United States Patent Application Publication US 2014/0004565 A1 - sequence listing, part 68

SEQ ID NO: 1647712 - RNA, 19 nt, Artificial Sequence
  Description of Artificial Sequence: Synthetic oligonucleotide
cugcacuuuccucuccgcc

SEQ ID NO: 1647713 - RNA, 19 nt, Artificial Sequence
  Description of Artificial Sequence: Synthetic oligonucleotide
ggaucauauucugaauuug

SEQ ID NO: 1647714 - RNA, 19 nt, Artificial Sequence
  Description of Artificial Sequence: Synthetic oligonucleotide
uucgugucauguccaugac

SEQ ID NO: 1647715 - RNA, 19 nt, Artificial Sequence
  Description of Artificial Sequence: Synthetic oligonucleotide
guaauuguuccuagguuaa

SEQ ID NO: 1647716 - RNA, 19 nt, Artificial Sequence
  Description of Artificial Sequence: Synthetic oligonucleotide
uccagacucgguacauggu

SEQ ID NO: 1647717 - RNA, 19 nt, Artificial Sequence
  Description of Artificial Sequence: Synthetic oligonucleotide
ugcccucauguuguguggg

SEQ ID NO: 1647718 - RNA, 19 nt, Artificial Sequence
  Description of Artificial Sequence: Synthetic oligonucleotide
cuuagccuguugauagcuc

SEQ ID NO: 1647719 - RNA, 19 nt, Artificial Sequence
  Description of Artificial Sequence: Synthetic oligonucleotide
uguuugccucgguucaccu

SEQ ID NO: 1647720 - RNA, 19 nt, Artificial Sequence
  Description of Artificial Sequence: Synthetic oligonucleotide
uccggcacgccuucagggc

SEQ ID NO: 1647721 - RNA, 19 nt, Artificial Sequence
  Description of Artificial Sequence: Synthetic oligonucleotide
uccgggcucacccgcuggg

SEQ ID NO: 1647722 - RNA, 19 nt, Artificial Sequence
  Description of Artificial Sequence: Synthetic oligonucleotide
ugcccaugcggcucuguug

SEQ ID NO: 1647723 - RNA, 19 nt, Artificial Sequence
  Description of Artificial Sequence: Synthetic oligonucleotide
ccucgguucaccugcaagc

SEQ ID NO: 1647724 - RNA, 19 nt, Artificial Sequence
  Description of Artificial Sequence: Synthetic oligonucleotide
cagcuguuugccucgguuc

SEQ ID NO: 1647725 - RNA, 19 nt, Artificial Sequence
  Description of Artificial Sequence: Synthetic oligonucleotide
aguauucgguagguggcug

SEQ ID NO: 1647726 - RNA, 19 nt, Artificial Sequence
  Description of Artificial Sequence: Synthetic oligonucleotide
cauguuguguggggcgugg

SEQ ID NO: 1647727 - RNA, 19 nt, Artificial Sequence
  Description of Artificial Sequence: Synthetic oligonucleotide
cagacucgguacaugguca

SEQ ID NO: 1647728 - RNA, 19 nt, Artificial Sequence
  Description of Artificial Sequence: Synthetic oligonucleotide
caguucaauagcaguggca

SEQ ID NO: 1647729 - RNA, 19 nt, Artificial Sequence
  Description of Artificial Sequence: Synthetic oligonucleotide
ucaauagcaguggcagaaa

SEQ ID NO: 1647730 - RNA, 19 nt, Artificial Sequence
  Description of Artificial Sequence: Synthetic oligonucleotide
acaucgagauggaucauau

SEQ ID NO: 1647731 - RNA, 19 nt, Artificial Sequence
  Description of Artificial Sequence: Synthetic oligonucleotide
gugggcguucacuucauaa

SEQ ID NO: 1647732 - RNA, 19 nt, Artificial Sequence
  Description of Artificial Sequence: Synthetic oligonucleotide
cacaggaggcaccuucgug

SEQ ID NO: 1647733 - RNA, 19 nt, Artificial Sequence
  Description of Artificial Sequence: Synthetic oligonucleotide
gguuauuguuaguuuguaa

SEQ ID NO: 1647734 - RNA, 19 nt, Artificial Sequence
  Description of Artificial Sequence: Synthetic oligonucleotide
aagacgcgcgccggaucgc

SEQ ID NO: 1647735 - RNA, 19 nt, Artificial Sequence
  Description of Artificial Sequence: Synthetic oligonucleotide
guuugccucgguucaccug

SEQ ID NO: 1647736 - RNA, 19 nt, Artificial Sequence
  Description of Artificial Sequence: Synthetic oligonucleotide
uucccguccuggaccuccg

SEQ ID NO: 1647737 - RNA, 19 nt, Artificial Sequence
  Description of Artificial Sequence: Synthetic oligonucleotide
cucaaguauucgguaggug

SEQ ID NO: 1647738 - RNA, 19 nt, Artificial Sequence
  Description of Artificial Sequence: Synthetic oligonucleotide
guauucgguagguggcuga

SEQ ID NO: 1647739 - RNA, 19 nt, Artificial Sequence
  Description of Artificial Sequence: Synthetic oligonucleotide
caauagcaguggcagaaaa

SEQ ID NO: 1647740 - RNA, 19 nt, Artificial Sequence
  Description of Artificial Sequence: Synthetic oligonucleotide
uccggguuucaggagucug

SEQ ID NO: 1647741 - RNA, 19 nt, Artificial Sequence
  Description of Artificial Sequence: Synthetic oligonucleotide
gggcguucacuucauaauc

SEQ ID NO: 1647742 - RNA, 19 nt, Artificial Sequence
  Description of Artificial Sequence: Synthetic oligonucleotide
gggguaaauccgucauggg

SEQ ID NO: 1647743 - RNA, 19 nt, Artificial Sequence
  Description of Artificial Sequence: Synthetic oligonucleotide
ucauguuguguggggcgug

SEQ ID NO: 1647744 - RNA, 19 nt, Artificial Sequence
  Description of Artificial Sequence: Synthetic oligonucleotide
cagggguaaauccgucaug

SEQ ID NO: 1647745 - RNA, 19 nt, Artificial Sequence
  Description of Artificial Sequence: Synthetic oligonucleotide
uggaccuccggcacgccuu

SEQ ID NO: 1647746 - RNA, 19 nt, Artificial Sequence
  Description of Artificial Sequence: Synthetic oligonucleotide
gcggcgauccaccagguuc

SEQ ID NO: 1647747 - RNA, 19 nt, Artificial Sequence
  Description of Artificial Sequence: Synthetic oligonucleotide
cccgcagcugugaagagug

SEQ ID NO: 1647748 - RNA, 19 nt, Artificial Sequence
  Description of Artificial Sequence: Synthetic oligonucleotide
ccaggcauuguaguggaag

SEQ ID NO: 1647749 - RNA, 19 nt, Artificial Sequence
  Description of Artificial Sequence: Synthetic oligonucleotide
guuuggguuauuguuaguu

SEQ ID NO: 1647750 - RNA, 19 nt, Artificial Sequence
  Description of Artificial Sequence: Synthetic oligonucleotide
gcaucggguaacuuugauc

SEQ ID NO: 1647751 - RNA, 19 nt, Artificial Sequence
  Description of Artificial Sequence: Synthetic oligonucleotide
aacugccgucucuucccgu

SEQ ID NO: 1647752 - RNA, 19 nt, Artificial Sequence
  Description of Artificial Sequence: Synthetic oligonucleotide
guauuugugggcguucacu

SEQ ID NO: 1647753 - RNA, 19 nt, Artificial Sequence
  Description of Artificial Sequence: Synthetic oligonucleotide
uccaguauuugugggcguu

SEQ ID NO: 1647754 - RNA, 19 nt, Artificial Sequence
  Description of Artificial Sequence: Synthetic oligonucleotide
caggaggcaccuucguguc

SEQ ID NO: 1647755 - RNA, 19 nt, Artificial Sequence
  Description of Artificial Sequence: Synthetic oligonucleotide
cuccccguuggcacugggc

SEQ ID NO: 1647756 - RNA, 19 nt, Artificial Sequence
  Description of Artificial Sequence: Synthetic oligonucleotide
agccuguugauagcucucu

SEQ ID NO: 1647757 - RNA, 19 nt, Artificial Sequence
  Description of Artificial Sequence: Synthetic oligonucleotide
ucacucuccagggguaaau

SEQ ID NO: 1647758 - RNA, 19 nt, Artificial Sequence
  Description of Artificial Sequence: Synthetic oligonucleotide
cgagauggaucauauucug

SEQ ID NO: 1647759 - RNA, 19 nt, Artificial Sequence
  Description of Artificial Sequence: Synthetic oligonucleotide
ucaccugcaagcggcgauc

SEQ ID NO: 1647760 - RNA, 19 nt, Artificial Sequence
  Description of Artificial Sequence: Synthetic oligonucleotide
cacgccuucagggcaggag

SEQ ID NO: 1647761 - RNA, 19 nt, Artificial Sequence
  Description of Artificial Sequence: Synthetic oligonucleotide
gcacuuuccucuccgccgc

SEQ ID NO: 1647762 - RNA, 19 nt, Artificial Sequence
  Description of Artificial Sequence: Synthetic oligonucleotide
cgaacugccgucucuuccc

SEQ ID NO: 1647763 - RNA, 19 nt, Artificial Sequence
  Description of Artificial Sequence: Synthetic oligonucleotide
gacucgguacauggucagc

SEQ ID NO: 1647764 - RNA, 19 nt, Artificial Sequence
  Description of Artificial Sequence: Synthetic oligonucleotide
ccucucacauagaaauuuc

SEQ ID NO: 1647765 - RNA, 19 nt, Artificial Sequence
  Description of Artificial Sequence: Synthetic oligonucleotide
aaacaucgagauggaucau

SEQ ID NO: 1647766 - RNA, 19 nt, Artificial Sequence
  Description of Artificial Sequence: Synthetic oligonucleotide
augucauaucggccauagu

SEQ ID NO: 1647767 - RNA, 19 nt, Artificial Sequence
  Description of Artificial Sequence: Synthetic oligonucleotide
caaccucaaguauucggua

SEQ ID NO: 1647768 - RNA, 19 nt, Artificial Sequence
  Description of Artificial Sequence: Synthetic oligonucleotide
gcacugaauccagacucgg

SEQ ID NO: 1647769 - RNA, 19 nt, Artificial Sequence
  Description of Artificial Sequence: Synthetic oligonucleotide
cuaggugacugagcuucug

SEQ ID NO: 1647770 - RNA, 19 nt, Artificial Sequence
  Description of Artificial Sequence: Synthetic oligonucleotide
uugugggcguucacuucau

SEQ ID NO: 1647771 - RNA, 19 nt, Artificial Sequence
  Description of Artificial Sequence: Synthetic oligonucleotide
caggaaccgguucccgaac

SEQ ID NO: 1647772 - RNA, 19 nt, Artificial Sequence
  Description of Artificial Sequence: Synthetic oligonucleotide
cauguccaugacuggcaca

SEQ ID NO: 1647773 - RNA, 19 nt, Artificial Sequence
  Description of Artificial Sequence: Synthetic oligonucleotide
uuaccccuccggguuucag

SEQ ID NO: 1647774 - RNA, 19 nt, Artificial Sequence
  Description of Artificial Sequence: Synthetic oligonucleotide
ccggguuucaggagucugc

SEQ ID NO: 1647775 - RNA, 19 nt, Artificial Sequence
  Description of Artificial Sequence: Synthetic oligonucleotide
acgaagagguuuggguuau

SEQ ID NO: 1647776 - RNA, 19 nt, Artificial Sequence
  Description of Artificial Sequence: Synthetic oligonucleotide
accuucgugucauguccau

SEQ ID NO: 1647777 - RNA, 19 nt, Artificial Sequence
  Description of Artificial Sequence: Synthetic oligonucleotide
ucgguagguggcugaggau

SEQ ID NO: 1647778 - RNA, 19 nt, Artificial Sequence
  Description of Artificial Sequence: Synthetic oligonucleotide
cacucuccagggguaaauc

SEQ ID NO: 1647779 - RNA, 19 nt, Artificial Sequence
  Description of Artificial Sequence: Synthetic oligonucleotide
cugcuauuugcagaugucu

SEQ ID NO: 1647780 - RNA, 19 nt, Artificial Sequence
  Description of Artificial Sequence: Synthetic oligonucleotide
caugcggcucuguugucaa

SEQ ID NO: 1647781 - RNA, 19 nt, Artificial Sequence
  Description of Artificial Sequence: Synthetic oligonucleotide
aucggguaacuuugaucuu

SEQ ID NO: 1647782 - RNA, 19 nt, Artificial Sequence
  Description of Artificial Sequence: Synthetic oligonucleotide
ugugggcguucacuucaua

SEQ ID NO: 1647783 - RNA, 19 nt, Artificial Sequence
  Description of Artificial Sequence: Synthetic oligonucleotide
ccuagguuaagguuugagu

SEQ ID NO: 1647784 - RNA, 19 nt, Artificial Sequence
  Description of Artificial Sequence: Synthetic oligonucleotide
gguucaccugcaagcggcg

SEQ ID NO: 1647785 - RNA, 19 nt, Artificial Sequence
  Description of Artificial Sequence: Synthetic oligonucleotide
caccuucgugucaugucca

SEQ ID NO: 1647786 - RNA, 19 nt, Artificial Sequence
  Description of Artificial Sequence: Synthetic oligonucleotide
aggaggcaccuucguguca

SEQ ID NO: 1647787 - RNA, 19 nt, Artificial Sequence
  Description of Artificial Sequence: Synthetic oligonucleotide
cguucacuucauaaucaac

SEQ ID NO: 1647788 - RNA, 19 nt, Artificial Sequence
  Description of Artificial Sequence: Synthetic oligonucleotide
cauagucucgaagaagcau

SEQ ID NO: 1647789 - RNA, 19 nt, Artificial Sequence
  Description of Artificial Sequence: Synthetic oligonucleotide
gcaagcggcgauccaccag

SEQ ID NO: 1647790 - RNA, 19 nt, Artificial Sequence
  Description of Artificial Sequence: Synthetic oligonucleotide
uggaagacgcgcgccggau

SEQ ID NO: 1647791 - RNA, 19 nt, Artificial Sequence
  Description of Artificial Sequence: Synthetic oligonucleotide
uugcuaggugacugagcuu

SEQ ID NO: 1647792 - RNA, 19 nt, Artificial Sequence
  Description of Artificial Sequence: Synthetic oligonucleotide
cuccgggcucacccgcugg

SEQ ID NO: 1647793 - RNA, 19 nt, Artificial Sequence
  Description of Artificial Sequence: Synthetic oligonucleotide
cgccggaucgcucaggaac

SEQ ID NO: 1647794 - RNA, 19 nt, Artificial Sequence
  Description of Artificial Sequence: Synthetic oligonucleotide
uguguggggcguggacgcc

SEQ ID NO: 1647795 - RNA, 19 nt, Artificial Sequence
  Description of Artificial Sequence: Synthetic oligonucleotide
acgcgcgccggaucgcuca

SEQ ID NO: 1647796 - RNA, 19 nt, Artificial Sequence
  Description of Artificial Sequence: Synthetic oligonucleotide
cuuggauucccagacugau

SEQ ID NO: 1647797 - RNA, 19 nt, Artificial Sequence
  Description of Artificial Sequence: Synthetic oligonucleotide
aggcaccuucgugucaugu

SEQ ID NO: 1647798 - RNA, 19 nt, Artificial Sequence
  Description of Artificial Sequence: Synthetic oligonucleotide
gcggcucuguugucaagcc

SEQ ID NO: 1647799 - RNA, 19 nt, Artificial Sequence
  Description of Artificial Sequence: Synthetic oligonucleotide
gcucuguugucaagccagg

SEQ ID NO: 1647800 - RNA, 19 nt, Artificial Sequence
  Description of Artificial Sequence: Synthetic oligonucleotide
aacgcccggccgaaaguaa

SEQ ID NO: 1647801 - RNA, 19 nt, Artificial Sequence
  Description of Artificial Sequence: Synthetic oligonucleotide
gcguucacuucauaaucaa

SEQ ID NO: 1647802 - RNA, 19 nt, Artificial Sequence
  Description of Artificial Sequence: Synthetic oligonucleotide
gccggaucgcucaggaacc

SEQ ID NO: 1647803 - RNA, 19 nt, Artificial Sequence
  Description of Artificial Sequence: Synthetic oligonucleotide
uuccuagguuaagguuuga

SEQ ID NO: 1647804 - RNA, 19 nt, Artificial Sequence
  Description of Artificial Sequence: Synthetic oligonucleotide
cauuaccccuccggguuuc

SEQ ID NO: 1647805 - RNA, 19 nt, Artificial Sequence
  Description of Artificial Sequence: Synthetic oligonucleotide
gcugcuauuugcagauguc

SEQ ID NO: 1647806 - RNA, 19 nt, Artificial Sequence
  Description of Artificial Sequence: Synthetic oligonucleotide
guggaagacgcgcgccgga

SEQ ID NO: 1647807 - RNA, 19 nt, Artificial Sequence
  Description of Artificial Sequence: Synthetic oligonucleotide
agccagugucuguccuuga

SEQ ID NO: 1647808 - RNA, 19 nt, Artificial Sequence
  Description of Artificial Sequence: Synthetic oligonucleotide
caugggauuguggcuaggu

SEQ ID NO: 1647809 - RNA, 19 nt, Artificial Sequence
  Description of Artificial Sequence: Synthetic oligonucleotide
gccgaaaguaauuguuccu

SEQ ID NO: 1647810 - RNA, 19 nt, Artificial Sequence
  Description of Artificial Sequence: Synthetic oligonucleotide
aagcggcgauccaccaggu

SEQ ID NO: 1647811 - RNA, 19 nt, Artificial Sequence
  Description of Artificial Sequence: Synthetic oligonucleotide
cacugaauccagacucggu

SEQ ID NO: 1647812 - RNA, 19 nt, Artificial Sequence
  Description of Artificial Sequence: Synthetic oligonucleotide
gggcguggacgccuccccg

SEQ ID NO: 1647813 - RNA, 19 nt, Artificial Sequence
  Description of Artificial Sequence: Synthetic oligonucleotide
cggccgaaaguaauuguuc

SEQ ID NO: 1647814 - RNA, 19 nt, Artificial Sequence
  Description of Artificial Sequence: Synthetic oligonucleotide
cacaaauugcuaggugacu

SEQ ID NO: 1647815 - RNA, 19 nt, Artificial Sequence
  Description of Artificial Sequence: Synthetic oligonucleotide
caagacuguccuugggcau

SEQ ID NO: 1647816 - RNA, 19 nt, Artificial Sequence
  Description of Artificial Sequence: Synthetic oligonucleotide
auguuguguggggcgugga

SEQ ID NO: 1647817 - RNA, 19 nt, Artificial Sequence
  Description of Artificial Sequence: Synthetic oligonucleotide
ggaagacgcgcgccggauc

SEQ ID NO: 1647818 - RNA, 19 nt, Artificial Sequence
  Description of Artificial Sequence: Synthetic oligonucleotide
aggccgccaugacaccgga

SEQ ID NO: 1647819 - RNA, 19 nt, Artificial Sequence
  Description of Artificial Sequence: Synthetic oligonucleotide
gcccaugcggcucuguugu

SEQ ID NO: 1647820 - RNA, 19 nt, Artificial Sequence
  Description of Artificial Sequence: Synthetic oligonucleotide
gcggccugcuccucugacc

SEQ ID NO: 1647821 - RNA, 19 nt, Artificial Sequence
  Description of Artificial Sequence: Synthetic oligonucleotide
ccgaaaguaauuguuccua

SEQ ID NO: 1647822 - RNA, 19 nt, Artificial Sequence
  Description of Artificial Sequence: Synthetic oligonucleotide
ccuuggauucccagacuga

SEQ ID NO: 1647823 - RNA, 19 nt, Artificial Sequence
  Description of Artificial Sequence: Synthetic oligonucleotide
agacgcgcgccggaucgcu

SEQ ID NO: 1647824 - RNA, 19 nt, Artificial Sequence
  Description of Artificial Sequence: Synthetic oligonucleotide
gaaugcccaugcggcucug

SEQ ID NO: 1647825 - RNA, 19 nt, Artificial Sequence
  Description of Artificial Sequence: Synthetic oligonucleotide
auuaccccuccggguuuca

SEQ ID NO: 1647826 - RNA, 19 nt, Artificial Sequence
  Description of Artificial Sequence: Synthetic oligonucleotide
ggguuauuguuaguuugua

SEQ ID NO: 1647827 - RNA, 19 nt, Artificial Sequence
  Description of Artificial Sequence: Synthetic oligonucleotide
ccgcugggaacuguucucc

SEQ ID NO: 1647828 - RNA, 19 nt, Artificial Sequence
  Description of Artificial Sequence: Synthetic oligonucleotide
gcuuagccuguugauagcu

SEQ ID NO: 1647829 - RNA, 19 nt, Artificial Sequence
  Description of Artificial Sequence: Synthetic oligonucleotide
gcccggccgaaaguaauug

SEQ ID NO: 1647830 - RNA, 19 nt, Artificial Sequence
  Description of Artificial Sequence: Synthetic oligonucleotide
gccagugucuguccuugaa

SEQ ID NO: 1647831 - RNA, 19 nt, Artificial Sequence
  Description of Artificial Sequence: Synthetic oligonucleotide
cucauguuguguggggcgu

SEQ ID NO: 1647832 - RNA, 19 nt, Artificial Sequence
  Description of Artificial Sequence: Synthetic oligonucleotide
caacgcccggccgaaagua

SEQ ID NO: 1647833 - RNA, 19 nt, Artificial Sequence
  Description of Artificial Sequence: Synthetic oligonucleotide
gucaagccaggcccauccu

SEQ ID NO: 1647834 - RNA, 19 nt, Artificial Sequence
  Description of Artificial Sequence: Synthetic oligonucleotide
acgcccggccgaaaguaau

SEQ ID NO: 1647835 - RNA, 19 nt, Artificial Sequence
  Description of Artificial Sequence: Synthetic oligonucleotide
ccuucgugucauguccaug

SEQ ID NO: 1647836 - RNA, 19 nt, Artificial Sequence
  Description of Artificial Sequence: Synthetic oligonucleotide
ggaucgcucaggaaccggu

SEQ ID NO: 1647837 - RNA, 19 nt, Artificial Sequence
  Description of Artificial Sequence: Synthetic oligonucleotide
ccguccuggaccuccggca

SEQ ID NO: 1647838 - RNA, 19 nt, Artificial Sequence
  Description of Artificial Sequence: Synthetic oligonucleotide
gaucgcucaggaaccgguu

SEQ ID NO: 1647839 - RNA, 19 nt, Artificial Sequence
  Description of Artificial Sequence: Synthetic oligonucleotide
caucgagauggaucauauu

SEQ ID NO: 1647840 - RNA, 19 nt, Artificial Sequence
  Description of Artificial Sequence: Synthetic oligonucleotide
ccggaucgcucaggaaccg

SEQ ID NO: 1647841 - RNA, 19 nt, Artificial Sequence
  Description of Artificial Sequence: Synthetic oligonucleotide
ggcacgccuucagggcagg

SEQ ID NO: 1647842 - RNA, 19 nt, Artificial Sequence
  Description of Artificial Sequence: Synthetic oligonucleotide
ggcaucggguaacuuugau

SEQ ID NO: 1647843 - RNA, 19 nt, Artificial Sequence
  Description of Artificial Sequence: Synthetic oligonucleotide
gacgcgcgccggaucgcuc

SEQ ID NO: 1647844 - RNA, 19 nt, Artificial Sequence
  Description of Artificial Sequence: Synthetic oligonucleotide
ccaugcggcucuguuguca

SEQ ID NO: 1647845 - RNA, 19 nt, Artificial Sequence
  Description of Artificial Sequence: Synthetic oligonucleotide
ccagggguaaauccgucau

SEQ ID NO: 1647846 - RNA, 19 nt, Artificial Sequence
  Description of Artificial Sequence: Synthetic oligonucleotide
ggacgccuccccguuggca

SEQ ID NO: 1647847 - RNA, 19 nt, Artificial Sequence
  Description of Artificial Sequence: Synthetic oligonucleotide
ggcucacccgcugggaacu

SEQ ID NO: 1647848 - RNA, 19 nt, Artificial Sequence
  Description of Artificial Sequence: Synthetic oligonucleotide
ccuccccguuggcacuggg

SEQ ID NO: 1647849 - RNA, 19 nt, Artificial Sequence
  Description of Artificial Sequence: Synthetic oligonucleotide
ggcguggacgccuccccgu

SEQ ID NO: 1647850 - RNA, 19 nt, Artificial Sequence
  Description of Artificial Sequence: Synthetic oligonucleotide
cggaucgcucaggaaccgg

SEQ ID NO: 1647851 - RNA, 19 nt, Artificial Sequence
  Description of Artificial Sequence: Synthetic oligonucleotide
cggcacgccuucagggcag

SEQ ID NO: 1647852 - RNA, 19 nt, Artificial Sequence
  Description of Artificial Sequence: Synthetic oligonucleotide
gggcaucggguaacuuuga

SEQ ID NO: 1647853 - RNA, 19 nt, Artificial Sequence
  Description of Artificial Sequence: Synthetic oligonucleotide
ccucaaguauucgguaggu

SEQ ID NO: 1647854 - RNA, 19 nt, Artificial Sequence
  Description of Artificial Sequence: Synthetic oligonucleotide
gguuaagguuugaguuccu

SEQ ID NO: 1647855 - RNA, 19 nt, Artificial Sequence
  Description of Artificial Sequence: Synthetic oligonucleotide
caccaucaacaugcugcua

SEQ ID NO: 1647856 - RNA, 19 nt, Artificial Sequence
  Description of Artificial Sequence: Synthetic oligonucleotide
gcauuaccccuccggguuu

SEQ ID NO: 1647857 - RNA, 19 nt, Artificial Sequence
  Description of Artificial Sequence: Synthetic oligonucleotide
cucacccgcugggaacugu

SEQ ID NO: 1647858 - RNA, 19 nt, Artificial Sequence
  Description of Artificial Sequence: Synthetic oligonucleotide
gcucacccgcugggaacug

SEQ ID NO: 1647859 - RNA, 19 nt, Artificial Sequence
  Description of Artificial Sequence: Synthetic oligonucleotide
gcuaggugacugagcuucu

SEQ ID NO: 1647860 - RNA, 19 nt, Artificial Sequence
  Description of Artificial Sequence: Synthetic oligonucleotide
cggccauagucucgaagaa

SEQ ID NO: 1647861 - RNA, 19 nt, Artificial Sequence
  Description of Artificial Sequence: Synthetic oligonucleotide
ccgguucccgaacugccgu

SEQ ID NO: 1647862 - RNA, 19 nt, Artificial Sequence
  Description of Artificial Sequence: Synthetic oligonucleotide
cuccggguuucaggagucu

SEQ ID NO: 1647863 - RNA, 19 nt, Artificial Sequence
  Description of Artificial Sequence: Synthetic oligonucleotide
cgcgccggaucgcucagga

SEQ ID NO: 1647864 - RNA, 19 nt, Artificial Sequence
  Description of Artificial Sequence: Synthetic oligonucleotide
gcgcgccggaucgcucagg

SEQ ID NO: 1647865 - RNA, 19 nt, Artificial Sequence
  Description of Artificial Sequence: Synthetic oligonucleotide
gcugaggauccaggaaauu

SEQ ID NO: 1647866 - RNA, 19 nt, Artificial Sequence
  Description of Artificial Sequence: Synthetic oligonucleotide
gcgccggaucgcucaggaa

SEQ ID NO: 1647867 - RNA, 19 nt, Artificial Sequence
  Description of Artificial Sequence: Synthetic oligonucleotide
cgcgcgccggaucgcucag

SEQ ID NO: 1647868 - RNA, 19 nt, Artificial Sequence
  Description of Artificial Sequence: Synthetic oligonucleotide
cgggcucacccgcugggaa

SEQ ID NO: 1647869 - RNA, 19 nt, Artificial Sequence
  Description of Artificial Sequence: Synthetic oligonucleotide
gcacgccuucagggcagga

SEQ ID NO: 1647870 - RNA, 19 nt, Artificial Sequence
  Description of Artificial Sequence: Synthetic oligonucleotide
gcguggacgccuccccguu

SEQ ID NO: 1647871 - RNA, 19 nt, Artificial Sequence
  Description of Artificial Sequence: Synthetic oligonucleotide
ccgggcucacccgcuggga

SEQ ID NO: 1647872 - RNA, 19 nt, Artificial Sequence
  Description of Artificial Sequence: Synthetic oligonucleotide
ccgcggccugcuccucuga

SEQ ID NO: 1647873 - RNA, 19 nt, Artificial Sequence
  Description of Artificial Sequence: Synthetic oligonucleotide
cgcccggccgaaaguaauu

SEQ ID NO: 1647874 - RNA, 19 nt, Artificial Sequence
  Description of Artificial Sequence: Synthetic oligonucleotide
aagaauacaacacaggacc

SEQ ID NO: 1647875 - RNA, 19 nt, Artificial Sequence
  Description of Artificial Sequence: Synthetic oligonucleotide
aguuaaguaacauagaagc

SEQ ID NO: 1647876 - RNA, 19 nt, Artificial Sequence
  Description of Artificial Sequence: Synthetic oligonucleotide
uuugaaaugauacacacug

SEQ ID NO: 1647877 - RNA, 19 nt, Artificial Sequence
  Description of Artificial Sequence: Synthetic oligonucleotide
uauauauauauauauauac

SEQ ID NO: 1647878 - RNA, 19 nt, Artificial Sequence
  Description of Artificial Sequence: Synthetic oligonucleotide
uauauauauauauauacug

SEQ ID NO: 1647879 - RNA, 19 nt, Artificial Sequence
  Description of Artificial Sequence: Synthetic oligonucleotide
aauaucaaguuucugaaug

SEQ ID NO: 1647880 - RNA, 19 nt, Artificial Sequence
  Description of Artificial Sequence: Synthetic oligonucleotide
uguaauaagagaaugaaau

SEQ ID NO: 1647881 - RNA, 19 nt, Artificial Sequence
  Description of Artificial Sequence: Synthetic oligonucleotide
uuaaauaucaaguuucuga

SEQ ID NO: 1647882 - RNA, 19 nt, Artificial Sequence
  Description of Artificial Sequence: Synthetic oligonucleotide
uccuaguuaaguaacauag

SEQ ID NO: 1647883 - RNA, 19 nt, Artificial Sequence
  Description of Artificial Sequence: Synthetic oligonucleotide
uauauaugcauauauauau

SEQ ID NO: 1647884 - RNA, 19 nt, Artificial Sequence
  Description of Artificial Sequence: Synthetic oligonucleotide
aaugugaguagauuaagug

SEQ ID NO: 1647885 - RNA, 19 nt, Artificial Sequence
  Description of Artificial Sequence: Synthetic oligonucleotide
uuagauaucuuggaaaugg

SEQ ID NO: 1647886 - RNA, 19 nt, Artificial Sequence
  Description of Artificial Sequence: Synthetic oligonucleotide
uauauauauauacuguaca

SEQ ID NO: 1647887 - RNA, 19 nt, Artificial Sequence
  Description of Artificial Sequence: Synthetic oligonucleotide
aauaaccauuccuaaaguc

SEQ ID NO: 1647888 - RNA, 19 nt, Artificial Sequence
  Description of Artificial Sequence: Synthetic oligonucleotide
aaucagaugcacuuucuac

SEQ ID NO: 1647889 - RNA, 19 nt, Artificial Sequence
  Description of Artificial Sequence: Synthetic oligonucleotide
uaauaagagaaugaaaugc

SEQ ID NO: 1647890 - RNA, 19 nt, Artificial Sequence
  Description of Artificial Sequence: Synthetic oligonucleotide
uauauauaugcauauauau

SEQ ID NO: 1647891 - RNA, 19 nt, Artificial Sequence
  Description of Artificial Sequence: Synthetic oligonucleotide
aaugcuucccgguaggcgg

SEQ ID NO: 1647892 - RNA, 19 nt, Artificial Sequence
  Description of Artificial Sequence: Synthetic oligonucleotide
uaugcauauauauauauau

SEQ ID NO: 1647893 - RNA, 19 nt, Artificial Sequence
  Description of Artificial Sequence: Synthetic oligonucleotide
auaagaauacaacacagga

SEQ ID NO: 1647894 - RNA, 19 nt, Artificial Sequence
  Description of Artificial Sequence: Synthetic oligonucleotide
aaugagacagagcacuguc

SEQ ID NO: 1647895 - RNA, 19 nt, Artificial Sequence
  Description of Artificial Sequence: Synthetic oligonucleotide
aaauguagaggcugugugg

SEQ ID NO: 1647896 - RNA, 19 nt, Artificial Sequence
  Description of Artificial Sequence: Synthetic oligonucleotide
acuuuauagaaaguaagcg

SEQ ID NO: 1647897 - RNA, 19 nt, Artificial Sequence
  Description of Artificial Sequence: Synthetic oligonucleotide
ugcauauauauauauauau

SEQ ID NO: 1647898 - RNA, 19 nt, Artificial Sequence
  Description of Artificial Sequence: Synthetic oligonucleotide
acuguaaggaaaaugaguc

SEQ ID NO: 1647899 - RNA, 19 nt, Artificial Sequence
  Description of Artificial Sequence: Synthetic oligonucleotide
uacuuuauagaaaguaagc

SEQ ID NO: 1647900 - RNA, 19 nt, Artificial Sequence
  Description of Artificial Sequence: Synthetic oligonucleotide
aaacaaacguuacagaaua

SEQ ID NO: 1647901 - RNA, 19 nt, Artificial Sequence
  Description of Artificial Sequence: Synthetic oligonucleotide
uccaauaaggccaggaaca

SEQ ID NO: 1647902 - RNA, 19 nt, Artificial Sequence
  Description of Artificial Sequence: Synthetic oligonucleotide
gaaacuaguugucaguuug

SEQ ID NO: 1647903 - RNA, 19 nt, Artificial Sequence
  Description of Artificial Sequence: Synthetic oligonucleotide
uuugcuaacggucuguccu

SEQ ID NO: 1647904 - RNA, 19 nt, Artificial Sequence
  Description of Artificial Sequence: Synthetic oligonucleotide
agaauaagaauacaacaca

SEQ ID NO: 1647905 - RNA, 19 nt, Artificial Sequence
  Description of Artificial Sequence: Synthetic oligonucleotide
ucuuauguuagcauucuac

SEQ ID NO: 1647906 - RNA, 19 nt, Artificial Sequence
  Description of Artificial Sequence: Synthetic oligonucleotide
uaguuaaguaacauagaag

SEQ ID NO: 1647907 - RNA, 19 nt, Artificial Sequence
  Description of Artificial Sequence: Synthetic oligonucleotide
cuaguugucaguuuguuuc

SEQ ID NO: 1647908 - RNA, 19 nt, Artificial Sequence
  Description of Artificial Sequence: Synthetic oligonucleotide
uaaauaucaaguuucugaa

SEQ ID NO: 1647909 - RNA, 19 nt, Artificial Sequence
  Description of Artificial Sequence: Synthetic oligonucleotide
agcgcuacuuuauagaaag

SEQ ID NO: 1647910 - RNA, 19 nt, Artificial Sequence
  Description of Artificial Sequence: Synthetic oligonucleotide
uauauauauauauacugua

SEQ ID NO: 1647911 - RNA, 19 nt, Artificial Sequence
  Description of Artificial Sequence: Synthetic oligonucleotide
aguggaacaguaaauuucc

SEQ ID NO: 1647912 - RNA, 19 nt, Artificial Sequence
  Description of Artificial Sequence: Synthetic oligonucleotide
auauauauauauacuguac

SEQ ID NO: 1647913 - RNA, 19 nt, Artificial Sequence
  Description of Artificial Sequence: Synthetic oligonucleotide
uuaaguaacauagaagcaa

SEQ ID NO: 1647914 - RNA, 19 nt, Artificial Sequence
  Description of Artificial Sequence: Synthetic oligonucleotide
uugguuucaaaccuuacaa

SEQ ID NO: 1647915 - RNA, 19 nt, Artificial Sequence
  Description of Artificial Sequence: Synthetic oligonucleotide
uauaugcauauauauauau

SEQ ID NO: 1647916 - RNA, 19 nt, Artificial Sequence
  Description of Artificial Sequence: Synthetic oligonucleotide
cuaucaacuggacaugugg

SEQ ID NO: 1647917 - RNA, 19 nt, Artificial Sequence
  Description of Artificial Sequence: Synthetic oligonucleotide
agaaaucagaugcacuuuc

SEQ ID NO: 1647918 - RNA, 19 nt, Artificial Sequence
  Description of Artificial Sequence: Synthetic oligonucleotide
uuaguaaacaaacguuaca

SEQ ID NO: 1647919 - RNA, 19 nt, Artificial Sequence
  Description of Artificial Sequence: Synthetic oligonucleotide
ugauuuagcaggcugaauu

SEQ ID NO: 1647920 - RNA, 19 nt, Artificial Sequence
  Description of Artificial Sequence: Synthetic oligonucleotide
ugauuauaugcaaggaugu

SEQ ID NO: 1647921 - RNA, 19 nt, Artificial Sequence
  Description of Artificial Sequence: Synthetic oligonucleotide
uucuauaucacugugcaaa

SEQ ID NO: 1647922 - RNA, 19 nt, Artificial Sequence
  Description of Artificial Sequence: Synthetic oligonucleotide
ucaaguuucugaaugcuuc

SEQ ID NO: 1647923 - RNA, 19 nt, Artificial Sequence
  Description of Artificial Sequence: Synthetic oligonucleotide
ggcauugaaauguagaggc

SEQ ID NO: 1647924 - RNA, 19 nt, Artificial Sequence
  Description of Artificial Sequence: Synthetic oligonucleotide
aguuuguuuccaauaaggc

SEQ ID NO: 1647925 - RNA, 19 nt, Artificial Sequence
  Description of Artificial Sequence: Synthetic oligonucleotide
gaaauguagaggcugugug

SEQ ID NO: 1647926 - RNA, 19 nt, Artificial Sequence
  Description of Artificial Sequence: Synthetic oligonucleotide
uuauagaaaguaagcguug

SEQ ID NO: 1647927 - RNA, 19 nt, Artificial Sequence
  Description of Artificial Sequence: Synthetic oligonucleotide
ugauuaggcauugaaaugu

SEQ ID NO: 1647928 - RNA, 19 nt, Artificial Sequence
  Description of Artificial Sequence: Synthetic oligonucleotide
ugagacagagcacuguccc

SEQ ID NO: 1647929 - RNA, 19 nt, Artificial Sequence
  Description of Artificial Sequence: Synthetic oligonucleotide
auuaguaaacaaacguuac

SEQ ID NO: 1647930 - RNA, 19 nt, Artificial Sequence
  Description of Artificial Sequence: Synthetic oligonucleotide
aaccuuacaaugcacuccu

SEQ ID NO: 1647931 - RNA, 19 nt, Artificial Sequence
  Description of Artificial Sequence: Synthetic oligonucleotide
ugagucaugagucaugauu

SEQ ID NO: 1647932 - RNA, 19 nt, Artificial Sequence
  Description of Artificial Sequence: Synthetic oligonucleotide
auaucuuggaaauggguca

SEQ ID NO: 1647933 - RNA, 19 nt, Artificial Sequence
  Description of Artificial Sequence: Synthetic oligonucleotide
aguccaagcuaguaguaac

SEQ ID NO: 1647934 - RNA, 19 nt, Artificial Sequence
  Description of Artificial Sequence: Synthetic oligonucleotide
gaaaugauacacacugagg

SEQ ID NO: 1647935 - RNA, 19 nt, Artificial Sequence
  Description of Artificial Sequence: Synthetic oligonucleotide
aaggaugucaagucuuaug

SEQ ID NO: 1647936 - RNA, 19 nt, Artificial Sequence
  Description of Artificial Sequence: Synthetic oligonucleotide
auagggaacuauuucuguc

SEQ ID NO: 1647937 - RNA, 19 nt, Artificial Sequence
  Description of Artificial Sequence: Synthetic oligonucleotide
aaagcgcuacuuuauagaa

SEQ ID NO: 1647938 - RNA, 19 nt, Artificial Sequence
  Description of Artificial Sequence: Synthetic oligonucleotide
cauucauuugcuaacgguc

SEQ ID NO: 1647939 - RNA, 19 nt, Artificial Sequence
  Description of Artificial Sequence: Synthetic oligonucleotide
ugcauuuccaaaugcuucc

SEQ ID NO: 1647940 - RNA, 19 nt, Artificial Sequence
  Description of Artificial Sequence: Synthetic oligonucleotide
gugauuauaugcaaggaug

SEQ ID NO: 1647941 - RNA, 19 nt, Artificial Sequence
  Description of Artificial Sequence: Synthetic oligonucleotide
cugagcguguccaacaagg

SEQ ID NO: 1647942 - RNA, 19 nt, Artificial Sequence
  Description of Artificial Sequence: Synthetic oligonucleotide
aaugauacacacugaggau

SEQ ID NO: 1647943 - RNA, 19 nt, Artificial Sequence
  Description of Artificial Sequence: Synthetic oligonucleotide
gauaucuuggaaauggguc

SEQ ID NO: 1647944 - RNA, 19 nt, Artificial Sequence
  Description of Artificial Sequence: Synthetic oligonucleotide
uagauuaaguggaacagua

SEQ ID NO: 1647945 - RNA, 19 nt, Artificial Sequence
  Description of Artificial Sequence: Synthetic oligonucleotide
agucaggugauucugauuu

SEQ ID NO: 1647946 - RNA, 19 nt, Artificial Sequence
  Description of Artificial Sequence: Synthetic oligonucleotide
auauauauauauauacugu

SEQ ID NO: 1647947 - RNA, 19 nt, Artificial Sequence
  Description of Artificial Sequence: Synthetic oligonucleotide
aaaugggucauuguuacau

SEQ ID NO: 1647948 - RNA, 19 nt, Artificial Sequence
  Description of Artificial Sequence: Synthetic oligonucleotide
uuauguuagcauucuacac

SEQ ID NO: 1647949 - RNA, 19 nt, Artificial Sequence
  Description of Artificial Sequence: Synthetic oligonucleotide
uagggaacuauuucugucc

SEQ ID NO: 1647950 - RNA, 19 nt, Artificial Sequence
  Description of Artificial Sequence: Synthetic oligonucleotide
aaacguuacagaauaagaa

SEQ ID NO: 1647951 - RNA, 19 nt, Artificial Sequence
  Description of Artificial Sequence: Synthetic oligonucleotide
uccaccauugauguaagcc

SEQ ID NO: 1647952 - RNA, 19 nt, Artificial Sequence
  Description of Artificial Sequence: Synthetic oligonucleotide
auauauauauauauauacu

SEQ ID NO: 1647953 - RNA, 19 nt, Artificial Sequence
  Description of Artificial Sequence: Synthetic oligonucleotide
uaaugugaguagauuaagu

SEQ ID NO: 1647954 - RNA, 19 nt, Artificial Sequence
  Description of Artificial Sequence: Synthetic oligonucleotide
uaugcaaggaugucaaguc

SEQ ID NO: 1647955 - RNA, 19 nt, Artificial Sequence
  Description of Artificial Sequence: Synthetic oligonucleotide
ugugcuuagauaucuugga

SEQ ID NO: 1647956 - RNA, 19 nt, Artificial Sequence
  Description of Artificial Sequence: Synthetic oligonucleotide
aagucuuauguuagcauuc

SEQ ID NO: 1647957 - RNA, 19 nt, Artificial Sequence
  Description of Artificial Sequence: Synthetic oligonucleotide
uuagcaggcugaauucagg

SEQ ID NO: 1647958 - RNA, 19 nt, Artificial Sequence
  Description of Artificial Sequence: Synthetic oligonucleotide
cauauauauauauauauau

SEQ ID NO: 1647959 - RNA, 19 nt, Artificial Sequence
  Description of Artificial Sequence: Synthetic oligonucleotide
agggaacuauuucuguccc

SEQ ID NO: 1647960 - RNA, 19 nt, Artificial Sequence
  Description of Artificial Sequence: Synthetic oligonucleotide
aauguagaggcugugugga

SEQ ID NO: 1647961 - RNA, 19 nt, Artificial Sequence
  Description of Artificial Sequence: Synthetic oligonucleotide
uuauaaacaccagggacug

SEQ ID NO: 1647962 - RNA, 19 nt, Artificial Sequence
  Description of Artificial Sequence: Synthetic oligonucleotide
gaguagauuaaguggaaca

SEQ ID NO: 1647963 - RNA, 19 nt, Artificial Sequence
  Description of Artificial Sequence: Synthetic oligonucleotide
agugauuauaugcaaggau

SEQ ID NO: 1647964 - RNA, 19 nt, Artificial Sequence
  Description of Artificial Sequence: Synthetic oligonucleotide
uccuuugucuccaccauug

SEQ ID NO: 1647965 - RNA, 19 nt, Artificial Sequence
  Description of Artificial Sequence: Synthetic oligonucleotide
aguuuauaaacaccaggga

SEQ ID NO: 1647966 - RNA, 19 nt, Artificial Sequence
  Description of Artificial Sequence: Synthetic oligonucleotide
uguaaggaaaaugagucau

SEQ ID NO: 1647967 - RNA, 19 nt, Artificial Sequence
  Description of Artificial Sequence: Synthetic oligonucleotide
aaugagucaugagucauga

SEQ ID NO: 1647968 - RNA, 19 nt, Artificial Sequence
  Description of Artificial Sequence: Synthetic oligonucleotide
agucaugagucaugauugc

SEQ ID NO: 1647969 - RNA, 19 nt, Artificial Sequence
  Description of Artificial Sequence: Synthetic oligonucleotide
acaaacguuacagaauaag

SEQ ID NO: 1647970 - RNA, 19 nt, Artificial Sequence
  Description of Artificial Sequence: Synthetic oligonucleotide
agccacaucaucugcacag

SEQ ID NO: 1647971 - RNA, 19 nt, Artificial Sequence
  Description of Artificial Sequence: Synthetic oligonucleotide
ugauacacacugaggauac

SEQ ID NO: 1647972 - RNA, 19 nt, Artificial Sequence
  Description of Artificial Sequence: Synthetic oligonucleotide
aaaguaagcguugaagcaa

SEQ ID NO: 1647973 - RNA, 19 nt, Artificial Sequence
  Description of Artificial Sequence: Synthetic oligonucleotide
auaaccauuccuaaaguca

SEQ ID NO: 1647974 - RNA, 19 nt, Artificial Sequence
  Description of Artificial Sequence: Synthetic oligonucleotide
agucaguccaagcuaguag

SEQ ID NO: 1647975 - RNA, 19 nt, Artificial Sequence
  Description of Artificial Sequence: Synthetic oligonucleotide
uuggaaaugggucauuguu

SEQ ID NO: 1647976 - RNA, 19 nt, Artificial Sequence
  Description of Artificial Sequence: Synthetic oligonucleotide
cuuauguuagcauucuaca

SEQ ID NO: 1647977 - RNA, 19 nt, Artificial Sequence
  Description of Artificial Sequence: Synthetic oligonucleotide
agaaugaaaugcugauuag

SEQ ID NO: 1647978 - RNA, 19 nt, Artificial Sequence
  Description of Artificial Sequence: Synthetic oligonucleotide
gauuuagcaggcugaauuc

SEQ ID NO: 1647979 - RNA, 19 nt, Artificial Sequence
  Description of Artificial Sequence: Synthetic oligonucleotide
guuagcauucuacaccagc

SEQ ID NO: 1647980 - RNA, 19 nt, Artificial Sequence
  Description of Artificial Sequence: Synthetic oligonucleotide
auucuacaccagcaguagc

SEQ ID NO: 1647981 - RNA, 19 nt, Artificial Sequence
  Description of Artificial Sequence: Synthetic oligonucleotide
uuaaguggaacaguaaauu

SEQ ID NO: 1647982 - RNA, 19 nt, Artificial Sequence
  Description of Artificial Sequence: Synthetic oligonucleotide
ugguaaugugaguagauua

SEQ ID NO: 1647983 - RNA, 19 nt, Artificial Sequence
  Description of Artificial Sequence: Synthetic oligonucleotide
agggauaccaaagcgcuac

SEQ ID NO: 1647984 - RNA, 19 nt, Artificial Sequence
  Description of Artificial Sequence: Synthetic oligonucleotide
cuaguuaaguaacauagaa

SEQ ID NO: 1647985 - RNA, 19 nt, Artificial Sequence
  Description of Artificial Sequence: Synthetic oligonucleotide
aggggucuguaaaugaucc

SEQ ID NO: 1647986 - RNA, 19 nt, Artificial Sequence
  Description of Artificial Sequence: Synthetic oligonucleotide
guacauuaguaaacaaacg

SEQ ID NO: 1647987 - RNA, 19 nt, Artificial Sequence
  Description of Artificial Sequence: Synthetic oligonucleotide
aauacuuucugaauauaua

SEQ ID NO: 1647988 - RNA, 19 nt, Artificial Sequence
  Description of Artificial Sequence: Synthetic oligonucleotide
uuugguaaugugaguagau

SEQ ID NO: 1647989 - RNA, 19 nt, Artificial Sequence
  Description of Artificial Sequence: Synthetic oligonucleotide
guaguaaccccugauuuag

SEQ ID NO: 1647990 - RNA, 19 nt, Artificial Sequence
  Description of Artificial Sequence: Synthetic oligonucleotide
acauucauuugcuaacggu

SEQ ID NO: 1647991 - RNA, 19 nt, Artificial Sequence
  Description of Artificial Sequence: Synthetic oligonucleotide
uauagaaaguaagcguuga

SEQ ID NO: 1647992 - RNA, 19 nt, Artificial Sequence
  Description of Artificial Sequence: Synthetic oligonucleotide
acugucucgugguaagggg

SEQ ID NO: 1647993 - RNA, 19 nt, Artificial Sequence
  Description of Artificial Sequence: Synthetic oligonucleotide
cauuaguaaacaaacguua

SEQ ID NO: 1647994 - RNA, 19 nt, Artificial Sequence
  Description of Artificial Sequence: Synthetic oligonucleotide
caaacguuacagaauaaga

SEQ ID NO: 1647995 - RNA, 19 nt, Artificial Sequence
  Description of Artificial Sequence: Synthetic oligonucleotide
cugauuaggcauugaaaug

SEQ ID NO: 1647996 - RNA, 19 nt, Artificial Sequence
  Description of Artificial Sequence: Synthetic oligonucleotide
cauugaaauguagaggcug

SEQ ID NO: 1647997 - RNA, 19 nt, Artificial Sequence
  Description of Artificial Sequence: Synthetic oligonucleotide
uuugugcaggggaaacuag

SEQ ID NO: 1647998 - RNA, 19 nt, Artificial Sequence
  Description of Artificial Sequence: Synthetic oligonucleotide
aagcagugcauuuccaaau

SEQ ID NO: 1647999 - RNA, 19 nt, Artificial Sequence
  Description of Artificial Sequence: Synthetic oligonucleotide
ugcacuccuaucaacugga

SEQ ID NO: 1648000 - RNA, 19 nt, Artificial Sequence
  Description of Artificial Sequence: Synthetic oligonucleotide
cuuuauagaaaguaagcgu

SEQ ID NO: 1648001 - RNA, 19 nt, Artificial Sequence
  Description of Artificial Sequence: Synthetic oligonucleotide
ugcugauuaggcauugaaa

SEQ ID NO: 1648002 - RNA, 19 nt, Artificial Sequence
  Description of Artificial Sequence: Synthetic oligonucleotide
auaugcaaggaugucaagu

SEQ ID NO: 1648003 - RNA, 19 nt, Artificial Sequence
  Description of Artificial Sequence: Synthetic oligonucleotide
uaaaagagugcuggcagca

SEQ ID NO: 1648004 - RNA, 19 nt, Artificial Sequence
  Description of Artificial Sequence: Synthetic oligonucleotide
uaaguggaacaguaaauuu

SEQ ID NO: 1648005 - RNA, 19 nt, Artificial Sequence
  Description of Artificial Sequence: Synthetic oligonucleotide
aacaccagggacuguaaua

SEQ ID NO: 1648006 - RNA, 19 nt, Artificial Sequence
  Description of Artificial Sequence: Synthetic oligonucleotide
uagacugucucgugguaag

SEQ ID NO: 1648007 - RNA, 19 nt, Artificial Sequence
  Description of Artificial Sequence: Synthetic oligonucleotide
aagcccuguaauaagagaa

SEQ ID NO: 1648008 - RNA, 19 nt, Artificial Sequence
  Description of Artificial Sequence: Synthetic oligonucleotide
uuccuauguaaaagagugc

SEQ ID NO: 1648009 - RNA, 19 nt, Artificial Sequence
  Description of Artificial Sequence: Synthetic oligonucleotide
aggggaaacuaguugucag

SEQ ID NO: 1648010 - RNA, 19 nt, Artificial Sequence
  Description of Artificial Sequence: Synthetic oligonucleotide
augugcuuagauaucuugg

SEQ ID NO: 1648011 - RNA, 19 nt, Artificial Sequence
  Description of Artificial Sequence: Synthetic oligonucleotide
auauauauauauauauaua

SEQ ID NO: 1648012 - RNA, 19 nt, Artificial Sequence
  Description of Artificial Sequence: Synthetic oligonucleotide
ugggucauuguuacauuca

SEQ ID NO: 1648013 - RNA, 19 nt, Artificial Sequence
  Description of Artificial Sequence: Synthetic oligonucleotide
aaggggucuguaaaugauc

SEQ ID NO: 1648014 - RNA, 19 nt, Artificial Sequence
  Description of Artificial Sequence: Synthetic oligonucleotide
aaggaguagacugucucgu

SEQ ID NO: 1648015 - RNA, 19 nt, Artificial Sequence
  Description of Artificial Sequence: Synthetic oligonucleotide
caaaccuuacaaugcacuc

SEQ ID NO: 1648016 - RNA, 19 nt, Artificial Sequence
  Description of Artificial Sequence: Synthetic oligonucleotide
aacggucuguccucucuag

SEQ ID NO: 1648017 - RNA, 19 nt, Artificial Sequence
  Description of Artificial Sequence: Synthetic oligonucleotide
uuugcucaugugcuuagau

SEQ ID NO: 1648018 - RNA, 19 nt, Artificial Sequence
  Description of Artificial Sequence: Synthetic oligonucleotide
gucauuguuacauucauuu

SEQ ID NO: 1648019 - RNA, 19 nt, Artificial Sequence
  Description of Artificial Sequence: Synthetic oligonucleotide
uaaggggucuguaaaugau

SEQ ID NO: 1648020 - RNA, 19 nt, Artificial Sequence
  Description of Artificial Sequence: Synthetic oligonucleotide
ucuauaucacugugcaaau

SEQ ID NO: 1648021 - RNA, 19 nt, Artificial Sequence
  Description of Artificial Sequence: Synthetic oligonucleotide
gagcguguccaacaaggag

SEQ ID NO: 1648022 - RNA, 19 nt, Artificial Sequence
  Description of Artificial Sequence: Synthetic oligonucleotide
uccaagcuaguaguaaccc

SEQ ID NO: 1648023 - RNA, 19 nt, Artificial Sequence
  Description of Artificial Sequence: Synthetic oligonucleotide
agcagugcauuuccaaaug

SEQ ID NO: 1648024 - RNA, 19 nt, Artificial Sequence
  Description of Artificial Sequence: Synthetic oligonucleotide
auauauaugcauauauaua

SEQ ID NO: 1648025 - RNA, 19 nt, Artificial Sequence
  Description of Artificial Sequence: Synthetic oligonucleotide
uccucuauuugcucaugug

SEQ ID NO: 1648026 - RNA, 19 nt, Artificial Sequence
  Description of Artificial Sequence: Synthetic oligonucleotide
ugagcuccaggcaguaucu

SEQ ID NO: 1648027 - RNA, 19 nt, Artificial Sequence
  Description of Artificial Sequence: Synthetic oligonucleotide
auuaaguggaacaguaaau

SEQ ID NO: 1648028 - RNA, 19 nt, Artificial Sequence
  Description of Artificial Sequence: Synthetic oligonucleotide
auauauauaugcauauaua

SEQ ID NO: 1648029 - RNA, 19 nt, Artificial Sequence
  Description of Artificial Sequence: Synthetic oligonucleotide
augagacagagcacugucc

SEQ ID NO: 1648030 - RNA, 19 nt, Artificial Sequence
  Description of Artificial Sequence: Synthetic oligonucleotide
uuguuuccuaaggaaacca

SEQ ID NO: 1648031 - RNA, 19 nt, Artificial Sequence
  Description of Artificial Sequence: Synthetic oligonucleotide
auaccaaagcgcuacuuua

SEQ ID NO: 1648032 - RNA, 19 nt, Artificial Sequence
  Description of Artificial Sequence: Synthetic oligonucleotide
ccuuugaaaugauacacac

SEQ ID NO: 1648033 - RNA, 19 nt, Artificial Sequence
  Description of Artificial Sequence: Synthetic oligonucleotide
ggacauguggcaaugagac

SEQ ID NO: 1648034 - RNA, 19 nt, Artificial Sequence
  Description of Artificial Sequence: Synthetic oligonucleotide
acauuaguaaacaaacguu

SEQ ID NO: 1648035 - RNA, 19 nt, Artificial Sequence
  Description of Artificial Sequence: Synthetic oligonucleotide
augucaagucuuauguuag

SEQ ID NO: 1648036 - RNA, 19 nt, Artificial Sequence
  Description of Artificial Sequence: Synthetic oligonucleotide
aaaugcugauuaggcauug

SEQ ID NO: 1648037 - RNA, 19 nt, Artificial Sequence
  Description of Artificial Sequence: Synthetic oligonucleotide
acagcgcaggcuuuuggag

SEQ ID NO: 1648038 - RNA, 19 nt, Artificial Sequence
  Description of Artificial Sequence: Synthetic oligonucleotide
ucaugauugcccaucucuu

SEQ ID NO: 1648039 - RNA, 19 nt, Artificial Sequence
  Description of Artificial Sequence: Synthetic oligonucleotide
ucuacaccagcaguagccc

SEQ ID NO: 1648040 - RNA, 19 nt, Artificial Sequence
  Description of Artificial Sequence: Synthetic oligonucleotide
cugaggauacaguggggcc

SEQ ID NO: 1648041 - RNA, 19 nt, Artificial Sequence
  Description of Artificial Sequence: Synthetic oligonucleotide
uguagaggcuguguggaga

SEQ ID NO: 1648042 - RNA, 19 nt, Artificial Sequence
  Description of Artificial Sequence: Synthetic oligonucleotide
gaacuauuucugucccugc

SEQ ID NO: 1648043 - RNA, 19 nt, Artificial Sequence
  Description of Artificial Sequence: Synthetic oligonucleotide
cucgucacuggaaaacaug

SEQ ID NO: 1648044 - RNA, 19 nt, Artificial Sequence
  Description of Artificial Sequence: Synthetic oligonucleotide
uuuugugcaggggaaacua

SEQ ID NO: 1648045 - RNA, 19 nt, Artificial Sequence
  Description of Artificial Sequence: Synthetic oligonucleotide
aacauagaagcaauucauu

SEQ ID NO: 1648046 - RNA, 19 nt, Artificial Sequence
  Description of Artificial Sequence: Synthetic oligonucleotide
auguaaaagagugcuggca

SEQ ID NO: 1648047 - RNA, 19 nt, Artificial Sequence
  Description of Artificial Sequence: Synthetic oligonucleotide
ucauucguccuuugguuuc

SEQ ID NO: 1648048 - RNA, 19 nt, Artificial Sequence
  Description of Artificial Sequence: Synthetic oligonucleotide
agcguguccaacaaggagu

SEQ ID NO: 1648049 - RNA, 19 nt, Artificial Sequence
  Description of Artificial Sequence: Synthetic oligonucleotide
agggacuguaauaaaauau

SEQ ID NO: 1648050 - RNA, 19 nt, Artificial Sequence
  Description of Artificial Sequence: Synthetic oligonucleotide
ucaggugauucugauuucu

SEQ ID NO: 1648051 - RNA, 19 nt, Artificial Sequence
  Description of Artificial Sequence: Synthetic oligonucleotide
cuggacauguggcaaugag

SEQ ID NO: 1648052 - RNA, 19 nt, Artificial Sequence
  Description of Artificial Sequence: Synthetic oligonucleotide
ccucuauuugcucaugugc

SEQ ID NO: 1648053 - RNA, 19 nt, Artificial Sequence
  Description of Artificial Sequence: Synthetic oligonucleotide
ugagcguguccaacaagga

SEQ ID NO: 1648054 - RNA, 19 nt, Artificial Sequence
  Description of Artificial Sequence: Synthetic oligonucleotide
gauuauaugcaaggauguc

SEQ ID NO: 1648055 - RNA, 19 nt, Artificial Sequence
  Description of Artificial Sequence: Synthetic oligonucleotide
auaaacaccagggacugua

SEQ ID NO: 1648056 - RNA, 19 nt, Artificial Sequence
  Description of Artificial Sequence: Synthetic oligonucleotide
auagaaaguaagcguugaa

SEQ ID NO: 1648057 - RNA, 19 nt, Artificial Sequence
  Description of Artificial Sequence: Synthetic oligonucleotide
augcaaggaugucaagucu

SEQ ID NO: 1648058 - RNA, 19 nt, Artificial Sequence
  Description of Artificial Sequence: Synthetic oligonucleotide
guuacagaauaagaauaca

SEQ ID NO: 1648059 - RNA, 19 nt, Artificial Sequence
  Description of Artificial Sequence: Synthetic oligonucleotide
uucauucguccuuugguuu

SEQ ID NO: 1648060 - RNA, 19 nt, Artificial Sequence
  Description of Artificial Sequence: Synthetic oligonucleotide
cuaaagucaguccaagcua

SEQ ID NO: 1648061 - RNA, 19 nt, Artificial Sequence
  Description of Artificial Sequence: Synthetic oligonucleotide
gucaugauugcccaucucu

SEQ ID NO: 1648062 - RNA, 19 nt, Artificial Sequence
  Description of Artificial Sequence: Synthetic oligonucleotide
uguuagcauucuacaccag

SEQ ID NO: 1648063 - RNA, 19 nt, Artificial Sequence
  Description of Artificial Sequence: Synthetic oligonucleotide
auuuagcaggcugaauuca

SEQ ID NO: 1648064 - RNA, 19 nt, Artificial Sequence
  Description of Artificial Sequence: Synthetic oligonucleotide
agauaucuuggaaaugggu

SEQ ID NO: 1648065 - RNA, 19 nt, Artificial Sequence
  Description of Artificial Sequence: Synthetic oligonucleotide
aaacuaguugucaguuugu

SEQ ID NO: 1648066 - RNA, 19 nt, Artificial Sequence
  Description of Artificial Sequence: Synthetic oligonucleotide
augauacacacugaggaua

SEQ ID NO: 1648067 - RNA, 19 nt, Artificial Sequence
  Description of Artificial Sequence: Synthetic oligonucleotide
ucucuagguugguuggcug

SEQ ID NO: 1648068 - RNA, 19 nt, Artificial Sequence
  Description of Artificial Sequence: Synthetic oligonucleotide
ugugcaaaucuaggauucc

SEQ ID NO: 1648069 - RNA, 19 nt, Artificial Sequence
  Description of Artificial Sequence: Synthetic oligonucleotide
uugucaguuuguuuccaau

SEQ ID NO: 1648070 - RNA, 19 nt, Artificial Sequence
  Description of Artificial Sequence: Synthetic oligonucleotide
gucuguccucucuagguug

SEQ ID NO: 1648071 - RNA, 19 nt, Artificial Sequence
  Description of Artificial Sequence: Synthetic oligonucleotide
aacuggacauguggcaaug

SEQ ID NO: 1648072 - RNA, 19 nt, Artificial Sequence
  Description of Artificial Sequence: Synthetic oligonucleotide
caagcuaguaguaaccccu

SEQ ID NO: 1648073 - RNA, 19 nt, Artificial Sequence
  Description of Artificial Sequence: Synthetic oligonucleotide
acguuacagaauaagaaua

SEQ ID NO: 1648074 - RNA, 19 nt, Artificial Sequence
  Description of Artificial Sequence: Synthetic oligonucleotide
auuaggcauugaaauguag

SEQ ID NO: 1648075 - RNA, 19 nt, Artificial Sequence
  Description of Artificial Sequence: Synthetic oligonucleotide
auccuaguuaaguaacaua

SEQ ID NO: 1648076 - RNA, 19 nt, Artificial Sequence
  Description of Artificial Sequence: Synthetic oligonucleotide
ggccuauuccucuauuugc

SEQ ID NO: 1648077 - RNA, 19 nt, Artificial Sequence
  Description of Artificial Sequence: Synthetic oligonucleotide
caguccauuugguaaugug

SEQ ID NO: 1648078 - RNA, 19 nt, Artificial Sequence
  Description of Artificial Sequence: Synthetic oligonucleotide
ggauuccuauguaaaagag

SEQ ID NO: 1648079 - RNA, 19 nt, Artificial Sequence
  Description of Artificial Sequence: Synthetic oligonucleotide
uuccaaaugcuucccggua

SEQ ID NO: 1648080 - RNA, 19 nt, Artificial Sequence
  Description of Artificial Sequence: Synthetic oligonucleotide
acaccagggacuguaauaa

SEQ ID NO: 1648081 - RNA, 19 nt, Artificial Sequence
  Description of Artificial Sequence: Synthetic oligonucleotide
aaguaagcguugaagcaaa

SEQ ID NO: 1648082 - RNA, 19 nt, Artificial Sequence
  Description of Artificial Sequence: Synthetic oligonucleotide
ugauugcccaucucuuuuc

SEQ ID NO: 1648083 - RNA, 19 nt, Artificial Sequence
  Description of Artificial Sequence: Synthetic oligonucleotide
gcugauuaggcauugaaau

SEQ ID NO: 1648084 - RNA, 19 nt, Artificial Sequence
  Description of Artificial Sequence: Synthetic oligonucleotide
agucuuauguuagcauucu

SEQ ID NO: 1648085 - RNA, 19 nt, Artificial Sequence
  Description of Artificial Sequence: Synthetic oligonucleotide
aagucaggugauucugauu

SEQ ID NO: 1648086 - RNA, 19 nt, Artificial Sequence
  Description of Artificial Sequence: Synthetic oligonucleotide
agcagcaugaaguguuuua

SEQ ID NO: 1648087 - RNA, 19 nt, Artificial Sequence
  Description of Artificial Sequence: Synthetic oligonucleotide
gucaugagucaugauugcc

SEQ ID NO: 1648088 - RNA, 19 nt, Artificial Sequence
  Description of Artificial Sequence: Synthetic oligonucleotide
auaugcauauauauauaua

SEQ ID NO: 1648089 - RNA, 19 nt, Artificial Sequence
  Description of Artificial Sequence: Synthetic oligonucleotide
gauuccuauguaaaagagu

SEQ ID NO: 1648090 - RNA, 19 nt, Artificial Sequence
  Description of Artificial Sequence: Synthetic oligonucleotide
gauugcccaucucuuuuca

SEQ ID NO: 1648091 - RNA, 19 nt, Artificial Sequence
  Description of Artificial Sequence: Synthetic oligonucleotide
acggucuguccucucuagg

SEQ ID NO: 1648092 - RNA, 19 nt, Artificial Sequence
  Description of Artificial Sequence: Synthetic oligonucleotide
guccaagcuaguaguaacc

SEQ ID NO: 1648093 - RNA, 19 nt, Artificial Sequence
  Description of Artificial Sequence: Synthetic oligonucleotide
auauaugcauauauauaua

SEQ ID NO: 1648094 - RNA, 19 nt, Artificial Sequence
  Description of Artificial Sequence: Synthetic oligonucleotide
uugguaaugugaguagauu

SEQ ID NO: 1648095 - RNA, 19 nt, Artificial Sequence
  Description of Artificial Sequence: Synthetic oligonucleotide
aaugcugauuaggcauuga

SEQ ID NO: 1648096 - RNA, 19 nt, Artificial Sequence
  Description of Artificial Sequence: Synthetic oligonucleotide
agcuccaggcaguaucugu

SEQ ID NO: 1648097 - RNA, 19 nt, Artificial Sequence
  Description of Artificial Sequence: Synthetic oligonucleotide
guggagaaaucagaugcac

SEQ ID NO: 1648098 - RNA, 19 nt, Artificial Sequence
  Description of Artificial Sequence: Synthetic oligonucleotide
gguaaggggucuguaaaug

SEQ ID NO: 1648099 - RNA, 19 nt, Artificial Sequence
  Description of Artificial Sequence: Synthetic oligonucleotide
aagcuaguaguaaccccug

SEQ ID NO: 1648100 - RNA, 19 nt, Artificial Sequence
  Description of Artificial Sequence: Synthetic oligonucleotide
aggaguagacugucucgug

SEQ ID NO: 1648101 - RNA, 19 nt, Artificial Sequence
  Description of Artificial Sequence: Synthetic oligonucleotide
augcauauauauauauaua

SEQ ID NO: 1648102 - RNA, 19 nt, Artificial Sequence
  Description of Artificial Sequence: Synthetic oligonucleotide
gguaaugugaguagauuaa

SEQ ID NO: 1648103 - RNA, 19 nt, Artificial Sequence
  Description of Artificial Sequence: Synthetic oligonucleotide
uugcuaacggucuguccuc

SEQ ID NO: 1648104 - RNA, 19 nt, Artificial Sequence
  Description of Artificial Sequence: Synthetic oligonucleotide
cuacagugauuauaugcaa

SEQ ID NO: 1648105 - RNA, 19 nt, Artificial Sequence
  Description of Artificial Sequence: Synthetic oligonucleotide
agguccuuucugcucguca

SEQ ID NO: 1648106 - RNA, 19 nt, Artificial Sequence
  Description of Artificial Sequence: Synthetic oligonucleotide
caaaagcauagcccaccac

SEQ ID NO: 1648107 - RNA, 19 nt, Artificial Sequence
  Description of Artificial Sequence: Synthetic oligonucleotide
ggugauucugauuucuaua

SEQ ID NO: 1648108 - RNA, 19 nt, Artificial Sequence
  Description of Artificial Sequence: Synthetic oligonucleotide
gggccuauuccucuauuug

SEQ ID NO: 1648109 - RNA, 19 nt, Artificial Sequence
  Description of Artificial Sequence: Synthetic oligonucleotide
uaacggucuguccucucua

SEQ ID NO: 1648110 - RNA, 19 nt, Artificial Sequence
  Description of Artificial Sequence: Synthetic oligonucleotide
gacauguggcaaugagaca

SEQ ID NO: 1648111 - RNA, 19 nt, Artificial Sequence
  Description of Artificial Sequence: Synthetic oligonucleotide
aacaaacguuacagaauaa

SEQ ID NO: 1648112 - RNA, 19 nt, Artificial Sequence
  Description of Artificial Sequence: Synthetic oligonucleotide
gcagugcauuuccaaaugc

SEQ ID NO: 1648113 - RNA, 19 nt, Artificial Sequence
  Description of Artificial Sequence: Synthetic oligonucleotide
cauugauguaagccacauc

SEQ ID NO: 1648114 - RNA, 19 nt, Artificial Sequence
  Description of Artificial Sequence: Synthetic oligonucleotide
aaguaacauagaagcaauu

SEQ ID NO: 1648115 - RNA, 19 nt, Artificial Sequence
  Description of Artificial Sequence: Synthetic oligonucleotide
ccaagcuaguaguaacccc

SEQ ID NO: 1648116 - RNA, 19 nt, Artificial Sequence
  Description of Artificial Sequence: Synthetic oligonucleotide
accaaagcgcuacuuuaua

SEQ ID NO: 1648117 - RNA, 19 nt, Artificial Sequence
  Description of Artificial Sequence: Synthetic oligonucleotide
agcuaguaguaaccccuga

SEQ ID NO: 1648118 - RNA, 19 nt, Artificial Sequence
  Description of Artificial Sequence: Synthetic oligonucleotide
agauuaaguggaacaguaa

SEQ ID NO: 1648119 - RNA, 19 nt, Artificial Sequence
  Description of Artificial Sequence: Synthetic oligonucleotide
ccuauguaaaagagugcug

SEQ ID NO: 1648120 - RNA, 19 nt, Artificial Sequence
  Description of Artificial Sequence: Synthetic oligonucleotide
agacugucucgugguaagg

SEQ ID NO: 1648121 - RNA, 19 nt, Artificial Sequence
  Description of Artificial Sequence: Synthetic oligonucleotide
caagucuuauguuagcauu

SEQ ID NO: 1648122 - RNA, 19 nt, Artificial Sequence
  Description of Artificial Sequence: Synthetic oligonucleotide
cuuuuggagacaacauacu

SEQ ID NO: 1648123 - RNA, 19 nt, Artificial Sequence
  Description of Artificial Sequence: Synthetic oligonucleotide
aagcgcuacuuuauagaaa

SEQ ID NO: 1648124 - RNA, 19 nt, Artificial Sequence
  Description of Artificial Sequence: Synthetic oligonucleotide
gcauauauauauauauaua

SEQ ID NO: 1648125 - RNA, 19 nt, Artificial Sequence
  Description of Artificial Sequence: Synthetic oligonucleotide
gauuaggcauugaaaugua

SEQ ID NO: 1648126 - RNA, 19 nt, Artificial Sequence
  Description of Artificial Sequence: Synthetic oligonucleotide
gcaggcugaauucaggucu

SEQ ID NO: 1648127 - RNA, 19 nt, Artificial Sequence
  Description of Artificial Sequence: Synthetic oligonucleotide
guagauuaaguggaacagu

SEQ ID NO: 1648128 - RNA, 19 nt, Artificial Sequence
  Description of Artificial Sequence: Synthetic oligonucleotide
ggcaguaucuguuccucuc

SEQ ID NO: 1648129 - RNA, 19 nt, Artificial Sequence
  Description of Artificial Sequence: Synthetic oligonucleotide
aguugucaguuuguuucca

SEQ ID NO: 1648130 - RNA, 19 nt, Artificial Sequence
  Description of Artificial Sequence: Synthetic oligonucleotide
cacagcgcaggcuuuugga

SEQ ID NO: 1648131 - RNA, 19 nt, Artificial Sequence
  Description of Artificial Sequence: Synthetic oligonucleotide
ucuagguugguuggcuguu

SEQ ID NO: 1648132 - RNA, 19 nt, Artificial Sequence
  Description of Artificial Sequence: Synthetic oligonucleotide
gaaugcuucauucguccuu

SEQ ID NO: 1648133 - RNA, 19 nt, Artificial Sequence
  Description of Artificial Sequence: Synthetic oligonucleotide
cagugauuauaugcaagga

SEQ ID NO: 1648134 - RNA, 19 nt, Artificial Sequence
  Description of Artificial Sequence: Synthetic oligonucleotide
cauguggcaaugagacaga

SEQ ID NO: 1648135 - RNA, 19 nt, Artificial Sequence
  Description of Artificial Sequence: Synthetic oligonucleotide
cuucauucguccuuugguu

SEQ ID NO: 1648136 - RNA, 19 nt, Artificial Sequence
  Description of Artificial Sequence: Synthetic oligonucleotide
guagacugucucgugguaa

SEQ ID NO: 1648137 - RNA, 19 nt, Artificial Sequence
  Description of Artificial Sequence: Synthetic oligonucleotide
ucucgugguaaggggucug

SEQ ID NO: 1648138 - RNA, 19 nt, Artificial Sequence
  Description of Artificial Sequence: Synthetic oligonucleotide
cuaguaguaaccccugauu

SEQ ID NO: 1648139 - RNA, 19 nt, Artificial Sequence
  Description of Artificial Sequence: Synthetic oligonucleotide
gucaggugauucugauuuc

SEQ ID NO: 1648140 - RNA, 19 nt, Artificial Sequence
  Description of Artificial Sequence: Synthetic oligonucleotide
guaucuguuccucuccuuu

SEQ ID NO: 1648141 - RNA, 19 nt, Artificial Sequence
  Description of Artificial Sequence: Synthetic oligonucleotide
gcuucauucguccuuuggu

SEQ ID NO: 1648142 - RNA, 19 nt, Artificial Sequence
  Description of Artificial Sequence: Synthetic oligonucleotide
ugcuaacggucuguccucu

SEQ ID NO: 1648143 - RNA, 19 nt, Artificial Sequence
  Description of Artificial Sequence: Synthetic oligonucleotide
ccuaguuaaguaacauaga

SEQ ID NO: 1648144 - RNA, 19 nt, Artificial Sequence
  Description of Artificial Sequence: Synthetic oligonucleotide
augagucaugauugcccau

SEQ ID NO: 1648145 - RNA, 19 nt, Artificial Sequence
  Description of Artificial Sequence: Synthetic oligonucleotide
gaggaauagggaacuauuu

SEQ ID NO: 1648146 - RNA, 19 nt, Artificial Sequence
  Description of Artificial Sequence: Synthetic oligonucleotide
uucguccuuugguuucaaa

SEQ ID NO: 1648147 - RNA, 19 nt, Artificial Sequence
  Description of Artificial Sequence: Synthetic oligonucleotide
cuagguugguuggcuguug

SEQ ID NO: 1648148 - RNA, 19 nt, Artificial Sequence
  Description of Artificial Sequence: Synthetic oligonucleotide
agcccuguaauaagagaau

SEQ ID NO: 1648149 - RNA, 19 nt, Artificial Sequence
  Description of Artificial Sequence: Synthetic oligonucleotide
ccuaucaacuggacaugug

SEQ ID NO: 1648150 - RNA, 19 nt, Artificial Sequence
  Description of Artificial Sequence: Synthetic oligonucleotide
gcugagcguguccaacaag

SEQ ID NO: 1648151 - RNA, 19 nt, Artificial Sequence
  Description of Artificial Sequence: Synthetic oligonucleotide
aguggggccuauuccucua

SEQ ID NO: 1648152 - RNA, 19 nt, Artificial Sequence
  Description of Artificial Sequence: Synthetic oligonucleotide
augcuucccgguaggcggg

SEQ ID NO: 1648153 - RNA, 19 nt, Artificial Sequence
  Description of Artificial Sequence: Synthetic oligonucleotide
guagccccacuguaaggaa

SEQ ID NO: 1648154 - RNA, 19 nt, Artificial Sequence
  Description of Artificial Sequence: Synthetic oligonucleotide
gcauugaagcccuguaaua

SEQ ID NO: 1648155 - RNA, 19 nt, Artificial Sequence
  Description of Artificial Sequence: Synthetic oligonucleotide
cuaacggucuguccucucu

SEQ ID NO: 1648156 - RNA, 19 nt, Artificial Sequence
  Description of Artificial Sequence: Synthetic oligonucleotide
gguugguuggcuguugcaa

SEQ ID NO: 1648157 - RNA, 19 nt, Artificial Sequence
  Description of Artificial Sequence: Synthetic oligonucleotide
gucuuauguuagcauucua

SEQ ID NO: 1648158 - RNA, 19 nt, Artificial Sequence
  Description of Artificial Sequence: Synthetic oligonucleotide
ggaucuccuuccuuugaaa

SEQ ID NO: 1648159 - RNA, 19 nt, Artificial Sequence
  Description of Artificial Sequence: Synthetic oligonucleotide
ggucaaaagcauagcccac

SEQ ID NO: 1648160 - RNA, 19 nt, Artificial Sequence
  Description of Artificial Sequence: Synthetic oligonucleotide
cugucucgugguaaggggu

SEQ ID NO: 1648161 - RNA, 19 nt, Artificial Sequence
  Description of Artificial Sequence: Synthetic oligonucleotide
uggggccuauuccucuauu

SEQ ID NO: 1648162 - RNA, 19 nt, Artificial Sequence
  Description of Artificial Sequence: Synthetic oligonucleotide
cauucguccuuugguuuca

SEQ ID NO: 1648163 - RNA, 19 nt, Artificial Sequence
  Description of Artificial Sequence: Synthetic oligonucleotide
caguccaagcuaguaguaa

SEQ ID NO: 1648164 - RNA, 19 nt, Artificial Sequence
  Description of Artificial Sequence: Synthetic oligonucleotide
gcagggauaccaaagcgcu

SEQ ID NO: 1648165 - RNA, 19 nt, Artificial Sequence
  Description of Artificial Sequence: Synthetic oligonucleotide
caugauugcccaucucuuu

SEQ ID NO: 1648166 - RNA, 19 nt, Artificial Sequence
  Description of Artificial Sequence: Synthetic oligonucleotide
ggggaaacuaguugucagu

SEQ ID NO: 1648167 - RNA, 19 nt, Artificial Sequence
  Description of Artificial Sequence: Synthetic oligonucleotide
caauaaggccaggaacaaa

SEQ ID NO: 1648168 - RNA, 19 nt, Artificial Sequence
  Description of Artificial Sequence: Synthetic oligonucleotide
cauccuaguuaaguaacau

SEQ ID NO: 1648169 - RNA, 19 nt, Artificial Sequence
  Description of Artificial Sequence: Synthetic oligonucleotide
gcuaguaguaaccccugau

SEQ ID NO: 1648170 - RNA, 19 nt, Artificial Sequence
  Description of Artificial Sequence: Synthetic oligonucleotide
aguaagcguugaagcaaaa

SEQ ID NO: 1648171 - RNA, 19 nt, Artificial Sequence
  Description of Artificial Sequence: Synthetic oligonucleotide
ucgugguaaggggucugua

SEQ ID NO: 1648172 - RNA, 19 nt, Artificial Sequence
  Description of Artificial Sequence: Synthetic oligonucleotide
caccaguccauuugguaau

SEQ ID NO: 1648173 - RNA, 19 nt, Artificial Sequence
  Description of Artificial Sequence: Synthetic oligonucleotide
gggucauuguuacauucau

SEQ ID NO: 1648174 - RNA, 19 nt, Artificial Sequence
  Description of Artificial Sequence: Synthetic oligonucleotide
gcaggggaaacuaguuguc

SEQ ID NO: 1648175 - RNA, 19 nt, Artificial Sequence
  Description of Artificial Sequence: Synthetic oligonucleotide
caccagggacuguaauaaa

SEQ ID NO: 1648176 - RNA, 19 nt, Artificial Sequence
  Description of Artificial Sequence: Synthetic oligonucleotide
ggaaacuaguugucaguuu

SEQ ID NO: 1648177 - RNA, 19 nt, Artificial Sequence
  Description of Artificial Sequence: Synthetic oligonucleotide
cucucuagguugguuggcu

SEQ ID NO: 1648178 - RNA, 19 nt, Artificial Sequence
  Description of Artificial Sequence: Synthetic oligonucleotide
cagggauaccaaagcgcua

SEQ ID NO: 1648179 - RNA, 19 nt, Artificial Sequence
  Description of Artificial Sequence: Synthetic oligonucleotide
gggaaacuaguugucaguu

SEQ ID NO: 1648180 - RNA, 19 nt, Artificial Sequence
  Description of Artificial Sequence: Synthetic oligonucleotide
gcaaggaugucaagucuua

SEQ ID NO: 1648181 - RNA, 19 nt, Artificial Sequence
  Description of Artificial Sequence: Synthetic oligonucleotide
ccuuacaaugcacuccuau

SEQ ID NO: 1648182 - RNA, 19 nt, Artificial Sequence
  Description of Artificial Sequence: Synthetic oligonucleotide
ccucucuagguugguuggc

SEQ ID NO: 1648183 - RNA, 19 nt, Artificial Sequence
  Description of Artificial Sequence: Synthetic oligonucleotide
caguggggccuauuccucu

SEQ ID NO: 1648184 - RNA, 19 nt, Artificial Sequence
  Description of Artificial Sequence: Synthetic oligonucleotide
ccaauaaggccaggaacaa

SEQ ID NO: 1648185 - RNA, 19 nt, Artificial Sequence
  Description of Artificial Sequence: Synthetic oligonucleotide
gcuaacggucuguccucuc

SEQ ID NO: 1648186 - RNA, 19 nt, Artificial Sequence
  Description of Artificial Sequence: Synthetic oligonucleotide
gggaacuauuucugucccu

SEQ ID NO: 1648187 - RNA, 19 nt, Artificial Sequence
  Description of Artificial Sequence: Synthetic oligonucleotide
gcauugaaauguagaggcu

SEQ ID NO: 1648188 - RNA, 19 nt, Artificial Sequence
  Description of Artificial Sequence: Synthetic oligonucleotide
gcguguccaacaaggagua

SEQ ID NO: 1648189 - RNA, 19 nt, Artificial Sequence
  Description of Artificial Sequence: Synthetic oligonucleotide
caaggaugucaagucuuau

SEQ ID NO: 1648190 - RNA, 19 nt, Artificial Sequence
  Description of Artificial Sequence: Synthetic oligonucleotide
ggucauuguuacauucauu

SEQ ID NO: 1648191 - RNA, 19 nt, Artificial Sequence
  Description of Artificial Sequence: Synthetic oligonucleotide
gggauaccaaagcgcuacu

SEQ ID NO: 1648192 - RNA, 19 nt, Artificial Sequence
  Description of Artificial Sequence: Synthetic oligonucleotide
accuuacaaugcacuccua

SEQ ID NO: 1648193 - RNA, 19 nt, Artificial Sequence
  Description of Artificial Sequence: Synthetic oligonucleotide
guggggccuauuccucuau

SEQ ID NO: 1648194 - RNA, 19 nt, Artificial Sequence
  Description of Artificial Sequence: Synthetic oligonucleotide
gcucgucacuggaaaacau

SEQ ID NO: 1648195 - RNA, 19 nt, Artificial Sequence
  Description of Artificial Sequence: Synthetic oligonucleotide
cugcacagcgcaggcuuuu

SEQ ID NO: 1648196 - RNA, 19 nt, Artificial Sequence
  Description of Artificial Sequence: Synthetic oligonucleotide
cccgguaggcggggcugag

SEQ ID NO: 1648197 - RNA, 19 nt, Artificial Sequence
  Description of Artificial Sequence: Synthetic oligonucleotide
ccaguccauuugguaaugu

SEQ ID NO: 1648198 - RNA, 19 nt, Artificial Sequence
  Description of Artificial Sequence: Synthetic oligonucleotide
gcgcaggcuuuuggagaca

SEQ ID NO: 1648199 - RNA, 19 nt, Artificial Sequence
  Description of Artificial Sequence: Synthetic oligonucleotide
aaagcuuggaaauagguac

SEQ ID NO: 1648200 - RNA, 19 nt, Artificial Sequence
  Description of Artificial Sequence: Synthetic oligonucleotide
uccuuaaaggcacuuaagg

SEQ ID NO: 1648201 - RNA, 19 nt, Artificial Sequence
  Description of Artificial Sequence: Synthetic oligonucleotide
gacauaaggucccaggucg

SEQ ID NO: 1648202 - RNA, 19 nt, Artificial Sequence
  Description of Artificial Sequence: Synthetic oligonucleotide
aacagugccacgcccaggc

SEQ ID NO: 1648203 - RNA, 19 nt, Artificial Sequence
  Description of Artificial Sequence: Synthetic oligonucleotide
agaaccuagccccagaagg

SEQ ID NO: 1648204 - RNA, 19 nt, Artificial Sequence
  Description of Artificial Sequence: Synthetic oligonucleotide
ugaagguuccuuucgaagg

SEQ ID NO: 1648205 - RNA, 19 nt, Artificial Sequence
  Description of Artificial Sequence: Synthetic oligonucleotide
caagauacaaggcaucugg

SEQ ID NO: 1648206 - RNA, 19 nt, Artificial Sequence
  Description of Artificial Sequence: Synthetic oligonucleotide
uaucacacaagcauccucc

SEQ ID NO: 1648207 - RNA, 19 nt, Artificial Sequence
  Description of Artificial Sequence: Synthetic oligonucleotide
gauacaaggcaucuggggc

SEQ ID NO: 1648208 - RNA, 19 nt, Artificial Sequence
  Description of Artificial Sequence: Synthetic oligonucleotide
auagguacucaauucacag

SEQ ID NO: 1648209 - RNA, 19 nt, Artificial Sequence
  Description of Artificial Sequence: Synthetic oligonucleotide
ucugguaugaaaugugccc

SEQ ID NO: 1648210 - RNA, 19 nt, Artificial Sequence
  Description of Artificial Sequence: Synthetic oligonucleotide
uuaaggguuagcucggucc

SEQ ID NO: 1648211 - RNA, 19 nt, Artificial Sequence
  Description of Artificial Sequence: Synthetic oligonucleotide
gugaacagaaccuagcccc

SEQ ID NO: 1648212 - RNA, 19 nt, Artificial Sequence
  Description of Artificial Sequence: Synthetic oligonucleotide
aaauagguacucaauucac

SEQ ID NO: 1648213 - RNA, 19 nt, Artificial Sequence
  Description of Artificial Sequence: Synthetic oligonucleotide
ugccaaagagcaaagccgg

SEQ ID NO: 1648214 - RNA, 19 nt, Artificial Sequence
  Description of Artificial Sequence: Synthetic oligonucleotide
aaagcgacacagcuugagg

SEQ ID NO: 1648215 - RNA, 19 nt, Artificial Sequence
  Description of Artificial Sequence: Synthetic oligonucleotide
caagacaagcccauguugg

SEQ ID NO: 1648216 - RNA, 19 nt, Artificial Sequence
  Description of Artificial Sequence: Synthetic oligonucleotide
auagugaacagugccacgc

SEQ ID NO: 1648217 - RNA, 19 nt, Artificial Sequence
  Description of Artificial Sequence: Synthetic oligonucleotide
guuagcucgguccaaagag

SEQ ID NO: 1648218 - RNA, 19 nt, Artificial Sequence
  Description of Artificial Sequence: Synthetic oligonucleotide
agauacaaggcaucugggg

SEQ ID NO: 1648219 - RNA, 19 nt, Artificial Sequence
  Description of Artificial Sequence: Synthetic oligonucleotide
gacaagcccauguuggugg

SEQ ID NO: 1648220 - RNA, 19 nt, Artificial Sequence
  Description of Artificial Sequence: Synthetic oligonucleotide
aaagagucaggagaaagcu

SEQ ID NO: 1648221 - RNA, 19 nt, Artificial Sequence
  Description of Artificial Sequence: Synthetic oligonucleotide
aguaggguagcccuaacca

SEQ ID NO: 1648222 - RNA, 19 nt, Artificial Sequence
  Description of Artificial Sequence: Synthetic oligonucleotide
gcacuuaaggguuagcucg

SEQ ID NO: 1648223 - RNA, 19 nt, Artificial Sequence
  Description of Artificial Sequence: Synthetic oligonucleotide
uacggaucuugccaaagag

SEQ ID NO: 1648224 - RNA, 19 nt, Artificial Sequence
  Description of Artificial Sequence: Synthetic oligonucleotide
uuuggucuuuggcacagag

SEQ ID NO: 1648225 - RNA, 19 nt, Artificial Sequence
  Description of Artificial Sequence: Synthetic oligonucleotide
aagcgacacagcuugaggu

SEQ ID NO: 1648226 - RNA, 19 nt, Artificial Sequence
  Description of Artificial Sequence: Synthetic oligonucleotide
augaaaugugcccagcgug

SEQ ID NO: 1648227 - RNA, 19 nt, Artificial Sequence
  Description of Artificial Sequence: Synthetic oligonucleotide
ugccggaaaagcacaauag

SEQ ID NO: 1648228 - RNA, 19 nt, Artificial Sequence
  Description of Artificial Sequence: Synthetic oligonucleotide
ucugggaccaccuggucag

SEQ ID NO: 1648229 - RNA, 19 nt, Artificial Sequence
  Description of Artificial Sequence: Synthetic oligonucleotide
guaugaaaugugcccagcg

SEQ ID NO: 1648230 - RNA, 19 nt, Artificial Sequence
  Description of Artificial Sequence: Synthetic oligonucleotide
uuuguuuaaagugcaagau

SEQ ID NO: 1648231 - RNA, 19 nt, Artificial Sequence
  Description of Artificial Sequence: Synthetic oligonucleotide
uaugaaaugugcccagcgu

SEQ ID NO: 1648232 - RNA, 19 nt, Artificial Sequence
  Description of Artificial Sequence: Synthetic oligonucleotide
uaucucuggucccacguag

SEQ ID NO: 1648233 - RNA, 19 nt, Artificial Sequence
  Description of Artificial Sequence: Synthetic oligonucleotide
uugaggucacgcaagacaa

SEQ ID NO: 1648234 - RNA, 19 nt, Artificial Sequence
  Description of Artificial Sequence: Synthetic oligonucleotide
uggaaauagguacucaauu

SEQ ID NO: 1648235 - RNA, 19 nt, Artificial Sequence
  Description of Artificial Sequence: Synthetic oligonucleotide
uggggcaccaaugaagagg

SEQ ID NO: 1648236 - RNA, 19 nt, Artificial Sequence
  Description of Artificial Sequence: Synthetic oligonucleotide
cauagcagccaucugccgg

SEQ ID NO: 1648237 - RNA, 19 nt, Artificial Sequence
  Description of Artificial Sequence: Synthetic oligonucleotide
uagcccuaaccauacagcc

SEQ ID NO: 1648238 - RNA, 19 nt, Artificial Sequence
  Description of Artificial Sequence: Synthetic oligonucleotide
gaaaagcacaauagccucg

SEQ ID NO: 1648239 - RNA, 19 nt, Artificial Sequence
  Description of Artificial Sequence: Synthetic oligonucleotide
aaccuagccccagaaggcc

SEQ ID NO: 1648240 - RNA, 19 nt, Artificial Sequence
  Description of Artificial Sequence: Synthetic oligonucleotide
ugugcaaguccccaugggu

SEQ ID NO: 1648241 - RNA, 19 nt, Artificial Sequence
  Description of Artificial Sequence: Synthetic oligonucleotide
caucggaucaggcaucggg

SEQ ID NO: 1648242 - RNA, 19 nt, Artificial Sequence
  Description of Artificial Sequence: Synthetic oligonucleotide
uaaggguuagcucggucca

SEQ ID NO: 1648243 - RNA, 19 nt, Artificial Sequence
  Description of Artificial Sequence: Synthetic oligonucleotide
cugugaacagaaccuagcc

SEQ ID NO: 1648244 - RNA, 19 nt, Artificial Sequence
  Description of Artificial Sequence: Synthetic oligonucleotide
ggaacugagagcccaacag

SEQ ID NO: 1648245 - RNA, 19 nt, Artificial Sequence
  Description of Artificial Sequence: Synthetic oligonucleotide
uacucaauucacagcuugc

SEQ ID NO: 1648246 - RNA, 19 nt, Artificial Sequence
  Description of Artificial Sequence: Synthetic oligonucleotide
uuggaaauagguacucaau

SEQ ID NO: 1648247 - RNA, 19 nt, Artificial Sequence
  Description of Artificial Sequence: Synthetic oligonucleotide
uuaucacacaagcauccuc

SEQ ID NO: 1648248 - RNA, 19 nt, Artificial Sequence
  Description of Artificial Sequence: Synthetic oligonucleotide
aaugugcccagcguggaug

SEQ ID NO: 1648249 - RNA, 19 nt, Artificial Sequence
  Description of Artificial Sequence: Synthetic oligonucleotide
aauaccgcggcggcugcgc

SEQ ID NO: 1648250 - RNA, 19 nt, Artificial Sequence
  Description of Artificial Sequence: Synthetic oligonucleotide
gugaagguuccuuucgaag

SEQ ID NO: 1648251 - RNA, 19 nt, Artificial Sequence
  Description of Artificial Sequence: Synthetic oligonucleotide
ggaaauagguacucaauuc

SEQ ID NO: 1648252 - RNA, 19 nt, Artificial Sequence
  Description of Artificial Sequence: Synthetic oligonucleotide
cuuucgaaggagacaucgg

SEQ ID NO: 1648253 - RNA, 19 nt, Artificial Sequence
  Description of Artificial Sequence: Synthetic oligonucleotide
aagacaagcccauguuggu

SEQ ID NO: 1648254 - RNA, 19 nt, Artificial Sequence
  Description of Artificial Sequence: Synthetic oligonucleotide
uuccuuucgaaggagacau

SEQ ID NO: 1648255 - RNA, 19 nt, Artificial Sequence
  Description of Artificial Sequence: Synthetic oligonucleotide
agcgacacagcuugagguc

SEQ ID NO: 1648256 - RNA, 19 nt, Artificial Sequence
  Description of Artificial Sequence: Synthetic oligonucleotide
acggguagugaccagccag

SEQ ID NO: 1648257 - RNA, 19 nt, Artificial Sequence
  Description of Artificial Sequence: Synthetic oligonucleotide
uuagcucgguccaaagagu

SEQ ID NO: 1648258 - RNA, 19 nt, Artificial Sequence
  Description of Artificial Sequence: Synthetic oligonucleotide
ugaacagugccacgcccag

SEQ ID NO: 1648259 - RNA, 19 nt, Artificial Sequence
  Description of Artificial Sequence: Synthetic oligonucleotide
aacucugguaugaaaugug

SEQ ID NO: 1648260 - RNA, 19 nt, Artificial Sequence
  Description of Artificial Sequence: Synthetic oligonucleotide
guauaugacacuguggcaa

SEQ ID NO: 1648261 - RNA, 19 nt, Artificial Sequence
  Description of Artificial Sequence: Synthetic oligonucleotide
aguaucucuggucccacgu

SEQ ID NO: 1648262 - RNA, 19 nt, Artificial Sequence
  Description of Artificial Sequence: Synthetic oligonucleotide
ucgaaggagacaucggauc

SEQ ID NO: 1648263 - RNA, 19 nt, Artificial Sequence
  Description of Artificial Sequence: Synthetic oligonucleotide
aucggaucaggcaucgggc

SEQ ID NO: 1648264 - RNA, 19 nt, Artificial Sequence
  Description of Artificial Sequence: Synthetic oligonucleotide
aguauaugacacuguggca

SEQ ID NO: 1648265 - RNA, 19 nt, Artificial Sequence
  Description of Artificial Sequence: Synthetic oligonucleotide
aaagcacaauagccucggg

SEQ ID NO: 1648266 - RNA, 19 nt, Artificial Sequence
  Description of Artificial Sequence: Synthetic oligonucleotide
ugguaugaaaugugcccag

SEQ ID NO: 1648267 - RNA, 19 nt, Artificial Sequence
  Description of Artificial Sequence: Synthetic oligonucleotide
cuagucgcugugaagguuc

SEQ ID NO: 1648268 - RNA, 19 nt, Artificial Sequence
  Description of Artificial Sequence: Synthetic oligonucleotide
uacugugugccuguggggc

SEQ ID NO: 1648269 - RNA, 19 nt, Artificial Sequence
  Description of Artificial Sequence: Synthetic oligonucleotide
augugcccagcguggaugc

SEQ ID NO: 1648270 - RNA, 19 nt, Artificial Sequence
  Description of Artificial Sequence: Synthetic oligonucleotide
uagugaccagccagcauag

SEQ ID NO: 1648271 - RNA, 19 nt, Artificial Sequence
  Description of Artificial Sequence: Synthetic oligonucleotide
ccggaaaagcacaauagcc

SEQ ID NO: 1648272 - RNA, 19 nt, Artificial Sequence
  Description of Artificial Sequence: Synthetic oligonucleotide
augaagaggacuguccugu

SEQ ID NO: 1648273 - RNA, 19 nt, Artificial Sequence
  Description of Artificial Sequence: Synthetic oligonucleotide
guagugaccagccagcaua

SEQ ID NO: 1648274 - RNA, 19 nt, Artificial Sequence
  Description of Artificial Sequence: Synthetic oligonucleotide
cauacagccccaacucgcc

SEQ ID NO: 1648275 - RNA, 19 nt, Artificial Sequence
  Description of Artificial Sequence: Synthetic oligonucleotide
ucaaccagggaugcagaag

SEQ ID NO: 1648276 - RNA, 19 nt, Artificial Sequence
  Description of Artificial Sequence: Synthetic oligonucleotide
guggcuagucuguggaggg

SEQ ID NO: 1648277 - RNA, 19 nt, Artificial Sequence
  Description of Artificial Sequence: Synthetic oligonucleotide
cacuuaaggguuagcucgg

SEQ ID NO: 1648278 - RNA, 19 nt, Artificial Sequence
  Description of Artificial Sequence: Synthetic oligonucleotide
cuuggaaauagguacucaa

SEQ ID NO: 1648279 - RNA, 19 nt, Artificial Sequence
  Description of Artificial Sequence: Synthetic oligonucleotide
ggaaaagcacaauagccuc

SEQ ID NO: 1648280 - RNA, 19 nt, Artificial Sequence
  Description of Artificial Sequence: Synthetic oligonucleotide
aucgggcuggggcugauag

SEQ ID NO: 1648281 - RNA, 19 nt, Artificial Sequence
  Description of Artificial Sequence: Synthetic oligonucleotide
agugccacgcccaggcucc

SEQ ID NO: 1648282 - RNA, 19 nt, Artificial Sequence
  Description of Artificial Sequence: Synthetic oligonucleotide
gaaccuagccccagaaggc

SEQ ID NO: 1648283 - RNA, 19 nt, Artificial Sequence
  Description of Artificial Sequence: Synthetic oligonucleotide
agugcaagauacaaggcau

SEQ ID NO: 1648284 - RNA, 19 nt, Artificial Sequence
  Description of Artificial Sequence: Synthetic oligonucleotide
cucgggcucgggaauaccg

SEQ ID NO: 1648285 - RNA, 19 nt, Artificial Sequence
  Description of Artificial Sequence: Synthetic oligonucleotide
caggaugucugcgggaugg

SEQ ID NO: 1648286 - RNA, 19 nt, Artificial Sequence
  Description of Artificial Sequence: Synthetic oligonucleotide
ucuacggaucuugccaaag

SEQ ID NO: 1648287 - RNA, 19 nt, Artificial Sequence
  Description of Artificial Sequence: Synthetic oligonucleotide
acaggcuggguacaccuug

SEQ ID NO: 1648288 - RNA, 19 nt, Artificial Sequence
  Description of Artificial Sequence: Synthetic oligonucleotide
aaagccggcucagaguccu

SEQ ID NO: 1648289 - RNA, 19 nt, Artificial Sequence
  Description of Artificial Sequence: Synthetic oligonucleotide
gggaguauaugacacugug

SEQ ID NO: 1648290 - RNA, 19 nt, Artificial Sequence
  Description of Artificial Sequence: Synthetic oligonucleotide
agucgucugguccaguuau

SEQ ID NO: 1648291 - RNA, 19 nt, Artificial Sequence
  Description of Artificial Sequence: Synthetic oligonucleotide
ugcccagcguggaugcugg

SEQ ID NO: 1648292 - RNA, 19 nt, Artificial Sequence
  Description of Artificial Sequence: Synthetic oligonucleotide
gacaucggaucaggcaucg

SEQ ID NO: 1648293 - RNA, 19 nt, Artificial Sequence
  Description of Artificial Sequence: Synthetic oligonucleotide
gagacaucggaucaggcau

SEQ ID NO: 1648294 - RNA, 19 nt, Artificial Sequence
  Description of Artificial Sequence: Synthetic oligonucleotide
ugaggucacgcaagacaag

SEQ ID NO: 1648295 - RNA, 19 nt, Artificial Sequence
  Description of Artificial Sequence: Synthetic oligonucleotide
caauuccagucuuugccug

SEQ ID NO: 1648296 - RNA, 19 nt, Artificial Sequence
  Description of Artificial Sequence: Synthetic oligonucleotide
guagcccuaaccauacagc

SEQ ID NO: 1648297 - RNA, 19 nt, Artificial Sequence
  Description of Artificial Sequence: Synthetic oligonucleotide
cagcugaggggccaguagg

SEQ ID NO: 1648298 - RNA, 19 nt, Artificial Sequence
  Description of Artificial Sequence: Synthetic oligonucleotide
uagcucgguccaaagaguc

SEQ ID NO: 1648299 - RNA, 19 nt, Artificial Sequence
  Description of Artificial Sequence: Synthetic oligonucleotide
gguucgguccucucgcucg

SEQ ID NO: 1648300 - RNA, 19 nt, Artificial Sequence
  Description of Artificial Sequence: Synthetic oligonucleotide
gcccuaaccauacagcccc

SEQ ID NO: 1648301 - RNA, 19 nt, Artificial Sequence
  Description of Artificial Sequence: Synthetic oligonucleotide
agcccuaaccauacagccc

SEQ ID NO: 1648302 - RNA, 19 nt, Artificial Sequence
  Description of Artificial Sequence: Synthetic oligonucleotide
ggucacgcaagacaagccc

SEQ ID NO: 1648303 - RNA, 19 nt, Artificial Sequence
  Description of Artificial Sequence: Synthetic oligonucleotide
ugggaguauaugacacugu

SEQ ID NO: 1648304 - RNA, 19 nt, Artificial Sequence
  Description of Artificial Sequence: Synthetic oligonucleotide
ugaggcacagggugaguga

SEQ ID NO: 1648305 - RNA, 19 nt, Artificial Sequence
  Description of Artificial Sequence: Synthetic oligonucleotide
uccccaugggucuucgaga

SEQ ID NO: 1648306 - RNA, 19 nt, Artificial Sequence
  Description of Artificial Sequence: Synthetic oligonucleotide
cuuugccugacuugugguc

SEQ ID NO: 1648307 - RNA, 19 nt, Artificial Sequence
  Description of Artificial Sequence: Synthetic oligonucleotide
acgcaagacaagcccaugu

SEQ ID NO: 1648308 - RNA, 19 nt, Artificial Sequence
  Description of Artificial Sequence: Synthetic oligonucleotide
auagccucgggcucgggaa

SEQ ID NO: 1648309 - RNA, 19 nt, Artificial Sequence
  Description of Artificial Sequence: Synthetic oligonucleotide
aggaacugagagcccaaca

SEQ ID NO: 1648310 - RNA, 19 nt, Artificial Sequence
  Description of Artificial Sequence: Synthetic oligonucleotide
ucgggaauaccgcggcggc

SEQ ID NO: 1648311 - RNA, 19 nt, Artificial Sequence
  Description of Artificial Sequence: Synthetic oligonucleotide
ggcaaaggucccucuacgg

SEQ ID NO: 1648312 - RNA, 19 nt, Artificial Sequence
  Description of Artificial Sequence: Synthetic oligonucleotide
cucgggaauaccgcggcgg

SEQ ID NO: 1648313 - RNA, 19 nt, Artificial Sequence
  Description of Artificial Sequence: Synthetic oligonucleotide
ugcccggggccacuagucg

SEQ ID NO: 1648314 - RNA, 19 nt, Artificial Sequence
  Description of Artificial Sequence: Synthetic oligonucleotide
ucggaucaggcaucgggcu

SEQ ID NO: 1648315 - RNA, 19 nt, Artificial Sequence
  Description of Artificial Sequence: Synthetic oligonucleotide
ucgucugguccaguuauca

SEQ ID NO: 1648316 - RNA, 19 nt, Artificial Sequence
  Description of Artificial Sequence: Synthetic oligonucleotide
aggcacuuaaggguuagcu

SEQ ID NO: 1648317 - RNA, 19 nt, Artificial Sequence
  Description of Artificial Sequence: Synthetic oligonucleotide
gaacggguagugaccagcc

SEQ ID NO: 1648318 - RNA, 19 nt, Artificial Sequence
  Description of Artificial Sequence: Synthetic oligonucleotide
gauggguaggcagccgugc

SEQ ID NO: 1648319 - RNA, 19 nt, Artificial Sequence
  Description of Artificial Sequence: Synthetic oligonucleotide
ucgggcucgggaauaccgc

SEQ ID NO: 1648320 - RNA, 19 nt, Artificial Sequence
  Description of Artificial Sequence: Synthetic oligonucleotide
caaagcgacacagcuugag

SEQ ID NO: 1648321 - RNA, 19 nt, Artificial Sequence
  Description of Artificial Sequence: Synthetic oligonucleotide
augucugcgggaugggcca

SEQ ID NO: 1648322 - RNA, 19 nt, Artificial Sequence
  Description of Artificial Sequence: Synthetic oligonucleotide
gcaaagccggcucagaguc

SEQ ID NO: 1648323 - RNA, 19 nt, Artificial Sequence
  Description of Artificial Sequence: Synthetic oligonucleotide
aaaugugcccagcguggau

SEQ ID NO: 1648324 - RNA, 19 nt, Artificial Sequence
  Description of Artificial Sequence: Synthetic oligonucleotide
gccggaaaagcacaauagc

SEQ ID NO: 1648325 - RNA, 19 nt, Artificial Sequence
  Description of Artificial Sequence: Synthetic oligonucleotide
guagguguggcugccuugc

SEQ ID NO: 1648326 - RNA, 19 nt, Artificial Sequence
  Description of Artificial Sequence: Synthetic oligonucleotide
aacggguagugaccagcca

SEQ ID NO: 1648327 - RNA, 19 nt, Artificial Sequence
  Description of Artificial Sequence: Synthetic oligonucleotide
ucacgcaagacaagcccau

SEQ ID NO: 1648328 - RNA, 19 nt, Artificial Sequence
  Description of Artificial Sequence: Synthetic oligonucleotide
cauaaggucccaggucggg

SEQ ID NO: 1648329 - RNA, 19 nt, Artificial Sequence
  Description of Artificial Sequence: Synthetic oligonucleotide
gcugaagacaaagcgacac

SEQ ID NO: 1648330 - RNA, 19 nt, Artificial Sequence
  Description of Artificial Sequence: Synthetic oligonucleotide
ccuuuguuuaaagugcaag

SEQ ID NO: 1648331 - RNA, 19 nt, Artificial Sequence
  Description of Artificial Sequence: Synthetic oligonucleotide
gauggucgggagcugagua

SEQ ID NO: 1648332 - RNA, 19 nt, Artificial Sequence
  Description of Artificial Sequence: Synthetic oligonucleotide
cugugcaaguccccauggg

SEQ ID NO: 1648333 - RNA, 19 nt, Artificial Sequence
  Description of Artificial Sequence: Synthetic oligonucleotide
ggagacaucggaucaggca

SEQ ID NO: 1648334 - RNA, 19 nt, Artificial Sequence
  Description of Artificial Sequence: Synthetic oligonucleotide
cugguaugaaaugugccca

SEQ ID NO: 1648335 - RNA, 19 nt, Artificial Sequence
  Description of Artificial Sequence: Synthetic oligonucleotide
cuuaaggguuagcucgguc

SEQ ID NO: 1648336 - RNA, 19 nt, Artificial Sequence
  Description of Artificial Sequence: Synthetic oligonucleotide
guguacugugugccugugg

SEQ ID NO: 1648337 - RNA, 19 nt, Artificial Sequence
  Description of Artificial Sequence: Synthetic oligonucleotide
aacucgccuuccucagucu

SEQ ID NO: 1648338 - RNA, 19 nt, Artificial Sequence
  Description of Artificial Sequence: Synthetic oligonucleotide
agacaagcccauguuggug

SEQ ID NO: 1648339 - RNA, 19 nt, Artificial Sequence
  Description of Artificial Sequence: Synthetic oligonucleotide
ccauacagccccaacucgc

SEQ ID NO: 1648340 - RNA, 19 nt, Artificial Sequence
  Description of Artificial Sequence: Synthetic oligonucleotide
ccaaagagucaggagaaag

SEQ ID NO: 1648341 - RNA, 19 nt, Artificial Sequence
  Description of Artificial Sequence: Synthetic oligonucleotide
ccaucugccggaaaagcac

SEQ ID NO: 1648342 - RNA, 19 nt, Artificial Sequence
  Description of Artificial Sequence: Synthetic oligonucleotide
cagagagucgucuggucca

SEQ ID NO: 1648343 - RNA, 19 nt, Artificial Sequence
  Description of Artificial Sequence: Synthetic oligonucleotide
acauaaggucccaggucgg

SEQ ID NO: 1648344 - RNA, 19 nt, Artificial Sequence
  Description of Artificial Sequence: Synthetic oligonucleotide
gaaggccaacucugguaug

SEQ ID NO: 1648345 - RNA, 19 nt, Artificial Sequence
  Description of Artificial Sequence: Synthetic oligonucleotide
ggcacuuaaggguuagcuc

SEQ ID NO: 1648346 - RNA, 19 nt, Artificial Sequence
  Description of Artificial Sequence: Synthetic oligonucleotide
cucgguccaaagagucagg

SEQ ID NO: 1648347 - RNA, 19 nt, Artificial Sequence
  Description of Artificial Sequence: Synthetic oligonucleotide
gcugugcaaguccccaugg

SEQ ID NO: 1648348 - RNA, 19 nt, Artificial Sequence
  Description of Artificial Sequence: Synthetic oligonucleotide
agacaucggaucaggcauc

SEQ ID NO: 1648349 - RNA, 19 nt, Artificial Sequence
  Description of Artificial Sequence: Synthetic oligonucleotide
uacaaggcaucuggggcac

SEQ ID NO: 1648350 - RNA, 19 nt, Artificial Sequence
  Description of Artificial Sequence: Synthetic oligonucleotide
caggcuggguacaccuugc

SEQ ID NO: 1648351 - RNA, 19 nt, Artificial Sequence
  Description of Artificial Sequence: Synthetic oligonucleotide
aucucuggucccacguagg

SEQ ID NO: 1648352 - RNA, 19 nt, Artificial Sequence
  Description of Artificial Sequence: Synthetic oligonucleotide
gugacaagucugaggcagg

SEQ ID NO: 1648353 - RNA, 19 nt, Artificial Sequence
  Description of Artificial Sequence: Synthetic oligonucleotide
caucugccggaaaagcaca

SEQ ID NO: 1648354 - RNA, 19 nt, Artificial Sequence
  Description of Artificial Sequence: Synthetic oligonucleotide
ccuggaacggguagugacc

SEQ ID NO: 1648355 - RNA, 19 nt, Artificial Sequence
  Description of Artificial Sequence: Synthetic oligonucleotide
gugcaaguccccauggguc

SEQ ID NO: 1648356 - RNA, 19 nt, Artificial Sequence
  Description of Artificial Sequence: Synthetic oligonucleotide
gucuucgagaagaaggugu

SEQ ID NO: 1648357 - RNA, 19 nt, Artificial Sequence
  Description of Artificial Sequence: Synthetic oligonucleotide
uggcuagucuguggagggg

SEQ ID NO: 1648358 - RNA, 19 nt, Artificial Sequence
  Description of Artificial Sequence: Synthetic oligonucleotide
gguccaguuaucacacaag

SEQ ID NO: 1648359 - RNA, 19 nt, Artificial Sequence
  Description of Artificial Sequence: Synthetic oligonucleotide
acaauagccucgggcucgg

SEQ ID NO: 1648360 - RNA, 19 nt, Artificial Sequence
  Description of Artificial Sequence: Synthetic oligonucleotide
gcucgguccaaagagucag

SEQ ID NO: 1648361 - RNA, 19 nt, Artificial Sequence
  Description of Artificial Sequence: Synthetic oligonucleotide
auggucgggagcugaguau

SEQ ID NO: 1648362 - RNA, 19 nt, Artificial Sequence
  Description of Artificial Sequence: Synthetic oligonucleotide
  modified_base (3)..(3): a, c, u, g, unknown or other
ccngguucgguccucucgc

SEQ ID NO: 1648363 - RNA, 19 nt, Artificial Sequence
  Description of Artificial Sequence: Synthetic oligonucleotide
ggaacggguagugaccagc

SEQ ID NO: 1648364 - RNA, 19 nt, Artificial Sequence
  Description of Artificial Sequence: Synthetic oligonucleotide
auacagccccaacucgccu

SEQ ID NO: 1648365 - RNA, 19 nt, Artificial Sequence
  Description of Artificial Sequence: Synthetic oligonucleotide
cuacggaucuugccaaaga

SEQ ID NO: 1648366 - RNA, 19 nt, Artificial Sequence
  Description of Artificial Sequence: Synthetic oligonucleotide
caaagccggcucagagucc

SEQ ID NO: 1648367 - RNA, 19 nt, Artificial Sequence
  Description of Artificial Sequence: Synthetic oligonucleotide
cagaguaggauggucggga

SEQ ID NO: 1648368 - RNA, 19 nt, Artificial Sequence
  Description of Artificial Sequence: Synthetic oligonucleotide
ucccacguaggcagggcau

SEQ ID NO: 1648369 - RNA, 19 nt, Artificial Sequence
  Description of Artificial Sequence: Synthetic oligonucleotide
gaacagugccacgcccagg

SEQ ID NO: 1648370 - RNA, 19 nt, Artificial Sequence
  Description of Artificial Sequence: Synthetic oligonucleotide
uugccugacuugugguccu

SEQ ID NO: 1648371 - RNA, 19 nt, Artificial Sequence
  Description of Artificial Sequence: Synthetic oligonucleotide
acaggaugucugcgggaug

SEQ ID NO: 1648372 - RNA, 19 nt, Artificial Sequence
  Description of Artificial Sequence: Synthetic oligonucleotide
gcaaaggucccucuacgga

SEQ ID NO: 1648373 - RNA, 19 nt, Artificial Sequence
  Description of Artificial Sequence: Synthetic oligonucleotide
cucucgcucguuuaggacu

SEQ ID NO: 1648374 - RNA, 19 nt, Artificial Sequence
  Description of Artificial Sequence: Synthetic oligonucleotide
gucacgcaagacaagccca

SEQ ID NO: 1648375 - RNA, 19 nt, Artificial Sequence
  Description of Artificial Sequence: Synthetic oligonucleotide
cucguccucucacgguugc

SEQ ID NO: 1648376 - RNA, 19 nt, Artificial Sequence
  Description of Artificial Sequence: Synthetic oligonucleotide
  modified_base (9)..(9): a, c, u, g, unknown or other
gguggcccngguucggucc

SEQ ID NO: 1648377 - RNA, 19 nt, Artificial Sequence
  Description of Artificial Sequence: Synthetic oligonucleotide
uggucccacguaggcaggg

SEQ ID NO: 1648378 - RNA, 19 nt, Artificial Sequence
  Description of Artificial Sequence: Synthetic oligonucleotide
gguaugaaaugugcccagc

SEQ ID NO: 1648379 - RNA, 19 nt, Artificial Sequence
  Description of Artificial Sequence: Synthetic oligonucleotide
agagagucgucugguccag

SEQ ID NO: 1648380 - RNA, 19 nt, Artificial Sequence
  Description of Artificial Sequence: Synthetic oligonucleotide
acguaggcagggcaugcau

SEQ ID NO: 1648381 - RNA, 19 nt, Artificial Sequence
  Description of Artificial Sequence: Synthetic oligonucleotide
gguccucucgcucguuuag

SEQ ID NO: 1648382 - RNA, 19 nt, Artificial Sequence
  Description of Artificial Sequence: Synthetic oligonucleotide
gugaacagugccacgccca

SEQ ID NO: 1648383 - RNA, 19 nt, Artificial Sequence
  Description of Artificial Sequence: Synthetic oligonucleotide
auaugacacuguggcaacu

SEQ ID NO: 1648384 - RNA, 19 nt, Artificial Sequence
  Description of Artificial Sequence: Synthetic oligonucleotide
ucgcugugaagguuccuuu

SEQ ID NO: 1648385 - RNA, 19 nt, Artificial Sequence
  Description of Artificial Sequence: Synthetic oligonucleotide
cagguguacugugugccug

SEQ ID NO: 1648386 - RNA, 19 nt, Artificial Sequence
  Description of Artificial Sequence: Synthetic oligonucleotide
caaaggucccucuacggau

SEQ ID NO: 1648387 - RNA, 19 nt, Artificial Sequence
  Description of Artificial Sequence: Synthetic oligonucleotide
cuggggcaccaaugaagag

SEQ ID NO: 1648388 - RNA, 19 nt, Artificial Sequence
  Description of Artificial Sequence: Synthetic oligonucleotide
gaugcucccuuuguuuaaa

SEQ ID NO: 1648389 - RNA, 19 nt, Artificial Sequence
  Description of Artificial Sequence: Synthetic oligonucleotide
  modified_base (4)..(4): a, c, u, g, unknown or other
cccngguucgguccucucg

SEQ ID NO: 1648390 - RNA, 19 nt, Artificial Sequence
  Description of Artificial Sequence: Synthetic oligonucleotide
guccucucgcucguuuagg

SEQ ID NO: 1648391 - RNA, 19 nt, Artificial Sequence
  Description of Artificial Sequence: Synthetic oligonucleotide
gggaauaccgcggcggcug

SEQ ID NO: 1648392 - RNA, 19 nt, Artificial Sequence
  Description of Artificial Sequence: Synthetic oligonucleotide
ggcagccgugcauagggug

SEQ ID NO: 1648393 - RNA, 19 nt, Artificial Sequence
  Description of Artificial Sequence: Synthetic oligonucleotide
cugccggaaaagcacaaua

SEQ ID NO: 1648394 - RNA, 19 nt, Artificial Sequence
  Description of Artificial Sequence: Synthetic oligonucleotide
cuggguacaccuugcaggu

SEQ ID NO: 1648395 - RNA, 19 nt, Artificial Sequence
  Description of Artificial Sequence: Synthetic oligonucleotide
gaucaggcaucgggcuggg

SEQ ID NO: 1648396 - RNA, 19 nt, Artificial Sequence
  Description of Artificial Sequence: Synthetic oligonucleotide
uccuuucgaaggagacauc

SEQ ID NO: 1648397 - RNA, 19 nt, Artificial Sequence
  Description of Artificial Sequence: Synthetic oligonucleotide
ggcugugcaaguccccaug

SEQ ID NO: 1648398 - RNA, 19 nt, Artificial Sequence
  Description of Artificial Sequence: Synthetic oligonucleotide
caccucccgggccucacag

SEQ ID NO: 1648399 - RNA, 19 nt, Artificial Sequence
  Description of Artificial Sequence: Synthetic oligonucleotide
cuggaacggguagugacca

SEQ ID NO: 1648400 - RNA, 19 nt, Artificial Sequence
  Description of Artificial Sequence: Synthetic oligonucleotide
gccacuagucgcugugaag

SEQ ID NO: 1648401 - RNA, 19 nt, Artificial Sequence
  Description of Artificial Sequence: Synthetic oligonucleotide
uugccagaguaggaugguc

SEQ ID NO: 1648402 - RNA, 19 nt, Artificial Sequence
  Description of Artificial Sequence: Synthetic oligonucleotide
ggucccucuacggaucuug

SEQ ID NO: 1648403 - RNA, 19 nt, Artificial Sequence
  Description of Artificial Sequence: Synthetic oligonucleotide
cucucacgguugcugaaga

SEQ ID NO: 1648404 - RNA, 19 nt, Artificial Sequence
  Description of Artificial Sequence: Synthetic oligonucleotide
gguguggcugccuugcucu

SEQ ID NO: 1648405 - RNA, 19 nt, Artificial Sequence
  Description of Artificial Sequence: Synthetic oligonucleotide
agagcaaagccggcucaga

SEQ ID NO: 1648406 - RNA, 19 nt, Artificial Sequence
  Description of Artificial Sequence: Synthetic oligonucleotide
acuuaaggguuagcucggu

SEQ ID NO: 1648407 - RNA, 19 nt, Artificial Sequence
  Description of Artificial Sequence: Synthetic oligonucleotide
agagcccaacaggaugucu

SEQ ID NO: 1648408 - RNA, 19 nt, Artificial Sequence
  Description of Artificial Sequence: Synthetic oligonucleotide
agccucguccucucacggu

SEQ ID NO: 1648409 - RNA, 19 nt, Artificial Sequence
  Description of Artificial Sequence: Synthetic oligonucleotide
guaucucuggucccacgua

SEQ ID NO: 1648410 - RNA, 19 nt, Artificial Sequence
  Description of Artificial Sequence: Synthetic oligonucleotide
caacucugguaugaaaugu

SEQ ID NO: 1648411 - RNA, 19 nt, Artificial Sequence
  Description of Artificial Sequence: Synthetic oligonucleotide
ucgguccucucgcucguuu

SEQ ID NO: 1648412 - RNA, 19 nt, Artificial Sequence
  Description of Artificial Sequence: Synthetic oligonucleotide
ggucuucgagaagaaggug

SEQ ID NO: 1648413 - RNA, 19 nt, Artificial Sequence
  Description of Artificial Sequence: Synthetic oligonucleotide
ggcagggcaugcaugcuug

SEQ ID NO: 1648414 - RNA, 19 nt, Artificial Sequence
  Description of Artificial Sequence: Synthetic oligonucleotide
cagccgugcauagggugcc

SEQ ID NO: 1648415 - RNA, 19 nt, Artificial Sequence
  Description of Artificial Sequence: Synthetic oligonucleotide
cugcuuugccagaguagga

SEQ ID NO: 1648416 - RNA, 19 nt, Artificial Sequence
  Description of Artificial Sequence: Synthetic oligonucleotide
cagucuuugccugacuugu

SEQ ID NO: 1648417 - RNA, 19 nt, Artificial Sequence
  Description of Artificial Sequence: Synthetic oligonucleotide
guuaucacacaagcauccu

SEQ ID NO: 1648418 - RNA, 19 nt, Artificial Sequence
  Description of Artificial Sequence: Synthetic oligonucleotide
acaucggaucaggcaucgg

SEQ ID NO: 1648419 - RNA, 19 nt, Artificial Sequence
  Description of Artificial Sequence: Synthetic oligonucleotide
cugaggggccaguagggua

SEQ ID NO: 1648420 - RNA, 19 nt, Artificial Sequence
  Description of Artificial Sequence: Synthetic oligonucleotide
agccccaacucgccuuccu

SEQ ID NO: 1648421 - RNA, 19 nt, Artificial Sequence
  Description of Artificial Sequence: Synthetic oligonucleotide
ccauagcagccaucugccg

SEQ ID NO: 1648422 - RNA, 19 nt, Artificial Sequence
  Description of Artificial Sequence: Synthetic oligonucleotide
gaugcccggggccacuagu

SEQ ID NO: 1648423 - RNA, 19 nt, Artificial Sequence
  Description of Artificial Sequence: Synthetic oligonucleotide
gucccucuacggaucuugc

SEQ ID NO: 1648424 - RNA, 19 nt, Artificial Sequence
  Description of Artificial Sequence: Synthetic oligonucleotide
cccaggucggguugcgagg

SEQ ID NO: 1648425 - RNA, 19 nt, Artificial Sequence
  Description of Artificial Sequence: Synthetic oligonucleotide
cccaacucgccuuccucag

SEQ ID NO: 1648426 - RNA, 19 nt, Artificial Sequence
  Description of Artificial Sequence: Synthetic oligonucleotide
caacucagccagcaaggua

SEQ ID NO: 1648427 - RNA, 19 nt, Artificial Sequence
  Description of Artificial Sequence: Synthetic oligonucleotide
gugugccaccauagcagcc

SEQ ID NO: 1648428 - RNA, 19 nt, Artificial Sequence
  Description of Artificial Sequence: Synthetic oligonucleotide
cacgcaagacaagcccaug

SEQ ID NO: 1648429 - RNA, 19 nt, Artificial Sequence
  Description of Artificial Sequence: Synthetic oligonucleotide
cugauggguaggcagccgu

SEQ ID NO: 1648430 - RNA, 19 nt, Artificial Sequence
  Description of Artificial Sequence: Synthetic oligonucleotide
gaugggccacgugcugaug

SEQ ID NO: 1648431 - RNA, 19 nt, Artificial Sequence
  Description of Artificial Sequence: Synthetic oligonucleotide
caucuggggcaccaaugaa

SEQ ID NO: 1648432 - RNA, 19 nt, Artificial Sequence
  Description of Artificial Sequence: Synthetic oligonucleotide
cggaaaagcacaauagccu

SEQ ID NO: 1648433 - RNA, 19 nt, Artificial Sequence
  Description of Artificial Sequence: Synthetic oligonucleotide
ggaauaccgcggcggcugc

SEQ ID NO: 1648434 - RNA, 19 nt, Artificial Sequence
  Description of Artificial Sequence: Synthetic oligonucleotide
ugggaccaccuggucaguc

SEQ ID NO: 1648435 - RNA, 19 nt, Artificial Sequence
  Description of Artificial Sequence: Synthetic oligonucleotide
gcuagucuguggaggggag

SEQ ID NO: 1648436 - RNA, 19 nt, Artificial Sequence
  Description of Artificial Sequence: Synthetic oligonucleotide
cagggcaugcaugcuuguc

SEQ ID NO: 1648437 - RNA, 19 nt, Artificial Sequence
  Description of Artificial Sequence: Synthetic oligonucleotide
cgaaggagacaucggauca

SEQ ID NO: 1648438 - RNA, 19 nt, Artificial Sequence
  Description of Artificial Sequence: Synthetic oligonucleotide
guacaccuugcagguguac

SEQ ID NO: 1648439 - RNA, 19 nt, Artificial Sequence
  Description of Artificial Sequence: Synthetic oligonucleotide
gcucgggaauaccgcggcg

SEQ ID NO: 1648440 - RNA, 19 nt, Artificial Sequence
  Description of Artificial Sequence: Synthetic oligonucleotide
gagagcccaacaggauguc

SEQ ID NO: 1648441 - RNA, 19 nt, Artificial Sequence
  Description of Artificial Sequence: Synthetic oligonucleotide
auaccgcggcggcugcgca

SEQ ID NO: 1648442 - RNA, 19 nt, Artificial Sequence
  Description of Artificial Sequence: Synthetic oligonucleotide
ccucucgcucguuuaggac

SEQ ID NO: 1648443 - RNA, 19 nt, Artificial Sequence
  Description of Artificial Sequence: Synthetic oligonucleotide
cucuggucccacguaggca

SEQ ID NO: 1648444 - RNA, 19 nt, Artificial Sequence
  Description of Artificial Sequence: Synthetic oligonucleotide
gucugcgggaugggccacg

SEQ ID NO: 1648445 - RNA, 19 nt, Artificial Sequence
  Description of Artificial Sequence: Synthetic oligonucleotide
agggugagugaggccuuug

SEQ ID NO: 1648446 - RNA, 19 nt, Artificial Sequence
  Description of Artificial Sequence: Synthetic oligonucleotide
ucggguugcgaggggccac

SEQ ID NO: 1648447 - RNA, 19 nt, Artificial Sequence
  Description of Artificial Sequence: Synthetic oligonucleotide
ggcuagucuguggagggga

SEQ ID NO: 1648448 - RNA, 19 nt, Artificial Sequence
  Description of Artificial Sequence: Synthetic oligonucleotide
ggcccgguagguguggcug

SEQ ID NO: 1648449 - RNA, 19 nt, Artificial Sequence
  Description of Artificial Sequence: Synthetic oligonucleotide
gguugcgaggggccacagc

SEQ ID NO: 1648450 - RNA, 19 nt, Artificial Sequence
  Description of Artificial Sequence: Synthetic oligonucleotide
gcccaacaggaugucugcg

SEQ ID NO: 1648451 - RNA, 19 nt, Artificial Sequence
  Description of Artificial Sequence: Synthetic oligonucleotide
gcgacacagcuugagguca

SEQ ID NO: 1648452 - RNA, 19 nt, Artificial Sequence
  Description of Artificial Sequence: Synthetic oligonucleotide
gaguccuggaacggguagu

SEQ ID NO: 1648453 - RNA, 19 nt, Artificial Sequence
  Description of Artificial Sequence: Synthetic oligonucleotide
cucuacggaucuugccaaa

SEQ ID NO: 1648454 - RNA, 19 nt, Artificial Sequence
  Description of Artificial Sequence: Synthetic oligonucleotide
ccuugcucuuguuccaaga

SEQ ID NO: 1648455 - RNA, 19 nt, Artificial Sequence
  Description of Artificial Sequence: Synthetic oligonucleotide
gucgggagcugaguaucuc

SEQ ID NO: 1648456 - RNA, 19 nt, Artificial Sequence
  Description of Artificial Sequence: Synthetic oligonucleotide
ccucucacgguugcugaag

SEQ ID NO: 1648457 - RNA, 19 nt, Artificial Sequence
  Description of Artificial Sequence: Synthetic oligonucleotide
cgggcucgggaauaccgcg

SEQ ID NO: 1648458 - RNA, 19 nt, Artificial Sequence
  Description of Artificial Sequence: Synthetic oligonucleotide
cagaguccuggaacgggua

SEQ ID NO: 1648459 - RNA, 19 nt, Artificial Sequence
  Description of Artificial Sequence: Synthetic oligonucleotide
gccaaagagcaaagccggc

SEQ ID NO: 1648460 - RNA, 19 nt, Artificial Sequence
  Description of Artificial Sequence: Synthetic oligonucleotide
ugucugcgggaugggccac

SEQ ID NO: 1648461 - RNA, 19 nt, Artificial Sequence
  Description of Artificial Sequence: Synthetic oligonucleotide
ucguccucucacgguugcu

SEQ ID NO: 1648462 - RNA, 19 nt, Artificial Sequence
  Description of Artificial Sequence: Synthetic oligonucleotide
ccgugcauagggugccagc

SEQ ID NO: 1648463 - RNA, 19 nt, Artificial Sequence
  Description of Artificial Sequence: Synthetic oligonucleotide
ggucggguugcgaggggcc

SEQ ID NO: 1648464 - RNA, 19 nt, Artificial Sequence
  Description of Artificial Sequence: Synthetic oligonucleotide
ugugcccagcguggaugcu

SEQ ID NO: 1648465 - RNA, 19 nt, Artificial Sequence
  Description of Artificial Sequence: Synthetic oligonucleotide
ggccaacucugguaugaaa

SEQ ID NO: 1648466 - RNA, 19 nt, Artificial Sequence
  Description of Artificial Sequence: Synthetic oligonucleotide
agucgcugugaagguuccu

SEQ ID NO: 1648467 - RNA, 19 nt, Artificial Sequence
  Description of Artificial Sequence: Synthetic oligonucleotide
  modified_base (11)..(11): a, c, u, g, unknown or other
aggguggcccngguucggu

SEQ ID NO: 1648468 - RNA, 19 nt, Artificial Sequence
  Description of Artificial Sequence: Synthetic oligonucleotide
aggccaacucugguaugaa

SEQ ID NO: 1648469 - RNA, 19 nt, Artificial Sequence
  Description of Artificial Sequence: Synthetic oligonucleotide
gucgucugguccaguuauc

SEQ ID NO: 1648470 - RNA, 19 nt, Artificial Sequence
  Description of Artificial Sequence: Synthetic oligonucleotide
  modified_base (10)..(10): a, c, u, g, unknown or other
ggguggcccngguucgguc

SEQ ID NO: 1648471 - RNA, 19 nt, Artificial Sequence
  Description of Artificial Sequence: Synthetic oligonucleotide
cccagcguggaugcuggcc

SEQ ID NO: 1648472 - RNA, 19 nt, Artificial Sequence
  Description of Artificial Sequence: Synthetic oligonucleotide
gucgcugugaagguuccuu

SEQ ID NO: 1648473 - RNA, 19 nt, Artificial Sequence
  Description of Artificial Sequence: Synthetic oligonucleotide
cuggggcugauaggccuuc

SEQ ID NO: 1648474 - RNA, 19 nt, Artificial Sequence
  Description of Artificial Sequence: Synthetic oligonucleotide
gggaugggccacgugcuga

SEQ ID NO: 1648475 - RNA, 19 nt, Artificial Sequence
  Description of Artificial Sequence: Synthetic oligonucleotide
gucggguugcgaggggcca

SEQ ID NO: 1648476 - RNA, 19 nt, Artificial Sequence
  Description of Artificial Sequence: Synthetic oligonucleotide
ggcaugcaugcuuguccca

SEQ ID NO: 1648477 - RNA, 19 nt, Artificial Sequence
  Description of Artificial Sequence: Synthetic oligonucleotide
gucccacagagagucgucu

SEQ ID NO: 1648478 - RNA, 19 nt, Artificial Sequence
  Description of Artificial Sequence: Synthetic oligonucleotide
cacguaggcagggcaugca

SEQ ID NO: 1648479 - RNA, 19 nt, Artificial Sequence
  Description of Artificial Sequence: Synthetic oligonucleotide
ggaggggagacaaggcugu

SEQ ID NO: 1648480 - RNA, 19 nt, Artificial Sequence
  Description of Artificial Sequence: Synthetic oligonucleotide
ccacguaggcagggcaugc

SEQ ID NO: 1648481 - RNA, 19 nt, Artificial Sequence
  Description of Artificial Sequence: Synthetic oligonucleotide
ggaugcccggggccacuag

SEQ ID NO: 1648482 - RNA, 19 nt, Artificial Sequence
  Description of Artificial Sequence: Synthetic oligonucleotide
gggaccaccuggucagucu

SEQ ID NO: 1648483 - RNA, 19 nt, Artificial Sequence
  Description of Artificial Sequence: Synthetic oligonucleotide
gccccaacucgccuuccuc

SEQ ID NO: 1648484 - RNA, 19 nt, Artificial Sequence
  Description of Artificial Sequence: Synthetic oligonucleotide
ccaucugggaccaccuggu

SEQ ID NO: 1648485 - RNA, 19 nt, Artificial Sequence
  Description of Artificial Sequence: Synthetic oligonucleotide
  modified_base (7)..(7): a, c, u, g, unknown or other
uggcccngguucgguccuc

SEQ ID NO: 1648486 - RNA, 19 nt, Artificial Sequence
  Description of Artificial Sequence: Synthetic oligonucleotide
cccacguaggcagggcaug

SEQ ID NO: 1648487 - RNA, 19 nt, Artificial Sequence
  Description of Artificial Sequence: Synthetic oligonucleotide
ggggccacagcaggugaca

SEQ ID NO: 1648488 - RNA, 19 nt, Artificial Sequence
  Description of Artificial Sequence: Synthetic oligonucleotide
cugcgggaugggccacgug

SEQ ID NO: 1648489 - RNA, 19 nt, Artificial Sequence
  Description of Artificial Sequence: Synthetic oligonucleotide
  modified_base (8)..(8): a, c, u, g, unknown or other
guggcccngguucgguccu

SEQ ID NO: 1648490 - RNA, 19 nt, Artificial Sequence
  Description of Artificial Sequence: Synthetic oligonucleotide
cgacacagcuugaggucac

SEQ ID NO: 1648491 - RNA, 19 nt, Artificial Sequence
  Description of Artificial Sequence: Synthetic oligonucleotide
ccugggaguauaugacacu

SEQ ID NO: 1648492 - RNA, 19 nt, Artificial Sequence
  Description of Artificial Sequence: Synthetic oligonucleotide
  modified_base (2)..(2): a, c, u, g, unknown or other
cngguucgguccucucgcu

SEQ ID NO: 1648493 - RNA, 19 nt, Artificial Sequence
  Description of Artificial Sequence: Synthetic oligonucleotide
uucgguccucucgcucguu

SEQ ID NO: 1648494 - RNA, 19 nt, Artificial Sequence
  Description of Artificial Sequence: Synthetic oligonucleotide
gcaacucagccagcaaggu

SEQ ID NO: 1648495 - RNA, 19 nt, Artificial Sequence
  Description of Artificial Sequence: Synthetic oligonucleotide
gccucguccucucacgguu

SEQ ID NO: 1648496 - RNA, 19 nt, Artificial Sequence
  Description of Artificial Sequence: Synthetic oligonucleotide
gguacucaauucacagcuu

SEQ ID NO: 1648497 - RNA, 19 nt, Artificial Sequence
  Description of Artificial Sequence: Synthetic oligonucleotide
gucccaggucggguugcga

SEQ ID NO: 1648498 - RNA, 19 nt, Artificial Sequence
  Description of Artificial Sequence: Synthetic oligonucleotide
ggguugcgaggggccacag

SEQ ID NO: 1648499 - RNA, 19 nt, Artificial Sequence
  Description of Artificial Sequence: Synthetic oligonucleotide
gagagucgucugguccagu

SEQ ID NO: 1648500 - RNA, 19 nt, Artificial Sequence
  Description of Artificial Sequence: Synthetic oligonucleotide
ccucgggcucgggaauacc

SEQ ID NO: 1648501 - RNA, 19 nt, Artificial Sequence
  Description of Artificial Sequence: Synthetic oligonucleotide
gccugacuugugguccuga

SEQ ID NO: 1648502 - RNA, 19 nt, Artificial Sequence
  Description of Artificial Sequence: Synthetic oligonucleotide
gcugaggggccaguagggu

SEQ ID NO: 1648503 - RNA, 19 nt, Artificial Sequence
  Description of Artificial Sequence: Synthetic oligonucleotide
gccucgggcucgggaauac

SEQ ID NO: 1648504 - RNA, 19 nt, Artificial Sequence
  Description of Artificial Sequence: Synthetic oligonucleotide
cccuaaccauacagcccca

SEQ ID NO: 1648505 - RNA, 19 nt, Artificial Sequence
  Description of Artificial Sequence: Synthetic oligonucleotide
  modified_base (5)..(5): a, c, u, g, unknown or other
gcccngguucgguccucuc

SEQ ID NO: 1648506 - RNA, 19 nt, Artificial Sequence
  Description of Artificial Sequence: Synthetic oligonucleotide
gcccagcguggaugcuggc

SEQ ID NO: 1648507 - RNA, 19 nt, Artificial Sequence
  Description of Artificial Sequence: Synthetic oligonucleotide
cgcaagacaagcccauguu

SEQ ID NO: 1648508 - RNA, 19 nt, Artificial Sequence
  Description of Artificial Sequence: Synthetic oligonucleotide
cagcaagguauggcuguuu

SEQ ID NO: 1648509 - RNA, 19 nt, Artificial Sequence
  Description of Artificial Sequence: Synthetic oligonucleotide
caucgggcuggggcugaua

SEQ ID NO: 1648510 - RNA, 19 nt, Artificial Sequence
  Description of Artificial Sequence: Synthetic oligonucleotide
gcgaggggccacagcaggu

SEQ ID NO: 1648511 - RNA, 19 nt, Artificial Sequence
  Description of Artificial Sequence: Synthetic oligonucleotide
cgguccucucgcucguuua

SEQ ID NO: 1648512 - RNA, 19 nt, Artificial Sequence
  Description of Artificial Sequence: Synthetic oligonucleotide
  modified_base (6)..(6): a, c, u, g, unknown or other
ggcccngguucgguccucu

SEQ ID NO: 1648513 - RNA, 19 nt, Artificial Sequence
  Description of Artificial Sequence: Synthetic oligonucleotide
cggguugcgaggggccaca

SEQ ID NO: 1648514 - RNA, 19 nt, Artificial Sequence
  Description of Artificial Sequence: Synthetic oligonucleotide
cgggaauaccgcggcggcu

SEQ ID NO: 1648515 - RNA, 19 nt, Artificial Sequence
  Description of Artificial Sequence: Synthetic oligonucleotide
  modified_base (1)..(1): a, c, u, g, unknown or other
ngguucgguccucucgcuc

SEQ ID NO: 1648516 - RNA, 19 nt, Artificial Sequence
  Description of Artificial Sequence: Synthetic oligonucleotide
agaauagucauuccaaagg

SEQ ID NO: 1648517 - RNA, 19 nt, Artificial Sequence
  Description of Artificial Sequence: Synthetic oligonucleotide
aagaaugcccuuuaaaucu

SEQ ID NO: 1648518 - RNA, 19 nt, Artificial Sequence
  Description of Artificial Sequence: Synthetic oligonucleotide
cuauacaggggaaucaucc

SEQ ID NO: 1648519 - RNA, 19 nt, Artificial Sequence
  Description of Artificial Sequence: Synthetic oligonucleotide
gagagagugagagagagag

SEQ ID NO: 1648520 - RNA, 19 nt, Artificial Sequence
  Description of Artificial Sequence: Synthetic oligonucleotide
ugucgcuucuaaaagaaug

SEQ ID NO: 1648521 - RNA, 19 nt, Artificial Sequence
  Description of Artificial Sequence: Synthetic oligonucleotide
uucaaugacagcguaaggc

SEQ ID NO: 1648522 - RNA, 19 nt, Artificial Sequence
  Description of Artificial Sequence: Synthetic oligonucleotide
gagagagagagugagagag

SEQ ID NO: 1648523 - RNA, 19 nt, Artificial Sequence
  Description of Artificial Sequence: Synthetic oligonucleotide
gagagugagagagagagag

SEQ ID NO: 1648524 - RNA, 19 nt, Artificial Sequence
  Description of Artificial Sequence: Synthetic oligonucleotide
uuaagguacagccacccca

SEQ ID NO: 1648525 - RNA, 19 nt, Artificial Sequence
  Description of Artificial Sequence: Synthetic oligonucleotide
aaacuggacaccucuuggg

SEQ ID NO: 1648526 - RNA, 19 nt, Artificial Sequence
  Description of Artificial Sequence: Synthetic oligonucleotide
auagucauuccaaaggugg

SEQ ID NO: 1648527 - RNA, 19 nt, Artificial Sequence
  Description of Artificial Sequence: Synthetic oligonucleotide
aaggcgagguaacacuggc

SEQ ID NO: 1648528 - RNA, 19 nt, Artificial Sequence
  Description of Artificial Sequence: Synthetic oligonucleotide
ucaaugacagcguaaggca

SEQ ID NO: 1648529 - RNA, 19 nt, Artificial Sequence
  Description of Artificial Sequence: Synthetic oligonucleotide
uagaauagucauuccaaag

SEQ ID NO: 1648530 - RNA, 19 nt, Artificial Sequence
  Description of Artificial Sequence: Synthetic oligonucleotide
ucauacacggucucuaggc

SEQ ID NO: 1648531 - RNA, 19 nt, Artificial Sequence
  Description of Artificial Sequence: Synthetic oligonucleotide
uaaggcacaccacacagga

SEQ ID NO: 1648532 - RNA, 19 nt, Artificial Sequence
  Description of Artificial Sequence: Synthetic oligonucleotide
ugcccuuuaaaucuucacc

SEQ ID NO: 1648533 - RNA, 19 nt, Artificial Sequence
  Description of Artificial Sequence: Synthetic oligonucleotide
gagagagagagggagaggg

SEQ ID NO: 1648534 - RNA, 19 nt, Artificial Sequence
  Description of Artificial Sequence: Synthetic oligonucleotide
auggccucaggauaagccc

SEQ ID NO: 1648535 - RNA, 19 nt, Artificial Sequence
  Description of Artificial Sequence: Synthetic oligonucleotide
ugaucaucgagcugguucc

SEQ ID NO: 1648536 - RNA, 19 nt, Artificial Sequence
  Description of Artificial Sequence: Synthetic oligonucleotide
gagagagagagagugagag

SEQ ID NO: 1648537 - RNA, 19 nt, Artificial Sequence
  Description of Artificial Sequence: Synthetic oligonucleotide
gaucuuagaauagucauuc

SEQ ID NO: 1648538 - RNA, 19 nt, Artificial Sequence
  Description of Artificial Sequence: Synthetic oligonucleotide
uaacggacugcacagcucc

SEQ ID NO: 1648539 - RNA, 19 nt, Artificial Sequence
  Description of Artificial Sequence: Synthetic oligonucleotide
ucucccgacgacaaacugg

SEQ ID NO: 1648540 - RNA, 19 nt, Artificial Sequence
  Description of Artificial Sequence: Synthetic oligonucleotide
cuacaagaccccuagcugc

SEQ ID NO: 1648541 - RNA, 19 nt, Artificial Sequence
  Description of Artificial Sequence: Synthetic oligonucleotide
gcucaaauaguauugcagg

SEQ ID NO: 1648542 - RNA, 19 nt, Artificial Sequence
  Description of Artificial Sequence: Synthetic oligonucleotide
aaagggcacaguguuaguc

SEQ ID NO: 1648543 - RNA, 19 nt, Artificial Sequence
  Description of Artificial Sequence: Synthetic oligonucleotide
uaccuuaagguacagccac

SEQ ID NO: 1648544 - RNA, 19 nt, Artificial Sequence
  Description of Artificial Sequence: Synthetic oligonucleotide
aggauaagcccugacaagg

SEQ ID NO: 1648545 - RNA, 19 nt, Artificial Sequence
  Description of Artificial Sequence: Synthetic oligonucleotide
augaucuuagaauagucau

SEQ ID NO: 1648546 - RNA, 19 nt, Artificial Sequence
  Description of Artificial Sequence: Synthetic oligonucleotide
acacccagccauuagaugu

SEQ ID NO: 1648547 - RNA, 19 nt, Artificial Sequence
  Description of Artificial Sequence: Synthetic oligonucleotide
uucuuagcucccuugagcu

SEQ ID NO: 1648548 - RNA, 19 nt, Artificial Sequence
  Description of Artificial Sequence: Synthetic oligonucleotide
uagucauuccaaagguggg

SEQ ID NO: 1648549 - RNA, 19 nt, Artificial Sequence
  Description of Artificial Sequence: Synthetic oligonucleotide
gauaagcccugacaagggg

SEQ ID NO: 1648550 - RNA, 19 nt, Artificial Sequence
  Description of Artificial Sequence: Synthetic oligonucleotide
uccuuaacggacugcacag

SEQ ID NO: 1648551 - RNA, 19 nt, Artificial Sequence
  Description of Artificial Sequence: Synthetic oligonucleotide
agacgcaugacuugaagcu

SEQ ID NO: 1648552 - RNA, 19 nt, Artificial Sequence
  Description of Artificial Sequence: Synthetic oligonucleotide
gacagcguaaggcacacac

SEQ ID NO: 1648553 - RNA, 19 nt, Artificial Sequence
  Description of Artificial Sequence: Synthetic oligonucleotide
aacgacggcagcgauccgc

SEQ ID NO: 1648554 - RNA, 19 nt, Artificial Sequence
  Description of Artificial Sequence: Synthetic oligonucleotide
acuacaagaccccuagcug

SEQ ID NO: 1648555 - RNA, 19 nt, Artificial Sequence
  Description of Artificial Sequence: Synthetic oligonucleotide
ucuaaaagaaugcccuuua

SEQ ID NO: 1648556 - RNA, 19 nt, Artificial Sequence
  Description of Artificial Sequence: Synthetic oligonucleotide
uaagcccugacaaggggag

SEQ ID NO: 1648557 - RNA, 19 nt, Artificial Sequence
  Description of Artificial Sequence: Synthetic oligonucleotide
aacgacugcacagaggggu

SEQ ID NO: 1648558 - RNA, 19 nt, Artificial Sequence
  Description of Artificial Sequence: Synthetic oligonucleotide
uggggcacaaggucaaagg

SEQ ID NO: 1648559 - RNA, 19 nt, Artificial Sequence
  Description of Artificial Sequence: Synthetic oligonucleotide
gagagagagugagagagag

SEQ ID NO: 1648560 - RNA, 19 nt, Artificial Sequence
  Description of Artificial Sequence: Synthetic oligonucleotide
aauagucauuccaaaggug

SEQ ID NO: 1648561 - RNA, 19 nt, Artificial Sequence
  Description of Artificial Sequence: Synthetic oligonucleotide
uuccugucgcuucuaaaag

SEQ ID NO: 1648562 - RNA, 19 nt, Artificial Sequence
  Description of Artificial Sequence: Synthetic oligonucleotide
cuuagaauagucauuccaa

SEQ ID NO: 1648563 - RNA, 19 nt, Artificial Sequence
  Description of Artificial Sequence: Synthetic oligonucleotide
gugacuacaagaccccuag

SEQ ID NO: 1648564 - RNA, 19 nt, Artificial Sequence
  Description of Artificial Sequence: Synthetic oligonucleotide
gaacuucucauacacgguc

SEQ ID NO: 1648565 - RNA, 19 nt, Artificial Sequence
  Description of Artificial Sequence: Synthetic oligonucleotide
cuucuuagcucccuugagc

SEQ ID NO: 1648566 - RNA, 19 nt, Artificial Sequence
  Description of Artificial Sequence: Synthetic oligonucleotide
gaugacaucggcgaacgac

SEQ ID NO: 1648567 - RNA, 19 nt, Artificial Sequence
  Description of Artificial Sequence: Synthetic oligonucleotide
augacuugaagcugcuaag

SEQ ID NO: 1648568 - RNA, 19 nt, Artificial Sequence
  Description of Artificial Sequence: Synthetic oligonucleotide
uaagguacagccaccccac

SEQ ID NO: 1648569 - RNA, 19 nt, Artificial Sequence
  Description of Artificial Sequence: Synthetic oligonucleotide
uacaccauccucguggggc

SEQ ID NO: 1648570 - RNA, 19 nt, Artificial Sequence
  Description of Artificial Sequence: Synthetic oligonucleotide
aguauccccuccaucauac

SEQ ID NO: 1648571 - RNA, 19 nt, Artificial Sequence
  Description of Artificial Sequence: Synthetic oligonucleotide
auacaggggaaucauccug

SEQ ID NO: 1648572 - RNA, 19 nt, Artificial Sequence
  Description of Artificial Sequence: Synthetic oligonucleotide
aggaccagaaucuuccaga

SEQ ID NO: 1648573 - RNA, 19 nt, Artificial Sequence
  Description of Artificial Sequence: Synthetic oligonucleotide
cagccauuagaugugaggc

SEQ ID NO: 1648574 - RNA, 19 nt, Artificial Sequence
  Description of Artificial Sequence: Synthetic oligonucleotide
cuagcugcuauacagggga

SEQ ID NO: 1648575 - RNA, 19 nt, Artificial Sequence
  Description of Artificial Sequence: Synthetic oligonucleotide
aagcugcuaaggcacacca

SEQ ID NO: 1648576 - RNA, 19 nt, Artificial Sequence
  Description of Artificial Sequence: Synthetic oligonucleotide
agugugacuacaagacccc

SEQ ID NO: 1648577 - RNA, 19 nt, Artificial Sequence
  Description of Artificial Sequence: Synthetic oligonucleotide
gaauagucauuccaaaggu

SEQ ID NO: 1648578 - RNA, 19 nt, Artificial Sequence
  Description of Artificial Sequence: Synthetic oligonucleotide
gagugagagagagagaguc

SEQ ID NO: 1648579 - RNA, 19 nt, Artificial Sequence
  Description of Artificial Sequence: Synthetic oligonucleotide
gugaucaucgagcugguuc

SEQ ID NO: 1648580 - RNA, 19 nt, Artificial Sequence
  Description of Artificial Sequence: Synthetic oligonucleotide
ggcgagguaacacuggcgg

SEQ ID NO: 1648581 - RNA, 19 nt, Artificial Sequence
  Description of Artificial Sequence: Synthetic oligonucleotide
gagagagagagaguccagg

SEQ ID NO: 1648582 - RNA, 19 nt, Artificial Sequence
  Description of Artificial Sequence: Synthetic oligonucleotide
aacacccagccauuagaug

SEQ ID NO: 1648583 - RNA, 19 nt, Artificial Sequence
  Description of Artificial Sequence: Synthetic oligonucleotide
uauacaggggaaucauccu

SEQ ID NO: 1648584 - RNA, 19 nt, Artificial Sequence
  Description of Artificial Sequence: Synthetic oligonucleotide
ucggcgaacgacugcacag

SEQ ID NO: 1648585 - RNA, 19 nt, Artificial Sequence
  Description of Artificial Sequence: Synthetic oligonucleotide
accacugauguaguggccg

SEQ ID NO: 1648586 - RNA, 19 nt, Artificial Sequence
  Description of Artificial Sequence: Synthetic oligonucleotide
uucagacucucccuguccu

SEQ ID NO: 1648587 - RNA, 19 nt, Artificial Sequence
  Description of Artificial Sequence: Synthetic oligonucleotide
aggggagagagagagagug

SEQ ID NO: 1648588 - RNA, 19 nt, Artificial Sequence
  Description of Artificial Sequence: Synthetic oligonucleotide
ucgccaaccccggugaugg

SEQ ID NO: 1648589 - RNA, 19 nt, Artificial Sequence
  Description of Artificial Sequence: Synthetic oligonucleotide
aagguacagccaccccacc

SEQ ID NO: 1648590 - RNA, 19 nt, Artificial Sequence
  Description of Artificial Sequence: Synthetic oligonucleotide
auccuggugaucucccgac

SEQ ID NO: 1648591 - RNA, 19 nt, Artificial Sequence
  Description of Artificial Sequence: Synthetic oligonucleotide
agugagagagagagagucc

SEQ ID NO: 1648592 - RNA, 19 nt, Artificial Sequence
  Description of Artificial Sequence: Synthetic oligonucleotide
cuaaggcacaccacacagg

SEQ ID NO: 1648593 - RNA, 19 nt, Artificial Sequence
  Description of Artificial Sequence: Synthetic oligonucleotide
agagagagagaguccaggu

SEQ ID NO: 1648594 - RNA, 19 nt, Artificial Sequence
  Description of Artificial Sequence: Synthetic oligonucleotide
guauugcaggccuugcuug

SEQ ID NO: 1648595 - RNA, 19 nt, Artificial Sequence
  Description of Artificial Sequence: Synthetic oligonucleotide
uggccgaugacaucggcga

SEQ ID NO: 1648596 - RNA, 19 nt, Artificial Sequence
  Description of Artificial Sequence: Synthetic oligonucleotide
ggugaaugaucuuagaaua

SEQ ID NO: 1648597 - RNA, 19 nt, Artificial Sequence
  Description of Artificial Sequence: Synthetic oligonucleotide
auaccugcagugugacuac

SEQ ID NO: 1648598 - RNA, 19 nt, Artificial Sequence
  Description of Artificial Sequence: Synthetic oligonucleotide
acggcggugaucaucgagc

SEQ ID NO: 1648599 - RNA, 19 nt, Artificial Sequence
  Description of Artificial Sequence: Synthetic oligonucleotide
aguauugcaggccuugcuu

SEQ ID NO: 1648600 - RNA, 19 nt, Artificial Sequence
  Description of Artificial Sequence: Synthetic oligonucleotide
gucgcuucuaaaagaaugc

SEQ ID NO: 1648601 - RNA, 19 nt, Artificial Sequence
  Description of Artificial Sequence: Synthetic oligonucleotide
cgaacgacugcacagaggg

SEQ ID NO: 1648602 - RNA, 19 nt, Artificial Sequence
  Description of Artificial Sequence: Synthetic oligonucleotide
ugaucucccgacgacaaac

SEQ ID NO: 1648603 - RNA, 19 nt, Artificial Sequence
  Description of Artificial Sequence: Synthetic oligonucleotide
ucugccgauagauggagua

SEQ ID NO: 1648604 - RNA, 19 nt, Artificial Sequence
  Description of Artificial Sequence: Synthetic oligonucleotide
uccagagccggacacugga

SEQ ID NO: 1648605 - RNA, 19 nt, Artificial Sequence
  Description of Artificial Sequence: Synthetic oligonucleotide
gacuacaagaccccuagcu

SEQ ID NO: 1648606 - RNA, 19 nt, Artificial Sequence
  Description of Artificial Sequence: Synthetic oligonucleotide
ugagagagagagaguccag

SEQ ID NO: 1648607 - RNA, 19 nt, Artificial Sequence
  Description of Artificial Sequence: Synthetic oligonucleotide
aaacugacuguugaguguu

SEQ ID NO: 1648608 - RNA, 19 nt, Artificial Sequence
  Description of Artificial Sequence: Synthetic oligonucleotide
ugugaggcuugccaguauc

SEQ ID NO: 1648609 - RNA, 19 nt, Artificial Sequence
  Description of Artificial Sequence: Synthetic oligonucleotide
ccaucauaccuuaagguac

SEQ ID NO: 1648610 - RNA, 19 nt, Artificial Sequence
  Description of Artificial Sequence: Synthetic oligonucleotide
agcgauccgcccuccaugg

SEQ ID NO: 1648611 - RNA, 19 nt, Artificial Sequence
  Description of Artificial Sequence: Synthetic oligonucleotide
uacaagaccccuagcugcu

SEQ ID NO: 1648612 - RNA, 19 nt, Artificial Sequence
  Description of Artificial Sequence: Synthetic oligonucleotide
cauacacggucucuaggcc

SEQ ID NO: 1648613 - RNA, 19 nt, Artificial Sequence
  Description of Artificial Sequence: Synthetic oligonucleotide
ugcuaaggcacaccacaca

SEQ ID NO: 1648614 - RNA, 19 nt, Artificial Sequence
  Description of Artificial Sequence: Synthetic oligonucleotide
uccugucgcuucuaaaaga

SEQ ID NO: 1648615 - RNA, 19 nt, Artificial Sequence
  Description of Artificial Sequence: Synthetic oligonucleotide
gagggauaccugcagugug

SEQ ID NO: 1648616 - RNA, 19 nt, Artificial Sequence
  Description of Artificial Sequence: Synthetic oligonucleotide
ucauuccaaagguggguug

SEQ ID NO: 1648617 - RNA, 19 nt, Artificial Sequence
  Description of Artificial Sequence: Synthetic oligonucleotide
ucaucgagcugguucccag

SEQ ID NO: 1648618 - RNA, 19 nt, Artificial Sequence
  Description of Artificial Sequence: Synthetic oligonucleotide
acgcaugacuugaagcugc

SEQ ID NO: 1648619 - RNA, 19 nt, Artificial Sequence
  Description of Artificial Sequence: Synthetic oligonucleotide
caaugacagcguaaggcac

SEQ ID NO: 1648620 - RNA, 19 nt, Artificial Sequence
  Description of Artificial Sequence: Synthetic oligonucleotide
ugacuguugaguguuuccu

SEQ ID NO: 1648621 - RNA, 19 nt, Artificial Sequence
  Description of Artificial Sequence: Synthetic oligonucleotide
uaguauugcaggccuugcu

SEQ ID NO: 1648622 - RNA, 19 nt, Artificial Sequence
  Description of Artificial Sequence: Synthetic oligonucleotide
agcacggcggugaucaucg

SEQ ID NO: 1648623 - RNA, 19 nt, Artificial Sequence
  Description of Artificial Sequence: Synthetic oligonucleotide
cuucaaugacagcguaagg

SEQ ID NO: 1648624 - RNA, 19 nt, Artificial Sequence
  Description of Artificial Sequence: Synthetic oligonucleotide
cagccuggaaaccacgagc

SEQ ID NO: 1648625 - RNA, 19 nt, Artificial Sequence
  Description of Artificial Sequence: Synthetic oligonucleotide
uguucgguuccacaccauc

SEQ ID NO: 1648626 - RNA, 19 nt, Artificial Sequence
  Description of Artificial Sequence: Synthetic oligonucleotide
ucgcuucuaaaagaaugcc

SEQ ID NO: 1648627 - RNA, 19 nt, Artificial Sequence
  Description of Artificial Sequence: Synthetic oligonucleotide
ggaggggagagagagagag

SEQ ID NO: 1648628 - RNA, 19 nt, Artificial Sequence
  Description of Artificial Sequence: Synthetic oligonucleotide
ugaagcgucgaccgcugga

SEQ ID NO: 1648629 - RNA, 19 nt, Artificial Sequence
  Description of Artificial Sequence: Synthetic oligonucleotide
caaggcgagguaacacugg

SEQ ID NO: 1648630 - RNA, 19 nt, Artificial Sequence
  Description of Artificial Sequence: Synthetic oligonucleotide
ucuggugaaugaucuuaga

SEQ ID NO: 1648631 - RNA, 19 nt, Artificial Sequence
  Description of Artificial Sequence: Synthetic oligonucleotide
aguggccgaugacaucggc

SEQ ID NO: 1648632 - RNA, 19 nt, Artificial Sequence
  Description of Artificial Sequence: Synthetic oligonucleotide
uuaacggacugcacagcuc

SEQ ID NO: 1648633 - RNA, 19 nt, Artificial Sequence
  Description of Artificial Sequence: Synthetic oligonucleotide
cuuaagguacagccacccc

SEQ ID NO: 1648634 - RNA, 19 nt, Artificial Sequence
  Description of Artificial Sequence: Synthetic oligonucleotide
ugugacuacaagaccccua

SEQ ID NO: 1648635 - RNA, 19 nt, Artificial Sequence
  Description of Artificial Sequence: Synthetic oligonucleotide
uccuggugaucucccgacg

SEQ ID NO: 1648636 - RNA, 19 nt, Artificial Sequence
  Description of Artificial Sequence: Synthetic oligonucleotide
guuguucgguuccacacca

SEQ ID NO: 1648637 - RNA, 19 nt, Artificial Sequence
  Description of Artificial Sequence: Synthetic oligonucleotide
ugacaucggcgaacgacug

SEQ ID NO: 1648638 - RNA, 19 nt, Artificial Sequence
  Description of Artificial Sequence: Synthetic oligonucleotide
agcaacacccagccauuag

SEQ ID NO: 1648639 - RNA, 19 nt, Artificial Sequence
  Description of Artificial Sequence: Synthetic oligonucleotide
ugccgauagauggaguaca

SEQ ID NO: 1648640 - RNA, 19 nt, Artificial Sequence
  Description of Artificial Sequence: Synthetic oligonucleotide
ggaacagacaugcccacac

SEQ ID NO: 1648641 - RNA, 19 nt, Artificial Sequence
  Description of Artificial Sequence: Synthetic oligonucleotide
uccuucaaugacagcguaa

SEQ ID NO: 1648642 - RNA, 19 nt, Artificial Sequence
  Description of Artificial Sequence: Synthetic oligonucleotide
accccggugaugguggccc

SEQ ID NO: 1648643 - RNA, 19 nt, Artificial Sequence
  Description of Artificial Sequence: Synthetic oligonucleotide
uggagguacugccuccgca

SEQ ID NO: 1648644 - RNA, 19 nt, Artificial Sequence
  Description of Artificial Sequence: Synthetic oligonucleotide
agccauuagaugugaggcu

SEQ ID NO: 1648645 - RNA, 19 nt, Artificial Sequence
  Description of Artificial Sequence: Synthetic oligonucleotide
ugaggcuugccaguauccc

SEQ ID NO: 1648646 - RNA, 19 nt, Artificial Sequence
  Description of Artificial Sequence: Synthetic oligonucleotide
cucaggauaagcccugaca

SEQ ID NO: 1648647 - RNA, 19 nt, Artificial Sequence
  Description of Artificial Sequence: Synthetic oligonucleotide
caucauaccuuaagguaca

SEQ ID NO: 1648648 - RNA, 19 nt, Artificial Sequence
  Description of Artificial Sequence: Synthetic oligonucleotide
ucauaccuuaagguacagc

SEQ ID NO: 1648649 - RNA, 19 nt, Artificial Sequence
  Description of Artificial Sequence: Synthetic oligonucleotide
augacagcguaaggcacac

SEQ ID NO: 1648650 - RNA, 19 nt, Artificial Sequence
  Description of Artificial Sequence: Synthetic oligonucleotide
aagcgucgaccgcuggauc

SEQ ID NO: 1648651 - RNA, 19 nt, Artificial Sequence
  Description of Artificial Sequence: Synthetic oligonucleotide
agagagagagagugagaga

SEQ ID NO: 1648652 - RNA, 19 nt, Artificial Sequence
  Description of Artificial Sequence: Synthetic oligonucleotide
agaccccuagcugcuauac

SEQ ID NO: 1648653 - RNA, 19 nt, Artificial Sequence
  Description of Artificial Sequence: Synthetic oligonucleotide
caaauaguauugcaggccu

SEQ ID NO: 1648654 - RNA, 19 nt, Artificial Sequence
  Description of Artificial Sequence: Synthetic oligonucleotide
ccuccaucauaccuuaagg

SEQ ID NO: 1648655 - RNA, 19 nt, Artificial Sequence
  Description of Artificial Sequence: Synthetic oligonucleotide
ucguguucacggaacuccu

SEQ ID NO: 1648656 - RNA, 19 nt, Artificial Sequence
  Description of Artificial Sequence: Synthetic oligonucleotide
cauuagaugugaggcuugc

SEQ ID NO: 1648657 - RNA, 19 nt, Artificial Sequence
  Description of Artificial Sequence: Synthetic oligonucleotide
gacgcaugacuugaagcug

SEQ ID NO: 1648658 - RNA, 19 nt, Artificial Sequence
  Description of Artificial Sequence: Synthetic oligonucleotide
agcccugacaaggggaggg

SEQ ID NO: 1648659 - RNA, 19 nt, Artificial Sequence
  Description of Artificial Sequence: Synthetic oligonucleotide
gugagagagagagagucca

SEQ ID NO: 1648660 - RNA, 19 nt, Artificial Sequence
  Description of Artificial Sequence: Synthetic oligonucleotide
ccgacgacaaacuggacac

SEQ ID NO: 1648661 - RNA, 19 nt, Artificial Sequence
  Description of Artificial Sequence: Synthetic oligonucleotide
cucccgacgacaaacugga

SEQ ID NO: 1648662 - RNA, 19 nt, Artificial Sequence
  Description of Artificial Sequence: Synthetic oligonucleotide
ugacuacaagaccccuagc

SEQ ID NO: 1648663 - RNA, 19 nt, Artificial Sequence
  Description of Artificial Sequence: Synthetic oligonucleotide
agcgucgaccgcuggauca

SEQ ID NO: 1648664 - RNA, 19 nt, Artificial Sequence
  Description of Artificial Sequence: Synthetic oligonucleotide
aggcggacagaguuguugu

SEQ ID NO: 1648665 - RNA, 19 nt, Artificial Sequence
  Description of Artificial Sequence: Synthetic oligonucleotide
acaucggcgaacgacugca

SEQ ID NO: 1648666 - RNA, 19 nt, Artificial Sequence
  Description of Artificial Sequence: Synthetic oligonucleotide
gccaguauccccuccauca

SEQ ID NO: 1648667 - RNA, 19 nt, Artificial Sequence
  Description of Artificial Sequence: Synthetic oligonucleotide
agucauuccaaaggugggu

SEQ ID NO: 1648668 - RNA, 19 nt, Artificial Sequence
  Description of Artificial Sequence: Synthetic oligonucleotide
gggagagagagagagugag

SEQ ID NO: 1648669 - RNA, 19 nt, Artificial Sequence
  Description of Artificial Sequence: Synthetic oligonucleotide
uggguuguucgguuccaca

SEQ ID NO: 1648670 - RNA, 19 nt, Artificial Sequence
  Description of Artificial Sequence: Synthetic oligonucleotide
gacaucggcgaacgacugc

SEQ ID NO: 1648671 - RNA, 19 nt, Artificial Sequence
  Description of Artificial Sequence: Synthetic oligonucleotide
uuuccacaaacugacuguu

SEQ ID NO: 1648672 - RNA, 19 nt, Artificial Sequence
  Description of Artificial Sequence: Synthetic oligonucleotide
auaagcccugacaagggga

SEQ ID NO: 1648673 - RNA, 19 nt, Artificial Sequence
  Description of Artificial Sequence: Synthetic oligonucleotide
aguaggugggccucguguu

SEQ ID NO: 1648674 - RNA, 19 nt, Artificial Sequence
  Description of Artificial Sequence: Synthetic oligonucleotide
auaccuuaagguacagcca

SEQ ID NO: 1648675 - RNA, 19 nt, Artificial Sequence
  Description of Artificial Sequence: Synthetic oligonucleotide
aucucccgacgacaaacug

SEQ ID NO: 1648676 - RNA, 19 nt, Artificial Sequence
  Description of Artificial Sequence: Synthetic oligonucleotide
acgacggcagcgauccgcc

SEQ ID NO: 1648677 - RNA, 19 nt, Artificial Sequence
  Description of Artificial Sequence: Synthetic oligonucleotide
uaguggccgaugacaucgg

SEQ ID NO: 1648678 - RNA, 19 nt, Artificial Sequence
  Description of Artificial Sequence: Synthetic oligonucleotide
guggccgaugacaucggcg

SEQ ID NO: 1648679 - RNA, 19 nt, Artificial Sequence
  Description of Artificial Sequence: Synthetic oligonucleotide
ugcaggcggacagaguugu

SEQ ID NO: 1648680 - RNA, 19 nt, Artificial Sequence
  Description of Artificial Sequence: Synthetic oligonucleotide
cuaaaagaaugcccuuuaa

SEQ ID NO: 1648681 - RNA, 19 nt, Artificial Sequence
  Description of Artificial Sequence: Synthetic oligonucleotide
cucguggggcacaagguca

SEQ ID NO: 1648682 - RNA, 19 nt, Artificial Sequence
  Description of Artificial Sequence: Synthetic oligonucleotide
acggcagcgauccgcccuc

SEQ ID NO: 1648683 - RNA, 19 nt, Artificial Sequence
  Description of Artificial Sequence: Synthetic oligonucleotide
uggugaucucccgacgaca

SEQ ID NO: 1648684 - RNA, 19 nt, Artificial Sequence
  Description of Artificial Sequence: Synthetic oligonucleotide
caucgagcugguucccagc

SEQ ID NO: 1648685 - RNA, 19 nt, Artificial Sequence
  Description of Artificial Sequence: Synthetic oligonucleotide
ggguuguucgguuccacac

SEQ ID NO: 1648686 - RNA, 19 nt, Artificial Sequence
  Description of Artificial Sequence: Synthetic oligonucleotide
uggcggcaggaacagacau

SEQ ID NO: 1648687 - RNA, 19 nt, Artificial Sequence
  Description of Artificial Sequence: Synthetic oligonucleotide
guacagguggcaaagccaa

SEQ ID NO: 1648688 - RNA, 19 nt, Artificial Sequence
  Description of Artificial Sequence: Synthetic oligonucleotide
aucggcgaacgacugcaca

SEQ ID NO: 1648689 - RNA, 19 nt, Artificial Sequence
  Description of Artificial Sequence: Synthetic oligonucleotide
ucaguaggugggccucgug

SEQ ID NO: 1648690 - RNA, 19 nt, Artificial Sequence
  Description of Artificial Sequence: Synthetic oligonucleotide
caggccuugcuugggaggc

SEQ ID NO: 1648691 - RNA, 19 nt, Artificial Sequence
  Description of Artificial Sequence: Synthetic oligonucleotide
cuuaacggacugcacagcu

SEQ ID NO: 1648692 - RNA, 19 nt, Artificial Sequence
  Description of Artificial Sequence: Synthetic oligonucleotide
ucgaccgcuggaucacccc

SEQ ID NO: 1648693 - RNA, 19 nt, Artificial Sequence
  Description of Artificial Sequence: Synthetic oligonucleotide
gaacgacugcacagagggg

SEQ ID NO: 1648694 - RNA, 19 nt, Artificial Sequence
  Description of Artificial Sequence: Synthetic oligonucleotide
gggguggaacuucucauac

SEQ ID NO: 1648695 - RNA, 19 nt, Artificial Sequence
  Description of Artificial Sequence: Synthetic oligonucleotide
caggcggacagaguuguug

SEQ ID NO: 1648696 - RNA, 19 nt, Artificial Sequence
  Description of Artificial Sequence: Synthetic oligonucleotide
ggaugaacuggcccaacga

SEQ ID NO: 1648697 - RNA, 19 nt, Artificial Sequence
  Description of Artificial Sequence: Synthetic oligonucleotide
cagacaugcccacacucca

SEQ ID NO: 1648698 - RNA, 19 nt, Artificial Sequence
  Description of Artificial Sequence: Synthetic oligonucleotide
ugggccuucugccgauaga

SEQ ID NO: 1648699 - RNA, 19 nt, Artificial Sequence
  Description of Artificial Sequence: Synthetic oligonucleotide
ccuagcugcuauacagggg

SEQ ID NO: 1648700 - RNA, 19 nt, Artificial Sequence
  Description of Artificial Sequence: Synthetic oligonucleotide
aucauaccuuaagguacag

SEQ ID NO: 1648701 - RNA, 19 nt, Artificial Sequence
  Description of Artificial Sequence: Synthetic oligonucleotide
guaaggcacacacuuuccu

SEQ ID NO: 1648702 - RNA, 19 nt, Artificial Sequence
  Description of Artificial Sequence: Synthetic oligonucleotide
uuagcucccuugagcuccu

SEQ ID NO: 1648703 - RNA, 19 nt, Artificial Sequence
  Description of Artificial Sequence: Synthetic oligonucleotide
auguaguggccgaugacau

SEQ ID NO: 1648704 - RNA, 19 nt, Artificial Sequence
  Description of Artificial Sequence: Synthetic oligonucleotide
ugccaguauccccuccauc

SEQ ID NO: 1648705 - RNA, 19 nt, Artificial Sequence
  Description of Artificial Sequence: Synthetic oligonucleotide
acgagcgaccccugcgcag

SEQ ID NO: 1648706 - RNA, 19 nt, Artificial Sequence
  Description of Artificial Sequence: Synthetic oligonucleotide
ccuuaagguacagccaccc

SEQ ID NO: 1648707 - RNA, 19 nt, Artificial Sequence
  Description of Artificial Sequence: Synthetic oligonucleotide
agggauaccugcaguguga

SEQ ID NO: 1648708 - RNA, 19 nt, Artificial Sequence
  Description of Artificial Sequence: Synthetic oligonucleotide
gaucaucgagcugguuccc

SEQ ID NO: 1648709 - RNA, 19 nt, Artificial Sequence
  Description of Artificial Sequence: Synthetic oligonucleotide
cagcgauccgcccuccaug

SEQ ID NO: 1648710 - RNA, 19 nt, Artificial Sequence
  Description of Artificial Sequence: Synthetic oligonucleotide
cccuccaucauaccuuaag

SEQ ID NO: 1648711 - RNA, 19 nt, Artificial Sequence
  Description of Artificial Sequence: Synthetic oligonucleotide
cugccgauagauggaguac

SEQ ID NO: 1648712 - RNA, 19 nt, Artificial Sequence
  Description of Artificial Sequence: Synthetic oligonucleotide
gaugugaggcuugccagua

SEQ ID NO: 1648713 - RNA, 19 nt, Artificial Sequence
  Description of Artificial Sequence: Synthetic oligonucleotide
gacgcuccugccacuggag

SEQ ID NO: 1648714 - RNA, 19 nt, Artificial Sequence
  Description of Artificial Sequence: Synthetic oligonucleotide
ugggccucguguucacgga

SEQ ID NO: 1648715 - RNA, 19 nt, Artificial Sequence
  Description of Artificial Sequence: Synthetic oligonucleotide
ccugcagugugacuacaag

SEQ ID NO: 1648716 - RNA, 19 nt, Artificial Sequence
  Description of Artificial Sequence: Synthetic oligonucleotide
guaggugggccucguguuc

SEQ ID NO: 1648717 - RNA, 19 nt, Artificial Sequence
  Description of Artificial Sequence: Synthetic oligonucleotide
guauccccuccaucauacc

SEQ ID NO: 1648718 - RNA, 19 nt, Artificial Sequence
  Description of Artificial Sequence: Synthetic oligonucleotide
ggcgaacgacugcacagag

SEQ ID NO: 1648719 - RNA, 19 nt, Artificial Sequence
  Description of Artificial Sequence: Synthetic oligonucleotide
agagagagagugagagaga

SEQ ID NO: 1648720 - RNA, 19 nt, Artificial Sequence
  Description of Artificial Sequence: Synthetic oligonucleotide
gcagccuggaaaccacgag

SEQ ID NO: 1648721 - RNA, 19 nt, Artificial Sequence
  Description of Artificial Sequence: Synthetic oligonucleotide
cuacaccauccucgugggg

SEQ ID NO: 1648722 - RNA, 19 nt, Artificial Sequence
  Description of Artificial Sequence: Synthetic oligonucleotide
ugggccgcucaccacugau

SEQ ID NO: 1648723 - RNA, 19 nt, Artificial Sequence
  Description of Artificial Sequence: Synthetic oligonucleotide
cauggcgacgccgagccga

SEQ ID NO: 1648724 - RNA, 19 nt, Artificial Sequence
  Description of Artificial Sequence: Synthetic oligonucleotide
cugcacagagggguggaac

SEQ ID NO: 1648725 - RNA, 19 nt, Artificial Sequence
  Description of Artificial Sequence: Synthetic oligonucleotide
gcugcuauacaggggaauc

SEQ ID NO: 1648726 - RNA, 19 nt, Artificial Sequence
  Description of Artificial Sequence: Synthetic oligonucleotide
agagugagagagagagagu

SEQ ID NO: 1648727 - RNA, 19 nt, Artificial Sequence
  Description of Artificial Sequence: Synthetic oligonucleotide
cugaagcgucgaccgcugg

SEQ ID NO: 1648728 - RNA, 19 nt, Artificial Sequence
  Description of Artificial Sequence: Synthetic oligonucleotide
ggcgacgccgagccgagcc

SEQ ID NO: 1648729 - RNA, 19 nt, Artificial Sequence
  Description of Artificial Sequence: Synthetic oligonucleotide
caggaugccucugggccgc

SEQ ID NO: 1648730 - RNA, 19 nt, Artificial Sequence
  Description of Artificial Sequence: Synthetic oligonucleotide
cacagagggguggaacuuc

SEQ ID NO: 1648731 - RNA, 19 nt, Artificial Sequence
  Description of Artificial Sequence: Synthetic oligonucleotide
cuggagguacugccuccgc

SEQ ID NO: 1648732 - RNA, 19 nt, Artificial Sequence
  Description of Artificial Sequence: Synthetic oligonucleotide
gaccccuagcugcuauaca

SEQ ID NO: 1648733 - RNA, 19 nt, Artificial Sequence
  Description of Artificial Sequence: Synthetic oligonucleotide
ccgaugacaucggcgaacg

SEQ ID NO: 1648734 - RNA, 19 nt, Artificial Sequence
  Description of Artificial Sequence: Synthetic oligonucleotide
agagagagugagagagaga

SEQ ID NO: 1648735 - RNA, 19 nt, Artificial Sequence
  Description of Artificial Sequence: Synthetic oligonucleotide
agagagugagagagagaga

SEQ ID NO: 1648736 - RNA, 19 nt, Artificial Sequence
  Description of Artificial Sequence: Synthetic oligonucleotide
ccugucgcuucuaaaagaa

SEQ ID NO: 1648737 - RNA, 19 nt, Artificial Sequence
  Description of Artificial Sequence: Synthetic oligonucleotide
aucaucgagcugguuccca

SEQ ID NO: 1648738 - RNA, 19 nt, Artificial Sequence
  Description of Artificial Sequence: Synthetic oligonucleotide
ccauuagaugugaggcuug

SEQ ID NO: 1648739 - RNA, 19 nt, Artificial Sequence
  Description of Artificial Sequence: Synthetic oligonucleotide
gccgagccgagccagcagc

SEQ ID NO: 1648740 - RNA, 19 nt, Artificial Sequence
  Description of Artificial Sequence: Synthetic oligonucleotide
acacacuuuccugucgcuu

SEQ ID NO: 1648741 - RNA, 19 nt, Artificial Sequence
  Description of Artificial Sequence: Synthetic oligonucleotide
cagcguaaggcacacacuu

SEQ ID NO: 1648742 - RNA, 19 nt, Artificial Sequence
  Description of Artificial Sequence: Synthetic oligonucleotide
aguccagguugaaaagcaa

SEQ ID NO: 1648743 - RNA, 19 nt, Artificial Sequence
  Description of Artificial Sequence: Synthetic oligonucleotide
cccgacgacaaacuggaca

SEQ ID NO: 1648744 - RNA, 19 nt, Artificial Sequence
  Description of Artificial Sequence: Synthetic oligonucleotide
aaaccacgagcgaccccug

SEQ ID NO: 1648745 - RNA, 19 nt, Artificial Sequence
  Description of Artificial Sequence: Synthetic oligonucleotide
caucggcgaacgacugcac

SEQ ID NO: 1648746 - RNA, 19 nt, Artificial Sequence
  Description of Artificial Sequence: Synthetic oligonucleotide
ccccuuacaguuuuccaca

SEQ ID NO: 1648747 - RNA, 19 nt, Artificial Sequence
  Description of Artificial Sequence: Synthetic oligonucleotide
gugguacagguggcaaagc

SEQ ID NO: 1648748 - RNA, 19 nt, Artificial Sequence
  Description of Artificial Sequence: Synthetic oligonucleotide
uccgcccuccauggcgacg

SEQ ID NO: 1648749 - RNA, 19 nt, Artificial Sequence
  Description of Artificial Sequence: Synthetic oligonucleotide
cgauccgcccuccauggcg

SEQ ID NO: 1648750 - RNA, 19 nt, Artificial Sequence
  Description of Artificial Sequence: Synthetic oligonucleotide
ccggacacuggacuccugc

SEQ ID NO: 1648751 - RNA, 19 nt, Artificial Sequence
  Description of Artificial Sequence: Synthetic oligonucleotide
augugaggcuugccaguau

SEQ ID NO: 1648752 - RNA, 19 nt, Artificial Sequence
  Description of Artificial Sequence: Synthetic oligonucleotide
uaccugcagugugacuaca

SEQ ID NO: 1648753 - RNA, 19 nt, Artificial Sequence
  Description of Artificial Sequence: Synthetic oligonucleotide
gccgauagauggaguacag

SEQ ID NO: 1648754 - RNA, 19 nt, Artificial Sequence
  Description of Artificial Sequence: Synthetic oligonucleotide
aacggacugcacagcuccu

SEQ ID NO: 1648755 - RNA, 19 nt, Artificial Sequence
  Description of Artificial Sequence: Synthetic oligonucleotide
caacacccagccauuagau

SEQ ID NO: 1648756 - RNA, 19 nt, Artificial Sequence
  Description of Artificial Sequence: Synthetic oligonucleotide
gucgaccgcuggaucaccc

SEQ ID NO: 1648757 - RNA, 19 nt, Artificial Sequence
  Description of Artificial Sequence: Synthetic oligonucleotide
caguaggugggccucgugu

SEQ ID NO: 1648758 - RNA, 19 nt, Artificial Sequence
  Description of Artificial Sequence: Synthetic oligonucleotide
gaagcgucgaccgcuggau

SEQ ID NO: 1648759 - RNA, 19 nt, Artificial Sequence
  Description of Artificial Sequence: Synthetic oligonucleotide
gaucucccgacgacaaacu

SEQ ID NO: 1648760 - RNA, 19 nt, Artificial Sequence
  Description of Artificial Sequence: Synthetic oligonucleotide
gucucuaggcccagaucca

SEQ ID NO: 1648761 - RNA, 19 nt, Artificial Sequence
  Description of Artificial Sequence: Synthetic oligonucleotide
cuggcggcaggaacagaca

SEQ ID NO: 1648762 - RNA, 19 nt, Artificial Sequence
  Description of Artificial Sequence: Synthetic oligonucleotide
cucgccaaccccggugaug

SEQ ID NO: 1648763 - RNA, 19 nt, Artificial Sequence
  Description of Artificial Sequence: Synthetic oligonucleotide
gcgaacgacugcacagagg

SEQ ID NO: 1648764 - RNA, 19 nt, Artificial Sequence
  Description of Artificial Sequence: Synthetic oligonucleotide
caaccccggugaugguggc

SEQ ID NO: 1648765 - RNA, 19 nt, Artificial Sequence
  Description of Artificial Sequence: Synthetic oligonucleotide
caggaccagcucgccaacc

SEQ ID NO: 1648766 - RNA, 19 nt, Artificial Sequence
  Description of Artificial Sequence: Synthetic oligonucleotide
gcuauacaggggaaucauc

SEQ ID NO: 1648767 - RNA, 19 nt, Artificial Sequence
  Description of Artificial Sequence: Synthetic oligonucleotide
ccacgagcgaccccugcgc

SEQ ID NO: 1648768 - RNA, 19 nt, Artificial Sequence
  Description of Artificial Sequence: Synthetic oligonucleotide
gagcgaccccugcgcagcc

SEQ ID NO: 1648769 - RNA, 19 nt, Artificial Sequence
  Description of Artificial Sequence: Synthetic oligonucleotide
ucccgacgacaaacuggac

SEQ ID NO: 1648770 - RNA, 19 nt, Artificial Sequence
  Description of Artificial Sequence: Synthetic oligonucleotide
cuggcugcucaaauaguau

SEQ ID NO: 1648771 - RNA, 19 nt, Artificial Sequence
  Description of Artificial Sequence: Synthetic oligonucleotide
aacugacuguugaguguuu

SEQ ID NO: 1648772 - RNA, 19 nt, Artificial Sequence
  Description of Artificial Sequence: Synthetic oligonucleotide
gggauaccugcagugugac

SEQ ID NO: 1648773 - RNA, 19 nt, Artificial Sequence
  Description of Artificial Sequence: Synthetic oligonucleotide
ccgauagauggaguacagc

SEQ ID NO: 1648774 - RNA, 19 nt, Artificial Sequence
  Description of Artificial Sequence: Synthetic oligonucleotide
agcguaaggcacacacuuu

SEQ ID NO: 1648775 - RNA, 19 nt, Artificial Sequence
  Description of Artificial Sequence: Synthetic oligonucleotide
gucauuccaaagguggguu

SEQ ID NO: 1648776 - RNA, 19 nt, Artificial Sequence
  Description of Artificial Sequence: Synthetic oligonucleotide
cucugggccgcucaccacu

SEQ ID NO: 1648777 - RNA, 19 nt, Artificial Sequence
  Description of Artificial Sequence: Synthetic oligonucleotide
caguauccccuccaucaua

SEQ ID NO: 1648778 - RNA, 19 nt, Artificial Sequence
  Description of Artificial Sequence: Synthetic oligonucleotide
ccuuaacggacugcacagc

SEQ ID NO: 1648779 - RNA, 19 nt, Artificial Sequence
  Description of Artificial Sequence: Synthetic oligonucleotide
ccugaagcgucgaccgcug

SEQ ID NO: 1648780 - RNA, 19 nt, Artificial Sequence
  Description of Artificial Sequence: Synthetic oligonucleotide
ggacuccugccugugcagc

SEQ ID NO: 1648781 - RNA, 19 nt, Artificial Sequence
  Description of Artificial Sequence: Synthetic oligonucleotide
ggagagagagagagugaga

SEQ ID NO: 1648782 - RNA, 19 nt, Artificial Sequence
  Description of Artificial Sequence: Synthetic oligonucleotide
ggcggcaggaacagacaug

SEQ ID NO: 1648783 - RNA, 19 nt, Artificial Sequence
  Description of Artificial Sequence: Synthetic oligonucleotide
gccgaugacaucggcgaac

SEQ ID NO: 1648784 - RNA, 19 nt, Artificial Sequence
  Description of Artificial Sequence: Synthetic oligonucleotide
gugaucucccgacgacaaa

SEQ ID NO: 1648785 - RNA, 19 nt, Artificial Sequence
  Description of Artificial Sequence: Synthetic oligonucleotide
guggguuguucgguuccac

SEQ ID NO: 1648786 - RNA, 19 nt, Artificial Sequence
  Description of Artificial Sequence: Synthetic oligonucleotide
ccuggugaucucccgacga

SEQ ID NO: 1648787 - RNA, 19 nt, Artificial Sequence
  Description of Artificial Sequence: Synthetic oligonucleotide
agccggacacuggacuccu

SEQ ID NO: 1648788 - RNA, 19 nt, Artificial Sequence
  Description of Artificial Sequence: Synthetic oligonucleotide
ggcggugaucaucgagcug

SEQ ID NO: 1648789 - RNA, 19 nt, Artificial Sequence
  Description of Artificial Sequence: Synthetic oligonucleotide
gcgacgccgagccgagccg

SEQ ID NO: 1648790 - RNA, 19 nt, Artificial Sequence
  Description of Artificial Sequence: Synthetic oligonucleotide
gccaaccccggugauggug

SEQ ID NO: 1648791 - RNA, 19 nt, Artificial Sequence
  Description of Artificial Sequence: Synthetic oligonucleotide
cacgagcgaccccugcgca

SEQ ID NO: 1648792 - RNA, 19 nt, Artificial Sequence
  Description of Artificial Sequence: Synthetic oligonucleotide
acugcacagagggguggaa

SEQ ID NO: 1648793 - RNA, 19 nt, Artificial Sequence
  Description of Artificial Sequence: Synthetic oligonucleotide
ggcggacagaguuguuguc

SEQ ID NO: 1648794 - RNA, 19 nt, Artificial Sequence
  Description of Artificial Sequence: Synthetic oligonucleotide
caacgacggcagcgauccg

SEQ ID NO: 1648795 - RNA, 19 nt, Artificial Sequence
  Description of Artificial Sequence: Synthetic oligonucleotide
acggacugcacagcuccuu

SEQ ID NO: 1648796 - RNA, 19 nt, Artificial Sequence
  Description of Artificial Sequence: Synthetic oligonucleotide
cccagccauuagaugugag

SEQ ID NO: 1648797 - RNA, 19 nt, Artificial Sequence
  Description of Artificial Sequence: Synthetic oligonucleotide
ccagagccggacacuggac

SEQ ID NO: 1648798 - RNA, 19 nt, Artificial Sequence
  Description of Artificial Sequence: Synthetic oligonucleotide
cccaacgacggcagcgauc

SEQ ID NO: 1648799 - RNA, 19 nt, Artificial Sequence
  Description of Artificial Sequence: Synthetic oligonucleotide
ccgagccgagccagcagcc

SEQ ID NO: 1648800 - RNA, 19 nt, Artificial Sequence
  Description of Artificial Sequence: Synthetic oligonucleotide
aggaggggagagagagaga

SEQ ID NO: 1648801 - RNA, 19 nt, Artificial Sequence
  Description of Artificial Sequence: Synthetic oligonucleotide
cgagguaacacuggcggca

SEQ ID NO: 1648802 - RNA, 19 nt, Artificial Sequence
  Description of Artificial Sequence: Synthetic oligonucleotide
ccacaccaucuugugcucc

SEQ ID NO: 1648803 - RNA, 19 nt, Artificial Sequence
  Description of Artificial Sequence: Synthetic oligonucleotide
acaagaccccuagcugcua

SEQ ID NO: 1648804 - RNA, 19 nt, Artificial Sequence
  Description of Artificial Sequence: Synthetic oligonucleotide
ggggaaucauccuggugau

SEQ ID NO: 1648805 - RNA, 19 nt, Artificial Sequence
  Description of Artificial Sequence: Synthetic oligonucleotide
ggggagagagagagaguga

SEQ ID NO: 1648806 - RNA, 19 nt, Artificial Sequence
  Description of Artificial Sequence: Synthetic oligonucleotide
gaggggagagagagagagu

SEQ ID NO: 1648807 - RNA, 19 nt, Artificial Sequence
  Description of Artificial Sequence: Synthetic oligonucleotide
gggccgcucaccacugaug

SEQ ID NO: 1648808 - RNA, 19 nt, Artificial Sequence
  Description of Artificial Sequence: Synthetic oligonucleotide
gggccuucugccgauagau

SEQ ID NO: 1648809 - RNA, 19 nt, Artificial Sequence
  Description of Artificial Sequence: Synthetic oligonucleotide
caccgaguccaggggcuuc

SEQ ID NO: 1648810 - RNA, 19 nt, Artificial Sequence
  Description of Artificial Sequence: Synthetic oligonucleotide
guacagcacggcggugauc

SEQ ID NO: 1648811 - RNA, 19 nt, Artificial Sequence
  Description of Artificial Sequence: Synthetic oligonucleotide
cguguucacggaacuccuc

SEQ ID NO: 1648812 - RNA, 19 nt, Artificial Sequence
  Description of Artificial Sequence: Synthetic oligonucleotide
cgagcgaccccugcgcagc

SEQ ID NO: 1648813 - RNA, 19 nt, Artificial Sequence
  Description of Artificial Sequence: Synthetic oligonucleotide
gggccucguguucacggaa

SEQ ID NO: 1648814 - RNA, 19 nt, Artificial Sequence
  Description of Artificial Sequence: Synthetic oligonucleotide
ccucguguucacggaacuc

SEQ ID NO: 1648815 - RNA, 19 nt, Artificial Sequence
  Description of Artificial Sequence: Synthetic oligonucleotide
gcccuccauggcgacgccg

SEQ ID NO: 1648816 - RNA, 19 nt, Artificial Sequence
  Description of Artificial Sequence: Synthetic oligonucleotide
cccuuacaguuuuccacaa

SEQ ID NO: 1648817 - RNA, 19 nt, Artificial Sequence
  Description of Artificial Sequence: Synthetic oligonucleotide
aggcaaggcuuggcucagu

SEQ ID NO: 1648818 - RNA, 19 nt, Artificial Sequence
  Description of Artificial Sequence: Synthetic oligonucleotide
ggcugucgaaguccuggcu

SEQ ID NO: 1648819 - RNA, 19 nt, Artificial Sequence
  Description of Artificial Sequence: Synthetic oligonucleotide
gcgucgaccgcuggaucac

SEQ ID NO: 1648820 - RNA, 19 nt, Artificial Sequence
  Description of Artificial Sequence: Synthetic oligonucleotide
gcgauccgcccuccauggc

SEQ ID NO: 1648821 - RNA, 19 nt, Artificial Sequence
  Description of Artificial Sequence: Synthetic oligonucleotide
ggauaccugcagugugacu

SEQ ID NO: 1648822 - RNA, 19 nt, Artificial Sequence
  Description of Artificial Sequence: Synthetic oligonucleotide
gccucguguucacggaacu

SEQ ID NO: 1648823 - RNA, 19 nt, Artificial Sequence
  Description of Artificial Sequence: Synthetic oligonucleotide
cgacgacaaacuggacacc

SEQ ID NO: 1648824 - RNA, 19 nt, Artificial Sequence
  Description of Artificial Sequence: Synthetic oligonucleotide
ccauggcgacgccgagccg

SEQ ID NO: 1648825 - RNA, 19 nt, Artificial Sequence
  Description of Artificial Sequence: Synthetic oligonucleotide
gcagcgauccgcccuccau

SEQ ID NO: 1648826 - RNA, 19 nt, Artificial Sequence
  Description of Artificial Sequence: Synthetic oligonucleotide
ggcagcgauccgcccucca

SEQ ID NO: 1648827 - RNA, 19 nt, Artificial Sequence
  Description of Artificial Sequence: Synthetic oligonucleotide
cugggcgaccugggccuuc

SEQ ID NO: 1648828 - RNA, 19 nt, Artificial Sequence
  Description of Artificial Sequence: Synthetic oligonucleotide
cacuuuccugucgcuucua

SEQ ID NO: 1648829 - RNA, 19 nt, Artificial Sequence
  Description of Artificial Sequence: Synthetic oligonucleotide
cacccagauggaucuucuu

SEQ ID NO: 1648830 - RNA, 19 nt, Artificial Sequence
  Description of Artificial Sequence: Synthetic oligonucleotide
gccucaggauaagcccuga

SEQ ID NO: 1648831 - RNA, 19 nt, Artificial Sequence
  Description of Artificial Sequence: Synthetic oligonucleotide
gcaugacuugaagcugcua

SEQ ID NO: 1648832 - RNA, 19 nt, Artificial Sequence
  Description of Artificial Sequence: Synthetic oligonucleotide
aggaugccucugggccgcu

SEQ ID NO: 1648833 - RNA, 19 nt, Artificial Sequence
  Description of Artificial Sequence: Synthetic oligonucleotide
ccaguauccccuccaucau

SEQ ID NO: 1648834 - RNA, 19 nt, Artificial Sequence
  Description of Artificial Sequence: Synthetic oligonucleotide
gccgcucaccacugaugua

SEQ ID NO: 1648835 - RNA, 19 nt, Artificial Sequence
  Description of Artificial Sequence: Synthetic oligonucleotide
cgucgaccgcuggaucacc

SEQ ID NO: 1648836 - RNA, 19 nt, Artificial Sequence
  Description of Artificial Sequence: Synthetic oligonucleotide
ccgaguccaggggcuucag

SEQ ID NO: 1648837 - RNA, 19 nt, Artificial Sequence
  Description of Artificial Sequence: Synthetic oligonucleotide
cgacggcagcgauccgccc

SEQ ID NO: 1648838 - RNA, 19 nt, Artificial Sequence
  Description of Artificial Sequence: Synthetic oligonucleotide
cggcgaacgacugcacaga

SEQ ID NO: 1648839 - RNA, 19 nt, Artificial Sequence
  Description of Artificial Sequence: Synthetic oligonucleotide
gcacggcggugaucaucga

SEQ ID NO: 1648840 - RNA, 19 nt, Artificial Sequence
  Description of Artificial Sequence: Synthetic oligonucleotide
cuucacccagauggaucuu

SEQ ID NO: 1648841 - RNA, 19 nt, Artificial Sequence
  Description of Artificial Sequence: Synthetic oligonucleotide
gccgagccagcagccugga

SEQ ID NO: 1648842 - RNA, 19 nt, Artificial Sequence
  Description of Artificial Sequence: Synthetic oligonucleotide
cgcaugacuugaagcugcu

SEQ ID NO: 1648843 - RNA, 19 nt, Artificial Sequence
  Description of Artificial Sequence: Synthetic oligonucleotide
ggugaucaucgagcugguu

SEQ ID NO: 1648844 - RNA, 19 nt, Artificial Sequence
  Description of Artificial Sequence: Synthetic oligonucleotide
gcccaacgacggcagcgau

SEQ ID NO: 1648845 - RNA, 19 nt, Artificial Sequence
  Description of Artificial Sequence: Synthetic oligonucleotide
cgcucaccacugauguagu

SEQ ID NO: 1648846 - RNA, 19 nt, Artificial Sequence
  Description of Artificial Sequence: Synthetic oligonucleotide
ccccuccaucauaccuuaa

SEQ ID NO: 1648847 - RNA, 19 nt, Artificial Sequence
  Description of Artificial Sequence: Synthetic oligonucleotide
cgacgccgagccgagccga

SEQ ID NO: 1648848 - RNA, 19 nt, Artificial Sequence
  Description of Artificial Sequence: Synthetic oligonucleotide
cggcagcgauccgcccucc

SEQ ID NO: 1648849 - RNA, 19 nt, Artificial Sequence
  Description of Artificial Sequence: Synthetic oligonucleotide
gcaggcggacagaguuguu

SEQ ID NO: 1648850 - RNA, 19 nt, Artificial Sequence
  Description of Artificial Sequence: Synthetic oligonucleotide
ccaccgaguccaggggcuu

SEQ ID NO: 1648851 - RNA, 19 nt, Artificial Sequence
  Description of Artificial Sequence: Synthetic oligonucleotide
uugucuaugauccagaaag

SEQ ID NO: 1648852 - RNA, 19 nt, Artificial Sequence
  Description of Artificial Sequence: Synthetic oligonucleotide
aaaaugauauacaagaggg

SEQ ID NO: 1648853 - RNA, 19 nt, Artificial Sequence
  Description of Artificial Sequence: Synthetic oligonucleotide
aaugauauacaagaggggc

SEQ ID NO: 1648854 - RNA, 19 nt, Artificial Sequence
  Description of Artificial Sequence: Synthetic oligonucleotide
aguucgaacaaaaugaggc

SEQ ID NO: 1648855 - RNA, 19 nt, Artificial Sequence
  Description of Artificial Sequence: Synthetic oligonucleotide
uuggaagcaacacaguucg

SEQ ID NO: 1648856 - RNA, 19 nt, Artificial Sequence
  Description of Artificial Sequence: Synthetic oligonucleotide
uccauagaaauacucacgg

SEQ ID NO: 1648857 - RNA, 19 nt, Artificial Sequence
  Description of Artificial Sequence: Synthetic oligonucleotide
agagacauaagccaccucg

SEQ ID NO: 1648858 - RNA, 19 nt, Artificial Sequence
  Description of Artificial Sequence: Synthetic oligonucleotide
aucaguaggacccacuacc

SEQ ID NO: 1648859 - RNA, 19 nt, Artificial Sequence
  Description of Artificial Sequence: Synthetic oligonucleotide
ucguucuugauccagaacc

SEQ ID NO: 1648860 - RNA, 19 nt, Artificial Sequence
  Description of Artificial Sequence: Synthetic oligonucleotide
acauaagccaccucggucc

SEQ ID NO: 1648861 - RNA, 19 nt, Artificial Sequence
  Description of Artificial Sequence: Synthetic oligonucleotide
gaagaaaguucuuaggcag

SEQ ID NO: 1648862 - RNA, 19 nt, Artificial Sequence
  Description of Artificial Sequence: Synthetic oligonucleotide
cuuauuauaaagcuugaug

SEQ ID NO: 1648863 - RNA, 19 nt, Artificial Sequence
  Description of Artificial Sequence: Synthetic oligonucleotide
acagguacuaacuugagcu

SEQ ID NO: 1648864 - RNA, 19 nt, Artificial Sequence
  Description of Artificial Sequence: Synthetic oligonucleotide
uauuacuugagauccauga

SEQ ID NO: 1648865 - RNA, 19 nt, Artificial Sequence
  Description of Artificial Sequence: Synthetic oligonucleotide
uacuugagauccaugaacc

SEQ ID NO: 1648866 - RNA, 19 nt, Artificial Sequence
  Description of Artificial Sequence: Synthetic oligonucleotide
guugaacugacugagaugc

SEQ ID NO: 1648867 - RNA, 19 nt, Artificial Sequence
  Description of Artificial Sequence: Synthetic oligonucleotide
agugcugacacucaggaga

SEQ ID NO: 1648868 - RNA, 19 nt, Artificial Sequence
  Description of Artificial Sequence: Synthetic oligonucleotide
aaacgcacugcauaguuga

SEQ ID NO: 1648869 - RNA, 19 nt, Artificial Sequence
  Description of Artificial Sequence: Synthetic oligonucleotide
aaaguucuuaggcagugga

SEQ ID NO: 1648870 - RNA, 19 nt, Artificial Sequence
  Description of Artificial Sequence: Synthetic oligonucleotide
accacguccacuucaaagg

SEQ ID NO: 1648871 - RNA, 19 nt, Artificial Sequence
  Description of Artificial Sequence: Synthetic oligonucleotide
aaccacguccacuucaaag

SEQ ID NO: 1648872 - RNA, 19 nt, Artificial Sequence
  Description of Artificial Sequence: Synthetic oligonucleotide
aauauagagggcucccaug

SEQ ID NO: 1648873 - RNA, 19 nt, Artificial Sequence
  Description of Artificial Sequence: Synthetic oligonucleotide
cauggggauagaaacagcc

SEQ ID NO: 1648874 - RNA, 19 nt, Artificial Sequence
  Description of Artificial Sequence: Synthetic oligonucleotide
uguacagucguucuugauc

SEQ ID NO: 1648875 - RNA, 19 nt, Artificial Sequence
  Description of Artificial Sequence: Synthetic oligonucleotide
aaaugauauacaagagggg

SEQ ID NO: 1648876 - RNA, 19 nt, Artificial Sequence
  Description of Artificial Sequence: Synthetic oligonucleotide
caugaugagaagaaaguuc

SEQ ID NO: 1648877 - RNA, 19 nt, Artificial Sequence
  Description of Artificial Sequence: Synthetic oligonucleotide
gauagaaacagccucggaa

SEQ ID NO: 1648878 - RNA, 19 nt, Artificial Sequence
  Description of Artificial Sequence: Synthetic oligonucleotide
aguucuuaggcaguggacg

SEQ ID NO: 1648879 - RNA, 19 nt, Artificial Sequence
  Description of Artificial Sequence: Synthetic oligonucleotide
ggccguucaauauagaggg

SEQ ID NO: 1648880 - RNA, 19 nt, Artificial Sequence
  Description of Artificial Sequence: Synthetic oligonucleotide
uccuuagagacauaagcca

SEQ ID NO: 1648881 - RNA, 19 nt, Artificial Sequence
  Description of Artificial Sequence: Synthetic oligonucleotide
guacagucguucuugaucc

SEQ ID NO: 1648882 - RNA, 19 nt, Artificial Sequence
  Description of Artificial Sequence: Synthetic oligonucleotide
cuggucacgacaaugaauc

SEQ ID NO: 1648883 - RNA, 19 nt, Artificial Sequence
  Description of Artificial Sequence: Synthetic oligonucleotide
aguaggacccacuaccauc

SEQ ID NO: 1648884 - RNA, 19 nt, Artificial Sequence
  Description of Artificial Sequence: Synthetic oligonucleotide
agauccaugaaccggauau

SEQ ID NO: 1648885 - RNA, 19 nt, Artificial Sequence
  Description of Artificial Sequence: Synthetic oligonucleotide
aguguugagguaaagcaac

SEQ ID NO: 1648886 - RNA, 19 nt, Artificial Sequence
  Description of Artificial Sequence: Synthetic oligonucleotide
ucggaauccauagaaauac

SEQ ID NO: 1648887 - RNA, 19 nt, Artificial Sequence
  Description of Artificial Sequence: Synthetic oligonucleotide
ugucuaugauccagaaagg

SEQ ID NO: 1648888 - RNA, 19 nt, Artificial Sequence
  Description of Artificial Sequence: Synthetic oligonucleotide
guaaccagagcucuugacc

SEQ ID NO: 1648889 - RNA, 19 nt, Artificial Sequence
  Description of Artificial Sequence: Synthetic oligonucleotide
cuuugguugaacacaucgg

SEQ ID NO: 1648890 - RNA, 19 nt, Artificial Sequence
  Description of Artificial Sequence: Synthetic oligonucleotide
augauauacaagaggggcc

SEQ ID NO: 1648891 - RNA, 19 nt, Artificial Sequence
  Description of Artificial Sequence: Synthetic oligonucleotide
augaguguugagguaaagc

SEQ ID NO: 1648892 - RNA, 19 nt, Artificial Sequence
  Description of Artificial Sequence: Synthetic oligonucleotide
uucgaacaaaaugaggcag

SEQ ID NO: 1648893 - RNA, 19 nt, Artificial Sequence
  Description of Artificial Sequence: Synthetic oligonucleotide
aacacaucggcuaaacgug

SEQ ID NO: 1648894 - RNA, 19 nt, Artificial Sequence
  Description of Artificial Sequence: Synthetic oligonucleotide
ugcuaauuauuacuugaga

SEQ ID NO: 1648895 - RNA, 19 nt, Artificial Sequence
  Description of Artificial Sequence: Synthetic oligonucleotide
ugaacacaucggcuaaacg

SEQ ID NO: 1648896 - RNA, 19 nt, Artificial Sequence
  Description of Artificial Sequence: Synthetic oligonucleotide
auagaaacagccucggaau

SEQ ID NO: 1648897 - RNA, 19 nt, Artificial Sequence
  Description of Artificial Sequence: Synthetic oligonucleotide
augccaagugaaaacagcc

SEQ ID NO: 1648898 - RNA, 19 nt, Artificial Sequence
  Description of Artificial Sequence: Synthetic oligonucleotide
uaccauaucucugccaggg

SEQ ID NO: 1648899 - RNA, 19 nt, Artificial Sequence
  Description of Artificial Sequence: Synthetic oligonucleotide
aaacaggagucugggaugg

SEQ ID NO: 1648900 - RNA, 19 nt, Artificial Sequence
  Description of Artificial Sequence: Synthetic oligonucleotide
uccaguugaacugacugag

SEQ ID NO: 1648901 - RNA, 19 nt, Artificial Sequence
  Description of Artificial Sequence: Synthetic oligonucleotide
agaacagccaugccaagug

SEQ ID NO: 1648902 - RNA, 19 nt, Artificial Sequence
  Description of Artificial Sequence: Synthetic oligonucleotide
uguaugaguguugagguaa

SEQ ID NO: 1648903 - RNA, 19 nt, Artificial Sequence
  Description of Artificial Sequence: Synthetic oligonucleotide
cuugcuaauuauuacuuga

SEQ ID NO: 1648904 - RNA, 19 nt, Artificial Sequence
  Description of Artificial Sequence: Synthetic oligonucleotide
cuuggagcguucuaccacg

SEQ ID NO: 1648905 - RNA, 19 nt, Artificial Sequence
  Description of Artificial Sequence: Synthetic oligonucleotide
gaacacaucggcuaaacgu

SEQ ID NO: 1648906 - RNA, 19 nt, Artificial Sequence
  Description of Artificial Sequence: Synthetic oligonucleotide
acgacaaugaauccagcca

SEQ ID NO: 1648907 - RNA, 19 nt, Artificial Sequence
  Description of Artificial Sequence: Synthetic oligonucleotide
ugcauaguugaguagcagu

SEQ ID NO: 1648908 - RNA, 19 nt, Artificial Sequence
  Description of Artificial Sequence: Synthetic oligonucleotide
cucacggauacgcucaucc

SEQ ID NO: 1648909 - RNA, 19 nt, Artificial Sequence
  Description of Artificial Sequence: Synthetic oligonucleotide
caugccaagugaaaacagc

SEQ ID NO: 1648910 - RNA, 19 nt, Artificial Sequence
  Description of Artificial Sequence: Synthetic oligonucleotide
acagccucggaauccauag

SEQ ID NO: 1648911 - RNA, 19 nt, Artificial Sequence
  Description of Artificial Sequence: Synthetic oligonucleotide
aacauagggguguccuuag

SEQ ID NO: 1648912 - RNA, 19 nt, Artificial Sequence
  Description of Artificial Sequence: Synthetic oligonucleotide
gaagcaacacaguucgaac

SEQ ID NO: 1648913 - RNA, 19 nt, Artificial Sequence
  Description of Artificial Sequence: Synthetic oligonucleotide
ugauauacaagaggggccu

SEQ ID NO: 1648914 - RNA, 19 nt, Artificial Sequence
  Description of Artificial Sequence: Synthetic oligonucleotide
uggggauagaaacagccuc

SEQ ID NO: 1648915 - RNA, 19 nt, Artificial Sequence
  Description of Artificial Sequence: Synthetic oligonucleotide
cacuucacaccuuugguug

SEQ ID NO: 1648916 - RNA, 19 nt, Artificial Sequence
  Description of Artificial Sequence: Synthetic oligonucleotide
uugaguagcagucgacaca

SEQ ID NO: 1648917 - RNA, 19 nt, Artificial Sequence
  Description of Artificial Sequence: Synthetic oligonucleotide
gaaccggauauccaugaug

SEQ ID NO: 1648918 - RNA, 19 nt, Artificial Sequence
  Description of Artificial Sequence: Synthetic oligonucleotide
uagcagucgacacacugug

SEQ ID NO: 1648919 - RNA, 19 nt, Artificial Sequence
  Description of Artificial Sequence: Synthetic oligonucleotide
cacgacaaugaauccagcc

SEQ ID NO: 1648920 - RNA, 19 nt, Artificial Sequence
  Description of Artificial Sequence: Synthetic oligonucleotide
uaaacgugauguaaucuua

SEQ ID NO: 1648921 - RNA, 19 nt, Artificial Sequence
  Description of Artificial Sequence: Synthetic oligonucleotide
uuauuacuugagauccaug

SEQ ID NO: 1648922 - RNA, 19 nt, Artificial Sequence
  Description of Artificial Sequence: Synthetic oligonucleotide
gucuaugauccagaaaggg

SEQ ID NO: 1648923 - RNA, 19 nt, Artificial Sequence
  Description of Artificial Sequence: Synthetic oligonucleotide
acaguaaacaccugguguu

SEQ ID NO: 1648924 - RNA, 19 nt, Artificial Sequence
  Description of Artificial Sequence: Synthetic oligonucleotide
auucguuguacagucguuc

SEQ ID NO: 1648925 - RNA, 19 nt, Artificial Sequence
  Description of Artificial Sequence: Synthetic oligonucleotide
uagggguguccuuagagac

SEQ ID NO: 1648926 - RNA, 19 nt, Artificial Sequence
  Description of Artificial Sequence: Synthetic oligonucleotide
aaagcaacauagggguguc

SEQ ID NO: 1648927 - RNA, 19 nt, Artificial Sequence
  Description of Artificial Sequence: Synthetic oligonucleotide
aaguucuuaggcaguggac

SEQ ID NO: 1648928 - RNA, 19 nt, Artificial Sequence
  Description of Artificial Sequence: Synthetic oligonucleotide
gacagguacuaacuugagc

SEQ ID NO: 1648929 - RNA, 19 nt, Artificial Sequence
  Description of Artificial Sequence: Synthetic oligonucleotide
guccuuagagacauaagcc

SEQ ID NO: 1648930 - RNA, 19 nt, Artificial Sequence
  Description of Artificial Sequence: Synthetic oligonucleotide
gguaaagcaacauaggggu

SEQ ID NO: 1648931 - RNA, 19 nt, Artificial Sequence
  Description of Artificial Sequence: Synthetic oligonucleotide
ucaguaggacccacuacca

SEQ ID NO: 1648932 - RNA, 19 nt, Artificial Sequence
  Description of Artificial Sequence: Synthetic oligonucleotide
caguucgaacaaaaugagg

SEQ ID NO: 1648933 - RNA, 19 nt, Artificial Sequence
  Description of Artificial Sequence: Synthetic oligonucleotide
cauaguugaguagcagucg

SEQ ID NO: 1648934 - RNA, 19 nt, Artificial Sequence
  Description of Artificial Sequence: Synthetic oligonucleotide
ugccaagugaaaacagcca

SEQ ID NO: 1648935 - RNA, 19 nt, Artificial Sequence
  Description of Artificial Sequence: Synthetic oligonucleotide
ugagcugauugucuuccug

SEQ ID NO: 1648936 - RNA, 19 nt, Artificial Sequence
  Description of Artificial Sequence: Synthetic oligonucleotide
gaugguguaccauaucucu

SEQ ID NO: 1648937 - RNA, 19 nt, Artificial Sequence
  Description of Artificial Sequence: Synthetic oligonucleotide
gucacgacaaugaauccag

SEQ ID NO: 1648938 - RNA, 19 nt, Artificial Sequence
  Description of Artificial Sequence: Synthetic oligonucleotide
gagacauaagccaccucgg

SEQ ID NO: 1648939 - RNA, 19 nt, Artificial Sequence
  Description of Artificial Sequence: Synthetic oligonucleotide
gagguaaacaggagucugg

SEQ ID NO: 1648940 - RNA, 19 nt, Artificial Sequence
  Description of Artificial Sequence: Synthetic oligonucleotide
uccuugcuaauuauuacuu

SEQ ID NO: 1648941 - RNA, 19 nt, Artificial Sequence
  Description of Artificial Sequence: Synthetic oligonucleotide
uggagccaaaaugauauac

SEQ ID NO: 1648942 - RNA, 19 nt, Artificial Sequence
  Description of Artificial Sequence: Synthetic oligonucleotide
auuacuugagauccaugaa

SEQ ID NO: 1648943 - RNA, 19 nt, Artificial Sequence
  Description of Artificial Sequence: Synthetic oligonucleotide
auagguagggcggcggccc

SEQ ID NO: 1648944 - RNA, 19 nt, Artificial Sequence
  Description of Artificial Sequence: Synthetic oligonucleotide
cuaguucaaauuuaguugu

SEQ ID NO: 1648945 - RNA, 19 nt, Artificial Sequence
  Description of Artificial Sequence: Synthetic oligonucleotide
agaaauacucacggauacg

SEQ ID NO: 1648946 - RNA, 19 nt, Artificial Sequence
  Description of Artificial Sequence: Synthetic oligonucleotide
aaggcuguaugaguguuga

SEQ ID NO: 1648947 - RNA, 19 nt, Artificial Sequence
  Description of Artificial Sequence: Synthetic oligonucleotide
auagggguguccuuagaga

SEQ ID NO: 1648948 - RNA, 19 nt, Artificial Sequence
  Description of Artificial Sequence: Synthetic oligonucleotide
uugacccaaccacaggugu

SEQ ID NO: 1648949 - RNA, 19 nt, Artificial Sequence
  Description of Artificial Sequence: Synthetic oligonucleotide
aacaccugguguuccagau

SEQ ID NO: 1648950 - RNA, 19 nt, Artificial Sequence
  Description of Artificial Sequence: Synthetic oligonucleotide
cucaguugcagagaacagc

SEQ ID NO: 1648951 - RNA, 19 nt, Artificial Sequence
  Description of Artificial Sequence: Synthetic oligonucleotide
ugguugaacacaucggcua

SEQ ID NO: 1648952 - RNA, 19 nt, Artificial Sequence
  Description of Artificial Sequence: Synthetic oligonucleotide
agaaccacaaccacgucca

SEQ ID NO: 1648953 - RNA, 19 nt, Artificial Sequence
  Description of Artificial Sequence: Synthetic oligonucleotide
cacacuguggacuugccca

SEQ ID NO: 1648954 - RNA, 19 nt, Artificial Sequence
  Description of Artificial Sequence: Synthetic oligonucleotide
guacaguaaacaccuggug

SEQ ID NO: 1648955 - RNA, 19 nt, Artificial Sequence
  Description of Artificial Sequence: Synthetic oligonucleotide
uucguuguacagucguucu

SEQ ID NO: 1648956 - RNA, 19 nt, Artificial Sequence
  Description of Artificial Sequence: Synthetic oligonucleotide
aguacaguaaacaccuggu

SEQ ID NO: 1648957 - RNA, 19 nt, Artificial Sequence
  Description of Artificial Sequence: Synthetic oligonucleotide
aucccuacauucccgccgg

SEQ ID NO: 1648958 - RNA, 19 nt, Artificial Sequence
  Description of Artificial Sequence: Synthetic oligonucleotide
uacgcucaucccuacauuc

SEQ ID NO: 1648959 - RNA, 19 nt, Artificial Sequence
  Description of Artificial Sequence: Synthetic oligonucleotide
ugaauccagccacacuugu

SEQ ID NO: 1648960 - RNA, 19 nt, Artificial Sequence
  Description of Artificial Sequence: Synthetic oligonucleotide
guugaguagcagucgacac

SEQ ID NO: 1648961 - RNA, 19 nt, Artificial Sequence
  Description of Artificial Sequence: Synthetic oligonucleotide
cuuuucaauucguuguaca

SEQ ID NO: 1648962 - RNA, 19 nt, Artificial Sequence
  Description of Artificial Sequence: Synthetic oligonucleotide
acaguucgaacaaaaugag

SEQ ID NO: 1648963 - RNA, 19 nt, Artificial Sequence
  Description of Artificial Sequence: Synthetic oligonucleotide
guaaacaggagucugggau

SEQ ID NO: 1648964 - RNA, 19 nt, Artificial Sequence
  Description of Artificial Sequence: Synthetic oligonucleotide
guucgaacaaaaugaggca

SEQ ID NO: 1648965 - RNA, 19 nt, Artificial Sequence
  Description of Artificial Sequence: Synthetic oligonucleotide
ugacagguacuaacuugag

SEQ ID NO: 1648966 - RNA, 19 nt, Artificial Sequence
  Description of Artificial Sequence: Synthetic oligonucleotide
ugaaaacagccaccuuggc

SEQ ID NO: 1648967 - RNA, 19 nt, Artificial Sequence
  Description of Artificial Sequence: Synthetic oligonucleotide
aauuauuacuugagaucca

SEQ ID NO: 1648968 - RNA, 19 nt, Artificial Sequence
  Description of Artificial Sequence: Synthetic oligonucleotide
ucuugucaucauuggauuc

SEQ ID NO: 1648969 - RNA, 19 nt, Artificial Sequence
  Description of Artificial Sequence: Synthetic oligonucleotide
aacgugauguaaucuuauu

SEQ ID NO: 1648970 - RNA, 19 nt, Artificial Sequence
  Description of Artificial Sequence: Synthetic oligonucleotide
uguucccucagcagugcug

SEQ ID NO: 1648971 - RNA, 19 nt, Artificial Sequence
  Description of Artificial Sequence: Synthetic oligonucleotide
acccacuaccaucacucgg

SEQ ID NO: 1648972 - RNA, 19 nt, Artificial Sequence
  Description of Artificial Sequence: Synthetic oligonucleotide
ucccaugguaccagggaug

SEQ ID NO: 1648973 - RNA, 19 nt, Artificial Sequence
  Description of Artificial Sequence: Synthetic oligonucleotide
ucacuucacaccuuugguu

SEQ ID NO: 1648974 - RNA, 19 nt, Artificial Sequence
  Description of Artificial Sequence: Synthetic oligonucleotide
agaugguguaccauaucuc

SEQ ID NO: 1648975 - RNA, 19 nt, Artificial Sequence
  Description of Artificial Sequence: Synthetic oligonucleotide
aaugaggcaggucccuuuu

SEQ ID NO: 1648976 - RNA, 19 nt, Artificial Sequence
  Description of Artificial Sequence: Synthetic oligonucleotide
aguugaguagcagucgaca

SEQ ID NO: 1648977 - RNA, 19 nt, Artificial Sequence
  Description of Artificial Sequence: Synthetic oligonucleotide
cucaucccuacauucccgc

SEQ ID NO: 1648978 - RNA, 19 nt, Artificial Sequence
  Description of Artificial Sequence: Synthetic oligonucleotide
ugacacucaggagauggug

SEQ ID NO: 1648979 - RNA, 19 nt, Artificial Sequence
  Description of Artificial Sequence: Synthetic oligonucleotide
cagguguuaaugacacagc

SEQ ID NO: 1648980 - RNA, 19 nt, Artificial Sequence
  Description of Artificial Sequence: Synthetic oligonucleotide
cuguuucucgcucuaguuc

SEQ ID NO: 1648981 - RNA, 19 nt, Artificial Sequence
  Description of Artificial Sequence: Synthetic oligonucleotide
ucgaagcucuguuucucgc

SEQ ID NO: 1648982 - RNA, 19 nt, Artificial Sequence
  Description of Artificial Sequence: Synthetic oligonucleotide
aaauacucacggauacgcu

SEQ ID NO: 1648983 - RNA, 19 nt, Artificial Sequence
  Description of Artificial Sequence: Synthetic oligonucleotide
cuugacccaaccacaggug

SEQ ID NO: 1648984 - RNA, 19 nt, Artificial Sequence
  Description of Artificial Sequence: Synthetic oligonucleotide
ugcuuuuggugauggccag

SEQ ID NO: 1648985 - RNA, 19 nt, Artificial Sequence
  Description of Artificial Sequence: Synthetic oligonucleotide
ugccggccguucaauauag

SEQ ID NO: 1648986 - RNA, 19 nt, Artificial Sequence
  Description of Artificial Sequence: Synthetic oligonucleotide
ucggcuaaacgugauguaa

SEQ ID NO: 1648987 - RNA, 19 nt, Artificial Sequence
  Description of Artificial Sequence: Synthetic oligonucleotide
agccucggaauccauagaa

SEQ ID NO: 1648988 - RNA, 19 nt, Artificial Sequence
  Description of Artificial Sequence: Synthetic oligonucleotide
auagaaauacucacggaua

SEQ ID NO: 1648989 - RNA, 19 nt, Artificial Sequence
  Description of Artificial Sequence: Synthetic oligonucleotide
agaaaccuucuuccacauc

SEQ ID NO: 1648990 - RNA, 19 nt, Artificial Sequence
  Description of Artificial Sequence: Synthetic oligonucleotide
cacucaguugcagagaaca

SEQ ID NO: 1648991 - RNA, 19 nt, Artificial Sequence
  Description of Artificial Sequence: Synthetic oligonucleotide
aaacgugauguaaucuuau

SEQ ID NO: 1648992 - RNA, 19 nt, Artificial Sequence
  Description of Artificial Sequence: Synthetic oligonucleotide
uaugaguguugagguaaag

SEQ ID NO: 1648993 - RNA, 19 nt, Artificial Sequence
  Description of Artificial Sequence: Synthetic oligonucleotide
ucacggauacgcucauccc

SEQ ID NO: 1648994 - RNA, 19 nt, Artificial Sequence
  Description of Artificial Sequence: Synthetic oligonucleotide
cagagaacagccaugccaa

SEQ ID NO: 1648995 - RNA, 19 nt, Artificial Sequence
  Description of Artificial Sequence: Synthetic oligonucleotide
uugaacacaucggcuaaac

SEQ ID NO: 1648996 - RNA, 19 nt, Artificial Sequence
  Description of Artificial Sequence: Synthetic oligonucleotide
agcaacauagggguguccu

SEQ ID NO: 1648997 - RNA, 19 nt, Artificial Sequence
  Description of Artificial Sequence: Synthetic oligonucleotide
uaguugaguagcagucgac

SEQ ID NO: 1648998 - RNA, 19 nt, Artificial Sequence
  Description of Artificial Sequence: Synthetic oligonucleotide
ggagcguucuaccacgccc

SEQ ID NO: 1648999 - RNA, 19 nt, Artificial Sequence
  Description of Artificial Sequence: Synthetic oligonucleotide
aguugucuaugauccagaa

SEQ ID NO: 1649000 - RNA, 19 nt, Artificial Sequence
  Description of Artificial Sequence: Synthetic oligonucleotide
gcuaauuauuacuugagau

SEQ ID NO: 1649001 - RNA, 19 nt, Artificial Sequence
  Description of Artificial Sequence: Synthetic oligonucleotide
acaucaguaggacccacua

SEQ ID NO: 1649002 - RNA, 19 nt, Artificial Sequence
  Description of Artificial Sequence: Synthetic oligonucleotide
cagaaaauuugacauugaa

SEQ ID NO: 1649003 - RNA, 19 nt, Artificial Sequence
  Description of Artificial Sequence: Synthetic oligonucleotide
cagguacuaacuugagcug

SEQ ID NO: 1649004 - RNA, 19 nt, Artificial Sequence
  Description of Artificial Sequence: Synthetic oligonucleotide
ucucgcucuaguucaaauu

SEQ ID NO: 1649005 - RNA, 19 nt, Artificial Sequence
  Description of Artificial Sequence: Synthetic oligonucleotide
gacccacuaccaucacucg

SEQ ID NO: 1649006 - RNA, 19 nt, Artificial Sequence
  Description of Artificial Sequence: Synthetic oligonucleotide
cucagcagugcugacacuc

SEQ ID NO: 1649007 - RNA, 19 nt, Artificial Sequence
  Description of Artificial Sequence: Synthetic oligonucleotide
ccuuagagacauaagccac

SEQ ID NO: 1649008 - RNA, 19 nt, Artificial Sequence
  Description of Artificial Sequence: Synthetic oligonucleotide
acgcucaucccuacauucc

SEQ ID NO: 1649009 - RNA, 19 nt, Artificial Sequence
  Description of Artificial Sequence: Synthetic oligonucleotide
acaucggcuaaacgugaug

SEQ ID NO: 1649010 - RNA, 19 nt, Artificial Sequence
  Description of Artificial Sequence: Synthetic oligonucleotide
ugagaugcuuccaccucaa

SEQ ID NO: 1649011 - RNA, 19 nt, Artificial Sequence
  Description of Artificial Sequence: Synthetic oligonucleotide
ggggauagaaacagccucg

SEQ ID NO: 1649012 - RNA, 19 nt, Artificial Sequence
  Description of Artificial Sequence: Synthetic oligonucleotide
agguacuaacuugagcuga

SEQ ID NO: 1649013 - RNA, 19 nt, Artificial Sequence
  Description of Artificial Sequence: Synthetic oligonucleotide
gugccaaagaucucugcca

SEQ ID NO: 1649014 - RNA, 19 nt, Artificial Sequence
  Description of Artificial Sequence: Synthetic oligonucleotide
auagagggcucccauggua

SEQ ID NO: 1649015 - RNA, 19 nt, Artificial Sequence
  Description of Artificial Sequence: Synthetic oligonucleotide
uccagccacacuugucuca

SEQ ID NO: 1649016 - RNA, 19 nt, Artificial Sequence
  Description of Artificial Sequence: Synthetic oligonucleotide
gagacaugcccagagguaa

SEQ ID NO: 1649017 - RNA, 19 nt, Artificial Sequence
  Description of Artificial Sequence: Synthetic oligonucleotide
auacucacggauacgcuca

SEQ ID NO: 1649018 - RNA, 19 nt, Artificial Sequence
  Description of Artificial Sequence: Synthetic oligonucleotide
ugguggagccaaaaugaua

SEQ ID NO: 1649019 - RNA, 19 nt, Artificial Sequence
  Description of Artificial Sequence: Synthetic oligonucleotide
acagucguucuugauccag

SEQ ID NO: 1649020 - RNA, 19 nt, Artificial Sequence
  Description of Artificial Sequence: Synthetic oligonucleotide
acauucccgccggaagucc

SEQ ID NO: 1649021 - RNA, 19 nt, Artificial Sequence
  Description of Artificial Sequence: Synthetic oligonucleotide
guaggacccacuaccauca

SEQ ID NO: 1649022 - RNA, 19 nt, Artificial Sequence
  Description of Artificial Sequence: Synthetic oligonucleotide
caucaguaggacccacuac

SEQ ID NO: 1649023 - RNA, 19 nt, Artificial Sequence
  Description of Artificial Sequence: Synthetic oligonucleotide
cuaaacgugauguaaucuu

SEQ ID NO: 1649024 - RNA, 19 nt, Artificial Sequence
  Description of Artificial Sequence: Synthetic oligonucleotide
agagaacagccaugccaag

SEQ ID NO: 1649025 - RNA, 19 nt, Artificial Sequence
  Description of Artificial Sequence: Synthetic oligonucleotide
aacagccaugccaagugaa

SEQ ID NO: 1649026 - RNA, 19 nt, Artificial Sequence
  Description of Artificial Sequence: Synthetic oligonucleotide
ugaugagaagaaaguucuu

SEQ ID NO: 1649027 - RNA, 19 nt, Artificial Sequence
  Description of Artificial Sequence: Synthetic oligonucleotide
cugguaaccagagcucuug

SEQ ID NO: 1649028 - RNA, 19 nt, Artificial Sequence
  Description of Artificial Sequence: Synthetic oligonucleotide
guccuuggagcguucuacc

SEQ ID NO: 1649029 - RNA, 19 nt, Artificial Sequence
  Description of Artificial Sequence: Synthetic oligonucleotide
ugguaccagggauggacac

SEQ ID NO: 1649030 - RNA, 19 nt, Artificial Sequence
  Description of Artificial Sequence: Synthetic oligonucleotide
uaguucaaauuuaguuguu

SEQ ID NO: 1649031 - RNA, 19 nt, Artificial Sequence
  Description of Artificial Sequence: Synthetic oligonucleotide
uuggagcguucuaccacgc

SEQ ID NO: 1649032 - RNA, 19 nt, Artificial Sequence
  Description of Artificial Sequence: Synthetic oligonucleotide
caaccacagguguuaauga

SEQ ID NO: 1649033 - RNA, 19 nt, Artificial Sequence
  Description of Artificial Sequence: Synthetic oligonucleotide
ugaaccggauauccaugau

SEQ ID NO: 1649034 - RNA, 19 nt, Artificial Sequence
  Description of Artificial Sequence: Synthetic oligonucleotide
cugagaugcuuccaccuca

SEQ ID NO: 1649035 - RNA, 19 nt, Artificial Sequence
  Description of Artificial Sequence: Synthetic oligonucleotide
gaacagccaugccaaguga

SEQ ID NO: 1649036 - RNA, 19 nt, Artificial Sequence
  Description of Artificial Sequence: Synthetic oligonucleotide
uugaacugacugagaugcu

SEQ ID NO: 1649037 - RNA, 19 nt, Artificial Sequence
  Description of Artificial Sequence: Synthetic oligonucleotide
cugugccaaagaucucugc

SEQ ID NO: 1649038 - RNA, 19 nt, Artificial Sequence
  Description of Artificial Sequence: Synthetic oligonucleotide
uggagcguucuaccacgcc

SEQ ID NO: 1649039 - RNA, 19 nt, Artificial Sequence
  Description of Artificial Sequence: Synthetic oligonucleotide
ccaaccacagguguuaaug

SEQ ID NO: 1649040 - RNA, 19 nt, Artificial Sequence
  Description of Artificial Sequence: Synthetic oligonucleotide
ggugccccaacuuuguaga

SEQ ID NO: 1649041 - RNA, 19 nt, Artificial Sequence
  Description of Artificial Sequence: Synthetic oligonucleotide
gacaaugaauccagccaca

SEQ ID NO: 1649042 - RNA, 19 nt, Artificial Sequence
  Description of Artificial Sequence: Synthetic oligonucleotide
guaaagcaacauaggggug

SEQ ID NO: 1649043 - RNA, 19 nt, Artificial Sequence
  Description of Artificial Sequence: Synthetic oligonucleotide
aauucguuguacagucguu

SEQ ID NO: 1649044 - RNA, 19 nt, Artificial Sequence
  Description of Artificial Sequence: Synthetic oligonucleotide
gauggccaguugucuauga

SEQ ID NO: 1649045 - RNA, 19 nt, Artificial Sequence
  Description of Artificial Sequence: Synthetic oligonucleotide
cuccuugcuaauuauuacu

SEQ ID NO: 1649046 - RNA, 19 nt, Artificial Sequence
  Description of Artificial Sequence: Synthetic oligonucleotide
gcagucgacacacugugga

SEQ ID NO: 1649047 - RNA, 19 nt, Artificial Sequence
  Description of Artificial Sequence: Synthetic oligonucleotide
guugucuaugauccagaaa

SEQ ID NO: 1649048 - RNA, 19 nt, Artificial Sequence
  Description of Artificial Sequence: Synthetic oligonucleotide
ggacccacuaccaucacuc

SEQ ID NO: 1649049 - RNA, 19 nt, Artificial Sequence
  Description of Artificial Sequence: Synthetic oligonucleotide
gguguaccauaucucugcc

SEQ ID NO: 1649050 - RNA, 19 nt, Artificial Sequence
  Description of Artificial Sequence: Synthetic oligonucleotide
aacgcacugcauaguugag

SEQ ID NO: 1649051 - RNA, 19 nt, Artificial Sequence
  Description of Artificial Sequence: Synthetic oligonucleotide
gggauagaaacagccucgg

SEQ ID NO: 1649052 - RNA, 19 nt, Artificial Sequence
  Description of Artificial Sequence: Synthetic oligonucleotide
acucaguugcagagaacag

SEQ ID NO: 1649053 - RNA, 19 nt, Artificial Sequence
  Description of Artificial Sequence: Synthetic oligonucleotide
aggacccacuaccaucacu

SEQ ID NO: 1649054 - RNA, 19 nt, Artificial Sequence
  Description of Artificial Sequence: Synthetic oligonucleotide
gguggagccaaaaugauau

SEQ ID NO: 1649055 - RNA, 19 nt, Artificial Sequence
  Description of Artificial Sequence: Synthetic oligonucleotide
guuggugccaggaguggug

SEQ ID NO: 1649056 - RNA, 19 nt, Artificial Sequence
  Description of Artificial Sequence: Synthetic oligonucleotide
augguguaccauaucucug

SEQ ID NO: 1649057 - RNA, 19 nt, Artificial Sequence
  Description of Artificial Sequence: Synthetic oligonucleotide
cagucgacacacuguggac

SEQ ID NO: 1649058 - RNA, 19 nt, Artificial Sequence
  Description of Artificial Sequence: Synthetic oligonucleotide
caauucguuguacagucgu

SEQ ID NO: 1649059 - RNA, 19 nt, Artificial Sequence
  Description of Artificial Sequence: Synthetic oligonucleotide
cauagguagggcggcggcc

SEQ ID NO: 1649060 - RNA, 19 nt, Artificial Sequence
  Description of Artificial Sequence: Synthetic oligonucleotide
agcucuugacccaaccaca

SEQ ID NO: 1649061 - RNA, 19 nt, Artificial Sequence
  Description of Artificial Sequence: Synthetic oligonucleotide
uacauucccgccggaaguc

SEQ ID NO: 1649062 - RNA, 19 nt, Artificial Sequence
  Description of Artificial Sequence: Synthetic oligonucleotide
gcccaaacgcacugcauag

SEQ ID NO: 1649063 - RNA, 19 nt, Artificial Sequence
  Description of Artificial Sequence: Synthetic oligonucleotide
auggggauagaaacagccu

SEQ ID NO: 1649064 - RNA, 19 nt, Artificial Sequence
  Description of Artificial Sequence: Synthetic oligonucleotide
ccuugcuaauuauuacuug

SEQ ID NO: 1649065 - RNA, 19 nt, Artificial Sequence
  Description of Artificial Sequence: Synthetic oligonucleotide
acuggucacgacaaugaau

SEQ ID NO: 1649066 - RNA, 19 nt, Artificial Sequence
  Description of Artificial Sequence: Synthetic oligonucleotide
gcuccuugcuaauuauuac

SEQ ID NO: 1649067 - RNA, 19 nt, Artificial Sequence
  Description of Artificial Sequence: Synthetic oligonucleotide
ccuacauucccgccggaag

SEQ ID NO: 1649068 - RNA, 19 nt, Artificial Sequence
  Description of Artificial Sequence: Synthetic oligonucleotide
ugauggccaguugucuaug

SEQ ID NO: 1649069 - RNA, 19 nt, Artificial Sequence
  Description of Artificial Sequence: Synthetic oligonucleotide
auaucucugccagggguga

SEQ ID NO: 1649070 - RNA, 19 nt, Artificial Sequence
  Description of Artificial Sequence: Synthetic oligonucleotide
cugcauaguugaguagcag

SEQ ID NO: 1649071 - RNA, 19 nt, Artificial Sequence
  Description of Artificial Sequence: Synthetic oligonucleotide
aggcaggucccuuuucaau

SEQ ID NO: 1649072 - RNA, 19 nt, Artificial Sequence
  Description of Artificial Sequence: Synthetic oligonucleotide
gguguuaaugacacagcca

SEQ ID NO: 1649073 - RNA, 19 nt, Artificial Sequence
  Description of Artificial Sequence: Synthetic oligonucleotide
caguugucuaugauccaga

SEQ ID NO: 1649074 - RNA, 19 nt, Artificial Sequence
  Description of Artificial Sequence: Synthetic oligonucleotide
cggccguucaauauagagg

SEQ ID NO: 1649075 - RNA, 19 nt, Artificial Sequence
  Description of Artificial Sequence: Synthetic oligonucleotide
ccggccguucaauauagag

SEQ ID NO: 1649076 - RNA, 19 nt, Artificial Sequence
  Description of Artificial Sequence: Synthetic oligonucleotide
uacagucguucuugaucca

SEQ ID NO: 1649077 - RNA, 19 nt, Artificial Sequence
  Description of Artificial Sequence: Synthetic oligonucleotide
ggauauccaugaugagaag

SEQ ID NO: 1649078 - RNA, 19 nt, Artificial Sequence
  Description of Artificial Sequence: Synthetic oligonucleotide
uagagacauaagccaccuc

SEQ ID NO: 1649079 - RNA, 19 nt, Artificial Sequence
  Description of Artificial Sequence: Synthetic oligonucleotide
ucaggagaugguguaccau

SEQ ID NO: 1649080 - RNA, 19 nt, Artificial Sequence
  Description of Artificial Sequence: Synthetic oligonucleotide
ccaguugucuaugauccag

SEQ ID NO: 1649081 - RNA, 19 nt, Artificial Sequence
  Description of Artificial Sequence: Synthetic oligonucleotide
caguaaacaccugguguuc

SEQ ID NO: 1649082 - RNA, 19 nt, Artificial Sequence
  Description of Artificial Sequence: Synthetic oligonucleotide
acauagggguguccuuaga

SEQ ID NO: 1649083 - RNA, 19 nt, Artificial Sequence
  Description of Artificial Sequence: Synthetic oligonucleotide
ggucacgacaaugaaucca

SEQ ID NO: 1649084 - RNA, 19 nt, Artificial Sequence
  Description of Artificial Sequence: Synthetic oligonucleotide
aucggcuaaacgugaugua

SEQ ID NO: 1649085 - RNA, 19 nt, Artificial Sequence
  Description of Artificial Sequence: Synthetic oligonucleotide
cggauauccaugaugagaa

SEQ ID NO: 1649086 - RNA, 19 nt, Artificial Sequence
  Description of Artificial Sequence: Synthetic oligonucleotide
acgcacugcauaguugagu

SEQ ID NO: 1649087 - RNA, 19 nt, Artificial Sequence
  Description of Artificial Sequence: Synthetic oligonucleotide
gguguccuuagagacauaa

SEQ ID NO: 1649088 - RNA, 19 nt, Artificial Sequence
  Description of Artificial Sequence: Synthetic oligonucleotide
aggcuguaugaguguugag

SEQ ID NO: 1649089 - RNA, 19 nt, Artificial Sequence
  Description of Artificial Sequence: Synthetic oligonucleotide
aacagccucggaauccaua

SEQ ID NO: 1649090 - RNA, 19 nt, Artificial Sequence
  Description of Artificial Sequence: Synthetic oligonucleotide
cagucguucuugauccaga

SEQ ID NO: 1649091 - RNA, 19 nt, Artificial Sequence
  Description of Artificial Sequence: Synthetic oligonucleotide
caucggcuaaacgugaugu

SEQ ID NO: 1649092 - RNA, 19 nt, Artificial Sequence
  Description of Artificial Sequence: Synthetic oligonucleotide
acacaucggcuaaacguga

SEQ ID NO: 1649093 - RNA, 19 nt, Artificial Sequence
  Description of Artificial Sequence: Synthetic oligonucleotide
uucacaccuuugguugaac

SEQ ID NO: 1649094 - RNA, 19 nt, Artificial Sequence
  Description of Artificial Sequence: Synthetic oligonucleotide
uacucacggauacgcucau

SEQ ID NO: 1649095 - RNA, 19 nt, Artificial Sequence
  Description of Artificial Sequence: Synthetic oligonucleotide
cagcuccacauagguaggg

SEQ ID NO: 1649096 - RNA, 19 nt, Artificial Sequence
  Description of Artificial Sequence: Synthetic oligonucleotide
gcucuugacccaaccacag

SEQ ID NO: 1649097 - RNA, 19 nt, Artificial Sequence
  Description of Artificial Sequence: Synthetic oligonucleotide
uuucucgcucuaguucaaa

SEQ ID NO: 1649098 - RNA, 19 nt, Artificial Sequence
  Description of Artificial Sequence: Synthetic oligonucleotide
cuacauucccgccggaagu

SEQ ID NO: 1649099 - RNA, 19 nt, Artificial Sequence
  Description of Artificial Sequence: Synthetic oligonucleotide
ccuuggagcguucuaccac

SEQ ID NO: 1649100 - RNA, 19 nt, Artificial Sequence
  Description of Artificial Sequence: Synthetic oligonucleotide
cacggauacgcucaucccu

SEQ ID NO: 1649101 - RNA, 19 nt, Artificial Sequence
  Description of Artificial Sequence: Synthetic oligonucleotide
cucaaaucgaagcucuguu

SEQ ID NO: 1649102 - RNA, 19 nt, Artificial Sequence
  Description of Artificial Sequence: Synthetic oligonucleotide
guagcagucgacacacugu

SEQ ID NO: 1649103 - RNA, 19 nt, Artificial Sequence
  Description of Artificial Sequence: Synthetic oligonucleotide
gcucaucccuacauucccg

SEQ ID NO: 1649104 - RNA, 19 nt, Artificial Sequence
  Description of Artificial Sequence: Synthetic oligonucleotide
cugguaagcucugugccaa

SEQ ID NO: 1649105 - RNA, 19 nt, Artificial Sequence
  Description of Artificial Sequence: Synthetic oligonucleotide
gaaccacaaccacguccac

SEQ ID NO: 1649106 - RNA, 19 nt, Artificial Sequence
  Description of Artificial Sequence: Synthetic oligonucleotide
ugccccaacuuuguagauu

SEQ ID NO: 1649107 - RNA, 19 nt, Artificial Sequence
  Description of Artificial Sequence: Synthetic oligonucleotide
uaggacccacuaccaucac

SEQ ID NO: 1649108 - RNA, 19 nt, Artificial Sequence
  Description of Artificial Sequence: Synthetic oligonucleotide
gagauccaugaaccggaua

SEQ ID NO: 1649109 - RNA, 19 nt, Artificial Sequence
  Description of Artificial Sequence: Synthetic oligonucleotide
acggauacgcucaucccua

SEQ ID NO: 1649110 - RNA, 19 nt, Artificial Sequence
  Description of Artificial Sequence: Synthetic oligonucleotide
acucacggauacgcucauc

SEQ ID NO: 1649111 - RNA, 19 nt, Artificial Sequence
  Description of Artificial Sequence: Synthetic oligonucleotide
gccacucaguugcagagaa

SEQ ID NO: 1649112 - RNA, 19 nt, Artificial Sequence
  Description of Artificial Sequence: Synthetic oligonucleotide
ucgacacacuguggacuug

SEQ ID NO: 1649113 - RNA, 19 nt, Artificial Sequence
  Description of Artificial Sequence: Synthetic oligonucleotide
ggauagaaacagccucgga

SEQ ID NO: 1649114 - RNA, 19 nt, Artificial Sequence
  Description of Artificial Sequence: Synthetic oligonucleotide
ugggaugguuggugcccca

SEQ ID NO: 1649115 - RNA, 19 nt, Artificial Sequence
  Description of Artificial Sequence: Synthetic oligonucleotide
uaccagggauggacacaga

SEQ ID NO: 1649116 - RNA, 19 nt, Artificial Sequence
  Description of Artificial Sequence: Synthetic oligonucleotide
guaugaguguugagguaaa

SEQ ID NO: 1649117 - RNA, 19 nt, Artificial Sequence
  Description of Artificial Sequence: Synthetic oligonucleotide
uugaaggcauggggauaga

SEQ ID NO: 1649118 - RNA, 19 nt, Artificial Sequence
  Description of Artificial Sequence: Synthetic oligonucleotide
ccauagaaauacucacgga

SEQ ID NO: 1649119 - RNA, 19 nt, Artificial Sequence
  Description of Artificial Sequence: Synthetic oligonucleotide
ccggauauccaugaugaga

SEQ ID NO: 1649120 - RNA, 19 nt, Artificial Sequence
  Description of Artificial Sequence: Synthetic oligonucleotide
ccacuaccaucacucgggg

SEQ ID NO: 1649121 - RNA, 19 nt, Artificial Sequence
  Description of Artificial Sequence: Synthetic oligonucleotide
gcuaaacgugauguaaucu

SEQ ID NO: 1649122 - RNA, 19 nt, Artificial Sequence
  Description of Artificial Sequence: Synthetic oligonucleotide
aucugccggccguucaaua

SEQ ID NO: 1649123 - RNA, 19 nt, Artificial Sequence
  Description of Artificial Sequence: Synthetic oligonucleotide
cacuggucacgacaaugaa

SEQ ID NO: 1649124 - RNA, 19 nt, Artificial Sequence
  Description of Artificial Sequence: Synthetic oligonucleotide
caccuuugguugaacacau

SEQ ID NO: 1649125 - RNA, 19 nt, Artificial Sequence
  Description of Artificial Sequence: Synthetic oligonucleotide
cacagguguuaaugacaca

SEQ ID NO: 1649126 - RNA, 19 nt, Artificial Sequence
  Description of Artificial Sequence: Synthetic oligonucleotide
gucgacacacuguggacuu

SEQ ID NO: 1649127 - RNA, 19 nt, Artificial Sequence
  Description of Artificial Sequence: Synthetic oligonucleotide
gguaccagggauggacaca

SEQ ID NO: 1649128 - RNA, 19 nt, Artificial Sequence
  Description of Artificial Sequence: Synthetic oligonucleotide
cacaucaguaggacccacu

SEQ ID NO: 1649129 - RNA, 19 nt, Artificial Sequence
  Description of Artificial Sequence: Synthetic oligonucleotide
uucccucagcagugcugac

SEQ ID NO: 1649130 - RNA, 19 nt, Artificial Sequence
  Description of Artificial Sequence: Synthetic oligonucleotide
ggauacgcucaucccuaca

SEQ ID NO: 1649131 - RNA, 19 nt, Artificial Sequence
  Description of Artificial Sequence: Synthetic oligonucleotide
guggagccaaaaugauaua

SEQ ID NO: 1649132 - RNA, 19 nt, Artificial Sequence
  Description of Artificial Sequence: Synthetic oligonucleotide
gcauggggauagaaacagc

SEQ ID NO: 1649133 - RNA, 19 nt, Artificial Sequence
  Description of Artificial Sequence: Synthetic oligonucleotide
cucccaugguaccagggau

SEQ ID NO: 1649134 - RNA, 19 nt, Artificial Sequence
  Description of Artificial Sequence: Synthetic oligonucleotide
cugacacucaggagauggu

SEQ ID NO: 1649135 - RNA, 19 nt, Artificial Sequence
  Description of Artificial Sequence: Synthetic oligonucleotide
cgcacugcauaguugagua

SEQ ID NO: 1649136 - RNA, 19 nt, Artificial Sequence
  Description of Artificial Sequence: Synthetic oligonucleotide
cgacacacuguggacuugc

SEQ ID NO: 1649137 - RNA, 19 nt, Artificial Sequence
  Description of Artificial Sequence: Synthetic oligonucleotide
cagccucggaauccauaga

SEQ ID NO: 1649138 - RNA, 19 nt, Artificial Sequence
  Description of Artificial Sequence: Synthetic oligonucleotide
guagggcggcggcccaaac

SEQ ID NO: 1649139 - RNA, 19 nt, Artificial Sequence
  Description of Artificial Sequence: Synthetic oligonucleotide
cauucccgccggaaguccu

SEQ ID NO: 1649140 - RNA, 19 nt, Artificial Sequence
  Description of Artificial Sequence: Synthetic oligonucleotide
acccaaccacagguguuaa

SEQ ID NO: 1649141 - RNA, 19 nt, Artificial Sequence
  Description of Artificial Sequence: Synthetic oligonucleotide
gcaacacaguucgaacaaa

SEQ ID NO: 1649142 - RNA, 19 nt, Artificial Sequence
  Description of Artificial Sequence: Synthetic oligonucleotide
cacaucggcuaaacgugau

SEQ ID NO: 1649143 - RNA, 19 nt, Artificial Sequence
  Description of Artificial Sequence: Synthetic oligonucleotide
ccacucaguugcagagaac

SEQ ID NO: 1649144 - RNA, 19 nt, Artificial Sequence
  Description of Artificial Sequence: Synthetic oligonucleotide
gugguggagccaaaaugau

SEQ ID NO: 1649145 - RNA, 19 nt, Artificial Sequence
  Description of Artificial Sequence: Synthetic oligonucleotide
gguacuaacuugagcugau

SEQ ID NO: 1649146 - RNA, 19 nt, Artificial Sequence
  Description of Artificial Sequence: Synthetic oligonucleotide
caaccacguccacuucaaa

SEQ ID NO: 1649147 - RNA, 19 nt, Artificial Sequence
  Description of Artificial Sequence: Synthetic oligonucleotide
auucccgccggaaguccuu

SEQ ID NO: 1649148 - RNA, 19 nt, Artificial Sequence
  Description of Artificial Sequence: Synthetic oligonucleotide
gccucggaauccauagaaa

SEQ ID NO: 1649149 - RNA, 19 nt, Artificial Sequence
  Description of Artificial Sequence: Synthetic oligonucleotide
ccacucacagaagcccuuc

SEQ ID NO: 1649150 - RNA, 19 nt, Artificial Sequence
  Description of Artificial Sequence: Synthetic oligonucleotide
ccaaacgcacugcauaguu

SEQ ID NO: 1649151 - RNA, 19 nt, Artificial Sequence
  Description of Artificial Sequence: Synthetic oligonucleotide
ggccacucaguugcagaga

SEQ ID NO: 1649152 - RNA, 19 nt, Artificial Sequence
  Description of Artificial Sequence: Synthetic oligonucleotide
gugccccaacuuuguagau

SEQ ID NO: 1649153 - RNA, 19 nt, Artificial Sequence
  Description of Artificial Sequence: Synthetic oligonucleotide
gggaugguuggugccccaa

SEQ ID NO: 1649154 - RNA, 19 nt, Artificial Sequence
  Description of Artificial Sequence: Synthetic oligonucleotide
caccucgguccggccacuc

SEQ ID NO: 1649155 - RNA, 19 nt, Artificial Sequence
  Description of Artificial Sequence: Synthetic oligonucleotide
gguagggcggcggcccaaa

SEQ ID NO: 1649156 - RNA, 19 nt, Artificial Sequence
  Description of Artificial Sequence: Synthetic oligonucleotide
gcuuuuggugauggccagu

SEQ ID NO: 1649157 - RNA, 19 nt, Artificial Sequence
  Description of Artificial Sequence: Synthetic oligonucleotide
cggaauccauagaaauacu

SEQ ID NO: 1649158 - RNA, 19 nt, Artificial Sequence
  Description of Artificial Sequence: Synthetic oligonucleotide
cggcuaaacgugauguaau

SEQ ID NO: 1649159 - RNA, 19 nt, Artificial Sequence
  Description of Artificial Sequence: Synthetic oligonucleotide
ggacggggugcuggagaca

SEQ ID NO: 1649160 - RNA, 19 nt, Artificial Sequence
  Description of Artificial Sequence: Synthetic oligonucleotide
caucugccggccguucaau

SEQ ID NO: 1649161 - RNA, 19 nt, Artificial Sequence
  Description of Artificial Sequence: Synthetic oligonucleotide
cggcggcccaaacgcacug

SEQ ID NO: 1649162 - RNA, 19 nt, Artificial Sequence
  Description of Artificial Sequence: Synthetic oligonucleotide
gccggccguucaauauaga

SEQ ID NO: 1649163 - RNA, 19 nt, Artificial Sequence
  Description of Artificial Sequence: Synthetic oligonucleotide
cccaaacgcacugcauagu

SEQ ID NO: 1649164 - RNA, 19 nt, Artificial Sequence
  Description of Artificial Sequence: Synthetic oligonucleotide
gccacucacagaagcccuu

SEQ ID NO: 1649165 - RNA, 19 nt, Artificial Sequence
  Description of Artificial Sequence: Synthetic oligonucleotide
cccaaccacagguguuaau

SEQ ID NO: 1649166 - RNA, 19 nt, Artificial Sequence
  Description of Artificial Sequence: Synthetic oligonucleotide
ggguguccuuagagacaua

SEQ ID NO: 1649167 - RNA, 19 nt, Artificial Sequence
  Description of Artificial Sequence: Synthetic oligonucleotide
ccacacuggucacgacaau

SEQ ID NO: 1649168 - RNA, 19 nt, Artificial Sequence
  Description of Artificial Sequence: Synthetic oligonucleotide
ccccaacuuuguagauuuu

SEQ ID NO: 1649169 - RNA, 19 nt, Artificial Sequence
  Description of Artificial Sequence: Synthetic oligonucleotide
ccaccucgguccggccacu

SEQ ID NO: 1649170 - RNA, 19 nt, Artificial Sequence
  Description of Artificial Sequence: Synthetic oligonucleotide
aauucugccaacucgcucc

SEQ ID NO: 1649171 - RNA, 19 nt, Artificial Sequence
  Description of Artificial Sequence: Synthetic oligonucleotide
uauaucagcauccucaggg

SEQ ID NO: 1649172 - RNA, 19 nt, Artificial Sequence
  Description of Artificial Sequence: Synthetic oligonucleotide
uuuacaagcaccaauauuc

SEQ ID NO: 1649173 - RNA, 19 nt, Artificial Sequence
  Description of Artificial Sequence: Synthetic oligonucleotide
uuuauuaagaaaccuaugu

SEQ ID NO: 1649174 - RNA, 19 nt, Artificial Sequence
  Description of Artificial Sequence: Synthetic oligonucleotide
aaacaauucugccaacucg

SEQ ID NO: 1649175 - RNA, 19 nt, Artificial Sequence
  Description of Artificial Sequence: Synthetic oligonucleotide
aaggacauccuuuaaaaug

SEQ ID NO: 1649176 - RNA, 19 nt, Artificial Sequence
  Description of Artificial Sequence: Synthetic oligonucleotide
ucuaaaacaauucugccaa

SEQ ID NO: 1649177 - RNA, 19 nt, Artificial Sequence
  Description of Artificial Sequence: Synthetic oligonucleotide
uuuuccauccaaaugagga

SEQ ID NO: 1649178 - RNA, 19 nt, Artificial Sequence
  Description of Artificial Sequence: Synthetic oligonucleotide
aaggcuauagguugcaguc

SEQ ID NO: 1649179 - RNA, 19 nt, Artificial Sequence
  Description of Artificial Sequence: Synthetic oligonucleotide
ucuucaauuuacaagcacc

SEQ ID NO: 1649180 - RNA, 19 nt, Artificial Sequence
  Description of Artificial Sequence: Synthetic oligonucleotide
aacaauucuaaaacaauuc

SEQ ID NO: 1649181 - RNA, 19 nt, Artificial Sequence
  Description of Artificial Sequence: Synthetic oligonucleotide
auccacguaucuuaaaacc

SEQ ID NO: 1649182 - RNA, 19 nt, Artificial Sequence
  Description of Artificial Sequence: Synthetic oligonucleotide
uuuucuccuguacacaacg

SEQ ID NO: 1649183 - RNA, 19 nt, Artificial Sequence
  Description of Artificial Sequence: Synthetic oligonucleotide
aacaauucugccaacucgc

SEQ ID NO: 1649184 - RNA, 19 nt, Artificial Sequence
  Description of Artificial Sequence: Synthetic oligonucleotide
aauaauucggugaaaagga

SEQ ID NO: 1649185 - RNA, 19 nt, Artificial Sequence
  Description of Artificial Sequence: Synthetic oligonucleotide
auuugagaagucuccaccc

SEQ ID NO: 1649186 - RNA, 19 nt, Artificial Sequence
  Description of Artificial Sequence: Synthetic oligonucleotide
uucaguacacagcuuaagg

SEQ ID NO: 1649187 - RNA, 19 nt, Artificial Sequence
  Description of Artificial Sequence: Synthetic oligonucleotide
aucuacaucuuuuaaaucu

SEQ ID NO: 1649188 - RNA, 19 nt, Artificial Sequence
  Description of Artificial Sequence: Synthetic oligonucleotide
uuugacaucuucaauuuac

SEQ ID NO: 1649189 - RNA, 19 nt, Artificial Sequence
  Description of Artificial Sequence: Synthetic oligonucleotide
aaaaggacauccuuuaaaa

SEQ ID NO: 1649190 - RNA, 19 nt, Artificial Sequence
  Description of Artificial Sequence: Synthetic oligonucleotide
uuugggaacaauaucugca

SEQ ID NO: 1649191 - RNA, 19 nt, Artificial Sequence
  Description of Artificial Sequence: Synthetic oligonucleotide
uuaucuacaucuuuuaaau

SEQ ID NO: 1649192 - RNA, 19 nt, Artificial Sequence
  Description of Artificial Sequence: Synthetic oligonucleotide
cauccuuuaaaauggagag

SEQ ID NO: 1649193 - RNA, 19 nt, Artificial Sequence
  Description of Artificial Sequence: Synthetic oligonucleotide
accaauauucaguacacag

SEQ ID NO: 1649194 - RNA, 19 nt, Artificial Sequence
  Description of Artificial Sequence: Synthetic oligonucleotide
gugcuuuaguauuugaugg

SEQ ID NO: 1649195 - RNA, 19 nt, Artificial Sequence
  Description of Artificial Sequence: Synthetic oligonucleotide
uuauuaagaaaccuauguc

SEQ ID NO: 1649196 - RNA, 19 nt, Artificial Sequence
  Description of Artificial Sequence: Synthetic oligonucleotide
uuuaucuacaucuuuuaaa

SEQ ID NO: 1649197 - RNA, 19 nt, Artificial Sequence
  Description of Artificial Sequence: Synthetic oligonucleotide
uuaauaauucggugaaaag

SEQ ID NO: 1649198 - RNA, 19 nt, Artificial Sequence
  Description of Artificial Sequence: Synthetic oligonucleotide
uaucuuaaaaccuuugcau

SEQ ID NO: 1649199 - RNA, 19 nt, Artificial Sequence
  Description of Artificial Sequence: Synthetic oligonucleotide
agugcuuuaguauuugaug

SEQ ID NO: 1649200 - RNA, 19 nt, Artificial Sequence
  Description of Artificial Sequence: Synthetic oligonucleotide
acagcuuaaggcuauaggu

SEQ ID NO: 1649201 - RNA, 19 nt, Artificial Sequence
  Description of Artificial Sequence: Synthetic oligonucleotide
aucauaaacuucuuaauaa

SEQ ID NO: 1649202 - RNA, 19 nt, Artificial Sequence
  Description of Artificial Sequence: Synthetic oligonucleotide
acaauucuaaaacaauucu

SEQ ID NO: 1649203 - RNA, 19 nt, Artificial Sequence
  Description of Artificial Sequence: Synthetic oligonucleotide
auaaauacuuucuccaccu

SEQ ID NO: 1649204 - RNA, 19 nt, Artificial Sequence
  Description of Artificial Sequence: Synthetic oligonucleotide
cuuuuaaaucuauaucagc

SEQ ID NO: 1649205 - RNA, 19 nt, Artificial Sequence
  Description of Artificial Sequence: Synthetic oligonucleotide
gauuugagaagucuccacc

SEQ ID NO: 1649206 - RNA, 19 nt, Artificial Sequence
  Description of Artificial Sequence: Synthetic oligonucleotide
uccuuuaaaauggagaggu

SEQ ID NO: 1649207 - RNA, 19 nt, Artificial Sequence
  Description of Artificial Sequence: Synthetic oligonucleotide
ugugcuuuucgguauagug

SEQ ID NO: 1649208 - RNA, 19 nt, Artificial Sequence
  Description of Artificial Sequence: Synthetic oligonucleotide
ucaauuuacaagcaccaau

SEQ ID NO: 1649209 - RNA, 19 nt, Artificial Sequence
  Description of Artificial Sequence: Synthetic oligonucleotide
aauacuuucuccaccuguc

SEQ ID NO: 1649210 - RNA, 19 nt, Artificial Sequence
  Description of Artificial Sequence: Synthetic oligonucleotide
uuuucaagcauccuugcua

SEQ ID NO: 1649211 - RNA, 19 nt, Artificial Sequence
  Description of Artificial Sequence: Synthetic oligonucleotide
uucuuaauaauucggugaa

SEQ ID NO: 1649212 - RNA, 19 nt, Artificial Sequence
  Description of Artificial Sequence: Synthetic oligonucleotide
cacuucgacauuuucaagc

SEQ ID NO: 1649213 - RNA, 19 nt, Artificial Sequence
  Description of Artificial Sequence: Synthetic oligonucleotide
caauucuaaaacaauucug

SEQ ID NO: 1649214 - RNA, 19 nt, Artificial Sequence
  Description of Artificial Sequence: Synthetic oligonucleotide
aguuuugggaacaauaucu

SEQ ID NO: 1649215 - RNA, 19 nt, Artificial Sequence
  Description of Artificial Sequence: Synthetic oligonucleotide
aggacauccuuuaaaaugg

SEQ ID NO: 1649216 - RNA, 19 nt, Artificial Sequence
  Description of Artificial Sequence: Synthetic oligonucleotide
acgcacgaaaauuuucugc

SEQ ID NO: 1649217 - RNA, 19 nt, Artificial Sequence
  Description of Artificial Sequence: Synthetic oligonucleotide
gaaccauuuguauugggac

SEQ ID NO: 1649218 - RNA, 19 nt, Artificial Sequence
  Description of Artificial Sequence: Synthetic oligonucleotide
ucaauucuccacauucugc

SEQ ID NO: 1649219 - RNA, 19 nt, Artificial Sequence
  Description of Artificial Sequence: Synthetic oligonucleotide
guugugauaaagaacugag

SEQ ID NO: 1649220 - RNA, 19 nt, Artificial Sequence
  Description of Artificial Sequence: Synthetic oligonucleotide
auagguugcagucuagaug

SEQ ID NO: 1649221 - RNA, 19 nt, Artificial Sequence
  Description of Artificial Sequence: Synthetic oligonucleotide
uucaauucuccacauucug

SEQ ID NO: 1649222 - RNA, 19 nt, Artificial Sequence
  Description of Artificial Sequence: Synthetic oligonucleotide
uaauucggugaaaaggaca

SEQ ID NO: 1649223 - RNA, 19 nt, Artificial Sequence
  Description of Artificial Sequence: Synthetic oligonucleotide
aucuucaauuuacaagcac

SEQ ID NO: 1649224 - RNA, 19 nt, Artificial Sequence
  Description of Artificial Sequence: Synthetic oligonucleotide
acaaacucuacuccgccuc

SEQ ID NO: 1649225 - RNA, 19 nt, Artificial Sequence
  Description of Artificial Sequence: Synthetic oligonucleotide
acuucuuaauaauucggug

SEQ ID NO: 1649226 - RNA, 19 nt, Artificial Sequence
  Description of Artificial Sequence: Synthetic oligonucleotide
uuuccauccaaaugaggag

SEQ ID NO: 1649227 - RNA, 19 nt, Artificial Sequence
  Description of Artificial Sequence: Synthetic oligonucleotide
aauaacagccuuugaacua

SEQ ID NO: 1649228 - RNA, 19 nt, Artificial Sequence
  Description of Artificial Sequence: Synthetic oligonucleotide
uucggugaaaaggacaucc

SEQ ID NO: 1649229 - RNA, 19 nt, Artificial Sequence
  Description of Artificial Sequence: Synthetic oligonucleotide
aacucuacuccgccucugc

SEQ ID NO: 1649230 - RNA, 19 nt, Artificial Sequence
  Description of Artificial Sequence: Synthetic oligonucleotide
agcuuaaggcuauagguug

SEQ ID NO: 1649231 - RNA, 19 nt, Artificial Sequence
  Description of Artificial Sequence: Synthetic oligonucleotide
ucgacauuuucaagcaucc

SEQ ID NO: 1649232 - RNA, 19 nt, Artificial Sequence
  Description of Artificial Sequence: Synthetic oligonucleotide
ucaaagaagacccgcgggu

SEQ ID NO: 1649233 - RNA, 19 nt, Artificial Sequence
  Description of Artificial Sequence: Synthetic oligonucleotide
aacaauaucugcaaacaau

SEQ ID NO: 1649234 - RNA, 19 nt, Artificial Sequence
  Description of Artificial Sequence: Synthetic oligonucleotide
aauuuacaagcaccaauau

SEQ ID NO: 1649235 - RNA, 19 nt, Artificial Sequence
  Description of Artificial Sequence: Synthetic oligonucleotide
uuaauagccaucucccagu

SEQ ID NO: 1649236 - RNA, 19 nt, Artificial Sequence
  Description of Artificial Sequence: Synthetic oligonucleotide
ucauaaacuucuuaauaau

SEQ ID NO: 1649237 - RNA, 19 nt, Artificial Sequence
  Description of Artificial Sequence: Synthetic oligonucleotide
uggaugacugucaccagag

SEQ ID NO: 1649238 - RNA, 19 nt, Artificial Sequence
  Description of Artificial Sequence: Synthetic oligonucleotide
auacuuucuccaccugucc

SEQ ID NO: 1649239 - RNA, 19 nt, Artificial Sequence
  Description of Artificial Sequence: Synthetic oligonucleotide
cuucuuaauaauucgguga

SEQ ID NO: 1649240 - RNA, 19 nt, Artificial Sequence
  Description of Artificial Sequence: Synthetic oligonucleotide
uucgacauuuucaagcauc

SEQ ID NO: 1649241 - RNA, 19 nt, Artificial Sequence
  Description of Artificial Sequence: Synthetic oligonucleotide
auauucaguacacagcuua

SEQ ID NO: 1649242 - RNA, 19 nt, Artificial Sequence
  Description of Artificial Sequence: Synthetic oligonucleotide
guaucuuaaaaccuuugca

SEQ ID NO: 1649243 - RNA, 19 nt, Artificial Sequence
  Description of Artificial Sequence: Synthetic oligonucleotide
uccacguaucuuaaaaccu

SEQ ID NO: 1649244 - RNA, 19 nt, Artificial Sequence
  Description of Artificial Sequence: Synthetic oligonucleotide
uuugccaugcucagcaaac

SEQ ID NO: 1649245 - RNA, 19 nt, Artificial Sequence
  Description of Artificial Sequence: Synthetic oligonucleotide
gacgagaagagagacucgg

SEQ ID NO: 1649246 - RNA, 19 nt, Artificial Sequence
  Description of Artificial Sequence: Synthetic oligonucleotide
aauucggugaaaaggacau

SEQ ID NO: 1649247 - RNA, 19 nt, Artificial Sequence
  Description of Artificial Sequence: Synthetic oligonucleotide
uuaaaauggagagguuucc

SEQ ID NO: 1649248 - RNA, 19 nt, Artificial Sequence
  Description of Artificial Sequence: Synthetic oligonucleotide
ucugccaacucgcuccccg

SEQ ID NO: 1649249 - RNA, 19 nt, Artificial Sequence
  Description of Artificial Sequence: Synthetic oligonucleotide
uguugugauaaagaacuga

SEQ ID NO: 1649250 - RNA, 19 nt, Artificial Sequence
  Description of Artificial Sequence: Synthetic oligonucleotide
aaaggacauccuuuaaaau

SEQ ID NO: 1649251 - RNA, 19 nt, Artificial Sequence
  Description of Artificial Sequence: Synthetic oligonucleotide
aacgcacgaaaauuuucug

SEQ ID NO: 1649252 - RNA, 19 nt, Artificial Sequence
  Description of Artificial Sequence: Synthetic oligonucleotide
uucucaauaacagccuuug

SEQ ID NO: 1649253 - RNA, 19 nt, Artificial Sequence
  Description of Artificial Sequence: Synthetic oligonucleotide
uugacaucuucaauuuaca

SEQ ID NO: 1649254 - RNA, 19 nt, Artificial Sequence
  Description of Artificial Sequence: Synthetic oligonucleotide
acagcaagcgacgagaaga

SEQ ID NO: 1649255 - RNA, 19 nt, Artificial Sequence
  Description of Artificial Sequence: Synthetic oligonucleotide
acuucgacauuuucaagca

SEQ ID NO: 1649256 - RNA, 19 nt, Artificial Sequence
  Description of Artificial Sequence: Synthetic oligonucleotide
uauccacguaucuuaaaac

SEQ ID NO: 1649257 - RNA, 19 nt, Artificial Sequence
  Description of Artificial Sequence: Synthetic oligonucleotide
uucuccuguacacaacgca

SEQ ID NO: 1649258 - RNA, 19 nt, Artificial Sequence
  Description of Artificial Sequence: Synthetic oligonucleotide
aacugagaaccauuuguau

SEQ ID NO: 1649259 - RNA, 19 nt, Artificial Sequence
  Description of Artificial Sequence: Synthetic oligonucleotide
auugggaccugcauuugcc

SEQ ID NO: 1649260 - RNA, 19 nt, Artificial Sequence
  Description of Artificial Sequence: Synthetic oligonucleotide
cuucaauuuacaagcacca

SEQ ID NO: 1649261 - RNA, 19 nt, Artificial Sequence
  Description of Artificial Sequence: Synthetic oligonucleotide
uaaggcuauagguugcagu

SEQ ID NO: 1649262 - RNA, 19 nt, Artificial Sequence
  Description of Artificial Sequence: Synthetic oligonucleotide
uuuaagucuucaguuauua

SEQ ID NO: 1649263 - RNA, 19 nt, Artificial Sequence
  Description of Artificial Sequence: Synthetic oligonucleotide
uuugagaagucuccacccu

SEQ ID NO: 1649264 - RNA, 19 nt, Artificial Sequence
  Description of Artificial Sequence: Synthetic oligonucleotide
augggugcgacaucuucac

SEQ ID NO: 1649265 - RNA, 19 nt, Artificial Sequence
  Description of Artificial Sequence: Synthetic oligonucleotide
aagcgacgagaagagagac

SEQ ID NO: 1649266 - RNA, 19 nt, Artificial Sequence
  Description of Artificial Sequence: Synthetic oligonucleotide
cacagcuuaaggcuauagg

SEQ ID NO: 1649267 - RNA, 19 nt, Artificial Sequence
  Description of Artificial Sequence: Synthetic oligonucleotide
uauugggaccugcauuugc

SEQ ID NO: 1649268 - RNA, 19 nt, Artificial Sequence
  Description of Artificial Sequence: Synthetic oligonucleotide
uuuguauugggaccugcau

SEQ ID NO: 1649269 - RNA, 19 nt, Artificial Sequence
  Description of Artificial Sequence: Synthetic oligonucleotide
caaacccucccgaucaugc

SEQ ID NO: 1649270 - RNA, 19 nt, Artificial Sequence
  Description of Artificial Sequence: Synthetic oligonucleotide
uggguccauuucaagagcc

SEQ ID NO: 1649271 - RNA, 19 nt, Artificial Sequence
  Description of Artificial Sequence: Synthetic oligonucleotide
uugaacuauccacguaucu

SEQ ID NO: 1649272 - RNA, 19 nt, Artificial Sequence
  Description of Artificial Sequence: Synthetic oligonucleotide
aauagccaucucccaguuc

SEQ ID NO: 1649273 - RNA, 19 nt, Artificial Sequence
  Description of Artificial Sequence: Synthetic oligonucleotide
ugucccauucugauuugag

SEQ ID NO: 1649274 - RNA, 19 nt, Artificial Sequence
  Description of Artificial Sequence: Synthetic oligonucleotide
agacucgggcaccacgugc

SEQ ID NO: 1649275 - RNA, 19 nt, Artificial Sequence
  Description of Artificial Sequence: Synthetic oligonucleotide
auaauucggugaaaaggac

SEQ ID NO: 1649276 - RNA, 19 nt, Artificial Sequence
  Description of Artificial Sequence: Synthetic oligonucleotide
aagcaccaauauucaguac

SEQ ID NO: 1649277 - RNA, 19 nt, Artificial Sequence
  Description of Artificial Sequence: Synthetic oligonucleotide
uggaacuguugugauaaag

SEQ ID NO: 1649278 - RNA, 19 nt, Artificial Sequence
  Description of Artificial Sequence: Synthetic oligonucleotide
acugagaaccauuuguauu

SEQ ID NO: 1649279 - RNA, 19 nt, Artificial Sequence
  Description of Artificial Sequence: Synthetic oligonucleotide
cucaauaacagccuuugaa

SEQ ID NO: 1649280 - RNA, 19 nt, Artificial Sequence
  Description of Artificial Sequence: Synthetic oligonucleotide
caauuuacaagcaccaaua

SEQ ID NO: 1649281 - RNA, 19 nt, Artificial Sequence
  Description of Artificial Sequence: Synthetic oligonucleotide
auuuacaagcaccaauauu

SEQ ID NO: 1649282 - RNA, 19 nt, Artificial Sequence
  Description of Artificial Sequence: Synthetic oligonucleotide
gaacuauccacguaucuua

SEQ ID NO: 1649283 - RNA, 19 nt, Artificial Sequence
  Description of Artificial Sequence: Synthetic oligonucleotide
uugggaacaauaucugcaa

SEQ ID NO: 1649284 - RNA, 19 nt, Artificial Sequence
  Description of Artificial Sequence: Synthetic oligonucleotide
uguacacaacgcacgaaaa

SEQ ID NO: 1649285 - RNA, 19 nt, Artificial Sequence
  Description of Artificial Sequence: Synthetic oligonucleotide
cuccuguacacaacgcacg

SEQ ID NO: 1649286 - RNA, 19 nt, Artificial Sequence
  Description of Artificial Sequence: Synthetic oligonucleotide
uuugaacuauccacguauc

SEQ ID NO: 1649287 - RNA, 19 nt, Artificial Sequence
  Description of Artificial Sequence: Synthetic oligonucleotide
ucuagauguaucugcuuuc

SEQ ID NO: 1649288 - RNA, 19 nt, Artificial Sequence
  Description of Artificial Sequence: Synthetic oligonucleotide
uauagugcuuuaguauuug

SEQ ID NO: 1649289 - RNA, 19 nt, Artificial Sequence
  Description of Artificial Sequence: Synthetic oligonucleotide
caauucuccacauucugca

SEQ ID NO: 1649290 - RNA, 19 nt, Artificial Sequence
  Description of Artificial Sequence: Synthetic oligonucleotide
uagugcuuuaguauuugau

SEQ ID NO: 1649291 - RNA, 19 nt, Artificial Sequence
  Description of Artificial Sequence: Synthetic oligonucleotide
uauagguugcagucuagau

SEQ ID NO: 1649292 - RNA, 19 nt, Artificial Sequence
  Description of Artificial Sequence: Synthetic oligonucleotide
aaaugaggaguuggaacug

SEQ ID NO: 1649293 - RNA, 19 nt, Artificial Sequence
  Description of Artificial Sequence: Synthetic oligonucleotide
ugagaaccauuuguauugg

SEQ ID NO: 1649294 - RNA, 19 nt, Artificial Sequence
  Description of Artificial Sequence: Synthetic oligonucleotide
acaagcaccaauauucagu

SEQ ID NO: 1649295 - RNA, 19 nt, Artificial Sequence
  Description of Artificial Sequence: Synthetic oligonucleotide
caauauucaguacacagcu

SEQ ID NO: 1649296 - RNA, 19 nt, Artificial Sequence
  Description of Artificial Sequence: Synthetic oligonucleotide
uuguauugggaccugcauu

SEQ ID NO: 1649297 - RNA, 19 nt, Artificial Sequence
  Description of Artificial Sequence: Synthetic oligonucleotide
uauucaguacacagcuuaa

SEQ ID NO: 1649298 - RNA, 19 nt, Artificial Sequence
  Description of Artificial Sequence: Synthetic oligonucleotide
agccuuugaacuauccacg

SEQ ID NO: 1649299 - RNA, 19 nt, Artificial Sequence
  Description of Artificial Sequence: Synthetic oligonucleotide
ugacaucuucaauuuacaa

SEQ ID NO: 1649300 - RNA, 19 nt, Artificial Sequence
  Description of Artificial Sequence: Synthetic oligonucleotide
uugcagucuagauguaucu

SEQ ID NO: 1649301 - RNA, 19 nt, Artificial Sequence
  Description of Artificial Sequence: Synthetic oligonucleotide
auucugccaacucgcuccc

SEQ ID NO: 1649302 - RNA, 19 nt, Artificial Sequence
  Description of Artificial Sequence: Synthetic oligonucleotide
gagagacucgggcaccacg

SEQ ID NO: 1649303 - RNA, 19 nt, Artificial Sequence
  Description of Artificial Sequence: Synthetic oligonucleotide
uggggaauauuccccaguc

SEQ ID NO: 1649304 - RNA, 19 nt, Artificial Sequence
  Description of Artificial Sequence: Synthetic oligonucleotide
uaucuacaucuuuuaaauc

SEQ ID NO: 1649305 - RNA, 19 nt, Artificial Sequence
  Description of Artificial Sequence: Synthetic oligonucleotide
ucgguauagugcuuuagua

SEQ ID NO: 1649306 - RNA, 19 nt, Artificial Sequence
  Description of Artificial Sequence: Synthetic oligonucleotide
auccuuuaaaauggagagg

SEQ ID NO: 1649307 - RNA, 19 nt, Artificial Sequence
  Description of Artificial Sequence: Synthetic oligonucleotide
ucaugcuuauaaugaaaau

SEQ ID NO: 1649308 - RNA, 19 nt, Artificial Sequence
  Description of Artificial Sequence: Synthetic oligonucleotide
caaaugaggaguuggaacu

SEQ ID NO: 1649309 - RNA, 19 nt, Artificial Sequence
  Description of Artificial Sequence: Synthetic oligonucleotide
agucuucaguuauuaauaa

SEQ ID NO: 1649310 - RNA, 19 nt, Artificial Sequence
  Description of Artificial Sequence: Synthetic oligonucleotide
uuccauccaaaugaggagu

SEQ ID NO: 1649311 - RNA, 19 nt, Artificial Sequence
  Description of Artificial Sequence: Synthetic oligonucleotide
uuaagucuucaguuauuaa

SEQ ID NO: 1649312 - RNA, 19 nt, Artificial Sequence
  Description of Artificial Sequence: Synthetic oligonucleotide
gugcuuuucgguauagugc

SEQ ID NO: 1649313 - RNA, 19 nt, Artificial Sequence
  Description of Artificial Sequence: Synthetic oligonucleotide
uccuguacacaacgcacga

SEQ ID NO: 1649314 - RNA, 19 nt, Artificial Sequence
  Description of Artificial Sequence: Synthetic oligonucleotide
ugaacuauccacguaucuu

SEQ ID NO: 1649315 - RNA, 19 nt, Artificial Sequence
  Description of Artificial Sequence: Synthetic oligonucleotide
uuuuaagucuucaguuauu

SEQ ID NO: 1649316 - RNA, 19 nt, Artificial Sequence
  Description of Artificial Sequence: Synthetic oligonucleotide
acgaaaauuuucugcaguu

SEQ ID NO: 1649317 - RNA, 19 nt, Artificial Sequence
  Description of Artificial Sequence: Synthetic oligonucleotide
aaugaggaguuggaacugu

SEQ ID NO: 1649318 - RNA, 19 nt, Artificial Sequence
  Description of Artificial Sequence: Synthetic oligonucleotide
auaucagcauccucaggga

SEQ ID NO: 1649319 - RNA, 19 nt, Artificial Sequence
  Description of Artificial Sequence: Synthetic oligonucleotide
acacuuuauuaagaaaccu

SEQ ID NO: 1649320 - RNA, 19 nt, Artificial Sequence
  Description of Artificial Sequence: Synthetic oligonucleotide
gcagucuagauguaucugc

SEQ ID NO: 1649321 - RNA, 19 nt, Artificial Sequence
  Description of Artificial Sequence: Synthetic oligonucleotide
gaaucauaaacuucuuaau

SEQ ID NO: 1649322 - RNA, 19 nt, Artificial Sequence
  Description of Artificial Sequence: Synthetic oligonucleotide
ggggacaaacucuacuccg

SEQ ID NO: 1649323 - RNA, 19 nt, Artificial Sequence
  Description of Artificial Sequence: Synthetic oligonucleotide
acaacgcacgaaaauuuuc

SEQ ID NO: 1649324 - RNA, 19 nt, Artificial Sequence
  Description of Artificial Sequence: Synthetic oligonucleotide
uaucugcuuucucaauaac

SEQ ID NO: 1649325 - RNA, 19 nt, Artificial Sequence
  Description of Artificial Sequence: Synthetic oligonucleotide
gggugcgacaucuucacag

SEQ ID NO: 1649326 - RNA, 19 nt, Artificial Sequence
  Description of Artificial Sequence: Synthetic oligonucleotide
cuauccacguaucuuaaaa

SEQ ID NO: 1649327 - RNA, 19 nt, Artificial Sequence
  Description of Artificial Sequence: Synthetic oligonucleotide
ucacuucgacauuuucaag

SEQ ID NO: 1649328 - RNA, 19 nt, Artificial Sequence
  Description of Artificial Sequence: Synthetic oligonucleotide
uuggggaauauuccccagu

SEQ ID NO: 1649329 - RNA, 19 nt, Artificial Sequence
  Description of Artificial Sequence: Synthetic oligonucleotide
auucaguacacagcuuaag

SEQ ID NO: 1649330 - RNA, 19 nt, Artificial Sequence
  Description of Artificial Sequence: Synthetic oligonucleotide
gaaaucuggaugacuguca

SEQ ID NO: 1649331 - RNA, 19 nt, Artificial Sequence
  Description of Artificial Sequence: Synthetic oligonucleotide
uauuccccagucauccccu

SEQ ID NO: 1649332 - RNA, 19 nt, Artificial Sequence
  Description of Artificial Sequence: Synthetic oligonucleotide
ucucaauaacagccuuuga

SEQ ID NO: 1649333 - RNA, 19 nt, Artificial Sequence
  Description of Artificial Sequence: Synthetic oligonucleotide
gacucgggcaccacgugcg

SEQ ID NO: 1649334 - RNA, 19 nt, Artificial Sequence
  Description of Artificial Sequence: Synthetic oligonucleotide
auaacagccuuugaacuau

SEQ ID NO: 1649335 - RNA, 19 nt, Artificial Sequence
  Description of Artificial Sequence: Synthetic oligonucleotide
acucuacuccgccucugcg

SEQ ID NO: 1649336 - RNA, 19 nt, Artificial Sequence
  Description of Artificial Sequence: Synthetic oligonucleotide
ugcgacaucuucacagcaa

SEQ ID NO: 1649337 - RNA, 19 nt, Artificial Sequence
  Description of Artificial Sequence: Synthetic oligonucleotide
auagugcuuuaguauuuga

SEQ ID NO: 1649338 - RNA, 19 nt, Artificial Sequence
  Description of Artificial Sequence: Synthetic oligonucleotide
cuuugaacuauccacguau

SEQ ID NO: 1649339 - RNA, 19 nt, Artificial Sequence
  Description of Artificial Sequence: Synthetic oligonucleotide
gcaagcgacgagaagagag

SEQ ID NO: 1649340 - RNA, 19 nt, Artificial Sequence
  Description of Artificial Sequence: Synthetic oligonucleotide
gugaaaaggacauccuuua

SEQ ID NO: 1649341 - RNA, 19 nt, Artificial Sequence
  Description of Artificial Sequence: Synthetic oligonucleotide
ucggugaaaaggacauccu

SEQ ID NO: 1649342 - RNA, 19 nt, Artificial Sequence
  Description of Artificial Sequence: Synthetic oligonucleotide
aaacccucccgaucaugcu

SEQ ID NO: 1649343 - RNA, 19 nt, Artificial Sequence
  Description of Artificial Sequence: Synthetic oligonucleotide
cagcaagcgacgagaagag

SEQ ID NO: 1649344 - RNA, 19 nt, Artificial Sequence
  Description of Artificial Sequence: Synthetic oligonucleotide
uuaaggcuauagguugcag

SEQ ID NO: 1649345 - RNA, 19 nt, Artificial Sequence
  Description of Artificial Sequence: Synthetic oligonucleotide
aagaagacccgcggguucu

SEQ ID NO: 1649346 - RNA, 19 nt, Artificial Sequence
  Description of Artificial Sequence: Synthetic oligonucleotide
caauaacagccuuugaacu

SEQ ID NO: 1649347 - RNA, 19 nt, Artificial Sequence
  Description of Artificial Sequence: Synthetic oligonucleotide
ugcagucuagauguaucug

SEQ ID NO: 1649348 - RNA, 19 nt, Artificial Sequence
  Description of Artificial Sequence: Synthetic oligonucleotide
caagcaccaauauucagua

SEQ ID NO: 1649349 - RNA, 19 nt, Artificial Sequence
  Description of Artificial Sequence: Synthetic oligonucleotide
ugggaacaauaucugcaaa

SEQ ID NO: 1649350 - RNA, 19 nt, Artificial Sequence
  Description of Artificial Sequence: Synthetic oligonucleotide
cucccgaucaugcuuauaa

SEQ ID NO: 1649351 - RNA, 19 nt, Artificial Sequence
  Description of Artificial Sequence: Synthetic oligonucleotide
cacgucaaagaagacccgc

SEQ ID NO: 1649352 - RNA, 19 nt, Artificial Sequence
  Description of Artificial Sequence: Synthetic oligonucleotide
cauucugauuugagaaguc

SEQ ID NO: 1649353 - RNA, 19 nt, Artificial Sequence
  Description of Artificial Sequence: Synthetic oligonucleotide
uccaaaugaggaguuggaa

SEQ ID NO: 1649354 - RNA, 19 nt, Artificial Sequence
  Description of Artificial Sequence: Synthetic oligonucleotide
uucuuucaauucuccacau

SEQ ID NO: 1649355 - RNA, 19 nt, Artificial Sequence
  Description of Artificial Sequence: Synthetic oligonucleotide
uggcugucggggaugggug

SEQ ID NO: 1649356 - RNA, 19 nt, Artificial Sequence
  Description of Artificial Sequence: Synthetic oligonucleotide
cauucugcaaugacacaca

SEQ ID NO: 1649357 - RNA, 19 nt, Artificial Sequence
  Description of Artificial Sequence: Synthetic oligonucleotide
cuucacagcaagcgacgag

SEQ ID NO: 1649358 - RNA, 19 nt, Artificial Sequence
  Description of Artificial Sequence: Synthetic oligonucleotide
uugggaccugcauuugcca

SEQ ID NO: 1649359 - RNA, 19 nt, Artificial Sequence
  Description of Artificial Sequence: Synthetic oligonucleotide
aacccucccgaucaugcuu

SEQ ID NO: 1649360 - RNA, 19 nt, Artificial Sequence
  Description of Artificial Sequence: Synthetic oligonucleotide
ucuuaauaauucggugaaa

SEQ ID NO: 1649361 - RNA, 19 nt, Artificial Sequence
  Description of Artificial Sequence: Synthetic oligonucleotide
guccauuucaagagccucc

SEQ ID NO: 1649362 - RNA, 19 nt, Artificial Sequence
  Description of Artificial Sequence: Synthetic oligonucleotide
cguaucuuaaaaccuuugc

SEQ ID NO: 1649363 - RNA, 19 nt, Artificial Sequence
  Description of Artificial Sequence: Synthetic oligonucleotide
gaagagagacucgggcacc

SEQ ID NO: 1649364 - RNA, 19 nt, Artificial Sequence
  Description of Artificial Sequence: Synthetic oligonucleotide
gcaaacaauucuaaaacaa

SEQ ID NO: 1649365 - RNA, 19 nt, Artificial Sequence
  Description of Artificial Sequence: Synthetic oligonucleotide
auccuugugcuuuucggua

SEQ ID NO: 1649366 - RNA, 19 nt, Artificial Sequence
  Description of Artificial Sequence: Synthetic oligonucleotide
auuuguauugggaccugca

SEQ ID NO: 1649367 - RNA, 19 nt, Artificial Sequence
  Description of Artificial Sequence: Synthetic oligonucleotide
cuguugugauaaagaacug

SEQ ID NO: 1649368 - RNA, 19 nt, Artificial Sequence
  Description of Artificial Sequence: Synthetic oligonucleotide
uaauagccaucucccaguu

SEQ ID NO: 1649369 - RNA, 19 nt, Artificial Sequence
  Description of Artificial Sequence: Synthetic oligonucleotide
ucgggcaccacgugcguga

SEQ ID NO: 1649370 - RNA, 19 nt, Artificial Sequence
  Description of Artificial Sequence: Synthetic oligonucleotide
uccuugugcuuuucgguau

SEQ ID NO: 1649371 - RNA, 19 nt, Artificial Sequence
  Description of Artificial Sequence: Synthetic oligonucleotide
gcgacaucuucacagcaag

SEQ ID NO: 1649372 - RNA, 19 nt, Artificial Sequence
  Description of Artificial Sequence: Synthetic oligonucleotide
ccauaaauacuuucuccac

SEQ ID NO: 1649373 - RNA, 19 nt, Artificial Sequence
  Description of Artificial Sequence: Synthetic oligonucleotide
ccgucuuuggggaauauuc

SEQ ID NO: 1649374 - RNA, 19 nt, Artificial Sequence
  Description of Artificial Sequence: Synthetic oligonucleotide
cuucaguuauuaauaaaau

SEQ ID NO: 1649375 - RNA, 19 nt, Artificial Sequence
  Description of Artificial Sequence: Synthetic oligonucleotide
aauauucaguacacagcuu

SEQ ID NO: 1649376 - RNA, 19 nt, Artificial Sequence
  Description of Artificial Sequence: Synthetic oligonucleotide
caagcgacgagaagagaga

SEQ ID NO: 1649377 - RNA, 19 nt, Artificial Sequence
  Description of Artificial Sequence: Synthetic oligonucleotide
ucauccccuucuuucaauu

SEQ ID NO: 1649378 - RNA, 19 nt, Artificial Sequence
  Description of Artificial Sequence: Synthetic oligonucleotide
ucuucacagcaagcgacga

SEQ ID NO: 1649379 - RNA, 19 nt, Artificial Sequence
  Description of Artificial Sequence: Synthetic oligonucleotide
cagcaaacccucccgauca

SEQ ID NO: 1649380 - RNA, 19 nt, Artificial Sequence
  Description of Artificial Sequence: Synthetic oligonucleotide
caucuucaauuuacaagca

SEQ ID NO: 1649381 - RNA, 19 nt, Artificial Sequence
  Description of Artificial Sequence: Synthetic oligonucleotide
ccgaucaugcuuauaauga

SEQ ID NO: 1649382 - RNA, 19 nt, Artificial Sequence
  Description of Artificial Sequence: Synthetic oligonucleotide
aaacucuacuccgccucug

SEQ ID NO: 1649383 - RNA, 19 nt, Artificial Sequence
  Description of Artificial Sequence: Synthetic oligonucleotide
ugacugucaccagagccgu

SEQ ID NO: 1649384 - RNA, 19 nt, Artificial Sequence
  Description of Artificial Sequence: Synthetic oligonucleotide
ggacaaacucuacuccgcc

SEQ ID NO: 1649385 - RNA, 19 nt, Artificial Sequence
  Description of Artificial Sequence: Synthetic oligonucleotide
ugcauuugccaugcucagc

SEQ ID NO: 1649386 - RNA, 19 nt, Artificial Sequence
  Description of Artificial Sequence: Synthetic oligonucleotide
agguuucccaguugugggu

SEQ ID NO: 1649387 - RNA, 19 nt, Artificial Sequence
  Description of Artificial Sequence: Synthetic oligonucleotide
aagagagacucgggcacca

SEQ ID NO: 1649388 - RNA, 19 nt, Artificial Sequence
  Description of Artificial Sequence: Synthetic oligonucleotide
ggugcgacaucuucacagc

SEQ ID NO: 1649389 - RNA, 19 nt, Artificial Sequence
  Description of Artificial Sequence: Synthetic oligonucleotide
aacuauccacguaucuuaa

SEQ ID NO: 1649390 - RNA, 19 nt, Artificial Sequence
  Description of Artificial Sequence: Synthetic oligonucleotide
cccgaucaugcuuauaaug

SEQ ID NO: 1649391 - RNA, 19 nt, Artificial Sequence
  Description of Artificial Sequence: Synthetic oligonucleotide
ggaguuggaacuguuguga

SEQ ID NO: 1649392 - RNA, 19 nt, Artificial Sequence
  Description of Artificial Sequence: Synthetic oligonucleotide
aguuggaacuguugugaua

SEQ ID NO: 1649393 - RNA, 19 nt, Artificial Sequence
  Description of Artificial Sequence: Synthetic oligonucleotide
caacgcacgaaaauuuucu

SEQ ID NO: 1649394 - RNA, 19 nt, Artificial Sequence
  Description of Artificial Sequence: Synthetic oligonucleotide
aguacacagcuuaaggcua

SEQ ID NO: 1649395 - RNA, 19 nt, Artificial Sequence
  Description of Artificial Sequence: Synthetic oligonucleotide
gcacgaaaauuuucugcag

SEQ ID NO: 1649396 - RNA, 19 nt, Artificial Sequence
  Description of Artificial Sequence: Synthetic oligonucleotide
acacagcuuaaggcuauag

SEQ ID NO: 1649397 - RNA, 19 nt, Artificial Sequence
  Description of Artificial Sequence: Synthetic oligonucleotide
caccacgugcgugaguggg

SEQ ID NO: 1649398 - RNA, 19 nt, Artificial Sequence
  Description of Artificial Sequence: Synthetic oligonucleotide
gguauagugcuuuaguauu

SEQ ID NO: 1649399 - RNA, 19 nt, Artificial Sequence
  Description of Artificial Sequence: Synthetic oligonucleotide
acuauccacguaucuuaaa

SEQ ID NO: 1649400 - RNA, 19 nt, Artificial Sequence
  Description of Artificial Sequence: Synthetic oligonucleotide
auucggugaaaaggacauc

SEQ ID NO: 1649401 - RNA, 19 nt, Artificial Sequence
  Description of Artificial Sequence: Synthetic oligonucleotide
agagacucgggcaccacgu

SEQ ID NO: 1649402 - RNA, 19 nt, Artificial Sequence
  Description of Artificial Sequence: Synthetic oligonucleotide
acgagaagagagacucggg

SEQ ID NO: 1649403 - RNA, 19 nt, Artificial Sequence
  Description of Artificial Sequence: Synthetic oligonucleotide
gcgacgagaagagagacuc

SEQ ID NO: 1649404 - RNA, 19 nt, Artificial Sequence
  Description of Artificial Sequence: Synthetic oligonucleotide
acucgcuccccgccgaugu

SEQ ID NO: 1649405 - RNA, 19 nt, Artificial Sequence
  Description of Artificial Sequence: Synthetic oligonucleotide
ucggggaugggugcgacau

SEQ ID NO: 1649406 - RNA, 19 nt, Artificial Sequence
  Description of Artificial Sequence: Synthetic oligonucleotide
ggaaaucuggaugacuguc

SEQ ID NO: 1649407 - RNA, 19 nt, Artificial Sequence
  Description of Artificial Sequence: Synthetic oligonucleotide
gacccgcggguucuugggg

SEQ ID NO: 1649408 - RNA, 19 nt, Artificial Sequence
  Description of Artificial Sequence: Synthetic oligonucleotide
cauccccuucuuucaauuc

SEQ ID NO: 1649409 - RNA, 19 nt, Artificial Sequence
  Description of Artificial Sequence: Synthetic oligonucleotide
cuugugcuuuucgguauag

SEQ ID NO: 1649410 - RNA, 19 nt, Artificial Sequence
  Description of Artificial Sequence: Synthetic oligonucleotide
ugggaccugcauuugccau

SEQ ID NO: 1649411 - RNA, 19 nt, Artificial Sequence
  Description of Artificial Sequence: Synthetic oligonucleotide
acguaucuuaaaaccuuug

SEQ ID NO: 1649412 - RNA, 19 nt, Artificial Sequence
  Description of Artificial Sequence: Synthetic oligonucleotide
ggcaccacgugcgugagug

SEQ ID NO: 1649413 - RNA, 19 nt, Artificial Sequence
  Description of Artificial Sequence: Synthetic oligonucleotide
acacaacgcacgaaaauuu

SEQ ID NO: 1649414 - RNA, 19 nt, Artificial Sequence
  Description of Artificial Sequence: Synthetic oligonucleotide
agucuagauguaucugcuu

SEQ ID NO: 1649415 - RNA, 19 nt, Artificial Sequence
  Description of Artificial Sequence: Synthetic oligonucleotide
cgagaagagagacucgggc

SEQ ID NO: 1649416 - RNA, 19 nt, Artificial Sequence
  Description of Artificial Sequence: Synthetic oligonucleotide
cacagcaagcgacgagaag

SEQ ID NO: 1649417 - RNA, 19 nt, Artificial Sequence
  Description of Artificial Sequence: Synthetic oligonucleotide
gccgauguccacgucaaag

SEQ ID NO: 1649418 - RNA, 19 nt, Artificial Sequence
  Description of Artificial Sequence: Synthetic oligonucleotide
ucccgaucaugcuuauaau

SEQ ID NO: 1649419 - RNA, 19 nt, Artificial Sequence
  Description of Artificial Sequence: Synthetic oligonucleotide
cuauagguugcagucuaga

SEQ ID NO: 1649420 - RNA, 19 nt, Artificial Sequence
  Description of Artificial Sequence: Synthetic oligonucleotide
uguccacgucaaagaagac

SEQ ID NO: 1649421 - RNA, 19 nt, Artificial Sequence
  Description of Artificial Sequence: Synthetic oligonucleotide
gggaauauuccccagucau

SEQ ID NO: 1649422 - RNA, 19 nt, Artificial Sequence
  Description of Artificial Sequence: Synthetic oligonucleotide
cgucuuuggggaauauucc

SEQ ID NO: 1649423 - RNA, 19 nt, Artificial Sequence
  Description of Artificial Sequence: Synthetic oligonucleotide
cuuaaggcuauagguugca

SEQ ID NO: 1649424 - RNA, 19 nt, Artificial Sequence
  Description of Artificial Sequence: Synthetic oligonucleotide
acaauucugccaacucgcu

SEQ ID NO: 1649425 - RNA, 19 nt, Artificial Sequence
  Description of Artificial Sequence: Synthetic oligonucleotide
gggaccugcauuugccaug

SEQ ID NO: 1649426 - RNA, 19 nt, Artificial Sequence
  Description of Artificial Sequence: Synthetic oligonucleotide
ugggugcgacaucuucaca

SEQ ID NO: 1649427 - RNA, 19 nt, Artificial Sequence
  Description of Artificial Sequence: Synthetic oligonucleotide
guacacaacgcacgaaaau

SEQ ID NO: 1649428 - RNA, 19 nt, Artificial Sequence
  Description of Artificial Sequence: Synthetic oligonucleotide
gggacaaacucuacuccgc

SEQ ID NO: 1649429 - RNA, 19 nt, Artificial Sequence
  Description of Artificial Sequence: Synthetic oligonucleotide
uguggguccagugccuuuu

SEQ ID NO: 1649430 - RNA, 19 nt, Artificial Sequence
  Description of Artificial Sequence: Synthetic oligonucleotide
aggcuauagguugcagucu

SEQ ID NO: 1649431 - RNA, 19 nt, Artificial Sequence
  Description of Artificial Sequence: Synthetic oligonucleotide
cugccaacucgcuccccgc

SEQ ID NO: 1649432 - RNA, 19 nt, Artificial Sequence
  Description of Artificial Sequence: Synthetic oligonucleotide
cgcacgaaaauuuucugca

SEQ ID NO: 1649433 - RNA, 19 nt, Artificial Sequence
  Description of Artificial Sequence: Synthetic oligonucleotide
cagucuagauguaucugcu

SEQ ID NO: 1649434 - RNA, 19 nt, Artificial Sequence
  Description of Artificial Sequence: Synthetic oligonucleotide
ggaugggugcgacaucuuc

SEQ ID NO: 1649435 - RNA, 19 nt, Artificial Sequence
  Description of Artificial Sequence: Synthetic oligonucleotide
ggaauauuccccagucauc

SEQ ID NO: 1649436 - RNA, 19 nt, Artificial Sequence
  Description of Artificial Sequence: Synthetic oligonucleotide
uuggaacuguugugauaaa

SEQ ID NO: 1649437 - RNA, 19 nt, Artificial Sequence
  Description of Artificial Sequence: Synthetic oligonucleotide
ggaccugcauuugccaugc

SEQ ID NO: 1649438 - RNA, 19 nt, Artificial Sequence
  Description of Artificial Sequence: Synthetic oligonucleotide
gugcgacaucuucacagca

SEQ ID NO: 1649439 - RNA, 19 nt, Artificial Sequence
  Description of Artificial Sequence: Synthetic oligonucleotide
cuccccgccgauguccacg

SEQ ID NO: 1649440 - RNA, 19 nt, Artificial Sequence
  Description of Artificial Sequence: Synthetic oligonucleotide
acccgcggguucuuggggu

SEQ ID NO: 1649441 - RNA, 19 nt, Artificial Sequence
  Description of Artificial Sequence: Synthetic oligonucleotide
aacucgcuccccgccgaug

SEQ ID NO: 1649442 - RNA, 19 nt, Artificial Sequence
  Description of Artificial Sequence: Synthetic oligonucleotide
cuagauguaucugcuuucu

SEQ ID NO: 1649443 - RNA, 19 nt, Artificial Sequence
  Description of Artificial Sequence: Synthetic oligonucleotide
ccaguucugagauuugaaa

SEQ ID NO: 1649444 - RNA, 19 nt, Artificial Sequence
  Description of Artificial Sequence: Synthetic oligonucleotide
gguccauuucaagagccuc

SEQ ID NO: 1649445 - RNA, 19 nt, Artificial Sequence
  Description of Artificial Sequence: Synthetic oligonucleotide
agagccgucuuuggggaau

SEQ ID NO: 1649446 - RNA, 19 nt, Artificial Sequence
  Description of Artificial Sequence: Synthetic oligonucleotide
gccaacucgcuccccgccg

SEQ ID NO: 1649447 - RNA, 19 nt, Artificial Sequence
  Description of Artificial Sequence: Synthetic oligonucleotide
ggcuauagguugcagucua

SEQ ID NO: 1649448 - RNA, 19 nt, Artificial Sequence
  Description of Artificial Sequence: Synthetic oligonucleotide
uccccgccgauguccacgu

SEQ ID NO: 1649449 - RNA, 19 nt, Artificial Sequence
  Description of Artificial Sequence: Synthetic oligonucleotide
gaagacccgcggguucuug

SEQ ID NO: 1649450 - RNA, 19 nt, Artificial Sequence
  Description of Artificial Sequence: Synthetic oligonucleotide
agcgacgagaagagagacu

SEQ ID NO: 1649451 - RNA, 19 nt, Artificial Sequence
  Description of Artificial Sequence: Synthetic oligonucleotide
ccgauguccacgucaaaga

SEQ ID NO: 1649452 - RNA, 19 nt, Artificial Sequence
  Description of Artificial Sequence: Synthetic oligonucleotide
agcaaacccucccgaucau

SEQ ID NO: 1649453 - RNA, 19 nt, Artificial Sequence
  Description of Artificial Sequence: Synthetic oligonucleotide
caucucccaguucugagau

SEQ ID NO: 1649454 - RNA, 19 nt, Artificial Sequence
  Description of Artificial Sequence: Synthetic oligonucleotide
gcuauagguugcagucuag

SEQ ID NO: 1649455 - RNA, 19 nt, Artificial Sequence
  Description of Artificial Sequence: Synthetic oligonucleotide
ccacgucaaagaagacccg

SEQ ID NO: 1649456 - RNA, 19 nt, Artificial Sequence
  Description of Artificial Sequence: Synthetic oligonucleotide
agcaagcgacgagaagaga

SEQ ID NO: 1649457 - RNA, 19 nt, Artificial Sequence
  Description of Artificial Sequence: Synthetic oligonucleotide
cucuacuccgccucugcgu

SEQ ID NO: 1649458 - RNA, 19 nt, Artificial Sequence
  Description of Artificial Sequence: Synthetic oligonucleotide
ucccaguuguggguccagu

SEQ ID NO: 1649459 - RNA, 19 nt, Artificial Sequence
  Description of Artificial Sequence: Synthetic oligonucleotide
caccaauauucaguacaca

SEQ ID NO: 1649460 - RNA, 19 nt, Artificial Sequence
  Description of Artificial Sequence: Synthetic oligonucleotide
guauagugcuuuaguauuu

SEQ ID NO: 1649461 - RNA, 19 nt, Artificial Sequence
  Description of Artificial Sequence: Synthetic oligonucleotide
cccaguuguggguccagug

SEQ ID NO: 1649462 - RNA, 19 nt, Artificial Sequence
  Description of Artificial Sequence: Synthetic oligonucleotide
cacguaucuuaaaaccuuu

SEQ ID NO: 1649463 - RNA, 19 nt, Artificial Sequence
  Description of Artificial Sequence: Synthetic oligonucleotide
gcugucggggaugggugcg

SEQ ID NO: 1649464 - RNA, 19 nt, Artificial Sequence
  Description of Artificial Sequence: Synthetic oligonucleotide
acucgggcaccacgugcgu

SEQ ID NO: 1649465 - RNA, 19 nt, Artificial Sequence
  Description of Artificial Sequence: Synthetic oligonucleotide
ugucggggaugggugcgac

SEQ ID NO: 1649466 - RNA, 19 nt, Artificial Sequence
  Description of Artificial Sequence: Synthetic oligonucleotide
cacaacgcacgaaaauuuu

SEQ ID NO: 1649467 - RNA, 19 nt, Artificial Sequence
  Description of Artificial Sequence: Synthetic oligonucleotide
ggcugucggggaugggugc

SEQ ID NO: 1649468 - RNA, 19 nt, Artificial Sequence
  Description of Artificial Sequence: Synthetic oligonucleotide
gguuggagggccuggcugu

SEQ ID NO: 1649469 - RNA, 19 nt, Artificial Sequence
  Description of Artificial Sequence: Synthetic oligonucleotide
gcucagcaaacccucccga

SEQ ID NO: 1649470 - RNA, 19 nt, Artificial Sequence
  Description of Artificial Sequence: Synthetic oligonucleotide
caaacucuacuccgccucu

SEQ ID NO: 1649471 - RNA, 19 nt, Artificial Sequence
  Description of Artificial Sequence: Synthetic oligonucleotide
uucugccaacucgcucccc

SEQ ID NO: 1649472 - RNA, 19 nt, Artificial Sequence
  Description of Artificial Sequence: Synthetic oligonucleotide
aucucccaguucugagauu

SEQ ID NO: 1649473 - RNA, 19 nt, Artificial Sequence
  Description of Artificial Sequence: Synthetic oligonucleotide
gggaaaucuggaugacugu

SEQ ID NO: 1649474 - RNA, 19 nt, Artificial Sequence
  Description of Artificial Sequence: Synthetic oligonucleotide
ccagagccgucuuugggga

SEQ ID NO: 1649475 - RNA, 19 nt, Artificial Sequence
  Description of Artificial Sequence: Synthetic oligonucleotide
acccucccgaucaugcuua

SEQ ID NO: 1649476 - RNA, 19 nt, Artificial Sequence
  Description of Artificial Sequence: Synthetic oligonucleotide
cccuucuuucaauucucca

SEQ ID NO: 1649477 - RNA, 19 nt, Artificial Sequence
  Description of Artificial Sequence: Synthetic oligonucleotide
gccuuugaacuauccacgu

SEQ ID NO: 1649478 - RNA, 19 nt, Artificial Sequence
  Description of Artificial Sequence: Synthetic oligonucleotide
cgaucaugcuuauaaugaa

SEQ ID NO: 1649479 - RNA, 19 nt, Artificial Sequence
  Description of Artificial Sequence: Synthetic oligonucleotide
cugucccauucugauuuga

SEQ ID NO: 1649480 - RNA, 19 nt, Artificial Sequence
  Description of Artificial Sequence: Synthetic oligonucleotide
cgacgagaagagagacucg

SEQ ID NO: 1649481 - RNA, 19 nt, Artificial Sequence
  Description of Artificial Sequence: Synthetic oligonucleotide
cucgggcaccacgugcgug

SEQ ID NO: 1649482 - RNA, 19 nt, Artificial Sequence
  Description of Artificial Sequence: Synthetic oligonucleotide
gucauccccuucuuucaau

SEQ ID NO: 1649483 - RNA, 19 nt, Artificial Sequence
  Description of Artificial Sequence: Synthetic oligonucleotide
gcaccacgugcgugagugg

SEQ ID NO: 1649484 - RNA, 19 nt, Artificial Sequence
  Description of Artificial Sequence: Synthetic oligonucleotide
guacacagcuuaaggcuau

SEQ ID NO: 1649485 - RNA, 19 nt, Artificial Sequence
  Description of Artificial Sequence: Synthetic oligonucleotide
cuucgacauuuucaagcau

SEQ ID NO: 1649486 - RNA, 19 nt, Artificial Sequence
  Description of Artificial Sequence: Synthetic oligonucleotide
guuggagggccuggcuguc

SEQ ID NO: 1649487 - RNA, 19 nt, Artificial Sequence
  Description of Artificial Sequence: Synthetic oligonucleotide
gucggggaugggugcgaca

SEQ ID NO: 1649488 - RNA, 19 nt, Artificial Sequence
  Description of Artificial Sequence: Synthetic oligonucleotide
cucgcuccccgccgauguc

SEQ ID NO: 1649489 - RNA, 19 nt, Artificial Sequence
  Description of Artificial Sequence: Synthetic oligonucleotide
ccacguaucuuaaaaccuu

SEQ ID NO: 1649490 - RNA, 19 nt, Artificial Sequence
  Description of Artificial Sequence: Synthetic oligonucleotide
gacugucaccagagccguc

SEQ ID NO: 1649491 - RNA, 19 nt, Artificial Sequence
  Description of Artificial Sequence: Synthetic oligonucleotide
cgguauagugcuuuaguau

SEQ ID NO: 1649492 - RNA, 19 nt, Artificial Sequence
  Description of Artificial Sequence: Synthetic oligonucleotide
gguugcagucuagauguau

SEQ ID NO: 1649493 - RNA, 19 nt, Artificial Sequence
  Description of Artificial Sequence: Synthetic oligonucleotide
gagccgucuuuggggaaua

SEQ ID NO: 1649494 - RNA, 19 nt, Artificial Sequence
  Description of Artificial Sequence: Synthetic oligonucleotide
cagagccgucuuuggggaa

SEQ ID NO: 1649495 - RNA, 19 nt, Artificial Sequence
  Description of Artificial Sequence: Synthetic oligonucleotide
agccgucuuuggggaauau

SEQ ID NO: 1649496 - RNA, 19 nt, Artificial Sequence
  Description of Artificial Sequence: Synthetic oligonucleotide
cugucggggaugggugcga

SEQ ID NO: 1649497 - RNA, 19 nt, Artificial Sequence
  Description of Artificial Sequence: Synthetic oligonucleotide
ccaacucgcuccccgccga

SEQ ID NO: 1649498 - RNA, 19 nt, Artificial Sequence
  Description of Artificial Sequence: Synthetic oligonucleotide
ggguccauuucaagagccu

SEQ ID NO: 1649499 - RNA, 19 nt, Artificial Sequence
  Description of Artificial Sequence: Synthetic oligonucleotide
ccgccgauguccacgucaa

SEQ ID NO: 1649500 - RNA, 19 nt, Artificial Sequence
  Description of Artificial Sequence: Synthetic oligonucleotide
caccauucacuucgacauu

SEQ ID NO: 1649501 - RNA, 19 nt, Artificial Sequence
  Description of Artificial Sequence: Synthetic oligonucleotide
ccuguacacaacgcacgaa

SEQ ID NO: 1649502 - RNA, 19 nt, Artificial Sequence
  Description of Artificial Sequence: Synthetic oligonucleotide
cgcggguucuugggguugg

SEQ ID NO: 1649503 - RNA, 19 nt, Artificial Sequence
  Description of Artificial Sequence: Synthetic oligonucleotide
gaccugcauuugccaugcu

SEQ ID NO: 1649504 - RNA, 19 nt, Artificial Sequence
  Description of Artificial Sequence: Synthetic oligonucleotide
cggugaaaaggacauccuu

SEQ ID NO: 1649505 - RNA, 19 nt, Artificial Sequence
  Description of Artificial Sequence: Synthetic oligonucleotide
ccgcggguucuugggguug

SEQ ID NO: 1649506 - RNA, 19 nt, Artificial Sequence
  Description of Artificial Sequence: Synthetic oligonucleotide
gcuccccgccgauguccac

SEQ ID NO: 1649507 - RNA, 19 nt, Artificial Sequence
  Description of Artificial Sequence: Synthetic oligonucleotide
caacucgcuccccgccgau

SEQ ID NO: 1649508 - RNA, 19 nt, Artificial Sequence
  Description of Artificial Sequence: Synthetic oligonucleotide
gccgucuuuggggaauauu

SEQ ID NO: 1649509 - RNA, 19 nt, Artificial Sequence
  Description of Artificial Sequence: Synthetic oligonucleotide
cgggcaccacgugcgugag

SEQ ID NO: 1649510 - RNA, 19 nt, Artificial Sequence
  Description of Artificial Sequence: Synthetic oligonucleotide
gcggguucuugggguugga

SEQ ID NO: 1649511 - RNA, 19 nt, Artificial Sequence
  Description of Artificial Sequence: Synthetic oligonucleotide
gggaugggugcgacaucuu

SEQ ID NO: 1649512 - RNA, 19 nt, Artificial Sequence
  Description of Artificial Sequence: Synthetic oligonucleotide
ccucccgaucaugcuuaua

SEQ ID NO: 1649513 - RNA, 19 nt, Artificial Sequence
  Description of Artificial Sequence: Synthetic oligonucleotide
cccgcggguucuugggguu

SEQ ID NO: 1649514 - RNA, 19 nt, Artificial Sequence
  Description of Artificial Sequence: Synthetic oligonucleotide
ccccgccgauguccacguc

SEQ ID NO: 1649515 - RNA, 19 nt, Artificial Sequence
  Description of Artificial Sequence: Synthetic oligonucleotide
cgccgauguccacgucaaa

SEQ ID NO: 1649516 - RNA, 19 nt, Artificial Sequence
  Description of Artificial Sequence: Synthetic oligonucleotide
aauagcuacguucauauuc

SEQ ID NO: 1649517 - RNA, 19 nt, Artificial Sequence
  Description of Artificial Sequence: Synthetic oligonucleotide
aaacaacaaagauaauacc

SEQ ID NO: 1649518 - RNA, 19 nt, Artificial Sequence
  Description of Artificial Sequence: Synthetic oligonucleotide
auagcgaagaucuugacag

SEQ ID NO: 1649519 - RNA, 19 nt, Artificial Sequence
  Description of Artificial Sequence: Synthetic oligonucleotide
aagaaaucgucccaggcac

SEQ ID NO: 1649520 - RNA, 19 nt, Artificial Sequence
  Description of Artificial Sequence: Synthetic oligonucleotide
gauaugaggaaguagcuag

SEQ ID NO: 1649521 - RNA, 19 nt, Artificial Sequence
  Description of Artificial Sequence: Synthetic oligonucleotide
uucuauuucaaaaccacag

SEQ ID NO: 1649522 - RNA, 19 nt, Artificial Sequence
  Description of Artificial Sequence: Synthetic oligonucleotide
aauaccacuaaacuaacau

SEQ ID NO: 1649523 - RNA, 19 nt, Artificial Sequence
  Description of Artificial Sequence: Synthetic oligonucleotide
ucguaaacaaaauauaaac

SEQ ID NO: 1649524 - RNA, 19 nt, Artificial Sequence
  Description of Artificial Sequence: Synthetic oligonucleotide
acuuuaaccgacuuuucgc

SEQ ID NO: 1649525 - RNA, 19 nt, Artificial Sequence
  Description of Artificial Sequence: Synthetic oligonucleotide
aaugauuccuccaaggauc

SEQ ID NO: 1649526 - RNA, 19 nt, Artificial Sequence
  Description of Artificial Sequence: Synthetic oligonucleotide
auuggcgucuucuucaacc

SEQ ID NO: 1649527 - RNA, 19 nt, Artificial Sequence
  Description of Artificial Sequence: Synthetic oligonucleotide
agcaaaggaaaagugaugc

SEQ ID NO: 1649528 - RNA, 19 nt, Artificial Sequence
  Description of Artificial Sequence: Synthetic oligonucleotide
aaaaugacuguuccccuac

SEQ ID NO: 1649529 - RNA, 19 nt, Artificial Sequence
  Description of Artificial Sequence: Synthetic oligonucleotide
uaauucgcaagaaauaccu

SEQ ID NO: 1649530 - RNA, 19 nt, Artificial Sequence
  Description of Artificial Sequence: Synthetic oligonucleotide
uauaacaggagauuggguc

SEQ ID NO: 1649531 - RNA, 19 nt, Artificial Sequence
  Description of Artificial Sequence: Synthetic oligonucleotide
uucuaaauagcuacguuca

SEQ ID NO: 1649532 - RNA, 19 nt, Artificial Sequence
  Description of Artificial Sequence: Synthetic oligonucleotide
gauaauaccacuaaacuaa

SEQ ID NO: 1649533 - RNA, 19 nt, Artificial Sequence
  Description of Artificial Sequence: Synthetic oligonucleotide
acugaaaucaucauggcag

SEQ ID NO: 1649534 - RNA, 19 nt, Artificial Sequence
  Description of Artificial Sequence: Synthetic oligonucleotide
aauagagcagauugcucac

SEQ ID NO: 1649535 - RNA, 19 nt, Artificial Sequence
  Description of Artificial Sequence: Synthetic oligonucleotide
gauauaacaggagauuggg

SEQ ID NO: 1649536 - RNA, 19 nt, Artificial Sequence
  Description of Artificial Sequence: Synthetic oligonucleotide
aaagaaaucgucccaggca

SEQ ID NO: 1649537 - RNA, 19 nt, Artificial Sequence
  Description of Artificial Sequence: Synthetic oligonucleotide
agaauaacagaaguuauag

SEQ ID NO: 1649538 - RNA, 19 nt, Artificial Sequence
  Description of Artificial Sequence: Synthetic oligonucleotide
uuuaauucgcaagaaauac

SEQ ID NO: 1649539 - RNA, 19 nt, Artificial Sequence
  Description of Artificial Sequence: Synthetic oligonucleotide
auucgcaagaaauaccuuc

SEQ ID NO: 1649540 - RNA, 19 nt, Artificial Sequence
  Description of Artificial Sequence: Synthetic oligonucleotide
cauuguucuaaauagcuac

SEQ ID NO: 1649541 - RNA, 19 nt, Artificial Sequence
  Description of Artificial Sequence: Synthetic oligonucleotide
uacuuuaaccgacuuuucg

SEQ ID NO: 1649542 - RNA, 19 nt, Artificial Sequence
  Description of Artificial Sequence: Synthetic oligonucleotide
aaguuauagaguuguaacu

SEQ ID NO: 1649543 - RNA, 19 nt, Artificial Sequence
  Description of Artificial Sequence: Synthetic oligonucleotide
aacuggcugauccaguuuc

SEQ ID NO: 1649544 - RNA, 19 nt, Artificial Sequence
  Description of Artificial Sequence: Synthetic oligonucleotide
uuaauucgcaagaaauacc

SEQ ID NO: 1649545 - RNA, 19 nt, Artificial Sequence
  Description of Artificial Sequence: Synthetic oligonucleotide
acaacaaagauaauaccac

SEQ ID NO: 1649546 - RNA, 19 nt, Artificial Sequence
  Description of Artificial Sequence: Synthetic oligonucleotide
aaagggauagaaaucaccu

SEQ ID NO: 1649547 - RNA, 19 nt, Artificial Sequence
  Description of Artificial Sequence: Synthetic oligonucleotide
acgacugaaaucaucaugg

SEQ ID NO: 1649548 - RNA, 19 nt, Artificial Sequence
  Description of Artificial Sequence: Synthetic oligonucleotide
caaugcacaucaaacaggc

SEQ ID NO: 1649549 - RNA, 19 nt, Artificial Sequence
  Description of Artificial Sequence: Synthetic oligonucleotide
uuauagaguuguaacuacc

SEQ ID NO: 1649550 - RNA, 19 nt, Artificial Sequence
  Description of Artificial Sequence: Synthetic oligonucleotide
guugaaggggcucagaaac

SEQ ID NO: 1649551 - RNA, 19 nt, Artificial Sequence
  Description of Artificial Sequence: Synthetic oligonucleotide
uauucguaaacaaaauaua

SEQ ID NO: 1649552 - RNA, 19 nt, Artificial Sequence
  Description of Artificial Sequence: Synthetic oligonucleotide
aacgggucugaacaagggg

SEQ ID NO: 1649553 - RNA, 19 nt, Artificial Sequence
  Description of Artificial Sequence: Synthetic oligonucleotide
aggcuagaagauuuacucc

SEQ ID NO: 1649554 - RNA, 19 nt, Artificial Sequence
  Description of Artificial Sequence: Synthetic oligonucleotide
auagaaaucaccucugauu

SEQ ID NO: 1649555 - RNA, 19 nt, Artificial Sequence
  Description of Artificial Sequence: Synthetic oligonucleotide
aaccccacgacugaaauca

SEQ ID NO: 1649556 - RNA, 19 nt, Artificial Sequence
  Description of Artificial Sequence: Synthetic oligonucleotide
caagucaagaauaacagaa

SEQ ID NO: 1649557 - RNA, 19 nt, Artificial Sequence
  Description of Artificial Sequence: Synthetic oligonucleotide
guucuaaauagcuacguuc

SEQ ID NO: 1649558 - RNA, 19 nt, Artificial Sequence
  Description of Artificial Sequence: Synthetic oligonucleotide
aacccuauucccuccaucu

SEQ ID NO: 1649559 - RNA, 19 nt, Artificial Sequence
  Description of Artificial Sequence: Synthetic oligonucleotide
uuuagcaagucaagaauaa

SEQ ID NO: 1649560 - RNA, 19 nt, Artificial Sequence
  Description of Artificial Sequence: Synthetic oligonucleotide
uccuccaaggaucauguug

SEQ ID NO: 1649561 - RNA, 19 nt, Artificial Sequence
  Description of Artificial Sequence: Synthetic oligonucleotide
auagcuacguucauauucg

SEQ ID NO: 1649562 - RNA, 19 nt, Artificial Sequence
  Description of Artificial Sequence: Synthetic oligonucleotide
acagaaaacgggucugaac

SEQ ID NO: 1649563 - RNA, 19 nt, Artificial Sequence
  Description of Artificial Sequence: Synthetic oligonucleotide
aggaggaugacauuuaauu

SEQ ID NO: 1649564 - RNA, 19 nt, Artificial Sequence
  Description of Artificial Sequence: Synthetic oligonucleotide
caaagggauagaaaucacc

SEQ ID NO: 1649565 - RNA, 19 nt, Artificial Sequence
  Description of Artificial Sequence: Synthetic oligonucleotide
cucacuacacgguuguucc

SEQ ID NO: 1649566 - RNA, 19 nt, Artificial Sequence
  Description of Artificial Sequence: Synthetic oligonucleotide
agguuucgaagucucaggg

SEQ ID NO: 1649567 - RNA, 19 nt, Artificial Sequence
  Description of Artificial Sequence: Synthetic oligonucleotide
aaaacgggucugaacaagg

SEQ ID NO: 1649568 - RNA, 19 nt, Artificial Sequence
  Description of Artificial Sequence: Synthetic oligonucleotide
acaaagauaauaccacuaa

SEQ ID NO: 1649569 - RNA, 19 nt, Artificial Sequence
  Description of Artificial Sequence: Synthetic oligonucleotide
caggcuagaagauuuacuc

SEQ ID NO: 1649570 - RNA, 19 nt, Artificial Sequence
  Description of Artificial Sequence: Synthetic oligonucleotide
uucgcaagaaauaccuucu

SEQ ID NO: 1649571 - RNA, 19 nt, Artificial Sequence
  Description of Artificial Sequence: Synthetic oligonucleotide
ugugcaugcaugaugccgu

SEQ ID NO: 1649572 - RNA, 19 nt, Artificial Sequence
  Description of Artificial Sequence: Synthetic oligonucleotide
auaacaggagauugggucu

SEQ ID NO: 1649573 - RNA, 19 nt, Artificial Sequence
  Description of Artificial Sequence: Synthetic oligonucleotide
cuaaacuaacauauccaac

SEQ ID NO: 1649574 - RNA, 19 nt, Artificial Sequence
  Description of Artificial Sequence: Synthetic oligonucleotide
agcaagucaagaauaacag

SEQ ID NO: 1649575 - RNA, 19 nt, Artificial Sequence
  Description of Artificial Sequence: Synthetic oligonucleotide
aggauaaugcccauuggcg

SEQ ID NO: 1649576 - RNA, 19 nt, Artificial Sequence
  Description of Artificial Sequence: Synthetic oligonucleotide
cagaaaacgggucugaaca

SEQ ID NO: 1649577 - RNA, 19 nt, Artificial Sequence
  Description of Artificial Sequence: Synthetic oligonucleotide
aaucgucccaggcacggag

SEQ ID NO: 1649578 - RNA, 19 nt, Artificial Sequence
  Description of Artificial Sequence: Synthetic oligonucleotide
uugugugcugcccacacga

SEQ ID NO: 1649579 - RNA, 19 nt, Artificial Sequence
  Description of Artificial Sequence: Synthetic oligonucleotide
gacaggguuagaaacagac

SEQ ID NO: 1649580 - RNA, 19 nt, Artificial Sequence
  Description of Artificial Sequence: Synthetic oligonucleotide
guuauagaguuguaacuac

SEQ ID NO: 1649581 - RNA, 19 nt, Artificial Sequence
  Description of Artificial Sequence: Synthetic oligonucleotide
cucagaaaccccacgacug

SEQ ID NO: 1649582 - RNA, 19 nt, Artificial Sequence
  Description of Artificial Sequence: Synthetic oligonucleotide
aucacaaaagcuguggggu

SEQ ID NO: 1649583 - RNA, 19 nt, Artificial Sequence
  Description of Artificial Sequence: Synthetic oligonucleotide
aaguagcuagccaacauga

SEQ ID NO: 1649584 - RNA, 19 nt, Artificial Sequence
  Description of Artificial Sequence: Synthetic oligonucleotide
uuugagguuucgaagucuc

SEQ ID NO: 1649585 - RNA, 19 nt, Artificial Sequence
  Description of Artificial Sequence: Synthetic oligonucleotide
aaaccccacgacugaaauc

SEQ ID NO: 1649586 - RNA, 19 nt, Artificial Sequence
  Description of Artificial Sequence: Synthetic oligonucleotide
agaaauaccuucuggugaa

SEQ ID NO: 1649587 - RNA, 19 nt, Artificial Sequence
  Description of Artificial Sequence: Synthetic oligonucleotide
acacgguuguuccauuugg

SEQ ID NO: 1649588 - RNA, 19 nt, Artificial Sequence
  Description of Artificial Sequence: Synthetic oligonucleotide
ugagguuucgaagucucag

SEQ ID NO: 1649589 - RNA, 19 nt, Artificial Sequence
  Description of Artificial Sequence: Synthetic oligonucleotide
ugaccaccaucacaaaagc

SEQ ID NO: 1649590 - RNA, 19 nt, Artificial Sequence
  Description of Artificial Sequence: Synthetic oligonucleotide
gauaaugcccauuggcguc

SEQ ID NO: 1649591 - RNA, 19 nt, Artificial Sequence
  Description of Artificial Sequence: Synthetic oligonucleotide
uaucgcuacccuuuuaaaa

SEQ ID NO: 1649592 - RNA, 19 nt, Artificial Sequence
  Description of Artificial Sequence: Synthetic oligonucleotide
ugauccaguuuccaaugca

SEQ ID NO: 1649593 - RNA, 19 nt, Artificial Sequence
  Description of Artificial Sequence: Synthetic oligonucleotide
auuguucuaaauagcuacg

SEQ ID NO: 1649594 - RNA, 19 nt, Artificial Sequence
  Description of Artificial Sequence: Synthetic oligonucleotide
aguuggucugguaauagag

SEQ ID NO: 1649595 - RNA, 19 nt, Artificial Sequence
  Description of Artificial Sequence: Synthetic oligonucleotide
auucguaaacaaaauauaa

SEQ ID NO: 1649596 - RNA, 19 nt, Artificial Sequence
  Description of Artificial Sequence: Synthetic oligonucleotide
uuuauugugugcugcccac

SEQ ID NO: 1649597 - RNA, 19 nt, Artificial Sequence
  Description of Artificial Sequence: Synthetic oligonucleotide
agagcccggaaagaaaucg

SEQ ID NO: 1649598 - RNA, 19 nt, Artificial Sequence
  Description of Artificial Sequence: Synthetic oligonucleotide
acacgaacccugugaauac

SEQ ID NO: 1649599 - RNA, 19 nt, Artificial Sequence
  Description of Artificial Sequence: Synthetic oligonucleotide
auagucauagaggacuuug

SEQ ID NO: 1649600 - RNA, 19 nt, Artificial Sequence
  Description of Artificial Sequence: Synthetic oligonucleotide
aaagcauaucgcuacccuu

SEQ ID NO: 1649601 - RNA, 19 nt, Artificial Sequence
  Description of Artificial Sequence: Synthetic oligonucleotide
uucgcuuacucaguguugc

SEQ ID NO: 1649602 - RNA, 19 nt, Artificial Sequence
  Description of Artificial Sequence: Synthetic oligonucleotide
uucgaagucucagggaugc

SEQ ID NO: 1649603 - RNA, 19 nt, Artificial Sequence
  Description of Artificial Sequence: Synthetic oligonucleotide
aacaaagauaauaccacua

SEQ ID NO: 1649604 - RNA, 19 nt, Artificial Sequence
  Description of Artificial Sequence: Synthetic oligonucleotide
uggauaugaggaaguagcu

SEQ ID NO: 1649605 - RNA, 19 nt, Artificial Sequence
  Description of Artificial Sequence: Synthetic oligonucleotide
ggugaaagcauaucgcuac

SEQ ID NO: 1649606 - RNA, 19 nt, Artificial Sequence
  Description of Artificial Sequence: Synthetic oligonucleotide
ccuacauugguacuguugc

SEQ ID NO: 1649607 - RNA, 19 nt, Artificial Sequence
  Description of Artificial Sequence: Synthetic oligonucleotide
aguuauagaguuguaacua

SEQ ID NO: 1649608 - RNA, 19 nt, Artificial Sequence
  Description of Artificial Sequence: Synthetic oligonucleotide
uaauaccacuaaacuaaca

SEQ ID NO: 1649609 - RNA, 19 nt, Artificial Sequence
  Description of Artificial Sequence: Synthetic oligonucleotide
uacuguugcuguccaaccc

SEQ ID NO: 1649610 - RNA, 19 nt, Artificial Sequence
  Description of Artificial Sequence: Synthetic oligonucleotide
auaauaccacuaaacuaac

SEQ ID NO: 1649611 - RNA, 19 nt, Artificial Sequence
  Description of Artificial Sequence: Synthetic oligonucleotide
accgacuuuucgcuuacuc

SEQ ID NO: 1649612 - RNA, 19 nt, Artificial Sequence
  Description of Artificial Sequence: Synthetic oligonucleotide
gaaaucgucccaggcacgg

SEQ ID NO: 1649613 - RNA, 19 nt, Artificial Sequence
  Description of Artificial Sequence: Synthetic oligonucleotide
cccgauuccaaaaugacug

SEQ ID NO: 1649614 - RNA, 19 nt, Artificial Sequence
  Description of Artificial Sequence: Synthetic oligonucleotide
cuccguuuagcuugcuucg

SEQ ID NO: 1649615 - RNA, 19 nt, Artificial Sequence
  Description of Artificial Sequence: Synthetic oligonucleotide
guagucagccaauuuggug

SEQ ID NO: 1649616 - RNA, 19 nt, Artificial Sequence
  Description of Artificial Sequence: Synthetic oligonucleotide
gaaaacgggucugaacaag

SEQ ID NO: 1649617 - RNA, 19 nt, Artificial Sequence
  Description of Artificial Sequence: Synthetic oligonucleotide
uacguucauauucguaaac

SEQ ID NO: 1649618 - RNA, 19 nt, Artificial Sequence
  Description of Artificial Sequence: Synthetic oligonucleotide
aaacgggucugaacaaggg

SEQ ID NO: 1649619 - RNA, 19 nt, Artificial Sequence
  Description of Artificial Sequence: Synthetic oligonucleotide
auaugaggaaguagcuagc

SEQ ID NO: 1649620 - RNA, 19 nt, Artificial Sequence
  Description of Artificial Sequence: Synthetic oligonucleotide
acuuuucgcuuacucagug

SEQ ID NO: 1649621 - RNA, 19 nt, Artificial Sequence
  Description of Artificial Sequence: Synthetic oligonucleotide
uguucuaaauagcuacguu

SEQ ID NO: 1649622 - RNA, 19 nt, Artificial Sequence
  Description of Artificial Sequence: Synthetic oligonucleotide
uacacgguuguuccauuug

SEQ ID NO: 1649623 - RNA, 19 nt, Artificial Sequence
  Description of Artificial Sequence: Synthetic oligonucleotide
agaaguuauagaguuguaa

SEQ ID NO: 1649624 - RNA, 19 nt, Artificial Sequence
  Description of Artificial Sequence: Synthetic oligonucleotide
agcagauugcucacuacac

SEQ ID NO: 1649625 - RNA, 19 nt, Artificial Sequence
  Description of Artificial Sequence: Synthetic oligonucleotide
uguagucagccaauuuggu

SEQ ID NO: 1649626 - RNA, 19 nt, Artificial Sequence
  Description of Artificial Sequence: Synthetic oligonucleotide
ucccgauuccaaaaugacu

SEQ ID NO: 1649627 - RNA, 19 nt, Artificial Sequence
  Description of Artificial Sequence: Synthetic oligonucleotide
uugaaggggcucagaaacc

SEQ ID NO: 1649628 - RNA, 19 nt, Artificial Sequence
  Description of Artificial Sequence: Synthetic oligonucleotide
cacgacugaaaucaucaug

SEQ ID NO: 1649629 - RNA, 19 nt, Artificial Sequence
  Description of Artificial Sequence: Synthetic oligonucleotide
uuucgcuuacucaguguug

SEQ ID NO: 1649630 - RNA, 19 nt, Artificial Sequence
  Description of Artificial Sequence: Synthetic oligonucleotide
ucugaacaaggggaaagug

SEQ ID NO: 1649631 - RNA, 19 nt, Artificial Sequence
  Description of Artificial Sequence: Synthetic oligonucleotide
cauacuggaaacuucagau

SEQ ID NO: 1649632 - RNA, 19 nt, Artificial Sequence
  Description of Artificial Sequence: Synthetic oligonucleotide
uuaaccgacuuuucgcuua

SEQ ID NO: 1649633 - RNA, 19 nt, Artificial Sequence
  Description of Artificial Sequence: Synthetic oligonucleotide
caaacaggcgccaaaggga

SEQ ID NO: 1649634 - RNA, 19 nt, Artificial Sequence
  Description of Artificial Sequence: Synthetic oligonucleotide
ucuuuauugugugcugccc

SEQ ID NO: 1649635 - RNA, 19 nt, Artificial Sequence
  Description of Artificial Sequence: Synthetic oligonucleotide
uuggcgucuucuucaaccc

SEQ ID NO: 1649636 - RNA, 19 nt, Artificial Sequence
  Description of Artificial Sequence: Synthetic oligonucleotide
acagcaaaggaaaagugau

SEQ ID NO: 1649637 - RNA, 19 nt, Artificial Sequence
  Description of Artificial Sequence: Synthetic oligonucleotide
auaccacuaaacuaacaua

SEQ ID NO: 1649638 - RNA, 19 nt, Artificial Sequence
  Description of Artificial Sequence: Synthetic oligonucleotide
gagcagauugcucacuaca

SEQ ID NO: 1649639 - RNA, 19 nt, Artificial Sequence
  Description of Artificial Sequence: Synthetic oligonucleotide
cuagccaacaugaccacca

SEQ ID NO: 1649640 - RNA, 19 nt, Artificial Sequence
  Description of Artificial Sequence: Synthetic oligonucleotide
ugaugccguggguaguugg

SEQ ID NO: 1649641 - RNA, 19 nt, Artificial Sequence
  Description of Artificial Sequence: Synthetic oligonucleotide
acgaagaccaugacacccc

SEQ ID NO: 1649642 - RNA, 19 nt, Artificial Sequence
  Description of Artificial Sequence: Synthetic oligonucleotide
uuguucuaaauagcuacgu

SEQ ID NO: 1649643 - RNA, 19 nt, Artificial Sequence
  Description of Artificial Sequence: Synthetic oligonucleotide
agcaccacaaugauuccuc

SEQ ID NO: 1649644 - RNA, 19 nt, Artificial Sequence
  Description of Artificial Sequence: Synthetic oligonucleotide
uuagcaagucaagaauaac

SEQ ID NO: 1649645 - RNA, 19 nt, Artificial Sequence
  Description of Artificial Sequence: Synthetic oligonucleotide
acacacggcauccuguacu

SEQ ID NO: 1649646 - RNA, 19 nt, Artificial Sequence
  Description of Artificial Sequence: Synthetic oligonucleotide
aacagaaguuauagaguug

SEQ ID NO: 1649647 - RNA, 19 nt, Artificial Sequence
  Description of Artificial Sequence: Synthetic oligonucleotide
uacucaguguugccucccg

SEQ ID NO: 1649648 - RNA, 19 nt, Artificial Sequence
  Description of Artificial Sequence: Synthetic oligonucleotide
ucuaaauagcuacguucau

SEQ ID NO: 1649649 - RNA, 19 nt, Artificial Sequence
  Description of Artificial Sequence: Synthetic oligonucleotide
aacauacuggaaacuucag

SEQ ID NO: 1649650 - RNA, 19 nt, Artificial Sequence
  Description of Artificial Sequence: Synthetic oligonucleotide
acaaggggaaagugcaacu

SEQ ID NO: 1649651 - RNA, 19 nt, Artificial Sequence
  Description of Artificial Sequence: Synthetic oligonucleotide
gggcgaagcgaucagagcc

SEQ ID NO: 1649652 - RNA, 19 nt, Artificial Sequence
  Description of Artificial Sequence: Synthetic oligonucleotide
aggagauugggucuguauu

SEQ ID NO: 1649653 - RNA, 19 nt, Artificial Sequence
  Description of Artificial Sequence: Synthetic oligonucleotide
uuuugagguuucgaagucu

SEQ ID NO: 1649654 - RNA, 19 nt, Artificial Sequence
  Description of Artificial Sequence: Synthetic oligonucleotide
auugugugcugcccacacg

SEQ ID NO: 1649655 - RNA, 19 nt, Artificial Sequence
  Description of Artificial Sequence: Synthetic oligonucleotide
aaaugacuguuccccuaca

SEQ ID NO: 1649656 - RNA, 19 nt, Artificial Sequence
  Description of Artificial Sequence: Synthetic oligonucleotide
gcuacguucauauucguaa

SEQ ID NO: 1649657 - RNA, 19 nt, Artificial Sequence
  Description of Artificial Sequence: Synthetic oligonucleotide
gaaaucaccucugauuuua

SEQ ID NO: 1649658 - RNA, 19 nt, Artificial Sequence
  Description of Artificial Sequence: Synthetic oligonucleotide
acguucauauucguaaaca

SEQ ID NO: 1649659 - RNA, 19 nt, Artificial Sequence
  Description of Artificial Sequence: Synthetic oligonucleotide
acaggcgccaaagggauag

SEQ ID NO: 1649660 - RNA, 19 nt, Artificial Sequence
  Description of Artificial Sequence: Synthetic oligonucleotide
gaugccguggguaguuggg

SEQ ID NO: 1649661 - RNA, 19 nt, Artificial Sequence
  Description of Artificial Sequence: Synthetic oligonucleotide
ucgcaagaaauaccuucug

SEQ ID NO: 1649662 - RNA, 19 nt, Artificial Sequence
  Description of Artificial Sequence: Synthetic oligonucleotide
uggugaaagcauaucgcua

SEQ ID NO: 1649663 - RNA, 19 nt, Artificial Sequence
  Description of Artificial Sequence: Synthetic oligonucleotide
auuuacucccuggcuuugc

SEQ ID NO: 1649664 - RNA, 19 nt, Artificial Sequence
  Description of Artificial Sequence: Synthetic oligonucleotide
uagcgaagaucuugacagg

SEQ ID NO: 1649665 - RNA, 19 nt, Artificial Sequence
  Description of Artificial Sequence: Synthetic oligonucleotide
ggaggaugacauuuaauuc

SEQ ID NO: 1649666 - RNA, 19 nt, Artificial Sequence
  Description of Artificial Sequence: Synthetic oligonucleotide
guuggucugguaauagagc

SEQ ID NO: 1649667 - RNA, 19 nt, Artificial Sequence
  Description of Artificial Sequence: Synthetic oligonucleotide
cuaacauauccaacacauc

SEQ ID NO: 1649668 - RNA, 19 nt, Artificial Sequence
  Description of Artificial Sequence: Synthetic oligonucleotide
agacggacacacggcaucc

SEQ ID NO: 1649669 - RNA, 19 nt, Artificial Sequence
  Description of Artificial Sequence: Synthetic oligonucleotide
cauagcgaagaucuugaca

SEQ ID NO: 1649670 - RNA, 19 nt, Artificial Sequence
  Description of Artificial Sequence: Synthetic oligonucleotide
uagagcagauugcucacua

SEQ ID NO: 1649671 - RNA, 19 nt, Artificial Sequence
  Description of Artificial Sequence: Synthetic oligonucleotide
gaagauuuacucccuggcu

SEQ ID NO: 1649672 - RNA, 19 nt, Artificial Sequence
  Description of Artificial Sequence: Synthetic oligonucleotide
cuuuauugugugcugccca

SEQ ID NO: 1649673 - RNA, 19 nt, Artificial Sequence
  Description of Artificial Sequence: Synthetic oligonucleotide
uccuguacuuuaaccgacu

SEQ ID NO: 1649674 - RNA, 19 nt, Artificial Sequence
  Description of Artificial Sequence: Synthetic oligonucleotide
cucccgauuccaaaaugac

SEQ ID NO: 1649675 - RNA, 19 nt, Artificial Sequence
  Description of Artificial Sequence: Synthetic oligonucleotide
guaguuggucugguaauag

SEQ ID NO: 1649676 - RNA, 19 nt, Artificial Sequence
  Description of Artificial Sequence: Synthetic oligonucleotide
cauaucgcuacccuuuuaa

SEQ ID NO: 1649677 - RNA, 19 nt, Artificial Sequence
  Description of Artificial Sequence: Synthetic oligonucleotide
accaggcuagaagauuuac

SEQ ID NO: 1649678 - RNA, 19 nt, Artificial Sequence
  Description of Artificial Sequence: Synthetic oligonucleotide
agaaaacgggucugaacaa

SEQ ID NO: 1649679 - RNA, 19 nt, Artificial Sequence
  Description of Artificial Sequence: Synthetic oligonucleotide
auacuggaaacuucagaua

SEQ ID NO: 1649680 - RNA, 19 nt, Artificial Sequence
  Description of Artificial Sequence: Synthetic oligonucleotide
agcuagccaacaugaccac

SEQ ID NO: 1649681 - RNA, 19 nt, Artificial Sequence
  Description of Artificial Sequence: Synthetic oligonucleotide
aagcauaucgcuacccuuu

SEQ ID NO: 1649682 - RNA, 19 nt, Artificial Sequence
  Description of Artificial Sequence: Synthetic oligonucleotide
aguagcuagccaacaugac

SEQ ID NO: 1649683 - RNA, 19 nt, Artificial Sequence
  Description of Artificial Sequence: Synthetic oligonucleotide
gaaagcauaucgcuacccu

SEQ ID NO: 1649684 - RNA, 19 nt, Artificial Sequence
  Description of Artificial Sequence: Synthetic oligonucleotide
uuccccuacauugguacug

SEQ ID NO: 1649685 - RNA, 19 nt, Artificial Sequence
  Description of Artificial Sequence: Synthetic oligonucleotide
uugagguuucgaagucuca

SEQ ID NO: 1649686 - RNA, 19 nt, Artificial Sequence
  Description of Artificial Sequence: Synthetic oligonucleotide
uuuaaccgacuuuucgcuu

SEQ ID NO: 1649687 - RNA, 19 nt, Artificial Sequence
  Description of Artificial Sequence: Synthetic oligonucleotide
aaauagcuacguucauauu

SEQ ID NO: 1649688 - RNA, 19 nt, Artificial Sequence
  Description of Artificial Sequence: Synthetic oligonucleotide
gauagaaaucaccucugau

SEQ ID NO: 1649689 - RNA, 19 nt, Artificial Sequence
  Description of Artificial Sequence: Synthetic oligonucleotide
cuucaacccuauucccucc

SEQ ID NO: 1649690 - RNA, 19 nt, Artificial Sequence
  Description of Artificial Sequence: Synthetic oligonucleotide
uccaacccgaaauucuuuu

SEQ ID NO: 1649691 - RNA, 19 nt, Artificial Sequence
  Description of Artificial Sequence: Synthetic oligonucleotide
acaacuggcugauccaguu

SEQ ID NO: 1649692 - RNA, 19 nt, Artificial Sequence
  Description of Artificial Sequence: Synthetic oligonucleotide
auaccagcaccacaaugau

SEQ ID NO: 1649693 - RNA, 19 nt, Artificial Sequence
  Description of Artificial Sequence: Synthetic oligonucleotide
gugaaagcauaucgcuacc

SEQ ID NO: 1649694 - RNA, 19 nt, Artificial Sequence
  Description of Artificial Sequence: Synthetic oligonucleotide
acgguuguuccauuuggaa

SEQ ID NO: 1649695 - RNA, 19 nt, Artificial Sequence
  Description of Artificial Sequence: Synthetic oligonucleotide
cuuuaaccgacuuuucgcu

SEQ ID NO: 1649696 - RNA, 19 nt, Artificial Sequence
  Description of Artificial Sequence: Synthetic oligonucleotide
uaaccgacuuuucgcuuac

SEQ ID NO: 1649697 - RNA, 19 nt, Artificial Sequence
  Description of Artificial Sequence: Synthetic oligonucleotide
auaucgcuacccuuuuaaa

SEQ ID NO: 1649698 - RNA, 19 nt, Artificial Sequence
  Description of Artificial Sequence: Synthetic oligonucleotide
ugaggccucccuuggguca

SEQ ID NO: 1649699 - RNA, 19 nt, Artificial Sequence
  Description of Artificial Sequence: Synthetic oligonucleotide
acgggucugaacaagggga

SEQ ID NO: 1649700 - RNA, 19 nt, Artificial Sequence
  Description of Artificial Sequence: Synthetic oligonucleotide
cgacuuuucgcuuacucag

SEQ ID NO: 1649701 - RNA, 19 nt, Artificial Sequence
  Description of Artificial Sequence: Synthetic oligonucleotide
gucauagcgaagaucuuga

SEQ ID NO: 1649702 - RNA, 19 nt, Artificial Sequence
  Description of Artificial Sequence: Synthetic oligonucleotide
cgaagaucuugacaggugg

SEQ ID NO: 1649703 - RNA, 19 nt, Artificial Sequence
  Description of Artificial Sequence: Synthetic oligonucleotide
agggaugcauggaugaaca

SEQ ID NO: 1649704 - RNA, 19 nt, Artificial Sequence
  Description of Artificial Sequence: Synthetic oligonucleotide
acuggcugauccaguuucc

SEQ ID NO: 1649705 - RNA, 19 nt, Artificial Sequence
  Description of Artificial Sequence: Synthetic oligonucleotide
ugggccugugcaugcauga

SEQ ID NO: 1649706 - RNA, 19 nt, Artificial Sequence
  Description of Artificial Sequence: Synthetic oligonucleotide
ucacaaaagcuguggggua

SEQ ID NO: 1649707 - RNA, 19 nt, Artificial Sequence
  Description of Artificial Sequence: Synthetic oligonucleotide
gaagcgaucagagcccgga

SEQ ID NO: 1649708 - RNA, 19 nt, Artificial Sequence
  Description of Artificial Sequence: Synthetic oligonucleotide
uccucgguuucugaggccu

SEQ ID NO: 1649709 - RNA, 19 nt, Artificial Sequence
  Description of Artificial Sequence: Synthetic oligonucleotide
ggaggaugucuuuauugug

SEQ ID NO: 1649710 - RNA, 19 nt, Artificial Sequence
  Description of Artificial Sequence: Synthetic oligonucleotide
auugcucacuacacgguug

SEQ ID NO: 1649711 - RNA, 19 nt, Artificial Sequence
  Description of Artificial Sequence: Synthetic oligonucleotide
cacaaaagcugugggguac

SEQ ID NO: 1649712 - RNA, 19 nt, Artificial Sequence
  Description of Artificial Sequence: Synthetic oligonucleotide
aaggggcucagaaacccca

SEQ ID NO: 1649713 - RNA, 19 nt, Artificial Sequence
  Description of Artificial Sequence: Synthetic oligonucleotide
caguguugccucccgauuc

SEQ ID NO: 1649714 - RNA, 19 nt, Artificial Sequence
  Description of Artificial Sequence: Synthetic oligonucleotide
caaacacgaagaccaugac

SEQ ID NO: 1649715 - RNA, 19 nt, Artificial Sequence
  Description of Artificial Sequence: Synthetic oligonucleotide
gcgaucagagcccggaaag

SEQ ID NO: 1649716 - RNA, 19 nt, Artificial Sequence
  Description of Artificial Sequence: Synthetic oligonucleotide
gccaaagggauagaaauca

SEQ ID NO: 1649717 - RNA, 19 nt, Artificial Sequence
  Description of Artificial Sequence: Synthetic oligonucleotide
guaauagagcagauugcuc

SEQ ID NO: 1649718 - RNA, 19 nt, Artificial Sequence
  Description of Artificial Sequence: Synthetic oligonucleotide
cccggaaagaaaucguccc

SEQ ID NO: 1649719 - RNA, 19 nt, Artificial Sequence
  Description of Artificial Sequence: Synthetic oligonucleotide
gaucauguugaaggggcuc

SEQ ID NO: 1649720 - RNA, 19 nt, Artificial Sequence
  Description of Artificial Sequence: Synthetic oligonucleotide
gaucuugacaggugggccu

SEQ ID NO: 1649721 - RNA, 19 nt, Artificial Sequence
  Description of Artificial Sequence: Synthetic oligonucleotide
auauaacaggagauugggu

SEQ ID NO: 1649722 - RNA, 19 nt, Artificial Sequence
  Description of Artificial Sequence: Synthetic oligonucleotide
gccacguccauguuccucc

SEQ ID NO: 1649723 - RNA, 19 nt, Artificial Sequence
  Description of Artificial Sequence: Synthetic oligonucleotide
aacaacuggcugauccagu

SEQ ID NO: 1649724 - RNA, 19 nt, Artificial Sequence
  Description of Artificial Sequence: Synthetic oligonucleotide
ugcuguccaacccgaaauu

SEQ ID NO: 1649725 - RNA, 19 nt, Artificial Sequence
  Description of Artificial Sequence: Synthetic oligonucleotide
agaaaucgucccaggcacg

SEQ ID NO: 1649726 - RNA, 19 nt, Artificial Sequence
  Description of Artificial Sequence: Synthetic oligonucleotide
gauuuacucccuggcuuug

SEQ ID NO: 1649727 - RNA, 19 nt, Artificial Sequence
  Description of Artificial Sequence: Synthetic oligonucleotide
uuacucaguguugccuccc

SEQ ID NO: 1649728 - RNA, 19 nt, Artificial Sequence
  Description of Artificial Sequence: Synthetic oligonucleotide
acggacacacggcauccug

SEQ ID NO: 1649729 - RNA, 19 nt, Artificial Sequence
  Description of Artificial Sequence: Synthetic oligonucleotide
cuggugaaagcauaucgcu

SEQ ID NO: 1649730 - RNA, 19 nt, Artificial Sequence
  Description of Artificial Sequence: Synthetic oligonucleotide
agucagccaauuuggugau

SEQ ID NO: 1649731 - RNA, 19 nt, Artificial Sequence
  Description of Artificial Sequence: Synthetic oligonucleotide
agcgaucagagcccggaaa

SEQ ID NO: 1649732 - RNA, 19 nt, Artificial Sequence
  Description of Artificial Sequence: Synthetic oligonucleotide
ccuccaaggaucauguuga

SEQ ID NO: 1649733 - RNA, 19 nt, Artificial Sequence
  Description of Artificial Sequence: Synthetic oligonucleotide
aauucgcaagaaauaccuu

SEQ ID NO: 1649734 - RNA, 19 nt, Artificial Sequence
  Description of Artificial Sequence: Synthetic oligonucleotide
uugggucauagcgaagauc

SEQ ID NO: 1649735 - RNA, 19 nt, Artificial Sequence
  Description of Artificial Sequence: Synthetic oligonucleotide
ggguuagaaacagacggac

SEQ ID NO: 1649736 - RNA, 19 nt, Artificial Sequence
  Description of Artificial Sequence: Synthetic oligonucleotide
ucacuacacgguuguucca

SEQ ID NO: 1649737 - RNA, 19 nt, Artificial Sequence
  Description of Artificial Sequence: Synthetic oligonucleotide
ggugguaagaagugcaccu

SEQ ID NO: 1649738 - RNA, 19 nt, Artificial Sequence
  Description of Artificial Sequence: Synthetic oligonucleotide
gcaagucaagaauaacaga

SEQ ID NO: 1649739 - RNA, 19 nt, Artificial Sequence
  Description of Artificial Sequence: Synthetic oligonucleotide
cauugguacuguugcuguc

SEQ ID NO: 1649740 - RNA, 19 nt, Artificial Sequence
  Description of Artificial Sequence: Synthetic oligonucleotide
cuacguucauauucguaaa

SEQ ID NO: 1649741 - RNA, 19 nt, Artificial Sequence
  Description of Artificial Sequence: Synthetic oligonucleotide
ucgcuuacucaguguugcc

SEQ ID NO: 1649742 - RNA, 19 nt, Artificial Sequence
  Description of Artificial Sequence: Synthetic oligonucleotide
cacacgaacccugugaaua

SEQ ID NO: 1649743 - RNA, 19 nt, Artificial Sequence
  Description of Artificial Sequence: Synthetic oligonucleotide
gcuuacucaguguugccuc

SEQ ID NO: 1649744 - RNA, 19 nt, Artificial Sequence
  Description of Artificial Sequence: Synthetic oligonucleotide
uucauccgucggaggaugu

SEQ ID NO: 1649745 - RNA, 19 nt, Artificial Sequence
  Description of Artificial Sequence: Synthetic oligonucleotide
aagcgaucagagcccggaa

SEQ ID NO: 1649746 - RNA, 19 nt, Artificial Sequence
  Description of Artificial Sequence: Synthetic oligonucleotide
ucaacccuauucccuccau

SEQ ID NO: 1649747 - RNA, 19 nt, Artificial Sequence
  Description of Artificial Sequence: Synthetic oligonucleotide
cuucauccgucggaggaug

SEQ ID NO: 1649748 - RNA, 19 nt, Artificial Sequence
  Description of Artificial Sequence: Synthetic oligonucleotide
uggcgucuucuucaacccu

SEQ ID NO: 1649749 - RNA, 19 nt, Artificial Sequence
  Description of Artificial Sequence: Synthetic oligonucleotide
aucuugacaggugggccug

SEQ ID NO: 1649750 - RNA, 19 nt, Artificial Sequence
  Description of Artificial Sequence: Synthetic oligonucleotide
aucuuauuuuccagcuugu

SEQ ID NO: 1649751 - RNA, 19 nt, Artificial Sequence
  Description of Artificial Sequence: Synthetic oligonucleotide
acguccauguuccuccguu

SEQ ID NO: 1649752 - RNA, 19 nt, Artificial Sequence
  Description of Artificial Sequence: Synthetic oligonucleotide
cccacgacugaaaucauca

SEQ ID NO: 1649753 - RNA, 19 nt, Artificial Sequence
  Description of Artificial Sequence: Synthetic oligonucleotide
ggauagaaaucaccucuga

SEQ ID NO: 1649754 - RNA, 19 nt, Artificial Sequence
  Description of Artificial Sequence: Synthetic oligonucleotide
ggauaaugcccauuggcgu

SEQ ID NO: 1649755 - RNA, 19 nt, Artificial Sequence
  Description of Artificial Sequence: Synthetic oligonucleotide
ccugugaauaccagcacca

SEQ ID NO: 1649756 - RNA, 19 nt, Artificial Sequence
  Description of Artificial Sequence: Synthetic oligonucleotide
agcauaucgcuacccuuuu

SEQ ID NO: 1649757 - RNA, 19 nt, Artificial Sequence
  Description of Artificial Sequence: Synthetic oligonucleotide
gggauagaaaucaccucug

SEQ ID NO: 1649758 - RNA, 19 nt, Artificial Sequence
  Description of Artificial Sequence: Synthetic oligonucleotide
uagcuacguucauauucgu

SEQ ID NO: 1649759 - RNA, 19 nt, Artificial Sequence
  Description of Artificial Sequence: Synthetic oligonucleotide
ggccccaucaccaggcuag

SEQ ID NO: 1649760 - RNA, 19 nt, Artificial Sequence
  Description of Artificial Sequence: Synthetic oligonucleotide
uccccuacauugguacugu

SEQ ID NO: 1649761 - RNA, 19 nt, Artificial Sequence
  Description of Artificial Sequence: Synthetic oligonucleotide
cacgaacccugugaauacc

SEQ ID NO: 1649762 - RNA, 19 nt, Artificial Sequence
  Description of Artificial Sequence: Synthetic oligonucleotide
aaaucgucccaggcacgga

SEQ ID NO: 1649763 - RNA, 19 nt, Artificial Sequence
  Description of Artificial Sequence: Synthetic oligonucleotide
gauugcucacuacacgguu

SEQ ID NO: 1649764 - RNA, 19 nt, Artificial Sequence
  Description of Artificial Sequence: Synthetic oligonucleotide
agccacguccauguuccuc

SEQ ID NO: 1649765 - RNA, 19 nt, Artificial Sequence
  Description of Artificial Sequence: Synthetic oligonucleotide
caacccuauucccuccauc

SEQ ID NO: 1649766 - RNA, 19 nt, Artificial Sequence
  Description of Artificial Sequence: Synthetic oligonucleotide
cugugaauaccagcaccac

SEQ ID NO: 1649767 - RNA, 19 nt, Artificial Sequence
  Description of Artificial Sequence: Synthetic oligonucleotide
cucgguuucugaggccucc

SEQ ID NO: 1649768 - RNA, 19 nt, Artificial Sequence
  Description of Artificial Sequence: Synthetic oligonucleotide
aacaggagauugggucugu

SEQ ID NO: 1649769 - RNA, 19 nt, Artificial Sequence
  Description of Artificial Sequence: Synthetic oligonucleotide
ucagggaugcauggaugaa

SEQ ID NO: 1649770 - RNA, 19 nt, Artificial Sequence
  Description of Artificial Sequence: Synthetic oligonucleotide
cacgguuguuccauuugga

SEQ ID NO: 1649771 - RNA, 19 nt, Artificial Sequence
  Description of Artificial Sequence: Synthetic oligonucleotide
gaagucaggccgggcgaag

SEQ ID NO: 1649772 - RNA, 19 nt, Artificial Sequence
  Description of Artificial Sequence: Synthetic oligonucleotide
ggcucagaaaccccacgac

SEQ ID NO: 1649773 - RNA, 19 nt, Artificial Sequence
  Description of Artificial Sequence: Synthetic oligonucleotide
uccuccguuuagcuugcuu

SEQ ID NO: 1649774 - RNA, 19 nt, Artificial Sequence
  Description of Artificial Sequence: Synthetic oligonucleotide
cagagcccggaaagaaauc

SEQ ID NO: 1649775 - RNA, 19 nt, Artificial Sequence
  Description of Artificial Sequence: Synthetic oligonucleotide
cuguccaacccgaaauucu

SEQ ID NO: 1649776 - RNA, 19 nt, Artificial Sequence
  Description of Artificial Sequence: Synthetic oligonucleotide
gggugguaagaagugcacc

SEQ ID NO: 1649777 - RNA, 19 nt, Artificial Sequence
  Description of Artificial Sequence: Synthetic oligonucleotide
cuguugcuguccaacccga

SEQ ID NO: 1649778 - RNA, 19 nt, Artificial Sequence
  Description of Artificial Sequence: Synthetic oligonucleotide
ugcccauuggcgucuucuu

SEQ ID NO: 1649779 - RNA, 19 nt, Artificial Sequence
  Description of Artificial Sequence: Synthetic oligonucleotide
ucauccgucggaggauguc

SEQ ID NO: 1649780 - RNA, 19 nt, Artificial Sequence
  Description of Artificial Sequence: Synthetic oligonucleotide
caaaagcugugggguacug

SEQ ID NO: 1649781 - RNA, 19 nt, Artificial Sequence
  Description of Artificial Sequence: Synthetic oligonucleotide
gcgccaaagggauagaaau

SEQ ID NO: 1649782 - RNA, 19 nt, Artificial Sequence
  Description of Artificial Sequence: Synthetic oligonucleotide
gcccggaaagaaaucgucc

SEQ ID NO: 1649783 - RNA, 19 nt, Artificial Sequence
  Description of Artificial Sequence: Synthetic oligonucleotide
ccucccgauuccaaaauga

SEQ ID NO: 1649784 - RNA, 19 nt, Artificial Sequence
  Description of Artificial Sequence: Synthetic oligonucleotide
ccgacuuuucgcuuacuca

SEQ ID NO: 1649785 - RNA, 19 nt, Artificial Sequence
  Description of Artificial Sequence: Synthetic oligonucleotide
ggcuuugcugauguaguca

SEQ ID NO: 1649786 - RNA, 19 nt, Artificial Sequence
  Description of Artificial Sequence: Synthetic oligonucleotide
gcucacuacacgguuguuc

SEQ ID NO: 1649787 - RNA, 19 nt, Artificial Sequence
  Description of Artificial Sequence: Synthetic oligonucleotide
ccgggcgaagcgaucagag

SEQ ID NO: 1649788 - RNA, 19 nt, Artificial Sequence
  Description of Artificial Sequence: Synthetic oligonucleotide
ggauaugaggaaguagcua

SEQ ID NO: 1649789 - RNA, 19 nt, Artificial Sequence
  Description of Artificial Sequence: Synthetic oligonucleotide
cggaaagaaaucgucccag

SEQ ID NO: 1649790 - RNA, 19 nt, Artificial Sequence
  Description of Artificial Sequence: Synthetic oligonucleotide
gacuuuucgcuuacucagu

SEQ ID NO: 1649791 - RNA, 19 nt, Artificial Sequence
  Description of Artificial Sequence: Synthetic oligonucleotide
agcuacguucauauucgua

SEQ ID NO: 1649792 - RNA, 19 nt, Artificial Sequence
  Description of Artificial Sequence: Synthetic oligonucleotide
augaugccguggguaguug

SEQ ID NO: 1649793 - RNA, 19 nt, Artificial Sequence
  Description of Artificial Sequence: Synthetic oligonucleotide
cuacauugguacuguugcu

SEQ ID NO: 1649794 - RNA, 19 nt, Artificial Sequence
  Description of Artificial Sequence: Synthetic oligonucleotide
gcgaagaucuugacaggug

SEQ ID NO: 1649795 - RNA, 19 nt, Artificial Sequence
  Description of Artificial Sequence: Synthetic oligonucleotide
augccguggguaguugggu

SEQ ID NO: 1649796 - RNA, 19 nt, Artificial Sequence
  Description of Artificial Sequence: Synthetic oligonucleotide
gcucagaaaccccacgacu

SEQ ID NO: 1649797 - RNA, 19 nt, Artificial Sequence
  Description of Artificial Sequence: Synthetic oligonucleotide
aggccgggcgaagcgauca

SEQ ID NO: 1649798 - RNA, 19 nt, Artificial Sequence
  Description of Artificial Sequence: Synthetic oligonucleotide
ccuugggucauagcgaaga

SEQ ID NO: 1649799 - RNA, 19 nt, Artificial Sequence
  Description of Artificial Sequence: Synthetic oligonucleotide
agcggggcgagagccacgu

SEQ ID NO: 1649800 - RNA, 19 nt, Artificial Sequence
  Description of Artificial Sequence: Synthetic oligonucleotide
gcuguccaacccgaaauuc

SEQ ID NO: 1649801 - RNA, 19 nt, Artificial Sequence
  Description of Artificial Sequence: Synthetic oligonucleotide
cagaaguuauagaguugua

SEQ ID NO: 1649802 - RNA, 19 nt, Artificial Sequence
  Description of Artificial Sequence: Synthetic oligonucleotide
agacaggguuagaaacaga

SEQ ID NO: 1649803 - RNA, 19 nt, Artificial Sequence
  Description of Artificial Sequence: Synthetic oligonucleotide
cugcugcggccccaucacc

SEQ ID NO: 1649804 - RNA, 19 nt, Artificial Sequence
  Description of Artificial Sequence: Synthetic oligonucleotide
aaccgacuuuucgcuuacu

SEQ ID NO: 1649805 - RNA, 19 nt, Artificial Sequence
  Description of Artificial Sequence: Synthetic oligonucleotide
uccgucggaggaugucuuu

SEQ ID NO: 1649806 - RNA, 19 nt, Artificial Sequence
  Description of Artificial Sequence: Synthetic oligonucleotide
ucgaagucucagggaugca

SEQ ID NO: 1649807 - RNA, 19 nt, Artificial Sequence
  Description of Artificial Sequence: Synthetic oligonucleotide
gcuagccaacaugaccacc

SEQ ID NO: 1649808 - RNA, 19 nt, Artificial Sequence
  Description of Artificial Sequence: Synthetic oligonucleotide
gcgaagcgaucagagcccg

SEQ ID NO: 1649809 - RNA, 19 nt, Artificial Sequence
  Description of Artificial Sequence: Synthetic oligonucleotide
gguaagaagugcaccuucu

SEQ ID NO: 1649810 - RNA, 19 nt, Artificial Sequence
  Description of Artificial Sequence: Synthetic oligonucleotide
ggacuuuggagcagauguc

SEQ ID NO: 1649811 - RNA, 19 nt, Artificial Sequence
  Description of Artificial Sequence: Synthetic oligonucleotide
cggggcgagagccacgucc

SEQ ID NO: 1649812 - RNA, 19 nt, Artificial Sequence
  Description of Artificial Sequence: Synthetic oligonucleotide
ggacacacggcauccugua

SEQ ID NO: 1649813 - RNA, 19 nt, Artificial Sequence
  Description of Artificial Sequence: Synthetic oligonucleotide
guuccccuacauugguacu

SEQ ID NO: 1649814 - RNA, 19 nt, Artificial Sequence
  Description of Artificial Sequence: Synthetic oligonucleotide
ugauuccuccaaggaucau

SEQ ID NO: 1649815 - RNA, 19 nt, Artificial Sequence
  Description of Artificial Sequence: Synthetic oligonucleotide
ccggaaagaaaucguccca

SEQ ID NO: 1649816 - RNA, 19 nt, Artificial Sequence
  Description of Artificial Sequence: Synthetic oligonucleotide
ggaugacauuuaauucgca

SEQ ID NO: 1649817 - RNA, 19 nt, Artificial Sequence
  Description of Artificial Sequence: Synthetic oligonucleotide
aacaggcgccaaagggaua

SEQ ID NO: 1649818 - RNA, 19 nt, Artificial Sequence
  Description of Artificial Sequence: Synthetic oligonucleotide
cauccgucggaggaugucu

SEQ ID NO: 1649819 - RNA, 19 nt, Artificial Sequence
  Description of Artificial Sequence: Synthetic oligonucleotide
gcacggagcggggcgagag

SEQ ID NO: 1649820 - RNA, 19 nt, Artificial Sequence
  Description of Artificial Sequence: Synthetic oligonucleotide
ccacguccauguuccuccg

SEQ ID NO: 1649821 - RNA, 19 nt, Artificial Sequence
  Description of Artificial Sequence: Synthetic oligonucleotide
cuugggucauagcgaagau

SEQ ID NO: 1649822 - RNA, 19 nt, Artificial Sequence
  Description of Artificial Sequence: Synthetic oligonucleotide
cccuauucccuccaucuua

SEQ ID NO: 1649823 - RNA, 19 nt, Artificial Sequence
  Description of Artificial Sequence: Synthetic oligonucleotide
cuacacgguuguuccauuu

SEQ ID NO: 1649824 - RNA, 19 nt, Artificial Sequence
  Description of Artificial Sequence: Synthetic oligonucleotide
ccccacgacugaaaucauc

SEQ ID NO: 1649825 - RNA, 19 nt, Artificial Sequence
  Description of Artificial Sequence: Synthetic oligonucleotide
cucaccccaggaggaugac

SEQ ID NO: 1649826 - RNA, 19 nt, Artificial Sequence
  Description of Artificial Sequence: Synthetic oligonucleotide
ggggcgagagccacgucca

SEQ ID NO: 1649827 - RNA, 19 nt, Artificial Sequence
  Description of Artificial Sequence: Synthetic oligonucleotide
gugguaagaagugcaccuu

SEQ ID NO: 1649828 - RNA, 19 nt, Artificial Sequence
  Description of Artificial Sequence: Synthetic oligonucleotide
aggugggccugugcaugca

SEQ ID NO: 1649829 - RNA, 19 nt, Artificial Sequence
  Description of Artificial Sequence: Synthetic oligonucleotide
caugaugccguggguaguu

SEQ ID NO: 1649830 - RNA, 19 nt, Artificial Sequence
  Description of Artificial Sequence: Synthetic oligonucleotide
cgggcgaagcgaucagagc

SEQ ID NO: 1649831 - RNA, 19 nt, Artificial Sequence
  Description of Artificial Sequence: Synthetic oligonucleotide
ggccgggcgaagcgaucag

SEQ ID NO: 1649832 - RNA, 19 nt, Artificial Sequence
  Description of Artificial Sequence: Synthetic oligonucleotide
gcugauguagucagccaau

SEQ ID NO: 1649833 - RNA, 19 nt, Artificial Sequence
  Description of Artificial Sequence: Synthetic oligonucleotide
cccuugggucauagcgaag

SEQ ID NO: 1649834 - RNA, 19 nt, Artificial Sequence
  Description of Artificial Sequence: Synthetic oligonucleotide
gcauaucgcuacccuuuua

SEQ ID NO: 1649835 - RNA, 19 nt, Artificial Sequence
  Description of Artificial Sequence: Synthetic oligonucleotide
cgaagcgaucagagcccgg

SEQ ID NO: 1649836 - RNA, 19 nt, Artificial Sequence
  Description of Artificial Sequence: Synthetic oligonucleotide
uuccuccguuuagcuugcu

SEQ ID NO: 1649837 - RNA, 19 nt, Artificial Sequence
  Description of Artificial Sequence: Synthetic oligonucleotide
caacuggcugauccaguuu

SEQ ID NO: 1649838 - RNA, 19 nt, Artificial Sequence
  Description of Artificial Sequence: Synthetic oligonucleotide
cauccaggauaaugcccau

SEQ ID NO: 1649839 - RNA, 19 nt, Artificial Sequence
  Description of Artificial Sequence: Synthetic oligonucleotide
ccgauuccaaaaugacugu

SEQ ID NO: 1649840 - RNA, 19 nt, Artificial Sequence
  Description of Artificial Sequence: Synthetic oligonucleotide
guccaacccgaaauucuuu

SEQ ID NO: 1649841 - RNA, 19 nt, Artificial Sequence
  Description of Artificial Sequence: Synthetic oligonucleotide
caggcacggagcggggcga

SEQ ID NO: 1649842 - RNA, 19 nt, Artificial Sequence
  Description of Artificial Sequence: Synthetic oligonucleotide
ccucgguuucugaggccuc

SEQ ID NO: 1649843 - RNA, 19 nt, Artificial Sequence
  Description of Artificial Sequence: Synthetic oligonucleotide
cgggucugaacaaggggaa

SEQ ID NO: 1649844 - RNA, 19 nt, Artificial Sequence
  Description of Artificial Sequence: Synthetic oligonucleotide
gaggccucccuugggucau

SEQ ID NO: 1649845 - RNA, 19 nt, Artificial Sequence
  Description of Artificial Sequence: Synthetic oligonucleotide
accccacgacugaaaucau

SEQ ID NO: 1649846 - RNA, 19 nt, Artificial Sequence
  Description of Artificial Sequence: Synthetic oligonucleotide
cuauucccuccaucuuauu

SEQ ID NO: 1649847 - RNA, 19 nt, Artificial Sequence
  Description of Artificial Sequence: Synthetic oligonucleotide
cgaucagagcccggaaaga

SEQ ID NO: 1649848 - RNA, 19 nt, Artificial Sequence
  Description of Artificial Sequence: Synthetic oligonucleotide
ccuguacuuuaaccgacuu

SEQ ID NO: 1649849 - RNA, 19 nt, Artificial Sequence
  Description of Artificial Sequence: Synthetic oligonucleotide
cacguccauguuccuccgu

SEQ ID NO: 1649850 - RNA, 19 nt, Artificial Sequence
  Description of Artificial Sequence: Synthetic oligonucleotide
gccgggcgaagcgaucaga

SEQ ID NO: 1649851 - RNA, 19 nt, Artificial Sequence
  Description of Artificial Sequence: Synthetic oligonucleotide
cgaagucucagggaugcau

SEQ ID NO: 1649852 - RNA, 19 nt, Artificial Sequence
  Description of Artificial Sequence: Synthetic oligonucleotide
cgcuuacucaguguugccu

SEQ ID NO: 1649853 - RNA, 19 nt, Artificial Sequence
  Description of Artificial Sequence: Synthetic oligonucleotide
ccgucggaggaugucuuua

SEQ ID NO: 1649854 - RNA, 19 nt, Artificial Sequence
  Description of Artificial Sequence: Synthetic oligonucleotide
ccacacgaacccugugaau

SEQ ID NO: 1649855 - RNA, 19 nt, Artificial Sequence
  Description of Artificial Sequence: Synthetic oligonucleotide
ccguggguaguuggguggu

SEQ ID NO: 1649856 - RNA, 19 nt, Artificial Sequence
  Description of Artificial Sequence: Synthetic oligonucleotide
gcggggcgagagccacguc

SEQ ID NO: 1649857 - RNA, 19 nt, Artificial Sequence
  Description of Artificial Sequence: Synthetic oligonucleotide
aagauagaaucuuacaggg

SEQ ID NO: 1649858 - RNA, 19 nt, Artificial Sequence
  Description of Artificial Sequence: Synthetic oligonucleotide
acaaauacgaaccucaaag

SEQ ID NO: 1649859 - RNA, 19 nt, Artificial Sequence
  Description of Artificial Sequence: Synthetic oligonucleotide
gaaauuucauuuuaggugc

SEQ ID NO: 1649860 - RNA, 19 nt, Artificial Sequence
  Description of Artificial Sequence: Synthetic oligonucleotide
caaaauagcuuauuuaggg

SEQ ID NO: 1649861 - RNA, 19 nt, Artificial Sequence
  Description of Artificial Sequence: Synthetic oligonucleotide
gauagaaucuuacagggug

SEQ ID NO: 1649862 - RNA, 19 nt, Artificial Sequence
  Description of Artificial Sequence: Synthetic oligonucleotide
ugaaauauucuccaucaag

SEQ ID NO: 1649863 - RNA, 19 nt, Artificial Sequence
  Description of Artificial Sequence: Synthetic oligonucleotide
caaacuaucgccuucggag

SEQ ID NO: 1649864 - RNA, 19 nt, Artificial Sequence
  Description of Artificial Sequence: Synthetic oligonucleotide
aaucuuacaggguguaggg

SEQ ID NO: 1649865 - RNA, 19 nt, Artificial Sequence
  Description of Artificial Sequence: Synthetic oligonucleotide
aaauacgaaccucaaagcu

SEQ ID NO: 1649866 - RNA, 19 nt, Artificial Sequence
  Description of Artificial Sequence: Synthetic oligonucleotide
aauauucuccaucaagugu

SEQ ID NO: 1649867 - RNA, 19 nt, Artificial Sequence
  Description of Artificial Sequence: Synthetic oligonucleotide
ucggauaagaugcugagga

SEQ ID NO: 1649868 - RNA, 19 nt, Artificial Sequence
  Description of Artificial Sequence: Synthetic oligonucleotide
aaauauucuccaucaagug

SEQ ID NO: 1649869 - RNA, 19 nt, Artificial Sequence
  Description of Artificial Sequence: Synthetic oligonucleotide
cuugaaacaucuugaagcg

SEQ ID NO: 1649870 - RNA, 19 nt, Artificial Sequence
  Description of Artificial Sequence: Synthetic oligonucleotide
uuccacucggauaagaugc

SEQ ID NO: 1649871 - RNA, 19 nt, Artificial Sequence
  Description of Artificial Sequence: Synthetic oligonucleotide
uggugguacagucagagcc

SEQ ID NO: 1649872 - RNA, 19 nt, Artificial Sequence
  Description of Artificial Sequence: Synthetic oligonucleotide
cuaugagagcccaagauag

SEQ ID NO: 1649873 - RNA, 19 nt, Artificial Sequence
  Description of Artificial Sequence: Synthetic oligonucleotide
aaacuaucgccuucggagg

SEQ ID NO: 1649874 - RNA, 19 nt, Artificial Sequence
  Description of Artificial Sequence: Synthetic oligonucleotide
gauauggacccuaugagag

SEQ ID NO: 1649875 - RNA, 19 nt, Artificial Sequence
  Description of Artificial Sequence: Synthetic oligonucleotide
uaagggugaaauauucucc

SEQ ID NO: 1649876 - RNA, 19 nt, Artificial Sequence
  Description of Artificial Sequence: Synthetic oligonucleotide
caagguaauaaauggugcg

SEQ ID NO: 1649877 - RNA, 19 nt, Artificial Sequence
  Description of Artificial Sequence: Synthetic oligonucleotide
cuggauaggauuucgcugg

SEQ ID NO: 1649878 - RNA, 19 nt, Artificial Sequence
  Description of Artificial Sequence: Synthetic oligonucleotide
aaguacgggaggcagacug

SEQ ID NO: 1649879 - RNA, 19 nt, Artificial Sequence
  Description of Artificial Sequence: Synthetic oligonucleotide
uuaagggugaaauauucuc

SEQ ID NO: 1649880 - RNA, 19 nt, Artificial Sequence
  Description of Artificial Sequence: Synthetic oligonucleotide
uauuguagcuucuuguaga

SEQ ID NO: 1649881 - RNA, 19 nt, Artificial Sequence
  Description of Artificial Sequence: Synthetic oligonucleotide
uggauauggacccuaugag

SEQ ID NO: 1649882 - RNA, 19 nt, Artificial Sequence
  Description of Artificial Sequence: Synthetic oligonucleotide
aauacgaaccucaaagcug

SEQ ID NO: 1649883 - RNA, 19 nt, Artificial Sequence
  Description of Artificial Sequence: Synthetic oligonucleotide
gauaggauuucgcugggcc

SEQ ID NO: 1649884 - RNA, 19 nt, Artificial Sequence
  Description of Artificial Sequence: Synthetic oligonucleotide
ucuuacaggguguagggug

SEQ ID NO: 1649885 - RNA, 19 nt, Artificial Sequence
  Description of Artificial Sequence: Synthetic oligonucleotide
caaauuuccuuccacucgg

SEQ ID NO: 1649886 - RNA, 19 nt, Artificial Sequence
  Description of Artificial Sequence: Synthetic oligonucleotide
cacaagguaauaaauggug

SEQ ID NO: 1649887 - RNA, 19 nt, Artificial Sequence
  Description of Artificial Sequence: Synthetic oligonucleotide
gagaugguaugauaggagc

SEQ ID NO: 1649888 - RNA, 19 nt, Artificial Sequence
  Description of Artificial Sequence: Synthetic oligonucleotide
acaagguaauaaauggugc

SEQ ID NO: 1649889 - RNA, 19 nt, Artificial Sequence
  Description of Artificial Sequence: Synthetic oligonucleotide
augaugguaaggaugggcc

SEQ ID NO: 1649890 - RNA, 19 nt, Artificial Sequence
  Description of Artificial Sequence: Synthetic oligonucleotide
uaguuguaauggauggugg

SEQ ID NO: 1649891 - RNA, 19 nt, Artificial Sequence
  Description of Artificial Sequence: Synthetic oligonucleotide
aagucuggaaggcucuagg

SEQ ID NO: 1649892 - RNA, 19 nt, Artificial Sequence
  Description of Artificial Sequence: Synthetic oligonucleotide
aauagcuuauuuagggaag

SEQ ID NO: 1649893 - RNA, 19 nt, Artificial Sequence
  Description of Artificial Sequence: Synthetic oligonucleotide
cauguaguuguaauggaug

SEQ ID NO: 1649894 - RNA, 19 nt, Artificial Sequence
  Description of Artificial Sequence: Synthetic oligonucleotide
caaauacgaaccucaaagc

SEQ ID NO: 1649895 - RNA, 19 nt, Artificial Sequence
  Description of Artificial Sequence: Synthetic oligonucleotide
uaaauggugcggaagggac

SEQ ID NO: 1649896 - RNA, 19 nt, Artificial Sequence
  Description of Artificial Sequence: Synthetic oligonucleotide
agacggaagccauagucac

SEQ ID NO: 1649897 - RNA, 19 nt, Artificial Sequence
  Description of Artificial Sequence: Synthetic oligonucleotide
acggaagccauagucaccc

SEQ ID NO: 1649898 - RNA, 19 nt, Artificial Sequence
  Description of Artificial Sequence: Synthetic oligonucleotide
gauggugguacagucagag

SEQ ID NO: 1649899 - RNA, 19 nt, Artificial Sequence
  Description of Artificial Sequence: Synthetic oligonucleotide
uuuagggaaggggaguacg

SEQ ID NO: 1649900 - RNA, 19 nt, Artificial Sequence
  Description of Artificial Sequence: Synthetic oligonucleotide
ugagcauccuucaauucca

SEQ ID NO: 1649901 - RNA, 19 nt, Artificial Sequence
  Description of Artificial Sequence: Synthetic oligonucleotide
uguagauggccauggcacg

SEQ ID NO: 1649902 - RNA, 19 nt, Artificial Sequence
  Description of Artificial Sequence: Synthetic oligonucleotide
ugaugguaaggaugggccg

SEQ ID NO: 1649903 - RNA, 19 nt, Artificial Sequence
  Description of Artificial Sequence: Synthetic oligonucleotide
aauggugcggaagggacag

SEQ ID NO: 1649904 - RNA, 19 nt, Artificial Sequence
  Description of Artificial Sequence: Synthetic oligonucleotide
uguauuguagcuucuugua

SEQ ID NO: 1649905 - RNA, 19 nt, Artificial Sequence
  Description of Artificial Sequence: Synthetic oligonucleotide
ugguagguuuuauaggaug

SEQ ID NO: 1649906 - RNA, 19 nt, Artificial Sequence
  Description of Artificial Sequence: Synthetic oligonucleotide
cuuacaggguguagggugg

SEQ ID NO: 1649907 - RNA, 19 nt, Artificial Sequence
  Description of Artificial Sequence: Synthetic oligonucleotide
guauuguagcuucuuguag

SEQ ID NO: 1649908 - RNA, 19 nt, Artificial Sequence
  Description of Artificial Sequence: Synthetic oligonucleotide
uauggacccuaugagagcc

SEQ ID NO: 1649909 - RNA, 19 nt, Artificial Sequence
  Description of Artificial Sequence: Synthetic oligonucleotide
aguuacagggucuucugcu

SEQ ID NO: 1649910 - RNA, 19 nt, Artificial Sequence
  Description of Artificial Sequence: Synthetic oligonucleotide
agguuuuauaggaugggac

SEQ ID NO: 1649911 - RNA, 19 nt, Artificial Sequence
  Description of Artificial Sequence: Synthetic oligonucleotide
auagcuuauuuagggaagg

SEQ ID NO: 1649912 - RNA, 19 nt, Artificial Sequence
  Description of Artificial Sequence: Synthetic oligonucleotide
uguguugguaggcaaugcu

SEQ ID NO: 1649913 - RNA, 19 nt, Artificial Sequence
  Description of Artificial Sequence: Synthetic oligonucleotide
gaaggcucuaggauggcgg

SEQ ID NO: 1649914 - RNA, 19 nt, Artificial Sequence
  Description of Artificial Sequence: Synthetic oligonucleotide
guggauauggacccuauga

SEQ ID NO: 1649915 - RNA, 19 nt, Artificial Sequence
  Description of Artificial Sequence: Synthetic oligonucleotide
accccuuugaagccugagc

SEQ ID NO: 1649916 - RNA, 19 nt, Artificial Sequence
  Description of Artificial Sequence: Synthetic oligonucleotide
gggacagaagaugagaggg

SEQ ID NO: 1649917 - RNA, 19 nt, Artificial Sequence
  Description of Artificial Sequence: Synthetic oligonucleotide
gucaguccgagucaggccc

SEQ ID NO: 1649918 - RNA, 19 nt, Artificial Sequence
  Description of Artificial Sequence: Synthetic oligonucleotide
uuaaguacgggaggcagac

SEQ ID NO: 1649919 - RNA, 19 nt, Artificial Sequence
  Description of Artificial Sequence: Synthetic oligonucleotide
gacagaagaugagaggggc

SEQ ID NO: 1649920 - RNA, 19 nt, Artificial Sequence
  Description of Artificial Sequence: Synthetic oligonucleotide
uuguaauggauggugguac

SEQ ID NO: 1649921 - RNA, 19 nt, Artificial Sequence
  Description of Artificial Sequence: Synthetic oligonucleotide
gcaaauuuccuuccacucg

SEQ ID NO: 1649922 - RNA, 19 nt, Artificial Sequence
  Description of Artificial Sequence: Synthetic oligonucleotide
agggcagcgucuuacaacu

SEQ ID NO: 1649923 - RNA, 19 nt, Artificial Sequence
  Description of Artificial Sequence: Synthetic oligonucleotide
gaguacgugcacgugacag

SEQ ID NO: 1649924 - RNA, 19 nt, Artificial Sequence
  Description of Artificial Sequence: Synthetic oligonucleotide
aaggaugggccgccgguuc

SEQ ID NO: 1649925 - RNA, 19 nt, Artificial Sequence
  Description of Artificial Sequence: Synthetic oligonucleotide
ucaguuacagggucuucug

SEQ ID NO: 1649926 - RNA, 19 nt, Artificial Sequence
  Description of Artificial Sequence: Synthetic oligonucleotide
cucguuuagcacucuuugg

SEQ ID NO: 1649927 - RNA, 19 nt, Artificial Sequence
  Description of Artificial Sequence: Synthetic oligonucleotide
acucggauaagaugcugag

SEQ ID NO: 1649928 - RNA, 19 nt, Artificial Sequence
  Description of Artificial Sequence: Synthetic oligonucleotide
gguagguuuuauaggaugg

SEQ ID NO: 1649929 - RNA, 19 nt, Artificial Sequence
  Description of Artificial Sequence: Synthetic oligonucleotide
uuauaggaugggacagaag

SEQ ID NO: 1649930 - RNA, 19 nt, Artificial Sequence
  Description of Artificial Sequence: Synthetic oligonucleotide
uuucgcugggccagcagag

SEQ ID NO: 1649931 - RNA, 19 nt, Artificial Sequence
  Description of Artificial Sequence: Synthetic oligonucleotide
ugaggaggagccaaacuau

SEQ ID NO: 1649932 - RNA, 19 nt, Artificial Sequence
  Description of Artificial Sequence: Synthetic oligonucleotide
ugcggaagggacaggaagu

SEQ ID NO: 1649933 - RNA, 19 nt, Artificial Sequence
  Description of Artificial Sequence: Synthetic oligonucleotide
uuuauaggaugggacagaa

SEQ ID NO: 1649934 - RNA, 19 nt, Artificial Sequence
  Description of Artificial Sequence: Synthetic oligonucleotide
auuuggccgucccugagug

SEQ ID NO: 1649935 - RNA, 19 nt, Artificial Sequence
  Description of Artificial Sequence: Synthetic oligonucleotide
auuucauuuuaggugccag

SEQ ID NO: 1649936 - RNA, 19 nt, Artificial Sequence
  Description of Artificial Sequence: Synthetic oligonucleotide
gaugguaaggaugggccgc

SEQ ID NO: 1649937 - RNA, 19 nt, Artificial Sequence
  Description of Artificial Sequence: Synthetic oligonucleotide
uaggauuucgcugggccag

SEQ ID NO: 1649938 - RNA, 19 nt, Artificial Sequence
  Description of Artificial Sequence: Synthetic oligonucleotide
guagguuuuauaggauggg

SEQ ID NO: 1649939 - RNA, 19 nt, Artificial Sequence
  Description of Artificial Sequence: Synthetic oligonucleotide
uguaauggauggugguaca

SEQ ID NO: 1649940 - RNA, 19 nt, Artificial Sequence
  Description of Artificial Sequence: Synthetic oligonucleotide
aacuaucgccuucggagga

SEQ ID NO: 1649941 - RNA, 19 nt, Artificial Sequence
  Description of Artificial Sequence: Synthetic oligonucleotide
cuuccacucggauaagaug

SEQ ID NO: 1649942 - RNA, 19 nt, Artificial Sequence
  Description of Artificial Sequence: Synthetic oligonucleotide
agagaugguaugauaggag

SEQ ID NO: 1649943 - RNA, 19 nt, Artificial Sequence
  Description of Artificial Sequence: Synthetic oligonucleotide
guggaguugacccacagcu

SEQ ID NO: 1649944 - RNA, 19 nt, Artificial Sequence
  Description of Artificial Sequence: Synthetic oligonucleotide
acagauuuggccgucccug

SEQ ID NO: 1649945 - RNA, 19 nt, Artificial Sequence
  Description of Artificial Sequence: Synthetic oligonucleotide
ggaguugacccacagcugc

SEQ ID NO: 1649946 - RNA, 19 nt, Artificial Sequence
  Description of Artificial Sequence: Synthetic oligonucleotide
uaugagagcccaagauaga

SEQ ID NO: 1649947 - RNA, 19 nt, Artificial Sequence
  Description of Artificial Sequence: Synthetic oligonucleotide
gugcacgugacagauuugg

SEQ ID NO: 1649948 - RNA, 19 nt, Artificial Sequence
  Description of Artificial Sequence: Synthetic oligonucleotide
gaucuuaagggugaaauau

SEQ ID NO: 1649949 - RNA, 19 nt, Artificial Sequence
  Description of Artificial Sequence: Synthetic oligonucleotide
uagguuuuauaggauggga

SEQ ID NO: 1649950 - RNA, 19 nt, Artificial Sequence
  Description of Artificial Sequence: Synthetic oligonucleotide
auacgaaccucaaagcugu

SEQ ID NO: 1649951 - RNA, 19 nt, Artificial Sequence
  Description of Artificial Sequence: Synthetic oligonucleotide
auuucgcugggccagcaga

SEQ ID NO: 1649952 - RNA, 19 nt, Artificial Sequence
  Description of Artificial Sequence: Synthetic oligonucleotide
uggauaggauuucgcuggg

SEQ ID NO: 1649953 - RNA, 19 nt, Artificial Sequence
  Description of Artificial Sequence: Synthetic oligonucleotide
uaggcaaugcucguuuagc

SEQ ID NO: 1649954 - RNA, 19 nt, Artificial Sequence
  Description of Artificial Sequence: Synthetic oligonucleotide
ucuaggauggcggcuggag

SEQ ID NO: 1649955 - RNA, 19 nt, Artificial Sequence
  Description of Artificial Sequence: Synthetic oligonucleotide
cauggcacggacacgggug

SEQ ID NO: 1649956 - RNA, 19 nt, Artificial Sequence
  Description of Artificial Sequence: Synthetic oligonucleotide
gaugggacagaagaugaga

SEQ ID NO: 1649957 - RNA, 19 nt, Artificial Sequence
  Description of Artificial Sequence: Synthetic oligonucleotide
uggcucauaugguaccacc

SEQ ID NO: 1649958 - RNA, 19 nt, Artificial Sequence
  Description of Artificial Sequence: Synthetic oligonucleotide
guaggcaaugcucguuuag

SEQ ID NO: 1649959 - RNA, 19 nt, Artificial Sequence
  Description of Artificial Sequence: Synthetic oligonucleotide
uggagugagcaccauuguc

SEQ ID NO: 1649960 - RNA, 19 nt, Artificial Sequence
  Description of Artificial Sequence: Synthetic oligonucleotide
auaaauggugcggaaggga

SEQ ID NO: 1649961 - RNA, 19 nt, Artificial Sequence
  Description of Artificial Sequence: Synthetic oligonucleotide
gugcggaagggacaggaag

SEQ ID NO: 1649962 - RNA, 19 nt, Artificial Sequence
  Description of Artificial Sequence: Synthetic oligonucleotide
aauaggggccaggaaccag

SEQ ID NO: 1649963 - RNA, 19 nt, Artificial Sequence
  Description of Artificial Sequence: Synthetic oligonucleotide
uggaguugacccacagcug

SEQ ID NO: 1649964 - RNA, 19 nt, Artificial Sequence
  Description of Artificial Sequence: Synthetic oligonucleotide
agguaauaaauggugcgga

SEQ ID NO: 1649965 - RNA, 19 nt, Artificial Sequence
  Description of Artificial Sequence: Synthetic oligonucleotide
acgugcacgugacagauuu

SEQ ID NO: 1649966 - RNA, 19 nt, Artificial Sequence
  Description of Artificial Sequence: Synthetic oligonucleotide
uuuuccucgguacgacggu

SEQ ID NO: 1649967 - RNA, 19 nt, Artificial Sequence
  Description of Artificial Sequence: Synthetic oligonucleotide
uugaaacaucuugaagcgc

SEQ ID NO: 1649968 - RNA, 19 nt, Artificial Sequence
  Description of Artificial Sequence: Synthetic oligonucleotide
uaauggauggugguacagu

SEQ ID NO: 1649969 - RNA, 19 nt, Artificial Sequence
  Description of Artificial Sequence: Synthetic oligonucleotide
auuuagggaaggggaguac

SEQ ID NO: 1649970 - RNA, 19 nt, Artificial Sequence
  Description of Artificial Sequence: Synthetic oligonucleotide
gacggucucucccaggaca

SEQ ID NO: 1649971 - RNA, 19 nt, Artificial Sequence
  Description of Artificial Sequence: Synthetic oligonucleotide
agccaaacuaucgccuucg

SEQ ID NO: 1649972 - RNA, 19 nt, Artificial Sequence
  Description of Artificial Sequence: Synthetic oligonucleotide
acagucagagccaaccuca

SEQ ID NO: 1649973 - RNA, 19 nt, Artificial Sequence
  Description of Artificial Sequence: Synthetic oligonucleotide
ugcacgugacagauuuggc

SEQ ID NO: 1649974 - RNA, 19 nt, Artificial Sequence
  Description of Artificial Sequence: Synthetic oligonucleotide
uacucggcaugcaaauuuc

SEQ ID NO: 1649975 - RNA, 19 nt, Artificial Sequence
  Description of Artificial Sequence: Synthetic oligonucleotide
ugcaggguggaaagaaaau

SEQ ID NO: 1649976 - RNA, 19 nt, Artificial Sequence
  Description of Artificial Sequence: Synthetic oligonucleotide
ugagagcccaagauagaau

SEQ ID NO: 1649977 - RNA, 19 nt, Artificial Sequence
  Description of Artificial Sequence: Synthetic oligonucleotide
uauuuagggaaggggagua

SEQ ID NO: 1649978 - RNA, 19 nt, Artificial Sequence
  Description of Artificial Sequence: Synthetic oligonucleotide
agcgucuuacaacuucugu

SEQ ID NO: 1649979 - RNA, 19 nt, Artificial Sequence
  Description of Artificial Sequence: Synthetic oligonucleotide
gacccuaugagagcccaag

SEQ ID NO: 1649980 - RNA, 19 nt, Artificial Sequence
  Description of Artificial Sequence: Synthetic oligonucleotide
uaucgccuucggaggagcg

SEQ ID NO: 1649981 - RNA, 19 nt, Artificial Sequence
  Description of Artificial Sequence: Synthetic oligonucleotide
gagucucaguuacaggguc

SEQ ID NO: 1649982 - RNA, 19 nt, Artificial Sequence
  Description of Artificial Sequence: Synthetic oligonucleotide
cuuguguugguaggcaaug

SEQ ID NO: 1649983 - RNA, 19 nt, Artificial Sequence
  Description of Artificial Sequence: Synthetic oligonucleotide
ggaggagccaaacuaucgc

SEQ ID NO: 1649984 - RNA, 19 nt, Artificial Sequence
  Description of Artificial Sequence: Synthetic oligonucleotide
guagauggccauggcacgg

SEQ ID NO: 1649985 - RNA, 19 nt, Artificial Sequence
  Description of Artificial Sequence: Synthetic oligonucleotide
ucggcaugcaaauuuccuu

SEQ ID NO: 1649986 - RNA, 19 nt, Artificial Sequence
  Description of Artificial Sequence: Synthetic oligonucleotide
gcacgugacagauuuggcc

SEQ ID NO: 1649987 - RNA, 19 nt, Artificial Sequence
  Description of Artificial Sequence: Synthetic oligonucleotide
ugaucaagucuggaaggcu

SEQ ID NO: 1649988 - RNA, 19 nt, Artificial Sequence
  Description of Artificial Sequence: Synthetic oligonucleotide
auagaaucuuacagggugu

SEQ ID NO: 1649989 - RNA, 19 nt, Artificial Sequence
  Description of Artificial Sequence: Synthetic oligonucleotide
gcagcuaccaacccauccc

SEQ ID NO: 1649990 - RNA, 19 nt, Artificial Sequence
  Description of Artificial Sequence: Synthetic oligonucleotide
aaauggugcggaagggaca

SEQ ID NO: 1649991 - RNA, 19 nt, Artificial Sequence
  Description of Artificial Sequence: Synthetic oligonucleotide
caugaccucggaucuuaag

SEQ ID NO: 1649992 - RNA, 19 nt, Artificial Sequence
  Description of Artificial Sequence: Synthetic oligonucleotide
acucggcaugcaaauuucc

SEQ ID NO: 1649993 - RNA, 19 nt, Artificial Sequence
  Description of Artificial Sequence: Synthetic oligonucleotide
ugguaggcaaugcucguuu

SEQ ID NO: 1649994 - RNA, 19 nt, Artificial Sequence
  Description of Artificial Sequence: Synthetic oligonucleotide
uuuuaggugccagggucca

SEQ ID NO: 1649995 - RNA, 19 nt, Artificial Sequence
  Description of Artificial Sequence: Synthetic oligonucleotide
ggauauggacccuaugaga

SEQ ID NO: 1649996 - RNA, 19 nt, Artificial Sequence
  Description of Artificial Sequence: Synthetic oligonucleotide
aguugacccacagcugcac

SEQ ID NO: 1649997 - RNA, 19 nt, Artificial Sequence
  Description of Artificial Sequence: Synthetic oligonucleotide
gcucguuuagcacucuuug

SEQ ID NO: 1649998 - RNA, 19 nt, Artificial Sequence
  Description of Artificial Sequence: Synthetic oligonucleotide
acgacggucucucccagga

SEQ ID NO: 1649999 - RNA, 19 nt, Artificial Sequence
  Description of Artificial Sequence: Synthetic oligonucleotide
cccaauaggggccaggaac

SEQ ID NO: 1650000 - RNA, 19 nt, Artificial Sequence
  Description of Artificial Sequence: Synthetic oligonucleotide
agaaucuuacaggguguag

SEQ ID NO: 1650001 - RNA, 19 nt, Artificial Sequence
  Description of Artificial Sequence: Synthetic oligonucleotide
uguaggguggggugaaauu

SEQ ID NO: 1650002 - RNA, 19 nt, Artificial Sequence
  Description of Artificial Sequence: Synthetic oligonucleotide
cagcuaccaacccaucccc

SEQ ID NO: 1650003 - RNA, 19 nt, Artificial Sequence
  Description of Artificial Sequence: Synthetic oligonucleotide
caaugcucguuuagcacuc

SEQ ID NO: 1650004 - RNA, 19 nt, Artificial Sequence
  Description of Artificial Sequence: Synthetic oligonucleotide
cucggauaagaugcugagg

SEQ ID NO: 1650005 - RNA, 19 nt, Artificial Sequence
  Description of Artificial Sequence: Synthetic oligonucleotide
caguuacagggucuucugc

SEQ ID NO: 1650006 - RNA, 19 nt, Artificial Sequence
  Description of Artificial Sequence: Synthetic oligonucleotide
gauuucgcugggccagcag

SEQ ID NO: 1650007 - RNA, 19 nt, Artificial Sequence
  Description of Artificial Sequence: Synthetic oligonucleotide
augguaugauaggagccag

SEQ ID NO: 1650008 - RNA, 19 nt, Artificial Sequence
  Description of Artificial Sequence: Synthetic oligonucleotide
aggaugggacagaagauga

SEQ ID NO: 1650009 - RNA, 19 nt, Artificial Sequence
  Description of Artificial Sequence: Synthetic oligonucleotide
uggcuggauaggauuucgc

SEQ ID NO: 1650010 - RNA, 19 nt, Artificial Sequence
  Description of Artificial Sequence: Synthetic oligonucleotide
caacaaguggcuggauagg

SEQ ID NO: 1650011 - RNA, 19 nt, Artificial Sequence
  Description of Artificial Sequence: Synthetic oligonucleotide
agggguggaguugacccac

SEQ ID NO: 1650012 - RNA, 19 nt, Artificial Sequence
  Description of Artificial Sequence: Synthetic oligonucleotide
cucauaugguaccaccaca

SEQ ID NO: 1650013 - RNA, 19 nt, Artificial Sequence
  Description of Artificial Sequence: Synthetic oligonucleotide
uuccucgguacgacggucu

SEQ ID NO: 1650014 - RNA, 19 nt, Artificial Sequence
  Description of Artificial Sequence: Synthetic oligonucleotide
aggcacaaauacgaaccuc

SEQ ID NO: 1650015 - RNA, 19 nt, Artificial Sequence
  Description of Artificial Sequence: Synthetic oligonucleotide
ggcacaaauacgaaccuca

SEQ ID NO: 1650016 - RNA, 19 nt, Artificial Sequence
  Description of Artificial Sequence: Synthetic oligonucleotide
aucgccuucggaggagcgc

SEQ ID NO: 1650017 - RNA, 19 nt, Artificial Sequence
  Description of Artificial Sequence: Synthetic oligonucleotide
acauguaguuguaauggau

SEQ ID NO: 1650018 - RNA, 19 nt, Artificial Sequence
  Description of Artificial Sequence: Synthetic oligonucleotide
gcuggagugagcaccauug

SEQ ID NO: 1650019 - RNA, 19 nt, Artificial Sequence
  Description of Artificial Sequence: Synthetic oligonucleotide
uauucuccaucaaguguuu

SEQ ID NO: 1650020 - RNA, 19 nt, Artificial Sequence
  Description of Artificial Sequence: Synthetic oligonucleotide
cacauguaguuguaaugga

SEQ ID NO: 1650021 - RNA, 19 nt, Artificial Sequence
  Description of Artificial Sequence: Synthetic oligonucleotide
gcgucuuacaacuucuguc

SEQ ID NO: 1650022 - RNA, 19 nt, Artificial Sequence
  Description of Artificial Sequence: Synthetic oligonucleotide
uacgacggucucucccagg

SEQ ID NO: 1650023 - RNA, 19 nt, Artificial Sequence
  Description of Artificial Sequence: Synthetic oligonucleotide
cuuaagggugaaauauucu

SEQ ID NO: 1650024 - RNA, 19 nt, Artificial Sequence
  Description of Artificial Sequence: Synthetic oligonucleotide
cacucggauaagaugcuga

SEQ ID NO: 1650025 - RNA, 19 nt, Artificial Sequence
  Description of Artificial Sequence: Synthetic oligonucleotide
aguacgggaggcagacugg

SEQ ID NO: 1650026 - RNA, 19 nt, Artificial Sequence
  Description of Artificial Sequence: Synthetic oligonucleotide
uggugcggaagggacagga

SEQ ID NO: 1650027 - RNA, 19 nt, Artificial Sequence
  Description of Artificial Sequence: Synthetic oligonucleotide
agauagaaucuuacagggu

SEQ ID NO: 1650028 - RNA, 19 nt, Artificial Sequence
  Description of Artificial Sequence: Synthetic oligonucleotide
uagaaucuuacagggugua

SEQ ID NO: 1650029 - RNA, 19 nt, Artificial Sequence
  Description of Artificial Sequence: Synthetic oligonucleotide
gaagucaguccgagucagg

SEQ ID NO: 1650030 - RNA, 19 nt, Artificial Sequence
  Description of Artificial Sequence: Synthetic oligonucleotide
ggccauggcacggacacgg

SEQ ID NO: 1650031 - RNA, 19 nt, Artificial Sequence
  Description of Artificial Sequence: Synthetic oligonucleotide
ggcaaugcucguuuagcac

SEQ ID NO: 1650032 - RNA, 19 nt, Artificial Sequence
  Description of Artificial Sequence: Synthetic oligonucleotide
aaauuuccuuccacucgga

SEQ ID NO: 1650033 - RNA, 19 nt, Artificial Sequence
  Description of Artificial Sequence: Synthetic oligonucleotide
uacgggaggcagacuggcc

SEQ ID NO: 1650034 - RNA, 19 nt, Artificial Sequence
  Description of Artificial Sequence: Synthetic oligonucleotide
guguugguaggcaaugcuc

SEQ ID NO: 1650035 - RNA, 19 nt, Artificial Sequence
  Description of Artificial Sequence: Synthetic oligonucleotide
gguaaggaugggccgccgg

SEQ ID NO: 1650036 - RNA, 19 nt, Artificial Sequence
  Description of Artificial Sequence: Synthetic oligonucleotide
ggcagcuaccaacccaucc

SEQ ID NO: 1650037 - RNA, 19 nt, Artificial Sequence
  Description of Artificial Sequence: Synthetic oligonucleotide
ucguggugagggcagcguc

SEQ ID NO: 1650038 - RNA, 19 nt, Artificial Sequence
  Description of Artificial Sequence: Synthetic oligonucleotide
guggggugaaauuucauuu

SEQ ID NO: 1650039 - RNA, 19 nt, Artificial Sequence
  Description of Artificial Sequence: Synthetic oligonucleotide
acgugacagauuuggccgu

SEQ ID NO: 1650040 - RNA, 19 nt, Artificial Sequence
  Description of Artificial Sequence: Synthetic oligonucleotide
cagcuggcaaaauagcuua

SEQ ID NO: 1650041 - RNA, 19 nt, Artificial Sequence
  Description of Artificial Sequence: Synthetic oligonucleotide
aagccugagcauccuucaa

SEQ ID NO: 1650042 - RNA, 19 nt, Artificial Sequence
  Description of Artificial Sequence: Synthetic oligonucleotide
ggagcgcucguggugaggg

SEQ ID NO: 1650043 - RNA, 19 nt, Artificial Sequence
  Description of Artificial Sequence: Synthetic oligonucleotide
cucgguacgacggucucuc

SEQ ID NO: 1650044 - RNA, 19 nt, Artificial Sequence
  Description of Artificial Sequence: Synthetic oligonucleotide
uggacccuaugagagccca

SEQ ID NO: 1650045 - RNA, 19 nt, Artificial Sequence
  Description of Artificial Sequence: Synthetic oligonucleotide
aggauuucgcugggccagc

SEQ ID NO: 1650046 - RNA, 19 nt, Artificial Sequence
  Description of Artificial Sequence: Synthetic oligonucleotide
gaggccaccggugcaggag

SEQ ID NO: 1650047 - RNA, 19 nt, Artificial Sequence
  Description of Artificial Sequence: Synthetic oligonucleotide
gaagcccagacggaagcca

SEQ ID NO: 1650048 - RNA, 19 nt, Artificial Sequence
  Description of Artificial Sequence: Synthetic oligonucleotide
gguacgacggucucuccca

SEQ ID NO: 1650049 - RNA, 19 nt, Artificial Sequence
  Description of Artificial Sequence: Synthetic oligonucleotide
acuaucgccuucggaggag

SEQ ID NO: 1650050 - RNA, 19 nt, Artificial Sequence
  Description of Artificial Sequence: Synthetic oligonucleotide
acccuaugagagcccaaga

SEQ ID NO: 1650051 - RNA, 19 nt, Artificial Sequence
  Description of Artificial Sequence: Synthetic oligonucleotide
agagaccuggcagcuacca

SEQ ID NO: 1650052 - RNA, 19 nt, Artificial Sequence
  Description of Artificial Sequence: Synthetic oligonucleotide
aaugcucguuuagcacucu

SEQ ID NO: 1650053 - RNA, 19 nt, Artificial Sequence
  Description of Artificial Sequence: Synthetic oligonucleotide
uuuggccgucccugagugc

SEQ ID NO: 1650054 - RNA, 19 nt, Artificial Sequence
  Description of Artificial Sequence: Synthetic oligonucleotide
ugguggauauggacccuau

SEQ ID NO: 1650055 - RNA, 19 nt, Artificial Sequence
  Description of Artificial Sequence: Synthetic oligonucleotide
ugagcaccauuguccucug

SEQ ID NO: 1650056 - RNA, 19 nt, Artificial Sequence
  Description of Artificial Sequence: Synthetic oligonucleotide
ucaugaccucggaucuuaa

SEQ ID NO: 1650057 - RNA, 19 nt, Artificial Sequence
  Description of Artificial Sequence: Synthetic oligonucleotide
gauuuggccgucccugagu

SEQ ID NO: 1650058 - RNA, 19 nt, Artificial Sequence
  Description of Artificial Sequence: Synthetic oligonucleotide
aucuuacaggguguagggu

SEQ ID NO: 1650059 - RNA, 19 nt, Artificial Sequence
  Description of Artificial Sequence: Synthetic oligonucleotide
guacgggaggcagacuggc

SEQ ID NO: 1650060 - RNA, 19 nt, Artificial Sequence
  Description of Artificial Sequence: Synthetic oligonucleotide
cuaucgccuucggaggagc

SEQ ID NO: 1650061 - RNA, 19 nt, Artificial Sequence
  Description of Artificial Sequence: Synthetic oligonucleotide
auggacccuaugagagccc

SEQ ID NO: 1650062 - RNA, 19 nt, Artificial Sequence
  Description of Artificial Sequence: Synthetic oligonucleotide
ggaaggcucuaggauggcg

SEQ ID NO: 1650063 - RNA, 19 nt, Artificial Sequence
  Description of Artificial Sequence: Synthetic oligonucleotide
gcaaugcucguuuagcacu

SEQ ID NO: 1650064 - RNA, 19 nt, Artificial Sequence
  Description of Artificial Sequence: Synthetic oligonucleotide
guacucggcaugcaaauuu

SEQ ID NO: 1650065 - RNA, 19 nt, Artificial Sequence
  Description of Artificial Sequence: Synthetic oligonucleotide
cagcgucuuacaacuucug

SEQ ID NO: 1650066 - RNA, 19 nt, Artificial Sequence
  Description of Artificial Sequence: Synthetic oligonucleotide
uuuccucgguacgacgguc

SEQ ID NO: 1650067 - RNA, 19 nt, Artificial Sequence
  Description of Artificial Sequence: Synthetic oligonucleotide
guacgacggucucucccag

SEQ ID NO: 1650068 - RNA, 19 nt, Artificial Sequence
  Description of Artificial Sequence: Synthetic oligonucleotide
gguggauauggacccuaug

SEQ ID NO: 1650069 - RNA, 19 nt, Artificial Sequence
  Description of Artificial Sequence: Synthetic oligonucleotide
augauaggagccagcaguu

SEQ ID NO: 1650070 - RNA, 19 nt, Artificial Sequence
  Description of Artificial Sequence: Synthetic oligonucleotide
ggaucuuaagggugaaaua

SEQ ID NO: 1650071 - RNA, 19 nt, Artificial Sequence
  Description of Artificial Sequence: Synthetic oligonucleotide
guugacccacagcugcaca

SEQ ID NO: 1650072 - RNA, 19 nt, Artificial Sequence
  Description of Artificial Sequence: Synthetic oligonucleotide
ugguaaggaugggccgccg

SEQ ID NO: 1650073 - RNA, 19 nt, Artificial Sequence
  Description of Artificial Sequence: Synthetic oligonucleotide
uugguggauauggacccua

SEQ ID NO: 1650074 - RNA, 19 nt, Artificial Sequence
  Description of Artificial Sequence: Synthetic oligonucleotide
uccucgguacgacggucuc

SEQ ID NO: 1650075 - RNA, 19 nt, Artificial Sequence
  Description of Artificial Sequence: Synthetic oligonucleotide
auagucacccugguagguu

SEQ ID NO: 1650076 - RNA, 19 nt, Artificial Sequence
  Description of Artificial Sequence: Synthetic oligonucleotide
cagguuaccacuggggucu

SEQ ID NO: 1650077 - RNA, 19 nt, Artificial Sequence
  Description of Artificial Sequence: Synthetic oligonucleotide
ggcggcuggagugagcacc

SEQ ID NO: 1650078 - RNA, 19 nt, Artificial Sequence
  Description of Artificial Sequence: Synthetic oligonucleotide
aggaugggccgccgguuca

SEQ ID NO: 1650079 - RNA, 19 nt, Artificial Sequence
  Description of Artificial Sequence: Synthetic oligonucleotide
ggggaguacgugcacguga

SEQ ID NO: 1650080 - RNA, 19 nt, Artificial Sequence
  Description of Artificial Sequence: Synthetic oligonucleotide
caguuuggacuuuucuucu

SEQ ID NO: 1650081 - RNA, 19 nt, Artificial Sequence
  Description of Artificial Sequence: Synthetic oligonucleotide
gcagguuaccacugggguc

SEQ ID NO: 1650082 - RNA, 19 nt, Artificial Sequence
  Description of Artificial Sequence: Synthetic oligonucleotide
guaaggaugggccgccggu

SEQ ID NO: 1650083 - RNA, 19 nt, Artificial Sequence
  Description of Artificial Sequence: Synthetic oligonucleotide
uaaggaugggccgccgguu

SEQ ID NO: 1650084 - RNA, 19 nt, Artificial Sequence
  Description of Artificial Sequence: Synthetic oligonucleotide
cagauuuggccgucccuga

SEQ ID NO: 1650085 - RNA, 19 nt, Artificial Sequence
  Description of Artificial Sequence: Synthetic oligonucleotide
cuucggaggagcgcucgug

SEQ ID NO: 1650086 - RNA, 19 nt, Artificial Sequence
  Description of Artificial Sequence: Synthetic oligonucleotide
gaggagcgcucguggugag

SEQ ID NO: 1650087 - RNA, 19 nt, Artificial Sequence
  Description of Artificial Sequence: Synthetic oligonucleotide
cucggcaugcaaauuuccu

SEQ ID NO: 1650088 - RNA, 19 nt, Artificial Sequence
  Description of Artificial Sequence: Synthetic oligonucleotide
ugaccccuuugaagccuga

SEQ ID NO: 1650089 - RNA, 19 nt, Artificial Sequence
  Description of Artificial Sequence: Synthetic oligonucleotide
uaaguacgggaggcagacu

SEQ ID NO: 1650090 - RNA, 19 nt, Artificial Sequence
  Description of Artificial Sequence: Synthetic oligonucleotide
uguuccgucccagcagguu

SEQ ID NO: 1650091 - RNA, 19 nt, Artificial Sequence
  Description of Artificial Sequence: Synthetic oligonucleotide
agccauagucacccuggua

SEQ ID NO: 1650092 - RNA, 19 nt, Artificial Sequence
  Description of Artificial Sequence: Synthetic oligonucleotide
ucucaguuacagggucuuc

SEQ ID NO: 1650093 - RNA, 19 nt, Artificial Sequence
  Description of Artificial Sequence: Synthetic oligonucleotide
cacacugugccgaaauuuu

SEQ ID NO: 1650094 - RNA, 19 nt, Artificial Sequence
  Description of Artificial Sequence: Synthetic oligonucleotide
gggaguacgugcacgugac

SEQ ID NO: 1650095 - RNA, 19 nt, Artificial Sequence
  Description of Artificial Sequence: Synthetic oligonucleotide
ucgguacgacggucucucc

SEQ ID NO: 1650096 - RNA, 19 nt, Artificial Sequence
  Description of Artificial Sequence: Synthetic oligonucleotide
ggcucauaugguaccacca

SEQ ID NO: 1650097 - RNA, 19 nt, Artificial Sequence
  Description of Artificial Sequence: Synthetic oligonucleotide
guaggguggggugaaauuu

SEQ ID NO: 1650098 - RNA, 19 nt, Artificial Sequence
  Description of Artificial Sequence: Synthetic oligonucleotide
ggguggaguugacccacag

SEQ ID NO: 1650099 - RNA, 19 nt, Artificial Sequence
  Description of Artificial Sequence: Synthetic oligonucleotide
gcccaagauagaaucuuac

SEQ ID NO: 1650100 - RNA, 19 nt, Artificial Sequence
  Description of Artificial Sequence: Synthetic oligonucleotide
augcucguuuagcacucuu

SEQ ID NO: 1650101 - RNA, 19 nt, Artificial Sequence
  Description of Artificial Sequence: Synthetic oligonucleotide
gguggggugaaauuucauu

SEQ ID NO: 1650102 - RNA, 19 nt, Artificial Sequence
  Description of Artificial Sequence: Synthetic oligonucleotide
gagcgcucguggugagggc

SEQ ID NO: 1650103 - RNA, 19 nt, Artificial Sequence
  Description of Artificial Sequence: Synthetic oligonucleotide
gcccagacggaagccauag

SEQ ID NO: 1650104 - RNA, 19 nt, Artificial Sequence
  Description of Artificial Sequence: Synthetic oligonucleotide
uuuaggugccaggguccaa

SEQ ID NO: 1650105 - RNA, 19 nt, Artificial Sequence
  Description of Artificial Sequence: Synthetic oligonucleotide
guggcucauaugguaccac

SEQ ID NO: 1650106 - RNA, 19 nt, Artificial Sequence
  Description of Artificial Sequence: Synthetic oligonucleotide
agcccaagauagaaucuua

SEQ ID NO: 1650107 - RNA, 19 nt, Artificial Sequence
  Description of Artificial Sequence: Synthetic oligonucleotide
uacgugcacgugacagauu

SEQ ID NO: 1650108 - RNA, 19 nt, Artificial Sequence
  Description of Artificial Sequence: Synthetic oligonucleotide
agccaaccucagguggcuc

SEQ ID NO: 1650109 - RNA, 19 nt, Artificial Sequence
  Description of Artificial Sequence: Synthetic oligonucleotide
aggggaguacgugcacgug

SEQ ID NO: 1650110 - RNA, 19 nt, Artificial Sequence
  Description of Artificial Sequence: Synthetic oligonucleotide
ggauaggauuucgcugggc

SEQ ID NO: 1650111 - RNA, 19 nt, Artificial Sequence
  Description of Artificial Sequence: Synthetic oligonucleotide
cuaggauggcggcuggagu

SEQ ID NO: 1650112 - RNA, 19 nt, Artificial Sequence
  Description of Artificial Sequence: Synthetic oligonucleotide
uacgaaccucaaagcuguu

SEQ ID NO: 1650113 - RNA, 19 nt, Artificial Sequence
  Description of Artificial Sequence: Synthetic oligonucleotide
gaugggccgccgguucaug

SEQ ID NO: 1650114 - RNA, 19 nt, Artificial Sequence
  Description of Artificial Sequence: Synthetic oligonucleotide
caauaggggccaggaacca

SEQ ID NO: 1650115 - RNA, 19 nt, Artificial Sequence
  Description of Artificial Sequence: Synthetic oligonucleotide
guccucugaccccuuugaa

SEQ ID NO: 1650116 - RNA, 19 nt, Artificial Sequence
  Description of Artificial Sequence: Synthetic oligonucleotide
ggguggaaagaaaaugggu

SEQ ID NO: 1650117 - RNA, 19 nt, Artificial Sequence
  Description of Artificial Sequence: Synthetic oligonucleotide
caggcacaaauacgaaccu

SEQ ID NO: 1650118 - RNA, 19 nt, Artificial Sequence
  Description of Artificial Sequence: Synthetic oligonucleotide
uccgucccagcagguuacc

SEQ ID NO: 1650119 - RNA, 19 nt, Artificial Sequence
  Description of Artificial Sequence: Synthetic oligonucleotide
gugguacagucagagccaa

SEQ ID NO: 1650120 - RNA, 19 nt, Artificial Sequence
  Description of Artificial Sequence: Synthetic oligonucleotide
auggugcggaagggacagg

SEQ ID NO: 1650121 - RNA, 19 nt, Artificial Sequence
  Description of Artificial Sequence: Synthetic oligonucleotide
aggaacuauugcacaugua

SEQ ID NO: 1650122 - RNA, 19 nt, Artificial Sequence
  Description of Artificial Sequence: Synthetic oligonucleotide
cauagucacccugguaggu

SEQ ID NO: 1650123 - RNA, 19 nt, Artificial Sequence
  Description of Artificial Sequence: Synthetic oligonucleotide
cgguacgacggucucuccc

SEQ ID NO: 1650124 - RNA, 19 nt, Artificial Sequence
  Description of Artificial Sequence: Synthetic oligonucleotide
gcucguggugagggcagcg

SEQ ID NO: 1650125 - RNA, 19 nt, Artificial Sequence
  Description of Artificial Sequence: Synthetic oligonucleotide
caggguccaacaaguggcu

SEQ ID NO: 1650126 - RNA, 19 nt, Artificial Sequence
  Description of Artificial Sequence: Synthetic oligonucleotide
aggccccucuucucuugau

SEQ ID NO: 1650127 - RNA, 19 nt, Artificial Sequence
  Description of Artificial Sequence: Synthetic oligonucleotide
caccggugcaggagucuca

SEQ ID NO: 1650128 - RNA, 19 nt, Artificial Sequence
  Description of Artificial Sequence: Synthetic oligonucleotide
ggaguacgugcacgugaca

SEQ ID NO: 1650129 - RNA, 19 nt, Artificial Sequence
  Description of Artificial Sequence: Synthetic oligonucleotide
caccacacugugccgaaau

SEQ ID NO: 1650130 - RNA, 19 nt, Artificial Sequence
  Description of Artificial Sequence: Synthetic oligonucleotide
gcagcgucuuacaacuucu

SEQ ID NO: 1650131 - RNA, 19 nt, Artificial Sequence
  Description of Artificial Sequence: Synthetic oligonucleotide
ccagcuggcaaaauagcuu

SEQ ID NO: 1650132 - RNA, 19 nt, Artificial Sequence
  Description of Artificial Sequence: Synthetic oligonucleotide
guguaggguggggugaaau

SEQ ID NO: 1650133 - RNA, 19 nt, Artificial Sequence
  Description of Artificial Sequence: Synthetic oligonucleotide
ccacucggauaagaugcug

SEQ ID NO: 1650134 - RNA, 19 nt, Artificial Sequence
  Description of Artificial Sequence: Synthetic oligonucleotide
cccuaugagagcccaagau

SEQ ID NO: 1650135 - RNA, 19 nt, Artificial Sequence
  Description of Artificial Sequence: Synthetic oligonucleotide
ggauuucgcugggccagca

SEQ ID NO: 1650136 - RNA, 19 nt, Artificial Sequence
  Description of Artificial Sequence: Synthetic oligonucleotide
ccgagucaggccccucuuc

SEQ ID NO: 1650137 - RNA, 19 nt, Artificial Sequence
  Description of Artificial Sequence: Synthetic oligonucleotide
ggugcggaagggacaggaa

SEQ ID NO: 1650138 - RNA, 19 nt, Artificial Sequence
  Description of Artificial Sequence: Synthetic oligonucleotide
guggagggguggaguugac

SEQ ID NO: 1650139 - RNA, 19 nt, Artificial Sequence
  Description of Artificial Sequence: Synthetic oligonucleotide
cgugcacgugacagauuug

SEQ ID NO: 1650140 - RNA, 19 nt, Artificial Sequence
  Description of Artificial Sequence: Synthetic oligonucleotide
cggaucuuaagggugaaau

SEQ ID NO: 1650141 - RNA, 19 nt, Artificial Sequence
  Description of Artificial Sequence: Synthetic oligonucleotide
agcccagacggaagccaua

SEQ ID NO: 1650142 - RNA, 19 nt, Artificial Sequence
  Description of Artificial Sequence: Synthetic oligonucleotide
cucguggugagggcagcgu

SEQ ID NO: 1650143 - RNA, 19 nt, Artificial Sequence
  Description of Artificial Sequence: Synthetic oligonucleotide
gcuggcaaaauagcuuauu

SEQ ID NO: 1650144 - RNA, 19 nt, Artificial Sequence
  Description of Artificial Sequence: Synthetic oligonucleotide
gguacucggcaugcaaauu

SEQ ID NO: 1650145 - RNA, 19 nt, Artificial Sequence
  Description of Artificial Sequence: Synthetic oligonucleotide
gguuaccacuggggucuuc

SEQ ID NO: 1650146 - RNA, 19 nt, Artificial Sequence
  Description of Artificial Sequence: Synthetic oligonucleotide
cgacggucucucccaggac

SEQ ID NO: 1650147 - RNA, 19 nt, Artificial Sequence
  Description of Artificial Sequence: Synthetic oligonucleotide
ccauggcacggacacgggu

SEQ ID NO: 1650148 - RNA, 19 nt, Artificial Sequence
  Description of Artificial Sequence: Synthetic oligonucleotide
ggccaccggugcaggaguc

SEQ ID NO: 1650149 - RNA, 19 nt, Artificial Sequence
  Description of Artificial Sequence: Synthetic oligonucleotide
ggacccuaugagagcccaa

SEQ ID NO: 1650150 - RNA, 19 nt, Artificial Sequence
  Description of Artificial Sequence: Synthetic oligonucleotide
ccccaauaggggccaggaa

SEQ ID NO: 1650151 - RNA, 19 nt, Artificial Sequence
  Description of Artificial Sequence: Synthetic oligonucleotide
gccaccggugcaggagucu

SEQ ID NO: 1650152 - RNA, 19 nt, Artificial Sequence
  Description of Artificial Sequence: Synthetic oligonucleotide
ccgucccugagugcaggaa

SEQ ID NO: 1650153 - RNA, 19 nt, Artificial Sequence
  Description of Artificial Sequence: Synthetic oligonucleotide
cgccuucggaggagcgcuc

SEQ ID NO: 1650154 - RNA, 19 nt, Artificial Sequence
  Description of Artificial Sequence: Synthetic oligonucleotide
cccagacggaagccauagu

SEQ ID NO: 1650155 - RNA, 19 nt, Artificial Sequence
  Description of Artificial Sequence: Synthetic oligonucleotide
ccucgguacgacggucucu

SEQ ID NO: 1650156 - RNA, 19 nt, Artificial Sequence
  Description of Artificial Sequence: Synthetic oligonucleotide
ccaccacacugugccgaaa

SEQ ID NO: 1650157 - RNA, 19 nt, Artificial Sequence
  Description of Artificial Sequence: Synthetic oligonucleotide
gggcagcgucuuacaacuu

SEQ ID NO: 1650158 - RNA, 19 nt, Artificial Sequence
  Description of Artificial Sequence: Synthetic oligonucleotide
ucaauaaacacaauggaug

SEQ ID NO: 1650159 - RNA, 19 nt, Artificial Sequence
  Description of Artificial Sequence: Synthetic oligonucleotide
aagauaaucuuuuauucuc

SEQ ID NO: 1650160 - RNA, 19 nt, Artificial Sequence
  Description of Artificial Sequence: Synthetic oligonucleotide
uaagguuacaucaucagcc

SEQ ID NO: 1650161 - RNA, 19 nt, Artificial Sequence
  Description of Artificial Sequence: Synthetic oligonucleotide
agaagauaaucuuuuauuc

SEQ ID NO: 1650162 - RNA, 19 nt, Artificial Sequence
  Description of Artificial Sequence: Synthetic oligonucleotide
ucauuuguaacuuucauuc

SEQ ID NO: 1650163 - RNA, 19 nt, Artificial Sequence
  Description of Artificial Sequence: Synthetic oligonucleotide
uuuuccaccuucaucacgg

SEQ ID NO: 1650164 - RNA, 19 nt, Artificial Sequence
  Description of Artificial Sequence: Synthetic oligonucleotide
aaugacaggaugcugacgu

SEQ ID NO: 1650165 - RNA, 19 nt, Artificial Sequence
  Description of Artificial Sequence: Synthetic oligonucleotide
uuugcuacugcuuuggcca

SEQ ID NO: 1650166 - RNA, 19 nt, Artificial Sequence
  Description of Artificial Sequence: Synthetic oligonucleotide
uuugccaugaucaagucau

SEQ ID NO: 1650167 - RNA, 19 nt, Artificial Sequence
  Description of Artificial Sequence: Synthetic oligonucleotide
ucugauaagugcuggaucc

SEQ ID NO: 1650168 - RNA, 19 nt, Artificial Sequence
  Description of Artificial Sequence: Synthetic oligonucleotide
aacaguuccaacauuguuc

SEQ ID NO: 1650169 - RNA, 19 nt, Artificial Sequence
  Description of Artificial Sequence: Synthetic oligonucleotide
uuucuauucgguuuguggc

SEQ ID NO: 1650170 - RNA, 19 nt, Artificial Sequence
  Description of Artificial Sequence: Synthetic oligonucleotide
uccauuagcacaccuauca

SEQ ID NO: 1650171 - RNA, 19 nt, Artificial Sequence
  Description of Artificial Sequence: Synthetic oligonucleotide
aagaacauucucuuuagau

SEQ ID NO: 1650172 - RNA, 19 nt, Artificial Sequence
  Description of Artificial Sequence: Synthetic oligonucleotide
uuuuaccuguuccuggugg

SEQ ID NO: 1650173 - RNA, 19 nt, Artificial Sequence
  Description of Artificial Sequence: Synthetic oligonucleotide
acuucaguaacuugaggcg

SEQ ID NO: 1650174 - RNA, 19 nt, Artificial Sequence
  Description of Artificial Sequence: Synthetic oligonucleotide
aauggcgugauuaucauca

SEQ ID NO: 1650175 - RNA, 19 nt, Artificial Sequence
  Description of Artificial Sequence: Synthetic oligonucleotide
uuuguaacuuucauucugc

SEQ ID NO: 1650176 - RNA, 19 nt, Artificial Sequence
  Description of Artificial Sequence: Synthetic oligonucleotide
uccacaaaugacaggaugc

SEQ ID NO: 1650177 - RNA, 19 nt, Artificial Sequence
  Description of Artificial Sequence: Synthetic oligonucleotide
auugccuugaugucagccc

SEQ ID NO: 1650178 - RNA, 19 nt, Artificial Sequence
  Description of Artificial Sequence: Synthetic oligonucleotide
ucuaguugggacaggaggc

SEQ ID NO: 1650179 - RNA, 19 nt, Artificial Sequence
  Description of Artificial Sequence: Synthetic oligonucleotide
guuucuauucgguuugugg

SEQ ID NO: 1650180 - RNA, 19 nt, Artificial Sequence
  Description of Artificial Sequence: Synthetic oligonucleotide
ucacuagagauacagcccc

SEQ ID NO: 1650181 - RNA, 19 nt, Artificial Sequence
  Description of Artificial Sequence: Synthetic oligonucleotide
ucaagaaaguggcugaagu

SEQ ID NO: 1650182 - RNA, 19 nt, Artificial Sequence
  Description of Artificial Sequence: Synthetic oligonucleotide
aagguuccuacagacaugg

SEQ ID NO: 1650183 - RNA, 19 nt, Artificial Sequence
  Description of Artificial Sequence: Synthetic oligonucleotide
auggguaagaggaagcucc

SEQ ID NO: 1650184 - RNA, 19 nt, Artificial Sequence
  Description of Artificial Sequence: Synthetic oligonucleotide
uaaagaacauucucuuuag

SEQ ID NO: 1650185 - RNA, 19 nt, Artificial Sequence
  Description of Artificial Sequence: Synthetic oligonucleotide
aacgaguuuggguccgucc

SEQ ID NO: 1650186 - RNA, 19 nt, Artificial Sequence
  Description of Artificial Sequence: Synthetic oligonucleotide
augaucaagucaucuaagg

SEQ ID NO: 1650187 - RNA, 19 nt, Artificial Sequence
  Description of Artificial Sequence: Synthetic oligonucleotide
uucugaauaagcucugagc

SEQ ID NO: 1650188 - RNA, 19 nt, Artificial Sequence
  Description of Artificial Sequence: Synthetic oligonucleotide
gauuugguuguccaguccc

SEQ ID NO: 1650189 - RNA, 19 nt, Artificial Sequence
  Description of Artificial Sequence: Synthetic oligonucleotide
ucuaagguuacaucaucag

SEQ ID NO: 1650190 - RNA, 19 nt, Artificial Sequence
  Description of Artificial Sequence: Synthetic oligonucleotide
uuucuaaugaacucuuccu

SEQ ID NO: 1650191 - RNA, 19 nt, Artificial Sequence
  Description of Artificial Sequence: Synthetic oligonucleotide
auuagcacaccuaucacgg

SEQ ID NO: 1650192 - RNA, 19 nt, Artificial Sequence
  Description of Artificial Sequence: Synthetic oligonucleotide
ucugugucauccauuagca

SEQ ID NO: 1650193 - RNA, 19 nt, Artificial Sequence
  Description of Artificial Sequence: Synthetic oligonucleotide
aauaagcucugagccaacc

SEQ ID NO: 1650194 - RNA, 19 nt, Artificial Sequence
  Description of Artificial Sequence: Synthetic oligonucleotide
uaaucuuuuauucucucua

SEQ ID NO: 1650195 - RNA, 19 nt, Artificial Sequence
  Description of Artificial Sequence: Synthetic oligonucleotide
cauuagcacaccuaucacg

SEQ ID NO: 1650196 - RNA, 19 nt, Artificial Sequence
  Description of Artificial Sequence: Synthetic oligonucleotide
uuuuccccacucuaguugg

SEQ ID NO: 1650197 - RNA, 19 nt, Artificial Sequence
  Description of Artificial Sequence: Synthetic oligonucleotide
ucugcguucccucaaggcc

SEQ ID NO: 1650198 - RNA, 19 nt, Artificial Sequence
  Description of Artificial Sequence: Synthetic oligonucleotide
gugauuaucaucaaugauc

SEQ ID NO: 1650199 - RNA, 19 nt, Artificial Sequence
  Description of Artificial Sequence: Synthetic oligonucleotide
cucaaggccaucaagccag

SEQ ID NO: 1650200 - RNA, 19 nt, Artificial Sequence
  Description of Artificial Sequence: Synthetic oligonucleotide
aaguuugguuugcuacugc

SEQ ID NO: 1650201 - RNA, 19 nt, Artificial Sequence
  Description of Artificial Sequence: Synthetic oligonucleotide
agagauacagccccucagg

SEQ ID NO: 1650202 - RNA, 19 nt, Artificial Sequence
  Description of Artificial Sequence: Synthetic oligonucleotide
agcaacucggaagagcucc

SEQ ID NO: 1650203 - RNA, 19 nt, Artificial Sequence
  Description of Artificial Sequence: Synthetic oligonucleotide
cucuaguugggacaggagg

SEQ ID NO: 1650204 - RNA, 19 nt, Artificial Sequence
  Description of Artificial Sequence: Synthetic oligonucleotide
aaugaacucuuccuccaug

SEQ ID NO: 1650205 - RNA, 19 nt, Artificial Sequence
  Description of Artificial Sequence: Synthetic oligonucleotide
caugauaacuuuuacaucu

SEQ ID NO: 1650206 - RNA, 19 nt, Artificial Sequence
  Description of Artificial Sequence: Synthetic oligonucleotide
ugacguaguguuccgagcc

SEQ ID NO: 1650207 - RNA, 19 nt, Artificial Sequence
  Description of Artificial Sequence: Synthetic oligonucleotide
uugugguugagcaggacug

SEQ ID NO: 1650208 - RNA, 19 nt, Artificial Sequence
  Description of Artificial Sequence: Synthetic oligonucleotide
ugguucaacaguuccaaca

SEQ ID NO: 1650209 - RNA, 19 nt, Artificial Sequence
  Description of Artificial Sequence: Synthetic oligonucleotide
guaagaggaagcuccacag

SEQ ID NO: 1650210 - RNA, 19 nt, Artificial Sequence
  Description of Artificial Sequence: Synthetic oligonucleotide
ugauaacuuuuacaucucc

SEQ ID NO: 1650211 - RNA, 19 nt, Artificial Sequence
  Description of Artificial Sequence: Synthetic oligonucleotide
cauccaauugguucaacag

SEQ ID NO: 1650212 - RNA, 19 nt, Artificial Sequence
  Description of Artificial Sequence: Synthetic oligonucleotide
uaauguuuuaccuguuccu

SEQ ID NO: 1650213 - RNA, 19 nt, Artificial Sequence
  Description of Artificial Sequence: Synthetic oligonucleotide
uuacaucuccccuugaauc

SEQ ID NO: 1650214 - RNA, 19 nt, Artificial Sequence
  Description of Artificial Sequence: Synthetic oligonucleotide
ugggccauagagaaugacc

SEQ ID NO: 1650215 - RNA, 19 nt, Artificial Sequence
  Description of Artificial Sequence: Synthetic oligonucleotide
uucuaaugaacucuuccuc

SEQ ID NO: 1650216 - RNA, 19 nt, Artificial Sequence
  Description of Artificial Sequence: Synthetic oligonucleotide
aaucuuuuauucucucuaa

SEQ ID NO: 1650217 - RNA, 19 nt, Artificial Sequence
  Description of Artificial Sequence: Synthetic oligonucleotide
ucggaagagcucccgaacg

SEQ ID NO: 1650218 - RNA, 19 nt, Artificial Sequence
  Description of Artificial Sequence: Synthetic oligonucleotide
uugaaucaaauccauccaa

SEQ ID NO: 1650219 - RNA, 19 nt, Artificial Sequence
  Description of Artificial Sequence: Synthetic oligonucleotide
aggccaucaagccagcuuc

SEQ ID NO: 1650220 - RNA, 19 nt, Artificial Sequence
  Description of Artificial Sequence: Synthetic oligonucleotide
ggucacuagagauacagcc

SEQ ID NO: 1650221 - RNA, 19 nt, Artificial Sequence
  Description of Artificial Sequence: Synthetic oligonucleotide
gugugaaucuggaagaucc

SEQ ID NO: 1650222 - RNA, 19 nt, Artificial Sequence
  Description of Artificial Sequence: Synthetic oligonucleotide
ugugaaucuggaagauccg

SEQ ID NO: 1650223 - RNA, 19 nt, Artificial Sequence
  Description of Artificial Sequence: Synthetic oligonucleotide
gaugcugacguaguguucc

SEQ ID NO: 1650224 - RNA, 19 nt, Artificial Sequence
  Description of Artificial Sequence: Synthetic oligonucleotide
aaacacaauggauggggca

SEQ ID NO: 1650225 - RNA, 19 nt, Artificial Sequence
  Description of Artificial Sequence: Synthetic oligonucleotide
uuuaccuguuccugguggg

SEQ ID NO: 1650226 - RNA, 19 nt, Artificial Sequence
  Description of Artificial Sequence: Synthetic oligonucleotide
ugucaaugcggccuggucu

SEQ ID NO: 1650227 - RNA, 19 nt, Artificial Sequence
  Description of Artificial Sequence: Synthetic oligonucleotide
ugcaccuugugguugagca

SEQ ID NO: 1650228 - RNA, 19 nt, Artificial Sequence
  Description of Artificial Sequence: Synthetic oligonucleotide
uaacuuuuacaucuccccu

SEQ ID NO: 1650229 - RNA, 19 nt, Artificial Sequence
  Description of Artificial Sequence: Synthetic oligonucleotide
uguacagauugccuugaug

SEQ ID NO: 1650230 - RNA, 19 nt, Artificial Sequence
  Description of Artificial Sequence: Synthetic oligonucleotide
ucuuuuggucccaauggca

SEQ ID NO: 1650231 - RNA, 19 nt, Artificial Sequence
  Description of Artificial Sequence: Synthetic oligonucleotide
gagccaaccacucucaaga

SEQ ID NO: 1650232 - RNA, 19 nt, Artificial Sequence
  Description of Artificial Sequence: Synthetic oligonucleotide
uucuauucgguuuguggcc

SEQ ID NO: 1650233 - RNA, 19 nt, Artificial Sequence
  Description of Artificial Sequence: Synthetic oligonucleotide
gagauacagccccucaggg

SEQ ID NO: 1650234 - RNA, 19 nt, Artificial Sequence
  Description of Artificial Sequence: Synthetic oligonucleotide
ugaaucaaauccauccaau

SEQ ID NO: 1650235 - RNA, 19 nt, Artificial Sequence
  Description of Artificial Sequence: Synthetic oligonucleotide
uccaauugguucaacaguu

SEQ ID NO: 1650236 - RNA, 19 nt, Artificial Sequence
  Description of Artificial Sequence: Synthetic oligonucleotide
cuugaggcggcacugagug

SEQ ID NO: 1650237 - RNA, 19 nt, Artificial Sequence
  Description of Artificial Sequence: Synthetic oligonucleotide
gcuugugugaaucuggaag

SEQ ID NO: 1650238 - RNA, 19 nt, Artificial Sequence
  Description of Artificial Sequence: Synthetic oligonucleotide
uuguaacuuucauucugcg

SEQ ID NO: 1650239 - RNA, 19 nt, Artificial Sequence
  Description of Artificial Sequence: Synthetic oligonucleotide
agucaucuaagguuacauc

SEQ ID NO: 1650240 - RNA, 19 nt, Artificial Sequence
  Description of Artificial Sequence: Synthetic oligonucleotide
uugaaucauaucuuuuggu

SEQ ID NO: 1650241 - RNA, 19 nt, Artificial Sequence
  Description of Artificial Sequence: Synthetic oligonucleotide
ugaaucuggaagauccgcu

SEQ ID NO: 1650242 - RNA, 19 nt, Artificial Sequence
  Description of Artificial Sequence: Synthetic oligonucleotide
aagauccuuguccacaaau

SEQ ID NO: 1650243 - RNA, 19 nt, Artificial Sequence
  Description of Artificial Sequence: Synthetic oligonucleotide
uuuacaucuccccuugaau

SEQ ID NO: 1650244 - RNA, 19 nt, Artificial Sequence
  Description of Artificial Sequence: Synthetic oligonucleotide
aagaaaguggcugaaguuu

SEQ ID NO: 1650245 - RNA, 19 nt, Artificial Sequence
  Description of Artificial Sequence: Synthetic oligonucleotide
auaaucuuuuauucucucu

SEQ ID NO: 1650246 - RNA, 19 nt, Artificial Sequence
  Description of Artificial Sequence: Synthetic oligonucleotide
ucucucuaacuucaguaac

SEQ ID NO: 1650247 - RNA, 19 nt, Artificial Sequence
  Description of Artificial Sequence: Synthetic oligonucleotide
uguucuucagcaacucgga

SEQ ID NO: 1650248 - RNA, 19 nt, Artificial Sequence
  Description of Artificial Sequence: Synthetic oligonucleotide
aaagaacauucucuuuaga

SEQ ID NO: 1650249 - RNA, 19 nt, Artificial Sequence
  Description of Artificial Sequence: Synthetic oligonucleotide
ugaauaagcucugagccaa

SEQ ID NO: 1650250 - RNA, 19 nt, Artificial Sequence
  Description of Artificial Sequence: Synthetic oligonucleotide
aacauuguucgcugaauuu

SEQ ID NO: 1650251 - RNA, 19 nt, Artificial Sequence
  Description of Artificial Sequence: Synthetic oligonucleotide
gauccuuguccacaaauga

SEQ ID NO: 1650252 - RNA, 19 nt, Artificial Sequence
  Description of Artificial Sequence: Synthetic oligonucleotide
guacagauugccuugaugu

SEQ ID NO: 1650253 - RNA, 19 nt, Artificial Sequence
  Description of Artificial Sequence: Synthetic oligonucleotide
guuacaucaucagccaggg

SEQ ID NO: 1650254 - RNA, 19 nt, Artificial Sequence
  Description of Artificial Sequence: Synthetic oligonucleotide
agauacagccccucagggg

SEQ ID NO: 1650255 - RNA, 19 nt, Artificial Sequence
  Description of Artificial Sequence: Synthetic oligonucleotide
uucaguaacuugaggcggc

SEQ ID NO: 1650256 - RNA, 19 nt, Artificial Sequence
  Description of Artificial Sequence: Synthetic oligonucleotide
aagauccgcuucuuggucu

SEQ ID NO: 1650257 - RNA, 19 nt, Artificial Sequence
  Description of Artificial Sequence: Synthetic oligonucleotide
uccagaguuugaaucauau

SEQ ID NO: 1650258 - RNA, 19 nt, Artificial Sequence
  Description of Artificial Sequence: Synthetic oligonucleotide
auccaauugguucaacagu

SEQ ID NO: 1650259 - RNA, 19 nt, Artificial Sequence
  Description of Artificial Sequence: Synthetic oligonucleotide
agcuucuguacagauugcc

SEQ ID NO: 1650260 - RNA, 19 nt, Artificial Sequence
  Description of Artificial Sequence: Synthetic oligonucleotide
aguggcugaaguuugguuu

SEQ ID NO: 1650261 - RNA, 19 nt, Artificial Sequence
  Description of Artificial Sequence: Synthetic oligonucleotide
cuuccaaugguuucaucug

SEQ ID NO: 1650262 - RNA, 19 nt, Artificial Sequence
  Description of Artificial Sequence: Synthetic oligonucleotide
uauucucucuaacuucagu

SEQ ID NO: 1650263 - RNA, 19 nt, Artificial Sequence
  Description of Artificial Sequence: Synthetic oligonucleotide
ucccgaacgaguuuggguc

SEQ ID NO: 1650264 - RNA, 19 nt, Artificial Sequence
  Description of Artificial Sequence: Synthetic oligonucleotide
cuucaguaacuugaggcgg

SEQ ID NO: 1650265 - RNA, 19 nt, Artificial Sequence
  Description of Artificial Sequence: Synthetic oligonucleotide
uagcacaccuaucacggca

SEQ ID NO: 1650266 - RNA, 19 nt, Artificial Sequence
  Description of Artificial Sequence: Synthetic oligonucleotide
uggccaguaauguuuuacc

SEQ ID NO: 1650267 - RNA, 19 nt, Artificial Sequence
  Description of Artificial Sequence: Synthetic oligonucleotide
aucuuucugucaaugcggc

SEQ ID NO: 1650268 - RNA, 19 nt, Artificial Sequence
  Description of Artificial Sequence: Synthetic oligonucleotide
ccaaccacucucaagaaag

SEQ ID NO: 1650269 - RNA, 19 nt, Artificial Sequence
  Description of Artificial Sequence: Synthetic oligonucleotide
ucgaucuuucugucaaugc

SEQ ID NO: 1650270 - RNA, 19 nt, Artificial Sequence
  Description of Artificial Sequence: Synthetic oligonucleotide
uuccaagguuccuacagac

SEQ ID NO: 1650271 - RNA, 19 nt, Artificial Sequence
  Description of Artificial Sequence: Synthetic oligonucleotide
agcaggacugaacagccug

SEQ ID NO: 1650272 - RNA, 19 nt, Artificial Sequence
  Description of Artificial Sequence: Synthetic oligonucleotide
cuucugaauaagcucugag

SEQ ID NO: 1650273 - RNA, 19 nt, Artificial Sequence
  Description of Artificial Sequence: Synthetic oligonucleotide
acggcaugcaccuuguggu

SEQ ID NO: 1650274 - RNA, 19 nt, Artificial Sequence
  Description of Artificial Sequence: Synthetic oligonucleotide
uccacagauuccuuaauuu

SEQ ID NO: 1650275 - RNA, 19 nt, Artificial Sequence
  Description of Artificial Sequence: Synthetic oligonucleotide
aguuugguuugcuacugcu

SEQ ID NO: 1650276 - RNA, 19 nt, Artificial Sequence
  Description of Artificial Sequence: Synthetic oligonucleotide
uguucgcugaauuucucuc

SEQ ID NO: 1650277 - RNA, 19 nt, Artificial Sequence
  Description of Artificial Sequence: Synthetic oligonucleotide
agugugagguguuaccagu

SEQ ID NO: 1650278 - RNA, 19 nt, Artificial Sequence
  Description of Artificial Sequence: Synthetic oligonucleotide
ugagccaaccacucucaag

SEQ ID NO: 1650279 - RNA, 19 nt, Artificial Sequence
  Description of Artificial Sequence: Synthetic oligonucleotide
gauacagccccucaggggu

SEQ ID NO: 1650280 - RNA, 19 nt, Artificial Sequence
  Description of Artificial Sequence: Synthetic oligonucleotide
aagucaucuaagguuacau

SEQ ID NO: 1650281 - RNA, 19 nt, Artificial Sequence
  Description of Artificial Sequence: Synthetic oligonucleotide
ugaucucuuccaagguucc

SEQ ID NO: 1650282 - RNA, 19 nt, Artificial Sequence
  Description of Artificial Sequence: Synthetic oligonucleotide
uuucgaucuuuccuccucu

SEQ ID NO: 1650283 - RNA, 19 nt, Artificial Sequence
  Description of Artificial Sequence: Synthetic oligonucleotide
uguuaccaguggcaguuug

SEQ ID NO: 1650284 - RNA, 19 nt, Artificial Sequence
  Description of Artificial Sequence: Synthetic oligonucleotide
uuucugucaaugcggccug

SEQ ID NO: 1650285 - RNA, 19 nt, Artificial Sequence
  Description of Artificial Sequence: Synthetic oligonucleotide
cacggcaugcaccuugugg

SEQ ID NO: 1650286 - RNA, 19 nt, Artificial Sequence
  Description of Artificial Sequence: Synthetic oligonucleotide
ugaggcggcacugagugug

SEQ ID NO: 1650287 - RNA, 19 nt, Artificial Sequence
  Description of Artificial Sequence: Synthetic oligonucleotide
gauugccuugaugucagcc

SEQ ID NO: 1650288 - RNA, 19 nt, Artificial Sequence
  Description of Artificial Sequence: Synthetic oligonucleotide
cagauugccuugaugucag

SEQ ID NO: 1650289 - RNA, 19 nt, Artificial Sequence
  Description of Artificial Sequence: Synthetic oligonucleotide
acaggaggcucauauuucu

SEQ ID NO: 1650290 - RNA, 19 nt, Artificial Sequence
  Description of Artificial Sequence: Synthetic oligonucleotide
ucauccauuagcacaccua

SEQ ID NO: 1650291 - RNA, 19 nt, Artificial Sequence
  Description of Artificial Sequence: Synthetic oligonucleotide
aaccacucucaagaaagug

SEQ ID NO: 1650292 - RNA, 19 nt, Artificial Sequence
  Description of Artificial Sequence: Synthetic oligonucleotide
cugagugugagguguuacc

SEQ ID NO: 1650293 - RNA, 19 nt, Artificial Sequence
  Description of Artificial Sequence: Synthetic oligonucleotide
gguuacaucaucagccagg

SEQ ID NO: 1650294 - RNA, 19 nt, Artificial Sequence
  Description of Artificial Sequence: Synthetic oligonucleotide
guccacaaaugacaggaug

SEQ ID NO: 1650295 - RNA, 19 nt, Artificial Sequence
  Description of Artificial Sequence: Synthetic oligonucleotide
accuaucacggcaugcacc

SEQ ID NO: 1650296 - RNA, 19 nt, Artificial Sequence
  Description of Artificial Sequence: Synthetic oligonucleotide
caccuugugguugagcagg

SEQ ID NO: 1650297 - RNA, 19 nt, Artificial Sequence
  Description of Artificial Sequence: Synthetic oligonucleotide
ucaagccagcuucuguaca

SEQ ID NO: 1650298 - RNA, 19 nt, Artificial Sequence
  Description of Artificial Sequence: Synthetic oligonucleotide
gaaaguggcugaaguuugg

SEQ ID NO: 1650299 - RNA, 19 nt, Artificial Sequence
  Description of Artificial Sequence: Synthetic oligonucleotide
ugcuuuucuuccaaugguu

SEQ ID NO: 1650300 - RNA, 19 nt, Artificial Sequence
  Description of Artificial Sequence: Synthetic oligonucleotide
acagauugccuugauguca

SEQ ID NO: 1650301 - RNA, 19 nt, Artificial Sequence
  Description of Artificial Sequence: Synthetic oligonucleotide
uucugcguucccucaaggc

SEQ ID NO: 1650302 - RNA, 19 nt, Artificial Sequence
  Description of Artificial Sequence: Synthetic oligonucleotide
uucccucaaggccaucaag

SEQ ID NO: 1650303 - RNA, 19 nt, Artificial Sequence
  Description of Artificial Sequence: Synthetic oligonucleotide
uuguucgcugaauuucucu

SEQ ID NO: 1650304 - RNA, 19 nt, Artificial Sequence
  Description of Artificial Sequence: Synthetic oligonucleotide
auaagcucugagccaacca

SEQ ID NO: 1650305 - RNA, 19 nt, Artificial Sequence
  Description of Artificial Sequence: Synthetic oligonucleotide
ggcgugauuaucaucaaug

SEQ ID NO: 1650306 - RNA, 19 nt, Artificial Sequence
  Description of Artificial Sequence: Synthetic oligonucleotide
cugaauuucucucucaccu

SEQ ID NO: 1650307 - RNA, 19 nt, Artificial Sequence
  Description of Artificial Sequence: Synthetic oligonucleotide
ucuucauaguacucaggau

SEQ ID NO: 1650308 - RNA, 19 nt, Artificial Sequence
  Description of Artificial Sequence: Synthetic oligonucleotide
ucgaucuuuccuccucuug

SEQ ID NO: 1650309 - RNA, 19 nt, Artificial Sequence
  Description of Artificial Sequence: Synthetic oligonucleotide
auucugcguucccucaagg

SEQ ID NO: 1650310 - RNA, 19 nt, Artificial Sequence
  Description of Artificial Sequence: Synthetic oligonucleotide
uucgcugaauuucucucuc

SEQ ID NO: 1650311 - RNA, 19 nt, Artificial Sequence
  Description of Artificial Sequence: Synthetic oligonucleotide
gucacuagagauacagccc

SEQ ID NO: 1650312 - RNA, 19 nt, Artificial Sequence
  Description of Artificial Sequence: Synthetic oligonucleotide
uccaagguuccuacagaca

SEQ ID NO: 1650313 - RNA, 19 nt, Artificial Sequence
  Description of Artificial Sequence: Synthetic oligonucleotide
guugagcaggacugaacag

SEQ ID NO: 1650314 - RNA, 19 nt, Artificial Sequence
  Description of Artificial Sequence: Synthetic oligonucleotide
gucaaugcggccuggucug

SEQ ID NO: 1650315 - RNA, 19 nt, Artificial Sequence
  Description of Artificial Sequence: Synthetic oligonucleotide
ucuauucgguuuguggcca

SEQ ID NO: 1650316 - RNA, 19 nt, Artificial Sequence
  Description of Artificial Sequence: Synthetic oligonucleotide
ugaacagccuggcuccaga

SEQ ID NO: 1650317 - RNA, 19 nt, Artificial Sequence
  Description of Artificial Sequence: Synthetic oligonucleotide
agauaaucuuuuauucucu

SEQ ID NO: 1650318 - RNA, 19 nt, Artificial Sequence
  Description of Artificial Sequence: Synthetic oligonucleotide
aaggccaucaagccagcuu

SEQ ID NO: 1650319 - RNA, 19 nt, Artificial Sequence
  Description of Artificial Sequence: Synthetic oligonucleotide
agaaaguggcugaaguuug

SEQ ID NO: 1650320 - RNA, 19 nt, Artificial Sequence
  Description of Artificial Sequence: Synthetic oligonucleotide
ugagaucauccacuuucga

SEQ ID NO: 1650321 - RNA, 19 nt, Artificial Sequence
  Description of Artificial Sequence: Synthetic oligonucleotide
ucucuuccaagguuccuac

SEQ ID NO: 1650322 - RNA, 19 nt, Artificial Sequence
  Description of Artificial Sequence: Synthetic oligonucleotide
uuccuccaugagaagauaa

SEQ ID NO: 1650323 - RNA, 19 nt, Artificial Sequence
  Description of Artificial Sequence: Synthetic oligonucleotide
uuggccaguaauguuuuac

SEQ ID NO: 1650324 - RNA, 19 nt, Artificial Sequence
  Description of Artificial Sequence: Synthetic oligonucleotide
uuuauccccaucucuucau

SEQ ID NO: 1650325 - RNA, 19 nt, Artificial Sequence
  Description of Artificial Sequence: Synthetic oligonucleotide
ucaucugcuccugauuucu

SEQ ID NO: 1650326 - RNA, 19 nt, Artificial Sequence
  Description of Artificial Sequence: Synthetic oligonucleotide
aucaagucaucuaagguua

SEQ ID NO: 1650327 - RNA, 19 nt, Artificial Sequence
  Description of Artificial Sequence: Synthetic oligonucleotide
uccuggauuugguugucca

SEQ ID NO: 1650328 - RNA, 19 nt, Artificial Sequence
  Description of Artificial Sequence: Synthetic oligonucleotide
uaguacucaggauggguaa

SEQ ID NO: 1650329 - RNA, 19 nt, Artificial Sequence
  Description of Artificial Sequence: Synthetic oligonucleotide
uguuccgagcccacagaug

SEQ ID NO: 1650330 - RNA, 19 nt, Artificial Sequence
  Description of Artificial Sequence: Synthetic oligonucleotide
uacagauugccuugauguc

SEQ ID NO: 1650331 - RNA, 19 nt, Artificial Sequence
  Description of Artificial Sequence: Synthetic oligonucleotide
gguugagcaggacugaaca

SEQ ID NO: 1650332 - RNA, 19 nt, Artificial Sequence
  Description of Artificial Sequence: Synthetic oligonucleotide
aaaguggcugaaguuuggu

SEQ ID NO: 1650333 - RNA, 19 nt, Artificial Sequence
  Description of Artificial Sequence: Synthetic oligonucleotide
caucuaagguuacaucauc

SEQ ID NO: 1650334 - RNA, 19 nt, Artificial Sequence
  Description of Artificial Sequence: Synthetic oligonucleotide
gaagauccgcuucuugguc

SEQ ID NO: 1650335 - RNA, 19 nt, Artificial Sequence
  Description of Artificial Sequence: Synthetic oligonucleotide
agguuacaucaucagccag

SEQ ID NO: 1650336 - RNA, 19 nt, Artificial Sequence
  Description of Artificial Sequence: Synthetic oligonucleotide
gaggucauccuuugccaug

SEQ ID NO: 1650337 - RNA, 19 nt, Artificial Sequence
  Description of Artificial Sequence: Synthetic oligonucleotide
agauccuuguccacaaaug

SEQ ID NO: 1650338 - RNA, 19 nt, Artificial Sequence
  Description of Artificial Sequence: Synthetic oligonucleotide
aacucggaagagcucccga

SEQ ID NO: 1650339 - RNA, 19 nt, Artificial Sequence
  Description of Artificial Sequence: Synthetic oligonucleotide
acuagagauacagccccuc

SEQ ID NO: 1650340 - RNA, 19 nt, Artificial Sequence
  Description of Artificial Sequence: Synthetic oligonucleotide
ucaagucaucuaagguuac

SEQ ID NO: 1650341 - RNA, 19 nt, Artificial Sequence
  Description of Artificial Sequence: Synthetic oligonucleotide
uccccaucucuucauagua

SEQ ID NO: 1650342 - RNA, 19 nt, Artificial Sequence
  Description of Artificial Sequence: Synthetic oligonucleotide
ccacucucaagaaaguggc

SEQ ID NO: 1650343 - RNA, 19 nt, Artificial Sequence
  Description of Artificial Sequence: Synthetic oligonucleotide
cuucaucacggugaccagg

SEQ ID NO: 1650344 - RNA, 19 nt, Artificial Sequence
  Description of Artificial Sequence: Synthetic oligonucleotide
uaaugaacucuuccuccau

SEQ ID NO: 1650345 - RNA, 19 nt, Artificial Sequence
  Description of Artificial Sequence: Synthetic oligonucleotide
gggccauagagaaugaccc

SEQ ID NO: 1650346 - RNA, 19 nt, Artificial Sequence
  Description of Artificial Sequence: Synthetic oligonucleotide
gacguaguguuccgagccc

SEQ ID NO: 1650347 - RNA, 19 nt, Artificial Sequence
  Description of Artificial Sequence: Synthetic oligonucleotide
gaucauccacuuucgaucu

SEQ ID NO: 1650348 - RNA, 19 nt, Artificial Sequence
  Description of Artificial Sequence: Synthetic oligonucleotide
cugacguaguguuccgagc

SEQ ID NO: 1650349 - RNA, 19 nt, Artificial Sequence
  Description of Artificial Sequence: Synthetic oligonucleotide
uuuccccacucuaguuggg

SEQ ID NO: 1650350 - RNA, 19 nt, Artificial Sequence
  Description of Artificial Sequence: Synthetic oligonucleotide
aggaugcugacguaguguu

SEQ ID NO: 1650351 - RNA, 19 nt, Artificial Sequence
  Description of Artificial Sequence: Synthetic oligonucleotide
agggucauccugcuugugu

SEQ ID NO: 1650352 - RNA, 19 nt, Artificial Sequence
  Description of Artificial Sequence: Synthetic oligonucleotide
ucgguuuguggccaugaua

SEQ ID NO: 1650353 - RNA, 19 nt, Artificial Sequence
  Description of Artificial Sequence: Synthetic oligonucleotide
ugguugagcaggacugaac

SEQ ID NO: 1650354 - RNA, 19 nt, Artificial Sequence
  Description of Artificial Sequence: Synthetic oligonucleotide
uacucaggauggguaagag

SEQ ID NO: 1650355 - RNA, 19 nt, Artificial Sequence
  Description of Artificial Sequence: Synthetic oligonucleotide
gucugauaagugcuggauc

SEQ ID NO: 1650356 - RNA, 19 nt, Artificial Sequence
  Description of Artificial Sequence: Synthetic oligonucleotide
uuagcacaccuaucacggc

SEQ ID NO: 1650357 - RNA, 19 nt, Artificial Sequence
  Description of Artificial Sequence: Synthetic oligonucleotide
gugaaucuggaagauccgc

SEQ ID NO: 1650358 - RNA, 19 nt, Artificial Sequence
  Description of Artificial Sequence: Synthetic oligonucleotide
gccaugauaacuuuuacau

SEQ ID NO: 1650359 - RNA, 19 nt, Artificial Sequence
  Description of Artificial Sequence: Synthetic oligonucleotide
acaucaucagccaggguca

SEQ ID NO: 1650360 - RNA, 19 nt, Artificial Sequence
  Description of Artificial Sequence: Synthetic oligonucleotide
guuccgagcccacagaugu

SEQ ID NO: 1650361 - RNA, 19 nt, Artificial Sequence
  Description of Artificial Sequence: Synthetic oligonucleotide
gguaagaggaagcuccaca

SEQ ID NO: 1650362 - RNA, 19 nt, Artificial Sequence
  Description of Artificial Sequence: Synthetic oligonucleotide
aguacucaggauggguaag

SEQ ID NO: 1650363 - RNA, 19 nt, Artificial Sequence
  Description of Artificial Sequence: Synthetic oligonucleotide
cucucaagaaaguggcuga

SEQ ID NO: 1650364 - RNA, 19 nt, Artificial Sequence
  Description of Artificial Sequence: Synthetic oligonucleotide
cgaucuuucugucaaugcg

SEQ ID NO: 1650365 - RNA, 19 nt, Artificial Sequence
  Description of Artificial Sequence: Synthetic oligonucleotide
acaauggcgugauuaucau

SEQ ID NO: 1650366 - RNA, 19 nt, Artificial Sequence
  Description of Artificial Sequence: Synthetic oligonucleotide
cuggucugauaagugcugg

SEQ ID NO: 1650367 - RNA, 19 nt, Artificial Sequence
  Description of Artificial Sequence: Synthetic oligonucleotide
ugauaagugcuggauccaa

SEQ ID NO: 1650368 - RNA, 19 nt, Artificial Sequence
  Description of Artificial Sequence: Synthetic oligonucleotide
gagaucauccacuuucgau

SEQ ID NO: 1650369 - RNA, 19 nt, Artificial Sequence
  Description of Artificial Sequence: Synthetic oligonucleotide
cucgaucuuucugucaaug

SEQ ID NO: 1650370 - RNA, 19 nt, Artificial Sequence
  Description of Artificial Sequence: Synthetic oligonucleotide
ucucucucaccuccagagu

SEQ ID NO: 1650371 - RNA, 19 nt, Artificial Sequence
  Description of Artificial Sequence: Synthetic oligonucleotide
gaaucaaauccauccaauu

SEQ ID NO: 1650372 - RNA, 19 nt, Artificial Sequence
  Description of Artificial Sequence: Synthetic oligonucleotide
auccccaucucuucauagu

SEQ ID NO: 1650373 - RNA, 19 nt, Artificial Sequence
  Description of Artificial Sequence: Synthetic oligonucleotide
ccugauuucuaaugaacuc

SEQ ID NO: 1650374 - RNA, 19 nt, Artificial Sequence
  Description of Artificial Sequence: Synthetic oligonucleotide
augagaagauaaucuuuua

SEQ ID NO: 1650375 - RNA, 19 nt, Artificial Sequence
  Description of Artificial Sequence: Synthetic oligonucleotide
guuaccaguggcaguuugc

SEQ ID NO: 1650376 - RNA, 19 nt, Artificial Sequence
  Description of Artificial Sequence: Synthetic oligonucleotide
ugugugaaucuggaagauc

SEQ ID NO: 1650377 - RNA, 19 nt, Artificial Sequence
  Description of Artificial Sequence: Synthetic oligonucleotide
cauccugcuugugugaauc

SEQ ID NO: 1650378 - RNA, 19 nt, Artificial Sequence
  Description of Artificial Sequence: Synthetic oligonucleotide
guuuuaccuguuccuggug

SEQ ID NO: 1650379 - RNA, 19 nt, Artificial Sequence
  Description of Artificial Sequence: Synthetic oligonucleotide
acaccuaucacggcaugca

SEQ ID NO: 1650380 - RNA, 19 nt, Artificial Sequence
  Description of Artificial Sequence: Synthetic oligonucleotide
auuguucgcugaauuucuc

SEQ ID NO: 1650381 - RNA, 19 nt, Artificial Sequence
  Description of Artificial Sequence: Synthetic oligonucleotide
gcugacguaguguuccgag

SEQ ID NO: 1650382 - RNA, 19 nt, Artificial Sequence
  Description of Artificial Sequence: Synthetic oligonucleotide
auaguacucaggaugggua

SEQ ID NO: 1650383 - RNA, 19 nt, Artificial Sequence
  Description of Artificial Sequence: Synthetic oligonucleotide
uuauccccaucucuucaua

SEQ ID NO: 1650384 - RNA, 19 nt, Artificial Sequence
  Description of Artificial Sequence: Synthetic oligonucleotide
gauuaucaucaaugaucuc

SEQ ID NO: 1650385 - RNA, 19 nt, Artificial Sequence
  Description of Artificial Sequence: Synthetic oligonucleotide
uugcuacugcuuuggccag

SEQ ID NO: 1650386 - RNA, 19 nt, Artificial Sequence
  Description of Artificial Sequence: Synthetic oligonucleotide
cuuugccaugaucaaguca

SEQ ID NO: 1650387 - RNA, 19 nt, Artificial Sequence
  Description of Artificial Sequence: Synthetic oligonucleotide
aggggugccuucuuguuuu

SEQ ID NO: 1650388 - RNA, 19 nt, Artificial Sequence
  Description of Artificial Sequence: Synthetic oligonucleotide
cugauuucuaaugaacucu

SEQ ID NO: 1650389 - RNA, 19 nt, Artificial Sequence
  Description of Artificial Sequence: Synthetic oligonucleotide
ugugguugagcaggacuga

SEQ ID NO: 1650390 - RNA, 19 nt, Artificial Sequence
  Description of Artificial Sequence: Synthetic oligonucleotide
uugguucaacaguuccaac

SEQ ID NO: 1650391 - RNA, 19 nt, Artificial Sequence
  Description of Artificial Sequence: Synthetic oligonucleotide
ugucauccuucuugccacc

SEQ ID NO: 1650392 - RNA, 19 nt, Artificial Sequence
  Description of Artificial Sequence: Synthetic oligonucleotide
augcugacguaguguuccg

SEQ ID NO: 1650393 - RNA, 19 nt, Artificial Sequence
  Description of Artificial Sequence: Synthetic oligonucleotide
cugcguucccucaaggcca

SEQ ID NO: 1650394 - RNA, 19 nt, Artificial Sequence
  Description of Artificial Sequence: Synthetic oligonucleotide
uguccacaaaugacaggau

SEQ ID NO: 1650395 - RNA, 19 nt, Artificial Sequence
  Description of Artificial Sequence: Synthetic oligonucleotide
ucgcugaauuucucucuca

SEQ ID NO: 1650396 - RNA, 19 nt, Artificial Sequence
  Description of Artificial Sequence: Synthetic oligonucleotide
gacacaauggcgugauuau

SEQ ID NO: 1650397 - RNA, 19 nt, Artificial Sequence
  Description of Artificial Sequence: Synthetic oligonucleotide
ucaguaacuugaggcggca

SEQ ID NO: 1650398 - RNA, 19 nt, Artificial Sequence
  Description of Artificial Sequence: Synthetic oligonucleotide
aagagcucccgaacgaguu

SEQ ID NO: 1650399 - RNA, 19 nt, Artificial Sequence
  Description of Artificial Sequence: Synthetic oligonucleotide
aguuugcuggcagcauccg

SEQ ID NO: 1650400 - RNA, 19 nt, Artificial Sequence
  Description of Artificial Sequence: Synthetic oligonucleotide
ucucaagaaaguggcugaa

SEQ ID NO: 1650401 - RNA, 19 nt, Artificial Sequence
  Description of Artificial Sequence: Synthetic oligonucleotide
uccccacucuaguugggac

SEQ ID NO: 1650402 - RNA, 19 nt, Artificial Sequence
  Description of Artificial Sequence: Synthetic oligonucleotide
aguuucuauucgguuugug

SEQ ID NO: 1650403 - RNA, 19 nt, Artificial Sequence
  Description of Artificial Sequence: Synthetic oligonucleotide
uggcgugauuaucaucaau

SEQ ID NO: 1650404 - RNA, 19 nt, Artificial Sequence
  Description of Artificial Sequence: Synthetic oligonucleotide
aaugcggccuggucugaua

SEQ ID NO: 1650405 - RNA, 19 nt, Artificial Sequence
  Description of Artificial Sequence: Synthetic oligonucleotide
cucucuaacuucaguaacu

SEQ ID NO: 1650406 - RNA, 19 nt, Artificial Sequence
  Description of Artificial Sequence: Synthetic oligonucleotide
cuuccaagguuccuacaga

SEQ ID NO: 1650407 - RNA, 19 nt, Artificial Sequence
  Description of Artificial Sequence: Synthetic oligonucleotide
cuagagauacagccccuca

SEQ ID NO: 1650408 - RNA, 19 nt, Artificial Sequence
  Description of Artificial Sequence: Synthetic oligonucleotide
caauggcgugauuaucauc

SEQ ID NO: 1650409 - RNA, 19 nt, Artificial Sequence
  Description of Artificial Sequence: Synthetic oligonucleotide
aaguuucuauucgguuugu

SEQ ID NO: 1650410 - RNA, 19 nt, Artificial Sequence
  Description of Artificial Sequence: Synthetic oligonucleotide
uugugugaaucuggaagau

SEQ ID NO: 1650411 - RNA, 19 nt, Artificial Sequence
  Description of Artificial Sequence: Synthetic oligonucleotide
cacaccuaucacggcaugc

SEQ ID NO: 1650412 - RNA, 19 nt, Artificial Sequence
  Description of Artificial Sequence: Synthetic oligonucleotide
ugguuucaucugcuccuga

SEQ ID NO: 1650413 - RNA, 19 nt, Artificial Sequence
  Description of Artificial Sequence: Synthetic oligonucleotide
cagaagauccuuguccaca

SEQ ID NO: 1650414 - RNA, 19 nt, Artificial Sequence
  Description of Artificial Sequence: Synthetic oligonucleotide
cgaucuuuccuccucuugc

SEQ ID NO: 1650415 - RNA, 19 nt, Artificial Sequence
  Description of Artificial Sequence: Synthetic oligonucleotide
gcgugauuaucaucaauga

SEQ ID NO: 1650416 - RNA, 19 nt, Artificial Sequence
  Description of Artificial Sequence: Synthetic oligonucleotide
gaaucuggaagauccgcuu

SEQ ID NO: 1650417 - RNA, 19 nt, Artificial Sequence
  Description of Artificial Sequence: Synthetic oligonucleotide
ccaugauaacuuuuacauc

SEQ ID NO: 1650418 - RNA, 19 nt, Artificial Sequence
  Description of Artificial Sequence: Synthetic oligonucleotide
caccuaucacggcaugcac

SEQ ID NO: 1650419 - RNA, 19 nt, Artificial Sequence
  Description of Artificial Sequence: Synthetic oligonucleotide
ggaacucgaucuuucuguc

SEQ ID NO: 1650420 - RNA, 19 nt, Artificial Sequence
  Description of Artificial Sequence: Synthetic oligonucleotide
cccucaaggccaucaagcc

SEQ ID NO: 1650421 - RNA, 19 nt, Artificial Sequence
  Description of Artificial Sequence: Synthetic oligonucleotide
uuccgagcccacagaugug

SEQ ID NO: 1650422 - RNA, 19 nt, Artificial Sequence
  Description of Artificial Sequence: Synthetic oligonucleotide
aucucuuccaagguuccua

SEQ ID NO: 1650423 - RNA, 19 nt, Artificial Sequence
  Description of Artificial Sequence: Synthetic oligonucleotide
acacaauggauggggcaug

SEQ ID NO: 1650424 - RNA, 19 nt, Artificial Sequence
  Description of Artificial Sequence: Synthetic oligonucleotide
ugcggccuggucugauaag

SEQ ID NO: 1650425 - RNA, 19 nt, Artificial Sequence
  Description of Artificial Sequence: Synthetic oligonucleotide
cagcuucuguacagauugc

SEQ ID NO: 1650426 - RNA, 19 nt, Artificial Sequence
  Description of Artificial Sequence: Synthetic oligonucleotide
accauggccaccacucuga

SEQ ID NO: 1650427 - RNA, 19 nt, Artificial Sequence
  Description of Artificial Sequence: Synthetic oligonucleotide
caggacugaacagccuggc

SEQ ID NO: 1650428 - RNA, 19 nt, Artificial Sequence
  Description of Artificial Sequence: Synthetic oligonucleotide
cuucuguacagauugccuu

SEQ ID NO: 1650429 - RNA, 19 nt, Artificial Sequence
  Description of Artificial Sequence: Synthetic oligonucleotide
cauuuguaacuuucauucu

SEQ ID NO: 1650430 - RNA, 19 nt, Artificial Sequence
  Description of Artificial Sequence: Synthetic oligonucleotide
ggaagagcucccgaacgag

SEQ ID NO: 1650431 - RNA, 19 nt, Artificial Sequence
  Description of Artificial Sequence: Synthetic oligonucleotide
augcggccuggucugauaa

SEQ ID NO: 1650432 - RNA, 19 nt, Artificial Sequence
  Description of Artificial Sequence: Synthetic oligonucleotide
guucgcugaauuucucucu

SEQ ID NO: 1650433 - RNA, 19 nt, Artificial Sequence
  Description of Artificial Sequence: Synthetic oligonucleotide
caacucggaagagcucccg

SEQ ID NO: 1650434 - RNA, 19 nt, Artificial Sequence
  Description of Artificial Sequence: Synthetic oligonucleotide
gaauaagcucugagccaac

SEQ ID NO: 1650435 - RNA, 19 nt, Artificial Sequence
  Description of Artificial Sequence: Synthetic oligonucleotide
cucucaccuccagaguuug

SEQ ID NO: 1650436 - RNA, 19 nt, Artificial Sequence
  Description of Artificial Sequence: Synthetic oligonucleotide
guacucaggauggguaaga

SEQ ID NO: 1650437 - RNA, 19 nt, Artificial Sequence
  Description of Artificial Sequence: Synthetic oligonucleotide
cgguuuguggccaugauaa

SEQ ID NO: 1650438 - RNA, 19 nt, Artificial Sequence
  Description of Artificial Sequence: Synthetic oligonucleotide
cauccuuugccaugaucaa

SEQ ID NO: 1650439 - RNA, 19 nt, Artificial Sequence
  Description of Artificial Sequence: Synthetic oligonucleotide
cacucuaguugggacagga

SEQ ID NO: 1650440 - RNA, 19 nt, Artificial Sequence
  Description of Artificial Sequence: Synthetic oligonucleotide
uuuggccaguaauguuuua

SEQ ID NO: 1650441 - RNA, 19 nt, Artificial Sequence
  Description of Artificial Sequence: Synthetic oligonucleotide
gaacagccuggcuccagaa

SEQ ID NO: 1650442 - RNA, 19 nt, Artificial Sequence
  Description of Artificial Sequence: Synthetic oligonucleotide
ggacacaauggcgugauua

SEQ ID NO: 1650443 - RNA, 19 nt, Artificial Sequence
  Description of Artificial Sequence: Synthetic oligonucleotide
uccggucccuuuguuuucu

SEQ ID NO: 1650444 - RNA, 19 nt, Artificial Sequence
  Description of Artificial Sequence: Synthetic oligonucleotide
gaagauccuuguccacaaa

SEQ ID NO: 1650445 - RNA, 19 nt, Artificial Sequence
  Description of Artificial Sequence: Synthetic oligonucleotide
caagaaaguggcugaaguu

SEQ ID NO: 1650446 - RNA, 19 nt, Artificial Sequence
  Description of Artificial Sequence: Synthetic oligonucleotide
agccaaccacucucaagaa

SEQ ID NO: 1650447 - RNA, 19 nt, Artificial Sequence
  Description of Artificial Sequence: Synthetic oligonucleotide
ucacggcaugcaccuugug

SEQ ID NO: 1650448 - RNA, 19 nt, Artificial Sequence
  Description of Artificial Sequence: Synthetic oligonucleotide
ugcugacguaguguuccga

SEQ ID NO: 1650449 - RNA, 19 nt, Artificial Sequence
  Description of Artificial Sequence: Synthetic oligonucleotide
cuucagcaacucggaagag

SEQ ID NO: 1650450 - RNA, 19 nt, Artificial Sequence
  Description of Artificial Sequence: Synthetic oligonucleotide
ugcguucccucaaggccau

SEQ ID NO: 1650451 - RNA, 19 nt, Artificial Sequence
  Description of Artificial Sequence: Synthetic oligonucleotide
cauaguacucaggaugggu

SEQ ID NO: 1650452 - RNA, 19 nt, Artificial Sequence
  Description of Artificial Sequence: Synthetic oligonucleotide
ccaauugguucaacaguuc

SEQ ID NO: 1650453 - RNA, 19 nt, Artificial Sequence
  Description of Artificial Sequence: Synthetic oligonucleotide
ccauuagcacaccuaucac

SEQ ID NO: 1650454 - RNA, 19 nt, Artificial Sequence
  Description of Artificial Sequence: Synthetic oligonucleotide
auggcgugauuaucaucaa

SEQ ID NO: 1650455 - RNA, 19 nt, Artificial Sequence
  Description of Artificial Sequence: Synthetic oligonucleotide
gggucugugucauccauua

SEQ ID NO: 1650456 - RNA, 19 nt, Artificial Sequence
  Description of Artificial Sequence: Synthetic oligonucleotide
ccuggucugauaagugcug

SEQ ID NO: 1650457 - RNA, 19 nt, Artificial Sequence
  Description of Artificial Sequence: Synthetic oligonucleotide
augacaggaugcugacgua

SEQ ID NO: 1650458 - RNA, 19 nt, Artificial Sequence
  Description of Artificial Sequence: Synthetic oligonucleotide
ggcggcacugagugugagg

SEQ ID NO: 1650459 - RNA, 19 nt, Artificial Sequence
  Description of Artificial Sequence: Synthetic oligonucleotide
ggacaggaggcucauauuu

SEQ ID NO: 1650460 - RNA, 19 nt, Artificial Sequence
  Description of Artificial Sequence: Synthetic oligonucleotide
agcacaccuaucacggcau

SEQ ID NO: 1650461 - RNA, 19 nt, Artificial Sequence
  Description of Artificial Sequence: Synthetic oligonucleotide
uugaggcggcacugagugu

SEQ ID NO: 1650462 - RNA, 19 nt, Artificial Sequence
  Description of Artificial Sequence: Synthetic oligonucleotide
ggucugugucauccauuag

SEQ ID NO: 1650463 - RNA, 19 nt, Artificial Sequence
  Description of Artificial Sequence: Synthetic oligonucleotide
cuuuuacaucuccccuuga

SEQ ID NO: 1650464 - RNA, 19 nt, Artificial Sequence
  Description of Artificial Sequence: Synthetic oligonucleotide
cugauaagugcuggaucca

SEQ ID NO: 1650465 - RNA, 19 nt, Artificial Sequence
  Description of Artificial Sequence: Synthetic oligonucleotide
agaggaagcuccacagauu

SEQ ID NO: 1650466 - RNA, 19 nt, Artificial Sequence
  Description of Artificial Sequence: Synthetic oligonucleotide
gaagagcucccgaacgagu

SEQ ID NO: 1650467 - RNA, 19 nt, Artificial Sequence
  Description of Artificial Sequence: Synthetic oligonucleotide
gcuccugauuucuaaugaa

SEQ ID NO: 1650468 - RNA, 19 nt, Artificial Sequence
  Description of Artificial Sequence: Synthetic oligonucleotide
ggccaguaauguuuuaccu

SEQ ID NO: 1650469 - RNA, 19 nt, Artificial Sequence
  Description of Artificial Sequence: Synthetic oligonucleotide
cccacucuaguugggacag

SEQ ID NO: 1650470 - RNA, 19 nt, Artificial Sequence
  Description of Artificial Sequence: Synthetic oligonucleotide
caacauuguucgcugaauu

SEQ ID NO: 1650471 - RNA, 19 nt, Artificial Sequence
  Description of Artificial Sequence: Synthetic oligonucleotide
gucauccauuagcacaccu

SEQ ID NO: 1650472 - RNA, 19 nt, Artificial Sequence
  Description of Artificial Sequence: Synthetic oligonucleotide
cccgaacgaguuugggucc

SEQ ID NO: 1650473 - RNA, 19 nt, Artificial Sequence
  Description of Artificial Sequence: Synthetic oligonucleotide
gaacgaguuuggguccguc

SEQ ID NO: 1650474 - RNA, 19 nt, Artificial Sequence
  Description of Artificial Sequence: Synthetic oligonucleotide
aucacggcaugcaccuugu

SEQ ID NO: 1650475 - RNA, 19 nt, Artificial Sequence
  Description of Artificial Sequence: Synthetic oligonucleotide
ggggcuuuauccccaucuc

SEQ ID NO: 1650476 - RNA, 19 nt, Artificial Sequence
  Description of Artificial Sequence: Synthetic oligonucleotide
agcucccgaacgaguuugg

SEQ ID NO: 1650477 - RNA, 19 nt, Artificial Sequence
  Description of Artificial Sequence: Synthetic oligonucleotide
ucaaugcggccuggucuga

SEQ ID NO: 1650478 - RNA, 19 nt, Artificial Sequence
  Description of Artificial Sequence: Synthetic oligonucleotide
cucucucaccuccagaguu

SEQ ID NO: 1650479 - RNA, 19 nt, Artificial Sequence
  Description of Artificial Sequence: Synthetic oligonucleotide
caguaacuugaggcggcac

SEQ ID NO: 1650480 - RNA, 19 nt, Artificial Sequence
  Description of Artificial Sequence: Synthetic oligonucleotide
cucccgaacgaguuugggu

SEQ ID NO: 1650481 - RNA, 19 nt, Artificial Sequence
  Description of Artificial Sequence: Synthetic oligonucleotide
ccuaucacggcaugcaccu

SEQ ID NO: 1650482 - RNA, 19 nt, Artificial Sequence
  Description of Artificial Sequence: Synthetic oligonucleotide
gggucacuagagauacagc

SEQ ID NO: 1650483 - RNA, 19 nt, Artificial Sequence
  Description of Artificial Sequence: Synthetic oligonucleotide
agcauccggucccuuuguu

SEQ ID NO: 1650484 - RNA, 19 nt, Artificial Sequence
  Description of Artificial Sequence: Synthetic oligonucleotide
gguguuaccaguggcaguu

SEQ ID NO: 1650485 - RNA, 19 nt, Artificial Sequence
  Description of Artificial Sequence: Synthetic oligonucleotide
cccuugaaucaaauccauc

SEQ ID NO: 1650486 - RNA, 19 nt, Artificial Sequence
  Description of Artificial Sequence: Synthetic oligonucleotide
auacagccccucaggggug

SEQ ID NO: 1650487 - RNA, 19 nt, Artificial Sequence
  Description of Artificial Sequence: Synthetic oligonucleotide
guguuccgagcccacagau

SEQ ID NO: 1650488 - RNA, 19 nt, Artificial Sequence
  Description of Artificial Sequence: Synthetic oligonucleotide
acagccccucaggggugcc

SEQ ID NO: 1650489 - RNA, 19 nt, Artificial Sequence
  Description of Artificial Sequence: Synthetic oligonucleotide
acugaacagccuggcucca

SEQ ID NO: 1650490 - RNA, 19 nt, Artificial Sequence
  Description of Artificial Sequence: Synthetic oligonucleotide
cuaguugggacaggaggcu

SEQ ID NO: 1650491 - RNA, 19 nt, Artificial Sequence
  Description of Artificial Sequence: Synthetic oligonucleotide
cuccagaguuugaaucaua

SEQ ID NO: 1650492 - RNA, 19 nt, Artificial Sequence
  Description of Artificial Sequence: Synthetic oligonucleotide
uggacacaauggcgugauu

SEQ ID NO: 1650493 - RNA, 19 nt, Artificial Sequence
  Description of Artificial Sequence: Synthetic oligonucleotide
cugcuuuggccaguaaugu

SEQ ID NO: 1650494 - RNA, 19 nt, Artificial Sequence
  Description of Artificial Sequence: Synthetic oligonucleotide
gccaaccacucucaagaaa

SEQ ID NO: 1650495 - RNA, 19 nt, Artificial Sequence
  Description of Artificial Sequence: Synthetic oligonucleotide
ggcuccagaagauccuugu

SEQ ID NO: 1650496 - RNA, 19 nt, Artificial Sequence
  Description of Artificial Sequence: Synthetic oligonucleotide
gugguugagcaggacugaa

SEQ ID NO: 1650497 - RNA, 19 nt, Artificial Sequence
  Description of Artificial Sequence: Synthetic oligonucleotide
gcucccgaacgaguuuggg

SEQ ID NO: 1650498 - RNA, 19 nt, Artificial Sequence
  Description of Artificial Sequence: Synthetic oligonucleotide
accuugugguugagcagga

SEQ ID NO: 1650499 - RNA, 19 nt, Artificial Sequence
  Description of Artificial Sequence: Synthetic oligonucleotide
caggaugcugacguagugu

SEQ ID NO: 1650500 - RNA, 19 nt, Artificial Sequence
  Description of Artificial Sequence: Synthetic oligonucleotide
ccucaaggccaucaagcca

SEQ ID NO: 1650501 - RNA, 19 nt, Artificial Sequence
  Description of Artificial Sequence: Synthetic oligonucleotide
gggcuuuauccccaucucu

SEQ ID NO: 1650502 - RNA, 19 nt, Artificial Sequence
  Description of Artificial Sequence: Synthetic oligonucleotide
gcaacucggaagagcuccc

SEQ ID NO: 1650503 - RNA, 19 nt, Artificial Sequence
  Description of Artificial Sequence: Synthetic oligonucleotide
gcuucuguacagauugccu

SEQ ID NO: 1650504 - RNA, 19 nt, Artificial Sequence
  Description of Artificial Sequence: Synthetic oligonucleotide
cacucucaagaaaguggcu

SEQ ID NO: 1650505 - RNA, 19 nt, Artificial Sequence
  Description of Artificial Sequence: Synthetic oligonucleotide
ccgaacgaguuuggguccg

SEQ ID NO: 1650506 - RNA, 19 nt, Artificial Sequence
  Description of Artificial Sequence: Synthetic oligonucleotide
aggcggcacugagugugag

SEQ ID NO: 1650507 - RNA, 19 nt, Artificial Sequence
  Description of Artificial Sequence: Synthetic oligonucleotide
gcacaccuaucacggcaug

SEQ ID NO: 1650508 - RNA, 19 nt, Artificial Sequence
  Description of Artificial Sequence: Synthetic oligonucleotide
cacuagagauacagccccu

SEQ ID NO: 1650509 - RNA, 19 nt, Artificial Sequence
  Description of Artificial Sequence: Synthetic oligonucleotide
ggucugauaagugcuggau

SEQ ID NO: 1650510 - RNA, 19 nt, Artificial Sequence
  Description of Artificial Sequence: Synthetic oligonucleotide
gcggcacugagugugaggu

SEQ ID NO: 1650511 - RNA, 19 nt, Artificial Sequence
  Description of Artificial Sequence: Synthetic oligonucleotide
ggguaagaggaagcuccac

SEQ ID NO: 1650512 - RNA, 19 nt, Artificial Sequence
  Description of Artificial Sequence: Synthetic oligonucleotide
gccaucaagccagcuucug

SEQ ID NO: 1650513 - RNA, 19 nt, Artificial Sequence
  Description of Artificial Sequence: Synthetic oligonucleotide
cugagccaaccacucucaa

SEQ ID NO: 1650514 - RNA, 19 nt, Artificial Sequence
  Description of Artificial Sequence: Synthetic oligonucleotide
caccuucaucacggugacc

SEQ ID NO: 1650515 - RNA, 19 nt, Artificial Sequence
  Description of Artificial Sequence: Synthetic oligonucleotide
ggggcauguucuucagcaa

SEQ ID NO: 1650516 - RNA, 19 nt, Artificial Sequence
  Description of Artificial Sequence: Synthetic oligonucleotide
ccccacucuaguugggaca

SEQ ID NO: 1650517 - RNA, 19 nt, Artificial Sequence
  Description of Artificial Sequence: Synthetic oligonucleotide
ccaaaguuucuauucgguu

SEQ ID NO: 1650518 - RNA, 19 nt, Artificial Sequence
  Description of Artificial Sequence: Synthetic oligonucleotide
ccccagguacuucugaaua

SEQ ID NO: 1650519 - RNA, 19 nt, Artificial Sequence
  Description of Artificial Sequence: Synthetic oligonucleotide
cacucugacuuugacccau

SEQ ID NO: 1650520 - RNA, 19 nt, Artificial Sequence
  Description of Artificial Sequence: Synthetic oligonucleotide
cacaauggauggggcaugu

SEQ ID NO: 1650521 - RNA, 19 nt, Artificial Sequence
  Description of Artificial Sequence: Synthetic oligonucleotide
gaagcuccacagauuccuu

SEQ ID NO: 1650522 - RNA, 19 nt, Artificial Sequence
  Description of Artificial Sequence: Synthetic oligonucleotide
agccccucaggggugccuu

SEQ ID NO: 1650523 - RNA, 19 nt, Artificial Sequence
  Description of Artificial Sequence: Synthetic oligonucleotide
cagccuggcuccagaagau

SEQ ID NO: 1650524 - RNA, 19 nt, Artificial Sequence
  Description of Artificial Sequence: Synthetic oligonucleotide
caggaggcucauauuucuu

SEQ ID NO: 1650525 - RNA, 19 nt, Artificial Sequence
  Description of Artificial Sequence: Synthetic oligonucleotide
cggccuggucugauaagug

SEQ ID NO: 1650526 - RNA, 19 nt, Artificial Sequence
  Description of Artificial Sequence: Synthetic oligonucleotide
cuauucgguuuguggccau

SEQ ID NO: 1650527 - RNA, 19 nt, Artificial Sequence
  Description of Artificial Sequence: Synthetic oligonucleotide
ccaucaagccagcuucugu

SEQ ID NO: 1650528 - RNA, 19 nt, Artificial Sequence
  Description of Artificial Sequence: Synthetic oligonucleotide
cuguacagauugccuugau

SEQ ID NO: 1650529 - RNA, 19 nt, Artificial Sequence
  Description of Artificial Sequence: Synthetic oligonucleotide
gcggccuggucugauaagu

SEQ ID NO: 1650530 - RNA, 19 nt, Artificial Sequence
  Description of Artificial Sequence: Synthetic oligonucleotide
ccccaauaucugcauaggu

SEQ ID NO: 1650531 - RNA, 19 nt, Artificial Sequence
  Description of Artificial Sequence: Synthetic oligonucleotide
ccuugugguugagcaggac

SEQ ID NO: 1650532 - RNA, 19 nt, Artificial Sequence
  Description of Artificial Sequence: Synthetic oligonucleotide
gcauccggucccuuuguuu

SEQ ID NO: 1650533 - RNA, 19 nt, Artificial Sequence
  Description of Artificial Sequence: Synthetic oligonucleotide
cagcauccggucccuuugu

SEQ ID NO: 1650534 - RNA, 19 nt, Artificial Sequence
  Description of Artificial Sequence: Synthetic oligonucleotide
ccacucuaguugggacagg

SEQ ID NO: 1650535 - RNA, 19 nt, Artificial Sequence
  Description of Artificial Sequence: Synthetic oligonucleotide
ccacucugacuuugaccca

SEQ ID NO: 1650536 - RNA, 19 nt, Artificial Sequence
  Description of Artificial Sequence: Synthetic oligonucleotide
gggacaggaggcucauauu

SEQ ID NO: 1650537 - RNA, 19 nt, Artificial Sequence
  Description of Artificial Sequence: Synthetic oligonucleotide
ccccuugaaucaaauccau

SEQ ID NO: 1650538 - RNA, 19 nt, Artificial Sequence
  Description of Artificial Sequence: Synthetic oligonucleotide
ccaacauuguucgcugaau

SEQ ID NO: 1650539 - RNA, 19 nt, Artificial Sequence
  Description of Artificial Sequence: Synthetic oligonucleotide
ccgagcccacagaugugga

SEQ ID NO: 1650540 - RNA, 19 nt, Artificial Sequence
  Description of Artificial Sequence: Synthetic oligonucleotide
cggcacugagugugaggug

SEQ ID NO: 1650541 - RNA, 19 nt, Artificial Sequence
  Description of Artificial Sequence: Synthetic oligonucleotide
caucaucagccagggucau

SEQ ID NO: 1650542 - RNA, 19 nt, Artificial Sequence
  Description of Artificial Sequence: Synthetic oligonucleotide
ggccaucaagccagcuucu

SEQ ID NO: 1650543 - RNA, 19 nt, Artificial Sequence
  Description of Artificial Sequence: Synthetic oligonucleotide
gauccgcuucuuggucuuu

SEQ ID NO: 1650544 - RNA, 19 nt, Artificial Sequence
  Description of Artificial Sequence: Synthetic oligonucleotide
caaugcggccuggucugau

SEQ ID NO: 1650545 - RNA, 19 nt, Artificial Sequence
  Description of Artificial Sequence: Synthetic oligonucleotide
ggggucugugucauccauu

SEQ ID NO: 1650546 - RNA, 19 nt, Artificial Sequence
  Description of Artificial Sequence: Synthetic oligonucleotide
ccacagauguggacacaau

SEQ ID NO: 1650547 - RNA, 19 nt, Artificial Sequence
  Description of Artificial Sequence: Synthetic oligonucleotide
cuaucacggcaugcaccuu

SEQ ID NO: 1650548 - RNA, 19 nt, Artificial Sequence
  Description of Artificial Sequence: Synthetic oligonucleotide
gcguucccucaaggccauc

SEQ ID NO: 1650549 - RNA, 19 nt, Artificial Sequence
  Description of Artificial Sequence: Synthetic oligonucleotide
cggcaugcaccuugugguu

SEQ ID NO: 1650550 - RNA, 19 nt, Artificial Sequence
  Description of Artificial Sequence: Synthetic oligonucleotide
cgaacgaguuuggguccgu

SEQ ID NO: 1650551 - RNA, 19 nt, Artificial Sequence
  Description of Artificial Sequence: Synthetic oligonucleotide
ccggucccuuuguuuucuu

SEQ ID NO: 1650552 - RNA, 19 nt, Artificial Sequence
  Description of Artificial Sequence: Synthetic oligonucleotide
gauuccuuuaaucaggugg

SEQ ID NO: 1650553 - RNA, 19 nt, Artificial Sequence
  Description of Artificial Sequence: Synthetic oligonucleotide
aaauauugauuccauuggc

SEQ ID NO: 1650554 - RNA, 19 nt, Artificial Sequence
  Description of Artificial Sequence: Synthetic oligonucleotide
aaauuagcuauguaugugg

SEQ ID NO: 1650555 - RNA, 19 nt, Artificial Sequence
  Description of Artificial Sequence: Synthetic oligonucleotide
aauagauaaauuguccacc

SEQ ID NO: 1650556 - RNA, 19 nt, Artificial Sequence
  Description of Artificial Sequence: Synthetic oligonucleotide
acaacaaagagauaaacug

SEQ ID NO: 1650557 - RNA, 19 nt, Artificial Sequence
  Description of Artificial Sequence: Synthetic oligonucleotide
uuaagaaaggaucugagaa

SEQ ID NO: 1650558 - RNA, 19 nt, Artificial Sequence
  Description of Artificial Sequence: Synthetic oligonucleotide
acuaaagaaagccagacca

SEQ ID NO: 1650559 - RNA, 19 nt, Artificial Sequence
  Description of Artificial Sequence: Synthetic oligonucleotide
aaucgaaucccucugccac

SEQ ID NO: 1650560 - RNA, 19 nt, Artificial Sequence
  Description of Artificial Sequence: Synthetic oligonucleotide
aauugaguuagauucauau

SEQ ID NO: 1650561 - RNA, 19 nt, Artificial Sequence
  Description of Artificial Sequence: Synthetic oligonucleotide
uuagauucauauuaggcug

SEQ ID NO: 1650562 - RNA, 19 nt, Artificial Sequence
  Description of Artificial Sequence: Synthetic oligonucleotide
uuaagucgauuucugagcg

SEQ ID NO: 1650563 - RNA, 19 nt, Artificial Sequence
  Description of Artificial Sequence: Synthetic oligonucleotide
uuaaaugaagccaaaucga

SEQ ID NO: 1650564 - RNA, 19 nt, Artificial Sequence
  Description of Artificial Sequence: Synthetic oligonucleotide
ucaggugaaauauugauuc

SEQ ID NO: 1650565 - RNA, 19 nt, Artificial Sequence
  Description of Artificial Sequence: Synthetic oligonucleotide
gaaccuuuaauugaguuag

SEQ ID NO: 1650566 - RNA, 19 nt, Artificial Sequence
  Description of Artificial Sequence: Synthetic oligonucleotide
uuugcuacaacuuauugua

SEQ ID NO: 1650567 - RNA, 19 nt, Artificial Sequence
  Description of Artificial Sequence: Synthetic oligonucleotide
uaugaaagugcuaaugcca

SEQ ID NO: 1650568 - RNA, 19 nt, Artificial Sequence
  Description of Artificial Sequence: Synthetic oligonucleotide
ucaauagauaaauugucca

SEQ ID NO: 1650569 - RNA, 19 nt, Artificial Sequence
  Description of Artificial Sequence: Synthetic oligonucleotide
aacuuauuguacuugcaug

SEQ ID NO: 1650570 - RNA, 19 nt, Artificial Sequence
  Description of Artificial Sequence: Synthetic oligonucleotide
uacaacuuagaguucacag

SEQ ID NO: 1650571 - RNA, 19 nt, Artificial Sequence
  Description of Artificial Sequence: Synthetic oligonucleotide
ugguucacaacaaagagau

SEQ ID NO: 1650572 - RNA, 19 nt, Artificial Sequence
  Description of Artificial Sequence: Synthetic oligonucleotide
ugaguuagauucauauuag

SEQ ID NO: 1650573 - RNA, 19 nt, Artificial Sequence
  Description of Artificial Sequence: Synthetic oligonucleotide
aaaucgaagccccagcuga

SEQ ID NO: 1650574 - RNA, 19 nt, Artificial Sequence
  Description of Artificial Sequence: Synthetic oligonucleotide
ugauauacacuguaguuac

SEQ ID NO: 1650575 - RNA, 19 nt, Artificial Sequence
  Description of Artificial Sequence: Synthetic oligonucleotide
uguauucuugaauuccggg

SEQ ID NO: 1650576 - RNA, 19 nt, Artificial Sequence
  Description of Artificial Sequence: Synthetic oligonucleotide
uacgaugucauucacacuu

SEQ ID NO: 1650577 - RNA, 19 nt, Artificial Sequence
  Description of Artificial Sequence: Synthetic oligonucleotide
ugaugcugaaaguacauca

SEQ ID NO: 1650578 - RNA, 19 nt, Artificial Sequence
  Description of Artificial Sequence: Synthetic oligonucleotide
cuauguaugugguauauuc

SEQ ID NO: 1650579 - RNA, 19 nt, Artificial Sequence
  Description of Artificial Sequence: Synthetic oligonucleotide
uguugauauacacuguagu

SEQ ID NO: 1650580 - RNA, 19 nt, Artificial Sequence
  Description of Artificial Sequence: Synthetic oligonucleotide
gaugguucgggucauacac

SEQ ID NO: 1650581 - RNA, 19 nt, Artificial Sequence
  Description of Artificial Sequence: Synthetic oligonucleotide
aacaaagagauaaacugug

SEQ ID NO: 1650582 - RNA, 19 nt, Artificial Sequence
  Description of Artificial Sequence: Synthetic oligonucleotide
gauaaauuguccaccagug

SEQ ID NO: 1650583 - RNA, 19 nt, Artificial Sequence
  Description of Artificial Sequence: Synthetic oligonucleotide
gaugauggaggaugguucg

SEQ ID NO: 1650584 - RNA, 19 nt, Artificial Sequence
  Description of Artificial Sequence: Synthetic oligonucleotide
cacacacccaauaauaaag

SEQ ID NO: 1650585 - RNA, 19 nt, Artificial Sequence
  Description of Artificial Sequence: Synthetic oligonucleotide
auuccuuuaaucagguggc

SEQ ID NO: 1650586 - RNA, 19 nt, Artificial Sequence
  Description of Artificial Sequence: Synthetic oligonucleotide
aaaagauuguuuugcuaca

SEQ ID NO: 1650587 - RNA, 19 nt, Artificial Sequence
  Description of Artificial Sequence: Synthetic oligonucleotide
gacucuuaauuccagugcc

SEQ ID NO: 1650588 - RNA, 19 nt, Artificial Sequence
  Description of Artificial Sequence: Synthetic oligonucleotide
ucagaauuagcaauucauc

SEQ ID NO: 1650589 - RNA, 19 nt, Artificial Sequence
  Description of Artificial Sequence: Synthetic oligonucleotide
uuucugagcgccaggaacc

SEQ ID NO: 1650590 - RNA, 19 nt, Artificial Sequence
  Description of Artificial Sequence: Synthetic oligonucleotide
ugacagccaacccagaugu

SEQ ID NO: 1650591 - RNA, 19 nt, Artificial Sequence
  Description of Artificial Sequence: Synthetic oligonucleotide
aaacuugaggcccacacua

SEQ ID NO: 1650592 - RNA, 19 nt, Artificial Sequence
  Description of Artificial Sequence: Synthetic oligonucleotide
cuuuaagaaaggaucugag

SEQ ID NO: 1650593 - RNA, 19 nt, Artificial Sequence
  Description of Artificial Sequence: Synthetic oligonucleotide
uuccuaucguagauggucg

SEQ ID NO: 1650594 - RNA, 19 nt, Artificial Sequence
  Description of Artificial Sequence: Synthetic oligonucleotide
ugacucuuaauuccagugc

SEQ ID NO: 1650595 - RNA, 19 nt, Artificial Sequence
  Description of Artificial Sequence: Synthetic oligonucleotide
aacucagugccaccagucg

SEQ ID NO: 1650596 - RNA, 19 nt, Artificial Sequence
  Description of Artificial Sequence: Synthetic oligonucleotide
cucgauuccuuuaaucagg

SEQ ID NO: 1650597 - RNA, 19 nt, Artificial Sequence
  Description of Artificial Sequence: Synthetic oligonucleotide
uuguugauauacacuguag

SEQ ID NO: 1650598 - RNA, 19 nt, Artificial Sequence
  Description of Artificial Sequence: Synthetic oligonucleotide
gaguuagauucauauuagg

SEQ ID NO: 1650599 - RNA, 19 nt, Artificial Sequence
  Description of Artificial Sequence: Synthetic oligonucleotide
auagauaaauuguccacca

SEQ ID NO: 1650600 - RNA, 19 nt, Artificial Sequence
  Description of Artificial Sequence: Synthetic oligonucleotide
auuggcugaaucgaauccc

SEQ ID NO: 1650601 - RNA, 19 nt, Artificial Sequence
  Description of Artificial Sequence: Synthetic oligonucleotide
aaagccagaccauugggaa

SEQ ID NO: 1650602 - RNA, 19 nt, Artificial Sequence
  Description of Artificial Sequence: Synthetic oligonucleotide
aagaaguuuccuaucguag

SEQ ID NO: 1650603 - RNA, 19 nt, Artificial Sequence
  Description of Artificial Sequence: Synthetic oligonucleotide
aaagugcuaaugccaugcg

SEQ ID NO: 1650604 - RNA, 19 nt, Artificial Sequence
  Description of Artificial Sequence: Synthetic oligonucleotide
aauucccucagaauuagca

SEQ ID NO: 1650605 - RNA, 19 nt, Artificial Sequence
  Description of Artificial Sequence: Synthetic oligonucleotide
uguugaugcugaaaguaca

SEQ ID NO: 1650606 - RNA, 19 nt, Artificial Sequence
  Description of Artificial Sequence: Synthetic oligonucleotide
acacgaagagcuucuggcc

SEQ ID NO: 1650607 - RNA, 19 nt, Artificial Sequence
  Description of Artificial Sequence: Synthetic oligonucleotide
agaauuguaggccuuuccu

SEQ ID NO: 1650608 - RNA, 19 nt, Artificial Sequence
  Description of Artificial Sequence: Synthetic oligonucleotide
cacacacacacacacaccc

SEQ ID NO: 1650609 - RNA, 19 nt, Artificial Sequence
  Description of Artificial Sequence: Synthetic oligonucleotide
agaauuagcaauucaucaa

SEQ ID NO: 1650610 - RNA, 19 nt, Artificial Sequence
  Description of Artificial Sequence: Synthetic oligonucleotide
ugccaugcggguuaaauga

SEQ ID NO: 1650611 - RNA, 19 nt, Artificial Sequence
  Description of Artificial Sequence: Synthetic oligonucleotide
aucaccaucuaugaaagug

SEQ ID NO: 1650612 - RNA, 19 nt, Artificial Sequence
  Description of Artificial Sequence: Synthetic oligonucleotide
ucugguauaaagugccuac

SEQ ID NO: 1650613 - RNA, 19 nt, Artificial Sequence
  Description of Artificial Sequence: Synthetic oligonucleotide
agugccuacaagaaguuuc

SEQ ID NO: 1650614 - RNA, 19 nt, Artificial Sequence
  Description of Artificial Sequence: Synthetic oligonucleotide
acacuaaagaaagccagac

SEQ ID NO: 1650615 - RNA, 19 nt, Artificial Sequence
  Description of Artificial Sequence: Synthetic oligonucleotide
guaugugguauauuccuag

SEQ ID NO: 1650616 - RNA, 19 nt, Artificial Sequence
  Description of Artificial Sequence: Synthetic oligonucleotide
guuagauucauauuaggcu

SEQ ID NO: 1650617 - RNA, 19 nt, Artificial Sequence
  Description of Artificial Sequence: Synthetic oligonucleotide
aagagauaaacugugucau

SEQ ID NO: 1650618 - RNA, 19 nt, Artificial Sequence
  Description of Artificial Sequence: Synthetic oligonucleotide
agauaaacugugucaucac

SEQ ID NO: 1650619 - RNA, 19 nt, Artificial Sequence
  Description of Artificial Sequence: Synthetic oligonucleotide
uccggagaaccucugauga

SEQ ID NO: 1650620 - RNA, 19 nt, Artificial Sequence
  Description of Artificial Sequence: Synthetic oligonucleotide
ugaaucgaaucccucugcc

SEQ ID NO: 1650621 - RNA, 19 nt, Artificial Sequence
  Description of Artificial Sequence: Synthetic oligonucleotide
gaauuagcaauucaucaaa

SEQ ID NO: 1650622 - RNA, 19 nt, Artificial Sequence
  Description of Artificial Sequence: Synthetic oligonucleotide
augcggguuaaaugaagcc

SEQ ID NO: 1650623 - RNA, 19 nt, Artificial Sequence
  Description of Artificial Sequence: Synthetic oligonucleotide
acaacuuagaguucacagu

SEQ ID NO: 1650624 - RNA, 19 nt, Artificial Sequence
  Description of Artificial Sequence: Synthetic oligonucleotide
acucagugccaccagucgc

SEQ ID NO: 1650625 - RNA, 19 nt, Artificial Sequence
  Description of Artificial Sequence: Synthetic oligonucleotide
auuugcccagcguagguuc

SEQ ID NO: 1650626 - RNA, 19 nt, Artificial Sequence
  Description of Artificial Sequence: Synthetic oligonucleotide
ugcugaaaguacaucagaa

SEQ ID NO: 1650627 - RNA, 19 nt, Artificial Sequence
  Description of Artificial Sequence: Synthetic oligonucleotide
uggcuucucggauagaaug

SEQ ID NO: 1650628 - RNA, 19 nt, Artificial Sequence
  Description of Artificial Sequence: Synthetic oligonucleotide
ucaaguacgucuccaaaua

SEQ ID NO: 1650629 - RNA, 19 nt, Artificial Sequence
  Description of Artificial Sequence: Synthetic oligonucleotide
gaaccucugaugauggagg

SEQ ID NO: 1650630 - RNA, 19 nt, Artificial Sequence
  Description of Artificial Sequence: Synthetic oligonucleotide
uucucggauagaauguucu

SEQ ID NO: 1650631 - RNA, 19 nt, Artificial Sequence
  Description of Artificial Sequence: Synthetic oligonucleotide
agacccguuguugauauac

SEQ ID NO: 1650632 - RNA, 19 nt, Artificial Sequence
  Description of Artificial Sequence: Synthetic oligonucleotide
cagaauuagcaauucauca

SEQ ID NO: 1650633 - RNA, 19 nt, Artificial Sequence
  Description of Artificial Sequence: Synthetic oligonucleotide
ucuugagaugcaacaaaga

SEQ ID NO: 1650634 - RNA, 19 nt, Artificial Sequence
  Description of Artificial Sequence: Synthetic oligonucleotide
ucggauagaauguucugga

SEQ ID NO: 1650635 - RNA, 19 nt, Artificial Sequence
  Description of Artificial Sequence: Synthetic oligonucleotide
cucuggaggcuuuaagucg

SEQ ID NO: 1650636 - RNA, 19 nt, Artificial Sequence
  Description of Artificial Sequence: Synthetic oligonucleotide
augucauucacacuuggaa

SEQ ID NO: 1650637 - RNA, 19 nt, Artificial Sequence
  Description of Artificial Sequence: Synthetic oligonucleotide
acaacauuugcccagcgua

SEQ ID NO: 1650638 - RNA, 19 nt, Artificial Sequence
  Description of Artificial Sequence: Synthetic oligonucleotide
ugcuacaacuuauuguacu

SEQ ID NO: 1650639 - RNA, 19 nt, Artificial Sequence
  Description of Artificial Sequence: Synthetic oligonucleotide
ucuggaggcuuuaagucga

SEQ ID NO: 1650640 - RNA, 19 nt, Artificial Sequence
  Description of Artificial Sequence: Synthetic oligonucleotide
agaaguuuccuaucguaga

SEQ ID NO: 1650641 - RNA, 19 nt, Artificial Sequence
  Description of Artificial Sequence: Synthetic oligonucleotide
auauacacuguaguuacug

SEQ ID NO: 1650642 - RNA, 19 nt, Artificial Sequence
  Description of Artificial Sequence: Synthetic oligonucleotide
gagauaaacugugucauca

SEQ ID NO: 1650643 - RNA, 19 nt, Artificial Sequence
  Description of Artificial Sequence: Synthetic oligonucleotide
gaugcugaaaguacaucag

SEQ ID NO: 1650644 - RNA, 19 nt, Artificial Sequence
  Description of Artificial Sequence: Synthetic oligonucleotide
uugaggcccacacuaaaga

SEQ ID NO: 1650645 - RNA, 19 nt, Artificial Sequence
  Description of Artificial Sequence: Synthetic oligonucleotide
caugcggguuaaaugaagc

SEQ ID NO: 1650646 - RNA, 19 nt, Artificial Sequence
  Description of Artificial Sequence: Synthetic oligonucleotide
cauagaagugggcuggccc

SEQ ID NO: 1650647 - RNA, 19 nt, Artificial Sequence
  Description of Artificial Sequence: Synthetic oligonucleotide
acuuagaguucacaguaca

SEQ ID NO: 1650648 - RNA, 19 nt, Artificial Sequence
  Description of Artificial Sequence: Synthetic oligonucleotide
cacacacacacacacacac

SEQ ID NO: 1650649 - RNA, 19 nt, Artificial Sequence
  Description of Artificial Sequence: Synthetic oligonucleotide
uagauaaauuguccaccag

SEQ ID NO: 1650650 - RNA, 19 nt, Artificial Sequence
  Description of Artificial Sequence: Synthetic oligonucleotide
gacgguuaaauucccucag

SEQ ID NO: 1650651 - RNA, 19 nt, Artificial Sequence
  Description of Artificial Sequence: Synthetic oligonucleotide
aggagcucaugcuuaauug

SEQ ID NO: 1650652 - RNA, 19 nt, Artificial Sequence
  Description of Artificial Sequence: Synthetic oligonucleotide
auauuccuaggucagugcu

SEQ ID NO: 1650653 - RNA, 19 nt, Artificial Sequence
  Description of Artificial Sequence: Synthetic oligonucleotide
acaucagaauuguaggccu

SEQ ID NO: 1650654 - RNA, 19 nt, Artificial Sequence
  Description of Artificial Sequence: Synthetic oligonucleotide
cuuaucuggugcaaagcug

SEQ ID NO: 1650655 - RNA, 19 nt, Artificial Sequence
  Description of Artificial Sequence: Synthetic oligonucleotide
ggugguucacaacaaagag

SEQ ID NO: 1650656 - RNA, 19 nt, Artificial Sequence
  Description of Artificial Sequence: Synthetic oligonucleotide
uuacugauggcuucucgga

SEQ ID NO: 1650657 - RNA, 19 nt, Artificial Sequence
  Description of Artificial Sequence: Synthetic oligonucleotide
agagauaaacugugucauc

SEQ ID NO: 1650658 - RNA, 19 nt, Artificial Sequence
  Description of Artificial Sequence: Synthetic oligonucleotide
cacccaauaauaaaguuaa

SEQ ID NO: 1650659 - RNA, 19 nt, Artificial Sequence
  Description of Artificial Sequence: Synthetic oligonucleotide
ucauacacgaagagcuucu

SEQ ID NO: 1650660 - RNA, 19 nt, Artificial Sequence
  Description of Artificial Sequence: Synthetic oligonucleotide
aaacucagugccaccaguc

SEQ ID NO: 1650661 - RNA, 19 nt, Artificial Sequence
  Description of Artificial Sequence: Synthetic oligonucleotide
ugucuugagaugcaacaaa

SEQ ID NO: 1650662 - RNA, 19 nt, Artificial Sequence
  Description of Artificial Sequence: Synthetic oligonucleotide
uacgucuccaaauacuuua

SEQ ID NO: 1650663 - RNA, 19 nt, Artificial Sequence
  Description of Artificial Sequence: Synthetic oligonucleotide
aguuacugauggcuucucg

SEQ ID NO: 1650664 - RNA, 19 nt, Artificial Sequence
  Description of Artificial Sequence: Synthetic oligonucleotide
acccguuguugauauacac

SEQ ID NO: 1650665 - RNA, 19 nt, Artificial Sequence
  Description of Artificial Sequence: Synthetic oligonucleotide
ucaggauuccuccaggcuu

SEQ ID NO: 1650666 - RNA, 19 nt, Artificial Sequence
  Description of Artificial Sequence: Synthetic oligonucleotide
aucgaaucccucugccacc

SEQ ID NO: 1650667 - RNA, 19 nt, Artificial Sequence
  Description of Artificial Sequence: Synthetic oligonucleotide
cauuggcugaaucgaaucc

SEQ ID NO: 1650668 - RNA, 19 nt, Artificial Sequence
  Description of Artificial Sequence: Synthetic oligonucleotide
uuguuuugcuacaacuuau

SEQ ID NO: 1650669 - RNA, 19 nt, Artificial Sequence
  Description of Artificial Sequence: Synthetic oligonucleotide
cagcguagguucaaguacg

SEQ ID NO: 1650670 - RNA, 19 nt, Artificial Sequence
  Description of Artificial Sequence: Synthetic oligonucleotide
uauuccuaggucagugcug

SEQ ID NO: 1650671 - RNA, 19 nt, Artificial Sequence
  Description of Artificial Sequence: Synthetic oligonucleotide
cucggauagaauguucugg

SEQ ID NO: 1650672 - RNA, 19 nt, Artificial Sequence
  Description of Artificial Sequence: Synthetic oligonucleotide
gugguauauuccuagguca

SEQ ID NO: 1650673 - RNA, 19 nt, Artificial Sequence
  Description of Artificial Sequence: Synthetic oligonucleotide
auaaauuguccaccagugu

SEQ ID NO: 1650674 - RNA, 19 nt, Artificial Sequence
  Description of Artificial Sequence: Synthetic oligonucleotide
agauucuacuucucuggag

SEQ ID NO: 1650675 - RNA, 19 nt, Artificial Sequence
  Description of Artificial Sequence: Synthetic oligonucleotide
aaguuaauuuucuguugau

SEQ ID NO: 1650676 - RNA, 19 nt, Artificial Sequence
  Description of Artificial Sequence: Synthetic oligonucleotide
uaaacaacauuugcccagc

SEQ ID NO: 1650677 - RNA, 19 nt, Artificial Sequence
  Description of Artificial Sequence: Synthetic oligonucleotide
aagccagaccauugggaag

SEQ ID NO: 1650678 - RNA, 19 nt, Artificial Sequence
  Description of Artificial Sequence: Synthetic oligonucleotide
aauuagcuauguauguggu

SEQ ID NO: 1650679 - RNA, 19 nt, Artificial Sequence
  Description of Artificial Sequence: Synthetic oligonucleotide
gucagcaacguagacauac

SEQ ID NO: 1650680 - RNA, 19 nt, Artificial Sequence
  Description of Artificial Sequence: Synthetic oligonucleotide
cacggaacuucccuggagg

SEQ ID NO: 1650681 - RNA, 19 nt, Artificial Sequence
  Description of Artificial Sequence: Synthetic oligonucleotide
aaggagcucaugcuuaauu

SEQ ID NO: 1650682 - RNA, 19 nt, Artificial Sequence
  Description of Artificial Sequence: Synthetic oligonucleotide
cuugaggcccacacuaaag

SEQ ID NO: 1650683 - RNA, 19 nt, Artificial Sequence
  Description of Artificial Sequence: Synthetic oligonucleotide
aucugagaaauagugguca

SEQ ID NO: 1650684 - RNA, 19 nt, Artificial Sequence
  Description of Artificial Sequence: Synthetic oligonucleotide
aaugccaugcggguuaaau

SEQ ID NO: 1650685 - RNA, 19 nt, Artificial Sequence
  Description of Artificial Sequence: Synthetic oligonucleotide
uucaucuggacuguaguaa

SEQ ID NO: 1650686 - RNA, 19 nt, Artificial Sequence
  Description of Artificial Sequence: Synthetic oligonucleotide
aaauucccucagaauuagc

SEQ ID NO: 1650687 - RNA, 19 nt, Artificial Sequence
  Description of Artificial Sequence: Synthetic oligonucleotide
cacuaaagaaagccagacc

SEQ ID NO: 1650688 - RNA, 19 nt, Artificial Sequence
  Description of Artificial Sequence: Synthetic oligonucleotide
caacauuugcccagcguag

SEQ ID NO: 1650689 - RNA, 19 nt, Artificial Sequence
  Description of Artificial Sequence: Synthetic oligonucleotide
auacacuguaguuacugau

SEQ ID NO: 1650690 - RNA, 19 nt, Artificial Sequence
  Description of Artificial Sequence: Synthetic oligonucleotide
gaggcuuuaagucgauuuc

SEQ ID NO: 1650691 - RNA, 19 nt, Artificial Sequence
  Description of Artificial Sequence: Synthetic oligonucleotide
aaguacgucuccaaauacu

SEQ ID NO: 1650692 - RNA, 19 nt, Artificial Sequence
  Description of Artificial Sequence: Synthetic oligonucleotide
uucccucagaauuagcaau

SEQ ID NO: 1650693 - RNA, 19 nt, Artificial Sequence
  Description of Artificial Sequence: Synthetic oligonucleotide
uggugcaaagcuguggagc

SEQ ID NO: 1650694 - RNA, 19 nt, Artificial Sequence
  Description of Artificial Sequence: Synthetic oligonucleotide
ucgauuccuuuaaucaggu

SEQ ID NO: 1650695 - RNA, 19 nt, Artificial Sequence
  Description of Artificial Sequence: Synthetic oligonucleotide
gagcuaguaugucagcaac

SEQ ID NO: 1650696 - RNA, 19 nt, Artificial Sequence
  Description of Artificial Sequence: Synthetic oligonucleotide
auugaguuagauucauauu

SEQ ID NO: 1650697 - RNA, 19 nt, Artificial Sequence
  Description of Artificial Sequence: Synthetic oligonucleotide
acucuuaauuccagugccc

SEQ ID NO: 1650698 - RNA, 19 nt, Artificial Sequence
  Description of Artificial Sequence: Synthetic oligonucleotide
ugagcuaguaugucagcaa

SEQ ID NO: 1650699 - RNA, 19 nt, Artificial Sequence
  Description of Artificial Sequence: Synthetic oligonucleotide
acaagaaguuuccuaucgu

SEQ ID NO: 1650700 - RNA, 19 nt, Artificial Sequence
  Description of Artificial Sequence: Synthetic oligonucleotide
aaagauuguuuugcuacaa

SEQ ID NO: 1650701 - RNA, 19 nt, Artificial Sequence
  Description of Artificial Sequence: Synthetic oligonucleotide
uccuuuaaucagguggcag

SEQ ID NO: 1650702 - RNA, 19 nt, Artificial Sequence
  Description of Artificial Sequence: Synthetic oligonucleotide
uuggcugaaucgaaucccu

SEQ ID NO: 1650703 - RNA, 19 nt, Artificial Sequence
  Description of Artificial Sequence: Synthetic oligonucleotide
ugguucgggucauacacga

SEQ ID NO: 1650704 - RNA, 19 nt, Artificial Sequence
  Description of Artificial Sequence: Synthetic oligonucleotide
auuccauuggcugaaucga

SEQ ID NO: 1650705 - RNA, 19 nt, Artificial Sequence
  Description of Artificial Sequence: Synthetic oligonucleotide
cugacgguuaaauucccuc

SEQ ID NO: 1650706 - RNA, 19 nt, Artificial Sequence
  Description of Artificial Sequence: Synthetic oligonucleotide
ucgauuucugagcgccagg

SEQ ID NO: 1650707 - RNA, 19 nt, Artificial Sequence
  Description of Artificial Sequence: Synthetic oligonucleotide
aaccucugaugauggagga

SEQ ID NO: 1650708 - RNA, 19 nt, Artificial Sequence
  Description of Artificial Sequence: Synthetic oligonucleotide
ucucggauagaauguucug

SEQ ID NO: 1650709 - RNA, 19 nt, Artificial Sequence
  Description of Artificial Sequence: Synthetic oligonucleotide
ucuacagauucuacuucuc

SEQ ID NO: 1650710 - RNA, 19 nt, Artificial Sequence
  Description of Artificial Sequence: Synthetic oligonucleotide
aggugaaauauugauucca

SEQ ID NO: 1650711 - RNA, 19 nt, Artificial Sequence
  Description of Artificial Sequence: Synthetic oligonucleotide
uuagggugacagccaaccc

SEQ ID NO: 1650712 - RNA, 19 nt, Artificial Sequence
  Description of Artificial Sequence: Synthetic oligonucleotide
caacuuagaguucacagua

SEQ ID NO: 1650713 - RNA, 19 nt, Artificial Sequence
  Description of Artificial Sequence: Synthetic oligonucleotide
augcugaaaguacaucaga

SEQ ID NO: 1650714 - RNA, 19 nt, Artificial Sequence
  Description of Artificial Sequence: Synthetic oligonucleotide
ggauagaauguucuggauc

SEQ ID NO: 1650715 - RNA, 19 nt, Artificial Sequence
  Description of Artificial Sequence: Synthetic oligonucleotide
augccaugcggguuaaaug

SEQ ID NO: 1650716 - RNA, 19 nt, Artificial Sequence
  Description of Artificial Sequence: Synthetic oligonucleotide
cagaauuguaggccuuucc

SEQ ID NO: 1650717 - RNA, 19 nt, Artificial Sequence
  Description of Artificial Sequence: Synthetic oligonucleotide
aaucgaagccccagcugac

SEQ ID NO: 1650718 - RNA, 19 nt, Artificial Sequence
  Description of Artificial Sequence: Synthetic oligonucleotide
ggugcaaagcuguggagcc

SEQ ID NO: 1650719 - RNA, 19 nt, Artificial Sequence
  Description of Artificial Sequence: Synthetic oligonucleotide
caaguacgucuccaaauac

SEQ ID NO: 1650720 - RNA, 19 nt, Artificial Sequence
  Description of Artificial Sequence: Synthetic oligonucleotide
ucagcaacguagacauacu

SEQ ID NO: 1650721 - RNA, 19 nt, Artificial Sequence
  Description of Artificial Sequence: Synthetic oligonucleotide
ggaaacuugaggcccacac

SEQ ID NO: 1650722 - RNA, 19 nt, Artificial Sequence
  Description of Artificial Sequence: Synthetic oligonucleotide
ugucacccgaggaaggauc

SEQ ID NO: 1650723 - RNA, 19 nt, Artificial Sequence
  Description of Artificial Sequence: Synthetic oligonucleotide
gaaucgaaucccucugcca

SEQ ID NO: 1650724 - RNA, 19 nt, Artificial Sequence
  Description of Artificial Sequence: Synthetic oligonucleotide
ccuaggucagugcugacgg

SEQ ID NO: 1650725 - RNA, 19 nt, Artificial Sequence
  Description of Artificial Sequence: Synthetic oligonucleotide
aaucccucugccaccagcu

SEQ ID NO: 1650726 - RNA, 19 nt, Artificial Sequence
  Description of Artificial Sequence: Synthetic oligonucleotide
uccauuggcugaaucgaau

SEQ ID NO: 1650727 - RNA, 19 nt, Artificial Sequence
  Description of Artificial Sequence: Synthetic oligonucleotide
agccaacccagaugucacc

SEQ ID NO: 1650728 - RNA, 19 nt, Artificial Sequence
  Description of Artificial Sequence: Synthetic oligonucleotide
uugcuacaacuuauuguac

SEQ ID NO: 1650729 - RNA, 19 nt, Artificial Sequence
  Description of Artificial Sequence: Synthetic oligonucleotide
guauucuugaauuccgggu

SEQ ID NO: 1650730 - RNA, 19 nt, Artificial Sequence
  Description of Artificial Sequence: Synthetic oligonucleotide
aucaggauuccuccaggcu

SEQ ID NO: 1650731 - RNA, 19 nt, Artificial Sequence
  Description of Artificial Sequence: Synthetic oligonucleotide
agcuaguaugucagcaacg

SEQ ID NO: 1650732 - RNA, 19 nt, Artificial Sequence
  Description of Artificial Sequence: Synthetic oligonucleotide
cuacaagaaguuuccuauc

SEQ ID NO: 1650733 - RNA, 19 nt, Artificial Sequence
  Description of Artificial Sequence: Synthetic oligonucleotide
auccggagaaccucugaug

SEQ ID NO: 1650734 - RNA, 19 nt, Artificial Sequence
  Description of Artificial Sequence: Synthetic oligonucleotide
aucguagauggucgccacg

SEQ ID NO: 1650735 - RNA, 19 nt, Artificial Sequence
  Description of Artificial Sequence: Synthetic oligonucleotide
augagcuaguaugucagca

SEQ ID NO: 1650736 - RNA, 19 nt, Artificial Sequence
  Description of Artificial Sequence: Synthetic oligonucleotide
guagguucaaguacgucuc

SEQ ID NO: 1650737 - RNA, 19 nt, Artificial Sequence
  Description of Artificial Sequence: Synthetic oligonucleotide
ugucaucaccaucuaugaa

SEQ ID NO: 1650738 - RNA, 19 nt, Artificial Sequence
  Description of Artificial Sequence: Synthetic oligonucleotide
acacacacacacccaauaa

SEQ ID NO: 1650739 - RNA, 19 nt, Artificial Sequence
  Description of Artificial Sequence: Synthetic oligonucleotide
acagacccguuguugauau

SEQ ID NO: 1650740 - RNA, 19 nt, Artificial Sequence
  Description of Artificial Sequence: Synthetic oligonucleotide
aguaugucagcaacguaga

SEQ ID NO: 1650741 - RNA, 19 nt, Artificial Sequence
  Description of Artificial Sequence: Synthetic oligonucleotide
gcuuaauugucuugagaug

SEQ ID NO: 1650742 - RNA, 19 nt, Artificial Sequence
  Description of Artificial Sequence: Synthetic oligonucleotide
caugagcuaguaugucagc

SEQ ID NO: 1650743 - RNA, 19 nt, Artificial Sequence
  Description of Artificial Sequence: Synthetic oligonucleotide
acacacacacacacacacc

SEQ ID NO: 1650744 - RNA, 19 nt, Artificial Sequence
  Description of Artificial Sequence: Synthetic oligonucleotide
auuccgggugguucacaac

SEQ ID NO: 1650745 - RNA, 19 nt, Artificial Sequence
  Description of Artificial Sequence: Synthetic oligonucleotide
uaucguagauggucgccac

SEQ ID NO: 1650746 - RNA, 19 nt, Artificial Sequence
  Description of Artificial Sequence: Synthetic oligonucleotide
caccagucgccccauggcg

SEQ ID NO: 1650747 - RNA, 19 nt, Artificial Sequence
  Description of Artificial Sequence: Synthetic oligonucleotide
auuagcuauguauguggua

SEQ ID NO: 1650748 - RNA, 19 nt, Artificial Sequence
  Description of Artificial Sequence: Synthetic oligonucleotide
uucugagcgccaggaaccg

SEQ ID NO: 1650749 - RNA, 19 nt, Artificial Sequence
  Description of Artificial Sequence: Synthetic oligonucleotide
uuccauuggcugaaucgaa

SEQ ID NO: 1650750 - RNA, 19 nt, Artificial Sequence
  Description of Artificial Sequence: Synthetic oligonucleotide
uccuaucguagauggucgc

SEQ ID NO: 1650751 - RNA, 19 nt, Artificial Sequence
  Description of Artificial Sequence: Synthetic oligonucleotide
aguacgucuccaaauacuu

SEQ ID NO: 1650752 - RNA, 19 nt, Artificial Sequence
  Description of Artificial Sequence: Synthetic oligonucleotide
acaaagagauaaacugugu

SEQ ID NO: 1650753 - RNA, 19 nt, Artificial Sequence
  Description of Artificial Sequence: Synthetic oligonucleotide
aggcuuuaagucgauuucu

SEQ ID NO: 1650754 - RNA, 19 nt, Artificial Sequence
  Description of Artificial Sequence: Synthetic oligonucleotide
cuucucggauagaauguuc

SEQ ID NO: 1650755 - RNA, 19 nt, Artificial Sequence
  Description of Artificial Sequence: Synthetic oligonucleotide
accuuuaauugaguuagau

SEQ ID NO: 1650756 - RNA, 19 nt, Artificial Sequence
  Description of Artificial Sequence: Synthetic oligonucleotide
gaacaucaauguccucagc

SEQ ID NO: 1650757 - RNA, 19 nt, Artificial Sequence
  Description of Artificial Sequence: Synthetic oligonucleotide
acgguuaaauucccucaga

SEQ ID NO: 1650758 - RNA, 19 nt, Artificial Sequence
  Description of Artificial Sequence: Synthetic oligonucleotide
gugccuacaagaaguuucc

SEQ ID NO: 1650759 - RNA, 19 nt, Artificial Sequence
  Description of Artificial Sequence: Synthetic oligonucleotide
agcuucuggccauuagggu

SEQ ID NO: 1650760 - RNA, 19 nt, Artificial Sequence
  Description of Artificial Sequence: Synthetic oligonucleotide
gcugaaucgaaucccucug

SEQ ID NO: 1650761 - RNA, 19 nt, Artificial Sequence
  Description of Artificial Sequence: Synthetic oligonucleotide
accagucgccccauggcgc

SEQ ID NO: 1650762 - RNA, 19 nt, Artificial Sequence
  Description of Artificial Sequence: Synthetic oligonucleotide
acacacccaauaauaaagu

SEQ ID NO: 1650763 - RNA, 19 nt, Artificial Sequence
  Description of Artificial Sequence: Synthetic oligonucleotide
uuuccaaaacauggauuuc

SEQ ID NO: 1650764 - RNA, 19 nt, Artificial Sequence
  Description of Artificial Sequence: Synthetic oligonucleotide
ucgaagccccagcugacuc

SEQ ID NO: 1650765 - RNA, 19 nt, Artificial Sequence
  Description of Artificial Sequence: Synthetic oligonucleotide
ccucgauuccuuuaaucag

SEQ ID NO: 1650766 - RNA, 19 nt, Artificial Sequence
  Description of Artificial Sequence: Synthetic oligonucleotide
gaaacuugaggcccacacu

SEQ ID NO: 1650767 - RNA, 19 nt, Artificial Sequence
  Description of Artificial Sequence: Synthetic oligonucleotide
acggaacuucccuggagga

SEQ ID NO: 1650768 - RNA, 19 nt, Artificial Sequence
  Description of Artificial Sequence: Synthetic oligonucleotide
aaggaucaauagauaaauu

SEQ ID NO: 1650769 - RNA, 19 nt, Artificial Sequence
  Description of Artificial Sequence: Synthetic oligonucleotide
acaacuuauuguacuugca

SEQ ID NO: 1650770 - RNA, 19 nt, Artificial Sequence
  Description of Artificial Sequence: Synthetic oligonucleotide
gacuguaguaaacaacauu

SEQ ID NO: 1650771 - RNA, 19 nt, Artificial Sequence
  Description of Artificial Sequence: Synthetic oligonucleotide
augguucgggucauacacg

SEQ ID NO: 1650772 - RNA, 19 nt, Artificial Sequence
  Description of Artificial Sequence: Synthetic oligonucleotide
uguaggccuuuccuuugaa

SEQ ID NO: 1650773 - RNA, 19 nt, Artificial Sequence
  Description of Artificial Sequence: Synthetic oligonucleotide
aggccuuuccuuugaaaua

SEQ ID NO: 1650774 - RNA, 19 nt, Artificial Sequence
  Description of Artificial Sequence: Synthetic oligonucleotide
auuccagugcccugggcuu

SEQ ID NO: 1650775 - RNA, 19 nt, Artificial Sequence
  Description of Artificial Sequence: Synthetic oligonucleotide
ucgaaucccucugccacca

SEQ ID NO: 1650776 - RNA, 19 nt, Artificial Sequence
  Description of Artificial Sequence: Synthetic oligonucleotide
guaugucagcaacguagac

SEQ ID NO: 1650777 - RNA, 19 nt, Artificial Sequence
  Description of Artificial Sequence: Synthetic oligonucleotide
ccagcguagguucaaguac

SEQ ID NO: 1650778 - RNA, 19 nt, Artificial Sequence
  Description of Artificial Sequence: Synthetic oligonucleotide
agcaacguagacauacuuu

SEQ ID NO: 1650779 - RNA, 19 nt, Artificial Sequence
  Description of Artificial Sequence: Synthetic oligonucleotide
cuggugcaaagcuguggag

SEQ ID NO: 1650780 - RNA, 19 nt, Artificial Sequence
  Description of Artificial Sequence: Synthetic oligonucleotide
guagauggucgccacggaa

SEQ ID NO: 1650781 - RNA, 19 nt, Artificial Sequence
  Description of Artificial Sequence: Synthetic oligonucleotide
uggauccggagaaccucug

SEQ ID NO: 1650782 - RNA, 19 nt, Artificial Sequence
  Description of Artificial Sequence: Synthetic oligonucleotide
uacaaggcuuucugguaua

SEQ ID NO: 1650783 - RNA, 19 nt, Artificial Sequence
  Description of Artificial Sequence: Synthetic oligonucleotide
uuccuuuaaucagguggca

SEQ ID NO: 1650784 - RNA, 19 nt, Artificial Sequence
  Description of Artificial Sequence: Synthetic oligonucleotide
cuaucguagauggucgcca

SEQ ID NO: 1650785 - RNA, 19 nt, Artificial Sequence
  Description of Artificial Sequence: Synthetic oligonucleotide
uggucgccacggaacuucc

SEQ ID NO: 1650786 - RNA, 19 nt, Artificial Sequence
  Description of Artificial Sequence: Synthetic oligonucleotide
ggaacuucccuggaggaca

SEQ ID NO: 1650787 - RNA, 19 nt, Artificial Sequence
  Description of Artificial Sequence: Synthetic oligonucleotide
uaggucagugcugacgguu

SEQ ID NO: 1650788 - RNA, 19 nt, Artificial Sequence
  Description of Artificial Sequence: Synthetic oligonucleotide
cagauucuacuucucugga

SEQ ID NO: 1650789 - RNA, 19 nt, Artificial Sequence
  Description of Artificial Sequence: Synthetic oligonucleotide
cacacacacacacacccaa

SEQ ID NO: 1650790 - RNA, 19 nt, Artificial Sequence
  Description of Artificial Sequence: Synthetic oligonucleotide
caacuuauuguacuugcau

SEQ ID NO: 1650791 - RNA, 19 nt, Artificial Sequence
  Description of Artificial Sequence: Synthetic oligonucleotide
ggaaggaucaauagauaaa

SEQ ID NO: 1650792 - RNA, 19 nt, Artificial Sequence
  Description of Artificial Sequence: Synthetic oligonucleotide
gcccagcaaacucagugcc

SEQ ID NO: 1650793 - RNA, 19 nt, Artificial Sequence
  Description of Artificial Sequence: Synthetic oligonucleotide
agguucaaguacgucucca

SEQ ID NO: 1650794 - RNA, 19 nt, Artificial Sequence
  Description of Artificial Sequence: Synthetic oligonucleotide
uggcugaaucgaaucccuc

SEQ ID NO: 1650795 - RNA, 19 nt, Artificial Sequence
  Description of Artificial Sequence: Synthetic oligonucleotide
gauccggagaaccucugau

SEQ ID NO: 1650796 - RNA, 19 nt, Artificial Sequence
  Description of Artificial Sequence: Synthetic oligonucleotide
aacuugaggcccacacuaa

SEQ ID NO: 1650797 - RNA, 19 nt, Artificial Sequence
  Description of Artificial Sequence: Synthetic oligonucleotide
aaccuuuaauugaguuaga

SEQ ID NO: 1650798 - RNA, 19 nt, Artificial Sequence
  Description of Artificial Sequence: Synthetic oligonucleotide
ggcuuuaagucgauuucug

SEQ ID NO: 1650799 - RNA, 19 nt, Artificial Sequence
  Description of Artificial Sequence: Synthetic oligonucleotide
ugaauuccgggugguucac

SEQ ID NO: 1650800 - RNA, 19 nt, Artificial Sequence
  Description of Artificial Sequence: Synthetic oligonucleotide
cauacacgaagagcuucug

SEQ ID NO: 1650801 - RNA, 19 nt, Artificial Sequence
  Description of Artificial Sequence: Synthetic oligonucleotide
gcaacguagacauacuuuu

SEQ ID NO: 1650802 - RNA, 19 nt, Artificial Sequence
  Description of Artificial Sequence: Synthetic oligonucleotide
cccgaggaaggaucaauag

SEQ ID NO: 1650803 - RNA, 19 nt, Artificial Sequence
  Description of Artificial Sequence: Synthetic oligonucleotide
cuacagauucuacuucucu

SEQ ID NO: 1650804 - RNA, 19 nt, Artificial Sequence
  Description of Artificial Sequence: Synthetic oligonucleotide
gauggaggaugguucgggu

SEQ ID NO: 1650805 - RNA, 19 nt, Artificial Sequence
  Description of Artificial Sequence: Synthetic oligonucleotide
agaagugggcuggcccaac

SEQ ID NO: 1650806 - RNA, 19 nt, Artificial Sequence
  Description of Artificial Sequence: Synthetic oligonucleotide
cauggcgcgggacccgccc

SEQ ID NO: 1650807 - RNA, 19 nt, Artificial Sequence
  Description of Artificial Sequence: Synthetic oligonucleotide
gcuaaugccaugcggguua

SEQ ID NO: 1650808 - RNA, 19 nt, Artificial Sequence
  Description of Artificial Sequence: Synthetic oligonucleotide
ccauuggcugaaucgaauc

SEQ ID NO: 1650809 - RNA, 19 nt, Artificial Sequence
  Description of Artificial Sequence: Synthetic oligonucleotide
aaccgcucgcccagcagug

SEQ ID NO: 1650810 - RNA, 19 nt, Artificial Sequence
  Description of Artificial Sequence: Synthetic oligonucleotide
uggcaguuuggcaggucua

SEQ ID NO: 1650811 - RNA, 19 nt, Artificial Sequence
  Description of Artificial Sequence: Synthetic oligonucleotide
cacacacacacacccaaua

SEQ ID NO: 1650812 - RNA, 19 nt, Artificial Sequence
  Description of Artificial Sequence: Synthetic oligonucleotide
ccuacaagaaguuuccuau

SEQ ID NO: 1650813 - RNA, 19 nt, Artificial Sequence
  Description of Artificial Sequence: Synthetic oligonucleotide
ccaugcggguuaaaugaag

SEQ ID NO: 1650814 - RNA, 19 nt, Artificial Sequence
  Description of Artificial Sequence: Synthetic oligonucleotide
cagugugcccaacugcaga

SEQ ID NO: 1650815 - RNA, 19 nt, Artificial Sequence
  Description of Artificial Sequence: Synthetic oligonucleotide
ggagcucaugcuuaauugu

SEQ ID NO: 1650816 - RNA, 19 nt, Artificial Sequence
  Description of Artificial Sequence: Synthetic oligonucleotide
uaguggucauugguggcau

SEQ ID NO: 1650817 - RNA, 19 nt, Artificial Sequence
  Description of Artificial Sequence: Synthetic oligonucleotide
ugcuaaugccaugcggguu

SEQ ID NO: 1650818 - RNA, 19 nt, Artificial Sequence
  Description of Artificial Sequence: Synthetic oligonucleotide
gacccguuguugauauaca

SEQ ID NO: 1650819 - RNA, 19 nt, Artificial Sequence
  Description of Artificial Sequence: Synthetic oligonucleotide
ggaggcuuuaagucgauuu

SEQ ID NO: 1650820 - RNA, 19 nt, Artificial Sequence
  Description of Artificial Sequence: Synthetic oligonucleotide
caggauuccuccaggcuua

SEQ ID NO: 1650821 - RNA, 19 nt, Artificial Sequence
  Description of Artificial Sequence: Synthetic oligonucleotide
ugccuacaagaaguuuccu

SEQ ID NO: 1650822 - RNA, 19 nt, Artificial Sequence
  Description of Artificial Sequence: Synthetic oligonucleotide
acacacacacacacacaca

SEQ ID NO: 1650823 - RNA, 19 nt, Artificial Sequence
  Description of Artificial Sequence: Synthetic oligonucleotide
gcccuggaaacuugaggcc

SEQ ID NO: 1650824 - RNA, 19 nt, Artificial Sequence
  Description of Artificial Sequence: Synthetic oligonucleotide
cagaaccuuuaauugaguu

SEQ ID NO: 1650825 - RNA, 19 nt, Artificial Sequence
  Description of Artificial Sequence: Synthetic oligonucleotide
ugcccagcguagguucaag

SEQ ID NO: 1650826 - RNA, 19 nt, Artificial Sequence
  Description of Artificial Sequence: Synthetic oligonucleotide
ucugagcgccaggaaccgc

SEQ ID NO: 1650827 - RNA, 19 nt, Artificial Sequence
  Description of Artificial Sequence: Synthetic oligonucleotide
cuaguaugucagcaacgua

SEQ ID NO: 1650828 - RNA, 19 nt, Artificial Sequence
  Description of Artificial Sequence: Synthetic oligonucleotide
acacacacacacacaccca

SEQ ID NO: 1650829 - RNA, 19 nt, Artificial Sequence
  Description of Artificial Sequence: Synthetic oligonucleotide
accgcucgcccagcagugc

SEQ ID NO: 1650830 - RNA, 19 nt, Artificial Sequence
  Description of Artificial Sequence: Synthetic oligonucleotide
cguagguucaaguacgucu

SEQ ID NO: 1650831 - RNA, 19 nt, Artificial Sequence
  Description of Artificial Sequence: Synthetic oligonucleotide
aggaaccgcucgcccagca

SEQ ID NO: 1650832 - RNA, 19 nt, Artificial Sequence
  Description of Artificial Sequence: Synthetic oligonucleotide
gucgccacggaacuucccu

SEQ ID NO: 1650833 - RNA, 19 nt, Artificial Sequence
  Description of Artificial Sequence: Synthetic oligonucleotide
ccuaucguagauggucgcc

SEQ ID NO: 1650834 - RNA, 19 nt, Artificial Sequence
  Description of Artificial Sequence: Synthetic oligonucleotide
ggcugaaucgaaucccucu

SEQ ID NO: 1650835 - RNA, 19 nt, Artificial Sequence
  Description of Artificial Sequence: Synthetic oligonucleotide
ggaugguucgggucauaca

SEQ ID NO: 1650836 - RNA, 19 nt, Artificial Sequence
  Description of Artificial Sequence: Synthetic oligonucleotide
gacagacccguuguugaua

SEQ ID NO: 1650837 - RNA, 19 nt, Artificial Sequence
  Description of Artificial Sequence: Synthetic oligonucleotide
gucaggugaaauauugauu

SEQ ID NO: 1650838 - RNA, 19 nt, Artificial Sequence
  Description of Artificial Sequence: Synthetic oligonucleotide
ggcaguuuggcaggucuac

SEQ ID NO: 1650839 - RNA, 19 nt, Artificial Sequence
  Description of Artificial Sequence: Synthetic oligonucleotide
gcuuaacuucaucuggacu

SEQ ID NO: 1650840 - RNA, 19 nt, Artificial Sequence
  Description of Artificial Sequence: Synthetic oligonucleotide
cgaggaaggaucaauagau

SEQ ID NO: 1650841 - RNA, 19 nt, Artificial Sequence
  Description of Artificial Sequence: Synthetic oligonucleotide
ccagucgccccauggcgcg

SEQ ID NO: 1650842 - RNA, 19 nt, Artificial Sequence
  Description of Artificial Sequence: Synthetic oligonucleotide
agcguagguucaaguacgu

SEQ ID NO: 1650843 - RNA, 19 nt, Artificial Sequence
  Description of Artificial Sequence: Synthetic oligonucleotide
ccuuuaaucagguggcagu

SEQ ID NO: 1650844 - RNA, 19 nt, Artificial Sequence
  Description of Artificial Sequence: Synthetic oligonucleotide
ccgaggaaggaucaauaga

SEQ ID NO: 1650845 - RNA, 19 nt, Artificial Sequence
  Description of Artificial Sequence: Synthetic oligonucleotide
gcuacaacuuauuguacuu

SEQ ID NO: 1650846 - RNA, 19 nt, Artificial Sequence
  Description of Artificial Sequence: Synthetic oligonucleotide
agucgccccauggcgcggg

SEQ ID NO: 1650847 - RNA, 19 nt, Artificial Sequence
  Description of Artificial Sequence: Synthetic oligonucleotide
gugcuaaugccaugcgggu

SEQ ID NO: 1650848 - RNA, 19 nt, Artificial Sequence
  Description of Artificial Sequence: Synthetic oligonucleotide
gaauuccgggugguucaca

SEQ ID NO: 1650849 - RNA, 19 nt, Artificial Sequence
  Description of Artificial Sequence: Synthetic oligonucleotide
ugucagcaacguagacaua

SEQ ID NO: 1650850 - RNA, 19 nt, Artificial Sequence
  Description of Artificial Sequence: Synthetic oligonucleotide
ggcccaacagcuacgaugu

SEQ ID NO: 1650851 - RNA, 19 nt, Artificial Sequence
  Description of Artificial Sequence: Synthetic oligonucleotide
cuuuaaucagguggcaguu

SEQ ID NO: 1650852 - RNA, 19 nt, Artificial Sequence
  Description of Artificial Sequence: Synthetic oligonucleotide
cuggauccggagaaccucu

SEQ ID NO: 1650853 - RNA, 19 nt, Artificial Sequence
  Description of Artificial Sequence: Synthetic oligonucleotide
ccaccagucgccccauggc

SEQ ID NO: 1650854 - RNA, 19 nt, Artificial Sequence
  Description of Artificial Sequence: Synthetic oligonucleotide
uguccaccagugugcccaa

SEQ ID NO: 1650855 - RNA, 19 nt, Artificial Sequence
  Description of Artificial Sequence: Synthetic oligonucleotide
acccgaggaaggaucaaua

SEQ ID NO: 1650856 - RNA, 19 nt, Artificial Sequence
  Description of Artificial Sequence: Synthetic oligonucleotide
cacuuggaaggagcucaug

SEQ ID NO: 1650857 - RNA, 19 nt, Artificial Sequence
  Description of Artificial Sequence: Synthetic oligonucleotide
acacacacacacacccaau

SEQ ID NO: 1650858 - RNA, 19 nt, Artificial Sequence
  Description of Artificial Sequence: Synthetic oligonucleotide
cggagaaccucugaugaug

SEQ ID NO: 1650859 - RNA, 19 nt, Artificial Sequence
  Description of Artificial Sequence: Synthetic oligonucleotide
ccucagaauuagcaauuca

SEQ ID NO: 1650860 - RNA, 19 nt, Artificial Sequence
  Description of Artificial Sequence: Synthetic oligonucleotide
ggauccggagaaccucuga

SEQ ID NO: 1650861 - RNA, 19 nt, Artificial Sequence
  Description of Artificial Sequence: Synthetic oligonucleotide
accaucuaugaaagugcua

SEQ ID NO: 1650862 - RNA, 19 nt, Artificial Sequence
  Description of Artificial Sequence: Synthetic oligonucleotide
caucuaugaaagugcuaau

SEQ ID NO: 1650863 - RNA, 19 nt, Artificial Sequence
  Description of Artificial Sequence: Synthetic oligonucleotide
gcauagaagugggcuggcc

SEQ ID NO: 1650864 - RNA, 19 nt, Artificial Sequence
  Description of Artificial Sequence: Synthetic oligonucleotide
ccuuuaauugaguuagauu

SEQ ID NO: 1650865 - RNA, 19 nt, Artificial Sequence
  Description of Artificial Sequence: Synthetic oligonucleotide
gcugacucuuaauuccagu

SEQ ID NO: 1650866 - RNA, 19 nt, Artificial Sequence
  Description of Artificial Sequence: Synthetic oligonucleotide
ccacggaacuucccuggag

SEQ ID NO: 1650867 - RNA, 19 nt, Artificial Sequence
  Description of Artificial Sequence: Synthetic oligonucleotide
ggugacagccaacccagau

SEQ ID NO: 1650868 - RNA, 19 nt, Artificial Sequence
  Description of Artificial Sequence: Synthetic oligonucleotide
uugcccagcguagguucaa

SEQ ID NO: 1650869 - RNA, 19 nt, Artificial Sequence
  Description of Artificial Sequence: Synthetic oligonucleotide
gacccgcccgccgucuggc

SEQ ID NO: 1650870 - RNA, 19 nt, Artificial Sequence
  Description of Artificial Sequence: Synthetic oligonucleotide
ggcauagaagugggcuggc

SEQ ID NO: 1650871 - RNA, 19 nt, Artificial Sequence
  Description of Artificial Sequence: Synthetic oligonucleotide
ggcaggucuacagauucua

SEQ ID NO: 1650872 - RNA, 19 nt, Artificial Sequence
  Description of Artificial Sequence: Synthetic oligonucleotide
cagcacccgccucgauucc

SEQ ID NO: 1650873 - RNA, 19 nt, Artificial Sequence
  Description of Artificial Sequence: Synthetic oligonucleotide
gacagccaacccagauguc

SEQ ID NO: 1650874 - RNA, 19 nt, Artificial Sequence
  Description of Artificial Sequence: Synthetic oligonucleotide
cgguuaaauucccucagaa

SEQ ID NO: 1650875 - RNA, 19 nt, Artificial Sequence
  Description of Artificial Sequence: Synthetic oligonucleotide
ggacccgcccgccgucugg

SEQ ID NO: 1650876 - RNA, 19 nt, Artificial Sequence
  Description of Artificial Sequence: Synthetic oligonucleotide
ggauuucaugagcuaguau

SEQ ID NO: 1650877 - RNA, 19 nt, Artificial Sequence
  Description of Artificial Sequence: Synthetic oligonucleotide
caggcuuaucuggugcaaa

SEQ ID NO: 1650878 - RNA, 19 nt, Artificial Sequence
  Description of Artificial Sequence: Synthetic oligonucleotide
acccgccucgauuccuuua

SEQ ID NO: 1650879 - RNA, 19 nt, Artificial Sequence
  Description of Artificial Sequence: Synthetic oligonucleotide
gguauauuccuaggucagu

SEQ ID NO: 1650880 - RNA, 19 nt, Artificial Sequence
  Description of Artificial Sequence: Synthetic oligonucleotide
ccaaaucgaagccccagcu

SEQ ID NO: 1650881 - RNA, 19 nt, Artificial Sequence
  Description of Artificial Sequence: Synthetic oligonucleotide
gucagugcugacgguuaaa

SEQ ID NO: 1650882 - RNA, 19 nt, Artificial Sequence
  Description of Artificial Sequence: Synthetic oligonucleotide
cccguuguugauauacacu

SEQ ID NO: 1650883 - RNA, 19 nt, Artificial Sequence
  Description of Artificial Sequence: Synthetic oligonucleotide
uaaugccaugcggguuaaa

SEQ ID NO: 1650884 - RNA, 19 nt, Artificial Sequence
  Description of Artificial Sequence: Synthetic oligonucleotide
caucagaauuguaggccuu

SEQ ID NO: 1650885 - RNA, 19 nt, Artificial Sequence
  Description of Artificial Sequence: Synthetic oligonucleotide
cccucagaauuagcaauuc

SEQ ID NO: 1650886 - RNA, 19 nt, Artificial Sequence
  Description of Artificial Sequence: Synthetic oligonucleotide
guuuccuaucguagauggu

SEQ ID NO: 1650887 - RNA, 19 nt, Artificial Sequence
  Description of Artificial Sequence: Synthetic oligonucleotide
cccagcguagguucaagua

SEQ ID NO: 1650888 - RNA, 19 nt, Artificial Sequence
  Description of Artificial Sequence: Synthetic oligonucleotide
cuaaugccaugcggguuaa

SEQ ID NO: 1650889 - RNA, 19 nt, Artificial Sequence
  Description of Artificial Sequence: Synthetic oligonucleotide
caucaccaucuaugaaagu

SEQ ID NO: 1650890 - RNA, 19 nt, Artificial Sequence
  Description of Artificial Sequence: Synthetic oligonucleotide
cagcaacguagacauacuu

SEQ ID NO: 1650891 - RNA, 19 nt, Artificial Sequence
  Description of Artificial Sequence: Synthetic oligonucleotide
cgccucgauuccuuuaauc

SEQ ID NO: 1650892 - RNA, 19 nt, Artificial Sequence
  Description of Artificial Sequence: Synthetic oligonucleotide
gcaguuuggcaggucuaca

SEQ ID NO: 1650893 - RNA, 19 nt, Artificial Sequence
  Description of Artificial Sequence: Synthetic oligonucleotide
cucagcacccgccucgauu

SEQ ID NO: 1650894 - RNA, 19 nt, Artificial Sequence
  Description of Artificial Sequence: Synthetic oligonucleotide
cccagcaaacucagugcca

SEQ ID NO: 1650895 - RNA, 19 nt, Artificial Sequence
  Description of Artificial Sequence: Synthetic oligonucleotide
cgauuccuuuaaucaggug

SEQ ID NO: 1650896 - RNA, 19 nt, Artificial Sequence
  Description of Artificial Sequence: Synthetic oligonucleotide
cugagaaauaguggucauu

SEQ ID NO: 1650897 - RNA, 19 nt, Artificial Sequence
  Description of Artificial Sequence: Synthetic oligonucleotide
ccgcucgcccagcagugcc

SEQ ID NO: 1650898 - RNA, 19 nt, Artificial Sequence
  Description of Artificial Sequence: Synthetic oligonucleotide
cagucgccccauggcgcgg

SEQ ID NO: 1650899 - RNA, 19 nt, Artificial Sequence
  Description of Artificial Sequence: Synthetic oligonucleotide
cccgccgucuggcuccggc

SEQ ID NO: 1650900 - RNA, 19 nt, Artificial Sequence
  Description of Artificial Sequence: Synthetic oligonucleotide
gcguagguucaaguacguc

SEQ ID NO: 1650901 - RNA, 19 nt, Artificial Sequence
  Description of Artificial Sequence: Synthetic oligonucleotide
ucgccccauggcgcgggac

SEQ ID NO: 1650902 - RNA, 19 nt, Artificial Sequence
  Description of Artificial Sequence: Synthetic oligonucleotide
ggacuguaguaaacaacau

SEQ ID NO: 1650903 - RNA, 19 nt, Artificial Sequence
  Description of Artificial Sequence: Synthetic oligonucleotide
gccaugcggguuaaaugaa

SEQ ID NO: 1650904 - RNA, 19 nt, Artificial Sequence
  Description of Artificial Sequence: Synthetic oligonucleotide
cccgccucgauuccuuuaa

SEQ ID NO: 1650905 - RNA, 19 nt, Artificial Sequence
  Description of Artificial Sequence: Synthetic oligonucleotide
ggacagacccguuguugau

SEQ ID NO: 1650906 - RNA, 19 nt, Artificial Sequence
  Description of Artificial Sequence: Synthetic oligonucleotide
gcgccaggaaccgcucgcc

SEQ ID NO: 1650907 - RNA, 19 nt, Artificial Sequence
  Description of Artificial Sequence: Synthetic oligonucleotide
gauggucgccacggaacuu

SEQ ID NO: 1650908 - RNA, 19 nt, Artificial Sequence
  Description of Artificial Sequence: Synthetic oligonucleotide
gcagaaccuuuaauugagu

SEQ ID NO: 1650909 - RNA, 19 nt, Artificial Sequence
  Description of Artificial Sequence: Synthetic oligonucleotide
cacccgaggaaggaucaau

SEQ ID NO: 1650910 - RNA, 19 nt, Artificial Sequence
  Description of Artificial Sequence: Synthetic oligonucleotide
gguucacaacaaagagaua

SEQ ID NO: 1650911 - RNA, 19 nt, Artificial Sequence
  Description of Artificial Sequence: Synthetic oligonucleotide
gcugacgguuaaauucccu

SEQ ID NO: 1650912 - RNA, 19 nt, Artificial Sequence
  Description of Artificial Sequence: Synthetic oligonucleotide
cguuguugauauacacugu

SEQ ID NO: 1650913 - RNA, 19 nt, Artificial Sequence
  Description of Artificial Sequence: Synthetic oligonucleotide
ccgucuggcuccggccugg

SEQ ID NO: 1650914 - RNA, 19 nt, Artificial Sequence
  Description of Artificial Sequence: Synthetic oligonucleotide
gguucgggucauacacgaa

SEQ ID NO: 1650915 - RNA, 19 nt, Artificial Sequence
  Description of Artificial Sequence: Synthetic oligonucleotide
aagccccagcugacucuua

SEQ ID NO: 1650916 - RNA, 19 nt, Artificial Sequence
  Description of Artificial Sequence: Synthetic oligonucleotide
cuggaggcuuuaagucgau

SEQ ID NO: 1650917 - RNA, 19 nt, Artificial Sequence
  Description of Artificial Sequence: Synthetic oligonucleotide
gggacccgcccgccgucug

SEQ ID NO: 1650918 - RNA, 19 nt, Artificial Sequence
  Description of Artificial Sequence: Synthetic oligonucleotide
gcccagcguagguucaagu

SEQ ID NO: 1650919 - RNA, 19 nt, Artificial Sequence
  Description of Artificial Sequence: Synthetic oligonucleotide
cagacccguuguugauaua

SEQ ID NO: 1650920 - RNA, 19 nt, Artificial Sequence
  Description of Artificial Sequence: Synthetic oligonucleotide
ccccagcugacucuuaauu

SEQ ID NO: 1650921 - RNA, 19 nt, Artificial Sequence
  Description of Artificial Sequence: Synthetic oligonucleotide
ccgggugguucacaacaaa

SEQ ID NO: 1650922 - RNA, 19 nt, Artificial Sequence
  Description of Artificial Sequence: Synthetic oligonucleotide
gucgccccauggcgcggga

SEQ ID NO: 1650923 - RNA, 19 nt, Artificial Sequence
  Description of Artificial Sequence: Synthetic oligonucleotide
cguagauggucgccacgga

SEQ ID NO: 1650924 - RNA, 19 nt, Artificial Sequence
  Description of Artificial Sequence: Synthetic oligonucleotide
ccaggcuuaucuggugcaa

SEQ ID NO: 1650925 - RNA, 19 nt, Artificial Sequence
  Description of Artificial Sequence: Synthetic oligonucleotide
ggcgcgggacccgcccgcc

SEQ ID NO: 1650926 - RNA, 19 nt, Artificial Sequence
  Description of Artificial Sequence: Synthetic oligonucleotide
cgaaucccucugccaccag

SEQ ID NO: 1650927 - RNA, 19 nt, Artificial Sequence
  Description of Artificial Sequence: Synthetic oligonucleotide
cggauagaauguucuggau

SEQ ID NO: 1650928 - RNA, 19 nt, Artificial Sequence
  Description of Artificial Sequence: Synthetic oligonucleotide
ccggagaaccucugaugau

SEQ ID NO: 1650929 - RNA, 19 nt, Artificial Sequence
  Description of Artificial Sequence: Synthetic oligonucleotide
cgcucgcccagcagugcca

SEQ ID NO: 1650930 - RNA, 19 nt, Artificial Sequence
  Description of Artificial Sequence: Synthetic oligonucleotide
cacccgccucgauuccuuu

SEQ ID NO: 1650931 - RNA, 19 nt, Artificial Sequence
  Description of Artificial Sequence: Synthetic oligonucleotide
cgucuggcuccggccuggc

SEQ ID NO: 1650932 - RNA, 19 nt, Artificial Sequence
  Description of Artificial Sequence: Synthetic oligonucleotide
cgccgucuggcuccggccu

SEQ ID NO: 1650933 - RNA, 19 nt, Artificial Sequence
  Description of Artificial Sequence: Synthetic oligonucleotide
ccgccucgauuccuuuaau

SEQ ID NO: 1650934 - RNA, 19 nt, Artificial Sequence
  Description of Artificial Sequence: Synthetic oligonucleotide
cgcgggacccgcccgccgu

SEQ ID NO: 1650935 - RNA, 19 nt, Artificial Sequence
  Description of Artificial Sequence: Synthetic oligonucleotide
ccucagcacccgccucgau

SEQ ID NO: 1650936 - RNA, 19 nt, Artificial Sequence
  Description of Artificial Sequence: Synthetic oligonucleotide
aauggugagagccagagag

SEQ ID NO: 1650937 - RNA, 19 nt, Artificial Sequence
  Description of Artificial Sequence: Synthetic oligonucleotide
aacaaagagaacuucaagu

SEQ ID NO: 1650938 - RNA, 19 nt, Artificial Sequence
  Description of Artificial Sequence: Synthetic oligonucleotide
aucauuguagaauuuggcc

SEQ ID NO: 1650939 - RNA, 19 nt, Artificial Sequence
  Description of Artificial Sequence: Synthetic oligonucleotide
ugucggaugaauuggaugg

SEQ ID NO: 1650940 - RNA, 19 nt, Artificial Sequence
  Description of Artificial Sequence: Synthetic oligonucleotide
aaagagaacuucaaguugg

SEQ ID NO: 1650941 - RNA, 19 nt, Artificial Sequence
  Description of Artificial Sequence: Synthetic oligonucleotide
ucgaugaaagugcugaggg

SEQ ID NO: 1650942 - RNA, 19 nt, Artificial Sequence
  Description of Artificial Sequence: Synthetic oligonucleotide
uccuccaucaaucacacac

SEQ ID NO: 1650943 - RNA, 19 nt, Artificial Sequence
  Description of Artificial Sequence: Synthetic oligonucleotide
gaguggaguaguuacaagg

SEQ ID NO: 1650944 - RNA, 19 nt, Artificial Sequence
  Description of Artificial Sequence: Synthetic oligonucleotide
aaaagauuucuuaaaaccu

SEQ ID NO: 1650945 - RNA, 19 nt, Artificial Sequence
  Description of Artificial Sequence: Synthetic oligonucleotide
aauaauuugggaggagagg

SEQ ID NO: 1650946 - RNA, 19 nt, Artificial Sequence
  Description of Artificial Sequence: Synthetic oligonucleotide
aauggacagccccaaaguc

SEQ ID NO: 1650947 - RNA, 19 nt, Artificial Sequence
  Description of Artificial Sequence: Synthetic oligonucleotide
ucauuguagaauuuggccu

SEQ ID NO: 1650948 - RNA, 19 nt, Artificial Sequence
  Description of Artificial Sequence: Synthetic oligonucleotide
cucuauaagggcaagcgcc

SEQ ID NO: 1650949 - RNA, 19 nt, Artificial Sequence
  Description of Artificial Sequence: Synthetic oligonucleotide
aaacgcauguuucgguagc

SEQ ID NO: 1650950 - RNA, 19 nt, Artificial Sequence
  Description of Artificial Sequence: Synthetic oligonucleotide
uugaacuccaccaacucug

SEQ ID NO: 1650951 - RNA, 19 nt, Artificial Sequence
  Description of Artificial Sequence: Synthetic oligonucleotide
guuaaagcugccuuccugg

SEQ ID NO: 1650952 - RNA, 19 nt, Artificial Sequence
  Description of Artificial Sequence: Synthetic oligonucleotide
gaauuuggccuucagcagg

SEQ ID NO: 1650953 - RNA, 19 nt, Artificial Sequence
  Description of Artificial Sequence: Synthetic oligonucleotide
agcuacaugacgcagcauc

SEQ ID NO: 1650954 - RNA, 19 nt, Artificial Sequence
  Description of Artificial Sequence: Synthetic oligonucleotide
ugugugaugaggaaacgca

SEQ ID NO: 1650955 - RNA, 19 nt, Artificial Sequence
  Description of Artificial Sequence: Synthetic oligonucleotide
uggaguaguuacaaggaag

SEQ ID NO: 1650956 - RNA, 19 nt, Artificial Sequence
  Description of Artificial Sequence: Synthetic oligonucleotide
aguaguuaaagcugccuuc

SEQ ID NO: 1650957 - RNA, 19 nt, Artificial Sequence
  Description of Artificial Sequence: Synthetic oligonucleotide
acucugguagcccugggcc

SEQ ID NO: 1650958 - RNA, 19 nt, Artificial Sequence
  Description of Artificial Sequence: Synthetic oligonucleotide
aaauaauuugggaggagag

SEQ ID NO: 1650959 - RNA, 19 nt, Artificial Sequence
  Description of Artificial Sequence: Synthetic oligonucleotide
ucaggaaacggcaaguccu

SEQ ID NO: 1650960 - RNA, 19 nt, Artificial Sequence
  Description of Artificial Sequence: Synthetic oligonucleotide
ugaggaaacgcauguuucg

SEQ ID NO: 1650961 - RNA, 19 nt, Artificial Sequence
  Description of Artificial Sequence: Synthetic oligonucleotide
aucaggaaacggcaagucc

SEQ ID NO: 1650962 - RNA, 19 nt, Artificial Sequence
  Description of Artificial Sequence: Synthetic oligonucleotide
agaacacuguccucuaugg

SEQ ID NO: 1650963 - RNA, 19 nt, Artificial Sequence
  Description of Artificial Sequence: Synthetic oligonucleotide
uucagguccucgaugaaag

SEQ ID NO: 1650964 - RNA, 19 nt, Artificial Sequence
  Description of Artificial Sequence: Synthetic oligonucleotide
aacucugguagcccugggc

SEQ ID NO: 1650965 - RNA, 19 nt, Artificial Sequence
  Description of Artificial Sequence: Synthetic oligonucleotide
gaggaaagcugccuggugg

SEQ ID NO: 1650966 - RNA, 19 nt, Artificial Sequence
  Description of Artificial Sequence: Synthetic oligonucleotide
agggaaaaugaacuugaac

SEQ ID NO: 1650967 - RNA, 19 nt, Artificial Sequence
  Description of Artificial Sequence: Synthetic oligonucleotide
uguugauggccccacggcg

SEQ ID NO: 1650968 - RNA, 19 nt, Artificial Sequence
  Description of Artificial Sequence: Synthetic oligonucleotide
ugcacagccacgcagcugc

SEQ ID NO: 1650969 - RNA, 19 nt, Artificial Sequence
  Description of Artificial Sequence: Synthetic oligonucleotide
cucagcaacagcauccacg

SEQ ID NO: 1650970 - RNA, 19 nt, Artificial Sequence
  Description of Artificial Sequence: Synthetic oligonucleotide
aagccugccacacagugca

SEQ ID NO: 1650971 - RNA, 19 nt, Artificial Sequence
  Description of Artificial Sequence: Synthetic oligonucleotide
agugugugggucuuugaac

SEQ ID NO: 1650972 - RNA, 19 nt, Artificial Sequence
  Description of Artificial Sequence: Synthetic oligonucleotide
aauuuggccuucagcaggc

SEQ ID NO: 1650973 - RNA, 19 nt, Artificial Sequence
  Description of Artificial Sequence: Synthetic oligonucleotide
auaauuugggaggagagga

SEQ ID NO: 1650974 - RNA, 19 nt, Artificial Sequence
  Description of Artificial Sequence: Synthetic oligonucleotide
ucuauggggucguugcugg

SEQ ID NO: 1650975 - RNA, 19 nt, Artificial Sequence
  Description of Artificial Sequence: Synthetic oligonucleotide
ggucacuucacacacacgc

SEQ ID NO: 1650976 - RNA, 19 nt, Artificial Sequence
  Description of Artificial Sequence: Synthetic oligonucleotide
gaggggaccagccagcaag

SEQ ID NO: 1650977 - RNA, 19 nt, Artificial Sequence
  Description of Artificial Sequence: Synthetic oligonucleotide
aaagggccaguccacaaca

SEQ ID NO: 1650978 - RNA, 19 nt, Artificial Sequence
  Description of Artificial Sequence: Synthetic oligonucleotide
ucacguuaccccaucagga

SEQ ID NO: 1650979 - RNA, 19 nt, Artificial Sequence
  Description of Artificial Sequence: Synthetic oligonucleotide
auccucauacuucaucccg

SEQ ID NO: 1650980 - RNA, 19 nt, Artificial Sequence
  Description of Artificial Sequence: Synthetic oligonucleotide
gaaacggcaaguccuggag

SEQ ID NO: 1650981 - RNA, 19 nt, Artificial Sequence
  Description of Artificial Sequence: Synthetic oligonucleotide
caguaaaauggacagcccc

SEQ ID NO: 1650982 - RNA, 19 nt, Artificial Sequence
  Description of Artificial Sequence: Synthetic oligonucleotide
ucucuauaagggcaagcgc

SEQ ID NO: 1650983 - RNA, 19 nt, Artificial Sequence
  Description of Artificial Sequence: Synthetic oligonucleotide
gaagaguccccuuugcuca

SEQ ID NO: 1650984 - RNA, 19 nt, Artificial Sequence
  Description of Artificial Sequence: Synthetic oligonucleotide
caaagagaacuucaaguug

SEQ ID NO: 1650985 - RNA, 19 nt, Artificial Sequence
  Description of Artificial Sequence: Synthetic oligonucleotide
uaccccaucaggaaacggc

SEQ ID NO: 1650986 - RNA, 19 nt, Artificial Sequence
  Description of Artificial Sequence: Synthetic oligonucleotide
guagaauuuggccuucagc

SEQ ID NO: 1650987 - RNA, 19 nt, Artificial Sequence
  Description of Artificial Sequence: Synthetic oligonucleotide
ugagcuacaugacgcagca

SEQ ID NO: 1650988 - RNA, 19 nt, Artificial Sequence
  Description of Artificial Sequence: Synthetic oligonucleotide
uaggucacuucacacacac

SEQ ID NO: 1650989 - RNA, 19 nt, Artificial Sequence
  Description of Artificial Sequence: Synthetic oligonucleotide
gaaacgcauguuucgguag

SEQ ID NO: 1650990 - RNA, 19 nt, Artificial Sequence
  Description of Artificial Sequence: Synthetic oligonucleotide
gaucauuguagaauuuggc

SEQ ID NO: 1650991 - RNA, 19 nt, Artificial Sequence
  Description of Artificial Sequence: Synthetic oligonucleotide
uccaucaaucacacacugg

SEQ ID NO: 1650992 - RNA, 19 nt, Artificial Sequence
  Description of Artificial Sequence: Synthetic oligonucleotide
uccagugagauccccgugc

SEQ ID NO: 1650993 - RNA, 19 nt, Artificial Sequence
  Description of Artificial Sequence: Synthetic oligonucleotide
aaagauuucuuaaaaccuu

SEQ ID NO: 1650994 - RNA, 19 nt, Artificial Sequence
  Description of Artificial Sequence: Synthetic oligonucleotide
auggacagccccaaagucc

SEQ ID NO: 1650995 - RNA, 19 nt, Artificial Sequence
  Description of Artificial Sequence: Synthetic oligonucleotide
gucacguuaccccaucagg

SEQ ID NO: 1650996 - RNA, 19 nt, Artificial Sequence
  Description of Artificial Sequence: Synthetic oligonucleotide
uguagaauuuggccuucag

SEQ ID NO: 1650997 - RNA, 19 nt, Artificial Sequence
  Description of Artificial Sequence: Synthetic oligonucleotide
cuugucauaggucacuuca

SEQ ID NO: 1650998 - RNA, 19 nt, Artificial Sequence
  Description of Artificial Sequence: Synthetic oligonucleotide
uccucuauggggucguugc

SEQ ID NO: 1650999 - RNA, 19 nt, Artificial Sequence
  Description of Artificial Sequence: Synthetic oligonucleotide
uccucgaugaaagugcuga

SEQ ID NO: 1651000 - RNA, 19 nt, Artificial Sequence
  Description of Artificial Sequence: Synthetic oligonucleotide
ucacuucacacacacgcac

SEQ ID NO: 1651001 - RNA, 19 nt, Artificial Sequence
  Description of Artificial Sequence: Synthetic oligonucleotide
aguuaaagcugccuuccug

SEQ ID NO: 1651002 - RNA, 19 nt, Artificial Sequence
  Description of Artificial Sequence: Synthetic oligonucleotide
aguuggugacucuggcugc

SEQ ID NO: 1651003 - RNA, 19 nt, Artificial Sequence
  Description of Artificial Sequence: Synthetic oligonucleotide
uugugcaaauaauuuggga

SEQ ID NO: 1651004 - RNA, 19 nt, Artificial Sequence
  Description of Artificial Sequence: Synthetic oligonucleotide
gugucugucacguuacccc

SEQ ID NO: 1651005 - RNA, 19 nt, Artificial Sequence
  Description of Artificial Sequence: Synthetic oligonucleotide
ugucacguuaccccaucag

SEQ ID NO: 1651006 - RNA, 19 nt, Artificial Sequence
  Description of Artificial Sequence: Synthetic oligonucleotide
ugcaaauaauuugggagga

SEQ ID NO: 1651007 - RNA, 19 nt, Artificial Sequence
  Description of Artificial Sequence: Synthetic oligonucleotide
agugagauccccgugcuug

SEQ ID NO: 1651008 - RNA, 19 nt, Artificial Sequence
  Description of Artificial Sequence: Synthetic oligonucleotide
uccucauacuucaucccgc

SEQ ID NO: 1651009 - RNA, 19 nt, Artificial Sequence
  Description of Artificial Sequence: Synthetic oligonucleotide
auugugcaaauaauuuggg

SEQ ID NO: 1651010 - RNA, 19 nt, Artificial Sequence
  Description of Artificial Sequence: Synthetic oligonucleotide
cuuaaaaccuuguccccac

SEQ ID NO: 1651011 - RNA, 19 nt, Artificial Sequence
  Description of Artificial Sequence: Synthetic oligonucleotide
gaacacuguccucuauggg

SEQ ID NO: 1651012 - RNA, 19 nt, Artificial Sequence
  Description of Artificial Sequence: Synthetic oligonucleotide
guaguuaaagcugccuucc

SEQ ID NO: 1651013 - RNA, 19 nt, Artificial Sequence
  Description of Artificial Sequence: Synthetic oligonucleotide
cacacacgcaccacggugg

SEQ ID NO: 1651014 - RNA, 19 nt, Artificial Sequence
  Description of Artificial Sequence: Synthetic oligonucleotide
gaacuugaacuccaccaac

SEQ ID NO: 1651015 - RNA, 19 nt, Artificial Sequence
  Description of Artificial Sequence: Synthetic oligonucleotide
uggugguugauaauuccaa

SEQ ID NO: 1651016 - RNA, 19 nt, Artificial Sequence
  Description of Artificial Sequence: Synthetic oligonucleotide
aauuugggaggagaggaaa

SEQ ID NO: 1651017 - RNA, 19 nt, Artificial Sequence
  Description of Artificial Sequence: Synthetic oligonucleotide
acacagugcacagccacgc

SEQ ID NO: 1651018 - RNA, 19 nt, Artificial Sequence
  Description of Artificial Sequence: Synthetic oligonucleotide
aacuugaacuccaccaacu

SEQ ID NO: 1651019 - RNA, 19 nt, Artificial Sequence
  Description of Artificial Sequence: Synthetic oligonucleotide
caaggccugagcuacauga

SEQ ID NO: 1651020 - RNA, 19 nt, Artificial Sequence
  Description of Artificial Sequence: Synthetic oligonucleotide
aaacggcaaguccuggaga

SEQ ID NO: 1651021 - RNA, 19 nt, Artificial Sequence
  Description of Artificial Sequence: Synthetic oligonucleotide
aguaaaauggacagcccca

SEQ ID NO: 1651022 - RNA, 19 nt, Artificial Sequence
  Description of Artificial Sequence: Synthetic oligonucleotide
uauggggucguugcugggg

SEQ ID NO: 1651023 - RNA, 19 nt, Artificial Sequence
  Description of Artificial Sequence: Synthetic oligonucleotide
aggccugagcuacaugacg

SEQ ID NO: 1651024 - RNA, 19 nt, Artificial Sequence
  Description of Artificial Sequence: Synthetic oligonucleotide
uguugggaacagcaguagu

SEQ ID NO: 1651025 - RNA, 19 nt, Artificial Sequence
  Description of Artificial Sequence: Synthetic oligonucleotide
ugaauuggauggcauccuc

SEQ ID NO: 1651026 - RNA, 19 nt, Artificial Sequence
  Description of Artificial Sequence: Synthetic oligonucleotide
ucuuugaaccgcagucucu

SEQ ID NO: 1651027 - RNA, 19 nt, Artificial Sequence
  Description of Artificial Sequence: Synthetic oligonucleotide
ugucugucacguuacccca

SEQ ID NO: 1651028 - RNA, 19 nt, Artificial Sequence
  Description of Artificial Sequence: Synthetic oligonucleotide
acacacacgcaccacggug

SEQ ID NO: 1651029 - RNA, 19 nt, Artificial Sequence
  Description of Artificial Sequence: Synthetic oligonucleotide
gucauaggucacuucacac

SEQ ID NO: 1651030 - RNA, 19 nt, Artificial Sequence
  Description of Artificial Sequence: Synthetic oligonucleotide
ggaacagcaguaguuaaag

SEQ ID NO: 1651031 - RNA, 19 nt, Artificial Sequence
  Description of Artificial Sequence: Synthetic oligonucleotide
uugucauaggucacuucac

SEQ ID NO: 1651032 - RNA, 19 nt, Artificial Sequence
  Description of Artificial Sequence: Synthetic oligonucleotide
cucgaugaaagugcugagg

SEQ ID NO: 1651033 - RNA, 19 nt, Artificial Sequence
  Description of Artificial Sequence: Synthetic oligonucleotide
uugaaccgcagucucugcu

SEQ ID NO: 1651034 - RNA, 19 nt, Artificial Sequence
  Description of Artificial Sequence: Synthetic oligonucleotide
uggucuugugagugugugg

SEQ ID NO: 1651035 - RNA, 19 nt, Artificial Sequence
  Description of Artificial Sequence: Synthetic oligonucleotide
cacgauguugggaacagca

SEQ ID NO: 1651036 - RNA, 19 nt, Artificial Sequence
  Description of Artificial Sequence: Synthetic oligonucleotide
agaguggaguaguuacaag

SEQ ID NO: 1651037 - RNA, 19 nt, Artificial Sequence
  Description of Artificial Sequence: Synthetic oligonucleotide
cacaacagugaugccaucc

SEQ ID NO: 1651038 - RNA, 19 nt, Artificial Sequence
  Description of Artificial Sequence: Synthetic oligonucleotide
ugcuggccgguucaugcgg

SEQ ID NO: 1651039 - RNA, 19 nt, Artificial Sequence
  Description of Artificial Sequence: Synthetic oligonucleotide
aaguccagugagauccccg

SEQ ID NO: 1651040 - RNA, 19 nt, Artificial Sequence
  Description of Artificial Sequence: Synthetic oligonucleotide
aguggaguaguuacaagga

SEQ ID NO: 1651041 - RNA, 19 nt, Artificial Sequence
  Description of Artificial Sequence: Synthetic oligonucleotide
acacgcaccacggugguag

SEQ ID NO: 1651042 - RNA, 19 nt, Artificial Sequence
  Description of Artificial Sequence: Synthetic oligonucleotide
cuuugaaccgcagucucug

SEQ ID NO: 1651043 - RNA, 19 nt, Artificial Sequence
  Description of Artificial Sequence: Synthetic oligonucleotide
aaucacacacuggucuuca

SEQ ID NO: 1651044 - RNA, 19 nt, Artificial Sequence
  Description of Artificial Sequence: Synthetic oligonucleotide
cccaguaaaauggacagcc

SEQ ID NO: 1651045 - RNA, 19 nt, Artificial Sequence
  Description of Artificial Sequence: Synthetic oligonucleotide
aaggccugagcuacaugac

SEQ ID NO: 1651046 - RNA, 19 nt, Artificial Sequence
  Description of Artificial Sequence: Synthetic oligonucleotide
cuuaggccgguacuucucc

SEQ ID NO: 1651047 - RNA, 19 nt, Artificial Sequence
  Description of Artificial Sequence: Synthetic oligonucleotide
cacuucacacacacgcacc

SEQ ID NO: 1651048 - RNA, 19 nt, Artificial Sequence
  Description of Artificial Sequence: Synthetic oligonucleotide
ugagagccagagaggcacg

SEQ ID NO: 1651049 - RNA, 19 nt, Artificial Sequence
  Description of Artificial Sequence: Synthetic oligonucleotide
uuaaaaccuuguccccaca

SEQ ID NO: 1651050 - RNA, 19 nt, Artificial Sequence
  Description of Artificial Sequence: Synthetic oligonucleotide
agaggcacgggccuccuca

SEQ ID NO: 1651051 - RNA, 19 nt, Artificial Sequence
  Description of Artificial Sequence: Synthetic oligonucleotide
ucaaucacacacuggucuu

SEQ ID NO: 1651052 - RNA, 19 nt, Artificial Sequence
  Description of Artificial Sequence: Synthetic oligonucleotide
guuacaaggaagugaaaau

SEQ ID NO: 1651053 - RNA, 19 nt, Artificial Sequence
  Description of Artificial Sequence: Synthetic oligonucleotide
ugcuugcuguugauggccc

SEQ ID NO: 1651054 - RNA, 19 nt, Artificial Sequence
  Description of Artificial Sequence: Synthetic oligonucleotide
aguccagugagauccccgu

SEQ ID NO: 1651055 - RNA, 19 nt, Artificial Sequence
  Description of Artificial Sequence: Synthetic oligonucleotide
auuguagaauuuggccuuc

SEQ ID NO: 1651056 - RNA, 19 nt, Artificial Sequence
  Description of Artificial Sequence: Synthetic oligonucleotide
cuguugauggccccacggc

SEQ ID NO: 1651057 - RNA, 19 nt, Artificial Sequence
  Description of Artificial Sequence: Synthetic oligonucleotide
augacgcagcaucuggucu

SEQ ID NO: 1651058 - RNA, 19 nt, Artificial Sequence
  Description of Artificial Sequence: Synthetic oligonucleotide
agcaguaguuaaagcugcc

SEQ ID NO: 1651059 - RNA, 19 nt, Artificial Sequence
  Description of Artificial Sequence: Synthetic oligonucleotide
aggaaagcugccugguggu

SEQ ID NO: 1651060 - RNA, 19 nt, Artificial Sequence
  Description of Artificial Sequence: Synthetic oligonucleotide
aggaaacgcauguuucggu

SEQ ID NO: 1651061 - RNA, 19 nt, Artificial Sequence
  Description of Artificial Sequence: Synthetic oligonucleotide
uuugaaccgcagucucugc

SEQ ID NO: 1651062 - RNA, 19 nt, Artificial Sequence
  Description of Artificial Sequence: Synthetic oligonucleotide
ugucucucagaguggagua

SEQ ID NO: 1651063 - RNA, 19 nt, Artificial Sequence
  Description of Artificial Sequence: Synthetic oligonucleotide
uugggaacagcaguaguua

SEQ ID NO: 1651064 - RNA, 19 nt, Artificial Sequence
  Description of Artificial Sequence: Synthetic oligonucleotide
cauguuucgguagcucacc

SEQ ID NO: 1651065 - RNA, 19 nt, Artificial Sequence
  Description of Artificial Sequence: Synthetic oligonucleotide
auaagggcaagcgccacga

SEQ ID NO: 1651066 - RNA, 19 nt, Artificial Sequence
  Description of Artificial Sequence: Synthetic oligonucleotide
caugacgcagcaucugguc

SEQ ID NO: 1651067 - RNA, 19 nt, Artificial Sequence
  Description of Artificial Sequence: Synthetic oligonucleotide
uagcucaccuccacaggug

SEQ ID NO: 1651068 - RNA, 19 nt, Artificial Sequence
  Description of Artificial Sequence: Synthetic oligonucleotide
uaguuaaagcugccuuccu

SEQ ID NO: 1651069 - RNA, 19 nt, Artificial Sequence
  Description of Artificial Sequence: Synthetic oligonucleotide
ucucucagaguggaguagu

SEQ ID NO: 1651070 - RNA, 19 nt, Artificial Sequence
  Description of Artificial Sequence: Synthetic oligonucleotide
uacuucaucccgcucucua

SEQ ID NO: 1651071 - RNA, 19 nt, Artificial Sequence
  Description of Artificial Sequence: Synthetic oligonucleotide
acaccccgcacaaauauug

SEQ ID NO: 1651072 - RNA, 19 nt, Artificial Sequence
  Description of Artificial Sequence: Synthetic oligonucleotide
ggggucuugucauagguca

SEQ ID NO: 1651073 - RNA, 19 nt, Artificial Sequence
  Description of Artificial Sequence: Synthetic oligonucleotide
aguccccuuugcucagagc

SEQ ID NO: 1651074 - RNA, 19 nt, Artificial Sequence
  Description of Artificial Sequence: Synthetic oligonucleotide
gaauuggauggcauccuca

SEQ ID NO: 1651075 - RNA, 19 nt, Artificial Sequence
  Description of Artificial Sequence: Synthetic oligonucleotide
aaccgcagucucugcuuag

SEQ ID NO: 1651076 - RNA, 19 nt, Artificial Sequence
  Description of Artificial Sequence: Synthetic oligonucleotide
ugcauggguggauggagaa

SEQ ID NO: 1651077 - RNA, 19 nt, Artificial Sequence
  Description of Artificial Sequence: Synthetic oligonucleotide
ucugucacguuaccccauc

SEQ ID NO: 1651078 - RNA, 19 nt, Artificial Sequence
  Description of Artificial Sequence: Synthetic oligonucleotide
uucaugcgggccaugccuc

SEQ ID NO: 1651079 - RNA, 19 nt, Artificial Sequence
  Description of Artificial Sequence: Synthetic oligonucleotide
ucggaugaauuggauggca

SEQ ID NO: 1651080 - RNA, 19 nt, Artificial Sequence
  Description of Artificial Sequence: Synthetic oligonucleotide
guaggugagcugcuugcug

SEQ ID NO: 1651081 - RNA, 19 nt, Artificial Sequence
  Description of Artificial Sequence: Synthetic oligonucleotide
cuggcugcagaacacuguc

SEQ ID NO: 1651082 - RNA, 19 nt, Artificial Sequence
  Description of Artificial Sequence: Synthetic oligonucleotide
uuaccccaucaggaaacgg

SEQ ID NO: 1651083 - RNA, 19 nt, Artificial Sequence
  Description of Artificial Sequence: Synthetic oligonucleotide
auggagaagaguccccuuu

SEQ ID NO: 1651084 - RNA, 19 nt, Artificial Sequence
  Description of Artificial Sequence: Synthetic oligonucleotide
cuggugguugauaauucca

SEQ ID NO: 1651085 - RNA, 19 nt, Artificial Sequence
  Description of Artificial Sequence: Synthetic oligonucleotide
caggaaacggcaaguccug

SEQ ID NO: 1651086 - RNA, 19 nt, Artificial Sequence
  Description of Artificial Sequence: Synthetic oligonucleotide
ugggaacagcaguaguuaa

SEQ ID NO: 1651087 - RNA, 19 nt, Artificial Sequence
  Description of Artificial Sequence: Synthetic oligonucleotide
gucuuugaaccgcagucuc

SEQ ID NO: 1651088 - RNA, 19 nt, Artificial Sequence
  Description of Artificial Sequence: Synthetic oligonucleotide
uucaucccgcucucuauaa

SEQ ID NO: 1651089 - RNA, 19 nt, Artificial Sequence
  Description of Artificial Sequence: Synthetic oligonucleotide
aagagaacuucaaguuggu

SEQ ID NO: 1651090 - RNA, 19 nt, Artificial Sequence
  Description of Artificial Sequence: Synthetic oligonucleotide
aucccgcucucuauaaggg

SEQ ID NO: 1651091 - RNA, 19 nt, Artificial Sequence
  Description of Artificial Sequence: Synthetic oligonucleotide
ugcuguugauggccccacg

SEQ ID NO: 1651092 - RNA, 19 nt, Artificial Sequence
  Description of Artificial Sequence: Synthetic oligonucleotide
uuucgguagcucaccucca

SEQ ID NO: 1651093 - RNA, 19 nt, Artificial Sequence
  Description of Artificial Sequence: Synthetic oligonucleotide
accccgcacaaauauugug

SEQ ID NO: 1651094 - RNA, 19 nt, Artificial Sequence
  Description of Artificial Sequence: Synthetic oligonucleotide
ugauccggggugucuguca

SEQ ID NO: 1651095 - RNA, 19 nt, Artificial Sequence
  Description of Artificial Sequence: Synthetic oligonucleotide
cacggugguagccccauac

SEQ ID NO: 1651096 - RNA, 19 nt, Artificial Sequence
  Description of Artificial Sequence: Synthetic oligonucleotide
ucccgcucucuauaagggc

SEQ ID NO: 1651097 - RNA, 19 nt, Artificial Sequence
  Description of Artificial Sequence: Synthetic oligonucleotide
guuaccccaucaggaaacg

SEQ ID NO: 1651098 - RNA, 19 nt, Artificial Sequence
  Description of Artificial Sequence: Synthetic oligonucleotide
ucuggucuugugagugugu

SEQ ID NO: 1651099 - RNA, 19 nt, Artificial Sequence
  Description of Artificial Sequence: Synthetic oligonucleotide
ucgguagcucaccuccaca

SEQ ID NO: 1651100 - RNA, 19 nt, Artificial Sequence
  Description of Artificial Sequence: Synthetic oligonucleotide
uguuucgguagcucaccuc

SEQ ID NO: 1651101 - RNA, 19 nt, Artificial Sequence
  Description of Artificial Sequence: Synthetic oligonucleotide
gggucuuugaaccgcaguc

SEQ ID NO: 1651102 - RNA, 19 nt, Artificial Sequence
  Description of Artificial Sequence: Synthetic oligonucleotide
ugaaccgcagucucugcuu

SEQ ID NO: 1651103 - RNA, 19 nt, Artificial Sequence
  Description of Artificial Sequence: Synthetic oligonucleotide
aacgcauguuucgguagcu

SEQ ID NO: 1651104 - RNA, 19 nt, Artificial Sequence
  Description of Artificial Sequence: Synthetic oligonucleotide
gcaauggugagagccagag

SEQ ID NO: 1651105 - RNA, 19 nt, Artificial Sequence
  Description of Artificial Sequence: Synthetic oligonucleotide
gauccggggugucugucac

SEQ ID NO: 1651106 - RNA, 19 nt, Artificial Sequence
  Description of Artificial Sequence: Synthetic oligonucleotide
aggcaggcagccucugauc

SEQ ID NO: 1651107 - RNA, 19 nt, Artificial Sequence
  Description of Artificial Sequence: Synthetic oligonucleotide
gguagcucaccuccacagg

SEQ ID NO: 1651108 - RNA, 19 nt, Artificial Sequence
  Description of Artificial Sequence: Synthetic oligonucleotide
gucguugcuggggacaccc

SEQ ID NO: 1651109 - RNA, 19 nt, Artificial Sequence
  Description of Artificial Sequence: Synthetic oligonucleotide
ccccgcacaaauauugugc

SEQ ID NO: 1651110 - RNA, 19 nt, Artificial Sequence
  Description of Artificial Sequence: Synthetic oligonucleotide
acuucaaguuggugacucu

SEQ ID NO: 1651111 - RNA, 19 nt, Artificial Sequence
  Description of Artificial Sequence: Synthetic oligonucleotide
auguuucgguagcucaccu

SEQ ID NO: 1651112 - RNA, 19 nt, Artificial Sequence
  Description of Artificial Sequence: Synthetic oligonucleotide
agcaucuggucuugugagu

SEQ ID NO: 1651113 - RNA, 19 nt, Artificial Sequence
  Description of Artificial Sequence: Synthetic oligonucleotide
aggccauugggaggcaagg

SEQ ID NO: 1651114 - RNA, 19 nt, Artificial Sequence
  Description of Artificial Sequence: Synthetic oligonucleotide
ugacgcagcaucuggucuu

SEQ ID NO: 1651115 - RNA, 19 nt, Artificial Sequence
  Description of Artificial Sequence: Synthetic oligonucleotide
augaauuggauggcauccu

SEQ ID NO: 1651116 - RNA, 19 nt, Artificial Sequence
  Description of Artificial Sequence: Synthetic oligonucleotide
guugugugugaugaggaaa

SEQ ID NO: 1651117 - RNA, 19 nt, Artificial Sequence
  Description of Artificial Sequence: Synthetic oligonucleotide
acgauguugggaacagcag

SEQ ID NO: 1651118 - RNA, 19 nt, Artificial Sequence
  Description of Artificial Sequence: Synthetic oligonucleotide
gaguccccuuugcucagag

SEQ ID NO: 1651119 - RNA, 19 nt, Artificial Sequence
  Description of Artificial Sequence: Synthetic oligonucleotide
acguuaccccaucaggaaa

SEQ ID NO: 1651120 - RNA, 19 nt, Artificial Sequence
  Description of Artificial Sequence: Synthetic oligonucleotide
cucuauggggucguugcug

SEQ ID NO: 1651121 - RNA, 19 nt, Artificial Sequence
  Description of Artificial Sequence: Synthetic oligonucleotide
aucuggucuugugagugug

SEQ ID NO: 1651122 - RNA, 19 nt, Artificial Sequence
  Description of Artificial Sequence: Synthetic oligonucleotide
agcgccacgagcacuggag

SEQ ID NO: 1651123 - RNA, 19 nt, Artificial Sequence
  Description of Artificial Sequence: Synthetic oligonucleotide
uccggggugucugucacgu

SEQ ID NO: 1651124 - RNA, 19 nt, Artificial Sequence
  Description of Artificial Sequence: Synthetic oligonucleotide
gaggccauugggaggcaag

SEQ ID NO: 1651125 - RNA, 19 nt, Artificial Sequence
  Description of Artificial Sequence: Synthetic oligonucleotide
guggaguaguuacaaggaa

SEQ ID NO: 1651126 - RNA, 19 nt, Artificial Sequence
  Description of Artificial Sequence: Synthetic oligonucleotide
cagguaggugagcugcuug

SEQ ID NO: 1651127 - RNA, 19 nt, Artificial Sequence
  Description of Artificial Sequence: Synthetic oligonucleotide
guucaugcgggccaugccu

SEQ ID NO: 1651128 - RNA, 19 nt, Artificial Sequence
  Description of Artificial Sequence: Synthetic oligonucleotide
auggggucguugcugggga

SEQ ID NO: 1651129 - RNA, 19 nt, Artificial Sequence
  Description of Artificial Sequence: Synthetic oligonucleotide
guagcucaccuccacaggu

SEQ ID NO: 1651130 - RNA, 19 nt, Artificial Sequence
  Description of Artificial Sequence: Synthetic oligonucleotide
cuggucuugugagugugug

SEQ ID NO: 1651131 - RNA, 19 nt, Artificial Sequence
  Description of Artificial Sequence: Synthetic oligonucleotide
ucaugcgggccaugccucc

SEQ ID NO: 1651132 - RNA, 19 nt, Artificial Sequence
  Description of Artificial Sequence: Synthetic oligonucleotide
caucaggaaacggcaaguc

SEQ ID NO: 1651133 - RNA, 19 nt, Artificial Sequence
  Description of Artificial Sequence: Synthetic oligonucleotide
ccagcacucaagaccaaag

SEQ ID NO: 1651134 - RNA, 19 nt, Artificial Sequence
  Description of Artificial Sequence: Synthetic oligonucleotide
ucugauccggggugucugu

SEQ ID NO: 1651135 - RNA, 19 nt, Artificial Sequence
  Description of Artificial Sequence: Synthetic oligonucleotide
agggccaguccacaacagu

SEQ ID NO: 1651136 - RNA, 19 nt, Artificial Sequence
  Description of Artificial Sequence: Synthetic oligonucleotide
gacacccucucugcauggg

SEQ ID NO: 1651137 - RNA, 19 nt, Artificial Sequence
  Description of Artificial Sequence: Synthetic oligonucleotide
gugcuggccgguucaugcg

SEQ ID NO: 1651138 - RNA, 19 nt, Artificial Sequence
  Description of Artificial Sequence: Synthetic oligonucleotide
gagaagaguccccuuugcu

SEQ ID NO: 1651139 - RNA, 19 nt, Artificial Sequence
  Description of Artificial Sequence: Synthetic oligonucleotide
aggaaacggcaaguccugg

SEQ ID NO: 1651140 - RNA, 19 nt, Artificial Sequence
  Description of Artificial Sequence: Synthetic oligonucleotide
aggcaagggcaauggugag

SEQ ID NO: 1651141 - RNA, 19 nt, Artificial Sequence
  Description of Artificial Sequence: Synthetic oligonucleotide
cauuguagaauuuggccuu

SEQ ID NO: 1651142 - RNA, 19 nt, Artificial Sequence
  Description of Artificial Sequence: Synthetic oligonucleotide
acggcguuucugucggaug

SEQ ID NO: 1651143 - RNA, 19 nt, Artificial Sequence
  Description of Artificial Sequence: Synthetic oligonucleotide
cuauggggucguugcuggg

SEQ ID NO: 1651144 - RNA, 19 nt, Artificial Sequence
  Description of Artificial Sequence: Synthetic oligonucleotide
acggugguagccccauacu

SEQ ID NO: 1651145 - RNA, 19 nt, Artificial Sequence
  Description of Artificial Sequence: Synthetic oligonucleotide
cuacaugacgcagcaucug

SEQ ID NO: 1651146 - RNA, 19 nt, Artificial Sequence
  Description of Artificial Sequence: Synthetic oligonucleotide
uuguagaauuuggccuuca

SEQ ID NO: 1651147 - RNA, 19 nt, Artificial Sequence
  Description of Artificial Sequence: Synthetic oligonucleotide
gcaucuggucuugugagug

SEQ ID NO: 1651148 - RNA, 19 nt, Artificial Sequence
  Description of Artificial Sequence: Synthetic oligonucleotide
gucucucagaguggaguag

SEQ ID NO: 1651149 - RNA, 19 nt, Artificial Sequence
  Description of Artificial Sequence: Synthetic oligonucleotide
ccaguaaaauggacagccc

SEQ ID NO: 1651150 - RNA, 19 nt, Artificial Sequence
  Description of Artificial Sequence: Synthetic oligonucleotide
ggccugagcuacaugacgc

SEQ ID NO: 1651151 - RNA, 19 nt, Artificial Sequence
  Description of Artificial Sequence: Synthetic oligonucleotide
cacaccaaguccagugaga

SEQ ID NO: 1651152 - RNA, 19 nt, Artificial Sequence
  Description of Artificial Sequence: Synthetic oligonucleotide
gucggaugaauuggauggc

SEQ ID NO: 1651153 - RNA, 19 nt, Artificial Sequence
  Description of Artificial Sequence: Synthetic oligonucleotide
aagcgccacgagcacugga

SEQ ID NO: 1651154 - RNA, 19 nt, Artificial Sequence
  Description of Artificial Sequence: Synthetic oligonucleotide
acgcauguuucgguagcuc

SEQ ID NO: 1651155 - RNA, 19 nt, Artificial Sequence
  Description of Artificial Sequence: Synthetic oligonucleotide
cucucugcauggguggaug

SEQ ID NO: 1651156 - RNA, 19 nt, Artificial Sequence
  Description of Artificial Sequence: Synthetic oligonucleotide
cacguuaccccaucaggaa

SEQ ID NO: 1651157 - RNA, 19 nt, Artificial Sequence
  Description of Artificial Sequence: Synthetic oligonucleotide
cuauaagggcaagcgccac

SEQ ID NO: 1651158 - RNA, 19 nt, Artificial Sequence
  Description of Artificial Sequence: Synthetic oligonucleotide
cagccucugauccggggug

SEQ ID NO: 1651159 - RNA, 19 nt, Artificial Sequence
  Description of Artificial Sequence: Synthetic oligonucleotide
auccacgauguugggaaca

SEQ ID NO: 1651160 - RNA, 19 nt, Artificial Sequence
  Description of Artificial Sequence: Synthetic oligonucleotide
caaucacacacuggucuuc

SEQ ID NO: 1651161 - RNA, 19 nt, Artificial Sequence
  Description of Artificial Sequence: Synthetic oligonucleotide
ugccuggaucauuguagaa

SEQ ID NO: 1651162 - RNA, 19 nt, Artificial Sequence
  Description of Artificial Sequence: Synthetic oligonucleotide
gggaccagccagcaagggc

SEQ ID NO: 1651163 - RNA, 19 nt, Artificial Sequence
  Description of Artificial Sequence: Synthetic oligonucleotide
cauccacgauguugggaac

SEQ ID NO: 1651164 - RNA, 19 nt, Artificial Sequence
  Description of Artificial Sequence: Synthetic oligonucleotide
agcaagggcugcacagggg

SEQ ID NO: 1651165 - RNA, 19 nt, Artificial Sequence
  Description of Artificial Sequence: Synthetic oligonucleotide
gcaaauaauuugggaggag

SEQ ID NO: 1651166 - RNA, 19 nt, Artificial Sequence
  Description of Artificial Sequence: Synthetic oligonucleotide
ggugguugauaauuccaaa

SEQ ID NO: 1651167 - RNA, 19 nt, Artificial Sequence
  Description of Artificial Sequence: Synthetic oligonucleotide
ggaaacgcauguuucggua

SEQ ID NO: 1651168 - RNA, 19 nt, Artificial Sequence
  Description of Artificial Sequence: Synthetic oligonucleotide
agccaauccuccaccaccu

SEQ ID NO: 1651169 - RNA, 19 nt, Artificial Sequence
  Description of Artificial Sequence: Synthetic oligonucleotide
auccggggugucugucacg

SEQ ID NO: 1651170 - RNA, 19 nt, Artificial Sequence
  Description of Artificial Sequence: Synthetic oligonucleotide
ggaguuccuccaucaauca

SEQ ID NO: 1651171 - RNA, 19 nt, Artificial Sequence
  Description of Artificial Sequence: Synthetic oligonucleotide
uugauggccccacggcguu

SEQ ID NO: 1651172 - RNA, 19 nt, Artificial Sequence
  Description of Artificial Sequence: Synthetic oligonucleotide
cucauacuucaucccgcuc

SEQ ID NO: 1651173 - RNA, 19 nt, Artificial Sequence
  Description of Artificial Sequence: Synthetic oligonucleotide
ggccgugguaggcaggcag

SEQ ID NO: 1651174 - RNA, 19 nt, Artificial Sequence
  Description of Artificial Sequence: Synthetic oligonucleotide
gacgcagcaucuggucuug

SEQ ID NO: 1651175 - RNA, 19 nt, Artificial Sequence
  Description of Artificial Sequence: Synthetic oligonucleotide
ggaaacggcaaguccugga

SEQ ID NO: 1651176 - RNA, 19 nt, Artificial Sequence
  Description of Artificial Sequence: Synthetic oligonucleotide
acgagcacuggagcccuuc

SEQ ID NO: 1651177 - RNA, 19 nt, Artificial Sequence
  Description of Artificial Sequence: Synthetic oligonucleotide
cagaguggaguaguuacaa

SEQ ID NO: 1651178 - RNA, 19 nt, Artificial Sequence
  Description of Artificial Sequence: Synthetic oligonucleotide
acgcaccacggugguagcc

SEQ ID NO: 1651179 - RNA, 19 nt, Artificial Sequence
  Description of Artificial Sequence: Synthetic oligonucleotide
gggacacccucucugcaug

SEQ ID NO: 1651180 - RNA, 19 nt, Artificial Sequence
  Description of Artificial Sequence: Synthetic oligonucleotide
cauugggaggcaagggcaa

SEQ ID NO: 1651181 - RNA, 19 nt, Artificial Sequence
  Description of Artificial Sequence: Synthetic oligonucleotide
acggcaaguccuggagagg

SEQ ID NO: 1651182 - RNA, 19 nt, Artificial Sequence
  Description of Artificial Sequence: Synthetic oligonucleotide
augcgggccaugccuccuc

SEQ ID NO: 1651183 - RNA, 19 nt, Artificial Sequence
  Description of Artificial Sequence: Synthetic oligonucleotide
acacacgcaccacgguggu

SEQ ID NO: 1651184 - RNA, 19 nt, Artificial Sequence
  Description of Artificial Sequence: Synthetic oligonucleotide
caacucugguagcccuggg

SEQ ID NO: 1651185 - RNA, 19 nt, Artificial Sequence
  Description of Artificial Sequence: Synthetic oligonucleotide
gguucaugcgggccaugcc

SEQ ID NO: 1651186 - RNA, 19 nt, Artificial Sequence
  Description of Artificial Sequence: Synthetic oligonucleotide
ggacacccucucugcaugg

SEQ ID NO: 1651187 - RNA, 19 nt, Artificial Sequence
  Description of Artificial Sequence: Synthetic oligonucleotide
guccagugagauccccgug

SEQ ID NO: 1651188 - RNA, 19 nt, Artificial Sequence
  Description of Artificial Sequence: Synthetic oligonucleotide
ccuccggggacccggaggg

SEQ ID NO: 1651189 - RNA, 19 nt, Artificial Sequence
  Description of Artificial Sequence: Synthetic oligonucleotide
cccacggcguuucugucgg

SEQ ID NO: 1651190 - RNA, 19 nt, Artificial Sequence
  Description of Artificial Sequence: Synthetic oligonucleotide
guugggaacagcaguaguu

SEQ ID NO: 1651191 - RNA, 19 nt, Artificial Sequence
  Description of Artificial Sequence: Synthetic oligonucleotide
cgccccgucaucaaagggc

SEQ ID NO: 1651192 - RNA, 19 nt, Artificial Sequence
  Description of Artificial Sequence: Synthetic oligonucleotide
cuucagguccucgaugaaa

SEQ ID NO: 1651193 - RNA, 19 nt, Artificial Sequence
  Description of Artificial Sequence: Synthetic oligonucleotide
uccggggacccggagggga

SEQ ID NO: 1651194 - RNA, 19 nt, Artificial Sequence
  Description of Artificial Sequence: Synthetic oligonucleotide
ccauugggaggcaagggca

SEQ ID NO: 1651195 - RNA, 19 nt, Artificial Sequence
  Description of Artificial Sequence: Synthetic oligonucleotide
ccaauccuccaccaccuug

SEQ ID NO: 1651196 - RNA, 19 nt, Artificial Sequence
  Description of Artificial Sequence: Synthetic oligonucleotide
caccaaguccagugagauc

SEQ ID NO: 1651197 - RNA, 19 nt, Artificial Sequence
  Description of Artificial Sequence: Synthetic oligonucleotide
gacccggaggggaccagcc

SEQ ID NO: 1651198 - RNA, 19 nt, Artificial Sequence
  Description of Artificial Sequence: Synthetic oligonucleotide
cuucaucccgcucucuaua

SEQ ID NO: 1651199 - RNA, 19 nt, Artificial Sequence
  Description of Artificial Sequence: Synthetic oligonucleotide
ccacaccaaguccagugag

SEQ ID NO: 1651200 - RNA, 19 nt, Artificial Sequence
  Description of Artificial Sequence: Synthetic oligonucleotide
caaguuggugacucuggcu

SEQ ID NO: 1651201 - RNA, 19 nt, Artificial Sequence
  Description of Artificial Sequence: Synthetic oligonucleotide
aggucacuucacacacacg

SEQ ID NO: 1651202 - RNA, 19 nt, Artificial Sequence
  Description of Artificial Sequence: Synthetic oligonucleotide
auaggucacuucacacaca

SEQ ID NO: 1651203 - RNA, 19 nt, Artificial Sequence
  Description of Artificial Sequence: Synthetic oligonucleotide
ggcgccccgucaucaaagg

SEQ ID NO: 1651204 - RNA, 19 nt, Artificial Sequence
  Description of Artificial Sequence: Synthetic oligonucleotide
gauggccccacggcguuuc

SEQ ID NO: 1651205 - RNA, 19 nt, Artificial Sequence
  Description of Artificial Sequence: Synthetic oligonucleotide
gguugugugugaugaggaa

SEQ ID NO: 1651206 - RNA, 19 nt, Artificial Sequence
  Description of Artificial Sequence: Synthetic oligonucleotide
ggaccagccagcaagggcu

SEQ ID NO: 1651207 - RNA, 19 nt, Artificial Sequence
  Description of Artificial Sequence: Synthetic oligonucleotide
cuggccgguucaugcgggc

SEQ ID NO: 1651208 - RNA, 19 nt, Artificial Sequence
  Description of Artificial Sequence: Synthetic oligonucleotide
gcaagcgccacgagcacug

SEQ ID NO: 1651209 - RNA, 19 nt, Artificial Sequence
  Description of Artificial Sequence: Synthetic oligonucleotide
accaacucugguagcccug

SEQ ID NO: 1651210 - RNA, 19 nt, Artificial Sequence
  Description of Artificial Sequence: Synthetic oligonucleotide
ccccuuugcucagagcugg

SEQ ID NO: 1651211 - RNA, 19 nt, Artificial Sequence
  Description of Artificial Sequence: Synthetic oligonucleotide
ggccuccucagcaacagca

SEQ ID NO: 1651212 - RNA, 19 nt, Artificial Sequence
  Description of Artificial Sequence: Synthetic oligonucleotide
cacgggccuccucagcaac

SEQ ID NO: 1651213 - RNA, 19 nt, Artificial Sequence
  Description of Artificial Sequence: Synthetic oligonucleotide
uggccgguucaugcgggcc

SEQ ID NO: 1651214 - RNA, 19 nt, Artificial Sequence
  Description of Artificial Sequence: Synthetic oligonucleotide
gcauguuucgguagcucac

SEQ ID NO: 1651215 - RNA, 19 nt, Artificial Sequence
  Description of Artificial Sequence: Synthetic oligonucleotide
ucguugcuggggacacccu

SEQ ID NO: 1651216 - RNA, 19 nt, Artificial Sequence
  Description of Artificial Sequence: Synthetic oligonucleotide
cgguagcucaccuccacag

SEQ ID NO: 1651217 - RNA, 19 nt, Artificial Sequence
  Description of Artificial Sequence: Synthetic oligonucleotide
cccgcucucuauaagggca

SEQ ID NO: 1651218 - RNA, 19 nt, Artificial Sequence
  Description of Artificial Sequence: Synthetic oligonucleotide
cccgcacaaauauugugca

SEQ ID NO: 1651219 - RNA, 19 nt, Artificial Sequence
  Description of Artificial Sequence: Synthetic oligonucleotide
gccccgucaucaaagggcc

SEQ ID NO: 1651220 - RNA, 19 nt, Artificial Sequence
  Description of Artificial Sequence: Synthetic oligonucleotide
guccucuauggggucguug

SEQ ID NO: 1651221 - RNA, 19 nt, Artificial Sequence
  Description of Artificial Sequence: Synthetic oligonucleotide
cugucucucagaguggagu

SEQ ID NO: 1651222 - RNA, 19 nt, Artificial Sequence
  Description of Artificial Sequence: Synthetic oligonucleotide
guaggcaggcagccucuga

SEQ ID NO: 1651223 - RNA, 19 nt, Artificial Sequence
  Description of Artificial Sequence: Synthetic oligonucleotide
cacuguccucuaugggguc

SEQ ID NO: 1651224 - RNA, 19 nt, Artificial Sequence
  Description of Artificial Sequence: Synthetic oligonucleotide
uugugagugugugggucuu

SEQ ID NO: 1651225 - RNA, 19 nt, Artificial Sequence
  Description of Artificial Sequence: Synthetic oligonucleotide
cugggccgugguaggcagg

SEQ ID NO: 1651226 - RNA, 19 nt, Artificial Sequence
  Description of Artificial Sequence: Synthetic oligonucleotide
guugauggccccacggcgu

SEQ ID NO: 1651227 - RNA, 19 nt, Artificial Sequence
  Description of Artificial Sequence: Synthetic oligonucleotide
gcucucuauaagggcaagc

SEQ ID NO: 1651228 - RNA, 19 nt, Artificial Sequence
  Description of Artificial Sequence: Synthetic oligonucleotide
cacgcaccacggugguagc

SEQ ID NO: 1651229 - RNA, 19 nt, Artificial Sequence
  Description of Artificial Sequence: Synthetic oligonucleotide
gauggagaagaguccccuu

SEQ ID NO: 1651230 - RNA, 19 nt, Artificial Sequence
  Description of Artificial Sequence: Synthetic oligonucleotide
uggggucguugcuggggac

SEQ ID NO: 1651231 - RNA, 19 nt, Artificial Sequence
  Description of Artificial Sequence: Synthetic oligonucleotide
caccuccacaggugcuggc

SEQ ID NO: 1651232 - RNA, 19 nt, Artificial Sequence
  Description of Artificial Sequence: Synthetic oligonucleotide
ccccacggcguuucugucg

SEQ ID NO: 1651233 - RNA, 19 nt, Artificial Sequence
  Description of Artificial Sequence: Synthetic oligonucleotide
ccugagcuacaugacgcag

SEQ ID NO: 1651234 - RNA, 19 nt, Artificial Sequence
  Description of Artificial Sequence: Synthetic oligonucleotide
cccggaggggaccagccag

SEQ ID NO: 1651235 - RNA, 19 nt, Artificial Sequence
  Description of Artificial Sequence: Synthetic oligonucleotide
cugucacguuaccccauca

SEQ ID NO: 1651236 - RNA, 19 nt, Artificial Sequence
  Description of Artificial Sequence: Synthetic oligonucleotide
gugggucuuugaaccgcag

SEQ ID NO: 1651237 - RNA, 19 nt, Artificial Sequence
  Description of Artificial Sequence: Synthetic oligonucleotide
gggaacagcaguaguuaaa

SEQ ID NO: 1651238 - RNA, 19 nt, Artificial Sequence
  Description of Artificial Sequence: Synthetic oligonucleotide
gccccauacuucuucaggu

SEQ ID NO: 1651239 - RNA, 19 nt, Artificial Sequence
  Description of Artificial Sequence: Synthetic oligonucleotide
caagcgccacgagcacugg

SEQ ID NO: 1651240 - RNA, 19 nt, Artificial Sequence
  Description of Artificial Sequence: Synthetic oligonucleotide
gugugaugaggaaacgcau

SEQ ID NO: 1651241 - RNA, 19 nt, Artificial Sequence
  Description of Artificial Sequence: Synthetic oligonucleotide
gcgccccgucaucaaaggg

SEQ ID NO: 1651242 - RNA, 19 nt, Artificial Sequence
  Description of Artificial Sequence: Synthetic oligonucleotide
ugugagugugugggucuuu

SEQ ID NO: 1651243 - RNA, 19 nt, Artificial Sequence
  Description of Artificial Sequence: Synthetic oligonucleotide
ccuggaucauuguagaauu

SEQ ID NO: 1651244 - RNA, 19 nt, Artificial Sequence
  Description of Artificial Sequence: Synthetic oligonucleotide
ggggugucugucacguuac

SEQ ID NO: 1651245 - RNA, 19 nt, Artificial Sequence
  Description of Artificial Sequence: Synthetic oligonucleotide
cucugcuuaggccgguacu

SEQ ID NO: 1651246 - RNA, 19 nt, Artificial Sequence
  Description of Artificial Sequence: Synthetic oligonucleotide
gggugucugucacguuacc

SEQ ID NO: 1651247 - RNA, 19 nt, Artificial Sequence
  Description of Artificial Sequence: Synthetic oligonucleotide
gcaccacggugguagcccc

SEQ ID NO: 1651248 - RNA, 19 nt, Artificial Sequence
  Description of Artificial Sequence: Synthetic oligonucleotide
cugauccggggugucuguc

SEQ ID NO: 1651249 - RNA, 19 nt, Artificial Sequence
  Description of Artificial Sequence: Synthetic oligonucleotide
agccucugauccggggugu

SEQ ID NO: 1651250 - RNA, 19 nt, Artificial Sequence
  Description of Artificial Sequence: Synthetic oligonucleotide
gugagauccccgugcuugu

SEQ ID NO: 1651251 - RNA, 19 nt, Artificial Sequence
  Description of Artificial Sequence: Synthetic oligonucleotide
cagggccaaggccugagcu

SEQ ID NO: 1651252 - RNA, 19 nt, Artificial Sequence
  Description of Artificial Sequence: Synthetic oligonucleotide
cgcauguuucgguagcuca

SEQ ID NO: 1651253 - RNA, 19 nt, Artificial Sequence
  Description of Artificial Sequence: Synthetic oligonucleotide
caccaacucugguagcccu

SEQ ID NO: 1651254 - RNA, 19 nt, Artificial Sequence
  Description of Artificial Sequence: Synthetic oligonucleotide
gcgccacgagcacuggagc

SEQ ID NO: 1651255 - RNA, 19 nt, Artificial Sequence
  Description of Artificial Sequence: Synthetic oligonucleotide
ccgcagucucugcuuaggc

SEQ ID NO: 1651256 - RNA, 19 nt, Artificial Sequence
  Description of Artificial Sequence: Synthetic oligonucleotide
gcuacaugacgcagcaucu

SEQ ID NO: 1651257 - RNA, 19 nt, Artificial Sequence
  Description of Artificial Sequence: Synthetic oligonucleotide
caucuggucuugugagugu

SEQ ID NO: 1651258 - RNA, 19 nt, Artificial Sequence
  Description of Artificial Sequence: Synthetic oligonucleotide
gauccccgugcuuguccaa

SEQ ID NO: 1651259 - RNA, 19 nt, Artificial Sequence
  Description of Artificial Sequence: Synthetic oligonucleotide
gucuugugagugugugggu

SEQ ID NO: 1651260 - RNA, 19 nt, Artificial Sequence
  Description of Artificial Sequence: Synthetic oligonucleotide
agaguccccuuugcucaga

SEQ ID NO: 1651261 - RNA, 19 nt, Artificial Sequence
  Description of Artificial Sequence: Synthetic oligonucleotide
gggcgccccgucaucaaag

SEQ ID NO: 1651262 - RNA, 19 nt, Artificial Sequence
  Description of Artificial Sequence: Synthetic oligonucleotide
agccacgcagcugccugga

SEQ ID NO: 1651263 - RNA, 19 nt, Artificial Sequence
  Description of Artificial Sequence: Synthetic oligonucleotide
cgccacgagcacuggagcc

SEQ ID NO: 1651264 - RNA, 19 nt, Artificial Sequence
  Description of Artificial Sequence: Synthetic oligonucleotide
ccggaggggaccagccagc

SEQ ID NO: 1651265 - RNA, 19 nt, Artificial Sequence
  Description of Artificial Sequence: Synthetic oligonucleotide
gccuggaucauuguagaau

SEQ ID NO: 1651266 - RNA, 19 nt, Artificial Sequence
  Description of Artificial Sequence: Synthetic oligonucleotide
gcaguaguuaaagcugccu

SEQ ID NO: 1651267 - RNA, 19 nt, Artificial Sequence
  Description of Artificial Sequence: Synthetic oligonucleotide
gccgugguaggcaggcagc

SEQ ID NO: 1651268 - RNA, 19 nt, Artificial Sequence
  Description of Artificial Sequence: Synthetic oligonucleotide
ccuuguccccacaccccgc

SEQ ID NO: 1651269 - RNA, 19 nt, Artificial Sequence
  Description of Artificial Sequence: Synthetic oligonucleotide
gcuuaggccgguacuucuc

SEQ ID NO: 1651270 - RNA, 19 nt, Artificial Sequence
  Description of Artificial Sequence: Synthetic oligonucleotide
guagcccugggccguggua

SEQ ID NO: 1651271 - RNA, 19 nt, Artificial Sequence
  Description of Artificial Sequence: Synthetic oligonucleotide
agagaggcacgggccuccu

SEQ ID NO: 1651272 - RNA, 19 nt, Artificial Sequence
  Description of Artificial Sequence: Synthetic oligonucleotide
ccccaguaaaauggacagc

SEQ ID NO: 1651273 - RNA, 19 nt, Artificial Sequence
  Description of Artificial Sequence: Synthetic oligonucleotide
gggucguugcuggggacac

SEQ ID NO: 1651274 - RNA, 19 nt, Artificial Sequence
  Description of Artificial Sequence: Synthetic oligonucleotide
cagugcuggccccuggccu

SEQ ID NO: 1651275 - RNA, 19 nt, Artificial Sequence
  Description of Artificial Sequence: Synthetic oligonucleotide
caccccgcacaaauauugu

SEQ ID NO: 1651276 - RNA, 19 nt, Artificial Sequence
  Description of Artificial Sequence: Synthetic oligonucleotide
acgggccuccucagcaaca

SEQ ID NO: 1651277 - RNA, 19 nt, Artificial Sequence
  Description of Artificial Sequence: Synthetic oligonucleotide
cuccuccggggacccggag

SEQ ID NO: 1651278 - RNA, 19 nt, Artificial Sequence
  Description of Artificial Sequence: Synthetic oligonucleotide
ccgugguaggcaggcagcc

SEQ ID NO: 1651279 - RNA, 19 nt, Artificial Sequence
  Description of Artificial Sequence: Synthetic oligonucleotide
cccacaccaaguccaguga

SEQ ID NO: 1651280 - RNA, 19 nt, Artificial Sequence
  Description of Artificial Sequence: Synthetic oligonucleotide
cgcaccacggugguagccc

SEQ ID NO: 1651281 - RNA, 19 nt, Artificial Sequence
  Description of Artificial Sequence: Synthetic oligonucleotide
cgcagcaucuggucuugug

SEQ ID NO: 1651282 - RNA, 19 nt, Artificial Sequence
  Description of Artificial Sequence: Synthetic oligonucleotide
cgggccaugccuccuccgg

SEQ ID NO: 1651283 - RNA, 19 nt, Artificial Sequence
  Description of Artificial Sequence: Synthetic oligonucleotide
auggccccacggcguuucu

SEQ ID NO: 1651284 - RNA, 19 nt, Artificial Sequence
  Description of Artificial Sequence: Synthetic oligonucleotide
ggggucguugcuggggaca

SEQ ID NO: 1651285 - RNA, 19 nt, Artificial Sequence
  Description of Artificial Sequence: Synthetic oligonucleotide
gcgggccaugccuccuccg

SEQ ID NO: 1651286 - RNA, 19 nt, Artificial Sequence
  Description of Artificial Sequence: Synthetic oligonucleotide
ggccccacggcguuucugu

SEQ ID NO: 1651287 - RNA, 19 nt, Artificial Sequence
  Description of Artificial Sequence: Synthetic oligonucleotide
ggacccggaggggaccagc

SEQ ID NO: 1651288 - RNA, 19 nt, Artificial Sequence
  Description of Artificial Sequence: Synthetic oligonucleotide
caccacggugguagcccca

SEQ ID NO: 1651289 - RNA, 19 nt, Artificial Sequence
  Description of Artificial Sequence: Synthetic oligonucleotide
gguccucgaugaaagugcu

SEQ ID NO: 1651290 - RNA, 19 nt, Artificial Sequence
  Description of Artificial Sequence: Synthetic oligonucleotide
cggcguuucugucggauga

SEQ ID NO: 1651291 - RNA, 19 nt, Artificial Sequence
  Description of Artificial Sequence: Synthetic oligonucleotide
ugauggccccacggcguuu

SEQ ID NO: 1651292 - RNA, 19 nt, Artificial Sequence
  Description of Artificial Sequence: Synthetic oligonucleotide
ccacgauguugggaacagc

SEQ ID NO: 1651293 - RNA, 19 nt, Artificial Sequence
  Description of Artificial Sequence: Synthetic oligonucleotide
cacaccccgcacaaauauu

SEQ ID NO: 1651294 - RNA, 19 nt, Artificial Sequence
  Description of Artificial Sequence: Synthetic oligonucleotide
cagccccaaaguccugucu

SEQ ID NO: 1651295 - RNA, 19 nt, Artificial Sequence
  Description of Artificial Sequence: Synthetic oligonucleotide
ggggacacccucucugcau

SEQ ID NO: 1651296 - RNA, 19 nt, Artificial Sequence
  Description of Artificial Sequence: Synthetic oligonucleotide
ggucguugcuggggacacc

SEQ ID NO: 1651297 - RNA, 19 nt, Artificial Sequence
  Description of Artificial Sequence: Synthetic oligonucleotide
ccgcacaaauauugugcaa

SEQ ID NO: 1651298 - RNA, 19 nt, Artificial Sequence
  Description of Artificial Sequence: Synthetic oligonucleotide
gccaugccuccuccgggga

SEQ ID NO: 1651299 - RNA, 19 nt, Artificial Sequence
  Description of Artificial Sequence: Synthetic oligonucleotide
ccccaaaguccugucucuc

SEQ ID NO: 1651300 - RNA, 19 nt, Artificial Sequence
  Description of Artificial Sequence: Synthetic oligonucleotide
ccacaccccgcacaaauau

SEQ ID NO: 1651301 - RNA, 19 nt, Artificial Sequence
  Description of Artificial Sequence: Synthetic oligonucleotide
ccgcucucuauaagggcaa

SEQ ID NO: 1651302 - RNA, 19 nt, Artificial Sequence
  Description of Artificial Sequence: Synthetic oligonucleotide
ccacaacagugaugccauc

SEQ ID NO: 1651303 - RNA, 19 nt, Artificial Sequence
  Description of Artificial Sequence: Synthetic oligonucleotide
acgcagcaucuggucuugu

SEQ ID NO: 1651304 - RNA, 19 nt, Artificial Sequence
  Description of Artificial Sequence: Synthetic oligonucleotide
ccggggacccggaggggac

SEQ ID NO: 1651305 - RNA, 19 nt, Artificial Sequence
  Description of Artificial Sequence: Synthetic oligonucleotide
cuguccucuauggggucgu

SEQ ID NO: 1651306 - RNA, 19 nt, Artificial Sequence
  Description of Artificial Sequence: Synthetic oligonucleotide
cggggugucugucacguua

SEQ ID NO: 1651307 - RNA, 19 nt, Artificial Sequence
  Description of Artificial Sequence: Synthetic oligonucleotide
gucugucacguuaccccau

SEQ ID NO: 1651308 - RNA, 19 nt, Artificial Sequence
  Description of Artificial Sequence: Synthetic oligonucleotide
ggggcgccccgucaucaaa

SEQ ID NO: 1651309 - RNA, 19 nt, Artificial Sequence
  Description of Artificial Sequence: Synthetic oligonucleotide
ggcaagcgccacgagcacu

SEQ ID NO: 1651310 - RNA, 19 nt, Artificial Sequence
  Description of Artificial Sequence: Synthetic oligonucleotide
gccccacggcguuucuguc

SEQ ID NO: 1651311 - RNA, 19 nt, Artificial Sequence
  Description of Artificial Sequence: Synthetic oligonucleotide
gagcuacaugacgcagcau

SEQ ID NO: 1651312 - RNA, 19 nt, Artificial Sequence
  Description of Artificial Sequence: Synthetic oligonucleotide
caugcgggccaugccuccu

SEQ ID NO: 1651313 - RNA, 19 nt, Artificial Sequence
  Description of Artificial Sequence: Synthetic oligonucleotide
gguagcccugggccguggu

SEQ ID NO: 1651314 - RNA, 19 nt, Artificial Sequence
  Description of Artificial Sequence: Synthetic oligonucleotide
acgcagcugccuggaucau

SEQ ID NO: 1651315 - RNA, 19 nt, Artificial Sequence
  Description of Artificial Sequence: Synthetic oligonucleotide
cguuucugucggaugaauu

SEQ ID NO: 1651316 - RNA, 19 nt, Artificial Sequence
  Description of Artificial Sequence: Synthetic oligonucleotide
cggaugaauuggauggcau

SEQ ID NO: 1651317 - RNA, 19 nt, Artificial Sequence
  Description of Artificial Sequence: Synthetic oligonucleotide
gccucugauccgggguguc

SEQ ID NO: 1651318 - RNA, 19 nt, Artificial Sequence
  Description of Artificial Sequence: Synthetic oligonucleotide
ccucuauggggucguugcu

SEQ ID NO: 1651319 - RNA, 19 nt, Artificial Sequence
  Description of Artificial Sequence: Synthetic oligonucleotide
cagugagauccccgugcuu

SEQ ID NO: 1651320 - RNA, 19 nt, Artificial Sequence
  Description of Artificial Sequence: Synthetic oligonucleotide
gcguuucugucggaugaau

SEQ ID NO: 1651321 - RNA, 19 nt, Artificial Sequence
  Description of Artificial Sequence: Synthetic oligonucleotide
cacacgcaccacgguggua

SEQ ID NO: 1651322 - RNA, 19 nt, Artificial Sequence
  Description of Artificial Sequence: Synthetic oligonucleotide
ggaaagcugccuggugguu

SEQ ID NO: 1651323 - RNA, 19 nt, Artificial Sequence
  Description of Artificial Sequence: Synthetic oligonucleotide
gcucaccuccacaggugcu

SEQ ID NO: 1651324 - RNA, 19 nt, Artificial Sequence
  Description of Artificial Sequence: Synthetic oligonucleotide
ccccgucaucaaagggcca

SEQ ID NO: 1651325 - RNA, 19 nt, Artificial Sequence
  Description of Artificial Sequence: Synthetic oligonucleotide
cggugguagccccauacuu

SEQ ID NO: 1651326 - RNA, 19 nt, Artificial Sequence
  Description of Artificial Sequence: Synthetic oligonucleotide
caacagcauccacgauguu

SEQ ID NO: 1651327 - RNA, 19 nt, Artificial Sequence
  Description of Artificial Sequence: Synthetic oligonucleotide
ccacgagcacuggagcccu

SEQ ID NO: 1651328 - RNA, 19 nt, Artificial Sequence
  Description of Artificial Sequence: Synthetic oligonucleotide
gggccgugguaggcaggca

SEQ ID NO: 1651329 - RNA, 19 nt, Artificial Sequence
  Description of Artificial Sequence: Synthetic oligonucleotide
caggugcuggccgguucau

SEQ ID NO: 1651330 - RNA, 19 nt, Artificial Sequence
  Description of Artificial Sequence: Synthetic oligonucleotide
ccgucaucaaagggccagu

SEQ ID NO: 1651331 - RNA, 19 nt, Artificial Sequence
  Description of Artificial Sequence: Synthetic oligonucleotide
cacgagcacuggagcccuu

SEQ ID NO: 1651332 - RNA, 19 nt, Artificial Sequence
  Description of Artificial Sequence: Synthetic oligonucleotide
ccacggcguuucugucgga

SEQ ID NO: 1651333 - RNA, 19 nt, Artificial Sequence
  Description of Artificial Sequence: Synthetic oligonucleotide
ccacggugguagccccaua

SEQ ID NO: 1651334 - RNA, 19 nt, Artificial Sequence
  Description of Artificial Sequence: Synthetic oligonucleotide
ccacaggugcuggccgguu

SEQ ID NO: 1651335 - RNA, 19 nt, Artificial Sequence
  Description of Artificial Sequence: Synthetic oligonucleotide
ccggggugucugucacguu

SEQ ID NO: 1651336 - RNA, 19 nt, Artificial Sequence
  Description of Artificial Sequence: Synthetic oligonucleotide
auuaauuggacucagggac

SEQ ID NO: 1651337 - RNA, 19 nt, Artificial Sequence
  Description of Artificial Sequence: Synthetic oligonucleotide
uugacuaguaccaacaugg

SEQ ID NO: 1651338 - RNA, 19 nt, Artificial Sequence
  Description of Artificial Sequence: Synthetic oligonucleotide
aauguuguauacuagguag

SEQ ID NO: 1651339 - RNA, 19 nt, Artificial Sequence
  Description of Artificial Sequence: Synthetic oligonucleotide
aaagcuugccaucaaagac

SEQ ID NO: 1651340 - RNA, 19 nt, Artificial Sequence
  Description of Artificial Sequence: Synthetic oligonucleotide
uuuauuuguaguaugugcc

SEQ ID NO: 1651341 - RNA, 19 nt, Artificial Sequence
  Description of Artificial Sequence: Synthetic oligonucleotide
uccgaauuaguacacacgg

SEQ ID NO: 1651342 - RNA, 19 nt, Artificial Sequence
  Description of Artificial Sequence: Synthetic oligonucleotide
aguaccaacauggugaggc

SEQ ID NO: 1651343 - RNA, 19 nt, Artificial Sequence
  Description of Artificial Sequence: Synthetic oligonucleotide
gaucuauacacauaggaac

SEQ ID NO: 1651344 - RNA, 19 nt, Artificial Sequence
  Description of Artificial Sequence: Synthetic oligonucleotide
uaucucagguucuauaucc

SEQ ID NO: 1651345 - RNA, 19 nt, Artificial Sequence
  Description of Artificial Sequence: Synthetic oligonucleotide
uggaucuauacacauagga

SEQ ID NO: 1651346 - RNA, 19 nt, Artificial Sequence
  Description of Artificial Sequence: Synthetic oligonucleotide
uuguauacuagguagcucu

SEQ ID NO: 1651347 - RNA, 19 nt, Artificial Sequence
  Description of Artificial Sequence: Synthetic oligonucleotide
ucuggaguuaauguaaucc

SEQ ID NO: 1651348 - RNA, 19 nt, Artificial Sequence
  Description of Artificial Sequence: Synthetic oligonucleotide
cuagguagcucucagagug

SEQ ID NO: 1651349 - RNA, 19 nt, Artificial Sequence
  Description of Artificial Sequence: Synthetic oligonucleotide
uucuagauuaauuggacuc

SEQ ID NO: 1651350 - RNA, 19 nt, Artificial Sequence
  Description of Artificial Sequence: Synthetic oligonucleotide
guugauuuuccuuggaggc

SEQ ID NO: 1651351 - RNA, 19 nt, Artificial Sequence
  Description of Artificial Sequence: Synthetic oligonucleotide
cuuguuuggauucaggguc

SEQ ID NO: 1651352 - RNA, 19 nt, Artificial Sequence
  Description of Artificial Sequence: Synthetic oligonucleotide
agcagaagcgaguacacuc

SEQ ID NO: 1651353 - RNA, 19 nt, Artificial Sequence
  Description of Artificial Sequence: Synthetic oligonucleotide
acuaguaccaacaugguga

SEQ ID NO: 1651354 - RNA, 19 nt, Artificial Sequence
  Description of Artificial Sequence: Synthetic oligonucleotide
uguaguuugaagaugucuu

SEQ ID NO: 1651355 - RNA, 19 nt, Artificial Sequence
  Description of Artificial Sequence: Synthetic oligonucleotide
uauacuagguagcucucag

SEQ ID NO: 1651356 - RNA, 19 nt, Artificial Sequence
  Description of Artificial Sequence: Synthetic oligonucleotide
guuauuaugacuuuggguu

SEQ ID NO: 1651357 - RNA, 19 nt, Artificial Sequence
  Description of Artificial Sequence: Synthetic oligonucleotide
aguaugugcccuuacccac

SEQ ID NO: 1651358 - RNA, 19 nt, Artificial Sequence
  Description of Artificial Sequence: Synthetic oligonucleotide
aaugcgucggcucuccuug

SEQ ID NO: 1651359 - RNA, 19 nt, Artificial Sequence
  Description of Artificial Sequence: Synthetic oligonucleotide
uuccuguuuaauuucaggu

SEQ ID NO: 1651360 - RNA, 19 nt, Artificial Sequence
  Description of Artificial Sequence: Synthetic oligonucleotide
aagcgaguacacucgcugc

SEQ ID NO: 1651361 - RNA, 19 nt, Artificial Sequence
  Description of Artificial Sequence: Synthetic oligonucleotide
augguuacuuguuuuaucu

SEQ ID NO: 1651362 - RNA, 19 nt, Artificial Sequence
  Description of Artificial Sequence: Synthetic oligonucleotide
uggaguuaauguaauccag

SEQ ID NO: 1651363 - RNA, 19 nt, Artificial Sequence
  Description of Artificial Sequence: Synthetic oligonucleotide
ucauaauguuguauacuag

SEQ ID NO: 1651364 - RNA, 19 nt, Artificial Sequence
  Description of Artificial Sequence: Synthetic oligonucleotide
ugcuucuagauuaauugga

SEQ ID NO: 1651365 - RNA, 19 nt, Artificial Sequence
  Description of Artificial Sequence: Synthetic oligonucleotide
cuuggagcaagccuuacag

SEQ ID NO: 1651366 - RNA, 19 nt, Artificial Sequence
  Description of Artificial Sequence: Synthetic oligonucleotide
cauaggaacuucuugcuug

SEQ ID NO: 1651367 - RNA, 19 nt, Artificial Sequence
  Description of Artificial Sequence: Synthetic oligonucleotide
ugcgcuguugacuaguacc

SEQ ID NO: 1651368 - RNA, 19 nt, Artificial Sequence
  Description of Artificial Sequence: Synthetic oligonucleotide
acuccgaauuaguacacac

SEQ ID NO: 1651369 - RNA, 19 nt, Artificial Sequence
  Description of Artificial Sequence: Synthetic oligonucleotide
cugagcaauaaaugcaugc

SEQ ID NO: 1651370 - RNA, 19 nt, Artificial Sequence
  Description of Artificial Sequence: Synthetic oligonucleotide
uccuguuuaauuucaggug

SEQ ID NO: 1651371 - RNA, 19 nt, Artificial Sequence
  Description of Artificial Sequence: Synthetic oligonucleotide
augcuucuagauuaauugg

SEQ ID NO: 1651372 - RNA, 19 nt, Artificial Sequence
  Description of Artificial Sequence: Synthetic oligonucleotide
caggguuuaaacuugccac

SEQ ID NO: 1651373 - RNA, 19 nt, Artificial Sequence
  Description of Artificial Sequence: Synthetic oligonucleotide
uguguucugccuacaaugc

SEQ ID NO: 1651374 - RNA, 19 nt, Artificial Sequence
  Description of Artificial Sequence: Synthetic oligonucleotide
ugcuugucuguuauuauga

SEQ ID NO: 1651375 - RNA, 19 nt, Artificial Sequence
  Description of Artificial Sequence: Synthetic oligonucleotide
gauuaauuggacucaggga

SEQ ID NO: 1651376 - RNA, 19 nt, Artificial Sequence
  Description of Artificial Sequence: Synthetic oligonucleotide
uagcaaugagucuaggcgc

SEQ ID NO: 1651377 - RNA, 19 nt, Artificial Sequence
  Description of Artificial Sequence: Synthetic oligonucleotide
acuucuugcacagacuccg

SEQ ID NO: 1651378 - RNA, 19 nt, Artificial Sequence
  Description of Artificial Sequence: Synthetic oligonucleotide
uguucugccuacaaugcgu

SEQ ID NO: 1651379 - RNA, 19 nt, Artificial Sequence
  Description of Artificial Sequence: Synthetic oligonucleotide
uguuccaaaagaaccucca

SEQ ID NO: 1651380 - RNA, 19 nt, Artificial Sequence
  Description of Artificial Sequence: Synthetic oligonucleotide
uauuuauuuguaguaugug

SEQ ID NO: 1651381 - RNA, 19 nt, Artificial Sequence
  Description of Artificial Sequence: Synthetic oligonucleotide
aggauacacaaaccacucc

SEQ ID NO: 1651382 - RNA, 19 nt, Artificial Sequence
  Description of Artificial Sequence: Synthetic oligonucleotide
ucuuguuuggauucagggu

SEQ ID NO: 1651383 - RNA, 19 nt, Artificial Sequence
  Description of Artificial Sequence: Synthetic oligonucleotide
auaggaacuucuugcuugg

SEQ ID NO: 1651384 - RNA, 19 nt, Artificial Sequence
  Description of Artificial Sequence: Synthetic oligonucleotide
aaugagucuaggcgccggg

SEQ ID NO: 1651385 - RNA, 19 nt, Artificial Sequence
  Description of Artificial Sequence: Synthetic oligonucleotide
ugggcuuucaauugccugc

SEQ ID NO: 1651386 - RNA, 19 nt, Artificial Sequence
  Description of Artificial Sequence: Synthetic oligonucleotide
ucuagauuaauuggacuca

SEQ ID NO: 1651387 - RNA, 19 nt, Artificial Sequence
  Description of Artificial Sequence: Synthetic oligonucleotide
uucgauucuggaucuauac

SEQ ID NO: 1651388 - RNA, 19 nt, Artificial Sequence
  Description of Artificial Sequence: Synthetic oligonucleotide
uaauguuguauacuaggua

SEQ ID NO: 1651389 - RNA, 19 nt, Artificial Sequence
  Description of Artificial Sequence: Synthetic oligonucleotide
uagauuaauuggacucagg

SEQ ID NO: 1651390 - RNA, 19 nt, Artificial Sequence
  Description of Artificial Sequence: Synthetic oligonucleotide
aguuaauguaauccagcug

SEQ ID NO: 1651391 - RNA, 19 nt, Artificial Sequence
  Description of Artificial Sequence: Synthetic oligonucleotide
uuaauuggacucagggacu

SEQ ID NO: 1651392 - RNA, 19 nt, Artificial Sequence
  Description of Artificial Sequence: Synthetic oligonucleotide
agcgaguacacucgcugcc

SEQ ID NO: 1651393 - RNA, 19 nt, Artificial Sequence
  Description of Artificial Sequence: Synthetic oligonucleotide
ugcacaugggaauuucuug

SEQ ID NO: 1651394 - RNA, 19 nt, Artificial Sequence
  Description of Artificial Sequence: Synthetic oligonucleotide
cucgcugccggauugggcg

SEQ ID NO: 1651395 - RNA, 19 nt, Artificial Sequence
  Description of Artificial Sequence: Synthetic oligonucleotide
caugaaugcuucuagauua

SEQ ID NO: 1651396 - RNA, 19 nt, Artificial Sequence
  Description of Artificial Sequence: Synthetic oligonucleotide
agguucuauauccauggug

SEQ ID NO: 1651397 - RNA, 19 nt, Artificial Sequence
  Description of Artificial Sequence: Synthetic oligonucleotide
acuccuugaccaccggacc

SEQ ID NO: 1651398 - RNA, 19 nt, Artificial Sequence
  Description of Artificial Sequence: Synthetic oligonucleotide
uaguaugugcccuuaccca

SEQ ID NO: 1651399 - RNA, 19 nt, Artificial Sequence
  Description of Artificial Sequence: Synthetic oligonucleotide
auuaguacacacgggaacu

SEQ ID NO: 1651400 - RNA, 19 nt, Artificial Sequence
  Description of Artificial Sequence: Synthetic oligonucleotide
acaugaugcauccuggcaa

SEQ ID NO: 1651401 - RNA, 19 nt, Artificial Sequence
  Description of Artificial Sequence: Synthetic oligonucleotide
gacuaguaccaacauggug

SEQ ID NO: 1651402 - RNA, 19 nt, Artificial Sequence
  Description of Artificial Sequence: Synthetic oligonucleotide
cuccgaauuaguacacacg

SEQ ID NO: 1651403 - RNA, 19 nt, Artificial Sequence
  Description of Artificial Sequence: Synthetic oligonucleotide
aauucgcuuguuguccagg

SEQ ID NO: 1651404 - RNA, 19 nt, Artificial Sequence
  Description of Artificial Sequence: Synthetic oligonucleotide
auguuguauacuagguagc

SEQ ID NO: 1651405 - RNA, 19 nt, Artificial Sequence
  Description of Artificial Sequence: Synthetic oligonucleotide
gauucaggguuuaaacuug

SEQ ID NO: 1651406 - RNA, 19 nt, Artificial Sequence
  Description of Artificial Sequence: Synthetic oligonucleotide
cagggcaugaauucgcuug

SEQ ID NO: 1651407 - RNA, 19 nt, Artificial Sequence
  Description of Artificial Sequence: Synthetic oligonucleotide
ugugcccuuacccaccugu

SEQ ID NO: 1651408 - RNA, 19 nt, Artificial Sequence
  Description of Artificial Sequence: Synthetic oligonucleotide
guugacuaguaccaacaug

SEQ ID NO: 1651409 - RNA, 19 nt, Artificial Sequence
  Description of Artificial Sequence: Synthetic oligonucleotide
uguuguauacuagguagcu

SEQ ID NO: 1651410 - RNA, 19 nt, Artificial Sequence
  Description of Artificial Sequence: Synthetic oligonucleotide
ugaucuauucuguuccaaa

SEQ ID NO: 1651411 - RNA, 19 nt, Artificial Sequence
  Description of Artificial Sequence: Synthetic oligonucleotide
augggaacuuguuuggacu

SEQ ID NO: 1651412 - RNA, 19 nt, Artificial Sequence
  Description of Artificial Sequence: Synthetic oligonucleotide
cucauaauguuguauacua

SEQ ID NO: 1651413 - RNA, 19 nt, Artificial Sequence
  Description of Artificial Sequence: Synthetic oligonucleotide
uuaucucagguucuauauc

SEQ ID NO: 1651414 - RNA, 19 nt, Artificial Sequence
  Description of Artificial Sequence: Synthetic oligonucleotide
auaauguuguauacuaggu

SEQ ID NO: 1651415 - RNA, 19 nt, Artificial Sequence
  Description of Artificial Sequence: Synthetic oligonucleotide
uagugagaguuccaaugug

SEQ ID NO: 1651416 - RNA, 19 nt, Artificial Sequence
  Description of Artificial Sequence: Synthetic oligonucleotide
guuacuuguuuuaucucag

SEQ ID NO: 1651417 - RNA, 19 nt, Artificial Sequence
  Description of Artificial Sequence: Synthetic oligonucleotide
agcaaugagucuaggcgcc

SEQ ID NO: 1651418 - RNA, 19 nt, Artificial Sequence
  Description of Artificial Sequence: Synthetic oligonucleotide
acuuguuuuaucucagguu

SEQ ID NO: 1651419 - RNA, 19 nt, Artificial Sequence
  Description of Artificial Sequence: Synthetic oligonucleotide
ugauuuuccuuggaggcac

SEQ ID NO: 1651420 - RNA, 19 nt, Artificial Sequence
  Description of Artificial Sequence: Synthetic oligonucleotide
aucuauacacauaggaacu

SEQ ID NO: 1651421 - RNA, 19 nt, Artificial Sequence
  Description of Artificial Sequence: Synthetic oligonucleotide
aaagacauuccagggcaug

SEQ ID NO: 1651422 - RNA, 19 nt, Artificial Sequence
  Description of Artificial Sequence: Synthetic oligonucleotide
ucagaguggacaugaugca

SEQ ID NO: 1651423 - RNA, 19 nt, Artificial Sequence
  Description of Artificial Sequence: Synthetic oligonucleotide
aggguuuaaacuugccacu

SEQ ID NO: 1651424 - RNA, 19 nt, Artificial Sequence
  Description of Artificial Sequence: Synthetic oligonucleotide
uuacagaccacugccuuca

SEQ ID NO: 1651425 - RNA, 19 nt, Artificial Sequence
  Description of Artificial Sequence: Synthetic oligonucleotide
aggugcauacacaugaaug

SEQ ID NO: 1651426 - RNA, 19 nt, Artificial Sequence
  Description of Artificial Sequence: Synthetic oligonucleotide
ugaauucgcuuguugucca

SEQ ID NO: 1651427 - RNA, 19 nt, Artificial Sequence
  Description of Artificial Sequence: Synthetic oligonucleotide
uucgcuuguuguccagggg

SEQ ID NO: 1651428 - RNA, 19 nt, Artificial Sequence
  Description of Artificial Sequence: Synthetic oligonucleotide
ugccaucaaagacauucca

SEQ ID NO: 1651429 - RNA, 19 nt, Artificial Sequence
  Description of Artificial Sequence: Synthetic oligonucleotide
aacauggugaggccacgga

SEQ ID NO: 1651430 - RNA, 19 nt, Artificial Sequence
  Description of Artificial Sequence: Synthetic oligonucleotide
acaaggagggaccccaacu

SEQ ID NO: 1651431 - RNA, 19 nt, Artificial Sequence
  Description of Artificial Sequence: Synthetic oligonucleotide
gagauaucugcccuggcaa

SEQ ID NO: 1651432 - RNA, 19 nt, Artificial Sequence
  Description of Artificial Sequence: Synthetic oligonucleotide
ucauaagcugugagguuga

SEQ ID NO: 1651433 - RNA, 19 nt, Artificial Sequence
  Description of Artificial Sequence: Synthetic oligonucleotide
gguuacuuguuuuaucuca

SEQ ID NO: 1651434 - RNA, 19 nt, Artificial Sequence
  Description of Artificial Sequence: Synthetic oligonucleotide
uuguuuggauucagggucu

SEQ ID NO: 1651435 - RNA, 19 nt, Artificial Sequence
  Description of Artificial Sequence: Synthetic oligonucleotide
gcaugcaaaucuuccaggg

SEQ ID NO: 1651436 - RNA, 19 nt, Artificial Sequence
  Description of Artificial Sequence: Synthetic oligonucleotide
caugggaacuuguuuggac

SEQ ID NO: 1651437 - RNA, 19 nt, Artificial Sequence
  Description of Artificial Sequence: Synthetic oligonucleotide
cuagauuaauuggacucag

SEQ ID NO: 1651438 - RNA, 19 nt, Artificial Sequence
  Description of Artificial Sequence: Synthetic oligonucleotide
gaguuaauguaauccagcu

SEQ ID NO: 1651439 - RNA, 19 nt, Artificial Sequence
  Description of Artificial Sequence: Synthetic oligonucleotide
ccuaacaaggucugggugc

SEQ ID NO: 1651440 - RNA, 19 nt, Artificial Sequence
  Description of Artificial Sequence: Synthetic oligonucleotide
uuucagacugcaaguacuu

SEQ ID NO: 1651441 - RNA, 19 nt, Artificial Sequence
  Description of Artificial Sequence: Synthetic oligonucleotide
uacacucgcugccggauug

SEQ ID NO: 1651442 - RNA, 19 nt, Artificial Sequence
  Description of Artificial Sequence: Synthetic oligonucleotide
ugugagguugauuuuccuu

SEQ ID NO: 1651443 - RNA, 19 nt, Artificial Sequence
  Description of Artificial Sequence: Synthetic oligonucleotide
uguugacuaguaccaacau

SEQ ID NO: 1651444 - RNA, 19 nt, Artificial Sequence
  Description of Artificial Sequence: Synthetic oligonucleotide
uuccaaacuagguguuccc

SEQ ID NO: 1651445 - RNA, 19 nt, Artificial Sequence
  Description of Artificial Sequence: Synthetic oligonucleotide
cuaacaaggucugggugcc

SEQ ID NO: 1651446 - RNA, 19 nt, Artificial Sequence
  Description of Artificial Sequence: Synthetic oligonucleotide
guguucugccuacaaugcg

SEQ ID NO: 1651447 - RNA, 19 nt, Artificial Sequence
  Description of Artificial Sequence: Synthetic oligonucleotide
uaauuggacucagggacug

SEQ ID NO: 1651448 - RNA, 19 nt, Artificial Sequence
  Description of Artificial Sequence: Synthetic oligonucleotide
uguauacuagguagcucuc

SEQ ID NO: 1651449 - RNA, 19 nt, Artificial Sequence
  Description of Artificial Sequence: Synthetic oligonucleotide
cacuccuugaccaccggac

SEQ ID NO: 1651450 - RNA, 19 nt, Artificial Sequence
  Description of Artificial Sequence: Synthetic oligonucleotide
ugugcacaugggaacuucu

SEQ ID NO: 1651451 - RNA, 19 nt, Artificial Sequence
  Description of Artificial Sequence: Synthetic oligonucleotide
ucuugcacagacuccgaau

SEQ ID NO: 1651452 - RNA, 19 nt, Artificial Sequence
  Description of Artificial Sequence: Synthetic oligonucleotide
aggccuaacaaggucuggg

SEQ ID NO: 1651453 - RNA, 19 nt, Artificial Sequence
  Description of Artificial Sequence: Synthetic oligonucleotide
cuccuugaccaccggaccg

SEQ ID NO: 1651454 - RNA, 19 nt, Artificial Sequence
  Description of Artificial Sequence: Synthetic oligonucleotide
cacucgaucucuccauugc

SEQ ID NO: 1651455 - RNA, 19 nt, Artificial Sequence
  Description of Artificial Sequence: Synthetic oligonucleotide
ugugcacaugggaacuugu

SEQ ID NO: 1651456 - RNA, 19 nt, Artificial Sequence
  Description of Artificial Sequence: Synthetic oligonucleotide
uccaaacuagguguucccc

SEQ ID NO: 1651457 - RNA, 19 nt, Artificial Sequence
  Description of Artificial Sequence: Synthetic oligonucleotide
cuggaucuauacacauagg

SEQ ID NO: 1651458 - RNA, 19 nt, Artificial Sequence
  Description of Artificial Sequence: Synthetic oligonucleotide
uuacccaccuguguaguga

SEQ ID NO: 1651459 - RNA, 19 nt, Artificial Sequence
  Description of Artificial Sequence: Synthetic oligonucleotide
ugacuaguaccaacauggu

SEQ ID NO: 1651460 - RNA, 19 nt, Artificial Sequence
  Description of Artificial Sequence: Synthetic oligonucleotide
cuuacagaccacugccuuc

SEQ ID NO: 1651461 - RNA, 19 nt, Artificial Sequence
  Description of Artificial Sequence: Synthetic oligonucleotide
ggaguuaauguaauccagc

SEQ ID NO: 1651462 - RNA, 19 nt, Artificial Sequence
  Description of Artificial Sequence: Synthetic oligonucleotide
ugggaacuuguuuggacuc

SEQ ID NO: 1651463 - RNA, 19 nt, Artificial Sequence
  Description of Artificial Sequence: Synthetic oligonucleotide
gcacaugggaacuucuugc

SEQ ID NO: 1651464 - RNA, 19 nt, Artificial Sequence
  Description of Artificial Sequence: Synthetic oligonucleotide
uucugccuacaaugcgucg

SEQ ID NO: 1651465 - RNA, 19 nt, Artificial Sequence
  Description of Artificial Sequence: Synthetic oligonucleotide
acuagccacggagauaucu

SEQ ID NO: 1651466 - RNA, 19 nt, Artificial Sequence
  Description of Artificial Sequence: Synthetic oligonucleotide
acuagguagcucucagagu

SEQ ID NO: 1651467 - RNA, 19 nt, Artificial Sequence
  Description of Artificial Sequence: Synthetic oligonucleotide
guagcucucagaguggaca

SEQ ID NO: 1651468 - RNA, 19 nt, Artificial Sequence
  Description of Artificial Sequence: Synthetic oligonucleotide
gaauucgcuuguuguccag

SEQ ID NO: 1651469 - RNA, 19 nt, Artificial Sequence
  Description of Artificial Sequence: Synthetic oligonucleotide
gagguagauuaggaggcag

SEQ ID NO: 1651470 - RNA, 19 nt, Artificial Sequence
  Description of Artificial Sequence: Synthetic oligonucleotide
gaacuagccacggagauau

SEQ ID NO: 1651471 - RNA, 19 nt, Artificial Sequence
  Description of Artificial Sequence: Synthetic oligonucleotide
gaauuaguacacacgggaa

SEQ ID NO: 1651472 - RNA, 19 nt, Artificial Sequence
  Description of Artificial Sequence: Synthetic oligonucleotide
uacccaccuguguagugag

SEQ ID NO: 1651473 - RNA, 19 nt, Artificial Sequence
  Description of Artificial Sequence: Synthetic oligonucleotide
acuugcuugucuguuauua

SEQ ID NO: 1651474 - RNA, 19 nt, Artificial Sequence
  Description of Artificial Sequence: Synthetic oligonucleotide
accggugcugguuccaucu

SEQ ID NO: 1651475 - RNA, 19 nt, Artificial Sequence
  Description of Artificial Sequence: Synthetic oligonucleotide
ugguuacuuguuuuaucuc

SEQ ID NO: 1651476 - RNA, 19 nt, Artificial Sequence
  Description of Artificial Sequence: Synthetic oligonucleotide
guugaagcaggcuagcaau

SEQ ID NO: 1651477 - RNA, 19 nt, Artificial Sequence
  Description of Artificial Sequence: Synthetic oligonucleotide
auacuagguagcucucaga

SEQ ID NO: 1651478 - RNA, 19 nt, Artificial Sequence
  Description of Artificial Sequence: Synthetic oligonucleotide
gauucagggucugugcaca

SEQ ID NO: 1651479 - RNA, 19 nt, Artificial Sequence
  Description of Artificial Sequence: Synthetic oligonucleotide
uggcucagccacaaaacuu

SEQ ID NO: 1651480 - RNA, 19 nt, Artificial Sequence
  Description of Artificial Sequence: Synthetic oligonucleotide
caaaacuuccaaacuaggu

SEQ ID NO: 1651481 - RNA, 19 nt, Artificial Sequence
  Description of Artificial Sequence: Synthetic oligonucleotide
agggacugugcacauggga

SEQ ID NO: 1651482 - RNA, 19 nt, Artificial Sequence
  Description of Artificial Sequence: Synthetic oligonucleotide
uucuugcacagacuccgaa

SEQ ID NO: 1651483 - RNA, 19 nt, Artificial Sequence
  Description of Artificial Sequence: Synthetic oligonucleotide
auaucugcccuggcaaaag

SEQ ID NO: 1651484 - RNA, 19 nt, Artificial Sequence
  Description of Artificial Sequence: Synthetic oligonucleotide
cuugcuuggauucaggguu

SEQ ID NO: 1651485 - RNA, 19 nt, Artificial Sequence
  Description of Artificial Sequence: Synthetic oligonucleotide
auugggcgguagaugaagg

SEQ ID NO: 1651486 - RNA, 19 nt, Artificial Sequence
  Description of Artificial Sequence: Synthetic oligonucleotide
acggagauaucugcccugg

SEQ ID NO: 1651487 - RNA, 19 nt, Artificial Sequence
  Description of Artificial Sequence: Synthetic oligonucleotide
ugcccuggcaaaagauaug

SEQ ID NO: 1651488 - RNA, 19 nt, Artificial Sequence
  Description of Artificial Sequence: Synthetic oligonucleotide
agggcaugaauucgcuugu

SEQ ID NO: 1651489 - RNA, 19 nt, Artificial Sequence
  Description of Artificial Sequence: Synthetic oligonucleotide
gcaaccuuuaagauuucag

SEQ ID NO: 1651490 - RNA, 19 nt, Artificial Sequence
  Description of Artificial Sequence: Synthetic oligonucleotide
augcgcuguugacuaguac

SEQ ID NO: 1651491 - RNA, 19 nt, Artificial Sequence
  Description of Artificial Sequence: Synthetic oligonucleotide
gcuuucaauugccugcagc

SEQ ID NO: 1651492 - RNA, 19 nt, Artificial Sequence
  Description of Artificial Sequence: Synthetic oligonucleotide
ggauacacaaaccacuccu

SEQ ID NO: 1651493 - RNA, 19 nt, Artificial Sequence
  Description of Artificial Sequence: Synthetic oligonucleotide
gcagaagcgaguacacucg

SEQ ID NO: 1651494 - RNA, 19 nt, Artificial Sequence
  Description of Artificial Sequence: Synthetic oligonucleotide
accggaccggugcugguuc

SEQ ID NO: 1651495 - RNA, 19 nt, Artificial Sequence
  Description of Artificial Sequence: Synthetic oligonucleotide
ggagauaucugcccuggca

SEQ ID NO: 1651496 - RNA, 19 nt, Artificial Sequence
  Description of Artificial Sequence: Synthetic oligonucleotide
uggugagccaugaucuauu

SEQ ID NO: 1651497 - RNA, 19 nt, Artificial Sequence
  Description of Artificial Sequence: Synthetic oligonucleotide
uacaaugcgucggcucucc

SEQ ID NO: 1651498 - RNA, 19 nt, Artificial Sequence
  Description of Artificial Sequence: Synthetic oligonucleotide
ugcccuuacccaccugugu

SEQ ID NO: 1651499 - RNA, 19 nt, Artificial Sequence
  Description of Artificial Sequence: Synthetic oligonucleotide
cuuacccaccuguguagug

SEQ ID NO: 1651500 - RNA, 19 nt, Artificial Sequence
  Description of Artificial Sequence: Synthetic oligonucleotide
cagaagcgaguacacucgc

SEQ ID NO: 1651501 - RNA, 19 nt, Artificial Sequence
  Description of Artificial Sequence: Synthetic oligonucleotide
ucaauugccugcagcucuu

SEQ ID NO: 1651502 - RNA, 19 nt, Artificial Sequence
  Description of Artificial Sequence: Synthetic oligonucleotide
gguucauaagcugugaggu

SEQ ID NO: 1651503 - RNA, 19 nt, Artificial Sequence
  Description of Artificial Sequence: Synthetic oligonucleotide
ggaucuauacacauaggaa

SEQ ID NO: 1651504 - RNA, 19 nt, Artificial Sequence
  Description of Artificial Sequence: Synthetic oligonucleotide
ggcaugaauucgcuuguug

SEQ ID NO: 1651505 - RNA, 19 nt, Artificial Sequence
  Description of Artificial Sequence: Synthetic oligonucleotide
cucuggaguuaauguaauc

SEQ ID NO: 1651506 - RNA, 19 nt, Artificial Sequence
  Description of Artificial Sequence: Synthetic oligonucleotide
caaugagucuaggcgccgg

SEQ ID NO: 1651507 - RNA, 19 nt, Artificial Sequence
  Description of Artificial Sequence: Synthetic oligonucleotide
guuguauacuagguagcuc

SEQ ID NO: 1651508 - RNA, 19 nt, Artificial Sequence
  Description of Artificial Sequence: Synthetic oligonucleotide
gcuguugacuaguaccaac

SEQ ID NO: 1651509 - RNA, 19 nt, Artificial Sequence
  Description of Artificial Sequence: Synthetic oligonucleotide
gauaucugcccuggcaaaa

SEQ ID NO: 1651510 - RNA, 19 nt, Artificial Sequence
  Description of Artificial Sequence: Synthetic oligonucleotide
ccgaauuaguacacacggg

SEQ ID NO: 1651511 - RNA, 19 nt, Artificial Sequence
  Description of Artificial Sequence: Synthetic oligonucleotide
cgaauuaguacacacggga

SEQ ID NO: 1651512 - RNA, 19 nt, Artificial Sequence
  Description of Artificial Sequence: Synthetic oligonucleotide
ugaacuagccacggagaua

SEQ ID NO: 1651513 - RNA, 19 nt, Artificial Sequence
  Description of Artificial Sequence: Synthetic oligonucleotide
uaguacacacgggaacuuc

SEQ ID NO: 1651514 - RNA, 19 nt, Artificial Sequence
  Description of Artificial Sequence: Synthetic oligonucleotide
ugcacagcucuggaguuaa

SEQ ID NO: 1651515 - RNA, 19 nt, Artificial Sequence
  Description of Artificial Sequence: Synthetic oligonucleotide
cacgggaacuucuggcuuc

SEQ ID NO: 1651516 - RNA, 19 nt, Artificial Sequence
  Description of Artificial Sequence: Synthetic oligonucleotide
cacggagauaucugcccug

SEQ ID NO: 1651517 - RNA, 19 nt, Artificial Sequence
  Description of Artificial Sequence: Synthetic oligonucleotide
caacauggugaggccacgg

SEQ ID NO: 1651518 - RNA, 19 nt, Artificial Sequence
  Description of Artificial Sequence: Synthetic oligonucleotide
gagguugaagcaggcuagc

SEQ ID NO: 1651519 - RNA, 19 nt, Artificial Sequence
  Description of Artificial Sequence: Synthetic oligonucleotide
ggacugugcacaugggaac

SEQ ID NO: 1651520 - RNA, 19 nt, Artificial Sequence
  Description of Artificial Sequence: Synthetic oligonucleotide
cccaggauacacaaaccac

SEQ ID NO: 1651521 - RNA, 19 nt, Artificial Sequence
  Description of Artificial Sequence: Synthetic oligonucleotide
uuaguacacacgggaacuu

SEQ ID NO: 1651522 - RNA, 19 nt, Artificial Sequence
  Description of Artificial Sequence: Synthetic oligonucleotide
acaaggucugggugccuca

SEQ ID NO: 1651523 - RNA, 19 nt, Artificial Sequence
  Description of Artificial Sequence: Synthetic oligonucleotide
gguugaagcaggcuagcaa

SEQ ID NO: 1651524 - RNA, 19 nt, Artificial Sequence
  Description of Artificial Sequence: Synthetic oligonucleotide
gaggccuaacaaggucugg

SEQ ID NO: 1651525 - RNA, 19 nt, Artificial Sequence
  Description of Artificial Sequence: Synthetic oligonucleotide
ucgcugccggauugggcgg

SEQ ID NO: 1651526 - RNA, 19 nt, Artificial Sequence
  Description of Artificial Sequence: Synthetic oligonucleotide
gucggcucuccuuggagca

SEQ ID NO: 1651527 - RNA, 19 nt, Artificial Sequence
  Description of Artificial Sequence: Synthetic oligonucleotide
guauacuagguagcucuca

SEQ ID NO: 1651528 - RNA, 19 nt, Artificial Sequence
  Description of Artificial Sequence: Synthetic oligonucleotide
aggccacggacaaggaggg

SEQ ID NO: 1651529 - RNA, 19 nt, Artificial Sequence
  Description of Artificial Sequence: Synthetic oligonucleotide
aacuuccaaacuagguguu

SEQ ID NO: 1651530 - RNA, 19 nt, Artificial Sequence
  Description of Artificial Sequence: Synthetic oligonucleotide
gccacggagauaucugccc

SEQ ID NO: 1651531 - RNA, 19 nt, Artificial Sequence
  Description of Artificial Sequence: Synthetic oligonucleotide
uucagggucugugcacaug

SEQ ID NO: 1651532 - RNA, 19 nt, Artificial Sequence
  Description of Artificial Sequence: Synthetic oligonucleotide
ugcacucgaucucuccauu

SEQ ID NO: 1651533 - RNA, 19 nt, Artificial Sequence
  Description of Artificial Sequence: Synthetic oligonucleotide
aacuugccacuugcuuguc

SEQ ID NO: 1651534 - RNA, 19 nt, Artificial Sequence
  Description of Artificial Sequence: Synthetic oligonucleotide
acucgcugccggauugggc

SEQ ID NO: 1651535 - RNA, 19 nt, Artificial Sequence
  Description of Artificial Sequence: Synthetic oligonucleotide
ugaccaccggaccggugcu

SEQ ID NO: 1651536 - RNA, 19 nt, Artificial Sequence
  Description of Artificial Sequence: Synthetic oligonucleotide
ggggaagccacaugcgcug

SEQ ID NO: 1651537 - RNA, 19 nt, Artificial Sequence
  Description of Artificial Sequence: Synthetic oligonucleotide
acaugcgcuguugacuagu

SEQ ID NO: 1651538 - RNA, 19 nt, Artificial Sequence
  Description of Artificial Sequence: Synthetic oligonucleotide
gccuaacaaggucugggug

SEQ ID NO: 1651539 - RNA, 19 nt, Artificial Sequence
  Description of Artificial Sequence: Synthetic oligonucleotide
gcaugaauucgcuuguugu

SEQ ID NO: 1651540 - RNA, 19 nt, Artificial Sequence
  Description of Artificial Sequence: Synthetic oligonucleotide
aguacacucgcugccggau

SEQ ID NO: 1651541 - RNA, 19 nt, Artificial Sequence
  Description of Artificial Sequence: Synthetic oligonucleotide
acacgggaacuucuggcuu

SEQ ID NO: 1651542 - RNA, 19 nt, Artificial Sequence
  Description of Artificial Sequence: Synthetic oligonucleotide
cacagacuccgaauuagua

SEQ ID NO: 1651543 - RNA, 19 nt, Artificial Sequence
  Description of Artificial Sequence: Synthetic oligonucleotide
guaguuugaagaugucuuu

SEQ ID NO: 1651544 - RNA, 19 nt, Artificial Sequence
  Description of Artificial Sequence: Synthetic oligonucleotide
ugcgucggcucuccuugga

SEQ ID NO: 1651545 - RNA, 19 nt, Artificial Sequence
  Description of Artificial Sequence: Synthetic oligonucleotide
acaugggaacuuguuugga

SEQ ID NO: 1651546 - RNA, 19 nt, Artificial Sequence
  Description of Artificial Sequence: Synthetic oligonucleotide
ugccggauugggcgguaga

SEQ ID NO: 1651547 - RNA, 19 nt, Artificial Sequence
  Description of Artificial Sequence: Synthetic oligonucleotide
gagggaccccaacugcaca

SEQ ID NO: 1651548 - RNA, 19 nt, Artificial Sequence
  Description of Artificial Sequence: Synthetic oligonucleotide
cuugcacagacuccgaauu

SEQ ID NO: 1651549 - RNA, 19 nt, Artificial Sequence
  Description of Artificial Sequence: Synthetic oligonucleotide
cugugcacaugggaacuug

SEQ ID NO: 1651550 - RNA, 19 nt, Artificial Sequence
  Description of Artificial Sequence: Synthetic oligonucleotide
gcaaaagauaugaggccac

SEQ ID NO: 1651551 - RNA, 19 nt, Artificial Sequence
  Description of Artificial Sequence: Synthetic oligonucleotide
gacuccgaauuaguacaca

SEQ ID NO: 1651552 - RNA, 19 nt, Artificial Sequence
  Description of Artificial Sequence: Synthetic oligonucleotide
gcacaugggaauuucuugu

SEQ ID NO: 1651553 - RNA, 19 nt, Artificial Sequence
  Description of Artificial Sequence: Synthetic oligonucleotide
agguugaagcaggcuagca

SEQ ID NO: 1651554 - RNA, 19 nt, Artificial Sequence
  Description of Artificial Sequence: Synthetic oligonucleotide
cuucgauucuggaucuaua

SEQ ID NO: 1651555 - RNA, 19 nt, Artificial Sequence
  Description of Artificial Sequence: Synthetic oligonucleotide
gacauuccagggcaugaau

SEQ ID NO: 1651556 - RNA, 19 nt, Artificial Sequence
  Description of Artificial Sequence: Synthetic oligonucleotide
cacggacaaggagggaccc

SEQ ID NO: 1651557 - RNA, 19 nt, Artificial Sequence
  Description of Artificial Sequence: Synthetic oligonucleotide
agacauuccagggcaugaa

SEQ ID NO: 1651558 - RNA, 19 nt, Artificial Sequence
  Description of Artificial Sequence: Synthetic oligonucleotide
uccaguccccaagcagaag

SEQ ID NO: 1651559 - RNA, 19 nt, Artificial Sequence
  Description of Artificial Sequence: Synthetic oligonucleotide
ccaagcagaagcgaguaca

SEQ ID NO: 1651560 - RNA, 19 nt, Artificial Sequence
  Description of Artificial Sequence: Synthetic oligonucleotide
auaagcugugagguugauu

SEQ ID NO: 1651561 - RNA, 19 nt, Artificial Sequence
  Description of Artificial Sequence: Synthetic oligonucleotide
aggcuagcaaugagucuag

SEQ ID NO: 1651562 - RNA, 19 nt, Artificial Sequence
  Description of Artificial Sequence: Synthetic oligonucleotide
cacaugcgcuguugacuag

SEQ ID NO: 1651563 - RNA, 19 nt, Artificial Sequence
  Description of Artificial Sequence: Synthetic oligonucleotide
ggugagccaugaucuauuc

SEQ ID NO: 1651564 - RNA, 19 nt, Artificial Sequence
  Description of Artificial Sequence: Synthetic oligonucleotide
acacucgcugccggauugg

SEQ ID NO: 1651565 - RNA, 19 nt, Artificial Sequence
  Description of Artificial Sequence: Synthetic oligonucleotide
aguccccaagcagaagcga

SEQ ID NO: 1651566 - RNA, 19 nt, Artificial Sequence
  Description of Artificial Sequence: Synthetic oligonucleotide
gcacucgaucucuccauug

SEQ ID NO: 1651567 - RNA, 19 nt, Artificial Sequence
  Description of Artificial Sequence: Synthetic oligonucleotide
cacacgggaacuucuggcu

SEQ ID NO: 1651568 - RNA, 19 nt, Artificial Sequence
  Description of Artificial Sequence: Synthetic oligonucleotide
ccaggauacacaaaccacu

SEQ ID NO: 1651569 - RNA, 19 nt, Artificial Sequence
  Description of Artificial Sequence: Synthetic oligonucleotide
cugugcacaugggaacuuc

SEQ ID NO: 1651570 - RNA, 19 nt, Artificial Sequence
  Description of Artificial Sequence: Synthetic oligonucleotide
gacugugcacaugggaacu

SEQ ID NO: 1651571 - RNA, 19 nt, Artificial Sequence
  Description of Artificial Sequence: Synthetic oligonucleotide
cuugaccaccggaccggug

SEQ ID NO: 1651572 - RNA, 19 nt, Artificial Sequence
  Description of Artificial Sequence: Synthetic oligonucleotide
gcgaguacacucgcugccg

SEQ ID NO: 1651573 - RNA, 19 nt, Artificial Sequence
  Description of Artificial Sequence: Synthetic oligonucleotide
cugcccuggcaaaagauau

SEQ ID NO: 1651574 - RNA, 19 nt, Artificial Sequence
  Description of Artificial Sequence: Synthetic oligonucleotide
cccuuacccaccuguguag

SEQ ID NO: 1651575 - RNA, 19 nt, Artificial Sequence
  Description of Artificial Sequence: Synthetic oligonucleotide
cuguguagugagaguucca

SEQ ID NO: 1651576 - RNA, 19 nt, Artificial Sequence
  Description of Artificial Sequence: Synthetic oligonucleotide
gagucuaggcgccgggccu

SEQ ID NO: 1651577 - RNA, 19 nt, Artificial Sequence
  Description of Artificial Sequence: Synthetic oligonucleotide
cuugcuugucuguuauuau

SEQ ID NO: 1651578 - RNA, 19 nt, Artificial Sequence
  Description of Artificial Sequence: Synthetic oligonucleotide
cauacacaugaaugcuucu

SEQ ID NO: 1651579 - RNA, 19 nt, Artificial Sequence
  Description of Artificial Sequence: Synthetic oligonucleotide
cuacaaugcgucggcucuc

SEQ ID NO: 1651580 - RNA, 19 nt, Artificial Sequence
  Description of Artificial Sequence: Synthetic oligonucleotide
uugcugcacucgaucucuc

SEQ ID NO: 1651581 - RNA, 19 nt, Artificial Sequence
  Description of Artificial Sequence: Synthetic oligonucleotide
cucagggucugugcacaug

SEQ ID NO: 1651582 - RNA, 19 nt, Artificial Sequence
  Description of Artificial Sequence: Synthetic oligonucleotide
gggucugugcacaugggaa

SEQ ID NO: 1651583 - RNA, 19 nt, Artificial Sequence
  Description of Artificial Sequence: Synthetic oligonucleotide
gaccggugcugguuccauc

SEQ ID NO: 1651584 - RNA, 19 nt, Artificial Sequence
  Description of Artificial Sequence: Synthetic oligonucleotide
cggauugggcgguagauga

SEQ ID NO: 1651585 - RNA, 19 nt, Artificial Sequence
  Description of Artificial Sequence: Synthetic oligonucleotide
gcgcuguugacuaguacca

SEQ ID NO: 1651586 - RNA, 19 nt, Artificial Sequence
  Description of Artificial Sequence: Synthetic oligonucleotide
gugcccuuacccaccugug

SEQ ID NO: 1651587 - RNA, 19 nt, Artificial Sequence
  Description of Artificial Sequence: Synthetic oligonucleotide
ucuaggcgccgggccugcg

SEQ ID NO: 1651588 - RNA, 19 nt, Artificial Sequence
  Description of Artificial Sequence: Synthetic oligonucleotide
cgucggcucuccuuggagc

SEQ ID NO: 1651589 - RNA, 19 nt, Artificial Sequence
  Description of Artificial Sequence: Synthetic oligonucleotide
ggcuagcaaugagucuagg

SEQ ID NO: 1651590 - RNA, 19 nt, Artificial Sequence
  Description of Artificial Sequence: Synthetic oligonucleotide
ccuacaaugcgucggcucu

SEQ ID NO: 1651591 - RNA, 19 nt, Artificial Sequence
  Description of Artificial Sequence: Synthetic oligonucleotide
ccacaugcgcuguugacua

SEQ ID NO: 1651592 - RNA, 19 nt, Artificial Sequence
  Description of Artificial Sequence: Synthetic oligonucleotide
augugcccuuacccaccug

SEQ ID NO: 1651593 - RNA, 19 nt, Artificial Sequence
  Description of Artificial Sequence: Synthetic oligonucleotide
caauugccugcagcucuuc

SEQ ID NO: 1651594 - RNA, 19 nt, Artificial Sequence
  Description of Artificial Sequence: Synthetic oligonucleotide
gcccuuacccaccugugua

SEQ ID NO: 1651595 - RNA, 19 nt, Artificial Sequence
  Description of Artificial Sequence: Synthetic oligonucleotide
ggccuaacaaggucugggu

SEQ ID NO: 1651596 - RNA, 19 nt, Artificial Sequence
  Description of Artificial Sequence: Synthetic oligonucleotide
ccucaaugggcuuucaauu

SEQ ID NO: 1651597 - RNA, 19 nt, Artificial Sequence
  Description of Artificial Sequence: Synthetic oligonucleotide
ccaacauggugaggccacg

SEQ ID NO: 1651598 - RNA, 19 nt, Artificial Sequence
  Description of Artificial Sequence: Synthetic oligonucleotide
cugugagguugauuuuccu

SEQ ID NO: 1651599 - RNA, 19 nt, Artificial Sequence
  Description of Artificial Sequence: Synthetic oligonucleotide
gguagcucucagaguggac

SEQ ID NO: 1651600 - RNA, 19 nt, Artificial Sequence
  Description of Artificial Sequence: Synthetic oligonucleotide
cugcacucgaucucuccau

SEQ ID NO: 1651601 - RNA, 19 nt, Artificial Sequence
  Description of Artificial Sequence: Synthetic oligonucleotide
ccggauugggcgguagaug

SEQ ID NO: 1651602 - RNA, 19 nt, Artificial Sequence
  Description of Artificial Sequence: Synthetic oligonucleotide
ugcccucaaugggcuuuca

SEQ ID NO: 1651603 - RNA, 19 nt, Artificial Sequence
  Description of Artificial Sequence: Synthetic oligonucleotide
cugccggauugggcgguag

SEQ ID NO: 1651604 - RNA, 19 nt, Artificial Sequence
  Description of Artificial Sequence: Synthetic oligonucleotide
cccucaaugggcuuucaau

SEQ ID NO: 1651605 - RNA, 19 nt, Artificial Sequence
  Description of Artificial Sequence: Synthetic oligonucleotide
gccacaugcgcuguugacu

SEQ ID NO: 1651606 - RNA, 19 nt, Artificial Sequence
  Description of Artificial Sequence: Synthetic oligonucleotide
cagaguggacaugaugcau

SEQ ID NO: 1651607 - RNA, 19 nt, Artificial Sequence
  Description of Artificial Sequence: Synthetic oligonucleotide
cagguucuauauccauggu

SEQ ID NO: 1651608 - RNA, 19 nt, Artificial Sequence
  Description of Artificial Sequence: Synthetic oligonucleotide
gcaagccuuacagaccacu

SEQ ID NO: 1651609 - RNA, 19 nt, Artificial Sequence
  Description of Artificial Sequence: Synthetic oligonucleotide
ccccuugaagggucaucug

SEQ ID NO: 1651610 - RNA, 19 nt, Artificial Sequence
  Description of Artificial Sequence: Synthetic oligonucleotide
aggcgccgggccugcgcug

SEQ ID NO: 1651611 - RNA, 19 nt, Artificial Sequence
  Description of Artificial Sequence: Synthetic oligonucleotide
ggaccccaacugcacagcu

SEQ ID NO: 1651612 - RNA, 19 nt, Artificial Sequence
  Description of Artificial Sequence: Synthetic oligonucleotide
guacacucgcugccggauu

SEQ ID NO: 1651613 - RNA, 19 nt, Artificial Sequence
  Description of Artificial Sequence: Synthetic oligonucleotide
gcuucgauucuggaucuau

SEQ ID NO: 1651614 - RNA, 19 nt, Artificial Sequence
  Description of Artificial Sequence: Synthetic oligonucleotide
ggauugggcgguagaugaa

SEQ ID NO: 1651615 - RNA, 19 nt, Artificial Sequence
  Description of Artificial Sequence: Synthetic oligonucleotide
gugcacaugggaacuuguu

SEQ ID NO: 1651616 - RNA, 19 nt, Artificial Sequence
  Description of Artificial Sequence: Synthetic oligonucleotide
gcccucaaugggcuuucaa

SEQ ID NO: 1651617 - RNA, 19 nt, Artificial Sequence
  Description of Artificial Sequence: Synthetic oligonucleotide
gugcacaugggaacuucuu

SEQ ID NO: 1651618 - RNA, 19 nt, Artificial Sequence
  Description of Artificial Sequence: Synthetic oligonucleotide
ccuuacagaccacugccuu

SEQ ID NO: 1651619 - RNA, 19 nt, Artificial Sequence
  Description of Artificial Sequence: Synthetic oligonucleotide
ccacggagauaucugcccu

SEQ ID NO: 1651620 - RNA, 19 nt, Artificial Sequence
  Description of Artificial Sequence: Synthetic oligonucleotide
cauaagcugugagguugau

SEQ ID NO: 1651621 - RNA, 19 nt, Artificial Sequence
  Description of Artificial Sequence: Synthetic oligonucleotide
gccggauugggcgguagau

SEQ ID NO: 1651622 - RNA, 19 nt, Artificial Sequence
  Description of Artificial Sequence: Synthetic oligonucleotide
gcgcugcugggucuuggcu

SEQ ID NO: 1651623 - RNA, 19 nt, Artificial Sequence
  Description of Artificial Sequence: Synthetic oligonucleotide
ccaccuguguagugagagu

SEQ ID NO: 1651624 - RNA, 19 nt, Artificial Sequence
  Description of Artificial Sequence: Synthetic oligonucleotide
ggcuucgauucuggaucua

SEQ ID NO: 1651625 - RNA, 19 nt, Artificial Sequence
  Description of Artificial Sequence: Synthetic oligonucleotide
ccagggcaugaauucgcuu

SEQ ID NO: 1651626 - RNA, 19 nt, Artificial Sequence
  Description of Artificial Sequence: Synthetic oligonucleotide
cagugcccucaaugggcuu

SEQ ID NO: 1651627 - RNA, 19 nt, Artificial Sequence
  Description of Artificial Sequence: Synthetic oligonucleotide
caccggaccggugcugguu

SEQ ID NO: 1651628 - RNA, 19 nt, Artificial Sequence
  Description of Artificial Sequence: Synthetic oligonucleotide
ggaccggugcugguuccau

SEQ ID NO: 1651629 - RNA, 19 nt, Artificial Sequence
  Description of Artificial Sequence: Synthetic oligonucleotide
cgcuguugacuaguaccaa

SEQ ID NO: 1651630 - RNA, 19 nt, Artificial Sequence
  Description of Artificial Sequence: Synthetic oligonucleotide
gggcaugaauucgcuuguu

SEQ ID NO: 1651631 - RNA, 19 nt, Artificial Sequence
  Description of Artificial Sequence: Synthetic oligonucleotide
gcugccggauugggcggua

SEQ ID NO: 1651632 - RNA, 19 nt, Artificial Sequence
  Description of Artificial Sequence: Synthetic oligonucleotide
ccuugaccaccggaccggu

SEQ ID NO: 1651633 - RNA, 19 nt, Artificial Sequence
  Description of Artificial Sequence: Synthetic oligonucleotide
cggaccggugcugguucca

SEQ ID NO: 1651634 - RNA, 19 nt, Artificial Sequence
  Description of Artificial Sequence: Synthetic oligonucleotide
ccaccggaccggugcuggu

SEQ ID NO: 1651635 - RNA, 19 nt, Artificial Sequence
  Description of Artificial Sequence: Synthetic oligonucleotide
gcacagcucuggaguuaau

SEQ ID NO: 1651636 - RNA, 19 nt, Artificial Sequence
  Description of Artificial Sequence: Synthetic oligonucleotide
aaucacaguaccuagaugc

SEQ ID NO: 1651637 - RNA, 19 nt, Artificial Sequence
  Description of Artificial Sequence: Synthetic oligonucleotide
uguaauaucagcuucuccc

SEQ ID NO: 1651638 - RNA, 19 nt, Artificial Sequence
  Description of Artificial Sequence: Synthetic oligonucleotide
uaauuuauugacuaaagcu

SEQ ID NO: 1651639 - RNA, 19 nt, Artificial Sequence
  Description of Artificial Sequence: Synthetic oligonucleotide
aagaaauagagaugaaggg

SEQ ID NO: 1651640 - RNA, 19 nt, Artificial Sequence
  Description of Artificial Sequence: Synthetic oligonucleotide
uguaguguggcccaggccg

SEQ ID NO: 1651641 - RNA, 19 nt, Artificial Sequence
  Description of Artificial Sequence: Synthetic oligonucleotide
aauuuauugacuaaagcug

SEQ ID NO: 1651642 - RNA, 19 nt, Artificial Sequence
  Description of Artificial Sequence: Synthetic oligonucleotide
gaagguauagaugaguucc

SEQ ID NO: 1651643 - RNA, 19 nt, Artificial Sequence
  Description of Artificial Sequence: Synthetic oligonucleotide
agaaaggaaguuuccaugg

SEQ ID NO: 1651644 - RNA, 19 nt, Artificial Sequence
  Description of Artificial Sequence: Synthetic oligonucleotide
cucacaaggacuaaucugc

SEQ ID NO: 1651645 - RNA, 19 nt, Artificial Sequence
  Description of Artificial Sequence: Synthetic oligonucleotide
ugguaaaugucacagugcc

SEQ ID NO: 1651646 - RNA, 19 nt, Artificial Sequence
  Description of Artificial Sequence: Synthetic oligonucleotide
auggguaugggauccaggc

SEQ ID NO: 1651647 - RNA, 19 nt, Artificial Sequence
  Description of Artificial Sequence: Synthetic oligonucleotide
auugacuaaagcugcugcc

SEQ ID NO: 1651648 - RNA, 19 nt, Artificial Sequence
  Description of Artificial Sequence: Synthetic oligonucleotide
auagaugaguuccugugac

SEQ ID NO: 1651649 - RNA, 19 nt, Artificial Sequence
  Description of Artificial Sequence: Synthetic oligonucleotide
aguaccuagaugcuuuugg

SEQ ID NO: 1651650 - RNA, 19 nt, Artificial Sequence
  Description of Artificial Sequence: Synthetic oligonucleotide
gaaauagagaugaagggac

SEQ ID NO: 1651651 - RNA, 19 nt, Artificial Sequence
  Description of Artificial Sequence: Synthetic oligonucleotide
guaauuuauugacuaaagc

SEQ ID NO: 1651652 - RNA, 19 nt, Artificial Sequence
  Description of Artificial Sequence: Synthetic oligonucleotide
uauugacuaaagcugcugc

SEQ ID NO: 1651653 - RNA, 19 nt, Artificial Sequence
  Description of Artificial Sequence: Synthetic oligonucleotide
gaagggacagugcugagag

SEQ ID NO: 1651654 - RNA, 19 nt, Artificial Sequence
  Description of Artificial Sequence: Synthetic oligonucleotide
gugaaaguggccgugaagg

SEQ ID NO: 1651655 - RNA, 19 nt, Artificial Sequence
  Description of Artificial Sequence: Synthetic oligonucleotide
agcacuccagaacacaaac

SEQ ID NO: 1651656 - RNA, 19 nt, Artificial Sequence
  Description of Artificial Sequence: Synthetic oligonucleotide
aaaggaaguuuccaugggu

SEQ ID NO: 1651657 - RNA, 19 nt, Artificial Sequence
  Description of Artificial Sequence: Synthetic oligonucleotide
gaaguuuccauggguaugg

SEQ ID NO: 1651658 - RNA, 19 nt, Artificial Sequence
  Description of Artificial Sequence: Synthetic oligonucleotide
gaguccuggaaucucagag

SEQ ID NO: 1651659 - RNA, 19 nt, Artificial Sequence
  Description of Artificial Sequence: Synthetic oligonucleotide
ucaagagcaagauguuggg

SEQ ID NO: 1651660 - RNA, 19 nt, Artificial Sequence
  Description of Artificial Sequence: Synthetic oligonucleotide
agccgaagggcccacacgc

SEQ ID NO: 1651661 - RNA, 19 nt, Artificial Sequence
  Description of Artificial Sequence: Synthetic oligonucleotide
ugcagcuguaauaucagcu

SEQ ID NO: 1651662 - RNA, 19 nt, Artificial Sequence
  Description of Artificial Sequence: Synthetic oligonucleotide
agaagcuacaacaagaaau

SEQ ID NO: 1651663 - RNA, 19 nt, Artificial Sequence
  Description of Artificial Sequence: Synthetic oligonucleotide
acaaggacuaaucugcaga

SEQ ID NO: 1651664 - RNA, 19 nt, Artificial Sequence
  Description of Artificial Sequence: Synthetic oligonucleotide
ucauaauccagggcgaugc

SEQ ID NO: 1651665 - RNA, 19 nt, Artificial Sequence
  Description of Artificial Sequence: Synthetic oligonucleotide
agcuuugcuaaccacacca

SEQ ID NO: 1651666 - RNA, 19 nt, Artificial Sequence
  Description of Artificial Sequence: Synthetic oligonucleotide
uguaaugucccucuucuuu

SEQ ID NO: 1651667 - RNA, 19 nt, Artificial Sequence
  Description of Artificial Sequence: Synthetic oligonucleotide
aguagugcaacuucuccug

SEQ ID NO: 1651668 - RNA, 19 nt, Artificial Sequence
  Description of Artificial Sequence: Synthetic oligonucleotide
aggacuaaucugcagaggu

SEQ ID NO: 1651669 - RNA, 19 nt, Artificial Sequence
  Description of Artificial Sequence: Synthetic oligonucleotide
ugugacucugcauugguaa

SEQ ID NO: 1651670 - RNA, 19 nt, Artificial Sequence
  Description of Artificial Sequence: Synthetic oligonucleotide
ugaaucacaguaccuagau

SEQ ID NO: 1651671 - RNA, 19 nt, Artificial Sequence
  Description of Artificial Sequence: Synthetic oligonucleotide
agaugauuccaccagcacu

SEQ ID NO: 1651672 - RNA, 19 nt, Artificial Sequence
  Description of Artificial Sequence: Synthetic oligonucleotide
cugaucaagagcaagaugu

SEQ ID NO: 1651673 - RNA, 19 nt, Artificial Sequence
  Description of Artificial Sequence: Synthetic oligonucleotide
ugagcuuugcuaaccacac

SEQ ID NO: 1651674 - RNA, 19 nt, Artificial Sequence
  Description of Artificial Sequence: Synthetic oligonucleotide
aauuggauguaaugucccu

SEQ ID NO: 1651675 - RNA, 19 nt, Artificial Sequence
  Description of Artificial Sequence: Synthetic oligonucleotide
gaagauucuguaguguggc

SEQ ID NO: 1651676 - RNA, 19 nt, Artificial Sequence
  Description of Artificial Sequence: Synthetic oligonucleotide
uucucccuuggccugaaag

SEQ ID NO: 1651677 - RNA, 19 nt, Artificial Sequence
  Description of Artificial Sequence: Synthetic oligonucleotide
ucugccacaauguacuguc

SEQ ID NO: 1651678 - RNA, 19 nt, Artificial Sequence
  Description of Artificial Sequence: Synthetic oligonucleotide
cacaacuucauguccugcg

SEQ ID NO: 1651679 - RNA, 19 nt, Artificial Sequence
  Description of Artificial Sequence: Synthetic oligonucleotide
caauuggauguaauguccc

SEQ ID NO: 1651680 - RNA, 19 nt, Artificial Sequence
  Description of Artificial Sequence: Synthetic oligonucleotide
uaauccagggcgaugccca

SEQ ID NO: 1651681 - RNA, 19 nt, Artificial Sequence
  Description of Artificial Sequence: Synthetic oligonucleotide
caaacucacacagccaugg

SEQ ID NO: 1651682 - RNA, 19 nt, Artificial Sequence
  Description of Artificial Sequence: Synthetic oligonucleotide
uaccuagaugcuuuuggag

SEQ ID NO: 1651683 - RNA, 19 nt, Artificial Sequence
  Description of Artificial Sequence: Synthetic oligonucleotide
aacuucauguccugcggcu

SEQ ID NO: 1651684 - RNA, 19 nt, Artificial Sequence
  Description of Artificial Sequence: Synthetic oligonucleotide
uggaaacuugagaagcuac

SEQ ID NO: 1651685 - RNA, 19 nt, Artificial Sequence
  Description of Artificial Sequence: Synthetic oligonucleotide
cccuucauaauccagggcg

SEQ ID NO: 1651686 - RNA, 19 nt, Artificial Sequence
  Description of Artificial Sequence: Synthetic oligonucleotide
uucgcaauaguagugcaac

SEQ ID NO: 1651687 - RNA, 19 nt, Artificial Sequence
  Description of Artificial Sequence: Synthetic oligonucleotide
aaccuccuccuccuccucc

SEQ ID NO: 1651688 - RNA, 19 nt, Artificial Sequence
  Description of Artificial Sequence: Synthetic oligonucleotide
cucacgcuucuuuagaaac

SEQ ID NO: 1651689 - RNA, 19 nt, Artificial Sequence
  Description of Artificial Sequence: Synthetic oligonucleotide
auaauccagggcgaugccc

SEQ ID NO: 1651690 - RNA, 19 nt, Artificial Sequence
  Description of Artificial Sequence: Synthetic oligonucleotide
cuuugcuaaccacaccagg

SEQ ID NO: 1651691 - RNA, 19 nt, Artificial Sequence
  Description of Artificial Sequence: Synthetic oligonucleotide
ucucccuuggccugaaagc

SEQ ID NO: 1651692 - RNA, 19 nt, Artificial Sequence
  Description of Artificial Sequence: Synthetic oligonucleotide
aacucacacagccauggaa

SEQ ID NO: 1651693 - RNA, 19 nt, Artificial Sequence
  Description of Artificial Sequence: Synthetic oligonucleotide
ggugcuuuggccaagaaca

SEQ ID NO: 1651694 - RNA, 19 nt, Artificial Sequence
  Description of Artificial Sequence: Synthetic oligonucleotide
gauggguggcaauuggaug

SEQ ID NO: 1651695 - RNA, 19 nt, Artificial Sequence
  Description of Artificial Sequence: Synthetic oligonucleotide
aaacugguggcccugcuua

SEQ ID NO: 1651696 - RNA, 19 nt, Artificial Sequence
  Description of Artificial Sequence: Synthetic oligonucleotide
uuuagaaacugguggcccu

SEQ ID NO: 1651697 - RNA, 19 nt, Artificial Sequence
  Description of Artificial Sequence: Synthetic oligonucleotide
gauguaaugucccucuucu

SEQ ID NO: 1651698 - RNA, 19 nt, Artificial Sequence
  Description of Artificial Sequence: Synthetic oligonucleotide
ugacuaaagcugcugccug

SEQ ID NO: 1651699 - RNA, 19 nt, Artificial Sequence
  Description of Artificial Sequence: Synthetic oligonucleotide
ucgucuucgcaauaguagu

SEQ ID NO: 1651700 - RNA, 19 nt, Artificial Sequence
  Description of Artificial Sequence: Synthetic oligonucleotide
uggcaauuggauguaaugu

SEQ ID NO: 1651701 - RNA, 19 nt, Artificial Sequence
  Description of Artificial Sequence: Synthetic oligonucleotide
gauuccaccagcacuccag

SEQ ID NO: 1651702 - RNA, 19 nt, Artificial Sequence
  Description of Artificial Sequence: Synthetic oligonucleotide
cuuuagaaacugguggccc

SEQ ID NO: 1651703 - RNA, 19 nt, Artificial Sequence
  Description of Artificial Sequence: Synthetic oligonucleotide
aagcuacaacaagaaauag

SEQ ID NO: 1651704 - RNA, 19 nt, Artificial Sequence
  Description of Artificial Sequence: Synthetic oligonucleotide
cucacacaacuucaugucc

SEQ ID NO: 1651705 - RNA, 19 nt, Artificial Sequence
  Description of Artificial Sequence: Synthetic oligonucleotide
ucuaccuucagccgcucaa

SEQ ID NO: 1651706 - RNA, 19 nt, Artificial Sequence
  Description of Artificial Sequence: Synthetic oligonucleotide
cauugucuaccuucagccg

SEQ ID NO: 1651707 - RNA, 19 nt, Artificial Sequence
  Description of Artificial Sequence: Synthetic oligonucleotide
guggcaauuggauguaaug

SEQ ID NO: 1651708 - RNA, 19 nt, Artificial Sequence
  Description of Artificial Sequence: Synthetic oligonucleotide
aucgucuucgcaauaguag

SEQ ID NO: 1651709 - RNA, 19 nt, Artificial Sequence
  Description of Artificial Sequence: Synthetic oligonucleotide
acaauguacugucucugcu

SEQ ID NO: 1651710 - RNA, 19 nt, Artificial Sequence
  Description of Artificial Sequence: Synthetic oligonucleotide
aaggacuaaucugcagagg

SEQ ID NO: 1651711 - RNA, 19 nt, Artificial Sequence
  Description of Artificial Sequence: Synthetic oligonucleotide
cacaccaggagaugauucc

SEQ ID NO: 1651712 - RNA, 19 nt, Artificial Sequence
  Description of Artificial Sequence: Synthetic oligonucleotide
cucagcucuagguuuggag

SEQ ID NO: 1651713 - RNA, 19 nt, Artificial Sequence
  Description of Artificial Sequence: Synthetic oligonucleotide
agugcaacuucuccuggug

SEQ ID NO: 1651714 - RNA, 19 nt, Artificial Sequence
  Description of Artificial Sequence: Synthetic oligonucleotide
aaauagagaugaagggaca

SEQ ID NO: 1651715 - RNA, 19 nt, Artificial Sequence
  Description of Artificial Sequence: Synthetic oligonucleotide
ccuuaagguguucaggugg

SEQ ID NO: 1651716 - RNA, 19 nt, Artificial Sequence
  Description of Artificial Sequence: Synthetic oligonucleotide
cacaauguacugucucugc

SEQ ID NO: 1651717 - RNA, 19 nt, Artificial Sequence
  Description of Artificial Sequence: Synthetic oligonucleotide
uggugcuuuggccaagaac

SEQ ID NO: 1651718 - RNA, 19 nt, Artificial Sequence
  Description of Artificial Sequence: Synthetic oligonucleotide
cuugccaucgucuucgcaa

SEQ ID NO: 1651719 - RNA, 19 nt, Artificial Sequence
  Description of Artificial Sequence: Synthetic oligonucleotide
gcauugguaaaugucacag

SEQ ID NO: 1651720 - RNA, 19 nt, Artificial Sequence
  Description of Artificial Sequence: Synthetic oligonucleotide
ucacaaggacuaaucugca

SEQ ID NO: 1651721 - RNA, 19 nt, Artificial Sequence
  Description of Artificial Sequence: Synthetic oligonucleotide
ucuucgcaauaguagugca

SEQ ID NO: 1651722 - RNA, 19 nt, Artificial Sequence
  Description of Artificial Sequence: Synthetic oligonucleotide
aaaacuccccucacaagga

SEQ ID NO: 1651723 - RNA, 19 nt, Artificial Sequence
  Description of Artificial Sequence: Synthetic oligonucleotide
cagcucuagguuuggaggc

SEQ ID NO: 1651724 - RNA, 19 nt, Artificial Sequence
  Description of Artificial Sequence: Synthetic oligonucleotide
gagaugaagggacagugcu

SEQ ID NO: 1651725 - RNA, 19 nt, Artificial Sequence
  Description of Artificial Sequence: Synthetic oligonucleotide
uggcccagaugccugagga

SEQ ID NO: 1651726 - RNA, 19 nt, Artificial Sequence
  Description of Artificial Sequence: Synthetic oligonucleotide
gccgugaagguauagauga

SEQ ID NO: 1651727 - RNA, 19 nt, Artificial Sequence
  Description of Artificial Sequence: Synthetic oligonucleotide
uccuuaagguguucaggug

SEQ ID NO: 1651728 - RNA, 19 nt, Artificial Sequence
  Description of Artificial Sequence: Synthetic oligonucleotide
aguccuggaaucucagaga

SEQ ID NO: 1651729 - RNA, 19 nt, Artificial Sequence
  Description of Artificial Sequence: Synthetic oligonucleotide
ccugcuuaaauucugccac

SEQ ID NO: 1651730 - RNA, 19 nt, Artificial Sequence
  Description of Artificial Sequence: Synthetic oligonucleotide
aguaggcguguuccuggcc

SEQ ID NO: 1651731 - RNA, 19 nt, Artificial Sequence
  Description of Artificial Sequence: Synthetic oligonucleotide
agguaauuuauugacuaaa

SEQ ID NO: 1651732 - RNA, 19 nt, Artificial Sequence
  Description of Artificial Sequence: Synthetic oligonucleotide
gacuaaucugcagagguaa

SEQ ID NO: 1651733 - RNA, 19 nt, Artificial Sequence
  Description of Artificial Sequence: Synthetic oligonucleotide
uguguucccgggacucgcg

SEQ ID NO: 1651734 - RNA, 19 nt, Artificial Sequence
  Description of Artificial Sequence: Synthetic oligonucleotide
agcuacaacaagaaauaga

SEQ ID NO: 1651735 - RNA, 19 nt, Artificial Sequence
  Description of Artificial Sequence: Synthetic oligonucleotide
ugggccucgggacuggugu

SEQ ID NO: 1651736 - RNA, 19 nt, Artificial Sequence
  Description of Artificial Sequence: Synthetic oligonucleotide
gagaugauuccaccagcac

SEQ ID NO: 1651737 - RNA, 19 nt, Artificial Sequence
  Description of Artificial Sequence: Synthetic oligonucleotide
ggcaauuggauguaauguc

SEQ ID NO: 1651738 - RNA, 19 nt, Artificial Sequence
  Description of Artificial Sequence: Synthetic oligonucleotide
uggguaugggauccaggca

SEQ ID NO: 1651739 - RNA, 19 nt, Artificial Sequence
  Description of Artificial Sequence: Synthetic oligonucleotide
cagcuugccaucgucuucg

SEQ ID NO: 1651740 - RNA, 19 nt, Artificial Sequence
  Description of Artificial Sequence: Synthetic oligonucleotide
aaacucacacagccaugga

SEQ ID NO: 1651741 - RNA, 19 nt, Artificial Sequence
  Description of Artificial Sequence: Synthetic oligonucleotide
agcucuagguuuggaggcc

SEQ ID NO: 1651742 - RNA, 19 nt, Artificial Sequence
  Description of Artificial Sequence: Synthetic oligonucleotide
uccucacugacgccccggg

SEQ ID NO: 1651743 - RNA, 19 nt, Artificial Sequence
  Description of Artificial Sequence: Synthetic oligonucleotide
gacucugcauugguaaaug

SEQ ID NO: 1651744 - RNA, 19 nt, Artificial Sequence
  Description of Artificial Sequence: Synthetic oligonucleotide
gcaauuggauguaaugucc

SEQ ID NO: 1651745 - RNA, 19 nt, Artificial Sequence
  Description of Artificial Sequence: Synthetic oligonucleotide
ucgggacugguguuggccc

SEQ ID NO: 1651746 - RNA, 19 nt, Artificial Sequence
  Description of Artificial Sequence: Synthetic oligonucleotide
uggccgugaagguauagau

SEQ ID NO: 1651747 - RNA, 19 nt, Artificial Sequence
  Description of Artificial Sequence: Synthetic oligonucleotide
ugccugaggaggagagccg

SEQ ID NO: 1651748 - RNA, 19 nt, Artificial Sequence
  Description of Artificial Sequence: Synthetic oligonucleotide
guaccuagaugcuuuugga

SEQ ID NO: 1651749 - RNA, 19 nt, Artificial Sequence
  Description of Artificial Sequence: Synthetic oligonucleotide
uucauaauccagggcgaug

SEQ ID NO: 1651750 - RNA, 19 nt, Artificial Sequence
  Description of Artificial Sequence: Synthetic oligonucleotide
agggucucagcaguaggcg

SEQ ID NO: 1651751 - RNA, 19 nt, Artificial Sequence
  Description of Artificial Sequence: Synthetic oligonucleotide
ggagauggguggcaauugg

SEQ ID NO: 1651752 - RNA, 19 nt, Artificial Sequence
  Description of Artificial Sequence: Synthetic oligonucleotide
gagguaauuuauugacuaa

SEQ ID NO: 1651753 - RNA, 19 nt, Artificial Sequence
  Description of Artificial Sequence: Synthetic oligonucleotide
uagaugaguuccugugacu

SEQ ID NO: 1651754 - RNA, 19 nt, Artificial Sequence
  Description of Artificial Sequence: Synthetic oligonucleotide
uaauaucagcuucucccuu

SEQ ID NO: 1651755 - RNA, 19 nt, Artificial Sequence
  Description of Artificial Sequence: Synthetic oligonucleotide
guaauaucagcuucucccu

SEQ ID NO: 1651756 - RNA, 19 nt, Artificial Sequence
  Description of Artificial Sequence: Synthetic oligonucleotide
ccauggaaacuugagaagc

SEQ ID NO: 1651757 - RNA, 19 nt, Artificial Sequence
  Description of Artificial Sequence: Synthetic oligonucleotide
aggcaacccuucuucaucu

SEQ ID NO: 1651758 - RNA, 19 nt, Artificial Sequence
  Description of Artificial Sequence: Synthetic oligonucleotide
cacgcuucuuuagaaacug

SEQ ID NO: 1651759 - RNA, 19 nt, Artificial Sequence
  Description of Artificial Sequence: Synthetic oligonucleotide
ggaucccaaagaaaggaag

SEQ ID NO: 1651760 - RNA, 19 nt, Artificial Sequence
  Description of Artificial Sequence: Synthetic oligonucleotide
acucacacagccauggaaa

SEQ ID NO: 1651761 - RNA, 19 nt, Artificial Sequence
  Description of Artificial Sequence: Synthetic oligonucleotide
uccugugacucugcauugg

SEQ ID NO: 1651762 - RNA, 19 nt, Artificial Sequence
  Description of Artificial Sequence: Synthetic oligonucleotide
auguccugcggcucucggg

SEQ ID NO: 1651763 - RNA, 19 nt, Artificial Sequence
  Description of Artificial Sequence: Synthetic oligonucleotide
cuucuuuccuccccuggug

SEQ ID NO: 1651764 - RNA, 19 nt, Artificial Sequence
  Description of Artificial Sequence: Synthetic oligonucleotide
aaguuuccauggguauggg

SEQ ID NO: 1651765 - RNA, 19 nt, Artificial Sequence
  Description of Artificial Sequence: Synthetic oligonucleotide
guaggcguguuccuggcca

SEQ ID NO: 1651766 - RNA, 19 nt, Artificial Sequence
  Description of Artificial Sequence: Synthetic oligonucleotide
aguuuccauggguauggga

SEQ ID NO: 1651767 - RNA, 19 nt, Artificial Sequence
  Description of Artificial Sequence: Synthetic oligonucleotide
uguggggccuguguucccg

SEQ ID NO: 1651768 - RNA, 19 nt, Artificial Sequence
  Description of Artificial Sequence: Synthetic oligonucleotide
ugcuuaaauucugccacaa

SEQ ID NO: 1651769 - RNA, 19 nt, Artificial Sequence
  Description of Artificial Sequence: Synthetic oligonucleotide
ccuagaugcuuuuggagac

SEQ ID NO: 1651770 - RNA, 19 nt, Artificial Sequence
  Description of Artificial Sequence: Synthetic oligonucleotide
gccaagaacauuucuucac

SEQ ID NO: 1651771 - RNA, 19 nt, Artificial Sequence
  Description of Artificial Sequence: Synthetic oligonucleotide
gagccgaagggcccacacg

SEQ ID NO: 1651772 - RNA, 19 nt, Artificial Sequence
  Description of Artificial Sequence: Synthetic oligonucleotide
caggguggccagcuggucg

SEQ ID NO: 1651773 - RNA, 19 nt, Artificial Sequence
  Description of Artificial Sequence: Synthetic oligonucleotide
uuuggaggccaugagcuuu

SEQ ID NO: 1651774 - RNA, 19 nt, Artificial Sequence
  Description of Artificial Sequence: Synthetic oligonucleotide
cuacaacaagaaauagaga

SEQ ID NO: 1651775 - RNA, 19 nt, Artificial Sequence
  Description of Artificial Sequence: Synthetic oligonucleotide
guccuggaaucucagagaa

SEQ ID NO: 1651776 - RNA, 19 nt, Artificial Sequence
  Description of Artificial Sequence: Synthetic oligonucleotide
ggccacuugagccacagga

SEQ ID NO: 1651777 - RNA, 19 nt, Artificial Sequence
  Description of Artificial Sequence: Synthetic oligonucleotide
agggcgaugcccacccucc

SEQ ID NO: 1651778 - RNA, 19 nt, Artificial Sequence
  Description of Artificial Sequence: Synthetic oligonucleotide
ucgucagugcagcuguaau

SEQ ID NO: 1651779 - RNA, 19 nt, Artificial Sequence
  Description of Artificial Sequence: Synthetic oligonucleotide
ucgcaauaguagugcaacu

SEQ ID NO: 1651780 - RNA, 19 nt, Artificial Sequence
  Description of Artificial Sequence: Synthetic oligonucleotide
cauaauccagggcgaugcc

SEQ ID NO: 1651781 - RNA, 19 nt, Artificial Sequence
  Description of Artificial Sequence: Synthetic oligonucleotide
gcaguaggcguguuccugg

SEQ ID NO: 1651782 - RNA, 19 nt, Artificial Sequence
  Description of Artificial Sequence: Synthetic oligonucleotide
gaucccaaagaaaggaagu

SEQ ID NO: 1651783 - RNA, 19 nt, Artificial Sequence
  Description of Artificial Sequence: Synthetic oligonucleotide
ccucacaaggacuaaucug

SEQ ID NO: 1651784 - RNA, 19 nt, Artificial Sequence
  Description of Artificial Sequence: Synthetic oligonucleotide
guuuccauggguaugggau

SEQ ID NO: 1651785 - RNA, 19 nt, Artificial Sequence
  Description of Artificial Sequence: Synthetic oligonucleotide
ugguguuggcccagaugcc

SEQ ID NO: 1651786 - RNA, 19 nt, Artificial Sequence
  Description of Artificial Sequence: Synthetic oligonucleotide
uucuguaguguggcccagg

SEQ ID NO: 1651787 - RNA, 19 nt, Artificial Sequence
  Description of Artificial Sequence: Synthetic oligonucleotide
cugaaucacaguaccuaga

SEQ ID NO: 1651788 - RNA, 19 nt, Artificial Sequence
  Description of Artificial Sequence: Synthetic oligonucleotide
gagcuuugcuaaccacacc

SEQ ID NO: 1651789 - RNA, 19 nt, Artificial Sequence
  Description of Artificial Sequence: Synthetic oligonucleotide
gguggcccugcuuaaauuc

SEQ ID NO: 1651790 - RNA, 19 nt, Artificial Sequence
  Description of Artificial Sequence: Synthetic oligonucleotide
cuccuuaagguguucaggu

SEQ ID NO: 1651791 - RNA, 19 nt, Artificial Sequence
  Description of Artificial Sequence: Synthetic oligonucleotide
uggccugaaagcccugaau

SEQ ID NO: 1651792 - RNA, 19 nt, Artificial Sequence
  Description of Artificial Sequence: Synthetic oligonucleotide
gagggcguggccacggcag

SEQ ID NO: 1651793 - RNA, 19 nt, Artificial Sequence
  Description of Artificial Sequence: Synthetic oligonucleotide
aacuccccucacaaggacu

SEQ ID NO: 1651794 - RNA, 19 nt, Artificial Sequence
  Description of Artificial Sequence: Synthetic oligonucleotide
uccaggguggccagcuggu

SEQ ID NO: 1651795 - RNA, 19 nt, Artificial Sequence
  Description of Artificial Sequence: Synthetic oligonucleotide
ggguaugggauccaggcaa

SEQ ID NO: 1651796 - RNA, 19 nt, Artificial Sequence
  Description of Artificial Sequence: Synthetic oligonucleotide
cuucacacggucuugggau

SEQ ID NO: 1651797 - RNA, 19 nt, Artificial Sequence
  Description of Artificial Sequence: Synthetic oligonucleotide
uccuggaaucucagagaac

SEQ ID NO: 1651798 - RNA, 19 nt, Artificial Sequence
  Description of Artificial Sequence: Synthetic oligonucleotide
uugccaucgucuucgcaau

SEQ ID NO: 1651799 - RNA, 19 nt, Artificial Sequence
  Description of Artificial Sequence: Synthetic oligonucleotide
uucacacggucuugggauc

SEQ ID NO: 1651800 - RNA, 19 nt, Artificial Sequence
  Description of Artificial Sequence: Synthetic oligonucleotide
agauggguggcaauuggau

SEQ ID NO: 1651801 - RNA, 19 nt, Artificial Sequence
  Description of Artificial Sequence: Synthetic oligonucleotide
agagagggcguggccacgg

SEQ ID NO: 1651802 - RNA, 19 nt, Artificial Sequence
  Description of Artificial Sequence: Synthetic oligonucleotide
cucgcggcacaugacacac

SEQ ID NO: 1651803 - RNA, 19 nt, Artificial Sequence
  Description of Artificial Sequence: Synthetic oligonucleotide
cucgggccagcucuccugg

SEQ ID NO: 1651804 - RNA, 19 nt, Artificial Sequence
  Description of Artificial Sequence: Synthetic oligonucleotide
uuggccugaaagcccugaa

SEQ ID NO: 1651805 - RNA, 19 nt, Artificial Sequence
  Description of Artificial Sequence: Synthetic oligonucleotide
gaaaguggccgugaaggua

SEQ ID NO: 1651806 - RNA, 19 nt, Artificial Sequence
  Description of Artificial Sequence: Synthetic oligonucleotide
aacugguggcccugcuuaa

SEQ ID NO: 1651807 - RNA, 19 nt, Artificial Sequence
  Description of Artificial Sequence: Synthetic oligonucleotide
agcuugccaucgucuucgc

SEQ ID NO: 1651808 - RNA, 19 nt, Artificial Sequence
  Description of Artificial Sequence: Synthetic oligonucleotide
agcuucgucagugcagcug

SEQ ID NO: 1651809 - RNA, 19 nt, Artificial Sequence
  Description of Artificial Sequence: Synthetic oligonucleotide
cugucucuccuuaaggugu

SEQ ID NO: 1651810 - RNA, 19 nt, Artificial Sequence
  Description of Artificial Sequence: Synthetic oligonucleotide
gaugccugaggaggagagc

SEQ ID NO: 1651811 - RNA, 19 nt, Artificial Sequence
  Description of Artificial Sequence: Synthetic oligonucleotide
guaguguggcccaggccgg

SEQ ID NO: 1651812 - RNA, 19 nt, Artificial Sequence
  Description of Artificial Sequence: Synthetic oligonucleotide
guguucccgggacucgcgg

SEQ ID NO: 1651813 - RNA, 19 nt, Artificial Sequence
  Description of Artificial Sequence: Synthetic oligonucleotide
cauguccugcggcucucgg

SEQ ID NO: 1651814 - RNA, 19 nt, Artificial Sequence
  Description of Artificial Sequence: Synthetic oligonucleotide
cuuaagguguucagguggu

SEQ ID NO: 1651815 - RNA, 19 nt, Artificial Sequence
  Description of Artificial Sequence: Synthetic oligonucleotide
caguaggcguguuccuggc

SEQ ID NO: 1651816 - RNA, 19 nt, Artificial Sequence
  Description of Artificial Sequence: Synthetic oligonucleotide
acgccccgggucuugaacu

SEQ ID NO: 1651817 - RNA, 19 nt, Artificial Sequence
  Description of Artificial Sequence: Synthetic oligonucleotide
acaaacucacacagccaug

SEQ ID NO: 1651818 - RNA, 19 nt, Artificial Sequence
  Description of Artificial Sequence: Synthetic oligonucleotide
cuucgcaauaguagugcaa

SEQ ID NO: 1651819 - RNA, 19 nt, Artificial Sequence
  Description of Artificial Sequence: Synthetic oligonucleotide
cacacgccauccucuggcc

SEQ ID NO: 1651820 - RNA, 19 nt, Artificial Sequence
  Description of Artificial Sequence: Synthetic oligonucleotide
cauggaaacuugagaagcu

SEQ ID NO: 1651821 - RNA, 19 nt, Artificial Sequence
  Description of Artificial Sequence: Synthetic oligonucleotide
gacucgcggcacaugacac

SEQ ID NO: 1651822 - RNA, 19 nt, Artificial Sequence
  Description of Artificial Sequence: Synthetic oligonucleotide
uggcugccugccauugucu

SEQ ID NO: 1651823 - RNA, 19 nt, Artificial Sequence
  Description of Artificial Sequence: Synthetic oligonucleotide
acucgcggcacaugacaca

SEQ ID NO: 1651824 - RNA, 19 nt, Artificial Sequence
  Description of Artificial Sequence: Synthetic oligonucleotide
ggagagguccccuuuccuc

SEQ ID NO: 1651825 - RNA, 19 nt, Artificial Sequence
  Description of Artificial Sequence: Synthetic oligonucleotide
cugccauugucuaccuuca

SEQ ID NO: 1651826 - RNA, 19 nt, Artificial Sequence
  Description of Artificial Sequence: Synthetic oligonucleotide
caccaggaccgcagugugg

SEQ ID NO: 1651827 - RNA, 19 nt, Artificial Sequence
  Description of Artificial Sequence: Synthetic oligonucleotide
gaacauuucuucacacggu

SEQ ID NO: 1651828 - RNA, 19 nt, Artificial Sequence
  Description of Artificial Sequence: Synthetic oligonucleotide
cucagcaguaggcguguuc

SEQ ID NO: 1651829 - RNA, 19 nt, Artificial Sequence
  Description of Artificial Sequence: Synthetic oligonucleotide
gacgccccgggucuugaac

SEQ ID NO: 1651830 - RNA, 19 nt, Artificial Sequence
  Description of Artificial Sequence: Synthetic oligonucleotide
uucgucagugcagcuguaa

SEQ ID NO: 1651831 - RNA, 19 nt, Artificial Sequence
  Description of Artificial Sequence: Synthetic oligonucleotide
accagcacuccagaacaca

SEQ ID NO: 1651832 - RNA, 19 nt, Artificial Sequence
  Description of Artificial Sequence: Synthetic oligonucleotide
uggccacuugagccacagg

SEQ ID NO: 1651833 - RNA, 19 nt, Artificial Sequence
  Description of Artificial Sequence: Synthetic oligonucleotide
acaguaccuagaugcuuuu

SEQ ID NO: 1651834 - RNA, 19 nt, Artificial Sequence
  Description of Artificial Sequence: Synthetic oligonucleotide
uaggcguguuccuggccac

SEQ ID NO: 1651835 - RNA, 19 nt, Artificial Sequence
  Description of Artificial Sequence: Synthetic oligonucleotide
ggagaugauuccaccagca

SEQ ID NO: 1651836 - RNA, 19 nt, Artificial Sequence
  Description of Artificial Sequence: Synthetic oligonucleotide
agauggcccuggggcaucc

SEQ ID NO: 1651837 - RNA, 19 nt, Artificial Sequence
  Description of Artificial Sequence: Synthetic oligonucleotide
acggucuugggaucccaaa

SEQ ID NO: 1651838 - RNA, 19 nt, Artificial Sequence
  Description of Artificial Sequence: Synthetic oligonucleotide
accuccuccuccuccuccu

SEQ ID NO: 1651839 - RNA, 19 nt, Artificial Sequence
  Description of Artificial Sequence: Synthetic oligonucleotide
ggccacucccaccaugcag

SEQ ID NO: 1651840 - RNA, 19 nt, Artificial Sequence
  Description of Artificial Sequence: Synthetic oligonucleotide
auguaaugucccucuucuu

SEQ ID NO: 1651841 - RNA, 19 nt, Artificial Sequence
  Description of Artificial Sequence: Synthetic oligonucleotide
cuguguucccgggacucgc

SEQ ID NO: 1651842 - RNA, 19 nt, Artificial Sequence
  Description of Artificial Sequence: Synthetic oligonucleotide
agagggcguggccacggca

SEQ ID NO: 1651843 - RNA, 19 nt, Artificial Sequence
  Description of Artificial Sequence: Synthetic oligonucleotide
gugacucugcauugguaaa

SEQ ID NO: 1651844 - RNA, 19 nt, Artificial Sequence
  Description of Artificial Sequence: Synthetic oligonucleotide
gguguucaggugguucagg

SEQ ID NO: 1651845 - RNA, 19 nt, Artificial Sequence
  Description of Artificial Sequence: Synthetic oligonucleotide
gccaucgucuucgcaauag

SEQ ID NO: 1651846 - RNA, 19 nt, Artificial Sequence
  Description of Artificial Sequence: Synthetic oligonucleotide
cacagccauggaaacuuga

SEQ ID NO: 1651847 - RNA, 19 nt, Artificial Sequence
  Description of Artificial Sequence: Synthetic oligonucleotide
ggacucgcggcacaugaca

SEQ ID NO: 1651848 - RNA, 19 nt, Artificial Sequence
  Description of Artificial Sequence: Synthetic oligonucleotide
gagagagggcguggccacg

SEQ ID NO: 1651849 - RNA, 19 nt, Artificial Sequence
  Description of Artificial Sequence: Synthetic oligonucleotide
ugguggcccugcuuaaauu

SEQ ID NO: 1651850 - RNA, 19 nt, Artificial Sequence
  Description of Artificial Sequence: Synthetic oligonucleotide
gaagggcccacacgccauc

SEQ ID NO: 1651851 - RNA, 19 nt, Artificial Sequence
  Description of Artificial Sequence: Synthetic oligonucleotide
cacaguaccuagaugcuuu

SEQ ID NO: 1651852 - RNA, 19 nt, Artificial Sequence
  Description of Artificial Sequence: Synthetic oligonucleotide
guucccgggacucgcggca

SEQ ID NO: 1651853 - RNA, 19 nt, Artificial Sequence
  Description of Artificial Sequence: Synthetic oligonucleotide
gugaagguauagaugaguu

SEQ ID NO: 1651854 - RNA, 19 nt, Artificial Sequence
  Description of Artificial Sequence: Synthetic oligonucleotide
ugcuuuggccaagaacauu

SEQ ID NO: 1651855 - RNA, 19 nt, Artificial Sequence
  Description of Artificial Sequence: Synthetic oligonucleotide
caagagcaagauguuggga

SEQ ID NO: 1651856 - RNA, 19 nt, Artificial Sequence
  Description of Artificial Sequence: Synthetic oligonucleotide
aguggccgugaagguauag

SEQ ID NO: 1651857 - RNA, 19 nt, Artificial Sequence
  Description of Artificial Sequence: Synthetic oligonucleotide
gcugccugaaucacaguac

SEQ ID NO: 1651858 - RNA, 19 nt, Artificial Sequence
  Description of Artificial Sequence: Synthetic oligonucleotide
acuaaucugcagagguaau

SEQ ID NO: 1651859 - RNA, 19 nt, Artificial Sequence
  Description of Artificial Sequence: Synthetic oligonucleotide
agcuggucgagcaggugcu

SEQ ID NO: 1651860 - RNA, 19 nt, Artificial Sequence
  Description of Artificial Sequence: Synthetic oligonucleotide
cugcucacgcuucuuuaga

SEQ ID NO: 1651861 - RNA, 19 nt, Artificial Sequence
  Description of Artificial Sequence: Synthetic oligonucleotide
caggcgccgggugaaagug

SEQ ID NO: 1651862 - RNA, 19 nt, Artificial Sequence
  Description of Artificial Sequence: Synthetic oligonucleotide
uggccacucccaccaugca

SEQ ID NO: 1651863 - RNA, 19 nt, Artificial Sequence
  Description of Artificial Sequence: Synthetic oligonucleotide
cagggcgaugcccacccuc

SEQ ID NO: 1651864 - RNA, 19 nt, Artificial Sequence
  Description of Artificial Sequence: Synthetic oligonucleotide
cuagaugcuuuuggagaca

SEQ ID NO: 1651865 - RNA, 19 nt, Artificial Sequence
  Description of Artificial Sequence: Synthetic oligonucleotide
gcccugcuuaaauucugcc

SEQ ID NO: 1651866 - RNA, 19 nt, Artificial Sequence
  Description of Artificial Sequence: Synthetic oligonucleotide
guggccgugaagguauaga

SEQ ID NO: 1651867 - RNA, 19 nt, Artificial Sequence
  Description of Artificial Sequence: Synthetic oligonucleotide
agguccccuuuccucuuca

SEQ ID NO: 1651868 - RNA, 19 nt, Artificial Sequence
  Description of Artificial Sequence: Synthetic oligonucleotide
caguaccuagaugcuuuug

SEQ ID NO: 1651869 - RNA, 19 nt, Artificial Sequence
  Description of Artificial Sequence: Synthetic oligonucleotide
acggcaguggggagauggg

SEQ ID NO: 1651870 - RNA, 19 nt, Artificial Sequence
  Description of Artificial Sequence: Synthetic oligonucleotide
ggccgugaagguauagaug

SEQ ID NO: 1651871 - RNA, 19 nt, Artificial Sequence
  Description of Artificial Sequence: Synthetic oligonucleotide
uccccucacaaggacuaau

SEQ ID NO: 1651872 - RNA, 19 nt, Artificial Sequence
  Description of Artificial Sequence: Synthetic oligonucleotide
gagagggcguggccacggc

SEQ ID NO: 1651873 - RNA, 19 nt, Artificial Sequence
  Description of Artificial Sequence: Synthetic oligonucleotide
uccuccuccuccuccucuu

SEQ ID NO: 1651874 - RNA, 19 nt, Artificial Sequence
  Description of Artificial Sequence: Synthetic oligonucleotide
uccauggguaugggaucca

SEQ ID NO: 1651875 - RNA, 19 nt, Artificial Sequence
  Description of Artificial Sequence: Synthetic oligonucleotide
gaaacugguggcccugcuu

SEQ ID NO: 1651876 - RNA, 19 nt, Artificial Sequence
  Description of Artificial Sequence: Synthetic oligonucleotide
ccugcccucggugaggagc

SEQ ID NO: 1651877 - RNA, 19 nt, Artificial Sequence
  Description of Artificial Sequence: Synthetic oligonucleotide
cccugcuuaaauucugcca

SEQ ID NO: 1651878 - RNA, 19 nt, Artificial Sequence
  Description of Artificial Sequence: Synthetic oligonucleotide
gggagauggguggcaauug

SEQ ID NO: 1651879 - RNA, 19 nt, Artificial Sequence
  Description of Artificial Sequence: Synthetic oligonucleotide
gcuucgucagugcagcugu

SEQ ID NO: 1651880 - RNA, 19 nt, Artificial Sequence
  Description of Artificial Sequence: Synthetic oligonucleotide
ucgcggcacaugacacaca

SEQ ID NO: 1651881 - RNA, 19 nt, Artificial Sequence
  Description of Artificial Sequence: Synthetic oligonucleotide
gguaugggauccaggcaac

SEQ ID NO: 1651882 - RNA, 19 nt, Artificial Sequence
  Description of Artificial Sequence: Synthetic oligonucleotide
cgucuucgcaauaguagug

SEQ ID NO: 1651883 - RNA, 19 nt, Artificial Sequence
  Description of Artificial Sequence: Synthetic oligonucleotide
ggccugaaagcccugaauu

SEQ ID NO: 1651884 - RNA, 19 nt, Artificial Sequence
  Description of Artificial Sequence: Synthetic oligonucleotide
cagcacuccagaacacaaa

SEQ ID NO: 1651885 - RNA, 19 nt, Artificial Sequence
  Description of Artificial Sequence: Synthetic oligonucleotide
ugccaucgucuucgcaaua

SEQ ID NO: 1651886 - RNA, 19 nt, Artificial Sequence
  Description of Artificial Sequence: Synthetic oligonucleotide
gccacaauguacugucucu

SEQ ID NO: 1651887 - RNA, 19 nt, Artificial Sequence
  Description of Artificial Sequence: Synthetic oligonucleotide
cacacggucuugggauccc

SEQ ID NO: 1651888 - RNA, 19 nt, Artificial Sequence
  Description of Artificial Sequence: Synthetic oligonucleotide
ccccucacaaggacuaauc

SEQ ID NO: 1651889 - RNA, 19 nt, Artificial Sequence
  Description of Artificial Sequence: Synthetic oligonucleotide
ggcguggccacggcagugg

SEQ ID NO: 1651890 - RNA, 19 nt, Artificial Sequence
  Description of Artificial Sequence: Synthetic oligonucleotide
ggcccugcuuaaauucugc

SEQ ID NO: 1651891 - RNA, 19 nt, Artificial Sequence
  Description of Artificial Sequence: Synthetic oligonucleotide
agggcguggccacggcagu

SEQ ID NO: 1651892 - RNA, 19 nt, Artificial Sequence
  Description of Artificial Sequence: Synthetic oligonucleotide
gccugaaucacaguaccua

SEQ ID NO: 1651893 - RNA, 19 nt, Artificial Sequence
  Description of Artificial Sequence: Synthetic oligonucleotide
gggccuguguucccgggac

SEQ ID NO: 1651894 - RNA, 19 nt, Artificial Sequence
  Description of Artificial Sequence: Synthetic oligonucleotide
ucgggccagcucuccuggc

SEQ ID NO: 1651895 - RNA, 19 nt, Artificial Sequence
  Description of Artificial Sequence: Synthetic oligonucleotide
ccgugaagguauagaugag

SEQ ID NO: 1651896 - RNA, 19 nt, Artificial Sequence
  Description of Artificial Sequence: Synthetic oligonucleotide
gcucacgcuucuuuagaaa

SEQ ID NO: 1651897 - RNA, 19 nt, Artificial Sequence
  Description of Artificial Sequence: Synthetic oligonucleotide
aggcgccgggugaaagugg

SEQ ID NO: 1651898 - RNA, 19 nt, Artificial Sequence
  Description of Artificial Sequence: Synthetic oligonucleotide
ggccaugagcuuugcuaac

SEQ ID NO: 1651899 - RNA, 19 nt, Artificial Sequence
  Description of Artificial Sequence: Synthetic oligonucleotide
gucuaccuucagccgcuca

SEQ ID NO: 1651900 - RNA, 19 nt, Artificial Sequence
  Description of Artificial Sequence: Synthetic oligonucleotide
cugggccucgggacuggug

SEQ ID NO: 1651901 - RNA, 19 nt, Artificial Sequence
  Description of Artificial Sequence: Synthetic oligonucleotide
acugacgccccgggucuug

SEQ ID NO: 1651902 - RNA, 19 nt, Artificial Sequence
  Description of Artificial Sequence: Synthetic oligonucleotide
gccgguucuggaacucagg

SEQ ID NO: 1651903 - RNA, 19 nt, Artificial Sequence
  Description of Artificial Sequence: Synthetic oligonucleotide
gcuaaccacaccaggagau

SEQ ID NO: 1651904 - RNA, 19 nt, Artificial Sequence
  Description of Artificial Sequence: Synthetic oligonucleotide
cuccggggccgcagcacug

SEQ ID NO: 1651905 - RNA, 19 nt, Artificial Sequence
  Description of Artificial Sequence: Synthetic oligonucleotide
ccaccaggaccgcagugug

SEQ ID NO: 1651906 - RNA, 19 nt, Artificial Sequence
  Description of Artificial Sequence: Synthetic oligonucleotide
acacggucuugggauccca

SEQ ID NO: 1651907 - RNA, 19 nt, Artificial Sequence
  Description of Artificial Sequence: Synthetic oligonucleotide
aggccgguucuggaacuca

SEQ ID NO: 1651908 - RNA, 19 nt, Artificial Sequence
  Description of Artificial Sequence: Synthetic oligonucleotide
ggccgguucuggaacucag

SEQ ID NO: 1651909 - RNA, 19 nt, Artificial Sequence
  Description of Artificial Sequence: Synthetic oligonucleotide
ugucuaccuucagccgcuc

SEQ ID NO: 1651910 - RNA, 19 nt, Artificial Sequence
  Description of Artificial Sequence: Synthetic oligonucleotide
ccuguguucccgggacucg

SEQ ID NO: 1651911 - RNA, 19 nt, Artificial Sequence
  Description of Artificial Sequence: Synthetic oligonucleotide
ugcggcucucgggccagcu

SEQ ID NO: 1651912 - RNA, 19 nt, Artificial Sequence
  Description of Artificial Sequence: Synthetic oligonucleotide
ggacuaaucugcagaggua

SEQ ID NO: 1651913 - RNA, 19 nt, Artificial Sequence
  Description of Artificial Sequence: Synthetic oligonucleotide
acgccauccucuggccuca

SEQ ID NO: 1651914 - RNA, 19 nt, Artificial Sequence
  Description of Artificial Sequence: Synthetic oligonucleotide
cacggucuugggaucccaa

SEQ ID NO: 1651915 - RNA, 19 nt, Artificial Sequence
  Description of Artificial Sequence: Synthetic oligonucleotide
ugacgccccgggucuugaa

SEQ ID NO: 1651916 - RNA, 19 nt, Artificial Sequence
  Description of Artificial Sequence: Synthetic oligonucleotide
ccauggguaugggauccag

SEQ ID NO: 1651917 - RNA, 19 nt, Artificial Sequence
  Description of Artificial Sequence: Synthetic oligonucleotide
ccgcucacacaacuucaug

SEQ ID NO: 1651918 - RNA, 19 nt, Artificial Sequence
  Description of Artificial Sequence: Synthetic oligonucleotide
cuucauaauccagggcgau

SEQ ID NO: 1651919 - RNA, 19 nt, Artificial Sequence
  Description of Artificial Sequence: Synthetic oligonucleotide
gcguguuccuggccacuug

SEQ ID NO: 1651920 - RNA, 19 nt, Artificial Sequence
  Description of Artificial Sequence: Synthetic oligonucleotide
cgcucacacaacuucaugu

SEQ ID NO: 1651921 - RNA, 19 nt, Artificial Sequence
  Description of Artificial Sequence: Synthetic oligonucleotide
gggucucagcaguaggcgu

SEQ ID NO: 1651922 - RNA, 19 nt, Artificial Sequence
  Description of Artificial Sequence: Synthetic oligonucleotide
gccugaaagcccugaauuu

SEQ ID NO: 1651923 - RNA, 19 nt, Artificial Sequence
  Description of Artificial Sequence: Synthetic oligonucleotide
aggcguguuccuggccacu

SEQ ID NO: 1651924 - RNA, 19 nt, Artificial Sequence
  Description of Artificial Sequence: Synthetic oligonucleotide
gccuguguucccgggacuc

SEQ ID NO: 1651925 - RNA, 19 nt, Artificial Sequence
  Description of Artificial Sequence: Synthetic oligonucleotide
gucucagcaguaggcgugu

SEQ ID NO: 1651926 - RNA, 19 nt, Artificial Sequence
  Description of Artificial Sequence: Synthetic oligonucleotide
accgcaguguggggccugu

SEQ ID NO: 1651927 - RNA, 19 nt, Artificial Sequence
  Description of Artificial Sequence: Synthetic oligonucleotide
aaguggccgugaagguaua

SEQ ID NO: 1651928 - RNA, 19 nt, Artificial Sequence
  Description of Artificial Sequence: Synthetic oligonucleotide
ccaggaccgcagugugggg

SEQ ID NO: 1651929 - RNA, 19 nt, Artificial Sequence
  Description of Artificial Sequence: Synthetic oligonucleotide
ccccuuuccucuucauaga

SEQ ID NO: 1651930 - RNA, 19 nt, Artificial Sequence
  Description of Artificial Sequence: Synthetic oligonucleotide
ccgaagggcccacacgcca

SEQ ID NO: 1651931 - RNA, 19 nt, Artificial Sequence
  Description of Artificial Sequence: Synthetic oligonucleotide
cugccacaauguacugucu

SEQ ID NO: 1651932 - RNA, 19 nt, Artificial Sequence
  Description of Artificial Sequence: Synthetic oligonucleotide
cuucgucagugcagcugua

SEQ ID NO: 1651933 - RNA, 19 nt, Artificial Sequence
  Description of Artificial Sequence: Synthetic oligonucleotide
cagugcugagagagggcgu

SEQ ID NO: 1651934 - RNA, 19 nt, Artificial Sequence
  Description of Artificial Sequence: Synthetic oligonucleotide
gguggcaauuggauguaau

SEQ ID NO: 1651935 - RNA, 19 nt, Artificial Sequence
  Description of Artificial Sequence: Synthetic oligonucleotide
gccgaagggcccacacgcc

SEQ ID NO: 1651936 - RNA, 19 nt, Artificial Sequence
  Description of Artificial Sequence: Synthetic oligonucleotide
gggacucgcggcacaugac

SEQ ID NO: 1651937 - RNA, 19 nt, Artificial Sequence
  Description of Artificial Sequence: Synthetic oligonucleotide
gcccucggugaggagcugc

SEQ ID NO: 1651938 - RNA, 19 nt, Artificial Sequence
  Description of Artificial Sequence: Synthetic oligonucleotide
ugcccucggugaggagcug

SEQ ID NO: 1651939 - RNA, 19 nt, Artificial Sequence
  Description of Artificial Sequence: Synthetic oligonucleotide
gcacuccagaacacaaacu

SEQ ID NO: 1651940 - RNA, 19 nt, Artificial Sequence
  Description of Artificial Sequence: Synthetic oligonucleotide
cagcaguaggcguguuccu

SEQ ID NO: 1651941 - RNA, 19 nt, Artificial Sequence
  Description of Artificial Sequence: Synthetic oligonucleotide
cuccuccuccuccuccucu

SEQ ID NO: 1651942 - RNA, 19 nt, Artificial Sequence
  Description of Artificial Sequence: Synthetic oligonucleotide
ccgggugaaaguggccgug

SEQ ID NO: 1651943 - RNA, 19 nt, Artificial Sequence
  Description of Artificial Sequence: Synthetic oligonucleotide
ccugaaagcccugaauuuu

SEQ ID NO: 1651944 - RNA, 19 nt, Artificial Sequence
  Description of Artificial Sequence: Synthetic oligonucleotide
cgggacucgcggcacauga

SEQ ID NO: 1651945 - RNA, 19 nt, Artificial Sequence
  Description of Artificial Sequence: Synthetic oligonucleotide
gcccaggccgguucuggaa

SEQ ID NO: 1651946 - RNA, 19 nt, Artificial Sequence
  Description of Artificial Sequence: Synthetic oligonucleotide
ggggagauggguggcaauu

SEQ ID NO: 1651947 - RNA, 19 nt, Artificial Sequence
  Description of Artificial Sequence: Synthetic oligonucleotide
cugacgccccgggucuuga

SEQ ID NO: 1651948 - RNA, 19 nt, Artificial Sequence
  Description of Artificial Sequence: Synthetic oligonucleotide
cucucgggccagcucuccu

SEQ ID NO: 1651949 - RNA, 19 nt, Artificial Sequence
  Description of Artificial Sequence: Synthetic oligonucleotide
gcccuggggcaucccacuc

SEQ ID NO: 1651950 - RNA, 19 nt, Artificial Sequence
  Description of Artificial Sequence: Synthetic oligonucleotide
cuuuccuccccuggugcuu

SEQ ID NO: 1651951 - RNA, 19 nt, Artificial Sequence
  Description of Artificial Sequence: Synthetic oligonucleotide
ccaucgucuucgcaauagu

SEQ ID NO: 1651952 - RNA, 19 nt, Artificial Sequence
  Description of Artificial Sequence: Synthetic oligonucleotide
cuucucccuuggccugaaa

SEQ ID NO: 1651953 - RNA, 19 nt, Artificial Sequence
  Description of Artificial Sequence: Synthetic oligonucleotide
gcggcucucgggccagcuc

SEQ ID NO: 1651954 - RNA, 19 nt, Artificial Sequence
  Description of Artificial Sequence: Synthetic oligonucleotide
gccgggugaaaguggccgu

SEQ ID NO: 1651955 - RNA, 19 nt, Artificial Sequence
  Description of Artificial Sequence: Synthetic oligonucleotide
cuccccucacaaggacuaa

SEQ ID NO: 1651956 - RNA, 19 nt, Artificial Sequence
  Description of Artificial Sequence: Synthetic oligonucleotide
ccugcggcucucgggccag

SEQ ID NO: 1651957 - RNA, 19 nt, Artificial Sequence
  Description of Artificial Sequence: Synthetic oligonucleotide
cagcuucgucagugcagcu

SEQ ID NO: 1651958 - RNA, 19 nt, Artificial Sequence
  Description of Artificial Sequence: Synthetic oligonucleotide
cugcggcucucgggccagc

SEQ ID NO: 1651959 - RNA, 19 nt, Artificial Sequence
  Description of Artificial Sequence: Synthetic oligonucleotide
ccuccuccuccuccuccuc

SEQ ID NO: 1651960 - RNA, 19 nt, Artificial Sequence
  Description of Artificial Sequence: Synthetic oligonucleotide
gcgccgggugaaaguggcc

SEQ ID NO: 1651961 - RNA, 19 nt, Artificial Sequence
  Description of Artificial Sequence: Synthetic oligonucleotide
gcaccaggcgccgggugaa

SEQ ID NO: 1651962 - RNA, 19 nt, Artificial Sequence
  Description of Artificial Sequence: Synthetic oligonucleotide
gccccgggucuugaacuuc

SEQ ID NO: 1651963 - RNA, 19 nt, Artificial Sequence
  Description of Artificial Sequence: Synthetic oligonucleotide
ccgcagcacugggaagagc

SEQ ID NO: 1651964 - RNA, 19 nt, Artificial Sequence
  Description of Artificial Sequence: Synthetic oligonucleotide
ccccuggugcuuuggccaa

SEQ ID NO: 1651965 - RNA, 19 nt, Artificial Sequence
  Description of Artificial Sequence: Synthetic oligonucleotide
gguccccuuuccucuucau

SEQ ID NO: 1651966 - RNA, 19 nt, Artificial Sequence
  Description of Artificial Sequence: Synthetic oligonucleotide
cuccuggcugccugccauu

SEQ ID NO: 1651967 - RNA, 19 nt, Artificial Sequence
  Description of Artificial Sequence: Synthetic oligonucleotide
gccgcucacacaacuucau

SEQ ID NO: 1651968 - RNA, 19 nt, Artificial Sequence
  Description of Artificial Sequence: Synthetic oligonucleotide
ccucagcucuagguuugga

SEQ ID NO: 1651969 - RNA, 19 nt, Artificial Sequence
  Description of Artificial Sequence: Synthetic oligonucleotide
cgggugaaaguggccguga

SEQ ID NO: 1651970 - RNA, 19 nt, Artificial Sequence
  Description of Artificial Sequence: Synthetic oligonucleotide
ggcguguuccuggccacuu

SEQ ID NO: 1651971 - RNA, 19 nt, Artificial Sequence
  Description of Artificial Sequence: Synthetic oligonucleotide
ccgggacucgcggcacaug

SEQ ID NO: 1651972 - RNA, 19 nt, Artificial Sequence
  Description of Artificial Sequence: Synthetic oligonucleotide
caccaggcgccgggugaaa

SEQ ID NO: 1651973 - RNA, 19 nt, Artificial Sequence
  Description of Artificial Sequence: Synthetic oligonucleotide
ccuccggggccgcagcacu

SEQ ID NO: 1651974 - RNA, 19 nt, Artificial Sequence
  Description of Artificial Sequence: Synthetic oligonucleotide
cgaagggcccacacgccau

SEQ ID NO: 1651975 - RNA, 19 nt, Artificial Sequence
  Description of Artificial Sequence: Synthetic oligonucleotide
ccucagggagagguccccu

SEQ ID NO: 1651976 - RNA, 19 nt, Artificial Sequence
  Description of Artificial Sequence: Synthetic oligonucleotide
ccacggcaguggggagaug

SEQ ID NO: 1651977 - RNA, 19 nt, Artificial Sequence
  Description of Artificial Sequence: Synthetic oligonucleotide
cacugacgccccgggucuu

SEQ ID NO: 1651978 - RNA, 19 nt, Artificial Sequence
  Description of Artificial Sequence: Synthetic oligonucleotide
cgccccgggucuugaacuu

SEQ ID NO: 1651979 - RNA, 19 nt, Artificial Sequence
  Description of Artificial Sequence: Synthetic oligonucleotide
gaagguuuuagccugaagg

SEQ ID NO: 1651980 - RNA, 19 nt, Artificial Sequence
  Description of Artificial Sequence: Synthetic oligonucleotide
uugacaauggaucagacug

SEQ ID NO: 1651981 - RNA, 19 nt, Artificial Sequence
  Description of Artificial Sequence: Synthetic oligonucleotide
acugaaggaguauagagcc

SEQ ID NO: 1651982 - RNA, 19 nt, Artificial Sequence
  Description of Artificial Sequence: Synthetic oligonucleotide
aagguuuuagccugaaggc

SEQ ID NO: 1651983 - RNA, 19 nt, Artificial Sequence
  Description of Artificial Sequence: Synthetic oligonucleotide
uaaguuauagugcagggcc

SEQ ID NO: 1651984 - RNA, 19 nt, Artificial Sequence
  Description of Artificial Sequence: Synthetic oligonucleotide
ucuaagaucaauuuaggac

SEQ ID NO: 1651985 - RNA, 19 nt, Artificial Sequence
  Description of Artificial Sequence: Synthetic oligonucleotide
ucugcuauaaaguugcuga

SEQ ID NO: 1651986 - RNA, 19 nt, Artificial Sequence
  Description of Artificial Sequence: Synthetic oligonucleotide
auauaaacaacaaacuccg

SEQ ID NO: 1651987 - RNA, 19 nt, Artificial Sequence
  Description of Artificial Sequence: Synthetic oligonucleotide
aauaaagguuacaaggcac

SEQ ID NO: 1651988 - RNA, 19 nt, Artificial Sequence
  Description of Artificial Sequence: Synthetic oligonucleotide
cuccguaauaaauacaggg

SEQ ID NO: 1651989 - RNA, 19 nt, Artificial Sequence
  Description of Artificial Sequence: Synthetic oligonucleotide
agguauguggaucacggcc

SEQ ID NO: 1651990 - RNA, 19 nt, Artificial Sequence
  Description of Artificial Sequence: Synthetic oligonucleotide
uuauugacagcaauacugc

SEQ ID NO: 1651991 - RNA, 19 nt, Artificial Sequence
  Description of Artificial Sequence: Synthetic oligonucleotide
acacuucugguacugaacc

SEQ ID NO: 1651992 - RNA, 19 nt, Artificial Sequence
  Description of Artificial Sequence: Synthetic oligonucleotide
aagagaagguuuuagccug

SEQ ID NO: 1651993 - RNA, 19 nt, Artificial Sequence
  Description of Artificial Sequence: Synthetic oligonucleotide
uacugauucugcuauaaag

SEQ ID NO: 1651994 - RNA, 19 nt, Artificial Sequence
  Description of Artificial Sequence: Synthetic oligonucleotide
aacuccguaauaaauacag

SEQ ID NO: 1651995 - RNA, 19 nt, Artificial Sequence
  Description of Artificial Sequence: Synthetic oligonucleotide
cuaagaucaauuuaggaca

SEQ ID NO: 1651996 - RNA, 19 nt, Artificial Sequence
  Description of Artificial Sequence: Synthetic oligonucleotide
ucaauuuaggacauaugga

SEQ ID NO: 1651997 - RNA, 19 nt, Artificial Sequence
  Description of Artificial Sequence: Synthetic oligonucleotide
uuacaaggcacacagggca

SEQ ID NO: 1651998 - RNA, 19 nt, Artificial Sequence
  Description of Artificial Sequence: Synthetic oligonucleotide
aauggaucagacugugguc

SEQ ID NO: 1651999 - RNA, 19 nt, Artificial Sequence
  Description of Artificial Sequence: Synthetic oligonucleotide
aauaaauacaggguaugca

SEQ ID NO: 1652000 - RNA, 19 nt, Artificial Sequence
  Description of Artificial Sequence: Synthetic oligonucleotide
gguuacaaggcacacaggg

SEQ ID NO: 1652001 - RNA, 19 nt, Artificial Sequence
  Description of Artificial Sequence: Synthetic oligonucleotide
aaucccuccuuugaguagc

SEQ ID NO: 1652002 - RNA, 19 nt, Artificial Sequence
  Description of Artificial Sequence: Synthetic oligonucleotide
uuauuuguacugauucugc

SEQ ID NO: 1652003 - RNA, 19 nt, Artificial Sequence
  Description of Artificial Sequence: Synthetic oligonucleotide
uuuguacugauucugcuau

SEQ ID NO: 1652004 - RNA, 19 nt, Artificial Sequence
  Description of Artificial Sequence: Synthetic oligonucleotide
gaaggcaucaagaaaugag

SEQ ID NO: 1652005 - RNA, 19 nt, Artificial Sequence
  Description of Artificial Sequence: Synthetic oligonucleotide
agguacaucacagcgaaac

SEQ ID NO: 1652006 - RNA, 19 nt, Artificial Sequence
  Description of Artificial Sequence: Synthetic oligonucleotide
accagcaugaggcuggcac

SEQ ID NO: 1652007 - RNA, 19 nt, Artificial Sequence
  Description of Artificial Sequence: Synthetic oligonucleotide
uccguaauaaauacagggu

SEQ ID NO: 1652008 - RNA, 19 nt, Artificial Sequence
  Description of Artificial Sequence: Synthetic oligonucleotide
uccaggauuggacaggggc

SEQ ID NO: 1652009 - RNA, 19 nt, Artificial Sequence
  Description of Artificial Sequence: Synthetic oligonucleotide
auggugagaggcuacagag

SEQ ID NO: 1652010 - RNA, 19 nt, Artificial Sequence
  Description of Artificial Sequence: Synthetic oligonucleotide
uuugaggucacugagggau

SEQ ID NO: 1652011 - RNA, 19 nt, Artificial Sequence
  Description of Artificial Sequence: Synthetic oligonucleotide
cugacaaccaaggucagcg

SEQ ID NO: 1652012 - RNA, 19 nt, Artificial Sequence
  Description of Artificial Sequence: Synthetic oligonucleotide
ggaacaaaagaacccaagg

SEQ ID NO: 1652013 - RNA, 19 nt, Artificial Sequence
  Description of Artificial Sequence: Synthetic oligonucleotide
auaaacaacaaacuccgua

SEQ ID NO: 1652014 - RNA, 19 nt, Artificial Sequence
  Description of Artificial Sequence: Synthetic oligonucleotide
uuagccugaaggcaucaag

SEQ ID NO: 1652015 - RNA, 19 nt, Artificial Sequence
  Description of Artificial Sequence: Synthetic oligonucleotide
gagaagagaagguuuuagc

SEQ ID NO: 1652016 - RNA, 19 nt, Artificial Sequence
  Description of Artificial Sequence: Synthetic oligonucleotide
cagagagucagacacacug

SEQ ID NO: 1652017 - RNA, 19 nt, Artificial Sequence
  Description of Artificial Sequence: Synthetic oligonucleotide
ugagguagagccaauuguc

SEQ ID NO: 1652018 - RNA, 19 nt, Artificial Sequence
  Description of Artificial Sequence: Synthetic oligonucleotide
gaguauagagccuccuucc

SEQ ID NO: 1652019 - RNA, 19 nt, Artificial Sequence
  Description of Artificial Sequence: Synthetic oligonucleotide
acggccaacaccaauaaag

SEQ ID NO: 1652020 - RNA, 19 nt, Artificial Sequence
  Description of Artificial Sequence: Synthetic oligonucleotide
uauggagaagagaagguuu

SEQ ID NO: 1652021 - RNA, 19 nt, Artificial Sequence
  Description of Artificial Sequence: Synthetic oligonucleotide
aaccauacaggcagcuugc

SEQ ID NO: 1652022 - RNA, 19 nt, Artificial Sequence
  Description of Artificial Sequence: Synthetic oligonucleotide
uauagagccuccuucccca

SEQ ID NO: 1652023 - RNA, 19 nt, Artificial Sequence
  Description of Artificial Sequence: Synthetic oligonucleotide
acauccauacccauggcgg

SEQ ID NO: 1652024 - RNA, 19 nt, Artificial Sequence
  Description of Artificial Sequence: Synthetic oligonucleotide
aaggcaucaagaaaugaga

SEQ ID NO: 1652025 - RNA, 19 nt, Artificial Sequence
  Description of Artificial Sequence: Synthetic oligonucleotide
cuagccucugccugaaugg

SEQ ID NO: 1652026 - RNA, 19 nt, Artificial Sequence
  Description of Artificial Sequence: Synthetic oligonucleotide
cugguugcgagucugggcc

SEQ ID NO: 1652027 - RNA, 19 nt, Artificial Sequence
  Description of Artificial Sequence: Synthetic oligonucleotide
auagcagggacccagguuu

SEQ ID NO: 1652028 - RNA, 19 nt, Artificial Sequence
  Description of Artificial Sequence: Synthetic oligonucleotide
aauaggaucuggggaacag

SEQ ID NO: 1652029 - RNA, 19 nt, Artificial Sequence
  Description of Artificial Sequence: Synthetic oligonucleotide
ggauucaccaggcucauag

SEQ ID NO: 1652030 - RNA, 19 nt, Artificial Sequence
  Description of Artificial Sequence: Synthetic oligonucleotide
aggucuuaccccgagcugc

SEQ ID NO: 1652031 - RNA, 19 nt, Artificial Sequence
  Description of Artificial Sequence: Synthetic oligonucleotide
agucaucagagagucagac

SEQ ID NO: 1652032 - RNA, 19 nt, Artificial Sequence
  Description of Artificial Sequence: Synthetic oligonucleotide
aggggccuaaguuauagug

SEQ ID NO: 1652033 - RNA, 19 nt, Artificial Sequence
  Description of Artificial Sequence: Synthetic oligonucleotide
ccaauaaagguuacaaggc

SEQ ID NO: 1652034 - RNA, 19 nt, Artificial Sequence
  Description of Artificial Sequence: Synthetic oligonucleotide
acaacaaacuccguaauaa

SEQ ID NO: 1652035 - RNA, 19 nt, Artificial Sequence
  Description of Artificial Sequence: Synthetic oligonucleotide
uagccugaaggcaucaaga

SEQ ID NO: 1652036 - RNA, 19 nt, Artificial Sequence
  Description of Artificial Sequence: Synthetic oligonucleotide
cucucagucauccauauaa

SEQ ID NO: 1652037 - RNA, 19 nt, Artificial Sequence
  Description of Artificial Sequence: Synthetic oligonucleotide
uuaggacauauggagaaga

SEQ ID NO: 1652038 - RNA, 19 nt, Artificial Sequence
  Description of Artificial Sequence: Synthetic oligonucleotide
guaauaaauacaggguaug

SEQ ID NO: 1652039 - RNA, 19 nt, Artificial Sequence
  Description of Artificial Sequence: Synthetic oligonucleotide
aaacaacaaacuccguaau

SEQ ID NO: 1652040 - RNA, 19 nt, Artificial Sequence
  Description of Artificial Sequence: Synthetic oligonucleotide
uggcacuugagcauacagc

SEQ ID NO: 1652041 - RNA, 19 nt, Artificial Sequence
  Description of Artificial Sequence: Synthetic oligonucleotide
ggugagaggcuacagagcc

SEQ ID NO: 1652042 - RNA, 19 nt, Artificial Sequence
  Description of Artificial Sequence: Synthetic oligonucleotide
agcuugcacagcuucagag

SEQ ID NO: 1652043 - RNA, 19 nt, Artificial Sequence
  Description of Artificial Sequence: Synthetic oligonucleotide
aacaacaaacuccguaaua

SEQ ID NO: 1652044 - RNA, 19 nt, Artificial Sequence
  Description of Artificial Sequence: Synthetic oligonucleotide
ucuccacugacuccugucc

SEQ ID NO: 1652045 - RNA, 19 nt, Artificial Sequence
  Description of Artificial Sequence: Synthetic oligonucleotide
cauacaggcagcuugcaca

SEQ ID NO: 1652046 - RNA, 19 nt, Artificial Sequence
  Description of Artificial Sequence: Synthetic oligonucleotide
acauguucuggcccucacc

SEQ ID NO: 1652047 - RNA, 19 nt, Artificial Sequence
  Description of Artificial Sequence: Synthetic oligonucleotide
gauucccauguacagugcc

SEQ ID NO: 1652048 - RNA, 19 nt, Artificial Sequence
  Description of Artificial Sequence: Synthetic oligonucleotide
agugccucauacuucugag

SEQ ID NO: 1652049 - RNA, 19 nt, Artificial Sequence
  Description of Artificial Sequence: Synthetic oligonucleotide
aauacaggguaugcaagga

SEQ ID NO: 1652050 - RNA, 19 nt, Artificial Sequence
  Description of Artificial Sequence: Synthetic oligonucleotide
gaagagaagguuuuagccu

SEQ ID NO: 1652051 - RNA, 19 nt, Artificial Sequence
  Description of Artificial Sequence: Synthetic oligonucleotide
aggggcaaggaacaaaaga

SEQ ID NO: 1652052 - RNA, 19 nt, Artificial Sequence
  Description of Artificial Sequence: Synthetic oligonucleotide
cuggauacaguuauugaca

SEQ ID NO: 1652053 - RNA, 19 nt, Artificial Sequence
  Description of Artificial Sequence: Synthetic oligonucleotide
uguagggcacuugcaaugg

SEQ ID NO: 1652054 - RNA, 19 nt, Artificial Sequence
  Description of Artificial Sequence: Synthetic oligonucleotide
cacauccauacccauggcg

SEQ ID NO: 1652055 - RNA, 19 nt, Artificial Sequence
  Description of Artificial Sequence: Synthetic oligonucleotide
auggcggauucccauguac

SEQ ID NO: 1652056 - RNA, 19 nt, Artificial Sequence
  Description of Artificial Sequence: Synthetic oligonucleotide
gaaaugagaagacaccccu

SEQ ID NO: 1652057 - RNA, 19 nt, Artificial Sequence
  Description of Artificial Sequence: Synthetic oligonucleotide
cuucagagaguccaccagc

SEQ ID NO: 1652058 - RNA, 19 nt, Artificial Sequence
  Description of Artificial Sequence: Synthetic oligonucleotide
cuaaguuauagugcagggc

SEQ ID NO: 1652059 - RNA, 19 nt, Artificial Sequence
  Description of Artificial Sequence: Synthetic oligonucleotide
ugcugaggccaccagacac

SEQ ID NO: 1652060 - RNA, 19 nt, Artificial Sequence
  Description of Artificial Sequence: Synthetic oligonucleotide
aaaugagaagacaccccuc

SEQ ID NO: 1652061 - RNA, 19 nt, Artificial Sequence
  Description of Artificial Sequence: Synthetic oligonucleotide
ugaaggaguauagagccuc

SEQ ID NO: 1652062 - RNA, 19 nt, Artificial Sequence
  Description of Artificial Sequence: Synthetic oligonucleotide
uauagugcagggccucuca

SEQ ID NO: 1652063 - RNA, 19 nt, Artificial Sequence
  Description of Artificial Sequence: Synthetic oligonucleotide
uuuaggacauauggagaag

SEQ ID NO: 1652064 - RNA, 19 nt, Artificial Sequence
  Description of Artificial Sequence: Synthetic oligonucleotide
caccaauaaagguuacaag

SEQ ID NO: 1652065 - RNA, 19 nt, Artificial Sequence
  Description of Artificial Sequence: Synthetic oligonucleotide
agaucaauuuaggacauau

SEQ ID NO: 1652066 - RNA, 19 nt, Artificial Sequence
  Description of Artificial Sequence: Synthetic oligonucleotide
cugagcauagcagggaccc

SEQ ID NO: 1652067 - RNA, 19 nt, Artificial Sequence
  Description of Artificial Sequence: Synthetic oligonucleotide
acaccaauaaagguuacaa

SEQ ID NO: 1652068 - RNA, 19 nt, Artificial Sequence
  Description of Artificial Sequence: Synthetic oligonucleotide
uguacugauucugcuauaa

SEQ ID NO: 1652069 - RNA, 19 nt, Artificial Sequence
  Description of Artificial Sequence: Synthetic oligonucleotide
ggggaaauaggaucugggg

SEQ ID NO: 1652070 - RNA, 19 nt, Artificial Sequence
  Description of Artificial Sequence: Synthetic oligonucleotide
guauagagccuccuucccc

SEQ ID NO: 1652071 - RNA, 19 nt, Artificial Sequence
  Description of Artificial Sequence: Synthetic oligonucleotide
auaaagguuacaaggcaca

SEQ ID NO: 1652072 - RNA, 19 nt, Artificial Sequence
  Description of Artificial Sequence: Synthetic oligonucleotide
gccucuaagaucaauuuag

SEQ ID NO: 1652073 - RNA, 19 nt, Artificial Sequence
  Description of Artificial Sequence: Synthetic oligonucleotide
gguaccaauggccucauuc

SEQ ID NO: 1652074 - RNA, 19 nt, Artificial Sequence
  Description of Artificial Sequence: Synthetic oligonucleotide
uauaaacaacaaacuccgu

SEQ ID NO: 1652075 - RNA, 19 nt, Artificial Sequence
  Description of Artificial Sequence: Synthetic oligonucleotide
gauggugagaggcuacaga

SEQ ID NO: 1652076 - RNA, 19 nt, Artificial Sequence
  Description of Artificial Sequence: Synthetic oligonucleotide
cauguacagugccucauac

SEQ ID NO: 1652077 - RNA, 19 nt, Artificial Sequence
  Description of Artificial Sequence: Synthetic oligonucleotide
aacaccaauaaagguuaca

SEQ ID NO: 1652078 - RNA, 19 nt, Artificial Sequence
  Description of Artificial Sequence: Synthetic oligonucleotide
guaccaauggccucauuca

SEQ ID NO: 1652079 - RNA, 19 nt, Artificial Sequence
  Description of Artificial Sequence: Synthetic oligonucleotide
accaauggccucauucagc

SEQ ID NO: 1652080 - RNA, 19 nt, Artificial Sequence
  Description of Artificial Sequence: Synthetic oligonucleotide
ggaaauaggaucuggggaa

SEQ ID NO: 1652081 - RNA, 19 nt, Artificial Sequence
  Description of Artificial Sequence: Synthetic oligonucleotide
cagagaguccaccagcaug

SEQ ID NO: 1652082 - RNA, 19 nt, Artificial Sequence
  Description of Artificial Sequence: Synthetic oligonucleotide
aguuauagugcagggccuc

SEQ ID NO: 1652083 - RNA, 19 nt, Artificial Sequence
  Description of Artificial Sequence: Synthetic oligonucleotide
ucugguugcgagucugggc

SEQ ID NO: 1652084 - RNA, 19 nt, Artificial Sequence
  Description of Artificial Sequence: Synthetic oligonucleotide
ucucagucauccauauaaa

SEQ ID NO: 1652085 - RNA, 19 nt, Artificial Sequence
  Description of Artificial Sequence: Synthetic oligonucleotide
uucugcuauaaaguugcug

SEQ ID NO: 1652086 - RNA, 19 nt, Artificial Sequence
  Description of Artificial Sequence: Synthetic oligonucleotide
gacaauggaucagacugug

SEQ ID NO: 1652087 - RNA, 19 nt, Artificial Sequence
  Description of Artificial Sequence: Synthetic oligonucleotide
ucuuaccccgagcugcuga

SEQ ID NO: 1652088 - RNA, 19 nt, Artificial Sequence
  Description of Artificial Sequence: Synthetic oligonucleotide
agagaguccaccagcauga

SEQ ID NO: 1652089 - RNA, 19 nt, Artificial Sequence
  Description of Artificial Sequence: Synthetic oligonucleotide
uggugagaggcuacagagc

SEQ ID NO: 1652090 - RNA, 19 nt, Artificial Sequence
  Description of Artificial Sequence: Synthetic oligonucleotide
ggcaaagucccugucacgg

SEQ ID NO: 1652091 - RNA, 19 nt, Artificial Sequence
  Description of Artificial Sequence: Synthetic oligonucleotide
ggucugacaaccaagguca

SEQ ID NO: 1652092 - RNA, 19 nt, Artificial Sequence
  Description of Artificial Sequence: Synthetic oligonucleotide
cugcuauaaaguugcugag

SEQ ID NO: 1652093 - RNA, 19 nt, Artificial Sequence
  Description of Artificial Sequence: Synthetic oligonucleotide
caaagguauguggaucacg

SEQ ID NO: 1652094 - RNA, 19 nt, Artificial Sequence
  Description of Artificial Sequence: Synthetic oligonucleotide
acaaacuccguaauaaaua

SEQ ID NO: 1652095 - RNA, 19 nt, Artificial Sequence
  Description of Artificial Sequence: Synthetic oligonucleotide
ggacauauggagaagagaa

SEQ ID NO: 1652096 - RNA, 19 nt, Artificial Sequence
  Description of Artificial Sequence: Synthetic oligonucleotide
uaaagguuacaaggcacac

SEQ ID NO: 1652097 - RNA, 19 nt, Artificial Sequence
  Description of Artificial Sequence: Synthetic oligonucleotide
gaucagacugugguccagg

SEQ ID NO: 1652098 - RNA, 19 nt, Artificial Sequence
  Description of Artificial Sequence: Synthetic oligonucleotide
ucugcacuagccucugccu

SEQ ID NO: 1652099 - RNA, 19 nt, Artificial Sequence
  Description of Artificial Sequence: Synthetic oligonucleotide
guuacaaggcacacagggc

SEQ ID NO: 1652100 - RNA, 19 nt, Artificial Sequence
  Description of Artificial Sequence: Synthetic oligonucleotide
ccuaaguuauagugcaggg

SEQ ID NO: 1652101 - RNA, 19 nt, Artificial Sequence
  Description of Artificial Sequence: Synthetic oligonucleotide
augugaaccagagguugac

SEQ ID NO: 1652102 - RNA, 19 nt, Artificial Sequence
  Description of Artificial Sequence: Synthetic oligonucleotide
gggaaauaggaucugggga

SEQ ID NO: 1652103 - RNA, 19 nt, Artificial Sequence
  Description of Artificial Sequence: Synthetic oligonucleotide
gagcauagcagggacccag

SEQ ID NO: 1652104 - RNA, 19 nt, Artificial Sequence
  Description of Artificial Sequence: Synthetic oligonucleotide
cugaaggcaucaagaaaug

SEQ ID NO: 1652105 - RNA, 19 nt, Artificial Sequence
  Description of Artificial Sequence: Synthetic oligonucleotide
cuaggggccuaaguuauag

SEQ ID NO: 1652106 - RNA, 19 nt, Artificial Sequence
  Description of Artificial Sequence: Synthetic oligonucleotide
agcugguccgcuugagccg

SEQ ID NO: 1652107 - RNA, 19 nt, Artificial Sequence
  Description of Artificial Sequence: Synthetic oligonucleotide
uguggaucacggccaacac

SEQ ID NO: 1652108 - RNA, 19 nt, Artificial Sequence
  Description of Artificial Sequence: Synthetic oligonucleotide
ugucacggcccuuggagcu

SEQ ID NO: 1652109 - RNA, 19 nt, Artificial Sequence
  Description of Artificial Sequence: Synthetic oligonucleotide
ugcacuagccucugccuga

SEQ ID NO: 1652110 - RNA, 19 nt, Artificial Sequence
  Description of Artificial Sequence: Synthetic oligonucleotide
gcaaggaacaaaagaaccc

SEQ ID NO: 1652111 - RNA, 19 nt, Artificial Sequence
  Description of Artificial Sequence: Synthetic oligonucleotide
caccccaggucuuaccccg

SEQ ID NO: 1652112 - RNA, 19 nt, Artificial Sequence
  Description of Artificial Sequence: Synthetic oligonucleotide
aaacuccguaauaaauaca

SEQ ID NO: 1652113 - RNA, 19 nt, Artificial Sequence
  Description of Artificial Sequence: Synthetic oligonucleotide
gaaauaggaucuggggaac

SEQ ID NO: 1652114 - RNA, 19 nt, Artificial Sequence
  Description of Artificial Sequence: Synthetic oligonucleotide
ggaguauagagccuccuuc

SEQ ID NO: 1652115 - RNA, 19 nt, Artificial Sequence
  Description of Artificial Sequence: Synthetic oligonucleotide
agccaauuguccaggauug

SEQ ID NO: 1652116 - RNA, 19 nt, Artificial Sequence
  Description of Artificial Sequence: Synthetic oligonucleotide
cgcaacaaaggcaaagucc

SEQ ID NO: 1652117 - RNA, 19 nt, Artificial Sequence
  Description of Artificial Sequence: Synthetic oligonucleotide
uagcaucuuucuuaaggau

SEQ ID NO: 1652118 - RNA, 19 nt, Artificial Sequence
  Description of Artificial Sequence: Synthetic oligonucleotide
aaguuauagugcagggccu

SEQ ID NO: 1652119 - RNA, 19 nt, Artificial Sequence
  Description of Artificial Sequence: Synthetic oligonucleotide
ugagccgaagucgggcacg

SEQ ID NO: 1652120 - RNA, 19 nt, Artificial Sequence
  Description of Artificial Sequence: Synthetic oligonucleotide
agaggcuacagagcccugg

SEQ ID NO: 1652121 - RNA, 19 nt, Artificial Sequence
  Description of Artificial Sequence: Synthetic oligonucleotide
caauggaucagacuguggu

SEQ ID NO: 1652122 - RNA, 19 nt, Artificial Sequence
  Description of Artificial Sequence: Synthetic oligonucleotide
acuccguaauaaauacagg

SEQ ID NO: 1652123 - RNA, 19 nt, Artificial Sequence
  Description of Artificial Sequence: Synthetic oligonucleotide
ugucuuugucacccgcaac

SEQ ID NO: 1652124 - RNA, 19 nt, Artificial Sequence
  Description of Artificial Sequence: Synthetic oligonucleotide
cuuaccccgagcugcugag

SEQ ID NO: 1652125 - RNA, 19 nt, Artificial Sequence
  Description of Artificial Sequence: Synthetic oligonucleotide
auacaggguaugcaaggau

SEQ ID NO: 1652126 - RNA, 19 nt, Artificial Sequence
  Description of Artificial Sequence: Synthetic oligonucleotide
uaaggaucaucaacauguu

SEQ ID NO: 1652127 - RNA, 19 nt, Artificial Sequence
  Description of Artificial Sequence: Synthetic oligonucleotide
uuccccagccucuaagauc

SEQ ID NO: 1652128 - RNA, 19 nt, Artificial Sequence
  Description of Artificial Sequence: Synthetic oligonucleotide
auguggaucacggccaaca

SEQ ID NO: 1652129 - RNA, 19 nt, Artificial Sequence
  Description of Artificial Sequence: Synthetic oligonucleotide
uggagcugcccacacccca

SEQ ID NO: 1652130 - RNA, 19 nt, Artificial Sequence
  Description of Artificial Sequence: Synthetic oligonucleotide
aggacauauggagaagaga

SEQ ID NO: 1652131 - RNA, 19 nt, Artificial Sequence
  Description of Artificial Sequence: Synthetic oligonucleotide
ucacggccaacaccaauaa

SEQ ID NO: 1652132 - RNA, 19 nt, Artificial Sequence
  Description of Artificial Sequence: Synthetic oligonucleotide
gcuauaaaguugcugaggu

SEQ ID NO: 1652133 - RNA, 19 nt, Artificial Sequence
  Description of Artificial Sequence: Synthetic oligonucleotide
caaucccuccuuugaguag

SEQ ID NO: 1652134 - RNA, 19 nt, Artificial Sequence
  Description of Artificial Sequence: Synthetic oligonucleotide
acaaccaaggucagcgaug

SEQ ID NO: 1652135 - RNA, 19 nt, Artificial Sequence
  Description of Artificial Sequence: Synthetic oligonucleotide
acagagccccuguagggca

SEQ ID NO: 1652136 - RNA, 19 nt, Artificial Sequence
  Description of Artificial Sequence: Synthetic oligonucleotide
aaggaguauagagccuccu

SEQ ID NO: 1652137 - RNA, 19 nt, Artificial Sequence
  Description of Artificial Sequence: Synthetic oligonucleotide
cauggagcugguccgcuug

SEQ ID NO: 1652138 - RNA, 19 nt, Artificial Sequence
  Description of Artificial Sequence: Synthetic oligonucleotide
ugacaaccaaggucagcga

SEQ ID NO: 1652139 - RNA, 19 nt, Artificial Sequence
  Description of Artificial Sequence: Synthetic oligonucleotide
caggcucauagcaucuuuc

SEQ ID NO: 1652140 - RNA, 19 nt, Artificial Sequence
  Description of Artificial Sequence: Synthetic oligonucleotide
auaaaguugcugagguaga

SEQ ID NO: 1652141 - RNA, 19 nt, Artificial Sequence
  Description of Artificial Sequence: Synthetic oligonucleotide
ucuuugucacccgcaacaa

SEQ ID NO: 1652142 - RNA, 19 nt, Artificial Sequence
  Description of Artificial Sequence: Synthetic oligonucleotide
ggcggauucccauguacag

SEQ ID NO: 1652143 - RNA, 19 nt, Artificial Sequence
  Description of Artificial Sequence: Synthetic oligonucleotide
guugcugagguagagccaa

SEQ ID NO: 1652144 - RNA, 19 nt, Artificial Sequence
  Description of Artificial Sequence: Synthetic oligonucleotide
uugagccgaagucgggcac

SEQ ID NO: 1652145 - RNA, 19 nt, Artificial Sequence
  Description of Artificial Sequence: Synthetic oligonucleotide
gcugagguagagccaauug

SEQ ID NO: 1652146 - RNA, 19 nt, Artificial Sequence
  Description of Artificial Sequence: Synthetic oligonucleotide
auuggacaggggcaaggaa

SEQ ID NO: 1652147 - RNA, 19 nt, Artificial Sequence
  Description of Artificial Sequence: Synthetic oligonucleotide
gggccuaaguuauagugca

SEQ ID NO: 1652148 - RNA, 19 nt, Artificial Sequence
  Description of Artificial Sequence: Synthetic oligonucleotide
uucccauguacagugccuc

SEQ ID NO: 1652149 - RNA, 19 nt, Artificial Sequence
  Description of Artificial Sequence: Synthetic oligonucleotide
cuccacuugccucgggaag

SEQ ID NO: 1652150 - RNA, 19 nt, Artificial Sequence
  Description of Artificial Sequence: Synthetic oligonucleotide
cauauggagaagagaaggu

SEQ ID NO: 1652151 - RNA, 19 nt, Artificial Sequence
  Description of Artificial Sequence: Synthetic oligonucleotide
ucagagaguccaccagcau

SEQ ID NO: 1652152 - RNA, 19 nt, Artificial Sequence
  Description of Artificial Sequence: Synthetic oligonucleotide
gauuggacaggggcaagga

SEQ ID NO: 1652153 - RNA, 19 nt, Artificial Sequence
  Description of Artificial Sequence: Synthetic oligonucleotide
cuugccucgggaagucuuc

SEQ ID NO: 1652154 - RNA, 19 nt, Artificial Sequence
  Description of Artificial Sequence: Synthetic oligonucleotide
gacaagaucugugcacaga

SEQ ID NO: 1652155 - RNA, 19 nt, Artificial Sequence
  Description of Artificial Sequence: Synthetic oligonucleotide
aggaguauagagccuccuu

SEQ ID NO: 1652156 - RNA, 19 nt, Artificial Sequence
  Description of Artificial Sequence: Synthetic oligonucleotide
guugacaauggaucagacu

SEQ ID NO: 1652157 - RNA, 19 nt, Artificial Sequence
  Description of Artificial Sequence: Synthetic oligonucleotide
cacuggaaggucugacaac

SEQ ID NO: 1652158 - RNA, 19 nt, Artificial Sequence
  Description of Artificial Sequence: Synthetic oligonucleotide
accagagguugacaaugga

SEQ ID NO: 1652159 - RNA, 19 nt, Artificial Sequence
  Description of Artificial Sequence: Synthetic oligonucleotide
cugcacuagccucugccug

SEQ ID NO: 1652160 - RNA, 19 nt, Artificial Sequence
  Description of Artificial Sequence: Synthetic oligonucleotide
ugaggguaccaauggccuc

SEQ ID NO: 1652161 - RNA, 19 nt, Artificial Sequence
  Description of Artificial Sequence: Synthetic oligonucleotide
ccugucacggcccuuggag

SEQ ID NO: 1652162 - RNA, 19 nt, Artificial Sequence
  Description of Artificial Sequence: Synthetic oligonucleotide
agagccaauuguccaggau

SEQ ID NO: 1652163 - RNA, 19 nt, Artificial Sequence
  Description of Artificial Sequence: Synthetic oligonucleotide
cagacaagaucugugcaca

SEQ ID NO: 1652164 - RNA, 19 nt, Artificial Sequence
  Description of Artificial Sequence: Synthetic oligonucleotide
cagccugucucacugcauc

SEQ ID NO: 1652165 - RNA, 19 nt, Artificial Sequence
  Description of Artificial Sequence: Synthetic oligonucleotide
agagagucagacacacuga

SEQ ID NO: 1652166 - RNA, 19 nt, Artificial Sequence
  Description of Artificial Sequence: Synthetic oligonucleotide
aagucccugucacggcccu

SEQ ID NO: 1652167 - RNA, 19 nt, Artificial Sequence
  Description of Artificial Sequence: Synthetic oligonucleotide
aggcaucaagaaaugagaa

SEQ ID NO: 1652168 - RNA, 19 nt, Artificial Sequence
  Description of Artificial Sequence: Synthetic oligonucleotide
gggaugugcagucaucaga

SEQ ID NO: 1652169 - RNA, 19 nt, Artificial Sequence
  Description of Artificial Sequence: Synthetic oligonucleotide
ggauacaguuauugacagc

SEQ ID NO: 1652170 - RNA, 19 nt, Artificial Sequence
  Description of Artificial Sequence: Synthetic oligonucleotide
gcagguacaucacagcgaa

SEQ ID NO: 1652171 - RNA, 19 nt, Artificial Sequence
  Description of Artificial Sequence: Synthetic oligonucleotide
caauggccuuugcagguac

SEQ ID NO: 1652172 - RNA, 19 nt, Artificial Sequence
  Description of Artificial Sequence: Synthetic oligonucleotide
gguauguggaucacggcca

SEQ ID NO: 1652173 - RNA, 19 nt, Artificial Sequence
  Description of Artificial Sequence: Synthetic oligonucleotide
acuccacuugccucgggaa

SEQ ID NO: 1652174 - RNA, 19 nt, Artificial Sequence
  Description of Artificial Sequence: Synthetic oligonucleotide
augcaaggaucagggacag

SEQ ID NO: 1652175 - RNA, 19 nt, Artificial Sequence
  Description of Artificial Sequence: Synthetic oligonucleotide
aucuggggaacagcaagca

SEQ ID NO: 1652176 - RNA, 19 nt, Artificial Sequence
  Description of Artificial Sequence: Synthetic oligonucleotide
cugagguagagccaauugu

SEQ ID NO: 1652177 - RNA, 19 nt, Artificial Sequence
  Description of Artificial Sequence: Synthetic oligonucleotide
ggggccuaaguuauagugc

SEQ ID NO: 1652178 - RNA, 19 nt, Artificial Sequence
  Description of Artificial Sequence: Synthetic oligonucleotide
gcgagucugggccagcugc

SEQ ID NO: 1652179 - RNA, 19 nt, Artificial Sequence
  Description of Artificial Sequence: Synthetic oligonucleotide
caaaggcaaagucccuguc

SEQ ID NO: 1652180 - RNA, 19 nt, Artificial Sequence
  Description of Artificial Sequence: Synthetic oligonucleotide
ucugccugaaugggaugug

SEQ ID NO: 1652181 - RNA, 19 nt, Artificial Sequence
  Description of Artificial Sequence: Synthetic oligonucleotide
uacccauggcggauuccca

SEQ ID NO: 1652182 - RNA, 19 nt, Artificial Sequence
  Description of Artificial Sequence: Synthetic oligonucleotide
caacaccaauaaagguuac

SEQ ID NO: 1652183 - RNA, 19 nt, Artificial Sequence
  Description of Artificial Sequence: Synthetic oligonucleotide
aucacggccaacaccaaua

SEQ ID NO: 1652184 - RNA, 19 nt, Artificial Sequence
  Description of Artificial Sequence: Synthetic oligonucleotide
ggcaccccaggucuuaccc

SEQ ID NO: 1652185 - RNA, 19 nt, Artificial Sequence
  Description of Artificial Sequence: Synthetic oligonucleotide
ugccucgggaagucuucag

SEQ ID NO: 1652186 - RNA, 19 nt, Artificial Sequence
  Description of Artificial Sequence: Synthetic oligonucleotide
gccugaaugggaugugcag

SEQ ID NO: 1652187 - RNA, 19 nt, Artificial Sequence
  Description of Artificial Sequence: Synthetic oligonucleotide
uuauagugcagggccucuc

SEQ ID NO: 1652188 - RNA, 19 nt, Artificial Sequence
  Description of Artificial Sequence: Synthetic oligonucleotide
guagggcacuugcaauggc

SEQ ID NO: 1652189 - RNA, 19 nt, Artificial Sequence
  Description of Artificial Sequence: Synthetic oligonucleotide
gacacggaugugaaccaga

SEQ ID NO: 1652190 - RNA, 19 nt, Artificial Sequence
  Description of Artificial Sequence: Synthetic oligonucleotide
gacaaccaaggucagcgau

SEQ ID NO: 1652191 - RNA, 19 nt, Artificial Sequence
  Description of Artificial Sequence: Synthetic oligonucleotide
uaggggccuaaguuauagu

SEQ ID NO: 1652192 - RNA, 19 nt, Artificial Sequence
  Description of Artificial Sequence: Synthetic oligonucleotide
uuuagccugaaggcaucaa

SEQ ID NO: 1652193 - RNA, 19 nt, Artificial Sequence
  Description of Artificial Sequence: Synthetic oligonucleotide
gcuacagagcccuggggac

SEQ ID NO: 1652194 - RNA, 19 nt, Artificial Sequence
  Description of Artificial Sequence: Synthetic oligonucleotide
cggccaacaccaauaaagg

SEQ ID NO: 1652195 - RNA, 19 nt, Artificial Sequence
  Description of Artificial Sequence: Synthetic oligonucleotide
cugcacacuggaaggucug

SEQ ID NO: 1652196 - RNA, 19 nt, Artificial Sequence
  Description of Artificial Sequence: Synthetic oligonucleotide
ugcgagucugggccagcug

SEQ ID NO: 1652197 - RNA, 19 nt, Artificial Sequence
  Description of Artificial Sequence: Synthetic oligonucleotide
cugccugaaugggaugugc

SEQ ID NO: 1652198 - RNA, 19 nt, Artificial Sequence
  Description of Artificial Sequence: Synthetic oligonucleotide
caucagagagucagacaca

SEQ ID NO: 1652199 - RNA, 19 nt, Artificial Sequence
  Description of Artificial Sequence: Synthetic oligonucleotide
cagggacccagguuuucug

SEQ ID NO: 1652200 - RNA, 19 nt, Artificial Sequence
  Description of Artificial Sequence: Synthetic oligonucleotide
cuauaaaguugcugaggua

SEQ ID NO: 1652201 - RNA, 19 nt, Artificial Sequence
  Description of Artificial Sequence: Synthetic oligonucleotide
gugcuaggggccuaaguua

SEQ ID NO: 1652202 - RNA, 19 nt, Artificial Sequence
  Description of Artificial Sequence: Synthetic oligonucleotide
guacugaaccauacaggca

SEQ ID NO: 1652203 - RNA, 19 nt, Artificial Sequence
  Description of Artificial Sequence: Synthetic oligonucleotide
uuguacugauucugcuaua

SEQ ID NO: 1652204 - RNA, 19 nt, Artificial Sequence
  Description of Artificial Sequence: Synthetic oligonucleotide
guacugauucugcuauaaa

SEQ ID NO: 1652205 - RNA, 19 nt, Artificial Sequence
  Description of Artificial Sequence: Synthetic oligonucleotide
ccguaauaaauacagggua

SEQ ID NO: 1652206 - RNA, 19 nt, Artificial Sequence
  Description of Artificial Sequence: Synthetic oligonucleotide
ugguugcgagucugggcca

SEQ ID NO: 1652207 - RNA, 19 nt, Artificial Sequence
  Description of Artificial Sequence: Synthetic oligonucleotide
acccauggcggauucccau

SEQ ID NO: 1652208 - RNA, 19 nt, Artificial Sequence
  Description of Artificial Sequence: Synthetic oligonucleotide
uggagaagagaagguuuua

SEQ ID NO: 1652209 - RNA, 19 nt, Artificial Sequence
  Description of Artificial Sequence: Synthetic oligonucleotide
caggucuuaccccgagcug

SEQ ID NO: 1652210 - RNA, 19 nt, Artificial Sequence
  Description of Artificial Sequence: Synthetic oligonucleotide
cagacacggaugugaacca

SEQ ID NO: 1652211 - RNA, 19 nt, Artificial Sequence
  Description of Artificial Sequence: Synthetic oligonucleotide
gcauacagcugucuuuguc

SEQ ID NO: 1652212 - RNA, 19 nt, Artificial Sequence
  Description of Artificial Sequence: Synthetic oligonucleotide
aggauggugagaggcuaca

SEQ ID NO: 1652213 - RNA, 19 nt, Artificial Sequence
  Description of Artificial Sequence: Synthetic oligonucleotide
gucagcgaugaggccaaag

SEQ ID NO: 1652214 - RNA, 19 nt, Artificial Sequence
  Description of Artificial Sequence: Synthetic oligonucleotide
agguuacaaggcacacagg

SEQ ID NO: 1652215 - RNA, 19 nt, Artificial Sequence
  Description of Artificial Sequence: Synthetic oligonucleotide
ccgaagucgggcacgggcc

SEQ ID NO: 1652216 - RNA, 19 nt, Artificial Sequence
  Description of Artificial Sequence: Synthetic oligonucleotide
ggagcugguccgcuugagc

SEQ ID NO: 1652217 - RNA, 19 nt, Artificial Sequence
  Description of Artificial Sequence: Synthetic oligonucleotide
aguugcugagguagagcca

SEQ ID NO: 1652218 - RNA, 19 nt, Artificial Sequence
  Description of Artificial Sequence: Synthetic oligonucleotide
ggugcuaggggccuaaguu

SEQ ID NO: 1652219 - RNA, 19 nt, Artificial Sequence
  Description of Artificial Sequence: Synthetic oligonucleotide
ugagcauagcagggaccca

SEQ ID NO: 1652220 - RNA, 19 nt, Artificial Sequence
  Description of Artificial Sequence: Synthetic oligonucleotide
ucccuccuuugaguagcgg

SEQ ID NO: 1652221 - RNA, 19 nt, Artificial Sequence
  Description of Artificial Sequence: Synthetic oligonucleotide
cauacccauggcggauucc

SEQ ID NO: 1652222 - RNA, 19 nt, Artificial Sequence
  Description of Artificial Sequence: Synthetic oligonucleotide
cugucuuugucacccgcaa

SEQ ID NO: 1652223 - RNA, 19 nt, Artificial Sequence
  Description of Artificial Sequence: Synthetic oligonucleotide
guauguggaucacggccaa

SEQ ID NO: 1652224 - RNA, 19 nt, Artificial Sequence
  Description of Artificial Sequence: Synthetic oligonucleotide
gccccuguagggcacuugc

SEQ ID NO: 1652225 - RNA, 19 nt, Artificial Sequence
  Description of Artificial Sequence: Synthetic oligonucleotide
cagcugucuuugucacccg

SEQ ID NO: 1652226 - RNA, 19 nt, Artificial Sequence
  Description of Artificial Sequence: Synthetic oligonucleotide
gucccugucacggcccuug

SEQ ID NO: 1652227 - RNA, 19 nt, Artificial Sequence
  Description of Artificial Sequence: Synthetic oligonucleotide
ccgcuugagccgaagucgg

SEQ ID NO: 1652228 - RNA, 19 nt, Artificial Sequence
  Description of Artificial Sequence: Synthetic oligonucleotide
gguaugcaaggaucaggga

SEQ ID NO: 1652229 - RNA, 19 nt, Artificial Sequence
  Description of Artificial Sequence: Synthetic oligonucleotide
auacaguuauugacagcaa

SEQ ID NO: 1652230 - RNA, 19 nt, Artificial Sequence
  Description of Artificial Sequence: Synthetic oligonucleotide
uacuucugagcagccuguc

SEQ ID NO: 1652231 - RNA, 19 nt, Artificial Sequence
  Description of Artificial Sequence: Synthetic oligonucleotide
uccauggagcugguccgcu

SEQ ID NO: 1652232 - RNA, 19 nt, Artificial Sequence
  Description of Artificial Sequence: Synthetic oligonucleotide
gguugacaauggaucagac

SEQ ID NO: 1652233 - RNA, 19 nt, Artificial Sequence
  Description of Artificial Sequence: Synthetic oligonucleotide
ccaggauuggacaggggca

SEQ ID NO: 1652234 - RNA, 19 nt, Artificial Sequence
  Description of Artificial Sequence: Synthetic oligonucleotide
gugaggguaccaauggccu

SEQ ID NO: 1652235 - RNA, 19 nt, Artificial Sequence
  Description of Artificial Sequence: Synthetic oligonucleotide
uccauacccauggcggauu

SEQ ID NO: 1652236 - RNA, 19 nt, Artificial Sequence
  Description of Artificial Sequence: Synthetic oligonucleotide
uugcgagucugggccagcu

SEQ ID NO: 1652237 - RNA, 19 nt, Artificial Sequence
  Description of Artificial Sequence: Synthetic oligonucleotide
ggauggugagaggcuacag

SEQ ID NO: 1652238 - RNA, 19 nt, Artificial Sequence
  Description of Artificial Sequence: Synthetic oligonucleotide
auccauacccauggcggau

SEQ ID NO: 1652239 - RNA, 19 nt, Artificial Sequence
  Description of Artificial Sequence: Synthetic oligonucleotide
gaucacggccaacaccaau

SEQ ID NO: 1652240 - RNA, 19 nt, Artificial Sequence
  Description of Artificial Sequence: Synthetic oligonucleotide
gucugacaaccaaggucag

SEQ ID NO: 1652241 - RNA, 19 nt, Artificial Sequence
  Description of Artificial Sequence: Synthetic oligonucleotide
ccauacaggcagcuugcac

SEQ ID NO: 1652242 - RNA, 19 nt, Artificial Sequence
  Description of Artificial Sequence: Synthetic oligonucleotide
ggccaaagguauguggauc

SEQ ID NO: 1652243 - RNA, 19 nt, Artificial Sequence
  Description of Artificial Sequence: Synthetic oligonucleotide
accauacaggcagcuugca

SEQ ID NO: 1652244 - RNA, 19 nt, Artificial Sequence
  Description of Artificial Sequence: Synthetic oligonucleotide
gccaauuguccaggauugg

SEQ ID NO: 1652245 - RNA, 19 nt, Artificial Sequence
  Description of Artificial Sequence: Synthetic oligonucleotide
agagcccuggggacugaag

SEQ ID NO: 1652246 - RNA, 19 nt, Artificial Sequence
  Description of Artificial Sequence: Synthetic oligonucleotide
gccugaaggcaucaagaaa

SEQ ID NO: 1652247 - RNA, 19 nt, Artificial Sequence
  Description of Artificial Sequence: Synthetic oligonucleotide
caacuccacuugccucggg

SEQ ID NO: 1652248 - RNA, 19 nt, Artificial Sequence
  Description of Artificial Sequence: Synthetic oligonucleotide
ggacccagguuuucugguc

SEQ ID NO: 1652249 - RNA, 19 nt, Artificial Sequence
  Description of Artificial Sequence: Synthetic oligonucleotide
auucugcuauaaaguugcu

SEQ ID NO: 1652250 - RNA, 19 nt, Artificial Sequence
  Description of Artificial Sequence: Synthetic oligonucleotide
ccgcaacaaaggcaaaguc

SEQ ID NO: 1652251 - RNA, 19 nt, Artificial Sequence
  Description of Artificial Sequence: Synthetic oligonucleotide
aaagggugcuaggggccua

SEQ ID NO: 1652252 - RNA, 19 nt, Artificial Sequence
  Description of Artificial Sequence: Synthetic oligonucleotide
ccccaaucccuccuuugag

SEQ ID NO: 1652253 - RNA, 19 nt, Artificial Sequence
  Description of Artificial Sequence: Synthetic oligonucleotide
ggaacagcaagcagcuucu

SEQ ID NO: 1652254 - RNA, 19 nt, Artificial Sequence
  Description of Artificial Sequence: Synthetic oligonucleotide
aggucagcgaugaggccaa

SEQ ID NO: 1652255 - RNA, 19 nt, Artificial Sequence
  Description of Artificial Sequence: Synthetic oligonucleotide
cagccucuaagaucaauuu

SEQ ID NO: 1652256 - RNA, 19 nt, Artificial Sequence
  Description of Artificial Sequence: Synthetic oligonucleotide
ccaaucccuccuuugagua

SEQ ID NO: 1652257 - RNA, 19 nt, Artificial Sequence
  Description of Artificial Sequence: Synthetic oligonucleotide
ccaauuguccaggauugga

SEQ ID NO: 1652258 - RNA, 19 nt, Artificial Sequence
  Description of Artificial Sequence: Synthetic oligonucleotide
gcaacuccacuugccucgg

SEQ ID NO: 1652259 - RNA, 19 nt, Artificial Sequence
  Description of Artificial Sequence: Synthetic oligonucleotide
ggccuaaguuauagugcag

SEQ ID NO: 1652260 - RNA, 19 nt, Artificial Sequence
  Description of Artificial Sequence: Synthetic oligonucleotide
gguugcgagucugggccag

SEQ ID NO: 1652261 - RNA, 19 nt, Artificial Sequence
  Description of Artificial Sequence: Synthetic oligonucleotide
gcacuugcaauggccuuug

SEQ ID NO: 1652262 - RNA, 19 nt, Artificial Sequence
  Description of Artificial Sequence: Synthetic oligonucleotide
agacugugguccaggggau

SEQ ID NO: 1652263 - RNA, 19 nt, Artificial Sequence
  Description of Artificial Sequence: Synthetic oligonucleotide
ccuuggagcugcccacacc

SEQ ID NO: 1652264 - RNA, 19 nt, Artificial Sequence
  Description of Artificial Sequence: Synthetic oligonucleotide
cccauggcggauucccaug

SEQ ID NO: 1652265 - RNA, 19 nt, Artificial Sequence
  Description of Artificial Sequence: Synthetic oligonucleotide
ugggcaccccaggucuuac

SEQ ID NO: 1652266 - RNA, 19 nt, Artificial Sequence
  Description of Artificial Sequence: Synthetic oligonucleotide
guugcgagucugggccagc

SEQ ID NO: 1652267 - RNA, 19 nt, Artificial Sequence
  Description of Artificial Sequence: Synthetic oligonucleotide
caccaggggaguccaugga

SEQ ID NO: 1652268 - RNA, 19 nt, Artificial Sequence
  Description of Artificial Sequence: Synthetic oligonucleotide
gcacacuggaaggucugac

SEQ ID NO: 1652269 - RNA, 19 nt, Artificial Sequence
  Description of Artificial Sequence: Synthetic oligonucleotide
gagaggcuacagagcccug

SEQ ID NO: 1652270 - RNA, 19 nt, Artificial Sequence
  Description of Artificial Sequence: Synthetic oligonucleotide
cuuccccagccucuaagau

SEQ ID NO: 1652271 - RNA, 19 nt, Artificial Sequence
  Description of Artificial Sequence: Synthetic oligonucleotide
ccagagguugacaauggau

SEQ ID NO: 1652272 - RNA, 19 nt, Artificial Sequence
  Description of Artificial Sequence: Synthetic oligonucleotide
aucugugcacagagccccu

SEQ ID NO: 1652273 - RNA, 19 nt, Artificial Sequence
  Description of Artificial Sequence: Synthetic oligonucleotide
agagccccuguagggcacu

SEQ ID NO: 1652274 - RNA, 19 nt, Artificial Sequence
  Description of Artificial Sequence: Synthetic oligonucleotide
cagacacuucugguacuga

SEQ ID NO: 1652275 - RNA, 19 nt, Artificial Sequence
  Description of Artificial Sequence: Synthetic oligonucleotide
accaggcucauagcaucuu

SEQ ID NO: 1652276 - RNA, 19 nt, Artificial Sequence
  Description of Artificial Sequence: Synthetic oligonucleotide
gcgaugaggccaaagguau

SEQ ID NO: 1652277 - RNA, 19 nt, Artificial Sequence
  Description of Artificial Sequence: Synthetic oligonucleotide
ccagcugcuggauacaguu

SEQ ID NO: 1652278 - RNA, 19 nt, Artificial Sequence
  Description of Artificial Sequence: Synthetic oligonucleotide
agucgggcacgggccuggg

SEQ ID NO: 1652279 - RNA, 19 nt, Artificial Sequence
  Description of Artificial Sequence: Synthetic oligonucleotide
agccgaagucgggcacggg

SEQ ID NO: 1652280 - RNA, 19 nt, Artificial Sequence
  Description of Artificial Sequence: Synthetic oligonucleotide
agggugcuaggggccuaag

SEQ ID NO: 1652281 - RNA, 19 nt, Artificial Sequence
  Description of Artificial Sequence: Synthetic oligonucleotide
cacggccaacaccaauaaa

SEQ ID NO: 1652282 - RNA, 19 nt, Artificial Sequence
  Description of Artificial Sequence: Synthetic oligonucleotide
ccucaccccaagcaccauc

SEQ ID NO: 1652283 - RNA, 19 nt, Artificial Sequence
  Description of Artificial Sequence: Synthetic oligonucleotide
cccaggucuuaccccgagc

SEQ ID NO: 1652284 - RNA, 19 nt, Artificial Sequence
  Description of Artificial Sequence: Synthetic oligonucleotide
ccauacccauggcggauuc

SEQ ID NO: 1652285 - RNA, 19 nt, Artificial Sequence
  Description of Artificial Sequence: Synthetic oligonucleotide
gggcaccccaggucuuacc

SEQ ID NO: 1652286 - RNA, 19 nt, Artificial Sequence
  Description of Artificial Sequence: Synthetic oligonucleotide
cuacagagcccuggggacu

SEQ ID NO: 1652287 - RNA, 19 nt, Artificial Sequence
  Description of Artificial Sequence: Synthetic oligonucleotide
gcugguccgcuugagccga

SEQ ID NO: 1652288 - RNA, 19 nt, Artificial Sequence
  Description of Artificial Sequence: Synthetic oligonucleotide
ccagccucuaagaucaauu

SEQ ID NO: 1652289 - RNA, 19 nt, Artificial Sequence
  Description of Artificial Sequence: Synthetic oligonucleotide
aggguaccaauggccucau

SEQ ID NO: 1652290 - RNA, 19 nt, Artificial Sequence
  Description of Artificial Sequence: Synthetic oligonucleotide
cauggcggauucccaugua

SEQ ID NO: 1652291 - RNA, 19 nt, Artificial Sequence
  Description of Artificial Sequence: Synthetic oligonucleotide
cagguacaucacagcgaaa

SEQ ID NO: 1652292 - RNA, 19 nt, Artificial Sequence
  Description of Artificial Sequence: Synthetic oligonucleotide
cccaaucccuccuuugagu

SEQ ID NO: 1652293 - RNA, 19 nt, Artificial Sequence
  Description of Artificial Sequence: Synthetic oligonucleotide
cacggcccuuggagcugcc

SEQ ID NO: 1652294 - RNA, 19 nt, Artificial Sequence
  Description of Artificial Sequence: Synthetic oligonucleotide
gggaagucuucaggggaaa

SEQ ID NO: 1652295 - RNA, 19 nt, Artificial Sequence
  Description of Artificial Sequence: Synthetic oligonucleotide
gcugaggccaccagacacu

SEQ ID NO: 1652296 - RNA, 19 nt, Artificial Sequence
  Description of Artificial Sequence: Synthetic oligonucleotide
gguccgcuugagccgaagu

SEQ ID NO: 1652297 - RNA, 19 nt, Artificial Sequence
  Description of Artificial Sequence: Synthetic oligonucleotide
ccauguacagugccucaua

SEQ ID NO: 1652298 - RNA, 19 nt, Artificial Sequence
  Description of Artificial Sequence: Synthetic oligonucleotide
gccucucagucauccauau

SEQ ID NO: 1652299 - RNA, 19 nt, Artificial Sequence
  Description of Artificial Sequence: Synthetic oligonucleotide
gggugcuaggggccuaagu

SEQ ID NO: 1652300 - RNA, 19 nt, Artificial Sequence
  Description of Artificial Sequence: Synthetic oligonucleotide
ggccucucagucauccaua

SEQ ID NO: 1652301 - RNA, 19 nt, Artificial Sequence
  Description of Artificial Sequence: Synthetic oligonucleotide
gcggauucccauguacagu

SEQ ID NO: 1652302 - RNA, 19 nt, Artificial Sequence
  Description of Artificial Sequence: Synthetic oligonucleotide
ggcacuugcaauggccuuu

SEQ ID NO: 1652303 - RNA, 19 nt, Artificial Sequence
  Description of Artificial Sequence: Synthetic oligonucleotide
ccacuugccucgggaaguc

SEQ ID NO: 1652304 - RNA, 19 nt, Artificial Sequence
  Description of Artificial Sequence: Synthetic oligonucleotide
ggucuuaccccgagcugcu

SEQ ID NO: 1652305 - RNA, 19 nt, Artificial Sequence
  Description of Artificial Sequence: Synthetic oligonucleotide
ccccgggcagugaggguac

SEQ ID NO: 1652306 - RNA, 19 nt, Artificial Sequence
  Description of Artificial Sequence: Synthetic oligonucleotide
ccucuuucgaggagcugcu

SEQ ID NO: 1652307 - RNA, 19 nt, Artificial Sequence
  Description of Artificial Sequence: Synthetic oligonucleotide
ggaagucuucaggggaaau

SEQ ID NO: 1652308 - RNA, 19 nt, Artificial Sequence
  Description of Artificial Sequence: Synthetic oligonucleotide
cugaggccaccagacacuu

SEQ ID NO: 1652309 - RNA, 19 nt, Artificial Sequence
  Description of Artificial Sequence: Synthetic oligonucleotide
gacugugguccaggggauu

SEQ ID NO: 1652310 - RNA, 19 nt, Artificial Sequence
  Description of Artificial Sequence: Synthetic oligonucleotide
ccauggcggauucccaugu

SEQ ID NO: 1652311 - RNA, 19 nt, Artificial Sequence
  Description of Artificial Sequence: Synthetic oligonucleotide
cugggcaccccaggucuua

SEQ ID NO: 1652312 - RNA, 19 nt, Artificial Sequence
  Description of Artificial Sequence: Synthetic oligonucleotide
cuggggacugaaggaguau

SEQ ID NO: 1652313 - RNA, 19 nt, Artificial Sequence
  Description of Artificial Sequence: Synthetic oligonucleotide
agucccugucacggcccuu

SEQ ID NO: 1652314 - RNA, 19 nt, Artificial Sequence
  Description of Artificial Sequence: Synthetic oligonucleotide
cagagcccuggggacugaa

SEQ ID NO: 1652315 - RNA, 19 nt, Artificial Sequence
  Description of Artificial Sequence: Synthetic oligonucleotide
cacagggcacugccacagu

SEQ ID NO: 1652316 - RNA, 19 nt, Artificial Sequence
  Description of Artificial Sequence: Synthetic oligonucleotide
ggaucacggccaacaccaa

SEQ ID NO: 1652317 - RNA, 19 nt, Artificial Sequence
  Description of Artificial Sequence: Synthetic oligonucleotide
gcuaggggccuaaguuaua

SEQ ID NO: 1652318 - RNA, 19 nt, Artificial Sequence
  Description of Artificial Sequence: Synthetic oligonucleotide
ccgagcugcugaggccacc

SEQ ID NO: 1652319 - RNA, 19 nt, Artificial Sequence
  Description of Artificial Sequence: Synthetic oligonucleotide
cacuugccucgggaagucu

SEQ ID NO: 1652320 - RNA, 19 nt, Artificial Sequence
  Description of Artificial Sequence: Synthetic oligonucleotide
ccaggcucauagcaucuuu

SEQ ID NO: 1652321 - RNA, 19 nt, Artificial Sequence
  Description of Artificial Sequence: Synthetic oligonucleotide
ggggauucaccaggcucau

SEQ ID NO: 1652322 - RNA, 19 nt, Artificial Sequence
  Description of Artificial Sequence: Synthetic oligonucleotide
cggaugugaaccagagguu

SEQ ID NO: 1652323 - RNA, 19 nt, Artificial Sequence
  Description of Artificial Sequence: Synthetic oligonucleotide
gggauucaccaggcucaua

SEQ ID NO: 1652324 - RNA, 19 nt, Artificial Sequence
  Description of Artificial Sequence: Synthetic oligonucleotide
cgagucugggccagcugcu

SEQ ID NO: 1652325 - RNA, 19 nt, Artificial Sequence
  Description of Artificial Sequence: Synthetic oligonucleotide
gcacgggccugggcacccc

SEQ ID NO: 1652326 - RNA, 19 nt, Artificial Sequence
  Description of Artificial Sequence: Synthetic oligonucleotide
cgaagucgggcacgggccu

SEQ ID NO: 1652327 - RNA, 19 nt, Artificial Sequence
  Description of Artificial Sequence: Synthetic oligonucleotide
cacuagccucugccugaau

SEQ ID NO: 1652328 - RNA, 19 nt, Artificial Sequence
  Description of Artificial Sequence: Synthetic oligonucleotide
ggucagcgaugaggccaaa

SEQ ID NO: 1652329 - RNA, 19 nt, Artificial Sequence
  Description of Artificial Sequence: Synthetic oligonucleotide
cccagccucuaagaucaau

SEQ ID NO: 1652330 - RNA, 19 nt, Artificial Sequence
  Description of Artificial Sequence: Synthetic oligonucleotide
ggguaccaauggccucauu

SEQ ID NO: 1652331 - RNA, 19 nt, Artificial Sequence
  Description of Artificial Sequence: Synthetic oligonucleotide
ccugggcaccccaggucuu

SEQ ID NO: 1652332 - RNA, 19 nt, Artificial Sequence
  Description of Artificial Sequence: Synthetic oligonucleotide
uaaaguaauucuaaggugg

SEQ ID NO: 1652333 - RNA, 19 nt, Artificial Sequence
  Description of Artificial Sequence: Synthetic oligonucleotide
aaaauguugucauucaccg

SEQ ID NO: 1652334 - RNA, 19 nt, Artificial Sequence
  Description of Artificial Sequence: Synthetic oligonucleotide
aauuuaaucauuuuggaaa

SEQ ID NO: 1652335 - RNA, 19 nt, Artificial Sequence
  Description of Artificial Sequence: Synthetic oligonucleotide
uaauuugccaggcagaagg

SEQ ID NO: 1652336 - RNA, 19 nt, Artificial Sequence
  Description of Artificial Sequence: Synthetic oligonucleotide
ucuaaaguaauucuaaggu

SEQ ID NO: 1652337 - RNA, 19 nt, Artificial Sequence
  Description of Artificial Sequence: Synthetic oligonucleotide
uuaaacaugacacugugga

SEQ ID NO: 1652338 - RNA, 19 nt, Artificial Sequence
  Description of Artificial Sequence: Synthetic oligonucleotide
agcuguaugggcuugaccc

SEQ ID NO: 1652339 - RNA, 19 nt, Artificial Sequence
  Description of Artificial Sequence: Synthetic oligonucleotide
uucaugagcaaacacaucc

SEQ ID NO: 1652340 - RNA, 19 nt, Artificial Sequence
  Description of Artificial Sequence: Synthetic oligonucleotide
auagucaaaagauaaauca

SEQ ID NO: 1652341 - RNA, 19 nt, Artificial Sequence
  Description of Artificial Sequence: Synthetic oligonucleotide
ucaaugacaacucaggaac

SEQ ID NO: 1652342 - RNA, 19 nt, Artificial Sequence
  Description of Artificial Sequence: Synthetic oligonucleotide
uuuauaagaacccuggcuc

SEQ ID NO: 1652343 - RNA, 19 nt, Artificial Sequence
  Description of Artificial Sequence: Synthetic oligonucleotide
agauacuaagcucaucucc

SEQ ID NO: 1652344 - RNA, 19 nt, Artificial Sequence
  Description of Artificial Sequence: Synthetic oligonucleotide
acuauugaaagccaggcag

SEQ ID NO: 1652345 - RNA, 19 nt, Artificial Sequence
  Description of Artificial Sequence: Synthetic oligonucleotide
ucugugaauagucaaaaga

SEQ ID NO: 1652346 - RNA, 19 nt, Artificial Sequence
  Description of Artificial Sequence: Synthetic oligonucleotide
ucagauacuaagcucaucu

SEQ ID NO: 1652347 - RNA, 19 nt, Artificial Sequence
  Description of Artificial Sequence: Synthetic oligonucleotide
aucuaaaguaauucuaagg

SEQ ID NO: 1652348 - RNA, 19 nt, Artificial Sequence
  Description of Artificial Sequence: Synthetic oligonucleotide
uuuuauaagaacccuggcu

SEQ ID NO: 1652349 - RNA, 19 nt, Artificial Sequence
  Description of Artificial Sequence: Synthetic oligonucleotide
aaucuaaaguaauucuaag

SEQ ID NO: 1652350 - RNA, 19 nt, Artificial Sequence
  Description of Artificial Sequence: Synthetic oligonucleotide
agcaagaugagauauccuc

SEQ ID NO: 1652351 - RNA, 19 nt, Artificial Sequence
  Description of Artificial Sequence: Synthetic oligonucleotide
uacacuggaaauuugauau

SEQ ID NO: 1652352 - RNA, 19 nt, Artificial Sequence
  Description of Artificial Sequence: Synthetic oligonucleotide
aauucuaaggugguuacag

SEQ ID NO: 1652353 - RNA, 19 nt, Artificial Sequence
  Description of Artificial Sequence: Synthetic oligonucleotide
aauagucaaaagauaaauc

SEQ ID NO: 1652354 - RNA, 19 nt, Artificial Sequence
  Description of Artificial Sequence: Synthetic oligonucleotide
aaacaugacacuguggaag

SEQ ID NO: 1652355 - RNA, 19 nt, Artificial Sequence
  Description of Artificial Sequence: Synthetic oligonucleotide
aaaauuccaauuuaaucau

SEQ ID NO: 1652356 - RNA, 19 nt, Artificial Sequence
  Description of Artificial Sequence: Synthetic oligonucleotide
auauacugcaucuucauga

SEQ ID NO: 1652357 - RNA, 19 nt, Artificial Sequence
  Description of Artificial Sequence: Synthetic oligonucleotide
aaaucauagaaccauuuua

SEQ ID NO: 1652358 - RNA, 19 nt, Artificial Sequence
  Description of Artificial Sequence: Synthetic oligonucleotide
ucaccgacaaaccauauac

SEQ ID NO: 1652359 - RNA, 19 nt, Artificial Sequence
  Description of Artificial Sequence: Synthetic oligonucleotide
uccauuguuaccuacuuca

SEQ ID NO: 1652360 - RNA, 19 nt, Artificial Sequence
  Description of Artificial Sequence: Synthetic oligonucleotide
uuguuggagaauucaaugg

SEQ ID NO: 1652361 - RNA, 19 nt, Artificial Sequence
  Description of Artificial Sequence: Synthetic oligonucleotide
ugcaaaguugacauggacc

SEQ ID NO: 1652362 - RNA, 19 nt, Artificial Sequence
  Description of Artificial Sequence: Synthetic oligonucleotide
aaaauguuggaauggugcu

SEQ ID NO: 1652363 - RNA, 19 nt, Artificial Sequence
  Description of Artificial Sequence: Synthetic oligonucleotide
gauggauugacaccggacc

SEQ ID NO: 1652364 - RNA, 19 nt, Artificial Sequence
  Description of Artificial Sequence: Synthetic oligonucleotide
aaggugguuacagaacugc

SEQ ID NO: 1652365 - RNA, 19 nt, Artificial Sequence
  Description of Artificial Sequence: Synthetic oligonucleotide
ucauucaccgggcucaccg

SEQ ID NO: 1652366 - RNA, 19 nt, Artificial Sequence
  Description of Artificial Sequence: Synthetic oligonucleotide
ugauggauaauuugccagg

SEQ ID NO: 1652367 - RNA, 19 nt, Artificial Sequence
  Description of Artificial Sequence: Synthetic oligonucleotide
aauugucucucgucacucc

SEQ ID NO: 1652368 - RNA, 19 nt, Artificial Sequence
  Description of Artificial Sequence: Synthetic oligonucleotide
acaaaucuaaaguaauucu

SEQ ID NO: 1652369 - RNA, 19 nt, Artificial Sequence
  Description of Artificial Sequence: Synthetic oligonucleotide
cauagaaccauuuuaauua

SEQ ID NO: 1652370 - RNA, 19 nt, Artificial Sequence
  Description of Artificial Sequence: Synthetic oligonucleotide
auugacacagccgaagugg

SEQ ID NO: 1652371 - RNA, 19 nt, Artificial Sequence
  Description of Artificial Sequence: Synthetic oligonucleotide
aaaggaacgcuucaucagu

SEQ ID NO: 1652372 - RNA, 19 nt, Artificial Sequence
  Description of Artificial Sequence: Synthetic oligonucleotide
uccaacguuccacuguucg

SEQ ID NO: 1652373 - RNA, 19 nt, Artificial Sequence
  Description of Artificial Sequence: Synthetic oligonucleotide
acuguaugcauccccacuc

SEQ ID NO: 1652374 - RNA, 19 nt, Artificial Sequence
  Description of Artificial Sequence: Synthetic oligonucleotide
ucauccuccauucuucagc

SEQ ID NO: 1652375 - RNA, 19 nt, Artificial Sequence
  Description of Artificial Sequence: Synthetic oligonucleotide
augacuugggcuuauaaaa

SEQ ID NO: 1652376 - RNA, 19 nt, Artificial Sequence
  Description of Artificial Sequence: Synthetic oligonucleotide
gauacuaagcucaucuccc

SEQ ID NO: 1652377 - RNA, 19 nt, Artificial Sequence
  Description of Artificial Sequence: Synthetic oligonucleotide
auugucucucgucacuccc

SEQ ID NO: 1652378 - RNA, 19 nt, Artificial Sequence
  Description of Artificial Sequence: Synthetic oligonucleotide
auaacuugcucaucauuuc

SEQ ID NO: 1652379 - RNA, 19 nt, Artificial Sequence
  Description of Artificial Sequence: Synthetic oligonucleotide
agccacaucagauacuaag

SEQ ID NO: 1652380 - RNA, 19 nt, Artificial Sequence
  Description of Artificial Sequence: Synthetic oligonucleotide
agagaauugucucucguca

SEQ ID NO: 1652381 - RNA, 19 nt, Artificial Sequence
  Description of Artificial Sequence: Synthetic oligonucleotide
aaaucuaaaguaauucuaa

SEQ ID NO: 1652382 - RNA, 19 nt, Artificial Sequence
  Description of Artificial Sequence: Synthetic oligonucleotide
agaacugcugucccacucc

SEQ ID NO: 1652383 - RNA, 19 nt, Artificial Sequence
  Description of Artificial Sequence: Synthetic oligonucleotide
auuuaaucauuuuggaaaa

SEQ ID NO: 1652384 - RNA, 19 nt, Artificial Sequence
  Description of Artificial Sequence: Synthetic oligonucleotide
ucaaaagauaaaucauaga

SEQ ID NO: 1652385 - RNA, 19 nt, Artificial Sequence
  Description of Artificial Sequence: Synthetic oligonucleotide
uuauaagaacccuggcucc

SEQ ID NO: 1652386 - RNA, 19 nt, Artificial Sequence
  Description of Artificial Sequence: Synthetic oligonucleotide
acgggguuaaacaugacac

SEQ ID NO: 1652387 - RNA, 19 nt, Artificial Sequence
  Description of Artificial Sequence: Synthetic oligonucleotide
uacaauuaucugugaauag

SEQ ID NO: 1652388 - RNA, 19 nt, Artificial Sequence
  Description of Artificial Sequence: Synthetic oligonucleotide
uugauauuuucuucucucc

SEQ ID NO: 1652389 - RNA, 19 nt, Artificial Sequence
  Description of Artificial Sequence: Synthetic oligonucleotide
aaaccagagaauugucucu

SEQ ID NO: 1652390 - RNA, 19 nt, Artificial Sequence
  Description of Artificial Sequence: Synthetic oligonucleotide
accgacaaaccauauacug

SEQ ID NO: 1652391 - RNA, 19 nt, Artificial Sequence
  Description of Artificial Sequence: Synthetic oligonucleotide
ugacaccggaccaauaacc

SEQ ID NO: 1652392 - RNA, 19 nt, Artificial Sequence
  Description of Artificial Sequence: Synthetic oligonucleotide
aauguuggaauggugcucu

SEQ ID NO: 1652393 - RNA, 19 nt, Artificial Sequence
  Description of Artificial Sequence: Synthetic oligonucleotide
aucauggaggauaacuugc

SEQ ID NO: 1652394 - RNA, 19 nt, Artificial Sequence
  Description of Artificial Sequence: Synthetic oligonucleotide
acaaaccauauacugcauc

SEQ ID NO: 1652395 - RNA, 19 nt, Artificial Sequence
  Description of Artificial Sequence: Synthetic oligonucleotide
cugauggauaauuugccag

SEQ ID NO: 1652396 - RNA, 19 nt, Artificial Sequence
  Description of Artificial Sequence: Synthetic oligonucleotide
gcaaaguugacauggaccc

SEQ ID NO: 1652397 - RNA, 19 nt, Artificial Sequence
  Description of Artificial Sequence: Synthetic oligonucleotide
uuaucugugaauagucaaa

SEQ ID NO: 1652398 - RNA, 19 nt, Artificial Sequence
  Description of Artificial Sequence: Synthetic oligonucleotide
uucaaugacaacucaggaa

SEQ ID NO: 1652399 - RNA, 19 nt, Artificial Sequence
  Description of Artificial Sequence: Synthetic oligonucleotide
aaauguuggaauggugcuc

SEQ ID NO: 1652400 - RNA, 19 nt, Artificial Sequence
  Description of Artificial Sequence: Synthetic oligonucleotide
caauuaucugugaauaguc

SEQ ID NO: 1652401 - RNA, 19 nt, Artificial Sequence
  Description of Artificial Sequence: Synthetic oligonucleotide
ucagcuaaguccucccuag

SEQ ID NO: 1652402 - RNA, 19 nt, Artificial Sequence
  Description of Artificial Sequence: Synthetic oligonucleotide
ucuaaggugguuacagaac

SEQ ID NO: 1652403 - RNA, 19 nt, Artificial Sequence
  Description of Artificial Sequence: Synthetic oligonucleotide
uuacaauuaucugugaaua

SEQ ID NO: 1652404 - RNA, 19 nt, Artificial Sequence
  Description of Artificial Sequence: Synthetic oligonucleotide
aacaucauccuccauucuu

SEQ ID NO: 1652405 - RNA, 19 nt, Artificial Sequence
  Description of Artificial Sequence: Synthetic oligonucleotide
uugacccuggaauggauag

SEQ ID NO: 1652406 - RNA, 19 nt, Artificial Sequence
  Description of Artificial Sequence: Synthetic oligonucleotide
gacaacuccaagccugagg

SEQ ID NO: 1652407 - RNA, 19 nt, Artificial Sequence
  Description of Artificial Sequence: Synthetic oligonucleotide
uuugccaggcagaagggcu

SEQ ID NO: 1652408 - RNA, 19 nt, Artificial Sequence
  Description of Artificial Sequence: Synthetic oligonucleotide
ugacaacucaggaacuacc

SEQ ID NO: 1652409 - RNA, 19 nt, Artificial Sequence
  Description of Artificial Sequence: Synthetic oligonucleotide
aucaccacuauacacugga

SEQ ID NO: 1652410 - RNA, 19 nt, Artificial Sequence
  Description of Artificial Sequence: Synthetic oligonucleotide
caccggaccaauaaccugg

SEQ ID NO: 1652411 - RNA, 19 nt, Artificial Sequence
  Description of Artificial Sequence: Synthetic oligonucleotide
gcuuucaacaucauggagg

SEQ ID NO: 1652412 - RNA, 19 nt, Artificial Sequence
  Description of Artificial Sequence: Synthetic oligonucleotide
ucccggaugucccaaauga

SEQ ID NO: 1652413 - RNA, 19 nt, Artificial Sequence
  Description of Artificial Sequence: Synthetic oligonucleotide
accacuauacacuggaaau

SEQ ID NO: 1652414 - RNA, 19 nt, Artificial Sequence
  Description of Artificial Sequence: Synthetic oligonucleotide
acaauuaucugugaauagu

SEQ ID NO: 1652415 - RNA, 19 nt, Artificial Sequence
  Description of Artificial Sequence: Synthetic oligonucleotide
auagcuuguuccauaugcc

SEQ ID NO: 1652416 - RNA, 19 nt, Artificial Sequence
  Description of Artificial Sequence: Synthetic oligonucleotide
aaagccaggcagaaaaugu

SEQ ID NO: 1652417 - RNA, 19 nt, Artificial Sequence
  Description of Artificial Sequence: Synthetic oligonucleotide
ccuuuuauaagaacccugg

SEQ ID NO: 1652418 - RNA, 19 nt, Artificial Sequence
  Description of Artificial Sequence: Synthetic oligonucleotide
aacucaggaacuaccauca

SEQ ID NO: 1652419 - RNA, 19 nt, Artificial Sequence
  Description of Artificial Sequence: Synthetic oligonucleotide
ugacuugggcuuauaaaac

SEQ ID NO: 1652420 - RNA, 19 nt, Artificial Sequence
  Description of Artificial Sequence: Synthetic oligonucleotide
aauuccaauuuaaucauuu

SEQ ID NO: 1652421 - RNA, 19 nt, Artificial Sequence
  Description of Artificial Sequence: Synthetic oligonucleotide
uccacgggguuaaacauga

SEQ ID NO: 1652422 - RNA, 19 nt, Artificial Sequence
  Description of Artificial Sequence: Synthetic oligonucleotide
aacccuucaaugacaacuc

SEQ ID NO: 1652423 - RNA, 19 nt, Artificial Sequence
  Description of Artificial Sequence: Synthetic oligonucleotide
ucccaaaugagaacccggc

SEQ ID NO: 1652424 - RNA, 19 nt, Artificial Sequence
  Description of Artificial Sequence: Synthetic oligonucleotide
ugcuuucaacaucauggag

SEQ ID NO: 1652425 - RNA, 19 nt, Artificial Sequence
  Description of Artificial Sequence: Synthetic oligonucleotide
ugggcuuauaaaaccagaa

SEQ ID NO: 1652426 - RNA, 19 nt, Artificial Sequence
  Description of Artificial Sequence: Synthetic oligonucleotide
cuuuuauaagaacccuggc

SEQ ID NO: 1652427 - RNA, 19 nt, Artificial Sequence
  Description of Artificial Sequence: Synthetic oligonucleotide
ucaaccaccuuccuuuuau

SEQ ID NO: 1652428 - RNA, 19 nt, Artificial Sequence
  Description of Artificial Sequence: Synthetic oligonucleotide
auugacaccggaccaauaa

SEQ ID NO: 1652429 - RNA, 19 nt, Artificial Sequence
  Description of Artificial Sequence: Synthetic oligonucleotide
auaaccugggcuccacggg

SEQ ID NO: 1652430 - RNA, 19 nt, Artificial Sequence
  Description of Artificial Sequence: Synthetic oligonucleotide
uugcacaacccuucaauga

SEQ ID NO: 1652431 - RNA, 19 nt, Artificial Sequence
  Description of Artificial Sequence: Synthetic oligonucleotide
ucucucgucacucccugcc

SEQ ID NO: 1652432 - RNA, 19 nt, Artificial Sequence
  Description of Artificial Sequence: Synthetic oligonucleotide
caucauggaggauaacuug

SEQ ID NO: 1652433 - RNA, 19 nt, Artificial Sequence
  Description of Artificial Sequence: Synthetic oligonucleotide
guaauucuaaggugguuac

SEQ ID NO: 1652434 - RNA, 19 nt, Artificial Sequence
  Description of Artificial Sequence: Synthetic oligonucleotide
aaaguaauucuaagguggu

SEQ ID NO: 1652435 - RNA, 19 nt, Artificial Sequence
  Description of Artificial Sequence: Synthetic oligonucleotide
uguuaccuacuucaacaga

SEQ ID NO: 1652436 - RNA, 19 nt, Artificial Sequence
  Description of Artificial Sequence: Synthetic oligonucleotide
cuugggcuuauaaaaccag

SEQ ID NO: 1652437 - RNA, 19 nt, Artificial Sequence
  Description of Artificial Sequence: Synthetic oligonucleotide
cuugcacaacccuucaaug

SEQ ID NO: 1652438 - RNA, 19 nt, Artificial Sequence
  Description of Artificial Sequence: Synthetic oligonucleotide
aaugagaacccggccauca

SEQ ID NO: 1652439 - RNA, 19 nt, Artificial Sequence
  Description of Artificial Sequence: Synthetic oligonucleotide
uugggcuuauaaaaccaga

SEQ ID NO: 1652440 - RNA, 19 nt, Artificial Sequence
  Description of Artificial Sequence: Synthetic oligonucleotide
uuggagaauucaauggcau

SEQ ID NO: 1652441 - RNA, 19 nt, Artificial Sequence
  Description of Artificial Sequence: Synthetic oligonucleotide
aguaauucuaaggugguua

SEQ ID NO: 1652442 - RNA, 19 nt, Artificial Sequence
  Description of Artificial Sequence: Synthetic oligonucleotide
ugauggauugacaccggac

SEQ ID NO: 1652443 - RNA, 19 nt, Artificial Sequence
  Description of Artificial Sequence: Synthetic oligonucleotide
caugagcaaacacauccag

SEQ ID NO: 1652444 - RNA, 19 nt, Artificial Sequence
  Description of Artificial Sequence: Synthetic oligonucleotide
ucuacuuaggcgccuuccu

SEQ ID NO: 1652445 - RNA, 19 nt, Artificial Sequence
  Description of Artificial Sequence: Synthetic oligonucleotide
uccauuguuggagaauuca

SEQ ID NO: 1652446 - RNA, 19 nt, Artificial Sequence
  Description of Artificial Sequence: Synthetic oligonucleotide
ucauggaggauaacuugcu

SEQ ID NO: 1652447 - RNA, 19 nt, Artificial Sequence
  Description of Artificial Sequence: Synthetic oligonucleotide
ucuccuucccaaacugugc

SEQ ID NO: 1652448 - RNA, 19 nt, Artificial Sequence
  Description of Artificial Sequence: Synthetic oligonucleotide
ugccauagcagaacucggc

SEQ ID NO: 1652449 - RNA, 19 nt, Artificial Sequence
  Description of Artificial Sequence: Synthetic oligonucleotide
aucugugaauagucaaaag

SEQ ID NO: 1652450 - RNA, 19 nt, Artificial Sequence
  Description of Artificial Sequence: Synthetic oligonucleotide
cacuaaucugcaaaguuga

SEQ ID NO: 1652451 - RNA, 19 nt, Artificial Sequence
  Description of Artificial Sequence: Synthetic oligonucleotide
cauaccucagccacaucag

SEQ ID NO: 1652452 - RNA, 19 nt, Artificial Sequence
  Description of Artificial Sequence: Synthetic oligonucleotide
agaauugucucucgucacu

SEQ ID NO: 1652453 - RNA, 19 nt, Artificial Sequence
  Description of Artificial Sequence: Synthetic oligonucleotide
uaucugugaauagucaaaa

SEQ ID NO: 1652454 - RNA, 19 nt, Artificial Sequence
  Description of Artificial Sequence: Synthetic oligonucleotide
uaccaucaccacuauacac

SEQ ID NO: 1652455 - RNA, 19 nt, Artificial Sequence
  Description of Artificial Sequence: Synthetic oligonucleotide
uccacuguucgucuuccug

SEQ ID NO: 1652456 - RNA, 19 nt, Artificial Sequence
  Description of Artificial Sequence: Synthetic oligonucleotide
cacaucagauacuaagcuc

SEQ ID NO: 1652457 - RNA, 19 nt, Artificial Sequence
  Description of Artificial Sequence: Synthetic oligonucleotide
aagcucagcaagaugagau

SEQ ID NO: 1652458 - RNA, 19 nt, Artificial Sequence
  Description of Artificial Sequence: Synthetic oligonucleotide
ucccacuauugaaagccag

SEQ ID NO: 1652459 - RNA, 19 nt, Artificial Sequence
  Description of Artificial Sequence: Synthetic oligonucleotide
agcaaauguaaaaugacuu

SEQ ID NO: 1652460 - RNA, 19 nt, Artificial Sequence
  Description of Artificial Sequence: Synthetic oligonucleotide
ggagaauucaauggcauug

SEQ ID NO: 1652461 - RNA, 19 nt, Artificial Sequence
  Description of Artificial Sequence: Synthetic oligonucleotide
uguaugggcuugacccugg

SEQ ID NO: 1652462 - RNA, 19 nt, Artificial Sequence
  Description of Artificial Sequence: Synthetic oligonucleotide
ugcccacuaaucugcaaag

SEQ ID NO: 1652463 - RNA, 19 nt, Artificial Sequence
  Description of Artificial Sequence: Synthetic oligonucleotide
gguuaaacaugacacugug

SEQ ID NO: 1652464 - RNA, 19 nt, Artificial Sequence
  Description of Artificial Sequence: Synthetic oligonucleotide
agaaccauuuuaauuacaa

SEQ ID NO: 1652465 - RNA, 19 nt, Artificial Sequence
  Description of Artificial Sequence: Synthetic oligonucleotide
agcugucuagcaccucugc

SEQ ID NO: 1652466 - RNA, 19 nt, Artificial Sequence
  Description of Artificial Sequence: Synthetic oligonucleotide
ucaucuccuccugagacca

SEQ ID NO: 1652467 - RNA, 19 nt, Artificial Sequence
  Description of Artificial Sequence: Synthetic oligonucleotide
aggcagaaaauguuggaau

SEQ ID NO: 1652468 - RNA, 19 nt, Artificial Sequence
  Description of Artificial Sequence: Synthetic oligonucleotide
ucugcaaaguugacaugga

SEQ ID NO: 1652469 - RNA, 19 nt, Artificial Sequence
  Description of Artificial Sequence: Synthetic oligonucleotide
uugacaccggaccaauaac

SEQ ID NO: 1652470 - RNA, 19 nt, Artificial Sequence
  Description of Artificial Sequence: Synthetic oligonucleotide
auacacuggaaauuugaua

SEQ ID NO: 1652471 - RNA, 19 nt, Artificial Sequence
  Description of Artificial Sequence: Synthetic oligonucleotide
aggaacuaccaucaccacu

SEQ ID NO: 1652472 - RNA, 19 nt, Artificial Sequence
  Description of Artificial Sequence: Synthetic oligonucleotide
aucauagaaccauuuuaau

SEQ ID NO: 1652473 - RNA, 19 nt, Artificial Sequence
  Description of Artificial Sequence: Synthetic oligonucleotide
auucaccgggcucaccgac

SEQ ID NO: 1652474 - RNA, 19 nt, Artificial Sequence
  Description of Artificial Sequence: Synthetic oligonucleotide
aacguuccacuguucgucu

SEQ ID NO: 1652475 - RNA, 19 nt, Artificial Sequence
  Description of Artificial Sequence: Synthetic oligonucleotide
cauauacugcaucuucaug

SEQ ID NO: 1652476 - RNA, 19 nt, Artificial Sequence
  Description of Artificial Sequence: Synthetic oligonucleotide
ucgucuuccugucuugcac

SEQ ID NO: 1652477 - RNA, 19 nt, Artificial Sequence
  Description of Artificial Sequence: Synthetic oligonucleotide
gagaauugucucucgucac

SEQ ID NO: 1652478 - RNA, 19 nt, Artificial Sequence
  Description of Artificial Sequence: Synthetic oligonucleotide
agucaaaagauaaaucaua

SEQ ID NO: 1652479 - RNA, 19 nt, Artificial Sequence
  Description of Artificial Sequence: Synthetic oligonucleotide
auggauugacaccggacca

SEQ ID NO: 1652480 - RNA, 19 nt, Artificial Sequence
  Description of Artificial Sequence: Synthetic oligonucleotide
cagaaaugucuucucggag

SEQ ID NO: 1652481 - RNA, 19 nt, Artificial Sequence
  Description of Artificial Sequence: Synthetic oligonucleotide
accgggcucaccgacaaac

SEQ ID NO: 1652482 - RNA, 19 nt, Artificial Sequence
  Description of Artificial Sequence: Synthetic oligonucleotide
aacugugcuuucauaccuc

SEQ ID NO: 1652483 - RNA, 19 nt, Artificial Sequence
  Description of Artificial Sequence: Synthetic oligonucleotide
aguugccuucagcuaaguc

SEQ ID NO: 1652484 - RNA, 19 nt, Artificial Sequence
  Description of Artificial Sequence: Synthetic oligonucleotide
aaugacaacucaggaacua

SEQ ID NO: 1652485 - RNA, 19 nt, Artificial Sequence
  Description of Artificial Sequence: Synthetic oligonucleotide
gcuuucauaccucagccac

SEQ ID NO: 1652486 - RNA, 19 nt, Artificial Sequence
  Description of Artificial Sequence: Synthetic oligonucleotide
gaagaguccagccgcugac

SEQ ID NO: 1652487 - RNA, 19 nt, Artificial Sequence
  Description of Artificial Sequence: Synthetic oligonucleotide
gauaacuugcucaucauuu

SEQ ID NO: 1652488 - RNA, 19 nt, Artificial Sequence
  Description of Artificial Sequence: Synthetic oligonucleotide
aauggauagcuuguuccau

SEQ ID NO: 1652489 - RNA, 19 nt, Artificial Sequence
  Description of Artificial Sequence: Synthetic oligonucleotide
ugccugauggauugacacc

SEQ ID NO: 1652490 - RNA, 19 nt, Artificial Sequence
  Description of Artificial Sequence: Synthetic oligonucleotide
uaccucagccacaucagau

SEQ ID NO: 1652491 - RNA, 19 nt, Artificial Sequence
  Description of Artificial Sequence: Synthetic oligonucleotide
ugcuuucauaccucagcca

SEQ ID NO: 1652492 - RNA, 19 nt, Artificial Sequence
  Description of Artificial Sequence: Synthetic oligonucleotide
cuauugaaagccaggcaga

SEQ ID NO: 1652493 - RNA, 19 nt, Artificial Sequence
  Description of Artificial Sequence: Synthetic oligonucleotide
aaggaacgcuucaucagug

SEQ ID NO: 1652494 - RNA, 19 nt, Artificial Sequence
  Description of Artificial Sequence: Synthetic oligonucleotide
ugagaacccggccaucauc

SEQ ID NO: 1652495 - RNA, 19 nt, Artificial Sequence
  Description of Artificial Sequence: Synthetic oligonucleotide
uggauagcuuguuccauau

SEQ ID NO: 1652496 - RNA, 19 nt, Artificial Sequence
  Description of Artificial Sequence: Synthetic oligonucleotide
cuucaaugacaacucagga

SEQ ID NO: 1652497 - RNA, 19 nt, Artificial Sequence
  Description of Artificial Sequence: Synthetic oligonucleotide
auacuaagcucaucucccu

SEQ ID NO: 1652498 - RNA, 19 nt, Artificial Sequence
  Description of Artificial Sequence: Synthetic oligonucleotide
augcccacuaaucugcaaa

SEQ ID NO: 1652499 - RNA, 19 nt, Artificial Sequence
  Description of Artificial Sequence: Synthetic oligonucleotide
uguucgucuuccugucuug

SEQ ID NO: 1652500 - RNA, 19 nt, Artificial Sequence
  Description of Artificial Sequence: Synthetic oligonucleotide
gccugauggauugacaccg

SEQ ID NO: 1652501 - RNA, 19 nt, Artificial Sequence
  Description of Artificial Sequence: Synthetic oligonucleotide
gacaacucaggaacuacca

SEQ ID NO: 1652502 - RNA, 19 nt, Artificial Sequence
  Description of Artificial Sequence: Synthetic oligonucleotide
agagaagacucugguguuc

SEQ ID NO: 1652503 - RNA, 19 nt, Artificial Sequence
  Description of Artificial Sequence: Synthetic oligonucleotide
auaaaucauagaaccauuu

SEQ ID NO: 1652504 - RNA, 19 nt, Artificial Sequence
  Description of Artificial Sequence: Synthetic oligonucleotide
acuaaucugcaaaguugac

SEQ ID NO: 1652505 - RNA, 19 nt, Artificial Sequence
  Description of Artificial Sequence: Synthetic oligonucleotide
gccauagcagaacucggcg

SEQ ID NO: 1652506 - RNA, 19 nt, Artificial Sequence
  Description of Artificial Sequence: Synthetic oligonucleotide
ccugagaccagccacuggc

SEQ ID NO: 1652507 - RNA, 19 nt, Artificial Sequence
  Description of Artificial Sequence: Synthetic oligonucleotide
gcuaaguccucccuaggcc

SEQ ID NO: 1652508 - RNA, 19 nt, Artificial Sequence
  Description of Artificial Sequence: Synthetic oligonucleotide
uucccacuauugaaagcca

SEQ ID NO: 1652509 - RNA, 19 nt, Artificial Sequence
  Description of Artificial Sequence: Synthetic oligonucleotide
agaguccagccgcugacug

SEQ ID NO: 1652510 - RNA, 19 nt, Artificial Sequence
  Description of Artificial Sequence: Synthetic oligonucleotide
cucccuucagcuguauggg

SEQ ID NO: 1652511 - RNA, 19 nt, Artificial Sequence
  Description of Artificial Sequence: Synthetic oligonucleotide
ugacacagccgaaguggcc

SEQ ID NO: 1652512 - RNA, 19 nt, Artificial Sequence
  Description of Artificial Sequence: Synthetic oligonucleotide
cuaaggugguuacagaacu

SEQ ID NO: 1652513 - RNA, 19 nt, Artificial Sequence
  Description of Artificial Sequence: Synthetic oligonucleotide
gaauugucucucgucacuc

SEQ ID NO: 1652514 - RNA, 19 nt, Artificial Sequence
  Description of Artificial Sequence: Synthetic oligonucleotide
aucauccuccauucuucag

SEQ ID NO: 1652515 - RNA, 19 nt, Artificial Sequence
  Description of Artificial Sequence: Synthetic oligonucleotide
ccgacaaaccauauacugc

SEQ ID NO: 1652516 - RNA, 19 nt, Artificial Sequence
  Description of Artificial Sequence: Synthetic oligonucleotide
acuugggcuuauaaaacca

SEQ ID NO: 1652517 - RNA, 19 nt, Artificial Sequence
  Description of Artificial Sequence: Synthetic oligonucleotide
ccaggagacaaaaccagag

SEQ ID NO: 1652518 - RNA, 19 nt, Artificial Sequence
  Description of Artificial Sequence: Synthetic oligonucleotide
auguugucauucaccgggc

SEQ ID NO: 1652519 - RNA, 19 nt, Artificial Sequence
  Description of Artificial Sequence: Synthetic oligonucleotide
acucaggaacuaccaucac

SEQ ID NO: 1652520 - RNA, 19 nt, Artificial Sequence
  Description of Artificial Sequence: Synthetic oligonucleotide
ucuccauggggagacuccc

SEQ ID NO: 1652521 - RNA, 19 nt, Artificial Sequence
  Description of Artificial Sequence: Synthetic oligonucleotide
cagauacuaagcucaucuc

SEQ ID NO: 1652522 - RNA, 19 nt, Artificial Sequence
  Description of Artificial Sequence: Synthetic oligonucleotide
acaccggaccaauaaccug

SEQ ID NO: 1652523 - RNA, 19 nt, Artificial Sequence
  Description of Artificial Sequence: Synthetic oligonucleotide
uggaauggugcucucccuu

SEQ ID NO: 1652524 - RNA, 19 nt, Artificial Sequence
  Description of Artificial Sequence: Synthetic oligonucleotide
gagccaggagacaaaacca

SEQ ID NO: 1652525 - RNA, 19 nt, Artificial Sequence
  Description of Artificial Sequence: Synthetic oligonucleotide
caauaaccugggcuccacg

SEQ ID NO: 1652526 - RNA, 19 nt, Artificial Sequence
  Description of Artificial Sequence: Synthetic oligonucleotide
accauauacugcaucuuca

SEQ ID NO: 1652527 - RNA, 19 nt, Artificial Sequence
  Description of Artificial Sequence: Synthetic oligonucleotide
caacguuccacuguucguc

SEQ ID NO: 1652528 - RNA, 19 nt, Artificial Sequence
  Description of Artificial Sequence: Synthetic oligonucleotide
gcaagaugagauauccucc

SEQ ID NO: 1652529 - RNA, 19 nt, Artificial Sequence
  Description of Artificial Sequence: Synthetic oligonucleotide
aaaccauauacugcaucuu

SEQ ID NO: 1652530 - RNA, 19 nt, Artificial Sequence
  Description of Artificial Sequence: Synthetic oligonucleotide
ugccuccuaacagaugccc

SEQ ID NO: 1652531 - RNA, 19 nt, Artificial Sequence
  Description of Artificial Sequence: Synthetic oligonucleotide
uucgucuuccugucuugca

SEQ ID NO: 1652532 - RNA, 19 nt, Artificial Sequence
  Description of Artificial Sequence: Synthetic oligonucleotide
cuuccucuccuucccaaac

SEQ ID NO: 1652533 - RNA, 19 nt, Artificial Sequence
  Description of Artificial Sequence: Synthetic oligonucleotide
uggagaauucaauggcauu

SEQ ID NO: 1652534 - RNA, 19 nt, Artificial Sequence
  Description of Artificial Sequence: Synthetic oligonucleotide
ccccacucuacuuaggcgc

SEQ ID NO: 1652535 - RNA, 19 nt, Artificial Sequence
  Description of Artificial Sequence: Synthetic oligonucleotide
acuauacacuggaaauuug

SEQ ID NO: 1652536 - RNA, 19 nt, Artificial Sequence
  Description of Artificial Sequence: Synthetic oligonucleotide
aucagauacuaagcucauc

SEQ ID NO: 1652537 - RNA, 19 nt, Artificial Sequence
  Description of Artificial Sequence: Synthetic oligonucleotide
ccggccaucaucugaagag

SEQ ID NO: 1652538 - RNA, 19 nt, Artificial Sequence
  Description of Artificial Sequence: Synthetic oligonucleotide
auaugccauagcagaacuc

SEQ ID NO: 1652539 - RNA, 19 nt, Artificial Sequence
  Description of Artificial Sequence: Synthetic oligonucleotide
cugagaccagccacuggcc

SEQ ID NO: 1652540 - RNA, 19 nt, Artificial Sequence
  Description of Artificial Sequence: Synthetic oligonucleotide
ucucuccauuguuaccuac

SEQ ID NO: 1652541 - RNA, 19 nt, Artificial Sequence
  Description of Artificial Sequence: Synthetic oligonucleotide
gaccccacagcuucugaca

SEQ ID NO: 1652542 - RNA, 19 nt, Artificial Sequence
  Description of Artificial Sequence: Synthetic oligonucleotide
uguaugcauccccacucua

SEQ ID NO: 1652543 - RNA, 19 nt, Artificial Sequence
  Description of Artificial Sequence: Synthetic oligonucleotide
acaucauggaggauaacuu

SEQ ID NO: 1652544 - RNA, 19 nt, Artificial Sequence
  Description of Artificial Sequence: Synthetic oligonucleotide
auggauagcuuguuccaua

SEQ ID NO: 1652545 - RNA, 19 nt, Artificial Sequence
  Description of Artificial Sequence: Synthetic oligonucleotide
gaccaauaaccugggcucc

SEQ ID NO: 1652546 - RNA, 19 nt, Artificial Sequence
  Description of Artificial Sequence: Synthetic oligonucleotide
cacgggguuaaacaugaca

SEQ ID NO: 1652547 - RNA, 19 nt, Artificial Sequence
  Description of Artificial Sequence: Synthetic oligonucleotide
cuccacgggguuaaacaug

SEQ ID NO: 1652548 - RNA, 19 nt, Artificial Sequence
  Description of Artificial Sequence: Synthetic oligonucleotide
cucuacuuaggcgccuucc

SEQ ID NO: 1652549 - RNA, 19 nt, Artificial Sequence
  Description of Artificial Sequence: Synthetic oligonucleotide
aacucggcggucaucuccu

SEQ ID NO: 1652550 - RNA, 19 nt, Artificial Sequence
  Description of Artificial Sequence: Synthetic oligonucleotide
cuacuuaggcgccuuccuc

SEQ ID NO: 1652551 - RNA, 19 nt, Artificial Sequence
  Description of Artificial Sequence: Synthetic oligonucleotide
uccuaacagaugcccacua

SEQ ID NO: 1652552 - RNA, 19 nt, Artificial Sequence
  Description of Artificial Sequence: Synthetic oligonucleotide
aggaacgcuucaucaguga

SEQ ID NO: 1652553 - RNA, 19 nt, Artificial Sequence
  Description of Artificial Sequence: Synthetic oligonucleotide
guaugcauccccacucuac

SEQ ID NO: 1652554 - RNA, 19 nt, Artificial Sequence
  Description of Artificial Sequence: Synthetic oligonucleotide
ucucggagccaggagacaa

SEQ ID NO: 1652555 - RNA, 19 nt, Artificial Sequence
  Description of Artificial Sequence: Synthetic oligonucleotide
cccacuauugaaagccagg

SEQ ID NO: 1652556 - RNA, 19 nt, Artificial Sequence
  Description of Artificial Sequence: Synthetic oligonucleotide
acucuacuuaggcgccuuc

SEQ ID NO: 1652557 - RNA, 19 nt, Artificial Sequence
  Description of Artificial Sequence: Synthetic oligonucleotide
gaauggugcucucccuuca

SEQ ID NO: 1652558 - RNA, 19 nt, Artificial Sequence
  Description of Artificial Sequence: Synthetic oligonucleotide
uacuaagcucaucucccuu

SEQ ID NO: 1652559 - RNA, 19 nt, Artificial Sequence
  Description of Artificial Sequence: Synthetic oligonucleotide
aaguaauucuaaggugguu

SEQ ID NO: 1652560 - RNA, 19 nt, Artificial Sequence
  Description of Artificial Sequence: Synthetic oligonucleotide
uucaccgggcucaccgaca

SEQ ID NO: 1652561 - RNA, 19 nt, Artificial Sequence
  Description of Artificial Sequence: Synthetic oligonucleotide
ugucuucucggagccagga

SEQ ID NO: 1652562 - RNA, 19 nt, Artificial Sequence
  Description of Artificial Sequence: Synthetic oligonucleotide
gucuagcaccucugcaucc

SEQ ID NO: 1652563 - RNA, 19 nt, Artificial Sequence
  Description of Artificial Sequence: Synthetic oligonucleotide
cagguggucuucucuuggc

SEQ ID NO: 1652564 - RNA, 19 nt, Artificial Sequence
  Description of Artificial Sequence: Synthetic oligonucleotide
gaacccggccaucaucuga

SEQ ID NO: 1652565 - RNA, 19 nt, Artificial Sequence
  Description of Artificial Sequence: Synthetic oligonucleotide
ggugguuacagaacugcug

SEQ ID NO: 1652566 - RNA, 19 nt, Artificial Sequence
  Description of Artificial Sequence: Synthetic oligonucleotide
caucugaagagcuggcaaa

SEQ ID NO: 1652567 - RNA, 19 nt, Artificial Sequence
  Description of Artificial Sequence: Synthetic oligonucleotide
agguggucuucucuuggcu

SEQ ID NO: 1652568 - RNA, 19 nt, Artificial Sequence
  Description of Artificial Sequence: Synthetic oligonucleotide
auagcagaacucggcgguc

SEQ ID NO: 1652569 - RNA, 19 nt, Artificial Sequence
  Description of Artificial Sequence: Synthetic oligonucleotide
caaaguugacauggacccc

SEQ ID NO: 1652570 - RNA, 19 nt, Artificial Sequence
  Description of Artificial Sequence: Synthetic oligonucleotide
accucagccacaucagaua

SEQ ID NO: 1652571 - RNA, 19 nt, Artificial Sequence
  Description of Artificial Sequence: Synthetic oligonucleotide
ccauagcagaacucggcgg

SEQ ID NO: 1652572 - RNA, 19 nt, Artificial Sequence
  Description of Artificial Sequence: Synthetic oligonucleotide
aggccaguuccagccaggc

SEQ ID NO: 1652573 - RNA, 19 nt, Artificial Sequence
  Description of Artificial Sequence: Synthetic oligonucleotide
uggauugacaccggaccaa

SEQ ID NO: 1652574 - RNA, 19 nt, Artificial Sequence
  Description of Artificial Sequence: Synthetic oligonucleotide
gagaccagccacuggccuc

SEQ ID NO: 1652575 - RNA, 19 nt, Artificial Sequence
  Description of Artificial Sequence: Synthetic oligonucleotide
ggcugauggauaauuugcc

SEQ ID NO: 1652576 - RNA, 19 nt, Artificial Sequence
  Description of Artificial Sequence: Synthetic oligonucleotide
cacagguggucuucucuug

SEQ ID NO: 1652577 - RNA, 19 nt, Artificial Sequence
  Description of Artificial Sequence: Synthetic oligonucleotide
ggcauugacacagccgaag

SEQ ID NO: 1652578 - RNA, 19 nt, Artificial Sequence
  Description of Artificial Sequence: Synthetic oligonucleotide
caccacuauacacuggaaa

SEQ ID NO: 1652579 - RNA, 19 nt, Artificial Sequence
  Description of Artificial Sequence: Synthetic oligonucleotide
aacccggccaucaucugaa

SEQ ID NO: 1652580 - RNA, 19 nt, Artificial Sequence
  Description of Artificial Sequence: Synthetic oligonucleotide
ugacccuggaauggauagc

SEQ ID NO: 1652581 - RNA, 19 nt, Artificial Sequence
  Description of Artificial Sequence: Synthetic oligonucleotide
cuccauggggagacucccg

SEQ ID NO: 1652582 - RNA, 19 nt, Artificial Sequence
  Description of Artificial Sequence: Synthetic oligonucleotide
acccuucaaugacaacuca

SEQ ID NO: 1652583 - RNA, 19 nt, Artificial Sequence
  Description of Artificial Sequence: Synthetic oligonucleotide
cccuggaauggauagcuug

SEQ ID NO: 1652584 - RNA, 19 nt, Artificial Sequence
  Description of Artificial Sequence: Synthetic oligonucleotide
cgacaaaccauauacugca

SEQ ID NO: 1652585 - RNA, 19 nt, Artificial Sequence
  Description of Artificial Sequence: Synthetic oligonucleotide
ggcuccacgggguuaaaca

SEQ ID NO: 1652586 - RNA, 19 nt, Artificial Sequence
  Description of Artificial Sequence: Synthetic oligonucleotide
uagcagaacucggcgguca

SEQ ID NO: 1652587 - RNA, 19 nt, Artificial Sequence
  Description of Artificial Sequence: Synthetic oligonucleotide
acuguucgucuuccugucu

SEQ ID NO: 1652588 - RNA, 19 nt, Artificial Sequence
  Description of Artificial Sequence: Synthetic oligonucleotide
gagaacccggccaucaucu

SEQ ID NO: 1652589 - RNA, 19 nt, Artificial Sequence
  Description of Artificial Sequence: Synthetic oligonucleotide
cagcuaaguccucccuagg

SEQ ID NO: 1652590 - RNA, 19 nt, Artificial Sequence
  Description of Artificial Sequence: Synthetic oligonucleotide
cuucccaaacugugcuuuc

SEQ ID NO: 1652591 - RNA, 19 nt, Artificial Sequence
  Description of Artificial Sequence: Synthetic oligonucleotide
cuuaggcgccuuccucucc

SEQ ID NO: 1652592 - RNA, 19 nt, Artificial Sequence
  Description of Artificial Sequence: Synthetic oligonucleotide
caucauccuccauucuuca

SEQ ID NO: 1652593 - RNA, 19 nt, Artificial Sequence
  Description of Artificial Sequence: Synthetic oligonucleotide
cuaacagaugcccacuaau

SEQ ID NO: 1652594 - RNA, 19 nt, Artificial Sequence
  Description of Artificial Sequence: Synthetic oligonucleotide
cagcuguaugggcuugacc

SEQ ID NO: 1652595 - RNA, 19 nt, Artificial Sequence
  Description of Artificial Sequence: Synthetic oligonucleotide
ucccuaggccaguuccagc

SEQ ID NO: 1652596 - RNA, 19 nt, Artificial Sequence
  Description of Artificial Sequence: Synthetic oligonucleotide
cucccugccuccuaacaga

SEQ ID NO: 1652597 - RNA, 19 nt, Artificial Sequence
  Description of Artificial Sequence: Synthetic oligonucleotide
cuccauuguuggagaauuc

SEQ ID NO: 1652598 - RNA, 19 nt, Artificial Sequence
  Description of Artificial Sequence: Synthetic oligonucleotide
cugccuccuaacagaugcc

SEQ ID NO: 1652599 - RNA, 19 nt, Artificial Sequence
  Description of Artificial Sequence: Synthetic oligonucleotide
cugacaacuccaagccuga

SEQ ID NO: 1652600 - RNA, 19 nt, Artificial Sequence
  Description of Artificial Sequence: Synthetic oligonucleotide
gguggucuucucuuggcuc

SEQ ID NO: 1652601 - RNA, 19 nt, Artificial Sequence
  Description of Artificial Sequence: Synthetic oligonucleotide
gacccuggaauggauagcu

SEQ ID NO: 1652602 - RNA, 19 nt, Artificial Sequence
  Description of Artificial Sequence: Synthetic oligonucleotide
uggaccccacagcuucuga

SEQ ID NO: 1652603 - RNA, 19 nt, Artificial Sequence
  Description of Artificial Sequence: Synthetic oligonucleotide
ucagcuguaugggcuugac

SEQ ID NO: 1652604 - RNA, 19 nt, Artificial Sequence
  Description of Artificial Sequence: Synthetic oligonucleotide
ucggagccaggagacaaaa

SEQ ID NO: 1652605 - RNA, 19 nt, Artificial Sequence
  Description of Artificial Sequence: Synthetic oligonucleotide
ccuccuaacagaugcccac

SEQ ID NO: 1652606 - RNA, 19 nt, Artificial Sequence
  Description of Artificial Sequence: Synthetic oligonucleotide
aggacagguccuccucuga

SEQ ID NO: 1652607 - RNA, 19 nt, Artificial Sequence
  Description of Artificial Sequence: Synthetic oligonucleotide
gacaccggaccaauaaccu

SEQ ID NO: 1652608 - RNA, 19 nt, Artificial Sequence
  Description of Artificial Sequence: Synthetic oligonucleotide
acucugguguucccacuau

SEQ ID NO: 1652609 - RNA, 19 nt, Artificial Sequence
  Description of Artificial Sequence: Synthetic oligonucleotide
cucccuaggccaguuccag

SEQ ID NO: 1652610 - RNA, 19 nt, Artificial Sequence
  Description of Artificial Sequence: Synthetic oligonucleotide
caaaugagaacccggccau

SEQ ID NO: 1652611 - RNA, 19 nt, Artificial Sequence
  Description of Artificial Sequence: Synthetic oligonucleotide
accggaccaauaaccuggg

SEQ ID NO: 1652612 - RNA, 19 nt, Artificial Sequence
  Description of Artificial Sequence: Synthetic oligonucleotide
cugucuagcaccucugcau

SEQ ID NO: 1652613 - RNA, 19 nt, Artificial Sequence
  Description of Artificial Sequence: Synthetic oligonucleotide
cugauggauugacaccgga

SEQ ID NO: 1652614 - RNA, 19 nt, Artificial Sequence
  Description of Artificial Sequence: Synthetic oligonucleotide
gaugcccacuaaucugcaa

SEQ ID NO: 1652615 - RNA, 19 nt, Artificial Sequence
  Description of Artificial Sequence: Synthetic oligonucleotide
augagaacccggccaucau

SEQ ID NO: 1652616 - RNA, 19 nt, Artificial Sequence
  Description of Artificial Sequence: Synthetic oligonucleotide
aggugguuacagaacugcu

SEQ ID NO: 1652617 - RNA, 19 nt, Artificial Sequence
  Description of Artificial Sequence: Synthetic oligonucleotide
aggcgccuuccucuccuuc

SEQ ID NO: 1652618 - RNA, 19 nt, Artificial Sequence
  Description of Artificial Sequence: Synthetic oligonucleotide
ggaagaguccagccgcuga

SEQ ID NO: 1652619 - RNA, 19 nt, Artificial Sequence
  Description of Artificial Sequence: Synthetic oligonucleotide
accaauaaccugggcucca

SEQ ID NO: 1652620 - RNA, 19 nt, Artificial Sequence
  Description of Artificial Sequence: Synthetic oligonucleotide
acucccggaugucccaaau

SEQ ID NO: 1652621 - RNA, 19 nt, Artificial Sequence
  Description of Artificial Sequence: Synthetic oligonucleotide
acacagccgaaguggccga

SEQ ID NO: 1652622 - RNA, 19 nt, Artificial Sequence
  Description of Artificial Sequence: Synthetic oligonucleotide
ccacuccccaggaagaguc

SEQ ID NO: 1652623 - RNA, 19 nt, Artificial Sequence
  Description of Artificial Sequence: Synthetic oligonucleotide
ccauaugccauagcagaac

SEQ ID NO: 1652624 - RNA, 19 nt, Artificial Sequence
  Description of Artificial Sequence: Synthetic oligonucleotide
uccuucccaaacugugcuu

SEQ ID NO: 1652625 - RNA, 19 nt, Artificial Sequence
  Description of Artificial Sequence: Synthetic oligonucleotide
aaccugggcuccacggggu

SEQ ID NO: 1652626 - RNA, 19 nt, Artificial Sequence
  Description of Artificial Sequence: Synthetic oligonucleotide
cucucccuucagcuguaug

SEQ ID NO: 1652627 - RNA, 19 nt, Artificial Sequence
  Description of Artificial Sequence: Synthetic oligonucleotide
augcauccccacucuacuu

SEQ ID NO: 1652628 - RNA, 19 nt, Artificial Sequence
  Description of Artificial Sequence: Synthetic oligonucleotide
cucuccauuguuaccuacu

SEQ ID NO: 1652629 - RNA, 19 nt, Artificial Sequence
  Description of Artificial Sequence: Synthetic oligonucleotide
caaugacaacucaggaacu

SEQ ID NO: 1652630 - RNA, 19 nt, Artificial Sequence
  Description of Artificial Sequence: Synthetic oligonucleotide
ucacucccugccuccuaac

SEQ ID NO: 1652631 - RNA, 19 nt, Artificial Sequence
  Description of Artificial Sequence: Synthetic oligonucleotide
uucauaccucagccacauc

SEQ ID NO: 1652632 - RNA, 19 nt, Artificial Sequence
  Description of Artificial Sequence: Synthetic oligonucleotide
ggaccccacagcuucugac

SEQ ID NO: 1652633 - RNA, 19 nt, Artificial Sequence
  Description of Artificial Sequence: Synthetic oligonucleotide
ccugauggauugacaccgg

SEQ ID NO: 1652634 - RNA, 19 nt, Artificial Sequence
  Description of Artificial Sequence: Synthetic oligonucleotide
agcagaacucggcggucau

SEQ ID NO: 1652635 - RNA, 19 nt, Artificial Sequence
  Description of Artificial Sequence: Synthetic oligonucleotide
cucaccgacaaaccauaua

SEQ ID NO: 1652636 - RNA, 19 nt, Artificial Sequence
  Description of Artificial Sequence: Synthetic oligonucleotide
gcugucuagcaccucugca

SEQ ID NO: 1652637 - RNA, 19 nt, Artificial Sequence
  Description of Artificial Sequence: Synthetic oligonucleotide
gucacucccugccuccuaa

SEQ ID NO: 1652638 - RNA, 19 nt, Artificial Sequence
  Description of Artificial Sequence: Synthetic oligonucleotide
gucucucgucacucccugc

SEQ ID NO: 1652639 - RNA, 19 nt, Artificial Sequence
  Description of Artificial Sequence: Synthetic oligonucleotide
uuccacagguggucuucuc

SEQ ID NO: 1652640 - RNA, 19 nt, Artificial Sequence
  Description of Artificial Sequence: Synthetic oligonucleotide
aaguccucccuaggccagu

SEQ ID NO: 1652641 - RNA, 19 nt, Artificial Sequence
  Description of Artificial Sequence: Synthetic oligonucleotide
gcucccagcacugaacauc

SEQ ID NO: 1652642 - RNA, 19 nt, Artificial Sequence
  Description of Artificial Sequence: Synthetic oligonucleotide
caucagugaggccacaguu

SEQ ID NO: 1652643 - RNA, 19 nt, Artificial Sequence
  Description of Artificial Sequence: Synthetic oligonucleotide
cauucaccgggcucaccga

SEQ ID NO: 1652644 - RNA, 19 nt, Artificial Sequence
  Description of Artificial Sequence: Synthetic oligonucleotide
ccauuguuggagaauucaa

SEQ ID NO: 1652645 - RNA, 19 nt, Artificial Sequence
  Description of Artificial Sequence: Synthetic oligonucleotide
gcucaucucccuuccaaaa

SEQ ID NO: 1652646 - RNA, 19 nt, Artificial Sequence
  Description of Artificial Sequence: Synthetic oligonucleotide
acucggcggucaucuccuc

SEQ ID NO: 1652647 - RNA, 19 nt, Artificial Sequence
  Description of Artificial Sequence: Synthetic oligonucleotide
auccaacguuccacuguuc

SEQ ID NO: 1652648 - RNA, 19 nt, Artificial Sequence
  Description of Artificial Sequence: Synthetic oligonucleotide
gggcuuauaaaaccagaau

SEQ ID NO: 1652649 - RNA, 19 nt, Artificial Sequence
  Description of Artificial Sequence: Synthetic oligonucleotide
agaugcccacuaaucugca

SEQ ID NO: 1652650 - RNA, 19 nt, Artificial Sequence
  Description of Artificial Sequence: Synthetic oligonucleotide
cauccaacguuccacuguu

SEQ ID NO: 1652651 - RNA, 19 nt, Artificial Sequence
  Description of Artificial Sequence: Synthetic oligonucleotide
caacuccaagccugaggga

SEQ ID NO: 1652652 - RNA, 19 nt, Artificial Sequence
  Description of Artificial Sequence: Synthetic oligonucleotide
acccggccaucaucugaag

SEQ ID NO: 1652653 - RNA, 19 nt, Artificial Sequence
  Description of Artificial Sequence: Synthetic oligonucleotide
caccgacaaaccauauacu

SEQ ID NO: 1652654 - RNA, 19 nt, Artificial Sequence
  Description of Artificial Sequence: Synthetic oligonucleotide
cuguaugcauccccacucu

SEQ ID NO: 1652655 - RNA, 19 nt, Artificial Sequence
  Description of Artificial Sequence: Synthetic oligonucleotide
gucccacuccccaggaaga

SEQ ID NO: 1652656 - RNA, 19 nt, Artificial Sequence
  Description of Artificial Sequence: Synthetic oligonucleotide
guaugggcuugacccugga

SEQ ID NO: 1652657 - RNA, 19 nt, Artificial Sequence
  Description of Artificial Sequence: Synthetic oligonucleotide
ggacagguccuccucugaa

SEQ ID NO: 1652658 - RNA, 19 nt, Artificial Sequence
  Description of Artificial Sequence: Synthetic oligonucleotide
ucgucacucccugccuccu

SEQ ID NO: 1652659 - RNA, 19 nt, Artificial Sequence
  Description of Artificial Sequence: Synthetic oligonucleotide
ccacaucagauacuaagcu

SEQ ID NO: 1652660 - RNA, 19 nt, Artificial Sequence
  Description of Artificial Sequence: Synthetic oligonucleotide
caucagauacuaagcucau

SEQ ID NO: 1652661 - RNA, 19 nt, Artificial Sequence
  Description of Artificial Sequence: Synthetic oligonucleotide
gacacuguggaaggcugau

SEQ ID NO: 1652662 - RNA, 19 nt, Artificial Sequence
  Description of Artificial Sequence: Synthetic oligonucleotide
caacaucauggaggauaac

SEQ ID NO: 1652663 - RNA, 19 nt, Artificial Sequence
  Description of Artificial Sequence: Synthetic oligonucleotide
gcauccaacguuccacugu

SEQ ID NO: 1652664 - RNA, 19 nt, Artificial Sequence
  Description of Artificial Sequence: Synthetic oligonucleotide
acguuccacuguucgucuu

SEQ ID NO: 1652665 - RNA, 19 nt, Artificial Sequence
  Description of Artificial Sequence: Synthetic oligonucleotide
cucggagccaggagacaaa

SEQ ID NO: 1652666 - RNA, 19 nt, Artificial Sequence
  Description of Artificial Sequence: Synthetic oligonucleotide
gacucccggaugucccaaa

SEQ ID NO: 1652667 - RNA, 19 nt, Artificial Sequence
  Description of Artificial Sequence: Synthetic oligonucleotide
gucauucaccgggcucacc

SEQ ID NO: 1652668 - RNA, 19 nt, Artificial Sequence
  Description of Artificial Sequence: Synthetic oligonucleotide
cagccgaaguggccgagaa

SEQ ID NO: 1652669 - RNA, 19 nt, Artificial Sequence
  Description of Artificial Sequence: Synthetic oligonucleotide
ggaggauaacuugcucauc

SEQ ID NO: 1652670 - RNA, 19 nt, Artificial Sequence
  Description of Artificial Sequence: Synthetic oligonucleotide
cacagccgaaguggccgag

SEQ ID NO: 1652671 - RNA, 19 nt, Artificial Sequence
  Description of Artificial Sequence: Synthetic oligonucleotide
gggcucuccauggggagac

SEQ ID NO: 1652672 - RNA, 19 nt, Artificial Sequence
  Description of Artificial Sequence: Synthetic oligonucleotide
ucccagcacugaacaucau

SEQ ID NO: 1652673 - RNA, 19 nt, Artificial Sequence
  Description of Artificial Sequence: Synthetic oligonucleotide
agacucccggaugucccaa

SEQ ID NO: 1652674 - RNA, 19 nt, Artificial Sequence
  Description of Artificial Sequence: Synthetic oligonucleotide
gggaaggugccaggccugc

SEQ ID NO: 1652675 - RNA, 19 nt, Artificial Sequence
  Description of Artificial Sequence: Synthetic oligonucleotide
ccuaacagaugcccacuaa

SEQ ID NO: 1652676 - RNA, 19 nt, Artificial Sequence
  Description of Artificial Sequence: Synthetic oligonucleotide
cggaccaauaaccugggcu

SEQ ID NO: 1652677 - RNA, 19 nt, Artificial Sequence
  Description of Artificial Sequence: Synthetic oligonucleotide
ggcuugacccuggaaugga

SEQ ID NO: 1652678 - RNA, 19 nt, Artificial Sequence
  Description of Artificial Sequence: Synthetic oligonucleotide
caccucugcauccaacguu

SEQ ID NO: 1652679 - RNA, 19 nt, Artificial Sequence
  Description of Artificial Sequence: Synthetic oligonucleotide
ggcucaccgacaaaccaua

SEQ ID NO: 1652680 - RNA, 19 nt, Artificial Sequence
  Description of Artificial Sequence: Synthetic oligonucleotide
cuccucugaaaggaacgcu

SEQ ID NO: 1652681 - RNA, 19 nt, Artificial Sequence
  Description of Artificial Sequence: Synthetic oligonucleotide
cggccaucaucugaagagc

SEQ ID NO: 1652682 - RNA, 19 nt, Artificial Sequence
  Description of Artificial Sequence: Synthetic oligonucleotide
gccuccuaacagaugccca

SEQ ID NO: 1652683 - RNA, 19 nt, Artificial Sequence
  Description of Artificial Sequence: Synthetic oligonucleotide
caguucugccugauggauu

SEQ ID NO: 1652684 - RNA, 19 nt, Artificial Sequence
  Description of Artificial Sequence: Synthetic oligonucleotide
ggcggucaucuccuccuga

SEQ ID NO: 1652685 - RNA, 19 nt, Artificial Sequence
  Description of Artificial Sequence: Synthetic oligonucleotide
gcucuccauggggagacuc

SEQ ID NO: 1652686 - RNA, 19 nt, Artificial Sequence
  Description of Artificial Sequence: Synthetic oligonucleotide
cccacuaaucugcaaaguu

SEQ ID NO: 1652687 - RNA, 19 nt, Artificial Sequence
  Description of Artificial Sequence: Synthetic oligonucleotide
cucucgucacucccugccu

SEQ ID NO: 1652688 - RNA, 19 nt, Artificial Sequence
  Description of Artificial Sequence: Synthetic oligonucleotide
ggccaucaucugaagagcu

SEQ ID NO: 1652689 - RNA, 19 nt, Artificial Sequence
  Description of Artificial Sequence: Synthetic oligonucleotide
ccagagaauugucucucgu

SEQ ID NO: 1652690 - RNA, 19 nt, Artificial Sequence
  Description of Artificial Sequence: Synthetic oligonucleotide
ccucccuaggccaguucca

SEQ ID NO: 1652691 - RNA, 19 nt, Artificial Sequence
  Description of Artificial Sequence: Synthetic oligonucleotide
ggauugacaccggaccaau

SEQ ID NO: 1652692 - RNA, 19 nt, Artificial Sequence
  Description of Artificial Sequence: Synthetic oligonucleotide
ccggaccaauaaccugggc

SEQ ID NO: 1652693 - RNA, 19 nt, Artificial Sequence
  Description of Artificial Sequence: Synthetic oligonucleotide
acccuggaauggauagcuu

SEQ ID NO: 1652694 - RNA, 19 nt, Artificial Sequence
  Description of Artificial Sequence: Synthetic oligonucleotide
ccaacguuccacuguucgu

SEQ ID NO: 1652695 - RNA, 19 nt, Artificial Sequence
  Description of Artificial Sequence: Synthetic oligonucleotide
cucugguguucccacuauu

SEQ ID NO: 1652696 - RNA, 19 nt, Artificial Sequence
  Description of Artificial Sequence: Synthetic oligonucleotide
cccggccaucaucugaaga

SEQ ID NO: 1652697 - RNA, 19 nt, Artificial Sequence
  Description of Artificial Sequence: Synthetic oligonucleotide
gcagaacucggcggucauc

SEQ ID NO: 1652698 - RNA, 19 nt, Artificial Sequence
  Description of Artificial Sequence: Synthetic oligonucleotide
cccugccuccuaacagaug

SEQ ID NO: 1652699 - RNA, 19 nt, Artificial Sequence
  Description of Artificial Sequence: Synthetic oligonucleotide
gggcuccacgggguuaaac

SEQ ID NO: 1652700 - RNA, 19 nt, Artificial Sequence
  Description of Artificial Sequence: Synthetic oligonucleotide
gggcucaccgacaaaccau

SEQ ID NO: 1652701 - RNA, 19 nt, Artificial Sequence
  Description of Artificial Sequence: Synthetic oligonucleotide
ccacgggguuaaacaugac

SEQ ID NO: 1652702 - RNA, 19 nt, Artificial Sequence
  Description of Artificial Sequence: Synthetic oligonucleotide
aguggccgagaagguccuu

SEQ ID NO: 1652703 - RNA, 19 nt, Artificial Sequence
  Description of Artificial Sequence: Synthetic oligonucleotide
gcccacuaaucugcaaagu

SEQ ID NO: 1652704 - RNA, 19 nt, Artificial Sequence
  Description of Artificial Sequence: Synthetic oligonucleotide
cacucuacuuaggcgccuu

SEQ ID NO: 1652705 - RNA, 19 nt, Artificial Sequence
  Description of Artificial Sequence: Synthetic oligonucleotide
caguugccuucagcuaagu

SEQ ID NO: 1652706 - RNA, 19 nt, Artificial Sequence
  Description of Artificial Sequence: Synthetic oligonucleotide
cggucaucuccuccugaga

SEQ ID NO: 1652707 - RNA, 19 nt, Artificial Sequence
  Description of Artificial Sequence: Synthetic oligonucleotide
ggcucccagcacugaacau

SEQ ID NO: 1652708 - RNA, 19 nt, Artificial Sequence
  Description of Artificial Sequence: Synthetic oligonucleotide
gcuugacccuggaauggau

SEQ ID NO: 1652709 - RNA, 19 nt, Artificial Sequence
  Description of Artificial Sequence: Synthetic oligonucleotide
caccgggcucaccgacaaa

SEQ ID NO: 1652710 - RNA, 19 nt, Artificial Sequence
  Description of Artificial Sequence: Synthetic oligonucleotide
gcucaccgacaaaccauau

SEQ ID NO: 1652711 - RNA, 19 nt, Artificial Sequence
  Description of Artificial Sequence: Synthetic oligonucleotide
ccugggcuccacgggguua

SEQ ID NO: 1652712 - RNA, 19 nt, Artificial Sequence
  Description of Artificial Sequence: Synthetic oligonucleotide
ccacucuacuuaggcgccu

SEQ ID NO: 1652713 - RNA, 19 nt, Artificial Sequence
  Description of Artificial Sequence: Synthetic oligonucleotide
ggcucuccauggggagacu

SEQ ID NO: 1652714 - RNA, 19 nt, Artificial Sequence
  Description of Artificial Sequence: Synthetic oligonucleotide
gcucucccuucagcuguau

SEQ ID NO: 1652715 - RNA, 19 nt, Artificial Sequence
  Description of Artificial Sequence: Synthetic oligonucleotide
aagaagaacacauggaugc

SEQ ID NO: 1652716 - RNA, 19 nt, Artificial Sequence
  Description of Artificial Sequence: Synthetic oligonucleotide
uuacagaauacuuugauag

SEQ ID NO: 1652717 - RNA, 19 nt, Artificial Sequence
  Description of Artificial Sequence: Synthetic oligonucleotide
aauaggaccaguaggaccc

SEQ ID NO: 1652718 - RNA, 19 nt, Artificial Sequence
  Description of Artificial Sequence: Synthetic oligonucleotide
uaacaagaagaacacaugg

SEQ ID NO: 1652719 - RNA, 19 nt, Artificial Sequence
  Description of Artificial Sequence: Synthetic oligonucleotide
aagacauaaucucuccucc

SEQ ID NO: 1652720 - RNA, 19 nt, Artificial Sequence
  Description of Artificial Sequence: Synthetic oligonucleotide
uuuacgagaaccaucagga

SEQ ID NO: 1652721 - RNA, 19 nt, Artificial Sequence
  Description of Artificial Sequence: Synthetic oligonucleotide
auaggacuagcauuuaugc

SEQ ID NO: 1652722 - RNA, 19 nt, Artificial Sequence
  Description of Artificial Sequence: Synthetic oligonucleotide
uuuuacgagaaccaucagg

SEQ ID NO: 1652723 - RNA, 19 nt, Artificial Sequence
  Description of Artificial Sequence: Synthetic oligonucleotide
gaucccaucagcuuuagag

SEQ ID NO: 1652724 - RNA, 19 nt, Artificial Sequence
  Description of Artificial Sequence: Synthetic oligonucleotide
ugcgauuuuguuuugcugg

SEQ ID NO: 1652725 - RNA, 19 nt, Artificial Sequence
  Description of Artificial Sequence: Synthetic oligonucleotide
uucuauuuguccauuaaca

SEQ ID NO: 1652726 - RNA, 19 nt, Artificial Sequence
  Description of Artificial Sequence: Synthetic oligonucleotide
cauaacugaacugaaaucc

SEQ ID NO: 1652727 - RNA, 19 nt, Artificial Sequence
  Description of Artificial Sequence: Synthetic oligonucleotide
uauuuguccauuaacagua

SEQ ID NO: 1652728 - RNA, 19 nt, Artificial Sequence
  Description of Artificial Sequence: Synthetic oligonucleotide
caagauuauaacaagaaga

SEQ ID NO: 1652729 - RNA, 19 nt, Artificial Sequence
  Description of Artificial Sequence: Synthetic oligonucleotide
ucuauuuguccauuaacag

SEQ ID NO: 1652730 - RNA, 19 nt, Artificial Sequence
  Description of Artificial Sequence: Synthetic oligonucleotide
acuguuuugcuccacuccc

SEQ ID NO: 1652731 - RNA, 19 nt, Artificial Sequence
  Description of Artificial Sequence: Synthetic oligonucleotide
uuuacauugccacuggccu

SEQ ID NO: 1652732 - RNA, 19 nt, Artificial Sequence
  Description of Artificial Sequence: Synthetic oligonucleotide
ugaaauccaccauucauag

SEQ ID NO: 1652733 - RNA, 19 nt, Artificial Sequence
  Description of Artificial Sequence: Synthetic oligonucleotide
auucauagauucuccaaac

SEQ ID NO: 1652734 - RNA, 19 nt, Artificial Sequence
  Description of Artificial Sequence: Synthetic oligonucleotide
uccauuaacaguacuugag

SEQ ID NO: 1652735 - RNA, 19 nt, Artificial Sequence
  Description of Artificial Sequence: Synthetic oligonucleotide
ugguauguaauguucuggg

SEQ ID NO: 1652736 - RNA, 19 nt, Artificial Sequence
  Description of Artificial Sequence: Synthetic oligonucleotide
guuucuuuucagcagaggc

SEQ ID NO: 1652737 - RNA, 19 nt, Artificial Sequence
  Description of Artificial Sequence: Synthetic oligonucleotide
aagauuauaacaagaagaa

SEQ ID NO: 1652738 - RNA, 19 nt, Artificial Sequence
  Description of Artificial Sequence: Synthetic oligonucleotide
accggcaucacccuugccc

SEQ ID NO: 1652739 - RNA, 19 nt, Artificial Sequence
  Description of Artificial Sequence: Synthetic oligonucleotide
ucgagguccagcuauaccc

SEQ ID NO: 1652740 - RNA, 19 nt, Artificial Sequence
  Description of Artificial Sequence: Synthetic oligonucleotide
ucgaagacuguuuugcucc

SEQ ID NO: 1652741 - RNA, 19 nt, Artificial Sequence
  Description of Artificial Sequence: Synthetic oligonucleotide
uauucgaagacuguuuugc

SEQ ID NO: 1652742 - RNA, 19 nt, Artificial Sequence
  Description of Artificial Sequence: Synthetic oligonucleotide
aaauucuugaucgggacca

SEQ ID NO: 1652743 - RNA, 19 nt, Artificial Sequence
  Description of Artificial Sequence: Synthetic oligonucleotide
gaccaauaggaccaguagg

SEQ ID NO: 1652744 - RNA, 19 nt, Artificial Sequence
  Description of Artificial Sequence: Synthetic oligonucleotide
agcauuuaugcaugucucc

SEQ ID NO: 1652745 - RNA, 19 nt, Artificial Sequence
  Description of Artificial Sequence: Synthetic oligonucleotide
aauacuuugauagcaucca

SEQ ID NO: 1652746 - RNA, 19 nt, Artificial Sequence
  Description of Artificial Sequence: Synthetic oligonucleotide
aacuguguaagugaauuug

SEQ ID NO: 1652747 - RNA, 19 nt, Artificial Sequence
  Description of Artificial Sequence: Synthetic oligonucleotide
uccucuaagaccaggggcc

SEQ ID NO: 1652748 - RNA, 19 nt, Artificial Sequence
  Description of Artificial Sequence: Synthetic oligonucleotide
auuuaugcaugucuccccg

SEQ ID NO: 1652749 - RNA, 19 nt, Artificial Sequence
  Description of Artificial Sequence: Synthetic oligonucleotide
uucuugaucgggaccaccg

SEQ ID NO: 1652750 - RNA, 19 nt, Artificial Sequence
  Description of Artificial Sequence: Synthetic oligonucleotide
auuaacaguacuugaguga

SEQ ID NO: 1652751 - RNA, 19 nt, Artificial Sequence
  Description of Artificial Sequence: Synthetic oligonucleotide
uucauuugaucccaucagc

SEQ ID NO: 1652752 - RNA, 19 nt, Artificial Sequence
  Description of Artificial Sequence: Synthetic oligonucleotide
accaacuucucccuuuggc

SEQ ID NO: 1652753 - RNA, 19 nt, Artificial Sequence
  Description of Artificial Sequence: Synthetic oligonucleotide
uuucuauuuguccauuaac

SEQ ID NO: 1652754 - RNA, 19 nt, Artificial Sequence
  Description of Artificial Sequence: Synthetic oligonucleotide
ggugcgauaucuaugaugg

SEQ ID NO: 1652755 - RNA, 19 nt, Artificial Sequence
  Description of Artificial Sequence: Synthetic oligonucleotide
uuuagagacuucuuuacau

SEQ ID NO: 1652756 - RNA, 19 nt, Artificial Sequence
  Description of Artificial Sequence: Synthetic oligonucleotide
ugacaagauuauaacaaga

SEQ ID NO: 1652757 - RNA, 19 nt, Artificial Sequence
  Description of Artificial Sequence: Synthetic oligonucleotide
uuuccuucagccuugaauu

SEQ ID NO: 1652758 - RNA, 19 nt, Artificial Sequence
  Description of Artificial Sequence: Synthetic oligonucleotide
aggacuagcauuuaugcau

SEQ ID NO: 1652759 - RNA, 19 nt, Artificial Sequence
  Description of Artificial Sequence: Synthetic oligonucleotide
cuuuacauugccacuggcc

SEQ ID NO: 1652760 - RNA, 19 nt, Artificial Sequence
  Description of Artificial Sequence: Synthetic oligonucleotide
aacccaauauucuccgcuc

SEQ ID NO: 1652761 - RNA, 19 nt, Artificial Sequence
  Description of Artificial Sequence: Synthetic oligonucleotide
accaguaggaccccuuggc

SEQ ID NO: 1652762 - RNA, 19 nt, Artificial Sequence
  Description of Artificial Sequence: Synthetic oligonucleotide
uucauagauucuccaaacc

SEQ ID NO: 1652763 - RNA, 19 nt, Artificial Sequence
  Description of Artificial Sequence: Synthetic oligonucleotide
cauuaacaguacuugagug

SEQ ID NO: 1652764 - RNA, 19 nt, Artificial Sequence
  Description of Artificial Sequence: Synthetic oligonucleotide
aacaguacuugagugaaga

SEQ ID NO: 1652765 - RNA, 19 nt, Artificial Sequence
  Description of Artificial Sequence: Synthetic oligonucleotide
aucaacccaauauucuccg

SEQ ID NO: 1652766 - RNA, 19 nt, Artificial Sequence
  Description of Artificial Sequence: Synthetic oligonucleotide
accaucaggacuaaugagg

SEQ ID NO: 1652767 - RNA, 19 nt, Artificial Sequence
  Description of Artificial Sequence: Synthetic oligonucleotide
ugcgauaucuaugaugggc

SEQ ID NO: 1652768 - RNA, 19 nt, Artificial Sequence
  Description of Artificial Sequence: Synthetic oligonucleotide
acuaaugaggucuuucuau

SEQ ID NO: 1652769 - RNA, 19 nt, Artificial Sequence
  Description of Artificial Sequence: Synthetic oligonucleotide
cauaggacuagcauuuaug

SEQ ID NO: 1652770 - RNA, 19 nt, Artificial Sequence
  Description of Artificial Sequence: Synthetic oligonucleotide
uucuuuacauugccacugg

SEQ ID NO: 1652771 - RNA, 19 nt, Artificial Sequence
  Description of Artificial Sequence: Synthetic oligonucleotide
uccagaacuguguaaguga

SEQ ID NO: 1652772 - RNA, 19 nt, Artificial Sequence
  Description of Artificial Sequence: Synthetic oligonucleotide
ugaauuccccuucauuuga

SEQ ID NO: 1652773 - RNA, 19 nt, Artificial Sequence
  Description of Artificial Sequence: Synthetic oligonucleotide
gagacuucuuuacauugcc

SEQ ID NO: 1652774 - RNA, 19 nt, Artificial Sequence
  Description of Artificial Sequence: Synthetic oligonucleotide
caagaagaacacauggaug

SEQ ID NO: 1652775 - RNA, 19 nt, Artificial Sequence
  Description of Artificial Sequence: Synthetic oligonucleotide
cuuaucuccaggcugacca

SEQ ID NO: 1652776 - RNA, 19 nt, Artificial Sequence
  Description of Artificial Sequence: Synthetic oligonucleotide
caauaggaccaguaggacc

SEQ ID NO: 1652777 - RNA, 19 nt, Artificial Sequence
  Description of Artificial Sequence: Synthetic oligonucleotide
uagggugcgauaucuauga

SEQ ID NO: 1652778 - RNA, 19 nt, Artificial Sequence
  Description of Artificial Sequence: Synthetic oligonucleotide
cuucauuugaucccaucag

SEQ ID NO: 1652779 - RNA, 19 nt, Artificial Sequence
  Description of Artificial Sequence: Synthetic oligonucleotide
aauguccacaccaaauucu

SEQ ID NO: 1652780 - RNA, 19 nt, Artificial Sequence
  Description of Artificial Sequence: Synthetic oligonucleotide
acugaaauccaccauucau

SEQ ID NO: 1652781 - RNA, 19 nt, Artificial Sequence
  Description of Artificial Sequence: Synthetic oligonucleotide
gaaccaucaggacuaauga

SEQ ID NO: 1652782 - RNA, 19 nt, Artificial Sequence
  Description of Artificial Sequence: Synthetic oligonucleotide
auccaccauucauagauuc

SEQ ID NO: 1652783 - RNA, 19 nt, Artificial Sequence
  Description of Artificial Sequence: Synthetic oligonucleotide
auggaugcgauuuuguuuu

SEQ ID NO: 1652784 - RNA, 19 nt, Artificial Sequence
  Description of Artificial Sequence: Synthetic oligonucleotide
ugguugacaagauuauaac

SEQ ID NO: 1652785 - RNA, 19 nt, Artificial Sequence
  Description of Artificial Sequence: Synthetic oligonucleotide
aacaagaagaacacaugga

SEQ ID NO: 1652786 - RNA, 19 nt, Artificial Sequence
  Description of Artificial Sequence: Synthetic oligonucleotide
aagcaaacagggccaaugu

SEQ ID NO: 1652787 - RNA, 19 nt, Artificial Sequence
  Description of Artificial Sequence: Synthetic oligonucleotide
uccagcuauacccggaagu

SEQ ID NO: 1652788 - RNA, 19 nt, Artificial Sequence
  Description of Artificial Sequence: Synthetic oligonucleotide
uaacugaacugaaauccac

SEQ ID NO: 1652789 - RNA, 19 nt, Artificial Sequence
  Description of Artificial Sequence: Synthetic oligonucleotide
uuaguuggucacuugcacu

SEQ ID NO: 1652790 - RNA, 19 nt, Artificial Sequence
  Description of Artificial Sequence: Synthetic oligonucleotide
aagaucaggauugccauaa

SEQ ID NO: 1652791 - RNA, 19 nt, Artificial Sequence
  Description of Artificial Sequence: Synthetic oligonucleotide
uaagugaauuugcuguuuc

SEQ ID NO: 1652792 - RNA, 19 nt, Artificial Sequence
  Description of Artificial Sequence: Synthetic oligonucleotide
aucaggauugccauaacug

SEQ ID NO: 1652793 - RNA, 19 nt, Artificial Sequence
  Description of Artificial Sequence: Synthetic oligonucleotide
cauuuaugcaugucucccc

SEQ ID NO: 1652794 - RNA, 19 nt, Artificial Sequence
  Description of Artificial Sequence: Synthetic oligonucleotide
guauguaauguucugggaa

SEQ ID NO: 1652795 - RNA, 19 nt, Artificial Sequence
  Description of Artificial Sequence: Synthetic oligonucleotide
uguucuugcagugguaugu

SEQ ID NO: 1652796 - RNA, 19 nt, Artificial Sequence
  Description of Artificial Sequence: Synthetic oligonucleotide
aauuugcuguuuccuucag

SEQ ID NO: 1652797 - RNA, 19 nt, Artificial Sequence
  Description of Artificial Sequence: Synthetic oligonucleotide
uuccguggcacagucauag

SEQ ID NO: 1652798 - RNA, 19 nt, Artificial Sequence
  Description of Artificial Sequence: Synthetic oligonucleotide
gacuguuuugcuccacucc

SEQ ID NO: 1652799 - RNA, 19 nt, Artificial Sequence
  Description of Artificial Sequence: Synthetic oligonucleotide
caaauucuugaucgggacc

SEQ ID NO: 1652800 - RNA, 19 nt, Artificial Sequence
  Description of Artificial Sequence: Synthetic oligonucleotide
uagcauuuaugcaugucuc

SEQ ID NO: 1652801 - RNA, 19 nt, Artificial Sequence
  Description of Artificial Sequence: Synthetic oligonucleotide
agugguauguaauguucug

SEQ ID NO: 1652802 - RNA, 19 nt, Artificial Sequence
  Description of Artificial Sequence: Synthetic oligonucleotide
agaaguaccaggaggacca

SEQ ID NO: 1652803 - RNA, 19 nt, Artificial Sequence
  Description of Artificial Sequence: Synthetic oligonucleotide
acaguacuugagugaagac

SEQ ID NO: 1652804 - RNA, 19 nt, Artificial Sequence
  Description of Artificial Sequence: Synthetic oligonucleotide
caggagaaccagaaguacc

SEQ ID NO: 1652805 - RNA, 19 nt, Artificial Sequence
  Description of Artificial Sequence: Synthetic oligonucleotide
guguuuagcacagccaucc

SEQ ID NO: 1652806 - RNA, 19 nt, Artificial Sequence
  Description of Artificial Sequence: Synthetic oligonucleotide
uccauguuacagaauacuu

SEQ ID NO: 1652807 - RNA, 19 nt, Artificial Sequence
  Description of Artificial Sequence: Synthetic oligonucleotide
uuuaugcaugucuccccgg

SEQ ID NO: 1652808 - RNA, 19 nt, Artificial Sequence
  Description of Artificial Sequence: Synthetic oligonucleotide
agcaaacagggccaauguc

SEQ ID NO: 1652809 - RNA, 19 nt, Artificial Sequence
  Description of Artificial Sequence: Synthetic oligonucleotide
uuuccauguuacagaauac

SEQ ID NO: 1652810 - RNA, 19 nt, Artificial Sequence
  Description of Artificial Sequence: Synthetic oligonucleotide
ucugcaguugcgagcuagg

SEQ ID NO: 1652811 - RNA, 19 nt, Artificial Sequence
  Description of Artificial Sequence: Synthetic oligonucleotide
cuucuuuacauugccacug

SEQ ID NO: 1652812 - RNA, 19 nt, Artificial Sequence
  Description of Artificial Sequence: Synthetic oligonucleotide
aacugaaauccaccauuca

SEQ ID NO: 1652813 - RNA, 19 nt, Artificial Sequence
  Description of Artificial Sequence: Synthetic oligonucleotide
auaacaagaagaacacaug

SEQ ID NO: 1652814 - RNA, 19 nt, Artificial Sequence
  Description of Artificial Sequence: Synthetic oligonucleotide
gauugccauaacugaacug

SEQ ID NO: 1652815 - RNA, 19 nt, Artificial Sequence
  Description of Artificial Sequence: Synthetic oligonucleotide
gaauuugcuguuuccuuca

SEQ ID NO: 1652816 - RNA, 19 nt, Artificial Sequence
  Description of Artificial Sequence: Synthetic oligonucleotide
ucuugcagugguauguaau

SEQ ID NO: 1652817 - RNA, 19 nt, Artificial Sequence
  Description of Artificial Sequence: Synthetic oligonucleotide
caggauggcagaauuucag

SEQ ID NO: 1652818 - RNA, 19 nt, Artificial Sequence
  Description of Artificial Sequence: Synthetic oligonucleotide
uguaauguucugggaagcc

SEQ ID NO: 1652819 - RNA, 19 nt, Artificial Sequence
  Description of Artificial Sequence: Synthetic oligonucleotide
uuaugcaugucuccccggu

SEQ ID NO: 1652820 - RNA, 19 nt, Artificial Sequence
  Description of Artificial Sequence: Synthetic oligonucleotide
uugaucgggaccaccgaug

SEQ ID NO: 1652821 - RNA, 19 nt, Artificial Sequence
  Description of Artificial Sequence: Synthetic oligonucleotide
acagucauaggacuagcau

SEQ ID NO: 1652822 - RNA, 19 nt, Artificial Sequence
  Description of Artificial Sequence: Synthetic oligonucleotide
agaacuguguaagugaauu

SEQ ID NO: 1652823 - RNA, 19 nt, Artificial Sequence
  Description of Artificial Sequence: Synthetic oligonucleotide
ucuuuacauugccacuggc

SEQ ID NO: 1652824 - RNA, 19 nt, Artificial Sequence
  Description of Artificial Sequence: Synthetic oligonucleotide
caguguguuuagcacagcc

SEQ ID NO: 1652825 - RNA, 19 nt, Artificial Sequence
  Description of Artificial Sequence: Synthetic oligonucleotide
cauagauucuccaaaccaa

SEQ ID NO: 1652826 - RNA, 19 nt, Artificial Sequence
  Description of Artificial Sequence: Synthetic oligonucleotide
uuugcuccacuccccagug

SEQ ID NO: 1652827 - RNA, 19 nt, Artificial Sequence
  Description of Artificial Sequence: Synthetic oligonucleotide
ugauccauguaggcaaugc

SEQ ID NO: 1652828 - RNA, 19 nt, Artificial Sequence
  Description of Artificial Sequence: Synthetic oligonucleotide
caucuugcaaccuugguua

SEQ ID NO: 1652829 - RNA, 19 nt, Artificial Sequence
  Description of Artificial Sequence: Synthetic oligonucleotide
uguuucuuuucagcagagg

SEQ ID NO: 1652830 - RNA, 19 nt, Artificial Sequence
  Description of Artificial Sequence: Synthetic oligonucleotide
uucuccgcucuugagauca

SEQ ID NO: 1652831 - RNA, 19 nt, Artificial Sequence
  Description of Artificial Sequence: Synthetic oligonucleotide
gugguauguaauguucugg

SEQ ID NO: 1652832 - RNA, 19 nt, Artificial Sequence
  Description of Artificial Sequence: Synthetic oligonucleotide
cugguugacaagauuauaa

SEQ ID NO: 1652833 - RNA, 19 nt, Artificial Sequence
  Description of Artificial Sequence: Synthetic oligonucleotide
uucgaagacuguuuugcuc

SEQ ID NO: 1652834 - RNA, 19 nt, Artificial Sequence
  Description of Artificial Sequence: Synthetic oligonucleotide
accgaugucauagggugcg

SEQ ID NO: 1652835 - RNA, 19 nt, Artificial Sequence
  Description of Artificial Sequence: Synthetic oligonucleotide
uuacauugccacuggccug

SEQ ID NO: 1652836 - RNA, 19 nt, Artificial Sequence
  Description of Artificial Sequence: Synthetic oligonucleotide
ugaucgggaccaccgaugu

SEQ ID NO: 1652837 - RNA, 19 nt, Artificial Sequence
  Description of Artificial Sequence: Synthetic oligonucleotide
cauccuuuccuggagcucc

SEQ ID NO: 1652838 - RNA, 19 nt, Artificial Sequence
  Description of Artificial Sequence: Synthetic oligonucleotide
aggacuaaugaggucuuuc

SEQ ID NO: 1652839 - RNA, 19 nt, Artificial Sequence
  Description of Artificial Sequence: Synthetic oligonucleotide
uccaccauucauagauucu

SEQ ID NO: 1652840 - RNA, 19 nt, Artificial Sequence
  Description of Artificial Sequence: Synthetic oligonucleotide
uccgcucuugagaucagga

SEQ ID NO: 1652841 - RNA, 19 nt, Artificial Sequence
  Description of Artificial Sequence: Synthetic oligonucleotide
ugcaguugcgagcuagggu

SEQ ID NO: 1652842 - RNA, 19 nt, Artificial Sequence
  Description of Artificial Sequence: Synthetic oligonucleotide
acagggccaauguccacac

SEQ ID NO: 1652843 - RNA, 19 nt, Artificial Sequence
  Description of Artificial Sequence: Synthetic oligonucleotide
agauagaguuggcuuauaa

SEQ ID NO: 1652844 - RNA, 19 nt, Artificial Sequence
  Description of Artificial Sequence: Synthetic oligonucleotide
aucgggaccaccgauguca

SEQ ID NO: 1652845 - RNA, 19 nt, Artificial Sequence
  Description of Artificial Sequence: Synthetic oligonucleotide
caccauucauagauucucc

SEQ ID NO: 1652846 - RNA, 19 nt, Artificial Sequence
  Description of Artificial Sequence: Synthetic oligonucleotide
gguugacaagauuauaaca

SEQ ID NO: 1652847 - RNA, 19 nt, Artificial Sequence
  Description of Artificial Sequence: Synthetic oligonucleotide
gcaaacagggccaaugucc

SEQ ID NO: 1652848 - RNA, 19 nt, Artificial Sequence
  Description of Artificial Sequence: Synthetic oligonucleotide
guuacagaauacuuugaua

SEQ ID NO: 1652849 - RNA, 19 nt, Artificial Sequence
  Description of Artificial Sequence: Synthetic oligonucleotide
cagcuguacaucaaggaca

SEQ ID NO: 1652850 - RNA, 19 nt, Artificial Sequence
  Description of Artificial Sequence: Synthetic oligonucleotide
uaacaguacuugagugaag

SEQ ID NO: 1652851 - RNA, 19 nt, Artificial Sequence
  Description of Artificial Sequence: Synthetic oligonucleotide
guauucgaagacuguuuug

SEQ ID NO: 1652852 - RNA, 19 nt, Artificial Sequence
  Description of Artificial Sequence: Synthetic oligonucleotide
auucgaagacuguuuugcu

SEQ ID NO: 1652853 - RNA, 19 nt, Artificial Sequence
  Description of Artificial Sequence: Synthetic oligonucleotide
agaucaggauggcagaauu

SEQ ID NO: 1652854 - RNA, 19 nt, Artificial Sequence
  Description of Artificial Sequence: Synthetic oligonucleotide
ugaugggcagucucagggc

SEQ ID NO: 1652855 - RNA, 19 nt, Artificial Sequence
  Description of Artificial Sequence: Synthetic oligonucleotide
aacacauggaugcgauuuu

SEQ ID NO: 1652856 - RNA, 19 nt, Artificial Sequence
  Description of Artificial Sequence: Synthetic oligonucleotide
ugcgcguucgguauucgaa

SEQ ID NO: 1652857 - RNA, 19 nt, Artificial Sequence
  Description of Artificial Sequence: Synthetic oligonucleotide
acuugcacugguugacaag

SEQ ID NO: 1652858 - RNA, 19 nt, Artificial Sequence
  Description of Artificial Sequence: Synthetic oligonucleotide
uuugcugggguuucagaua

SEQ ID NO: 1652859 - RNA, 19 nt, Artificial Sequence
  Description of Artificial Sequence: Synthetic oligonucleotide
acuagcauuuaugcauguc

SEQ ID NO: 1652860 - RNA, 19 nt, Artificial Sequence
  Description of Artificial Sequence: Synthetic oligonucleotide
uucgguauucgaagacugu

SEQ ID NO: 1652861 - RNA, 19 nt, Artificial Sequence
  Description of Artificial Sequence: Synthetic oligonucleotide
ggcaaugcuguucuugcag

SEQ ID NO: 1652862 - RNA, 19 nt, Artificial Sequence
  Description of Artificial Sequence: Synthetic oligonucleotide
ucuugaucgggaccaccga

SEQ ID NO: 1652863 - RNA, 19 nt, Artificial Sequence
  Description of Artificial Sequence: Synthetic oligonucleotide
acccuuuggaccaggacuc

SEQ ID NO: 1652864 - RNA, 19 nt, Artificial Sequence
  Description of Artificial Sequence: Synthetic oligonucleotide
uguguuuagcacagccauc

SEQ ID NO: 1652865 - RNA, 19 nt, Artificial Sequence
  Description of Artificial Sequence: Synthetic oligonucleotide
ucacccuuaucuccaggcu

SEQ ID NO: 1652866 - RNA, 19 nt, Artificial Sequence
  Description of Artificial Sequence: Synthetic oligonucleotide
caccuucacccuuaucucc

SEQ ID NO: 1652867 - RNA, 19 nt, Artificial Sequence
  Description of Artificial Sequence: Synthetic oligonucleotide
cuuuagagacuucuuuaca

SEQ ID NO: 1652868 - RNA, 19 nt, Artificial Sequence
  Description of Artificial Sequence: Synthetic oligonucleotide
ucuuucuauuuguccauua

SEQ ID NO: 1652869 - RNA, 19 nt, Artificial Sequence
  Description of Artificial Sequence: Synthetic oligonucleotide
cuauuuguccauuaacagu

SEQ ID NO: 1652870 - RNA, 19 nt, Artificial Sequence
  Description of Artificial Sequence: Synthetic oligonucleotide
guucgguauucgaagacug

SEQ ID NO: 1652871 - RNA, 19 nt, Artificial Sequence
  Description of Artificial Sequence: Synthetic oligonucleotide
ggaccaauaggaccaguag

SEQ ID NO: 1652872 - RNA, 19 nt, Artificial Sequence
  Description of Artificial Sequence: Synthetic oligonucleotide
gggaccaccgaugucauag

SEQ ID NO: 1652873 - RNA, 19 nt, Artificial Sequence
  Description of Artificial Sequence: Synthetic oligonucleotide
agaucaggauugccauaac

SEQ ID NO: 1652874 - RNA, 19 nt, Artificial Sequence
  Description of Artificial Sequence: Synthetic oligonucleotide
ggguuucagauagaguugg

SEQ ID NO: 1652875 - RNA, 19 nt, Artificial Sequence
  Description of Artificial Sequence: Synthetic oligonucleotide
aaccuugguuaggaucaac

SEQ ID NO: 1652876 - RNA, 19 nt, Artificial Sequence
  Description of Artificial Sequence: Synthetic oligonucleotide
ugcagugguauguaauguu

SEQ ID NO: 1652877 - RNA, 19 nt, Artificial Sequence
  Description of Artificial Sequence: Synthetic oligonucleotide
ggaucaacccaauauucuc

SEQ ID NO: 1652878 - RNA, 19 nt, Artificial Sequence
  Description of Artificial Sequence: Synthetic oligonucleotide
aucccuuguagaccaggag

SEQ ID NO: 1652879 - RNA, 19 nt, Artificial Sequence
  Description of Artificial Sequence: Synthetic oligonucleotide
auuuguccauuaacaguac

SEQ ID NO: 1652880 - RNA, 19 nt, Artificial Sequence
  Description of Artificial Sequence: Synthetic oligonucleotide
gaagaacacauggaugcga

SEQ ID NO: 1652881 - RNA, 19 nt, Artificial Sequence
  Description of Artificial Sequence: Synthetic oligonucleotide
uuacgagaaccaucaggac

SEQ ID NO: 1652882 - RNA, 19 nt, Artificial Sequence
  Description of Artificial Sequence: Synthetic oligonucleotide
ugccauaacugaacugaaa

SEQ ID NO: 1652883 - RNA, 19 nt, Artificial Sequence
  Description of Artificial Sequence: Synthetic oligonucleotide
uccccgguuuccauguuac

SEQ ID NO: 1652884 - RNA, 19 nt, Artificial Sequence
  Description of Artificial Sequence: Synthetic oligonucleotide
gagguaagccagcuguaca

SEQ ID NO: 1652885 - RNA, 19 nt, Artificial Sequence
  Description of Artificial Sequence: Synthetic oligonucleotide
ugagguaagccagcuguac

SEQ ID NO: 1652886 - RNA, 19 nt, Artificial Sequence
  Description of Artificial Sequence: Synthetic oligonucleotide
gaugcgauuuuguuuugcu

SEQ ID NO: 1652887 - RNA, 19 nt, Artificial Sequence
  Description of Artificial Sequence: Synthetic oligonucleotide
uccccaguguguuuagcac

SEQ ID NO: 1652888 - RNA, 19 nt, Artificial Sequence
  Description of Artificial Sequence: Synthetic oligonucleotide
uaagccagcuguacaucaa

SEQ ID NO: 1652889 - RNA, 19 nt, Artificial Sequence
  Description of Artificial Sequence: Synthetic oligonucleotide
cuaugaugggcagucucag

SEQ ID NO: 1652890 - RNA, 19 nt, Artificial Sequence
  Description of Artificial Sequence: Synthetic oligonucleotide
gcgauuuuguuuugcuggg

SEQ ID NO: 1652891 - RNA, 19 nt, Artificial Sequence
  Description of Artificial Sequence: Synthetic oligonucleotide
uugccauaacugaacugaa

SEQ ID NO: 1652892 - RNA, 19 nt, Artificial Sequence
  Description of Artificial Sequence: Synthetic oligonucleotide
auacuuugauagcauccau

SEQ ID NO: 1652893 - RNA, 19 nt, Artificial Sequence
  Description of Artificial Sequence: Synthetic oligonucleotide
cacccuuaucuccaggcug

SEQ ID NO: 1652894 - RNA, 19 nt, Artificial Sequence
  Description of Artificial Sequence: Synthetic oligonucleotide
aguuccaggugguccacgu

SEQ ID NO: 1652895 - RNA, 19 nt, Artificial Sequence
  Description of Artificial Sequence: Synthetic oligonucleotide
aucuugcaaccuugguuag

SEQ ID NO: 1652896 - RNA, 19 nt, Artificial Sequence
  Description of Artificial Sequence: Synthetic oligonucleotide
ucagauagaguuggcuuau

SEQ ID NO: 1652897 - RNA, 19 nt, Artificial Sequence
  Description of Artificial Sequence: Synthetic oligonucleotide
agcuauacccggaagucca

SEQ ID NO: 1652898 - RNA, 19 nt, Artificial Sequence
  Description of Artificial Sequence: Synthetic oligonucleotide
cuugcaaccuugguuagga

SEQ ID NO: 1652899 - RNA, 19 nt, Artificial Sequence
  Description of Artificial Sequence: Synthetic oligonucleotide
uguuuagcacagccauccu

SEQ ID NO: 1652900 - RNA, 19 nt, Artificial Sequence
  Description of Artificial Sequence: Synthetic oligonucleotide
acgagaaccaucaggacua

SEQ ID NO: 1652901 - RNA, 19 nt, Artificial Sequence
  Description of Artificial Sequence: Synthetic oligonucleotide
cuggagcuccgucagcacc

SEQ ID NO: 1652902 - RNA, 19 nt, Artificial Sequence
  Description of Artificial Sequence: Synthetic oligonucleotide
auagggugcgauaucuaug

SEQ ID NO: 1652903 - RNA, 19 nt, Artificial Sequence
  Description of Artificial Sequence: Synthetic oligonucleotide
gcauuuaugcaugucuccc

SEQ ID NO: 1652904 - RNA, 19 nt, Artificial Sequence
  Description of Artificial Sequence: Synthetic oligonucleotide
ugucauagggugcgauauc

SEQ ID NO: 1652905 - RNA, 19 nt, Artificial Sequence
  Description of Artificial Sequence: Synthetic oligonucleotide
gaugucauagggugcgaua

SEQ ID NO: 1652906 - RNA, 19 nt, Artificial Sequence
  Description of Artificial Sequence: Synthetic oligonucleotide
gggugcgauaucuaugaug

SEQ ID NO: 1652907 - RNA, 19 nt, Artificial Sequence
  Description of Artificial Sequence: Synthetic oligonucleotide
cucgagguccagcuauacc

SEQ ID NO: 1652908 - RNA, 19 nt, Artificial Sequence
  Description of Artificial Sequence: Synthetic oligonucleotide
gaaauccaccauucauaga

SEQ ID NO: 1652909 - RNA, 19 nt, Artificial Sequence
  Description of Artificial Sequence: Synthetic oligonucleotide
gcaaccuugguuaggauca

SEQ ID NO: 1652910 - RNA, 19 nt, Artificial Sequence
  Description of Artificial Sequence: Synthetic oligonucleotide
cuccaggcaucccuuguag

SEQ ID NO: 1652911 - RNA, 19 nt, Artificial Sequence
  Description of Artificial Sequence: Synthetic oligonucleotide
acccaauauucuccgcucu

SEQ ID NO: 1652912 - RNA, 19 nt, Artificial Sequence
  Description of Artificial Sequence: Synthetic oligonucleotide
ucgguauucgaagacuguu

SEQ ID NO: 1652913 - RNA, 19 nt, Artificial Sequence
  Description of Artificial Sequence: Synthetic oligonucleotide
uccccuucauuugauccca

SEQ ID NO: 1652914 - RNA, 19 nt, Artificial Sequence
  Description of Artificial Sequence: Synthetic oligonucleotide
ucauagggugcgauaucua

SEQ ID NO: 1652915 - RNA, 19 nt, Artificial Sequence
  Description of Artificial Sequence: Synthetic oligonucleotide
ccagcuguacaucaaggac

SEQ ID NO: 1652916 - RNA, 19 nt, Artificial Sequence
  Description of Artificial Sequence: Synthetic oligonucleotide
ugcaccaacuucucccuuu

SEQ ID NO: 1652917 - RNA, 19 nt, Artificial Sequence
  Description of Artificial Sequence: Synthetic oligonucleotide
caggcaucccuuguagacc

SEQ ID NO: 1652918 - RNA, 19 nt, Artificial Sequence
  Description of Artificial Sequence: Synthetic oligonucleotide
cuucacccuuaucuccagg

SEQ ID NO: 1652919 - RNA, 19 nt, Artificial Sequence
  Description of Artificial Sequence: Synthetic oligonucleotide
ugcaugucuccccgguuuc

SEQ ID NO: 1652920 - RNA, 19 nt, Artificial Sequence
  Description of Artificial Sequence: Synthetic oligonucleotide
uccagggcaccucuuucuc

SEQ ID NO: 1652921 - RNA, 19 nt, Artificial Sequence
  Description of Artificial Sequence: Synthetic oligonucleotide
augcaugucuccccgguuu

SEQ ID NO: 1652922 - RNA, 19 nt, Artificial Sequence
  Description of Artificial Sequence: Synthetic oligonucleotide
uucuugcagugguauguaa

SEQ ID NO: 1652923 - RNA, 19 nt, Artificial Sequence
  Description of Artificial Sequence: Synthetic oligonucleotide
cuuuggaccaggacuccca

SEQ ID NO: 1652924 - RNA, 19 nt, Artificial Sequence
  Description of Artificial Sequence: Synthetic oligonucleotide
auaggaccaguaggacccc

SEQ ID NO: 1652925 - RNA, 19 nt, Artificial Sequence
  Description of Artificial Sequence: Synthetic oligonucleotide
cucugcaguugcgagcuag

SEQ ID NO: 1652926 - RNA, 19 nt, Artificial Sequence
  Description of Artificial Sequence: Synthetic oligonucleotide
auucuccgcucuugagauc

SEQ ID NO: 1652927 - RNA, 19 nt, Artificial Sequence
  Description of Artificial Sequence: Synthetic oligonucleotide
uccguggcacagucauagg

SEQ ID NO: 1652928 - RNA, 19 nt, Artificial Sequence
  Description of Artificial Sequence: Synthetic oligonucleotide
gguauguaauguucuggga

SEQ ID NO: 1652929 - RNA, 19 nt, Artificial Sequence
  Description of Artificial Sequence: Synthetic oligonucleotide
gucacuugcacugguugac

SEQ ID NO: 1652930 - RNA, 19 nt, Artificial Sequence
  Description of Artificial Sequence: Synthetic oligonucleotide
uggcccauccuuuccugga

SEQ ID NO: 1652931 - RNA, 19 nt, Artificial Sequence
  Description of Artificial Sequence: Synthetic oligonucleotide
cagcuauacccggaagucc

SEQ ID NO: 1652932 - RNA, 19 nt, Artificial Sequence
  Description of Artificial Sequence: Synthetic oligonucleotide
cuguucuugcagugguaug

SEQ ID NO: 1652933 - RNA, 19 nt, Artificial Sequence
  Description of Artificial Sequence: Synthetic oligonucleotide
caggauugccauaacugaa

SEQ ID NO: 1652934 - RNA, 19 nt, Artificial Sequence
  Description of Artificial Sequence: Synthetic oligonucleotide
uaugcaugucuccccgguu

SEQ ID NO: 1652935 - RNA, 19 nt, Artificial Sequence
  Description of Artificial Sequence: Synthetic oligonucleotide
uggcacagucauaggacua

SEQ ID NO: 1652936 - RNA, 19 nt, Artificial Sequence
  Description of Artificial Sequence: Synthetic oligonucleotide
guuuugcugggguuucaga

SEQ ID NO: 1652937 - RNA, 19 nt, Artificial Sequence
  Description of Artificial Sequence: Synthetic oligonucleotide
gcugggguuucagauagag

SEQ ID NO: 1652938 - RNA, 19 nt, Artificial Sequence
  Description of Artificial Sequence: Synthetic oligonucleotide
ccuucagccuugaauuccc

SEQ ID NO: 1652939 - RNA, 19 nt, Artificial Sequence
  Description of Artificial Sequence: Synthetic oligonucleotide
cuccccaguguguuuagca

SEQ ID NO: 1652940 - RNA, 19 nt, Artificial Sequence
  Description of Artificial Sequence: Synthetic oligonucleotide
auguuacagaauacuuuga

SEQ ID NO: 1652941 - RNA, 19 nt, Artificial Sequence
  Description of Artificial Sequence: Synthetic oligonucleotide
cacccuuuggaccaggacu

SEQ ID NO: 1652942 - RNA, 19 nt, Artificial Sequence
  Description of Artificial Sequence: Synthetic oligonucleotide
gugcgauaucuaugauggg

SEQ ID NO: 1652943 - RNA, 19 nt, Artificial Sequence
  Description of Artificial Sequence: Synthetic oligonucleotide
ccuucauuugaucccauca

SEQ ID NO: 1652944 - RNA, 19 nt, Artificial Sequence
  Description of Artificial Sequence: Synthetic oligonucleotide
cacagucauaggacuagca

SEQ ID NO: 1652945 - RNA, 19 nt, Artificial Sequence
  Description of Artificial Sequence: Synthetic oligonucleotide
ugaucccaucagcuuuaga

SEQ ID NO: 1652946 - RNA, 19 nt, Artificial Sequence
  Description of Artificial Sequence: Synthetic oligonucleotide
uggaugcgauuuuguuuug

SEQ ID NO: 1652947 - RNA, 19 nt, Artificial Sequence
  Description of Artificial Sequence: Synthetic oligonucleotide
aauccaccauucauagauu

SEQ ID NO: 1652948 - RNA, 19 nt, Artificial Sequence
  Description of Artificial Sequence: Synthetic oligonucleotide
acuccccaguguguuuagc

SEQ ID NO: 1652949 - RNA, 19 nt, Artificial Sequence
  Description of Artificial Sequence: Synthetic oligonucleotide
gccauaacugaacugaaau

SEQ ID NO: 1652950 - RNA, 19 nt, Artificial Sequence
  Description of Artificial Sequence: Synthetic oligonucleotide
acuugagugaagacauaau

SEQ ID NO: 1652951 - RNA, 19 nt, Artificial Sequence
  Description of Artificial Sequence: Synthetic oligonucleotide
aggcaaugcuguucuugca

SEQ ID NO: 1652952 - RNA, 19 nt, Artificial Sequence
  Description of Artificial Sequence: Synthetic oligonucleotide
cauggaugcgauuuuguuu

SEQ ID NO: 1652953 - RNA, 19 nt, Artificial Sequence
  Description of Artificial Sequence: Synthetic oligonucleotide
gcgauaucuaugaugggca

SEQ ID NO: 1652954 - RNA, 19 nt, Artificial Sequence
  Description of Artificial Sequence: Synthetic oligonucleotide
uugcgcguucgguauucga

SEQ ID NO: 1652955 - RNA, 19 nt, Artificial Sequence
  Description of Artificial Sequence: Synthetic oligonucleotide
caacccaauauucuccgcu

SEQ ID NO: 1652956 - RNA, 19 nt, Artificial Sequence
  Description of Artificial Sequence: Synthetic oligonucleotide
caggugcaccaacuucucc

SEQ ID NO: 1652957 - RNA, 19 nt, Artificial Sequence
  Description of Artificial Sequence: Synthetic oligonucleotide
accaccgaugucauagggu

SEQ ID NO: 1652958 - RNA, 19 nt, Artificial Sequence
  Description of Artificial Sequence: Synthetic oligonucleotide
gucauagggugcgauaucu

SEQ ID NO: 1652959 - RNA, 19 nt, Artificial Sequence
  Description of Artificial Sequence: Synthetic oligonucleotide
gcgcguucgguauucgaag

SEQ ID NO: 1652960 - RNA, 19 nt, Artificial Sequence
  Description of Artificial Sequence: Synthetic oligonucleotide
cauagggugcgauaucuau

SEQ ID NO: 1652961 - RNA, 19 nt, Artificial Sequence
  Description of Artificial Sequence: Synthetic oligonucleotide
ugcuguucuugcaguggua

SEQ ID NO: 1652962 - RNA, 19 nt, Artificial Sequence
  Description of Artificial Sequence: Synthetic oligonucleotide
ucuccgcucuugagaucag

SEQ ID NO: 1652963 - RNA, 19 nt, Artificial Sequence
  Description of Artificial Sequence: Synthetic oligonucleotide
caccaacuucucccuuugg

SEQ ID NO: 1652964 - RNA, 19 nt, Artificial Sequence
  Description of Artificial Sequence: Synthetic oligonucleotide
cagucauaggacuagcauu

SEQ ID NO: 1652965 - RNA, 19 nt, Artificial Sequence
  Description of Artificial Sequence: Synthetic oligonucleotide
ggucacuugcacugguuga

SEQ ID NO: 1652966 - RNA, 19 nt, Artificial Sequence
  Description of Artificial Sequence: Synthetic oligonucleotide
gggguuucagauagaguug

SEQ ID NO: 1652967 - RNA, 19 nt, Artificial Sequence
  Description of Artificial Sequence: Synthetic oligonucleotide
cguggcacagucauaggac

SEQ ID NO: 1652968 - RNA, 19 nt, Artificial Sequence
  Description of Artificial Sequence: Synthetic oligonucleotide
gaacuguguaagugaauuu

SEQ ID NO: 1652969 - RNA, 19 nt, Artificial Sequence
  Description of Artificial Sequence: Synthetic oligonucleotide
guggcacagucauaggacu

SEQ ID NO: 1652970 - RNA, 19 nt, Artificial Sequence
  Description of Artificial Sequence: Synthetic oligonucleotide
gcaguugcgagcuaggguu

SEQ ID NO: 1652971 - RNA, 19 nt, Artificial Sequence
  Description of Artificial Sequence: Synthetic oligonucleotide
agcuccgucagcaccggca

SEQ ID NO: 1652972 - RNA, 19 nt, Artificial Sequence
  Description of Artificial Sequence: Synthetic oligonucleotide
ccaccauucauagauucuc

SEQ ID NO: 1652973 - RNA, 19 nt, Artificial Sequence
  Description of Artificial Sequence: Synthetic oligonucleotide
uuguuuugcugggguuuca

SEQ ID NO: 1652974 - RNA, 19 nt, Artificial Sequence
  Description of Artificial Sequence: Synthetic oligonucleotide
cagaauacuuugauagcau

SEQ ID NO: 1652975 - RNA, 19 nt, Artificial Sequence
  Description of Artificial Sequence: Synthetic oligonucleotide
ucagggccuugcgcguucg

SEQ ID NO: 1652976 - RNA, 19 nt, Artificial Sequence
  Description of Artificial Sequence: Synthetic oligonucleotide
cucuugagaucaggauggc

SEQ ID NO: 1652977 - RNA, 19 nt, Artificial Sequence
  Description of Artificial Sequence: Synthetic oligonucleotide
uuagcgccugguucaccau

SEQ ID NO: 1652978 - RNA, 19 nt, Artificial Sequence
  Description of Artificial Sequence: Synthetic oligonucleotide
gguauucgaagacuguuuu

SEQ ID NO: 1652979 - RNA, 19 nt, Artificial Sequence
  Description of Artificial Sequence: Synthetic oligonucleotide
uugcuccacuccccagugu

SEQ ID NO: 1652980 - RNA, 19 nt, Artificial Sequence
  Description of Artificial Sequence: Synthetic oligonucleotide
ggaugcgauuuuguuuugc

SEQ ID NO: 1652981 - RNA, 19 nt, Artificial Sequence
  Description of Artificial Sequence: Synthetic oligonucleotide
cuugcgcguucgguauucg

SEQ ID NO: 1652982 - RNA, 19 nt, Artificial Sequence
  Description of Artificial Sequence: Synthetic oligonucleotide
cuccgcucuugagaucagg

SEQ ID NO: 1652983 - RNA, 19 nt, Artificial Sequence
  Description of Artificial Sequence: Synthetic oligonucleotide
cucuaagaccaggggcccc

SEQ ID NO: 1652984 - RNA, 19 nt, Artificial Sequence
  Description of Artificial Sequence: Synthetic oligonucleotide
gcaccaacuucucccuuug

SEQ ID NO: 1652985 - RNA, 19 nt, Artificial Sequence
  Description of Artificial Sequence: Synthetic oligonucleotide
ucgggaccaccgaugucau

SEQ ID NO: 1652986 - RNA, 19 nt, Artificial Sequence
  Description of Artificial Sequence: Synthetic oligonucleotide
cacuugcacugguugacaa

SEQ ID NO: 1652987 - RNA, 19 nt, Artificial Sequence
  Description of Artificial Sequence: Synthetic oligonucleotide
ggauugccauaacugaacu

SEQ ID NO: 1652988 - RNA, 19 nt, Artificial Sequence
  Description of Artificial Sequence: Synthetic oligonucleotide
ccagcuauacccggaaguc

SEQ ID NO: 1652989 - RNA, 19 nt, Artificial Sequence
  Description of Artificial Sequence: Synthetic oligonucleotide
gcaucccuuguagaccagg

SEQ ID NO: 1652990 - RNA, 19 nt, Artificial Sequence
  Description of Artificial Sequence: Synthetic oligonucleotide
ugcugggguuucagauaga

SEQ ID NO: 1652991 - RNA, 19 nt, Artificial Sequence
  Description of Artificial Sequence: Synthetic oligonucleotide
cgauaucuaugaugggcag

SEQ ID NO: 1652992 - RNA, 19 nt, Artificial Sequence
  Description of Artificial Sequence: Synthetic oligonucleotide
gaucgggaccaccgauguc

SEQ ID NO: 1652993 - RNA, 19 nt, Artificial Sequence
  Description of Artificial Sequence: Synthetic oligonucleotide
cacauggaugcgauuuugu

SEQ ID NO: 1652994 - RNA, 19 nt, Artificial Sequence
  Description of Artificial Sequence: Synthetic oligonucleotide
ccaggagaaccagaaguac

SEQ ID NO: 1652995 - RNA, 19 nt, Artificial Sequence
  Description of Artificial Sequence: Synthetic oligonucleotide
ccgguuuccauguuacaga

SEQ ID NO: 1652996 - RNA, 19 nt, Artificial Sequence
  Description of Artificial Sequence: Synthetic oligonucleotide
ggcaucacccuugccccgg

SEQ ID NO: 1652997 - RNA, 19 nt, Artificial Sequence
  Description of Artificial Sequence: Synthetic oligonucleotide
gcguucgguauucgaagac

SEQ ID NO: 1652998 - RNA, 19 nt, Artificial Sequence
  Description of Artificial Sequence: Synthetic oligonucleotide
ccaauaggaccaguaggac

SEQ ID NO: 1652999 - RNA, 19 nt, Artificial Sequence
  Description of Artificial Sequence: Synthetic oligonucleotide
gguuucagauagaguuggc

SEQ ID NO: 1653000 - RNA, 19 nt, Artificial Sequence
  Description of Artificial Sequence: Synthetic oligonucleotide
agggcccuuuccucccuca

SEQ ID NO: 1653001 - RNA, 19 nt, Artificial Sequence
  Description of Artificial Sequence: Synthetic oligonucleotide
ccauuaacaguacuugagu

SEQ ID NO: 1653002 - RNA, 19 nt, Artificial Sequence
  Description of Artificial Sequence: Synthetic oligonucleotide
agcauccaucuugcaaccu

SEQ ID NO: 1653003 - RNA, 19 nt, Artificial Sequence
  Description of Artificial Sequence: Synthetic oligonucleotide
agggccuugcgcguucggu

SEQ ID NO: 1653004 - RNA, 19 nt, Artificial Sequence
  Description of Artificial Sequence: Synthetic oligonucleotide
agggugcgauaucuaugau

SEQ ID NO: 1653005 - RNA, 19 nt, Artificial Sequence
  Description of Artificial Sequence: Synthetic oligonucleotide
cuugaucgggaccaccgau

SEQ ID NO: 1653006 - RNA, 19 nt, Artificial Sequence
  Description of Artificial Sequence: Synthetic oligonucleotide
gcuccgucagcaccggcac

SEQ ID NO: 1653007 - RNA, 19 nt, Artificial Sequence
  Description of Artificial Sequence: Synthetic oligonucleotide
ggcaccggcaucacccuug

SEQ ID NO: 1653008 - RNA, 19 nt, Artificial Sequence
  Description of Artificial Sequence: Synthetic oligonucleotide
cuccgucagcaccggcacc

SEQ ID NO: 1653009 - RNA, 19 nt, Artificial Sequence
  Description of Artificial Sequence: Synthetic oligonucleotide
gagaucaggauggcagaau

SEQ ID NO: 1653010 - RNA, 19 nt, Artificial Sequence
  Description of Artificial Sequence: Synthetic oligonucleotide
gcuauacccggaaguccag

SEQ ID NO: 1653011 - RNA, 19 nt, Artificial Sequence
  Description of Artificial Sequence: Synthetic oligonucleotide
ggccugauccauguaggca

SEQ ID NO: 1653012 - RNA, 19 nt, Artificial Sequence
  Description of Artificial Sequence: Synthetic oligonucleotide
cuccagggcaccucuuucu

SEQ ID NO: 1653013 - RNA, 19 nt, Artificial Sequence
  Description of Artificial Sequence: Synthetic oligonucleotide
gcacagucauaggacuagc

SEQ ID NO: 1653014 - RNA, 19 nt, Artificial Sequence
  Description of Artificial Sequence: Synthetic oligonucleotide
ccauguuacagaauacuuu

SEQ ID NO: 1653015 - RNA, 19 nt, Artificial Sequence
  Description of Artificial Sequence: Synthetic oligonucleotide
aguugcgagcuaggguuuu

SEQ ID NO: 1653016 - RNA, 19 nt, Artificial Sequence
  Description of Artificial Sequence: Synthetic oligonucleotide
cuaagaccaggggccccug

SEQ ID NO: 1653017 - RNA, 19 nt, Artificial Sequence
  Description of Artificial Sequence: Synthetic oligonucleotide
ccucuaagaccaggggccc

SEQ ID NO: 1653018 - RNA, 19 nt, Artificial Sequence
  Description of Artificial Sequence: Synthetic oligonucleotide
ccuuuggaccaggacuccc

SEQ ID NO: 1653019 - RNA, 19 nt, Artificial Sequence
  Description of Artificial Sequence: Synthetic oligonucleotide
ccguggcacagucauagga

SEQ ID NO: 1653020 - RNA, 19 nt, Artificial Sequence
  Description of Artificial Sequence: Synthetic oligonucleotide
gcccauguucaccucucuc

SEQ ID NO: 1653021 - RNA, 19 nt, Artificial Sequence
  Description of Artificial Sequence: Synthetic oligonucleotide
cauugccacuggccugauc

SEQ ID NO: 1653022 - RNA, 19 nt, Artificial Sequence
  Description of Artificial Sequence: Synthetic oligonucleotide
uccuuuccuggagcuccgu

SEQ ID NO: 1653023 - RNA, 19 nt, Artificial Sequence
  Description of Artificial Sequence: Synthetic oligonucleotide
caccucgagguccagcuau

SEQ ID NO: 1653024 - RNA, 19 nt, Artificial Sequence
  Description of Artificial Sequence: Synthetic oligonucleotide
cuuugauagcauccaucuu

SEQ ID NO: 1653025 - RNA, 19 nt, Artificial Sequence
  Description of Artificial Sequence: Synthetic oligonucleotide
cccuucauuugaucccauc

SEQ ID NO: 1653026 - RNA, 19 nt, Artificial Sequence
  Description of Artificial Sequence: Synthetic oligonucleotide
gcacccgggaagccagcag

SEQ ID NO: 1653027 - RNA, 19 nt, Artificial Sequence
  Description of Artificial Sequence: Synthetic oligonucleotide
cagggccuugcgcguucgg

SEQ ID NO: 1653028 - RNA, 19 nt, Artificial Sequence
  Description of Artificial Sequence: Synthetic oligonucleotide
ccuuguagaccaggagaac

SEQ ID NO: 1653029 - RNA, 19 nt, Artificial Sequence
  Description of Artificial Sequence: Synthetic oligonucleotide
gggcccuuuccucccucag

SEQ ID NO: 1653030 - RNA, 19 nt, Artificial Sequence
  Description of Artificial Sequence: Synthetic oligonucleotide
cagaggcaucuguccacca

SEQ ID NO: 1653031 - RNA, 19 nt, Artificial Sequence
  Description of Artificial Sequence: Synthetic oligonucleotide
gcaccggcaucacccuugc

SEQ ID NO: 1653032 - RNA, 19 nt, Artificial Sequence
  Description of Artificial Sequence: Synthetic oligonucleotide
ggacaucuucaggaagauc

SEQ ID NO: 1653033 - RNA, 19 nt, Artificial Sequence
  Description of Artificial Sequence: Synthetic oligonucleotide
accccuuggcccauccuuu

SEQ ID NO: 1653034 - RNA, 19 nt, Artificial Sequence
  Description of Artificial Sequence: Synthetic oligonucleotide
cccuuggcccauccuuucc

SEQ ID NO: 1653035 - RNA, 19 nt, Artificial Sequence
  Description of Artificial Sequence: Synthetic oligonucleotide
gccccgggaacuccaggug

SEQ ID NO: 1653036 - RNA, 19 nt, Artificial Sequence
  Description of Artificial Sequence: Synthetic oligonucleotide
ccaaaccaaacauguuucu

SEQ ID NO: 1653037 - RNA, 19 nt, Artificial Sequence
  Description of Artificial Sequence: Synthetic oligonucleotide
cuccccgguuuccauguua

SEQ ID NO: 1653038 - RNA, 19 nt, Artificial Sequence
  Description of Artificial Sequence: Synthetic oligonucleotide
gggccuugcgcguucggua

SEQ ID NO: 1653039 - RNA, 19 nt, Artificial Sequence
  Description of Artificial Sequence: Synthetic oligonucleotide
cuuccguggcacagucaua

SEQ ID NO: 1653040 - RNA, 19 nt, Artificial Sequence
  Description of Artificial Sequence: Synthetic oligonucleotide
caccggcaucacccuugcc

SEQ ID NO: 1653041 - RNA, 19 nt, Artificial Sequence
  Description of Artificial Sequence: Synthetic oligonucleotide
ccuugcgcguucgguauuc

SEQ ID NO: 1653042 - RNA, 19 nt, Artificial Sequence
  Description of Artificial Sequence: Synthetic oligonucleotide
ggcaccaccuucacccuua

SEQ ID NO: 1653043 - RNA, 19 nt, Artificial Sequence
  Description of Artificial Sequence: Synthetic oligonucleotide
accucgagguccagcuaua

SEQ ID NO: 1653044 - RNA, 19 nt, Artificial Sequence
  Description of Artificial Sequence: Synthetic oligonucleotide
ccucgagguccagcuauac

SEQ ID NO: 1653045 - RNA, 19 nt, Artificial Sequence
  Description of Artificial Sequence: Synthetic oligonucleotide
cccuuuggaccaggacucc

SEQ ID NO: 1653046 - RNA, 19 nt, Artificial Sequence
  Description of Artificial Sequence: Synthetic oligonucleotide
cacccuugccccgggaacu

SEQ ID NO: 1653047 - RNA, 19 nt, Artificial Sequence
  Description of Artificial Sequence: Synthetic oligonucleotide
cagauagaguuggcuuaua

SEQ ID NO: 1653048 - RNA, 19 nt, Artificial Sequence
  Description of Artificial Sequence: Synthetic oligonucleotide
cgcguucgguauucgaaga

SEQ ID NO: 1653049 - RNA, 19 nt, Artificial Sequence
  Description of Artificial Sequence: Synthetic oligonucleotide
ggcaucccuuguagaccag

SEQ ID NO: 1653050 - RNA, 19 nt, Artificial Sequence
  Description of Artificial Sequence: Synthetic oligonucleotide
ggccuugcgcguucgguau

SEQ ID NO: 1653051 - RNA, 19 nt, Artificial Sequence
  Description of Artificial Sequence: Synthetic oligonucleotide
cgccugguucaccauucug

SEQ ID NO: 1653052 - RNA, 19 nt, Artificial Sequence
  Description of Artificial Sequence: Synthetic oligonucleotide
uaggaccccuuggcccauc

SEQ ID NO: 1653053 - RNA, 19 nt, Artificial Sequence
  Description of Artificial Sequence: Synthetic oligonucleotide
ccuugccccgggaacucca

SEQ ID NO: 1653054 - RNA, 19 nt, Artificial Sequence
  Description of Artificial Sequence: Synthetic oligonucleotide
caguugcgagcuaggguuu

SEQ ID NO: 1653055 - RNA, 19 nt, Artificial Sequence
  Description of Artificial Sequence: Synthetic oligonucleotide
cccauccuuuccuggagcu

SEQ ID NO: 1653056 - RNA, 19 nt, Artificial Sequence
  Description of Artificial Sequence: Synthetic oligonucleotide
ccaucagcuuuagagacuu

SEQ ID NO: 1653057 - RNA, 19 nt, Artificial Sequence
  Description of Artificial Sequence: Synthetic oligonucleotide
cccaucagcuuuagagacu

SEQ ID NO: 1653058 - RNA, 19 nt, Artificial Sequence
  Description of Artificial Sequence: Synthetic oligonucleotide
acauugccacuggccugau

SEQ ID NO: 1653059 - RNA, 19 nt, Artificial Sequence
  Description of Artificial Sequence: Synthetic oligonucleotide
cggcaucacccuugccccg

SEQ ID NO: 1653060 - RNA, 19 nt, Artificial Sequence
  Description of Artificial Sequence: Synthetic oligonucleotide
ccauucuguccaggagcac

SEQ ID NO: 1653061 - RNA, 19 nt, Artificial Sequence
  Description of Artificial Sequence: Synthetic oligonucleotide
cccuuaucuccaggcugac

SEQ ID NO: 1653062 - RNA, 19 nt, Artificial Sequence
  Description of Artificial Sequence: Synthetic oligonucleotide
cguucgguauucgaagacu

SEQ ID NO: 1653063 - RNA, 19 nt, Artificial Sequence
  Description of Artificial Sequence: Synthetic oligonucleotide
ggcccauguucaccucucu

SEQ ID NO: 1653064 - RNA, 19 nt, Artificial Sequence
  Description of Artificial Sequence: Synthetic oligonucleotide
cgguauucgaagacuguuu

SEQ ID NO: 1653065 - RNA, 19 nt, Artificial Sequence
  Description of Artificial Sequence: Synthetic oligonucleotide
ccccgguuuccauguuaca

SEQ ID NO: 1653066 - RNA, 19 nt, Artificial Sequence
  Description of Artificial Sequence: Synthetic oligonucleotide
ccgucagcaccggcacccc

SEQ ID NO: 1653067 - RNA, 19 nt, Artificial Sequence
  Description of Artificial Sequence: Synthetic oligonucleotide
gcgccugguucaccauucu

SEQ ID NO: 1653068 - RNA, 19 nt, Artificial Sequence
  Description of Artificial Sequence: Synthetic oligonucleotide
ccgaugucauagggugcga

SEQ ID NO: 1653069 - RNA, 19 nt, Artificial Sequence
  Description of Artificial Sequence: Synthetic oligonucleotide
ggggaccaauaggaccagu

SEQ ID NO: 1653070 - RNA, 19 nt, Artificial Sequence
  Description of Artificial Sequence: Synthetic oligonucleotide
cgaugucauagggugcgau

SEQ ID NO: 1653071 - RNA, 19 nt, Artificial Sequence
  Description of Artificial Sequence: Synthetic oligonucleotide
gccuugcgcguucgguauu

SEQ ID NO: 1653072 - RNA, 19 nt, Artificial Sequence
  Description of Artificial Sequence: Synthetic oligonucleotide
gggcaccggcaucacccuu

SEQ ID NO: 1653073 - RNA, 19 nt, Artificial Sequence
  Description of Artificial Sequence: Synthetic oligonucleotide
cgggaccaccgaugucaua

SEQ ID NO: 1653074 - RNA, 19 nt, Artificial Sequence
  Description of Artificial Sequence: Synthetic oligonucleotide
auaaguaccaaggaaaagc

SEQ ID NO: 1653075 - RNA, 19 nt, Artificial Sequence
  Description of Artificial Sequence: Synthetic oligonucleotide
aaugacagucacuuaguac

SEQ ID NO: 1653076 - RNA, 19 nt, Artificial Sequence
  Description of Artificial Sequence: Synthetic oligonucleotide
auugauaacagucacucca

SEQ ID NO: 1653077 - RNA, 19 nt, Artificial Sequence
  Description of Artificial Sequence: Synthetic oligonucleotide
ugucaaauugauaacaguc

SEQ ID NO: 1653078 - RNA, 19 nt, Artificial Sequence
  Description of Artificial Sequence: Synthetic oligonucleotide
ucuacugauucccagagga

SEQ ID NO: 1653079 - RNA, 19 nt, Artificial Sequence
  Description of Artificial Sequence: Synthetic oligonucleotide
uacgugaaggaaaugacag

SEQ ID NO: 1653080 - RNA, 19 nt, Artificial Sequence
  Description of Artificial Sequence: Synthetic oligonucleotide
caugauuugcccaaaggcg

SEQ ID NO: 1653081 - RNA, 19 nt, Artificial Sequence
  Description of Artificial Sequence: Synthetic oligonucleotide
auagauuacgaaaagggcg

SEQ ID NO: 1653082 - RNA, 19 nt, Artificial Sequence
  Description of Artificial Sequence: Synthetic oligonucleotide
aauugauaacagucacucc

SEQ ID NO: 1653083 - RNA, 19 nt, Artificial Sequence
  Description of Artificial Sequence: Synthetic oligonucleotide
cuguacuuaaggaagaaag

SEQ ID NO: 1653084 - RNA, 19 nt, Artificial Sequence
  Description of Artificial Sequence: Synthetic oligonucleotide
uguucauagauuacgaaaa

SEQ ID NO: 1653085 - RNA, 19 nt, Artificial Sequence
  Description of Artificial Sequence: Synthetic oligonucleotide
uuuggucugagaaagaaua

SEQ ID NO: 1653086 - RNA, 19 nt, Artificial Sequence
  Description of Artificial Sequence: Synthetic oligonucleotide
acuaugggaaugccgaccc

SEQ ID NO: 1653087 - RNA, 19 nt, Artificial Sequence
  Description of Artificial Sequence: Synthetic oligonucleotide
acuucuguauaaaucaagc

SEQ ID NO: 1653088 - RNA, 19 nt, Artificial Sequence
  Description of Artificial Sequence: Synthetic oligonucleotide
cauagauuacgaaaagggc

SEQ ID NO: 1653089 - RNA, 19 nt, Artificial Sequence
  Description of Artificial Sequence: Synthetic oligonucleotide
uaaaucaagcuggagagcc

SEQ ID NO: 1653090 - RNA, 19 nt, Artificial Sequence
  Description of Artificial Sequence: Synthetic oligonucleotide
guauaaaucaagcuggaga

SEQ ID NO: 1653091 - RNA, 19 nt, Artificial Sequence
  Description of Artificial Sequence: Synthetic oligonucleotide
uguacuuaaggaagaaaga

SEQ ID NO: 1653092 - RNA, 19 nt, Artificial Sequence
  Description of Artificial Sequence: Synthetic oligonucleotide
ggaagaaagaucuaaugcc

SEQ ID NO: 1653093 - RNA, 19 nt, Artificial Sequence
  Description of Artificial Sequence: Synthetic oligonucleotide
ugugagaguaccuuggggu

SEQ ID NO: 1653094 - RNA, 19 nt, Artificial Sequence
  Description of Artificial Sequence: Synthetic oligonucleotide
uaaguaccaaggaaaagca

SEQ ID NO: 1653095 - RNA, 19 nt, Artificial Sequence
  Description of Artificial Sequence: Synthetic oligonucleotide
ugucauggugugauaaagg

SEQ ID NO: 1653096 - RNA, 19 nt, Artificial Sequence
  Description of Artificial Sequence: Synthetic oligonucleotide
uagauuacgaaaagggcgu

SEQ ID NO: 1653097 - RNA, 19 nt, Artificial Sequence
  Description of Artificial Sequence: Synthetic oligonucleotide
uaucuacugauucccagag

SEQ ID NO: 1653098 - RNA, 19 nt, Artificial Sequence
  Description of Artificial Sequence: Synthetic oligonucleotide
ggaaaugacagucacuuag

SEQ ID NO: 1653099 - RNA, 19 nt, Artificial Sequence
  Description of Artificial Sequence: Synthetic oligonucleotide
ugauaguauacuucuguug

SEQ ID NO: 1653100 - RNA, 19 nt, Artificial Sequence
  Description of Artificial Sequence: Synthetic oligonucleotide
agcaguucccuccaccucc

SEQ ID NO: 1653101 - RNA, 19 nt, Artificial Sequence
  Description of Artificial Sequence: Synthetic oligonucleotide
gaucuaaugccacugugug

SEQ ID NO: 1653102 - RNA, 19 nt, Artificial Sequence
  Description of Artificial Sequence: Synthetic oligonucleotide
aguaccuugggguuauggg

SEQ ID NO: 1653103 - RNA, 19 nt, Artificial Sequence
  Description of Artificial Sequence: Synthetic oligonucleotide
gauaucuacugauucccag

SEQ ID NO: 1653104 - RNA, 19 nt, Artificial Sequence
  Description of Artificial Sequence: Synthetic oligonucleotide
ugacaugggaccuucuucc

SEQ ID NO: 1653105 - RNA, 19 nt, Artificial Sequence
  Description of Artificial Sequence: Synthetic oligonucleotide
uacaugagcggugugagag

SEQ ID NO: 1653106 - RNA, 19 nt, Artificial Sequence
  Description of Artificial Sequence: Synthetic oligonucleotide
agucuuauugcccuguacu

SEQ ID NO: 1653107 - RNA, 19 nt, Artificial Sequence
  Description of Artificial Sequence: Synthetic oligonucleotide
ucggccaccauacacaagu

SEQ ID NO: 1653108 - RNA, 19 nt, Artificial Sequence
  Description of Artificial Sequence: Synthetic oligonucleotide
aagaucuaaugccacugug

SEQ ID NO: 1653109 - RNA, 19 nt, Artificial Sequence
  Description of Artificial Sequence: Synthetic oligonucleotide
acuguuacauucugaaucu

SEQ ID NO: 1653110 - RNA, 19 nt, Artificial Sequence
  Description of Artificial Sequence: Synthetic oligonucleotide
gguugaauaaguaccaagg

SEQ ID NO: 1653111 - RNA, 19 nt, Artificial Sequence
  Description of Artificial Sequence: Synthetic oligonucleotide
uauugcccuguacuuaagg

SEQ ID NO: 1653112 - RNA, 19 nt, Artificial Sequence
  Description of Artificial Sequence: Synthetic oligonucleotide
ugaaauagugggcacacuu

SEQ ID NO: 1653113 - RNA, 19 nt, Artificial Sequence
  Description of Artificial Sequence: Synthetic oligonucleotide
aggaggaaugaauccagac

SEQ ID NO: 1653114 - RNA, 19 nt, Artificial Sequence
  Description of Artificial Sequence: Synthetic oligonucleotide
ucuacgugaaggaaaugac

SEQ ID NO: 1653115 - RNA, 19 nt, Artificial Sequence
  Description of Artificial Sequence: Synthetic oligonucleotide
aagggcgucgggaaaacgc

SEQ ID NO: 1653116 - RNA, 19 nt, Artificial Sequence
  Description of Artificial Sequence: Synthetic oligonucleotide
aaauacaugagcgguguga

SEQ ID NO: 1653117 - RNA, 19 nt, Artificial Sequence
  Description of Artificial Sequence: Synthetic oligonucleotide
aaggcguccaucccacugg

SEQ ID NO: 1653118 - RNA, 19 nt, Artificial Sequence
  Description of Artificial Sequence: Synthetic oligonucleotide
acuuacuggggacagucuc

SEQ ID NO: 1653119 - RNA, 19 nt, Artificial Sequence
  Description of Artificial Sequence: Synthetic oligonucleotide
aaugccgccaacgugacau

SEQ ID NO: 1653120 - RNA, 19 nt, Artificial Sequence
  Description of Artificial Sequence: Synthetic oligonucleotide
uuaaauacaugagcggugu

SEQ ID NO: 1653121 - RNA, 19 nt, Artificial Sequence
  Description of Artificial Sequence: Synthetic oligonucleotide
gucgggaaaacgcugggcg

SEQ ID NO: 1653122 - RNA, 19 nt, Artificial Sequence
  Description of Artificial Sequence: Synthetic oligonucleotide
uggauaucuacugauuccc

SEQ ID NO: 1653123 - RNA, 19 nt, Artificial Sequence
  Description of Artificial Sequence: Synthetic oligonucleotide
ugugggguugaauaaguac

SEQ ID NO: 1653124 - RNA, 19 nt, Artificial Sequence
  Description of Artificial Sequence: Synthetic oligonucleotide
caucuguucauagauuacg

SEQ ID NO: 1653125 - RNA, 19 nt, Artificial Sequence
  Description of Artificial Sequence: Synthetic oligonucleotide
ugauaacagucacuccagg

SEQ ID NO: 1653126 - RNA, 19 nt, Artificial Sequence
  Description of Artificial Sequence: Synthetic oligonucleotide
ucgggaaagaagacuacca

SEQ ID NO: 1653127 - RNA, 19 nt, Artificial Sequence
  Description of Artificial Sequence: Synthetic oligonucleotide
auuacgaaaagggcgucgg

SEQ ID NO: 1653128 - RNA, 19 nt, Artificial Sequence
  Description of Artificial Sequence: Synthetic oligonucleotide
auaaaucaagcuggagagc

SEQ ID NO: 1653129 - RNA, 19 nt, Artificial Sequence
  Description of Artificial Sequence: Synthetic oligonucleotide
aaaucaagcuggagagccc

SEQ ID NO: 1653130 - RNA, 19 nt, Artificial Sequence
  Description of Artificial Sequence: Synthetic oligonucleotide
uaaguaucuuugauucuga

SEQ ID NO: 1653131 - RNA, 19 nt, Artificial Sequence
  Description of Artificial Sequence: Synthetic oligonucleotide
uacacaaguaaguaucuuu

SEQ ID NO: 1653132 - RNA, 19 nt, Artificial Sequence
  Description of Artificial Sequence: Synthetic oligonucleotide
cacacuucggccaccauac

SEQ ID NO: 1653133 - RNA, 19 nt, Artificial Sequence
  Description of Artificial Sequence: Synthetic oligonucleotide
uguugaaugccgccaacgu

SEQ ID NO: 1653134 - RNA, 19 nt, Artificial Sequence
  Description of Artificial Sequence: Synthetic oligonucleotide
guucauagauuacgaaaag

SEQ ID NO: 1653135 - RNA, 19 nt, Artificial Sequence
  Description of Artificial Sequence: Synthetic oligonucleotide
uguuacuguuacauucuga

SEQ ID NO: 1653136 - RNA, 19 nt, Artificial Sequence
  Description of Artificial Sequence: Synthetic oligonucleotide
auaucuacugauucccaga

SEQ ID NO: 1653137 - RNA, 19 nt, Artificial Sequence
  Description of Artificial Sequence: Synthetic oligonucleotide
ugggguugaauaaguacca

SEQ ID NO: 1653138 - RNA, 19 nt, Artificial Sequence
  Description of Artificial Sequence: Synthetic oligonucleotide
uuguugaaugccgccaacg

SEQ ID NO: 1653139 - RNA, 19 nt, Artificial Sequence
  Description of Artificial Sequence: Synthetic oligonucleotide
aggaugaaauagugggcac

SEQ ID NO: 1653140 - RNA, 19 nt, Artificial Sequence
  Description of Artificial Sequence: Synthetic oligonucleotide
ugucucuacgugaaggaaa

SEQ ID NO: 1653141 - RNA, 19 nt, Artificial Sequence
  Description of Artificial Sequence: Synthetic oligonucleotide
agaaagaucuaaugccacu

SEQ ID NO: 1653142 - RNA, 19 nt, Artificial Sequence
  Description of Artificial Sequence: Synthetic oligonucleotide
ucuuugauucugauaguau

SEQ ID NO: 1653143 - RNA, 19 nt, Artificial Sequence
  Description of Artificial Sequence: Synthetic oligonucleotide
agaaccagaaccugaguau

SEQ ID NO: 1653144 - RNA, 19 nt, Artificial Sequence
  Description of Artificial Sequence: Synthetic oligonucleotide
aucuaaugccacugugugg

SEQ ID NO: 1653145 - RNA, 19 nt, Artificial Sequence
  Description of Artificial Sequence: Synthetic oligonucleotide
ugaaucucagggcaauuau

SEQ ID NO: 1653146 - RNA, 19 nt, Artificial Sequence
  Description of Artificial Sequence: Synthetic oligonucleotide
gaugaaauagugggcacac

SEQ ID NO: 1653147 - RNA, 19 nt, Artificial Sequence
  Description of Artificial Sequence: Synthetic oligonucleotide
uagucgagggagcucacgc

SEQ ID NO: 1653148 - RNA, 19 nt, Artificial Sequence
  Description of Artificial Sequence: Synthetic oligonucleotide
gauuacgaaaagggcgucg

SEQ ID NO: 1653149 - RNA, 19 nt, Artificial Sequence
  Description of Artificial Sequence: Synthetic oligonucleotide
auuaaauacaugagcggug

SEQ ID NO: 1653150 - RNA, 19 nt, Artificial Sequence
  Description of Artificial Sequence: Synthetic oligonucleotide
uucuguuguugaaugccgc

SEQ ID NO: 1653151 - RNA, 19 nt, Artificial Sequence
  Description of Artificial Sequence: Synthetic oligonucleotide
auacucagagcucaacccu

SEQ ID NO: 1653152 - RNA, 19 nt, Artificial Sequence
  Description of Artificial Sequence: Synthetic oligonucleotide
acacaaguaaguaucuuug

SEQ ID NO: 1653153 - RNA, 19 nt, Artificial Sequence
  Description of Artificial Sequence: Synthetic oligonucleotide
uuacgaaaagggcgucggg

SEQ ID NO: 1653154 - RNA, 19 nt, Artificial Sequence
  Description of Artificial Sequence: Synthetic oligonucleotide
ugaguaucugaaagccuug

SEQ ID NO: 1653155 - RNA, 19 nt, Artificial Sequence
  Description of Artificial Sequence: Synthetic oligonucleotide
gauagaacucguucagguc

SEQ ID NO: 1653156 - RNA, 19 nt, Artificial Sequence
  Description of Artificial Sequence: Synthetic oligonucleotide
cauuaauggccauggcacc

SEQ ID NO: 1653157 - RNA, 19 nt, Artificial Sequence
  Description of Artificial Sequence: Synthetic oligonucleotide
uucuacugggauucugacc

SEQ ID NO: 1653158 - RNA, 19 nt, Artificial Sequence
  Description of Artificial Sequence: Synthetic oligonucleotide
gcaacauuaauggccaugg

SEQ ID NO: 1653159 - RNA, 19 nt, Artificial Sequence
  Description of Artificial Sequence: Synthetic oligonucleotide
gucaaauugauaacaguca

SEQ ID NO: 1653160 - RNA, 19 nt, Artificial Sequence
  Description of Artificial Sequence: Synthetic oligonucleotide
auaaaggcguccaucccac

SEQ ID NO: 1653161 - RNA, 19 nt, Artificial Sequence
  Description of Artificial Sequence: Synthetic oligonucleotide
aagaagacuaccaggccgu

SEQ ID NO: 1653162 - RNA, 19 nt, Artificial Sequence
  Description of Artificial Sequence: Synthetic oligonucleotide
ucuaccacacuucggccac

SEQ ID NO: 1653163 - RNA, 19 nt, Artificial Sequence
  Description of Artificial Sequence: Synthetic oligonucleotide
aaaagggcgucgggaaaac

SEQ ID NO: 1653164 - RNA, 19 nt, Artificial Sequence
  Description of Artificial Sequence: Synthetic oligonucleotide
ucuguucauagauuacgaa

SEQ ID NO: 1653165 - RNA, 19 nt, Artificial Sequence
  Description of Artificial Sequence: Synthetic oligonucleotide
auagugggcacacuucaga

SEQ ID NO: 1653166 - RNA, 19 nt, Artificial Sequence
  Description of Artificial Sequence: Synthetic oligonucleotide
ucaucuguucauagauuac

SEQ ID NO: 1653167 - RNA, 19 nt, Artificial Sequence
  Description of Artificial Sequence: Synthetic oligonucleotide
aguacagguucuaccacac

SEQ ID NO: 1653168 - RNA, 19 nt, Artificial Sequence
  Description of Artificial Sequence: Synthetic oligonucleotide
ccauacacaaguaaguauc

SEQ ID NO: 1653169 - RNA, 19 nt, Artificial Sequence
  Description of Artificial Sequence: Synthetic oligonucleotide
gaauacagagcucaauggu

SEQ ID NO: 1653170 - RNA, 19 nt, Artificial Sequence
  Description of Artificial Sequence: Synthetic oligonucleotide
cuguucauagauuacgaaa

SEQ ID NO: 1653171 - RNA, 19 nt, Artificial Sequence
  Description of Artificial Sequence: Synthetic oligonucleotide
uguuguugaaugccgccaa

SEQ ID NO: 1653172 - RNA, 19 nt, Artificial Sequence
  Description of Artificial Sequence: Synthetic oligonucleotide
agcuugaaggaagcgcugc

SEQ ID NO: 1653173 - RNA, 19 nt, Artificial Sequence
  Description of Artificial Sequence: Synthetic oligonucleotide
guugaaugccgccaacgug

SEQ ID NO: 1653174 - RNA, 19 nt, Artificial Sequence
  Description of Artificial Sequence: Synthetic oligonucleotide
aguaucuuugauucugaua

SEQ ID NO: 1653175 - RNA, 19 nt, Artificial Sequence
  Description of Artificial Sequence: Synthetic oligonucleotide
uucugauaguauacuucug

SEQ ID NO: 1653176 - RNA, 19 nt, Artificial Sequence
  Description of Artificial Sequence: Synthetic oligonucleotide
cacggcuucggccaggagc

SEQ ID NO: 1653177 - RNA, 19 nt, Artificial Sequence
  Description of Artificial Sequence: Synthetic oligonucleotide
ucugacccaagccauuguc

SEQ ID NO: 1653178 - RNA, 19 nt, Artificial Sequence
  Description of Artificial Sequence: Synthetic oligonucleotide
cagguucuaccacacuucg

SEQ ID NO: 1653179 - RNA, 19 nt, Artificial Sequence
  Description of Artificial Sequence: Synthetic oligonucleotide
ccauuaaauacaugagcgg

SEQ ID NO: 1653180 - RNA, 19 nt, Artificial Sequence
  Description of Artificial Sequence: Synthetic oligonucleotide
uacgaaaagggcgucggga

SEQ ID NO: 1653181 - RNA, 19 nt, Artificial Sequence
  Description of Artificial Sequence: Synthetic oligonucleotide
uagaacucguucaggucca

SEQ ID NO: 1653182 - RNA, 19 nt, Artificial Sequence
  Description of Artificial Sequence: Synthetic oligonucleotide
ugagcggugugagaguacc

SEQ ID NO: 1653183 - RNA, 19 nt, Artificial Sequence
  Description of Artificial Sequence: Synthetic oligonucleotide
gugugagaguaccuugggg

SEQ ID NO: 1653184 - RNA, 19 nt, Artificial Sequence
  Description of Artificial Sequence: Synthetic oligonucleotide
aucuacugauucccagagg

SEQ ID NO: 1653185 - RNA, 19 nt, Artificial Sequence
  Description of Artificial Sequence: Synthetic oligonucleotide
guaccuugggguuauggga

SEQ ID NO: 1653186 - RNA, 19 nt, Artificial Sequence
  Description of Artificial Sequence: Synthetic oligonucleotide
ugacccaagccauugucuc

SEQ ID NO: 1653187 - RNA, 19 nt, Artificial Sequence
  Description of Artificial Sequence: Synthetic oligonucleotide
ugugguugugcaacauuaa

SEQ ID NO: 1653188 - RNA, 19 nt, Artificial Sequence
  Description of Artificial Sequence: Synthetic oligonucleotide
agcucaaugguuccucaga

SEQ ID NO: 1653189 - RNA, 19 nt, Artificial Sequence
  Description of Artificial Sequence: Synthetic oligonucleotide
ugcccaaaggcgucucgcg

SEQ ID NO: 1653190 - RNA, 19 nt, Artificial Sequence
  Description of Artificial Sequence: Synthetic oligonucleotide
gucgcugcaacaugauuug

SEQ ID NO: 1653191 - RNA, 19 nt, Artificial Sequence
  Description of Artificial Sequence: Synthetic oligonucleotide
ggguugaauaaguaccaag

SEQ ID NO: 1653192 - RNA, 19 nt, Artificial Sequence
  Description of Artificial Sequence: Synthetic oligonucleotide
uacugauucccagaggaau

SEQ ID NO: 1653193 - RNA, 19 nt, Artificial Sequence
  Description of Artificial Sequence: Synthetic oligonucleotide
caaagucgcugcaacauga

SEQ ID NO: 1653194 - RNA, 19 nt, Artificial Sequence
  Description of Artificial Sequence: Synthetic oligonucleotide
agaucuaaugccacugugu

SEQ ID NO: 1653195 - RNA, 19 nt, Artificial Sequence
  Description of Artificial Sequence: Synthetic oligonucleotide
cuacgugaaggaaaugaca

SEQ ID NO: 1653196 - RNA, 19 nt, Artificial Sequence
  Description of Artificial Sequence: Synthetic oligonucleotide
ucgagggagcucacgcagg

SEQ ID NO: 1653197 - RNA, 19 nt, Artificial Sequence
  Description of Artificial Sequence: Synthetic oligonucleotide
acagucucccuccgagaac

SEQ ID NO: 1653198 - RNA, 19 nt, Artificial Sequence
  Description of Artificial Sequence: Synthetic oligonucleotide
uuauugcccuguacuuaag

SEQ ID NO: 1653199 - RNA, 19 nt, Artificial Sequence
  Description of Artificial Sequence: Synthetic oligonucleotide
agggucucgacccgcugac

SEQ ID NO: 1653200 - RNA, 19 nt, Artificial Sequence
  Description of Artificial Sequence: Synthetic oligonucleotide
cucuacgugaaggaaauga

SEQ ID NO: 1653201 - RNA, 19 nt, Artificial Sequence
  Description of Artificial Sequence: Synthetic oligonucleotide
agucacuccaggaacugag

SEQ ID NO: 1653202 - RNA, 19 nt, Artificial Sequence
  Description of Artificial Sequence: Synthetic oligonucleotide
cugccaggaugaaauagug

SEQ ID NO: 1653203 - RNA, 19 nt, Artificial Sequence
  Description of Artificial Sequence: Synthetic oligonucleotide
cuccacgucgggaaagaag

SEQ ID NO: 1653204 - RNA, 19 nt, Artificial Sequence
  Description of Artificial Sequence: Synthetic oligonucleotide
uauccucacuucuguauaa

SEQ ID NO: 1653205 - RNA, 19 nt, Artificial Sequence
  Description of Artificial Sequence: Synthetic oligonucleotide
ucuuauugcccuguacuua

SEQ ID NO: 1653206 - RNA, 19 nt, Artificial Sequence
  Description of Artificial Sequence: Synthetic oligonucleotide
cagucucccuccgagaacc

SEQ ID NO: 1653207 - RNA, 19 nt, Artificial Sequence
  Description of Artificial Sequence: Synthetic oligonucleotide
agucgcugcaacaugauuu

SEQ ID NO: 1653208 - RNA, 19 nt, Artificial Sequence
  Description of Artificial Sequence: Synthetic oligonucleotide
agcgauaagugcuccuccu

SEQ ID NO: 1653209 - RNA, 19 nt, Artificial Sequence
  Description of Artificial Sequence: Synthetic oligonucleotide
aagcugauacucagagcuc

SEQ ID NO: 1653210 - RNA, 19 nt, Artificial Sequence
  Description of Artificial Sequence: Synthetic oligonucleotide
acgaaaagggcgucgggaa

SEQ ID NO: 1653211 - RNA, 19 nt, Artificial Sequence
  Description of Artificial Sequence: Synthetic oligonucleotide
augggaaugccgacccucc

SEQ ID NO: 1653212 - RNA, 19 nt, Artificial Sequence
  Description of Artificial Sequence: Synthetic oligonucleotide
cauuaaauacaugagcggu

SEQ ID NO: 1653213 - RNA, 19 nt, Artificial Sequence
  Description of Artificial Sequence: Synthetic oligonucleotide
aaagggcgucgggaaaacg

SEQ ID NO: 1653214 - RNA, 19 nt, Artificial Sequence
  Description of Artificial Sequence: Synthetic oligonucleotide
uaugggaaugccgacccuc

SEQ ID NO: 1653215 - RNA, 19 nt, Artificial Sequence
  Description of Artificial Sequence: Synthetic oligonucleotide
ugggaaugccgacccuccg

SEQ ID NO: 1653216 - RNA, 19 nt, Artificial Sequence
  Description of Artificial Sequence: Synthetic oligonucleotide
gaaucucagggcaauuauc

SEQ ID NO: 1653217 - RNA, 19 nt, Artificial Sequence
  Description of Artificial Sequence: Synthetic oligonucleotide
ugaauccagaccccuccaa

SEQ ID NO: 1653218 - RNA, 19 nt, Artificial Sequence
  Description of Artificial Sequence: Synthetic oligonucleotide
gacagucacuuaguacagg

SEQ ID NO: 1653219 - RNA, 19 nt, Artificial Sequence
  Description of Artificial Sequence: Synthetic oligonucleotide
ggaaugccgacccuccggg

SEQ ID NO: 1653220 - RNA, 19 nt, Artificial Sequence
  Description of Artificial Sequence: Synthetic oligonucleotide
auccagaccccuccaacca

SEQ ID NO: 1653221 - RNA, 19 nt, Artificial Sequence
  Description of Artificial Sequence: Synthetic oligonucleotide
agagcucaacccuguuguc

SEQ ID NO: 1653222 - RNA, 19 nt, Artificial Sequence
  Description of Artificial Sequence: Synthetic oligonucleotide
gacuaccaggccgugcagg

SEQ ID NO: 1653223 - RNA, 19 nt, Artificial Sequence
  Description of Artificial Sequence: Synthetic oligonucleotide
auucugacccaagccauug

SEQ ID NO: 1653224 - RNA, 19 nt, Artificial Sequence
  Description of Artificial Sequence: Synthetic oligonucleotide
gcuggauaucuacugauuc

SEQ ID NO: 1653225 - RNA, 19 nt, Artificial Sequence
  Description of Artificial Sequence: Synthetic oligonucleotide
acgugaaggaaaugacagu

SEQ ID NO: 1653226 - RNA, 19 nt, Artificial Sequence
  Description of Artificial Sequence: Synthetic oligonucleotide
aucuguucauagauuacga

SEQ ID NO: 1653227 - RNA, 19 nt, Artificial Sequence
  Description of Artificial Sequence: Synthetic oligonucleotide
cacuucggccaccauacac

SEQ ID NO: 1653228 - RNA, 19 nt, Artificial Sequence
  Description of Artificial Sequence: Synthetic oligonucleotide
acuucggccaccauacaca

SEQ ID NO: 1653229 - RNA, 19 nt, Artificial Sequence
  Description of Artificial Sequence: Synthetic oligonucleotide
cacaaguaaguaucuuuga

SEQ ID NO: 1653230 - RNA, 19 nt, Artificial Sequence
  Description of Artificial Sequence: Synthetic oligonucleotide
uuaauggccauggcaccga

SEQ ID NO: 1653231 - RNA, 19 nt, Artificial Sequence
  Description of Artificial Sequence: Synthetic oligonucleotide
cacuaugggaaugccgacc

SEQ ID NO: 1653232 - RNA, 19 nt, Artificial Sequence
  Description of Artificial Sequence: Synthetic oligonucleotide
ggugagguggcguccaggc

SEQ ID NO: 1653233 - RNA, 19 nt, Artificial Sequence
  Description of Artificial Sequence: Synthetic oligonucleotide
gaaggaagcgcugcaccug

SEQ ID NO: 1653234 - RNA, 19 nt, Artificial Sequence
  Description of Artificial Sequence: Synthetic oligonucleotide
aaccagaaccugaguaucu

SEQ ID NO: 1653235 - RNA, 19 nt, Artificial Sequence
  Description of Artificial Sequence: Synthetic oligonucleotide
cacacuucagaugccacuc

SEQ ID NO: 1653236 - RNA, 19 nt, Artificial Sequence
  Description of Artificial Sequence: Synthetic oligonucleotide
ugaaugccgccaacgugac

SEQ ID NO: 1653237 - RNA, 19 nt, Artificial Sequence
  Description of Artificial Sequence: Synthetic oligonucleotide
uggugugauaaaggcgucc

SEQ ID NO: 1653238 - RNA, 19 nt, Artificial Sequence
  Description of Artificial Sequence: Synthetic oligonucleotide
agauuacgaaaagggcguc

SEQ ID NO: 1653239 - RNA, 19 nt, Artificial Sequence
  Description of Artificial Sequence: Synthetic oligonucleotide
guacuuaaggaagaaagau

SEQ ID NO: 1653240 - RNA, 19 nt, Artificial Sequence
  Description of Artificial Sequence: Synthetic oligonucleotide
ggcucgagggucucgaccc

SEQ ID NO: 1653241 - RNA, 19 nt, Artificial Sequence
  Description of Artificial Sequence: Synthetic oligonucleotide
agccgcccaaagucgcugc

SEQ ID NO: 1653242 - RNA, 19 nt, Artificial Sequence
  Description of Artificial Sequence: Synthetic oligonucleotide
aaagggcucgagggucucg

SEQ ID NO: 1653243 - RNA, 19 nt, Artificial Sequence
  Description of Artificial Sequence: Synthetic oligonucleotide
gaugagggccgcggcaccg

SEQ ID NO: 1653244 - RNA, 19 nt, Artificial Sequence
  Description of Artificial Sequence: Synthetic oligonucleotide
aggcuggauaucuacugau

SEQ ID NO: 1653245 - RNA, 19 nt, Artificial Sequence
  Description of Artificial Sequence: Synthetic oligonucleotide
gaaugccgacccuccgggg

SEQ ID NO: 1653246 - RNA, 19 nt, Artificial Sequence
  Description of Artificial Sequence: Synthetic oligonucleotide
cagcgauaagugcuccucc

SEQ ID NO: 1653247 - RNA, 19 nt, Artificial Sequence
  Description of Artificial Sequence: Synthetic oligonucleotide
augaauccagaccccucca

SEQ ID NO: 1653248 - RNA, 19 nt, Artificial Sequence
  Description of Artificial Sequence: Synthetic oligonucleotide
caaauugauaacagucacu

SEQ ID NO: 1653249 - RNA, 19 nt, Artificial Sequence
  Description of Artificial Sequence: Synthetic oligonucleotide
caagccauugucucuacgu

SEQ ID NO: 1653250 - RNA, 19 nt, Artificial Sequence
  Description of Artificial Sequence: Synthetic oligonucleotide
guuaugggaggcuggauau

SEQ ID NO: 1653251 - RNA, 19 nt, Artificial Sequence
  Description of Artificial Sequence: Synthetic oligonucleotide
gaagacuaccaggccgugc

SEQ ID NO: 1653252 - RNA, 19 nt, Artificial Sequence
  Description of Artificial Sequence: Synthetic oligonucleotide
cagaugccacuccucaaac

SEQ ID NO: 1653253 - RNA, 19 nt, Artificial Sequence
  Description of Artificial Sequence: Synthetic oligonucleotide
uugcccaaaggcgucucgc

SEQ ID NO: 1653254 - RNA, 19 nt, Artificial Sequence
  Description of Artificial Sequence: Synthetic oligonucleotide
gaaagccuugucauggugu

SEQ ID NO: 1653255 - RNA, 19 nt, Artificial Sequence
  Description of Artificial Sequence: Synthetic oligonucleotide
gcugacgcuccucugcggg

SEQ ID NO: 1653256 - RNA, 19 nt, Artificial Sequence
  Description of Artificial Sequence: Synthetic oligonucleotide
cauacacaaguaaguaucu

SEQ ID NO: 1653257 - RNA, 19 nt, Artificial Sequence
  Description of Artificial Sequence: Synthetic oligonucleotide
gggaaugccgacccuccgg

SEQ ID NO: 1653258 - RNA, 19 nt, Artificial Sequence
  Description of Artificial Sequence: Synthetic oligonucleotide
gucacuccaggaacugagg

SEQ ID NO: 1653259 - RNA, 19 nt, Artificial Sequence
  Description of Artificial Sequence: Synthetic oligonucleotide
cugaguaucugaaagccuu

SEQ ID NO: 1653260 - RNA, 19 nt, Artificial Sequence
  Description of Artificial Sequence: Synthetic oligonucleotide
auacaugagcggugugaga

SEQ ID NO: 1653261 - RNA, 19 nt, Artificial Sequence
  Description of Artificial Sequence: Synthetic oligonucleotide
aggcacuaugggaaugccg

SEQ ID NO: 1653262 - RNA, 19 nt, Artificial Sequence
  Description of Artificial Sequence: Synthetic oligonucleotide
cucgccuagucgagggagc

SEQ ID NO: 1653263 - RNA, 19 nt, Artificial Sequence
  Description of Artificial Sequence: Synthetic oligonucleotide
uccagucuuauugcccugu

SEQ ID NO: 1653264 - RNA, 19 nt, Artificial Sequence
  Description of Artificial Sequence: Synthetic oligonucleotide
acaugagcggugugagagu

SEQ ID NO: 1653265 - RNA, 19 nt, Artificial Sequence
  Description of Artificial Sequence: Synthetic oligonucleotide
gaaaacgcugggcggccca

SEQ ID NO: 1653266 - RNA, 19 nt, Artificial Sequence
  Description of Artificial Sequence: Synthetic oligonucleotide
ugagaguaccuugggguua

SEQ ID NO: 1653267 - RNA, 19 nt, Artificial Sequence
  Description of Artificial Sequence: Synthetic oligonucleotide
cuagucgagggagcucacg

SEQ ID NO: 1653268 - RNA, 19 nt, Artificial Sequence
  Description of Artificial Sequence: Synthetic oligonucleotide
aagggcucgagggucucga

SEQ ID NO: 1653269 - RNA, 19 nt, Artificial Sequence
  Description of Artificial Sequence: Synthetic oligonucleotide
uccagcgauaagugcuccu

SEQ ID NO: 1653270 - RNA, 19 nt, Artificial Sequence
  Description of Artificial Sequence: Synthetic oligonucleotide
cugacgcuccucugcgggg

SEQ ID NO: 1653271 - RNA, 19 nt, Artificial Sequence
  Description of Artificial Sequence: Synthetic oligonucleotide
uucggccaccauacacaag

SEQ ID NO: 1653272 - RNA, 19 nt, Artificial Sequence
  Description of Artificial Sequence: Synthetic oligonucleotide
uccgcgcccaggaugcggu

SEQ ID NO: 1653273 - RNA, 19 nt, Artificial Sequence
  Description of Artificial Sequence: Synthetic oligonucleotide
ccgagaaccagaaccugag

SEQ ID NO: 1653274 - RNA, 19 nt, Artificial Sequence
  Description of Artificial Sequence: Synthetic oligonucleotide
acgucgggaaagaagacua

SEQ ID NO: 1653275 - RNA, 19 nt, Artificial Sequence
  Description of Artificial Sequence: Synthetic oligonucleotide
ugggcacacuucagaugcc

SEQ ID NO: 1653276 - RNA, 19 nt, Artificial Sequence
  Description of Artificial Sequence: Synthetic oligonucleotide
ugcaggcacuaugggaaug

SEQ ID NO: 1653277 - RNA, 19 nt, Artificial Sequence
  Description of Artificial Sequence: Synthetic oligonucleotide
ucacuuaguacagguucua

SEQ ID NO: 1653278 - RNA, 19 nt, Artificial Sequence
  Description of Artificial Sequence: Synthetic oligonucleotide
agacuaccaggccgugcag

SEQ ID NO: 1653279 - RNA, 19 nt, Artificial Sequence
  Description of Artificial Sequence: Synthetic oligonucleotide
ccagcggcgauagaacucg

SEQ ID NO: 1653280 - RNA, 19 nt, Artificial Sequence
  Description of Artificial Sequence: Synthetic oligonucleotide
cugcaacaugauuugccca

SEQ ID NO: 1653281 - RNA, 19 nt, Artificial Sequence
  Description of Artificial Sequence: Synthetic oligonucleotide
caccgauguugugucaagc

SEQ ID NO: 1653282 - RNA, 19 nt, Artificial Sequence
  Description of Artificial Sequence: Synthetic oligonucleotide
aggaaaugacagucacuua

SEQ ID NO: 1653283 - RNA, 19 nt, Artificial Sequence
  Description of Artificial Sequence: Synthetic oligonucleotide
ucgagggucucgacccgcu

SEQ ID NO: 1653284 - RNA, 19 nt, Artificial Sequence
  Description of Artificial Sequence: Synthetic oligonucleotide
auggugugauaaaggcguc

SEQ ID NO: 1653285 - RNA, 19 nt, Artificial Sequence
  Description of Artificial Sequence: Synthetic oligonucleotide
gcggcgauagaacucguuc

SEQ ID NO: 1653286 - RNA, 19 nt, Artificial Sequence
  Description of Artificial Sequence: Synthetic oligonucleotide
aggcccgcgcaguccaggg

SEQ ID NO: 1653287 - RNA, 19 nt, Artificial Sequence
  Description of Artificial Sequence: Synthetic oligonucleotide
ccgauguugugucaagcug

SEQ ID NO: 1653288 - RNA, 19 nt, Artificial Sequence
  Description of Artificial Sequence: Synthetic oligonucleotide
ucucuacgugaaggaaaug

SEQ ID NO: 1653289 - RNA, 19 nt, Artificial Sequence
  Description of Artificial Sequence: Synthetic oligonucleotide
acagagcucaaugguuccu

SEQ ID NO: 1653290 - RNA, 19 nt, Artificial Sequence
  Description of Artificial Sequence: Synthetic oligonucleotide
ugacgcuccucugcgggga

SEQ ID NO: 1653291 - RNA, 19 nt, Artificial Sequence
  Description of Artificial Sequence: Synthetic oligonucleotide
ggaugaaauagugggcaca

SEQ ID NO: 1653292 - RNA, 19 nt, Artificial Sequence
  Description of Artificial Sequence: Synthetic oligonucleotide
ggcgucgggaaaacgcugg

SEQ ID NO: 1653293 - RNA, 19 nt, Artificial Sequence
  Description of Artificial Sequence: Synthetic oligonucleotide
agggcucgagggucucgac

SEQ ID NO: 1653294 - RNA, 19 nt, Artificial Sequence
  Description of Artificial Sequence: Synthetic oligonucleotide
cagagcucaaugguuccuc

SEQ ID NO: 1653295 - RNA, 19 nt, Artificial Sequence
  Description of Artificial Sequence: Synthetic oligonucleotide
ucagggcaauuauccucac

SEQ ID NO: 1653296 - RNA, 19 nt, Artificial Sequence
  Description of Artificial Sequence: Synthetic oligonucleotide
uaaaggcguccaucccacu

SEQ ID NO: 1653297 - RNA, 19 nt, Artificial Sequence
  Description of Artificial Sequence: Synthetic oligonucleotide
ggccucgccuagucgaggg

SEQ ID NO: 1653298 - RNA, 19 nt, Artificial Sequence
  Description of Artificial Sequence: Synthetic oligonucleotide
ucucgacccgcugacgcuc

SEQ ID NO: 1653299 - RNA, 19 nt, Artificial Sequence
  Description of Artificial Sequence: Synthetic oligonucleotide
ucugaaucucagggcaauu

SEQ ID NO: 1653300 - RNA, 19 nt, Artificial Sequence
  Description of Artificial Sequence: Synthetic oligonucleotide
augagcggugugagaguac

SEQ ID NO: 1653301 - RNA, 19 nt, Artificial Sequence
  Description of Artificial Sequence: Synthetic oligonucleotide
uacugggauucugacccaa

SEQ ID NO: 1653302 - RNA, 19 nt, Artificial Sequence
  Description of Artificial Sequence: Synthetic oligonucleotide
gcucaaugguuccucagaa

SEQ ID NO: 1653303 - RNA, 19 nt, Artificial Sequence
  Description of Artificial Sequence: Synthetic oligonucleotide
agcggugugagaguaccuu

SEQ ID NO: 1653304 - RNA, 19 nt, Artificial Sequence
  Description of Artificial Sequence: Synthetic oligonucleotide
ucgcugcaacaugauuugc

SEQ ID NO: 1653305 - RNA, 19 nt, Artificial Sequence
  Description of Artificial Sequence: Synthetic oligonucleotide
agguaggucagcacggcuu

SEQ ID NO: 1653306 - RNA, 19 nt, Artificial Sequence
  Description of Artificial Sequence: Synthetic oligonucleotide
ucgccuagucgagggagcu

SEQ ID NO: 1653307 - RNA, 19 nt, Artificial Sequence
  Description of Artificial Sequence: Synthetic oligonucleotide
cucgcggcuucaucuguuc

SEQ ID NO: 1653308 - RNA, 19 nt, Artificial Sequence
  Description of Artificial Sequence: Synthetic oligonucleotide
gucacuuaguacagguucu

SEQ ID NO: 1653309 - RNA, 19 nt, Artificial Sequence
  Description of Artificial Sequence: Synthetic oligonucleotide
cuuuggucugagaaagaau

SEQ ID NO: 1653310 - RNA, 19 nt, Artificial Sequence
  Description of Artificial Sequence: Synthetic oligonucleotide
gggcaauuauccucacuuc

SEQ ID NO: 1653311 - RNA, 19 nt, Artificial Sequence
  Description of Artificial Sequence: Synthetic oligonucleotide
gucuuauugcccuguacuu

SEQ ID NO: 1653312 - RNA, 19 nt, Artificial Sequence
  Description of Artificial Sequence: Synthetic oligonucleotide
gcggugugagaguaccuug

SEQ ID NO: 1653313 - RNA, 19 nt, Artificial Sequence
  Description of Artificial Sequence: Synthetic oligonucleotide
cugaaucucagggcaauua

SEQ ID NO: 1653314 - RNA, 19 nt, Artificial Sequence
  Description of Artificial Sequence: Synthetic oligonucleotide
cucacgcagguccgcgccc

SEQ ID NO: 1653315 - RNA, 19 nt, Artificial Sequence
  Description of Artificial Sequence: Synthetic oligonucleotide
caggcacuaugggaaugcc

SEQ ID NO: 1653316 - RNA, 19 nt, Artificial Sequence
  Description of Artificial Sequence: Synthetic oligonucleotide
cgauaagugcuccuccuug

SEQ ID NO: 1653317 - RNA, 19 nt, Artificial Sequence
  Description of Artificial Sequence: Synthetic oligonucleotide
cucgacccgcugacgcucc

SEQ ID NO: 1653318 - RNA, 19 nt, Artificial Sequence
  Description of Artificial Sequence: Synthetic oligonucleotide
cuguuacauucugaaucuc

SEQ ID NO: 1653319 - RNA, 19 nt, Artificial Sequence
  Description of Artificial Sequence: Synthetic oligonucleotide
ggaacugaggaggaaugaa

SEQ ID NO: 1653320 - RNA, 19 nt, Artificial Sequence
  Description of Artificial Sequence: Synthetic oligonucleotide
gauguugugucaagcugau

SEQ ID NO: 1653321 - RNA, 19 nt, Artificial Sequence
  Description of Artificial Sequence: Synthetic oligonucleotide
cuccgagaaccagaaccug

SEQ ID NO: 1653322 - RNA, 19 nt, Artificial Sequence
  Description of Artificial Sequence: Synthetic oligonucleotide
gacccaagccauugucucu

SEQ ID NO: 1653323 - RNA, 19 nt, Artificial Sequence
  Description of Artificial Sequence: Synthetic oligonucleotide
ugggcggcccaggcgauga

SEQ ID NO: 1653324 - RNA, 19 nt, Artificial Sequence
  Description of Artificial Sequence: Synthetic oligonucleotide
agaugcugccaggaugaaa

SEQ ID NO: 1653325 - RNA, 19 nt, Artificial Sequence
  Description of Artificial Sequence: Synthetic oligonucleotide
auccucacuucuguauaaa

SEQ ID NO: 1653326 - RNA, 19 nt, Artificial Sequence
  Description of Artificial Sequence: Synthetic oligonucleotide
cuccagcgauaagugcucc

SEQ ID NO: 1653327 - RNA, 19 nt, Artificial Sequence
  Description of Artificial Sequence: Synthetic oligonucleotide
agaacucguucagguccag

SEQ ID NO: 1653328 - RNA, 19 nt, Artificial Sequence
  Description of Artificial Sequence: Synthetic oligonucleotide
cucgagggucucgacccgc

SEQ ID NO: 1653329 - RNA, 19 nt, Artificial Sequence
  Description of Artificial Sequence: Synthetic oligonucleotide
augagggccgcggcaccgg

SEQ ID NO: 1653330 - RNA, 19 nt, Artificial Sequence
  Description of Artificial Sequence: Synthetic oligonucleotide
gcaccgauguugugucaag

SEQ ID NO: 1653331 - RNA, 19 nt, Artificial Sequence
  Description of Artificial Sequence: Synthetic oligonucleotide
gcucacgcagguccgcgcc

SEQ ID NO: 1653332 - RNA, 19 nt, Artificial Sequence
  Description of Artificial Sequence: Synthetic oligonucleotide
gugagaguaccuugggguu

SEQ ID NO: 1653333 - RNA, 19 nt, Artificial Sequence
  Description of Artificial Sequence: Synthetic oligonucleotide
agagggcuuuggucugaga

SEQ ID NO: 1653334 - RNA, 19 nt, Artificial Sequence
  Description of Artificial Sequence: Synthetic oligonucleotide
caugagcggugugagagua

SEQ ID NO: 1653335 - RNA, 19 nt, Artificial Sequence
  Description of Artificial Sequence: Synthetic oligonucleotide
gcccgcgcaguccagggcc

SEQ ID NO: 1653336 - RNA, 19 nt, Artificial Sequence
  Description of Artificial Sequence: Synthetic oligonucleotide
acacuucggccaccauaca

SEQ ID NO: 1653337 - RNA, 19 nt, Artificial Sequence
  Description of Artificial Sequence: Synthetic oligonucleotide
aaggcgucucgcggcuuca

SEQ ID NO: 1653338 - RNA, 19 nt, Artificial Sequence
  Description of Artificial Sequence: Synthetic oligonucleotide
ggauaucuacugauuccca

SEQ ID NO: 1653339 - RNA, 19 nt, Artificial Sequence
  Description of Artificial Sequence: Synthetic oligonucleotide
uggcaccgauguuguguca

SEQ ID NO: 1653340 - RNA, 19 nt, Artificial Sequence
  Description of Artificial Sequence: Synthetic oligonucleotide
gccccuucuacugggauuc

SEQ ID NO: 1653341 - RNA, 19 nt, Artificial Sequence
  Description of Artificial Sequence: Synthetic oligonucleotide
gccuagucgagggagcuca

SEQ ID NO: 1653342 - RNA, 19 nt, Artificial Sequence
  Description of Artificial Sequence: Synthetic oligonucleotide
gcgucgggaaaacgcuggg

SEQ ID NO: 1653343 - RNA, 19 nt, Artificial Sequence
  Description of Artificial Sequence: Synthetic oligonucleotide
cuccaguaagcaggaucug

SEQ ID NO: 1653344 - RNA, 19 nt, Artificial Sequence
  Description of Artificial Sequence: Synthetic oligonucleotide
cccgcugacgcuccucugc

SEQ ID NO: 1653345 - RNA, 19 nt, Artificial Sequence
  Description of Artificial Sequence: Synthetic oligonucleotide
ccccauagaugcugccagg

SEQ ID NO: 1653346 - RNA, 19 nt, Artificial Sequence
  Description of Artificial Sequence: Synthetic oligonucleotide
augccacugugugggguug

SEQ ID NO: 1653347 - RNA, 19 nt, Artificial Sequence
  Description of Artificial Sequence: Synthetic oligonucleotide
acgcuccucugcggggagc

SEQ ID NO: 1653348 - RNA, 19 nt, Artificial Sequence
  Description of Artificial Sequence: Synthetic oligonucleotide
gccauugucucuacgugaa

SEQ ID NO: 1653349 - RNA, 19 nt, Artificial Sequence
  Description of Artificial Sequence: Synthetic oligonucleotide
ccagcgauaagugcuccuc

SEQ ID NO: 1653350 - RNA, 19 nt, Artificial Sequence
  Description of Artificial Sequence: Synthetic oligonucleotide
agcgugggugagguggcgu

SEQ ID NO: 1653351 - RNA, 19 nt, Artificial Sequence
  Description of Artificial Sequence: Synthetic oligonucleotide
agggccucgccuagucgag

SEQ ID NO: 1653352 - RNA, 19 nt, Artificial Sequence
  Description of Artificial Sequence: Synthetic oligonucleotide
ccaccauacacaaguaagu

SEQ ID NO: 1653353 - RNA, 19 nt, Artificial Sequence
  Description of Artificial Sequence: Synthetic oligonucleotide
cugaaagccuugucauggu

SEQ ID NO: 1653354 - RNA, 19 nt, Artificial Sequence
  Description of Artificial Sequence: Synthetic oligonucleotide
gccgccaacgugacauggg

SEQ ID NO: 1653355 - RNA, 19 nt, Artificial Sequence
  Description of Artificial Sequence: Synthetic oligonucleotide
gagaguaccuugggguuau

SEQ ID NO: 1653356 - RNA, 19 nt, Artificial Sequence
  Description of Artificial Sequence: Synthetic oligonucleotide
gggaaaacgcugggcggcc

SEQ ID NO: 1653357 - RNA, 19 nt, Artificial Sequence
  Description of Artificial Sequence: Synthetic oligonucleotide
ccgcugacgcuccucugcg

SEQ ID NO: 1653358 - RNA, 19 nt, Artificial Sequence
  Description of Artificial Sequence: Synthetic oligonucleotide
agcacggcuucggccagga

SEQ ID NO: 1653359 - RNA, 19 nt, Artificial Sequence
  Description of Artificial Sequence: Synthetic oligonucleotide
ccucgccuagucgagggag

SEQ ID NO: 1653360 - RNA, 19 nt, Artificial Sequence
  Description of Artificial Sequence: Synthetic oligonucleotide
ccauugucucuacgugaag

SEQ ID NO: 1653361 - RNA, 19 nt, Artificial Sequence
  Description of Artificial Sequence: Synthetic oligonucleotide
acccgcugacgcuccucug

SEQ ID NO: 1653362 - RNA, 19 nt, Artificial Sequence
  Description of Artificial Sequence: Synthetic oligonucleotide
cgauagaacucguucaggu

SEQ ID NO: 1653363 - RNA, 19 nt, Artificial Sequence
  Description of Artificial Sequence: Synthetic oligonucleotide
ccuugccaacugcaggcac

SEQ ID NO: 1653364 - RNA, 19 nt, Artificial Sequence
  Description of Artificial Sequence: Synthetic oligonucleotide
gcccaggcgaugagggccg

SEQ ID NO: 1653365 - RNA, 19 nt, Artificial Sequence
  Description of Artificial Sequence: Synthetic oligonucleotide
ggcaccgauguugugucaa

SEQ ID NO: 1653366 - RNA, 19 nt, Artificial Sequence
  Description of Artificial Sequence: Synthetic oligonucleotide
cagaccccuccaaccagaa

SEQ ID NO: 1653367 - RNA, 19 nt, Artificial Sequence
  Description of Artificial Sequence: Synthetic oligonucleotide
gcgucucgcggcuucaucu

SEQ ID NO: 1653368 - RNA, 19 nt, Artificial Sequence
  Description of Artificial Sequence: Synthetic oligonucleotide
cgggaaaacgcugggcggc

SEQ ID NO: 1653369 - RNA, 19 nt, Artificial Sequence
  Description of Artificial Sequence: Synthetic oligonucleotide
ggauucugacccaagccau

SEQ ID NO: 1653370 - RNA, 19 nt, Artificial Sequence
  Description of Artificial Sequence: Synthetic oligonucleotide
accacacuucggccaccau

SEQ ID NO: 1653371 - RNA, 19 nt, Artificial Sequence
  Description of Artificial Sequence: Synthetic oligonucleotide
cggcuucaucuguucauag

SEQ ID NO: 1653372 - RNA, 19 nt, Artificial Sequence
  Description of Artificial Sequence: Synthetic oligonucleotide
cgucgggaaagaagacuac

SEQ ID NO: 1653373 - RNA, 19 nt, Artificial Sequence
  Description of Artificial Sequence: Synthetic oligonucleotide
ggccuccacgucgggaaag

SEQ ID NO: 1653374 - RNA, 19 nt, Artificial Sequence
  Description of Artificial Sequence: Synthetic oligonucleotide
gggguugaauaaguaccaa

SEQ ID NO: 1653375 - RNA, 19 nt, Artificial Sequence
  Description of Artificial Sequence: Synthetic oligonucleotide
gucucgcggcuucaucugu

SEQ ID NO: 1653376 - RNA, 19 nt, Artificial Sequence
  Description of Artificial Sequence: Synthetic oligonucleotide
ugccgacccuccggggcug

SEQ ID NO: 1653377 - RNA, 19 nt, Artificial Sequence
  Description of Artificial Sequence: Synthetic oligonucleotide
ccacacuucggccaccaua

SEQ ID NO: 1653378 - RNA, 19 nt, Artificial Sequence
  Description of Artificial Sequence: Synthetic oligonucleotide
ccagaccccuccaaccaga

SEQ ID NO: 1653379 - RNA, 19 nt, Artificial Sequence
  Description of Artificial Sequence: Synthetic oligonucleotide
agcggcgauagaacucguu

SEQ ID NO: 1653380 - RNA, 19 nt, Artificial Sequence
  Description of Artificial Sequence: Synthetic oligonucleotide
gggcgucgggaaaacgcug

SEQ ID NO: 1653381 - RNA, 19 nt, Artificial Sequence
  Description of Artificial Sequence: Synthetic oligonucleotide
ccgccaacgugacauggga

SEQ ID NO: 1653382 - RNA, 19 nt, Artificial Sequence
  Description of Artificial Sequence: Synthetic oligonucleotide
gcaacaugauuugcccaaa

SEQ ID NO: 1653383 - RNA, 19 nt, Artificial Sequence
  Description of Artificial Sequence: Synthetic oligonucleotide
gccagcggcgauagaacuc

SEQ ID NO: 1653384 - RNA, 19 nt, Artificial Sequence
  Description of Artificial Sequence: Synthetic oligonucleotide
ggcgucucgcggcuucauc

SEQ ID NO: 1653385 - RNA, 19 nt, Artificial Sequence
  Description of Artificial Sequence: Synthetic oligonucleotide
cccuggaagcuggacuuac

SEQ ID NO: 1653386 - RNA, 19 nt, Artificial Sequence
  Description of Artificial Sequence: Synthetic oligonucleotide
cgucucgcggcuucaucug

SEQ ID NO: 1653387 - RNA, 19 nt, Artificial Sequence
  Description of Artificial Sequence: Synthetic oligonucleotide
ccuagucgagggagcucac

SEQ ID NO: 1653388 - RNA, 19 nt, Artificial Sequence
  Description of Artificial Sequence: Synthetic oligonucleotide
cuaugggaaugccgacccu

SEQ ID NO: 1653389 - RNA, 19 nt, Artificial Sequence
  Description of Artificial Sequence: Synthetic oligonucleotide
cgccaacgugacaugggac

SEQ ID NO: 1653390 - RNA, 19 nt, Artificial Sequence
  Description of Artificial Sequence: Synthetic oligonucleotide
gggccucgccuagucgagg

SEQ ID NO: 1653391 - RNA, 19 nt, Artificial Sequence
  Description of Artificial Sequence: Synthetic oligonucleotide
gcugauacucagagcucaa

SEQ ID NO: 1653392 - RNA, 19 nt, Artificial Sequence
  Description of Artificial Sequence: Synthetic oligonucleotide
cgucgggaaaacgcugggc

SEQ ID NO: 1653393 - RNA, 19 nt, Artificial Sequence
  Description of Artificial Sequence: Synthetic oligonucleotide
gagcggugugagaguaccu

SEQ ID NO: 1653394 - RNA, 19 nt, Artificial Sequence
  Description of Artificial Sequence: Synthetic oligonucleotide
cccuguugucaaauugaua

SEQ ID NO: 1653395 - RNA, 19 nt, Artificial Sequence
  Description of Artificial Sequence: Synthetic oligonucleotide
caccgggcgggcuccaggu

SEQ ID NO: 1653396 - RNA, 19 nt, Artificial Sequence
  Description of Artificial Sequence: Synthetic oligonucleotide
gcggcuucaucuguucaua

SEQ ID NO: 1653397 - RNA, 19 nt, Artificial Sequence
  Description of Artificial Sequence: Synthetic oligonucleotide
ccgugcaggggagagugca

SEQ ID NO: 1653398 - RNA, 19 nt, Artificial Sequence
  Description of Artificial Sequence: Synthetic oligonucleotide
cugggcggcccaggcgaug

SEQ ID NO: 1653399 - RNA, 19 nt, Artificial Sequence
  Description of Artificial Sequence: Synthetic oligonucleotide
gcaguccagggccucgccu

SEQ ID NO: 1653400 - RNA, 19 nt, Artificial Sequence
  Description of Artificial Sequence: Synthetic oligonucleotide
cgcugacgcuccucugcgg

SEQ ID NO: 1653401 - RNA, 19 nt, Artificial Sequence
  Description of Artificial Sequence: Synthetic oligonucleotide
gccgcccaaagucgcugca

SEQ ID NO: 1653402 - RNA, 19 nt, Artificial Sequence
  Description of Artificial Sequence: Synthetic oligonucleotide
gcgauaagugcuccuccuu

SEQ ID NO: 1653403 - RNA, 19 nt, Artificial Sequence
  Description of Artificial Sequence: Synthetic oligonucleotide
aggcgucucgcggcuucau

SEQ ID NO: 1653404 - RNA, 19 nt, Artificial Sequence
  Description of Artificial Sequence: Synthetic oligonucleotide
ccaggcgaugagggccgcg

SEQ ID NO: 1653405 - RNA, 19 nt, Artificial Sequence
  Description of Artificial Sequence: Synthetic oligonucleotide
gguccgcgcccaggaugcg

SEQ ID NO: 1653406 - RNA, 19 nt, Artificial Sequence
  Description of Artificial Sequence: Synthetic oligonucleotide
ccagucuuauugcccugua

SEQ ID NO: 1653407 - RNA, 19 nt, Artificial Sequence
  Description of Artificial Sequence: Synthetic oligonucleotide
ccaaaggcgucucgcggcu

SEQ ID NO: 1653408 - RNA, 19 nt, Artificial Sequence
  Description of Artificial Sequence: Synthetic oligonucleotide
cgcaguccagggccucgcc

SEQ ID NO: 1653409 - RNA, 19 nt, Artificial Sequence
  Description of Artificial Sequence: Synthetic oligonucleotide
gccgugcaggggagagugc

SEQ ID NO: 1653410 - RNA, 19 nt, Artificial Sequence
  Description of Artificial Sequence: Synthetic oligonucleotide
caacgugacaugggaccuu

SEQ ID NO: 1653411 - RNA, 19 nt, Artificial Sequence
  Description of Artificial Sequence: Synthetic oligonucleotide
ggcaccgggcgggcuccag

SEQ ID NO: 1653412 - RNA, 19 nt, Artificial Sequence
  Description of Artificial Sequence: Synthetic oligonucleotide
cagcggcgauagaacucgu

SEQ ID NO: 1653413 - RNA, 19 nt, Artificial Sequence
  Description of Artificial Sequence: Synthetic oligonucleotide
cgcggcuucaucuguucau

SEQ ID NO: 1653414 - RNA, 19 nt, Artificial Sequence
  Description of Artificial Sequence: Synthetic oligonucleotide
cuucggccaggagcagcgu

SEQ ID NO: 1653415 - RNA, 19 nt, Artificial Sequence
  Description of Artificial Sequence: Synthetic oligonucleotide
ccuccacgucgggaaagaa

SEQ ID NO: 1653416 - RNA, 19 nt, Artificial Sequence
  Description of Artificial Sequence: Synthetic oligonucleotide
gcccuggaagcuggacuua

SEQ ID NO: 1653417 - RNA, 19 nt, Artificial Sequence
  Description of Artificial Sequence: Synthetic oligonucleotide
ccgcccaaagucgcugcaa

SEQ ID NO: 1653418 - RNA, 19 nt, Artificial Sequence
  Description of Artificial Sequence: Synthetic oligonucleotide
gcagguccgcgcccaggau

SEQ ID NO: 1653419 - RNA, 19 nt, Artificial Sequence
  Description of Artificial Sequence: Synthetic oligonucleotide
cccaggcgaugagggccgc

SEQ ID NO: 1653420 - RNA, 19 nt, Artificial Sequence
  Description of Artificial Sequence: Synthetic oligonucleotide
caaaggcgucucgcggcuu

SEQ ID NO: 1653421 - RNA, 19 nt, Artificial Sequence
  Description of Artificial Sequence: Synthetic oligonucleotide
cgccuagucgagggagcuc

SEQ ID NO: 1653422 - RNA, 19 nt, Artificial Sequence
  Description of Artificial Sequence: Synthetic oligonucleotide
ccaggccgugcaggggaga

SEQ ID NO: 1653423 - RNA, 19 nt, Artificial Sequence
  Description of Artificial Sequence: Synthetic oligonucleotide
cccgcgcaguccagggccu

SEQ ID NO: 1653424 - RNA, 19 nt, Artificial Sequence
  Description of Artificial Sequence: Synthetic oligonucleotide
gcggggagccagcggcgau

SEQ ID NO: 1653425 - RNA, 19 nt, Artificial Sequence
  Description of Artificial Sequence: Synthetic oligonucleotide
cggggagccagcggcgaua

SEQ ID NO: 1653426 - RNA, 19 nt, Artificial Sequence
  Description of Artificial Sequence: Synthetic oligonucleotide
ccgcgcccaggaugcggua

SEQ ID NO: 1653427 - RNA, 19 nt, Artificial Sequence
  Description of Artificial Sequence: Synthetic oligonucleotide
uuaauuguagaaaagaagg

SEQ ID NO: 1653428 - RNA, 19 nt, Artificial Sequence
  Description of Artificial Sequence: Synthetic oligonucleotide
uuuaaaguagcuuuggugg

SEQ ID NO: 1653429 - RNA, 19 nt, Artificial Sequence
  Description of Artificial Sequence: Synthetic oligonucleotide
aaaauauugcccuacuagg

SEQ ID NO: 1653430 - RNA, 19 nt, Artificial Sequence
  Description of Artificial Sequence: Synthetic oligonucleotide
uuuaauuguagaaaagaag

SEQ ID NO: 1653431 - RNA, 19 nt, Artificial Sequence
  Description of Artificial Sequence: Synthetic oligonucleotide
uuuaccuggacauacagug

SEQ ID NO: 1653432 - RNA, 19 nt, Artificial Sequence
  Description of Artificial Sequence: Synthetic oligonucleotide
aagguuaauauuuuaaauu

SEQ ID NO: 1653433 - RNA, 19 nt, Artificial Sequence
  Description of Artificial Sequence: Synthetic oligonucleotide
uuuaaugauauucuuuuaa

SEQ ID NO: 1653434 - RNA, 19 nt, Artificial Sequence
  Description of Artificial Sequence: Synthetic oligonucleotide
aacuuaagagauuugcaug

SEQ ID NO: 1653435 - RNA, 19 nt, Artificial Sequence
  Description of Artificial Sequence: Synthetic oligonucleotide
aaauauugcccuacuaggc

SEQ ID NO: 1653436 - RNA, 19 nt, Artificial Sequence
  Description of Artificial Sequence: Synthetic oligonucleotide
ugacaaauauucagcagcg

SEQ ID NO: 1653437 - RNA, 19 nt, Artificial Sequence
  Description of Artificial Sequence: Synthetic oligonucleotide
aauauccuaauuuaaugau

SEQ ID NO: 1653438 - RNA, 19 nt, Artificial Sequence
  Description of Artificial Sequence: Synthetic oligonucleotide
agcgugagagcauaaauac

SEQ ID NO: 1653439 - RNA, 19 nt, Artificial Sequence
  Description of Artificial Sequence: Synthetic oligonucleotide
guaaaagugacaaauauuc

SEQ ID NO: 1653440 - RNA, 19 nt, Artificial Sequence
  Description of Artificial Sequence: Synthetic oligonucleotide
aaacuuaagagauuugcau

SEQ ID NO: 1653441 - RNA, 19 nt, Artificial Sequence
  Description of Artificial Sequence: Synthetic oligonucleotide
acgacgagcucacauaucc

SEQ ID NO: 1653442 - RNA, 19 nt, Artificial Sequence
  Description of Artificial Sequence: Synthetic oligonucleotide
uauuaccauucucugaagg

SEQ ID NO: 1653443 - RNA, 19 nt, Artificial Sequence
  Description of Artificial Sequence: Synthetic oligonucleotide
uucucguggaaacaaaacc

SEQ ID NO: 1653444 - RNA, 19 nt, Artificial Sequence
  Description of Artificial Sequence: Synthetic oligonucleotide
auccuuuacacccagacca

SEQ ID NO: 1653445 - RNA, 19 nt, Artificial Sequence
  Description of Artificial Sequence: Synthetic oligonucleotide
ugagagcauaaauacaucc

SEQ ID NO: 1653446 - RNA, 19 nt, Artificial Sequence
  Description of Artificial Sequence: Synthetic oligonucleotide
aauauugcccuacuaggca

SEQ ID NO: 1653447 - RNA, 19 nt, Artificial Sequence
  Description of Artificial Sequence: Synthetic oligonucleotide
uauacuuuacauuucucgu

SEQ ID NO: 1653448 - RNA, 19 nt, Artificial Sequence
  Description of Artificial Sequence: Synthetic oligonucleotide
cacacgugaacauauauac

SEQ ID NO: 1653449 - RNA, 19 nt, Artificial Sequence
  Description of Artificial Sequence: Synthetic oligonucleotide
acauccuuuacacccagac

SEQ ID NO: 1653450 - RNA, 19 nt, Artificial Sequence
  Description of Artificial Sequence: Synthetic oligonucleotide
aguggagacagacuucggc

SEQ ID NO: 1653451 - RNA, 19 nt, Artificial Sequence
  Description of Artificial Sequence: Synthetic oligonucleotide
aagugacaaauauucagca

SEQ ID NO: 1653452 - RNA, 19 nt, Artificial Sequence
  Description of Artificial Sequence: Synthetic oligonucleotide
uccuaauuuaaugauauuc

SEQ ID NO: 1653453 - RNA, 19 nt, Artificial Sequence
  Description of Artificial Sequence: Synthetic oligonucleotide
uaauuguagaaaagaaggu

SEQ ID NO: 1653454 - RNA, 19 nt, Artificial Sequence
  Description of Artificial Sequence: Synthetic oligonucleotide
acacuaagcaagcccaagc

SEQ ID NO: 1653455 - RNA, 19 nt, Artificial Sequence
  Description of Artificial Sequence: Synthetic oligonucleotide
agguuaauauuuuaaauua

SEQ ID NO: 1653456 - RNA, 19 nt, Artificial Sequence
  Description of Artificial Sequence: Synthetic oligonucleotide
gacuuugcccuucucaggg

SEQ ID NO: 1653457 - RNA, 19 nt, Artificial Sequence
  Description of Artificial Sequence: Synthetic oligonucleotide
aaauauucagcagcgugag

SEQ ID NO: 1653458 - RNA, 19 nt, Artificial Sequence
  Description of Artificial Sequence: Synthetic oligonucleotide
aguaauggcucugcaagcc

SEQ ID NO: 1653459 - RNA, 19 nt, Artificial Sequence
  Description of Artificial Sequence: Synthetic oligonucleotide
ucugcaagccauagggccg

SEQ ID NO: 1653460 - RNA, 19 nt, Artificial Sequence
  Description of Artificial Sequence: Synthetic oligonucleotide
aauuguagaaaagaagguu

SEQ ID NO: 1653461 - RNA, 19 nt, Artificial Sequence
  Description of Artificial Sequence: Synthetic oligonucleotide
aaaacgacggagagucucc

SEQ ID NO: 1653462 - RNA, 19 nt, Artificial Sequence
  Description of Artificial Sequence: Synthetic oligonucleotide
auauugcccuacuaggcac

SEQ ID NO: 1653463 - RNA, 19 nt, Artificial Sequence
  Description of Artificial Sequence: Synthetic oligonucleotide
uuacauuucucguggaaac

SEQ ID NO: 1653464 - RNA, 19 nt, Artificial Sequence
  Description of Artificial Sequence: Synthetic oligonucleotide
uucugacugcuucuggugg

SEQ ID NO: 1653465 - RNA, 19 nt, Artificial Sequence
  Description of Artificial Sequence: Synthetic oligonucleotide
ggaacaacaguucucgcgg

SEQ ID NO: 1653466 - RNA, 19 nt, Artificial Sequence
  Description of Artificial Sequence: Synthetic oligonucleotide
augucuuggagcaccaucc

SEQ ID NO: 1653467 - RNA, 19 nt, Artificial Sequence
  Description of Artificial Sequence: Synthetic oligonucleotide
accuaugcggaugugagac

SEQ ID NO: 1653468 - RNA, 19 nt, Artificial Sequence
  Description of Artificial Sequence: Synthetic oligonucleotide
gaaacaaaaccuaugcgga

SEQ ID NO: 1653469 - RNA, 19 nt, Artificial Sequence
  Description of Artificial Sequence: Synthetic oligonucleotide
auuaccauucucugaaggu

SEQ ID NO: 1653470 - RNA, 19 nt, Artificial Sequence
  Description of Artificial Sequence: Synthetic oligonucleotide
uuaagagauuugcaugcug

SEQ ID NO: 1653471 - RNA, 19 nt, Artificial Sequence
  Description of Artificial Sequence: Synthetic oligonucleotide
aacguuuccaaagaacaga

SEQ ID NO: 1653472 - RNA, 19 nt, Artificial Sequence
  Description of Artificial Sequence: Synthetic oligonucleotide
aaaccuaugcggaugugag

SEQ ID NO: 1653473 - RNA, 19 nt, Artificial Sequence
  Description of Artificial Sequence: Synthetic oligonucleotide
aaccaguggagacagacuu

SEQ ID NO: 1653474 - RNA, 19 nt, Artificial Sequence
  Description of Artificial Sequence: Synthetic oligonucleotide
uuccagaugucuuggagca

SEQ ID NO: 1653475 - RNA, 19 nt, Artificial Sequence
  Description of Artificial Sequence: Synthetic oligonucleotide
cauagggccggguaggagg

SEQ ID NO: 1653476 - RNA, 19 nt, Artificial Sequence
  Description of Artificial Sequence: Synthetic oligonucleotide
agaacguuuccaaagaaca

SEQ ID NO: 1653477 - RNA, 19 nt, Artificial Sequence
  Description of Artificial Sequence: Synthetic oligonucleotide
aaagaagguuaauauuuua

SEQ ID NO: 1653478 - RNA, 19 nt, Artificial Sequence
  Description of Artificial Sequence: Synthetic oligonucleotide
ucuccugacccauagcccc

SEQ ID NO: 1653479 - RNA, 19 nt, Artificial Sequence
  Description of Artificial Sequence: Synthetic oligonucleotide
uuguagaaaagaagguuaa

SEQ ID NO: 1653480 - RNA, 19 nt, Artificial Sequence
  Description of Artificial Sequence: Synthetic oligonucleotide
uggagcucggagaagggag

SEQ ID NO: 1653481 - RNA, 19 nt, Artificial Sequence
  Description of Artificial Sequence: Synthetic oligonucleotide
uuaccuggacauacagugg

SEQ ID NO: 1653482 - RNA, 19 nt, Artificial Sequence
  Description of Artificial Sequence: Synthetic oligonucleotide
uuacacccagaccauaugu

SEQ ID NO: 1653483 - RNA, 19 nt, Artificial Sequence
  Description of Artificial Sequence: Synthetic oligonucleotide
ggcucugcaagccauaggg

SEQ ID NO: 1653484 - RNA, 19 nt, Artificial Sequence
  Description of Artificial Sequence: Synthetic oligonucleotide
uuucucguggaaacaaaac

SEQ ID NO: 1653485 - RNA, 19 nt, Artificial Sequence
  Description of Artificial Sequence: Synthetic oligonucleotide
ucucggugauuucugacug

SEQ ID NO: 1653486 - RNA, 19 nt, Artificial Sequence
  Description of Artificial Sequence: Synthetic oligonucleotide
uuaccauucucugaaggug

SEQ ID NO: 1653487 - RNA, 19 nt, Artificial Sequence
  Description of Artificial Sequence: Synthetic oligonucleotide
acaccuagaaaccucucug

SEQ ID NO: 1653488 - RNA, 19 nt, Artificial Sequence
  Description of Artificial Sequence: Synthetic oligonucleotide
gauuucugacugcuucugg

SEQ ID NO: 1653489 - RNA, 19 nt, Artificial Sequence
  Description of Artificial Sequence: Synthetic oligonucleotide
agaccauauguacacacgu

SEQ ID NO: 1653490 - RNA, 19 nt, Artificial Sequence
  Description of Artificial Sequence: Synthetic oligonucleotide
ucacauauccuuccaggcu

SEQ ID NO: 1653491 - RNA, 19 nt, Artificial Sequence
  Description of Artificial Sequence: Synthetic oligonucleotide
cucacauauccuuccaggc

SEQ ID NO: 1653492 - RNA, 19 nt, Artificial Sequence
  Description of Artificial Sequence: Synthetic oligonucleotide
gaaaccaguggagacagac

SEQ ID NO: 1653493 - RNA, 19 nt, Artificial Sequence
  Description of Artificial Sequence: Synthetic oligonucleotide
uuuuaccuggacauacagu

SEQ ID NO: 1653494 - RNA, 19 nt, Artificial Sequence
  Description of Artificial Sequence: Synthetic oligonucleotide
uuuacacccagaccauaug

SEQ ID NO: 1653495 - RNA, 19 nt, Artificial Sequence
  Description of Artificial Sequence: Synthetic oligonucleotide
ggaggaguugcucagcacg

SEQ ID NO: 1653496 - RNA, 19 nt, Artificial Sequence
  Description of Artificial Sequence: Synthetic oligonucleotide
agagcauaaauacauccuu

SEQ ID NO: 1653497 - RNA, 19 nt, Artificial Sequence
  Description of Artificial Sequence: Synthetic oligonucleotide
cugacguggacagacagcc

SEQ ID NO: 1653498 - RNA, 19 nt, Artificial Sequence
  Description of Artificial Sequence: Synthetic oligonucleotide
aaacaaaaccuaugcggau

SEQ ID NO: 1653499 - RNA, 19 nt, Artificial Sequence
  Description of Artificial Sequence: Synthetic oligonucleotide
uaccuggacauacaguggu

SEQ ID NO: 1653500 - RNA, 19 nt, Artificial Sequence
  Description of Artificial Sequence: Synthetic oligonucleotide
gaaacuuaagagauuugca

SEQ ID NO: 1653501 - RNA, 19 nt, Artificial Sequence
  Description of Artificial Sequence: Synthetic oligonucleotide
auuucugacugcuucuggu

SEQ ID NO: 1653502 - RNA, 19 nt, Artificial Sequence
  Description of Artificial Sequence: Synthetic oligonucleotide
ugcccuacuaggcacagaa

SEQ ID NO: 1653503 - RNA, 19 nt, Artificial Sequence
  Description of Artificial Sequence: Synthetic oligonucleotide
uuucugacugcuucuggug

SEQ ID NO: 1653504 - RNA, 19 nt, Artificial Sequence
  Description of Artificial Sequence: Synthetic oligonucleotide
ggacauacaguggugagcg

SEQ ID NO: 1653505 - RNA, 19 nt, Artificial Sequence
  Description of Artificial Sequence: Synthetic oligonucleotide
cagggaacaacaguucucg

SEQ ID NO: 1653506 - RNA, 19 nt, Artificial Sequence
  Description of Artificial Sequence: Synthetic oligonucleotide
uaagcaagcccaagcaaaa

SEQ ID NO: 1653507 - RNA, 19 nt, Artificial Sequence
  Description of Artificial Sequence: Synthetic oligonucleotide
acagaauuuguuucucaga

SEQ ID NO: 1653508 - RNA, 19 nt, Artificial Sequence
  Description of Artificial Sequence: Synthetic oligonucleotide
cagaccauauguacacacg

SEQ ID NO: 1653509 - RNA, 19 nt, Artificial Sequence
  Description of Artificial Sequence: Synthetic oligonucleotide
gggaacaacaguucucgcg

SEQ ID NO: 1653510 - RNA, 19 nt, Artificial Sequence
  Description of Artificial Sequence: Synthetic oligonucleotide
ugacuuugcccuucucagg

SEQ ID NO: 1653511 - RNA, 19 nt, Artificial Sequence
  Description of Artificial Sequence: Synthetic oligonucleotide
cagaacguuuccaaagaac

SEQ ID NO: 1653512 - RNA, 19 nt, Artificial Sequence
  Description of Artificial Sequence: Synthetic oligonucleotide
ugcucagcacggcugaccc

SEQ ID NO: 1653513 - RNA, 19 nt, Artificial Sequence
  Description of Artificial Sequence: Synthetic oligonucleotide
cacauauccuuccaggcuc

SEQ ID NO: 1653514 - RNA, 19 nt, Artificial Sequence
  Description of Artificial Sequence: Synthetic oligonucleotide
agaauuuguuucucagaca

SEQ ID NO: 1653515 - RNA, 19 nt, Artificial Sequence
  Description of Artificial Sequence: Synthetic oligonucleotide
gaacguuuccaaagaacag

SEQ ID NO: 1653516 - RNA, 19 nt, Artificial Sequence
  Description of Artificial Sequence: Synthetic oligonucleotide
uugcaugcuggucuacugc

SEQ ID NO: 1653517 - RNA, 19 nt, Artificial Sequence
  Description of Artificial Sequence: Synthetic oligonucleotide
gaugugagacucucgguga

SEQ ID NO: 1653518 - RNA, 19 nt, Artificial Sequence
  Description of Artificial Sequence: Synthetic oligonucleotide
cauacaguggugagcgagc

SEQ ID NO: 1653519 - RNA, 19 nt, Artificial Sequence
  Description of Artificial Sequence: Synthetic oligonucleotide
aacaacaguucucgcggca

SEQ ID NO: 1653520 - RNA, 19 nt, Artificial Sequence
  Description of Artificial Sequence: Synthetic oligonucleotide
auuauacuuuacauuucuc

SEQ ID NO: 1653521 - RNA, 19 nt, Artificial Sequence
  Description of Artificial Sequence: Synthetic oligonucleotide
cuucugguggaggagacgc

SEQ ID NO: 1653522 - RNA, 19 nt, Artificial Sequence
  Description of Artificial Sequence: Synthetic oligonucleotide
uggauucugcacaugcagu

SEQ ID NO: 1653523 - RNA, 19 nt, Artificial Sequence
  Description of Artificial Sequence: Synthetic oligonucleotide
acucucggugauuucugac

SEQ ID NO: 1653524 - RNA, 19 nt, Artificial Sequence
  Description of Artificial Sequence: Synthetic oligonucleotide
uucucugaagguguggcca

SEQ ID NO: 1653525 - RNA, 19 nt, Artificial Sequence
  Description of Artificial Sequence: Synthetic oligonucleotide
acauacaguggugagcgag

SEQ ID NO: 1653526 - RNA, 19 nt, Artificial Sequence
  Description of Artificial Sequence: Synthetic oligonucleotide
caugcuggucuacugcacg

SEQ ID NO: 1653527 - RNA, 19 nt, Artificial Sequence
  Description of Artificial Sequence: Synthetic oligonucleotide
auacaguggugagcgagcc

SEQ ID NO: 1653528 - RNA, 19 nt, Artificial Sequence
  Description of Artificial Sequence: Synthetic oligonucleotide
uaucccuggagcucggaga

SEQ ID NO: 1653529 - RNA, 19 nt, Artificial Sequence
  Description of Artificial Sequence: Synthetic oligonucleotide
agggcauuuuaccuggaca

SEQ ID NO: 1653530 - RNA, 19 nt, Artificial Sequence
  Description of Artificial Sequence: Synthetic oligonucleotide
cccuacuaggcacagaacg

SEQ ID NO: 1653531 - RNA, 19 nt, Artificial Sequence
  Description of Artificial Sequence: Synthetic oligonucleotide
cucugcacaccuagaaacc

SEQ ID NO: 1653532 - RNA, 19 nt, Artificial Sequence
  Description of Artificial Sequence: Synthetic oligonucleotide
aaaaggcagggaacaacag

SEQ ID NO: 1653533 - RNA, 19 nt, Artificial Sequence
  Description of Artificial Sequence: Synthetic oligonucleotide
gguaggagggcauuuuacc

SEQ ID NO: 1653534 - RNA, 19 nt, Artificial Sequence
  Description of Artificial Sequence: Synthetic oligonucleotide
acuggagucugcgggaaac

SEQ ID NO: 1653535 - RNA, 19 nt, Artificial Sequence
  Description of Artificial Sequence: Synthetic oligonucleotide
ugcacaugcagugcagucc

SEQ ID NO: 1653536 - RNA, 19 nt, Artificial Sequence
  Description of Artificial Sequence: Synthetic oligonucleotide
agaggccuggccacuaucc

SEQ ID NO: 1653537 - RNA, 19 nt, Artificial Sequence
  Description of Artificial Sequence: Synthetic oligonucleotide
cauccuuuacacccagacc

SEQ ID NO: 1653538 - RNA, 19 nt, Artificial Sequence
  Description of Artificial Sequence: Synthetic oligonucleotide
uuugugggacuggugcugg

SEQ ID NO: 1653539 - RNA, 19 nt, Artificial Sequence
  Description of Artificial Sequence: Synthetic oligonucleotide
ccuuuugugggacuggugc

SEQ ID NO: 1653540 - RNA, 19 nt, Artificial Sequence
  Description of Artificial Sequence: Synthetic oligonucleotide
ugccacagaggccuggcca

SEQ ID NO: 1653541 - RNA, 19 nt, Artificial Sequence
  Description of Artificial Sequence: Synthetic oligonucleotide
uuuccuuuugugggacugg

SEQ ID NO: 1653542 - RNA, 19 nt, Artificial Sequence
  Description of Artificial Sequence: Synthetic oligonucleotide
uauugcccuacuaggcaca

SEQ ID NO: 1653543 - RNA, 19 nt, Artificial Sequence
  Description of Artificial Sequence: Synthetic oligonucleotide
acuaagcaagcccaagcaa

SEQ ID NO: 1653544 - RNA, 19 nt, Artificial Sequence
  Description of Artificial Sequence: Synthetic oligonucleotide
uggacuguugucuccugga

SEQ ID NO: 1653545 - RNA, 19 nt, Artificial Sequence
  Description of Artificial Sequence: Synthetic oligonucleotide
uggacauacaguggugagc

SEQ ID NO: 1653546 - RNA, 19 nt, Artificial Sequence
  Description of Artificial Sequence: Synthetic oligonucleotide
agggaacaacaguucucgc

SEQ ID NO: 1653547 - RNA, 19 nt, Artificial Sequence
  Description of Artificial Sequence: Synthetic oligonucleotide
aguagcuuuggugguggac

SEQ ID NO: 1653548 - RNA, 19 nt, Artificial Sequence
  Description of Artificial Sequence: Synthetic oligonucleotide
caguaauggcucugcaagc

SEQ ID NO: 1653549 - RNA, 19 nt, Artificial Sequence
  Description of Artificial Sequence: Synthetic oligonucleotide
ucguggaaacaaaaccuau

SEQ ID NO: 1653550 - RNA, 19 nt, Artificial Sequence
  Description of Artificial Sequence: Synthetic oligonucleotide
uuggcaacgacgagcucac

SEQ ID NO: 1653551 - RNA, 19 nt, Artificial Sequence
  Description of Artificial Sequence: Synthetic oligonucleotide
agcucacauauccuuccag

SEQ ID NO: 1653552 - RNA, 19 nt, Artificial Sequence
  Description of Artificial Sequence: Synthetic oligonucleotide
cacgugaacauauauacau

SEQ ID NO: 1653553 - RNA, 19 nt, Artificial Sequence
  Description of Artificial Sequence: Synthetic oligonucleotide
ugcggaugugagacucucg

SEQ ID NO: 1653554 - RNA, 19 nt, Artificial Sequence
  Description of Artificial Sequence: Synthetic oligonucleotide
uacacccagaccauaugua

SEQ ID NO: 1653555 - RNA, 19 nt, Artificial Sequence
  Description of Artificial Sequence: Synthetic oligonucleotide
augguggauaggguccucc

SEQ ID NO: 1653556 - RNA, 19 nt, Artificial Sequence
  Description of Artificial Sequence: Synthetic oligonucleotide
aaccuaugcggaugugaga

SEQ ID NO: 1653557 - RNA, 19 nt, Artificial Sequence
  Description of Artificial Sequence: Synthetic oligonucleotide
uggccacuaucccuggagc

SEQ ID NO: 1653558 - RNA, 19 nt, Artificial Sequence
  Description of Artificial Sequence: Synthetic oligonucleotide
agggucuccugacccauag

SEQ ID NO: 1653559 - RNA, 19 nt, Artificial Sequence
  Description of Artificial Sequence: Synthetic oligonucleotide
aguugcucagcacggcuga

SEQ ID NO: 1653560 - RNA, 19 nt, Artificial Sequence
  Description of Artificial Sequence: Synthetic oligonucleotide
acagaacguuuccaaagaa

SEQ ID NO: 1653561 - RNA, 19 nt, Artificial Sequence
  Description of Artificial Sequence: Synthetic oligonucleotide
uggcccuuuccucugcaca

SEQ ID NO: 1653562 - RNA, 19 nt, Artificial Sequence
  Description of Artificial Sequence: Synthetic oligonucleotide
acuuugcccuucucagggg

SEQ ID NO: 1653563 - RNA, 19 nt, Artificial Sequence
  Description of Artificial Sequence: Synthetic oligonucleotide
gcauaaauacauccuuuac

SEQ ID NO: 1653564 - RNA, 19 nt, Artificial Sequence
  Description of Artificial Sequence: Synthetic oligonucleotide
uggcugacagcauggauuu

SEQ ID NO: 1653565 - RNA, 19 nt, Artificial Sequence
  Description of Artificial Sequence: Synthetic oligonucleotide
ugacccauagccccuccuc

SEQ ID NO: 1653566 - RNA, 19 nt, Artificial Sequence
  Description of Artificial Sequence: Synthetic oligonucleotide
agggagggaccguaaaagu

SEQ ID NO: 1653567 - RNA, 19 nt, Artificial Sequence
  Description of Artificial Sequence: Synthetic oligonucleotide
guuuccuuuugugggacug

SEQ ID NO: 1653568 - RNA, 19 nt, Artificial Sequence
  Description of Artificial Sequence: Synthetic oligonucleotide
cacuaagcaagcccaagca

SEQ ID NO: 1653569 - RNA, 19 nt, Artificial Sequence
  Description of Artificial Sequence: Synthetic oligonucleotide
ucggagaagggaguggggu

SEQ ID NO: 1653570 - RNA, 19 nt, Artificial Sequence
  Description of Artificial Sequence: Synthetic oligonucleotide
ucggugauuucugacugcu

SEQ ID NO: 1653571 - RNA, 19 nt, Artificial Sequence
  Description of Artificial Sequence: Synthetic oligonucleotide
cuggccacuaucccuggag

SEQ ID NO: 1653572 - RNA, 19 nt, Artificial Sequence
  Description of Artificial Sequence: Synthetic oligonucleotide
cauagccccuccucugucc

SEQ ID NO: 1653573 - RNA, 19 nt, Artificial Sequence
  Description of Artificial Sequence: Synthetic oligonucleotide
cucgcggcaguucugccgc

SEQ ID NO: 1653574 - RNA, 19 nt, Artificial Sequence
  Description of Artificial Sequence: Synthetic oligonucleotide
aaaccaguggagacagacu

SEQ ID NO: 1653575 - RNA, 19 nt, Artificial Sequence
  Description of Artificial Sequence: Synthetic oligonucleotide
gaccguaaaagugacaaau

SEQ ID NO: 1653576 - RNA, 19 nt, Artificial Sequence
  Description of Artificial Sequence: Synthetic oligonucleotide
cuaugcggaugugagacuc

SEQ ID NO: 1653577 - RNA, 19 nt, Artificial Sequence
  Description of Artificial Sequence: Synthetic oligonucleotide
ucggcucuggcccuuuccu

SEQ ID NO: 1653578 - RNA, 19 nt, Artificial Sequence
  Description of Artificial Sequence: Synthetic oligonucleotide
uccuuuugugggacuggug

SEQ ID NO: 1653579 - RNA, 19 nt, Artificial Sequence
  Description of Artificial Sequence: Synthetic oligonucleotide
auauccuaauuuaaugaua

SEQ ID NO: 1653580 - RNA, 19 nt, Artificial Sequence
  Description of Artificial Sequence: Synthetic oligonucleotide
uucggcucuggcccuuucc

SEQ ID NO: 1653581 - RNA, 19 nt, Artificial Sequence
  Description of Artificial Sequence: Synthetic oligonucleotide
auucagcagcgugagagca

SEQ ID NO: 1653582 - RNA, 19 nt, Artificial Sequence
  Description of Artificial Sequence: Synthetic oligonucleotide
uacuaggcacagaacguuu

SEQ ID NO: 1653583 - RNA, 19 nt, Artificial Sequence
  Description of Artificial Sequence: Synthetic oligonucleotide
aacgacgagcucacauauc

SEQ ID NO: 1653584 - RNA, 19 nt, Artificial Sequence
  Description of Artificial Sequence: Synthetic oligonucleotide
ugcgggaaaccaguggaga

SEQ ID NO: 1653585 - RNA, 19 nt, Artificial Sequence
  Description of Artificial Sequence: Synthetic oligonucleotide
ccuaauuuaaugauauucu

SEQ ID NO: 1653586 - RNA, 19 nt, Artificial Sequence
  Description of Artificial Sequence: Synthetic oligonucleotide
cuaucccuggagcucggag

SEQ ID NO: 1653587 - RNA, 19 nt, Artificial Sequence
  Description of Artificial Sequence: Synthetic oligonucleotide
auuucucguggaaacaaaa

SEQ ID NO: 1653588 - RNA, 19 nt, Artificial Sequence
  Description of Artificial Sequence: Synthetic oligonucleotide
uucugguggaggagacgcc

SEQ ID NO: 1653589 - RNA, 19 nt, Artificial Sequence
  Description of Artificial Sequence: Synthetic oligonucleotide
acgagcucacauauccuuc

SEQ ID NO: 1653590 - RNA, 19 nt, Artificial Sequence
  Description of Artificial Sequence: Synthetic oligonucleotide
cucagcacggcugacccug

SEQ ID NO: 1653591 - RNA, 19 nt, Artificial Sequence
  Description of Artificial Sequence: Synthetic oligonucleotide
gagggcauuuuaccuggac

SEQ ID NO: 1653592 - RNA, 19 nt, Artificial Sequence
  Description of Artificial Sequence: Synthetic oligonucleotide
ucuacugcacgguggccuc

SEQ ID NO: 1653593 - RNA, 19 nt, Artificial Sequence
  Description of Artificial Sequence: Synthetic oligonucleotide
uguugucuccuggauucug

SEQ ID NO: 1653594 - RNA, 19 nt, Artificial Sequence
  Description of Artificial Sequence: Synthetic oligonucleotide
uaggcacagaacguuucca

SEQ ID NO: 1653595 - RNA, 19 nt, Artificial Sequence
  Description of Artificial Sequence: Synthetic oligonucleotide
accuagaaaccucucuguu

SEQ ID NO: 1653596 - RNA, 19 nt, Artificial Sequence
  Description of Artificial Sequence: Synthetic oligonucleotide
ggugagcgagccucggugg

SEQ ID NO: 1653597 - RNA, 19 nt, Artificial Sequence
  Description of Artificial Sequence: Synthetic oligonucleotide
guaggagggcauuuuaccu

SEQ ID NO: 1653598 - RNA, 19 nt, Artificial Sequence
  Description of Artificial Sequence: Synthetic oligonucleotide
acgacggagagucuccuuu

SEQ ID NO: 1653599 - RNA, 19 nt, Artificial Sequence
  Description of Artificial Sequence: Synthetic oligonucleotide
gaguugcucagcacggcug

SEQ ID NO: 1653600 - RNA, 19 nt, Artificial Sequence
  Description of Artificial Sequence: Synthetic oligonucleotide
auagggccggguaggaggg

SEQ ID NO: 1653601 - RNA, 19 nt, Artificial Sequence
  Description of Artificial Sequence: Synthetic oligonucleotide
cucggugauuucugacugc

SEQ ID NO: 1653602 - RNA, 19 nt, Artificial Sequence
  Description of Artificial Sequence: Synthetic oligonucleotide
guaauggcucugcaagcca

SEQ ID NO: 1653603 - RNA, 19 nt, Artificial Sequence
  Description of Artificial Sequence: Synthetic oligonucleotide
gcauuuuaccuggacauac

SEQ ID NO: 1653604 - RNA, 19 nt, Artificial Sequence
  Description of Artificial Sequence: Synthetic oligonucleotide
ccaguggagacagacuucg

SEQ ID NO: 1653605 - RNA, 19 nt, Artificial Sequence
  Description of Artificial Sequence: Synthetic oligonucleotide
uacauccuuuacacccaga

SEQ ID NO: 1653606 - RNA, 19 nt, Artificial Sequence
  Description of Artificial Sequence: Synthetic oligonucleotide
uguuuccuuuugugggacu

SEQ ID NO: 1653607 - RNA, 19 nt, Artificial Sequence
  Description of Artificial Sequence: Synthetic oligonucleotide
gaagggagugggguagccc

SEQ ID NO: 1653608 - RNA, 19 nt, Artificial Sequence
  Description of Artificial Sequence: Synthetic oligonucleotide
acguuuccaaagaacagaa

SEQ ID NO: 1653609 - RNA, 19 nt, Artificial Sequence
  Description of Artificial Sequence: Synthetic oligonucleotide
gggaaaccaguggagacag

SEQ ID NO: 1653610 - RNA, 19 nt, Artificial Sequence
  Description of Artificial Sequence: Synthetic oligonucleotide
cucggagaagggagugggg

SEQ ID NO: 1653611 - RNA, 19 nt, Artificial Sequence
  Description of Artificial Sequence: Synthetic oligonucleotide
cucguggaaacaaaaccua

SEQ ID NO: 1653612 - RNA, 19 nt, Artificial Sequence
  Description of Artificial Sequence: Synthetic oligonucleotide
ugggguagcccucgcugca

SEQ ID NO: 1653613 - RNA, 19 nt, Artificial Sequence
  Description of Artificial Sequence: Synthetic oligonucleotide
ugguggauaggguccuccu

SEQ ID NO: 1653614 - RNA, 19 nt, Artificial Sequence
  Description of Artificial Sequence: Synthetic oligonucleotide
gcugacuuugcccuucuca

SEQ ID NO: 1653615 - RNA, 19 nt, Artificial Sequence
  Description of Artificial Sequence: Synthetic oligonucleotide
augcggaugugagacucuc

SEQ ID NO: 1653616 - RNA, 19 nt, Artificial Sequence
  Description of Artificial Sequence: Synthetic oligonucleotide
cacacuaagcaagcccaag

SEQ ID NO: 1653617 - RNA, 19 nt, Artificial Sequence
  Description of Artificial Sequence: Synthetic oligonucleotide
aaacgacggagagucuccu

SEQ ID NO: 1653618 - RNA, 19 nt, Artificial Sequence
  Description of Artificial Sequence: Synthetic oligonucleotide
ggacuggugcuggauagcg

SEQ ID NO: 1653619 - RNA, 19 nt, Artificial Sequence
  Description of Artificial Sequence: Synthetic oligonucleotide
cauccccucccacacuaag

SEQ ID NO: 1653620 - RNA, 19 nt, Artificial Sequence
  Description of Artificial Sequence: Synthetic oligonucleotide
cccaccuuucugcacaggg

SEQ ID NO: 1653621 - RNA, 19 nt, Artificial Sequence
  Description of Artificial Sequence: Synthetic oligonucleotide
cagcgugagagcauaaaua

SEQ ID NO: 1653622 - RNA, 19 nt, Artificial Sequence
  Description of Artificial Sequence: Synthetic oligonucleotide
ggcagaggaaggcugugug

SEQ ID NO: 1653623 - RNA, 19 nt, Artificial Sequence
  Description of Artificial Sequence: Synthetic oligonucleotide
cugcacaccuagaaaccuc

SEQ ID NO: 1653624 - RNA, 19 nt, Artificial Sequence
  Description of Artificial Sequence: Synthetic oligonucleotide
gacagacuucggcucuggc

SEQ ID NO: 1653625 - RNA, 19 nt, Artificial Sequence
  Description of Artificial Sequence: Synthetic oligonucleotide
aaguagcuuugguggugga

SEQ ID NO: 1653626 - RNA, 19 nt, Artificial Sequence
  Description of Artificial Sequence: Synthetic oligonucleotide
caguucugccgcuagggga

SEQ ID NO: 1653627 - RNA, 19 nt, Artificial Sequence
  Description of Artificial Sequence: Synthetic oligonucleotide
guagcuuuggugguggacu

SEQ ID NO: 1653628 - RNA, 19 nt, Artificial Sequence
  Description of Artificial Sequence: Synthetic oligonucleotide
cugcacaugcagugcaguc

SEQ ID NO: 1653629 - RNA, 19 nt, Artificial Sequence
  Description of Artificial Sequence: Synthetic oligonucleotide
ggagggaccguaaaaguga

SEQ ID NO: 1653630 - RNA, 19 nt, Artificial Sequence
  Description of Artificial Sequence: Synthetic oligonucleotide
ucuggcccuuuccucugca

SEQ ID NO: 1653631 - RNA, 19 nt, Artificial Sequence
  Description of Artificial Sequence: Synthetic oligonucleotide
cugguggaggagacgcccc

SEQ ID NO: 1653632 - RNA, 19 nt, Artificial Sequence
  Description of Artificial Sequence: Synthetic oligonucleotide
uguggccaguaauggcucu

SEQ ID NO: 1653633 - RNA, 19 nt, Artificial Sequence
  Description of Artificial Sequence: Synthetic oligonucleotide
guucucgcggcaguucugc

SEQ ID NO: 1653634 - RNA, 19 nt, Artificial Sequence
  Description of Artificial Sequence: Synthetic oligonucleotide
cugcaagccauagggccgg

SEQ ID NO: 1653635 - RNA, 19 nt, Artificial Sequence
  Description of Artificial Sequence: Synthetic oligonucleotide
gacucucggugauuucuga

SEQ ID NO: 1653636 - RNA, 19 nt, Artificial Sequence
  Description of Artificial Sequence: Synthetic oligonucleotide
uggauagcgugggcagagg

SEQ ID NO: 1653637 - RNA, 19 nt, Artificial Sequence
  Description of Artificial Sequence: Synthetic oligonucleotide
cuuggagcaccauccccuc

SEQ ID NO: 1653638 - RNA, 19 nt, Artificial Sequence
  Description of Artificial Sequence: Synthetic oligonucleotide
uggugccaaggccccagug

SEQ ID NO: 1653639 - RNA, 19 nt, Artificial Sequence
  Description of Artificial Sequence: Synthetic oligonucleotide
gagggaccguaaaagugac

SEQ ID NO: 1653640 - RNA, 19 nt, Artificial Sequence
  Description of Artificial Sequence: Synthetic oligonucleotide
acacgugaacauauauaca

SEQ ID NO: 1653641 - RNA, 19 nt, Artificial Sequence
  Description of Artificial Sequence: Synthetic oligonucleotide
cacccagaccauauguaca

SEQ ID NO: 1653642 - RNA, 19 nt, Artificial Sequence
  Description of Artificial Sequence: Synthetic oligonucleotide
accaguggagacagacuuc

SEQ ID NO: 1653643 - RNA, 19 nt, Artificial Sequence
  Description of Artificial Sequence: Synthetic oligonucleotide
auccuaauuuaaugauauu

SEQ ID NO: 1653644 - RNA, 19 nt, Artificial Sequence
  Description of Artificial Sequence: Synthetic oligonucleotide
auugcccuacuaggcacag

SEQ ID NO: 1653645 - RNA, 19 nt, Artificial Sequence
  Description of Artificial Sequence: Synthetic oligonucleotide
uggccaguaauggcucugc

SEQ ID NO: 1653646 - RNA, 19 nt, Artificial Sequence
  Description of Artificial Sequence: Synthetic oligonucleotide
gagacucucggugauuucu

SEQ ID NO: 1653647 - RNA, 19 nt, Artificial Sequence
  Description of Artificial Sequence: Synthetic oligonucleotide
cccucccacacuaagcaag

SEQ ID NO: 1653648 - RNA, 19 nt, Artificial Sequence
  Description of Artificial Sequence: Synthetic oligonucleotide
aacaguucucgcggcaguu

SEQ ID NO: 1653649 - RNA, 19 nt, Artificial Sequence
  Description of Artificial Sequence: Synthetic oligonucleotide
cauuucucguggaaacaaa

SEQ ID NO: 1653650 - RNA, 19 nt, Artificial Sequence
  Description of Artificial Sequence: Synthetic oligonucleotide
augugagacucucggugau

SEQ ID NO: 1653651 - RNA, 19 nt, Artificial Sequence
  Description of Artificial Sequence: Synthetic oligonucleotide
agcucggagaagggagugg

SEQ ID NO: 1653652 - RNA, 19 nt, Artificial Sequence
  Description of Artificial Sequence: Synthetic oligonucleotide
gauagcgugggcagaggaa

SEQ ID NO: 1653653 - RNA, 19 nt, Artificial Sequence
  Description of Artificial Sequence: Synthetic oligonucleotide
cugcacagggucuccugac

SEQ ID NO: 1653654 - RNA, 19 nt, Artificial Sequence
  Description of Artificial Sequence: Synthetic oligonucleotide
gcucggagaagggaguggg

SEQ ID NO: 1653655 - RNA, 19 nt, Artificial Sequence
  Description of Artificial Sequence: Synthetic oligonucleotide
gacgagcucacauauccuu

SEQ ID NO: 1653656 - RNA, 19 nt, Artificial Sequence
  Description of Artificial Sequence: Synthetic oligonucleotide
caguggugagcgagccucg

SEQ ID NO: 1653657 - RNA, 19 nt, Artificial Sequence
  Description of Artificial Sequence: Synthetic oligonucleotide
aguggugagcgagccucgg

SEQ ID NO: 1653658 - RNA, 19 nt, Artificial Sequence
  Description of Artificial Sequence: Synthetic oligonucleotide
ugagcgagccucgguggcc

SEQ ID NO: 1653659 - RNA, 19 nt, Artificial Sequence
  Description of Artificial Sequence: Synthetic oligonucleotide
caguggagacagacuucgg

SEQ ID NO: 1653660 - RNA, 19 nt, Artificial Sequence
  Description of Artificial Sequence: Synthetic oligonucleotide
cagugggucugucuuccug

SEQ ID NO: 1653661 - RNA, 19 nt, Artificial Sequence
  Description of Artificial Sequence: Synthetic oligonucleotide
aacgacggagagucuccuu

SEQ ID NO: 1653662 - RNA, 19 nt, Artificial Sequence
  Description of Artificial Sequence: Synthetic oligonucleotide
gguggauaggguccuccug

SEQ ID NO: 1653663 - RNA, 19 nt, Artificial Sequence
  Description of Artificial Sequence: Synthetic oligonucleotide
cuuuacacccagaccauau

SEQ ID NO: 1653664 - RNA, 19 nt, Artificial Sequence
  Description of Artificial Sequence: Synthetic oligonucleotide
ugagacucucggugauuuc

SEQ ID NO: 1653665 - RNA, 19 nt, Artificial Sequence
  Description of Artificial Sequence: Synthetic oligonucleotide
gugagcgagccucgguggc

SEQ ID NO: 1653666 - RNA, 19 nt, Artificial Sequence
  Description of Artificial Sequence: Synthetic oligonucleotide
accguaaaagugacaaaua

SEQ ID NO: 1653667 - RNA, 19 nt, Artificial Sequence
  Description of Artificial Sequence: Synthetic oligonucleotide
agugcaguccuggugccaa

SEQ ID NO: 1653668 - RNA, 19 nt, Artificial Sequence
  Description of Artificial Sequence: Synthetic oligonucleotide
agacucucggugauuucug

SEQ ID NO: 1653669 - RNA, 19 nt, Artificial Sequence
  Description of Artificial Sequence: Synthetic oligonucleotide
gcacagggucuccugaccc

SEQ ID NO: 1653670 - RNA, 19 nt, Artificial Sequence
  Description of Artificial Sequence: Synthetic oligonucleotide
cucucggugauuucugacu

SEQ ID NO: 1653671 - RNA, 19 nt, Artificial Sequence
  Description of Artificial Sequence: Synthetic oligonucleotide
cagccggugccuguguugc

SEQ ID NO: 1653672 - RNA, 19 nt, Artificial Sequence
  Description of Artificial Sequence: Synthetic oligonucleotide
cccacacuaagcaagccca

SEQ ID NO: 1653673 - RNA, 19 nt, Artificial Sequence
  Description of Artificial Sequence: Synthetic oligonucleotide
gacagggagggaccguaaa

SEQ ID NO: 1653674 - RNA, 19 nt, Artificial Sequence
  Description of Artificial Sequence: Synthetic oligonucleotide
gagcucggagaagggagug

SEQ ID NO: 1653675 - RNA, 19 nt, Artificial Sequence
  Description of Artificial Sequence: Synthetic oligonucleotide
gagaagggagugggguagc

SEQ ID NO: 1653676 - RNA, 19 nt, Artificial Sequence
  Description of Artificial Sequence: Synthetic oligonucleotide
uggauaggguccuccuguu

SEQ ID NO: 1653677 - RNA, 19 nt, Artificial Sequence
  Description of Artificial Sequence: Synthetic oligonucleotide
guguuuccuuuugugggac

SEQ ID NO: 1653678 - RNA, 19 nt, Artificial Sequence
  Description of Artificial Sequence: Synthetic oligonucleotide
cuuuugugggacuggugcu

SEQ ID NO: 1653679 - RNA, 19 nt, Artificial Sequence
  Description of Artificial Sequence: Synthetic oligonucleotide
ggcccuuuccucugcacac

SEQ ID NO: 1653680 - RNA, 19 nt, Artificial Sequence
  Description of Artificial Sequence: Synthetic oligonucleotide
ccugacguggacagacagc

SEQ ID NO: 1653681 - RNA, 19 nt, Artificial Sequence
  Description of Artificial Sequence: Synthetic oligonucleotide
ggagucugcgggaaaccag

SEQ ID NO: 1653682 - RNA, 19 nt, Artificial Sequence
  Description of Artificial Sequence: Synthetic oligonucleotide
ccucccacacuaagcaagc

SEQ ID NO: 1653683 - RNA, 19 nt, Artificial Sequence
  Description of Artificial Sequence: Synthetic oligonucleotide
acauauccuuccaggcuca

SEQ ID NO: 1653684 - RNA, 19 nt, Artificial Sequence
  Description of Artificial Sequence: Synthetic oligonucleotide
acgugaacauauauacaua

SEQ ID NO: 1653685 - RNA, 19 nt, Artificial Sequence
  Description of Artificial Sequence: Synthetic oligonucleotide
cgagcucacauauccuucc

SEQ ID NO: 1653686 - RNA, 19 nt, Artificial Sequence
  Description of Artificial Sequence: Synthetic oligonucleotide
ggauagcgugggcagagga

SEQ ID NO: 1653687 - RNA, 19 nt, Artificial Sequence
  Description of Artificial Sequence: Synthetic oligonucleotide
auauccuuccaggcucagu

SEQ ID NO: 1653688 - RNA, 19 nt, Artificial Sequence
  Description of Artificial Sequence: Synthetic oligonucleotide
gagcauaaauacauccuuu

SEQ ID NO: 1653689 - RNA, 19 nt, Artificial Sequence
  Description of Artificial Sequence: Synthetic oligonucleotide
gguuaauauuuuaaauuau

SEQ ID NO: 1653690 - RNA, 19 nt, Artificial Sequence
  Description of Artificial Sequence: Synthetic oligonucleotide
cucgguggccucccauggc

SEQ ID NO: 1653691 - RNA, 19 nt, Artificial Sequence
  Description of Artificial Sequence: Synthetic oligonucleotide
gagucugcgggaaaccagu

SEQ ID NO: 1653692 - RNA, 19 nt, Artificial Sequence
  Description of Artificial Sequence: Synthetic oligonucleotide
ccacuaucccuggagcucg

SEQ ID NO: 1653693 - RNA, 19 nt, Artificial Sequence
  Description of Artificial Sequence: Synthetic oligonucleotide
cacuaucccuggagcucgg

SEQ ID NO: 1653694 - RNA, 19 nt, Artificial Sequence
  Description of Artificial Sequence: Synthetic oligonucleotide
gcgggaaaccaguggagac

SEQ ID NO: 1653695 - RNA, 19 nt, Artificial Sequence
  Description of Artificial Sequence: Synthetic oligonucleotide
gacauacaguggugagcga

SEQ ID NO: 1653696 - RNA, 19 nt, Artificial Sequence
  Description of Artificial Sequence: Synthetic oligonucleotide
gcuggucuacugcacggug

SEQ ID NO: 1653697 - RNA, 19 nt, Artificial Sequence
  Description of Artificial Sequence: Synthetic oligonucleotide
ucagugggucugucuuccu

SEQ ID NO: 1653698 - RNA, 19 nt, Artificial Sequence
  Description of Artificial Sequence: Synthetic oligonucleotide
cacaccuagaaaccucucu

SEQ ID NO: 1653699 - RNA, 19 nt, Artificial Sequence
  Description of Artificial Sequence: Synthetic oligonucleotide
gguggggccugcccugacg

SEQ ID NO: 1653700 - RNA, 19 nt, Artificial Sequence
  Description of Artificial Sequence: Synthetic oligonucleotide
agacuucggcucuggcccu

SEQ ID NO: 1653701 - RNA, 19 nt, Artificial Sequence
  Description of Artificial Sequence: Synthetic oligonucleotide
gacuguugucuccuggauu

SEQ ID NO: 1653702 - RNA, 19 nt, Artificial Sequence
  Description of Artificial Sequence: Synthetic oligonucleotide
gcaacgacgagcucacaua

SEQ ID NO: 1653703 - RNA, 19 nt, Artificial Sequence
  Description of Artificial Sequence: Synthetic oligonucleotide
ggggccugcccugacgugg

SEQ ID NO: 1653704 - RNA, 19 nt, Artificial Sequence
  Description of Artificial Sequence: Synthetic oligonucleotide
ugugagacucucggugauu

SEQ ID NO: 1653705 - RNA, 19 nt, Artificial Sequence
  Description of Artificial Sequence: Synthetic oligonucleotide
cagaugucuuggagcacca

SEQ ID NO: 1653706 - RNA, 19 nt, Artificial Sequence
  Description of Artificial Sequence: Synthetic oligonucleotide
caccuagaaaccucucugu

SEQ ID NO: 1653707 - RNA, 19 nt, Artificial Sequence
  Description of Artificial Sequence: Synthetic oligonucleotide
uccagaugucuuggagcac

SEQ ID NO: 1653708 - RNA, 19 nt, Artificial Sequence
  Description of Artificial Sequence: Synthetic oligonucleotide
agcagcgugagagcauaaa

SEQ ID NO: 1653709 - RNA, 19 nt, Artificial Sequence
  Description of Artificial Sequence: Synthetic oligonucleotide
guggccaguaauggcucug

SEQ ID NO: 1653710 - RNA, 19 nt, Artificial Sequence
  Description of Artificial Sequence: Synthetic oligonucleotide
gugggucugucuuccuguc

SEQ ID NO: 1653711 - RNA, 19 nt, Artificial Sequence
  Description of Artificial Sequence: Synthetic oligonucleotide
cuggcccuuuccucugcac

SEQ ID NO: 1653712 - RNA, 19 nt, Artificial Sequence
  Description of Artificial Sequence: Synthetic oligonucleotide
gucuacugcacgguggccu

SEQ ID NO: 1653713 - RNA, 19 nt, Artificial Sequence
  Description of Artificial Sequence: Synthetic oligonucleotide
agucugcgggaaaccagug

SEQ ID NO: 1653714 - RNA, 19 nt, Artificial Sequence
  Description of Artificial Sequence: Synthetic oligonucleotide
ggugcuggauagcgugggc

SEQ ID NO: 1653715 - RNA, 19 nt, Artificial Sequence
  Description of Artificial Sequence: Synthetic oligonucleotide
cccugacguggacagacag

SEQ ID NO: 1653716 - RNA, 19 nt, Artificial Sequence
  Description of Artificial Sequence: Synthetic oligonucleotide
cuacugcacgguggccucg

SEQ ID NO: 1653717 - RNA, 19 nt, Artificial Sequence
  Description of Artificial Sequence: Synthetic oligonucleotide
uggggauggcugacagcau

SEQ ID NO: 1653718 - RNA, 19 nt, Artificial Sequence
  Description of Artificial Sequence: Synthetic oligonucleotide
agacagccggugccugugu

SEQ ID NO: 1653719 - RNA, 19 nt, Artificial Sequence
  Description of Artificial Sequence: Synthetic oligonucleotide
caacgacgagcucacauau

SEQ ID NO: 1653720 - RNA, 19 nt, Artificial Sequence
  Description of Artificial Sequence: Synthetic oligonucleotide
acugcacgguggccucgag

SEQ ID NO: 1653721 - RNA, 19 nt, Artificial Sequence
  Description of Artificial Sequence: Synthetic oligonucleotide
ggagguggggccugcccug

SEQ ID NO: 1653722 - RNA, 19 nt, Artificial Sequence
  Description of Artificial Sequence: Synthetic oligonucleotide
gccaguaauggcucugcaa

SEQ ID NO: 1653723 - RNA, 19 nt, Artificial Sequence
  Description of Artificial Sequence: Synthetic oligonucleotide
cagaggccuggccacuauc

SEQ ID NO: 1653724 - RNA, 19 nt, Artificial Sequence
  Description of Artificial Sequence: Synthetic oligonucleotide
agguggggccugcccugac

SEQ ID NO: 1653725 - RNA, 19 nt, Artificial Sequence
  Description of Artificial Sequence: Synthetic oligonucleotide
guucugccgcuaggggagg

SEQ ID NO: 1653726 - RNA, 19 nt, Artificial Sequence
  Description of Artificial Sequence: Synthetic oligonucleotide
gcagggaacaacaguucuc

SEQ ID NO: 1653727 - RNA, 19 nt, Artificial Sequence
  Description of Artificial Sequence: Synthetic oligonucleotide
uggggccugcccugacgug

SEQ ID NO: 1653728 - RNA, 19 nt, Artificial Sequence
  Description of Artificial Sequence: Synthetic oligonucleotide
gcagugcaguccuggugcc

SEQ ID NO: 1653729 - RNA, 19 nt, Artificial Sequence
  Description of Artificial Sequence: Synthetic oligonucleotide
gcucugcaagccauagggc

SEQ ID NO: 1653730 - RNA, 19 nt, Artificial Sequence
  Description of Artificial Sequence: Synthetic oligonucleotide
ccguaaaagugacaaauau

SEQ ID NO: 1653731 - RNA, 19 nt, Artificial Sequence
  Description of Artificial Sequence: Synthetic oligonucleotide
gacuggagucugcgggaaa

SEQ ID NO: 1653732 - RNA, 19 nt, Artificial Sequence
  Description of Artificial Sequence: Synthetic oligonucleotide
ucccuggagcucggagaag

SEQ ID NO: 1653733 - RNA, 19 nt, Artificial Sequence
  Description of Artificial Sequence: Synthetic oligonucleotide
ggagacagacuucggcucu

SEQ ID NO: 1653734 - RNA, 19 nt, Artificial Sequence
  Description of Artificial Sequence: Synthetic oligonucleotide
ccucccaccuuucugcaca

SEQ ID NO: 1653735 - RNA, 19 nt, Artificial Sequence
  Description of Artificial Sequence: Synthetic oligonucleotide
guguccucugaagcccaug

SEQ ID NO: 1653736 - RNA, 19 nt, Artificial Sequence
  Description of Artificial Sequence: Synthetic oligonucleotide
cgugggcagaggaaggcug

SEQ ID NO: 1653737 - RNA, 19 nt, Artificial Sequence
  Description of Artificial Sequence: Synthetic oligonucleotide
ccuacuaggcacagaacgu

SEQ ID NO: 1653738 - RNA, 19 nt, Artificial Sequence
  Description of Artificial Sequence: Synthetic oligonucleotide
ggaccguaaaagugacaaa

SEQ ID NO: 1653739 - RNA, 19 nt, Artificial Sequence
  Description of Artificial Sequence: Synthetic oligonucleotide
ggcaacgacgagcucacau

SEQ ID NO: 1653740 - RNA, 19 nt, Artificial Sequence
  Description of Artificial Sequence: Synthetic oligonucleotide
gccacuaucccuggagcuc

SEQ ID NO: 1653741 - RNA, 19 nt, Artificial Sequence
  Description of Artificial Sequence: Synthetic oligonucleotide
gcagcgugagagcauaaau

SEQ ID NO: 1653742 - RNA, 19 nt, Artificial Sequence
  Description of Artificial Sequence: Synthetic oligonucleotide
gcggcaguucugccgcuag

SEQ ID NO: 1653743 - RNA, 19 nt, Artificial Sequence
  Description of Artificial Sequence: Synthetic oligonucleotide
uccugacccauagccccuc

SEQ ID NO: 1653744 - RNA, 19 nt, Artificial Sequence
  Description of Artificial Sequence: Synthetic oligonucleotide
acuaucccuggagcucgga

SEQ ID NO: 1653745 - RNA, 19 nt, Artificial Sequence
  Description of Artificial Sequence: Synthetic oligonucleotide
ccggugccuguguugcugg

SEQ ID NO: 1653746 - RNA, 19 nt, Artificial Sequence
  Description of Artificial Sequence: Synthetic oligonucleotide
agaugucuuggagcaccau

SEQ ID NO: 1653747 - RNA, 19 nt, Artificial Sequence
  Description of Artificial Sequence: Synthetic oligonucleotide
agcccaugguggauagggu

SEQ ID NO: 1653748 - RNA, 19 nt, Artificial Sequence
  Description of Artificial Sequence: Synthetic oligonucleotide
ggccucccauggcagcagg

SEQ ID NO: 1653749 - RNA, 19 nt, Artificial Sequence
  Description of Artificial Sequence: Synthetic oligonucleotide
guggggccugcccugacgu

SEQ ID NO: 1653750 - RNA, 19 nt, Artificial Sequence
  Description of Artificial Sequence: Synthetic oligonucleotide
gcgugagagcauaaauaca

SEQ ID NO: 1653751 - RNA, 19 nt, Artificial Sequence
  Description of Artificial Sequence: Synthetic oligonucleotide
guugcucagcacggcugac

SEQ ID NO: 1653752 - RNA, 19 nt, Artificial Sequence
  Description of Artificial Sequence: Synthetic oligonucleotide
ccuggacauacagugguga

SEQ ID NO: 1653753 - RNA, 19 nt, Artificial Sequence
  Description of Artificial Sequence: Synthetic oligonucleotide
guacacacgugaacauaua

SEQ ID NO: 1653754 - RNA, 19 nt, Artificial Sequence
  Description of Artificial Sequence: Synthetic oligonucleotide
gugagacucucggugauuu

SEQ ID NO: 1653755 - RNA, 19 nt, Artificial Sequence
  Description of Artificial Sequence: Synthetic oligonucleotide
cuacuaggcacagaacguu

SEQ ID NO: 1653756 - RNA, 19 nt, Artificial Sequence
  Description of Artificial Sequence: Synthetic oligonucleotide
cuccucuguccacucugga

SEQ ID NO: 1653757 - RNA, 19 nt, Artificial Sequence
  Description of Artificial Sequence: Synthetic oligonucleotide
agggaccguaaaagugaca

SEQ ID NO: 1653758 - RNA, 19 nt, Artificial Sequence
  Description of Artificial Sequence: Synthetic oligonucleotide
ggccucgagugccugccac

SEQ ID NO: 1653759 - RNA, 19 nt, Artificial Sequence
  Description of Artificial Sequence: Synthetic oligonucleotide
ggccacuaucccuggagcu

SEQ ID NO: 1653760 - RNA, 19 nt, Artificial Sequence
  Description of Artificial Sequence: Synthetic oligonucleotide
cuccuggauucugcacaug

SEQ ID NO: 1653761 - RNA, 19 nt, Artificial Sequence
  Description of Artificial Sequence: Synthetic oligonucleotide
ggccaguaauggcucugca

SEQ ID NO: 1653762 - RNA, 19 nt, Artificial Sequence
  Description of Artificial Sequence: Synthetic oligonucleotide
ggagugggguagcccucgc

SEQ ID NO: 1653763 - RNA, 19 nt, Artificial Sequence
  Description of Artificial Sequence: Synthetic oligonucleotide
ggcauuuuaccuggacaua

SEQ ID NO: 1653764 - RNA, 19 nt, Artificial Sequence
  Description of Artificial Sequence: Synthetic oligonucleotide
agccggugccuguguugcu

SEQ ID NO: 1653765 - RNA, 19 nt, Artificial Sequence
  Description of Artificial Sequence: Synthetic oligonucleotide
gacuggugcuggauagcgu

SEQ ID NO: 1653766 - RNA, 19 nt, Artificial Sequence
  Description of Artificial Sequence: Synthetic oligonucleotide
gccggugccuguguugcug

SEQ ID NO: 1653767 - RNA, 19 nt, Artificial Sequence
  Description of Artificial Sequence: Synthetic oligonucleotide
gggguagcccucgcugcag

SEQ ID NO: 1653768 - RNA, 19 nt, Artificial Sequence
  Description of Artificial Sequence: Synthetic oligonucleotide
ggagcaccauccccuccca

SEQ ID NO: 1653769 - RNA, 19 nt, Artificial Sequence
  Description of Artificial Sequence: Synthetic oligonucleotide
gguccuccuguuuccagau

SEQ ID NO: 1653770 - RNA, 19 nt, Artificial Sequence
  Description of Artificial Sequence: Synthetic oligonucleotide
guggugagcgagccucggu

SEQ ID NO: 1653771 - RNA, 19 nt, Artificial Sequence
  Description of Artificial Sequence: Synthetic oligonucleotide
ggacuguugucuccuggau

SEQ ID NO: 1653772 - RNA, 19 nt, Artificial Sequence
  Description of Artificial Sequence: Synthetic oligonucleotide
ucgcggcaguucugccgcu

SEQ ID NO: 1653773 - RNA, 19 nt, Artificial Sequence
  Description of Artificial Sequence: Synthetic oligonucleotide
ccauagccccuccucuguc

SEQ ID NO: 1653774 - RNA, 19 nt, Artificial Sequence
  Description of Artificial Sequence: Synthetic oligonucleotide
gacagccggugccuguguu

SEQ ID NO: 1653775 - RNA, 19 nt, Artificial Sequence
  Description of Artificial Sequence: Synthetic oligonucleotide
cuccugacccauagccccu

SEQ ID NO: 1653776 - RNA, 19 nt, Artificial Sequence
  Description of Artificial Sequence: Synthetic oligonucleotide
uggcaacgacgagcucaca

SEQ ID NO: 1653777 - RNA, 19 nt, Artificial Sequence
  Description of Artificial Sequence: Synthetic oligonucleotide
ccauagggccggguaggag

SEQ ID NO: 1653778 - RNA, 19 nt, Artificial Sequence
  Description of Artificial Sequence: Synthetic oligonucleotide
cugacccauagccccuccu

SEQ ID NO: 1653779 - RNA, 19 nt, Artificial Sequence
  Description of Artificial Sequence: Synthetic oligonucleotide
ggagcucggagaagggagu

SEQ ID NO: 1653780 - RNA, 19 nt, Artificial Sequence
  Description of Artificial Sequence: Synthetic oligonucleotide
ggacuggagucugcgggaa

SEQ ID NO: 1653781 - RNA, 19 nt, Artificial Sequence
  Description of Artificial Sequence: Synthetic oligonucleotide
ccacacuaagcaagcccaa

SEQ ID NO: 1653782 - RNA, 19 nt, Artificial Sequence
  Description of Artificial Sequence: Synthetic oligonucleotide
cugcacgguggccucgagu

SEQ ID NO: 1653783 - RNA, 19 nt, Artificial Sequence
  Description of Artificial Sequence: Synthetic oligonucleotide
cagcagcgugagagcauaa

SEQ ID NO: 1653784 - RNA, 19 nt, Artificial Sequence
  Description of Artificial Sequence: Synthetic oligonucleotide
ggcugacuuugcccuucuc

SEQ ID NO: 1653785 - RNA, 19 nt, Artificial Sequence
  Description of Artificial Sequence: Synthetic oligonucleotide
cacagaggccuggccacua

SEQ ID NO: 1653786 - RNA, 19 nt, Artificial Sequence
  Description of Artificial Sequence: Synthetic oligonucleotide
ggaaaccaguggagacaga

SEQ ID NO: 1653787 - RNA, 19 nt, Artificial Sequence
  Description of Artificial Sequence: Synthetic oligonucleotide
cuguugucuccuggauucu

SEQ ID NO: 1653788 - RNA, 19 nt, Artificial Sequence
  Description of Artificial Sequence: Synthetic oligonucleotide
gccauagggccggguagga

SEQ ID NO: 1653789 - RNA, 19 nt, Artificial Sequence
  Description of Artificial Sequence: Synthetic oligonucleotide
gcccucgcugcagcuggag

SEQ ID NO: 1653790 - RNA, 19 nt, Artificial Sequence
  Description of Artificial Sequence: Synthetic oligonucleotide
ggagggcauuuuaccugga

SEQ ID NO: 1653791 - RNA, 19 nt, Artificial Sequence
  Description of Artificial Sequence: Synthetic oligonucleotide
cucugaagguguggccagu

SEQ ID NO: 1653792 - RNA, 19 nt, Artificial Sequence
  Description of Artificial Sequence: Synthetic oligonucleotide
ccuaugcggaugugagacu

SEQ ID NO: 1653793 - RNA, 19 nt, Artificial Sequence
  Description of Artificial Sequence: Synthetic oligonucleotide
ccuuuacacccagaccaua

SEQ ID NO: 1653794 - RNA, 19 nt, Artificial Sequence
  Description of Artificial Sequence: Synthetic oligonucleotide
cggcucuggcccuuuccuc

SEQ ID NO: 1653795 - RNA, 19 nt, Artificial Sequence
  Description of Artificial Sequence: Synthetic oligonucleotide
gggccugcccugacgugga

SEQ ID NO: 1653796 - RNA, 19 nt, Artificial Sequence
  Description of Artificial Sequence: Synthetic oligonucleotide
caccauccccucccacacu

SEQ ID NO: 1653797 - RNA, 19 nt, Artificial Sequence
  Description of Artificial Sequence: Synthetic oligonucleotide
ccccucccaccuuucugca

SEQ ID NO: 1653798 - RNA, 19 nt, Artificial Sequence
  Description of Artificial Sequence: Synthetic oligonucleotide
ggagacagggagggaccgu

SEQ ID NO: 1653799 - RNA, 19 nt, Artificial Sequence
  Description of Artificial Sequence: Synthetic oligonucleotide
cugcccugacguggacaga

SEQ ID NO: 1653800 - RNA, 19 nt, Artificial Sequence
  Description of Artificial Sequence: Synthetic oligonucleotide
ccccucccacacuaagcaa

SEQ ID NO: 1653801 - RNA, 19 nt, Artificial Sequence
  Description of Artificial Sequence: Synthetic oligonucleotide
gcucagcacggcugacccu

SEQ ID NO: 1653802 - RNA, 19 nt, Artificial Sequence
  Description of Artificial Sequence: Synthetic oligonucleotide
cggguaggagggcauuuua

SEQ ID NO: 1653803 - RNA, 19 nt, Artificial Sequence
  Description of Artificial Sequence: Synthetic oligonucleotide
ccauccccucccacacuaa

SEQ ID NO: 1653804 - RNA, 19 nt, Artificial Sequence
  Description of Artificial Sequence: Synthetic oligonucleotide
cgacgagcucacauauccu

SEQ ID NO: 1653805 - RNA, 19 nt, Artificial Sequence
  Description of Artificial Sequence: Synthetic oligonucleotide
gcaagccauagggccgggu

SEQ ID NO: 1653806 - RNA, 19 nt, Artificial Sequence
  Description of Artificial Sequence: Synthetic oligonucleotide
cgacggagagucuccuuuu

SEQ ID NO: 1653807 - RNA, 19 nt, Artificial Sequence
  Description of Artificial Sequence: Synthetic oligonucleotide
gccggguaggagggcauuu

SEQ ID NO: 1653808 - RNA, 19 nt, Artificial Sequence
  Description of Artificial Sequence: Synthetic oligonucleotide
ccggguaggagggcauuuu

SEQ ID NO: 1653809 - RNA, 19 nt, Artificial Sequence
  Description of Artificial Sequence: Synthetic oligonucleotide
ggcugacagcauggauuuu

SEQ ID NO: 1653810 - RNA, 19 nt, Artificial Sequence
  Description of Artificial Sequence: Synthetic oligonucleotide
gggccggguaggagggcau

SEQ ID NO: 1653811 - RNA, 19 nt, Artificial Sequence
  Description of Artificial Sequence: Synthetic oligonucleotide
ggccggguaggagggcauu

SEQ ID NO: 1653812 - RNA, 19 nt, Artificial Sequence
  Description of Artificial Sequence: Synthetic oligonucleotide
cgcggcaguucugccgcua

SEQ ID NO: 1653813 - RNA, 19 nt, Artificial Sequence
  Description of Artificial Sequence: Synthetic oligonucleotide
ucugaauaaucccagaucc

SEQ ID NO: 1653814 - RNA, 19 nt, Artificial Sequence
  Description of Artificial Sequence: Synthetic oligonucleotide
uuuguaguuggaaauacgg

SEQ ID NO: 1653815 - RNA, 19 nt, Artificial Sequence
  Description of Artificial Sequence: Synthetic oligonucleotide
ucugauucagcacucaacg

SEQ ID NO: 1653816 - RNA, 19 nt, Artificial Sequence
  Description of Artificial Sequence: Synthetic oligonucleotide
aagaauaguaaauuggccu

SEQ ID NO: 1653817 - RNA, 19 nt, Artificial Sequence
  Description of Artificial Sequence: Synthetic oligonucleotide
cauacuuguauuuaguggg

SEQ ID NO: 1653818 - RNA, 19 nt, Artificial Sequence
  Description of Artificial Sequence: Synthetic oligonucleotide
acguaaaaccaccugaugc

SEQ ID NO: 1653819 - RNA, 19 nt, Artificial Sequence
  Description of Artificial Sequence: Synthetic oligonucleotide
aaaauagucuucguugggc

SEQ ID NO: 1653820 - RNA, 19 nt, Artificial Sequence
  Description of Artificial Sequence: Synthetic oligonucleotide
ucuggauuagcaaaggaca

SEQ ID NO: 1653821 - RNA, 19 nt, Artificial Sequence
  Description of Artificial Sequence: Synthetic oligonucleotide
aauaaucccagaucccuuc

SEQ ID NO: 1653822 - RNA, 19 nt, Artificial Sequence
  Description of Artificial Sequence: Synthetic oligonucleotide
auuagguacccucagaaug

SEQ ID NO: 1653823 - RNA, 19 nt, Artificial Sequence
  Description of Artificial Sequence: Synthetic oligonucleotide
uuagguacccucagaaugg

SEQ ID NO: 1653824 - RNA, 19 nt, Artificial Sequence
  Description of Artificial Sequence: Synthetic oligonucleotide
aaagccagcggccagcggg

SEQ ID NO: 1653825 - RNA, 19 nt, Artificial Sequence
  Description of Artificial Sequence: Synthetic oligonucleotide
ugugcuacgaagaauagua

SEQ ID NO: 1653826 - RNA, 19 nt, Artificial Sequence
  Description of Artificial Sequence: Synthetic oligonucleotide
uucguugucugaauaaucc

SEQ ID NO: 1653827 - RNA, 19 nt, Artificial Sequence
  Description of Artificial Sequence: Synthetic oligonucleotide
ucaacguaaaaccaccuga

SEQ ID NO: 1653828 - RNA, 19 nt, Artificial Sequence
  Description of Artificial Sequence: Synthetic oligonucleotide
uucacuucuauacccaaag

SEQ ID NO: 1653829 - RNA, 19 nt, Artificial Sequence
  Description of Artificial Sequence: Synthetic oligonucleotide
ugacauaacgcacaggcac

SEQ ID NO: 1653830 - RNA, 19 nt, Artificial Sequence
  Description of Artificial Sequence: Synthetic oligonucleotide
acaacguugcugcagaguc

SEQ ID NO: 1653831 - RNA, 19 nt, Artificial Sequence
  Description of Artificial Sequence: Synthetic oligonucleotide
uaaaguguaucucaaacuu

SEQ ID NO: 1653832 - RNA, 19 nt, Artificial Sequence
  Description of Artificial Sequence: Synthetic oligonucleotide
uuucaccucgagaacaacg

SEQ ID NO: 1653833 - RNA, 19 nt, Artificial Sequence
  Description of Artificial Sequence: Synthetic oligonucleotide
ucgagaacaacguugcugc

SEQ ID NO: 1653834 - RNA, 19 nt, Artificial Sequence
  Description of Artificial Sequence: Synthetic oligonucleotide
aauagucuucguugggcac

SEQ ID NO: 1653835 - RNA, 19 nt, Artificial Sequence
  Description of Artificial Sequence: Synthetic oligonucleotide
ugaaccuugauggagaccu

SEQ ID NO: 1653836 - RNA, 19 nt, Artificial Sequence
  Description of Artificial Sequence: Synthetic oligonucleotide
uguaguuggaaauacggau

SEQ ID NO: 1653837 - RNA, 19 nt, Artificial Sequence
  Description of Artificial Sequence: Synthetic oligonucleotide
uaugccacgacuuucuaac

SEQ ID NO: 1653838 - RNA, 19 nt, Artificial Sequence
  Description of Artificial Sequence: Synthetic oligonucleotide
uacgaagaauaguaaauug

SEQ ID NO: 1653839 - RNA, 19 nt, Artificial Sequence
  Description of Artificial Sequence: Synthetic oligonucleotide
auaaaguguaucucaaacu

SEQ ID NO: 1653840 - RNA, 19 nt, Artificial Sequence
  Description of Artificial Sequence: Synthetic oligonucleotide
uaguaaauuggccuugucu

SEQ ID NO: 1653841 - RNA, 19 nt, Artificial Sequence
  Description of Artificial Sequence: Synthetic oligonucleotide
augacaaucguccucucag

SEQ ID NO: 1653842 - RNA, 19 nt, Artificial Sequence
  Description of Artificial Sequence: Synthetic oligonucleotide
cacuucuauacccaaagcc

SEQ ID NO: 1653843 - RNA, 19 nt, Artificial Sequence
  Description of Artificial Sequence: Synthetic oligonucleotide
uuagcaaaggacagugcag

SEQ ID NO: 1653844 - RNA, 19 nt, Artificial Sequence
  Description of Artificial Sequence: Synthetic oligonucleotide
acuuaguccauuucacuuc

SEQ ID NO: 1653845 - RNA, 19 nt, Artificial Sequence
  Description of Artificial Sequence: Synthetic oligonucleotide
cauguuggaggaaugagug

SEQ ID NO: 1653846 - RNA, 19 nt, Artificial Sequence
  Description of Artificial Sequence: Synthetic oligonucleotide
uguaguggaaaugacaauc

SEQ ID NO: 1653847 - RNA, 19 nt, Artificial Sequence
  Description of Artificial Sequence: Synthetic oligonucleotide
gaaauacggaugcagaaga

SEQ ID NO: 1653848 - RNA, 19 nt, Artificial Sequence
  Description of Artificial Sequence: Synthetic oligonucleotide
uugagagaccgauacauga

SEQ ID NO: 1653849 - RNA, 19 nt, Artificial Sequence
  Description of Artificial Sequence: Synthetic oligonucleotide
acgaagaauaguaaauugg

SEQ ID NO: 1653850 - RNA, 19 nt, Artificial Sequence
  Description of Artificial Sequence: Synthetic oligonucleotide
acaaucguccucucaggcc

SEQ ID NO: 1653851 - RNA, 19 nt, Artificial Sequence
  Description of Artificial Sequence: Synthetic oligonucleotide
uccacaaaugucacuguag

SEQ ID NO: 1653852 - RNA, 19 nt, Artificial Sequence
  Description of Artificial Sequence: Synthetic oligonucleotide
gaauguccccaguacaagg

SEQ ID NO: 1653853 - RNA, 19 nt, Artificial Sequence
  Description of Artificial Sequence: Synthetic oligonucleotide
aauuggccuugucuguucg

SEQ ID NO: 1653854 - RNA, 19 nt, Artificial Sequence
  Description of Artificial Sequence: Synthetic oligonucleotide
uguugaauuagguacccuc

SEQ ID NO: 1653855 - RNA, 19 nt, Artificial Sequence
  Description of Artificial Sequence: Synthetic oligonucleotide
cacauuguagccaaacaac

SEQ ID NO: 1653856 - RNA, 19 nt, Artificial Sequence
  Description of Artificial Sequence: Synthetic oligonucleotide
cagucgaagaaaugaaccg

SEQ ID NO: 1653857 - RNA, 19 nt, Artificial Sequence
  Description of Artificial Sequence: Synthetic oligonucleotide
gaagaauaguaaauuggcc

SEQ ID NO: 1653858 - RNA, 19 nt, Artificial Sequence
  Description of Artificial Sequence: Synthetic oligonucleotide
uugaauuagguacccucag

SEQ ID NO: 1653859 - RNA, 19 nt, Artificial Sequence
  Description of Artificial Sequence: Synthetic oligonucleotide
aaaguguaucucaaacuuc

SEQ ID NO: 1653860 - RNA, 19 nt, Artificial Sequence
  Description of Artificial Sequence: Synthetic oligonucleotide
aaguguaucucaaacuucu

SEQ ID NO: 1653861 - RNA, 19 nt, Artificial Sequence
  Description of Artificial Sequence: Synthetic oligonucleotide
agaccgauacaugacagac

SEQ ID NO: 1653862 - RNA, 19 nt, Artificial Sequence
  Description of Artificial Sequence: Synthetic oligonucleotide
ugauucagcacucaacgua

SEQ ID NO: 1653863 - RNA, 19 nt, Artificial Sequence
  Description of Artificial Sequence: Synthetic oligonucleotide
uuggaaauacggaugcaga

SEQ ID NO: 1653864 - RNA, 19 nt, Artificial Sequence
  Description of Artificial Sequence: Synthetic oligonucleotide
agugcagguuuguaguugg

SEQ ID NO: 1653865 - RNA, 19 nt, Artificial Sequence
  Description of Artificial Sequence: Synthetic oligonucleotide
aauguccccaguacaaggg

SEQ ID NO: 1653866 - RNA, 19 nt, Artificial Sequence
  Description of Artificial Sequence: Synthetic oligonucleotide
ggaugcagaagauggaugg

SEQ ID NO: 1653867 - RNA, 19 nt, Artificial Sequence
  Description of Artificial Sequence: Synthetic oligonucleotide
uuguaguuggaaauacgga

SEQ ID NO: 1653868 - RNA, 19 nt, Artificial Sequence
  Description of Artificial Sequence: Synthetic oligonucleotide
ucuauccugcccaaugcug

SEQ ID NO: 1653869 - RNA, 19 nt, Artificial Sequence
  Description of Artificial Sequence: Synthetic oligonucleotide
agaauaguaaauuggccuu

SEQ ID NO: 1653870 - RNA, 19 nt, Artificial Sequence
  Description of Artificial Sequence: Synthetic oligonucleotide
caaucguccucucaggccc

SEQ ID NO: 1653871 - RNA, 19 nt, Artificial Sequence
  Description of Artificial Sequence: Synthetic oligonucleotide
cuucuauacccaaagccac

SEQ ID NO: 1653872 - RNA, 19 nt, Artificial Sequence
  Description of Artificial Sequence: Synthetic oligonucleotide
guaguggaaaugacaaucg

SEQ ID NO: 1653873 - RNA, 19 nt, Artificial Sequence
  Description of Artificial Sequence: Synthetic oligonucleotide
aauuagguacccucagaau

SEQ ID NO: 1653874 - RNA, 19 nt, Artificial Sequence
  Description of Artificial Sequence: Synthetic oligonucleotide
ugggcagugacauucacua

SEQ ID NO: 1653875 - RNA, 19 nt, Artificial Sequence
  Description of Artificial Sequence: Synthetic oligonucleotide
aguggaaaugacaaucguc

SEQ ID NO: 1653876 - RNA, 19 nt, Artificial Sequence
  Description of Artificial Sequence: Synthetic oligonucleotide
ugucugaauaaucccagau

SEQ ID NO: 1653877 - RNA, 19 nt, Artificial Sequence
  Description of Artificial Sequence: Synthetic oligonucleotide
ugaauuagguacccucaga

SEQ ID NO: 1653878 - RNA, 19 nt, Artificial Sequence
  Description of Artificial Sequence: Synthetic oligonucleotide
cacucaacguaaaaccacc

SEQ ID NO: 1653879 - RNA, 19 nt, Artificial Sequence
  Description of Artificial Sequence: Synthetic oligonucleotide
guuggaaauacggaugcag

SEQ ID NO: 1653880 - RNA, 19 nt, Artificial Sequence
  Description of Artificial Sequence: Synthetic oligonucleotide
gagaugacgagagagguga

SEQ ID NO: 1653881 - RNA, 19 nt, Artificial Sequence
  Description of Artificial Sequence: Synthetic oligonucleotide
ucuauacccaaagccacag

SEQ ID NO: 1653882 - RNA, 19 nt, Artificial Sequence
  Description of Artificial Sequence: Synthetic oligonucleotide
cuguagugagccauggggc

SEQ ID NO: 1653883 - RNA, 19 nt, Artificial Sequence
  Description of Artificial Sequence: Synthetic oligonucleotide
uucuaacccggucagcgug

SEQ ID NO: 1653884 - RNA, 19 nt, Artificial Sequence
  Description of Artificial Sequence: Synthetic oligonucleotide
agaacaacguugcugcaga

SEQ ID NO: 1653885 - RNA, 19 nt, Artificial Sequence
  Description of Artificial Sequence: Synthetic oligonucleotide
aacgcacaggcacccaguc

SEQ ID NO: 1653886 - RNA, 19 nt, Artificial Sequence
  Description of Artificial Sequence: Synthetic oligonucleotide
agcagagauccauacuuag

SEQ ID NO: 1653887 - RNA, 19 nt, Artificial Sequence
  Description of Artificial Sequence: Synthetic oligonucleotide
gagauccauacuuagucca

SEQ ID NO: 1653888 - RNA, 19 nt, Artificial Sequence
  Description of Artificial Sequence: Synthetic oligonucleotide
ugagagaccgauacaugac

SEQ ID NO: 1653889 - RNA, 19 nt, Artificial Sequence
  Description of Artificial Sequence: Synthetic oligonucleotide
uguauuuagugggcugugg

SEQ ID NO: 1653890 - RNA, 19 nt, Artificial Sequence
  Description of Artificial Sequence: Synthetic oligonucleotide
aaccggaaggugugccugc

SEQ ID NO: 1653891 - RNA, 19 nt, Artificial Sequence
  Description of Artificial Sequence: Synthetic oligonucleotide
ugacaaucguccucucagg

SEQ ID NO: 1653892 - RNA, 19 nt, Artificial Sequence
  Description of Artificial Sequence: Synthetic oligonucleotide
aaaugaaccggaaggugug

SEQ ID NO: 1653893 - RNA, 19 nt, Artificial Sequence
  Description of Artificial Sequence: Synthetic oligonucleotide
ugcuacgaagaauaguaaa

SEQ ID NO: 1653894 - RNA, 19 nt, Artificial Sequence
  Description of Artificial Sequence: Synthetic oligonucleotide
aaagccacagggaguuggc

SEQ ID NO: 1653895 - RNA, 19 nt, Artificial Sequence
  Description of Artificial Sequence: Synthetic oligonucleotide
aauaguaaauuggccuugu

SEQ ID NO: 1653896 - RNA, 19 nt, Artificial Sequence
  Description of Artificial Sequence: Synthetic oligonucleotide
uggaaauacggaugcagaa

SEQ ID NO: 1653897 - RNA, 19 nt, Artificial Sequence
  Description of Artificial Sequence: Synthetic oligonucleotide
cagcgugugauugagagac

SEQ ID NO: 1653898 - RNA, 19 nt, Artificial Sequence
  Description of Artificial Sequence: Synthetic oligonucleotide
ucguugucugaauaauccc

SEQ ID NO: 1653899 - RNA, 19 nt, Artificial Sequence
  Description of Artificial Sequence: Synthetic oligonucleotide
auacuuguauuuagugggc

SEQ ID NO: 1653900 - RNA, 19 nt, Artificial Sequence
  Description of Artificial Sequence: Synthetic oligonucleotide
cacauagucagggaaggcc

SEQ ID NO: 1653901 - RNA, 19 nt, Artificial Sequence
  Description of Artificial Sequence: Synthetic oligonucleotide
guaucucaaacuucugcug

SEQ ID NO: 1653902 - RNA, 19 nt, Artificial Sequence
  Description of Artificial Sequence: Synthetic oligonucleotide
ucacuucuauacccaaagc

SEQ ID NO: 1653903 - RNA, 19 nt, Artificial Sequence
  Description of Artificial Sequence: Synthetic oligonucleotide
acgacuuucuaacccgguc

SEQ ID NO: 1653904 - RNA, 19 nt, Artificial Sequence
  Description of Artificial Sequence: Synthetic oligonucleotide
auacuuaguccauuucacu

SEQ ID NO: 1653905 - RNA, 19 nt, Artificial Sequence
  Description of Artificial Sequence: Synthetic oligonucleotide
guuuguaguuggaaauacg

SEQ ID NO: 1653906 - RNA, 19 nt, Artificial Sequence
  Description of Artificial Sequence: Synthetic oligonucleotide
ugaugguggguggagcucg

SEQ ID NO: 1653907 - RNA, 19 nt, Artificial Sequence
  Description of Artificial Sequence: Synthetic oligonucleotide
uucuauacccaaagccaca

SEQ ID NO: 1653908 - RNA, 19 nt, Artificial Sequence
  Description of Artificial Sequence: Synthetic oligonucleotide
gaauaguaaauuggccuug

SEQ ID NO: 1653909 - RNA, 19 nt, Artificial Sequence
  Description of Artificial Sequence: Synthetic oligonucleotide
acauaacgcacaggcaccc

SEQ ID NO: 1653910 - RNA, 19 nt, Artificial Sequence
  Description of Artificial Sequence: Synthetic oligonucleotide
ggaauucccaaaugcagcc

SEQ ID NO: 1653911 - RNA, 19 nt, Artificial Sequence
  Description of Artificial Sequence: Synthetic oligonucleotide
cgaagaauaguaaauuggc

SEQ ID NO: 1653912 - RNA, 19 nt, Artificial Sequence
  Description of Artificial Sequence: Synthetic oligonucleotide
auaguaaauuggccuuguc

SEQ ID NO: 1653913 - RNA, 19 nt, Artificial Sequence
  Description of Artificial Sequence: Synthetic oligonucleotide
ugcggaaggaacaucugau

SEQ ID NO: 1653914 - RNA, 19 nt, Artificial Sequence
  Description of Artificial Sequence: Synthetic oligonucleotide
agaccuguguuguugaauu

SEQ ID NO: 1653915 - RNA, 19 nt, Artificial Sequence
  Description of Artificial Sequence: Synthetic oligonucleotide
gaugcagaagauggauggg

SEQ ID NO: 1653916 - RNA, 19 nt, Artificial Sequence
  Description of Artificial Sequence: Synthetic oligonucleotide
gagaacaacguugcugcag

SEQ ID NO: 1653917 - RNA, 19 nt, Artificial Sequence
  Description of Artificial Sequence: Synthetic oligonucleotide
caccucgagaacaacguug

SEQ ID NO: 1653918 - RNA, 19 nt, Artificial Sequence
  Description of Artificial Sequence: Synthetic oligonucleotide
gaaaugacaaucguccucu

SEQ ID NO: 1653919 - RNA, 19 nt, Artificial Sequence
  Description of Artificial Sequence: Synthetic oligonucleotide
ugacacguccacaaauguc

SEQ ID NO: 1653920 - RNA, 19 nt, Artificial Sequence
  Description of Artificial Sequence: Synthetic oligonucleotide
gagagaccgauacaugaca

SEQ ID NO: 1653921 - RNA, 19 nt, Artificial Sequence
  Description of Artificial Sequence: Synthetic oligonucleotide
ggaggaaugagugacauaa

SEQ ID NO: 1653922 - RNA, 19 nt, Artificial Sequence
  Description of Artificial Sequence: Synthetic oligonucleotide
uaguccauuucacuucuau

SEQ ID NO: 1653923 - RNA, 19 nt, Artificial Sequence
  Description of Artificial Sequence: Synthetic oligonucleotide
gacauaacgcacaggcacc

SEQ ID NO: 1653924 - RNA, 19 nt, Artificial Sequence
  Description of Artificial Sequence: Synthetic oligonucleotide
cucgagaacaacguugcug

SEQ ID NO: 1653925 - RNA, 19 nt, Artificial Sequence
  Description of Artificial Sequence: Synthetic oligonucleotide
ggugccaugcugaauaaag

SEQ ID NO: 1653926 - RNA, 19 nt, Artificial Sequence
  Description of Artificial Sequence: Synthetic oligonucleotide
augaaccggaaggugugcc

SEQ ID NO: 1653927 - RNA, 19 nt, Artificial Sequence
  Description of Artificial Sequence: Synthetic oligonucleotide
cucaacguaaaaccaccug

SEQ ID NO: 1653928 - RNA, 19 nt, Artificial Sequence
  Description of Artificial Sequence: Synthetic oligonucleotide
auggccgcaauaugccacg

SEQ ID NO: 1653929 - RNA, 19 nt, Artificial Sequence
  Description of Artificial Sequence: Synthetic oligonucleotide
agacugaaccuugauggag

SEQ ID NO: 1653930 - RNA, 19 nt, Artificial Sequence
  Description of Artificial Sequence: Synthetic oligonucleotide
guauuuagugggcugugga

SEQ ID NO: 1653931 - RNA, 19 nt, Artificial Sequence
  Description of Artificial Sequence: Synthetic oligonucleotide
ccauuucacuucuauaccc

SEQ ID NO: 1653932 - RNA, 19 nt, Artificial Sequence
  Description of Artificial Sequence: Synthetic oligonucleotide
agcaggcuguauuucaccu

SEQ ID NO: 1653933 - RNA, 19 nt, Artificial Sequence
  Description of Artificial Sequence: Synthetic oligonucleotide
caagggcccuucauguugg

SEQ ID NO: 1653934 - RNA, 19 nt, Artificial Sequence
  Description of Artificial Sequence: Synthetic oligonucleotide
gauugagagaccgauacau

SEQ ID NO: 1653935 - RNA, 19 nt, Artificial Sequence
  Description of Artificial Sequence: Synthetic oligonucleotide
ggaaauacggaugcagaag

SEQ ID NO: 1653936 - RNA, 19 nt, Artificial Sequence
  Description of Artificial Sequence: Synthetic oligonucleotide
cuucggcugcauuggaagg

SEQ ID NO: 1653937 - RNA, 19 nt, Artificial Sequence
  Description of Artificial Sequence: Synthetic oligonucleotide
gaugacgagagaggugaag

SEQ ID NO: 1653938 - RNA, 19 nt, Artificial Sequence
  Description of Artificial Sequence: Synthetic oligonucleotide
uucguugggcacuucugga

SEQ ID NO: 1653939 - RNA, 19 nt, Artificial Sequence
  Description of Artificial Sequence: Synthetic oligonucleotide
uccauacuuaguccauuuc

SEQ ID NO: 1653940 - RNA, 19 nt, Artificial Sequence
  Description of Artificial Sequence: Synthetic oligonucleotide
ugauggagaccuguguugu

SEQ ID NO: 1653941 - RNA, 19 nt, Artificial Sequence
  Description of Artificial Sequence: Synthetic oligonucleotide
guugaauuagguacccuca

SEQ ID NO: 1653942 - RNA, 19 nt, Artificial Sequence
  Description of Artificial Sequence: Synthetic oligonucleotide
cugugcacagagaugacga

SEQ ID NO: 1653943 - RNA, 19 nt, Artificial Sequence
  Description of Artificial Sequence: Synthetic oligonucleotide
ggaauggagaagaucuggg

SEQ ID NO: 1653944 - RNA, 19 nt, Artificial Sequence
  Description of Artificial Sequence: Synthetic oligonucleotide
uggcaagggcccuucaugu

SEQ ID NO: 1653945 - RNA, 19 nt, Artificial Sequence
  Description of Artificial Sequence: Synthetic oligonucleotide
ugugauugagagaccgaua

SEQ ID NO: 1653946 - RNA, 19 nt, Artificial Sequence
  Description of Artificial Sequence: Synthetic oligonucleotide
uguucguugucugaauaau

SEQ ID NO: 1653947 - RNA, 19 nt, Artificial Sequence
  Description of Artificial Sequence: Synthetic oligonucleotide
ugaaagccagcggccagcg

SEQ ID NO: 1653948 - RNA, 19 nt, Artificial Sequence
  Description of Artificial Sequence: Synthetic oligonucleotide
uacggaugcagaagaugga

SEQ ID NO: 1653949 - RNA, 19 nt, Artificial Sequence
  Description of Artificial Sequence: Synthetic oligonucleotide
gcagucgaagaaaugaacc

SEQ ID NO: 1653950 - RNA, 19 nt, Artificial Sequence
  Description of Artificial Sequence: Synthetic oligonucleotide
gguacccucagaauggcag

SEQ ID NO: 1653951 - RNA, 19 nt, Artificial Sequence
  Description of Artificial Sequence: Synthetic oligonucleotide
ugcagaagauggauggguu

SEQ ID NO: 1653952 - RNA, 19 nt, Artificial Sequence
  Description of Artificial Sequence: Synthetic oligonucleotide
gauuagcaaaggacagugc

SEQ ID NO: 1653953 - RNA, 19 nt, Artificial Sequence
  Description of Artificial Sequence: Synthetic oligonucleotide
guaucugauauggcugcgg

SEQ ID NO: 1653954 - RNA, 19 nt, Artificial Sequence
  Description of Artificial Sequence: Synthetic oligonucleotide
gucagucugaguugacagc

SEQ ID NO: 1653955 - RNA, 19 nt, Artificial Sequence
  Description of Artificial Sequence: Synthetic oligonucleotide
agagaccgauacaugacag

SEQ ID NO: 1653956 - RNA, 19 nt, Artificial Sequence
  Description of Artificial Sequence: Synthetic oligonucleotide
ggaguaucugauauggcug

SEQ ID NO: 1653957 - RNA, 19 nt, Artificial Sequence
  Description of Artificial Sequence: Synthetic oligonucleotide
uguaucuggccgguggcug

SEQ ID NO: 1653958 - RNA, 19 nt, Artificial Sequence
  Description of Artificial Sequence: Synthetic oligonucleotide
uucggcugcauuggaaggc

SEQ ID NO: 1653959 - RNA, 19 nt, Artificial Sequence
  Description of Artificial Sequence: Synthetic oligonucleotide
cauuggaaggccuggcuca

SEQ ID NO: 1653960 - RNA, 19 nt, Artificial Sequence
  Description of Artificial Sequence: Synthetic oligonucleotide
uuucuaacccggucagcgu

SEQ ID NO: 1653961 - RNA, 19 nt, Artificial Sequence
  Description of Artificial Sequence: Synthetic oligonucleotide
uggauuagcaaaggacagu

SEQ ID NO: 1653962 - RNA, 19 nt, Artificial Sequence
  Description of Artificial Sequence: Synthetic oligonucleotide
ucuaacccggucagcgugu

SEQ ID NO: 1653963 - RNA, 19 nt, Artificial Sequence
  Description of Artificial Sequence: Synthetic oligonucleotide
uugucuguucguugucuga

SEQ ID NO: 1653964 - RNA, 19 nt, Artificial Sequence
  Description of Artificial Sequence: Synthetic oligonucleotide
aguaucugauauggcugcg

SEQ ID NO: 1653965 - RNA, 19 nt, Artificial Sequence
  Description of Artificial Sequence: Synthetic oligonucleotide
uacuuguauuuagugggcu

SEQ ID NO: 1653966 - RNA, 19 nt, Artificial Sequence
  Description of Artificial Sequence: Synthetic oligonucleotide
gccacgacuuucuaacccg

SEQ ID NO: 1653967 - RNA, 19 nt, Artificial Sequence
  Description of Artificial Sequence: Synthetic oligonucleotide
ggaaaugacaaucguccuc

SEQ ID NO: 1653968 - RNA, 19 nt, Artificial Sequence
  Description of Artificial Sequence: Synthetic oligonucleotide
auggagaccuguguuguug

SEQ ID NO: 1653969 - RNA, 19 nt, Artificial Sequence
  Description of Artificial Sequence: Synthetic oligonucleotide
auaugccacgacuuucuaa

SEQ ID NO: 1653970 - RNA, 19 nt, Artificial Sequence
  Description of Artificial Sequence: Synthetic oligonucleotide
agcacucaacguaaaacca

SEQ ID NO: 1653971 - RNA, 19 nt, Artificial Sequence
  Description of Artificial Sequence: Synthetic oligonucleotide
gacgagagaggugaaggca

SEQ ID NO: 1653972 - RNA, 19 nt, Artificial Sequence
  Description of Artificial Sequence: Synthetic oligonucleotide
ugucuguucguugucugaa

SEQ ID NO: 1653973 - RNA, 19 nt, Artificial Sequence
  Description of Artificial Sequence: Synthetic oligonucleotide
auagucuucguugggcacu

SEQ ID NO: 1653974 - RNA, 19 nt, Artificial Sequence
  Description of Artificial Sequence: Synthetic oligonucleotide
gaacaacguugcugcagag

SEQ ID NO: 1653975 - RNA, 19 nt, Artificial Sequence
  Description of Artificial Sequence: Synthetic oligonucleotide
aguccauuucacuucuaua

SEQ ID NO: 1653976 - RNA, 19 nt, Artificial Sequence
  Description of Artificial Sequence: Synthetic oligonucleotide
cugaauguccccaguacaa

SEQ ID NO: 1653977 - RNA, 19 nt, Artificial Sequence
  Description of Artificial Sequence: Synthetic oligonucleotide
aacccggucagcgugugau

SEQ ID NO: 1653978 - RNA, 19 nt, Artificial Sequence
  Description of Artificial Sequence: Synthetic oligonucleotide
gguggguggagcucggaag

SEQ ID NO: 1653979 - RNA, 19 nt, Artificial Sequence
  Description of Artificial Sequence: Synthetic oligonucleotide
agauugcacauuguagcca

SEQ ID NO: 1653980 - RNA, 19 nt, Artificial Sequence
  Description of Artificial Sequence: Synthetic oligonucleotide
agccagauugcacauugua

SEQ ID NO: 1653981 - RNA, 19 nt, Artificial Sequence
  Description of Artificial Sequence: Synthetic oligonucleotide
aaauacggaugcagaagau

SEQ ID NO: 1653982 - RNA, 19 nt, Artificial Sequence
  Description of Artificial Sequence: Synthetic oligonucleotide
gagaccgauacaugacaga

SEQ ID NO: 1653983 - RNA, 19 nt, Artificial Sequence
  Description of Artificial Sequence: Synthetic oligonucleotide
auccauacuuaguccauuu

SEQ ID NO: 1653984 - RNA, 19 nt, Artificial Sequence
  Description of Artificial Sequence: Synthetic oligonucleotide
ugacagacugaaccuugau

SEQ ID NO: 1653985 - RNA, 19 nt, Artificial Sequence
  Description of Artificial Sequence: Synthetic oligonucleotide
gccagauugcacauuguag

SEQ ID NO: 1653986 - RNA, 19 nt, Artificial Sequence
  Description of Artificial Sequence: Synthetic oligonucleotide
gauauggcugcggaaggaa

SEQ ID NO: 1653987 - RNA, 19 nt, Artificial Sequence
  Description of Artificial Sequence: Synthetic oligonucleotide
ccuucggcugcauuggaag

SEQ ID NO: 1653988 - RNA, 19 nt, Artificial Sequence
  Description of Artificial Sequence: Synthetic oligonucleotide
guucguugucugaauaauc

SEQ ID NO: 1653989 - RNA, 19 nt, Artificial Sequence
  Description of Artificial Sequence: Synthetic oligonucleotide
cucgccugugcuacgaaga

SEQ ID NO: 1653990 - RNA, 19 nt, Artificial Sequence
  Description of Artificial Sequence: Synthetic oligonucleotide
gaugcuugcaucagucugu

SEQ ID NO: 1653991 - RNA, 19 nt, Artificial Sequence
  Description of Artificial Sequence: Synthetic oligonucleotide
gcgugugauugagagaccg

SEQ ID NO: 1653992 - RNA, 19 nt, Artificial Sequence
  Description of Artificial Sequence: Synthetic oligonucleotide
ucgccugugcuacgaagaa

SEQ ID NO: 1653993 - RNA, 19 nt, Artificial Sequence
  Description of Artificial Sequence: Synthetic oligonucleotide
auacccaaagccacaggga

SEQ ID NO: 1653994 - RNA, 19 nt, Artificial Sequence
  Description of Artificial Sequence: Synthetic oligonucleotide
agcccacaggggauggugc

SEQ ID NO: 1653995 - RNA, 19 nt, Artificial Sequence
  Description of Artificial Sequence: Synthetic oligonucleotide
ccugaugcuugcaucaguc

SEQ ID NO: 1653996 - RNA, 19 nt, Artificial Sequence
  Description of Artificial Sequence: Synthetic oligonucleotide
gcugaauguccccaguaca

SEQ ID NO: 1653997 - RNA, 19 nt, Artificial Sequence
  Description of Artificial Sequence: Synthetic oligonucleotide
aucugauauggcugcggaa

SEQ ID NO: 1653998 - RNA, 19 nt, Artificial Sequence
  Description of Artificial Sequence: Synthetic oligonucleotide
cuguucguugucugaauaa

SEQ ID NO: 1653999 - RNA, 19 nt, Artificial Sequence
  Description of Artificial Sequence: Synthetic oligonucleotide
ggcuguauuucaccucgag

SEQ ID NO: 1654000 - RNA, 19 nt, Artificial Sequence
  Description of Artificial Sequence: Synthetic oligonucleotide
acggaugcagaagauggau

SEQ ID NO: 1654001 - RNA, 19 nt, Artificial Sequence
  Description of Artificial Sequence: Synthetic oligonucleotide
gaaagccagcggccagcgg

SEQ ID NO: 1654002 - RNA, 19 nt, Artificial Sequence
  Description of Artificial Sequence: Synthetic oligonucleotide
ucaccucgagaacaacguu

SEQ ID NO: 1654003 - RNA, 19 nt, Artificial Sequence
  Description of Artificial Sequence: Synthetic oligonucleotide
cucuggaauggagaagauc

SEQ ID NO: 1654004 - RNA, 19 nt, Artificial Sequence
  Description of Artificial Sequence: Synthetic oligonucleotide
ggcucuggaauggagaaga

SEQ ID NO: 1654005 - RNA, 19 nt, Artificial Sequence
  Description of Artificial Sequence: Synthetic oligonucleotide
acccuguaaccaggguugc

SEQ ID NO: 1654006 - RNA, 19 nt, Artificial Sequence
  Description of Artificial Sequence: Synthetic oligonucleotide
cuuaguccauuucacuucu

SEQ ID NO: 1654007 - RNA, 19 nt, Artificial Sequence
  Description of Artificial Sequence: Synthetic oligonucleotide
gcugacacguccacaaaug

SEQ ID NO: 1654008 - RNA, 19 nt, Artificial Sequence
  Description of Artificial Sequence: Synthetic oligonucleotide
uuguaucuggccgguggcu

SEQ ID NO: 1654009 - RNA, 19 nt, Artificial Sequence
  Description of Artificial Sequence: Synthetic oligonucleotide
auuggccuugucuguucgu

SEQ ID NO: 1654010 - RNA, 19 nt, Artificial Sequence
  Description of Artificial Sequence: Synthetic oligonucleotide
cugcggaaggaacaucuga

SEQ ID NO: 1654011 - RNA, 19 nt, Artificial Sequence
  Description of Artificial Sequence: Synthetic oligonucleotide
gaugguggguggagcucgg

SEQ ID NO: 1654012 - RNA, 19 nt, Artificial Sequence
  Description of Artificial Sequence: Synthetic oligonucleotide
agccuggcguugauggugg

SEQ ID NO: 1654013 - RNA, 19 nt, Artificial Sequence
  Description of Artificial Sequence: Synthetic oligonucleotide
acaugacagacugaaccuu

SEQ ID NO: 1654014 - RNA, 19 nt, Artificial Sequence
  Description of Artificial Sequence: Synthetic oligonucleotide
agcgugugauugagagacc

SEQ ID NO: 1654015 - RNA, 19 nt, Artificial Sequence
  Description of Artificial Sequence: Synthetic oligonucleotide
cucggaagccugccucugc

SEQ ID NO: 1654016 - RNA, 19 nt, Artificial Sequence
  Description of Artificial Sequence: Synthetic oligonucleotide
caacguaaaaccaccugau

SEQ ID NO: 1654017 - RNA, 19 nt, Artificial Sequence
  Description of Artificial Sequence: Synthetic oligonucleotide
gcauuggaaggccuggcuc

SEQ ID NO: 1654018 - RNA, 19 nt, Artificial Sequence
  Description of Artificial Sequence: Synthetic oligonucleotide
accagagauggccgcaaua

SEQ ID NO: 1654019 - RNA, 19 nt, Artificial Sequence
  Description of Artificial Sequence: Synthetic oligonucleotide
agauccauacuuaguccau

SEQ ID NO: 1654020 - RNA, 19 nt, Artificial Sequence
  Description of Artificial Sequence: Synthetic oligonucleotide
cuguguuguugaauuaggu

SEQ ID NO: 1654021 - RNA, 19 nt, Artificial Sequence
  Description of Artificial Sequence: Synthetic oligonucleotide
guuggaggaaugagugaca

SEQ ID NO: 1654022 - RNA, 19 nt, Artificial Sequence
  Description of Artificial Sequence: Synthetic oligonucleotide
gcacucaacguaaaaccac

SEQ ID NO: 1654023 - RNA, 19 nt, Artificial Sequence
  Description of Artificial Sequence: Synthetic oligonucleotide
aucugugcacagagaugac

SEQ ID NO: 1654024 - RNA, 19 nt, Artificial Sequence
  Description of Artificial Sequence: Synthetic oligonucleotide
ccacccuucggcugcauug

SEQ ID NO: 1654025 - RNA, 19 nt, Artificial Sequence
  Description of Artificial Sequence: Synthetic oligonucleotide
cagggcugcuguagugagc

SEQ ID NO: 1654026 - RNA, 19 nt, Artificial Sequence
  Description of Artificial Sequence: Synthetic oligonucleotide
cuacgaagaauaguaaauu

SEQ ID NO: 1654027 - RNA, 19 nt, Artificial Sequence
  Description of Artificial Sequence: Synthetic oligonucleotide
gcagggcugcuguagugag

SEQ ID NO: 1654028 - RNA, 19 nt, Artificial Sequence
  Description of Artificial Sequence: Synthetic oligonucleotide
uagugggcuguggaguauc

SEQ ID NO: 1654029 - RNA, 19 nt, Artificial Sequence
  Description of Artificial Sequence: Synthetic oligonucleotide
gcugaccagagauggccgc

SEQ ID NO: 1654030 - RNA, 19 nt, Artificial Sequence
  Description of Artificial Sequence: Synthetic oligonucleotide
ccacgacuuucuaacccgg

SEQ ID NO: 1654031 - RNA, 19 nt, Artificial Sequence
  Description of Artificial Sequence: Synthetic oligonucleotide
gaaccuugauggagaccug

SEQ ID NO: 1654032 - RNA, 19 nt, Artificial Sequence
  Description of Artificial Sequence: Synthetic oligonucleotide
gcuacgaagaauaguaaau

SEQ ID NO: 1654033 - RNA, 19 nt, Artificial Sequence
  Description of Artificial Sequence: Synthetic oligonucleotide
gccagcgggagucccaccc

SEQ ID NO: 1654034 - RNA, 19 nt, Artificial Sequence
  Description of Artificial Sequence: Synthetic oligonucleotide
caaggcaguccugcucgcc

SEQ ID NO: 1654035 - RNA, 19 nt, Artificial Sequence
  Description of Artificial Sequence: Synthetic oligonucleotide
ccugugcuacgaagaauag

SEQ ID NO: 1654036 - RNA, 19 nt, Artificial Sequence
  Description of Artificial Sequence: Synthetic oligonucleotide
aaucguccucucaggcccu

SEQ ID NO: 1654037 - RNA, 19 nt, Artificial Sequence
  Description of Artificial Sequence: Synthetic oligonucleotide
cuggccgguggcuguguac

SEQ ID NO: 1654038 - RNA, 19 nt, Artificial Sequence
  Description of Artificial Sequence: Synthetic oligonucleotide
gcucgccugugcuacgaag

SEQ ID NO: 1654039 - RNA, 19 nt, Artificial Sequence
  Description of Artificial Sequence: Synthetic oligonucleotide
gugugauugagagaccgau

SEQ ID NO: 1654040 - RNA, 19 nt, Artificial Sequence
  Description of Artificial Sequence: Synthetic oligonucleotide
ccucagaauggcagggcug

SEQ ID NO: 1654041 - RNA, 19 nt, Artificial Sequence
  Description of Artificial Sequence: Synthetic oligonucleotide
cugauucagcacucaacgu

SEQ ID NO: 1654042 - RNA, 19 nt, Artificial Sequence
  Description of Artificial Sequence: Synthetic oligonucleotide
gccugugcuacgaagaaua

SEQ ID NO: 1654043 - RNA, 19 nt, Artificial Sequence
  Description of Artificial Sequence: Synthetic oligonucleotide
ucguccucucaggcccugg

SEQ ID NO: 1654044 - RNA, 19 nt, Artificial Sequence
  Description of Artificial Sequence: Synthetic oligonucleotide
ccaccugaugcuugcauca

SEQ ID NO: 1654045 - RNA, 19 nt, Artificial Sequence
  Description of Artificial Sequence: Synthetic oligonucleotide
uccacccuucggcugcauu

SEQ ID NO: 1654046 - RNA, 19 nt, Artificial Sequence
  Description of Artificial Sequence: Synthetic oligonucleotide
gccgcaauaugccacgacu

SEQ ID NO: 1654047 - RNA, 19 nt, Artificial Sequence
  Description of Artificial Sequence: Synthetic oligonucleotide
uggugccaugcugaauaaa

SEQ ID NO: 1654048 - RNA, 19 nt, Artificial Sequence
  Description of Artificial Sequence: Synthetic oligonucleotide
cugcccaaugcugaccaga

SEQ ID NO: 1654049 - RNA, 19 nt, Artificial Sequence
  Description of Artificial Sequence: Synthetic oligonucleotide
ugcucgccugugcuacgaa

SEQ ID NO: 1654050 - RNA, 19 nt, Artificial Sequence
  Description of Artificial Sequence: Synthetic oligonucleotide
gaccgauacaugacagacu

SEQ ID NO: 1654051 - RNA, 19 nt, Artificial Sequence
  Description of Artificial Sequence: Synthetic oligonucleotide
cagcgggagucccacccug

SEQ ID NO: 1654052 - RNA, 19 nt, Artificial Sequence
  Description of Artificial Sequence: Synthetic oligonucleotide
cuaacccggucagcgugug

SEQ ID NO: 1654053 - RNA, 19 nt, Artificial Sequence
  Description of Artificial Sequence: Synthetic oligonucleotide
gugcuacgaagaauaguaa

SEQ ID NO: 1654054 - RNA, 19 nt, Artificial Sequence
  Description of Artificial Sequence: Synthetic oligonucleotide
cgauacaugacagacugaa

SEQ ID NO: 1654055 - RNA, 19 nt, Artificial Sequence
  Description of Artificial Sequence: Synthetic oligonucleotide
uguguacagcaggcuguau

SEQ ID NO: 1654056 - RNA, 19 nt, Artificial Sequence
  Description of Artificial Sequence: Synthetic oligonucleotide
gccaugcugaauaaagugu

SEQ ID NO: 1654057 - RNA, 19 nt, Artificial Sequence
  Description of Artificial Sequence: Synthetic oligonucleotide
gagaccuguguuguugaau

SEQ ID NO: 1654058 - RNA, 19 nt, Artificial Sequence
  Description of Artificial Sequence: Synthetic oligonucleotide
agagucuauccugcccaau

SEQ ID NO: 1654059 - RNA, 19 nt, Artificial Sequence
  Description of Artificial Sequence: Synthetic oligonucleotide
guaucuggccgguggcugu

SEQ ID NO: 1654060 - RNA, 19 nt, Artificial Sequence
  Description of Artificial Sequence: Synthetic oligonucleotide
gauccauacuuaguccauu

SEQ ID NO: 1654061 - RNA, 19 nt, Artificial Sequence
  Description of Artificial Sequence: Synthetic oligonucleotide
cugaccagagauggccgca

SEQ ID NO: 1654062 - RNA, 19 nt, Artificial Sequence
  Description of Artificial Sequence: Synthetic oligonucleotide
cagagucuauccugcccaa

SEQ ID NO: 1654063 - RNA, 19 nt, Artificial Sequence
  Description of Artificial Sequence: Synthetic oligonucleotide
cuguaguggaaaugacaau

SEQ ID NO: 1654064 - RNA, 19 nt, Artificial Sequence
  Description of Artificial Sequence: Synthetic oligonucleotide
caacguugcugcagagucu

SEQ ID NO: 1654065 - RNA, 19 nt, Artificial Sequence
  Description of Artificial Sequence: Synthetic oligonucleotide
ccucugcaggggcugacac

SEQ ID NO: 1654066 - RNA, 19 nt, Artificial Sequence
  Description of Artificial Sequence: Synthetic oligonucleotide
agguacccucagaauggca

SEQ ID NO: 1654067 - RNA, 19 nt, Artificial Sequence
  Description of Artificial Sequence: Synthetic oligonucleotide
uguccacccuucggcugca

SEQ ID NO: 1654068 - RNA, 19 nt, Artificial Sequence
  Description of Artificial Sequence: Synthetic oligonucleotide
uggccgcaauaugccacga

SEQ ID NO: 1654069 - RNA, 19 nt, Artificial Sequence
  Description of Artificial Sequence: Synthetic oligonucleotide
cugugcuacgaagaauagu

SEQ ID NO: 1654070 - RNA, 19 nt, Artificial Sequence
  Description of Artificial Sequence: Synthetic oligonucleotide
ggcugcggaaggaacaucu

SEQ ID NO: 1654071 - RNA, 19 nt, Artificial Sequence
  Description of Artificial Sequence: Synthetic oligonucleotide
gguucagcagagauccaua

SEQ ID NO: 1654072 - RNA, 19 nt, Artificial Sequence
  Description of Artificial Sequence: Synthetic oligonucleotide
gcugcggaaggaacaucug

SEQ ID NO: 1654073 - RNA, 19 nt, Artificial Sequence
  Description of Artificial Sequence: Synthetic oligonucleotide
gucuguucguugucugaau

SEQ ID NO: 1654074 - RNA, 19 nt, Artificial Sequence
  Description of Artificial Sequence: Synthetic oligonucleotide
ggccgcaauaugccacgac

SEQ ID NO: 1654075 - RNA, 19 nt, Artificial Sequence
  Description of Artificial Sequence: Synthetic oligonucleotide
cccggucagcgugugauug

SEQ ID NO: 1654076 - RNA, 19 nt, Artificial Sequence
  Description of Artificial Sequence: Synthetic oligonucleotide
cacgacuuucuaacccggu

SEQ ID NO: 1654077 - RNA, 19 nt, Artificial Sequence
  Description of Artificial Sequence: Synthetic oligonucleotide
ccagcggccagcgggaguc

SEQ ID NO: 1654078 - RNA, 19 nt, Artificial Sequence
  Description of Artificial Sequence: Synthetic oligonucleotide
agaugacgagagaggugaa

SEQ ID NO: 1654079 - RNA, 19 nt, Artificial Sequence
  Description of Artificial Sequence: Synthetic oligonucleotide
agcgggagucccacccugu

SEQ ID NO: 1654080 - RNA, 19 nt, Artificial Sequence
  Description of Artificial Sequence: Synthetic oligonucleotide
acccggucagcgugugauu

SEQ ID NO: 1654081 - RNA, 19 nt, Artificial Sequence
  Description of Artificial Sequence: Synthetic oligonucleotide
cacguccacaaaugucacu

SEQ ID NO: 1654082 - RNA, 19 nt, Artificial Sequence
  Description of Artificial Sequence: Synthetic oligonucleotide
gugcagguuuguaguugga

SEQ ID NO: 1654083 - RNA, 19 nt, Artificial Sequence
  Description of Artificial Sequence: Synthetic oligonucleotide
augguggguggagcucgga

SEQ ID NO: 1654084 - RNA, 19 nt, Artificial Sequence
  Description of Artificial Sequence: Synthetic oligonucleotide
gccgguggcuguguacagc

SEQ ID NO: 1654085 - RNA, 19 nt, Artificial Sequence
  Description of Artificial Sequence: Synthetic oligonucleotide
guccugcucgccugugcua

SEQ ID NO: 1654086 - RNA, 19 nt, Artificial Sequence
  Description of Artificial Sequence: Synthetic oligonucleotide
ggugugccugcagucugca

SEQ ID NO: 1654087 - RNA, 19 nt, Artificial Sequence
  Description of Artificial Sequence: Synthetic oligonucleotide
cugcucgccugugcuacga

SEQ ID NO: 1654088 - RNA, 19 nt, Artificial Sequence
  Description of Artificial Sequence: Synthetic oligonucleotide
aucuggccgguggcugugu

SEQ ID NO: 1654089 - RNA, 19 nt, Artificial Sequence
  Description of Artificial Sequence: Synthetic oligonucleotide
agccagcggccagcgggag

SEQ ID NO: 1654090 - RNA, 19 nt, Artificial Sequence
  Description of Artificial Sequence: Synthetic oligonucleotide
cgugugauugagagaccga

SEQ ID NO: 1654091 - RNA, 19 nt, Artificial Sequence
  Description of Artificial Sequence: Synthetic oligonucleotide
gcggaaggaacaucugauu

SEQ ID NO: 1654092 - RNA, 19 nt, Artificial Sequence
  Description of Artificial Sequence: Synthetic oligonucleotide
ggagcucggaagccugccu

SEQ ID NO: 1654093 - RNA, 19 nt, Artificial Sequence
  Description of Artificial Sequence: Synthetic oligonucleotide
cggaagccugccucugcag

SEQ ID NO: 1654094 - RNA, 19 nt, Artificial Sequence
  Description of Artificial Sequence: Synthetic oligonucleotide
ccgauacaugacagacuga

SEQ ID NO: 1654095 - RNA, 19 nt, Artificial Sequence
  Description of Artificial Sequence: Synthetic oligonucleotide
gcaaaggacagugcagguu

SEQ ID NO: 1654096 - RNA, 19 nt, Artificial Sequence
  Description of Artificial Sequence: Synthetic oligonucleotide
ggguugccacugcaaggaa

SEQ ID NO: 1654097 - RNA, 19 nt, Artificial Sequence
  Description of Artificial Sequence: Synthetic oligonucleotide
cauccugggccugggaauu

SEQ ID NO: 1654098 - RNA, 19 nt, Artificial Sequence
  Description of Artificial Sequence: Synthetic oligonucleotide
ggugccugucagucugagu

SEQ ID NO: 1654099 - RNA, 19 nt, Artificial Sequence
  Description of Artificial Sequence: Synthetic oligonucleotide
ccacccuguaaccaggguu

SEQ ID NO: 1654100 - RNA, 19 nt, Artificial Sequence
  Description of Artificial Sequence: Synthetic oligonucleotide
cccucagaauggcagggcu

SEQ ID NO: 1654101 - RNA, 19 nt, Artificial Sequence
  Description of Artificial Sequence: Synthetic oligonucleotide
cccuucggcugcauuggaa

SEQ ID NO: 1654102 - RNA, 19 nt, Artificial Sequence
  Description of Artificial Sequence: Synthetic oligonucleotide
ccgcaauaugccacgacuu

SEQ ID NO: 1654103 - RNA, 19 nt, Artificial Sequence
  Description of Artificial Sequence: Synthetic oligonucleotide
ggccagcgggagucccacc

SEQ ID NO: 1654104 - RNA, 19 nt, Artificial Sequence
  Description of Artificial Sequence: Synthetic oligonucleotide
gcagccuggcguugauggu

SEQ ID NO: 1654105 - RNA, 19 nt, Artificial Sequence
  Description of Artificial Sequence: Synthetic oligonucleotide
gcgggagucccacccugua

SEQ ID NO: 1654106 - RNA, 19 nt, Artificial Sequence
  Description of Artificial Sequence: Synthetic oligonucleotide
cgcaauaugccacgacuuu

SEQ ID NO: 1654107 - RNA, 19 nt, Artificial Sequence
  Description of Artificial Sequence: Synthetic oligonucleotide
cgggagucccacccuguaa

SEQ ID NO: 1654108 - RNA, 19 nt, Artificial Sequence
  Description of Artificial Sequence: Synthetic oligonucleotide
ccacugcaaggaacaggcu

SEQ ID NO: 1654109 - RNA, 19 nt, Artificial Sequence
  Description of Artificial Sequence: Synthetic oligonucleotide
ccucgagaacaacguugcu

SEQ ID NO: 1654110 - RNA, 19 nt, Artificial Sequence
  Description of Artificial Sequence: Synthetic oligonucleotide
ccagcgggagucccacccu

SEQ ID NO: 1654111 - RNA, 19 nt, Artificial Sequence
  Description of Artificial Sequence: Synthetic oligonucleotide
ggagcccacaggggauggu

SEQ ID NO: 1654112 - RNA, 19 nt, Artificial Sequence
  Description of Artificial Sequence: Synthetic oligonucleotide
gccagcggccagcgggagu

SEQ ID NO: 1654113 - RNA, 19 nt, Artificial Sequence
  Description of Artificial Sequence: Synthetic oligonucleotide
cggcugcauuggaaggccu

SEQ ID NO: 1654114 - RNA, 19 nt, Artificial Sequence
  Description of Artificial Sequence: Synthetic oligonucleotide
uuaggcaucaguuuccccg

SEQ ID NO: 1654115 - RNA, 19 nt, Artificial Sequence
  Description of Artificial Sequence: Synthetic oligonucleotide
aacaccguggccuuggccg

SEQ ID NO: 1654116 - RNA, 19 nt, Artificial Sequence
  Description of Artificial Sequence: Synthetic oligonucleotide
gguaagaugauacaaaggc

SEQ ID NO: 1654117 - RNA, 19 nt, Artificial Sequence
  Description of Artificial Sequence: Synthetic oligonucleotide
uggauuucuucccaaaggg

SEQ ID NO: 1654118 - RNA, 19 nt, Artificial Sequence
  Description of Artificial Sequence: Synthetic oligonucleotide
uucaggaacaauuucaaac

SEQ ID NO: 1654119 - RNA, 19 nt, Artificial Sequence
  Description of Artificial Sequence: Synthetic oligonucleotide
acccaaagaacucagcacc

SEQ ID NO: 1654120 - RNA, 19 nt, Artificial Sequence
  Description of Artificial Sequence: Synthetic oligonucleotide
auggaggggacguaaaacc

SEQ ID NO: 1654121 - RNA, 19 nt, Artificial Sequence
  Description of Artificial Sequence: Synthetic oligonucleotide
uuucaucacaaauagcagc

SEQ ID NO: 1654122 - RNA, 19 nt, Artificial Sequence
  Description of Artificial Sequence: Synthetic oligonucleotide
aauggaccgaaccagcuug

SEQ ID NO: 1654123 - RNA, 19 nt, Artificial Sequence
  Description of Artificial Sequence: Synthetic oligonucleotide
agcauuuucaaacaccgug

SEQ ID NO: 1654124 - RNA, 19 nt, Artificial Sequence
  Description of Artificial Sequence: Synthetic oligonucleotide
caugcaucagacuucaccc

SEQ ID NO: 1654125 - RNA, 19 nt, Artificial Sequence
  Description of Artificial Sequence: Synthetic oligonucleotide
uuagaaacugcccucuuca

SEQ ID NO: 1654126 - RNA, 19 nt, Artificial Sequence
  Description of Artificial Sequence: Synthetic oligonucleotide
ucaggaacaauuucaaacu

SEQ ID NO: 1654127 - RNA, 19 nt, Artificial Sequence
  Description of Artificial Sequence: Synthetic oligonucleotide
auuacugaugguccugacc

SEQ ID NO: 1654128 - RNA, 19 nt, Artificial Sequence
  Description of Artificial Sequence: Synthetic oligonucleotide
caucauggaagccaggucg

SEQ ID NO: 1654129 - RNA, 19 nt, Artificial Sequence
  Description of Artificial Sequence: Synthetic oligonucleotide
ugaccugacagguauacag

SEQ ID NO: 1654130 - RNA, 19 nt, Artificial Sequence
  Description of Artificial Sequence: Synthetic oligonucleotide
uaagaugauacaaaggcuu

SEQ ID NO: 1654131 - RNA, 19 nt, Artificial Sequence
  Description of Artificial Sequence: Synthetic oligonucleotide
ugugauggagacuuuaggu

SEQ ID NO: 1654132 - RNA, 19 nt, Artificial Sequence
  Description of Artificial Sequence: Synthetic oligonucleotide
aaaaccaacuggcgauccc

SEQ ID NO: 1654133 - RNA, 19 nt, Artificial Sequence
  Description of Artificial Sequence: Synthetic oligonucleotide
uggaugagaaaacccaaag

SEQ ID NO: 1654134 - RNA, 19 nt, Artificial Sequence
  Description of Artificial Sequence: Synthetic oligonucleotide
aaggcucauagcugcaucg

SEQ ID NO: 1654135 - RNA, 19 nt, Artificial Sequence
  Description of Artificial Sequence: Synthetic oligonucleotide
agacuuuagguccuguagg

SEQ ID NO: 1654136 - RNA, 19 nt, Artificial Sequence
  Description of Artificial Sequence: Synthetic oligonucleotide
ugguaagaugauacaaagg

SEQ ID NO: 1654137 - RNA, 19 nt, Artificial Sequence
  Description of Artificial Sequence: Synthetic oligonucleotide
cagaauggaguccucaugg

SEQ ID NO: 1654138 - RNA, 19 nt, Artificial Sequence
  Description of Artificial Sequence: Synthetic oligonucleotide
guagauggcacucucauca

SEQ ID NO: 1654139 - RNA, 19 nt, Artificial Sequence
  Description of Artificial Sequence: Synthetic oligonucleotide
cuucauaacaggcaucggc

SEQ ID NO: 1654140 - RNA, 19 nt, Artificial Sequence
  Description of Artificial Sequence: Synthetic oligonucleotide
ucagacuucacccacugau

SEQ ID NO: 1654141 - RNA, 19 nt, Artificial Sequence
  Description of Artificial Sequence: Synthetic oligonucleotide
augauugacacaguuuugg

SEQ ID NO: 1654142 - RNA, 19 nt, Artificial Sequence
  Description of Artificial Sequence: Synthetic oligonucleotide
gagacuuuagguccuguag

SEQ ID NO: 1654143 - RNA, 19 nt, Artificial Sequence
  Description of Artificial Sequence: Synthetic oligonucleotide
gauggcacucucaucaugg

SEQ ID NO: 1654144 - RNA, 19 nt, Artificial Sequence
  Description of Artificial Sequence: Synthetic oligonucleotide
cuggauaguucccacaggg

SEQ ID NO: 1654145 - RNA, 19 nt, Artificial Sequence
  Description of Artificial Sequence: Synthetic oligonucleotide
cugguaagaugauacaaag

SEQ ID NO: 1654146 - RNA, 19 nt, Artificial Sequence
  Description of Artificial Sequence: Synthetic oligonucleotide
ugaccaguucuucauaaca

SEQ ID NO: 1654147 - RNA, 19 nt, Artificial Sequence
  Description of Artificial Sequence: Synthetic oligonucleotide
ugauugacacaguuuuggg

SEQ ID NO: 1654148 - RNA, 19 nt, Artificial Sequence
  Description of Artificial Sequence: Synthetic oligonucleotide
gaccgaaccagcuugcgag

SEQ ID NO: 1654149 - RNA, 19 nt, Artificial Sequence
  Description of Artificial Sequence: Synthetic oligonucleotide
acacaggccguccugaggg

SEQ ID NO: 1654150 - RNA, 19 nt, Artificial Sequence
  Description of Artificial Sequence: Synthetic oligonucleotide
acaaauagcagcauuuuca

SEQ ID NO: 1654151 - RNA, 19 nt, Artificial Sequence
  Description of Artificial Sequence: Synthetic oligonucleotide
ucuuugaccugacagguau

SEQ ID NO: 1654152 - RNA, 19 nt, Artificial Sequence
  Description of Artificial Sequence: Synthetic oligonucleotide
augagaaaacccaaagaac

SEQ ID NO: 1654153 - RNA, 19 nt, Artificial Sequence
  Description of Artificial Sequence: Synthetic oligonucleotide
acucgaguacugcaguagc

SEQ ID NO: 1654154 - RNA, 19 nt, Artificial Sequence
  Description of Artificial Sequence: Synthetic oligonucleotide
cuauauacuguuagacccc

SEQ ID NO: 1654155 - RNA, 19 nt, Artificial Sequence
  Description of Artificial Sequence: Synthetic oligonucleotide
aagaugauacaaaggcuuc

SEQ ID NO: 1654156 - RNA, 19 nt, Artificial Sequence
  Description of Artificial Sequence: Synthetic oligonucleotide
accugacagguauacagac

SEQ ID NO: 1654157 - RNA, 19 nt, Artificial Sequence
  Description of Artificial Sequence: Synthetic oligonucleotide
ugaaucagguuguggauga

SEQ ID NO: 1654158 - RNA, 19 nt, Artificial Sequence
  Description of Artificial Sequence: Synthetic oligonucleotide
aaggcuucauguugaagcu

SEQ ID NO: 1654159 - RNA, 19 nt, Artificial Sequence
  Description of Artificial Sequence: Synthetic oligonucleotide
ugacuggaugagaaaaccc

SEQ ID NO: 1654160 - RNA, 19 nt, Artificial Sequence
  Description of Artificial Sequence: Synthetic oligonucleotide
cucaagacgagcaauuuca

SEQ ID NO: 1654161 - RNA, 19 nt, Artificial Sequence
  Description of Artificial Sequence: Synthetic oligonucleotide
cuggcugguaagaugauac

SEQ ID NO: 1654162 - RNA, 19 nt, Artificial Sequence
  Description of Artificial Sequence: Synthetic oligonucleotide
aaacaccguggccuuggcc

SEQ ID NO: 1654163 - RNA, 19 nt, Artificial Sequence
  Description of Artificial Sequence: Synthetic oligonucleotide
cuugcgagcaccucccucc

SEQ ID NO: 1654164 - RNA, 19 nt, Artificial Sequence
  Description of Artificial Sequence: Synthetic oligonucleotide
uuuagaaacugcccucuuc

SEQ ID NO: 1654165 - RNA, 19 nt, Artificial Sequence
  Description of Artificial Sequence: Synthetic oligonucleotide
agacgagcaauuucaucac

SEQ ID NO: 1654166 - RNA, 19 nt, Artificial Sequence
  Description of Artificial Sequence: Synthetic oligonucleotide
guugcauuacugauggucc

SEQ ID NO: 1654167 - RNA, 19 nt, Artificial Sequence
  Description of Artificial Sequence: Synthetic oligonucleotide
aagaacucagcaccacaug

SEQ ID NO: 1654168 - RNA, 19 nt, Artificial Sequence
  Description of Artificial Sequence: Synthetic oligonucleotide
gggacguaaaaccaacugg

SEQ ID NO: 1654169 - RNA, 19 nt, Artificial Sequence
  Description of Artificial Sequence: Synthetic oligonucleotide
ucagguagguccagggacc

SEQ ID NO: 1654170 - RNA, 19 nt, Artificial Sequence
  Description of Artificial Sequence: Synthetic oligonucleotide
cauuuucaaacaccguggc

SEQ ID NO: 1654171 - RNA, 19 nt, Artificial Sequence
  Description of Artificial Sequence: Synthetic oligonucleotide
aacacucgaguacugcagu

SEQ ID NO: 1654172 - RNA, 19 nt, Artificial Sequence
  Description of Artificial Sequence: Synthetic oligonucleotide
ucggcagaagagcugacga

SEQ ID NO: 1654173 - RNA, 19 nt, Artificial Sequence
  Description of Artificial Sequence: Synthetic oligonucleotide
uggguuugcaugcaucaga

SEQ ID NO: 1654174 - RNA, 19 nt, Artificial Sequence
  Description of Artificial Sequence: Synthetic oligonucleotide
acaugagaguagguuaggc

SEQ ID NO: 1654175 - RNA, 19 nt, Artificial Sequence
  Description of Artificial Sequence: Synthetic oligonucleotide
uuuacgcagccgcagguac

SEQ ID NO: 1654176 - RNA, 19 nt, Artificial Sequence
  Description of Artificial Sequence: Synthetic oligonucleotide
aaacacucgaguacugcag

SEQ ID NO: 1654177 - RNA, 19 nt, Artificial Sequence
  Description of Artificial Sequence: Synthetic oligonucleotide
gaccaguucuucauaacag

SEQ ID NO: 1654178 - RNA, 19 nt, Artificial Sequence
  Description of Artificial Sequence: Synthetic oligonucleotide
gacguaaaaccaacuggcg

SEQ ID NO: 1654179 - RNA, 19 nt, Artificial Sequence
  Description of Artificial Sequence: Synthetic oligonucleotide
ggauaguucccacagggcc

SEQ ID NO: 1654180 - RNA, 19 nt, Artificial Sequence
  Description of Artificial Sequence: Synthetic oligonucleotide
acguaaaaccaacuggcga

SEQ ID NO: 1654181 - RNA, 19 nt, Artificial Sequence
  Description of Artificial Sequence: Synthetic oligonucleotide
ucaugauccggccccagcu

SEQ ID NO: 1654182 - RNA, 19 nt, Artificial Sequence
  Description of Artificial Sequence: Synthetic oligonucleotide
cucaaaggcuucaaggcuc

SEQ ID NO: 1654183 - RNA, 19 nt, Artificial Sequence
  Description of Artificial Sequence: Synthetic oligonucleotide
cugcacaccaccaucuuug

SEQ ID NO: 1654184 - RNA, 19 nt, Artificial Sequence
  Description of Artificial Sequence: Synthetic oligonucleotide
ucguucuggcucuucuucg

SEQ ID NO: 1654185 - RNA, 19 nt, Artificial Sequence
  Description of Artificial Sequence: Synthetic oligonucleotide
cucagguagguccagggac

SEQ ID NO: 1654186 - RNA, 19 nt, Artificial Sequence
  Description of Artificial Sequence: Synthetic oligonucleotide
ucugggcacuucauacugg

SEQ ID NO: 1654187 - RNA, 19 nt, Artificial Sequence
  Description of Artificial Sequence: Synthetic oligonucleotide
gugauggagacuuuagguc

SEQ ID NO: 1654188 - RNA, 19 nt, Artificial Sequence
  Description of Artificial Sequence: Synthetic oligonucleotide
cugugauggagacuuuagg

SEQ ID NO: 1654189 - RNA, 19 nt, Artificial Sequence
  Description of Artificial Sequence: Synthetic oligonucleotide
ccuagcaggcucaugaucc

SEQ ID NO: 1654190 - RNA, 19 nt, Artificial Sequence
  Description of Artificial Sequence: Synthetic oligonucleotide
auggaagccaggucgguug

SEQ ID NO: 1654191 - RNA, 19 nt, Artificial Sequence
  Description of Artificial Sequence: Synthetic oligonucleotide
uacugcaguagcccacagg

SEQ ID NO: 1654192 - RNA, 19 nt, Artificial Sequence
  Description of Artificial Sequence: Synthetic oligonucleotide
aguccgauggggaacacag

SEQ ID NO: 1654193 - RNA, 19 nt, Artificial Sequence
  Description of Artificial Sequence: Synthetic oligonucleotide
aaaccaacuggcgaucccu

SEQ ID NO: 1654194 - RNA, 19 nt, Artificial Sequence
  Description of Artificial Sequence: Synthetic oligonucleotide
uggauaguucccacagggc

SEQ ID NO: 1654195 - RNA, 19 nt, Artificial Sequence
  Description of Artificial Sequence: Synthetic oligonucleotide
ucgaguacugcaguagccc

SEQ ID NO: 1654196 - RNA, 19 nt, Artificial Sequence
  Description of Artificial Sequence: Synthetic oligonucleotide
agguacuucaaccgguacu

SEQ ID NO: 1654197 - RNA, 19 nt, Artificial Sequence
  Description of Artificial Sequence: Synthetic oligonucleotide
agcucagguagguccaggg

SEQ ID NO: 1654198 - RNA, 19 nt, Artificial Sequence
  Description of Artificial Sequence: Synthetic oligonucleotide
accacaugagaguagguua

SEQ ID NO: 1654199 - RNA, 19 nt, Artificial Sequence
  Description of Artificial Sequence: Synthetic oligonucleotide
cuucaaccgguacuucucg

SEQ ID NO: 1654200 - RNA, 19 nt, Artificial Sequence
  Description of Artificial Sequence: Synthetic oligonucleotide
ggacguaaaaccaacuggc

SEQ ID NO: 1654201 - RNA, 19 nt, Artificial Sequence
  Description of Artificial Sequence: Synthetic oligonucleotide
augauccggccccagcucg

SEQ ID NO: 1654202 - RNA, 19 nt, Artificial Sequence
  Description of Artificial Sequence: Synthetic oligonucleotide
aaggguucgugugucagga

SEQ ID NO: 1654203 - RNA, 19 nt, Artificial Sequence
  Description of Artificial Sequence: Synthetic oligonucleotide
gaauggaguccucaugguc

SEQ ID NO: 1654204 - RNA, 19 nt, Artificial Sequence
  Description of Artificial Sequence: Synthetic oligonucleotide
guuguggaugacuggauga

SEQ ID NO: 1654205 - RNA, 19 nt, Artificial Sequence
  Description of Artificial Sequence: Synthetic oligonucleotide
aacaggcaucggcagaaga

SEQ ID NO: 1654206 - RNA, 19 nt, Artificial Sequence
  Description of Artificial Sequence: Synthetic oligonucleotide
aacuggcgaucccuagcac

SEQ ID NO: 1654207 - RNA, 19 nt, Artificial Sequence
  Description of Artificial Sequence: Synthetic oligonucleotide
ucauguugaagcucaggua

SEQ ID NO: 1654208 - RNA, 19 nt, Artificial Sequence
  Description of Artificial Sequence: Synthetic oligonucleotide
uaaaaccaacuggcgaucc

SEQ ID NO: 1654209 - RNA, 19 nt, Artificial Sequence
  Description of Artificial Sequence: Synthetic oligonucleotide
uagaaacugcccucuucag

SEQ ID NO: 1654210 - RNA, 19 nt, Artificial Sequence
  Description of Artificial Sequence: Synthetic oligonucleotide
uggauguuuucuucagaac

SEQ ID NO: 1654211 - RNA, 19 nt, Artificial Sequence
  Description of Artificial Sequence: Synthetic oligonucleotide
cucgaguacugcaguagcc

SEQ ID NO: 1654212 - RNA, 19 nt, Artificial Sequence
  Description of Artificial Sequence: Synthetic oligonucleotide
acuggcaaacacucgagua

SEQ ID NO: 1654213 - RNA, 19 nt, Artificial Sequence
  Description of Artificial Sequence: Synthetic oligonucleotide
caggaacaauuucaaacug

SEQ ID NO: 1654214 - RNA, 19 nt, Artificial Sequence
  Description of Artificial Sequence: Synthetic oligonucleotide
agguuaggcaucaguuucc

SEQ ID NO: 1654215 - RNA, 19 nt, Artificial Sequence
  Description of Artificial Sequence: Synthetic oligonucleotide
gcaugcaucagacuucacc

SEQ ID NO: 1654216 - RNA, 19 nt, Artificial Sequence
  Description of Artificial Sequence: Synthetic oligonucleotide
accgaaccagcuugcgagc

SEQ ID NO: 1654217 - RNA, 19 nt, Artificial Sequence
  Description of Artificial Sequence: Synthetic oligonucleotide
aaccgguacuucucguucu

SEQ ID NO: 1654218 - RNA, 19 nt, Artificial Sequence
  Description of Artificial Sequence: Synthetic oligonucleotide
aacuuccaguuuguuguuc

SEQ ID NO: 1654219 - RNA, 19 nt, Artificial Sequence
  Description of Artificial Sequence: Synthetic oligonucleotide
cacaaauagcagcauuuuc

SEQ ID NO: 1654220 - RNA, 19 nt, Artificial Sequence
  Description of Artificial Sequence: Synthetic oligonucleotide
acuucaaccgguacuucuc

SEQ ID NO: 1654221 - RNA, 19 nt, Artificial Sequence
  Description of Artificial Sequence: Synthetic oligonucleotide
aguagguuaggcaucaguu

SEQ ID NO: 1654222 - RNA, 19 nt, Artificial Sequence
  Description of Artificial Sequence: Synthetic oligonucleotide
aggaacucuggcugguaag

SEQ ID NO: 1654223 - RNA, 19 nt, Artificial Sequence
  Description of Artificial Sequence: Synthetic oligonucleotide
ggcacucucaucauggaag

SEQ ID NO: 1654224 - RNA, 19 nt, Artificial Sequence
  Description of Artificial Sequence: Synthetic oligonucleotide
cuucacccacugaugauug

SEQ ID NO: 1654225 - RNA, 19 nt, Artificial Sequence
  Description of Artificial Sequence: Synthetic oligonucleotide
acuggcgaucccuagcacu

SEQ ID NO: 1654226 - RNA, 19 nt, Artificial Sequence
  Description of Artificial Sequence: Synthetic oligonucleotide
acaggcaucggcagaagag

SEQ ID NO: 1654227 - RNA, 19 nt, Artificial Sequence
  Description of Artificial Sequence: Synthetic oligonucleotide
uuccccguugcauuacuga

SEQ ID NO: 1654228 - RNA, 19 nt, Artificial Sequence
  Description of Artificial Sequence: Synthetic oligonucleotide
cagggcaauggaccgaacc

SEQ ID NO: 1654229 - RNA, 19 nt, Artificial Sequence
  Description of Artificial Sequence: Synthetic oligonucleotide
ggauguuuucuucagaacu

SEQ ID NO: 1654230 - RNA, 19 nt, Artificial Sequence
  Description of Artificial Sequence: Synthetic oligonucleotide
cuagcaggcucaugauccg

SEQ ID NO: 1654231 - RNA, 19 nt, Artificial Sequence
  Description of Artificial Sequence: Synthetic oligonucleotide
auaguucccacagggccgg

SEQ ID NO: 1654232 - RNA, 19 nt, Artificial Sequence
  Description of Artificial Sequence: Synthetic oligonucleotide
caguuuugggcuucuggac

SEQ ID NO: 1654233 - RNA, 19 nt, Artificial Sequence
  Description of Artificial Sequence: Synthetic oligonucleotide
ucccaaaggguuccucagc

SEQ ID NO: 1654234 - RNA, 19 nt, Artificial Sequence
  Description of Artificial Sequence: Synthetic oligonucleotide
caaggguucgugugucagg

SEQ ID NO: 1654235 - RNA, 19 nt, Artificial Sequence
  Description of Artificial Sequence: Synthetic oligonucleotide
aagccaggccgccuagcag

SEQ ID NO: 1654236 - RNA, 19 nt, Artificial Sequence
  Description of Artificial Sequence: Synthetic oligonucleotide
cccguugcauuacugaugg

SEQ ID NO: 1654237 - RNA, 19 nt, Artificial Sequence
  Description of Artificial Sequence: Synthetic oligonucleotide
agaauggaguccucauggu

SEQ ID NO: 1654238 - RNA, 19 nt, Artificial Sequence
  Description of Artificial Sequence: Synthetic oligonucleotide
cugaaucagguuguggaug

SEQ ID NO: 1654239 - RNA, 19 nt, Artificial Sequence
  Description of Artificial Sequence: Synthetic oligonucleotide
aggucaguguccaccaagg

SEQ ID NO: 1654240 - RNA, 19 nt, Artificial Sequence
  Description of Artificial Sequence: Synthetic oligonucleotide
uuuccccguugcauuacug

SEQ ID NO: 1654241 - RNA, 19 nt, Artificial Sequence
  Description of Artificial Sequence: Synthetic oligonucleotide
uugcauuacugaugguccu

SEQ ID NO: 1654242 - RNA, 19 nt, Artificial Sequence
  Description of Artificial Sequence: Synthetic oligonucleotide
uggccuuggccgcuuuacg

SEQ ID NO: 1654243 - RNA, 19 nt, Artificial Sequence
  Description of Artificial Sequence: Synthetic oligonucleotide
uacuucucguucuggcucu

SEQ ID NO: 1654244 - RNA, 19 nt, Artificial Sequence
  Description of Artificial Sequence: Synthetic oligonucleotide
uuccucaagacgagcaauu

SEQ ID NO: 1654245 - RNA, 19 nt, Artificial Sequence
  Description of Artificial Sequence: Synthetic oligonucleotide
uaggcaucaguuuccccgu

SEQ ID NO: 1654246 - RNA, 19 nt, Artificial Sequence
  Description of Artificial Sequence: Synthetic oligonucleotide
aggcuucaaggcucauagc

SEQ ID NO: 1654247 - RNA, 19 nt, Artificial Sequence
  Description of Artificial Sequence: Synthetic oligonucleotide
ugcauuacugaugguccug

SEQ ID NO: 1654248 - RNA, 19 nt, Artificial Sequence
  Description of Artificial Sequence: Synthetic oligonucleotide
aagccaggucgguugguga

SEQ ID NO: 1654249 - RNA, 19 nt, Artificial Sequence
  Description of Artificial Sequence: Synthetic oligonucleotide
agauggcacucucaucaug

SEQ ID NO: 1654250 - RNA, 19 nt, Artificial Sequence
  Description of Artificial Sequence: Synthetic oligonucleotide
caggcaucggcagaagagc

SEQ ID NO: 1654251 - RNA, 19 nt, Artificial Sequence
  Description of Artificial Sequence: Synthetic oligonucleotide
gaaccagcuugcgagcacc

SEQ ID NO: 1654252 - RNA, 19 nt, Artificial Sequence
  Description of Artificial Sequence: Synthetic oligonucleotide
aucggcagaagagcugacg

SEQ ID NO: 1654253 - RNA, 19 nt, Artificial Sequence
  Description of Artificial Sequence: Synthetic oligonucleotide
gugucucaaaggcuucaag

SEQ ID NO: 1654254 - RNA, 19 nt, Artificial Sequence
  Description of Artificial Sequence: Synthetic oligonucleotide
gaugguccugaccaguucu

SEQ ID NO: 1654255 - RNA, 19 nt, Artificial Sequence
  Description of Artificial Sequence: Synthetic oligonucleotide
uacugaugguccugaccag

SEQ ID NO: 1654256 - RNA, 19 nt, Artificial Sequence
  Description of Artificial Sequence: Synthetic oligonucleotide
gagcaauuucaucacaaau

SEQ ID NO: 1654257 - RNA, 19 nt, Artificial Sequence
  Description of Artificial Sequence: Synthetic oligonucleotide
ggggacguaaaaccaacug

SEQ ID NO: 1654258 - RNA, 19 nt, Artificial Sequence
  Description of Artificial Sequence: Synthetic oligonucleotide
gaacacaggccguccugag

SEQ ID NO: 1654259 - RNA, 19 nt, Artificial Sequence
  Description of Artificial Sequence: Synthetic oligonucleotide
uuuuagaaacugcccucuu

SEQ ID NO: 1654260 - RNA, 19 nt, Artificial Sequence
  Description of Artificial Sequence: Synthetic oligonucleotide
aggucgguuggugaugauc

SEQ ID NO: 1654261 - RNA, 19 nt, Artificial Sequence
  Description of Artificial Sequence: Synthetic oligonucleotide
ccaggcuauauacuguuag

SEQ ID NO: 1654262 - RNA, 19 nt, Artificial Sequence
  Description of Artificial Sequence: Synthetic oligonucleotide
ucacaaauagcagcauuuu

SEQ ID NO: 1654263 - RNA, 19 nt, Artificial Sequence
  Description of Artificial Sequence: Synthetic oligonucleotide
uguggaugacuggaugaga

SEQ ID NO: 1654264 - RNA, 19 nt, Artificial Sequence
  Description of Artificial Sequence: Synthetic oligonucleotide
caaagaacucagcaccaca

SEQ ID NO: 1654265 - RNA, 19 nt, Artificial Sequence
  Description of Artificial Sequence: Synthetic oligonucleotide
ucaaccgguacuucucguu

SEQ ID NO: 1654266 - RNA, 19 nt, Artificial Sequence
  Description of Artificial Sequence: Synthetic oligonucleotide
gauuucuucccaaaggguu

SEQ ID NO: 1654267 - RNA, 19 nt, Artificial Sequence
  Description of Artificial Sequence: Synthetic oligonucleotide
gguuguggaugacuggaug

SEQ ID NO: 1654268 - RNA, 19 nt, Artificial Sequence
  Description of Artificial Sequence: Synthetic oligonucleotide
augcaucagacuucaccca

SEQ ID NO: 1654269 - RNA, 19 nt, Artificial Sequence
  Description of Artificial Sequence: Synthetic oligonucleotide
aucaguuuccccguugcau

SEQ ID NO: 1654270 - RNA, 19 nt, Artificial Sequence
  Description of Artificial Sequence: Synthetic oligonucleotide
cugaccaguucuucauaac

SEQ ID NO: 1654271 - RNA, 19 nt, Artificial Sequence
  Description of Artificial Sequence: Synthetic oligonucleotide
cuucagucagagccugaag

SEQ ID NO: 1654272 - RNA, 19 nt, Artificial Sequence
  Description of Artificial Sequence: Synthetic oligonucleotide
accaacuggcgaucccuag

SEQ ID NO: 1654273 - RNA, 19 nt, Artificial Sequence
  Description of Artificial Sequence: Synthetic oligonucleotide
ccacaugagaguagguuag

SEQ ID NO: 1654274 - RNA, 19 nt, Artificial Sequence
  Description of Artificial Sequence: Synthetic oligonucleotide
uggcacucucaucauggaa

SEQ ID NO: 1654275 - RNA, 19 nt, Artificial Sequence
  Description of Artificial Sequence: Synthetic oligonucleotide
gaagccaggccgccuagca

SEQ ID NO: 1654276 - RNA, 19 nt, Artificial Sequence
  Description of Artificial Sequence: Synthetic oligonucleotide
auacuggcaaacacucgag

SEQ ID NO: 1654277 - RNA, 19 nt, Artificial Sequence
  Description of Artificial Sequence: Synthetic oligonucleotide
caaccgguacuucucguuc

SEQ ID NO: 1654278 - RNA, 19 nt, Artificial Sequence
  Description of Artificial Sequence: Synthetic oligonucleotide
uucaaccgguacuucucgu

SEQ ID NO: 1654279 - RNA, 19 nt, Artificial Sequence
  Description of Artificial Sequence: Synthetic oligonucleotide
cagcuugcgagcaccuccc

SEQ ID NO: 1654280 - RNA, 19 nt, Artificial Sequence
  Description of Artificial Sequence: Synthetic oligonucleotide
guaagaugauacaaaggcu

SEQ ID NO: 1654281 - RNA, 19 nt, Artificial Sequence
  Description of Artificial Sequence: Synthetic oligonucleotide
gaggggacguaaaaccaac

SEQ ID NO: 1654282 - RNA, 19 nt, Artificial Sequence
  Description of Artificial Sequence: Synthetic oligonucleotide
cacucgaguacugcaguag

SEQ ID NO: 1654283 - RNA, 19 nt, Artificial Sequence
  Description of Artificial Sequence: Synthetic oligonucleotide
uuugggcuucuggacaacu

SEQ ID NO: 1654284 - RNA, 19 nt, Artificial Sequence
  Description of Artificial Sequence: Synthetic oligonucleotide
ggcagaagagcugacgaug

SEQ ID NO: 1654285 - RNA, 19 nt, Artificial Sequence
  Description of Artificial Sequence: Synthetic oligonucleotide
aguacugcaguagcccaca

SEQ ID NO: 1654286 - RNA, 19 nt, Artificial Sequence
  Description of Artificial Sequence: Synthetic oligonucleotide
aguuuccccguugcauuac

SEQ ID NO: 1654287 - RNA, 19 nt, Artificial Sequence
  Description of Artificial Sequence: Synthetic oligonucleotide
ggcuucaaggcucauagcu

SEQ ID NO: 1654288 - RNA, 19 nt, Artificial Sequence
  Description of Artificial Sequence: Synthetic oligonucleotide
cauaacaggcaucggcaga

SEQ ID NO: 1654289 - RNA, 19 nt, Artificial Sequence
  Description of Artificial Sequence: Synthetic oligonucleotide
caggcuauauacuguuaga

SEQ ID NO: 1654290 - RNA, 19 nt, Artificial Sequence
  Description of Artificial Sequence: Synthetic oligonucleotide
cucaugauccggccccagc

SEQ ID NO: 1654291 - RNA, 19 nt, Artificial Sequence
  Description of Artificial Sequence: Synthetic oligonucleotide
aaaggguuccucagcccca

SEQ ID NO: 1654292 - RNA, 19 nt, Artificial Sequence
  Description of Artificial Sequence: Synthetic oligonucleotide
cacaugagaguagguuagg

SEQ ID NO: 1654293 - RNA, 19 nt, Artificial Sequence
  Description of Artificial Sequence: Synthetic oligonucleotide
ucagccccagugcuggguc

SEQ ID NO: 1654294 - RNA, 19 nt, Artificial Sequence
  Description of Artificial Sequence: Synthetic oligonucleotide
guuaggcaucaguuucccc

SEQ ID NO: 1654295 - RNA, 19 nt, Artificial Sequence
  Description of Artificial Sequence: Synthetic oligonucleotide
auggggaacacaggccguc

SEQ ID NO: 1654296 - RNA, 19 nt, Artificial Sequence
  Description of Artificial Sequence: Synthetic oligonucleotide
gucaguguccaccaagggu

SEQ ID NO: 1654297 - RNA, 19 nt, Artificial Sequence
  Description of Artificial Sequence: Synthetic oligonucleotide
cauuacugaugguccugac

SEQ ID NO: 1654298 - RNA, 19 nt, Artificial Sequence
  Description of Artificial Sequence: Synthetic oligonucleotide
caacuggcgaucccuagca

SEQ ID NO: 1654299 - RNA, 19 nt, Artificial Sequence
  Description of Artificial Sequence: Synthetic oligonucleotide
caaggcucauagcugcauc

SEQ ID NO: 1654300 - RNA, 19 nt, Artificial Sequence
  Description of Artificial Sequence: Synthetic oligonucleotide
cgauggggaacacaggccg

SEQ ID NO: 1654301 - RNA, 19 nt, Artificial Sequence
  Description of Artificial Sequence: Synthetic oligonucleotide
uggaccgaaccagcuugcg

SEQ ID NO: 1654302 - RNA, 19 nt, Artificial Sequence
  Description of Artificial Sequence: Synthetic oligonucleotide
cacagggccggccacacca

SEQ ID NO: 1654303 - RNA, 19 nt, Artificial Sequence
  Description of Artificial Sequence: Synthetic oligonucleotide
gaagagcugacgaugguau

SEQ ID NO: 1654304 - RNA, 19 nt, Artificial Sequence
  Description of Artificial Sequence: Synthetic oligonucleotide
gaguagguuaggcaucagu

SEQ ID NO: 1654305 - RNA, 19 nt, Artificial Sequence
  Description of Artificial Sequence: Synthetic oligonucleotide
cauccuggccuugugggac

SEQ ID NO: 1654306 - RNA, 19 nt, Artificial Sequence
  Description of Artificial Sequence: Synthetic oligonucleotide
ugcaucguucucugucagu

SEQ ID NO: 1654307 - RNA, 19 nt, Artificial Sequence
  Description of Artificial Sequence: Synthetic oligonucleotide
gaccugacagguauacaga

SEQ ID NO: 1654308 - RNA, 19 nt, Artificial Sequence
  Description of Artificial Sequence: Synthetic oligonucleotide
ggguucgugugucaggaac

SEQ ID NO: 1654309 - RNA, 19 nt, Artificial Sequence
  Description of Artificial Sequence: Synthetic oligonucleotide
acgagcaauuucaucacaa

SEQ ID NO: 1654310 - RNA, 19 nt, Artificial Sequence
  Description of Artificial Sequence: Synthetic oligonucleotide
acaccauaagccaggggca

SEQ ID NO: 1654311 - RNA, 19 nt, Artificial Sequence
  Description of Artificial Sequence: Synthetic oligonucleotide
ggucaguguccaccaaggg

SEQ ID NO: 1654312 - RNA, 19 nt, Artificial Sequence
  Description of Artificial Sequence: Synthetic oligonucleotide
gcagaauggaguccucaug

SEQ ID NO: 1654313 - RNA, 19 nt, Artificial Sequence
  Description of Artificial Sequence: Synthetic oligonucleotide
caggcucaugauccggccc

SEQ ID NO: 1654314 - RNA, 19 nt, Artificial Sequence
  Description of Artificial Sequence: Synthetic oligonucleotide
auggaguccucauggucau

SEQ ID NO: 1654315 - RNA, 19 nt, Artificial Sequence
  Description of Artificial Sequence: Synthetic oligonucleotide
cuuggccgcuuuacgcagc

SEQ ID NO: 1654316 - RNA, 19 nt, Artificial Sequence
  Description of Artificial Sequence: Synthetic oligonucleotide
uccagggcaauggaccgaa

SEQ ID NO: 1654317 - RNA, 19 nt, Artificial Sequence
  Description of Artificial Sequence: Synthetic oligonucleotide
auggcacucucaucaugga

SEQ ID NO: 1654318 - RNA, 19 nt, Artificial Sequence
  Description of Artificial Sequence: Synthetic oligonucleotide
ucggaagccaggccgccua

SEQ ID NO: 1654319 - RNA, 19 nt, Artificial Sequence
  Description of Artificial Sequence: Synthetic oligonucleotide
ucauagcugcaucguucuc

SEQ ID NO: 1654320 - RNA, 19 nt, Artificial Sequence
  Description of Artificial Sequence: Synthetic oligonucleotide
caugauccggccccagcuc

SEQ ID NO: 1654321 - RNA, 19 nt, Artificial Sequence
  Description of Artificial Sequence: Synthetic oligonucleotide
aucagacuucacccacuga

SEQ ID NO: 1654322 - RNA, 19 nt, Artificial Sequence
  Description of Artificial Sequence: Synthetic oligonucleotide
gcuucaaggcucauagcug

SEQ ID NO: 1654323 - RNA, 19 nt, Artificial Sequence
  Description of Artificial Sequence: Synthetic oligonucleotide
ggccuuggccgcuuuacgc

SEQ ID NO: 1654324 - RNA, 19 nt, Artificial Sequence
  Description of Artificial Sequence: Synthetic oligonucleotide
cucauagcugcaucguucu

SEQ ID NO: 1654325 - RNA, 19 nt, Artificial Sequence
  Description of Artificial Sequence: Synthetic oligonucleotide
uaacaggcaucggcagaag

SEQ ID NO: 1654326 - RNA, 19 nt, Artificial Sequence
  Description of Artificial Sequence: Synthetic oligonucleotide
ggguuugcaugcaucagac

SEQ ID NO: 1654327 - RNA, 19 nt, Artificial Sequence
  Description of Artificial Sequence: Synthetic oligonucleotide
cagguacuucaaccgguac

SEQ ID NO: 1654328 - RNA, 19 nt, Artificial Sequence
  Description of Artificial Sequence: Synthetic oligonucleotide
caggguagauggcacucuc

SEQ ID NO: 1654329 - RNA, 19 nt, Artificial Sequence
  Description of Artificial Sequence: Synthetic oligonucleotide
gguagguccagggacccug

SEQ ID NO: 1654330 - RNA, 19 nt, Artificial Sequence
  Description of Artificial Sequence: Synthetic oligonucleotide
guagguuaggcaucaguuu

SEQ ID NO: 1654331 - RNA, 19 nt, Artificial Sequence
  Description of Artificial Sequence: Synthetic oligonucleotide
gcaaacacucgaguacugc

SEQ ID NO: 1654332 - RNA, 19 nt, Artificial Sequence
  Description of Artificial Sequence: Synthetic oligonucleotide
uccucaagacgagcaauuu

SEQ ID NO: 1654333 - RNA, 19 nt, Artificial Sequence
  Description of Artificial Sequence: Synthetic oligonucleotide
agccaggucgguuggugau

SEQ ID NO: 1654334 - RNA, 19 nt, Artificial Sequence
  Description of Artificial Sequence: Synthetic oligonucleotide
uucgugugucaggaacucu

SEQ ID NO: 1654335 - RNA, 19 nt, Artificial Sequence
  Description of Artificial Sequence: Synthetic oligonucleotide
acacucgaguacugcagua

SEQ ID NO: 1654336 - RNA, 19 nt, Artificial Sequence
  Description of Artificial Sequence: Synthetic oligonucleotide
gguuaggcaucaguuuccc

SEQ ID NO: 1654337 - RNA, 19 nt, Artificial Sequence
  Description of Artificial Sequence: Synthetic oligonucleotide
cucccuggauaguucccac

SEQ ID NO: 1654338 - RNA, 19 nt, Artificial Sequence
  Description of Artificial Sequence: Synthetic oligonucleotide
caucuuugaccugacaggu

SEQ ID NO: 1654339 - RNA, 19 nt, Artificial Sequence
  Description of Artificial Sequence: Synthetic oligonucleotide
gcugcaucguucucuguca

SEQ ID NO: 1654340 - RNA, 19 nt, Artificial Sequence
  Description of Artificial Sequence: Synthetic oligonucleotide
guucgugugucaggaacuc

SEQ ID NO: 1654341 - RNA, 19 nt, Artificial Sequence
  Description of Artificial Sequence: Synthetic oligonucleotide
guagguccagggacccugg

SEQ ID NO: 1654342 - RNA, 19 nt, Artificial Sequence
  Description of Artificial Sequence: Synthetic oligonucleotide
caaacaccguggccuuggc

SEQ ID NO: 1654343 - RNA, 19 nt, Artificial Sequence
  Description of Artificial Sequence: Synthetic oligonucleotide
cuugugggacagcggggug

SEQ ID NO: 1654344 - RNA, 19 nt, Artificial Sequence
  Description of Artificial Sequence: Synthetic oligonucleotide
guacugcaguagcccacag

SEQ ID NO: 1654345 - RNA, 19 nt, Artificial Sequence
  Description of Artificial Sequence: Synthetic oligonucleotide
guugaagcucagguagguc

SEQ ID NO: 1654346 - RNA, 19 nt, Artificial Sequence
  Description of Artificial Sequence: Synthetic oligonucleotide
ccaacuggcgaucccuagc

SEQ ID NO: 1654347 - RNA, 19 nt, Artificial Sequence
  Description of Artificial Sequence: Synthetic oligonucleotide
ucauggaagccaggucggu

SEQ ID NO: 1654348 - RNA, 19 nt, Artificial Sequence
  Description of Artificial Sequence: Synthetic oligonucleotide
cagguagguccagggaccc

SEQ ID NO: 1654349 - RNA, 19 nt, Artificial Sequence
  Description of Artificial Sequence: Synthetic oligonucleotide
gguccugaccaguucuuca

SEQ ID NO: 1654350 - RNA, 19 nt, Artificial Sequence
  Description of Artificial Sequence: Synthetic oligonucleotide
caacucugaaucagguugu

SEQ ID NO: 1654351 - RNA, 19 nt, Artificial Sequence
  Description of Artificial Sequence: Synthetic oligonucleotide
gauccggccccagcucggg

SEQ ID NO: 1654352 - RNA, 19 nt, Artificial Sequence
  Description of Artificial Sequence: Synthetic oligonucleotide
cacucucaucauggaagcc

SEQ ID NO: 1654353 - RNA, 19 nt, Artificial Sequence
  Description of Artificial Sequence: Synthetic oligonucleotide
ggcaucaguuuccccguug

SEQ ID NO: 1654354 - RNA, 19 nt, Artificial Sequence
  Description of Artificial Sequence: Synthetic oligonucleotide
gacaacucugaaucagguu

SEQ ID NO: 1654355 - RNA, 19 nt, Artificial Sequence
  Description of Artificial Sequence: Synthetic oligonucleotide
ggcgaucccuagcacuucc

SEQ ID NO: 1654356 - RNA, 19 nt, Artificial Sequence
  Description of Artificial Sequence: Synthetic oligonucleotide
cagacacuucuggucuggg

SEQ ID NO: 1654357 - RNA, 19 nt, Artificial Sequence
  Description of Artificial Sequence: Synthetic oligonucleotide
uuccuggguuugcaugcau

SEQ ID NO: 1654358 - RNA, 19 nt, Artificial Sequence
  Description of Artificial Sequence: Synthetic oligonucleotide
gcucauagcugcaucguuc

SEQ ID NO: 1654359 - RNA, 19 nt, Artificial Sequence
  Description of Artificial Sequence: Synthetic oligonucleotide
caguguccaccaaggguuc

SEQ ID NO: 1654360 - RNA, 19 nt, Artificial Sequence
  Description of Artificial Sequence: Synthetic oligonucleotide
ccgauggggaacacaggcc

SEQ ID NO: 1654361 - RNA, 19 nt, Artificial Sequence
  Description of Artificial Sequence: Synthetic oligonucleotide
ccucaagacgagcaauuuc

SEQ ID NO: 1654362 - RNA, 19 nt, Artificial Sequence
  Description of Artificial Sequence: Synthetic oligonucleotide
aggcucauagcugcaucgu

SEQ ID NO: 1654363 - RNA, 19 nt, Artificial Sequence
  Description of Artificial Sequence: Synthetic oligonucleotide
accagcuugcgagcaccuc

SEQ ID NO: 1654364 - RNA, 19 nt, Artificial Sequence
  Description of Artificial Sequence: Synthetic oligonucleotide
ggcugguaagaugauacaa

SEQ ID NO: 1654365 - RNA, 19 nt, Artificial Sequence
  Description of Artificial Sequence: Synthetic oligonucleotide
uggagacuuuagguccugu

SEQ ID NO: 1654366 - RNA, 19 nt, Artificial Sequence
  Description of Artificial Sequence: Synthetic oligonucleotide
ggcuacacugugauggaga

SEQ ID NO: 1654367 - RNA, 19 nt, Artificial Sequence
  Description of Artificial Sequence: Synthetic oligonucleotide
gggacagcggggugcgcgg

SEQ ID NO: 1654368 - RNA, 19 nt, Artificial Sequence
  Description of Artificial Sequence: Synthetic oligonucleotide
caucaguuuccccguugca

SEQ ID NO: 1654369 - RNA, 19 nt, Artificial Sequence
  Description of Artificial Sequence: Synthetic oligonucleotide
aaccaacuggcgaucccua

SEQ ID NO: 1654370 - RNA, 19 nt, Artificial Sequence
  Description of Artificial Sequence: Synthetic oligonucleotide
aggggacguaaaaccaacu

SEQ ID NO: 1654371 - RNA, 19 nt, Artificial Sequence
  Description of Artificial Sequence: Synthetic oligonucleotide
cgguuggugaugaucuccc

SEQ ID NO: 1654372 - RNA, 19 nt, Artificial Sequence
  Description of Artificial Sequence: Synthetic oligonucleotide
caucggcagaagagcugac

SEQ ID NO: 1654373 - RNA, 19 nt, Artificial Sequence
  Description of Artificial Sequence: Synthetic oligonucleotide
ccgcagguacuucaaccgg

SEQ ID NO: 1654374 - RNA, 19 nt, Artificial Sequence
  Description of Artificial Sequence: Synthetic oligonucleotide
agccugugguuccccuuca

SEQ ID NO: 1654375 - RNA, 19 nt, Artificial Sequence
  Description of Artificial Sequence: Synthetic oligonucleotide
auccggccccagcucgggg

SEQ ID NO: 1654376 - RNA, 19 nt, Artificial Sequence
  Description of Artificial Sequence: Synthetic oligonucleotide
ggagacuuuagguccugua

SEQ ID NO: 1654377 - RNA, 19 nt, Artificial Sequence
  Description of Artificial Sequence: Synthetic oligonucleotide
caggccguccugagggauc

SEQ ID NO: 1654378 - RNA, 19 nt, Artificial Sequence
  Description of Artificial Sequence: Synthetic oligonucleotide
ccuuggccgcuuuacgcag

SEQ ID NO: 1654379 - RNA, 19 nt, Artificial Sequence
  Description of Artificial Sequence: Synthetic oligonucleotide
gacuucacccacugaugau

SEQ ID NO: 1654380 - RNA, 19 nt, Artificial Sequence
  Description of Artificial Sequence: Synthetic oligonucleotide
ggaacacaggccguccuga

SEQ ID NO: 1654381 - RNA, 19 nt, Artificial Sequence
  Description of Artificial Sequence: Synthetic oligonucleotide
ccaaggguucgugugucag

SEQ ID NO: 1654382 - RNA, 19 nt, Artificial Sequence
  Description of Artificial Sequence: Synthetic oligonucleotide
ccauaagccaggggcaaac

SEQ ID NO: 1654383 - RNA, 19 nt, Artificial Sequence
  Description of Artificial Sequence: Synthetic oligonucleotide
ggaccgaaccagcuugcga

SEQ ID NO: 1654384 - RNA, 19 nt, Artificial Sequence
  Description of Artificial Sequence: Synthetic oligonucleotide
ccugacagguauacagaca

SEQ ID NO: 1654385 - RNA, 19 nt, Artificial Sequence
  Description of Artificial Sequence: Synthetic oligonucleotide
guccugaccaguucuucau

SEQ ID NO: 1654386 - RNA, 19 nt, Artificial Sequence
  Description of Artificial Sequence: Synthetic oligonucleotide
gcauuacugaugguccuga

SEQ ID NO: 1654387 - RNA, 19 nt, Artificial Sequence
  Description of Artificial Sequence: Synthetic oligonucleotide
ccugaccaguucuucauaa

SEQ ID NO: 1654388 - RNA, 19 nt, Artificial Sequence
  Description of Artificial Sequence: Synthetic oligonucleotide
gccuagcaggcucaugauc

SEQ ID NO: 1654389 - RNA, 19 nt, Artificial Sequence
  Description of Artificial Sequence: Synthetic oligonucleotide
ccgccuagcaggcucauga

SEQ ID NO: 1654390 - RNA, 19 nt, Artificial Sequence
  Description of Artificial Sequence: Synthetic oligonucleotide
cguaaaaccaacuggcgau

SEQ ID NO: 1654391 - RNA, 19 nt, Artificial Sequence
  Description of Artificial Sequence: Synthetic oligonucleotide
ggccggccacaccauaagc

SEQ ID NO: 1654392 - RNA, 19 nt, Artificial Sequence
  Description of Artificial Sequence: Synthetic oligonucleotide
agguuguggaugacuggau

SEQ ID NO: 1654393 - RNA, 19 nt, Artificial Sequence
  Description of Artificial Sequence: Synthetic oligonucleotide
accauaagccaggggcaaa

SEQ ID NO: 1654394 - RNA, 19 nt, Artificial Sequence
  Description of Artificial Sequence: Synthetic oligonucleotide
agcuugcgagcaccucccu

SEQ ID NO: 1654395 - RNA, 19 nt, Artificial Sequence
  Description of Artificial Sequence: Synthetic oligonucleotide
gggccggccacaccauaag

SEQ ID NO: 1654396 - RNA, 19 nt, Artificial Sequence
  Description of Artificial Sequence: Synthetic oligonucleotide
gcucagguagguccaggga

SEQ ID NO: 1654397 - RNA, 19 nt, Artificial Sequence
  Description of Artificial Sequence: Synthetic oligonucleotide
cuggucugggcacuucaua

SEQ ID NO: 1654398 - RNA, 19 nt, Artificial Sequence
  Description of Artificial Sequence: Synthetic oligonucleotide
ccguccugagggauccagg

SEQ ID NO: 1654399 - RNA, 19 nt, Artificial Sequence
  Description of Artificial Sequence: Synthetic oligonucleotide
ggauuucuucccaaagggu

SEQ ID NO: 1654400 - RNA, 19 nt, Artificial Sequence
  Description of Artificial Sequence: Synthetic oligonucleotide
ggguccagcucccuggaua

SEQ ID NO: 1654401 - RNA, 19 nt, Artificial Sequence
  Description of Artificial Sequence: Synthetic oligonucleotide
cuuuacgcagccgcaggua

SEQ ID NO: 1654402 - RNA, 19 nt, Artificial Sequence
  Description of Artificial Sequence: Synthetic oligonucleotide
ggaggggacguaaaaccaa

SEQ ID NO: 1654403 - RNA, 19 nt, Artificial Sequence
  Description of Artificial Sequence: Synthetic oligonucleotide
aggguucgugugucaggaa

SEQ ID NO: 1654404 - RNA, 19 nt, Artificial Sequence
  Description of Artificial Sequence: Synthetic oligonucleotide
guuuccccguugcauuacu

SEQ ID NO: 1654405 - RNA, 19 nt, Artificial Sequence
  Description of Artificial Sequence: Synthetic oligonucleotide
aucuuugaccugacaggua

SEQ ID NO: 1654406 - RNA, 19 nt, Artificial Sequence
  Description of Artificial Sequence: Synthetic oligonucleotide
cuggcgaucccuagcacuu

SEQ ID NO: 1654407 - RNA, 19 nt, Artificial Sequence
  Description of Artificial Sequence: Synthetic oligonucleotide
ugcgagcaccucccuccau

SEQ ID NO: 1654408 - RNA, 19 nt, Artificial Sequence
  Description of Artificial Sequence: Synthetic oligonucleotide
acaggccguccugagggau

SEQ ID NO: 1654409 - RNA, 19 nt, Artificial Sequence
  Description of Artificial Sequence: Synthetic oligonucleotide
cgcuuuacgcagccgcagg

SEQ ID NO: 1654410 - RNA, 19 nt, Artificial Sequence
  Description of Artificial Sequence: Synthetic oligonucleotide
caccauaagccaggggcaa

SEQ ID NO: 1654411 - RNA, 19 nt, Artificial Sequence
  Description of Artificial Sequence: Synthetic oligonucleotide
ggggugcgcggcucggaag

SEQ ID NO: 1654412 - RNA, 19 nt, Artificial Sequence
  Description of Artificial Sequence: Synthetic oligonucleotide
cagcggggugcgcggcucg

SEQ ID NO: 1654413 - RNA, 19 nt, Artificial Sequence
  Description of Artificial Sequence: Synthetic oligonucleotide
gcuugcgagcaccucccuc

SEQ ID NO: 1654414 - RNA, 19 nt, Artificial Sequence
  Description of Artificial Sequence: Synthetic oligonucleotide
agccccagugcugggucca

SEQ ID NO: 1654415 - RNA, 19 nt, Artificial Sequence
  Description of Artificial Sequence: Synthetic oligonucleotide
ggcucggaagccaggccgc

SEQ ID NO: 1654416 - RNA, 19 nt, Artificial Sequence
  Description of Artificial Sequence: Synthetic oligonucleotide
uggcgaucccuagcacuuc

SEQ ID NO: 1654417 - RNA, 19 nt, Artificial Sequence
  Description of Artificial Sequence: Synthetic oligonucleotide
caggagccugugguucccc

SEQ ID NO: 1654418 - RNA, 19 nt, Artificial Sequence
  Description of Artificial Sequence: Synthetic oligonucleotide
ggcagaauggaguccucau

SEQ ID NO: 1654419 - RNA, 19 nt, Artificial Sequence
  Description of Artificial Sequence: Synthetic oligonucleotide
caccaucuuugaccugaca

SEQ ID NO: 1654420 - RNA, 19 nt, Artificial Sequence
  Description of Artificial Sequence: Synthetic oligonucleotide
agggccggccacaccauaa

SEQ ID NO: 1654421 - RNA, 19 nt, Artificial Sequence
  Description of Artificial Sequence: Synthetic oligonucleotide
cuaguccgauggggaacac

SEQ ID NO: 1654422 - RNA, 19 nt, Artificial Sequence
  Description of Artificial Sequence: Synthetic oligonucleotide
augguccugaccaguucuu

SEQ ID NO: 1654423 - RNA, 19 nt, Artificial Sequence
  Description of Artificial Sequence: Synthetic oligonucleotide
aggcaucaguuuccccguu

SEQ ID NO: 1654424 - RNA, 19 nt, Artificial Sequence
  Description of Artificial Sequence: Synthetic oligonucleotide
ccuaguccgauggggaaca

SEQ ID NO: 1654425 - RNA, 19 nt, Artificial Sequence
  Description of Artificial Sequence: Synthetic oligonucleotide
gccguccugagggauccag

SEQ ID NO: 1654426 - RNA, 19 nt, Artificial Sequence
  Description of Artificial Sequence: Synthetic oligonucleotide
guccaccaaggguucgugu

SEQ ID NO: 1654427 - RNA, 19 nt, Artificial Sequence
  Description of Artificial Sequence: Synthetic oligonucleotide
gcuuuacgcagccgcaggu

SEQ ID NO: 1654428 - RNA, 19 nt, Artificial Sequence
  Description of Artificial Sequence: Synthetic oligonucleotide
cgaguacugcaguagccca

SEQ ID NO: 1654429 - RNA, 19 nt, Artificial Sequence
  Description of Artificial Sequence: Synthetic oligonucleotide
cacaggccguccugaggga

SEQ ID NO: 1654430 - RNA, 19 nt, Artificial Sequence
  Description of Artificial Sequence: Synthetic oligonucleotide
cauaagccaggggcaaacu

SEQ ID NO: 1654431 - RNA, 19 nt, Artificial Sequence
  Description of Artificial Sequence: Synthetic oligonucleotide
agguagguccagggacccu

SEQ ID NO: 1654432 - RNA, 19 nt, Artificial Sequence
  Description of Artificial Sequence: Synthetic oligonucleotide
gcggcucggaagccaggcc

SEQ ID NO: 1654433 - RNA, 19 nt, Artificial Sequence
  Description of Artificial Sequence: Synthetic oligonucleotide
ccaccaucuuugaccugac

SEQ ID NO: 1654434 - RNA, 19 nt, Artificial Sequence
  Description of Artificial Sequence: Synthetic oligonucleotide
gccaggucgguuggugaug

SEQ ID NO: 1654435 - RNA, 19 nt, Artificial Sequence
  Description of Artificial Sequence: Synthetic oligonucleotide
gcaauggaccgaaccagcu

SEQ ID NO: 1654436 - RNA, 19 nt, Artificial Sequence
  Description of Artificial Sequence: Synthetic oligonucleotide
gaagcuggaggagcuucuu

SEQ ID NO: 1654437 - RNA, 19 nt, Artificial Sequence
  Description of Artificial Sequence: Synthetic oligonucleotide
gacagcggggugcgcggcu

SEQ ID NO: 1654438 - RNA, 19 nt, Artificial Sequence
  Description of Artificial Sequence: Synthetic oligonucleotide
uaguucccacagggccggc

SEQ ID NO: 1654439 - RNA, 19 nt, Artificial Sequence
  Description of Artificial Sequence: Synthetic oligonucleotide
gcagguacuucaaccggua

SEQ ID NO: 1654440 - RNA, 19 nt, Artificial Sequence
  Description of Artificial Sequence: Synthetic oligonucleotide
ccgcuuuacgcagccgcag

SEQ ID NO: 1654441 - RNA, 19 nt, Artificial Sequence
  Description of Artificial Sequence: Synthetic oligonucleotide
aggccgccuagcaggcuca

SEQ ID NO: 1654442 - RNA, 19 nt, Artificial Sequence
  Description of Artificial Sequence: Synthetic oligonucleotide
ccagugcuggguccagcuc

SEQ ID NO: 1654443 - RNA, 19 nt, Artificial Sequence
  Description of Artificial Sequence: Synthetic oligonucleotide
cgaaccagcuugcgagcac

SEQ ID NO: 1654444 - RNA, 19 nt, Artificial Sequence
  Description of Artificial Sequence: Synthetic oligonucleotide
gcucaugauccggccccag

SEQ ID NO: 1654445 - RNA, 19 nt, Artificial Sequence
  Description of Artificial Sequence: Synthetic oligonucleotide
ggcauggaggggacguaaa

SEQ ID NO: 1654446 - RNA, 19 nt, Artificial Sequence
  Description of Artificial Sequence: Synthetic oligonucleotide
gggcauggaggggacguaa

SEQ ID NO: 1654447 - RNA, 19 nt, Artificial Sequence
  Description of Artificial Sequence: Synthetic oligonucleotide
gccgcuuuacgcagccgca

SEQ ID NO: 1654448 - RNA, 19 nt, Artificial Sequence
  Description of Artificial Sequence: Synthetic oligonucleotide
cauggaagccaggucgguu

SEQ ID NO: 1654449 - RNA, 19 nt, Artificial Sequence
  Description of Artificial Sequence: Synthetic oligonucleotide
ccaggucgguuggugauga

SEQ ID NO: 1654450 - RNA, 19 nt, Artificial Sequence
  Description of Artificial Sequence: Synthetic oligonucleotide
gcucggaagccaggccgcc

SEQ ID NO: 1654451 - RNA, 19 nt, Artificial Sequence
  Description of Artificial Sequence: Synthetic oligonucleotide
cugcccucuucagucugaa

SEQ ID NO: 1654452 - RNA, 19 nt, Artificial Sequence
  Description of Artificial Sequence: Synthetic oligonucleotide
gugcgcggcucggaagcca

SEQ ID NO: 1654453 - RNA, 19 nt, Artificial Sequence
  Description of Artificial Sequence: Synthetic oligonucleotide
cucuggcugguaagaugau

SEQ ID NO: 1654454 - RNA, 19 nt, Artificial Sequence
  Description of Artificial Sequence: Synthetic oligonucleotide
ggcucaugauccggcccca

SEQ ID NO: 1654455 - RNA, 19 nt, Artificial Sequence
  Description of Artificial Sequence: Synthetic oligonucleotide
ccuugugggacagcggggu

SEQ ID NO: 1654456 - RNA, 19 nt, Artificial Sequence
  Description of Artificial Sequence: Synthetic oligonucleotide
ccagggcaauggaccgaac

SEQ ID NO: 1654457 - RNA, 19 nt, Artificial Sequence
  Description of Artificial Sequence: Synthetic oligonucleotide
ccgaaccagcuugcgagca

SEQ ID NO: 1654458 - RNA, 19 nt, Artificial Sequence
  Description of Artificial Sequence: Synthetic oligonucleotide
gcgagcaccucccuccauu

SEQ ID NO: 1654459 - RNA, 19 nt, Artificial Sequence
  Description of Artificial Sequence: Synthetic oligonucleotide
ccccuaguccgauggggaa

SEQ ID NO: 1654460 - RNA, 19 nt, Artificial Sequence
  Description of Artificial Sequence: Synthetic oligonucleotide
gugggacagcggggugcgc

SEQ ID NO: 1654461 - RNA, 19 nt, Artificial Sequence
  Description of Artificial Sequence: Synthetic oligonucleotide
gccccuuccuggguuugca

SEQ ID NO: 1654462 - RNA, 19 nt, Artificial Sequence
  Description of Artificial Sequence: Synthetic oligonucleotide
cggaagccaggccgccuag

SEQ ID NO: 1654463 - RNA, 19 nt, Artificial Sequence
  Description of Artificial Sequence: Synthetic oligonucleotide
cagggccggccacaccaua

SEQ ID NO: 1654464 - RNA, 19 nt, Artificial Sequence
  Description of Artificial Sequence: Synthetic oligonucleotide
cucggaagccaggccgccu

SEQ ID NO: 1654465 - RNA, 19 nt, Artificial Sequence
  Description of Artificial Sequence: Synthetic oligonucleotide
ggaagccaggucgguuggu

SEQ ID NO: 1654466 - RNA, 19 nt, Artificial Sequence
  Description of Artificial Sequence: Synthetic oligonucleotide
gcaccacaugagaguaggu

SEQ ID NO: 1654467 - RNA, 19 nt, Artificial Sequence
  Description of Artificial Sequence: Synthetic oligonucleotide
ggggcauggaggggacgua

SEQ ID NO: 1654468 - RNA, 19 nt, Artificial Sequence
  Description of Artificial Sequence: Synthetic oligonucleotide
caggucgguuggugaugau

SEQ ID NO: 1654469 - RNA, 19 nt, Artificial Sequence
  Description of Artificial Sequence: Synthetic oligonucleotide
cggcagaagagcugacgau

SEQ ID NO: 1654470 - RNA, 19 nt, Artificial Sequence
  Description of Artificial Sequence: Synthetic oligonucleotide
cgagcaccucccuccauuu

SEQ ID NO: 1654471 - RNA, 19 nt, Artificial Sequence
  Description of Artificial Sequence: Synthetic oligonucleotide
ccguugcauuacugauggu

SEQ ID NO: 1654472 - RNA, 19 nt, Artificial Sequence
  Description of Artificial Sequence: Synthetic oligonucleotide
cgccuagcaggcucaugau

SEQ ID NO: 1654473 - RNA, 19 nt, Artificial Sequence
  Description of Artificial Sequence: Synthetic oligonucleotide
ccguggccuuggccgcuuu

SEQ ID NO: 1654474 - RNA, 19 nt, Artificial Sequence
  Description of Artificial Sequence: Synthetic oligonucleotide
uuuucuaaggggaugaucc

SEQ ID NO: 1654475 - RNA, 19 nt, Artificial Sequence
  Description of Artificial Sequence: Synthetic oligonucleotide
uacuccuuccucuagaacg

SEQ ID NO: 1654476 - RNA, 19 nt, Artificial Sequence
  Description of Artificial Sequence: Synthetic oligonucleotide
agggauauaaagcucaaag

SEQ ID NO: 1654477 - RNA, 19 nt, Artificial Sequence
  Description of Artificial Sequence: Synthetic oligonucleotide
aucagguaaaaccuacucc

SEQ ID NO: 1654478 - RNA, 19 nt, Artificial Sequence
  Description of Artificial Sequence: Synthetic oligonucleotide
uugguuauuaggaaaacgu

SEQ ID NO: 1654479 - RNA, 19 nt, Artificial Sequence
  Description of Artificial Sequence: Synthetic oligonucleotide
gaaacagucggccaccugg

SEQ ID NO: 1654480 - RNA, 19 nt, Artificial Sequence
  Description of Artificial Sequence: Synthetic oligonucleotide
aaaacguggacuuuccacu

SEQ ID NO: 1654481 - RNA, 19 nt, Artificial Sequence
  Description of Artificial Sequence: Synthetic oligonucleotide
uggacuuuccacuuuaaag

SEQ ID NO: 1654482 - RNA, 19 nt, Artificial Sequence
  Description of Artificial Sequence: Synthetic oligonucleotide
uucacaccgaguuaggagg

SEQ ID NO: 1654483 - RNA, 19 nt, Artificial Sequence
  Description of Artificial Sequence: Synthetic oligonucleotide
gauacucagauuuucuaag

SEQ ID NO: 1654484 - RNA, 19 nt, Artificial Sequence
  Description of Artificial Sequence: Synthetic oligonucleotide
aaaggcugaagccccaagg

SEQ ID NO: 1654485 - RNA, 19 nt, Artificial Sequence
  Description of Artificial Sequence: Synthetic oligonucleotide
aagcuauuuccagaggugc

SEQ ID NO: 1654486 - RNA, 19 nt, Artificial Sequence
  Description of Artificial Sequence: Synthetic oligonucleotide
gacuuuccacuuuaaagcg

SEQ ID NO: 1654487 - RNA, 19 nt, Artificial Sequence
  Description of Artificial Sequence: Synthetic oligonucleotide
aaguaguaaaggcaguugu

SEQ ID NO: 1654488 - RNA, 19 nt, Artificial Sequence
  Description of Artificial Sequence: Synthetic oligonucleotide
acucagauuuucuaagggg

SEQ ID NO: 1654489 - RNA, 19 nt, Artificial Sequence
  Description of Artificial Sequence: Synthetic oligonucleotide
uuuugaggcagaaaaggcu

SEQ ID NO: 1654490 - RNA, 19 nt, Artificial Sequence
  Description of Artificial Sequence: Synthetic oligonucleotide
cacaguuuugguuauuagg

SEQ ID NO: 1654491 - RNA, 19 nt, Artificial Sequence
  Description of Artificial Sequence: Synthetic oligonucleotide
acuuuugaggcagaaaagg

SEQ ID NO: 1654492 - RNA, 19 nt, Artificial Sequence
  Description of Artificial Sequence: Synthetic oligonucleotide
uccacuuuaaagcgcagug

SEQ ID NO: 1654493 - RNA, 19 nt, Artificial Sequence
  Description of Artificial Sequence: Synthetic oligonucleotide
aaggggaugaucccacggg

SEQ ID NO: 1654494 - RNA, 19 nt, Artificial Sequence
  Description of Artificial Sequence: Synthetic oligonucleotide
ggauauaaagcucaaagca

SEQ ID NO: 1654495 - RNA, 19 nt, Artificial Sequence
  Description of Artificial Sequence: Synthetic oligonucleotide
ugucuuacaggccuuaauc

SEQ ID NO: 1654496 - RNA, 19 nt, Artificial Sequence
  Description of Artificial Sequence: Synthetic oligonucleotide
cacuuuaaagcgcaguggg

SEQ ID NO: 1654497 - RNA, 19 nt, Artificial Sequence
  Description of Artificial Sequence: Synthetic oligonucleotide
guuggggauacuuuugagg

SEQ ID NO: 1654498 - RNA, 19 nt, Artificial Sequence
  Description of Artificial Sequence: Synthetic oligonucleotide
agcuaugaaacagucggcc

SEQ ID NO: 1654499 - RNA, 19 nt, Artificial Sequence
  Description of Artificial Sequence: Synthetic oligonucleotide
cuuuugaggcagaaaaggc

SEQ ID NO: 1654500 - RNA, 19 nt, Artificial Sequence
  Description of Artificial Sequence: Synthetic oligonucleotide
ucuagaacgaggaguggag

SEQ ID NO: 1654501 - RNA, 19 nt, Artificial Sequence
  Description of Artificial Sequence: Synthetic oligonucleotide
ggacuuuccacuuuaaagc

SEQ ID NO: 1654502 - RNA, 19 nt, Artificial Sequence
  Description of Artificial Sequence: Synthetic oligonucleotide
ugguuauuaggaaaacgug

SEQ ID NO: 1654503 - RNA, 19 nt, Artificial Sequence
  Description of Artificial Sequence: Synthetic oligonucleotide
gaaaacguggacuuuccac

SEQ ID NO: 1654504 - RNA, 19 nt, Artificial Sequence
  Description of Artificial Sequence: Synthetic oligonucleotide
uccucuagaacgaggagug

SEQ ID NO: 1654505 - RNA, 19 nt, Artificial Sequence
  Description of Artificial Sequence: Synthetic oligonucleotide
gagaagcugcgcuucaugg

SEQ ID NO: 1654506 - RNA, 19 nt, Artificial Sequence
  Description of Artificial Sequence: Synthetic oligonucleotide
cuuuaaagcgcagugggcc

SEQ ID NO: 1654507 - RNA, 19 nt, Artificial Sequence
  Description of Artificial Sequence: Synthetic oligonucleotide
uauuaggaaaacguggacu

SEQ ID NO: 1654508 - RNA, 19 nt, Artificial Sequence
  Description of Artificial Sequence: Synthetic oligonucleotide
ucuuccaccucucggauac

SEQ ID NO: 1654509 - RNA, 19 nt, Artificial Sequence
  Description of Artificial Sequence: Synthetic oligonucleotide
uugucagaaugaaccagcg

SEQ ID NO: 1654510 - RNA, 19 nt, Artificial Sequence
  Description of Artificial Sequence: Synthetic oligonucleotide
gguuauuaggaaaacgugg

SEQ ID NO: 1654511 - RNA, 19 nt, Artificial Sequence
  Description of Artificial Sequence: Synthetic oligonucleotide
agugugccaagacaccacc

SEQ ID NO: 1654512 - RNA, 19 nt, Artificial Sequence
  Description of Artificial Sequence: Synthetic oligonucleotide
ccagcuaugaaacagucgg

SEQ ID NO: 1654513 - RNA, 19 nt, Artificial Sequence
  Description of Artificial Sequence: Synthetic oligonucleotide
accuccuaguuucagcagc

SEQ ID NO: 1654514 - RNA, 19 nt, Artificial Sequence
  Description of Artificial Sequence: Synthetic oligonucleotide
uacuuuugaggcagaaaag

SEQ ID NO: 1654515 - RNA, 19 nt, Artificial Sequence
  Description of Artificial Sequence: Synthetic oligonucleotide
agaagcugcgcuucauggc

SEQ ID NO: 1654516 - RNA, 19 nt, Artificial Sequence
  Description of Artificial Sequence: Synthetic oligonucleotide
auuaggaaaacguggacuu

SEQ ID NO: 1654517 - RNA, 19 nt, Artificial Sequence
  Description of Artificial Sequence: Synthetic oligonucleotide
aucccauaggcacugggcg

SEQ ID NO: 1654518 - RNA, 19 nt, Artificial Sequence
  Description of Artificial Sequence: Synthetic oligonucleotide
acaguuuugguuauuagga

SEQ ID NO: 1654519 - RNA, 19 nt, Artificial Sequence
  Description of Artificial Sequence: Synthetic oligonucleotide
ugagagaacggcaggagaa

SEQ ID NO: 1654520 - RNA, 19 nt, Artificial Sequence
  Description of Artificial Sequence: Synthetic oligonucleotide
uaaggggaugaucccacgg

SEQ ID NO: 1654521 - RNA, 19 nt, Artificial Sequence
  Description of Artificial Sequence: Synthetic oligonucleotide
aaggccaccucaccucacc

SEQ ID NO: 1654522 - RNA, 19 nt, Artificial Sequence
  Description of Artificial Sequence: Synthetic oligonucleotide
aaagaaagaccagcuauga

SEQ ID NO: 1654523 - RNA, 19 nt, Artificial Sequence
  Description of Artificial Sequence: Synthetic oligonucleotide
ugccauagagggcaagggg

SEQ ID NO: 1654524 - RNA, 19 nt, Artificial Sequence
  Description of Artificial Sequence: Synthetic oligonucleotide
ucuuacaggccuuaaucac

SEQ ID NO: 1654525 - RNA, 19 nt, Artificial Sequence
  Description of Artificial Sequence: Synthetic oligonucleotide
acaggccuuaaucaccugg

SEQ ID NO: 1654526 - RNA, 19 nt, Artificial Sequence
  Description of Artificial Sequence: Synthetic oligonucleotide
uuauuaggaaaacguggac

SEQ ID NO: 1654527 - RNA, 19 nt, Artificial Sequence
  Description of Artificial Sequence: Synthetic oligonucleotide
aggaguggaguucuugggg

SEQ ID NO: 1654528 - RNA, 19 nt, Artificial Sequence
  Description of Artificial Sequence: Synthetic oligonucleotide
uugagagucccugagagaa

SEQ ID NO: 1654529 - RNA, 19 nt, Artificial Sequence
  Description of Artificial Sequence: Synthetic oligonucleotide
ugugccaagacaccaccug

SEQ ID NO: 1654530 - RNA, 19 nt, Artificial Sequence
  Description of Artificial Sequence: Synthetic oligonucleotide
aaagcuauuuccagaggug

SEQ ID NO: 1654531 - RNA, 19 nt, Artificial Sequence
  Description of Artificial Sequence: Synthetic oligonucleotide
uggaggcuaccacagagug

SEQ ID NO: 1654532 - RNA, 19 nt, Artificial Sequence
  Description of Artificial Sequence: Synthetic oligonucleotide
cuucacaccgaguuaggag

SEQ ID NO: 1654533 - RNA, 19 nt, Artificial Sequence
  Description of Artificial Sequence: Synthetic oligonucleotide
gggauauaaagcucaaagc

SEQ ID NO: 1654534 - RNA, 19 nt, Artificial Sequence
  Description of Artificial Sequence: Synthetic oligonucleotide
cucagauuuucuaagggga

SEQ ID NO: 1654535 - RNA, 19 nt, Artificial Sequence
  Description of Artificial Sequence: Synthetic oligonucleotide
ucuaaggggaugaucccac

SEQ ID NO: 1654536 - RNA, 19 nt, Artificial Sequence
  Description of Artificial Sequence: Synthetic oligonucleotide
gaggcuaccacagagugca

SEQ ID NO: 1654537 - RNA, 19 nt, Artificial Sequence
  Description of Artificial Sequence: Synthetic oligonucleotide
gaggaguggaguucuuggg

SEQ ID NO: 1654538 - RNA, 19 nt, Artificial Sequence
  Description of Artificial Sequence: Synthetic oligonucleotide
uccuaguuucagcagccag

SEQ ID NO: 1654539 - RNA, 19 nt, Artificial Sequence
  Description of Artificial Sequence: Synthetic oligonucleotide
aguuucagcagccagccuu

SEQ ID NO: 1654540 - RNA, 19 nt, Artificial Sequence
  Description of Artificial Sequence: Synthetic oligonucleotide
cuaguuucagcagccagcc

SEQ ID NO: 1654541 - RNA, 19 nt, Artificial Sequence
  Description of Artificial Sequence: Synthetic oligonucleotide
aucaccuggucuuuguugu

SEQ ID NO: 1654542 - RNA, 19 nt, Artificial Sequence
  Description of Artificial Sequence: Synthetic oligonucleotide
auuuucuaaggggaugauc

SEQ ID NO: 1654543 - RNA, 19 nt, Artificial Sequence
  Description of Artificial Sequence: Synthetic oligonucleotide
uuuaaagcgcagugggccu

SEQ ID NO: 1654544 - RNA, 19 nt, Artificial Sequence
  Description of Artificial Sequence: Synthetic oligonucleotide
guugucagaaugaaccagc

SEQ ID NO: 1654545 - RNA, 19 nt, Artificial Sequence
  Description of Artificial Sequence: Synthetic oligonucleotide
ucagauuuucuaaggggau

SEQ ID NO: 1654546 - RNA, 19 nt, Artificial Sequence
  Description of Artificial Sequence: Synthetic oligonucleotide
agagaacggcaggagaagc

SEQ ID NO: 1654547 - RNA, 19 nt, Artificial Sequence
  Description of Artificial Sequence: Synthetic oligonucleotide
aaagaccagcuaugaaaca

SEQ ID NO: 1654548 - RNA, 19 nt, Artificial Sequence
  Description of Artificial Sequence: Synthetic oligonucleotide
auaggcacugggcgggagc

SEQ ID NO: 1654549 - RNA, 19 nt, Artificial Sequence
  Description of Artificial Sequence: Synthetic oligonucleotide
uuucuaaggggaugauccc

SEQ ID NO: 1654550 - RNA, 19 nt, Artificial Sequence
  Description of Artificial Sequence: Synthetic oligonucleotide
ugucagaaugaaccagcgc

SEQ ID NO: 1654551 - RNA, 19 nt, Artificial Sequence
  Description of Artificial Sequence: Synthetic oligonucleotide
uuauccgugguguacucaa

SEQ ID NO: 1654552 - RNA, 19 nt, Artificial Sequence
  Description of Artificial Sequence: Synthetic oligonucleotide
acuuuaaagcgcagugggc

SEQ ID NO: 1654553 - RNA, 19 nt, Artificial Sequence
  Description of Artificial Sequence: Synthetic oligonucleotide
caggucuucacccugccac

SEQ ID NO: 1654554 - RNA, 19 nt, Artificial Sequence
  Description of Artificial Sequence: Synthetic oligonucleotide
acagucggccaccuggcac

SEQ ID NO: 1654555 - RNA, 19 nt, Artificial Sequence
  Description of Artificial Sequence: Synthetic oligonucleotide
ggcaaggggacacaaaggc

SEQ ID NO: 1654556 - RNA, 19 nt, Artificial Sequence
  Description of Artificial Sequence: Synthetic oligonucleotide
ucuucacccugccaccucc

SEQ ID NO: 1654557 - RNA, 19 nt, Artificial Sequence
  Description of Artificial Sequence: Synthetic oligonucleotide
gagaaagggccacagcuuc

SEQ ID NO: 1654558 - RNA, 19 nt, Artificial Sequence
  Description of Artificial Sequence: Synthetic oligonucleotide
auagagggcaaggggacac

SEQ ID NO: 1654559 - RNA, 19 nt, Artificial Sequence
  Description of Artificial Sequence: Synthetic oligonucleotide
acuuuccacuuuaaagcgc

SEQ ID NO: 1654560 - RNA, 19 nt, Artificial Sequence
  Description of Artificial Sequence: Synthetic oligonucleotide
ucggauacucagauuuucu

SEQ ID NO: 1654561 - RNA, 19 nt, Artificial Sequence
  Description of Artificial Sequence: Synthetic oligonucleotide
ugugguuuccuuccaccac

SEQ ID NO: 1654562 - RNA, 19 nt, Artificial Sequence
  Description of Artificial Sequence: Synthetic oligonucleotide
uugacugcacugcacccug

SEQ ID NO: 1654563 - RNA, 19 nt, Artificial Sequence
  Description of Artificial Sequence: Synthetic oligonucleotide
agaacgaggaguggaguuc

SEQ ID NO: 1654564 - RNA, 19 nt, Artificial Sequence
  Description of Artificial Sequence: Synthetic oligonucleotide
ucccuucacaccgaguuag

SEQ ID NO: 1654565 - RNA, 19 nt, Artificial Sequence
  Description of Artificial Sequence: Synthetic oligonucleotide
gaugcacuugauccacucc

SEQ ID NO: 1654566 - RNA, 19 nt, Artificial Sequence
  Description of Artificial Sequence: Synthetic oligonucleotide
ugccaagacaccaccugcc

SEQ ID NO: 1654567 - RNA, 19 nt, Artificial Sequence
  Description of Artificial Sequence: Synthetic oligonucleotide
guaguaaaggcaguuguca

SEQ ID NO: 1654568 - RNA, 19 nt, Artificial Sequence
  Description of Artificial Sequence: Synthetic oligonucleotide
aggcugaagccccaagggg

SEQ ID NO: 1654569 - RNA, 19 nt, Artificial Sequence
  Description of Artificial Sequence: Synthetic oligonucleotide
agugcaccagaacagucca

SEQ ID NO: 1654570 - RNA, 19 nt, Artificial Sequence
  Description of Artificial Sequence: Synthetic oligonucleotide
ucuuuauccgugguguacu

SEQ ID NO: 1654571 - RNA, 19 nt, Artificial Sequence
  Description of Artificial Sequence: Synthetic oligonucleotide
gcagagaugcgguacacag

SEQ ID NO: 1654572 - RNA, 19 nt, Artificial Sequence
  Description of Artificial Sequence: Synthetic oligonucleotide
caccccaucccauaggcac

SEQ ID NO: 1654573 - RNA, 19 nt, Artificial Sequence
  Description of Artificial Sequence: Synthetic oligonucleotide
gucuuacaggccuuaauca

SEQ ID NO: 1654574 - RNA, 19 nt, Artificial Sequence
  Description of Artificial Sequence: Synthetic oligonucleotide
agcgcagugggccugggug

SEQ ID NO: 1654575 - RNA, 19 nt, Artificial Sequence
  Description of Artificial Sequence: Synthetic oligonucleotide
ucagcaccccuccagggga

SEQ ID NO: 1654576 - RNA, 19 nt, Artificial Sequence
  Description of Artificial Sequence: Synthetic oligonucleotide
ggaggagaaagaaagacca

SEQ ID NO: 1654577 - RNA, 19 nt, Artificial Sequence
  Description of Artificial Sequence: Synthetic oligonucleotide
gagucuuccaccucucgga

SEQ ID NO: 1654578 - RNA, 19 nt, Artificial Sequence
  Description of Artificial Sequence: Synthetic oligonucleotide
aggaaaacguggacuuucc

SEQ ID NO: 1654579 - RNA, 19 nt, Artificial Sequence
  Description of Artificial Sequence: Synthetic oligonucleotide
ugucagggauauaaagcuc

SEQ ID NO: 1654580 - RNA, 19 nt, Artificial Sequence
  Description of Artificial Sequence: Synthetic oligonucleotide
uuuugguuauuaggaaaac

SEQ ID NO: 1654581 - RNA, 19 nt, Artificial Sequence
  Description of Artificial Sequence: Synthetic oligonucleotide
gagugcaccagaacagucc

SEQ ID NO: 1654582 - RNA, 19 nt, Artificial Sequence
  Description of Artificial Sequence: Synthetic oligonucleotide
caccacucgcccaucagcc

SEQ ID NO: 1654583 - RNA, 19 nt, Artificial Sequence
  Description of Artificial Sequence: Synthetic oligonucleotide
ucuuuguugucagggauau

SEQ ID NO: 1654584 - RNA, 19 nt, Artificial Sequence
  Description of Artificial Sequence: Synthetic oligonucleotide
aaacguggacuuuccacuu

SEQ ID NO: 1654585 - RNA, 19 nt, Artificial Sequence
  Description of Artificial Sequence: Synthetic oligonucleotide
aaaccuacuccuuccucua

SEQ ID NO: 1654586 - RNA, 19 nt, Artificial Sequence
  Description of Artificial Sequence: Synthetic oligonucleotide
ucccugagagaacggcagg

SEQ ID NO: 1654587 - RNA, 19 nt, Artificial Sequence
  Description of Artificial Sequence: Synthetic oligonucleotide
agugucucuuuguggagga

SEQ ID NO: 1654588 - RNA, 19 nt, Artificial Sequence
  Description of Artificial Sequence: Synthetic oligonucleotide
aggggaucagguaaaaccu

SEQ ID NO: 1654589 - RNA, 19 nt, Artificial Sequence
  Description of Artificial Sequence: Synthetic oligonucleotide
uaccacagagugcaccaga

SEQ ID NO: 1654590 - RNA, 19 nt, Artificial Sequence
  Description of Artificial Sequence: Synthetic oligonucleotide
ugcaccagaacaguccagu

SEQ ID NO: 1654591 - RNA, 19 nt, Artificial Sequence
  Description of Artificial Sequence: Synthetic oligonucleotide
agcugcgcuucauggcucc

SEQ ID NO: 1654592 - RNA, 19 nt, Artificial Sequence
  Description of Artificial Sequence: Synthetic oligonucleotide
agggccaacccacacgugu

SEQ ID NO: 1654593 - RNA, 19 nt, Artificial Sequence
  Description of Artificial Sequence: Synthetic oligonucleotide
ucguagaaggggucucugc

SEQ ID NO: 1654594 - RNA, 19 nt, Artificial Sequence
  Description of Artificial Sequence: Synthetic oligonucleotide
cucugcaaagcuauuucca

SEQ ID NO: 1654595 - RNA, 19 nt, Artificial Sequence
  Description of Artificial Sequence: Synthetic oligonucleotide
ccuaguuucagcagccagc

SEQ ID NO: 1654596 - RNA, 19 nt, Artificial Sequence
  Description of Artificial Sequence: Synthetic oligonucleotide
caccagaacaguccaguug

SEQ ID NO: 1654597 - RNA, 19 nt, Artificial Sequence
  Description of Artificial Sequence: Synthetic oligonucleotide
aggcauggagcuguccacc

SEQ ID NO: 1654598 - RNA, 19 nt, Artificial Sequence
  Description of Artificial Sequence: Synthetic oligonucleotide
cuaaggggaugaucccacg

SEQ ID NO: 1654599 - RNA, 19 nt, Artificial Sequence
  Description of Artificial Sequence: Synthetic oligonucleotide
gagagaacggcaggagaag

SEQ ID NO: 1654600 - RNA, 19 nt, Artificial Sequence
  Description of Artificial Sequence: Synthetic oligonucleotide
uuguugucagggauauaaa

SEQ ID NO: 1654601 - RNA, 19 nt, Artificial Sequence
  Description of Artificial Sequence: Synthetic oligonucleotide
aggccaccucaccucaccc

SEQ ID NO: 1654602 - RNA, 19 nt, Artificial Sequence
  Description of Artificial Sequence: Synthetic oligonucleotide
uuuuccgcgcugcaagcau

SEQ ID NO: 1654603 - RNA, 19 nt, Artificial Sequence
  Description of Artificial Sequence: Synthetic oligonucleotide
ccuugagagucccugagag

SEQ ID NO: 1654604 - RNA, 19 nt, Artificial Sequence
  Description of Artificial Sequence: Synthetic oligonucleotide
gaagcugcgcuucauggcu

SEQ ID NO: 1654605 - RNA, 19 nt, Artificial Sequence
  Description of Artificial Sequence: Synthetic oligonucleotide
gagaaagaaagaccagcua

SEQ ID NO: 1654606 - RNA, 19 nt, Artificial Sequence
  Description of Artificial Sequence: Synthetic oligonucleotide
aggccuuaaucaccugguc

SEQ ID NO: 1654607 - RNA, 19 nt, Artificial Sequence
  Description of Artificial Sequence: Synthetic oligonucleotide
uggggauacuuuugaggca

SEQ ID NO: 1654608 - RNA, 19 nt, Artificial Sequence
  Description of Artificial Sequence: Synthetic oligonucleotide
cagucggccaccuggcacc

SEQ ID NO: 1654609 - RNA, 19 nt, Artificial Sequence
  Description of Artificial Sequence: Synthetic oligonucleotide
gcucacgcagcccaguggg

SEQ ID NO: 1654610 - RNA, 19 nt, Artificial Sequence
  Description of Artificial Sequence: Synthetic oligonucleotide
agcucacgcagcccagugg

SEQ ID NO: 1654611 - RNA, 19 nt, Artificial Sequence
  Description of Artificial Sequence: Synthetic oligonucleotide
uggaggagugugccaagac

SEQ ID NO: 1654612 - RNA, 19 nt, Artificial Sequence
  Description of Artificial Sequence: Synthetic oligonucleotide
gugccaagacaccaccugc

SEQ ID NO: 1654613 - RNA, 19 nt, Artificial Sequence
  Description of Artificial Sequence: Synthetic oligonucleotide
aggagugugccaagacacc

SEQ ID NO: 1654614 - RNA, 19 nt, Artificial Sequence
  Description of Artificial Sequence: Synthetic oligonucleotide
ggagcuguccaccuucacc

SEQ ID NO: 1654615 - RNA, 19 nt, Artificial Sequence
  Description of Artificial Sequence: Synthetic oligonucleotide
cuucugagaugggaggagc

SEQ ID NO: 1654616 - RNA, 19 nt, Artificial Sequence
  Description of Artificial Sequence: Synthetic oligonucleotide
ggggauacuuuugaggcag

SEQ ID NO: 1654617 - RNA, 19 nt, Artificial Sequence
  Description of Artificial Sequence: Synthetic oligonucleotide
cagcuaugaaacagucggc

SEQ ID NO: 1654618 - RNA, 19 nt, Artificial Sequence
  Description of Artificial Sequence: Synthetic oligonucleotide
cagauuuucuaaggggaug

SEQ ID NO: 1654619 - RNA, 19 nt, Artificial Sequence
  Description of Artificial Sequence: Synthetic oligonucleotide
ucacgcagcccagugggag

SEQ ID NO: 1654620 - RNA, 19 nt, Artificial Sequence
  Description of Artificial Sequence: Synthetic oligonucleotide
ugaaacagucggccaccug

SEQ ID NO: 1654621 - RNA, 19 nt, Artificial Sequence
  Description of Artificial Sequence: Synthetic oligonucleotide
cagugucucuuuguggagg

SEQ ID NO: 1654622 - RNA, 19 nt, Artificial Sequence
  Description of Artificial Sequence: Synthetic oligonucleotide
uuuauccgugguguacuca

SEQ ID NO: 1654623 - RNA, 19 nt, Artificial Sequence
  Description of Artificial Sequence: Synthetic oligonucleotide
accagcuaugaaacagucg

SEQ ID NO: 1654624 - RNA, 19 nt, Artificial Sequence
  Description of Artificial Sequence: Synthetic oligonucleotide
cucaccucacccuggcuug

SEQ ID NO: 1654625 - RNA, 19 nt, Artificial Sequence
  Description of Artificial Sequence: Synthetic oligonucleotide
ccuggaggcaccauucugc

SEQ ID NO: 1654626 - RNA, 19 nt, Artificial Sequence
  Description of Artificial Sequence: Synthetic oligonucleotide
uuaaagcgcagugggccug

SEQ ID NO: 1654627 - RNA, 19 nt, Artificial Sequence
  Description of Artificial Sequence: Synthetic oligonucleotide
agagugcaccagaacaguc

SEQ ID NO: 1654628 - RNA, 19 nt, Artificial Sequence
  Description of Artificial Sequence: Synthetic oligonucleotide
cuucaccccaucccauagg

SEQ ID NO: 1654629 - RNA, 19 nt, Artificial Sequence
  Description of Artificial Sequence: Synthetic oligonucleotide
gcuuuugccccucuugccc

SEQ ID NO: 1654630 - RNA, 19 nt, Artificial Sequence
  Description of Artificial Sequence: Synthetic oligonucleotide
ggauacucagauuuucuaa

SEQ ID NO: 1654631 - RNA, 19 nt, Artificial Sequence
  Description of Artificial Sequence: Synthetic oligonucleotide
cucacccuggcuugacugc

SEQ ID NO: 1654632 - RNA, 19 nt, Artificial Sequence
  Description of Artificial Sequence: Synthetic oligonucleotide
cucuuuauccgugguguac

SEQ ID NO: 1654633 - RNA, 19 nt, Artificial Sequence
  Description of Artificial Sequence: Synthetic oligonucleotide
uuccacuuuaaagcgcagu

SEQ ID NO: 1654634 - RNA, 19 nt, Artificial Sequence
  Description of Artificial Sequence: Synthetic oligonucleotide
ggcuugacugcacugcacc

SEQ ID NO: 1654635 - RNA, 19 nt, Artificial Sequence
  Description of Artificial Sequence: Synthetic oligonucleotide
gggaggagaaagaaagacc

SEQ ID NO: 1654636 - RNA, 19 nt, Artificial Sequence
  Description of Artificial Sequence: Synthetic oligonucleotide
cuuuguggaggagaccuuc

SEQ ID NO: 1654637 - RNA, 19 nt, Artificial Sequence
  Description of Artificial Sequence: Synthetic oligonucleotide
ccugccaccuccuaguuuc

SEQ ID NO: 1654638 - RNA, 19 nt, Artificial Sequence
  Description of Artificial Sequence: Synthetic oligonucleotide
gcugcaagcaucucguaga

SEQ ID NO: 1654639 - RNA, 19 nt, Artificial Sequence
  Description of Artificial Sequence: Synthetic oligonucleotide
ugagagucccugagagaac

SEQ ID NO: 1654640 - RNA, 19 nt, Artificial Sequence
  Description of Artificial Sequence: Synthetic oligonucleotide
uggcaugccaugccauaga

SEQ ID NO: 1654641 - RNA, 19 nt, Artificial Sequence
  Description of Artificial Sequence: Synthetic oligonucleotide
uugaugcacuugauccacu

SEQ ID NO: 1654642 - RNA, 19 nt, Artificial Sequence
  Description of Artificial Sequence: Synthetic oligonucleotide
ggacacaaaggccaccuca

SEQ ID NO: 1654643 - RNA, 19 nt, Artificial Sequence
  Description of Artificial Sequence: Synthetic oligonucleotide
cuuuauccgugguguacuc

SEQ ID NO: 1654644 - RNA, 19 nt, Artificial Sequence
  Description of Artificial Sequence: Synthetic oligonucleotide
uugauccacuccuccuucu

SEQ ID NO: 1654645 - RNA, 19 nt, Artificial Sequence
  Description of Artificial Sequence: Synthetic oligonucleotide
uuccgcgcugcaagcaucu

SEQ ID NO: 1654646 - RNA, 19 nt, Artificial Sequence
  Description of Artificial Sequence: Synthetic oligonucleotide
cugcaaagcuauuuccaga

SEQ ID NO: 1654647 - RNA, 19 nt, Artificial Sequence
  Description of Artificial Sequence: Synthetic oligonucleotide
gaacggcaggagaagcugc

SEQ ID NO: 1654648 - RNA, 19 nt, Artificial Sequence
  Description of Artificial Sequence: Synthetic oligonucleotide
gaacaguccaguuggggau

SEQ ID NO: 1654649 - RNA, 19 nt, Artificial Sequence
  Description of Artificial Sequence: Synthetic oligonucleotide
ggagcugcccuugagaguc

SEQ ID NO: 1654650 - RNA, 19 nt, Artificial Sequence
  Description of Artificial Sequence: Synthetic oligonucleotide
ggaggagcugagcucacgc

SEQ ID NO: 1654651 - RNA, 19 nt, Artificial Sequence
  Description of Artificial Sequence: Synthetic oligonucleotide
gcaaagcuauuuccagagg

SEQ ID NO: 1654652 - RNA, 19 nt, Artificial Sequence
  Description of Artificial Sequence: Synthetic oligonucleotide
uguggcaugccaugccaua

SEQ ID NO: 1654653 - RNA, 19 nt, Artificial Sequence
  Description of Artificial Sequence: Synthetic oligonucleotide
uuuccgcgcugcaagcauc

SEQ ID NO: 1654654 - RNA, 19 nt, Artificial Sequence
  Description of Artificial Sequence: Synthetic oligonucleotide
ucucggauacucagauuuu

SEQ ID NO: 1654655 - RNA, 19 nt, Artificial Sequence
  Description of Artificial Sequence: Synthetic oligonucleotide
cuccaccugcccuggaggc

SEQ ID NO: 1654656 - RNA, 19 nt, Artificial Sequence
  Description of Artificial Sequence: Synthetic oligonucleotide
gaaggggucucugcugaug

SEQ ID NO: 1654657 - RNA, 19 nt, Artificial Sequence
  Description of Artificial Sequence: Synthetic oligonucleotide
acacugccugccugcugcc

SEQ ID NO: 1654658 - RNA, 19 nt, Artificial Sequence
  Description of Artificial Sequence: Synthetic oligonucleotide
ugcugagcaaggcccugcu

SEQ ID NO: 1654659 - RNA, 19 nt, Artificial Sequence
  Description of Artificial Sequence: Synthetic oligonucleotide
augcgguacacaguguggu

SEQ ID NO: 1654660 - RNA, 19 nt, Artificial Sequence
  Description of Artificial Sequence: Synthetic oligonucleotide
cucuagaacgaggagugga

SEQ ID NO: 1654661 - RNA, 19 nt, Artificial Sequence
  Description of Artificial Sequence: Synthetic oligonucleotide
cacgcagcccagugggagg

SEQ ID NO: 1654662 - RNA, 19 nt, Artificial Sequence
  Description of Artificial Sequence: Synthetic oligonucleotide
acuccuuccucuagaacga

SEQ ID NO: 1654663 - RNA, 19 nt, Artificial Sequence
  Description of Artificial Sequence: Synthetic oligonucleotide
agaccagcuaugaaacagu

SEQ ID NO: 1654664 - RNA, 19 nt, Artificial Sequence
  Description of Artificial Sequence: Synthetic oligonucleotide
gaccagcuaugaaacaguc

SEQ ID NO: 1654665 - RNA, 19 nt, Artificial Sequence
  Description of Artificial Sequence: Synthetic oligonucleotide
ucucuuuguggaggagacc

SEQ ID NO: 1654666 - RNA, 19 nt, Artificial Sequence
  Description of Artificial Sequence: Synthetic oligonucleotide
caguuuugguuauuaggaa

SEQ ID NO: 1654667 - RNA, 19 nt, Artificial Sequence
  Description of Artificial Sequence: Synthetic oligonucleotide
aagcugcgcuucauggcuc

SEQ ID NO: 1654668 - RNA, 19 nt, Artificial Sequence
  Description of Artificial Sequence: Synthetic oligonucleotide
ugcaagcaucucguagaag

SEQ ID NO: 1654669 - RNA, 19 nt, Artificial Sequence
  Description of Artificial Sequence: Synthetic oligonucleotide
acacgugugcuguggcaug

SEQ ID NO: 1654670 - RNA, 19 nt, Artificial Sequence
  Description of Artificial Sequence: Synthetic oligonucleotide
ugucugcugggcccucgcc

SEQ ID NO: 1654671 - RNA, 19 nt, Artificial Sequence
  Description of Artificial Sequence: Synthetic oligonucleotide
cuacuccuuccucuagaac

SEQ ID NO: 1654672 - RNA, 19 nt, Artificial Sequence
  Description of Artificial Sequence: Synthetic oligonucleotide
gagcucacgcagcccagug

SEQ ID NO: 1654673 - RNA, 19 nt, Artificial Sequence
  Description of Artificial Sequence: Synthetic oligonucleotide
ucucguagaaggggucucu

SEQ ID NO: 1654674 - RNA, 19 nt, Artificial Sequence
  Description of Artificial Sequence: Synthetic oligonucleotide
cugagagaacggcaggaga

SEQ ID NO: 1654675 - RNA, 19 nt, Artificial Sequence
  Description of Artificial Sequence: Synthetic oligonucleotide
acagugugguuuccuucca

SEQ ID NO: 1654676 - RNA, 19 nt, Artificial Sequence
  Description of Artificial Sequence: Synthetic oligonucleotide
cuuuugccccucuugccca

SEQ ID NO: 1654677 - RNA, 19 nt, Artificial Sequence
  Description of Artificial Sequence: Synthetic oligonucleotide
cuggacuggcacaguggcc

SEQ ID NO: 1654678 - RNA, 19 nt, Artificial Sequence
  Description of Artificial Sequence: Synthetic oligonucleotide
cuugagagucccugagaga

SEQ ID NO: 1654679 - RNA, 19 nt, Artificial Sequence
  Description of Artificial Sequence: Synthetic oligonucleotide
cccacggggcucuuuaucc

SEQ ID NO: 1654680 - RNA, 19 nt, Artificial Sequence
  Description of Artificial Sequence: Synthetic oligonucleotide
gcuaugaaacagucggcca

SEQ ID NO: 1654681 - RNA, 19 nt, Artificial Sequence
  Description of Artificial Sequence: Synthetic oligonucleotide
ucuuuguggaggagaccuu

SEQ ID NO: 1654682 - RNA, 19 nt, Artificial Sequence
  Description of Artificial Sequence: Synthetic oligonucleotide
acggcaggagaagcugcgc

SEQ ID NO: 1654683 - RNA, 19 nt, Artificial Sequence
  Description of Artificial Sequence: Synthetic oligonucleotide
ucccacggggcucuuuauc

SEQ ID NO: 1654684 - RNA, 19 nt, Artificial Sequence
  Description of Artificial Sequence: Synthetic oligonucleotide
caccgaguuaggaggccag

SEQ ID NO: 1654685 - RNA, 19 nt, Artificial Sequence
  Description of Artificial Sequence: Synthetic oligonucleotide
ugaccuccucacaguuuug

SEQ ID NO: 1654686 - RNA, 19 nt, Artificial Sequence
  Description of Artificial Sequence: Synthetic oligonucleotide
cgaggaguggaguucuugg

SEQ ID NO: 1654687 - RNA, 19 nt, Artificial Sequence
  Description of Artificial Sequence: Synthetic oligonucleotide
ccacuuuaaagcgcagugg

SEQ ID NO: 1654688 - RNA, 19 nt, Artificial Sequence
  Description of Artificial Sequence: Synthetic oligonucleotide
ggugcugaccuccuucuga

SEQ ID NO: 1654689 - RNA, 19 nt, Artificial Sequence
  Description of Artificial Sequence: Synthetic oligonucleotide
aguccaguuggggauacuu

SEQ ID NO: 1654690 - RNA, 19 nt, Artificial Sequence
  Description of Artificial Sequence: Synthetic oligonucleotide
gaucccacggggcucuuua

SEQ ID NO: 1654691 - RNA, 19 nt, Artificial Sequence
  Description of Artificial Sequence: Synthetic oligonucleotide
acguggacuuuccacuuua

SEQ ID NO: 1654692 - RNA, 19 nt, Artificial Sequence
  Description of Artificial Sequence: Synthetic oligonucleotide
caccuccuaguuucagcag

SEQ ID NO: 1654693 - RNA, 19 nt, Artificial Sequence
  Description of Artificial Sequence: Synthetic oligonucleotide
accgaguuaggaggccagg

SEQ ID NO: 1654694 - RNA, 19 nt, Artificial Sequence
  Description of Artificial Sequence: Synthetic oligonucleotide
uuuugccccucuugcccac

SEQ ID NO: 1654695 - RNA, 19 nt, Artificial Sequence
  Description of Artificial Sequence: Synthetic oligonucleotide
caaaggccaccucaccuca

SEQ ID NO: 1654696 - RNA, 19 nt, Artificial Sequence
  Description of Artificial Sequence: Synthetic oligonucleotide
ccauagagggcaaggggac

SEQ ID NO: 1654697 - RNA, 19 nt, Artificial Sequence
  Description of Artificial Sequence: Synthetic oligonucleotide
acgaggaguggaguucuug

SEQ ID NO: 1654698 - RNA, 19 nt, Artificial Sequence
  Description of Artificial Sequence: Synthetic oligonucleotide
caaggggaucagguaaaac

SEQ ID NO: 1654699 - RNA, 19 nt, Artificial Sequence
  Description of Artificial Sequence: Synthetic oligonucleotide
gugguuuccuuccaccacu

SEQ ID NO: 1654700 - RNA, 19 nt, Artificial Sequence
  Description of Artificial Sequence: Synthetic oligonucleotide
acccacacgugugcugugg

SEQ ID NO: 1654701 - RNA, 19 nt, Artificial Sequence
  Description of Artificial Sequence: Synthetic oligonucleotide
gggaucagguaaaaccuac

SEQ ID NO: 1654702 - RNA, 19 nt, Artificial Sequence
  Description of Artificial Sequence: Synthetic oligonucleotide
ucugucuuacaggccuuaa

SEQ ID NO: 1654703 - RNA, 19 nt, Artificial Sequence
  Description of Artificial Sequence: Synthetic oligonucleotide
ggcuuuugccccucuugcc

SEQ ID NO: 1654704 - RNA, 19 nt, Artificial Sequence
  Description of Artificial Sequence: Synthetic oligonucleotide
uaguuucagcagccagccu

SEQ ID NO: 1654705 - RNA, 19 nt, Artificial Sequence
  Description of Artificial Sequence: Synthetic oligonucleotide
cacaaaggccaccucaccu

SEQ ID NO: 1654706 - RNA, 19 nt, Artificial Sequence
  Description of Artificial Sequence: Synthetic oligonucleotide
cagaaugaaccagcgccuc

SEQ ID NO: 1654707 - RNA, 19 nt, Artificial Sequence
  Description of Artificial Sequence: Synthetic oligonucleotide
gccauagagggcaagggga

SEQ ID NO: 1654708 - RNA, 19 nt, Artificial Sequence
  Description of Artificial Sequence: Synthetic oligonucleotide
acgugugcuguggcaugcc

SEQ ID NO: 1654709 - RNA, 19 nt, Artificial Sequence
  Description of Artificial Sequence: Synthetic oligonucleotide
caccucaccucacccuggc

SEQ ID NO: 1654710 - RNA, 19 nt, Artificial Sequence
  Description of Artificial Sequence: Synthetic oligonucleotide
cacgugugcuguggcaugc

SEQ ID NO: 1654711 - RNA, 19 nt, Artificial Sequence
  Description of Artificial Sequence: Synthetic oligonucleotide
acaccgaguuaggaggcca

SEQ ID NO: 1654712 - RNA, 19 nt, Artificial Sequence
  Description of Artificial Sequence: Synthetic oligonucleotide
cucccugugucugcugggc

SEQ ID NO: 1654713 - RNA, 19 nt, Artificial Sequence
  Description of Artificial Sequence: Synthetic oligonucleotide
uggagcuguccaccuucac

SEQ ID NO: 1654714 - RNA, 19 nt, Artificial Sequence
  Description of Artificial Sequence: Synthetic oligonucleotide
ugcugaccuccuucugaga

SEQ ID NO: 1654715 - RNA, 19 nt, Artificial Sequence
  Description of Artificial Sequence: Synthetic oligonucleotide
aagcgcagugggccugggu

SEQ ID NO: 1654716 - RNA, 19 nt, Artificial Sequence
  Description of Artificial Sequence: Synthetic oligonucleotide
ugcgguacacagugugguu

SEQ ID NO: 1654717 - RNA, 19 nt, Artificial Sequence
  Description of Artificial Sequence: Synthetic oligonucleotide
guggaggagaccuucuuuu

SEQ ID NO: 1654718 - RNA, 19 nt, Artificial Sequence
  Description of Artificial Sequence: Synthetic oligonucleotide
cuucaugggcuggcugugc

SEQ ID NO: 1654719 - RNA, 19 nt, Artificial Sequence
  Description of Artificial Sequence: Synthetic oligonucleotide
gugaccuccucacaguuuu

SEQ ID NO: 1654720 - RNA, 19 nt, Artificial Sequence
  Description of Artificial Sequence: Synthetic oligonucleotide
gucaucuccucagcacccc

SEQ ID NO: 1654721 - RNA, 19 nt, Artificial Sequence
  Description of Artificial Sequence: Synthetic oligonucleotide
cucguagaaggggucucug

SEQ ID NO: 1654722 - RNA, 19 nt, Artificial Sequence
  Description of Artificial Sequence: Synthetic oligonucleotide
augaaacagucggccaccu

SEQ ID NO: 1654723 - RNA, 19 nt, Artificial Sequence
  Description of Artificial Sequence: Synthetic oligonucleotide
ccuggcuugacugcacugc

SEQ ID NO: 1654724 - RNA, 19 nt, Artificial Sequence
  Description of Artificial Sequence: Synthetic oligonucleotide
aguucuuggggaggagaaa

SEQ ID NO: 1654725 - RNA, 19 nt, Artificial Sequence
  Description of Artificial Sequence: Synthetic oligonucleotide
ggagugugccaagacacca

SEQ ID NO: 1654726 - RNA, 19 nt, Artificial Sequence
  Description of Artificial Sequence: Synthetic oligonucleotide
ggaaaacguggacuuucca

SEQ ID NO: 1654727 - RNA, 19 nt, Artificial Sequence
  Description of Artificial Sequence: Synthetic oligonucleotide
auggggugaccuccucaca

SEQ ID NO: 1654728 - RNA, 19 nt, Artificial Sequence
  Description of Artificial Sequence: Synthetic oligonucleotide
ucgccagcagccuggcuuu

SEQ ID NO: 1654729 - RNA, 19 nt, Artificial Sequence
  Description of Artificial Sequence: Synthetic oligonucleotide
ugccaccuccuaguuucag

SEQ ID NO: 1654730 - RNA, 19 nt, Artificial Sequence
  Description of Artificial Sequence: Synthetic oligonucleotide
gcuccuggaggcuaccaca

SEQ ID NO: 1654731 - RNA, 19 nt, Artificial Sequence
  Description of Artificial Sequence: Synthetic oligonucleotide
accuucaccccaucccaua

SEQ ID NO: 1654732 - RNA, 19 nt, Artificial Sequence
  Description of Artificial Sequence: Synthetic oligonucleotide
gagaacggcaggagaagcu

SEQ ID NO: 1654733 - RNA, 19 nt, Artificial Sequence
  Description of Artificial Sequence: Synthetic oligonucleotide
ccucacccuggcuugacug

SEQ ID NO: 1654734 - RNA, 19 nt, Artificial Sequence
  Description of Artificial Sequence: Synthetic oligonucleotide
caccuggcaccauggggug

SEQ ID NO: 1654735 - RNA, 19 nt, Artificial Sequence
  Description of Artificial Sequence: Synthetic oligonucleotide
acugggcgggagcugccca

SEQ ID NO: 1654736 - RNA, 19 nt, Artificial Sequence
  Description of Artificial Sequence: Synthetic oligonucleotide
cugcacccugcugagcaag

SEQ ID NO: 1654737 - RNA, 19 nt, Artificial Sequence
  Description of Artificial Sequence: Synthetic oligonucleotide
cacaccgaguuaggaggcc

SEQ ID NO: 1654738 - RNA, 19 nt, Artificial Sequence
  Description of Artificial Sequence: Synthetic oligonucleotide
ccaccacucgcccaucagc

SEQ ID NO: 1654739 - RNA, 19 nt, Artificial Sequence
  Description of Artificial Sequence: Synthetic oligonucleotide
ggccuuaaucaccuggucu

SEQ ID NO: 1654740 - RNA, 19 nt, Artificial Sequence
  Description of Artificial Sequence: Synthetic oligonucleotide
gcaugccaugccauagagg

SEQ ID NO: 1654741 - RNA, 19 nt, Artificial Sequence
  Description of Artificial Sequence: Synthetic oligonucleotide
gaagccccaaggggaucag

SEQ ID NO: 1654742 - RNA, 19 nt, Artificial Sequence
  Description of Artificial Sequence: Synthetic oligonucleotide
caggccuuaaucaccuggu

SEQ ID NO: 1654743 - RNA, 19 nt, Artificial Sequence
  Description of Artificial Sequence: Synthetic oligonucleotide
ggcucuuuauccguggugu

SEQ ID NO: 1654744 - RNA, 19 nt, Artificial Sequence
  Description of Artificial Sequence: Synthetic oligonucleotide
gcagccagccuucucgguc

SEQ ID NO: 1654745 - RNA, 19 nt, Artificial Sequence
  Description of Artificial Sequence: Synthetic oligonucleotide
ccacggggcucuuuauccg

SEQ ID NO: 1654746 - RNA, 19 nt, Artificial Sequence
  Description of Artificial Sequence: Synthetic oligonucleotide
ccgagggccaggcauggag

SEQ ID NO: 1654747 - RNA, 19 nt, Artificial Sequence
  Description of Artificial Sequence: Synthetic oligonucleotide
ccgaguuaggaggccaggg

SEQ ID NO: 1654748 - RNA, 19 nt, Artificial Sequence
  Description of Artificial Sequence: Synthetic oligonucleotide
cauagagggcaaggggaca

SEQ ID NO: 1654749 - RNA, 19 nt, Artificial Sequence
  Description of Artificial Sequence: Synthetic oligonucleotide
ccaagacaccaccugccac

SEQ ID NO: 1654750 - RNA, 19 nt, Artificial Sequence
  Description of Artificial Sequence: Synthetic oligonucleotide
gacugcacugcacccugcu

SEQ ID NO: 1654751 - RNA, 19 nt, Artificial Sequence
  Description of Artificial Sequence: Synthetic oligonucleotide
gggucucugcugauggcag

SEQ ID NO: 1654752 - RNA, 19 nt, Artificial Sequence
  Description of Artificial Sequence: Synthetic oligonucleotide
cugggcgggagcugcccac

SEQ ID NO: 1654753 - RNA, 19 nt, Artificial Sequence
  Description of Artificial Sequence: Synthetic oligonucleotide
ggaggcuaccacagagugc

SEQ ID NO: 1654754 - RNA, 19 nt, Artificial Sequence
  Description of Artificial Sequence: Synthetic oligonucleotide
cacuugauccacuccuccu

SEQ ID NO: 1654755 - RNA, 19 nt, Artificial Sequence
  Description of Artificial Sequence: Synthetic oligonucleotide
gcccuggccaaggagcagg

SEQ ID NO: 1654756 - RNA, 19 nt, Artificial Sequence
  Description of Artificial Sequence: Synthetic oligonucleotide
ccgcgcugcaagcaucucg

SEQ ID NO: 1654757 - RNA, 19 nt, Artificial Sequence
  Description of Artificial Sequence: Synthetic oligonucleotide
cagcaccccuccaggggag

SEQ ID NO: 1654758 - RNA, 19 nt, Artificial Sequence
  Description of Artificial Sequence: Synthetic oligonucleotide
ucaccucacccuggcuuga

SEQ ID NO: 1654759 - RNA, 19 nt, Artificial Sequence
  Description of Artificial Sequence: Synthetic oligonucleotide
gccacauggaggagugugc

SEQ ID NO: 1654760 - RNA, 19 nt, Artificial Sequence
  Description of Artificial Sequence: Synthetic oligonucleotide
gugucucuuuguggaggag

SEQ ID NO: 1654761 - RNA, 19 nt, Artificial Sequence
  Description of Artificial Sequence: Synthetic oligonucleotide
cacccuggcuugacugcac

SEQ ID NO: 1654762 - RNA, 19 nt, Artificial Sequence
  Description of Artificial Sequence: Synthetic oligonucleotide
cacaguggcccuggccaag

SEQ ID NO: 1654763 - RNA, 19 nt, Artificial Sequence
  Description of Artificial Sequence: Synthetic oligonucleotide
gccaagacaccaccugcca

SEQ ID NO: 1654764 - RNA, 19 nt, Artificial Sequence
  Description of Artificial Sequence: Synthetic oligonucleotide
cucgccagcagccuggcuu

SEQ ID NO: 1654765 - RNA, 19 nt, Artificial Sequence
  Description of Artificial Sequence: Synthetic oligonucleotide
cuugacugcacugcacccu

SEQ ID NO: 1654766 - RNA, 19 nt, Artificial Sequence
  Description of Artificial Sequence: Synthetic oligonucleotide
gauuuucuaaggggaugau

SEQ ID NO: 1654767 - RNA, 19 nt, Artificial Sequence
  Description of Artificial Sequence: Synthetic oligonucleotide
agcaccccuccaggggagg

SEQ ID NO: 1654768 - RNA, 19 nt, Artificial Sequence
  Description of Artificial Sequence: Synthetic oligonucleotide
accccuccaggggaggcug

SEQ ID NO: 1654769 - RNA, 19 nt, Artificial Sequence
  Description of Artificial Sequence: Synthetic oligonucleotide
uccucagggguggggcaga

SEQ ID NO: 1654770 - RNA, 19 nt, Artificial Sequence
  Description of Artificial Sequence: Synthetic oligonucleotide
gcgcagugggccugggugc

SEQ ID NO: 1654771 - RNA, 19 nt, Artificial Sequence
  Description of Artificial Sequence: Synthetic oligonucleotide
ggggcagagaugcgguaca

SEQ ID NO: 1654772 - RNA, 19 nt, Artificial Sequence
  Description of Artificial Sequence: Synthetic oligonucleotide
cugggugccgagggccagg

SEQ ID NO: 1654773 - RNA, 19 nt, Artificial Sequence
  Description of Artificial Sequence: Synthetic oligonucleotide
cccuucacaccgaguuagg

SEQ ID NO: 1654774 - RNA, 19 nt, Artificial Sequence
  Description of Artificial Sequence: Synthetic oligonucleotide
cagagaugcgguacacagu

SEQ ID NO: 1654775 - RNA, 19 nt, Artificial Sequence
  Description of Artificial Sequence: Synthetic oligonucleotide
aucccacggggcucuuuau

SEQ ID NO: 1654776 - RNA, 19 nt, Artificial Sequence
  Description of Artificial Sequence: Synthetic oligonucleotide
ugggcgggagcugcccaca

SEQ ID NO: 1654777 - RNA, 19 nt, Artificial Sequence
  Description of Artificial Sequence: Synthetic oligonucleotide
ggaggccucccugugucug

SEQ ID NO: 1654778 - RNA, 19 nt, Artificial Sequence
  Description of Artificial Sequence: Synthetic oligonucleotide
ggugccgagggccaggcau

SEQ ID NO: 1654779 - RNA, 19 nt, Artificial Sequence
  Description of Artificial Sequence: Synthetic oligonucleotide
ggauacuuuugaggcagaa

SEQ ID NO: 1654780 - RNA, 19 nt, Artificial Sequence
  Description of Artificial Sequence: Synthetic oligonucleotide
cuucucugcaaagcuauuu

SEQ ID NO: 1654781 - RNA, 19 nt, Artificial Sequence
  Description of Artificial Sequence: Synthetic oligonucleotide
cacugggcgggagcugccc

SEQ ID NO: 1654782 - RNA, 19 nt, Artificial Sequence
  Description of Artificial Sequence: Synthetic oligonucleotide
gggccaacccacacgugug

SEQ ID NO: 1654783 - RNA, 19 nt, Artificial Sequence
  Description of Artificial Sequence: Synthetic oligonucleotide
uggcagcuuugaugcacuu

SEQ ID NO: 1654784 - RNA, 19 nt, Artificial Sequence
  Description of Artificial Sequence: Synthetic oligonucleotide
acccuucucugcaaagcua

SEQ ID NO: 1654785 - RNA, 19 nt, Artificial Sequence
  Description of Artificial Sequence: Synthetic oligonucleotide
ccucccugugucugcuggg

SEQ ID NO: 1654786 - RNA, 19 nt, Artificial Sequence
  Description of Artificial Sequence: Synthetic oligonucleotide
caacccacacgugugcugu

SEQ ID NO: 1654787 - RNA, 19 nt, Artificial Sequence
  Description of Artificial Sequence: Synthetic oligonucleotide
ccaccucaccucacccugg

SEQ ID NO: 1654788 - RNA, 19 nt, Artificial Sequence
  Description of Artificial Sequence: Synthetic oligonucleotide
cugucuuacaggccuuaau

SEQ ID NO: 1654789 - RNA, 19 nt, Artificial Sequence
  Description of Artificial Sequence: Synthetic oligonucleotide
acgcccucagugucucuuu

SEQ ID NO: 1654790 - RNA, 19 nt, Artificial Sequence
  Description of Artificial Sequence: Synthetic oligonucleotide
cucacgcagcccaguggga

SEQ ID NO: 1654791 - RNA, 19 nt, Artificial Sequence
  Description of Artificial Sequence: Synthetic oligonucleotide
cagggccaacccacacgug

SEQ ID NO: 1654792 - RNA, 19 nt, Artificial Sequence
  Description of Artificial Sequence: Synthetic oligonucleotide
ccccaaggggaucagguaa

SEQ ID NO: 1654793 - RNA, 19 nt, Artificial Sequence
  Description of Artificial Sequence: Synthetic oligonucleotide
aacgaggaguggaguucuu

SEQ ID NO: 1654794 - RNA, 19 nt, Artificial Sequence
  Description of Artificial Sequence: Synthetic oligonucleotide
guacacagugugguuuccu

SEQ ID NO: 1654795 - RNA, 19 nt, Artificial Sequence
  Description of Artificial Sequence: Synthetic oligonucleotide
ccucuagaacgaggagugg

SEQ ID NO: 1654796 - RNA, 19 nt, Artificial Sequence
  Description of Artificial Sequence: Synthetic oligonucleotide
cuccuaguuucagcagcca

SEQ ID NO: 1654797 - RNA, 19 nt, Artificial Sequence
  Description of Artificial Sequence: Synthetic oligonucleotide
auggcucccuucacaccga

SEQ ID NO: 1654798 - RNA, 19 nt, Artificial Sequence
  Description of Artificial Sequence: Synthetic oligonucleotide
ggcagagaugcgguacaca

SEQ ID NO: 1654799 - RNA, 19 nt, Artificial Sequence
  Description of Artificial Sequence: Synthetic oligonucleotide
caugggcuggcugugcccu

SEQ ID NO: 1654800 - RNA, 19 nt, Artificial Sequence
  Description of Artificial Sequence: Synthetic oligonucleotide
aggcuaccacagagugcac

SEQ ID NO: 1654801 - RNA, 19 nt, Artificial Sequence
  Description of Artificial Sequence: Synthetic oligonucleotide
cacggggcucuuuauccgu

SEQ ID NO: 1654802 - RNA, 19 nt, Artificial Sequence
  Description of Artificial Sequence: Synthetic oligonucleotide
ggaucagguaaaaccuacu

SEQ ID NO: 1654803 - RNA, 19 nt, Artificial Sequence
  Description of Artificial Sequence: Synthetic oligonucleotide
caccugcccuggaggcacc

SEQ ID NO: 1654804 - RNA, 19 nt, Artificial Sequence
  Description of Artificial Sequence: Synthetic oligonucleotide
agucggccaccuggcacca

SEQ ID NO: 1654805 - RNA, 19 nt, Artificial Sequence
  Description of Artificial Sequence: Synthetic oligonucleotide
cacacgugugcuguggcau

SEQ ID NO: 1654806 - RNA, 19 nt, Artificial Sequence
  Description of Artificial Sequence: Synthetic oligonucleotide
cagcgccucuuccaggucu

SEQ ID NO: 1654807 - RNA, 19 nt, Artificial Sequence
  Description of Artificial Sequence: Synthetic oligonucleotide
caccaccugccaccugcuc

SEQ ID NO: 1654808 - RNA, 19 nt, Artificial Sequence
  Description of Artificial Sequence: Synthetic oligonucleotide
caccucacccuggcuugac

SEQ ID NO: 1654809 - RNA, 19 nt, Artificial Sequence
  Description of Artificial Sequence: Synthetic oligonucleotide
ggggaucagguaaaaccua

SEQ ID NO: 1654810 - RNA, 19 nt, Artificial Sequence
  Description of Artificial Sequence: Synthetic oligonucleotide
cggggcucuuuauccgugg

SEQ ID NO: 1654811 - RNA, 19 nt, Artificial Sequence
  Description of Artificial Sequence: Synthetic oligonucleotide
gagaugcgguacacagugu

SEQ ID NO: 1654812 - RNA, 19 nt, Artificial Sequence
  Description of Artificial Sequence: Synthetic oligonucleotide
gcucuuuauccguggugua

SEQ ID NO: 1654813 - RNA, 19 nt, Artificial Sequence
  Description of Artificial Sequence: Synthetic oligonucleotide
cggauacucagauuuucua

SEQ ID NO: 1654814 - RNA, 19 nt, Artificial Sequence
  Description of Artificial Sequence: Synthetic oligonucleotide
cguagaaggggucucugcu

SEQ ID NO: 1654815 - RNA, 19 nt, Artificial Sequence
  Description of Artificial Sequence: Synthetic oligonucleotide
ggagaaagggccacagcuu

SEQ ID NO: 1654816 - RNA, 19 nt, Artificial Sequence
  Description of Artificial Sequence: Synthetic oligonucleotide
ccagggccaacccacacgu

SEQ ID NO: 1654817 - RNA, 19 nt, Artificial Sequence
  Description of Artificial Sequence: Synthetic oligonucleotide
ccuucacaccgaguuagga

SEQ ID NO: 1654818 - RNA, 19 nt, Artificial Sequence
  Description of Artificial Sequence: Synthetic oligonucleotide
gugugccaagacaccaccu

SEQ ID NO: 1654819 - RNA, 19 nt, Artificial Sequence
  Description of Artificial Sequence: Synthetic oligonucleotide
ccauggggugaccuccuca

SEQ ID NO: 1654820 - RNA, 19 nt, Artificial Sequence
  Description of Artificial Sequence: Synthetic oligonucleotide
cuguggcaugccaugccau

SEQ ID NO: 1654821 - RNA, 19 nt, Artificial Sequence
  Description of Artificial Sequence: Synthetic oligonucleotide
gccugcugcccugcugggg

SEQ ID NO: 1654822 - RNA, 19 nt, Artificial Sequence
  Description of Artificial Sequence: Synthetic oligonucleotide
agcgccucuuccaggucuu

SEQ ID NO: 1654823 - RNA, 19 nt, Artificial Sequence
  Description of Artificial Sequence: Synthetic oligonucleotide
guccaguuggggauacuuu

SEQ ID NO: 1654824 - RNA, 19 nt, Artificial Sequence
  Description of Artificial Sequence: Synthetic oligonucleotide
gugugcuguggcaugccau

SEQ ID NO: 1654825 - RNA, 19 nt, Artificial Sequence
  Description of Artificial Sequence: Synthetic oligonucleotide
cuucacccugccaccuccu

SEQ ID NO: 1654826 - RNA, 19 nt, Artificial Sequence
  Description of Artificial Sequence: Synthetic oligonucleotide
uccgcgcugcaagcaucuc

SEQ ID NO: 1654827 - RNA, 19 nt, Artificial Sequence
  Description of Artificial Sequence: Synthetic oligonucleotide
ccacacgugugcuguggca

SEQ ID NO: 1654828 - RNA, 19 nt, Artificial Sequence
  Description of Artificial Sequence: Synthetic oligonucleotide
agcccagugggaggcccau

SEQ ID NO: 1654829 - RNA, 19 nt, Artificial Sequence
  Description of Artificial Sequence: Synthetic oligonucleotide
ggcacgcccucagugucuc

SEQ ID NO: 1654830 - RNA, 19 nt, Artificial Sequence
  Description of Artificial Sequence: Synthetic oligonucleotide
gggauacuuuugaggcaga

SEQ ID NO: 1654831 - RNA, 19 nt, Artificial Sequence
  Description of Artificial Sequence: Synthetic oligonucleotide
caccauggggugaccuccu

SEQ ID NO: 1654832 - RNA, 19 nt, Artificial Sequence
  Description of Artificial Sequence: Synthetic oligonucleotide
gcagugggccugggugccg

SEQ ID NO: 1654833 - RNA, 19 nt, Artificial Sequence
  Description of Artificial Sequence: Synthetic oligonucleotide
cagugggccugggugccga

SEQ ID NO: 1654834 - RNA, 19 nt, Artificial Sequence
  Description of Artificial Sequence: Synthetic oligonucleotide
ggggcucuuuauccguggu

SEQ ID NO: 1654835 - RNA, 19 nt, Artificial Sequence
  Description of Artificial Sequence: Synthetic oligonucleotide
ccuggcacgcccucagugu

SEQ ID NO: 1654836 - RNA, 19 nt, Artificial Sequence
  Description of Artificial Sequence: Synthetic oligonucleotide
gggugaccuccucacaguu

SEQ ID NO: 1654837 - RNA, 19 nt, Artificial Sequence
  Description of Artificial Sequence: Synthetic oligonucleotide
ggcugugcccuggcacgcc

SEQ ID NO: 1654838 - RNA, 19 nt, Artificial Sequence
  Description of Artificial Sequence: Synthetic oligonucleotide
cgggagcugcccacacugc

SEQ ID NO: 1654839 - RNA, 19 nt, Artificial Sequence
  Description of Artificial Sequence: Synthetic oligonucleotide
gccaggcauggagcugucc

SEQ ID NO: 1654840 - RNA, 19 nt, Artificial Sequence
  Description of Artificial Sequence: Synthetic oligonucleotide
gcgcuucauggcucccuuc

SEQ ID NO: 1654841 - RNA, 19 nt, Artificial Sequence
  Description of Artificial Sequence: Synthetic oligonucleotide
ccucaccucacccuggcuu

SEQ ID NO: 1654842 - RNA, 19 nt, Artificial Sequence
  Description of Artificial Sequence: Synthetic oligonucleotide
gcgguacacagugugguuu

SEQ ID NO: 1654843 - RNA, 19 nt, Artificial Sequence
  Description of Artificial Sequence: Synthetic oligonucleotide
gggcgggagcugcccacac

SEQ ID NO: 1654844 - RNA, 19 nt, Artificial Sequence
  Description of Artificial Sequence: Synthetic oligonucleotide
gcccucagugucucuuugu

SEQ ID NO: 1654845 - RNA, 19 nt, Artificial Sequence
  Description of Artificial Sequence: Synthetic oligonucleotide
cgcgcugcaagcaucucgu

SEQ ID NO: 1654846 - RNA, 19 nt, Artificial Sequence
  Description of Artificial Sequence: Synthetic oligonucleotide
gcugcgcuucauggcuccc

SEQ ID NO: 1654847 - RNA, 19 nt, Artificial Sequence
  Description of Artificial Sequence: Synthetic oligonucleotide
cgcagugggccugggugcc

SEQ ID NO: 1654848 - RNA, 19 nt, Artificial Sequence
  Description of Artificial Sequence: Synthetic oligonucleotide
cgcccucagugucucuuug

SEQ ID NO: 1654849 - RNA, 19 nt, Artificial Sequence
  Description of Artificial Sequence: Synthetic oligonucleotide
cgugugcuguggcaugcca

SEQ ID NO: 1654850 - RNA, 19 nt, Artificial Sequence
  Description of Artificial Sequence: Synthetic oligonucleotide
cccaucccauaggcacugg

SEQ ID NO: 1654851 - RNA, 19 nt, Artificial Sequence
  Description of Artificial Sequence: Synthetic oligonucleotide
cacgcccucagugucucuu

SEQ ID NO: 1654852 - RNA, 19 nt, Artificial Sequence
  Description of Artificial Sequence: Synthetic oligonucleotide
gcacugggcgggagcugcc

SEQ ID NO: 1654853 - RNA, 19 nt, Artificial Sequence
  Description of Artificial Sequence: Synthetic oligonucleotide
cguggacuuuccacuuuaa

SEQ ID NO: 1654854 - RNA, 19 nt, Artificial Sequence
  Description of Artificial Sequence: Synthetic oligonucleotide
gccaacccacacgugugcu

SEQ ID NO: 1654855 - RNA, 19 nt, Artificial Sequence
  Description of Artificial Sequence: Synthetic oligonucleotide
cgcccaucagccucugucu

SEQ ID NO: 1654856 - RNA, 19 nt, Artificial Sequence
  Description of Artificial Sequence: Synthetic oligonucleotide
gcgcugcaagcaucucgua

SEQ ID NO: 1654857 - RNA, 19 nt, Artificial Sequence
  Description of Artificial Sequence: Synthetic oligonucleotide
ccauaggcacugggcggga

SEQ ID NO: 1654858 - RNA, 19 nt, Artificial Sequence
  Description of Artificial Sequence: Synthetic oligonucleotide
ccucucggauacucagauu

SEQ ID NO: 1654859 - RNA, 19 nt, Artificial Sequence
  Description of Artificial Sequence: Synthetic oligonucleotide
cugccuggacuggcacagu

SEQ ID NO: 1654860 - RNA, 19 nt, Artificial Sequence
  Description of Artificial Sequence: Synthetic oligonucleotide
gccgagggccaggcaugga

SEQ ID NO: 1654861 - RNA, 19 nt, Artificial Sequence
  Description of Artificial Sequence: Synthetic oligonucleotide
gccuggcuuuugccccucu

SEQ ID NO: 1654862 - RNA, 19 nt, Artificial Sequence
  Description of Artificial Sequence: Synthetic oligonucleotide
gcacgcccucagugucucu

SEQ ID NO: 1654863 - RNA, 19 nt, Artificial Sequence
  Description of Artificial Sequence: Synthetic oligonucleotide
cccugccaccuccuaguuu

SEQ ID NO: 1654864 - RNA, 19 nt, Artificial Sequence
  Description of Artificial Sequence: Synthetic oligonucleotide
aauucguccuuccugaucc

SEQ ID NO: 1654865 - RNA, 19 nt, Artificial Sequence
  Description of Artificial Sequence: Synthetic oligonucleotide
aaauuguccucacuuaccc

SEQ ID NO: 1654866 - RNA, 19 nt, Artificial Sequence
  Description of Artificial Sequence: Synthetic oligonucleotide
ugucaaggcaacaaaagcg

SEQ ID NO: 1654867 - RNA, 19 nt, Artificial Sequence
  Description of Artificial Sequence: Synthetic oligonucleotide
cuuacaaaacagaugagcg

SEQ ID NO: 1654868 - RNA, 19 nt, Artificial Sequence
  Description of Artificial Sequence: Synthetic oligonucleotide
ucaugaaaugccaagaugu

SEQ ID NO: 1654869 - RNA, 19 nt, Artificial Sequence
  Description of Artificial Sequence: Synthetic oligonucleotide
auuaucaaacaaucggagc

SEQ ID NO: 1654870 - RNA, 19 nt, Artificial Sequence
  Description of Artificial Sequence: Synthetic oligonucleotide
ugaagcuugagaaagcgcc

SEQ ID NO: 1654871 - RNA, 19 nt, Artificial Sequence
  Description of Artificial Sequence: Synthetic oligonucleotide
aagacauuaucaaacaauc

SEQ ID NO: 1654872 - RNA, 19 nt, Artificial Sequence
  Description of Artificial Sequence: Synthetic oligonucleotide
aucuauaaagugcuguagc

SEQ ID NO: 1654873 - RNA, 19 nt, Artificial Sequence
  Description of Artificial Sequence: Synthetic oligonucleotide
uaugagaguagcaacaacu

SEQ ID NO: 1654874 - RNA, 19 nt, Artificial Sequence
  Description of Artificial Sequence: Synthetic oligonucleotide
aaugggaaagucaagagug

SEQ ID NO: 1654875 - RNA, 19 nt, Artificial Sequence
  Description of Artificial Sequence: Synthetic oligonucleotide
aagaauuccaauucguccu

SEQ ID NO: 1654876 - RNA, 19 nt, Artificial Sequence
  Description of Artificial Sequence: Synthetic oligonucleotide
uuaaagaugggguauugcc

SEQ ID NO: 1654877 - RNA, 19 nt, Artificial Sequence
  Description of Artificial Sequence: Synthetic oligonucleotide
aaugagacucccuuucuuc

SEQ ID NO: 1654878 - RNA, 19 nt, Artificial Sequence
  Description of Artificial Sequence: Synthetic oligonucleotide
ucuguuuauguaaagcuug

SEQ ID NO: 1654879 - RNA, 19 nt, Artificial Sequence
  Description of Artificial Sequence: Synthetic oligonucleotide
ugauaguccacaauaaacu

SEQ ID NO: 1654880 - RNA, 19 nt, Artificial Sequence
  Description of Artificial Sequence: Synthetic oligonucleotide
agauccuucucauaaaguc

SEQ ID NO: 1654881 - RNA, 19 nt, Artificial Sequence
  Description of Artificial Sequence: Synthetic oligonucleotide
caccaauugauuaugagag

SEQ ID NO: 1654882 - RNA, 19 nt, Artificial Sequence
  Description of Artificial Sequence: Synthetic oligonucleotide
ucaagaguggaagauacgg

SEQ ID NO: 1654883 - RNA, 19 nt, Artificial Sequence
  Description of Artificial Sequence: Synthetic oligonucleotide
aagaguggaagauacggug

SEQ ID NO: 1654884 - RNA, 19 nt, Artificial Sequence
  Description of Artificial Sequence: Synthetic oligonucleotide
uuacaaaacagaugagcgg

SEQ ID NO: 1654885 - RNA, 19 nt, Artificial Sequence
  Description of Artificial Sequence: Synthetic oligonucleotide
uagggaaguacucaaacca

SEQ ID NO: 1654886 - RNA, 19 nt, Artificial Sequence
  Description of Artificial Sequence: Synthetic oligonucleotide
agugagcuaacgcagagag

SEQ ID NO: 1654887 - RNA, 19 nt, Artificial Sequence
  Description of Artificial Sequence: Synthetic oligonucleotide
aagaauauugauggguggg

SEQ ID NO: 1654888 - RNA, 19 nt, Artificial Sequence
  Description of Artificial Sequence: Synthetic oligonucleotide
caacuuacaaaacagauga

SEQ ID NO: 1654889 - RNA, 19 nt, Artificial Sequence
  Description of Artificial Sequence: Synthetic oligonucleotide
ucucaagaauuccaauucg

SEQ ID NO: 1654890 - RNA, 19 nt, Artificial Sequence
  Description of Artificial Sequence: Synthetic oligonucleotide
aagaucgcagaccagugag

SEQ ID NO: 1654891 - RNA, 19 nt, Artificial Sequence
  Description of Artificial Sequence: Synthetic oligonucleotide
aaaugggaaagucaagagu

SEQ ID NO: 1654892 - RNA, 19 nt, Artificial Sequence
  Description of Artificial Sequence: Synthetic oligonucleotide
aaagcgaagacauuaucaa

SEQ ID NO: 1654893 - RNA, 19 nt, Artificial Sequence
  Description of Artificial Sequence: Synthetic oligonucleotide
uccaccaucgcauuuaaga

SEQ ID NO: 1654894 - RNA, 19 nt, Artificial Sequence
  Description of Artificial Sequence: Synthetic oligonucleotide
aacauguguucuucaaggg

SEQ ID NO: 1654895 - RNA, 19 nt, Artificial Sequence
  Description of Artificial Sequence: Synthetic oligonucleotide
uaagauccuucucauaaag

SEQ ID NO: 1654896 - RNA, 19 nt, Artificial Sequence
  Description of Artificial Sequence: Synthetic oligonucleotide
aguaagauccuucucauaa

SEQ ID NO: 1654897 - RNA, 19 nt, Artificial Sequence
  Description of Artificial Sequence: Synthetic oligonucleotide
acauguguucuucaagggc

SEQ ID NO: 1654898 - RNA, 19 nt, Artificial Sequence
  Description of Artificial Sequence: Synthetic oligonucleotide
aagacuugcauuucuuucu

SEQ ID NO: 1654899 - RNA, 19 nt, Artificial Sequence
  Description of Artificial Sequence: Synthetic oligonucleotide
uggaauaacuucacaaaug

SEQ ID NO: 1654900 - RNA, 19 nt, Artificial Sequence
  Description of Artificial Sequence: Synthetic oligonucleotide
uaaagaugggguauugccc

SEQ ID NO: 1654901 - RNA, 19 nt, Artificial Sequence
  Description of Artificial Sequence: Synthetic oligonucleotide
ucagcuuuugccaaauugu

SEQ ID NO: 1654902 - RNA, 19 nt, Artificial Sequence
  Description of Artificial Sequence: Synthetic oligonucleotide
caagauguuuucuaucgcg

SEQ ID NO: 1654903 - RNA, 19 nt, Artificial Sequence
  Description of Artificial Sequence: Synthetic oligonucleotide
uauaaagugcuguagcagu

SEQ ID NO: 1654904 - RNA, 19 nt, Artificial Sequence
  Description of Artificial Sequence: Synthetic oligonucleotide
cacaguuucaaggagaggc

SEQ ID NO: 1654905 - RNA, 19 nt, Artificial Sequence
  Description of Artificial Sequence: Synthetic oligonucleotide
auuuucaacugucugccuc

SEQ ID NO: 1654906 - RNA, 19 nt, Artificial Sequence
  Description of Artificial Sequence: Synthetic oligonucleotide
cuuucucucaaucucgucc

SEQ ID NO: 1654907 - RNA, 19 nt, Artificial Sequence
  Description of Artificial Sequence: Synthetic oligonucleotide
cauuaucaaacaaucggag

SEQ ID NO: 1654908 - RNA, 19 nt, Artificial Sequence
  Description of Artificial Sequence: Synthetic oligonucleotide
ucuugcugaagcuugagaa

SEQ ID NO: 1654909 - RNA, 19 nt, Artificial Sequence
  Description of Artificial Sequence: Synthetic oligonucleotide
cugauaguccacaauaaac

SEQ ID NO: 1654910 - RNA, 19 nt, Artificial Sequence
  Description of Artificial Sequence: Synthetic oligonucleotide
uuccuugucaugaaaugcc

SEQ ID NO: 1654911 - RNA, 19 nt, Artificial Sequence
  Description of Artificial Sequence: Synthetic oligonucleotide
agcgaagacauuaucaaac

SEQ ID NO: 1654912 - RNA, 19 nt, Artificial Sequence
  Description of Artificial Sequence: Synthetic oligonucleotide
uacaaaacagaugagcgga

SEQ ID NO: 1654913 - RNA, 19 nt, Artificial Sequence
  Description of Artificial Sequence: Synthetic oligonucleotide
gcggcaagaauauugaugg

SEQ ID NO: 1654914 - RNA, 19 nt, Artificial Sequence
  Description of Artificial Sequence: Synthetic oligonucleotide
aauguugacaccaauugau

SEQ ID NO: 1654915 - RNA, 19 nt, Artificial Sequence
  Description of Artificial Sequence: Synthetic oligonucleotide
agcacuuucuguuaggcgu

SEQ ID NO: 1654916 - RNA, 19 nt, Artificial Sequence
  Description of Artificial Sequence: Synthetic oligonucleotide
uaucgcggcaagaauauug

SEQ ID NO: 1654917 - RNA, 19 nt, Artificial Sequence
  Description of Artificial Sequence: Synthetic oligonucleotide
aacaaaagcgaagacauua

SEQ ID NO: 1654918 - RNA, 19 nt, Artificial Sequence
  Description of Artificial Sequence: Synthetic oligonucleotide
uacggugugucacugaaga

SEQ ID NO: 1654919 - RNA, 19 nt, Artificial Sequence
  Description of Artificial Sequence: Synthetic oligonucleotide
uguaucuuucucucaaucu

SEQ ID NO: 1654920 - RNA, 19 nt, Artificial Sequence
  Description of Artificial Sequence: Synthetic oligonucleotide
cuacuuucugccuaugggc

SEQ ID NO: 1654921 - RNA, 19 nt, Artificial Sequence
  Description of Artificial Sequence: Synthetic oligonucleotide
aagauguuuucuaucgcgg

SEQ ID NO: 1654922 - RNA, 19 nt, Artificial Sequence
  Description of Artificial Sequence: Synthetic oligonucleotide
ugcaacagaguccugauuu

SEQ ID NO: 1654923 - RNA, 19 nt, Artificial Sequence
  Description of Artificial Sequence: Synthetic oligonucleotide
gagaguggcgacuucuugg

SEQ ID NO: 1654924 - RNA, 19 nt, Artificial Sequence
  Description of Artificial Sequence: Synthetic oligonucleotide
acaccaauugauuaugaga

SEQ ID NO: 1654925 - RNA, 19 nt, Artificial Sequence
  Description of Artificial Sequence: Synthetic oligonucleotide
uucgcugcgcugcaggucg

SEQ ID NO: 1654926 - RNA, 19 nt, Artificial Sequence
  Description of Artificial Sequence: Synthetic oligonucleotide
aacaacuuacaaaacagau

SEQ ID NO: 1654927 - RNA, 19 nt, Artificial Sequence
  Description of Artificial Sequence: Synthetic oligonucleotide
cacaauaaacuuuggguac

SEQ ID NO: 1654928 - RNA, 19 nt, Artificial Sequence
  Description of Artificial Sequence: Synthetic oligonucleotide
uugauuaugagaguagcaa

SEQ ID NO: 1654929 - RNA, 19 nt, Artificial Sequence
  Description of Artificial Sequence: Synthetic oligonucleotide
ucaagaauuccaauucguc

SEQ ID NO: 1654930 - RNA, 19 nt, Artificial Sequence
  Description of Artificial Sequence: Synthetic oligonucleotide
cacaucccgaucuauaaag

SEQ ID NO: 1654931 - RNA, 19 nt, Artificial Sequence
  Description of Artificial Sequence: Synthetic oligonucleotide
agucaagaguggaagauac

SEQ ID NO: 1654932 - RNA, 19 nt, Artificial Sequence
  Description of Artificial Sequence: Synthetic oligonucleotide
aaguacucaaaccaauguu

SEQ ID NO: 1654933 - RNA, 19 nt, Artificial Sequence
  Description of Artificial Sequence: Synthetic oligonucleotide
aucccgaucuauaaagugc

SEQ ID NO: 1654934 - RNA, 19 nt, Artificial Sequence
  Description of Artificial Sequence: Synthetic oligonucleotide
caagaauauugaugggugg

SEQ ID NO: 1654935 - RNA, 19 nt, Artificial Sequence
  Description of Artificial Sequence: Synthetic oligonucleotide
aguggcgacuucuugguag

SEQ ID NO: 1654936 - RNA, 19 nt, Artificial Sequence
  Description of Artificial Sequence: Synthetic oligonucleotide
caauugauuaugagaguag

SEQ ID NO: 1654937 - RNA, 19 nt, Artificial Sequence
  Description of Artificial Sequence: Synthetic oligonucleotide
caaaugggaaagucaagag

SEQ ID NO: 1654938 - RNA, 19 nt, Artificial Sequence
  Description of Artificial Sequence: Synthetic oligonucleotide
auuuaagacuugcauuucu

SEQ ID NO: 1654939 - RNA, 19 nt, Artificial Sequence
  Description of Artificial Sequence: Synthetic oligonucleotide
acaaaugggaaagucaaga

SEQ ID NO: 1654940 - RNA, 19 nt, Artificial Sequence
  Description of Artificial Sequence: Synthetic oligonucleotide
gauuaugagaguagcaaca

SEQ ID NO: 1654941 - RNA, 19 nt, Artificial Sequence
  Description of Artificial Sequence: Synthetic oligonucleotide
caaauuguccucacuuacc

SEQ ID NO: 1654942 - RNA, 19 nt, Artificial Sequence
  Description of Artificial Sequence: Synthetic oligonucleotide
aauauugauggguggguua

SEQ ID NO: 1654943 - RNA, 19 nt, Artificial Sequence
  Description of Artificial Sequence: Synthetic oligonucleotide
uugcugaagcuugagaaag

SEQ ID NO: 1654944 - RNA, 19 nt, Artificial Sequence
  Description of Artificial Sequence: Synthetic oligonucleotide
agaccagugagcuaacgca

SEQ ID NO: 1654945 - RNA, 19 nt, Artificial Sequence
  Description of Artificial Sequence: Synthetic oligonucleotide
uacuuucugccuaugggca

SEQ ID NO: 1654946 - RNA, 19 nt, Artificial Sequence
  Description of Artificial Sequence: Synthetic oligonucleotide
ugauggguggguuagggaa

SEQ ID NO: 1654947 - RNA, 19 nt, Artificial Sequence
  Description of Artificial Sequence: Synthetic oligonucleotide
uucugacugcaaaugagac

SEQ ID NO: 1654948 - RNA, 19 nt, Artificial Sequence
  Description of Artificial Sequence: Synthetic oligonucleotide
uguaucucucauuuguauc

SEQ ID NO: 1654949 - RNA, 19 nt, Artificial Sequence
  Description of Artificial Sequence: Synthetic oligonucleotide
gaucuauaaagugcuguag

SEQ ID NO: 1654950 - RNA, 19 nt, Artificial Sequence
  Description of Artificial Sequence: Synthetic oligonucleotide
ugggguauugcccuuuugu

SEQ ID NO: 1654951 - RNA, 19 nt, Artificial Sequence
  Description of Artificial Sequence: Synthetic oligonucleotide
guaucuuucucucaaucuc

SEQ ID NO: 1654952 - RNA, 19 nt, Artificial Sequence
  Description of Artificial Sequence: Synthetic oligonucleotide
ucggauuuccuuugcaaca

SEQ ID NO: 1654953 - RNA, 19 nt, Artificial Sequence
  Description of Artificial Sequence: Synthetic oligonucleotide
auaaacuuuggguacugau

SEQ ID NO: 1654954 - RNA, 19 nt, Artificial Sequence
  Description of Artificial Sequence: Synthetic oligonucleotide
uuuucuaucgcggcaagaa

SEQ ID NO: 1654955 - RNA, 19 nt, Artificial Sequence
  Description of Artificial Sequence: Synthetic oligonucleotide
aguccugauuuccaguaag

SEQ ID NO: 1654956 - RNA, 19 nt, Artificial Sequence
  Description of Artificial Sequence: Synthetic oligonucleotide
uucggauuuccuuugcaac

SEQ ID NO: 1654957 - RNA, 19 nt, Artificial Sequence
  Description of Artificial Sequence: Synthetic oligonucleotide
ucccgaucuauaaagugcu

SEQ ID NO: 1654958 - RNA, 19 nt, Artificial Sequence
  Description of Artificial Sequence: Synthetic oligonucleotide
uucuaucgcggcaagaaua

SEQ ID NO: 1654959 - RNA, 19 nt, Artificial Sequence
  Description of Artificial Sequence: Synthetic oligonucleotide
ugaagaucgcagaccagug

SEQ ID NO: 1654960 - RNA, 19 nt, Artificial Sequence
  Description of Artificial Sequence: Synthetic oligonucleotide
ucucucaagaauuccaauu

SEQ ID NO: 1654961 - RNA, 19 nt, Artificial Sequence
  Description of Artificial Sequence: Synthetic oligonucleotide
cauuucacguugaucuugc

SEQ ID NO: 1654962 - RNA, 19 nt, Artificial Sequence
  Description of Artificial Sequence: Synthetic oligonucleotide
acugauuaaagauggggua

SEQ ID NO: 1654963 - RNA, 19 nt, Artificial Sequence
  Description of Artificial Sequence: Synthetic oligonucleotide
ugucaugaaaugccaagau

SEQ ID NO: 1654964 - RNA, 19 nt, Artificial Sequence
  Description of Artificial Sequence: Synthetic oligonucleotide
agcucuacggagcagcucu

SEQ ID NO: 1654965 - RNA, 19 nt, Artificial Sequence
  Description of Artificial Sequence: Synthetic oligonucleotide
uucaagggcuacuuucugc

SEQ ID NO: 1654966 - RNA, 19 nt, Artificial Sequence
  Description of Artificial Sequence: Synthetic oligonucleotide
uuguaucuuucucucaauc

SEQ ID NO: 1654967 - RNA, 19 nt, Artificial Sequence
  Description of Artificial Sequence: Synthetic oligonucleotide
uuuaagacuugcauuucuu

SEQ ID NO: 1654968 - RNA, 19 nt, Artificial Sequence
  Description of Artificial Sequence: Synthetic oligonucleotide
ucgcauuuaagacuugcau

SEQ ID NO: 1654969 - RNA, 19 nt, Artificial Sequence
  Description of Artificial Sequence: Synthetic oligonucleotide
acaacuuacaaaacagaug

SEQ ID NO: 1654970 - RNA, 19 nt, Artificial Sequence
  Description of Artificial Sequence: Synthetic oligonucleotide
agcaucuuuucggauuucc

SEQ ID NO: 1654971 - RNA, 19 nt, Artificial Sequence
  Description of Artificial Sequence: Synthetic oligonucleotide
ucaacugucugccucucuc

SEQ ID NO: 1654972 - RNA, 19 nt, Artificial Sequence
  Description of Artificial Sequence: Synthetic oligonucleotide
uguugacaccaauugauua

SEQ ID NO: 1654973 - RNA, 19 nt, Artificial Sequence
  Description of Artificial Sequence: Synthetic oligonucleotide
ucuaucgcggcaagaauau

SEQ ID NO: 1654974 - RNA, 19 nt, Artificial Sequence
  Description of Artificial Sequence: Synthetic oligonucleotide
agacauuaucaaacaaucg

SEQ ID NO: 1654975 - RNA, 19 nt, Artificial Sequence
  Description of Artificial Sequence: Synthetic oligonucleotide
agcucuuguuucugguacc

SEQ ID NO: 1654976 - RNA, 19 nt, Artificial Sequence
  Description of Artificial Sequence: Synthetic oligonucleotide
ggugugucacugaagaucg

SEQ ID NO: 1654977 - RNA, 19 nt, Artificial Sequence
  Description of Artificial Sequence: Synthetic oligonucleotide
agcuugagaaagcgccucc

SEQ ID NO: 1654978 - RNA, 19 nt, Artificial Sequence
  Description of Artificial Sequence: Synthetic oligonucleotide
uuaugagaguagcaacaac

SEQ ID NO: 1654979 - RNA, 19 nt, Artificial Sequence
  Description of Artificial Sequence: Synthetic oligonucleotide
gcuacuuucugccuauggg

SEQ ID NO: 1654980 - RNA, 19 nt, Artificial Sequence
  Description of Artificial Sequence: Synthetic oligonucleotide
gauguuuucuaucgcggca

SEQ ID NO: 1654981 - RNA, 19 nt, Artificial Sequence
  Description of Artificial Sequence: Synthetic oligonucleotide
auauugauggguggguuag

SEQ ID NO: 1654982 - RNA, 19 nt, Artificial Sequence
  Description of Artificial Sequence: Synthetic oligonucleotide
ucuugguagcuuucgcugc

SEQ ID NO: 1654983 - RNA, 19 nt, Artificial Sequence
  Description of Artificial Sequence: Synthetic oligonucleotide
ucacuuacccucugcgucc

SEQ ID NO: 1654984 - RNA, 19 nt, Artificial Sequence
  Description of Artificial Sequence: Synthetic oligonucleotide
aauuguccucacuuacccu

SEQ ID NO: 1654985 - RNA, 19 nt, Artificial Sequence
  Description of Artificial Sequence: Synthetic oligonucleotide
ucaaucucguccuccaguc

SEQ ID NO: 1654986 - RNA, 19 nt, Artificial Sequence
  Description of Artificial Sequence: Synthetic oligonucleotide
cagcugggaagucacaucc

SEQ ID NO: 1654987 - RNA, 19 nt, Artificial Sequence
  Description of Artificial Sequence: Synthetic oligonucleotide
aaucggagccacuccucuc

SEQ ID NO: 1654988 - RNA, 19 nt, Artificial Sequence
  Description of Artificial Sequence: Synthetic oligonucleotide
aaacagaugagcggauugu

SEQ ID NO: 1654989 - RNA, 19 nt, Artificial Sequence
  Description of Artificial Sequence: Synthetic oligonucleotide
aaggagaggccaggcauac

SEQ ID NO: 1654990 - RNA, 19 nt, Artificial Sequence
  Description of Artificial Sequence: Synthetic oligonucleotide
aaaugagacucccuuucuu

SEQ ID NO: 1654991 - RNA, 19 nt, Artificial Sequence
  Description of Artificial Sequence: Synthetic oligonucleotide
uguagcaguuccuugucau

SEQ ID NO: 1654992 - RNA, 19 nt, Artificial Sequence
  Description of Artificial Sequence: Synthetic oligonucleotide
agcuugcauauuuucaacu

SEQ ID NO: 1654993 - RNA, 19 nt, Artificial Sequence
  Description of Artificial Sequence: Synthetic oligonucleotide
cuguaagcgcauuuccugc

SEQ ID NO: 1654994 - RNA, 19 nt, Artificial Sequence
  Description of Artificial Sequence: Synthetic oligonucleotide
uugacaccaauugauuaug

SEQ ID NO: 1654995 - RNA, 19 nt, Artificial Sequence
  Description of Artificial Sequence: Synthetic oligonucleotide
aagcgaagacauuaucaaa

SEQ ID NO: 1654996 - RNA, 19 nt, Artificial Sequence
  Description of Artificial Sequence: Synthetic oligonucleotide
ggguacugauuaaagaugg

SEQ ID NO: 1654997 - RNA, 19 nt, Artificial Sequence
  Description of Artificial Sequence: Synthetic oligonucleotide
uuguaucucucauuuguau

SEQ ID NO: 1654998 - RNA, 19 nt, Artificial Sequence
  Description of Artificial Sequence: Synthetic oligonucleotide
ucugguaccaagccucauc

SEQ ID NO: 1654999 - RNA, 19 nt, Artificial Sequence
  Description of Artificial Sequence: Synthetic oligonucleotide
guagcuuucgcugcgcugc

SEQ ID NO: 1655000 - RNA, 19 nt, Artificial Sequence
  Description of Artificial Sequence: Synthetic oligonucleotide
uguaagcgcauuuccugca

SEQ ID NO: 1655001 - RNA, 19 nt, Artificial Sequence
  Description of Artificial Sequence: Synthetic oligonucleotide
ugugucacugaagaucgca

SEQ ID NO: 1655002 - RNA, 19 nt, Artificial Sequence
  Description of Artificial Sequence: Synthetic oligonucleotide
uccuguaagcgcauuuccu

SEQ ID NO: 1655003 - RNA, 19 nt, Artificial Sequence
  Description of Artificial Sequence: Synthetic oligonucleotide
cucacuuacccucugcguc

SEQ ID NO: 1655004 - RNA, 19 nt, Artificial Sequence
  Description of Artificial Sequence: Synthetic oligonucleotide
gauuaaagaugggguauug

SEQ ID NO: 1655005 - RNA, 19 nt, Artificial Sequence
  Description of Artificial Sequence: Synthetic oligonucleotide
cuuucuguuaggcgucugc

SEQ ID NO: 1655006 - RNA, 19 nt, Artificial Sequence
  Description of Artificial Sequence: Synthetic oligonucleotide
caucccgaucuauaaagug

SEQ ID NO: 1655007 - RNA, 19 nt, Artificial Sequence
  Description of Artificial Sequence: Synthetic oligonucleotide
uguuuucuaucgcggcaag

SEQ ID NO: 1655008 - RNA, 19 nt, Artificial Sequence
  Description of Artificial Sequence: Synthetic oligonucleotide
aagcgcauuuccugcaccu

SEQ ID NO: 1655009 - RNA, 19 nt, Artificial Sequence
  Description of Artificial Sequence: Synthetic oligonucleotide
gaaguacucaaaccaaugu

SEQ ID NO: 1655010 - RNA, 19 nt, Artificial Sequence
  Description of Artificial Sequence: Synthetic oligonucleotide
ucgucuccuagcuuuaaaa

SEQ ID NO: 1655011 - RNA, 19 nt, Artificial Sequence
  Description of Artificial Sequence: Synthetic oligonucleotide
uauugcccuuuugucaagg

SEQ ID NO: 1655012 - RNA, 19 nt, Artificial Sequence
  Description of Artificial Sequence: Synthetic oligonucleotide
cagaccagugagcuaacgc

SEQ ID NO: 1655013 - RNA, 19 nt, Artificial Sequence
  Description of Artificial Sequence: Synthetic oligonucleotide
uaagcgcauuuccugcacc

SEQ ID NO: 1655014 - RNA, 19 nt, Artificial Sequence
  Description of Artificial Sequence: Synthetic oligonucleotide
ugcugaagcuugagaaagc

SEQ ID NO: 1655015 - RNA, 19 nt, Artificial Sequence
  Description of Artificial Sequence: Synthetic oligonucleotide
uuucuguuaggcgucugca

SEQ ID NO: 1655016 - RNA, 19 nt, Artificial Sequence
  Description of Artificial Sequence: Synthetic oligonucleotide
cugaagcuugagaaagcgc

SEQ ID NO: 1655017 - RNA, 19 nt, Artificial Sequence
  Description of Artificial Sequence: Synthetic oligonucleotide
auugauuaugagaguagca

SEQ ID NO: 1655018 - RNA, 19 nt, Artificial Sequence
  Description of Artificial Sequence: Synthetic oligonucleotide
aacuuacaaaacagaugag

SEQ ID NO: 1655019 - RNA, 19 nt, Artificial Sequence
  Description of Artificial Sequence: Synthetic oligonucleotide
ugagacucccuuucuucug

SEQ ID NO: 1655020 - RNA, 19 nt, Artificial Sequence
  Description of Artificial Sequence: Synthetic oligonucleotide
agaguggcgacuucuuggu

SEQ ID NO: 1655021 - RNA, 19 nt, Artificial Sequence
  Description of Artificial Sequence: Synthetic oligonucleotide
ucuacggagcagcucuugu

SEQ ID NO: 1655022 - RNA, 19 nt, Artificial Sequence
  Description of Artificial Sequence: Synthetic oligonucleotide
acaauaaacuuuggguacu

SEQ ID NO: 1655023 - RNA, 19 nt, Artificial Sequence
  Description of Artificial Sequence: Synthetic oligonucleotide
uuucuaucgcggcaagaau

SEQ ID NO: 1655024 - RNA, 19 nt, Artificial Sequence
  Description of Artificial Sequence: Synthetic oligonucleotide
cuucacggcggcuagccug

SEQ ID NO: 1655025 - RNA, 19 nt, Artificial Sequence
  Description of Artificial Sequence: Synthetic oligonucleotide
uuugccaaauuguccucac

SEQ ID NO: 1655026 - RNA, 19 nt, Artificial Sequence
  Description of Artificial Sequence: Synthetic oligonucleotide
aggcaacaaaagcgaagac

SEQ ID NO: 1655027 - RNA, 19 nt, Artificial Sequence
  Description of Artificial Sequence: Synthetic oligonucleotide
gucagcacuucugagaaca

SEQ ID NO: 1655028 - RNA, 19 nt, Artificial Sequence
  Description of Artificial Sequence: Synthetic oligonucleotide
aagauacggugugucacug

SEQ ID NO: 1655029 - RNA, 19 nt, Artificial Sequence
  Description of Artificial Sequence: Synthetic oligonucleotide
caaaagcgaagacauuauc

SEQ ID NO: 1655030 - RNA, 19 nt, Artificial Sequence
  Description of Artificial Sequence: Synthetic oligonucleotide
ucuuccggaggagaguggc

SEQ ID NO: 1655031 - RNA, 19 nt, Artificial Sequence
  Description of Artificial Sequence: Synthetic oligonucleotide
aacgcagagaggguucucu

SEQ ID NO: 1655032 - RNA, 19 nt, Artificial Sequence
  Description of Artificial Sequence: Synthetic oligonucleotide
uggguuagggaaguacuca

SEQ ID NO: 1655033 - RNA, 19 nt, Artificial Sequence
  Description of Artificial Sequence: Synthetic oligonucleotide
ugggaagucacaucccgau

SEQ ID NO: 1655034 - RNA, 19 nt, Artificial Sequence
  Description of Artificial Sequence: Synthetic oligonucleotide
cuguuaggcgucugcacag

SEQ ID NO: 1655035 - RNA, 19 nt, Artificial Sequence
  Description of Artificial Sequence: Synthetic oligonucleotide
agaguccugauuuccagua

SEQ ID NO: 1655036 - RNA, 19 nt, Artificial Sequence
  Description of Artificial Sequence: Synthetic oligonucleotide
ucgcagaccagugagcuaa

SEQ ID NO: 1655037 - RNA, 19 nt, Artificial Sequence
  Description of Artificial Sequence: Synthetic oligonucleotide
acggcggcuagccuguguc

SEQ ID NO: 1655038 - RNA, 19 nt, Artificial Sequence
  Description of Artificial Sequence: Synthetic oligonucleotide
gauggguggguuagggaag

SEQ ID NO: 1655039 - RNA, 19 nt, Artificial Sequence
  Description of Artificial Sequence: Synthetic oligonucleotide
cagcuuuugccaaauuguc

SEQ ID NO: 1655040 - RNA, 19 nt, Artificial Sequence
  Description of Artificial Sequence: Synthetic oligonucleotide
uucuguuaggcgucugcac

SEQ ID NO: 1655041 - RNA, 19 nt, Artificial Sequence
  Description of Artificial Sequence: Synthetic oligonucleotide
cagcucuuguuucugguac

SEQ ID NO: 1655042 - RNA, 19 nt, Artificial Sequence
  Description of Artificial Sequence: Synthetic oligonucleotide
aacuuuggguacugauuaa

SEQ ID NO: 1655043 - RNA, 19 nt, Artificial Sequence
  Description of Artificial Sequence: Synthetic oligonucleotide
aagggcuacuuucugccua

SEQ ID NO: 1655044 - RNA, 19 nt, Artificial Sequence
  Description of Artificial Sequence: Synthetic oligonucleotide
gcaagaauauugaugggug

SEQ ID NO: 1655045 - RNA, 19 nt, Artificial Sequence
  Description of Artificial Sequence: Synthetic oligonucleotide
caucgcauuuaagacuugc

SEQ ID NO: 1655046 - RNA, 19 nt, Artificial Sequence
  Description of Artificial Sequence: Synthetic oligonucleotide
cacugaagaucgcagacca

SEQ ID NO: 1655047 - RNA, 19 nt, Artificial Sequence
  Description of Artificial Sequence: Synthetic oligonucleotide
accaauugauuaugagagu

SEQ ID NO: 1655048 - RNA, 19 nt, Artificial Sequence
  Description of Artificial Sequence: Synthetic oligonucleotide
gaagaucgcagaccaguga

SEQ ID NO: 1655049 - RNA, 19 nt, Artificial Sequence
  Description of Artificial Sequence: Synthetic oligonucleotide
cucagcucuacggagcagc

SEQ ID NO: 1655050 - RNA, 19 nt, Artificial Sequence
  Description of Artificial Sequence: Synthetic oligonucleotide
aucggagccacuccucucu

SEQ ID NO: 1655051 - RNA, 19 nt, Artificial Sequence
  Description of Artificial Sequence: Synthetic oligonucleotide
ugccucucucucaagaauu

SEQ ID NO: 1655052 - RNA, 19 nt, Artificial Sequence
  Description of Artificial Sequence: Synthetic oligonucleotide
cuuuucggauuuccuuugc

SEQ ID NO: 1655053 - RNA, 19 nt, Artificial Sequence
  Description of Artificial Sequence: Synthetic oligonucleotide
ggucuccucagcucuacgg

SEQ ID NO: 1655054 - RNA, 19 nt, Artificial Sequence
  Description of Artificial Sequence: Synthetic oligonucleotide
caacagaguccugauuucc

SEQ ID NO: 1655055 - RNA, 19 nt, Artificial Sequence
  Description of Artificial Sequence: Synthetic oligonucleotide
caauguugacaccaauuga

SEQ ID NO: 1655056 - RNA, 19 nt, Artificial Sequence
  Description of Artificial Sequence: Synthetic oligonucleotide
gauaguccacaauaaacuu

SEQ ID NO: 1655057 - RNA, 19 nt, Artificial Sequence
  Description of Artificial Sequence: Synthetic oligonucleotide
cuuagccugcuccuccacc

SEQ ID NO: 1655058 - RNA, 19 nt, Artificial Sequence
  Description of Artificial Sequence: Synthetic oligonucleotide
cauucaggcaggcuugcuc

SEQ ID NO: 1655059 - RNA, 19 nt, Artificial Sequence
  Description of Artificial Sequence: Synthetic oligonucleotide
agaucgcagaccagugagc

SEQ ID NO: 1655060 - RNA, 19 nt, Artificial Sequence
  Description of Artificial Sequence: Synthetic oligonucleotide
uguuaggcgucugcacagg

SEQ ID NO: 1655061 - RNA, 19 nt, Artificial Sequence
  Description of Artificial Sequence: Synthetic oligonucleotide
ugcaaaugagacucccuuu

SEQ ID NO: 1655062 - RNA, 19 nt, Artificial Sequence
  Description of Artificial Sequence: Synthetic oligonucleotide
aagucaagaguggaagaua

SEQ ID NO: 1655063 - RNA, 19 nt, Artificial Sequence
  Description of Artificial Sequence: Synthetic oligonucleotide
agcggauuguucuggaaua

SEQ ID NO: 1655064 - RNA, 19 nt, Artificial Sequence
  Description of Artificial Sequence: Synthetic oligonucleotide
auucaagcuccagaugucu

SEQ ID NO: 1655065 - RNA, 19 nt, Artificial Sequence
  Description of Artificial Sequence: Synthetic oligonucleotide
guacucaaaccaauguuga

SEQ ID NO: 1655066 - RNA, 19 nt, Artificial Sequence
  Description of Artificial Sequence: Synthetic oligonucleotide
gcaaaugagacucccuuuc

SEQ ID NO: 1655067 - RNA, 19 nt, Artificial Sequence
  Description of Artificial Sequence: Synthetic oligonucleotide
gguauugcccuuuugucaa

SEQ ID NO: 1655068 - RNA, 19 nt, Artificial Sequence
  Description of Artificial Sequence: Synthetic oligonucleotide
ugauccuuucccguuccug

SEQ ID NO: 1655069 - RNA, 19 nt, Artificial Sequence
  Description of Artificial Sequence: Synthetic oligonucleotide
cauuuccugcaccuucagc

SEQ ID NO: 1655070 - RNA, 19 nt, Artificial Sequence
  Description of Artificial Sequence: Synthetic oligonucleotide
cuccucagcucuacggagc

SEQ ID NO: 1655071 - RNA, 19 nt, Artificial Sequence
  Description of Artificial Sequence: Synthetic oligonucleotide
uguuuauguaaagcuugaa

SEQ ID NO: 1655072 - RNA, 19 nt, Artificial Sequence
  Description of Artificial Sequence: Synthetic oligonucleotide
ugauuaaagaugggguauu

SEQ ID NO: 1655073 - RNA, 19 nt, Artificial Sequence
  Description of Artificial Sequence: Synthetic oligonucleotide
aggcauacagcugggaagu

SEQ ID NO: 1655074 - RNA, 19 nt, Artificial Sequence
  Description of Artificial Sequence: Synthetic oligonucleotide
cuguuuauguaaagcuuga

SEQ ID NO: 1655075 - RNA, 19 nt, Artificial Sequence
  Description of Artificial Sequence: Synthetic oligonucleotide
uaaagugcuguagcaguuc

SEQ ID NO: 1655076 - RNA, 19 nt, Artificial Sequence
  Description of Artificial Sequence: Synthetic oligonucleotide
ggcagcauccuguaagcgc

SEQ ID NO: 1655077 - RNA, 19 nt, Artificial Sequence
  Description of Artificial Sequence: Synthetic oligonucleotide
uucacggcggcuagccugu

SEQ ID NO: 1655078 - RNA, 19 nt, Artificial Sequence
  Description of Artificial Sequence: Synthetic oligonucleotide
cagcuugcauauuuucaac

SEQ ID NO: 1655079 - RNA, 19 nt, Artificial Sequence
  Description of Artificial Sequence: Synthetic oligonucleotide
gugauucaagcuccagaug

SEQ ID NO: 1655080 - RNA, 19 nt, Artificial Sequence
  Description of Artificial Sequence: Synthetic oligonucleotide
uccugauuuccaguaagau

SEQ ID NO: 1655081 - RNA, 19 nt, Artificial Sequence
  Description of Artificial Sequence: Synthetic oligonucleotide
aguuucaaggagaggccag

SEQ ID NO: 1655082 - RNA, 19 nt, Artificial Sequence
  Description of Artificial Sequence: Synthetic oligonucleotide
ggaaguacucaaaccaaug

SEQ ID NO: 1655083 - RNA, 19 nt, Artificial Sequence
  Description of Artificial Sequence: Synthetic oligonucleotide
guugacaccaauugauuau

SEQ ID NO: 1655084 - RNA, 19 nt, Artificial Sequence
  Description of Artificial Sequence: Synthetic oligonucleotide
gaagauacggugugucacu

SEQ ID NO: 1655085 - RNA, 19 nt, Artificial Sequence
  Description of Artificial Sequence: Synthetic oligonucleotide
gucaagaguggaagauacg

SEQ ID NO: 1655086 - RNA, 19 nt, Artificial Sequence
  Description of Artificial Sequence: Synthetic oligonucleotide
cuugcugaagcuugagaaa

SEQ ID NO: 1655087 - RNA, 19 nt, Artificial Sequence
  Description of Artificial Sequence: Synthetic oligonucleotide
accaucgcauuuaagacuu

SEQ ID NO: 1655088 - RNA, 19 nt, Artificial Sequence
  Description of Artificial Sequence: Synthetic oligonucleotide
gcugguuuccagcagguuc

SEQ ID NO: 1655089 - RNA, 19 nt, Artificial Sequence
  Description of Artificial Sequence: Synthetic oligonucleotide
uggucuccucagcucuacg

SEQ ID NO: 1655090 - RNA, 19 nt, Artificial Sequence
  Description of Artificial Sequence: Synthetic oligonucleotide
ccuguaagcgcauuuccug

SEQ ID NO: 1655091 - RNA, 19 nt, Artificial Sequence
  Description of Artificial Sequence: Synthetic oligonucleotide
cuuacccucugcguccucc

SEQ ID NO: 1655092 - RNA, 19 nt, Artificial Sequence
  Description of Artificial Sequence: Synthetic oligonucleotide
cuagccugugucucugcug

SEQ ID NO: 1655093 - RNA, 19 nt, Artificial Sequence
  Description of Artificial Sequence: Synthetic oligonucleotide
ggcuacuuucugccuaugg

SEQ ID NO: 1655094 - RNA, 19 nt, Artificial Sequence
  Description of Artificial Sequence: Synthetic oligonucleotide
gaagcaucucucuucuggu

SEQ ID NO: 1655095 - RNA, 19 nt, Artificial Sequence
  Description of Artificial Sequence: Synthetic oligonucleotide
cuucaagggcuacuuucug

SEQ ID NO: 1655096 - RNA, 19 nt, Artificial Sequence
  Description of Artificial Sequence: Synthetic oligonucleotide
cuuccggaggagaguggcg

SEQ ID NO: 1655097 - RNA, 19 nt, Artificial Sequence
  Description of Artificial Sequence: Synthetic oligonucleotide
augaaaugccaagauguuu

SEQ ID NO: 1655098 - RNA, 19 nt, Artificial Sequence
  Description of Artificial Sequence: Synthetic oligonucleotide
ucuuucucucaaucucguc

SEQ ID NO: 1655099 - RNA, 19 nt, Artificial Sequence
  Description of Artificial Sequence: Synthetic oligonucleotide
ggguauugcccuuuuguca

SEQ ID NO: 1655100 - RNA, 19 nt, Artificial Sequence
  Description of Artificial Sequence: Synthetic oligonucleotide
acaaaagcgaagacauuau

SEQ ID NO: 1655101 - RNA, 19 nt, Artificial Sequence
  Description of Artificial Sequence: Synthetic oligonucleotide
acuuuggguacugauuaaa

SEQ ID NO: 1655102 - RNA, 19 nt, Artificial Sequence
  Description of Artificial Sequence: Synthetic oligonucleotide
guggcgacuucuugguagc

SEQ ID NO: 1655103 - RNA, 19 nt, Artificial Sequence
  Description of Artificial Sequence: Synthetic oligonucleotide
agacuugcauuucuuucuu

SEQ ID NO: 1655104 - RNA, 19 nt, Artificial Sequence
  Description of Artificial Sequence: Synthetic oligonucleotide
caauucguccuuccugauc

SEQ ID NO: 1655105 - RNA, 19 nt, Artificial Sequence
  Description of Artificial Sequence: Synthetic oligonucleotide
guaagcgcauuuccugcac

SEQ ID NO: 1655106 - RNA, 19 nt, Artificial Sequence
  Description of Artificial Sequence: Synthetic oligonucleotide
ccaccaucgcauuuaagac

SEQ ID NO: 1655107 - RNA, 19 nt, Artificial Sequence
  Description of Artificial Sequence: Synthetic oligonucleotide
cucaagaauuccaauucgu

SEQ ID NO: 1655108 - RNA, 19 nt, Artificial Sequence
  Description of Artificial Sequence: Synthetic oligonucleotide
uccuuccacuucuuagccu

SEQ ID NO: 1655109 - RNA, 19 nt, Artificial Sequence
  Description of Artificial Sequence: Synthetic oligonucleotide
gguacugauuaaagauggg

SEQ ID NO: 1655110 - RNA, 19 nt, Artificial Sequence
  Description of Artificial Sequence: Synthetic oligonucleotide
aucgcggcaagaauauuga

SEQ ID NO: 1655111 - RNA, 19 nt, Artificial Sequence
  Description of Artificial Sequence: Synthetic oligonucleotide
acaaucggagccacuccuc

SEQ ID NO: 1655112 - RNA, 19 nt, Artificial Sequence
  Description of Artificial Sequence: Synthetic oligonucleotide
augagaguagcaacaacuu

SEQ ID NO: 1655113 - RNA, 19 nt, Artificial Sequence
  Description of Artificial Sequence: Synthetic oligonucleotide
aucgcauuuaagacuugca

SEQ ID NO: 1655114 - RNA, 19 nt, Artificial Sequence
  Description of Artificial Sequence: Synthetic oligonucleotide
agcucucucuucacggcgg

SEQ ID NO: 1655115 - RNA, 19 nt, Artificial Sequence
  Description of Artificial Sequence: Synthetic oligonucleotide
gcuuucgcugcgcugcagg

SEQ ID NO: 1655116 - RNA, 19 nt, Artificial Sequence
  Description of Artificial Sequence: Synthetic oligonucleotide
ugagcggauuguucuggaa

SEQ ID NO: 1655117 - RNA, 19 nt, Artificial Sequence
  Description of Artificial Sequence: Synthetic oligonucleotide
cuggaauaacuucacaaau

SEQ ID NO: 1655118 - RNA, 19 nt, Artificial Sequence
  Description of Artificial Sequence: Synthetic oligonucleotide
ugguagcuuucgcugcgcu

SEQ ID NO: 1655119 - RNA, 19 nt, Artificial Sequence
  Description of Artificial Sequence: Synthetic oligonucleotide
ucucucuucacggcggcua

SEQ ID NO: 1655120 - RNA, 19 nt, Artificial Sequence
  Description of Artificial Sequence: Synthetic oligonucleotide
gcgaagacauuaucaaaca

SEQ ID NO: 1655121 - RNA, 19 nt, Artificial Sequence
  Description of Artificial Sequence: Synthetic oligonucleotide
cucucuucacggcggcuag

SEQ ID NO: 1655122 - RNA, 19 nt, Artificial Sequence
  Description of Artificial Sequence: Synthetic oligonucleotide
guaccaagccucauccuca

SEQ ID NO: 1655123 - RNA, 19 nt, Artificial Sequence
  Description of Artificial Sequence: Synthetic oligonucleotide
gaucgcagaccagugagcu

SEQ ID NO: 1655124 - RNA, 19 nt, Artificial Sequence
  Description of Artificial Sequence: Synthetic oligonucleotide
ucguccuuccugauccuuu

SEQ ID NO: 1655125 - RNA, 19 nt, Artificial Sequence
  Description of Artificial Sequence: Synthetic oligonucleotide
auaaagugcuguagcaguu

SEQ ID NO: 1655126 - RNA, 19 nt, Artificial Sequence
  Description of Artificial Sequence: Synthetic oligonucleotide
uuacccucugcguccuccu

SEQ ID NO: 1655127 - RNA, 19 nt, Artificial Sequence
  Description of Artificial Sequence: Synthetic oligonucleotide
aguggaagauacggugugu

SEQ ID NO: 1655128 - RNA, 19 nt, Artificial Sequence
  Description of Artificial Sequence: Synthetic oligonucleotide
uuucggcuguggcagcaau

SEQ ID NO: 1655129 - RNA, 19 nt, Artificial Sequence
  Description of Artificial Sequence: Synthetic oligonucleotide
ugcgucugauaguccacaa

SEQ ID NO: 1655130 - RNA, 19 nt, Artificial Sequence
  Description of Artificial Sequence: Synthetic oligonucleotide
aagaugggguauugcccuu

SEQ ID NO: 1655131 - RNA, 19 nt, Artificial Sequence
  Description of Artificial Sequence: Synthetic oligonucleotide
uguguucuucaagggcuac

SEQ ID NO: 1655132 - RNA, 19 nt, Artificial Sequence
  Description of Artificial Sequence: Synthetic oligonucleotide
gggguauugcccuuuuguc

SEQ ID NO: 1655133 - RNA, 19 nt, Artificial Sequence
  Description of Artificial Sequence: Synthetic oligonucleotide
aguccacaauaaacuuugg

SEQ ID NO: 1655134 - RNA, 19 nt, Artificial Sequence
  Description of Artificial Sequence: Synthetic oligonucleotide
gugagcuaacgcagagagg

SEQ ID NO: 1655135 - RNA, 19 nt, Artificial Sequence
  Description of Artificial Sequence: Synthetic oligonucleotide
uuccugauccuuucccguu

SEQ ID NO: 1655136 - RNA, 19 nt, Artificial Sequence
  Description of Artificial Sequence: Synthetic oligonucleotide
ccaagauguuuucuaucgc

SEQ ID NO: 1655137 - RNA, 19 nt, Artificial Sequence
  Description of Artificial Sequence: Synthetic oligonucleotide
acaucccgaucuauaaagu

SEQ ID NO: 1655138 - RNA, 19 nt, Artificial Sequence
  Description of Artificial Sequence: Synthetic oligonucleotide
agggcuacuuucugccuau

SEQ ID NO: 1655139 - RNA, 19 nt, Artificial Sequence
  Description of Artificial Sequence: Synthetic oligonucleotide
agucugcgcagcuccauuu

SEQ ID NO: 1655140 - RNA, 19 nt, Artificial Sequence
  Description of Artificial Sequence: Synthetic oligonucleotide
aagucacaucccgaucuau

SEQ ID NO: 1655141 - RNA, 19 nt, Artificial Sequence
  Description of Artificial Sequence: Synthetic oligonucleotide
uugcaacagaguccugauu

SEQ ID NO: 1655142 - RNA, 19 nt, Artificial Sequence
  Description of Artificial Sequence: Synthetic oligonucleotide
gaagucacaucccgaucua

SEQ ID NO: 1655143 - RNA, 19 nt, Artificial Sequence
  Description of Artificial Sequence: Synthetic oligonucleotide
ugguaccaagccucauccu

SEQ ID NO: 1655144 - RNA, 19 nt, Artificial Sequence
  Description of Artificial Sequence: Synthetic oligonucleotide
gagcggauuguucuggaau

SEQ ID NO: 1655145 - RNA, 19 nt, Artificial Sequence
  Description of Artificial Sequence: Synthetic oligonucleotide
acugcaaaugagacucccu

SEQ ID NO: 1655146 - RNA, 19 nt, Artificial Sequence
  Description of Artificial Sequence: Synthetic oligonucleotide
ucugcguccuccugcccuc

SEQ ID NO: 1655147 - RNA, 19 nt, Artificial Sequence
  Description of Artificial Sequence: Synthetic oligonucleotide
ggagaguggcgacuucuug

SEQ ID NO: 1655148 - RNA, 19 nt, Artificial Sequence
  Description of Artificial Sequence: Synthetic oligonucleotide
ucggagccacuccucucug

SEQ ID NO: 1655149 - RNA, 19 nt, Artificial Sequence
  Description of Artificial Sequence: Synthetic oligonucleotide
ggcaagaauauugaugggu

SEQ ID NO: 1655150 - RNA, 19 nt, Artificial Sequence
  Description of Artificial Sequence: Synthetic oligonucleotide
auguugacaccaauugauu

SEQ ID NO: 1655151 - RNA, 19 nt, Artificial Sequence
  Description of Artificial Sequence: Synthetic oligonucleotide
cgcggcaagaauauugaug

SEQ ID NO: 1655152 - RNA, 19 nt, Artificial Sequence
  Description of Artificial Sequence: Synthetic oligonucleotide
agcuccauuucacguugau

SEQ ID NO: 1655153 - RNA, 19 nt, Artificial Sequence
  Description of Artificial Sequence: Synthetic oligonucleotide
guggguuagggaaguacuc

SEQ ID NO: 1655154 - RNA, 19 nt, Artificial Sequence
  Description of Artificial Sequence: Synthetic oligonucleotide
agacucccuuucuucugcu

SEQ ID NO: 1655155 - RNA, 19 nt, Artificial Sequence
  Description of Artificial Sequence: Synthetic oligonucleotide
agcuaacgcagagaggguu

SEQ ID NO: 1655156 - RNA, 19 nt, Artificial Sequence
  Description of Artificial Sequence: Synthetic oligonucleotide
caccaucgcauuuaagacu

SEQ ID NO: 1655157 - RNA, 19 nt, Artificial Sequence
  Description of Artificial Sequence: Synthetic oligonucleotide
ucuggucuccucagcucua

SEQ ID NO: 1655158 - RNA, 19 nt, Artificial Sequence
  Description of Artificial Sequence: Synthetic oligonucleotide
acugaagaucgcagaccag

SEQ ID NO: 1655159 - RNA, 19 nt, Artificial Sequence
  Description of Artificial Sequence: Synthetic oligonucleotide
auacggugugucacugaag

SEQ ID NO: 1655160 - RNA, 19 nt, Artificial Sequence
  Description of Artificial Sequence: Synthetic oligonucleotide
gaagcuugagaaagcgccu

SEQ ID NO: 1655161 - RNA, 19 nt, Artificial Sequence
  Description of Artificial Sequence: Synthetic oligonucleotide
caguuucaaggagaggcca

SEQ ID NO: 1655162 - RNA, 19 nt, Artificial Sequence
  Description of Artificial Sequence: Synthetic oligonucleotide
gaggguucucuguggaccu

SEQ ID NO: 1655163 - RNA, 19 nt, Artificial Sequence
  Description of Artificial Sequence: Synthetic oligonucleotide
uggaccucccuguguuccu

SEQ ID NO: 1655164 - RNA, 19 nt, Artificial Sequence
  Description of Artificial Sequence: Synthetic oligonucleotide
acaaaacagaugagcggau

SEQ ID NO: 1655165 - RNA, 19 nt, Artificial Sequence
  Description of Artificial Sequence: Synthetic oligonucleotide
cugauuaaagaugggguau

SEQ ID NO: 1655166 - RNA, 19 nt, Artificial Sequence
  Description of Artificial Sequence: Synthetic oligonucleotide
uuucaacugucugccucuc

SEQ ID NO: 1655167 - RNA, 19 nt, Artificial Sequence
  Description of Artificial Sequence: Synthetic oligonucleotide
uccuucucauaaagucguu

SEQ ID NO: 1655168 - RNA, 19 nt, Artificial Sequence
  Description of Artificial Sequence: Synthetic oligonucleotide
ggauuguucuggaauaacu

SEQ ID NO: 1655169 - RNA, 19 nt, Artificial Sequence
  Description of Artificial Sequence: Synthetic oligonucleotide
agucacaucccgaucuaua

SEQ ID NO: 1655170 - RNA, 19 nt, Artificial Sequence
  Description of Artificial Sequence: Synthetic oligonucleotide
ugcucagcuuuugccaaau

SEQ ID NO: 1655171 - RNA, 19 nt, Artificial Sequence
  Description of Artificial Sequence: Synthetic oligonucleotide
auucguccuuccugauccu

SEQ ID NO: 1655172 - RNA, 19 nt, Artificial Sequence
  Description of Artificial Sequence: Synthetic oligonucleotide
aagcuccagaugucuuauu

SEQ ID NO: 1655173 - RNA, 19 nt, Artificial Sequence
  Description of Artificial Sequence: Synthetic oligonucleotide
ccguuccugcgucugauag

SEQ ID NO: 1655174 - RNA, 19 nt, Artificial Sequence
  Description of Artificial Sequence: Synthetic oligonucleotide
ccaauugauuaugagagua

SEQ ID NO: 1655175 - RNA, 19 nt, Artificial Sequence
  Description of Artificial Sequence: Synthetic oligonucleotide
uuucgcugcgcugcagguc

SEQ ID NO: 1655176 - RNA, 19 nt, Artificial Sequence
  Description of Artificial Sequence: Synthetic oligonucleotide
cuccaccaucgcauuuaag

SEQ ID NO: 1655177 - RNA, 19 nt, Artificial Sequence
  Description of Artificial Sequence: Synthetic oligonucleotide
guuuucuaucgcggcaaga

SEQ ID NO: 1655178 - RNA, 19 nt, Artificial Sequence
  Description of Artificial Sequence: Synthetic oligonucleotide
acggugugucacugaagau

SEQ ID NO: 1655179 - RNA, 19 nt, Artificial Sequence
  Description of Artificial Sequence: Synthetic oligonucleotide
gaauauugauggguggguu

SEQ ID NO: 1655180 - RNA, 19 nt, Artificial Sequence
  Description of Artificial Sequence: Synthetic oligonucleotide
ucgcggcaagaauauugau

SEQ ID NO: 1655181 - RNA, 19 nt, Artificial Sequence
  Description of Artificial Sequence: Synthetic oligonucleotide
gccuaugggcaucagcauc

SEQ ID NO: 1655182 - RNA, 19 nt, Artificial Sequence
  Description of Artificial Sequence: Synthetic oligonucleotide
cucguccuccagucugcgc

SEQ ID NO: 1655183 - RNA, 19 nt, Artificial Sequence
  Description of Artificial Sequence: Synthetic oligonucleotide
caugaaaugccaagauguu

SEQ ID NO: 1655184 - RNA, 19 nt, Artificial Sequence
  Description of Artificial Sequence: Synthetic oligonucleotide
gaggagaguggcgacuucu

SEQ ID NO: 1655185 - RNA, 19 nt, Artificial Sequence
  Description of Artificial Sequence: Synthetic oligonucleotide
cuuccugauccuuucccgu

SEQ ID NO: 1655186 - RNA, 19 nt, Artificial Sequence
  Description of Artificial Sequence: Synthetic oligonucleotide
uuuucggcuguggcagcaa

SEQ ID NO: 1655187 - RNA, 19 nt, Artificial Sequence
  Description of Artificial Sequence: Synthetic oligonucleotide
cugcaaaugagacucccuu

SEQ ID NO: 1655188 - RNA, 19 nt, Artificial Sequence
  Description of Artificial Sequence: Synthetic oligonucleotide
acuuucuguuaggcgucug

SEQ ID NO: 1655189 - RNA, 19 nt, Artificial Sequence
  Description of Artificial Sequence: Synthetic oligonucleotide
acuuacccucugcguccuc

SEQ ID NO: 1655190 - RNA, 19 nt, Artificial Sequence
  Description of Artificial Sequence: Synthetic oligonucleotide
cucuacggagcagcucuug

SEQ ID NO: 1655191 - RNA, 19 nt, Artificial Sequence
  Description of Artificial Sequence: Synthetic oligonucleotide
caggcuugcucagcuuuug

SEQ ID NO: 1655192 - RNA, 19 nt, Artificial Sequence
  Description of Artificial Sequence: Synthetic oligonucleotide
uagccugcuccuccaccau

SEQ ID NO: 1655193 - RNA, 19 nt, Artificial Sequence
  Description of Artificial Sequence: Synthetic oligonucleotide
cuggucuccucagcucuac

SEQ ID NO: 1655194 - RNA, 19 nt, Artificial Sequence
  Description of Artificial Sequence: Synthetic oligonucleotide
gggaagucacaucccgauc

SEQ ID NO: 1655195 - RNA, 19 nt, Artificial Sequence
  Description of Artificial Sequence: Synthetic oligonucleotide
aucgcagaccagugagcua

SEQ ID NO: 1655196 - RNA, 19 nt, Artificial Sequence
  Description of Artificial Sequence: Synthetic oligonucleotide
gcgcauuuccugcaccuuc

SEQ ID NO: 1655197 - RNA, 19 nt, Artificial Sequence
  Description of Artificial Sequence: Synthetic oligonucleotide
cgucugauaguccacaaua

SEQ ID NO: 1655198 - RNA, 19 nt, Artificial Sequence
  Description of Artificial Sequence: Synthetic oligonucleotide
gguggguuagggaaguacu

SEQ ID NO: 1655199 - RNA, 19 nt, Artificial Sequence
  Description of Artificial Sequence: Synthetic oligonucleotide
cagguuccggaacaugugu

SEQ ID NO: 1655200 - RNA, 19 nt, Artificial Sequence
  Description of Artificial Sequence: Synthetic oligonucleotide
caaucggagccacuccucu

SEQ ID NO: 1655201 - RNA, 19 nt, Artificial Sequence
  Description of Artificial Sequence: Synthetic oligonucleotide
ggguucucuguggaccucc

SEQ ID NO: 1655202 - RNA, 19 nt, Artificial Sequence
  Description of Artificial Sequence: Synthetic oligonucleotide
uucguccuuccugauccuu

SEQ ID NO: 1655203 - RNA, 19 nt, Artificial Sequence
  Description of Artificial Sequence: Synthetic oligonucleotide
auguguucuucaagggcua

SEQ ID NO: 1655204 - RNA, 19 nt, Artificial Sequence
  Description of Artificial Sequence: Synthetic oligonucleotide
cucucucaagaauuccaau

SEQ ID NO: 1655205 - RNA, 19 nt, Artificial Sequence
  Description of Artificial Sequence: Synthetic oligonucleotide
agaugggguauugcccuuu

SEQ ID NO: 1655206 - RNA, 19 nt, Artificial Sequence
  Description of Artificial Sequence: Synthetic oligonucleotide
uaacgcagagaggguucuc

SEQ ID NO: 1655207 - RNA, 19 nt, Artificial Sequence
  Description of Artificial Sequence: Synthetic oligonucleotide
gguuagggaaguacucaaa

SEQ ID NO: 1655208 - RNA, 19 nt, Artificial Sequence
  Description of Artificial Sequence: Synthetic oligonucleotide
cccucugcguccuccugcc

SEQ ID NO: 1655209 - RNA, 19 nt, Artificial Sequence
  Description of Artificial Sequence: Synthetic oligonucleotide
gcuccauuucacguugauc

SEQ ID NO: 1655210 - RNA, 19 nt, Artificial Sequence
  Description of Artificial Sequence: Synthetic oligonucleotide
cuuucgcugcgcugcaggu

SEQ ID NO: 1655211 - RNA, 19 nt, Artificial Sequence
  Description of Artificial Sequence: Synthetic oligonucleotide
agcuuucgcugcgcugcag

SEQ ID NO: 1655212 - RNA, 19 nt, Artificial Sequence
  Description of Artificial Sequence: Synthetic oligonucleotide
cucugcguccuccugcccu

SEQ ID NO: 1655213 - RNA, 19 nt, Artificial Sequence
  Description of Artificial Sequence: Synthetic oligonucleotide
gaugggguauugcccuuuu

SEQ ID NO: 1655214 - RNA, 19 nt, Artificial Sequence
  Description of Artificial Sequence: Synthetic oligonucleotide
gugugucacugaagaucgc

SEQ ID NO: 1655215 - RNA, 19 nt, Artificial Sequence
  Description of Artificial Sequence: Synthetic oligonucleotide
aggagaguggcgacuucuu

SEQ ID NO: 1655216 - RNA, 19 nt, Artificial Sequence
  Description of Artificial Sequence: Synthetic oligonucleotide
ggucagcacuucugagaac

SEQ ID NO: 1655217 - RNA, 19 nt, Artificial Sequence
  Description of Artificial Sequence: Synthetic oligonucleotide
gaguggcgacuucuuggua

SEQ ID NO: 1655218 - RNA, 19 nt, Artificial Sequence
  Description of Artificial Sequence: Synthetic oligonucleotide
ccuugucaugaaaugccaa

SEQ ID NO: 1655219 - RNA, 19 nt, Artificial Sequence
  Description of Artificial Sequence: Synthetic oligonucleotide
gguucucuguggaccuccc

SEQ ID NO: 1655220 - RNA, 19 nt, Artificial Sequence
  Description of Artificial Sequence: Synthetic oligonucleotide
cccgaucuauaaagugcug

SEQ ID NO: 1655221 - RNA, 19 nt, Artificial Sequence
  Description of Artificial Sequence: Synthetic oligonucleotide
cuaacgcagagaggguucu

SEQ ID NO: 1655222 - RNA, 19 nt, Artificial Sequence
  Description of Artificial Sequence: Synthetic oligonucleotide
cggcaagaauauugauggg

SEQ ID NO: 1655223 - RNA, 19 nt, Artificial Sequence
  Description of Artificial Sequence: Synthetic oligonucleotide
gcccuuuugucaaggcaac

SEQ ID NO: 1655224 - RNA, 19 nt, Artificial Sequence
  Description of Artificial Sequence: Synthetic oligonucleotide
agcgcauuuccugcaccuu

SEQ ID NO: 1655225 - RNA, 19 nt, Artificial Sequence
  Description of Artificial Sequence: Synthetic oligonucleotide
cuacggagcagcucuuguu

SEQ ID NO: 1655226 - RNA, 19 nt, Artificial Sequence
  Description of Artificial Sequence: Synthetic oligonucleotide
acucgucuccuagcuuuaa

SEQ ID NO: 1655227 - RNA, 19 nt, Artificial Sequence
  Description of Artificial Sequence: Synthetic oligonucleotide
ccuuucccguuccugcguc

SEQ ID NO: 1655228 - RNA, 19 nt, Artificial Sequence
  Description of Artificial Sequence: Synthetic oligonucleotide
guguucuucaagggcuacu

SEQ ID NO: 1655229 - RNA, 19 nt, Artificial Sequence
  Description of Artificial Sequence: Synthetic oligonucleotide
ggcuagccugugucucugc

SEQ ID NO: 1655230 - RNA, 19 nt, Artificial Sequence
  Description of Artificial Sequence: Synthetic oligonucleotide
caagcuccagaugucuuau

SEQ ID NO: 1655231 - RNA, 19 nt, Artificial Sequence
  Description of Artificial Sequence: Synthetic oligonucleotide
guucucuguggaccucccu

SEQ ID NO: 1655232 - RNA, 19 nt, Artificial Sequence
  Description of Artificial Sequence: Synthetic oligonucleotide
caucagcaucuuuucggau

SEQ ID NO: 1655233 - RNA, 19 nt, Artificial Sequence
  Description of Artificial Sequence: Synthetic oligonucleotide
ccaguaagauccuucucau

SEQ ID NO: 1655234 - RNA, 19 nt, Artificial Sequence
  Description of Artificial Sequence: Synthetic oligonucleotide
cagcuccauuucacguuga

SEQ ID NO: 1655235 - RNA, 19 nt, Artificial Sequence
  Description of Artificial Sequence: Synthetic oligonucleotide
ucgcugcgcugcaggucgu

SEQ ID NO: 1655236 - RNA, 19 nt, Artificial Sequence
  Description of Artificial Sequence: Synthetic oligonucleotide
ggcggcuagccugugucuc

SEQ ID NO: 1655237 - RNA, 19 nt, Artificial Sequence
  Description of Artificial Sequence: Synthetic oligonucleotide
gagcuaacgcagagagggu

SEQ ID NO: 1655238 - RNA, 19 nt, Artificial Sequence
  Description of Artificial Sequence: Synthetic oligonucleotide
cgcauuuccugcaccuuca

SEQ ID NO: 1655239 - RNA, 19 nt, Artificial Sequence
  Description of Artificial Sequence: Synthetic oligonucleotide
ccgaucuauaaagugcugu

SEQ ID NO: 1655240 - RNA, 19 nt, Artificial Sequence
  Description of Artificial Sequence: Synthetic oligonucleotide
gucagcauucaggcaggcu

SEQ ID NO: 1655241 - RNA, 19 nt, Artificial Sequence
  Description of Artificial Sequence: Synthetic oligonucleotide
gcggauuguucuggaauaa

SEQ ID NO: 1655242 - RNA, 19 nt, Artificial Sequence
  Description of Artificial Sequence: Synthetic oligonucleotide
cugcguccuccugcccucc

SEQ ID NO: 1655243 - RNA, 19 nt, Artificial Sequence
  Description of Artificial Sequence: Synthetic oligonucleotide
ccggaacauguguucuuca

SEQ ID NO: 1655244 - RNA, 19 nt, Artificial Sequence
  Description of Artificial Sequence: Synthetic oligonucleotide
ccaucgcauuuaagacuug

SEQ ID NO: 1655245 - RNA, 19 nt, Artificial Sequence
  Description of Artificial Sequence: Synthetic oligonucleotide
ggcauacagcugggaaguc

SEQ ID NO: 1655246 - RNA, 19 nt, Artificial Sequence
  Description of Artificial Sequence: Synthetic oligonucleotide
ccucacuuacccucugcgu

SEQ ID NO: 1655247 - RNA, 19 nt, Artificial Sequence
  Description of Artificial Sequence: Synthetic oligonucleotide
gcgucugauaguccacaau

SEQ ID NO: 1655248 - RNA, 19 nt, Artificial Sequence
  Description of Artificial Sequence: Synthetic oligonucleotide
gggcuacuuucugccuaug

SEQ ID NO: 1655249 - RNA, 19 nt, Artificial Sequence
  Description of Artificial Sequence: Synthetic oligonucleotide
cacuuacccucugcguccu

SEQ ID NO: 1655250 - RNA, 19 nt, Artificial Sequence
  Description of Artificial Sequence: Synthetic oligonucleotide
cagucugcgcagcuccauu

SEQ ID NO: 1655251 - RNA, 19 nt, Artificial Sequence
  Description of Artificial Sequence: Synthetic oligonucleotide
gcggcuagccugugucucu

SEQ ID NO: 1655252 - RNA, 19 nt, Artificial Sequence
  Description of Artificial Sequence: Synthetic oligonucleotide
cgcagaccagugagcuaac

SEQ ID NO: 1655253 - RNA, 19 nt, Artificial Sequence
  Description of Artificial Sequence: Synthetic oligonucleotide
cuaucgcggcaagaauauu

SEQ ID NO: 1655254 - RNA, 19 nt, Artificial Sequence
  Description of Artificial Sequence: Synthetic oligonucleotide
cuccuccaccaucgcauuu

SEQ ID NO: 1655255 - RNA, 19 nt, Artificial Sequence
  Description of Artificial Sequence: Synthetic oligonucleotide
cacggcggcuagccugugu

SEQ ID NO: 1655256 - RNA, 19 nt, Artificial Sequence
  Description of Artificial Sequence: Synthetic oligonucleotide
cuaugggcaucagcaucuu

SEQ ID NO: 1655257 - RNA, 19 nt, Artificial Sequence
  Description of Artificial Sequence: Synthetic oligonucleotide
gcucagcuuuugccaaauu

SEQ ID NO: 1655258 - RNA, 19 nt, Artificial Sequence
  Description of Artificial Sequence: Synthetic oligonucleotide
cccguuccugcgucugaua

SEQ ID NO: 1655259 - RNA, 19 nt, Artificial Sequence
  Description of Artificial Sequence: Synthetic oligonucleotide
gcguccuccugcccuccau

SEQ ID NO: 1655260 - RNA, 19 nt, Artificial Sequence
  Description of Artificial Sequence: Synthetic oligonucleotide
ggcugguuuccagcagguu

SEQ ID NO: 1655261 - RNA, 19 nt, Artificial Sequence
  Description of Artificial Sequence: Synthetic oligonucleotide
gcgcugcaggucgucauuu

SEQ ID NO: 1655262 - RNA, 19 nt, Artificial Sequence
  Description of Artificial Sequence: Synthetic oligonucleotide
gcucuacggagcagcucuu

SEQ ID NO: 1655263 - RNA, 19 nt, Artificial Sequence
  Description of Artificial Sequence: Synthetic oligonucleotide
cggcggcuagccugugucu

SEQ ID NO: 1655264 - RNA, 19 nt, Artificial Sequence
  Description of Artificial Sequence: Synthetic oligonucleotide
aauauaaacaccaaaauuc

SEQ ID NO: 1655265 - RNA, 19 nt, Artificial Sequence
  Description of Artificial Sequence: Synthetic oligonucleotide
uuuauuaacccuuucagcc

SEQ ID NO: 1655266 - RNA, 19 nt, Artificial Sequence
  Description of Artificial Sequence: Synthetic oligonucleotide
uuuucauuaaaguuggagg

SEQ ID NO: 1655267 - RNA, 19 nt, Artificial Sequence
  Description of Artificial Sequence: Synthetic oligonucleotide
uuucauuaaaguuggaggg

SEQ ID NO: 1655268 - RNA, 19 nt, Artificial Sequence
  Description of Artificial Sequence: Synthetic oligonucleotide
aaucucacccugcagagcc

SEQ ID NO: 1655269 - RNA, 19 nt, Artificial Sequence
  Description of Artificial Sequence: Synthetic oligonucleotide
auacuugucauuaagaugg

SEQ ID NO: 1655270 - RNA, 19 nt, Artificial Sequence
  Description of Artificial Sequence: Synthetic oligonucleotide
uuuauuaguaggaucaugu

SEQ ID NO: 1655271 - RNA, 19 nt, Artificial Sequence
  Description of Artificial Sequence: Synthetic oligonucleotide
aaaaucuucgucuucccag

SEQ ID NO: 1655272 - RNA, 19 nt, Artificial Sequence
  Description of Artificial Sequence: Synthetic oligonucleotide
uauagaagaagccagucac

SEQ ID NO: 1655273 - RNA, 19 nt, Artificial Sequence
  Description of Artificial Sequence: Synthetic oligonucleotide
gauaauuuuaggaagccag

SEQ ID NO: 1655274 - RNA, 19 nt, Artificial Sequence
  Description of Artificial Sequence: Synthetic oligonucleotide
uuauauaaaaugccuccgg

SEQ ID NO: 1655275 - RNA, 19 nt, Artificial Sequence
  Description of Artificial Sequence: Synthetic oligonucleotide
ucuacagguaaucucaccc

SEQ ID NO: 1655276 - RNA, 19 nt, Artificial Sequence
  Description of Artificial Sequence: Synthetic oligonucleotide
aguugagucaucuacaggu

SEQ ID NO: 1655277 - RNA, 19 nt, Artificial Sequence
  Description of Artificial Sequence: Synthetic oligonucleotide
auuugccuggaccagacgc

SEQ ID NO: 1655278 - RNA, 19 nt, Artificial Sequence
  Description of Artificial Sequence: Synthetic oligonucleotide
ugaacucuaacgcaauggg

SEQ ID NO: 1655279 - RNA, 19 nt, Artificial Sequence
  Description of Artificial Sequence: Synthetic oligonucleotide
uccuuugggacucugaacc

SEQ ID NO: 1655280 - RNA, 19 nt, Artificial Sequence
  Description of Artificial Sequence: Synthetic oligonucleotide
ucaauagccauacuuguca

SEQ ID NO: 1655281 - RNA, 19 nt, Artificial Sequence
  Description of Artificial Sequence: Synthetic oligonucleotide
uucaggagaauccacuggg

SEQ ID NO: 1655282 - RNA, 19 nt, Artificial Sequence
  Description of Artificial Sequence: Synthetic oligonucleotide
ugauuugucaucccaaaca

SEQ ID NO: 1655283 - RNA, 19 nt, Artificial Sequence
  Description of Artificial Sequence: Synthetic oligonucleotide
guuuuauuaacccuuucag

SEQ ID NO: 1655284 - RNA, 19 nt, Artificial Sequence
  Description of Artificial Sequence: Synthetic oligonucleotide
uauuaguaggaucaugucu

SEQ ID NO: 1655285 - RNA, 19 nt, Artificial Sequence
  Description of Artificial Sequence: Synthetic oligonucleotide
uuuacuaauuuucagugua

SEQ ID NO: 1655286 - RNA, 19 nt, Artificial Sequence
  Description of Artificial Sequence: Synthetic oligonucleotide
aauauagaagaagccaguc

SEQ ID NO: 1655287 - RNA, 19 nt, Artificial Sequence
  Description of Artificial Sequence: Synthetic oligonucleotide
auaaacaccaaaauucagg

SEQ ID NO: 1655288 - RNA, 19 nt, Artificial Sequence
  Description of Artificial Sequence: Synthetic oligonucleotide
aaucaauagccauacuugu

SEQ ID NO: 1655289 - RNA, 19 nt, Artificial Sequence
  Description of Artificial Sequence: Synthetic oligonucleotide
uuuucaguguauaugguuc

SEQ ID NO: 1655290 - RNA, 19 nt, Artificial Sequence
  Description of Artificial Sequence: Synthetic oligonucleotide
uuacaaguuuuauuaaccc

SEQ ID NO: 1655291 - RNA, 19 nt, Artificial Sequence
  Description of Artificial Sequence: Synthetic oligonucleotide
guauuuggaagaaagaaug

SEQ ID NO: 1655292 - RNA, 19 nt, Artificial Sequence
  Description of Artificial Sequence: Synthetic oligonucleotide
uguaucaaggauccgacaa

SEQ ID NO: 1655293 - RNA, 19 nt, Artificial Sequence
  Description of Artificial Sequence: Synthetic oligonucleotide
uucacaaauggucaucuga

SEQ ID NO: 1655294 - RNA, 19 nt, Artificial Sequence
  Description of Artificial Sequence: Synthetic oligonucleotide
aauggguggaaauuugccu

SEQ ID NO: 1655295 - RNA, 19 nt, Artificial Sequence
  Description of Artificial Sequence: Synthetic oligonucleotide
uccuuuauauaaaaugccu

SEQ ID NO: 1655296 - RNA, 19 nt, Artificial Sequence
  Description of Artificial Sequence: Synthetic oligonucleotide
uaaugcaaguuucuuagcu

SEQ ID NO: 1655297 - RNA, 19 nt, Artificial Sequence
  Description of Artificial Sequence: Synthetic oligonucleotide
uauauaaaaugccuccggu

SEQ ID NO: 1655298 - RNA, 19 nt, Artificial Sequence
  Description of Artificial Sequence: Synthetic oligonucleotide
aaccaaucaauagccauac

SEQ ID NO: 1655299 - RNA, 19 nt, Artificial Sequence
  Description of Artificial Sequence: Synthetic oligonucleotide
aguagucuggaucaucuuc

SEQ ID NO: 1655300 - RNA, 19 nt, Artificial Sequence
  Description of Artificial Sequence: Synthetic oligonucleotide
aguuuuauuaacccuuuca

SEQ ID NO: 1655301 - RNA, 19 nt, Artificial Sequence
  Description of Artificial Sequence: Synthetic oligonucleotide
aauuugaauuugcuuccuc

SEQ ID NO: 1655302 - RNA, 19 nt, Artificial Sequence
  Description of Artificial Sequence: Synthetic oligonucleotide
ucagaugaaguuucuuccg

SEQ ID NO: 1655303 - RNA, 19 nt, Artificial Sequence
  Description of Artificial Sequence: Synthetic oligonucleotide
gguaaugcaaguuucuuag

SEQ ID NO: 1655304 - RNA, 19 nt, Artificial Sequence
  Description of Artificial Sequence: Synthetic oligonucleotide
cauauuccaacucuucucc

SEQ ID NO: 1655305 - RNA, 19 nt, Artificial Sequence
  Description of Artificial Sequence: Synthetic oligonucleotide
uugaccuucagguggaacc

SEQ ID NO: 1655306 - RNA, 19 nt, Artificial Sequence
  Description of Artificial Sequence: Synthetic oligonucleotide
auuaagauggguucugcca

SEQ ID NO: 1655307 - RNA, 19 nt, Artificial Sequence
  Description of Artificial Sequence: Synthetic oligonucleotide
cucugaaccaaucaauagc

SEQ ID NO: 1655308 - RNA, 19 nt, Artificial Sequence
  Description of Artificial Sequence: Synthetic oligonucleotide
uugaacucuaacgcaaugg

SEQ ID NO: 1655309 - RNA, 19 nt, Artificial Sequence
  Description of Artificial Sequence: Synthetic oligonucleotide
aggaauguaucaucgucac

SEQ ID NO: 1655310 - RNA, 19 nt, Artificial Sequence
  Description of Artificial Sequence: Synthetic oligonucleotide
uguagucugaaguucaguc

SEQ ID NO: 1655311 - RNA, 19 nt, Artificial Sequence
  Description of Artificial Sequence: Synthetic oligonucleotide
aaucccaauguaucaagga

SEQ ID NO: 1655312 - RNA, 19 nt, Artificial Sequence
  Description of Artificial Sequence: Synthetic oligonucleotide
accaaaauucaggagaauc

SEQ ID NO: 1655313 - RNA, 19 nt, Artificial Sequence
  Description of Artificial Sequence: Synthetic oligonucleotide
uuggagggaguucuggacg

SEQ ID NO: 1655314 - RNA, 19 nt, Artificial Sequence
  Description of Artificial Sequence: Synthetic oligonucleotide
cacuuaaauauaaacacca

SEQ ID NO: 1655315 - RNA, 19 nt, Artificial Sequence
  Description of Artificial Sequence: Synthetic oligonucleotide
auccuuuauauaaaaugcc

SEQ ID NO: 1655316 - RNA, 19 nt, Artificial Sequence
  Description of Artificial Sequence: Synthetic oligonucleotide
aacucuaacgcaauggggu

SEQ ID NO: 1655317 - RNA, 19 nt, Artificial Sequence
  Description of Artificial Sequence: Synthetic oligonucleotide
ugucaaagaagccuucgga

SEQ ID NO: 1655318 - RNA, 19 nt, Artificial Sequence
  Description of Artificial Sequence: Synthetic oligonucleotide
aacccuuucagccucugcu

SEQ ID NO: 1655319 - RNA, 19 nt, Artificial Sequence
  Description of Artificial Sequence: Synthetic oligonucleotide
caaagagagguaaugcaag

SEQ ID NO: 1655320 - RNA, 19 nt, Artificial Sequence
  Description of Artificial Sequence: Synthetic oligonucleotide
uucacauucauucccuggu

SEQ ID NO: 1655321 - RNA, 19 nt, Artificial Sequence
  Description of Artificial Sequence: Synthetic oligonucleotide
caccagauuucacaaaugg

SEQ ID NO: 1655322 - RNA, 19 nt, Artificial Sequence
  Description of Artificial Sequence: Synthetic oligonucleotide
aaauggucaucugaacuuc

SEQ ID NO: 1655323 - RNA, 19 nt, Artificial Sequence
  Description of Artificial Sequence: Synthetic oligonucleotide
ugaaguuucuuccgggaca

SEQ ID NO: 1655324 - RNA, 19 nt, Artificial Sequence
  Description of Artificial Sequence: Synthetic oligonucleotide
ucauuaaaguuggagggag

SEQ ID NO: 1655325 - RNA, 19 nt, Artificial Sequence
  Description of Artificial Sequence: Synthetic oligonucleotide
gauccgacaagcuuccagc

SEQ ID NO: 1655326 - RNA, 19 nt, Artificial Sequence
  Description of Artificial Sequence: Synthetic oligonucleotide
guccuguugaacucuaacg

SEQ ID NO: 1655327 - RNA, 19 nt, Artificial Sequence
  Description of Artificial Sequence: Synthetic oligonucleotide
ucacaaauggucaucugaa

SEQ ID NO: 1655328 - RNA, 19 nt, Artificial Sequence
  Description of Artificial Sequence: Synthetic oligonucleotide
cuuaguucaaaguccucag

SEQ ID NO: 1655329 - RNA, 19 nt, Artificial Sequence
  Description of Artificial Sequence: Synthetic oligonucleotide
uuuuacuaauuuucagugu

SEQ ID NO: 1655330 - RNA, 19 nt, Artificial Sequence
  Description of Artificial Sequence: Synthetic oligonucleotide
uuauuaacccuuucagccu

SEQ ID NO: 1655331 - RNA, 19 nt, Artificial Sequence
  Description of Artificial Sequence: Synthetic oligonucleotide
uuucaguguauaugguucc

SEQ ID NO: 1655332 - RNA, 19 nt, Artificial Sequence
  Description of Artificial Sequence: Synthetic oligonucleotide
auauagaagaagccaguca

SEQ ID NO: 1655333 - RNA, 19 nt, Artificial Sequence
  Description of Artificial Sequence: Synthetic oligonucleotide
aaugccuccgguccuguug

SEQ ID NO: 1655334 - RNA, 19 nt, Artificial Sequence
  Description of Artificial Sequence: Synthetic oligonucleotide
ugucuuuuauuuuacuaau

SEQ ID NO: 1655335 - RNA, 19 nt, Artificial Sequence
  Description of Artificial Sequence: Synthetic oligonucleotide
agaggccuucuuuggaucc

SEQ ID NO: 1655336 - RNA, 19 nt, Artificial Sequence
  Description of Artificial Sequence: Synthetic oligonucleotide
gucaucugaacuucccugg

SEQ ID NO: 1655337 - RNA, 19 nt, Artificial Sequence
  Description of Artificial Sequence: Synthetic oligonucleotide
acucugaaccaaucaauag

SEQ ID NO: 1655338 - RNA, 19 nt, Artificial Sequence
  Description of Artificial Sequence: Synthetic oligonucleotide
caaggauccgacaagcuuc

SEQ ID NO: 1655339 - RNA, 19 nt, Artificial Sequence
  Description of Artificial Sequence: Synthetic oligonucleotide
ugucaucccaaacauccug

SEQ ID NO: 1655340 - RNA, 19 nt, Artificial Sequence
  Description of Artificial Sequence: Synthetic oligonucleotide
aauggucaucugaacuucc

SEQ ID NO: 1655341 - RNA, 19 nt, Artificial Sequence
  Description of Artificial Sequence: Synthetic oligonucleotide
auaauuuuaggaagccagg

SEQ ID NO: 1655342 - RNA, 19 nt, Artificial Sequence
  Description of Artificial Sequence: Synthetic oligonucleotide
gaauccacugggcagauaa

SEQ ID NO: 1655343 - RNA, 19 nt, Artificial Sequence
  Description of Artificial Sequence: Synthetic oligonucleotide
guggaaauuugccuggacc

SEQ ID NO: 1655344 - RNA, 19 nt, Artificial Sequence
  Description of Artificial Sequence: Synthetic oligonucleotide
ucccaguugagucaucuac

SEQ ID NO: 1655345 - RNA, 19 nt, Artificial Sequence
  Description of Artificial Sequence: Synthetic oligonucleotide
cuuuccugagugaauggcc

SEQ ID NO: 1655346 - RNA, 19 nt, Artificial Sequence
  Description of Artificial Sequence: Synthetic oligonucleotide
aucuacagguaaucucacc

SEQ ID NO: 1655347 - RNA, 19 nt, Artificial Sequence
  Description of Artificial Sequence: Synthetic oligonucleotide
ggaauauagaagaagccag

SEQ ID NO: 1655348 - RNA, 19 nt, Artificial Sequence
  Description of Artificial Sequence: Synthetic oligonucleotide
uuuuauuaguaggaucaug

SEQ ID NO: 1655349 - RNA, 19 nt, Artificial Sequence
  Description of Artificial Sequence: Synthetic oligonucleotide
uuuuccgugauacggcuuc

SEQ ID NO: 1655350 - RNA, 19 nt, Artificial Sequence
  Description of Artificial Sequence: Synthetic oligonucleotide
ggcagauaauuuuaggaag

SEQ ID NO: 1655351 - RNA, 19 nt, Artificial Sequence
  Description of Artificial Sequence: Synthetic oligonucleotide
aucaucgucacuaucauaa

SEQ ID NO: 1655352 - RNA, 19 nt, Artificial Sequence
  Description of Artificial Sequence: Synthetic oligonucleotide
accaaagagagguaaugca

SEQ ID NO: 1655353 - RNA, 19 nt, Artificial Sequence
  Description of Artificial Sequence: Synthetic oligonucleotide
ugccguagcaaucccaaug

SEQ ID NO: 1655354 - RNA, 19 nt, Artificial Sequence
  Description of Artificial Sequence: Synthetic oligonucleotide
guaaucucacccugcagag

SEQ ID NO: 1655355 - RNA, 19 nt, Artificial Sequence
  Description of Artificial Sequence: Synthetic oligonucleotide
agaauggguggaaauuugc

SEQ ID NO: 1655356 - RNA, 19 nt, Artificial Sequence
  Description of Artificial Sequence: Synthetic oligonucleotide
ucugugggagcacucaagu

SEQ ID NO: 1655357 - RNA, 19 nt, Artificial Sequence
  Description of Artificial Sequence: Synthetic oligonucleotide
uaucaaggauccgacaagc

SEQ ID NO: 1655358 - RNA, 19 nt, Artificial Sequence
  Description of Artificial Sequence: Synthetic oligonucleotide
aacccauacacaguagucu

SEQ ID NO: 1655359 - RNA, 19 nt, Artificial Sequence
  Description of Artificial Sequence: Synthetic oligonucleotide
uucuccuucccugucaaag

SEQ ID NO: 1655360 - RNA, 19 nt, Artificial Sequence
  Description of Artificial Sequence: Synthetic oligonucleotide
uauuaacccuuucagccuc

SEQ ID NO: 1655361 - RNA, 19 nt, Artificial Sequence
  Description of Artificial Sequence: Synthetic oligonucleotide
uucaacucaucucuguuuu

SEQ ID NO: 1655362 - RNA, 19 nt, Artificial Sequence
  Description of Artificial Sequence: Synthetic oligonucleotide
cauuaagauggguucugcc

SEQ ID NO: 1655363 - RNA, 19 nt, Artificial Sequence
  Description of Artificial Sequence: Synthetic oligonucleotide
ccagauuucacaaaugguc

SEQ ID NO: 1655364 - RNA, 19 nt, Artificial Sequence
  Description of Artificial Sequence: Synthetic oligonucleotide
uguuuucagcauuuguagu

SEQ ID NO: 1655365 - RNA, 19 nt, Artificial Sequence
  Description of Artificial Sequence: Synthetic oligonucleotide
uugauuugucaucccaaac

SEQ ID NO: 1655366 - RNA, 19 nt, Artificial Sequence
  Description of Artificial Sequence: Synthetic oligonucleotide
gaacucuaacgcaaugggg

SEQ ID NO: 1655367 - RNA, 19 nt, Artificial Sequence
  Description of Artificial Sequence: Synthetic oligonucleotide
auuaguaggaucaugucuu

SEQ ID NO: 1655368 - RNA, 19 nt, Artificial Sequence
  Description of Artificial Sequence: Synthetic oligonucleotide
uuuccuuuuccgugauacg

SEQ ID NO: 1655369 - RNA, 19 nt, Artificial Sequence
  Description of Artificial Sequence: Synthetic oligonucleotide
aauguaucaucgucacuau

SEQ ID NO: 1655370 - RNA, 19 nt, Artificial Sequence
  Description of Artificial Sequence: Synthetic oligonucleotide
uccuuuuccgugauacggc

SEQ ID NO: 1655371 - RNA, 19 nt, Artificial Sequence
  Description of Artificial Sequence: Synthetic oligonucleotide
uucggagaggccuucuuug

SEQ ID NO: 1655372 - RNA, 19 nt, Artificial Sequence
  Description of Artificial Sequence: Synthetic oligonucleotide
uuauuaguaggaucauguc

SEQ ID NO: 1655373 - RNA, 19 nt, Artificial Sequence
  Description of Artificial Sequence: Synthetic oligonucleotide
guucuggacgcuugggugg

SEQ ID NO: 1655374 - RNA, 19 nt, Artificial Sequence
  Description of Artificial Sequence: Synthetic oligonucleotide
cagaugaaguuucuuccgg

SEQ ID NO: 1655375 - RNA, 19 nt, Artificial Sequence
  Description of Artificial Sequence: Synthetic oligonucleotide
guaucaaggauccgacaag

SEQ ID NO: 1655376 - RNA, 19 nt, Artificial Sequence
  Description of Artificial Sequence: Synthetic oligonucleotide
gaaguuucuuccgggacag

SEQ ID NO: 1655377 - RNA, 19 nt, Artificial Sequence
  Description of Artificial Sequence: Synthetic oligonucleotide
uucuuuccugagugaaugg

SEQ ID NO: 1655378 - RNA, 19 nt, Artificial Sequence
  Description of Artificial Sequence: Synthetic oligonucleotide
uuuucagcauuuguagucu

SEQ ID NO: 1655379 - RNA, 19 nt, Artificial Sequence
  Description of Artificial Sequence: Synthetic oligonucleotide
uucuuuccuuaguucaaag

SEQ ID NO: 1655380 - RNA, 19 nt, Artificial Sequence
  Description of Artificial Sequence: Synthetic oligonucleotide
cagauuucacaaaugguca

SEQ ID NO: 1655381 - RNA, 19 nt, Artificial Sequence
  Description of Artificial Sequence: Synthetic oligonucleotide
uucauuaaaguuggaggga

SEQ ID NO: 1655382 - RNA, 19 nt, Artificial Sequence
  Description of Artificial Sequence: Synthetic oligonucleotide
uuuccgcuggcuuuacaag

SEQ ID NO: 1655383 - RNA, 19 nt, Artificial Sequence
  Description of Artificial Sequence: Synthetic oligonucleotide
agccauacuugucauuaag

SEQ ID NO: 1655384 - RNA, 19 nt, Artificial Sequence
  Description of Artificial Sequence: Synthetic oligonucleotide
gaauggguggaaauuugcc

SEQ ID NO: 1655385 - RNA, 19 nt, Artificial Sequence
  Description of Artificial Sequence: Synthetic oligonucleotide
cauccugugguccgcaagg

SEQ ID NO: 1655386 - RNA, 19 nt, Artificial Sequence
  Description of Artificial Sequence: Synthetic oligonucleotide
uuacuaauuuucaguguau

SEQ ID NO: 1655387 - RNA, 19 nt, Artificial Sequence
  Description of Artificial Sequence: Synthetic oligonucleotide
aacgcaaugggguucucuu

SEQ ID NO: 1655388 - RNA, 19 nt, Artificial Sequence
  Description of Artificial Sequence: Synthetic oligonucleotide
aaguuggagggaguucugg

SEQ ID NO: 1655389 - RNA, 19 nt, Artificial Sequence
  Description of Artificial Sequence: Synthetic oligonucleotide
aucugaacuucccuggcca

SEQ ID NO: 1655390 - RNA, 19 nt, Artificial Sequence
  Description of Artificial Sequence: Synthetic oligonucleotide
aucaugucuuuuauuuuac

SEQ ID NO: 1655391 - RNA, 19 nt, Artificial Sequence
  Description of Artificial Sequence: Synthetic oligonucleotide
auuuccgcuggcuuuacaa

SEQ ID NO: 1655392 - RNA, 19 nt, Artificial Sequence
  Description of Artificial Sequence: Synthetic oligonucleotide
acccauacacaguagucug

SEQ ID NO: 1655393 - RNA, 19 nt, Artificial Sequence
  Description of Artificial Sequence: Synthetic oligonucleotide
auaaaaugccuccgguccu

SEQ ID NO: 1655394 - RNA, 19 nt, Artificial Sequence
  Description of Artificial Sequence: Synthetic oligonucleotide
ugagucaucuacagguaau

SEQ ID NO: 1655395 - RNA, 19 nt, Artificial Sequence
  Description of Artificial Sequence: Synthetic oligonucleotide
uugagucaucuacagguaa

SEQ ID NO: 1655396 - RNA, 19 nt, Artificial Sequence
  Description of Artificial Sequence: Synthetic oligonucleotide
cacauucauucccuggugc

SEQ ID NO: 1655397 - RNA, 19 nt, Artificial Sequence
  Description of Artificial Sequence: Synthetic oligonucleotide
cagauaauuuuaggaagcc

SEQ ID NO: 1655398 - RNA, 19 nt, Artificial Sequence
  Description of Artificial Sequence: Synthetic oligonucleotide
uccccugagagcacucggg

SEQ ID NO: 1655399 - RNA, 19 nt, Artificial Sequence
  Description of Artificial Sequence: Synthetic oligonucleotide
cugggcagauaauuuuagg

SEQ ID NO: 1655400 - RNA, 19 nt, Artificial Sequence
  Description of Artificial Sequence: Synthetic oligonucleotide
acauucauucccuggugcu

SEQ ID NO: 1655401 - RNA, 19 nt, Artificial Sequence
  Description of Artificial Sequence: Synthetic oligonucleotide
ugucauuaagauggguucu

SEQ ID NO: 1655402 - RNA, 19 nt, Artificial Sequence
  Description of Artificial Sequence: Synthetic oligonucleotide
auagccauacuugucauua

SEQ ID NO: 1655403 - RNA, 19 nt, Artificial Sequence
  Description of Artificial Sequence: Synthetic oligonucleotide
aucaauagccauacuuguc

SEQ ID NO: 1655404 - RNA, 19 nt, Artificial Sequence
  Description of Artificial Sequence: Synthetic oligonucleotide
cagccuacugcucccaucc

SEQ ID NO: 1655405 - RNA, 19 nt, Artificial Sequence
  Description of Artificial Sequence: Synthetic oligonucleotide
ugauacggcuuccugccgu

SEQ ID NO: 1655406 - RNA, 19 nt, Artificial Sequence
  Description of Artificial Sequence: Synthetic oligonucleotide
ugaacuucccuggccauca

SEQ ID NO: 1655407 - RNA, 19 nt, Artificial Sequence
  Description of Artificial Sequence: Synthetic oligonucleotide
ucaugucuuuuauuuuacu

SEQ ID NO: 1655408 - RNA, 19 nt, Artificial Sequence
  Description of Artificial Sequence: Synthetic oligonucleotide
augcaaguuucuuagcuuu

SEQ ID NO: 1655409 - RNA, 19 nt, Artificial Sequence
  Description of Artificial Sequence: Synthetic oligonucleotide
agccucguccucuacagca

SEQ ID NO: 1655410 - RNA, 19 nt, Artificial Sequence
  Description of Artificial Sequence: Synthetic oligonucleotide
aucuucaggguauuuggaa

SEQ ID NO: 1655411 - RNA, 19 nt, Artificial Sequence
  Description of Artificial Sequence: Synthetic oligonucleotide
ucauuaagauggguucugc

SEQ ID NO: 1655412 - RNA, 19 nt, Artificial Sequence
  Description of Artificial Sequence: Synthetic oligonucleotide
uccuucccugucaaagaag

SEQ ID NO: 1655413 - RNA, 19 nt, Artificial Sequence
  Description of Artificial Sequence: Synthetic oligonucleotide
caauguaucaaggauccga

SEQ ID NO: 1655414 - RNA, 19 nt, Artificial Sequence
  Description of Artificial Sequence: Synthetic oligonucleotide
gaauuugcuuccuccuuuc

SEQ ID NO: 1655415 - RNA, 19 nt, Artificial Sequence
  Description of Artificial Sequence: Synthetic oligonucleotide
uguugaacucuaacgcaau

SEQ ID NO: 1655416 - RNA, 19 nt, Artificial Sequence
  Description of Artificial Sequence: Synthetic oligonucleotide
acaagcuuccagcgagcac

SEQ ID NO: 1655417 - RNA, 19 nt, Artificial Sequence
  Description of Artificial Sequence: Synthetic oligonucleotide
agauaauuuuaggaagcca

SEQ ID NO: 1655418 - RNA, 19 nt, Artificial Sequence
  Description of Artificial Sequence: Synthetic oligonucleotide
aauagccauacuugucauu

SEQ ID NO: 1655419 - RNA, 19 nt, Artificial Sequence
  Description of Artificial Sequence: Synthetic oligonucleotide
uggucaucugaacuucccu

SEQ ID NO: 1655420 - RNA, 19 nt, Artificial Sequence
  Description of Artificial Sequence: Synthetic oligonucleotide
auuaaaguuggagggaguu

SEQ ID NO: 1655421 - RNA, 19 nt, Artificial Sequence
  Description of Artificial Sequence: Synthetic oligonucleotide
guaaugcaaguuucuuagc

SEQ ID NO: 1655422 - RNA, 19 nt, Artificial Sequence
  Description of Artificial Sequence: Synthetic oligonucleotide
ccuuuauauaaaaugccuc

SEQ ID NO: 1655423 - RNA, 19 nt, Artificial Sequence
  Description of Artificial Sequence: Synthetic oligonucleotide
cuuccugccguagcaaucc

SEQ ID NO: 1655424 - RNA, 19 nt, Artificial Sequence
  Description of Artificial Sequence: Synthetic oligonucleotide
ucuaacgcaaugggguucu

SEQ ID NO: 1655425 - RNA, 19 nt, Artificial Sequence
  Description of Artificial Sequence: Synthetic oligonucleotide
uccucuacagcaucuucuc

SEQ ID NO: 1655426 - RNA, 19 nt, Artificial Sequence
  Description of Artificial Sequence: Synthetic oligonucleotide
ggacaggaauguaucaucg

SEQ ID NO: 1655427 - RNA, 19 nt, Artificial Sequence
  Description of Artificial Sequence: Synthetic oligonucleotide
uccgcaaggucuuccuuug

SEQ ID NO: 1655428 - RNA, 19 nt, Artificial Sequence
  Description of Artificial Sequence: Synthetic oligonucleotide
uuugggacucugaaccaau

SEQ ID NO: 1655429 - RNA, 19 nt, Artificial Sequence
  Description of Artificial Sequence: Synthetic oligonucleotide
gcagauaauuuuaggaagc

SEQ ID NO: 1655430 - RNA, 19 nt, Artificial Sequence
  Description of Artificial Sequence: Synthetic oligonucleotide
cuucaggguauuuggaaga

SEQ ID NO: 1655431 - RNA, 19 nt, Artificial Sequence
  Description of Artificial Sequence: Synthetic oligonucleotide
uccagcgagcacugaauca

SEQ ID NO: 1655432 - RNA, 19 nt, Artificial Sequence
  Description of Artificial Sequence: Synthetic oligonucleotide
aguuucuuccgggacagga

SEQ ID NO: 1655433 - RNA, 19 nt, Artificial Sequence
  Description of Artificial Sequence: Synthetic oligonucleotide
ugggguucucuucagccuc

SEQ ID NO: 1655434 - RNA, 19 nt, Artificial Sequence
  Description of Artificial Sequence: Synthetic oligonucleotide
uuaaaguuggagggaguuc

SEQ ID NO: 1655435 - RNA, 19 nt, Artificial Sequence
  Description of Artificial Sequence: Synthetic oligonucleotide
uccgugauacggcuuccug

SEQ ID NO: 1655436 - RNA, 19 nt, Artificial Sequence
  Description of Artificial Sequence: Synthetic oligonucleotide
uggaacccauacacaguag

SEQ ID NO: 1655437 - RNA, 19 nt, Artificial Sequence
  Description of Artificial Sequence: Synthetic oligonucleotide
caucugaacuucccuggcc

SEQ ID NO: 1655438 - RNA, 19 nt, Artificial Sequence
  Description of Artificial Sequence: Synthetic oligonucleotide
uacuaauuuucaguguaua

SEQ ID NO: 1655439 - RNA, 19 nt, Artificial Sequence
  Description of Artificial Sequence: Synthetic oligonucleotide
uuggguggcaacuucccua

SEQ ID NO: 1655440 - RNA, 19 nt, Artificial Sequence
  Description of Artificial Sequence: Synthetic oligonucleotide
ucuuuggauccuuuauaua

SEQ ID NO: 1655441 - RNA, 19 nt, Artificial Sequence
  Description of Artificial Sequence: Synthetic oligonucleotide
uuccuuugggacucugaac

SEQ ID NO: 1655442 - RNA, 19 nt, Artificial Sequence
  Description of Artificial Sequence: Synthetic oligonucleotide
cauggcaccaaagagaggu

SEQ ID NO: 1655443 - RNA, 19 nt, Artificial Sequence
  Description of Artificial Sequence: Synthetic oligonucleotide
aacuucccuggccaucacu

SEQ ID NO: 1655444 - RNA, 19 nt, Artificial Sequence
  Description of Artificial Sequence: Synthetic oligonucleotide
uaauuugaauuugcuuccu

SEQ ID NO: 1655445 - RNA, 19 nt, Artificial Sequence
  Description of Artificial Sequence: Synthetic oligonucleotide
aguguauaugguuccuuuu

SEQ ID NO: 1655446 - RNA, 19 nt, Artificial Sequence
  Description of Artificial Sequence: Synthetic oligonucleotide
aacuucccuacaguuccag

SEQ ID NO: 1655447 - RNA, 19 nt, Artificial Sequence
  Description of Artificial Sequence: Synthetic oligonucleotide
caguugagucaucuacagg

SEQ ID NO: 1655448 - RNA, 19 nt, Artificial Sequence
  Description of Artificial Sequence: Synthetic oligonucleotide
uuccagcgagcacugaauc

SEQ ID NO: 1655449 - RNA, 19 nt, Artificial Sequence
  Description of Artificial Sequence: Synthetic oligonucleotide
uuccgggacaggaauguau

SEQ ID NO: 1655450 - RNA, 19 nt, Artificial Sequence
  Description of Artificial Sequence: Synthetic oligonucleotide
ucuuccgggacaggaaugu

SEQ ID NO: 1655451 - RNA, 19 nt, Artificial Sequence
  Description of Artificial Sequence: Synthetic oligonucleotide
cauucccuggugcuguggc

SEQ ID NO: 1655452 - RNA, 19 nt, Artificial Sequence
  Description of Artificial Sequence: Synthetic oligonucleotide
uccgacaagcuuccagcga

SEQ ID NO: 1655453 - RNA, 19 nt, Artificial Sequence
  Description of Artificial Sequence: Synthetic oligonucleotide
ugugucccugcucaucaaa

SEQ ID NO: 1655454 - RNA, 19 nt, Artificial Sequence
  Description of Artificial Sequence: Synthetic oligonucleotide
acauccugugguccgcaag

SEQ ID NO: 1655455 - RNA, 19 nt, Artificial Sequence
  Description of Artificial Sequence: Synthetic oligonucleotide
gaaauuugccuggaccaga

SEQ ID NO: 1655456 - RNA, 19 nt, Artificial Sequence
  Description of Artificial Sequence: Synthetic oligonucleotide
ucccugucaaagaagccuu

SEQ ID NO: 1655457 - RNA, 19 nt, Artificial Sequence
  Description of Artificial Sequence: Synthetic oligonucleotide
acgcaaugggguucucuuc

SEQ ID NO: 1655458 - RNA, 19 nt, Artificial Sequence
  Description of Artificial Sequence: Synthetic oligonucleotide
cuugucauuaagauggguu

SEQ ID NO: 1655459 - RNA, 19 nt, Artificial Sequence
  Description of Artificial Sequence: Synthetic oligonucleotide
cuguugaacucuaacgcaa

SEQ ID NO: 1655460 - RNA, 19 nt, Artificial Sequence
  Description of Artificial Sequence: Synthetic oligonucleotide
cagcauuuguagucugaag

SEQ ID NO: 1655461 - RNA, 19 nt, Artificial Sequence
  Description of Artificial Sequence: Synthetic oligonucleotide
agguaaucucacccugcag

SEQ ID NO: 1655462 - RNA, 19 nt, Artificial Sequence
  Description of Artificial Sequence: Synthetic oligonucleotide
agcgagcacugaaucaucg

SEQ ID NO: 1655463 - RNA, 19 nt, Artificial Sequence
  Description of Artificial Sequence: Synthetic oligonucleotide
gcaaucccaauguaucaag

SEQ ID NO: 1655464 - RNA, 19 nt, Artificial Sequence
  Description of Artificial Sequence: Synthetic oligonucleotide
gucauuaagauggguucug

SEQ ID NO: 1655465 - RNA, 19 nt, Artificial Sequence
  Description of Artificial Sequence: Synthetic oligonucleotide
ccaaacauccugugguccg

SEQ ID NO: 1655466 - RNA, 19 nt, Artificial Sequence
  Description of Artificial Sequence: Synthetic oligonucleotide
agucaucuacagguaaucu

SEQ ID NO: 1655467 - RNA, 19 nt, Artificial Sequence
  Description of Artificial Sequence: Synthetic oligonucleotide
auguaucaaggauccgaca

SEQ ID NO: 1655468 - RNA, 19 nt, Artificial Sequence
  Description of Artificial Sequence: Synthetic oligonucleotide
ucacuugauuugucauccc

SEQ ID NO: 1655469 - RNA, 19 nt, Artificial Sequence
  Description of Artificial Sequence: Synthetic oligonucleotide
uaagauggguucugccauc

SEQ ID NO: 1655470 - RNA, 19 nt, Artificial Sequence
  Description of Artificial Sequence: Synthetic oligonucleotide
guggaacccauacacagua

SEQ ID NO: 1655471 - RNA, 19 nt, Artificial Sequence
  Description of Artificial Sequence: Synthetic oligonucleotide
gggcagauaauuuuaggaa

SEQ ID NO: 1655472 - RNA, 19 nt, Artificial Sequence
  Description of Artificial Sequence: Synthetic oligonucleotide
uacggcuuccugccguagc

SEQ ID NO: 1655473 - RNA, 19 nt, Artificial Sequence
  Description of Artificial Sequence: Synthetic oligonucleotide
acucgggaucugugggagc

SEQ ID NO: 1655474 - RNA, 19 nt, Artificial Sequence
  Description of Artificial Sequence: Synthetic oligonucleotide
gaagccuucggagaggccu

SEQ ID NO: 1655475 - RNA, 19 nt, Artificial Sequence
  Description of Artificial Sequence: Synthetic oligonucleotide
ggauccgacaagcuuccag

SEQ ID NO: 1655476 - RNA, 19 nt, Artificial Sequence
  Description of Artificial Sequence: Synthetic oligonucleotide
uccugagugaauggccuca

SEQ ID NO: 1655477 - RNA, 19 nt, Artificial Sequence
  Description of Artificial Sequence: Synthetic oligonucleotide
gacucugaaccaaucaaua

SEQ ID NO: 1655478 - RNA, 19 nt, Artificial Sequence
  Description of Artificial Sequence: Synthetic oligonucleotide
ucaucgucacuaucauaaa

SEQ ID NO: 1655479 - RNA, 19 nt, Artificial Sequence
  Description of Artificial Sequence: Synthetic oligonucleotide
uuaguaggaucaugucuuu

SEQ ID NO: 1655480 - RNA, 19 nt, Artificial Sequence
  Description of Artificial Sequence: Synthetic oligonucleotide
uguccccugagagcacucg

SEQ ID NO: 1655481 - RNA, 19 nt, Artificial Sequence
  Description of Artificial Sequence: Synthetic oligonucleotide
uggaccagacgcuuucuuu

SEQ ID NO: 1655482 - RNA, 19 nt, Artificial Sequence
  Description of Artificial Sequence: Synthetic oligonucleotide
gagaggccuucuuuggauc

SEQ ID NO: 1655483 - RNA, 19 nt, Artificial Sequence
  Description of Artificial Sequence: Synthetic oligonucleotide
aaucuucgucuucccaguu

SEQ ID NO: 1655484 - RNA, 19 nt, Artificial Sequence
  Description of Artificial Sequence: Synthetic oligonucleotide
acucuaacgcaaugggguu

SEQ ID NO: 1655485 - RNA, 19 nt, Artificial Sequence
  Description of Artificial Sequence: Synthetic oligonucleotide
cacuugauuugucauccca

SEQ ID NO: 1655486 - RNA, 19 nt, Artificial Sequence
  Description of Artificial Sequence: Synthetic oligonucleotide
ggguauuuggaagaaagaa

SEQ ID NO: 1655487 - RNA, 19 nt, Artificial Sequence
  Description of Artificial Sequence: Synthetic oligonucleotide
uggcaacuucccuacaguu

SEQ ID NO: 1655488 - RNA, 19 nt, Artificial Sequence
  Description of Artificial Sequence: Synthetic oligonucleotide
uucaggguauuuggaagaa

SEQ ID NO: 1655489 - RNA, 19 nt, Artificial Sequence
  Description of Artificial Sequence: Synthetic oligonucleotide
cauucauucccuggugcug

SEQ ID NO: 1655490 - RNA, 19 nt, Artificial Sequence
  Description of Artificial Sequence: Synthetic oligonucleotide
ggaagaaagaaugggugga

SEQ ID NO: 1655491 - RNA, 19 nt, Artificial Sequence
  Description of Artificial Sequence: Synthetic oligonucleotide
uccgcuggcuuuacaaguu

SEQ ID NO: 1655492 - RNA, 19 nt, Artificial Sequence
  Description of Artificial Sequence: Synthetic oligonucleotide
uuaggaagccaggaauaua

SEQ ID NO: 1655493 - RNA, 19 nt, Artificial Sequence
  Description of Artificial Sequence: Synthetic oligonucleotide
ggaaauuugccuggaccag

SEQ ID NO: 1655494 - RNA, 19 nt, Artificial Sequence
  Description of Artificial Sequence: Synthetic oligonucleotide
uccugccguagcaauccca

SEQ ID NO: 1655495 - RNA, 19 nt, Artificial Sequence
  Description of Artificial Sequence: Synthetic oligonucleotide
acggcuuccugccguagca

SEQ ID NO: 1655496 - RNA, 19 nt, Artificial Sequence
  Description of Artificial Sequence: Synthetic oligonucleotide
caaauggucaucugaacuu

SEQ ID NO: 1655497 - RNA, 19 nt, Artificial Sequence
  Description of Artificial Sequence: Synthetic oligonucleotide
agcaaucccaauguaucaa

SEQ ID NO: 1655498 - RNA, 19 nt, Artificial Sequence
  Description of Artificial Sequence: Synthetic oligonucleotide
aaguccugcacugcuguuu

SEQ ID NO: 1655499 - RNA, 19 nt, Artificial Sequence
  Description of Artificial Sequence: Synthetic oligonucleotide
augccuccgguccuguuga

SEQ ID NO: 1655500 - RNA, 19 nt, Artificial Sequence
  Description of Artificial Sequence: Synthetic oligonucleotide
ucauucccuggugcugugg

SEQ ID NO: 1655501 - RNA, 19 nt, Artificial Sequence
  Description of Artificial Sequence: Synthetic oligonucleotide
caaacauccugugguccgc

SEQ ID NO: 1655502 - RNA, 19 nt, Artificial Sequence
  Description of Artificial Sequence: Synthetic oligonucleotide
guccccugagagcacucgg

SEQ ID NO: 1655503 - RNA, 19 nt, Artificial Sequence
  Description of Artificial Sequence: Synthetic oligonucleotide
aggguauuuggaagaaaga

SEQ ID NO: 1655504 - RNA, 19 nt, Artificial Sequence
  Description of Artificial Sequence: Synthetic oligonucleotide
gguccuguugaacucuaac

SEQ ID NO: 1655505 - RNA, 19 nt, Artificial Sequence
  Description of Artificial Sequence: Synthetic oligonucleotide
uggccaucacuugauuugu

SEQ ID NO: 1655506 - RNA, 19 nt, Artificial Sequence
  Description of Artificial Sequence: Synthetic oligonucleotide
caucgucacuaucauaaaa

SEQ ID NO: 1655507 - RNA, 19 nt, Artificial Sequence
  Description of Artificial Sequence: Synthetic oligonucleotide
ccgacaagcuuccagcgag

SEQ ID NO: 1655508 - RNA, 19 nt, Artificial Sequence
  Description of Artificial Sequence: Synthetic oligonucleotide
gugauacggcuuccugccg

SEQ ID NO: 1655509 - RNA, 19 nt, Artificial Sequence
  Description of Artificial Sequence: Synthetic oligonucleotide
uaacgcaaugggguucucu

SEQ ID NO: 1655510 - RNA, 19 nt, Artificial Sequence
  Description of Artificial Sequence: Synthetic oligonucleotide
aaacauccugugguccgca

SEQ ID NO: 1655511 - RNA, 19 nt, Artificial Sequence
  Description of Artificial Sequence: Synthetic oligonucleotide
agucaccagauuucacaaa

SEQ ID NO: 1655512 - RNA, 19 nt, Artificial Sequence
  Description of Artificial Sequence: Synthetic oligonucleotide
cuccuucgauuucuccucc

SEQ ID NO: 1655513 - RNA, 19 nt, Artificial Sequence
  Description of Artificial Sequence: Synthetic oligonucleotide
ucccuacaguuccaguuuu

SEQ ID NO: 1655514 - RNA, 19 nt, Artificial Sequence
  Description of Artificial Sequence: Synthetic oligonucleotide
gaucugugggagcacucaa

SEQ ID NO: 1655515 - RNA, 19 nt, Artificial Sequence
  Description of Artificial Sequence: Synthetic oligonucleotide
aaaaugccuccgguccugu

SEQ ID NO: 1655516 - RNA, 19 nt, Artificial Sequence
  Description of Artificial Sequence: Synthetic oligonucleotide
cauccuucauuuucauuaa

SEQ ID NO: 1655517 - RNA, 19 nt, Artificial Sequence
  Description of Artificial Sequence: Synthetic oligonucleotide
aacauccugugguccgcaa

SEQ ID NO: 1655518 - RNA, 19 nt, Artificial Sequence
  Description of Artificial Sequence: Synthetic oligonucleotide
caucuucucccauucccca

SEQ ID NO: 1655519 - RNA, 19 nt, Artificial Sequence
  Description of Artificial Sequence: Synthetic oligonucleotide
uucauucccuggugcugug

SEQ ID NO: 1655520 - RNA, 19 nt, Artificial Sequence
  Description of Artificial Sequence: Synthetic oligonucleotide
cugugggagcacucaaguc

SEQ ID NO: 1655521 - RNA, 19 nt, Artificial Sequence
  Description of Artificial Sequence: Synthetic oligonucleotide
uccugugguccgcaagguc

SEQ ID NO: 1655522 - RNA, 19 nt, Artificial Sequence
  Description of Artificial Sequence: Synthetic oligonucleotide
aaguuucuuccgggacagg

SEQ ID NO: 1655523 - RNA, 19 nt, Artificial Sequence
  Description of Artificial Sequence: Synthetic oligonucleotide
ccaaagagagguaaugcaa

SEQ ID NO: 1655524 - RNA, 19 nt, Artificial Sequence
  Description of Artificial Sequence: Synthetic oligonucleotide
gggaguucuggacgcuugg

SEQ ID NO: 1655525 - RNA, 19 nt, Artificial Sequence
  Description of Artificial Sequence: Synthetic oligonucleotide
gacaggaauguaucaucgu

SEQ ID NO: 1655526 - RNA, 19 nt, Artificial Sequence
  Description of Artificial Sequence: Synthetic oligonucleotide
uuccuccuuucauggcacc

SEQ ID NO: 1655527 - RNA, 19 nt, Artificial Sequence
  Description of Artificial Sequence: Synthetic oligonucleotide
uuuccgugauacggcuucc

SEQ ID NO: 1655528 - RNA, 19 nt, Artificial Sequence
  Description of Artificial Sequence: Synthetic oligonucleotide
ucaggguauuuggaagaaa

SEQ ID NO: 1655529 - RNA, 19 nt, Artificial Sequence
  Description of Artificial Sequence: Synthetic oligonucleotide
cacucgggaucugugggag

SEQ ID NO: 1655530 - RNA, 19 nt, Artificial Sequence
  Description of Artificial Sequence: Synthetic oligonucleotide
uuccugccguagcaauccc

SEQ ID NO: 1655531 - RNA, 19 nt, Artificial Sequence
  Description of Artificial Sequence: Synthetic oligonucleotide
ccgugauacggcuuccugc

SEQ ID NO: 1655532 - RNA, 19 nt, Artificial Sequence
  Description of Artificial Sequence: Synthetic oligonucleotide
cccauacacaguagucugg

SEQ ID NO: 1655533 - RNA, 19 nt, Artificial Sequence
  Description of Artificial Sequence: Synthetic oligonucleotide
gcaccaaagagagguaaug

SEQ ID NO: 1655534 - RNA, 19 nt, Artificial Sequence
  Description of Artificial Sequence: Synthetic oligonucleotide
gguauuuggaagaaagaau

SEQ ID NO: 1655535 - RNA, 19 nt, Artificial Sequence
  Description of Artificial Sequence: Synthetic oligonucleotide
uggguucugccaucuccac

SEQ ID NO: 1655536 - RNA, 19 nt, Artificial Sequence
  Description of Artificial Sequence: Synthetic oligonucleotide
accaaucaauagccauacu

SEQ ID NO: 1655537 - RNA, 19 nt, Artificial Sequence
  Description of Artificial Sequence: Synthetic oligonucleotide
uccgguccuguugaacucu

SEQ ID NO: 1655538 - RNA, 19 nt, Artificial Sequence
  Description of Artificial Sequence: Synthetic oligonucleotide
cuacagguaaucucacccu

SEQ ID NO: 1655539 - RNA, 19 nt, Artificial Sequence
  Description of Artificial Sequence: Synthetic oligonucleotide
aucaaggauccgacaagcu

SEQ ID NO: 1655540 - RNA, 19 nt, Artificial Sequence
  Description of Artificial Sequence: Synthetic oligonucleotide
guaggaucaugucuuuuau

SEQ ID NO: 1655541 - RNA, 19 nt, Artificial Sequence
  Description of Artificial Sequence: Synthetic oligonucleotide
cucuaacgcaaugggguuc

SEQ ID NO: 1655542 - RNA, 19 nt, Artificial Sequence
  Description of Artificial Sequence: Synthetic oligonucleotide
agagcacucgggaucugug

SEQ ID NO: 1655543 - RNA, 19 nt, Artificial Sequence
  Description of Artificial Sequence: Synthetic oligonucleotide
ccuguugaacucuaacgca

SEQ ID NO: 1655544 - RNA, 19 nt, Artificial Sequence
  Description of Artificial Sequence: Synthetic oligonucleotide
agccagucaccagauuuca

SEQ ID NO: 1655545 - RNA, 19 nt, Artificial Sequence
  Description of Artificial Sequence: Synthetic oligonucleotide
cacucaaguccugcacugc

SEQ ID NO: 1655546 - RNA, 19 nt, Artificial Sequence
  Description of Artificial Sequence: Synthetic oligonucleotide
ccuuaguucaaaguccuca

SEQ ID NO: 1655547 - RNA, 19 nt, Artificial Sequence
  Description of Artificial Sequence: Synthetic oligonucleotide
ucccauccuccauuugcuc

SEQ ID NO: 1655548 - RNA, 19 nt, Artificial Sequence
  Description of Artificial Sequence: Synthetic oligonucleotide
ggaacccauacacaguagu

SEQ ID NO: 1655549 - RNA, 19 nt, Artificial Sequence
  Description of Artificial Sequence: Synthetic oligonucleotide
ggaguucuggacgcuuggg

SEQ ID NO: 1655550 - RNA, 19 nt, Artificial Sequence
  Description of Artificial Sequence: Synthetic oligonucleotide
cucgggaucugugggagca

SEQ ID NO: 1655551 - RNA, 19 nt, Artificial Sequence
  Description of Artificial Sequence: Synthetic oligonucleotide
gauacggcuuccugccgua

SEQ ID NO: 1655552 - RNA, 19 nt, Artificial Sequence
  Description of Artificial Sequence: Synthetic oligonucleotide
aauccacugggcagauaau

SEQ ID NO: 1655553 - RNA, 19 nt, Artificial Sequence
  Description of Artificial Sequence: Synthetic oligonucleotide
aaaugccuccgguccuguu

SEQ ID NO: 1655554 - RNA, 19 nt, Artificial Sequence
  Description of Artificial Sequence: Synthetic oligonucleotide
gguggaaauuugccuggac

SEQ ID NO: 1655555 - RNA, 19 nt, Artificial Sequence
  Description of Artificial Sequence: Synthetic oligonucleotide
ccuccuucgauuucuccuc

SEQ ID NO: 1655556 - RNA, 19 nt, Artificial Sequence
  Description of Artificial Sequence: Synthetic oligonucleotide
cuccgguccuguugaacuc

SEQ ID NO: 1655557 - RNA, 19 nt, Artificial Sequence
  Description of Artificial Sequence: Synthetic oligonucleotide
uucccaguugagucaucua

SEQ ID NO: 1655558 - RNA, 19 nt, Artificial Sequence
  Description of Artificial Sequence: Synthetic oligonucleotide
gguucugccaucuccacuu

SEQ ID NO: 1655559 - RNA, 19 nt, Artificial Sequence
  Description of Artificial Sequence: Synthetic oligonucleotide
agggaguucuggacgcuug

SEQ ID NO: 1655560 - RNA, 19 nt, Artificial Sequence
  Description of Artificial Sequence: Synthetic oligonucleotide
ugggagcacucaaguccug

SEQ ID NO: 1655561 - RNA, 19 nt, Artificial Sequence
  Description of Artificial Sequence: Synthetic oligonucleotide
guugagucaucuacaggua

SEQ ID NO: 1655562 - RNA, 19 nt, Artificial Sequence
  Description of Artificial Sequence: Synthetic oligonucleotide
cuucaacucaucucuguuu

SEQ ID NO: 1655563 - RNA, 19 nt, Artificial Sequence
  Description of Artificial Sequence: Synthetic oligonucleotide
cauuaaaguuggagggagu

SEQ ID NO: 1655564 - RNA, 19 nt, Artificial Sequence
  Description of Artificial Sequence: Synthetic oligonucleotide
ggagcacucaaguccugca

SEQ ID NO: 1655565 - RNA, 19 nt, Artificial Sequence
  Description of Artificial Sequence: Synthetic oligonucleotide
ccaaucaauagccauacuu

SEQ ID NO: 1655566 - RNA, 19 nt, Artificial Sequence
  Description of Artificial Sequence: Synthetic oligonucleotide
auuaacccuuucagccucu

SEQ ID NO: 1655567 - RNA, 19 nt, Artificial Sequence
  Description of Artificial Sequence: Synthetic oligonucleotide
uggacgcuuggguggcaac

SEQ ID NO: 1655568 - RNA, 19 nt, Artificial Sequence
  Description of Artificial Sequence: Synthetic oligonucleotide
uuccgugauacggcuuccu

SEQ ID NO: 1655569 - RNA, 19 nt, Artificial Sequence
  Description of Artificial Sequence: Synthetic oligonucleotide
cagcgagcacugaaucauc

SEQ ID NO: 1655570 - RNA, 19 nt, Artificial Sequence
  Description of Artificial Sequence: Synthetic oligonucleotide
gcgagcacugaaucaucgc

SEQ ID NO: 1655571 - RNA, 19 nt, Artificial Sequence
  Description of Artificial Sequence: Synthetic oligonucleotide
guggcaacuucccuacagu

SEQ ID NO: 1655572 - RNA, 19 nt, Artificial Sequence
  Description of Artificial Sequence: Synthetic oligonucleotide
uuguccccugagagcacuc

SEQ ID NO: 1655573 - RNA, 19 nt, Artificial Sequence
  Description of Artificial Sequence: Synthetic oligonucleotide
cccaaacauccuguggucc

SEQ ID NO: 1655574 - RNA, 19 nt, Artificial Sequence
  Description of Artificial Sequence: Synthetic oligonucleotide
cccaguugagucaucuaca

SEQ ID NO: 1655575 - RNA, 19 nt, Artificial Sequence
  Description of Artificial Sequence: Synthetic oligonucleotide
gccguagcaaucccaaugu

SEQ ID NO: 1655576 - RNA, 19 nt, Artificial Sequence
  Description of Artificial Sequence: Synthetic oligonucleotide
auacggcuuccugccguag

SEQ ID NO: 1655577 - RNA, 19 nt, Artificial Sequence
  Description of Artificial Sequence: Synthetic oligonucleotide
auccugugguccgcaaggu

SEQ ID NO: 1655578 - RNA, 19 nt, Artificial Sequence
  Description of Artificial Sequence: Synthetic oligonucleotide
caguguauaugguuccuuu

SEQ ID NO: 1655579 - RNA, 19 nt, Artificial Sequence
  Description of Artificial Sequence: Synthetic oligonucleotide
uugccuggaccagacgcuu

SEQ ID NO: 1655580 - RNA, 19 nt, Artificial Sequence
  Description of Artificial Sequence: Synthetic oligonucleotide
gggagcacucaaguccugc

SEQ ID NO: 1655581 - RNA, 19 nt, Artificial Sequence
  Description of Artificial Sequence: Synthetic oligonucleotide
aagccuucggagaggccuu

SEQ ID NO: 1655582 - RNA, 19 nt, Artificial Sequence
  Description of Artificial Sequence: Synthetic oligonucleotide
gggguucucuucagccucg

SEQ ID NO: 1655583 - RNA, 19 nt, Artificial Sequence
  Description of Artificial Sequence: Synthetic oligonucleotide
agccuacugcucccauccu

SEQ ID NO: 1655584 - RNA, 19 nt, Artificial Sequence
  Description of Artificial Sequence: Synthetic oligonucleotide
gugggagcacucaaguccu

SEQ ID NO: 1655585 - RNA, 19 nt, Artificial Sequence
  Description of Artificial Sequence: Synthetic oligonucleotide
ccugugguccgcaaggucu

SEQ ID NO: 1655586 - RNA, 19 nt, Artificial Sequence
  Description of Artificial Sequence: Synthetic oligonucleotide
caacuucccuacaguucca

SEQ ID NO: 1655587 - RNA, 19 nt, Artificial Sequence
  Description of Artificial Sequence: Synthetic oligonucleotide
agccaggugcugugucccu

SEQ ID NO: 1655588 - RNA, 19 nt, Artificial Sequence
  Description of Artificial Sequence: Synthetic oligonucleotide
cucuggcagccuacugcuc

SEQ ID NO: 1655589 - RNA, 19 nt, Artificial Sequence
  Description of Artificial Sequence: Synthetic oligonucleotide
ccaauguaucaaggauccg

SEQ ID NO: 1655590 - RNA, 19 nt, Artificial Sequence
  Description of Artificial Sequence: Synthetic oligonucleotide
ggaccagacgcuuucuuuu

SEQ ID NO: 1655591 - RNA, 19 nt, Artificial Sequence
  Description of Artificial Sequence: Synthetic oligonucleotide
guccgcaaggucuuccuuu

SEQ ID NO: 1655592 - RNA, 19 nt, Artificial Sequence
  Description of Artificial Sequence: Synthetic oligonucleotide
gagagcacucgggaucugu

SEQ ID NO: 1655593 - RNA, 19 nt, Artificial Sequence
  Description of Artificial Sequence: Synthetic oligonucleotide
cauccuccauuugcucuuc

SEQ ID NO: 1655594 - RNA, 19 nt, Artificial Sequence
  Description of Artificial Sequence: Synthetic oligonucleotide
cucugucucuggcagccua

SEQ ID NO: 1655595 - RNA, 19 nt, Artificial Sequence
  Description of Artificial Sequence: Synthetic oligonucleotide
ccugccguagcaaucccaa

SEQ ID NO: 1655596 - RNA, 19 nt, Artificial Sequence
  Description of Artificial Sequence: Synthetic oligonucleotide
cugaaucaucgcuucuuuu

SEQ ID NO: 1655597 - RNA, 19 nt, Artificial Sequence
  Description of Artificial Sequence: Synthetic oligonucleotide
gcacucgggaucuguggga

SEQ ID NO: 1655598 - RNA, 19 nt, Artificial Sequence
  Description of Artificial Sequence: Synthetic oligonucleotide
gcagccuacugcucccauc

SEQ ID NO: 1655599 - RNA, 19 nt, Artificial Sequence
  Description of Artificial Sequence: Synthetic oligonucleotide
ucuggacgcuuggguggca

SEQ ID NO: 1655600 - RNA, 19 nt, Artificial Sequence
  Description of Artificial Sequence: Synthetic oligonucleotide
ggaauguaucaucgucacu

SEQ ID NO: 1655601 - RNA, 19 nt, Artificial Sequence
  Description of Artificial Sequence: Synthetic oligonucleotide
cuucggagaggccuucuuu

SEQ ID NO: 1655602 - RNA, 19 nt, Artificial Sequence
  Description of Artificial Sequence: Synthetic oligonucleotide
gguucucuucagccucguc

SEQ ID NO: 1655603 - RNA, 19 nt, Artificial Sequence
  Description of Artificial Sequence: Synthetic oligonucleotide
ccuccgguccuguugaacu

SEQ ID NO: 1655604 - RNA, 19 nt, Artificial Sequence
  Description of Artificial Sequence: Synthetic oligonucleotide
cguagcaaucccaauguau

SEQ ID NO: 1655605 - RNA, 19 nt, Artificial Sequence
  Description of Artificial Sequence: Synthetic oligonucleotide
cccugucaaagaagccuuc

SEQ ID NO: 1655606 - RNA, 19 nt, Artificial Sequence
  Description of Artificial Sequence: Synthetic oligonucleotide
gguggaacccauacacagu

SEQ ID NO: 1655607 - RNA, 19 nt, Artificial Sequence
  Description of Artificial Sequence: Synthetic oligonucleotide
gggauuuccgcuggcuuua

SEQ ID NO: 1655608 - RNA, 19 nt, Artificial Sequence
  Description of Artificial Sequence: Synthetic oligonucleotide
ccuuuuccgugauacggcu

SEQ ID NO: 1655609 - RNA, 19 nt, Artificial Sequence
  Description of Artificial Sequence: Synthetic oligonucleotide
cugugucccugcucaucaa

SEQ ID NO: 1655610 - RNA, 19 nt, Artificial Sequence
  Description of Artificial Sequence: Synthetic oligonucleotide
ccgcaaggucuuccuuugg

SEQ ID NO: 1655611 - RNA, 19 nt, Artificial Sequence
  Description of Artificial Sequence: Synthetic oligonucleotide
gacgcuuggguggcaacuu

SEQ ID NO: 1655612 - RNA, 19 nt, Artificial Sequence
  Description of Artificial Sequence: Synthetic oligonucleotide
cuaacgcaaugggguucuc

SEQ ID NO: 1655613 - RNA, 19 nt, Artificial Sequence
  Description of Artificial Sequence: Synthetic oligonucleotide
ugccuccgguccuguugaa

SEQ ID NO: 1655614 - RNA, 19 nt, Artificial Sequence
  Description of Artificial Sequence: Synthetic oligonucleotide
gccaggugcugugucccug

SEQ ID NO: 1655615 - RNA, 19 nt, Artificial Sequence
  Description of Artificial Sequence: Synthetic oligonucleotide
ccccugagagcacucggga

SEQ ID NO: 1655616 - RNA, 19 nt, Artificial Sequence
  Description of Artificial Sequence: Synthetic oligonucleotide
cuggacgcuuggguggcaa

SEQ ID NO: 1655617 - RNA, 19 nt, Artificial Sequence
  Description of Artificial Sequence: Synthetic oligonucleotide
gagggaguucuggacgcuu

SEQ ID NO: 1655618 - RNA, 19 nt, Artificial Sequence
  Description of Artificial Sequence: Synthetic oligonucleotide
caguagucuggaucaucuu

SEQ ID NO: 1655619 - RNA, 19 nt, Artificial Sequence
  Description of Artificial Sequence: Synthetic oligonucleotide
ggacgcuuggguggcaacu

SEQ ID NO: 1655620 - RNA, 19 nt, Artificial Sequence
  Description of Artificial Sequence: Synthetic oligonucleotide
cuuccgggacaggaaugua

SEQ ID NO: 1655621 - RNA, 19 nt, Artificial Sequence
  Description of Artificial Sequence: Synthetic oligonucleotide
ccagcgagcacugaaucau

SEQ ID NO: 1655622 - RNA, 19 nt, Artificial Sequence
  Description of Artificial Sequence: Synthetic oligonucleotide
ggcuuccugccguagcaau

SEQ ID NO: 1655623 - RNA, 19 nt, Artificial Sequence
  Description of Artificial Sequence: Synthetic oligonucleotide
ggcaccaaagagagguaau

SEQ ID NO: 1655624 - RNA, 19 nt, Artificial Sequence
  Description of Artificial Sequence: Synthetic oligonucleotide
gccuccgguccuguugaac

SEQ ID NO: 1655625 - RNA, 19 nt, Artificial Sequence
  Description of Artificial Sequence: Synthetic oligonucleotide
caaguccugcacugcuguu

SEQ ID NO: 1655626 - RNA, 19 nt, Artificial Sequence
  Description of Artificial Sequence: Synthetic oligonucleotide
cccuuucagccucugcugu

SEQ ID NO: 1655627 - RNA, 19 nt, Artificial Sequence
  Description of Artificial Sequence: Synthetic oligonucleotide
ggguggcaacuucccuaca

SEQ ID NO: 1655628 - RNA, 19 nt, Artificial Sequence
  Description of Artificial Sequence: Synthetic oligonucleotide
cugccguagcaaucccaau

SEQ ID NO: 1655629 - RNA, 19 nt, Artificial Sequence
  Description of Artificial Sequence: Synthetic oligonucleotide
ggaucaucuucaggguauu

SEQ ID NO: 1655630 - RNA, 19 nt, Artificial Sequence
  Description of Artificial Sequence: Synthetic oligonucleotide
ccguagcaaucccaaugua

SEQ ID NO: 1655631 - RNA, 19 nt, Artificial Sequence
  Description of Artificial Sequence: Synthetic oligonucleotide
cccaguucuuggcuuuccu

SEQ ID NO: 1655632 - RNA, 19 nt, Artificial Sequence
  Description of Artificial Sequence: Synthetic oligonucleotide
ggagggaguucuggacgcu

SEQ ID NO: 1655633 - RNA, 19 nt, Artificial Sequence
  Description of Artificial Sequence: Synthetic oligonucleotide
ccgguccuguugaacucua

SEQ ID NO: 1655634 - RNA, 19 nt, Artificial Sequence
  Description of Artificial Sequence: Synthetic oligonucleotide
ggguucucuucagccucgu

SEQ ID NO: 1655635 - RNA, 19 nt, Artificial Sequence
  Description of Artificial Sequence: Synthetic oligonucleotide
ccuucggagaggccuucuu

SEQ ID NO: 1655636 - RNA, 19 nt, Artificial Sequence
  Description of Artificial Sequence: Synthetic oligonucleotide
cgcuggcuuuacaaguuuu

SEQ ID NO: 1655637 - RNA, 19 nt, Artificial Sequence
  Description of Artificial Sequence: Synthetic oligonucleotide
cgguccuguugaacucuaa

SEQ ID NO: 1655638 - RNA, 19 nt, Artificial Sequence
  Description of Artificial Sequence: Synthetic oligonucleotide
gccuucggagaggccuucu

SEQ ID NO: 1655639 - RNA, 19 nt, Artificial Sequence
  Description of Artificial Sequence: Synthetic oligonucleotide
ccgcuggcuuuacaaguuu

SEQ ID NO: 1655640 - RNA, 19 nt, Artificial Sequence
  Description of Artificial Sequence: Synthetic oligonucleotide
cggcuuccugccguagcaa

SEQ ID NO: 1655641 - RNA, 19 nt, Artificial Sequence
  Description of Artificial Sequence: Synthetic oligonucleotide
cccuggccaucacuugauu

SEQ ID NO: 1655642 - RNA, 19 nt, Artificial Sequence
  Description of Artificial Sequence: Synthetic oligonucleotide
ccucagcuaccagcuguuu

SEQ ID NO: 1655643 - RNA, 19 nt, Artificial Sequence
  Description of Artificial Sequence: Synthetic oligonucleotide
aaauacugcauacacaugg

SEQ ID NO: 1655644 - RNA, 19 nt, Artificial Sequence
  Description of Artificial Sequence: Synthetic oligonucleotide
aauacuuuugccuguguuc

SEQ ID NO: 1655645 - RNA, 19 nt, Artificial Sequence
  Description of Artificial Sequence: Synthetic oligonucleotide
aauguuaccauagagauua

SEQ ID NO: 1655646 - RNA, 19 nt, Artificial Sequence
  Description of Artificial Sequence: Synthetic oligonucleotide
augucuauguucuugugcc

SEQ ID NO: 1655647 - RNA, 19 nt, Artificial Sequence
  Description of Artificial Sequence: Synthetic oligonucleotide
auagagauuaggcaucacc

SEQ ID NO: 1655648 - RNA, 19 nt, Artificial Sequence
  Description of Artificial Sequence: Synthetic oligonucleotide
aguggcuuuauucuggagc

SEQ ID NO: 1655649 - RNA, 19 nt, Artificial Sequence
  Description of Artificial Sequence: Synthetic oligonucleotide
uaauuaagcuuccacagcc

SEQ ID NO: 1655650 - RNA, 19 nt, Artificial Sequence
  Description of Artificial Sequence: Synthetic oligonucleotide
aaugcguagggacuuggcc

SEQ ID NO: 1655651 - RNA, 19 nt, Artificial Sequence
  Description of Artificial Sequence: Synthetic oligonucleotide
ugauuuaacaugcaacaug

SEQ ID NO: 1655652 - RNA, 19 nt, Artificial Sequence
  Description of Artificial Sequence: Synthetic oligonucleotide
ucuagcaucaugcaacuug

SEQ ID NO: 1655653 - RNA, 19 nt, Artificial Sequence
  Description of Artificial Sequence: Synthetic oligonucleotide
agcguuggagcucacaugc

SEQ ID NO: 1655654 - RNA, 19 nt, Artificial Sequence
  Description of Artificial Sequence: Synthetic oligonucleotide
aaagcauauucagcaaugc

SEQ ID NO: 1655655 - RNA, 19 nt, Artificial Sequence
  Description of Artificial Sequence: Synthetic oligonucleotide
uagagauuaggcaucacca

SEQ ID NO: 1655656 - RNA, 19 nt, Artificial Sequence
  Description of Artificial Sequence: Synthetic oligonucleotide
ucggauauccuccucauca

SEQ ID NO: 1655657 - RNA, 19 nt, Artificial Sequence
  Description of Artificial Sequence: Synthetic oligonucleotide
uguugugaggaaaugcucc

SEQ ID NO: 1655658 - RNA, 19 nt, Artificial Sequence
  Description of Artificial Sequence: Synthetic oligonucleotide
aggauaauuaagcuuccac

SEQ ID NO: 1655659 - RNA, 19 nt, Artificial Sequence
  Description of Artificial Sequence: Synthetic oligonucleotide
aagcauauucagcaaugcg

SEQ ID NO: 1655660 - RNA, 19 nt, Artificial Sequence
  Description of Artificial Sequence: Synthetic oligonucleotide
gaugugacgaaugaugucc

SEQ ID NO: 1655661 - RNA, 19 nt, Artificial Sequence
  Description of Artificial Sequence: Synthetic oligonucleotide
acagccguuacuuucuuac

SEQ ID NO: 1655662 - RNA, 19 nt, Artificial Sequence
  Description of Artificial Sequence: Synthetic oligonucleotide
ugcuaagacagcuuugcgg

SEQ ID NO: 1655663 - RNA, 19 nt, Artificial Sequence
  Description of Artificial Sequence: Synthetic oligonucleotide
cauacuuagcagauggagg

SEQ ID NO: 1655664 - RNA, 19 nt, Artificial Sequence
  Description of Artificial Sequence: Synthetic oligonucleotide
ucucaaauacugcauacac

SEQ ID NO: 1655665 - RNA, 19 nt, Artificial Sequence
  Description of Artificial Sequence: Synthetic oligonucleotide
ugagauaacugcaaggaua

SEQ ID NO: 1655666 - RNA, 19 nt, Artificial Sequence
  Description of Artificial Sequence: Synthetic oligonucleotide
uacugauuuaacaugcaac

SEQ ID NO: 1655667 - RNA, 19 nt, Artificial Sequence
  Description of Artificial Sequence: Synthetic oligonucleotide
aauacugcauacacauggc

SEQ ID NO: 1655668 - RNA, 19 nt, Artificial Sequence
  Description of Artificial Sequence: Synthetic oligonucleotide
uuaaugaugcggaugugac

SEQ ID NO: 1655669 - RNA, 19 nt, Artificial Sequence
  Description of Artificial Sequence: Synthetic oligonucleotide
guuaccauagagauuaggc

SEQ ID NO: 1655670 - RNA, 19 nt, Artificial Sequence
  Description of Artificial Sequence: Synthetic oligonucleotide
uuggcaauacuuuugccug

SEQ ID NO: 1655671 - RNA, 19 nt, Artificial Sequence
  Description of Artificial Sequence: Synthetic oligonucleotide
gaugucuauguucuugugc

SEQ ID NO: 1655672 - RNA, 19 nt, Artificial Sequence
  Description of Artificial Sequence: Synthetic oligonucleotide
auuaagcuuccacagcccg

SEQ ID NO: 1655673 - RNA, 19 nt, Artificial Sequence
  Description of Artificial Sequence: Synthetic oligonucleotide
agccguuacuuucuuacgc

SEQ ID NO: 1655674 - RNA, 19 nt, Artificial Sequence
  Description of Artificial Sequence: Synthetic oligonucleotide
cuuauuggcaauacuuuug

SEQ ID NO: 1655675 - RNA, 19 nt, Artificial Sequence
  Description of Artificial Sequence: Synthetic oligonucleotide
caccauacuuagcagaugg

SEQ ID NO: 1655676 - RNA, 19 nt, Artificial Sequence
  Description of Artificial Sequence: Synthetic oligonucleotide
cucuucaaaauccacuggc

SEQ ID NO: 1655677 - RNA, 19 nt, Artificial Sequence
  Description of Artificial Sequence: Synthetic oligonucleotide
cuagaaccacccaaggacg

SEQ ID NO: 1655678 - RNA, 19 nt, Artificial Sequence
  Description of Artificial Sequence: Synthetic oligonucleotide
uguuuucccgcacaaugag

SEQ ID NO: 1655679 - RNA, 19 nt, Artificial Sequence
  Description of Artificial Sequence: Synthetic oligonucleotide
uccugcuacgcucucaugc

SEQ ID NO: 1655680 - RNA, 19 nt, Artificial Sequence
  Description of Artificial Sequence: Synthetic oligonucleotide
cuagcaucaugcaacuugc

SEQ ID NO: 1655681 - RNA, 19 nt, Artificial Sequence
  Description of Artificial Sequence: Synthetic oligonucleotide
uaccauagagauuaggcau

SEQ ID NO: 1655682 - RNA, 19 nt, Artificial Sequence
  Description of Artificial Sequence: Synthetic oligonucleotide
aacugcaaggauaauuaag

SEQ ID NO: 1655683 - RNA, 19 nt, Artificial Sequence
  Description of Artificial Sequence: Synthetic oligonucleotide
uuucuuacgcccacucucc

SEQ ID NO: 1655684 - RNA, 19 nt, Artificial Sequence
  Description of Artificial Sequence: Synthetic oligonucleotide
guagcugucucaaauacug

SEQ ID NO: 1655685 - RNA, 19 nt, Artificial Sequence
  Description of Artificial Sequence: Synthetic oligonucleotide
gagauuaggcaucaccaug

SEQ ID NO: 1655686 - RNA, 19 nt, Artificial Sequence
  Description of Artificial Sequence: Synthetic oligonucleotide
gaauuguuuguugugagga

SEQ ID NO: 1655687 - RNA, 19 nt, Artificial Sequence
  Description of Artificial Sequence: Synthetic oligonucleotide
ugcauuguuguguugucca

SEQ ID NO: 1655688 - RNA, 19 nt, Artificial Sequence
  Description of Artificial Sequence: Synthetic oligonucleotide
uccaaugucuggaguaugc

SEQ ID NO: 1655689 - RNA, 19 nt, Artificial Sequence
  Description of Artificial Sequence: Synthetic oligonucleotide
ucaaaggugaucugcgggu

SEQ ID NO: 1655690 - RNA, 19 nt, Artificial Sequence
  Description of Artificial Sequence: Synthetic oligonucleotide
cuuacgcccacucuccugg

SEQ ID NO: 1655691 - RNA, 19 nt, Artificial Sequence
  Description of Artificial Sequence: Synthetic oligonucleotide
uacgcucucaugcuccagg

SEQ ID NO: 1655692 - RNA, 19 nt, Artificial Sequence
  Description of Artificial Sequence: Synthetic oligonucleotide
agguggucuagcaucaugc

SEQ ID NO: 1655693 - RNA, 19 nt, Artificial Sequence
  Description of Artificial Sequence: Synthetic oligonucleotide
ucagcaaugcguagggacu

SEQ ID NO: 1655694 - RNA, 19 nt, Artificial Sequence
  Description of Artificial Sequence: Synthetic oligonucleotide
ucaugcaacuugcuagcag

SEQ ID NO: 1655695 - RNA, 19 nt, Artificial Sequence
  Description of Artificial Sequence: Synthetic oligonucleotide
agcauauucagcaaugcgu

SEQ ID NO: 1655696 - RNA, 19 nt, Artificial Sequence
  Description of Artificial Sequence: Synthetic oligonucleotide
gcaucaugcaacuugcuag

SEQ ID NO: 1655697 - RNA, 19 nt, Artificial Sequence
  Description of Artificial Sequence: Synthetic oligonucleotide
cuuucuuacgcccacucuc

SEQ ID NO: 1655698 - RNA, 19 nt, Artificial Sequence
  Description of Artificial Sequence: Synthetic oligonucleotide
agugggguuagcaauguuc

SEQ ID NO: 1655699 - RNA, 19 nt, Artificial Sequence
  Description of Artificial Sequence: Synthetic oligonucleotide
guugagauaacugcaagga

SEQ ID NO: 1655700 - RNA, 19 nt, Artificial Sequence
  Description of Artificial Sequence: Synthetic oligonucleotide
aggaauuguuuguugugag

SEQ ID NO: 1655701 - RNA, 19 nt, Artificial Sequence
  Description of Artificial Sequence: Synthetic oligonucleotide
aaggugaucugcggguagc

SEQ ID NO: 1655702 - RNA, 19 nt, Artificial Sequence
  Description of Artificial Sequence: Synthetic oligonucleotide
caucaugcaacuugcuagc

SEQ ID NO: 1655703 - RNA, 19 nt, Artificial Sequence
  Description of Artificial Sequence: Synthetic oligonucleotide
auuaaugaugcggauguga

SEQ ID NO: 1655704 - RNA, 19 nt, Artificial Sequence
  Description of Artificial Sequence: Synthetic oligonucleotide
gguugagauaacugcaagg

SEQ ID NO: 1655705 - RNA, 19 nt, Artificial Sequence
  Description of Artificial Sequence: Synthetic oligonucleotide
auacacauggccauaguug

SEQ ID NO: 1655706 - RNA, 19 nt, Artificial Sequence
  Description of Artificial Sequence: Synthetic oligonucleotide
accgccagcugcuaucgcc

SEQ ID NO: 1655707 - RNA, 19 nt, Artificial Sequence
  Description of Artificial Sequence: Synthetic oligonucleotide
ggauaauuaagcuuccaca

SEQ ID NO: 1655708 - RNA, 19 nt, Artificial Sequence
  Description of Artificial Sequence: Synthetic oligonucleotide
uguuaccauagagauuagg

SEQ ID NO: 1655709 - RNA, 19 nt, Artificial Sequence
  Description of Artificial Sequence: Synthetic oligonucleotide
uucgggauuugugggaugg

SEQ ID NO: 1655710 - RNA, 19 nt, Artificial Sequence
  Description of Artificial Sequence: Synthetic oligonucleotide
auaacugcaaggauaauua

SEQ ID NO: 1655711 - RNA, 19 nt, Artificial Sequence
  Description of Artificial Sequence: Synthetic oligonucleotide
ugaucugcggguagcgugc

SEQ ID NO: 1655712 - RNA, 19 nt, Artificial Sequence
  Description of Artificial Sequence: Synthetic oligonucleotide
agaaguggcuuuauucugg

SEQ ID NO: 1655713 - RNA, 19 nt, Artificial Sequence
  Description of Artificial Sequence: Synthetic oligonucleotide
uguagcugucucaaauacu

SEQ ID NO: 1655714 - RNA, 19 nt, Artificial Sequence
  Description of Artificial Sequence: Synthetic oligonucleotide
uggugauaaucuucaagcu

SEQ ID NO: 1655715 - RNA, 19 nt, Artificial Sequence
  Description of Artificial Sequence: Synthetic oligonucleotide
ucuacaggucaaaacguua

SEQ ID NO: 1655716 - RNA, 19 nt, Artificial Sequence
  Description of Artificial Sequence: Synthetic oligonucleotide
ucagcguuggagcucacau

SEQ ID NO: 1655717 - RNA, 19 nt, Artificial Sequence
  Description of Artificial Sequence: Synthetic oligonucleotide
agaggucuaggcugguacg

SEQ ID NO: 1655718 - RNA, 19 nt, Artificial Sequence
  Description of Artificial Sequence: Synthetic oligonucleotide
guacgaaggauguuguuuc

SEQ ID NO: 1655719 - RNA, 19 nt, Artificial Sequence
  Description of Artificial Sequence: Synthetic oligonucleotide
ucucauuggcaccuagaac

SEQ ID NO: 1655720 - RNA, 19 nt, Artificial Sequence
  Description of Artificial Sequence: Synthetic oligonucleotide
uacgaaggauguuguuucg

SEQ ID NO: 1655721 - RNA, 19 nt, Artificial Sequence
  Description of Artificial Sequence: Synthetic oligonucleotide
ccuagaaccacccaaggac

SEQ ID NO: 1655722 - RNA, 19 nt, Artificial Sequence
  Description of Artificial Sequence: Synthetic oligonucleotide
uugagguggucuagcauca

SEQ ID NO: 1655723 - RNA, 19 nt, Artificial Sequence
  Description of Artificial Sequence: Synthetic oligonucleotide
agguugagauaacugcaag

SEQ ID NO: 1655724 - RNA, 19 nt, Artificial Sequence
  Description of Artificial Sequence: Synthetic oligonucleotide
ggcauagaggucuaggcug

SEQ ID NO: 1655725 - RNA, 19 nt, Artificial Sequence
  Description of Artificial Sequence: Synthetic oligonucleotide
ugcuacgcucucaugcucc

SEQ ID NO: 1655726 - RNA, 19 nt, Artificial Sequence
  Description of Artificial Sequence: Synthetic oligonucleotide
uguuucgggauuuguggga

SEQ ID NO: 1655727 - RNA, 19 nt, Artificial Sequence
  Description of Artificial Sequence: Synthetic oligonucleotide
uaugauuuguuucgauguu

SEQ ID NO: 1655728 - RNA, 19 nt, Artificial Sequence
  Description of Artificial Sequence: Synthetic oligonucleotide
auacugauuuaacaugcaa

SEQ ID NO: 1655729 - RNA, 19 nt, Artificial Sequence
  Description of Artificial Sequence: Synthetic oligonucleotide
augcguagggacuuggccu

SEQ ID NO: 1655730 - RNA, 19 nt, Artificial Sequence
  Description of Artificial Sequence: Synthetic oligonucleotide
uggcauuucggauauccuc

SEQ ID NO: 1655731 - RNA, 19 nt, Artificial Sequence
  Description of Artificial Sequence: Synthetic oligonucleotide
uggaugcuaagacagcuuu

SEQ ID NO: 1655732 - RNA, 19 nt, Artificial Sequence
  Description of Artificial Sequence: Synthetic oligonucleotide
ugaggaccucuacagguca

SEQ ID NO: 1655733 - RNA, 19 nt, Artificial Sequence
  Description of Artificial Sequence: Synthetic oligonucleotide
gacggcagaggagagcugg

SEQ ID NO: 1655734 - RNA, 19 nt, Artificial Sequence
  Description of Artificial Sequence: Synthetic oligonucleotide
ugacggaaagugaggaccu

SEQ ID NO: 1655735 - RNA, 19 nt, Artificial Sequence
  Description of Artificial Sequence: Synthetic oligonucleotide
uugagauaacugcaaggau

SEQ ID NO: 1655736 - RNA, 19 nt, Artificial Sequence
  Description of Artificial Sequence: Synthetic oligonucleotide
gagauaacugcaaggauaa

SEQ ID NO: 1655737 - RNA, 19 nt, Artificial Sequence
  Description of Artificial Sequence: Synthetic oligonucleotide
uaugccgcccaccauacuu

SEQ ID NO: 1655738 - RNA, 19 nt, Artificial Sequence
  Description of Artificial Sequence: Synthetic oligonucleotide
uggccaugauggcauuucg

SEQ ID NO: 1655739 - RNA, 19 nt, Artificial Sequence
  Description of Artificial Sequence: Synthetic oligonucleotide
aaggacggcagaggagagc

SEQ ID NO: 1655740 - RNA, 19 nt, Artificial Sequence
  Description of Artificial Sequence: Synthetic oligonucleotide
agauuaggcaucaccauga

SEQ ID NO: 1655741 - RNA, 19 nt, Artificial Sequence
  Description of Artificial Sequence: Synthetic oligonucleotide
augcuaagacagcuuugcg

SEQ ID NO: 1655742 - RNA, 19 nt, Artificial Sequence
  Description of Artificial Sequence: Synthetic oligonucleotide
acaagcaugccugaauacu

SEQ ID NO: 1655743 - RNA, 19 nt, Artificial Sequence
  Description of Artificial Sequence: Synthetic oligonucleotide
uguaugccgcccaccauac

SEQ ID NO: 1655744 - RNA, 19 nt, Artificial Sequence
  Description of Artificial Sequence: Synthetic oligonucleotide
guuacuuucuuacgcccac

SEQ ID NO: 1655745 - RNA, 19 nt, Artificial Sequence
  Description of Artificial Sequence: Synthetic oligonucleotide
acgcucucaugcuccaggc

SEQ ID NO: 1655746 - RNA, 19 nt, Artificial Sequence
  Description of Artificial Sequence: Synthetic oligonucleotide
ggugauaaucuucaagcuc

SEQ ID NO: 1655747 - RNA, 19 nt, Artificial Sequence
  Description of Artificial Sequence: Synthetic oligonucleotide
ugcauacacauggccauag

SEQ ID NO: 1655748 - RNA, 19 nt, Artificial Sequence
  Description of Artificial Sequence: Synthetic oligonucleotide
cagaaguggcuuuauucug

SEQ ID NO: 1655749 - RNA, 19 nt, Artificial Sequence
  Description of Artificial Sequence: Synthetic oligonucleotide
gaggaauuguuuguuguga

SEQ ID NO: 1655750 - RNA, 19 nt, Artificial Sequence
  Description of Artificial Sequence: Synthetic oligonucleotide
aaguggcuuuauucuggag

SEQ ID NO: 1655751 - RNA, 19 nt, Artificial Sequence
  Description of Artificial Sequence: Synthetic oligonucleotide
uccaacuagcccugcgcag

SEQ ID NO: 1655752 - RNA, 19 nt, Artificial Sequence
  Description of Artificial Sequence: Synthetic oligonucleotide
gucuaggcugguacgaagg

SEQ ID NO: 1655753 - RNA, 19 nt, Artificial Sequence
  Description of Artificial Sequence: Synthetic oligonucleotide
auuaggcaucaccaugaca

SEQ ID NO: 1655754 - RNA, 19 nt, Artificial Sequence
  Description of Artificial Sequence: Synthetic oligonucleotide
ccagcuugaaagcauauuc

SEQ ID NO: 1655755 - RNA, 19 nt, Artificial Sequence
  Description of Artificial Sequence: Synthetic oligonucleotide
agcaccgccagcugcuauc

SEQ ID NO: 1655756 - RNA, 19 nt, Artificial Sequence
  Description of Artificial Sequence: Synthetic oligonucleotide
uagcugucucaaauacugc

SEQ ID NO: 1655757 - RNA, 19 nt, Artificial Sequence
  Description of Artificial Sequence: Synthetic oligonucleotide
ggauuugugggaugguggc

SEQ ID NO: 1655758 - RNA, 19 nt, Artificial Sequence
  Description of Artificial Sequence: Synthetic oligonucleotide
gucuuugcagcaccgccag

SEQ ID NO: 1655759 - RNA, 19 nt, Artificial Sequence
  Description of Artificial Sequence: Synthetic oligonucleotide
uuggccuccaaugucugga

SEQ ID NO: 1655760 - RNA, 19 nt, Artificial Sequence
  Description of Artificial Sequence: Synthetic oligonucleotide
ugggaucauagucacugua

SEQ ID NO: 1655761 - RNA, 19 nt, Artificial Sequence
  Description of Artificial Sequence: Synthetic oligonucleotide
uagcccugcgcagacauug

SEQ ID NO: 1655762 - RNA, 19 nt, Artificial Sequence
  Description of Artificial Sequence: Synthetic oligonucleotide
uggccuugugcacagccgu

SEQ ID NO: 1655763 - RNA, 19 nt, Artificial Sequence
  Description of Artificial Sequence: Synthetic oligonucleotide
guuuucccgcacaaugagg

SEQ ID NO: 1655764 - RNA, 19 nt, Artificial Sequence
  Description of Artificial Sequence: Synthetic oligonucleotide
cuccggaccaaugccaucc

SEQ ID NO: 1655765 - RNA, 19 nt, Artificial Sequence
  Description of Artificial Sequence: Synthetic oligonucleotide
cuacaggucaaaacguuaa

SEQ ID NO: 1655766 - RNA, 19 nt, Artificial Sequence
  Description of Artificial Sequence: Synthetic oligonucleotide
ucuuacgcccacucuccug

SEQ ID NO: 1655767 - RNA, 19 nt, Artificial Sequence
  Description of Artificial Sequence: Synthetic oligonucleotide
uuucggauauccuccucau

SEQ ID NO: 1655768 - RNA, 19 nt, Artificial Sequence
  Description of Artificial Sequence: Synthetic oligonucleotide
gcugcuacuucccugcagc

SEQ ID NO: 1655769 - RNA, 19 nt, Artificial Sequence
  Description of Artificial Sequence: Synthetic oligonucleotide
acgaaggauguuguuucgg

SEQ ID NO: 1655770 - RNA, 19 nt, Artificial Sequence
  Description of Artificial Sequence: Synthetic oligonucleotide
acuagcccugcgcagacau

SEQ ID NO: 1655771 - RNA, 19 nt, Artificial Sequence
  Description of Artificial Sequence: Synthetic oligonucleotide
cacaagcaugccugaauac

SEQ ID NO: 1655772 - RNA, 19 nt, Artificial Sequence
  Description of Artificial Sequence: Synthetic oligonucleotide
ugugacgaaugauguccug

SEQ ID NO: 1655773 - RNA, 19 nt, Artificial Sequence
  Description of Artificial Sequence: Synthetic oligonucleotide
guuggagcucacaugcacc

SEQ ID NO: 1655774 - RNA, 19 nt, Artificial Sequence
  Description of Artificial Sequence: Synthetic oligonucleotide
ugcugcuacuucccugcag

SEQ ID NO: 1655775 - RNA, 19 nt, Artificial Sequence
  Description of Artificial Sequence: Synthetic oligonucleotide
gggauuugugggauggugg

SEQ ID NO: 1655776 - RNA, 19 nt, Artificial Sequence
  Description of Artificial Sequence: Synthetic oligonucleotide
gcaacuugcuagcagugug

SEQ ID NO: 1655777 - RNA, 19 nt, Artificial Sequence
  Description of Artificial Sequence: Synthetic oligonucleotide
caugcugucaaaggugauc

SEQ ID NO: 1655778 - RNA, 19 nt, Artificial Sequence
  Description of Artificial Sequence: Synthetic oligonucleotide
uggcuugggaugugguacc

SEQ ID NO: 1655779 - RNA, 19 nt, Artificial Sequence
  Description of Artificial Sequence: Synthetic oligonucleotide
aagcaugccugaauacuga

SEQ ID NO: 1655780 - RNA, 19 nt, Artificial Sequence
  Description of Artificial Sequence: Synthetic oligonucleotide
ugugccgggucaccacucc

SEQ ID NO: 1655781 - RNA, 19 nt, Artificial Sequence
  Description of Artificial Sequence: Synthetic oligonucleotide
aguggauaacauuggcaua

SEQ ID NO: 1655782 - RNA, 19 nt, Artificial Sequence
  Description of Artificial Sequence: Synthetic oligonucleotide
caaugcguagggacuuggc

SEQ ID NO: 1655783 - RNA, 19 nt, Artificial Sequence
  Description of Artificial Sequence: Synthetic oligonucleotide
caugcaacaugagcuccgg

SEQ ID NO: 1655784 - RNA, 19 nt, Artificial Sequence
  Description of Artificial Sequence: Synthetic oligonucleotide
caugccugaauacugauuu

SEQ ID NO: 1655785 - RNA, 19 nt, Artificial Sequence
  Description of Artificial Sequence: Synthetic oligonucleotide
uuugccuguguuccuugua

SEQ ID NO: 1655786 - RNA, 19 nt, Artificial Sequence
  Description of Artificial Sequence: Synthetic oligonucleotide
cuuguagcugucucaaaua

SEQ ID NO: 1655787 - RNA, 19 nt, Artificial Sequence
  Description of Artificial Sequence: Synthetic oligonucleotide
gugcuagaaugagaagggg

SEQ ID NO: 1655788 - RNA, 19 nt, Artificial Sequence
  Description of Artificial Sequence: Synthetic oligonucleotide
ugccgggucaccacuccug

SEQ ID NO: 1655789 - RNA, 19 nt, Artificial Sequence
  Description of Artificial Sequence: Synthetic oligonucleotide
ccauacuuagcagauggag

SEQ ID NO: 1655790 - RNA, 19 nt, Artificial Sequence
  Description of Artificial Sequence: Synthetic oligonucleotide
uggcaauacuuuugccugu

SEQ ID NO: 1655791 - RNA, 19 nt, Artificial Sequence
  Description of Artificial Sequence: Synthetic oligonucleotide
acgguuccggcggauggcc

SEQ ID NO: 1655792 - RNA, 19 nt, Artificial Sequence
  Description of Artificial Sequence: Synthetic oligonucleotide
cuucagggcuacacgguuc

SEQ ID NO: 1655793 - RNA, 19 nt, Artificial Sequence
  Description of Artificial Sequence: Synthetic oligonucleotide
gccguuacuuucuuacgcc

SEQ ID NO: 1655794 - RNA, 19 nt, Artificial Sequence
  Description of Artificial Sequence: Synthetic oligonucleotide
cugcauuguuguguugucc

SEQ ID NO: 1655795 - RNA, 19 nt, Artificial Sequence
  Description of Artificial Sequence: Synthetic oligonucleotide
uuucgggauuugugggaug

SEQ ID NO: 1655796 - RNA, 19 nt, Artificial Sequence
  Description of Artificial Sequence: Synthetic oligonucleotide
uucuuacgcccacucuccu

SEQ ID NO: 1655797 - RNA, 19 nt, Artificial Sequence
  Description of Artificial Sequence: Synthetic oligonucleotide
agcccggccauuaaugaug

SEQ ID NO: 1655798 - RNA, 19 nt, Artificial Sequence
  Description of Artificial Sequence: Synthetic oligonucleotide
cuaucgccaccuucagcgc

SEQ ID NO: 1655799 - RNA, 19 nt, Artificial Sequence
  Description of Artificial Sequence: Synthetic oligonucleotide
gaugguggcagguuaugau

SEQ ID NO: 1655800 - RNA, 19 nt, Artificial Sequence
  Description of Artificial Sequence: Synthetic oligonucleotide
agcucacaugcaccucuuc

SEQ ID NO: 1655801 - RNA, 19 nt, Artificial Sequence
  Description of Artificial Sequence: Synthetic oligonucleotide
uucggauauccuccucauc

SEQ ID NO: 1655802 - RNA, 19 nt, Artificial Sequence
  Description of Artificial Sequence: Synthetic oligonucleotide
caacaugagcuccggacca

SEQ ID NO: 1655803 - RNA, 19 nt, Artificial Sequence
  Description of Artificial Sequence: Synthetic oligonucleotide
cuugaacacugucuuugca

SEQ ID NO: 1655804 - RNA, 19 nt, Artificial Sequence
  Description of Artificial Sequence: Synthetic oligonucleotide
aggcucuuacaguggauaa

SEQ ID NO: 1655805 - RNA, 19 nt, Artificial Sequence
  Description of Artificial Sequence: Synthetic oligonucleotide
uggcagguuaugauuuguu

SEQ ID NO: 1655806 - RNA, 19 nt, Artificial Sequence
  Description of Artificial Sequence: Synthetic oligonucleotide
caugagcuccggaccaaug

SEQ ID NO: 1655807 - RNA, 19 nt, Artificial Sequence
  Description of Artificial Sequence: Synthetic oligonucleotide
aggugaucugcggguagcg

SEQ ID NO: 1655808 - RNA, 19 nt, Artificial Sequence
  Description of Artificial Sequence: Synthetic oligonucleotide
uuacgcccacucuccuggg

SEQ ID NO: 1655809 - RNA, 19 nt, Artificial Sequence
  Description of Artificial Sequence: Synthetic oligonucleotide
agcaugccugaauacugau

SEQ ID NO: 1655810 - RNA, 19 nt, Artificial Sequence
  Description of Artificial Sequence: Synthetic oligonucleotide
gcauagaggucuaggcugg

SEQ ID NO: 1655811 - RNA, 19 nt, Artificial Sequence
  Description of Artificial Sequence: Synthetic oligonucleotide
ggaugugguaccuuggccu

SEQ ID NO: 1655812 - RNA, 19 nt, Artificial Sequence
  Description of Artificial Sequence: Synthetic oligonucleotide
cagggcuacacgguuccgg

SEQ ID NO: 1655813 - RNA, 19 nt, Artificial Sequence
  Description of Artificial Sequence: Synthetic oligonucleotide
ggucuaggcugguacgaag

SEQ ID NO: 1655814 - RNA, 19 nt, Artificial Sequence
  Description of Artificial Sequence: Synthetic oligonucleotide
ugccgcccaccauacuuag

SEQ ID NO: 1655815 - RNA, 19 nt, Artificial Sequence
  Description of Artificial Sequence: Synthetic oligonucleotide
caaggacggcagaggagag

SEQ ID NO: 1655816 - RNA, 19 nt, Artificial Sequence
  Description of Artificial Sequence: Synthetic oligonucleotide
gauuugugggaugguggca

SEQ ID NO: 1655817 - RNA, 19 nt, Artificial Sequence
  Description of Artificial Sequence: Synthetic oligonucleotide
uuacuuucuuacgcccacu

SEQ ID NO: 1655818 - RNA, 19 nt, Artificial Sequence
  Description of Artificial Sequence: Synthetic oligonucleotide
cauaggaguggagcuugag

SEQ ID NO: 1655819 - RNA, 19 nt, Artificial Sequence
  Description of Artificial Sequence: Synthetic oligonucleotide
acggaaagugaggaccucu

SEQ ID NO: 1655820 - RNA, 19 nt, Artificial Sequence
  Description of Artificial Sequence: Synthetic oligonucleotide
gccauuaaugaugcggaug

SEQ ID NO: 1655821 - RNA, 19 nt, Artificial Sequence
  Description of Artificial Sequence: Synthetic oligonucleotide
cacuguaugccgcccacca

SEQ ID NO: 1655822 - RNA, 19 nt, Artificial Sequence
  Description of Artificial Sequence: Synthetic oligonucleotide
uccuauggacagguugaga

SEQ ID NO: 1655823 - RNA, 19 nt, Artificial Sequence
  Description of Artificial Sequence: Synthetic oligonucleotide
guggucuagcaucaugcaa

SEQ ID NO: 1655824 - RNA, 19 nt, Artificial Sequence
  Description of Artificial Sequence: Synthetic oligonucleotide
cagcguuggagcucacaug

SEQ ID NO: 1655825 - RNA, 19 nt, Artificial Sequence
  Description of Artificial Sequence: Synthetic oligonucleotide
gucacuguaugccgcccac

SEQ ID NO: 1655826 - RNA, 19 nt, Artificial Sequence
  Description of Artificial Sequence: Synthetic oligonucleotide
ucaugcugucaaaggugau

SEQ ID NO: 1655827 - RNA, 19 nt, Artificial Sequence
  Description of Artificial Sequence: Synthetic oligonucleotide
cagacauuguugacaaugu

SEQ ID NO: 1655828 - RNA, 19 nt, Artificial Sequence
  Description of Artificial Sequence: Synthetic oligonucleotide
agguuaugauuuguuucga

SEQ ID NO: 1655829 - RNA, 19 nt, Artificial Sequence
  Description of Artificial Sequence: Synthetic oligonucleotide
cauuguuguguuguccaca

SEQ ID NO: 1655830 - RNA, 19 nt, Artificial Sequence
  Description of Artificial Sequence: Synthetic oligonucleotide
gaggucuaggcugguacga

SEQ ID NO: 1655831 - RNA, 19 nt, Artificial Sequence
  Description of Artificial Sequence: Synthetic oligonucleotide
uugcggauggagguggcau

SEQ ID NO: 1655832 - RNA, 19 nt, Artificial Sequence
  Description of Artificial Sequence: Synthetic oligonucleotide
gcucacaugcaccucuuca

SEQ ID NO: 1655833 - RNA, 19 nt, Artificial Sequence
  Description of Artificial Sequence: Synthetic oligonucleotide
ucacuguaugccgcccacc

SEQ ID NO: 1655834 - RNA, 19 nt, Artificial Sequence
  Description of Artificial Sequence: Synthetic oligonucleotide
cauuaaugaugcggaugug

SEQ ID NO: 1655835 - RNA, 19 nt, Artificial Sequence
  Description of Artificial Sequence: Synthetic oligonucleotide
aacaugagcuccggaccaa

SEQ ID NO: 1655836 - RNA, 19 nt, Artificial Sequence
  Description of Artificial Sequence: Synthetic oligonucleotide
ccguuacuuucuuacgccc

SEQ ID NO: 1655837 - RNA, 19 nt, Artificial Sequence
  Description of Artificial Sequence: Synthetic oligonucleotide
cuguaugccgcccaccaua

SEQ ID NO: 1655838 - RNA, 19 nt, Artificial Sequence
  Description of Artificial Sequence: Synthetic oligonucleotide
cugggccuccaacuagccc

SEQ ID NO: 1655839 - RNA, 19 nt, Artificial Sequence
  Description of Artificial Sequence: Synthetic oligonucleotide
ccauuaaugaugcggaugu

SEQ ID NO: 1655840 - RNA, 19 nt, Artificial Sequence
  Description of Artificial Sequence: Synthetic oligonucleotide
caagcuagcaggagugcua

SEQ ID NO: 1655841 - RNA, 19 nt, Artificial Sequence
  Description of Artificial Sequence: Synthetic oligonucleotide
uggauaccagcugcauugu

SEQ ID NO: 1655842 - RNA, 19 nt, Artificial Sequence
  Description of Artificial Sequence: Synthetic oligonucleotide
gugggguuagcaauguucu

SEQ ID NO: 1655843 - RNA, 19 nt, Artificial Sequence
  Description of Artificial Sequence: Synthetic oligonucleotide
aucaugcaacuugcuagca

SEQ ID NO: 1655844 - RNA, 19 nt, Artificial Sequence
  Description of Artificial Sequence: Synthetic oligonucleotide
augugacgaaugauguccu

SEQ ID NO: 1655845 - RNA, 19 nt, Artificial Sequence
  Description of Artificial Sequence: Synthetic oligonucleotide
gccaugacggaaagugagg

SEQ ID NO: 1655846 - RNA, 19 nt, Artificial Sequence
  Description of Artificial Sequence: Synthetic oligonucleotide
ucagggcuacacgguuccg

SEQ ID NO: 1655847 - RNA, 19 nt, Artificial Sequence
  Description of Artificial Sequence: Synthetic oligonucleotide
uggcaccuagaaccaccca

SEQ ID NO: 1655848 - RNA, 19 nt, Artificial Sequence
  Description of Artificial Sequence: Synthetic oligonucleotide
auggcauuucggauauccu

SEQ ID NO: 1655849 - RNA, 19 nt, Artificial Sequence
  Description of Artificial Sequence: Synthetic oligonucleotide
gguggucuagcaucaugca

SEQ ID NO: 1655850 - RNA, 19 nt, Artificial Sequence
  Description of Artificial Sequence: Synthetic oligonucleotide
gugaggaccucuacagguc

SEQ ID NO: 1655851 - RNA, 19 nt, Artificial Sequence
  Description of Artificial Sequence: Synthetic oligonucleotide
gguagcgugcugcuacuuc

SEQ ID NO: 1655852 - RNA, 19 nt, Artificial Sequence
  Description of Artificial Sequence: Synthetic oligonucleotide
cgccaugacggaaagugag

SEQ ID NO: 1655853 - RNA, 19 nt, Artificial Sequence
  Description of Artificial Sequence: Synthetic oligonucleotide
cuccaaugucuggaguaug

SEQ ID NO: 1655854 - RNA, 19 nt, Artificial Sequence
  Description of Artificial Sequence: Synthetic oligonucleotide
augccugaauacugauuua

SEQ ID NO: 1655855 - RNA, 19 nt, Artificial Sequence
  Description of Artificial Sequence: Synthetic oligonucleotide
accacuccugcuacgcucu

SEQ ID NO: 1655856 - RNA, 19 nt, Artificial Sequence
  Description of Artificial Sequence: Synthetic oligonucleotide
accauacuuagcagaugga

SEQ ID NO: 1655857 - RNA, 19 nt, Artificial Sequence
  Description of Artificial Sequence: Synthetic oligonucleotide
ggagcuugagguggucuag

SEQ ID NO: 1655858 - RNA, 19 nt, Artificial Sequence
  Description of Artificial Sequence: Synthetic oligonucleotide
gcggguagcgugcugcuac

SEQ ID NO: 1655859 - RNA, 19 nt, Artificial Sequence
  Description of Artificial Sequence: Synthetic oligonucleotide
ugggguuagcaauguucuu

SEQ ID NO: 1655860 - RNA, 19 nt, Artificial Sequence
  Description of Artificial Sequence: Synthetic oligonucleotide
auucagcaaugcguaggga

SEQ ID NO: 1655861 - RNA, 19 nt, Artificial Sequence
  Description of Artificial Sequence: Synthetic oligonucleotide
ggaugcuaagacagcuuug

SEQ ID NO: 1655862 - RNA, 19 nt, Artificial Sequence
  Description of Artificial Sequence: Synthetic oligonucleotide
agcaaugcguagggacuug

SEQ ID NO: 1655863 - RNA, 19 nt, Artificial Sequence
  Description of Artificial Sequence: Synthetic oligonucleotide
ccugcgcagacauuguuga

SEQ ID NO: 1655864 - RNA, 19 nt, Artificial Sequence
  Description of Artificial Sequence: Synthetic oligonucleotide
gcauuguuguguuguccac

SEQ ID NO: 1655865 - RNA, 19 nt, Artificial Sequence
  Description of Artificial Sequence: Synthetic oligonucleotide
gcaaugcguagggacuugg

SEQ ID NO: 1655866 - RNA, 19 nt, Artificial Sequence
  Description of Artificial Sequence: Synthetic oligonucleotide
cugcgcagacauuguugac

SEQ ID NO: 1655867 - RNA, 19 nt, Artificial Sequence
  Description of Artificial Sequence: Synthetic oligonucleotide
cugcuacgcucucaugcuc

SEQ ID NO: 1655868 - RNA, 19 nt, Artificial Sequence
  Description of Artificial Sequence: Synthetic oligonucleotide
gugggaugguggcagguua

SEQ ID NO: 1655869 - RNA, 19 nt, Artificial Sequence
  Description of Artificial Sequence: Synthetic oligonucleotide
cauuggcauagaggucuag

SEQ ID NO: 1655870 - RNA, 19 nt, Artificial Sequence
  Description of Artificial Sequence: Synthetic oligonucleotide
cauuggcaccuagaaccac

SEQ ID NO: 1655871 - RNA, 19 nt, Artificial Sequence
  Description of Artificial Sequence: Synthetic oligonucleotide
gggguuagcaauguucuua

SEQ ID NO: 1655872 - RNA, 19 nt, Artificial Sequence
  Description of Artificial Sequence: Synthetic oligonucleotide
gcuagcaggagugcuagaa

SEQ ID NO: 1655873 - RNA, 19 nt, Artificial Sequence
  Description of Artificial Sequence: Synthetic oligonucleotide
aacuagcccugcgcagaca

SEQ ID NO: 1655874 - RNA, 19 nt, Artificial Sequence
  Description of Artificial Sequence: Synthetic oligonucleotide
ccaaggacggcagaggaga

SEQ ID NO: 1655875 - RNA, 19 nt, Artificial Sequence
  Description of Artificial Sequence: Synthetic oligonucleotide
ggagcucacaugcaccucu

SEQ ID NO: 1655876 - RNA, 19 nt, Artificial Sequence
  Description of Artificial Sequence: Synthetic oligonucleotide
aucagcguuggagcucaca

SEQ ID NO: 1655877 - RNA, 19 nt, Artificial Sequence
  Description of Artificial Sequence: Synthetic oligonucleotide
ggcucuuacaguggauaac

SEQ ID NO: 1655878 - RNA, 19 nt, Artificial Sequence
  Description of Artificial Sequence: Synthetic oligonucleotide
cccugcgcagacauuguug

SEQ ID NO: 1655879 - RNA, 19 nt, Artificial Sequence
  Description of Artificial Sequence: Synthetic oligonucleotide
gacgaaugauguccuggau

SEQ ID NO: 1655880 - RNA, 19 nt, Artificial Sequence
  Description of Artificial Sequence: Synthetic oligonucleotide
ccgcccaccauacuuagca

SEQ ID NO: 1655881 - RNA, 19 nt, Artificial Sequence
  Description of Artificial Sequence: Synthetic oligonucleotide
cguuggagcucacaugcac

SEQ ID NO: 1655882 - RNA, 19 nt, Artificial Sequence
  Description of Artificial Sequence: Synthetic oligonucleotide
caggcucuuacaguggaua

SEQ ID NO: 1655883 - RNA, 19 nt, Artificial Sequence
  Description of Artificial Sequence: Synthetic oligonucleotide
cugcuacuucccugcagca

SEQ ID NO: 1655884 - RNA, 19 nt, Artificial Sequence
  Description of Artificial Sequence: Synthetic oligonucleotide
gguacgaaggauguuguuu

SEQ ID NO: 1655885 - RNA, 19 nt, Artificial Sequence
  Description of Artificial Sequence: Synthetic oligonucleotide
auguuaccauagagauuag

SEQ ID NO: 1655886 - RNA, 19 nt, Artificial Sequence
  Description of Artificial Sequence: Synthetic oligonucleotide
gacggaaagugaggaccuc

SEQ ID NO: 1655887 - RNA, 19 nt, Artificial Sequence
  Description of Artificial Sequence: Synthetic oligonucleotide
cugauuuaacaugcaacau

SEQ ID NO: 1655888 - RNA, 19 nt, Artificial Sequence
  Description of Artificial Sequence: Synthetic oligonucleotide
aggaccucuacaggucaaa

SEQ ID NO: 1655889 - RNA, 19 nt, Artificial Sequence
  Description of Artificial Sequence: Synthetic oligonucleotide
ucgggauuugugggauggu

SEQ ID NO: 1655890 - RNA, 19 nt, Artificial Sequence
  Description of Artificial Sequence: Synthetic oligonucleotide
ggucuagcaucaugcaacu

SEQ ID NO: 1655891 - RNA, 19 nt, Artificial Sequence
  Description of Artificial Sequence: Synthetic oligonucleotide
ggguuagcaauguucuuau

SEQ ID NO: 1655892 - RNA, 19 nt, Artificial Sequence
  Description of Artificial Sequence: Synthetic oligonucleotide
gguuaugauuuguuucgau

SEQ ID NO: 1655893 - RNA, 19 nt, Artificial Sequence
  Description of Artificial Sequence: Synthetic oligonucleotide
gcaccgccagcugcuaucg

SEQ ID NO: 1655894 - RNA, 19 nt, Artificial Sequence
  Description of Artificial Sequence: Synthetic oligonucleotide
aucugcggguagcgugcug

SEQ ID NO: 1655895 - RNA, 19 nt, Artificial Sequence
  Description of Artificial Sequence: Synthetic oligonucleotide
cuacgcucucaugcuccag

SEQ ID NO: 1655896 - RNA, 19 nt, Artificial Sequence
  Description of Artificial Sequence: Synthetic oligonucleotide
ggaugguggcagguuauga

SEQ ID NO: 1655897 - RNA, 19 nt, Artificial Sequence
  Description of Artificial Sequence: Synthetic oligonucleotide
ccuugugcacagccguuac

SEQ ID NO: 1655898 - RNA, 19 nt, Artificial Sequence
  Description of Artificial Sequence: Synthetic oligonucleotide
cuccugcuacgcucucaug

SEQ ID NO: 1655899 - RNA, 19 nt, Artificial Sequence
  Description of Artificial Sequence: Synthetic oligonucleotide
uuccggcggauggccauga

SEQ ID NO: 1655900 - RNA, 19 nt, Artificial Sequence
  Description of Artificial Sequence: Synthetic oligonucleotide
agcccaucacccaguuuca

SEQ ID NO: 1655901 - RNA, 19 nt, Artificial Sequence
  Description of Artificial Sequence: Synthetic oligonucleotide
cuugugccgggucaccacu

SEQ ID NO: 1655902 - RNA, 19 nt, Artificial Sequence
  Description of Artificial Sequence: Synthetic oligonucleotide
ggcagguuaugauuuguuu

SEQ ID NO: 1655903 - RNA, 19 nt, Artificial Sequence
  Description of Artificial Sequence: Synthetic oligonucleotide
agcuccggaccaaugccau

SEQ ID NO: 1655904 - RNA, 19 nt, Artificial Sequence
  Description of Artificial Sequence: Synthetic oligonucleotide
ggucucauuggcaccuaga

SEQ ID NO: 1655905 - RNA, 19 nt, Artificial Sequence
  Description of Artificial Sequence: Synthetic oligonucleotide
ugagguggucuagcaucau

SEQ ID NO: 1655906 - RNA, 19 nt, Artificial Sequence
  Description of Artificial Sequence: Synthetic oligonucleotide
guuccggcggauggccaug

SEQ ID NO: 1655907 - RNA, 19 nt, Artificial Sequence
  Description of Artificial Sequence: Synthetic oligonucleotide
ccacccaaggacggcagag

SEQ ID NO: 1655908 - RNA, 19 nt, Artificial Sequence
  Description of Artificial Sequence: Synthetic oligonucleotide
cggccauuaaugaugcgga

SEQ ID NO: 1655909 - RNA, 19 nt, Artificial Sequence
  Description of Artificial Sequence: Synthetic oligonucleotide
gaggaccucuacaggucaa

SEQ ID NO: 1655910 - RNA, 19 nt, Artificial Sequence
  Description of Artificial Sequence: Synthetic oligonucleotide
cguuacuuucuuacgccca

SEQ ID NO: 1655911 - RNA, 19 nt, Artificial Sequence
  Description of Artificial Sequence: Synthetic oligonucleotide
gcccggccauuaaugaugc

SEQ ID NO: 1655912 - RNA, 19 nt, Artificial Sequence
  Description of Artificial Sequence: Synthetic oligonucleotide
ccucuacaggucaaaacgu

SEQ ID NO: 1655913 - RNA, 19 nt, Artificial Sequence
  Description of Artificial Sequence: Synthetic oligonucleotide
gcuacgcucucaugcucca

SEQ ID NO: 1655914 - RNA, 19 nt, Artificial Sequence
  Description of Artificial Sequence: Synthetic oligonucleotide
augccgcccaccauacuua

SEQ ID NO: 1655915 - RNA, 19 nt, Artificial Sequence
  Description of Artificial Sequence: Synthetic oligonucleotide
caguguggcagugggguua

SEQ ID NO: 1655916 - RNA, 19 nt, Artificial Sequence
  Description of Artificial Sequence: Synthetic oligonucleotide
gccuguguuccuuguagcu

SEQ ID NO: 1655917 - RNA, 19 nt, Artificial Sequence
  Description of Artificial Sequence: Synthetic oligonucleotide
guggcagguuaugauuugu

SEQ ID NO: 1655918 - RNA, 19 nt, Artificial Sequence
  Description of Artificial Sequence: Synthetic oligonucleotide
ccggcggauggccaugaug

SEQ ID NO: 1655919 - RNA, 19 nt, Artificial Sequence
  Description of Artificial Sequence: Synthetic oligonucleotide
ccaacuagcccugcgcaga

SEQ ID NO: 1655920 - RNA, 19 nt, Artificial Sequence
  Description of Artificial Sequence: Synthetic oligonucleotide
guacucucccucuguguuu

SEQ ID NO: 1655921 - RNA, 19 nt, Artificial Sequence
  Description of Artificial Sequence: Synthetic oligonucleotide
cacagccguuacuuucuua

SEQ ID NO: 1655922 - RNA, 19 nt, Artificial Sequence
  Description of Artificial Sequence: Synthetic oligonucleotide
ccggaccaaugccaucccc

SEQ ID NO: 1655923 - RNA, 19 nt, Artificial Sequence
  Description of Artificial Sequence: Synthetic oligonucleotide
ugcggguagcgugcugcua

SEQ ID NO: 1655924 - RNA, 19 nt, Artificial Sequence
  Description of Artificial Sequence: Synthetic oligonucleotide
ggaccucuacaggucaaaa

SEQ ID NO: 1655925 - RNA, 19 nt, Artificial Sequence
  Description of Artificial Sequence: Synthetic oligonucleotide
cuaggcugguacgaaggau

SEQ ID NO: 1655926 - RNA, 19 nt, Artificial Sequence
  Description of Artificial Sequence: Synthetic oligonucleotide
uccggcggauggccaugau

SEQ ID NO: 1655927 - RNA, 19 nt, Artificial Sequence
  Description of Artificial Sequence: Synthetic oligonucleotide
guagggacuuggccuuggu

SEQ ID NO: 1655928 - RNA, 19 nt, Artificial Sequence
  Description of Artificial Sequence: Synthetic oligonucleotide
gcuacacgguuccggcgga

SEQ ID NO: 1655929 - RNA, 19 nt, Artificial Sequence
  Description of Artificial Sequence: Synthetic oligonucleotide
agcccugcgcagacauugu

SEQ ID NO: 1655930 - RNA, 19 nt, Artificial Sequence
  Description of Artificial Sequence: Synthetic oligonucleotide
cggaugugacgaaugaugu

SEQ ID NO: 1655931 - RNA, 19 nt, Artificial Sequence
  Description of Artificial Sequence: Synthetic oligonucleotide
ccaccauacuuagcagaug

SEQ ID NO: 1655932 - RNA, 19 nt, Artificial Sequence
  Description of Artificial Sequence: Synthetic oligonucleotide
cccaccauacuuagcagau

SEQ ID NO: 1655933 - RNA, 19 nt, Artificial Sequence
  Description of Artificial Sequence: Synthetic oligonucleotide
agacagcuuugcggaugga

SEQ ID NO: 1655934 - RNA, 19 nt, Artificial Sequence
  Description of Artificial Sequence: Synthetic oligonucleotide
caucacccaguuucaugau

SEQ ID NO: 1655935 - RNA, 19 nt, Artificial Sequence
  Description of Artificial Sequence: Synthetic oligonucleotide
gggccuccaacuagcccug

SEQ ID NO: 1655936 - RNA, 19 nt, Artificial Sequence
  Description of Artificial Sequence: Synthetic oligonucleotide
ggauguuguuucgggauuu

SEQ ID NO: 1655937 - RNA, 19 nt, Artificial Sequence
  Description of Artificial Sequence: Synthetic oligonucleotide
gaucugcggguagcgugcu

SEQ ID NO: 1655938 - RNA, 19 nt, Artificial Sequence
  Description of Artificial Sequence: Synthetic oligonucleotide
ccgggucaccacuccuggc

SEQ ID NO: 1655939 - RNA, 19 nt, Artificial Sequence
  Description of Artificial Sequence: Synthetic oligonucleotide
gcacaaugaggaugucuau

SEQ ID NO: 1655940 - RNA, 19 nt, Artificial Sequence
  Description of Artificial Sequence: Synthetic oligonucleotide
cagcccggccauuaaugau

SEQ ID NO: 1655941 - RNA, 19 nt, Artificial Sequence
  Description of Artificial Sequence: Synthetic oligonucleotide
gcuccggaccaaugccauc

SEQ ID NO: 1655942 - RNA, 19 nt, Artificial Sequence
  Description of Artificial Sequence: Synthetic oligonucleotide
cguagggacuuggccuugg

SEQ ID NO: 1655943 - RNA, 19 nt, Artificial Sequence
  Description of Artificial Sequence: Synthetic oligonucleotide
ggccauuaaugaugcggau

SEQ ID NO: 1655944 - RNA, 19 nt, Artificial Sequence
  Description of Artificial Sequence: Synthetic oligonucleotide
gcgccaugacggaaaguga

SEQ ID NO: 1655945 - RNA, 19 nt, Artificial Sequence
  Description of Artificial Sequence: Synthetic oligonucleotide
guaugccgcccaccauacu

SEQ ID NO: 1655946 - RNA, 19 nt, Artificial Sequence
  Description of Artificial Sequence: Synthetic oligonucleotide
gugccgggucaccacuccu

SEQ ID NO: 1655947 - RNA, 19 nt, Artificial Sequence
  Description of Artificial Sequence: Synthetic oligonucleotide
ggugaucugcggguagcgu

SEQ ID NO: 1655948 - RNA, 19 nt, Artificial Sequence
  Description of Artificial Sequence: Synthetic oligonucleotide
cagcaaugcguagggacuu

SEQ ID NO: 1655949 - RNA, 19 nt, Artificial Sequence
  Description of Artificial Sequence: Synthetic oligonucleotide
cugcggguagcgugcugcu

SEQ ID NO: 1655950 - RNA, 19 nt, Artificial Sequence
  Description of Artificial Sequence: Synthetic oligonucleotide
gagcucacaugcaccucuu

SEQ ID NO: 1655951 - RNA, 19 nt, Artificial Sequence
  Description of Artificial Sequence: Synthetic oligonucleotide
ccaagcuagcaggagugcu

SEQ ID NO: 1655952 - RNA, 19 nt, Artificial Sequence
  Description of Artificial Sequence: Synthetic oligonucleotide
cacccaguuucaugauguu

SEQ ID NO: 1655953 - RNA, 19 nt, Artificial Sequence
  Description of Artificial Sequence: Synthetic oligonucleotide
gcguuggagcucacaugca

SEQ ID NO: 1655954 - RNA, 19 nt, Artificial Sequence
  Description of Artificial Sequence: Synthetic oligonucleotide
gcguagggacuuggccuug

SEQ ID NO: 1655955 - RNA, 19 nt, Artificial Sequence
  Description of Artificial Sequence: Synthetic oligonucleotide
gccgcccaccauacuuagc

SEQ ID NO: 1655956 - RNA, 19 nt, Artificial Sequence
  Description of Artificial Sequence: Synthetic oligonucleotide
ccuggauaccagcugcauu

SEQ ID NO: 1655957 - RNA, 19 nt, Artificial Sequence
  Description of Artificial Sequence: Synthetic oligonucleotide
gcaugccugaauacugauu

SEQ ID NO: 1655958 - RNA, 19 nt, Artificial Sequence
  Description of Artificial Sequence: Synthetic oligonucleotide
ccgcacaaugaggaugucu

SEQ ID NO: 1655959 - RNA, 19 nt, Artificial Sequence
  Description of Artificial Sequence: Synthetic oligonucleotide
ccacuccugcuacgcucuc

SEQ ID NO: 1655960 - RNA, 19 nt, Artificial Sequence
  Description of Artificial Sequence: Synthetic oligonucleotide
cuacacgguuccggcggau

SEQ ID NO: 1655961 - RNA, 19 nt, Artificial Sequence
  Description of Artificial Sequence: Synthetic oligonucleotide
gcccugcgcagacauuguu

SEQ ID NO: 1655962 - RNA, 19 nt, Artificial Sequence
  Description of Artificial Sequence: Synthetic oligonucleotide
ggggucucauuggcaccua

SEQ ID NO: 1655963 - RNA, 19 nt, Artificial Sequence
  Description of Artificial Sequence: Synthetic oligonucleotide
cagcgccaugacggaaagu

SEQ ID NO: 1655964 - RNA, 19 nt, Artificial Sequence
  Description of Artificial Sequence: Synthetic oligonucleotide
cgguuccggcggauggcca

SEQ ID NO: 1655965 - RNA, 19 nt, Artificial Sequence
  Description of Artificial Sequence: Synthetic oligonucleotide
ggccuugugcacagccguu

SEQ ID NO: 1655966 - RNA, 19 nt, Artificial Sequence
  Description of Artificial Sequence: Synthetic oligonucleotide
ggguagcgugcugcuacuu

SEQ ID NO: 1655967 - RNA, 19 nt, Artificial Sequence
  Description of Artificial Sequence: Synthetic oligonucleotide
cagcugcuaucgccaccuu

SEQ ID NO: 1655968 - RNA, 19 nt, Artificial Sequence
  Description of Artificial Sequence: Synthetic oligonucleotide
aauggugugaacuuuaugg

SEQ ID NO: 1655969 - RNA, 19 nt, Artificial Sequence
  Description of Artificial Sequence: Synthetic oligonucleotide
aaacauaaggcuuuucccc

SEQ ID NO: 1655970 - RNA, 19 nt, Artificial Sequence
  Description of Artificial Sequence: Synthetic oligonucleotide
aaugucuucacauguacgg

SEQ ID NO: 1655971 - RNA, 19 nt, Artificial Sequence
  Description of Artificial Sequence: Synthetic oligonucleotide
cuuuauaccaacuuggaug

SEQ ID NO: 1655972 - RNA, 19 nt, Artificial Sequence
  Description of Artificial Sequence: Synthetic oligonucleotide
auuccugacaaacauaagg

SEQ ID NO: 1655973 - RNA, 19 nt, Artificial Sequence
  Description of Artificial Sequence: Synthetic oligonucleotide
aaugaagugcucuccacac

SEQ ID NO: 1655974 - RNA, 19 nt, Artificial Sequence
  Description of Artificial Sequence: Synthetic oligonucleotide
ucugugacaaucuugacaa

SEQ ID NO: 1655975 - RNA, 19 nt, Artificial Sequence
  Description of Artificial Sequence: Synthetic oligonucleotide
aauaagguaguuacucugc

SEQ ID NO: 1655976 - RNA, 19 nt, Artificial Sequence
  Description of Artificial Sequence: Synthetic oligonucleotide
uuuauaccaacuuggaugu

SEQ ID NO: 1655977 - RNA, 19 nt, Artificial Sequence
  Description of Artificial Sequence: Synthetic oligonucleotide
uuugcugauguucaugaag

SEQ ID NO: 1655978 - RNA, 19 nt, Artificial Sequence
  Description of Artificial Sequence: Synthetic oligonucleotide
acuuccggaaggcugaugc

SEQ ID NO: 1655979 - RNA, 19 nt, Artificial Sequence
  Description of Artificial Sequence: Synthetic oligonucleotide
agucaccacauuuaaaggg

SEQ ID NO: 1655980 - RNA, 19 nt, Artificial Sequence
  Description of Artificial Sequence: Synthetic oligonucleotide
acuacaagagugaaguugc

SEQ ID NO: 1655981 - RNA, 19 nt, Artificial Sequence
  Description of Artificial Sequence: Synthetic oligonucleotide
uggcuuuauaccaacuugg

SEQ ID NO: 1655982 - RNA, 19 nt, Artificial Sequence
  Description of Artificial Sequence: Synthetic oligonucleotide
acucacuacacucaaagug

SEQ ID NO: 1655983 - RNA, 19 nt, Artificial Sequence
  Description of Artificial Sequence: Synthetic oligonucleotide
acuguuacauuuaaagggc

SEQ ID NO: 1655984 - RNA, 19 nt, Artificial Sequence
  Description of Artificial Sequence: Synthetic oligonucleotide
agugguugaaagcuuuacc

SEQ ID NO: 1655985 - RNA, 19 nt, Artificial Sequence
  Description of Artificial Sequence: Synthetic oligonucleotide
aacuuuauggugcugcacu

SEQ ID NO: 1655986 - RNA, 19 nt, Artificial Sequence
  Description of Artificial Sequence: Synthetic oligonucleotide
ugcugaauaagguaguuac

SEQ ID NO: 1655987 - RNA, 19 nt, Artificial Sequence
  Description of Artificial Sequence: Synthetic oligonucleotide
acuacacucaaagugcugc

SEQ ID NO: 1655988 - RNA, 19 nt, Artificial Sequence
  Description of Artificial Sequence: Synthetic oligonucleotide
cacuaguuguucuuuaugg

SEQ ID NO: 1655989 - RNA, 19 nt, Artificial Sequence
  Description of Artificial Sequence: Synthetic oligonucleotide
cuuacacucauacagggac

SEQ ID NO: 1655990 - RNA, 19 nt, Artificial Sequence
  Description of Artificial Sequence: Synthetic oligonucleotide
aucugcuacauuuguaugg

SEQ ID NO: 1655991 - RNA, 19 nt, Artificial Sequence
  Description of Artificial Sequence: Synthetic oligonucleotide
caacuguuacauuuaaagg

SEQ ID NO: 1655992 - RNA, 19 nt, Artificial Sequence
  Description of Artificial Sequence: Synthetic oligonucleotide
gcaacuguuacauuuaaag

SEQ ID NO: 1655993 - RNA, 19 nt, Artificial Sequence
  Description of Artificial Sequence: Synthetic oligonucleotide
gaauaagguaguuacucug

SEQ ID NO: 1655994 - RNA, 19 nt, Artificial Sequence
  Description of Artificial Sequence: Synthetic oligonucleotide
gacuaaagguccuuguugc

SEQ ID NO: 1655995 - RNA, 19 nt, Artificial Sequence
  Description of Artificial Sequence: Synthetic oligonucleotide
ugacuaaagguccuuguug

SEQ ID NO: 1655996 - RNA, 19 nt, Artificial Sequence
  Description of Artificial Sequence: Synthetic oligonucleotide
gaggugagcgcuuaagccg

SEQ ID NO: 1655997 - RNA, 19 nt, Artificial Sequence
  Description of Artificial Sequence: Synthetic oligonucleotide
agaggcaugagcucugacg

SEQ ID NO: 1655998 - RNA, 19 nt, Artificial Sequence
  Description of Artificial Sequence: Synthetic oligonucleotide
acaagagugaaguugcuga

SEQ ID NO: 1655999 - RNA, 19 nt, Artificial Sequence
  Description of Artificial Sequence: Synthetic oligonucleotide
ugucggaucaaaugugagg

SEQ ID NO: 1656000 - RNA, 19 nt, Artificial Sequence
  Description of Artificial Sequence: Synthetic oligonucleotide
cauguggcaauguagaguc

SEQ ID NO: 1656001 - RNA, 19 nt, Artificial Sequence
  Description of Artificial Sequence: Synthetic oligonucleotide
ugugaauuaacugauguuu

SEQ ID NO: 1656002 - RNA, 19 nt, Artificial Sequence
  Description of Artificial Sequence: Synthetic oligonucleotide
ugugugcuccgacagaaag

SEQ ID NO: 1656003 - RNA, 19 nt, Artificial Sequence
  Description of Artificial Sequence: Synthetic oligonucleotide
uugacaaugugguuucucc

SEQ ID NO: 1656004 - RNA, 19 nt, Artificial Sequence
  Description of Artificial Sequence: Synthetic oligonucleotide
gucggaucaaaugugaggg

SEQ ID NO: 1656005 - RNA, 19 nt, Artificial Sequence
  Description of Artificial Sequence: Synthetic oligonucleotide
ugcuuacacucauacaggg

SEQ ID NO: 1656006 - RNA, 19 nt, Artificial Sequence
  Description of Artificial Sequence: Synthetic oligonucleotide
aaugacugacuuccuauga

SEQ ID NO: 1656007 - RNA, 19 nt, Artificial Sequence
  Description of Artificial Sequence: Synthetic oligonucleotide
agcuauuacgcuuggaugu

SEQ ID NO: 1656008 - RNA, 19 nt, Artificial Sequence
  Description of Artificial Sequence: Synthetic oligonucleotide
uaguuguucuuuauggcug

SEQ ID NO: 1656009 - RNA, 19 nt, Artificial Sequence
  Description of Artificial Sequence: Synthetic oligonucleotide
uacuacaagagugaaguug

SEQ ID NO: 1656010 - RNA, 19 nt, Artificial Sequence
  Description of Artificial Sequence: Synthetic oligonucleotide
ugcuuaaaggcucugucac

SEQ ID NO: 1656011 - RNA, 19 nt, Artificial Sequence
  Description of Artificial Sequence: Synthetic oligonucleotide
uacugacagagcuauuacg

SEQ ID NO: 1656012 - RNA, 19 nt, Artificial Sequence
  Description of Artificial Sequence: Synthetic oligonucleotide
agugcuacugguuacuaca

SEQ ID NO: 1656013 - RNA, 19 nt, Artificial Sequence
  Description of Artificial Sequence: Synthetic oligonucleotide
aagguguucuugcacuuag

SEQ ID NO: 1656014 - RNA, 19 nt, Artificial Sequence
  Description of Artificial Sequence: Synthetic oligonucleotide
ucugacgaaauguuuuccc

SEQ ID NO: 1656015 - RNA, 19 nt, Artificial Sequence
  Description of Artificial Sequence: Synthetic oligonucleotide
acacgucacagguauaagg

SEQ ID NO: 1656016 - RNA, 19 nt, Artificial Sequence
  Description of Artificial Sequence: Synthetic oligonucleotide
uguugcaacuguuacauuu

SEQ ID NO: 1656017 - RNA, 19 nt, Artificial Sequence
  Description of Artificial Sequence: Synthetic oligonucleotide
cacgucacagguauaaggc

SEQ ID NO: 1656018 - RNA, 19 nt, Artificial Sequence
  Description of Artificial Sequence: Synthetic oligonucleotide
guaguuacucugcuuaaag

SEQ ID NO: 1656019 - RNA, 19 nt, Artificial Sequence
  Description of Artificial Sequence: Synthetic oligonucleotide
ugaccugagaccuucuggc

SEQ ID NO: 1656020 - RNA, 19 nt, Artificial Sequence
  Description of Artificial Sequence: Synthetic oligonucleotide
ucuaccacacacgucacag

SEQ ID NO: 1656021 - RNA, 19 nt, Artificial Sequence
  Description of Artificial Sequence: Synthetic oligonucleotide
agagugaaguugcugaugu

SEQ ID NO: 1656022 - RNA, 19 nt, Artificial Sequence
  Description of Artificial Sequence: Synthetic oligonucleotide
ugugacaaucuugacaaug

SEQ ID NO: 1656023 - RNA, 19 nt, Artificial Sequence
  Description of Artificial Sequence: Synthetic oligonucleotide
ugaauaagguaguuacucu

SEQ ID NO: 1656024 - RNA, 19 nt, Artificial Sequence
  Description of Artificial Sequence: Synthetic oligonucleotide
aaggugugugcuccgacag

SEQ ID NO: 1656025 - RNA, 19 nt, Artificial Sequence
  Description of Artificial Sequence: Synthetic oligonucleotide
ugugcuccgacagaaagcc

SEQ ID NO: 1656026 - RNA, 19 nt, Artificial Sequence
  Description of Artificial Sequence: Synthetic oligonucleotide
ugagcgcuuaagccgaagg

SEQ ID NO: 1656027 - RNA, 19 nt, Artificial Sequence
  Description of Artificial Sequence: Synthetic oligonucleotide
gaugcuuacugacagagcu

SEQ ID NO: 1656028 - RNA, 19 nt, Artificial Sequence
  Description of Artificial Sequence: Synthetic oligonucleotide
agagcuauuacgcuuggau

SEQ ID NO: 1656029 - RNA, 19 nt, Artificial Sequence
  Description of Artificial Sequence: Synthetic oligonucleotide
uuugcucucugggaaaagg

SEQ ID NO: 1656030 - RNA, 19 nt, Artificial Sequence
  Description of Artificial Sequence: Synthetic oligonucleotide
ugcuuagagaggcaugagc

SEQ ID NO: 1656031 - RNA, 19 nt, Artificial Sequence
  Description of Artificial Sequence: Synthetic oligonucleotide
aaggcucuaccacacacgu

SEQ ID NO: 1656032 - RNA, 19 nt, Artificial Sequence
  Description of Artificial Sequence: Synthetic oligonucleotide
caauguagagucgagcugc

SEQ ID NO: 1656033 - RNA, 19 nt, Artificial Sequence
  Description of Artificial Sequence: Synthetic oligonucleotide
ugaugucggaucaaaugug

SEQ ID NO: 1656034 - RNA, 19 nt, Artificial Sequence
  Description of Artificial Sequence: Synthetic oligonucleotide
uugcacuuagcacagccga

SEQ ID NO: 1656035 - RNA, 19 nt, Artificial Sequence
  Description of Artificial Sequence: Synthetic oligonucleotide
acaucugcuacauuuguau

SEQ ID NO: 1656036 - RNA, 19 nt, Artificial Sequence
  Description of Artificial Sequence: Synthetic oligonucleotide
uguuugaaaagcugggcau

SEQ ID NO: 1656037 - RNA, 19 nt, Artificial Sequence
  Description of Artificial Sequence: Synthetic oligonucleotide
cuuagcacagccgaagggc

SEQ ID NO: 1656038 - RNA, 19 nt, Artificial Sequence
  Description of Artificial Sequence: Synthetic oligonucleotide
uuuauggugcugcacuagu

SEQ ID NO: 1656039 - RNA, 19 nt, Artificial Sequence
  Description of Artificial Sequence: Synthetic oligonucleotide
uguucaugaaggugugugc

SEQ ID NO: 1656040 - RNA, 19 nt, Artificial Sequence
  Description of Artificial Sequence: Synthetic oligonucleotide
cugaauaagguaguuacuc

SEQ ID NO: 1656041 - RNA, 19 nt, Artificial Sequence
  Description of Artificial Sequence: Synthetic oligonucleotide
gagcuauuacgcuuggaug

SEQ ID NO: 1656042 - RNA, 19 nt, Artificial Sequence
  Description of Artificial Sequence: Synthetic oligonucleotide
uauaccaacuuggaugucu

SEQ ID NO: 1656043 - RNA, 19 nt, Artificial Sequence
  Description of Artificial Sequence: Synthetic oligonucleotide
ugaggggcggcuaaaacuc

SEQ ID NO: 1656044 - RNA, 19 nt, Artificial Sequence
  Description of Artificial Sequence: Synthetic oligonucleotide
ucugcuacauuuguauggc

SEQ ID NO: 1656045 - RNA, 19 nt, Artificial Sequence
  Description of Artificial Sequence: Synthetic oligonucleotide
ugaacucuccggugaaggg

SEQ ID NO: 1656046 - RNA, 19 nt, Artificial Sequence
  Description of Artificial Sequence: Synthetic oligonucleotide
agugcugcuucacaguaug

SEQ ID NO: 1656047 - RNA, 19 nt, Artificial Sequence
  Description of Artificial Sequence: Synthetic oligonucleotide
uuugaaaagcugggcaucc

SEQ ID NO: 1656048 - RNA, 19 nt, Artificial Sequence
  Description of Artificial Sequence: Synthetic oligonucleotide
aacuuggaugucugauggg

SEQ ID NO: 1656049 - RNA, 19 nt, Artificial Sequence
  Description of Artificial Sequence: Synthetic oligonucleotide
gaggcaugagcucugacga

SEQ ID NO: 1656050 - RNA, 19 nt, Artificial Sequence
  Description of Artificial Sequence: Synthetic oligonucleotide
cuaugaaugucuucacaug

SEQ ID NO: 1656051 - RNA, 19 nt, Artificial Sequence
  Description of Artificial Sequence: Synthetic oligonucleotide
uaccacacacgucacaggu

SEQ ID NO: 1656052 - RNA, 19 nt, Artificial Sequence
  Description of Artificial Sequence: Synthetic oligonucleotide
acuuagcacagccgaaggg

SEQ ID NO: 1656053 - RNA, 19 nt, Artificial Sequence
  Description of Artificial Sequence: Synthetic oligonucleotide
agugcauucaucuggcuuu

SEQ ID NO: 1656054 - RNA, 19 nt, Artificial Sequence
  Description of Artificial Sequence: Synthetic oligonucleotide
uuagagaggcaugagcucu

SEQ ID NO: 1656055 - RNA, 19 nt, Artificial Sequence
  Description of Artificial Sequence: Synthetic oligonucleotide
ugcuccgacagaaagcccu

SEQ ID NO: 1656056 - RNA, 19 nt, Artificial Sequence
  Description of Artificial Sequence: Synthetic oligonucleotide
ugucuucacauguacggga

SEQ ID NO: 1656057 - RNA, 19 nt, Artificial Sequence
  Description of Artificial Sequence: Synthetic oligonucleotide
uaaagguccuuguugcaac

SEQ ID NO: 1656058 - RNA, 19 nt, Artificial Sequence
  Description of Artificial Sequence: Synthetic oligonucleotide
gaucaaaugugaggggcgg

SEQ ID NO: 1656059 - RNA, 19 nt, Artificial Sequence
  Description of Artificial Sequence: Synthetic oligonucleotide
uccuuguugcaacuguuac

SEQ ID NO: 1656060 - RNA, 19 nt, Artificial Sequence
  Description of Artificial Sequence: Synthetic oligonucleotide
uaagccgaaggcucuacca

SEQ ID NO: 1656061 - RNA, 19 nt, Artificial Sequence
  Description of Artificial Sequence: Synthetic oligonucleotide
uccugacaaacauaaggcu

SEQ ID NO: 1656062 - RNA, 19 nt, Artificial Sequence
  Description of Artificial Sequence: Synthetic oligonucleotide
ucgagcugcaaaugaagug

SEQ ID NO: 1656063 - RNA, 19 nt, Artificial Sequence
  Description of Artificial Sequence: Synthetic oligonucleotide
aaugugguuucuccugcgu

SEQ ID NO: 1656064 - RNA, 19 nt, Artificial Sequence
  Description of Artificial Sequence: Synthetic oligonucleotide
uuacgcuuggaugugucag

SEQ ID NO: 1656065 - RNA, 19 nt, Artificial Sequence
  Description of Artificial Sequence: Synthetic oligonucleotide
ugacgaaauguuuucccac

SEQ ID NO: 1656066 - RNA, 19 nt, Artificial Sequence
  Description of Artificial Sequence: Synthetic oligonucleotide
gucacuaaguggcucuggg

SEQ ID NO: 1656067 - RNA, 19 nt, Artificial Sequence
  Description of Artificial Sequence: Synthetic oligonucleotide
ugacuuccuaugaaugucu

SEQ ID NO: 1656068 - RNA, 19 nt, Artificial Sequence
  Description of Artificial Sequence: Synthetic oligonucleotide
uuuaaagggcugcucacuu

SEQ ID NO: 1656069 - RNA, 19 nt, Artificial Sequence
  Description of Artificial Sequence: Synthetic oligonucleotide
ugugguuucuccugcgugu

SEQ ID NO: 1656070 - RNA, 19 nt, Artificial Sequence
  Description of Artificial Sequence: Synthetic oligonucleotide
auguacgggacucugcugu

SEQ ID NO: 1656071 - RNA, 19 nt, Artificial Sequence
  Description of Artificial Sequence: Synthetic oligonucleotide
cugaugcuuacugacagag

SEQ ID NO: 1656072 - RNA, 19 nt, Artificial Sequence
  Description of Artificial Sequence: Synthetic oligonucleotide
cagucaccacauuuaaagg

SEQ ID NO: 1656073 - RNA, 19 nt, Artificial Sequence
  Description of Artificial Sequence: Synthetic oligonucleotide
acauguacgggacucugcu

SEQ ID NO: 1656074 - RNA, 19 nt, Artificial Sequence
  Description of Artificial Sequence: Synthetic oligonucleotide
uuauaucuucucuggugug

SEQ ID NO: 1656075 - RNA, 19 nt, Artificial Sequence
  Description of Artificial Sequence: Synthetic oligonucleotide
uacgcuuggaugugucagg

SEQ ID NO: 1656076 - RNA, 19 nt, Artificial Sequence
  Description of Artificial Sequence: Synthetic oligonucleotide
auaagguaguuacucugcu

SEQ ID NO: 1656077 - RNA, 19 nt, Artificial Sequence
  Description of Artificial Sequence: Synthetic oligonucleotide
ugaacuuuauggugcugca

SEQ ID NO: 1656078 - RNA, 19 nt, Artificial Sequence
  Description of Artificial Sequence: Synthetic oligonucleotide
ucacaguaugaauucucug

SEQ ID NO: 1656079 - RNA, 19 nt, Artificial Sequence
  Description of Artificial Sequence: Synthetic oligonucleotide
ucuggcuuuauaccaacuu

SEQ ID NO: 1656080 - RNA, 19 nt, Artificial Sequence
  Description of Artificial Sequence: Synthetic oligonucleotide
acuaaguggcucugggcag

SEQ ID NO: 1656081 - RNA, 19 nt, Artificial Sequence
  Description of Artificial Sequence: Synthetic oligonucleotide
acuccugacacacucugga

SEQ ID NO: 1656082 - RNA, 19 nt, Artificial Sequence
  Description of Artificial Sequence: Synthetic oligonucleotide
ugcuucacaguaugaauuc

SEQ ID NO: 1656083 - RNA, 19 nt, Artificial Sequence
  Description of Artificial Sequence: Synthetic oligonucleotide
ugcuacauuuguauggcuu

SEQ ID NO: 1656084 - RNA, 19 nt, Artificial Sequence
  Description of Artificial Sequence: Synthetic oligonucleotide
agagucgagcugcaaauga

SEQ ID NO: 1656085 - RNA, 19 nt, Artificial Sequence
  Description of Artificial Sequence: Synthetic oligonucleotide
gaaggcucuaccacacacg

SEQ ID NO: 1656086 - RNA, 19 nt, Artificial Sequence
  Description of Artificial Sequence: Synthetic oligonucleotide
uguggcaauguagagucga

SEQ ID NO: 1656087 - RNA, 19 nt, Artificial Sequence
  Description of Artificial Sequence: Synthetic oligonucleotide
ugaugcuuagagaggcaug

SEQ ID NO: 1656088 - RNA, 19 nt, Artificial Sequence
  Description of Artificial Sequence: Synthetic oligonucleotide
gacgaaauguuuucccaca

SEQ ID NO: 1656089 - RNA, 19 nt, Artificial Sequence
  Description of Artificial Sequence: Synthetic oligonucleotide
ugcucucugggaaaaggcu

SEQ ID NO: 1656090 - RNA, 19 nt, Artificial Sequence
  Description of Artificial Sequence: Synthetic oligonucleotide
gugaauuaacugauguuug

SEQ ID NO: 1656091 - RNA, 19 nt, Artificial Sequence
  Description of Artificial Sequence: Synthetic oligonucleotide
ucauguggcaauguagagu

SEQ ID NO: 1656092 - RNA, 19 nt, Artificial Sequence
  Description of Artificial Sequence: Synthetic oligonucleotide
aaagguccuuguugcaacu

SEQ ID NO: 1656093 - RNA, 19 nt, Artificial Sequence
  Description of Artificial Sequence: Synthetic oligonucleotide
uuaagccgaaggcucuacc

SEQ ID NO: 1656094 - RNA, 19 nt, Artificial Sequence
  Description of Artificial Sequence: Synthetic oligonucleotide
uuacacucauacagggacu

SEQ ID NO: 1656095 - RNA, 19 nt, Artificial Sequence
  Description of Artificial Sequence: Synthetic oligonucleotide
ucggaucaaaugugagggg

SEQ ID NO: 1656096 - RNA, 19 nt, Artificial Sequence
  Description of Artificial Sequence: Synthetic oligonucleotide
gcuuauaucuucucuggug

SEQ ID NO: 1656097 - RNA, 19 nt, Artificial Sequence
  Description of Artificial Sequence: Synthetic oligonucleotide
ugcuacugguuacuacaag

SEQ ID NO: 1656098 - RNA, 19 nt, Artificial Sequence
  Description of Artificial Sequence: Synthetic oligonucleotide
uacaagagugaaguugcug

SEQ ID NO: 1656099 - RNA, 19 nt, Artificial Sequence
  Description of Artificial Sequence: Synthetic oligonucleotide
cugaggugagcgcuuaagc

SEQ ID NO: 1656100 - RNA, 19 nt, Artificial Sequence
  Description of Artificial Sequence: Synthetic oligonucleotide
gagcgcuuaagccgaaggc

SEQ ID NO: 1656101 - RNA, 19 nt, Artificial Sequence
  Description of Artificial Sequence: Synthetic oligonucleotide
ucaccacauuuaaagggcu

SEQ ID NO: 1656102 - RNA, 19 nt, Artificial Sequence
  Description of Artificial Sequence: Synthetic oligonucleotide
uccggugaaggguaaggca

SEQ ID NO: 1656103 - RNA, 19 nt, Artificial Sequence
  Description of Artificial Sequence: Synthetic oligonucleotide
ugaugcuuacugacagagc

SEQ ID NO: 1656104 - RNA, 19 nt, Artificial Sequence
  Description of Artificial Sequence: Synthetic oligonucleotide
caaugacugacuuccuaug

SEQ ID NO: 1656105 - RNA, 19 nt, Artificial Sequence
  Description of Artificial Sequence: Synthetic oligonucleotide
gcugaugucggaucaaaug

SEQ ID NO: 1656106 - RNA, 19 nt, Artificial Sequence
  Description of Artificial Sequence: Synthetic oligonucleotide
aagugcucuccacacugcu

SEQ ID NO: 1656107 - RNA, 19 nt, Artificial Sequence
  Description of Artificial Sequence: Synthetic oligonucleotide
cacuaaguggcucugggca

SEQ ID NO: 1656108 - RNA, 19 nt, Artificial Sequence
  Description of Artificial Sequence: Synthetic oligonucleotide
aaaugugaggggcggcuaa

SEQ ID NO: 1656109 - RNA, 19 nt, Artificial Sequence
  Description of Artificial Sequence: Synthetic oligonucleotide
uauuacgcuuggauguguc

SEQ ID NO: 1656110 - RNA, 19 nt, Artificial Sequence
  Description of Artificial Sequence: Synthetic oligonucleotide
ucugaccugagaccuucug

SEQ ID NO: 1656111 - RNA, 19 nt, Artificial Sequence
  Description of Artificial Sequence: Synthetic oligonucleotide
augucuucacauguacggg

SEQ ID NO: 1656112 - RNA, 19 nt, Artificial Sequence
  Description of Artificial Sequence: Synthetic oligonucleotide
cuuagagaggcaugagcuc

SEQ ID NO: 1656113 - RNA, 19 nt, Artificial Sequence
  Description of Artificial Sequence: Synthetic oligonucleotide
ucaaaugugaggggcggcu

SEQ ID NO: 1656114 - RNA, 19 nt, Artificial Sequence
  Description of Artificial Sequence: Synthetic oligonucleotide
uuauggcugaagguguucu

SEQ ID NO: 1656115 - RNA, 19 nt, Artificial Sequence
  Description of Artificial Sequence: Synthetic oligonucleotide
ugacagagcuauuacgcuu

SEQ ID NO: 1656116 - RNA, 19 nt, Artificial Sequence
  Description of Artificial Sequence: Synthetic oligonucleotide
ugcuuacugacagagcuau

SEQ ID NO: 1656117 - RNA, 19 nt, Artificial Sequence
  Description of Artificial Sequence: Synthetic oligonucleotide
cacuuagcacagccgaagg

SEQ ID NO: 1656118 - RNA, 19 nt, Artificial Sequence
  Description of Artificial Sequence: Synthetic oligonucleotide
ucaauggugugaacuuuau

SEQ ID NO: 1656119 - RNA, 19 nt, Artificial Sequence
  Description of Artificial Sequence: Synthetic oligonucleotide
uccgacagaaagcccuccc

SEQ ID NO: 1656120 - RNA, 19 nt, Artificial Sequence
  Description of Artificial Sequence: Synthetic oligonucleotide
acucugcugucacuaagug

SEQ ID NO: 1656121 - RNA, 19 nt, Artificial Sequence
  Description of Artificial Sequence: Synthetic oligonucleotide
cugcgugugaacccucugg

SEQ ID NO: 1656122 - RNA, 19 nt, Artificial Sequence
  Description of Artificial Sequence: Synthetic oligonucleotide
uucuccugcgugugaaccc

SEQ ID NO: 1656123 - RNA, 19 nt, Artificial Sequence
  Description of Artificial Sequence: Synthetic oligonucleotide
uugucuguggugugacuca

SEQ ID NO: 1656124 - RNA, 19 nt, Artificial Sequence
  Description of Artificial Sequence: Synthetic oligonucleotide
gaugucggaucaaauguga

SEQ ID NO: 1656125 - RNA, 19 nt, Artificial Sequence
  Description of Artificial Sequence: Synthetic oligonucleotide
augugguuucuccugcgug

SEQ ID NO: 1656126 - RNA, 19 nt, Artificial Sequence
  Description of Artificial Sequence: Synthetic oligonucleotide
ugcaacuguuacauuuaaa

SEQ ID NO: 1656127 - RNA, 19 nt, Artificial Sequence
  Description of Artificial Sequence: Synthetic oligonucleotide
aucaaaugugaggggcggc

SEQ ID NO: 1656128 - RNA, 19 nt, Artificial Sequence
  Description of Artificial Sequence: Synthetic oligonucleotide
cuugucuguggugugacuc

SEQ ID NO: 1656129 - RNA, 19 nt, Artificial Sequence
  Description of Artificial Sequence: Synthetic oligonucleotide
uuguucuuuauggcugaag

SEQ ID NO: 1656130 - RNA, 19 nt, Artificial Sequence
  Description of Artificial Sequence: Synthetic oligonucleotide
uguugguuucaaugacuga

SEQ ID NO: 1656131 - RNA, 19 nt, Artificial Sequence
  Description of Artificial Sequence: Synthetic oligonucleotide
caaugugguuucuccugcg

SEQ ID NO: 1656132 - RNA, 19 nt, Artificial Sequence
  Description of Artificial Sequence: Synthetic oligonucleotide
auuacgcuuggauguguca

SEQ ID NO: 1656133 - RNA, 19 nt, Artificial Sequence
  Description of Artificial Sequence: Synthetic oligonucleotide
caucugcuacauuuguaug

SEQ ID NO: 1656134 - RNA, 19 nt, Artificial Sequence
  Description of Artificial Sequence: Synthetic oligonucleotide
ugacacacucuggacacug

SEQ ID NO: 1656135 - RNA, 19 nt, Artificial Sequence
  Description of Artificial Sequence: Synthetic oligonucleotide
ugucgggugagcugggcac

SEQ ID NO: 1656136 - RNA, 19 nt, Artificial Sequence
  Description of Artificial Sequence: Synthetic oligonucleotide
ggcugaugcuuacugacag

SEQ ID NO: 1656137 - RNA, 19 nt, Artificial Sequence
  Description of Artificial Sequence: Synthetic oligonucleotide
uuaaagggcugcucacuuc

SEQ ID NO: 1656138 - RNA, 19 nt, Artificial Sequence
  Description of Artificial Sequence: Synthetic oligonucleotide
agcgcuuaagccgaaggcu

SEQ ID NO: 1656139 - RNA, 19 nt, Artificial Sequence
  Description of Artificial Sequence: Synthetic oligonucleotide
ucuucacauguacgggacu

SEQ ID NO: 1656140 - RNA, 19 nt, Artificial Sequence
  Description of Artificial Sequence: Synthetic oligonucleotide
gcuacugguuacuacaaga

SEQ ID NO: 1656141 - RNA, 19 nt, Artificial Sequence
  Description of Artificial Sequence: Synthetic oligonucleotide
ggaaggcugaugcuuacug

SEQ ID NO: 1656142 - RNA, 19 nt, Artificial Sequence
  Description of Artificial Sequence: Synthetic oligonucleotide
cugacgaaauguuuuccca

SEQ ID NO: 1656143 - RNA, 19 nt, Artificial Sequence
  Description of Artificial Sequence: Synthetic oligonucleotide
cugaugucggaucaaaugu

SEQ ID NO: 1656144 - RNA, 19 nt, Artificial Sequence
  Description of Artificial Sequence: Synthetic oligonucleotide
ucaggcucagugcauucau

SEQ ID NO: 1656145 - RNA, 19 nt, Artificial Sequence
  Description of Artificial Sequence: Synthetic oligonucleotide
ugcacuaguuguucuuuau

SEQ ID NO: 1656146 - RNA, 19 nt, Artificial Sequence
  Description of Artificial Sequence: Synthetic oligonucleotide
ugucacuaaguggcucugg

SEQ ID NO: 1656147 - RNA, 19 nt, Artificial Sequence
  Description of Artificial Sequence: Synthetic oligonucleotide
uacacucauacagggacuc

SEQ ID NO: 1656148 - RNA, 19 nt, Artificial Sequence
  Description of Artificial Sequence: Synthetic oligonucleotide
cuuuauggugcugcacuag

SEQ ID NO: 1656149 - RNA, 19 nt, Artificial Sequence
  Description of Artificial Sequence: Synthetic oligonucleotide
uugcugauguuugcuaaga

SEQ ID NO: 1656150 - RNA, 19 nt, Artificial Sequence
  Description of Artificial Sequence: Synthetic oligonucleotide
uuauggugcugcacuaguu

SEQ ID NO: 1656151 - RNA, 19 nt, Artificial Sequence
  Description of Artificial Sequence: Synthetic oligonucleotide
cacucuggacacugguagg

SEQ ID NO: 1656152 - RNA, 19 nt, Artificial Sequence
  Description of Artificial Sequence: Synthetic oligonucleotide
acugaggugagcgcuuaag

SEQ ID NO: 1656153 - RNA, 19 nt, Artificial Sequence
  Description of Artificial Sequence: Synthetic oligonucleotide
cuuacugacagagcuauua

SEQ ID NO: 1656154 - RNA, 19 nt, Artificial Sequence
  Description of Artificial Sequence: Synthetic oligonucleotide
cuucacauguacgggacuc

SEQ ID NO: 1656155 - RNA, 19 nt, Artificial Sequence
  Description of Artificial Sequence: Synthetic oligonucleotide
acagccgaagggcuugucu

SEQ ID NO: 1656156 - RNA, 19 nt, Artificial Sequence
  Description of Artificial Sequence: Synthetic oligonucleotide
uaagguaguuacucugcuu

SEQ ID NO: 1656157 - RNA, 19 nt, Artificial Sequence
  Description of Artificial Sequence: Synthetic oligonucleotide
cagccgaagggcuugucug

SEQ ID NO: 1656158 - RNA, 19 nt, Artificial Sequence
  Description of Artificial Sequence: Synthetic oligonucleotide
agguuugcaaaguguuggu

SEQ ID NO: 1656159 - RNA, 19 nt, Artificial Sequence
  Description of Artificial Sequence: Synthetic oligonucleotide
guggauuugcugauguuca

SEQ ID NO: 1656160 - RNA, 19 nt, Artificial Sequence
  Description of Artificial Sequence: Synthetic oligonucleotide
caauggugugaacuuuaug

SEQ ID NO: 1656161 - RNA, 19 nt, Artificial Sequence
  Description of Artificial Sequence: Synthetic oligonucleotide
guuugaaaagcugggcauc

SEQ ID NO: 1656162 - RNA, 19 nt, Artificial Sequence
  Description of Artificial Sequence: Synthetic oligonucleotide
gauggguucugaccugaga

SEQ ID NO: 1656163 - RNA, 19 nt, Artificial Sequence
  Description of Artificial Sequence: Synthetic oligonucleotide
ugcacuuagcacagccgaa

SEQ ID NO: 1656164 - RNA, 19 nt, Artificial Sequence
  Description of Artificial Sequence: Synthetic oligonucleotide
ugucuguggugugacucag

SEQ ID NO: 1656165 - RNA, 19 nt, Artificial Sequence
  Description of Artificial Sequence: Synthetic oligonucleotide
uacgggacucugcugucac

SEQ ID NO: 1656166 - RNA, 19 nt, Artificial Sequence
  Description of Artificial Sequence: Synthetic oligonucleotide
gagugguugaaagcuuuac

SEQ ID NO: 1656167 - RNA, 19 nt, Artificial Sequence
  Description of Artificial Sequence: Synthetic oligonucleotide
gcuuggaugugucaggcuc

SEQ ID NO: 1656168 - RNA, 19 nt, Artificial Sequence
  Description of Artificial Sequence: Synthetic oligonucleotide
acuuuauggugcugcacua

SEQ ID NO: 1656169 - RNA, 19 nt, Artificial Sequence
  Description of Artificial Sequence: Synthetic oligonucleotide
uagagucgagcugcaaaug

SEQ ID NO: 1656170 - RNA, 19 nt, Artificial Sequence
  Description of Artificial Sequence: Synthetic oligonucleotide
ugaagguguucuugcacuu

SEQ ID NO: 1656171 - RNA, 19 nt, Artificial Sequence
  Description of Artificial Sequence: Synthetic oligonucleotide
ucaguacacuuguaugguu

SEQ ID NO: 1656172 - RNA, 19 nt, Artificial Sequence
  Description of Artificial Sequence: Synthetic oligonucleotide
uccggaaggcugaugcuua

SEQ ID NO: 1656173 - RNA, 19 nt, Artificial Sequence
  Description of Artificial Sequence: Synthetic oligonucleotide
aauguagagucgagcugca

SEQ ID NO: 1656174 - RNA, 19 nt, Artificial Sequence
  Description of Artificial Sequence: Synthetic oligonucleotide
uuuauggcugaagguguuc

SEQ ID NO: 1656175 - RNA, 19 nt, Artificial Sequence
  Description of Artificial Sequence: Synthetic oligonucleotide
uccugacuaaagguccuug

SEQ ID NO: 1656176 - RNA, 19 nt, Artificial Sequence
  Description of Artificial Sequence: Synthetic oligonucleotide
auaccaacuuggaugucug

SEQ ID NO: 1656177 - RNA, 19 nt, Artificial Sequence
  Description of Artificial Sequence: Synthetic oligonucleotide
cuuggaugugucaggcuca

SEQ ID NO: 1656178 - RNA, 19 nt, Artificial Sequence
  Description of Artificial Sequence: Synthetic oligonucleotide
cugguagggucuguggccc

SEQ ID NO: 1656179 - RNA, 19 nt, Artificial Sequence
  Description of Artificial Sequence: Synthetic oligonucleotide
accaacuuggaugucugau

SEQ ID NO: 1656180 - RNA, 19 nt, Artificial Sequence
  Description of Artificial Sequence: Synthetic oligonucleotide
gugacucagcugaugucgg

SEQ ID NO: 1656181 - RNA, 19 nt, Artificial Sequence
  Description of Artificial Sequence: Synthetic oligonucleotide
gaagugcucuccacacugc

SEQ ID NO: 1656182 - RNA, 19 nt, Artificial Sequence
  Description of Artificial Sequence: Synthetic oligonucleotide
uucacauguacgggacucu

SEQ ID NO: 1656183 - RNA, 19 nt, Artificial Sequence
  Description of Artificial Sequence: Synthetic oligonucleotide
guucuuuauggcugaaggu

SEQ ID NO: 1656184 - RNA, 19 nt, Artificial Sequence
  Description of Artificial Sequence: Synthetic oligonucleotide
guaaggcaggagcucuggc

SEQ ID NO: 1656185 - RNA, 19 nt, Artificial Sequence
  Description of Artificial Sequence: Synthetic oligonucleotide
cauguacgggacucugcug

SEQ ID NO: 1656186 - RNA, 19 nt, Artificial Sequence
  Description of Artificial Sequence: Synthetic oligonucleotide
agguguucuugcacuuagc

SEQ ID NO: 1656187 - RNA, 19 nt, Artificial Sequence
  Description of Artificial Sequence: Synthetic oligonucleotide
ucuccugcgugugaacccu

SEQ ID NO: 1656188 - RNA, 19 nt, Artificial Sequence
  Description of Artificial Sequence: Synthetic oligonucleotide
uggaugucugauggguucu

SEQ ID NO: 1656189 - RNA, 19 nt, Artificial Sequence
  Description of Artificial Sequence: Synthetic oligonucleotide
ugguuacuacaagagugaa

SEQ ID NO: 1656190 - RNA, 19 nt, Artificial Sequence
  Description of Artificial Sequence: Synthetic oligonucleotide
ugguuugcucucugggaaa

SEQ ID NO: 1656191 - RNA, 19 nt, Artificial Sequence
  Description of Artificial Sequence: Synthetic oligonucleotide
uuacuacaagagugaaguu

SEQ ID NO: 1656192 - RNA, 19 nt, Artificial Sequence
  Description of Artificial Sequence: Synthetic oligonucleotide
augucggaucaaaugugag

SEQ ID NO: 1656193 - RNA, 19 nt, Artificial Sequence
  Description of Artificial Sequence: Synthetic oligonucleotide
guagagucgagcugcaaau

SEQ ID NO: 1656194 - RNA, 19 nt, Artificial Sequence
  Description of Artificial Sequence: Synthetic oligonucleotide
aacucuccggugaagggua

SEQ ID NO: 1656195 - RNA, 19 nt, Artificial Sequence
  Description of Artificial Sequence: Synthetic oligonucleotide
cagugcuacugguuacuac

SEQ ID NO: 1656196 - RNA, 19 nt, Artificial Sequence
  Description of Artificial Sequence: Synthetic oligonucleotide
gucuucacauguacgggac

SEQ ID NO: 1656197 - RNA, 19 nt, Artificial Sequence
  Description of Artificial Sequence: Synthetic oligonucleotide
cuccugacacacucuggac

SEQ ID NO: 1656198 - RNA, 19 nt, Artificial Sequence
  Description of Artificial Sequence: Synthetic oligonucleotide
aaugugaggggcggcuaaa

SEQ ID NO: 1656199 - RNA, 19 nt, Artificial Sequence
  Description of Artificial Sequence: Synthetic oligonucleotide
gugugcuccgacagaaagc

SEQ ID NO: 1656200 - RNA, 19 nt, Artificial Sequence
  Description of Artificial Sequence: Synthetic oligonucleotide
cuaaagguccuuguugcaa

SEQ ID NO: 1656201 - RNA, 19 nt, Artificial Sequence
  Description of Artificial Sequence: Synthetic oligonucleotide
cuccggugaaggguaaggc

SEQ ID NO: 1656202 - RNA, 19 nt, Artificial Sequence
  Description of Artificial Sequence: Synthetic oligonucleotide
gcggcuaaaacuccugaca

SEQ ID NO: 1656203 - RNA, 19 nt, Artificial Sequence
  Description of Artificial Sequence: Synthetic oligonucleotide
uguacgggacucugcuguc

SEQ ID NO: 1656204 - RNA, 19 nt, Artificial Sequence
  Description of Artificial Sequence: Synthetic oligonucleotide
gugacaaucuugacaaugu

SEQ ID NO: 1656205 - RNA, 19 nt, Artificial Sequence
  Description of Artificial Sequence: Synthetic oligonucleotide
uguggacgcucauguggca

SEQ ID NO: 1656206 - RNA, 19 nt, Artificial Sequence
  Description of Artificial Sequence: Synthetic oligonucleotide
gaucuucaggguggaggag

SEQ ID NO: 1656207 - RNA, 19 nt, Artificial Sequence
  Description of Artificial Sequence: Synthetic oligonucleotide
gugcucuccacacugcuua

SEQ ID NO: 1656208 - RNA, 19 nt, Artificial Sequence
  Description of Artificial Sequence: Synthetic oligonucleotide
ccuucuggcuuauaucuuc

SEQ ID NO: 1656209 - RNA, 19 nt, Artificial Sequence
  Description of Artificial Sequence: Synthetic oligonucleotide
uauggcugaagguguucuu

SEQ ID NO: 1656210 - RNA, 19 nt, Artificial Sequence
  Description of Artificial Sequence: Synthetic oligonucleotide
agcacagccgaagggcuug

SEQ ID NO: 1656211 - RNA, 19 nt, Artificial Sequence
  Description of Artificial Sequence: Synthetic oligonucleotide
agggacucaauggugugaa

SEQ ID NO: 1656212 - RNA, 19 nt, Artificial Sequence
  Description of Artificial Sequence: Synthetic oligonucleotide
uuccggaaggcugaugcuu

SEQ ID NO: 1656213 - RNA, 19 nt, Artificial Sequence
  Description of Artificial Sequence: Synthetic oligonucleotide
guucugaccugagaccuuc

SEQ ID NO: 1656214 - RNA, 19 nt, Artificial Sequence
  Description of Artificial Sequence: Synthetic oligonucleotide
guugcaacuguuacauuua

SEQ ID NO: 1656215 - RNA, 19 nt, Artificial Sequence
  Description of Artificial Sequence: Synthetic oligonucleotide
uggacgcucauguggcaau

SEQ ID NO: 1656216 - RNA, 19 nt, Artificial Sequence
  Description of Artificial Sequence: Synthetic oligonucleotide
cuuaagccgaaggcucuac

SEQ ID NO: 1656217 - RNA, 19 nt, Artificial Sequence
  Description of Artificial Sequence: Synthetic oligonucleotide
guucaugaaggugugugcu

SEQ ID NO: 1656218 - RNA, 19 nt, Artificial Sequence
  Description of Artificial Sequence: Synthetic oligonucleotide
uggugcugcacuaguuguu

SEQ ID NO: 1656219 - RNA, 19 nt, Artificial Sequence
  Description of Artificial Sequence: Synthetic oligonucleotide
gcuuagagaggcaugagcu

SEQ ID NO: 1656220 - RNA, 19 nt, Artificial Sequence
  Description of Artificial Sequence: Synthetic oligonucleotide
aggugagcgcuuaagccga

SEQ ID NO: 1656221 - RNA, 19 nt, Artificial Sequence
  Description of Artificial Sequence: Synthetic oligonucleotide
uggcucugggcagugcuac

SEQ ID NO: 1656222 - RNA, 19 nt, Artificial Sequence
  Description of Artificial Sequence: Synthetic oligonucleotide
gcacuuagcacagccgaag

SEQ ID NO: 1656223 - RNA, 19 nt, Artificial Sequence
  Description of Artificial Sequence: Synthetic oligonucleotide
uucugaccugagaccuucu

SEQ ID NO: 1656224 - RNA, 19 nt, Artificial Sequence
  Description of Artificial Sequence: Synthetic oligonucleotide
gcucugacgaaauguuuuc

SEQ ID NO: 1656225 - RNA, 19 nt, Artificial Sequence
  Description of Artificial Sequence: Synthetic oligonucleotide
augcuuagagaggcaugag

SEQ ID NO: 1656226 - RNA, 19 nt, Artificial Sequence
  Description of Artificial Sequence: Synthetic oligonucleotide
ggcuaaaacuccugacaca

SEQ ID NO: 1656227 - RNA, 19 nt, Artificial Sequence
  Description of Artificial Sequence: Synthetic oligonucleotide
ugaacccucuggugcugac

SEQ ID NO: 1656228 - RNA, 19 nt, Artificial Sequence
  Description of Artificial Sequence: Synthetic oligonucleotide
ggcggcuaaaacuccugac

SEQ ID NO: 1656229 - RNA, 19 nt, Artificial Sequence
  Description of Artificial Sequence: Synthetic oligonucleotide
aggugugugcuccgacaga

SEQ ID NO: 1656230 - RNA, 19 nt, Artificial Sequence
  Description of Artificial Sequence: Synthetic oligonucleotide
gcuauuacgcuuggaugug

SEQ ID NO: 1656231 - RNA, 19 nt, Artificial Sequence
  Description of Artificial Sequence: Synthetic oligonucleotide
aagugcugcuucacaguau

SEQ ID NO: 1656232 - RNA, 19 nt, Artificial Sequence
  Description of Artificial Sequence: Synthetic oligonucleotide
uguggcccgaguggauuug

SEQ ID NO: 1656233 - RNA, 19 nt, Artificial Sequence
  Description of Artificial Sequence: Synthetic oligonucleotide
cuguuacauuuaaagggcu

SEQ ID NO: 1656234 - RNA, 19 nt, Artificial Sequence
  Description of Artificial Sequence: Synthetic oligonucleotide
cugacagagcuauuacgcu

SEQ ID NO: 1656235 - RNA, 19 nt, Artificial Sequence
  Description of Artificial Sequence: Synthetic oligonucleotide
cugcucacuuccggaaggc

SEQ ID NO: 1656236 - RNA, 19 nt, Artificial Sequence
  Description of Artificial Sequence: Synthetic oligonucleotide
gcucacuuccggaaggcug

SEQ ID NO: 1656237 - RNA, 19 nt, Artificial Sequence
  Description of Artificial Sequence: Synthetic oligonucleotide
cggcuaaaacuccugacac

SEQ ID NO: 1656238 - RNA, 19 nt, Artificial Sequence
  Description of Artificial Sequence: Synthetic oligonucleotide
cgcucauguggcaauguag

SEQ ID NO: 1656239 - RNA, 19 nt, Artificial Sequence
  Description of Artificial Sequence: Synthetic oligonucleotide
ggcuuucccacagucacca

SEQ ID NO: 1656240 - RNA, 19 nt, Artificial Sequence
  Description of Artificial Sequence: Synthetic oligonucleotide
acgcucauguggcaaugua

SEQ ID NO: 1656241 - RNA, 19 nt, Artificial Sequence
  Description of Artificial Sequence: Synthetic oligonucleotide
uggcccgaguggauuugcu

SEQ ID NO: 1656242 - RNA, 19 nt, Artificial Sequence
  Description of Artificial Sequence: Synthetic oligonucleotide
acucauacagggacucaau

SEQ ID NO: 1656243 - RNA, 19 nt, Artificial Sequence
  Description of Artificial Sequence: Synthetic oligonucleotide
augaaggugugugcuccga

SEQ ID NO: 1656244 - RNA, 19 nt, Artificial Sequence
  Description of Artificial Sequence: Synthetic oligonucleotide
cacagucaccacauuuaaa

SEQ ID NO: 1656245 - RNA, 19 nt, Artificial Sequence
  Description of Artificial Sequence: Synthetic oligonucleotide
uagcacagccgaagggcuu

SEQ ID NO: 1656246 - RNA, 19 nt, Artificial Sequence
  Description of Artificial Sequence: Synthetic oligonucleotide
gaggggcggcuaaaacucc

SEQ ID NO: 1656247 - RNA, 19 nt, Artificial Sequence
  Description of Artificial Sequence: Synthetic oligonucleotide
ucgcugcauuuguaaggcu

SEQ ID NO: 1656248 - RNA, 19 nt, Artificial Sequence
  Description of Artificial Sequence: Synthetic oligonucleotide
ggcuuuauaccaacuugga

SEQ ID NO: 1656249 - RNA, 19 nt, Artificial Sequence
  Description of Artificial Sequence: Synthetic oligonucleotide
gugucgggugagcugggca

SEQ ID NO: 1656250 - RNA, 19 nt, Artificial Sequence
  Description of Artificial Sequence: Synthetic oligonucleotide
ggacucaauggugugaacu

SEQ ID NO: 1656251 - RNA, 19 nt, Artificial Sequence
  Description of Artificial Sequence: Synthetic oligonucleotide
gaagguguucuugcacuua

SEQ ID NO: 1656252 - RNA, 19 nt, Artificial Sequence
  Description of Artificial Sequence: Synthetic oligonucleotide
ggugugugcuccgacagaa

SEQ ID NO: 1656253 - RNA, 19 nt, Artificial Sequence
  Description of Artificial Sequence: Synthetic oligonucleotide
cugucacuaaguggcucug

SEQ ID NO: 1656254 - RNA, 19 nt, Artificial Sequence
  Description of Artificial Sequence: Synthetic oligonucleotide
ucgggugagcugggcaccc

SEQ ID NO: 1656255 - RNA, 19 nt, Artificial Sequence
  Description of Artificial Sequence: Synthetic oligonucleotide
ggcccgaguggauuugcug

SEQ ID NO: 1656256 - RNA, 19 nt, Artificial Sequence
  Description of Artificial Sequence: Synthetic oligonucleotide
gucgagcugcaaaugaagu

SEQ ID NO: 1656257 - RNA, 19 nt, Artificial Sequence
  Description of Artificial Sequence: Synthetic oligonucleotide
acacucauacagggacuca

SEQ ID NO: 1656258 - RNA, 19 nt, Artificial Sequence
  Description of Artificial Sequence: Synthetic oligonucleotide
ugacugaggugagcgcuua

SEQ ID NO: 1656259 - RNA, 19 nt, Artificial Sequence
  Description of Artificial Sequence: Synthetic oligonucleotide
cuccgacagaaagcccucc

SEQ ID NO: 1656260 - RNA, 19 nt, Artificial Sequence
  Description of Artificial Sequence: Synthetic oligonucleotide
cuaaaacuccugacacacu

SEQ ID NO: 1656261 - RNA, 19 nt, Artificial Sequence
  Description of Artificial Sequence: Synthetic oligonucleotide
cucuaccacacacgucaca

SEQ ID NO: 1656262 - RNA, 19 nt, Artificial Sequence
  Description of Artificial Sequence: Synthetic oligonucleotide
gucgggugagcugggcacc

SEQ ID NO: 1656263 - RNA, 19 nt, Artificial Sequence
  Description of Artificial Sequence: Synthetic oligonucleotide
agcugaugucggaucaaau

SEQ ID NO: 1656264 - RNA, 19 nt, Artificial Sequence
  Description of Artificial Sequence: Synthetic oligonucleotide
aggcucuaccacacacguc

SEQ ID NO: 1656265 - RNA, 19 nt, Artificial Sequence
  Description of Artificial Sequence: Synthetic oligonucleotide
cugacuaaagguccuuguu

SEQ ID NO: 1656266 - RNA, 19 nt, Artificial Sequence
  Description of Artificial Sequence: Synthetic oligonucleotide
gguaguuacucugcuuaaa

SEQ ID NO: 1656267 - RNA, 19 nt, Artificial Sequence
  Description of Artificial Sequence: Synthetic oligonucleotide
gcuuuauaccaacuuggau

SEQ ID NO: 1656268 - RNA, 19 nt, Artificial Sequence
  Description of Artificial Sequence: Synthetic oligonucleotide
gauguucaugaaggugugu

SEQ ID NO: 1656269 - RNA, 19 nt, Artificial Sequence
  Description of Artificial Sequence: Synthetic oligonucleotide
acgggacucugcugucacu

SEQ ID NO: 1656270 - RNA, 19 nt, Artificial Sequence
  Description of Artificial Sequence: Synthetic oligonucleotide
cgacagaaagcccucccac

SEQ ID NO: 1656271 - RNA, 19 nt, Artificial Sequence
  Description of Artificial Sequence: Synthetic oligonucleotide
ggcaugagcucugacgaaa

SEQ ID NO: 1656272 - RNA, 19 nt, Artificial Sequence
  Description of Artificial Sequence: Synthetic oligonucleotide
gugagcgcuuaagccgaag

SEQ ID NO: 1656273 - RNA, 19 nt, Artificial Sequence
  Description of Artificial Sequence: Synthetic oligonucleotide
ccgaagggcuugucugugg

SEQ ID NO: 1656274 - RNA, 19 nt, Artificial Sequence
  Description of Artificial Sequence: Synthetic oligonucleotide
augcuuacugacagagcua

SEQ ID NO: 1656275 - RNA, 19 nt, Artificial Sequence
  Description of Artificial Sequence: Synthetic oligonucleotide
cugcacuaguuguucuuua

SEQ ID NO: 1656276 - RNA, 19 nt, Artificial Sequence
  Description of Artificial Sequence: Synthetic oligonucleotide
guccuuguugcaacuguua

SEQ ID NO: 1656277 - RNA, 19 nt, Artificial Sequence
  Description of Artificial Sequence: Synthetic oligonucleotide
gcuuacacucauacaggga

SEQ ID NO: 1656278 - RNA, 19 nt, Artificial Sequence
  Description of Artificial Sequence: Synthetic oligonucleotide
aggggcggcuaaaacuccu

SEQ ID NO: 1656279 - RNA, 19 nt, Artificial Sequence
  Description of Artificial Sequence: Synthetic oligonucleotide
gcgcuuaagccgaaggcuc

SEQ ID NO: 1656280 - RNA, 19 nt, Artificial Sequence
  Description of Artificial Sequence: Synthetic oligonucleotide
ggugagcugggcacccaag

SEQ ID NO: 1656281 - RNA, 19 nt, Artificial Sequence
  Description of Artificial Sequence: Synthetic oligonucleotide
cagggacucaaugguguga

SEQ ID NO: 1656282 - RNA, 19 nt, Artificial Sequence
  Description of Artificial Sequence: Synthetic oligonucleotide
guacgggacucugcuguca

SEQ ID NO: 1656283 - RNA, 19 nt, Artificial Sequence
  Description of Artificial Sequence: Synthetic oligonucleotide
gacugaggugagcgcuuaa

SEQ ID NO: 1656284 - RNA, 19 nt, Artificial Sequence
  Description of Artificial Sequence: Synthetic oligonucleotide
gggcagugcuacugguuac

SEQ ID NO: 1656285 - RNA, 19 nt, Artificial Sequence
  Description of Artificial Sequence: Synthetic oligonucleotide
guggcccgaguggauuugc

SEQ ID NO: 1656286 - RNA, 19 nt, Artificial Sequence
  Description of Artificial Sequence: Synthetic oligonucleotide
cagugcauucaucuggcuu

SEQ ID NO: 1656287 - RNA, 19 nt, Artificial Sequence
  Description of Artificial Sequence: Synthetic oligonucleotide
ggaugucugauggguucug

SEQ ID NO: 1656288 - RNA, 19 nt, Artificial Sequence
  Description of Artificial Sequence: Synthetic oligonucleotide
ggcuugucuguggugugac

SEQ ID NO: 1656289 - RNA, 19 nt, Artificial Sequence
  Description of Artificial Sequence: Synthetic oligonucleotide
ggucuguggcccgagugga

SEQ ID NO: 1656290 - RNA, 19 nt, Artificial Sequence
  Description of Artificial Sequence: Synthetic oligonucleotide
gggcggcuaaaacuccuga

SEQ ID NO: 1656291 - RNA, 19 nt, Artificial Sequence
  Description of Artificial Sequence: Synthetic oligonucleotide
cuuccggaaggcugaugcu

SEQ ID NO: 1656292 - RNA, 19 nt, Artificial Sequence
  Description of Artificial Sequence: Synthetic oligonucleotide
ggacgcucauguggcaaug

SEQ ID NO: 1656293 - RNA, 19 nt, Artificial Sequence
  Description of Artificial Sequence: Synthetic oligonucleotide
gggacucaauggugugaac

SEQ ID NO: 1656294 - RNA, 19 nt, Artificial Sequence
  Description of Artificial Sequence: Synthetic oligonucleotide
ccugagaccuucuggcuua

SEQ ID NO: 1656295 - RNA, 19 nt, Artificial Sequence
  Description of Artificial Sequence: Synthetic oligonucleotide
gcugaauaagguaguuacu

SEQ ID NO: 1656296 - RNA, 19 nt, Artificial Sequence
  Description of Artificial Sequence: Synthetic oligonucleotide
cuaaguggcucugggcagu

SEQ ID NO: 1656297 - RNA, 19 nt, Artificial Sequence
  Description of Artificial Sequence: Synthetic oligonucleotide
gaacccucuggugcugacu

SEQ ID NO: 1656298 - RNA, 19 nt, Artificial Sequence
  Description of Artificial Sequence: Synthetic oligonucleotide
cguguuucuucugguuugc

SEQ ID NO: 1656299 - RNA, 19 nt, Artificial Sequence
  Description of Artificial Sequence: Synthetic oligonucleotide
gacgcucauguggcaaugu

SEQ ID NO: 1656300 - RNA, 19 nt, Artificial Sequence
  Description of Artificial Sequence: Synthetic oligonucleotide
gagugaaguugcugauguu

SEQ ID NO: 1656301 - RNA, 19 nt, Artificial Sequence
  Description of Artificial Sequence: Synthetic oligonucleotide
cuauuacgcuuggaugugu

SEQ ID NO: 1656302 - RNA, 19 nt, Artificial Sequence
  Description of Artificial Sequence: Synthetic oligonucleotide
gguggaucuucagggugga

SEQ ID NO: 1656303 - RNA, 19 nt, Artificial Sequence
  Description of Artificial Sequence: Synthetic oligonucleotide
cacuuccggaaggcugaug

SEQ ID NO: 1656304 - RNA, 19 nt, Artificial Sequence
  Description of Artificial Sequence: Synthetic oligonucleotide
cugcuacauuuguauggcu

SEQ ID NO: 1656305 - RNA, 19 nt, Artificial Sequence
  Description of Artificial Sequence: Synthetic oligonucleotide
ccgacagaaagcccuccca

SEQ ID NO: 1656306 - RNA, 19 nt, Artificial Sequence
  Description of Artificial Sequence: Synthetic oligonucleotide
gugcugcuucacaguauga

SEQ ID NO: 1656307 - RNA, 19 nt, Artificial Sequence
  Description of Artificial Sequence: Synthetic oligonucleotide
cagagcuauuacgcuugga

SEQ ID NO: 1656308 - RNA, 19 nt, Artificial Sequence
  Description of Artificial Sequence: Synthetic oligonucleotide
ugagaccuucuggcuuaua

SEQ ID NO: 1656309 - RNA, 19 nt, Artificial Sequence
  Description of Artificial Sequence: Synthetic oligonucleotide
ccugcgugugaacccucug

SEQ ID NO: 1656310 - RNA, 19 nt, Artificial Sequence
  Description of Artificial Sequence: Synthetic oligonucleotide
ccggaaggcugaugcuuac

SEQ ID NO: 1656311 - RNA, 19 nt, Artificial Sequence
  Description of Artificial Sequence: Synthetic oligonucleotide
gcaaaguguugguuucaau

SEQ ID NO: 1656312 - RNA, 19 nt, Artificial Sequence
  Description of Artificial Sequence: Synthetic oligonucleotide
gguagggucuguggcccga

SEQ ID NO: 1656313 - RNA, 19 nt, Artificial Sequence
  Description of Artificial Sequence: Synthetic oligonucleotide
gugugugcuccgacagaaa

SEQ ID NO: 1656314 - RNA, 19 nt, Artificial Sequence
  Description of Artificial Sequence: Synthetic oligonucleotide
gggugagcugggcacccaa

SEQ ID NO: 1656315 - RNA, 19 nt, Artificial Sequence
  Description of Artificial Sequence: Synthetic oligonucleotide
gguuugcaaaguguugguu

SEQ ID NO: 1656316 - RNA, 19 nt, Artificial Sequence
  Description of Artificial Sequence: Synthetic oligonucleotide
cugggcagugcuacugguu

SEQ ID NO: 1656317 - RNA, 19 nt, Artificial Sequence
  Description of Artificial Sequence: Synthetic oligonucleotide
ggcagugcuacugguuacu

SEQ ID NO: 1656318 - RNA, 19 nt, Artificial Sequence
  Description of Artificial Sequence: Synthetic oligonucleotide
acucuccggugaaggguaa

SEQ ID NO: 1656319 - RNA, 19 nt, Artificial Sequence
  Description of Artificial Sequence: Synthetic oligonucleotide
cacagccgaagggcuuguc

SEQ ID NO: 1656320 - RNA, 19 nt, Artificial Sequence
  Description of Artificial Sequence: Synthetic oligonucleotide
ccgaguggauuugcugaug

SEQ ID NO: 1656321 - RNA, 19 nt, Artificial Sequence
  Description of Artificial Sequence: Synthetic oligonucleotide
ccacaucugcuacauuugu

SEQ ID NO: 1656322 - RNA, 19 nt, Artificial Sequence
  Description of Artificial Sequence: Synthetic oligonucleotide
cuguggcccgaguggauuu

SEQ ID NO: 1656323 - RNA, 19 nt, Artificial Sequence
  Description of Artificial Sequence: Synthetic oligonucleotide
gcuuaagccgaaggcucua

SEQ ID NO: 1656324 - RNA, 19 nt, Artificial Sequence
  Description of Artificial Sequence: Synthetic oligonucleotide
gcagugcuacugguuacua

SEQ ID NO: 1656325 - RNA, 19 nt, Artificial Sequence
  Description of Artificial Sequence: Synthetic oligonucleotide
gcugcacuaguuguucuuu

SEQ ID NO: 1656326 - RNA, 19 nt, Artificial Sequence
  Description of Artificial Sequence: Synthetic oligonucleotide
cugacacacucuggacacu

SEQ ID NO: 1656327 - RNA, 19 nt, Artificial Sequence
  Description of Artificial Sequence: Synthetic oligonucleotide
gcugggcauccugacuaaa

SEQ ID NO: 1656328 - RNA, 19 nt, Artificial Sequence
  Description of Artificial Sequence: Synthetic oligonucleotide
ccgaaggcucuaccacaca

SEQ ID NO: 1656329 - RNA, 19 nt, Artificial Sequence
  Description of Artificial Sequence: Synthetic oligonucleotide
guggugugacucagcugau

SEQ ID NO: 1656330 - RNA, 19 nt, Artificial Sequence
  Description of Artificial Sequence: Synthetic oligonucleotide
cccgaguggauuugcugau

SEQ ID NO: 1656331 - RNA, 19 nt, Artificial Sequence
  Description of Artificial Sequence: Synthetic oligonucleotide
gucuguggcccgaguggau

SEQ ID NO: 1656332 - RNA, 19 nt, Artificial Sequence
  Description of Artificial Sequence: Synthetic oligonucleotide
cgggacucugcugucacua

SEQ ID NO: 1656333 - RNA, 19 nt, Artificial Sequence
  Description of Artificial Sequence: Synthetic oligonucleotide
cucugguguggacgcucau

SEQ ID NO: 1656334 - RNA, 19 nt, Artificial Sequence
  Description of Artificial Sequence: Synthetic oligonucleotide
gguucugaccugagaccuu

SEQ ID NO: 1656335 - RNA, 19 nt, Artificial Sequence
  Description of Artificial Sequence: Synthetic oligonucleotide
cugagaccuucuggcuuau

SEQ ID NO: 1656336 - RNA, 19 nt, Artificial Sequence
  Description of Artificial Sequence: Synthetic oligonucleotide
gcuuacugacagagcuauu

SEQ ID NO: 1656337 - RNA, 19 nt, Artificial Sequence
  Description of Artificial Sequence: Synthetic oligonucleotide
cggaaggcugaugcuuacu

SEQ ID NO: 1656338 - RNA, 19 nt, Artificial Sequence
  Description of Artificial Sequence: Synthetic oligonucleotide
ugaauuuugacauugcuaa

SEQ ID NO: 1656339 - RNA, 19 nt, Artificial Sequence
  Description of Artificial Sequence: Synthetic oligonucleotide
aaaaggggcacuccgcugc

SEQ ID NO: 1656340 - RNA, 19 nt, Artificial Sequence
  Description of Artificial Sequence: Synthetic oligonucleotide
uaugugaaaccacacauca

SEQ ID NO: 1656341 - RNA, 19 nt, Artificial Sequence
  Description of Artificial Sequence: Synthetic oligonucleotide
aguucaaaggcuuaucauc

SEQ ID NO: 1656342 - RNA, 19 nt, Artificial Sequence
  Description of Artificial Sequence: Synthetic oligonucleotide
uuuagggugagccucacug

SEQ ID NO: 1656343 - RNA, 19 nt, Artificial Sequence
  Description of Artificial Sequence: Synthetic oligonucleotide
guaagauugguuucgagag

SEQ ID NO: 1656344 - RNA, 19 nt, Artificial Sequence
  Description of Artificial Sequence: Synthetic oligonucleotide
agaaccgagaacaagagcg

SEQ ID NO: 1656345 - RNA, 19 nt, Artificial Sequence
  Description of Artificial Sequence: Synthetic oligonucleotide
aucuacaacauuuggaaag

SEQ ID NO: 1656346 - RNA, 19 nt, Artificial Sequence
  Description of Artificial Sequence: Synthetic oligonucleotide
cuaaaguucacccacuggc

SEQ ID NO: 1656347 - RNA, 19 nt, Artificial Sequence
  Description of Artificial Sequence: Synthetic oligonucleotide
acauugcuaaaguucaccc

SEQ ID NO: 1656348 - RNA, 19 nt, Artificial Sequence
  Description of Artificial Sequence: Synthetic oligonucleotide
ugaacuaugugaaaccaca

SEQ ID NO: 1656349 - RNA, 19 nt, Artificial Sequence
  Description of Artificial Sequence: Synthetic oligonucleotide
uuuaugucuagaaaccaca

SEQ ID NO: 1656350 - RNA, 19 nt, Artificial Sequence
  Description of Artificial Sequence: Synthetic oligonucleotide
ugguguauguucaucagag

SEQ ID NO: 1656351 - RNA, 19 nt, Artificial Sequence
  Description of Artificial Sequence: Synthetic oligonucleotide
ugugaaaccacacaucaaa

SEQ ID NO: 1656352 - RNA, 19 nt, Artificial Sequence
  Description of Artificial Sequence: Synthetic oligonucleotide
ucugcaaucuacaacauuu

SEQ ID NO: 1656353 - RNA, 19 nt, Artificial Sequence
  Description of Artificial Sequence: Synthetic oligonucleotide
ucggcgauaguucaaaggc

SEQ ID NO: 1656354 - RNA, 19 nt, Artificial Sequence
  Description of Artificial Sequence: Synthetic oligonucleotide
uucacuuaaucucuucugc

SEQ ID NO: 1656355 - RNA, 19 nt, Artificial Sequence
  Description of Artificial Sequence: Synthetic oligonucleotide
aaaggcuuaucaucuuggg

SEQ ID NO: 1656356 - RNA, 19 nt, Artificial Sequence
  Description of Artificial Sequence: Synthetic oligonucleotide
ugcaaucuacaacauuugg

SEQ ID NO: 1656357 - RNA, 19 nt, Artificial Sequence
  Description of Artificial Sequence: Synthetic oligonucleotide
aaggauucucuagaaauuc

SEQ ID NO: 1656358 - RNA, 19 nt, Artificial Sequence
  Description of Artificial Sequence: Synthetic oligonucleotide
cacugauucuacuuuaggg

SEQ ID NO: 1656359 - RNA, 19 nt, Artificial Sequence
  Description of Artificial Sequence: Synthetic oligonucleotide
uuuagagcuugaaucacug

SEQ ID NO: 1656360 - RNA, 19 nt, Artificial Sequence
  Description of Artificial Sequence: Synthetic oligonucleotide
caucuucugaacucgaugc

SEQ ID NO: 1656361 - RNA, 19 nt, Artificial Sequence
  Description of Artificial Sequence: Synthetic oligonucleotide
uagagcuugaaucacugga

SEQ ID NO: 1656362 - RNA, 19 nt, Artificial Sequence
  Description of Artificial Sequence: Synthetic oligonucleotide
acuaugugaaaccacacau

SEQ ID NO: 1656363 - RNA, 19 nt, Artificial Sequence
  Description of Artificial Sequence: Synthetic oligonucleotide
aagucguucagaaucaucu

SEQ ID NO: 1656364 - RNA, 19 nt, Artificial Sequence
  Description of Artificial Sequence: Synthetic oligonucleotide
ggccaauaagaucagaugg

SEQ ID NO: 1656365 - RNA, 19 nt, Artificial Sequence
  Description of Artificial Sequence: Synthetic oligonucleotide
aacuaugugaaaccacaca

SEQ ID NO: 1656366 - RNA, 19 nt, Artificial Sequence
  Description of Artificial Sequence: Synthetic oligonucleotide
aguuccucacuugucaucc

SEQ ID NO: 1656367 - RNA, 19 nt, Artificial Sequence
  Description of Artificial Sequence: Synthetic oligonucleotide
gauucuucggagaaagucc

SEQ ID NO: 1656368 - RNA, 19 nt, Artificial Sequence
  Description of Artificial Sequence: Synthetic oligonucleotide
aauaggcggacgaggaugc

SEQ ID NO: 1656369 - RNA, 19 nt, Artificial Sequence
  Description of Artificial Sequence: Synthetic oligonucleotide
gagucuggcaagcacagag

SEQ ID NO: 1656370 - RNA, 19 nt, Artificial Sequence
  Description of Artificial Sequence: Synthetic oligonucleotide
acaaaauggcaacaguucu

SEQ ID NO: 1656371 - RNA, 19 nt, Artificial Sequence
  Description of Artificial Sequence: Synthetic oligonucleotide
uuucacuuaaucucuucug

SEQ ID NO: 1656372 - RNA, 19 nt, Artificial Sequence
  Description of Artificial Sequence: Synthetic oligonucleotide
ccuacuaauacacugauuc

SEQ ID NO: 1656373 - RNA, 19 nt, Artificial Sequence
  Description of Artificial Sequence: Synthetic oligonucleotide
auaguucaaaggcuuauca

SEQ ID NO: 1656374 - RNA, 19 nt, Artificial Sequence
  Description of Artificial Sequence: Synthetic oligonucleotide
acuaauacacugauucuac

SEQ ID NO: 1656375 - RNA, 19 nt, Artificial Sequence
  Description of Artificial Sequence: Synthetic oligonucleotide
ucguucagaaucaucuuug

SEQ ID NO: 1656376 - RNA, 19 nt, Artificial Sequence
  Description of Artificial Sequence: Synthetic oligonucleotide
ucgaaagcuggccagaauc

SEQ ID NO: 1656377 - RNA, 19 nt, Artificial Sequence
  Description of Artificial Sequence: Synthetic oligonucleotide
gaagcuacucagcgaaugg

SEQ ID NO: 1656378 - RNA, 19 nt, Artificial Sequence
  Description of Artificial Sequence: Synthetic oligonucleotide
ugcuagguagguaacaaaa

SEQ ID NO: 1656379 - RNA, 19 nt, Artificial Sequence
  Description of Artificial Sequence: Synthetic oligonucleotide
aagauugguuucgagagcu

SEQ ID NO: 1656380 - RNA, 19 nt, Artificial Sequence
  Description of Artificial Sequence: Synthetic oligonucleotide
ucuccuacuaauacacuga

SEQ ID NO: 1656381 - RNA, 19 nt, Artificial Sequence
  Description of Artificial Sequence: Synthetic oligonucleotide
uucggcgauaguucaaagg

SEQ ID NO: 1656382 - RNA, 19 nt, Artificial Sequence
  Description of Artificial Sequence: Synthetic oligonucleotide
cacuuguaaugucagaaag

SEQ ID NO: 1656383 - RNA, 19 nt, Artificial Sequence
  Description of Artificial Sequence: Synthetic oligonucleotide
uguagcucaugccaaccag

SEQ ID NO: 1656384 - RNA, 19 nt, Artificial Sequence
  Description of Artificial Sequence: Synthetic oligonucleotide
aagcuacucagcgaauggc

SEQ ID NO: 1656385 - RNA, 19 nt, Artificial Sequence
  Description of Artificial Sequence: Synthetic oligonucleotide
ugguuaaaggaugcaaggg

SEQ ID NO: 1656386 - RNA, 19 nt, Artificial Sequence
  Description of Artificial Sequence: Synthetic oligonucleotide
uugaucgauccuuccaagg

SEQ ID NO: 1656387 - RNA, 19 nt, Artificial Sequence
  Description of Artificial Sequence: Synthetic oligonucleotide
aaauauccacuuguaaugu

SEQ ID NO: 1656388 - RNA, 19 nt, Artificial Sequence
  Description of Artificial Sequence: Synthetic oligonucleotide
gagaacgcgaucgcgagcg

SEQ ID NO: 1656389 - RNA, 19 nt, Artificial Sequence
  Description of Artificial Sequence: Synthetic oligonucleotide
cugauucuacuuuagggug

SEQ ID NO: 1656390 - RNA, 19 nt, Artificial Sequence
  Description of Artificial Sequence: Synthetic oligonucleotide
uuuccgcagacgcacagcc

SEQ ID NO: 1656391 - RNA, 19 nt, Artificial Sequence
  Description of Artificial Sequence: Synthetic oligonucleotide
auucuucggagaaaguccc

SEQ ID NO: 1656392 - RNA, 19 nt, Artificial Sequence
  Description of Artificial Sequence: Synthetic oligonucleotide
cuugucgccgccauagggg

SEQ ID NO: 1656393 - RNA, 19 nt, Artificial Sequence
  Description of Artificial Sequence: Synthetic oligonucleotide
uacacugauucuacuuuag

SEQ ID NO: 1656394 - RNA, 19 nt, Artificial Sequence
  Description of Artificial Sequence: Synthetic oligonucleotide
ugauucuacuuuaggguga

SEQ ID NO: 1656395 - RNA, 19 nt, Artificial Sequence
  Description of Artificial Sequence: Synthetic oligonucleotide
uuugaucgauccuuccaag

SEQ ID NO: 1656396 - RNA, 19 nt, Artificial Sequence
  Description of Artificial Sequence: Synthetic oligonucleotide
gguuaaaggaugcaagggc

SEQ ID NO: 1656397 - RNA, 19 nt, Artificial Sequence
  Description of Artificial Sequence: Synthetic oligonucleotide
uuagagcuugaaucacugg

SEQ ID NO: 1656398 - RNA, 19 nt, Artificial Sequence
  Description of Artificial Sequence: Synthetic oligonucleotide
uaauaggcggacgaggaug

SEQ ID NO: 1656399 - RNA, 19 nt, Artificial Sequence
  Description of Artificial Sequence: Synthetic oligonucleotide
ugguucaggauucuucgga

SEQ ID NO: 1656400 - RNA, 19 nt, Artificial Sequence
  Description of Artificial Sequence: Synthetic oligonucleotide
uuaugucuagaaaccacaa

SEQ ID NO: 1656401 - RNA, 19 nt, Artificial Sequence
  Description of Artificial Sequence: Synthetic oligonucleotide
agcuugaaucacuggacuc

SEQ ID NO: 1656402 - RNA, 19 nt, Artificial Sequence
  Description of Artificial Sequence: Synthetic oligonucleotide
guagccgccauaauaggcg

SEQ ID NO: 1656403 - RNA, 19 nt, Artificial Sequence
  Description of Artificial Sequence: Synthetic oligonucleotide
acacugauucuacuuuagg

SEQ ID NO: 1656404 - RNA, 19 nt, Artificial Sequence
  Description of Artificial Sequence: Synthetic oligonucleotide
guagguaacaaaauggcaa

SEQ ID NO: 1656405 - RNA, 19 nt, Artificial Sequence
  Description of Artificial Sequence: Synthetic oligonucleotide
agagcuugaaucacuggac

SEQ ID NO: 1656406 - RNA, 19 nt, Artificial Sequence
  Description of Artificial Sequence: Synthetic oligonucleotide
ugucuagaaaccacaacuu

SEQ ID NO: 1656407 - RNA, 19 nt, Artificial Sequence
  Description of Artificial Sequence: Synthetic oligonucleotide
uuaaaggaugcaagggcuc

SEQ ID NO: 1656408 - RNA, 19 nt, Artificial Sequence
  Description of Artificial Sequence: Synthetic oligonucleotide
ucuacaacauuuggaaagu

SEQ ID NO: 1656409 - RNA, 19 nt, Artificial Sequence
  Description of Artificial Sequence: Synthetic oligonucleotide
auuuuggagucuggcaagc

SEQ ID NO: 1656410 - RNA, 19 nt, Artificial Sequence
  Description of Artificial Sequence: Synthetic oligonucleotide
agaaucuuguucucucucu

SEQ ID NO: 1656411 - RNA, 19 nt, Artificial Sequence
  Description of Artificial Sequence: Synthetic oligonucleotide
ugggccaauaagaucagau

SEQ ID NO: 1656412 - RNA, 19 nt, Artificial Sequence
  Description of Artificial Sequence: Synthetic oligonucleotide
aguagaggcagucaaccaa

SEQ ID NO: 1656413 - RNA, 19 nt, Artificial Sequence
  Description of Artificial Sequence: Synthetic oligonucleotide
uacuaauacacugauucua

SEQ ID NO: 1656414 - RNA, 19 nt, Artificial Sequence
  Description of Artificial Sequence: Synthetic oligonucleotide
cacagaaccgagaacaaga

SEQ ID NO: 1656415 - RNA, 19 nt, Artificial Sequence
  Description of Artificial Sequence: Synthetic oligonucleotide
agcgggaagauuugcuggg

SEQ ID NO: 1656416 - RNA, 19 nt, Artificial Sequence
  Description of Artificial Sequence: Synthetic oligonucleotide
aaccgagaacaagagcgcg

SEQ ID NO: 1656417 - RNA, 19 nt, Artificial Sequence
  Description of Artificial Sequence: Synthetic oligonucleotide
cuagaaauucuucuuggga

SEQ ID NO: 1656418 - RNA, 19 nt, Artificial Sequence
  Description of Artificial Sequence: Synthetic oligonucleotide
agagcuuugacugaagcua

SEQ ID NO: 1656419 - RNA, 19 nt, Artificial Sequence
  Description of Artificial Sequence: Synthetic oligonucleotide
cacagaguugaauuuugac

SEQ ID NO: 1656420 - RNA, 19 nt, Artificial Sequence
  Description of Artificial Sequence: Synthetic oligonucleotide
gguaagauugguuucgaga

SEQ ID NO: 1656421 - RNA, 19 nt, Artificial Sequence
  Description of Artificial Sequence: Synthetic oligonucleotide
auuccgaucacagaaccga

SEQ ID NO: 1656422 - RNA, 19 nt, Artificial Sequence
  Description of Artificial Sequence: Synthetic oligonucleotide
cuaugugaaaccacacauc

SEQ ID NO: 1656423 - RNA, 19 nt, Artificial Sequence
  Description of Artificial Sequence: Synthetic oligonucleotide
acugguguauguucaucag

SEQ ID NO: 1656424 - RNA, 19 nt, Artificial Sequence
  Description of Artificial Sequence: Synthetic oligonucleotide
ucucucgaaagcuggccag

SEQ ID NO: 1656425 - RNA, 19 nt, Artificial Sequence
  Description of Artificial Sequence: Synthetic oligonucleotide
agaagcaaaaggggcacuc

SEQ ID NO: 1656426 - RNA, 19 nt, Artificial Sequence
  Description of Artificial Sequence: Synthetic oligonucleotide
agcgguaagauugguuucg

SEQ ID NO: 1656427 - RNA, 19 nt, Artificial Sequence
  Description of Artificial Sequence: Synthetic oligonucleotide
gauucuacuuuagggugag

SEQ ID NO: 1656428 - RNA, 19 nt, Artificial Sequence
  Description of Artificial Sequence: Synthetic oligonucleotide
aaguucacccacuggcccu

SEQ ID NO: 1656429 - RNA, 19 nt, Artificial Sequence
  Description of Artificial Sequence: Synthetic oligonucleotide
gagugugcuagguagguaa

SEQ ID NO: 1656430 - RNA, 19 nt, Artificial Sequence
  Description of Artificial Sequence: Synthetic oligonucleotide
agcgggagcgguaagauug

SEQ ID NO: 1656431 - RNA, 19 nt, Artificial Sequence
  Description of Artificial Sequence: Synthetic oligonucleotide
uaucaucuugggaaguaau

SEQ ID NO: 1656432 - RNA, 19 nt, Artificial Sequence
  Description of Artificial Sequence: Synthetic oligonucleotide
ucgagaacgcgaucgcgag

SEQ ID NO: 1656433 - RNA, 19 nt, Artificial Sequence
  Description of Artificial Sequence: Synthetic oligonucleotide
gaugcaagggcucucuucu

SEQ ID NO: 1656434 - RNA, 19 nt, Artificial Sequence
  Description of Artificial Sequence: Synthetic oligonucleotide
uagagggccgcucucgaga

SEQ ID NO: 1656435 - RNA, 19 nt, Artificial Sequence
  Description of Artificial Sequence: Synthetic oligonucleotide
aaaggaugcaagggcucuc

SEQ ID NO: 1656436 - RNA, 19 nt, Artificial Sequence
  Description of Artificial Sequence: Synthetic oligonucleotide
cuugggacucuuuagagcu

SEQ ID NO: 1656437 - RNA, 19 nt, Artificial Sequence
  Description of Artificial Sequence: Synthetic oligonucleotide
uuccgaucacagaaccgag

SEQ ID NO: 1656438 - RNA, 19 nt, Artificial Sequence
  Description of Artificial Sequence: Synthetic oligonucleotide
ucuuuagagcuugaaucac

SEQ ID NO: 1656439 - RNA, 19 nt, Artificial Sequence
  Description of Artificial Sequence: Synthetic oligonucleotide
uacuuuagggugagccuca

SEQ ID NO: 1656440 - RNA, 19 nt, Artificial Sequence
  Description of Artificial Sequence: Synthetic oligonucleotide
gcucaugccaaccagucug

SEQ ID NO: 1656441 - RNA, 19 nt, Artificial Sequence
  Description of Artificial Sequence: Synthetic oligonucleotide
cuuccaaggauucucuaga

SEQ ID NO: 1656442 - RNA, 19 nt, Artificial Sequence
  Description of Artificial Sequence: Synthetic oligonucleotide
uagccgccauaauaggcgg

SEQ ID NO: 1656443 - RNA, 19 nt, Artificial Sequence
  Description of Artificial Sequence: Synthetic oligonucleotide
ugugcuagguagguaacaa

SEQ ID NO: 1656444 - RNA, 19 nt, Artificial Sequence
  Description of Artificial Sequence: Synthetic oligonucleotide
ucuucggagaaagucccca

SEQ ID NO: 1656445 - RNA, 19 nt, Artificial Sequence
  Description of Artificial Sequence: Synthetic oligonucleotide
acuuguaaugucagaaagu

SEQ ID NO: 1656446 - RNA, 19 nt, Artificial Sequence
  Description of Artificial Sequence: Synthetic oligonucleotide
cauaggggcgcgaguagcc

SEQ ID NO: 1656447 - RNA, 19 nt, Artificial Sequence
  Description of Artificial Sequence: Synthetic oligonucleotide
cagucaaccaaagucguuc

SEQ ID NO: 1656448 - RNA, 19 nt, Artificial Sequence
  Description of Artificial Sequence: Synthetic oligonucleotide
uagaggcagucaaccaaag

SEQ ID NO: 1656449 - RNA, 19 nt, Artificial Sequence
  Description of Artificial Sequence: Synthetic oligonucleotide
agucaaccaaagucguuca

SEQ ID NO: 1656450 - RNA, 19 nt, Artificial Sequence
  Description of Artificial Sequence: Synthetic oligonucleotide
gguucuccuacuaauacac

SEQ ID NO: 1656451 - RNA, 19 nt, Artificial Sequence
  Description of Artificial Sequence: Synthetic oligonucleotide
uggcuugucgccgccauag

SEQ ID NO: 1656452 - RNA, 19 nt, Artificial Sequence
  Description of Artificial Sequence: Synthetic oligonucleotide
aagauuugcugggcuuagg

SEQ ID NO: 1656453 - RNA, 19 nt, Artificial Sequence
  Description of Artificial Sequence: Synthetic oligonucleotide
ugugccuaccuccaagcuu

SEQ ID NO: 1656454 - RNA, 19 nt, Artificial Sequence
  Description of Artificial Sequence: Synthetic oligonucleotide
ucucgagaacgcgaucgcg

SEQ ID NO: 1656455 - RNA, 19 nt, Artificial Sequence
  Description of Artificial Sequence: Synthetic oligonucleotide
aucucucgaaagcuggcca

SEQ ID NO: 1656456 - RNA, 19 nt, Artificial Sequence
  Description of Artificial Sequence: Synthetic oligonucleotide
gugccuaccuccaagcuug

SEQ ID NO: 1656457 - RNA, 19 nt, Artificial Sequence
  Description of Artificial Sequence: Synthetic oligonucleotide
uugucgccgccauaggggc

SEQ ID NO: 1656458 - RNA, 19 nt, Artificial Sequence
  Description of Artificial Sequence: Synthetic oligonucleotide
acagaaccgagaacaagag

SEQ ID NO: 1656459 - RNA, 19 nt, Artificial Sequence
  Description of Artificial Sequence: Synthetic oligonucleotide
gaaccgagaacaagagcgc

SEQ ID NO: 1656460 - RNA, 19 nt, Artificial Sequence
  Description of Artificial Sequence: Synthetic oligonucleotide
cuccauucggcgauaguuc

SEQ ID NO: 1656461 - RNA, 19 nt, Artificial Sequence
  Description of Artificial Sequence: Synthetic oligonucleotide
uccgcugcguagagggccg

SEQ ID NO: 1656462 - RNA, 19 nt, Artificial Sequence
  Description of Artificial Sequence: Synthetic oligonucleotide
gguucaggauucuucggag

SEQ ID NO: 1656463 - RNA, 19 nt, Artificial Sequence
  Description of Artificial Sequence: Synthetic oligonucleotide
uugguuucgagagcuuuga

SEQ ID NO: 1656464 - RNA, 19 nt, Artificial Sequence
  Description of Artificial Sequence: Synthetic oligonucleotide
ucugggccaauaagaucag

SEQ ID NO: 1656465 - RNA, 19 nt, Artificial Sequence
  Description of Artificial Sequence: Synthetic oligonucleotide
uugcuaaaguucacccacu

SEQ ID NO: 1656466 - RNA, 19 nt, Artificial Sequence
  Description of Artificial Sequence: Synthetic oligonucleotide
gaacuaugugaaaccacac

SEQ ID NO: 1656467 - RNA, 19 nt, Artificial Sequence
  Description of Artificial Sequence: Synthetic oligonucleotide
cucagcgaauggcucaggc

SEQ ID NO: 1656468 - RNA, 19 nt, Artificial Sequence
  Description of Artificial Sequence: Synthetic oligonucleotide
aaccaaagucguucagaau

SEQ ID NO: 1656469 - RNA, 19 nt, Artificial Sequence
  Description of Artificial Sequence: Synthetic oligonucleotide
cugggcuuagggcuccucg

SEQ ID NO: 1656470 - RNA, 19 nt, Artificial Sequence
  Description of Artificial Sequence: Synthetic oligonucleotide
caaccaaagucguucagaa

SEQ ID NO: 1656471 - RNA, 19 nt, Artificial Sequence
  Description of Artificial Sequence: Synthetic oligonucleotide
uuggaaaguagaggcaguc

SEQ ID NO: 1656472 - RNA, 19 nt, Artificial Sequence
  Description of Artificial Sequence: Synthetic oligonucleotide
cauugcuaaaguucaccca

SEQ ID NO: 1656473 - RNA, 19 nt, Artificial Sequence
  Description of Artificial Sequence: Synthetic oligonucleotide
cagaaccgagaacaagagc

SEQ ID NO: 1656474 - RNA, 19 nt, Artificial Sequence
  Description of Artificial Sequence: Synthetic oligonucleotide
ugggacucuuuagagcuug

SEQ ID NO: 1656475 - RNA, 19 nt, Artificial Sequence
  Description of Artificial Sequence: Synthetic oligonucleotide
cgaguagccgccauaauag

SEQ ID NO: 1656476 - RNA, 19 nt, Artificial Sequence
  Description of Artificial Sequence: Synthetic oligonucleotide
guacaccaucucucgaaag

SEQ ID NO: 1656477 - RNA, 19 nt, Artificial Sequence
  Description of Artificial Sequence: Synthetic oligonucleotide
acaaagccugaggccaacc

SEQ ID NO: 1656478 - RNA, 19 nt, Artificial Sequence
  Description of Artificial Sequence: Synthetic oligonucleotide
uccugguuaaaggaugcaa

SEQ ID NO: 1656479 - RNA, 19 nt, Artificial Sequence
  Description of Artificial Sequence: Synthetic oligonucleotide
auucggcgauaguucaaag

SEQ ID NO: 1656480 - RNA, 19 nt, Artificial Sequence
  Description of Artificial Sequence: Synthetic oligonucleotide
uucuucggagaaagucccc

SEQ ID NO: 1656481 - RNA, 19 nt, Artificial Sequence
  Description of Artificial Sequence: Synthetic oligonucleotide
auaauaggcggacgaggau

SEQ ID NO: 1656482 - RNA, 19 nt, Artificial Sequence
  Description of Artificial Sequence: Synthetic oligonucleotide
uacucagcgaauggcucag

SEQ ID NO: 1656483 - RNA, 19 nt, Artificial Sequence
  Description of Artificial Sequence: Synthetic oligonucleotide
gcccuuagcuguuuggucc

SEQ ID NO: 1656484 - RNA, 19 nt, Artificial Sequence
  Description of Artificial Sequence: Synthetic oligonucleotide
acaccaucucucgaaagcu

SEQ ID NO: 1656485 - RNA, 19 nt, Artificial Sequence
  Description of Artificial Sequence: Synthetic oligonucleotide
gcucucgagaacgcgaucg

SEQ ID NO: 1656486 - RNA, 19 nt, Artificial Sequence
  Description of Artificial Sequence: Synthetic oligonucleotide
agaggcagucaaccaaagu

SEQ ID NO: 1656487 - RNA, 19 nt, Artificial Sequence
  Description of Artificial Sequence: Synthetic oligonucleotide
gaaggguucuccuacuaau

SEQ ID NO: 1656488 - RNA, 19 nt, Artificial Sequence
  Description of Artificial Sequence: Synthetic oligonucleotide
gggccaauaagaucagaug

SEQ ID NO: 1656489 - RNA, 19 nt, Artificial Sequence
  Description of Artificial Sequence: Synthetic oligonucleotide
ucgagagcuuugacugaag

SEQ ID NO: 1656490 - RNA, 19 nt, Artificial Sequence
  Description of Artificial Sequence: Synthetic oligonucleotide
acaugucugcaaucuacaa

SEQ ID NO: 1656491 - RNA, 19 nt, Artificial Sequence
  Description of Artificial Sequence: Synthetic oligonucleotide
uucgagagcuuugacugaa

SEQ ID NO: 1656492 - RNA, 19 nt, Artificial Sequence
  Description of Artificial Sequence: Synthetic oligonucleotide
gucaaccaaagucguucag

SEQ ID NO: 1656493 - RNA, 19 nt, Artificial Sequence
  Description of Artificial Sequence: Synthetic oligonucleotide
gccaaccugaacuauguga

SEQ ID NO: 1656494 - RNA, 19 nt, Artificial Sequence
  Description of Artificial Sequence: Synthetic oligonucleotide
aacaagagcgcgagcgaga

SEQ ID NO: 1656495 - RNA, 19 nt, Artificial Sequence
  Description of Artificial Sequence: Synthetic oligonucleotide
gaacgcgaucgcgagcggg

SEQ ID NO: 1656496 - RNA, 19 nt, Artificial Sequence
  Description of Artificial Sequence: Synthetic oligonucleotide
caaaaggggcacuccgcug

SEQ ID NO: 1656497 - RNA, 19 nt, Artificial Sequence
  Description of Artificial Sequence: Synthetic oligonucleotide
cucgagaacgcgaucgcga

SEQ ID NO: 1656498 - RNA, 19 nt, Artificial Sequence
  Description of Artificial Sequence: Synthetic oligonucleotide
ccuuccaaggauucucuag

SEQ ID NO: 1656499 - RNA, 19 nt, Artificial Sequence
  Description of Artificial Sequence: Synthetic oligonucleotide
gcuugucgccgccauaggg

SEQ ID NO: 1656500 - RNA, 19 nt, Artificial Sequence
  Description of Artificial Sequence: Synthetic oligonucleotide
gcaaucuacaacauuugga

SEQ ID NO: 1656501 - RNA, 19 nt, Artificial Sequence
  Description of Artificial Sequence: Synthetic oligonucleotide
cuacucagcgaauggcuca

SEQ ID NO: 1656502 - RNA, 19 nt, Artificial Sequence
  Description of Artificial Sequence: Synthetic oligonucleotide
gagcgguaagauugguuuc

SEQ ID NO: 1656503 - RNA, 19 nt, Artificial Sequence
  Description of Artificial Sequence: Synthetic oligonucleotide
acaaaacuaauaaccuuuu

SEQ ID NO: 1656504 - RNA, 19 nt, Artificial Sequence
  Description of Artificial Sequence: Synthetic oligonucleotide
caccaucucucgaaagcug

SEQ ID NO: 1656505 - RNA, 19 nt, Artificial Sequence
  Description of Artificial Sequence: Synthetic oligonucleotide
ggccauuccgaucacagaa

SEQ ID NO: 1656506 - RNA, 19 nt, Artificial Sequence
  Description of Artificial Sequence: Synthetic oligonucleotide
auaggggcgcgaguagccg

SEQ ID NO: 1656507 - RNA, 19 nt, Artificial Sequence
  Description of Artificial Sequence: Synthetic oligonucleotide
cucucgagaacgcgaucgc

SEQ ID NO: 1656508 - RNA, 19 nt, Artificial Sequence
  Description of Artificial Sequence: Synthetic oligonucleotide
ugucgccgccauaggggcg

SEQ ID NO: 1656509 - RNA, 19 nt, Artificial Sequence
  Description of Artificial Sequence: Synthetic oligonucleotide
ugguuucgagagcuuugac

SEQ ID NO: 1656510 - RNA, 19 nt, Artificial Sequence
  Description of Artificial Sequence: Synthetic oligonucleotide
gagcuugaaucacuggacu

SEQ ID NO: 1656511 - RNA, 19 nt, Artificial Sequence
  Description of Artificial Sequence: Synthetic oligonucleotide
aacgcgaucgcgagcggga

SEQ ID NO: 1656512 - RNA, 19 nt, Artificial Sequence
  Description of Artificial Sequence: Synthetic oligonucleotide
agcucaugccaaccagucu

SEQ ID NO: 1656513 - RNA, 19 nt, Artificial Sequence
  Description of Artificial Sequence: Synthetic oligonucleotide
aaggguucuccuacuaaua

SEQ ID NO: 1656514 - RNA, 19 nt, Artificial Sequence
  Description of Artificial Sequence: Synthetic oligonucleotide
gguagguaacaaaauggca

SEQ ID NO: 1656515 - RNA, 19 nt, Artificial Sequence
  Description of Artificial Sequence: Synthetic oligonucleotide
agccucugggccaauaaga

SEQ ID NO: 1656516 - RNA, 19 nt, Artificial Sequence
  Description of Artificial Sequence: Synthetic oligonucleotide
agucguucagaaucaucuu

SEQ ID NO: 1656517 - RNA, 19 nt, Artificial Sequence
  Description of Artificial Sequence: Synthetic oligonucleotide
cuuuagagcuugaaucacu

SEQ ID NO: 1656518 - RNA, 19 nt, Artificial Sequence
  Description of Artificial Sequence: Synthetic oligonucleotide
agucugaaggguucuccua

SEQ ID NO: 1656519 - RNA, 19 nt, Artificial Sequence
  Description of Artificial Sequence: Synthetic oligonucleotide
guagagggccgcucucgag

SEQ ID NO: 1656520 - RNA, 19 nt, Artificial Sequence
  Description of Artificial Sequence: Synthetic oligonucleotide
gguuucgagagcuuugacu

SEQ ID NO: 1656521 - RNA, 19 nt, Artificial Sequence
  Description of Artificial Sequence: Synthetic oligonucleotide
uaggggcgcgaguagccgc

SEQ ID NO: 1656522 - RNA, 19 nt, Artificial Sequence
  Description of Artificial Sequence: Synthetic oligonucleotide
uccucuacugguguauguu

SEQ ID NO: 1656523 - RNA, 19 nt, Artificial Sequence
  Description of Artificial Sequence: Synthetic oligonucleotide
guagaggcagucaaccaaa

SEQ ID NO: 1656524 - RNA, 19 nt, Artificial Sequence
  Description of Artificial Sequence: Synthetic oligonucleotide
cuuagacuucuuuucuugu

SEQ ID NO: 1656525 - RNA, 19 nt, Artificial Sequence
  Description of Artificial Sequence: Synthetic oligonucleotide
ucucgaaagcuggccagaa

SEQ ID NO: 1656526 - RNA, 19 nt, Artificial Sequence
  Description of Artificial Sequence: Synthetic oligonucleotide
cuaauacacugauucuacu

SEQ ID NO: 1656527 - RNA, 19 nt, Artificial Sequence
  Description of Artificial Sequence: Synthetic oligonucleotide
gcacaugucugcaaucuac

SEQ ID NO: 1656528 - RNA, 19 nt, Artificial Sequence
  Description of Artificial Sequence: Synthetic oligonucleotide
ggagcgguaagauugguuu

SEQ ID NO: 1656529 - RNA, 19 nt, Artificial Sequence
  Description of Artificial Sequence: Synthetic oligonucleotide
cuuaucaucuugggaagua

SEQ ID NO: 1656530 - RNA, 19 nt, Artificial Sequence
  Description of Artificial Sequence: Synthetic oligonucleotide
agagggccgcucucgagaa

SEQ ID NO: 1656531 - RNA, 19 nt, Artificial Sequence
  Description of Artificial Sequence: Synthetic oligonucleotide
uuccgcagacgcacagccu

SEQ ID NO: 1656532 - RNA, 19 nt, Artificial Sequence
  Description of Artificial Sequence: Synthetic oligonucleotide
aggggcgcgaguagccgcc

SEQ ID NO: 1656533 - RNA, 19 nt, Artificial Sequence
  Description of Artificial Sequence: Synthetic oligonucleotide
ggaugcaagggcucucuuc

SEQ ID NO: 1656534 - RNA, 19 nt, Artificial Sequence
  Description of Artificial Sequence: Synthetic oligonucleotide
caaacuucaggagcuccca

SEQ ID NO: 1656535 - RNA, 19 nt, Artificial Sequence
  Description of Artificial Sequence: Synthetic oligonucleotide
accagucugaaggguucuc

SEQ ID NO: 1656536 - RNA, 19 nt, Artificial Sequence
  Description of Artificial Sequence: Synthetic oligonucleotide
uacaaagccugaggccaac

SEQ ID NO: 1656537 - RNA, 19 nt, Artificial Sequence
  Description of Artificial Sequence: Synthetic oligonucleotide
cauccucuacugguguaug

SEQ ID NO: 1656538 - RNA, 19 nt, Artificial Sequence
  Description of Artificial Sequence: Synthetic oligonucleotide
gucguucagaaucaucuuu

SEQ ID NO: 1656539 - RNA, 19 nt, Artificial Sequence
  Description of Artificial Sequence: Synthetic oligonucleotide
accgagaacaagagcgcga

SEQ ID NO: 1656540 - RNA, 19 nt, Artificial Sequence
  Description of Artificial Sequence: Synthetic oligonucleotide
ccaagcuugauacacauuu

SEQ ID NO: 1656541 - RNA, 19 nt, Artificial Sequence
  Description of Artificial Sequence: Synthetic oligonucleotide
ugaggccaaccugaacuau

SEQ ID NO: 1656542 - RNA, 19 nt, Artificial Sequence
  Description of Artificial Sequence: Synthetic oligonucleotide
cauucggcgauaguucaaa

SEQ ID NO: 1656543 - RNA, 19 nt, Artificial Sequence
  Description of Artificial Sequence: Synthetic oligonucleotide
ugagugugcuagguaggua

SEQ ID NO: 1656544 - RNA, 19 nt, Artificial Sequence
  Description of Artificial Sequence: Synthetic oligonucleotide
gugcuagguagguaacaaa

SEQ ID NO: 1656545 - RNA, 19 nt, Artificial Sequence
  Description of Artificial Sequence: Synthetic oligonucleotide
uugggacucuuuagagcuu

SEQ ID NO: 1656546 - RNA, 19 nt, Artificial Sequence
  Description of Artificial Sequence: Synthetic oligonucleotide
ccucuacugguguauguuc

SEQ ID NO: 1656547 - RNA, 19 nt, Artificial Sequence
  Description of Artificial Sequence: Synthetic oligonucleotide
gcgaguagccgccauaaua

SEQ ID NO: 1656548 - RNA, 19 nt, Artificial Sequence
  Description of Artificial Sequence: Synthetic oligonucleotide
gucgccgccauaggggcgc

SEQ ID NO: 1656549 - RNA, 19 nt, Artificial Sequence
  Description of Artificial Sequence: Synthetic oligonucleotide
acuccgcugcguagagggc

SEQ ID NO: 1656550 - RNA, 19 nt, Artificial Sequence
  Description of Artificial Sequence: Synthetic oligonucleotide
augugaaaccacacaucaa

SEQ ID NO: 1656551 - RNA, 19 nt, Artificial Sequence
  Description of Artificial Sequence: Synthetic oligonucleotide
ccgagaacaagagcgcgag

SEQ ID NO: 1656552 - RNA, 19 nt, Artificial Sequence
  Description of Artificial Sequence: Synthetic oligonucleotide
cagagucugguucaggauu

SEQ ID NO: 1656553 - RNA, 19 nt, Artificial Sequence
  Description of Artificial Sequence: Synthetic oligonucleotide
guagcucaugccaaccagu

SEQ ID NO: 1656554 - RNA, 19 nt, Artificial Sequence
  Description of Artificial Sequence: Synthetic oligonucleotide
gcuugaaucacuggacucu

SEQ ID NO: 1656555 - RNA, 19 nt, Artificial Sequence
  Description of Artificial Sequence: Synthetic oligonucleotide
gcuacucagcgaauggcuc

SEQ ID NO: 1656556 - RNA, 19 nt, Artificial Sequence
  Description of Artificial Sequence: Synthetic oligonucleotide
augcugaaguagugcuuuu

SEQ ID NO: 1656557 - RNA, 19 nt, Artificial Sequence
  Description of Artificial Sequence: Synthetic oligonucleotide
aggggcacuccgcugcgua

SEQ ID NO: 1656558 - RNA, 19 nt, Artificial Sequence
  Description of Artificial Sequence: Synthetic oligonucleotide
gccauaggggcgcgaguag

SEQ ID NO: 1656559 - RNA, 19 nt, Artificial Sequence
  Description of Artificial Sequence: Synthetic oligonucleotide
ccgaucacagaaccgagaa

SEQ ID NO: 1656560 - RNA, 19 nt, Artificial Sequence
  Description of Artificial Sequence: Synthetic oligonucleotide
ggcccuuagcuguuugguc

SEQ ID NO: 1656561 - RNA, 19 nt, Artificial Sequence
  Description of Artificial Sequence: Synthetic oligonucleotide
gccaauaagaucagauggu

SEQ ID NO: 1656562 - RNA, 19 nt, Artificial Sequence
  Description of Artificial Sequence: Synthetic oligonucleotide
gcguagagggccgcucucg

SEQ ID NO: 1656563 - RNA, 19 nt, Artificial Sequence
  Description of Artificial Sequence: Synthetic oligonucleotide
cacccacuggcccuuagcu

SEQ ID NO: 1656564 - RNA, 19 nt, Artificial Sequence
  Description of Artificial Sequence: Synthetic oligonucleotide
aggaugcaagggcucucuu

SEQ ID NO: 1656565 - RNA, 19 nt, Artificial Sequence
  Description of Artificial Sequence: Synthetic oligonucleotide
gccauuccgaucacagaac

SEQ ID NO: 1656566 - RNA, 19 nt, Artificial Sequence
  Description of Artificial Sequence: Synthetic oligonucleotide
cucucgaaagcuggccaga

SEQ ID NO: 1656567 - RNA, 19 nt, Artificial Sequence
  Description of Artificial Sequence: Synthetic oligonucleotide
gguguauguucaucagagu

SEQ ID NO: 1656568 - RNA, 19 nt, Artificial Sequence
  Description of Artificial Sequence: Synthetic oligonucleotide
ggagccucugggccaauaa

SEQ ID NO: 1656569 - RNA, 19 nt, Artificial Sequence
  Description of Artificial Sequence: Synthetic oligonucleotide
ccauaggggcgcgaguagc

SEQ ID NO: 1656570 - RNA, 19 nt, Artificial Sequence
  Description of Artificial Sequence: Synthetic oligonucleotide
gccgccauaauaggcggac

SEQ ID NO: 1656571 - RNA, 19 nt, Artificial Sequence
  Description of Artificial Sequence: Synthetic oligonucleotide
ucgcgagcgggagcgguaa

SEQ ID NO: 1656572 - RNA, 19 nt, Artificial Sequence
  Description of Artificial Sequence: Synthetic oligonucleotide
ggggcacuccgcugcguag

SEQ ID NO: 1656573 - RNA, 19 nt, Artificial Sequence
  Description of Artificial Sequence: Synthetic oligonucleotide
gucugcaaucuacaacauu

SEQ ID NO: 1656574 - RNA, 19 nt, Artificial Sequence
  Description of Artificial Sequence: Synthetic oligonucleotide
ggccauggcuugucgccgc

SEQ ID NO: 1656575 - RNA, 19 nt, Artificial Sequence
  Description of Artificial Sequence: Synthetic oligonucleotide
agcgaauggcucaggccau

SEQ ID NO: 1656576 - RNA, 19 nt, Artificial Sequence
  Description of Artificial Sequence: Synthetic oligonucleotide
gcgggagcgguaagauugg

SEQ ID NO: 1656577 - RNA, 19 nt, Artificial Sequence
  Description of Artificial Sequence: Synthetic oligonucleotide
cccaauucuccaauucucu

SEQ ID NO: 1656578 - RNA, 19 nt, Artificial Sequence
  Description of Artificial Sequence: Synthetic oligonucleotide
gcacagaguugaauuuuga

SEQ ID NO: 1656579 - RNA, 19 nt, Artificial Sequence
  Description of Artificial Sequence: Synthetic oligonucleotide
auggcuugucgccgccaua

SEQ ID NO: 1656580 - RNA, 19 nt, Artificial Sequence
  Description of Artificial Sequence: Synthetic oligonucleotide
ggcgauaguucaaaggcuu

SEQ ID NO: 1656581 - RNA, 19 nt, Artificial Sequence
  Description of Artificial Sequence: Synthetic oligonucleotide
guucuccuacuaauacacu

SEQ ID NO: 1656582 - RNA, 19 nt, Artificial Sequence
  Description of Artificial Sequence: Synthetic oligonucleotide
agauugguuucgagagcuu

SEQ ID NO: 1656583 - RNA, 19 nt, Artificial Sequence
  Description of Artificial Sequence: Synthetic oligonucleotide
auaggcggacgaggaugca

SEQ ID NO: 1656584 - RNA, 19 nt, Artificial Sequence
  Description of Artificial Sequence: Synthetic oligonucleotide
gcuagguagguaacaaaau

SEQ ID NO: 1656585 - RNA, 19 nt, Artificial Sequence
  Description of Artificial Sequence: Synthetic oligonucleotide
gagcggcgaccccgcgggg

SEQ ID NO: 1656586 - RNA, 19 nt, Artificial Sequence
  Description of Artificial Sequence: Synthetic oligonucleotide
cgaggaugcagaagcaaaa

SEQ ID NO: 1656587 - RNA, 19 nt, Artificial Sequence
  Description of Artificial Sequence: Synthetic oligonucleotide
gccgccauaggggcgcgag

SEQ ID NO: 1656588 - RNA, 19 nt, Artificial Sequence
  Description of Artificial Sequence: Synthetic oligonucleotide
ggccgcucucgagaacgcg

SEQ ID NO: 1656589 - RNA, 19 nt, Artificial Sequence
  Description of Artificial Sequence: Synthetic oligonucleotide
gcggcgaccccgcggggag

SEQ ID NO: 1656590 - RNA, 19 nt, Artificial Sequence
  Description of Artificial Sequence: Synthetic oligonucleotide
agccgccauaauaggcgga

SEQ ID NO: 1656591 - RNA, 19 nt, Artificial Sequence
  Description of Artificial Sequence: Synthetic oligonucleotide
cugcguagagggccgcucu

SEQ ID NO: 1656592 - RNA, 19 nt, Artificial Sequence
  Description of Artificial Sequence: Synthetic oligonucleotide
gcgagcgagagcggcgacc

SEQ ID NO: 1656593 - RNA, 19 nt, Artificial Sequence
  Description of Artificial Sequence: Synthetic oligonucleotide
cauggcuugucgccgccau

SEQ ID NO: 1656594 - RNA, 19 nt, Artificial Sequence
  Description of Artificial Sequence: Synthetic oligonucleotide
ccgccauaauaggcggacg

SEQ ID NO: 1656595 - RNA, 19 nt, Artificial Sequence
  Description of Artificial Sequence: Synthetic oligonucleotide
cgagaacaagagcgcgagc

SEQ ID NO: 1656596 - RNA, 19 nt, Artificial Sequence
  Description of Artificial Sequence: Synthetic oligonucleotide
cucgaaagcuggccagaau

SEQ ID NO: 1656597 - RNA, 19 nt, Artificial Sequence
  Description of Artificial Sequence: Synthetic oligonucleotide
gcgguaagauugguuucga

SEQ ID NO: 1656598 - RNA, 19 nt, Artificial Sequence
  Description of Artificial Sequence: Synthetic oligonucleotide
gagcgggagcgguaagauu

SEQ ID NO: 1656599 - RNA, 19 nt, Artificial Sequence
  Description of Artificial Sequence: Synthetic oligonucleotide
gcgauaguucaaaggcuua

SEQ ID NO: 1656600 - RNA, 19 nt, Artificial Sequence
  Description of Artificial Sequence: Synthetic oligonucleotide
aucgcgagcgggagcggua

SEQ ID NO: 1656601 - RNA, 19 nt, Artificial Sequence
  Description of Artificial Sequence: Synthetic oligonucleotide
ggcggacgaggaugcagaa

SEQ ID NO: 1656602 - RNA, 19 nt, Artificial Sequence
  Description of Artificial Sequence: Synthetic oligonucleotide
gggcacuccgcugcguaga

SEQ ID NO: 1656603 - RNA, 19 nt, Artificial Sequence
  Description of Artificial Sequence: Synthetic oligonucleotide
ccuccauucggcgauaguu

SEQ ID NO: 1656604 - RNA, 19 nt, Artificial Sequence
  Description of Artificial Sequence: Synthetic oligonucleotide
gcgagcgggagcgguaaga

SEQ ID NO: 1656605 - RNA, 19 nt, Artificial Sequence
  Description of Artificial Sequence: Synthetic oligonucleotide
gcgcgaguagccgccauaa

SEQ ID NO: 1656606 - RNA, 19 nt, Artificial Sequence
  Description of Artificial Sequence: Synthetic oligonucleotide
gcgagagcggcgaccccgc

SEQ ID NO: 1656607 - RNA, 19 nt, Artificial Sequence
  Description of Artificial Sequence: Synthetic oligonucleotide
cagaagcaaaaggggcacu

SEQ ID NO: 1656608 - RNA, 19 nt, Artificial Sequence
  Description of Artificial Sequence: Synthetic oligonucleotide
ccauucggcgauaguucaa

SEQ ID NO: 1656609 - RNA, 19 nt, Artificial Sequence
  Description of Artificial Sequence: Synthetic oligonucleotide
gccucugggccaauaagau

SEQ ID NO: 1656610 - RNA, 19 nt, Artificial Sequence
  Description of Artificial Sequence: Synthetic oligonucleotide
gcggggagcgggaagauuu

SEQ ID NO: 1656611 - RNA, 19 nt, Artificial Sequence
  Description of Artificial Sequence: Synthetic oligonucleotide
gggccgcucucgagaacgc

SEQ ID NO: 1656612 - RNA, 19 nt, Artificial Sequence
  Description of Artificial Sequence: Synthetic oligonucleotide
cguagagggccgcucucga

SEQ ID NO: 1656613 - RNA, 19 nt, Artificial Sequence
  Description of Artificial Sequence: Synthetic oligonucleotide
cggcgauaguucaaaggcu

SEQ ID NO: 1656614 - RNA, 19 nt, Artificial Sequence
  Description of Artificial Sequence: Synthetic oligonucleotide
gggagcgguaagauugguu

SEQ ID NO: 1656615 - RNA, 19 nt, Artificial Sequence
  Description of Artificial Sequence: Synthetic oligonucleotide
cccgcggggagcgggaaga

SEQ ID NO: 1656616 - RNA, 19 nt, Artificial Sequence
  Description of Artificial Sequence: Synthetic oligonucleotide
cgauaguucaaaggcuuau

SEQ ID NO: 1656617 - RNA, 19 nt, Artificial Sequence
  Description of Artificial Sequence: Synthetic oligonucleotide
cgccauaggggcgcgagua

SEQ ID NO: 1656618 - RNA, 19 nt, Artificial Sequence
  Description of Artificial Sequence: Synthetic oligonucleotide
ccgcucucgagaacgcgau

SEQ ID NO: 1656619 - RNA, 19 nt, Artificial Sequence
  Description of Artificial Sequence: Synthetic oligonucleotide
cgcgagcgggagcgguaag

SEQ ID NO: 1656620 - RNA, 19 nt, Artificial Sequence
  Description of Artificial Sequence: Synthetic oligonucleotide
cagccuccauucggcgaua

SEQ ID NO: 1656621 - RNA, 19 nt, Artificial Sequence
  Description of Artificial Sequence: Synthetic oligonucleotide
ggggcgcgaguagccgcca

SEQ ID NO: 1656622 - RNA, 19 nt, Artificial Sequence
  Description of Artificial Sequence: Synthetic oligonucleotide
gcgaauggcucaggccauu

SEQ ID NO: 1656623 - RNA, 19 nt, Artificial Sequence
  Description of Artificial Sequence: Synthetic oligonucleotide
gggcgcgaguagccgccau

SEQ ID NO: 1656624 - RNA, 19 nt, Artificial Sequence
  Description of Artificial Sequence: Synthetic oligonucleotide
ccgcagacucuccucccuu

SEQ ID NO: 1656625 - RNA, 19 nt, Artificial Sequence
  Description of Artificial Sequence: Synthetic oligonucleotide
ccgccauaggggcgcgagu

SEQ ID NO: 1656626 - RNA, 19 nt, Artificial Sequence
  Description of Artificial Sequence: Synthetic oligonucleotide
cgcgaguagccgccauaau

SEQ ID NO: 1656627 - RNA, 19 nt, Artificial Sequence
  Description of Artificial Sequence: Synthetic oligonucleotide
cgggagcgguaagauuggu

SEQ ID NO: 1656628 - RNA, 19 nt, Artificial Sequence
  Description of Artificial Sequence: Synthetic oligonucleotide
ccgcggggagcgggaagau

SEQ ID NO: 1656629 - RNA, 19 nt, Artificial Sequence
  Description of Artificial Sequence: Synthetic oligonucleotide
cgcggggagcgggaagauu

SEQ ID NO: 1656630 - RNA, 19 nt, Artificial Sequence
  Description of Artificial Sequence: Synthetic oligonucleotide
cgccgccauaggggcgcga

SEQ ID NO: 1656631 - RNA, 19 nt, Artificial Sequence
  Description of Artificial Sequence: Synthetic oligonucleotide
aaaagcuaaacccugaagg

SEQ ID NO: 1656632 - RNA, 19 nt, Artificial Sequence
  Description of Artificial Sequence: Synthetic oligonucleotide
aguuugaugguccaaaggc

SEQ ID NO: 1656633 - RNA, 19 nt, Artificial Sequence
  Description of Artificial Sequence: Synthetic oligonucleotide
uauuacuagacccaaaacc

SEQ ID NO: 1656634 - RNA, 19 nt, Artificial Sequence
  Description of Artificial Sequence: Synthetic oligonucleotide
cuugacaaaagcuaaaccc

SEQ ID NO: 1656635 - RNA, 19 nt, Artificial Sequence
  Description of Artificial Sequence: Synthetic oligonucleotide
aaccaguauuacuagaccc

SEQ ID NO: 1656636 - RNA, 19 nt, Artificial Sequence
  Description of Artificial Sequence: Synthetic oligonucleotide
auuacuagacccaaaaccg

SEQ ID NO: 1656637 - RNA, 19 nt, Artificial Sequence
  Description of Artificial Sequence: Synthetic oligonucleotide
ugaagcaccaaacguaggg

SEQ ID NO: 1656638 - RNA, 19 nt, Artificial Sequence
  Description of Artificial Sequence: Synthetic oligonucleotide
aacacuuugccucccgucg

SEQ ID NO: 1656639 - RNA, 19 nt, Artificial Sequence
  Description of Artificial Sequence: Synthetic oligonucleotide
agauuagugguauuugggg

SEQ ID NO: 1656640 - RNA, 19 nt, Artificial Sequence
  Description of Artificial Sequence: Synthetic oligonucleotide
uagauuagugguauuuggg

SEQ ID NO: 1656641 - RNA, 19 nt, Artificial Sequence
  Description of Artificial Sequence: Synthetic oligonucleotide
auagauuagugguauuugg

SEQ ID NO: 1656642 - RNA, 19 nt, Artificial Sequence
  Description of Artificial Sequence: Synthetic oligonucleotide
aaagcuaaacccugaaggu

SEQ ID NO: 1656643 - RNA, 19 nt, Artificial Sequence
  Description of Artificial Sequence: Synthetic oligonucleotide
ggugcuaccaaacacagag

SEQ ID NO: 1656644 - RNA, 19 nt, Artificial Sequence
  Description of Artificial Sequence: Synthetic oligonucleotide
augacugcuggccaaagac

SEQ ID NO: 1656645 - RNA, 19 nt, Artificial Sequence
  Description of Artificial Sequence: Synthetic oligonucleotide
aaggcgaaugcuccugugc

SEQ ID NO: 1656646 - RNA, 19 nt, Artificial Sequence
  Description of Artificial Sequence: Synthetic oligonucleotide
caaaugagaaggaaccagg

SEQ ID NO: 1656647 - RNA, 19 nt, Artificial Sequence
  Description of Artificial Sequence: Synthetic oligonucleotide
cuccaaaugucuuagcgcc

SEQ ID NO: 1656648 - RNA, 19 nt, Artificial Sequence
  Description of Artificial Sequence: Synthetic oligonucleotide
ugcuugaccaaacacagaa

SEQ ID NO: 1656649 - RNA, 19 nt, Artificial Sequence
  Description of Artificial Sequence: Synthetic oligonucleotide
uuguuuuggccaaacagug

SEQ ID NO: 1656650 - RNA, 19 nt, Artificial Sequence
  Description of Artificial Sequence: Synthetic oligonucleotide
aauagauuagugguauuug

SEQ ID NO: 1656651 - RNA, 19 nt, Artificial Sequence
  Description of Artificial Sequence: Synthetic oligonucleotide
aguacuggaugcuugacca

SEQ ID NO: 1656652 - RNA, 19 nt, Artificial Sequence
  Description of Artificial Sequence: Synthetic oligonucleotide
uuacuagacccaaaaccgg

SEQ ID NO: 1656653 - RNA, 19 nt, Artificial Sequence
  Description of Artificial Sequence: Synthetic oligonucleotide
agagaauccacuguucugg

SEQ ID NO: 1656654 - RNA, 19 nt, Artificial Sequence
  Description of Artificial Sequence: Synthetic oligonucleotide
gacaaggacccaaaggucg

SEQ ID NO: 1656655 - RNA, 19 nt, Artificial Sequence
  Description of Artificial Sequence: Synthetic oligonucleotide
aguauuacuagacccaaaa

SEQ ID NO: 1656656 - RNA, 19 nt, Artificial Sequence
  Description of Artificial Sequence: Synthetic oligonucleotide
aagacugauccaccaguac

SEQ ID NO: 1656657 - RNA, 19 nt, Artificial Sequence
  Description of Artificial Sequence: Synthetic oligonucleotide
auuagugguauuuggggug

SEQ ID NO: 1656658 - RNA, 19 nt, Artificial Sequence
  Description of Artificial Sequence: Synthetic oligonucleotide
agaaccaguauuacuagac

SEQ ID NO: 1656659 - RNA, 19 nt, Artificial Sequence
  Description of Artificial Sequence: Synthetic oligonucleotide
gggcagacgaguuugaugg

SEQ ID NO: 1656660 - RNA, 19 nt, Artificial Sequence
  Description of Artificial Sequence: Synthetic oligonucleotide
agcuaaacccugaaggugc

SEQ ID NO: 1656661 - RNA, 19 nt, Artificial Sequence
  Description of Artificial Sequence: Synthetic oligonucleotide
acguagggcugccaaaucc

SEQ ID NO: 1656662 - RNA, 19 nt, Artificial Sequence
  Description of Artificial Sequence: Synthetic oligonucleotide
ugacaaaagcuaaacccug

SEQ ID NO: 1656663 - RNA, 19 nt, Artificial Sequence
  Description of Artificial Sequence: Synthetic oligonucleotide
aaauccugagcugcuggcc

SEQ ID NO: 1656664 - RNA, 19 nt, Artificial Sequence
  Description of Artificial Sequence: Synthetic oligonucleotide
ugaccaaacacagaaccag

SEQ ID NO: 1656665 - RNA, 19 nt, Artificial Sequence
  Description of Artificial Sequence: Synthetic oligonucleotide
aacacgcuaccacuggaag

SEQ ID NO: 1656666 - RNA, 19 nt, Artificial Sequence
  Description of Artificial Sequence: Synthetic oligonucleotide
ucuccgaacacuuugccuc

SEQ ID NO: 1656667 - RNA, 19 nt, Artificial Sequence
  Description of Artificial Sequence: Synthetic oligonucleotide
gguuguuuuggccaaacag

SEQ ID NO: 1656668 - RNA, 19 nt, Artificial Sequence
  Description of Artificial Sequence: Synthetic oligonucleotide
gaguuugaugguccaaagg

SEQ ID NO: 1656669 - RNA, 19 nt, Artificial Sequence
  Description of Artificial Sequence: Synthetic oligonucleotide
aggcgaaugcuccugugcc

SEQ ID NO: 1656670 - RNA, 19 nt, Artificial Sequence
  Description of Artificial Sequence: Synthetic oligonucleotide
uguugcuugcccaaaggcu

SEQ ID NO: 1656671 - RNA, 19 nt, Artificial Sequence
  Description of Artificial Sequence: Synthetic oligonucleotide
uucuguuccccgaaggaug

SEQ ID NO: 1656672 - RNA, 19 nt, Artificial Sequence
  Description of Artificial Sequence: Synthetic oligonucleotide
uuguugcuugcccaaaggc

SEQ ID NO: 1656673 - RNA, 19 nt, Artificial Sequence
  Description of Artificial Sequence: Synthetic oligonucleotide
aaacacuggagcagcaccg

SEQ ID NO: 1656674 - RNA, 19 nt, Artificial Sequence
  Description of Artificial Sequence: Synthetic oligonucleotide
gaaccaguauuacuagacc

SEQ ID NO: 1656675 - RNA, 19 nt, Artificial Sequence
  Description of Artificial Sequence: Synthetic oligonucleotide
aaugucuuagcgccacugu

SEQ ID NO: 1656676 - RNA, 19 nt, Artificial Sequence
  Description of Artificial Sequence: Synthetic oligonucleotide
aaacccgaauccuccugcg

SEQ ID NO: 1656677 - RNA, 19 nt, Artificial Sequence
  Description of Artificial Sequence: Synthetic oligonucleotide
guuugaugguccaaaggcg

SEQ ID NO: 1656678 - RNA, 19 nt, Artificial Sequence
  Description of Artificial Sequence: Synthetic oligonucleotide
aagcaccaaacguagggcu

SEQ ID NO: 1656679 - RNA, 19 nt, Artificial Sequence
  Description of Artificial Sequence: Synthetic oligonucleotide
uagacccaaaaccggaggc

SEQ ID NO: 1656680 - RNA, 19 nt, Artificial Sequence
  Description of Artificial Sequence: Synthetic oligonucleotide
guuuuggccaaacaguguc

SEQ ID NO: 1656681 - RNA, 19 nt, Artificial Sequence
  Description of Artificial Sequence: Synthetic oligonucleotide
uacuagacccaaaaccgga

SEQ ID NO: 1656682 - RNA, 19 nt, Artificial Sequence
  Description of Artificial Sequence: Synthetic oligonucleotide
agacugauccaccaguacu

SEQ ID NO: 1656683 - RNA, 19 nt, Artificial Sequence
  Description of Artificial Sequence: Synthetic oligonucleotide
aacccgaauccuccugcgc

SEQ ID NO: 1656684 - RNA, 19 nt, Artificial Sequence
  Description of Artificial Sequence: Synthetic oligonucleotide
aauccugagcugcuggccu

SEQ ID NO: 1656685 - RNA, 19 nt, Artificial Sequence
  Description of Artificial Sequence: Synthetic oligonucleotide
uguccaaagacugcuggag

SEQ ID NO: 1656686 - RNA, 19 nt, Artificial Sequence
  Description of Artificial Sequence: Synthetic oligonucleotide
uguagagguaguagccgag

SEQ ID NO: 1656687 - RNA, 19 nt, Artificial Sequence
  Description of Artificial Sequence: Synthetic oligonucleotide
acaggcccggagcugaacc

SEQ ID NO: 1656688 - RNA, 19 nt, Artificial Sequence
  Description of Artificial Sequence: Synthetic oligonucleotide
uccaaauagauuaguggua

SEQ ID NO: 1656689 - RNA, 19 nt, Artificial Sequence
  Description of Artificial Sequence: Synthetic oligonucleotide
aauuuggacacuggcucag

SEQ ID NO: 1656690 - RNA, 19 nt, Artificial Sequence
  Description of Artificial Sequence: Synthetic oligonucleotide
uccaaagacugcuggagcu

SEQ ID NO: 1656691 - RNA, 19 nt, Artificial Sequence
  Description of Artificial Sequence: Synthetic oligonucleotide
aaugcuccugugccggauc

SEQ ID NO: 1656692 - RNA, 19 nt, Artificial Sequence
  Description of Artificial Sequence: Synthetic oligonucleotide
aguaggagggcugccaaac

SEQ ID NO: 1656693 - RNA, 19 nt, Artificial Sequence
  Description of Artificial Sequence: Synthetic oligonucleotide
aagcuaaacccugaaggug

SEQ ID NO: 1656694 - RNA, 19 nt, Artificial Sequence
  Description of Artificial Sequence: Synthetic oligonucleotide
aaaugucuuagcgccacug

SEQ ID NO: 1656695 - RNA, 19 nt, Artificial Sequence
  Description of Artificial Sequence: Synthetic oligonucleotide
accuguuuuauuuggagua

SEQ ID NO: 1656696 - RNA, 19 nt, Artificial Sequence
  Description of Artificial Sequence: Synthetic oligonucleotide
cuuguugcuugcccaaagg

SEQ ID NO: 1656697 - RNA, 19 nt, Artificial Sequence
  Description of Artificial Sequence: Synthetic oligonucleotide
ggaauuuggacacuggcuc

SEQ ID NO: 1656698 - RNA, 19 nt, Artificial Sequence
  Description of Artificial Sequence: Synthetic oligonucleotide
ugcccaaacacaggggugg

SEQ ID NO: 1656699 - RNA, 19 nt, Artificial Sequence
  Description of Artificial Sequence: Synthetic oligonucleotide
caaaagcuaaacccugaag

SEQ ID NO: 1656700 - RNA, 19 nt, Artificial Sequence
  Description of Artificial Sequence: Synthetic oligonucleotide
caagaggaaacagacuggc

SEQ ID NO: 1656701 - RNA, 19 nt, Artificial Sequence
  Description of Artificial Sequence: Synthetic oligonucleotide
auccaccaguacuggaugc

SEQ ID NO: 1656702 - RNA, 19 nt, Artificial Sequence
  Description of Artificial Sequence: Synthetic oligonucleotide
aaaacaggcccggagcuga

SEQ ID NO: 1656703 - RNA, 19 nt, Artificial Sequence
  Description of Artificial Sequence: Synthetic oligonucleotide
ggagcugaagcaccaaacg

SEQ ID NO: 1656704 - RNA, 19 nt, Artificial Sequence
  Description of Artificial Sequence: Synthetic oligonucleotide
aacguagggcugccaaauc

SEQ ID NO: 1656705 - RNA, 19 nt, Artificial Sequence
  Description of Artificial Sequence: Synthetic oligonucleotide
aaacacagaaccaguauua

SEQ ID NO: 1656706 - RNA, 19 nt, Artificial Sequence
  Description of Artificial Sequence: Synthetic oligonucleotide
uccgaagacguucgcacug

SEQ ID NO: 1656707 - RNA, 19 nt, Artificial Sequence
  Description of Artificial Sequence: Synthetic oligonucleotide
uaccaaaggacgcaguguu

SEQ ID NO: 1656708 - RNA, 19 nt, Artificial Sequence
  Description of Artificial Sequence: Synthetic oligonucleotide
uggagcugaagcaccaaac

SEQ ID NO: 1656709 - RNA, 19 nt, Artificial Sequence
  Description of Artificial Sequence: Synthetic oligonucleotide
augguccaaaggcgaaugc

SEQ ID NO: 1656710 - RNA, 19 nt, Artificial Sequence
  Description of Artificial Sequence: Synthetic oligonucleotide
cuagacccaaaaccggagg

SEQ ID NO: 1656711 - RNA, 19 nt, Artificial Sequence
  Description of Artificial Sequence: Synthetic oligonucleotide
ucuguuccccgaaggauga

SEQ ID NO: 1656712 - RNA, 19 nt, Artificial Sequence
  Description of Artificial Sequence: Synthetic oligonucleotide
cacagugggucacaggagc

SEQ ID NO: 1656713 - RNA, 19 nt, Artificial Sequence
  Description of Artificial Sequence: Synthetic oligonucleotide
gaaggaauuuggacacugg

SEQ ID NO: 1656714 - RNA, 19 nt, Artificial Sequence
  Description of Artificial Sequence: Synthetic oligonucleotide
gacgcaguguugcugcugc

SEQ ID NO: 1656715 - RNA, 19 nt, Artificial Sequence
  Description of Artificial Sequence: Synthetic oligonucleotide
guauuacuagacccaaaac

SEQ ID NO: 1656716 - RNA, 19 nt, Artificial Sequence
  Description of Artificial Sequence: Synthetic oligonucleotide
aagccuguccaaaugagaa

SEQ ID NO: 1656717 - RNA, 19 nt, Artificial Sequence
  Description of Artificial Sequence: Synthetic oligonucleotide
aacccuccaaaugucuuag

SEQ ID NO: 1656718 - RNA, 19 nt, Artificial Sequence
  Description of Artificial Sequence: Synthetic oligonucleotide
ugaaccgaaugcuggcacc

SEQ ID NO: 1656719 - RNA, 19 nt, Artificial Sequence
  Description of Artificial Sequence: Synthetic oligonucleotide
gauuagugguauuuggggu

SEQ ID NO: 1656720 - RNA, 19 nt, Artificial Sequence
  Description of Artificial Sequence: Synthetic oligonucleotide
aggacccaaaggucggcgc

SEQ ID NO: 1656721 - RNA, 19 nt, Artificial Sequence
  Description of Artificial Sequence: Synthetic oligonucleotide
aaaggcgaaugcuccugug

SEQ ID NO: 1656722 - RNA, 19 nt, Artificial Sequence
  Description of Artificial Sequence: Synthetic oligonucleotide
gaagcaccaaacguagggc

SEQ ID NO: 1656723 - RNA, 19 nt, Artificial Sequence
  Description of Artificial Sequence: Synthetic oligonucleotide
gacccaaacacgcuaccac

SEQ ID NO: 1656724 - RNA, 19 nt, Artificial Sequence
  Description of Artificial Sequence: Synthetic oligonucleotide
agagguaguagccgaggug

SEQ ID NO: 1656725 - RNA, 19 nt, Artificial Sequence
  Description of Artificial Sequence: Synthetic oligonucleotide
agugccagcaggcuucugu

SEQ ID NO: 1656726 - RNA, 19 nt, Artificial Sequence
  Description of Artificial Sequence: Synthetic oligonucleotide
aaacccuccaaaugucuua

SEQ ID NO: 1656727 - RNA, 19 nt, Artificial Sequence
  Description of Artificial Sequence: Synthetic oligonucleotide
aaaggacgcaguguugcug

SEQ ID NO: 1656728 - RNA, 19 nt, Artificial Sequence
  Description of Artificial Sequence: Synthetic oligonucleotide
caaacccgaauccuccugc

SEQ ID NO: 1656729 - RNA, 19 nt, Artificial Sequence
  Description of Artificial Sequence: Synthetic oligonucleotide
gaauuuggacacuggcuca

SEQ ID NO: 1656730 - RNA, 19 nt, Artificial Sequence
  Description of Artificial Sequence: Synthetic oligonucleotide
agggcugccaaauccugag

SEQ ID NO: 1656731 - RNA, 19 nt, Artificial Sequence
  Description of Artificial Sequence: Synthetic oligonucleotide
acacagaaccaguauuacu

SEQ ID NO: 1656732 - RNA, 19 nt, Artificial Sequence
  Description of Artificial Sequence: Synthetic oligonucleotide
cuuguaaaggcuggggcug

SEQ ID NO: 1656733 - RNA, 19 nt, Artificial Sequence
  Description of Artificial Sequence: Synthetic oligonucleotide
caaauccugagcugcuggc

SEQ ID NO: 1656734 - RNA, 19 nt, Artificial Sequence
  Description of Artificial Sequence: Synthetic oligonucleotide
ugucuuagcgccacuguuu

SEQ ID NO: 1656735 - RNA, 19 nt, Artificial Sequence
  Description of Artificial Sequence: Synthetic oligonucleotide
aaggacccaaaggucggcg

SEQ ID NO: 1656736 - RNA, 19 nt, Artificial Sequence
  Description of Artificial Sequence: Synthetic oligonucleotide
uagagguaguagccgaggu

SEQ ID NO: 1656737 - RNA, 19 nt, Artificial Sequence
  Description of Artificial Sequence: Synthetic oligonucleotide
acaaaagcuaaacccugaa

SEQ ID NO: 1656738 - RNA, 19 nt, Artificial Sequence
  Description of Artificial Sequence: Synthetic oligonucleotide
aaacguagggcugccaaau

SEQ ID NO: 1656739 - RNA, 19 nt, Artificial Sequence
  Description of Artificial Sequence: Synthetic oligonucleotide
caguacuggaugcuugacc

SEQ ID NO: 1656740 - RNA, 19 nt, Artificial Sequence
  Description of Artificial Sequence: Synthetic oligonucleotide
gaugguccaaaggcgaaug

SEQ ID NO: 1656741 - RNA, 19 nt, Artificial Sequence
  Description of Artificial Sequence: Synthetic oligonucleotide
aaacagugucccuccugug

SEQ ID NO: 1656742 - RNA, 19 nt, Artificial Sequence
  Description of Artificial Sequence: Synthetic oligonucleotide
cacgcuaccacuggaagug

SEQ ID NO: 1656743 - RNA, 19 nt, Artificial Sequence
  Description of Artificial Sequence: Synthetic oligonucleotide
agccgcaguacccucuccg

SEQ ID NO: 1656744 - RNA, 19 nt, Artificial Sequence
  Description of Artificial Sequence: Synthetic oligonucleotide
cuggcgaggguaccaaagg

SEQ ID NO: 1656745 - RNA, 19 nt, Artificial Sequence
  Description of Artificial Sequence: Synthetic oligonucleotide
gaaggaugagcugccaaac

SEQ ID NO: 1656746 - RNA, 19 nt, Artificial Sequence
  Description of Artificial Sequence: Synthetic oligonucleotide
accgccagagcugaaagug

SEQ ID NO: 1656747 - RNA, 19 nt, Artificial Sequence
  Description of Artificial Sequence: Synthetic oligonucleotide
gaaguggaugacugcuggc

SEQ ID NO: 1656748 - RNA, 19 nt, Artificial Sequence
  Description of Artificial Sequence: Synthetic oligonucleotide
gaugccacgcuuccaccgc

SEQ ID NO: 1656749 - RNA, 19 nt, Artificial Sequence
  Description of Artificial Sequence: Synthetic oligonucleotide
uccaaacccagagaaucca

SEQ ID NO: 1656750 - RNA, 19 nt, Artificial Sequence
  Description of Artificial Sequence: Synthetic oligonucleotide
aaccgaaugcuggcacccc

SEQ ID NO: 1656751 - RNA, 19 nt, Artificial Sequence
  Description of Artificial Sequence: Synthetic oligonucleotide
cucuuguagaguuuccaga

SEQ ID NO: 1656752 - RNA, 19 nt, Artificial Sequence
  Description of Artificial Sequence: Synthetic oligonucleotide
uccaaaugucuuagcgcca

SEQ ID NO: 1656753 - RNA, 19 nt, Artificial Sequence
  Description of Artificial Sequence: Synthetic oligonucleotide
cagagaauccacuguucug

SEQ ID NO: 1656754 - RNA, 19 nt, Artificial Sequence
  Description of Artificial Sequence: Synthetic oligonucleotide
gcuugacaaaagcuaaacc

SEQ ID NO: 1656755 - RNA, 19 nt, Artificial Sequence
  Description of Artificial Sequence: Synthetic oligonucleotide
agccuguccaaaugagaag

SEQ ID NO: 1656756 - RNA, 19 nt, Artificial Sequence
  Description of Artificial Sequence: Synthetic oligonucleotide
gaaagagaagccacuugca

SEQ ID NO: 1656757 - RNA, 19 nt, Artificial Sequence
  Description of Artificial Sequence: Synthetic oligonucleotide
guagagguaguagccgagg

SEQ ID NO: 1656758 - RNA, 19 nt, Artificial Sequence
  Description of Artificial Sequence: Synthetic oligonucleotide
acagugggucacaggagcc

SEQ ID NO: 1656759 - RNA, 19 nt, Artificial Sequence
  Description of Artificial Sequence: Synthetic oligonucleotide
gaaccgaaugcuggcaccc

SEQ ID NO: 1656760 - RNA, 19 nt, Artificial Sequence
  Description of Artificial Sequence: Synthetic oligonucleotide
accaguauuacuagaccca

SEQ ID NO: 1656761 - RNA, 19 nt, Artificial Sequence
  Description of Artificial Sequence: Synthetic oligonucleotide
uuguuggcagcauccuggc

SEQ ID NO: 1656762 - RNA, 19 nt, Artificial Sequence
  Description of Artificial Sequence: Synthetic oligonucleotide
acccgaauccuccugcgcu

SEQ ID NO: 1656763 - RNA, 19 nt, Artificial Sequence
  Description of Artificial Sequence: Synthetic oligonucleotide
ggcuuugaccaaaagcagg

SEQ ID NO: 1656764 - RNA, 19 nt, Artificial Sequence
  Description of Artificial Sequence: Synthetic oligonucleotide
gcuggguuuuccuccaagg

SEQ ID NO: 1656765 - RNA, 19 nt, Artificial Sequence
  Description of Artificial Sequence: Synthetic oligonucleotide
agaagccacuugcagggcu

SEQ ID NO: 1656766 - RNA, 19 nt, Artificial Sequence
  Description of Artificial Sequence: Synthetic oligonucleotide
aaggcuggggcugaaccga

SEQ ID NO: 1656767 - RNA, 19 nt, Artificial Sequence
  Description of Artificial Sequence: Synthetic oligonucleotide
acccucuccgaacacuuug

SEQ ID NO: 1656768 - RNA, 19 nt, Artificial Sequence
  Description of Artificial Sequence: Synthetic oligonucleotide
aaagacugauccaccagua

SEQ ID NO: 1656769 - RNA, 19 nt, Artificial Sequence
  Description of Artificial Sequence: Synthetic oligonucleotide
acaaggacccaaaggucgg

SEQ ID NO: 1656770 - RNA, 19 nt, Artificial Sequence
  Description of Artificial Sequence: Synthetic oligonucleotide
gggacaaggacccaaaggu

SEQ ID NO: 1656771 - RNA, 19 nt, Artificial Sequence
  Description of Artificial Sequence: Synthetic oligonucleotide
uguuccccgaaggaugagc

SEQ ID NO: 1656772 - RNA, 19 nt, Artificial Sequence
  Description of Artificial Sequence: Synthetic oligonucleotide
aaaccggaggcuugacaaa

SEQ ID NO: 1656773 - RNA, 19 nt, Artificial Sequence
  Description of Artificial Sequence: Synthetic oligonucleotide
acuggaugcuugaccaaac

SEQ ID NO: 1656774 - RNA, 19 nt, Artificial Sequence
  Description of Artificial Sequence: Synthetic oligonucleotide
gucccuccuguguuggugg

SEQ ID NO: 1656775 - RNA, 19 nt, Artificial Sequence
  Description of Artificial Sequence: Synthetic oligonucleotide
ugguccaaaggcgaaugcu

SEQ ID NO: 1656776 - RNA, 19 nt, Artificial Sequence
  Description of Artificial Sequence: Synthetic oligonucleotide
acacgcuaccacuggaagu

SEQ ID NO: 1656777 - RNA, 19 nt, Artificial Sequence
  Description of Artificial Sequence: Synthetic oligonucleotide
ggcuuguaaaggcuggggc

SEQ ID NO: 1656778 - RNA, 19 nt, Artificial Sequence
  Description of Artificial Sequence: Synthetic oligonucleotide
augccacgcuuccaccgcc

SEQ ID NO: 1656779 - RNA, 19 nt, Artificial Sequence
  Description of Artificial Sequence: Synthetic oligonucleotide
caaagccugaugucugcug

SEQ ID NO: 1656780 - RNA, 19 nt, Artificial Sequence
  Description of Artificial Sequence: Synthetic oligonucleotide
accacuggaaguggaugac

SEQ ID NO: 1656781 - RNA, 19 nt, Artificial Sequence
  Description of Artificial Sequence: Synthetic oligonucleotide
agcgccacuguuuccaaau

SEQ ID NO: 1656782 - RNA, 19 nt, Artificial Sequence
  Description of Artificial Sequence: Synthetic oligonucleotide
ccuccaaaugucuuagcgc

SEQ ID NO: 1656783 - RNA, 19 nt, Artificial Sequence
  Description of Artificial Sequence: Synthetic oligonucleotide
gacaaaagcuaaacccuga

SEQ ID NO: 1656784 - RNA, 19 nt, Artificial Sequence
  Description of Artificial Sequence: Synthetic oligonucleotide
uucugacuggcgaggguac

SEQ ID NO: 1656785 - RNA, 19 nt, Artificial Sequence
  Description of Artificial Sequence: Synthetic oligonucleotide
acuagacccaaaaccggag

SEQ ID NO: 1656786 - RNA, 19 nt, Artificial Sequence
  Description of Artificial Sequence: Synthetic oligonucleotide
cccuccaaaugucuuagcg

SEQ ID NO: 1656787 - RNA, 19 nt, Artificial Sequence
  Description of Artificial Sequence: Synthetic oligonucleotide
cugaaccgaaugcuggcac

SEQ ID NO: 1656788 - RNA, 19 nt, Artificial Sequence
  Description of Artificial Sequence: Synthetic oligonucleotide
gcugaagcaccaaacguag

SEQ ID NO: 1656789 - RNA, 19 nt, Artificial Sequence
  Description of Artificial Sequence: Synthetic oligonucleotide
gucuuagcgccacuguuuc

SEQ ID NO: 1656790 - RNA, 19 nt, Artificial Sequence
  Description of Artificial Sequence: Synthetic oligonucleotide
gaugacugcuggccaaaga

SEQ ID NO: 1656791 - RNA, 19 nt, Artificial Sequence
  Description of Artificial Sequence: Synthetic oligonucleotide
cuccgaacacuuugccucc

SEQ ID NO: 1656792 - RNA, 19 nt, Artificial Sequence
  Description of Artificial Sequence: Synthetic oligonucleotide
ggaugccacgcuuccaccg

SEQ ID NO: 1656793 - RNA, 19 nt, Artificial Sequence
  Description of Artificial Sequence: Synthetic oligonucleotide
cuuagcgccacuguuucca

SEQ ID NO: 1656794 - RNA, 19 nt, Artificial Sequence
  Description of Artificial Sequence: Synthetic oligonucleotide
aaacacgcuaccacuggaa

SEQ ID NO: 1656795 - RNA, 19 nt, Artificial Sequence
  Description of Artificial Sequence: Synthetic oligonucleotide
acccuccaaaugucuuagc

SEQ ID NO: 1656796 - RNA, 19 nt, Artificial Sequence
  Description of Artificial Sequence: Synthetic oligonucleotide
caaagccuugggcagacga

SEQ ID NO: 1656797 - RNA, 19 nt, Artificial Sequence
  Description of Artificial Sequence: Synthetic oligonucleotide
uggcacucgaggcggcucc

SEQ ID NO: 1656798 - RNA, 19 nt, Artificial Sequence
  Description of Artificial Sequence: Synthetic oligonucleotide
aaguaggagggcugccaaa

SEQ ID NO: 1656799 - RNA, 19 nt, Artificial Sequence
  Description of Artificial Sequence: Synthetic oligonucleotide
augucuuagcgccacuguu

SEQ ID NO: 1656800 - RNA, 19 nt, Artificial Sequence
  Description of Artificial Sequence: Synthetic oligonucleotide
agaauccacuguucugggu

SEQ ID NO: 1656801 - RNA, 19 nt, Artificial Sequence
  Description of Artificial Sequence: Synthetic oligonucleotide
gaagccuguccaaaugaga

SEQ ID NO: 1656802 - RNA, 19 nt, Artificial Sequence
  Description of Artificial Sequence: Synthetic oligonucleotide
acuggcgaggguaccaaag

SEQ ID NO: 1656803 - RNA, 19 nt, Artificial Sequence
  Description of Artificial Sequence: Synthetic oligonucleotide
uccaaaaccuugggaugcc

SEQ ID NO: 1656804 - RNA, 19 nt, Artificial Sequence
  Description of Artificial Sequence: Synthetic oligonucleotide
gaagacguucgcacuggug

SEQ ID NO: 1656805 - RNA, 19 nt, Artificial Sequence
  Description of Artificial Sequence: Synthetic oligonucleotide
agagggcuuguaaaggcug

SEQ ID NO: 1656806 - RNA, 19 nt, Artificial Sequence
  Description of Artificial Sequence: Synthetic oligonucleotide
gagcugaagcaccaaacgu

SEQ ID NO: 1656807 - RNA, 19 nt, Artificial Sequence
  Description of Artificial Sequence: Synthetic oligonucleotide
ugccaaauccugagcugcu

SEQ ID NO: 1656808 - RNA, 19 nt, Artificial Sequence
  Description of Artificial Sequence: Synthetic oligonucleotide
acagugucccuccuguguu

SEQ ID NO: 1656809 - RNA, 19 nt, Artificial Sequence
  Description of Artificial Sequence: Synthetic oligonucleotide
gcgaggguaccaaaggacg

SEQ ID NO: 1656810 - RNA, 19 nt, Artificial Sequence
  Description of Artificial Sequence: Synthetic oligonucleotide
ucuuagcgccacuguuucc

SEQ ID NO: 1656811 - RNA, 19 nt, Artificial Sequence
  Description of Artificial Sequence: Synthetic oligonucleotide
agacguucgcacuggugga

SEQ ID NO: 1656812 - RNA, 19 nt, Artificial Sequence
  Description of Artificial Sequence: Synthetic oligonucleotide
agcugaagcaccaaacgua

SEQ ID NO: 1656813 - RNA, 19 nt, Artificial Sequence
  Description of Artificial Sequence: Synthetic oligonucleotide
auuugggguggcuguagau

SEQ ID NO: 1656814 - RNA, 19 nt, Artificial Sequence
  Description of Artificial Sequence: Synthetic oligonucleotide
gccggauccaaacccagag

SEQ ID NO: 1656815 - RNA, 19 nt, Artificial Sequence
  Description of Artificial Sequence: Synthetic oligonucleotide
ugucccuccuguguuggug

SEQ ID NO: 1656816 - RNA, 19 nt, Artificial Sequence
  Description of Artificial Sequence: Synthetic oligonucleotide
ggacccaaaggucggcgcg

SEQ ID NO: 1656817 - RNA, 19 nt, Artificial Sequence
  Description of Artificial Sequence: Synthetic oligonucleotide
acucgaggcggcuccgaag

SEQ ID NO: 1656818 - RNA, 19 nt, Artificial Sequence
  Description of Artificial Sequence: Synthetic oligonucleotide
ggggcaagaggaaacagac

SEQ ID NO: 1656819 - RNA, 19 nt, Artificial Sequence
  Description of Artificial Sequence: Synthetic oligonucleotide
accgaagccaccuguuuua

SEQ ID NO: 1656820 - RNA, 19 nt, Artificial Sequence
  Description of Artificial Sequence: Synthetic oligonucleotide
gugguauuugggguggcug

SEQ ID NO: 1656821 - RNA, 19 nt, Artificial Sequence
  Description of Artificial Sequence: Synthetic oligonucleotide
aguacccucuccgaacacu

SEQ ID NO: 1656822 - RNA, 19 nt, Artificial Sequence
  Description of Artificial Sequence: Synthetic oligonucleotide
aacaggcccggagcugaac

SEQ ID NO: 1656823 - RNA, 19 nt, Artificial Sequence
  Description of Artificial Sequence: Synthetic oligonucleotide
gaugagcugccaaacccuc

SEQ ID NO: 1656824 - RNA, 19 nt, Artificial Sequence
  Description of Artificial Sequence: Synthetic oligonucleotide
uucgcacugguggaaugug

SEQ ID NO: 1656825 - RNA, 19 nt, Artificial Sequence
  Description of Artificial Sequence: Synthetic oligonucleotide
caaaaguaggagggcugcc

SEQ ID NO: 1656826 - RNA, 19 nt, Artificial Sequence
  Description of Artificial Sequence: Synthetic oligonucleotide
cucccgucgagcccagagg

SEQ ID NO: 1656827 - RNA, 19 nt, Artificial Sequence
  Description of Artificial Sequence: Synthetic oligonucleotide
agacccaaaaccggaggcu

SEQ ID NO: 1656828 - RNA, 19 nt, Artificial Sequence
  Description of Artificial Sequence: Synthetic oligonucleotide
acacuuugccucccgucga

SEQ ID NO: 1656829 - RNA, 19 nt, Artificial Sequence
  Description of Artificial Sequence: Synthetic oligonucleotide
uccaccaguacuggaugcu

SEQ ID NO: 1656830 - RNA, 19 nt, Artificial Sequence
  Description of Artificial Sequence: Synthetic oligonucleotide
gcugaaagugccagcaggc

SEQ ID NO: 1656831 - RNA, 19 nt, Artificial Sequence
  Description of Artificial Sequence: Synthetic oligonucleotide
gcuccgaagacguucgcac

SEQ ID NO: 1656832 - RNA, 19 nt, Artificial Sequence
  Description of Artificial Sequence: Synthetic oligonucleotide
agggcuuguaaaggcuggg

SEQ ID NO: 1656833 - RNA, 19 nt, Artificial Sequence
  Description of Artificial Sequence: Synthetic oligonucleotide
uggcugagcugaauggguu

SEQ ID NO: 1656834 - RNA, 19 nt, Artificial Sequence
  Description of Artificial Sequence: Synthetic oligonucleotide
uagccgaggugcuaccaaa

SEQ ID NO: 1656835 - RNA, 19 nt, Artificial Sequence
  Description of Artificial Sequence: Synthetic oligonucleotide
ggcgaaugcuccugugccg

SEQ ID NO: 1656836 - RNA, 19 nt, Artificial Sequence
  Description of Artificial Sequence: Synthetic oligonucleotide
ccaaacacgcuaccacugg

SEQ ID NO: 1656837 - RNA, 19 nt, Artificial Sequence
  Description of Artificial Sequence: Synthetic oligonucleotide
ugccggauccaaacccaga

SEQ ID NO: 1656838 - RNA, 19 nt, Artificial Sequence
  Description of Artificial Sequence: Synthetic oligonucleotide
cucgaggcggcuccgaaga

SEQ ID NO: 1656839 - RNA, 19 nt, Artificial Sequence
  Description of Artificial Sequence: Synthetic oligonucleotide
agcaccaaacguagggcug

SEQ ID NO: 1656840 - RNA, 19 nt, Artificial Sequence
  Description of Artificial Sequence: Synthetic oligonucleotide
cugcccaaacacaggggug

SEQ ID NO: 1656841 - RNA, 19 nt, Artificial Sequence
  Description of Artificial Sequence: Synthetic oligonucleotide
cugggacaaggacccaaag

SEQ ID NO: 1656842 - RNA, 19 nt, Artificial Sequence
  Description of Artificial Sequence: Synthetic oligonucleotide
ggcuugacaaaagcuaaac

SEQ ID NO: 1656843 - RNA, 19 nt, Artificial Sequence
  Description of Artificial Sequence: Synthetic oligonucleotide
cagaaccaguauuacuaga

SEQ ID NO: 1656844 - RNA, 19 nt, Artificial Sequence
  Description of Artificial Sequence: Synthetic oligonucleotide
gcuuugaccaaaagcagga

SEQ ID NO: 1656845 - RNA, 19 nt, Artificial Sequence
  Description of Artificial Sequence: Synthetic oligonucleotide
aaaggucggcgcguucuga

SEQ ID NO: 1656846 - RNA, 19 nt, Artificial Sequence
  Description of Artificial Sequence: Synthetic oligonucleotide
agacccaaacacgcuacca

SEQ ID NO: 1656847 - RNA, 19 nt, Artificial Sequence
  Description of Artificial Sequence: Synthetic oligonucleotide
cugcuagcugccaccugcc

SEQ ID NO: 1656848 - RNA, 19 nt, Artificial Sequence
  Description of Artificial Sequence: Synthetic oligonucleotide
uugguggaagccuguccaa

SEQ ID NO: 1656849 - RNA, 19 nt, Artificial Sequence
  Description of Artificial Sequence: Synthetic oligonucleotide
uguuggcagcauccuggcu

SEQ ID NO: 1656850 - RNA, 19 nt, Artificial Sequence
  Description of Artificial Sequence: Synthetic oligonucleotide
auccacuguucuggguccc

SEQ ID NO: 1656851 - RNA, 19 nt, Artificial Sequence
  Description of Artificial Sequence: Synthetic oligonucleotide
ggguuuuccuccaaggcca

SEQ ID NO: 1656852 - RNA, 19 nt, Artificial Sequence
  Description of Artificial Sequence: Synthetic oligonucleotide
uuggccaaacagugucccu

SEQ ID NO: 1656853 - RNA, 19 nt, Artificial Sequence
  Description of Artificial Sequence: Synthetic oligonucleotide
ggaagccuguccaaaugag

SEQ ID NO: 1656854 - RNA, 19 nt, Artificial Sequence
  Description of Artificial Sequence: Synthetic oligonucleotide
gcuuguugcuugcccaaag

SEQ ID NO: 1656855 - RNA, 19 nt, Artificial Sequence
  Description of Artificial Sequence: Synthetic oligonucleotide
caaaaccggaggcuugaca

SEQ ID NO: 1656856 - RNA, 19 nt, Artificial Sequence
  Description of Artificial Sequence: Synthetic oligonucleotide
agccgaggugcuaccaaac

SEQ ID NO: 1656857 - RNA, 19 nt, Artificial Sequence
  Description of Artificial Sequence: Synthetic oligonucleotide
caaacacgcuaccacugga

SEQ ID NO: 1656858 - RNA, 19 nt, Artificial Sequence
  Description of Artificial Sequence: Synthetic oligonucleotide
uggcaccccuccaaaccca

SEQ ID NO: 1656859 - RNA, 19 nt, Artificial Sequence
  Description of Artificial Sequence: Synthetic oligonucleotide
ggcugaaccgaaugcuggc

SEQ ID NO: 1656860 - RNA, 19 nt, Artificial Sequence
  Description of Artificial Sequence: Synthetic oligonucleotide
gucggcgcguucugacugg

SEQ ID NO: 1656861 - RNA, 19 nt, Artificial Sequence
  Description of Artificial Sequence: Synthetic oligonucleotide
ggaggcuugacaaaagcua

SEQ ID NO: 1656862 - RNA, 19 nt, Artificial Sequence
  Description of Artificial Sequence: Synthetic oligonucleotide
gcccagagggcuuguaaag

SEQ ID NO: 1656863 - RNA, 19 nt, Artificial Sequence
  Description of Artificial Sequence: Synthetic oligonucleotide
cuggccaaagacugaucca

SEQ ID NO: 1656864 - RNA, 19 nt, Artificial Sequence
  Description of Artificial Sequence: Synthetic oligonucleotide
uuagcgccacuguuuccaa

SEQ ID NO: 1656865 - RNA, 19 nt, Artificial Sequence
  Description of Artificial Sequence: Synthetic oligonucleotide
ggccaaacagugucccucc

SEQ ID NO: 1656866 - RNA, 19 nt, Artificial Sequence
  Description of Artificial Sequence: Synthetic oligonucleotide
caaaggucggcgcguucug

SEQ ID NO: 1656867 - RNA, 19 nt, Artificial Sequence
  Description of Artificial Sequence: Synthetic oligonucleotide
agugguauuugggguggcu

SEQ ID NO: 1656868 - RNA, 19 nt, Artificial Sequence
  Description of Artificial Sequence: Synthetic oligonucleotide
ugcuugcccaaaggcuggg

SEQ ID NO: 1656869 - RNA, 19 nt, Artificial Sequence
  Description of Artificial Sequence: Synthetic oligonucleotide
ccuguuuuauuuggaguag

SEQ ID NO: 1656870 - RNA, 19 nt, Artificial Sequence
  Description of Artificial Sequence: Synthetic oligonucleotide
gcgaaugcuccugugccgg

SEQ ID NO: 1656871 - RNA, 19 nt, Artificial Sequence
  Description of Artificial Sequence: Synthetic oligonucleotide
cccaaaaguaggagggcug

SEQ ID NO: 1656872 - RNA, 19 nt, Artificial Sequence
  Description of Artificial Sequence: Synthetic oligonucleotide
gggaugugcacaguggguc

SEQ ID NO: 1656873 - RNA, 19 nt, Artificial Sequence
  Description of Artificial Sequence: Synthetic oligonucleotide
aggagggcugccaaacacu

SEQ ID NO: 1656874 - RNA, 19 nt, Artificial Sequence
  Description of Artificial Sequence: Synthetic oligonucleotide
gcccaaaugcugucugucc

SEQ ID NO: 1656875 - RNA, 19 nt, Artificial Sequence
  Description of Artificial Sequence: Synthetic oligonucleotide
gcuggggcugaaccgaaug

SEQ ID NO: 1656876 - RNA, 19 nt, Artificial Sequence
  Description of Artificial Sequence: Synthetic oligonucleotide
caaacguagggcugccaaa

SEQ ID NO: 1656877 - RNA, 19 nt, Artificial Sequence
  Description of Artificial Sequence: Synthetic oligonucleotide
ggucggcgcguucugacug

SEQ ID NO: 1656878 - RNA, 19 nt, Artificial Sequence
  Description of Artificial Sequence: Synthetic oligonucleotide
guaggagggcugccaaaca

SEQ ID NO: 1656879 - RNA, 19 nt, Artificial Sequence
  Description of Artificial Sequence: Synthetic oligonucleotide
gggcuuugaccaaaagcag

SEQ ID NO: 1656880 - RNA, 19 nt, Artificial Sequence
  Description of Artificial Sequence: Synthetic oligonucleotide
gcuuguaaaggcuggggcu

SEQ ID NO: 1656881 - RNA, 19 nt, Artificial Sequence
  Description of Artificial Sequence: Synthetic oligonucleotide
caccuguuuuauuuggagu

SEQ ID NO: 1656882 - RNA, 19 nt, Artificial Sequence
  Description of Artificial Sequence: Synthetic oligonucleotide
caaggacccaaaggucggc

SEQ ID NO: 1656883 - RNA, 19 nt, Artificial Sequence
  Description of Artificial Sequence: Synthetic oligonucleotide
ugccacgcuuccaccgcca

SEQ ID NO: 1656884 - RNA, 19 nt, Artificial Sequence
  Description of Artificial Sequence: Synthetic oligonucleotide
ugcugcucccaaacccgaa

SEQ ID NO: 1656885 - RNA, 19 nt, Artificial Sequence
  Description of Artificial Sequence: Synthetic oligonucleotide
aguagccgaggugcuacca

SEQ ID NO: 1656886 - RNA, 19 nt, Artificial Sequence
  Description of Artificial Sequence: Synthetic oligonucleotide
ccagacccaaacacgcuac

SEQ ID NO: 1656887 - RNA, 19 nt, Artificial Sequence
  Description of Artificial Sequence: Synthetic oligonucleotide
gggcuuguaaaggcugggg

SEQ ID NO: 1656888 - RNA, 19 nt, Artificial Sequence
  Description of Artificial Sequence: Synthetic oligonucleotide
ccgaggugcuaccaaacac

SEQ ID NO: 1656889 - RNA, 19 nt, Artificial Sequence
  Description of Artificial Sequence: Synthetic oligonucleotide
aggucggcgcguucugacu

SEQ ID NO: 1656890 - RNA, 19 nt, Artificial Sequence
  Description of Artificial Sequence: Synthetic oligonucleotide
acacuggagcagcaccgaa

SEQ ID NO: 1656891 - RNA, 19 nt, Artificial Sequence
  Description of Artificial Sequence: Synthetic oligonucleotide
guagccgaggugcuaccaa

SEQ ID NO: 1656892 - RNA, 19 nt, Artificial Sequence
  Description of Artificial Sequence: Synthetic oligonucleotide
ugacuggcgaggguaccaa

SEQ ID NO: 1656893 - RNA, 19 nt, Artificial Sequence
  Description of Artificial Sequence: Synthetic oligonucleotide
agggaugugcacagugggu

SEQ ID NO: 1656894 - RNA, 19 nt, Artificial Sequence
  Description of Artificial Sequence: Synthetic oligonucleotide
gcaguacccucuccgaaca

SEQ ID NO: 1656895 - RNA, 19 nt, Artificial Sequence
  Description of Artificial Sequence: Synthetic oligonucleotide
ccggaggcuugacaaaagc

SEQ ID NO: 1656896 - RNA, 19 nt, Artificial Sequence
  Description of Artificial Sequence: Synthetic oligonucleotide
uccgaacacuuugccuccc

SEQ ID NO: 1656897 - RNA, 19 nt, Artificial Sequence
  Description of Artificial Sequence: Synthetic oligonucleotide
cugauccaccaguacugga

SEQ ID NO: 1656898 - RNA, 19 nt, Artificial Sequence
  Description of Artificial Sequence: Synthetic oligonucleotide
acgcuaccacuggaagugg

SEQ ID NO: 1656899 - RNA, 19 nt, Artificial Sequence
  Description of Artificial Sequence: Synthetic oligonucleotide
ggcgcguucugacuggcga

SEQ ID NO: 1656900 - RNA, 19 nt, Artificial Sequence
  Description of Artificial Sequence: Synthetic oligonucleotide
cuggaaguggaugacugcu

SEQ ID NO: 1656901 - RNA, 19 nt, Artificial Sequence
  Description of Artificial Sequence: Synthetic oligonucleotide
ccuugggcagacgaguuug

SEQ ID NO: 1656902 - RNA, 19 nt, Artificial Sequence
  Description of Artificial Sequence: Synthetic oligonucleotide
ucccuccuguguuggugga

SEQ ID NO: 1656903 - RNA, 19 nt, Artificial Sequence
  Description of Artificial Sequence: Synthetic oligonucleotide
cuaaacccugaaggugcug

SEQ ID NO: 1656904 - RNA, 19 nt, Artificial Sequence
  Description of Artificial Sequence: Synthetic oligonucleotide
cgaggguaccaaaggacgc

SEQ ID NO: 1656905 - RNA, 19 nt, Artificial Sequence
  Description of Artificial Sequence: Synthetic oligonucleotide
accggaggcuugacaaaag

SEQ ID NO: 1656906 - RNA, 19 nt, Artificial Sequence
  Description of Artificial Sequence: Synthetic oligonucleotide
caguauuacuagacccaaa

SEQ ID NO: 1656907 - RNA, 19 nt, Artificial Sequence
  Description of Artificial Sequence: Synthetic oligonucleotide
cuggagcugaagcaccaaa

SEQ ID NO: 1656908 - RNA, 19 nt, Artificial Sequence
  Description of Artificial Sequence: Synthetic oligonucleotide
ucgaggcggcuccgaagac

SEQ ID NO: 1656909 - RNA, 19 nt, Artificial Sequence
  Description of Artificial Sequence: Synthetic oligonucleotide
ggacaaggacccaaagguc

SEQ ID NO: 1656910 - RNA, 19 nt, Artificial Sequence
  Description of Artificial Sequence: Synthetic oligonucleotide
acccaaaaccggaggcuug

SEQ ID NO: 1656911 - RNA, 19 nt, Artificial Sequence
  Description of Artificial Sequence: Synthetic oligonucleotide
guaccaaaggacgcagugu

SEQ ID NO: 1656912 - RNA, 19 nt, Artificial Sequence
  Description of Artificial Sequence: Synthetic oligonucleotide
gugccggauccaaacccag

SEQ ID NO: 1656913 - RNA, 19 nt, Artificial Sequence
  Description of Artificial Sequence: Synthetic oligonucleotide
ggggcugaaccgaaugcug

SEQ ID NO: 1656914 - RNA, 19 nt, Artificial Sequence
  Description of Artificial Sequence: Synthetic oligonucleotide
cucuccgaacacuuugccu

SEQ ID NO: 1656915 - RNA, 19 nt, Artificial Sequence
  Description of Artificial Sequence: Synthetic oligonucleotide
guacuggaugcuugaccaa

SEQ ID NO: 1656916 - RNA, 19 nt, Artificial Sequence
  Description of Artificial Sequence: Synthetic oligonucleotide
ccucuccgaacacuuugcc

SEQ ID NO: 1656917 - RNA, 19 nt, Artificial Sequence
  Description of Artificial Sequence: Synthetic oligonucleotide
gacgaguuugaugguccaa

SEQ ID NO: 1656918 - RNA, 19 nt, Artificial Sequence
  Description of Artificial Sequence: Synthetic oligonucleotide
cacaggagccugaaggaau

SEQ ID NO: 1656919 - RNA, 19 nt, Artificial Sequence
  Description of Artificial Sequence: Synthetic oligonucleotide
ggaggguuguuuuggccaa

SEQ ID NO: 1656920 - RNA, 19 nt, Artificial Sequence
  Description of Artificial Sequence: Synthetic oligonucleotide
gaggcggcuccgaagacgu

SEQ ID NO: 1656921 - RNA, 19 nt, Artificial Sequence
  Description of Artificial Sequence: Synthetic oligonucleotide
aggcuugacaaaagcuaaa

SEQ ID NO: 1656922 - RNA, 19 nt, Artificial Sequence
  Description of Artificial Sequence: Synthetic oligonucleotide
uagcgccacuguuuccaaa

SEQ ID NO: 1656923 - RNA, 19 nt, Artificial Sequence
  Description of Artificial Sequence: Synthetic oligonucleotide
cagagggcuuguaaaggcu

SEQ ID NO: 1656924 - RNA, 19 nt, Artificial Sequence
  Description of Artificial Sequence: Synthetic oligonucleotide
caaaugcugucuguccaaa

SEQ ID NO: 1656925 - RNA, 19 nt, Artificial Sequence
  Description of Artificial Sequence: Synthetic oligonucleotide
gcagacgaguuugaugguc

SEQ ID NO: 1656926 - RNA, 19 nt, Artificial Sequence
  Description of Artificial Sequence: Synthetic oligonucleotide
gcuggggccugcccaaaug

SEQ ID NO: 1656927 - RNA, 19 nt, Artificial Sequence
  Description of Artificial Sequence: Synthetic oligonucleotide
caccaaacguagggcugcc

SEQ ID NO: 1656928 - RNA, 19 nt, Artificial Sequence
  Description of Artificial Sequence: Synthetic oligonucleotide
gcuugaccaaacacagaac

SEQ ID NO: 1656929 - RNA, 19 nt, Artificial Sequence
  Description of Artificial Sequence: Synthetic oligonucleotide
caguggcugugcugcuagc

SEQ ID NO: 1656930 - RNA, 19 nt, Artificial Sequence
  Description of Artificial Sequence: Synthetic oligonucleotide
gcggcuccgaagacguucg

SEQ ID NO: 1656931 - RNA, 19 nt, Artificial Sequence
  Description of Artificial Sequence: Synthetic oligonucleotide
gacguucgcacugguggaa

SEQ ID NO: 1656932 - RNA, 19 nt, Artificial Sequence
  Description of Artificial Sequence: Synthetic oligonucleotide
caaacccuccaaaugucuu

SEQ ID NO: 1656933 - RNA, 19 nt, Artificial Sequence
  Description of Artificial Sequence: Synthetic oligonucleotide
ccaaagacugcuggagcug

SEQ ID NO: 1656934 - RNA, 19 nt, Artificial Sequence
  Description of Artificial Sequence: Synthetic oligonucleotide
cugacuggcgaggguacca

SEQ ID NO: 1656935 - RNA, 19 nt, Artificial Sequence
  Description of Artificial Sequence: Synthetic oligonucleotide
ccaaaggcgaaugcuccug

SEQ ID NO: 1656936 - RNA, 19 nt, Artificial Sequence
  Description of Artificial Sequence: Synthetic oligonucleotide
gcgcguucugacuggcgag

SEQ ID NO: 1656937 - RNA, 19 nt, Artificial Sequence
  Description of Artificial Sequence: Synthetic oligonucleotide
ugcuccugugccggaucca

SEQ ID NO: 1656938 - RNA, 19 nt, Artificial Sequence
  Description of Artificial Sequence: Synthetic oligonucleotide
gacuggcgaggguaccaaa

SEQ ID NO: 1656939 - RNA, 19 nt, Artificial Sequence
  Description of Artificial Sequence: Synthetic oligonucleotide
ucggcgcguucugacuggc

SEQ ID NO: 1656940 - RNA, 19 nt, Artificial Sequence
  Description of Artificial Sequence: Synthetic oligonucleotide
ccucccgucgagcccagag

SEQ ID NO: 1656941 - RNA, 19 nt, Artificial Sequence
  Description of Artificial Sequence: Synthetic oligonucleotide
caaaggacgcaguguugcu

SEQ ID NO: 1656942 - RNA, 19 nt, Artificial Sequence
  Description of Artificial Sequence: Synthetic oligonucleotide
cgcaguacccucuccgaac

SEQ ID NO: 1656943 - RNA, 19 nt, Artificial Sequence
  Description of Artificial Sequence: Synthetic oligonucleotide
gccgaggugcuaccaaaca

SEQ ID NO: 1656944 - RNA, 19 nt, Artificial Sequence
  Description of Artificial Sequence: Synthetic oligonucleotide
agcauccuggcuggguuuu

SEQ ID NO: 1656945 - RNA, 19 nt, Artificial Sequence
  Description of Artificial Sequence: Synthetic oligonucleotide
ccgaagacguucgcacugg

SEQ ID NO: 1656946 - RNA, 19 nt, Artificial Sequence
  Description of Artificial Sequence: Synthetic oligonucleotide
ccaaacguagggcugccaa

SEQ ID NO: 1656947 - RNA, 19 nt, Artificial Sequence
  Description of Artificial Sequence: Synthetic oligonucleotide
guguugguggaagccuguc

SEQ ID NO: 1656948 - RNA, 19 nt, Artificial Sequence
  Description of Artificial Sequence: Synthetic oligonucleotide
cuucuguuccccgaaggau

SEQ ID NO: 1656949 - RNA, 19 nt, Artificial Sequence
  Description of Artificial Sequence: Synthetic oligonucleotide
ccaaauagauuagugguau

SEQ ID NO: 1656950 - RNA, 19 nt, Artificial Sequence
  Description of Artificial Sequence: Synthetic oligonucleotide
caaaggcgaaugcuccugu

SEQ ID NO: 1656951 - RNA, 19 nt, Artificial Sequence
  Description of Artificial Sequence: Synthetic oligonucleotide
guucgcacugguggaaugu

SEQ ID NO: 1656952 - RNA, 19 nt, Artificial Sequence
  Description of Artificial Sequence: Synthetic oligonucleotide
gacccaaaaccggaggcuu

SEQ ID NO: 1656953 - RNA, 19 nt, Artificial Sequence
  Description of Artificial Sequence: Synthetic oligonucleotide
gcguucugacuggcgaggg

SEQ ID NO: 1656954 - RNA, 19 nt, Artificial Sequence
  Description of Artificial Sequence: Synthetic oligonucleotide
acguucgcacugguggaau

SEQ ID NO: 1656955 - RNA, 19 nt, Artificial Sequence
  Description of Artificial Sequence: Synthetic oligonucleotide
accaaacguagggcugcca

SEQ ID NO: 1656956 - RNA, 19 nt, Artificial Sequence
  Description of Artificial Sequence: Synthetic oligonucleotide
cccgaauccuccugcgcug

SEQ ID NO: 1656957 - RNA, 19 nt, Artificial Sequence
  Description of Artificial Sequence: Synthetic oligonucleotide
ggcggcuccgaagacguuc

SEQ ID NO: 1656958 - RNA, 19 nt, Artificial Sequence
  Description of Artificial Sequence: Synthetic oligonucleotide
gcugaaccgaaugcuggca

SEQ ID NO: 1656959 - RNA, 19 nt, Artificial Sequence
  Description of Artificial Sequence: Synthetic oligonucleotide
aaacaggcccggagcugaa

SEQ ID NO: 1656960 - RNA, 19 nt, Artificial Sequence
  Description of Artificial Sequence: Synthetic oligonucleotide
cacuguucugggucccaaa

SEQ ID NO: 1656961 - RNA, 19 nt, Artificial Sequence
  Description of Artificial Sequence: Synthetic oligonucleotide
uggcagccgcaguacccuc

SEQ ID NO: 1656962 - RNA, 19 nt, Artificial Sequence
  Description of Artificial Sequence: Synthetic oligonucleotide
cuccgaagacguucgcacu

SEQ ID NO: 1656963 - RNA, 19 nt, Artificial Sequence
  Description of Artificial Sequence: Synthetic oligonucleotide
ccccgaaggaugagcugcc

SEQ ID NO: 1656964 - RNA, 19 nt, Artificial Sequence
  Description of Artificial Sequence: Synthetic oligonucleotide
cugaaagugccagcaggcu

SEQ ID NO: 1656965 - RNA, 19 nt, Artificial Sequence
  Description of Artificial Sequence: Synthetic oligonucleotide
cagccgcaguacccucucc

SEQ ID NO: 1656966 - RNA, 19 nt, Artificial Sequence
  Description of Artificial Sequence: Synthetic oligonucleotide
cuggcacucgaggcggcuc

SEQ ID NO: 1656967 - RNA, 19 nt, Artificial Sequence
  Description of Artificial Sequence: Synthetic oligonucleotide
cuguuccccgaaggaugag

SEQ ID NO: 1656968 - RNA, 19 nt, Artificial Sequence
  Description of Artificial Sequence: Synthetic oligonucleotide
ggcaccccuccaaacccag

SEQ ID NO: 1656969 - RNA, 19 nt, Artificial Sequence
  Description of Artificial Sequence: Synthetic oligonucleotide
ccaguauuacuagacccaa

SEQ ID NO: 1656970 - RNA, 19 nt, Artificial Sequence
  Description of Artificial Sequence: Synthetic oligonucleotide
ugccucccgucgagcccag

SEQ ID NO: 1656971 - RNA, 19 nt, Artificial Sequence
  Description of Artificial Sequence: Synthetic oligonucleotide
ccgaaugcuggcaccccuc

SEQ ID NO: 1656972 - RNA, 19 nt, Artificial Sequence
  Description of Artificial Sequence: Synthetic oligonucleotide
gacccaaaggucggcgcgu

SEQ ID NO: 1656973 - RNA, 19 nt, Artificial Sequence
  Description of Artificial Sequence: Synthetic oligonucleotide
ggcuccgaagacguucgca

SEQ ID NO: 1656974 - RNA, 19 nt, Artificial Sequence
  Description of Artificial Sequence: Synthetic oligonucleotide
gccgcaguacccucuccga

SEQ ID NO: 1656975 - RNA, 19 nt, Artificial Sequence
  Description of Artificial Sequence: Synthetic oligonucleotide
ccgaauccuccugcgcugg

SEQ ID NO: 1656976 - RNA, 19 nt, Artificial Sequence
  Description of Artificial Sequence: Synthetic oligonucleotide
gccacgcuuccaccgccag

SEQ ID NO: 1656977 - RNA, 19 nt, Artificial Sequence
  Description of Artificial Sequence: Synthetic oligonucleotide
gaaugcuccugugccggau

SEQ ID NO: 1656978 - RNA, 19 nt, Artificial Sequence
  Description of Artificial Sequence: Synthetic oligonucleotide
gaacccaggcuggcugaaa

SEQ ID NO: 1656979 - RNA, 19 nt, Artificial Sequence
  Description of Artificial Sequence: Synthetic oligonucleotide
gaggguuguuuuggccaaa

SEQ ID NO: 1656980 - RNA, 19 nt, Artificial Sequence
  Description of Artificial Sequence: Synthetic oligonucleotide
gcuaccaaacacagagccu

SEQ ID NO: 1656981 - RNA, 19 nt, Artificial Sequence
  Description of Artificial Sequence: Synthetic oligonucleotide
cgaggcggcuccgaagacg

SEQ ID NO: 1656982 - RNA, 19 nt, Artificial Sequence
  Description of Artificial Sequence: Synthetic oligonucleotide
caccgaagccaccuguuuu

SEQ ID NO: 1656983 - RNA, 19 nt, Artificial Sequence
  Description of Artificial Sequence: Synthetic oligonucleotide
cugcccaaaugcugucugu

SEQ ID NO: 1656984 - RNA, 19 nt, Artificial Sequence
  Description of Artificial Sequence: Synthetic oligonucleotide
ccaaacccuccaaaugucu

SEQ ID NO: 1656985 - RNA, 19 nt, Artificial Sequence
  Description of Artificial Sequence: Synthetic oligonucleotide
cacucgaggcggcuccgaa

SEQ ID NO: 1656986 - RNA, 19 nt, Artificial Sequence
  Description of Artificial Sequence: Synthetic oligonucleotide
cgcguucugacuggcgagg

SEQ ID NO: 1656987 - RNA, 19 nt, Artificial Sequence
  Description of Artificial Sequence: Synthetic oligonucleotide
gacagccguggagggaugu

SEQ ID NO: 1656988 - RNA, 19 nt, Artificial Sequence
  Description of Artificial Sequence: Synthetic oligonucleotide
ucgagcccagagggcuugu

SEQ ID NO: 1656989 - RNA, 19 nt, Artificial Sequence
  Description of Artificial Sequence: Synthetic oligonucleotide
cguucgcacugguggaaug

SEQ ID NO: 1656990 - RNA, 19 nt, Artificial Sequence
  Description of Artificial Sequence: Synthetic oligonucleotide
ccggauccaaacccagaga

SEQ ID NO: 1656991 - RNA, 19 nt, Artificial Sequence
  Description of Artificial Sequence: Synthetic oligonucleotide
ggcccggagcugaacccag

SEQ ID NO: 1656992 - RNA, 19 nt, Artificial Sequence
  Description of Artificial Sequence: Synthetic oligonucleotide
cccaaaaccggaggcuuga

SEQ ID NO: 1656993 - RNA, 19 nt, Artificial Sequence
  Description of Artificial Sequence: Synthetic oligonucleotide
gcucccaaacccgaauccu

SEQ ID NO: 1656994 - RNA, 19 nt, Artificial Sequence
  Description of Artificial Sequence: Synthetic oligonucleotide
ccaaaaccggaggcuugac

SEQ ID NO: 1656995 - RNA, 19 nt, Artificial Sequence
  Description of Artificial Sequence: Synthetic oligonucleotide
ccgaaggaugagcugccaa

SEQ ID NO: 1656996 - RNA, 19 nt, Artificial Sequence
  Description of Artificial Sequence: Synthetic oligonucleotide
ccguggagggaugugcaca

SEQ ID NO: 1656997 - RNA, 19 nt, Artificial Sequence
  Description of Artificial Sequence: Synthetic oligonucleotide
ccaaaaccuugggaugcca

SEQ ID NO: 1656998 - RNA, 19 nt, Artificial Sequence
  Description of Artificial Sequence: Synthetic oligonucleotide
gcuaccacuggaaguggau

SEQ ID NO: 1656999 - RNA, 19 nt, Artificial Sequence
  Description of Artificial Sequence: Synthetic oligonucleotide
ggcagacgaguuugauggu

SEQ ID NO: 1657000 - RNA, 19 nt, Artificial Sequence
  Description of Artificial Sequence: Synthetic oligonucleotide
gcgccacuguuuccaaaua

SEQ ID NO: 1657001 - RNA, 19 nt, Artificial Sequence
  Description of Artificial Sequence: Synthetic oligonucleotide
ggacagccguggagggaug

SEQ ID NO: 1657002 - RNA, 19 nt, Artificial Sequence
  Description of Artificial Sequence: Synthetic oligonucleotide
ccccaaaaguaggagggcu

SEQ ID NO: 1657003 - RNA, 19 nt, Artificial Sequence
  Description of Artificial Sequence: Synthetic oligonucleotide
cagcauccuggcuggguuu

SEQ ID NO: 1657004 - RNA, 19 nt, Artificial Sequence
  Description of Artificial Sequence: Synthetic oligonucleotide
gugucccuccuguguuggu

SEQ ID NO: 1657005 - RNA, 19 nt, Artificial Sequence
  Description of Artificial Sequence: Synthetic oligonucleotide
gccaaacagugucccuccu

SEQ ID NO: 1657006 - RNA, 19 nt, Artificial Sequence
  Description of Artificial Sequence: Synthetic oligonucleotide
cgcuaccacuggaagugga

SEQ ID NO: 1657007 - RNA, 19 nt, Artificial Sequence
  Description of Artificial Sequence: Synthetic oligonucleotide
ccgcaguacccucuccgaa

SEQ ID NO: 1657008 - RNA, 19 nt, Artificial Sequence
  Description of Artificial Sequence: Synthetic oligonucleotide
cggcgcguucugacuggcg

SEQ ID NO: 1657009 - RNA, 19 nt, Artificial Sequence
  Description of Artificial Sequence: Synthetic oligonucleotide
ccacgcuuccaccgccaga

SEQ ID NO: 1657010 - RNA, 19 nt, Artificial Sequence
  Description of Artificial Sequence: Synthetic oligonucleotide
ccgucgagcccagagggcu

SEQ ID NO: 1657011 - RNA, 19 nt, Artificial Sequence
  Description of Artificial Sequence: Synthetic oligonucleotide
gccuugggcagacgaguuu

SEQ ID NO: 1657012 - RNA, 19 nt, Artificial Sequence
  Description of Artificial Sequence: Synthetic oligonucleotide
ccggagcugaacccaggcu

SEQ ID NO: 1657013 - RNA, 19 nt, Artificial Sequence
  Description of Artificial Sequence: Synthetic oligonucleotide
cgaaugcuccugugccgga

SEQ ID NO: 1657014 - RNA, 19 nt, Artificial Sequence
  Description of Artificial Sequence: Synthetic oligonucleotide
gccugcccaaaugcugucu

SEQ ID NO: 1657015 - RNA, 19 nt, Artificial Sequence
  Description of Artificial Sequence: Synthetic oligonucleotide
cgaacacuuugccucccgu

SEQ ID NO: 1657016 - RNA, 19 nt, Artificial Sequence
  Description of Artificial Sequence: Synthetic oligonucleotide
gcacucgaggcggcuccga

SEQ ID NO: 1657017 - RNA, 19 nt, Artificial Sequence
  Description of Artificial Sequence: Synthetic oligonucleotide
caggagccugaaggaauuu

SEQ ID NO: 1657018 - RNA, 19 nt, Artificial Sequence
  Description of Artificial Sequence: Synthetic oligonucleotide
gccacuugcagggcugcuu

SEQ ID NO: 1657019 - RNA, 19 nt, Artificial Sequence
  Description of Artificial Sequence: Synthetic oligonucleotide
cccgaaggaugagcugcca

SEQ ID NO: 1657020 - RNA, 19 nt, Artificial Sequence
  Description of Artificial Sequence: Synthetic oligonucleotide
cugcgcuggcagccgcagu

SEQ ID NO: 1657021 - RNA, 19 nt, Artificial Sequence
  Description of Artificial Sequence: Synthetic oligonucleotide
ggcuggggccugcccaaau

SEQ ID NO: 1657022 - RNA, 19 nt, Artificial Sequence
  Description of Artificial Sequence: Synthetic oligonucleotide
cggcuccgaagacguucgc

SEQ ID NO: 1657023 - RNA, 19 nt, Artificial Sequence
  Description of Artificial Sequence: Synthetic oligonucleotide
cguucugacuggcgagggu

SEQ ID NO: 1657024 - RNA, 19 nt, Artificial Sequence
  Description of Artificial Sequence: Synthetic oligonucleotide
cgaagacguucgcacuggu

SEQ ID NO: 1657025 - RNA, 19 nt, Artificial Sequence
  Description of Artificial Sequence: Synthetic oligonucleotide
ccgaagccaccuguuuuau

SEQ ID NO: 1657026 - RNA, 19 nt, Artificial Sequence
  Description of Artificial Sequence: Synthetic oligonucleotide
gccucccgucgagcccaga

SEQ ID NO: 1657027 - RNA, 19 nt, Artificial Sequence
  Description of Artificial Sequence: Synthetic oligonucleotide
aucaguauaacauauacac

SEQ ID NO: 1657028 - RNA, 19 nt, Artificial Sequence
  Description of Artificial Sequence: Synthetic oligonucleotide
aaagggaacaaauugagag

SEQ ID NO: 1657029 - RNA, 19 nt, Artificial Sequence
  Description of Artificial Sequence: Synthetic oligonucleotide
aaugaauuaggcuaaaaug

SEQ ID NO: 1657030 - RNA, 19 nt, Artificial Sequence
  Description of Artificial Sequence: Synthetic oligonucleotide
aaugacauaauuccuaguc

SEQ ID NO: 1657031 - RNA, 19 nt, Artificial Sequence
  Description of Artificial Sequence: Synthetic oligonucleotide
uauaacuucauacagauaa

SEQ ID NO: 1657032 - RNA, 19 nt, Artificial Sequence
  Description of Artificial Sequence: Synthetic oligonucleotide
aacauaacuauucuacagc

SEQ ID NO: 1657033 - RNA, 19 nt, Artificial Sequence
  Description of Artificial Sequence: Synthetic oligonucleotide
aacauauacacagaagucc

SEQ ID NO: 1657034 - RNA, 19 nt, Artificial Sequence
  Description of Artificial Sequence: Synthetic oligonucleotide
aaagaucugggcuuaauac

SEQ ID NO: 1657035 - RNA, 19 nt, Artificial Sequence
  Description of Artificial Sequence: Synthetic oligonucleotide
uuaaacauaacuauucuac

SEQ ID NO: 1657036 - RNA, 19 nt, Artificial Sequence
  Description of Artificial Sequence: Synthetic oligonucleotide
uuuuagaauauccaggcag

SEQ ID NO: 1657037 - RNA, 19 nt, Artificial Sequence
  Description of Artificial Sequence: Synthetic oligonucleotide
aauacaaaugacauaauuc

SEQ ID NO: 1657038 - RNA, 19 nt, Artificial Sequence
  Description of Artificial Sequence: Synthetic oligonucleotide
uaugcuuccaaccagagga

SEQ ID NO: 1657039 - RNA, 19 nt, Artificial Sequence
  Description of Artificial Sequence: Synthetic oligonucleotide
aaaguucuacucuugauag

SEQ ID NO: 1657040 - RNA, 19 nt, Artificial Sequence
  Description of Artificial Sequence: Synthetic oligonucleotide
aaaggguaaaaggaaaucc

SEQ ID NO: 1657041 - RNA, 19 nt, Artificial Sequence
  Description of Artificial Sequence: Synthetic oligonucleotide
aaauccucucauuacaaac

SEQ ID NO: 1657042 - RNA, 19 nt, Artificial Sequence
  Description of Artificial Sequence: Synthetic oligonucleotide
auaacauauacacagaagu

SEQ ID NO: 1657043 - RNA, 19 nt, Artificial Sequence
  Description of Artificial Sequence: Synthetic oligonucleotide
augaauuaggcuaaaaugc

SEQ ID NO: 1657044 - RNA, 19 nt, Artificial Sequence
  Description of Artificial Sequence: Synthetic oligonucleotide
uaaauggauaaucugaaga

SEQ ID NO: 1657045 - RNA, 19 nt, Artificial Sequence
  Description of Artificial Sequence: Synthetic oligonucleotide
aaacauaacuauucuacag

SEQ ID NO: 1657046 - RNA, 19 nt, Artificial Sequence
  Description of Artificial Sequence: Synthetic oligonucleotide
aagggaacaaauugagagc

SEQ ID NO: 1657047 - RNA, 19 nt, Artificial Sequence
  Description of Artificial Sequence: Synthetic oligonucleotide
uuuauuguguuugagauga

SEQ ID NO: 1657048 - RNA, 19 nt, Artificial Sequence
  Description of Artificial Sequence: Synthetic oligonucleotide
aaguccguauuguaaaggc

SEQ ID NO: 1657049 - RNA, 19 nt, Artificial Sequence
  Description of Artificial Sequence: Synthetic oligonucleotide
aacaucgaaagucgcaggc

SEQ ID NO: 1657050 - RNA, 19 nt, Artificial Sequence
  Description of Artificial Sequence: Synthetic oligonucleotide
auagcauuuaccuuuuggg

SEQ ID NO: 1657051 - RNA, 19 nt, Artificial Sequence
  Description of Artificial Sequence: Synthetic oligonucleotide
aaugcacuauaauauuugg

SEQ ID NO: 1657052 - RNA, 19 nt, Artificial Sequence
  Description of Artificial Sequence: Synthetic oligonucleotide
aaauagucaaagcaggacu

SEQ ID NO: 1657053 - RNA, 19 nt, Artificial Sequence
  Description of Artificial Sequence: Synthetic oligonucleotide
acaaagguaaaacauuuuc

SEQ ID NO: 1657054 - RNA, 19 nt, Artificial Sequence
  Description of Artificial Sequence: Synthetic oligonucleotide
uuugagaugauacaucagu

SEQ ID NO: 1657055 - RNA, 19 nt, Artificial Sequence
  Description of Artificial Sequence: Synthetic oligonucleotide
uuagcagucguuuugcuag

SEQ ID NO: 1657056 - RNA, 19 nt, Artificial Sequence
  Description of Artificial Sequence: Synthetic oligonucleotide
ucucauuacaaacugacaa

SEQ ID NO: 1657057 - RNA, 19 nt, Artificial Sequence
  Description of Artificial Sequence: Synthetic oligonucleotide
gguuauuucagcuagcucc

SEQ ID NO: 1657058 - RNA, 19 nt, Artificial Sequence
  Description of Artificial Sequence: Synthetic oligonucleotide
ucuacagcuacuuuuauaa

SEQ ID NO: 1657059 - RNA, 19 nt, Artificial Sequence
  Description of Artificial Sequence: Synthetic oligonucleotide
ucauguucugcucuguugg

SEQ ID NO: 1657060 - RNA, 19 nt, Artificial Sequence
  Description of Artificial Sequence: Synthetic oligonucleotide
uguggaacaucgaaagucg

SEQ ID NO: 1657061 - RNA, 19 nt, Artificial Sequence
  Description of Artificial Sequence: Synthetic oligonucleotide
aaggaaauccucucauuac

SEQ ID NO: 1657062 - RNA, 19 nt, Artificial Sequence
  Description of Artificial Sequence: Synthetic oligonucleotide
uauaacauauacacagaag

SEQ ID NO: 1657063 - RNA, 19 nt, Artificial Sequence
  Description of Artificial Sequence: Synthetic oligonucleotide
aaauacugaguugcuaugc

SEQ ID NO: 1657064 - RNA, 19 nt, Artificial Sequence
  Description of Artificial Sequence: Synthetic oligonucleotide
guaaaggcuauaaagaucc

SEQ ID NO: 1657065 - RNA, 19 nt, Artificial Sequence
  Description of Artificial Sequence: Synthetic oligonucleotide
aaauggauaaucugaagaa

SEQ ID NO: 1657066 - RNA, 19 nt, Artificial Sequence
  Description of Artificial Sequence: Synthetic oligonucleotide
auaauuccuagucaucuac

SEQ ID NO: 1657067 - RNA, 19 nt, Artificial Sequence
  Description of Artificial Sequence: Synthetic oligonucleotide
gauagcauuuaccuuuugg

SEQ ID NO: 1657068 - RNA, 19 nt, Artificial Sequence
  Description of Artificial Sequence: Synthetic oligonucleotide
uaaucugaagaaaauguga

SEQ ID NO: 1657069 - RNA, 19 nt, Artificial Sequence
  Description of Artificial Sequence: Synthetic oligonucleotide
aaaggcuauaaagauccgc

SEQ ID NO: 1657070 - RNA, 19 nt, Artificial Sequence
  Description of Artificial Sequence: Synthetic oligonucleotide
aauuccuagucaucuacag

SEQ ID NO: 1657071 - RNA, 19 nt, Artificial Sequence
  Description of Artificial Sequence: Synthetic oligonucleotide
agaagguuuucucucuucc

SEQ ID NO: 1657072 - RNA, 19 nt, Artificial Sequence
  Description of Artificial Sequence: Synthetic oligonucleotide
uuuugauaucccaaagaag

SEQ ID NO: 1657073 - RNA, 19 nt, Artificial Sequence
  Description of Artificial Sequence: Synthetic oligonucleotide
uguuaucuccuuuagggcc

SEQ ID NO: 1657074 - RNA, 19 nt, Artificial Sequence
  Description of Artificial Sequence: Synthetic oligonucleotide
uaguggauaacuuagcagu

SEQ ID NO: 1657075 - RNA, 19 nt, Artificial Sequence
  Description of Artificial Sequence: Synthetic oligonucleotide
aagacuugcaaguaggcau

SEQ ID NO: 1657076 - RNA, 19 nt, Artificial Sequence
  Description of Artificial Sequence: Synthetic oligonucleotide
aagaaaaugugauauccaa

SEQ ID NO: 1657077 - RNA, 19 nt, Artificial Sequence
  Description of Artificial Sequence: Synthetic oligonucleotide
ugaauuaggcuaaaaugca

SEQ ID NO: 1657078 - RNA, 19 nt, Artificial Sequence
  Description of Artificial Sequence: Synthetic oligonucleotide
uacagauaaugaauuaggc

SEQ ID NO: 1657079 - RNA, 19 nt, Artificial Sequence
  Description of Artificial Sequence: Synthetic oligonucleotide
auuuugauaucccaaagaa

SEQ ID NO: 1657080 - RNA, 19 nt, Artificial Sequence
  Description of Artificial Sequence: Synthetic oligonucleotide
auuguguuugagaugauac

SEQ ID NO: 1657081 - RNA, 19 nt, Artificial Sequence
  Description of Artificial Sequence: Synthetic oligonucleotide
ugcacuauaauauuuggua

SEQ ID NO: 1657082 - RNA, 19 nt, Artificial Sequence
  Description of Artificial Sequence: Synthetic oligonucleotide
uagcauuuaccuuuugggg

SEQ ID NO: 1657083 - RNA, 19 nt, Artificial Sequence
  Description of Artificial Sequence: Synthetic oligonucleotide
acuauaauauuugguagac

SEQ ID NO: 1657084 - RNA, 19 nt, Artificial Sequence
  Description of Artificial Sequence: Synthetic oligonucleotide
ugcauacaaaucaugagaa

SEQ ID NO: 1657085 - RNA, 19 nt, Artificial Sequence
  Description of Artificial Sequence: Synthetic oligonucleotide
aaagaagcaagacuugcaa

SEQ ID NO: 1657086 - RNA, 19 nt, Artificial Sequence
  Description of Artificial Sequence: Synthetic oligonucleotide
auguuaucuccuuuagggc

SEQ ID NO: 1657087 - RNA, 19 nt, Artificial Sequence
  Description of Artificial Sequence: Synthetic oligonucleotide
aggcauuuuaaacauaacu

SEQ ID NO: 1657088 - RNA, 19 nt, Artificial Sequence
  Description of Artificial Sequence: Synthetic oligonucleotide
aguagaaucaguauaacau

SEQ ID NO: 1657089 - RNA, 19 nt, Artificial Sequence
  Description of Artificial Sequence: Synthetic oligonucleotide
acagauaaugaauuaggcu

SEQ ID NO: 1657090 - RNA, 19 nt, Artificial Sequence
  Description of Artificial Sequence: Synthetic oligonucleotide
cuccaaaggauaaaggcag

SEQ ID NO: 1657091 - RNA, 19 nt, Artificial Sequence
  Description of Artificial Sequence: Synthetic oligonucleotide
gaguguggaacaucgaaag

SEQ ID NO: 1657092 - RNA, 19 nt, Artificial Sequence
  Description of Artificial Sequence: Synthetic oligonucleotide
uauaaagauccgcagcaca

SEQ ID NO: 1657093 - RNA, 19 nt, Artificial Sequence
  Description of Artificial Sequence: Synthetic oligonucleotide
uuugccuaucacuggacgg

SEQ ID NO: 1657094 - RNA, 19 nt, Artificial Sequence
  Description of Artificial Sequence: Synthetic oligonucleotide
aaagguaaccuuugguggu

SEQ ID NO: 1657095 - RNA, 19 nt, Artificial Sequence
  Description of Artificial Sequence: Synthetic oligonucleotide
uucuuuuagcacuagugga

SEQ ID NO: 1657096 - RNA, 19 nt, Artificial Sequence
  Description of Artificial Sequence: Synthetic oligonucleotide
auacagauaaugaauuagg

SEQ ID NO: 1657097 - RNA, 19 nt, Artificial Sequence
  Description of Artificial Sequence: Synthetic oligonucleotide
aaaugcacuauaauauuug

SEQ ID NO: 1657098 - RNA, 19 nt, Artificial Sequence
  Description of Artificial Sequence: Synthetic oligonucleotide
caaaugacauaauuccuag

SEQ ID NO: 1657099 - RNA, 19 nt, Artificial Sequence
  Description of Artificial Sequence: Synthetic oligonucleotide
uguaaaggcuauaaagauc

SEQ ID NO: 1657100 - RNA, 19 nt, Artificial Sequence
  Description of Artificial Sequence: Synthetic oligonucleotide
aaagauccgcagcacagug

SEQ ID NO: 1657101 - RNA, 19 nt, Artificial Sequence
  Description of Artificial Sequence: Synthetic oligonucleotide
uuguuuauuguguuugaga

SEQ ID NO: 1657102 - RNA, 19 nt, Artificial Sequence
  Description of Artificial Sequence: Synthetic oligonucleotide
uaacauauacacagaaguc

SEQ ID NO: 1657103 - RNA, 19 nt, Artificial Sequence
  Description of Artificial Sequence: Synthetic oligonucleotide
aaguaggcauuuuaaacau

SEQ ID NO: 1657104 - RNA, 19 nt, Artificial Sequence
  Description of Artificial Sequence: Synthetic oligonucleotide
acugcauacaaaucaugag

SEQ ID NO: 1657105 - RNA, 19 nt, Artificial Sequence
  Description of Artificial Sequence: Synthetic oligonucleotide
uacaaaugacauaauuccu

SEQ ID NO: 1657106 - RNA, 19 nt, Artificial Sequence
  Description of Artificial Sequence: Synthetic oligonucleotide
uagaaucaguauaacauau

SEQ ID NO: 1657107 - RNA, 19 nt, Artificial Sequence
  Description of Artificial Sequence: Synthetic oligonucleotide
uauccuuaguacaucacaa

SEQ ID NO: 1657108 - RNA, 19 nt, Artificial Sequence
  Description of Artificial Sequence: Synthetic oligonucleotide
acagcuacaaaguucuacu

SEQ ID NO: 1657109 - RNA, 19 nt, Artificial Sequence
  Description of Artificial Sequence: Synthetic oligonucleotide
acauauacacagaaguccg

SEQ ID NO: 1657110 - RNA, 19 nt, Artificial Sequence
  Description of Artificial Sequence: Synthetic oligonucleotide
aauuaggcuaaaaugcacu

SEQ ID NO: 1657111 - RNA, 19 nt, Artificial Sequence
  Description of Artificial Sequence: Synthetic oligonucleotide
uuguaaaggcuauaaagau

SEQ ID NO: 1657112 - RNA, 19 nt, Artificial Sequence
  Description of Artificial Sequence: Synthetic oligonucleotide
uacacagaaguccguauug

SEQ ID NO: 1657113 - RNA, 19 nt, Artificial Sequence
  Description of Artificial Sequence: Synthetic oligonucleotide
acugaguugcuaugcuucc

SEQ ID NO: 1657114 - RNA, 19 nt, Artificial Sequence
  Description of Artificial Sequence: Synthetic oligonucleotide
ucuuuuagcacuaguggau

SEQ ID NO: 1657115 - RNA, 19 nt, Artificial Sequence
  Description of Artificial Sequence: Synthetic oligonucleotide
uaacuuagcagucguuuug

SEQ ID NO: 1657116 - RNA, 19 nt, Artificial Sequence
  Description of Artificial Sequence: Synthetic oligonucleotide
cuaguggauaacuuagcag

SEQ ID NO: 1657117 - RNA, 19 nt, Artificial Sequence
  Description of Artificial Sequence: Synthetic oligonucleotide
aggaucaaggguuauuuca

SEQ ID NO: 1657118 - RNA, 19 nt, Artificial Sequence
  Description of Artificial Sequence: Synthetic oligonucleotide
uccuuaguacaucacaaaa

SEQ ID NO: 1657119 - RNA, 19 nt, Artificial Sequence
  Description of Artificial Sequence: Synthetic oligonucleotide
cagucguuuugcuagaaag

SEQ ID NO: 1657120 - RNA, 19 nt, Artificial Sequence
  Description of Artificial Sequence: Synthetic oligonucleotide
uauccugucauguucugcu

SEQ ID NO: 1657121 - RNA, 19 nt, Artificial Sequence
  Description of Artificial Sequence: Synthetic oligonucleotide
uucgaaagguaaccuuugg

SEQ ID NO: 1657122 - RNA, 19 nt, Artificial Sequence
  Description of Artificial Sequence: Synthetic oligonucleotide
caaggguuauuucagcuag

SEQ ID NO: 1657123 - RNA, 19 nt, Artificial Sequence
  Description of Artificial Sequence: Synthetic oligonucleotide
aaucugaagaaaaugugau

SEQ ID NO: 1657124 - RNA, 19 nt, Artificial Sequence
  Description of Artificial Sequence: Synthetic oligonucleotide
ugacauaauuccuagucau

SEQ ID NO: 1657125 - RNA, 19 nt, Artificial Sequence
  Description of Artificial Sequence: Synthetic oligonucleotide
aaggcuauaaagauccgca

SEQ ID NO: 1657126 - RNA, 19 nt, Artificial Sequence
  Description of Artificial Sequence: Synthetic oligonucleotide
aagcaagacuugcaaguag

SEQ ID NO: 1657127 - RNA, 19 nt, Artificial Sequence
  Description of Artificial Sequence: Synthetic oligonucleotide
acuaguggauaacuuagca

SEQ ID NO: 1657128 - RNA, 19 nt, Artificial Sequence
  Description of Artificial Sequence: Synthetic oligonucleotide
aacuucauacagauaauga

SEQ ID NO: 1657129 - RNA, 19 nt, Artificial Sequence
  Description of Artificial Sequence: Synthetic oligonucleotide
acucuugauagcauuuacc

SEQ ID NO: 1657130 - RNA, 19 nt, Artificial Sequence
  Description of Artificial Sequence: Synthetic oligonucleotide
uaacuucauacagauaaug

SEQ ID NO: 1657131 - RNA, 19 nt, Artificial Sequence
  Description of Artificial Sequence: Synthetic oligonucleotide
aaucaguauaacauauaca

SEQ ID NO: 1657132 - RNA, 19 nt, Artificial Sequence
  Description of Artificial Sequence: Synthetic oligonucleotide
uguguuugagaugauacau

SEQ ID NO: 1657133 - RNA, 19 nt, Artificial Sequence
  Description of Artificial Sequence: Synthetic oligonucleotide
aauccucucauuacaaacu

SEQ ID NO: 1657134 - RNA, 19 nt, Artificial Sequence
  Description of Artificial Sequence: Synthetic oligonucleotide
augacauaauuccuaguca

SEQ ID NO: 1657135 - RNA, 19 nt, Artificial Sequence
  Description of Artificial Sequence: Synthetic oligonucleotide
uucaggaccaguauccuua

SEQ ID NO: 1657136 - RNA, 19 nt, Artificial Sequence
  Description of Artificial Sequence: Synthetic oligonucleotide
auaaucugaagaaaaugug

SEQ ID NO: 1657137 - RNA, 19 nt, Artificial Sequence
  Description of Artificial Sequence: Synthetic oligonucleotide
augagaauuauguugcgua

SEQ ID NO: 1657138 - RNA, 19 nt, Artificial Sequence
  Description of Artificial Sequence: Synthetic oligonucleotide
uacugaguugcuaugcuuc

SEQ ID NO: 1657139 - RNA, 19 nt, Artificial Sequence
  Description of Artificial Sequence: Synthetic oligonucleotide
aguucuacucuugauagca

SEQ ID NO: 1657140 - RNA, 19 nt, Artificial Sequence
  Description of Artificial Sequence: Synthetic oligonucleotide
acauaauuccuagucaucu

SEQ ID NO: 1657141 - RNA, 19 nt, Artificial Sequence
  Description of Artificial Sequence: Synthetic oligonucleotide
ucugguucgaaagguaacc

SEQ ID NO: 1657142 - RNA, 19 nt, Artificial Sequence
  Description of Artificial Sequence: Synthetic oligonucleotide
aauggauaaucugaagaaa

SEQ ID NO: 1657143 - RNA, 19 nt, Artificial Sequence
  Description of Artificial Sequence: Synthetic oligonucleotide
auagucaaagcaggacucc

SEQ ID NO: 1657144 - RNA, 19 nt, Artificial Sequence
  Description of Artificial Sequence: Synthetic oligonucleotide
caucgaaagucgcaggcgg

SEQ ID NO: 1657145 - RNA, 19 nt, Artificial Sequence
  Description of Artificial Sequence: Synthetic oligonucleotide
ucaucuacagcuacuuuua

SEQ ID NO: 1657146 - RNA, 19 nt, Artificial Sequence
  Description of Artificial Sequence: Synthetic oligonucleotide
uaauuccuagucaucuaca

SEQ ID NO: 1657147 - RNA, 19 nt, Artificial Sequence
  Description of Artificial Sequence: Synthetic oligonucleotide
aggaaauccucucauuaca

SEQ ID NO: 1657148 - RNA, 19 nt, Artificial Sequence
  Description of Artificial Sequence: Synthetic oligonucleotide
auacagaaccugguggacc

SEQ ID NO: 1657149 - RNA, 19 nt, Artificial Sequence
  Description of Artificial Sequence: Synthetic oligonucleotide
gaguagaaucaguauaaca

SEQ ID NO: 1657150 - RNA, 19 nt, Artificial Sequence
  Description of Artificial Sequence: Synthetic oligonucleotide
uggauaaucugaagaaaau

SEQ ID NO: 1657151 - RNA, 19 nt, Artificial Sequence
  Description of Artificial Sequence: Synthetic oligonucleotide
ugggcuuaauacaaaugac

SEQ ID NO: 1657152 - RNA, 19 nt, Artificial Sequence
  Description of Artificial Sequence: Synthetic oligonucleotide
gaaguccguauuguaaagg

SEQ ID NO: 1657153 - RNA, 19 nt, Artificial Sequence
  Description of Artificial Sequence: Synthetic oligonucleotide
uggauaacuuagcagucgu

SEQ ID NO: 1657154 - RNA, 19 nt, Artificial Sequence
  Description of Artificial Sequence: Synthetic oligonucleotide
uuguguuugagaugauaca

SEQ ID NO: 1657155 - RNA, 19 nt, Artificial Sequence
  Description of Artificial Sequence: Synthetic oligonucleotide
auaaagauccgcagcacag

SEQ ID NO: 1657156 - RNA, 19 nt, Artificial Sequence
  Description of Artificial Sequence: Synthetic oligonucleotide
guugcuaugcuuccaacca

SEQ ID NO: 1657157 - RNA, 19 nt, Artificial Sequence
  Description of Artificial Sequence: Synthetic oligonucleotide
ugauacaucagugcucucu

SEQ ID NO: 1657158 - RNA, 19 nt, Artificial Sequence
  Description of Artificial Sequence: Synthetic oligonucleotide
aaaaugcacuauaauauuu

SEQ ID NO: 1657159 - RNA, 19 nt, Artificial Sequence
  Description of Artificial Sequence: Synthetic oligonucleotide
uggaacaucgaaagucgca

SEQ ID NO: 1657160 - RNA, 19 nt, Artificial Sequence
  Description of Artificial Sequence: Synthetic oligonucleotide
gaacaucgaaagucgcagg

SEQ ID NO: 1657161 - RNA, 19 nt, Artificial Sequence
  Description of Artificial Sequence: Synthetic oligonucleotide
uacagaaccugguggacca

SEQ ID NO: 1657162 - RNA, 19 nt, Artificial Sequence
  Description of Artificial Sequence: Synthetic oligonucleotide
aacuauucuacagcuacaa

SEQ ID NO: 1657163 - RNA, 19 nt, Artificial Sequence
  Description of Artificial Sequence: Synthetic oligonucleotide
aggauaaaggcagagagua

SEQ ID NO: 1657164 - RNA, 19 nt, Artificial Sequence
  Description of Artificial Sequence: Synthetic oligonucleotide
uugccuaucacuggacggg

SEQ ID NO: 1657165 - RNA, 19 nt, Artificial Sequence
  Description of Artificial Sequence: Synthetic oligonucleotide
ugucaaaagggaacaaauu

SEQ ID NO: 1657166 - RNA, 19 nt, Artificial Sequence
  Description of Artificial Sequence: Synthetic oligonucleotide
gcuaaaaugcacuauaaua

SEQ ID NO: 1657167 - RNA, 19 nt, Artificial Sequence
  Description of Artificial Sequence: Synthetic oligonucleotide
ucucugagcuacaaagggu

SEQ ID NO: 1657168 - RNA, 19 nt, Artificial Sequence
  Description of Artificial Sequence: Synthetic oligonucleotide
auauccaggcagaugacuc

SEQ ID NO: 1657169 - RNA, 19 nt, Artificial Sequence
  Description of Artificial Sequence: Synthetic oligonucleotide
auuucagcuagcuccuucu

SEQ ID NO: 1657170 - RNA, 19 nt, Artificial Sequence
  Description of Artificial Sequence: Synthetic oligonucleotide
agaaguccguauuguaaag

SEQ ID NO: 1657171 - RNA, 19 nt, Artificial Sequence
  Description of Artificial Sequence: Synthetic oligonucleotide
aauauuugguagacuucag

SEQ ID NO: 1657172 - RNA, 19 nt, Artificial Sequence
  Description of Artificial Sequence: Synthetic oligonucleotide
guaaaaggaaauccucuca

SEQ ID NO: 1657173 - RNA, 19 nt, Artificial Sequence
  Description of Artificial Sequence: Synthetic oligonucleotide
uaaaggcuauaaagauccg

SEQ ID NO: 1657174 - RNA, 19 nt, Artificial Sequence
  Description of Artificial Sequence: Synthetic oligonucleotide
agcaagacuugcaaguagg

SEQ ID NO: 1657175 - RNA, 19 nt, Artificial Sequence
  Description of Artificial Sequence: Synthetic oligonucleotide
gauagauucugguucgaaa

SEQ ID NO: 1657176 - RNA, 19 nt, Artificial Sequence
  Description of Artificial Sequence: Synthetic oligonucleotide
agggaacaaauugagagca

SEQ ID NO: 1657177 - RNA, 19 nt, Artificial Sequence
  Description of Artificial Sequence: Synthetic oligonucleotide
ugguggaccaaguauaguu

SEQ ID NO: 1657178 - RNA, 19 nt, Artificial Sequence
  Description of Artificial Sequence: Synthetic oligonucleotide
cugcauacaaaucaugaga

SEQ ID NO: 1657179 - RNA, 19 nt, Artificial Sequence
  Description of Artificial Sequence: Synthetic oligonucleotide
cagucugucaaaagggaac

SEQ ID NO: 1657180 - RNA, 19 nt, Artificial Sequence
  Description of Artificial Sequence: Synthetic oligonucleotide
uuuugcuagaaaguuuggu

SEQ ID NO: 1657181 - RNA, 19 nt, Artificial Sequence
  Description of Artificial Sequence: Synthetic oligonucleotide
ugcaaguaggcauuuuaaa

SEQ ID NO: 1657182 - RNA, 19 nt, Artificial Sequence
  Description of Artificial Sequence: Synthetic oligonucleotide
accaaguauaguugaccuc

SEQ ID NO: 1657183 - RNA, 19 nt, Artificial Sequence
  Description of Artificial Sequence: Synthetic oligonucleotide
ucuacucuugauagcauuu

SEQ ID NO: 1657184 - RNA, 19 nt, Artificial Sequence
  Description of Artificial Sequence: Synthetic oligonucleotide
agcuuguuuauuguguuug

SEQ ID NO: 1657185 - RNA, 19 nt, Artificial Sequence
  Description of Artificial Sequence: Synthetic oligonucleotide
uacucuugauagcauuuac

SEQ ID NO: 1657186 - RNA, 19 nt, Artificial Sequence
  Description of Artificial Sequence: Synthetic oligonucleotide
uuagcacuaguggauaacu

SEQ ID NO: 1657187 - RNA, 19 nt, Artificial Sequence
  Description of Artificial Sequence: Synthetic oligonucleotide
guauccuuaguacaucaca

SEQ ID NO: 1657188 - RNA, 19 nt, Artificial Sequence
  Description of Artificial Sequence: Synthetic oligonucleotide
gcacuauaauauuugguag

SEQ ID NO: 1657189 - RNA, 19 nt, Artificial Sequence
  Description of Artificial Sequence: Synthetic oligonucleotide
ugagaauuauguugcguau

SEQ ID NO: 1657190 - RNA, 19 nt, Artificial Sequence
  Description of Artificial Sequence: Synthetic oligonucleotide
uaacuauucuacagcuaca

SEQ ID NO: 1657191 - RNA, 19 nt, Artificial Sequence
  Description of Artificial Sequence: Synthetic oligonucleotide
gcaaguaggcauuuuaaac

SEQ ID NO: 1657192 - RNA, 19 nt, Artificial Sequence
  Description of Artificial Sequence: Synthetic oligonucleotide
auccucucauuacaaacug

SEQ ID NO: 1657193 - RNA, 19 nt, Artificial Sequence
  Description of Artificial Sequence: Synthetic oligonucleotide
uugcuaugcuuccaaccag

SEQ ID NO: 1657194 - RNA, 19 nt, Artificial Sequence
  Description of Artificial Sequence: Synthetic oligonucleotide
agaguagaaucaguauaac

SEQ ID NO: 1657195 - RNA, 19 nt, Artificial Sequence
  Description of Artificial Sequence: Synthetic oligonucleotide
cacuauaauauuugguaga

SEQ ID NO: 1657196 - RNA, 19 nt, Artificial Sequence
  Description of Artificial Sequence: Synthetic oligonucleotide
cauuuugauaucccaaaga

SEQ ID NO: 1657197 - RNA, 19 nt, Artificial Sequence
  Description of Artificial Sequence: Synthetic oligonucleotide
gaauuaggcuaaaaugcac

SEQ ID NO: 1657198 - RNA, 19 nt, Artificial Sequence
  Description of Artificial Sequence: Synthetic oligonucleotide
uacagcuacaaaguucuac

SEQ ID NO: 1657199 - RNA, 19 nt, Artificial Sequence
  Description of Artificial Sequence: Synthetic oligonucleotide
aggguaaaaggaaauccuc

SEQ ID NO: 1657200 - RNA, 19 nt, Artificial Sequence
  Description of Artificial Sequence: Synthetic oligonucleotide
uugcagugauagauucugg

SEQ ID NO: 1657201 - RNA, 19 nt, Artificial Sequence
  Description of Artificial Sequence: Synthetic oligonucleotide
ugagagcaaaaccuuugaa

SEQ ID NO: 1657202 - RNA, 19 nt, Artificial Sequence
  Description of Artificial Sequence: Synthetic oligonucleotide
agaggauccgcaggguugc

SEQ ID NO: 1657203 - RNA, 19 nt, Artificial Sequence
  Description of Artificial Sequence: Synthetic oligonucleotide
cuggucagcaucugaacug

SEQ ID NO: 1657204 - RNA, 19 nt, Artificial Sequence
  Description of Artificial Sequence: Synthetic oligonucleotide
aggaccaguauccuuagua

SEQ ID NO: 1657205 - RNA, 19 nt, Artificial Sequence
  Description of Artificial Sequence: Synthetic oligonucleotide
agaugauacaucagugcuc

SEQ ID NO: 1657206 - RNA, 19 nt, Artificial Sequence
  Description of Artificial Sequence: Synthetic oligonucleotide
gcuacaaaggguaaaagga

SEQ ID NO: 1657207 - RNA, 19 nt, Artificial Sequence
  Description of Artificial Sequence: Synthetic oligonucleotide
ccaaguauaguugaccucc

SEQ ID NO: 1657208 - RNA, 19 nt, Artificial Sequence
  Description of Artificial Sequence: Synthetic oligonucleotide
ugagcuacaaaggguaaaa

SEQ ID NO: 1657209 - RNA, 19 nt, Artificial Sequence
  Description of Artificial Sequence: Synthetic oligonucleotide
cacugcauacaaaucauga

SEQ ID NO: 1657210 - RNA, 19 nt, Artificial Sequence
  Description of Artificial Sequence: Synthetic oligonucleotide
aggcuauaaagauccgcag

SEQ ID NO: 1657211 - RNA, 19 nt, Artificial Sequence
  Description of Artificial Sequence: Synthetic oligonucleotide
uucacacugcauacaaauc

SEQ ID NO: 1657212 - RNA, 19 nt, Artificial Sequence
  Description of Artificial Sequence: Synthetic oligonucleotide
guagaaucaguauaacaua

SEQ ID NO: 1657213 - RNA, 19 nt, Artificial Sequence
  Description of Artificial Sequence: Synthetic oligonucleotide
agcacuaguggauaacuua

SEQ ID NO: 1657214 - RNA, 19 nt, Artificial Sequence
  Description of Artificial Sequence: Synthetic oligonucleotide
uucugguucgaaagguaac

SEQ ID NO: 1657215 - RNA, 19 nt, Artificial Sequence
  Description of Artificial Sequence: Synthetic oligonucleotide
auuaggcuaaaaugcacua

SEQ ID NO: 1657216 - RNA, 19 nt, Artificial Sequence
  Description of Artificial Sequence: Synthetic oligonucleotide
ggauaaucugaagaaaaug

SEQ ID NO: 1657217 - RNA, 19 nt, Artificial Sequence
  Description of Artificial Sequence: Synthetic oligonucleotide
auggauaaucugaagaaaa

SEQ ID NO: 1657218 - RNA, 19 nt, Artificial Sequence
  Description of Artificial Sequence: Synthetic oligonucleotide
cuaugcuuccaaccagagg

SEQ ID NO: 1657219 - RNA, 19 nt, Artificial Sequence
  Description of Artificial Sequence: Synthetic oligonucleotide
aguggauaacuuagcaguc

SEQ ID NO: 1657220 - RNA, 19 nt, Artificial Sequence
  Description of Artificial Sequence: Synthetic oligonucleotide
cucuugauagcauuuaccu

SEQ ID NO: 1657221 - RNA, 19 nt, Artificial Sequence
  Description of Artificial Sequence: Synthetic oligonucleotide
guguggaacaucgaaaguc

SEQ ID NO: 1657222 - RNA, 19 nt, Artificial Sequence
  Description of Artificial Sequence: Synthetic oligonucleotide
ggaacaucgaaagucgcag

SEQ ID NO: 1657223 - RNA, 19 nt, Artificial Sequence
  Description of Artificial Sequence: Synthetic oligonucleotide
gucauguucugcucuguug

SEQ ID NO: 1657224 - RNA, 19 nt, Artificial Sequence
  Description of Artificial Sequence: Synthetic oligonucleotide
acaucgaaagucgcaggcg

SEQ ID NO: 1657225 - RNA, 19 nt, Artificial Sequence
  Description of Artificial Sequence: Synthetic oligonucleotide
acaaaugacauaauuccua

SEQ ID NO: 1657226 - RNA, 19 nt, Artificial Sequence
  Description of Artificial Sequence: Synthetic oligonucleotide
ucuugauagcauuuaccuu

SEQ ID NO: 1657227 - RNA, 19 nt, Artificial Sequence
  Description of Artificial Sequence: Synthetic oligonucleotide
aguauccuuaguacaucac

SEQ ID NO: 1657228 - RNA, 19 nt, Artificial Sequence
  Description of Artificial Sequence: Synthetic oligonucleotide
cacuaguggauaacuuagc

SEQ ID NO: 1657229 - RNA, 19 nt, Artificial Sequence
  Description of Artificial Sequence: Synthetic oligonucleotide
ggcuauaaagauccgcagc

SEQ ID NO: 1657230 - RNA, 19 nt, Artificial Sequence
  Description of Artificial Sequence: Synthetic oligonucleotide
cuacaaaguucuacucuug

SEQ ID NO: 1657231 - RNA, 19 nt, Artificial Sequence
  Description of Artificial Sequence: Synthetic oligonucleotide
aauugagagcaaaaccuuu

SEQ ID NO: 1657232 - RNA, 19 nt, Artificial Sequence
  Description of Artificial Sequence: Synthetic oligonucleotide
uccugucauguucugcucu

SEQ ID NO: 1657233 - RNA, 19 nt, Artificial Sequence
  Description of Artificial Sequence: Synthetic oligonucleotide
cucauuacaaacugacaaa

SEQ ID NO: 1657234 - RNA, 19 nt, Artificial Sequence
  Description of Artificial Sequence: Synthetic oligonucleotide
agucuccaaaggauaaagg

SEQ ID NO: 1657235 - RNA, 19 nt, Artificial Sequence
  Description of Artificial Sequence: Synthetic oligonucleotide
aguauaacauauacacaga

SEQ ID NO: 1657236 - RNA, 19 nt, Artificial Sequence
  Description of Artificial Sequence: Synthetic oligonucleotide
uccaaaggauaaaggcaga

SEQ ID NO: 1657237 - RNA, 19 nt, Artificial Sequence
  Description of Artificial Sequence: Synthetic oligonucleotide
uccucucauuacaaacuga

SEQ ID NO: 1657238 - RNA, 19 nt, Artificial Sequence
  Description of Artificial Sequence: Synthetic oligonucleotide
ggcauuuuaaacauaacua

SEQ ID NO: 1657239 - RNA, 19 nt, Artificial Sequence
  Description of Artificial Sequence: Synthetic oligonucleotide
caaccagaggauccgcagg

SEQ ID NO: 1657240 - RNA, 19 nt, Artificial Sequence
  Description of Artificial Sequence: Synthetic oligonucleotide
uuucagcuagcuccuucug

SEQ ID NO: 1657241 - RNA, 19 nt, Artificial Sequence
  Description of Artificial Sequence: Synthetic oligonucleotide
agauaaugaauuaggcuaa

SEQ ID NO: 1657242 - RNA, 19 nt, Artificial Sequence
  Description of Artificial Sequence: Synthetic oligonucleotide
gaaauccucucauuacaaa

SEQ ID NO: 1657243 - RNA, 19 nt, Artificial Sequence
  Description of Artificial Sequence: Synthetic oligonucleotide
uccguauuguaaaggcuau

SEQ ID NO: 1657244 - RNA, 19 nt, Artificial Sequence
  Description of Artificial Sequence: Synthetic oligonucleotide
agucugucaaaagggaaca

SEQ ID NO: 1657245 - RNA, 19 nt, Artificial Sequence
  Description of Artificial Sequence: Synthetic oligonucleotide
uggaccaaguauaguugac

SEQ ID NO: 1657246 - RNA, 19 nt, Artificial Sequence
  Description of Artificial Sequence: Synthetic oligonucleotide
aguguggaacaucgaaagu

SEQ ID NO: 1657247 - RNA, 19 nt, Artificial Sequence
  Description of Artificial Sequence: Synthetic oligonucleotide
cagcaugaaccacauacuc

SEQ ID NO: 1657248 - RNA, 19 nt, Artificial Sequence
  Description of Artificial Sequence: Synthetic oligonucleotide
cgaaagguaaccuuuggug

SEQ ID NO: 1657249 - RNA, 19 nt, Artificial Sequence
  Description of Artificial Sequence: Synthetic oligonucleotide
ccucucauuacaaacugac

SEQ ID NO: 1657250 - RNA, 19 nt, Artificial Sequence
  Description of Artificial Sequence: Synthetic oligonucleotide
cuuccaaccagaggauccg

SEQ ID NO: 1657251 - RNA, 19 nt, Artificial Sequence
  Description of Artificial Sequence: Synthetic oligonucleotide
ucguuuugcuagaaaguuu

SEQ ID NO: 1657252 - RNA, 19 nt, Artificial Sequence
  Description of Artificial Sequence: Synthetic oligonucleotide
cagucuccaaaggauaaag

SEQ ID NO: 1657253 - RNA, 19 nt, Artificial Sequence
  Description of Artificial Sequence: Synthetic oligonucleotide
ugcuagaaaguuugguguu

SEQ ID NO: 1657254 - RNA, 19 nt, Artificial Sequence
  Description of Artificial Sequence: Synthetic oligonucleotide
ggaucaaggguuauuucag

SEQ ID NO: 1657255 - RNA, 19 nt, Artificial Sequence
  Description of Artificial Sequence: Synthetic oligonucleotide
uggcagaagguuuucucuc

SEQ ID NO: 1657256 - RNA, 19 nt, Artificial Sequence
  Description of Artificial Sequence: Synthetic oligonucleotide
auacauuuugauaucccaa

SEQ ID NO: 1657257 - RNA, 19 nt, Artificial Sequence
  Description of Artificial Sequence: Synthetic oligonucleotide
aucugaagaaaaugugaua

SEQ ID NO: 1657258 - RNA, 19 nt, Artificial Sequence
  Description of Artificial Sequence: Synthetic oligonucleotide
cagaggauccgcaggguug

SEQ ID NO: 1657259 - RNA, 19 nt, Artificial Sequence
  Description of Artificial Sequence: Synthetic oligonucleotide
ucagugcucucugagcuac

SEQ ID NO: 1657260 - RNA, 19 nt, Artificial Sequence
  Description of Artificial Sequence: Synthetic oligonucleotide
cguuuugcuagaaaguuug

SEQ ID NO: 1657261 - RNA, 19 nt, Artificial Sequence
  Description of Artificial Sequence: Synthetic oligonucleotide
augacucccugacuguuga

SEQ ID NO: 1657262 - RNA, 19 nt, Artificial Sequence
  Description of Artificial Sequence: Synthetic oligonucleotide
aaguauaguugaccuccau

SEQ ID NO: 1657263 - RNA, 19 nt, Artificial Sequence
  Description of Artificial Sequence: Synthetic oligonucleotide
ucccugacuguugauguug

SEQ ID NO: 1657264 - RNA, 19 nt, Artificial Sequence
  Description of Artificial Sequence: Synthetic oligonucleotide
ucugagcuacaaaggguaa

SEQ ID NO: 1657265 - RNA, 19 nt, Artificial Sequence
  Description of Artificial Sequence: Synthetic oligonucleotide
uaaagauccgcagcacagu

SEQ ID NO: 1657266 - RNA, 19 nt, Artificial Sequence
  Description of Artificial Sequence: Synthetic oligonucleotide
agaucugggcuuaauacaa

SEQ ID NO: 1657267 - RNA, 19 nt, Artificial Sequence
  Description of Artificial Sequence: Synthetic oligonucleotide
agcuacuuuuauaacuuca

SEQ ID NO: 1657268 - RNA, 19 nt, Artificial Sequence
  Description of Artificial Sequence: Synthetic oligonucleotide
guuuugcuagaaaguuugg

SEQ ID NO: 1657269 - RNA, 19 nt, Artificial Sequence
  Description of Artificial Sequence: Synthetic oligonucleotide
ucgcuggucagcaucugaa

SEQ ID NO: 1657270 - RNA, 19 nt, Artificial Sequence
  Description of Artificial Sequence: Synthetic oligonucleotide
ucgaaagucgcaggcggcc

SEQ ID NO: 1657271 - RNA, 19 nt, Artificial Sequence
  Description of Artificial Sequence: Synthetic oligonucleotide
gaacaaauugagagcaaaa

SEQ ID NO: 1657272 - RNA, 19 nt, Artificial Sequence
  Description of Artificial Sequence: Synthetic oligonucleotide
aggguuauuucagcuagcu

SEQ ID NO: 1657273 - RNA, 19 nt, Artificial Sequence
  Description of Artificial Sequence: Synthetic oligonucleotide
gacucccugacuguugaug

SEQ ID NO: 1657274 - RNA, 19 nt, Artificial Sequence
  Description of Artificial Sequence: Synthetic oligonucleotide
cagaaguccguauuguaaa

SEQ ID NO: 1657275 - RNA, 19 nt, Artificial Sequence
  Description of Artificial Sequence: Synthetic oligonucleotide
caggagcuuguuuauugug

SEQ ID NO: 1657276 - RNA, 19 nt, Artificial Sequence
  Description of Artificial Sequence: Synthetic oligonucleotide
gacauaauuccuagucauc

SEQ ID NO: 1657277 - RNA, 19 nt, Artificial Sequence
  Description of Artificial Sequence: Synthetic oligonucleotide
aucgaaagucgcaggcggc

SEQ ID NO: 1657278 - RNA, 19 nt, Artificial Sequence
  Description of Artificial Sequence: Synthetic oligonucleotide
cucugagcuacaaagggua

SEQ ID NO: 1657279 - RNA, 19 nt, Artificial Sequence
  Description of Artificial Sequence: Synthetic oligonucleotide
aucuacagcuacuuuuaua

SEQ ID NO: 1657280 - RNA, 19 nt, Artificial Sequence
  Description of Artificial Sequence: Synthetic oligonucleotide
cuauaaagauccgcagcac

SEQ ID NO: 1657281 - RNA, 19 nt, Artificial Sequence
  Description of Artificial Sequence: Synthetic oligonucleotide
gauaacuuagcagucguuu

SEQ ID NO: 1657282 - RNA, 19 nt, Artificial Sequence
  Description of Artificial Sequence: Synthetic oligonucleotide
auccugucauguucugcuc

SEQ ID NO: 1657283 - RNA, 19 nt, Artificial Sequence
  Description of Artificial Sequence: Synthetic oligonucleotide
guucgaaagguaaccuuug

SEQ ID NO: 1657284 - RNA, 19 nt, Artificial Sequence
  Description of Artificial Sequence: Synthetic oligonucleotide
ugccuaucacuggacgggg

SEQ ID NO: 1657285 - RNA, 19 nt, Artificial Sequence
  Description of Artificial Sequence: Synthetic oligonucleotide
aggagcuuguuuauugugu

SEQ ID NO: 1657286 - RNA, 19 nt, Artificial Sequence
  Description of Artificial Sequence: Synthetic oligonucleotide
gaugacucccugacuguug

SEQ ID NO: 1657287 - RNA, 19 nt, Artificial Sequence
  Description of Artificial Sequence: Synthetic oligonucleotide
ugauagcauuuaccuuuug

SEQ ID NO: 1657288 - RNA, 19 nt, Artificial Sequence
  Description of Artificial Sequence: Synthetic oligonucleotide
ucccagucuccaaaggaua

SEQ ID NO: 1657289 - RNA, 19 nt, Artificial Sequence
  Description of Artificial Sequence: Synthetic oligonucleotide
cauacaaaucaugagaauu

SEQ ID NO: 1657290 - RNA, 19 nt, Artificial Sequence
  Description of Artificial Sequence: Synthetic oligonucleotide
agucaaagcaggacuccag

SEQ ID NO: 1657291 - RNA, 19 nt, Artificial Sequence
  Description of Artificial Sequence: Synthetic oligonucleotide
ugguucgaaagguaaccuu

SEQ ID NO: 1657292 - RNA, 19 nt, Artificial Sequence
  Description of Artificial Sequence: Synthetic oligonucleotide
caguauccuuaguacauca

SEQ ID NO: 1657293 - RNA, 19 nt, Artificial Sequence
  Description of Artificial Sequence: Synthetic oligonucleotide
uaaaggcagagaguagaau

SEQ ID NO: 1657294 - RNA, 19 nt, Artificial Sequence
  Description of Artificial Sequence: Synthetic oligonucleotide
cuauccugucauguucugc

SEQ ID NO: 1657295 - RNA, 19 nt, Artificial Sequence
  Description of Artificial Sequence: Synthetic oligonucleotide
cucucauuacaaacugaca

SEQ ID NO: 1657296 - RNA, 19 nt, Artificial Sequence
  Description of Artificial Sequence: Synthetic oligonucleotide
uccgcagcacagugggaag

SEQ ID NO: 1657297 - RNA, 19 nt, Artificial Sequence
  Description of Artificial Sequence: Synthetic oligonucleotide
ugucauguucugcucuguu

SEQ ID NO: 1657298 - RNA, 19 nt, Artificial Sequence
  Description of Artificial Sequence: Synthetic oligonucleotide
gaguugcuaugcuuccaac

SEQ ID NO: 1657299 - RNA, 19 nt, Artificial Sequence
  Description of Artificial Sequence: Synthetic oligonucleotide
ggaccaaguauaguugacc

SEQ ID NO: 1657300 - RNA, 19 nt, Artificial Sequence
  Description of Artificial Sequence: Synthetic oligonucleotide
caaaggauaaaggcagaga

SEQ ID NO: 1657301 - RNA, 19 nt, Artificial Sequence
  Description of Artificial Sequence: Synthetic oligonucleotide
guguuugagaugauacauc

SEQ ID NO: 1657302 - RNA, 19 nt, Artificial Sequence
  Description of Artificial Sequence: Synthetic oligonucleotide
uccuagucaucuacagcua

SEQ ID NO: 1657303 - RNA, 19 nt, Artificial Sequence
  Description of Artificial Sequence: Synthetic oligonucleotide
caggcggccgugcagugcc

SEQ ID NO: 1657304 - RNA, 19 nt, Artificial Sequence
  Description of Artificial Sequence: Synthetic oligonucleotide
gguggaccaaguauaguug

SEQ ID NO: 1657305 - RNA, 19 nt, Artificial Sequence
  Description of Artificial Sequence: Synthetic oligonucleotide
auaacuucauacagauaau

SEQ ID NO: 1657306 - RNA, 19 nt, Artificial Sequence
  Description of Artificial Sequence: Synthetic oligonucleotide
aagucgcaggcggccgugc

SEQ ID NO: 1657307 - RNA, 19 nt, Artificial Sequence
  Description of Artificial Sequence: Synthetic oligonucleotide
auaucccaaagaagcaaga

SEQ ID NO: 1657308 - RNA, 19 nt, Artificial Sequence
  Description of Artificial Sequence: Synthetic oligonucleotide
gaagcaagacuugcaagua

SEQ ID NO: 1657309 - RNA, 19 nt, Artificial Sequence
  Description of Artificial Sequence: Synthetic oligonucleotide
guccguauuguaaaggcua

SEQ ID NO: 1657310 - RNA, 19 nt, Artificial Sequence
  Description of Artificial Sequence: Synthetic oligonucleotide
aguccguauuguaaaggcu

SEQ ID NO: 1657311 - RNA, 19 nt, Artificial Sequence
  Description of Artificial Sequence: Synthetic oligonucleotide
aucugaacugccacugcug

SEQ ID NO: 1657312 - RNA, 19 nt, Artificial Sequence
  Description of Artificial Sequence: Synthetic oligonucleotide
ucucaucauccgaccuuug

SEQ ID NO: 1657313 - RNA, 19 nt, Artificial Sequence
  Description of Artificial Sequence: Synthetic oligonucleotide
cauaacuauucuacagcua

SEQ ID NO: 1657314 - RNA, 19 nt, Artificial Sequence
  Description of Artificial Sequence: Synthetic oligonucleotide
aaagucgcaggcggccgug

SEQ ID NO: 1657315 - RNA, 19 nt, Artificial Sequence
  Description of Artificial Sequence: Synthetic oligonucleotide
uguugauguugcagugaua

SEQ ID NO: 1657316 - RNA, 19 nt, Artificial Sequence
  Description of Artificial Sequence: Synthetic oligonucleotide
uuaucuccuuuagggccag

SEQ ID NO: 1657317 - RNA, 19 nt, Artificial Sequence
  Description of Artificial Sequence: Synthetic oligonucleotide
caagacuugcaaguaggca

SEQ ID NO: 1657318 - RNA, 19 nt, Artificial Sequence
  Description of Artificial Sequence: Synthetic oligonucleotide
agaaucaguauaacauaua

SEQ ID NO: 1657319 - RNA, 19 nt, Artificial Sequence
  Description of Artificial Sequence: Synthetic oligonucleotide
cgaccuuugccuaucacug

SEQ ID NO: 1657320 - RNA, 19 nt, Artificial Sequence
  Description of Artificial Sequence: Synthetic oligonucleotide
ucauccgaccuuugccuau

SEQ ID NO: 1657321 - RNA, 19 nt, Artificial Sequence
  Description of Artificial Sequence: Synthetic oligonucleotide
caucauccgaccuuugccu

SEQ ID NO: 1657322 - RNA, 19 nt, Artificial Sequence
  Description of Artificial Sequence: Synthetic oligonucleotide
gauccgcaggguugcaguc

SEQ ID NO: 1657323 - RNA, 19 nt, Artificial Sequence
  Description of Artificial Sequence: Synthetic oligonucleotide
gauucugguucgaaaggua

SEQ ID NO: 1657324 - RNA, 19 nt, Artificial Sequence
  Description of Artificial Sequence: Synthetic oligonucleotide
auccgcagcacagugggaa

SEQ ID NO: 1657325 - RNA, 19 nt, Artificial Sequence
  Description of Artificial Sequence: Synthetic oligonucleotide
uagcagucguuuugcuaga

SEQ ID NO: 1657326 - RNA, 19 nt, Artificial Sequence
  Description of Artificial Sequence: Synthetic oligonucleotide
uuauuguguuugagaugau

SEQ ID NO: 1657327 - RNA, 19 nt, Artificial Sequence
  Description of Artificial Sequence: Synthetic oligonucleotide
uccgaccuuugccuaucac

SEQ ID NO: 1657328 - RNA, 19 nt, Artificial Sequence
  Description of Artificial Sequence: Synthetic oligonucleotide
guggaacaucgaaagucgc

SEQ ID NO: 1657329 - RNA, 19 nt, Artificial Sequence
  Description of Artificial Sequence: Synthetic oligonucleotide
caaguauaguugaccucca

SEQ ID NO: 1657330 - RNA, 19 nt, Artificial Sequence
  Description of Artificial Sequence: Synthetic oligonucleotide
agugccgcgcugcggccgg

SEQ ID NO: 1657331 - RNA, 19 nt, Artificial Sequence
  Description of Artificial Sequence: Synthetic oligonucleotide
gggaguguggaacaucgaa

SEQ ID NO: 1657332 - RNA, 19 nt, Artificial Sequence
  Description of Artificial Sequence: Synthetic oligonucleotide
ccugguggaccaaguauag

SEQ ID NO: 1657333 - RNA, 19 nt, Artificial Sequence
  Description of Artificial Sequence: Synthetic oligonucleotide
gcuuaauacaaaugacaua

SEQ ID NO: 1657334 - RNA, 19 nt, Artificial Sequence
  Description of Artificial Sequence: Synthetic oligonucleotide
ccaaaggauaaaggcagag

SEQ ID NO: 1657335 - RNA, 19 nt, Artificial Sequence
  Description of Artificial Sequence: Synthetic oligonucleotide
gaaccugguggaccaagua

SEQ ID NO: 1657336 - RNA, 19 nt, Artificial Sequence
  Description of Artificial Sequence: Synthetic oligonucleotide
ccuagucaucuacagcuac

SEQ ID NO: 1657337 - RNA, 19 nt, Artificial Sequence
  Description of Artificial Sequence: Synthetic oligonucleotide
accugguggaccaaguaua

SEQ ID NO: 1657338 - RNA, 19 nt, Artificial Sequence
  Description of Artificial Sequence: Synthetic oligonucleotide
cagaaccugguggaccaag

SEQ ID NO: 1657339 - RNA, 19 nt, Artificial Sequence
  Description of Artificial Sequence: Synthetic oligonucleotide
cuagucaucuacagcuacu

SEQ ID NO: 1657340 - RNA, 19 nt, Artificial Sequence
  Description of Artificial Sequence: Synthetic oligonucleotide
gacucucaucauccgaccu

SEQ ID NO: 1657341 - RNA, 19 nt, Artificial Sequence
  Description of Artificial Sequence: Synthetic oligonucleotide
agacuugcaaguaggcauu

SEQ ID NO: 1657342 - RNA, 19 nt, Artificial Sequence
  Description of Artificial Sequence: Synthetic oligonucleotide
gcaagacuugcaaguaggc

SEQ ID NO: 1657343 - RNA, 19 nt, Artificial Sequence
  Description of Artificial Sequence: Synthetic oligonucleotide
acaaacugacaaagguaaa

SEQ ID NO: 1657344 - RNA, 19 nt, Artificial Sequence
  Description of Artificial Sequence: Synthetic oligonucleotide
gcagagaguagaaucagua

SEQ ID NO: 1657345 - RNA, 19 nt, Artificial Sequence
  Description of Artificial Sequence: Synthetic oligonucleotide
gucguuuugcuagaaaguu

SEQ ID NO: 1657346 - RNA, 19 nt, Artificial Sequence
  Description of Artificial Sequence: Synthetic oligonucleotide
agugcucucugagcuacaa

SEQ ID NO: 1657347 - RNA, 19 nt, Artificial Sequence
  Description of Artificial Sequence: Synthetic oligonucleotide
cacacugcauacaaaucau

SEQ ID NO: 1657348 - RNA, 19 nt, Artificial Sequence
  Description of Artificial Sequence: Synthetic oligonucleotide
ggucucgcuggucagcauc

SEQ ID NO: 1657349 - RNA, 19 nt, Artificial Sequence
  Description of Artificial Sequence: Synthetic oligonucleotide
gucgcaggcggccgugcag

SEQ ID NO: 1657350 - RNA, 19 nt, Artificial Sequence
  Description of Artificial Sequence: Synthetic oligonucleotide
ggaguguggaacaucgaaa

SEQ ID NO: 1657351 - RNA, 19 nt, Artificial Sequence
  Description of Artificial Sequence: Synthetic oligonucleotide
aggauccgcaggguugcag

SEQ ID NO: 1657352 - RNA, 19 nt, Artificial Sequence
  Description of Artificial Sequence: Synthetic oligonucleotide
gcuaugcuuccaaccagag

SEQ ID NO: 1657353 - RNA, 19 nt, Artificial Sequence
  Description of Artificial Sequence: Synthetic oligonucleotide
cagagaguagaaucaguau

SEQ ID NO: 1657354 - RNA, 19 nt, Artificial Sequence
  Description of Artificial Sequence: Synthetic oligonucleotide
agaugacucccugacuguu

SEQ ID NO: 1657355 - RNA, 19 nt, Artificial Sequence
  Description of Artificial Sequence: Synthetic oligonucleotide
gaucugggcuuaauacaaa

SEQ ID NO: 1657356 - RNA, 19 nt, Artificial Sequence
  Description of Artificial Sequence: Synthetic oligonucleotide
caugagaauuauguugcgu

SEQ ID NO: 1657357 - RNA, 19 nt, Artificial Sequence
  Description of Artificial Sequence: Synthetic oligonucleotide
ggguuauuucagcuagcuc

SEQ ID NO: 1657358 - RNA, 19 nt, Artificial Sequence
  Description of Artificial Sequence: Synthetic oligonucleotide
agccacgguggggugggcg

SEQ ID NO: 1657359 - RNA, 19 nt, Artificial Sequence
  Description of Artificial Sequence: Synthetic oligonucleotide
cuauaauauuugguagacu

SEQ ID NO: 1657360 - RNA, 19 nt, Artificial Sequence
  Description of Artificial Sequence: Synthetic oligonucleotide
cuacucuugauagcauuua

SEQ ID NO: 1657361 - RNA, 19 nt, Artificial Sequence
  Description of Artificial Sequence: Synthetic oligonucleotide
aguaggcauuuuaaacaua

SEQ ID NO: 1657362 - RNA, 19 nt, Artificial Sequence
  Description of Artificial Sequence: Synthetic oligonucleotide
gaaagucgcaggcggccgu

SEQ ID NO: 1657363 - RNA, 19 nt, Artificial Sequence
  Description of Artificial Sequence: Synthetic oligonucleotide
agucgcaggcggccgugca

SEQ ID NO: 1657364 - RNA, 19 nt, Artificial Sequence
  Description of Artificial Sequence: Synthetic oligonucleotide
aggaggaucaaggguuauu

SEQ ID NO: 1657365 - RNA, 19 nt, Artificial Sequence
  Description of Artificial Sequence: Synthetic oligonucleotide
cccugacuguugauguugc

SEQ ID NO: 1657366 - RNA, 19 nt, Artificial Sequence
  Description of Artificial Sequence: Synthetic oligonucleotide
cugagcuacaaaggguaaa

SEQ ID NO: 1657367 - RNA, 19 nt, Artificial Sequence
  Description of Artificial Sequence: Synthetic oligonucleotide
ggcuaaaaugcacuauaau

SEQ ID NO: 1657368 - RNA, 19 nt, Artificial Sequence
  Description of Artificial Sequence: Synthetic oligonucleotide
auccgaccuuugccuauca

SEQ ID NO: 1657369 - RNA, 19 nt, Artificial Sequence
  Description of Artificial Sequence: Synthetic oligonucleotide
cucgcuggucagcaucuga

SEQ ID NO: 1657370 - RNA, 19 nt, Artificial Sequence
  Description of Artificial Sequence: Synthetic oligonucleotide
ccuuaguacaucacaaaau

SEQ ID NO: 1657371 - RNA, 19 nt, Artificial Sequence
  Description of Artificial Sequence: Synthetic oligonucleotide
cauccgaccuuugccuauc

SEQ ID NO: 1657372 - RNA, 19 nt, Artificial Sequence
  Description of Artificial Sequence: Synthetic oligonucleotide
ucucgcuggucagcaucug

SEQ ID NO: 1657373 - RNA, 19 nt, Artificial Sequence
  Description of Artificial Sequence: Synthetic oligonucleotide
acgguggggugggcgcucc

SEQ ID NO: 1657374 - RNA, 19 nt, Artificial Sequence
  Description of Artificial Sequence: Synthetic oligonucleotide
cugaguugcuaugcuucca

SEQ ID NO: 1657375 - RNA, 19 nt, Artificial Sequence
  Description of Artificial Sequence: Synthetic oligonucleotide
ugacucccugacuguugau

SEQ ID NO: 1657376 - RNA, 19 nt, Artificial Sequence
  Description of Artificial Sequence: Synthetic oligonucleotide
gccacgguggggugggcgc

SEQ ID NO: 1657377 - RNA, 19 nt, Artificial Sequence
  Description of Artificial Sequence: Synthetic oligonucleotide
acuugcaaguaggcauuuu

SEQ ID NO: 1657378 - RNA, 19 nt, Artificial Sequence
  Description of Artificial Sequence: Synthetic oligonucleotide
uccggcccgggagugugga

SEQ ID NO: 1657379 - RNA, 19 nt, Artificial Sequence
  Description of Artificial Sequence: Synthetic oligonucleotide
ggggaaucucccagucucc

SEQ ID NO: 1657380 - RNA, 19 nt, Artificial Sequence
  Description of Artificial Sequence: Synthetic oligonucleotide
ugggcgcuccgccggccga

SEQ ID NO: 1657381 - RNA, 19 nt, Artificial Sequence
  Description of Artificial Sequence: Synthetic oligonucleotide
gcagucugucaaaagggaa

SEQ ID NO: 1657382 - RNA, 19 nt, Artificial Sequence
  Description of Artificial Sequence: Synthetic oligonucleotide
cugguucgaaagguaaccu

SEQ ID NO: 1657383 - RNA, 19 nt, Artificial Sequence
  Description of Artificial Sequence: Synthetic oligonucleotide
ggauccgcaggguugcagu

SEQ ID NO: 1657384 - RNA, 19 nt, Artificial Sequence
  Description of Artificial Sequence: Synthetic oligonucleotide
cagugccgcgcugcggccg

SEQ ID NO: 1657385 - RNA, 19 nt, Artificial Sequence
  Description of Artificial Sequence: Synthetic oligonucleotide
gugcucucugagcuacaaa

SEQ ID NO: 1657386 - RNA, 19 nt, Artificial Sequence
  Description of Artificial Sequence: Synthetic oligonucleotide
agguaaccuuuggugguuu

SEQ ID NO: 1657387 - RNA, 19 nt, Artificial Sequence
  Description of Artificial Sequence: Synthetic oligonucleotide
cuccggcccgggagugugg

SEQ ID NO: 1657388 - RNA, 19 nt, Artificial Sequence
  Description of Artificial Sequence: Synthetic oligonucleotide
gcagucguuuugcuagaaa

SEQ ID NO: 1657389 - RNA, 19 nt, Artificial Sequence
  Description of Artificial Sequence: Synthetic oligonucleotide
ccgaccuuugccuaucacu

SEQ ID NO: 1657390 - RNA, 19 nt, Artificial Sequence
  Description of Artificial Sequence: Synthetic oligonucleotide
ggucagcaucugaacugcc

SEQ ID NO: 1657391 - RNA, 19 nt, Artificial Sequence
  Description of Artificial Sequence: Synthetic oligonucleotide
cuucaggaccaguauccuu

SEQ ID NO: 1657392 - RNA, 19 nt, Artificial Sequence
  Description of Artificial Sequence: Synthetic oligonucleotide
cuggguggcagaagguuuu

SEQ ID NO: 1657393 - RNA, 19 nt, Artificial Sequence
  Description of Artificial Sequence: Synthetic oligonucleotide
gauccgcagcacaguggga

SEQ ID NO: 1657394 - RNA, 19 nt, Artificial Sequence
  Description of Artificial Sequence: Synthetic oligonucleotide
ggcuauccugucauguucu

SEQ ID NO: 1657395 - RNA, 19 nt, Artificial Sequence
  Description of Artificial Sequence: Synthetic oligonucleotide
cgaaagucgcaggcggccg

SEQ ID NO: 1657396 - RNA, 19 nt, Artificial Sequence
  Description of Artificial Sequence: Synthetic oligonucleotide
gguggggugggcgcuccgc

SEQ ID NO: 1657397 - RNA, 19 nt, Artificial Sequence
  Description of Artificial Sequence: Synthetic oligonucleotide
ggcccgggaguguggaaca

SEQ ID NO: 1657398 - RNA, 19 nt, Artificial Sequence
  Description of Artificial Sequence: Synthetic oligonucleotide
cuacagcuacaaaguucua

SEQ ID NO: 1657399 - RNA, 19 nt, Artificial Sequence
  Description of Artificial Sequence: Synthetic oligonucleotide
guucuacucuugauagcau

SEQ ID NO: 1657400 - RNA, 19 nt, Artificial Sequence
  Description of Artificial Sequence: Synthetic oligonucleotide
gggaacaaauugagagcaa

SEQ ID NO: 1657401 - RNA, 19 nt, Artificial Sequence
  Description of Artificial Sequence: Synthetic oligonucleotide
cgcuccgggagccacggug

SEQ ID NO: 1657402 - RNA, 19 nt, Artificial Sequence
  Description of Artificial Sequence: Synthetic oligonucleotide
ggcagagaguagaaucagu

SEQ ID NO: 1657403 - RNA, 19 nt, Artificial Sequence
  Description of Artificial Sequence: Synthetic oligonucleotide
ggguugcagucugucaaaa

SEQ ID NO: 1657404 - RNA, 19 nt, Artificial Sequence
  Description of Artificial Sequence: Synthetic oligonucleotide
ccugacuguugauguugca

SEQ ID NO: 1657405 - RNA, 19 nt, Artificial Sequence
  Description of Artificial Sequence: Synthetic oligonucleotide
gcuagaaaguuugguguuu

SEQ ID NO: 1657406 - RNA, 19 nt, Artificial Sequence
  Description of Artificial Sequence: Synthetic oligonucleotide
gcuccggcccgggagugug

SEQ ID NO: 1657407 - RNA, 19 nt, Artificial Sequence
  Description of Artificial Sequence: Synthetic oligonucleotide
gaggaggaucaaggguuau

SEQ ID NO: 1657408 - RNA, 19 nt, Artificial Sequence
  Description of Artificial Sequence: Synthetic oligonucleotide
gguggcgccgccccgcgcu

SEQ ID NO: 1657409 - RNA, 19 nt, Artificial Sequence
  Description of Artificial Sequence: Synthetic oligonucleotide
caacagcaugaaccacaua

SEQ ID NO: 1657410 - RNA, 19 nt, Artificial Sequence
  Description of Artificial Sequence: Synthetic oligonucleotide
gcagaagguuuucucucuu

SEQ ID NO: 1657411 - RNA, 19 nt, Artificial Sequence
  Description of Artificial Sequence: Synthetic oligonucleotide
cacgguggggugggcgcuc

SEQ ID NO: 1657412 - RNA, 19 nt, Artificial Sequence
  Description of Artificial Sequence: Synthetic oligonucleotide
gcaggcggccgugcagugc

SEQ ID NO: 1657413 - RNA, 19 nt, Artificial Sequence
  Description of Artificial Sequence: Synthetic oligonucleotide
ggauaacuuagcagucguu

SEQ ID NO: 1657414 - RNA, 19 nt, Artificial Sequence
  Description of Artificial Sequence: Synthetic oligonucleotide
cucccugacuguugauguu

SEQ ID NO: 1657415 - RNA, 19 nt, Artificial Sequence
  Description of Artificial Sequence: Synthetic oligonucleotide
gagccacgguggggugggc

SEQ ID NO: 1657416 - RNA, 19 nt, Artificial Sequence
  Description of Artificial Sequence: Synthetic oligonucleotide
caggaccaguauccuuagu

SEQ ID NO: 1657417 - RNA, 19 nt, Artificial Sequence
  Description of Artificial Sequence: Synthetic oligonucleotide
cccgggaguguggaacauc

SEQ ID NO: 1657418 - RNA, 19 nt, Artificial Sequence
  Description of Artificial Sequence: Synthetic oligonucleotide
cggcccgggaguguggaac

SEQ ID NO: 1657419 - RNA, 19 nt, Artificial Sequence
  Description of Artificial Sequence: Synthetic oligonucleotide
cugcaguugggaggaggau

SEQ ID NO: 1657420 - RNA, 19 nt, Artificial Sequence
  Description of Artificial Sequence: Synthetic oligonucleotide
ggccgugcagugccgcgcu

SEQ ID NO: 1657421 - RNA, 19 nt, Artificial Sequence
  Description of Artificial Sequence: Synthetic oligonucleotide
ccguauuguaaaggcuaua

SEQ ID NO: 1657422 - RNA, 19 nt, Artificial Sequence
  Description of Artificial Sequence: Synthetic oligonucleotide
cgggaguguggaacaucga

SEQ ID NO: 1657423 - RNA, 19 nt, Artificial Sequence
  Description of Artificial Sequence: Synthetic oligonucleotide
cgcaggcggccgugcagug

SEQ ID NO: 1657424 - RNA, 19 nt, Artificial Sequence
  Description of Artificial Sequence: Synthetic oligonucleotide
gggucucgcuggucagcau

SEQ ID NO: 1657425 - RNA, 19 nt, Artificial Sequence
  Description of Artificial Sequence: Synthetic oligonucleotide
ccggcccgggaguguggaa

SEQ ID NO: 1657426 - RNA, 19 nt, Artificial Sequence
  Description of Artificial Sequence: Synthetic oligonucleotide
gcccgggaguguggaacau

SEQ ID NO: 1657427 - RNA, 19 nt, Artificial Sequence
  Description of Artificial Sequence: Synthetic oligonucleotide
aauaauaauaauaauaaac

SEQ ID NO: 1657428 - RNA, 19 nt, Artificial Sequence
  Description of Artificial Sequence: Synthetic oligonucleotide
aaaauaauaauaauaauaa

SEQ ID NO: 1657429 - RNA, 19 nt, Artificial Sequence
  Description of Artificial Sequence: Synthetic oligonucleotide
uauguaaucuaagagaagg

SEQ ID NO: 1657430 - RNA, 19 nt, Artificial Sequence
  Description of Artificial Sequence: Synthetic oligonucleotide
aauaauaauaauaauaaua

SEQ ID NO: 1657431 - RNA, 19 nt, Artificial Sequence
  Description of Artificial Sequence: Synthetic oligonucleotide
ugucguuucuauaauaagg

SEQ ID NO: 1657432 - RNA, 19 nt, Artificial Sequence
  Description of Artificial Sequence: Synthetic oligonucleotide
uccuuauagauaaaguggg

SEQ ID NO: 1657433 - RNA, 19 nt, Artificial Sequence
  Description of Artificial Sequence: Synthetic oligonucleotide
aauaauaaacgaugcaaca

SEQ ID NO: 1657434 - RNA, 19 nt, Artificial Sequence
  Description of Artificial Sequence: Synthetic oligonucleotide
aauaauaauaaacgaugca

SEQ ID NO: 1657435 - RNA, 19 nt, Artificial Sequence
  Description of Artificial Sequence: Synthetic oligonucleotide
auagccauuaauuucuggg

SEQ ID NO: 1657436 - RNA, 19 nt, Artificial Sequence
  Description of Artificial Sequence: Synthetic oligonucleotide
uaauaaacgaugcaacagc

SEQ ID NO: 1657437 - RNA, 19 nt, Artificial Sequence
  Description of Artificial Sequence: Synthetic oligonucleotide
auaauaauaauaauaauaa

SEQ ID NO: 1657438 - RNA, 19 nt, Artificial Sequence
  Description of Artificial Sequence: Synthetic oligonucleotide
aacgaugcaacagcgauac

SEQ ID NO: 1657439 - RNA, 19 nt, Artificial Sequence
  Description of Artificial Sequence: Synthetic oligonucleotide
ucuauaauaaggcuucccu

SEQ ID NO: 1657440 - RNA, 19 nt, Artificial Sequence
  Description of Artificial Sequence: Synthetic oligonucleotide
uauaauaaggcuucccuac

SEQ ID NO: 1657441 - RNA, 19 nt, Artificial Sequence
  Description of Artificial Sequence: Synthetic oligonucleotide
ugaacuuugcgcauccagg

SEQ ID NO: 1657442 - RNA, 19 nt, Artificial Sequence
  Description of Artificial Sequence: Synthetic oligonucleotide
aauaaacgaugcaacagcg

SEQ ID NO: 1657443 - RNA, 19 nt, Artificial Sequence
  Description of Artificial Sequence: Synthetic oligonucleotide
aaauaauaauaauaauaau

SEQ ID NO: 1657444 - RNA, 19 nt, Artificial Sequence
  Description of Artificial Sequence: Synthetic oligonucleotide
ugcaacagcgauaccaacg

SEQ ID NO: 1657445 - RNA, 19 nt, Artificial Sequence
  Description of Artificial Sequence: Synthetic oligonucleotide
auaauaaggcuucccuacc

SEQ ID NO: 1657446 - RNA, 19 nt, Artificial Sequence
  Description of Artificial Sequence: Synthetic oligonucleotide
acauaguuugaguugauca

SEQ ID NO: 1657447 - RNA, 19 nt, Artificial Sequence
  Description of Artificial Sequence: Synthetic oligonucleotide
ugugaauacuccucgcacg

SEQ ID NO: 1657448 - RNA, 19 nt, Artificial Sequence
  Description of Artificial Sequence: Synthetic oligonucleotide
uguaaucuaagagaaggcc

SEQ ID NO: 1657449 - RNA, 19 nt, Artificial Sequence
  Description of Artificial Sequence: Synthetic oligonucleotide
uucacauucauauguaauc

SEQ ID NO: 1657450 - RNA, 19 nt, Artificial Sequence
  Description of Artificial Sequence: Synthetic oligonucleotide
auaauaaacgaugcaacag

SEQ ID NO: 1657451 - RNA, 19 nt, Artificial Sequence
  Description of Artificial Sequence: Synthetic oligonucleotide
gaacuuugcgcauccaggg

SEQ ID NO: 1657452 - RNA, 19 nt, Artificial Sequence
  Description of Artificial Sequence: Synthetic oligonucleotide
uaaacgaugcaacagcgau

SEQ ID NO: 1657453 - RNA, 19 nt, Artificial Sequence
  Description of Artificial Sequence: Synthetic oligonucleotide
uuauuccuuauagauaaag

SEQ ID NO: 1657454 - RNA, 19 nt, Artificial Sequence
  Description of Artificial Sequence: Synthetic oligonucleotide
uaauaauaauaauaauaaa

SEQ ID NO: 1657455 - RNA, 19 nt, Artificial Sequence
  Description of Artificial Sequence: Synthetic oligonucleotide
uuggggucgacauaguuug

SEQ ID NO: 1657456 - RNA, 19 nt, Artificial Sequence
  Description of Artificial Sequence: Synthetic oligonucleotide
uaauaauaauaauaauaau

SEQ ID NO: 1657457 - RNA, 19 nt, Artificial Sequence
  Description of Artificial Sequence: Synthetic oligonucleotide
acguugugaagacugcccc

SEQ ID NO: 1657458 - RNA, 19 nt, Artificial Sequence
  Description of Artificial Sequence: Synthetic oligonucleotide
aacuuugcgcauccagggg

SEQ ID NO: 1657459 - RNA, 19 nt, Artificial Sequence
  Description of Artificial Sequence: Synthetic oligonucleotide
ucugugaauacuccucgca

SEQ ID NO: 1657460 - RNA, 19 nt, Artificial Sequence
  Description of Artificial Sequence: Synthetic oligonucleotide
gucguuucuauaauaaggc

SEQ ID NO: 1657461 - RNA, 19 nt, Artificial Sequence
  Description of Artificial Sequence: Synthetic oligonucleotide
guuaccguggccaaaacac

SEQ ID NO: 1657462 - RNA, 19 nt, Artificial Sequence
  Description of Artificial Sequence: Synthetic oligonucleotide
uugucguuucuauaauaag

SEQ ID NO: 1657463 - RNA, 19 nt, Artificial Sequence
  Description of Artificial Sequence: Synthetic oligonucleotide
cuagaacucaacugccucc

SEQ ID NO: 1657464 - RNA, 19 nt, Artificial Sequence
  Description of Artificial Sequence: Synthetic oligonucleotide
cugcguuuauuccuuauag

SEQ ID NO: 1657465 - RNA, 19 nt, Artificial Sequence
  Description of Artificial Sequence: Synthetic oligonucleotide
uagccauuaauuucuggga

SEQ ID NO: 1657466 - RNA, 19 nt, Artificial Sequence
  Description of Artificial Sequence: Synthetic oligonucleotide
uguccuuccagaguaggag

SEQ ID NO: 1657467 - RNA, 19 nt, Artificial Sequence
  Description of Artificial Sequence: Synthetic oligonucleotide
acucaacugccucccaccc

SEQ ID NO: 1657468 - RNA, 19 nt, Artificial Sequence
  Description of Artificial Sequence: Synthetic oligonucleotide
gauaccaacgggagaaggc

SEQ ID NO: 1657469 - RNA, 19 nt, Artificial Sequence
  Description of Artificial Sequence: Synthetic oligonucleotide
uguuaccguggccaaaaca

SEQ ID NO: 1657470 - RNA, 19 nt, Artificial Sequence
  Description of Artificial Sequence: Synthetic oligonucleotide
ucuccggagggcuucaccc

SEQ ID NO: 1657471 - RNA, 19 nt, Artificial Sequence
  Description of Artificial Sequence: Synthetic oligonucleotide
ucgacauaguuugaguuga

SEQ ID NO: 1657472 - RNA, 19 nt, Artificial Sequence
  Description of Artificial Sequence: Synthetic oligonucleotide
aacagcgauaccaacggga

SEQ ID NO: 1657473 - RNA, 19 nt, Artificial Sequence
  Description of Artificial Sequence: Synthetic oligonucleotide
gucgacauaguuugaguug

SEQ ID NO: 1657474 - RNA, 19 nt, Artificial Sequence
  Description of Artificial Sequence: Synthetic oligonucleotide
uaguuugaguugaucaaaa

SEQ ID NO: 1657475 - RNA, 19 nt, Artificial Sequence
  Description of Artificial Sequence: Synthetic oligonucleotide
gguauugggcaacuugugg

SEQ ID NO: 1657476 - RNA, 19 nt, Artificial Sequence
  Description of Artificial Sequence: Synthetic oligonucleotide
ucccauaccccgaauuccc

SEQ ID NO: 1657477 - RNA, 19 nt, Artificial Sequence
  Description of Artificial Sequence: Synthetic oligonucleotide
acgugaacuuugcgcaucc

SEQ ID NO: 1657478 - RNA, 19 nt, Artificial Sequence
  Description of Artificial Sequence: Synthetic oligonucleotide
ugggugucuaaauuucucu

SEQ ID NO: 1657479 - RNA, 19 nt, Artificial Sequence
  Description of Artificial Sequence: Synthetic oligonucleotide
gcuccuagaacucaacugc

SEQ ID NO: 1657480 - RNA, 19 nt, Artificial Sequence
  Description of Artificial Sequence: Synthetic oligonucleotide
acgacgggcucuuugcacg

SEQ ID NO: 1657481 - RNA, 19 nt, Artificial Sequence
  Description of Artificial Sequence: Synthetic oligonucleotide
ugcguuuauuccuuauaga

SEQ ID NO: 1657482 - RNA, 19 nt, Artificial Sequence
  Description of Artificial Sequence: Synthetic oligonucleotide
ucguuucuauaauaaggcu

SEQ ID NO: 1657483 - RNA, 19 nt, Artificial Sequence
  Description of Artificial Sequence: Synthetic oligonucleotide
uuggggagcacuagaguga

SEQ ID NO: 1657484 - RNA, 19 nt, Artificial Sequence
  Description of Artificial Sequence: Synthetic oligonucleotide
uaccguggccaaaacacug

SEQ ID NO: 1657485 - RNA, 19 nt, Artificial Sequence
  Description of Artificial Sequence: Synthetic oligonucleotide
uucuauaauaaggcuuccc

SEQ ID NO: 1657486 - RNA, 19 nt, Artificial Sequence
  Description of Artificial Sequence: Synthetic oligonucleotide
uagacgacgggcucuuugc

SEQ ID NO: 1657487 - RNA, 19 nt, Artificial Sequence
  Description of Artificial Sequence: Synthetic oligonucleotide
cacguugugaagacugccc

SEQ ID NO: 1657488 - RNA, 19 nt, Artificial Sequence
  Description of Artificial Sequence: Synthetic oligonucleotide
guguguguguguuuguuac

SEQ ID NO: 1657489 - RNA, 19 nt, Artificial Sequence
  Description of Artificial Sequence: Synthetic oligonucleotide
gagaaguugugugugugug

SEQ ID NO: 1657490 - RNA, 19 nt, Artificial Sequence
  Description of Artificial Sequence: Synthetic oligonucleotide
aguuguguguguguguuug

SEQ ID NO: 1657491 - RNA, 19 nt, Artificial Sequence
  Description of Artificial Sequence: Synthetic oligonucleotide
uuuguuaccguggccaaaa

SEQ ID NO: 1657492 - RNA, 19 nt, Artificial Sequence
  Description of Artificial Sequence: Synthetic oligonucleotide
ugggaauugcccacaaaau

SEQ ID NO: 1657493 - RNA, 19 nt, Artificial Sequence
  Description of Artificial Sequence: Synthetic oligonucleotide
agugggacggacugggaug

SEQ ID NO: 1657494 - RNA, 19 nt, Artificial Sequence
  Description of Artificial Sequence: Synthetic oligonucleotide
uauugggcaacuugugguc

SEQ ID NO: 1657495 - RNA, 19 nt, Artificial Sequence
  Description of Artificial Sequence: Synthetic oligonucleotide
uauugucguuucuauaaua

SEQ ID NO: 1657496 - RNA, 19 nt, Artificial Sequence
  Description of Artificial Sequence: Synthetic oligonucleotide
accuucuaccagaaggccc

SEQ ID NO: 1657497 - RNA, 19 nt, Artificial Sequence
  Description of Artificial Sequence: Synthetic oligonucleotide
ucuaccagaaggcccuccu

SEQ ID NO: 1657498 - RNA, 19 nt, Artificial Sequence
  Description of Artificial Sequence: Synthetic oligonucleotide
auugucguuucuauaauaa

SEQ ID NO: 1657499 - RNA, 19 nt, Artificial Sequence
  Description of Artificial Sequence: Synthetic oligonucleotide
ucugcguuuauuccuuaua

SEQ ID NO: 1657500 - RNA, 19 nt, Artificial Sequence
  Description of Artificial Sequence: Synthetic oligonucleotide
gggagcacuagagugaggg

SEQ ID NO: 1657501 - RNA, 19 nt, Artificial Sequence
  Description of Artificial Sequence: Synthetic oligonucleotide
cauaguuugaguugaucaa

SEQ ID NO: 1657502 - RNA, 19 nt, Artificial Sequence
  Description of Artificial Sequence: Synthetic oligonucleotide
augcgucgauucuggaacc

SEQ ID NO: 1657503 - RNA, 19 nt, Artificial Sequence
  Description of Artificial Sequence: Synthetic oligonucleotide
cugugaauacuccucgcac

SEQ ID NO: 1657504 - RNA, 19 nt, Artificial Sequence
  Description of Artificial Sequence: Synthetic oligonucleotide
ugcuaucuggcagucuccg

SEQ ID NO: 1657505 - RNA, 19 nt, Artificial Sequence
  Description of Artificial Sequence: Synthetic oligonucleotide
uccccuucggugcucgcgg

SEQ ID NO: 1657506 - RNA, 19 nt, Artificial Sequence
  Description of Artificial Sequence: Synthetic oligonucleotide
uggggacccucccauaccc

SEQ ID NO: 1657507 - RNA, 19 nt, Artificial Sequence
  Description of Artificial Sequence: Synthetic oligonucleotide
uccauuaggccggccaggg

SEQ ID NO: 1657508 - RNA, 19 nt, Artificial Sequence
  Description of Artificial Sequence: Synthetic oligonucleotide
agccauuaauuucugggaa

SEQ ID NO: 1657509 - RNA, 19 nt, Artificial Sequence
  Description of Artificial Sequence: Synthetic oligonucleotide
aauuccccuucggugcucg

SEQ ID NO: 1657510 - RNA, 19 nt, Artificial Sequence
  Description of Artificial Sequence: Synthetic oligonucleotide
agcggaucuugguauuggg

SEQ ID NO: 1657511 - RNA, 19 nt, Artificial Sequence
  Description of Artificial Sequence: Synthetic oligonucleotide
uuaccguggccaaaacacu

SEQ ID NO: 1657512 - RNA, 19 nt, Artificial Sequence
  Description of Artificial Sequence: Synthetic oligonucleotide
agcgauaccaacgggagaa

SEQ ID NO: 1657513 - RNA, 19 nt, Artificial Sequence
  Description of Artificial Sequence: Synthetic oligonucleotide
uccuagaacucaacugccu

SEQ ID NO: 1657514 - RNA, 19 nt, Artificial Sequence
  Description of Artificial Sequence: Synthetic oligonucleotide
cugggaauugcccacaaaa

SEQ ID NO: 1657515 - RNA, 19 nt, Artificial Sequence
  Description of Artificial Sequence: Synthetic oligonucleotide
aaucuaagagaaggccucu

SEQ ID NO: 1657516 - RNA, 19 nt, Artificial Sequence
  Description of Artificial Sequence: Synthetic oligonucleotide
uccgaaacccacguuguga

SEQ ID NO: 1657517 - RNA, 19 nt, Artificial Sequence
  Description of Artificial Sequence: Synthetic oligonucleotide
uccggagggcuucacccgg

SEQ ID NO: 1657518 - RNA, 19 nt, Artificial Sequence
  Description of Artificial Sequence: Synthetic oligonucleotide
auaguuugaguugaucaaa

SEQ ID NO: 1657519 - RNA, 19 nt, Artificial Sequence
  Description of Artificial Sequence: Synthetic oligonucleotide
auaccaacgggagaaggcu

SEQ ID NO: 1657520 - RNA, 19 nt, Artificial Sequence
  Description of Artificial Sequence: Synthetic oligonucleotide
guguuuguuaccguggcca

SEQ ID NO: 1657521 - RNA, 19 nt, Artificial Sequence
  Description of Artificial Sequence: Synthetic oligonucleotide
agaaguugugugugugugu

SEQ ID NO: 1657522 - RNA, 19 nt, Artificial Sequence
  Description of Artificial Sequence: Synthetic oligonucleotide
gcucacgugaacuuugcgc

SEQ ID NO: 1657523 - RNA, 19 nt, Artificial Sequence
  Description of Artificial Sequence: Synthetic oligonucleotide
acagcgauaccaacgggag

SEQ ID NO: 1657524 - RNA, 19 nt, Artificial Sequence
  Description of Artificial Sequence: Synthetic oligonucleotide
auauguaaucuaagagaag

SEQ ID NO: 1657525 - RNA, 19 nt, Artificial Sequence
  Description of Artificial Sequence: Synthetic oligonucleotide
gcucugugaauacuccucg

SEQ ID NO: 1657526 - RNA, 19 nt, Artificial Sequence
  Description of Artificial Sequence: Synthetic oligonucleotide
cuauaauaaggcuucccua

SEQ ID NO: 1657527 - RNA, 19 nt, Artificial Sequence
  Description of Artificial Sequence: Synthetic oligonucleotide
cucagacaggcagagcgcg

SEQ ID NO: 1657528 - RNA, 19 nt, Artificial Sequence
  Description of Artificial Sequence: Synthetic oligonucleotide
gauuggccagaagacauuc

SEQ ID NO: 1657529 - RNA, 19 nt, Artificial Sequence
  Description of Artificial Sequence: Synthetic oligonucleotide
uguguguguguguuuguua

SEQ ID NO: 1657530 - RNA, 19 nt, Artificial Sequence
  Description of Artificial Sequence: Synthetic oligonucleotide
guagacgacgggcucuuug

SEQ ID NO: 1657531 - RNA, 19 nt, Artificial Sequence
  Description of Artificial Sequence: Synthetic oligonucleotide
guauugggcaacuuguggu

SEQ ID NO: 1657532 - RNA, 19 nt, Artificial Sequence
  Description of Artificial Sequence: Synthetic oligonucleotide
guagguaaucgcucuguga

SEQ ID NO: 1657533 - RNA, 19 nt, Artificial Sequence
  Description of Artificial Sequence: Synthetic oligonucleotide
uugcacgcggagugggacg

SEQ ID NO: 1657534 - RNA, 19 nt, Artificial Sequence
  Description of Artificial Sequence: Synthetic oligonucleotide
uaccccgaauuccccuucg

SEQ ID NO: 1657535 - RNA, 19 nt, Artificial Sequence
  Description of Artificial Sequence: Synthetic oligonucleotide
uguuuguuaccguggccaa

SEQ ID NO: 1657536 - RNA, 19 nt, Artificial Sequence
  Description of Artificial Sequence: Synthetic oligonucleotide
cugggugucuaaauuucuc

SEQ ID NO: 1657537 - RNA, 19 nt, Artificial Sequence
  Description of Artificial Sequence: Synthetic oligonucleotide
guaaucgcucugugaauac

SEQ ID NO: 1657538 - RNA, 19 nt, Artificial Sequence
  Description of Artificial Sequence: Synthetic oligonucleotide
guacccaggcgaguggucg

SEQ ID NO: 1657539 - RNA, 19 nt, Artificial Sequence
  Description of Artificial Sequence: Synthetic oligonucleotide
cucugugaauacuccucgc

SEQ ID NO: 1657540 - RNA, 19 nt, Artificial Sequence
  Description of Artificial Sequence: Synthetic oligonucleotide
uagcgcugcacggugcacg

SEQ ID NO: 1657541 - RNA, 19 nt, Artificial Sequence
  Description of Artificial Sequence: Synthetic oligonucleotide
ccuauugucguuucuauaa

SEQ ID NO: 1657542 - RNA, 19 nt, Artificial Sequence
  Description of Artificial Sequence: Synthetic oligonucleotide
auaccccgaauuccccuuc

SEQ ID NO: 1657543 - RNA, 19 nt, Artificial Sequence
  Description of Artificial Sequence: Synthetic oligonucleotide
uuccgaaacccacguugug

SEQ ID NO: 1657544 - RNA, 19 nt, Artificial Sequence
  Description of Artificial Sequence: Synthetic oligonucleotide
uucacccggcucccuauug

SEQ ID NO: 1657545 - RNA, 19 nt, Artificial Sequence
  Description of Artificial Sequence: Synthetic oligonucleotide
ugcacgcggagugggacgg

SEQ ID NO: 1657546 - RNA, 19 nt, Artificial Sequence
  Description of Artificial Sequence: Synthetic oligonucleotide
gacauaguuugaguugauc

SEQ ID NO: 1657547 - RNA, 19 nt, Artificial Sequence
  Description of Artificial Sequence: Synthetic oligonucleotide
gagcggaucuugguauugg

SEQ ID NO: 1657548 - RNA, 19 nt, Artificial Sequence
  Description of Artificial Sequence: Synthetic oligonucleotide
ccgaauuccccuucggugc

SEQ ID NO: 1657549 - RNA, 19 nt, Artificial Sequence
  Description of Artificial Sequence: Synthetic oligonucleotide
gagaaggccucugcuguag

SEQ ID NO: 1657550 - RNA, 19 nt, Artificial Sequence
  Description of Artificial Sequence: Synthetic oligonucleotide
agcgcugcacggugcacgg

SEQ ID NO: 1657551 - RNA, 19 nt, Artificial Sequence
  Description of Artificial Sequence: Synthetic oligonucleotide
uuugcacgcggagugggac

SEQ ID NO: 1657552 - RNA, 19 nt, Artificial Sequence
  Description of Artificial Sequence: Synthetic oligonucleotide
cucccauaccccgaauucc

SEQ ID NO: 1657553 - RNA, 19 nt, Artificial Sequence
  Description of Artificial Sequence: Synthetic oligonucleotide
gaucuugguauugggcaac

SEQ ID NO: 1657554 - RNA, 19 nt, Artificial Sequence
  Description of Artificial Sequence: Synthetic oligonucleotide
uaaucgcucugugaauacu

SEQ ID NO: 1657555 - RNA, 19 nt, Artificial Sequence
  Description of Artificial Sequence: Synthetic oligonucleotide
acccacguugugaagacug

SEQ ID NO: 1657556 - RNA, 19 nt, Artificial Sequence
  Description of Artificial Sequence: Synthetic oligonucleotide
auaaacgaugcaacagcga

SEQ ID NO: 1657557 - RNA, 19 nt, Artificial Sequence
  Description of Artificial Sequence: Synthetic oligonucleotide
gaccuucuaccagaaggcc

SEQ ID NO: 1657558 - RNA, 19 nt, Artificial Sequence
  Description of Artificial Sequence: Synthetic oligonucleotide
uccccgccggaguaauugg

SEQ ID NO: 1657559 - RNA, 19 nt, Artificial Sequence
  Description of Artificial Sequence: Synthetic oligonucleotide
uaccaacgggagaaggcuc

SEQ ID NO: 1657560 - RNA, 19 nt, Artificial Sequence
  Description of Artificial Sequence: Synthetic oligonucleotide
ccuggcuggaccuucuacc

SEQ ID NO: 1657561 - RNA, 19 nt, Artificial Sequence
  Description of Artificial Sequence: Synthetic oligonucleotide
cuuucucgccucuggccgc

SEQ ID NO: 1657562 - RNA, 19 nt, Artificial Sequence
  Description of Artificial Sequence: Synthetic oligonucleotide
ggaguaauugggguuuacc

SEQ ID NO: 1657563 - RNA, 19 nt, Artificial Sequence
  Description of Artificial Sequence: Synthetic oligonucleotide
gaauugcccacaaaauaua

SEQ ID NO: 1657564 - RNA, 19 nt, Artificial Sequence
  Description of Artificial Sequence: Synthetic oligonucleotide
caacggugggcaccuacag

SEQ ID NO: 1657565 - RNA, 19 nt, Artificial Sequence
  Description of Artificial Sequence: Synthetic oligonucleotide
caacagcgauaccaacggg

SEQ ID NO: 1657566 - RNA, 19 nt, Artificial Sequence
  Description of Artificial Sequence: Synthetic oligonucleotide
ucgcuggguagguaaucgc

SEQ ID NO: 1657567 - RNA, 19 nt, Artificial Sequence
  Description of Artificial Sequence: Synthetic oligonucleotide
acgggcucuuugcacgcgg

SEQ ID NO: 1657568 - RNA, 19 nt, Artificial Sequence
  Description of Artificial Sequence: Synthetic oligonucleotide
auuccgaaacccacguugu

SEQ ID NO: 1657569 - RNA, 19 nt, Artificial Sequence
  Description of Artificial Sequence: Synthetic oligonucleotide
uuaccgugcucacgugaac

SEQ ID NO: 1657570 - RNA, 19 nt, Artificial Sequence
  Description of Artificial Sequence: Synthetic oligonucleotide
agaaggcccuccugggugu

SEQ ID NO: 1657571 - RNA, 19 nt, Artificial Sequence
  Description of Artificial Sequence: Synthetic oligonucleotide
aaacgaugcaacagcgaua

SEQ ID NO: 1657572 - RNA, 19 nt, Artificial Sequence
  Description of Artificial Sequence: Synthetic oligonucleotide
gggaauugcccacaaaaua

SEQ ID NO: 1657573 - RNA, 19 nt, Artificial Sequence
  Description of Artificial Sequence: Synthetic oligonucleotide
gguagguaaucgcucugug

SEQ ID NO: 1657574 - RNA, 19 nt, Artificial Sequence
  Description of Artificial Sequence: Synthetic oligonucleotide
uucccagcuccuagaacuc

SEQ ID NO: 1657575 - RNA, 19 nt, Artificial Sequence
  Description of Artificial Sequence: Synthetic oligonucleotide
aaguuguguguguguguuu

SEQ ID NO: 1657576 - RNA, 19 nt, Artificial Sequence
  Description of Artificial Sequence: Synthetic oligonucleotide
uuguuaccguggccaaaac

SEQ ID NO: 1657577 - RNA, 19 nt, Artificial Sequence
  Description of Artificial Sequence: Synthetic oligonucleotide
cauucccagcuccuagaac

SEQ ID NO: 1657578 - RNA, 19 nt, Artificial Sequence
  Description of Artificial Sequence: Synthetic oligonucleotide
gggugucuaaauuucucuc

SEQ ID NO: 1657579 - RNA, 19 nt, Artificial Sequence
  Description of Artificial Sequence: Synthetic oligonucleotide
gcguuuauuccuuauagau

SEQ ID NO: 1657580 - RNA, 19 nt, Artificial Sequence
  Description of Artificial Sequence: Synthetic oligonucleotide
ccuacagggagagaaguug

SEQ ID NO: 1657581 - RNA, 19 nt, Artificial Sequence
  Description of Artificial Sequence: Synthetic oligonucleotide
uaggcgguccgagagcgcu

SEQ ID NO: 1657582 - RNA, 19 nt, Artificial Sequence
  Description of Artificial Sequence: Synthetic oligonucleotide
aucuaagagaaggccucug

SEQ ID NO: 1657583 - RNA, 19 nt, Artificial Sequence
  Description of Artificial Sequence: Synthetic oligonucleotide
ggagcacuagagugagggg

SEQ ID NO: 1657584 - RNA, 19 nt, Artificial Sequence
  Description of Artificial Sequence: Synthetic oligonucleotide
agguaaucgcucugugaau

SEQ ID NO: 1657585 - RNA, 19 nt, Artificial Sequence
  Description of Artificial Sequence: Synthetic oligonucleotide
accccgaauuccccuucgg

SEQ ID NO: 1657586 - RNA, 19 nt, Artificial Sequence
  Description of Artificial Sequence: Synthetic oligonucleotide
cuggcuggaccuucuacca

SEQ ID NO: 1657587 - RNA, 19 nt, Artificial Sequence
  Description of Artificial Sequence: Synthetic oligonucleotide
ggugucuaaauuucucucu

SEQ ID NO: 1657588 - RNA, 19 nt, Artificial Sequence
  Description of Artificial Sequence: Synthetic oligonucleotide
acgaugcaacagcgauacc

SEQ ID NO: 1657589 - RNA, 19 nt, Artificial Sequence
  Description of Artificial Sequence: Synthetic oligonucleotide
agggcuucacccggcuccc

SEQ ID NO: 1657590 - RNA, 19 nt, Artificial Sequence
  Description of Artificial Sequence: Synthetic oligonucleotide
ggaauugcccacaaaauau

SEQ ID NO: 1657591 - RNA, 19 nt, Artificial Sequence
  Description of Artificial Sequence: Synthetic oligonucleotide
ggugggcaccuacagggag

SEQ ID NO: 1657592 - RNA, 19 nt, Artificial Sequence
  Description of Artificial Sequence: Synthetic oligonucleotide
cuaccagaaggcccuccug

SEQ ID NO: 1657593 - RNA, 19 nt, Artificial Sequence
  Description of Artificial Sequence: Synthetic oligonucleotide
gguucgagcuccugcuuug

SEQ ID NO: 1657594 - RNA, 19 nt, Artificial Sequence
  Description of Artificial Sequence: Synthetic oligonucleotide
uggccgccggcguaguacc

SEQ ID NO: 1657595 - RNA, 19 nt, Artificial Sequence
  Description of Artificial Sequence: Synthetic oligonucleotide
ccuagaacucaacugccuc

SEQ ID NO: 1657596 - RNA, 19 nt, Artificial Sequence
  Description of Artificial Sequence: Synthetic oligonucleotide
uacccaggcgaguggucgc

SEQ ID NO: 1657597 - RNA, 19 nt, Artificial Sequence
  Description of Artificial Sequence: Synthetic oligonucleotide
ggcaccuacagggagagaa

SEQ ID NO: 1657598 - RNA, 19 nt, Artificial Sequence
  Description of Artificial Sequence: Synthetic oligonucleotide
uuguguguguguguuuguu

SEQ ID NO: 1657599 - RNA, 19 nt, Artificial Sequence
  Description of Artificial Sequence: Synthetic oligonucleotide
guaggagggccacagaauu

SEQ ID NO: 1657600 - RNA, 19 nt, Artificial Sequence
  Description of Artificial Sequence: Synthetic oligonucleotide
guguaggcgguccgagagc

SEQ ID NO: 1657601 - RNA, 19 nt, Artificial Sequence
  Description of Artificial Sequence: Synthetic oligonucleotide
acggacugggaugcagggg

SEQ ID NO: 1657602 - RNA, 19 nt, Artificial Sequence
  Description of Artificial Sequence: Synthetic oligonucleotide
gaaguuguguguguguguu

SEQ ID NO: 1657603 - RNA, 19 nt, Artificial Sequence
  Description of Artificial Sequence: Synthetic oligonucleotide
uggccaaaacacugugcua

SEQ ID NO: 1657604 - RNA, 19 nt, Artificial Sequence
  Description of Artificial Sequence: Synthetic oligonucleotide
cuacagggagagaaguugu

SEQ ID NO: 1657605 - RNA, 19 nt, Artificial Sequence
  Description of Artificial Sequence: Synthetic oligonucleotide
ugcgucgauucuggaacca

SEQ ID NO: 1657606 - RNA, 19 nt, Artificial Sequence
  Description of Artificial Sequence: Synthetic oligonucleotide
gcuaucuggcagucuccgg

SEQ ID NO: 1657607 - RNA, 19 nt, Artificial Sequence
  Description of Artificial Sequence: Synthetic oligonucleotide
uuucucgccucuggccgcc

SEQ ID NO: 1657608 - RNA, 19 nt, Artificial Sequence
  Description of Artificial Sequence: Synthetic oligonucleotide
gucuccggagggcuucacc

SEQ ID NO: 1657609 - RNA, 19 nt, Artificial Sequence
  Description of Artificial Sequence: Synthetic oligonucleotide
ggggucgacauaguuugag

SEQ ID NO: 1657610 - RNA, 19 nt, Artificial Sequence
  Description of Artificial Sequence: Synthetic oligonucleotide
cacggugcacggcgcacgg

SEQ ID NO: 1657611 - RNA, 19 nt, Artificial Sequence
  Description of Artificial Sequence: Synthetic oligonucleotide
gguaaucgcucugugaaua

SEQ ID NO: 1657612 - RNA, 19 nt, Artificial Sequence
  Description of Artificial Sequence: Synthetic oligonucleotide
caggcgaguggucgcuggg

SEQ ID NO: 1657613 - RNA, 19 nt, Artificial Sequence
  Description of Artificial Sequence: Synthetic oligonucleotide
ggccgcguagcgcugcacg

SEQ ID NO: 1657614 - RNA, 19 nt, Artificial Sequence
  Description of Artificial Sequence: Synthetic oligonucleotide
aacccacguugugaagacu

SEQ ID NO: 1657615 - RNA, 19 nt, Artificial Sequence
  Description of Artificial Sequence: Synthetic oligonucleotide
gguccuccggcugugcccg

SEQ ID NO: 1657616 - RNA, 19 nt, Artificial Sequence
  Description of Artificial Sequence: Synthetic oligonucleotide
uggggucgacauaguuuga

SEQ ID NO: 1657617 - RNA, 19 nt, Artificial Sequence
  Description of Artificial Sequence: Synthetic oligonucleotide
acccggcucccuauugucg

SEQ ID NO: 1657618 - RNA, 19 nt, Artificial Sequence
  Description of Artificial Sequence: Synthetic oligonucleotide
uggucgcuggguagguaau

SEQ ID NO: 1657619 - RNA, 19 nt, Artificial Sequence
  Description of Artificial Sequence: Synthetic oligonucleotide
ucgggcuggaagccgcuuu

SEQ ID NO: 1657620 - RNA, 19 nt, Artificial Sequence
  Description of Artificial Sequence: Synthetic oligonucleotide
agauuccgaaacccacguu

SEQ ID NO: 1657621 - RNA, 19 nt, Artificial Sequence
  Description of Artificial Sequence: Synthetic oligonucleotide
caacugccucccacccugg

SEQ ID NO: 1657622 - RNA, 19 nt, Artificial Sequence
  Description of Artificial Sequence: Synthetic oligonucleotide
acccgagcggaucuuggua

SEQ ID NO: 1657623 - RNA, 19 nt, Artificial Sequence
  Description of Artificial Sequence: Synthetic oligonucleotide
gacgggcucuuugcacgcg

SEQ ID NO: 1657624 - RNA, 19 nt, Artificial Sequence
  Description of Artificial Sequence: Synthetic oligonucleotide
caacgggagaaggcucugc

SEQ ID NO: 1657625 - RNA, 19 nt, Artificial Sequence
  Description of Artificial Sequence: Synthetic oligonucleotide
cuggccgccggcguaguac

SEQ ID NO: 1657626 - RNA, 19 nt, Artificial Sequence
  Description of Artificial Sequence: Synthetic oligonucleotide
cuggguagguaaucgcucu

SEQ ID NO: 1657627 - RNA, 19 nt, Artificial Sequence
  Description of Artificial Sequence: Synthetic oligonucleotide
gugcuaucuggcagucucc

SEQ ID NO: 1657628 - RNA, 19 nt, Artificial Sequence
  Description of Artificial Sequence: Synthetic oligonucleotide
cagauuccgaaacccacgu

SEQ ID NO: 1657629 - RNA, 19 nt, Artificial Sequence
  Description of Artificial Sequence: Synthetic oligonucleotide
cccgccggaguaauugggg

SEQ ID NO: 1657630 - RNA, 19 nt, Artificial Sequence
  Description of Artificial Sequence: Synthetic oligonucleotide
ucucugcguuuauuccuua

SEQ ID NO: 1657631 - RNA, 19 nt, Artificial Sequence
  Description of Artificial Sequence: Synthetic oligonucleotide
ggcgaucuccacccuccgg

SEQ ID NO: 1657632 - RNA, 19 nt, Artificial Sequence
  Description of Artificial Sequence: Synthetic oligonucleotide
cgaugcaacagcgauacca

SEQ ID NO: 1657633 - RNA, 19 nt, Artificial Sequence
  Description of Artificial Sequence: Synthetic oligonucleotide
ccucccauaccccgaauuc

SEQ ID NO: 1657634 - RNA, 19 nt, Artificial Sequence
  Description of Artificial Sequence: Synthetic oligonucleotide
cuucggugcucgcggcccc

SEQ ID NO: 1657635 - RNA, 19 nt, Artificial Sequence
  Description of Artificial Sequence: Synthetic oligonucleotide
gccggcguaguacccaggc

SEQ ID NO: 1657636 - RNA, 19 nt, Artificial Sequence
  Description of Artificial Sequence: Synthetic oligonucleotide
gccgcguagcgcugcacgg

SEQ ID NO: 1657637 - RNA, 19 nt, Artificial Sequence
  Description of Artificial Sequence: Synthetic oligonucleotide
gaaggccgccucgggcugg

SEQ ID NO: 1657638 - RNA, 19 nt, Artificial Sequence
  Description of Artificial Sequence: Synthetic oligonucleotide
ggcguaguacccaggcgag

SEQ ID NO: 1657639 - RNA, 19 nt, Artificial Sequence
  Description of Artificial Sequence: Synthetic oligonucleotide
uacuccucgcacggaggga

SEQ ID NO: 1657640 - RNA, 19 nt, Artificial Sequence
  Description of Artificial Sequence: Synthetic oligonucleotide
ggucgacauaguuugaguu

SEQ ID NO: 1657641 - RNA, 19 nt, Artificial Sequence
  Description of Artificial Sequence: Synthetic oligonucleotide
cccacguugugaagacugc

SEQ ID NO: 1657642 - RNA, 19 nt, Artificial Sequence
  Description of Artificial Sequence: Synthetic oligonucleotide
gcgaguggucgcuggguag

SEQ ID NO: 1657643 - RNA, 19 nt, Artificial Sequence
  Description of Artificial Sequence: Synthetic oligonucleotide
ugcacggugcacggcgcac

SEQ ID NO: 1657644 - RNA, 19 nt, Artificial Sequence
  Description of Artificial Sequence: Synthetic oligonucleotide
cucccuauugucguuucua

SEQ ID NO: 1657645 - RNA, 19 nt, Artificial Sequence
  Description of Artificial Sequence: Synthetic oligonucleotide
cguggccaaaacacugugc

SEQ ID NO: 1657646 - RNA, 19 nt, Artificial Sequence
  Description of Artificial Sequence: Synthetic oligonucleotide
gcuggguagguaaucgcuc

SEQ ID NO: 1657647 - RNA, 19 nt, Artificial Sequence
  Description of Artificial Sequence: Synthetic oligonucleotide
gcaccuacagggagagaag

SEQ ID NO: 1657648 - RNA, 19 nt, Artificial Sequence
  Description of Artificial Sequence: Synthetic oligonucleotide
cacggcgccccggaaggcc

SEQ ID NO: 1657649 - RNA, 19 nt, Artificial Sequence
  Description of Artificial Sequence: Synthetic oligonucleotide
gggcucuuugcacgcggag

SEQ ID NO: 1657650 - RNA, 19 nt, Artificial Sequence
  Description of Artificial Sequence: Synthetic oligonucleotide
ccacguugugaagacugcc

SEQ ID NO: 1657651 - RNA, 19 nt, Artificial Sequence
  Description of Artificial Sequence: Synthetic oligonucleotide
guuguguguguguguuugu

SEQ ID NO: 1657652 - RNA, 19 nt, Artificial Sequence
  Description of Artificial Sequence: Synthetic oligonucleotide
cccauaccccgaauucccc

SEQ ID NO: 1657653 - RNA, 19 nt, Artificial Sequence
  Description of Artificial Sequence: Synthetic oligonucleotide
guuuguuaccguggccaaa

SEQ ID NO: 1657654 - RNA, 19 nt, Artificial Sequence
  Description of Artificial Sequence: Synthetic oligonucleotide
acggugcacggcgcacggc

SEQ ID NO: 1657655 - RNA, 19 nt, Artificial Sequence
  Description of Artificial Sequence: Synthetic oligonucleotide
cgauaccaacgggagaagg

SEQ ID NO: 1657656 - RNA, 19 nt, Artificial Sequence
  Description of Artificial Sequence: Synthetic oligonucleotide
ccaggcgaguggucgcugg

SEQ ID NO: 1657657 - RNA, 19 nt, Artificial Sequence
  Description of Artificial Sequence: Synthetic oligonucleotide
gccauuaauuucugggaau

SEQ ID NO: 1657658 - RNA, 19 nt, Artificial Sequence
  Description of Artificial Sequence: Synthetic oligonucleotide
gggacggacugggaugcag

SEQ ID NO: 1657659 - RNA, 19 nt, Artificial Sequence
  Description of Artificial Sequence: Synthetic oligonucleotide
cagcgauaccaacgggaga

SEQ ID NO: 1657660 - RNA, 19 nt, Artificial Sequence
  Description of Artificial Sequence: Synthetic oligonucleotide
ccgaaacccacguugugaa

SEQ ID NO: 1657661 - RNA, 19 nt, Artificial Sequence
  Description of Artificial Sequence: Synthetic oligonucleotide
cacgcggagugggacggac

SEQ ID NO: 1657662 - RNA, 19 nt, Artificial Sequence
  Description of Artificial Sequence: Synthetic oligonucleotide
ugggcaacuuguggucuuu

SEQ ID NO: 1657663 - RNA, 19 nt, Artificial Sequence
  Description of Artificial Sequence: Synthetic oligonucleotide
cggugcacggcgcacggcg

SEQ ID NO: 1657664 - RNA, 19 nt, Artificial Sequence
  Description of Artificial Sequence: Synthetic oligonucleotide
gaauuccccuucggugcuc

SEQ ID NO: 1657665 - RNA, 19 nt, Artificial Sequence
  Description of Artificial Sequence: Synthetic oligonucleotide
gcgucgauucuggaaccag

SEQ ID NO: 1657666 - RNA, 19 nt, Artificial Sequence
  Description of Artificial Sequence: Synthetic oligonucleotide
ggaaggccgccucgggcug

SEQ ID NO: 1657667 - RNA, 19 nt, Artificial Sequence
  Description of Artificial Sequence: Synthetic oligonucleotide
ccccgccggaguaauuggg

SEQ ID NO: 1657668 - RNA, 19 nt, Artificial Sequence
  Description of Artificial Sequence: Synthetic oligonucleotide
gggucgacauaguuugagu

SEQ ID NO: 1657669 - RNA, 19 nt, Artificial Sequence
  Description of Artificial Sequence: Synthetic oligonucleotide
cgaguggucgcuggguagg

SEQ ID NO: 1657670 - RNA, 19 nt, Artificial Sequence
  Description of Artificial Sequence: Synthetic oligonucleotide
ccggcguaguacccaggcg

SEQ ID NO: 1657671 - RNA, 19 nt, Artificial Sequence
  Description of Artificial Sequence: Synthetic oligonucleotide
gcacggugcacggcgcacg

SEQ ID NO: 1657672 - RNA, 19 nt, Artificial Sequence
  Description of Artificial Sequence: Synthetic oligonucleotide
ccauuaggccggccagggg

SEQ ID NO: 1657673 - RNA, 19 nt, Artificial Sequence
  Description of Artificial Sequence: Synthetic oligonucleotide
cauaccccgaauuccccuu

SEQ ID NO: 1657674 - RNA, 19 nt, Artificial Sequence
  Description of Artificial Sequence: Synthetic oligonucleotide
ggugccacccgagcggauc

SEQ ID NO: 1657675 - RNA, 19 nt, Artificial Sequence
  Description of Artificial Sequence: Synthetic oligonucleotide
cccaacggugggcaccuac

SEQ ID NO: 1657676 - RNA, 19 nt, Artificial Sequence
  Description of Artificial Sequence: Synthetic oligonucleotide
cggcguaguacccaggcga

SEQ ID NO: 1657677 - RNA, 19 nt, Artificial Sequence
  Description of Artificial Sequence: Synthetic oligonucleotide
ccgcuuucucgccucuggc

SEQ ID NO: 1657678 - RNA, 19 nt, Artificial Sequence
  Description of Artificial Sequence: Synthetic oligonucleotide
gcgauaccaacgggagaag

SEQ ID NO: 1657679 - RNA, 19 nt, Artificial Sequence
  Description of Artificial Sequence: Synthetic oligonucleotide
guagcgcugcacggugcac

SEQ ID NO: 1657680 - RNA, 19 nt, Artificial Sequence
  Description of Artificial Sequence: Synthetic oligonucleotide
gaaggcccuccuggguguc

SEQ ID NO: 1657681 - RNA, 19 nt, Artificial Sequence
  Description of Artificial Sequence: Synthetic oligonucleotide
gagggccacagaauuucau

SEQ ID NO: 1657682 - RNA, 19 nt, Artificial Sequence
  Description of Artificial Sequence: Synthetic oligonucleotide
ggcgguccgagagcgcuug

SEQ ID NO: 1657683 - RNA, 19 nt, Artificial Sequence
  Description of Artificial Sequence: Synthetic oligonucleotide
cucugcguuuauuccuuau

SEQ ID NO: 1657684 - RNA, 19 nt, Artificial Sequence
  Description of Artificial Sequence: Synthetic oligonucleotide
aggccgcguagcgcugcac

SEQ ID NO: 1657685 - RNA, 19 nt, Artificial Sequence
  Description of Artificial Sequence: Synthetic oligonucleotide
ugggacggacugggaugca

SEQ ID NO: 1657686 - RNA, 19 nt, Artificial Sequence
  Description of Artificial Sequence: Synthetic oligonucleotide
ggcgaguggucgcugggua

SEQ ID NO: 1657687 - RNA, 19 nt, Artificial Sequence
  Description of Artificial Sequence: Synthetic oligonucleotide
ccagguucgagcuccugcu

SEQ ID NO: 1657688 - RNA, 19 nt, Artificial Sequence
  Description of Artificial Sequence: Synthetic oligonucleotide
ggugcacggcgcacggcgc

SEQ ID NO: 1657689 - RNA, 19 nt, Artificial Sequence
  Description of Artificial Sequence: Synthetic oligonucleotide
cugcacggugcacggcgca

SEQ ID NO: 1657690 - RNA, 19 nt, Artificial Sequence
  Description of Artificial Sequence: Synthetic oligonucleotide
cgucgauucuggaaccaga

SEQ ID NO: 1657691 - RNA, 19 nt, Artificial Sequence
  Description of Artificial Sequence: Synthetic oligonucleotide
ggucgcuggguagguaauc

SEQ ID NO: 1657692 - RNA, 19 nt, Artificial Sequence
  Description of Artificial Sequence: Synthetic oligonucleotide
ggagggccacagaauuuca

SEQ ID NO: 1657693 - RNA, 19 nt, Artificial Sequence
  Description of Artificial Sequence: Synthetic oligonucleotide
gcugcacggugcacggcgc

SEQ ID NO: 1657694 - RNA, 19 nt, Artificial Sequence
  Description of Artificial Sequence: Synthetic oligonucleotide
acccucccauaccccgaau

SEQ ID NO: 1657695 - RNA, 19 nt, Artificial Sequence
  Description of Artificial Sequence: Synthetic oligonucleotide
ggggagcacuagagugagg

SEQ ID NO: 1657696 - RNA, 19 nt, Artificial Sequence
  Description of Artificial Sequence: Synthetic oligonucleotide
cgacgggcucuuugcacgc

SEQ ID NO: 1657697 - RNA, 19 nt, Artificial Sequence
  Description of Artificial Sequence: Synthetic oligonucleotide
cacccgagcggaucuuggu

SEQ ID NO: 1657698 - RNA, 19 nt, Artificial Sequence
  Description of Artificial Sequence: Synthetic oligonucleotide
gccacccgagcggaucuug

SEQ ID NO: 1657699 - RNA, 19 nt, Artificial Sequence
  Description of Artificial Sequence: Synthetic oligonucleotide
cgcguagcgcugcacggug

SEQ ID NO: 1657700 - RNA, 19 nt, Artificial Sequence
  Description of Artificial Sequence: Synthetic oligonucleotide
ccaacgggagaaggcucug

SEQ ID NO: 1657701 - RNA, 19 nt, Artificial Sequence
  Description of Artificial Sequence: Synthetic oligonucleotide
ggacccucccauaccccga

SEQ ID NO: 1657702 - RNA, 19 nt, Artificial Sequence
  Description of Artificial Sequence: Synthetic oligonucleotide
gcgguccgagagcgcuugg

SEQ ID NO: 1657703 - RNA, 19 nt, Artificial Sequence
  Description of Artificial Sequence: Synthetic oligonucleotide
ccauaccccgaauuccccu

SEQ ID NO: 1657704 - RNA, 19 nt, Artificial Sequence
  Description of Artificial Sequence: Synthetic oligonucleotide
ccccuucggugcucgcggc

SEQ ID NO: 1657705 - RNA, 19 nt, Artificial Sequence
  Description of Artificial Sequence: Synthetic oligonucleotide
gggguagacgacgggcucu

SEQ ID NO: 1657706 - RNA, 19 nt, Artificial Sequence
  Description of Artificial Sequence: Synthetic oligonucleotide
gccggaguaauugggguuu

SEQ ID NO: 1657707 - RNA, 19 nt, Artificial Sequence
  Description of Artificial Sequence: Synthetic oligonucleotide
cccgagcggaucuugguau

SEQ ID NO: 1657708 - RNA, 19 nt, Artificial Sequence
  Description of Artificial Sequence: Synthetic oligonucleotide
ugccacccgagcggaucuu

SEQ ID NO: 1657709 - RNA, 19 nt, Artificial Sequence
  Description of Artificial Sequence: Synthetic oligonucleotide
cgggcuggaagccgcuuuc

SEQ ID NO: 1657710 - RNA, 19 nt, Artificial Sequence
  Description of Artificial Sequence: Synthetic oligonucleotide
cagucuccggagggcuuca

SEQ ID NO: 1657711 - RNA, 19 nt, Artificial Sequence
  Description of Artificial Sequence: Synthetic oligonucleotide
cgcuggguagguaaucgcu

SEQ ID NO: 1657712 - RNA, 19 nt, Artificial Sequence
  Description of Artificial Sequence: Synthetic oligonucleotide
ggauuggccagaagacauu

SEQ ID NO: 1657713 - RNA, 19 nt, Artificial Sequence
  Description of Artificial Sequence: Synthetic oligonucleotide
ccuccugggugucuaaauu

SEQ ID NO: 1657714 - RNA, 19 nt, Artificial Sequence
  Description of Artificial Sequence: Synthetic oligonucleotide
cccggcucccuauugucgu

SEQ ID NO: 1657715 - RNA, 19 nt, Artificial Sequence
  Description of Artificial Sequence: Synthetic oligonucleotide
cggaguaauugggguuuac

SEQ ID NO: 1657716 - RNA, 19 nt, Artificial Sequence
  Description of Artificial Sequence: Synthetic oligonucleotide
cuucacccggcucccuauu

SEQ ID NO: 1657717 - RNA, 19 nt, Artificial Sequence
  Description of Artificial Sequence: Synthetic oligonucleotide
gccgccggcguaguaccca

SEQ ID NO: 1657718 - RNA, 19 nt, Artificial Sequence
  Description of Artificial Sequence: Synthetic oligonucleotide
ccccgaauuccccuucggu

SEQ ID NO: 1657719 - RNA, 19 nt, Artificial Sequence
  Description of Artificial Sequence: Synthetic oligonucleotide
ccgccggaguaauuggggu

SEQ ID NO: 1657720 - RNA, 19 nt, Artificial Sequence
  Description of Artificial Sequence: Synthetic oligonucleotide
aggcgguccgagagcgcuu

SEQ ID NO: 1657721 - RNA, 19 nt, Artificial Sequence
  Description of Artificial Sequence: Synthetic oligonucleotide
ggccgccggcguaguaccc

SEQ ID NO: 1657722 - RNA, 19 nt, Artificial Sequence
  Description of Artificial Sequence: Synthetic oligonucleotide
cgccggcguaguacccagg

SEQ ID NO: 1657723 - RNA, 19 nt, Artificial Sequence
  Description of Artificial Sequence: Synthetic oligonucleotide
cgaauuccccuucggugcu

SEQ ID NO: 1657724 - RNA, 19 nt, Artificial Sequence
  Description of Artificial Sequence: Synthetic oligonucleotide
gcacggcgccccggaaggc

SEQ ID NO: 1657725 - RNA, 19 nt, Artificial Sequence
  Description of Artificial Sequence: Synthetic oligonucleotide
cccaggcgaguggucgcug

SEQ ID NO: 1657726 - RNA, 19 nt, Artificial Sequence
  Description of Artificial Sequence: Synthetic oligonucleotide
ggcgccccggaaggccgcc

SEQ ID NO: 1657727 - RNA, 19 nt, Artificial Sequence
  Description of Artificial Sequence: Synthetic oligonucleotide
cgggcucuuugcacgcgga

SEQ ID NO: 1657728 - RNA, 19 nt, Artificial Sequence
  Description of Artificial Sequence: Synthetic oligonucleotide
cccucccauaccccgaauu

SEQ ID NO: 1657729 - RNA, 19 nt, Artificial Sequence
  Description of Artificial Sequence: Synthetic oligonucleotide
cgccgcgucagguagcgau

SEQ ID NO: 1657730 - RNA, 19 nt, Artificial Sequence
  Description of Artificial Sequence: Synthetic oligonucleotide
ggguagacgacgggcucuu

SEQ ID NO: 1657731 - RNA, 19 nt, Artificial Sequence
  Description of Artificial Sequence: Synthetic oligonucleotide
gcgcugcacggugcacggc

SEQ ID NO: 1657732 - RNA, 19 nt, Artificial Sequence
  Description of Artificial Sequence: Synthetic oligonucleotide
ggcgcacggcgccccggaa

SEQ ID NO: 1657733 - RNA, 19 nt, Artificial Sequence
  Description of Artificial Sequence: Synthetic oligonucleotide
ccggaguaauugggguuua

SEQ ID NO: 1657734 - RNA, 19 nt, Artificial Sequence
  Description of Artificial Sequence: Synthetic oligonucleotide
gggcaccuacagggagaga

SEQ ID NO: 1657735 - RNA, 19 nt, Artificial Sequence
  Description of Artificial Sequence: Synthetic oligonucleotide
cgacauaguuugaguugau

SEQ ID NO: 1657736 - RNA, 19 nt, Artificial Sequence
  Description of Artificial Sequence: Synthetic oligonucleotide
ccgagcggaucuugguauu

SEQ ID NO: 1657737 - RNA, 19 nt, Artificial Sequence
  Description of Artificial Sequence: Synthetic oligonucleotide
cucgggcuggaagccgcuu

SEQ ID NO: 1657738 - RNA, 19 nt, Artificial Sequence
  Description of Artificial Sequence: Synthetic oligonucleotide
gcacgcggagugggacgga

SEQ ID NO: 1657739 - RNA, 19 nt, Artificial Sequence
  Description of Artificial Sequence: Synthetic oligonucleotide
cgccggaguaauugggguu

SEQ ID NO: 1657740 - RNA, 19 nt, Artificial Sequence
  Description of Artificial Sequence: Synthetic oligonucleotide
cucuggccgccggcguagu

SEQ ID NO: 1657741 - RNA, 19 nt, Artificial Sequence
  Description of Artificial Sequence: Synthetic oligonucleotide
gguagacgacgggcucuuu

SEQ ID NO: 1657742 - RNA, 19 nt, Artificial Sequence
  Description of Artificial Sequence: Synthetic oligonucleotide
ccgcguagcgcugcacggu

SEQ ID NO: 1657743 - RNA, 19 nt, Artificial Sequence
  Description of Artificial Sequence: Synthetic oligonucleotide
ggucucgggcaggccgcgu

SEQ ID NO: 1657744 - RNA, 19 nt, Artificial Sequence
  Description of Artificial Sequence: Synthetic oligonucleotide
ccggcucccuauugucguu

SEQ ID NO: 1657745 - RNA, 19 nt, Artificial Sequence
  Description of Artificial Sequence: Synthetic oligonucleotide
cggcucccuauugucguuu

SEQ ID NO: 1657746 - RNA, 19 nt, Artificial Sequence
  Description of Artificial Sequence: Synthetic oligonucleotide
cggugccacccgagcggau

SEQ ID NO: 1657747 - RNA, 19 nt, Artificial Sequence
  Description of Artificial Sequence: Synthetic oligonucleotide
ccccaacggugggcaccua

SEQ ID NO: 1657748 - RNA, 19 nt, Artificial Sequence
  Description of Artificial Sequence: Synthetic oligonucleotide
aagagaaacauccagaugu

SEQ ID NO: 1657749 - RNA, 19 nt, Artificial Sequence
  Description of Artificial Sequence: Synthetic oligonucleotide
aguagagauacacaaagac

SEQ ID NO: 1657750 - RNA, 19 nt, Artificial Sequence
  Description of Artificial Sequence: Synthetic oligonucleotide
uaaguagagauacacaaag

SEQ ID NO: 1657751 - RNA, 19 nt, Artificial Sequence
  Description of Artificial Sequence: Synthetic oligonucleotide
agagcauuguuccagacac

SEQ ID NO: 1657752 - RNA, 19 nt, Artificial Sequence
  Description of Artificial Sequence: Synthetic oligonucleotide
aaaucuaacaaaagacacc

SEQ ID NO: 1657753 - RNA, 19 nt, Artificial Sequence
  Description of Artificial Sequence: Synthetic oligonucleotide
acuacuaguuuauacgugg

SEQ ID NO: 1657754 - RNA, 19 nt, Artificial Sequence
  Description of Artificial Sequence: Synthetic oligonucleotide
aaucuaacaaaagacacca

SEQ ID NO: 1657755 - RNA, 19 nt, Artificial Sequence
  Description of Artificial Sequence: Synthetic oligonucleotide
acugcuaggaacucuacgg

SEQ ID NO: 1657756 - RNA, 19 nt, Artificial Sequence
  Description of Artificial Sequence: Synthetic oligonucleotide
uuaauaaguagagauacac

SEQ ID NO: 1657757 - RNA, 19 nt, Artificial Sequence
  Description of Artificial Sequence: Synthetic oligonucleotide
agacaagcuacacuaauuc

SEQ ID NO: 1657758 - RNA, 19 nt, Artificial Sequence
  Description of Artificial Sequence: Synthetic oligonucleotide
uggaguuuggcacugcuag

SEQ ID NO: 1657759 - RNA, 19 nt, Artificial Sequence
  Description of Artificial Sequence: Synthetic oligonucleotide
aguguuucaaguaucuggc

SEQ ID NO: 1657760 - RNA, 19 nt, Artificial Sequence
  Description of Artificial Sequence: Synthetic oligonucleotide
agaaaaucauccuggcugg

SEQ ID NO: 1657761 - RNA, 19 nt, Artificial Sequence
  Description of Artificial Sequence: Synthetic oligonucleotide
uagugggagaaaaucaucc

SEQ ID NO: 1657762 - RNA, 19 nt, Artificial Sequence
  Description of Artificial Sequence: Synthetic oligonucleotide
gaaacauccagaugucucc

SEQ ID NO: 1657763 - RNA, 19 nt, Artificial Sequence
  Description of Artificial Sequence: Synthetic oligonucleotide
uccuaagagaaacauccag

SEQ ID NO: 1657764 - RNA, 19 nt, Artificial Sequence
  Description of Artificial Sequence: Synthetic oligonucleotide
uacgagucuucaauggugg

SEQ ID NO: 1657765 - RNA, 19 nt, Artificial Sequence
  Description of Artificial Sequence: Synthetic oligonucleotide
aaguagccauggcauagcc

SEQ ID NO: 1657766 - RNA, 19 nt, Artificial Sequence
  Description of Artificial Sequence: Synthetic oligonucleotide
aaacaaucauuacucaaau

SEQ ID NO: 1657767 - RNA, 19 nt, Artificial Sequence
  Description of Artificial Sequence: Synthetic oligonucleotide
aguaucuggcauucuaggg

SEQ ID NO: 1657768 - RNA, 19 nt, Artificial Sequence
  Description of Artificial Sequence: Synthetic oligonucleotide
cauaaaaggcucaagcauc

SEQ ID NO: 1657769 - RNA, 19 nt, Artificial Sequence
  Description of Artificial Sequence: Synthetic oligonucleotide
uccaaaauggcccacugau

SEQ ID NO: 1657770 - RNA, 19 nt, Artificial Sequence
  Description of Artificial Sequence: Synthetic oligonucleotide
uacuaguuuauacgugggg

SEQ ID NO: 1657771 - RNA, 19 nt, Artificial Sequence
  Description of Artificial Sequence: Synthetic oligonucleotide
ugucuggucucgaagcugg

SEQ ID NO: 1657772 - RNA, 19 nt, Artificial Sequence
  Description of Artificial Sequence: Synthetic oligonucleotide
ucagugacggaguacacga

SEQ ID NO: 1657773 - RNA, 19 nt, Artificial Sequence
  Description of Artificial Sequence: Synthetic oligonucleotide
acauaaaaggcucaagcau

SEQ ID NO: 1657774 - RNA, 19 nt, Artificial Sequence
  Description of Artificial Sequence: Synthetic oligonucleotide
uggcuaaggagagaaaagg

SEQ ID NO: 1657775 - RNA, 19 nt, Artificial Sequence
  Description of Artificial Sequence: Synthetic oligonucleotide
cuaguuuauacguggggag

SEQ ID NO: 1657776 - RNA, 19 nt, Artificial Sequence
  Description of Artificial Sequence: Synthetic oligonucleotide
gugacuacagucaaaggag

SEQ ID NO: 1657777 - RNA, 19 nt, Artificial Sequence
  Description of Artificial Sequence: Synthetic oligonucleotide
acaagcuacacuaauucag

SEQ ID NO: 1657778 - RNA, 19 nt, Artificial Sequence
  Description of Artificial Sequence: Synthetic oligonucleotide
uggcauagccccauucugg

SEQ ID NO: 1657779 - RNA, 19 nt, Artificial Sequence
  Description of Artificial Sequence: Synthetic oligonucleotide
guggcgagcgacuucaccg

SEQ ID NO: 1657780 - RNA, 19 nt, Artificial Sequence
  Description of Artificial Sequence: Synthetic oligonucleotide
ucguuucuugacaauggcc

SEQ ID NO: 1657781 - RNA, 19 nt, Artificial Sequence
  Description of Artificial Sequence: Synthetic oligonucleotide
aaauggcccacugauuguc

SEQ ID NO: 1657782 - RNA, 19 nt, Artificial Sequence
  Description of Artificial Sequence: Synthetic oligonucleotide
aucacucucguuucuugac

SEQ ID NO: 1657783 - RNA, 19 nt, Artificial Sequence
  Description of Artificial Sequence: Synthetic oligonucleotide
uguagcaggucugaggggc

SEQ ID NO: 1657784 - RNA, 19 nt, Artificial Sequence
  Description of Artificial Sequence: Synthetic oligonucleotide
agguacgagucuucaaugg

SEQ ID NO: 1657785 - RNA, 19 nt, Artificial Sequence
  Description of Artificial Sequence: Synthetic oligonucleotide
aagacgucuaggcaucacu

SEQ ID NO: 1657786 - RNA, 19 nt, Artificial Sequence
  Description of Artificial Sequence: Synthetic oligonucleotide
caaguaucuggcauucuag

SEQ ID NO: 1657787 - RNA, 19 nt, Artificial Sequence
  Description of Artificial Sequence: Synthetic oligonucleotide
gaagggaccccucuguggc

SEQ ID NO: 1657788 - RNA, 19 nt, Artificial Sequence
  Description of Artificial Sequence: Synthetic oligonucleotide
uacacuaauucagucaggu

SEQ ID NO: 1657789 - RNA, 19 nt, Artificial Sequence
  Description of Artificial Sequence: Synthetic oligonucleotide
ucugccaaagccucgggcu

SEQ ID NO: 1657790 - RNA, 19 nt, Artificial Sequence
  Description of Artificial Sequence: Synthetic oligonucleotide
uaguuuauacguggggagg

SEQ ID NO: 1657791 - RNA, 19 nt, Artificial Sequence
  Description of Artificial Sequence: Synthetic oligonucleotide
cuccguaugcuucagguac

SEQ ID NO: 1657792 - RNA, 19 nt, Artificial Sequence
  Description of Artificial Sequence: Synthetic oligonucleotide
caauguggagucuccaccc

SEQ ID NO: 1657793 - RNA, 19 nt, Artificial Sequence
  Description of Artificial Sequence: Synthetic oligonucleotide
agcuacacuaauucaguca

SEQ ID NO: 1657794 - RNA, 19 nt, Artificial Sequence
  Description of Artificial Sequence: Synthetic oligonucleotide
cuacuaguuuauacguggg

SEQ ID NO: 1657795 - RNA, 19 nt, Artificial Sequence
  Description of Artificial Sequence: Synthetic oligonucleotide
ugauugucaaucuccguau

SEQ ID NO: 1657796 - RNA, 19 nt, Artificial Sequence
  Description of Artificial Sequence: Synthetic oligonucleotide
ucaaucuccguaugcuuca

SEQ ID NO: 1657797 - RNA, 19 nt, Artificial Sequence
  Description of Artificial Sequence: Synthetic oligonucleotide
agugacggaguacacgaug

SEQ ID NO: 1657798 - RNA, 19 nt, Artificial Sequence
  Description of Artificial Sequence: Synthetic oligonucleotide
uccguaugcuucagguacg

SEQ ID NO: 1657799 - RNA, 19 nt, Artificial Sequence
  Description of Artificial Sequence: Synthetic oligonucleotide
ugggguuagagcugccagg

SEQ ID NO: 1657800 - RNA, 19 nt, Artificial Sequence
  Description of Artificial Sequence: Synthetic oligonucleotide
cuggcuaaggagagaaaag

SEQ ID NO: 1657801 - RNA, 19 nt, Artificial Sequence
  Description of Artificial Sequence: Synthetic oligonucleotide
cuagaacauccaaaauggc

SEQ ID NO: 1657802 - RNA, 19 nt, Artificial Sequence
  Description of Artificial Sequence: Synthetic oligonucleotide
ucuccagugcgcauguacu

SEQ ID NO: 1657803 - RNA, 19 nt, Artificial Sequence
  Description of Artificial Sequence: Synthetic oligonucleotide
agucuguuugagcgguggc

SEQ ID NO: 1657804 - RNA, 19 nt, Artificial Sequence
  Description of Artificial Sequence: Synthetic oligonucleotide
gugggagaaaaucauccug

SEQ ID NO: 1657805 - RNA, 19 nt, Artificial Sequence
  Description of Artificial Sequence: Synthetic oligonucleotide
uuauacguggggagguugu

SEQ ID NO: 1657806 - RNA, 19 nt, Artificial Sequence
  Description of Artificial Sequence: Synthetic oligonucleotide
guuggugggucacaucucc

SEQ ID NO: 1657807 - RNA, 19 nt, Artificial Sequence
  Description of Artificial Sequence: Synthetic oligonucleotide
agcgacuucaccgcacacc

SEQ ID NO: 1657808 - RNA, 19 nt, Artificial Sequence
  Description of Artificial Sequence: Synthetic oligonucleotide
ucuguuugagcgguggcca

SEQ ID NO: 1657809 - RNA, 19 nt, Artificial Sequence
  Description of Artificial Sequence: Synthetic oligonucleotide
ucacucucguuucuugaca

SEQ ID NO: 1657810 - RNA, 19 nt, Artificial Sequence
  Description of Artificial Sequence: Synthetic oligonucleotide
uuuauacguggggagguug

SEQ ID NO: 1657811 - RNA, 19 nt, Artificial Sequence
  Description of Artificial Sequence: Synthetic oligonucleotide
gugucuagaacauccaaaa

SEQ ID NO: 1657812 - RNA, 19 nt, Artificial Sequence
  Description of Artificial Sequence: Synthetic oligonucleotide
aagggaccccucuguggcc

SEQ ID NO: 1657813 - RNA, 19 nt, Artificial Sequence
  Description of Artificial Sequence: Synthetic oligonucleotide
uggccaccggcuaauacug

SEQ ID NO: 1657814 - RNA, 19 nt, Artificial Sequence
  Description of Artificial Sequence: Synthetic oligonucleotide
cucaagcaucaucaagacg

SEQ ID NO: 1657815 - RNA, 19 nt, Artificial Sequence
  Description of Artificial Sequence: Synthetic oligonucleotide
acaccguuacgcuggggcg

SEQ ID NO: 1657816 - RNA, 19 nt, Artificial Sequence
  Description of Artificial Sequence: Synthetic oligonucleotide
cucguuucuugacaauggc

SEQ ID NO: 1657817 - RNA, 19 nt, Artificial Sequence
  Description of Artificial Sequence: Synthetic oligonucleotide
ggugggacacuccuaagag

SEQ ID NO: 1657818 - RNA, 19 nt, Artificial Sequence
  Description of Artificial Sequence: Synthetic oligonucleotide
aacagaccucuuuaauaaa

SEQ ID NO: 1657819 - RNA, 19 nt, Artificial Sequence
  Description of Artificial Sequence: Synthetic oligonucleotide
ugucuagaacauccaaaau

SEQ ID NO: 1657820 - RNA, 19 nt, Artificial Sequence
  Description of Artificial Sequence: Synthetic oligonucleotide
uucaccgcacaccguuacg

SEQ ID NO: 1657821 - RNA, 19 nt, Artificial Sequence
  Description of Artificial Sequence: Synthetic oligonucleotide
agaggugggacacuccuaa

SEQ ID NO: 1657822 - RNA, 19 nt, Artificial Sequence
  Description of Artificial Sequence: Synthetic oligonucleotide
aggcucaagcaucaucaag

SEQ ID NO: 1657823 - RNA, 19 nt, Artificial Sequence
  Description of Artificial Sequence: Synthetic oligonucleotide
agagaaacauccagauguc

SEQ ID NO: 1657824 - RNA, 19 nt, Artificial Sequence
  Description of Artificial Sequence: Synthetic oligonucleotide
cacuacuaguuuauacgug

SEQ ID NO: 1657825 - RNA, 19 nt, Artificial Sequence
  Description of Artificial Sequence: Synthetic oligonucleotide
cacugcuaggaacucuacg

SEQ ID NO: 1657826 - RNA, 19 nt, Artificial Sequence
  Description of Artificial Sequence: Synthetic oligonucleotide
cuacacuaauucagucagg

SEQ ID NO: 1657827 - RNA, 19 nt, Artificial Sequence
  Description of Artificial Sequence: Synthetic oligonucleotide
auuaauaaguagagauaca

SEQ ID NO: 1657828 - RNA, 19 nt, Artificial Sequence
  Description of Artificial Sequence: Synthetic oligonucleotide
gagucuguuugagcggugg

SEQ ID NO: 1657829 - RNA, 19 nt, Artificial Sequence
  Description of Artificial Sequence: Synthetic oligonucleotide
ggucacaucuccuggcagg

SEQ ID NO: 1657830 - RNA, 19 nt, Artificial Sequence
  Description of Artificial Sequence: Synthetic oligonucleotide
gcgacuucaccgcacaccg

SEQ ID NO: 1657831 - RNA, 19 nt, Artificial Sequence
  Description of Artificial Sequence: Synthetic oligonucleotide
aggaagccgucuccagugc

SEQ ID NO: 1657832 - RNA, 19 nt, Artificial Sequence
  Description of Artificial Sequence: Synthetic oligonucleotide
aguacacgaugaggaagcc

SEQ ID NO: 1657833 - RNA, 19 nt, Artificial Sequence
  Description of Artificial Sequence: Synthetic oligonucleotide
aucaagacgucuaggcauc

SEQ ID NO: 1657834 - RNA, 19 nt, Artificial Sequence
  Description of Artificial Sequence: Synthetic oligonucleotide
aguuuauacguggggaggu

SEQ ID NO: 1657835 - RNA, 19 nt, Artificial Sequence
  Description of Artificial Sequence: Synthetic oligonucleotide
aggugggacacuccuaaga

SEQ ID NO: 1657836 - RNA, 19 nt, Artificial Sequence
  Description of Artificial Sequence: Synthetic oligonucleotide
gacacuagcggagaggucu

SEQ ID NO: 1657837 - RNA, 19 nt, Artificial Sequence
  Description of Artificial Sequence: Synthetic oligonucleotide
acuagcggagaggucugcc

SEQ ID NO: 1657838 - RNA, 19 nt, Artificial Sequence
  Description of Artificial Sequence: Synthetic oligonucleotide
ccacugauugucaaucucc

SEQ ID NO: 1657839 - RNA, 19 nt, Artificial Sequence
  Description of Artificial Sequence: Synthetic oligonucleotide
cugauugucaaucuccgua

SEQ ID NO: 1657840 - RNA, 19 nt, Artificial Sequence
  Description of Artificial Sequence: Synthetic oligonucleotide
guuuggcacugcuaggaac

SEQ ID NO: 1657841 - RNA, 19 nt, Artificial Sequence
  Description of Artificial Sequence: Synthetic oligonucleotide
uuaguguagcaggucugag

SEQ ID NO: 1657842 - RNA, 19 nt, Artificial Sequence
  Description of Artificial Sequence: Synthetic oligonucleotide
cagguacgagucuucaaug

SEQ ID NO: 1657843 - RNA, 19 nt, Artificial Sequence
  Description of Artificial Sequence: Synthetic oligonucleotide
cucucguuucuugacaaug

SEQ ID NO: 1657844 - RNA, 19 nt, Artificial Sequence
  Description of Artificial Sequence: Synthetic oligonucleotide
ucaccgcacaccguuacgc

SEQ ID NO: 1657845 - RNA, 19 nt, Artificial Sequence
  Description of Artificial Sequence: Synthetic oligonucleotide
guaugcuucagguacgagu

SEQ ID NO: 1657846 - RNA, 19 nt, Artificial Sequence
  Description of Artificial Sequence: Synthetic oligonucleotide
gaaguagccauggcauagc

SEQ ID NO: 1657847 - RNA, 19 nt, Artificial Sequence
  Description of Artificial Sequence: Synthetic oligonucleotide
cugaacuccuccugcccgg

SEQ ID NO: 1657848 - RNA, 19 nt, Artificial Sequence
  Description of Artificial Sequence: Synthetic oligonucleotide
acagccagcgucgggcgcc

SEQ ID NO: 1657849 - RNA, 19 nt, Artificial Sequence
  Description of Artificial Sequence: Synthetic oligonucleotide
aggcaagacaagcuacacu

SEQ ID NO: 1657850 - RNA, 19 nt, Artificial Sequence
  Description of Artificial Sequence: Synthetic oligonucleotide
aaggagccuaaaaggaggu

SEQ ID NO: 1657851 - RNA, 19 nt, Artificial Sequence
  Description of Artificial Sequence: Synthetic oligonucleotide
cauccaaaauggcccacug

SEQ ID NO: 1657852 - RNA, 19 nt, Artificial Sequence
  Description of Artificial Sequence: Synthetic oligonucleotide
aggaacucuacgguuaaaa

SEQ ID NO: 1657853 - RNA, 19 nt, Artificial Sequence
  Description of Artificial Sequence: Synthetic oligonucleotide
ugggaacagaccucuuuaa

SEQ ID NO: 1657854 - RNA, 19 nt, Artificial Sequence
  Description of Artificial Sequence: Synthetic oligonucleotide
auccaaaauggcccacuga

SEQ ID NO: 1657855 - RNA, 19 nt, Artificial Sequence
  Description of Artificial Sequence: Synthetic oligonucleotide
guuacgcuggggcggcugg

SEQ ID NO: 1657856 - RNA, 19 nt, Artificial Sequence
  Description of Artificial Sequence: Synthetic oligonucleotide
aaggcucaagcaucaucaa

SEQ ID NO: 1657857 - RNA, 19 nt, Artificial Sequence
  Description of Artificial Sequence: Synthetic oligonucleotide
gucuccagugcgcauguac

SEQ ID NO: 1657858 - RNA, 19 nt, Artificial Sequence
  Description of Artificial Sequence: Synthetic oligonucleotide
agcauuguuccagacacua

SEQ ID NO: 1657859 - RNA, 19 nt, Artificial Sequence
  Description of Artificial Sequence: Synthetic oligonucleotide
ugcuaggaacucuacgguu

SEQ ID NO: 1657860 - RNA, 19 nt, Artificial Sequence
  Description of Artificial Sequence: Synthetic oligonucleotide
gucaaucuccguaugcuuc

SEQ ID NO: 1657861 - RNA, 19 nt, Artificial Sequence
  Description of Artificial Sequence: Synthetic oligonucleotide
gucuguuugagcgguggcc

SEQ ID NO: 1657862 - RNA, 19 nt, Artificial Sequence
  Description of Artificial Sequence: Synthetic oligonucleotide
cugaggucgguggcgagcg

SEQ ID NO: 1657863 - RNA, 19 nt, Artificial Sequence
  Description of Artificial Sequence: Synthetic oligonucleotide
cugcugguagucacacccg

SEQ ID NO: 1657864 - RNA, 19 nt, Artificial Sequence
  Description of Artificial Sequence: Synthetic oligonucleotide
uaauucagucagguacucu

SEQ ID NO: 1657865 - RNA, 19 nt, Artificial Sequence
  Description of Artificial Sequence: Synthetic oligonucleotide
uagcggagaggucugccaa

SEQ ID NO: 1657866 - RNA, 19 nt, Artificial Sequence
  Description of Artificial Sequence: Synthetic oligonucleotide
cauggcuugucuggucucg

SEQ ID NO: 1657867 - RNA, 19 nt, Artificial Sequence
  Description of Artificial Sequence: Synthetic oligonucleotide
gagcgggccacaccgccgg

SEQ ID NO: 1657868 - RNA, 19 nt, Artificial Sequence
  Description of Artificial Sequence: Synthetic oligonucleotide
caagagcauuguuccagac

SEQ ID NO: 1657869 - RNA, 19 nt, Artificial Sequence
  Description of Artificial Sequence: Synthetic oligonucleotide
ugcuaaaggaagggacccc

SEQ ID NO: 1657870 - RNA, 19 nt, Artificial Sequence
  Description of Artificial Sequence: Synthetic oligonucleotide
cuaggcaucacucucguuu

SEQ ID NO: 1657871 - RNA, 19 nt, Artificial Sequence
  Description of Artificial Sequence: Synthetic oligonucleotide
gaagccgucuccagugcgc

SEQ ID NO: 1657872 - RNA, 19 nt, Artificial Sequence
  Description of Artificial Sequence: Synthetic oligonucleotide
ggaguuuggcacugcuagg

SEQ ID NO: 1657873 - RNA, 19 nt, Artificial Sequence
  Description of Artificial Sequence: Synthetic oligonucleotide
caucaagacgucuaggcau

SEQ ID NO: 1657874 - RNA, 19 nt, Artificial Sequence
  Description of Artificial Sequence: Synthetic oligonucleotide
cuccagugcgcauguacug

SEQ ID NO: 1657875 - RNA, 19 nt, Artificial Sequence
  Description of Artificial Sequence: Synthetic oligonucleotide
ugacaauggccaccggcua

SEQ ID NO: 1657876 - RNA, 19 nt, Artificial Sequence
  Description of Artificial Sequence: Synthetic oligonucleotide
cuucaccgcacaccguuac

SEQ ID NO: 1657877 - RNA, 19 nt, Artificial Sequence
  Description of Artificial Sequence: Synthetic oligonucleotide
cuggcauucuagggaaacc

SEQ ID NO: 1657878 - RNA, 19 nt, Artificial Sequence
  Description of Artificial Sequence: Synthetic oligonucleotide
gucugccaaagccucgggc

SEQ ID NO: 1657879 - RNA, 19 nt, Artificial Sequence
  Description of Artificial Sequence: Synthetic oligonucleotide
ucuccguaugcuucaggua

SEQ ID NO: 1657880 - RNA, 19 nt, Artificial Sequence
  Description of Artificial Sequence: Synthetic oligonucleotide
aguuuggcacugcuaggaa

SEQ ID NO: 1657881 - RNA, 19 nt, Artificial Sequence
  Description of Artificial Sequence: Synthetic oligonucleotide
uuggugggucacaucuccu

SEQ ID NO: 1657882 - RNA, 19 nt, Artificial Sequence
  Description of Artificial Sequence: Synthetic oligonucleotide
accguuacgcuggggcggc

SEQ ID NO: 1657883 - RNA, 19 nt, Artificial Sequence
  Description of Artificial Sequence: Synthetic oligonucleotide
gaggugggacacuccuaag

SEQ ID NO: 1657884 - RNA, 19 nt, Artificial Sequence
  Description of Artificial Sequence: Synthetic oligonucleotide
auucagucagguacucuca

SEQ ID NO: 1657885 - RNA, 19 nt, Artificial Sequence
  Description of Artificial Sequence: Synthetic oligonucleotide
guuugagcgguggccaggc

SEQ ID NO: 1657886 - RNA, 19 nt, Artificial Sequence
  Description of Artificial Sequence: Synthetic oligonucleotide
caccggcuaauacugucac

SEQ ID NO: 1657887 - RNA, 19 nt, Artificial Sequence
  Description of Artificial Sequence: Synthetic oligonucleotide
ggaagccgucuccagugcg

SEQ ID NO: 1657888 - RNA, 19 nt, Artificial Sequence
  Description of Artificial Sequence: Synthetic oligonucleotide
acacuaauucagucaggua

SEQ ID NO: 1657889 - RNA, 19 nt, Artificial Sequence
  Description of Artificial Sequence: Synthetic oligonucleotide
ucccaccacuacuaguuua

SEQ ID NO: 1657890 - RNA, 19 nt, Artificial Sequence
  Description of Artificial Sequence: Synthetic oligonucleotide
gcucaagcaucaucaagac

SEQ ID NO: 1657891 - RNA, 19 nt, Artificial Sequence
  Description of Artificial Sequence: Synthetic oligonucleotide
ggcuugucuggucucgaag

SEQ ID NO: 1657892 - RNA, 19 nt, Artificial Sequence
  Description of Artificial Sequence: Synthetic oligonucleotide
gggaacaggcggcugguug

SEQ ID NO: 1657893 - RNA, 19 nt, Artificial Sequence
  Description of Artificial Sequence: Synthetic oligonucleotide
caccguuacgcuggggcgg

SEQ ID NO: 1657894 - RNA, 19 nt, Artificial Sequence
  Description of Artificial Sequence: Synthetic oligonucleotide
uuugagcgguggccaggcc

SEQ ID NO: 1657895 - RNA, 19 nt, Artificial Sequence
  Description of Artificial Sequence: Synthetic oligonucleotide
aggaaguagccauggcaua

SEQ ID NO: 1657896 - RNA, 19 nt, Artificial Sequence
  Description of Artificial Sequence: Synthetic oligonucleotide
gugggacacuccuaagaga

SEQ ID NO: 1657897 - RNA, 19 nt, Artificial Sequence
  Description of Artificial Sequence: Synthetic oligonucleotide
cuagcggagaggucugcca

SEQ ID NO: 1657898 - RNA, 19 nt, Artificial Sequence
  Description of Artificial Sequence: Synthetic oligonucleotide
auacguggggagguuguca

SEQ ID NO: 1657899 - RNA, 19 nt, Artificial Sequence
  Description of Artificial Sequence: Synthetic oligonucleotide
ccggcuaauacugucacuc

SEQ ID NO: 1657900 - RNA, 19 nt, Artificial Sequence
  Description of Artificial Sequence: Synthetic oligonucleotide
aagccgucuccagugcgca

SEQ ID NO: 1657901 - RNA, 19 nt, Artificial Sequence
  Description of Artificial Sequence: Synthetic oligonucleotide
caggcaagacaagcuacac

SEQ ID NO: 1657902 - RNA, 19 nt, Artificial Sequence
  Description of Artificial Sequence: Synthetic oligonucleotide
aaccccggggugacuacag

SEQ ID NO: 1657903 - RNA, 19 nt, Artificial Sequence
  Description of Artificial Sequence: Synthetic oligonucleotide
uagucacacccgggcagcg

SEQ ID NO: 1657904 - RNA, 19 nt, Artificial Sequence
  Description of Artificial Sequence: Synthetic oligonucleotide
ucaagacgucuaggcauca

SEQ ID NO: 1657905 - RNA, 19 nt, Artificial Sequence
  Description of Artificial Sequence: Synthetic oligonucleotide
gaacaggcggcugguugcc

SEQ ID NO: 1657906 - RNA, 19 nt, Artificial Sequence
  Description of Artificial Sequence: Synthetic oligonucleotide
cacucucguuucuugacaa

SEQ ID NO: 1657907 - RNA, 19 nt, Artificial Sequence
  Description of Artificial Sequence: Synthetic oligonucleotide
gacuucaccgcacaccguu

SEQ ID NO: 1657908 - RNA, 19 nt, Artificial Sequence
  Description of Artificial Sequence: Synthetic oligonucleotide
uauacguggggagguuguc

SEQ ID NO: 1657909 - RNA, 19 nt, Artificial Sequence
  Description of Artificial Sequence: Synthetic oligonucleotide
uggugagggcgcucuugcc

SEQ ID NO: 1657910 - RNA, 19 nt, Artificial Sequence
  Description of Artificial Sequence: Synthetic oligonucleotide
gcaucacucucguuucuug

SEQ ID NO: 1657911 - RNA, 19 nt, Artificial Sequence
  Description of Artificial Sequence: Synthetic oligonucleotide
gcccacaccuuccaucucc

SEQ ID NO: 1657912 - RNA, 19 nt, Artificial Sequence
  Description of Artificial Sequence: Synthetic oligonucleotide
cauggcauagccccauucu

SEQ ID NO: 1657913 - RNA, 19 nt, Artificial Sequence
  Description of Artificial Sequence: Synthetic oligonucleotide
ggguuggugggucacaucu

SEQ ID NO: 1657914 - RNA, 19 nt, Artificial Sequence
  Description of Artificial Sequence: Synthetic oligonucleotide
agccuaaaaggagguguca

SEQ ID NO: 1657915 - RNA, 19 nt, Artificial Sequence
  Description of Artificial Sequence: Synthetic oligonucleotide
ccgcacaccguuacgcugg

SEQ ID NO: 1657916 - RNA, 19 nt, Artificial Sequence
  Description of Artificial Sequence: Synthetic oligonucleotide
accggcuaauacugucacu

SEQ ID NO: 1657917 - RNA, 19 nt, Artificial Sequence
  Description of Artificial Sequence: Synthetic oligonucleotide
gaggucgguggcgagcgac

SEQ ID NO: 1657918 - RNA, 19 nt, Artificial Sequence
  Description of Artificial Sequence: Synthetic oligonucleotide
gugucagaguagugggaga

SEQ ID NO: 1657919 - RNA, 19 nt, Artificial Sequence
  Description of Artificial Sequence: Synthetic oligonucleotide
ccacgcacagccagcgucg

SEQ ID NO: 1657920 - RNA, 19 nt, Artificial Sequence
  Description of Artificial Sequence: Synthetic oligonucleotide
agggcgggagaaacuguuc

SEQ ID NO: 1657921 - RNA, 19 nt, Artificial Sequence
  Description of Artificial Sequence: Synthetic oligonucleotide
ggagccuaaaaggaggugu

SEQ ID NO: 1657922 - RNA, 19 nt, Artificial Sequence
  Description of Artificial Sequence: Synthetic oligonucleotide
aggagccuaaaaggaggug

SEQ ID NO: 1657923 - RNA, 19 nt, Artificial Sequence
  Description of Artificial Sequence: Synthetic oligonucleotide
gguggcgagcgacuucacc

SEQ ID NO: 1657924 - RNA, 19 nt, Artificial Sequence
  Description of Artificial Sequence: Synthetic oligonucleotide
cacaccgccggccacaccu

SEQ ID NO: 1657925 - RNA, 19 nt, Artificial Sequence
  Description of Artificial Sequence: Synthetic oligonucleotide
caaucuccguaugcuucag

SEQ ID NO: 1657926 - RNA, 19 nt, Artificial Sequence
  Description of Artificial Sequence: Synthetic oligonucleotide
cuggucucgaagcuggccu

SEQ ID NO: 1657927 - RNA, 19 nt, Artificial Sequence
  Description of Artificial Sequence: Synthetic oligonucleotide
aggcaucacucucguuucu

SEQ ID NO: 1657928 - RNA, 19 nt, Artificial Sequence
  Description of Artificial Sequence: Synthetic oligonucleotide
acacgaugaggaagccguc

SEQ ID NO: 1657929 - RNA, 19 nt, Artificial Sequence
  Description of Artificial Sequence: Synthetic oligonucleotide
uggcccacugauugucaau

SEQ ID NO: 1657930 - RNA, 19 nt, Artificial Sequence
  Description of Artificial Sequence: Synthetic oligonucleotide
agcggagaggucugccaaa

SEQ ID NO: 1657931 - RNA, 19 nt, Artificial Sequence
  Description of Artificial Sequence: Synthetic oligonucleotide
uguucccgcauggcacuga

SEQ ID NO: 1657932 - RNA, 19 nt, Artificial Sequence
  Description of Artificial Sequence: Synthetic oligonucleotide
caagacgucuaggcaucac

SEQ ID NO: 1657933 - RNA, 19 nt, Artificial Sequence
  Description of Artificial Sequence: Synthetic oligonucleotide
gcgggagaaacuguucaug

SEQ ID NO: 1657934 - RNA, 19 nt, Artificial Sequence
  Description of Artificial Sequence: Synthetic oligonucleotide
gcugguagucacacccggg

SEQ ID NO: 1657935 - RNA, 19 nt, Artificial Sequence
  Description of Artificial Sequence: Synthetic oligonucleotide
gagcgacuucaccgcacac

SEQ ID NO: 1657936 - RNA, 19 nt, Artificial Sequence
  Description of Artificial Sequence: Synthetic oligonucleotide
acacuagcggagaggucug

SEQ ID NO: 1657937 - RNA, 19 nt, Artificial Sequence
  Description of Artificial Sequence: Synthetic oligonucleotide
ucuaggcaucacucucguu

SEQ ID NO: 1657938 - RNA, 19 nt, Artificial Sequence
  Description of Artificial Sequence: Synthetic oligonucleotide
gguuagagcugccaggguu

SEQ ID NO: 1657939 - RNA, 19 nt, Artificial Sequence
  Description of Artificial Sequence: Synthetic oligonucleotide
acguggggagguugucacu

SEQ ID NO: 1657940 - RNA, 19 nt, Artificial Sequence
  Description of Artificial Sequence: Synthetic oligonucleotide
cuggaguuuggcacugcua

SEQ ID NO: 1657941 - RNA, 19 nt, Artificial Sequence
  Description of Artificial Sequence: Synthetic oligonucleotide
ggcgagcgagcgcggagcg

SEQ ID NO: 1657942 - RNA, 19 nt, Artificial Sequence
  Description of Artificial Sequence: Synthetic oligonucleotide
gcaagagccguggagaggu

SEQ ID NO: 1657943 - RNA, 19 nt, Artificial Sequence
  Description of Artificial Sequence: Synthetic oligonucleotide
aacaggcggcugguugcca

SEQ ID NO: 1657944 - RNA, 19 nt, Artificial Sequence
  Description of Artificial Sequence: Synthetic oligonucleotide
ccgggcagugggaacagac

SEQ ID NO: 1657945 - RNA, 19 nt, Artificial Sequence
  Description of Artificial Sequence: Synthetic oligonucleotide
ggagagaaaaggagccuaa

SEQ ID NO: 1657946 - RNA, 19 nt, Artificial Sequence
  Description of Artificial Sequence: Synthetic oligonucleotide
aggaaccccggggugacua

SEQ ID NO: 1657947 - RNA, 19 nt, Artificial Sequence
  Description of Artificial Sequence: Synthetic oligonucleotide
caagagccguggagaggug

SEQ ID NO: 1657948 - RNA, 19 nt, Artificial Sequence
  Description of Artificial Sequence: Synthetic oligonucleotide
gccaccggcuaauacuguc

SEQ ID NO: 1657949 - RNA, 19 nt, Artificial Sequence
  Description of Artificial Sequence: Synthetic oligonucleotide
gcaggcaagacaagcuaca

SEQ ID NO: 1657950 - RNA, 19 nt, Artificial Sequence
  Description of Artificial Sequence: Synthetic oligonucleotide
auggcuugucuggucucga

SEQ ID NO: 1657951 - RNA, 19 nt, Artificial Sequence
  Description of Artificial Sequence: Synthetic oligonucleotide
caccuuccaucucccacca

SEQ ID NO: 1657952 - RNA, 19 nt, Artificial Sequence
  Description of Artificial Sequence: Synthetic oligonucleotide
cacgcacagccagcgucgg

SEQ ID NO: 1657953 - RNA, 19 nt, Artificial Sequence
  Description of Artificial Sequence: Synthetic oligonucleotide
gaaccccggggugacuaca

SEQ ID NO: 1657954 - RNA, 19 nt, Artificial Sequence
  Description of Artificial Sequence: Synthetic oligonucleotide
cacuagcggagaggucugc

SEQ ID NO: 1657955 - RNA, 19 nt, Artificial Sequence
  Description of Artificial Sequence: Synthetic oligonucleotide
uuacgcuggggcggcuggu

SEQ ID NO: 1657956 - RNA, 19 nt, Artificial Sequence
  Description of Artificial Sequence: Synthetic oligonucleotide
accccggggugacuacagu

SEQ ID NO: 1657957 - RNA, 19 nt, Artificial Sequence
  Description of Artificial Sequence: Synthetic oligonucleotide
ucgggcgcccgggugcagc

SEQ ID NO: 1657958 - RNA, 19 nt, Artificial Sequence
  Description of Artificial Sequence: Synthetic oligonucleotide
ggagcgggccacaccgccg

SEQ ID NO: 1657959 - RNA, 19 nt, Artificial Sequence
  Description of Artificial Sequence: Synthetic oligonucleotide
gcuaaaggaagggaccccu

SEQ ID NO: 1657960 - RNA, 19 nt, Artificial Sequence
  Description of Artificial Sequence: Synthetic oligonucleotide
gcguugggguuagagcugc

SEQ ID NO: 1657961 - RNA, 19 nt, Artificial Sequence
  Description of Artificial Sequence: Synthetic oligonucleotide
ggcguugggguuagagcug

SEQ ID NO: 1657962 - RNA, 19 nt, Artificial Sequence
  Description of Artificial Sequence: Synthetic oligonucleotide
ggcacugcuaggaacucua

SEQ ID NO: 1657963 - RNA, 19 nt, Artificial Sequence
  Description of Artificial Sequence: Synthetic oligonucleotide
gccgucuccagugcgcaug

SEQ ID NO: 1657964 - RNA, 19 nt, Artificial Sequence
  Description of Artificial Sequence: Synthetic oligonucleotide
aggucgguggcgagcgacu

SEQ ID NO: 1657965 - RNA, 19 nt, Artificial Sequence
  Description of Artificial Sequence: Synthetic oligonucleotide
ccaccggcuaauacuguca

SEQ ID NO: 1657966 - RNA, 19 nt, Artificial Sequence
  Description of Artificial Sequence: Synthetic oligonucleotide
acaccgccggccacaccuc

SEQ ID NO: 1657967 - RNA, 19 nt, Artificial Sequence
  Description of Artificial Sequence: Synthetic oligonucleotide
ccccggggugacuacaguc

SEQ ID NO: 1657968 - RNA, 19 nt, Artificial Sequence
  Description of Artificial Sequence: Synthetic oligonucleotide
acuucaccgcacaccguua

SEQ ID NO: 1657969 - RNA, 19 nt, Artificial Sequence
  Description of Artificial Sequence: Synthetic oligonucleotide
gcggaggaaccccggggug

SEQ ID NO: 1657970 - RNA, 19 nt, Artificial Sequence
  Description of Artificial Sequence: Synthetic oligonucleotide
ggaaccccggggugacuac

SEQ ID NO: 1657971 - RNA, 19 nt, Artificial Sequence
  Description of Artificial Sequence: Synthetic oligonucleotide
gcccacugaggucgguggc

SEQ ID NO: 1657972 - RNA, 19 nt, Artificial Sequence
  Description of Artificial Sequence: Synthetic oligonucleotide
cacgaugaggaagccgucu

SEQ ID NO: 1657973 - RNA, 19 nt, Artificial Sequence
  Description of Artificial Sequence: Synthetic oligonucleotide
cacccaggugggcugcuaa

SEQ ID NO: 1657974 - RNA, 19 nt, Artificial Sequence
  Description of Artificial Sequence: Synthetic oligonucleotide
gccagcgucgggcgcccgg

SEQ ID NO: 1657975 - RNA, 19 nt, Artificial Sequence
  Description of Artificial Sequence: Synthetic oligonucleotide
guuuauacguggggagguu

SEQ ID NO: 1657976 - RNA, 19 nt, Artificial Sequence
  Description of Artificial Sequence: Synthetic oligonucleotide
ggcgagcgacuucaccgca

SEQ ID NO: 1657977 - RNA, 19 nt, Artificial Sequence
  Description of Artificial Sequence: Synthetic oligonucleotide
agccgucuccagugcgcau

SEQ ID NO: 1657978 - RNA, 19 nt, Artificial Sequence
  Description of Artificial Sequence: Synthetic oligonucleotide
caccgcacaccguuacgcu

SEQ ID NO: 1657979 - RNA, 19 nt, Artificial Sequence
  Description of Artificial Sequence: Synthetic oligonucleotide
cugaggggcguugggguua

SEQ ID NO: 1657980 - RNA, 19 nt, Artificial Sequence
  Description of Artificial Sequence: Synthetic oligonucleotide
gugcagcgcagcagggcga

SEQ ID NO: 1657981 - RNA, 19 nt, Artificial Sequence
  Description of Artificial Sequence: Synthetic oligonucleotide
ggcgggagaaacuguucau

SEQ ID NO: 1657982 - RNA, 19 nt, Artificial Sequence
  Description of Artificial Sequence: Synthetic oligonucleotide
ccagcgucgggcgcccggg

SEQ ID NO: 1657983 - RNA, 19 nt, Artificial Sequence
  Description of Artificial Sequence: Synthetic oligonucleotide
ccgggcagcggaggaaccc

SEQ ID NO: 1657984 - RNA, 19 nt, Artificial Sequence
  Description of Artificial Sequence: Synthetic oligonucleotide
accgggcagugggaacaga

SEQ ID NO: 1657985 - RNA, 19 nt, Artificial Sequence
  Description of Artificial Sequence: Synthetic oligonucleotide
gcgagcgacuucaccgcac

SEQ ID NO: 1657986 - RNA, 19 nt, Artificial Sequence
  Description of Artificial Sequence: Synthetic oligonucleotide
cguaugcuucagguacgag

SEQ ID NO: 1657987 - RNA, 19 nt, Artificial Sequence
  Description of Artificial Sequence: Synthetic oligonucleotide
cagugacggaguacacgau

SEQ ID NO: 1657988 - RNA, 19 nt, Artificial Sequence
  Description of Artificial Sequence: Synthetic oligonucleotide
cccgggcagcggaggaacc

SEQ ID NO: 1657989 - RNA, 19 nt, Artificial Sequence
  Description of Artificial Sequence: Synthetic oligonucleotide
ccaaaauggcccacugauu

SEQ ID NO: 1657990 - RNA, 19 nt, Artificial Sequence
  Description of Artificial Sequence: Synthetic oligonucleotide
cgagcgacuucaccgcaca

SEQ ID NO: 1657991 - RNA, 19 nt, Artificial Sequence
  Description of Artificial Sequence: Synthetic oligonucleotide
cggaguacacgaugaggaa

SEQ ID NO: 1657992 - RNA, 19 nt, Artificial Sequence
  Description of Artificial Sequence: Synthetic oligonucleotide
cgcacaccguuacgcuggg

SEQ ID NO: 1657993 - RNA, 19 nt, Artificial Sequence
  Description of Artificial Sequence: Synthetic oligonucleotide
ggcggcuggugggagcaga

SEQ ID NO: 1657994 - RNA, 19 nt, Artificial Sequence
  Description of Artificial Sequence: Synthetic oligonucleotide
ccggggugacuacagucaa

SEQ ID NO: 1657995 - RNA, 19 nt, Artificial Sequence
  Description of Artificial Sequence: Synthetic oligonucleotide
ccguaugcuucagguacga

SEQ ID NO: 1657996 - RNA, 19 nt, Artificial Sequence
  Description of Artificial Sequence: Synthetic oligonucleotide
cucccaccacuacuaguuu

SEQ ID NO: 1657997 - RNA, 19 nt, Artificial Sequence
  Description of Artificial Sequence: Synthetic oligonucleotide
gcagggcgagcgagcgcgg

SEQ ID NO: 1657998 - RNA, 19 nt, Artificial Sequence
  Description of Artificial Sequence: Synthetic oligonucleotide
caauggccaccggcuaaua

SEQ ID NO: 1657999 - RNA, 19 nt, Artificial Sequence
  Description of Artificial Sequence: Synthetic oligonucleotide
gcgcggagcgggccacacc

SEQ ID NO: 1658000 - RNA, 19 nt, Artificial Sequence
  Description of Artificial Sequence: Synthetic oligonucleotide
cguuacgcuggggcggcug

SEQ ID NO: 1658001 - RNA, 19 nt, Artificial Sequence
  Description of Artificial Sequence: Synthetic oligonucleotide
gccacaccgccggccacac

SEQ ID NO: 1658002 - RNA, 19 nt, Artificial Sequence
  Description of Artificial Sequence: Synthetic oligonucleotide
gagcgcggagcgggccaca

SEQ ID NO: 1658003 - RNA, 19 nt, Artificial Sequence
  Description of Artificial Sequence: Synthetic oligonucleotide
cacccgggcagcggaggaa

SEQ ID NO: 1658004 - RNA, 19 nt, Artificial Sequence
  Description of Artificial Sequence: Synthetic oligonucleotide
ggaccccucuguggcccug

SEQ ID NO: 1658005 - RNA, 19 nt, Artificial Sequence
  Description of Artificial Sequence: Synthetic oligonucleotide
gcggagcgggccacaccgc

SEQ ID NO: 1658006 - RNA, 19 nt, Artificial Sequence
  Description of Artificial Sequence: Synthetic oligonucleotide
gucgggcgcccgggugcag

SEQ ID NO: 1658007 - RNA, 19 nt, Artificial Sequence
  Description of Artificial Sequence: Synthetic oligonucleotide
ccagugcgcauguacuguu

SEQ ID NO: 1658008 - RNA, 19 nt, Artificial Sequence
  Description of Artificial Sequence: Synthetic oligonucleotide
cagugggaacagaccucuu

SEQ ID NO: 1658009 - RNA, 19 nt, Artificial Sequence
  Description of Artificial Sequence: Synthetic oligonucleotide
ccaccacuacuaguuuaua

SEQ ID NO: 1658010 - RNA, 19 nt, Artificial Sequence
  Description of Artificial Sequence: Synthetic oligonucleotide
ccgucuccagugcgcaugu

SEQ ID NO: 1658011 - RNA, 19 nt, Artificial Sequence
  Description of Artificial Sequence: Synthetic oligonucleotide
gaggggcguugggguuaga

SEQ ID NO: 1658012 - RNA, 19 nt, Artificial Sequence
  Description of Artificial Sequence: Synthetic oligonucleotide
ggucgguggcgagcgacuu

SEQ ID NO: 1658013 - RNA, 19 nt, Artificial Sequence
  Description of Artificial Sequence: Synthetic oligonucleotide
cgguggcgagcgacuucac

SEQ ID NO: 1658014 - RNA, 19 nt, Artificial Sequence
  Description of Artificial Sequence: Synthetic oligonucleotide
cgacuucaccgcacaccgu

SEQ ID NO: 1658015 - RNA, 19 nt, Artificial Sequence
  Description of Artificial Sequence: Synthetic oligonucleotide
cgucgggcgcccgggugca

SEQ ID NO: 1658016 - RNA, 19 nt, Artificial Sequence
  Description of Artificial Sequence: Synthetic oligonucleotide
ccguuacgcuggggcggcu

SEQ ID NO: 1658017 - RNA, 19 nt, Artificial Sequence
  Description of Artificial Sequence: Synthetic oligonucleotide
uuauuuugagcacaaaccg

SEQ ID NO: 1658018 - RNA, 19 nt, Artificial Sequence
  Description of Artificial Sequence: Synthetic oligonucleotide
gaugaagcgaguaagaugg

SEQ ID NO: 1658019 - RNA, 19 nt, Artificial Sequence
  Description of Artificial Sequence: Synthetic oligonucleotide
ucaaaguugucgauuaugg

SEQ ID NO: 1658020 - RNA, 19 nt, Artificial Sequence
  Description of Artificial Sequence: Synthetic oligonucleotide
aauaaguucgcauuuuccu

SEQ ID NO: 1658021 - RNA, 19 nt, Artificial Sequence
  Description of Artificial Sequence: Synthetic oligonucleotide
gagacauggaucuuuagag

SEQ ID NO: 1658022 - RNA, 19 nt, Artificial Sequence
  Description of Artificial Sequence: Synthetic oligonucleotide
uuagacuccauucuagaag

SEQ ID NO: 1658023 - RNA, 19 nt, Artificial Sequence
  Description of Artificial Sequence: Synthetic oligonucleotide
cauuaaugagugaauagcg

SEQ ID NO: 1658024 - RNA, 19 nt, Artificial Sequence
  Description of Artificial Sequence: Synthetic oligonucleotide
auaaaggucauuaagaagu

SEQ ID NO: 1658025 - RNA, 19 nt, Artificial Sequence
  Description of Artificial Sequence: Synthetic oligonucleotide
ugaauagcgaaacauccag

SEQ ID NO: 1658026 - RNA, 19 nt, Artificial Sequence
  Description of Artificial Sequence: Synthetic oligonucleotide
uguuauuuugagcacaaac

SEQ ID NO: 1658027 - RNA, 19 nt, Artificial Sequence
  Description of Artificial Sequence: Synthetic oligonucleotide
aucuaguaaugcuagggcc

SEQ ID NO: 1658028 - RNA, 19 nt, Artificial Sequence
  Description of Artificial Sequence: Synthetic oligonucleotide
gaucuuuagagcuugacca

SEQ ID NO: 1658029 - RNA, 19 nt, Artificial Sequence
  Description of Artificial Sequence: Synthetic oligonucleotide
aauugaugcugucauuuuc

SEQ ID NO: 1658030 - RNA, 19 nt, Artificial Sequence
  Description of Artificial Sequence: Synthetic oligonucleotide
aaugcaaauguugggaggg

SEQ ID NO: 1658031 - RNA, 19 nt, Artificial Sequence
  Description of Artificial Sequence: Synthetic oligonucleotide
aaaauauggccgcugacca

SEQ ID NO: 1658032 - RNA, 19 nt, Artificial Sequence
  Description of Artificial Sequence: Synthetic oligonucleotide
agugaauagcgaaacaucc

SEQ ID NO: 1658033 - RNA, 19 nt, Artificial Sequence
  Description of Artificial Sequence: Synthetic oligonucleotide
uuggccgaaaauauggccg

SEQ ID NO: 1658034 - RNA, 19 nt, Artificial Sequence
  Description of Artificial Sequence: Synthetic oligonucleotide
ugagaugcaauaaugcugu

SEQ ID NO: 1658035 - RNA, 19 nt, Artificial Sequence
  Description of Artificial Sequence: Synthetic oligonucleotide
uagagcuugaccauuagac

SEQ ID NO: 1658036 - RNA, 19 nt, Artificial Sequence
  Description of Artificial Sequence: Synthetic oligonucleotide
ucgauuauggcaucaaagc

SEQ ID NO: 1658037 - RNA, 19 nt, Artificial Sequence
  Description of Artificial Sequence: Synthetic oligonucleotide
ugcuuggccgaaaauaugg

SEQ ID NO: 1658038 - RNA, 19 nt, Artificial Sequence
  Description of Artificial Sequence: Synthetic oligonucleotide
ucauuaaugagugaauagc

SEQ ID NO: 1658039 - RNA, 19 nt, Artificial Sequence
  Description of Artificial Sequence: Synthetic oligonucleotide
uauccguaaccucagcugg

SEQ ID NO: 1658040 - RNA, 19 nt, Artificial Sequence
  Description of Artificial Sequence: Synthetic oligonucleotide
uggacaaucucuuugggac

SEQ ID NO: 1658041 - RNA, 19 nt, Artificial Sequence
  Description of Artificial Sequence: Synthetic oligonucleotide
accauuucggccuggaagg

SEQ ID NO: 1658042 - RNA, 19 nt, Artificial Sequence
  Description of Artificial Sequence: Synthetic oligonucleotide
caucuucagaccaacaacc

SEQ ID NO: 1658043 - RNA, 19 nt, Artificial Sequence
  Description of Artificial Sequence: Synthetic oligonucleotide
ucuaguaaugcuagggcca

SEQ ID NO: 1658044 - RNA, 19 nt, Artificial Sequence
  Description of Artificial Sequence: Synthetic oligonucleotide
aucauuaaugagugaauag

SEQ ID NO: 1658045 - RNA, 19 nt, Artificial Sequence
  Description of Artificial Sequence: Synthetic oligonucleotide
agacauggaucuuuagagc

SEQ ID NO: 1658046 - RNA, 19 nt, Artificial Sequence
  Description of Artificial Sequence: Synthetic oligonucleotide
cucuuugggacugagaucc

SEQ ID NO: 1658047 - RNA, 19 nt, Artificial Sequence
  Description of Artificial Sequence: Synthetic oligonucleotide
agguauaaaggucauuaag

SEQ ID NO: 1658048 - RNA, 19 nt, Artificial Sequence
  Description of Artificial Sequence: Synthetic oligonucleotide
uagacuccauucuagaagc

SEQ ID NO: 1658049 - RNA, 19 nt, Artificial Sequence
  Description of Artificial Sequence: Synthetic oligonucleotide
aguuguguccggucaaugc

SEQ ID NO: 1658050 - RNA, 19 nt, Artificial Sequence
  Description of Artificial Sequence: Synthetic oligonucleotide
uuaaugagugaauagcgaa

SEQ ID NO: 1658051 - RNA, 19 nt, Artificial Sequence
  Description of Artificial Sequence: Synthetic oligonucleotide
aagaucauuaaugagugaa

SEQ ID NO: 1658052 - RNA, 19 nt, Artificial Sequence
  Description of Artificial Sequence: Synthetic oligonucleotide
aaagcagguauaaagguca

SEQ ID NO: 1658053 - RNA, 19 nt, Artificial Sequence
  Description of Artificial Sequence: Synthetic oligonucleotide
uugaucggaagcuagccag

SEQ ID NO: 1658054 - RNA, 19 nt, Artificial Sequence
  Description of Artificial Sequence: Synthetic oligonucleotide
uccaugagaugcaauaaug

SEQ ID NO: 1658055 - RNA, 19 nt, Artificial Sequence
  Description of Artificial Sequence: Synthetic oligonucleotide
aaggaguucccacuaagca

SEQ ID NO: 1658056 - RNA, 19 nt, Artificial Sequence
  Description of Artificial Sequence: Synthetic oligonucleotide
gaaaauauggccgcugacc

SEQ ID NO: 1658057 - RNA, 19 nt, Artificial Sequence
  Description of Artificial Sequence: Synthetic oligonucleotide
cauauguuugaguucaaac

SEQ ID NO: 1658058 - RNA, 19 nt, Artificial Sequence
  Description of Artificial Sequence: Synthetic oligonucleotide
ugucuuguaagcucccacg

SEQ ID NO: 1658059 - RNA, 19 nt, Artificial Sequence
  Description of Artificial Sequence: Synthetic oligonucleotide
aaaccgacuauccaccaca

SEQ ID NO: 1658060 - RNA, 19 nt, Artificial Sequence
  Description of Artificial Sequence: Synthetic oligonucleotide
ugucggaugcgaaaggaag

SEQ ID NO: 1658061 - RNA, 19 nt, Artificial Sequence
  Description of Artificial Sequence: Synthetic oligonucleotide
acugcggagugcuauuucc

SEQ ID NO: 1658062 - RNA, 19 nt, Artificial Sequence
  Description of Artificial Sequence: Synthetic oligonucleotide
auuuccuguaggaugaugg

SEQ ID NO: 1658063 - RNA, 19 nt, Artificial Sequence
  Description of Artificial Sequence: Synthetic oligonucleotide
gaccauuucggccuggaag

SEQ ID NO: 1658064 - RNA, 19 nt, Artificial Sequence
  Description of Artificial Sequence: Synthetic oligonucleotide
agaauuugggucuggacgu

SEQ ID NO: 1658065 - RNA, 19 nt, Artificial Sequence
  Description of Artificial Sequence: Synthetic oligonucleotide
gauaccaccauauaggcau

SEQ ID NO: 1658066 - RNA, 19 nt, Artificial Sequence
  Description of Artificial Sequence: Synthetic oligonucleotide
gaugcaauaaugcuguugu

SEQ ID NO: 1658067 - RNA, 19 nt, Artificial Sequence
  Description of Artificial Sequence: Synthetic oligonucleotide
acaaugcaaauguugggag

SEQ ID NO: 1658068 - RNA, 19 nt, Artificial Sequence
  Description of Artificial Sequence: Synthetic oligonucleotide
cauaaucuguuauuuugag

SEQ ID NO: 1658069 - RNA, 19 nt, Artificial Sequence
  Description of Artificial Sequence: Synthetic oligonucleotide
aguaagaugguugaacuga

SEQ ID NO: 1658070 - RNA, 19 nt, Artificial Sequence
  Description of Artificial Sequence: Synthetic oligonucleotide
uggugcauggcguugacca

SEQ ID NO: 1658071 - RNA, 19 nt, Artificial Sequence
  Description of Artificial Sequence: Synthetic oligonucleotide
uguaggaugauggcaaagc

SEQ ID NO: 1658072 - RNA, 19 nt, Artificial Sequence
  Description of Artificial Sequence: Synthetic oligonucleotide
caauaaguucgcauuuucc

SEQ ID NO: 1658073 - RNA, 19 nt, Artificial Sequence
  Description of Artificial Sequence: Synthetic oligonucleotide
uuccaaguagaaaggacca

SEQ ID NO: 1658074 - RNA, 19 nt, Artificial Sequence
  Description of Artificial Sequence: Synthetic oligonucleotide
auuuucgaaccuucuggac

SEQ ID NO: 1658075 - RNA, 19 nt, Artificial Sequence
  Description of Artificial Sequence: Synthetic oligonucleotide
ucuaugcaggcuccgauga

SEQ ID NO: 1658076 - RNA, 19 nt, Artificial Sequence
  Description of Artificial Sequence: Synthetic oligonucleotide
uggaaggccagauaccacc

SEQ ID NO: 1658077 - RNA, 19 nt, Artificial Sequence
  Description of Artificial Sequence: Synthetic oligonucleotide
cuagaagcaguguucacug

SEQ ID NO: 1658078 - RNA, 19 nt, Artificial Sequence
  Description of Artificial Sequence: Synthetic oligonucleotide
aguugaucggaagcuagcc

SEQ ID NO: 1658079 - RNA, 19 nt, Artificial Sequence
  Description of Artificial Sequence: Synthetic oligonucleotide
acaagaucauuaaugagug

SEQ ID NO: 1658080 - RNA, 19 nt, Artificial Sequence
  Description of Artificial Sequence: Synthetic oligonucleotide
cauauaggcauccccaaug

SEQ ID NO: 1658081 - RNA, 19 nt, Artificial Sequence
  Description of Artificial Sequence: Synthetic oligonucleotide
uucgcauuuuccuuuuccc

SEQ ID NO: 1658082 - RNA, 19 nt, Artificial Sequence
  Description of Artificial Sequence: Synthetic oligonucleotide
aggaguucccacuaagcag

SEQ ID NO: 1658083 - RNA, 19 nt, Artificial Sequence
  Description of Artificial Sequence: Synthetic oligonucleotide
uccuaguaccagcagcagg

SEQ ID NO: 1658084 - RNA, 19 nt, Artificial Sequence
  Description of Artificial Sequence: Synthetic oligonucleotide
ugaccauuagacuccauuc

SEQ ID NO: 1658085 - RNA, 19 nt, Artificial Sequence
  Description of Artificial Sequence: Synthetic oligonucleotide
caucuaguaaugcuagggc

SEQ ID NO: 1658086 - RNA, 19 nt, Artificial Sequence
  Description of Artificial Sequence: Synthetic oligonucleotide
guugggagggucuaugcag

SEQ ID NO: 1658087 - RNA, 19 nt, Artificial Sequence
  Description of Artificial Sequence: Synthetic oligonucleotide
uggagaaaggccauacccu

SEQ ID NO: 1658088 - RNA, 19 nt, Artificial Sequence
  Description of Artificial Sequence: Synthetic oligonucleotide
ugggguagaauuugggucu

SEQ ID NO: 1658089 - RNA, 19 nt, Artificial Sequence
  Description of Artificial Sequence: Synthetic oligonucleotide
uagaaugucuuguaagcuc

SEQ ID NO: 1658090 - RNA, 19 nt, Artificial Sequence
  Description of Artificial Sequence: Synthetic oligonucleotide
uuuaacugcucugccacag

SEQ ID NO: 1658091 - RNA, 19 nt, Artificial Sequence
  Description of Artificial Sequence: Synthetic oligonucleotide
ugagugaauagcgaaacau

SEQ ID NO: 1658092 - RNA, 19 nt, Artificial Sequence
  Description of Artificial Sequence: Synthetic oligonucleotide
ucuuguaagcucccacgag

SEQ ID NO: 1658093 - RNA, 19 nt, Artificial Sequence
  Description of Artificial Sequence: Synthetic oligonucleotide
aggaagaaacagcaucuag

SEQ ID NO: 1658094 - RNA, 19 nt, Artificial Sequence
  Description of Artificial Sequence: Synthetic oligonucleotide
cauucuagaagcaguguuc

SEQ ID NO: 1658095 - RNA, 19 nt, Artificial Sequence
  Description of Artificial Sequence: Synthetic oligonucleotide
cacaaaccgacuauccacc

SEQ ID NO: 1658096 - RNA, 19 nt, Artificial Sequence
  Description of Artificial Sequence: Synthetic oligonucleotide
cacuaagcaguucuggggc

SEQ ID NO: 1658097 - RNA, 19 nt, Artificial Sequence
  Description of Artificial Sequence: Synthetic oligonucleotide
caguuggaggacuugagac

SEQ ID NO: 1658098 - RNA, 19 nt, Artificial Sequence
  Description of Artificial Sequence: Synthetic oligonucleotide
ucuguuauuuugagcacaa

SEQ ID NO: 1658099 - RNA, 19 nt, Artificial Sequence
  Description of Artificial Sequence: Synthetic oligonucleotide
gucgauuauggcaucaaag

SEQ ID NO: 1658100 - RNA, 19 nt, Artificial Sequence
  Description of Artificial Sequence: Synthetic oligonucleotide
augagaugcaauaaugcug

SEQ ID NO: 1658101 - RNA, 19 nt, Artificial Sequence
  Description of Artificial Sequence: Synthetic oligonucleotide
agcuagccagaccauaauc

SEQ ID NO: 1658102 - RNA, 19 nt, Artificial Sequence
  Description of Artificial Sequence: Synthetic oligonucleotide
cuauccguaaccucagcug

SEQ ID NO: 1658103 - RNA, 19 nt, Artificial Sequence
  Description of Artificial Sequence: Synthetic oligonucleotide
uagaaaggaccacugcgga

SEQ ID NO: 1658104 - RNA, 19 nt, Artificial Sequence
  Description of Artificial Sequence: Synthetic oligonucleotide
uuguaagcucccacgagga

SEQ ID NO: 1658105 - RNA, 19 nt, Artificial Sequence
  Description of Artificial Sequence: Synthetic oligonucleotide
agaugguugaacugaacau

SEQ ID NO: 1658106 - RNA, 19 nt, Artificial Sequence
  Description of Artificial Sequence: Synthetic oligonucleotide
gaugguugaacugaacauc

SEQ ID NO: 1658107 - RNA, 19 nt, Artificial Sequence
  Description of Artificial Sequence: Synthetic oligonucleotide
caaaguugucgauuauggc

SEQ ID NO: 1658108 - RNA, 19 nt, Artificial Sequence
  Description of Artificial Sequence: Synthetic oligonucleotide
caaguagaaaggaccacug

SEQ ID NO: 1658109 - RNA, 19 nt, Artificial Sequence
  Description of Artificial Sequence: Synthetic oligonucleotide
acugagauccaagccuucc

SEQ ID NO: 1658110 - RNA, 19 nt, Artificial Sequence
  Description of Artificial Sequence: Synthetic oligonucleotide
agagcuugaccauuagacu

SEQ ID NO: 1658111 - RNA, 19 nt, Artificial Sequence
  Description of Artificial Sequence: Synthetic oligonucleotide
uccccaaugguuuccaccu

SEQ ID NO: 1658112 - RNA, 19 nt, Artificial Sequence
  Description of Artificial Sequence: Synthetic oligonucleotide
uggccgcugaccauuuucg

SEQ ID NO: 1658113 - RNA, 19 nt, Artificial Sequence
  Description of Artificial Sequence: Synthetic oligonucleotide
uuuccuguaggaugauggc

SEQ ID NO: 1658114 - RNA, 19 nt, Artificial Sequence
  Description of Artificial Sequence: Synthetic oligonucleotide
cuuuucgcucuccuaagag

SEQ ID NO: 1658115 - RNA, 19 nt, Artificial Sequence
  Description of Artificial Sequence: Synthetic oligonucleotide
augauggcaaagcuguaca

SEQ ID NO: 1658116 - RNA, 19 nt, Artificial Sequence
  Description of Artificial Sequence: Synthetic oligonucleotide
augcgaaaggaagaaacag

SEQ ID NO: 1658117 - RNA, 19 nt, Artificial Sequence
  Description of Artificial Sequence: Synthetic oligonucleotide
aguuggaggacuugagacu

SEQ ID NO: 1658118 - RNA, 19 nt, Artificial Sequence
  Description of Artificial Sequence: Synthetic oligonucleotide
gacauggaucuuuagagcu

SEQ ID NO: 1658119 - RNA, 19 nt, Artificial Sequence
  Description of Artificial Sequence: Synthetic oligonucleotide
accauuuucgaaccuucug

SEQ ID NO: 1658120 - RNA, 19 nt, Artificial Sequence
  Description of Artificial Sequence: Synthetic oligonucleotide
aguguggacgccuauccgu

SEQ ID NO: 1658121 - RNA, 19 nt, Artificial Sequence
  Description of Artificial Sequence: Synthetic oligonucleotide
uggacguucugcugggucc

SEQ ID NO: 1658122 - RNA, 19 nt, Artificial Sequence
  Description of Artificial Sequence: Synthetic oligonucleotide
uccggucaaugcuuggccg

SEQ ID NO: 1658123 - RNA, 19 nt, Artificial Sequence
  Description of Artificial Sequence: Synthetic oligonucleotide
aauuucuggugcauggcgu

SEQ ID NO: 1658124 - RNA, 19 nt, Artificial Sequence
  Description of Artificial Sequence: Synthetic oligonucleotide
auucaguuguguccgguca

SEQ ID NO: 1658125 - RNA, 19 nt, Artificial Sequence
  Description of Artificial Sequence: Synthetic oligonucleotide
auuaaugagugaauagcga

SEQ ID NO: 1658126 - RNA, 19 nt, Artificial Sequence
  Description of Artificial Sequence: Synthetic oligonucleotide
auaaguucgcauuuuccuu

SEQ ID NO: 1658127 - RNA, 19 nt, Artificial Sequence
  Description of Artificial Sequence: Synthetic oligonucleotide
agucucuccccguuuuaac

SEQ ID NO: 1658128 - RNA, 19 nt, Artificial Sequence
  Description of Artificial Sequence: Synthetic oligonucleotide
uccgaugaagcgaguaaga

SEQ ID NO: 1658129 - RNA, 19 nt, Artificial Sequence
  Description of Artificial Sequence: Synthetic oligonucleotide
ugcgagcaauuucuggugc

SEQ ID NO: 1658130 - RNA, 19 nt, Artificial Sequence
  Description of Artificial Sequence: Synthetic oligonucleotide
cagcaucuaguaaugcuag

SEQ ID NO: 1658131 - RNA, 19 nt, Artificial Sequence
  Description of Artificial Sequence: Synthetic oligonucleotide
ucccacgaggacaauacuc

SEQ ID NO: 1658132 - RNA, 19 nt, Artificial Sequence
  Description of Artificial Sequence: Synthetic oligonucleotide
acaucucucauauguuuga

SEQ ID NO: 1658133 - RNA, 19 nt, Artificial Sequence
  Description of Artificial Sequence: Synthetic oligonucleotide
aauauggccgcugaccauu

SEQ ID NO: 1658134 - RNA, 19 nt, Artificial Sequence
  Description of Artificial Sequence: Synthetic oligonucleotide
auggccgcugaccauuuuc

SEQ ID NO: 1658135 - RNA, 19 nt, Artificial Sequence
  Description of Artificial Sequence: Synthetic oligonucleotide
ugaacaucucucauauguu

SEQ ID NO: 1658136 - RNA, 19 nt, Artificial Sequence
  Description of Artificial Sequence: Synthetic oligonucleotide
agcacaaaccgacuaucca

SEQ ID NO: 1658137 - RNA, 19 nt, Artificial Sequence
  Description of Artificial Sequence: Synthetic oligonucleotide
uaggcauccccaaugguuu

SEQ ID NO: 1658138 - RNA, 19 nt, Artificial Sequence
  Description of Artificial Sequence: Synthetic oligonucleotide
gaugcgaaaggaagaaaca

SEQ ID NO: 1658139 - RNA, 19 nt, Artificial Sequence
  Description of Artificial Sequence: Synthetic oligonucleotide
ucgcauuuuccuuuucccu

SEQ ID NO: 1658140 - RNA, 19 nt, Artificial Sequence
  Description of Artificial Sequence: Synthetic oligonucleotide
gcaucuaguaaugcuaggg

SEQ ID NO: 1658141 - RNA, 19 nt, Artificial Sequence
  Description of Artificial Sequence: Synthetic oligonucleotide
uguguccggucaaugcuug

SEQ ID NO: 1658142 - RNA, 19 nt, Artificial Sequence
  Description of Artificial Sequence: Synthetic oligonucleotide
cauccuaguaccagcagca

SEQ ID NO: 1658143 - RNA, 19 nt, Artificial Sequence
  Description of Artificial Sequence: Synthetic oligonucleotide
uaagaugguugaacugaac

SEQ ID NO: 1658144 - RNA, 19 nt, Artificial Sequence
  Description of Artificial Sequence: Synthetic oligonucleotide
guagaauuugggucuggac

SEQ ID NO: 1658145 - RNA, 19 nt, Artificial Sequence
  Description of Artificial Sequence: Synthetic oligonucleotide
ugucgauuauggcaucaaa

SEQ ID NO: 1658146 - RNA, 19 nt, Artificial Sequence
  Description of Artificial Sequence: Synthetic oligonucleotide
gugguuggcaaggaguucc

SEQ ID NO: 1658147 - RNA, 19 nt, Artificial Sequence
  Description of Artificial Sequence: Synthetic oligonucleotide
aaauauggccgcugaccau

SEQ ID NO: 1658148 - RNA, 19 nt, Artificial Sequence
  Description of Artificial Sequence: Synthetic oligonucleotide
caggcuccgaugaagcgag

SEQ ID NO: 1658149 - RNA, 19 nt, Artificial Sequence
  Description of Artificial Sequence: Synthetic oligonucleotide
ugcggagugcuauuuccug

SEQ ID NO: 1658150 - RNA, 19 nt, Artificial Sequence
  Description of Artificial Sequence: Synthetic oligonucleotide
uggacgccuauccguaacc

SEQ ID NO: 1658151 - RNA, 19 nt, Artificial Sequence
  Description of Artificial Sequence: Synthetic oligonucleotide
augcgagcaauuucuggug

SEQ ID NO: 1658152 - RNA, 19 nt, Artificial Sequence
  Description of Artificial Sequence: Synthetic oligonucleotide
accggggcaucuucagacc

SEQ ID NO: 1658153 - RNA, 19 nt, Artificial Sequence
  Description of Artificial Sequence: Synthetic oligonucleotide
ugaucggaagcuagccaga

SEQ ID NO: 1658154 - RNA, 19 nt, Artificial Sequence
  Description of Artificial Sequence: Synthetic oligonucleotide
uugguggucgaggagacau

SEQ ID NO: 1658155 - RNA, 19 nt, Artificial Sequence
  Description of Artificial Sequence: Synthetic oligonucleotide
aaggccagauaccaccaua

SEQ ID NO: 1658156 - RNA, 19 nt, Artificial Sequence
  Description of Artificial Sequence: Synthetic oligonucleotide
uuaacugcucugccacaga

SEQ ID NO: 1658157 - RNA, 19 nt, Artificial Sequence
  Description of Artificial Sequence: Synthetic oligonucleotide
aaccgacuauccaccacac

SEQ ID NO: 1658158 - RNA, 19 nt, Artificial Sequence
  Description of Artificial Sequence: Synthetic oligonucleotide
uuccuguaggaugauggca

SEQ ID NO: 1658159 - RNA, 19 nt, Artificial Sequence
  Description of Artificial Sequence: Synthetic oligonucleotide
ggaugcgaaaggaagaaac

SEQ ID NO: 1658160 - RNA, 19 nt, Artificial Sequence
  Description of Artificial Sequence: Synthetic oligonucleotide
aacauccaguccaaauuga

SEQ ID NO: 1658161 - RNA, 19 nt, Artificial Sequence
  Description of Artificial Sequence: Synthetic oligonucleotide
aucuguuauuuugagcaca

SEQ ID NO: 1658162 - RNA, 19 nt, Artificial Sequence
  Description of Artificial Sequence: Synthetic oligonucleotide
caguugaucggaagcuagc

SEQ ID NO: 1658163 - RNA, 19 nt, Artificial Sequence
  Description of Artificial Sequence: Synthetic oligonucleotide
cucucauauguuugaguuc

SEQ ID NO: 1658164 - RNA, 19 nt, Artificial Sequence
  Description of Artificial Sequence: Synthetic oligonucleotide
augagugaauagcgaaaca

SEQ ID NO: 1658165 - RNA, 19 nt, Artificial Sequence
  Description of Artificial Sequence: Synthetic oligonucleotide
auggggucgaugucggaug

SEQ ID NO: 1658166 - RNA, 19 nt, Artificial Sequence
  Description of Artificial Sequence: Synthetic oligonucleotide
aguugucgauuauggcauc

SEQ ID NO: 1658167 - RNA, 19 nt, Artificial Sequence
  Description of Artificial Sequence: Synthetic oligonucleotide
gcugacagugcugugaagc

SEQ ID NO: 1658168 - RNA, 19 nt, Artificial Sequence
  Description of Artificial Sequence: Synthetic oligonucleotide
guaaugcuagggccaugcg

SEQ ID NO: 1658169 - RNA, 19 nt, Artificial Sequence
  Description of Artificial Sequence: Synthetic oligonucleotide
gcacaaaccgacuauccac

SEQ ID NO: 1658170 - RNA, 19 nt, Artificial Sequence
  Description of Artificial Sequence: Synthetic oligonucleotide
uccgggagguccuuuucgc

SEQ ID NO: 1658171 - RNA, 19 nt, Artificial Sequence
  Description of Artificial Sequence: Synthetic oligonucleotide
uguaagcucccacgaggac

SEQ ID NO: 1658172 - RNA, 19 nt, Artificial Sequence
  Description of Artificial Sequence: Synthetic oligonucleotide
gaugucggaugcgaaagga

SEQ ID NO: 1658173 - RNA, 19 nt, Artificial Sequence
  Description of Artificial Sequence: Synthetic oligonucleotide
cuccgaugaagcgaguaag

SEQ ID NO: 1658174 - RNA, 19 nt, Artificial Sequence
  Description of Artificial Sequence: Synthetic oligonucleotide
cacaucugccuucugcaug

SEQ ID NO: 1658175 - RNA, 19 nt, Artificial Sequence
  Description of Artificial Sequence: Synthetic oligonucleotide
ucaaugcuuggccgaaaau

SEQ ID NO: 1658176 - RNA, 19 nt, Artificial Sequence
  Description of Artificial Sequence: Synthetic oligonucleotide
uaguaccagcagcaggaga

SEQ ID NO: 1658177 - RNA, 19 nt, Artificial Sequence
  Description of Artificial Sequence: Synthetic oligonucleotide
aagcuagccagaccauaau

SEQ ID NO: 1658178 - RNA, 19 nt, Artificial Sequence
  Description of Artificial Sequence: Synthetic oligonucleotide
guugaucggaagcuagcca

SEQ ID NO: 1658179 - RNA, 19 nt, Artificial Sequence
  Description of Artificial Sequence: Synthetic oligonucleotide
cuccuaagagccaauaagu

SEQ ID NO: 1658180 - RNA, 19 nt, Artificial Sequence
  Description of Artificial Sequence: Synthetic oligonucleotide
acagcaucuaguaaugcua

SEQ ID NO: 1658181 - RNA, 19 nt, Artificial Sequence
  Description of Artificial Sequence: Synthetic oligonucleotide
cauucaguuguguccgguc

SEQ ID NO: 1658182 - RNA, 19 nt, Artificial Sequence
  Description of Artificial Sequence: Synthetic oligonucleotide
gaccauuagacuccauucu

SEQ ID NO: 1658183 - RNA, 19 nt, Artificial Sequence
  Description of Artificial Sequence: Synthetic oligonucleotide
guaagcucccacgaggaca

SEQ ID NO: 1658184 - RNA, 19 nt, Artificial Sequence
  Description of Artificial Sequence: Synthetic oligonucleotide
gucuuguaagcucccacga

SEQ ID NO: 1658185 - RNA, 19 nt, Artificial Sequence
  Description of Artificial Sequence: Synthetic oligonucleotide
acaaaccgacuauccacca

SEQ ID NO: 1658186 - RNA, 19 nt, Artificial Sequence
  Description of Artificial Sequence: Synthetic oligonucleotide
accauauaggcauccccaa

SEQ ID NO: 1658187 - RNA, 19 nt, Artificial Sequence
  Description of Artificial Sequence: Synthetic oligonucleotide
ggcguugaccauuucggcc

SEQ ID NO: 1658188 - RNA, 19 nt, Artificial Sequence
  Description of Artificial Sequence: Synthetic oligonucleotide
ucggaugcgaaaggaagaa

SEQ ID NO: 1658189 - RNA, 19 nt, Artificial Sequence
  Description of Artificial Sequence: Synthetic oligonucleotide
aaguucgcauuuuccuuuu

SEQ ID NO: 1658190 - RNA, 19 nt, Artificial Sequence
  Description of Artificial Sequence: Synthetic oligonucleotide
ggccauacccuucacaaga

SEQ ID NO: 1658191 - RNA, 19 nt, Artificial Sequence
  Description of Artificial Sequence: Synthetic oligonucleotide
aguucgcauuuuccuuuuc

SEQ ID NO: 1658192 - RNA, 19 nt, Artificial Sequence
  Description of Artificial Sequence: Synthetic oligonucleotide
gguggucgaggagacaugg

SEQ ID NO: 1658193 - RNA, 19 nt, Artificial Sequence
  Description of Artificial Sequence: Synthetic oligonucleotide
uuguguccggucaaugcuu

SEQ ID NO: 1658194 - RNA, 19 nt, Artificial Sequence
  Description of Artificial Sequence: Synthetic oligonucleotide
agaucauuaaugagugaau

SEQ ID NO: 1658195 - RNA, 19 nt, Artificial Sequence
  Description of Artificial Sequence: Synthetic oligonucleotide
aaggaccacugcggagugc

SEQ ID NO: 1658196 - RNA, 19 nt, Artificial Sequence
  Description of Artificial Sequence: Synthetic oligonucleotide
uucuagaagcaguguucac

SEQ ID NO: 1658197 - RNA, 19 nt, Artificial Sequence
  Description of Artificial Sequence: Synthetic oligonucleotide
gucuggacguucugcuggg

SEQ ID NO: 1658198 - RNA, 19 nt, Artificial Sequence
  Description of Artificial Sequence: Synthetic oligonucleotide
ccuaguaccagcagcagga

SEQ ID NO: 1658199 - RNA, 19 nt, Artificial Sequence
  Description of Artificial Sequence: Synthetic oligonucleotide
aguccgggagguccuuuuc

SEQ ID NO: 1658200 - RNA, 19 nt, Artificial Sequence
  Description of Artificial Sequence: Synthetic oligonucleotide
uucgcucuccuaagagcca

SEQ ID NO: 1658201 - RNA, 19 nt, Artificial Sequence
  Description of Artificial Sequence: Synthetic oligonucleotide
caucucucauauguuugag

SEQ ID NO: 1658202 - RNA, 19 nt, Artificial Sequence
  Description of Artificial Sequence: Synthetic oligonucleotide
aggccauacccuucacaag

SEQ ID NO: 1658203 - RNA, 19 nt, Artificial Sequence
  Description of Artificial Sequence: Synthetic oligonucleotide
aaucucuuugggacugaga

SEQ ID NO: 1658204 - RNA, 19 nt, Artificial Sequence
  Description of Artificial Sequence: Synthetic oligonucleotide
ugcaaauguugggaggguc

SEQ ID NO: 1658205 - RNA, 19 nt, Artificial Sequence
  Description of Artificial Sequence: Synthetic oligonucleotide
ucuuuagagcuugaccauu

SEQ ID NO: 1658206 - RNA, 19 nt, Artificial Sequence
  Description of Artificial Sequence: Synthetic oligonucleotide
cuaagcaguucuggggcag

SEQ ID NO: 1658207 - RNA, 19 nt, Artificial Sequence
  Description of Artificial Sequence: Synthetic oligonucleotide
guuguguccggucaaugcu

SEQ ID NO: 1658208 - RNA, 19 nt, Artificial Sequence
  Description of Artificial Sequence: Synthetic oligonucleotide
aggacaauacucagugaca

SEQ ID NO: 1658209 - RNA, 19 nt, Artificial Sequence
  Description of Artificial Sequence: Synthetic oligonucleotide
caaaccgacuauccaccac

SEQ ID NO: 1658210 - RNA, 19 nt, Artificial Sequence
  Description of Artificial Sequence: Synthetic oligonucleotide
acugaacaucucucauaug

SEQ ID NO: 1658211 - RNA, 19 nt, Artificial Sequence
  Description of Artificial Sequence: Synthetic oligonucleotide
acgccuauccguaaccuca

SEQ ID NO: 1658212 - RNA, 19 nt, Artificial Sequence
  Description of Artificial Sequence: Synthetic oligonucleotide
caguguggacgccuauccg

SEQ ID NO: 1658213 - RNA, 19 nt, Artificial Sequence
  Description of Artificial Sequence: Synthetic oligonucleotide
ggguuuacaggaguccggg

SEQ ID NO: 1658214 - RNA, 19 nt, Artificial Sequence
  Description of Artificial Sequence: Synthetic oligonucleotide
auacucagugacaaugcaa

SEQ ID NO: 1658215 - RNA, 19 nt, Artificial Sequence
  Description of Artificial Sequence: Synthetic oligonucleotide
aggaccacugcggagugcu

SEQ ID NO: 1658216 - RNA, 19 nt, Artificial Sequence
  Description of Artificial Sequence: Synthetic oligonucleotide
uggguccuggcccaacauc

SEQ ID NO: 1658217 - RNA, 19 nt, Artificial Sequence
  Description of Artificial Sequence: Synthetic oligonucleotide
gcagguauaaaggucauua

SEQ ID NO: 1658218 - RNA, 19 nt, Artificial Sequence
  Description of Artificial Sequence: Synthetic oligonucleotide
ugaagcgaguaagaugguu

SEQ ID NO: 1658219 - RNA, 19 nt, Artificial Sequence
  Description of Artificial Sequence: Synthetic oligonucleotide
ucagaccaacaaccccagc

SEQ ID NO: 1658220 - RNA, 19 nt, Artificial Sequence
  Description of Artificial Sequence: Synthetic oligonucleotide
gacgccuauccguaaccuc

SEQ ID NO: 1658221 - RNA, 19 nt, Artificial Sequence
  Description of Artificial Sequence: Synthetic oligonucleotide
uaccaccauauaggcaucc

SEQ ID NO: 1658222 - RNA, 19 nt, Artificial Sequence
  Description of Artificial Sequence: Synthetic oligonucleotide
caucagcaaaacuaacucu

SEQ ID NO: 1658223 - RNA, 19 nt, Artificial Sequence
  Description of Artificial Sequence: Synthetic oligonucleotide
ugguggucgaggagacaug

SEQ ID NO: 1658224 - RNA, 19 nt, Artificial Sequence
  Description of Artificial Sequence: Synthetic oligonucleotide
cuguaggaugauggcaaag

SEQ ID NO: 1658225 - RNA, 19 nt, Artificial Sequence
  Description of Artificial Sequence: Synthetic oligonucleotide
ccaguguggacgccuaucc

SEQ ID NO: 1658226 - RNA, 19 nt, Artificial Sequence
  Description of Artificial Sequence: Synthetic oligonucleotide
aagagccaauaaguucgca

SEQ ID NO: 1658227 - RNA, 19 nt, Artificial Sequence
  Description of Artificial Sequence: Synthetic oligonucleotide
ccaugcgagcaauuucugg

SEQ ID NO: 1658228 - RNA, 19 nt, Artificial Sequence
  Description of Artificial Sequence: Synthetic oligonucleotide
ugaccauuucggccuggaa

SEQ ID NO: 1658229 - RNA, 19 nt, Artificial Sequence
  Description of Artificial Sequence: Synthetic oligonucleotide
uuucggccuggaaggccag

SEQ ID NO: 1658230 - RNA, 19 nt, Artificial Sequence
  Description of Artificial Sequence: Synthetic oligonucleotide
gucgaugucggaugcgaaa

SEQ ID NO: 1658231 - RNA, 19 nt, Artificial Sequence
  Description of Artificial Sequence: Synthetic oligonucleotide
gcaguugaucggaagcuag

SEQ ID NO: 1658232 - RNA, 19 nt, Artificial Sequence
  Description of Artificial Sequence: Synthetic oligonucleotide
caaucucuuugggacugag

SEQ ID NO: 1658233 - RNA, 19 nt, Artificial Sequence
  Description of Artificial Sequence: Synthetic oligonucleotide
uugaccauuucggccugga

SEQ ID NO: 1658234 - RNA, 19 nt, Artificial Sequence
  Description of Artificial Sequence: Synthetic oligonucleotide
cuggacguucugcuggguc

SEQ ID NO: 1658235 - RNA, 19 nt, Artificial Sequence
  Description of Artificial Sequence: Synthetic oligonucleotide
guaagaugguugaacugaa

SEQ ID NO: 1658236 - RNA, 19 nt, Artificial Sequence
  Description of Artificial Sequence: Synthetic oligonucleotide
gagggucuaugcaggcucc

SEQ ID NO: 1658237 - RNA, 19 nt, Artificial Sequence
  Description of Artificial Sequence: Synthetic oligonucleotide
ccgcugaccauuuucgaac

SEQ ID NO: 1658238 - RNA, 19 nt, Artificial Sequence
  Description of Artificial Sequence: Synthetic oligonucleotide
cuaguaccagcagcaggag

SEQ ID NO: 1658239 - RNA, 19 nt, Artificial Sequence
  Description of Artificial Sequence: Synthetic oligonucleotide
gucggaugcgaaaggaaga

SEQ ID NO: 1658240 - RNA, 19 nt, Artificial Sequence
  Description of Artificial Sequence: Synthetic oligonucleotide
guccccacggagcucuagc

SEQ ID NO: 1658241 - RNA, 19 nt, Artificial Sequence
  Description of Artificial Sequence: Synthetic oligonucleotide
gauugucuggcuugggguu

SEQ ID NO: 1658242 - RNA, 19 nt, Artificial Sequence
  Description of Artificial Sequence: Synthetic oligonucleotide
aguguucacugugucucca

SEQ ID NO: 1658243 - RNA, 19 nt, Artificial Sequence
  Description of Artificial Sequence: Synthetic oligonucleotide
cccguuuuaacugcucugc

SEQ ID NO: 1658244 - RNA, 19 nt, Artificial Sequence
  Description of Artificial Sequence: Synthetic oligonucleotide
gacuauccaccacacaguu

SEQ ID NO: 1658245 - RNA, 19 nt, Artificial Sequence
  Description of Artificial Sequence: Synthetic oligonucleotide
guugucgauuauggcauca

SEQ ID NO: 1658246 - RNA, 19 nt, Artificial Sequence
  Description of Artificial Sequence: Synthetic oligonucleotide
cuagaaugucuuguaagcu

SEQ ID NO: 1658247 - RNA, 19 nt, Artificial Sequence
  Description of Artificial Sequence: Synthetic oligonucleotide
uccguaaccucagcugguc

SEQ ID NO: 1658248 - RNA, 19 nt, Artificial Sequence
  Description of Artificial Sequence: Synthetic oligonucleotide
auccuaguaccagcagcag

SEQ ID NO: 1658249 - RNA, 19 nt, Artificial Sequence
  Description of Artificial Sequence: Synthetic oligonucleotide
guggacgccuauccguaac

SEQ ID NO: 1658250 - RNA, 19 nt, Artificial Sequence
  Description of Artificial Sequence: Synthetic oligonucleotide
gaauagcgaaacauccagu

SEQ ID NO: 1658251 - RNA, 19 nt, Artificial Sequence
  Description of Artificial Sequence: Synthetic oligonucleotide
guguccggucaaugcuugg

SEQ ID NO: 1658252 - RNA, 19 nt, Artificial Sequence
  Description of Artificial Sequence: Synthetic oligonucleotide
gucucuccccguuuuaacu

SEQ ID NO: 1658253 - RNA, 19 nt, Artificial Sequence
  Description of Artificial Sequence: Synthetic oligonucleotide
aggccagauaccaccauau

SEQ ID NO: 1658254 - RNA, 19 nt, Artificial Sequence
  Description of Artificial Sequence: Synthetic oligonucleotide
aagcagguauaaaggucau

SEQ ID NO: 1658255 - RNA, 19 nt, Artificial Sequence
  Description of Artificial Sequence: Synthetic oligonucleotide
accgacuauccaccacaca

SEQ ID NO: 1658256 - RNA, 19 nt, Artificial Sequence
  Description of Artificial Sequence: Synthetic oligonucleotide
gggguuuacaggaguccgg

SEQ ID NO: 1658257 - RNA, 19 nt, Artificial Sequence
  Description of Artificial Sequence: Synthetic oligonucleotide
ucgcucuccuaagagccaa

SEQ ID NO: 1658258 - RNA, 19 nt, Artificial Sequence
  Description of Artificial Sequence: Synthetic oligonucleotide
ggaguucccacuaagcagu

SEQ ID NO: 1658259 - RNA, 19 nt, Artificial Sequence
  Description of Artificial Sequence: Synthetic oligonucleotide
acguucugcuggguccugg

SEQ ID NO: 1658260 - RNA, 19 nt, Artificial Sequence
  Description of Artificial Sequence: Synthetic oligonucleotide
gguagaauuugggucugga

SEQ ID NO: 1658261 - RNA, 19 nt, Artificial Sequence
  Description of Artificial Sequence: Synthetic oligonucleotide
cccaaugguuuccaccuug

SEQ ID NO: 1658262 - RNA, 19 nt, Artificial Sequence
  Description of Artificial Sequence: Synthetic oligonucleotide
uaguaaugcuagggccaug

SEQ ID NO: 1658263 - RNA, 19 nt, Artificial Sequence
  Description of Artificial Sequence: Synthetic oligonucleotide
acauggaucuuuagagcuu

SEQ ID NO: 1658264 - RNA, 19 nt, Artificial Sequence
  Description of Artificial Sequence: Synthetic oligonucleotide
gcucccacgaggacaauac

SEQ ID NO: 1658265 - RNA, 19 nt, Artificial Sequence
  Description of Artificial Sequence: Synthetic oligonucleotide
agcaguugaucggaagcua

SEQ ID NO: 1658266 - RNA, 19 nt, Artificial Sequence
  Description of Artificial Sequence: Synthetic oligonucleotide
ccguuuuaacugcucugcc

SEQ ID NO: 1658267 - RNA, 19 nt, Artificial Sequence
  Description of Artificial Sequence: Synthetic oligonucleotide
cacugcggagugcuauuuc

SEQ ID NO: 1658268 - RNA, 19 nt, Artificial Sequence
  Description of Artificial Sequence: Synthetic oligonucleotide
caguuguguccggucaaug

SEQ ID NO: 1658269 - RNA, 19 nt, Artificial Sequence
  Description of Artificial Sequence: Synthetic oligonucleotide
augucggaugcgaaaggaa

SEQ ID NO: 1658270 - RNA, 19 nt, Artificial Sequence
  Description of Artificial Sequence: Synthetic oligonucleotide
ggucgaggagacauggauc

SEQ ID NO: 1658271 - RNA, 19 nt, Artificial Sequence
  Description of Artificial Sequence: Synthetic oligonucleotide
ggaagcauccuaacucauc

SEQ ID NO: 1658272 - RNA, 19 nt, Artificial Sequence
  Description of Artificial Sequence: Synthetic oligonucleotide
caccacacaguuggaggac

SEQ ID NO: 1658273 - RNA, 19 nt, Artificial Sequence
  Description of Artificial Sequence: Synthetic oligonucleotide
accacugcggagugcuauu

SEQ ID NO: 1658274 - RNA, 19 nt, Artificial Sequence
  Description of Artificial Sequence: Synthetic oligonucleotide
gcuuggccgaaaauauggc

SEQ ID NO: 1658275 - RNA, 19 nt, Artificial Sequence
  Description of Artificial Sequence: Synthetic oligonucleotide
guaccggggcaucuucaga

SEQ ID NO: 1658276 - RNA, 19 nt, Artificial Sequence
  Description of Artificial Sequence: Synthetic oligonucleotide
agcgaaacauccaguccaa

SEQ ID NO: 1658277 - RNA, 19 nt, Artificial Sequence
  Description of Artificial Sequence: Synthetic oligonucleotide
gcguugaccauuucggccu

SEQ ID NO: 1658278 - RNA, 19 nt, Artificial Sequence
  Description of Artificial Sequence: Synthetic oligonucleotide
ccuggacagucucuccccg

SEQ ID NO: 1658279 - RNA, 19 nt, Artificial Sequence
  Description of Artificial Sequence: Synthetic oligonucleotide
uaaugcuguuguggagaaa

SEQ ID NO: 1658280 - RNA, 19 nt, Artificial Sequence
  Description of Artificial Sequence: Synthetic oligonucleotide
ggagcucuagcuggaagca

SEQ ID NO: 1658281 - RNA, 19 nt, Artificial Sequence
  Description of Artificial Sequence: Synthetic oligonucleotide
cuccccguuuuaacugcuc

SEQ ID NO: 1658282 - RNA, 19 nt, Artificial Sequence
  Description of Artificial Sequence: Synthetic oligonucleotide
acaaucucuuugggacuga

SEQ ID NO: 1658283 - RNA, 19 nt, Artificial Sequence
  Description of Artificial Sequence: Synthetic oligonucleotide
ggagauugucuggcuuggg

SEQ ID NO: 1658284 - RNA, 19 nt, Artificial Sequence
  Description of Artificial Sequence: Synthetic oligonucleotide
caaauguugggagggucua

SEQ ID NO: 1658285 - RNA, 19 nt, Artificial Sequence
  Description of Artificial Sequence: Synthetic oligonucleotide
auccguaaccucagcuggu

SEQ ID NO: 1658286 - RNA, 19 nt, Artificial Sequence
  Description of Artificial Sequence: Synthetic oligonucleotide
agcgaguaagaugguugaa

SEQ ID NO: 1658287 - RNA, 19 nt, Artificial Sequence
  Description of Artificial Sequence: Synthetic oligonucleotide
gaccauuuucgaaccuucu

SEQ ID NO: 1658288 - RNA, 19 nt, Artificial Sequence
  Description of Artificial Sequence: Synthetic oligonucleotide
gguuuacaggaguccggga

SEQ ID NO: 1658289 - RNA, 19 nt, Artificial Sequence
  Description of Artificial Sequence: Synthetic oligonucleotide
gcuccgaugaagcgaguaa

SEQ ID NO: 1658290 - RNA, 19 nt, Artificial Sequence
  Description of Artificial Sequence: Synthetic oligonucleotide
ccccguuuuaacugcucug

SEQ ID NO: 1658291 - RNA, 19 nt, Artificial Sequence
  Description of Artificial Sequence: Synthetic oligonucleotide
gccgaaaauauggccgcug

SEQ ID NO: 1658292 - RNA, 19 nt, Artificial Sequence
  Description of Artificial Sequence: Synthetic oligonucleotide
ggaaggccagauaccacca

SEQ ID NO: 1658293 - RNA, 19 nt, Artificial Sequence
  Description of Artificial Sequence: Synthetic oligonucleotide
gggccaugcgagcaauuuc

SEQ ID NO: 1658294 - RNA, 19 nt, Artificial Sequence
  Description of Artificial Sequence: Synthetic oligonucleotide
cgaaaauauggccgcugac

SEQ ID NO: 1658295 - RNA, 19 nt, Artificial Sequence
  Description of Artificial Sequence: Synthetic oligonucleotide
ccgaaaauauggccgcuga

SEQ ID NO: 1658296 - RNA, 19 nt, Artificial Sequence
  Description of Artificial Sequence: Synthetic oligonucleotide
ggccaugcgagcaauuucu

SEQ ID NO: 1658297 - RNA, 19 nt, Artificial Sequence
  Description of Artificial Sequence: Synthetic oligonucleotide
agcagguauaaaggucauu

SEQ ID NO: 1658298 - RNA, 19 nt, Artificial Sequence
  Description of Artificial Sequence: Synthetic oligonucleotide
gcaggcuccgaugaagcga

SEQ ID NO: 1658299 - RNA, 19 nt, Artificial Sequence
  Description of Artificial Sequence: Synthetic oligonucleotide
ggacaaucucuuugggacu

SEQ ID NO: 1658300 - RNA, 19 nt, Artificial Sequence
  Description of Artificial Sequence: Synthetic oligonucleotide
cgaguaagaugguugaacu

SEQ ID NO: 1658301 - RNA, 19 nt, Artificial Sequence
  Description of Artificial Sequence: Synthetic oligonucleotide
gccgcugaccauuuucgaa

SEQ ID NO: 1658302 - RNA, 19 nt, Artificial Sequence
  Description of Artificial Sequence: Synthetic oligonucleotide
cgaugucggaugcgaaagg

SEQ ID NO: 1658303 - RNA, 19 nt, Artificial Sequence
  Description of Artificial Sequence: Synthetic oligonucleotide
caaugguuuccaccuugua

SEQ ID NO: 1658304 - RNA, 19 nt, Artificial Sequence
  Description of Artificial Sequence: Synthetic oligonucleotide
caaaggccucugccuggac

SEQ ID NO: 1658305 - RNA, 19 nt, Artificial Sequence
  Description of Artificial Sequence: Synthetic oligonucleotide
cagcaguugaucggaagcu

SEQ ID NO: 1658306 - RNA, 19 nt, Artificial Sequence
  Description of Artificial Sequence: Synthetic oligonucleotide
gggucgaugucggaugcga

SEQ ID NO: 1658307 - RNA, 19 nt, Artificial Sequence
  Description of Artificial Sequence: Synthetic oligonucleotide
cuaguaaugcuagggccau

SEQ ID NO: 1658308 - RNA, 19 nt, Artificial Sequence
  Description of Artificial Sequence: Synthetic oligonucleotide
guguggacgccuauccgua

SEQ ID NO: 1658309 - RNA, 19 nt, Artificial Sequence
  Description of Artificial Sequence: Synthetic oligonucleotide
cugcggagugcuauuuccu

SEQ ID NO: 1658310 - RNA, 19 nt, Artificial Sequence
  Description of Artificial Sequence: Synthetic oligonucleotide
ggcauggcugucaucaggu

SEQ ID NO: 1658311 - RNA, 19 nt, Artificial Sequence
  Description of Artificial Sequence: Synthetic oligonucleotide
gccuuccaaguagaaagga

SEQ ID NO: 1658312 - RNA, 19 nt, Artificial Sequence
  Description of Artificial Sequence: Synthetic oligonucleotide
gggguagaauuugggucug

SEQ ID NO: 1658313 - RNA, 19 nt, Artificial Sequence
  Description of Artificial Sequence: Synthetic oligonucleotide
gacguucugcuggguccug

SEQ ID NO: 1658314 - RNA, 19 nt, Artificial Sequence
  Description of Artificial Sequence: Synthetic oligonucleotide
cauggggucgaugucggau

SEQ ID NO: 1658315 - RNA, 19 nt, Artificial Sequence
  Description of Artificial Sequence: Synthetic oligonucleotide
ggaagcuagccagaccaua

SEQ ID NO: 1658316 - RNA, 19 nt, Artificial Sequence
  Description of Artificial Sequence: Synthetic oligonucleotide
ccuauccguaaccucagcu

SEQ ID NO: 1658317 - RNA, 19 nt, Artificial Sequence
  Description of Artificial Sequence: Synthetic oligonucleotide
ccuuuucgcucuccuaaga

SEQ ID NO: 1658318 - RNA, 19 nt, Artificial Sequence
  Description of Artificial Sequence: Synthetic oligonucleotide
gccuauccguaaccucagc

SEQ ID NO: 1658319 - RNA, 19 nt, Artificial Sequence
  Description of Artificial Sequence: Synthetic oligonucleotide
caucaaaguugucgauuau

SEQ ID NO: 1658320 - RNA, 19 nt, Artificial Sequence
  Description of Artificial Sequence: Synthetic oligonucleotide
gcuggguccuggcccaaca

SEQ ID NO: 1658321 - RNA, 19 nt, Artificial Sequence
  Description of Artificial Sequence: Synthetic oligonucleotide
ggggucgaugucggaugcg

SEQ ID NO: 1658322 - RNA, 19 nt, Artificial Sequence
  Description of Artificial Sequence: Synthetic oligonucleotide
gccaugcgagcaauuucug

SEQ ID NO: 1658323 - RNA, 19 nt, Artificial Sequence
  Description of Artificial Sequence: Synthetic oligonucleotide
ccauuucggccuggaaggc

SEQ ID NO: 1658324 - RNA, 19 nt, Artificial Sequence
  Description of Artificial Sequence: Synthetic oligonucleotide
auauggccgcugaccauuu

SEQ ID NO: 1658325 - RNA, 19 nt, Artificial Sequence
  Description of Artificial Sequence: Synthetic oligonucleotide
ccccacggagcucuagcug

SEQ ID NO: 1658326 - RNA, 19 nt, Artificial Sequence
  Description of Artificial Sequence: Synthetic oligonucleotide
cuugguggucgaggagaca

SEQ ID NO: 1658327 - RNA, 19 nt, Artificial Sequence
  Description of Artificial Sequence: Synthetic oligonucleotide
ccggucaaugcuuggccga

SEQ ID NO: 1658328 - RNA, 19 nt, Artificial Sequence
  Description of Artificial Sequence: Synthetic oligonucleotide
ggccgcugaccauuuucga

SEQ ID NO: 1658329 - RNA, 19 nt, Artificial Sequence
  Description of Artificial Sequence: Synthetic oligonucleotide
gaguccgggagguccuuuu

SEQ ID NO: 1658330 - RNA, 19 nt, Artificial Sequence
  Description of Artificial Sequence: Synthetic oligonucleotide
gcggagugcuauuuccugu

SEQ ID NO: 1658331 - RNA, 19 nt, Artificial Sequence
  Description of Artificial Sequence: Synthetic oligonucleotide
cgccuauccguaaccucag

SEQ ID NO: 1658332 - RNA, 19 nt, Artificial Sequence
  Description of Artificial Sequence: Synthetic oligonucleotide
cacguccccacggagcucu

SEQ ID NO: 1658333 - RNA, 19 nt, Artificial Sequence
  Description of Artificial Sequence: Synthetic oligonucleotide
cagugacaaugcaaauguu

SEQ ID NO: 1658334 - RNA, 19 nt, Artificial Sequence
  Description of Artificial Sequence: Synthetic oligonucleotide
cucccacgaggacaauacu

SEQ ID NO: 1658335 - RNA, 19 nt, Artificial Sequence
  Description of Artificial Sequence: Synthetic oligonucleotide
ggcuccgaugaagcgagua

SEQ ID NO: 1658336 - RNA, 19 nt, Artificial Sequence
  Description of Artificial Sequence: Synthetic oligonucleotide
gugcauggcguugaccauu

SEQ ID NO: 1658337 - RNA, 19 nt, Artificial Sequence
  Description of Artificial Sequence: Synthetic oligonucleotide
ggucgaugucggaugcgaa

SEQ ID NO: 1658338 - RNA, 19 nt, Artificial Sequence
  Description of Artificial Sequence: Synthetic oligonucleotide
ggugcauggcguugaccau

SEQ ID NO: 1658339 - RNA, 19 nt, Artificial Sequence
  Description of Artificial Sequence: Synthetic oligonucleotide
ggacgccuauccguaaccu

SEQ ID NO: 1658340 - RNA, 19 nt, Artificial Sequence
  Description of Artificial Sequence: Synthetic oligonucleotide
ccguaaccucagcugguca

SEQ ID NO: 1658341 - RNA, 19 nt, Artificial Sequence
  Description of Artificial Sequence: Synthetic oligonucleotide
aagcucccacgaggacaau

SEQ ID NO: 1658342 - RNA, 19 nt, Artificial Sequence
  Description of Artificial Sequence: Synthetic oligonucleotide
cgacuauccaccacacagu

SEQ ID NO: 1658343 - RNA, 19 nt, Artificial Sequence
  Description of Artificial Sequence: Synthetic oligonucleotide
ggacguucugcuggguccu

SEQ ID NO: 1658344 - RNA, 19 nt, Artificial Sequence
  Description of Artificial Sequence: Synthetic oligonucleotide
ggucaaugcuuggccgaaa

SEQ ID NO: 1658345 - RNA, 19 nt, Artificial Sequence
  Description of Artificial Sequence: Synthetic oligonucleotide
cggagugcuauuuccugua

SEQ ID NO: 1658346 - RNA, 19 nt, Artificial Sequence
  Description of Artificial Sequence: Synthetic oligonucleotide
cuugaccauuagacuccau

SEQ ID NO: 1658347 - RNA, 19 nt, Artificial Sequence
  Description of Artificial Sequence: Synthetic oligonucleotide
gccacagaaugggguagaa

SEQ ID NO: 1658348 - RNA, 19 nt, Artificial Sequence
  Description of Artificial Sequence: Synthetic oligonucleotide
ccaaauugaugcugucauu

SEQ ID NO: 1658349 - RNA, 19 nt, Artificial Sequence
  Description of Artificial Sequence: Synthetic oligonucleotide
cuucugcaugccugugguu

SEQ ID NO: 1658350 - RNA, 19 nt, Artificial Sequence
  Description of Artificial Sequence: Synthetic oligonucleotide
ccauauaggcauccccaau

SEQ ID NO: 1658351 - RNA, 19 nt, Artificial Sequence
  Description of Artificial Sequence: Synthetic oligonucleotide
cguaaccucagcuggucau

SEQ ID NO: 1658352 - RNA, 19 nt, Artificial Sequence
  Description of Artificial Sequence: Synthetic oligonucleotide
cacggagcucuagcuggaa

SEQ ID NO: 1658353 - RNA, 19 nt, Artificial Sequence
  Description of Artificial Sequence: Synthetic oligonucleotide
ccgaugaagcgaguaagau

SEQ ID NO: 1658354 - RNA, 19 nt, Artificial Sequence
  Description of Artificial Sequence: Synthetic oligonucleotide
ggccgaaaauauggccgcu

SEQ ID NO: 1658355 - RNA, 19 nt, Artificial Sequence
  Description of Artificial Sequence: Synthetic oligonucleotide
ccgggagguccuuuucgcu

SEQ ID NO: 1658356 - RNA, 19 nt, Artificial Sequence
  Description of Artificial Sequence: Synthetic oligonucleotide
cggaugcgaaaggaagaaa

SEQ ID NO: 1658357 - RNA, 19 nt, Artificial Sequence
  Description of Artificial Sequence: Synthetic oligonucleotide
cguccccacggagcucuag

SEQ ID NO: 1658358 - RNA, 19 nt, Artificial Sequence
  Description of Artificial Sequence: Synthetic oligonucleotide
ccacagaaugggguagaau

SEQ ID NO: 1658359 - RNA, 19 nt, Artificial Sequence
  Description of Artificial Sequence: Synthetic oligonucleotide
ggaguccgggagguccuuu

SEQ ID NO: 1658360 - RNA, 19 nt, Artificial Sequence
  Description of Artificial Sequence: Synthetic oligonucleotide
ccacugcggagugcuauuu

SEQ ID NO: 1658361 - RNA, 19 nt, Artificial Sequence
  Description of Artificial Sequence: Synthetic oligonucleotide
ccccaaugguuuccaccuu

SEQ ID NO: 1658362 - RNA, 19 nt, Artificial Sequence
  Description of Artificial Sequence: Synthetic oligonucleotide
cgcucuccuaagagccaau

SEQ ID NO: 1658363 - RNA, 19 nt, Artificial Sequence
  Description of Artificial Sequence: Synthetic oligonucleotide
uuuaacauuaauaugccgg

SEQ ID NO: 1658364 - RNA, 19 nt, Artificial Sequence
  Description of Artificial Sequence: Synthetic oligonucleotide
uuuaaauucgaauucagag

SEQ ID NO: 1658365 - RNA, 19 nt, Artificial Sequence
  Description of Artificial Sequence: Synthetic oligonucleotide
auguuuaacauuaauaugc

SEQ ID NO: 1658366 - RNA, 19 nt, Artificial Sequence
  Description of Artificial Sequence: Synthetic oligonucleotide
uggauuuccauuaagagac

SEQ ID NO: 1658367 - RNA, 19 nt, Artificial Sequence
  Description of Artificial Sequence: Synthetic oligonucleotide
ugcuauuggaaccaaaagg

SEQ ID NO: 1658368 - RNA, 19 nt, Artificial Sequence
  Description of Artificial Sequence: Synthetic oligonucleotide
uauuacaaauccuuggagg

SEQ ID NO: 1658369 - RNA, 19 nt, Artificial Sequence
  Description of Artificial Sequence: Synthetic oligonucleotide
aaggauuuagucucccugc

SEQ ID NO: 1658370 - RNA, 19 nt, Artificial Sequence
  Description of Artificial Sequence: Synthetic oligonucleotide
uuuucauuacauauccagg

SEQ ID NO: 1658371 - RNA, 19 nt, Artificial Sequence
  Description of Artificial Sequence: Synthetic oligonucleotide
caagaagagucuuugaagg

SEQ ID NO: 1658372 - RNA, 19 nt, Artificial Sequence
  Description of Artificial Sequence: Synthetic oligonucleotide
uccaauauaguauuuguga

SEQ ID NO: 1658373 - RNA, 19 nt, Artificial Sequence
  Description of Artificial Sequence: Synthetic oligonucleotide
uuucauuacauauccaggc

SEQ ID NO: 1658374 - RNA, 19 nt, Artificial Sequence
  Description of Artificial Sequence: Synthetic oligonucleotide
uucaauauccaguucauac

SEQ ID NO: 1658375 - RNA, 19 nt, Artificial Sequence
  Description of Artificial Sequence: Synthetic oligonucleotide
gauauguccccauuggagg

SEQ ID NO: 1658376 - RNA, 19 nt, Artificial Sequence
  Description of Artificial Sequence: Synthetic oligonucleotide
cuuuucauuacauauccag

SEQ ID NO: 1658377 - RNA, 19 nt, Artificial Sequence
  Description of Artificial Sequence: Synthetic oligonucleotide
ugugaguauaccaaaucag

SEQ ID NO: 1658378 - RNA, 19 nt, Artificial Sequence
  Description of Artificial Sequence: Synthetic oligonucleotide
ugaagaaggauuuagucuc

SEQ ID NO: 1658379 - RNA, 19 nt, Artificial Sequence
  Description of Artificial Sequence: Synthetic oligonucleotide
uuaaauucgaauucagagu

SEQ ID NO: 1658380 - RNA, 19 nt, Artificial Sequence
  Description of Artificial Sequence: Synthetic oligonucleotide
uaaauggcauuuaagcugc

SEQ ID NO: 1658381 - RNA, 19 nt, Artificial Sequence
  Description of Artificial Sequence: Synthetic oligonucleotide
ugaguauaccaaaucagcc

SEQ ID NO: 1658382 - RNA, 19 nt, Artificial Sequence
  Description of Artificial Sequence: Synthetic oligonucleotide
uugggaguauucaauaucc

SEQ ID NO: 1658383 - RNA, 19 nt, Artificial Sequence
  Description of Artificial Sequence: Synthetic oligonucleotide
uuauuacaaauccuuggag

SEQ ID NO: 1658384 - RNA, 19 nt, Artificial Sequence
  Description of Artificial Sequence: Synthetic oligonucleotide
uguuuaacauuaauaugcc

SEQ ID NO: 1658385 - RNA, 19 nt, Artificial Sequence
  Description of Artificial Sequence: Synthetic oligonucleotide
aauccauuuaaauucgaau

SEQ ID NO: 1658386 - RNA, 19 nt, Artificial Sequence
  Description of Artificial Sequence: Synthetic oligonucleotide
auuauuacaaauccuugga

SEQ ID NO: 1658387 - RNA, 19 nt, Artificial Sequence
  Description of Artificial Sequence: Synthetic oligonucleotide
uuuccauuaagagacuccg

SEQ ID NO: 1658388 - RNA, 19 nt, Artificial Sequence
  Description of Artificial Sequence: Synthetic oligonucleotide
ucgaauucagaguaucagg

SEQ ID NO: 1658389 - RNA, 19 nt, Artificial Sequence
  Description of Artificial Sequence: Synthetic oligonucleotide
uauguuaggagggaaauga

SEQ ID NO: 1658390 - RNA, 19 nt, Artificial Sequence
  Description of Artificial Sequence: Synthetic oligonucleotide
ucaauugugcuccacuuca

SEQ ID NO: 1658391 - RNA, 19 nt, Artificial Sequence
  Description of Artificial Sequence: Synthetic oligonucleotide
ugauuauuacaaauccuug

SEQ ID NO: 1658392 - RNA, 19 nt, Artificial Sequence
  Description of Artificial Sequence: Synthetic oligonucleotide
ucagguucuguucugacac

SEQ ID NO: 1658393 - RNA, 19 nt, Artificial Sequence
  Description of Artificial Sequence: Synthetic oligonucleotide
ucagcuaacacuugggagu

SEQ ID NO: 1658394 - RNA, 19 nt, Artificial Sequence
  Description of Artificial Sequence: Synthetic oligonucleotide
uugacaacggacauuggca

SEQ ID NO: 1658395 - RNA, 19 nt, Artificial Sequence
  Description of Artificial Sequence: Synthetic oligonucleotide
uaguggagcagcuauacug

SEQ ID NO: 1658396 - RNA, 19 nt, Artificial Sequence
  Description of Artificial Sequence: Synthetic oligonucleotide
aaaggauggacguaccgga

SEQ ID NO: 1658397 - RNA, 19 nt, Artificial Sequence
  Description of Artificial Sequence: Synthetic oligonucleotide
uccauuaagagacuccgcu

SEQ ID NO: 1658398 - RNA, 19 nt, Artificial Sequence
  Description of Artificial Sequence: Synthetic oligonucleotide
uggacugccaaaccagucg

SEQ ID NO: 1658399 - RNA, 19 nt, Artificial Sequence
  Description of Artificial Sequence: Synthetic oligonucleotide
uucugucaaaggauggacg

SEQ ID NO: 1658400 - RNA, 19 nt, Artificial Sequence
  Description of Artificial Sequence: Synthetic oligonucleotide
aaugugaucacugguaaau

SEQ ID NO: 1658401 - RNA, 19 nt, Artificial Sequence
  Description of Artificial Sequence: Synthetic oligonucleotide
ucaaaggauggacguaccg

SEQ ID NO: 1658402 - RNA, 19 nt, Artificial Sequence
  Description of Artificial Sequence: Synthetic oligonucleotide
cauguuuaacauuaauaug

SEQ ID NO: 1658403 - RNA, 19 nt, Artificial Sequence
  Description of Artificial Sequence: Synthetic oligonucleotide
aaaguuucagagaaaguga

SEQ ID NO: 1658404 - RNA, 19 nt, Artificial Sequence
  Description of Artificial Sequence: Synthetic oligonucleotide
gaagucuugaacuucucca

SEQ ID NO: 1658405 - RNA, 19 nt, Artificial Sequence
  Description of Artificial Sequence: Synthetic oligonucleotide
cauuacauauccaggcagg

SEQ ID NO: 1658406 - RNA, 19 nt, Artificial Sequence
  Description of Artificial Sequence: Synthetic oligonucleotide
cugugugaaagcaauggcc

SEQ ID NO: 1658407 - RNA, 19 nt, Artificial Sequence
  Description of Artificial Sequence: Synthetic oligonucleotide
ugcuucuucugucaaagga

SEQ ID NO: 1658408 - RNA, 19 nt, Artificial Sequence
  Description of Artificial Sequence: Synthetic oligonucleotide
uugauggggauccaccucc

SEQ ID NO: 1658409 - RNA, 19 nt, Artificial Sequence
  Description of Artificial Sequence: Synthetic oligonucleotide
ucuguuugaggacccaacc

SEQ ID NO: 1658410 - RNA, 19 nt, Artificial Sequence
  Description of Artificial Sequence: Synthetic oligonucleotide
uacuguucuugaauuuugg

SEQ ID NO: 1658411 - RNA, 19 nt, Artificial Sequence
  Description of Artificial Sequence: Synthetic oligonucleotide
uuuguggacaguagcaccu

SEQ ID NO: 1658412 - RNA, 19 nt, Artificial Sequence
  Description of Artificial Sequence: Synthetic oligonucleotide
ucucgguccaagaagaguc

SEQ ID NO: 1658413 - RNA, 19 nt, Artificial Sequence
  Description of Artificial Sequence: Synthetic oligonucleotide
agaacaauggauuuccauu

SEQ ID NO: 1658414 - RNA, 19 nt, Artificial Sequence
  Description of Artificial Sequence: Synthetic oligonucleotide
uucgaauucagaguaucag

SEQ ID NO: 1658415 - RNA, 19 nt, Artificial Sequence
  Description of Artificial Sequence: Synthetic oligonucleotide
ucugucaaaggauggacgu

SEQ ID NO: 1658416 - RNA, 19 nt, Artificial Sequence
  Description of Artificial Sequence: Synthetic oligonucleotide
guugacaacggacauuggc

SEQ ID NO: 1658417 - RNA, 19 nt, Artificial Sequence
  Description of Artificial Sequence: Synthetic oligonucleotide
aguauaccaaaucagccaa

SEQ ID NO: 1658418 - RNA, 19 nt, Artificial Sequence
  Description of Artificial Sequence: Synthetic oligonucleotide
uucucagcuaacacuuggg

SEQ ID NO: 1658419 - RNA, 19 nt, Artificial Sequence
  Description of Artificial Sequence: Synthetic oligonucleotide
ucaaugugaucacugguaa

SEQ ID NO: 1658420 - RNA, 19 nt, Artificial Sequence
  Description of Artificial Sequence: Synthetic oligonucleotide
acugguaaaugcuauugga

SEQ ID NO: 1658421 - RNA, 19 nt, Artificial Sequence
  Description of Artificial Sequence: Synthetic oligonucleotide
ugacaacggacauuggcag

SEQ ID NO: 1658422 - RNA, 19 nt, Artificial Sequence
  Description of Artificial Sequence: Synthetic oligonucleotide
gaguauaccaaaucagcca

SEQ ID NO: 1658423 - RNA, 19 nt, Artificial Sequence
  Description of Artificial Sequence: Synthetic oligonucleotide
agagucaacugcguggagc

SEQ ID NO: 1658424 - RNA, 19 nt, Artificial Sequence
  Description of Artificial Sequence: Synthetic oligonucleotide
aagcaauggcccuuucuag

SEQ ID NO: 1658425 - RNA, 19 nt, Artificial Sequence
  Description of Artificial Sequence: Synthetic oligonucleotide
aaucccacggguccucagg

SEQ ID NO: 1658426 - RNA, 19 nt, Artificial Sequence
  Description of Artificial Sequence: Synthetic oligonucleotide
aaccuuggacugccaaacc

SEQ ID NO: 1658427 - RNA, 19 nt, Artificial Sequence
  Description of Artificial Sequence: Synthetic oligonucleotide
gauuuagucucccugcaga

SEQ ID NO: 1658428 - RNA, 19 nt, Artificial Sequence
  Description of Artificial Sequence: Synthetic oligonucleotide
aacacuugggaguauucaa

SEQ ID NO: 1658429 - RNA, 19 nt, Artificial Sequence
  Description of Artificial Sequence: Synthetic oligonucleotide
aagaaggauuuagucuccc

SEQ ID NO: 1658430 - RNA, 19 nt, Artificial Sequence
  Description of Artificial Sequence: Synthetic oligonucleotide
aaggccuuagagaacaaug

SEQ ID NO: 1658431 - RNA, 19 nt, Artificial Sequence
  Description of Artificial Sequence: Synthetic oligonucleotide
uuagaacaacuuuucauua

SEQ ID NO: 1658432 - RNA, 19 nt, Artificial Sequence
  Description of Artificial Sequence: Synthetic oligonucleotide
uccucuguugacaacggac

SEQ ID NO: 1658433 - RNA, 19 nt, Artificial Sequence
  Description of Artificial Sequence: Synthetic oligonucleotide
augcuauuggaaccaaaag

SEQ ID NO: 1658434 - RNA, 19 nt, Artificial Sequence
  Description of Artificial Sequence: Synthetic oligonucleotide
cagggauauguuaggaggg

SEQ ID NO: 1658435 - RNA, 19 nt, Artificial Sequence
  Description of Artificial Sequence: Synthetic oligonucleotide
cucagcuaacacuugggag

SEQ ID NO: 1658436 - RNA, 19 nt, Artificial Sequence
  Description of Artificial Sequence: Synthetic oligonucleotide
acaauggauuuccauuaag

SEQ ID NO: 1658437 - RNA, 19 nt, Artificial Sequence
  Description of Artificial Sequence: Synthetic oligonucleotide
ucucagcuaacacuuggga

SEQ ID NO: 1658438 - RNA, 19 nt, Artificial Sequence
  Description of Artificial Sequence: Synthetic oligonucleotide
gugaguauaccaaaucagc

SEQ ID NO: 1658439 - RNA, 19 nt, Artificial Sequence
  Description of Artificial Sequence: Synthetic oligonucleotide
auuacauauccaggcaggg

SEQ ID NO: 1658440 - RNA, 19 nt, Artificial Sequence
  Description of Artificial Sequence: Synthetic oligonucleotide
gaacaauggauuuccauua

SEQ ID NO: 1658441 - RNA, 19 nt, Artificial Sequence
  Description of Artificial Sequence: Synthetic oligonucleotide
uuguuugacuggaugugug

SEQ ID NO: 1658442 - RNA, 19 nt, Artificial Sequence
  Description of Artificial Sequence: Synthetic oligonucleotide
gugggcggaaaacagaaug

SEQ ID NO: 1658443 - RNA, 19 nt, Artificial Sequence
  Description of Artificial Sequence: Synthetic oligonucleotide
ugucaaaggauggacguac

SEQ ID NO: 1658444 - RNA, 19 nt, Artificial Sequence
  Description of Artificial Sequence: Synthetic oligonucleotide
caaaggauggacguaccgg

SEQ ID NO: 1658445 - RNA, 19 nt, Artificial Sequence
  Description of Artificial Sequence: Synthetic oligonucleotide
gagcggacagcucagaguc

SEQ ID NO: 1658446 - RNA, 19 nt, Artificial Sequence
  Description of Artificial Sequence: Synthetic oligonucleotide
acaacggacauuggcaggg

SEQ ID NO: 1658447 - RNA, 19 nt, Artificial Sequence
  Description of Artificial Sequence: Synthetic oligonucleotide
cuguugacaacggacauug

SEQ ID NO: 1658448 - RNA, 19 nt, Artificial Sequence
  Description of Artificial Sequence: Synthetic oligonucleotide
accggaauccaauauagua

SEQ ID NO: 1658449 - RNA, 19 nt, Artificial Sequence
  Description of Artificial Sequence: Synthetic oligonucleotide
acacuucucagcuaacacu

SEQ ID NO: 1658450 - RNA, 19 nt, Artificial Sequence
  Description of Artificial Sequence: Synthetic oligonucleotide
uggcauuuaagcugcugcc

SEQ ID NO: 1658451 - RNA, 19 nt, Artificial Sequence
  Description of Artificial Sequence: Synthetic oligonucleotide
caauggauuuccauuaaga

SEQ ID NO: 1658452 - RNA, 19 nt, Artificial Sequence
  Description of Artificial Sequence: Synthetic oligonucleotide
cuugggaguauucaauauc

SEQ ID NO: 1658453 - RNA, 19 nt, Artificial Sequence
  Description of Artificial Sequence: Synthetic oligonucleotide
ugggcggaaaacagaauga

SEQ ID NO: 1658454 - RNA, 19 nt, Artificial Sequence
  Description of Artificial Sequence: Synthetic oligonucleotide
ucucacaaagcccuuugau

SEQ ID NO: 1658455 - RNA, 19 nt, Artificial Sequence
  Description of Artificial Sequence: Synthetic oligonucleotide
ucguuauaguaucuguaaa

SEQ ID NO: 1658456 - RNA, 19 nt, Artificial Sequence
  Description of Artificial Sequence: Synthetic oligonucleotide
agggaaaugaagugacucu

SEQ ID NO: 1658457 - RNA, 19 nt, Artificial Sequence
  Description of Artificial Sequence: Synthetic oligonucleotide
guaccggaauccaauauag

SEQ ID NO: 1658458 - RNA, 19 nt, Artificial Sequence
  Description of Artificial Sequence: Synthetic oligonucleotide
aacaauggauuuccauuaa

SEQ ID NO: 1658459 - RNA, 19 nt, Artificial Sequence
  Description of Artificial Sequence: Synthetic oligonucleotide
guaaccuagcucuuccaug

SEQ ID NO: 1658460 - RNA, 19 nt, Artificial Sequence
  Description of Artificial Sequence: Synthetic oligonucleotide
uguuugacuggauguguga

SEQ ID NO: 1658461 - RNA, 19 nt, Artificial Sequence
  Description of Artificial Sequence: Synthetic oligonucleotide
uauccaggcagggauaugu

SEQ ID NO: 1658462 - RNA, 19 nt, Artificial Sequence
  Description of Artificial Sequence: Synthetic oligonucleotide
gacaacggacauuggcagg

SEQ ID NO: 1658463 - RNA, 19 nt, Artificial Sequence
  Description of Artificial Sequence: Synthetic oligonucleotide
uauuuugaaugggaagugu

SEQ ID NO: 1658464 - RNA, 19 nt, Artificial Sequence
  Description of Artificial Sequence: Synthetic oligonucleotide
caggauuuacacagagcgg

SEQ ID NO: 1658465 - RNA, 19 nt, Artificial Sequence
  Description of Artificial Sequence: Synthetic oligonucleotide
agugucaugaggucucggu

SEQ ID NO: 1658466 - RNA, 19 nt, Artificial Sequence
  Description of Artificial Sequence: Synthetic oligonucleotide
gacccaaccacgguacugg

SEQ ID NO: 1658467 - RNA, 19 nt, Artificial Sequence
  Description of Artificial Sequence: Synthetic oligonucleotide
gggaguauucaauauccag

SEQ ID NO: 1658468 - RNA, 19 nt, Artificial Sequence
  Description of Artificial Sequence: Synthetic oligonucleotide
cucccucggaaaauggucc

SEQ ID NO: 1658469 - RNA, 19 nt, Artificial Sequence
  Description of Artificial Sequence: Synthetic oligonucleotide
guauuugugaggugcugug

SEQ ID NO: 1658470 - RNA, 19 nt, Artificial Sequence
  Description of Artificial Sequence: Synthetic oligonucleotide
cugugaaucccacgggucc

SEQ ID NO: 1658471 - RNA, 19 nt, Artificial Sequence
  Description of Artificial Sequence: Synthetic oligonucleotide
aucccacggguccucaggc

SEQ ID NO: 1658472 - RNA, 19 nt, Artificial Sequence
  Description of Artificial Sequence: Synthetic oligonucleotide
gaugugugaguauaccaaa

SEQ ID NO: 1658473 - RNA, 19 nt, Artificial Sequence
  Description of Artificial Sequence: Synthetic oligonucleotide
uuugaaugggaagugucau

SEQ ID NO: 1658474 - RNA, 19 nt, Artificial Sequence
  Description of Artificial Sequence: Synthetic oligonucleotide
gagggaaaugaagugacuc

SEQ ID NO: 1658475 - RNA, 19 nt, Artificial Sequence
  Description of Artificial Sequence: Synthetic oligonucleotide
uggauacugugugaaagca

SEQ ID NO: 1658476 - RNA, 19 nt, Artificial Sequence
  Description of Artificial Sequence: Synthetic oligonucleotide
gagucaacugcguggagca

SEQ ID NO: 1658477 - RNA, 19 nt, Artificial Sequence
  Description of Artificial Sequence: Synthetic oligonucleotide
guagcaccuacuuccuggg

SEQ ID NO: 1658478 - RNA, 19 nt, Artificial Sequence
  Description of Artificial Sequence: Synthetic oligonucleotide
guaaaugcuauuggaacca

SEQ ID NO: 1658479 - RNA, 19 nt, Artificial Sequence
  Description of Artificial Sequence: Synthetic oligonucleotide
ucugugaaucccacggguc

SEQ ID NO: 1658480 - RNA, 19 nt, Artificial Sequence
  Description of Artificial Sequence: Synthetic oligonucleotide
gauagccucaucuguuuga

SEQ ID NO: 1658481 - RNA, 19 nt, Artificial Sequence
  Description of Artificial Sequence: Synthetic oligonucleotide
guuugaggacccaaccacg

SEQ ID NO: 1658482 - RNA, 19 nt, Artificial Sequence
  Description of Artificial Sequence: Synthetic oligonucleotide
gugaagaaggauuuagucu

SEQ ID NO: 1658483 - RNA, 19 nt, Artificial Sequence
  Description of Artificial Sequence: Synthetic oligonucleotide
agcaccuacuuccugggga

SEQ ID NO: 1658484 - RNA, 19 nt, Artificial Sequence
  Description of Artificial Sequence: Synthetic oligonucleotide
uacaaauccuuggaggauc

SEQ ID NO: 1658485 - RNA, 19 nt, Artificial Sequence
  Description of Artificial Sequence: Synthetic oligonucleotide
auauguccccauuggaggu

SEQ ID NO: 1658486 - RNA, 19 nt, Artificial Sequence
  Description of Artificial Sequence: Synthetic oligonucleotide
aguaucagguucuguucug

SEQ ID NO: 1658487 - RNA, 19 nt, Artificial Sequence
  Description of Artificial Sequence: Synthetic oligonucleotide
accuccaauccugcgauac

SEQ ID NO: 1658488 - RNA, 19 nt, Artificial Sequence
  Description of Artificial Sequence: Synthetic oligonucleotide
augaagugacucugauggg

SEQ ID NO: 1658489 - RNA, 19 nt, Artificial Sequence
  Description of Artificial Sequence: Synthetic oligonucleotide
ucggaaaaugguccaguuc

SEQ ID NO: 1658490 - RNA, 19 nt, Artificial Sequence
  Description of Artificial Sequence: Synthetic oligonucleotide
uucugacacaauucuuaca

SEQ ID NO: 1658491 - RNA, 19 nt, Artificial Sequence
  Description of Artificial Sequence: Synthetic oligonucleotide
ugaggacccaaccacggua

SEQ ID NO: 1658492 - RNA, 19 nt, Artificial Sequence
  Description of Artificial Sequence: Synthetic oligonucleotide
uuccaugacuuuguggaca

SEQ ID NO: 1658493 - RNA, 19 nt, Artificial Sequence
  Description of Artificial Sequence: Synthetic oligonucleotide
augggaagugucaugaggu

SEQ ID NO: 1658494 - RNA, 19 nt, Artificial Sequence
  Description of Artificial Sequence: Synthetic oligonucleotide
ugggaguauucaauaucca

SEQ ID NO: 1658495 - RNA, 19 nt, Artificial Sequence
  Description of Artificial Sequence: Synthetic oligonucleotide
ugucaauugugcuccacuu

SEQ ID NO: 1658496 - RNA, 19 nt, Artificial Sequence
  Description of Artificial Sequence: Synthetic oligonucleotide
guuugacuggaugugugag

SEQ ID NO: 1658497 - RNA, 19 nt, Artificial Sequence
  Description of Artificial Sequence: Synthetic oligonucleotide
uggaaguccacaucuugau

SEQ ID NO: 1658498 - RNA, 19 nt, Artificial Sequence
  Description of Artificial Sequence: Synthetic oligonucleotide
cucguuauaguaucuguaa

SEQ ID NO: 1658499 - RNA, 19 nt, Artificial Sequence
  Description of Artificial Sequence: Synthetic oligonucleotide
gacuuuguggacaguagca

SEQ ID NO: 1658500 - RNA, 19 nt, Artificial Sequence
  Description of Artificial Sequence: Synthetic oligonucleotide
accuuggacugccaaacca

SEQ ID NO: 1658501 - RNA, 19 nt, Artificial Sequence
  Description of Artificial Sequence: Synthetic oligonucleotide
uugacuggaugugugagua

SEQ ID NO: 1658502 - RNA, 19 nt, Artificial Sequence
  Description of Artificial Sequence: Synthetic oligonucleotide
gcagcuauacuguggauac

SEQ ID NO: 1658503 - RNA, 19 nt, Artificial Sequence
  Description of Artificial Sequence: Synthetic oligonucleotide
aguaucuguaaauggcauu

SEQ ID NO: 1658504 - RNA, 19 nt, Artificial Sequence
  Description of Artificial Sequence: Synthetic oligonucleotide
caccugucaauugugcucc

SEQ ID NO: 1658505 - RNA, 19 nt, Artificial Sequence
  Description of Artificial Sequence: Synthetic oligonucleotide
aucuguuugaggacccaac

SEQ ID NO: 1658506 - RNA, 19 nt, Artificial Sequence
  Description of Artificial Sequence: Synthetic oligonucleotide
ucggcguuuggcaaugaau

SEQ ID NO: 1658507 - RNA, 19 nt, Artificial Sequence
  Description of Artificial Sequence: Synthetic oligonucleotide
ggaaaacagaaugaccacc

SEQ ID NO: 1658508 - RNA, 19 nt, Artificial Sequence
  Description of Artificial Sequence: Synthetic oligonucleotide
acuugggaguauucaauau

SEQ ID NO: 1658509 - RNA, 19 nt, Artificial Sequence
  Description of Artificial Sequence: Synthetic oligonucleotide
uguugacaacggacauugg

SEQ ID NO: 1658510 - RNA, 19 nt, Artificial Sequence
  Description of Artificial Sequence: Synthetic oligonucleotide
gacaggauuuacacagagc

SEQ ID NO: 1658511 - RNA, 19 nt, Artificial Sequence
  Description of Artificial Sequence: Synthetic oligonucleotide
uccaauccugcgauacugu

SEQ ID NO: 1658512 - RNA, 19 nt, Artificial Sequence
  Description of Artificial Sequence: Synthetic oligonucleotide
auauguuaggagggaaaug

SEQ ID NO: 1658513 - RNA, 19 nt, Artificial Sequence
  Description of Artificial Sequence: Synthetic oligonucleotide
ccaaccacgguacugggcc

SEQ ID NO: 1658514 - RNA, 19 nt, Artificial Sequence
  Description of Artificial Sequence: Synthetic oligonucleotide
cucaaugugaucacuggua

SEQ ID NO: 1658515 - RNA, 19 nt, Artificial Sequence
  Description of Artificial Sequence: Synthetic oligonucleotide
gcauuuaagcugcugccag

SEQ ID NO: 1658516 - RNA, 19 nt, Artificial Sequence
  Description of Artificial Sequence: Synthetic oligonucleotide
caaccuuggacugccaaac

SEQ ID NO: 1658517 - RNA, 19 nt, Artificial Sequence
  Description of Artificial Sequence: Synthetic oligonucleotide
ggcguuuggcaaugaaugg

SEQ ID NO: 1658518 - RNA, 19 nt, Artificial Sequence
  Description of Artificial Sequence: Synthetic oligonucleotide
agucgguagggguuggggu

SEQ ID NO: 1658519 - RNA, 19 nt, Artificial Sequence
  Description of Artificial Sequence: Synthetic oligonucleotide
uguggacaguagcaccuac

SEQ ID NO: 1658520 - RNA, 19 nt, Artificial Sequence
  Description of Artificial Sequence: Synthetic oligonucleotide
aauccuuggaggaucccaa

SEQ ID NO: 1658521 - RNA, 19 nt, Artificial Sequence
  Description of Artificial Sequence: Synthetic oligonucleotide
gaagugucaugaggucucg

SEQ ID NO: 1658522 - RNA, 19 nt, Artificial Sequence
  Description of Artificial Sequence: Synthetic oligonucleotide
uugauagccucaucuguuu

SEQ ID NO: 1658523 - RNA, 19 nt, Artificial Sequence
  Description of Artificial Sequence: Synthetic oligonucleotide
uuggacugccaaaccaguc

SEQ ID NO: 1658524 - RNA, 19 nt, Artificial Sequence
  Description of Artificial Sequence: Synthetic oligonucleotide
uauuugugaggugcugugu

SEQ ID NO: 1658525 - RNA, 19 nt, Artificial Sequence
  Description of Artificial Sequence: Synthetic oligonucleotide
cauuaagagacuccgcucu

SEQ ID NO: 1658526 - RNA, 19 nt, Artificial Sequence
  Description of Artificial Sequence: Synthetic oligonucleotide
accaccucgcuucucuucu

SEQ ID NO: 1658527 - RNA, 19 nt, Artificial Sequence
  Description of Artificial Sequence: Synthetic oligonucleotide
agugacucugaugggauau

SEQ ID NO: 1658528 - RNA, 19 nt, Artificial Sequence
  Description of Artificial Sequence: Synthetic oligonucleotide
uaccggaauccaauauagu

SEQ ID NO: 1658529 - RNA, 19 nt, Artificial Sequence
  Description of Artificial Sequence: Synthetic oligonucleotide
cuccaauccugcgauacug

SEQ ID NO: 1658530 - RNA, 19 nt, Artificial Sequence
  Description of Artificial Sequence: Synthetic oligonucleotide
auaguauuugugaggugcu

SEQ ID NO: 1658531 - RNA, 19 nt, Artificial Sequence
  Description of Artificial Sequence: Synthetic oligonucleotide
aaauucgaauucagaguau

SEQ ID NO: 1658532 - RNA, 19 nt, Artificial Sequence
  Description of Artificial Sequence: Synthetic oligonucleotide
auucgaauucagaguauca

SEQ ID NO: 1658533 - RNA, 19 nt, Artificial Sequence
  Description of Artificial Sequence: Synthetic oligonucleotide
aagugucaugaggucucgg

SEQ ID NO: 1658534 - RNA, 19 nt, Artificial Sequence
  Description of Artificial Sequence: Synthetic oligonucleotide
gauauguuaggagggaaau

SEQ ID NO: 1658535 - RNA, 19 nt, Artificial Sequence
  Description of Artificial Sequence: Synthetic oligonucleotide
aaccagucgguagggguug

SEQ ID NO: 1658536 - RNA, 19 nt, Artificial Sequence
  Description of Artificial Sequence: Synthetic oligonucleotide
caucucguuauaguaucug

SEQ ID NO: 1658537 - RNA, 19 nt, Artificial Sequence
  Description of Artificial Sequence: Synthetic oligonucleotide
augugaucacugguaaaug

SEQ ID NO: 1658538 - RNA, 19 nt, Artificial Sequence
  Description of Artificial Sequence: Synthetic oligonucleotide
cuugauggggauccaccuc

SEQ ID NO: 1658539 - RNA, 19 nt, Artificial Sequence
  Description of Artificial Sequence: Synthetic oligonucleotide
accuacuuccuggggauag

SEQ ID NO: 1658540 - RNA, 19 nt, Artificial Sequence
  Description of Artificial Sequence: Synthetic oligonucleotide
uggacguaccggaauccaa

SEQ ID NO: 1658541 - RNA, 19 nt, Artificial Sequence
  Description of Artificial Sequence: Synthetic oligonucleotide
ccauguuuaacauuaauau

SEQ ID NO: 1658542 - RNA, 19 nt, Artificial Sequence
  Description of Artificial Sequence: Synthetic oligonucleotide
aaaccagucgguagggguu

SEQ ID NO: 1658543 - RNA, 19 nt, Artificial Sequence
  Description of Artificial Sequence: Synthetic oligonucleotide
ugugaaagcaauggcccuu

SEQ ID NO: 1658544 - RNA, 19 nt, Artificial Sequence
  Description of Artificial Sequence: Synthetic oligonucleotide
ugggaagugucaugagguc

SEQ ID NO: 1658545 - RNA, 19 nt, Artificial Sequence
  Description of Artificial Sequence: Synthetic oligonucleotide
gaaagcaauggcccuuucu

SEQ ID NO: 1658546 - RNA, 19 nt, Artificial Sequence
  Description of Artificial Sequence: Synthetic oligonucleotide
cuguuugaggacccaacca

SEQ ID NO: 1658547 - RNA, 19 nt, Artificial Sequence
  Description of Artificial Sequence: Synthetic oligonucleotide
gacuccgcucuucugaugu

SEQ ID NO: 1658548 - RNA, 19 nt, Artificial Sequence
  Description of Artificial Sequence: Synthetic oligonucleotide
ggauuuagucucccugcag

SEQ ID NO: 1658549 - RNA, 19 nt, Artificial Sequence
  Description of Artificial Sequence: Synthetic oligonucleotide
aaaugcuauuggaaccaaa

SEQ ID NO: 1658550 - RNA, 19 nt, Artificial Sequence
  Description of Artificial Sequence: Synthetic oligonucleotide
auuaagagacuccgcucuu

SEQ ID NO: 1658551 - RNA, 19 nt, Artificial Sequence
  Description of Artificial Sequence: Synthetic oligonucleotide
guauaccaaaucagccaag

SEQ ID NO: 1658552 - RNA, 19 nt, Artificial Sequence
  Description of Artificial Sequence: Synthetic oligonucleotide
ccuuggacugccaaaccag

SEQ ID NO: 1658553 - RNA, 19 nt, Artificial Sequence
  Description of Artificial Sequence: Synthetic oligonucleotide
ucccucggaaaauggucca

SEQ ID NO: 1658554 - RNA, 19 nt, Artificial Sequence
  Description of Artificial Sequence: Synthetic oligonucleotide
uuccgucccaucucguuau

SEQ ID NO: 1658555 - RNA, 19 nt, Artificial Sequence
  Description of Artificial Sequence: Synthetic oligonucleotide
gguccaagaagagucuuug

SEQ ID NO: 1658556 - RNA, 19 nt, Artificial Sequence
  Description of Artificial Sequence: Synthetic oligonucleotide
cacagagcggacagcucag

SEQ ID NO: 1658557 - RNA, 19 nt, Artificial Sequence
  Description of Artificial Sequence: Synthetic oligonucleotide
aggauggacguaccggaau

SEQ ID NO: 1658558 - RNA, 19 nt, Artificial Sequence
  Description of Artificial Sequence: Synthetic oligonucleotide
ugauggggauccaccucca

SEQ ID NO: 1658559 - RNA, 19 nt, Artificial Sequence
  Description of Artificial Sequence: Synthetic oligonucleotide
aagugacucugaugggaua

SEQ ID NO: 1658560 - RNA, 19 nt, Artificial Sequence
  Description of Artificial Sequence: Synthetic oligonucleotide
gagugggcggaaaacagaa

SEQ ID NO: 1658561 - RNA, 19 nt, Artificial Sequence
  Description of Artificial Sequence: Synthetic oligonucleotide
agguugugcaucugugaau

SEQ ID NO: 1658562 - RNA, 19 nt, Artificial Sequence
  Description of Artificial Sequence: Synthetic oligonucleotide
aggucucgguccaagaaga

SEQ ID NO: 1658563 - RNA, 19 nt, Artificial Sequence
  Description of Artificial Sequence: Synthetic oligonucleotide
uggaggugucuggagguug

SEQ ID NO: 1658564 - RNA, 19 nt, Artificial Sequence
  Description of Artificial Sequence: Synthetic oligonucleotide
ucuguugacaacggacauu

SEQ ID NO: 1658565 - RNA, 19 nt, Artificial Sequence
  Description of Artificial Sequence: Synthetic oligonucleotide
cuuagagaacaauggauuu

SEQ ID NO: 1658566 - RNA, 19 nt, Artificial Sequence
  Description of Artificial Sequence: Synthetic oligonucleotide
ggauccaccuccaauccug

SEQ ID NO: 1658567 - RNA, 19 nt, Artificial Sequence
  Description of Artificial Sequence: Synthetic oligonucleotide
gggguaaccuagcucuucc

SEQ ID NO: 1658568 - RNA, 19 nt, Artificial Sequence
  Description of Artificial Sequence: Synthetic oligonucleotide
uucggcguuuggcaaugaa

SEQ ID NO: 1658569 - RNA, 19 nt, Artificial Sequence
  Description of Artificial Sequence: Synthetic oligonucleotide
acguaccggaauccaauau

SEQ ID NO: 1658570 - RNA, 19 nt, Artificial Sequence
  Description of Artificial Sequence: Synthetic oligonucleotide
gucccaucucguuauagua

SEQ ID NO: 1658571 - RNA, 19 nt, Artificial Sequence
  Description of Artificial Sequence: Synthetic oligonucleotide
caugacuuuguggacagua

SEQ ID NO: 1658572 - RNA, 19 nt, Artificial Sequence
  Description of Artificial Sequence: Synthetic oligonucleotide
gguacugggccaaccuugg

SEQ ID NO: 1658573 - RNA, 19 nt, Artificial Sequence
  Description of Artificial Sequence: Synthetic oligonucleotide
ccagcuuauuuugaauggg

SEQ ID NO: 1658574 - RNA, 19 nt, Artificial Sequence
  Description of Artificial Sequence: Synthetic oligonucleotide
cuccacacuucucagcuaa

SEQ ID NO: 1658575 - RNA, 19 nt, Artificial Sequence
  Description of Artificial Sequence: Synthetic oligonucleotide
gaauucagaguaucagguu

SEQ ID NO: 1658576 - RNA, 19 nt, Artificial Sequence
  Description of Artificial Sequence: Synthetic oligonucleotide
caccucgcuucucuucucc

SEQ ID NO: 1658577 - RNA, 19 nt, Artificial Sequence
  Description of Artificial Sequence: Synthetic oligonucleotide
aagcccuuugauagccuca

SEQ ID NO: 1658578 - RNA, 19 nt, Artificial Sequence
  Description of Artificial Sequence: Synthetic oligonucleotide
caaaggguuucagggcccc

SEQ ID NO: 1658579 - RNA, 19 nt, Artificial Sequence
  Description of Artificial Sequence: Synthetic oligonucleotide
auacagggucucaauguga

SEQ ID NO: 1658580 - RNA, 19 nt, Artificial Sequence
  Description of Artificial Sequence: Synthetic oligonucleotide
augugugggccaccuguca

SEQ ID NO: 1658581 - RNA, 19 nt, Artificial Sequence
  Description of Artificial Sequence: Synthetic oligonucleotide
ggauggacguaccggaauc

SEQ ID NO: 1658582 - RNA, 19 nt, Artificial Sequence
  Description of Artificial Sequence: Synthetic oligonucleotide
gaggaucccaaagacuuua

SEQ ID NO: 1658583 - RNA, 19 nt, Artificial Sequence
  Description of Artificial Sequence: Synthetic oligonucleotide
cggcguuuggcaaugaaug

SEQ ID NO: 1658584 - RNA, 19 nt, Artificial Sequence
  Description of Artificial Sequence: Synthetic oligonucleotide
cagucgguagggguugggg

SEQ ID NO: 1658585 - RNA, 19 nt, Artificial Sequence
  Description of Artificial Sequence: Synthetic oligonucleotide
gucaaaggauggacguacc

SEQ ID NO: 1658586 - RNA, 19 nt, Artificial Sequence
  Description of Artificial Sequence: Synthetic oligonucleotide
cccaucucguuauaguauc

SEQ ID NO: 1658587 - RNA, 19 nt, Artificial Sequence
  Description of Artificial Sequence: Synthetic oligonucleotide
gacguaccggaauccaaua

SEQ ID NO: 1658588 - RNA, 19 nt, Artificial Sequence
  Description of Artificial Sequence: Synthetic oligonucleotide
augugugaguauaccaaau

SEQ ID NO: 1658589 - RNA, 19 nt, Artificial Sequence
  Description of Artificial Sequence: Synthetic oligonucleotide
ccauuaagagacuccgcuc

SEQ ID NO: 1658590 - RNA, 19 nt, Artificial Sequence
  Description of Artificial Sequence: Synthetic oligonucleotide
agucaacugcguggagcac

SEQ ID NO: 1658591 - RNA, 19 nt, Artificial Sequence
  Description of Artificial Sequence: Synthetic oligonucleotide
aggugcugugucaggggac

SEQ ID NO: 1658592 - RNA, 19 nt, Artificial Sequence
  Description of Artificial Sequence: Synthetic oligonucleotide
acggacauuggcagggagu

SEQ ID NO: 1658593 - RNA, 19 nt, Artificial Sequence
  Description of Artificial Sequence: Synthetic oligonucleotide
ccuuucuaggccaucccuc

SEQ ID NO: 1658594 - RNA, 19 nt, Artificial Sequence
  Description of Artificial Sequence: Synthetic oligonucleotide
auggacguaccggaaucca

SEQ ID NO: 1658595 - RNA, 19 nt, Artificial Sequence
  Description of Artificial Sequence: Synthetic oligonucleotide
guccaagaagagucuuuga

SEQ ID NO: 1658596 - RNA, 19 nt, Artificial Sequence
  Description of Artificial Sequence: Synthetic oligonucleotide
ccaccugucaauugugcuc

SEQ ID NO: 1658597 - RNA, 19 nt, Artificial Sequence
  Description of Artificial Sequence: Synthetic oligonucleotide
ugggccaaccuuggacugc

SEQ ID NO: 1658598 - RNA, 19 nt, Artificial Sequence
  Description of Artificial Sequence: Synthetic oligonucleotide
gggagugggcggaaaacag

SEQ ID NO: 1658599 - RNA, 19 nt, Artificial Sequence
  Description of Artificial Sequence: Synthetic oligonucleotide
caaugugaucacugguaaa

SEQ ID NO: 1658600 - RNA, 19 nt, Artificial Sequence
  Description of Artificial Sequence: Synthetic oligonucleotide
gucgguagggguuggggua

SEQ ID NO: 1658601 - RNA, 19 nt, Artificial Sequence
  Description of Artificial Sequence: Synthetic oligonucleotide
agacuccgcucuucugaug

SEQ ID NO: 1658602 - RNA, 19 nt, Artificial Sequence
  Description of Artificial Sequence: Synthetic oligonucleotide
ugggguaaccuagcucuuc

SEQ ID NO: 1658603 - RNA, 19 nt, Artificial Sequence
  Description of Artificial Sequence: Synthetic oligonucleotide
gaucacugguaaaugcuau

SEQ ID NO: 1658604 - RNA, 19 nt, Artificial Sequence
  Description of Artificial Sequence: Synthetic oligonucleotide
gaagugacucugaugggau

SEQ ID NO: 1658605 - RNA, 19 nt, Artificial Sequence
  Description of Artificial Sequence: Synthetic oligonucleotide
caaauccuuggaggauccc

SEQ ID NO: 1658606 - RNA, 19 nt, Artificial Sequence
  Description of Artificial Sequence: Synthetic oligonucleotide
agagaacaauggauuucca

SEQ ID NO: 1658607 - RNA, 19 nt, Artificial Sequence
  Description of Artificial Sequence: Synthetic oligonucleotide
ucgguagggguugggguaa

SEQ ID NO: 1658608 - RNA, 19 nt, Artificial Sequence
  Description of Artificial Sequence: Synthetic oligonucleotide
ucccacggguccucaggca

SEQ ID NO: 1658609 - RNA, 19 nt, Artificial Sequence
  Description of Artificial Sequence: Synthetic oligonucleotide
ccaaaggguuucagggccc

SEQ ID NO: 1658610 - RNA, 19 nt, Artificial Sequence
  Description of Artificial Sequence: Synthetic oligonucleotide
cuucuccuugcuuggaagu

SEQ ID NO: 1658611 - RNA, 19 nt, Artificial Sequence
  Description of Artificial Sequence: Synthetic oligonucleotide
ggcauuuaagcugcugcca

SEQ ID NO: 1658612 - RNA, 19 nt, Artificial Sequence
  Description of Artificial Sequence: Synthetic oligonucleotide
cuuggacugccaaaccagu

SEQ ID NO: 1658613 - RNA, 19 nt, Artificial Sequence
  Description of Artificial Sequence: Synthetic oligonucleotide
agcccuuugauagccucau

SEQ ID NO: 1658614 - RNA, 19 nt, Artificial Sequence
  Description of Artificial Sequence: Synthetic oligonucleotide
ugugggccaccugucaauu

SEQ ID NO: 1658615 - RNA, 19 nt, Artificial Sequence
  Description of Artificial Sequence: Synthetic oligonucleotide
aaauggcauuuaagcugcu

SEQ ID NO: 1658616 - RNA, 19 nt, Artificial Sequence
  Description of Artificial Sequence: Synthetic oligonucleotide
ggauuuacacagagcggac

SEQ ID NO: 1658617 - RNA, 19 nt, Artificial Sequence
  Description of Artificial Sequence: Synthetic oligonucleotide
gaugggauauguccccauu

SEQ ID NO: 1658618 - RNA, 19 nt, Artificial Sequence
  Description of Artificial Sequence: Synthetic oligonucleotide
gugugaaagcaauggcccu

SEQ ID NO: 1658619 - RNA, 19 nt, Artificial Sequence
  Description of Artificial Sequence: Synthetic oligonucleotide
cauuuaagcugcugccagu

SEQ ID NO: 1658620 - RNA, 19 nt, Artificial Sequence
  Description of Artificial Sequence: Synthetic oligonucleotide
ccuuagagaacaauggauu

SEQ ID NO: 1658621 - RNA, 19 nt, Artificial Sequence
  Description of Artificial Sequence: Synthetic oligonucleotide
cagagucaacugcguggag

SEQ ID NO: 1658622 - RNA, 19 nt, Artificial Sequence
  Description of Artificial Sequence: Synthetic oligonucleotide
ccucucacaaagcccuuug

SEQ ID NO: 1658623 - RNA, 19 nt, Artificial Sequence
  Description of Artificial Sequence: Synthetic oligonucleotide
cgaauucagaguaucaggu

SEQ ID NO: 1658624 - RNA, 19 nt, Artificial Sequence
  Description of Artificial Sequence: Synthetic oligonucleotide
ucgguccaagaagagucuu

SEQ ID NO: 1658625 - RNA, 19 nt, Artificial Sequence
  Description of Artificial Sequence: Synthetic oligonucleotide
cuggggauagggaucuccu

SEQ ID NO: 1658626 - RNA, 19 nt, Artificial Sequence
  Description of Artificial Sequence: Synthetic oligonucleotide
guaguggagcagcuauacu

SEQ ID NO: 1658627 - RNA, 19 nt, Artificial Sequence
  Description of Artificial Sequence: Synthetic oligonucleotide
ggugcugugucaggggaca

SEQ ID NO: 1658628 - RNA, 19 nt, Artificial Sequence
  Description of Artificial Sequence: Synthetic oligonucleotide
cuguggauacugugugaaa

SEQ ID NO: 1658629 - RNA, 19 nt, Artificial Sequence
  Description of Artificial Sequence: Synthetic oligonucleotide
acugcguggagcacagcuu

SEQ ID NO: 1658630 - RNA, 19 nt, Artificial Sequence
  Description of Artificial Sequence: Synthetic oligonucleotide
accagucgguagggguugg

SEQ ID NO: 1658631 - RNA, 19 nt, Artificial Sequence
  Description of Artificial Sequence: Synthetic oligonucleotide
ggauacugugugaaagcaa

SEQ ID NO: 1658632 - RNA, 19 nt, Artificial Sequence
  Description of Artificial Sequence: Synthetic oligonucleotide
ggacccaaccacgguacug

SEQ ID NO: 1658633 - RNA, 19 nt, Artificial Sequence
  Description of Artificial Sequence: Synthetic oligonucleotide
ccggaauccaauauaguau

SEQ ID NO: 1658634 - RNA, 19 nt, Artificial Sequence
  Description of Artificial Sequence: Synthetic oligonucleotide
ggagugggcggaaaacaga

SEQ ID NO: 1658635 - RNA, 19 nt, Artificial Sequence
  Description of Artificial Sequence: Synthetic oligonucleotide
accugucaauugugcucca

SEQ ID NO: 1658636 - RNA, 19 nt, Artificial Sequence
  Description of Artificial Sequence: Synthetic oligonucleotide
cggacauuggcagggagug

SEQ ID NO: 1658637 - RNA, 19 nt, Artificial Sequence
  Description of Artificial Sequence: Synthetic oligonucleotide
ggccaccugucaauugugc

SEQ ID NO: 1658638 - RNA, 19 nt, Artificial Sequence
  Description of Artificial Sequence: Synthetic oligonucleotide
ggucucgguccaagaagag

SEQ ID NO: 1658639 - RNA, 19 nt, Artificial Sequence
  Description of Artificial Sequence: Synthetic oligonucleotide
aggaucccaaagacuuuaa

SEQ ID NO: 1658640 - RNA, 19 nt, Artificial Sequence
  Description of Artificial Sequence: Synthetic oligonucleotide
cucgguccaagaagagucu

SEQ ID NO: 1658641 - RNA, 19 nt, Artificial Sequence
  Description of Artificial Sequence: Synthetic oligonucleotide
cucuguugacaacggacau

SEQ ID NO: 1658642 - RNA, 19 nt, Artificial Sequence
  Description of Artificial Sequence: Synthetic oligonucleotide
guacugggccaaccuugga

SEQ ID NO: 1658643 - RNA, 19 nt, Artificial Sequence
  Description of Artificial Sequence: Synthetic oligonucleotide
agugggcggaaaacagaau

SEQ ID NO: 1658644 - RNA, 19 nt, Artificial Sequence
  Description of Artificial Sequence: Synthetic oligonucleotide
gccuuagagaacaauggau

SEQ ID NO: 1658645 - RNA, 19 nt, Artificial Sequence
  Description of Artificial Sequence: Synthetic oligonucleotide
cacgguacugggccaaccu

SEQ ID NO: 1658646 - RNA, 19 nt, Artificial Sequence
  Description of Artificial Sequence: Synthetic oligonucleotide
ggaggggaugugugggcca

SEQ ID NO: 1658647 - RNA, 19 nt, Artificial Sequence
  Description of Artificial Sequence: Synthetic oligonucleotide
ucaugaggucucgguccaa

SEQ ID NO: 1658648 - RNA, 19 nt, Artificial Sequence
  Description of Artificial Sequence: Synthetic oligonucleotide
cuucauggugggcuuccgu

SEQ ID NO: 1658649 - RNA, 19 nt, Artificial Sequence
  Description of Artificial Sequence: Synthetic oligonucleotide
caaaucagccaaggccuua

SEQ ID NO: 1658650 - RNA, 19 nt, Artificial Sequence
  Description of Artificial Sequence: Synthetic oligonucleotide
caauugugcuccacuucau

SEQ ID NO: 1658651 - RNA, 19 nt, Artificial Sequence
  Description of Artificial Sequence: Synthetic oligonucleotide
gcguuuggcaaugaauggu

SEQ ID NO: 1658652 - RNA, 19 nt, Artificial Sequence
  Description of Artificial Sequence: Synthetic oligonucleotide
gggguucggcguuuggcaa

SEQ ID NO: 1658653 - RNA, 19 nt, Artificial Sequence
  Description of Artificial Sequence: Synthetic oligonucleotide
ccaguaguggagcagcuau

SEQ ID NO: 1658654 - RNA, 19 nt, Artificial Sequence
  Description of Artificial Sequence: Synthetic oligonucleotide
cguaccggaauccaauaua

SEQ ID NO: 1658655 - RNA, 19 nt, Artificial Sequence
  Description of Artificial Sequence: Synthetic oligonucleotide
gacugccaaaccagucggu

SEQ ID NO: 1658656 - RNA, 19 nt, Artificial Sequence
  Description of Artificial Sequence: Synthetic oligonucleotide
ucccugcagacaggauuua

SEQ ID NO: 1658657 - RNA, 19 nt, Artificial Sequence
  Description of Artificial Sequence: Synthetic oligonucleotide
gcggacagcucagagucaa

SEQ ID NO: 1658658 - RNA, 19 nt, Artificial Sequence
  Description of Artificial Sequence: Synthetic oligonucleotide
ggacguaccggaauccaau

SEQ ID NO: 1658659 - RNA, 19 nt, Artificial Sequence
  Description of Artificial Sequence: Synthetic oligonucleotide
ggaugaggaggggaugugu

SEQ ID NO: 1658660 - RNA, 19 nt, Artificial Sequence
  Description of Artificial Sequence: Synthetic oligonucleotide
gcaccuacuuccuggggau

SEQ ID NO: 1658661 - RNA, 19 nt, Artificial Sequence
  Description of Artificial Sequence: Synthetic oligonucleotide
cccucggaaaaugguccag

SEQ ID NO: 1658662 - RNA, 19 nt, Artificial Sequence
  Description of Artificial Sequence: Synthetic oligonucleotide
caacugcguggagcacagc

SEQ ID NO: 1658663 - RNA, 19 nt, Artificial Sequence
  Description of Artificial Sequence: Synthetic oligonucleotide
cggaauccaauauaguauu

SEQ ID NO: 1658664 - RNA, 19 nt, Artificial Sequence
  Description of Artificial Sequence: Synthetic oligonucleotide
cccugcagacaggauuuac

SEQ ID NO: 1658665 - RNA, 19 nt, Artificial Sequence
  Description of Artificial Sequence: Synthetic oligonucleotide
ccgcucuucugauguuuuc

SEQ ID NO: 1658666 - RNA, 19 nt, Artificial Sequence
  Description of Artificial Sequence: Synthetic oligonucleotide
gcuaacacuugggaguauu

SEQ ID NO: 1658667 - RNA, 19 nt, Artificial Sequence
  Description of Artificial Sequence: Synthetic oligonucleotide
ggagggaaaugaagugacu

SEQ ID NO: 1658668 - RNA, 19 nt, Artificial Sequence
  Description of Artificial Sequence: Synthetic oligonucleotide
ggaggugucuggagguugu

SEQ ID NO: 1658669 - RNA, 19 nt, Artificial Sequence
  Description of Artificial Sequence: Synthetic oligonucleotide
ggguugggguaaccuagcu

SEQ ID NO: 1658670 - RNA, 19 nt, Artificial Sequence
  Description of Artificial Sequence: Synthetic oligonucleotide
ccagucgguagggguuggg

SEQ ID NO: 1658671 - RNA, 19 nt, Artificial Sequence
  Description of Artificial Sequence: Synthetic oligonucleotide
ccaucucguuauaguaucu

SEQ ID NO: 1658672 - RNA, 19 nt, Artificial Sequence
  Description of Artificial Sequence: Synthetic oligonucleotide
caacuucaccaugccuucu

SEQ ID NO: 1658673 - RNA, 19 nt, Artificial Sequence
  Description of Artificial Sequence: Synthetic oligonucleotide
ccaccucgcuucucuucuc

SEQ ID NO: 1658674 - RNA, 19 nt, Artificial Sequence
  Description of Artificial Sequence: Synthetic oligonucleotide
ggguucggcguuuggcaau

SEQ ID NO: 1658675 - RNA, 19 nt, Artificial Sequence
  Description of Artificial Sequence: Synthetic oligonucleotide
cgucccaucucguuauagu

SEQ ID NO: 1658676 - RNA, 19 nt, Artificial Sequence
  Description of Artificial Sequence: Synthetic oligonucleotide
ggggaugugugggccaccu

SEQ ID NO: 1658677 - RNA, 19 nt, Artificial Sequence
  Description of Artificial Sequence: Synthetic oligonucleotide
caccuccaauccugcgaua

SEQ ID NO: 1658678 - RNA, 19 nt, Artificial Sequence
  Description of Artificial Sequence: Synthetic oligonucleotide
gccaguaguggagcagcua

SEQ ID NO: 1658679 - RNA, 19 nt, Artificial Sequence
  Description of Artificial Sequence: Synthetic oligonucleotide
cagcuauacuguggauacu

SEQ ID NO: 1658680 - RNA, 19 nt, Artificial Sequence
  Description of Artificial Sequence: Synthetic oligonucleotide
ccaauccugcgauacuguu

SEQ ID NO: 1658681 - RNA, 19 nt, Artificial Sequence
  Description of Artificial Sequence: Synthetic oligonucleotide
cuaggccaucccucuccau

SEQ ID NO: 1658682 - RNA, 19 nt, Artificial Sequence
  Description of Artificial Sequence: Synthetic oligonucleotide
acggguccucaggcagggu

SEQ ID NO: 1658683 - RNA, 19 nt, Artificial Sequence
  Description of Artificial Sequence: Synthetic oligonucleotide
ccaaggccuuagagaacaa

SEQ ID NO: 1658684 - RNA, 19 nt, Artificial Sequence
  Description of Artificial Sequence: Synthetic oligonucleotide
ccuccaauccugcgauacu

SEQ ID NO: 1658685 - RNA, 19 nt, Artificial Sequence
  Description of Artificial Sequence: Synthetic oligonucleotide
gcguggagcacagcuuguu

SEQ ID NO: 1658686 - RNA, 19 nt, Artificial Sequence
  Description of Artificial Sequence: Synthetic oligonucleotide
cguggagcacagcuuguuu

SEQ ID NO: 1658687 - RNA, 19 nt, Artificial Sequence
  Description of Artificial Sequence: Synthetic oligonucleotide
gaaacaggaauuugcaucg

SEQ ID NO: 1658688 - RNA, 19 nt, Artificial Sequence
  Description of Artificial Sequence: Synthetic oligonucleotide
aacacugaccucuagaugu

SEQ ID NO: 1658689 - RNA, 19 nt, Artificial Sequence
  Description of Artificial Sequence: Synthetic oligonucleotide
agaaacaggaauuugcauc

SEQ ID NO: 1658690 - RNA, 19 nt, Artificial Sequence
  Description of Artificial Sequence: Synthetic oligonucleotide
uacgcaaaccaaaagaagc

SEQ ID NO: 1658691 - RNA, 19 nt, Artificial Sequence
  Description of Artificial Sequence: Synthetic oligonucleotide
aagggugucagagagaauc

SEQ ID NO: 1658692 - RNA, 19 nt, Artificial Sequence
  Description of Artificial Sequence: Synthetic oligonucleotide
uuaauuagaaacaggaauu

SEQ ID NO: 1658693 - RNA, 19 nt, Artificial Sequence
  Description of Artificial Sequence: Synthetic oligonucleotide
gaugagguucccaaaaugg

SEQ ID NO: 1658694 - RNA, 19 nt, Artificial Sequence
  Description of Artificial Sequence: Synthetic oligonucleotide
cucgcaaagacucaggagc

SEQ ID NO: 1658695 - RNA, 19 nt, Artificial Sequence
  Description of Artificial Sequence: Synthetic oligonucleotide
cuagaugucaccucuacac

SEQ ID NO: 1658696 - RNA, 19 nt, Artificial Sequence
  Description of Artificial Sequence: Synthetic oligonucleotide
caugcugucagcaccaggg

SEQ ID NO: 1658697 - RNA, 19 nt, Artificial Sequence
  Description of Artificial Sequence: Synthetic oligonucleotide
aagagagcaagcuggagcu

SEQ ID NO: 1658698 - RNA, 19 nt, Artificial Sequence
  Description of Artificial Sequence: Synthetic oligonucleotide
ugcaaucgcgugcagagcg

SEQ ID NO: 1658699 - RNA, 19 nt, Artificial Sequence
  Description of Artificial Sequence: Synthetic oligonucleotide
agagagaauccacacacuc

SEQ ID NO: 1658700 - RNA, 19 nt, Artificial Sequence
  Description of Artificial Sequence: Synthetic oligonucleotide
uccguuucagcacagcugc

SEQ ID NO: 1658701 - RNA, 19 nt, Artificial Sequence
  Description of Artificial Sequence: Synthetic oligonucleotide
aaccauuucagcugggcca

SEQ ID NO: 1658702 - RNA, 19 nt, Artificial Sequence
  Description of Artificial Sequence: Synthetic oligonucleotide
cuuggccacacacauaugg

SEQ ID NO: 1658703 - RNA, 19 nt, Artificial Sequence
  Description of Artificial Sequence: Synthetic oligonucleotide
ugagguucccaaaaugggc

SEQ ID NO: 1658704 - RNA, 19 nt, Artificial Sequence
  Description of Artificial Sequence: Synthetic oligonucleotide
agcuucgcagagcaaaggc

SEQ ID NO: 1658705 - RNA, 19 nt, Artificial Sequence
  Description of Artificial Sequence: Synthetic oligonucleotide
uguaugucacucuugguaa

SEQ ID NO: 1658706 - RNA, 19 nt, Artificial Sequence
  Description of Artificial Sequence: Synthetic oligonucleotide
gaaggcaacgccaucaagc

SEQ ID NO: 1658707 - RNA, 19 nt, Artificial Sequence
  Description of Artificial Sequence: Synthetic oligonucleotide
aauuagaaacaggaauuug

SEQ ID NO: 1658708 - RNA, 19 nt, Artificial Sequence
  Description of Artificial Sequence: Synthetic oligonucleotide
uugguaacaccuguggagg

SEQ ID NO: 1658709 - RNA, 19 nt, Artificial Sequence
  Description of Artificial Sequence: Synthetic oligonucleotide
caagagagcaagcuggagc

SEQ ID NO: 1658710 - RNA, 19 nt, Artificial Sequence
  Description of Artificial Sequence: Synthetic oligonucleotide
aaggcaacgccaucaagcu

SEQ ID NO: 1658711 - RNA, 19 nt, Artificial Sequence
  Description of Artificial Sequence: Synthetic oligonucleotide
guagacuggagaccaaggg

SEQ ID NO: 1658712 - RNA, 19 nt, Artificial Sequence
  Description of Artificial Sequence: Synthetic oligonucleotide
acauggaugguaaaggaag

SEQ ID NO: 1658713 - RNA, 19 nt, Artificial Sequence
  Description of Artificial Sequence: Synthetic oligonucleotide
ucaaccaccaccucgcaaa

SEQ ID NO: 1658714 - RNA, 19 nt, Artificial Sequence
  Description of Artificial Sequence: Synthetic oligonucleotide
ucccaaaaugggcugcugg

SEQ ID NO: 1658715 - RNA, 19 nt, Artificial Sequence
  Description of Artificial Sequence: Synthetic oligonucleotide
ugagggaguagacuggaga

SEQ ID NO: 1658716 - RNA, 19 nt, Artificial Sequence
  Description of Artificial Sequence: Synthetic oligonucleotide
aagcuggcucuauccaugc

SEQ ID NO: 1658717 - RNA, 19 nt, Artificial Sequence
  Description of Artificial Sequence: Synthetic oligonucleotide
ucaaccagugagcagccca

SEQ ID NO: 1658718 - RNA, 19 nt, Artificial Sequence
  Description of Artificial Sequence: Synthetic oligonucleotide
acgcaaaccaaaagaagcc

SEQ ID NO: 1658719 - RNA, 19 nt, Artificial Sequence
  Description of Artificial Sequence: Synthetic oligonucleotide
aguccgagcucuccgauuc

SEQ ID NO: 1658720 - RNA, 19 nt, Artificial Sequence
  Description of Artificial Sequence: Synthetic oligonucleotide
cuggagucaggaaugagug

SEQ ID NO: 1658721 - RNA, 19 nt, Artificial Sequence
  Description of Artificial Sequence: Synthetic oligonucleotide
agucggagccuguacacac

SEQ ID NO: 1658722 - RNA, 19 nt, Artificial Sequence
  Description of Artificial Sequence: Synthetic oligonucleotide
ucuugguaacaccugugga

SEQ ID NO: 1658723 - RNA, 19 nt, Artificial Sequence
  Description of Artificial Sequence: Synthetic oligonucleotide
gagggaguagacuggagac

SEQ ID NO: 1658724 - RNA, 19 nt, Artificial Sequence
  Description of Artificial Sequence: Synthetic oligonucleotide
aaaaugggcugcugggccu

SEQ ID NO: 1658725 - RNA, 19 nt, Artificial Sequence
  Description of Artificial Sequence: Synthetic oligonucleotide
ucggagccuguacacaccg

SEQ ID NO: 1658726 - RNA, 19 nt, Artificial Sequence
  Description of Artificial Sequence: Synthetic oligonucleotide
aaaggauacgcaaaccaaa

SEQ ID NO: 1658727 - RNA, 19 nt, Artificial Sequence
  Description of Artificial Sequence: Synthetic oligonucleotide
ucuagaugucaccucuaca

SEQ ID NO: 1658728 - RNA, 19 nt, Artificial Sequence
  Description of Artificial Sequence: Synthetic oligonucleotide
ugucagagagaauccacac

SEQ ID NO: 1658729 - RNA, 19 nt, Artificial Sequence
  Description of Artificial Sequence: Synthetic oligonucleotide
ucgcaaagacucaggagcc

SEQ ID NO: 1658730 - RNA, 19 nt, Artificial Sequence
  Description of Artificial Sequence: Synthetic oligonucleotide
caccucuacaccaggaggc

SEQ ID NO: 1658731 - RNA, 19 nt, Artificial Sequence
  Description of Artificial Sequence: Synthetic oligonucleotide
gaaacccucaggccugagg

SEQ ID NO: 1658732 - RNA, 19 nt, Artificial Sequence
  Description of Artificial Sequence: Synthetic oligonucleotide
cugcgagaccgcuugaucc

SEQ ID NO: 1658733 - RNA, 19 nt, Artificial Sequence
  Description of Artificial Sequence: Synthetic oligonucleotide
uggauugucuugcccacug

SEQ ID NO: 1658734 - RNA, 19 nt, Artificial Sequence
  Description of Artificial Sequence: Synthetic oligonucleotide
auugucuugcccacugggc

SEQ ID NO: 1658735 - RNA, 19 nt, Artificial Sequence
  Description of Artificial Sequence: Synthetic oligonucleotide
augguaaaggaaggcaacg

SEQ ID NO: 1658736 - RNA, 19 nt, Artificial Sequence
  Description of Artificial Sequence: Synthetic oligonucleotide
acggguuccugccuccucc

SEQ ID NO: 1658737 - RNA, 19 nt, Artificial Sequence
  Description of Artificial Sequence: Synthetic oligonucleotide
agucaggggccacagauga

SEQ ID NO: 1658738 - RNA, 19 nt, Artificial Sequence
  Description of Artificial Sequence: Synthetic oligonucleotide
ucuccguuucagcacagcu

SEQ ID NO: 1658739 - RNA, 19 nt, Artificial Sequence
  Description of Artificial Sequence: Synthetic oligonucleotide
aggauacgcaaaccaaaag

SEQ ID NO: 1658740 - RNA, 19 nt, Artificial Sequence
  Description of Artificial Sequence: Synthetic oligonucleotide
ggauacgcaaaccaaaaga

SEQ ID NO: 1658741 - RNA, 19 nt, Artificial Sequence
  Description of Artificial Sequence: Synthetic oligonucleotide
accagugagcagcccaagc

SEQ ID NO: 1658742 - RNA, 19 nt, Artificial Sequence
  Description of Artificial Sequence: Synthetic oligonucleotide
ggugcaaucgcgugcagag

SEQ ID NO: 1658743 - RNA, 19 nt, Artificial Sequence
  Description of Artificial Sequence: Synthetic oligonucleotide
cuaccagaagcaacugggg

SEQ ID NO: 1658744 - RNA, 19 nt, Artificial Sequence
  Description of Artificial Sequence: Synthetic oligonucleotide
gguaaaggaaggcaacgcc

SEQ ID NO: 1658745 - RNA, 19 nt, Artificial Sequence
  Description of Artificial Sequence: Synthetic oligonucleotide
uaauuagaaacaggaauuu

SEQ ID NO: 1658746 - RNA, 19 nt, Artificial Sequence
  Description of Artificial Sequence: Synthetic oligonucleotide
augagguucccaaaauggg

SEQ ID NO: 1658747 - RNA, 19 nt, Artificial Sequence
  Description of Artificial Sequence: Synthetic oligonucleotide
cuauccaugccaucuccag

SEQ ID NO: 1658748 - RNA, 19 nt, Artificial Sequence
  Description of Artificial Sequence: Synthetic oligonucleotide
gaugguaaaggaaggcaac

SEQ ID NO: 1658749 - RNA, 19 nt, Artificial Sequence
  Description of Artificial Sequence: Synthetic oligonucleotide
aucauugccuccagguccc

SEQ ID NO: 1658750 - RNA, 19 nt, Artificial Sequence
  Description of Artificial Sequence: Synthetic oligonucleotide
ugugcguggaguugggccu

SEQ ID NO: 1658751 - RNA, 19 nt, Artificial Sequence
  Description of Artificial Sequence: Synthetic oligonucleotide
ggaaguuccggugcaaucg

SEQ ID NO: 1658752 - RNA, 19 nt, Artificial Sequence
  Description of Artificial Sequence: Synthetic oligonucleotide
accucuagaugucaccucu

SEQ ID NO: 1658753 - RNA, 19 nt, Artificial Sequence
  Description of Artificial Sequence: Synthetic oligonucleotide
gaccgcuugauccggcgcg

SEQ ID NO: 1658754 - RNA, 19 nt, Artificial Sequence
  Description of Artificial Sequence: Synthetic oligonucleotide
ugguaaaggaaggcaacgc

SEQ ID NO: 1658755 - RNA, 19 nt, Artificial Sequence
  Description of Artificial Sequence: Synthetic oligonucleotide
acaacggguuccugccucc

SEQ ID NO: 1658756 - RNA, 19 nt, Artificial Sequence
  Description of Artificial Sequence: Synthetic oligonucleotide
gaaguuccggugcaaucgc

SEQ ID NO: 1658757 - RNA, 19 nt, Artificial Sequence
  Description of Artificial Sequence: Synthetic oligonucleotide
cugugcguggaguugggcc

SEQ ID NO: 1658758 - RNA, 19 nt, Artificial Sequence
  Description of Artificial Sequence: Synthetic oligonucleotide
ggaggaaccauuucagcug

SEQ ID NO: 1658759 - RNA, 19 nt, Artificial Sequence
  Description of Artificial Sequence: Synthetic oligonucleotide
auacgcaaaccaaaagaag

SEQ ID NO: 1658760 - RNA, 19 nt, Artificial Sequence
  Description of Artificial Sequence: Synthetic oligonucleotide
gaagcaacuggggcggagg

SEQ ID NO: 1658761 - RNA, 19 nt, Artificial Sequence
  Description of Artificial Sequence: Synthetic oligonucleotide
ggcacaacccucuggauug

SEQ ID NO: 1658762 - RNA, 19 nt, Artificial Sequence
  Description of Artificial Sequence: Synthetic oligonucleotide
cuucgcagagcaaaggcca

SEQ ID NO: 1658763 - RNA, 19 nt, Artificial Sequence
  Description of Artificial Sequence: Synthetic oligonucleotide
uuugcaucggggaggcuaa

SEQ ID NO: 1658764 - RNA, 19 nt, Artificial Sequence
  Description of Artificial Sequence: Synthetic oligonucleotide
aaggauacgcaaaccaaaa

SEQ ID NO: 1658765 - RNA, 19 nt, Artificial Sequence
  Description of Artificial Sequence: Synthetic oligonucleotide
aaacaggaauuugcaucgg

SEQ ID NO: 1658766 - RNA, 19 nt, Artificial Sequence
  Description of Artificial Sequence: Synthetic oligonucleotide
aggcuaaaaggauacgcaa

SEQ ID NO: 1658767 - RNA, 19 nt, Artificial Sequence
  Description of Artificial Sequence: Synthetic oligonucleotide
agugagacuggagucagga

SEQ ID NO: 1658768 - RNA, 19 nt, Artificial Sequence
  Description of Artificial Sequence: Synthetic oligonucleotide
agccuguacacaccgucuc

SEQ ID NO: 1658769 - RNA, 19 nt, Artificial Sequence
  Description of Artificial Sequence: Synthetic oligonucleotide
ucuggauugucuugcccac

SEQ ID NO: 1658770 - RNA, 19 nt, Artificial Sequence
  Description of Artificial Sequence: Synthetic oligonucleotide
gucaccucuacaccaggag

SEQ ID NO: 1658771 - RNA, 19 nt, Artificial Sequence
  Description of Artificial Sequence: Synthetic oligonucleotide
ugaccucuagaugucaccu

SEQ ID NO: 1658772 - RNA, 19 nt, Artificial Sequence
  Description of Artificial Sequence: Synthetic oligonucleotide
caagcuggcucuauccaug

SEQ ID NO: 1658773 - RNA, 19 nt, Artificial Sequence
  Description of Artificial Sequence: Synthetic oligonucleotide
cucuacaccaggaggccgc

SEQ ID NO: 1658774 - RNA, 19 nt, Artificial Sequence
  Description of Artificial Sequence: Synthetic oligonucleotide
guaaaggaaggcaacgcca

SEQ ID NO: 1658775 - RNA, 19 nt, Artificial Sequence
  Description of Artificial Sequence: Synthetic oligonucleotide
agaccgcuugauccggcgc

SEQ ID NO: 1658776 - RNA, 19 nt, Artificial Sequence
  Description of Artificial Sequence: Synthetic oligonucleotide
uucgcagagcaaaggccag

SEQ ID NO: 1658777 - RNA, 19 nt, Artificial Sequence
  Description of Artificial Sequence: Synthetic oligonucleotide
ggcaacgccaucaagcugc

SEQ ID NO: 1658778 - RNA, 19 nt, Artificial Sequence
  Description of Artificial Sequence: Synthetic oligonucleotide
ggcacauggaugguaaagg

SEQ ID NO: 1658779 - RNA, 19 nt, Artificial Sequence
  Description of Artificial Sequence: Synthetic oligonucleotide
ggagucaggaaugagugug

SEQ ID NO: 1658780 - RNA, 19 nt, Artificial Sequence
  Description of Artificial Sequence: Synthetic oligonucleotide
gaguagacuggagaccaag

SEQ ID NO: 1658781 - RNA, 19 nt, Artificial Sequence
  Description of Artificial Sequence: Synthetic oligonucleotide
cugaccucuagaugucacc

SEQ ID NO: 1658782 - RNA, 19 nt, Artificial Sequence
  Description of Artificial Sequence: Synthetic oligonucleotide
gcguguaugucacucuugg

SEQ ID NO: 1658783 - RNA, 19 nt, Artificial Sequence
  Description of Artificial Sequence: Synthetic oligonucleotide
cuccguuucagcacagcug

SEQ ID NO: 1658784 - RNA, 19 nt, Artificial Sequence
  Description of Artificial Sequence: Synthetic oligonucleotide
cacacauaugggccaagag

SEQ ID NO: 1658785 - RNA, 19 nt, Artificial Sequence
  Description of Artificial Sequence: Synthetic oligonucleotide
aaggccauggcagcccaag

SEQ ID NO: 1658786 - RNA, 19 nt, Artificial Sequence
  Description of Artificial Sequence: Synthetic oligonucleotide
caagcggccucuucugugc

SEQ ID NO: 1658787 - RNA, 19 nt, Artificial Sequence
  Description of Artificial Sequence: Synthetic oligonucleotide
ugcguguaugucacucuug

SEQ ID NO: 1658788 - RNA, 19 nt, Artificial Sequence
  Description of Artificial Sequence: Synthetic oligonucleotide
aacaccuguggaggcagag

SEQ ID NO: 1658789 - RNA, 19 nt, Artificial Sequence
  Description of Artificial Sequence: Synthetic oligonucleotide
ggaggcuaaaaggauacgc

SEQ ID NO: 1658790 - RNA, 19 nt, Artificial Sequence
  Description of Artificial Sequence: Synthetic oligonucleotide
gagaccgcuugauccggcg

SEQ ID NO: 1658791 - RNA, 19 nt, Artificial Sequence
  Description of Artificial Sequence: Synthetic oligonucleotide
cucuagaugucaccucuac

SEQ ID NO: 1658792 - RNA, 19 nt, Artificial Sequence
  Description of Artificial Sequence: Synthetic oligonucleotide
aacggguuccugccuccuc

SEQ ID NO: 1658793 - RNA, 19 nt, Artificial Sequence
  Description of Artificial Sequence: Synthetic oligonucleotide
uuccggugcaaucgcgugc

SEQ ID NO: 1658794 - RNA, 19 nt, Artificial Sequence
  Description of Artificial Sequence: Synthetic oligonucleotide
aucgcgugcagagcguggc

SEQ ID NO: 1658795 - RNA, 19 nt, Artificial Sequence
  Description of Artificial Sequence: Synthetic oligonucleotide
cacucuuucucugcugccg

SEQ ID NO: 1658796 - RNA, 19 nt, Artificial Sequence
  Description of Artificial Sequence: Synthetic oligonucleotide
aagcggccucuucugugcg

SEQ ID NO: 1658797 - RNA, 19 nt, Artificial Sequence
  Description of Artificial Sequence: Synthetic oligonucleotide
accucgcaaagacucagga

SEQ ID NO: 1658798 - RNA, 19 nt, Artificial Sequence
  Description of Artificial Sequence: Synthetic oligonucleotide
gagcucuccgauucagggc

SEQ ID NO: 1658799 - RNA, 19 nt, Artificial Sequence
  Description of Artificial Sequence: Synthetic oligonucleotide
aaggagucaggggccacag

SEQ ID NO: 1658800 - RNA, 19 nt, Artificial Sequence
  Description of Artificial Sequence: Synthetic oligonucleotide
uggaccuaucauugccucc

SEQ ID NO: 1658801 - RNA, 19 nt, Artificial Sequence
  Description of Artificial Sequence: Synthetic oligonucleotide
aucggggaggcuaaaagga

SEQ ID NO: 1658802 - RNA, 19 nt, Artificial Sequence
  Description of Artificial Sequence: Synthetic oligonucleotide
ugcucgaggagcuggggaa

SEQ ID NO: 1658803 - RNA, 19 nt, Artificial Sequence
  Description of Artificial Sequence: Synthetic oligonucleotide
ugguaacaccuguggaggc

SEQ ID NO: 1658804 - RNA, 19 nt, Artificial Sequence
  Description of Artificial Sequence: Synthetic oligonucleotide
accuaucauugccuccagg

SEQ ID NO: 1658805 - RNA, 19 nt, Artificial Sequence
  Description of Artificial Sequence: Synthetic oligonucleotide
ucuguccuggaccuaucau

SEQ ID NO: 1658806 - RNA, 19 nt, Artificial Sequence
  Description of Artificial Sequence: Synthetic oligonucleotide
ugacaacacugaccucuag

SEQ ID NO: 1658807 - RNA, 19 nt, Artificial Sequence
  Description of Artificial Sequence: Synthetic oligonucleotide
caacacugaccucuagaug

SEQ ID NO: 1658808 - RNA, 19 nt, Artificial Sequence
  Description of Artificial Sequence: Synthetic oligonucleotide
cuccugacaacacugaccu

SEQ ID NO: 1658809 - RNA, 19 nt, Artificial Sequence
  Description of Artificial Sequence: Synthetic oligonucleotide
caagugagacuggagucag

SEQ ID NO: 1658810 - RNA, 19 nt, Artificial Sequence
  Description of Artificial Sequence: Synthetic oligonucleotide
agcuggcucuauccaugcc

SEQ ID NO: 1658811 - RNA, 19 nt, Artificial Sequence
  Description of Artificial Sequence: Synthetic oligonucleotide
aaguuccggugcaaucgcg

SEQ ID NO: 1658812 - RNA, 19 nt, Artificial Sequence
  Description of Artificial Sequence: Synthetic oligonucleotide
uccgauucagggccgcuau

SEQ ID NO: 1658813 - RNA, 19 nt, Artificial Sequence
  Description of Artificial Sequence: Synthetic oligonucleotide
acgccaucaagcugcccuc

SEQ ID NO: 1658814 - RNA, 19 nt, Artificial Sequence
  Description of Artificial Sequence: Synthetic oligonucleotide
aaucgcgugcagagcgugg

SEQ ID NO: 1658815 - RNA, 19 nt, Artificial Sequence
  Description of Artificial Sequence: Synthetic oligonucleotide
uucucugcugccggcgccg

SEQ ID NO: 1658816 - RNA, 19 nt, Artificial Sequence
  Description of Artificial Sequence: Synthetic oligonucleotide
agcaggggccgucugcgag

SEQ ID NO: 1658817 - RNA, 19 nt, Artificial Sequence
  Description of Artificial Sequence: Synthetic oligonucleotide
uccggugugggcgggagca

SEQ ID NO: 1658818 - RNA, 19 nt, Artificial Sequence
  Description of Artificial Sequence: Synthetic oligonucleotide
cacguggcagcagucacag

SEQ ID NO: 1658819 - RNA, 19 nt, Artificial Sequence
  Description of Artificial Sequence: Synthetic oligonucleotide
ugucuugcccacugggcau

SEQ ID NO: 1658820 - RNA, 19 nt, Artificial Sequence
  Description of Artificial Sequence: Synthetic oligonucleotide
cagggcuaccagaagcaac

SEQ ID NO: 1658821 - RNA, 19 nt, Artificial Sequence
  Description of Artificial Sequence: Synthetic oligonucleotide
gggacaacggguuccugcc

SEQ ID NO: 1658822 - RNA, 19 nt, Artificial Sequence
  Description of Artificial Sequence: Synthetic oligonucleotide
guacacaccgucucccaca

SEQ ID NO: 1658823 - RNA, 19 nt, Artificial Sequence
  Description of Artificial Sequence: Synthetic oligonucleotide
aggcacaacccucuggauu

SEQ ID NO: 1658824 - RNA, 19 nt, Artificial Sequence
  Description of Artificial Sequence: Synthetic oligonucleotide
gcuugauccggcgcgaggg

SEQ ID NO: 1658825 - RNA, 19 nt, Artificial Sequence
  Description of Artificial Sequence: Synthetic oligonucleotide
ggagugggcccagaaaggg

SEQ ID NO: 1658826 - RNA, 19 nt, Artificial Sequence
  Description of Artificial Sequence: Synthetic oligonucleotide
cacauggaugguaaaggaa

SEQ ID NO: 1658827 - RNA, 19 nt, Artificial Sequence
  Description of Artificial Sequence: Synthetic oligonucleotide
ucacagaggggcggagccg

SEQ ID NO: 1658828 - RNA, 19 nt, Artificial Sequence
  Description of Artificial Sequence: Synthetic oligonucleotide
aagggcagucuccguuuca

SEQ ID NO: 1658829 - RNA, 19 nt, Artificial Sequence
  Description of Artificial Sequence: Synthetic oligonucleotide
uccugcguguaugucacuc

SEQ ID NO: 1658830 - RNA, 19 nt, Artificial Sequence
  Description of Artificial Sequence: Synthetic oligonucleotide
uccgagcucuccgauucag

SEQ ID NO: 1658831 - RNA, 19 nt, Artificial Sequence
  Description of Artificial Sequence: Synthetic oligonucleotide
caccucgcaaagacucagg

SEQ ID NO: 1658832 - RNA, 19 nt, Artificial Sequence
  Description of Artificial Sequence: Synthetic oligonucleotide
aggaaugagugugggcuug

SEQ ID NO: 1658833 - RNA, 19 nt, Artificial Sequence
  Description of Artificial Sequence: Synthetic oligonucleotide
gagguucccaaaaugggcu

SEQ ID NO: 1658834 - RNA, 19 nt, Artificial Sequence
  Description of Artificial Sequence: Synthetic oligonucleotide
agcucggagcccucuucuc

SEQ ID NO: 1658835 - RNA, 19 nt, Artificial Sequence
  Description of Artificial Sequence: Synthetic oligonucleotide
cacuccugcggaaguuccg

SEQ ID NO: 1658836 - RNA, 19 nt, Artificial Sequence
  Description of Artificial Sequence: Synthetic oligonucleotide
cuugauccggcgcgagggc

SEQ ID NO: 1658837 - RNA, 19 nt, Artificial Sequence
  Description of Artificial Sequence: Synthetic oligonucleotide
gaccuaucauugccuccag

SEQ ID NO: 1658838 - RNA, 19 nt, Artificial Sequence
  Description of Artificial Sequence: Synthetic oligonucleotide
accuguggaggcagaggcc

SEQ ID NO: 1658839 - RNA, 19 nt, Artificial Sequence
  Description of Artificial Sequence: Synthetic oligonucleotide
gucacucuugguaacaccu

SEQ ID NO: 1658840 - RNA, 19 nt, Artificial Sequence
  Description of Artificial Sequence: Synthetic oligonucleotide
agugugggcuuggccacac

SEQ ID NO: 1658841 - RNA, 19 nt, Artificial Sequence
  Description of Artificial Sequence: Synthetic oligonucleotide
ugauccggcgcgagggcaa

SEQ ID NO: 1658842 - RNA, 19 nt, Artificial Sequence
  Description of Artificial Sequence: Synthetic oligonucleotide
ggauugucuugcccacugg

SEQ ID NO: 1658843 - RNA, 19 nt, Artificial Sequence
  Description of Artificial Sequence: Synthetic oligonucleotide
cacagaggggcggagccgc

SEQ ID NO: 1658844 - RNA, 19 nt, Artificial Sequence
  Description of Artificial Sequence: Synthetic oligonucleotide
gaaugagugugggcuuggc

SEQ ID NO: 1658845 - RNA, 19 nt, Artificial Sequence
  Description of Artificial Sequence: Synthetic oligonucleotide
gagucaggggccacagaug

SEQ ID NO: 1658846 - RNA, 19 nt, Artificial Sequence
  Description of Artificial Sequence: Synthetic oligonucleotide
ggagccuguacacaccguc

SEQ ID NO: 1658847 - RNA, 19 nt, Artificial Sequence
  Description of Artificial Sequence: Synthetic oligonucleotide
ccagaagcaacuggggcgg

SEQ ID NO: 1658848 - RNA, 19 nt, Artificial Sequence
  Description of Artificial Sequence: Synthetic oligonucleotide
ggccacacacauaugggcc

SEQ ID NO: 1658849 - RNA, 19 nt, Artificial Sequence
  Description of Artificial Sequence: Synthetic oligonucleotide
auccggugugggcgggagc

SEQ ID NO: 1658850 - RNA, 19 nt, Artificial Sequence
  Description of Artificial Sequence: Synthetic oligonucleotide
cagagucggagccuguaca

SEQ ID NO: 1658851 - RNA, 19 nt, Artificial Sequence
  Description of Artificial Sequence: Synthetic oligonucleotide
gcucaguccgagcucuccg

SEQ ID NO: 1658852 - RNA, 19 nt, Artificial Sequence
  Description of Artificial Sequence: Synthetic oligonucleotide
ggaaccauuucagcugggc

SEQ ID NO: 1658853 - RNA, 19 nt, Artificial Sequence
  Description of Artificial Sequence: Synthetic oligonucleotide
aggcaacgccaucaagcug

SEQ ID NO: 1658854 - RNA, 19 nt, Artificial Sequence
  Description of Artificial Sequence: Synthetic oligonucleotide
ggccaaggaaacccucagg

SEQ ID NO: 1658855 - RNA, 19 nt, Artificial Sequence
  Description of Artificial Sequence: Synthetic oligonucleotide
ucuacaccaggaggccgcc

SEQ ID NO: 1658856 - RNA, 19 nt, Artificial Sequence
  Description of Artificial Sequence: Synthetic oligonucleotide
ggaugguaaaggaaggcaa

SEQ ID NO: 1658857 - RNA, 19 nt, Artificial Sequence
  Description of Artificial Sequence: Synthetic oligonucleotide
agaggggcggagccgcuca

SEQ ID NO: 1658858 - RNA, 19 nt, Artificial Sequence
  Description of Artificial Sequence: Synthetic oligonucleotide
gcuucgcagagcaaaggcc

SEQ ID NO: 1658859 - RNA, 19 nt, Artificial Sequence
  Description of Artificial Sequence: Synthetic oligonucleotide
ggaaggcaacgccaucaag

SEQ ID NO: 1658860 - RNA, 19 nt, Artificial Sequence
  Description of Artificial Sequence: Synthetic oligonucleotide
aguuccggugcaaucgcgu

SEQ ID NO: 1658861 - RNA, 19 nt, Artificial Sequence
  Description of Artificial Sequence: Synthetic oligonucleotide
cagcuucgcagagcaaagg

SEQ ID NO: 1658862 - RNA, 19 nt, Artificial Sequence
  Description of Artificial Sequence: Synthetic oligonucleotide
ccugcggaaguuccggugc

SEQ ID NO: 1658863 - RNA, 19 nt, Artificial Sequence
  Description of Artificial Sequence: Synthetic oligonucleotide
ggagcaggggccgucugcg

SEQ ID NO: 1658864 - RNA, 19 nt, Artificial Sequence
  Description of Artificial Sequence: Synthetic oligonucleotide
acaacccucuggauugucu

SEQ ID NO: 1658865 - RNA, 19 nt, Artificial Sequence
  Description of Artificial Sequence: Synthetic oligonucleotide
cccaagugagacuggaguc

SEQ ID NO: 1658866 - RNA, 19 nt, Artificial Sequence
  Description of Artificial Sequence: Synthetic oligonucleotide
ggggccggcaucaugggag

SEQ ID NO: 1658867 - RNA, 19 nt, Artificial Sequence
  Description of Artificial Sequence: Synthetic oligonucleotide
agaggcccucgggacaacg

SEQ ID NO: 1658868 - RNA, 19 nt, Artificial Sequence
  Description of Artificial Sequence: Synthetic oligonucleotide
aucaaggagucaggggcca

SEQ ID NO: 1658869 - RNA, 19 nt, Artificial Sequence
  Description of Artificial Sequence: Synthetic oligonucleotide
gggcacauggaugguaaag

SEQ ID NO: 1658870 - RNA, 19 nt, Artificial Sequence
  Description of Artificial Sequence: Synthetic oligonucleotide
acaccgucucccacacagc

SEQ ID NO: 1658871 - RNA, 19 nt, Artificial Sequence
  Description of Artificial Sequence: Synthetic oligonucleotide
ucgcgugcagagcguggcc

SEQ ID NO: 1658872 - RNA, 19 nt, Artificial Sequence
  Description of Artificial Sequence: Synthetic oligonucleotide
gcagucuccguuucagcac

SEQ ID NO: 1658873 - RNA, 19 nt, Artificial Sequence
  Description of Artificial Sequence: Synthetic oligonucleotide
ugggcgggagcaggggccg

SEQ ID NO: 1658874 - RNA, 19 nt, Artificial Sequence
  Description of Artificial Sequence: Synthetic oligonucleotide
ccucgcaaagacucaggag

SEQ ID NO: 1658875 - RNA, 19 nt, Artificial Sequence
  Description of Artificial Sequence: Synthetic oligonucleotide
cucacuccugcggaaguuc

SEQ ID NO: 1658876 - RNA, 19 nt, Artificial Sequence
  Description of Artificial Sequence: Synthetic oligonucleotide
ggcuuggccacacacauau

SEQ ID NO: 1658877 - RNA, 19 nt, Artificial Sequence
  Description of Artificial Sequence: Synthetic oligonucleotide
ugcucucacuccugcggaa

SEQ ID NO: 1658878 - RNA, 19 nt, Artificial Sequence
  Description of Artificial Sequence: Synthetic oligonucleotide
gugucuuggcugucuccug

SEQ ID NO: 1658879 - RNA, 19 nt, Artificial Sequence
  Description of Artificial Sequence: Synthetic oligonucleotide
ccagcuucgcagagcaaag

SEQ ID NO: 1658880 - RNA, 19 nt, Artificial Sequence
  Description of Artificial Sequence: Synthetic oligonucleotide
gcugccaccgugucuuggc

SEQ ID NO: 1658881 - RNA, 19 nt, Artificial Sequence
  Description of Artificial Sequence: Synthetic oligonucleotide
cucgaggagcuggggaagc

SEQ ID NO: 1658882 - RNA, 19 nt, Artificial Sequence
  Description of Artificial Sequence: Synthetic oligonucleotide
aguugggccucgggccacc

SEQ ID NO: 1658883 - RNA, 19 nt, Artificial Sequence
  Description of Artificial Sequence: Synthetic oligonucleotide
ggaaugagugugggcuugg

SEQ ID NO: 1658884 - RNA, 19 nt, Artificial Sequence
  Description of Artificial Sequence: Synthetic oligonucleotide
caaucgcgugcagagcgug

SEQ ID NO: 1658885 - RNA, 19 nt, Artificial Sequence
  Description of Artificial Sequence: Synthetic oligonucleotide
cucaguccgagcucuccga

SEQ ID NO: 1658886 - RNA, 19 nt, Artificial Sequence
  Description of Artificial Sequence: Synthetic oligonucleotide
ccuaucauugccuccaggu

SEQ ID NO: 1658887 - RNA, 19 nt, Artificial Sequence
  Description of Artificial Sequence: Synthetic oligonucleotide
caaccagugagcagcccaa

SEQ ID NO: 1658888 - RNA, 19 nt, Artificial Sequence
  Description of Artificial Sequence: Synthetic oligonucleotide
ugcccucgucucuccugcg

SEQ ID NO: 1658889 - RNA, 19 nt, Artificial Sequence
  Description of Artificial Sequence: Synthetic oligonucleotide
gguucccaaaaugggcugc

SEQ ID NO: 1658890 - RNA, 19 nt, Artificial Sequence
  Description of Artificial Sequence: Synthetic oligonucleotide
ggagucaggggccacagau

SEQ ID NO: 1658891 - RNA, 19 nt, Artificial Sequence
  Description of Artificial Sequence: Synthetic oligonucleotide
cacagaugagguucccaaa

SEQ ID NO: 1658892 - RNA, 19 nt, Artificial Sequence
  Description of Artificial Sequence: Synthetic oligonucleotide
ugcaucggggaggcuaaaa

SEQ ID NO: 1658893 - RNA, 19 nt, Artificial Sequence
  Description of Artificial Sequence: Synthetic oligonucleotide
ggcuaaaaggauacgcaaa

SEQ ID NO: 1658894 - RNA, 19 nt, Artificial Sequence
  Description of Artificial Sequence: Synthetic oligonucleotide
agagcguggccagggugag

SEQ ID NO: 1658895 - RNA, 19 nt, Artificial Sequence
  Description of Artificial Sequence: Synthetic oligonucleotide
caagggcagucuccguuuc

SEQ ID NO: 1658896 - RNA, 19 nt, Artificial Sequence
  Description of Artificial Sequence: Synthetic oligonucleotide
ccuguacacaccgucuccc

SEQ ID NO: 1658897 - RNA, 19 nt, Artificial Sequence
  Description of Artificial Sequence: Synthetic oligonucleotide
ugggcacauggaugguaaa

SEQ ID NO: 1658898 - RNA, 19 nt, Artificial Sequence
  Description of Artificial Sequence: Synthetic oligonucleotide
ccgucucccacacagcuuc

SEQ ID NO: 1658899 - RNA, 19 nt, Artificial Sequence
  Description of Artificial Sequence: Synthetic oligonucleotide
gagucggagccuguacaca

SEQ ID NO: 1658900 - RNA, 19 nt, Artificial Sequence
  Description of Artificial Sequence: Synthetic oligonucleotide
cugagccucuguccuggac

SEQ ID NO: 1658901 - RNA, 19 nt, Artificial Sequence
  Description of Artificial Sequence: Synthetic oligonucleotide
gccuguacacaccgucucc

SEQ ID NO: 1658902 - RNA, 19 nt, Artificial Sequence
  Description of Artificial Sequence: Synthetic oligonucleotide
ucaaggagucaggggccac

SEQ ID NO: 1658903 - RNA, 19 nt, Artificial Sequence
  Description of Artificial Sequence: Synthetic oligonucleotide
aggggccggucccaaguga

SEQ ID NO: 1658904 - RNA, 19 nt, Artificial Sequence
  Description of Artificial Sequence: Synthetic oligonucleotide
caucuccagugcagucccc

SEQ ID NO: 1658905 - RNA, 19 nt, Artificial Sequence
  Description of Artificial Sequence: Synthetic oligonucleotide
gccggcaucaugggagugg

SEQ ID NO: 1658906 - RNA, 19 nt, Artificial Sequence
  Description of Artificial Sequence: Synthetic oligonucleotide
ccauggcagcccaagcggc

SEQ ID NO: 1658907 - RNA, 19 nt, Artificial Sequence
  Description of Artificial Sequence: Synthetic oligonucleotide
ucgucucuccugcguguau

SEQ ID NO: 1658908 - RNA, 19 nt, Artificial Sequence
  Description of Artificial Sequence: Synthetic oligonucleotide
cauuucagcugggccagca

SEQ ID NO: 1658909 - RNA, 19 nt, Artificial Sequence
  Description of Artificial Sequence: Synthetic oligonucleotide
gucggagccuguacacacc

SEQ ID NO: 1658910 - RNA, 19 nt, Artificial Sequence
  Description of Artificial Sequence: Synthetic oligonucleotide
ggcccagaaagggugucag

SEQ ID NO: 1658911 - RNA, 19 nt, Artificial Sequence
  Description of Artificial Sequence: Synthetic oligonucleotide
gugggcgggagcaggggcc

SEQ ID NO: 1658912 - RNA, 19 nt, Artificial Sequence
  Description of Artificial Sequence: Synthetic oligonucleotide
gccgcuauccggugugggc

SEQ ID NO: 1658913 - RNA, 19 nt, Artificial Sequence
  Description of Artificial Sequence: Synthetic oligonucleotide
auggcagcccaagcggccu

SEQ ID NO: 1658914 - RNA, 19 nt, Artificial Sequence
  Description of Artificial Sequence: Synthetic oligonucleotide
ccgcuauccggugugggcg

SEQ ID NO: 1658915 - RNA, 19 nt, Artificial Sequence
  Description of Artificial Sequence: Synthetic oligonucleotide
gggaggcuaaaaggauacg

SEQ ID NO: 1658916 - RNA, 19 nt, Artificial Sequence
  Description of Artificial Sequence: Synthetic oligonucleotide
gauccggcgcgagggcaag

SEQ ID NO: 1658917 - RNA, 19 nt, Artificial Sequence
  Description of Artificial Sequence: Synthetic oligonucleotide
cugcucgaggagcugggga

SEQ ID NO: 1658918 - RNA, 19 nt, Artificial Sequence
  Description of Artificial Sequence: Synthetic oligonucleotide
ccugacaacacugaccucu

SEQ ID NO: 1658919 - RNA, 19 nt, Artificial Sequence
  Description of Artificial Sequence: Synthetic oligonucleotide
aaagggugucagagagaau

SEQ ID NO: 1658920 - RNA, 19 nt, Artificial Sequence
  Description of Artificial Sequence: Synthetic oligonucleotide
gugcaaucgcgugcagagc

SEQ ID NO: 1658921 - RNA, 19 nt, Artificial Sequence
  Description of Artificial Sequence: Synthetic oligonucleotide
ggcucuauccaugccaucu

SEQ ID NO: 1658922 - RNA, 19 nt, Artificial Sequence
  Description of Artificial Sequence: Synthetic oligonucleotide
ccaagcggccucuucugug

SEQ ID NO: 1658923 - RNA, 19 nt, Artificial Sequence
  Description of Artificial Sequence: Synthetic oligonucleotide
cgggacaacggguuccugc

SEQ ID NO: 1658924 - RNA, 19 nt, Artificial Sequence
  Description of Artificial Sequence: Synthetic oligonucleotide
caugggagugggcccagaa

SEQ ID NO: 1658925 - RNA, 19 nt, Artificial Sequence
  Description of Artificial Sequence: Synthetic oligonucleotide
gcucuauccaugccaucuc

SEQ ID NO: 1658926 - RNA, 19 nt, Artificial Sequence
  Description of Artificial Sequence: Synthetic oligonucleotide
uccugacaacacugaccuc

SEQ ID NO: 1658927 - RNA, 19 nt, Artificial Sequence
  Description of Artificial Sequence: Synthetic oligonucleotide
ccgucugcgagaccgcuug

SEQ ID NO: 1658928 - RNA, 19 nt, Artificial Sequence
  Description of Artificial Sequence: Synthetic oligonucleotide
ccggucccaagugagacug

SEQ ID NO: 1658929 - RNA, 19 nt, Artificial Sequence
  Description of Artificial Sequence: Synthetic oligonucleotide
gugugggcgggagcagggg

SEQ ID NO: 1658930 - RNA, 19 nt, Artificial Sequence
  Description of Artificial Sequence: Synthetic oligonucleotide
cuccgucugccgccagggg

SEQ ID NO: 1658931 - RNA, 19 nt, Artificial Sequence
  Description of Artificial Sequence: Synthetic oligonucleotide
accaccucgcaaagacuca

SEQ ID NO: 1658932 - RNA, 19 nt, Artificial Sequence
  Description of Artificial Sequence: Synthetic oligonucleotide
cucaaccaccaccucgcaa

SEQ ID NO: 1658933 - RNA, 19 nt, Artificial Sequence
  Description of Artificial Sequence: Synthetic oligonucleotide
gucuccguuucagcacagc

SEQ ID NO: 1658934 - RNA, 19 nt, Artificial Sequence
  Description of Artificial Sequence: Synthetic oligonucleotide
agcggccucuucugugcgu

SEQ ID NO: 1658935 - RNA, 19 nt, Artificial Sequence
  Description of Artificial Sequence: Synthetic oligonucleotide
ucuccgauucagggccgcu

SEQ ID NO: 1658936 - RNA, 19 nt, Artificial Sequence
  Description of Artificial Sequence: Synthetic oligonucleotide
uggcucuauccaugccauc

SEQ ID NO: 1658937 - RNA, 19 nt, Artificial Sequence
  Description of Artificial Sequence: Synthetic oligonucleotide
cggcucaaccaccaccucg

SEQ ID NO: 1658938 - RNA, 19 nt, Artificial Sequence
  Description of Artificial Sequence: Synthetic oligonucleotide
cucuccgauucagggccgc

SEQ ID NO: 1658939 - RNA, 19 nt, Artificial Sequence
  Description of Artificial Sequence: Synthetic oligonucleotide
ccgagcucuccgauucagg

SEQ ID NO: 1658940 - RNA, 19 nt, Artificial Sequence
  Description of Artificial Sequence: Synthetic oligonucleotide
caaggagucaggggccaca

SEQ ID NO: 1658941 - RNA, 19 nt, Artificial Sequence
  Description of Artificial Sequence: Synthetic oligonucleotide
gagccuguacacaccgucu

SEQ ID NO: 1658942 - RNA, 19 nt, Artificial Sequence
  Description of Artificial Sequence: Synthetic oligonucleotide
ugcggaaguuccggugcaa

SEQ ID NO: 1658943 - RNA, 19 nt, Artificial Sequence
  Description of Artificial Sequence: Synthetic oligonucleotide
ccagagucggagccuguac

SEQ ID NO: 1658944 - RNA, 19 nt, Artificial Sequence
  Description of Artificial Sequence: Synthetic oligonucleotide
cagaugagguucccaaaau

SEQ ID NO: 1658945 - RNA, 19 nt, Artificial Sequence
  Description of Artificial Sequence: Synthetic oligonucleotide
caccgucucccacacagcu

SEQ ID NO: 1658946 - RNA, 19 nt, Artificial Sequence
  Description of Artificial Sequence: Synthetic oligonucleotide
gggccuucgggcucuguga

SEQ ID NO: 1658947 - RNA, 19 nt, Artificial Sequence
  Description of Artificial Sequence: Synthetic oligonucleotide
ccggcaucaugggaguggg

SEQ ID NO: 1658948 - RNA, 19 nt, Artificial Sequence
  Description of Artificial Sequence: Synthetic oligonucleotide
ggucccaagugagacugga

SEQ ID NO: 1658949 - RNA, 19 nt, Artificial Sequence
  Description of Artificial Sequence: Synthetic oligonucleotide
ccccagucaucaaggaguc

SEQ ID NO: 1658950 - RNA, 19 nt, Artificial Sequence
  Description of Artificial Sequence: Synthetic oligonucleotide
uggcagcccaagcggccuc

SEQ ID NO: 1658951 - RNA, 19 nt, Artificial Sequence
  Description of Artificial Sequence: Synthetic oligonucleotide
gcgugcagagcguggccag

SEQ ID NO: 1658952 - RNA, 19 nt, Artificial Sequence
  Description of Artificial Sequence: Synthetic oligonucleotide
cucggagcccucuucuccu

SEQ ID NO: 1658953 - RNA, 19 nt, Artificial Sequence
  Description of Artificial Sequence: Synthetic oligonucleotide
ccucuacaccaggaggccg

SEQ ID NO: 1658954 - RNA, 19 nt, Artificial Sequence
  Description of Artificial Sequence: Synthetic oligonucleotide
ccucgggccacccggggag

SEQ ID NO: 1658955 - RNA, 19 nt, Artificial Sequence
  Description of Artificial Sequence: Synthetic oligonucleotide
ggagccgcucaguccgagc

SEQ ID NO: 1658956 - RNA, 19 nt, Artificial Sequence
  Description of Artificial Sequence: Synthetic oligonucleotide
gcccaagcggccucuucug

SEQ ID NO: 1658957 - RNA, 19 nt, Artificial Sequence
  Description of Artificial Sequence: Synthetic oligonucleotide
aggggccgucugcgagacc

SEQ ID NO: 1658958 - RNA, 19 nt, Artificial Sequence
  Description of Artificial Sequence: Synthetic oligonucleotide
gucuugcccacugggcauc

SEQ ID NO: 1658959 - RNA, 19 nt, Artificial Sequence
  Description of Artificial Sequence: Synthetic oligonucleotide
cuccgccgccggcucaacc

SEQ ID NO: 1658960 - RNA, 19 nt, Artificial Sequence
  Description of Artificial Sequence: Synthetic oligonucleotide
ccucgggacaacggguucc

SEQ ID NO: 1658961 - RNA, 19 nt, Artificial Sequence
  Description of Artificial Sequence: Synthetic oligonucleotide
accgcuugauccggcgcga

SEQ ID NO: 1658962 - RNA, 19 nt, Artificial Sequence
  Description of Artificial Sequence: Synthetic oligonucleotide
ccaccucgcaaagacucag

SEQ ID NO: 1658963 - RNA, 19 nt, Artificial Sequence
  Description of Artificial Sequence: Synthetic oligonucleotide
ccuucgggcucugugaaga

SEQ ID NO: 1658964 - RNA, 19 nt, Artificial Sequence
  Description of Artificial Sequence: Synthetic oligonucleotide
gcgagaccgcuugauccgg

SEQ ID NO: 1658965 - RNA, 19 nt, Artificial Sequence
  Description of Artificial Sequence: Synthetic oligonucleotide
gcucgaggagcuggggaag

SEQ ID NO: 1658966 - RNA, 19 nt, Artificial Sequence
  Description of Artificial Sequence: Synthetic oligonucleotide
caggggccgucugcgagac

SEQ ID NO: 1658967 - RNA, 19 nt, Artificial Sequence
  Description of Artificial Sequence: Synthetic oligonucleotide
ucgggacaacggguuccug

SEQ ID NO: 1658968 - RNA, 19 nt, Artificial Sequence
  Description of Artificial Sequence: Synthetic oligonucleotide
agagagcaagcuggagcuu

SEQ ID NO: 1658969 - RNA, 19 nt, Artificial Sequence
  Description of Artificial Sequence: Synthetic oligonucleotide
cacaacccucuggauuguc

SEQ ID NO: 1658970 - RNA, 19 nt, Artificial Sequence
  Description of Artificial Sequence: Synthetic oligonucleotide
ggggcggagccgcucaguc

SEQ ID NO: 1658971 - RNA, 19 nt, Artificial Sequence
  Description of Artificial Sequence: Synthetic oligonucleotide
gcugcucgaggagcugggg

SEQ ID NO: 1658972 - RNA, 19 nt, Artificial Sequence
  Description of Artificial Sequence: Synthetic oligonucleotide
gagugggcccagaaagggu

SEQ ID NO: 1658973 - RNA, 19 nt, Artificial Sequence
  Description of Artificial Sequence: Synthetic oligonucleotide
gagcaggggccgucugcga

SEQ ID NO: 1658974 - RNA, 19 nt, Artificial Sequence
  Description of Artificial Sequence: Synthetic oligonucleotide
ccagugagcagcccaagcu

SEQ ID NO: 1658975 - RNA, 19 nt, Artificial Sequence
  Description of Artificial Sequence: Synthetic oligonucleotide
ccgugucuuggcugucucc

SEQ ID NO: 1658976 - RNA, 19 nt, Artificial Sequence
  Description of Artificial Sequence: Synthetic oligonucleotide
gccagcagucccgccaacc

SEQ ID NO: 1658977 - RNA, 19 nt, Artificial Sequence
  Description of Artificial Sequence: Synthetic oligonucleotide
gccuucgggcucugugaag

SEQ ID NO: 1658978 - RNA, 19 nt, Artificial Sequence
  Description of Artificial Sequence: Synthetic oligonucleotide
acacaccgucucccacaca

SEQ ID NO: 1658979 - RNA, 19 nt, Artificial Sequence
  Description of Artificial Sequence: Synthetic oligonucleotide
gccgccucuucaaccagug

SEQ ID NO: 1658980 - RNA, 19 nt, Artificial Sequence
  Description of Artificial Sequence: Synthetic oligonucleotide
guccgagcucuccgauuca

SEQ ID NO: 1658981 - RNA, 19 nt, Artificial Sequence
  Description of Artificial Sequence: Synthetic oligonucleotide
cccaagcuggcucuaucca

SEQ ID NO: 1658982 - RNA, 19 nt, Artificial Sequence
  Description of Artificial Sequence: Synthetic oligonucleotide
cucgggccacccggggagg

SEQ ID NO: 1658983 - RNA, 19 nt, Artificial Sequence
  Description of Artificial Sequence: Synthetic oligonucleotide
ggccgcuauccgguguggg

SEQ ID NO: 1658984 - RNA, 19 nt, Artificial Sequence
  Description of Artificial Sequence: Synthetic oligonucleotide
cucucacuccugcggaagu

SEQ ID NO: 1658985 - RNA, 19 nt, Artificial Sequence
  Description of Artificial Sequence: Synthetic oligonucleotide
gcggccucuucugugcgug

SEQ ID NO: 1658986 - RNA, 19 nt, Artificial Sequence
  Description of Artificial Sequence: Synthetic oligonucleotide
auccggcgcgagggcaagg

SEQ ID NO: 1658987 - RNA, 19 nt, Artificial Sequence
  Description of Artificial Sequence: Synthetic oligonucleotide
cgcuauccggugugggcgg

SEQ ID NO: 1658988 - RNA, 19 nt, Artificial Sequence
  Description of Artificial Sequence: Synthetic oligonucleotide
ggggcgccggcgcacggcc

SEQ ID NO: 1658989 - RNA, 19 nt, Artificial Sequence
  Description of Artificial Sequence: Synthetic oligonucleotide
gcuauccggugugggcggg

SEQ ID NO: 1658990 - RNA, 19 nt, Artificial Sequence
  Description of Artificial Sequence: Synthetic oligonucleotide
ggguuccugccuccuccgc

SEQ ID NO: 1658991 - RNA, 19 nt, Artificial Sequence
  Description of Artificial Sequence: Synthetic oligonucleotide
caacgccaucaagcugccc

SEQ ID NO: 1658992 - RNA, 19 nt, Artificial Sequence
  Description of Artificial Sequence: Synthetic oligonucleotide
ccguuucagcacagcugcc

SEQ ID NO: 1658993 - RNA, 19 nt, Artificial Sequence
  Description of Artificial Sequence: Synthetic oligonucleotide
gcucuccgauucagggccg

SEQ ID NO: 1658994 - RNA, 19 nt, Artificial Sequence
  Description of Artificial Sequence: Synthetic oligonucleotide
cugcguguaugucacucuu

SEQ ID NO: 1658995 - RNA, 19 nt, Artificial Sequence
  Description of Artificial Sequence: Synthetic oligonucleotide
caggaaugagugugggcuu

SEQ ID NO: 1658996 - RNA, 19 nt, Artificial Sequence
  Description of Artificial Sequence: Synthetic oligonucleotide
gggcuaccagaagcaacug

SEQ ID NO: 1658997 - RNA, 19 nt, Artificial Sequence
  Description of Artificial Sequence: Synthetic oligonucleotide
accgucucccacacagcuu

SEQ ID NO: 1658998 - RNA, 19 nt, Artificial Sequence
  Description of Artificial Sequence: Synthetic oligonucleotide
ggccucgggccacccgggg

SEQ ID NO: 1658999 - RNA, 19 nt, Artificial Sequence
  Description of Artificial Sequence: Synthetic oligonucleotide
uugcaucggggaggcuaaa

SEQ ID NO: 1659000 - RNA, 19 nt, Artificial Sequence
  Description of Artificial Sequence: Synthetic oligonucleotide
cagaggggcggagccgcuc

SEQ ID NO: 1659001 - RNA, 19 nt, Artificial Sequence
  Description of Artificial Sequence: Synthetic oligonucleotide
ggccgccagcuucgcagag

SEQ ID NO: 1659002 - RNA, 19 nt, Artificial Sequence
  Description of Artificial Sequence: Synthetic oligonucleotide
ccacguggcagcagucaca

SEQ ID NO: 1659003 - RNA, 19 nt, Artificial Sequence
  Description of Artificial Sequence: Synthetic oligonucleotide
gccggcucaaccaccaccu

SEQ ID NO: 1659004 - RNA, 19 nt, Artificial Sequence
  Description of Artificial Sequence: Synthetic oligonucleotide
cuccgauucagggccgcua

SEQ ID NO: 1659005 - RNA, 19 nt, Artificial Sequence
  Description of Artificial Sequence: Synthetic oligonucleotide
ggaaacccucaggccugag

SEQ ID NO: 1659006 - RNA, 19 nt, Artificial Sequence
  Description of Artificial Sequence: Synthetic oligonucleotide
ggcgccgccgccucuucaa

SEQ ID NO: 1659007 - RNA, 19 nt, Artificial Sequence
  Description of Artificial Sequence: Synthetic oligonucleotide
cgagaccgcuugauccggc

SEQ ID NO: 1659008 - RNA, 19 nt, Artificial Sequence
  Description of Artificial Sequence: Synthetic oligonucleotide
cucgucucuccugcgugua

SEQ ID NO: 1659009 - RNA, 19 nt, Artificial Sequence
  Description of Artificial Sequence: Synthetic oligonucleotide
cuauccggugugggcggga

SEQ ID NO: 1659010 - RNA, 19 nt, Artificial Sequence
  Description of Artificial Sequence: Synthetic oligonucleotide
ggccacagaugagguuccc

SEQ ID NO: 1659011 - RNA, 19 nt, Artificial Sequence
  Description of Artificial Sequence: Synthetic oligonucleotide
cuccugcggaaguuccggu

SEQ ID NO: 1659012 - RNA, 19 nt, Artificial Sequence
  Description of Artificial Sequence: Synthetic oligonucleotide
gucugcgagaccgcuugau

SEQ ID NO: 1659013 - RNA, 19 nt, Artificial Sequence
  Description of Artificial Sequence: Synthetic oligonucleotide
cugccaccgugucuuggcu

SEQ ID NO: 1659014 - RNA, 19 nt, Artificial Sequence
  Description of Artificial Sequence: Synthetic oligonucleotide
ccucuguccuggaccuauc

SEQ ID NO: 1659015 - RNA, 19 nt, Artificial Sequence
  Description of Artificial Sequence: Synthetic oligonucleotide
cucgggacaacggguuccu

SEQ ID NO: 1659016 - RNA, 19 nt, Artificial Sequence
  Description of Artificial Sequence: Synthetic oligonucleotide
cuggauugucuugcccacu

SEQ ID NO: 1659017 - RNA, 19 nt, Artificial Sequence
  Description of Artificial Sequence: Synthetic oligonucleotide
ggacaacggguuccugccu

SEQ ID NO: 1659018 - RNA, 19 nt, Artificial Sequence
  Description of Artificial Sequence: Synthetic oligonucleotide
cccaguagaugcucucacu

SEQ ID NO: 1659019 - RNA, 19 nt, Artificial Sequence
  Description of Artificial Sequence: Synthetic oligonucleotide
ccgauucagggccgcuauc

SEQ ID NO: 1659020 - RNA, 19 nt, Artificial Sequence
  Description of Artificial Sequence: Synthetic oligonucleotide
ccugcguguaugucacucu

SEQ ID NO: 1659021 - RNA, 19 nt, Artificial Sequence
  Description of Artificial Sequence: Synthetic oligonucleotide
caggcacaacccucuggau

SEQ ID NO: 1659022 - RNA, 19 nt, Artificial Sequence
  Description of Artificial Sequence: Synthetic oligonucleotide
cccucgggacaacggguuc

SEQ ID NO: 1659023 - RNA, 19 nt, Artificial Sequence
  Description of Artificial Sequence: Synthetic oligonucleotide
ccucuagaugucaccucua

SEQ ID NO: 1659024 - RNA, 19 nt, Artificial Sequence
  Description of Artificial Sequence: Synthetic oligonucleotide
ccggcgcgagggcaagggc

SEQ ID NO: 1659025 - RNA, 19 nt, Artificial Sequence
  Description of Artificial Sequence: Synthetic oligonucleotide
cgcucaguccgagcucucc

SEQ ID NO: 1659026 - RNA, 19 nt, Artificial Sequence
  Description of Artificial Sequence: Synthetic oligonucleotide
gccgcucaguccgagcucu

SEQ ID NO: 1659027 - RNA, 19 nt, Artificial Sequence
  Description of Artificial Sequence: Synthetic oligonucleotide
cgcaaaccaaaagaagccu

SEQ ID NO: 1659028 - RNA, 19 nt, Artificial Sequence
  Description of Artificial Sequence: Synthetic oligonucleotide
cagaggcccucgggacaac

SEQ ID NO: 1659029 - RNA, 19 nt, Artificial Sequence
  Description of Artificial Sequence: Synthetic oligonucleotide
ggccggcaucaugggagug

SEQ ID NO: 1659030 - RNA, 19 nt, Artificial Sequence
  Description of Artificial Sequence: Synthetic oligonucleotide
caccgugucuuggcugucu

SEQ ID NO: 1659031 - RNA, 19 nt, Artificial Sequence
  Description of Artificial Sequence: Synthetic oligonucleotide
ccagaggcccucgggacaa

SEQ ID NO: 1659032 - RNA, 19 nt, Artificial Sequence
  Description of Artificial Sequence: Synthetic oligonucleotide
ccacccggggaggcgcugc

SEQ ID NO: 1659033 - RNA, 19 nt, Artificial Sequence
  Description of Artificial Sequence: Synthetic oligonucleotide
gcaaucgcgugcagagcgu

SEQ ID NO: 1659034 - RNA, 19 nt, Artificial Sequence
  Description of Artificial Sequence: Synthetic oligonucleotide
gccucuguccuggaccuau

SEQ ID NO: 1659035 - RNA, 19 nt, Artificial Sequence
  Description of Artificial Sequence: Synthetic oligonucleotide
gggccggucccaagugaga

SEQ ID NO: 1659036 - RNA, 19 nt, Artificial Sequence
  Description of Artificial Sequence: Synthetic oligonucleotide
gggccgucugcgagaccgc

SEQ ID NO: 1659037 - RNA, 19 nt, Artificial Sequence
  Description of Artificial Sequence: Synthetic oligonucleotide
caacggguuccugccuccu

SEQ ID NO: 1659038 - RNA, 19 nt, Artificial Sequence
  Description of Artificial Sequence: Synthetic oligonucleotide
gcccucgucucuccugcgu

SEQ ID NO: 1659039 - RNA, 19 nt, Artificial Sequence
  Description of Artificial Sequence: Synthetic oligonucleotide
cguguaugucacucuuggu

SEQ ID NO: 1659040 - RNA, 19 nt, Artificial Sequence
  Description of Artificial Sequence: Synthetic oligonucleotide
cggcaucaugggagugggc

SEQ ID NO: 1659041 - RNA, 19 nt, Artificial Sequence
  Description of Artificial Sequence: Synthetic oligonucleotide
ccucgucucuccugcgugu

SEQ ID NO: 1659042 - RNA, 19 nt, Artificial Sequence
  Description of Artificial Sequence: Synthetic oligonucleotide
ggcccacguggcagcaguc

SEQ ID NO: 1659043 - RNA, 19 nt, Artificial Sequence
  Description of Artificial Sequence: Synthetic oligonucleotide
cuccugcguguaugucacu

SEQ ID NO: 1659044 - RNA, 19 nt, Artificial Sequence
  Description of Artificial Sequence: Synthetic oligonucleotide
gcggaaguuccggugcaau

SEQ ID NO: 1659045 - RNA, 19 nt, Artificial Sequence
  Description of Artificial Sequence: Synthetic oligonucleotide
cgcgagggcaagggcaguc

SEQ ID NO: 1659046 - RNA, 19 nt, Artificial Sequence
  Description of Artificial Sequence: Synthetic oligonucleotide
cgcgugcagagcguggcca

SEQ ID NO: 1659047 - RNA, 19 nt, Artificial Sequence
  Description of Artificial Sequence: Synthetic oligonucleotide
gcgagggcaagggcagucu

SEQ ID NO: 1659048 - RNA, 19 nt, Artificial Sequence
  Description of Artificial Sequence: Synthetic oligonucleotide
cgccgccggcucaaccacc

SEQ ID NO: 1659049 - RNA, 19 nt, Artificial Sequence
  Description of Artificial Sequence: Synthetic oligonucleotide
ccgccucuucaaccaguga

SEQ ID NO: 1659050 - RNA, 19 nt, Artificial Sequence
  Description of Artificial Sequence: Synthetic oligonucleotide
cggugcaaucgcgugcaga

SEQ ID NO: 1659051 - RNA, 19 nt, Artificial Sequence
  Description of Artificial Sequence: Synthetic oligonucleotide
gggcuuggccacacacaua

SEQ ID NO: 1659052 - RNA, 19 nt, Artificial Sequence
  Description of Artificial Sequence: Synthetic oligonucleotide
gggcaagggcagucuccgu

SEQ ID NO: 1659053 - RNA, 19 nt, Artificial Sequence
  Description of Artificial Sequence: Synthetic oligonucleotide
cccaagcggccucuucugu

SEQ ID NO: 1659054 - RNA, 19 nt, Artificial Sequence
  Description of Artificial Sequence: Synthetic oligonucleotide
ccgcucaguccgagcucuc

SEQ ID NO: 1659055 - RNA, 19 nt, Artificial Sequence
  Description of Artificial Sequence: Synthetic oligonucleotide
ggcagcccaagcggccucu

SEQ ID NO: 1659056 - RNA, 19 nt, Artificial Sequence
  Description of Artificial Sequence: Synthetic oligonucleotide
gccacccggggaggcgcug

SEQ ID NO: 1659057 - RNA, 19 nt, Artificial Sequence
  Description of Artificial Sequence: Synthetic oligonucleotide
ccgccggcucaaccaccac

SEQ ID NO: 1659058 - RNA, 19 nt, Artificial Sequence
  Description of Artificial Sequence: Synthetic oligonucleotide
cgucugcgagaccgcuuga

SEQ ID NO: 1659059 - RNA, 19 nt, Artificial Sequence
  Description of Artificial Sequence: Synthetic oligonucleotide
gggugggcacauggauggu

SEQ ID NO: 1659060 - RNA, 19 nt, Artificial Sequence
  Description of Artificial Sequence: Synthetic oligonucleotide
gcgggagcaggggccgucu

SEQ ID NO: 1659061 - RNA, 19 nt, Artificial Sequence
  Description of Artificial Sequence: Synthetic oligonucleotide
gccgucugcgagaccgcuu

SEQ ID NO: 1659062 - RNA, 19 nt, Artificial Sequence
  Description of Artificial Sequence: Synthetic oligonucleotide
cggagccuguacacaccgu

SEQ ID NO: 1659063 - RNA, 19 nt, Artificial Sequence
  Description of Artificial Sequence: Synthetic oligonucleotide
cgccggcgcacggcccacg

SEQ ID NO: 1659064 - RNA, 19 nt, Artificial Sequence
  Description of Artificial Sequence: Synthetic oligonucleotide
ggccacccggggaggcgcu

SEQ ID NO: 1659065 - RNA, 19 nt, Artificial Sequence
  Description of Artificial Sequence: Synthetic oligonucleotide
aacucuuugucucuguucc

SEQ ID NO: 1659066 - RNA, 19 nt, Artificial Sequence
  Description of Artificial Sequence: Synthetic oligonucleotide
ucucuaauaaacuucgggg

SEQ ID NO: 1659067 - RNA, 19 nt, Artificial Sequence
  Description of Artificial Sequence: Synthetic oligonucleotide
uauguauacacacacacac

SEQ ID NO: 1659068 - RNA, 19 nt, Artificial Sequence
  Description of Artificial Sequence: Synthetic oligonucleotide
uauagauuaauuuauguau

SEQ ID NO: 1659069 - RNA, 19 nt, Artificial Sequence
  Description of Artificial Sequence: Synthetic oligonucleotide
aagaaucuaaccuuuaagu

SEQ ID NO: 1659070 - RNA, 19 nt, Artificial Sequence
  Description of Artificial Sequence: Synthetic oligonucleotide
aaaucugaccaccuugggc

SEQ ID NO: 1659071 - RNA, 19 nt, Artificial Sequence
  Description of Artificial Sequence: Synthetic oligonucleotide
uucagaugaaaucugacca

SEQ ID NO: 1659072 - RNA, 19 nt, Artificial Sequence
  Description of Artificial Sequence: Synthetic oligonucleotide
aaucugaccaccuugggca

SEQ ID NO: 1659073 - RNA, 19 nt, Artificial Sequence
  Description of Artificial Sequence: Synthetic oligonucleotide
uucucuaauaaacuucggg

SEQ ID NO: 1659074 - RNA, 19 nt, Artificial Sequence
  Description of Artificial Sequence: Synthetic oligonucleotide
uguauaaugaucugcugag

SEQ ID NO: 1659075 - RNA, 19 nt, Artificial Sequence
  Description of Artificial Sequence: Synthetic oligonucleotide
agaaucuaaccuuuaaguc

SEQ ID NO: 1659076 - RNA, 19 nt, Artificial Sequence
  Description of Artificial Sequence: Synthetic oligonucleotide
uuagguaucaggauuuagc

SEQ ID NO: 1659077 - RNA, 19 nt, Artificial Sequence
  Description of Artificial Sequence: Synthetic oligonucleotide
uauacacacacacacacac

SEQ ID NO: 1659078 - RNA, 19 nt, Artificial Sequence
  Description of Artificial Sequence: Synthetic oligonucleotide
uaagaaucuaaccuuuaag

SEQ ID NO: 1659079 - RNA, 19 nt, Artificial Sequence
  Description of Artificial Sequence: Synthetic oligonucleotide
agugaucuaguucagaucu

SEQ ID NO: 1659080 - RNA, 19 nt, Artificial Sequence
  Description of Artificial Sequence: Synthetic oligonucleotide
aagggaaagguguauaaug

SEQ ID NO: 1659081 - RNA, 19 nt, Artificial Sequence
  Description of Artificial Sequence: Synthetic oligonucleotide
ucaggauuuagccucaccc

SEQ ID NO: 1659082 - RNA, 19 nt, Artificial Sequence
  Description of Artificial Sequence: Synthetic oligonucleotide
aaguccauaggccugccac

SEQ ID NO: 1659083 - RNA, 19 nt, Artificial Sequence
  Description of Artificial Sequence: Synthetic oligonucleotide
uguauacacacacacacac

SEQ ID NO: 1659084 - RNA, 19 nt, Artificial Sequence
  Description of Artificial Sequence: Synthetic oligonucleotide
acauacauagguuucuggg

SEQ ID NO: 1659085 - RNA, 19 nt, Artificial Sequence
  Description of Artificial Sequence: Synthetic oligonucleotide
uuauaaugguaucccaggg

SEQ ID NO: 1659086 - RNA, 19 nt, Artificial Sequence
  Description of Artificial Sequence: Synthetic oligonucleotide
aagguguauaaugaucugc

SEQ ID NO: 1659087 - RNA, 19 nt, Artificial Sequence
  Description of Artificial Sequence: Synthetic oligonucleotide
aaaauaaauccaggguagc

SEQ ID NO: 1659088 - RNA, 19 nt, Artificial Sequence
  Description of Artificial Sequence: Synthetic oligonucleotide
ucaaauagguagcacacac

SEQ ID NO: 1659089 - RNA, 19 nt, Artificial Sequence
  Description of Artificial Sequence: Synthetic oligonucleotide
gaaaauaaauccaggguag

SEQ ID NO: 1659090 - RNA, 19 nt, Artificial Sequence
  Description of Artificial Sequence: Synthetic oligonucleotide
uuaagacacuguuuuaucc

SEQ ID NO: 1659091 - RNA, 19 nt, Artificial Sequence
  Description of Artificial Sequence: Synthetic oligonucleotide
aacaagugaauugcuaggg

SEQ ID NO: 1659092 - RNA, 19 nt, Artificial Sequence
  Description of Artificial Sequence: Synthetic oligonucleotide
gacugcgugauuuaacagg

SEQ ID NO: 1659093 - RNA, 19 nt, Artificial Sequence
  Description of Artificial Sequence: Synthetic oligonucleotide
auaaugguaucccagggug

SEQ ID NO: 1659094 - RNA, 19 nt, Artificial Sequence
  Description of Artificial Sequence: Synthetic oligonucleotide
ugcgugauuuaacaggcgg

SEQ ID NO: 1659095 - RNA, 19 nt, Artificial Sequence
  Description of Artificial Sequence: Synthetic oligonucleotide
uuuaacaggcggcugaaac

SEQ ID NO: 1659096 - RNA, 19 nt, Artificial Sequence
  Description of Artificial Sequence: Synthetic oligonucleotide
ugacagucauauuaacucg

SEQ ID NO: 1659097 - RNA, 19 nt, Artificial Sequence
  Description of Artificial Sequence: Synthetic oligonucleotide
uagguaucaggauuuagcc

SEQ ID NO: 1659098 - RNA, 19 nt, Artificial Sequence
  Description of Artificial Sequence: Synthetic oligonucleotide
uacacacacacacacacac

SEQ ID NO: 1659099 - RNA, 19 nt, Artificial Sequence
  Description of Artificial Sequence: Synthetic oligonucleotide
aaugguaucccagggugac

SEQ ID NO: 1659100 - RNA, 19 nt, Artificial Sequence
  Description of Artificial Sequence: Synthetic oligonucleotide
ucuaauaaacuucgggguc

SEQ ID NO: 1659101 - RNA, 19 nt, Artificial Sequence
  Description of Artificial Sequence: Synthetic oligonucleotide
ugcccuacaggcaucaugc

SEQ ID NO: 1659102 - RNA, 19 nt, Artificial Sequence
  Description of Artificial Sequence: Synthetic oligonucleotide
cugugcauaaacauggcug

SEQ ID NO: 1659103 - RNA, 19 nt, Artificial Sequence
  Description of Artificial Sequence: Synthetic oligonucleotide
uaauuuauguauguauaca

SEQ ID NO: 1659104 - RNA, 19 nt, Artificial Sequence
  Description of Artificial Sequence: Synthetic oligonucleotide
ugugcauaaacauggcugu

SEQ ID NO: 1659105 - RNA, 19 nt, Artificial Sequence
  Description of Artificial Sequence: Synthetic oligonucleotide
aucaccaugaugucaccac

SEQ ID NO: 1659106 - RNA, 19 nt, Artificial Sequence
  Description of Artificial Sequence: Synthetic oligonucleotide
uuaacaggcggcugaaacc

SEQ ID NO: 1659107 - RNA, 19 nt, Artificial Sequence
  Description of Artificial Sequence: Synthetic oligonucleotide
uagauuaauuuauguaugu

SEQ ID NO: 1659108 - RNA, 19 nt, Artificial Sequence
  Description of Artificial Sequence: Synthetic oligonucleotide
gaaucuaaccuuuaagucu

SEQ ID NO: 1659109 - RNA, 19 nt, Artificial Sequence
  Description of Artificial Sequence: Synthetic oligonucleotide
auccagauggcacaaacca

SEQ ID NO: 1659110 - RNA, 19 nt, Artificial Sequence
  Description of Artificial Sequence: Synthetic oligonucleotide
acugcgugauuuaacaggc

SEQ ID NO: 1659111 - RNA, 19 nt, Artificial Sequence
  Description of Artificial Sequence: Synthetic oligonucleotide
aguacaacuuaagacacug

SEQ ID NO: 1659112 - RNA, 19 nt, Artificial Sequence
  Description of Artificial Sequence: Synthetic oligonucleotide
aaagguguauaaugaucug

SEQ ID NO: 1659113 - RNA, 19 nt, Artificial Sequence
  Description of Artificial Sequence: Synthetic oligonucleotide
gaagcggaaaagcuuccgg

SEQ ID NO: 1659114 - RNA, 19 nt, Artificial Sequence
  Description of Artificial Sequence: Synthetic oligonucleotide
agaguaagaaucuaaccuu

SEQ ID NO: 1659115 - RNA, 19 nt, Artificial Sequence
  Description of Artificial Sequence: Synthetic oligonucleotide
aguuauaaugguaucccag

SEQ ID NO: 1659116 - RNA, 19 nt, Artificial Sequence
  Description of Artificial Sequence: Synthetic oligonucleotide
uuuuauccagugccacugg

SEQ ID NO: 1659117 - RNA, 19 nt, Artificial Sequence
  Description of Artificial Sequence: Synthetic oligonucleotide
ucggaaauccugaaaucca

SEQ ID NO: 1659118 - RNA, 19 nt, Artificial Sequence
  Description of Artificial Sequence: Synthetic oligonucleotide
gguaucaggauuuagccuc

SEQ ID NO: 1659119 - RNA, 19 nt, Artificial Sequence
  Description of Artificial Sequence: Synthetic oligonucleotide
caguguggagucuaggcgg

SEQ ID NO: 1659120 - RNA, 19 nt, Artificial Sequence
  Description of Artificial Sequence: Synthetic oligonucleotide
uuaugggucucuucuuuag

SEQ ID NO: 1659121 - RNA, 19 nt, Artificial Sequence
  Description of Artificial Sequence: Synthetic oligonucleotide
caggauuuagccucacccg

SEQ ID NO: 1659122 - RNA, 19 nt, Artificial Sequence
  Description of Artificial Sequence: Synthetic oligonucleotide
aaccuuuaagucuuaggua

SEQ ID NO: 1659123 - RNA, 19 nt, Artificial Sequence
  Description of Artificial Sequence: Synthetic oligonucleotide
aagcggaaaagcuuccgga

SEQ ID NO: 1659124 - RNA, 19 nt, Artificial Sequence
  Description of Artificial Sequence: Synthetic oligonucleotide
ucuccguuuauucuacuuc

SEQ ID NO: 1659125 - RNA, 19 nt, Artificial Sequence
  Description of Artificial Sequence: Synthetic oligonucleotide
ugaucugcugaguauuucu

SEQ ID NO: 1659126 - RNA, 19 nt, Artificial Sequence
  Description of Artificial Sequence: Synthetic oligonucleotide
acacuguuuuauccagugc

SEQ ID NO: 1659127 - RNA, 19 nt, Artificial Sequence
  Description of Artificial Sequence: Synthetic oligonucleotide
uuagaccuuagguaacucu

SEQ ID NO: 1659128 - RNA, 19 nt, Artificial Sequence
  Description of Artificial Sequence: Synthetic oligonucleotide
gucgagaagucgaugaccg

SEQ ID NO: 1659129 - RNA, 19 nt, Artificial Sequence
  Description of Artificial Sequence: Synthetic oligonucleotide
cacacacacacacacacac

SEQ ID NO: 1659130 - RNA, 19 nt, Artificial Sequence
  Description of Artificial Sequence: Synthetic oligonucleotide
gggaguacaacuuaagaca

SEQ ID NO: 1659131 - RNA, 19 nt, Artificial Sequence
  Description of Artificial Sequence: Synthetic oligonucleotide
aaggacucgagggacugcg

SEQ ID NO: 1659132 - RNA, 19 nt, Artificial Sequence
  Description of Artificial Sequence: Synthetic oligonucleotide
guguauaaugaucugcuga

SEQ ID NO: 1659133 - RNA, 19 nt, Artificial Sequence
  Description of Artificial Sequence: Synthetic oligonucleotide
auaaacuucggggucuccg

SEQ ID NO: 1659134 - RNA, 19 nt, Artificial Sequence
  Description of Artificial Sequence: Synthetic oligonucleotide
aaagcuuccggaaggcguc

SEQ ID NO: 1659135 - RNA, 19 nt, Artificial Sequence
  Description of Artificial Sequence: Synthetic oligonucleotide
aaaagcuuccggaaggcgu

SEQ ID NO: 1659136 - RNA, 19 nt, Artificial Sequence
  Description of Artificial Sequence: Synthetic oligonucleotide
aaucuaaccuuuaagucuu

SEQ ID NO: 1659137 - RNA, 19 nt, Artificial Sequence
  Description of Artificial Sequence: Synthetic oligonucleotide
guuuuacugggcuauucug

SEQ ID NO: 1659138 - RNA, 19 nt, Artificial Sequence
  Description of Artificial Sequence: Synthetic oligonucleotide
caaauagguagcacacacc

SEQ ID NO: 1659139 - RNA, 19 nt, Artificial Sequence
  Description of Artificial Sequence: Synthetic oligonucleotide
auaaugaucugcugaguau

SEQ ID NO: 1659140 - RNA, 19 nt, Artificial Sequence
  Description of Artificial Sequence: Synthetic oligonucleotide
cagaacagggcucaacaag

SEQ ID NO: 1659141 - RNA, 19 nt, Artificial Sequence
  Description of Artificial Sequence: Synthetic oligonucleotide
uuauccagugccacuggca

SEQ ID NO: 1659142 - RNA, 19 nt, Artificial Sequence
  Description of Artificial Sequence: Synthetic oligonucleotide
agaagucgaugaccgcucc

SEQ ID NO: 1659143 - RNA, 19 nt, Artificial Sequence
  Description of Artificial Sequence: Synthetic oligonucleotide
aacagggcucaacaaguga

SEQ ID NO: 1659144 - RNA, 19 nt, Artificial Sequence
  Description of Artificial Sequence: Synthetic oligonucleotide
aauaaacuucggggucucc

SEQ ID NO: 1659145 - RNA, 19 nt, Artificial Sequence
  Description of Artificial Sequence: Synthetic oligonucleotide
uuguccagguuacauacau

SEQ ID NO: 1659146 - RNA, 19 nt, Artificial Sequence
  Description of Artificial Sequence: Synthetic oligonucleotide
cacacacacacacacacuc

SEQ ID NO: 1659147 - RNA, 19 nt, Artificial Sequence
  Description of Artificial Sequence: Synthetic oligonucleotide
ucuuuagaccuuagguaac

SEQ ID NO: 1659148 - RNA, 19 nt, Artificial Sequence
  Description of Artificial Sequence: Synthetic oligonucleotide
caggguagccuucaagucc

SEQ ID NO: 1659149 - RNA, 19 nt, Artificial Sequence
  Description of Artificial Sequence: Synthetic oligonucleotide
uagaccuuagguaacucuu

SEQ ID NO: 1659150 - RNA, 19 nt, Artificial Sequence
  Description of Artificial Sequence: Synthetic oligonucleotide
agucuuagguaucaggauu

SEQ ID NO: 1659151 - RNA, 19 nt, Artificial Sequence
  Description of Artificial Sequence: Synthetic oligonucleotide
uguuuuauccagugccacu

SEQ ID NO: 1659152 - RNA, 19 nt, Artificial Sequence
  Description of Artificial Sequence: Synthetic oligonucleotide
ugggcuauucuggucaucc

SEQ ID NO: 1659153 - RNA, 19 nt, Artificial Sequence
  Description of Artificial Sequence: Synthetic oligonucleotide
aggauuuagccucacccgu

SEQ ID NO: 1659154 - RNA, 19 nt, Artificial Sequence
  Description of Artificial Sequence: Synthetic oligonucleotide
cagaguaagaaucuaaccu

SEQ ID NO: 1659155 - RNA, 19 nt, Artificial Sequence
  Description of Artificial Sequence: Synthetic oligonucleotide
uucugcucggaaauccuga

SEQ ID NO: 1659156 - RNA, 19 nt, Artificial Sequence
  Description of Artificial Sequence: Synthetic oligonucleotide
ucaugcgccgucgagaagu

SEQ ID NO: 1659157 - RNA, 19 nt, Artificial Sequence
  Description of Artificial Sequence: Synthetic oligonucleotide
uaacaggcggcugaaaccu

SEQ ID NO: 1659158 - RNA, 19 nt, Artificial Sequence
  Description of Artificial Sequence: Synthetic oligonucleotide
uaaugguaucccaggguga

SEQ ID NO: 1659159 - RNA, 19 nt, Artificial Sequence
  Description of Artificial Sequence: Synthetic oligonucleotide
cauacauagguuucuggga

SEQ ID NO: 1659160 - RNA, 19 nt, Artificial Sequence
  Description of Artificial Sequence: Synthetic oligonucleotide
gaccuuagguaacucuuug

SEQ ID NO: 1659161 - RNA, 19 nt, Artificial Sequence
  Description of Artificial Sequence: Synthetic oligonucleotide
agcgcaguuucucuaauaa

SEQ ID NO: 1659162 - RNA, 19 nt, Artificial Sequence
  Description of Artificial Sequence: Synthetic oligonucleotide
agguuacauacauagguuu

SEQ ID NO: 1659163 - RNA, 19 nt, Artificial Sequence
  Description of Artificial Sequence: Synthetic oligonucleotide
auaaauccaggguagccuu

SEQ ID NO: 1659164 - RNA, 19 nt, Artificial Sequence
  Description of Artificial Sequence: Synthetic oligonucleotide
uaaacuucggggucuccgu

SEQ ID NO: 1659165 - RNA, 19 nt, Artificial Sequence
  Description of Artificial Sequence: Synthetic oligonucleotide
cagaugaaaucugaccacc

SEQ ID NO: 1659166 - RNA, 19 nt, Artificial Sequence
  Description of Artificial Sequence: Synthetic oligonucleotide
ugguaucccagggugaccc

SEQ ID NO: 1659167 - RNA, 19 nt, Artificial Sequence
  Description of Artificial Sequence: Synthetic oligonucleotide
ugcgccgucgagaagucga

SEQ ID NO: 1659168 - RNA, 19 nt, Artificial Sequence
  Description of Artificial Sequence: Synthetic oligonucleotide
ucuaaccuuuaagucuuag

SEQ ID NO: 1659169 - RNA, 19 nt, Artificial Sequence
  Description of Artificial Sequence: Synthetic oligonucleotide
cuuacugucccaguuauaa

SEQ ID NO: 1659170 - RNA, 19 nt, Artificial Sequence
  Description of Artificial Sequence: Synthetic oligonucleotide
uggcacaaaccaucuguag

SEQ ID NO: 1659171 - RNA, 19 nt, Artificial Sequence
  Description of Artificial Sequence: Synthetic oligonucleotide
ucugucgccagcguggcga

SEQ ID NO: 1659172 - RNA, 19 nt, Artificial Sequence
  Description of Artificial Sequence: Synthetic oligonucleotide
agguaucaggauuuagccu

SEQ ID NO: 1659173 - RNA, 19 nt, Artificial Sequence
  Description of Artificial Sequence: Synthetic oligonucleotide
uuaacucgggcaguuuuca

SEQ ID NO: 1659174 - RNA, 19 nt, Artificial Sequence
  Description of Artificial Sequence: Synthetic oligonucleotide
agaacagggcucaacaagu

SEQ ID NO: 1659175 - RNA, 19 nt, Artificial Sequence
  Description of Artificial Sequence: Synthetic oligonucleotide
agcgacuugcucugagagg

SEQ ID NO: 1659176 - RNA, 19 nt, Artificial Sequence
  Description of Artificial Sequence: Synthetic oligonucleotide
ggaugaaaauaaauccagg

SEQ ID NO: 1659177 - RNA, 19 nt, Artificial Sequence
  Description of Artificial Sequence: Synthetic oligonucleotide
aagucgaugaccgcuccca

SEQ ID NO: 1659178 - RNA, 19 nt, Artificial Sequence
  Description of Artificial Sequence: Synthetic oligonucleotide
aagccugccagaguaagaa

SEQ ID NO: 1659179 - RNA, 19 nt, Artificial Sequence
  Description of Artificial Sequence: Synthetic oligonucleotide
auagguuucugggaguaca

SEQ ID NO: 1659180 - RNA, 19 nt, Artificial Sequence
  Description of Artificial Sequence: Synthetic oligonucleotide
aacuuaagacacuguuuua

SEQ ID NO: 1659181 - RNA, 19 nt, Artificial Sequence
  Description of Artificial Sequence: Synthetic oligonucleotide
ugaaaccugacaucaccau

SEQ ID NO: 1659182 - RNA, 19 nt, Artificial Sequence
  Description of Artificial Sequence: Synthetic oligonucleotide
uuuagccucacccguuuua

SEQ ID NO: 1659183 - RNA, 19 nt, Artificial Sequence
  Description of Artificial Sequence: Synthetic oligonucleotide
acagucauauuaacucggg

SEQ ID NO: 1659184 - RNA, 19 nt, Artificial Sequence
  Description of Artificial Sequence: Synthetic oligonucleotide
ugcuucugcucggaaaucc

SEQ ID NO: 1659185 - RNA, 19 nt, Artificial Sequence
  Description of Artificial Sequence: Synthetic oligonucleotide
uagaagcggaaaagcuucc

SEQ ID NO: 1659186 - RNA, 19 nt, Artificial Sequence
  Description of Artificial Sequence: Synthetic oligonucleotide
gagugaucuaguucagauc

SEQ ID NO: 1659187 - RNA, 19 nt, Artificial Sequence
  Description of Artificial Sequence: Synthetic oligonucleotide
ggauaccugcuucugcucg

SEQ ID NO: 1659188 - RNA, 19 nt, Artificial Sequence
  Description of Artificial Sequence: Synthetic oligonucleotide
cagucauauuaacucgggc

SEQ ID NO: 1659189 - RNA, 19 nt, Artificial Sequence
  Description of Artificial Sequence: Synthetic oligonucleotide
cacacucucucucucuggc

SEQ ID NO: 1659190 - RNA, 19 nt, Artificial Sequence
  Description of Artificial Sequence: Synthetic oligonucleotide
cucuaauaaacuucggggu

SEQ ID NO: 1659191 - RNA, 19 nt, Artificial Sequence
  Description of Artificial Sequence: Synthetic oligonucleotide
ccagaguaagaaucuaacc

SEQ ID NO: 1659192 - RNA, 19 nt, Artificial Sequence
  Description of Artificial Sequence: Synthetic oligonucleotide
acacacucucucucucugg

SEQ ID NO: 1659193 - RNA, 19 nt, Artificial Sequence
  Description of Artificial Sequence: Synthetic oligonucleotide
cagcgacuugcucugagag

SEQ ID NO: 1659194 - RNA, 19 nt, Artificial Sequence
  Description of Artificial Sequence: Synthetic oligonucleotide
acucucucucucuggcaac

SEQ ID NO: 1659195 - RNA, 19 nt, Artificial Sequence
  Description of Artificial Sequence: Synthetic oligonucleotide
caugcucagucacugagga

SEQ ID NO: 1659196 - RNA, 19 nt, Artificial Sequence
  Description of Artificial Sequence: Synthetic oligonucleotide
agaagcggaaaagcuuccg

SEQ ID NO: 1659197 - RNA, 19 nt, Artificial Sequence
  Description of Artificial Sequence: Synthetic oligonucleotide
cuuagguaucaggauuuag

SEQ ID NO: 1659198 - RNA, 19 nt, Artificial Sequence
  Description of Artificial Sequence: Synthetic oligonucleotide
cacacacacacacacucuc

SEQ ID NO: 1659199 - RNA, 19 nt, Artificial Sequence
  Description of Artificial Sequence: Synthetic oligonucleotide
uuagccucacccguuuuac

SEQ ID NO: 1659200 - RNA, 19 nt, Artificial Sequence
  Description of Artificial Sequence: Synthetic oligonucleotide
ucuaggcgguaguaauuca

SEQ ID NO: 1659201 - RNA, 19 nt, Artificial Sequence
  Description of Artificial Sequence: Synthetic oligonucleotide
ccaguuauaaugguauccc

SEQ ID NO: 1659202 - RNA, 19 nt, Artificial Sequence
  Description of Artificial Sequence: Synthetic oligonucleotide
ucauauuaacucgggcagu

SEQ ID NO: 1659203 - RNA, 19 nt, Artificial Sequence
  Description of Artificial Sequence: Synthetic oligonucleotide
agcggaaaagcuuccggaa

SEQ ID NO: 1659204 - RNA, 19 nt, Artificial Sequence
  Description of Artificial Sequence: Synthetic oligonucleotide
auuaugggucucuucuuua

SEQ ID NO: 1659205 - RNA, 19 nt, Artificial Sequence
  Description of Artificial Sequence: Synthetic oligonucleotide
agauuaauuuauguaugua

SEQ ID NO: 1659206 - RNA, 19 nt, Artificial Sequence
  Description of Artificial Sequence: Synthetic oligonucleotide
acacacacacacucucucu

SEQ ID NO: 1659207 - RNA, 19 nt, Artificial Sequence
  Description of Artificial Sequence: Synthetic oligonucleotide
gucgaugaccgcucccagg

SEQ ID NO: 1659208 - RNA, 19 nt, Artificial Sequence
  Description of Artificial Sequence: Synthetic oligonucleotide
augaucugcugaguauuuc

SEQ ID NO: 1659209 - RNA, 19 nt, Artificial Sequence
  Description of Artificial Sequence: Synthetic oligonucleotide
gaagucgaugaccgcuccc

SEQ ID NO: 1659210 - RNA, 19 nt, Artificial Sequence
  Description of Artificial Sequence: Synthetic oligonucleotide
guggcgaacgaagccacgg

SEQ ID NO: 1659211 - RNA, 19 nt, Artificial Sequence
  Description of Artificial Sequence: Synthetic oligonucleotide
uaguucagaucuguccaca

SEQ ID NO: 1659212 - RNA, 19 nt, Artificial Sequence
  Description of Artificial Sequence: Synthetic oligonucleotide
acaacuuaagacacuguuu

SEQ ID NO: 1659213 - RNA, 19 nt, Artificial Sequence
  Description of Artificial Sequence: Synthetic oligonucleotide
cacacacacacacucucuc

SEQ ID NO: 1659214 - RNA, 19 nt, Artificial Sequence
  Description of Artificial Sequence: Synthetic oligonucleotide
uggcgaacgaagccacggc

SEQ ID NO: 1659215 - RNA, 19 nt, Artificial Sequence
  Description of Artificial Sequence: Synthetic oligonucleotide
caacuuaagacacuguuuu

SEQ ID NO: 1659216 - RNA, 19 nt, Artificial Sequence
  Description of Artificial Sequence: Synthetic oligonucleotide
gguguauaaugaucugcug

SEQ ID NO: 1659217 - RNA, 19 nt, Artificial Sequence
  Description of Artificial Sequence: Synthetic oligonucleotide
ccuuagguaacucuuuguc

SEQ ID NO: 1659218 - RNA, 19 nt, Artificial Sequence
  Description of Artificial Sequence: Synthetic oligonucleotide
cuuuagucauguguuuguc

SEQ ID NO: 1659219 - RNA, 19 nt, Artificial Sequence
  Description of Artificial Sequence: Synthetic oligonucleotide
gaacagggcucaacaagug

SEQ ID NO: 1659220 - RNA, 19 nt, Artificial Sequence
  Description of Artificial Sequence: Synthetic oligonucleotide
aaccugacaucaccaugau

SEQ ID NO: 1659221 - RNA, 19 nt, Artificial Sequence
  Description of Artificial Sequence: Synthetic oligonucleotide
cacacacucucucucucug

SEQ ID NO: 1659222 - RNA, 19 nt, Artificial Sequence
  Description of Artificial Sequence: Synthetic oligonucleotide
uuuagaccuuagguaacuc

SEQ ID NO: 1659223 - RNA, 19 nt, Artificial Sequence
  Description of Artificial Sequence: Synthetic oligonucleotide
aaacuucggggucuccguu

SEQ ID NO: 1659224 - RNA, 19 nt, Artificial Sequence
  Description of Artificial Sequence: Synthetic oligonucleotide
gggacugcgugauuuaaca

SEQ ID NO: 1659225 - RNA, 19 nt, Artificial Sequence
  Description of Artificial Sequence: Synthetic oligonucleotide
ggcauuccccaucaggaug

SEQ ID NO: 1659226 - RNA, 19 nt, Artificial Sequence
  Description of Artificial Sequence: Synthetic oligonucleotide
cuguuuuauccagugccac

SEQ ID NO: 1659227 - RNA, 19 nt, Artificial Sequence
  Description of Artificial Sequence: Synthetic oligonucleotide
acacacacucucucucucu

SEQ ID NO: 1659228 - RNA, 19 nt, Artificial Sequence
  Description of Artificial Sequence: Synthetic oligonucleotide
gucgccagcguggcgaacg

SEQ ID NO: 1659229 - RNA, 19 nt, Artificial Sequence
  Description of Artificial Sequence: Synthetic oligonucleotide
ucggggucuccguuuauuc

SEQ ID NO: 1659230 - RNA, 19 nt, Artificial Sequence
  Description of Artificial Sequence: Synthetic oligonucleotide
agucgaugaccgcucccag

SEQ ID NO: 1659231 - RNA, 19 nt, Artificial Sequence
  Description of Artificial Sequence: Synthetic oligonucleotide
gacucgagggacugcguga

SEQ ID NO: 1659232 - RNA, 19 nt, Artificial Sequence
  Description of Artificial Sequence: Synthetic oligonucleotide
cugcgugauuuaacaggcg

SEQ ID NO: 1659233 - RNA, 19 nt, Artificial Sequence
  Description of Artificial Sequence: Synthetic oligonucleotide
caguuauaaugguauccca

SEQ ID NO: 1659234 - RNA, 19 nt, Artificial Sequence
  Description of Artificial Sequence: Synthetic oligonucleotide
gaugaccgcucccaggucu

SEQ ID NO: 1659235 - RNA, 19 nt, Artificial Sequence
  Description of Artificial Sequence: Synthetic oligonucleotide
gauuaugggucucuucuuu

SEQ ID NO: 1659236 - RNA, 19 nt, Artificial Sequence
  Description of Artificial Sequence: Synthetic oligonucleotide
auguauacacacacacaca

SEQ ID NO: 1659237 - RNA, 19 nt, Artificial Sequence
  Description of Artificial Sequence: Synthetic oligonucleotide
ggaggaauggguuugggau

SEQ ID NO: 1659238 - RNA, 19 nt, Artificial Sequence
  Description of Artificial Sequence: Synthetic oligonucleotide
ucccaguuauaaugguauc

SEQ ID NO: 1659239 - RNA, 19 nt, Artificial Sequence
  Description of Artificial Sequence: Synthetic oligonucleotide
gucuaggcgguaguaauuc

SEQ ID NO: 1659240 - RNA, 19 nt, Artificial Sequence
  Description of Artificial Sequence: Synthetic oligonucleotide
cacaggcugaaguccugcc

SEQ ID NO: 1659241 - RNA, 19 nt, Artificial Sequence
  Description of Artificial Sequence: Synthetic oligonucleotide
cccaguuauaaugguaucc

SEQ ID NO: 1659242 - RNA, 19 nt, Artificial Sequence
  Description of Artificial Sequence: Synthetic oligonucleotide
augguaucccagggugacc

SEQ ID NO: 1659243 - RNA, 19 nt, Artificial Sequence
  Description of Artificial Sequence: Synthetic oligonucleotide
gcgguaguaauucaggaua

SEQ ID NO: 1659244 - RNA, 19 nt, Artificial Sequence
  Description of Artificial Sequence: Synthetic oligonucleotide
gguuacauacauagguuuc

SEQ ID NO: 1659245 - RNA, 19 nt, Artificial Sequence
  Description of Artificial Sequence: Synthetic oligonucleotide
agcguggcgaacgaagcca

SEQ ID NO: 1659246 - RNA, 19 nt, Artificial Sequence
  Description of Artificial Sequence: Synthetic oligonucleotide
uuacugggcuauucugguc

SEQ ID NO: 1659247 - RNA, 19 nt, Artificial Sequence
  Description of Artificial Sequence: Synthetic oligonucleotide
aggguagccuucaagucca

SEQ ID NO: 1659248 - RNA, 19 nt, Artificial Sequence
  Description of Artificial Sequence: Synthetic oligonucleotide
cugcccuacaggcaucaug

SEQ ID NO: 1659249 - RNA, 19 nt, Artificial Sequence
  Description of Artificial Sequence: Synthetic oligonucleotide
gagaagucgaugaccgcuc

SEQ ID NO: 1659250 - RNA, 19 nt, Artificial Sequence
  Description of Artificial Sequence: Synthetic oligonucleotide
gcggaaaagcuuccggaag

SEQ ID NO: 1659251 - RNA, 19 nt, Artificial Sequence
  Description of Artificial Sequence: Synthetic oligonucleotide
ucgagggacugcgugauuu

SEQ ID NO: 1659252 - RNA, 19 nt, Artificial Sequence
  Description of Artificial Sequence: Synthetic oligonucleotide
accugacaucaccaugaug

SEQ ID NO: 1659253 - RNA, 19 nt, Artificial Sequence
  Description of Artificial Sequence: Synthetic oligonucleotide
gauuuaacaggcggcugaa

SEQ ID NO: 1659254 - RNA, 19 nt, Artificial Sequence
  Description of Artificial Sequence: Synthetic oligonucleotide
gagccucgggccucaugcg

SEQ ID NO: 1659255 - RNA, 19 nt, Artificial Sequence
  Description of Artificial Sequence: Synthetic oligonucleotide
uggagugaucuaguucaga

SEQ ID NO: 1659256 - RNA, 19 nt, Artificial Sequence
  Description of Artificial Sequence: Synthetic oligonucleotide
gcacaaaccaucuguagua

SEQ ID NO: 1659257 - RNA, 19 nt, Artificial Sequence
  Description of Artificial Sequence: Synthetic oligonucleotide
gccucacccguuuuacugg

SEQ ID NO: 1659258 - RNA, 19 nt, Artificial Sequence
  Description of Artificial Sequence: Synthetic oligonucleotide
cuaauaaacuucggggucu

SEQ ID NO: 1659259 - RNA, 19 nt, Artificial Sequence
  Description of Artificial Sequence: Synthetic oligonucleotide
ggcgaacgaagccacggcc

SEQ ID NO: 1659260 - RNA, 19 nt, Artificial Sequence
  Description of Artificial Sequence: Synthetic oligonucleotide
guauacacacacacacaca

SEQ ID NO: 1659261 - RNA, 19 nt, Artificial Sequence
  Description of Artificial Sequence: Synthetic oligonucleotide
uggcaacacaagccugcca

SEQ ID NO: 1659262 - RNA, 19 nt, Artificial Sequence
  Description of Artificial Sequence: Synthetic oligonucleotide
uucugucgccagcguggcg

SEQ ID NO: 1659263 - RNA, 19 nt, Artificial Sequence
  Description of Artificial Sequence: Synthetic oligonucleotide
gagucuaggcgguaguaau

SEQ ID NO: 1659264 - RNA, 19 nt, Artificial Sequence
  Description of Artificial Sequence: Synthetic oligonucleotide
cagcguggcgaacgaagcc

SEQ ID NO: 1659265 - RNA, 19 nt, Artificial Sequence
  Description of Artificial Sequence: Synthetic oligonucleotide
acacucucucucucuggca

SEQ ID NO: 1659266 - RNA, 19 nt, Artificial Sequence
  Description of Artificial Sequence: Synthetic oligonucleotide
acauagguuucugggagua

SEQ ID NO: 1659267 - RNA, 19 nt, Artificial Sequence
  Description of Artificial Sequence: Synthetic oligonucleotide
caucaggauguggaaggac

SEQ ID NO: 1659268 - RNA, 19 nt, Artificial Sequence
  Description of Artificial Sequence: Synthetic oligonucleotide
auggauccccaguguggag

SEQ ID NO: 1659269 - RNA, 19 nt, Artificial Sequence
  Description of Artificial Sequence: Synthetic oligonucleotide
ucuuagguaucaggauuua

SEQ ID NO: 1659270 - RNA, 19 nt, Artificial Sequence
  Description of Artificial Sequence: Synthetic oligonucleotide
uaacucgggcaguuuucaa

SEQ ID NO: 1659271 - RNA, 19 nt, Artificial Sequence
  Description of Artificial Sequence: Synthetic oligonucleotide
uagcacacaccugccaguc

SEQ ID NO: 1659272 - RNA, 19 nt, Artificial Sequence
  Description of Artificial Sequence: Synthetic oligonucleotide
ggagugaucuaguucagau

SEQ ID NO: 1659273 - RNA, 19 nt, Artificial Sequence
  Description of Artificial Sequence: Synthetic oligonucleotide
auacacacacacacacaca

SEQ ID NO: 1659274 - RNA, 19 nt, Artificial Sequence
  Description of Artificial Sequence: Synthetic oligonucleotide
aggcauuccccaucaggau

SEQ ID NO: 1659275 - RNA, 19 nt, Artificial Sequence
  Description of Artificial Sequence: Synthetic oligonucleotide
ggcacaaaccaucuguagu

SEQ ID NO: 1659276 - RNA, 19 nt, Artificial Sequence
  Description of Artificial Sequence: Synthetic oligonucleotide
gcgaacgaagccacggccg

SEQ ID NO: 1659277 - RNA, 19 nt, Artificial Sequence
  Description of Artificial Sequence: Synthetic oligonucleotide
cacucucucucucuggcaa

SEQ ID NO: 1659278 - RNA, 19 nt, Artificial Sequence
  Description of Artificial Sequence: Synthetic oligonucleotide
gccgucgagaagucgauga

SEQ ID NO: 1659279 - RNA, 19 nt, Artificial Sequence
  Description of Artificial Sequence: Synthetic oligonucleotide
cucacccguuuuacugggc

SEQ ID NO: 1659280 - RNA, 19 nt, Artificial Sequence
  Description of Artificial Sequence: Synthetic oligonucleotide
acacacacacacacucucu

SEQ ID NO: 1659281 - RNA, 19 nt, Artificial Sequence
  Description of Artificial Sequence: Synthetic oligonucleotide
acacacacacacacacucu

SEQ ID NO: 1659282 - RNA, 19 nt, Artificial Sequence
  Description of Artificial Sequence: Synthetic oligonucleotide
gugaucuaguucagaucug

SEQ ID NO: 1659283 - RNA, 19 nt, Artificial Sequence
  Description of Artificial Sequence: Synthetic oligonucleotide
acccguuuuacugggcuau

SEQ ID NO: 1659284 - RNA, 19 nt, Artificial Sequence
  Description of Artificial Sequence: Synthetic oligonucleotide
gucccaguuauaaugguau

SEQ ID NO: 1659285 - RNA, 19 nt, Artificial Sequence
  Description of Artificial Sequence: Synthetic oligonucleotide
gauuuagccucacccguuu

SEQ ID NO: 1659286 - RNA, 19 nt, Artificial Sequence
  Description of Artificial Sequence: Synthetic oligonucleotide
auuuagccucacccguuuu

SEQ ID NO: 1659287 - RNA, 19 nt, Artificial Sequence
  Description of Artificial Sequence: Synthetic oligonucleotide
gaacgaagccacggccgcc

SEQ ID NO: 1659288 - RNA, 19 nt, Artificial Sequence
  Description of Artificial Sequence: Synthetic oligonucleotide
ggaaauccugaaauccaca

SEQ ID NO: 1659289 - RNA, 19 nt, Artificial Sequence
  Description of Artificial Sequence: Synthetic oligonucleotide
ccagcguggcgaacgaagc

SEQ ID NO: 1659290 - RNA, 19 nt, Artificial Sequence
  Description of Artificial Sequence: Synthetic oligonucleotide
gcgugauuuaacaggcggc

SEQ ID NO: 1659291 - RNA, 19 nt, Artificial Sequence
  Description of Artificial Sequence: Synthetic oligonucleotide
augucaccacugugcauaa

SEQ ID NO: 1659292 - RNA, 19 nt, Artificial Sequence
  Description of Artificial Sequence: Synthetic oligonucleotide
ccuuuaagucuuagguauc

SEQ ID NO: 1659293 - RNA, 19 nt, Artificial Sequence
  Description of Artificial Sequence: Synthetic oligonucleotide
ggaaggacucgagggacug

SEQ ID NO: 1659294 - RNA, 19 nt, Artificial Sequence
  Description of Artificial Sequence: Synthetic oligonucleotide
guucugucgccagcguggc

SEQ ID NO: 1659295 - RNA, 19 nt, Artificial Sequence
  Description of Artificial Sequence: Synthetic oligonucleotide
ccucacccguuuuacuggg

SEQ ID NO: 1659296 - RNA, 19 nt, Artificial Sequence
  Description of Artificial Sequence: Synthetic oligonucleotide
cagguuacauacauagguu

SEQ ID NO: 1659297 - RNA, 19 nt, Artificial Sequence
  Description of Artificial Sequence: Synthetic oligonucleotide
acacacacacacacacaca

SEQ ID NO: 1659298 - RNA, 19 nt, Artificial Sequence
  Description of Artificial Sequence: Synthetic oligonucleotide
acacacacacacacacacu

SEQ ID NO: 1659299 - RNA, 19 nt, Artificial Sequence
  Description of Artificial Sequence: Synthetic oligonucleotide
agggcucaacaagugaauu

SEQ ID NO: 1659300 - RNA, 19 nt, Artificial Sequence
  Description of Artificial Sequence: Synthetic oligonucleotide
cuuuagaccuuagguaacu

SEQ ID NO: 1659301 - RNA, 19 nt, Artificial Sequence
  Description of Artificial Sequence: Synthetic oligonucleotide
cuauucuggucauccagau

SEQ ID NO: 1659302 - RNA, 19 nt, Artificial Sequence
  Description of Artificial Sequence: Synthetic oligonucleotide
agaccuuagguaacucuuu

SEQ ID NO: 1659303 - RNA, 19 nt, Artificial Sequence
  Description of Artificial Sequence: Synthetic oligonucleotide
auauuaacucgggcaguuu

SEQ ID NO: 1659304 - RNA, 19 nt, Artificial Sequence
  Description of Artificial Sequence: Synthetic oligonucleotide
uaccugucugacagucaua

SEQ ID NO: 1659305 - RNA, 19 nt, Artificial Sequence
  Description of Artificial Sequence: Synthetic oligonucleotide
gccagcguggcgaacgaag

SEQ ID NO: 1659306 - RNA, 19 nt, Artificial Sequence
  Description of Artificial Sequence: Synthetic oligonucleotide
auuuaacaggcggcugaaa

SEQ ID NO: 1659307 - RNA, 19 nt, Artificial Sequence
  Description of Artificial Sequence: Synthetic oligonucleotide
uucggggucuccguuuauu

SEQ ID NO: 1659308 - RNA, 19 nt, Artificial Sequence
  Description of Artificial Sequence: Synthetic oligonucleotide
caugcgccgucgagaaguc

SEQ ID NO: 1659309 - RNA, 19 nt, Artificial Sequence
  Description of Artificial Sequence: Synthetic oligonucleotide
agucuaggcgguaguaauu

SEQ ID NO: 1659310 - RNA, 19 nt, Artificial Sequence
  Description of Artificial Sequence: Synthetic oligonucleotide
caugguucugcagggaagu

SEQ ID NO: 1659311 - RNA, 19 nt, Artificial Sequence
  Description of Artificial Sequence: Synthetic oligonucleotide
cacaaaccaucuguaguaa

SEQ ID NO: 1659312 - RNA, 19 nt, Artificial Sequence
  Description of Artificial Sequence: Synthetic oligonucleotide
auaccugcuucugcucgga

SEQ ID NO: 1659313 - RNA, 19 nt, Artificial Sequence
  Description of Artificial Sequence: Synthetic oligonucleotide
ggggucuccguuuauucua

SEQ ID NO: 1659314 - RNA, 19 nt, Artificial Sequence
  Description of Artificial Sequence: Synthetic oligonucleotide
ggcggcugaaaccugacau

SEQ ID NO: 1659315 - RNA, 19 nt, Artificial Sequence
  Description of Artificial Sequence: Synthetic oligonucleotide
gaguacaacuuaagacacu

SEQ ID NO: 1659316 - RNA, 19 nt, Artificial Sequence
  Description of Artificial Sequence: Synthetic oligonucleotide
gcggcugaaaccugacauc

SEQ ID NO: 1659317 - RNA, 19 nt, Artificial Sequence
  Description of Artificial Sequence: Synthetic oligonucleotide
ggauccccaguguggaguc

SEQ ID NO: 1659318 - RNA, 19 nt, Artificial Sequence
  Description of Artificial Sequence: Synthetic oligonucleotide
gacccagcgcaguuucucu

SEQ ID NO: 1659319 - RNA, 19 nt, Artificial Sequence
  Description of Artificial Sequence: Synthetic oligonucleotide
cucucucucucuggcaaca

SEQ ID NO: 1659320 - RNA, 19 nt, Artificial Sequence
  Description of Artificial Sequence: Synthetic oligonucleotide
cccuacaggcaucaugcuc

SEQ ID NO: 1659321 - RNA, 19 nt, Artificial Sequence
  Description of Artificial Sequence: Synthetic oligonucleotide
gguucugcagggaaguccu

SEQ ID NO: 1659322 - RNA, 19 nt, Artificial Sequence
  Description of Artificial Sequence: Synthetic oligonucleotide
augaccgcucccaggucug

SEQ ID NO: 1659323 - RNA, 19 nt, Artificial Sequence
  Description of Artificial Sequence: Synthetic oligonucleotide
cucaugcgccgucgagaag

SEQ ID NO: 1659324 - RNA, 19 nt, Artificial Sequence
  Description of Artificial Sequence: Synthetic oligonucleotide
cauauuaacucgggcaguu

SEQ ID NO: 1659325 - RNA, 19 nt, Artificial Sequence
  Description of Artificial Sequence: Synthetic oligonucleotide
cagaagggaaagguguaua

SEQ ID NO: 1659326 - RNA, 19 nt, Artificial Sequence
  Description of Artificial Sequence: Synthetic oligonucleotide
acccagcgcaguuucucua

SEQ ID NO: 1659327 - RNA, 19 nt, Artificial Sequence
  Description of Artificial Sequence: Synthetic oligonucleotide
gggaaagguguauaaugau

SEQ ID NO: 1659328 - RNA, 19 nt, Artificial Sequence
  Description of Artificial Sequence: Synthetic oligonucleotide
ggacacauucagaugaaau

SEQ ID NO: 1659329 - RNA, 19 nt, Artificial Sequence
  Description of Artificial Sequence: Synthetic oligonucleotide
gggguaggcauuccccauc

SEQ ID NO: 1659330 - RNA, 19 nt, Artificial Sequence
  Description of Artificial Sequence: Synthetic oligonucleotide
guguuuguccagguuacau

SEQ ID NO: 1659331 - RNA, 19 nt, Artificial Sequence
  Description of Artificial Sequence: Synthetic oligonucleotide
cgucgagaagucgaugacc

SEQ ID NO: 1659332 - RNA, 19 nt, Artificial Sequence
  Description of Artificial Sequence: Synthetic oligonucleotide
gucuccguuuauucuacuu

SEQ ID NO: 1659333 - RNA, 19 nt, Artificial Sequence
  Description of Artificial Sequence: Synthetic oligonucleotide
ggagucuaggcgguaguaa

SEQ ID NO: 1659334 - RNA, 19 nt, Artificial Sequence
  Description of Artificial Sequence: Synthetic oligonucleotide
augcgccgucgagaagucg

SEQ ID NO: 1659335 - RNA, 19 nt, Artificial Sequence
  Description of Artificial Sequence: Synthetic oligonucleotide
ggcgguaguaauucaggau

SEQ ID NO: 1659336 - RNA, 19 nt, Artificial Sequence
  Description of Artificial Sequence: Synthetic oligonucleotide
ugaccgcucccaggucugc

SEQ ID NO: 1659337 - RNA, 19 nt, Artificial Sequence
  Description of Artificial Sequence: Synthetic oligonucleotide
cacaagccugccagaguaa

SEQ ID NO: 1659338 - RNA, 19 nt, Artificial Sequence
  Description of Artificial Sequence: Synthetic oligonucleotide
uccuggucuguggccagua

SEQ ID NO: 1659339 - RNA, 19 nt, Artificial Sequence
  Description of Artificial Sequence: Synthetic oligonucleotide
gggucuccguuuauucuac

SEQ ID NO: 1659340 - RNA, 19 nt, Artificial Sequence
  Description of Artificial Sequence: Synthetic oligonucleotide
auggcuguaggggccucau

SEQ ID NO: 1659341 - RNA, 19 nt, Artificial Sequence
  Description of Artificial Sequence: Synthetic oligonucleotide
gcgcaguuucucuaauaaa

SEQ ID NO: 1659342 - RNA, 19 nt, Artificial Sequence
  Description of Artificial Sequence: Synthetic oligonucleotide
gcucagucacugaggacac

SEQ ID NO: 1659343 - RNA, 19 nt, Artificial Sequence
  Description of Artificial Sequence: Synthetic oligonucleotide
ccgucgagaagucgaugac

SEQ ID NO: 1659344 - RNA, 19 nt, Artificial Sequence
  Description of Artificial Sequence: Synthetic oligonucleotide
cugucccaguuauaauggu

SEQ ID NO: 1659345 - RNA, 19 nt, Artificial Sequence
  Description of Artificial Sequence: Synthetic oligonucleotide
cacuagauuaugggucucu

SEQ ID NO: 1659346 - RNA, 19 nt, Artificial Sequence
  Description of Artificial Sequence: Synthetic oligonucleotide
cgggccucgagccucgggc

SEQ ID NO: 1659347 - RNA, 19 nt, Artificial Sequence
  Description of Artificial Sequence: Synthetic oligonucleotide
cacccguuuuacugggcua

SEQ ID NO: 1659348 - RNA, 19 nt, Artificial Sequence
  Description of Artificial Sequence: Synthetic oligonucleotide
cagggcucaacaagugaau

SEQ ID NO: 1659349 - RNA, 19 nt, Artificial Sequence
  Description of Artificial Sequence: Synthetic oligonucleotide
ccucaugcgccgucgagaa

SEQ ID NO: 1659350 - RNA, 19 nt, Artificial Sequence
  Description of Artificial Sequence: Synthetic oligonucleotide
gggcuauucuggucaucca

SEQ ID NO: 1659351 - RNA, 19 nt, Artificial Sequence
  Description of Artificial Sequence: Synthetic oligonucleotide
ggcugaaaccugacaucac

SEQ ID NO: 1659352 - RNA, 19 nt, Artificial Sequence
  Description of Artificial Sequence: Synthetic oligonucleotide
cauaggccugccacuugcu

SEQ ID NO: 1659353 - RNA, 19 nt, Artificial Sequence
  Description of Artificial Sequence: Synthetic oligonucleotide
cuugggcacgccgggccuc

SEQ ID NO: 1659354 - RNA, 19 nt, Artificial Sequence
  Description of Artificial Sequence: Synthetic oligonucleotide
aggacucgagggacugcgu

SEQ ID NO: 1659355 - RNA, 19 nt, Artificial Sequence
  Description of Artificial Sequence: Synthetic oligonucleotide
cauggcuguaggggccuca

SEQ ID NO: 1659356 - RNA, 19 nt, Artificial Sequence
  Description of Artificial Sequence: Synthetic oligonucleotide
ccguuuuacugggcuauuc

SEQ ID NO: 1659357 - RNA, 19 nt, Artificial Sequence
  Description of Artificial Sequence: Synthetic oligonucleotide
cugccagaguaagaaucua

SEQ ID NO: 1659358 - RNA, 19 nt, Artificial Sequence
  Description of Artificial Sequence: Synthetic oligonucleotide
cguggcgaacgaagccacg

SEQ ID NO: 1659359 - RNA, 19 nt, Artificial Sequence
  Description of Artificial Sequence: Synthetic oligonucleotide
cggaaggcguccucuccag

SEQ ID NO: 1659360 - RNA, 19 nt, Artificial Sequence
  Description of Artificial Sequence: Synthetic oligonucleotide
cguuuuacugggcuauucu

SEQ ID NO: 1659361 - RNA, 19 nt, Artificial Sequence
  Description of Artificial Sequence: Synthetic oligonucleotide
gcguggcgaacgaagccac

SEQ ID NO: 1659362 - RNA, 19 nt, Artificial Sequence
  Description of Artificial Sequence: Synthetic oligonucleotide
ugucgccagcguggcgaac

SEQ ID NO: 1659363 - RNA, 19 nt, Artificial Sequence
  Description of Artificial Sequence: Synthetic oligonucleotide
guccauaggccugccacuu

SEQ ID NO: 1659364 - RNA, 19 nt, Artificial Sequence
  Description of Artificial Sequence: Synthetic oligonucleotide
ccggaaggcguccucucca

SEQ ID NO: 1659365 - RNA, 19 nt, Artificial Sequence
  Description of Artificial Sequence: Synthetic oligonucleotide
cugucgccagcguggcgaa

SEQ ID NO: 1659366 - RNA, 19 nt, Artificial Sequence
  Description of Artificial Sequence: Synthetic oligonucleotide
cccagcgcaguuucucuaa

SEQ ID NO: 1659367 - RNA, 19 nt, Artificial Sequence
  Description of Artificial Sequence: Synthetic oligonucleotide
gggcacgccgggccucgag

SEQ ID NO: 1659368 - RNA, 19 nt, Artificial Sequence
  Description of Artificial Sequence: Synthetic oligonucleotide
gcaaggguuuggagugauc

SEQ ID NO: 1659369 - RNA, 19 nt, Artificial Sequence
  Description of Artificial Sequence: Synthetic oligonucleotide
ccguuuauucuacuucuuu

SEQ ID NO: 1659370 - RNA, 19 nt, Artificial Sequence
  Description of Artificial Sequence: Synthetic oligonucleotide
ggauuuagccucacccguu

SEQ ID NO: 1659371 - RNA, 19 nt, Artificial Sequence
  Description of Artificial Sequence: Synthetic oligonucleotide
ccacuagauuaugggucuc

SEQ ID NO: 1659372 - RNA, 19 nt, Artificial Sequence
  Description of Artificial Sequence: Synthetic oligonucleotide
gguagccuucaaguccaua

SEQ ID NO: 1659373 - RNA, 19 nt, Artificial Sequence
  Description of Artificial Sequence: Synthetic oligonucleotide
cagguucugucgccagcgu

SEQ ID NO: 1659374 - RNA, 19 nt, Artificial Sequence
  Description of Artificial Sequence: Synthetic oligonucleotide
gggccucaugcgccgucga

SEQ ID NO: 1659375 - RNA, 19 nt, Artificial Sequence
  Description of Artificial Sequence: Synthetic oligonucleotide
ccgggccucgagccucggg

SEQ ID NO: 1659376 - RNA, 19 nt, Artificial Sequence
  Description of Artificial Sequence: Synthetic oligonucleotide
ggaauggguuugggaugaa

SEQ ID NO: 1659377 - RNA, 19 nt, Artificial Sequence
  Description of Artificial Sequence: Synthetic oligonucleotide
ggccucgagccucgggccu

SEQ ID NO: 1659378 - RNA, 19 nt, Artificial Sequence
  Description of Artificial Sequence: Synthetic oligonucleotide
gcccuacaggcaucaugcu

SEQ ID NO: 1659379 - RNA, 19 nt, Artificial Sequence
  Description of Artificial Sequence: Synthetic oligonucleotide
cgaugaccgcucccagguc

SEQ ID NO: 1659380 - RNA, 19 nt, Artificial Sequence
  Description of Artificial Sequence: Synthetic oligonucleotide
cagcagcgacuugcucuga

SEQ ID NO: 1659381 - RNA, 19 nt, Artificial Sequence
  Description of Artificial Sequence: Synthetic oligonucleotide
cgagggacugcgugauuua

SEQ ID NO: 1659382 - RNA, 19 nt, Artificial Sequence
  Description of Artificial Sequence: Synthetic oligonucleotide
cgccgggccucgagccucg

SEQ ID NO: 1659383 - RNA, 19 nt, Artificial Sequence
  Description of Artificial Sequence: Synthetic oligonucleotide
cucgagggacugcgugauu

SEQ ID NO: 1659384 - RNA, 19 nt, Artificial Sequence
  Description of Artificial Sequence: Synthetic oligonucleotide
cgccgucgagaagucgaug

SEQ ID NO: 1659385 - RNA, 19 nt, Artificial Sequence
  Description of Artificial Sequence: Synthetic oligonucleotide
ccagcgcaguuucucuaau

SEQ ID NO: 1659386 - RNA, 19 nt, Artificial Sequence
  Description of Artificial Sequence: Synthetic oligonucleotide
cguccucuccagguucugu

SEQ ID NO: 1659387 - RNA, 19 nt, Artificial Sequence
  Description of Artificial Sequence: Synthetic oligonucleotide
cccguuuuacugggcuauu

SEQ ID NO: 1659388 - RNA, 19 nt, Artificial Sequence
  Description of Artificial Sequence: Synthetic oligonucleotide
cucgagccucgggccucau

SEQ ID NO: 1659389 - RNA, 19 nt, Artificial Sequence
  Description of Artificial Sequence: Synthetic oligonucleotide
cgccagcguggcgaacgaa

SEQ ID NO: 1659390 - RNA, 19 nt, Artificial Sequence
  Description of Artificial Sequence: Synthetic oligonucleotide
uuuauuaucaccuuaagca

SEQ ID NO: 1659391 - RNA, 19 nt, Artificial Sequence
  Description of Artificial Sequence: Synthetic oligonucleotide
aaugaaaaggcccaguuac

SEQ ID NO: 1659392 - RNA, 19 nt, Artificial Sequence
  Description of Artificial Sequence: Synthetic oligonucleotide
aauuguauaggacaugaac

SEQ ID NO: 1659393 - RNA, 19 nt, Artificial Sequence
  Description of Artificial Sequence: Synthetic oligonucleotide
aaacacgagaacuugauag

SEQ ID NO: 1659394 - RNA, 19 nt, Artificial Sequence
  Description of Artificial Sequence: Synthetic oligonucleotide
auucuuaugguucaguccc

SEQ ID NO: 1659395 - RNA, 19 nt, Artificial Sequence
  Description of Artificial Sequence: Synthetic oligonucleotide
aaaggugguauucuuaugg

SEQ ID NO: 1659396 - RNA, 19 nt, Artificial Sequence
  Description of Artificial Sequence: Synthetic oligonucleotide
aaguauaugaaggauuugc

SEQ ID NO: 1659397 - RNA, 19 nt, Artificial Sequence
  Description of Artificial Sequence: Synthetic oligonucleotide
uguaaacugacucaaauac

SEQ ID NO: 1659398 - RNA, 19 nt, Artificial Sequence
  Description of Artificial Sequence: Synthetic oligonucleotide
ucuagaacaucuuaaaacc

SEQ ID NO: 1659399 - RNA, 19 nt, Artificial Sequence
  Description of Artificial Sequence: Synthetic oligonucleotide
uuaaauugggcaaauagcu

SEQ ID NO: 1659400 - RNA, 19 nt, Artificial Sequence
  Description of Artificial Sequence: Synthetic oligonucleotide
auagcuuaaugacagagac

SEQ ID NO: 1659401 - RNA, 19 nt, Artificial Sequence
  Description of Artificial Sequence: Synthetic oligonucleotide
aauagaaaguagaagcggc

SEQ ID NO: 1659402 - RNA, 19 nt, Artificial Sequence
  Description of Artificial Sequence: Synthetic oligonucleotide
uugaaaauccguuauaaca

SEQ ID NO: 1659403 - RNA, 19 nt, Artificial Sequence
  Description of Artificial Sequence: Synthetic oligonucleotide
ugcaauaucaauaccaaac

SEQ ID NO: 1659404 - RNA, 19 nt, Artificial Sequence
  Description of Artificial Sequence: Synthetic oligonucleotide
aauagcaugccauuuucuc

SEQ ID NO: 1659405 - RNA, 19 nt, Artificial Sequence
  Description of Artificial Sequence: Synthetic oligonucleotide
guaacuacuaaauagcaug

SEQ ID NO: 1659406 - RNA, 19 nt, Artificial Sequence
  Description of Artificial Sequence: Synthetic oligonucleotide
ugaaaauccguuauaacac

SEQ ID NO: 1659407 - RNA, 19 nt, Artificial Sequence
  Description of Artificial Sequence: Synthetic oligonucleotide
uuauagacuauaaaguacu

SEQ ID NO: 1659408 - RNA, 19 nt, Artificial Sequence
  Description of Artificial Sequence: Synthetic oligonucleotide
aaaaccagacuucuaguuc

SEQ ID NO: 1659409 - RNA, 19 nt, Artificial Sequence
  Description of Artificial Sequence: Synthetic oligonucleotide
aucuaauuuuauuaucacc

SEQ ID NO: 1659410 - RNA, 19 nt, Artificial Sequence
  Description of Artificial Sequence: Synthetic oligonucleotide
uguaaguccaauuaagaga

SEQ ID NO: 1659411 - RNA, 19 nt, Artificial Sequence
  Description of Artificial Sequence: Synthetic oligonucleotide
gacuauaaaguacuuacag

SEQ ID NO: 1659412 - RNA, 19 nt, Artificial Sequence
  Description of Artificial Sequence: Synthetic oligonucleotide
uggauguuaacucucaaug

SEQ ID NO: 1659413 - RNA, 19 nt, Artificial Sequence
  Description of Artificial Sequence: Synthetic oligonucleotide
aaaacuguaaguccaauua

SEQ ID NO: 1659414 - RNA, 19 nt, Artificial Sequence
  Description of Artificial Sequence: Synthetic oligonucleotide
agcuuaaugacagagacuc

SEQ ID NO: 1659415 - RNA, 19 nt, Artificial Sequence
  Description of Artificial Sequence: Synthetic oligonucleotide
auuugugagaauuguauag

SEQ ID NO: 1659416 - RNA, 19 nt, Artificial Sequence
  Description of Artificial Sequence: Synthetic oligonucleotide
aacaaaaguauaugaagga

SEQ ID NO: 1659417 - RNA, 19 nt, Artificial Sequence
  Description of Artificial Sequence: Synthetic oligonucleotide
uuuagauuacagaacucag

SEQ ID NO: 1659418 - RNA, 19 nt, Artificial Sequence
  Description of Artificial Sequence: Synthetic oligonucleotide
guugaugccuaacaaaagg

SEQ ID NO: 1659419 - RNA, 19 nt, Artificial Sequence
  Description of Artificial Sequence: Synthetic oligonucleotide
ucaccuuaagcaaaacacg

SEQ ID NO: 1659420 - RNA, 19 nt, Artificial Sequence
  Description of Artificial Sequence: Synthetic oligonucleotide
aaaaggcccaguuaccuag

SEQ ID NO: 1659421 - RNA, 19 nt, Artificial Sequence
  Description of Artificial Sequence: Synthetic oligonucleotide
ucuaguaaagggaaguaac

SEQ ID NO: 1659422 - RNA, 19 nt, Artificial Sequence
  Description of Artificial Sequence: Synthetic oligonucleotide
auagcaugccauuuucucc

SEQ ID NO: 1659423 - RNA, 19 nt, Artificial Sequence
  Description of Artificial Sequence: Synthetic oligonucleotide
gaaguaacuacuaaauagc

SEQ ID NO: 1659424 - RNA, 19 nt, Artificial Sequence
  Description of Artificial Sequence: Synthetic oligonucleotide
uuuuagauuacagaacuca

SEQ ID NO: 1659425 - RNA, 19 nt, Artificial Sequence
  Description of Artificial Sequence: Synthetic oligonucleotide
gauagaaugcacaagauaa

SEQ ID NO: 1659426 - RNA, 19 nt, Artificial Sequence
  Description of Artificial Sequence: Synthetic oligonucleotide
auuauagacuauaaaguac

SEQ ID NO: 1659427 - RNA, 19 nt, Artificial Sequence
  Description of Artificial Sequence: Synthetic oligonucleotide
uuuacuuacucugaaauuc

SEQ ID NO: 1659428 - RNA, 19 nt, Artificial Sequence
  Description of Artificial Sequence: Synthetic oligonucleotide
auaacugucauacuuacua

SEQ ID NO: 1659429 - RNA, 19 nt, Artificial Sequence
  Description of Artificial Sequence: Synthetic oligonucleotide
acaagauaauaauauuuag

SEQ ID NO: 1659430 - RNA, 19 nt, Artificial Sequence
  Description of Artificial Sequence: Synthetic oligonucleotide
cucaaauacacuuuaagga

SEQ ID NO: 1659431 - RNA, 19 nt, Artificial Sequence
  Description of Artificial Sequence: Synthetic oligonucleotide
ccuaacaaaaggaaaaugg

SEQ ID NO: 1659432 - RNA, 19 nt, Artificial Sequence
  Description of Artificial Sequence: Synthetic oligonucleotide
ugggcaaauagcuuaauga

SEQ ID NO: 1659433 - RNA, 19 nt, Artificial Sequence
  Description of Artificial Sequence: Synthetic oligonucleotide
aaaguacuuacaguguagg

SEQ ID NO: 1659434 - RNA, 19 nt, Artificial Sequence
  Description of Artificial Sequence: Synthetic oligonucleotide
agaauuaucuuugugguug

SEQ ID NO: 1659435 - RNA, 19 nt, Artificial Sequence
  Description of Artificial Sequence: Synthetic oligonucleotide
auacuuacuaccaagaccu

SEQ ID NO: 1659436 - RNA, 19 nt, Artificial Sequence
  Description of Artificial Sequence: Synthetic oligonucleotide
cauacuuacuaccaagacc

SEQ ID NO: 1659437 - RNA, 19 nt, Artificial Sequence
  Description of Artificial Sequence: Synthetic oligonucleotide
ugugaauuccuaaaacugu

SEQ ID NO: 1659438 - RNA, 19 nt, Artificial Sequence
  Description of Artificial Sequence: Synthetic oligonucleotide
uguuaacuggaccucaucu

SEQ ID NO: 1659439 - RNA, 19 nt, Artificial Sequence
  Description of Artificial Sequence: Synthetic oligonucleotide
uuacaguguaggaugaggc

SEQ ID NO: 1659440 - RNA, 19 nt, Artificial Sequence
  Description of Artificial Sequence: Synthetic oligonucleotide
ucaguauuuggucaguuuc

SEQ ID NO: 1659441 - RNA, 19 nt, Artificial Sequence
  Description of Artificial Sequence: Synthetic oligonucleotide
cuaauuaauaaauugugaa

SEQ ID NO: 1659442 - RNA, 19 nt, Artificial Sequence
  Description of Artificial Sequence: Synthetic oligonucleotide
uuugcaucaaggaucaaau

SEQ ID NO: 1659443 - RNA, 19 nt, Artificial Sequence
  Description of Artificial Sequence: Synthetic oligonucleotide
uacaccaagucaaaauaag

SEQ ID NO: 1659444 - RNA, 19 nt, Artificial Sequence
  Description of Artificial Sequence: Synthetic oligonucleotide
uauaaaguacuuacagugu

SEQ ID NO: 1659445 - RNA, 19 nt, Artificial Sequence
  Description of Artificial Sequence: Synthetic oligonucleotide
uaaaguacuuacaguguag

SEQ ID NO: 1659446 - RNA, 19 nt, Artificial Sequence
  Description of Artificial Sequence: Synthetic oligonucleotide
ugaaauuccagaagagcca

SEQ ID NO: 1659447 - RNA, 19 nt, Artificial Sequence
  Description of Artificial Sequence: Synthetic oligonucleotide
aaauugugaauuccuaaaa

SEQ ID NO: 1659448 - RNA, 19 nt, Artificial Sequence
  Description of Artificial Sequence: Synthetic oligonucleotide
caccaagucaaaauaagag

SEQ ID NO: 1659449 - RNA, 19 nt, Artificial Sequence
  Description of Artificial Sequence: Synthetic oligonucleotide
ucuaguagccagaagggcu

SEQ ID NO: 1659450 - RNA, 19 nt, Artificial Sequence
  Description of Artificial Sequence: Synthetic oligonucleotide
gaguuggucauuucaaacc

SEQ ID NO: 1659451 - RNA, 19 nt, Artificial Sequence
  Description of Artificial Sequence: Synthetic oligonucleotide
uauucuuaugguucagucc

SEQ ID NO: 1659452 - RNA, 19 nt, Artificial Sequence
  Description of Artificial Sequence: Synthetic oligonucleotide
aacuacuaaauagcaugcc

SEQ ID NO: 1659453 - RNA, 19 nt, Artificial Sequence
  Description of Artificial Sequence: Synthetic oligonucleotide
auaauaauauuuagaggac

SEQ ID NO: 1659454 - RNA, 19 nt, Artificial Sequence
  Description of Artificial Sequence: Synthetic oligonucleotide
uguggcauugucuuucucc

SEQ ID NO: 1659455 - RNA, 19 nt, Artificial Sequence
  Description of Artificial Sequence: Synthetic oligonucleotide
gaggcgugaaacaagaaag

SEQ ID NO: 1659456 - RNA, 19 nt, Artificial Sequence
  Description of Artificial Sequence: Synthetic oligonucleotide
acgagaacuugauagaaug

SEQ ID NO: 1659457 - RNA, 19 nt, Artificial Sequence
  Description of Artificial Sequence: Synthetic oligonucleotide
uugaggaucuaguagccag

SEQ ID NO: 1659458 - RNA, 19 nt, Artificial Sequence
  Description of Artificial Sequence: Synthetic oligonucleotide
uuauuaucaccuuaagcaa

SEQ ID NO: 1659459 - RNA, 19 nt, Artificial Sequence
  Description of Artificial Sequence: Synthetic oligonucleotide
uuacuuacucugaaauucc

SEQ ID NO: 1659460 - RNA, 19 nt, Artificial Sequence
  Description of Artificial Sequence: Synthetic oligonucleotide
auuguauaggacaugaacu

SEQ ID NO: 1659461 - RNA, 19 nt, Artificial Sequence
  Description of Artificial Sequence: Synthetic oligonucleotide
ugaaacaagaaagcaagga

SEQ ID NO: 1659462 - RNA, 19 nt, Artificial Sequence
  Description of Artificial Sequence: Synthetic oligonucleotide
acuauaaaguacuuacagu

SEQ ID NO: 1659463 - RNA, 19 nt, Artificial Sequence
  Description of Artificial Sequence: Synthetic oligonucleotide
uucacuucuuaaauugggc

SEQ ID NO: 1659464 - RNA, 19 nt, Artificial Sequence
  Description of Artificial Sequence: Synthetic oligonucleotide
guacuuacaguguaggaug

SEQ ID NO: 1659465 - RNA, 19 nt, Artificial Sequence
  Description of Artificial Sequence: Synthetic oligonucleotide
cuuacuaccaagaccucag

SEQ ID NO: 1659466 - RNA, 19 nt, Artificial Sequence
  Description of Artificial Sequence: Synthetic oligonucleotide
ucuguaaacugacucaaau

SEQ ID NO: 1659467 - RNA, 19 nt, Artificial Sequence
  Description of Artificial Sequence: Synthetic oligonucleotide
uugaugccuaacaaaagga

SEQ ID NO: 1659468 - RNA, 19 nt, Artificial Sequence
  Description of Artificial Sequence: Synthetic oligonucleotide
ugaauaacugucauacuua

SEQ ID NO: 1659469 - RNA, 19 nt, Artificial Sequence
  Description of Artificial Sequence: Synthetic oligonucleotide
auacacuuuaaggaguugg

SEQ ID NO: 1659470 - RNA, 19 nt, Artificial Sequence
  Description of Artificial Sequence: Synthetic oligonucleotide
aaguccaauuaagagaaug

SEQ ID NO: 1659471 - RNA, 19 nt, Artificial Sequence
  Description of Artificial Sequence: Synthetic oligonucleotide
ugagaauuguauaggacau

SEQ ID NO: 1659472 - RNA, 19 nt, Artificial Sequence
  Description of Artificial Sequence: Synthetic oligonucleotide
uuaagagaaugauacaguu

SEQ ID NO: 1659473 - RNA, 19 nt, Artificial Sequence
  Description of Artificial Sequence: Synthetic oligonucleotide
acauguaggaacauuaaug

SEQ ID NO: 1659474 - RNA, 19 nt, Artificial Sequence
  Description of Artificial Sequence: Synthetic oligonucleotide
aagggaaguaacuacuaaa

SEQ ID NO: 1659475 - RNA, 19 nt, Artificial Sequence
  Description of Artificial Sequence: Synthetic oligonucleotide
uaucaccuuaagcaaaaca

SEQ ID NO: 1659476 - RNA, 19 nt, Artificial Sequence
  Description of Artificial Sequence: Synthetic oligonucleotide
agagugaacuaauuaauaa

SEQ ID NO: 1659477 - RNA, 19 nt, Artificial Sequence
  Description of Artificial Sequence: Synthetic oligonucleotide
ucaaguuuacuuacucuga

SEQ ID NO: 1659478 - RNA, 19 nt, Artificial Sequence
  Description of Artificial Sequence: Synthetic oligonucleotide
gagaagguugaugaaaacc

SEQ ID NO: 1659479 - RNA, 19 nt, Artificial Sequence
  Description of Artificial Sequence: Synthetic oligonucleotide
aacacgagaacuugauaga

SEQ ID NO: 1659480 - RNA, 19 nt, Artificial Sequence
  Description of Artificial Sequence: Synthetic oligonucleotide
uuaagcuuauuuauaucuc

SEQ ID NO: 1659481 - RNA, 19 nt, Artificial Sequence
  Description of Artificial Sequence: Synthetic oligonucleotide
uguaggaugaggcaauuuu

SEQ ID NO: 1659482 - RNA, 19 nt, Artificial Sequence
  Description of Artificial Sequence: Synthetic oligonucleotide
uuucuccuaggguugaugc

SEQ ID NO: 1659483 - RNA, 19 nt, Artificial Sequence
  Description of Artificial Sequence: Synthetic oligonucleotide
ucuaaucauucucucaaaa

SEQ ID NO: 1659484 - RNA, 19 nt, Artificial Sequence
  Description of Artificial Sequence: Synthetic oligonucleotide
auaaauugugaauuccuaa

SEQ ID NO: 1659485 - RNA, 19 nt, Artificial Sequence
  Description of Artificial Sequence: Synthetic oligonucleotide
aaacuguaaguccaauuaa

SEQ ID NO: 1659486 - RNA, 19 nt, Artificial Sequence
  Description of Artificial Sequence: Synthetic oligonucleotide
gaucuaguagccagaaggg

SEQ ID NO: 1659487 - RNA, 19 nt, Artificial Sequence
  Description of Artificial Sequence: Synthetic oligonucleotide
agauuacagaacucaguuc

SEQ ID NO: 1659488 - RNA, 19 nt, Artificial Sequence
  Description of Artificial Sequence: Synthetic oligonucleotide
ugugagaauuguauaggac

SEQ ID NO: 1659489 - RNA, 19 nt, Artificial Sequence
  Description of Artificial Sequence: Synthetic oligonucleotide
cuugagauaaacugggaga

SEQ ID NO: 1659490 - RNA, 19 nt, Artificial Sequence
  Description of Artificial Sequence: Synthetic oligonucleotide
uugagauaaacugggagac

SEQ ID NO: 1659491 - RNA, 19 nt, Artificial Sequence
  Description of Artificial Sequence: Synthetic oligonucleotide
aagguagaaauuauagacu

SEQ ID NO: 1659492 - RNA, 19 nt, Artificial Sequence
  Description of Artificial Sequence: Synthetic oligonucleotide
aguuggucauuucaaacca

SEQ ID NO: 1659493 - RNA, 19 nt, Artificial Sequence
  Description of Artificial Sequence: Synthetic oligonucleotide
gcuaagacaaccuucucag

SEQ ID NO: 1659494 - RNA, 19 nt, Artificial Sequence
  Description of Artificial Sequence: Synthetic oligonucleotide
uuaacucucaauguggcau

SEQ ID NO: 1659495 - RNA, 19 nt, Artificial Sequence
  Description of Artificial Sequence: Synthetic oligonucleotide
ucauacuuacuaccaagac

SEQ ID NO: 1659496 - RNA, 19 nt, Artificial Sequence
  Description of Artificial Sequence: Synthetic oligonucleotide
gaaucaaguuuacuuacuc

SEQ ID NO: 1659497 - RNA, 19 nt, Artificial Sequence
  Description of Artificial Sequence: Synthetic oligonucleotide
agguagaaauuauagacua

SEQ ID NO: 1659498 - RNA, 19 nt, Artificial Sequence
  Description of Artificial Sequence: Synthetic oligonucleotide
agugaacuaauuaauaaau

SEQ ID NO: 1659499 - RNA, 19 nt, Artificial Sequence
  Description of Artificial Sequence: Synthetic oligonucleotide
aguucaacuugcaauauca

SEQ ID NO: 1659500 - RNA, 19 nt, Artificial Sequence
  Description of Artificial Sequence: Synthetic oligonucleotide
auaaaguacuuacagugua

SEQ ID NO: 1659501 - RNA, 19 nt, Artificial Sequence
  Description of Artificial Sequence: Synthetic oligonucleotide
aauagcuuaaugacagaga

SEQ ID NO: 1659502 - RNA, 19 nt, Artificial Sequence
  Description of Artificial Sequence: Synthetic oligonucleotide
ugaugccuaacaaaaggaa

SEQ ID NO: 1659503 - RNA, 19 nt, Artificial Sequence
  Description of Artificial Sequence: Synthetic oligonucleotide
uuggcauauaucucuagaa

SEQ ID NO: 1659504 - RNA, 19 nt, Artificial Sequence
  Description of Artificial Sequence: Synthetic oligonucleotide
aaucaucuaguaaagggaa

SEQ ID NO: 1659505 - RNA, 19 nt, Artificial Sequence
  Description of Artificial Sequence: Synthetic oligonucleotide
guaaguccaauuaagagaa

SEQ ID NO: 1659506 - RNA, 19 nt, Artificial Sequence
  Description of Artificial Sequence: Synthetic oligonucleotide
aggaucaaaucucugaaua

SEQ ID NO: 1659507 - RNA, 19 nt, Artificial Sequence
  Description of Artificial Sequence: Synthetic oligonucleotide
gagugaacuaauuaauaaa

SEQ ID NO: 1659508 - RNA, 19 nt, Artificial Sequence
  Description of Artificial Sequence: Synthetic oligonucleotide
uugggcaaauagcuuaaug

SEQ ID NO: 1659509 - RNA, 19 nt, Artificial Sequence
  Description of Artificial Sequence: Synthetic oligonucleotide
ucaucuaguaaagggaagu

SEQ ID NO: 1659510 - RNA, 19 nt, Artificial Sequence
  Description of Artificial Sequence: Synthetic oligonucleotide
aauuaucuuugugguuggc

SEQ ID NO: 1659511 - RNA, 19 nt, Artificial Sequence
  Description of Artificial Sequence: Synthetic oligonucleotide
augaaaaccuaguuuugca

SEQ ID NO: 1659512 - RNA, 19 nt, Artificial Sequence
  Description of Artificial Sequence: Synthetic oligonucleotide
ucagaacuucuaaucauuc

SEQ ID NO: 1659513 - RNA, 19 nt, Artificial Sequence
  Description of Artificial Sequence: Synthetic oligonucleotide
cuuacaguguaggaugagg

SEQ ID NO: 1659514 - RNA, 19 nt, Artificial Sequence
  Description of Artificial Sequence: Synthetic oligonucleotide
aagacaaccuucucagaau

SEQ ID NO: 1659515 - RNA, 19 nt, Artificial Sequence
  Description of Artificial Sequence: Synthetic oligonucleotide
ugaaggauuugcugugaag

SEQ ID NO: 1659516 - RNA, 19 nt, Artificial Sequence
  Description of Artificial Sequence: Synthetic oligonucleotide
acuaggaauagaaaguaga

SEQ ID NO: 1659517 - RNA, 19 nt, Artificial Sequence
  Description of Artificial Sequence: Synthetic oligonucleotide
aauaaauugugaauuccua

SEQ ID NO: 1659518 - RNA, 19 nt, Artificial Sequence
  Description of Artificial Sequence: Synthetic oligonucleotide
aaggugguauucuuauggu

SEQ ID NO: 1659519 - RNA, 19 nt, Artificial Sequence
  Description of Artificial Sequence: Synthetic oligonucleotide
uauuugugagaauuguaua

SEQ ID NO: 1659520 - RNA, 19 nt, Artificial Sequence
  Description of Artificial Sequence: Synthetic oligonucleotide
aaguagaagcggcuuucag

SEQ ID NO: 1659521 - RNA, 19 nt, Artificial Sequence
  Description of Artificial Sequence: Synthetic oligonucleotide
guauguuguuaacuggacc

SEQ ID NO: 1659522 - RNA, 19 nt, Artificial Sequence
  Description of Artificial Sequence: Synthetic oligonucleotide
gauacaguucacuucuuaa

SEQ ID NO: 1659523 - RNA, 19 nt, Artificial Sequence
  Description of Artificial Sequence: Synthetic oligonucleotide
cuuacucugaaauuccaga

SEQ ID NO: 1659524 - RNA, 19 nt, Artificial Sequence
  Description of Artificial Sequence: Synthetic oligonucleotide
augccauuuucuccuaggg

SEQ ID NO: 1659525 - RNA, 19 nt, Artificial Sequence
  Description of Artificial Sequence: Synthetic oligonucleotide
aucuaguagccagaagggc

SEQ ID NO: 1659526 - RNA, 19 nt, Artificial Sequence
  Description of Artificial Sequence: Synthetic oligonucleotide
cacuuuaaggaguugguca

SEQ ID NO: 1659527 - RNA, 19 nt, Artificial Sequence
  Description of Artificial Sequence: Synthetic oligonucleotide
uguauaggacaugaacuca

SEQ ID NO: 1659528 - RNA, 19 nt, Artificial Sequence
  Description of Artificial Sequence: Synthetic oligonucleotide
acuuuaaggaguuggucau

SEQ ID NO: 1659529 - RNA, 19 nt, Artificial Sequence
  Description of Artificial Sequence: Synthetic oligonucleotide
guauucuuaugguucaguc

SEQ ID NO: 1659530 - RNA, 19 nt, Artificial Sequence
  Description of Artificial Sequence: Synthetic oligonucleotide
agaggcgugaaacaagaaa

SEQ ID NO: 1659531 - RNA, 19 nt, Artificial Sequence
  Description of Artificial Sequence: Synthetic oligonucleotide
ugaaaaggcccaguuaccu

SEQ ID NO: 1659532 - RNA, 19 nt, Artificial Sequence
  Description of Artificial Sequence: Synthetic oligonucleotide
aguuucaagguagaaauua

SEQ ID NO: 1659533 - RNA, 19 nt, Artificial Sequence
  Description of Artificial Sequence: Synthetic oligonucleotide
aaaacacgagaacuugaua

SEQ ID NO: 1659534 - RNA, 19 nt, Artificial Sequence
  Description of Artificial Sequence: Synthetic oligonucleotide
agaaugaaaaggcccaguu

SEQ ID NO: 1659535 - RNA, 19 nt, Artificial Sequence
  Description of Artificial Sequence: Synthetic oligonucleotide
uaaauugggcaaauagcuu

SEQ ID NO: 1659536 - RNA, 19 nt, Artificial Sequence
  Description of Artificial Sequence: Synthetic oligonucleotide
aggaaauacaggaagguau

SEQ ID NO: 1659537 - RNA, 19 nt, Artificial Sequence
  Description of Artificial Sequence: Synthetic oligonucleotide
auacucacacuguggcuac

SEQ ID NO: 1659538 - RNA, 19 nt, Artificial Sequence
  Description of Artificial Sequence: Synthetic oligonucleotide
cuucuaaucauucucucaa

SEQ ID NO: 1659539 - RNA, 19 nt, Artificial Sequence
  Description of Artificial Sequence: Synthetic oligonucleotide
gaaacuuuaaugagaaggu

SEQ ID NO: 1659540 - RNA, 19 nt, Artificial Sequence
  Description of Artificial Sequence: Synthetic oligonucleotide
aaaguauaugaaggauuug

SEQ ID NO: 1659541 - RNA, 19 nt, Artificial Sequence
  Description of Artificial Sequence: Synthetic oligonucleotide
cuuaagcaaaacacgagaa

SEQ ID NO: 1659542 - RNA, 19 nt, Artificial Sequence
  Description of Artificial Sequence: Synthetic oligonucleotide
aguuaccuagaaaugaagu

SEQ ID NO: 1659543 - RNA, 19 nt, Artificial Sequence
  Description of Artificial Sequence: Synthetic oligonucleotide
aagaauuaucuuugugguu

SEQ ID NO: 1659544 - RNA, 19 nt, Artificial Sequence
  Description of Artificial Sequence: Synthetic oligonucleotide
cuuggggagaugacguggg

SEQ ID NO: 1659545 - RNA, 19 nt, Artificial Sequence
  Description of Artificial Sequence: Synthetic oligonucleotide
auuaccaguagaguuucug

SEQ ID NO: 1659546 - RNA, 19 nt, Artificial Sequence
  Description of Artificial Sequence: Synthetic oligonucleotide
cucaucugggguuuucccc

SEQ ID NO: 1659547 - RNA, 19 nt, Artificial Sequence
  Description of Artificial Sequence: Synthetic oligonucleotide
uacuuacucugaaauucca

SEQ ID NO: 1659548 - RNA, 19 nt, Artificial Sequence
  Description of Artificial Sequence: Synthetic oligonucleotide
gcuacugggaaauuaccag

SEQ ID NO: 1659549 - RNA, 19 nt, Artificial Sequence
  Description of Artificial Sequence: Synthetic oligonucleotide
aaucucugaauaacuguca

SEQ ID NO: 1659550 - RNA, 19 nt, Artificial Sequence
  Description of Artificial Sequence: Synthetic oligonucleotide
uacuuacaguguaggauga

SEQ ID NO: 1659551 - RNA, 19 nt, Artificial Sequence
  Description of Artificial Sequence: Synthetic oligonucleotide
auuuagaggacuaggaaua

SEQ ID NO: 1659552 - RNA, 19 nt, Artificial Sequence
  Description of Artificial Sequence: Synthetic oligonucleotide
gacaugaacucaguauuug

SEQ ID NO: 1659553 - RNA, 19 nt, Artificial Sequence
  Description of Artificial Sequence: Synthetic oligonucleotide
gacuucuaguucaacuugc

SEQ ID NO: 1659554 - RNA, 19 nt, Artificial Sequence
  Description of Artificial Sequence: Synthetic oligonucleotide
ugcacaagauaauaauauu

SEQ ID NO: 1659555 - RNA, 19 nt, Artificial Sequence
  Description of Artificial Sequence: Synthetic oligonucleotide
ugaugcaaucuaauuuuau

SEQ ID NO: 1659556 - RNA, 19 nt, Artificial Sequence
  Description of Artificial Sequence: Synthetic oligonucleotide
uauaucucuagaacaucuu

SEQ ID NO: 1659557 - RNA, 19 nt, Artificial Sequence
  Description of Artificial Sequence: Synthetic oligonucleotide
ccagaaaucaucuaguaaa

SEQ ID NO: 1659558 - RNA, 19 nt, Artificial Sequence
  Description of Artificial Sequence: Synthetic oligonucleotide
aggcgugaaacaagaaagc

SEQ ID NO: 1659559 - RNA, 19 nt, Artificial Sequence
  Description of Artificial Sequence: Synthetic oligonucleotide
aguuuugcaucaaggauca

SEQ ID NO: 1659560 - RNA, 19 nt, Artificial Sequence
  Description of Artificial Sequence: Synthetic oligonucleotide
gacuaggaauagaaaguag

SEQ ID NO: 1659561 - RNA, 19 nt, Artificial Sequence
  Description of Artificial Sequence: Synthetic oligonucleotide
uacugggaaauuaccagua

SEQ ID NO: 1659562 - RNA, 19 nt, Artificial Sequence
  Description of Artificial Sequence: Synthetic oligonucleotide
caguuaccuagaaaugaag

SEQ ID NO: 1659563 - RNA, 19 nt, Artificial Sequence
  Description of Artificial Sequence: Synthetic oligonucleotide
gacaucuacccuuuauuaa

SEQ ID NO: 1659564 - RNA, 19 nt, Artificial Sequence
  Description of Artificial Sequence: Synthetic oligonucleotide
acacuuuaaggaguugguc

SEQ ID NO: 1659565 - RNA, 19 nt, Artificial Sequence
  Description of Artificial Sequence: Synthetic oligonucleotide
uauagacuauaaaguacuu

SEQ ID NO: 1659566 - RNA, 19 nt, Artificial Sequence
  Description of Artificial Sequence: Synthetic oligonucleotide
uguuguuaacuggaccuca

SEQ ID NO: 1659567 - RNA, 19 nt, Artificial Sequence
  Description of Artificial Sequence: Synthetic oligonucleotide
caccuuaagcaaaacacga

SEQ ID NO: 1659568 - RNA, 19 nt, Artificial Sequence
  Description of Artificial Sequence: Synthetic oligonucleotide
acuguaaguccaauuaaga

SEQ ID NO: 1659569 - RNA, 19 nt, Artificial Sequence
  Description of Artificial Sequence: Synthetic oligonucleotide
uacuaaauagcaugccauu

SEQ ID NO: 1659570 - RNA, 19 nt, Artificial Sequence
  Description of Artificial Sequence: Synthetic oligonucleotide
ucugaauaacugucauacu

SEQ ID NO: 1659571 - RNA, 19 nt, Artificial Sequence
  Description of Artificial Sequence: Synthetic oligonucleotide
uaguucaacuugcaauauc

SEQ ID NO: 1659572 - RNA, 19 nt, Artificial Sequence
  Description of Artificial Sequence: Synthetic oligonucleotide
aaaauccguuauaacacaa

SEQ ID NO: 1659573 - RNA, 19 nt, Artificial Sequence
  Description of Artificial Sequence: Synthetic oligonucleotide
auaaacugggagacaggac

SEQ ID NO: 1659574 - RNA, 19 nt, Artificial Sequence
  Description of Artificial Sequence: Synthetic oligonucleotide
gaugccuaacaaaaggaaa

SEQ ID NO: 1659575 - RNA, 19 nt, Artificial Sequence
  Description of Artificial Sequence: Synthetic oligonucleotide
acugucauacuuacuacca

SEQ ID NO: 1659576 - RNA, 19 nt, Artificial Sequence
  Description of Artificial Sequence: Synthetic oligonucleotide
uuguugaaaauccguuaua

SEQ ID NO: 1659577 - RNA, 19 nt, Artificial Sequence
  Description of Artificial Sequence: Synthetic oligonucleotide
aauaacugucauacuuacu

SEQ ID NO: 1659578 - RNA, 19 nt, Artificial Sequence
  Description of Artificial Sequence: Synthetic oligonucleotide
ugagaagguugaugaaaac

SEQ ID NO: 1659579 - RNA, 19 nt, Artificial Sequence
  Description of Artificial Sequence: Synthetic oligonucleotide
uucuccuaggguugaugcc

SEQ ID NO: 1659580 - RNA, 19 nt, Artificial Sequence
  Description of Artificial Sequence: Synthetic oligonucleotide
aggacaucuacccuuuauu

SEQ ID NO: 1659581 - RNA, 19 nt, Artificial Sequence
  Description of Artificial Sequence: Synthetic oligonucleotide
gaaugaaaaggcccaguua

SEQ ID NO: 1659582 - RNA, 19 nt, Artificial Sequence
  Description of Artificial Sequence: Synthetic oligonucleotide
uugcaauaucaauaccaaa

SEQ ID NO: 1659583 - RNA, 19 nt, Artificial Sequence
  Description of Artificial Sequence: Synthetic oligonucleotide
agacaggacaucuacccuu

SEQ ID NO: 1659584 - RNA, 19 nt, Artificial Sequence
  Description of Artificial Sequence: Synthetic oligonucleotide
cacagaggcgugaaacaag

SEQ ID NO: 1659585 - RNA, 19 nt, Artificial Sequence
  Description of Artificial Sequence: Synthetic oligonucleotide
auuucagacuaaagaauga

SEQ ID NO: 1659586 - RNA, 19 nt, Artificial Sequence
  Description of Artificial Sequence: Synthetic oligonucleotide
cagaagggcuaagacaacc

SEQ ID NO: 1659587 - RNA, 19 nt, Artificial Sequence
  Description of Artificial Sequence: Synthetic oligonucleotide
agggaaguaacuacuaaau

SEQ ID NO: 1659588 - RNA, 19 nt, Artificial Sequence
  Description of Artificial Sequence: Synthetic oligonucleotide
uucuaaucauucucucaaa

SEQ ID NO: 1659589 - RNA, 19 nt, Artificial Sequence
  Description of Artificial Sequence: Synthetic oligonucleotide
auguuguuaacuggaccuc

SEQ ID NO: 1659590 - RNA, 19 nt, Artificial Sequence
  Description of Artificial Sequence: Synthetic oligonucleotide
uccccuuggggagaugacg

SEQ ID NO: 1659591 - RNA, 19 nt, Artificial Sequence
  Description of Artificial Sequence: Synthetic oligonucleotide
augccuaacaaaaggaaaa

SEQ ID NO: 1659592 - RNA, 19 nt, Artificial Sequence
  Description of Artificial Sequence: Synthetic oligonucleotide
agaacaucuuaaaaccaga

SEQ ID NO: 1659593 - RNA, 19 nt, Artificial Sequence
  Description of Artificial Sequence: Synthetic oligonucleotide
aaauccguuauaacacaaa

SEQ ID NO: 1659594 - RNA, 19 nt, Artificial Sequence
  Description of Artificial Sequence: Synthetic oligonucleotide
cguuauaacacaaaaguaa

SEQ ID NO: 1659595 - RNA, 19 nt, Artificial Sequence
  Description of Artificial Sequence: Synthetic oligonucleotide
ggugguauucuuaugguuc

SEQ ID NO: 1659596 - RNA, 19 nt, Artificial Sequence
  Description of Artificial Sequence: Synthetic oligonucleotide
auagaaaguagaagcggcu

SEQ ID NO: 1659597 - RNA, 19 nt, Artificial Sequence
  Description of Artificial Sequence: Synthetic oligonucleotide
ccuugagauaaacugggag

SEQ ID NO: 1659598 - RNA, 19 nt, Artificial Sequence
  Description of Artificial Sequence: Synthetic oligonucleotide
agguauguuguuaacugga

SEQ ID NO: 1659599 - RNA, 19 nt, Artificial Sequence
  Description of Artificial Sequence: Synthetic oligonucleotide
aguaacuacuaaauagcau

SEQ ID NO: 1659600 - RNA, 19 nt, Artificial Sequence
  Description of Artificial Sequence: Synthetic oligonucleotide
acuaaauagcaugccauuu

SEQ ID NO: 1659601 - RNA, 19 nt, Artificial Sequence
  Description of Artificial Sequence: Synthetic oligonucleotide
gagaauuguauaggacaug

SEQ ID NO: 1659602 - RNA, 19 nt, Artificial Sequence
  Description of Artificial Sequence: Synthetic oligonucleotide
acaccaagucaaaauaaga

SEQ ID NO: 1659603 - RNA, 19 nt, Artificial Sequence
  Description of Artificial Sequence: Synthetic oligonucleotide
accuuaagcaaaacacgag

SEQ ID NO: 1659604 - RNA, 19 nt, Artificial Sequence
  Description of Artificial Sequence: Synthetic oligonucleotide
acaguguaggaugaggcaa

SEQ ID NO: 1659605 - RNA, 19 nt, Artificial Sequence
  Description of Artificial Sequence: Synthetic oligonucleotide
agagaaugauacaguucac

SEQ ID NO: 1659606 - RNA, 19 nt, Artificial Sequence
  Description of Artificial Sequence: Synthetic oligonucleotide
auagacuauaaaguacuua

SEQ ID NO: 1659607 - RNA, 19 nt, Artificial Sequence
  Description of Artificial Sequence: Synthetic oligonucleotide
uucuuaugguucaguccca

SEQ ID NO: 1659608 - RNA, 19 nt, Artificial Sequence
  Description of Artificial Sequence: Synthetic oligonucleotide
cacuucuuaaauugggcaa

SEQ ID NO: 1659609 - RNA, 19 nt, Artificial Sequence
  Description of Artificial Sequence: Synthetic oligonucleotide
ugagauaaacugggagaca

SEQ ID NO: 1659610 - RNA, 19 nt, Artificial Sequence
  Description of Artificial Sequence: Synthetic oligonucleotide
guauuugugagaauuguau

SEQ ID NO: 1659611 - RNA, 19 nt, Artificial Sequence
  Description of Artificial Sequence: Synthetic oligonucleotide
agauaaacugggagacagg

SEQ ID NO: 1659612 - RNA, 19 nt, Artificial Sequence
  Description of Artificial Sequence: Synthetic oligonucleotide
gucauacuuacuaccaaga

SEQ ID NO: 1659613 - RNA, 19 nt, Artificial Sequence
  Description of Artificial Sequence: Synthetic oligonucleotide
agggcuaagacaaccuucu

SEQ ID NO: 1659614 - RNA, 19 nt, Artificial Sequence
  Description of Artificial Sequence: Synthetic oligonucleotide
aucaucuaguaaagggaag

SEQ ID NO: 1659615 - RNA, 19 nt, Artificial Sequence
  Description of Artificial Sequence: Synthetic oligonucleotide
auacacaaagcuacuggga

SEQ ID NO: 1659616 - RNA, 19 nt, Artificial Sequence
  Description of Artificial Sequence: Synthetic oligonucleotide
uuucuccaauacugaaggu

SEQ ID NO: 1659617 - RNA, 19 nt, Artificial Sequence
  Description of Artificial Sequence: Synthetic oligonucleotide
cugaauaacugucauacuu

SEQ ID NO: 1659618 - RNA, 19 nt, Artificial Sequence
  Description of Artificial Sequence: Synthetic oligonucleotide
uaccaagaccucagaguga

SEQ ID NO: 1659619 - RNA, 19 nt, Artificial Sequence
  Description of Artificial Sequence: Synthetic oligonucleotide
cauguugccaaaggagaug

SEQ ID NO: 1659620 - RNA, 19 nt, Artificial Sequence
  Description of Artificial Sequence: Synthetic oligonucleotide
guggcuacaugaugcaauc

SEQ ID NO: 1659621 - RNA, 19 nt, Artificial Sequence
  Description of Artificial Sequence: Synthetic oligonucleotide
gaacuucuaaucauucucu

SEQ ID NO: 1659622 - RNA, 19 nt, Artificial Sequence
  Description of Artificial Sequence: Synthetic oligonucleotide
uugcaucaaggaucaaauc

SEQ ID NO: 1659623 - RNA, 19 nt, Artificial Sequence
  Description of Artificial Sequence: Synthetic oligonucleotide
gacgugggcauuccacaug

SEQ ID NO: 1659624 - RNA, 19 nt, Artificial Sequence
  Description of Artificial Sequence: Synthetic oligonucleotide
uuaaggaguuggucauuuc

SEQ ID NO: 1659625 - RNA, 19 nt, Artificial Sequence
  Description of Artificial Sequence: Synthetic oligonucleotide
aggaucuaguagccagaag

SEQ ID NO: 1659626 - RNA, 19 nt, Artificial Sequence
  Description of Artificial Sequence: Synthetic oligonucleotide
gagaaugauacaguucacu

SEQ ID NO: 1659627 - RNA, 19 nt, Artificial Sequence
  Description of Artificial Sequence: Synthetic oligonucleotide
cuuguugaaaauccguuau

SEQ ID NO: 1659628 - RNA, 19 nt, Artificial Sequence
  Description of Artificial Sequence: Synthetic oligonucleotide
auagaaugcacaagauaau

SEQ ID NO: 1659629 - RNA, 19 nt, Artificial Sequence
  Description of Artificial Sequence: Synthetic oligonucleotide
cagagugaacuaauuaaua

SEQ ID NO: 1659630 - RNA, 19 nt, Artificial Sequence
  Description of Artificial Sequence: Synthetic oligonucleotide
agaagggcuaagacaaccu

SEQ ID NO: 1659631 - RNA, 19 nt, Artificial Sequence
  Description of Artificial Sequence: Synthetic oligonucleotide
gaaaaggcccaguuaccua

SEQ ID NO: 1659632 - RNA, 19 nt, Artificial Sequence
  Description of Artificial Sequence: Synthetic oligonucleotide
aggugguauucuuaugguu

SEQ ID NO: 1659633 - RNA, 19 nt, Artificial Sequence
  Description of Artificial Sequence: Synthetic oligonucleotide
acacgagaacuugauagaa

SEQ ID NO: 1659634 - RNA, 19 nt, Artificial Sequence
  Description of Artificial Sequence: Synthetic oligonucleotide
ccuuaagcaaaacacgaga

SEQ ID NO: 1659635 - RNA, 19 nt, Artificial Sequence
  Description of Artificial Sequence: Synthetic oligonucleotide
ugguauucuuaugguucag

SEQ ID NO: 1659636 - RNA, 19 nt, Artificial Sequence
  Description of Artificial Sequence: Synthetic oligonucleotide
gguugaugccuaacaaaag

SEQ ID NO: 1659637 - RNA, 19 nt, Artificial Sequence
  Description of Artificial Sequence: Synthetic oligonucleotide
aaguucacagaggcgugaa

SEQ ID NO: 1659638 - RNA, 19 nt, Artificial Sequence
  Description of Artificial Sequence: Synthetic oligonucleotide
aaaccuaguuuugcaucaa

SEQ ID NO: 1659639 - RNA, 19 nt, Artificial Sequence
  Description of Artificial Sequence: Synthetic oligonucleotide
gaaguucacagaggcguga

SEQ ID NO: 1659640 - RNA, 19 nt, Artificial Sequence
  Description of Artificial Sequence: Synthetic oligonucleotide
caaaacacgagaacuugau

SEQ ID NO: 1659641 - RNA, 19 nt, Artificial Sequence
  Description of Artificial Sequence: Synthetic oligonucleotide
ucuuaugguucagucccau

SEQ ID NO: 1659642 - RNA, 19 nt, Artificial Sequence
  Description of Artificial Sequence: Synthetic oligonucleotide
agaccucagagugaacuaa

SEQ ID NO: 1659643 - RNA, 19 nt, Artificial Sequence
  Description of Artificial Sequence: Synthetic oligonucleotide
cuacugggaaauuaccagu

SEQ ID NO: 1659644 - RNA, 19 nt, Artificial Sequence
  Description of Artificial Sequence: Synthetic oligonucleotide
ggacaucuacccuuuauua

SEQ ID NO: 1659645 - RNA, 19 nt, Artificial Sequence
  Description of Artificial Sequence: Synthetic oligonucleotide
uaaguccaauuaagagaau

SEQ ID NO: 1659646 - RNA, 19 nt, Artificial Sequence
  Description of Artificial Sequence: Synthetic oligonucleotide
gguauguuguuaacuggac

SEQ ID NO: 1659647 - RNA, 19 nt, Artificial Sequence
  Description of Artificial Sequence: Synthetic oligonucleotide
ggguugaugccuaacaaaa

SEQ ID NO: 1659648 - RNA, 19 nt, Artificial Sequence
  Description of Artificial Sequence: Synthetic oligonucleotide
ggauuugcugugaagagua

SEQ ID NO: 1659649 - RNA, 19 nt, Artificial Sequence
  Description of Artificial Sequence: Synthetic oligonucleotide
ggauguuaacucucaaugu

SEQ ID NO: 1659650 - RNA, 19 nt, Artificial Sequence
  Description of Artificial Sequence: Synthetic oligonucleotide
uacuuacuaccaagaccuc

SEQ ID NO: 1659651 - RNA, 19 nt, Artificial Sequence
  Description of Artificial Sequence: Synthetic oligonucleotide
aauuaccaguagaguuucu

SEQ ID NO: 1659652 - RNA, 19 nt, Artificial Sequence
  Description of Artificial Sequence: Synthetic oligonucleotide
uagaagcggcuuucagaac

SEQ ID NO: 1659653 - RNA, 19 nt, Artificial Sequence
  Description of Artificial Sequence: Synthetic oligonucleotide
ggcgugaaacaagaaagca

SEQ ID NO: 1659654 - RNA, 19 nt, Artificial Sequence
  Description of Artificial Sequence: Synthetic oligonucleotide
gagacaggacaucuacccu

SEQ ID NO: 1659655 - RNA, 19 nt, Artificial Sequence
  Description of Artificial Sequence: Synthetic oligonucleotide
agaggacuaggaauagaaa

SEQ ID NO: 1659656 - RNA, 19 nt, Artificial Sequence
  Description of Artificial Sequence: Synthetic oligonucleotide
aguucacagaggcgugaaa

SEQ ID NO: 1659657 - RNA, 19 nt, Artificial Sequence
  Description of Artificial Sequence: Synthetic oligonucleotide
guuucaagguagaaauuau

SEQ ID NO: 1659658 - RNA, 19 nt, Artificial Sequence
  Description of Artificial Sequence: Synthetic oligonucleotide
gccagaaaucaucuaguaa

SEQ ID NO: 1659659 - RNA, 19 nt, Artificial Sequence
  Description of Artificial Sequence: Synthetic oligonucleotide
uggcuacaugaugcaaucu

SEQ ID NO: 1659660 - RNA, 19 nt, Artificial Sequence
  Description of Artificial Sequence: Synthetic oligonucleotide
gaagggcuaagacaaccuu

SEQ ID NO: 1659661 - RNA, 19 nt, Artificial Sequence
  Description of Artificial Sequence: Synthetic oligonucleotide
ccuuggggagaugacgugg

SEQ ID NO: 1659662 - RNA, 19 nt, Artificial Sequence
  Description of Artificial Sequence: Synthetic oligonucleotide
gugaacuaauuaauaaauu

SEQ ID NO: 1659663 - RNA, 19 nt, Artificial Sequence
  Description of Artificial Sequence: Synthetic oligonucleotide
cuccaauacugaagguuaa

SEQ ID NO: 1659664 - RNA, 19 nt, Artificial Sequence
  Description of Artificial Sequence: Synthetic oligonucleotide
ggaagguauguuguuaacu

SEQ ID NO: 1659665 - RNA, 19 nt, Artificial Sequence
  Description of Artificial Sequence: Synthetic oligonucleotide
cacauguaggaacauuaau

SEQ ID NO: 1659666 - RNA, 19 nt, Artificial Sequence
  Description of Artificial Sequence: Synthetic oligonucleotide
aggcccaguuaccuagaaa

SEQ ID NO: 1659667 - RNA, 19 nt, Artificial Sequence
  Description of Artificial Sequence: Synthetic oligonucleotide
caucuaguaaagggaagua

SEQ ID NO: 1659668 - RNA, 19 nt, Artificial Sequence
  Description of Artificial Sequence: Synthetic oligonucleotide
acucaguauuuggucaguu

SEQ ID NO: 1659669 - RNA, 19 nt, Artificial Sequence
  Description of Artificial Sequence: Synthetic oligonucleotide
ccguuauaacacaaaagua

SEQ ID NO: 1659670 - RNA, 19 nt, Artificial Sequence
  Description of Artificial Sequence: Synthetic oligonucleotide
gcgugaaacaagaaagcaa

SEQ ID NO: 1659671 - RNA, 19 nt, Artificial Sequence
  Description of Artificial Sequence: Synthetic oligonucleotide
cacacuguggcuacaugau

SEQ ID NO: 1659672 - RNA, 19 nt, Artificial Sequence
  Description of Artificial Sequence: Synthetic oligonucleotide
cccaguuaccuagaaauga

SEQ ID NO: 1659673 - RNA, 19 nt, Artificial Sequence
  Description of Artificial Sequence: Synthetic oligonucleotide
gcaugccauuuucuccuag

SEQ ID NO: 1659674 - RNA, 19 nt, Artificial Sequence
  Description of Artificial Sequence: Synthetic oligonucleotide
aguguaggaugaggcaauu

SEQ ID NO: 1659675 - RNA, 19 nt, Artificial Sequence
  Description of Artificial Sequence: Synthetic oligonucleotide
uccuaggguugaugccuaa

SEQ ID NO: 1659676 - RNA, 19 nt, Artificial Sequence
  Description of Artificial Sequence: Synthetic oligonucleotide
ccuaaaacuguaaguccaa

SEQ ID NO: 1659677 - RNA, 19 nt, Artificial Sequence
  Description of Artificial Sequence: Synthetic oligonucleotide
uaguagccagaagggcuaa

SEQ ID NO: 1659678 - RNA, 19 nt, Artificial Sequence
  Description of Artificial Sequence: Synthetic oligonucleotide
cacgagaacuugauagaau

SEQ ID NO: 1659679 - RNA, 19 nt, Artificial Sequence
  Description of Artificial Sequence: Synthetic oligonucleotide
cucaguauuuggucaguuu

SEQ ID NO: 1659680 - RNA, 19 nt, Artificial Sequence
  Description of Artificial Sequence: Synthetic oligonucleotide
cagaagagccagaaaucau

SEQ ID NO: 1659681 - RNA, 19 nt, Artificial Sequence
  Description of Artificial Sequence: Synthetic oligonucleotide
gcccaguuaccuagaaaug

SEQ ID NO: 1659682 - RNA, 19 nt, Artificial Sequence
  Description of Artificial Sequence: Synthetic oligonucleotide
gguauucuuaugguucagu

SEQ ID NO: 1659683 - RNA, 19 nt, Artificial Sequence
  Description of Artificial Sequence: Synthetic oligonucleotide
acaggacaucuacccuuua

SEQ ID NO: 1659684 - RNA, 19 nt, Artificial Sequence
  Description of Artificial Sequence: Synthetic oligonucleotide
gacaggacaucuacccuuu

SEQ ID NO: 1659685 - RNA, 19 nt, Artificial Sequence
  Description of Artificial Sequence: Synthetic oligonucleotide
gaccucagagugaacuaau

SEQ ID NO: 1659686 - RNA, 19 nt, Artificial Sequence
  Description of Artificial Sequence: Synthetic oligonucleotide
caggacaucuacccuuuau

SEQ ID NO: 1659687 - RNA, 19 nt, Artificial Sequence
  Description of Artificial Sequence: Synthetic oligonucleotide
cagaggcgugaaacaagaa

SEQ ID NO: 1659688 - RNA, 19 nt, Artificial Sequence
  Description of Artificial Sequence: Synthetic oligonucleotide
gguagaaauuauagacuau

SEQ ID NO: 1659689 - RNA, 19 nt, Artificial Sequence
  Description of Artificial Sequence: Synthetic oligonucleotide
cuccuaggguugaugccua

SEQ ID NO: 1659690 - RNA, 19 nt, Artificial Sequence
  Description of Artificial Sequence: Synthetic oligonucleotide
gcuuaaugacagagacuca

SEQ ID NO: 1659691 - RNA, 19 nt, Artificial Sequence
  Description of Artificial Sequence: Synthetic oligonucleotide
ggucaguuucaagguagaa

SEQ ID NO: 1659692 - RNA, 19 nt, Artificial Sequence
  Description of Artificial Sequence: Synthetic oligonucleotide
cccuugagauaaacuggga

SEQ ID NO: 1659693 - RNA, 19 nt, Artificial Sequence
  Description of Artificial Sequence: Synthetic oligonucleotide
ggacaugaacucaguauuu

SEQ ID NO: 1659694 - RNA, 19 nt, Artificial Sequence
  Description of Artificial Sequence: Synthetic oligonucleotide
guuuuccccuuggggagau

SEQ ID NO: 1659695 - RNA, 19 nt, Artificial Sequence
  Description of Artificial Sequence: Synthetic oligonucleotide
gguuggcuguuggcuguau

SEQ ID NO: 1659696 - RNA, 19 nt, Artificial Sequence
  Description of Artificial Sequence: Synthetic oligonucleotide
aacaucauuaucuaaaaug

SEQ ID NO: 1659697 - RNA, 19 nt, Artificial Sequence
  Description of Artificial Sequence: Synthetic oligonucleotide
aaaaccaucugauccaugc

SEQ ID NO: 1659698 - RNA, 19 nt, Artificial Sequence
  Description of Artificial Sequence: Synthetic oligonucleotide
ucaaauuaacgucagggcg

SEQ ID NO: 1659699 - RNA, 19 nt, Artificial Sequence
  Description of Artificial Sequence: Synthetic oligonucleotide
aacugaaccaaccuguagg

SEQ ID NO: 1659700 - RNA, 19 nt, Artificial Sequence
  Description of Artificial Sequence: Synthetic oligonucleotide
ucuuauucgacgaaggcag

SEQ ID NO: 1659701 - RNA, 19 nt, Artificial Sequence
  Description of Artificial Sequence: Synthetic oligonucleotide
ugugucuucagguagcugg

SEQ ID NO: 1659702 - RNA, 19 nt, Artificial Sequence
  Description of Artificial Sequence: Synthetic oligonucleotide
aauauuaaaggcaguaauc

SEQ ID NO: 1659703 - RNA, 19 nt, Artificial Sequence
  Description of Artificial Sequence: Synthetic oligonucleotide
aaaggcaguaaucagaaaa

SEQ ID NO: 1659704 - RNA, 19 nt, Artificial Sequence
  Description of Artificial Sequence: Synthetic oligonucleotide
aggcaaaaccaucugaucc

SEQ ID NO: 1659705 - RNA, 19 nt, Artificial Sequence
  Description of Artificial Sequence: Synthetic oligonucleotide
ucucaaauuaacgucaggg

SEQ ID NO: 1659706 - RNA, 19 nt, Artificial Sequence
  Description of Artificial Sequence: Synthetic oligonucleotide
aaaucaaguggauaggacu

SEQ ID NO: 1659707 - RNA, 19 nt, Artificial Sequence
  Description of Artificial Sequence: Synthetic oligonucleotide
uacaucaccaauuaggagu

SEQ ID NO: 1659708 - RNA, 19 nt, Artificial Sequence
  Description of Artificial Sequence: Synthetic oligonucleotide
agaauaauugcauacacaa

SEQ ID NO: 1659709 - RNA, 19 nt, Artificial Sequence
  Description of Artificial Sequence: Synthetic oligonucleotide
cucuacaucaccaauuagg

SEQ ID NO: 1659710 - RNA, 19 nt, Artificial Sequence
  Description of Artificial Sequence: Synthetic oligonucleotide
ucagaaaacagugacagug

SEQ ID NO: 1659711 - RNA, 19 nt, Artificial Sequence
  Description of Artificial Sequence: Synthetic oligonucleotide
gacgaaggcagcuugauag

SEQ ID NO: 1659712 - RNA, 19 nt, Artificial Sequence
  Description of Artificial Sequence: Synthetic oligonucleotide
aaaacggaggcucguuucc

SEQ ID NO: 1659713 - RNA, 19 nt, Artificial Sequence
  Description of Artificial Sequence: Synthetic oligonucleotide
uccaccauccgauacacgg

SEQ ID NO: 1659714 - RNA, 19 nt, Artificial Sequence
  Description of Artificial Sequence: Synthetic oligonucleotide
ucuacaucaccaauuagga

SEQ ID NO: 1659715 - RNA, 19 nt, Artificial Sequence
  Description of Artificial Sequence: Synthetic oligonucleotide
aauguauaugcccucacau

SEQ ID NO: 1659716 - RNA, 19 nt, Artificial Sequence
  Description of Artificial Sequence: Synthetic oligonucleotide
aaaauguauaugcccucac

SEQ ID NO: 1659717 - RNA, 19 nt, Artificial Sequence
  Description of Artificial Sequence: Synthetic oligonucleotide
cucguuuccaggaagacag

SEQ ID NO: 1659718 - RNA, 19 nt, Artificial Sequence
  Description of Artificial Sequence: Synthetic oligonucleotide
gcugguaucaaacugaacc

SEQ ID NO: 1659719 - RNA, 19 nt, Artificial Sequence
  Description of Artificial Sequence: Synthetic oligonucleotide
guaaucagaaaacagugac

SEQ ID NO: 1659720 - RNA, 19 nt, Artificial Sequence
  Description of Artificial Sequence: Synthetic oligonucleotide
caaauuaacgucagggcgc

SEQ ID NO: 1659721 - RNA, 19 nt, Artificial Sequence
  Description of Artificial Sequence: Synthetic oligonucleotide
ugaugucgagaccaaauag

SEQ ID NO: 1659722 - RNA, 19 nt, Artificial Sequence
  Description of Artificial Sequence: Synthetic oligonucleotide
acuguggucaaaaugcacc

SEQ ID NO: 1659723 - RNA, 19 nt, Artificial Sequence
  Description of Artificial Sequence: Synthetic oligonucleotide
aaggcaguaaucagaaaac

SEQ ID NO: 1659724 - RNA, 19 nt, Artificial Sequence
  Description of Artificial Sequence: Synthetic oligonucleotide
auguuaaagcacccggugc

SEQ ID NO: 1659725 - RNA, 19 nt, Artificial Sequence
  Description of Artificial Sequence: Synthetic oligonucleotide
ucagaauaauugcauacac

SEQ ID NO: 1659726 - RNA, 19 nt, Artificial Sequence
  Description of Artificial Sequence: Synthetic oligonucleotide
uguuaaagcacccggugca

SEQ ID NO: 1659727 - RNA, 19 nt, Artificial Sequence
  Description of Artificial Sequence: Synthetic oligonucleotide
uucagaaggguaaaguuuc

SEQ ID NO: 1659728 - RNA, 19 nt, Artificial Sequence
  Description of Artificial Sequence: Synthetic oligonucleotide
aaaccugucgcgcacuuug

SEQ ID NO: 1659729 - RNA, 19 nt, Artificial Sequence
  Description of Artificial Sequence: Synthetic oligonucleotide
gaaguauuccaucuucacc

SEQ ID NO: 1659730 - RNA, 19 nt, Artificial Sequence
  Description of Artificial Sequence: Synthetic oligonucleotide
gucaaaaugcaccuggggc

SEQ ID NO: 1659731 - RNA, 19 nt, Artificial Sequence
  Description of Artificial Sequence: Synthetic oligonucleotide
agaccuucgacaccguccc

SEQ ID NO: 1659732 - RNA, 19 nt, Artificial Sequence
  Description of Artificial Sequence: Synthetic oligonucleotide
uguuaauccaccauccgau

SEQ ID NO: 1659733 - RNA, 19 nt, Artificial Sequence
  Description of Artificial Sequence: Synthetic oligonucleotide
aauaucuccuaggaccugg

SEQ ID NO: 1659734 - RNA, 19 nt, Artificial Sequence
  Description of Artificial Sequence: Synthetic oligonucleotide
cucaaauuaacgucagggc

SEQ ID NO: 1659735 - RNA, 19 nt, Artificial Sequence
  Description of Artificial Sequence: Synthetic oligonucleotide
aguauccuccucaaaagcc

SEQ ID NO: 1659736 - RNA, 19 nt, Artificial Sequence
  Description of Artificial Sequence: Synthetic oligonucleotide
aacgucagggcgcaggaag

SEQ ID NO: 1659737 - RNA, 19 nt, Artificial Sequence
  Description of Artificial Sequence: Synthetic oligonucleotide
aauugcauacacaauuuca

SEQ ID NO: 1659738 - RNA, 19 nt, Artificial Sequence
  Description of Artificial Sequence: Synthetic oligonucleotide
aaucaaguggauaggacug

SEQ ID NO: 1659739 - RNA, 19 nt, Artificial Sequence
  Description of Artificial Sequence: Synthetic oligonucleotide
uccuuucucaaauuaacgu

SEQ ID NO: 1659740 - RNA, 19 nt, Artificial Sequence
  Description of Artificial Sequence: Synthetic oligonucleotide
gucgagaccaaauagccug

SEQ ID NO: 1659741 - RNA, 19 nt, Artificial Sequence
  Description of Artificial Sequence: Synthetic oligonucleotide
ucguggaucuuauucgacg

SEQ ID NO: 1659742 - RNA, 19 nt, Artificial Sequence
  Description of Artificial Sequence: Synthetic oligonucleotide
ucgagcgucagauaguugu

SEQ ID NO: 1659743 - RNA, 19 nt, Artificial Sequence
  Description of Artificial Sequence: Synthetic oligonucleotide
aguggauaggacugcaguc

SEQ ID NO: 1659744 - RNA, 19 nt, Artificial Sequence
  Description of Artificial Sequence: Synthetic oligonucleotide
uaucaaacugaaccaaccu

SEQ ID NO: 1659745 - RNA, 19 nt, Artificial Sequence
  Description of Artificial Sequence: Synthetic oligonucleotide
ucuucaagguuuccagcgg

SEQ ID NO: 1659746 - RNA, 19 nt, Artificial Sequence
  Description of Artificial Sequence: Synthetic oligonucleotide
aaaauaucuccuaggaccu

SEQ ID NO: 1659747 - RNA, 19 nt, Artificial Sequence
  Description of Artificial Sequence: Synthetic oligonucleotide
aaacugaaccaaccuguag

SEQ ID NO: 1659748 - RNA, 19 nt, Artificial Sequence
  Description of Artificial Sequence: Synthetic oligonucleotide
gaugucgagaccaaauagc

SEQ ID NO: 1659749 - RNA, 19 nt, Artificial Sequence
  Description of Artificial Sequence: Synthetic oligonucleotide
augucgagaccaaauagcc

SEQ ID NO: 1659750 - RNA, 19 nt, Artificial Sequence
  Description of Artificial Sequence: Synthetic oligonucleotide
uaggcuaccucauaauucu

SEQ ID NO: 1659751 - RNA, 19 nt, Artificial Sequence
  Description of Artificial Sequence: Synthetic oligonucleotide
aaggcgaggcuccuggcgg

SEQ ID NO: 1659752 - RNA, 19 nt, Artificial Sequence
  Description of Artificial Sequence: Synthetic oligonucleotide
uccuuaaccaccauccaaa

SEQ ID NO: 1659753 - RNA, 19 nt, Artificial Sequence
  Description of Artificial Sequence: Synthetic oligonucleotide
agcuucgagcgucagauag

SEQ ID NO: 1659754 - RNA, 19 nt, Artificial Sequence
  Description of Artificial Sequence: Synthetic oligonucleotide
uagcuggugaaccauugag

SEQ ID NO: 1659755 - RNA, 19 nt, Artificial Sequence
  Description of Artificial Sequence: Synthetic oligonucleotide
cuuucucaaauuaacguca

SEQ ID NO: 1659756 - RNA, 19 nt, Artificial Sequence
  Description of Artificial Sequence: Synthetic oligonucleotide
acucuuuccacugagaaau

SEQ ID NO: 1659757 - RNA, 19 nt, Artificial Sequence
  Description of Artificial Sequence: Synthetic oligonucleotide
ugcauacacaauuucauuu

SEQ ID NO: 1659758 - RNA, 19 nt, Artificial Sequence
  Description of Artificial Sequence: Synthetic oligonucleotide
gaucuuauucgacgaaggc

SEQ ID NO: 1659759 - RNA, 19 nt, Artificial Sequence
  Description of Artificial Sequence: Synthetic oligonucleotide
cagaaaacagugacagugg

SEQ ID NO: 1659760 - RNA, 19 nt, Artificial Sequence
  Description of Artificial Sequence: Synthetic oligonucleotide
caaguauccuccucaaaag

SEQ ID NO: 1659761 - RNA, 19 nt, Artificial Sequence
  Description of Artificial Sequence: Synthetic oligonucleotide
uuaauccaccauccgauac

SEQ ID NO: 1659762 - RNA, 19 nt, Artificial Sequence
  Description of Artificial Sequence: Synthetic oligonucleotide
auuaaaggcaguaaucaga

SEQ ID NO: 1659763 - RNA, 19 nt, Artificial Sequence
  Description of Artificial Sequence: Synthetic oligonucleotide
uaauccaccauccgauaca

SEQ ID NO: 1659764 - RNA, 19 nt, Artificial Sequence
  Description of Artificial Sequence: Synthetic oligonucleotide
aagguaacuuucagaaggg

SEQ ID NO: 1659765 - RNA, 19 nt, Artificial Sequence
  Description of Artificial Sequence: Synthetic oligonucleotide
ucauaauucugaagguaac

SEQ ID NO: 1659766 - RNA, 19 nt, Artificial Sequence
  Description of Artificial Sequence: Synthetic oligonucleotide
gauaggacugcagucuggg

SEQ ID NO: 1659767 - RNA, 19 nt, Artificial Sequence
  Description of Artificial Sequence: Synthetic oligonucleotide
ucuaugauuccagugucug

SEQ ID NO: 1659768 - RNA, 19 nt, Artificial Sequence
  Description of Artificial Sequence: Synthetic oligonucleotide
cagucguggaucuuauucg

SEQ ID NO: 1659769 - RNA, 19 nt, Artificial Sequence
  Description of Artificial Sequence: Synthetic oligonucleotide
ugaaccauugagcaaccuc

SEQ ID NO: 1659770 - RNA, 19 nt, Artificial Sequence
  Description of Artificial Sequence: Synthetic oligonucleotide
aucuccuaggaccuggaag

SEQ ID NO: 1659771 - RNA, 19 nt, Artificial Sequence
  Description of Artificial Sequence: Synthetic oligonucleotide
cuugauaggcaaaaccauc

SEQ ID NO: 1659772 - RNA, 19 nt, Artificial Sequence
  Description of Artificial Sequence: Synthetic oligonucleotide
uuugccgcagcgcagcccc

SEQ ID NO: 1659773 - RNA, 19 nt, Artificial Sequence
  Description of Artificial Sequence: Synthetic oligonucleotide
aacucucaggcuuccaacu

SEQ ID NO: 1659774 - RNA, 19 nt, Artificial Sequence
  Description of Artificial Sequence: Synthetic oligonucleotide
ugaaguauuccaucuucac

SEQ ID NO: 1659775 - RNA, 19 nt, Artificial Sequence
  Description of Artificial Sequence: Synthetic oligonucleotide
aucauuaucuaaaauguau

SEQ ID NO: 1659776 - RNA, 19 nt, Artificial Sequence
  Description of Artificial Sequence: Synthetic oligonucleotide
ccauugagcaaccucaucg

SEQ ID NO: 1659777 - RNA, 19 nt, Artificial Sequence
  Description of Artificial Sequence: Synthetic oligonucleotide
ucugaugucgagaccaaau

SEQ ID NO: 1659778 - RNA, 19 nt, Artificial Sequence
  Description of Artificial Sequence: Synthetic oligonucleotide
ugguguugagaucagcuaa

SEQ ID NO: 1659779 - RNA, 19 nt, Artificial Sequence
  Description of Artificial Sequence: Synthetic oligonucleotide
gaaccauugagcaaccuca

SEQ ID NO: 1659780 - RNA, 19 nt, Artificial Sequence
  Description of Artificial Sequence: Synthetic oligonucleotide
ugauguuuggccugaagua

SEQ ID NO: 1659781 - RNA, 19 nt, Artificial Sequence
  Description of Artificial Sequence: Synthetic oligonucleotide
gauaggcaaaaccaucuga

SEQ ID NO: 1659782 - RNA, 19 nt, Artificial Sequence
  Description of Artificial Sequence: Synthetic oligonucleotide
uucucaaauuaacgucagg

SEQ ID NO: 1659783 - RNA, 19 nt, Artificial Sequence
  Description of Artificial Sequence: Synthetic oligonucleotide
uaggaguucaucccaagua

SEQ ID NO: 1659784 - RNA, 19 nt, Artificial Sequence
  Description of Artificial Sequence: Synthetic oligonucleotide
auuaacgucagggcgcagg

SEQ ID NO: 1659785 - RNA, 19 nt, Artificial Sequence
  Description of Artificial Sequence: Synthetic oligonucleotide
aaauagccugcagucgugg

SEQ ID NO: 1659786 - RNA, 19 nt, Artificial Sequence
  Description of Artificial Sequence: Synthetic oligonucleotide
uggucaaaaugcaccuggg

SEQ ID NO: 1659787 - RNA, 19 nt, Artificial Sequence
  Description of Artificial Sequence: Synthetic oligonucleotide
aucucugccucugaugucg

SEQ ID NO: 1659788 - RNA, 19 nt, Artificial Sequence
  Description of Artificial Sequence: Synthetic oligonucleotide
ugucuaugauuccaguguc

SEQ ID NO: 1659789 - RNA, 19 nt, Artificial Sequence
  Description of Artificial Sequence: Synthetic oligonucleotide
uggaucuuauucgacgaag

SEQ ID NO: 1659790 - RNA, 19 nt, Artificial Sequence
  Description of Artificial Sequence: Synthetic oligonucleotide
agcuugauaggcaaaacca

SEQ ID NO: 1659791 - RNA, 19 nt, Artificial Sequence
  Description of Artificial Sequence: Synthetic oligonucleotide
uucgacaccguccccaccu

SEQ ID NO: 1659792 - RNA, 19 nt, Artificial Sequence
  Description of Artificial Sequence: Synthetic oligonucleotide
cagcuugauaggcaaaacc

SEQ ID NO: 1659793 - RNA, 19 nt, Artificial Sequence
  Description of Artificial Sequence: Synthetic oligonucleotide
uuaacgucagggcgcagga

SEQ ID NO: 1659794 - RNA, 19 nt, Artificial Sequence
  Description of Artificial Sequence: Synthetic oligonucleotide
aaggcagcuugauaggcaa

SEQ ID NO: 1659795 - RNA, 19 nt, Artificial Sequence
  Description of Artificial Sequence: Synthetic oligonucleotide
agcuggugaaccauugagc

SEQ ID NO: 1659796 - RNA, 19 nt, Artificial Sequence
  Description of Artificial Sequence: Synthetic oligonucleotide
cucauaauucugaagguaa

SEQ ID NO: 1659797 - RNA, 19 nt, Artificial Sequence
  Description of Artificial Sequence: Synthetic oligonucleotide
aaucucugccucugauguc

SEQ ID NO: 1659798 - RNA, 19 nt, Artificial Sequence
  Description of Artificial Sequence: Synthetic oligonucleotide
auccagaccuucgacaccg

SEQ ID NO: 1659799 - RNA, 19 nt, Artificial Sequence
  Description of Artificial Sequence: Synthetic oligonucleotide
aaauuaacgucagggcgca

SEQ ID NO: 1659800 - RNA, 19 nt, Artificial Sequence
  Description of Artificial Sequence: Synthetic oligonucleotide
aucuuauucgacgaaggca

SEQ ID NO: 1659801 - RNA, 19 nt, Artificial Sequence
  Description of Artificial Sequence: Synthetic oligonucleotide
gaaaucaaguggauaggac

SEQ ID NO: 1659802 - RNA, 19 nt, Artificial Sequence
  Description of Artificial Sequence: Synthetic oligonucleotide
uuccugucuaugauuccag

SEQ ID NO: 1659803 - RNA, 19 nt, Artificial Sequence
  Description of Artificial Sequence: Synthetic oligonucleotide
guccuuucucaaauuaacg

SEQ ID NO: 1659804 - RNA, 19 nt, Artificial Sequence
  Description of Artificial Sequence: Synthetic oligonucleotide
aggaguucaucccaaguau

SEQ ID NO: 1659805 - RNA, 19 nt, Artificial Sequence
  Description of Artificial Sequence: Synthetic oligonucleotide
auugcauacacaauuucau

SEQ ID NO: 1659806 - RNA, 19 nt, Artificial Sequence
  Description of Artificial Sequence: Synthetic oligonucleotide
ggugauggaaaccagcaca

SEQ ID NO: 1659807 - RNA, 19 nt, Artificial Sequence
  Description of Artificial Sequence: Synthetic oligonucleotide
uggauaggacugcagucug

SEQ ID NO: 1659808 - RNA, 19 nt, Artificial Sequence
  Description of Artificial Sequence: Synthetic oligonucleotide
aucgccacaaucucugccu

SEQ ID NO: 1659809 - RNA, 19 nt, Artificial Sequence
  Description of Artificial Sequence: Synthetic oligonucleotide
cuccucaaaagccucgcag

SEQ ID NO: 1659810 - RNA, 19 nt, Artificial Sequence
  Description of Artificial Sequence: Synthetic oligonucleotide
aggcgguagcucuucaagg

SEQ ID NO: 1659811 - RNA, 19 nt, Artificial Sequence
  Description of Artificial Sequence: Synthetic oligonucleotide
gauacacggggucaccaac

SEQ ID NO: 1659812 - RNA, 19 nt, Artificial Sequence
  Description of Artificial Sequence: Synthetic oligonucleotide
cuacaucaccaauuaggag

SEQ ID NO: 1659813 - RNA, 19 nt, Artificial Sequence
  Description of Artificial Sequence: Synthetic oligonucleotide
gagcggaggagcuggaggc

SEQ ID NO: 1659814 - RNA, 19 nt, Artificial Sequence
  Description of Artificial Sequence: Synthetic oligonucleotide
agcuaaggaggcuucagaa

SEQ ID NO: 1659815 - RNA, 19 nt, Artificial Sequence
  Description of Artificial Sequence: Synthetic oligonucleotide
ccaauuaggaguucauccc

SEQ ID NO: 1659816 - RNA, 19 nt, Artificial Sequence
  Description of Artificial Sequence: Synthetic oligonucleotide
aucugauccaugccuggag

SEQ ID NO: 1659817 - RNA, 19 nt, Artificial Sequence
  Description of Artificial Sequence: Synthetic oligonucleotide
gaccauguguccaucuucc

SEQ ID NO: 1659818 - RNA, 19 nt, Artificial Sequence
  Description of Artificial Sequence: Synthetic oligonucleotide
uucagccugguguugagau

SEQ ID NO: 1659819 - RNA, 19 nt, Artificial Sequence
  Description of Artificial Sequence: Synthetic oligonucleotide
uggguaggcuaccucauaa

SEQ ID NO: 1659820 - RNA, 19 nt, Artificial Sequence
  Description of Artificial Sequence: Synthetic oligonucleotide
aucucuacaucaccaauua

SEQ ID NO: 1659821 - RNA, 19 nt, Artificial Sequence
  Description of Artificial Sequence: Synthetic oligonucleotide
ucccaaaccaccucugguc

SEQ ID NO: 1659822 - RNA, 19 nt, Artificial Sequence
  Description of Artificial Sequence: Synthetic oligonucleotide
cagauaguuguucuccaug

SEQ ID NO: 1659823 - RNA, 19 nt, Artificial Sequence
  Description of Artificial Sequence: Synthetic oligonucleotide
ugucgagaccaaauagccu

SEQ ID NO: 1659824 - RNA, 19 nt, Artificial Sequence
  Description of Artificial Sequence: Synthetic oligonucleotide
caaacucuucacagagggg

SEQ ID NO: 1659825 - RNA, 19 nt, Artificial Sequence
  Description of Artificial Sequence: Synthetic oligonucleotide
accaaauagccugcagucg

SEQ ID NO: 1659826 - RNA, 19 nt, Artificial Sequence
  Description of Artificial Sequence: Synthetic oligonucleotide
aguaaucagaaaacaguga

SEQ ID NO: 1659827 - RNA, 19 nt, Artificial Sequence
  Description of Artificial Sequence: Synthetic oligonucleotide
caccauccgauacacgggg

SEQ ID NO: 1659828 - RNA, 19 nt, Artificial Sequence
  Description of Artificial Sequence: Synthetic oligonucleotide
aauagccugcagucgugga

SEQ ID NO: 1659829 - RNA, 19 nt, Artificial Sequence
  Description of Artificial Sequence: Synthetic oligonucleotide
ggccauucagaauaauugc

SEQ ID NO: 1659830 - RNA, 19 nt, Artificial Sequence
  Description of Artificial Sequence: Synthetic oligonucleotide
auucgacgaaggcagcuug

SEQ ID NO: 1659831 - RNA, 19 nt, Artificial Sequence
  Description of Artificial Sequence: Synthetic oligonucleotide
uguuuggccugaaguauuc

SEQ ID NO: 1659832 - RNA, 19 nt, Artificial Sequence
  Description of Artificial Sequence: Synthetic oligonucleotide
auaggcaaaaccaucugau

SEQ ID NO: 1659833 - RNA, 19 nt, Artificial Sequence
  Description of Artificial Sequence: Synthetic oligonucleotide
agucguggaucuuauucga

SEQ ID NO: 1659834 - RNA, 19 nt, Artificial Sequence
  Description of Artificial Sequence: Synthetic oligonucleotide
accugucgcgcacuuugcc

SEQ ID NO: 1659835 - RNA, 19 nt, Artificial Sequence
  Description of Artificial Sequence: Synthetic oligonucleotide
ccugacaccaugauguuug

SEQ ID NO: 1659836 - RNA, 19 nt, Artificial Sequence
  Description of Artificial Sequence: Synthetic oligonucleotide
ucgagaccaaauagccugc

SEQ ID NO: 1659837 - RNA, 19 nt, Artificial Sequence
  Description of Artificial Sequence: Synthetic oligonucleotide
accucauaauucugaaggu

SEQ ID NO: 1659838 - RNA, 19 nt, Artificial Sequence
  Description of Artificial Sequence: Synthetic oligonucleotide
cuuuccacugagaaauaca

SEQ ID NO: 1659839 - RNA, 19 nt, Artificial Sequence
  Description of Artificial Sequence: Synthetic oligonucleotide
agcgucagauaguuguucu

SEQ ID NO: 1659840 - RNA, 19 nt, Artificial Sequence
  Description of Artificial Sequence: Synthetic oligonucleotide
aaccuguagggcugugucu

SEQ ID NO: 1659841 - RNA, 19 nt, Artificial Sequence
  Description of Artificial Sequence: Synthetic oligonucleotide
aaaaugcaccuggggcagc

SEQ ID NO: 1659842 - RNA, 19 nt, Artificial Sequence
  Description of Artificial Sequence: Synthetic oligonucleotide
cauccaaaaccugucgcgc

SEQ ID NO: 1659843 - RNA, 19 nt, Artificial Sequence
  Description of Artificial Sequence: Synthetic oligonucleotide
ggaggcuucagaaaucaag

SEQ ID NO: 1659844 - RNA, 19 nt, Artificial Sequence
  Description of Artificial Sequence: Synthetic oligonucleotide
ggaucuuauucgacgaagg

SEQ ID NO: 1659845 - RNA, 19 nt, Artificial Sequence
  Description of Artificial Sequence: Synthetic oligonucleotide
ucagaaggguaaaguuucu

SEQ ID NO: 1659846 - RNA, 19 nt, Artificial Sequence
  Description of Artificial Sequence: Synthetic oligonucleotide
gaggcucguuuccaggaag

SEQ ID NO: 1659847 - RNA, 19 nt, Artificial Sequence
  Description of Artificial Sequence: Synthetic oligonucleotide
uucagaaaucaaguggaua

SEQ ID NO: 1659848 - RNA, 19 nt, Artificial Sequence
  Description of Artificial Sequence: Synthetic oligonucleotide
ggcaguaaucagaaaacag

SEQ ID NO: 1659849 - RNA, 19 nt, Artificial Sequence
  Description of Artificial Sequence: Synthetic oligonucleotide
cacggggucaccaacucuc

SEQ ID NO: 1659850 - RNA, 19 nt, Artificial Sequence
  Description of Artificial Sequence: Synthetic oligonucleotide
cagcucaacaccuucuuca

SEQ ID NO: 1659851 - RNA, 19 nt, Artificial Sequence
  Description of Artificial Sequence: Synthetic oligonucleotide
ccuuucucaaauuaacguc

SEQ ID NO: 1659852 - RNA, 19 nt, Artificial Sequence
  Description of Artificial Sequence: Synthetic oligonucleotide
caaaaugcaccuggggcag

SEQ ID NO: 1659853 - RNA, 19 nt, Artificial Sequence
  Description of Artificial Sequence: Synthetic oligonucleotide
uuauucgacgaaggcagcu

SEQ ID NO: 1659854 - RNA, 19 nt, Artificial Sequence
  Description of Artificial Sequence: Synthetic oligonucleotide
uggugauggaaaccagcac

SEQ ID NO: 1659855 - RNA, 19 nt, Artificial Sequence
  Description of Artificial Sequence: Synthetic oligonucleotide
aauuaggaguucaucccaa

SEQ ID NO: 1659856 - RNA, 19 nt, Artificial Sequence
  Description of Artificial Sequence: Synthetic oligonucleotide
ugcagucuggguaggcuac

SEQ ID NO: 1659857 - RNA, 19 nt, Artificial Sequence
  Description of Artificial Sequence: Synthetic oligonucleotide
cuguuaauccaccauccga

SEQ ID NO: 1659858 - RNA, 19 nt, Artificial Sequence
  Description of Artificial Sequence: Synthetic oligonucleotide
cuuauucgacgaaggcagc

SEQ ID NO: 1659859 - RNA, 19 nt, Artificial Sequence
  Description of Artificial Sequence: Synthetic oligonucleotide
cugccucugaugucgagac

SEQ ID NO: 1659860 - RNA, 19 nt, Artificial Sequence
  Description of Artificial Sequence: Synthetic oligonucleotide
auguauaugcccucacauu

SEQ ID NO: 1659861 - RNA, 19 nt, Artificial Sequence
  Description of Artificial Sequence: Synthetic oligonucleotide
guaggcuaccucauaauuc

SEQ ID NO: 1659862 - RNA, 19 nt, Artificial Sequence
  Description of Artificial Sequence: Synthetic oligonucleotide
caccauccaaaaccugucg

SEQ ID NO: 1659863 - RNA, 19 nt, Artificial Sequence
  Description of Artificial Sequence: Synthetic oligonucleotide
caauuaggaguucauccca

SEQ ID NO: 1659864 - RNA, 19 nt, Artificial Sequence
  Description of Artificial Sequence: Synthetic oligonucleotide
caacucucaggcuuccaac

SEQ ID NO: 1659865 - RNA, 19 nt, Artificial Sequence
  Description of Artificial Sequence: Synthetic oligonucleotide
guauaugcccucacauucc

SEQ ID NO: 1659866 - RNA, 19 nt, Artificial Sequence
  Description of Artificial Sequence: Synthetic oligonucleotide
ucagauaguuguucuccau

SEQ ID NO: 1659867 - RNA, 19 nt, Artificial Sequence
  Description of Artificial Sequence: Synthetic oligonucleotide
ucaccaauuaggaguucau

SEQ ID NO: 1659868 - RNA, 19 nt, Artificial Sequence
  Description of Artificial Sequence: Synthetic oligonucleotide
accaccauccaaaaccugu

SEQ ID NO: 1659869 - RNA, 19 nt, Artificial Sequence
  Description of Artificial Sequence: Synthetic oligonucleotide
caggcgguagcucuucaag

SEQ ID NO: 1659870 - RNA, 19 nt, Artificial Sequence
  Description of Artificial Sequence: Synthetic oligonucleotide
caucgccacaaucucugcc

SEQ ID NO: 1659871 - RNA, 19 nt, Artificial Sequence
  Description of Artificial Sequence: Synthetic oligonucleotide
acuuugccgcagcgcagcc

SEQ ID NO: 1659872 - RNA, 19 nt, Artificial Sequence
  Description of Artificial Sequence: Synthetic oligonucleotide
aaauaucuccuaggaccug

SEQ ID NO: 1659873 - RNA, 19 nt, Artificial Sequence
  Description of Artificial Sequence: Synthetic oligonucleotide
caaauagccugcagucgug

SEQ ID NO: 1659874 - RNA, 19 nt, Artificial Sequence
  Description of Artificial Sequence: Synthetic oligonucleotide
cauggcuggcaguaaggac

SEQ ID NO: 1659875 - RNA, 19 nt, Artificial Sequence
  Description of Artificial Sequence: Synthetic oligonucleotide
guguugagaucagcuaagg

SEQ ID NO: 1659876 - RNA, 19 nt, Artificial Sequence
  Description of Artificial Sequence: Synthetic oligonucleotide
cccauguuaaagcacccgg

SEQ ID NO: 1659877 - RNA, 19 nt, Artificial Sequence
  Description of Artificial Sequence: Synthetic oligonucleotide
caaccuguagggcuguguc

SEQ ID NO: 1659878 - RNA, 19 nt, Artificial Sequence
  Description of Artificial Sequence: Synthetic oligonucleotide
gucucgcacaccgacaccc

SEQ ID NO: 1659879 - RNA, 19 nt, Artificial Sequence
  Description of Artificial Sequence: Synthetic oligonucleotide
cuaaggaggcuucagaaau

SEQ ID NO: 1659880 - RNA, 19 nt, Artificial Sequence
  Description of Artificial Sequence: Synthetic oligonucleotide
aaaugcaccuggggcagcu

SEQ ID NO: 1659881 - RNA, 19 nt, Artificial Sequence
  Description of Artificial Sequence: Synthetic oligonucleotide
guuaaagcacccggugcag

SEQ ID NO: 1659882 - RNA, 19 nt, Artificial Sequence
  Description of Artificial Sequence: Synthetic oligonucleotide
acgcacgcgacgccaggcc

SEQ ID NO: 1659883 - RNA, 19 nt, Artificial Sequence
  Description of Artificial Sequence: Synthetic oligonucleotide
cauucccaaaccaccucug

SEQ ID NO: 1659884 - RNA, 19 nt, Artificial Sequence
  Description of Artificial Sequence: Synthetic oligonucleotide
cugucuaugauuccagugu

SEQ ID NO: 1659885 - RNA, 19 nt, Artificial Sequence
  Description of Artificial Sequence: Synthetic oligonucleotide
auagccugcagucguggau

SEQ ID NO: 1659886 - RNA, 19 nt, Artificial Sequence
  Description of Artificial Sequence: Synthetic oligonucleotide
acccauguuaaagcacccg

SEQ ID NO: 1659887 - RNA, 19 nt, Artificial Sequence
  Description of Artificial Sequence: Synthetic oligonucleotide
aggcaguaaucagaaaaca

SEQ ID NO: 1659888 - RNA, 19 nt, Artificial Sequence
  Description of Artificial Sequence: Synthetic oligonucleotide
aguucaucccaaguauccu

SEQ ID NO: 1659889 - RNA, 19 nt, Artificial Sequence
  Description of Artificial Sequence: Synthetic oligonucleotide
uaacuuucagaaggguaaa

SEQ ID NO: 1659890 - RNA, 19 nt, Artificial Sequence
  Description of Artificial Sequence: Synthetic oligonucleotide
ugucuggguccacuguggu

SEQ ID NO: 1659891 - RNA, 19 nt, Artificial Sequence
  Description of Artificial Sequence: Synthetic oligonucleotide
cagcacaaggcgaggcucc

SEQ ID NO: 1659892 - RNA, 19 nt, Artificial Sequence
  Description of Artificial Sequence: Synthetic oligonucleotide
uacacggggucaccaacuc

SEQ ID NO: 1659893 - RNA, 19 nt, Artificial Sequence
  Description of Artificial Sequence: Synthetic oligonucleotide
uccugucuaugauuccagu

SEQ ID NO: 1659894 - RNA, 19 nt, Artificial Sequence
  Description of Artificial Sequence: Synthetic oligonucleotide
gguccuuucucaaauuaac

SEQ ID NO: 1659895 - RNA, 19 nt, Artificial Sequence
  Description of Artificial Sequence: Synthetic oligonucleotide
agaucagcuaaggaggcuu

SEQ ID NO: 1659896 - RNA, 19 nt, Artificial Sequence
  Description of Artificial Sequence: Synthetic oligonucleotide
ggaccuggaagcaugucag

SEQ ID NO: 1659897 - RNA, 19 nt, Artificial Sequence
  Description of Artificial Sequence: Synthetic oligonucleotide
gggagggccauucagaaua

SEQ ID NO: 1659898 - RNA, 19 nt, Artificial Sequence
  Description of Artificial Sequence: Synthetic oligonucleotide
aaacggaggcucguuucca

SEQ ID NO: 1659899 - RNA, 19 nt, Artificial Sequence
  Description of Artificial Sequence: Synthetic oligonucleotide
auccgauacacggggucac

SEQ ID NO: 1659900 - RNA, 19 nt, Artificial Sequence
  Description of Artificial Sequence: Synthetic oligonucleotide
ugggccuguuaauccacca

SEQ ID NO: 1659901 - RNA, 19 nt, Artificial Sequence
  Description of Artificial Sequence: Synthetic oligonucleotide
caccaugauguuuggccug

SEQ ID NO: 1659902 - RNA, 19 nt, Artificial Sequence
  Description of Artificial Sequence: Synthetic oligonucleotide
cacccauguuaaagcaccc

SEQ ID NO: 1659903 - RNA, 19 nt, Artificial Sequence
  Description of Artificial Sequence: Synthetic oligonucleotide
gcacccauguuaaagcacc

SEQ ID NO: 1659904 - RNA, 19 nt, Artificial Sequence
  Description of Artificial Sequence: Synthetic oligonucleotide
gauguuuggccugaaguau

SEQ ID NO: 1659905 - RNA, 19 nt, Artificial Sequence
  Description of Artificial Sequence: Synthetic oligonucleotide
cagugggagggccauucag

SEQ ID NO: 1659906 - RNA, 19 nt, Artificial Sequence
  Description of Artificial Sequence: Synthetic oligonucleotide
gacagugggagggccauuc

SEQ ID NO: 1659907 - RNA, 19 nt, Artificial Sequence
  Description of Artificial Sequence: Synthetic oligonucleotide
agugggagggccauucaga

SEQ ID NO: 1659908 - RNA, 19 nt, Artificial Sequence
  Description of Artificial Sequence: Synthetic oligonucleotide
uucgagcgucagauaguug

SEQ ID NO: 1659909 - RNA, 19 nt, Artificial Sequence
  Description of Artificial Sequence: Synthetic oligonucleotide
gcaguaaggacucgcaaaa

SEQ ID NO: 1659910 - RNA, 19 nt, Artificial Sequence
  Description of Artificial Sequence: Synthetic oligonucleotide
ucggucucgcacaccgaca

SEQ ID NO: 1659911 - RNA, 19 nt, Artificial Sequence
  Description of Artificial Sequence: Synthetic oligonucleotide
ggggacgucugguacaaac

SEQ ID NO: 1659912 - RNA, 19 nt, Artificial Sequence
  Description of Artificial Sequence: Synthetic oligonucleotide
ggacgucugguacaaacuc

SEQ ID NO: 1659913 - RNA, 19 nt, Artificial Sequence
  Description of Artificial Sequence: Synthetic oligonucleotide
aaugcaccuggggcagcuc

SEQ ID NO: 1659914 - RNA, 19 nt, Artificial Sequence
  Description of Artificial Sequence: Synthetic oligonucleotide
ccuguuaauccaccauccg

SEQ ID NO: 1659915 - RNA, 19 nt, Artificial Sequence
  Description of Artificial Sequence: Synthetic oligonucleotide
ucccaaguauccuccucaa

SEQ ID NO: 1659916 - RNA, 19 nt, Artificial Sequence
  Description of Artificial Sequence: Synthetic oligonucleotide
gcaguaaucagaaaacagu

SEQ ID NO: 1659917 - RNA, 19 nt, Artificial Sequence
  Description of Artificial Sequence: Synthetic oligonucleotide
ugacaccaugauguuuggc

SEQ ID NO: 1659918 - RNA, 19 nt, Artificial Sequence
  Description of Artificial Sequence: Synthetic oligonucleotide
cacauucccaaaccaccuc

SEQ ID NO: 1659919 - RNA, 19 nt, Artificial Sequence
  Description of Artificial Sequence: Synthetic oligonucleotide
cugaugucgagaccaaaua

SEQ ID NO: 1659920 - RNA, 19 nt, Artificial Sequence
  Description of Artificial Sequence: Synthetic oligonucleotide
ggccuguuaauccaccauc

SEQ ID NO: 1659921 - RNA, 19 nt, Artificial Sequence
  Description of Artificial Sequence: Synthetic oligonucleotide
ccugucgcgcacuuugccg

SEQ ID NO: 1659922 - RNA, 19 nt, Artificial Sequence
  Description of Artificial Sequence: Synthetic oligonucleotide
ggcgcaggaagcucugaag

SEQ ID NO: 1659923 - RNA, 19 nt, Artificial Sequence
  Description of Artificial Sequence: Synthetic oligonucleotide
aaccauugagcaaccucau

SEQ ID NO: 1659924 - RNA, 19 nt, Artificial Sequence
  Description of Artificial Sequence: Synthetic oligonucleotide
caccaauuaggaguucauc

SEQ ID NO: 1659925 - RNA, 19 nt, Artificial Sequence
  Description of Artificial Sequence: Synthetic oligonucleotide
cagaggggucacacaggcg

SEQ ID NO: 1659926 - RNA, 19 nt, Artificial Sequence
  Description of Artificial Sequence: Synthetic oligonucleotide
guuaauccaccauccgaua

SEQ ID NO: 1659927 - RNA, 19 nt, Artificial Sequence
  Description of Artificial Sequence: Synthetic oligonucleotide
auacacggggucaccaacu

SEQ ID NO: 1659928 - RNA, 19 nt, Artificial Sequence
  Description of Artificial Sequence: Synthetic oligonucleotide
ugccucugaugucgagacc

SEQ ID NO: 1659929 - RNA, 19 nt, Artificial Sequence
  Description of Artificial Sequence: Synthetic oligonucleotide
gaauaauugcauacacaau

SEQ ID NO: 1659930 - RNA, 19 nt, Artificial Sequence
  Description of Artificial Sequence: Synthetic oligonucleotide
aggcgagccagagcggagg

SEQ ID NO: 1659931 - RNA, 19 nt, Artificial Sequence
  Description of Artificial Sequence: Synthetic oligonucleotide
gccuguuaauccaccaucc

SEQ ID NO: 1659932 - RNA, 19 nt, Artificial Sequence
  Description of Artificial Sequence: Synthetic oligonucleotide
cuggcaguaaggacucgca

SEQ ID NO: 1659933 - RNA, 19 nt, Artificial Sequence
  Description of Artificial Sequence: Synthetic oligonucleotide
cuggaggcacccauguuaa

SEQ ID NO: 1659934 - RNA, 19 nt, Artificial Sequence
  Description of Artificial Sequence: Synthetic oligonucleotide
gaucagcuaaggaggcuuc

SEQ ID NO: 1659935 - RNA, 19 nt, Artificial Sequence
  Description of Artificial Sequence: Synthetic oligonucleotide
ucgccacaaucucugccuc

SEQ ID NO: 1659936 - RNA, 19 nt, Artificial Sequence
  Description of Artificial Sequence: Synthetic oligonucleotide
aauuaacgucagggcgcag

SEQ ID NO: 1659937 - RNA, 19 nt, Artificial Sequence
  Description of Artificial Sequence: Synthetic oligonucleotide
accaugauguuuggccuga

SEQ ID NO: 1659938 - RNA, 19 nt, Artificial Sequence
  Description of Artificial Sequence: Synthetic oligonucleotide
caaacugaaccaaccugua

SEQ ID NO: 1659939 - RNA, 19 nt, Artificial Sequence
  Description of Artificial Sequence: Synthetic oligonucleotide
gagcgucagauaguuguuc

SEQ ID NO: 1659940 - RNA, 19 nt, Artificial Sequence
  Description of Artificial Sequence: Synthetic oligonucleotide
gguaacuuucagaagggua

SEQ ID NO: 1659941 - RNA, 19 nt, Artificial Sequence
  Description of Artificial Sequence: Synthetic oligonucleotide
accuguagggcugugucuu

SEQ ID NO: 1659942 - RNA, 19 nt, Artificial Sequence
  Description of Artificial Sequence: Synthetic oligonucleotide
acacggggucaccaacucu

SEQ ID NO: 1659943 - RNA, 19 nt, Artificial Sequence
  Description of Artificial Sequence: Synthetic oligonucleotide
guggauaggacugcagucu

SEQ ID NO: 1659944 - RNA, 19 nt, Artificial Sequence
  Description of Artificial Sequence: Synthetic oligonucleotide
ccaccauccgauacacggg

SEQ ID NO: 1659945 - RNA, 19 nt, Artificial Sequence
  Description of Artificial Sequence: Synthetic oligonucleotide
ugucgcgcacuuugccgca

SEQ ID NO: 1659946 - RNA, 19 nt, Artificial Sequence
  Description of Artificial Sequence: Synthetic oligonucleotide
uccgauacacggggucacc

SEQ ID NO: 1659947 - RNA, 19 nt, Artificial Sequence
  Description of Artificial Sequence: Synthetic oligonucleotide
ucgacgaaggcagcuugau

SEQ ID NO: 1659948 - RNA, 19 nt, Artificial Sequence
  Description of Artificial Sequence: Synthetic oligonucleotide
cacugggccuguuaaucca

SEQ ID NO: 1659949 - RNA, 19 nt, Artificial Sequence
  Description of Artificial Sequence: Synthetic oligonucleotide
gcuaaggaggcuucagaaa

SEQ ID NO: 1659950 - RNA, 19 nt, Artificial Sequence
  Description of Artificial Sequence: Synthetic oligonucleotide
ggauaggacugcagucugg

SEQ ID NO: 1659951 - RNA, 19 nt, Artificial Sequence
  Description of Artificial Sequence: Synthetic oligonucleotide
agcggcuccuuccugucua

SEQ ID NO: 1659952 - RNA, 19 nt, Artificial Sequence
  Description of Artificial Sequence: Synthetic oligonucleotide
ggaaaccagcacaaggcga

SEQ ID NO: 1659953 - RNA, 19 nt, Artificial Sequence
  Description of Artificial Sequence: Synthetic oligonucleotide
cauccgauacacgggguca

SEQ ID NO: 1659954 - RNA, 19 nt, Artificial Sequence
  Description of Artificial Sequence: Synthetic oligonucleotide
gacgucugguacaaacucu

SEQ ID NO: 1659955 - RNA, 19 nt, Artificial Sequence
  Description of Artificial Sequence: Synthetic oligonucleotide
gacgcacgcgacgccaggc

SEQ ID NO: 1659956 - RNA, 19 nt, Artificial Sequence
  Description of Artificial Sequence: Synthetic oligonucleotide
agccagguggaccgcggcu

SEQ ID NO: 1659957 - RNA, 19 nt, Artificial Sequence
  Description of Artificial Sequence: Synthetic oligonucleotide
ucgcgcacuuugccgcagc

SEQ ID NO: 1659958 - RNA, 19 nt, Artificial Sequence
  Description of Artificial Sequence: Synthetic oligonucleotide
ugggagggccauucagaau

SEQ ID NO: 1659959 - RNA, 19 nt, Artificial Sequence
  Description of Artificial Sequence: Synthetic oligonucleotide
gucguggaucuuauucgac

SEQ ID NO: 1659960 - RNA, 19 nt, Artificial Sequence
  Description of Artificial Sequence: Synthetic oligonucleotide
gcccucacauucccaaacc

SEQ ID NO: 1659961 - RNA, 19 nt, Artificial Sequence
  Description of Artificial Sequence: Synthetic oligonucleotide
auguuuggccugaaguauu

SEQ ID NO: 1659962 - RNA, 19 nt, Artificial Sequence
  Description of Artificial Sequence: Synthetic oligonucleotide
cuggugaaccauugagcaa

SEQ ID NO: 1659963 - RNA, 19 nt, Artificial Sequence
  Description of Artificial Sequence: Synthetic oligonucleotide
cuuugccgcagcgcagccc

SEQ ID NO: 1659964 - RNA, 19 nt, Artificial Sequence
  Description of Artificial Sequence: Synthetic oligonucleotide
cuucgacaccguccccacc

SEQ ID NO: 1659965 - RNA, 19 nt, Artificial Sequence
  Description of Artificial Sequence: Synthetic oligonucleotide
auaucuccuaggaccugga

SEQ ID NO: 1659966 - RNA, 19 nt, Artificial Sequence
  Description of Artificial Sequence: Synthetic oligonucleotide
uccuaggaccuggaagcau

SEQ ID NO: 1659967 - RNA, 19 nt, Artificial Sequence
  Description of Artificial Sequence: Synthetic oligonucleotide
ggcuaccucauaauucuga

SEQ ID NO: 1659968 - RNA, 19 nt, Artificial Sequence
  Description of Artificial Sequence: Synthetic oligonucleotide
ggagcuucgagcgucagau

SEQ ID NO: 1659969 - RNA, 19 nt, Artificial Sequence
  Description of Artificial Sequence: Synthetic oligonucleotide
ccaccauccaaaaccuguc

SEQ ID NO: 1659970 - RNA, 19 nt, Artificial Sequence
  Description of Artificial Sequence: Synthetic oligonucleotide
gguggaccgcggcugcccg

SEQ ID NO: 1659971 - RNA, 19 nt, Artificial Sequence
  Description of Artificial Sequence: Synthetic oligonucleotide
ugccuggagcuucgagcgu

SEQ ID NO: 1659972 - RNA, 19 nt, Artificial Sequence
  Description of Artificial Sequence: Synthetic oligonucleotide
ggugaaccauugagcaacc

SEQ ID NO: 1659973 - RNA, 19 nt, Artificial Sequence
  Description of Artificial Sequence: Synthetic oligonucleotide
gguaggcuaccucauaauu

SEQ ID NO: 1659974 - RNA, 19 nt, Artificial Sequence
  Description of Artificial Sequence: Synthetic oligonucleotide
ggcgguagcucuucaaggu

SEQ ID NO: 1659975 - RNA, 19 nt, Artificial Sequence
  Description of Artificial Sequence: Synthetic oligonucleotide
uccagaccuucgacaccgu

SEQ ID NO: 1659976 - RNA, 19 nt, Artificial Sequence
  Description of Artificial Sequence: Synthetic oligonucleotide
gaccuucgacaccgucccc

SEQ ID NO: 1659977 - RNA, 19 nt, Artificial Sequence
  Description of Artificial Sequence: Synthetic oligonucleotide
ggcacccauguuaaagcac

SEQ ID NO: 1659978 - RNA, 19 nt, Artificial Sequence
  Description of Artificial Sequence: Synthetic oligonucleotide
auaugcccucacauuccca

SEQ ID NO: 1659979 - RNA, 19 nt, Artificial Sequence
  Description of Artificial Sequence: Synthetic oligonucleotide
ccauccgauacacgggguc

SEQ ID NO: 1659980 - RNA, 19 nt, Artificial Sequence
  Description of Artificial Sequence: Synthetic oligonucleotide
cacgcgacgccaggccacg

SEQ ID NO: 1659981 - RNA, 19 nt, Artificial Sequence
  Description of Artificial Sequence: Synthetic oligonucleotide
cguggaucuuauucgacga

SEQ ID NO: 1659982 - RNA, 19 nt, Artificial Sequence
  Description of Artificial Sequence: Synthetic oligonucleotide
ugcagucguggaucuuauu

SEQ ID NO: 1659983 - RNA, 19 nt, Artificial Sequence
  Description of Artificial Sequence: Synthetic oligonucleotide
ccugguguugagaucagcu

SEQ ID NO: 1659984 - RNA, 19 nt, Artificial Sequence
  Description of Artificial Sequence: Synthetic oligonucleotide
ccaaauagccugcagucgu

SEQ ID NO: 1659985 - RNA, 19 nt, Artificial Sequence
  Description of Artificial Sequence: Synthetic oligonucleotide
aggcuaccucauaauucug

SEQ ID NO: 1659986 - RNA, 19 nt, Artificial Sequence
  Description of Artificial Sequence: Synthetic oligonucleotide
uaggaccuggaagcauguc

SEQ ID NO: 1659987 - RNA, 19 nt, Artificial Sequence
  Description of Artificial Sequence: Synthetic oligonucleotide
caccaacucucaggcuucc

SEQ ID NO: 1659988 - RNA, 19 nt, Artificial Sequence
  Description of Artificial Sequence: Synthetic oligonucleotide
cagggcgcaggaagcucug

SEQ ID NO: 1659989 - RNA, 19 nt, Artificial Sequence
  Description of Artificial Sequence: Synthetic oligonucleotide
gucuaugauuccagugucu

SEQ ID NO: 1659990 - RNA, 19 nt, Artificial Sequence
  Description of Artificial Sequence: Synthetic oligonucleotide
gcucguuuccaggaagaca

SEQ ID NO: 1659991 - RNA, 19 nt, Artificial Sequence
  Description of Artificial Sequence: Synthetic oligonucleotide
gcagcuugauaggcaaaac

SEQ ID NO: 1659992 - RNA, 19 nt, Artificial Sequence
  Description of Artificial Sequence: Synthetic oligonucleotide
caaaagccucgcagccuga

SEQ ID NO: 1659993 - RNA, 19 nt, Artificial Sequence
  Description of Artificial Sequence: Synthetic oligonucleotide
ggacgcacgcgacgccagg

SEQ ID NO: 1659994 - RNA, 19 nt, Artificial Sequence
  Description of Artificial Sequence: Synthetic oligonucleotide
ggucucgcacaccgacacc

SEQ ID NO: 1659995 - RNA, 19 nt, Artificial Sequence
  Description of Artificial Sequence: Synthetic oligonucleotide
accauccgauacacggggu

SEQ ID NO: 1659996 - RNA, 19 nt, Artificial Sequence
  Description of Artificial Sequence: Synthetic oligonucleotide
gucagggcgcaggaagcuc

SEQ ID NO: 1659997 - RNA, 19 nt, Artificial Sequence
  Description of Artificial Sequence: Synthetic oligonucleotide
ccuucgacaccguccccac

SEQ ID NO: 1659998 - RNA, 19 nt, Artificial Sequence
  Description of Artificial Sequence: Synthetic oligonucleotide
ccaacucuuuccacugaga

SEQ ID NO: 1659999 - RNA, 19 nt, Artificial Sequence
  Description of Artificial Sequence: Synthetic oligonucleotide
cuucagccugguguugaga

SEQ ID NO: 1660000 - RNA, 19 nt, Artificial Sequence
  Description of Artificial Sequence: Synthetic oligonucleotide
gccggggacgcacgcgacg

SEQ ID NO: 1660001 - RNA, 19 nt, Artificial Sequence
  Description of Artificial Sequence: Synthetic oligonucleotide
gcuugauaggcaaaaccau

SEQ ID NO: 1660002 - RNA, 19 nt, Artificial Sequence
  Description of Artificial Sequence: Synthetic oligonucleotide
ccaacucucaggcuuccaa

SEQ ID NO: 1660003 - RNA, 19 nt, Artificial Sequence
  Description of Artificial Sequence: Synthetic oligonucleotide
cgcacuuugccgcagcgca

SEQ ID NO: 1660004 - RNA, 19 nt, Artificial Sequence
  Description of Artificial Sequence: Synthetic oligonucleotide
acggggucaccaacucuca

SEQ ID NO: 1660005 - RNA, 19 nt, Artificial Sequence
  Description of Artificial Sequence: Synthetic oligonucleotide
cuucgagcgucagauaguu

SEQ ID NO: 1660006 - RNA, 19 nt, Artificial Sequence
  Description of Artificial Sequence: Synthetic oligonucleotide
uccaugccuggagcuucga

SEQ ID NO: 1660007 - RNA, 19 nt, Artificial Sequence
  Description of Artificial Sequence: Synthetic oligonucleotide
ccucauaauucugaaggua

SEQ ID NO: 1660008 - RNA, 19 nt, Artificial Sequence
  Description of Artificial Sequence: Synthetic oligonucleotide
cuggagcuucgagcgucag

SEQ ID NO: 1660009 - RNA, 19 nt, Artificial Sequence
  Description of Artificial Sequence: Synthetic oligonucleotide
cuccuaggaccuggaagca

SEQ ID NO: 1660010 - RNA, 19 nt, Artificial Sequence
  Description of Artificial Sequence: Synthetic oligonucleotide
ccuuaaccaccauccaaaa

SEQ ID NO: 1660011 - RNA, 19 nt, Artificial Sequence
  Description of Artificial Sequence: Synthetic oligonucleotide
ggaggcucguuuccaggaa

SEQ ID NO: 1660012 - RNA, 19 nt, Artificial Sequence
  Description of Artificial Sequence: Synthetic oligonucleotide
ccauguuaaagcacccggu

SEQ ID NO: 1660013 - RNA, 19 nt, Artificial Sequence
  Description of Artificial Sequence: Synthetic oligonucleotide
cggucucgcacaccgacac

SEQ ID NO: 1660014 - RNA, 19 nt, Artificial Sequence
  Description of Artificial Sequence: Synthetic oligonucleotide
gaccgcggcugcccgggga

SEQ ID NO: 1660015 - RNA, 19 nt, Artificial Sequence
  Description of Artificial Sequence: Synthetic oligonucleotide
gagcuucgagcgucagaua

SEQ ID NO: 1660016 - RNA, 19 nt, Artificial Sequence
  Description of Artificial Sequence: Synthetic oligonucleotide
ggguccacuguggucaaaa

SEQ ID NO: 1660017 - RNA, 19 nt, Artificial Sequence
  Description of Artificial Sequence: Synthetic oligonucleotide
gucgcgcacuuugccgcag

SEQ ID NO: 1660018 - RNA, 19 nt, Artificial Sequence
  Description of Artificial Sequence: Synthetic oligonucleotide
cuggguaggcuaccucaua

SEQ ID NO: 1660019 - RNA, 19 nt, Artificial Sequence
  Description of Artificial Sequence: Synthetic oligonucleotide
aggaggcuucagaaaucaa

SEQ ID NO: 1660020 - RNA, 19 nt, Artificial Sequence
  Description of Artificial Sequence: Synthetic oligonucleotide
accaaccuguagggcugug

SEQ ID NO: 1660021 - RNA, 19 nt, Artificial Sequence
  Description of Artificial Sequence: Synthetic oligonucleotide
cagguggaccgcggcugcc

SEQ ID NO: 1660022 - RNA, 19 nt, Artificial Sequence
  Description of Artificial Sequence: Synthetic oligonucleotide
gccuggagcuucgagcguc

SEQ ID NO: 1660023 - RNA, 19 nt, Artificial Sequence
  Description of Artificial Sequence: Synthetic oligonucleotide
gggacgucugguacaaacu

SEQ ID NO: 1660024 - RNA, 19 nt, Artificial Sequence
  Description of Artificial Sequence: Synthetic oligonucleotide
ccggggacgcacgcgacgc

SEQ ID NO: 1660025 - RNA, 19 nt, Artificial Sequence
  Description of Artificial Sequence: Synthetic oligonucleotide
cgagccagguggaccgcgg

SEQ ID NO: 1660026 - RNA, 19 nt, Artificial Sequence
  Description of Artificial Sequence: Synthetic oligonucleotide
ccuguagggcugugucuuc

SEQ ID NO: 1660027 - RNA, 19 nt, Artificial Sequence
  Description of Artificial Sequence: Synthetic oligonucleotide
agggcgcaggaagcucuga

SEQ ID NO: 1660028 - RNA, 19 nt, Artificial Sequence
  Description of Artificial Sequence: Synthetic oligonucleotide
gggacgcacgcgacgccag

SEQ ID NO: 1660029 - RNA, 19 nt, Artificial Sequence
  Description of Artificial Sequence: Synthetic oligonucleotide
cagugucuggguccacugu

SEQ ID NO: 1660030 - RNA, 19 nt, Artificial Sequence
  Description of Artificial Sequence: Synthetic oligonucleotide
ggguaggcuaccucauaau

SEQ ID NO: 1660031 - RNA, 19 nt, Artificial Sequence
  Description of Artificial Sequence: Synthetic oligonucleotide
aggcagcuugauaggcaaa

SEQ ID NO: 1660032 - RNA, 19 nt, Artificial Sequence
  Description of Artificial Sequence: Synthetic oligonucleotide
caaaaccugucgcgcacuu

SEQ ID NO: 1660033 - RNA, 19 nt, Artificial Sequence
  Description of Artificial Sequence: Synthetic oligonucleotide
gccugguguugagaucagc

SEQ ID NO: 1660034 - RNA, 19 nt, Artificial Sequence
  Description of Artificial Sequence: Synthetic oligonucleotide
gcgcacuuugccgcagcgc

SEQ ID NO: 1660035 - RNA, 19 nt, Artificial Sequence
  Description of Artificial Sequence: Synthetic oligonucleotide
ccgaggcgagccagagcgg

SEQ ID NO: 1660036 - RNA, 19 nt, Artificial Sequence
  Description of Artificial Sequence: Synthetic oligonucleotide
cugcagucguggaucuuau

SEQ ID NO: 1660037 - RNA, 19 nt, Artificial Sequence
  Description of Artificial Sequence: Synthetic oligonucleotide
ggcagcucaacaccuucuu

SEQ ID NO: 1660038 - RNA, 19 nt, Artificial Sequence
  Description of Artificial Sequence: Synthetic oligonucleotide
cgcgcacuuugccgcagcg

SEQ ID NO: 1660039 - RNA, 19 nt, Artificial Sequence
  Description of Artificial Sequence: Synthetic oligonucleotide
ggggacgcacgcgacgcca

SEQ ID NO: 1660040 - RNA, 19 nt, Artificial Sequence
  Description of Artificial Sequence: Synthetic oligonucleotide
gugaaccauugagcaaccu

SEQ ID NO: 1660041 - RNA, 19 nt, Artificial Sequence
  Description of Artificial Sequence: Synthetic oligonucleotide
ggagggccauucagaauaa

SEQ ID NO: 1660042 - RNA, 19 nt, Artificial Sequence
  Description of Artificial Sequence: Synthetic oligonucleotide
ccgagccagguggaccgcg

SEQ ID NO: 1660043 - RNA, 19 nt, Artificial Sequence
  Description of Artificial Sequence: Synthetic oligonucleotide
cagucauggcuggcaguaa

SEQ ID NO: 1660044 - RNA, 19 nt, Artificial Sequence
  Description of Artificial Sequence: Synthetic oligonucleotide
gcacgcgacgccaggccac

SEQ ID NO: 1660045 - RNA, 19 nt, Artificial Sequence
  Description of Artificial Sequence: Synthetic oligonucleotide
gcaccuggggcagcucaac

SEQ ID NO: 1660046 - RNA, 19 nt, Artificial Sequence
  Description of Artificial Sequence: Synthetic oligonucleotide
gcuucgagcgucagauagu

SEQ ID NO: 1660047 - RNA, 19 nt, Artificial Sequence
  Description of Artificial Sequence: Synthetic oligonucleotide
ccgauacacggggucacca

SEQ ID NO: 1660048 - RNA, 19 nt, Artificial Sequence
  Description of Artificial Sequence: Synthetic oligonucleotide
gcacaaggcgaggcuccug

SEQ ID NO: 1660049 - RNA, 19 nt, Artificial Sequence
  Description of Artificial Sequence: Synthetic oligonucleotide
ccucugaugucgagaccaa

SEQ ID NO: 1660050 - RNA, 19 nt, Artificial Sequence
  Description of Artificial Sequence: Synthetic oligonucleotide
ggcgaggcuccuggcgggc

SEQ ID NO: 1660051 - RNA, 19 nt, Artificial Sequence
  Description of Artificial Sequence: Synthetic oligonucleotide
gcgguagcucuucaagguu

SEQ ID NO: 1660052 - RNA, 19 nt, Artificial Sequence
  Description of Artificial Sequence: Synthetic oligonucleotide
cgauacacggggucaccaa

SEQ ID NO: 1660053 - RNA, 19 nt, Artificial Sequence
  Description of Artificial Sequence: Synthetic oligonucleotide
gcaaccucaucgccacaau

SEQ ID NO: 1660054 - RNA, 19 nt, Artificial Sequence
  Description of Artificial Sequence: Synthetic oligonucleotide
cucaggcuuccaacucuuu

SEQ ID NO: 1660055 - RNA, 19 nt, Artificial Sequence
  Description of Artificial Sequence: Synthetic oligonucleotide
ccgccggggacgcacgcga

SEQ ID NO: 1660056 - RNA, 19 nt, Artificial Sequence
  Description of Artificial Sequence: Synthetic oligonucleotide
cgagaccaaauagccugca

SEQ ID NO: 1660057 - RNA, 19 nt, Artificial Sequence
  Description of Artificial Sequence: Synthetic oligonucleotide
cgguagcucuucaagguuu

SEQ ID NO: 1660058 - RNA, 19 nt, Artificial Sequence
  Description of Artificial Sequence: Synthetic oligonucleotide
cgcacgcgacgccaggcca

SEQ ID NO: 1660059 - RNA, 19 nt, Artificial Sequence
  Description of Artificial Sequence: Synthetic oligonucleotide
gcugcccggggaggccgag

SEQ ID NO: 1660060 - RNA, 19 nt, Artificial Sequence
  Description of Artificial Sequence: Synthetic oligonucleotide
ccaaccuguagggcugugu

SEQ ID NO: 1660061 - RNA, 19 nt, Artificial Sequence
  Description of Artificial Sequence: Synthetic oligonucleotide
cgacgaaggcagcuugaua

SEQ ID NO: 1660062 - RNA, 19 nt, Artificial Sequence
  Description of Artificial Sequence: Synthetic oligonucleotide
gcgaggcuccuggcgggca

SEQ ID NO: 1660063 - RNA, 19 nt, Artificial Sequence
  Description of Artificial Sequence: Synthetic oligonucleotide
ccgcggcugcccggggagg

SEQ ID NO: 1660064 - RNA, 19 nt, Artificial Sequence
  Description of Artificial Sequence: Synthetic oligonucleotide
gcggcuccuuccugucuau

SEQ ID NO: 1660065 - RNA, 19 nt, Artificial Sequence
  Description of Artificial Sequence: Synthetic oligonucleotide
ccaugauguuuggccugaa

SEQ ID NO: 1660066 - RNA, 19 nt, Artificial Sequence
  Description of Artificial Sequence: Synthetic oligonucleotide
cgccggggacgcacgcgac

SEQ ID NO: 1660067 - RNA, 19 nt, Artificial Sequence
  Description of Artificial Sequence: Synthetic oligonucleotide
cgacgccgagccaggugga

SEQ ID NO: 1660068 - RNA, 19 nt, Artificial Sequence
  Description of Artificial Sequence: Synthetic oligonucleotide
cgccgccggggacgcacgc

SEQ ID NO: 1660069 - RNA, 19 nt, Artificial Sequence
  Description of Artificial Sequence: Synthetic oligonucleotide
cgucagggcgcaggaagcu

SEQ ID NO: 1660070 - RNA, 19 nt, Artificial Sequence
  Description of Artificial Sequence: Synthetic oligonucleotide
aaggauaagauucagaucu

SEQ ID NO: 1660071 - RNA, 19 nt, Artificial Sequence
  Description of Artificial Sequence: Synthetic oligonucleotide
uuaagaaaagguaugaugu

SEQ ID NO: 1660072 - RNA, 19 nt, Artificial Sequence
  Description of Artificial Sequence: Synthetic oligonucleotide
uagaauaaaguuaauacca

SEQ ID NO: 1660073 - RNA, 19 nt, Artificial Sequence
  Description of Artificial Sequence: Synthetic oligonucleotide
uuaaauuugaauucaacac

SEQ ID NO: 1660074 - RNA, 19 nt, Artificial Sequence
  Description of Artificial Sequence: Synthetic oligonucleotide
aaauuugugggguuuugcc

SEQ ID NO: 1660075 - RNA, 19 nt, Artificial Sequence
  Description of Artificial Sequence: Synthetic oligonucleotide
uaaauuugaauucaacacc

SEQ ID NO: 1660076 - RNA, 19 nt, Artificial Sequence
  Description of Artificial Sequence: Synthetic oligonucleotide
uuaaucauuuuccugauga

SEQ ID NO: 1660077 - RNA, 19 nt, Artificial Sequence
  Description of Artificial Sequence: Synthetic oligonucleotide
ucuuaagcaacccugcugg

SEQ ID NO: 1660078 - RNA, 19 nt, Artificial Sequence
  Description of Artificial Sequence: Synthetic oligonucleotide
aauuugugggguuuugccc

SEQ ID NO: 1660079 - RNA, 19 nt, Artificial Sequence
  Description of Artificial Sequence: Synthetic oligonucleotide
aaagguaugauguaggcau

SEQ ID NO: 1660080 - RNA, 19 nt, Artificial Sequence
  Description of Artificial Sequence: Synthetic oligonucleotide
ugagaauugacauucaaga

SEQ ID NO: 1660081 - RNA, 19 nt, Artificial Sequence
  Description of Artificial Sequence: Synthetic oligonucleotide
uuuaagaaaagguaugaug

SEQ ID NO: 1660082 - RNA, 19 nt, Artificial Sequence
  Description of Artificial Sequence: Synthetic oligonucleotide
uuuagacaguugaagaugg

SEQ ID NO: 1660083 - RNA, 19 nt, Artificial Sequence
  Description of Artificial Sequence: Synthetic oligonucleotide
ugaauucaacaccauaugg

SEQ ID NO: 1660084 - RNA, 19 nt, Artificial Sequence
  Description of Artificial Sequence: Synthetic oligonucleotide
acuucuguaaaauccaaac

SEQ ID NO: 1660085 - RNA, 19 nt, Artificial Sequence
  Description of Artificial Sequence: Synthetic oligonucleotide
auaucugccaggaagaugc

SEQ ID NO: 1660086 - RNA, 19 nt, Artificial Sequence
  Description of Artificial Sequence: Synthetic oligonucleotide
acaacuuuggaguaagcac

SEQ ID NO: 1660087 - RNA, 19 nt, Artificial Sequence
  Description of Artificial Sequence: Synthetic oligonucleotide
uuugaauucaacaccauau

SEQ ID NO: 1660088 - RNA, 19 nt, Artificial Sequence
  Description of Artificial Sequence: Synthetic oligonucleotide
  modified_base (6)..(6): a, c, u, g, unknown or other
aaaacngugcauuucuucu

SEQ ID NO: 1660089 - RNA, 19 nt, Artificial Sequence
  Description of Artificial Sequence: Synthetic oligonucleotide
guaaauuccagguauuucc

SEQ ID NO: 1660090 - RNA, 19 nt, Artificial Sequence
  Description of Artificial Sequence: Synthetic oligonucleotide
aguugaacaacuuuggagu

SEQ ID NO: 1660091 - RNA, 19 nt, Artificial Sequence
  Description of Artificial Sequence: Synthetic oligonucleotide
acaaucauugaacugcaac

SEQ ID NO: 1660092 - RNA, 19 nt, Artificial Sequence
  Description of Artificial Sequence: Synthetic oligonucleotide
aauuaaauuugaauucaac

SEQ ID NO: 1660093 - RNA, 19 nt, Artificial Sequence
  Description of Artificial Sequence: Synthetic oligonucleotide
uuugcuuuagccccaggcg

SEQ ID NO: 1660094 - RNA, 19 nt, Artificial Sequence
  Description of Artificial Sequence: Synthetic oligonucleotide
ugaucauucgaggugaugg

SEQ ID NO: 1660095 - RNA, 19 nt, Artificial Sequence
  Description of Artificial Sequence: Synthetic oligonucleotide
aaggucguaaaacaaucuc

SEQ ID NO: 1660096 - RNA, 19 nt, Artificial Sequence
  Description of Artificial Sequence: Synthetic oligonucleotide
uuuauaucugccaggaaga

SEQ ID NO: 1660097 - RNA, 19 nt, Artificial Sequence
  Description of Artificial Sequence: Synthetic oligonucleotide
aaucucuagcgacaggacg

SEQ ID NO: 1660098 - RNA, 19 nt, Artificial Sequence
  Description of Artificial Sequence: Synthetic oligonucleotide
uuauuagcuaauuaaauuu

SEQ ID NO: 1660099 - RNA, 19 nt, Artificial Sequence
  Description of Artificial Sequence: Synthetic oligonucleotide
aauagcguuguaccccugc

SEQ ID NO: 1660100 - RNA, 19 nt, Artificial Sequence
  Description of Artificial Sequence: Synthetic oligonucleotide
ugaccauaucacaaggucg

SEQ ID NO: 1660101 - RNA, 19 nt, Artificial Sequence
  Description of Artificial Sequence: Synthetic oligonucleotide
agcuaauuaaauuugaauu

SEQ ID NO: 1660102 - RNA, 19 nt, Artificial Sequence
  Description of Artificial Sequence: Synthetic oligonucleotide
agcgacaggacguaaauuc

SEQ ID NO: 1660103 - RNA, 19 nt, Artificial Sequence
  Description of Artificial Sequence: Synthetic oligonucleotide
uuagauaacaggaguggag

SEQ ID NO: 1660104 - RNA, 19 nt, Artificial Sequence
  Description of Artificial Sequence: Synthetic oligonucleotide
ugauguaggcauuaaacca

SEQ ID NO: 1660105 - RNA, 19 nt, Artificial Sequence
  Description of Artificial Sequence: Synthetic oligonucleotide
aauggaaucguuaaggaau

SEQ ID NO: 1660106 - RNA, 19 nt, Artificial Sequence
  Description of Artificial Sequence: Synthetic oligonucleotide
uuuggaguaagcaccagca

SEQ ID NO: 1660107 - RNA, 19 nt, Artificial Sequence
  Description of Artificial Sequence: Synthetic oligonucleotide
uguaaaauccaaaccacuc

SEQ ID NO: 1660108 - RNA, 19 nt, Artificial Sequence
  Description of Artificial Sequence: Synthetic oligonucleotide
uuagccagaaauacuagcu

SEQ ID NO: 1660109 - RNA, 19 nt, Artificial Sequence
  Description of Artificial Sequence: Synthetic oligonucleotide
aagaaaagguaugauguag

SEQ ID NO: 1660110 - RNA, 19 nt, Artificial Sequence
  Description of Artificial Sequence: Synthetic oligonucleotide
ucguaaaacaaucuccaug

SEQ ID NO: 1660111 - RNA, 19 nt, Artificial Sequence
  Description of Artificial Sequence: Synthetic oligonucleotide
cuugauuuauaucugccag

SEQ ID NO: 1660112 - RNA, 19 nt, Artificial Sequence
  Description of Artificial Sequence: Synthetic oligonucleotide
aaauuugaauucaacacca

SEQ ID NO: 1660113 - RNA, 19 nt, Artificial Sequence
  Description of Artificial Sequence: Synthetic oligonucleotide
uguuagauaacaggagugg

SEQ ID NO: 1660114 - RNA, 19 nt, Artificial Sequence
  Description of Artificial Sequence: Synthetic oligonucleotide
aaaacaaucuccaugguua

SEQ ID NO: 1660115 - RNA, 19 nt, Artificial Sequence
  Description of Artificial Sequence: Synthetic oligonucleotide
uucuuuccaaucucuagcg

SEQ ID NO: 1660116 - RNA, 19 nt, Artificial Sequence
  Description of Artificial Sequence: Synthetic oligonucleotide
caacuuuggaguaagcacc

SEQ ID NO: 1660117 - RNA, 19 nt, Artificial Sequence
  Description of Artificial Sequence: Synthetic oligonucleotide
uucuucuuaagcaacccug

SEQ ID NO: 1660118 - RNA, 19 nt, Artificial Sequence
  Description of Artificial Sequence: Synthetic oligonucleotide
uugauuuauaucugccagg

SEQ ID NO: 1660119 - RNA, 19 nt, Artificial Sequence
  Description of Artificial Sequence: Synthetic oligonucleotide
aagggcuucauuuaagaaa

SEQ ID NO: 1660120 - RNA, 19 nt, Artificial Sequence
  Description of Artificial Sequence: Synthetic oligonucleotide
uccaaguagggcauguuag

SEQ ID NO: 1660121 - RNA, 19 nt, Artificial Sequence
  Description of Artificial Sequence: Synthetic oligonucleotide
aaaguuaauaccaaacuuu

SEQ ID NO: 1660122 - RNA, 19 nt, Artificial Sequence
  Description of Artificial Sequence: Synthetic oligonucleotide
agcguuguaccccugcugc

SEQ ID NO: 1660123 - RNA, 19 nt, Artificial Sequence
  Description of Artificial Sequence: Synthetic oligonucleotide
cugggagaagccaauagcg

SEQ ID NO: 1660124 - RNA, 19 nt, Artificial Sequence
  Description of Artificial Sequence: Synthetic oligonucleotide
gugaguuccagccagcuag

SEQ ID NO: 1660125 - RNA, 19 nt, Artificial Sequence
  Description of Artificial Sequence: Synthetic oligonucleotide
uugcuuuagccccaggcgg

SEQ ID NO: 1660126 - RNA, 19 nt, Artificial Sequence
  Description of Artificial Sequence: Synthetic oligonucleotide
accauauggugauaggagg

SEQ ID NO: 1660127 - RNA, 19 nt, Artificial Sequence
  Description of Artificial Sequence: Synthetic oligonucleotide
aagugagugagaucuuguc

SEQ ID NO: 1660128 - RNA, 19 nt, Artificial Sequence
  Description of Artificial Sequence: Synthetic oligonucleotide
gaaaagguaugauguaggc

SEQ ID NO: 1660129 - RNA, 19 nt, Artificial Sequence
  Description of Artificial Sequence: Synthetic oligonucleotide
ucagguugaucauucgagg

SEQ ID NO: 1660130 - RNA, 19 nt, Artificial Sequence
  Description of Artificial Sequence: Synthetic oligonucleotide
gaauugacauucaagaaga

SEQ ID NO: 1660131 - RNA, 19 nt, Artificial Sequence
  Description of Artificial Sequence: Synthetic oligonucleotide
uuguaggucucauugacac

SEQ ID NO: 1660132 - RNA, 19 nt, Artificial Sequence
  Description of Artificial Sequence: Synthetic oligonucleotide
uuugaguucaagccagucu

SEQ ID NO: 1660133 - RNA, 19 nt, Artificial Sequence
  Description of Artificial Sequence: Synthetic oligonucleotide
uuaaaguuauacagaaaau

SEQ ID NO: 1660134 - RNA, 19 nt, Artificial Sequence
  Description of Artificial Sequence: Synthetic oligonucleotide
uguucuuuccaaucucuag

SEQ ID NO: 1660135 - RNA, 19 nt, Artificial Sequence
  Description of Artificial Sequence: Synthetic oligonucleotide
aacagcagauuccuuucuc

SEQ ID NO: 1660136 - RNA, 19 nt, Artificial Sequence
  Description of Artificial Sequence: Synthetic oligonucleotide
aguagggcauguuagauaa

SEQ ID NO: 1660137 - RNA, 19 nt, Artificial Sequence
  Description of Artificial Sequence: Synthetic oligonucleotide
ucuucuuaagcaacccugc

SEQ ID NO: 1660138 - RNA, 19 nt, Artificial Sequence
  Description of Artificial Sequence: Synthetic oligonucleotide
cuuagaucuuuccaaguag

SEQ ID NO: 1660139 - RNA, 19 nt, Artificial Sequence
  Description of Artificial Sequence: Synthetic oligonucleotide
aaggaauuucaccaucaca

SEQ ID NO: 1660140 - RNA, 19 nt, Artificial Sequence
  Description of Artificial Sequence: Synthetic oligonucleotide
aggucguaaaacaaucucc

SEQ ID NO: 1660141 - RNA, 19 nt, Artificial Sequence
  Description of Artificial Sequence: Synthetic oligonucleotide
gauaagauucagaucuuag

SEQ ID NO: 1660142 - RNA, 19 nt, Artificial Sequence
  Description of Artificial Sequence: Synthetic oligonucleotide
aacaccauauggugauagg

SEQ ID NO: 1660143 - RNA, 19 nt, Artificial Sequence
  Description of Artificial Sequence: Synthetic oligonucleotide
cguaaaacaaucuccaugg

SEQ ID NO: 1660144 - RNA, 19 nt, Artificial Sequence
  Description of Artificial Sequence: Synthetic oligonucleotide
uugaccauaucacaagguc

SEQ ID NO: 1660145 - RNA, 19 nt, Artificial Sequence
  Description of Artificial Sequence: Synthetic oligonucleotide
guauagagugcucuccugg

SEQ ID NO: 1660146 - RNA, 19 nt, Artificial Sequence
  Description of Artificial Sequence: Synthetic oligonucleotide
uuagcuaauuaaauuugaa

SEQ ID NO: 1660147 - RNA, 19 nt, Artificial Sequence
  Description of Artificial Sequence: Synthetic oligonucleotide
ugauuuauaucugccagga

SEQ ID NO: 1660148 - RNA, 19 nt, Artificial Sequence
  Description of Artificial Sequence: Synthetic oligonucleotide
cuuagccagaaauacuagc

SEQ ID NO: 1660149 - RNA, 19 nt, Artificial Sequence
  Description of Artificial Sequence: Synthetic oligonucleotide
aacuuugaguucaagccag

SEQ ID NO: 1660150 - RNA, 19 nt, Artificial Sequence
  Description of Artificial Sequence: Synthetic oligonucleotide
uuguugagggccaucaggu

SEQ ID NO: 1660151 - RNA, 19 nt, Artificial Sequence
  Description of Artificial Sequence: Synthetic oligonucleotide
ucuuuagacaguugaagau

SEQ ID NO: 1660152 - RNA, 19 nt, Artificial Sequence
  Description of Artificial Sequence: Synthetic oligonucleotide
cuuuccaaucucuagcgac

SEQ ID NO: 1660153 - RNA, 19 nt, Artificial Sequence
  Description of Artificial Sequence: Synthetic oligonucleotide
uccuuagccagaaauacua

SEQ ID NO: 1660154 - RNA, 19 nt, Artificial Sequence
  Description of Artificial Sequence: Synthetic oligonucleotide
gaucauucgaggugauggg

SEQ ID NO: 1660155 - RNA, 19 nt, Artificial Sequence
  Description of Artificial Sequence: Synthetic oligonucleotide
cauuucuucuuaagcaacc

SEQ ID NO: 1660156 - RNA, 19 nt, Artificial Sequence
  Description of Artificial Sequence: Synthetic oligonucleotide
agaaaagguaugauguagg

SEQ ID NO: 1660157 - RNA, 19 nt, Artificial Sequence
  Description of Artificial Sequence: Synthetic oligonucleotide
uccuuuuccagaaucugac

SEQ ID NO: 1660158 - RNA, 19 nt, Artificial Sequence
  Description of Artificial Sequence: Synthetic oligonucleotide
agcauuaaucauuuuccug

SEQ ID NO: 1660159 - RNA, 19 nt, Artificial Sequence
  Description of Artificial Sequence: Synthetic oligonucleotide
uuuccaaucucuagcgaca

SEQ ID NO: 1660160 - RNA, 19 nt, Artificial Sequence
  Description of Artificial Sequence: Synthetic oligonucleotide
uccacaauggaaucguuaa

SEQ ID NO: 1660161 - RNA, 19 nt, Artificial Sequence
  Description of Artificial Sequence: Synthetic oligonucleotide
aggauccuuuuccagaauc

SEQ ID NO: 1660162 - RNA, 19 nt, Artificial Sequence
  Description of Artificial Sequence: Synthetic oligonucleotide
ugaacaacuuuggaguaag

SEQ ID NO: 1660163 - RNA, 19 nt, Artificial Sequence
  Description of Artificial Sequence: Synthetic oligonucleotide
uagcuaauuaaauuugaau

SEQ ID NO: 1660164 - RNA, 19 nt, Artificial Sequence
  Description of Artificial Sequence: Synthetic oligonucleotide
auguacuuaaaguuauaca

SEQ ID NO: 1660165 - RNA, 19 nt, Artificial Sequence
  Description of Artificial Sequence: Synthetic oligonucleotide
gucugcucuacauagugag

SEQ ID NO: 1660166 - RNA, 19 nt, Artificial Sequence
  Description of Artificial Sequence: Synthetic oligonucleotide
aauacuagcuuuccugcuu

SEQ ID NO: 1660167 - RNA, 19 nt, Artificial Sequence
  Description of Artificial Sequence: Synthetic oligonucleotide
uggagaacugcuugcaagc

SEQ ID NO: 1660168 - RNA, 19 nt, Artificial Sequence
  Description of Artificial Sequence: Synthetic oligonucleotide
ucagaucuuagaucuuucc

SEQ ID NO: 1660169 - RNA, 19 nt, Artificial Sequence
  Description of Artificial Sequence: Synthetic oligonucleotide
guccauuugcuuuagcccc

SEQ ID NO: 1660170 - RNA, 19 nt, Artificial Sequence
  Description of Artificial Sequence: Synthetic oligonucleotide
auuugugggguuuugcccu

SEQ ID NO: 1660171 - RNA, 19 nt, Artificial Sequence
  Description of Artificial Sequence: Synthetic oligonucleotide
caaucauugaacugcaaca

SEQ ID NO: 1660172 - RNA, 19 nt, Artificial Sequence
  Description of Artificial Sequence: Synthetic oligonucleotide
uaagcaacccugcuggcac

SEQ ID NO: 1660173 - RNA, 19 nt, Artificial Sequence
  Description of Artificial Sequence: Synthetic oligonucleotide
aaaagguaugauguaggca

SEQ ID NO: 1660174 - RNA, 19 nt, Artificial Sequence
  Description of Artificial Sequence: Synthetic oligonucleotide
uuuccugaugaagucacag

SEQ ID NO: 1660175 - RNA, 19 nt, Artificial Sequence
  Description of Artificial Sequence: Synthetic oligonucleotide
agcuagauuagaguugagg

SEQ ID NO: 1660176 - RNA, 19 nt, Artificial Sequence
  Description of Artificial Sequence: Synthetic oligonucleotide
agccaauagcguuguaccc

SEQ ID NO: 1660177 - RNA, 19 nt, Artificial Sequence
  Description of Artificial Sequence: Synthetic oligonucleotide
uucaacaccauauggugau

SEQ ID NO: 1660178 - RNA, 19 nt, Artificial Sequence
  Description of Artificial Sequence: Synthetic oligonucleotide
agugagugagaucuugucu

SEQ ID NO: 1660179 - RNA, 19 nt, Artificial Sequence
  Description of Artificial Sequence: Synthetic oligonucleotide
agauuccuuucucaagagg

SEQ ID NO: 1660180 - RNA, 19 nt, Artificial Sequence
  Description of Artificial Sequence: Synthetic oligonucleotide
ucauucgaggugaugggca

SEQ ID NO: 1660181 - RNA, 19 nt, Artificial Sequence
  Description of Artificial Sequence: Synthetic oligonucleotide
aacuuaggauccuuuucca

SEQ ID NO: 1660182 - RNA, 19 nt, Artificial Sequence
  Description of Artificial Sequence: Synthetic oligonucleotide
auaacaggaguggagaacu

SEQ ID NO: 1660183 - RNA, 19 nt, Artificial Sequence
  Description of Artificial Sequence: Synthetic oligonucleotide
gaaucguuaaggaauuuca

SEQ ID NO: 1660184 - RNA, 19 nt, Artificial Sequence
  Description of Artificial Sequence: Synthetic oligonucleotide
ccagcauuaaucauuuucc

SEQ ID NO: 1660185 - RNA, 19 nt, Artificial Sequence
  Description of Artificial Sequence: Synthetic oligonucleotide
acaaggucguaaaacaauc

SEQ ID NO: 1660186 - RNA, 19 nt, Artificial Sequence
  Description of Artificial Sequence: Synthetic oligonucleotide
gcauuaaucauuuuccuga

SEQ ID NO: 1660187 - RNA, 19 nt, Artificial Sequence
  Description of Artificial Sequence: Synthetic oligonucleotide
gaagcuugaccauaucaca

SEQ ID NO: 1660188 - RNA, 19 nt, Artificial Sequence
  Description of Artificial Sequence: Synthetic oligonucleotide
uuagcuuggccacuucugu

SEQ ID NO: 1660189 - RNA, 19 nt, Artificial Sequence
  Description of Artificial Sequence: Synthetic oligonucleotide
aggaagcuugaccauauca

SEQ ID NO: 1660190 - RNA, 19 nt, Artificial Sequence
  Description of Artificial Sequence: Synthetic oligonucleotide
aggggaaugguuuccuuag

SEQ ID NO: 1660191 - RNA, 19 nt, Artificial Sequence
  Description of Artificial Sequence: Synthetic oligonucleotide
ggcacaaucauugaacugc

SEQ ID NO: 1660192 - RNA, 19 nt, Artificial Sequence
  Description of Artificial Sequence: Synthetic oligonucleotide
uagauuagaguugaggguu

SEQ ID NO: 1660193 - RNA, 19 nt, Artificial Sequence
  Description of Artificial Sequence: Synthetic oligonucleotide
auaccaaacuuugaguuca

SEQ ID NO: 1660194 - RNA, 19 nt, Artificial Sequence
  Description of Artificial Sequence: Synthetic oligonucleotide
  modified_base (4)..(4): a, c, u, g, unknown or other
aacngugcauuucuucuua

SEQ ID NO: 1660195 - RNA, 19 nt, Artificial Sequence
  Description of Artificial Sequence: Synthetic oligonucleotide
uauuugcuccaaauuugug

SEQ ID NO: 1660196 - RNA, 19 nt, Artificial Sequence
  Description of Artificial Sequence: Synthetic oligonucleotide
cauugaacugcaacagcag

SEQ ID NO: 1660197 - RNA, 19 nt, Artificial Sequence
  Description of Artificial Sequence: Synthetic oligonucleotide
aucauucgaggugaugggc

SEQ ID NO: 1660198 - RNA, 19 nt, Artificial Sequence
  Description of Artificial Sequence: Synthetic oligonucleotide
aucagguugaucauucgag

SEQ ID NO: 1660199 - RNA, 19 nt, Artificial Sequence
  Description of Artificial Sequence: Synthetic oligonucleotide
uuuuggaagagcugggguu

SEQ ID NO: 1660200 - RNA, 19 nt, Artificial Sequence
  Description of Artificial Sequence: Synthetic oligonucleotide
uaaggaauuucaccaucac

SEQ ID NO: 1660201 - RNA, 19 nt, Artificial Sequence
  Description of Artificial Sequence: Synthetic oligonucleotide
agguugaucauucgaggug

SEQ ID NO: 1660202 - RNA, 19 nt, Artificial Sequence
  Description of Artificial Sequence: Synthetic oligonucleotide
guaggucucauugacacac

SEQ ID NO: 1660203 - RNA, 19 nt, Artificial Sequence
  Description of Artificial Sequence: Synthetic oligonucleotide
acuuaggauccuuuuccag

SEQ ID NO: 1660204 - RNA, 19 nt, Artificial Sequence
  Description of Artificial Sequence: Synthetic oligonucleotide
caaaggauaagauucagau

SEQ ID NO: 1660205 - RNA, 19 nt, Artificial Sequence
  Description of Artificial Sequence: Synthetic oligonucleotide
aaucugacacaccaucauu

SEQ ID NO: 1660206 - RNA, 19 nt, Artificial Sequence
  Description of Artificial Sequence: Synthetic oligonucleotide
ucauuacuugagaauugac

SEQ ID NO: 1660207 - RNA, 19 nt, Artificial Sequence
  Description of Artificial Sequence: Synthetic oligonucleotide
uggaguaagcaccagcauu

SEQ ID NO: 1660208 - RNA, 19 nt, Artificial Sequence
  Description of Artificial Sequence: Synthetic oligonucleotide
uaagaaaagguaugaugua

SEQ ID NO: 1660209 - RNA, 19 nt, Artificial Sequence
  Description of Artificial Sequence: Synthetic oligonucleotide
aacuuguugagggccauca

SEQ ID NO: 1660210 - RNA, 19 nt, Artificial Sequence
  Description of Artificial Sequence: Synthetic oligonucleotide
auuugaauucaacaccaua

SEQ ID NO: 1660211 - RNA, 19 nt, Artificial Sequence
  Description of Artificial Sequence: Synthetic oligonucleotide
uccucuguguauagagugc

SEQ ID NO: 1660212 - RNA, 19 nt, Artificial Sequence
  Description of Artificial Sequence: Synthetic oligonucleotide
ugugguuucgguacacauc

SEQ ID NO: 1660213 - RNA, 19 nt, Artificial Sequence
  Description of Artificial Sequence: Synthetic oligonucleotide
guccucuguguauagagug

SEQ ID NO: 1660214 - RNA, 19 nt, Artificial Sequence
  Description of Artificial Sequence: Synthetic oligonucleotide
uguauagagugcucuccug

SEQ ID NO: 1660215 - RNA, 19 nt, Artificial Sequence
  Description of Artificial Sequence: Synthetic oligonucleotide
acaggacguaaauuccagg

SEQ ID NO: 1660216 - RNA, 19 nt, Artificial Sequence
  Description of Artificial Sequence: Synthetic oligonucleotide
accucucuugauuuauauc

SEQ ID NO: 1660217 - RNA, 19 nt, Artificial Sequence
  Description of Artificial Sequence: Synthetic oligonucleotide
  modified_base (5)..(5): a, c, u, g, unknown or other
aaacngugcauuucuucuu

SEQ ID NO: 1660218 - RNA, 19 nt, Artificial Sequence
  Description of Artificial Sequence: Synthetic oligonucleotide
cuuagcuuggccacuucug

SEQ ID NO: 1660219 - RNA, 19 nt, Artificial Sequence
  Description of Artificial Sequence: Synthetic oligonucleotide
auuaaucauuuuccugaug

SEQ ID NO: 1660220 - RNA, 19 nt, Artificial Sequence
  Description of Artificial Sequence: Synthetic oligonucleotide
ugaguuccagccagcuagg

SEQ ID NO: 1660221 - RNA, 19 nt, Artificial Sequence
  Description of Artificial Sequence: Synthetic oligonucleotide
gggcauguuagauaacagg

SEQ ID NO: 1660222 - RNA, 19 nt, Artificial Sequence
  Description of Artificial Sequence: Synthetic oligonucleotide
guuuccuuagcuuggccac

SEQ ID NO: 1660223 - RNA, 19 nt, Artificial Sequence
  Description of Artificial Sequence: Synthetic oligonucleotide
auuagcuaauuaaauuuga

SEQ ID NO: 1660224 - RNA, 19 nt, Artificial Sequence
  Description of Artificial Sequence: Synthetic oligonucleotide
gauaacaggaguggagaac

SEQ ID NO: 1660225 - RNA, 19 nt, Artificial Sequence
  Description of Artificial Sequence: Synthetic oligonucleotide
gaucagguugaucauucga

SEQ ID NO: 1660226 - RNA, 19 nt, Artificial Sequence
  Description of Artificial Sequence: Synthetic oligonucleotide
ugaguucaagccagucugc

SEQ ID NO: 1660227 - RNA, 19 nt, Artificial Sequence
  Description of Artificial Sequence: Synthetic oligonucleotide
gguauuuccuuuucaacca

SEQ ID NO: 1660228 - RNA, 19 nt, Artificial Sequence
  Description of Artificial Sequence: Synthetic oligonucleotide
auagagugcucuccuggag

SEQ ID NO: 1660229 - RNA, 19 nt, Artificial Sequence
  Description of Artificial Sequence: Synthetic oligonucleotide
auguuagauaacaggagug

SEQ ID NO: 1660230 - RNA, 19 nt, Artificial Sequence
  Description of Artificial Sequence: Synthetic oligonucleotide
agaucagguugaucauucg

SEQ ID NO: 1660231 - RNA, 19 nt, Artificial Sequence
  Description of Artificial Sequence: Synthetic oligonucleotide
aaguagggcauguuagaua

SEQ ID NO: 1660232 - RNA, 19 nt, Artificial Sequence
  Description of Artificial Sequence: Synthetic oligonucleotide
gaauucaacaccauauggu

SEQ ID NO: 1660233 - RNA, 19 nt, Artificial Sequence
  Description of Artificial Sequence: Synthetic oligonucleotide
ugggagaagccaauagcgu

SEQ ID NO: 1660234 - RNA, 19 nt, Artificial Sequence
  Description of Artificial Sequence: Synthetic oligonucleotide
gauggggucaugccaguac

SEQ ID NO: 1660235 - RNA, 19 nt, Artificial Sequence
  Description of Artificial Sequence: Synthetic oligonucleotide
ucuuuccaaucucuagcga

SEQ ID NO: 1660236 - RNA, 19 nt, Artificial Sequence
  Description of Artificial Sequence: Synthetic oligonucleotide
agucacagacaugugagcu

SEQ ID NO: 1660237 - RNA, 19 nt, Artificial Sequence
  Description of Artificial Sequence: Synthetic oligonucleotide
aaagugagugagaucuugu

SEQ ID NO: 1660238 - RNA, 19 nt, Artificial Sequence
  Description of Artificial Sequence: Synthetic oligonucleotide
gagucuacaggauccacaa

SEQ ID NO: 1660239 - RNA, 19 nt, Artificial Sequence
  Description of Artificial Sequence: Synthetic oligonucleotide
ucuagcgacaggacguaaa

SEQ ID NO: 1660240 - RNA, 19 nt, Artificial Sequence
  Description of Artificial Sequence: Synthetic oligonucleotide
aucauuacuugagaauuga

SEQ ID NO: 1660241 - RNA, 19 nt, Artificial Sequence
  Description of Artificial Sequence: Synthetic oligonucleotide
gacaggacguaaauuccag

SEQ ID NO: 1660242 - RNA, 19 nt, Artificial Sequence
  Description of Artificial Sequence: Synthetic oligonucleotide
aggauccacaauggaaucg

SEQ ID NO: 1660243 - RNA, 19 nt, Artificial Sequence
  Description of Artificial Sequence: Synthetic oligonucleotide
uuaagcaacccugcuggca

SEQ ID NO: 1660244 - RNA, 19 nt, Artificial Sequence
  Description of Artificial Sequence: Synthetic oligonucleotide
uagacaguugaagaugguc

SEQ ID NO: 1660245 - RNA, 19 nt, Artificial Sequence
  Description of Artificial Sequence: Synthetic oligonucleotide
acaaucuccaugguuauua

SEQ ID NO: 1660246 - RNA, 19 nt, Artificial Sequence
  Description of Artificial Sequence: Synthetic oligonucleotide
uaccccugcugcaacuuag

SEQ ID NO: 1660247 - RNA, 19 nt, Artificial Sequence
  Description of Artificial Sequence: Synthetic oligonucleotide
ggguuuugcccuuagugcc

SEQ ID NO: 1660248 - RNA, 19 nt, Artificial Sequence
  Description of Artificial Sequence: Synthetic oligonucleotide
gggguuuugcccuuagugc

SEQ ID NO: 1660249 - RNA, 19 nt, Artificial Sequence
  Description of Artificial Sequence: Synthetic oligonucleotide
acugcuugcaagcuagauu

SEQ ID NO: 1660250 - RNA, 19 nt, Artificial Sequence
  Description of Artificial Sequence: Synthetic oligonucleotide
gugagugagaucuugucua

SEQ ID NO: 1660251 - RNA, 19 nt, Artificial Sequence
  Description of Artificial Sequence: Synthetic oligonucleotide
cauaucacaaggucguaaa

SEQ ID NO: 1660252 - RNA, 19 nt, Artificial Sequence
  Description of Artificial Sequence: Synthetic oligonucleotide
acaccauauggugauagga

SEQ ID NO: 1660253 - RNA, 19 nt, Artificial Sequence
  Description of Artificial Sequence: Synthetic oligonucleotide
gugguuucgguacacaucu

SEQ ID NO: 1660254 - RNA, 19 nt, Artificial Sequence
  Description of Artificial Sequence: Synthetic oligonucleotide
gagaucagguugaucauuc

SEQ ID NO: 1660255 - RNA, 19 nt, Artificial Sequence
  Description of Artificial Sequence: Synthetic oligonucleotide
uccaaucucuagcgacagg

SEQ ID NO: 1660256 - RNA, 19 nt, Artificial Sequence
  Description of Artificial Sequence: Synthetic oligonucleotide
agaguugaggguugggcau

SEQ ID NO: 1660257 - RNA, 19 nt, Artificial Sequence
  Description of Artificial Sequence: Synthetic oligonucleotide
uccauuugcuuuagcccca

SEQ ID NO: 1660258 - RNA, 19 nt, Artificial Sequence
  Description of Artificial Sequence: Synthetic oligonucleotide
ggcauguuagauaacagga

SEQ ID NO: 1660259 - RNA, 19 nt, Artificial Sequence
  Description of Artificial Sequence: Synthetic oligonucleotide
acaccaucauuacuugaga

SEQ ID NO: 1660260 - RNA, 19 nt, Artificial Sequence
  Description of Artificial Sequence: Synthetic oligonucleotide
uuuuccugaugaagucaca

SEQ ID NO: 1660261 - RNA, 19 nt, Artificial Sequence
  Description of Artificial Sequence: Synthetic oligonucleotide
aagcuugaccauaucacaa

SEQ ID NO: 1660262 - RNA, 19 nt, Artificial Sequence
  Description of Artificial Sequence: Synthetic oligonucleotide
cauguuagauaacaggagu

SEQ ID NO: 1660263 - RNA, 19 nt, Artificial Sequence
  Description of Artificial Sequence: Synthetic oligonucleotide
uuccaaucucuagcgacag

SEQ ID NO: 1660264 - RNA, 19 nt, Artificial Sequence
  Description of Artificial Sequence: Synthetic oligonucleotide
ugcuuuagccccaggcggu

SEQ ID NO: 1660265 - RNA, 19 nt, Artificial Sequence
  Description of Artificial Sequence: Synthetic oligonucleotide
  modified_base (2)..(2): a, c, u, g, unknown or other
cngugcauuucuucuuaag

SEQ ID NO: 1660266 - RNA, 19 nt, Artificial Sequence
  Description of Artificial Sequence: Synthetic oligonucleotide
caagcuagauuagaguuga

SEQ ID NO: 1660267 - RNA, 19 nt, Artificial Sequence
  Description of Artificial Sequence: Synthetic oligonucleotide
uguaggcauuaaaccauuc

SEQ ID NO: 1660268 - RNA, 19 nt, Artificial Sequence
  Description of Artificial Sequence: Synthetic oligonucleotide
uguaggucucauugacaca

SEQ ID NO: 1660269 - RNA, 19 nt, Artificial Sequence
  Description of Artificial Sequence: Synthetic oligonucleotide
ggaagcuugaccauaucac

SEQ ID NO: 1660270 - RNA, 19 nt, Artificial Sequence
  Description of Artificial Sequence: Synthetic oligonucleotide
ugugccugcaccaggcgua

SEQ ID NO: 1660271 - RNA, 19 nt, Artificial Sequence
  Description of Artificial Sequence: Synthetic oligonucleotide
ggugauaggaggcagcaaa

SEQ ID NO: 1660272 - RNA, 19 nt, Artificial Sequence
  Description of Artificial Sequence: Synthetic oligonucleotide
uagcguuguaccccugcug

SEQ ID NO: 1660273 - RNA, 19 nt, Artificial Sequence
  Description of Artificial Sequence: Synthetic oligonucleotide
augccaguacugugccugc

SEQ ID NO: 1660274 - RNA, 19 nt, Artificial Sequence
  Description of Artificial Sequence: Synthetic oligonucleotide
uccuggaggggaaugguuu

SEQ ID NO: 1660275 - RNA, 19 nt, Artificial Sequence
  Description of Artificial Sequence: Synthetic oligonucleotide
guuagauaacaggagugga

SEQ ID NO: 1660276 - RNA, 19 nt, Artificial Sequence
  Description of Artificial Sequence: Synthetic oligonucleotide
ccauauggugauaggaggc

SEQ ID NO: 1660277 - RNA, 19 nt, Artificial Sequence
  Description of Artificial Sequence: Synthetic oligonucleotide
uucgaggugaugggcaucu

SEQ ID NO: 1660278 - RNA, 19 nt, Artificial Sequence
  Description of Artificial Sequence: Synthetic oligonucleotide
agaaucugacacaccauca

SEQ ID NO: 1660279 - RNA, 19 nt, Artificial Sequence
  Description of Artificial Sequence: Synthetic oligonucleotide
gaggccaaagacuccuuga

SEQ ID NO: 1660280 - RNA, 19 nt, Artificial Sequence
  Description of Artificial Sequence: Synthetic oligonucleotide
auagcguuguaccccugcu

SEQ ID NO: 1660281 - RNA, 19 nt, Artificial Sequence
  Description of Artificial Sequence: Synthetic oligonucleotide
uuuccugagcucugcugca

SEQ ID NO: 1660282 - RNA, 19 nt, Artificial Sequence
  Description of Artificial Sequence: Synthetic oligonucleotide
ugcuugcaagcuagauuag

SEQ ID NO: 1660283 - RNA, 19 nt, Artificial Sequence
  Description of Artificial Sequence: Synthetic oligonucleotide
cuuaagcaacccugcuggc

SEQ ID NO: 1660284 - RNA, 19 nt, Artificial Sequence
  Description of Artificial Sequence: Synthetic oligonucleotide
cuagauuagaguugagggu

SEQ ID NO: 1660285 - RNA, 19 nt, Artificial Sequence
  Description of Artificial Sequence: Synthetic oligonucleotide
auucaacaccauaugguga

SEQ ID NO: 1660286 - RNA, 19 nt, Artificial Sequence
  Description of Artificial Sequence: Synthetic oligonucleotide
caccugggcuuuuauuugc

SEQ ID NO: 1660287 - RNA, 19 nt, Artificial Sequence
  Description of Artificial Sequence: Synthetic oligonucleotide
ugugggguuuugcccuuag

SEQ ID NO: 1660288 - RNA, 19 nt, Artificial Sequence
  Description of Artificial Sequence: Synthetic oligonucleotide
uuggaguaagcaccagcau

SEQ ID NO: 1660289 - RNA, 19 nt, Artificial Sequence
  Description of Artificial Sequence: Synthetic oligonucleotide
ucuccaugguuauuagcua

SEQ ID NO: 1660290 - RNA, 19 nt, Artificial Sequence
  Description of Artificial Sequence: Synthetic oligonucleotide
aggacguaaauuccaggua

SEQ ID NO: 1660291 - RNA, 19 nt, Artificial Sequence
  Description of Artificial Sequence: Synthetic oligonucleotide
uuagugccugucucccugc

SEQ ID NO: 1660292 - RNA, 19 nt, Artificial Sequence
  Description of Artificial Sequence: Synthetic oligonucleotide
gugauaggaggcagcaaag

SEQ ID NO: 1660293 - RNA, 19 nt, Artificial Sequence
  Description of Artificial Sequence: Synthetic oligonucleotide
uuuagccccaggcgguccu

SEQ ID NO: 1660294 - RNA, 19 nt, Artificial Sequence
  Description of Artificial Sequence: Synthetic oligonucleotide
auacuagcuuuccugcuuu

SEQ ID NO: 1660295 - RNA, 19 nt, Artificial Sequence
  Description of Artificial Sequence: Synthetic oligonucleotide
gcguaguugaacaacuuug

SEQ ID NO: 1660296 - RNA, 19 nt, Artificial Sequence
  Description of Artificial Sequence: Synthetic oligonucleotide
cuguguauagagugcucuc

SEQ ID NO: 1660297 - RNA, 19 nt, Artificial Sequence
  Description of Artificial Sequence: Synthetic oligonucleotide
guaugauguaggcauuaaa

SEQ ID NO: 1660298 - RNA, 19 nt, Artificial Sequence
  Description of Artificial Sequence: Synthetic oligonucleotide
agagucuacaggauccaca

SEQ ID NO: 1660299 - RNA, 19 nt, Artificial Sequence
  Description of Artificial Sequence: Synthetic oligonucleotide
gcauguuagauaacaggag

SEQ ID NO: 1660300 - RNA, 19 nt, Artificial Sequence
  Description of Artificial Sequence: Synthetic oligonucleotide
ggucguaaaacaaucucca

SEQ ID NO: 1660301 - RNA, 19 nt, Artificial Sequence
  Description of Artificial Sequence: Synthetic oligonucleotide
uggggucaugccaguacug

SEQ ID NO: 1660302 - RNA, 19 nt, Artificial Sequence
  Description of Artificial Sequence: Synthetic oligonucleotide
ucagagucuacaggaucca

SEQ ID NO: 1660303 - RNA, 19 nt, Artificial Sequence
  Description of Artificial Sequence: Synthetic oligonucleotide
aggccaaagacuccuugau

SEQ ID NO: 1660304 - RNA, 19 nt, Artificial Sequence
  Description of Artificial Sequence: Synthetic oligonucleotide
gaccauaucacaaggucgu

SEQ ID NO: 1660305 - RNA, 19 nt, Artificial Sequence
  Description of Artificial Sequence: Synthetic oligonucleotide
ggaguggagaacugcuugc

SEQ ID NO: 1660306 - RNA, 19 nt, Artificial Sequence
  Description of Artificial Sequence: Synthetic oligonucleotide
caaaccacucagagucuac

SEQ ID NO: 1660307 - RNA, 19 nt, Artificial Sequence
  Description of Artificial Sequence: Synthetic oligonucleotide
guaggcauuaaaccauucu

SEQ ID NO: 1660308 - RNA, 19 nt, Artificial Sequence
  Description of Artificial Sequence: Synthetic oligonucleotide
ccucucuugauuuauaucu

SEQ ID NO: 1660309 - RNA, 19 nt, Artificial Sequence
  Description of Artificial Sequence: Synthetic oligonucleotide
gucacagacaugugagcuc

SEQ ID NO: 1660310 - RNA, 19 nt, Artificial Sequence
  Description of Artificial Sequence: Synthetic oligonucleotide
gguuucgguacacaucuuc

SEQ ID NO: 1660311 - RNA, 19 nt, Artificial Sequence
  Description of Artificial Sequence: Synthetic oligonucleotide
aucugacacaccaucauua

SEQ ID NO: 1660312 - RNA, 19 nt, Artificial Sequence
  Description of Artificial Sequence: Synthetic oligonucleotide
cuacaaagugagugagauc

SEQ ID NO: 1660313 - RNA, 19 nt, Artificial Sequence
  Description of Artificial Sequence: Synthetic oligonucleotide
ccauucuuuagacaguuga

SEQ ID NO: 1660314 - RNA, 19 nt, Artificial Sequence
  Description of Artificial Sequence: Synthetic oligonucleotide
acacaccaucauuacuuga

SEQ ID NO: 1660315 - RNA, 19 nt, Artificial Sequence
  Description of Artificial Sequence: Synthetic oligonucleotide
aguaagcaccagcauuaau

SEQ ID NO: 1660316 - RNA, 19 nt, Artificial Sequence
  Description of Artificial Sequence: Synthetic oligonucleotide
aauugacauucaagaagaa

SEQ ID NO: 1660317 - RNA, 19 nt, Artificial Sequence
  Description of Artificial Sequence: Synthetic oligonucleotide
aguugaggguugggcaugg

SEQ ID NO: 1660318 - RNA, 19 nt, Artificial Sequence
  Description of Artificial Sequence: Synthetic oligonucleotide
gacaugugagcucucuccu

SEQ ID NO: 1660319 - RNA, 19 nt, Artificial Sequence
  Description of Artificial Sequence: Synthetic oligonucleotide
caggauccacaauggaauc

SEQ ID NO: 1660320 - RNA, 19 nt, Artificial Sequence
  Description of Artificial Sequence: Synthetic oligonucleotide
agauuagaguugaggguug

SEQ ID NO: 1660321 - RNA, 19 nt, Artificial Sequence
  Description of Artificial Sequence: Synthetic oligonucleotide
gcaacuuaggauccuuuuc

SEQ ID NO: 1660322 - RNA, 19 nt, Artificial Sequence
  Description of Artificial Sequence: Synthetic oligonucleotide
gguugaucauucgagguga

SEQ ID NO: 1660323 - RNA, 19 nt, Artificial Sequence
  Description of Artificial Sequence: Synthetic oligonucleotide
agggcauguuagauaacag

SEQ ID NO: 1660324 - RNA, 19 nt, Artificial Sequence
  Description of Artificial Sequence: Synthetic oligonucleotide
cauauggugauaggaggca

SEQ ID NO: 1660325 - RNA, 19 nt, Artificial Sequence
  Description of Artificial Sequence: Synthetic oligonucleotide
ggaaucguuaaggaauuuc

SEQ ID NO: 1660326 - RNA, 19 nt, Artificial Sequence
  Description of Artificial Sequence: Synthetic oligonucleotide
uacuagcuuuccugcuuug

SEQ ID NO: 1660327 - RNA, 19 nt, Artificial Sequence
  Description of Artificial Sequence: Synthetic oligonucleotide
cuuugaguucaagccaguc

SEQ ID NO: 1660328 - RNA, 19 nt, Artificial Sequence
  Description of Artificial Sequence: Synthetic oligonucleotide
cuccaugguuauuagcuaa

SEQ ID NO: 1660329 - RNA, 19 nt, Artificial Sequence
  Description of Artificial Sequence: Synthetic oligonucleotide
acagacaugugagcucucu

SEQ ID NO: 1660330 - RNA, 19 nt, Artificial Sequence
  Description of Artificial Sequence: Synthetic oligonucleotide
ggccacugcccucagaaac

SEQ ID NO: 1660331 - RNA, 19 nt, Artificial Sequence
  Description of Artificial Sequence: Synthetic oligonucleotide
gccaauagcguuguacccc

SEQ ID NO: 1660332 - RNA, 19 nt, Artificial Sequence
  Description of Artificial Sequence: Synthetic oligonucleotide
gcaagcuagauuagaguug

SEQ ID NO: 1660333 - RNA, 19 nt, Artificial Sequence
  Description of Artificial Sequence: Synthetic oligonucleotide
uagugaguuccagccagcu

SEQ ID NO: 1660334 - RNA, 19 nt, Artificial Sequence
  Description of Artificial Sequence: Synthetic oligonucleotide
ucucaagaggaagcuugac

SEQ ID NO: 1660335 - RNA, 19 nt, Artificial Sequence
  Description of Artificial Sequence: Synthetic oligonucleotide
guuguaccccugcugcaac

SEQ ID NO: 1660336 - RNA, 19 nt, Artificial Sequence
  Description of Artificial Sequence: Synthetic oligonucleotide
uuguaccccugcugcaacu

SEQ ID NO: 1660337 - RNA, 19 nt, Artificial Sequence
  Description of Artificial Sequence: Synthetic oligonucleotide
  modified_base (3)..(3): a, c, u, g, unknown or other
acngugcauuucuucuuaa

SEQ ID NO: 1660338 - RNA, 19 nt, Artificial Sequence
  Description of Artificial Sequence: Synthetic oligonucleotide
gaguugaggguugggcaug

SEQ ID NO: 1660339 - RNA, 19 nt, Artificial Sequence
  Description of Artificial Sequence: Synthetic oligonucleotide
gagaacugcuugcaagcua

SEQ ID NO: 1660340 - RNA, 19 nt, Artificial Sequence
  Description of Artificial Sequence: Synthetic oligonucleotide
caccaucauuacuugagaa

SEQ ID NO: 1660341 - RNA, 19 nt, Artificial Sequence
  Description of Artificial Sequence: Synthetic oligonucleotide
caccaggcguaguugaaca

SEQ ID NO: 1660342 - RNA, 19 nt, Artificial Sequence
  Description of Artificial Sequence: Synthetic oligonucleotide
ugcaccaggcguaguugaa

SEQ ID NO: 1660343 - RNA, 19 nt, Artificial Sequence
  Description of Artificial Sequence: Synthetic oligonucleotide
uccaaauuugugggguuuu

SEQ ID NO: 1660344 - RNA, 19 nt, Artificial Sequence
  Description of Artificial Sequence: Synthetic oligonucleotide
auucgaggugaugggcauc

SEQ ID NO: 1660345 - RNA, 19 nt, Artificial Sequence
  Description of Artificial Sequence: Synthetic oligonucleotide
ucuuuccaaguagggcaug

SEQ ID NO: 1660346 - RNA, 19 nt, Artificial Sequence
  Description of Artificial Sequence: Synthetic oligonucleotide
acguaaauuccagguauuu

SEQ ID NO: 1660347 - RNA, 19 nt, Artificial Sequence
  Description of Artificial Sequence: Synthetic oligonucleotide
ggaauuucaccaucacaaa

SEQ ID NO: 1660348 - RNA, 19 nt, Artificial Sequence
  Description of Artificial Sequence: Synthetic oligonucleotide
agaggaagcuugaccauau

SEQ ID NO: 1660349 - RNA, 19 nt, Artificial Sequence
  Description of Artificial Sequence: Synthetic oligonucleotide
cucuguguauagagugcuc

SEQ ID NO: 1660350 - RNA, 19 nt, Artificial Sequence
  Description of Artificial Sequence: Synthetic oligonucleotide
auggaaucguuaaggaauu

SEQ ID NO: 1660351 - RNA, 19 nt, Artificial Sequence
  Description of Artificial Sequence: Synthetic oligonucleotide
ccuuagccagaaauacuag

SEQ ID NO: 1660352 - RNA, 19 nt, Artificial Sequence
  Description of Artificial Sequence: Synthetic oligonucleotide
ggacguaaauuccagguau

SEQ ID NO: 1660353 - RNA, 19 nt, Artificial Sequence
  Description of Artificial Sequence: Synthetic oligonucleotide
uaucugccaggaagaugcu

SEQ ID NO: 1660354 - RNA, 19 nt, Artificial Sequence
  Description of Artificial Sequence: Synthetic oligonucleotide
agugaguuccagccagcua

SEQ ID NO: 1660355 - RNA, 19 nt, Artificial Sequence
  Description of Artificial Sequence: Synthetic oligonucleotide
guguauagagugcucuccu

SEQ ID NO: 1660356 - RNA, 19 nt, Artificial Sequence
  Description of Artificial Sequence: Synthetic oligonucleotide
cauuugcuuuagccccagg

SEQ ID NO: 1660357 - RNA, 19 nt, Artificial Sequence
  Description of Artificial Sequence: Synthetic oligonucleotide
caaggucguaaaacaaucu

SEQ ID NO: 1660358 - RNA, 19 nt, Artificial Sequence
  Description of Artificial Sequence: Synthetic oligonucleotide
cagguugaucauucgaggu

SEQ ID NO: 1660359 - RNA, 19 nt, Artificial Sequence
  Description of Artificial Sequence: Synthetic oligonucleotide
aucuuuccaaguagggcau

SEQ ID NO: 1660360 - RNA, 19 nt, Artificial Sequence
  Description of Artificial Sequence: Synthetic oligonucleotide
uuugugggguuuugcccuu

SEQ ID NO: 1660361 - RNA, 19 nt, Artificial Sequence
  Description of Artificial Sequence: Synthetic oligonucleotide
cauuaaucauuuuccugau

SEQ ID NO: 1660362 - RNA, 19 nt, Artificial Sequence
  Description of Artificial Sequence: Synthetic oligonucleotide
gaggaagcuugaccauauc

SEQ ID NO: 1660363 - RNA, 19 nt, Artificial Sequence
  Description of Artificial Sequence: Synthetic oligonucleotide
gcauggagagcuguugaug

SEQ ID NO: 1660364 - RNA, 19 nt, Artificial Sequence
  Description of Artificial Sequence: Synthetic oligonucleotide
auccacaauggaaucguua

SEQ ID NO: 1660365 - RNA, 19 nt, Artificial Sequence
  Description of Artificial Sequence: Synthetic oligonucleotide
agucuacaggauccacaau

SEQ ID NO: 1660366 - RNA, 19 nt, Artificial Sequence
  Description of Artificial Sequence: Synthetic oligonucleotide
cagcauuaaucauuuuccu

SEQ ID NO: 1660367 - RNA, 19 nt, Artificial Sequence
  Description of Artificial Sequence: Synthetic oligonucleotide
accaggcguaguugaacaa

SEQ ID NO: 1660368 - RNA, 19 nt, Artificial Sequence
  Description of Artificial Sequence: Synthetic oligonucleotide
cuuuagccccaggcggucc

SEQ ID NO: 1660369 - RNA, 19 nt, Artificial Sequence
  Description of Artificial Sequence: Synthetic oligonucleotide
caucgagggaggccaaaga

SEQ ID NO: 1660370 - RNA, 19 nt, Artificial Sequence
  Description of Artificial Sequence: Synthetic oligonucleotide
agguaugauguaggcauua

SEQ ID NO: 1660371 - RNA, 19 nt, Artificial Sequence
  Description of Artificial Sequence: Synthetic oligonucleotide
uccccuuccuuagccagaa

SEQ ID NO: 1660372 - RNA, 19 nt, Artificial Sequence
  Description of Artificial Sequence: Synthetic oligonucleotide
gcgacaggacguaaauucc

SEQ ID NO: 1660373 - RNA, 19 nt, Artificial Sequence
  Description of Artificial Sequence: Synthetic oligonucleotide
gcuacaaagugagugagau

SEQ ID NO: 1660374 - RNA, 19 nt, Artificial Sequence
  Description of Artificial Sequence: Synthetic oligonucleotide
ucucuagcgacaggacgua

SEQ ID NO: 1660375 - RNA, 19 nt, Artificial Sequence
  Description of Artificial Sequence: Synthetic oligonucleotide
caggcguaguugaacaacu

SEQ ID NO: 1660376 - RNA, 19 nt, Artificial Sequence
  Description of Artificial Sequence: Synthetic oligonucleotide
uguaccccugcugcaacuu

SEQ ID NO: 1660377 - RNA, 19 nt, Artificial Sequence
  Description of Artificial Sequence: Synthetic oligonucleotide
gccagaaauacuagcuuuc

SEQ ID NO: 1660378 - RNA, 19 nt, Artificial Sequence
  Description of Artificial Sequence: Synthetic oligonucleotide
gagggaggccaaagacucc

SEQ ID NO: 1660379 - RNA, 19 nt, Artificial Sequence
  Description of Artificial Sequence: Synthetic oligonucleotide
cagaaauacuagcuuuccu

SEQ ID NO: 1660380 - RNA, 19 nt, Artificial Sequence
  Description of Artificial Sequence: Synthetic oligonucleotide
ccagguauuuccuuuucaa

SEQ ID NO: 1660381 - RNA, 19 nt, Artificial Sequence
  Description of Artificial Sequence: Synthetic oligonucleotide
uccuuagcuuggccacuuc

SEQ ID NO: 1660382 - RNA, 19 nt, Artificial Sequence
  Description of Artificial Sequence: Synthetic oligonucleotide
ugcugugguuucgguacac

SEQ ID NO: 1660383 - RNA, 19 nt, Artificial Sequence
  Description of Artificial Sequence: Synthetic oligonucleotide
ucaacaccauauggugaua

SEQ ID NO: 1660384 - RNA, 19 nt, Artificial Sequence
  Description of Artificial Sequence: Synthetic oligonucleotide
uggcaccugggcuuuuauu

SEQ ID NO: 1660385 - RNA, 19 nt, Artificial Sequence
  Description of Artificial Sequence: Synthetic oligonucleotide
gcccuuagugccugucucc

SEQ ID NO: 1660386 - RNA, 19 nt, Artificial Sequence
  Description of Artificial Sequence: Synthetic oligonucleotide
uuccuuagcuuggccacuu

SEQ ID NO: 1660387 - RNA, 19 nt, Artificial Sequence
  Description of Artificial Sequence: Synthetic oligonucleotide
uagcgacaggacguaaauu

SEQ ID NO: 1660388 - RNA, 19 nt, Artificial Sequence
  Description of Artificial Sequence: Synthetic oligonucleotide
cuagcgacaggacguaaau

SEQ ID NO: 1660389 - RNA, 19 nt, Artificial Sequence
  Description of Artificial Sequence: Synthetic oligonucleotide
ccaaguagggcauguuaga

SEQ ID NO: 1660390 - RNA, 19 nt, Artificial Sequence
  Description of Artificial Sequence: Synthetic oligonucleotide
caauagcguuguaccccug

SEQ ID NO: 1660391 - RNA, 19 nt, Artificial Sequence
  Description of Artificial Sequence: Synthetic oligonucleotide
gaguaagcaccagcauuaa

SEQ ID NO: 1660392 - RNA, 19 nt, Artificial Sequence
  Description of Artificial Sequence: Synthetic oligonucleotide
uggaaucguuaaggaauuu

SEQ ID NO: 1660393 - RNA, 19 nt, Artificial Sequence
  Description of Artificial Sequence: Synthetic oligonucleotide
gggcauggagagcuguuga

SEQ ID NO: 1660394 - RNA, 19 nt, Artificial Sequence
  Description of Artificial Sequence: Synthetic oligonucleotide
agcaacccugcuggcaccu

SEQ ID NO: 1660395 - RNA, 19 nt, Artificial Sequence
  Description of Artificial Sequence: Synthetic oligonucleotide
cguaaauuccagguauuuc

SEQ ID NO: 1660396 - RNA, 19 nt, Artificial Sequence
  Description of Artificial Sequence: Synthetic oligonucleotide
ccaggcguaguugaacaac

SEQ ID NO: 1660397 - RNA, 19 nt, Artificial Sequence
  Description of Artificial Sequence: Synthetic oligonucleotide
ggauaagauucagaucuua

SEQ ID NO: 1660398 - RNA, 19 nt, Artificial Sequence
  Description of Artificial Sequence: Synthetic oligonucleotide
ugauggggucaugccagua

SEQ ID NO: 1660399 - RNA, 19 nt, Artificial Sequence
  Description of Artificial Sequence: Synthetic oligonucleotide
aggauaagauucagaucuu

SEQ ID NO: 1660400 - RNA, 19 nt, Artificial Sequence
  Description of Artificial Sequence: Synthetic oligonucleotide
accugggcuuuuauuugcu

SEQ ID NO: 1660401 - RNA, 19 nt, Artificial Sequence
  Description of Artificial Sequence: Synthetic oligonucleotide
ggaaugguuuccuuagcuu

SEQ ID NO: 1660402 - RNA, 19 nt, Artificial Sequence
  Description of Artificial Sequence: Synthetic oligonucleotide
gcuugcaagcuagauuaga

SEQ ID NO: 1660403 - RNA, 19 nt, Artificial Sequence
  Description of Artificial Sequence: Synthetic oligonucleotide
gccaguacugugccugcac

SEQ ID NO: 1660404 - RNA, 19 nt, Artificial Sequence
  Description of Artificial Sequence: Synthetic oligonucleotide
cugugguuucgguacacau

SEQ ID NO: 1660405 - RNA, 19 nt, Artificial Sequence
  Description of Artificial Sequence: Synthetic oligonucleotide
ugguuucgguacacaucuu

SEQ ID NO: 1660406 - RNA, 19 nt, Artificial Sequence
  Description of Artificial Sequence: Synthetic oligonucleotide
gguaugauguaggcauuaa

SEQ ID NO: 1660407 - RNA, 19 nt, Artificial Sequence
  Description of Artificial Sequence: Synthetic oligonucleotide
caccucucuugauuuauau

SEQ ID NO: 1660408 - RNA, 19 nt, Artificial Sequence
  Description of Artificial Sequence: Synthetic oligonucleotide
cccuuagugccugucuccc

SEQ ID NO: 1660409 - RNA, 19 nt, Artificial Sequence
  Description of Artificial Sequence: Synthetic oligonucleotide
cuuuccaaguagggcaugu

SEQ ID NO: 1660410 - RNA, 19 nt, Artificial Sequence
  Description of Artificial Sequence: Synthetic oligonucleotide
gacguaaauuccagguauu

SEQ ID NO: 1660411 - RNA, 19 nt, Artificial Sequence
  Description of Artificial Sequence: Synthetic oligonucleotide
agccagcuagggcuacaaa

SEQ ID NO: 1660412 - RNA, 19 nt, Artificial Sequence
  Description of Artificial Sequence: Synthetic oligonucleotide
gugccugcaccaggcguag

SEQ ID NO: 1660413 - RNA, 19 nt, Artificial Sequence
  Description of Artificial Sequence: Synthetic oligonucleotide
cugucucccugcuucauuu

SEQ ID NO: 1660414 - RNA, 19 nt, Artificial Sequence
  Description of Artificial Sequence: Synthetic oligonucleotide
cauucgaggugaugggcau

SEQ ID NO: 1660415 - RNA, 19 nt, Artificial Sequence
  Description of Artificial Sequence: Synthetic oligonucleotide
cugagaucagguugaucau

SEQ ID NO: 1660416 - RNA, 19 nt, Artificial Sequence
  Description of Artificial Sequence: Synthetic oligonucleotide
guagggcauguuagauaac

SEQ ID NO: 1660417 - RNA, 19 nt, Artificial Sequence
  Description of Artificial Sequence: Synthetic oligonucleotide
caacagcagauuccuuucu

SEQ ID NO: 1660418 - RNA, 19 nt, Artificial Sequence
  Description of Artificial Sequence: Synthetic oligonucleotide
accauaucacaaggucgua

SEQ ID NO: 1660419 - RNA, 19 nt, Artificial Sequence
  Description of Artificial Sequence: Synthetic oligonucleotide
ccaucauuacuugagaauu

SEQ ID NO: 1660420 - RNA, 19 nt, Artificial Sequence
  Description of Artificial Sequence: Synthetic oligonucleotide
ucccugggagaagccaaua

SEQ ID NO: 1660421 - RNA, 19 nt, Artificial Sequence
  Description of Artificial Sequence: Synthetic oligonucleotide
agccccaggcgguccucug

SEQ ID NO: 1660422 - RNA, 19 nt, Artificial Sequence
  Description of Artificial Sequence: Synthetic oligonucleotide
guaccccugcugcaacuua

SEQ ID NO: 1660423 - RNA, 19 nt, Artificial Sequence
  Description of Artificial Sequence: Synthetic oligonucleotide
gcaccaggcguaguugaac

SEQ ID NO: 1660424 - RNA, 19 nt, Artificial Sequence
  Description of Artificial Sequence: Synthetic oligonucleotide
cacucagagucuacaggau

SEQ ID NO: 1660425 - RNA, 19 nt, Artificial Sequence
  Description of Artificial Sequence: Synthetic oligonucleotide
cgacaggacguaaauucca

SEQ ID NO: 1660426 - RNA, 19 nt, Artificial Sequence
  Description of Artificial Sequence: Synthetic oligonucleotide
aggcguaguugaacaacuu

SEQ ID NO: 1660427 - RNA, 19 nt, Artificial Sequence
  Description of Artificial Sequence: Synthetic oligonucleotide
aggcgguccucuguguaua

SEQ ID NO: 1660428 - RNA, 19 nt, Artificial Sequence
  Description of Artificial Sequence: Synthetic oligonucleotide
ccugcaccaggcguaguug

SEQ ID NO: 1660429 - RNA, 19 nt, Artificial Sequence
  Description of Artificial Sequence: Synthetic oligonucleotide
ccaauagcguuguaccccu

SEQ ID NO: 1660430 - RNA, 19 nt, Artificial Sequence
  Description of Artificial Sequence: Synthetic oligonucleotide
ccauaucacaaggucguaa

SEQ ID NO: 1660431 - RNA, 19 nt, Artificial Sequence
  Description of Artificial Sequence: Synthetic oligonucleotide
ggagaacugcuugcaagcu

SEQ ID NO: 1660432 - RNA, 19 nt, Artificial Sequence
  Description of Artificial Sequence: Synthetic oligonucleotide
cacaccucucuugauuuau

SEQ ID NO: 1660433 - RNA, 19 nt, Artificial Sequence
  Description of Artificial Sequence: Synthetic oligonucleotide
uugugggguuuugcccuua

SEQ ID NO: 1660434 - RNA, 19 nt, Artificial Sequence
  Description of Artificial Sequence: Synthetic oligonucleotide
ggcauggagagcuguugau

SEQ ID NO: 1660435 - RNA, 19 nt, Artificial Sequence
  Description of Artificial Sequence: Synthetic oligonucleotide
gcguuguaccccugcugca

SEQ ID NO: 1660436 - RNA, 19 nt, Artificial Sequence
  Description of Artificial Sequence: Synthetic oligonucleotide
ucgaggugaugggcaucuc

SEQ ID NO: 1660437 - RNA, 19 nt, Artificial Sequence
  Description of Artificial Sequence: Synthetic oligonucleotide
gugggguuuugcccuuagu

SEQ ID NO: 1660438 - RNA, 19 nt, Artificial Sequence
  Description of Artificial Sequence: Synthetic oligonucleotide
gguccucuguguauagagu

SEQ ID NO: 1660439 - RNA, 19 nt, Artificial Sequence
  Description of Artificial Sequence: Synthetic oligonucleotide
ccccaggcgguccucugug

SEQ ID NO: 1660440 - RNA, 19 nt, Artificial Sequence
  Description of Artificial Sequence: Synthetic oligonucleotide
guugaucauucgaggugau

SEQ ID NO: 1660441 - RNA, 19 nt, Artificial Sequence
  Description of Artificial Sequence: Synthetic oligonucleotide
ccuuagcuuggccacuucu

SEQ ID NO: 1660442 - RNA, 19 nt, Artificial Sequence
  Description of Artificial Sequence: Synthetic oligonucleotide
caggcgguccucuguguau

SEQ ID NO: 1660443 - RNA, 19 nt, Artificial Sequence
  Description of Artificial Sequence: Synthetic oligonucleotide
gcuuuagccccaggcgguc

SEQ ID NO: 1660444 - RNA, 19 nt, Artificial Sequence
  Description of Artificial Sequence: Synthetic oligonucleotide
cucuagcgacaggacguaa

SEQ ID NO: 1660445 - RNA, 19 nt, Artificial Sequence
  Description of Artificial Sequence: Synthetic oligonucleotide
ccaucauguucuuuccaau

SEQ ID NO: 1660446 - RNA, 19 nt, Artificial Sequence
  Description of Artificial Sequence: Synthetic oligonucleotide
gguacacaucuuccuugau

SEQ ID NO: 1660447 - RNA, 19 nt, Artificial Sequence
  Description of Artificial Sequence: Synthetic oligonucleotide
ccagaaucugacacaccau

SEQ ID NO: 1660448 - RNA, 19 nt, Artificial Sequence
  Description of Artificial Sequence: Synthetic oligonucleotide
ggaggggaaugguuuccuu

SEQ ID NO: 1660449 - RNA, 19 nt, Artificial Sequence
  Description of Artificial Sequence: Synthetic oligonucleotide
cuggcaccugggcuuuuau

SEQ ID NO: 1660450 - RNA, 19 nt, Artificial Sequence
  Description of Artificial Sequence: Synthetic oligonucleotide
gcugcaacuuaggauccuu

SEQ ID NO: 1660451 - RNA, 19 nt, Artificial Sequence
  Description of Artificial Sequence: Synthetic oligonucleotide
cguuguaccccugcugcaa

SEQ ID NO: 1660452 - RNA, 19 nt, Artificial Sequence
  Description of Artificial Sequence: Synthetic oligonucleotide
ggcaucgagggaggccaaa

SEQ ID NO: 1660453 - RNA, 19 nt, Artificial Sequence
  Description of Artificial Sequence: Synthetic oligonucleotide
ccuuagugccugucucccu

SEQ ID NO: 1660454 - RNA, 19 nt, Artificial Sequence
  Description of Artificial Sequence: Synthetic oligonucleotide
ccaugguuauuagcuaauu

SEQ ID NO: 1660455 - RNA, 19 nt, Artificial Sequence
  Description of Artificial Sequence: Synthetic oligonucleotide
caccagcauuaaucauuuu

SEQ ID NO: 1660456 - RNA, 19 nt, Artificial Sequence
  Description of Artificial Sequence: Synthetic oligonucleotide
ccccaacugagaucagguu

SEQ ID NO: 1660457 - RNA, 19 nt, Artificial Sequence
  Description of Artificial Sequence: Synthetic oligonucleotide
gggcaucgagggaggccaa

SEQ ID NO: 1660458 - RNA, 19 nt, Artificial Sequence
  Description of Artificial Sequence: Synthetic oligonucleotide
ccccuuccuuagccagaaa

SEQ ID NO: 1660459 - RNA, 19 nt, Artificial Sequence
  Description of Artificial Sequence: Synthetic oligonucleotide
  modified_base (1)..(1): a, c, u, g, unknown or other
ngugcauuucuucuuaagc

SEQ ID NO: 1660460 - RNA, 19 nt, Artificial Sequence
  Description of Artificial Sequence: Synthetic oligonucleotide
aaagguuacagucuucuac

SEQ ID NO: 1660461 - RNA, 19 nt, Artificial Sequence
  Description of Artificial Sequence: Synthetic oligonucleotide
auaagguacaaucacuggg

SEQ ID NO: 1660462 - RNA, 19 nt, Artificial Sequence
  Description of Artificial Sequence: Synthetic oligonucleotide
aauaaagaaguucucugcu

SEQ ID NO: 1660463 - RNA, 19 nt, Artificial Sequence
  Description of Artificial Sequence: Synthetic oligonucleotide
aauaagguacaaucacugg

SEQ ID NO: 1660464 - RNA, 19 nt, Artificial Sequence
  Description of Artificial Sequence: Synthetic oligonucleotide
aaucagaaccuuuuccuuc

SEQ ID NO: 1660465 - RNA, 19 nt, Artificial Sequence
  Description of Artificial Sequence: Synthetic oligonucleotide
uuugaguaagacagcaagg

SEQ ID NO: 1660466 - RNA, 19 nt, Artificial Sequence
  Description of Artificial Sequence: Synthetic oligonucleotide
accaauaagguacaaucac

SEQ ID NO: 1660467 - RNA, 19 nt, Artificial Sequence
  Description of Artificial Sequence: Synthetic oligonucleotide
uucucauuccugcugauag

SEQ ID NO: 1660468 - RNA, 19 nt, Artificial Sequence
  Description of Artificial Sequence: Synthetic oligonucleotide
aaggaagagaaacuggagu

SEQ ID NO: 1660469 - RNA, 19 nt, Artificial Sequence
  Description of Artificial Sequence: Synthetic oligonucleotide
uugacagauagcuucaucu

SEQ ID NO: 1660470 - RNA, 19 nt, Artificial Sequence
  Description of Artificial Sequence: Synthetic oligonucleotide
acacguguggccuuggggc

SEQ ID NO: 1660471 - RNA, 19 nt, Artificial Sequence
  Description of Artificial Sequence: Synthetic oligonucleotide
aagguacaaucacuggggc

SEQ ID NO: 1660472 - RNA, 19 nt, Artificial Sequence
  Description of Artificial Sequence: Synthetic oligonucleotide
gagaguggcagucaucucg

SEQ ID NO: 1660473 - RNA, 19 nt, Artificial Sequence
  Description of Artificial Sequence: Synthetic oligonucleotide
aacagguugcaauaggagu

SEQ ID NO: 1660474 - RNA, 19 nt, Artificial Sequence
  Description of Artificial Sequence: Synthetic oligonucleotide
aaagcugaugucauacccc

SEQ ID NO: 1660475 - RNA, 19 nt, Artificial Sequence
  Description of Artificial Sequence: Synthetic oligonucleotide
aagguuacagucuucuaca

SEQ ID NO: 1660476 - RNA, 19 nt, Artificial Sequence
  Description of Artificial Sequence: Synthetic oligonucleotide
aauagucgccuucuggcuc

SEQ ID NO: 1660477 - RNA, 19 nt, Artificial Sequence
  Description of Artificial Sequence: Synthetic oligonucleotide
aaguuggugauaagaaagc

SEQ ID NO: 1660478 - RNA, 19 nt, Artificial Sequence
  Description of Artificial Sequence: Synthetic oligonucleotide
ugaacuuauggcauaaaau

SEQ ID NO: 1660479 - RNA, 19 nt, Artificial Sequence
  Description of Artificial Sequence: Synthetic oligonucleotide
aguuuagguuucaagacgc

SEQ ID NO: 1660480 - RNA, 19 nt, Artificial Sequence
  Description of Artificial Sequence: Synthetic oligonucleotide
gaaagcugaugucauaccc

SEQ ID NO: 1660481 - RNA, 19 nt, Artificial Sequence
  Description of Artificial Sequence: Synthetic oligonucleotide
aagaauaaagaaguucucu

SEQ ID NO: 1660482 - RNA, 19 nt, Artificial Sequence
  Description of Artificial Sequence: Synthetic oligonucleotide
ugcaauaggaguucuuugc

SEQ ID NO: 1660483 - RNA, 19 nt, Artificial Sequence
  Description of Artificial Sequence: Synthetic oligonucleotide
uggauuacaaaguccacca

SEQ ID NO: 1660484 - RNA, 19 nt, Artificial Sequence
  Description of Artificial Sequence: Synthetic oligonucleotide
auggauucagcccuuguuc

SEQ ID NO: 1660485 - RNA, 19 nt, Artificial Sequence
  Description of Artificial Sequence: Synthetic oligonucleotide
caauaagguacaaucacug

SEQ ID NO: 1660486 - RNA, 19 nt, Artificial Sequence
  Description of Artificial Sequence: Synthetic oligonucleotide
ucugcucgcaucaucauga

SEQ ID NO: 1660487 - RNA, 19 nt, Artificial Sequence
  Description of Artificial Sequence: Synthetic oligonucleotide
uguuuguacaucugcuccg

SEQ ID NO: 1660488 - RNA, 19 nt, Artificial Sequence
  Description of Artificial Sequence: Synthetic oligonucleotide
aguagagaguccuuaccac

SEQ ID NO: 1660489 - RNA, 19 nt, Artificial Sequence
  Description of Artificial Sequence: Synthetic oligonucleotide
acccggacagaauugaugg

SEQ ID NO: 1660490 - RNA, 19 nt, Artificial Sequence
  Description of Artificial Sequence: Synthetic oligonucleotide
aguaacagguugcaauagg

SEQ ID NO: 1660491 - RNA, 19 nt, Artificial Sequence
  Description of Artificial Sequence: Synthetic oligonucleotide
ucuacaagcacagaguuua

SEQ ID NO: 1660492 - RNA, 19 nt, Artificial Sequence
  Description of Artificial Sequence: Synthetic oligonucleotide
accgcgaccaauaagguac

SEQ ID NO: 1660493 - RNA, 19 nt, Artificial Sequence
  Description of Artificial Sequence: Synthetic oligonucleotide
acggcacuaagguaggggc

SEQ ID NO: 1660494 - RNA, 19 nt, Artificial Sequence
  Description of Artificial Sequence: Synthetic oligonucleotide
ugaaguggauuacaaaguc

SEQ ID NO: 1660495 - RNA, 19 nt, Artificial Sequence
  Description of Artificial Sequence: Synthetic oligonucleotide
accaauuuguguuuguaca

SEQ ID NO: 1660496 - RNA, 19 nt, Artificial Sequence
  Description of Artificial Sequence: Synthetic oligonucleotide
aaaugucugucccagccca

SEQ ID NO: 1660497 - RNA, 19 nt, Artificial Sequence
  Description of Artificial Sequence: Synthetic oligonucleotide
aaguggauuacaaagucca

SEQ ID NO: 1660498 - RNA, 19 nt, Artificial Sequence
  Description of Artificial Sequence: Synthetic oligonucleotide
ugcugauaguaacagguug

SEQ ID NO: 1660499 - RNA, 19 nt, Artificial Sequence
  Description of Artificial Sequence: Synthetic oligonucleotide
uaacagguugcaauaggag

SEQ ID NO: 1660500 - RNA, 19 nt, Artificial Sequence
  Description of Artificial Sequence: Synthetic oligonucleotide
aacuuauggcauaaaaucu

SEQ ID NO: 1660501 - RNA, 19 nt, Artificial Sequence
  Description of Artificial Sequence: Synthetic oligonucleotide
aacucaggaggcuaguaga

SEQ ID NO: 1660502 - RNA, 19 nt, Artificial Sequence
  Description of Artificial Sequence: Synthetic oligonucleotide
gaagcgcaugaacuuaugg

SEQ ID NO: 1660503 - RNA, 19 nt, Artificial Sequence
  Description of Artificial Sequence: Synthetic oligonucleotide
uuugcuacuccugacuucc

SEQ ID NO: 1660504 - RNA, 19 nt, Artificial Sequence
  Description of Artificial Sequence: Synthetic oligonucleotide
uucccaaccagugugguag

SEQ ID NO: 1660505 - RNA, 19 nt, Artificial Sequence
  Description of Artificial Sequence: Synthetic oligonucleotide
agcgcaugaacuuauggca

SEQ ID NO: 1660506 - RNA, 19 nt, Artificial Sequence
  Description of Artificial Sequence: Synthetic oligonucleotide
ugucauaccccuccacagg

SEQ ID NO: 1660507 - RNA, 19 nt, Artificial Sequence
  Description of Artificial Sequence: Synthetic oligonucleotide
uuagguuucaagacgcuua

SEQ ID NO: 1660508 - RNA, 19 nt, Artificial Sequence
  Description of Artificial Sequence: Synthetic oligonucleotide
aaauagucgccuucuggcu

SEQ ID NO: 1660509 - RNA, 19 nt, Artificial Sequence
  Description of Artificial Sequence: Synthetic oligonucleotide
aguugccuggcuuuuggac

SEQ ID NO: 1660510 - RNA, 19 nt, Artificial Sequence
  Description of Artificial Sequence: Synthetic oligonucleotide
uauggcauaaaaucuucuc

SEQ ID NO: 1660511 - RNA, 19 nt, Artificial Sequence
  Description of Artificial Sequence: Synthetic oligonucleotide
accaccgcgaccaauaagg

SEQ ID NO: 1660512 - RNA, 19 nt, Artificial Sequence
  Description of Artificial Sequence: Synthetic oligonucleotide
gaaguugccuggcuuuugg

SEQ ID NO: 1660513 - RNA, 19 nt, Artificial Sequence
  Description of Artificial Sequence: Synthetic oligonucleotide
cuuaccaccucuacugggc

SEQ ID NO: 1660514 - RNA, 19 nt, Artificial Sequence
  Description of Artificial Sequence: Synthetic oligonucleotide
agguacaaucacuggggcc

SEQ ID NO: 1660515 - RNA, 19 nt, Artificial Sequence
  Description of Artificial Sequence: Synthetic oligonucleotide
agacaggcaagccuugggg

SEQ ID NO: 1660516 - RNA, 19 nt, Artificial Sequence
  Description of Artificial Sequence: Synthetic oligonucleotide
guccuuaccaccucuacug

SEQ ID NO: 1660517 - RNA, 19 nt, Artificial Sequence
  Description of Artificial Sequence: Synthetic oligonucleotide
acaggcacgguacccagac

SEQ ID NO: 1660518 - RNA, 19 nt, Artificial Sequence
  Description of Artificial Sequence: Synthetic oligonucleotide
uccuucgaagaauaaagaa

SEQ ID NO: 1660519 - RNA, 19 nt, Artificial Sequence
  Description of Artificial Sequence: Synthetic oligonucleotide
auugacagauagcuucauc

SEQ ID NO: 1660520 - RNA, 19 nt, Artificial Sequence
  Description of Artificial Sequence: Synthetic oligonucleotide
aguucuuugcuacuccuga

SEQ ID NO: 1660521 - RNA, 19 nt, Artificial Sequence
  Description of Artificial Sequence: Synthetic oligonucleotide
cuucgaagaauaaagaagu

SEQ ID NO: 1660522 - RNA, 19 nt, Artificial Sequence
  Description of Artificial Sequence: Synthetic oligonucleotide
uccaaugcccacccaaccc

SEQ ID NO: 1660523 - RNA, 19 nt, Artificial Sequence
  Description of Artificial Sequence: Synthetic oligonucleotide
uggauucagcccuuguucc

SEQ ID NO: 1660524 - RNA, 19 nt, Artificial Sequence
  Description of Artificial Sequence: Synthetic oligonucleotide
auccaaugcccacccaacc

SEQ ID NO: 1660525 - RNA, 19 nt, Artificial Sequence
  Description of Artificial Sequence: Synthetic oligonucleotide
cuagcaagcacaccacacc

SEQ ID NO: 1660526 - RNA, 19 nt, Artificial Sequence
  Description of Artificial Sequence: Synthetic oligonucleotide
ccuucgaagaauaaagaag

SEQ ID NO: 1660527 - RNA, 19 nt, Artificial Sequence
  Description of Artificial Sequence: Synthetic oligonucleotide
aggcacgguacccagacag

SEQ ID NO: 1660528 - RNA, 19 nt, Artificial Sequence
  Description of Artificial Sequence: Synthetic oligonucleotide
acagaauugauggagcccu

SEQ ID NO: 1660529 - RNA, 19 nt, Artificial Sequence
  Description of Artificial Sequence: Synthetic oligonucleotide
guagagaguccuuaccacc

SEQ ID NO: 1660530 - RNA, 19 nt, Artificial Sequence
  Description of Artificial Sequence: Synthetic oligonucleotide
aucagaagguagccugacc

SEQ ID NO: 1660531 - RNA, 19 nt, Artificial Sequence
  Description of Artificial Sequence: Synthetic oligonucleotide
uagagaguccuuaccaccu

SEQ ID NO: 1660532 - RNA, 19 nt, Artificial Sequence
  Description of Artificial Sequence: Synthetic oligonucleotide
uccuccaugaaguggauua

SEQ ID NO: 1660533 - RNA, 19 nt, Artificial Sequence
  Description of Artificial Sequence: Synthetic oligonucleotide
augaacuuauggcauaaaa

SEQ ID NO: 1660534 - RNA, 19 nt, Artificial Sequence
  Description of Artificial Sequence: Synthetic oligonucleotide
auaguaacagguugcaaua

SEQ ID NO: 1660535 - RNA, 19 nt, Artificial Sequence
  Description of Artificial Sequence: Synthetic oligonucleotide
acagauagcuucaucucac

SEQ ID NO: 1660536 - RNA, 19 nt, Artificial Sequence
  Description of Artificial Sequence: Synthetic oligonucleotide
cuaguagagaguccuuacc

SEQ ID NO: 1660537 - RNA, 19 nt, Artificial Sequence
  Description of Artificial Sequence: Synthetic oligonucleotide
ucugaaacuucccucucuc

SEQ ID NO: 1660538 - RNA, 19 nt, Artificial Sequence
  Description of Artificial Sequence: Synthetic oligonucleotide
uuauggcauaaaaucuucu

SEQ ID NO: 1660539 - RNA, 19 nt, Artificial Sequence
  Description of Artificial Sequence: Synthetic oligonucleotide
auagcuucaucucacugau

SEQ ID NO: 1660540 - RNA, 19 nt, Artificial Sequence
  Description of Artificial Sequence: Synthetic oligonucleotide
guugccuggcuuuuggacc

SEQ ID NO: 1660541 - RNA, 19 nt, Artificial Sequence
  Description of Artificial Sequence: Synthetic oligonucleotide
gacagauagcuucaucuca

SEQ ID NO: 1660542 - RNA, 19 nt, Artificial Sequence
  Description of Artificial Sequence: Synthetic oligonucleotide
aagcacaccacacccgacu

SEQ ID NO: 1660543 - RNA, 19 nt, Artificial Sequence
  Description of Artificial Sequence: Synthetic oligonucleotide
uccaugaaguggauuacaa

SEQ ID NO: 1660544 - RNA, 19 nt, Artificial Sequence
  Description of Artificial Sequence: Synthetic oligonucleotide
uguugugucguuccacgac

SEQ ID NO: 1660545 - RNA, 19 nt, Artificial Sequence
  Description of Artificial Sequence: Synthetic oligonucleotide
caaacaucagaagguagcc

SEQ ID NO: 1660546 - RNA, 19 nt, Artificial Sequence
  Description of Artificial Sequence: Synthetic oligonucleotide
ggcauugacagauagcuuc

SEQ ID NO: 1660547 - RNA, 19 nt, Artificial Sequence
  Description of Artificial Sequence: Synthetic oligonucleotide
uugcaauaggaguucuuug

SEQ ID NO: 1660548 - RNA, 19 nt, Artificial Sequence
  Description of Artificial Sequence: Synthetic oligonucleotide
guugugucguuccacgacc

SEQ ID NO: 1660549 - RNA, 19 nt, Artificial Sequence
  Description of Artificial Sequence: Synthetic oligonucleotide
gacacguguggccuugggg

SEQ ID NO: 1660550 - RNA, 19 nt, Artificial Sequence
  Description of Artificial Sequence: Synthetic oligonucleotide
cauuccugcugauaguaac

SEQ ID NO: 1660551 - RNA, 19 nt, Artificial Sequence
  Description of Artificial Sequence: Synthetic oligonucleotide
uggagucugaaacuucccu

SEQ ID NO: 1660552 - RNA, 19 nt, Artificial Sequence
  Description of Artificial Sequence: Synthetic oligonucleotide
aucagaaccuuuuccuucu

SEQ ID NO: 1660553 - RNA, 19 nt, Artificial Sequence
  Description of Artificial Sequence: Synthetic oligonucleotide
uccuuaccaccucuacugg

SEQ ID NO: 1660554 - RNA, 19 nt, Artificial Sequence
  Description of Artificial Sequence: Synthetic oligonucleotide
gcucgcaucaucaugaagc

SEQ ID NO: 1660555 - RNA, 19 nt, Artificial Sequence
  Description of Artificial Sequence: Synthetic oligonucleotide
cuggcaaucauggauucag

SEQ ID NO: 1660556 - RNA, 19 nt, Artificial Sequence
  Description of Artificial Sequence: Synthetic oligonucleotide
uccagcacaggcacgguac

SEQ ID NO: 1660557 - RNA, 19 nt, Artificial Sequence
  Description of Artificial Sequence: Synthetic oligonucleotide
agauagcuucaucucacug

SEQ ID NO: 1660558 - RNA, 19 nt, Artificial Sequence
  Description of Artificial Sequence: Synthetic oligonucleotide
caucaugaagcgcaugaac

SEQ ID NO: 1660559 - RNA, 19 nt, Artificial Sequence
  Description of Artificial Sequence: Synthetic oligonucleotide
acacccgacucccgcaucc

SEQ ID NO: 1660560 - RNA, 19 nt, Artificial Sequence
  Description of Artificial Sequence: Synthetic oligonucleotide
ugacagauagcuucaucuc

SEQ ID NO: 1660561 - RNA, 19 nt, Artificial Sequence
  Description of Artificial Sequence: Synthetic oligonucleotide
aggaggcuaguagagaguc

SEQ ID NO: 1660562 - RNA, 19 nt, Artificial Sequence
  Description of Artificial Sequence: Synthetic oligonucleotide
guggauuacaaaguccacc

SEQ ID NO: 1660563 - RNA, 19 nt, Artificial Sequence
  Description of Artificial Sequence: Synthetic oligonucleotide
agccugaccagacacgugu

SEQ ID NO: 1660564 - RNA, 19 nt, Artificial Sequence
  Description of Artificial Sequence: Synthetic oligonucleotide
cuaagguaggggcggagag

SEQ ID NO: 1660565 - RNA, 19 nt, Artificial Sequence
  Description of Artificial Sequence: Synthetic oligonucleotide
gcaaucauggauucagccc

SEQ ID NO: 1660566 - RNA, 19 nt, Artificial Sequence
  Description of Artificial Sequence: Synthetic oligonucleotide
gacacagggaaggccaagg

SEQ ID NO: 1660567 - RNA, 19 nt, Artificial Sequence
  Description of Artificial Sequence: Synthetic oligonucleotide
agcaaggaagagaaacugg

SEQ ID NO: 1660568 - RNA, 19 nt, Artificial Sequence
  Description of Artificial Sequence: Synthetic oligonucleotide
caccaauuuguguuuguac

SEQ ID NO: 1660569 - RNA, 19 nt, Artificial Sequence
  Description of Artificial Sequence: Synthetic oligonucleotide
ucguuccacgaccugggag

SEQ ID NO: 1660570 - RNA, 19 nt, Artificial Sequence
  Description of Artificial Sequence: Synthetic oligonucleotide
uccugcugauaguaacagg

SEQ ID NO: 1660571 - RNA, 19 nt, Artificial Sequence
  Description of Artificial Sequence: Synthetic oligonucleotide
gaccccagcuccuagguca

SEQ ID NO: 1660572 - RNA, 19 nt, Artificial Sequence
  Description of Artificial Sequence: Synthetic oligonucleotide
ugaccagacacguguggcc

SEQ ID NO: 1660573 - RNA, 19 nt, Artificial Sequence
  Description of Artificial Sequence: Synthetic oligonucleotide
gaagaauaaagaaguucuc

SEQ ID NO: 1660574 - RNA, 19 nt, Artificial Sequence
  Description of Artificial Sequence: Synthetic oligonucleotide
uugccuggcuuuuggaccc

SEQ ID NO: 1660575 - RNA, 19 nt, Artificial Sequence
  Description of Artificial Sequence: Synthetic oligonucleotide
uaguaacagguugcaauag

SEQ ID NO: 1660576 - RNA, 19 nt, Artificial Sequence
  Description of Artificial Sequence: Synthetic oligonucleotide
agcaaugcugacccggaca

SEQ ID NO: 1660577 - RNA, 19 nt, Artificial Sequence
  Description of Artificial Sequence: Synthetic oligonucleotide
augaaguggauuacaaagu

SEQ ID NO: 1660578 - RNA, 19 nt, Artificial Sequence
  Description of Artificial Sequence: Synthetic oligonucleotide
accucuggcuuguuguguc

SEQ ID NO: 1660579 - RNA, 19 nt, Artificial Sequence
  Description of Artificial Sequence: Synthetic oligonucleotide
ucccucucuccccaccugg

SEQ ID NO: 1660580 - RNA, 19 nt, Artificial Sequence
  Description of Artificial Sequence: Synthetic oligonucleotide
gguuucaagacgcuuaaaa

SEQ ID NO: 1660581 - RNA, 19 nt, Artificial Sequence
  Description of Artificial Sequence: Synthetic oligonucleotide
aguccuuaccaccucuacu

SEQ ID NO: 1660582 - RNA, 19 nt, Artificial Sequence
  Description of Artificial Sequence: Synthetic oligonucleotide
gacuccaggacaccuucgc

SEQ ID NO: 1660583 - RNA, 19 nt, Artificial Sequence
  Description of Artificial Sequence: Synthetic oligonucleotide
agucugaaacuucccucuc

SEQ ID NO: 1660584 - RNA, 19 nt, Artificial Sequence
  Description of Artificial Sequence: Synthetic oligonucleotide
agcacaccacacccgacuc

SEQ ID NO: 1660585 - RNA, 19 nt, Artificial Sequence
  Description of Artificial Sequence: Synthetic oligonucleotide
gcugaugucauaccccucc

SEQ ID NO: 1660586 - RNA, 19 nt, Artificial Sequence
  Description of Artificial Sequence: Synthetic oligonucleotide
ucaucucgggugcugucgc

SEQ ID NO: 1660587 - RNA, 19 nt, Artificial Sequence
  Description of Artificial Sequence: Synthetic oligonucleotide
gaccaauaagguacaauca

SEQ ID NO: 1660588 - RNA, 19 nt, Artificial Sequence
  Description of Artificial Sequence: Synthetic oligonucleotide
aguuggugauaagaaagcu

SEQ ID NO: 1660589 - RNA, 19 nt, Artificial Sequence
  Description of Artificial Sequence: Synthetic oligonucleotide
uucgaagaauaaagaaguu

SEQ ID NO: 1660590 - RNA, 19 nt, Artificial Sequence
  Description of Artificial Sequence: Synthetic oligonucleotide
guaacagguugcaauagga

SEQ ID NO: 1660591 - RNA, 19 nt, Artificial Sequence
  Description of Artificial Sequence: Synthetic oligonucleotide
gacucccgcauccaaugcc

SEQ ID NO: 1660592 - RNA, 19 nt, Artificial Sequence
  Description of Artificial Sequence: Synthetic oligonucleotide
ugacuccaggacaccuucg

SEQ ID NO: 1660593 - RNA, 19 nt, Artificial Sequence
  Description of Artificial Sequence: Synthetic oligonucleotide
agagaguccuuaccaccuc

SEQ ID NO: 1660594 - RNA, 19 nt, Artificial Sequence
  Description of Artificial Sequence: Synthetic oligonucleotide
ggugauaagaaagcugaug

SEQ ID NO: 1660595 - RNA, 19 nt, Artificial Sequence
  Description of Artificial Sequence: Synthetic oligonucleotide
gcuuuuggaccccagcucc

SEQ ID NO: 1660596 - RNA, 19 nt, Artificial Sequence
  Description of Artificial Sequence: Synthetic oligonucleotide
ugaagcgcaugaacuuaug

SEQ ID NO: 1660597 - RNA, 19 nt, Artificial Sequence
  Description of Artificial Sequence: Synthetic oligonucleotide
cagaagguagccugaccag

SEQ ID NO: 1660598 - RNA, 19 nt, Artificial Sequence
  Description of Artificial Sequence: Synthetic oligonucleotide
acaaucacuggggccaguc

SEQ ID NO: 1660599 - RNA, 19 nt, Artificial Sequence
  Description of Artificial Sequence: Synthetic oligonucleotide
acuuauggcauaaaaucuu

SEQ ID NO: 1660600 - RNA, 19 nt, Artificial Sequence
  Description of Artificial Sequence: Synthetic oligonucleotide
aguggauuacaaaguccac

SEQ ID NO: 1660601 - RNA, 19 nt, Artificial Sequence
  Description of Artificial Sequence: Synthetic oligonucleotide
ucgccuucuggcuccaggc

SEQ ID NO: 1660602 - RNA, 19 nt, Artificial Sequence
  Description of Artificial Sequence: Synthetic oligonucleotide
ugcucgcaucaucaugaag

SEQ ID NO: 1660603 - RNA, 19 nt, Artificial Sequence
  Description of Artificial Sequence: Synthetic oligonucleotide
guggaaguuggugauaaga

SEQ ID NO: 1660604 - RNA, 19 nt, Artificial Sequence
  Description of Artificial Sequence: Synthetic oligonucleotide
uggcaaucauggauucagc

SEQ ID NO: 1660605 - RNA, 19 nt, Artificial Sequence
  Description of Artificial Sequence: Synthetic oligonucleotide
uuuagguuucaagacgcuu

SEQ ID NO: 1660606 - RNA, 19 nt, Artificial Sequence
  Description of Artificial Sequence: Synthetic oligonucleotide
cagacacgcagagacacag

SEQ ID NO: 1660607 - RNA, 19 nt, Artificial Sequence
  Description of Artificial Sequence: Synthetic oligonucleotide
gcugauaguaacagguugc

SEQ ID NO: 1660608 - RNA, 19 nt, Artificial Sequence
  Description of Artificial Sequence: Synthetic oligonucleotide
uaagaaagcugaugucaua

SEQ ID NO: 1660609 - RNA, 19 nt, Artificial Sequence
  Description of Artificial Sequence: Synthetic oligonucleotide
gaagguagccugaccagac

SEQ ID NO: 1660610 - RNA, 19 nt, Artificial Sequence
  Description of Artificial Sequence: Synthetic oligonucleotide
auaggaguucuuugcuacu

SEQ ID NO: 1660611 - RNA, 19 nt, Artificial Sequence
  Description of Artificial Sequence: Synthetic oligonucleotide
aaguugccuggcuuuugga

SEQ ID NO: 1660612 - RNA, 19 nt, Artificial Sequence
  Description of Artificial Sequence: Synthetic oligonucleotide
guacaucugcuccgugugg

SEQ ID NO: 1660613 - RNA, 19 nt, Artificial Sequence
  Description of Artificial Sequence: Synthetic oligonucleotide
uguggaaguuggugauaag

SEQ ID NO: 1660614 - RNA, 19 nt, Artificial Sequence
  Description of Artificial Sequence: Synthetic oligonucleotide
cuucaggcagaacucagga

SEQ ID NO: 1660615 - RNA, 19 nt, Artificial Sequence
  Description of Artificial Sequence: Synthetic oligonucleotide
cgaccaauaagguacaauc

SEQ ID NO: 1660616 - RNA, 19 nt, Artificial Sequence
  Description of Artificial Sequence: Synthetic oligonucleotide
ugcuacuccugacuuccac

SEQ ID NO: 1660617 - RNA, 19 nt, Artificial Sequence
  Description of Artificial Sequence: Synthetic oligonucleotide
ucucuccccaccuggggug

SEQ ID NO: 1660618 - RNA, 19 nt, Artificial Sequence
  Description of Artificial Sequence: Synthetic oligonucleotide
cacgcagagacacagggaa

SEQ ID NO: 1660619 - RNA, 19 nt, Artificial Sequence
  Description of Artificial Sequence: Synthetic oligonucleotide
uucuacaagcacagaguuu

SEQ ID NO: 1660620 - RNA, 19 nt, Artificial Sequence
  Description of Artificial Sequence: Synthetic oligonucleotide
gucaucucgggugcugucg

SEQ ID NO: 1660621 - RNA, 19 nt, Artificial Sequence
  Description of Artificial Sequence: Synthetic oligonucleotide
ucauggauucagcccuugu

SEQ ID NO: 1660622 - RNA, 19 nt, Artificial Sequence
  Description of Artificial Sequence: Synthetic oligonucleotide
uccacgaccugggaggaga

SEQ ID NO: 1660623 - RNA, 19 nt, Artificial Sequence
  Description of Artificial Sequence: Synthetic oligonucleotide
uugugucguuccacgaccu

SEQ ID NO: 1660624 - RNA, 19 nt, Artificial Sequence
  Description of Artificial Sequence: Synthetic oligonucleotide
cugaccagacacguguggc

SEQ ID NO: 1660625 - RNA, 19 nt, Artificial Sequence
  Description of Artificial Sequence: Synthetic oligonucleotide
cagacagagggcagccugc

SEQ ID NO: 1660626 - RNA, 19 nt, Artificial Sequence
  Description of Artificial Sequence: Synthetic oligonucleotide
cagugugguagccaucuuc

SEQ ID NO: 1660627 - RNA, 19 nt, Artificial Sequence
  Description of Artificial Sequence: Synthetic oligonucleotide
aggagaaguucuccagaca

SEQ ID NO: 1660628 - RNA, 19 nt, Artificial Sequence
  Description of Artificial Sequence: Synthetic oligonucleotide
gaauugauggagcccucaa

SEQ ID NO: 1660629 - RNA, 19 nt, Artificial Sequence
  Description of Artificial Sequence: Synthetic oligonucleotide
ugugucguuccacgaccug

SEQ ID NO: 1660630 - RNA, 19 nt, Artificial Sequence
  Description of Artificial Sequence: Synthetic oligonucleotide
gaguccuuaccaccucuac

SEQ ID NO: 1660631 - RNA, 19 nt, Artificial Sequence
  Description of Artificial Sequence: Synthetic oligonucleotide
gaguucuuugcuacuccug

SEQ ID NO: 1660632 - RNA, 19 nt, Artificial Sequence
  Description of Artificial Sequence: Synthetic oligonucleotide
agaagguagccugaccaga

SEQ ID NO: 1660633 - RNA, 19 nt, Artificial Sequence
  Description of Artificial Sequence: Synthetic oligonucleotide
gccuguuucacagcaaugc

SEQ ID NO: 1660634 - RNA, 19 nt, Artificial Sequence
  Description of Artificial Sequence: Synthetic oligonucleotide
cacggcacuaagguagggg

SEQ ID NO: 1660635 - RNA, 19 nt, Artificial Sequence
  Description of Artificial Sequence: Synthetic oligonucleotide
auuccugcugauaguaaca

SEQ ID NO: 1660636 - RNA, 19 nt, Artificial Sequence
  Description of Artificial Sequence: Synthetic oligonucleotide
cguuccacgaccugggagg

SEQ ID NO: 1660637 - RNA, 19 nt, Artificial Sequence
  Description of Artificial Sequence: Synthetic oligonucleotide
aggaggcuuugaguaagac

SEQ ID NO: 1660638 - RNA, 19 nt, Artificial Sequence
  Description of Artificial Sequence: Synthetic oligonucleotide
ggcacuaagguaggggcgg

SEQ ID NO: 1660639 - RNA, 19 nt, Artificial Sequence
  Description of Artificial Sequence: Synthetic oligonucleotide
agcuagcaagcacaccaca

SEQ ID NO: 1660640 - RNA, 19 nt, Artificial Sequence
  Description of Artificial Sequence: Synthetic oligonucleotide
ugacuuccaccucuggcuu

SEQ ID NO: 1660641 - RNA, 19 nt, Artificial Sequence
  Description of Artificial Sequence: Synthetic oligonucleotide
cucugcucgcaucaucaug

SEQ ID NO: 1660642 - RNA, 19 nt, Artificial Sequence
  Description of Artificial Sequence: Synthetic oligonucleotide
aaugucugucccagcccag

SEQ ID NO: 1660643 - RNA, 19 nt, Artificial Sequence
  Description of Artificial Sequence: Synthetic oligonucleotide
ugauaguaacagguugcaa

SEQ ID NO: 1660644 - RNA, 19 nt, Artificial Sequence
  Description of Artificial Sequence: Synthetic oligonucleotide
agaauugauggagcccuca

SEQ ID NO: 1660645 - RNA, 19 nt, Artificial Sequence
  Description of Artificial Sequence: Synthetic oligonucleotide
gaggcuaguagagaguccu

SEQ ID NO: 1660646 - RNA, 19 nt, Artificial Sequence
  Description of Artificial Sequence: Synthetic oligonucleotide
aggacucaccucugcaccu

SEQ ID NO: 1660647 - RNA, 19 nt, Artificial Sequence
  Description of Artificial Sequence: Synthetic oligonucleotide
uaagguaggggcggagagu

SEQ ID NO: 1660648 - RNA, 19 nt, Artificial Sequence
  Description of Artificial Sequence: Synthetic oligonucleotide
agacacguguggccuuggg

SEQ ID NO: 1660649 - RNA, 19 nt, Artificial Sequence
  Description of Artificial Sequence: Synthetic oligonucleotide
gcuacuccugacuuccacc

SEQ ID NO: 1660650 - RNA, 19 nt, Artificial Sequence
  Description of Artificial Sequence: Synthetic oligonucleotide
gcuaguagagaguccuuac

SEQ ID NO: 1660651 - RNA, 19 nt, Artificial Sequence
  Description of Artificial Sequence: Synthetic oligonucleotide
acuaagguaggggcggaga

SEQ ID NO: 1660652 - RNA, 19 nt, Artificial Sequence
  Description of Artificial Sequence: Synthetic oligonucleotide
ccgcacggcacuaagguag

SEQ ID NO: 1660653 - RNA, 19 nt, Artificial Sequence
  Description of Artificial Sequence: Synthetic oligonucleotide
gugacuccaggacaccuuc

SEQ ID NO: 1660654 - RNA, 19 nt, Artificial Sequence
  Description of Artificial Sequence: Synthetic oligonucleotide
aguguggcccgcacggcac

SEQ ID NO: 1660655 - RNA, 19 nt, Artificial Sequence
  Description of Artificial Sequence: Synthetic oligonucleotide
cucagccacaaugcgggcc

SEQ ID NO: 1660656 - RNA, 19 nt, Artificial Sequence
  Description of Artificial Sequence: Synthetic oligonucleotide
aucucgggugcugucgcgg

SEQ ID NO: 1660657 - RNA, 19 nt, Artificial Sequence
  Description of Artificial Sequence: Synthetic oligonucleotide
uaccccuccacagguuucc

SEQ ID NO: 1660658 - RNA, 19 nt, Artificial Sequence
  Description of Artificial Sequence: Synthetic oligonucleotide
guagccaucuucaggcaga

SEQ ID NO: 1660659 - RNA, 19 nt, Artificial Sequence
  Description of Artificial Sequence: Synthetic oligonucleotide
cugauaguaacagguugca

SEQ ID NO: 1660660 - RNA, 19 nt, Artificial Sequence
  Description of Artificial Sequence: Synthetic oligonucleotide
cacaaugcgggcccgggca

SEQ ID NO: 1660661 - RNA, 19 nt, Artificial Sequence
  Description of Artificial Sequence: Synthetic oligonucleotide
gaguggcagucaucucggg

SEQ ID NO: 1660662 - RNA, 19 nt, Artificial Sequence
  Description of Artificial Sequence: Synthetic oligonucleotide
cagcuagcaagcacaccac

SEQ ID NO: 1660663 - RNA, 19 nt, Artificial Sequence
  Description of Artificial Sequence: Synthetic oligonucleotide
ggauucagcccuuguuccc

SEQ ID NO: 1660664 - RNA, 19 nt, Artificial Sequence
  Description of Artificial Sequence: Synthetic oligonucleotide
ccugacuuccaccucuggc

SEQ ID NO: 1660665 - RNA, 19 nt, Artificial Sequence
  Description of Artificial Sequence: Synthetic oligonucleotide
uacugggccaaggaggcuu

SEQ ID NO: 1660666 - RNA, 19 nt, Artificial Sequence
  Description of Artificial Sequence: Synthetic oligonucleotide
aaccagugugguagccauc

SEQ ID NO: 1660667 - RNA, 19 nt, Artificial Sequence
  Description of Artificial Sequence: Synthetic oligonucleotide
ccugcugauaguaacaggu

SEQ ID NO: 1660668 - RNA, 19 nt, Artificial Sequence
  Description of Artificial Sequence: Synthetic oligonucleotide
gucgcggggccggaaagcg

SEQ ID NO: 1660669 - RNA, 19 nt, Artificial Sequence
  Description of Artificial Sequence: Synthetic oligonucleotide
uagccugaccagacacgug

SEQ ID NO: 1660670 - RNA, 19 nt, Artificial Sequence
  Description of Artificial Sequence: Synthetic oligonucleotide
caucucgggugcugucgcg

SEQ ID NO: 1660671 - RNA, 19 nt, Artificial Sequence
  Description of Artificial Sequence: Synthetic oligonucleotide
ucgcaucaucaugaagcgc

SEQ ID NO: 1660672 - RNA, 19 nt, Artificial Sequence
  Description of Artificial Sequence: Synthetic oligonucleotide
gucauaccccuccacaggu

SEQ ID NO: 1660673 - RNA, 19 nt, Artificial Sequence
  Description of Artificial Sequence: Synthetic oligonucleotide
ucgcggggccggaaagcgg

SEQ ID NO: 1660674 - RNA, 19 nt, Artificial Sequence
  Description of Artificial Sequence: Synthetic oligonucleotide
ccugcagccagaaguugcc

SEQ ID NO: 1660675 - RNA, 19 nt, Artificial Sequence
  Description of Artificial Sequence: Synthetic oligonucleotide
cuucuacaagcacagaguu

SEQ ID NO: 1660676 - RNA, 19 nt, Artificial Sequence
  Description of Artificial Sequence: Synthetic oligonucleotide
agauccagccagaugguuu

SEQ ID NO: 1660677 - RNA, 19 nt, Artificial Sequence
  Description of Artificial Sequence: Synthetic oligonucleotide
gguaggggcggagaguggc

SEQ ID NO: 1660678 - RNA, 19 nt, Artificial Sequence
  Description of Artificial Sequence: Synthetic oligonucleotide
uggcccgcacggcacuaag

SEQ ID NO: 1660679 - RNA, 19 nt, Artificial Sequence
  Description of Artificial Sequence: Synthetic oligonucleotide
guugcaauaggaguucuuu

SEQ ID NO: 1660680 - RNA, 19 nt, Artificial Sequence
  Description of Artificial Sequence: Synthetic oligonucleotide
ucccaaccagugugguagc

SEQ ID NO: 1660681 - RNA, 19 nt, Artificial Sequence
  Description of Artificial Sequence: Synthetic oligonucleotide
accacacccgacucccgca

SEQ ID NO: 1660682 - RNA, 19 nt, Artificial Sequence
  Description of Artificial Sequence: Synthetic oligonucleotide
caagcacaccacacccgac

SEQ ID NO: 1660683 - RNA, 19 nt, Artificial Sequence
  Description of Artificial Sequence: Synthetic oligonucleotide
cucauuccugcugauagua

SEQ ID NO: 1660684 - RNA, 19 nt, Artificial Sequence
  Description of Artificial Sequence: Synthetic oligonucleotide
ugcuccggggagugacucc

SEQ ID NO: 1660685 - RNA, 19 nt, Artificial Sequence
  Description of Artificial Sequence: Synthetic oligonucleotide
augaagcgcaugaacuuau

SEQ ID NO: 1660686 - RNA, 19 nt, Artificial Sequence
  Description of Artificial Sequence: Synthetic oligonucleotide
gcuagcaagcacaccacac

SEQ ID NO: 1660687 - RNA, 19 nt, Artificial Sequence
  Description of Artificial Sequence: Synthetic oligonucleotide
ucauaccccuccacagguu

SEQ ID NO: 1660688 - RNA, 19 nt, Artificial Sequence
  Description of Artificial Sequence: Synthetic oligonucleotide
agacacagggaaggccaag

SEQ ID NO: 1660689 - RNA, 19 nt, Artificial Sequence
  Description of Artificial Sequence: Synthetic oligonucleotide
cagaauugauggagcccuc

SEQ ID NO: 1660690 - RNA, 19 nt, Artificial Sequence
  Description of Artificial Sequence: Synthetic oligonucleotide
ugucgcggggccggaaagc

SEQ ID NO: 1660691 - RNA, 19 nt, Artificial Sequence
  Description of Artificial Sequence: Synthetic oligonucleotide
uugcuacuccugacuucca

SEQ ID NO: 1660692 - RNA, 19 nt, Artificial Sequence
  Description of Artificial Sequence: Synthetic oligonucleotide
cagaccaccgcgaccaaua

SEQ ID NO: 1660693 - RNA, 19 nt, Artificial Sequence
  Description of Artificial Sequence: Synthetic oligonucleotide
ucccgcauccaaugcccac

SEQ ID NO: 1660694 - RNA, 19 nt, Artificial Sequence
  Description of Artificial Sequence: Synthetic oligonucleotide
ccugaccagacacgugugg

SEQ ID NO: 1660695 - RNA, 19 nt, Artificial Sequence
  Description of Artificial Sequence: Synthetic oligonucleotide
ggggagugacuccaggaca

SEQ ID NO: 1660696 - RNA, 19 nt, Artificial Sequence
  Description of Artificial Sequence: Synthetic oligonucleotide
guacaaucacuggggccag

SEQ ID NO: 1660697 - RNA, 19 nt, Artificial Sequence
  Description of Artificial Sequence: Synthetic oligonucleotide
gggagugacuccaggacac

SEQ ID NO: 1660698 - RNA, 19 nt, Artificial Sequence
  Description of Artificial Sequence: Synthetic oligonucleotide
aaucauggauucagcccuu

SEQ ID NO: 1660699 - RNA, 19 nt, Artificial Sequence
  Description of Artificial Sequence: Synthetic oligonucleotide
agccuggcaaucauggauu

SEQ ID NO: 1660700 - RNA, 19 nt, Artificial Sequence
  Description of Artificial Sequence: Synthetic oligonucleotide
ggugcugucgcggggccgg

SEQ ID NO: 1660701 - RNA, 19 nt, Artificial Sequence
  Description of Artificial Sequence: Synthetic oligonucleotide
cggacagaauugauggagc

SEQ ID NO: 1660702 - RNA, 19 nt, Artificial Sequence
  Description of Artificial Sequence: Synthetic oligonucleotide
caucaucaugaagcgcaug

SEQ ID NO: 1660703 - RNA, 19 nt, Artificial Sequence
  Description of Artificial Sequence: Synthetic oligonucleotide
ggaccaaacaucagaaggu

SEQ ID NO: 1660704 - RNA, 19 nt, Artificial Sequence
  Description of Artificial Sequence: Synthetic oligonucleotide
ugcugcugcugcugcugca

SEQ ID NO: 1660705 - RNA, 19 nt, Artificial Sequence
  Description of Artificial Sequence: Synthetic oligonucleotide
gcauccaaugcccacccaa

SEQ ID NO: 1660706 - RNA, 19 nt, Artificial Sequence
  Description of Artificial Sequence: Synthetic oligonucleotide
cugcugcugcugcugcugc

SEQ ID NO: 1660707 - RNA, 19 nt, Artificial Sequence
  Description of Artificial Sequence: Synthetic oligonucleotide
agaccaccgcgaccaauaa

SEQ ID NO: 1660708 - RNA, 19 nt, Artificial Sequence
  Description of Artificial Sequence: Synthetic oligonucleotide
cugucgcggggccggaaag

SEQ ID NO: 1660709 - RNA, 19 nt, Artificial Sequence
  Description of Artificial Sequence: Synthetic oligonucleotide
cacgguacccagacaggca

SEQ ID NO: 1660710 - RNA, 19 nt, Artificial Sequence
  Description of Artificial Sequence: Synthetic oligonucleotide
cacagcuagcaagcacacc

SEQ ID NO: 1660711 - RNA, 19 nt, Artificial Sequence
  Description of Artificial Sequence: Synthetic oligonucleotide
agccuguuucacagcaaug

SEQ ID NO: 1660712 - RNA, 19 nt, Artificial Sequence
  Description of Artificial Sequence: Synthetic oligonucleotide
ccaauaagguacaaucacu

SEQ ID NO: 1660713 - RNA, 19 nt, Artificial Sequence
  Description of Artificial Sequence: Synthetic oligonucleotide
guagccugaccagacacgu

SEQ ID NO: 1660714 - RNA, 19 nt, Artificial Sequence
  Description of Artificial Sequence: Synthetic oligonucleotide
caaucacuggggccaguca

SEQ ID NO: 1660715 - RNA, 19 nt, Artificial Sequence
  Description of Artificial Sequence: Synthetic oligonucleotide
ggggcagguccacugcugc

SEQ ID NO: 1660716 - RNA, 19 nt, Artificial Sequence
  Description of Artificial Sequence: Synthetic oligonucleotide
gcacgguacccagacaggc

SEQ ID NO: 1660717 - RNA, 19 nt, Artificial Sequence
  Description of Artificial Sequence: Synthetic oligonucleotide
acgcagagacacagggaag

SEQ ID NO: 1660718 - RNA, 19 nt, Artificial Sequence
  Description of Artificial Sequence: Synthetic oligonucleotide
gagcccucaaucagaaccu

SEQ ID NO: 1660719 - RNA, 19 nt, Artificial Sequence
  Description of Artificial Sequence: Synthetic oligonucleotide
ugcugcugcugcugcugcu

SEQ ID NO: 1660720 - RNA, 19 nt, Artificial Sequence
  Description of Artificial Sequence: Synthetic oligonucleotide
agcugaugucauaccccuc

SEQ ID NO: 1660721 - RNA, 19 nt, Artificial Sequence
  Description of Artificial Sequence: Synthetic oligonucleotide
ugcgggcccgggcauugac

SEQ ID NO: 1660722 - RNA, 19 nt, Artificial Sequence
  Description of Artificial Sequence: Synthetic oligonucleotide
cugacccggacagaauuga

SEQ ID NO: 1660723 - RNA, 19 nt, Artificial Sequence
  Description of Artificial Sequence: Synthetic oligonucleotide
cacguguggccuuggggca

SEQ ID NO: 1660724 - RNA, 19 nt, Artificial Sequence
  Description of Artificial Sequence: Synthetic oligonucleotide
uccugcugcugcugcugcu

SEQ ID NO: 1660725 - RNA, 19 nt, Artificial Sequence
  Description of Artificial Sequence: Synthetic oligonucleotide
acacgcagagacacaggga

SEQ ID NO: 1660726 - RNA, 19 nt, Artificial Sequence
  Description of Artificial Sequence: Synthetic oligonucleotide
cauggauucagcccuuguu

SEQ ID NO: 1660727 - RNA, 19 nt, Artificial Sequence
  Description of Artificial Sequence: Synthetic oligonucleotide
cacuaagguaggggcggag

SEQ ID NO: 1660728 - RNA, 19 nt, Artificial Sequence
  Description of Artificial Sequence: Synthetic oligonucleotide
ccgacucccgcauccaaug

SEQ ID NO: 1660729 - RNA, 19 nt, Artificial Sequence
  Description of Artificial Sequence: Synthetic oligonucleotide
ggcacgguacccagacagg

SEQ ID NO: 1660730 - RNA, 19 nt, Artificial Sequence
  Description of Artificial Sequence: Synthetic oligonucleotide
acguguggccuuggggcag

SEQ ID NO: 1660731 - RNA, 19 nt, Artificial Sequence
  Description of Artificial Sequence: Synthetic oligonucleotide
caaccagugugguagccau

SEQ ID NO: 1660732 - RNA, 19 nt, Artificial Sequence
  Description of Artificial Sequence: Synthetic oligonucleotide
ggaguucuuugcuacuccu

SEQ ID NO: 1660733 - RNA, 19 nt, Artificial Sequence
  Description of Artificial Sequence: Synthetic oligonucleotide
ccucuggcuuguugugucg

SEQ ID NO: 1660734 - RNA, 19 nt, Artificial Sequence
  Description of Artificial Sequence: Synthetic oligonucleotide
ccaaugcccacccaaccca

SEQ ID NO: 1660735 - RNA, 19 nt, Artificial Sequence
  Description of Artificial Sequence: Synthetic oligonucleotide
caguguggcccgcacggca

SEQ ID NO: 1660736 - RNA, 19 nt, Artificial Sequence
  Description of Artificial Sequence: Synthetic oligonucleotide
cccgggcauugacagauag

SEQ ID NO: 1660737 - RNA, 19 nt, Artificial Sequence
  Description of Artificial Sequence: Synthetic oligonucleotide
accgcugcuccggggagug

SEQ ID NO: 1660738 - RNA, 19 nt, Artificial Sequence
  Description of Artificial Sequence: Synthetic oligonucleotide
uuccacgaccugggaggag

SEQ ID NO: 1660739 - RNA, 19 nt, Artificial Sequence
  Description of Artificial Sequence: Synthetic oligonucleotide
ccgggcauugacagauagc

SEQ ID NO: 1660740 - RNA, 19 nt, Artificial Sequence
  Description of Artificial Sequence: Synthetic oligonucleotide
ggaggcuaguagagagucc

SEQ ID NO: 1660741 - RNA, 19 nt, Artificial Sequence
  Description of Artificial Sequence: Synthetic oligonucleotide
ccagccagaugguuuaaaa

SEQ ID NO: 1660742 - RNA, 19 nt, Artificial Sequence
  Description of Artificial Sequence: Synthetic oligonucleotide
guuuagguuucaagacgcu

SEQ ID NO: 1660743 - RNA, 19 nt, Artificial Sequence
  Description of Artificial Sequence: Synthetic oligonucleotide
caccugggguggcauagga

SEQ ID NO: 1660744 - RNA, 19 nt, Artificial Sequence
  Description of Artificial Sequence: Synthetic oligonucleotide
cggcacuaagguaggggcg

SEQ ID NO: 1660745 - RNA, 19 nt, Artificial Sequence
  Description of Artificial Sequence: Synthetic oligonucleotide
caugaacuuauggcauaaa

SEQ ID NO: 1660746 - RNA, 19 nt, Artificial Sequence
  Description of Artificial Sequence: Synthetic oligonucleotide
cagauagcuucaucucacu

SEQ ID NO: 1660747 - RNA, 19 nt, Artificial Sequence
  Description of Artificial Sequence: Synthetic oligonucleotide
guuccacgaccugggagga

SEQ ID NO: 1660748 - RNA, 19 nt, Artificial Sequence
  Description of Artificial Sequence: Synthetic oligonucleotide
gcaugaacuuauggcauaa

SEQ ID NO: 1660749 - RNA, 19 nt, Artificial Sequence
  Description of Artificial Sequence: Synthetic oligonucleotide
cuuuuggaccccagcuccu

SEQ ID NO: 1660750 - RNA, 19 nt, Artificial Sequence
  Description of Artificial Sequence: Synthetic oligonucleotide
agguaggggcggagagugg

SEQ ID NO: 1660751 - RNA, 19 nt, Artificial Sequence
  Description of Artificial Sequence: Synthetic oligonucleotide
cugcugcaccgcugcuccg

SEQ ID NO: 1660752 - RNA, 19 nt, Artificial Sequence
  Description of Artificial Sequence: Synthetic oligonucleotide
cagacacguguggccuugg

SEQ ID NO: 1660753 - RNA, 19 nt, Artificial Sequence
  Description of Artificial Sequence: Synthetic oligonucleotide
cauaccccuccacagguuu

SEQ ID NO: 1660754 - RNA, 19 nt, Artificial Sequence
  Description of Artificial Sequence: Synthetic oligonucleotide
gcugcugcugcugcugcug

SEQ ID NO: 1660755 - RNA, 19 nt, Artificial Sequence
  Description of Artificial Sequence: Synthetic oligonucleotide
cuucucauuccugcugaua

SEQ ID NO: 1660756 - RNA, 19 nt, Artificial Sequence
  Description of Artificial Sequence: Synthetic oligonucleotide
cccgcauccaaugcccacc

SEQ ID NO: 1660757 - RNA, 19 nt, Artificial Sequence
  Description of Artificial Sequence: Synthetic oligonucleotide
caccgcgaccaauaaggua

SEQ ID NO: 1660758 - RNA, 19 nt, Artificial Sequence
  Description of Artificial Sequence: Synthetic oligonucleotide
cacgaccugggaggagaag

SEQ ID NO: 1660759 - RNA, 19 nt, Artificial Sequence
  Description of Artificial Sequence: Synthetic oligonucleotide
gucguuccacgaccuggga

SEQ ID NO: 1660760 - RNA, 19 nt, Artificial Sequence
  Description of Artificial Sequence: Synthetic oligonucleotide
agguuucaagacgcuuaaa

SEQ ID NO: 1660761 - RNA, 19 nt, Artificial Sequence
  Description of Artificial Sequence: Synthetic oligonucleotide
agguccacugcugccuuuu

SEQ ID NO: 1660762 - RNA, 19 nt, Artificial Sequence
  Description of Artificial Sequence: Synthetic oligonucleotide
ggagugacuccaggacacc

SEQ ID NO: 1660763 - RNA, 19 nt, Artificial Sequence
  Description of Artificial Sequence: Synthetic oligonucleotide
ggcuaguagagaguccuua

SEQ ID NO: 1660764 - RNA, 19 nt, Artificial Sequence
  Description of Artificial Sequence: Synthetic oligonucleotide
cugcuccggggagugacuc

SEQ ID NO: 1660765 - RNA, 19 nt, Artificial Sequence
  Description of Artificial Sequence: Synthetic oligonucleotide
ccgcauccaaugcccaccc

SEQ ID NO: 1660766 - RNA, 19 nt, Artificial Sequence
  Description of Artificial Sequence: Synthetic oligonucleotide
cucucuccccaccuggggu

SEQ ID NO: 1660767 - RNA, 19 nt, Artificial Sequence
  Description of Artificial Sequence: Synthetic oligonucleotide
caggaggcuaguagagagu

SEQ ID NO: 1660768 - RNA, 19 nt, Artificial Sequence
  Description of Artificial Sequence: Synthetic oligonucleotide
cugcugauaguaacagguu

SEQ ID NO: 1660769 - RNA, 19 nt, Artificial Sequence
  Description of Artificial Sequence: Synthetic oligonucleotide
ccuccaugaaguggauuac

SEQ ID NO: 1660770 - RNA, 19 nt, Artificial Sequence
  Description of Artificial Sequence: Synthetic oligonucleotide
guaggggcggagaguggca

SEQ ID NO: 1660771 - RNA, 19 nt, Artificial Sequence
  Description of Artificial Sequence: Synthetic oligonucleotide
cggggagugacuccaggac

SEQ ID NO: 1660772 - RNA, 19 nt, Artificial Sequence
  Description of Artificial Sequence: Synthetic oligonucleotide
cucccgcauccaaugccca

SEQ ID NO: 1660773 - RNA, 19 nt, Artificial Sequence
  Description of Artificial Sequence: Synthetic oligonucleotide
gcugcugcugcugcugcac

SEQ ID NO: 1660774 - RNA, 19 nt, Artificial Sequence
  Description of Artificial Sequence: Synthetic oligonucleotide
cacacccgacucccgcauc

SEQ ID NO: 1660775 - RNA, 19 nt, Artificial Sequence
  Description of Artificial Sequence: Synthetic oligonucleotide
cuucgcagacacgcagaga

SEQ ID NO: 1660776 - RNA, 19 nt, Artificial Sequence
  Description of Artificial Sequence: Synthetic oligonucleotide
cgcacggcacuaagguagg

SEQ ID NO: 1660777 - RNA, 19 nt, Artificial Sequence
  Description of Artificial Sequence: Synthetic oligonucleotide
ggccaaggaggcuuugagu

SEQ ID NO: 1660778 - RNA, 19 nt, Artificial Sequence
  Description of Artificial Sequence: Synthetic oligonucleotide
accugggguggcauaggaa

SEQ ID NO: 1660779 - RNA, 19 nt, Artificial Sequence
  Description of Artificial Sequence: Synthetic oligonucleotide
caggcccgcccagaccacc

SEQ ID NO: 1660780 - RNA, 19 nt, Artificial Sequence
  Description of Artificial Sequence: Synthetic oligonucleotide
ccaaggaggcuuugaguaa

SEQ ID NO: 1660781 - RNA, 19 nt, Artificial Sequence
  Description of Artificial Sequence: Synthetic oligonucleotide
cugcucgcaucaucaugaa

SEQ ID NO: 1660782 - RNA, 19 nt, Artificial Sequence
  Description of Artificial Sequence: Synthetic oligonucleotide
ucuccccaccugggguggc

SEQ ID NO: 1660783 - RNA, 19 nt, Artificial Sequence
  Description of Artificial Sequence: Synthetic oligonucleotide
ccugcugcugcugcugcug

SEQ ID NO: 1660784 - RNA, 19 nt, Artificial Sequence
  Description of Artificial Sequence: Synthetic oligonucleotide
ccuguuucacagcaaugcu

SEQ ID NO: 1660785 - RNA, 19 nt, Artificial Sequence
  Description of Artificial Sequence: Synthetic oligonucleotide
gcccgcacggcacuaaggu

SEQ ID NO: 1660786 - RNA, 19 nt, Artificial Sequence
  Description of Artificial Sequence: Synthetic oligonucleotide
gguuuccuucgaagaauaa

SEQ ID NO: 1660787 - RNA, 19 nt, Artificial Sequence
  Description of Artificial Sequence: Synthetic oligonucleotide
gcuccggggagugacucca

SEQ ID NO: 1660788 - RNA, 19 nt, Artificial Sequence
  Description of Artificial Sequence: Synthetic oligonucleotide
gcaccgcugcuccggggag

SEQ ID NO: 1660789 - RNA, 19 nt, Artificial Sequence
  Description of Artificial Sequence: Synthetic oligonucleotide
ggaccccagcuccuagguc

SEQ ID NO: 1660790 - RNA, 19 nt, Artificial Sequence
  Description of Artificial Sequence: Synthetic oligonucleotide
ccucucagcugggaaggug

SEQ ID NO: 1660791 - RNA, 19 nt, Artificial Sequence
  Description of Artificial Sequence: Synthetic oligonucleotide
ccaacccagcuuccugcug

SEQ ID NO: 1660792 - RNA, 19 nt, Artificial Sequence
  Description of Artificial Sequence: Synthetic oligonucleotide
ggacucaccucugcaccuc

SEQ ID NO: 1660793 - RNA, 19 nt, Artificial Sequence
  Description of Artificial Sequence: Synthetic oligonucleotide
ccaaccagugugguagcca

SEQ ID NO: 1660794 - RNA, 19 nt, Artificial Sequence
  Description of Artificial Sequence: Synthetic oligonucleotide
augcugacccggacagaau

SEQ ID NO: 1660795 - RNA, 19 nt, Artificial Sequence
  Description of Artificial Sequence: Synthetic oligonucleotide
gccuuggggccucucagcu

SEQ ID NO: 1660796 - RNA, 19 nt, Artificial Sequence
  Description of Artificial Sequence: Synthetic oligonucleotide
ccggggagugacuccagga

SEQ ID NO: 1660797 - RNA, 19 nt, Artificial Sequence
  Description of Artificial Sequence: Synthetic oligonucleotide
gcacggcacuaagguaggg

SEQ ID NO: 1660798 - RNA, 19 nt, Artificial Sequence
  Description of Artificial Sequence: Synthetic oligonucleotide
auccagccagaugguuuaa

SEQ ID NO: 1660799 - RNA, 19 nt, Artificial Sequence
  Description of Artificial Sequence: Synthetic oligonucleotide
caggcacgguacccagaca

SEQ ID NO: 1660800 - RNA, 19 nt, Artificial Sequence
  Description of Artificial Sequence: Synthetic oligonucleotide
aggcuaguagagaguccuu

SEQ ID NO: 1660801 - RNA, 19 nt, Artificial Sequence
  Description of Artificial Sequence: Synthetic oligonucleotide
cgacucccgcauccaaugc

SEQ ID NO: 1660802 - RNA, 19 nt, Artificial Sequence
  Description of Artificial Sequence: Synthetic oligonucleotide
cuccuaggucagccuggca

SEQ ID NO: 1660803 - RNA, 19 nt, Artificial Sequence
  Description of Artificial Sequence: Synthetic oligonucleotide
gcugucgcggggccggaaa

SEQ ID NO: 1660804 - RNA, 19 nt, Artificial Sequence
  Description of Artificial Sequence: Synthetic oligonucleotide
cgccuucuggcuccaggcc

SEQ ID NO: 1660805 - RNA, 19 nt, Artificial Sequence
  Description of Artificial Sequence: Synthetic oligonucleotide
cucuggcuuguugugucgu

SEQ ID NO: 1660806 - RNA, 19 nt, Artificial Sequence
  Description of Artificial Sequence: Synthetic oligonucleotide
ccagaaguugccuggcuuu

SEQ ID NO: 1660807 - RNA, 19 nt, Artificial Sequence
  Description of Artificial Sequence: Synthetic oligonucleotide
cauugacagauagcuucau

SEQ ID NO: 1660808 - RNA, 19 nt, Artificial Sequence
  Description of Artificial Sequence: Synthetic oligonucleotide
caggcaagccuuggggccu

SEQ ID NO: 1660809 - RNA, 19 nt, Artificial Sequence
  Description of Artificial Sequence: Synthetic oligonucleotide
ggcccgggcauugacagau

SEQ ID NO: 1660810 - RNA, 19 nt, Artificial Sequence
  Description of Artificial Sequence: Synthetic oligonucleotide
cccggacagaauugaugga

SEQ ID NO: 1660811 - RNA, 19 nt, Artificial Sequence
  Description of Artificial Sequence: Synthetic oligonucleotide
gcgcaugaacuuauggcau

SEQ ID NO: 1660812 - RNA, 19 nt, Artificial Sequence
  Description of Artificial Sequence: Synthetic oligonucleotide
gcgaccaauaagguacaau

SEQ ID NO: 1660813 - RNA, 19 nt, Artificial Sequence
  Description of Artificial Sequence: Synthetic oligonucleotide
gcccugcagccagaaguug

SEQ ID NO: 1660814 - RNA, 19 nt, Artificial Sequence
  Description of Artificial Sequence: Synthetic oligonucleotide
cgcaugaacuuauggcaua

SEQ ID NO: 1660815 - RNA, 19 nt, Artificial Sequence
  Description of Artificial Sequence: Synthetic oligonucleotide
cagaaguugccuggcuuuu

SEQ ID NO: 1660816 - RNA, 19 nt, Artificial Sequence
  Description of Artificial Sequence: Synthetic oligonucleotide
gcacuaagguaggggcgga

SEQ ID NO: 1660817 - RNA, 19 nt, Artificial Sequence
  Description of Artificial Sequence: Synthetic oligonucleotide
gcccuuguucccaaccagu

SEQ ID NO: 1660818 - RNA, 19 nt, Artificial Sequence
  Description of Artificial Sequence: Synthetic oligonucleotide
ccuggcaaucauggauuca

SEQ ID NO: 1660819 - RNA, 19 nt, Artificial Sequence
  Description of Artificial Sequence: Synthetic oligonucleotide
cgcggggccggaaagcgga

SEQ ID NO: 1660820 - RNA, 19 nt, Artificial Sequence
  Description of Artificial Sequence: Synthetic oligonucleotide
cacccgacucccgcaucca

SEQ ID NO: 1660821 - RNA, 19 nt, Artificial Sequence
  Description of Artificial Sequence: Synthetic oligonucleotide
ccgcgaccaauaagguaca

SEQ ID NO: 1660822 - RNA, 19 nt, Artificial Sequence
  Description of Artificial Sequence: Synthetic oligonucleotide
gcggagaguggcagucauc

SEQ ID NO: 1660823 - RNA, 19 nt, Artificial Sequence
  Description of Artificial Sequence: Synthetic oligonucleotide
gguggcccugcagccagaa

SEQ ID NO: 1660824 - RNA, 19 nt, Artificial Sequence
  Description of Artificial Sequence: Synthetic oligonucleotide
gguugcaauaggaguucuu

SEQ ID NO: 1660825 - RNA, 19 nt, Artificial Sequence
  Description of Artificial Sequence: Synthetic oligonucleotide
cugcagccagaaguugccu

SEQ ID NO: 1660826 - RNA, 19 nt, Artificial Sequence
  Description of Artificial Sequence: Synthetic oligonucleotide
ggccuuggggcagguccac

SEQ ID NO: 1660827 - RNA, 19 nt, Artificial Sequence
  Description of Artificial Sequence: Synthetic oligonucleotide
gggcggagaguggcaguca

SEQ ID NO: 1660828 - RNA, 19 nt, Artificial Sequence
  Description of Artificial Sequence: Synthetic oligonucleotide
cccgcacggcacuaaggua

SEQ ID NO: 1660829 - RNA, 19 nt, Artificial Sequence
  Description of Artificial Sequence: Synthetic oligonucleotide
ccaccgcgaccaauaaggu

SEQ ID NO: 1660830 - RNA, 19 nt, Artificial Sequence
  Description of Artificial Sequence: Synthetic oligonucleotide
ccacgaccugggaggagaa

SEQ ID NO: 1660831 - RNA, 19 nt, Artificial Sequence
  Description of Artificial Sequence: Synthetic oligonucleotide
cccaacccagcuuccugcu

SEQ ID NO: 1660832 - RNA, 19 nt, Artificial Sequence
  Description of Artificial Sequence: Synthetic oligonucleotide
gcaagccuuggggccucuc

SEQ ID NO: 1660833 - RNA, 19 nt, Artificial Sequence
  Description of Artificial Sequence: Synthetic oligonucleotide
cccgacucccgcauccaau

SEQ ID NO: 1660834 - RNA, 19 nt, Artificial Sequence
  Description of Artificial Sequence: Synthetic oligonucleotide
gcugcuccggggagugacu

SEQ ID NO: 1660835 - RNA, 19 nt, Artificial Sequence
  Description of Artificial Sequence: Synthetic oligonucleotide
caccgcugcuccggggagu

SEQ ID NO: 1660836 - RNA, 19 nt, Artificial Sequence
  Description of Artificial Sequence: Synthetic oligonucleotide
ccagaccaccgcgaccaau

SEQ ID NO: 1660837 - RNA, 19 nt, Artificial Sequence
  Description of Artificial Sequence: Synthetic oligonucleotide
cgcgaccaauaagguacaa

SEQ ID NO: 1660838 - RNA, 19 nt, Artificial Sequence
  Description of Artificial Sequence: Synthetic oligonucleotide
gcccgggcauugacagaua

SEQ ID NO: 1660839 - RNA, 19 nt, Artificial Sequence
  Description of Artificial Sequence: Synthetic oligonucleotide
ccgcugcuccggggaguga

SEQ ID NO: 1660840 - RNA, 19 nt, Artificial Sequence
  Description of Artificial Sequence: Synthetic oligonucleotide
aagacuguaauccauaagc

SEQ ID NO: 1660841 - RNA, 19 nt, Artificial Sequence
  Description of Artificial Sequence: Synthetic oligonucleotide
caaaguuagacucauaccg

SEQ ID NO: 1660842 - RNA, 19 nt, Artificial Sequence
  Description of Artificial Sequence: Synthetic oligonucleotide
cauagcuaaagauauaggg

SEQ ID NO: 1660843 - RNA, 19 nt, Artificial Sequence
  Description of Artificial Sequence: Synthetic oligonucleotide
uguucaagaggcuagagcc

SEQ ID NO: 1660844 - RNA, 19 nt, Artificial Sequence
  Description of Artificial Sequence: Synthetic oligonucleotide
cuuuaugacaucaagcacc

SEQ ID NO: 1660845 - RNA, 19 nt, Artificial Sequence
  Description of Artificial Sequence: Synthetic oligonucleotide
agcguuguugacuacaugc

SEQ ID NO: 1660846 - RNA, 19 nt, Artificial Sequence
  Description of Artificial Sequence: Synthetic oligonucleotide
ucauacuuagcacaaauca

SEQ ID NO: 1660847 - RNA, 19 nt, Artificial Sequence
  Description of Artificial Sequence: Synthetic oligonucleotide
aaucgucaacuccagauac

SEQ ID NO: 1660848 - RNA, 19 nt, Artificial Sequence
  Description of Artificial Sequence: Synthetic oligonucleotide
aauaugaucaggcucgagu

SEQ ID NO: 1660849 - RNA, 19 nt, Artificial Sequence
  Description of Artificial Sequence: Synthetic oligonucleotide
acuuggaagacuguaaucc

SEQ ID NO: 1660850 - RNA, 19 nt, Artificial Sequence
  Description of Artificial Sequence: Synthetic oligonucleotide
accuuuaucaugaagaagg

SEQ ID NO: 1660851 - RNA, 19 nt, Artificial Sequence
  Description of Artificial Sequence: Synthetic oligonucleotide
aauaucaccagaucgucca

SEQ ID NO: 1660852 - RNA, 19 nt, Artificial Sequence
  Description of Artificial Sequence: Synthetic oligonucleotide
gauucuaccaacccgagac

SEQ ID NO: 1660853 - RNA, 19 nt, Artificial Sequence
  Description of Artificial Sequence: Synthetic oligonucleotide
aaucauuaaagccagcaau

SEQ ID NO: 1660854 - RNA, 19 nt, Artificial Sequence
  Description of Artificial Sequence: Synthetic oligonucleotide
ugccauaggaacuacaaag

SEQ ID NO: 1660855 - RNA, 19 nt, Artificial Sequence
  Description of Artificial Sequence: Synthetic oligonucleotide
uuugcacagacccaagagg

SEQ ID NO: 1660856 - RNA, 19 nt, Artificial Sequence
  Description of Artificial Sequence: Synthetic oligonucleotide
uguaguagaaugaaugcac

SEQ ID NO: 1660857 - RNA, 19 nt, Artificial Sequence
  Description of Artificial Sequence: Synthetic oligonucleotide
acaaaguuagacucauacc

SEQ ID NO: 1660858 - RNA, 19 nt, Artificial Sequence
  Description of Artificial Sequence: Synthetic oligonucleotide
agacccaagaggcacagcc

SEQ ID NO: 1660859 - RNA, 19 nt, Artificial Sequence
  Description of Artificial Sequence: Synthetic oligonucleotide
agaucguccaauuccaugg

SEQ ID NO: 1660860 - RNA, 19 nt, Artificial Sequence
  Description of Artificial Sequence: Synthetic oligonucleotide
aaaguguagccacucacag

SEQ ID NO: 1660861 - RNA, 19 nt, Artificial Sequence
  Description of Artificial Sequence: Synthetic oligonucleotide
acagaauaugaucaggcuc

SEQ ID NO: 1660862 - RNA, 19 nt, Artificial Sequence
  Description of Artificial Sequence: Synthetic oligonucleotide
gugauaaggacaucuaagg

SEQ ID NO: 1660863 - RNA, 19 nt, Artificial Sequence
  Description of Artificial Sequence: Synthetic oligonucleotide
gguaauuuuguucaagagg

SEQ ID NO: 1660864 - RNA, 19 nt, Artificial Sequence
  Description of Artificial Sequence: Synthetic oligonucleotide
gauguaguagaaugaaugc

SEQ ID NO: 1660865 - RNA, 19 nt, Artificial Sequence
  Description of Artificial Sequence: Synthetic oligonucleotide
ugaacgaaaacgucgauuc

SEQ ID NO: 1660866 - RNA, 19 nt, Artificial Sequence
  Description of Artificial Sequence: Synthetic oligonucleotide
gaaaccuuuaucaugaaga

SEQ ID NO: 1660867 - RNA, 19 nt, Artificial Sequence
  Description of Artificial Sequence: Synthetic oligonucleotide
auguuguccaucuaguguc

SEQ ID NO: 1660868 - RNA, 19 nt, Artificial Sequence
  Description of Artificial Sequence: Synthetic oligonucleotide
agcuuuaugacaucaagca

SEQ ID NO: 1660869 - RNA, 19 nt, Artificial Sequence
  Description of Artificial Sequence: Synthetic oligonucleotide
ggaacuacaaagcaauugg

SEQ ID NO: 1660870 - RNA, 19 nt, Artificial Sequence
  Description of Artificial Sequence: Synthetic oligonucleotide
aauccauaagcguuguuga

SEQ ID NO: 1660871 - RNA, 19 nt, Artificial Sequence
  Description of Artificial Sequence: Synthetic oligonucleotide
uguguuuaagcacuucuca

SEQ ID NO: 1660872 - RNA, 19 nt, Artificial Sequence
  Description of Artificial Sequence: Synthetic oligonucleotide
aaaagcauugagccaagcu

SEQ ID NO: 1660873 - RNA, 19 nt, Artificial Sequence
  Description of Artificial Sequence: Synthetic oligonucleotide
aacaagucaacauccugug

SEQ ID NO: 1660874 - RNA, 19 nt, Artificial Sequence
  Description of Artificial Sequence: Synthetic oligonucleotide
aaaacgucgauucuaccaa

SEQ ID NO: 1660875 - RNA, 19 nt, Artificial Sequence
  Description of Artificial Sequence: Synthetic oligonucleotide
uaauccauaagcguuguug

SEQ ID NO: 1660876 - RNA, 19 nt, Artificial Sequence
  Description of Artificial Sequence: Synthetic oligonucleotide
aaggguaauuaucugugug

SEQ ID NO: 1660877 - RNA, 19 nt, Artificial Sequence
  Description of Artificial Sequence: Synthetic oligonucleotide
aaaguuagacucauaccgg

SEQ ID NO: 1660878 - RNA, 19 nt, Artificial Sequence
  Description of Artificial Sequence: Synthetic oligonucleotide
ugaaccuguaaugacgacg

SEQ ID NO: 1660879 - RNA, 19 nt, Artificial Sequence
  Description of Artificial Sequence: Synthetic oligonucleotide
gaugcaugcacuuggaaga

SEQ ID NO: 1660880 - RNA, 19 nt, Artificial Sequence
  Description of Artificial Sequence: Synthetic oligonucleotide
aagccuuggaaaguguagc

SEQ ID NO: 1660881 - RNA, 19 nt, Artificial Sequence
  Description of Artificial Sequence: Synthetic oligonucleotide
ugcggaaugucauacuuag

SEQ ID NO: 1660882 - RNA, 19 nt, Artificial Sequence
  Description of Artificial Sequence: Synthetic oligonucleotide
aaauaucaccagaucgucc

SEQ ID NO: 1660883 - RNA, 19 nt, Artificial Sequence
  Description of Artificial Sequence: Synthetic oligonucleotide
gaaaacgucgauucuacca

SEQ ID NO: 1660884 - RNA, 19 nt, Artificial Sequence
  Description of Artificial Sequence: Synthetic oligonucleotide
auaaucgucaacuccagau

SEQ ID NO: 1660885 - RNA, 19 nt, Artificial Sequence
  Description of Artificial Sequence: Synthetic oligonucleotide
uacuuagcacaaaucacag

SEQ ID NO: 1660886 - RNA, 19 nt, Artificial Sequence
  Description of Artificial Sequence: Synthetic oligonucleotide
uuaacagcuucuuguagcc

SEQ ID NO: 1660887 - RNA, 19 nt, Artificial Sequence
  Description of Artificial Sequence: Synthetic oligonucleotide
ucaugaagaaggucauugg

SEQ ID NO: 1660888 - RNA, 19 nt, Artificial Sequence
  Description of Artificial Sequence: Synthetic oligonucleotide
acgacgagcaaccaaagca

SEQ ID NO: 1660889 - RNA, 19 nt, Artificial Sequence
  Description of Artificial Sequence: Synthetic oligonucleotide
gucauagcuaaagauauag

SEQ ID NO: 1660890 - RNA, 19 nt, Artificial Sequence
  Description of Artificial Sequence: Synthetic oligonucleotide
aaaccuuuaucaugaagaa

SEQ ID NO: 1660891 - RNA, 19 nt, Artificial Sequence
  Description of Artificial Sequence: Synthetic oligonucleotide
uguaaugacgacgagcaac

SEQ ID NO: 1660892 - RNA, 19 nt, Artificial Sequence
  Description of Artificial Sequence: Synthetic oligonucleotide
auggacuuaaagcaggacu

SEQ ID NO: 1660893 - RNA, 19 nt, Artificial Sequence
  Description of Artificial Sequence: Synthetic oligonucleotide
aguguagccacucacaguu

SEQ ID NO: 1660894 - RNA, 19 nt, Artificial Sequence
  Description of Artificial Sequence: Synthetic oligonucleotide
ugagguaagcacaagggua

SEQ ID NO: 1660895 - RNA, 19 nt, Artificial Sequence
  Description of Artificial Sequence: Synthetic oligonucleotide
uuguucaagaggcuagagc

SEQ ID NO: 1660896 - RNA, 19 nt, Artificial Sequence
  Description of Artificial Sequence: Synthetic oligonucleotide
uagcuaaagauauaggguu

SEQ ID NO: 1660897 - RNA, 19 nt, Artificial Sequence
  Description of Artificial Sequence: Synthetic oligonucleotide
aaacgucgauucuaccaac

SEQ ID NO: 1660898 - RNA, 19 nt, Artificial Sequence
  Description of Artificial Sequence: Synthetic oligonucleotide
aaguuagacucauaccggu

SEQ ID NO: 1660899 - RNA, 19 nt, Artificial Sequence
  Description of Artificial Sequence: Synthetic oligonucleotide
auaaggacaucuaaggaug

SEQ ID NO: 1660900 - RNA, 19 nt, Artificial Sequence
  Description of Artificial Sequence: Synthetic oligonucleotide
aagauauaggguugugaga

SEQ ID NO: 1660901 - RNA, 19 nt, Artificial Sequence
  Description of Artificial Sequence: Synthetic oligonucleotide
ucuuacuguguuuaagcac

SEQ ID NO: 1660902 - RNA, 19 nt, Artificial Sequence
  Description of Artificial Sequence: Synthetic oligonucleotide
auuauagcaccaccuacug

SEQ ID NO: 1660903 - RNA, 19 nt, Artificial Sequence
  Description of Artificial Sequence: Synthetic oligonucleotide
caagucaacauccuguguc

SEQ ID NO: 1660904 - RNA, 19 nt, Artificial Sequence
  Description of Artificial Sequence: Synthetic oligonucleotide
uuauagcaccaccuacugg

SEQ ID NO: 1660905 - RNA, 19 nt, Artificial Sequence
  Description of Artificial Sequence: Synthetic oligonucleotide
agauauaggguugugagau

SEQ ID NO: 1660906 - RNA, 19 nt, Artificial Sequence
  Description of Artificial Sequence: Synthetic oligonucleotide
acuguguuuaagcacuucu

SEQ ID NO: 1660907 - RNA, 19 nt, Artificial Sequence
  Description of Artificial Sequence: Synthetic oligonucleotide
ucuagugucccaaguguca

SEQ ID NO: 1660908 - RNA, 19 nt, Artificial Sequence
  Description of Artificial Sequence: Synthetic oligonucleotide
guucaguggacaaauauac

SEQ ID NO: 1660909 - RNA, 19 nt, Artificial Sequence
  Description of Artificial Sequence: Synthetic oligonucleotide
gagcaaccaaagcagaggc

SEQ ID NO: 1660910 - RNA, 19 nt, Artificial Sequence
  Description of Artificial Sequence: Synthetic oligonucleotide
auagcuaaagauauagggu

SEQ ID NO: 1660911 - RNA, 19 nt, Artificial Sequence
  Description of Artificial Sequence: Synthetic oligonucleotide
uuagacucauaccgguugc

SEQ ID NO: 1660912 - RNA, 19 nt, Artificial Sequence
  Description of Artificial Sequence: Synthetic oligonucleotide
ucuauccguggccauauga

SEQ ID NO: 1660913 - RNA, 19 nt, Artificial Sequence
  Description of Artificial Sequence: Synthetic oligonucleotide
uguagccacucacaguuug

SEQ ID NO: 1660914 - RNA, 19 nt, Artificial Sequence
  Description of Artificial Sequence: Synthetic oligonucleotide
accuguaaugacgacgagc

SEQ ID NO: 1660915 - RNA, 19 nt, Artificial Sequence
  Description of Artificial Sequence: Synthetic oligonucleotide
cuacaaagcaauuggccac

SEQ ID NO: 1660916 - RNA, 19 nt, Artificial Sequence
  Description of Artificial Sequence: Synthetic oligonucleotide
aacgucgauucuaccaacc

SEQ ID NO: 1660917 - RNA, 19 nt, Artificial Sequence
  Description of Artificial Sequence: Synthetic oligonucleotide
acgucgauucuaccaaccc

SEQ ID NO: 1660918 - RNA, 19 nt, Artificial Sequence
  Description of Artificial Sequence: Synthetic oligonucleotide
ucauaaucgucaacuccag

SEQ ID NO: 1660919 - RNA, 19 nt, Artificial Sequence
  Description of Artificial Sequence: Synthetic oligonucleotide
gaagacuguaauccauaag

SEQ ID NO: 1660920 - RNA, 19 nt, Artificial Sequence
  Description of Artificial Sequence: Synthetic oligonucleotide
ucuucuaaucuaucaggca

SEQ ID NO: 1660921 - RNA, 19 nt, Artificial Sequence
  Description of Artificial Sequence: Synthetic oligonucleotide
uagcagucuuucauugugg

SEQ ID NO: 1660922 - RNA, 19 nt, Artificial Sequence
  Description of Artificial Sequence: Synthetic oligonucleotide
guagcagucuuucauugug

SEQ ID NO: 1660923 - RNA, 19 nt, Artificial Sequence
  Description of Artificial Sequence: Synthetic oligonucleotide
auacuuagcacaaaucaca

SEQ ID NO: 1660924 - RNA, 19 nt, Artificial Sequence
  Description of Artificial Sequence: Synthetic oligonucleotide
uuagcacaaaucacagcca

SEQ ID NO: 1660925 - RNA, 19 nt, Artificial Sequence
  Description of Artificial Sequence: Synthetic oligonucleotide
caccagaucguccaauucc

SEQ ID NO: 1660926 - RNA, 19 nt, Artificial Sequence
  Description of Artificial Sequence: Synthetic oligonucleotide
guaaugacgacgagcaacc

SEQ ID NO: 1660927 - RNA, 19 nt, Artificial Sequence
  Description of Artificial Sequence: Synthetic oligonucleotide
agacuguaauccauaagcg

SEQ ID NO: 1660928 - RNA, 19 nt, Artificial Sequence
  Description of Artificial Sequence: Synthetic oligonucleotide
ggauguaguagaaugaaug

SEQ ID NO: 1660929 - RNA, 19 nt, Artificial Sequence
  Description of Artificial Sequence: Synthetic oligonucleotide
aagcauugagccaagcuga

SEQ ID NO: 1660930 - RNA, 19 nt, Artificial Sequence
  Description of Artificial Sequence: Synthetic oligonucleotide
uaauuaucugugugggaca

SEQ ID NO: 1660931 - RNA, 19 nt, Artificial Sequence
  Description of Artificial Sequence: Synthetic oligonucleotide
accuacuggaaccauaaaa

SEQ ID NO: 1660932 - RNA, 19 nt, Artificial Sequence
  Description of Artificial Sequence: Synthetic oligonucleotide
aaccuuuaucaugaagaag

SEQ ID NO: 1660933 - RNA, 19 nt, Artificial Sequence
  Description of Artificial Sequence: Synthetic oligonucleotide
acaccggccagcuuuauga

SEQ ID NO: 1660934 - RNA, 19 nt, Artificial Sequence
  Description of Artificial Sequence: Synthetic oligonucleotide
auaugaucaggcucgaguu

SEQ ID NO: 1660935 - RNA, 19 nt, Artificial Sequence
  Description of Artificial Sequence: Synthetic oligonucleotide
ucuaaggauggugaagcug

SEQ ID NO: 1660936 - RNA, 19 nt, Artificial Sequence
  Description of Artificial Sequence: Synthetic oligonucleotide
augaacaccggccagcuuu

SEQ ID NO: 1660937 - RNA, 19 nt, Artificial Sequence
  Description of Artificial Sequence: Synthetic oligonucleotide
uaaucgucaacuccagaua

SEQ ID NO: 1660938 - RNA, 19 nt, Artificial Sequence
  Description of Artificial Sequence: Synthetic oligonucleotide
acaaggguaauuaucugug

SEQ ID NO: 1660939 - RNA, 19 nt, Artificial Sequence
  Description of Artificial Sequence: Synthetic oligonucleotide
uuuaagcacuucucaaguc

SEQ ID NO: 1660940 - RNA, 19 nt, Artificial Sequence
  Description of Artificial Sequence: Synthetic oligonucleotide
gaaccuguaaugacgacga

SEQ ID NO: 1660941 - RNA, 19 nt, Artificial Sequence
  Description of Artificial Sequence: Synthetic oligonucleotide
ggugauaaggacaucuaag

SEQ ID NO: 1660942 - RNA, 19 nt, Artificial Sequence
  Description of Artificial Sequence: Synthetic oligonucleotide
cacccguggagcaaaacag

SEQ ID NO: 1660943 - RNA, 19 nt, Artificial Sequence
  Description of Artificial Sequence: Synthetic oligonucleotide
uaagcacuucucaagucuc

SEQ ID NO: 1660944 - RNA, 19 nt, Artificial Sequence
  Description of Artificial Sequence: Synthetic oligonucleotide
agugucccaagugucauag

SEQ ID NO: 1660945 - RNA, 19 nt, Artificial Sequence
  Description of Artificial Sequence: Synthetic oligonucleotide
ugaaugcacagaauaugau

SEQ ID NO: 1660946 - RNA, 19 nt, Artificial Sequence
  Description of Artificial Sequence: Synthetic oligonucleotide
gaagccuuggaaaguguag

SEQ ID NO: 1660947 - RNA, 19 nt, Artificial Sequence
  Description of Artificial Sequence: Synthetic oligonucleotide
acgaaaacgucgauucuac

SEQ ID NO: 1660948 - RNA, 19 nt, Artificial Sequence
  Description of Artificial Sequence: Synthetic oligonucleotide
uccauaagcguuguugacu

SEQ ID NO: 1660949 - RNA, 19 nt, Artificial Sequence
  Description of Artificial Sequence: Synthetic oligonucleotide
gaugaaccuguaaugacga

SEQ ID NO: 1660950 - RNA, 19 nt, Artificial Sequence
  Description of Artificial Sequence: Synthetic oligonucleotide
gaaauaucaccagaucguc

SEQ ID NO: 1660951 - RNA, 19 nt, Artificial Sequence
  Description of Artificial Sequence: Synthetic oligonucleotide
aacgaaaacgucgauucua

SEQ ID NO: 1660952 - RNA, 19 nt, Artificial Sequence
  Description of Artificial Sequence: Synthetic oligonucleotide
acuucuggucuauccgugg

SEQ ID NO: 1660953 - RNA, 19 nt, Artificial Sequence
  Description of Artificial Sequence: Synthetic oligonucleotide
auauaggguugugagaugu

SEQ ID NO: 1660954 - RNA, 19 nt, Artificial Sequence
  Description of Artificial Sequence: Synthetic oligonucleotide
auaugauauacuuggccuu

SEQ ID NO: 1660955 - RNA, 19 nt, Artificial Sequence
  Description of Artificial Sequence: Synthetic oligonucleotide
uucaagaggcuagagccug

SEQ ID NO: 1660956 - RNA, 19 nt, Artificial Sequence
  Description of Artificial Sequence: Synthetic oligonucleotide
agcaauuauagcaccaccu

SEQ ID NO: 1660957 - RNA, 19 nt, Artificial Sequence
  Description of Artificial Sequence: Synthetic oligonucleotide
aucuaucaggcacccgugg

SEQ ID NO: 1660958 - RNA, 19 nt, Artificial Sequence
  Description of Artificial Sequence: Synthetic oligonucleotide
uaccgguugccauaggaac

SEQ ID NO: 1660959 - RNA, 19 nt, Artificial Sequence
  Description of Artificial Sequence: Synthetic oligonucleotide
uucuaccaacccgagaccc

SEQ ID NO: 1660960 - RNA, 19 nt, Artificial Sequence
  Description of Artificial Sequence: Synthetic oligonucleotide
aguuucaaagccauuuccu

SEQ ID NO: 1660961 - RNA, 19 nt, Artificial Sequence
  Description of Artificial Sequence: Synthetic oligonucleotide
aacccgagaccccugcuga

SEQ ID NO: 1660962 - RNA, 19 nt, Artificial Sequence
  Description of Artificial Sequence: Synthetic oligonucleotide
aagucucuuuaugaacaag

SEQ ID NO: 1660963 - RNA, 19 nt, Artificial Sequence
  Description of Artificial Sequence: Synthetic oligonucleotide
uaugaucaggcucgaguuc

SEQ ID NO: 1660964 - RNA, 19 nt, Artificial Sequence
  Description of Artificial Sequence: Synthetic oligonucleotide
ugagaugcaugcacuugga

SEQ ID NO: 1660965 - RNA, 19 nt, Artificial Sequence
  Description of Artificial Sequence: Synthetic oligonucleotide
ucuaccaacccgagacccc

SEQ ID NO: 1660966 - RNA, 19 nt, Artificial Sequence
  Description of Artificial Sequence: Synthetic oligonucleotide
uugacuacaugcggaaugu

SEQ ID NO: 1660967 - RNA, 19 nt, Artificial Sequence
  Description of Artificial Sequence: Synthetic oligonucleotide
uccaucuagugucccaagu

SEQ ID NO: 1660968 - RNA, 19 nt, Artificial Sequence
  Description of Artificial Sequence: Synthetic oligonucleotide
acaucuaaggauggugaag

SEQ ID NO: 1660969 - RNA, 19 nt, Artificial Sequence
  Description of Artificial Sequence: Synthetic oligonucleotide
gaaaguguagccacucaca

SEQ ID NO: 1660970 - RNA, 19 nt, Artificial Sequence
  Description of Artificial Sequence: Synthetic oligonucleotide
uaagcguuguugacuacau

SEQ ID NO: 1660971 - RNA, 19 nt, Artificial Sequence
  Description of Artificial Sequence: Synthetic oligonucleotide
uuuagccuccacugcauuc

SEQ ID NO: 1660972 - RNA, 19 nt, Artificial Sequence
  Description of Artificial Sequence: Synthetic oligonucleotide
uuuuguucaagaggcuaga

SEQ ID NO: 1660973 - RNA, 19 nt, Artificial Sequence
  Description of Artificial Sequence: Synthetic oligonucleotide
cuguguuuaagcacuucuc

SEQ ID NO: 1660974 - RNA, 19 nt, Artificial Sequence
  Description of Artificial Sequence: Synthetic oligonucleotide
augcacagaauaugaucag

SEQ ID NO: 1660975 - RNA, 19 nt, Artificial Sequence
  Description of Artificial Sequence: Synthetic oligonucleotide
cuuuaugaacaagucaaca

SEQ ID NO: 1660976 - RNA, 19 nt, Artificial Sequence
  Description of Artificial Sequence: Synthetic oligonucleotide
uuguugacuacaugcggaa

SEQ ID NO: 1660977 - RNA, 19 nt, Artificial Sequence
  Description of Artificial Sequence: Synthetic oligonucleotide
auaagcguuguugacuaca

SEQ ID NO: 1660978 - RNA, 19 nt, Artificial Sequence
  Description of Artificial Sequence: Synthetic oligonucleotide
gcucugaacgaaaacgucg

SEQ ID NO: 1660979 - RNA, 19 nt, Artificial Sequence
  Description of Artificial Sequence: Synthetic oligonucleotide
ucaggcucgaguuccugga

SEQ ID NO: 1660980 - RNA, 19 nt, Artificial Sequence
  Description of Artificial Sequence: Synthetic oligonucleotide
uggaaaguguagccacuca

SEQ ID NO: 1660981 - RNA, 19 nt, Artificial Sequence
  Description of Artificial Sequence: Synthetic oligonucleotide
ucgaguuccuggacuuuag

SEQ ID NO: 1660982 - RNA, 19 nt, Artificial Sequence
  Description of Artificial Sequence: Synthetic oligonucleotide
aggguugugagaugucugu

SEQ ID NO: 1660983 - RNA, 19 nt, Artificial Sequence
  Description of Artificial Sequence: Synthetic oligonucleotide
ucgauucuaccaacccgag

SEQ ID NO: 1660984 - RNA, 19 nt, Artificial Sequence
  Description of Artificial Sequence: Synthetic oligonucleotide
accaacccgagaccccugc

SEQ ID NO: 1660985 - RNA, 19 nt, Artificial Sequence
  Description of Artificial Sequence: Synthetic oligonucleotide
ugacgacgagcaaccaaag

SEQ ID NO: 1660986 - RNA, 19 nt, Artificial Sequence
  Description of Artificial Sequence: Synthetic oligonucleotide
cagcaauuauagcaccacc

SEQ ID NO: 1660987 - RNA, 19 nt, Artificial Sequence
  Description of Artificial Sequence: Synthetic oligonucleotide
aaucuaucaggcacccgug

SEQ ID NO: 1660988 - RNA, 19 nt, Artificial Sequence
  Description of Artificial Sequence: Synthetic oligonucleotide
uccaagcucugaacgaaaa

SEQ ID NO: 1660989 - RNA, 19 nt, Artificial Sequence
  Description of Artificial Sequence: Synthetic oligonucleotide
gacuacaugcggaauguca

SEQ ID NO: 1660990 - RNA, 19 nt, Artificial Sequence
  Description of Artificial Sequence: Synthetic oligonucleotide
ucuaucaccacagguucaa

SEQ ID NO: 1660991 - RNA, 19 nt, Artificial Sequence
  Description of Artificial Sequence: Synthetic oligonucleotide
guuuaagcacuucucaagu

SEQ ID NO: 1660992 - RNA, 19 nt, Artificial Sequence
  Description of Artificial Sequence: Synthetic oligonucleotide
aacaccggccagcuuuaug

SEQ ID NO: 1660993 - RNA, 19 nt, Artificial Sequence
  Description of Artificial Sequence: Synthetic oligonucleotide
gacgacgagcaaccaaagc

SEQ ID NO: 1660994 - RNA, 19 nt, Artificial Sequence
  Description of Artificial Sequence: Synthetic oligonucleotide
aucccaauggcugcugccg

SEQ ID NO: 1660995 - RNA, 19 nt, Artificial Sequence
  Description of Artificial Sequence: Synthetic oligonucleotide
ggaaugucauacuuagcac

SEQ ID NO: 1660996 - RNA, 19 nt, Artificial Sequence
  Description of Artificial Sequence: Synthetic oligonucleotide
aggugauaaggacaucuaa

SEQ ID NO: 1660997 - RNA, 19 nt, Artificial Sequence
  Description of Artificial Sequence: Synthetic oligonucleotide
ucuggucuauccguggcca

SEQ ID NO: 1660998 - RNA, 19 nt, Artificial Sequence
  Description of Artificial Sequence: Synthetic oligonucleotide
uaucaggcacccguggagc

SEQ ID NO: 1660999 - RNA, 19 nt, Artificial Sequence
  Description of Artificial Sequence: Synthetic oligonucleotide
cucugaacgaaaacgucga

SEQ ID NO: 1661000 - RNA, 19 nt, Artificial Sequence
  Description of Artificial Sequence: Synthetic oligonucleotide
cagaucguccaauuccaug

SEQ ID NO: 1661001 - RNA, 19 nt, Artificial Sequence
  Description of Artificial Sequence: Synthetic oligonucleotide
guuguugacuacaugcgga

SEQ ID NO: 1661002 - RNA, 19 nt, Artificial Sequence
  Description of Artificial Sequence: Synthetic oligonucleotide
ucgccuuccaaaacauuuc

SEQ ID NO: 1661003 - RNA, 19 nt, Artificial Sequence
  Description of Artificial Sequence: Synthetic oligonucleotide
ggaaaguguagccacucac

SEQ ID NO: 1661004 - RNA, 19 nt, Artificial Sequence
  Description of Artificial Sequence: Synthetic oligonucleotide
aagcguuguugacuacaug

SEQ ID NO: 1661005 - RNA, 19 nt, Artificial Sequence
  Description of Artificial Sequence: Synthetic oligonucleotide
auuccauggaugaaccugu

SEQ ID NO: 1661006 - RNA, 19 nt, Artificial Sequence
  Description of Artificial Sequence: Synthetic oligonucleotide
gucgauucuaccaacccga

SEQ ID NO: 1661007 - RNA, 19 nt, Artificial Sequence
  Description of Artificial Sequence: Synthetic oligonucleotide
ggaaucauuaaagccagca

SEQ ID NO: 1661008 - RNA, 19 nt, Artificial Sequence
  Description of Artificial Sequence: Synthetic oligonucleotide
agaaacuugucugguaaaa

SEQ ID NO: 1661009 - RNA, 19 nt, Artificial Sequence
  Description of Artificial Sequence: Synthetic oligonucleotide
gagguaagcacaaggguaa

SEQ ID NO: 1661010 - RNA, 19 nt, Artificial Sequence
  Description of Artificial Sequence: Synthetic oligonucleotide
agcuaaagauauaggguug

SEQ ID NO: 1661011 - RNA, 19 nt, Artificial Sequence
  Description of Artificial Sequence: Synthetic oligonucleotide
uuugugucguaauguuaaa

SEQ ID NO: 1661012 - RNA, 19 nt, Artificial Sequence
  Description of Artificial Sequence: Synthetic oligonucleotide
aaccuguaaugacgacgag

SEQ ID NO: 1661013 - RNA, 19 nt, Artificial Sequence
  Description of Artificial Sequence: Synthetic oligonucleotide
ucaccagaucguccaauuc

SEQ ID NO: 1661014 - RNA, 19 nt, Artificial Sequence
  Description of Artificial Sequence: Synthetic oligonucleotide
uauccguggccauaugaua

SEQ ID NO: 1661015 - RNA, 19 nt, Artificial Sequence
  Description of Artificial Sequence: Synthetic oligonucleotide
acuccagauacacuugcuu

SEQ ID NO: 1661016 - RNA, 19 nt, Artificial Sequence
  Description of Artificial Sequence: Synthetic oligonucleotide
uauaggguugugagauguc

SEQ ID NO: 1661017 - RNA, 19 nt, Artificial Sequence
  Description of Artificial Sequence: Synthetic oligonucleotide
augacgacgagcaaccaaa

SEQ ID NO: 1661018 - RNA, 19 nt, Artificial Sequence
  Description of Artificial Sequence: Synthetic oligonucleotide
aguucaguggacaaauaua

SEQ ID NO: 1661019 - RNA, 19 nt, Artificial Sequence
  Description of Artificial Sequence: Synthetic oligonucleotide
guaguagaaugaaugcaca

SEQ ID NO: 1661020 - RNA, 19 nt, Artificial Sequence
  Description of Artificial Sequence: Synthetic oligonucleotide
cagugcgcagcucaucgcc

SEQ ID NO: 1661021 - RNA, 19 nt, Artificial Sequence
  Description of Artificial Sequence: Synthetic oligonucleotide
uugugucguaauguuaaaa

SEQ ID NO: 1661022 - RNA, 19 nt, Artificial Sequence
  Description of Artificial Sequence: Synthetic oligonucleotide
acaagucaacauccugugu

SEQ ID NO: 1661023 - RNA, 19 nt, Artificial Sequence
  Description of Artificial Sequence: Synthetic oligonucleotide
uggucuuuugugucguaau

SEQ ID NO: 1661024 - RNA, 19 nt, Artificial Sequence
  Description of Artificial Sequence: Synthetic oligonucleotide
uguccaagcucugaacgaa

SEQ ID NO: 1661025 - RNA, 19 nt, Artificial Sequence
  Description of Artificial Sequence: Synthetic oligonucleotide
ggucauugguccuugucac

SEQ ID NO: 1661026 - RNA, 19 nt, Artificial Sequence
  Description of Artificial Sequence: Synthetic oligonucleotide
cacuuggaagacuguaauc

SEQ ID NO: 1661027 - RNA, 19 nt, Artificial Sequence
  Description of Artificial Sequence: Synthetic oligonucleotide
cauaccgguugccauagga

SEQ ID NO: 1661028 - RNA, 19 nt, Artificial Sequence
  Description of Artificial Sequence: Synthetic oligonucleotide
aucuaaggauggugaagcu

SEQ ID NO: 1661029 - RNA, 19 nt, Artificial Sequence
  Description of Artificial Sequence: Synthetic oligonucleotide
aagcaauuggccacagaau

SEQ ID NO: 1661030 - RNA, 19 nt, Artificial Sequence
  Description of Artificial Sequence: Synthetic oligonucleotide
aucgccuuccaaaacauuu

SEQ ID NO: 1661031 - RNA, 19 nt, Artificial Sequence
  Description of Artificial Sequence: Synthetic oligonucleotide
ugugugggacaugaagccu

SEQ ID NO: 1661032 - RNA, 19 nt, Artificial Sequence
  Description of Artificial Sequence: Synthetic oligonucleotide
uuggaaaguguagccacuc

SEQ ID NO: 1661033 - RNA, 19 nt, Artificial Sequence
  Description of Artificial Sequence: Synthetic oligonucleotide
ucccaauggcugcugccgc

SEQ ID NO: 1661034 - RNA, 19 nt, Artificial Sequence
  Description of Artificial Sequence: Synthetic oligonucleotide
cucauaccgguugccauag

SEQ ID NO: 1661035 - RNA, 19 nt, Artificial Sequence
  Description of Artificial Sequence: Synthetic oligonucleotide
gucauacuuagcacaaauc

SEQ ID NO: 1661036 - RNA, 19 nt, Artificial Sequence
  Description of Artificial Sequence: Synthetic oligonucleotide
ucugaacgaaaacgucgau

SEQ ID NO: 1661037 - RNA, 19 nt, Artificial Sequence
  Description of Artificial Sequence: Synthetic oligonucleotide
acucauaccgguugccaua

SEQ ID NO: 1661038 - RNA, 19 nt, Artificial Sequence
  Description of Artificial Sequence: Synthetic oligonucleotide
gaauaugaucaggcucgag

SEQ ID NO: 1661039 - RNA, 19 nt, Artificial Sequence
  Description of Artificial Sequence: Synthetic oligonucleotide
gaucguccaauuccaugga

SEQ ID NO: 1661040 - RNA, 19 nt, Artificial Sequence
  Description of Artificial Sequence: Synthetic oligonucleotide
aucaccagaucguccaauu

SEQ ID NO: 1661041 - RNA, 19 nt, Artificial Sequence
  Description of Artificial Sequence: Synthetic oligonucleotide
uagacucauaccgguugcc

SEQ ID NO: 1661042 - RNA, 19 nt, Artificial Sequence
  Description of Artificial Sequence: Synthetic oligonucleotide
cacaaggguaauuaucugu

SEQ ID NO: 1661043 - RNA, 19 nt, Artificial Sequence
  Description of Artificial Sequence: Synthetic oligonucleotide
agccaguucuucuaaucua

SEQ ID NO: 1661044 - RNA, 19 nt, Artificial Sequence
  Description of Artificial Sequence: Synthetic oligonucleotide
acaugcggaaugucauacu

SEQ ID NO: 1661045 - RNA, 19 nt, Artificial Sequence
  Description of Artificial Sequence: Synthetic oligonucleotide
acgagcaaccaaagcagag

SEQ ID NO: 1661046 - RNA, 19 nt, Artificial Sequence
  Description of Artificial Sequence: Synthetic oligonucleotide
ugaacaccggccagcuuua

SEQ ID NO: 1661047 - RNA, 19 nt, Artificial Sequence
  Description of Artificial Sequence: Synthetic oligonucleotide
aaggugauaaggacaucua

SEQ ID NO: 1661048 - RNA, 19 nt, Artificial Sequence
  Description of Artificial Sequence: Synthetic oligonucleotide
cguggagcaaaacaggaug

SEQ ID NO: 1661049 - RNA, 19 nt, Artificial Sequence
  Description of Artificial Sequence: Synthetic oligonucleotide
gagaccccugcugaaugag

SEQ ID NO: 1661050 - RNA, 19 nt, Artificial Sequence
  Description of Artificial Sequence: Synthetic oligonucleotide
ucauaccgguugccauagg

SEQ ID NO: 1661051 - RNA, 19 nt, Artificial Sequence
  Description of Artificial Sequence: Synthetic oligonucleotide
uguagccauugcagccaag

SEQ ID NO: 1661052 - RNA, 19 nt, Artificial Sequence
  Description of Artificial Sequence: Synthetic oligonucleotide
acccguggagcaaaacagg

SEQ ID NO: 1661053 - RNA, 19 nt, Artificial Sequence
  Description of Artificial Sequence: Synthetic oligonucleotide
ugcugccgcauugagguaa

SEQ ID NO: 1661054 - RNA, 19 nt, Artificial Sequence
  Description of Artificial Sequence: Synthetic oligonucleotide
cuaaucuaucaggcacccg

SEQ ID NO: 1661055 - RNA, 19 nt, Artificial Sequence
  Description of Artificial Sequence: Synthetic oligonucleotide
aggcucgaguuccuggacu

SEQ ID NO: 1661056 - RNA, 19 nt, Artificial Sequence
  Description of Artificial Sequence: Synthetic oligonucleotide
aggaaucauuaaagccagc

SEQ ID NO: 1661057 - RNA, 19 nt, Artificial Sequence
  Description of Artificial Sequence: Synthetic oligonucleotide
guggccauaugauauacuu

SEQ ID NO: 1661058 - RNA, 19 nt, Artificial Sequence
  Description of Artificial Sequence: Synthetic oligonucleotide
auccguggccauaugauau

SEQ ID NO: 1661059 - RNA, 19 nt, Artificial Sequence
  Description of Artificial Sequence: Synthetic oligonucleotide
agcugagugacagcuuugu

SEQ ID NO: 1661060 - RNA, 19 nt, Artificial Sequence
  Description of Artificial Sequence: Synthetic oligonucleotide
ggauacaucuugcugauuu

SEQ ID NO: 1661061 - RNA, 19 nt, Artificial Sequence
  Description of Artificial Sequence: Synthetic oligonucleotide
caacccgagaccccugcug

SEQ ID NO: 1661062 - RNA, 19 nt, Artificial Sequence
  Description of Artificial Sequence: Synthetic oligonucleotide
agacucauaccgguugcca

SEQ ID NO: 1661063 - RNA, 19 nt, Artificial Sequence
  Description of Artificial Sequence: Synthetic oligonucleotide
augauauacuuggccuuug

SEQ ID NO: 1661064 - RNA, 19 nt, Artificial Sequence
  Description of Artificial Sequence: Synthetic oligonucleotide
caucuagugucccaagugu

SEQ ID NO: 1661065 - RNA, 19 nt, Artificial Sequence
  Description of Artificial Sequence: Synthetic oligonucleotide
ccaucuagugucccaagug

SEQ ID NO: 1661066 - RNA, 19 nt, Artificial Sequence
  Description of Artificial Sequence: Synthetic oligonucleotide
cauggacuuaaagcaggac

SEQ ID NO: 1661067 - RNA, 19 nt, Artificial Sequence
  Description of Artificial Sequence: Synthetic oligonucleotide
cauugcagccaagugacaa

SEQ ID NO: 1661068 - RNA, 19 nt, Artificial Sequence
  Description of Artificial Sequence: Synthetic oligonucleotide
aucguccaauuccauggau

SEQ ID NO: 1661069 - RNA, 19 nt, Artificial Sequence
  Description of Artificial Sequence: Synthetic oligonucleotide
guagccacucacaguuugc

SEQ ID NO: 1661070 - RNA, 19 nt, Artificial Sequence
  Description of Artificial Sequence: Synthetic oligonucleotide
aucaagcaccaaagaauug

SEQ ID NO: 1661071 - RNA, 19 nt, Artificial Sequence
  Description of Artificial Sequence: Synthetic oligonucleotide
gguaauuaucuguguggga

SEQ ID NO: 1661072 - RNA, 19 nt, Artificial Sequence
  Description of Artificial Sequence: Synthetic oligonucleotide
ggacaucuaaggaugguga

SEQ ID NO: 1661073 - RNA, 19 nt, Artificial Sequence
  Description of Artificial Sequence: Synthetic oligonucleotide
gccaagugacaacaaggug

SEQ ID NO: 1661074 - RNA, 19 nt, Artificial Sequence
  Description of Artificial Sequence: Synthetic oligonucleotide
gcaauuauagcaccaccua

SEQ ID NO: 1661075 - RNA, 19 nt, Artificial Sequence
  Description of Artificial Sequence: Synthetic oligonucleotide
uggagcaaaacaggaugua

SEQ ID NO: 1661076 - RNA, 19 nt, Artificial Sequence
  Description of Artificial Sequence: Synthetic oligonucleotide
cauaagcguuguugacuac

SEQ ID NO: 1661077 - RNA, 19 nt, Artificial Sequence
  Description of Artificial Sequence: Synthetic oligonucleotide
cauucaggucagugcgcag

SEQ ID NO: 1661078 - RNA, 19 nt, Artificial Sequence
  Description of Artificial Sequence: Synthetic oligonucleotide
agcauugagccaagcugag

SEQ ID NO: 1661079 - RNA, 19 nt, Artificial Sequence
  Description of Artificial Sequence: Synthetic oligonucleotide
cacagaauaugaucaggcu

SEQ ID NO: 1661080 - RNA, 19 nt, Artificial Sequence
  Description of Artificial Sequence: Synthetic oligonucleotide
uccguggccauaugauaua

SEQ ID NO: 1661081 - RNA, 19 nt, Artificial Sequence
  Description of Artificial Sequence: Synthetic oligonucleotide
uguugacuacaugcggaau

SEQ ID NO: 1661082 - RNA, 19 nt, Artificial Sequence
  Description of Artificial Sequence: Synthetic oligonucleotide
gacgagcaaccaaagcaga

SEQ ID NO: 1661083 - RNA, 19 nt, Artificial Sequence
  Description of Artificial Sequence: Synthetic oligonucleotide
auaucaccagaucguccaa

SEQ ID NO: 1661084 - RNA, 19 nt, Artificial Sequence
  Description of Artificial Sequence: Synthetic oligonucleotide
auaccgguugccauaggaa

SEQ ID NO: 1661085 - RNA, 19 nt, Artificial Sequence
  Description of Artificial Sequence: Synthetic oligonucleotide
cauaaucgucaacuccaga

SEQ ID NO: 1661086 - RNA, 19 nt, Artificial Sequence
  Description of Artificial Sequence: Synthetic oligonucleotide
acaaggugauaaggacauc

SEQ ID NO: 1661087 - RNA, 19 nt, Artificial Sequence
  Description of Artificial Sequence: Synthetic oligonucleotide
gaacgaaaacgucgauucu

SEQ ID NO: 1661088 - RNA, 19 nt, Artificial Sequence
  Description of Artificial Sequence: Synthetic oligonucleotide
ccuacuggaaccauaaaau

SEQ ID NO: 1661089 - RNA, 19 nt, Artificial Sequence
  Description of Artificial Sequence: Synthetic oligonucleotide
uaucugugugggacaugaa

SEQ ID NO: 1661090 - RNA, 19 nt, Artificial Sequence
  Description of Artificial Sequence: Synthetic oligonucleotide
cgucgauucuaccaacccg

SEQ ID NO: 1661091 - RNA, 19 nt, Artificial Sequence
  Description of Artificial Sequence: Synthetic oligonucleotide
guuguccaucuaguguccc

SEQ ID NO: 1661092 - RNA, 19 nt, Artificial Sequence
  Description of Artificial Sequence: Synthetic oligonucleotide
cuauccguggccauaugau

SEQ ID NO: 1661093 - RNA, 19 nt, Artificial Sequence
  Description of Artificial Sequence: Synthetic oligonucleotide
uacuguguuuaagcacuuc

SEQ ID NO: 1661094 - RNA, 19 nt, Artificial Sequence
  Description of Artificial Sequence: Synthetic oligonucleotide
gcacccguggagcaaaaca

SEQ ID NO: 1661095 - RNA, 19 nt, Artificial Sequence
  Description of Artificial Sequence: Synthetic oligonucleotide
ugcaugcacuuggaagacu

SEQ ID NO: 1661096 - RNA, 19 nt, Artificial Sequence
  Description of Artificial Sequence: Synthetic oligonucleotide
guagccauugcagccaagu

SEQ ID NO: 1661097 - RNA, 19 nt, Artificial Sequence
  Description of Artificial Sequence: Synthetic oligonucleotide
cagaaacuugucugguaaa

SEQ ID NO: 1661098 - RNA, 19 nt, Artificial Sequence
  Description of Artificial Sequence: Synthetic oligonucleotide
uuuggucuuuugugucgua

SEQ ID NO: 1661099 - RNA, 19 nt, Artificial Sequence
  Description of Artificial Sequence: Synthetic oligonucleotide
augcacuuggaagacugua

SEQ ID NO: 1661100 - RNA, 19 nt, Artificial Sequence
  Description of Artificial Sequence: Synthetic oligonucleotide
cgagcaaccaaagcagagg

SEQ ID NO: 1661101 - RNA, 19 nt, Artificial Sequence
  Description of Artificial Sequence: Synthetic oligonucleotide
guugcacagcagaaauauc

SEQ ID NO: 1661102 - RNA, 19 nt, Artificial Sequence
  Description of Artificial Sequence: Synthetic oligonucleotide
caccggccagcuuuaugac

SEQ ID NO: 1661103 - RNA, 19 nt, Artificial Sequence
  Description of Artificial Sequence: Synthetic oligonucleotide
ugacuacaugcggaauguc

SEQ ID NO: 1661104 - RNA, 19 nt, Artificial Sequence
  Description of Artificial Sequence: Synthetic oligonucleotide
ugcgcagcucaucgccuuc

SEQ ID NO: 1661105 - RNA, 19 nt, Artificial Sequence
  Description of Artificial Sequence: Synthetic oligonucleotide
caagcugagugacagcuuu

SEQ ID NO: 1661106 - RNA, 19 nt, Artificial Sequence
  Description of Artificial Sequence: Synthetic oligonucleotide
uggucuauccguggccaua

SEQ ID NO: 1661107 - RNA, 19 nt, Artificial Sequence
  Description of Artificial Sequence: Synthetic oligonucleotide
cuacaugcggaaugucaua

SEQ ID NO: 1661108 - RNA, 19 nt, Artificial Sequence
  Description of Artificial Sequence: Synthetic oligonucleotide
caggcucgaguuccuggac

SEQ ID NO: 1661109 - RNA, 19 nt, Artificial Sequence
  Description of Artificial Sequence: Synthetic oligonucleotide
ccauaagcguuguugacua

SEQ ID NO: 1661110 - RNA, 19 nt, Artificial Sequence
  Description of Artificial Sequence: Synthetic oligonucleotide
ggacuuaaagcaggacuuc

SEQ ID NO: 1661111 - RNA, 19 nt, Artificial Sequence
  Description of Artificial Sequence: Synthetic oligonucleotide
ccgcauugagguaagcaca

SEQ ID NO: 1661112 - RNA, 19 nt, Artificial Sequence
  Description of Artificial Sequence: Synthetic oligonucleotide
agugcgcagcucaucgccu

SEQ ID NO: 1661113 - RNA, 19 nt, Artificial Sequence
  Description of Artificial Sequence: Synthetic oligonucleotide
augcggaaugucauacuua

SEQ ID NO: 1661114 - RNA, 19 nt, Artificial Sequence
  Description of Artificial Sequence: Synthetic oligonucleotide
gucuauccguggccauaug

SEQ ID NO: 1661115 - RNA, 19 nt, Artificial Sequence
  Description of Artificial Sequence: Synthetic oligonucleotide
gcuaaagauauaggguugu

SEQ ID NO: 1661116 - RNA, 19 nt, Artificial Sequence
  Description of Artificial Sequence: Synthetic oligonucleotide
uuaugacaucaagcaccaa

SEQ ID NO: 1661117 - RNA, 19 nt, Artificial Sequence
  Description of Artificial Sequence: Synthetic oligonucleotide
agaccccugcugaaugaga

SEQ ID NO: 1661118 - RNA, 19 nt, Artificial Sequence
  Description of Artificial Sequence: Synthetic oligonucleotide
cauugguccuugucaccaa

SEQ ID NO: 1661119 - RNA, 19 nt, Artificial Sequence
  Description of Artificial Sequence: Synthetic oligonucleotide
cccguggagcaaaacagga

SEQ ID NO: 1661120 - RNA, 19 nt, Artificial Sequence
  Description of Artificial Sequence: Synthetic oligonucleotide
accaccuacuggaaccaua

SEQ ID NO: 1661121 - RNA, 19 nt, Artificial Sequence
  Description of Artificial Sequence: Synthetic oligonucleotide
cugaacgaaaacgucgauu

SEQ ID NO: 1661122 - RNA, 19 nt, Artificial Sequence
  Description of Artificial Sequence: Synthetic oligonucleotide
cuguaaugacgacgagcaa

SEQ ID NO: 1661123 - RNA, 19 nt, Artificial Sequence
  Description of Artificial Sequence: Synthetic oligonucleotide
ccgagaccccugcugaaug

SEQ ID NO: 1661124 - RNA, 19 nt, Artificial Sequence
  Description of Artificial Sequence: Synthetic oligonucleotide
cuaccaacccgagaccccu

SEQ ID NO: 1661125 - RNA, 19 nt, Artificial Sequence
  Description of Artificial Sequence: Synthetic oligonucleotide
cgaguuccuggacuuuagc

SEQ ID NO: 1661126 - RNA, 19 nt, Artificial Sequence
  Description of Artificial Sequence: Synthetic oligonucleotide
acccgagaccccugcugaa

SEQ ID NO: 1661127 - RNA, 19 nt, Artificial Sequence
  Description of Artificial Sequence: Synthetic oligonucleotide
cuagugucccaagugucau

SEQ ID NO: 1661128 - RNA, 19 nt, Artificial Sequence
  Description of Artificial Sequence: Synthetic oligonucleotide
cagacccaagaggcacagc

SEQ ID NO: 1661129 - RNA, 19 nt, Artificial Sequence
  Description of Artificial Sequence: Synthetic oligonucleotide
gugugggacaugaagccuu

SEQ ID NO: 1661130 - RNA, 19 nt, Artificial Sequence
  Description of Artificial Sequence: Synthetic oligonucleotide
gcggaaugucauacuuagc

SEQ ID NO: 1661131 - RNA, 19 nt, Artificial Sequence
  Description of Artificial Sequence: Synthetic oligonucleotide
gcugccgcauugagguaag

SEQ ID NO: 1661132 - RNA, 19 nt, Artificial Sequence
  Description of Artificial Sequence: Synthetic oligonucleotide
ccguggccauaugauauac

SEQ ID NO: 1661133 - RNA, 19 nt, Artificial Sequence
  Description of Artificial Sequence: Synthetic oligonucleotide
cgcauugagguaagcacaa

SEQ ID NO: 1661134 - RNA, 19 nt, Artificial Sequence
  Description of Artificial Sequence: Synthetic oligonucleotide
cuaucaccacagguucaaa

SEQ ID NO: 1661135 - RNA, 19 nt, Artificial Sequence
  Description of Artificial Sequence: Synthetic oligonucleotide
guaauccauaagcguuguu

SEQ ID NO: 1661136 - RNA, 19 nt, Artificial Sequence
  Description of Artificial Sequence: Synthetic oligonucleotide
cugccgcauugagguaagc

SEQ ID NO: 1661137 - RNA, 19 nt, Artificial Sequence
  Description of Artificial Sequence: Synthetic oligonucleotide
caggcacccguggagcaaa

SEQ ID NO: 1661138 - RNA, 19 nt, Artificial Sequence
  Description of Artificial Sequence: Synthetic oligonucleotide
ggcucgaguuccuggacuu

SEQ ID NO: 1661139 - RNA, 19 nt, Artificial Sequence
  Description of Artificial Sequence: Synthetic oligonucleotide
gcgcagcucaucgccuucc

SEQ ID NO: 1661140 - RNA, 19 nt, Artificial Sequence
  Description of Artificial Sequence: Synthetic oligonucleotide
ggguugugagaugucugua

SEQ ID NO: 1661141 - RNA, 19 nt, Artificial Sequence
  Description of Artificial Sequence: Synthetic oligonucleotide
ggucuauccguggccauau

SEQ ID NO: 1661142 - RNA, 19 nt, Artificial Sequence
  Description of Artificial Sequence: Synthetic oligonucleotide
cccaauggcugcugccgca

SEQ ID NO: 1661143 - RNA, 19 nt, Artificial Sequence
  Description of Artificial Sequence: Synthetic oligonucleotide
caucgccuuccaaaacauu

SEQ ID NO: 1661144 - RNA, 19 nt, Artificial Sequence
  Description of Artificial Sequence: Synthetic oligonucleotide
ggcacccguggagcaaaac

SEQ ID NO: 1661145 - RNA, 19 nt, Artificial Sequence
  Description of Artificial Sequence: Synthetic oligonucleotide
cagugaccauggacuuaaa

SEQ ID NO: 1661146 - RNA, 19 nt, Artificial Sequence
  Description of Artificial Sequence: Synthetic oligonucleotide
cgauucuaccaacccgaga

SEQ ID NO: 1661147 - RNA, 19 nt, Artificial Sequence
  Description of Artificial Sequence: Synthetic oligonucleotide
cgagaccccugcugaauga

SEQ ID NO: 1661148 - RNA, 19 nt, Artificial Sequence
  Description of Artificial Sequence: Synthetic oligonucleotide
cuggucuauccguggccau

SEQ ID NO: 1661149 - RNA, 19 nt, Artificial Sequence
  Description of Artificial Sequence: Synthetic oligonucleotide
gugcgcagcucaucgccuu

SEQ ID NO: 1661150 - RNA, 19 nt, Artificial Sequence
  Description of Artificial Sequence: Synthetic oligonucleotide
ccguggagcaaaacaggau

SEQ ID NO: 1661151 - RNA, 19 nt, Artificial Sequence
  Description of Artificial Sequence: Synthetic oligonucleotide
cugcugccgcauugaggua

SEQ ID NO: 1661152 - RNA, 19 nt, Artificial Sequence
  Description of Artificial Sequence: Synthetic oligonucleotide
gaacaccggccagcuuuau

SEQ ID NO: 1661153 - RNA, 19 nt, Artificial Sequence
  Description of Artificial Sequence: Synthetic oligonucleotide
aggcacccguggagcaaaa

SEQ ID NO: 1661154 - RNA, 19 nt, Artificial Sequence
  Description of Artificial Sequence: Synthetic oligonucleotide
ccagaucguccaauuccau

SEQ ID NO: 1661155 - RNA, 19 nt, Artificial Sequence
  Description of Artificial Sequence: Synthetic oligonucleotide
cguggccauaugauauacu

SEQ ID NO: 1661156 - RNA, 19 nt, Artificial Sequence
  Description of Artificial Sequence: Synthetic oligonucleotide
cgucaacuccagauacacu

SEQ ID NO: 1661157 - RNA, 19 nt, Artificial Sequence
  Description of Artificial Sequence: Synthetic oligonucleotide
caccaccuacuggaaccau

SEQ ID NO: 1661158 - RNA, 19 nt, Artificial Sequence
  Description of Artificial Sequence: Synthetic oligonucleotide
ccaacccgagaccccugcu

SEQ ID NO: 1661159 - RNA, 19 nt, Artificial Sequence
  Description of Artificial Sequence: Synthetic oligonucleotide
cccgagaccccugcugaau

SEQ ID NO: 1661160 - RNA, 19 nt, Artificial Sequence
  Description of Artificial Sequence: Synthetic oligonucleotide
aacucaauuguccacagag

SEQ ID NO: 1661161 - RNA, 19 nt, Artificial Sequence
  Description of Artificial Sequence: Synthetic oligonucleotide
aaacaucacgacuggaucc

SEQ ID NO: 1661162 - RNA, 19 nt, Artificial Sequence
  Description of Artificial Sequence: Synthetic oligonucleotide
agagaaucuaaguagagag

SEQ ID NO: 1661163 - RNA, 19 nt, Artificial Sequence
  Description of Artificial Sequence: Synthetic oligonucleotide
aaaaccccaacacaacagc

SEQ ID NO: 1661164 - RNA, 19 nt, Artificial Sequence
  Description of Artificial Sequence: Synthetic oligonucleotide
uuuagaaagggugugcugg

SEQ ID NO: 1661165 - RNA, 19 nt, Artificial Sequence
  Description of Artificial Sequence: Synthetic oligonucleotide
ucaaccaugggacagcaag

SEQ ID NO: 1661166 - RNA, 19 nt, Artificial Sequence
  Description of Artificial Sequence: Synthetic oligonucleotide
uucaguaaguuucuaauac

SEQ ID NO: 1661167 - RNA, 19 nt, Artificial Sequence
  Description of Artificial Sequence: Synthetic oligonucleotide
uaacguuguauuauuauug

SEQ ID NO: 1661168 - RNA, 19 nt, Artificial Sequence
  Description of Artificial Sequence: Synthetic oligonucleotide
aauuaguguaagugguugg

SEQ ID NO: 1661169 - RNA, 19 nt, Artificial Sequence
  Description of Artificial Sequence: Synthetic oligonucleotide
uaagaaacggcacagucac

SEQ ID NO: 1661170 - RNA, 19 nt, Artificial Sequence
  Description of Artificial Sequence: Synthetic oligonucleotide
aaucuaaguagagagagcu

SEQ ID NO: 1661171 - RNA, 19 nt, Artificial Sequence
  Description of Artificial Sequence: Synthetic oligonucleotide
uauuauuauuguuaacacc

SEQ ID NO: 1661172 - RNA, 19 nt, Artificial Sequence
  Description of Artificial Sequence: Synthetic oligonucleotide
uuuauagauaucuucuaga

SEQ ID NO: 1661173 - RNA, 19 nt, Artificial Sequence
  Description of Artificial Sequence: Synthetic oligonucleotide
uugcuauccaccauuacag

SEQ ID NO: 1661174 - RNA, 19 nt, Artificial Sequence
  Description of Artificial Sequence: Synthetic oligonucleotide
auguaagugucacacgugc

SEQ ID NO: 1661175 - RNA, 19 nt, Artificial Sequence
  Description of Artificial Sequence: Synthetic oligonucleotide
augaaaucaaccaugggac

SEQ ID NO: 1661176 - RNA, 19 nt, Artificial Sequence
  Description of Artificial Sequence: Synthetic oligonucleotide
auaucuucuagaucaguac

SEQ ID NO: 1661177 - RNA, 19 nt, Artificial Sequence
  Description of Artificial Sequence: Synthetic oligonucleotide
uucaauuaguguaaguggu

SEQ ID NO: 1661178 - RNA, 19 nt, Artificial Sequence
  Description of Artificial Sequence: Synthetic oligonucleotide
aaaauccguguuuacagcu

SEQ ID NO: 1661179 - RNA, 19 nt, Artificial Sequence
  Description of Artificial Sequence: Synthetic oligonucleotide
uuuugcaugcaacaaguac

SEQ ID NO: 1661180 - RNA, 19 nt, Artificial Sequence
  Description of Artificial Sequence: Synthetic oligonucleotide
aguaccuacccacuggacg

SEQ ID NO: 1661181 - RNA, 19 nt, Artificial Sequence
  Description of Artificial Sequence: Synthetic oligonucleotide
ucuaaguagagagagcuca

SEQ ID NO: 1661182 - RNA, 19 nt, Artificial Sequence
  Description of Artificial Sequence: Synthetic oligonucleotide
aguagagagagcucaggac

SEQ ID NO: 1661183 - RNA, 19 nt, Artificial Sequence
  Description of Artificial Sequence: Synthetic oligonucleotide
caugaaaucaaccauggga

SEQ ID NO: 1661184 - RNA, 19 nt, Artificial Sequence
  Description of Artificial Sequence: Synthetic oligonucleotide
gugaaaaggggcuacagug

SEQ ID NO: 1661185 - RNA, 19 nt, Artificial Sequence
  Description of Artificial Sequence: Synthetic oligonucleotide
auugcuauccaccauuaca

SEQ ID NO: 1661186 - RNA, 19 nt, Artificial Sequence
  Description of Artificial Sequence: Synthetic oligonucleotide
aacguuguauuauuauugu

SEQ ID NO: 1661187 - RNA, 19 nt, Artificial Sequence
  Description of Artificial Sequence: Synthetic oligonucleotide
auuaguguaagugguuggc

SEQ ID NO: 1661188 - RNA, 19 nt, Artificial Sequence
  Description of Artificial Sequence: Synthetic oligonucleotide
gaacaagauaccaaagugc

SEQ ID NO: 1661189 - RNA, 19 nt, Artificial Sequence
  Description of Artificial Sequence: Synthetic oligonucleotide
gacauugaagguuccuugg

SEQ ID NO: 1661190 - RNA, 19 nt, Artificial Sequence
  Description of Artificial Sequence: Synthetic oligonucleotide
ucuuaacccagcaaguuuc

SEQ ID NO: 1661191 - RNA, 19 nt, Artificial Sequence
  Description of Artificial Sequence: Synthetic oligonucleotide
aaugauauuuggucucacu

SEQ ID NO: 1661192 - RNA, 19 nt, Artificial Sequence
  Description of Artificial Sequence: Synthetic oligonucleotide
acauacacggcuuauguaa

SEQ ID NO: 1661193 - RNA, 19 nt, Artificial Sequence
  Description of Artificial Sequence: Synthetic oligonucleotide
aaguagagagagcucagga

SEQ ID NO: 1661194 - RNA, 19 nt, Artificial Sequence
  Description of Artificial Sequence: Synthetic oligonucleotide
uguacacaaagucaggguu

SEQ ID NO: 1661195 - RNA, 19 nt, Artificial Sequence
  Description of Artificial Sequence: Synthetic oligonucleotide
ugcagagaaucuaaguaga

SEQ ID NO: 1661196 - RNA, 19 nt, Artificial Sequence
  Description of Artificial Sequence: Synthetic oligonucleotide
uggaaaauuguuccccacc

SEQ ID NO: 1661197 - RNA, 19 nt, Artificial Sequence
  Description of Artificial Sequence: Synthetic oligonucleotide
aauuguuccccacccucuc

SEQ ID NO: 1661198 - RNA, 19 nt, Artificial Sequence
  Description of Artificial Sequence: Synthetic oligonucleotide
aaacggcacagucacccac

SEQ ID NO: 1661199 - RNA, 19 nt, Artificial Sequence
  Description of Artificial Sequence: Synthetic oligonucleotide
acaauaguagacuuucuaa

SEQ ID NO: 1661200 - RNA, 19 nt, Artificial Sequence
  Description of Artificial Sequence: Synthetic oligonucleotide
aacaaguaccuacccacug

SEQ ID NO: 1661201 - RNA, 19 nt, Artificial Sequence
  Description of Artificial Sequence: Synthetic oligonucleotide
aacaucacgacuggauccg

SEQ ID NO: 1661202 - RNA, 19 nt, Artificial Sequence
  Description of Artificial Sequence: Synthetic oligonucleotide
agaaagaguugcuacgucu

SEQ ID NO: 1661203 - RNA, 19 nt, Artificial Sequence
  Description of Artificial Sequence: Synthetic oligonucleotide
auaccaaagugcaaccugc

SEQ ID NO: 1661204 - RNA, 19 nt, Artificial Sequence
  Description of Artificial Sequence: Synthetic oligonucleotide
caaaaugauauuuggucuc

SEQ ID NO: 1661205 - RNA, 19 nt, Artificial Sequence
  Description of Artificial Sequence: Synthetic oligonucleotide
uguguagagagucggugug

SEQ ID NO: 1661206 - RNA, 19 nt, Artificial Sequence
  Description of Artificial Sequence: Synthetic oligonucleotide
agaguugcuacgucuuugg

SEQ ID NO: 1661207 - RNA, 19 nt, Artificial Sequence
  Description of Artificial Sequence: Synthetic oligonucleotide
agaacucuuacaauaguag

SEQ ID NO: 1661208 - RNA, 19 nt, Artificial Sequence
  Description of Artificial Sequence: Synthetic oligonucleotide
ugcuaacaugaaaucaacc

SEQ ID NO: 1661209 - RNA, 19 nt, Artificial Sequence
  Description of Artificial Sequence: Synthetic oligonucleotide
aacaccauuagcaucuagu

SEQ ID NO: 1661210 - RNA, 19 nt, Artificial Sequence
  Description of Artificial Sequence: Synthetic oligonucleotide
ggcauugaacuacugaggg

SEQ ID NO: 1661211 - RNA, 19 nt, Artificial Sequence
  Description of Artificial Sequence: Synthetic oligonucleotide
ggcaaaaugauauuugguc

SEQ ID NO: 1661212 - RNA, 19 nt, Artificial Sequence
  Description of Artificial Sequence: Synthetic oligonucleotide
auaguagacuuucuaaaau

SEQ ID NO: 1661213 - RNA, 19 nt, Artificial Sequence
  Description of Artificial Sequence: Synthetic oligonucleotide
aagcaagguaagaaacggc

SEQ ID NO: 1661214 - RNA, 19 nt, Artificial Sequence
  Description of Artificial Sequence: Synthetic oligonucleotide
cacaggauugcuauccacc

SEQ ID NO: 1661215 - RNA, 19 nt, Artificial Sequence
  Description of Artificial Sequence: Synthetic oligonucleotide
auguaacucaauuguccac

SEQ ID NO: 1661216 - RNA, 19 nt, Artificial Sequence
  Description of Artificial Sequence: Synthetic oligonucleotide
agcaccgugagagaaagag

SEQ ID NO: 1661217 - RNA, 19 nt, Artificial Sequence
  Description of Artificial Sequence: Synthetic oligonucleotide
agaccaaucgaggaaggac

SEQ ID NO: 1661218 - RNA, 19 nt, Artificial Sequence
  Description of Artificial Sequence: Synthetic oligonucleotide
agaccuuuagcaccgugag

SEQ ID NO: 1661219 - RNA, 19 nt, Artificial Sequence
  Description of Artificial Sequence: Synthetic oligonucleotide
auuauuguuaacaccauua

SEQ ID NO: 1661220 - RNA, 19 nt, Artificial Sequence
  Description of Artificial Sequence: Synthetic oligonucleotide
uguggagaccaaucgagga

SEQ ID NO: 1661221 - RNA, 19 nt, Artificial Sequence
  Description of Artificial Sequence: Synthetic oligonucleotide
ugcaacaaguaccuaccca

SEQ ID NO: 1661222 - RNA, 19 nt, Artificial Sequence
  Description of Artificial Sequence: Synthetic oligonucleotide
augauauuuggucucacuu

SEQ ID NO: 1661223 - RNA, 19 nt, Artificial Sequence
  Description of Artificial Sequence: Synthetic oligonucleotide
uacugaggggacauugaag

SEQ ID NO: 1661224 - RNA, 19 nt, Artificial Sequence
  Description of Artificial Sequence: Synthetic oligonucleotide
uguuaacaccauuagcauc

SEQ ID NO: 1661225 - RNA, 19 nt, Artificial Sequence
  Description of Artificial Sequence: Synthetic oligonucleotide
uuagcaccgugagagaaag

SEQ ID NO: 1661226 - RNA, 19 nt, Artificial Sequence
  Description of Artificial Sequence: Synthetic oligonucleotide
aaauccaguagccccugga

SEQ ID NO: 1661227 - RNA, 19 nt, Artificial Sequence
  Description of Artificial Sequence: Synthetic oligonucleotide
gaccaaucgaggaaggacc

SEQ ID NO: 1661228 - RNA, 19 nt, Artificial Sequence
  Description of Artificial Sequence: Synthetic oligonucleotide
uugugguggggugaaaagg

SEQ ID NO: 1661229 - RNA, 19 nt, Artificial Sequence
  Description of Artificial Sequence: Synthetic oligonucleotide
ggaaaauuguuccccaccc

SEQ ID NO: 1661230 - RNA, 19 nt, Artificial Sequence
  Description of Artificial Sequence: Synthetic oligonucleotide
gauauuuggucucacuugu

SEQ ID NO: 1661231 - RNA, 19 nt, Artificial Sequence
  Description of Artificial Sequence: Synthetic oligonucleotide
augcaacaaguaccuaccc

SEQ ID NO: 1661232 - RNA, 19 nt, Artificial Sequence
  Description of Artificial Sequence: Synthetic oligonucleotide
agacucauuggcaaaauga

SEQ ID NO: 1661233 - RNA, 19 nt, Artificial Sequence
  Description of Artificial Sequence: Synthetic oligonucleotide
acucuuacaauaguagacu

SEQ ID NO: 1661234 - RNA, 19 nt, Artificial Sequence
  Description of Artificial Sequence: Synthetic oligonucleotide
cauugaacuacugagggga

SEQ ID NO: 1661235 - RNA, 19 nt, Artificial Sequence
  Description of Artificial Sequence: Synthetic oligonucleotide
uguguguagagagucggug

SEQ ID NO: 1661236 - RNA, 19 nt, Artificial Sequence
  Description of Artificial Sequence: Synthetic oligonucleotide
uguaagugucacacgugca

SEQ ID NO: 1661237 - RNA, 19 nt, Artificial Sequence
  Description of Artificial Sequence: Synthetic oligonucleotide
uuauuauuguuaacaccau

SEQ ID NO: 1661238 - RNA, 19 nt, Artificial Sequence
  Description of Artificial Sequence: Synthetic oligonucleotide
aauccguguuuacagcuau

SEQ ID NO: 1661239 - RNA, 19 nt, Artificial Sequence
  Description of Artificial Sequence: Synthetic oligonucleotide
ucuuacaauaguagacuuu

SEQ ID NO: 1661240 - RNA, 19 nt, Artificial Sequence
  Description of Artificial Sequence: Synthetic oligonucleotide
caauuaguguaagugguug

SEQ ID NO: 1661241 - RNA, 19 nt, Artificial Sequence
  Description of Artificial Sequence: Synthetic oligonucleotide
ucgggaagggcggagauug

SEQ ID NO: 1661242 - RNA, 19 nt, Artificial Sequence
  Description of Artificial Sequence: Synthetic oligonucleotide
acaggauugcuauccacca

SEQ ID NO: 1661243 - RNA, 19 nt, Artificial Sequence
  Description of Artificial Sequence: Synthetic oligonucleotide
uccaguagccccuggaaaa

SEQ ID NO: 1661244 - RNA, 19 nt, Artificial Sequence
  Description of Artificial Sequence: Synthetic oligonucleotide
aagugcaaccugccacugg

SEQ ID NO: 1661245 - RNA, 19 nt, Artificial Sequence
  Description of Artificial Sequence: Synthetic oligonucleotide
ucggugugcauguaagugu

SEQ ID NO: 1661246 - RNA, 19 nt, Artificial Sequence
  Description of Artificial Sequence: Synthetic oligonucleotide
gauugugcugcgcacagaa

SEQ ID NO: 1661247 - RNA, 19 nt, Artificial Sequence
  Description of Artificial Sequence: Synthetic oligonucleotide
acugacuuccccaccaggg

SEQ ID NO: 1661248 - RNA, 19 nt, Artificial Sequence
  Description of Artificial Sequence: Synthetic oligonucleotide
aagaguugcuacgucuuug

SEQ ID NO: 1661249 - RNA, 19 nt, Artificial Sequence
  Description of Artificial Sequence: Synthetic oligonucleotide
caucuaguuuaauuaaaca

SEQ ID NO: 1661250 - RNA, 19 nt, Artificial Sequence
  Description of Artificial Sequence: Synthetic oligonucleotide
cucacuugugucacccugg

SEQ ID NO: 1661251 - RNA, 19 nt, Artificial Sequence
  Description of Artificial Sequence: Synthetic oligonucleotide
ugcugcuaacaugaaauca

SEQ ID NO: 1661252 - RNA, 19 nt, Artificial Sequence
  Description of Artificial Sequence: Synthetic oligonucleotide
ugcugcgcacagaaguggg

SEQ ID NO: 1661253 - RNA, 19 nt, Artificial Sequence
  Description of Artificial Sequence: Synthetic oligonucleotide
gcaacaaguaccuacccac

SEQ ID NO: 1661254 - RNA, 19 nt, Artificial Sequence
  Description of Artificial Sequence: Synthetic oligonucleotide
guaacucaauuguccacag

SEQ ID NO: 1661255 - RNA, 19 nt, Artificial Sequence
  Description of Artificial Sequence: Synthetic oligonucleotide
ucaauuaguguaagugguu

SEQ ID NO: 1661256 - RNA, 19 nt, Artificial Sequence
  Description of Artificial Sequence: Synthetic oligonucleotide
aaagggugugcuggugcgc

SEQ ID NO: 1661257 - RNA, 19 nt, Artificial Sequence
  Description of Artificial Sequence: Synthetic oligonucleotide
uacauucaauuaguguaag

SEQ ID NO: 1661258 - RNA, 19 nt, Artificial Sequence
  Description of Artificial Sequence: Synthetic oligonucleotide
uuuagcaccgugagagaaa

SEQ ID NO: 1661259 - RNA, 19 nt, Artificial Sequence
  Description of Artificial Sequence: Synthetic oligonucleotide
cagcuauguacacaaaguc

SEQ ID NO: 1661260 - RNA, 19 nt, Artificial Sequence
  Description of Artificial Sequence: Synthetic oligonucleotide
gaaacagggauguggugga

SEQ ID NO: 1661261 - RNA, 19 nt, Artificial Sequence
  Description of Artificial Sequence: Synthetic oligonucleotide
gaucaguacauucaguuuu

SEQ ID NO: 1661262 - RNA, 19 nt, Artificial Sequence
  Description of Artificial Sequence: Synthetic oligonucleotide
agggagggcauugaacuac

SEQ ID NO: 1661263 - RNA, 19 nt, Artificial Sequence
  Description of Artificial Sequence: Synthetic oligonucleotide
uacacaaagucaggguuug

SEQ ID NO: 1661264 - RNA, 19 nt, Artificial Sequence
  Description of Artificial Sequence: Synthetic oligonucleotide
gaaucuaaguagagagagc

SEQ ID NO: 1661265 - RNA, 19 nt, Artificial Sequence
  Description of Artificial Sequence: Synthetic oligonucleotide
agagaaagaguugcuacgu

SEQ ID NO: 1661266 - RNA, 19 nt, Artificial Sequence
  Description of Artificial Sequence: Synthetic oligonucleotide
aucacgacuggauccgcag

SEQ ID NO: 1661267 - RNA, 19 nt, Artificial Sequence
  Description of Artificial Sequence: Synthetic oligonucleotide
cuguggagaccaaucgagg

SEQ ID NO: 1661268 - RNA, 19 nt, Artificial Sequence
  Description of Artificial Sequence: Synthetic oligonucleotide
cauacacggcuuauguaac

SEQ ID NO: 1661269 - RNA, 19 nt, Artificial Sequence
  Description of Artificial Sequence: Synthetic oligonucleotide
ggauccgcagaccacagcc

SEQ ID NO: 1661270 - RNA, 19 nt, Artificial Sequence
  Description of Artificial Sequence: Synthetic oligonucleotide
gcuauccaccauuacagag

SEQ ID NO: 1661271 - RNA, 19 nt, Artificial Sequence
  Description of Artificial Sequence: Synthetic oligonucleotide
ggcuuauguaacucaauug

SEQ ID NO: 1661272 - RNA, 19 nt, Artificial Sequence
  Description of Artificial Sequence: Synthetic oligonucleotide
agagagucggugugcaugu

SEQ ID NO: 1661273 - RNA, 19 nt, Artificial Sequence
  Description of Artificial Sequence: Synthetic oligonucleotide
gguaagaaacggcacaguc

SEQ ID NO: 1661274 - RNA, 19 nt, Artificial Sequence
  Description of Artificial Sequence: Synthetic oligonucleotide
acauugaagguuccuugga

SEQ ID NO: 1661275 - RNA, 19 nt, Artificial Sequence
  Description of Artificial Sequence: Synthetic oligonucleotide
cugcuaacaugaaaucaac

SEQ ID NO: 1661276 - RNA, 19 nt, Artificial Sequence
  Description of Artificial Sequence: Synthetic oligonucleotide
uccguguuuacagcuaugu

SEQ ID NO: 1661277 - RNA, 19 nt, Artificial Sequence
  Description of Artificial Sequence: Synthetic oligonucleotide
aaagaguugcuacgucuuu

SEQ ID NO: 1661278 - RNA, 19 nt, Artificial Sequence
  Description of Artificial Sequence: Synthetic oligonucleotide
aaucgaggaaggacccugg

SEQ ID NO: 1661279 - RNA, 19 nt, Artificial Sequence
  Description of Artificial Sequence: Synthetic oligonucleotide
acauucaauuaguguaagu

SEQ ID NO: 1661280 - RNA, 19 nt, Artificial Sequence
  Description of Artificial Sequence: Synthetic oligonucleotide
ugcgcgcuaccauuugggg

SEQ ID NO: 1661281 - RNA, 19 nt, Artificial Sequence
  Description of Artificial Sequence: Synthetic oligonucleotide
aggauugcuauccaccauu

SEQ ID NO: 1661282 - RNA, 19 nt, Artificial Sequence
  Description of Artificial Sequence: Synthetic oligonucleotide
uuguuccccacccucucug

SEQ ID NO: 1661283 - RNA, 19 nt, Artificial Sequence
  Description of Artificial Sequence: Synthetic oligonucleotide
aaccccaacacaacagcug

SEQ ID NO: 1661284 - RNA, 19 nt, Artificial Sequence
  Description of Artificial Sequence: Synthetic oligonucleotide
guaagaaacggcacaguca

SEQ ID NO: 1661285 - RNA, 19 nt, Artificial Sequence
  Description of Artificial Sequence: Synthetic oligonucleotide
gaguugcuacgucuuuggg

SEQ ID NO: 1661286 - RNA, 19 nt, Artificial Sequence
  Description of Artificial Sequence: Synthetic oligonucleotide
auccgcagaccacagccuc

SEQ ID NO: 1661287 - RNA, 19 nt, Artificial Sequence
  Description of Artificial Sequence: Synthetic oligonucleotide
gagggcauugaacuacuga

SEQ ID NO: 1661288 - RNA, 19 nt, Artificial Sequence
  Description of Artificial Sequence: Synthetic oligonucleotide
uaacaccauuagcaucuag

SEQ ID NO: 1661289 - RNA, 19 nt, Artificial Sequence
  Description of Artificial Sequence: Synthetic oligonucleotide
aaaccccaacacaacagcu

SEQ ID NO: 1661290 - RNA, 19 nt, Artificial Sequence
  Description of Artificial Sequence: Synthetic oligonucleotide
gcaugcaacaaguaccuac

SEQ ID NO: 1661291 - RNA, 19 nt, Artificial Sequence
  Description of Artificial Sequence: Synthetic oligonucleotide
aagugguuggcugaacaaa

SEQ ID NO: 1661292 - RNA, 19 nt, Artificial Sequence
  Description of Artificial Sequence: Synthetic oligonucleotide
aacuuuuguggugggguga

SEQ ID NO: 1661293 - RNA, 19 nt, Artificial Sequence
  Description of Artificial Sequence: Synthetic oligonucleotide
gagucggugugcauguaag

SEQ ID NO: 1661294 - RNA, 19 nt, Artificial Sequence
  Description of Artificial Sequence: Synthetic oligonucleotide
aagaaacggcacagucacc

SEQ ID NO: 1661295 - RNA, 19 nt, Artificial Sequence
  Description of Artificial Sequence: Synthetic oligonucleotide
aaaccuucugugguaacuu

SEQ ID NO: 1661296 - RNA, 19 nt, Artificial Sequence
  Description of Artificial Sequence: Synthetic oligonucleotide
uaacucaauuguccacaga

SEQ ID NO: 1661297 - RNA, 19 nt, Artificial Sequence
  Description of Artificial Sequence: Synthetic oligonucleotide
cacauagcaggcaggccag

SEQ ID NO: 1661298 - RNA, 19 nt, Artificial Sequence
  Description of Artificial Sequence: Synthetic oligonucleotide
uguuccccacccucucugg

SEQ ID NO: 1661299 - RNA, 19 nt, Artificial Sequence
  Description of Artificial Sequence: Synthetic oligonucleotide
ggggucuguguguagagag

SEQ ID NO: 1661300 - RNA, 19 nt, Artificial Sequence
  Description of Artificial Sequence: Synthetic oligonucleotide
aaguaccuacccacuggac

SEQ ID NO: 1661301 - RNA, 19 nt, Artificial Sequence
  Description of Artificial Sequence: Synthetic oligonucleotide
cacccuggcccucuuaacc

SEQ ID NO: 1661302 - RNA, 19 nt, Artificial Sequence
  Description of Artificial Sequence: Synthetic oligonucleotide
aaccaugggacagcaagaa

SEQ ID NO: 1661303 - RNA, 19 nt, Artificial Sequence
  Description of Artificial Sequence: Synthetic oligonucleotide
cucaauuguccacagaggu

SEQ ID NO: 1661304 - RNA, 19 nt, Artificial Sequence
  Description of Artificial Sequence: Synthetic oligonucleotide
auugaacuacugaggggac

SEQ ID NO: 1661305 - RNA, 19 nt, Artificial Sequence
  Description of Artificial Sequence: Synthetic oligonucleotide
gagaaucuaaguagagaga

SEQ ID NO: 1661306 - RNA, 19 nt, Artificial Sequence
  Description of Artificial Sequence: Synthetic oligonucleotide
ugcacauacacggcuuaug

SEQ ID NO: 1661307 - RNA, 19 nt, Artificial Sequence
  Description of Artificial Sequence: Synthetic oligonucleotide
ugcuauccaccauuacaga

SEQ ID NO: 1661308 - RNA, 19 nt, Artificial Sequence
  Description of Artificial Sequence: Synthetic oligonucleotide
cuaacaugaaaucaaccau

SEQ ID NO: 1661309 - RNA, 19 nt, Artificial Sequence
  Description of Artificial Sequence: Synthetic oligonucleotide
gucggugugcauguaagug

SEQ ID NO: 1661310 - RNA, 19 nt, Artificial Sequence
  Description of Artificial Sequence: Synthetic oligonucleotide
ggaccagagacacuauagc

SEQ ID NO: 1661311 - RNA, 19 nt, Artificial Sequence
  Description of Artificial Sequence: Synthetic oligonucleotide
gauugcuauccaccauuac

SEQ ID NO: 1661312 - RNA, 19 nt, Artificial Sequence
  Description of Artificial Sequence: Synthetic oligonucleotide
ugaagguuccuuggaagaa

SEQ ID NO: 1661313 - RNA, 19 nt, Artificial Sequence
  Description of Artificial Sequence: Synthetic oligonucleotide
accaaagugcaaccugcca

SEQ ID NO: 1661314 - RNA, 19 nt, Artificial Sequence
  Description of Artificial Sequence: Synthetic oligonucleotide
aacaggggucuguguguag

SEQ ID NO: 1661315 - RNA, 19 nt, Artificial Sequence
  Description of Artificial Sequence: Synthetic oligonucleotide
gagaccuuuagcaccguga

SEQ ID NO: 1661316 - RNA, 19 nt, Artificial Sequence
  Description of Artificial Sequence: Synthetic oligonucleotide
cuggaaaauuguuccccac

SEQ ID NO: 1661317 - RNA, 19 nt, Artificial Sequence
  Description of Artificial Sequence: Synthetic oligonucleotide
uccuaacguuguauuauua

SEQ ID NO: 1661318 - RNA, 19 nt, Artificial Sequence
  Description of Artificial Sequence: Synthetic oligonucleotide
ugaggggacauugaagguu

SEQ ID NO: 1661319 - RNA, 19 nt, Artificial Sequence
  Description of Artificial Sequence: Synthetic oligonucleotide
gcaaaaugauauuuggucu

SEQ ID NO: 1661320 - RNA, 19 nt, Artificial Sequence
  Description of Artificial Sequence: Synthetic oligonucleotide
aaagcucccaggccuuuua

SEQ ID NO: 1661321 - RNA, 19 nt, Artificial Sequence
  Description of Artificial Sequence: Synthetic oligonucleotide
ccaaagugcaaccugccac

SEQ ID NO: 1661322 - RNA, 19 nt, Artificial Sequence
  Description of Artificial Sequence: Synthetic oligonucleotide
cacgacuggauccgcagac

SEQ ID NO: 1661323 - RNA, 19 nt, Artificial Sequence
  Description of Artificial Sequence: Synthetic oligonucleotide
acacggcuuauguaacuca

SEQ ID NO: 1661324 - RNA, 19 nt, Artificial Sequence
  Description of Artificial Sequence: Synthetic oligonucleotide
aucuaaguagagagagcuc

SEQ ID NO: 1661325 - RNA, 19 nt, Artificial Sequence
  Description of Artificial Sequence: Synthetic oligonucleotide
ucuucuagaucaguacauu

SEQ ID NO: 1661326 - RNA, 19 nt, Artificial Sequence
  Description of Artificial Sequence: Synthetic oligonucleotide
ucacgacuggauccgcaga

SEQ ID NO: 1661327 - RNA, 19 nt, Artificial Sequence
  Description of Artificial Sequence: Synthetic oligonucleotide
acgacuggauccgcagacc

SEQ ID NO: 1661328 - RNA, 19 nt, Artificial Sequence
  Description of Artificial Sequence: Synthetic oligonucleotide
uugaacuacugaggggaca

SEQ ID NO: 1661329 - RNA, 19 nt, Artificial Sequence
  Description of Artificial Sequence: Synthetic oligonucleotide
aaccuucugugguaacuuu

SEQ ID NO: 1661330 - RNA, 19 nt, Artificial Sequence
  Description of Artificial Sequence: Synthetic oligonucleotide
cagacucauuggcaaaaug

SEQ ID NO: 1661331 - RNA, 19 nt, Artificial Sequence
  Description of Artificial Sequence: Synthetic oligonucleotide
uacacggcuuauguaacuc

SEQ ID NO: 1661332 - RNA, 19 nt, Artificial Sequence
  Description of Artificial Sequence: Synthetic oligonucleotide
auagagcuucaaaauaaau

SEQ ID NO: 1661333 - RNA, 19 nt, Artificial Sequence
  Description of Artificial Sequence: Synthetic oligonucleotide
aaaacaucugcagccccuu

SEQ ID NO: 1661334 - RNA, 19 nt, Artificial Sequence
  Description of Artificial Sequence: Synthetic oligonucleotide
ggaaaugaaacagggaugu

SEQ ID NO: 1661335 - RNA, 19 nt, Artificial Sequence
  Description of Artificial Sequence: Synthetic oligonucleotide
aguagccccuggaaaauug

SEQ ID NO: 1661336 - RNA, 19 nt, Artificial Sequence
  Description of Artificial Sequence: Synthetic oligonucleotide
caaguaccuacccacugga

SEQ ID NO: 1661337 - RNA, 19 nt, Artificial Sequence
  Description of Artificial Sequence: Synthetic oligonucleotide
uuaacccagcaaguuucug

SEQ ID NO: 1661338 - RNA, 19 nt, Artificial Sequence
  Description of Artificial Sequence: Synthetic oligonucleotide
agucggugugcauguaagu

SEQ ID NO: 1661339 - RNA, 19 nt, Artificial Sequence
  Description of Artificial Sequence: Synthetic oligonucleotide
agagucggugugcauguaa

SEQ ID NO: 1661340 - RNA, 19 nt, Artificial Sequence
  Description of Artificial Sequence: Synthetic oligonucleotide
acguuguauuauuauuguu

SEQ ID NO: 1661341 - RNA, 19 nt, Artificial Sequence
  Description of Artificial Sequence: Synthetic oligonucleotide
gucuguguguagagagucg

SEQ ID NO: 1661342 - RNA, 19 nt, Artificial Sequence
  Description of Artificial Sequence: Synthetic oligonucleotide
cugcugcuaacaugaaauc

SEQ ID NO: 1661343 - RNA, 19 nt, Artificial Sequence
  Description of Artificial Sequence: Synthetic oligonucleotide
uggacgugcugcacuuucu

SEQ ID NO: 1661344 - RNA, 19 nt, Artificial Sequence
  Description of Artificial Sequence: Synthetic oligonucleotide
guaccuacccacuggacgu

SEQ ID NO: 1661345 - RNA, 19 nt, Artificial Sequence
  Description of Artificial Sequence: Synthetic oligonucleotide
aguaaguuucuaauacauu

SEQ ID NO: 1661346 - RNA, 19 nt, Artificial Sequence
  Description of Artificial Sequence: Synthetic oligonucleotide
cuaacguuguauuauuauu

SEQ ID NO: 1661347 - RNA, 19 nt, Artificial Sequence
  Description of Artificial Sequence: Synthetic oligonucleotide
gggcauugaacuacugagg

SEQ ID NO: 1661348 - RNA, 19 nt, Artificial Sequence
  Description of Artificial Sequence: Synthetic oligonucleotide
gggguugccaggaaacagg

SEQ ID NO: 1661349 - RNA, 19 nt, Artificial Sequence
  Description of Artificial Sequence: Synthetic oligonucleotide
acacgugcacauacacggc

SEQ ID NO: 1661350 - RNA, 19 nt, Artificial Sequence
  Description of Artificial Sequence: Synthetic oligonucleotide
aaauccguguuuacagcua

SEQ ID NO: 1661351 - RNA, 19 nt, Artificial Sequence
  Description of Artificial Sequence: Synthetic oligonucleotide
uccgcagaccacagccuca

SEQ ID NO: 1661352 - RNA, 19 nt, Artificial Sequence
  Description of Artificial Sequence: Synthetic oligonucleotide
acaugccucaucugaggaa

SEQ ID NO: 1661353 - RNA, 19 nt, Artificial Sequence
  Description of Artificial Sequence: Synthetic oligonucleotide
gaaguggggcucaaaucca

SEQ ID NO: 1661354 - RNA, 19 nt, Artificial Sequence
  Description of Artificial Sequence: Synthetic oligonucleotide
acaucacgacuggauccgc

SEQ ID NO: 1661355 - RNA, 19 nt, Artificial Sequence
  Description of Artificial Sequence: Synthetic oligonucleotide
gacgugcugcacuuucuga

SEQ ID NO: 1661356 - RNA, 19 nt, Artificial Sequence
  Description of Artificial Sequence: Synthetic oligonucleotide
aaacaggggucugugugua

SEQ ID NO: 1661357 - RNA, 19 nt, Artificial Sequence
  Description of Artificial Sequence: Synthetic oligonucleotide
caaccaugggacagcaaga

SEQ ID NO: 1661358 - RNA, 19 nt, Artificial Sequence
  Description of Artificial Sequence: Synthetic oligonucleotide
gaaacggcacagucaccca

SEQ ID NO: 1661359 - RNA, 19 nt, Artificial Sequence
  Description of Artificial Sequence: Synthetic oligonucleotide
gcauguaagugucacacgu

SEQ ID NO: 1661360 - RNA, 19 nt, Artificial Sequence
  Description of Artificial Sequence: Synthetic oligonucleotide
cguuguauuauuauuguua

SEQ ID NO: 1661361 - RNA, 19 nt, Artificial Sequence
  Description of Artificial Sequence: Synthetic oligonucleotide
gcugcuaacaugaaaucaa

SEQ ID NO: 1661362 - RNA, 19 nt, Artificial Sequence
  Description of Artificial Sequence: Synthetic oligonucleotide
gugcgcgcuaccauuuggg

SEQ ID NO: 1661363 - RNA, 19 nt, Artificial Sequence
  Description of Artificial Sequence: Synthetic oligonucleotide
ugucgggaagggcggagau

SEQ ID NO: 1661364 - RNA, 19 nt, Artificial Sequence
  Description of Artificial Sequence: Synthetic oligonucleotide
acuacugaggggacauuga

SEQ ID NO: 1661365 - RNA, 19 nt, Artificial Sequence
  Description of Artificial Sequence: Synthetic oligonucleotide
ggacccugggcaaagcucc

SEQ ID NO: 1661366 - RNA, 19 nt, Artificial Sequence
  Description of Artificial Sequence: Synthetic oligonucleotide
caugccucaucugaggaaa

SEQ ID NO: 1661367 - RNA, 19 nt, Artificial Sequence
  Description of Artificial Sequence: Synthetic oligonucleotide
cuuuagcaccgugagagaa

SEQ ID NO: 1661368 - RNA, 19 nt, Artificial Sequence
  Description of Artificial Sequence: Synthetic oligonucleotide
ggugcgcgcuaccauuugg

SEQ ID NO: 1661369 - RNA, 19 nt, Artificial Sequence
  Description of Artificial Sequence: Synthetic oligonucleotide
acaggggucuguguguaga

SEQ ID NO: 1661370 - RNA, 19 nt, Artificial Sequence
  Description of Artificial Sequence: Synthetic oligonucleotide
caccgugagagaaagaguu

SEQ ID NO: 1661371 - RNA, 19 nt, Artificial Sequence
  Description of Artificial Sequence: Synthetic oligonucleotide
ccgugagagaaagaguugc

SEQ ID NO: 1661372 - RNA, 19 nt, Artificial Sequence
  Description of Artificial Sequence: Synthetic oligonucleotide
cacaugccucaucugagga

SEQ ID NO: 1661373 - RNA, 19 nt, Artificial Sequence
  Description of Artificial Sequence: Synthetic oligonucleotide
ggguugccaggaaacaggg

SEQ ID NO: 1661374 - RNA, 19 nt, Artificial Sequence
  Description of Artificial Sequence: Synthetic oligonucleotide
aaccugccacuggaucaac

SEQ ID NO: 1661375 - RNA, 19 nt, Artificial Sequence
  Description of Artificial Sequence: Synthetic oligonucleotide
acucauuggcaaaaugaua

SEQ ID NO: 1661376 - RNA, 19 nt, Artificial Sequence
  Description of Artificial Sequence: Synthetic oligonucleotide
cuacugaggggacauugaa

SEQ ID NO: 1661377 - RNA, 19 nt, Artificial Sequence
  Description of Artificial Sequence: Synthetic oligonucleotide
ggaagggcggagauugugc

SEQ ID NO: 1661378 - RNA, 19 nt, Artificial Sequence
  Description of Artificial Sequence: Synthetic oligonucleotide
cacggcuuauguaacucaa

SEQ ID NO: 1661379 - RNA, 19 nt, Artificial Sequence
  Description of Artificial Sequence: Synthetic oligonucleotide
gcaaggaccagagacacua

SEQ ID NO: 1661380 - RNA, 19 nt, Artificial Sequence
  Description of Artificial Sequence: Synthetic oligonucleotide
uggugcgcgcuaccauuug

SEQ ID NO: 1661381 - RNA, 19 nt, Artificial Sequence
  Description of Artificial Sequence: Synthetic oligonucleotide
gagaccaaucgaggaagga

SEQ ID NO: 1661382 - RNA, 19 nt, Artificial Sequence
  Description of Artificial Sequence: Synthetic oligonucleotide
gaaagaguugcuacgucuu

SEQ ID NO: 1661383 - RNA, 19 nt, Artificial Sequence
  Description of Artificial Sequence: Synthetic oligonucleotide
cgcgcuaccauuuggggug

SEQ ID NO: 1661384 - RNA, 19 nt, Artificial Sequence
  Description of Artificial Sequence: Synthetic oligonucleotide
accgugagagaaagaguug

SEQ ID NO: 1661385 - RNA, 19 nt, Artificial Sequence
  Description of Artificial Sequence: Synthetic oligonucleotide
ugugucacccuggcccucu

SEQ ID NO: 1661386 - RNA, 19 nt, Artificial Sequence
  Description of Artificial Sequence: Synthetic oligonucleotide
ggcucaaauccaguagccc

SEQ ID NO: 1661387 - RNA, 19 nt, Artificial Sequence
  Description of Artificial Sequence: Synthetic oligonucleotide
cuagaucaguacauucagu

SEQ ID NO: 1661388 - RNA, 19 nt, Artificial Sequence
  Description of Artificial Sequence: Synthetic oligonucleotide
gucacccuggcccucuuaa

SEQ ID NO: 1661389 - RNA, 19 nt, Artificial Sequence
  Description of Artificial Sequence: Synthetic oligonucleotide
aggggacauugaagguucc

SEQ ID NO: 1661390 - RNA, 19 nt, Artificial Sequence
  Description of Artificial Sequence: Synthetic oligonucleotide
cauagcaggcaggccaguc

SEQ ID NO: 1661391 - RNA, 19 nt, Artificial Sequence
  Description of Artificial Sequence: Synthetic oligonucleotide
gcaagguaagaaacggcac

SEQ ID NO: 1661392 - RNA, 19 nt, Artificial Sequence
  Description of Artificial Sequence: Synthetic oligonucleotide
gcucccaggccuuuuagaa

SEQ ID NO: 1661393 - RNA, 19 nt, Artificial Sequence
  Description of Artificial Sequence: Synthetic oligonucleotide
gacuggauccgcagaccac

SEQ ID NO: 1661394 - RNA, 19 nt, Artificial Sequence
  Description of Artificial Sequence: Synthetic oligonucleotide
cacauacacggcuuaugua

SEQ ID NO: 1661395 - RNA, 19 nt, Artificial Sequence
  Description of Artificial Sequence: Synthetic oligonucleotide
caucacgacuggauccgca

SEQ ID NO: 1661396 - RNA, 19 nt, Artificial Sequence
  Description of Artificial Sequence: Synthetic oligonucleotide
uaccuacccacuggacgug

SEQ ID NO: 1661397 - RNA, 19 nt, Artificial Sequence
  Description of Artificial Sequence: Synthetic oligonucleotide
gguuggcugaacaaagcaa

SEQ ID NO: 1661398 - RNA, 19 nt, Artificial Sequence
  Description of Artificial Sequence: Synthetic oligonucleotide
caccauuacagagcaggga

SEQ ID NO: 1661399 - RNA, 19 nt, Artificial Sequence
  Description of Artificial Sequence: Synthetic oligonucleotide
uagcaccgugagagaaaga

SEQ ID NO: 1661400 - RNA, 19 nt, Artificial Sequence
  Description of Artificial Sequence: Synthetic oligonucleotide
gggcucaaauccaguagcc

SEQ ID NO: 1661401 - RNA, 19 nt, Artificial Sequence
  Description of Artificial Sequence: Synthetic oligonucleotide
gcggagauugugcugcgca

SEQ ID NO: 1661402 - RNA, 19 nt, Artificial Sequence
  Description of Artificial Sequence: Synthetic oligonucleotide
caacaaguaccuacccacu

SEQ ID NO: 1661403 - RNA, 19 nt, Artificial Sequence
  Description of Artificial Sequence: Synthetic oligonucleotide
cagucugugacucgaguau

SEQ ID NO: 1661404 - RNA, 19 nt, Artificial Sequence
  Description of Artificial Sequence: Synthetic oligonucleotide
ccuucaguaaguuucuaau

SEQ ID NO: 1661405 - RNA, 19 nt, Artificial Sequence
  Description of Artificial Sequence: Synthetic oligonucleotide
ggaaaccuucugugguaac

SEQ ID NO: 1661406 - RNA, 19 nt, Artificial Sequence
  Description of Artificial Sequence: Synthetic oligonucleotide
auccguguuuacagcuaug

SEQ ID NO: 1661407 - RNA, 19 nt, Artificial Sequence
  Description of Artificial Sequence: Synthetic oligonucleotide
acggcuuauguaacucaau

SEQ ID NO: 1661408 - RNA, 19 nt, Artificial Sequence
  Description of Artificial Sequence: Synthetic oligonucleotide
guguaagugguuggcugaa

SEQ ID NO: 1661409 - RNA, 19 nt, Artificial Sequence
  Description of Artificial Sequence: Synthetic oligonucleotide
ccuaacguuguauuauuau

SEQ ID NO: 1661410 - RNA, 19 nt, Artificial Sequence
  Description of Artificial Sequence: Synthetic oligonucleotide
ugcaugcaacaaguaccua

SEQ ID NO: 1661411 - RNA, 19 nt, Artificial Sequence
  Description of Artificial Sequence: Synthetic oligonucleotide
cugaggggacauugaaggu

SEQ ID NO: 1661412 - RNA, 19 nt, Artificial Sequence
  Description of Artificial Sequence: Synthetic oligonucleotide
gauccgcagaccacagccu

SEQ ID NO: 1661413 - RNA, 19 nt, Artificial Sequence
  Description of Artificial Sequence: Synthetic oligonucleotide
cuccuaacguuguauuauu

SEQ ID NO: 1661414 - RNA, 19 nt, Artificial Sequence
  Description of Artificial Sequence: Synthetic oligonucleotide
acgugcacauacacggcuu

SEQ ID NO: 1661415 - RNA, 19 nt, Artificial Sequence
  Description of Artificial Sequence: Synthetic oligonucleotide
cauugggugcagcucuacu

SEQ ID NO: 1661416 - RNA, 19 nt, Artificial Sequence
  Description of Artificial Sequence: Synthetic oligonucleotide
ccucaucugaggaaaacau

SEQ ID NO: 1661417 - RNA, 19 nt, Artificial Sequence
  Description of Artificial Sequence: Synthetic oligonucleotide
guagccccuggaaaauugu

SEQ ID NO: 1661418 - RNA, 19 nt, Artificial Sequence
  Description of Artificial Sequence: Synthetic oligonucleotide
cuguguguagagagucggu

SEQ ID NO: 1661419 - RNA, 19 nt, Artificial Sequence
  Description of Artificial Sequence: Synthetic oligonucleotide
ggauugcuauccaccauua

SEQ ID NO: 1661420 - RNA, 19 nt, Artificial Sequence
  Description of Artificial Sequence: Synthetic oligonucleotide
gggcggagauugugcugcg

SEQ ID NO: 1661421 - RNA, 19 nt, Artificial Sequence
  Description of Artificial Sequence: Synthetic oligonucleotide
gccuccuaacguuguauua

SEQ ID NO: 1661422 - RNA, 19 nt, Artificial Sequence
  Description of Artificial Sequence: Synthetic oligonucleotide
cggagauugugcugcgcac

SEQ ID NO: 1661423 - RNA, 19 nt, Artificial Sequence
  Description of Artificial Sequence: Synthetic oligonucleotide
ggagggcauugaacuacug

SEQ ID NO: 1661424 - RNA, 19 nt, Artificial Sequence
  Description of Artificial Sequence: Synthetic oligonucleotide
cugucgggaagggcggaga

SEQ ID NO: 1661425 - RNA, 19 nt, Artificial Sequence
  Description of Artificial Sequence: Synthetic oligonucleotide
aucaaccaugggacagcaa

SEQ ID NO: 1661426 - RNA, 19 nt, Artificial Sequence
  Description of Artificial Sequence: Synthetic oligonucleotide
augccucaucugaggaaaa

SEQ ID NO: 1661427 - RNA, 19 nt, Artificial Sequence
  Description of Artificial Sequence: Synthetic oligonucleotide
acuggacgugcugcacuuu

SEQ ID NO: 1661428 - RNA, 19 nt, Artificial Sequence
  Description of Artificial Sequence: Synthetic oligonucleotide
caggauugcuauccaccau

SEQ ID NO: 1661429 - RNA, 19 nt, Artificial Sequence
  Description of Artificial Sequence: Synthetic oligonucleotide
gcgcuaccauuuggggugg

SEQ ID NO: 1661430 - RNA, 19 nt, Artificial Sequence
  Description of Artificial Sequence: Synthetic oligonucleotide
cacuggacgugcugcacuu

SEQ ID NO: 1661431 - RNA, 19 nt, Artificial Sequence
  Description of Artificial Sequence: Synthetic oligonucleotide
cgacuggauccgcagacca

SEQ ID NO: 1661432 - RNA, 19 nt, Artificial Sequence
  Description of Artificial Sequence: Synthetic oligonucleotide
ggcggagauugugcugcgc

SEQ ID NO: 1661433 - RNA, 19 nt, Artificial Sequence
  Description of Artificial Sequence: Synthetic oligonucleotide
gcauugggugcagcucuac

SEQ ID NO: 1661434 - RNA, 19 nt, Artificial Sequence
  Description of Artificial Sequence: Synthetic oligonucleotide
gcgcgcuaccauuuggggu

SEQ ID NO: 1661435 - RNA, 19 nt, Artificial Sequence
  Description of Artificial Sequence: Synthetic oligonucleotide
cccucuuaacccagcaagu

SEQ ID NO: 1661436 - RNA, 19 nt, Artificial Sequence
  Description of Artificial Sequence: Synthetic oligonucleotide
ccuccuaacguuguauuau

SEQ ID NO: 1661437 - RNA, 19 nt, Artificial Sequence
  Description of Artificial Sequence: Synthetic oligonucleotide
cuggugcgcgcuaccauuu

SEQ ID NO: 1661438 - RNA, 19 nt, Artificial Sequence
  Description of Artificial Sequence: Synthetic oligonucleotide
gcuggugcgcgcuaccauu

SEQ ID NO: 1661439 - RNA, 19 nt, Artificial Sequence
  Description of Artificial Sequence: Synthetic oligonucleotide
cagggccuccuaacguugu

SEQ ID NO: 1661440 - RNA, 19 nt, Artificial Sequence
  Description of Artificial Sequence: Synthetic oligonucleotide
ggccuccuaacguuguauu

SEQ ID NO: 1661441 - RNA, 19 nt, Artificial Sequence
  Description of Artificial Sequence: Synthetic oligonucleotide
ccguguuuacagcuaugua

SEQ ID NO: 1661442 - RNA, 19 nt, Artificial Sequence
  Description of Artificial Sequence: Synthetic oligonucleotide
gcaccgugagagaaagagu

SEQ ID NO: 1661443 - RNA, 19 nt, Artificial Sequence
  Description of Artificial Sequence: Synthetic oligonucleotide
gaacuacugaggggacauu

SEQ ID NO: 1661444 - RNA, 19 nt, Artificial Sequence
  Description of Artificial Sequence: Synthetic oligonucleotide
ggggacauugaagguuccu

SEQ ID NO: 1661445 - RNA, 19 nt, Artificial Sequence
  Description of Artificial Sequence: Synthetic oligonucleotide
ggcauugggugcagcucua

SEQ ID NO: 1661446 - RNA, 19 nt, Artificial Sequence
  Description of Artificial Sequence: Synthetic oligonucleotide
cgugcacauacacggcuua

SEQ ID NO: 1661447 - RNA, 19 nt, Artificial Sequence
  Description of Artificial Sequence: Synthetic oligonucleotide
caguagccccuggaaaauu

SEQ ID NO: 1661448 - RNA, 19 nt, Artificial Sequence
  Description of Artificial Sequence: Synthetic oligonucleotide
gugcaaccugccacuggau

SEQ ID NO: 1661449 - RNA, 19 nt, Artificial Sequence
  Description of Artificial Sequence: Synthetic oligonucleotide
cacccucucuggguuccua

SEQ ID NO: 1661450 - RNA, 19 nt, Artificial Sequence
  Description of Artificial Sequence: Synthetic oligonucleotide
uugucuaucagaaauaacc

SEQ ID NO: 1661451 - RNA, 19 nt, Artificial Sequence
  Description of Artificial Sequence: Synthetic oligonucleotide
uguaacuccaacaagagga

SEQ ID NO: 1661452 - RNA, 19 nt, Artificial Sequence
  Description of Artificial Sequence: Synthetic oligonucleotide
ucauauauacuucuaacag

SEQ ID NO: 1661453 - RNA, 19 nt, Artificial Sequence
  Description of Artificial Sequence: Synthetic oligonucleotide
aauaauauauaagaagcag

SEQ ID NO: 1661454 - RNA, 19 nt, Artificial Sequence
  Description of Artificial Sequence: Synthetic oligonucleotide
aaaagguuguaaaagacac

SEQ ID NO: 1661455 - RNA, 19 nt, Artificial Sequence
  Description of Artificial Sequence: Synthetic oligonucleotide
augguuauauaacuaaccc

SEQ ID NO: 1661456 - RNA, 19 nt, Artificial Sequence
  Description of Artificial Sequence: Synthetic oligonucleotide
uauaacuaacccaaggaag

SEQ ID NO: 1661457 - RNA, 19 nt, Artificial Sequence
  Description of Artificial Sequence: Synthetic oligonucleotide
acagcuauccaauacugcc

SEQ ID NO: 1661458 - RNA, 19 nt, Artificial Sequence
  Description of Artificial Sequence: Synthetic oligonucleotide
uguggaaacccaaauacag

SEQ ID NO: 1661459 - RNA, 19 nt, Artificial Sequence
  Description of Artificial Sequence: Synthetic oligonucleotide
aagugcaagcuacaaaugg

SEQ ID NO: 1661460 - RNA, 19 nt, Artificial Sequence
  Description of Artificial Sequence: Synthetic oligonucleotide
uuuccuaaacaaaagguug

SEQ ID NO: 1661461 - RNA, 19 nt, Artificial Sequence
  Description of Artificial Sequence: Synthetic oligonucleotide
uuuaugagcagguacaacu

SEQ ID NO: 1661462 - RNA, 19 nt, Artificial Sequence
  Description of Artificial Sequence: Synthetic oligonucleotide
uguaauuuacuuugcagcc

SEQ ID NO: 1661463 - RNA, 19 nt, Artificial Sequence
  Description of Artificial Sequence: Synthetic oligonucleotide
aacccaaauacagucaccc

SEQ ID NO: 1661464 - RNA, 19 nt, Artificial Sequence
  Description of Artificial Sequence: Synthetic oligonucleotide
uaauauauaagaagcagau

SEQ ID NO: 1661465 - RNA, 19 nt, Artificial Sequence
  Description of Artificial Sequence: Synthetic oligonucleotide
ucuugauugguguaaaggc

SEQ ID NO: 1661466 - RNA, 19 nt, Artificial Sequence
  Description of Artificial Sequence: Synthetic oligonucleotide
cauauauacuucuaacagg

SEQ ID NO: 1661467 - RNA, 19 nt, Artificial Sequence
  Description of Artificial Sequence: Synthetic oligonucleotide
uuccaugacacuuuuaucu

SEQ ID NO: 1661468 - RNA, 19 nt, Artificial Sequence
  Description of Artificial Sequence: Synthetic oligonucleotide
uuuacuuugcagccaaugc

SEQ ID NO: 1661469 - RNA, 19 nt, Artificial Sequence
  Description of Artificial Sequence: Synthetic oligonucleotide
aaagacaccucuauaacag

SEQ ID NO: 1661470 - RNA, 19 nt, Artificial Sequence
  Description of Artificial Sequence: Synthetic oligonucleotide
uguuuccuaaacaaaaggu

SEQ ID NO: 1661471 - RNA, 19 nt, Artificial Sequence
  Description of Artificial Sequence: Synthetic oligonucleotide
acuccaucgcucuagacac

SEQ ID NO: 1661472 - RNA, 19 nt, Artificial Sequence
  Description of Artificial Sequence: Synthetic oligonucleotide
auuuccauuacuccuacug

SEQ ID NO: 1661473 - RNA, 19 nt, Artificial Sequence
  Description of Artificial Sequence: Synthetic oligonucleotide
cuuguggaaacccaaauac

SEQ ID NO: 1661474 - RNA, 19 nt, Artificial Sequence
  Description of Artificial Sequence: Synthetic oligonucleotide
uuuaucuauacauggcuug

SEQ ID NO: 1661475 - RNA, 19 nt, Artificial Sequence
  Description of Artificial Sequence: Synthetic oligonucleotide
guagcaagaggccucaugg

SEQ ID NO: 1661476 - RNA, 19 nt, Artificial Sequence
  Description of Artificial Sequence: Synthetic oligonucleotide
aagguuguaaaagacaccu

SEQ ID NO: 1661477 - RNA, 19 nt, Artificial Sequence
  Description of Artificial Sequence: Synthetic oligonucleotide
aucgcaaacggccaacacc

SEQ ID NO: 1661478 - RNA, 19 nt, Artificial Sequence
  Description of Artificial Sequence: Synthetic oligonucleotide
uauaacagcuauccaauac

SEQ ID NO: 1661479 - RNA, 19 nt, Artificial Sequence
  Description of Artificial Sequence: Synthetic oligonucleotide
auagagucgucuuucgugg

SEQ ID NO: 1661480 - RNA, 19 nt, Artificial Sequence
  Description of Artificial Sequence: Synthetic oligonucleotide
aagggccacuaauugaucg

SEQ ID NO: 1661481 - RNA, 19 nt, Artificial Sequence
  Description of Artificial Sequence: Synthetic oligonucleotide
uguaccagagagcacaaga

SEQ ID NO: 1661482 - RNA, 19 nt, Artificial Sequence
  Description of Artificial Sequence: Synthetic oligonucleotide
gauagagucgucuuucgug

SEQ ID NO: 1661483 - RNA, 19 nt, Artificial Sequence
  Description of Artificial Sequence: Synthetic oligonucleotide
gaaauaaccugguagucac

SEQ ID NO: 1661484 - RNA, 19 nt, Artificial Sequence
  Description of Artificial Sequence: Synthetic oligonucleotide
uuuaucuuuaugagcaggu

SEQ ID NO: 1661485 - RNA, 19 nt, Artificial Sequence
  Description of Artificial Sequence: Synthetic oligonucleotide
gacuaaacaugcuuugucc

SEQ ID NO: 1661486 - RNA, 19 nt, Artificial Sequence
  Description of Artificial Sequence: Synthetic oligonucleotide
uugcuuaaggcuuuccggg

SEQ ID NO: 1661487 - RNA, 19 nt, Artificial Sequence
  Description of Artificial Sequence: Synthetic oligonucleotide
uaauugaucgagguugugg

SEQ ID NO: 1661488 - RNA, 19 nt, Artificial Sequence
  Description of Artificial Sequence: Synthetic oligonucleotide
ugucuaucagaaauaaccu

SEQ ID NO: 1661489 - RNA, 19 nt, Artificial Sequence
  Description of Artificial Sequence: Synthetic oligonucleotide
uaucuuuaugagcagguac

SEQ ID NO: 1661490 - RNA, 19 nt, Artificial Sequence
  Description of Artificial Sequence: Synthetic oligonucleotide
agacacaagacuuucgucu

SEQ ID NO: 1661491 - RNA, 19 nt, Artificial Sequence
  Description of Artificial Sequence: Synthetic oligonucleotide
aaagguuguaaaagacacc

SEQ ID NO: 1661492 - RNA, 19 nt, Artificial Sequence
  Description of Artificial Sequence: Synthetic oligonucleotide
uaugcuguagcaagaggcc

SEQ ID NO: 1661493 - RNA, 19 nt, Artificial Sequence
  Description of Artificial Sequence: Synthetic oligonucleotide
ugguuauauaacuaaccca

SEQ ID NO: 1661494 - RNA, 19 nt, Artificial Sequence
  Description of Artificial Sequence: Synthetic oligonucleotide
guaacgaauaugcauccag

SEQ ID NO: 1661495 - RNA, 19 nt, Artificial Sequence
  Description of Artificial Sequence: Synthetic oligonucleotide
aacgcugccaucgcaaacg

SEQ ID NO: 1661496 - RNA, 19 nt, Artificial Sequence
  Description of Artificial Sequence: Synthetic oligonucleotide
ucaucauauauacuucuaa

SEQ ID NO: 1661497 - RNA, 19 nt, Artificial Sequence
  Description of Artificial Sequence: Synthetic oligonucleotide
uguguuggagugccuaagg

SEQ ID NO: 1661498 - RNA, 19 nt, Artificial Sequence
  Description of Artificial Sequence: Synthetic oligonucleotide
cacuaauugaucgagguug

SEQ ID NO: 1661499 - RNA, 19 nt, Artificial Sequence
  Description of Artificial Sequence: Synthetic oligonucleotide
cuguuuccuaaacaaaagg

SEQ ID NO: 1661500 - RNA, 19 nt, Artificial Sequence
  Description of Artificial Sequence: Synthetic oligonucleotide
caccacuccggcaagaacg

SEQ ID NO: 1661501 - RNA, 19 nt, Artificial Sequence
  Description of Artificial Sequence: Synthetic oligonucleotide
cuauacauggcuugacacc

SEQ ID NO: 1661502 - RNA, 19 nt, Artificial Sequence
  Description of Artificial Sequence: Synthetic oligonucleotide
gaaacccaaauacagucac

SEQ ID NO: 1661503 - RNA, 19 nt, Artificial Sequence
  Description of Artificial Sequence: Synthetic oligonucleotide
ugcaauuuagacugguaac

SEQ ID NO: 1661504 - RNA, 19 nt, Artificial Sequence
  Description of Artificial Sequence: Synthetic oligonucleotide
cugguaacgaauaugcauc

SEQ ID NO: 1661505 - RNA, 19 nt, Artificial Sequence
  Description of Artificial Sequence: Synthetic oligonucleotide
uaauuuacuuugcagccaa

SEQ ID NO: 1661506 - RNA, 19 nt, Artificial Sequence
  Description of Artificial Sequence: Synthetic oligonucleotide
aacacggugcuaagcaugc

SEQ ID NO: 1661507 - RNA, 19 nt, Artificial Sequence
  Description of Artificial Sequence: Synthetic oligonucleotide
caugcacuguaccagagag

SEQ ID NO: 1661508 - RNA, 19 nt, Artificial Sequence
  Description of Artificial Sequence: Synthetic oligonucleotide
auuaacaccugucuuugga

SEQ ID NO: 1661509 - RNA, 19 nt, Artificial Sequence
  Description of Artificial Sequence: Synthetic oligonucleotide
uuagacaucacaugcuuua

SEQ ID NO: 1661510 - RNA, 19 nt, Artificial Sequence
  Description of Artificial Sequence: Synthetic oligonucleotide
uuccuaaacaaaagguugu

SEQ ID NO: 1661511 - RNA, 19 nt, Artificial Sequence
  Description of Artificial Sequence: Synthetic oligonucleotide
cauuacuccuacugaaggg

SEQ ID NO: 1661512 - RNA, 19 nt, Artificial Sequence
  Description of Artificial Sequence: Synthetic oligonucleotide
ugugcuaccagccgaacau

SEQ ID NO: 1661513 - RNA, 19 nt, Artificial Sequence
  Description of Artificial Sequence: Synthetic oligonucleotide
aguuguaacuccaacaaga

SEQ ID NO: 1661514 - RNA, 19 nt, Artificial Sequence
  Description of Artificial Sequence: Synthetic oligonucleotide
guaugcuguagcaagaggc

SEQ ID NO: 1661515 - RNA, 19 nt, Artificial Sequence
  Description of Artificial Sequence: Synthetic oligonucleotide
aaacggccaacaccacucc

SEQ ID NO: 1661516 - RNA, 19 nt, Artificial Sequence
  Description of Artificial Sequence: Synthetic oligonucleotide
ugcuuuaagauauucccau

SEQ ID NO: 1661517 - RNA, 19 nt, Artificial Sequence
  Description of Artificial Sequence: Synthetic oligonucleotide
cuacaaaugggcuguuucc

SEQ ID NO: 1661518 - RNA, 19 nt, Artificial Sequence
  Description of Artificial Sequence: Synthetic oligonucleotide
uuuagacugguaacgaaua

SEQ ID NO: 1661519 - RNA, 19 nt, Artificial Sequence
  Description of Artificial Sequence: Synthetic oligonucleotide
uuuuaucuauacauggcuu

SEQ ID NO: 1661520 - RNA, 19 nt, Artificial Sequence
  Description of Artificial Sequence: Synthetic oligonucleotide
ugucaucauauauacuucu

SEQ ID NO: 1661521 - RNA, 19 nt, Artificial Sequence
  Description of Artificial Sequence: Synthetic oligonucleotide
uggaguuguaacuccaaca

SEQ ID NO: 1661522 - RNA, 19 nt, Artificial Sequence
  Description of Artificial Sequence: Synthetic oligonucleotide
acuaaacaugcuuugucca

SEQ ID NO: 1661523 - RNA, 19 nt, Artificial Sequence
  Description of Artificial Sequence: Synthetic oligonucleotide
aacuaacccaaggaagccg

SEQ ID NO: 1661524 - RNA, 19 nt, Artificial Sequence
  Description of Artificial Sequence: Synthetic oligonucleotide
aucgagaugaucuucugaa

SEQ ID NO: 1661525 - RNA, 19 nt, Artificial Sequence
  Description of Artificial Sequence: Synthetic oligonucleotide
aacauguacuccaucgcuc

SEQ ID NO: 1661526 - RNA, 19 nt, Artificial Sequence
  Description of Artificial Sequence: Synthetic oligonucleotide
acugaagggccacuaauug

SEQ ID NO: 1661527 - RNA, 19 nt, Artificial Sequence
  Description of Artificial Sequence: Synthetic oligonucleotide
uuguaaaagacaccucuau

SEQ ID NO: 1661528 - RNA, 19 nt, Artificial Sequence
  Description of Artificial Sequence: Synthetic oligonucleotide
cuaaacaugcuuuguccag

SEQ ID NO: 1661529 - RNA, 19 nt, Artificial Sequence
  Description of Artificial Sequence: Synthetic oligonucleotide
uguaaaagacaccucuaua

SEQ ID NO: 1661530 - RNA, 19 nt, Artificial Sequence
  Description of Artificial Sequence: Synthetic oligonucleotide
auaugcauccaguugccug

SEQ ID NO: 1661531 - RNA, 19 nt, Artificial Sequence
  Description of Artificial Sequence: Synthetic oligonucleotide
acuucaaacucaaucaugu

SEQ ID NO: 1661532 - RNA, 19 nt, Artificial Sequence
  Description of Artificial Sequence: Synthetic oligonucleotide
ccaauacugccuuaaaugg

SEQ ID NO: 1661533 - RNA, 19 nt, Artificial Sequence
  Description of Artificial Sequence: Synthetic oligonucleotide
gucuugauugguguaaagg

SEQ ID NO: 1661534 - RNA, 19 nt, Artificial Sequence
  Description of Artificial Sequence: Synthetic oligonucleotide
aaacgcugccaucgcaaac

SEQ ID NO: 1661535 - RNA, 19 nt, Artificial Sequence
  Description of Artificial Sequence: Synthetic oligonucleotide
aacgaauaugcauccaguu

SEQ ID NO: 1661536 - RNA, 19 nt, Artificial Sequence
  Description of Artificial Sequence: Synthetic oligonucleotide
uaacgaauaugcauccagu

SEQ ID NO: 1661537 - RNA, 19 nt, Artificial Sequence
  Description of Artificial Sequence: Synthetic oligonucleotide
ugauugguguaaaggcuag

SEQ ID NO: 1661538 - RNA, 19 nt, Artificial Sequence
  Description of Artificial Sequence: Synthetic oligonucleotide
auugguguaaaggcuagag

SEQ ID NO: 1661539 - RNA, 19 nt, Artificial Sequence
  Description of Artificial Sequence: Synthetic oligonucleotide
uugauugguguaaaggcua

SEQ ID NO: 1661540 - RNA, 19 nt, Artificial Sequence
  Description of Artificial Sequence: Synthetic oligonucleotide
gggcuugcaauuuagacug

SEQ ID NO: 1661541 - RNA, 19 nt, Artificial Sequence
  Description of Artificial Sequence: Synthetic oligonucleotide
agugcaagcuacaaauggg

SEQ ID NO: 1661542 - RNA, 19 nt, Artificial Sequence
  Description of Artificial Sequence: Synthetic oligonucleotide
uguagcaagaggccucaug

SEQ ID NO: 1661543 - RNA, 19 nt, Artificial Sequence
  Description of Artificial Sequence: Synthetic oligonucleotide
cuaguggaggccuuguaug

SEQ ID NO: 1661544 - RNA, 19 nt, Artificial Sequence
  Description of Artificial Sequence: Synthetic oligonucleotide
uuugucuaucagaaauaac

SEQ ID NO: 1661545 - RNA, 19 nt, Artificial Sequence
  Description of Artificial Sequence: Synthetic oligonucleotide
uauauacuucuaacaggug

SEQ ID NO: 1661546 - RNA, 19 nt, Artificial Sequence
  Description of Artificial Sequence: Synthetic oligonucleotide
uccuggacuggaaauguca

SEQ ID NO: 1661547 - RNA, 19 nt, Artificial Sequence
  Description of Artificial Sequence: Synthetic oligonucleotide
uguuugucuaucagaaaua

SEQ ID NO: 1661548 - RNA, 19 nt, Artificial Sequence
  Description of Artificial Sequence: Synthetic oligonucleotide
gucuaucagaaauaaccug

SEQ ID NO: 1661549 - RNA, 19 nt, Artificial Sequence
  Description of Artificial Sequence: Synthetic oligonucleotide
cugguagucacuaguggag

SEQ ID NO: 1661550 - RNA, 19 nt, Artificial Sequence
  Description of Artificial Sequence: Synthetic oligonucleotide
ugguaacgaauaugcaucc

SEQ ID NO: 1661551 - RNA, 19 nt, Artificial Sequence
  Description of Artificial Sequence: Synthetic oligonucleotide
uguuggagugccuaagguc

SEQ ID NO: 1661552 - RNA, 19 nt, Artificial Sequence
  Description of Artificial Sequence: Synthetic oligonucleotide
agaaauaaccugguaguca

SEQ ID NO: 1661553 - RNA, 19 nt, Artificial Sequence
  Description of Artificial Sequence: Synthetic oligonucleotide
gguuauauaacuaacccaa

SEQ ID NO: 1661554 - RNA, 19 nt, Artificial Sequence
  Description of Artificial Sequence: Synthetic oligonucleotide
ucgcucuagacacaagacu

SEQ ID NO: 1661555 - RNA, 19 nt, Artificial Sequence
  Description of Artificial Sequence: Synthetic oligonucleotide
agucacccaagugucaucg

SEQ ID NO: 1661556 - RNA, 19 nt, Artificial Sequence
  Description of Artificial Sequence: Synthetic oligonucleotide
uuacugugcuaccagccga

SEQ ID NO: 1661557 - RNA, 19 nt, Artificial Sequence
  Description of Artificial Sequence: Synthetic oligonucleotide
guuguaacuccaacaagag

SEQ ID NO: 1661558 - RNA, 19 nt, Artificial Sequence
  Description of Artificial Sequence: Synthetic oligonucleotide
uuaucuauacauggcuuga

SEQ ID NO: 1661559 - RNA, 19 nt, Artificial Sequence
  Description of Artificial Sequence: Synthetic oligonucleotide
caaacggccaacaccacuc

SEQ ID NO: 1661560 - RNA, 19 nt, Artificial Sequence
  Description of Artificial Sequence: Synthetic oligonucleotide
ugauccgaguccuggacug

SEQ ID NO: 1661561 - RNA, 19 nt, Artificial Sequence
  Description of Artificial Sequence: Synthetic oligonucleotide
uuccauuacuccuacugaa

SEQ ID NO: 1661562 - RNA, 19 nt, Artificial Sequence
  Description of Artificial Sequence: Synthetic oligonucleotide
auuugcuggacuaaacaug

SEQ ID NO: 1661563 - RNA, 19 nt, Artificial Sequence
  Description of Artificial Sequence: Synthetic oligonucleotide
agaacggucccacuuuuca

SEQ ID NO: 1661564 - RNA, 19 nt, Artificial Sequence
  Description of Artificial Sequence: Synthetic oligonucleotide
aauaaccugguagucacua

SEQ ID NO: 1661565 - RNA, 19 nt, Artificial Sequence
  Description of Artificial Sequence: Synthetic oligonucleotide
caugguagaaacccuagga

SEQ ID NO: 1661566 - RNA, 19 nt, Artificial Sequence
  Description of Artificial Sequence: Synthetic oligonucleotide
guaagaacugggcauuaac

SEQ ID NO: 1661567 - RNA, 19 nt, Artificial Sequence
  Description of Artificial Sequence: Synthetic oligonucleotide
ugcaagcuacaaaugggcu

SEQ ID NO: 1661568 - RNA, 19 nt, Artificial Sequence
  Description of Artificial Sequence: Synthetic oligonucleotide
gagguuguggagucacggg

SEQ ID NO: 1661569 - RNA, 19 nt, Artificial Sequence
  Description of Artificial Sequence: Synthetic oligonucleotide
gauccaacugggcaggaga

SEQ ID NO: 1661570 - RNA, 19 nt, Artificial Sequence
  Description of Artificial Sequence: Synthetic oligonucleotide
acuaacccaaggaagccgg

SEQ ID NO: 1661571 - RNA, 19 nt, Artificial Sequence
  Description of Artificial Sequence: Synthetic oligonucleotide
accugguagucacuagugg

SEQ ID NO: 1661572 - RNA, 19 nt, Artificial Sequence
  Description of Artificial Sequence: Synthetic oligonucleotide
ucguggcugaccaauauuu

SEQ ID NO: 1661573 - RNA, 19 nt, Artificial Sequence
  Description of Artificial Sequence: Synthetic oligonucleotide
acauguacuccaucgcucu

SEQ ID NO: 1661574 - RNA, 19 nt, Artificial Sequence
  Description of Artificial Sequence: Synthetic oligonucleotide
ucgagaugaucuucugaag

SEQ ID NO: 1661575 - RNA, 19 nt, Artificial Sequence
  Description of Artificial Sequence: Synthetic oligonucleotide
aaagugcaagcuacaaaug

SEQ ID NO: 1661576 - RNA, 19 nt, Artificial Sequence
  Description of Artificial Sequence: Synthetic oligonucleotide
cuaccagccgaacauguac

SEQ ID NO: 1661577 - RNA, 19 nt, Artificial Sequence
  Description of Artificial Sequence: Synthetic oligonucleotide
aaacucaaucauguaauuu

SEQ ID NO: 1661578 - RNA, 19 nt, Artificial Sequence
  Description of Artificial Sequence: Synthetic oligonucleotide
uggacucuccaaauauucu

SEQ ID NO: 1661579 - RNA, 19 nt, Artificial Sequence
  Description of Artificial Sequence: Synthetic oligonucleotide
aacggccaacaccacuccg

SEQ ID NO: 1661580 - RNA, 19 nt, Artificial Sequence
  Description of Artificial Sequence: Synthetic oligonucleotide
ugguagucacuaguggagg

SEQ ID NO: 1661581 - RNA, 19 nt, Artificial Sequence
  Description of Artificial Sequence: Synthetic oligonucleotide
uaguggaggccuuguaugc

SEQ ID NO: 1661582 - RNA, 19 nt, Artificial Sequence
  Description of Artificial Sequence: Synthetic oligonucleotide
uuguaugcuguagcaagag

SEQ ID NO: 1661583 - RNA, 19 nt, Artificial Sequence
  Description of Artificial Sequence: Synthetic oligonucleotide
uuagacugguaacgaauau

SEQ ID NO: 1661584 - RNA, 19 nt, Artificial Sequence
  Description of Artificial Sequence: Synthetic oligonucleotide
ugccuaaggucuugauugg

SEQ ID NO: 1661585 - RNA, 19 nt, Artificial Sequence
  Description of Artificial Sequence: Synthetic oligonucleotide
ugaucucauuuccauuacu

SEQ ID NO: 1661586 - RNA, 19 nt, Artificial Sequence
  Description of Artificial Sequence: Synthetic oligonucleotide
uaacuaacccaaggaagcc

SEQ ID NO: 1661587 - RNA, 19 nt, Artificial Sequence
  Description of Artificial Sequence: Synthetic oligonucleotide
acuccggcaagaacggucc

SEQ ID NO: 1661588 - RNA, 19 nt, Artificial Sequence
  Description of Artificial Sequence: Synthetic oligonucleotide
guuauauaacuaacccaag

SEQ ID NO: 1661589 - RNA, 19 nt, Artificial Sequence
  Description of Artificial Sequence: Synthetic oligonucleotide
uacaaaugggcuguuuccu

SEQ ID NO: 1661590 - RNA, 19 nt, Artificial Sequence
  Description of Artificial Sequence: Synthetic oligonucleotide
ccgaacauguacuccaucg

SEQ ID NO: 1661591 - RNA, 19 nt, Artificial Sequence
  Description of Artificial Sequence: Synthetic oligonucleotide
uguccagucacuggaguug

SEQ ID NO: 1661592 - RNA, 19 nt, Artificial Sequence
  Description of Artificial Sequence: Synthetic oligonucleotide
auaaccugguagucacuag

SEQ ID NO: 1661593 - RNA, 19 nt, Artificial Sequence
  Description of Artificial Sequence: Synthetic oligonucleotide
cuggacuaaacaugcuuug

SEQ ID NO: 1661594 - RNA, 19 nt, Artificial Sequence
  Description of Artificial Sequence: Synthetic oligonucleotide
gguagaaacccuaggagug

SEQ ID NO: 1661595 - RNA, 19 nt, Artificial Sequence
  Description of Artificial Sequence: Synthetic oligonucleotide
cuuuuaucuauacauggcu

SEQ ID NO: 1661596 - RNA, 19 nt, Artificial Sequence
  Description of Artificial Sequence: Synthetic oligonucleotide
aucgcucuagacacaagac

SEQ ID NO: 1661597 - RNA, 19 nt, Artificial Sequence
  Description of Artificial Sequence: Synthetic oligonucleotide
auccaauacugccuuaaau

SEQ ID NO: 1661598 - RNA, 19 nt, Artificial Sequence
  Description of Artificial Sequence: Synthetic oligonucleotide
caaugcugagaacacggug

SEQ ID NO: 1661599 - RNA, 19 nt, Artificial Sequence
  Description of Artificial Sequence: Synthetic oligonucleotide
gaacacggugcuaagcaug

SEQ ID NO: 1661600 - RNA, 19 nt, Artificial Sequence
  Description of Artificial Sequence: Synthetic oligonucleotide
cucuuacugugcuaccagc

SEQ ID NO: 1661601 - RNA, 19 nt, Artificial Sequence
  Description of Artificial Sequence: Synthetic oligonucleotide
aucgagguuguggagucac

SEQ ID NO: 1661602 - RNA, 19 nt, Artificial Sequence
  Description of Artificial Sequence: Synthetic oligonucleotide
gacaaggcuccucugucac

SEQ ID NO: 1661603 - RNA, 19 nt, Artificial Sequence
  Description of Artificial Sequence: Synthetic oligonucleotide
ccaagugucaucgagauga

SEQ ID NO: 1661604 - RNA, 19 nt, Artificial Sequence
  Description of Artificial Sequence: Synthetic oligonucleotide
aaccugguagucacuagug

SEQ ID NO: 1661605 - RNA, 19 nt, Artificial Sequence
  Description of Artificial Sequence: Synthetic oligonucleotide
uaccagccgaacauguacu

SEQ ID NO: 1661606 - RNA, 19 nt, Artificial Sequence
  Description of Artificial Sequence: Synthetic oligonucleotide
aacaugcuuuguccaguca

SEQ ID NO: 1661607 - RNA, 19 nt, Artificial Sequence
  Description of Artificial Sequence: Synthetic oligonucleotide
uaucagaaauaaccuggua

SEQ ID NO: 1661608 - RNA, 19 nt, Artificial Sequence
  Description of Artificial Sequence: Synthetic oligonucleotide
gugcaagcuacaaaugggc

SEQ ID NO: 1661609 - RNA, 19 nt, Artificial Sequence
  Description of Artificial Sequence: Synthetic oligonucleotide
aaggucuugauugguguaa

SEQ ID NO: 1661610 - RNA, 19 nt, Artificial Sequence
  Description of Artificial Sequence: Synthetic oligonucleotide
ugagaacacggugcuaagc

SEQ ID NO: 1661611 - RNA, 19 nt, Artificial Sequence
  Description of Artificial Sequence: Synthetic oligonucleotide
accagccgaacauguacuc

SEQ ID NO: 1661612 - RNA, 19 nt, Artificial Sequence
  Description of Artificial Sequence: Synthetic oligonucleotide
gguuguaaaagacaccucu

SEQ ID NO: 1661613 - RNA, 19 nt, Artificial Sequence
  Description of Artificial Sequence: Synthetic oligonucleotide
guucagaucccagcguggg

SEQ ID NO: 1661614 - RNA, 19 nt, Artificial Sequence
  Description of Artificial Sequence: Synthetic oligonucleotide
ugcuaagcaugcacuguac

SEQ ID NO: 1661615 - RNA, 19 nt, Artificial Sequence
  Description of Artificial Sequence: Synthetic oligonucleotide
ucaucgagaugaucuucug

SEQ ID NO: 1661616 - RNA, 19 nt, Artificial Sequence
  Description of Artificial Sequence: Synthetic oligonucleotide
ccauuacuccuacugaagg

SEQ ID NO: 1661617 - RNA, 19 nt, Artificial Sequence
  Description of Artificial Sequence: Synthetic oligonucleotide
cagucuggcucuuacugug

SEQ ID NO: 1661618 - RNA, 19 nt, Artificial Sequence
  Description of Artificial Sequence: Synthetic oligonucleotide
auccaguugccuguguuag

SEQ ID NO: 1661619 - RNA, 19 nt, Artificial Sequence
  Description of Artificial Sequence: Synthetic oligonucleotide
agugccuaaggucuugauu

SEQ ID NO: 1661620 - RNA, 19 nt, Artificial Sequence
  Description of Artificial Sequence: Synthetic oligonucleotide
uucuaacagguggagcgcc

SEQ ID NO: 1661621 - RNA, 19 nt, Artificial Sequence
  Description of Artificial Sequence: Synthetic oligonucleotide
uuucguggcugaccaauau

SEQ ID NO: 1661622 - RNA, 19 nt, Artificial Sequence
  Description of Artificial Sequence: Synthetic oligonucleotide
agguguaucucagccaucu

SEQ ID NO: 1661623 - RNA, 19 nt, Artificial Sequence
  Description of Artificial Sequence: Synthetic oligonucleotide
guugauccgaguccuggac

SEQ ID NO: 1661624 - RNA, 19 nt, Artificial Sequence
  Description of Artificial Sequence: Synthetic oligonucleotide
acaccucuauaacagcuau

SEQ ID NO: 1661625 - RNA, 19 nt, Artificial Sequence
  Description of Artificial Sequence: Synthetic oligonucleotide
ugaccaauauuugcuggac

SEQ ID NO: 1661626 - RNA, 19 nt, Artificial Sequence
  Description of Artificial Sequence: Synthetic oligonucleotide
agcaagaggccucauggua

SEQ ID NO: 1661627 - RNA, 19 nt, Artificial Sequence
  Description of Artificial Sequence: Synthetic oligonucleotide
cuugauugguguaaaggcu

SEQ ID NO: 1661628 - RNA, 19 nt, Artificial Sequence
  Description of Artificial Sequence: Synthetic oligonucleotide
gcugccaucgcaaacggcc

SEQ ID NO: 1661629 - RNA, 19 nt, Artificial Sequence
  Description of Artificial Sequence: Synthetic oligonucleotide
ucgagguuguggagucacg

SEQ ID NO: 1661630 - RNA, 19 nt, Artificial Sequence
  Description of Artificial Sequence: Synthetic oligonucleotide
acccaagugucaucgagau

SEQ ID NO: 1661631 - RNA, 19 nt, Artificial Sequence
  Description of Artificial Sequence: Synthetic oligonucleotide
uggacuaaacaugcuuugu

SEQ ID NO: 1661632 - RNA, 19 nt, Artificial Sequence
  Description of Artificial Sequence: Synthetic oligonucleotide
gaugacaaggcuccucugu

SEQ ID NO: 1661633 - RNA, 19 nt, Artificial Sequence
  Description of Artificial Sequence: Synthetic oligonucleotide
uucagaucccagcgugggc

SEQ ID NO: 1661634 - RNA, 19 nt, Artificial Sequence
  Description of Artificial Sequence: Synthetic oligonucleotide
gaugucggugaacccagca

SEQ ID NO: 1661635 - RNA, 19 nt, Artificial Sequence
  Description of Artificial Sequence: Synthetic oligonucleotide
agguacaacuggcuguggu

SEQ ID NO: 1661636 - RNA, 19 nt, Artificial Sequence
  Description of Artificial Sequence: Synthetic oligonucleotide
cuggcucuuacugugcuac

SEQ ID NO: 1661637 - RNA, 19 nt, Artificial Sequence
  Description of Artificial Sequence: Synthetic oligonucleotide
auguacuccaucgcucuag

SEQ ID NO: 1661638 - RNA, 19 nt, Artificial Sequence
  Description of Artificial Sequence: Synthetic oligonucleotide
guagaaacccuaggagugc

SEQ ID NO: 1661639 - RNA, 19 nt, Artificial Sequence
  Description of Artificial Sequence: Synthetic oligonucleotide
gucacuggaguuguaacuc

SEQ ID NO: 1661640 - RNA, 19 nt, Artificial Sequence
  Description of Artificial Sequence: Synthetic oligonucleotide
cugggcauuaacaccuguc

SEQ ID NO: 1661641 - RNA, 19 nt, Artificial Sequence
  Description of Artificial Sequence: Synthetic oligonucleotide
agcuauccaauacugccuu

SEQ ID NO: 1661642 - RNA, 19 nt, Artificial Sequence
  Description of Artificial Sequence: Synthetic oligonucleotide
aagaacggucccacuuuuc

SEQ ID NO: 1661643 - RNA, 19 nt, Artificial Sequence
  Description of Artificial Sequence: Synthetic oligonucleotide
guuggagugccuaaggucu

SEQ ID NO: 1661644 - RNA, 19 nt, Artificial Sequence
  Description of Artificial Sequence: Synthetic oligonucleotide
uaaggucuugauuggugua

SEQ ID NO: 1661645 - RNA, 19 nt, Artificial Sequence
  Description of Artificial Sequence: Synthetic oligonucleotide
aagccggcaguccuccacu

SEQ ID NO: 1661646 - RNA, 19 nt, Artificial Sequence
  Description of Artificial Sequence: Synthetic oligonucleotide
aggaagccggcaguccucc

SEQ ID NO: 1661647 - RNA, 19 nt, Artificial Sequence
  Description of Artificial Sequence: Synthetic oligonucleotide
agaacacggugcuaagcau

SEQ ID NO: 1661648 - RNA, 19 nt, Artificial Sequence
  Description of Artificial Sequence: Synthetic oligonucleotide
uacugugcuaccagccgaa

SEQ ID NO: 1661649 - RNA, 19 nt, Artificial Sequence
  Description of Artificial Sequence: Synthetic oligonucleotide
agagucgucuuucguggcu

SEQ ID NO: 1661650 - RNA, 19 nt, Artificial Sequence
  Description of Artificial Sequence: Synthetic oligonucleotide
ggacuaaacaugcuuuguc

SEQ ID NO: 1661651 - RNA, 19 nt, Artificial Sequence
  Description of Artificial Sequence: Synthetic oligonucleotide
cuucuaacagguggagcgc

SEQ ID NO: 1661652 - RNA, 19 nt, Artificial Sequence
  Description of Artificial Sequence: Synthetic oligonucleotide
uagucacuaguggaggccu

SEQ ID NO: 1661653 - RNA, 19 nt, Artificial Sequence
  Description of Artificial Sequence: Synthetic oligonucleotide
gguagucacuaguggaggc

SEQ ID NO: 1661654 - RNA, 19 nt, Artificial Sequence
  Description of Artificial Sequence: Synthetic oligonucleotide
caauuuagacugguaacga

SEQ ID NO: 1661655 - RNA, 19 nt, Artificial Sequence
  Description of Artificial Sequence: Synthetic oligonucleotide
gaagccggcaguccuccac

SEQ ID NO: 1661656 - RNA, 19 nt, Artificial Sequence
  Description of Artificial Sequence: Synthetic oligonucleotide
acggccaacaccacuccgg

SEQ ID NO: 1661657 - RNA, 19 nt, Artificial Sequence
  Description of Artificial Sequence: Synthetic oligonucleotide
gaggccuuguaugcuguag

SEQ ID NO: 1661658 - RNA, 19 nt, Artificial Sequence
  Description of Artificial Sequence: Synthetic oligonucleotide
cuagacacaagacuuucgu

SEQ ID NO: 1661659 - RNA, 19 nt, Artificial Sequence
  Description of Artificial Sequence: Synthetic oligonucleotide
uagcaagaggccucauggu

SEQ ID NO: 1661660 - RNA, 19 nt, Artificial Sequence
  Description of Artificial Sequence: Synthetic oligonucleotide
cagaaauaaccugguaguc

SEQ ID NO: 1661661 - RNA, 19 nt, Artificial Sequence
  Description of Artificial Sequence: Synthetic oligonucleotide
uucguggcugaccaauauu

SEQ ID NO: 1661662 - RNA, 19 nt, Artificial Sequence
  Description of Artificial Sequence: Synthetic oligonucleotide
ggccucaugguagaaaccc

SEQ ID NO: 1661663 - RNA, 19 nt, Artificial Sequence
  Description of Artificial Sequence: Synthetic oligonucleotide
ugccuuaaaugguuauaua

SEQ ID NO: 1661664 - RNA, 19 nt, Artificial Sequence
  Description of Artificial Sequence: Synthetic oligonucleotide
cacuccggcaagaacgguc

SEQ ID NO: 1661665 - RNA, 19 nt, Artificial Sequence
  Description of Artificial Sequence: Synthetic oligonucleotide
gugaucucauuuccauuac

SEQ ID NO: 1661666 - RNA, 19 nt, Artificial Sequence
  Description of Artificial Sequence: Synthetic oligonucleotide
agccaaugcugagaacacg

SEQ ID NO: 1661667 - RNA, 19 nt, Artificial Sequence
  Description of Artificial Sequence: Synthetic oligonucleotide
uagaaacccuaggagugcu

SEQ ID NO: 1661668 - RNA, 19 nt, Artificial Sequence
  Description of Artificial Sequence: Synthetic oligonucleotide
uuguccagucacuggaguu

SEQ ID NO: 1661669 - RNA, 19 nt, Artificial Sequence
  Description of Artificial Sequence: Synthetic oligonucleotide
uccuaaacaaaagguugua

SEQ ID NO: 1661670 - RNA, 19 nt, Artificial Sequence
  Description of Artificial Sequence: Synthetic oligonucleotide
gcuaagcaugcacuguacc

SEQ ID NO: 1661671 - RNA, 19 nt, Artificial Sequence
  Description of Artificial Sequence: Synthetic oligonucleotide
aagcaaaggugaucucauu

SEQ ID NO: 1661672 - RNA, 19 nt, Artificial Sequence
  Description of Artificial Sequence: Synthetic oligonucleotide
cuaacccaaggaagccggc

SEQ ID NO: 1661673 - RNA, 19 nt, Artificial Sequence
  Description of Artificial Sequence: Synthetic oligonucleotide
uacugccuuaaaugguuau

SEQ ID NO: 1661674 - RNA, 19 nt, Artificial Sequence
  Description of Artificial Sequence: Synthetic oligonucleotide
cuaaggucuugauuggugu

SEQ ID NO: 1661675 - RNA, 19 nt, Artificial Sequence
  Description of Artificial Sequence: Synthetic oligonucleotide
aaauaaccugguagucacu

SEQ ID NO: 1661676 - RNA, 19 nt, Artificial Sequence
  Description of Artificial Sequence: Synthetic oligonucleotide
aacagguggagcgccacuu

SEQ ID NO: 1661677 - RNA, 19 nt, Artificial Sequence
  Description of Artificial Sequence: Synthetic oligonucleotide
caugacacuuuuaucuaua

SEQ ID NO: 1661678 - RNA, 19 nt, Artificial Sequence
  Description of Artificial Sequence: Synthetic oligonucleotide
uccgggcuugcaauuuaga

SEQ ID NO: 1661679 - RNA, 19 nt, Artificial Sequence
  Description of Artificial Sequence: Synthetic oligonucleotide
acuccaacaagaggacucu

SEQ ID NO: 1661680 - RNA, 19 nt, Artificial Sequence
  Description of Artificial Sequence: Synthetic oligonucleotide
gagaaucuccuugaguaua

SEQ ID NO: 1661681 - RNA, 19 nt, Artificial Sequence
  Description of Artificial Sequence: Synthetic oligonucleotide
guuuccuaaacaaaagguu

SEQ ID NO: 1661682 - RNA, 19 nt, Artificial Sequence
  Description of Artificial Sequence: Synthetic oligonucleotide
gagucgucuuucguggcug

SEQ ID NO: 1661683 - RNA, 19 nt, Artificial Sequence
  Description of Artificial Sequence: Synthetic oligonucleotide
acccaaauacagucaccca

SEQ ID NO: 1661684 - RNA, 19 nt, Artificial Sequence
  Description of Artificial Sequence: Synthetic oligonucleotide
cuggacuggaaaugucauc

SEQ ID NO: 1661685 - RNA, 19 nt, Artificial Sequence
  Description of Artificial Sequence: Synthetic oligonucleotide
acauggcuugacaccaauc

SEQ ID NO: 1661686 - RNA, 19 nt, Artificial Sequence
  Description of Artificial Sequence: Synthetic oligonucleotide
ccuaaggucuugauuggug

SEQ ID NO: 1661687 - RNA, 19 nt, Artificial Sequence
  Description of Artificial Sequence: Synthetic oligonucleotide
agguuguaaaagacaccuc

SEQ ID NO: 1661688 - RNA, 19 nt, Artificial Sequence
  Description of Artificial Sequence: Synthetic oligonucleotide
caucgagaugaucuucuga

SEQ ID NO: 1661689 - RNA, 19 nt, Artificial Sequence
  Description of Artificial Sequence: Synthetic oligonucleotide
gcucuuacugugcuaccag

SEQ ID NO: 1661690 - RNA, 19 nt, Artificial Sequence
  Description of Artificial Sequence: Synthetic oligonucleotide
gaacggucccacuuuucaa

SEQ ID NO: 1661691 - RNA, 19 nt, Artificial Sequence
  Description of Artificial Sequence: Synthetic oligonucleotide
ggagaugucggugaaccca

SEQ ID NO: 1661692 - RNA, 19 nt, Artificial Sequence
  Description of Artificial Sequence: Synthetic oligonucleotide
uccaguugccuguguuaga

SEQ ID NO: 1661693 - RNA, 19 nt, Artificial Sequence
  Description of Artificial Sequence: Synthetic oligonucleotide
cuugcaauuuagacuggua

SEQ ID NO: 1661694 - RNA, 19 nt, Artificial Sequence
  Description of Artificial Sequence: Synthetic oligonucleotide
ggucuugauugguguaaag

SEQ ID NO: 1661695 - RNA, 19 nt, Artificial Sequence
  Description of Artificial Sequence: Synthetic oligonucleotide
cuguguuggagugccuaag

SEQ ID NO: 1661696 - RNA, 19 nt, Artificial Sequence
  Description of Artificial Sequence: Synthetic oligonucleotide
caauacugccuuaaauggu

SEQ ID NO: 1661697 - RNA, 19 nt, Artificial Sequence
  Description of Artificial Sequence: Synthetic oligonucleotide
acggucccacuuuucaaaa

SEQ ID NO: 1661698 - RNA, 19 nt, Artificial Sequence
  Description of Artificial Sequence: Synthetic oligonucleotide
ggcuugacaccaaucauga

SEQ ID NO: 1661699 - RNA, 19 nt, Artificial Sequence
  Description of Artificial Sequence: Synthetic oligonucleotide
cuaauugaucgagguugug

SEQ ID NO: 1661700 - RNA, 19 nt, Artificial Sequence
  Description of Artificial Sequence: Synthetic oligonucleotide
acggugcuaagcaugcacu

SEQ ID NO: 1661701 - RNA, 19 nt, Artificial Sequence
  Description of Artificial Sequence: Synthetic oligonucleotide
acugccuuaaaugguuaua

SEQ ID NO: 1661702 - RNA, 19 nt, Artificial Sequence
  Description of Artificial Sequence: Synthetic oligonucleotide
uccggcaagaacgguccca

SEQ ID NO: 1661703 - RNA, 19 nt, Artificial Sequence
  Description of Artificial Sequence: Synthetic oligonucleotide
cuaacagguggagcgccac

SEQ ID NO: 1661704 - RNA, 19 nt, Artificial Sequence
  Description of Artificial Sequence: Synthetic oligonucleotide
agagcacaagaugcugucu

SEQ ID NO: 1661705 - RNA, 19 nt, Artificial Sequence
  Description of Artificial Sequence: Synthetic oligonucleotide
gacacaagacuuucgucuu

SEQ ID NO: 1661706 - RNA, 19 nt, Artificial Sequence
  Description of Artificial Sequence: Synthetic oligonucleotide
ggggauccacagcaaacgc

SEQ ID NO: 1661707 - RNA, 19 nt, Artificial Sequence
  Description of Artificial Sequence: Synthetic oligonucleotide
gguucagaucccagcgugg

SEQ ID NO: 1661708 - RNA, 19 nt, Artificial Sequence
  Description of Artificial Sequence: Synthetic oligonucleotide
aauuuacuuugcagccaau

SEQ ID NO: 1661709 - RNA, 19 nt, Artificial Sequence
  Description of Artificial Sequence: Synthetic oligonucleotide
caccucuauaacagcuauc

SEQ ID NO: 1661710 - RNA, 19 nt, Artificial Sequence
  Description of Artificial Sequence: Synthetic oligonucleotide
ugccaucgcaaacggccaa

SEQ ID NO: 1661711 - RNA, 19 nt, Artificial Sequence
  Description of Artificial Sequence: Synthetic oligonucleotide
ggaaacccaaauacaguca

SEQ ID NO: 1661712 - RNA, 19 nt, Artificial Sequence
  Description of Artificial Sequence: Synthetic oligonucleotide
agacucacuucaaacucaa

SEQ ID NO: 1661713 - RNA, 19 nt, Artificial Sequence
  Description of Artificial Sequence: Synthetic oligonucleotide
gacaccucuauaacagcua

SEQ ID NO: 1661714 - RNA, 19 nt, Artificial Sequence
  Description of Artificial Sequence: Synthetic oligonucleotide
gauugguguaaaggcuaga

SEQ ID NO: 1661715 - RNA, 19 nt, Artificial Sequence
  Description of Artificial Sequence: Synthetic oligonucleotide
agucgucuuucguggcuga

SEQ ID NO: 1661716 - RNA, 19 nt, Artificial Sequence
  Description of Artificial Sequence: Synthetic oligonucleotide
gcugagaacacggugcuaa

SEQ ID NO: 1661717 - RNA, 19 nt, Artificial Sequence
  Description of Artificial Sequence: Synthetic oligonucleotide
uuggagugccuaaggucuu

SEQ ID NO: 1661718 - RNA, 19 nt, Artificial Sequence
  Description of Artificial Sequence: Synthetic oligonucleotide
acacaagacuuucgucuuu

SEQ ID NO: 1661719 - RNA, 19 nt, Artificial Sequence
  Description of Artificial Sequence: Synthetic oligonucleotide
gucggugaacccagcauca

SEQ ID NO: 1661720 - RNA, 19 nt, Artificial Sequence
  Description of Artificial Sequence: Synthetic oligonucleotide
ugcauccaguugccugugu

SEQ ID NO: 1661721 - RNA, 19 nt, Artificial Sequence
  Description of Artificial Sequence: Synthetic oligonucleotide
gccacuaauugaucgaggu

SEQ ID NO: 1661722 - RNA, 19 nt, Artificial Sequence
  Description of Artificial Sequence: Synthetic oligonucleotide
guacuccaucgcucuagac

SEQ ID NO: 1661723 - RNA, 19 nt, Artificial Sequence
  Description of Artificial Sequence: Synthetic oligonucleotide
ccaacaagaggacucugca

SEQ ID NO: 1661724 - RNA, 19 nt, Artificial Sequence
  Description of Artificial Sequence: Synthetic oligonucleotide
uccuacugaagggccacua

SEQ ID NO: 1661725 - RNA, 19 nt, Artificial Sequence
  Description of Artificial Sequence: Synthetic oligonucleotide
cagcaaacgcugccaucgc

SEQ ID NO: 1661726 - RNA, 19 nt, Artificial Sequence
  Description of Artificial Sequence: Synthetic oligonucleotide
gcuagagauggagaugaca

SEQ ID NO: 1661727 - RNA, 19 nt, Artificial Sequence
  Description of Artificial Sequence: Synthetic oligonucleotide
ucacgggagcagguaaauc

SEQ ID NO: 1661728 - RNA, 19 nt, Artificial Sequence
  Description of Artificial Sequence: Synthetic oligonucleotide
agcgugggcgccuggggau

SEQ ID NO: 1661729 - RNA, 19 nt, Artificial Sequence
  Description of Artificial Sequence: Synthetic oligonucleotide
caaacgcugccaucgcaaa

SEQ ID NO: 1661730 - RNA, 19 nt, Artificial Sequence
  Description of Artificial Sequence: Synthetic oligonucleotide
accaaucaugauggacucu

SEQ ID NO: 1661731 - RNA, 19 nt, Artificial Sequence
  Description of Artificial Sequence: Synthetic oligonucleotide
cugccaucgcaaacggcca

SEQ ID NO: 1661732 - RNA, 19 nt, Artificial Sequence
  Description of Artificial Sequence: Synthetic oligonucleotide
cuacugaagggccacuaau

SEQ ID NO: 1661733 - RNA, 19 nt, Artificial Sequence
  Description of Artificial Sequence: Synthetic oligonucleotide
guguuagacaucacaugcu

SEQ ID NO: 1661734 - RNA, 19 nt, Artificial Sequence
  Description of Artificial Sequence: Synthetic oligonucleotide
gguguuugucuaucagaaa

SEQ ID NO: 1661735 - RNA, 19 nt, Artificial Sequence
  Description of Artificial Sequence: Synthetic oligonucleotide
cagucacccaagugucauc

SEQ ID NO: 1661736 - RNA, 19 nt, Artificial Sequence
  Description of Artificial Sequence: Synthetic oligonucleotide
cuuucguggcugaccaaua

SEQ ID NO: 1661737 - RNA, 19 nt, Artificial Sequence
  Description of Artificial Sequence: Synthetic oligonucleotide
agcgccacuuuuaucuuua

SEQ ID NO: 1661738 - RNA, 19 nt, Artificial Sequence
  Description of Artificial Sequence: Synthetic oligonucleotide
caaacucaaucauguaauu

SEQ ID NO: 1661739 - RNA, 19 nt, Artificial Sequence
  Description of Artificial Sequence: Synthetic oligonucleotide
agucacgggagcagguaaa

SEQ ID NO: 1661740 - RNA, 19 nt, Artificial Sequence
  Description of Artificial Sequence: Synthetic oligonucleotide
gguaacgaauaugcaucca

SEQ ID NO: 1661741 - RNA, 19 nt, Artificial Sequence
  Description of Artificial Sequence: Synthetic oligonucleotide
cagguacaacuggcugugg

SEQ ID NO: 1661742 - RNA, 19 nt, Artificial Sequence
  Description of Artificial Sequence: Synthetic oligonucleotide
ccagccgaacauguacucc

SEQ ID NO: 1661743 - RNA, 19 nt, Artificial Sequence
  Description of Artificial Sequence: Synthetic oligonucleotide
ucggugaacccagcaucau

SEQ ID NO: 1661744 - RNA, 19 nt, Artificial Sequence
  Description of Artificial Sequence: Synthetic oligonucleotide
augcauccaguugccugug

SEQ ID NO: 1661745 - RNA, 19 nt, Artificial Sequence
  Description of Artificial Sequence: Synthetic oligonucleotide
cuccggcaagaacgguccc

SEQ ID NO: 1661746 - RNA, 19 nt, Artificial Sequence
  Description of Artificial Sequence: Synthetic oligonucleotide
gcaugcacuguaccagaga

SEQ ID NO: 1661747 - RNA, 19 nt, Artificial Sequence
  Description of Artificial Sequence: Synthetic oligonucleotide
gaucgagguuguggaguca

SEQ ID NO: 1661748 - RNA, 19 nt, Artificial Sequence
  Description of Artificial Sequence: Synthetic oligonucleotide
ccggcaguccuccacugac

SEQ ID NO: 1661749 - RNA, 19 nt, Artificial Sequence
  Description of Artificial Sequence: Synthetic oligonucleotide
cguggcugaccaauauuug

SEQ ID NO: 1661750 - RNA, 19 nt, Artificial Sequence
  Description of Artificial Sequence: Synthetic oligonucleotide
gcaaacgcugccaucgcaa

SEQ ID NO: 1661751 - RNA, 19 nt, Artificial Sequence
  Description of Artificial Sequence: Synthetic oligonucleotide
ggcaagaacggucccacuu

SEQ ID NO: 1661752 - RNA, 19 nt, Artificial Sequence
  Description of Artificial Sequence: Synthetic oligonucleotide
gcuuaaggcuuuccgggcu

SEQ ID NO: 1661753 - RNA, 19 nt, Artificial Sequence
  Description of Artificial Sequence: Synthetic oligonucleotide
cacugagauguuugucugu

SEQ ID NO: 1661754 - RNA, 19 nt, Artificial Sequence
  Description of Artificial Sequence: Synthetic oligonucleotide
ggcuugcaauuuagacugg

SEQ ID NO: 1661755 - RNA, 19 nt, Artificial Sequence
  Description of Artificial Sequence: Synthetic oligonucleotide
cgucuuucguggcugacca

SEQ ID NO: 1661756 - RNA, 19 nt, Artificial Sequence
  Description of Artificial Sequence: Synthetic oligonucleotide
gcaaacggccaacaccacu

SEQ ID NO: 1661757 - RNA, 19 nt, Artificial Sequence
  Description of Artificial Sequence: Synthetic oligonucleotide
gucgucuuucguggcugac

SEQ ID NO: 1661758 - RNA, 19 nt, Artificial Sequence
  Description of Artificial Sequence: Synthetic oligonucleotide
cagcgugggcgccugggga

SEQ ID NO: 1661759 - RNA, 19 nt, Artificial Sequence
  Description of Artificial Sequence: Synthetic oligonucleotide
cggugcuaagcaugcacug

SEQ ID NO: 1661760 - RNA, 19 nt, Artificial Sequence
  Description of Artificial Sequence: Synthetic oligonucleotide
gcuggacuaaacaugcuuu

SEQ ID NO: 1661761 - RNA, 19 nt, Artificial Sequence
  Description of Artificial Sequence: Synthetic oligonucleotide
cuccaucgcucuagacaca

SEQ ID NO: 1661762 - RNA, 19 nt, Artificial Sequence
  Description of Artificial Sequence: Synthetic oligonucleotide
cuuaaggcuuuccgggcuu

SEQ ID NO: 1661763 - RNA, 19 nt, Artificial Sequence
  Description of Artificial Sequence: Synthetic oligonucleotide
gagugccuaaggucuugau

SEQ ID NO: 1661764 - RNA, 19 nt, Artificial Sequence
  Description of Artificial Sequence: Synthetic oligonucleotide
ccggcaagaacggucccac

SEQ ID NO: 1661765 - RNA, 19 nt, Artificial Sequence
  Description of Artificial Sequence: Synthetic oligonucleotide
gguggagcgccacuuuuau

SEQ ID NO: 1661766 - RNA, 19 nt, Artificial Sequence
  Description of Artificial Sequence: Synthetic oligonucleotide
caagaacggucccacuuuu

SEQ ID NO: 1661767 - RNA, 19 nt, Artificial Sequence
  Description of Artificial Sequence: Synthetic oligonucleotide
aggauccaacugggcagga

SEQ ID NO: 1661768 - RNA, 19 nt, Artificial Sequence
  Description of Artificial Sequence: Synthetic oligonucleotide
gcaagaacggucccacuuu

SEQ ID NO: 1661769 - RNA, 19 nt, Artificial Sequence
  Description of Artificial Sequence: Synthetic oligonucleotide
gggauccacagcaaacgcu

SEQ ID NO: 1661770 - RNA, 19 nt, Artificial Sequence
  Description of Artificial Sequence: Synthetic oligonucleotide
gucuuucguggcugaccaa

SEQ ID NO: 1661771 - RNA, 19 nt, Artificial Sequence
  Description of Artificial Sequence: Synthetic oligonucleotide
ccaucgcucuagacacaag

SEQ ID NO: 1661772 - RNA, 19 nt, Artificial Sequence
  Description of Artificial Sequence: Synthetic oligonucleotide
ccuacugaagggccacuaa

SEQ ID NO: 1661773 - RNA, 19 nt, Artificial Sequence
  Description of Artificial Sequence: Synthetic oligonucleotide
agucacuaguggaggccuu

SEQ ID NO: 1661774 - RNA, 19 nt, Artificial Sequence
  Description of Artificial Sequence: Synthetic oligonucleotide
cggccaacaccacuccggc

SEQ ID NO: 1661775 - RNA, 19 nt, Artificial Sequence
  Description of Artificial Sequence: Synthetic oligonucleotide
gccaucgcaaacggccaac

SEQ ID NO: 1661776 - RNA, 19 nt, Artificial Sequence
  Description of Artificial Sequence: Synthetic oligonucleotide
gcuugcaauuuagacuggu

SEQ ID NO: 1661777 - RNA, 19 nt, Artificial Sequence
  Description of Artificial Sequence: Synthetic oligonucleotide
gccuuguaugcuguagcaa

SEQ ID NO: 1661778 - RNA, 19 nt, Artificial Sequence
  Description of Artificial Sequence: Synthetic oligonucleotide
gucacgggagcagguaaau

SEQ ID NO: 1661779 - RNA, 19 nt, Artificial Sequence
  Description of Artificial Sequence: Synthetic oligonucleotide
gaucccagcgugggcgccu

SEQ ID NO: 1661780 - RNA, 19 nt, Artificial Sequence
  Description of Artificial Sequence: Synthetic oligonucleotide
ggccaacaccacuccggca

SEQ ID NO: 1661781 - RNA, 19 nt, Artificial Sequence
  Description of Artificial Sequence: Synthetic oligonucleotide
ggcuagagauggagaugac

SEQ ID NO: 1661782 - RNA, 19 nt, Artificial Sequence
  Description of Artificial Sequence: Synthetic oligonucleotide
ccuggacuggaaaugucau

SEQ ID NO: 1661783 - RNA, 19 nt, Artificial Sequence
  Description of Artificial Sequence: Synthetic oligonucleotide
gcucagucuggcucuuacu

SEQ ID NO: 1661784 - RNA, 19 nt, Artificial Sequence
  Description of Artificial Sequence: Synthetic oligonucleotide
ccaugacacuuuuaucuau

SEQ ID NO: 1661785 - RNA, 19 nt, Artificial Sequence
  Description of Artificial Sequence: Synthetic oligonucleotide
gcuaccagccgaacaugua

SEQ ID NO: 1661786 - RNA, 19 nt, Artificial Sequence
  Description of Artificial Sequence: Synthetic oligonucleotide
ccgaguccuggacuggaaa

SEQ ID NO: 1661787 - RNA, 19 nt, Artificial Sequence
  Description of Artificial Sequence: Synthetic oligonucleotide
gccggcaguccuccacuga

SEQ ID NO: 1661788 - RNA, 19 nt, Artificial Sequence
  Description of Artificial Sequence: Synthetic oligonucleotide
ggaggccuuguaugcugua

SEQ ID NO: 1661789 - RNA, 19 nt, Artificial Sequence
  Description of Artificial Sequence: Synthetic oligonucleotide
ggagcgccacuuuuaucuu

SEQ ID NO: 1661790 - RNA, 19 nt, Artificial Sequence
  Description of Artificial Sequence: Synthetic oligonucleotide
gccucaugguagaaacccu

SEQ ID NO: 1661791 - RNA, 19 nt, Artificial Sequence
  Description of Artificial Sequence: Synthetic oligonucleotide
gccuaaggucuugauuggu

SEQ ID NO: 1661792 - RNA, 19 nt, Artificial Sequence
  Description of Artificial Sequence: Synthetic oligonucleotide
ccacuaauugaucgagguu

SEQ ID NO: 1661793 - RNA, 19 nt, Artificial Sequence
  Description of Artificial Sequence: Synthetic oligonucleotide
cgcaaacggccaacaccac

SEQ ID NO: 1661794 - RNA, 19 nt, Artificial Sequence
  Description of Artificial Sequence: Synthetic oligonucleotide
cgaguccuggacuggaaau

SEQ ID NO: 1661795 - RNA, 19 nt, Artificial Sequence
  Description of Artificial Sequence: Synthetic oligonucleotide
cuccuacugaagggccacu

SEQ ID NO: 1661796 - RNA, 19 nt, Artificial Sequence
  Description of Artificial Sequence: Synthetic oligonucleotide
cgugggcgccuggggaucc

SEQ ID NO: 1661797 - RNA, 19 nt, Artificial Sequence
  Description of Artificial Sequence: Synthetic oligonucleotide
gcgugggcgccuggggauc

SEQ ID NO: 1661798 - RNA, 19 nt, Artificial Sequence
  Description of Artificial Sequence: Synthetic oligonucleotide
gcgccacuuuuaucuuuau

SEQ ID NO: 1661799 - RNA, 19 nt, Artificial Sequence
  Description of Artificial Sequence: Synthetic oligonucleotide
cuguagcaagaggccucau

SEQ ID NO: 1661800 - RNA, 19 nt, Artificial Sequence
  Description of Artificial Sequence: Synthetic oligonucleotide
cggugaacccagcaucauu

SEQ ID NO: 1661801 - RNA, 19 nt, Artificial Sequence
  Description of Artificial Sequence: Synthetic oligonucleotide
cggcaagaacggucccacu

SEQ ID NO: 1661802 - RNA, 19 nt, Artificial Sequence
  Description of Artificial Sequence: Synthetic oligonucleotide
ccacuccggcaagaacggu

SEQ ID NO: 1661803 - RNA, 19 nt, Artificial Sequence
  Description of Artificial Sequence: Synthetic oligonucleotide
ucgaacaucacacugauga

SEQ ID NO: 1661804 - RNA, 19 nt, Artificial Sequence
  Description of Artificial Sequence: Synthetic oligonucleotide
aaagcaauccucuucaucu

SEQ ID NO: 1661805 - RNA, 19 nt, Artificial Sequence
  Description of Artificial Sequence: Synthetic oligonucleotide
ucuaguuugcucaagagga

SEQ ID NO: 1661806 - RNA, 19 nt, Artificial Sequence
  Description of Artificial Sequence: Synthetic oligonucleotide
aaugggacagcccuauggc

SEQ ID NO: 1661807 - RNA, 19 nt, Artificial Sequence
  Description of Artificial Sequence: Synthetic oligonucleotide
aaaugggacagcccuaugg

SEQ ID NO: 1661808 - RNA, 19 nt, Artificial Sequence
  Description of Artificial Sequence: Synthetic oligonucleotide
guuggaauguuccagaggc

SEQ ID NO: 1661809 - RNA, 19 nt, Artificial Sequence
  Description of Artificial Sequence: Synthetic oligonucleotide
cauaaggccaguaaagagg

SEQ ID NO: 1661810 - RNA, 19 nt, Artificial Sequence
  Description of Artificial Sequence: Synthetic oligonucleotide
ugaagcagggagcauaagg

SEQ ID NO: 1661811 - RNA, 19 nt, Artificial Sequence
  Description of Artificial Sequence: Synthetic oligonucleotide
uucuaguuugcucaagagg

SEQ ID NO: 1661812 - RNA, 19 nt, Artificial Sequence
  Description of Artificial Sequence: Synthetic oligonucleotide
cuggcuuccacucaaagcg

SEQ ID NO: 1661813 - RNA, 19 nt, Artificial Sequence
  Description of Artificial Sequence: Synthetic oligonucleotide
auuuguucuaguuugcuca

SEQ ID NO: 1661814 - RNA, 19 nt, Artificial Sequence
  Description of Artificial Sequence: Synthetic oligonucleotide
auaaggacgggagaaaugg

SEQ ID NO: 1661815 - RNA, 19 nt, Artificial Sequence
  Description of Artificial Sequence: Synthetic oligonucleotide
cacguaagcaccaggaugg

SEQ ID NO: 1661816 - RNA, 19 nt, Artificial Sequence
  Description of Artificial Sequence: Synthetic oligonucleotide
ucagcaucauagaugaggc

SEQ ID NO: 1661817 - RNA, 19 nt, Artificial Sequence
  Description of Artificial Sequence: Synthetic oligonucleotide
agacaguccacguaagcac

SEQ ID NO: 1661818 - RNA, 19 nt, Artificial Sequence
  Description of Artificial Sequence: Synthetic oligonucleotide
cauacuucagaaacugccg

SEQ ID NO: 1661819 - RNA, 19 nt, Artificial Sequence
  Description of Artificial Sequence: Synthetic oligonucleotide
uuauaugucuucagggaca

SEQ ID NO: 1661820 - RNA, 19 nt, Artificial Sequence
  Description of Artificial Sequence: Synthetic oligonucleotide
gacaaggugagugugugcg

SEQ ID NO: 1661821 - RNA, 19 nt, Artificial Sequence
  Description of Artificial Sequence: Synthetic oligonucleotide
aguaaagagggagaggauc

SEQ ID NO: 1661822 - RNA, 19 nt, Artificial Sequence
  Description of Artificial Sequence: Synthetic oligonucleotide
gaaggggucagucuuguug

SEQ ID NO: 1661823 - RNA, 19 nt, Artificial Sequence
  Description of Artificial Sequence: Synthetic oligonucleotide
aggaacucgaacaucacac

SEQ ID NO: 1661824 - RNA, 19 nt, Artificial Sequence
  Description of Artificial Sequence: Synthetic oligonucleotide
uuguagguuggaauguucc

SEQ ID NO: 1661825 - RNA, 19 nt, Artificial Sequence
  Description of Artificial Sequence: Synthetic oligonucleotide
agcaucauagaugaggcag

SEQ ID NO: 1661826 - RNA, 19 nt, Artificial Sequence
  Description of Artificial Sequence: Synthetic oligonucleotide
uguucuaguuugcucaaga

SEQ ID NO: 1661827 - RNA, 19 nt, Artificial Sequence
  Description of Artificial Sequence: Synthetic oligonucleotide
ugugcaggaacaaagccau

SEQ ID NO: 1661828 - RNA, 19 nt, Artificial Sequence
  Description of Artificial Sequence: Synthetic oligonucleotide
auaaggccaguaaagaggg

SEQ ID NO: 1661829 - RNA, 19 nt, Artificial Sequence
  Description of Artificial Sequence: Synthetic oligonucleotide
aagcguacccagcuguagg

SEQ ID NO: 1661830 - RNA, 19 nt, Artificial Sequence
  Description of Artificial Sequence: Synthetic oligonucleotide
ugauccaaugaucccacca

SEQ ID NO: 1661831 - RNA, 19 nt, Artificial Sequence
  Description of Artificial Sequence: Synthetic oligonucleotide
agccaauaugugcacacac

SEQ ID NO: 1661832 - RNA, 19 nt, Artificial Sequence
  Description of Artificial Sequence: Synthetic oligonucleotide
aaugaagugugcaggaaca

SEQ ID NO: 1661833 - RNA, 19 nt, Artificial Sequence
  Description of Artificial Sequence: Synthetic oligonucleotide
uucaugccacaguagaugc

SEQ ID NO: 1661834 - RNA, 19 nt, Artificial Sequence
  Description of Artificial Sequence: Synthetic oligonucleotide
gaugaguacguccaugauc

SEQ ID NO: 1661835 - RNA, 19 nt, Artificial Sequence
  Description of Artificial Sequence: Synthetic oligonucleotide
augaucaugcacauccacc

SEQ ID NO: 1661836 - RNA, 19 nt, Artificial Sequence
  Description of Artificial Sequence: Synthetic oligonucleotide
auccaaugaucccaccagc

SEQ ID NO: 1661837 - RNA, 19 nt, Artificial Sequence
  Description of Artificial Sequence: Synthetic oligonucleotide
ucaaagcguacccagcugu

SEQ ID NO: 1661838 - RNA, 19 nt, Artificial Sequence
  Description of Artificial Sequence: Synthetic oligonucleotide
gauguagaagggcagugac

SEQ ID NO: 1661839 - RNA, 19 nt, Artificial Sequence
  Description of Artificial Sequence: Synthetic oligonucleotide
uugcagaugaguacgucca

SEQ ID NO: 1661840 - RNA, 19 nt, Artificial Sequence
  Description of Artificial Sequence: Synthetic oligonucleotide
caggauggagccaagaguc

SEQ ID NO: 1661841 - RNA, 19 nt, Artificial Sequence
  Description of Artificial Sequence: Synthetic oligonucleotide
guugcagaugaguacgucc

SEQ ID NO: 1661842 - RNA, 19 nt, Artificial Sequence
  Description of Artificial Sequence: Synthetic oligonucleotide
uagggcgugaacugaaaag

SEQ ID NO: 1661843 - RNA, 19 nt, Artificial Sequence
  Description of Artificial Sequence: Synthetic oligonucleotide
agaagcgccagacagucca

SEQ ID NO: 1661844 - RNA, 19 nt, Artificial Sequence
  Description of Artificial Sequence: Synthetic oligonucleotide
ucaagaggacccuugcucu

SEQ ID NO: 1661845 - RNA, 19 nt, Artificial Sequence
  Description of Artificial Sequence: Synthetic oligonucleotide
cacgaagaagaccaggcgc

SEQ ID NO: 1661846 - RNA, 19 nt, Artificial Sequence
  Description of Artificial Sequence: Synthetic oligonucleotide
aguuugcucaagaggaccc

SEQ ID NO: 1661847 - RNA, 19 nt, Artificial Sequence
  Description of Artificial Sequence: Synthetic oligonucleotide
ucagguagaauguguucag

SEQ ID NO: 1661848 - RNA, 19 nt, Artificial Sequence
  Description of Artificial Sequence: Synthetic oligonucleotide
uucagggacagccacucga

SEQ ID NO: 1661849 - RNA, 19 nt, Artificial Sequence
  Description of Artificial Sequence: Synthetic oligonucleotide
uccuuguaccucaugguga

SEQ ID NO: 1661850 - RNA, 19 nt, Artificial Sequence
  Description of Artificial Sequence: Synthetic oligonucleotide
caagaugaugccacacacg

SEQ ID NO: 1661851 - RNA, 19 nt, Artificial Sequence
  Description of Artificial Sequence: Synthetic oligonucleotide
uucagauaccagccaauga

SEQ ID NO: 1661852 - RNA, 19 nt, Artificial Sequence
  Description of Artificial Sequence: Synthetic oligonucleotide
uaaggacgggagaaauggg

SEQ ID NO: 1661853 - RNA, 19 nt, Artificial Sequence
  Description of Artificial Sequence: Synthetic oligonucleotide
agguagaauguguucagcu

SEQ ID NO: 1661854 - RNA, 19 nt, Artificial Sequence
  Description of Artificial Sequence: Synthetic oligonucleotide
ugugauggccgccaccagc

SEQ ID NO: 1661855 - RNA, 19 nt, Artificial Sequence
  Description of Artificial Sequence: Synthetic oligonucleotide
ugucccgcaggaagaagcg

SEQ ID NO: 1661856 - RNA, 19 nt, Artificial Sequence
  Description of Artificial Sequence: Synthetic oligonucleotide
gucaggagccaauaugugc

SEQ ID NO: 1661857 - RNA, 19 nt, Artificial Sequence
  Description of Artificial Sequence: Synthetic oligonucleotide
cagucgcggaucaugaggg

SEQ ID NO: 1661858 - RNA, 19 nt, Artificial Sequence
  Description of Artificial Sequence: Synthetic oligonucleotide
cuggagacgugucaggagc

SEQ ID NO: 1661859 - RNA, 19 nt, Artificial Sequence
  Description of Artificial Sequence: Synthetic oligonucleotide
caaugaagugugcaggaac

SEQ ID NO: 1661860 - RNA, 19 nt, Artificial Sequence
  Description of Artificial Sequence: Synthetic oligonucleotide
acauguacacucaggugcc

SEQ ID NO: 1661861 - RNA, 19 nt, Artificial Sequence
  Description of Artificial Sequence: Synthetic oligonucleotide
uguagguuggaauguucca

SEQ ID NO: 1661862 - RNA, 19 nt, Artificial Sequence
  Description of Artificial Sequence: Synthetic oligonucleotide
guucuaguuugcucaagag

SEQ ID NO: 1661863 - RNA, 19 nt, Artificial Sequence
  Description of Artificial Sequence: Synthetic oligonucleotide
ucagggacagccacucgag

SEQ ID NO: 1661864 - RNA, 19 nt, Artificial Sequence
  Description of Artificial Sequence: Synthetic oligonucleotide
uagaugaggcaguugcccc

SEQ ID NO: 1661865 - RNA, 19 nt, Artificial Sequence
  Description of Artificial Sequence: Synthetic oligonucleotide
cucaagaggacccuugcuc

SEQ ID NO: 1661866 - RNA, 19 nt, Artificial Sequence
  Description of Artificial Sequence: Synthetic oligonucleotide
agaucucacgcauggccac

SEQ ID NO: 1661867 - RNA, 19 nt, Artificial Sequence
  Description of Artificial Sequence: Synthetic oligonucleotide
acguucacgaagaagacca

SEQ ID NO: 1661868 - RNA, 19 nt, Artificial Sequence
  Description of Artificial Sequence: Synthetic oligonucleotide
cuauggcaggcauaaggcc

SEQ ID NO: 1661869 - RNA, 19 nt, Artificial Sequence
  Description of Artificial Sequence: Synthetic oligonucleotide
acguccaugauccaaugau

SEQ ID NO: 1661870 - RNA, 19 nt, Artificial Sequence
  Description of Artificial Sequence: Synthetic oligonucleotide
acucaaagcguacccagcu

SEQ ID NO: 1661871 - RNA, 19 nt, Artificial Sequence
  Description of Artificial Sequence: Synthetic oligonucleotide
caugccacaguagaugccc

SEQ ID NO: 1661872 - RNA, 19 nt, Artificial Sequence
  Description of Artificial Sequence: Synthetic oligonucleotide
ucaugcacauccaccaguc

SEQ ID NO: 1661873 - RNA, 19 nt, Artificial Sequence
  Description of Artificial Sequence: Synthetic oligonucleotide
ucccgcaggaagaagcgcc

SEQ ID NO: 1661874 - RNA, 19 nt, Artificial Sequence
  Description of Artificial Sequence: Synthetic oligonucleotide
auaccagccaaugaagugu

SEQ ID NO: 1661875 - RNA, 19 nt, Artificial Sequence
  Description of Artificial Sequence: Synthetic oligonucleotide
uccaugauccaaugauccc

SEQ ID NO: 1661876 - RNA, 19 nt, Artificial Sequence
  Description of Artificial Sequence: Synthetic oligonucleotide
agcguacccagcuguaggg

SEQ ID NO: 1661877 - RNA, 19 nt, Artificial Sequence
  Description of Artificial Sequence: Synthetic oligonucleotide
gugaacugaaaagcaaucc

SEQ ID NO: 1661878 - RNA, 19 nt, Artificial Sequence
  Description of Artificial Sequence: Synthetic oligonucleotide
aagggcagugacaagguga

SEQ ID NO: 1661879 - RNA, 19 nt, Artificial Sequence
  Description of Artificial Sequence: Synthetic oligonucleotide
augucccgcaggaagaagc

SEQ ID NO: 1661880 - RNA, 19 nt, Artificial Sequence
  Description of Artificial Sequence: Synthetic oligonucleotide
cagccugggauccacauac

SEQ ID NO: 1661881 - RNA, 19 nt, Artificial Sequence
  Description of Artificial Sequence: Synthetic oligonucleotide
gacgggagaaaugggacag

SEQ ID NO: 1661882 - RNA, 19 nt, Artificial Sequence
  Description of Artificial Sequence: Synthetic oligonucleotide
auacuucaccacgaugagc

SEQ ID NO: 1661883 - RNA, 19 nt, Artificial Sequence
  Description of Artificial Sequence: Synthetic oligonucleotide
guagguuggaauguuccag

SEQ ID NO: 1661884 - RNA, 19 nt, Artificial Sequence
  Description of Artificial Sequence: Synthetic oligonucleotide
acugucauuggugcucccc

SEQ ID NO: 1661885 - RNA, 19 nt, Artificial Sequence
  Description of Artificial Sequence: Synthetic oligonucleotide
ugcgggucauacuucacca

SEQ ID NO: 1661886 - RNA, 19 nt, Artificial Sequence
  Description of Artificial Sequence: Synthetic oligonucleotide
uaguuugcucaagaggacc

SEQ ID NO: 1661887 - RNA, 19 nt, Artificial Sequence
  Description of Artificial Sequence: Synthetic oligonucleotide
aaacuucagguagaaugug

SEQ ID NO: 1661888 - RNA, 19 nt, Artificial Sequence
  Description of Artificial Sequence: Synthetic oligonucleotide
cauaaggacgggagaaaug

SEQ ID NO: 1661889 - RNA, 19 nt, Artificial Sequence
  Description of Artificial Sequence: Synthetic oligonucleotide
gaagaagcgccagacaguc

SEQ ID NO: 1661890 - RNA, 19 nt, Artificial Sequence
  Description of Artificial Sequence: Synthetic oligonucleotide
aaagcguacccagcuguag

SEQ ID NO: 1661891 - RNA, 19 nt, Artificial Sequence
  Description of Artificial Sequence: Synthetic oligonucleotide
ugucaggagccaauaugug

SEQ ID NO: 1661892 - RNA, 19 nt, Artificial Sequence
  Description of Artificial Sequence: Synthetic oligonucleotide
agcagggagcauaaggacg

SEQ ID NO: 1661893 - RNA, 19 nt, Artificial Sequence
  Description of Artificial Sequence: Synthetic oligonucleotide
cauggugaugucccgcagg

SEQ ID NO: 1661894 - RNA, 19 nt, Artificial Sequence
  Description of Artificial Sequence: Synthetic oligonucleotide
ucgagggucuucaugccac

SEQ ID NO: 1661895 - RNA, 19 nt, Artificial Sequence
  Description of Artificial Sequence: Synthetic oligonucleotide
agcucacagcccuggagac

SEQ ID NO: 1661896 - RNA, 19 nt, Artificial Sequence
  Description of Artificial Sequence: Synthetic oligonucleotide
cauacuucaccacgaugag

SEQ ID NO: 1661897 - RNA, 19 nt, Artificial Sequence
  Description of Artificial Sequence: Synthetic oligonucleotide
gaucaugcacauccaccag

SEQ ID NO: 1661898 - RNA, 19 nt, Artificial Sequence
  Description of Artificial Sequence: Synthetic oligonucleotide
auaugugcacacaccuacc

SEQ ID NO: 1661899 - RNA, 19 nt, Artificial Sequence
  Description of Artificial Sequence: Synthetic oligonucleotide
uagaugcccagcccguugc

SEQ ID NO: 1661900 - RNA, 19 nt, Artificial Sequence
  Description of Artificial Sequence: Synthetic oligonucleotide
aaggacgggagaaauggga

SEQ ID NO: 1661901 - RNA, 19 nt, Artificial Sequence
  Description of Artificial Sequence: Synthetic oligonucleotide
aggaucaugaggcggcuga

SEQ ID NO: 1661902 - RNA, 19 nt, Artificial Sequence
  Description of Artificial Sequence: Synthetic oligonucleotide
acucgcugaaguugggcag

SEQ ID NO: 1661903 - RNA, 19 nt, Artificial Sequence
  Description of Artificial Sequence: Synthetic oligonucleotide
ucaucauccggcccugggu

SEQ ID NO: 1661904 - RNA, 19 nt, Artificial Sequence
  Description of Artificial Sequence: Synthetic oligonucleotide
guaaagagggagaggauca

SEQ ID NO: 1661905 - RNA, 19 nt, Artificial Sequence
  Description of Artificial Sequence: Synthetic oligonucleotide
guggaguugggaaugggcc

SEQ ID NO: 1661906 - RNA, 19 nt, Artificial Sequence
  Description of Artificial Sequence: Synthetic oligonucleotide
ugagggucuucagauacca

SEQ ID NO: 1661907 - RNA, 19 nt, Artificial Sequence
  Description of Artificial Sequence: Synthetic oligonucleotide
agguuggaauguuccagag

SEQ ID NO: 1661908 - RNA, 19 nt, Artificial Sequence
  Description of Artificial Sequence: Synthetic oligonucleotide
guagaauguguucagcucu

SEQ ID NO: 1661909 - RNA, 19 nt, Artificial Sequence
  Description of Artificial Sequence: Synthetic oligonucleotide
uuggaauguuccagaggcc

SEQ ID NO: 1661910 - RNA, 19 nt, Artificial Sequence
  Description of Artificial Sequence: Synthetic oligonucleotide
gcauaaggccaguaaagag

SEQ ID NO: 1661911 - RNA, 19 nt, Artificial Sequence
  Description of Artificial Sequence: Synthetic oligonucleotide
ucuucagauaccagccaau

SEQ ID NO: 1661912 - RNA, 19 nt, Artificial Sequence
  Description of Artificial Sequence: Synthetic oligonucleotide
accagguaguguucagggg

SEQ ID NO: 1661913 - RNA, 19 nt, Artificial Sequence
  Description of Artificial Sequence: Synthetic oligonucleotide
acaaggugagugugugcgg

SEQ ID NO: 1661914 - RNA, 19 nt, Artificial Sequence
  Description of Artificial Sequence: Synthetic oligonucleotide
cuaguuugcucaagaggac

SEQ ID NO: 1661915 - RNA, 19 nt, Artificial Sequence
  Description of Artificial Sequence: Synthetic oligonucleotide
aaacugccggccauccugg

SEQ ID NO: 1661916 - RNA, 19 nt, Artificial Sequence
  Description of Artificial Sequence: Synthetic oligonucleotide
ucacuuuauuuguucuagu

SEQ ID NO: 1661917 - RNA, 19 nt, Artificial Sequence
  Description of Artificial Sequence: Synthetic oligonucleotide
caggaacaaagccauccag

SEQ ID NO: 1661918 - RNA, 19 nt, Artificial Sequence
  Description of Artificial Sequence: Synthetic oligonucleotide
accacccacguucacgaag

SEQ ID NO: 1661919 - RNA, 19 nt, Artificial Sequence
  Description of Artificial Sequence: Synthetic oligonucleotide
ucgcggaucaugagggucu

SEQ ID NO: 1661920 - RNA, 19 nt, Artificial Sequence
  Description of Artificial Sequence: Synthetic oligonucleotide
uugcucaagaggacccuug

SEQ ID NO: 1661921 - RNA, 19 nt, Artificial Sequence
  Description of Artificial Sequence: Synthetic oligonucleotide
auggugaugucccgcagga

SEQ ID NO: 1661922 - RNA, 19 nt, Artificial Sequence
  Description of Artificial Sequence: Synthetic oligonucleotide
uacacugucauuggugcuc

SEQ ID NO: 1661923 - RNA, 19 nt, Artificial Sequence
  Description of Artificial Sequence: Synthetic oligonucleotide
uggagacgugucaggagcc

SEQ ID NO: 1661924 - RNA, 19 nt, Artificial Sequence
  Description of Artificial Sequence: Synthetic oligonucleotide
aguccacguaagcaccagg

SEQ ID NO: 1661925 - RNA, 19 nt, Artificial Sequence
  Description of Artificial Sequence: Synthetic oligonucleotide
aggcauaaggccaguaaag

SEQ ID NO: 1661926 - RNA, 19 nt, Artificial Sequence
  Description of Artificial Sequence: Synthetic oligonucleotide
cuucagguagaauguguuc

SEQ ID NO: 1661927 - RNA, 19 nt, Artificial Sequence
  Description of Artificial Sequence: Synthetic oligonucleotide
gagauguagaagggcagug

SEQ ID NO: 1661928 - RNA, 19 nt, Artificial Sequence
  Description of Artificial Sequence: Synthetic oligonucleotide
aucuugcccuuguagguug

SEQ ID NO: 1661929 - RNA, 19 nt, Artificial Sequence
  Description of Artificial Sequence: Synthetic oligonucleotide
gguuggaauguuccagagg

SEQ ID NO: 1661930 - RNA, 19 nt, Artificial Sequence
  Description of Artificial Sequence: Synthetic oligonucleotide
uguacacucaggugccccu

SEQ ID NO: 1661931 - RNA, 19 nt, Artificial Sequence
  Description of Artificial Sequence: Synthetic oligonucleotide
uacguccaugauccaauga

SEQ ID NO: 1661932 - RNA, 19 nt, Artificial Sequence
  Description of Artificial Sequence: Synthetic oligonucleotide
ugcagucccagucccuagc

SEQ ID NO: 1661933 - RNA, 19 nt, Artificial Sequence
  Description of Artificial Sequence: Synthetic oligonucleotide
ucacgcauggccacaccac

SEQ ID NO: 1661934 - RNA, 19 nt, Artificial Sequence
  Description of Artificial Sequence: Synthetic oligonucleotide
ucuugcccuuguagguugg

SEQ ID NO: 1661935 - RNA, 19 nt, Artificial Sequence
  Description of Artificial Sequence: Synthetic oligonucleotide
cagaugaguacguccauga

SEQ ID NO: 1661936 - RNA, 19 nt, Artificial Sequence
  Description of Artificial Sequence: Synthetic oligonucleotide
cuucagauaccagccaaug

SEQ ID NO: 1661937 - RNA, 19 nt, Artificial Sequence
  Description of Artificial Sequence: Synthetic oligonucleotide
ggcagugacaaggugagug

SEQ ID NO: 1661938 - RNA, 19 nt, Artificial Sequence
  Description of Artificial Sequence: Synthetic oligonucleotide
cuggcaacgggacucccag

SEQ ID NO: 1661939 - RNA, 19 nt, Artificial Sequence
  Description of Artificial Sequence: Synthetic oligonucleotide
gguagaauguguucagcuc

SEQ ID NO: 1661940 - RNA, 19 nt, Artificial Sequence
  Description of Artificial Sequence: Synthetic oligonucleotide
cacucaaagcguacccagc

SEQ ID NO: 1661941 - RNA, 19 nt, Artificial Sequence
  Description of Artificial Sequence: Synthetic oligonucleotide
agucuuguugucagcauca

SEQ ID NO: 1661942 - RNA, 19 nt, Artificial Sequence
  Description of Artificial Sequence: Synthetic oligonucleotide
gauggagccaagaguccag

SEQ ID NO: 1661943 - RNA, 19 nt, Artificial Sequence
  Description of Artificial Sequence: Synthetic oligonucleotide
ucuggcaacgggacuccca

SEQ ID NO: 1661944 - RNA, 19 nt, Artificial Sequence
  Description of Artificial Sequence: Synthetic oligonucleotide
ugaagugugcaggaacaaa

SEQ ID NO: 1661945 - RNA, 19 nt, Artificial Sequence
  Description of Artificial Sequence: Synthetic oligonucleotide
acauccaccagucgcggau

SEQ ID NO: 1661946 - RNA, 19 nt, Artificial Sequence
  Description of Artificial Sequence: Synthetic oligonucleotide
ugcccuuguagguuggaau

SEQ ID NO: 1661947 - RNA, 19 nt, Artificial Sequence
  Description of Artificial Sequence: Synthetic oligonucleotide
gcagggagcauaaggacgg

SEQ ID NO: 1661948 - RNA, 19 nt, Artificial Sequence
  Description of Artificial Sequence: Synthetic oligonucleotide
guugauggcucugcccugg

SEQ ID NO: 1661949 - RNA, 19 nt, Artificial Sequence
  Description of Artificial Sequence: Synthetic oligonucleotide
gcaagcuccaggcucacug

SEQ ID NO: 1661950 - RNA, 19 nt, Artificial Sequence
  Description of Artificial Sequence: Synthetic oligonucleotide
cuuccacucaaagcguacc

SEQ ID NO: 1661951 - RNA, 19 nt, Artificial Sequence
  Description of Artificial Sequence: Synthetic oligonucleotide
aagaagcgccagacagucc

SEQ ID NO: 1661952 - RNA, 19 nt, Artificial Sequence
  Description of Artificial Sequence: Synthetic oligonucleotide
ggagaaaugggacagcccu

SEQ ID NO: 1661953 - RNA, 19 nt, Artificial Sequence
  Description of Artificial Sequence: Synthetic oligonucleotide
ucccuagcaggucaucauc

SEQ ID NO: 1661954 - RNA, 19 nt, Artificial Sequence
  Description of Artificial Sequence: Synthetic oligonucleotide
gugcgggucauacuucacc

SEQ ID NO: 1661955 - RNA, 19 nt, Artificial Sequence
  Description of Artificial Sequence: Synthetic oligonucleotide
uccacguaagcaccaggau

SEQ ID NO: 1661956 - RNA, 19 nt, Artificial Sequence
  Description of Artificial Sequence: Synthetic oligonucleotide
ugccacuuauaugucuuca

SEQ ID NO: 1661957 - RNA, 19 nt, Artificial Sequence
  Description of Artificial Sequence: Synthetic oligonucleotide
agguacacugucauuggug

SEQ ID NO: 1661958 - RNA, 19 nt, Artificial Sequence
  Description of Artificial Sequence: Synthetic oligonucleotide
ggcaacgggacucccagcc

SEQ ID NO: 1661959 - RNA, 19 nt, Artificial Sequence
  Description of Artificial Sequence: Synthetic oligonucleotide
aggauggagccaagagucc

SEQ ID NO: 1661960 - RNA, 19 nt, Artificial Sequence
  Description of Artificial Sequence: Synthetic oligonucleotide
cacgcauggccacaccacc

SEQ ID NO: 1661961 - RNA, 19 nt, Artificial Sequence
  Description of Artificial Sequence: Synthetic oligonucleotide
uguugauggcucugcccug

SEQ ID NO: 1661962 - RNA, 19 nt, Artificial Sequence
  Description of Artificial Sequence: Synthetic oligonucleotide
ugugugcgggucauacuuc

SEQ ID NO: 1661963 - RNA, 19 nt, Artificial Sequence
  Description of Artificial Sequence: Synthetic oligonucleotide
gugacaaggugagugugug

SEQ ID NO: 1661964 - RNA, 19 nt, Artificial Sequence
  Description of Artificial Sequence: Synthetic oligonucleotide
ggagccaauaugugcacac

SEQ ID NO: 1661965 - RNA, 19 nt, Artificial Sequence
  Description of Artificial Sequence: Synthetic oligonucleotide
cacguucacgaagaagacc

SEQ ID NO: 1661966 - RNA, 19 nt, Artificial Sequence
  Description of Artificial Sequence: Synthetic oligonucleotide
cagucuuguugucagcauc

SEQ ID NO: 1661967 - RNA, 19 nt, Artificial Sequence
  Description of Artificial Sequence: Synthetic oligonucleotide
aagcgccagacaguccacg

SEQ ID NO: 1661968 - RNA, 19 nt, Artificial Sequence
  Description of Artificial Sequence: Synthetic oligonucleotide
uguagggcgugaacugaaa

SEQ ID NO: 1661969 - RNA, 19 nt, Artificial Sequence
  Description of Artificial Sequence: Synthetic oligonucleotide
gagugugugcgggucauac

SEQ ID NO: 1661970 - RNA, 19 nt, Artificial Sequence
  Description of Artificial Sequence: Synthetic oligonucleotide
aguacguccaugauccaau

SEQ ID NO: 1661971 - RNA, 19 nt, Artificial Sequence
  Description of Artificial Sequence: Synthetic oligonucleotide
augggacagcccuauggca

SEQ ID NO: 1661972 - RNA, 19 nt, Artificial Sequence
  Description of Artificial Sequence: Synthetic oligonucleotide
guagaugcccagcccguug

SEQ ID NO: 1661973 - RNA, 19 nt, Artificial Sequence
  Description of Artificial Sequence: Synthetic oligonucleotide
ccaagaugaugccacacac

SEQ ID NO: 1661974 - RNA, 19 nt, Artificial Sequence
  Description of Artificial Sequence: Synthetic oligonucleotide
gagcauaaggacgggagaa

SEQ ID NO: 1661975 - RNA, 19 nt, Artificial Sequence
  Description of Artificial Sequence: Synthetic oligonucleotide
cucaaagcguacccagcug

SEQ ID NO: 1661976 - RNA, 19 nt, Artificial Sequence
  Description of Artificial Sequence: Synthetic oligonucleotide
guaccucauggugaugucc

SEQ ID NO: 1661977 - RNA, 19 nt, Artificial Sequence
  Description of Artificial Sequence: Synthetic oligonucleotide
aacgggacucccagccugg

SEQ ID NO: 1661978 - RNA, 19 nt, Artificial Sequence
  Description of Artificial Sequence: Synthetic oligonucleotide
ggaacaccaagaugaugcc

SEQ ID NO: 1661979 - RNA, 19 nt, Artificial Sequence
  Description of Artificial Sequence: Synthetic oligonucleotide
ggcccugccacuuauaugu

SEQ ID NO: 1661980 - RNA, 19 nt, Artificial Sequence
  Description of Artificial Sequence: Synthetic oligonucleotide
uuguucuaguuugcucaag

SEQ ID NO: 1661981 - RNA, 19 nt, Artificial Sequence
  Description of Artificial Sequence: Synthetic oligonucleotide
cagacaguccacguaagca

SEQ ID NO: 1661982 - RNA, 19 nt, Artificial Sequence
  Description of Artificial Sequence: Synthetic oligonucleotide
agggucuucaugccacagu

SEQ ID NO: 1661983 - RNA, 19 nt, Artificial Sequence
  Description of Artificial Sequence: Synthetic oligonucleotide
cucucuggcaacgggacuc

SEQ ID NO: 1661984 - RNA, 19 nt, Artificial Sequence
  Description of Artificial Sequence: Synthetic oligonucleotide
gccacuuauaugucuucag

SEQ ID NO: 1661985 - RNA, 19 nt, Artificial Sequence
  Description of Artificial Sequence: Synthetic oligonucleotide
gggagcauaaggacgggag

SEQ ID NO: 1661986 - RNA, 19 nt, Artificial Sequence
  Description of Artificial Sequence: Synthetic oligonucleotide
caacgggacucccagccug

SEQ ID NO: 1661987 - RNA, 19 nt, Artificial Sequence
  Description of Artificial Sequence: Synthetic oligonucleotide
acgcauggccacaccaccc

SEQ ID NO: 1661988 - RNA, 19 nt, Artificial Sequence
  Description of Artificial Sequence: Synthetic oligonucleotide
gcccuuguagguuggaaug

SEQ ID NO: 1661989 - RNA, 19 nt, Artificial Sequence
  Description of Artificial Sequence: Synthetic oligonucleotide
agaugaguacguccaugau

SEQ ID NO: 1661990 - RNA, 19 nt, Artificial Sequence
  Description of Artificial Sequence: Synthetic oligonucleotide
aucucacgcauggccacac

SEQ ID NO: 1661991 - RNA, 19 nt, Artificial Sequence
  Description of Artificial Sequence: Synthetic oligonucleotide
guacguccaugauccaaug

SEQ ID NO: 1661992 - RNA, 19 nt, Artificial Sequence
  Description of Artificial Sequence: Synthetic oligonucleotide
agugugugcgggucauacu

SEQ ID NO: 1661993 - RNA, 19 nt, Artificial Sequence
  Description of Artificial Sequence: Synthetic oligonucleotide
gaacaccaagaugaugcca

SEQ ID NO: 1661994 - RNA, 19 nt, Artificial Sequence
  Description of Artificial Sequence: Synthetic oligonucleotide
cucauggugaugucccgca

SEQ ID NO: 1661995 - RNA, 19 nt, Artificial Sequence
  Description of Artificial Sequence: Synthetic oligonucleotide
ccacguaagcaccaggaug

SEQ ID NO: 1661996 - RNA, 19 nt, Artificial Sequence
  Description of Artificial Sequence: Synthetic oligonucleotide
agucccuagcaggucauca

SEQ ID NO: 1661997 - RNA, 19 nt, Artificial Sequence
  Description of Artificial Sequence: Synthetic oligonucleotide
cagguagaauguguucagc

SEQ ID NO: 1661998 - RNA, 19 nt, Artificial Sequence
  Description of Artificial Sequence: Synthetic oligonucleotide
ugcagaugaguacguccau

SEQ ID NO: 1661999 - RNA, 19 nt, Artificial Sequence
  Description of Artificial Sequence: Synthetic oligonucleotide
ccagauguuguggaagggg

SEQ ID NO: 1662000 - RNA, 19 nt, Artificial Sequence
  Description of Artificial Sequence: Synthetic oligonucleotide
gaugucccgcaggaagaag

SEQ ID NO: 1662001 - RNA, 19 nt, Artificial Sequence
  Description of Artificial Sequence: Synthetic oligonucleotide
gugucaggagccaauaugu

SEQ ID NO: 1662002 - RNA, 19 nt, Artificial Sequence
  Description of Artificial Sequence: Synthetic oligonucleotide
acaccaagaugaugccaca

SEQ ID NO: 1662003 - RNA, 19 nt, Artificial Sequence
  Description of Artificial Sequence: Synthetic oligonucleotide
gucauagaucucacgcaug

SEQ ID NO: 1662004 - RNA, 19 nt, Artificial Sequence
  Description of Artificial Sequence: Synthetic oligonucleotide
ugugcgggucauacuucac

SEQ ID NO: 1662005 - RNA, 19 nt, Artificial Sequence
  Description of Artificial Sequence: Synthetic oligonucleotide
agcccuauggcaggcauaa

SEQ ID NO: 1662006 - RNA, 19 nt, Artificial Sequence
  Description of Artificial Sequence: Synthetic oligonucleotide
accagucgcggaucaugag

SEQ ID NO: 1662007 - RNA, 19 nt, Artificial Sequence
  Description of Artificial Sequence: Synthetic oligonucleotide
cccguugcagaugaguacg

SEQ ID NO: 1662008 - RNA, 19 nt, Artificial Sequence
  Description of Artificial Sequence: Synthetic oligonucleotide
cccuagcaggucaucaucc

SEQ ID NO: 1662009 - RNA, 19 nt, Artificial Sequence
  Description of Artificial Sequence: Synthetic oligonucleotide
ccacucaaagcguacccag

SEQ ID NO: 1662010 - RNA, 19 nt, Artificial Sequence
  Description of Artificial Sequence: Synthetic oligonucleotide
caaugaucccaccagcacu

SEQ ID NO: 1662011 - RNA, 19 nt, Artificial Sequence
  Description of Artificial Sequence: Synthetic oligonucleotide
gcgcaggaggaccagguag

SEQ ID NO: 1662012 - RNA, 19 nt, Artificial Sequence
  Description of Artificial Sequence: Synthetic oligonucleotide
ucucacgcauggccacacc

SEQ ID NO: 1662013 - RNA, 19 nt, Artificial Sequence
  Description of Artificial Sequence: Synthetic oligonucleotide
agcgccagacaguccacgu

SEQ ID NO: 1662014 - RNA, 19 nt, Artificial Sequence
  Description of Artificial Sequence: Synthetic oligonucleotide
agaaacugccggccauccu

SEQ ID NO: 1662015 - RNA, 19 nt, Artificial Sequence
  Description of Artificial Sequence: Synthetic oligonucleotide
guccacguaagcaccagga

SEQ ID NO: 1662016 - RNA, 19 nt, Artificial Sequence
  Description of Artificial Sequence: Synthetic oligonucleotide
gggagaggaucaugaggcg

SEQ ID NO: 1662017 - RNA, 19 nt, Artificial Sequence
  Description of Artificial Sequence: Synthetic oligonucleotide
cagggacagccacucgagg

SEQ ID NO: 1662018 - RNA, 19 nt, Artificial Sequence
  Description of Artificial Sequence: Synthetic oligonucleotide
aggcccugccacuuauaug

SEQ ID NO: 1662019 - RNA, 19 nt, Artificial Sequence
  Description of Artificial Sequence: Synthetic oligonucleotide
guagggcgugaacugaaaa

SEQ ID NO: 1662020 - RNA, 19 nt, Artificial Sequence
  Description of Artificial Sequence: Synthetic oligonucleotide
gugugcgggucauacuuca

SEQ ID NO: 1662021 - RNA, 19 nt, Artificial Sequence
  Description of Artificial Sequence: Synthetic oligonucleotide
ggcauaaggccaguaaaga

SEQ ID NO: 1662022 - RNA, 19 nt, Artificial Sequence
  Description of Artificial Sequence: Synthetic oligonucleotide
acccacguucacgaagaag

SEQ ID NO: 1662023 - RNA, 19 nt, Artificial Sequence
  Description of Artificial Sequence: Synthetic oligonucleotide
gaccaggcgcaggaggacc

SEQ ID NO: 1662024 - RNA, 19 nt, Artificial Sequence
  Description of Artificial Sequence: Synthetic oligonucleotide
ggagcauaaggacgggaga

SEQ ID NO: 1662025 - RNA, 19 nt, Artificial Sequence
  Description of Artificial Sequence: Synthetic oligonucleotide
gaguacguccaugauccaa

SEQ ID NO: 1662026 - RNA, 19 nt, Artificial Sequence
  Description of Artificial Sequence: Synthetic oligonucleotide
agcauaaggacgggagaaa

SEQ ID NO: 1662027 - RNA, 19 nt, Artificial Sequence
  Description of Artificial Sequence: Synthetic oligonucleotide
ccaaugaucccaccagcac

SEQ ID NO: 1662028 - RNA, 19 nt, Artificial Sequence
  Description of Artificial Sequence: Synthetic oligonucleotide
cgugucaggagccaauaug

SEQ ID NO: 1662029 - RNA, 19 nt, Artificial Sequence
  Description of Artificial Sequence: Synthetic oligonucleotide
ugaguacguccaugaucca

SEQ ID NO: 1662030 - RNA, 19 nt, Artificial Sequence
  Description of Artificial Sequence: Synthetic oligonucleotide
gccaaugaagugugcagga

SEQ ID NO: 1662031 - RNA, 19 nt, Artificial Sequence
  Description of Artificial Sequence: Synthetic oligonucleotide
ucauccggcccugggugcc

SEQ ID NO: 1662032 - RNA, 19 nt, Artificial Sequence
  Description of Artificial Sequence: Synthetic oligonucleotide
agaggacccuugcucuaga

SEQ ID NO: 1662033 - RNA, 19 nt, Artificial Sequence
  Description of Artificial Sequence: Synthetic oligonucleotide
augaagugugcaggaacaa

SEQ ID NO: 1662034 - RNA, 19 nt, Artificial Sequence
  Description of Artificial Sequence: Synthetic oligonucleotide
caccagucgcggaucauga

SEQ ID NO: 1662035 - RNA, 19 nt, Artificial Sequence
  Description of Artificial Sequence: Synthetic oligonucleotide
cauguacacucaggugccc

SEQ ID NO: 1662036 - RNA, 19 nt, Artificial Sequence
  Description of Artificial Sequence: Synthetic oligonucleotide
cgugaacugaaaagcaauc

SEQ ID NO: 1662037 - RNA, 19 nt, Artificial Sequence
  Description of Artificial Sequence: Synthetic oligonucleotide
aggccaguaaagagggaga

SEQ ID NO: 1662038 - RNA, 19 nt, Artificial Sequence
  Description of Artificial Sequence: Synthetic oligonucleotide
gugugugcgggucauacuu

SEQ ID NO: 1662039 - RNA, 19 nt, Artificial Sequence
  Description of Artificial Sequence: Synthetic oligonucleotide
acgugucaggagccaauau

SEQ ID NO: 1662040 - RNA, 19 nt, Artificial Sequence
  Description of Artificial Sequence: Synthetic oligonucleotide
gaucccaccagcacucgcu

SEQ ID NO: 1662041 - RNA, 19 nt, Artificial Sequence
  Description of Artificial Sequence: Synthetic oligonucleotide
cacacacggccagccagcg

SEQ ID NO: 1662042 - RNA, 19 nt, Artificial Sequence
  Description of Artificial Sequence: Synthetic oligonucleotide
cacucaggugccccuggug

SEQ ID NO: 1662043 - RNA, 19 nt, Artificial Sequence
  Description of Artificial Sequence: Synthetic oligonucleotide
ugcccagcccguugcagau

SEQ ID NO: 1662044 - RNA, 19 nt, Artificial Sequence
  Description of Artificial Sequence: Synthetic oligonucleotide
acagcccuggagacguguc

SEQ ID NO: 1662045 - RNA, 19 nt, Artificial Sequence
  Description of Artificial Sequence: Synthetic oligonucleotide
ggacgggagaaaugggaca

SEQ ID NO: 1662046 - RNA, 19 nt, Artificial Sequence
  Description of Artificial Sequence: Synthetic oligonucleotide
agccacucgagggucuuca

SEQ ID NO: 1662047 - RNA, 19 nt, Artificial Sequence
  Description of Artificial Sequence: Synthetic oligonucleotide
ccagacaguccacguaagc

SEQ ID NO: 1662048 - RNA, 19 nt, Artificial Sequence
  Description of Artificial Sequence: Synthetic oligonucleotide
cucgagggucuucaugcca

SEQ ID NO: 1662049 - RNA, 19 nt, Artificial Sequence
  Description of Artificial Sequence: Synthetic oligonucleotide
agucgcggaucaugagggu

SEQ ID NO: 1662050 - RNA, 19 nt, Artificial Sequence
  Description of Artificial Sequence: Synthetic oligonucleotide
uguggggcuucaguucauc

SEQ ID NO: 1662051 - RNA, 19 nt, Artificial Sequence
  Description of Artificial Sequence: Synthetic oligonucleotide
gcuugucccagauguugug

SEQ ID NO: 1662052 - RNA, 19 nt, Artificial Sequence
  Description of Artificial Sequence: Synthetic oligonucleotide
uugcccuuguagguuggaa

SEQ ID NO: 1662053 - RNA, 19 nt, Artificial Sequence
  Description of Artificial Sequence: Synthetic oligonucleotide
gcagaugaguacguccaug

SEQ ID NO: 1662054 - RNA, 19 nt, Artificial Sequence
  Description of Artificial Sequence: Synthetic oligonucleotide
uggcaacgggacucccagc

SEQ ID NO: 1662055 - RNA, 19 nt, Artificial Sequence
  Description of Artificial Sequence: Synthetic oligonucleotide
caggucaucauccggcccu

SEQ ID NO: 1662056 - RNA, 19 nt, Artificial Sequence
  Description of Artificial Sequence: Synthetic oligonucleotide
acaguccacguaagcacca

SEQ ID NO: 1662057 - RNA, 19 nt, Artificial Sequence
  Description of Artificial Sequence: Synthetic oligonucleotide
aggagccaauaugugcaca

SEQ ID NO: 1662058 - RNA, 19 nt, Artificial Sequence
  Description of Artificial Sequence: Synthetic oligonucleotide
gucgcggaucaugaggguc

SEQ ID NO: 1662059 - RNA, 19 nt, Artificial Sequence
  Description of Artificial Sequence: Synthetic oligonucleotide
gaacaaagccauccagcuu

SEQ ID NO: 1662060 - RNA, 19 nt, Artificial Sequence
  Description of Artificial Sequence: Synthetic oligonucleotide
ccuggagacgugucaggag

SEQ ID NO: 1662061 - RNA, 19 nt, Artificial Sequence
  Description of Artificial Sequence: Synthetic oligonucleotide
ccauuguugauggcucugc

SEQ ID NO: 1662062 - RNA, 19 nt, Artificial Sequence
  Description of Artificial Sequence: Synthetic oligonucleotide
gaggcccugccacuuauau

SEQ ID NO: 1662063 - RNA, 19 nt, Artificial Sequence
  Description of Artificial Sequence: Synthetic oligonucleotide
ccuaccugcacacaaacau

SEQ ID NO: 1662064 - RNA, 19 nt, Artificial Sequence
  Description of Artificial Sequence: Synthetic oligonucleotide
gaucucacgcauggccaca

SEQ ID NO: 1662065 - RNA, 19 nt, Artificial Sequence
  Description of Artificial Sequence: Synthetic oligonucleotide
guugggcagcuggugcucc

SEQ ID NO: 1662066 - RNA, 19 nt, Artificial Sequence
  Description of Artificial Sequence: Synthetic oligonucleotide
gagaaaugggacagcccua

SEQ ID NO: 1662067 - RNA, 19 nt, Artificial Sequence
  Description of Artificial Sequence: Synthetic oligonucleotide
uacccagcuguagggcgug

SEQ ID NO: 1662068 - RNA, 19 nt, Artificial Sequence
  Description of Artificial Sequence: Synthetic oligonucleotide
ggauggagccaagagucca

SEQ ID NO: 1662069 - RNA, 19 nt, Artificial Sequence
  Description of Artificial Sequence: Synthetic oligonucleotide
accuaccugcacacaaaca

SEQ ID NO: 1662070 - RNA, 19 nt, Artificial Sequence
  Description of Artificial Sequence: Synthetic oligonucleotide
agggagcauaaggacggga

SEQ ID NO: 1662071 - RNA, 19 nt, Artificial Sequence
  Description of Artificial Sequence: Synthetic oligonucleotide
agcccguugcagaugagua

SEQ ID NO: 1662072 - RNA, 19 nt, Artificial Sequence
  Description of Artificial Sequence: Synthetic oligonucleotide
gggagaaaugggacagccc

SEQ ID NO: 1662073 - RNA, 19 nt, Artificial Sequence
  Description of Artificial Sequence: Synthetic oligonucleotide
cagcaucauagaugaggca

SEQ ID NO: 1662074 - RNA, 19 nt, Artificial Sequence
  Description of Artificial Sequence: Synthetic oligonucleotide
ccacguucacgaagaagac

SEQ ID NO: 1662075 - RNA, 19 nt, Artificial Sequence
  Description of Artificial Sequence: Synthetic oligonucleotide
cucacagcccuggagacgu

SEQ ID NO: 1662076 - RNA, 19 nt, Artificial Sequence
  Description of Artificial Sequence: Synthetic oligonucleotide
ggaacucgaacaucacacu

SEQ ID NO: 1662077 - RNA, 19 nt, Artificial Sequence
  Description of Artificial Sequence: Synthetic oligonucleotide
gaagcgccagacaguccac

SEQ ID NO: 1662078 - RNA, 19 nt, Artificial Sequence
  Description of Artificial Sequence: Synthetic oligonucleotide
caaagcguacccagcugua

SEQ ID NO: 1662079 - RNA, 19 nt, Artificial Sequence
  Description of Artificial Sequence: Synthetic oligonucleotide
uccagaggcccugccacuu

SEQ ID NO: 1662080 - RNA, 19 nt, Artificial Sequence
  Description of Artificial Sequence: Synthetic oligonucleotide
ccugguggaguugggaaug

SEQ ID NO: 1662081 - RNA, 19 nt, Artificial Sequence
  Description of Artificial Sequence: Synthetic oligonucleotide
ggaucaugaggcggcugag

SEQ ID NO: 1662082 - RNA, 19 nt, Artificial Sequence
  Description of Artificial Sequence: Synthetic oligonucleotide
gagacgugucaggagccaa

SEQ ID NO: 1662083 - RNA, 19 nt, Artificial Sequence
  Description of Artificial Sequence: Synthetic oligonucleotide
gcccguugcagaugaguac

SEQ ID NO: 1662084 - RNA, 19 nt, Artificial Sequence
  Description of Artificial Sequence: Synthetic oligonucleotide
ggcccagcuuccugugggg

SEQ ID NO: 1662085 - RNA, 19 nt, Artificial Sequence
  Description of Artificial Sequence: Synthetic oligonucleotide
agacgugucaggagccaau

SEQ ID NO: 1662086 - RNA, 19 nt, Artificial Sequence
  Description of Artificial Sequence: Synthetic oligonucleotide
ucacagcccuggagacgug

SEQ ID NO: 1662087 - RNA, 19 nt, Artificial Sequence
  Description of Artificial Sequence: Synthetic oligonucleotide
cauccaccagucgcggauc

SEQ ID NO: 1662088 - RNA, 19 nt, Artificial Sequence
  Description of Artificial Sequence: Synthetic oligonucleotide
ccacccacguucacgaaga

SEQ ID NO: 1662089 - RNA, 19 nt, Artificial Sequence
  Description of Artificial Sequence: Synthetic oligonucleotide
cacugucauuggugcuccc

SEQ ID NO: 1662090 - RNA, 19 nt, Artificial Sequence
  Description of Artificial Sequence: Synthetic oligonucleotide
ggcgugaacugaaaagcaa

SEQ ID NO: 1662091 - RNA, 19 nt, Artificial Sequence
  Description of Artificial Sequence: Synthetic oligonucleotide
gcucacagcccuggagacg

SEQ ID NO: 1662092 - RNA, 19 nt, Artificial Sequence
  Description of Artificial Sequence: Synthetic oligonucleotide
gggcgugaacugaaaagca

SEQ ID NO: 1662093 - RNA, 19 nt, Artificial Sequence
  Description of Artificial Sequence: Synthetic oligonucleotide
gcuucugucgccgggucuc

SEQ ID NO: 1662094 - RNA, 19 nt, Artificial Sequence
  Description of Artificial Sequence: Synthetic oligonucleotide
cgggagaaaugggacagcc

SEQ ID NO: 1662095 - RNA, 19 nt, Artificial Sequence
  Description of Artificial Sequence: Synthetic oligonucleotide
acguaagcaccaggaugga

SEQ ID NO: 1662096 - RNA, 19 nt, Artificial Sequence
  Description of Artificial Sequence: Synthetic oligonucleotide
acgggacucccagccuggg

SEQ ID NO: 1662097 - RNA, 19 nt, Artificial Sequence
  Description of Artificial Sequence: Synthetic oligonucleotide
ccacucgagggucuucaug

SEQ ID NO: 1662098 - RNA, 19 nt, Artificial Sequence
  Description of Artificial Sequence: Synthetic oligonucleotide
gcagucccagucccuagca

SEQ ID NO: 1662099 - RNA, 19 nt, Artificial Sequence
  Description of Artificial Sequence: Synthetic oligonucleotide
gcuuccacucaaagcguac

SEQ ID NO: 1662100 - RNA, 19 nt, Artificial Sequence
  Description of Artificial Sequence: Synthetic oligonucleotide
cagcccuggagacguguca

SEQ ID NO: 1662101 - RNA, 19 nt, Artificial Sequence
  Description of Artificial Sequence: Synthetic oligonucleotide
gggacucccagccugggau

SEQ ID NO: 1662102 - RNA, 19 nt, Artificial Sequence
  Description of Artificial Sequence: Synthetic oligonucleotide
guuugcucaagaggacccu

SEQ ID NO: 1662103 - RNA, 19 nt, Artificial Sequence
  Description of Artificial Sequence: Synthetic oligonucleotide
cacugaugaucaugcacau

SEQ ID NO: 1662104 - RNA, 19 nt, Artificial Sequence
  Description of Artificial Sequence: Synthetic oligonucleotide
ggagauguagaagggcagu

SEQ ID NO: 1662105 - RNA, 19 nt, Artificial Sequence
  Description of Artificial Sequence: Synthetic oligonucleotide
gcuguagggcgugaacuga

SEQ ID NO: 1662106 - RNA, 19 nt, Artificial Sequence
  Description of Artificial Sequence: Synthetic oligonucleotide
cacauccaccagucgcgga

SEQ ID NO: 1662107 - RNA, 19 nt, Artificial Sequence
  Description of Artificial Sequence: Synthetic oligonucleotide
caguagaugcccagcccgu

SEQ ID NO: 1662108 - RNA, 19 nt, Artificial Sequence
  Description of Artificial Sequence: Synthetic oligonucleotide
cgccgggucuccuuguacc

SEQ ID NO: 1662109 - RNA, 19 nt, Artificial Sequence
  Description of Artificial Sequence: Synthetic oligonucleotide
gucccuagcaggucaucau

SEQ ID NO: 1662110 - RNA, 19 nt, Artificial Sequence
  Description of Artificial Sequence: Synthetic oligonucleotide
gccagacaguccacguaag

SEQ ID NO: 1662111 - RNA, 19 nt, Artificial Sequence
  Description of Artificial Sequence: Synthetic oligonucleotide
ggacucccagccugggauc

SEQ ID NO: 1662112 - RNA, 19 nt, Artificial Sequence
  Description of Artificial Sequence: Synthetic oligonucleotide
cagguacacugucauuggu

SEQ ID NO: 1662113 - RNA, 19 nt, Artificial Sequence
  Description of Artificial Sequence: Synthetic oligonucleotide
uggcucugcccuggugacu

SEQ ID NO: 1662114 - RNA, 19 nt, Artificial Sequence
  Description of Artificial Sequence: Synthetic oligonucleotide
cacggccagccagcggugc

SEQ ID NO: 1662115 - RNA, 19 nt, Artificial Sequence
  Description of Artificial Sequence: Synthetic oligonucleotide
caguaaagagggagaggau

SEQ ID NO: 1662116 - RNA, 19 nt, Artificial Sequence
  Description of Artificial Sequence: Synthetic oligonucleotide
gagcaagcuccaggcucac

SEQ ID NO: 1662117 - RNA, 19 nt, Artificial Sequence
  Description of Artificial Sequence: Synthetic oligonucleotide
gcucugugacugugauggc

SEQ ID NO: 1662118 - RNA, 19 nt, Artificial Sequence
  Description of Artificial Sequence: Synthetic oligonucleotide
aggugccccugguggaguu

SEQ ID NO: 1662119 - RNA, 19 nt, Artificial Sequence
  Description of Artificial Sequence: Synthetic oligonucleotide
gcguacccagcuguagggc

SEQ ID NO: 1662120 - RNA, 19 nt, Artificial Sequence
  Description of Artificial Sequence: Synthetic oligonucleotide
agcaagcuccaggcucacu

SEQ ID NO: 1662121 - RNA, 19 nt, Artificial Sequence
  Description of Artificial Sequence: Synthetic oligonucleotide
ggagacgugucaggagcca

SEQ ID NO: 1662122 - RNA, 19 nt, Artificial Sequence
  Description of Artificial Sequence: Synthetic oligonucleotide
ggucauacuucaccacgau

SEQ ID NO: 1662123 - RNA, 19 nt, Artificial Sequence
  Description of Artificial Sequence: Synthetic oligonucleotide
gcauaaggacgggagaaau

SEQ ID NO: 1662124 - RNA, 19 nt, Artificial Sequence
  Description of Artificial Sequence: Synthetic oligonucleotide
cuugcccuuguagguugga

SEQ ID NO: 1662125 - RNA, 19 nt, Artificial Sequence
  Description of Artificial Sequence: Synthetic oligonucleotide
ggaauguuccagaggcccu

SEQ ID NO: 1662126 - RNA, 19 nt, Artificial Sequence
  Description of Artificial Sequence: Synthetic oligonucleotide
uggcaggcauaaggccagu

SEQ ID NO: 1662127 - RNA, 19 nt, Artificial Sequence
  Description of Artificial Sequence: Synthetic oligonucleotide
caucauagaugaggcaguu

SEQ ID NO: 1662128 - RNA, 19 nt, Artificial Sequence
  Description of Artificial Sequence: Synthetic oligonucleotide
gcucaagaggacccuugcu

SEQ ID NO: 1662129 - RNA, 19 nt, Artificial Sequence
  Description of Artificial Sequence: Synthetic oligonucleotide
gacagccacucgagggucu

SEQ ID NO: 1662130 - RNA, 19 nt, Artificial Sequence
  Description of Artificial Sequence: Synthetic oligonucleotide
ccuuguaccucauggugau

SEQ ID NO: 1662131 - RNA, 19 nt, Artificial Sequence
  Description of Artificial Sequence: Synthetic oligonucleotide
cguagucccucucuggcaa

SEQ ID NO: 1662132 - RNA, 19 nt, Artificial Sequence
  Description of Artificial Sequence: Synthetic oligonucleotide
acacggccagccagcggug

SEQ ID NO: 1662133 - RNA, 19 nt, Artificial Sequence
  Description of Artificial Sequence: Synthetic oligonucleotide
cagucccuagcaggucauc

SEQ ID NO: 1662134 - RNA, 19 nt, Artificial Sequence
  Description of Artificial Sequence: Synthetic oligonucleotide
gugcaggaacaaagccauc

SEQ ID NO: 1662135 - RNA, 19 nt, Artificial Sequence
  Description of Artificial Sequence: Synthetic oligonucleotide
cagcccuauggcaggcaua

SEQ ID NO: 1662136 - RNA, 19 nt, Artificial Sequence
  Description of Artificial Sequence: Synthetic oligonucleotide
ccguagucccucucuggca

SEQ ID NO: 1662137 - RNA, 19 nt, Artificial Sequence
  Description of Artificial Sequence: Synthetic oligonucleotide
gucgccgggucuccuugua

SEQ ID NO: 1662138 - RNA, 19 nt, Artificial Sequence
  Description of Artificial Sequence: Synthetic oligonucleotide
ccccugguggaguugggaa

SEQ ID NO: 1662139 - RNA, 19 nt, Artificial Sequence
  Description of Artificial Sequence: Synthetic oligonucleotide
cagcccguugcagaugagu

SEQ ID NO: 1662140 - RNA, 19 nt, Artificial Sequence
  Description of Artificial Sequence: Synthetic oligonucleotide
cccgcaggaagaagcgcca

SEQ ID NO: 1662141 - RNA, 19 nt, Artificial Sequence
  Description of Artificial Sequence: Synthetic oligonucleotide
agaggcccugccacuuaua

SEQ ID NO: 1662142 - RNA, 19 nt, Artificial Sequence
  Description of Artificial Sequence: Synthetic oligonucleotide
cguugcagaugaguacguc

SEQ ID NO: 1662143 - RNA, 19 nt, Artificial Sequence
  Description of Artificial Sequence: Synthetic oligonucleotide
ggcgcaggaggaccaggua

SEQ ID NO: 1662144 - RNA, 19 nt, Artificial Sequence
  Description of Artificial Sequence: Synthetic oligonucleotide
cagaggcccugccacuuau

SEQ ID NO: 1662145 - RNA, 19 nt, Artificial Sequence
  Description of Artificial Sequence: Synthetic oligonucleotide
cacccacguucacgaagaa

SEQ ID NO: 1662146 - RNA, 19 nt, Artificial Sequence
  Description of Artificial Sequence: Synthetic oligonucleotide
cacagcccuggagacgugu

SEQ ID NO: 1662147 - RNA, 19 nt, Artificial Sequence
  Description of Artificial Sequence: Synthetic oligonucleotide
gcgccagacaguccacgua

SEQ ID NO: 1662148 - RNA, 19 nt, Artificial Sequence
  Description of Artificial Sequence: Synthetic oligonucleotide
gccgggucuccuuguaccu

SEQ ID NO: 1662149 - RNA, 19 nt, Artificial Sequence
  Description of Artificial Sequence: Synthetic oligonucleotide
ccgcaggaagaagcgccag

SEQ ID NO: 1662150 - RNA, 19 nt, Artificial Sequence
  Description of Artificial Sequence: Synthetic oligonucleotide
ccagcccguugcagaugag

SEQ ID NO: 1662151 - RNA, 19 nt, Artificial Sequence
  Description of Artificial Sequence: Synthetic oligonucleotide
cccugccacuuauaugucu

SEQ ID NO: 1662152 - RNA, 19 nt, Artificial Sequence
  Description of Artificial Sequence: Synthetic oligonucleotide
ccgccaccagccaggccug

SEQ ID NO: 1662153 - RNA, 19 nt, Artificial Sequence
  Description of Artificial Sequence: Synthetic oligonucleotide
gcccuauggcaggcauaag

SEQ ID NO: 1662154 - RNA, 19 nt, Artificial Sequence
  Description of Artificial Sequence: Synthetic oligonucleotide
gccccugguggaguuggga

SEQ ID NO: 1662155 - RNA, 19 nt, Artificial Sequence
  Description of Artificial Sequence: Synthetic oligonucleotide
ggcaggcauaaggccagua

SEQ ID NO: 1662156 - RNA, 19 nt, Artificial Sequence
  Description of Artificial Sequence: Synthetic oligonucleotide
cccuuguagguuggaaugu

SEQ ID NO: 1662157 - RNA, 19 nt, Artificial Sequence
  Description of Artificial Sequence: Synthetic oligonucleotide
cccugguggaguugggaau

SEQ ID NO: 1662158 - RNA, 19 nt, Artificial Sequence
  Description of Artificial Sequence: Synthetic oligonucleotide
gcccugccacuuauauguc

SEQ ID NO: 1662159 - RNA, 19 nt, Artificial Sequence
  Description of Artificial Sequence: Synthetic oligonucleotide
ccguugcagaugaguacgu

SEQ ID NO: 1662160 - RNA, 19 nt, Artificial Sequence
  Description of Artificial Sequence: Synthetic oligonucleotide
gcggaucaugagggucuuc

SEQ ID NO: 1662161 - RNA, 19 nt, Artificial Sequence
  Description of Artificial Sequence: Synthetic oligonucleotide
ccagucccuagcaggucau

SEQ ID NO: 1662162 - RNA, 19 nt, Artificial Sequence
  Description of Artificial Sequence: Synthetic oligonucleotide
gccacucgagggucuucau

SEQ ID NO: 1662163 - RNA, 19 nt, Artificial Sequence
  Description of Artificial Sequence: Synthetic oligonucleotide
gccagcggugcaggcugga

SEQ ID NO: 1662164 - RNA, 19 nt, Artificial Sequence
  Description of Artificial Sequence: Synthetic oligonucleotide
cgggacucccagccuggga

SEQ ID NO: 1662165 - RNA, 19 nt, Artificial Sequence
  Description of Artificial Sequence: Synthetic oligonucleotide
cgcggaucaugagggucuu

SEQ ID NO: 1662166 - RNA, 19 nt, Artificial Sequence
  Description of Artificial Sequence: Synthetic oligonucleotide
aauaagggcacacacaucg

SEQ ID NO: 1662167 - RNA, 19 nt, Artificial Sequence
  Description of Artificial Sequence: Synthetic oligonucleotide
aaauucaugagccacguac

SEQ ID NO: 1662168 - RNA, 19 nt, Artificial Sequence
  Description of Artificial Sequence: Synthetic oligonucleotide
aaauccguaauccuggagc

SEQ ID NO: 1662169 - RNA, 19 nt, Artificial Sequence
  Description of Artificial Sequence: Synthetic oligonucleotide
aaaauagcaauuucugugg

SEQ ID NO: 1662170 - RNA, 19 nt, Artificial Sequence
  Description of Artificial Sequence: Synthetic oligonucleotide
aaaauggagacucguaggc

SEQ ID NO: 1662171 - RNA, 19 nt, Artificial Sequence
  Description of Artificial Sequence: Synthetic oligonucleotide
aucaucuuaauauaagccc

SEQ ID NO: 1662172 - RNA, 19 nt, Artificial Sequence
  Description of Artificial Sequence: Synthetic oligonucleotide
ugucaaaugcuucagaaag

SEQ ID NO: 1662173 - RNA, 19 nt, Artificial Sequence
  Description of Artificial Sequence: Synthetic oligonucleotide
uuaccuugaaagauuaugg

SEQ ID NO: 1662174 - RNA, 19 nt, Artificial Sequence
  Description of Artificial Sequence: Synthetic oligonucleotide
aauauggucuaucccagcg

SEQ ID NO: 1662175 - RNA, 19 nt, Artificial Sequence
  Description of Artificial Sequence: Synthetic oligonucleotide
aauccguaauccuggagcc

SEQ ID NO: 1662176 - RNA, 19 nt, Artificial Sequence
  Description of Artificial Sequence: Synthetic oligonucleotide
uuuuauggaaacaauggga

SEQ ID NO: 1662177 - RNA, 19 nt, Artificial Sequence
  Description of Artificial Sequence: Synthetic oligonucleotide
ucaaacacaccauugguag

SEQ ID NO: 1662178 - RNA, 19 nt, Artificial Sequence
  Description of Artificial Sequence: Synthetic oligonucleotide
aauauaagcccaugaaaug

SEQ ID NO: 1662179 - RNA, 19 nt, Artificial Sequence
  Description of Artificial Sequence: Synthetic oligonucleotide
uacgugaucaugauggcgg

SEQ ID NO: 1662180 - RNA, 19 nt, Artificial Sequence
  Description of Artificial Sequence: Synthetic oligonucleotide
aaauagcaauuucuguggc

SEQ ID NO: 1662181 - RNA, 19 nt, Artificial Sequence
  Description of Artificial Sequence: Synthetic oligonucleotide
uguuuauccaccauggccu

SEQ ID NO: 1662182 - RNA, 19 nt, Artificial Sequence
  Description of Artificial Sequence: Synthetic oligonucleotide
uaaaccuccugcuugagcc

SEQ ID NO: 1662183 - RNA, 19 nt, Artificial Sequence
  Description of Artificial Sequence: Synthetic oligonucleotide
uauaucagcgauuucuugc

SEQ ID NO: 1662184 - RNA, 19 nt, Artificial Sequence
  Description of Artificial Sequence: Synthetic oligonucleotide
aauaaauucaugagccacg

SEQ ID NO: 1662185 - RNA, 19 nt, Artificial Sequence
  Description of Artificial Sequence: Synthetic oligonucleotide
uuguguuuauccaccaugg

SEQ ID NO: 1662186 - RNA, 19 nt, Artificial Sequence
  Description of Artificial Sequence: Synthetic oligonucleotide
gaaaauggagacucguagg

SEQ ID NO: 1662187 - RNA, 19 nt, Artificial Sequence
  Description of Artificial Sequence: Synthetic oligonucleotide
guuuuauggaaacaauggg

SEQ ID NO: 1662188 - RNA, 19 nt, Artificial Sequence
  Description of Artificial Sequence: Synthetic oligonucleotide
caacauauaaaccuccugc

SEQ ID NO: 1662189 - RNA, 19 nt, Artificial Sequence
  Description of Artificial Sequence: Synthetic oligonucleotide
ucaucuuaauauaagccca

SEQ ID NO: 1662190 - RNA, 19 nt, Artificial Sequence
  Description of Artificial Sequence: Synthetic oligonucleotide
uauaagcccaugaaauggg

SEQ ID NO: 1662191 - RNA, 19 nt, Artificial Sequence
  Description of Artificial Sequence: Synthetic oligonucleotide
ugaauaagggcacacacau

SEQ ID NO: 1662192 - RNA, 19 nt, Artificial Sequence
  Description of Artificial Sequence: Synthetic oligonucleotide
caucaucuuaauauaagcc

SEQ ID NO: 1662193 - RNA, 19 nt, Artificial Sequence
  Description of Artificial Sequence: Synthetic oligonucleotide
aauucaugagccacguacc

SEQ ID NO: 1662194 - RNA, 19 nt, Artificial Sequence
  Description of Artificial Sequence: Synthetic oligonucleotide
auucauauuugccccgucc

SEQ ID NO: 1662195 - RNA, 19 nt, Artificial Sequence
  Description of Artificial Sequence: Synthetic oligonucleotide
uccguguuggugaauaagg

SEQ ID NO: 1662196 - RNA, 19 nt, Artificial Sequence
  Description of Artificial Sequence: Synthetic oligonucleotide
uuuucuaaucgcuuggcca

SEQ ID NO: 1662197 - RNA, 19 nt, Artificial Sequence
  Description of Artificial Sequence: Synthetic oligonucleotide
agauuauggaaauauacaa

SEQ ID NO: 1662198 - RNA, 19 nt, Artificial Sequence
  Description of Artificial Sequence: Synthetic oligonucleotide
uauggucuaucccagcggg

SEQ ID NO: 1662199 - RNA, 19 nt, Artificial Sequence
  Description of Artificial Sequence: Synthetic oligonucleotide
uauggaaacaaugggauga

SEQ ID NO: 1662200 - RNA, 19 nt, Artificial Sequence
  Description of Artificial Sequence: Synthetic oligonucleotide
auauaagcccaugaaaugg

SEQ ID NO: 1662201 - RNA, 19 nt, Artificial Sequence
  Description of Artificial Sequence: Synthetic oligonucleotide
accauugguagauggauac

SEQ ID NO: 1662202 - RNA, 19 nt, Artificial Sequence
  Description of Artificial Sequence: Synthetic oligonucleotide
uguguuuacauuaccuuga

SEQ ID NO: 1662203 - RNA, 19 nt, Artificial Sequence
  Description of Artificial Sequence: Synthetic oligonucleotide
cuaaguuuuaccacucacc

SEQ ID NO: 1662204 - RNA, 19 nt, Artificial Sequence
  Description of Artificial Sequence: Synthetic oligonucleotide
aaaugggcaagauggaacu

SEQ ID NO: 1662205 - RNA, 19 nt, Artificial Sequence
  Description of Artificial Sequence: Synthetic oligonucleotide
ggauacgugaucaugaugg

SEQ ID NO: 1662206 - RNA, 19 nt, Artificial Sequence
  Description of Artificial Sequence: Synthetic oligonucleotide
ugggcauucauauuugccc

SEQ ID NO: 1662207 - RNA, 19 nt, Artificial Sequence
  Description of Artificial Sequence: Synthetic oligonucleotide
gaugucaucgauccgagca

SEQ ID NO: 1662208 - RNA, 19 nt, Artificial Sequence
  Description of Artificial Sequence: Synthetic oligonucleotide
agaaauauccuuguuuguc

SEQ ID NO: 1662209 - RNA, 19 nt, Artificial Sequence
  Description of Artificial Sequence: Synthetic oligonucleotide
gaugacugggcagaaaagg

SEQ ID NO: 1662210 - RNA, 19 nt, Artificial Sequence
  Description of Artificial Sequence: Synthetic oligonucleotide
uuaggugagagacaucaga

SEQ ID NO: 1662211 - RNA, 19 nt, Artificial Sequence
  Description of Artificial Sequence: Synthetic oligonucleotide
aguccuuugaacuuagaga

SEQ ID NO: 1662212 - RNA, 19 nt, Artificial Sequence
  Description of Artificial Sequence: Synthetic oligonucleotide
cauauaaaccuccugcuug

SEQ ID NO: 1662213 - RNA, 19 nt, Artificial Sequence
  Description of Artificial Sequence: Synthetic oligonucleotide
ucuuguguccaaaauaaau

SEQ ID NO: 1662214 - RNA, 19 nt, Artificial Sequence
  Description of Artificial Sequence: Synthetic oligonucleotide
aaauggagacucguaggcc

SEQ ID NO: 1662215 - RNA, 19 nt, Artificial Sequence
  Description of Artificial Sequence: Synthetic oligonucleotide
auuuaggugagagacauca

SEQ ID NO: 1662216 - RNA, 19 nt, Artificial Sequence
  Description of Artificial Sequence: Synthetic oligonucleotide
ucuguuccgaaaauggaga

SEQ ID NO: 1662217 - RNA, 19 nt, Artificial Sequence
  Description of Artificial Sequence: Synthetic oligonucleotide
caugaaauccguaauccug

SEQ ID NO: 1662218 - RNA, 19 nt, Artificial Sequence
  Description of Artificial Sequence: Synthetic oligonucleotide
aaacaaugggaugacuggg

SEQ ID NO: 1662219 - RNA, 19 nt, Artificial Sequence
  Description of Artificial Sequence: Synthetic oligonucleotide
aaaccaggugcugaucucc

SEQ ID NO: 1662220 - RNA, 19 nt, Artificial Sequence
  Description of Artificial Sequence: Synthetic oligonucleotide
gguuuuauggaaacaaugg

SEQ ID NO: 1662221 - RNA, 19 nt, Artificial Sequence
  Description of Artificial Sequence: Synthetic oligonucleotide
aacaaugggaugacugggc

SEQ ID NO: 1662222 - RNA, 19 nt, Artificial Sequence
  Description of Artificial Sequence: Synthetic oligonucleotide
ugacccuagggucaaugcg

SEQ ID NO: 1662223 - RNA, 19 nt, Artificial Sequence
  Description of Artificial Sequence: Synthetic oligonucleotide
auacaacauauaaaccucc

SEQ ID NO: 1662224 - RNA, 19 nt, Artificial Sequence
  Description of Artificial Sequence: Synthetic oligonucleotide
uuaccacucaccaugcuaa

SEQ ID NO: 1662225 - RNA, 19 nt, Artificial Sequence
  Description of Artificial Sequence: Synthetic oligonucleotide
acacacaucgcugauguuc

SEQ ID NO: 1662226 - RNA, 19 nt, Artificial Sequence
  Description of Artificial Sequence: Synthetic oligonucleotide
uaaucgcuuggccauguag

SEQ ID NO: 1662227 - RNA, 19 nt, Artificial Sequence
  Description of Artificial Sequence: Synthetic oligonucleotide
aacuuagagaggaaggacu

SEQ ID NO: 1662228 - RNA, 19 nt, Artificial Sequence
  Description of Artificial Sequence: Synthetic oligonucleotide
aaucuguccagcucugccu

SEQ ID NO: 1662229 - RNA, 19 nt, Artificial Sequence
  Description of Artificial Sequence: Synthetic oligonucleotide
ggugagagacaucagaccc

SEQ ID NO: 1662230 - RNA, 19 nt, Artificial Sequence
  Description of Artificial Sequence: Synthetic oligonucleotide
auagaugucaucgauccga

SEQ ID NO: 1662231 - RNA, 19 nt, Artificial Sequence
  Description of Artificial Sequence: Synthetic oligonucleotide
accucucuagaauaugguc

SEQ ID NO: 1662232 - RNA, 19 nt, Artificial Sequence
  Description of Artificial Sequence: Synthetic oligonucleotide
augaaauccguaauccugg

SEQ ID NO: 1662233 - RNA, 19 nt, Artificial Sequence
  Description of Artificial Sequence: Synthetic oligonucleotide
ucaucgauccgagcaaugg

SEQ ID NO: 1662234 - RNA, 19 nt, Artificial Sequence
  Description of Artificial Sequence: Synthetic oligonucleotide
ucagugggcucaaucauga

SEQ ID NO: 1662235 - RNA, 19 nt, Artificial Sequence
  Description of Artificial Sequence: Synthetic oligonucleotide
uuucuaaucgcuuggccau

SEQ ID NO: 1662236 - RNA, 19 nt, Artificial Sequence
  Description of Artificial Sequence: Synthetic oligonucleotide
aaugggaugacugggcaga

SEQ ID NO: 1662237 - RNA, 19 nt, Artificial Sequence
  Description of Artificial Sequence: Synthetic oligonucleotide
uuuaccacucaccaugcua

SEQ ID NO: 1662238 - RNA, 19 nt, Artificial Sequence
  Description of Artificial Sequence: Synthetic oligonucleotide
auauggucuaucccagcgg

SEQ ID NO: 1662239 - RNA, 19 nt, Artificial Sequence
  Description of Artificial Sequence: Synthetic oligonucleotide
ugcuucagaaagaagcauc

SEQ ID NO: 1662240 - RNA, 19 nt, Artificial Sequence
  Description of Artificial Sequence: Synthetic oligonucleotide
aaugguuggccagaauuug

SEQ ID NO: 1662241 - RNA, 19 nt, Artificial Sequence
  Description of Artificial Sequence: Synthetic oligonucleotide
auuugccccguccagguag

SEQ ID NO: 1662242 - RNA, 19 nt, Artificial Sequence
  Description of Artificial Sequence: Synthetic oligonucleotide
ugaagauuuaggugagaga

SEQ ID NO: 1662243 - RNA, 19 nt, Artificial Sequence
  Description of Artificial Sequence: Synthetic oligonucleotide
uugguagauggauacguga

SEQ ID NO: 1662244 - RNA, 19 nt, Artificial Sequence
  Description of Artificial Sequence: Synthetic oligonucleotide
ucuugccggaugcugauca

SEQ ID NO: 1662245 - RNA, 19 nt, Artificial Sequence
  Description of Artificial Sequence: Synthetic oligonucleotide
uuacauuaccuugaaagau

SEQ ID NO: 1662246 - RNA, 19 nt, Artificial Sequence
  Description of Artificial Sequence: Synthetic oligonucleotide
auucguuccaugugcugac

SEQ ID NO: 1662247 - RNA, 19 nt, Artificial Sequence
  Description of Artificial Sequence: Synthetic oligonucleotide
uaccuugaaagauuaugga

SEQ ID NO: 1662248 - RNA, 19 nt, Artificial Sequence
  Description of Artificial Sequence: Synthetic oligonucleotide
uacaacauauaaaccuccu

SEQ ID NO: 1662249 - RNA, 19 nt, Artificial Sequence
  Description of Artificial Sequence: Synthetic oligonucleotide
uacauuaccuugaaagauu

SEQ ID NO: 1662250 - RNA, 19 nt, Artificial Sequence
  Description of Artificial Sequence: Synthetic oligonucleotide
uucgguuuuauggaaacaa

SEQ ID NO: 1662251 - RNA, 19 nt, Artificial Sequence
  Description of Artificial Sequence: Synthetic oligonucleotide
gauggauacgugaucauga

SEQ ID NO: 1662252 - RNA, 19 nt, Artificial Sequence
  Description of Artificial Sequence: Synthetic oligonucleotide
gugaagauuuaggugagag

SEQ ID NO: 1662253 - RNA, 19 nt, Artificial Sequence
  Description of Artificial Sequence: Synthetic oligonucleotide
gacccuagggucaaugcgg

SEQ ID NO: 1662254 - RNA, 19 nt, Artificial Sequence
  Description of Artificial Sequence: Synthetic oligonucleotide
cuuguuugucaaaugcuuc

SEQ ID NO: 1662255 - RNA, 19 nt, Artificial Sequence
  Description of Artificial Sequence: Synthetic oligonucleotide
uguuggugaauaagggcac

SEQ ID NO: 1662256 - RNA, 19 nt, Artificial Sequence
  Description of Artificial Sequence: Synthetic oligonucleotide
aaucgcuuggccauguagu

SEQ ID NO: 1662257 - RNA, 19 nt, Artificial Sequence
  Description of Artificial Sequence: Synthetic oligonucleotide
agauuuaggugagagacau

SEQ ID NO: 1662258 - RNA, 19 nt, Artificial Sequence
  Description of Artificial Sequence: Synthetic oligonucleotide
uaagggcacacacaucgcu

SEQ ID NO: 1662259 - RNA, 19 nt, Artificial Sequence
  Description of Artificial Sequence: Synthetic oligonucleotide
augguaggggcaugaaauc

SEQ ID NO: 1662260 - RNA, 19 nt, Artificial Sequence
  Description of Artificial Sequence: Synthetic oligonucleotide
uucacaaagggcaguggaa

SEQ ID NO: 1662261 - RNA, 19 nt, Artificial Sequence
  Description of Artificial Sequence: Synthetic oligonucleotide
cauucgguuuuauggaaac

SEQ ID NO: 1662262 - RNA, 19 nt, Artificial Sequence
  Description of Artificial Sequence: Synthetic oligonucleotide
guuccgaaaauggagacuc

SEQ ID NO: 1662263 - RNA, 19 nt, Artificial Sequence
  Description of Artificial Sequence: Synthetic oligonucleotide
uggaaauauacaacauaua

SEQ ID NO: 1662264 - RNA, 19 nt, Artificial Sequence
  Description of Artificial Sequence: Synthetic oligonucleotide
gauacgugaucaugauggc

SEQ ID NO: 1662265 - RNA, 19 nt, Artificial Sequence
  Description of Artificial Sequence: Synthetic oligonucleotide
ucaugagccacguacccuc

SEQ ID NO: 1662266 - RNA, 19 nt, Artificial Sequence
  Description of Artificial Sequence: Synthetic oligonucleotide
ugguagauggauacgugau

SEQ ID NO: 1662267 - RNA, 19 nt, Artificial Sequence
  Description of Artificial Sequence: Synthetic oligonucleotide
gaaauccguaauccuggag

SEQ ID NO: 1662268 - RNA, 19 nt, Artificial Sequence
  Description of Artificial Sequence: Synthetic oligonucleotide
acggcagaugcccaccugg

SEQ ID NO: 1662269 - RNA, 19 nt, Artificial Sequence
  Description of Artificial Sequence: Synthetic oligonucleotide
ucgauccgagcaaugguug

SEQ ID NO: 1662270 - RNA, 19 nt, Artificial Sequence
  Description of Artificial Sequence: Synthetic oligonucleotide
guagauggauacgugauca

SEQ ID NO: 1662271 - RNA, 19 nt, Artificial Sequence
  Description of Artificial Sequence: Synthetic oligonucleotide
uggauacgugaucaugaug

SEQ ID NO: 1662272 - RNA, 19 nt, Artificial Sequence
  Description of Artificial Sequence: Synthetic oligonucleotide
ucuuugagacccuuuguuu

SEQ ID NO: 1662273 - RNA, 19 nt, Artificial Sequence
  Description of Artificial Sequence: Synthetic oligonucleotide
cugggcauucauauuugcc

SEQ ID NO: 1662274 - RNA, 19 nt, Artificial Sequence
  Description of Artificial Sequence: Synthetic oligonucleotide
ggugaauaagggcacacac

SEQ ID NO: 1662275 - RNA, 19 nt, Artificial Sequence
  Description of Artificial Sequence: Synthetic oligonucleotide
auaaauucaugagccacgu

SEQ ID NO: 1662276 - RNA, 19 nt, Artificial Sequence
  Description of Artificial Sequence: Synthetic oligonucleotide
ggaaacaaugggaugacug

SEQ ID NO: 1662277 - RNA, 19 nt, Artificial Sequence
  Description of Artificial Sequence: Synthetic oligonucleotide
uauccuuguuugucaaaug

SEQ ID NO: 1662278 - RNA, 19 nt, Artificial Sequence
  Description of Artificial Sequence: Synthetic oligonucleotide
auacgugaucaugauggcg

SEQ ID NO: 1662279 - RNA, 19 nt, Artificial Sequence
  Description of Artificial Sequence: Synthetic oligonucleotide
acgugaucaugauggcggc

SEQ ID NO: 1662280 - RNA, 19 nt, Artificial Sequence
  Description of Artificial Sequence: Synthetic oligonucleotide
aaguuuuaccacucaccau

SEQ ID NO: 1662281 - RNA, 19 nt, Artificial Sequence
  Description of Artificial Sequence: Synthetic oligonucleotide
uuccaugugcugacuuagg

SEQ ID NO: 1662282 - RNA, 19 nt, Artificial Sequence
  Description of Artificial Sequence: Synthetic oligonucleotide
uugacccuagggucaaugc

SEQ ID NO: 1662283 - RNA, 19 nt, Artificial Sequence
  Description of Artificial Sequence: Synthetic oligonucleotide
gaauauggucuaucccagc

SEQ ID NO: 1662284 - RNA, 19 nt, Artificial Sequence
  Description of Artificial Sequence: Synthetic oligonucleotide
uuccgaaaauggagacucg

SEQ ID NO: 1662285 - RNA, 19 nt, Artificial Sequence
  Description of Artificial Sequence: Synthetic oligonucleotide
uccaggacggcagaugccc

SEQ ID NO: 1662286 - RNA, 19 nt, Artificial Sequence
  Description of Artificial Sequence: Synthetic oligonucleotide
ugguaggggcaugaaaucc

SEQ ID NO: 1662287 - RNA, 19 nt, Artificial Sequence
  Description of Artificial Sequence: Synthetic oligonucleotide
uaccucucuagaauauggu

SEQ ID NO: 1662288 - RNA, 19 nt, Artificial Sequence
  Description of Artificial Sequence: Synthetic oligonucleotide
ucgguuuuauggaaacaau

SEQ ID NO: 1662289 - RNA, 19 nt, Artificial Sequence
  Description of Artificial Sequence: Synthetic oligonucleotide
agcgauuucuugccggaug

SEQ ID NO: 1662290 - RNA, 19 nt, Artificial Sequence
  Description of Artificial Sequence: Synthetic oligonucleotide
aguggaaaugcugcuaccu

SEQ ID NO: 1662291 - RNA, 19 nt, Artificial Sequence
  Description of Artificial Sequence: Synthetic oligonucleotide
acauauaaaccuccugcuu

SEQ ID NO: 1662292 - RNA, 19 nt, Artificial Sequence
  Description of Artificial Sequence: Synthetic oligonucleotide
agcgcaagagaagaaauau

SEQ ID NO: 1662293 - RNA, 19 nt, Artificial Sequence
  Description of Artificial Sequence: Synthetic oligonucleotide
ucagcgauuucuugccgga

SEQ ID NO: 1662294 - RNA, 19 nt, Artificial Sequence
  Description of Artificial Sequence: Synthetic oligonucleotide
ugaaauccguaauccugga

SEQ ID NO: 1662295 - RNA, 19 nt, Artificial Sequence
  Description of Artificial Sequence: Synthetic oligonucleotide
aagauuuaggugagagaca

SEQ ID NO: 1662296 - RNA, 19 nt, Artificial Sequence
  Description of Artificial Sequence: Synthetic oligonucleotide
agauggauacgugaucaug

SEQ ID NO: 1662297 - RNA, 19 nt, Artificial Sequence
  Description of Artificial Sequence: Synthetic oligonucleotide
aucaugagagucccugcca

SEQ ID NO: 1662298 - RNA, 19 nt, Artificial Sequence
  Description of Artificial Sequence: Synthetic oligonucleotide
uggauucguuccaugugcu

SEQ ID NO: 1662299 - RNA, 19 nt, Artificial Sequence
  Description of Artificial Sequence: Synthetic oligonucleotide
caucagacccaaagucucc

SEQ ID NO: 1662300 - RNA, 19 nt, Artificial Sequence
  Description of Artificial Sequence: Synthetic oligonucleotide
cacuugcuggauucguucc

SEQ ID NO: 1662301 - RNA, 19 nt, Artificial Sequence
  Description of Artificial Sequence: Synthetic oligonucleotide
aucaauguucccguaucug

SEQ ID NO: 1662302 - RNA, 19 nt, Artificial Sequence
  Description of Artificial Sequence: Synthetic oligonucleotide
cugaucauagcaucacaga

SEQ ID NO: 1662303 - RNA, 19 nt, Artificial Sequence
  Description of Artificial Sequence: Synthetic oligonucleotide
uccgaaaauggagacucgu

SEQ ID NO: 1662304 - RNA, 19 nt, Artificial Sequence
  Description of Artificial Sequence: Synthetic oligonucleotide
ugccauguaggcacuugcu

SEQ ID NO: 1662305 - RNA, 19 nt, Artificial Sequence
  Description of Artificial Sequence: Synthetic oligonucleotide
aaugcggcccuccucuaua

SEQ ID NO: 1662306 - RNA, 19 nt, Artificial Sequence
  Description of Artificial Sequence: Synthetic oligonucleotide
uguuccgaaaauggagacu

SEQ ID NO: 1662307 - RNA, 19 nt, Artificial Sequence
  Description of Artificial Sequence: Synthetic oligonucleotide
ggaaggacuaagaggaggc

SEQ ID NO: 1662308 - RNA, 19 nt, Artificial Sequence
  Description of Artificial Sequence: Synthetic oligonucleotide
aacuaguccuuugaacuua

SEQ ID NO: 1662309 - RNA, 19 nt, Artificial Sequence
  Description of Artificial Sequence: Synthetic oligonucleotide
gguaggggcaugaaauccg

SEQ ID NO: 1662310 - RNA, 19 nt, Artificial Sequence
  Description of Artificial Sequence: Synthetic oligonucleotide
ucaccaugcuaauuguguu

SEQ ID NO: 1662311 - RNA, 19 nt, Artificial Sequence
  Description of Artificial Sequence: Synthetic oligonucleotide
auagcaucacagaaucugu

SEQ ID NO: 1662312 - RNA, 19 nt, Artificial Sequence
  Description of Artificial Sequence: Synthetic oligonucleotide
gggcauucauauuugcccc

SEQ ID NO: 1662313 - RNA, 19 nt, Artificial Sequence
  Description of Artificial Sequence: Synthetic oligonucleotide
auugguagauggauacgug

SEQ ID NO: 1662314 - RNA, 19 nt, Artificial Sequence
  Description of Artificial Sequence: Synthetic oligonucleotide
gaaggacuaagaggaggcc

SEQ ID NO: 1662315 - RNA, 19 nt, Artificial Sequence
  Description of Artificial Sequence: Synthetic oligonucleotide
agggcacacacaucgcuga

SEQ ID NO: 1662316 - RNA, 19 nt, Artificial Sequence
  Description of Artificial Sequence: Synthetic oligonucleotide
uggccuugaggugagcggc

SEQ ID NO: 1662317 - RNA, 19 nt, Artificial Sequence
  Description of Artificial Sequence: Synthetic oligonucleotide
auggauacgugaucaugau

SEQ ID NO: 1662318 - RNA, 19 nt, Artificial Sequence
  Description of Artificial Sequence: Synthetic oligonucleotide
uccguaauccuggagccuc

SEQ ID NO: 1662319 - RNA, 19 nt, Artificial Sequence
  Description of Artificial Sequence: Synthetic oligonucleotide
ugcuaccucucuagaauau

SEQ ID NO: 1662320 - RNA, 19 nt, Artificial Sequence
  Description of Artificial Sequence: Synthetic oligonucleotide
cugccuugucuucugacuc

SEQ ID NO: 1662321 - RNA, 19 nt, Artificial Sequence
  Description of Artificial Sequence: Synthetic oligonucleotide
cccaucaucuuaauauaag

SEQ ID NO: 1662322 - RNA, 19 nt, Artificial Sequence
  Description of Artificial Sequence: Synthetic oligonucleotide
uuggugaauaagggcacac

SEQ ID NO: 1662323 - RNA, 19 nt, Artificial Sequence
  Description of Artificial Sequence: Synthetic oligonucleotide
augucaucgauccgagcaa

SEQ ID NO: 1662324 - RNA, 19 nt, Artificial Sequence
  Description of Artificial Sequence: Synthetic oligonucleotide
ggcauucauauuugccccg

SEQ ID NO: 1662325 - RNA, 19 nt, Artificial Sequence
  Description of Artificial Sequence: Synthetic oligonucleotide
cccaaacuaaguuuuacca

SEQ ID NO: 1662326 - RNA, 19 nt, Artificial Sequence
  Description of Artificial Sequence: Synthetic oligonucleotide
cuugaggugagcggcauca

SEQ ID NO: 1662327 - RNA, 19 nt, Artificial Sequence
  Description of Artificial Sequence: Synthetic oligonucleotide
gugagcggcaucaauguuc

SEQ ID NO: 1662328 - RNA, 19 nt, Artificial Sequence
  Description of Artificial Sequence: Synthetic oligonucleotide
ugaggugagcggcaucaau

SEQ ID NO: 1662329 - RNA, 19 nt, Artificial Sequence
  Description of Artificial Sequence: Synthetic oligonucleotide
ccacucaccaugcuaauug

SEQ ID NO: 1662330 - RNA, 19 nt, Artificial Sequence
  Description of Artificial Sequence: Synthetic oligonucleotide
uucugacucagugggcuca

SEQ ID NO: 1662331 - RNA, 19 nt, Artificial Sequence
  Description of Artificial Sequence: Synthetic oligonucleotide
cuaagaggaggcccuuuuc

SEQ ID NO: 1662332 - RNA, 19 nt, Artificial Sequence
  Description of Artificial Sequence: Synthetic oligonucleotide
ggucuuguguccaaaauaa

SEQ ID NO: 1662333 - RNA, 19 nt, Artificial Sequence
  Description of Artificial Sequence: Synthetic oligonucleotide
gugaauaagggcacacaca

SEQ ID NO: 1662334 - RNA, 19 nt, Artificial Sequence
  Description of Artificial Sequence: Synthetic oligonucleotide
agccaagcgcaagagaaga

SEQ ID NO: 1662335 - RNA, 19 nt, Artificial Sequence
  Description of Artificial Sequence: Synthetic oligonucleotide
cacguacccucuugcaccc

SEQ ID NO: 1662336 - RNA, 19 nt, Artificial Sequence
  Description of Artificial Sequence: Synthetic oligonucleotide
uuucuugccggaugcugau

SEQ ID NO: 1662337 - RNA, 19 nt, Artificial Sequence
  Description of Artificial Sequence: Synthetic oligonucleotide
ggcucaaucaugagagucc

SEQ ID NO: 1662338 - RNA, 19 nt, Artificial Sequence
  Description of Artificial Sequence: Synthetic oligonucleotide
acuaguccuuugaacuuag

SEQ ID NO: 1662339 - RNA, 19 nt, Artificial Sequence
  Description of Artificial Sequence: Synthetic oligonucleotide
aggacuaagaggaggcccu

SEQ ID NO: 1662340 - RNA, 19 nt, Artificial Sequence
  Description of Artificial Sequence: Synthetic oligonucleotide
ccacguacccucuugcacc

SEQ ID NO: 1662341 - RNA, 19 nt, Artificial Sequence
  Description of Artificial Sequence: Synthetic oligonucleotide
uuugccccguccagguaga

SEQ ID NO: 1662342 - RNA, 19 nt, Artificial Sequence
  Description of Artificial Sequence: Synthetic oligonucleotide
ucuaaucgcuuggccaugu

SEQ ID NO: 1662343 - RNA, 19 nt, Artificial Sequence
  Description of Artificial Sequence: Synthetic oligonucleotide
aggacggcagaugcccacc

SEQ ID NO: 1662344 - RNA, 19 nt, Artificial Sequence
  Description of Artificial Sequence: Synthetic oligonucleotide
gcgauuucuugccggaugc

SEQ ID NO: 1662345 - RNA, 19 nt, Artificial Sequence
  Description of Artificial Sequence: Synthetic oligonucleotide
uugagacccuuuguuuccc

SEQ ID NO: 1662346 - RNA, 19 nt, Artificial Sequence
  Description of Artificial Sequence: Synthetic oligonucleotide
ccaauaggccccaugccag

SEQ ID NO: 1662347 - RNA, 19 nt, Artificial Sequence
  Description of Artificial Sequence: Synthetic oligonucleotide
acauuaccuugaaagauua

SEQ ID NO: 1662348 - RNA, 19 nt, Artificial Sequence
  Description of Artificial Sequence: Synthetic oligonucleotide
caguggaaaugcugcuacc

SEQ ID NO: 1662349 - RNA, 19 nt, Artificial Sequence
  Description of Artificial Sequence: Synthetic oligonucleotide
gaucauagcaucacagaau

SEQ ID NO: 1662350 - RNA, 19 nt, Artificial Sequence
  Description of Artificial Sequence: Synthetic oligonucleotide
ccguguuggugaauaaggg

SEQ ID NO: 1662351 - RNA, 19 nt, Artificial Sequence
  Description of Artificial Sequence: Synthetic oligonucleotide
ggcggcacaguccccaccg

SEQ ID NO: 1662352 - RNA, 19 nt, Artificial Sequence
  Description of Artificial Sequence: Synthetic oligonucleotide
gagccaagcgcaagagaag

SEQ ID NO: 1662353 - RNA, 19 nt, Artificial Sequence
  Description of Artificial Sequence: Synthetic oligonucleotide
ugugaagauuuaggugaga

SEQ ID NO: 1662354 - RNA, 19 nt, Artificial Sequence
  Description of Artificial Sequence: Synthetic oligonucleotide
cuccguguuggugaauaag

SEQ ID NO: 1662355 - RNA, 19 nt, Artificial Sequence
  Description of Artificial Sequence: Synthetic oligonucleotide
gucaaugcggcccuccucu

SEQ ID NO: 1662356 - RNA, 19 nt, Artificial Sequence
  Description of Artificial Sequence: Synthetic oligonucleotide
uagauggauacgugaucau

SEQ ID NO: 1662357 - RNA, 19 nt, Artificial Sequence
  Description of Artificial Sequence: Synthetic oligonucleotide
gguagauggauacgugauc

SEQ ID NO: 1662358 - RNA, 19 nt, Artificial Sequence
  Description of Artificial Sequence: Synthetic oligonucleotide
aagcgcaagagaagaaaua

SEQ ID NO: 1662359 - RNA, 19 nt, Artificial Sequence
  Description of Artificial Sequence: Synthetic oligonucleotide
guccucauucgguuuuaug

SEQ ID NO: 1662360 - RNA, 19 nt, Artificial Sequence
  Description of Artificial Sequence: Synthetic oligonucleotide
cguguuggugaauaagggc

SEQ ID NO: 1662361 - RNA, 19 nt, Artificial Sequence
  Description of Artificial Sequence: Synthetic oligonucleotide
aucgcuuggccauguaguu

SEQ ID NO: 1662362 - RNA, 19 nt, Artificial Sequence
  Description of Artificial Sequence: Synthetic oligonucleotide
ucccguaucuguccaccuc

SEQ ID NO: 1662363 - RNA, 19 nt, Artificial Sequence
  Description of Artificial Sequence: Synthetic oligonucleotide
cgguuuuauggaaacaaug

SEQ ID NO: 1662364 - RNA, 19 nt, Artificial Sequence
  Description of Artificial Sequence: Synthetic oligonucleotide
auucgguuuuauggaaaca

SEQ ID NO: 1662365 - RNA, 19 nt, Artificial Sequence
  Description of Artificial Sequence: Synthetic oligonucleotide
uucuaaucgcuuggccaug

SEQ ID NO: 1662366 - RNA, 19 nt, Artificial Sequence
  Description of Artificial Sequence: Synthetic oligonucleotide
ggucaaggaguguggagac

SEQ ID NO: 1662367 - RNA, 19 nt, Artificial Sequence
  Description of Artificial Sequence: Synthetic oligonucleotide
ugcuugagccaagcgcaag

SEQ ID NO: 1662368 - RNA, 19 nt, Artificial Sequence
  Description of Artificial Sequence: Synthetic oligonucleotide
cacaccauugguagaugga

SEQ ID NO: 1662369 - RNA, 19 nt, Artificial Sequence
  Description of Artificial Sequence: Synthetic oligonucleotide
agcccaugaaaugggcaag

SEQ ID NO: 1662370 - RNA, 19 nt, Artificial Sequence
  Description of Artificial Sequence: Synthetic oligonucleotide
gcaucaauguucccguauc

SEQ ID NO: 1662371 - RNA, 19 nt, Artificial Sequence
  Description of Artificial Sequence: Synthetic oligonucleotide
augaaaugggcaagaugga

SEQ ID NO: 1662372 - RNA, 19 nt, Artificial Sequence
  Description of Artificial Sequence: Synthetic oligonucleotide
ucguuccaugugcugacuu

SEQ ID NO: 1662373 - RNA, 19 nt, Artificial Sequence
  Description of Artificial Sequence: Synthetic oligonucleotide
ccuagggucaaugcggccc

SEQ ID NO: 1662374 - RNA, 19 nt, Artificial Sequence
  Description of Artificial Sequence: Synthetic oligonucleotide
aaagggcaguggaaaugcu

SEQ ID NO: 1662375 - RNA, 19 nt, Artificial Sequence
  Description of Artificial Sequence: Synthetic oligonucleotide
aucgauccgagcaaugguu

SEQ ID NO: 1662376 - RNA, 19 nt, Artificial Sequence
  Description of Artificial Sequence: Synthetic oligonucleotide
cauugguagauggauacgu

SEQ ID NO: 1662377 - RNA, 19 nt, Artificial Sequence
  Description of Artificial Sequence: Synthetic oligonucleotide
uucccguaucuguccaccu

SEQ ID NO: 1662378 - RNA, 19 nt, Artificial Sequence
  Description of Artificial Sequence: Synthetic oligonucleotide
gggcaugaaauccguaauc

SEQ ID NO: 1662379 - RNA, 19 nt, Artificial Sequence
  Description of Artificial Sequence: Synthetic oligonucleotide
agcgggaggaugugacaca

SEQ ID NO: 1662380 - RNA, 19 nt, Artificial Sequence
  Description of Artificial Sequence: Synthetic oligonucleotide
cccguaucuguccaccucc

SEQ ID NO: 1662381 - RNA, 19 nt, Artificial Sequence
  Description of Artificial Sequence: Synthetic oligonucleotide
gaucuccauagaugucauc

SEQ ID NO: 1662382 - RNA, 19 nt, Artificial Sequence
  Description of Artificial Sequence: Synthetic oligonucleotide
ggaugugacacaggucaag

SEQ ID NO: 1662383 - RNA, 19 nt, Artificial Sequence
  Description of Artificial Sequence: Synthetic oligonucleotide
cuccugcuugagccaagcg

SEQ ID NO: 1662384 - RNA, 19 nt, Artificial Sequence
  Description of Artificial Sequence: Synthetic oligonucleotide
cauucauauuugccccguc

SEQ ID NO: 1662385 - RNA, 19 nt, Artificial Sequence
  Description of Artificial Sequence: Synthetic oligonucleotide
aaccaggugcugaucucca

SEQ ID NO: 1662386 - RNA, 19 nt, Artificial Sequence
  Description of Artificial Sequence: Synthetic oligonucleotide
cacuccaauaggccccaug

SEQ ID NO: 1662387 - RNA, 19 nt, Artificial Sequence
  Description of Artificial Sequence: Synthetic oligonucleotide
agccacguacccucuugca

SEQ ID NO: 1662388 - RNA, 19 nt, Artificial Sequence
  Description of Artificial Sequence: Synthetic oligonucleotide
cacacaucgcugauguucu

SEQ ID NO: 1662389 - RNA, 19 nt, Artificial Sequence
  Description of Artificial Sequence: Synthetic oligonucleotide
gacggcagaugcccaccug

SEQ ID NO: 1662390 - RNA, 19 nt, Artificial Sequence
  Description of Artificial Sequence: Synthetic oligonucleotide
uacccucuugcaccccuaa

SEQ ID NO: 1662391 - RNA, 19 nt, Artificial Sequence
  Description of Artificial Sequence: Synthetic oligonucleotide
caucgcugauguucucuuc

SEQ ID NO: 1662392 - RNA, 19 nt, Artificial Sequence
  Description of Artificial Sequence: Synthetic oligonucleotide
uauuugccccguccaggua

SEQ ID NO: 1662393 - RNA, 19 nt, Artificial Sequence
  Description of Artificial Sequence: Synthetic oligonucleotide
caagcgcaagagaagaaau

SEQ ID NO: 1662394 - RNA, 19 nt, Artificial Sequence
  Description of Artificial Sequence: Synthetic oligonucleotide
gauuuaggugagagacauc

SEQ ID NO: 1662395 - RNA, 19 nt, Artificial Sequence
  Description of Artificial Sequence: Synthetic oligonucleotide
ggugcaaaccaggugcuga

SEQ ID NO: 1662396 - RNA, 19 nt, Artificial Sequence
  Description of Artificial Sequence: Synthetic oligonucleotide
ggaggcccuuuucuguucc

SEQ ID NO: 1662397 - RNA, 19 nt, Artificial Sequence
  Description of Artificial Sequence: Synthetic oligonucleotide
gcacuugcuggauucguuc

SEQ ID NO: 1662398 - RNA, 19 nt, Artificial Sequence
  Description of Artificial Sequence: Synthetic oligonucleotide
ccucucuagaauauggucu

SEQ ID NO: 1662399 - RNA, 19 nt, Artificial Sequence
  Description of Artificial Sequence: Synthetic oligonucleotide
guuggugaauaagggcaca

SEQ ID NO: 1662400 - RNA, 19 nt, Artificial Sequence
  Description of Artificial Sequence: Synthetic oligonucleotide
caaagucuccaggacggca

SEQ ID NO: 1662401 - RNA, 19 nt, Artificial Sequence
  Description of Artificial Sequence: Synthetic oligonucleotide
gguagaccuggccuccgug

SEQ ID NO: 1662402 - RNA, 19 nt, Artificial Sequence
  Description of Artificial Sequence: Synthetic oligonucleotide
cuggaucuccaugccugcc

SEQ ID NO: 1662403 - RNA, 19 nt, Artificial Sequence
  Description of Artificial Sequence: Synthetic oligonucleotide
cugcuaccucucuagaaua

SEQ ID NO: 1662404 - RNA, 19 nt, Artificial Sequence
  Description of Artificial Sequence: Synthetic oligonucleotide
ugcaaaccaggugcugauc

SEQ ID NO: 1662405 - RNA, 19 nt, Artificial Sequence
  Description of Artificial Sequence: Synthetic oligonucleotide
gccacguacccucuugcac

SEQ ID NO: 1662406 - RNA, 19 nt, Artificial Sequence
  Description of Artificial Sequence: Synthetic oligonucleotide
gcuaccucucuagaauaug

SEQ ID NO: 1662407 - RNA, 19 nt, Artificial Sequence
  Description of Artificial Sequence: Synthetic oligonucleotide
guagaccuggccuccgugu

SEQ ID NO: 1662408 - RNA, 19 nt, Artificial Sequence
  Description of Artificial Sequence: Synthetic oligonucleotide
caugccugccauguaggca

SEQ ID NO: 1662409 - RNA, 19 nt, Artificial Sequence
  Description of Artificial Sequence: Synthetic oligonucleotide
gcccuccucuauaucagcg

SEQ ID NO: 1662410 - RNA, 19 nt, Artificial Sequence
  Description of Artificial Sequence: Synthetic oligonucleotide
caccauugguagauggaua

SEQ ID NO: 1662411 - RNA, 19 nt, Artificial Sequence
  Description of Artificial Sequence: Synthetic oligonucleotide
agguagaccuggccuccgu

SEQ ID NO: 1662412 - RNA, 19 nt, Artificial Sequence
  Description of Artificial Sequence: Synthetic oligonucleotide
gcuggaucuccaugccugc

SEQ ID NO: 1662413 - RNA, 19 nt, Artificial Sequence
  Description of Artificial Sequence: Synthetic oligonucleotide
ccauugguagauggauacg

SEQ ID NO: 1662414 - RNA, 19 nt, Artificial Sequence
  Description of Artificial Sequence: Synthetic oligonucleotide
ccgagcaaugguuggccag

SEQ ID NO: 1662415 - RNA, 19 nt, Artificial Sequence
  Description of Artificial Sequence: Synthetic oligonucleotide
caccugggcauucauauuu

SEQ ID NO: 1662416 - RNA, 19 nt, Artificial Sequence
  Description of Artificial Sequence: Synthetic oligonucleotide
auccguaauccuggagccu

SEQ ID NO: 1662417 - RNA, 19 nt, Artificial Sequence
  Description of Artificial Sequence: Synthetic oligonucleotide
ucaaugcggcccuccucua

SEQ ID NO: 1662418 - RNA, 19 nt, Artificial Sequence
  Description of Artificial Sequence: Synthetic oligonucleotide
caucgauccgagcaauggu

SEQ ID NO: 1662419 - RNA, 19 nt, Artificial Sequence
  Description of Artificial Sequence: Synthetic oligonucleotide
gcaugaaauccguaauccu

SEQ ID NO: 1662420 - RNA, 19 nt, Artificial Sequence
  Description of Artificial Sequence: Synthetic oligonucleotide
aggugcaaaccaggugcug

SEQ ID NO: 1662421 - RNA, 19 nt, Artificial Sequence
  Description of Artificial Sequence: Synthetic oligonucleotide
augcggcccuccucuauau

SEQ ID NO: 1662422 - RNA, 19 nt, Artificial Sequence
  Description of Artificial Sequence: Synthetic oligonucleotide
ugcggcccuccucuauauc

SEQ ID NO: 1662423 - RNA, 19 nt, Artificial Sequence
  Description of Artificial Sequence: Synthetic oligonucleotide
gcgggaggaugugacacag

SEQ ID NO: 1662424 - RNA, 19 nt, Artificial Sequence
  Description of Artificial Sequence: Synthetic oligonucleotide
uguccucauucgguuuuau

SEQ ID NO: 1662425 - RNA, 19 nt, Artificial Sequence
  Description of Artificial Sequence: Synthetic oligonucleotide
cauggggaaugcagaaggu

SEQ ID NO: 1662426 - RNA, 19 nt, Artificial Sequence
  Description of Artificial Sequence: Synthetic oligonucleotide
ugggaugacugggcagaaa

SEQ ID NO: 1662427 - RNA, 19 nt, Artificial Sequence
  Description of Artificial Sequence: Synthetic oligonucleotide
acguacccucuugcacccc

SEQ ID NO: 1662428 - RNA, 19 nt, Artificial Sequence
  Description of Artificial Sequence: Synthetic oligonucleotide
acccucuugcaccccuaaa

SEQ ID NO: 1662429 - RNA, 19 nt, Artificial Sequence
  Description of Artificial Sequence: Synthetic oligonucleotide
accacucaccaugcuaauu

SEQ ID NO: 1662430 - RNA, 19 nt, Artificial Sequence
  Description of Artificial Sequence: Synthetic oligonucleotide
uucuugccggaugcugauc

SEQ ID NO: 1662431 - RNA, 19 nt, Artificial Sequence
  Description of Artificial Sequence: Synthetic oligonucleotide
gaugcccaccugggcauuc

SEQ ID NO: 1662432 - RNA, 19 nt, Artificial Sequence
  Description of Artificial Sequence: Synthetic oligonucleotide
gagacccuuuguuucccau

SEQ ID NO: 1662433 - RNA, 19 nt, Artificial Sequence
  Description of Artificial Sequence: Synthetic oligonucleotide
gucaaggaguguggagaca

SEQ ID NO: 1662434 - RNA, 19 nt, Artificial Sequence
  Description of Artificial Sequence: Synthetic oligonucleotide
gcgcaagagaagaaauauc

SEQ ID NO: 1662435 - RNA, 19 nt, Artificial Sequence
  Description of Artificial Sequence: Synthetic oligonucleotide
ccaugcuaauuguguuuac

SEQ ID NO: 1662436 - RNA, 19 nt, Artificial Sequence
  Description of Artificial Sequence: Synthetic oligonucleotide
cccucuugcaccccuaaaa

SEQ ID NO: 1662437 - RNA, 19 nt, Artificial Sequence
  Description of Artificial Sequence: Synthetic oligonucleotide
ggaggaugugacacagguc

SEQ ID NO: 1662438 - RNA, 19 nt, Artificial Sequence
  Description of Artificial Sequence: Synthetic oligonucleotide
guuuauccaccauggccuu

SEQ ID NO: 1662439 - RNA, 19 nt, Artificial Sequence
  Description of Artificial Sequence: Synthetic oligonucleotide
gugcaaaccaggugcugau

SEQ ID NO: 1662440 - RNA, 19 nt, Artificial Sequence
  Description of Artificial Sequence: Synthetic oligonucleotide
guaggggcaugaaauccgu

SEQ ID NO: 1662441 - RNA, 19 nt, Artificial Sequence
  Description of Artificial Sequence: Synthetic oligonucleotide
gauggaacuggagccccau

SEQ ID NO: 1662442 - RNA, 19 nt, Artificial Sequence
  Description of Artificial Sequence: Synthetic oligonucleotide
cauuaccuugaaagauuau

SEQ ID NO: 1662443 - RNA, 19 nt, Artificial Sequence
  Description of Artificial Sequence: Synthetic oligonucleotide
caggugcaaaccaggugcu

SEQ ID NO: 1662444 - RNA, 19 nt, Artificial Sequence
  Description of Artificial Sequence: Synthetic oligonucleotide
ccgaaaauggagacucgua

SEQ ID NO: 1662445 - RNA, 19 nt, Artificial Sequence
  Description of Artificial Sequence: Synthetic oligonucleotide
gcugaucuccauagauguc

SEQ ID NO: 1662446 - RNA, 19 nt, Artificial Sequence
  Description of Artificial Sequence: Synthetic oligonucleotide
cuaaucgcuuggccaugua

SEQ ID NO: 1662447 - RNA, 19 nt, Artificial Sequence
  Description of Artificial Sequence: Synthetic oligonucleotide
caugagccacguacccucu

SEQ ID NO: 1662448 - RNA, 19 nt, Artificial Sequence
  Description of Artificial Sequence: Synthetic oligonucleotide
ccagguguccucauucggu

SEQ ID NO: 1662449 - RNA, 19 nt, Artificial Sequence
  Description of Artificial Sequence: Synthetic oligonucleotide
gcggcacaguccccaccgg

SEQ ID NO: 1662450 - RNA, 19 nt, Artificial Sequence
  Description of Artificial Sequence: Synthetic oligonucleotide
cccuagggucaaugcggcc

SEQ ID NO: 1662451 - RNA, 19 nt, Artificial Sequence
  Description of Artificial Sequence: Synthetic oligonucleotide
cuccucuauaucagcgauu

SEQ ID NO: 1662452 - RNA, 19 nt, Artificial Sequence
  Description of Artificial Sequence: Synthetic oligonucleotide
ccguccagguagaccuggc

SEQ ID NO: 1662453 - RNA, 19 nt, Artificial Sequence
  Description of Artificial Sequence: Synthetic oligonucleotide
cguaucuguccaccuccac

SEQ ID NO: 1662454 - RNA, 19 nt, Artificial Sequence
  Description of Artificial Sequence: Synthetic oligonucleotide
ccucuauaucagcgauuuc

SEQ ID NO: 1662455 - RNA, 19 nt, Artificial Sequence
  Description of Artificial Sequence: Synthetic oligonucleotide
accggccagguguccucau

SEQ ID NO: 1662456 - RNA, 19 nt, Artificial Sequence
  Description of Artificial Sequence: Synthetic oligonucleotide
cgugaucaugauggcggcc

SEQ ID NO: 1662457 - RNA, 19 nt, Artificial Sequence
  Description of Artificial Sequence: Synthetic oligonucleotide
gcauucauauuugccccgu

SEQ ID NO: 1662458 - RNA, 19 nt, Artificial Sequence
  Description of Artificial Sequence: Synthetic oligonucleotide
cuugccggaugcugaucau

SEQ ID NO: 1662459 - RNA, 19 nt, Artificial Sequence
  Description of Artificial Sequence: Synthetic oligonucleotide
ccguaucuguccaccucca

SEQ ID NO: 1662460 - RNA, 19 nt, Artificial Sequence
  Description of Artificial Sequence: Synthetic oligonucleotide
ccuccucuauaucagcgau

SEQ ID NO: 1662461 - RNA, 19 nt, Artificial Sequence
  Description of Artificial Sequence: Synthetic oligonucleotide
caaugcggcccuccucuau

SEQ ID NO: 1662462 - RNA, 19 nt, Artificial Sequence
  Description of Artificial Sequence: Synthetic oligonucleotide
ccucuuugagacccuuugu

SEQ ID NO: 1662463 - RNA, 19 nt, Artificial Sequence
  Description of Artificial Sequence: Synthetic oligonucleotide
guacccucuugcaccccua

SEQ ID NO: 1662464 - RNA, 19 nt, Artificial Sequence
  Description of Artificial Sequence: Synthetic oligonucleotide
ggacggcagaugcccaccu

SEQ ID NO: 1662465 - RNA, 19 nt, Artificial Sequence
  Description of Artificial Sequence: Synthetic oligonucleotide
ccaccggccagguguccuc

SEQ ID NO: 1662466 - RNA, 19 nt, Artificial Sequence
  Description of Artificial Sequence: Synthetic oligonucleotide
ggugagcggcaucaauguu

SEQ ID NO: 1662467 - RNA, 19 nt, Artificial Sequence
  Description of Artificial Sequence: Synthetic oligonucleotide
caccggccagguguccuca

SEQ ID NO: 1662468 - RNA, 19 nt, Artificial Sequence
  Description of Artificial Sequence: Synthetic oligonucleotide
ccuccguguuggugaauaa

SEQ ID NO: 1662469 - RNA, 19 nt, Artificial Sequence
  Description of Artificial Sequence: Synthetic oligonucleotide
ggcacuugcuggauucguu

SEQ ID NO: 1662470 - RNA, 19 nt, Artificial Sequence
  Description of Artificial Sequence: Synthetic oligonucleotide
ccccguccagguagaccug

SEQ ID NO: 1662471 - RNA, 19 nt, Artificial Sequence
  Description of Artificial Sequence: Synthetic oligonucleotide
cagcgauuucuugccggau

SEQ ID NO: 1662472 - RNA, 19 nt, Artificial Sequence
  Description of Artificial Sequence: Synthetic oligonucleotide
cguacccucuugcaccccu

SEQ ID NO: 1662473 - RNA, 19 nt, Artificial Sequence
  Description of Artificial Sequence: Synthetic oligonucleotide
ccccaccggccaggugucc

SEQ ID NO: 1662474 - RNA, 19 nt, Artificial Sequence
  Description of Artificial Sequence: Synthetic oligonucleotide
ccggccagguguccucauu

SEQ ID NO: 1662475 - RNA, 19 nt, Artificial Sequence
  Description of Artificial Sequence: Synthetic oligonucleotide
ggccuccguguuggugaau

SEQ ID NO: 1662476 - RNA, 19 nt, Artificial Sequence
  Description of Artificial Sequence: Synthetic oligonucleotide
aaaggagaguccuagcugc

SEQ ID NO: 1662477 - RNA, 19 nt, Artificial Sequence
  Description of Artificial Sequence: Synthetic oligonucleotide
aagucugcaggucuuaggc

SEQ ID NO: 1662478 - RNA, 19 nt, Artificial Sequence
  Description of Artificial Sequence: Synthetic oligonucleotide
agaucugugacacagacug

SEQ ID NO: 1662479 - RNA, 19 nt, Artificial Sequence
  Description of Artificial Sequence: Synthetic oligonucleotide
aauauaacucuuuggcuuc

SEQ ID NO: 1662480 - RNA, 19 nt, Artificial Sequence
  Description of Artificial Sequence: Synthetic oligonucleotide
aauacuguagagguccugc

SEQ ID NO: 1662481 - RNA, 19 nt, Artificial Sequence
  Description of Artificial Sequence: Synthetic oligonucleotide
aaaugugaacuauacagga

SEQ ID NO: 1662482 - RNA, 19 nt, Artificial Sequence
  Description of Artificial Sequence: Synthetic oligonucleotide
aacuauacaggaucguauc

SEQ ID NO: 1662483 - RNA, 19 nt, Artificial Sequence
  Description of Artificial Sequence: Synthetic oligonucleotide
caugaaacuauucucaaug

SEQ ID NO: 1662484 - RNA, 19 nt, Artificial Sequence
  Description of Artificial Sequence: Synthetic oligonucleotide
augugaacuauacaggauc

SEQ ID NO: 1662485 - RNA, 19 nt, Artificial Sequence
  Description of Artificial Sequence: Synthetic oligonucleotide
auuacaugaaaugugaacu

SEQ ID NO: 1662486 - RNA, 19 nt, Artificial Sequence
  Description of Artificial Sequence: Synthetic oligonucleotide
gaaaugugaacuauacagg

SEQ ID NO: 1662487 - RNA, 19 nt, Artificial Sequence
  Description of Artificial Sequence: Synthetic oligonucleotide
aggaagucuauuuuaaaug

SEQ ID NO: 1662488 - RNA, 19 nt, Artificial Sequence
  Description of Artificial Sequence: Synthetic oligonucleotide
cuuuguaccaccucugccc

SEQ ID NO: 1662489 - RNA, 19 nt, Artificial Sequence
  Description of Artificial Sequence: Synthetic oligonucleotide
uagagcuccaccaagcgug

SEQ ID NO: 1662490 - RNA, 19 nt, Artificial Sequence
  Description of Artificial Sequence: Synthetic oligonucleotide
ucuuaggacaucucugccg

SEQ ID NO: 1662491 - RNA, 19 nt, Artificial Sequence
  Description of Artificial Sequence: Synthetic oligonucleotide
cauucuagcuggcagaggc

SEQ ID NO: 1662492 - RNA, 19 nt, Artificial Sequence
  Description of Artificial Sequence: Synthetic oligonucleotide
ugaaacuauucucaaugca

SEQ ID NO: 1662493 - RNA, 19 nt, Artificial Sequence
  Description of Artificial Sequence: Synthetic oligonucleotide
aggucaugaaacuauucuc

SEQ ID NO: 1662494 - RNA, 19 nt, Artificial Sequence
  Description of Artificial Sequence: Synthetic oligonucleotide
aggaucugugcacagaaag

SEQ ID NO: 1662495 - RNA, 19 nt, Artificial Sequence
  Description of Artificial Sequence: Synthetic oligonucleotide
acaggaucguaucccagcc

SEQ ID NO: 1662496 - RNA, 19 nt, Artificial Sequence
  Description of Artificial Sequence: Synthetic oligonucleotide
aacaaccuagggcagccuc

SEQ ID NO: 1662497 - RNA, 19 nt, Artificial Sequence
  Description of Artificial Sequence: Synthetic oligonucleotide
ugucuuaggacaucucugc

SEQ ID NO: 1662498 - RNA, 19 nt, Artificial Sequence
  Description of Artificial Sequence: Synthetic oligonucleotide
ugacaaugggcacagcccc

SEQ ID NO: 1662499 - RNA, 19 nt, Artificial Sequence
  Description of Artificial Sequence: Synthetic oligonucleotide
ugaggauuacaugaaaugu

SEQ ID NO: 1662500 - RNA, 19 nt, Artificial Sequence
  Description of Artificial Sequence: Synthetic oligonucleotide
aaacagagcaucccagcug

SEQ ID NO: 1662501 - RNA, 19 nt, Artificial Sequence
  Description of Artificial Sequence: Synthetic oligonucleotide
auuucuugaggauuacaug

SEQ ID NO: 1662502 - RNA, 19 nt, Artificial Sequence
  Description of Artificial Sequence: Synthetic oligonucleotide
ugccauauguucuucugag

SEQ ID NO: 1662503 - RNA, 19 nt, Artificial Sequence
  Description of Artificial Sequence: Synthetic oligonucleotide
gucgaaagaaaagaugcgg

SEQ ID NO: 1662504 - RNA, 19 nt, Artificial Sequence
  Description of Artificial Sequence: Synthetic oligonucleotide
gaaaggagaguccuagcug

SEQ ID NO: 1662505 - RNA, 19 nt, Artificial Sequence
  Description of Artificial Sequence: Synthetic oligonucleotide
ucguaucccagccaggccc

SEQ ID NO: 1662506 - RNA, 19 nt, Artificial Sequence
  Description of Artificial Sequence: Synthetic oligonucleotide
aaucguggugagugugagc

SEQ ID NO: 1662507 - RNA, 19 nt, Artificial Sequence
  Description of Artificial Sequence: Synthetic oligonucleotide
gacgauguagguguucugg

SEQ ID NO: 1662508 - RNA, 19 nt, Artificial Sequence
  Description of Artificial Sequence: Synthetic oligonucleotide
uguacuacugacagucacu

SEQ ID NO: 1662509 - RNA, 19 nt, Artificial Sequence
  Description of Artificial Sequence: Synthetic oligonucleotide
gaggauuacaugaaaugug

SEQ ID NO: 1662510 - RNA, 19 nt, Artificial Sequence
  Description of Artificial Sequence: Synthetic oligonucleotide
uguucuggcagcucgcagc

SEQ ID NO: 1662511 - RNA, 19 nt, Artificial Sequence
  Description of Artificial Sequence: Synthetic oligonucleotide
uacuuggagaaagagguca

SEQ ID NO: 1662512 - RNA, 19 nt, Artificial Sequence
  Description of Artificial Sequence: Synthetic oligonucleotide
aggaucguaucccagccag

SEQ ID NO: 1662513 - RNA, 19 nt, Artificial Sequence
  Description of Artificial Sequence: Synthetic oligonucleotide
uggaauaggagugcucccg

SEQ ID NO: 1662514 - RNA, 19 nt, Artificial Sequence
  Description of Artificial Sequence: Synthetic oligonucleotide
cugcaguugacccugggag

SEQ ID NO: 1662515 - RNA, 19 nt, Artificial Sequence
  Description of Artificial Sequence: Synthetic oligonucleotide
uccgccaugucucacagua

SEQ ID NO: 1662516 - RNA, 19 nt, Artificial Sequence
  Description of Artificial Sequence: Synthetic oligonucleotide
uacuguagagguccugcag

SEQ ID NO: 1662517 - RNA, 19 nt, Artificial Sequence
  Description of Artificial Sequence: Synthetic oligonucleotide
cauagagcuccaccaagcg

SEQ ID NO: 1662518 - RNA, 19 nt, Artificial Sequence
  Description of Artificial Sequence: Synthetic oligonucleotide
ccgucgaaagaaaagaugc

SEQ ID NO: 1662519 - RNA, 19 nt, Artificial Sequence
  Description of Artificial Sequence: Synthetic oligonucleotide
uuacaugaaaugugaacua

SEQ ID NO: 1662520 - RNA, 19 nt, Artificial Sequence
  Description of Artificial Sequence: Synthetic oligonucleotide
agccugaaaacagagcauc

SEQ ID NO: 1662521 - RNA, 19 nt, Artificial Sequence
  Description of Artificial Sequence: Synthetic oligonucleotide
uaggacaucucugccgucg

SEQ ID NO: 1662522 - RNA, 19 nt, Artificial Sequence
  Description of Artificial Sequence: Synthetic oligonucleotide
ccauauguucuucugaggc

SEQ ID NO: 1662523 - RNA, 19 nt, Artificial Sequence
  Description of Artificial Sequence: Synthetic oligonucleotide
uacgcauaggagcuguggu

SEQ ID NO: 1662524 - RNA, 19 nt, Artificial Sequence
  Description of Artificial Sequence: Synthetic oligonucleotide
aggauuacaugaaauguga

SEQ ID NO: 1662525 - RNA, 19 nt, Artificial Sequence
  Description of Artificial Sequence: Synthetic oligonucleotide
auauaacucuuuggcuucc

SEQ ID NO: 1662526 - RNA, 19 nt, Artificial Sequence
  Description of Artificial Sequence: Synthetic oligonucleotide
uggccugacuucaccauag

SEQ ID NO: 1662527 - RNA, 19 nt, Artificial Sequence
  Description of Artificial Sequence: Synthetic oligonucleotide
gaaggaucugugcacagaa

SEQ ID NO: 1662528 - RNA, 19 nt, Artificial Sequence
  Description of Artificial Sequence: Synthetic oligonucleotide
ugugcacagaaagaugcca

SEQ ID NO: 1662529 - RNA, 19 nt, Artificial Sequence
  Description of Artificial Sequence: Synthetic oligonucleotide
gaggucaugaaacuauucu

SEQ ID NO: 1662530 - RNA, 19 nt, Artificial Sequence
  Description of Artificial Sequence: Synthetic oligonucleotide
cacgcaugccaccugacag

SEQ ID NO: 1662531 - RNA, 19 nt, Artificial Sequence
  Description of Artificial Sequence: Synthetic oligonucleotide
ugaacuauacaggaucgua

SEQ ID NO: 1662532 - RNA, 19 nt, Artificial Sequence
  Description of Artificial Sequence: Synthetic oligonucleotide
uccuuuguaccaccucugc

SEQ ID NO: 1662533 - RNA, 19 nt, Artificial Sequence
  Description of Artificial Sequence: Synthetic oligonucleotide
uccgggguaaggcugugug

SEQ ID NO: 1662534 - RNA, 19 nt, Artificial Sequence
  Description of Artificial Sequence: Synthetic oligonucleotide
acgcacaauacuguagagg

SEQ ID NO: 1662535 - RNA, 19 nt, Artificial Sequence
  Description of Artificial Sequence: Synthetic oligonucleotide
agcacgacgcacaauacug

SEQ ID NO: 1662536 - RNA, 19 nt, Artificial Sequence
  Description of Artificial Sequence: Synthetic oligonucleotide
ucaugaaacuauucucaau

SEQ ID NO: 1662537 - RNA, 19 nt, Artificial Sequence
  Description of Artificial Sequence: Synthetic oligonucleotide
uacugacagucacugggug

SEQ ID NO: 1662538 - RNA, 19 nt, Artificial Sequence
  Description of Artificial Sequence: Synthetic oligonucleotide
aaggagaguccuagcugcc

SEQ ID NO: 1662539 - RNA, 19 nt, Artificial Sequence
  Description of Artificial Sequence: Synthetic oligonucleotide
guacuacugacagucacug

SEQ ID NO: 1662540 - RNA, 19 nt, Artificial Sequence
  Description of Artificial Sequence: Synthetic oligonucleotide
cuuaggcaacaaccuaggg

SEQ ID NO: 1662541 - RNA, 19 nt, Artificial Sequence
  Description of Artificial Sequence: Synthetic oligonucleotide
cauggguggucccaguuac

SEQ ID NO: 1662542 - RNA, 19 nt, Artificial Sequence
  Description of Artificial Sequence: Synthetic oligonucleotide
acaaccuagggcagccucc

SEQ ID NO: 1662543 - RNA, 19 nt, Artificial Sequence
  Description of Artificial Sequence: Synthetic oligonucleotide
gaauaggagugcucccgcc

SEQ ID NO: 1662544 - RNA, 19 nt, Artificial Sequence
  Description of Artificial Sequence: Synthetic oligonucleotide
gacgcacaauacuguagag

SEQ ID NO: 1662545 - RNA, 19 nt, Artificial Sequence
  Description of Artificial Sequence: Synthetic oligonucleotide
uggagaaagaggucaugaa

SEQ ID NO: 1662546 - RNA, 19 nt, Artificial Sequence
  Description of Artificial Sequence: Synthetic oligonucleotide
auagagcuccaccaagcgu

SEQ ID NO: 1662547 - RNA, 19 nt, Artificial Sequence
  Description of Artificial Sequence: Synthetic oligonucleotide
gaaagaugccaggcuagag

SEQ ID NO: 1662548 - RNA, 19 nt, Artificial Sequence
  Description of Artificial Sequence: Synthetic oligonucleotide
gucagcacgacgcacaaua

SEQ ID NO: 1662549 - RNA, 19 nt, Artificial Sequence
  Description of Artificial Sequence: Synthetic oligonucleotide
agcugcuaccucauugccc

SEQ ID NO: 1662550 - RNA, 19 nt, Artificial Sequence
  Description of Artificial Sequence: Synthetic oligonucleotide
aucaaccugcgcccgcugg

SEQ ID NO: 1662551 - RNA, 19 nt, Artificial Sequence
  Description of Artificial Sequence: Synthetic oligonucleotide
agugugagcaggugagccu

SEQ ID NO: 1662552 - RNA, 19 nt, Artificial Sequence
  Description of Artificial Sequence: Synthetic oligonucleotide
acgcauaggagcuguggug

SEQ ID NO: 1662553 - RNA, 19 nt, Artificial Sequence
  Description of Artificial Sequence: Synthetic oligonucleotide
ggaagucuauuuuaaaugu

SEQ ID NO: 1662554 - RNA, 19 nt, Artificial Sequence
  Description of Artificial Sequence: Synthetic oligonucleotide
aucucugccgucgaaagaa

SEQ ID NO: 1662555 - RNA, 19 nt, Artificial Sequence
  Description of Artificial Sequence: Synthetic oligonucleotide
agcaagugccugccuguac

SEQ ID NO: 1662556 - RNA, 19 nt, Artificial Sequence
  Description of Artificial Sequence: Synthetic oligonucleotide
cuguccgcagcacucacac

SEQ ID NO: 1662557 - RNA, 19 nt, Artificial Sequence
  Description of Artificial Sequence: Synthetic oligonucleotide
cacaggacgauguaggugu

SEQ ID NO: 1662558 - RNA, 19 nt, Artificial Sequence
  Description of Artificial Sequence: Synthetic oligonucleotide
gucuuaggacaucucugcc

SEQ ID NO: 1662559 - RNA, 19 nt, Artificial Sequence
  Description of Artificial Sequence: Synthetic oligonucleotide
auacuguagagguccugca

SEQ ID NO: 1662560 - RNA, 19 nt, Artificial Sequence
  Description of Artificial Sequence: Synthetic oligonucleotide
ccuacuuggagaaagaggu

SEQ ID NO: 1662561 - RNA, 19 nt, Artificial Sequence
  Description of Artificial Sequence: Synthetic oligonucleotide
gaaaagaugcgggccccag

SEQ ID NO: 1662562 - RNA, 19 nt, Artificial Sequence
  Description of Artificial Sequence: Synthetic oligonucleotide
ucagcacgacgcacaauac

SEQ ID NO: 1662563 - RNA, 19 nt, Artificial Sequence
  Description of Artificial Sequence: Synthetic oligonucleotide
uguaugggcugcccucgug

SEQ ID NO: 1662564 - RNA, 19 nt, Artificial Sequence
  Description of Artificial Sequence: Synthetic oligonucleotide
agugccugccuguacuacu

SEQ ID NO: 1662565 - RNA, 19 nt, Artificial Sequence
  Description of Artificial Sequence: Synthetic oligonucleotide
agaugcucccugcacugug

SEQ ID NO: 1662566 - RNA, 19 nt, Artificial Sequence
  Description of Artificial Sequence: Synthetic oligonucleotide
uauggccugacuucaccau

SEQ ID NO: 1662567 - RNA, 19 nt, Artificial Sequence
  Description of Artificial Sequence: Synthetic oligonucleotide
agaggcccuacuuggagaa

SEQ ID NO: 1662568 - RNA, 19 nt, Artificial Sequence
  Description of Artificial Sequence: Synthetic oligonucleotide
ucacuggguggugaaagga

SEQ ID NO: 1662569 - RNA, 19 nt, Artificial Sequence
  Description of Artificial Sequence: Synthetic oligonucleotide
uggaaaucguggugagugu

SEQ ID NO: 1662570 - RNA, 19 nt, Artificial Sequence
  Description of Artificial Sequence: Synthetic oligonucleotide
aagaucugugacacagacu

SEQ ID NO: 1662571 - RNA, 19 nt, Artificial Sequence
  Description of Artificial Sequence: Synthetic oligonucleotide
ccaggcuagagaaagucug

SEQ ID NO: 1662572 - RNA, 19 nt, Artificial Sequence
  Description of Artificial Sequence: Synthetic oligonucleotide
uaccucauugcccguccca

SEQ ID NO: 1662573 - RNA, 19 nt, Artificial Sequence
  Description of Artificial Sequence: Synthetic oligonucleotide
ucccaguuaccaccuggug

SEQ ID NO: 1662574 - RNA, 19 nt, Artificial Sequence
  Description of Artificial Sequence: Synthetic oligonucleotide
cccacggucagcacgacgc

SEQ ID NO: 1662575 - RNA, 19 nt, Artificial Sequence
  Description of Artificial Sequence: Synthetic oligonucleotide
acuguguccguccuuugua

SEQ ID NO: 1662576 - RNA, 19 nt, Artificial Sequence
  Description of Artificial Sequence: Synthetic oligonucleotide
gagcugcuaccucauugcc

SEQ ID NO: 1662577 - RNA, 19 nt, Artificial Sequence
  Description of Artificial Sequence: Synthetic oligonucleotide
aggucuuaggcaacaaccu

SEQ ID NO: 1662578 - RNA, 19 nt, Artificial Sequence
  Description of Artificial Sequence: Synthetic oligonucleotide
gaaaucguggugaguguga

SEQ ID NO: 1662579 - RNA, 19 nt, Artificial Sequence
  Description of Artificial Sequence: Synthetic oligonucleotide
cuguguccguccuuuguac

SEQ ID NO: 1662580 - RNA, 19 nt, Artificial Sequence
  Description of Artificial Sequence: Synthetic oligonucleotide
ugcagccuagaggacaaga

SEQ ID NO: 1662581 - RNA, 19 nt, Artificial Sequence
  Description of Artificial Sequence: Synthetic oligonucleotide
agcguguuggaagaucugu

SEQ ID NO: 1662582 - RNA, 19 nt, Artificial Sequence
  Description of Artificial Sequence: Synthetic oligonucleotide
ucuguccgcagcacucaca

SEQ ID NO: 1662583 - RNA, 19 nt, Artificial Sequence
  Description of Artificial Sequence: Synthetic oligonucleotide
cucaaugcacaggacgaug

SEQ ID NO: 1662584 - RNA, 19 nt, Artificial Sequence
  Description of Artificial Sequence: Synthetic oligonucleotide
uagagaaagucugcagguc

SEQ ID NO: 1662585 - RNA, 19 nt, Artificial Sequence
  Description of Artificial Sequence: Synthetic oligonucleotide
agccguggaauaggagugc

SEQ ID NO: 1662586 - RNA, 19 nt, Artificial Sequence
  Description of Artificial Sequence: Synthetic oligonucleotide
cuugaggauuacaugaaau

SEQ ID NO: 1662587 - RNA, 19 nt, Artificial Sequence
  Description of Artificial Sequence: Synthetic oligonucleotide
ggcuagagaaagucugcag

SEQ ID NO: 1662588 - RNA, 19 nt, Artificial Sequence
  Description of Artificial Sequence: Synthetic oligonucleotide
guggaauaggagugcuccc

SEQ ID NO: 1662589 - RNA, 19 nt, Artificial Sequence
  Description of Artificial Sequence: Synthetic oligonucleotide
gguaaggcugugugucugg

SEQ ID NO: 1662590 - RNA, 19 nt, Artificial Sequence
  Description of Artificial Sequence: Synthetic oligonucleotide
agaggacaagaaggcacgg

SEQ ID NO: 1662591 - RNA, 19 nt, Artificial Sequence
  Description of Artificial Sequence: Synthetic oligonucleotide
cuacuuggagaaagagguc

SEQ ID NO: 1662592 - RNA, 19 nt, Artificial Sequence
  Description of Artificial Sequence: Synthetic oligonucleotide
gaacuccgggguaaggcug

SEQ ID NO: 1662593 - RNA, 19 nt, Artificial Sequence
  Description of Artificial Sequence: Synthetic oligonucleotide
cuuaggacaucucugccgu

SEQ ID NO: 1662594 - RNA, 19 nt, Artificial Sequence
  Description of Artificial Sequence: Synthetic oligonucleotide
gccuguacuacugacaguc

SEQ ID NO: 1662595 - RNA, 19 nt, Artificial Sequence
  Description of Artificial Sequence: Synthetic oligonucleotide
cuauggccugacuucacca

SEQ ID NO: 1662596 - RNA, 19 nt, Artificial Sequence
  Description of Artificial Sequence: Synthetic oligonucleotide
gccauauguucuucugagg

SEQ ID NO: 1662597 - RNA, 19 nt, Artificial Sequence
  Description of Artificial Sequence: Synthetic oligonucleotide
uccaucaaccugcgcccgc

SEQ ID NO: 1662598 - RNA, 19 nt, Artificial Sequence
  Description of Artificial Sequence: Synthetic oligonucleotide
ggaauaggagugcucccgc

SEQ ID NO: 1662599 - RNA, 19 nt, Artificial Sequence
  Description of Artificial Sequence: Synthetic oligonucleotide
guaugggcugcccucguga

SEQ ID NO: 1662600 - RNA, 19 nt, Artificial Sequence
  Description of Artificial Sequence: Synthetic oligonucleotide
uccaccaagcguguuggaa

SEQ ID NO: 1662601 - RNA, 19 nt, Artificial Sequence
  Description of Artificial Sequence: Synthetic oligonucleotide
caggaagucuauuuuaaau

SEQ ID NO: 1662602 - RNA, 19 nt, Artificial Sequence
  Description of Artificial Sequence: Synthetic oligonucleotide
ugagugugagcaggugagc

SEQ ID NO: 1662603 - RNA, 19 nt, Artificial Sequence
  Description of Artificial Sequence: Synthetic oligonucleotide
caucugcccgccagggccg

SEQ ID NO: 1662604 - RNA, 19 nt, Artificial Sequence
  Description of Artificial Sequence: Synthetic oligonucleotide
ugugucuggcagccguggu

SEQ ID NO: 1662605 - RNA, 19 nt, Artificial Sequence
  Description of Artificial Sequence: Synthetic oligonucleotide
ugcccgucccaugugggag

SEQ ID NO: 1662606 - RNA, 19 nt, Artificial Sequence
  Description of Artificial Sequence: Synthetic oligonucleotide
gaacuauacaggaucguau

SEQ ID NO: 1662607 - RNA, 19 nt, Artificial Sequence
  Description of Artificial Sequence: Synthetic oligonucleotide
guggugguguggaacuccg

SEQ ID NO: 1662608 - RNA, 19 nt, Artificial Sequence
  Description of Artificial Sequence: Synthetic oligonucleotide
caugucucacaguagcucu

SEQ ID NO: 1662609 - RNA, 19 nt, Artificial Sequence
  Description of Artificial Sequence: Synthetic oligonucleotide
agcucgcagccuucuguuc

SEQ ID NO: 1662610 - RNA, 19 nt, Artificial Sequence
  Description of Artificial Sequence: Synthetic oligonucleotide
uaugggcugcccucgugaa

SEQ ID NO: 1662611 - RNA, 19 nt, Artificial Sequence
  Description of Artificial Sequence: Synthetic oligonucleotide
acgacgcacaauacuguag

SEQ ID NO: 1662612 - RNA, 19 nt, Artificial Sequence
  Description of Artificial Sequence: Synthetic oligonucleotide
gugucuggcagccguggug

SEQ ID NO: 1662613 - RNA, 19 nt, Artificial Sequence
  Description of Artificial Sequence: Synthetic oligonucleotide
uccguccuuuguaccaccu

SEQ ID NO: 1662614 - RNA, 19 nt, Artificial Sequence
  Description of Artificial Sequence: Synthetic oligonucleotide
guguccguccuuuguacca

SEQ ID NO: 1662615 - RNA, 19 nt, Artificial Sequence
  Description of Artificial Sequence: Synthetic oligonucleotide
caagcguguuggaagaucu

SEQ ID NO: 1662616 - RNA, 19 nt, Artificial Sequence
  Description of Artificial Sequence: Synthetic oligonucleotide
auugcccgucccauguggg

SEQ ID NO: 1662617 - RNA, 19 nt, Artificial Sequence
  Description of Artificial Sequence: Synthetic oligonucleotide
ccugaaaacagagcauccc

SEQ ID NO: 1662618 - RNA, 19 nt, Artificial Sequence
  Description of Artificial Sequence: Synthetic oligonucleotide
augugggagugcuguccgg

SEQ ID NO: 1662619 - RNA, 19 nt, Artificial Sequence
  Description of Artificial Sequence: Synthetic oligonucleotide
cguggaauaggagugcucc

SEQ ID NO: 1662620 - RNA, 19 nt, Artificial Sequence
  Description of Artificial Sequence: Synthetic oligonucleotide
ggaccaggaugucaucugc

SEQ ID NO: 1662621 - RNA, 19 nt, Artificial Sequence
  Description of Artificial Sequence: Synthetic oligonucleotide
cgucgaaagaaaagaugcg

SEQ ID NO: 1662622 - RNA, 19 nt, Artificial Sequence
  Description of Artificial Sequence: Synthetic oligonucleotide
ggugucuuaggacaucucu

SEQ ID NO: 1662623 - RNA, 19 nt, Artificial Sequence
  Description of Artificial Sequence: Synthetic oligonucleotide
gcuauggccugacuucacc

SEQ ID NO: 1662624 - RNA, 19 nt, Artificial Sequence
  Description of Artificial Sequence: Synthetic oligonucleotide
ucguggugagugugagcag

SEQ ID NO: 1662625 - RNA, 19 nt, Artificial Sequence
  Description of Artificial Sequence: Synthetic oligonucleotide
ucucugccgucgaaagaaa

SEQ ID NO: 1662626 - RNA, 19 nt, Artificial Sequence
  Description of Artificial Sequence: Synthetic oligonucleotide
uguccguccuuuguaccac

SEQ ID NO: 1662627 - RNA, 19 nt, Artificial Sequence
  Description of Artificial Sequence: Synthetic oligonucleotide
gaugcgggccccaggcugc

SEQ ID NO: 1662628 - RNA, 19 nt, Artificial Sequence
  Description of Artificial Sequence: Synthetic oligonucleotide
gcucgcagccuucuguucc

SEQ ID NO: 1662629 - RNA, 19 nt, Artificial Sequence
  Description of Artificial Sequence: Synthetic oligonucleotide
guagagguccugcagccua

SEQ ID NO: 1662630 - RNA, 19 nt, Artificial Sequence
  Description of Artificial Sequence: Synthetic oligonucleotide
gccugacuucaccauagag

SEQ ID NO: 1662631 - RNA, 19 nt, Artificial Sequence
  Description of Artificial Sequence: Synthetic oligonucleotide
gccuagaggacaagaaggc

SEQ ID NO: 1662632 - RNA, 19 nt, Artificial Sequence
  Description of Artificial Sequence: Synthetic oligonucleotide
uguagagguccugcagccu

SEQ ID NO: 1662633 - RNA, 19 nt, Artificial Sequence
  Description of Artificial Sequence: Synthetic oligonucleotide
guccgcagcacucacacau

SEQ ID NO: 1662634 - RNA, 19 nt, Artificial Sequence
  Description of Artificial Sequence: Synthetic oligonucleotide
aacuccgggguaaggcugu

SEQ ID NO: 1662635 - RNA, 19 nt, Artificial Sequence
  Description of Artificial Sequence: Synthetic oligonucleotide
uggcggcagguacgcauag

SEQ ID NO: 1662636 - RNA, 19 nt, Artificial Sequence
  Description of Artificial Sequence: Synthetic oligonucleotide
uggguggugaaaggagagu

SEQ ID NO: 1662637 - RNA, 19 nt, Artificial Sequence
  Description of Artificial Sequence: Synthetic oligonucleotide
agccaugccauauguucuu

SEQ ID NO: 1662638 - RNA, 19 nt, Artificial Sequence
  Description of Artificial Sequence: Synthetic oligonucleotide
aggacaucucugccgucga

SEQ ID NO: 1662639 - RNA, 19 nt, Artificial Sequence
  Description of Artificial Sequence: Synthetic oligonucleotide
aagcguguuggaagaucug

SEQ ID NO: 1662640 - RNA, 19 nt, Artificial Sequence
  Description of Artificial Sequence: Synthetic oligonucleotide
accugcgcccgcugggguc

SEQ ID NO: 1662641 - RNA, 19 nt, Artificial Sequence
  Description of Artificial Sequence: Synthetic oligonucleotide
cuaccucauugcccguccc

SEQ ID NO: 1662642 - RNA, 19 nt, Artificial Sequence
  Description of Artificial Sequence: Synthetic oligonucleotide
gccgucgaaagaaaagaug

SEQ ID NO: 1662643 - RNA, 19 nt, Artificial Sequence
  Description of Artificial Sequence: Synthetic oligonucleotide
guccuuuguaccaccucug

SEQ ID NO: 1662644 - RNA, 19 nt, Artificial Sequence
  Description of Artificial Sequence: Synthetic oligonucleotide
cauaggagcugugguggug

SEQ ID NO: 1662645 - RNA, 19 nt, Artificial Sequence
  Description of Artificial Sequence: Synthetic oligonucleotide
agguacgcauaggagcugu

SEQ ID NO: 1662646 - RNA, 19 nt, Artificial Sequence
  Description of Artificial Sequence: Synthetic oligonucleotide
auggccugacuucaccaua

SEQ ID NO: 1662647 - RNA, 19 nt, Artificial Sequence
  Description of Artificial Sequence: Synthetic oligonucleotide
gcaacaaccuagggcagcc

SEQ ID NO: 1662648 - RNA, 19 nt, Artificial Sequence
  Description of Artificial Sequence: Synthetic oligonucleotide
caauacuguagagguccug

SEQ ID NO: 1662649 - RNA, 19 nt, Artificial Sequence
  Description of Artificial Sequence: Synthetic oligonucleotide
aaccugcgcccgcuggggu

SEQ ID NO: 1662650 - RNA, 19 nt, Artificial Sequence
  Description of Artificial Sequence: Synthetic oligonucleotide
gaugccacgcaugccaccu

SEQ ID NO: 1662651 - RNA, 19 nt, Artificial Sequence
  Description of Artificial Sequence: Synthetic oligonucleotide
gcuaccucauugcccgucc

SEQ ID NO: 1662652 - RNA, 19 nt, Artificial Sequence
  Description of Artificial Sequence: Synthetic oligonucleotide
ugccuguacuacugacagu

SEQ ID NO: 1662653 - RNA, 19 nt, Artificial Sequence
  Description of Artificial Sequence: Synthetic oligonucleotide
agaaaagaugcgggcccca

SEQ ID NO: 1662654 - RNA, 19 nt, Artificial Sequence
  Description of Artificial Sequence: Synthetic oligonucleotide
acaauacuguagagguccu

SEQ ID NO: 1662655 - RNA, 19 nt, Artificial Sequence
  Description of Artificial Sequence: Synthetic oligonucleotide
aguugacccugggagccug

SEQ ID NO: 1662656 - RNA, 19 nt, Artificial Sequence
  Description of Artificial Sequence: Synthetic oligonucleotide
uuaggacaucucugccguc

SEQ ID NO: 1662657 - RNA, 19 nt, Artificial Sequence
  Description of Artificial Sequence: Synthetic oligonucleotide
caaccugcgcccgcugggg

SEQ ID NO: 1662658 - RNA, 19 nt, Artificial Sequence
  Description of Artificial Sequence: Synthetic oligonucleotide
acagagcaucccagcuggc

SEQ ID NO: 1662659 - RNA, 19 nt, Artificial Sequence
  Description of Artificial Sequence: Synthetic oligonucleotide
gccuuuugaaggaucugug

SEQ ID NO: 1662660 - RNA, 19 nt, Artificial Sequence
  Description of Artificial Sequence: Synthetic oligonucleotide
gagccaugccauauguucu

SEQ ID NO: 1662661 - RNA, 19 nt, Artificial Sequence
  Description of Artificial Sequence: Synthetic oligonucleotide
gcggcagguacgcauagga

SEQ ID NO: 1662662 - RNA, 19 nt, Artificial Sequence
  Description of Artificial Sequence: Synthetic oligonucleotide
agaaagucugcaggucuua

SEQ ID NO: 1662663 - RNA, 19 nt, Artificial Sequence
  Description of Artificial Sequence: Synthetic oligonucleotide
cuccaucaaccugcgcccg

SEQ ID NO: 1662664 - RNA, 19 nt, Artificial Sequence
  Description of Artificial Sequence: Synthetic oligonucleotide
ugcuaccucauugcccguc

SEQ ID NO: 1662665 - RNA, 19 nt, Artificial Sequence
  Description of Artificial Sequence: Synthetic oligonucleotide
ggcacagccccacggucag

SEQ ID NO: 1662666 - RNA, 19 nt, Artificial Sequence
  Description of Artificial Sequence: Synthetic oligonucleotide
cccaguuaccaccugguga

SEQ ID NO: 1662667 - RNA, 19 nt, Artificial Sequence
  Description of Artificial Sequence: Synthetic oligonucleotide
gccugaaaacagagcaucc

SEQ ID NO: 1662668 - RNA, 19 nt, Artificial Sequence
  Description of Artificial Sequence: Synthetic oligonucleotide
cgcacaauacuguagaggu

SEQ ID NO: 1662669 - RNA, 19 nt, Artificial Sequence
  Description of Artificial Sequence: Synthetic oligonucleotide
ggucuuaggcaacaaccua

SEQ ID NO: 1662670 - RNA, 19 nt, Artificial Sequence
  Description of Artificial Sequence: Synthetic oligonucleotide
caucucugccgucgaaaga

SEQ ID NO: 1662671 - RNA, 19 nt, Artificial Sequence
  Description of Artificial Sequence: Synthetic oligonucleotide
cacgacgcacaauacugua

SEQ ID NO: 1662672 - RNA, 19 nt, Artificial Sequence
  Description of Artificial Sequence: Synthetic oligonucleotide
ggcaacaaccuagggcagc

SEQ ID NO: 1662673 - RNA, 19 nt, Artificial Sequence
  Description of Artificial Sequence: Synthetic oligonucleotide
gcugcaguugacccuggga

SEQ ID NO: 1662674 - RNA, 19 nt, Artificial Sequence
  Description of Artificial Sequence: Synthetic oligonucleotide
cucugccgucgaaagaaaa

SEQ ID NO: 1662675 - RNA, 19 nt, Artificial Sequence
  Description of Artificial Sequence: Synthetic oligonucleotide
caccauagagcuccaccaa

SEQ ID NO: 1662676 - RNA, 19 nt, Artificial Sequence
  Description of Artificial Sequence: Synthetic oligonucleotide
ggaucguaucccagccagg

SEQ ID NO: 1662677 - RNA, 19 nt, Artificial Sequence
  Description of Artificial Sequence: Synthetic oligonucleotide
ggauuacaugaaaugugaa

SEQ ID NO: 1662678 - RNA, 19 nt, Artificial Sequence
  Description of Artificial Sequence: Synthetic oligonucleotide
gcacaggacgauguaggug

SEQ ID NO: 1662679 - RNA, 19 nt, Artificial Sequence
  Description of Artificial Sequence: Synthetic oligonucleotide
gcccuacuuggagaaagag

SEQ ID NO: 1662680 - RNA, 19 nt, Artificial Sequence
  Description of Artificial Sequence: Synthetic oligonucleotide
ugacugccuuuugaaggau

SEQ ID NO: 1662681 - RNA, 19 nt, Artificial Sequence
  Description of Artificial Sequence: Synthetic oligonucleotide
aggcaacaaccuagggcag

SEQ ID NO: 1662682 - RNA, 19 nt, Artificial Sequence
  Description of Artificial Sequence: Synthetic oligonucleotide
ggguaaggcugugugucug

SEQ ID NO: 1662683 - RNA, 19 nt, Artificial Sequence
  Description of Artificial Sequence: Synthetic oligonucleotide
ggacgauguagguguucug

SEQ ID NO: 1662684 - RNA, 19 nt, Artificial Sequence
  Description of Artificial Sequence: Synthetic oligonucleotide
cacggucagcacgacgcac

SEQ ID NO: 1662685 - RNA, 19 nt, Artificial Sequence
  Description of Artificial Sequence: Synthetic oligonucleotide
caggaucguaucccagcca

SEQ ID NO: 1662686 - RNA, 19 nt, Artificial Sequence
  Description of Artificial Sequence: Synthetic oligonucleotide
cacggaugccacgcaugcc

SEQ ID NO: 1662687 - RNA, 19 nt, Artificial Sequence
  Description of Artificial Sequence: Synthetic oligonucleotide
caucaaccugcgcccgcug

SEQ ID NO: 1662688 - RNA, 19 nt, Artificial Sequence
  Description of Artificial Sequence: Synthetic oligonucleotide
gcuuccguccgccaugucu

SEQ ID NO: 1662689 - RNA, 19 nt, Artificial Sequence
  Description of Artificial Sequence: Synthetic oligonucleotide
ggaugccacgcaugccacc

SEQ ID NO: 1662690 - RNA, 19 nt, Artificial Sequence
  Description of Artificial Sequence: Synthetic oligonucleotide
caaugcacaggacgaugua

SEQ ID NO: 1662691 - RNA, 19 nt, Artificial Sequence
  Description of Artificial Sequence: Synthetic oligonucleotide
aaggugccagccagcccca

SEQ ID NO: 1662692 - RNA, 19 nt, Artificial Sequence
  Description of Artificial Sequence: Synthetic oligonucleotide
ccccguacgcuuccguccg

SEQ ID NO: 1662693 - RNA, 19 nt, Artificial Sequence
  Description of Artificial Sequence: Synthetic oligonucleotide
gggcuguucagugccacca

SEQ ID NO: 1662694 - RNA, 19 nt, Artificial Sequence
  Description of Artificial Sequence: Synthetic oligonucleotide
cucgugaagcugcaccacu

SEQ ID NO: 1662695 - RNA, 19 nt, Artificial Sequence
  Description of Artificial Sequence: Synthetic oligonucleotide
ggccgagccguggaauagg

SEQ ID NO: 1662696 - RNA, 19 nt, Artificial Sequence
  Description of Artificial Sequence: Synthetic oligonucleotide
cgacgcacaauacuguaga

SEQ ID NO: 1662697 - RNA, 19 nt, Artificial Sequence
  Description of Artificial Sequence: Synthetic oligonucleotide
gagccugaaaacagagcau

SEQ ID NO: 1662698 - RNA, 19 nt, Artificial Sequence
  Description of Artificial Sequence: Synthetic oligonucleotide
cagcacgacgcacaauacu

SEQ ID NO: 1662699 - RNA, 19 nt, Artificial Sequence
  Description of Artificial Sequence: Synthetic oligonucleotide
gccugccuguacuacugac

SEQ ID NO: 1662700 - RNA, 19 nt, Artificial Sequence
  Description of Artificial Sequence: Synthetic oligonucleotide
cccacggaugccacgcaug

SEQ ID NO: 1662701 - RNA, 19 nt, Artificial Sequence
  Description of Artificial Sequence: Synthetic oligonucleotide
gagugcucccgccgggugu

SEQ ID NO: 1662702 - RNA, 19 nt, Artificial Sequence
  Description of Artificial Sequence: Synthetic oligonucleotide
ccuccugagacccagcuau

SEQ ID NO: 1662703 - RNA, 19 nt, Artificial Sequence
  Description of Artificial Sequence: Synthetic oligonucleotide
ggguggucccaguuaccac

SEQ ID NO: 1662704 - RNA, 19 nt, Artificial Sequence
  Description of Artificial Sequence: Synthetic oligonucleotide
uggguuggaccaggauguc

SEQ ID NO: 1662705 - RNA, 19 nt, Artificial Sequence
  Description of Artificial Sequence: Synthetic oligonucleotide
gcuguccgggccuccagca

SEQ ID NO: 1662706 - RNA, 19 nt, Artificial Sequence
  Description of Artificial Sequence: Synthetic oligonucleotide
ucgggccugcuggaagcac

SEQ ID NO: 1662707 - RNA, 19 nt, Artificial Sequence
  Description of Artificial Sequence: Synthetic oligonucleotide
cuggcggcagguacgcaua

SEQ ID NO: 1662708 - RNA, 19 nt, Artificial Sequence
  Description of Artificial Sequence: Synthetic oligonucleotide
ccaagcguguuggaagauc

SEQ ID NO: 1662709 - RNA, 19 nt, Artificial Sequence
  Description of Artificial Sequence: Synthetic oligonucleotide
ccuagaggacaagaaggca

SEQ ID NO: 1662710 - RNA, 19 nt, Artificial Sequence
  Description of Artificial Sequence: Synthetic oligonucleotide
uccguccgccaugucucac

SEQ ID NO: 1662711 - RNA, 19 nt, Artificial Sequence
  Description of Artificial Sequence: Synthetic oligonucleotide
cacuguguccguccuuugu

SEQ ID NO: 1662712 - RNA, 19 nt, Artificial Sequence
  Description of Artificial Sequence: Synthetic oligonucleotide
gguacgcauaggagcugug

SEQ ID NO: 1662713 - RNA, 19 nt, Artificial Sequence
  Description of Artificial Sequence: Synthetic oligonucleotide
cgggguaaggcuguguguc

SEQ ID NO: 1662714 - RNA, 19 nt, Artificial Sequence
  Description of Artificial Sequence: Synthetic oligonucleotide
ggcggcagguacgcauagg

SEQ ID NO: 1662715 - RNA, 19 nt, Artificial Sequence
  Description of Artificial Sequence: Synthetic oligonucleotide
gcauggguggucccaguua

SEQ ID NO: 1662716 - RNA, 19 nt, Artificial Sequence
  Description of Artificial Sequence: Synthetic oligonucleotide
ggaaguccgccccacggau

SEQ ID NO: 1662717 - RNA, 19 nt, Artificial Sequence
  Description of Artificial Sequence: Synthetic oligonucleotide
ggguuggaccaggauguca

SEQ ID NO: 1662718 - RNA, 19 nt, Artificial Sequence
  Description of Artificial Sequence: Synthetic oligonucleotide
gggccgagccguggaauag

SEQ ID NO: 1662719 - RNA, 19 nt, Artificial Sequence
  Description of Artificial Sequence: Synthetic oligonucleotide
guacgcuuccguccgccau

SEQ ID NO: 1662720 - RNA, 19 nt, Artificial Sequence
  Description of Artificial Sequence: Synthetic oligonucleotide
ccuguacuacugacaguca

SEQ ID NO: 1662721 - RNA, 19 nt, Artificial Sequence
  Description of Artificial Sequence: Synthetic oligonucleotide
ccgagccguggaauaggag

SEQ ID NO: 1662722 - RNA, 19 nt, Artificial Sequence
  Description of Artificial Sequence: Synthetic oligonucleotide
ccguggaauaggagugcuc

SEQ ID NO: 1662723 - RNA, 19 nt, Artificial Sequence
  Description of Artificial Sequence: Synthetic oligonucleotide
cugcagccuagaggacaag

SEQ ID NO: 1662724 - RNA, 19 nt, Artificial Sequence
  Description of Artificial Sequence: Synthetic oligonucleotide
guccgccccacggaugcca

SEQ ID NO: 1662725 - RNA, 19 nt, Artificial Sequence
  Description of Artificial Sequence: Synthetic oligonucleotide
cagccgugguggguuggac

SEQ ID NO: 1662726 - RNA, 19 nt, Artificial Sequence
  Description of Artificial Sequence: Synthetic oligonucleotide
ccccacggucagcacgacg

SEQ ID NO: 1662727 - RNA, 19 nt, Artificial Sequence
  Description of Artificial Sequence: Synthetic oligonucleotide
gcuggcggcagguacgcau

SEQ ID NO: 1662728 - RNA, 19 nt, Artificial Sequence
  Description of Artificial Sequence: Synthetic oligonucleotide
cguccuuuguaccaccucu

SEQ ID NO: 1662729 - RNA, 19 nt, Artificial Sequence
  Description of Artificial Sequence: Synthetic oligonucleotide
guugacccugggagccuga

SEQ ID NO: 1662730 - RNA, 19 nt, Artificial Sequence
  Description of Artificial Sequence: Synthetic oligonucleotide
gggguaaggcugugugucu

SEQ ID NO: 1662731 - RNA, 19 nt, Artificial Sequence
  Description of Artificial Sequence: Synthetic oligonucleotide
ccacgcaugccaccugaca

SEQ ID NO: 1662732 - RNA, 19 nt, Artificial Sequence
  Description of Artificial Sequence: Synthetic oligonucleotide
gcacuggaaguccgcccca

SEQ ID NO: 1662733 - RNA, 19 nt, Artificial Sequence
  Description of Artificial Sequence: Synthetic oligonucleotide
ccguacgcuuccguccgcc

SEQ ID NO: 1662734 - RNA, 19 nt, Artificial Sequence
  Description of Artificial Sequence: Synthetic oligonucleotide
guguaugggcugcccucgu

SEQ ID NO: 1662735 - RNA, 19 nt, Artificial Sequence
  Description of Artificial Sequence: Synthetic oligonucleotide
gggucugagccaugccaua

SEQ ID NO: 1662736 - RNA, 19 nt, Artificial Sequence
  Description of Artificial Sequence: Synthetic oligonucleotide
cggaugccacgcaugccac

SEQ ID NO: 1662737 - RNA, 19 nt, Artificial Sequence
  Description of Artificial Sequence: Synthetic oligonucleotide
gccagggccgagccgugga

SEQ ID NO: 1662738 - RNA, 19 nt, Artificial Sequence
  Description of Artificial Sequence: Synthetic oligonucleotide
gggugucuuaggacaucuc

SEQ ID NO: 1662739 - RNA, 19 nt, Artificial Sequence
  Description of Artificial Sequence: Synthetic oligonucleotide
gccgagccguggaauagga

SEQ ID NO: 1662740 - RNA, 19 nt, Artificial Sequence
  Description of Artificial Sequence: Synthetic oligonucleotide
ccagccccacggcucgggc

SEQ ID NO: 1662741 - RNA, 19 nt, Artificial Sequence
  Description of Artificial Sequence: Synthetic oligonucleotide
ggggucugagccaugccau

SEQ ID NO: 1662742 - RNA, 19 nt, Artificial Sequence
  Description of Artificial Sequence: Synthetic oligonucleotide
ccaugccauauguucuucu

SEQ ID NO: 1662743 - RNA, 19 nt, Artificial Sequence
  Description of Artificial Sequence: Synthetic oligonucleotide
aucugcccgccagggccga

SEQ ID NO: 1662744 - RNA, 19 nt, Artificial Sequence
  Description of Artificial Sequence: Synthetic oligonucleotide
gcacgacgcacaauacugu

SEQ ID NO: 1662745 - RNA, 19 nt, Artificial Sequence
  Description of Artificial Sequence: Synthetic oligonucleotide
cgccccacggaugccacgc

SEQ ID NO: 1662746 - RNA, 19 nt, Artificial Sequence
  Description of Artificial Sequence: Synthetic oligonucleotide
ccggguguaugggcugccc

SEQ ID NO: 1662747 - RNA, 19 nt, Artificial Sequence
  Description of Artificial Sequence: Synthetic oligonucleotide
agcuggcggcagguacgca

SEQ ID NO: 1662748 - RNA, 19 nt, Artificial Sequence
  Description of Artificial Sequence: Synthetic oligonucleotide
gcuggaaaucguggugagu

SEQ ID NO: 1662749 - RNA, 19 nt, Artificial Sequence
  Description of Artificial Sequence: Synthetic oligonucleotide
gccacgcaugccaccugac

SEQ ID NO: 1662750 - RNA, 19 nt, Artificial Sequence
  Description of Artificial Sequence: Synthetic oligonucleotide
gccguggaauaggagugcu

SEQ ID NO: 1662751 - RNA, 19 nt, Artificial Sequence
  Description of Artificial Sequence: Synthetic oligonucleotide
caacaaccuagggcagccu

SEQ ID NO: 1662752 - RNA, 19 nt, Artificial Sequence
  Description of Artificial Sequence: Synthetic oligonucleotide
gcugggugucuuaggacau

SEQ ID NO: 1662753 - RNA, 19 nt, Artificial Sequence
  Description of Artificial Sequence: Synthetic oligonucleotide
ccacggucagcacgacgca

SEQ ID NO: 1662754 - RNA, 19 nt, Artificial Sequence
  Description of Artificial Sequence: Synthetic oligonucleotide
guccgccaugucucacagu

SEQ ID NO: 1662755 - RNA, 19 nt, Artificial Sequence
  Description of Artificial Sequence: Synthetic oligonucleotide
cccgucccaugugggagug

SEQ ID NO: 1662756 - RNA, 19 nt, Artificial Sequence
  Description of Artificial Sequence: Synthetic oligonucleotide
ugcgcccgcuggggucuga

SEQ ID NO: 1662757 - RNA, 19 nt, Artificial Sequence
  Description of Artificial Sequence: Synthetic oligonucleotide
cccguacgcuuccguccgc

SEQ ID NO: 1662758 - RNA, 19 nt, Artificial Sequence
  Description of Artificial Sequence: Synthetic oligonucleotide
gcccgucccaugugggagu

SEQ ID NO: 1662759 - RNA, 19 nt, Artificial Sequence
  Description of Artificial Sequence: Synthetic oligonucleotide
cguacgcuuccguccgcca

SEQ ID NO: 1662760 - RNA, 19 nt, Artificial Sequence
  Description of Artificial Sequence: Synthetic oligonucleotide
gcgcccgcuggggucugag

SEQ ID NO: 1662761 - RNA, 19 nt, Artificial Sequence
  Description of Artificial Sequence: Synthetic oligonucleotide
ccgggguaaggcugugugu

SEQ ID NO: 1662762 - RNA, 19 nt, Artificial Sequence
  Description of Artificial Sequence: Synthetic oligonucleotide
cagggccgagccguggaau

SEQ ID NO: 1662763 - RNA, 19 nt, Artificial Sequence
  Description of Artificial Sequence: Synthetic oligonucleotide
ccaucaaccugcgcccgcu

SEQ ID NO: 1662764 - RNA, 19 nt, Artificial Sequence
  Description of Artificial Sequence: Synthetic oligonucleotide
cgucccaugugggagugcu

SEQ ID NO: 1662765 - RNA, 19 nt, Artificial Sequence
  Description of Artificial Sequence: Synthetic oligonucleotide
cuccgggguaaggcugugu

SEQ ID NO: 1662766 - RNA, 19 nt, Artificial Sequence
  Description of Artificial Sequence: Synthetic oligonucleotide
ccagggccgagccguggaa

SEQ ID NO: 1662767 - RNA, 19 nt, Artificial Sequence
  Description of Artificial Sequence: Synthetic oligonucleotide
ccgucccaugugggagugc

SEQ ID NO: 1662768 - RNA, 19 nt, Artificial Sequence
  Description of Artificial Sequence: Synthetic oligonucleotide
cugcgcccgcuggggucug

SEQ ID NO: 1662769 - RNA, 19 nt, Artificial Sequence
  Description of Artificial Sequence: Synthetic oligonucleotide
ggucagcacgacgcacaau

SEQ ID NO: 1662770 - RNA, 19 nt, Artificial Sequence
  Description of Artificial Sequence: Synthetic oligonucleotide
cggguguaugggcugcccu

SEQ ID NO: 1662771 - RNA, 19 nt, Artificial Sequence
  Description of Artificial Sequence: Synthetic oligonucleotide
gccccacggucagcacgac

SEQ ID NO: 1662772 - RNA, 19 nt, Artificial Sequence
  Description of Artificial Sequence: Synthetic oligonucleotide
ccccacggaugccacgcau

SEQ ID NO: 1662773 - RNA, 19 nt, Artificial Sequence
  Description of Artificial Sequence: Synthetic oligonucleotide
cgggcgcuggccagaugcu

SEQ ID NO: 1662774 - RNA, 19 nt, Artificial Sequence
  Description of Artificial Sequence: Synthetic oligonucleotide
gugcucccgccggguguau

SEQ ID NO: 1662775 - RNA, 19 nt, Artificial Sequence
  Description of Artificial Sequence: Synthetic oligonucleotide
ccccgggcgcuggccagau

SEQ ID NO: 1662776 - RNA, 19 nt, Artificial Sequence
  Description of Artificial Sequence: Synthetic oligonucleotide
aguuuuacgacacagaggg

SEQ ID NO: 1662777 - RNA, 19 nt, Artificial Sequence
  Description of Artificial Sequence: Synthetic oligonucleotide
cauaauuaaacacacagcg

SEQ ID NO: 1662778 - RNA, 19 nt, Artificial Sequence
  Description of Artificial Sequence: Synthetic oligonucleotide
acuuguuugaaucaaacgg

SEQ ID NO: 1662779 - RNA, 19 nt, Artificial Sequence
  Description of Artificial Sequence: Synthetic oligonucleotide
agaacuguaucauucaccc

SEQ ID NO: 1662780 - RNA, 19 nt, Artificial Sequence
  Description of Artificial Sequence: Synthetic oligonucleotide
ucuagaaagauaaugcugc

SEQ ID NO: 1662781 - RNA, 19 nt, Artificial Sequence
  Description of Artificial Sequence: Synthetic oligonucleotide
aaucaaacggugcugaguc

SEQ ID NO: 1662782 - RNA, 19 nt, Artificial Sequence
  Description of Artificial Sequence: Synthetic oligonucleotide
aaagauagauggcuggucg

SEQ ID NO: 1662783 - RNA, 19 nt, Artificial Sequence
  Description of Artificial Sequence: Synthetic oligonucleotide
auugagaaaacucauaaga

SEQ ID NO: 1662784 - RNA, 19 nt, Artificial Sequence
  Description of Artificial Sequence: Synthetic oligonucleotide
uuucauaauacccugggug

SEQ ID NO: 1662785 - RNA, 19 nt, Artificial Sequence
  Description of Artificial Sequence: Synthetic oligonucleotide
auuugauucugcaagaacc

SEQ ID NO: 1662786 - RNA, 19 nt, Artificial Sequence
  Description of Artificial Sequence: Synthetic oligonucleotide
aaaauguucagaaaaugag

SEQ ID NO: 1662787 - RNA, 19 nt, Artificial Sequence
  Description of Artificial Sequence: Synthetic oligonucleotide
uaaguauuuuccuacaucu

SEQ ID NO: 1662788 - RNA, 19 nt, Artificial Sequence
  Description of Artificial Sequence: Synthetic oligonucleotide
aacuguaucauucacccga

SEQ ID NO: 1662789 - RNA, 19 nt, Artificial Sequence
  Description of Artificial Sequence: Synthetic oligonucleotide
uucauagaaacuuucauaa

SEQ ID NO: 1662790 - RNA, 19 nt, Artificial Sequence
  Description of Artificial Sequence: Synthetic oligonucleotide
aacgcuucgauuuccagag

SEQ ID NO: 1662791 - RNA, 19 nt, Artificial Sequence
  Description of Artificial Sequence: Synthetic oligonucleotide
agaaacuuucauaauaccc

SEQ ID NO: 1662792 - RNA, 19 nt, Artificial Sequence
  Description of Artificial Sequence: Synthetic oligonucleotide
aacuuguuugaaucaaacg

SEQ ID NO: 1662793 - RNA, 19 nt, Artificial Sequence
  Description of Artificial Sequence: Synthetic oligonucleotide
auuaacaaacccuaucgag

SEQ ID NO: 1662794 - RNA, 19 nt, Artificial Sequence
  Description of Artificial Sequence: Synthetic oligonucleotide
ugaagauuucaucaaacca

SEQ ID NO: 1662795 - RNA, 19 nt, Artificial Sequence
  Description of Artificial Sequence: Synthetic oligonucleotide
uuagauaagcauuugguaa

SEQ ID NO: 1662796 - RNA, 19 nt, Artificial Sequence
  Description of Artificial Sequence: Synthetic oligonucleotide
agcaugaacaguucuuucc

SEQ ID NO: 1662797 - RNA, 19 nt, Artificial Sequence
  Description of Artificial Sequence: Synthetic oligonucleotide
ugauaauaggcuaauuucu

SEQ ID NO: 1662798 - RNA, 19 nt, Artificial Sequence
  Description of Artificial Sequence: Synthetic oligonucleotide
ugagucuuaaucuuucugc

SEQ ID NO: 1662799 - RNA, 19 nt, Artificial Sequence
  Description of Artificial Sequence: Synthetic oligonucleotide
ugugcuaccaccucaaaga

SEQ ID NO: 1662800 - RNA, 19 nt, Artificial Sequence
  Description of Artificial Sequence: Synthetic oligonucleotide
  modified_base (2)..(2): a, c, u, g, unknown or other
anagaaagccgguggagag

SEQ ID NO: 1662801 - RNA, 19 nt, Artificial Sequence
  Description of Artificial Sequence: Synthetic oligonucleotide
uuacugaaaauuacuguag

SEQ ID NO: 1662802 - RNA, 19 nt, Artificial Sequence
  Description of Artificial Sequence: Synthetic oligonucleotide
cuacaauccgcuuuaagcc

SEQ ID NO: 1662803 - RNA, 19 nt, Artificial Sequence
  Description of Artificial Sequence: Synthetic oligonucleotide
auaaguauuuuccuacauc

SEQ ID NO: 1662804 - RNA, 19 nt, Artificial Sequence
  Description of Artificial Sequence: Synthetic oligonucleotide
uuaacaaacccuaucgagu

SEQ ID NO: 1662805 - RNA, 19 nt, Artificial Sequence
  Description of Artificial Sequence: Synthetic oligonucleotide
acuuaaauguuucauagaa

SEQ ID NO: 1662806 - RNA, 19 nt, Artificial Sequence
  Description of Artificial Sequence: Synthetic oligonucleotide
uuuaucuucucaccaacgc

SEQ ID NO: 1662807 - RNA, 19 nt, Artificial Sequence
  Description of Artificial Sequence: Synthetic oligonucleotide
auagaaacuuucauaauac

SEQ ID NO: 1662808 - RNA, 19 nt, Artificial Sequence
  Description of Artificial Sequence: Synthetic oligonucleotide
uuuaaucagaugcuggacu

SEQ ID NO: 1662809 - RNA, 19 nt, Artificial Sequence
  Description of Artificial Sequence: Synthetic oligonucleotide
gaagauuucaucaaaccac

SEQ ID NO: 1662810 - RNA, 19 nt, Artificial Sequence
  Description of Artificial Sequence: Synthetic oligonucleotide
uccgcuuuaagccauaaaa

SEQ ID NO: 1662811 - RNA, 19 nt, Artificial Sequence
  Description of Artificial Sequence: Synthetic oligonucleotide
ugauuugaugguuuccugg

SEQ ID NO: 1662812 - RNA, 19 nt, Artificial Sequence
  Description of Artificial Sequence: Synthetic oligonucleotide
ugaguuuccacauaaucgu

SEQ ID NO: 1662813 - RNA, 19 nt, Artificial Sequence
  Description of Artificial Sequence: Synthetic oligonucleotide
acauuagauaaguauuuuc

SEQ ID NO: 1662814 - RNA, 19 nt, Artificial Sequence
  Description of Artificial Sequence: Synthetic oligonucleotide
ggcuauauacuuuuaaagg

SEQ ID NO: 1662815 - RNA, 19 nt, Artificial Sequence
  Description of Artificial Sequence: Synthetic oligonucleotide
ugugauaauaggcuaauuu

SEQ ID NO: 1662816 - RNA, 19 nt, Artificial Sequence
  Description of Artificial Sequence: Synthetic oligonucleotide
ugauucaugucaauugagc

SEQ ID NO: 1662817 - RNA, 19 nt, Artificial Sequence
  Description of Artificial Sequence: Synthetic oligonucleotide
aauuagggaaguaucaaug

SEQ ID NO: 1662818 - RNA, 19 nt, Artificial Sequence
  Description of Artificial Sequence: Synthetic oligonucleotide
agugugcaggauuugauuc

SEQ ID NO: 1662819 - RNA, 19 nt, Artificial Sequence
  Description of Artificial Sequence: Synthetic oligonucleotide
aguauuuuccuacaucuca

SEQ ID NO: 1662820 - RNA, 19 nt, Artificial Sequence
  Description of Artificial Sequence: Synthetic oligonucleotide
agagggauaaaggcgaugc

SEQ ID NO: 1662821 - RNA, 19 nt, Artificial Sequence
  Description of Artificial Sequence: Synthetic oligonucleotide
gucuuaaucuuucugcacg

SEQ ID NO: 1662822 - RNA, 19 nt, Artificial Sequence
  Description of Artificial Sequence: Synthetic oligonucleotide
aaucauguauuguuaaaau

SEQ ID NO: 1662823 - RNA, 19 nt, Artificial Sequence
  Description of Artificial Sequence: Synthetic oligonucleotide
aauccauaguuacugaaaa

SEQ ID NO: 1662824 - RNA, 19 nt, Artificial Sequence
  Description of Artificial Sequence: Synthetic oligonucleotide
acuuucauaauacccuggg

SEQ ID NO: 1662825 - RNA, 19 nt, Artificial Sequence
  Description of Artificial Sequence: Synthetic oligonucleotide
uagauaaguauuuuccuac

SEQ ID NO: 1662826 - RNA, 19 nt, Artificial Sequence
  Description of Artificial Sequence: Synthetic oligonucleotide
aagucuagcagagugaaga

SEQ ID NO: 1662827 - RNA, 19 nt, Artificial Sequence
  Description of Artificial Sequence: Synthetic oligonucleotide
agacuaauaagcaugaacu

SEQ ID NO: 1662828 - RNA, 19 nt, Artificial Sequence
  Description of Artificial Sequence: Synthetic oligonucleotide
guaguugugaauuagggaa

SEQ ID NO: 1662829 - RNA, 19 nt, Artificial Sequence
  Description of Artificial Sequence: Synthetic oligonucleotide
  modified_base (17)..(17): a, c, u, g, unknown or other
aggaagaagacacccanag

SEQ ID NO: 1662830 - RNA, 19 nt, Artificial Sequence
  Description of Artificial Sequence: Synthetic oligonucleotide
aauaggcuaauuucuuuca

SEQ ID NO: 1662831 - RNA, 19 nt, Artificial Sequence
  Description of Artificial Sequence: Synthetic oligonucleotide
acaguacagaacuugagcu

SEQ ID NO: 1662832 - RNA, 19 nt, Artificial Sequence
  Description of Artificial Sequence: Synthetic oligonucleotide
aguaccaccaaucaaggaa

SEQ ID NO: 1662833 - RNA, 19 nt, Artificial Sequence
  Description of Artificial Sequence: Synthetic oligonucleotide
auuagauaaguauuuuccu

SEQ ID NO: 1662834 - RNA, 19 nt, Artificial Sequence
  Description of Artificial Sequence: Synthetic oligonucleotide
ucuuaaucuuucugcacgg

SEQ ID NO: 1662835 - RNA, 19 nt, Artificial Sequence
  Description of Artificial Sequence: Synthetic oligonucleotide
  modified_base (17)..(17): a, c, u, g, unknown or other
aaaggcgaugccuccanag

SEQ ID NO: 1662836 - RNA, 19 nt, Artificial Sequence
  Description of Artificial Sequence: Synthetic oligonucleotide
cuaucgaguggcuauauac

SEQ ID NO: 1662837 - RNA, 19 nt, Artificial Sequence
  Description of Artificial Sequence: Synthetic oligonucleotide
ugaagagcgggucucacug

SEQ ID NO: 1662838 - RNA, 19 nt, Artificial Sequence
  Description of Artificial Sequence: Synthetic oligonucleotide
uguuucauagaaacuuuca

SEQ ID NO: 1662839 - RNA, 19 nt, Artificial Sequence
  Description of Artificial Sequence: Synthetic oligonucleotide
augucaauugagcaaacug

SEQ ID NO: 1662840 - RNA, 19 nt, Artificial Sequence
  Description of Artificial Sequence: Synthetic oligonucleotide
aucaauguuugccauacca

SEQ ID NO: 1662841 - RNA, 19 nt, Artificial Sequence
  Description of Artificial Sequence: Synthetic oligonucleotide
uaacuuuaucuucucacca

SEQ ID NO: 1662842 - RNA, 19 nt, Artificial Sequence
  Description of Artificial Sequence: Synthetic oligonucleotide
uugaugacuccucacauaa

SEQ ID NO: 1662843 - RNA, 19 nt, Artificial Sequence
  Description of Artificial Sequence: Synthetic oligonucleotide
cauaguuacugaaaauuac

SEQ ID NO: 1662844 - RNA, 19 nt, Artificial Sequence
  Description of Artificial Sequence: Synthetic oligonucleotide
gauucaugucaauugagca

SEQ ID NO: 1662845 - RNA, 19 nt, Artificial Sequence
  Description of Artificial Sequence: Synthetic oligonucleotide
  modified_base (2)..(2): a, c, u, g, unknown or other
anagcuuucucagagcuaa

SEQ ID NO: 1662846 - RNA, 19 nt, Artificial Sequence
  Description of Artificial Sequence: Synthetic oligonucleotide
gugauaauaggcuaauuuc

SEQ ID NO: 1662847 - RNA, 19 nt, Artificial Sequence
  Description of Artificial Sequence: Synthetic oligonucleotide
ucauuaaacuguccugugc

SEQ ID NO: 1662848 - RNA, 19 nt, Artificial Sequence
  Description of Artificial Sequence: Synthetic oligonucleotide
aguuacugaaaauuacugu

SEQ ID NO: 1662849 - RNA, 19 nt, Artificial Sequence
  Description of Artificial Sequence: Synthetic oligonucleotide
uacaucucaucauugcuug

SEQ ID NO: 1662850 - RNA, 19 nt, Artificial Sequence
  Description of Artificial Sequence: Synthetic oligonucleotide
acuaauaagcaugaacuug

SEQ ID NO: 1662851 - RNA, 19 nt, Artificial Sequence
  Description of Artificial Sequence: Synthetic oligonucleotide
ucaauguuugccauaccac

SEQ ID NO: 1662852 - RNA, 19 nt, Artificial Sequence
  Description of Artificial Sequence: Synthetic oligonucleotide
auuacuguaguugugaauu

SEQ ID NO: 1662853 - RNA, 19 nt, Artificial Sequence
  Description of Artificial Sequence: Synthetic oligonucleotide
gcuacaauccgcuuuaagc

SEQ ID NO: 1662854 - RNA, 19 nt, Artificial Sequence
  Description of Artificial Sequence: Synthetic oligonucleotide
uaauaggcuaauuucuuuc

SEQ ID NO: 1662855 - RNA, 19 nt, Artificial Sequence
  Description of Artificial Sequence: Synthetic oligonucleotide
uaagcaugaacuuguuuga

SEQ ID NO: 1662856 - RNA, 19 nt, Artificial Sequence
  Description of Artificial Sequence: Synthetic oligonucleotide
cagaaagucuagcagagug

SEQ ID NO: 1662857 - RNA, 19 nt, Artificial Sequence
  Description of Artificial Sequence: Synthetic oligonucleotide
auuagggaaguaucaaugu

SEQ ID NO: 1662858 - RNA, 19 nt, Artificial Sequence
  Description of Artificial Sequence: Synthetic oligonucleotide
uuaucuucucaccaacgcu

SEQ ID NO: 1662859 - RNA, 19 nt, Artificial Sequence
  Description of Artificial Sequence: Synthetic oligonucleotide
cagacuaauaagcaugaac

SEQ ID NO: 1662860 - RNA, 19 nt, Artificial Sequence
  Description of Artificial Sequence: Synthetic oligonucleotide
cauaguauccugugugugc

SEQ ID NO: 1662861 - RNA, 19 nt, Artificial Sequence
  Description of Artificial Sequence: Synthetic oligonucleotide
cucauccccauuaacaaac

SEQ ID NO: 1662862 - RNA, 19 nt, Artificial Sequence
  Description of Artificial Sequence: Synthetic oligonucleotide
uguaucauucacccgaguu

SEQ ID NO: 1662863 - RNA, 19 nt, Artificial Sequence
  Description of Artificial Sequence: Synthetic oligonucleotide
auguucauuagauaagcau

SEQ ID NO: 1662864 - RNA, 19 nt, Artificial Sequence
  Description of Artificial Sequence: Synthetic oligonucleotide
uaucgaguggcuauauacu

SEQ ID NO: 1662865 - RNA, 19 nt, Artificial Sequence
  Description of Artificial Sequence: Synthetic oligonucleotide
ccauuaacaaacccuaucg

SEQ ID NO: 1662866 - RNA, 19 nt, Artificial Sequence
  Description of Artificial Sequence: Synthetic oligonucleotide
acugguucuagaaagauaa

SEQ ID NO: 1662867 - RNA, 19 nt, Artificial Sequence
  Description of Artificial Sequence: Synthetic oligonucleotide
  modified_base (6)..(6): a, c, u, g, unknown or other
acccanagaaagccggugg

SEQ ID NO: 1662868 - RNA, 19 nt, Artificial Sequence
  Description of Artificial Sequence: Synthetic oligonucleotide
uccauaguuacugaaaauu

SEQ ID NO: 1662869 - RNA, 19 nt, Artificial Sequence
  Description of Artificial Sequence: Synthetic oligonucleotide
  modified_base (9)..(9): a, c, u, g, unknown or other
gacacccanagaaagccgg

SEQ ID NO: 1662870 - RNA, 19 nt, Artificial Sequence
  Description of Artificial Sequence: Synthetic oligonucleotide
agccauaguauccugugug

SEQ ID NO: 1662871 - RNA, 19 nt, Artificial Sequence
  Description of Artificial Sequence: Synthetic oligonucleotide
uaucuucucaccaacgcuu

SEQ ID NO: 1662872 - RNA, 19 nt, Artificial Sequence
  Description of Artificial Sequence: Synthetic oligonucleotide
ucaauugagaaaacucaua

SEQ ID NO: 1662873 - RNA, 19 nt, Artificial Sequence
  Description of Artificial Sequence: Synthetic oligonucleotide
uuuccuacaucucaucauu

SEQ ID NO: 1662874 - RNA, 19 nt, Artificial Sequence
  Description of Artificial Sequence: Synthetic oligonucleotide
augaacaguucuuucccag

SEQ ID NO: 1662875 - RNA, 19 nt, Artificial Sequence
  Description of Artificial Sequence: Synthetic oligonucleotide
uuugaaucaaacggugcug

SEQ ID NO: 1662876 - RNA, 19 nt, Artificial Sequence
  Description of Artificial Sequence: Synthetic oligonucleotide
ucagccauaguauccugug

SEQ ID NO: 1662877 - RNA, 19 nt, Artificial Sequence
  Description of Artificial Sequence: Synthetic oligonucleotide
uacaauccgcuuuaagcca

SEQ ID NO: 1662878 - RNA, 19 nt, Artificial Sequence
  Description of Artificial Sequence: Synthetic oligonucleotide
cacagcgguaacaaaacac

SEQ ID NO: 1662879 - RNA, 19 nt, Artificial Sequence
  Description of Artificial Sequence: Synthetic oligonucleotide
  modified_base (6)..(6): a, c, u, g, unknown or other
cuccanagcuuucucagag

SEQ ID NO: 1662880 - RNA, 19 nt, Artificial Sequence
  Description of Artificial Sequence: Synthetic oligonucleotide
auaggcuaauuucuuucag

SEQ ID NO: 1662881 - RNA, 19 nt, Artificial Sequence
  Description of Artificial Sequence: Synthetic oligonucleotide
gucggauagccugugaugg

SEQ ID NO: 1662882 - RNA, 19 nt, Artificial Sequence
  Description of Artificial Sequence: Synthetic oligonucleotide
auaguuacugaaaauuacu

SEQ ID NO: 1662883 - RNA, 19 nt, Artificial Sequence
  Description of Artificial Sequence: Synthetic oligonucleotide
gaguuuuacgacacagagg

SEQ ID NO: 1662884 - RNA, 19 nt, Artificial Sequence
  Description of Artificial Sequence: Synthetic oligonucleotide
auucacccgaguuuuacga

SEQ ID NO: 1662885 - RNA, 19 nt, Artificial Sequence
  Description of Artificial Sequence: Synthetic oligonucleotide
guuuccacauaaucgugcc

SEQ ID NO: 1662886 - RNA, 19 nt, Artificial Sequence
  Description of Artificial Sequence: Synthetic oligonucleotide
uuguagucuagguguacag

SEQ ID NO: 1662887 - RNA, 19 nt, Artificial Sequence
  Description of Artificial Sequence: Synthetic oligonucleotide
aacuuucauaauacccugg

SEQ ID NO: 1662888 - RNA, 19 nt, Artificial Sequence
  Description of Artificial Sequence: Synthetic oligonucleotide
uuaaucagaugcuggacuu

SEQ ID NO: 1662889 - RNA, 19 nt, Artificial Sequence
  Description of Artificial Sequence: Synthetic oligonucleotide
aacagacuaauaagcauga

SEQ ID NO: 1662890 - RNA, 19 nt, Artificial Sequence
  Description of Artificial Sequence: Synthetic oligonucleotide
gguggagagggauaaaggc

SEQ ID NO: 1662891 - RNA, 19 nt, Artificial Sequence
  Description of Artificial Sequence: Synthetic oligonucleotide
agagcagucagugauuuga

SEQ ID NO: 1662892 - RNA, 19 nt, Artificial Sequence
  Description of Artificial Sequence: Synthetic oligonucleotide
aucauguauuguuaaaauu

SEQ ID NO: 1662893 - RNA, 19 nt, Artificial Sequence
  Description of Artificial Sequence: Synthetic oligonucleotide
gaaccuugaccacaugcug

SEQ ID NO: 1662894 - RNA, 19 nt, Artificial Sequence
  Description of Artificial Sequence: Synthetic oligonucleotide
ucguccaccaccgaagcag

SEQ ID NO: 1662895 - RNA, 19 nt, Artificial Sequence
  Description of Artificial Sequence: Synthetic oligonucleotide
agauaaguauuuuccuaca

SEQ ID NO: 1662896 - RNA, 19 nt, Artificial Sequence
  Description of Artificial Sequence: Synthetic oligonucleotide
gaagccauagugugcagga

SEQ ID NO: 1662897 - RNA, 19 nt, Artificial Sequence
  Description of Artificial Sequence: Synthetic oligonucleotide
caaucaaggaacugcagga

SEQ ID NO: 1662898 - RNA, 19 nt, Artificial Sequence
  Description of Artificial Sequence: Synthetic oligonucleotide
gaaucauguauuguuaaaa

SEQ ID NO: 1662899 - RNA, 19 nt, Artificial Sequence
  Description of Artificial Sequence: Synthetic oligonucleotide
agauaagcauuugguaaac

SEQ ID NO: 1662900 - RNA, 19 nt, Artificial Sequence
  Description of Artificial Sequence: Synthetic oligonucleotide
agaaucagaguuguagucu

SEQ ID NO: 1662901 - RNA, 19 nt, Artificial Sequence
  Description of Artificial Sequence: Synthetic oligonucleotide
ugacuccucacauaauuaa

SEQ ID NO: 1662902 - RNA, 19 nt, Artificial Sequence
  Description of Artificial Sequence: Synthetic oligonucleotide
cagaagaguaccaccaauc

SEQ ID NO: 1662903 - RNA, 19 nt, Artificial Sequence
  Description of Artificial Sequence: Synthetic oligonucleotide
aacccuaucgaguggcuau

SEQ ID NO: 1662904 - RNA, 19 nt, Artificial Sequence
  Description of Artificial Sequence: Synthetic oligonucleotide
uugaaucaaacggugcuga

SEQ ID NO: 1662905 - RNA, 19 nt, Artificial Sequence
  Description of Artificial Sequence: Synthetic oligonucleotide
ugcuugcuagcuuucauuc

SEQ ID NO: 1662906 - RNA, 19 nt, Artificial Sequence
  Description of Artificial Sequence: Synthetic oligonucleotide
uccccauuaacaaacccua

SEQ ID NO: 1662907 - RNA, 19 nt, Artificial Sequence
  Description of Artificial Sequence: Synthetic oligonucleotide
uuaaacuguccugugcuac

SEQ ID NO: 1662908 - RNA, 19 nt, Artificial Sequence
  Description of Artificial Sequence: Synthetic oligonucleotide
cuucgauuuccagaggugc

SEQ ID NO: 1662909 - RNA, 19 nt, Artificial Sequence
  Description of Artificial Sequence: Synthetic oligonucleotide
ugaauuagggaaguaucaa

SEQ ID NO: 1662910 - RNA, 19 nt, Artificial Sequence
  Description of Artificial Sequence: Synthetic oligonucleotide
gaagcaguugugauaugag

SEQ ID NO: 1662911 - RNA, 19 nt, Artificial Sequence
  Description of Artificial Sequence: Synthetic oligonucleotide
gauaaugcugcuggagcag

SEQ ID NO: 1662912 - RNA, 19 nt, Artificial Sequence
  Description of Artificial Sequence: Synthetic oligonucleotide
cauuaaauguucauuagau

SEQ ID NO: 1662913 - RNA, 19 nt, Artificial Sequence
  Description of Artificial Sequence: Synthetic oligonucleotide
cuggacuucugucggauag

SEQ ID NO: 1662914 - RNA, 19 nt, Artificial Sequence
  Description of Artificial Sequence: Synthetic oligonucleotide
uggucguccaccaccgaag

SEQ ID NO: 1662915 - RNA, 19 nt, Artificial Sequence
  Description of Artificial Sequence: Synthetic oligonucleotide
ugucggauagccugugaug

SEQ ID NO: 1662916 - RNA, 19 nt, Artificial Sequence
  Description of Artificial Sequence: Synthetic oligonucleotide
cauucacccgaguuuuacg

SEQ ID NO: 1662917 - RNA, 19 nt, Artificial Sequence
  Description of Artificial Sequence: Synthetic oligonucleotide
ugaacaguucuuucccaga

SEQ ID NO: 1662918 - RNA, 19 nt, Artificial Sequence
  Description of Artificial Sequence: Synthetic oligonucleotide
uaaacacacagcgguaaca

SEQ ID NO: 1662919 - RNA, 19 nt, Artificial Sequence
  Description of Artificial Sequence: Synthetic oligonucleotide
ugcuacaauccgcuuuaag

SEQ ID NO: 1662920 - RNA, 19 nt, Artificial Sequence
  Description of Artificial Sequence: Synthetic oligonucleotide
aguggcuauauacuuuuaa

SEQ ID NO: 1662921 - RNA, 19 nt, Artificial Sequence
  Description of Artificial Sequence: Synthetic oligonucleotide
uagucuagguguacaggug

SEQ ID NO: 1662922 - RNA, 19 nt, Artificial Sequence
  Description of Artificial Sequence: Synthetic oligonucleotide
aguauccugugugugcugg

SEQ ID NO: 1662923 - RNA, 19 nt, Artificial Sequence
  Description of Artificial Sequence: Synthetic oligonucleotide
uucgauuuccagaggugcu

SEQ ID NO: 1662924 - RNA, 19 nt, Artificial Sequence
  Description of Artificial Sequence: Synthetic oligonucleotide
uugugaauuagggaaguau

SEQ ID NO: 1662925 - RNA, 19 nt, Artificial Sequence
  Description of Artificial Sequence: Synthetic oligonucleotide
ugcuccucauuaaauguuc

SEQ ID NO: 1662926 - RNA, 19 nt, Artificial Sequence
  Description of Artificial Sequence: Synthetic oligonucleotide
gggagaaucagaguuguag

SEQ ID NO: 1662927 - RNA, 19 nt, Artificial Sequence
  Description of Artificial Sequence: Synthetic oligonucleotide
uaaucgugccagcaugaac

SEQ ID NO: 1662928 - RNA, 19 nt, Artificial Sequence
  Description of Artificial Sequence: Synthetic oligonucleotide
aggauuugauucugcaaga

SEQ ID NO: 1662929 - RNA, 19 nt, Artificial Sequence
  Description of Artificial Sequence: Synthetic oligonucleotide
  modified_base (5)..(5): a, c, u, g, unknown or other
uccanagcuuucucagagc

SEQ ID NO: 1662930 - RNA, 19 nt, Artificial Sequence
  Description of Artificial Sequence: Synthetic oligonucleotide
ucacccgaguuuuacgaca

SEQ ID NO: 1662931 - RNA, 19 nt, Artificial Sequence
  Description of Artificial Sequence: Synthetic oligonucleotide
cuuguuugaaucaaacggu

SEQ ID NO: 1662932 - RNA, 19 nt, Artificial Sequence
  Description of Artificial Sequence: Synthetic oligonucleotide
ucuucauuuuggguagcag

SEQ ID NO: 1662933 - RNA, 19 nt, Artificial Sequence
  Description of Artificial Sequence: Synthetic oligonucleotide
uuuuaaaccccuggaguaa

SEQ ID NO: 1662934 - RNA, 19 nt, Artificial Sequence
  Description of Artificial Sequence: Synthetic oligonucleotide
cugagucuuaaucuuucug

SEQ ID NO: 1662935 - RNA, 19 nt, Artificial Sequence
  Description of Artificial Sequence: Synthetic oligonucleotide
acagcgguaacaaaacaca

SEQ ID NO: 1662936 - RNA, 19 nt, Artificial Sequence
  Description of Artificial Sequence: Synthetic oligonucleotide
caguacagaacuugagcug

SEQ ID NO: 1662937 - RNA, 19 nt, Artificial Sequence
  Description of Artificial Sequence: Synthetic oligonucleotide
ccuggaguaaucuuuugag

SEQ ID NO: 1662938 - RNA, 19 nt, Artificial Sequence
  Description of Artificial Sequence: Synthetic oligonucleotide
aguaaucuuuugaguuucc

SEQ ID NO: 1662939 - RNA, 19 nt, Artificial Sequence
  Description of Artificial Sequence: Synthetic oligonucleotide
gggugauucaugucaauug

SEQ ID NO: 1662940 - RNA, 19 nt, Artificial Sequence
  Description of Artificial Sequence: Synthetic oligonucleotide
auaguauccugugugugcu

SEQ ID NO: 1662941 - RNA, 19 nt, Artificial Sequence
  Description of Artificial Sequence: Synthetic oligonucleotide
gauuugaugguuuccuggu

SEQ ID NO: 1662942 - RNA, 19 nt, Artificial Sequence
  Description of Artificial Sequence: Synthetic oligonucleotide
agagcaaguagaaagcuuu

SEQ ID NO: 1662943 - RNA, 19 nt, Artificial Sequence
  Description of Artificial Sequence: Synthetic oligonucleotide
uuuccacauaaucgugcca

SEQ ID NO: 1662944 - RNA, 19 nt, Artificial Sequence
  Description of Artificial Sequence: Synthetic oligonucleotide
aauacccugggugauucau

SEQ ID NO: 1662945 - RNA, 19 nt, Artificial Sequence
  Description of Artificial Sequence: Synthetic oligonucleotide
agcugugugauaauaggcu

SEQ ID NO: 1662946 - RNA, 19 nt, Artificial Sequence
  Description of Artificial Sequence: Synthetic oligonucleotide
guggcuauauacuuuuaaa

SEQ ID NO: 1662947 - RNA, 19 nt, Artificial Sequence
  Description of Artificial Sequence: Synthetic oligonucleotide
gugaauuagggaaguauca

SEQ ID NO: 1662948 - RNA, 19 nt, Artificial Sequence
  Description of Artificial Sequence: Synthetic oligonucleotide
uaaaccccuggaguaaucu

SEQ ID NO: 1662949 - RNA, 19 nt, Artificial Sequence
  Description of Artificial Sequence: Synthetic oligonucleotide
accgaagcaguugugauau

SEQ ID NO: 1662950 - RNA, 19 nt, Artificial Sequence
  Description of Artificial Sequence: Synthetic oligonucleotide
guaccaccaaucaaggaac

SEQ ID NO: 1662951 - RNA, 19 nt, Artificial Sequence
  Description of Artificial Sequence: Synthetic oligonucleotide
ggugauucaugucaauuga

SEQ ID NO: 1662952 - RNA, 19 nt, Artificial Sequence
  Description of Artificial Sequence: Synthetic oligonucleotide
gaugacuccucacauaauu

SEQ ID NO: 1662953 - RNA, 19 nt, Artificial Sequence
  Description of Artificial Sequence: Synthetic oligonucleotide
ugugugauaauaggcuaau

SEQ ID NO: 1662954 - RNA, 19 nt, Artificial Sequence
  Description of Artificial Sequence: Synthetic oligonucleotide
ugugaugggacaggcuuga

SEQ ID NO: 1662955 - RNA, 19 nt, Artificial Sequence
  Description of Artificial Sequence: Synthetic oligonucleotide
cauuaaacuguccugugcu

SEQ ID NO: 1662956 - RNA, 19 nt, Artificial Sequence
  Description of Artificial Sequence: Synthetic oligonucleotide
ucauucacccgaguuuuac

SEQ ID NO: 1662957 - RNA, 19 nt, Artificial Sequence
  Description of Artificial Sequence: Synthetic oligonucleotide
gaauuagggaaguaucaau

SEQ ID NO: 1662958 - RNA, 19 nt, Artificial Sequence
  Description of Artificial Sequence: Synthetic oligonucleotide
cauccccauuaacaaaccc

SEQ ID NO: 1662959 - RNA, 19 nt, Artificial Sequence
  Description of Artificial Sequence: Synthetic oligonucleotide
uugcuagcuuucauucaca

SEQ ID NO: 1662960 - RNA, 19 nt, Artificial Sequence
  Description of Artificial Sequence: Synthetic oligonucleotide
agcaaguagaaagcuuuug

SEQ ID NO: 1662961 - RNA, 19 nt, Artificial Sequence
  Description of Artificial Sequence: Synthetic oligonucleotide
  modified_base (15)..(15): a, c, u, g, unknown or other
aggcgaugccuccanagcu

SEQ ID NO: 1662962 - RNA, 19 nt, Artificial Sequence
  Description of Artificial Sequence: Synthetic oligonucleotide
gagggauaaaggcgaugcc

SEQ ID NO: 1662963 - RNA, 19 nt, Artificial Sequence
  Description of Artificial Sequence: Synthetic oligonucleotide
agcuaacuuuaucuucuca

SEQ ID NO: 1662964 - RNA, 19 nt, Artificial Sequence
  Description of Artificial Sequence: Synthetic oligonucleotide
  modified_base (19)..(19): a, c, u, g, unknown or other
auaaaggcgaugccuccan

SEQ ID NO: 1662965 - RNA, 19 nt, Artificial Sequence
  Description of Artificial Sequence: Synthetic oligonucleotide
uccacauaaucgugccagc

SEQ ID NO: 1662966 - RNA, 19 nt, Artificial Sequence
  Description of Artificial Sequence: Synthetic oligonucleotide
auagauggcuggucgucca

SEQ ID NO: 1662967 - RNA, 19 nt, Artificial Sequence
  Description of Artificial Sequence: Synthetic oligonucleotide
gauaaguauuuuccuacau

SEQ ID NO: 1662968 - RNA, 19 nt, Artificial Sequence
  Description of Artificial Sequence: Synthetic oligonucleotide
uucacccgaguuuuacgac

SEQ ID NO: 1662969 - RNA, 19 nt, Artificial Sequence
  Description of Artificial Sequence: Synthetic oligonucleotide
cgaguuuuacgacacagag

SEQ ID NO: 1662970 - RNA, 19 nt, Artificial Sequence
  Description of Artificial Sequence: Synthetic oligonucleotide
uaauaagcaugaacuuguu

SEQ ID NO: 1662971 - RNA, 19 nt, Artificial Sequence
  Description of Artificial Sequence: Synthetic oligonucleotide
cauaaucgugccagcauga

SEQ ID NO: 1662972 - RNA, 19 nt, Artificial Sequence
  Description of Artificial Sequence: Synthetic oligonucleotide
auuaaacuguccugugcua

SEQ ID NO: 1662973 - RNA, 19 nt, Artificial Sequence
  Description of Artificial Sequence: Synthetic oligonucleotide
uagugugcaggauuugauu

SEQ ID NO: 1662974 - RNA, 19 nt, Artificial Sequence
  Description of Artificial Sequence: Synthetic oligonucleotide
ucaugucaauugagcaaac

SEQ ID NO: 1662975 - RNA, 19 nt, Artificial Sequence
  Description of Artificial Sequence: Synthetic oligonucleotide
uuuaaaccccuggaguaau

SEQ ID NO: 1662976 - RNA, 19 nt, Artificial Sequence
  Description of Artificial Sequence: Synthetic oligonucleotide
cauuuuggguagcagggga

SEQ ID NO: 1662977 - RNA, 19 nt, Artificial Sequence
  Description of Artificial Sequence: Synthetic oligonucleotide
ucgaguggcuauauacuuu

SEQ ID NO: 1662978 - RNA, 19 nt, Artificial Sequence
  Description of Artificial Sequence: Synthetic oligonucleotide
ugcuagcuuucauucacau

SEQ ID NO: 1662979 - RNA, 19 nt, Artificial Sequence
  Description of Artificial Sequence: Synthetic oligonucleotide
aguugugauaugagccccg

SEQ ID NO: 1662980 - RNA, 19 nt, Artificial Sequence
  Description of Artificial Sequence: Synthetic oligonucleotide
uuacuguaguugugaauua

SEQ ID NO: 1662981 - RNA, 19 nt, Artificial Sequence
  Description of Artificial Sequence: Synthetic oligonucleotide
uuaaaccccuggaguaauc

SEQ ID NO: 1662982 - RNA, 19 nt, Artificial Sequence
  Description of Artificial Sequence: Synthetic oligonucleotide
uugccauaccacagcaguc

SEQ ID NO: 1662983 - RNA, 19 nt, Artificial Sequence
  Description of Artificial Sequence: Synthetic oligonucleotide
gaagagcgggucucacugc

SEQ ID NO: 1662984 - RNA, 19 nt, Artificial Sequence
  Description of Artificial Sequence: Synthetic oligonucleotide
ucaaacggugcugagucuu

SEQ ID NO: 1662985 - RNA, 19 nt, Artificial Sequence
  Description of Artificial Sequence: Synthetic oligonucleotide
ugcugucauuaaacugucc

SEQ ID NO: 1662986 - RNA, 19 nt, Artificial Sequence
  Description of Artificial Sequence: Synthetic oligonucleotide
gauagccugugaugggaca

SEQ ID NO: 1662987 - RNA, 19 nt, Artificial Sequence
  Description of Artificial Sequence: Synthetic oligonucleotide
caccaaucaaggaacugca

SEQ ID NO: 1662988 - RNA, 19 nt, Artificial Sequence
  Description of Artificial Sequence: Synthetic oligonucleotide
gauaaaggcgaugccucca

SEQ ID NO: 1662989 - RNA, 19 nt, Artificial Sequence
  Description of Artificial Sequence: Synthetic oligonucleotide
ucaccaacgcuucgauuuc

SEQ ID NO: 1662990 - RNA, 19 nt, Artificial Sequence
  Description of Artificial Sequence: Synthetic oligonucleotide
auaugagccccguguucag

SEQ ID NO: 1662991 - RNA, 19 nt, Artificial Sequence
  Description of Artificial Sequence: Synthetic oligonucleotide
uugugauaugagccccgug

SEQ ID NO: 1662992 - RNA, 19 nt, Artificial Sequence
  Description of Artificial Sequence: Synthetic oligonucleotide
  modified_base (3)..(3): a, c, u, g, unknown or other
canagaaagccgguggaga

SEQ ID NO: 1662993 - RNA, 19 nt, Artificial Sequence
  Description of Artificial Sequence: Synthetic oligonucleotide
acacagcgguaacaaaaca

SEQ ID NO: 1662994 - RNA, 19 nt, Artificial Sequence
  Description of Artificial Sequence: Synthetic oligonucleotide
caacgcuucgauuuccaga

SEQ ID NO: 1662995 - RNA, 19 nt, Artificial Sequence
  Description of Artificial Sequence: Synthetic oligonucleotide
uccugguucucagaagagu

SEQ ID NO: 1662996 - RNA, 19 nt, Artificial Sequence
  Description of Artificial Sequence: Synthetic oligonucleotide
uuucaguucucuggagagu

SEQ ID NO: 1662997 - RNA, 19 nt, Artificial Sequence
  Description of Artificial Sequence: Synthetic oligonucleotide
guauccugugugugcuggg

SEQ ID NO: 1662998 - RNA, 19 nt, Artificial Sequence
  Description of Artificial Sequence: Synthetic oligonucleotide
guuguagucuagguguaca

SEQ ID NO: 1662999 - RNA, 19 nt, Artificial Sequence
  Description of Artificial Sequence: Synthetic oligonucleotide
agaaaacucauaagagcaa

SEQ ID NO: 1663000 - RNA, 19 nt, Artificial Sequence
  Description of Artificial Sequence: Synthetic oligonucleotide
acuguaucauucacccgag

SEQ ID NO: 1663001 - RNA, 19 nt, Artificial Sequence
  Description of Artificial Sequence: Synthetic oligonucleotide
uccuugggaagaccagcac

SEQ ID NO: 1663002 - RNA, 19 nt, Artificial Sequence
  Description of Artificial Sequence: Synthetic oligonucleotide
ucugucggauagccuguga

SEQ ID NO: 1663003 - RNA, 19 nt, Artificial Sequence
  Description of Artificial Sequence: Synthetic oligonucleotide
gacuaauaagcaugaacuu

SEQ ID NO: 1663004 - RNA, 19 nt, Artificial Sequence
  Description of Artificial Sequence: Synthetic oligonucleotide
ugggugauucaugucaauu

SEQ ID NO: 1663005 - RNA, 19 nt, Artificial Sequence
  Description of Artificial Sequence: Synthetic oligonucleotide
aaccccuggaguaaucuuu

SEQ ID NO: 1663006 - RNA, 19 nt, Artificial Sequence
  Description of Artificial Sequence: Synthetic oligonucleotide
agcuuuugcuccucauuaa

SEQ ID NO: 1663007 - RNA, 19 nt, Artificial Sequence
  Description of Artificial Sequence: Synthetic oligonucleotide
ccaccaaucaaggaacugc

SEQ ID NO: 1663008 - RNA, 19 nt, Artificial Sequence
  Description of Artificial Sequence: Synthetic oligonucleotide
auagccagagguggcaaga

SEQ ID NO: 1663009 - RNA, 19 nt, Artificial Sequence
  Description of Artificial Sequence: Synthetic oligonucleotide
gauaauaggcuaauuucuu

SEQ ID NO: 1663010 - RNA, 19 nt, Artificial Sequence
  Description of Artificial Sequence: Synthetic oligonucleotide
ucgauuuccagaggugcuc

SEQ ID NO: 1663011 - RNA, 19 nt, Artificial Sequence
  Description of Artificial Sequence: Synthetic oligonucleotide
caugaacaguucuuuccca

SEQ ID NO: 1663012 - RNA, 19 nt, Artificial Sequence
  Description of Artificial Sequence: Synthetic oligonucleotide
cuagcagagugaagauuuc

SEQ ID NO: 1663013 - RNA, 19 nt, Artificial Sequence
  Description of Artificial Sequence: Synthetic oligonucleotide
ggauaaaggcgaugccucc

SEQ ID NO: 1663014 - RNA, 19 nt, Artificial Sequence
  Description of Artificial Sequence: Synthetic oligonucleotide
guaaucuuuugaguuucca

SEQ ID NO: 1663015 - RNA, 19 nt, Artificial Sequence
  Description of Artificial Sequence: Synthetic oligonucleotide
cauagugugcaggauuuga

SEQ ID NO: 1663016 - RNA, 19 nt, Artificial Sequence
  Description of Artificial Sequence: Synthetic oligonucleotide
gcugucauuaaacuguccu

SEQ ID NO: 1663017 - RNA, 19 nt, Artificial Sequence
  Description of Artificial Sequence: Synthetic oligonucleotide
ucuggagaguagaguuuaa

SEQ ID NO: 1663018 - RNA, 19 nt, Artificial Sequence
  Description of Artificial Sequence: Synthetic oligonucleotide
  modified_base (18)..(18): a, c, u, g, unknown or other
uaaaggcgaugccuccana

SEQ ID NO: 1663019 - RNA, 19 nt, Artificial Sequence
  Description of Artificial Sequence: Synthetic oligonucleotide
cugcugucauuaaacuguc

SEQ ID NO: 1663020 - RNA, 19 nt, Artificial Sequence
  Description of Artificial Sequence: Synthetic oligonucleotide
uggacuucugucggauagc

SEQ ID NO: 1663021 - RNA, 19 nt, Artificial Sequence
  Description of Artificial Sequence: Synthetic oligonucleotide
uacgacacagagggcacac

SEQ ID NO: 1663022 - RNA, 19 nt, Artificial Sequence
  Description of Artificial Sequence: Synthetic oligonucleotide
aucaaacggugcugagucu

SEQ ID NO: 1663023 - RNA, 19 nt, Artificial Sequence
  Description of Artificial Sequence: Synthetic oligonucleotide
gaguaccaccaaucaagga

SEQ ID NO: 1663024 - RNA, 19 nt, Artificial Sequence
  Description of Artificial Sequence: Synthetic oligonucleotide
cagcaugaacaguucuuuc

SEQ ID NO: 1663025 - RNA, 19 nt, Artificial Sequence
  Description of Artificial Sequence: Synthetic oligonucleotide
ugaugacuccucacauaau

SEQ ID NO: 1663026 - RNA, 19 nt, Artificial Sequence
  Description of Artificial Sequence: Synthetic oligonucleotide
uuuggguagcaggggagaa

SEQ ID NO: 1663027 - RNA, 19 nt, Artificial Sequence
  Description of Artificial Sequence: Synthetic oligonucleotide
auagugugcaggauuugau

SEQ ID NO: 1663028 - RNA, 19 nt, Artificial Sequence
  Description of Artificial Sequence: Synthetic oligonucleotide
  modified_base (7)..(7): a, c, u, g, unknown or other
cacccanagaaagccggug

SEQ ID NO: 1663029 - RNA, 19 nt, Artificial Sequence
  Description of Artificial Sequence: Synthetic oligonucleotide
gaaucaaacggugcugagu

SEQ ID NO: 1663030 - RNA, 19 nt, Artificial Sequence
  Description of Artificial Sequence: Synthetic oligonucleotide
gacuccucacauaauuaaa

SEQ ID NO: 1663031 - RNA, 19 nt, Artificial Sequence
  Description of Artificial Sequence: Synthetic oligonucleotide
ggcuaauuucuuucaguuc

SEQ ID NO: 1663032 - RNA, 19 nt, Artificial Sequence
  Description of Artificial Sequence: Synthetic oligonucleotide
accaaucaaggaacugcag

SEQ ID NO: 1663033 - RNA, 19 nt, Artificial Sequence
  Description of Artificial Sequence: Synthetic oligonucleotide
cuccuugggaagaccagca

SEQ ID NO: 1663034 - RNA, 19 nt, Artificial Sequence
  Description of Artificial Sequence: Synthetic oligonucleotide
cccauuaacaaacccuauc

SEQ ID NO: 1663035 - RNA, 19 nt, Artificial Sequence
  Description of Artificial Sequence: Synthetic oligonucleotide
cuugaugacuccucacaua

SEQ ID NO: 1663036 - RNA, 19 nt, Artificial Sequence
  Description of Artificial Sequence: Synthetic oligonucleotide
  modified_base (11)..(11): a, c, u, g, unknown or other
gaugccuccanagcuuucu

SEQ ID NO: 1663037 - RNA, 19 nt, Artificial Sequence
  Description of Artificial Sequence: Synthetic oligonucleotide
uuacgacacagagggcaca

SEQ ID NO: 1663038 - RNA, 19 nt, Artificial Sequence
  Description of Artificial Sequence: Synthetic oligonucleotide
agauuucaucaaaccaccu

SEQ ID NO: 1663039 - RNA, 19 nt, Artificial Sequence
  Description of Artificial Sequence: Synthetic oligonucleotide
aauccgcuuuaagccauaa

SEQ ID NO: 1663040 - RNA, 19 nt, Artificial Sequence
  Description of Artificial Sequence: Synthetic oligonucleotide
cuuucccagaaucauguau

SEQ ID NO: 1663041 - RNA, 19 nt, Artificial Sequence
  Description of Artificial Sequence: Synthetic oligonucleotide
cuggaguaaucuuuugagu

SEQ ID NO: 1663042 - RNA, 19 nt, Artificial Sequence
  Description of Artificial Sequence: Synthetic oligonucleotide
guagcaggggagaaucaga

SEQ ID NO: 1663043 - RNA, 19 nt, Artificial Sequence
  Description of Artificial Sequence: Synthetic oligonucleotide
cuagaaagauaaugcugcu

SEQ ID NO: 1663044 - RNA, 19 nt, Artificial Sequence
  Description of Artificial Sequence: Synthetic oligonucleotide
agcgguaacaaaacacaua

SEQ ID NO: 1663045 - RNA, 19 nt, Artificial Sequence
  Description of Artificial Sequence: Synthetic oligonucleotide
agcagucuuguggccuuac

SEQ ID NO: 1663046 - RNA, 19 nt, Artificial Sequence
  Description of Artificial Sequence: Synthetic oligonucleotide
ugagccccguguucagcca

SEQ ID NO: 1663047 - RNA, 19 nt, Artificial Sequence
  Description of Artificial Sequence: Synthetic oligonucleotide
acagcagucuuguggccuu

SEQ ID NO: 1663048 - RNA, 19 nt, Artificial Sequence
  Description of Artificial Sequence: Synthetic oligonucleotide
auaaucgugccagcaugaa

SEQ ID NO: 1663049 - RNA, 19 nt, Artificial Sequence
  Description of Artificial Sequence: Synthetic oligonucleotide
  modified_base (4)..(4): a, c, u, g, unknown or other
ccanagaaagccgguggag

SEQ ID NO: 1663050 - RNA, 19 nt, Artificial Sequence
  Description of Artificial Sequence: Synthetic oligonucleotide
agcgggucucacugcuguc

SEQ ID NO: 1663051 - RNA, 19 nt, Artificial Sequence
  Description of Artificial Sequence: Synthetic oligonucleotide
acaauccgcuuuaagccau

SEQ ID NO: 1663052 - RNA, 19 nt, Artificial Sequence
  Description of Artificial Sequence: Synthetic oligonucleotide
caggcuugaugacuccuca

SEQ ID NO: 1663053 - RNA, 19 nt, Artificial Sequence
  Description of Artificial Sequence: Synthetic oligonucleotide
guuuuacgacacagagggc

SEQ ID NO: 1663054 - RNA, 19 nt, Artificial Sequence
  Description of Artificial Sequence: Synthetic oligonucleotide
ggucguccaccaccgaagc

SEQ ID NO: 1663055 - RNA, 19 nt, Artificial Sequence
  Description of Artificial Sequence: Synthetic oligonucleotide
auccgcuuuaagccauaaa

SEQ ID NO: 1663056 - RNA, 19 nt, Artificial Sequence
  Description of Artificial Sequence: Synthetic oligonucleotide
cccgaguuuuacgacacag

SEQ ID NO: 1663057 - RNA, 19 nt, Artificial Sequence
  Description of Artificial Sequence: Synthetic oligonucleotide
cagagcagucagugauuug

SEQ ID NO: 1663058 - RNA, 19 nt, Artificial Sequence
  Description of Artificial Sequence: Synthetic oligonucleotide
guacagaacuugagcugug

SEQ ID NO: 1663059 - RNA, 19 nt, Artificial Sequence
  Description of Artificial Sequence: Synthetic oligonucleotide
  modified_base (3)..(3): a, c, u, g, unknown or other
canagcuuucucagagcua

SEQ ID NO: 1663060 - RNA, 19 nt, Artificial Sequence
  Description of Artificial Sequence: Synthetic oligonucleotide
cccugggugauucauguca

SEQ ID NO: 1663061 - RNA, 19 nt, Artificial Sequence
  Description of Artificial Sequence: Synthetic oligonucleotide
  modified_base (8)..(8): a, c, u, g, unknown or other
acacccanagaaagccggu

SEQ ID NO: 1663062 - RNA, 19 nt, Artificial Sequence
  Description of Artificial Sequence: Synthetic oligonucleotide
cgguggagagggauaaagg

SEQ ID NO: 1663063 - RNA, 19 nt, Artificial Sequence
  Description of Artificial Sequence: Synthetic oligonucleotide
cucuggagaguagaguuua

SEQ ID NO: 1663064 - RNA, 19 nt, Artificial Sequence
  Description of Artificial Sequence: Synthetic oligonucleotide
ggcuggucguccaccaccg

SEQ ID NO: 1663065 - RNA, 19 nt, Artificial Sequence
  Description of Artificial Sequence: Synthetic oligonucleotide
acagacuaauaagcaugaa

SEQ ID NO: 1663066 - RNA, 19 nt, Artificial Sequence
  Description of Artificial Sequence: Synthetic oligonucleotide
gcuucgauuuccagaggug

SEQ ID NO: 1663067 - RNA, 19 nt, Artificial Sequence
  Description of Artificial Sequence: Synthetic oligonucleotide
  modified_base (4)..(4): a, c, u, g, unknown or other
ccanagcuuucucagagcu

SEQ ID NO: 1663068 - RNA, 19 nt, Artificial Sequence
  Description of Artificial Sequence: Synthetic oligonucleotide
cccguguucagccauagua

SEQ ID NO: 1663069 - RNA, 19 nt, Artificial Sequence
  Description of Artificial Sequence: Synthetic oligonucleotide
ccagaaucauguauuguua

SEQ ID NO: 1663070 - RNA, 19 nt, Artificial Sequence
  Description of Artificial Sequence: Synthetic oligonucleotide
gcuugcuagcuuucauuca

SEQ ID NO: 1663071 - RNA, 19 nt, Artificial Sequence
  Description of Artificial Sequence: Synthetic oligonucleotide
guggcaagaacuguaucau

SEQ ID NO: 1663072 - RNA, 19 nt, Artificial Sequence
  Description of Artificial Sequence: Synthetic oligonucleotide
cguguucagccauaguauc

SEQ ID NO: 1663073 - RNA, 19 nt, Artificial Sequence
  Description of Artificial Sequence: Synthetic oligonucleotide
cuggucguccaccaccgaa

SEQ ID NO: 1663074 - RNA, 19 nt, Artificial Sequence
  Description of Artificial Sequence: Synthetic oligonucleotide
ccauaguauccugugugug

SEQ ID NO: 1663075 - RNA, 19 nt, Artificial Sequence
  Description of Artificial Sequence: Synthetic oligonucleotide
accaacgcuucgauuucca

SEQ ID NO: 1663076 - RNA, 19 nt, Artificial Sequence
  Description of Artificial Sequence: Synthetic oligonucleotide
gaguuguagucuaggugua

SEQ ID NO: 1663077 - RNA, 19 nt, Artificial Sequence
  Description of Artificial Sequence: Synthetic oligonucleotide
ggugcugagucuuaaucuu

SEQ ID NO: 1663078 - RNA, 19 nt, Artificial Sequence
  Description of Artificial Sequence: Synthetic oligonucleotide
ccgguggagagggauaaag

SEQ ID NO: 1663079 - RNA, 19 nt, Artificial Sequence
  Description of Artificial Sequence: Synthetic oligonucleotide
caccgaagcaguugugaua

SEQ ID NO: 1663080 - RNA, 19 nt, Artificial Sequence
  Description of Artificial Sequence: Synthetic oligonucleotide
ccaacgcuucgauuuccag

SEQ ID NO: 1663081 - RNA, 19 nt, Artificial Sequence
  Description of Artificial Sequence: Synthetic oligonucleotide
  modified_base (5)..(5): a, c, u, g, unknown or other
cccanagaaagccggugga

SEQ ID NO: 1663082 - RNA, 19 nt, Artificial Sequence
  Description of Artificial Sequence: Synthetic oligonucleotide
acccgaguuuuacgacaca

SEQ ID NO: 1663083 - RNA, 19 nt, Artificial Sequence
  Description of Artificial Sequence: Synthetic oligonucleotide
caugucaauugagcaaacu

SEQ ID NO: 1663084 - RNA, 19 nt, Artificial Sequence
  Description of Artificial Sequence: Synthetic oligonucleotide
ggauagccugugaugggac

SEQ ID NO: 1663085 - RNA, 19 nt, Artificial Sequence
  Description of Artificial Sequence: Synthetic oligonucleotide
cuucugucggauagccugu

SEQ ID NO: 1663086 - RNA, 19 nt, Artificial Sequence
  Description of Artificial Sequence: Synthetic oligonucleotide
caccaccgaagcaguugug

SEQ ID NO: 1663087 - RNA, 19 nt, Artificial Sequence
  Description of Artificial Sequence: Synthetic oligonucleotide
caaacggugcugagucuua

SEQ ID NO: 1663088 - RNA, 19 nt, Artificial Sequence
  Description of Artificial Sequence: Synthetic oligonucleotide
ucgugccagcaugaacagu

SEQ ID NO: 1663089 - RNA, 19 nt, Artificial Sequence
  Description of Artificial Sequence: Synthetic oligonucleotide
gucguccaccaccgaagca

SEQ ID NO: 1663090 - RNA, 19 nt, Artificial Sequence
  Description of Artificial Sequence: Synthetic oligonucleotide
gcucccugcuacaauccgc

SEQ ID NO: 1663091 - RNA, 19 nt, Artificial Sequence
  Description of Artificial Sequence: Synthetic oligonucleotide
cccagaaucauguauuguu

SEQ ID NO: 1663092 - RNA, 19 nt, Artificial Sequence
  Description of Artificial Sequence: Synthetic oligonucleotide
ccgaguuuuacgacacaga

SEQ ID NO: 1663093 - RNA, 19 nt, Artificial Sequence
  Description of Artificial Sequence: Synthetic oligonucleotide
cugucggauagccugugau

SEQ ID NO: 1663094 - RNA, 19 nt, Artificial Sequence
  Description of Artificial Sequence: Synthetic oligonucleotide
cagcgguaacaaaacacau

SEQ ID NO: 1663095 - RNA, 19 nt, Artificial Sequence
  Description of Artificial Sequence: Synthetic oligonucleotide
ccugcuacaauccgcuuua

SEQ ID NO: 1663096 - RNA, 19 nt, Artificial Sequence
  Description of Artificial Sequence: Synthetic oligonucleotide
cccuggaguaaucuuuuga

SEQ ID NO: 1663097 - RNA, 19 nt, Artificial Sequence
  Description of Artificial Sequence: Synthetic oligonucleotide
gccauaguauccugugugu

SEQ ID NO: 1663098 - RNA, 19 nt, Artificial Sequence
  Description of Artificial Sequence: Synthetic oligonucleotide
guugugauaugagccccgu

SEQ ID NO: 1663099 - RNA, 19 nt, Artificial Sequence
  Description of Artificial Sequence: Synthetic oligonucleotide
ccuacaucucaucauugcu

SEQ ID NO: 1663100 - RNA, 19 nt, Artificial Sequence
  Description of Artificial Sequence: Synthetic oligonucleotide
  modified_base (7)..(7): a, c, u, g, unknown or other
ccuccanagcuuucucaga

SEQ ID NO: 1663101 - RNA, 19 nt, Artificial Sequence
  Description of Artificial Sequence: Synthetic oligonucleotide
ggcggugggguaggcagag

SEQ ID NO: 1663102 - RNA, 19 nt, Artificial Sequence
  Description of Artificial Sequence: Synthetic oligonucleotide
ccugggugauucaugucaa

SEQ ID NO: 1663103 - RNA, 19 nt, Artificial Sequence
  Description of Artificial Sequence: Synthetic oligonucleotide
acccuaucgaguggcuaua

SEQ ID NO: 1663104 - RNA, 19 nt, Artificial Sequence
  Description of Artificial Sequence: Synthetic oligonucleotide
caucauugcuugcuagcuu

SEQ ID NO: 1663105 - RNA, 19 nt, Artificial Sequence
  Description of Artificial Sequence: Synthetic oligonucleotide
ucccugcuacaauccgcuu

SEQ ID NO: 1663106 - RNA, 19 nt, Artificial Sequence
  Description of Artificial Sequence: Synthetic oligonucleotide
gcagucuuguggccuuaca

SEQ ID NO: 1663107 - RNA, 19 nt, Artificial Sequence
  Description of Artificial Sequence: Synthetic oligonucleotide
gaguggcuauauacuuuua

SEQ ID NO: 1663108 - RNA, 19 nt, Artificial Sequence
  Description of Artificial Sequence: Synthetic oligonucleotide
ccacauaaucgugccagca

SEQ ID NO: 1663109 - RNA, 19 nt, Artificial Sequence
  Description of Artificial Sequence: Synthetic oligonucleotide
cagccauaguauccugugu

SEQ ID NO: 1663110 - RNA, 19 nt, Artificial Sequence
  Description of Artificial Sequence: Synthetic oligonucleotide
aucauucacccgaguuuua

SEQ ID NO: 1663111 - RNA, 19 nt, Artificial Sequence
  Description of Artificial Sequence: Synthetic oligonucleotide
caauccgcuuuaagccaua

SEQ ID NO: 1663112 - RNA, 19 nt, Artificial Sequence
  Description of Artificial Sequence: Synthetic oligonucleotide
gugagcucccugcuacaau

SEQ ID NO: 1663113 - RNA, 19 nt, Artificial Sequence
  Description of Artificial Sequence: Synthetic oligonucleotide
ccguguucagccauaguau

SEQ ID NO: 1663114 - RNA, 19 nt, Artificial Sequence
  Description of Artificial Sequence: Synthetic oligonucleotide
ccauagugugcaggauuug

SEQ ID NO: 1663115 - RNA, 19 nt, Artificial Sequence
  Description of Artificial Sequence: Synthetic oligonucleotide
gagccccguguucagccau

SEQ ID NO: 1663116 - RNA, 19 nt, Artificial Sequence
  Description of Artificial Sequence: Synthetic oligonucleotide
cuguaucauucacccgagu

SEQ ID NO: 1663117 - RNA, 19 nt, Artificial Sequence
  Description of Artificial Sequence: Synthetic oligonucleotide
gccauagugugcaggauuu

SEQ ID NO: 1663118 - RNA, 19 nt, Artificial Sequence
  Description of Artificial Sequence: Synthetic oligonucleotide
  modified_base (14)..(14): a, c, u, g, unknown or other
ggcgaugccuccanagcuu

SEQ ID NO: 1663119 - RNA, 19 nt, Artificial Sequence
  Description of Artificial Sequence: Synthetic oligonucleotide
gcuagcuuucauucacauu

SEQ ID NO: 1663120 - RNA, 19 nt, Artificial Sequence
  Description of Artificial Sequence: Synthetic oligonucleotide
gccccguguucagccauag

SEQ ID NO: 1663121 - RNA, 19 nt, Artificial Sequence
  Description of Artificial Sequence: Synthetic oligonucleotide
gugugauaauaggcuaauu

SEQ ID NO: 1663122 - RNA, 19 nt, Artificial Sequence
  Description of Artificial Sequence: Synthetic oligonucleotide
cugggugauucaugucaau

SEQ ID NO: 1663123 - RNA, 19 nt, Artificial Sequence
  Description of Artificial Sequence: Synthetic oligonucleotide
cugcugugagcucccugcu

SEQ ID NO: 1663124 - RNA, 19 nt, Artificial Sequence
  Description of Artificial Sequence: Synthetic oligonucleotide
gcuggacuucugucggaua

SEQ ID NO: 1663125 - RNA, 19 nt, Artificial Sequence
  Description of Artificial Sequence: Synthetic oligonucleotide
ccuaucgaguggcuauaua

SEQ ID NO: 1663126 - RNA, 19 nt, Artificial Sequence
  Description of Artificial Sequence: Synthetic oligonucleotide
ccaccaccgaagcaguugu

SEQ ID NO: 1663127 - RNA, 19 nt, Artificial Sequence
  Description of Artificial Sequence: Synthetic oligonucleotide
cgcuucgauuuccagaggu

SEQ ID NO: 1663128 - RNA, 19 nt, Artificial Sequence
  Description of Artificial Sequence: Synthetic oligonucleotide
cgaguggcuauauacuuuu

SEQ ID NO: 1663129 - RNA, 19 nt, Artificial Sequence
  Description of Artificial Sequence: Synthetic oligonucleotide
cggauagccugugauggga

SEQ ID NO: 1663130 - RNA, 19 nt, Artificial Sequence
  Description of Artificial Sequence: Synthetic oligonucleotide
ccgaagcaguugugauaug

SEQ ID NO: 1663131 - RNA, 19 nt, Artificial Sequence
  Description of Artificial Sequence: Synthetic oligonucleotide
gguaggcagagcagucagu

SEQ ID NO: 1663132 - RNA, 19 nt, Artificial Sequence
  Description of Artificial Sequence: Synthetic oligonucleotide
cugcuacaauccgcuuuaa

SEQ ID NO: 1663133 - RNA, 19 nt, Artificial Sequence
  Description of Artificial Sequence: Synthetic oligonucleotide
  modified_base (12)..(12): a, c, u, g, unknown or other
cgaugccuccanagcuuuc

SEQ ID NO: 1663134 - RNA, 19 nt, Artificial Sequence
  Description of Artificial Sequence: Synthetic oligonucleotide
ccaccgaagcaguugugau

SEQ ID NO: 1663135 - RNA, 19 nt, Artificial Sequence
  Description of Artificial Sequence: Synthetic oligonucleotide
agccccguguucagccaua

SEQ ID NO: 1663136 - RNA, 19 nt, Artificial Sequence
  Description of Artificial Sequence: Synthetic oligonucleotide
cccugcuacaauccgcuuu

SEQ ID NO: 1663137 - RNA, 19 nt, Artificial Sequence
  Description of Artificial Sequence: Synthetic oligonucleotide
ggggagaaucagaguugua

SEQ ID NO: 1663138 - RNA, 19 nt, Artificial Sequence
  Description of Artificial Sequence: Synthetic oligonucleotide
ccccauuaacaaacccuau

SEQ ID NO: 1663139 - RNA, 19 nt, Artificial Sequence
  Description of Artificial Sequence: Synthetic oligonucleotide
gugaugggacaggcuugau

SEQ ID NO: 1663140 - RNA, 19 nt, Artificial Sequence
  Description of Artificial Sequence: Synthetic oligonucleotide
ccagcacuggcuggucucu

SEQ ID NO: 1663141 - RNA, 19 nt, Artificial Sequence
  Description of Artificial Sequence: Synthetic oligonucleotide
gccgguggagagggauaaa

SEQ ID NO: 1663142 - RNA, 19 nt, Artificial Sequence
  Description of Artificial Sequence: Synthetic oligonucleotide
cccuaucgaguggcuauau

SEQ ID NO: 1663143 - RNA, 19 nt, Artificial Sequence
  Description of Artificial Sequence: Synthetic oligonucleotide
ccccguguucagccauagu

SEQ ID NO: 1663144 - RNA, 19 nt, Artificial Sequence
  Description of Artificial Sequence: Synthetic oligonucleotide
acugguaaccuuuaaaggc

SEQ ID NO: 1663145 - RNA, 19 nt, Artificial Sequence
  Description of Artificial Sequence: Synthetic oligonucleotide
uuaugaauaacuauagcug

SEQ ID NO: 1663146 - RNA, 19 nt, Artificial Sequence
  Description of Artificial Sequence: Synthetic oligonucleotide
uaauaugcaccaaauaggg

SEQ ID NO: 1663147 - RNA, 19 nt, Artificial Sequence
  Description of Artificial Sequence: Synthetic oligonucleotide
ucaguuacgaguauggugc

SEQ ID NO: 1663148 - RNA, 19 nt, Artificial Sequence
  Description of Artificial Sequence: Synthetic oligonucleotide
caaaauuugagcuucaaug

SEQ ID NO: 1663149 - RNA, 19 nt, Artificial Sequence
  Description of Artificial Sequence: Synthetic oligonucleotide
aaaauuugagcuucaauga

SEQ ID NO: 1663150 - RNA, 19 nt, Artificial Sequence
  Description of Artificial Sequence: Synthetic oligonucleotide
uuagaccaaaacaacaggg

SEQ ID NO: 1663151 - RNA, 19 nt, Artificial Sequence
  Description of Artificial Sequence: Synthetic oligonucleotide
auauccauagacuugaugu

SEQ ID NO: 1663152 - RNA, 19 nt, Artificial Sequence
  Description of Artificial Sequence: Synthetic oligonucleotide
uuuaguaucugcuagcugu

SEQ ID NO: 1663153 - RNA, 19 nt, Artificial Sequence
  Description of Artificial Sequence: Synthetic oligonucleotide
aaagaaauucuuucagcgg

SEQ ID NO: 1663154 - RNA, 19 nt, Artificial Sequence
  Description of Artificial Sequence: Synthetic oligonucleotide
cuaauaugcaccaaauagg

SEQ ID NO: 1663155 - RNA, 19 nt, Artificial Sequence
  Description of Artificial Sequence: Synthetic oligonucleotide
ugagaguccaucaggaacg

SEQ ID NO: 1663156 - RNA, 19 nt, Artificial Sequence
  Description of Artificial Sequence: Synthetic oligonucleotide
uaugaauaacuauagcugc

SEQ ID NO: 1663157 - RNA, 19 nt, Artificial Sequence
  Description of Artificial Sequence: Synthetic oligonucleotide
aagaaauucuuucagcgga

SEQ ID NO: 1663158 - RNA, 19 nt, Artificial Sequence
  Description of Artificial Sequence: Synthetic oligonucleotide
aauuugagcuucaaugacc

SEQ ID NO: 1663159 - RNA, 19 nt, Artificial Sequence
  Description of Artificial Sequence: Synthetic oligonucleotide
aauaacuauagcugcagga

SEQ ID NO: 1663160 - RNA, 19 nt, Artificial Sequence
  Description of Artificial Sequence: Synthetic oligonucleotide
auuggaacgaaauuuucag

SEQ ID NO: 1663161 - RNA, 19 nt, Artificial Sequence
  Description of Artificial Sequence: Synthetic oligonucleotide
ugaauguuagagaauguca

SEQ ID NO: 1663162 - RNA, 19 nt, Artificial Sequence
  Description of Artificial Sequence: Synthetic oligonucleotide
uguuaauuauuuuaguauc

SEQ ID NO: 1663163 - RNA, 19 nt, Artificial Sequence
  Description of Artificial Sequence: Synthetic oligonucleotide
uacacuuguacaaugggug

SEQ ID NO: 1663164 - RNA, 19 nt, Artificial Sequence
  Description of Artificial Sequence: Synthetic oligonucleotide
uugacuaauucucaguuac

SEQ ID NO: 1663165 - RNA, 19 nt, Artificial Sequence
  Description of Artificial Sequence: Synthetic oligonucleotide
uuuaggacgagaauaugca

SEQ ID NO: 1663166 - RNA, 19 nt, Artificial Sequence
  Description of Artificial Sequence: Synthetic oligonucleotide
agcacauugagucuuuagg

SEQ ID NO: 1663167 - RNA, 19 nt, Artificial Sequence
  Description of Artificial Sequence: Synthetic oligonucleotide
gaacgaaauuuucagaaug

SEQ ID NO: 1663168 - RNA, 19 nt, Artificial Sequence
  Description of Artificial Sequence: Synthetic oligonucleotide
aaauucuuucagcggaagg

SEQ ID NO: 1663169 - RNA, 19 nt, Artificial Sequence
  Description of Artificial Sequence: Synthetic oligonucleotide
uaaauggugccucaugcag

SEQ ID NO: 1663170 - RNA, 19 nt, Artificial Sequence
  Description of Artificial Sequence: Synthetic oligonucleotide
cuuuaggacgagaauaugc

SEQ ID NO: 1663171 - RNA, 19 nt, Artificial Sequence
  Description of Artificial Sequence: Synthetic oligonucleotide
uucucaguuacgaguaugg

SEQ ID NO: 1663172 - RNA, 19 nt, Artificial Sequence
  Description of Artificial Sequence: Synthetic oligonucleotide
aauauauuggaacgaaauu

SEQ ID NO: 1663173 - RNA, 19 nt, Artificial Sequence
  Description of Artificial Sequence: Synthetic oligonucleotide
auaaauucuuuaugccacc

SEQ ID NO: 1663174 - RNA, 19 nt, Artificial Sequence
  Description of Artificial Sequence: Synthetic oligonucleotide
acauugagucuuuaggacg

SEQ ID NO: 1663175 - RNA, 19 nt, Artificial Sequence
  Description of Artificial Sequence: Synthetic oligonucleotide
cacauuuucccacuaaugc

SEQ ID NO: 1663176 - RNA, 19 nt, Artificial Sequence
  Description of Artificial Sequence: Synthetic oligonucleotide
agcaaccggaacuugaaac

SEQ ID NO: 1663177 - RNA, 19 nt, Artificial Sequence
  Description of Artificial Sequence: Synthetic oligonucleotide
uaaacauauccauagacuu

SEQ ID NO: 1663178 - RNA, 19 nt, Artificial Sequence
  Description of Artificial Sequence: Synthetic oligonucleotide
uaauuuaugccuucuccag

SEQ ID NO: 1663179 - RNA, 19 nt, Artificial Sequence
  Description of Artificial Sequence: Synthetic oligonucleotide
aaucuuagaccaaaacaac

SEQ ID NO: 1663180 - RNA, 19 nt, Artificial Sequence
  Description of Artificial Sequence: Synthetic oligonucleotide
acuaaugcagaguugucag

SEQ ID NO: 1663181 - RNA, 19 nt, Artificial Sequence
  Description of Artificial Sequence: Synthetic oligonucleotide
uguuagagaaugucaaggc

SEQ ID NO: 1663182 - RNA, 19 nt, Artificial Sequence
  Description of Artificial Sequence: Synthetic oligonucleotide
augggugacugauagaauc

SEQ ID NO: 1663183 - RNA, 19 nt, Artificial Sequence
  Description of Artificial Sequence: Synthetic oligonucleotide
uaaaccucacuaaacauau

SEQ ID NO: 1663184 - RNA, 19 nt, Artificial Sequence
  Description of Artificial Sequence: Synthetic oligonucleotide
uguguuaauuauuuuagua

SEQ ID NO: 1663185 - RNA, 19 nt, Artificial Sequence
  Description of Artificial Sequence: Synthetic oligonucleotide
auuuaugccuucuccagag

SEQ ID NO: 1663186 - RNA, 19 nt, Artificial Sequence
  Description of Artificial Sequence: Synthetic oligonucleotide
ugaagaauugggcacauuu

SEQ ID NO: 1663187 - RNA, 19 nt, Artificial Sequence
  Description of Artificial Sequence: Synthetic oligonucleotide
ccuaauaugcaccaaauag

SEQ ID NO: 1663188 - RNA, 19 nt, Artificial Sequence
  Description of Artificial Sequence: Synthetic oligonucleotide
uggaacgaaauuuucagaa

SEQ ID NO: 1663189 - RNA, 19 nt, Artificial Sequence
  Description of Artificial Sequence: Synthetic oligonucleotide
agucacauaaaagaacccg

SEQ ID NO: 1663190 - RNA, 19 nt, Artificial Sequence
  Description of Artificial Sequence: Synthetic oligonucleotide
acaaauagauuccuacuug

SEQ ID NO: 1663191 - RNA, 19 nt, Artificial Sequence
  Description of Artificial Sequence: Synthetic oligonucleotide
gaagcuauugcacacccac

SEQ ID NO: 1663192 - RNA, 19 nt, Artificial Sequence
  Description of Artificial Sequence: Synthetic oligonucleotide
uugagaguccaucaggaac

SEQ ID NO: 1663193 - RNA, 19 nt, Artificial Sequence
  Description of Artificial Sequence: Synthetic oligonucleotide
aauagauuccuacuugcuu

SEQ ID NO: 1663194 - RNA, 19 nt, Artificial Sequence
  Description of Artificial Sequence: Synthetic oligonucleotide
caaaucuuagaccaaaaca

SEQ ID NO: 1663195 - RNA, 19 nt, Artificial Sequence
  Description of Artificial Sequence: Synthetic oligonucleotide
auaacuauagcugcaggag

SEQ ID NO: 1663196 - RNA, 19 nt, Artificial Sequence
  Description of Artificial Sequence: Synthetic oligonucleotide
ucagauuauaaauucuuua

SEQ ID NO: 1663197 - RNA, 19 nt, Artificial Sequence
  Description of Artificial Sequence: Synthetic oligonucleotide
augcagaguugucagaaac

SEQ ID NO: 1663198 - RNA, 19 nt, Artificial Sequence
  Description of Artificial Sequence: Synthetic oligonucleotide
aguugucagaaacccaaac

SEQ ID NO: 1663199 - RNA, 19 nt, Artificial Sequence
  Description of Artificial Sequence: Synthetic oligonucleotide
ugaguaaaccucacuaaac

SEQ ID NO: 1663200 - RNA, 19 nt, Artificial Sequence
  Description of Artificial Sequence: Synthetic oligonucleotide
ucccauuauggccagcagg

SEQ ID NO: 1663201 - RNA, 19 nt, Artificial Sequence
  Description of Artificial Sequence: Synthetic oligonucleotide
uaggacgagaauaugcaca

SEQ ID NO: 1663202 - RNA, 19 nt, Artificial Sequence
  Description of Artificial Sequence: Synthetic oligonucleotide
aauuuaugccuucuccaga

SEQ ID NO: 1663203 - RNA, 19 nt, Artificial Sequence
  Description of Artificial Sequence: Synthetic oligonucleotide
gagaauaugcacaauccug

SEQ ID NO: 1663204 - RNA, 19 nt, Artificial Sequence
  Description of Artificial Sequence: Synthetic oligonucleotide
uauggugcauucuccaugc

SEQ ID NO: 1663205 - RNA, 19 nt, Artificial Sequence
  Description of Artificial Sequence: Synthetic oligonucleotide
acgagaauaugcacaaucc

SEQ ID NO: 1663206 - RNA, 19 nt, Artificial Sequence
  Description of Artificial Sequence: Synthetic oligonucleotide
aaauggugccucaugcagc

SEQ ID NO: 1663207 - RNA, 19 nt, Artificial Sequence
  Description of Artificial Sequence: Synthetic oligonucleotide
agcaccaucuuugagcuac

SEQ ID NO: 1663208 - RNA, 19 nt, Artificial Sequence
  Description of Artificial Sequence: Synthetic oligonucleotide
aaugcaguauccgugugug

SEQ ID NO: 1663209 - RNA, 19 nt, Artificial Sequence
  Description of Artificial Sequence: Synthetic oligonucleotide
acgaguauggugcauucuc

SEQ ID NO: 1663210 - RNA, 19 nt, Artificial Sequence
  Description of Artificial Sequence: Synthetic oligonucleotide
auauauuggaacgaaauuu

SEQ ID NO: 1663211 - RNA, 19 nt, Artificial Sequence
  Description of Artificial Sequence: Synthetic oligonucleotide
cuugaaaccagcaaccgga

SEQ ID NO: 1663212 - RNA, 19 nt, Artificial Sequence
  Description of Artificial Sequence: Synthetic oligonucleotide
acaggugaauguuagagaa

SEQ ID NO: 1663213 - RNA, 19 nt, Artificial Sequence
  Description of Artificial Sequence: Synthetic oligonucleotide
ugaauaacuauagcugcag

SEQ ID NO: 1663214 - RNA, 19 nt, Artificial Sequence
  Description of Artificial Sequence: Synthetic oligonucleotide
uaauucucaguuacgagua

SEQ ID NO: 1663215 - RNA, 19 nt, Artificial Sequence
  Description of Artificial Sequence: Synthetic oligonucleotide
uuucagcggaaggagaugg

SEQ ID NO: 1663216 - RNA, 19 nt, Artificial Sequence
  Description of Artificial Sequence: Synthetic oligonucleotide
acuugaaaccagcaaccgg

SEQ ID NO: 1663217 - RNA, 19 nt, Artificial Sequence
  Description of Artificial Sequence: Synthetic oligonucleotide
ugacuaauucucaguuacg

SEQ ID NO: 1663218 - RNA, 19 nt, Artificial Sequence
  Description of Artificial Sequence: Synthetic oligonucleotide
aacuugaaaccagcaaccg

SEQ ID NO: 1663219 - RNA, 19 nt, Artificial Sequence
  Description of Artificial Sequence: Synthetic oligonucleotide
accaaauagggacagccug

SEQ ID NO: 1663220 - RNA, 19 nt, Artificial Sequence
  Description of Artificial Sequence: Synthetic oligonucleotide
ugagucuuuaggacgagaa

SEQ ID NO: 1663221 - RNA, 19 nt, Artificial Sequence
  Description of Artificial Sequence: Synthetic oligonucleotide
gaacuugaaaccagcaacc

SEQ ID NO: 1663222 - RNA, 19 nt, Artificial Sequence
  Description of Artificial Sequence: Synthetic oligonucleotide
agacgcaaagccuucagcu

SEQ ID NO: 1663223 - RNA, 19 nt, Artificial Sequence
  Description of Artificial Sequence: Synthetic oligonucleotide
agucgcucucuuuugaaag

SEQ ID NO: 1663224 - RNA, 19 nt, Artificial Sequence
  Description of Artificial Sequence: Synthetic oligonucleotide
auagacuugauguccagaa

SEQ ID NO: 1663225 - RNA, 19 nt, Artificial Sequence
  Description of Artificial Sequence: Synthetic oligonucleotide
ugccuuaacucuuuucuug

SEQ ID NO: 1663226 - RNA, 19 nt, Artificial Sequence
  Description of Artificial Sequence: Synthetic oligonucleotide
ugccacuaguaauuuaugc

SEQ ID NO: 1663227 - RNA, 19 nt, Artificial Sequence
  Description of Artificial Sequence: Synthetic oligonucleotide
cuuugagcuacacuuguac

SEQ ID NO: 1663228 - RNA, 19 nt, Artificial Sequence
  Description of Artificial Sequence: Synthetic oligonucleotide
uguacaaugggugacugau

SEQ ID NO: 1663229 - RNA, 19 nt, Artificial Sequence
  Description of Artificial Sequence: Synthetic oligonucleotide
uuugagcuacacuuguaca

SEQ ID NO: 1663230 - RNA, 19 nt, Artificial Sequence
  Description of Artificial Sequence: Synthetic oligonucleotide
cucaguuacgaguauggug

SEQ ID NO: 1663231 - RNA, 19 nt, Artificial Sequence
  Description of Artificial Sequence: Synthetic oligonucleotide
ugugaguaaaccucacuaa

SEQ ID NO: 1663232 - RNA, 19 nt, Artificial Sequence
  Description of Artificial Sequence: Synthetic oligonucleotide
aaacauauccauagacuug

SEQ ID NO: 1663233 - RNA, 19 nt, Artificial Sequence
  Description of Artificial Sequence: Synthetic oligonucleotide
uugagcuacacuuguacaa

SEQ ID NO: 1663234 - RNA, 19 nt, Artificial Sequence
  Description of Artificial Sequence: Synthetic oligonucleotide
ugugugugugugaaaggcc

SEQ ID NO: 1663235 - RNA, 19 nt, Artificial Sequence
  Description of Artificial Sequence: Synthetic oligonucleotide
aacgaaauuuucagaaugu

SEQ ID NO: 1663236 - RNA, 19 nt, Artificial Sequence
  Description of Artificial Sequence: Synthetic oligonucleotide
aagcacauugagucuuuag

SEQ ID NO: 1663237 - RNA, 19 nt, Artificial Sequence
  Description of Artificial Sequence: Synthetic oligonucleotide
augucauuuaugaauaacu

SEQ ID NO: 1663238 - RNA, 19 nt, Artificial Sequence
  Description of Artificial Sequence: Synthetic oligonucleotide
gucuguaucucccauuaug

SEQ ID NO: 1663239 - RNA, 19 nt, Artificial Sequence
  Description of Artificial Sequence: Synthetic oligonucleotide
uuuuaguaucugcuagcug

SEQ ID NO: 1663240 - RNA, 19 nt, Artificial Sequence
  Description of Artificial Sequence: Synthetic oligonucleotide
aacgagcugucuguuuugc

SEQ ID NO: 1663241 - RNA, 19 nt, Artificial Sequence
  Description of Artificial Sequence: Synthetic oligonucleotide
uucagauuauaaauucuuu

SEQ ID NO: 1663242 - RNA, 19 nt, Artificial Sequence
  Description of Artificial Sequence: Synthetic oligonucleotide
agaauaugcacaauccugu

SEQ ID NO: 1663243 - RNA, 19 nt, Artificial Sequence
  Description of Artificial Sequence: Synthetic oligonucleotide
ugugugugugugugaaagg

SEQ ID NO: 1663244 - RNA, 19 nt, Artificial Sequence
  Description of Artificial Sequence: Synthetic oligonucleotide
uucuccaugccacuaguaa

SEQ ID NO: 1663245 - RNA, 19 nt, Artificial Sequence
  Description of Artificial Sequence: Synthetic oligonucleotide
gaugggaauggaaaccaag

SEQ ID NO: 1663246 - RNA, 19 nt, Artificial Sequence
  Description of Artificial Sequence: Synthetic oligonucleotide
ugggugacugauagaauca

SEQ ID NO: 1663247 - RNA, 19 nt, Artificial Sequence
  Description of Artificial Sequence: Synthetic oligonucleotide
uuuucgaagguacucuauu

SEQ ID NO: 1663248 - RNA, 19 nt, Artificial Sequence
  Description of Artificial Sequence: Synthetic oligonucleotide
gaauguuagagaaugucaa

SEQ ID NO: 1663249 - RNA, 19 nt, Artificial Sequence
  Description of Artificial Sequence: Synthetic oligonucleotide
aaagguugcuugaggacag

SEQ ID NO: 1663250 - RNA, 19 nt, Artificial Sequence
  Description of Artificial Sequence: Synthetic oligonucleotide
acacccacaaauagauucc

SEQ ID NO: 1663251 - RNA, 19 nt, Artificial Sequence
  Description of Artificial Sequence: Synthetic oligonucleotide
caccacuauggcaacaagc

SEQ ID NO: 1663252 - RNA, 19 nt, Artificial Sequence
  Description of Artificial Sequence: Synthetic oligonucleotide
aaauagauuccuacuugcu

SEQ ID NO: 1663253 - RNA, 19 nt, Artificial Sequence
  Description of Artificial Sequence: Synthetic oligonucleotide
ucaggaacgagcugucugu

SEQ ID NO: 1663254 - RNA, 19 nt, Artificial Sequence
  Description of Artificial Sequence: Synthetic oligonucleotide
auccugugggacucgcucc

SEQ ID NO: 1663255 - RNA, 19 nt, Artificial Sequence
  Description of Artificial Sequence: Synthetic oligonucleotide
uuggaacgaaauuuucaga

SEQ ID NO: 1663256 - RNA, 19 nt, Artificial Sequence
  Description of Artificial Sequence: Synthetic oligonucleotide
ugugucagucagaaagcca

SEQ ID NO: 1663257 - RNA, 19 nt, Artificial Sequence
  Description of Artificial Sequence: Synthetic oligonucleotide
agagucaaugcaguauccg

SEQ ID NO: 1663258 - RNA, 19 nt, Artificial Sequence
  Description of Artificial Sequence: Synthetic oligonucleotide
uugagcuucaaugaccaaa

SEQ ID NO: 1663259 - RNA, 19 nt, Artificial Sequence
  Description of Artificial Sequence: Synthetic oligonucleotide
gacuaauucucaguuacga

SEQ ID NO: 1663260 - RNA, 19 nt, Artificial Sequence
  Description of Artificial Sequence: Synthetic oligonucleotide
cagggugaaacaacaacug

SEQ ID NO: 1663261 - RNA, 19 nt, Artificial Sequence
  Description of Artificial Sequence: Synthetic oligonucleotide
uuaggacgagaauaugcac

SEQ ID NO: 1663262 - RNA, 19 nt, Artificial Sequence
  Description of Artificial Sequence: Synthetic oligonucleotide
gccacuaguaauuuaugcc

SEQ ID NO: 1663263 - RNA, 19 nt, Artificial Sequence
  Description of Artificial Sequence: Synthetic oligonucleotide
aggucgacagcagugacag

SEQ ID NO: 1663264 - RNA, 19 nt, Artificial Sequence
  Description of Artificial Sequence: Synthetic oligonucleotide
acagggugaaacaacaacu

SEQ ID NO: 1663265 - RNA, 19 nt, Artificial Sequence
  Description of Artificial Sequence: Synthetic oligonucleotide
cuaaacauauccauagacu

SEQ ID NO: 1663266 - RNA, 19 nt, Artificial Sequence
  Description of Artificial Sequence: Synthetic oligonucleotide
cacauucggagccaacagg

SEQ ID NO: 1663267 - RNA, 19 nt, Artificial Sequence
  Description of Artificial Sequence: Synthetic oligonucleotide
uaaccuuuaaaggcaaauc

SEQ ID NO: 1663268 - RNA, 19 nt, Artificial Sequence
  Description of Artificial Sequence: Synthetic oligonucleotide
aggggaaaugccugaaucu

SEQ ID NO: 1663269 - RNA, 19 nt, Artificial Sequence
  Description of Artificial Sequence: Synthetic oligonucleotide
uucgaagguacucuauuuu

SEQ ID NO: 1663270 - RNA, 19 nt, Artificial Sequence
  Description of Artificial Sequence: Synthetic oligonucleotide
acggaaagguugcuugagg

SEQ ID NO: 1663271 - RNA, 19 nt, Artificial Sequence
  Description of Artificial Sequence: Synthetic oligonucleotide
aacggaaagguugcuugag

SEQ ID NO: 1663272 - RNA, 19 nt, Artificial Sequence
  Description of Artificial Sequence: Synthetic oligonucleotide
ggauguaccgguaaguggc

SEQ ID NO: 1663273 - RNA, 19 nt, Artificial Sequence
  Description of Artificial Sequence: Synthetic oligonucleotide
gugugugugugugugaaag

SEQ ID NO: 1663274 - RNA, 19 nt, Artificial Sequence
  Description of Artificial Sequence: Synthetic oligonucleotide
agcuauugcacacccacaa

SEQ ID NO: 1663275 - RNA, 19 nt, Artificial Sequence
  Description of Artificial Sequence: Synthetic oligonucleotide
cugaagcuauugcacaccc

SEQ ID NO: 1663276 - RNA, 19 nt, Artificial Sequence
  Description of Artificial Sequence: Synthetic oligonucleotide
ggaacggaaagguugcuug

SEQ ID NO: 1663277 - RNA, 19 nt, Artificial Sequence
  Description of Artificial Sequence: Synthetic oligonucleotide
aaccggaacuugaaacugg

SEQ ID NO: 1663278 - RNA, 19 nt, Artificial Sequence
  Description of Artificial Sequence: Synthetic oligonucleotide
ucuuuaugccaccuugaua

SEQ ID NO: 1663279 - RNA, 19 nt, Artificial Sequence
  Description of Artificial Sequence: Synthetic oligonucleotide
cugguaaccuuuaaaggca

SEQ ID NO: 1663280 - RNA, 19 nt, Artificial Sequence
  Description of Artificial Sequence: Synthetic oligonucleotide
gugacugauagaaucaaca

SEQ ID NO: 1663281 - RNA, 19 nt, Artificial Sequence
  Description of Artificial Sequence: Synthetic oligonucleotide
agcagggccaccacuaugg

SEQ ID NO: 1663282 - RNA, 19 nt, Artificial Sequence
  Description of Artificial Sequence: Synthetic oligonucleotide
gaaauucuuucagcggaag

SEQ ID NO: 1663283 - RNA, 19 nt, Artificial Sequence
  Description of Artificial Sequence: Synthetic oligonucleotide
acugcagugccccucacau

SEQ ID NO: 1663284 - RNA, 19 nt, Artificial Sequence
  Description of Artificial Sequence: Synthetic oligonucleotide
aacgcgaugccugacugca

SEQ ID NO: 1663285 - RNA, 19 nt, Artificial Sequence
  Description of Artificial Sequence: Synthetic oligonucleotide
cuguaucucccauuauggc

SEQ ID NO: 1663286 - RNA, 19 nt, Artificial Sequence
  Description of Artificial Sequence: Synthetic oligonucleotide
uucuuuaugccaccuugau

SEQ ID NO: 1663287 - RNA, 19 nt, Artificial Sequence
  Description of Artificial Sequence: Synthetic oligonucleotide
acaucuggccaggagcacc

SEQ ID NO: 1663288 - RNA, 19 nt, Artificial Sequence
  Description of Artificial Sequence: Synthetic oligonucleotide
gaccaaaacaacaggguga

SEQ ID NO: 1663289 - RNA, 19 nt, Artificial Sequence
  Description of Artificial Sequence: Synthetic oligonucleotide
gagaaugucaaggcauggc

SEQ ID NO: 1663290 - RNA, 19 nt, Artificial Sequence
  Description of Artificial Sequence: Synthetic oligonucleotide
ugcuugacuaauucucagu

SEQ ID NO: 1663291 - RNA, 19 nt, Artificial Sequence
  Description of Artificial Sequence: Synthetic oligonucleotide
uucuuucagcggaaggaga

SEQ ID NO: 1663292 - RNA, 19 nt, Artificial Sequence
  Description of Artificial Sequence: Synthetic oligonucleotide
uuucgaagguacucuauuu

SEQ ID NO: 1663293 - RNA, 19 nt, Artificial Sequence
  Description of Artificial Sequence: Synthetic oligonucleotide
uaaaagaacccguguguua

SEQ ID NO: 1663294 - RNA, 19 nt, Artificial Sequence
  Description of Artificial Sequence: Synthetic oligonucleotide
agaacgcgaugccugacug

SEQ ID NO: 1663295 - RNA, 19 nt, Artificial Sequence
  Description of Artificial Sequence: Synthetic oligonucleotide
ugugggacucgcuccaucu

SEQ ID NO: 1663296 - RNA, 19 nt, Artificial Sequence
  Description of Artificial Sequence: Synthetic oligonucleotide
aggacgagaauaugcacaa

SEQ ID NO: 1663297 - RNA, 19 nt, Artificial Sequence
  Description of Artificial Sequence: Synthetic oligonucleotide
ucuguuuugcugucuguau

SEQ ID NO: 1663298 - RNA, 19 nt, Artificial Sequence
  Description of Artificial Sequence: Synthetic oligonucleotide
ugggaauggaaaccaaguu

SEQ ID NO: 1663299 - RNA, 19 nt, Artificial Sequence
  Description of Artificial Sequence: Synthetic oligonucleotide
agaguugucagaaacccaa

SEQ ID NO: 1663300 - RNA, 19 nt, Artificial Sequence
  Description of Artificial Sequence: Synthetic oligonucleotide
uucggagccaacaggggaa

SEQ ID NO: 1663301 - RNA, 19 nt, Artificial Sequence
  Description of Artificial Sequence: Synthetic oligonucleotide
ucccuaauaugcaccaaau

SEQ ID NO: 1663302 - RNA, 19 nt, Artificial Sequence
  Description of Artificial Sequence: Synthetic oligonucleotide
uucagcggaaggagauggg

SEQ ID NO: 1663303 - RNA, 19 nt, Artificial Sequence
  Description of Artificial Sequence: Synthetic oligonucleotide
agcuacacuuguacaaugg

SEQ ID NO: 1663304 - RNA, 19 nt, Artificial Sequence
  Description of Artificial Sequence: Synthetic oligonucleotide
gugugugugugugaaaggc

SEQ ID NO: 1663305 - RNA, 19 nt, Artificial Sequence
  Description of Artificial Sequence: Synthetic oligonucleotide
aggaguuccacagucacau

SEQ ID NO: 1663306 - RNA, 19 nt, Artificial Sequence
  Description of Artificial Sequence: Synthetic oligonucleotide
agggugaaacaacaacuga

SEQ ID NO: 1663307 - RNA, 19 nt, Artificial Sequence
  Description of Artificial Sequence: Synthetic oligonucleotide
guaucucccauuauggcca

SEQ ID NO: 1663308 - RNA, 19 nt, Artificial Sequence
  Description of Artificial Sequence: Synthetic oligonucleotide
gcuacacuuguacaauggg

SEQ ID NO: 1663309 - RNA, 19 nt, Artificial Sequence
  Description of Artificial Sequence: Synthetic oligonucleotide
cuuaacucuuuucuugcca

SEQ ID NO: 1663310 - RNA, 19 nt, Artificial Sequence
  Description of Artificial Sequence: Synthetic oligonucleotide
agucagaaagccacucaac

SEQ ID NO: 1663311 - RNA, 19 nt, Artificial Sequence
  Description of Artificial Sequence: Synthetic oligonucleotide
ucaaugcaguauccgugug

SEQ ID NO: 1663312 - RNA, 19 nt, Artificial Sequence
  Description of Artificial Sequence: Synthetic oligonucleotide
ugaaagcacauugagucuu

SEQ ID NO: 1663313 - RNA, 19 nt, Artificial Sequence
  Description of Artificial Sequence: Synthetic oligonucleotide
agagaaugucaaggcaugg

SEQ ID NO: 1663314 - RNA, 19 nt, Artificial Sequence
  Description of Artificial Sequence: Synthetic oligonucleotide
aacuauagcugcaggaguu

SEQ ID NO: 1663315 - RNA, 19 nt, Artificial Sequence
  Description of Artificial Sequence: Synthetic oligonucleotide
uuuaugccaccuugauagc

SEQ ID NO: 1663316 - RNA, 19 nt, Artificial Sequence
  Description of Artificial Sequence: Synthetic oligonucleotide
auagggacagccugacaca

SEQ ID NO: 1663317 - RNA, 19 nt, Artificial Sequence
  Description of Artificial Sequence: Synthetic oligonucleotide
acaggagaggauguaccgg

SEQ ID NO: 1663318 - RNA, 19 nt, Artificial Sequence
  Description of Artificial Sequence: Synthetic oligonucleotide
acacucuuguacagggccc

SEQ ID NO: 1663319 - RNA, 19 nt, Artificial Sequence
  Description of Artificial Sequence: Synthetic oligonucleotide
cagauuauaaauucuuuau

SEQ ID NO: 1663320 - RNA, 19 nt, Artificial Sequence
  Description of Artificial Sequence: Synthetic oligonucleotide
cauucggagccaacagggg

SEQ ID NO: 1663321 - RNA, 19 nt, Artificial Sequence
  Description of Artificial Sequence: Synthetic oligonucleotide
uggaaaccaaguucccaga

SEQ ID NO: 1663322 - RNA, 19 nt, Artificial Sequence
  Description of Artificial Sequence: Synthetic oligonucleotide
gauguaccgguaaguggcg

SEQ ID NO: 1663323 - RNA, 19 nt, Artificial Sequence
  Description of Artificial Sequence: Synthetic oligonucleotide
cagagucaaugcaguaucc

SEQ ID NO: 1663324 - RNA, 19 nt, Artificial Sequence
  Description of Artificial Sequence: Synthetic oligonucleotide
acuauagcugcaggaguuc

SEQ ID NO: 1663325 - RNA, 19 nt, Artificial Sequence
  Description of Artificial Sequence: Synthetic oligonucleotide
uacagggccccacauuuuc

SEQ ID NO: 1663326 - RNA, 19 nt, Artificial Sequence
  Description of Artificial Sequence: Synthetic oligonucleotide
ucuuuaggacgagaauaug

SEQ ID NO: 1663327 - RNA, 19 nt, Artificial Sequence
  Description of Artificial Sequence: Synthetic oligonucleotide
auuccucgcagugacagga

SEQ ID NO: 1663328 - RNA, 19 nt, Artificial Sequence
  Description of Artificial Sequence: Synthetic oligonucleotide
uaucugcuagcugugagua

SEQ ID NO: 1663329 - RNA, 19 nt, Artificial Sequence
  Description of Artificial Sequence: Synthetic oligonucleotide
ugaagcuauugcacaccca

SEQ ID NO: 1663330 - RNA, 19 nt, Artificial Sequence
  Description of Artificial Sequence: Synthetic oligonucleotide
ugaaaccagcaaccggaac

SEQ ID NO: 1663331 - RNA, 19 nt, Artificial Sequence
  Description of Artificial Sequence: Synthetic oligonucleotide
ugguugaacuucuccugug

SEQ ID NO: 1663332 - RNA, 19 nt, Artificial Sequence
  Description of Artificial Sequence: Synthetic oligonucleotide
uuaucugccuuaacucuuu

SEQ ID NO: 1663333 - RNA, 19 nt, Artificial Sequence
  Description of Artificial Sequence: Synthetic oligonucleotide
aagggcucagaacgcgaug

SEQ ID NO: 1663334 - RNA, 19 nt, Artificial Sequence
  Description of Artificial Sequence: Synthetic oligonucleotide
uuacgaguauggugcauuc

SEQ ID NO: 1663335 - RNA, 19 nt, Artificial Sequence
  Description of Artificial Sequence: Synthetic oligonucleotide
aacccaaaccacauucgga

SEQ ID NO: 1663336 - RNA, 19 nt, Artificial Sequence
  Description of Artificial Sequence: Synthetic oligonucleotide
uguaccgguaaguggcggu

SEQ ID NO: 1663337 - RNA, 19 nt, Artificial Sequence
  Description of Artificial Sequence: Synthetic oligonucleotide
gucgcucucuuuugaaagc

SEQ ID NO: 1663338 - RNA, 19 nt, Artificial Sequence
  Description of Artificial Sequence: Synthetic oligonucleotide
cugugaguaaaccucacua

SEQ ID NO: 1663339 - RNA, 19 nt, Artificial Sequence
  Description of Artificial Sequence: Synthetic oligonucleotide
ugccugaaucugaaaagua

SEQ ID NO: 1663340 - RNA, 19 nt, Artificial Sequence
  Description of Artificial Sequence: Synthetic oligonucleotide
augccugaaucugaaaagu

SEQ ID NO: 1663341 - RNA, 19 nt, Artificial Sequence
  Description of Artificial Sequence: Synthetic oligonucleotide
cuauagcugcaggaguucc

SEQ ID NO: 1663342 - RNA, 19 nt, Artificial Sequence
  Description of Artificial Sequence: Synthetic oligonucleotide
ugaacagcgcagacgcaaa

SEQ ID NO: 1663343 - RNA, 19 nt, Artificial Sequence
  Description of Artificial Sequence: Synthetic oligonucleotide
caugcagcguugagagucc

SEQ ID NO: 1663344 - RNA, 19 nt, Artificial Sequence
  Description of Artificial Sequence: Synthetic oligonucleotide
acaauccugugggacucgc

SEQ ID NO: 1663345 - RNA, 19 nt, Artificial Sequence
  Description of Artificial Sequence: Synthetic oligonucleotide
cccugaacagcgcagacgc

SEQ ID NO: 1663346 - RNA, 19 nt, Artificial Sequence
  Description of Artificial Sequence: Synthetic oligonucleotide
gaacggaaagguugcuuga

SEQ ID NO: 1663347 - RNA, 19 nt, Artificial Sequence
  Description of Artificial Sequence: Synthetic oligonucleotide
cucgcagugacaggagagg

SEQ ID NO: 1663348 - RNA, 19 nt, Artificial Sequence
  Description of Artificial Sequence: Synthetic oligonucleotide
ugaggucgacagcagugac

SEQ ID NO: 1663349 - RNA, 19 nt, Artificial Sequence
  Description of Artificial Sequence: Synthetic oligonucleotide
cagacgcaaagccuucagc

SEQ ID NO: 1663350 - RNA, 19 nt, Artificial Sequence
  Description of Artificial Sequence: Synthetic oligonucleotide
ugcuagcugugaguaaacc

SEQ ID NO: 1663351 - RNA, 19 nt, Artificial Sequence
  Description of Artificial Sequence: Synthetic oligonucleotide
uguguguguguguguguga

SEQ ID NO: 1663352 - RNA, 19 nt, Artificial Sequence
  Description of Artificial Sequence: Synthetic oligonucleotide
guauccgugugugugugug

SEQ ID NO: 1663353 - RNA, 19 nt, Artificial Sequence
  Description of Artificial Sequence: Synthetic oligonucleotide
ggagcugcauuccucgcag

SEQ ID NO: 1663354 - RNA, 19 nt, Artificial Sequence
  Description of Artificial Sequence: Synthetic oligonucleotide
ucgcucucuuuugaaagca

SEQ ID NO: 1663355 - RNA, 19 nt, Artificial Sequence
  Description of Artificial Sequence: Synthetic oligonucleotide
uccucgcagugacaggaga

SEQ ID NO: 1663356 - RNA, 19 nt, Artificial Sequence
  Description of Artificial Sequence: Synthetic oligonucleotide
gcguugagaguccaucagg

SEQ ID NO: 1663357 - RNA, 19 nt, Artificial Sequence
  Description of Artificial Sequence: Synthetic oligonucleotide
ucccacuaaugcagaguug

SEQ ID NO: 1663358 - RNA, 19 nt, Artificial Sequence
  Description of Artificial Sequence: Synthetic oligonucleotide
aggagcugcauuccucgca

SEQ ID NO: 1663359 - RNA, 19 nt, Artificial Sequence
  Description of Artificial Sequence: Synthetic oligonucleotide
caaccggaacuugaaacug

SEQ ID NO: 1663360 - RNA, 19 nt, Artificial Sequence
  Description of Artificial Sequence: Synthetic oligonucleotide
gaacgcgaugccugacugc

SEQ ID NO: 1663361 - RNA, 19 nt, Artificial Sequence
  Description of Artificial Sequence: Synthetic oligonucleotide
ucucaguuacgaguauggu

SEQ ID NO: 1663362 - RNA, 19 nt, Artificial Sequence
  Description of Artificial Sequence: Synthetic oligonucleotide
uuccucgcagugacaggag

SEQ ID NO: 1663363 - RNA, 19 nt, Artificial Sequence
  Description of Artificial Sequence: Synthetic oligonucleotide
agaacccguguguuaauua

SEQ ID NO: 1663364 - RNA, 19 nt, Artificial Sequence
  Description of Artificial Sequence: Synthetic oligonucleotide
gauuccuacuugcuugacu

SEQ ID NO: 1663365 - RNA, 19 nt, Artificial Sequence
  Description of Artificial Sequence: Synthetic oligonucleotide
acaaugggugacugauaga

SEQ ID NO: 1663366 - RNA, 19 nt, Artificial Sequence
  Description of Artificial Sequence: Synthetic oligonucleotide
gaauguaagcagggccacc

SEQ ID NO: 1663367 - RNA, 19 nt, Artificial Sequence
  Description of Artificial Sequence: Synthetic oligonucleotide
ugggacucgcuccaucuuu

SEQ ID NO: 1663368 - RNA, 19 nt, Artificial Sequence
  Description of Artificial Sequence: Synthetic oligonucleotide
acagggccccacauuuucc

SEQ ID NO: 1663369 - RNA, 19 nt, Artificial Sequence
  Description of Artificial Sequence: Synthetic oligonucleotide
gugugugugugugugugug

SEQ ID NO: 1663370 - RNA, 19 nt, Artificial Sequence
  Description of Artificial Sequence: Synthetic oligonucleotide
uccuacuugcuugacuaau

SEQ ID NO: 1663371 - RNA, 19 nt, Artificial Sequence
  Description of Artificial Sequence: Synthetic oligonucleotide
accucacuaaacauaucca

SEQ ID NO: 1663372 - RNA, 19 nt, Artificial Sequence
  Description of Artificial Sequence: Synthetic oligonucleotide
agagucgcucucuuuugaa

SEQ ID NO: 1663373 - RNA, 19 nt, Artificial Sequence
  Description of Artificial Sequence: Synthetic oligonucleotide
cuugacuaauucucaguua

SEQ ID NO: 1663374 - RNA, 19 nt, Artificial Sequence
  Description of Artificial Sequence: Synthetic oligonucleotide
uugagucuuuaggacgaga

SEQ ID NO: 1663375 - RNA, 19 nt, Artificial Sequence
  Description of Artificial Sequence: Synthetic oligonucleotide
acgaaauuuucagaaugua

SEQ ID NO: 1663376 - RNA, 19 nt, Artificial Sequence
  Description of Artificial Sequence: Synthetic oligonucleotide
gucaaugcaguauccgugu

SEQ ID NO: 1663377 - RNA, 19 nt, Artificial Sequence
  Description of Artificial Sequence: Synthetic oligonucleotide
ggaggaacggaaagguugc

SEQ ID NO: 1663378 - RNA, 19 nt, Artificial Sequence
  Description of Artificial Sequence: Synthetic oligonucleotide
cacucuuguacagggcccc

SEQ ID NO: 1663379 - RNA, 19 nt, Artificial Sequence
  Description of Artificial Sequence: Synthetic oligonucleotide
aagaacccguguguuaauu

SEQ ID NO: 1663380 - RNA, 19 nt, Artificial Sequence
  Description of Artificial Sequence: Synthetic oligonucleotide
cuaaugcagaguugucaga

SEQ ID NO: 1663381 - RNA, 19 nt, Artificial Sequence
  Description of Artificial Sequence: Synthetic oligonucleotide
cuauugcacacccacaaau

SEQ ID NO: 1663382 - RNA, 19 nt, Artificial Sequence
  Description of Artificial Sequence: Synthetic oligonucleotide
uggugccucaugcagcguu

SEQ ID NO: 1663383 - RNA, 19 nt, Artificial Sequence
  Description of Artificial Sequence: Synthetic oligonucleotide
ccacauuuucccacuaaug

SEQ ID NO: 1663384 - RNA, 19 nt, Artificial Sequence
  Description of Artificial Sequence: Synthetic oligonucleotide
ucgcuccaucuuuaucugc

SEQ ID NO: 1663385 - RNA, 19 nt, Artificial Sequence
  Description of Artificial Sequence: Synthetic oligonucleotide
ugugugugugaaaggccuu

SEQ ID NO: 1663386 - RNA, 19 nt, Artificial Sequence
  Description of Artificial Sequence: Synthetic oligonucleotide
gaaaugccugaaucugaaa

SEQ ID NO: 1663387 - RNA, 19 nt, Artificial Sequence
  Description of Artificial Sequence: Synthetic oligonucleotide
gaacccguguguuaauuau

SEQ ID NO: 1663388 - RNA, 19 nt, Artificial Sequence
  Description of Artificial Sequence: Synthetic oligonucleotide
agauuccuacuugcuugac

SEQ ID NO: 1663389 - RNA, 19 nt, Artificial Sequence
  Description of Artificial Sequence: Synthetic oligonucleotide
auccgugugugugugugug

SEQ ID NO: 1663390 - RNA, 19 nt, Artificial Sequence
  Description of Artificial Sequence: Synthetic oligonucleotide
aacaggggaaaugccugaa

SEQ ID NO: 1663391 - RNA, 19 nt, Artificial Sequence
  Description of Artificial Sequence: Synthetic oligonucleotide
caacauaaauggugccuca

SEQ ID NO: 1663392 - RNA, 19 nt, Artificial Sequence
  Description of Artificial Sequence: Synthetic oligonucleotide
caccaagggcucagaacgc

SEQ ID NO: 1663393 - RNA, 19 nt, Artificial Sequence
  Description of Artificial Sequence: Synthetic oligonucleotide
gagucgcucucuuuugaaa

SEQ ID NO: 1663394 - RNA, 19 nt, Artificial Sequence
  Description of Artificial Sequence: Synthetic oligonucleotide
cacaaauagauuccuacuu

SEQ ID NO: 1663395 - RNA, 19 nt, Artificial Sequence
  Description of Artificial Sequence: Synthetic oligonucleotide
agaaauucuuucagcggaa

SEQ ID NO: 1663396 - RNA, 19 nt, Artificial Sequence
  Description of Artificial Sequence: Synthetic oligonucleotide
caaguucccagagucgcuc

SEQ ID NO: 1663397 - RNA, 19 nt, Artificial Sequence
  Description of Artificial Sequence: Synthetic oligonucleotide
uauccgugugugugugugu

SEQ ID NO: 1663398 - RNA, 19 nt, Artificial Sequence
  Description of Artificial Sequence: Synthetic oligonucleotide
ugugugugugugugugaaa

SEQ ID NO: 1663399 - RNA, 19 nt, Artificial Sequence
  Description of Artificial Sequence: Synthetic oligonucleotide
gguugcuugaggacagugc

SEQ ID NO: 1663400 - RNA, 19 nt, Artificial Sequence
  Description of Artificial Sequence: Synthetic oligonucleotide
auugagucuuuaggacgag

SEQ ID NO: 1663401 - RNA, 19 nt, Artificial Sequence
  Description of Artificial Sequence: Synthetic oligonucleotide
uacgaguauggugcauucu

SEQ ID NO: 1663402 - RNA, 19 nt, Artificial Sequence
  Description of Artificial Sequence: Synthetic oligonucleotide
cacauaaaagaacccgugu

SEQ ID NO: 1663403 - RNA, 19 nt, Artificial Sequence
  Description of Artificial Sequence: Synthetic oligonucleotide
gggacagccugacacacuc

SEQ ID NO: 1663404 - RNA, 19 nt, Artificial Sequence
  Description of Artificial Sequence: Synthetic oligonucleotide
auguaccgguaaguggcgg

SEQ ID NO: 1663405 - RNA, 19 nt, Artificial Sequence
  Description of Artificial Sequence: Synthetic oligonucleotide
cuuucagcggaaggagaug

SEQ ID NO: 1663406 - RNA, 19 nt, Artificial Sequence
  Description of Artificial Sequence: Synthetic oligonucleotide
uaguaucugcuagcuguga

SEQ ID NO: 1663407 - RNA, 19 nt, Artificial Sequence
  Description of Artificial Sequence: Synthetic oligonucleotide
uuugagcuucaaugaccaa

SEQ ID NO: 1663408 - RNA, 19 nt, Artificial Sequence
  Description of Artificial Sequence: Synthetic oligonucleotide
guaucugcuagcugugagu

SEQ ID NO: 1663409 - RNA, 19 nt, Artificial Sequence
  Description of Artificial Sequence: Synthetic oligonucleotide
uuccuacuugcuugacuaa

SEQ ID NO: 1663410 - RNA, 19 nt, Artificial Sequence
  Description of Artificial Sequence: Synthetic oligonucleotide
aguauccgugugugugugu

SEQ ID NO: 1663411 - RNA, 19 nt, Artificial Sequence
  Description of Artificial Sequence: Synthetic oligonucleotide
uggaggucugaggucgaca

SEQ ID NO: 1663412 - RNA, 19 nt, Artificial Sequence
  Description of Artificial Sequence: Synthetic oligonucleotide
cagaguugucagaaaccca

SEQ ID NO: 1663413 - RNA, 19 nt, Artificial Sequence
  Description of Artificial Sequence: Synthetic oligonucleotide
cugauagaaucaacauaaa

SEQ ID NO: 1663414 - RNA, 19 nt, Artificial Sequence
  Description of Artificial Sequence: Synthetic oligonucleotide
aaaccacauucggagccaa

SEQ ID NO: 1663415 - RNA, 19 nt, Artificial Sequence
  Description of Artificial Sequence: Synthetic oligonucleotide
gaagaauugggcacauuuu

SEQ ID NO: 1663416 - RNA, 19 nt, Artificial Sequence
  Description of Artificial Sequence: Synthetic oligonucleotide
cucagaacgcgaugccuga

SEQ ID NO: 1663417 - RNA, 19 nt, Artificial Sequence
  Description of Artificial Sequence: Synthetic oligonucleotide
cucccauuauggccagcag

SEQ ID NO: 1663418 - RNA, 19 nt, Artificial Sequence
  Description of Artificial Sequence: Synthetic oligonucleotide
guaccgguaaguggcggug

SEQ ID NO: 1663419 - RNA, 19 nt, Artificial Sequence
  Description of Artificial Sequence: Synthetic oligonucleotide
acgagcugucuguuuugcu

SEQ ID NO: 1663420 - RNA, 19 nt, Artificial Sequence
  Description of Artificial Sequence: Synthetic oligonucleotide
gaggucgacagcagugaca

SEQ ID NO: 1663421 - RNA, 19 nt, Artificial Sequence
  Description of Artificial Sequence: Synthetic oligonucleotide
ccagucuuucucugucugg

SEQ ID NO: 1663422 - RNA, 19 nt, Artificial Sequence
  Description of Artificial Sequence: Synthetic oligonucleotide
aaccagcaaccggaacuug

SEQ ID NO: 1663423 - RNA, 19 nt, Artificial Sequence
  Description of Artificial Sequence: Synthetic oligonucleotide
agcgcagacgcaaagccuu

SEQ ID NO: 1663424 - RNA, 19 nt, Artificial Sequence
  Description of Artificial Sequence: Synthetic oligonucleotide
cagcguugagaguccauca

SEQ ID NO: 1663425 - RNA, 19 nt, Artificial Sequence
  Description of Artificial Sequence: Synthetic oligonucleotide
acccguguguuaauuauuu

SEQ ID NO: 1663426 - RNA, 19 nt, Artificial Sequence
  Description of Artificial Sequence: Synthetic oligonucleotide
uccgugugugugugugugu

SEQ ID NO: 1663427 - RNA, 19 nt, Artificial Sequence
  Description of Artificial Sequence: Synthetic oligonucleotide
aacaagccucacacagaca

SEQ ID NO: 1663428 - RNA, 19 nt, Artificial Sequence
  Description of Artificial Sequence: Synthetic oligonucleotide
uaucugccuuaacucuuuu

SEQ ID NO: 1663429 - RNA, 19 nt, Artificial Sequence
  Description of Artificial Sequence: Synthetic oligonucleotide
gagucuuuaggacgagaau

SEQ ID NO: 1663430 - RNA, 19 nt, Artificial Sequence
  Description of Artificial Sequence: Synthetic oligonucleotide
gcucagaacgcgaugccug

SEQ ID NO: 1663431 - RNA, 19 nt, Artificial Sequence
  Description of Artificial Sequence: Synthetic oligonucleotide
ccucgcagugacaggagag

SEQ ID NO: 1663432 - RNA, 19 nt, Artificial Sequence
  Description of Artificial Sequence: Synthetic oligonucleotide
ggcggugagucgcaugccc

SEQ ID NO: 1663433 - RNA, 19 nt, Artificial Sequence
  Description of Artificial Sequence: Synthetic oligonucleotide
ccacauucggagccaacag

SEQ ID NO: 1663434 - RNA, 19 nt, Artificial Sequence
  Description of Artificial Sequence: Synthetic oligonucleotide
caggagaggauguaccggu

SEQ ID NO: 1663435 - RNA, 19 nt, Artificial Sequence
  Description of Artificial Sequence: Synthetic oligonucleotide
caguauccgugugugugug

SEQ ID NO: 1663436 - RNA, 19 nt, Artificial Sequence
  Description of Artificial Sequence: Synthetic oligonucleotide
gcuagcugugaguaaaccu

SEQ ID NO: 1663437 - RNA, 19 nt, Artificial Sequence
  Description of Artificial Sequence: Synthetic oligonucleotide
ucagaacgcgaugccugac

SEQ ID NO: 1663438 - RNA, 19 nt, Artificial Sequence
  Description of Artificial Sequence: Synthetic oligonucleotide
ggugacugauagaaucaac

SEQ ID NO: 1663439 - RNA, 19 nt, Artificial Sequence
  Description of Artificial Sequence: Synthetic oligonucleotide
ggaaaugccugaaucugaa

SEQ ID NO: 1663440 - RNA, 19 nt, Artificial Sequence
  Description of Artificial Sequence: Synthetic oligonucleotide
aggaacgagcugucuguuu

SEQ ID NO: 1663441 - RNA, 19 nt, Artificial Sequence
  Description of Artificial Sequence: Synthetic oligonucleotide
cuaguaauuuaugccuucu

SEQ ID NO: 1663442 - RNA, 19 nt, Artificial Sequence
  Description of Artificial Sequence: Synthetic oligonucleotide
aagguugcuugaggacagu

SEQ ID NO: 1663443 - RNA, 19 nt, Artificial Sequence
  Description of Artificial Sequence: Synthetic oligonucleotide
cccaugucauuuaugaaua

SEQ ID NO: 1663444 - RNA, 19 nt, Artificial Sequence
  Description of Artificial Sequence: Synthetic oligonucleotide
cugaggucgacagcaguga

SEQ ID NO: 1663445 - RNA, 19 nt, Artificial Sequence
  Description of Artificial Sequence: Synthetic oligonucleotide
gugugugugugugugugaa

SEQ ID NO: 1663446 - RNA, 19 nt, Artificial Sequence
  Description of Artificial Sequence: Synthetic oligonucleotide
ccguguguuaauuauuuua

SEQ ID NO: 1663447 - RNA, 19 nt, Artificial Sequence
  Description of Artificial Sequence: Synthetic oligonucleotide
cugacugcagugccccuca

SEQ ID NO: 1663448 - RNA, 19 nt, Artificial Sequence
  Description of Artificial Sequence: Synthetic oligonucleotide
cagcggaaggagaugggaa

SEQ ID NO: 1663449 - RNA, 19 nt, Artificial Sequence
  Description of Artificial Sequence: Synthetic oligonucleotide
cagagucgcucucuuuuga

SEQ ID NO: 1663450 - RNA, 19 nt, Artificial Sequence
  Description of Artificial Sequence: Synthetic oligonucleotide
aggaacggaaagguugcuu

SEQ ID NO: 1663451 - RNA, 19 nt, Artificial Sequence
  Description of Artificial Sequence: Synthetic oligonucleotide
gcuugacuaauucucaguu

SEQ ID NO: 1663452 - RNA, 19 nt, Artificial Sequence
  Description of Artificial Sequence: Synthetic oligonucleotide
ggaacgaaauuuucagaau

SEQ ID NO: 1663453 - RNA, 19 nt, Artificial Sequence
  Description of Artificial Sequence: Synthetic oligonucleotide
ggagaggauguaccgguaa

SEQ ID NO: 1663454 - RNA, 19 nt, Artificial Sequence
  Description of Artificial Sequence: Synthetic oligonucleotide
ggcauggcugaagcuauug

SEQ ID NO: 1663455 - RNA, 19 nt, Artificial Sequence
  Description of Artificial Sequence: Synthetic oligonucleotide
aguuacgaguauggugcau

SEQ ID NO: 1663456 - RNA, 19 nt, Artificial Sequence
  Description of Artificial Sequence: Synthetic oligonucleotide
gaguugucagaaacccaaa

SEQ ID NO: 1663457 - RNA, 19 nt, Artificial Sequence
  Description of Artificial Sequence: Synthetic oligonucleotide
guuacgaguauggugcauu

SEQ ID NO: 1663458 - RNA, 19 nt, Artificial Sequence
  Description of Artificial Sequence: Synthetic oligonucleotide
gggaaaugccugaaucuga

SEQ ID NO: 1663459 - RNA, 19 nt, Artificial Sequence
  Description of Artificial Sequence: Synthetic oligonucleotide
cacuaguaauuuaugccuu

SEQ ID NO: 1663460 - RNA, 19 nt, Artificial Sequence
  Description of Artificial Sequence: Synthetic oligonucleotide
cguugagaguccaucagga

SEQ ID NO: 1663461 - RNA, 19 nt, Artificial Sequence
  Description of Artificial Sequence: Synthetic oligonucleotide
caguuacgaguauggugca

SEQ ID NO: 1663462 - RNA, 19 nt, Artificial Sequence
  Description of Artificial Sequence: Synthetic oligonucleotide
ccagagucgcucucuuuug

SEQ ID NO: 1663463 - RNA, 19 nt, Artificial Sequence
  Description of Artificial Sequence: Synthetic oligonucleotide
gcggaaggagaugggaaug

SEQ ID NO: 1663464 - RNA, 19 nt, Artificial Sequence
  Description of Artificial Sequence: Synthetic oligonucleotide
cugugggacucgcuccauc

SEQ ID NO: 1663465 - RNA, 19 nt, Artificial Sequence
  Description of Artificial Sequence: Synthetic oligonucleotide
gcuauugcacacccacaaa

SEQ ID NO: 1663466 - RNA, 19 nt, Artificial Sequence
  Description of Artificial Sequence: Synthetic oligonucleotide
ggugccucaugcagcguug

SEQ ID NO: 1663467 - RNA, 19 nt, Artificial Sequence
  Description of Artificial Sequence: Synthetic oligonucleotide
cuuggaggucugaggucga

SEQ ID NO: 1663468 - RNA, 19 nt, Artificial Sequence
  Description of Artificial Sequence: Synthetic oligonucleotide
ccccaugucauuuaugaau

SEQ ID NO: 1663469 - RNA, 19 nt, Artificial Sequence
  Description of Artificial Sequence: Synthetic oligonucleotide
cacaucuggccaggagcac

SEQ ID NO: 1663470 - RNA, 19 nt, Artificial Sequence
  Description of Artificial Sequence: Synthetic oligonucleotide
ccucacuaaacauauccau

SEQ ID NO: 1663471 - RNA, 19 nt, Artificial Sequence
  Description of Artificial Sequence: Synthetic oligonucleotide
cuccagagucaaugcagua

SEQ ID NO: 1663472 - RNA, 19 nt, Artificial Sequence
  Description of Artificial Sequence: Synthetic oligonucleotide
gcgaugccugacugcagug

SEQ ID NO: 1663473 - RNA, 19 nt, Artificial Sequence
  Description of Artificial Sequence: Synthetic oligonucleotide
guacaaugggugacugaua

SEQ ID NO: 1663474 - RNA, 19 nt, Artificial Sequence
  Description of Artificial Sequence: Synthetic oligonucleotide
cagaacgcgaugccugacu

SEQ ID NO: 1663475 - RNA, 19 nt, Artificial Sequence
  Description of Artificial Sequence: Synthetic oligonucleotide
cccacuaaugcagaguugu

SEQ ID NO: 1663476 - RNA, 19 nt, Artificial Sequence
  Description of Artificial Sequence: Synthetic oligonucleotide
gcugugaguaaaccucacu

SEQ ID NO: 1663477 - RNA, 19 nt, Artificial Sequence
  Description of Artificial Sequence: Synthetic oligonucleotide
ccgugugugugugugugug

SEQ ID NO: 1663478 - RNA, 19 nt, Artificial Sequence
  Description of Artificial Sequence: Synthetic oligonucleotide
caagggcucagaacgcgau

SEQ ID NO: 1663479 - RNA, 19 nt, Artificial Sequence
  Description of Artificial Sequence: Synthetic oligonucleotide
ccaccacuauggcaacaag

SEQ ID NO: 1663480 - RNA, 19 nt, Artificial Sequence
  Description of Artificial Sequence: Synthetic oligonucleotide
cuauggcaacaagccucac

SEQ ID NO: 1663481 - RNA, 19 nt, Artificial Sequence
  Description of Artificial Sequence: Synthetic oligonucleotide
gggugacugauagaaucaa

SEQ ID NO: 1663482 - RNA, 19 nt, Artificial Sequence
  Description of Artificial Sequence: Synthetic oligonucleotide
cagcgcagacgcaaagccu

SEQ ID NO: 1663483 - RNA, 19 nt, Artificial Sequence
  Description of Artificial Sequence: Synthetic oligonucleotide
gugcauucuccaugccacu

SEQ ID NO: 1663484 - RNA, 19 nt, Artificial Sequence
  Description of Artificial Sequence: Synthetic oligonucleotide
guucccagagucgcucucu

SEQ ID NO: 1663485 - RNA, 19 nt, Artificial Sequence
  Description of Artificial Sequence: Synthetic oligonucleotide
cccuaauaugcaccaaaua

SEQ ID NO: 1663486 - RNA, 19 nt, Artificial Sequence
  Description of Artificial Sequence: Synthetic oligonucleotide
gccaccacuauggcaacaa

SEQ ID NO: 1663487 - RNA, 19 nt, Artificial Sequence
  Description of Artificial Sequence: Synthetic oligonucleotide
cgagaauaugcacaauccu

SEQ ID NO: 1663488 - RNA, 19 nt, Artificial Sequence
  Description of Artificial Sequence: Synthetic oligonucleotide
ccaagggcucagaacgcga

SEQ ID NO: 1663489 - RNA, 19 nt, Artificial Sequence
  Description of Artificial Sequence: Synthetic oligonucleotide
acgcgaugccugacugcag

SEQ ID NO: 1663490 - RNA, 19 nt, Artificial Sequence
  Description of Artificial Sequence: Synthetic oligonucleotide
cacccacaaauagauuccu

SEQ ID NO: 1663491 - RNA, 19 nt, Artificial Sequence
  Description of Artificial Sequence: Synthetic oligonucleotide
ggccuucagauuauaaauu

SEQ ID NO: 1663492 - RNA, 19 nt, Artificial Sequence
  Description of Artificial Sequence: Synthetic oligonucleotide
gaggaacggaaagguugcu

SEQ ID NO: 1663493 - RNA, 19 nt, Artificial Sequence
  Description of Artificial Sequence: Synthetic oligonucleotide
caauccugugggacucgcu

SEQ ID NO: 1663494 - RNA, 19 nt, Artificial Sequence
  Description of Artificial Sequence: Synthetic oligonucleotide
gagcugcauuccucgcagu

SEQ ID NO: 1663495 - RNA, 19 nt, Artificial Sequence
  Description of Artificial Sequence: Synthetic oligonucleotide
gagcaccaucuuugagcua

SEQ ID NO: 1663496 - RNA, 19 nt, Artificial Sequence
  Description of Artificial Sequence: Synthetic oligonucleotide
cucaugcagcguugagagu

SEQ ID NO: 1663497 - RNA, 19 nt, Artificial Sequence
  Description of Artificial Sequence: Synthetic oligonucleotide
auggugccucaugcagcgu

SEQ ID NO: 1663498 - RNA, 19 nt, Artificial Sequence
  Description of Artificial Sequence: Synthetic oligonucleotide
ggcucagaacgcgaugccu

SEQ ID NO: 1663499 - RNA, 19 nt, Artificial Sequence
  Description of Artificial Sequence: Synthetic oligonucleotide
gggacucgcuccaucuuua

SEQ ID NO: 1663500 - RNA, 19 nt, Artificial Sequence
  Description of Artificial Sequence: Synthetic oligonucleotide
gugggacucgcuccaucuu

SEQ ID NO: 1663501 - RNA, 19 nt, Artificial Sequence
  Description of Artificial Sequence: Synthetic oligonucleotide
ccugaacagcgcagacgca

SEQ ID NO: 1663502 - RNA, 19 nt, Artificial Sequence
  Description of Artificial Sequence: Synthetic oligonucleotide
ccauuauggccagcaggga

SEQ ID NO: 1663503 - RNA, 19 nt, Artificial Sequence
  Description of Artificial Sequence: Synthetic oligonucleotide
gcagugccccucacaucug

SEQ ID NO: 1663504 - RNA, 19 nt, Artificial Sequence
  Description of Artificial Sequence: Synthetic oligonucleotide
guacagggccccacauuuu

SEQ ID NO: 1663505 - RNA, 19 nt, Artificial Sequence
  Description of Artificial Sequence: Synthetic oligonucleotide
cugaagaauugggcacauu

SEQ ID NO: 1663506 - RNA, 19 nt, Artificial Sequence
  Description of Artificial Sequence: Synthetic oligonucleotide
ggacgagaauaugcacaau

SEQ ID NO: 1663507 - RNA, 19 nt, Artificial Sequence
  Description of Artificial Sequence: Synthetic oligonucleotide
cccguguguuaauuauuuu

SEQ ID NO: 1663508 - RNA, 19 nt, Artificial Sequence
  Description of Artificial Sequence: Synthetic oligonucleotide
cgugugugugugugugugu

SEQ ID NO: 1663509 - RNA, 19 nt, Artificial Sequence
  Description of Artificial Sequence: Synthetic oligonucleotide
auacauguuagccagaggg

SEQ ID NO: 1663510 - RNA, 19 nt, Artificial Sequence
  Description of Artificial Sequence: Synthetic oligonucleotide
uucucuaucaaucuuaugu

SEQ ID NO: 1663511 - RNA, 19 nt, Artificial Sequence
  Description of Artificial Sequence: Synthetic oligonucleotide
ugcaauuuuacacuugggg

SEQ ID NO: 1663512 - RNA, 19 nt, Artificial Sequence
  Description of Artificial Sequence: Synthetic oligonucleotide
accguauccaucuagcugc

SEQ ID NO: 1663513 - RNA, 19 nt, Artificial Sequence
  Description of Artificial Sequence: Synthetic oligonucleotide
auugcaaucuccuuccugg

SEQ ID NO: 1663514 - RNA, 19 nt, Artificial Sequence
  Description of Artificial Sequence: Synthetic oligonucleotide
augauuaaaauggaucucc

SEQ ID NO: 1663515 - RNA, 19 nt, Artificial Sequence
  Description of Artificial Sequence: Synthetic oligonucleotide
auugcaauuuuacacuugg

SEQ ID NO: 1663516 - RNA, 19 nt, Artificial Sequence
  Description of Artificial Sequence: Synthetic oligonucleotide
aucauugcaaucuccuucc

SEQ ID NO: 1663517 - RNA, 19 nt, Artificial Sequence
  Description of Artificial Sequence: Synthetic oligonucleotide
agacccacggaucucaugc

SEQ ID NO: 1663518 - RNA, 19 nt, Artificial Sequence
  Description of Artificial Sequence: Synthetic oligonucleotide
uugccauuaacuauguagc

SEQ ID NO: 1663519 - RNA, 19 nt, Artificial Sequence
  Description of Artificial Sequence: Synthetic oligonucleotide
cuacauucaauguuugugg

SEQ ID NO: 1663520 - RNA, 19 nt, Artificial Sequence
  Description of Artificial Sequence: Synthetic oligonucleotide
acaaugauuaaaauggauc

SEQ ID NO: 1663521 - RNA, 19 nt, Artificial Sequence
  Description of Artificial Sequence: Synthetic oligonucleotide
gaaugcagaggugauaucg

SEQ ID NO: 1663522 - RNA, 19 nt, Artificial Sequence
  Description of Artificial Sequence: Synthetic oligonucleotide
aaucacggaagaugcgacc

SEQ ID NO: 1663523 - RNA, 19 nt, Artificial Sequence
  Description of Artificial Sequence: Synthetic oligonucleotide
ugauuaaaauggaucuccg

SEQ ID NO: 1663524 - RNA, 19 nt, Artificial Sequence
  Description of Artificial Sequence: Synthetic oligonucleotide
uuaaauuggcagcaggaac

SEQ ID NO: 1663525 - RNA, 19 nt, Artificial Sequence
  Description of Artificial Sequence: Synthetic oligonucleotide
ucuaucaaucuuaugugcu

SEQ ID NO: 1663526 - RNA, 19 nt, Artificial Sequence
  Description of Artificial Sequence: Synthetic oligonucleotide
agguccaucugcuaagcgc

SEQ ID NO: 1663527 - RNA, 19 nt, Artificial Sequence
  Description of Artificial Sequence: Synthetic oligonucleotide
auucagugaaugcagccac

SEQ ID NO: 1663528 - RNA, 19 nt, Artificial Sequence
  Description of Artificial Sequence: Synthetic oligonucleotide
ucucuaucaaucuuaugug

SEQ ID NO: 1663529 - RNA, 19 nt, Artificial Sequence
  Description of Artificial Sequence: Synthetic oligonucleotide
aauuccguuccgaugacgg

SEQ ID NO: 1663530 - RNA, 19 nt, Artificial Sequence
  Description of Artificial Sequence: Synthetic oligonucleotide
aacgccugccccuccaugc

SEQ ID NO: 1663531 - RNA, 19 nt, Artificial Sequence
  Description of Artificial Sequence: Synthetic oligonucleotide
uguggcaucacuugaugag

SEQ ID NO: 1663532 - RNA, 19 nt, Artificial Sequence
  Description of Artificial Sequence: Synthetic oligonucleotide
ucacguagaauuccguucc

SEQ ID NO: 1663533 - RNA, 19 nt, Artificial Sequence
  Description of Artificial Sequence: Synthetic oligonucleotide
aaauggaucuccguucuuc

SEQ ID NO: 1663534 - RNA, 19 nt, Artificial Sequence
  Description of Artificial Sequence: Synthetic oligonucleotide
uugcagacagcuuuugggg

SEQ ID NO: 1663535 - RNA, 19 nt, Artificial Sequence
  Description of Artificial Sequence: Synthetic oligonucleotide
ucuuaugugcuuugggaag

SEQ ID NO: 1663536 - RNA, 19 nt, Artificial Sequence
  Description of Artificial Sequence: Synthetic oligonucleotide
ugggaaauuucaaaucccc

SEQ ID NO: 1663537 - RNA, 19 nt, Artificial Sequence
  Description of Artificial Sequence: Synthetic oligonucleotide
aucacguagaauuccguuc

SEQ ID NO: 1663538 - RNA, 19 nt, Artificial Sequence
  Description of Artificial Sequence: Synthetic oligonucleotide
ggugauaucgcccacgaag

SEQ ID NO: 1663539 - RNA, 19 nt, Artificial Sequence
  Description of Artificial Sequence: Synthetic oligonucleotide
aaaaucacggaagaugcga

SEQ ID NO: 1663540 - RNA, 19 nt, Artificial Sequence
  Description of Artificial Sequence: Synthetic oligonucleotide
  modified_base (6)..(6): a, c, u, g, unknown or other
aaaacnucuggagacaaaa

SEQ ID NO: 1663541 - RNA, 19 nt, Artificial Sequence
  Description of Artificial Sequence: Synthetic oligonucleotide
aaauuggcagcaggaacgc

SEQ ID NO: 1663542 - RNA, 19 nt, Artificial Sequence
  Description of Artificial Sequence: Synthetic oligonucleotide
cucgaugcuacauucaaug

SEQ ID NO: 1663543 - RNA, 19 nt, Artificial Sequence
  Description of Artificial Sequence: Synthetic oligonucleotide
gaugcgacccugcacaugc

SEQ ID NO: 1663544 - RNA, 19 nt, Artificial Sequence
  Description of Artificial Sequence: Synthetic oligonucleotide
uggcauacauguuagccag

SEQ ID NO: 1663545 - RNA, 19 nt, Artificial Sequence
  Description of Artificial Sequence: Synthetic oligonucleotide
ucuucccaaaacaauugca

SEQ ID NO: 1663546 - RNA, 19 nt, Artificial Sequence
  Description of Artificial Sequence: Synthetic oligonucleotide
ggcuaugcggcuuuuagcg

SEQ ID NO: 1663547 - RNA, 19 nt, Artificial Sequence
  Description of Artificial Sequence: Synthetic oligonucleotide
aaaucacggaagaugcgac

SEQ ID NO: 1663548 - RNA, 19 nt, Artificial Sequence
  Description of Artificial Sequence: Synthetic oligonucleotide
uuuagcgauccagugagcc

SEQ ID NO: 1663549 - RNA, 19 nt, Artificial Sequence
  Description of Artificial Sequence: Synthetic oligonucleotide
uacauucaauguuuguggc

SEQ ID NO: 1663550 - RNA, 19 nt, Artificial Sequence
  Description of Artificial Sequence: Synthetic oligonucleotide
aguaccguauccaucuagc

SEQ ID NO: 1663551 - RNA, 19 nt, Artificial Sequence
  Description of Artificial Sequence: Synthetic oligonucleotide
auuggcagcaggaacgcgc

SEQ ID NO: 1663552 - RNA, 19 nt, Artificial Sequence
  Description of Artificial Sequence: Synthetic oligonucleotide
cuuuuaguguuucaaucac

SEQ ID NO: 1663553 - RNA, 19 nt, Artificial Sequence
  Description of Artificial Sequence: Synthetic oligonucleotide
aucacggaagaugcgaccc

SEQ ID NO: 1663554 - RNA, 19 nt, Artificial Sequence
  Description of Artificial Sequence: Synthetic oligonucleotide
ugcaguaacuuuacauuca

SEQ ID NO: 1663555 - RNA, 19 nt, Artificial Sequence
  Description of Artificial Sequence: Synthetic oligonucleotide
uuuguggcaucacuugaug

SEQ ID NO: 1663556 - RNA, 19 nt, Artificial Sequence
  Description of Artificial Sequence: Synthetic oligonucleotide
augcagaggugauaucgcc

SEQ ID NO: 1663557 - RNA, 19 nt, Artificial Sequence
  Description of Artificial Sequence: Synthetic oligonucleotide
uccuuuuaguguuucaauc

SEQ ID NO: 1663558 - RNA, 19 nt, Artificial Sequence
  Description of Artificial Sequence: Synthetic oligonucleotide
uucguauuauggcauacau

SEQ ID NO: 1663559 - RNA, 19 nt, Artificial Sequence
  Description of Artificial Sequence: Synthetic oligonucleotide
caacguuucuauugcagcc

SEQ ID NO: 1663560 - RNA, 19 nt, Artificial Sequence
  Description of Artificial Sequence: Synthetic oligonucleotide
agugguggauucuuccacg

SEQ ID NO: 1663561 - RNA, 19 nt, Artificial Sequence
  Description of Artificial Sequence: Synthetic oligonucleotide
uaccguauccaucuagcug

SEQ ID NO: 1663562 - RNA, 19 nt, Artificial Sequence
  Description of Artificial Sequence: Synthetic oligonucleotide
ugagaccgcucacagcugg

SEQ ID NO: 1663563 - RNA, 19 nt, Artificial Sequence
  Description of Artificial Sequence: Synthetic oligonucleotide
aacuauguagccaucucca

SEQ ID NO: 1663564 - RNA, 19 nt, Artificial Sequence
  Description of Artificial Sequence: Synthetic oligonucleotide
ucguauuauggcauacaug

SEQ ID NO: 1663565 - RNA, 19 nt, Artificial Sequence
  Description of Artificial Sequence: Synthetic oligonucleotide
cccaguauuaaauuggcag

SEQ ID NO: 1663566 - RNA, 19 nt, Artificial Sequence
  Description of Artificial Sequence: Synthetic oligonucleotide
cucgcugccguacaggugc

SEQ ID NO: 1663567 - RNA, 19 nt, Artificial Sequence
  Description of Artificial Sequence: Synthetic oligonucleotide
ucaaucuuaugugcuuugg

SEQ ID NO: 1663568 - RNA, 19 nt, Artificial Sequence
  Description of Artificial Sequence: Synthetic oligonucleotide
auggcauacauguuagcca

SEQ ID NO: 1663569 - RNA, 19 nt, Artificial Sequence
  Description of Artificial Sequence: Synthetic oligonucleotide
aaggagaaagcccgguggu

SEQ ID NO: 1663570 - RNA, 19 nt, Artificial Sequence
  Description of Artificial Sequence: Synthetic oligonucleotide
uacuucgucagguccaucu

SEQ ID NO: 1663571 - RNA, 19 nt, Artificial Sequence
  Description of Artificial Sequence: Synthetic oligonucleotide
cauauauagcugcacguuc

SEQ ID NO: 1663572 - RNA, 19 nt, Artificial Sequence
  Description of Artificial Sequence: Synthetic oligonucleotide
ugaaugcagccacgcaacg

SEQ ID NO: 1663573 - RNA, 19 nt, Artificial Sequence
  Description of Artificial Sequence: Synthetic oligonucleotide
gugauaucgcccacgaagg

SEQ ID NO: 1663574 - RNA, 19 nt, Artificial Sequence
  Description of Artificial Sequence: Synthetic oligonucleotide
uuagccagaggguaauccu

SEQ ID NO: 1663575 - RNA, 19 nt, Artificial Sequence
  Description of Artificial Sequence: Synthetic oligonucleotide
auggcuaugcggcuuuuag

SEQ ID NO: 1663576 - RNA, 19 nt, Artificial Sequence
  Description of Artificial Sequence: Synthetic oligonucleotide
uacauguuagccagagggu

SEQ ID NO: 1663577 - RNA, 19 nt, Artificial Sequence
  Description of Artificial Sequence: Synthetic oligonucleotide
ugcagaggugauaucgccc

SEQ ID NO: 1663578 - RNA, 19 nt, Artificial Sequence
  Description of Artificial Sequence: Synthetic oligonucleotide
gauaucgcccacgaaggag

SEQ ID NO: 1663579 - RNA, 19 nt, Artificial Sequence
  Description of Artificial Sequence: Synthetic oligonucleotide
aucuuaugugcuuugggaa

SEQ ID NO: 1663580 - RNA, 19 nt, Artificial Sequence
  Description of Artificial Sequence: Synthetic oligonucleotide
aucgcugcaguacaguaga

SEQ ID NO: 1663581 - RNA, 19 nt, Artificial Sequence
  Description of Artificial Sequence: Synthetic oligonucleotide
guagaauuccguuccgaug

SEQ ID NO: 1663582 - RNA, 19 nt, Artificial Sequence
  Description of Artificial Sequence: Synthetic oligonucleotide
aaccucguguucauacagc

SEQ ID NO: 1663583 - RNA, 19 nt, Artificial Sequence
  Description of Artificial Sequence: Synthetic oligonucleotide
auuaacuauguagccaucu

SEQ ID NO: 1663584 - RNA, 19 nt, Artificial Sequence
  Description of Artificial Sequence: Synthetic oligonucleotide
uuucaaauccccugccuuc

SEQ ID NO: 1663585 - RNA, 19 nt, Artificial Sequence
  Description of Artificial Sequence: Synthetic oligonucleotide
auacagaaugcagagguga

SEQ ID NO: 1663586 - RNA, 19 nt, Artificial Sequence
  Description of Artificial Sequence: Synthetic oligonucleotide
uggaucuccguucuuccca

SEQ ID NO: 1663587 - RNA, 19 nt, Artificial Sequence
  Description of Artificial Sequence: Synthetic oligonucleotide
ugugcugcuuucaggguca

SEQ ID NO: 1663588 - RNA, 19 nt, Artificial Sequence
  Description of Artificial Sequence: Synthetic oligonucleotide
uaauccugggaaacgccug

SEQ ID NO: 1663589 - RNA, 19 nt, Artificial Sequence
  Description of Artificial Sequence: Synthetic oligonucleotide
ucugcuaagcgcagguuuc

SEQ ID NO: 1663590 - RNA, 19 nt, Artificial Sequence
  Description of Artificial Sequence: Synthetic oligonucleotide
ucuauugcagccacauaua

SEQ ID NO: 1663591 - RNA, 19 nt, Artificial Sequence
  Description of Artificial Sequence: Synthetic oligonucleotide
cacaaccucguguucauac

SEQ ID NO: 1663592 - RNA, 19 nt, Artificial Sequence
  Description of Artificial Sequence: Synthetic oligonucleotide
auuccguuccgaugacggc

SEQ ID NO: 1663593 - RNA, 19 nt, Artificial Sequence
  Description of Artificial Sequence: Synthetic oligonucleotide
cacgcaacguuucuauugc

SEQ ID NO: 1663594 - RNA, 19 nt, Artificial Sequence
  Description of Artificial Sequence: Synthetic oligonucleotide
aauugcaauuuuacacuug

SEQ ID NO: 1663595 - RNA, 19 nt, Artificial Sequence
  Description of Artificial Sequence: Synthetic oligonucleotide
ugagccacaaccucguguu

SEQ ID NO: 1663596 - RNA, 19 nt, Artificial Sequence
  Description of Artificial Sequence: Synthetic oligonucleotide
uaucuaugcugugugcugc

SEQ ID NO: 1663597 - RNA, 19 nt, Artificial Sequence
  Description of Artificial Sequence: Synthetic oligonucleotide
cugcccacaguaucuaugc

SEQ ID NO: 1663598 - RNA, 19 nt, Artificial Sequence
  Description of Artificial Sequence: Synthetic oligonucleotide
ccaguauuaaauuggcagc

SEQ ID NO: 1663599 - RNA, 19 nt, Artificial Sequence
  Description of Artificial Sequence: Synthetic oligonucleotide
gaugacggcagcaucgcug

SEQ ID NO: 1663600 - RNA, 19 nt, Artificial Sequence
  Description of Artificial Sequence: Synthetic oligonucleotide
ucgcccacgaaggagaggc

SEQ ID NO: 1663601 - RNA, 19 nt, Artificial Sequence
  Description of Artificial Sequence: Synthetic oligonucleotide
aacguuucuauugcagcca

SEQ ID NO: 1663602 - RNA, 19 nt, Artificial Sequence
  Description of Artificial Sequence: Synthetic oligonucleotide
acauucaauguuuguggca

SEQ ID NO: 1663603 - RNA, 19 nt, Artificial Sequence
  Description of Artificial Sequence: Synthetic oligonucleotide
uccguucuucccaaaacaa

SEQ ID NO: 1663604 - RNA, 19 nt, Artificial Sequence
  Description of Artificial Sequence: Synthetic oligonucleotide
ugagacauugggcucuguc

SEQ ID NO: 1663605 - RNA, 19 nt, Artificial Sequence
  Description of Artificial Sequence: Synthetic oligonucleotide
cuuugucauacccggcucc

SEQ ID NO: 1663606 - RNA, 19 nt, Artificial Sequence
  Description of Artificial Sequence: Synthetic oligonucleotide
uauccaucuagcugcagua

SEQ ID NO: 1663607 - RNA, 19 nt, Artificial Sequence
  Description of Artificial Sequence: Synthetic oligonucleotide
aauucucuaucaaucuuau

SEQ ID NO: 1663608 - RNA, 19 nt, Artificial Sequence
  Description of Artificial Sequence: Synthetic oligonucleotide
acggaucucaugcaguggu

SEQ ID NO: 1663609 - RNA, 19 nt, Artificial Sequence
  Description of Artificial Sequence: Synthetic oligonucleotide
gcuacauucaauguuugug

SEQ ID NO: 1663610 - RNA, 19 nt, Artificial Sequence
  Description of Artificial Sequence: Synthetic oligonucleotide
cuuccacgguccaaggcgg

SEQ ID NO: 1663611 - RNA, 19 nt, Artificial Sequence
  Description of Artificial Sequence: Synthetic oligonucleotide
guaucuaugcugugugcug

SEQ ID NO: 1663612 - RNA, 19 nt, Artificial Sequence
  Description of Artificial Sequence: Synthetic oligonucleotide
auuaaauuggcagcaggaa

SEQ ID NO: 1663613 - RNA, 19 nt, Artificial Sequence
  Description of Artificial Sequence: Synthetic oligonucleotide
acuuuccggucucuucggc

SEQ ID NO: 1663614 - RNA, 19 nt, Artificial Sequence
  Description of Artificial Sequence: Synthetic oligonucleotide
ucagugaaugcagccacgc

SEQ ID NO: 1663615 - RNA, 19 nt, Artificial Sequence
  Description of Artificial Sequence: Synthetic oligonucleotide
ugcaguacaguagaggcuu

SEQ ID NO: 1663616 - RNA, 19 nt, Artificial Sequence
  Description of Artificial Sequence: Synthetic oligonucleotide
uuagcgauccagugagcca

SEQ ID NO: 1663617 - RNA, 19 nt, Artificial Sequence
  Description of Artificial Sequence: Synthetic oligonucleotide
uuucguauuauggcauaca

SEQ ID NO: 1663618 - RNA, 19 nt, Artificial Sequence
  Description of Artificial Sequence: Synthetic oligonucleotide
uaagacgugcugcuggaua

SEQ ID NO: 1663619 - RNA, 19 nt, Artificial Sequence
  Description of Artificial Sequence: Synthetic oligonucleotide
gcagguuucguauuauggc

SEQ ID NO: 1663620 - RNA, 19 nt, Artificial Sequence
  Description of Artificial Sequence: Synthetic oligonucleotide
aguacaguagaggcuuggg

SEQ ID NO: 1663621 - RNA, 19 nt, Artificial Sequence
  Description of Artificial Sequence: Synthetic oligonucleotide
ugaugagacauugggcucu

SEQ ID NO: 1663622 - RNA, 19 nt, Artificial Sequence
  Description of Artificial Sequence: Synthetic oligonucleotide
agaauuccguuccgaugac

SEQ ID NO: 1663623 - RNA, 19 nt, Artificial Sequence
  Description of Artificial Sequence: Synthetic oligonucleotide
gaauucucuaucaaucuua

SEQ ID NO: 1663624 - RNA, 19 nt, Artificial Sequence
  Description of Artificial Sequence: Synthetic oligonucleotide
accucguguucauacagcu

SEQ ID NO: 1663625 - RNA, 19 nt, Artificial Sequence
  Description of Artificial Sequence: Synthetic oligonucleotide
ucuuugucauacccggcuc

SEQ ID NO: 1663626 - RNA, 19 nt, Artificial Sequence
  Description of Artificial Sequence: Synthetic oligonucleotide
caaccucguguucauacag

SEQ ID NO: 1663627 - RNA, 19 nt, Artificial Sequence
  Description of Artificial Sequence: Synthetic oligonucleotide
guuagccagaggguaaucc

SEQ ID NO: 1663628 - RNA, 19 nt, Artificial Sequence
  Description of Artificial Sequence: Synthetic oligonucleotide
caucgcugcaguacaguag

SEQ ID NO: 1663629 - RNA, 19 nt, Artificial Sequence
  Description of Artificial Sequence: Synthetic oligonucleotide
cagguuucguauuauggca

SEQ ID NO: 1663630 - RNA, 19 nt, Artificial Sequence
  Description of Artificial Sequence: Synthetic oligonucleotide
uccguuccgaugacggcag

SEQ ID NO: 1663631 - RNA, 19 nt, Artificial Sequence
  Description of Artificial Sequence: Synthetic oligonucleotide
cagcaagcggaucuccucg

SEQ ID NO: 1663632 - RNA, 19 nt, Artificial Sequence
  Description of Artificial Sequence: Synthetic oligonucleotide
gugguggauucuuccacgg

SEQ ID NO: 1663633 - RNA, 19 nt, Artificial Sequence
  Description of Artificial Sequence: Synthetic oligonucleotide
cuccucgauggcuaugcgg

SEQ ID NO: 1663634 - RNA, 19 nt, Artificial Sequence
  Description of Artificial Sequence: Synthetic oligonucleotide
uucugcagguaagacgugc

SEQ ID NO: 1663635 - RNA, 19 nt, Artificial Sequence
  Description of Artificial Sequence: Synthetic oligonucleotide
uggcugagaccgcucacag

SEQ ID NO: 1663636 - RNA, 19 nt, Artificial Sequence
  Description of Artificial Sequence: Synthetic oligonucleotide
uggcuaugcggcuuuuagc

SEQ ID NO: 1663637 - RNA, 19 nt, Artificial Sequence
  Description of Artificial Sequence: Synthetic oligonucleotide
ugauaucgcccacgaagga

SEQ ID NO: 1663638 - RNA, 19 nt, Artificial Sequence
  Description of Artificial Sequence: Synthetic oligonucleotide
ucugccagacccacggauc

SEQ ID NO: 1663639 - RNA, 19 nt, Artificial Sequence
  Description of Artificial Sequence: Synthetic oligonucleotide
agaaugcagaggugauauc

SEQ ID NO: 1663640 - RNA, 19 nt, Artificial Sequence
  Description of Artificial Sequence: Synthetic oligonucleotide
gauuaaaauggaucuccgu

SEQ ID NO: 1663641 - RNA, 19 nt, Artificial Sequence
  Description of Artificial Sequence: Synthetic oligonucleotide
ugcuggauaccugucuuug

SEQ ID NO: 1663642 - RNA, 19 nt, Artificial Sequence
  Description of Artificial Sequence: Synthetic oligonucleotide
gcaacguuucuauugcagc

SEQ ID NO: 1663643 - RNA, 19 nt, Artificial Sequence
  Description of Artificial Sequence: Synthetic oligonucleotide
uuccguuccgaugacggca

SEQ ID NO: 1663644 - RNA, 19 nt, Artificial Sequence
  Description of Artificial Sequence: Synthetic oligonucleotide
uucaaauccccugccuuca

SEQ ID NO: 1663645 - RNA, 19 nt, Artificial Sequence
  Description of Artificial Sequence: Synthetic oligonucleotide
aauuggcagcaggaacgcg

SEQ ID NO: 1663646 - RNA, 19 nt, Artificial Sequence
  Description of Artificial Sequence: Synthetic oligonucleotide
agaggugauaucgcccacg

SEQ ID NO: 1663647 - RNA, 19 nt, Artificial Sequence
  Description of Artificial Sequence: Synthetic oligonucleotide
gcgcacaaugauuaaaaug

SEQ ID NO: 1663648 - RNA, 19 nt, Artificial Sequence
  Description of Artificial Sequence: Synthetic oligonucleotide
ugcuacauucaauguuugu

SEQ ID NO: 1663649 - RNA, 19 nt, Artificial Sequence
  Description of Artificial Sequence: Synthetic oligonucleotide
uagcgauccagugagccac

SEQ ID NO: 1663650 - RNA, 19 nt, Artificial Sequence
  Description of Artificial Sequence: Synthetic oligonucleotide
uuuuagcgauccagugagc

SEQ ID NO: 1663651 - RNA, 19 nt, Artificial Sequence
  Description of Artificial Sequence: Synthetic oligonucleotide
cauacccggcuccaguacc

SEQ ID NO: 1663652 - RNA, 19 nt, Artificial Sequence
  Description of Artificial Sequence: Synthetic oligonucleotide
cucgcucgaugcuacauuc

SEQ ID NO: 1663653 - RNA, 19 nt, Artificial Sequence
  Description of Artificial Sequence: Synthetic oligonucleotide
gaauuccguuccgaugacg

SEQ ID NO: 1663654 - RNA, 19 nt, Artificial Sequence
  Description of Artificial Sequence: Synthetic oligonucleotide
acaaccucguguucauaca

SEQ ID NO: 1663655 - RNA, 19 nt, Artificial Sequence
  Description of Artificial Sequence: Synthetic oligonucleotide
uggugcuuggcaguuaaaa

SEQ ID NO: 1663656 - RNA, 19 nt, Artificial Sequence
  Description of Artificial Sequence: Synthetic oligonucleotide
gaugcuacauucaauguuu

SEQ ID NO: 1663657 - RNA, 19 nt, Artificial Sequence
  Description of Artificial Sequence: Synthetic oligonucleotide
ucuccucgauggcuaugcg

SEQ ID NO: 1663658 - RNA, 19 nt, Artificial Sequence
  Description of Artificial Sequence: Synthetic oligonucleotide
gcaauuuuacacuuggggu

SEQ ID NO: 1663659 - RNA, 19 nt, Artificial Sequence
  Description of Artificial Sequence: Synthetic oligonucleotide
ucauacccggcuccaguac

SEQ ID NO: 1663660 - RNA, 19 nt, Artificial Sequence
  Description of Artificial Sequence: Synthetic oligonucleotide
uaucgcccacgaaggagag

SEQ ID NO: 1663661 - RNA, 19 nt, Artificial Sequence
  Description of Artificial Sequence: Synthetic oligonucleotide
aaacgccugccccuccaug

SEQ ID NO: 1663662 - RNA, 19 nt, Artificial Sequence
  Description of Artificial Sequence: Synthetic oligonucleotide
caguauuaaauuggcagca

SEQ ID NO: 1663663 - RNA, 19 nt, Artificial Sequence
  Description of Artificial Sequence: Synthetic oligonucleotide
auucucuaucaaucuuaug

SEQ ID NO: 1663664 - RNA, 19 nt, Artificial Sequence
  Description of Artificial Sequence: Synthetic oligonucleotide
cagcuuuuggggcagccac

SEQ ID NO: 1663665 - RNA, 19 nt, Artificial Sequence
  Description of Artificial Sequence: Synthetic oligonucleotide
uuuacacuugggguuccca

SEQ ID NO: 1663666 - RNA, 19 nt, Artificial Sequence
  Description of Artificial Sequence: Synthetic oligonucleotide
gaggugauaucgcccacga

SEQ ID NO: 1663667 - RNA, 19 nt, Artificial Sequence
  Description of Artificial Sequence: Synthetic oligonucleotide
cagaggguaauccugggaa

SEQ ID NO: 1663668 - RNA, 19 nt, Artificial Sequence
  Description of Artificial Sequence: Synthetic oligonucleotide
ugaucauugcaaucuccuu

SEQ ID NO: 1663669 - RNA, 19 nt, Artificial Sequence
  Description of Artificial Sequence: Synthetic oligonucleotide
auaucgcccacgaaggaga

SEQ ID NO: 1663670 - RNA, 19 nt, Artificial Sequence
  Description of Artificial Sequence: Synthetic oligonucleotide
caguaccguauccaucuag

SEQ ID NO: 1663671 - RNA, 19 nt, Artificial Sequence
  Description of Artificial Sequence: Synthetic oligonucleotide
aacgcgcacaaugauuaaa

SEQ ID NO: 1663672 - RNA, 19 nt, Artificial Sequence
  Description of Artificial Sequence: Synthetic oligonucleotide
uguugcucgcugccguaca

SEQ ID NO: 1663673 - RNA, 19 nt, Artificial Sequence
  Description of Artificial Sequence: Synthetic oligonucleotide
gugaaugcagccacgcaac

SEQ ID NO: 1663674 - RNA, 19 nt, Artificial Sequence
  Description of Artificial Sequence: Synthetic oligonucleotide
agaggguaauccugggaaa

SEQ ID NO: 1663675 - RNA, 19 nt, Artificial Sequence
  Description of Artificial Sequence: Synthetic oligonucleotide
cacuuuccggucucuucgg

SEQ ID NO: 1663676 - RNA, 19 nt, Artificial Sequence
  Description of Artificial Sequence: Synthetic oligonucleotide
ggcccggucagcuauuuug

SEQ ID NO: 1663677 - RNA, 19 nt, Artificial Sequence
  Description of Artificial Sequence: Synthetic oligonucleotide
ucacggaagaugcgacccu

SEQ ID NO: 1663678 - RNA, 19 nt, Artificial Sequence
  Description of Artificial Sequence: Synthetic oligonucleotide
ggcauaguccagcuggcug

SEQ ID NO: 1663679 - RNA, 19 nt, Artificial Sequence
  Description of Artificial Sequence: Synthetic oligonucleotide
cacguagaauuccguuccg

SEQ ID NO: 1663680 - RNA, 19 nt, Artificial Sequence
  Description of Artificial Sequence: Synthetic oligonucleotide
gcugagaccgcucacagcu

SEQ ID NO: 1663681 - RNA, 19 nt, Artificial Sequence
  Description of Artificial Sequence: Synthetic oligonucleotide
guuucguauuauggcauac

SEQ ID NO: 1663682 - RNA, 19 nt, Artificial Sequence
  Description of Artificial Sequence: Synthetic oligonucleotide
caaucagggcauaguccag

SEQ ID NO: 1663683 - RNA, 19 nt, Artificial Sequence
  Description of Artificial Sequence: Synthetic oligonucleotide
aagcgcagguuucguauua

SEQ ID NO: 1663684 - RNA, 19 nt, Artificial Sequence
  Description of Artificial Sequence: Synthetic oligonucleotide
cgcagguuucguauuaugg

SEQ ID NO: 1663685 - RNA, 19 nt, Artificial Sequence
  Description of Artificial Sequence: Synthetic oligonucleotide
gggaauccaauggagaaca

SEQ ID NO: 1663686 - RNA, 19 nt, Artificial Sequence
  Description of Artificial Sequence: Synthetic oligonucleotide
cauuaacuauguagccauc

SEQ ID NO: 1663687 - RNA, 19 nt, Artificial Sequence
  Description of Artificial Sequence: Synthetic oligonucleotide
uaugcggcuuuuagcgauc

SEQ ID NO: 1663688 - RNA, 19 nt, Artificial Sequence
  Description of Artificial Sequence: Synthetic oligonucleotide
ucaauguuuguggcaucac

SEQ ID NO: 1663689 - RNA, 19 nt, Artificial Sequence
  Description of Artificial Sequence: Synthetic oligonucleotide
agccacgcaacguuucuau

SEQ ID NO: 1663690 - RNA, 19 nt, Artificial Sequence
  Description of Artificial Sequence: Synthetic oligonucleotide
gcuuuuagcgauccaguga

SEQ ID NO: 1663691 - RNA, 19 nt, Artificial Sequence
  Description of Artificial Sequence: Synthetic oligonucleotide
ucucgcucgaugcuacauu

SEQ ID NO: 1663692 - RNA, 19 nt, Artificial Sequence
  Description of Artificial Sequence: Synthetic oligonucleotide
uuuuacacuugggguuccc

SEQ ID NO: 1663693 - RNA, 19 nt, Artificial Sequence
  Description of Artificial Sequence: Synthetic oligonucleotide
guugcucgcugccguacag

SEQ ID NO: 1663694 - RNA, 19 nt, Artificial Sequence
  Description of Artificial Sequence: Synthetic oligonucleotide
augcggcuuuuagcgaucc

SEQ ID NO: 1663695 - RNA, 19 nt, Artificial Sequence
  Description of Artificial Sequence: Synthetic oligonucleotide
agggcauaguccagcuggc

SEQ ID NO: 1663696 - RNA, 19 nt, Artificial Sequence
  Description of Artificial Sequence: Synthetic oligonucleotide
aucuaugcugugugcugcu

SEQ ID NO: 1663697 - RNA, 19 nt, Artificial Sequence
  Description of Artificial Sequence: Synthetic oligonucleotide
ucgcucgaugcuacauuca

SEQ ID NO: 1663698 - RNA, 19 nt, Artificial Sequence
  Description of Artificial Sequence: Synthetic oligonucleotide
acugcccacaguaucuaug

SEQ ID NO: 1663699 - RNA, 19 nt, Artificial Sequence
  Description of Artificial Sequence: Synthetic oligonucleotide
aucuccguucuucccaaaa

SEQ ID NO: 1663700 - RNA, 19 nt, Artificial Sequence
  Description of Artificial Sequence: Synthetic oligonucleotide
caguacaguagaggcuugg

SEQ ID NO: 1663701 - RNA, 19 nt, Artificial Sequence
  Description of Artificial Sequence: Synthetic oligonucleotide
gucuuugucauacccggcu

SEQ ID NO: 1663702 - RNA, 19 nt, Artificial Sequence
  Description of Artificial Sequence: Synthetic oligonucleotide
ccacgcaacguuucuauug

SEQ ID NO: 1663703 - RNA, 19 nt, Artificial Sequence
  Description of Artificial Sequence: Synthetic oligonucleotide
acggaagaugcgacccugc

SEQ ID NO: 1663704 - RNA, 19 nt, Artificial Sequence
  Description of Artificial Sequence: Synthetic oligonucleotide
auacccggcuccaguaccg

SEQ ID NO: 1663705 - RNA, 19 nt, Artificial Sequence
  Description of Artificial Sequence: Synthetic oligonucleotide
cagguccaucugcuaagcg

SEQ ID NO: 1663706 - RNA, 19 nt, Artificial Sequence
  Description of Artificial Sequence: Synthetic oligonucleotide
ugcgacccugcacaugcuc

SEQ ID NO: 1663707 - RNA, 19 nt, Artificial Sequence
  Description of Artificial Sequence: Synthetic oligonucleotide
cugcuaagcgcagguuucg

SEQ ID NO: 1663708 - RNA, 19 nt, Artificial Sequence
  Description of Artificial Sequence: Synthetic oligonucleotide
ucgcugcaguacaguagag

SEQ ID NO: 1663709 - RNA, 19 nt, Artificial Sequence
  Description of Artificial Sequence: Synthetic oligonucleotide
uguacuucgucagguccau

SEQ ID NO: 1663710 - RNA, 19 nt, Artificial Sequence
  Description of Artificial Sequence: Synthetic oligonucleotide
cuuuccggucucuucggca

SEQ ID NO: 1663711 - RNA, 19 nt, Artificial Sequence
  Description of Artificial Sequence: Synthetic oligonucleotide
gaugagacauugggcucug

SEQ ID NO: 1663712 - RNA, 19 nt, Artificial Sequence
  Description of Artificial Sequence: Synthetic oligonucleotide
gguaauccugggaaacgcc

SEQ ID NO: 1663713 - RNA, 19 nt, Artificial Sequence
  Description of Artificial Sequence: Synthetic oligonucleotide
cauucaauguuuguggcau

SEQ ID NO: 1663714 - RNA, 19 nt, Artificial Sequence
  Description of Artificial Sequence: Synthetic oligonucleotide
gcggcuuuuagcgauccag

SEQ ID NO: 1663715 - RNA, 19 nt, Artificial Sequence
  Description of Artificial Sequence: Synthetic oligonucleotide
cugcagguaagacgugcug

SEQ ID NO: 1663716 - RNA, 19 nt, Artificial Sequence
  Description of Artificial Sequence: Synthetic oligonucleotide
agcaagcggaucuccucga

SEQ ID NO: 1663717 - RNA, 19 nt, Artificial Sequence
  Description of Artificial Sequence: Synthetic oligonucleotide
acccugcacaugcuccauc

SEQ ID NO: 1663718 - RNA, 19 nt, Artificial Sequence
  Description of Artificial Sequence: Synthetic oligonucleotide
cuaagcgcagguuucguau

SEQ ID NO: 1663719 - RNA, 19 nt, Artificial Sequence
  Description of Artificial Sequence: Synthetic oligonucleotide
ucgauggcuaugcggcuuu

SEQ ID NO: 1663720 - RNA, 19 nt, Artificial Sequence
  Description of Artificial Sequence: Synthetic oligonucleotide
ggguaauccugggaaacgc

SEQ ID NO: 1663721 - RNA, 19 nt, Artificial Sequence
  Description of Artificial Sequence: Synthetic oligonucleotide
agguuucguauuauggcau

SEQ ID NO: 1663722 - RNA, 19 nt, Artificial Sequence
  Description of Artificial Sequence: Synthetic oligonucleotide
uaccugucuuugucauacc

SEQ ID NO: 1663723 - RNA, 19 nt, Artificial Sequence
  Description of Artificial Sequence: Synthetic oligonucleotide
acgcgcacaaugauuaaaa

SEQ ID NO: 1663724 - RNA, 19 nt, Artificial Sequence
  Description of Artificial Sequence: Synthetic oligonucleotide
ggaacgcgcacaaugauua

SEQ ID NO: 1663725 - RNA, 19 nt, Artificial Sequence
  Description of Artificial Sequence: Synthetic oligonucleotide
gauaccugucuuugucaua

SEQ ID NO: 1663726 - RNA, 19 nt, Artificial Sequence
  Description of Artificial Sequence: Synthetic oligonucleotide
guggcaucacuugaugaga

SEQ ID NO: 1663727 - RNA, 19 nt, Artificial Sequence
  Description of Artificial Sequence: Synthetic oligonucleotide
cacggaucucaugcagugg

SEQ ID NO: 1663728 - RNA, 19 nt, Artificial Sequence
  Description of Artificial Sequence: Synthetic oligonucleotide
caauguuuguggcaucacu

SEQ ID NO: 1663729 - RNA, 19 nt, Artificial Sequence
  Description of Artificial Sequence: Synthetic oligonucleotide
gguaagacgugcugcugga

SEQ ID NO: 1663730 - RNA, 19 nt, Artificial Sequence
  Description of Artificial Sequence: Synthetic oligonucleotide
agugagccacaaccucgug

SEQ ID NO: 1663731 - RNA, 19 nt, Artificial Sequence
  Description of Artificial Sequence: Synthetic oligonucleotide
acagcuuuuggggcagcca

SEQ ID NO: 1663732 - RNA, 19 nt, Artificial Sequence
  Description of Artificial Sequence: Synthetic oligonucleotide
acguagaauuccguuccga

SEQ ID NO: 1663733 - RNA, 19 nt, Artificial Sequence
  Description of Artificial Sequence: Synthetic oligonucleotide
augcuacauucaauguuug

SEQ ID NO: 1663734 - RNA, 19 nt, Artificial Sequence
  Description of Artificial Sequence: Synthetic oligonucleotide
ugccguacaggugcagcac

SEQ ID NO: 1663735 - RNA, 19 nt, Artificial Sequence
  Description of Artificial Sequence: Synthetic oligonucleotide
ccggucagcuauuuugcag

SEQ ID NO: 1663736 - RNA, 19 nt, Artificial Sequence
  Description of Artificial Sequence: Synthetic oligonucleotide
acgcaacguuucuauugca

SEQ ID NO: 1663737 - RNA, 19 nt, Artificial Sequence
  Description of Artificial Sequence: Synthetic oligonucleotide
cacggaagaugcgacccug

SEQ ID NO: 1663738 - RNA, 19 nt, Artificial Sequence
  Description of Artificial Sequence: Synthetic oligonucleotide
agcaucgcugcaguacagu

SEQ ID NO: 1663739 - RNA, 19 nt, Artificial Sequence
  Description of Artificial Sequence: Synthetic oligonucleotide
cccuccaugcaccuggaug

SEQ ID NO: 1663740 - RNA, 19 nt, Artificial Sequence
  Description of Artificial Sequence: Synthetic oligonucleotide
ugcggcuuuuagcgaucca

SEQ ID NO: 1663741 - RNA, 19 nt, Artificial Sequence
  Description of Artificial Sequence: Synthetic oligonucleotide
cgcaacguuucuauugcag

SEQ ID NO: 1663742 - RNA, 19 nt, Artificial Sequence
  Description of Artificial Sequence: Synthetic oligonucleotide
gucauacccggcuccagua

SEQ ID NO: 1663743 - RNA, 19 nt, Artificial Sequence
  Description of Artificial Sequence: Synthetic oligonucleotide
gacccacggaucucaugca

SEQ ID NO: 1663744 - RNA, 19 nt, Artificial Sequence
  Description of Artificial Sequence: Synthetic oligonucleotide
ugcuaagcgcagguuucgu

SEQ ID NO: 1663745 - RNA, 19 nt, Artificial Sequence
  Description of Artificial Sequence: Synthetic oligonucleotide
ccacggaucucaugcagug

SEQ ID NO: 1663746 - RNA, 19 nt, Artificial Sequence
  Description of Artificial Sequence: Synthetic oligonucleotide
guaccguauccaucuagcu

SEQ ID NO: 1663747 - RNA, 19 nt, Artificial Sequence
  Description of Artificial Sequence: Synthetic oligonucleotide
cacugaguguccaccugca

SEQ ID NO: 1663748 - RNA, 19 nt, Artificial Sequence
  Description of Artificial Sequence: Synthetic oligonucleotide
agccacauauauagcugca

SEQ ID NO: 1663749 - RNA, 19 nt, Artificial Sequence
  Description of Artificial Sequence: Synthetic oligonucleotide
cagccacuuugaucauugc

SEQ ID NO: 1663750 - RNA, 19 nt, Artificial Sequence
  Description of Artificial Sequence: Synthetic oligonucleotide
acccaguauuaaauuggca

SEQ ID NO: 1663751 - RNA, 19 nt, Artificial Sequence
  Description of Artificial Sequence: Synthetic oligonucleotide
cuaugcggcuuuuagcgau

SEQ ID NO: 1663752 - RNA, 19 nt, Artificial Sequence
  Description of Artificial Sequence: Synthetic oligonucleotide
gcucugucauacagaaugc

SEQ ID NO: 1663753 - RNA, 19 nt, Artificial Sequence
  Description of Artificial Sequence: Synthetic oligonucleotide
aggaacgcgcacaaugauu

SEQ ID NO: 1663754 - RNA, 19 nt, Artificial Sequence
  Description of Artificial Sequence: Synthetic oligonucleotide
agaaagcccggugguuucu

SEQ ID NO: 1663755 - RNA, 19 nt, Artificial Sequence
  Description of Artificial Sequence: Synthetic oligonucleotide
ugggaaacgccugccccuc

SEQ ID NO: 1663756 - RNA, 19 nt, Artificial Sequence
  Description of Artificial Sequence: Synthetic oligonucleotide
gaacgcgcacaaugauuaa

SEQ ID NO: 1663757 - RNA, 19 nt, Artificial Sequence
  Description of Artificial Sequence: Synthetic oligonucleotide
gaaugcagccacgcaacgu

SEQ ID NO: 1663758 - RNA, 19 nt, Artificial Sequence
  Description of Artificial Sequence: Synthetic oligonucleotide
gagaccgcucacagcuggc

SEQ ID NO: 1663759 - RNA, 19 nt, Artificial Sequence
  Description of Artificial Sequence: Synthetic oligonucleotide
agaccgcucacagcuggca

SEQ ID NO: 1663760 - RNA, 19 nt, Artificial Sequence
  Description of Artificial Sequence: Synthetic oligonucleotide
aucucgcucgaugcuacau

SEQ ID NO: 1663761 - RNA, 19 nt, Artificial Sequence
  Description of Artificial Sequence: Synthetic oligonucleotide
gaccgcucacagcuggcaa

SEQ ID NO: 1663762 - RNA, 19 nt, Artificial Sequence
  Description of Artificial Sequence: Synthetic oligonucleotide
cuccaugcaccuggauggc

SEQ ID NO: 1663763 - RNA, 19 nt, Artificial Sequence
  Description of Artificial Sequence: Synthetic oligonucleotide
cuguugcucgcugccguac

SEQ ID NO: 1663764 - RNA, 19 nt, Artificial Sequence
  Description of Artificial Sequence: Synthetic oligonucleotide
aucgcccacgaaggagagg

SEQ ID NO: 1663765 - RNA, 19 nt, Artificial Sequence
  Description of Artificial Sequence: Synthetic oligonucleotide
gcaggaacgcgcacaauga

SEQ ID NO: 1663766 - RNA, 19 nt, Artificial Sequence
  Description of Artificial Sequence: Synthetic oligonucleotide
cuucacccaguauuaaauu

SEQ ID NO: 1663767 - RNA, 19 nt, Artificial Sequence
  Description of Artificial Sequence: Synthetic oligonucleotide
gguuucguauuauggcaua

SEQ ID NO: 1663768 - RNA, 19 nt, Artificial Sequence
  Description of Artificial Sequence: Synthetic oligonucleotide
cuggcugagaccgcucaca

SEQ ID NO: 1663769 - RNA, 19 nt, Artificial Sequence
  Description of Artificial Sequence: Synthetic oligonucleotide
cagugaaugcagccacgca

SEQ ID NO: 1663770 - RNA, 19 nt, Artificial Sequence
  Description of Artificial Sequence: Synthetic oligonucleotide
aggugauaucgcccacgaa

SEQ ID NO: 1663771 - RNA, 19 nt, Artificial Sequence
  Description of Artificial Sequence: Synthetic oligonucleotide
guuuguggcaucacuugau

SEQ ID NO: 1663772 - RNA, 19 nt, Artificial Sequence
  Description of Artificial Sequence: Synthetic oligonucleotide
gcuaugcggcuuuuagcga

SEQ ID NO: 1663773 - RNA, 19 nt, Artificial Sequence
  Description of Artificial Sequence: Synthetic oligonucleotide
ggucagcaagcggaucucc

SEQ ID NO: 1663774 - RNA, 19 nt, Artificial Sequence
  Description of Artificial Sequence: Synthetic oligonucleotide
gcgcagguuucguauuaug

SEQ ID NO: 1663775 - RNA, 19 nt, Artificial Sequence
  Description of Artificial Sequence: Synthetic oligonucleotide
ggcugagaccgcucacagc

SEQ ID NO: 1663776 - RNA, 19 nt, Artificial Sequence
  Description of Artificial Sequence: Synthetic oligonucleotide
ggauaccugucuuugucau

SEQ ID NO: 1663777 - RNA, 19 nt, Artificial Sequence
  Description of Artificial Sequence: Synthetic oligonucleotide
gcgacccugcacaugcucc

SEQ ID NO: 1663778 - RNA, 19 nt, Artificial Sequence
  Description of Artificial Sequence: Synthetic oligonucleotide
agcgcagguuucguauuau

SEQ ID NO: 1663779 - RNA, 19 nt, Artificial Sequence
  Description of Artificial Sequence: Synthetic oligonucleotide
gauggcuaugcggcuuuua

SEQ ID NO: 1663780 - RNA, 19 nt, Artificial Sequence
  Description of Artificial Sequence: Synthetic oligonucleotide
ggcuuggggacagggaauc

SEQ ID NO: 1663781 - RNA, 19 nt, Artificial Sequence
  Description of Artificial Sequence: Synthetic oligonucleotide
gcaucgcugcaguacagua

SEQ ID NO: 1663782 - RNA, 19 nt, Artificial Sequence
  Description of Artificial Sequence: Synthetic oligonucleotide
gcuaagcgcagguuucgua

SEQ ID NO: 1663783 - RNA, 19 nt, Artificial Sequence
  Description of Artificial Sequence: Synthetic oligonucleotide
uacccggcuccaguaccgu

SEQ ID NO: 1663784 - RNA, 19 nt, Artificial Sequence
  Description of Artificial Sequence: Synthetic oligonucleotide
caucucgcucgaugcuaca

SEQ ID NO: 1663785 - RNA, 19 nt, Artificial Sequence
  Description of Artificial Sequence: Synthetic oligonucleotide
ggaugcgcucugccagacc

SEQ ID NO: 1663786 - RNA, 19 nt, Artificial Sequence
  Description of Artificial Sequence: Synthetic oligonucleotide
guuccgaugacggcagcau

SEQ ID NO: 1663787 - RNA, 19 nt, Artificial Sequence
  Description of Artificial Sequence: Synthetic oligonucleotide
acgugcugcuggauaccug

SEQ ID NO: 1663788 - RNA, 19 nt, Artificial Sequence
  Description of Artificial Sequence: Synthetic oligonucleotide
ugccagacccacggaucuc

SEQ ID NO: 1663789 - RNA, 19 nt, Artificial Sequence
  Description of Artificial Sequence: Synthetic oligonucleotide
cuaugcugugugcugcuuu

SEQ ID NO: 1663790 - RNA, 19 nt, Artificial Sequence
  Description of Artificial Sequence: Synthetic oligonucleotide
ggcuaacuccaggaauuga

SEQ ID NO: 1663791 - RNA, 19 nt, Artificial Sequence
  Description of Artificial Sequence: Synthetic oligonucleotide
ccgaugacggcagcaucgc

SEQ ID NO: 1663792 - RNA, 19 nt, Artificial Sequence
  Description of Artificial Sequence: Synthetic oligonucleotide
guauuauggcauacauguu

SEQ ID NO: 1663793 - RNA, 19 nt, Artificial Sequence
  Description of Artificial Sequence: Synthetic oligonucleotide
uggcccggucagcuauuuu

SEQ ID NO: 1663794 - RNA, 19 nt, Artificial Sequence
  Description of Artificial Sequence: Synthetic oligonucleotide
gggaaacgccugccccucc

SEQ ID NO: 1663795 - RNA, 19 nt, Artificial Sequence
  Description of Artificial Sequence: Synthetic oligonucleotide
ggagaaagcccggugguuu

SEQ ID NO: 1663796 - RNA, 19 nt, Artificial Sequence
  Description of Artificial Sequence: Synthetic oligonucleotide
gcaguacaguagaggcuug

SEQ ID NO: 1663797 - RNA, 19 nt, Artificial Sequence
  Description of Artificial Sequence: Synthetic oligonucleotide
ggauggcccggucagcuau

SEQ ID NO: 1663798 - RNA, 19 nt, Artificial Sequence
  Description of Artificial Sequence: Synthetic oligonucleotide
augcagccacgcaacguuu

SEQ ID NO: 1663799 - RNA, 19 nt, Artificial Sequence
  Description of Artificial Sequence: Synthetic oligonucleotide
caggaacgcgcacaaugau

SEQ ID NO: 1663800 - RNA, 19 nt, Artificial Sequence
  Description of Artificial Sequence: Synthetic oligonucleotide
cuggugcuuggcaguuaaa

SEQ ID NO: 1663801 - RNA, 19 nt, Artificial Sequence
  Description of Artificial Sequence: Synthetic oligonucleotide
cacguucugcugggcuaac

SEQ ID NO: 1663802 - RNA, 19 nt, Artificial Sequence
  Description of Artificial Sequence: Synthetic oligonucleotide
guacuucgucagguccauc

SEQ ID NO: 1663803 - RNA, 19 nt, Artificial Sequence
  Description of Artificial Sequence: Synthetic oligonucleotide
auggcccggucagcuauuu

SEQ ID NO: 1663804 - RNA, 19 nt, Artificial Sequence
  Description of Artificial Sequence: Synthetic oligonucleotide
gcagccacgcaacguuucu

SEQ ID NO: 1663805 - RNA, 19 nt, Artificial Sequence
  Description of Artificial Sequence: Synthetic oligonucleotide
cguagaauuccguuccgau

SEQ ID NO: 1663806 - RNA, 19 nt, Artificial Sequence
  Description of Artificial Sequence: Synthetic oligonucleotide
cugcuggauaccugucuuu

SEQ ID NO: 1663807 - RNA, 19 nt, Artificial Sequence
  Description of Artificial Sequence: Synthetic oligonucleotide
gcacguucugcugggcuaa

SEQ ID NO: 1663808 - RNA, 19 nt, Artificial Sequence
  Description of Artificial Sequence: Synthetic oligonucleotide
guaagacgugcugcuggau

SEQ ID NO: 1663809 - RNA, 19 nt, Artificial Sequence
  Description of Artificial Sequence: Synthetic oligonucleotide
gaaagcccggugguuucuu

SEQ ID NO: 1663810 - RNA, 19 nt, Artificial Sequence
  Description of Artificial Sequence: Synthetic oligonucleotide
ggcggccuugggaaauuuc

SEQ ID NO: 1663811 - RNA, 19 nt, Artificial Sequence
  Description of Artificial Sequence: Synthetic oligonucleotide
cgcucgaugcuacauucaa

SEQ ID NO: 1663812 - RNA, 19 nt, Artificial Sequence
  Description of Artificial Sequence: Synthetic oligonucleotide
cccggucagcuauuuugca

SEQ ID NO: 1663813 - RNA, 19 nt, Artificial Sequence
  Description of Artificial Sequence: Synthetic oligonucleotide
gcucgcugccguacaggug

SEQ ID NO: 1663814 - RNA, 19 nt, Artificial Sequence
  Description of Artificial Sequence: Synthetic oligonucleotide
augcgacccugcacaugcu

SEQ ID NO: 1663815 - RNA, 19 nt, Artificial Sequence
  Description of Artificial Sequence: Synthetic oligonucleotide
ccguucuucccaaaacaau

SEQ ID NO: 1663816 - RNA, 19 nt, Artificial Sequence
  Description of Artificial Sequence: Synthetic oligonucleotide
ccggcuccaguaccguauc

SEQ ID NO: 1663817 - RNA, 19 nt, Artificial Sequence
  Description of Artificial Sequence: Synthetic oligonucleotide
ccaucacguagaauuccgu

SEQ ID NO: 1663818 - RNA, 19 nt, Artificial Sequence
  Description of Artificial Sequence: Synthetic oligonucleotide
caaggcggccuugggaaau

SEQ ID NO: 1663819 - RNA, 19 nt, Artificial Sequence
  Description of Artificial Sequence: Synthetic oligonucleotide
ccguauccaucuagcugca

SEQ ID NO: 1663820 - RNA, 19 nt, Artificial Sequence
  Description of Artificial Sequence: Synthetic oligonucleotide
cagccacgcaacguuucua

SEQ ID NO: 1663821 - RNA, 19 nt, Artificial Sequence
  Description of Artificial Sequence: Synthetic oligonucleotide
cguuucuauugcagccaca

SEQ ID NO: 1663822 - RNA, 19 nt, Artificial Sequence
  Description of Artificial Sequence: Synthetic oligonucleotide
cucgauggcuaugcggcuu

SEQ ID NO: 1663823 - RNA, 19 nt, Artificial Sequence
  Description of Artificial Sequence: Synthetic oligonucleotide
cccacggaucucaugcagu

SEQ ID NO: 1663824 - RNA, 19 nt, Artificial Sequence
  Description of Artificial Sequence: Synthetic oligonucleotide
cggcuccaguaccguaucc

SEQ ID NO: 1663825 - RNA, 19 nt, Artificial Sequence
  Description of Artificial Sequence: Synthetic oligonucleotide
gcucgaugcuacauucaau

SEQ ID NO: 1663826 - RNA, 19 nt, Artificial Sequence
  Description of Artificial Sequence: Synthetic oligonucleotide
gauggcccggucagcuauu

SEQ ID NO: 1663827 - RNA, 19 nt, Artificial Sequence
  Description of Artificial Sequence: Synthetic oligonucleotide
cggccuugggaaauuucaa

SEQ ID NO: 1663828 - RNA, 19 nt, Artificial Sequence
  Description of Artificial Sequence: Synthetic oligonucleotide
caucugcuaagcgcagguu

SEQ ID NO: 1663829 - RNA, 19 nt, Artificial Sequence
  Description of Artificial Sequence: Synthetic oligonucleotide
cggcuuuuagcgauccagu

SEQ ID NO: 1663830 - RNA, 19 nt, Artificial Sequence
  Description of Artificial Sequence: Synthetic oligonucleotide
cguuccgaugacggcagca

SEQ ID NO: 1663831 - RNA, 19 nt, Artificial Sequence
  Description of Artificial Sequence: Synthetic oligonucleotide
cccggcuccaguaccguau

SEQ ID NO: 1663832 - RNA, 19 nt, Artificial Sequence
  Description of Artificial Sequence: Synthetic oligonucleotide
cuucggcaaucagggcaua

SEQ ID NO: 1663833 - RNA, 19 nt, Artificial Sequence
  Description of Artificial Sequence: Synthetic oligonucleotide
ccggucucuucggcaauca

SEQ ID NO: 1663834 - RNA, 19 nt, Artificial Sequence
  Description of Artificial Sequence: Synthetic oligonucleotide
gccacgcaacguuucuauu

SEQ ID NO: 1663835 - RNA, 19 nt, Artificial Sequence
  Description of Artificial Sequence: Synthetic oligonucleotide
gcgauccagugagccacaa

SEQ ID NO: 1663836 - RNA, 19 nt, Artificial Sequence
  Description of Artificial Sequence: Synthetic oligonucleotide
cgcgcacaaugauuaaaau

SEQ ID NO: 1663837 - RNA, 19 nt, Artificial Sequence
  Description of Artificial Sequence: Synthetic oligonucleotide
ccaguaccguauccaucua

SEQ ID NO: 1663838 - RNA, 19 nt, Artificial Sequence
  Description of Artificial Sequence: Synthetic oligonucleotide
ccucgauggcuaugcggcu

SEQ ID NO: 1663839 - RNA, 19 nt, Artificial Sequence
  Description of Artificial Sequence: Synthetic oligonucleotide
ccucguguucauacagcuu

SEQ ID NO: 1663840 - RNA, 19 nt, Artificial Sequence
  Description of Artificial Sequence: Synthetic oligonucleotide
ccaccacuucuugccauua

SEQ ID NO: 1663841 - RNA, 19 nt, Artificial Sequence
  Description of Artificial Sequence: Synthetic oligonucleotide
cgauggcuaugcggcuuuu

SEQ ID NO: 1663842 - RNA, 19 nt, Artificial Sequence
  Description of Artificial Sequence: Synthetic oligonucleotide
agugugagcaauuaugcgg

SEQ ID NO: 1663843 - RNA, 19 nt, Artificial Sequence
  Description of Artificial Sequence: Synthetic oligonucleotide
aauuaugcggaugacuugg

SEQ ID NO: 1663844 - RNA, 19 nt, Artificial Sequence
  Description of Artificial Sequence: Synthetic oligonucleotide
uuagauuugugccaguucu

SEQ ID NO: 1663845 - RNA, 19 nt, Artificial Sequence
  Description of Artificial Sequence: Synthetic oligonucleotide
gcaaauacugucuugaagg

SEQ ID NO: 1663846 - RNA, 19 nt, Artificial Sequence
  Description of Artificial Sequence: Synthetic oligonucleotide
agaaacgccucuuacacuc

SEQ ID NO: 1663847 - RNA, 19 nt, Artificial Sequence
  Description of Artificial Sequence: Synthetic oligonucleotide
ucuggaaacgaccaugacc

SEQ ID NO: 1663848 - RNA, 19 nt, Artificial Sequence
  Description of Artificial Sequence: Synthetic oligonucleotide
agccuuguagccuagaaag

SEQ ID NO: 1663849 - RNA, 19 nt, Artificial Sequence
  Description of Artificial Sequence: Synthetic oligonucleotide
ugagcaauuaugcggauga

SEQ ID NO: 1663850 - RNA, 19 nt, Artificial Sequence
  Description of Artificial Sequence: Synthetic oligonucleotide
aaggcugugagaugaacag

SEQ ID NO: 1663851 - RNA, 19 nt, Artificial Sequence
  Description of Artificial Sequence: Synthetic oligonucleotide
ugagugugagcaauuaugc

SEQ ID NO: 1663852 - RNA, 19 nt, Artificial Sequence
  Description of Artificial Sequence: Synthetic oligonucleotide
ucaacauaucccacaaugc

SEQ ID NO: 1663853 - RNA, 19 nt, Artificial Sequence
  Description of Artificial Sequence: Synthetic oligonucleotide
uucuuguucaccuuggauc

SEQ ID NO: 1663854 - RNA, 19 nt, Artificial Sequence
  Description of Artificial Sequence: Synthetic oligonucleotide
cuggaaacgaccaugacca

SEQ ID NO: 1663855 - RNA, 19 nt, Artificial Sequence
  Description of Artificial Sequence: Synthetic oligonucleotide
uuuggucuguaccagcaag

SEQ ID NO: 1663856 - RNA, 19 nt, Artificial Sequence
  Description of Artificial Sequence: Synthetic oligonucleotide
acacucgucacugaugugc

SEQ ID NO: 1663857 - RNA, 19 nt, Artificial Sequence
  Description of Artificial Sequence: Synthetic oligonucleotide
uucuuaaucagcuuaccau

SEQ ID NO: 1663858 - RNA, 19 nt, Artificial Sequence
  Description of Artificial Sequence: Synthetic oligonucleotide
uuuccggugagacaucuug

SEQ ID NO: 1663859 - RNA, 19 nt, Artificial Sequence
  Description of Artificial Sequence: Synthetic oligonucleotide
uaugcggaugacuuggcag

SEQ ID NO: 1663860 - RNA, 19 nt, Artificial Sequence
  Description of Artificial Sequence: Synthetic oligonucleotide
cucaccauaauggacaaag

SEQ ID NO: 1663861 - RNA, 19 nt, Artificial Sequence
  Description of Artificial Sequence: Synthetic oligonucleotide
cuagucaccccuuuguagc

SEQ ID NO: 1663862 - RNA, 19 nt, Artificial Sequence
  Description of Artificial Sequence: Synthetic oligonucleotide
agagaauuuccggugagac

SEQ ID NO: 1663863 - RNA, 19 nt, Artificial Sequence
  Description of Artificial Sequence: Synthetic oligonucleotide
guagaaacgccucuuacac

SEQ ID NO: 1663864 - RNA, 19 nt, Artificial Sequence
  Description of Artificial Sequence: Synthetic oligonucleotide
cugagugugagcaauuaug

SEQ ID NO: 1663865 - RNA, 19 nt, Artificial Sequence
  Description of Artificial Sequence: Synthetic oligonucleotide
auacaggcaacuuugcgca

SEQ ID NO: 1663866 - RNA, 19 nt, Artificial Sequence
  Description of Artificial Sequence: Synthetic oligonucleotide
uuugcgcagcccucgaugg

SEQ ID NO: 1663867 - RNA, 19 nt, Artificial Sequence
  Description of Artificial Sequence: Synthetic oligonucleotide
aaugacccaugccucgggg

SEQ ID NO: 1663868 - RNA, 19 nt, Artificial Sequence
  Description of Artificial Sequence: Synthetic oligonucleotide
ugaugagguagccuugacc

SEQ ID NO: 1663869 - RNA, 19 nt, Artificial Sequence
  Description of Artificial Sequence: Synthetic oligonucleotide
aagcccaaugacccaugcc

SEQ ID NO: 1663870 - RNA, 19 nt, Artificial Sequence
  Description of Artificial Sequence: Synthetic oligonucleotide
agcccaaugacccaugccu

SEQ ID NO: 1663871 - RNA, 19 nt, Artificial Sequence
  Description of Artificial Sequence: Synthetic oligonucleotide
uucuuuguaugccaacgac

SEQ ID NO: 1663872 - RNA, 19 nt, Artificial Sequence
  Description of Artificial Sequence: Synthetic oligonucleotide
acuagucaccccuuuguag

SEQ ID NO: 1663873 - RNA, 19 nt, Artificial Sequence
  Description of Artificial Sequence: Synthetic oligonucleotide
ucuucucuagagcccgucg

SEQ ID NO: 1663874 - RNA, 19 nt, Artificial Sequence
  Description of Artificial Sequence: Synthetic oligonucleotide
cacaaugcccacaacuacc

SEQ ID NO: 1663875 - RNA, 19 nt, Artificial Sequence
  Description of Artificial Sequence: Synthetic oligonucleotide
gaaacgaccaugaccaaac

SEQ ID NO: 1663876 - RNA, 19 nt, Artificial Sequence
  Description of Artificial Sequence: Synthetic oligonucleotide
uuguucuuaaucagcuuac

SEQ ID NO: 1663877 - RNA, 19 nt, Artificial Sequence
  Description of Artificial Sequence: Synthetic oligonucleotide
uucuuacaguauuugguga

SEQ ID NO: 1663878 - RNA, 19 nt, Artificial Sequence
  Description of Artificial Sequence: Synthetic oligonucleotide
aggcaagaagcccaaugac

SEQ ID NO: 1663879 - RNA, 19 nt, Artificial Sequence
  Description of Artificial Sequence: Synthetic oligonucleotide
acgaccaugaccaaacuug

SEQ ID NO: 1663880 - RNA, 19 nt, Artificial Sequence
  Description of Artificial Sequence: Synthetic oligonucleotide
gaaggaucguccuugggga

SEQ ID NO: 1663881 - RNA, 19 nt, Artificial Sequence
  Description of Artificial Sequence: Synthetic oligonucleotide
gugaugguagccuuucugc

SEQ ID NO: 1663882 - RNA, 19 nt, Artificial Sequence
  Description of Artificial Sequence: Synthetic oligonucleotide
auagucaguggaugcauug

SEQ ID NO: 1663883 - RNA, 19 nt, Artificial Sequence
  Description of Artificial Sequence: Synthetic oligonucleotide
aagucauuggucaccucac

SEQ ID NO: 1663884 - RNA, 19 nt, Artificial Sequence
  Description of Artificial Sequence: Synthetic oligonucleotide
uuuguaugccaacgacuag

SEQ ID NO: 1663885 - RNA, 19 nt, Artificial Sequence
  Description of Artificial Sequence: Synthetic oligonucleotide
caauacaggcaacuuugcg

SEQ ID NO: 1663886 - RNA, 19 nt, Artificial Sequence
  Description of Artificial Sequence: Synthetic oligonucleotide
uuugagaccccaccagcug

SEQ ID NO: 1663887 - RNA, 19 nt, Artificial Sequence
  Description of Artificial Sequence: Synthetic oligonucleotide
agcacucgcuucuugguuc

SEQ ID NO: 1663888 - RNA, 19 nt, Artificial Sequence
  Description of Artificial Sequence: Synthetic oligonucleotide
uuguagaaacgccucuuac

SEQ ID NO: 1663889 - RNA, 19 nt, Artificial Sequence
  Description of Artificial Sequence: Synthetic oligonucleotide
ucaaucaucucauccuguc

SEQ ID NO: 1663890 - RNA, 19 nt, Artificial Sequence
  Description of Artificial Sequence: Synthetic oligonucleotide
uuaaucagcuuaccauccu

SEQ ID NO: 1663891 - RNA, 19 nt, Artificial Sequence
  Description of Artificial Sequence: Synthetic oligonucleotide
gacaucuugccgucacacg

SEQ ID NO: 1663892 - RNA, 19 nt, Artificial Sequence
  Description of Artificial Sequence: Synthetic oligonucleotide
agacaucuugccgucacac

SEQ ID NO: 1663893 - RNA, 19 nt, Artificial Sequence
  Description of Artificial Sequence: Synthetic oligonucleotide
ucaccauaauggacaaagc

SEQ ID NO: 1663894 - RNA, 19 nt, Artificial Sequence
  Description of Artificial Sequence: Synthetic oligonucleotide
ucaaugaauuucaggucaa

SEQ ID NO: 1663895 - RNA, 19 nt, Artificial Sequence
  Description of Artificial Sequence: Synthetic oligonucleotide
guuaaucuccguucgguga

SEQ ID NO: 1663896 - RNA, 19 nt, Artificial Sequence
  Description of Artificial Sequence: Synthetic oligonucleotide
uccggugagacaucuugcc

SEQ ID NO: 1663897 - RNA, 19 nt, Artificial Sequence
  Description of Artificial Sequence: Synthetic oligonucleotide
augugccuucuucuggcgc

SEQ ID NO: 1663898 - RNA, 19 nt, Artificial Sequence
  Description of Artificial Sequence: Synthetic oligonucleotide
gugagcacucgcuucuugg

SEQ ID NO: 1663899 - RNA, 19 nt, Artificial Sequence
  Description of Artificial Sequence: Synthetic oligonucleotide
augccaacgacuagucacc

SEQ ID NO: 1663900 - RNA, 19 nt, Artificial Sequence
  Description of Artificial Sequence: Synthetic oligonucleotide
aaucuccguucggugaugg

SEQ ID NO: 1663901 - RNA, 19 nt, Artificial Sequence
  Description of Artificial Sequence: Synthetic oligonucleotide
gagaugaacaggcuuggaa

SEQ ID NO: 1663902 - RNA, 19 nt, Artificial Sequence
  Description of Artificial Sequence: Synthetic oligonucleotide
aauuuccggugagacaucu

SEQ ID NO: 1663903 - RNA, 19 nt, Artificial Sequence
  Description of Artificial Sequence: Synthetic oligonucleotide
cuucaccuucccacgaugc

SEQ ID NO: 1663904 - RNA, 19 nt, Artificial Sequence
  Description of Artificial Sequence: Synthetic oligonucleotide
cuccguucggugaugguag

SEQ ID NO: 1663905 - RNA, 19 nt, Artificial Sequence
  Description of Artificial Sequence: Synthetic oligonucleotide
caaucaucucauccugucc

SEQ ID NO: 1663906 - RNA, 19 nt, Artificial Sequence
  Description of Artificial Sequence: Synthetic oligonucleotide
aacgaccaugaccaaacuu

SEQ ID NO: 1663907 - RNA, 19 nt, Artificial Sequence
  Description of Artificial Sequence: Synthetic oligonucleotide
ggaugcauuguucuuaauc

SEQ ID NO: 1663908 - RNA, 19 nt, Artificial Sequence
  Description of Artificial Sequence: Synthetic oligonucleotide
ucaccucaccauaauggac

SEQ ID NO: 1663909 - RNA, 19 nt, Artificial Sequence
  Description of Artificial Sequence: Synthetic oligonucleotide
uguagccuagaaaggcugu

SEQ ID NO: 1663910 - RNA, 19 nt, Artificial Sequence
  Description of Artificial Sequence: Synthetic oligonucleotide
auauuuuauuugagacccc

SEQ ID NO: 1663911 - RNA, 19 nt, Artificial Sequence
  Description of Artificial Sequence: Synthetic oligonucleotide
uuggaaggaucguccuugg

SEQ ID NO: 1663912 - RNA, 19 nt, Artificial Sequence
  Description of Artificial Sequence: Synthetic oligonucleotide
acaggcaacuuugcgcagc

SEQ ID NO: 1663913 - RNA, 19 nt, Artificial Sequence
  Description of Artificial Sequence: Synthetic oligonucleotide
agauuugugccaguucuug

SEQ ID NO: 1663914 - RNA, 19 nt, Artificial Sequence
  Description of Artificial Sequence: Synthetic oligonucleotide
uuccggugagacaucuugc

SEQ ID NO: 1663915 - RNA, 19 nt, Artificial Sequence
  Description of Artificial Sequence: Synthetic oligonucleotide
cccacaacuaccaugggug

SEQ ID NO: 1663916 - RNA, 19 nt, Artificial Sequence
  Description of Artificial Sequence: Synthetic oligonucleotide
caccucaccauaauggaca

SEQ ID NO: 1663917 - RNA, 19 nt, Artificial Sequence
  Description of Artificial Sequence: Synthetic oligonucleotide
ggugcggagaccucguggg

SEQ ID NO: 1663918 - RNA, 19 nt, Artificial Sequence
  Description of Artificial Sequence: Synthetic oligonucleotide
ugucaccccgaugacauca

SEQ ID NO: 1663919 - RNA, 19 nt, Artificial Sequence
  Description of Artificial Sequence: Synthetic oligonucleotide
uccauggucuggaaacgac

SEQ ID NO: 1663920 - RNA, 19 nt, Artificial Sequence
  Description of Artificial Sequence: Synthetic oligonucleotide
augcggaugacuuggcagu

SEQ ID NO: 1663921 - RNA, 19 nt, Artificial Sequence
  Description of Artificial Sequence: Synthetic oligonucleotide
acaacuaccauggguggug

SEQ ID NO: 1663922 - RNA, 19 nt, Artificial Sequence
  Description of Artificial Sequence: Synthetic oligonucleotide
uggucuggaaacgaccaug

SEQ ID NO: 1663923 - RNA, 19 nt, Artificial Sequence
  Description of Artificial Sequence: Synthetic oligonucleotide
gucaugccagccuuguagc

SEQ ID NO: 1663924 - RNA, 19 nt, Artificial Sequence
  Description of Artificial Sequence: Synthetic oligonucleotide
uuuugucaccccgaugaca

SEQ ID NO: 1663925 - RNA, 19 nt, Artificial Sequence
  Description of Artificial Sequence: Synthetic oligonucleotide
ggcaaugcggucuuucuug

SEQ ID NO: 1663926 - RNA, 19 nt, Artificial Sequence
  Description of Artificial Sequence: Synthetic oligonucleotide
agcaauuaugcggaugacu

SEQ ID NO: 1663927 - RNA, 19 nt, Artificial Sequence
  Description of Artificial Sequence: Synthetic oligonucleotide
aagccacacgggcagggug

SEQ ID NO: 1663928 - RNA, 19 nt, Artificial Sequence
  Description of Artificial Sequence: Synthetic oligonucleotide
ugacaaagucauuggucac

SEQ ID NO: 1663929 - RNA, 19 nt, Artificial Sequence
  Description of Artificial Sequence: Synthetic oligonucleotide
caaacaccugguucacagg

SEQ ID NO: 1663930 - RNA, 19 nt, Artificial Sequence
  Description of Artificial Sequence: Synthetic oligonucleotide
ggugguguuuccacaaugg

SEQ ID NO: 1663931 - RNA, 19 nt, Artificial Sequence
  Description of Artificial Sequence: Synthetic oligonucleotide
aaacgccucuuacacucgu

SEQ ID NO: 1663932 - RNA, 19 nt, Artificial Sequence
  Description of Artificial Sequence: Synthetic oligonucleotide
aucuugccgucacacgccg

SEQ ID NO: 1663933 - RNA, 19 nt, Artificial Sequence
  Description of Artificial Sequence: Synthetic oligonucleotide
aaacgaccaugaccaaacu

SEQ ID NO: 1663934 - RNA, 19 nt, Artificial Sequence
  Description of Artificial Sequence: Synthetic oligonucleotide
aucagcuuaccauccuuga

SEQ ID NO: 1663935 - RNA, 19 nt, Artificial Sequence
  Description of Artificial Sequence: Synthetic oligonucleotide
gggguuucaacauauccca

SEQ ID NO: 1663936 - RNA, 19 nt, Artificial Sequence
  Description of Artificial Sequence: Synthetic oligonucleotide
ucuguaccagcaaggacuu

SEQ ID NO: 1663937 - RNA, 19 nt, Artificial Sequence
  Description of Artificial Sequence: Synthetic oligonucleotide
ucagcuuaccauccuugau

SEQ ID NO: 1663938 - RNA, 19 nt, Artificial Sequence
  Description of Artificial Sequence: Synthetic oligonucleotide
uccaaccucucucgggccc

SEQ ID NO: 1663939 - RNA, 19 nt, Artificial Sequence
  Description of Artificial Sequence: Synthetic oligonucleotide
auuaugcggaugacuuggc

SEQ ID NO: 1663940 - RNA, 19 nt, Artificial Sequence
  Description of Artificial Sequence: Synthetic oligonucleotide
ugagcacucgcuucuuggu

SEQ ID NO: 1663941 - RNA, 19 nt, Artificial Sequence
  Description of Artificial Sequence: Synthetic oligonucleotide
gaagcccaaugacccaugc

SEQ ID NO: 1663942 - RNA, 19 nt, Artificial Sequence
  Description of Artificial Sequence: Synthetic oligonucleotide
gucuguaccagcaaggacu

SEQ ID NO: 1663943 - RNA, 19 nt, Artificial Sequence
  Description of Artificial Sequence: Synthetic oligonucleotide
uugucagacaggucauagu

SEQ ID NO: 1663944 - RNA, 19 nt, Artificial Sequence
  Description of Artificial Sequence: Synthetic oligonucleotide
uagucaccccuuuguagcc

SEQ ID NO: 1663945 - RNA, 19 nt, Artificial Sequence
  Description of Artificial Sequence: Synthetic oligonucleotide
uugccuuuugucaccccga

SEQ ID NO: 1663946 - RNA, 19 nt, Artificial Sequence
  Description of Artificial Sequence: Synthetic oligonucleotide
cucgaugggucuugcgggg

SEQ ID NO: 1663947 - RNA, 19 nt, Artificial Sequence
  Description of Artificial Sequence: Synthetic oligonucleotide
uagaaacgccucuuacacu

SEQ ID NO: 1663948 - RNA, 19 nt, Artificial Sequence
  Description of Artificial Sequence: Synthetic oligonucleotide
cacaaugguuacagccucc

SEQ ID NO: 1663949 - RNA, 19 nt, Artificial Sequence
  Description of Artificial Sequence: Synthetic oligonucleotide
ucccaugaaugcuuucuuc

SEQ ID NO: 1663950 - RNA, 19 nt, Artificial Sequence
  Description of Artificial Sequence: Synthetic oligonucleotide
cacgaugccggcugcugcg

SEQ ID NO: 1663951 - RNA, 19 nt, Artificial Sequence
  Description of Artificial Sequence: Synthetic oligonucleotide
ucgugggguuucaacauau

SEQ ID NO: 1663952 - RNA, 19 nt, Artificial Sequence
  Description of Artificial Sequence: Synthetic oligonucleotide
ucguuuggucuguaccagc

SEQ ID NO: 1663953 - RNA, 19 nt, Artificial Sequence
  Description of Artificial Sequence: Synthetic oligonucleotide
ucccggacgauguggguca

SEQ ID NO: 1663954 - RNA, 19 nt, Artificial Sequence
  Description of Artificial Sequence: Synthetic oligonucleotide
cacacagccuuugagcaug

SEQ ID NO: 1663955 - RNA, 19 nt, Artificial Sequence
  Description of Artificial Sequence: Synthetic oligonucleotide
gugugagcaauuaugcgga

SEQ ID NO: 1663956 - RNA, 19 nt, Artificial Sequence
  Description of Artificial Sequence: Synthetic oligonucleotide
acgccucuuacacucguca

SEQ ID NO: 1663957 - RNA, 19 nt, Artificial Sequence
  Description of Artificial Sequence: Synthetic oligonucleotide
aggugauucuggucuuaag

SEQ ID NO: 1663958 - RNA, 19 nt, Artificial Sequence
  Description of Artificial Sequence: Synthetic oligonucleotide
gaaacgccucuuacacucg

SEQ ID NO: 1663959 - RNA, 19 nt, Artificial Sequence
  Description of Artificial Sequence: Synthetic oligonucleotide
acgacuagucaccccuuug

SEQ ID NO: 1663960 - RNA, 19 nt, Artificial Sequence
  Description of Artificial Sequence: Synthetic oligonucleotide
uuguucaccuuggauccug

SEQ ID NO: 1663961 - RNA, 19 nt, Artificial Sequence
  Description of Artificial Sequence: Synthetic oligonucleotide
caugccucggggcagagaa

SEQ ID NO: 1663962 - RNA, 19 nt, Artificial Sequence
  Description of Artificial Sequence: Synthetic oligonucleotide
gucaacuucccggacgaug

SEQ ID NO: 1663963 - RNA, 19 nt, Artificial Sequence
  Description of Artificial Sequence: Synthetic oligonucleotide
accucucucgggcccaguc

SEQ ID NO: 1663964 - RNA, 19 nt, Artificial Sequence
  Description of Artificial Sequence: Synthetic oligonucleotide
aacgacuagucaccccuuu

SEQ ID NO: 1663965 - RNA, 19 nt, Artificial Sequence
  Description of Artificial Sequence: Synthetic oligonucleotide
acaaugguuacagccucca

SEQ ID NO: 1663966 - RNA, 19 nt, Artificial Sequence
  Description of Artificial Sequence: Synthetic oligonucleotide
gagcccgucguuuggucug

SEQ ID NO: 1663967 - RNA, 19 nt, Artificial Sequence
  Description of Artificial Sequence: Synthetic oligonucleotide
caacuuugcgcagcccucg

SEQ ID NO: 1663968 - RNA, 19 nt, Artificial Sequence
  Description of Artificial Sequence: Synthetic oligonucleotide
caugaccaaacuuggaggu

SEQ ID NO: 1663969 - RNA, 19 nt, Artificial Sequence
  Description of Artificial Sequence: Synthetic oligonucleotide
caaugacccaugccucggg

SEQ ID NO: 1663970 - RNA, 19 nt, Artificial Sequence
  Description of Artificial Sequence: Synthetic oligonucleotide
uugcgcagcccucgauggg

SEQ ID NO: 1663971 - RNA, 19 nt, Artificial Sequence
  Description of Artificial Sequence: Synthetic oligonucleotide
aaggaucguccuuggggaa

SEQ ID NO: 1663972 - RNA, 19 nt, Artificial Sequence
  Description of Artificial Sequence: Synthetic oligonucleotide
cuuuugucaccccgaugac

SEQ ID NO: 1663973 - RNA, 19 nt, Artificial Sequence
  Description of Artificial Sequence: Synthetic oligonucleotide
gacuugcggagagugagca

SEQ ID NO: 1663974 - RNA, 19 nt, Artificial Sequence
  Description of Artificial Sequence: Synthetic oligonucleotide
cccgaugacaucaaucauc

SEQ ID NO: 1663975 - RNA, 19 nt, Artificial Sequence
  Description of Artificial Sequence: Synthetic oligonucleotide
agagcccgucguuuggucu

SEQ ID NO: 1663976 - RNA, 19 nt, Artificial Sequence
  Description of Artificial Sequence: Synthetic oligonucleotide
aaggugauucuggucuuaa

SEQ ID NO: 1663977 - RNA, 19 nt, Artificial Sequence
  Description of Artificial Sequence: Synthetic oligonucleotide
gucguuuggucuguaccag

SEQ ID NO: 1663978 - RNA, 19 nt, Artificial Sequence
  Description of Artificial Sequence: Synthetic oligonucleotide
ccucgaugggucuugcggg

SEQ ID NO: 1663979 - RNA, 19 nt, Artificial Sequence
  Description of Artificial Sequence: Synthetic oligonucleotide
aaggugcggagaccucgug

SEQ ID NO: 1663980 - RNA, 19 nt, Artificial Sequence
  Description of Artificial Sequence: Synthetic oligonucleotide
cacgccgcagauagaggcc

SEQ ID NO: 1663981 - RNA, 19 nt, Artificial Sequence
  Description of Artificial Sequence: Synthetic oligonucleotide
gcgcaaaggaagcagccgc

SEQ ID NO: 1663982 - RNA, 19 nt, Artificial Sequence
  Description of Artificial Sequence: Synthetic oligonucleotide
cucgcuucuugguucccac

SEQ ID NO: 1663983 - RNA, 19 nt, Artificial Sequence
  Description of Artificial Sequence: Synthetic oligonucleotide
auacugucuugaaggugcg

SEQ ID NO: 1663984 - RNA, 19 nt, Artificial Sequence
  Description of Artificial Sequence: Synthetic oligonucleotide
acgccgcagauagaggccg

SEQ ID NO: 1663985 - RNA, 19 nt, Artificial Sequence
  Description of Artificial Sequence: Synthetic oligonucleotide
ugcggggcaguuucuuugu

SEQ ID NO: 1663986 - RNA, 19 nt, Artificial Sequence
  Description of Artificial Sequence: Synthetic oligonucleotide
ccauggucuggaaacgacc

SEQ ID NO: 1663987 - RNA, 19 nt, Artificial Sequence
  Description of Artificial Sequence: Synthetic oligonucleotide
acuaccaugggugguguuu

SEQ ID NO: 1663988 - RNA, 19 nt, Artificial Sequence
  Description of Artificial Sequence: Synthetic oligonucleotide
ugaaggccuucuucuuaga

SEQ ID NO: 1663989 - RNA, 19 nt, Artificial Sequence
  Description of Artificial Sequence: Synthetic oligonucleotide
aggaucguccuuggggaag

SEQ ID NO: 1663990 - RNA, 19 nt, Artificial Sequence
  Description of Artificial Sequence: Synthetic oligonucleotide
augaccaaacuuggaggug

SEQ ID NO: 1663991 - RNA, 19 nt, Artificial Sequence
  Description of Artificial Sequence: Synthetic oligonucleotide
uggcaaugcggucuuucuu

SEQ ID NO: 1663992 - RNA, 19 nt, Artificial Sequence
  Description of Artificial Sequence: Synthetic oligonucleotide
gccuugaccaaucuuguaa

SEQ ID NO: 1663993 - RNA, 19 nt, Artificial Sequence
  Description of Artificial Sequence: Synthetic oligonucleotide
gugagcaauuaugcggaug

SEQ ID NO: 1663994 - RNA, 19 nt, Artificial Sequence
  Description of Artificial Sequence: Synthetic oligonucleotide
cuugccgucacacgccgca

SEQ ID NO: 1663995 - RNA, 19 nt, Artificial Sequence
  Description of Artificial Sequence: Synthetic oligonucleotide
cgucacacgccgcagauag

SEQ ID NO: 1663996 - RNA, 19 nt, Artificial Sequence
  Description of Artificial Sequence: Synthetic oligonucleotide
caaugcggucuuucuugag

SEQ ID NO: 1663997 - RNA, 19 nt, Artificial Sequence
  Description of Artificial Sequence: Synthetic oligonucleotide
gucaguggaugcauuguuc

SEQ ID NO: 1663998 - RNA, 19 nt, Artificial Sequence
  Description of Artificial Sequence: Synthetic oligonucleotide
gacuagucaccccuuugua

SEQ ID NO: 1663999 - RNA, 19 nt, Artificial Sequence
  Description of Artificial Sequence: Synthetic oligonucleotide
ugcggagaccucguggggu

SEQ ID NO: 1664000 - RNA, 19 nt, Artificial Sequence
  Description of Artificial Sequence: Synthetic oligonucleotide
uaccaugggugguguuucc

SEQ ID NO: 1664001 - RNA, 19 nt, Artificial Sequence
  Description of Artificial Sequence: Synthetic oligonucleotide
gcagagaauuuccggugag

SEQ ID NO: 1664002 - RNA, 19 nt, Artificial Sequence
  Description of Artificial Sequence: Synthetic oligonucleotide
gucagacaggucauaguca

SEQ ID NO: 1664003 - RNA, 19 nt, Artificial Sequence
  Description of Artificial Sequence: Synthetic oligonucleotide
ucucgggcccagucuagcu

SEQ ID NO: 1664004 - RNA, 19 nt, Artificial Sequence
  Description of Artificial Sequence: Synthetic oligonucleotide
cuaccaugggugguguuuc

SEQ ID NO: 1664005 - RNA, 19 nt, Artificial Sequence
  Description of Artificial Sequence: Synthetic oligonucleotide
uucccggacgauguggguc

SEQ ID NO: 1664006 - RNA, 19 nt, Artificial Sequence
  Description of Artificial Sequence: Synthetic oligonucleotide
ccaauacaggcaacuuugc

SEQ ID NO: 1664007 - RNA, 19 nt, Artificial Sequence
  Description of Artificial Sequence: Synthetic oligonucleotide
accucaccauaauggacaa

SEQ ID NO: 1664008 - RNA, 19 nt, Artificial Sequence
  Description of Artificial Sequence: Synthetic oligonucleotide
ugcgcuuccgaggcaagaa

SEQ ID NO: 1664009 - RNA, 19 nt, Artificial Sequence
  Description of Artificial Sequence: Synthetic oligonucleotide
auggacaaagccacccagu

SEQ ID NO: 1664010 - RNA, 19 nt, Artificial Sequence
  Description of Artificial Sequence: Synthetic oligonucleotide
uucggugaugguagccuuu

SEQ ID NO: 1664011 - RNA, 19 nt, Artificial Sequence
  Description of Artificial Sequence: Synthetic oligonucleotide
aaggacuugcggagaguga

SEQ ID NO: 1664012 - RNA, 19 nt, Artificial Sequence
  Description of Artificial Sequence: Synthetic oligonucleotide
uugcggagagugagcacuc

SEQ ID NO: 1664013 - RNA, 19 nt, Artificial Sequence
  Description of Artificial Sequence: Synthetic oligonucleotide
cuugaaggugcggagaccu

SEQ ID NO: 1664014 - RNA, 19 nt, Artificial Sequence
  Description of Artificial Sequence: Synthetic oligonucleotide
ucggugaugguagccuuuc

SEQ ID NO: 1664015 - RNA, 19 nt, Artificial Sequence
  Description of Artificial Sequence: Synthetic oligonucleotide
caaugguuacagccuccac

SEQ ID NO: 1664016 - RNA, 19 nt, Artificial Sequence
  Description of Artificial Sequence: Synthetic oligonucleotide
ugugagcaauuaugcggau

SEQ ID NO: 1664017 - RNA, 19 nt, Artificial Sequence
  Description of Artificial Sequence: Synthetic oligonucleotide
ugccaacgacuagucaccc

SEQ ID NO: 1664018 - RNA, 19 nt, Artificial Sequence
  Description of Artificial Sequence: Synthetic oligonucleotide
ugccgucacacgccgcaga

SEQ ID NO: 1664019 - RNA, 19 nt, Artificial Sequence
  Description of Artificial Sequence: Synthetic oligonucleotide
ggugccaggcuccaauaca

SEQ ID NO: 1664020 - RNA, 19 nt, Artificial Sequence
  Description of Artificial Sequence: Synthetic oligonucleotide
ggcgcaaaggaagcagccg

SEQ ID NO: 1664021 - RNA, 19 nt, Artificial Sequence
  Description of Artificial Sequence: Synthetic oligonucleotide
ccacaacuaccaugggugg

SEQ ID NO: 1664022 - RNA, 19 nt, Artificial Sequence
  Description of Artificial Sequence: Synthetic oligonucleotide
cuugcggagagugagcacu

SEQ ID NO: 1664023 - RNA, 19 nt, Artificial Sequence
  Description of Artificial Sequence: Synthetic oligonucleotide
cgaccaugaccaaacuugg

SEQ ID NO: 1664024 - RNA, 19 nt, Artificial Sequence
  Description of Artificial Sequence: Synthetic oligonucleotide
ugggugguguuuccacaau

SEQ ID NO: 1664025 - RNA, 19 nt, Artificial Sequence
  Description of Artificial Sequence: Synthetic oligonucleotide
ugccucggggcagagaauu

SEQ ID NO: 1664026 - RNA, 19 nt, Artificial Sequence
  Description of Artificial Sequence: Synthetic oligonucleotide
auggucuggaaacgaccau

SEQ ID NO: 1664027 - RNA, 19 nt, Artificial Sequence
  Description of Artificial Sequence: Synthetic oligonucleotide
ggugagacaucuugccguc

SEQ ID NO: 1664028 - RNA, 19 nt, Artificial Sequence
  Description of Artificial Sequence: Synthetic oligonucleotide
ccgucguuuggucuguacc

SEQ ID NO: 1664029 - RNA, 19 nt, Artificial Sequence
  Description of Artificial Sequence: Synthetic oligonucleotide
gagguagccuugaccaauc

SEQ ID NO: 1664030 - RNA, 19 nt, Artificial Sequence
  Description of Artificial Sequence: Synthetic oligonucleotide
ggcagagaauuuccgguga

SEQ ID NO: 1664031 - RNA, 19 nt, Artificial Sequence
  Description of Artificial Sequence: Synthetic oligonucleotide
ggucuguaccagcaaggac

SEQ ID NO: 1664032 - RNA, 19 nt, Artificial Sequence
  Description of Artificial Sequence: Synthetic oligonucleotide
cauuggucaccucaccaua

SEQ ID NO: 1664033 - RNA, 19 nt, Artificial Sequence
  Description of Artificial Sequence: Synthetic oligonucleotide
uagagcccgucguuugguc

SEQ ID NO: 1664034 - RNA, 19 nt, Artificial Sequence
  Description of Artificial Sequence: Synthetic oligonucleotide
gucuggaaacgaccaugac

SEQ ID NO: 1664035 - RNA, 19 nt, Artificial Sequence
  Description of Artificial Sequence: Synthetic oligonucleotide
gugcggagaccucgugggg

SEQ ID NO: 1664036 - RNA, 19 nt, Artificial Sequence
  Description of Artificial Sequence: Synthetic oligonucleotide
gcuuccgaggcaagaagcc

SEQ ID NO: 1664037 - RNA, 19 nt, Artificial Sequence
  Description of Artificial Sequence: Synthetic oligonucleotide
ucgaugggucuugcggggc

SEQ ID NO: 1664038 - RNA, 19 nt, Artificial Sequence
  Description of Artificial Sequence: Synthetic oligonucleotide
aucugagugugagcaauua

SEQ ID NO: 1664039 - RNA, 19 nt, Artificial Sequence
  Description of Artificial Sequence: Synthetic oligonucleotide
ccggugagacaucuugccg

SEQ ID NO: 1664040 - RNA, 19 nt, Artificial Sequence
  Description of Artificial Sequence: Synthetic oligonucleotide
ccccuuuguagccuuugcc

SEQ ID NO: 1664041 - RNA, 19 nt, Artificial Sequence
  Description of Artificial Sequence: Synthetic oligonucleotide
cagccuuguagccuagaaa

SEQ ID NO: 1664042 - RNA, 19 nt, Artificial Sequence
  Description of Artificial Sequence: Synthetic oligonucleotide
uggaaacgaccaugaccaa

SEQ ID NO: 1664043 - RNA, 19 nt, Artificial Sequence
  Description of Artificial Sequence: Synthetic oligonucleotide
gacccaugccucggggcag

SEQ ID NO: 1664044 - RNA, 19 nt, Artificial Sequence
  Description of Artificial Sequence: Synthetic oligonucleotide
ucaccccgaugacaucaau

SEQ ID NO: 1664045 - RNA, 19 nt, Artificial Sequence
  Description of Artificial Sequence: Synthetic oligonucleotide
ugguagccuuucugcccag

SEQ ID NO: 1664046 - RNA, 19 nt, Artificial Sequence
  Description of Artificial Sequence: Synthetic oligonucleotide
cuucucuagagcccgucgu

SEQ ID NO: 1664047 - RNA, 19 nt, Artificial Sequence
  Description of Artificial Sequence: Synthetic oligonucleotide
ccuugaccaaucuuguaaa

SEQ ID NO: 1664048 - RNA, 19 nt, Artificial Sequence
  Description of Artificial Sequence: Synthetic oligonucleotide
cgcuuccgaggcaagaagc

SEQ ID NO: 1664049 - RNA, 19 nt, Artificial Sequence
  Description of Artificial Sequence: Synthetic oligonucleotide
acucgcuucuugguuccca

SEQ ID NO: 1664050 - RNA, 19 nt, Artificial Sequence
  Description of Artificial Sequence: Synthetic oligonucleotide
ggaucguccuuggggaagc

SEQ ID NO: 1664051 - RNA, 19 nt, Artificial Sequence
  Description of Artificial Sequence: Synthetic oligonucleotide
ccaugggugguguuuccac

SEQ ID NO: 1664052 - RNA, 19 nt, Artificial Sequence
  Description of Artificial Sequence: Synthetic oligonucleotide
cagagaauuuccggugaga

SEQ ID NO: 1664053 - RNA, 19 nt, Artificial Sequence
  Description of Artificial Sequence: Synthetic oligonucleotide
agccuugaccaaucuugua

SEQ ID NO: 1664054 - RNA, 19 nt, Artificial Sequence
  Description of Artificial Sequence: Synthetic oligonucleotide
agucaccccuuuguagccu

SEQ ID NO: 1664055 - RNA, 19 nt, Artificial Sequence
  Description of Artificial Sequence: Synthetic oligonucleotide
caacuucccggacgaugug

SEQ ID NO: 1664056 - RNA, 19 nt, Artificial Sequence
  Description of Artificial Sequence: Synthetic oligonucleotide
cgaggcaagaagcccaaug

SEQ ID NO: 1664057 - RNA, 19 nt, Artificial Sequence
  Description of Artificial Sequence: Synthetic oligonucleotide
aucuccguucggugauggu

SEQ ID NO: 1664058 - RNA, 19 nt, Artificial Sequence
  Description of Artificial Sequence: Synthetic oligonucleotide
cucucgggcccagucuagc

SEQ ID NO: 1664059 - RNA, 19 nt, Artificial Sequence
  Description of Artificial Sequence: Synthetic oligonucleotide
ccaaugacccaugccucgg

SEQ ID NO: 1664060 - RNA, 19 nt, Artificial Sequence
  Description of Artificial Sequence: Synthetic oligonucleotide
ggaaacgaccaugaccaaa

SEQ ID NO: 1664061 - RNA, 19 nt, Artificial Sequence
  Description of Artificial Sequence: Synthetic oligonucleotide
gcggagagugagcacucgc

SEQ ID NO: 1664062 - RNA, 19 nt, Artificial Sequence
  Description of Artificial Sequence: Synthetic oligonucleotide
cuugaccaaucuuguaaau

SEQ ID NO: 1664063 - RNA, 19 nt, Artificial Sequence
  Description of Artificial Sequence: Synthetic oligonucleotide
gcugcacaaggugauucug

SEQ ID NO: 1664064 - RNA, 19 nt, Artificial Sequence
  Description of Artificial Sequence: Synthetic oligonucleotide
ggcaguacuucuucaugcu

SEQ ID NO: 1664065 - RNA, 19 nt, Artificial Sequence
  Description of Artificial Sequence: Synthetic oligonucleotide
ccaacgacuagucaccccu

SEQ ID NO: 1664066 - RNA, 19 nt, Artificial Sequence
  Description of Artificial Sequence: Synthetic oligonucleotide
cccaugaaugcuuucuucu

SEQ ID NO: 1664067 - RNA, 19 nt, Artificial Sequence
  Description of Artificial Sequence: Synthetic oligonucleotide
gccaacgacuagucacccc

SEQ ID NO: 1664068 - RNA, 19 nt, Artificial Sequence
  Description of Artificial Sequence: Synthetic oligonucleotide
gggugccaggcuccaauac

SEQ ID NO: 1664069 - RNA, 19 nt, Artificial Sequence
  Description of Artificial Sequence: Synthetic oligonucleotide
caccccuuuguagccuuug

SEQ ID NO: 1664070 - RNA, 19 nt, Artificial Sequence
  Description of Artificial Sequence: Synthetic oligonucleotide
cgucguuuggucuguacca

SEQ ID NO: 1664071 - RNA, 19 nt, Artificial Sequence
  Description of Artificial Sequence: Synthetic oligonucleotide
gccgcaucugagugugagc

SEQ ID NO: 1664072 - RNA, 19 nt, Artificial Sequence
  Description of Artificial Sequence: Synthetic oligonucleotide
ggacuugcggagagugagc

SEQ ID NO: 1664073 - RNA, 19 nt, Artificial Sequence
  Description of Artificial Sequence: Synthetic oligonucleotide
cguuuggucuguaccagca

SEQ ID NO: 1664074 - RNA, 19 nt, Artificial Sequence
  Description of Artificial Sequence: Synthetic oligonucleotide
cucgugggguuucaacaua

SEQ ID NO: 1664075 - RNA, 19 nt, Artificial Sequence
  Description of Artificial Sequence: Synthetic oligonucleotide
ggguuucaacauaucccac

SEQ ID NO: 1664076 - RNA, 19 nt, Artificial Sequence
  Description of Artificial Sequence: Synthetic oligonucleotide
gaaggugcggagaccucgu

SEQ ID NO: 1664077 - RNA, 19 nt, Artificial Sequence
  Description of Artificial Sequence: Synthetic oligonucleotide
gugggucaugccagccuug

SEQ ID NO: 1664078 - RNA, 19 nt, Artificial Sequence
  Description of Artificial Sequence: Synthetic oligonucleotide
gccucuuacacucgucacu

SEQ ID NO: 1664079 - RNA, 19 nt, Artificial Sequence
  Description of Artificial Sequence: Synthetic oligonucleotide
gagaccucgugggguuuca

SEQ ID NO: 1664080 - RNA, 19 nt, Artificial Sequence
  Description of Artificial Sequence: Synthetic oligonucleotide
ugucaacuucccggacgau

SEQ ID NO: 1664081 - RNA, 19 nt, Artificial Sequence
  Description of Artificial Sequence: Synthetic oligonucleotide
ggauccuggccugucaacu

SEQ ID NO: 1664082 - RNA, 19 nt, Artificial Sequence
  Description of Artificial Sequence: Synthetic oligonucleotide
guucggugaugguagccuu

SEQ ID NO: 1664083 - RNA, 19 nt, Artificial Sequence
  Description of Artificial Sequence: Synthetic oligonucleotide
gcccacaacuaccaugggu

SEQ ID NO: 1664084 - RNA, 19 nt, Artificial Sequence
  Description of Artificial Sequence: Synthetic oligonucleotide
gaccaaacuuggagguggu

SEQ ID NO: 1664085 - RNA, 19 nt, Artificial Sequence
  Description of Artificial Sequence: Synthetic oligonucleotide
gcccucgaugggucuugcg

SEQ ID NO: 1664086 - RNA, 19 nt, Artificial Sequence
  Description of Artificial Sequence: Synthetic oligonucleotide
accuuggauccuggccugu

SEQ ID NO: 1664087 - RNA, 19 nt, Artificial Sequence
  Description of Artificial Sequence: Synthetic oligonucleotide
auuuccggugagacaucuu

SEQ ID NO: 1664088 - RNA, 19 nt, Artificial Sequence
  Description of Artificial Sequence: Synthetic oligonucleotide
cuagcuucucagccacggu

SEQ ID NO: 1664089 - RNA, 19 nt, Artificial Sequence
  Description of Artificial Sequence: Synthetic oligonucleotide
cacaacuaccauggguggu

SEQ ID NO: 1664090 - RNA, 19 nt, Artificial Sequence
  Description of Artificial Sequence: Synthetic oligonucleotide
cuguaccagcaaggacuug

SEQ ID NO: 1664091 - RNA, 19 nt, Artificial Sequence
  Description of Artificial Sequence: Synthetic oligonucleotide
gcaucugagugugagcaau

SEQ ID NO: 1664092 - RNA, 19 nt, Artificial Sequence
  Description of Artificial Sequence: Synthetic oligonucleotide
agcccgucguuuggucugu

SEQ ID NO: 1664093 - RNA, 19 nt, Artificial Sequence
  Description of Artificial Sequence: Synthetic oligonucleotide
cuagagcccgucguuuggu

SEQ ID NO: 1664094 - RNA, 19 nt, Artificial Sequence
  Description of Artificial Sequence: Synthetic oligonucleotide
cccgucguuuggucuguac

SEQ ID NO: 1664095 - RNA, 19 nt, Artificial Sequence
  Description of Artificial Sequence: Synthetic oligonucleotide
cgccucuuacacucgucac

SEQ ID NO: 1664096 - RNA, 19 nt, Artificial Sequence
  Description of Artificial Sequence: Synthetic oligonucleotide
gucaccccgaugacaucaa

SEQ ID NO: 1664097 - RNA, 19 nt, Artificial Sequence
  Description of Artificial Sequence: Synthetic oligonucleotide
gccugucaacuucccggac

SEQ ID NO: 1664098 - RNA, 19 nt, Artificial Sequence
  Description of Artificial Sequence: Synthetic oligonucleotide
ggagaccucgugggguuuc

SEQ ID NO: 1664099 - RNA, 19 nt, Artificial Sequence
  Description of Artificial Sequence: Synthetic oligonucleotide
ccgcagauagaggccggcc

SEQ ID NO: 1664100 - RNA, 19 nt, Artificial Sequence
  Description of Artificial Sequence: Synthetic oligonucleotide
gucaccccuuuguagccuu

SEQ ID NO: 1664101 - RNA, 19 nt, Artificial Sequence
  Description of Artificial Sequence: Synthetic oligonucleotide
cgcaaaggaagcagccgca

SEQ ID NO: 1664102 - RNA, 19 nt, Artificial Sequence
  Description of Artificial Sequence: Synthetic oligonucleotide
agaccucgugggguuucaa

SEQ ID NO: 1664103 - RNA, 19 nt, Artificial Sequence
  Description of Artificial Sequence: Synthetic oligonucleotide
gccgcagauagaggccggc

SEQ ID NO: 1664104 - RNA, 19 nt, Artificial Sequence
  Description of Artificial Sequence: Synthetic oligonucleotide
cggugagacaucuugccgu

SEQ ID NO: 1664105 - RNA, 19 nt, Artificial Sequence
  Description of Artificial Sequence: Synthetic oligonucleotide
gucacacgccgcagauaga

SEQ ID NO: 1664106 - RNA, 19 nt, Artificial Sequence
  Description of Artificial Sequence: Synthetic oligonucleotide
caacuaccauggguggugu

SEQ ID NO: 1664107 - RNA, 19 nt, Artificial Sequence
  Description of Artificial Sequence: Synthetic oligonucleotide
gccacacgggcagggugcc

SEQ ID NO: 1664108 - RNA, 19 nt, Artificial Sequence
  Description of Artificial Sequence: Synthetic oligonucleotide
caaugcccacaacuaccau

SEQ ID NO: 1664109 - RNA, 19 nt, Artificial Sequence
  Description of Artificial Sequence: Synthetic oligonucleotide
cucgggcccagucuagcuu

SEQ ID NO: 1664110 - RNA, 19 nt, Artificial Sequence
  Description of Artificial Sequence: Synthetic oligonucleotide
cgacuagucaccccuuugu

SEQ ID NO: 1664111 - RNA, 19 nt, Artificial Sequence
  Description of Artificial Sequence: Synthetic oligonucleotide
caacgacuagucaccccuu

SEQ ID NO: 1664112 - RNA, 19 nt, Artificial Sequence
  Description of Artificial Sequence: Synthetic oligonucleotide
augccucggggcagagaau

SEQ ID NO: 1664113 - RNA, 19 nt, Artificial Sequence
  Description of Artificial Sequence: Synthetic oligonucleotide
ccucgugggguuucaacau

SEQ ID NO: 1664114 - RNA, 19 nt, Artificial Sequence
  Description of Artificial Sequence: Synthetic oligonucleotide
gcaaaggaagcagccgcau

SEQ ID NO: 1664115 - RNA, 19 nt, Artificial Sequence
  Description of Artificial Sequence: Synthetic oligonucleotide
gccgucacacgccgcagau

SEQ ID NO: 1664116 - RNA, 19 nt, Artificial Sequence
  Description of Artificial Sequence: Synthetic oligonucleotide
cagccgcaucugaguguga

SEQ ID NO: 1664117 - RNA, 19 nt, Artificial Sequence
  Description of Artificial Sequence: Synthetic oligonucleotide
ccaaccucucucgggccca

SEQ ID NO: 1664118 - RNA, 19 nt, Artificial Sequence
  Description of Artificial Sequence: Synthetic oligonucleotide
cgaugggucuugcggggca

SEQ ID NO: 1664119 - RNA, 19 nt, Artificial Sequence
  Description of Artificial Sequence: Synthetic oligonucleotide
cguucggugaugguagccu

SEQ ID NO: 1664120 - RNA, 19 nt, Artificial Sequence
  Description of Artificial Sequence: Synthetic oligonucleotide
gcggagaccucgugggguu

SEQ ID NO: 1664121 - RNA, 19 nt, Artificial Sequence
  Description of Artificial Sequence: Synthetic oligonucleotide
agccacccaguggguugau

SEQ ID NO: 1664122 - RNA, 19 nt, Artificial Sequence
  Description of Artificial Sequence: Synthetic oligonucleotide
cgcaucugagugugagcaa

SEQ ID NO: 1664123 - RNA, 19 nt, Artificial Sequence
  Description of Artificial Sequence: Synthetic oligonucleotide
gcggccgagcagccuauau

SEQ ID NO: 1664124 - RNA, 19 nt, Artificial Sequence
  Description of Artificial Sequence: Synthetic oligonucleotide
ccggacgaugugggucaug

SEQ ID NO: 1664125 - RNA, 19 nt, Artificial Sequence
  Description of Artificial Sequence: Synthetic oligonucleotide
ccccgaugacaucaaucau

SEQ ID NO: 1664126 - RNA, 19 nt, Artificial Sequence
  Description of Artificial Sequence: Synthetic oligonucleotide
gggucuugcggggcaguuu

SEQ ID NO: 1664127 - RNA, 19 nt, Artificial Sequence
  Description of Artificial Sequence: Synthetic oligonucleotide
ccaugccucggggcagaga

SEQ ID NO: 1664128 - RNA, 19 nt, Artificial Sequence
  Description of Artificial Sequence: Synthetic oligonucleotide
ccuucccacgaugccggcu

SEQ ID NO: 1664129 - RNA, 19 nt, Artificial Sequence
  Description of Artificial Sequence: Synthetic oligonucleotide
ccgucacacgccgcagaua

SEQ ID NO: 1664130 - RNA, 19 nt, Artificial Sequence
  Description of Artificial Sequence: Synthetic oligonucleotide
ggcggccgagcagccuaua

SEQ ID NO: 1664131 - RNA, 19 nt, Artificial Sequence
  Description of Artificial Sequence: Synthetic oligonucleotide
ccacacgggcagggugcca

SEQ ID NO: 1664132 - RNA, 19 nt, Artificial Sequence
  Description of Artificial Sequence: Synthetic oligonucleotide
gcccgucguuuggucugua

SEQ ID NO: 1664133 - RNA, 19 nt, Artificial Sequence
  Description of Artificial Sequence: Synthetic oligonucleotide
ccgaggcaagaagcccaau

SEQ ID NO: 1664134 - RNA, 19 nt, Artificial Sequence
  Description of Artificial Sequence: Synthetic oligonucleotide
cccggacgaugugggucau

SEQ ID NO: 1664135 - RNA, 19 nt, Artificial Sequence
  Description of Artificial Sequence: Synthetic oligonucleotide
uauauauuuauauauauua

SEQ ID NO: 1664136 - RNA, 19 nt, Artificial Sequence
  Description of Artificial Sequence: Synthetic oligonucleotide
auuuauauauauuauauau

SEQ ID NO: 1664137 - RNA, 19 nt, Artificial Sequence
  Description of Artificial Sequence: Synthetic oligonucleotide
auuauauauauuuauauau

SEQ ID NO: 1664138 - RNA, 19 nt, Artificial Sequence
  Description of Artificial Sequence: Synthetic oligonucleotide
aaauuaauaaguguuagga

SEQ ID NO: 1664139 - RNA, 19 nt, Artificial Sequence
  Description of Artificial Sequence: Synthetic oligonucleotide
uuauauauauuauauauuu

SEQ ID NO: 1664140 - RNA, 19 nt, Artificial Sequence
  Description of Artificial Sequence: Synthetic oligonucleotide
auauuauauauuuauauau

SEQ ID NO: 1664141 - RNA, 19 nt, Artificial Sequence
  Description of Artificial Sequence: Synthetic oligonucleotide
auauauauuauauauuuau

SEQ ID NO: 1664142 - RNA, 19 nt, Artificial Sequence
  Description of Artificial Sequence: Synthetic oligonucleotide
uuugauuuaagucaguauu

SEQ ID NO: 1664143 - RNA, 19 nt, Artificial Sequence
  Description of Artificial Sequence: Synthetic oligonucleotide
auauauuauauauuuauau

SEQ ID NO: 1664144 - RNA, 19 nt, Artificial Sequence
  Description of Artificial Sequence: Synthetic oligonucleotide
aggucuuuuguacaggugc

SEQ ID NO: 1664145 - RNA, 19 nt, Artificial Sequence
  Description of Artificial Sequence: Synthetic oligonucleotide
uauauauauuuauauauau

SEQ ID NO: 1664146 - RNA, 19 nt, Artificial Sequence
  Description of Artificial Sequence: Synthetic oligonucleotide
aaguuuguaauccaaugga

SEQ ID NO: 1664147 - RNA, 19 nt, Artificial Sequence
  Description of Artificial Sequence: Synthetic oligonucleotide
uuaauaaguguuaggaagu

SEQ ID NO: 1664148 - RNA, 19 nt, Artificial Sequence
  Description of Artificial Sequence: Synthetic oligonucleotide
agaagaaucuuguuugggg

SEQ ID NO: 1664149 - RNA, 19 nt, Artificial Sequence
  Description of Artificial Sequence: Synthetic oligonucleotide
uauauuuauauauauuaua

SEQ ID NO: 1664150 - RNA, 19 nt, Artificial Sequence
  Description of Artificial Sequence: Synthetic oligonucleotide
uauauuauauauuuauaua

SEQ ID NO: 1664151 - RNA, 19 nt, Artificial Sequence
  Description of Artificial Sequence: Synthetic oligonucleotide
ggaaauuugauuuaaguca

SEQ ID NO: 1664152 - RNA, 19 nt, Artificial Sequence
  Description of Artificial Sequence: Synthetic oligonucleotide
uaaaguuuguaauccaaug

SEQ ID NO: 1664153 - RNA, 19 nt, Artificial Sequence
  Description of Artificial Sequence: Synthetic oligonucleotide
uauuauauauuuauauaua

SEQ ID NO: 1664154 - RNA, 19 nt, Artificial Sequence
  Description of Artificial Sequence: Synthetic oligonucleotide
uuauauauauuuauauaua

SEQ ID NO: 1664155 - RNA, 19 nt, Artificial Sequence
  Description of Artificial Sequence: Synthetic oligonucleotide
uuuauauauauuauauauu

SEQ ID NO: 1664156 - RNA, 19 nt, Artificial Sequence
  Description of Artificial Sequence: Synthetic oligonucleotide
uauuauauauauuuauaua

SEQ ID NO: 1664157 - RNA, 19 nt, Artificial Sequence
  Description of Artificial Sequence: Synthetic oligonucleotide
uucauaaauuaauaagugu

SEQ ID NO: 1664158 - RNA, 19 nt, Artificial Sequence
  Description of Artificial Sequence: Synthetic oligonucleotide
uugggaacguugaugaucc

SEQ ID NO: 1664159 - RNA, 19 nt, Artificial Sequence
  Description of Artificial Sequence: Synthetic oligonucleotide
agcgcacuuauacaaaugg

SEQ ID NO: 1664160 - RNA, 19 nt, Artificial Sequence
  Description of Artificial Sequence: Synthetic oligonucleotide
ugugacacuuccauguugc

SEQ ID NO: 1664161 - RNA, 19 nt, Artificial Sequence
  Description of Artificial Sequence: Synthetic oligonucleotide
uauauauuauauauuuaua

SEQ ID NO: 1664162 - RNA, 19 nt, Artificial Sequence
  Description of Artificial Sequence: Synthetic oligonucleotide
auaaguguuaggaagucgg

SEQ ID NO: 1664163 - RNA, 19 nt, Artificial Sequence
  Description of Artificial Sequence: Synthetic oligonucleotide
uaacgaagcgcacuuauac

SEQ ID NO: 1664164 - RNA, 19 nt, Artificial Sequence
  Description of Artificial Sequence: Synthetic oligonucleotide
aguugaaggugguggagcc

SEQ ID NO: 1664165 - RNA, 19 nt, Artificial Sequence
  Description of Artificial Sequence: Synthetic oligonucleotide
aacaacggcugcuuugggg

SEQ ID NO: 1664166 - RNA, 19 nt, Artificial Sequence
  Description of Artificial Sequence: Synthetic oligonucleotide
auauuuauauauauuauau

SEQ ID NO: 1664167 - RNA, 19 nt, Artificial Sequence
  Description of Artificial Sequence: Synthetic oligonucleotide
acauccgaugaguugaagg

SEQ ID NO: 1664168 - RNA, 19 nt, Artificial Sequence
  Description of Artificial Sequence: Synthetic oligonucleotide
ugugucguucuucagggcc

SEQ ID NO: 1664169 - RNA, 19 nt, Artificial Sequence
  Description of Artificial Sequence: Synthetic oligonucleotide
ucagacagaggcaaugaca

SEQ ID NO: 1664170 - RNA, 19 nt, Artificial Sequence
  Description of Artificial Sequence: Synthetic oligonucleotide
uauauauauuauauauuua

SEQ ID NO: 1664171 - RNA, 19 nt, Artificial Sequence
  Description of Artificial Sequence: Synthetic oligonucleotide
uauuuauauauauuauaua

SEQ ID NO: 1664172 - RNA, 19 nt, Artificial Sequence
  Description of Artificial Sequence: Synthetic oligonucleotide
ugugacgucagguguagag

SEQ ID NO: 1664173 - RNA, 19 nt, Artificial Sequence
  Description of Artificial Sequence: Synthetic oligonucleotide
ugagagacgaggcugcucu

SEQ ID NO: 1664174 - RNA, 19 nt, Artificial Sequence
  Description of Artificial Sequence: Synthetic oligonucleotide
ugucagggaaauuugauuu

SEQ ID NO: 1664175 - RNA, 19 nt, Artificial Sequence
  Description of Artificial Sequence: Synthetic oligonucleotide
uaaguguuaggaagucggg

SEQ ID NO: 1664176 - RNA, 19 nt, Artificial Sequence
  Description of Artificial Sequence: Synthetic oligonucleotide
uuacucaacuguaaacugu

SEQ ID NO: 1664177 - RNA, 19 nt, Artificial Sequence
  Description of Artificial Sequence: Synthetic oligonucleotide
aaguguuaggaagucgggg

SEQ ID NO: 1664178 - RNA, 19 nt, Artificial Sequence
  Description of Artificial Sequence: Synthetic oligonucleotide
aaucaugaggugcggggag

SEQ ID NO: 1664179 - RNA, 19 nt, Artificial Sequence
  Description of Artificial Sequence: Synthetic oligonucleotide
acgcccacagggcagagcc

SEQ ID NO: 1664180 - RNA, 19 nt, Artificial Sequence
  Description of Artificial Sequence: Synthetic oligonucleotide
auuguugccagagacgaag

SEQ ID NO: 1664181 - RNA, 19 nt, Artificial Sequence
  Description of Artificial Sequence: Synthetic oligonucleotide
uguaauccaauggacacac

SEQ ID NO: 1664182 - RNA, 19 nt, Artificial Sequence
  Description of Artificial Sequence: Synthetic oligonucleotide
aguuuguaauccaauggac

SEQ ID NO: 1664183 - RNA, 19 nt, Artificial Sequence
  Description of Artificial Sequence: Synthetic oligonucleotide
aguguuaggaagucgggga

SEQ ID NO: 1664184 - RNA, 19 nt, Artificial Sequence
  Description of Artificial Sequence: Synthetic oligonucleotide
cagacaguaaucuguuucc

SEQ ID NO: 1664185 - RNA, 19 nt, Artificial Sequence
  Description of Artificial Sequence: Synthetic oligonucleotide
augacaaucaugaggugcg

SEQ ID NO: 1664186 - RNA, 19 nt, Artificial Sequence
  Description of Artificial Sequence: Synthetic oligonucleotide
auggacacacaacaaaacu

SEQ ID NO: 1664187 - RNA, 19 nt, Artificial Sequence
  Description of Artificial Sequence: Synthetic oligonucleotide
aauuugauuuaagucagua

SEQ ID NO: 1664188 - RNA, 19 nt, Artificial Sequence
  Description of Artificial Sequence: Synthetic oligonucleotide
agagacgaaguggagcugc

SEQ ID NO: 1664189 - RNA, 19 nt, Artificial Sequence
  Description of Artificial Sequence: Synthetic oligonucleotide
agaaagaauccucuucgcu

SEQ ID NO: 1664190 - RNA, 19 nt, Artificial Sequence
  Description of Artificial Sequence: Synthetic oligonucleotide
acgaaguggagcugcacgg

SEQ ID NO: 1664191 - RNA, 19 nt, Artificial Sequence
  Description of Artificial Sequence: Synthetic oligonucleotide
aacgaagcgcacuuauaca

SEQ ID NO: 1664192 - RNA, 19 nt, Artificial Sequence
  Description of Artificial Sequence: Synthetic oligonucleotide
agacgaggcugcucuaucc

SEQ ID NO: 1664193 - RNA, 19 nt, Artificial Sequence
  Description of Artificial Sequence: Synthetic oligonucleotide
ugggugacgguacaaaguc

SEQ ID NO: 1664194 - RNA, 19 nt, Artificial Sequence
  Description of Artificial Sequence: Synthetic oligonucleotide
uguaacgaagcgcacuuau

SEQ ID NO: 1664195 - RNA, 19 nt, Artificial Sequence
  Description of Artificial Sequence: Synthetic oligonucleotide
acacacaacaaaacugcgc

SEQ ID NO: 1664196 - RNA, 19 nt, Artificial Sequence
  Description of Artificial Sequence: Synthetic oligonucleotide
acaaacaacggcugcuuug

SEQ ID NO: 1664197 - RNA, 19 nt, Artificial Sequence
  Description of Artificial Sequence: Synthetic oligonucleotide
uuuguacaggugcugugug

SEQ ID NO: 1664198 - RNA, 19 nt, Artificial Sequence
  Description of Artificial Sequence: Synthetic oligonucleotide
guaaacuguacauccgaug

SEQ ID NO: 1664199 - RNA, 19 nt, Artificial Sequence
  Description of Artificial Sequence: Synthetic oligonucleotide
uacaaaugggugacgguac

SEQ ID NO: 1664200 - RNA, 19 nt, Artificial Sequence
  Description of Artificial Sequence: Synthetic oligonucleotide
uuugcuucuugggagaccu

SEQ ID NO: 1664201 - RNA, 19 nt, Artificial Sequence
  Description of Artificial Sequence: Synthetic oligonucleotide
aacuguacauccgaugagu

SEQ ID NO: 1664202 - RNA, 19 nt, Artificial Sequence
  Description of Artificial Sequence: Synthetic oligonucleotide
aguucugcacauccgacca

SEQ ID NO: 1664203 - RNA, 19 nt, Artificial Sequence
  Description of Artificial Sequence: Synthetic oligonucleotide
gggaaauuugauuuaaguc

SEQ ID NO: 1664204 - RNA, 19 nt, Artificial Sequence
  Description of Artificial Sequence: Synthetic oligonucleotide
agggacaaacaacggcugc

SEQ ID NO: 1664205 - RNA, 19 nt, Artificial Sequence
  Description of Artificial Sequence: Synthetic oligonucleotide
ucggguauuucuucagaag

SEQ ID NO: 1664206 - RNA, 19 nt, Artificial Sequence
  Description of Artificial Sequence: Synthetic oligonucleotide
auauauuuauauauauuau

SEQ ID NO: 1664207 - RNA, 19 nt, Artificial Sequence
  Description of Artificial Sequence: Synthetic oligonucleotide
uucgcuuuacucaacugua

SEQ ID NO: 1664208 - RNA, 19 nt, Artificial Sequence
  Description of Artificial Sequence: Synthetic oligonucleotide
uguaaacuguacauccgau

SEQ ID NO: 1664209 - RNA, 19 nt, Artificial Sequence
  Description of Artificial Sequence: Synthetic oligonucleotide
uggcaaggaggucaggggc

SEQ ID NO: 1664210 - RNA, 19 nt, Artificial Sequence
  Description of Artificial Sequence: Synthetic oligonucleotide
cacagggacaaacaacggc

SEQ ID NO: 1664211 - RNA, 19 nt, Artificial Sequence
  Description of Artificial Sequence: Synthetic oligonucleotide
acgaagcgcacuuauacaa

SEQ ID NO: 1664212 - RNA, 19 nt, Artificial Sequence
  Description of Artificial Sequence: Synthetic oligonucleotide
aacguugaugaucccugcu

SEQ ID NO: 1664213 - RNA, 19 nt, Artificial Sequence
  Description of Artificial Sequence: Synthetic oligonucleotide
acguugaugaucccugcug

SEQ ID NO: 1664214 - RNA, 19 nt, Artificial Sequence
  Description of Artificial Sequence: Synthetic oligonucleotide
acagggacaaacaacggcu

SEQ ID NO: 1664215 - RNA, 19 nt, Artificial Sequence
  Description of Artificial Sequence: Synthetic oligonucleotide
gccacagggacaaacaacg

SEQ ID NO: 1664216 - RNA, 19 nt, Artificial Sequence
  Description of Artificial Sequence: Synthetic oligonucleotide
aaacaacggcugcuuuggg

SEQ ID NO: 1664217 - RNA, 19 nt, Artificial Sequence
  Description of Artificial Sequence: Synthetic oligonucleotide
ucuuuuguacaggugcugu

SEQ ID NO: 1664218 - RNA, 19 nt, Artificial Sequence
  Description of Artificial Sequence: Synthetic oligonucleotide
uccaagucacaggaagagg

SEQ ID NO: 1664219 - RNA, 19 nt, Artificial Sequence
  Description of Artificial Sequence: Synthetic oligonucleotide
auauauauuuauauauauu

SEQ ID NO: 1664220 - RNA, 19 nt, Artificial Sequence
  Description of Artificial Sequence: Synthetic oligonucleotide
gaggccucuagccgcaucc

SEQ ID NO: 1664221 - RNA, 19 nt, Artificial Sequence
  Description of Artificial Sequence: Synthetic oligonucleotide
aggcgggcugauuggagcc

SEQ ID NO: 1664222 - RNA, 19 nt, Artificial Sequence
  Description of Artificial Sequence: Synthetic oligonucleotide
ugacgguacaaagucugag

SEQ ID NO: 1664223 - RNA, 19 nt, Artificial Sequence
  Description of Artificial Sequence: Synthetic oligonucleotide
uccgaccaagaaagaaucc

SEQ ID NO: 1664224 - RNA, 19 nt, Artificial Sequence
  Description of Artificial Sequence: Synthetic oligonucleotide
uggccuguuuccacuggcg

SEQ ID NO: 1664225 - RNA, 19 nt, Artificial Sequence
  Description of Artificial Sequence: Synthetic oligonucleotide
uccucuucgcuuuacucaa

SEQ ID NO: 1664226 - RNA, 19 nt, Artificial Sequence
  Description of Artificial Sequence: Synthetic oligonucleotide
gacaaucaugaggugcggg

SEQ ID NO: 1664227 - RNA, 19 nt, Artificial Sequence
  Description of Artificial Sequence: Synthetic oligonucleotide
acgguacaaagucugagua

SEQ ID NO: 1664228 - RNA, 19 nt, Artificial Sequence
  Description of Artificial Sequence: Synthetic oligonucleotide
agaggugacucucggagaa

SEQ ID NO: 1664229 - RNA, 19 nt, Artificial Sequence
  Description of Artificial Sequence: Synthetic oligonucleotide
auacaaaugggugacggua

SEQ ID NO: 1664230 - RNA, 19 nt, Artificial Sequence
  Description of Artificial Sequence: Synthetic oligonucleotide
ucuucgcuuuacucaacug

SEQ ID NO: 1664231 - RNA, 19 nt, Artificial Sequence
  Description of Artificial Sequence: Synthetic oligonucleotide
gacgaggcugcucuauccc

SEQ ID NO: 1664232 - RNA, 19 nt, Artificial Sequence
  Description of Artificial Sequence: Synthetic oligonucleotide
uuguaauccaauggacaca

SEQ ID NO: 1664233 - RNA, 19 nt, Artificial Sequence
  Description of Artificial Sequence: Synthetic oligonucleotide
ugacucucggagaacucac

SEQ ID NO: 1664234 - RNA, 19 nt, Artificial Sequence
  Description of Artificial Sequence: Synthetic oligonucleotide
aaaugggugacgguacaaa

SEQ ID NO: 1664235 - RNA, 19 nt, Artificial Sequence
  Description of Artificial Sequence: Synthetic oligonucleotide
uggggcaucuugcuacuca

SEQ ID NO: 1664236 - RNA, 19 nt, Artificial Sequence
  Description of Artificial Sequence: Synthetic oligonucleotide
guaagugaugaaggcagcc

SEQ ID NO: 1664237 - RNA, 19 nt, Artificial Sequence
  Description of Artificial Sequence: Synthetic oligonucleotide
cugugaggccucuagccgc

SEQ ID NO: 1664238 - RNA, 19 nt, Artificial Sequence
  Description of Artificial Sequence: Synthetic oligonucleotide
ggcugugucguucuucagg

SEQ ID NO: 1664239 - RNA, 19 nt, Artificial Sequence
  Description of Artificial Sequence: Synthetic oligonucleotide
cacguaggcgggcugauug

SEQ ID NO: 1664240 - RNA, 19 nt, Artificial Sequence
  Description of Artificial Sequence: Synthetic oligonucleotide
gaacguugaugaucccugc

SEQ ID NO: 1664241 - RNA, 19 nt, Artificial Sequence
  Description of Artificial Sequence: Synthetic oligonucleotide
cuguacauccgaugaguug

SEQ ID NO: 1664242 - RNA, 19 nt, Artificial Sequence
  Description of Artificial Sequence: Synthetic oligonucleotide
aucggguauuucuucagaa

SEQ ID NO: 1664243 - RNA, 19 nt, Artificial Sequence
  Description of Artificial Sequence: Synthetic oligonucleotide
guugggaacguugaugauc

SEQ ID NO: 1664244 - RNA, 19 nt, Artificial Sequence
  Description of Artificial Sequence: Synthetic oligonucleotide
ucugugacgucagguguag

SEQ ID NO: 1664245 - RNA, 19 nt, Artificial Sequence
  Description of Artificial Sequence: Synthetic oligonucleotide
guaaucuguuuccacuguc

SEQ ID NO: 1664246 - RNA, 19 nt, Artificial Sequence
  Description of Artificial Sequence: Synthetic oligonucleotide
acaaaugggugacgguaca

SEQ ID NO: 1664247 - RNA, 19 nt, Artificial Sequence
  Description of Artificial Sequence: Synthetic oligonucleotide
acacaacaaaacugcgcug

SEQ ID NO: 1664248 - RNA, 19 nt, Artificial Sequence
  Description of Artificial Sequence: Synthetic oligonucleotide
gcuuuacucaacuguaaac

SEQ ID NO: 1664249 - RNA, 19 nt, Artificial Sequence
  Description of Artificial Sequence: Synthetic oligonucleotide
aaauuugauuuaagucagu

SEQ ID NO: 1664250 - RNA, 19 nt, Artificial Sequence
  Description of Artificial Sequence: Synthetic oligonucleotide
acccgugcuguaacgaagc

SEQ ID NO: 1664251 - RNA, 19 nt, Artificial Sequence
  Description of Artificial Sequence: Synthetic oligonucleotide
acagaggcaaugacaauca

SEQ ID NO: 1664252 - RNA, 19 nt, Artificial Sequence
  Description of Artificial Sequence: Synthetic oligonucleotide
uguuaggaagucggggaga

SEQ ID NO: 1664253 - RNA, 19 nt, Artificial Sequence
  Description of Artificial Sequence: Synthetic oligonucleotide
uggucacgcccacagggca

SEQ ID NO: 1664254 - RNA, 19 nt, Artificial Sequence
  Description of Artificial Sequence: Synthetic oligonucleotide
ugacaaucaugaggugcgg

SEQ ID NO: 1664255 - RNA, 19 nt, Artificial Sequence
  Description of Artificial Sequence: Synthetic oligonucleotide
gcugugaggccucuagccg

SEQ ID NO: 1664256 - RNA, 19 nt, Artificial Sequence
  Description of Artificial Sequence: Synthetic oligonucleotide
ucgcuuuacucaacuguaa

SEQ ID NO: 1664257 - RNA, 19 nt, Artificial Sequence
  Description of Artificial Sequence: Synthetic oligonucleotide
ugcuguaacgaagcgcacu

SEQ ID NO: 1664258 - RNA, 19 nt, Artificial Sequence
  Description of Artificial Sequence: Synthetic oligonucleotide
ggugacgguacaaagucug

SEQ ID NO: 1664259 - RNA, 19 nt, Artificial Sequence
  Description of Artificial Sequence: Synthetic oligonucleotide
ggguugggaacguugauga

SEQ ID NO: 1664260 - RNA, 19 nt, Artificial Sequence
  Description of Artificial Sequence: Synthetic oligonucleotide
aggguugggaacguugaug

SEQ ID NO: 1664261 - RNA, 19 nt, Artificial Sequence
  Description of Artificial Sequence: Synthetic oligonucleotide
ggaacguugaugaucccug

SEQ ID NO: 1664262 - RNA, 19 nt, Artificial Sequence
  Description of Artificial Sequence: Synthetic oligonucleotide
aagcgcacuuauacaaaug

SEQ ID NO: 1664263 - RNA, 19 nt, Artificial Sequence
  Description of Artificial Sequence: Synthetic oligonucleotide
acguaggcgggcugauugg

SEQ ID NO: 1664264 - RNA, 19 nt, Artificial Sequence
  Description of Artificial Sequence: Synthetic oligonucleotide
ugugugacacuuccauguu

SEQ ID NO: 1664265 - RNA, 19 nt, Artificial Sequence
  Description of Artificial Sequence: Synthetic oligonucleotide
acucaacuguaaacuguac

SEQ ID NO: 1664266 - RNA, 19 nt, Artificial Sequence
  Description of Artificial Sequence: Synthetic oligonucleotide
cauccgaugaguugaaggu

SEQ ID NO: 1664267 - RNA, 19 nt, Artificial Sequence
  Description of Artificial Sequence: Synthetic oligonucleotide
gugugacacuuccauguug

SEQ ID NO: 1664268 - RNA, 19 nt, Artificial Sequence
  Description of Artificial Sequence: Synthetic oligonucleotide
gacgguacaaagucugagu

SEQ ID NO: 1664269 - RNA, 19 nt, Artificial Sequence
  Description of Artificial Sequence: Synthetic oligonucleotide
aggucugucuucguggaga

SEQ ID NO: 1664270 - RNA, 19 nt, Artificial Sequence
  Description of Artificial Sequence: Synthetic oligonucleotide
ucggggagagguccaaguc

SEQ ID NO: 1664271 - RNA, 19 nt, Artificial Sequence
  Description of Artificial Sequence: Synthetic oligonucleotide
cuggucacgcccacagggc

SEQ ID NO: 1664272 - RNA, 19 nt, Artificial Sequence
  Description of Artificial Sequence: Synthetic oligonucleotide
acuggcgccuucugaaccu

SEQ ID NO: 1664273 - RNA, 19 nt, Artificial Sequence
  Description of Artificial Sequence: Synthetic oligonucleotide
cggguauuucuucagaagc

SEQ ID NO: 1664274 - RNA, 19 nt, Artificial Sequence
  Description of Artificial Sequence: Synthetic oligonucleotide
cucggagaacucacagggc

SEQ ID NO: 1664275 - RNA, 19 nt, Artificial Sequence
  Description of Artificial Sequence: Synthetic oligonucleotide
auccgaugaguugaaggug

SEQ ID NO: 1664276 - RNA, 19 nt, Artificial Sequence
  Description of Artificial Sequence: Synthetic oligonucleotide
cuucgcuuuacucaacugu

SEQ ID NO: 1664277 - RNA, 19 nt, Artificial Sequence
  Description of Artificial Sequence: Synthetic oligonucleotide
acauccgaccaagaaagaa

SEQ ID NO: 1664278 - RNA, 19 nt, Artificial Sequence
  Description of Artificial Sequence: Synthetic oligonucleotide
cacuggcgccuucugaacc

SEQ ID NO: 1664279 - RNA, 19 nt, Artificial Sequence
  Description of Artificial Sequence: Synthetic oligonucleotide
gacccgugcuguaacgaag

SEQ ID NO: 1664280 - RNA, 19 nt, Artificial Sequence
  Description of Artificial Sequence: Synthetic oligonucleotide
guaugucagggaaauuuga

SEQ ID NO: 1664281 - RNA, 19 nt, Artificial Sequence
  Description of Artificial Sequence: Synthetic oligonucleotide
gaagcgcacuuauacaaau

SEQ ID NO: 1664282 - RNA, 19 nt, Artificial Sequence
  Description of Artificial Sequence: Synthetic oligonucleotide
ugcacggcggcugugucgu

SEQ ID NO: 1664283 - RNA, 19 nt, Artificial Sequence
  Description of Artificial Sequence: Synthetic oligonucleotide
auacacaucccaaguucug

SEQ ID NO: 1664284 - RNA, 19 nt, Artificial Sequence
  Description of Artificial Sequence: Synthetic oligonucleotide
gaggugcggggagauauug

SEQ ID NO: 1664285 - RNA, 19 nt, Artificial Sequence
  Description of Artificial Sequence: Synthetic oligonucleotide
augggugacgguacaaagu

SEQ ID NO: 1664286 - RNA, 19 nt, Artificial Sequence
  Description of Artificial Sequence: Synthetic oligonucleotide
gacgucagguguagagaag

SEQ ID NO: 1664287 - RNA, 19 nt, Artificial Sequence
  Description of Artificial Sequence: Synthetic oligonucleotide
agacgaaguggagcugcac

SEQ ID NO: 1664288 - RNA, 19 nt, Artificial Sequence
  Description of Artificial Sequence: Synthetic oligonucleotide
cauguugcaggagcaggac

SEQ ID NO: 1664289 - RNA, 19 nt, Artificial Sequence
  Description of Artificial Sequence: Synthetic oligonucleotide
ggugcggggagauauugga

SEQ ID NO: 1664290 - RNA, 19 nt, Artificial Sequence
  Description of Artificial Sequence: Synthetic oligonucleotide
agagggaguuggccagguc

SEQ ID NO: 1664291 - RNA, 19 nt, Artificial Sequence
  Description of Artificial Sequence: Synthetic oligonucleotide
gaccaagaaagaauccucu

SEQ ID NO: 1664292 - RNA, 19 nt, Artificial Sequence
  Description of Artificial Sequence: Synthetic oligonucleotide
caggacccgugcuguaacg

SEQ ID NO: 1664293 - RNA, 19 nt, Artificial Sequence
  Description of Artificial Sequence: Synthetic oligonucleotide
uacauccgaugaguugaag

SEQ ID NO: 1664294 - RNA, 19 nt, Artificial Sequence
  Description of Artificial Sequence: Synthetic oligonucleotide
gagacgaggcugcucuauc

SEQ ID NO: 1664295 - RNA, 19 nt, Artificial Sequence
  Description of Artificial Sequence: Synthetic oligonucleotide
gauuggagccaggguuggg

SEQ ID NO: 1664296 - RNA, 19 nt, Artificial Sequence
  Description of Artificial Sequence: Synthetic oligonucleotide
cgugcuguaacgaagcgca

SEQ ID NO: 1664297 - RNA, 19 nt, Artificial Sequence
  Description of Artificial Sequence: Synthetic oligonucleotide
uggggugcuugcacccgag

SEQ ID NO: 1664298 - RNA, 19 nt, Artificial Sequence
  Description of Artificial Sequence: Synthetic oligonucleotide
cugcacggcggcugugucg

SEQ ID NO: 1664299 - RNA, 19 nt, Artificial Sequence
  Description of Artificial Sequence: Synthetic oligonucleotide
ugcuuuggggcagccugag

SEQ ID NO: 1664300 - RNA, 19 nt, Artificial Sequence
  Description of Artificial Sequence: Synthetic oligonucleotide
cauccgaccaagaaagaau

SEQ ID NO: 1664301 - RNA, 19 nt, Artificial Sequence
  Description of Artificial Sequence: Synthetic oligonucleotide
uccgggcaacuccuuccag

SEQ ID NO: 1664302 - RNA, 19 nt, Artificial Sequence
  Description of Artificial Sequence: Synthetic oligonucleotide
gcgcacuuauacaaauggg

SEQ ID NO: 1664303 - RNA, 19 nt, Artificial Sequence
  Description of Artificial Sequence: Synthetic oligonucleotide
acaggugcugugugacacu

SEQ ID NO: 1664304 - RNA, 19 nt, Artificial Sequence
  Description of Artificial Sequence: Synthetic oligonucleotide
ggaccggugggccaggaca

SEQ ID NO: 1664305 - RNA, 19 nt, Artificial Sequence
  Description of Artificial Sequence: Synthetic oligonucleotide
gugacgucagguguagaga

SEQ ID NO: 1664306 - RNA, 19 nt, Artificial Sequence
  Description of Artificial Sequence: Synthetic oligonucleotide
cugugucguucuucagggc

SEQ ID NO: 1664307 - RNA, 19 nt, Artificial Sequence
  Description of Artificial Sequence: Synthetic oligonucleotide
ggagaccuggggcaucuug

SEQ ID NO: 1664308 - RNA, 19 nt, Artificial Sequence
  Description of Artificial Sequence: Synthetic oligonucleotide
uccuccgggcaacuccuuc

SEQ ID NO: 1664309 - RNA, 19 nt, Artificial Sequence
  Description of Artificial Sequence: Synthetic oligonucleotide
gguaagugaugaaggcagc

SEQ ID NO: 1664310 - RNA, 19 nt, Artificial Sequence
  Description of Artificial Sequence: Synthetic oligonucleotide
caaucaugaggugcgggga

SEQ ID NO: 1664311 - RNA, 19 nt, Artificial Sequence
  Description of Artificial Sequence: Synthetic oligonucleotide
aggugcggggagauauugg

SEQ ID NO: 1664312 - RNA, 19 nt, Artificial Sequence
  Description of Artificial Sequence: Synthetic oligonucleotide
cuugcacccgaggccacag

SEQ ID NO: 1664313 - RNA, 19 nt, Artificial Sequence
  Description of Artificial Sequence: Synthetic oligonucleotide
ugucuucguggagacugac

SEQ ID NO: 1664314 - RNA, 19 nt, Artificial Sequence
  Description of Artificial Sequence: Synthetic oligonucleotide
agacagaggcaaugacaau

SEQ ID NO: 1664315 - RNA, 19 nt, Artificial Sequence
  Description of Artificial Sequence: Synthetic oligonucleotide
ggugguggagccucagaca

SEQ ID NO: 1664316 - RNA, 19 nt, Artificial Sequence
  Description of Artificial Sequence: Synthetic oligonucleotide
ugcagcacguaggcgggcu

SEQ ID NO: 1664317 - RNA, 19 nt, Artificial Sequence
  Description of Artificial Sequence: Synthetic oligonucleotide
acuguacauccgaugaguu

SEQ ID NO: 1664318 - RNA, 19 nt, Artificial Sequence
  Description of Artificial Sequence: Synthetic oligonucleotide
gugcggggagauauuggag

SEQ ID NO: 1664319 - RNA, 19 nt, Artificial Sequence
  Description of Artificial Sequence: Synthetic oligonucleotide
guaggcgggcugauuggag

SEQ ID NO: 1664320 - RNA, 19 nt, Artificial Sequence
  Description of Artificial Sequence: Synthetic oligonucleotide
ugaggugcggggagauauu

SEQ ID NO: 1664321 - RNA, 19 nt, Artificial Sequence
  Description of Artificial Sequence: Synthetic oligonucleotide
agagacgaggcugcucuau

SEQ ID NO: 1664322 - RNA, 19 nt, Artificial Sequence
  Description of Artificial Sequence: Synthetic oligonucleotide
ugaggccucuagccgcauc

SEQ ID NO: 1664323 - RNA, 19 nt, Artificial Sequence
  Description of Artificial Sequence: Synthetic oligonucleotide
gggcugauuggagccaggg

SEQ ID NO: 1664324 - RNA, 19 nt, Artificial Sequence
  Description of Artificial Sequence: Synthetic oligonucleotide
cacagggcgggaagaucug

SEQ ID NO: 1664325 - RNA, 19 nt, Artificial Sequence
  Description of Artificial Sequence: Synthetic oligonucleotide
guacaggugcugugugaca

SEQ ID NO: 1664326 - RNA, 19 nt, Artificial Sequence
  Description of Artificial Sequence: Synthetic oligonucleotide
ccacagggacaaacaacgg

SEQ ID NO: 1664327 - RNA, 19 nt, Artificial Sequence
  Description of Artificial Sequence: Synthetic oligonucleotide
aggacccgugcuguaacga

SEQ ID NO: 1664328 - RNA, 19 nt, Artificial Sequence
  Description of Artificial Sequence: Synthetic oligonucleotide
ugccacacgaucggguauu

SEQ ID NO: 1664329 - RNA, 19 nt, Artificial Sequence
  Description of Artificial Sequence: Synthetic oligonucleotide
gacucucggagaacucaca

SEQ ID NO: 1664330 - RNA, 19 nt, Artificial Sequence
  Description of Artificial Sequence: Synthetic oligonucleotide
caggcgggagaggugacuc

SEQ ID NO: 1664331 - RNA, 19 nt, Artificial Sequence
  Description of Artificial Sequence: Synthetic oligonucleotide
ccgggcaacuccuuccagc

SEQ ID NO: 1664332 - RNA, 19 nt, Artificial Sequence
  Description of Artificial Sequence: Synthetic oligonucleotide
ccuccgggcaacuccuucc

SEQ ID NO: 1664333 - RNA, 19 nt, Artificial Sequence
  Description of Artificial Sequence: Synthetic oligonucleotide
cucuaucccuccugucuga

SEQ ID NO: 1664334 - RNA, 19 nt, Artificial Sequence
  Description of Artificial Sequence: Synthetic oligonucleotide
uggcgccuucugaaccuga

SEQ ID NO: 1664335 - RNA, 19 nt, Artificial Sequence
  Description of Artificial Sequence: Synthetic oligonucleotide
guaacgaagcgcacuuaua

SEQ ID NO: 1664336 - RNA, 19 nt, Artificial Sequence
  Description of Artificial Sequence: Synthetic oligonucleotide
cagggcgggaagaucugca

SEQ ID NO: 1664337 - RNA, 19 nt, Artificial Sequence
  Description of Artificial Sequence: Synthetic oligonucleotide
cucacagggcgggaagauc

SEQ ID NO: 1664338 - RNA, 19 nt, Artificial Sequence
  Description of Artificial Sequence: Synthetic oligonucleotide
gagacgaaguggagcugca

SEQ ID NO: 1664339 - RNA, 19 nt, Artificial Sequence
  Description of Artificial Sequence: Synthetic oligonucleotide
acucacagggcgggaagau

SEQ ID NO: 1664340 - RNA, 19 nt, Artificial Sequence
  Description of Artificial Sequence: Synthetic oligonucleotide
agucggggagagguccaag

SEQ ID NO: 1664341 - RNA, 19 nt, Artificial Sequence
  Description of Artificial Sequence: Synthetic oligonucleotide
gcggcugugucguucuuca

SEQ ID NO: 1664342 - RNA, 19 nt, Artificial Sequence
  Description of Artificial Sequence: Synthetic oligonucleotide
cugcucuaucccuccuguc

SEQ ID NO: 1664343 - RNA, 19 nt, Artificial Sequence
  Description of Artificial Sequence: Synthetic oligonucleotide
gugacgguacaaagucuga

SEQ ID NO: 1664344 - RNA, 19 nt, Artificial Sequence
  Description of Artificial Sequence: Synthetic oligonucleotide
cacauccgaccaagaaaga

SEQ ID NO: 1664345 - RNA, 19 nt, Artificial Sequence
  Description of Artificial Sequence: Synthetic oligonucleotide
ccauguugcaggagcagga

SEQ ID NO: 1664346 - RNA, 19 nt, Artificial Sequence
  Description of Artificial Sequence: Synthetic oligonucleotide
agcaggacccgugcuguaa

SEQ ID NO: 1664347 - RNA, 19 nt, Artificial Sequence
  Description of Artificial Sequence: Synthetic oligonucleotide
ugucauccuccgggcaacu

SEQ ID NO: 1664348 - RNA, 19 nt, Artificial Sequence
  Description of Artificial Sequence: Synthetic oligonucleotide
cgcacuuauacaaaugggu

SEQ ID NO: 1664349 - RNA, 19 nt, Artificial Sequence
  Description of Artificial Sequence: Synthetic oligonucleotide
gucggggagagguccaagu

SEQ ID NO: 1664350 - RNA, 19 nt, Artificial Sequence
  Description of Artificial Sequence: Synthetic oligonucleotide
ugcuugcacccgaggccac

SEQ ID NO: 1664351 - RNA, 19 nt, Artificial Sequence
  Description of Artificial Sequence: Synthetic oligonucleotide
cauuguugccagagacgaa

SEQ ID NO: 1664352 - RNA, 19 nt, Artificial Sequence
  Description of Artificial Sequence: Synthetic oligonucleotide
caaaugggugacgguacaa

SEQ ID NO: 1664353 - RNA, 19 nt, Artificial Sequence
  Description of Artificial Sequence: Synthetic oligonucleotide
caacggcugcuuuggggca

SEQ ID NO: 1664354 - RNA, 19 nt, Artificial Sequence
  Description of Artificial Sequence: Synthetic oligonucleotide
gcaggacccgugcuguaac

SEQ ID NO: 1664355 - RNA, 19 nt, Artificial Sequence
  Description of Artificial Sequence: Synthetic oligonucleotide
cuccgggcaacuccuucca

SEQ ID NO: 1664356 - RNA, 19 nt, Artificial Sequence
  Description of Artificial Sequence: Synthetic oligonucleotide
guucugcacauccgaccaa

SEQ ID NO: 1664357 - RNA, 19 nt, Artificial Sequence
  Description of Artificial Sequence: Synthetic oligonucleotide
ggcucgcagggacagcuga

SEQ ID NO: 1664358 - RNA, 19 nt, Artificial Sequence
  Description of Artificial Sequence: Synthetic oligonucleotide
aucuugcuacucaguggcu

SEQ ID NO: 1664359 - RNA, 19 nt, Artificial Sequence
  Description of Artificial Sequence: Synthetic oligonucleotide
ccgugcuguaacgaagcgc

SEQ ID NO: 1664360 - RNA, 19 nt, Artificial Sequence
  Description of Artificial Sequence: Synthetic oligonucleotide
agugugaggcagagccagu

SEQ ID NO: 1664361 - RNA, 19 nt, Artificial Sequence
  Description of Artificial Sequence: Synthetic oligonucleotide
guaauccaauggacacaca

SEQ ID NO: 1664362 - RNA, 19 nt, Artificial Sequence
  Description of Artificial Sequence: Synthetic oligonucleotide
ggacccgugcuguaacgaa

SEQ ID NO: 1664363 - RNA, 19 nt, Artificial Sequence
  Description of Artificial Sequence: Synthetic oligonucleotide
cccgugcuguaacgaagcg

SEQ ID NO: 1664364 - RNA, 19 nt, Artificial Sequence
  Description of Artificial Sequence: Synthetic oligonucleotide
guacauccgaugaguugaa

SEQ ID NO: 1664365 - RNA, 19 nt, Artificial Sequence
  Description of Artificial Sequence: Synthetic oligonucleotide
gagagacgaggcugcucua

SEQ ID NO: 1664366 - RNA, 19 nt, Artificial Sequence
  Description of Artificial Sequence: Synthetic oligonucleotide
gggaacguugaugaucccu

SEQ ID NO: 1664367 - RNA, 19 nt, Artificial Sequence
  Description of Artificial Sequence: Synthetic oligonucleotide
gggacaaacaacggcugcu

SEQ ID NO: 1664368 - RNA, 19 nt, Artificial Sequence
  Description of Artificial Sequence: Synthetic oligonucleotide
gcgggagaggugacucucg

SEQ ID NO: 1664369 - RNA, 19 nt, Artificial Sequence
  Description of Artificial Sequence: Synthetic oligonucleotide
cuggcgccuucugaaccug

SEQ ID NO: 1664370 - RNA, 19 nt, Artificial Sequence
  Description of Artificial Sequence: Synthetic oligonucleotide
guggagccucagacagagg

SEQ ID NO: 1664371 - RNA, 19 nt, Artificial Sequence
  Description of Artificial Sequence: Synthetic oligonucleotide
cacgcccacagggcagagc

SEQ ID NO: 1664372 - RNA, 19 nt, Artificial Sequence
  Description of Artificial Sequence: Synthetic oligonucleotide
aggccucuagccgcauccu

SEQ ID NO: 1664373 - RNA, 19 nt, Artificial Sequence
  Description of Artificial Sequence: Synthetic oligonucleotide
gcgccuucugaaccugaac

SEQ ID NO: 1664374 - RNA, 19 nt, Artificial Sequence
  Description of Artificial Sequence: Synthetic oligonucleotide
cgggagaggugacucucgg

SEQ ID NO: 1664375 - RNA, 19 nt, Artificial Sequence
  Description of Artificial Sequence: Synthetic oligonucleotide
gugcuguaacgaagcgcac

SEQ ID NO: 1664376 - RNA, 19 nt, Artificial Sequence
  Description of Artificial Sequence: Synthetic oligonucleotide
ggcgggagaggugacucuc

SEQ ID NO: 1664377 - RNA, 19 nt, Artificial Sequence
  Description of Artificial Sequence: Synthetic oligonucleotide
agcacguaggcgggcugau

SEQ ID NO: 1664378 - RNA, 19 nt, Artificial Sequence
  Description of Artificial Sequence: Synthetic oligonucleotide
gcggccggcucgcagggac

SEQ ID NO: 1664379 - RNA, 19 nt, Artificial Sequence
  Description of Artificial Sequence: Synthetic oligonucleotide
ccaggucuuuuguacaggu

SEQ ID NO: 1664380 - RNA, 19 nt, Artificial Sequence
  Description of Artificial Sequence: Synthetic oligonucleotide
ccucagacagaggcaauga

SEQ ID NO: 1664381 - RNA, 19 nt, Artificial Sequence
  Description of Artificial Sequence: Synthetic oligonucleotide
cagcacguaggcgggcuga

SEQ ID NO: 1664382 - RNA, 19 nt, Artificial Sequence
  Description of Artificial Sequence: Synthetic oligonucleotide
ccucuucgcuuuacucaac

SEQ ID NO: 1664383 - RNA, 19 nt, Artificial Sequence
  Description of Artificial Sequence: Synthetic oligonucleotide
ccgaccaagaaagaauccu

SEQ ID NO: 1664384 - RNA, 19 nt, Artificial Sequence
  Description of Artificial Sequence: Synthetic oligonucleotide
gaccggugggccaggacau

SEQ ID NO: 1664385 - RNA, 19 nt, Artificial Sequence
  Description of Artificial Sequence: Synthetic oligonucleotide
cgcuuuacucaacuguaaa

SEQ ID NO: 1664386 - RNA, 19 nt, Artificial Sequence
  Description of Artificial Sequence: Synthetic oligonucleotide
ggcugauuggagccagggu

SEQ ID NO: 1664387 - RNA, 19 nt, Artificial Sequence
  Description of Artificial Sequence: Synthetic oligonucleotide
gcgggcugauuggagccag

SEQ ID NO: 1664388 - RNA, 19 nt, Artificial Sequence
  Description of Artificial Sequence: Synthetic oligonucleotide
cgaggccacagggacaaac

SEQ ID NO: 1664389 - RNA, 19 nt, Artificial Sequence
  Description of Artificial Sequence: Synthetic oligonucleotide
gagcaggacccgugcugua

SEQ ID NO: 1664390 - RNA, 19 nt, Artificial Sequence
  Description of Artificial Sequence: Synthetic oligonucleotide
ggccggcucgcagggacag

SEQ ID NO: 1664391 - RNA, 19 nt, Artificial Sequence
  Description of Artificial Sequence: Synthetic oligonucleotide
gcggggagauauuggagau

SEQ ID NO: 1664392 - RNA, 19 nt, Artificial Sequence
  Description of Artificial Sequence: Synthetic oligonucleotide
cuguaacgaagcgcacuua

SEQ ID NO: 1664393 - RNA, 19 nt, Artificial Sequence
  Description of Artificial Sequence: Synthetic oligonucleotide
ccucugugacgucaggugu

SEQ ID NO: 1664394 - RNA, 19 nt, Artificial Sequence
  Description of Artificial Sequence: Synthetic oligonucleotide
cgaagcgcacuuauacaaa

SEQ ID NO: 1664395 - RNA, 19 nt, Artificial Sequence
  Description of Artificial Sequence: Synthetic oligonucleotide
gagcugcacggcggcugug

SEQ ID NO: 1664396 - RNA, 19 nt, Artificial Sequence
  Description of Artificial Sequence: Synthetic oligonucleotide
gcugcacggcggcuguguc

SEQ ID NO: 1664397 - RNA, 19 nt, Artificial Sequence
  Description of Artificial Sequence: Synthetic oligonucleotide
gccucuagccgcauccucu

SEQ ID NO: 1664398 - RNA, 19 nt, Artificial Sequence
  Description of Artificial Sequence: Synthetic oligonucleotide
ccuguuuccacuggcgccu

SEQ ID NO: 1664399 - RNA, 19 nt, Artificial Sequence
  Description of Artificial Sequence: Synthetic oligonucleotide
ggacaaacaacggcugcuu

SEQ ID NO: 1664400 - RNA, 19 nt, Artificial Sequence
  Description of Artificial Sequence: Synthetic oligonucleotide
gggaccggugggccaggac

SEQ ID NO: 1664401 - RNA, 19 nt, Artificial Sequence
  Description of Artificial Sequence: Synthetic oligonucleotide
cagaggcaaugacaaucau

SEQ ID NO: 1664402 - RNA, 19 nt, Artificial Sequence
  Description of Artificial Sequence: Synthetic oligonucleotide
gcccugccacacgaucggg

SEQ ID NO: 1664403 - RNA, 19 nt, Artificial Sequence
  Description of Artificial Sequence: Synthetic oligonucleotide
cugccacacgaucggguau

SEQ ID NO: 1664404 - RNA, 19 nt, Artificial Sequence
  Description of Artificial Sequence: Synthetic oligonucleotide
caugaggugcggggagaua

SEQ ID NO: 1664405 - RNA, 19 nt, Artificial Sequence
  Description of Artificial Sequence: Synthetic oligonucleotide
caggguugggaacguugau

SEQ ID NO: 1664406 - RNA, 19 nt, Artificial Sequence
  Description of Artificial Sequence: Synthetic oligonucleotide
gggugacgguacaaagucu

SEQ ID NO: 1664407 - RNA, 19 nt, Artificial Sequence
  Description of Artificial Sequence: Synthetic oligonucleotide
ggcgccuucugaaccugaa

SEQ ID NO: 1664408 - RNA, 19 nt, Artificial Sequence
  Description of Artificial Sequence: Synthetic oligonucleotide
gcucaggcggccggcucgc

SEQ ID NO: 1664409 - RNA, 19 nt, Artificial Sequence
  Description of Artificial Sequence: Synthetic oligonucleotide
caggugcugugugacacuu

SEQ ID NO: 1664410 - RNA, 19 nt, Artificial Sequence
  Description of Artificial Sequence: Synthetic oligonucleotide
ggcgggcugauuggagcca

SEQ ID NO: 1664411 - RNA, 19 nt, Artificial Sequence
  Description of Artificial Sequence: Synthetic oligonucleotide
gagccaggguugggaacgu

SEQ ID NO: 1664412 - RNA, 19 nt, Artificial Sequence
  Description of Artificial Sequence: Synthetic oligonucleotide
cgggcaacuccuuccagcu

SEQ ID NO: 1664413 - RNA, 19 nt, Artificial Sequence
  Description of Artificial Sequence: Synthetic oligonucleotide
accggugggccaggacauu

SEQ ID NO: 1664414 - RNA, 19 nt, Artificial Sequence
  Description of Artificial Sequence: Synthetic oligonucleotide
ccacacgaucggguauuuc

SEQ ID NO: 1664415 - RNA, 19 nt, Artificial Sequence
  Description of Artificial Sequence: Synthetic oligonucleotide
ccgaugaguugaagguggu

SEQ ID NO: 1664416 - RNA, 19 nt, Artificial Sequence
  Description of Artificial Sequence: Synthetic oligonucleotide
cguaggcgggcugauugga

SEQ ID NO: 1664417 - RNA, 19 nt, Artificial Sequence
  Description of Artificial Sequence: Synthetic oligonucleotide
auccuccgggcaacuccuu

SEQ ID NO: 1664418 - RNA, 19 nt, Artificial Sequence
  Description of Artificial Sequence: Synthetic oligonucleotide
cggcucgcagggacagcug

SEQ ID NO: 1664419 - RNA, 19 nt, Artificial Sequence
  Description of Artificial Sequence: Synthetic oligonucleotide
ccggcucgcagggacagcu

SEQ ID NO: 1664420 - RNA, 19 nt, Artificial Sequence
  Description of Artificial Sequence: Synthetic oligonucleotide
gccggcucgcagggacagc

SEQ ID NO: 1664421 - RNA, 19 nt, Artificial Sequence
  Description of Artificial Sequence: Synthetic oligonucleotide
cucaggcggccggcucgca

SEQ ID NO: 1664422 - RNA, 19 nt, Artificial Sequence
  Description of Artificial Sequence: Synthetic oligonucleotide
gugaggccucuagccgcau

SEQ ID NO: 1664423 - RNA, 19 nt, Artificial Sequence
  Description of Artificial Sequence: Synthetic oligonucleotide
gccacacgaucggguauuu

SEQ ID NO: 1664424 - RNA, 19 nt, Artificial Sequence
  Description of Artificial Sequence: Synthetic oligonucleotide
gcacguaggcgggcugauu

SEQ ID NO: 1664425 - RNA, 19 nt, Artificial Sequence
  Description of Artificial Sequence: Synthetic oligonucleotide
gcacggcggcugugucguu

SEQ ID NO: 1664426 - RNA, 19 nt, Artificial Sequence
  Description of Artificial Sequence: Synthetic oligonucleotide
uuuauuaccaagcaggggc

SEQ ID NO: 1664427 - RNA, 19 nt, Artificial Sequence
  Description of Artificial Sequence: Synthetic oligonucleotide
uucaaaggggucaugaugc

SEQ ID NO: 1664428 - RNA, 19 nt, Artificial Sequence
  Description of Artificial Sequence: Synthetic oligonucleotide
caagauggagcuuauaacc

SEQ ID NO: 1664429 - RNA, 19 nt, Artificial Sequence
  Description of Artificial Sequence: Synthetic oligonucleotide
aguuuagcaagauggaggg

SEQ ID NO: 1664430 - RNA, 19 nt, Artificial Sequence
  Description of Artificial Sequence: Synthetic oligonucleotide
aguuccaucccuuugugac

SEQ ID NO: 1664431 - RNA, 19 nt, Artificial Sequence
  Description of Artificial Sequence: Synthetic oligonucleotide
uucacuauagaagacagug

SEQ ID NO: 1664432 - RNA, 19 nt, Artificial Sequence
  Description of Artificial Sequence: Synthetic oligonucleotide
guauaugucaaccccacgg

SEQ ID NO: 1664433 - RNA, 19 nt, Artificial Sequence
  Description of Artificial Sequence: Synthetic oligonucleotide
gauacugacacucuucaug

SEQ ID NO: 1664434 - RNA, 19 nt, Artificial Sequence
  Description of Artificial Sequence: Synthetic oligonucleotide
gauauaacggcugucagug

SEQ ID NO: 1664435 - RNA, 19 nt, Artificial Sequence
  Description of Artificial Sequence: Synthetic oligonucleotide
gauuugagucaucaguggg

SEQ ID NO: 1664436 - RNA, 19 nt, Artificial Sequence
  Description of Artificial Sequence: Synthetic oligonucleotide
cuuaaagacaggcaccacg

SEQ ID NO: 1664437 - RNA, 19 nt, Artificial Sequence
  Description of Artificial Sequence: Synthetic oligonucleotide
gaguuuagcaagauggagg

SEQ ID NO: 1664438 - RNA, 19 nt, Artificial Sequence
  Description of Artificial Sequence: Synthetic oligonucleotide
cuuuucaccaggcauggcg

SEQ ID NO: 1664439 - RNA, 19 nt, Artificial Sequence
  Description of Artificial Sequence: Synthetic oligonucleotide
uuaaagacaggcaccacgu

SEQ ID NO: 1664440 - RNA, 19 nt, Artificial Sequence
  Description of Artificial Sequence: Synthetic oligonucleotide
uuuagcaagauggagggga

SEQ ID NO: 1664441 - RNA, 19 nt, Artificial Sequence
  Description of Artificial Sequence: Synthetic oligonucleotide
ucgucaggcacaaagguca

SEQ ID NO: 1664442 - RNA, 19 nt, Artificial Sequence
  Description of Artificial Sequence: Synthetic oligonucleotide
uucgagcuuagucagauuc

SEQ ID NO: 1664443 - RNA, 19 nt, Artificial Sequence
  Description of Artificial Sequence: Synthetic oligonucleotide
gagcuuauaaccuuaugca

SEQ ID NO: 1664444 - RNA, 19 nt, Artificial Sequence
  Description of Artificial Sequence: Synthetic oligonucleotide
guaagguucauuuccuugc

SEQ ID NO: 1664445 - RNA, 19 nt, Artificial Sequence
  Description of Artificial Sequence: Synthetic oligonucleotide
ggagcuuauaaccuuaugc

SEQ ID NO: 1664446 - RNA, 19 nt, Artificial Sequence
  Description of Artificial Sequence: Synthetic oligonucleotide
ucuggugccacucggaagu

SEQ ID NO: 1664447 - RNA, 19 nt, Artificial Sequence
  Description of Artificial Sequence: Synthetic oligonucleotide
agguucauuuccuugcagg

SEQ ID NO: 1664448 - RNA, 19 nt, Artificial Sequence
  Description of Artificial Sequence: Synthetic oligonucleotide
aaccuuaugcaacuucucu

SEQ ID NO: 1664449 - RNA, 19 nt, Artificial Sequence
  Description of Artificial Sequence: Synthetic oligonucleotide
uauaugucaaccccacgga

SEQ ID NO: 1664450 - RNA, 19 nt, Artificial Sequence
  Description of Artificial Sequence: Synthetic oligonucleotide
ggcuuuauuaccaagcagg

SEQ ID NO: 1664451 - RNA, 19 nt, Artificial Sequence
  Description of Artificial Sequence: Synthetic oligonucleotide
agauucacagaagucacgg

SEQ ID NO: 1664452 - RNA, 19 nt, Artificial Sequence
  Description of Artificial Sequence: Synthetic oligonucleotide
ugccguauccucaaugaag

SEQ ID NO: 1664453 - RNA, 19 nt, Artificial Sequence
  Description of Artificial Sequence: Synthetic oligonucleotide
uagucagauucacagaagu

SEQ ID NO: 1664454 - RNA, 19 nt, Artificial Sequence
  Description of Artificial Sequence: Synthetic oligonucleotide
agggauuugagucaucagu

SEQ ID NO: 1664455 - RNA, 19 nt, Artificial Sequence
  Description of Artificial Sequence: Synthetic oligonucleotide
uaacccguauccaccaagg

SEQ ID NO: 1664456 - RNA, 19 nt, Artificial Sequence
  Description of Artificial Sequence: Synthetic oligonucleotide
aguaagguucauuuccuug

SEQ ID NO: 1664457 - RNA, 19 nt, Artificial Sequence
  Description of Artificial Sequence: Synthetic oligonucleotide
auacugacacucuucaugu

SEQ ID NO: 1664458 - RNA, 19 nt, Artificial Sequence
  Description of Artificial Sequence: Synthetic oligonucleotide
aaugaagcgugaggcaugg

SEQ ID NO: 1664459 - RNA, 19 nt, Artificial Sequence
  Description of Artificial Sequence: Synthetic oligonucleotide
uaugucaaccccacggaga

SEQ ID NO: 1664460 - RNA, 19 nt, Artificial Sequence
  Description of Artificial Sequence: Synthetic oligonucleotide
gaugguucuagggaagcgg

SEQ ID NO: 1664461 - RNA, 19 nt, Artificial Sequence
  Description of Artificial Sequence: Synthetic oligonucleotide
aucaguggguguuauucgg

SEQ ID NO: 1664462 - RNA, 19 nt, Artificial Sequence
  Description of Artificial Sequence: Synthetic oligonucleotide
acccguauccaccaaggac

SEQ ID NO: 1664463 - RNA, 19 nt, Artificial Sequence
  Description of Artificial Sequence: Synthetic oligonucleotide
uggucauguagcagcacgg

SEQ ID NO: 1664464 - RNA, 19 nt, Artificial Sequence
  Description of Artificial Sequence: Synthetic oligonucleotide
aaugccaagauggagcuua

SEQ ID NO: 1664465 - RNA, 19 nt, Artificial Sequence
  Description of Artificial Sequence: Synthetic oligonucleotide
uuauuaccaagcaggggca

SEQ ID NO: 1664466 - RNA, 19 nt, Artificial Sequence
  Description of Artificial Sequence: Synthetic oligonucleotide
accgcucggauauaacggc

SEQ ID NO: 1664467 - RNA, 19 nt, Artificial Sequence
  Description of Artificial Sequence: Synthetic oligonucleotide
ugaggguucgccugcagcc

SEQ ID NO: 1664468 - RNA, 19 nt, Artificial Sequence
  Description of Artificial Sequence: Synthetic oligonucleotide
guguguauaugucaacccc

SEQ ID NO: 1664469 - RNA, 19 nt, Artificial Sequence
  Description of Artificial Sequence: Synthetic oligonucleotide
guggucauguagcagcacg

SEQ ID NO: 1664470 - RNA, 19 nt, Artificial Sequence
  Description of Artificial Sequence: Synthetic oligonucleotide
cuuagucagauucacagaa

SEQ ID NO: 1664471 - RNA, 19 nt, Artificial Sequence
  Description of Artificial Sequence: Synthetic oligonucleotide
uccguaugggaguuuagca

SEQ ID NO: 1664472 - RNA, 19 nt, Artificial Sequence
  Description of Artificial Sequence: Synthetic oligonucleotide
guauccaccaaggacuccg

SEQ ID NO: 1664473 - RNA, 19 nt, Artificial Sequence
  Description of Artificial Sequence: Synthetic oligonucleotide
uggcuuuauuaccaagcag

SEQ ID NO: 1664474 - RNA, 19 nt, Artificial Sequence
  Description of Artificial Sequence: Synthetic oligonucleotide
accgccuucgagcuuaguc

SEQ ID NO: 1664475 - RNA, 19 nt, Artificial Sequence
  Description of Artificial Sequence: Synthetic oligonucleotide
gucagauucacagaaguca

SEQ ID NO: 1664476 - RNA, 19 nt, Artificial Sequence
  Description of Artificial Sequence: Synthetic oligonucleotide
gucaggauugggcugcacg

SEQ ID NO: 1664477 - RNA, 19 nt, Artificial Sequence
  Description of Artificial Sequence: Synthetic oligonucleotide
aagauggagcuuauaaccu

SEQ ID NO: 1664478 - RNA, 19 nt, Artificial Sequence
  Description of Artificial Sequence: Synthetic oligonucleotide
uucaugggcgagaagccca

SEQ ID NO: 1664479 - RNA, 19 nt, Artificial Sequence
  Description of Artificial Sequence: Synthetic oligonucleotide
cacgcuagcaagugcagag

SEQ ID NO: 1664480 - RNA, 19 nt, Artificial Sequence
  Description of Artificial Sequence: Synthetic oligonucleotide
auaaccuuaugcaacuucu

SEQ ID NO: 1664481 - RNA, 19 nt, Artificial Sequence
  Description of Artificial Sequence: Synthetic oligonucleotide
guauccucaaugaagcgug

SEQ ID NO: 1664482 - RNA, 19 nt, Artificial Sequence
  Description of Artificial Sequence: Synthetic oligonucleotide
ucggauauaacggcuguca

SEQ ID NO: 1664483 - RNA, 19 nt, Artificial Sequence
  Description of Artificial Sequence: Synthetic oligonucleotide
agcuuauaaccuuaugcaa

SEQ ID NO: 1664484 - RNA, 19 nt, Artificial Sequence
  Description of Artificial Sequence: Synthetic oligonucleotide
uuggauacugacacucuuc

SEQ ID NO: 1664485 - RNA, 19 nt, Artificial Sequence
  Description of Artificial Sequence: Synthetic oligonucleotide
cugguaacccguauccacc

SEQ ID NO: 1664486 - RNA, 19 nt, Artificial Sequence
  Description of Artificial Sequence: Synthetic oligonucleotide
caccgcucggauauaacgg

SEQ ID NO: 1664487 - RNA, 19 nt, Artificial Sequence
  Description of Artificial Sequence: Synthetic oligonucleotide
ucagguggaugguucuagg

SEQ ID NO: 1664488 - RNA, 19 nt, Artificial Sequence
  Description of Artificial Sequence: Synthetic oligonucleotide
guauuggauacugacacuc

SEQ ID NO: 1664489 - RNA, 19 nt, Artificial Sequence
  Description of Artificial Sequence: Synthetic oligonucleotide
uggcggaagagcgucacgg

SEQ ID NO: 1664490 - RNA, 19 nt, Artificial Sequence
  Description of Artificial Sequence: Synthetic oligonucleotide
cacuauagaagacagugaa

SEQ ID NO: 1664491 - RNA, 19 nt, Artificial Sequence
  Description of Artificial Sequence: Synthetic oligonucleotide
ggauuugagucaucagugg

SEQ ID NO: 1664492 - RNA, 19 nt, Artificial Sequence
  Description of Artificial Sequence: Synthetic oligonucleotide
cuccguaaauuucugagca

SEQ ID NO: 1664493 - RNA, 19 nt, Artificial Sequence
  Description of Artificial Sequence: Synthetic oligonucleotide
ucgagcuuagucagauuca

SEQ ID NO: 1664494 - RNA, 19 nt, Artificial Sequence
  Description of Artificial Sequence: Synthetic oligonucleotide
gaugagacguguguauaug

SEQ ID NO: 1664495 - RNA, 19 nt, Artificial Sequence
  Description of Artificial Sequence: Synthetic oligonucleotide
cuuuaggugaggguucgcc

SEQ ID NO: 1664496 - RNA, 19 nt, Artificial Sequence
  Description of Artificial Sequence: Synthetic oligonucleotide
uuauaggccacaccgccuu

SEQ ID NO: 1664497 - RNA, 19 nt, Artificial Sequence
  Description of Artificial Sequence: Synthetic oligonucleotide
agugguugggcugaaagaa

SEQ ID NO: 1664498 - RNA, 19 nt, Artificial Sequence
  Description of Artificial Sequence: Synthetic oligonucleotide
ugaggcauggcccggcuuc

SEQ ID NO: 1664499 - RNA, 19 nt, Artificial Sequence
  Description of Artificial Sequence: Synthetic oligonucleotide
ucuagggaagcgguggccc

SEQ ID NO: 1664500 - RNA, 19 nt, Artificial Sequence
  Description of Artificial Sequence: Synthetic oligonucleotide
cuccguucacuauagaaga

SEQ ID NO: 1664501 - RNA, 19 nt, Artificial Sequence
  Description of Artificial Sequence: Synthetic oligonucleotide
guaacccguauccaccaag

SEQ ID NO: 1664502 - RNA, 19 nt, Artificial Sequence
  Description of Artificial Sequence: Synthetic oligonucleotide
uguuauucggggcuccgua

SEQ ID NO: 1664503 - RNA, 19 nt, Artificial Sequence
  Description of Artificial Sequence: Synthetic oligonucleotide
ggcuccguaaauuucugag

SEQ ID NO: 1664504 - RNA, 19 nt, Artificial Sequence
  Description of Artificial Sequence: Synthetic oligonucleotide
acuauagaagacagugaag

SEQ ID NO: 1664505 - RNA, 19 nt, Artificial Sequence
  Description of Artificial Sequence: Synthetic oligonucleotide
uuaccaagcaggggcaacc

SEQ ID NO: 1664506 - RNA, 19 nt, Artificial Sequence
  Description of Artificial Sequence: Synthetic oligonucleotide
gggaguguaggguuggugc

SEQ ID NO: 1664507 - RNA, 19 nt, Artificial Sequence
  Description of Artificial Sequence: Synthetic oligonucleotide
cagguggaugguucuaggg

SEQ ID NO: 1664508 - RNA, 19 nt, Artificial Sequence
  Description of Artificial Sequence: Synthetic oligonucleotide
gacacucuucauguccugg

SEQ ID NO: 1664509 - RNA, 19 nt, Artificial Sequence
  Description of Artificial Sequence: Synthetic oligonucleotide
cuuauaaccuuaugcaacu

SEQ ID NO: 1664510 - RNA, 19 nt, Artificial Sequence
  Description of Artificial Sequence: Synthetic oligonucleotide
uuauucggggcuccguaaa

SEQ ID NO: 1664511 - RNA, 19 nt, Artificial Sequence
  Description of Artificial Sequence: Synthetic oligonucleotide
agucagauucacagaaguc

SEQ ID NO: 1664512 - RNA, 19 nt, Artificial Sequence
  Description of Artificial Sequence: Synthetic oligonucleotide
uccuuuaggugaggguucg

SEQ ID NO: 1664513 - RNA, 19 nt, Artificial Sequence
  Description of Artificial Sequence: Synthetic oligonucleotide
cacucggaagucaaagcug

SEQ ID NO: 1664514 - RNA, 19 nt, Artificial Sequence
  Description of Artificial Sequence: Synthetic oligonucleotide
uaaccuuaugcaacuucuc

SEQ ID NO: 1664515 - RNA, 19 nt, Artificial Sequence
  Description of Artificial Sequence: Synthetic oligonucleotide
gaagucaaagcuggcacuc

SEQ ID NO: 1664516 - RNA, 19 nt, Artificial Sequence
  Description of Artificial Sequence: Synthetic oligonucleotide
auuaccaagcaggggcaac

SEQ ID NO: 1664517 - RNA, 19 nt, Artificial Sequence
  Description of Artificial Sequence: Synthetic oligonucleotide
uggagcuuauaaccuuaug

SEQ ID NO: 1664518 - RNA, 19 nt, Artificial Sequence
  Description of Artificial Sequence: Synthetic oligonucleotide
caggucagcacagugauca

SEQ ID NO: 1664519 - RNA, 19 nt, Artificial Sequence
  Description of Artificial Sequence: Synthetic oligonucleotide
agaugagacguguguauau

SEQ ID NO: 1664520 - RNA, 19 nt, Artificial Sequence
  Description of Artificial Sequence: Synthetic oligonucleotide
gcuuauaaccuuaugcaac

SEQ ID NO: 1664521 - RNA, 19 nt, Artificial Sequence
  Description of Artificial Sequence: Synthetic oligonucleotide
ucggaagucaaagcuggca

SEQ ID NO: 1664522 - RNA, 19 nt, Artificial Sequence
  Description of Artificial Sequence: Synthetic oligonucleotide
ugguaacccguauccacca

SEQ ID NO: 1664523 - RNA, 19 nt, Artificial Sequence
  Description of Artificial Sequence: Synthetic oligonucleotide
guuccaucccuuugugacc

SEQ ID NO: 1664524 - RNA, 19 nt, Artificial Sequence
  Description of Artificial Sequence: Synthetic oligonucleotide
uccguucacuauagaagac

SEQ ID NO: 1664525 - RNA, 19 nt, Artificial Sequence
  Description of Artificial Sequence: Synthetic oligonucleotide
caaugaagcgugaggcaug

SEQ ID NO: 1664526 - RNA, 19 nt, Artificial Sequence
  Description of Artificial Sequence: Synthetic oligonucleotide
aacccguauccaccaagga

SEQ ID NO: 1664527 - RNA, 19 nt, Artificial Sequence
  Description of Artificial Sequence: Synthetic oligonucleotide
cucgucaggcacaaagguc

SEQ ID NO: 1664528 - RNA, 19 nt, Artificial Sequence
  Description of Artificial Sequence: Synthetic oligonucleotide
accccuggcauagauguag

SEQ ID NO: 1664529 - RNA, 19 nt, Artificial Sequence
  Description of Artificial Sequence: Synthetic oligonucleotide
acaggcaccacguccguau

SEQ ID NO: 1664530 - RNA, 19 nt, Artificial Sequence
  Description of Artificial Sequence: Synthetic oligonucleotide
agccccauagucaggauug

SEQ ID NO: 1664531 - RNA, 19 nt, Artificial Sequence
  Description of Artificial Sequence: Synthetic oligonucleotide
aggauugggcugcacggug

SEQ ID NO: 1664532 - RNA, 19 nt, Artificial Sequence
  Description of Artificial Sequence: Synthetic oligonucleotide
aggggcaaccgauccuugg

SEQ ID NO: 1664533 - RNA, 19 nt, Artificial Sequence
  Description of Artificial Sequence: Synthetic oligonucleotide
ccaagauggagcuuauaac

SEQ ID NO: 1664534 - RNA, 19 nt, Artificial Sequence
  Description of Artificial Sequence: Synthetic oligonucleotide
caggccgcuucacaaacag

SEQ ID NO: 1664535 - RNA, 19 nt, Artificial Sequence
  Description of Artificial Sequence: Synthetic oligonucleotide
cugggauccccaccgcucg

SEQ ID NO: 1664536 - RNA, 19 nt, Artificial Sequence
  Description of Artificial Sequence: Synthetic oligonucleotide
cacucuucauguccugggc

SEQ ID NO: 1664537 - RNA, 19 nt, Artificial Sequence
  Description of Artificial Sequence: Synthetic oligonucleotide
uaccaagcaggggcaaccg

SEQ ID NO: 1664538 - RNA, 19 nt, Artificial Sequence
  Description of Artificial Sequence: Synthetic oligonucleotide
gacguguguauaugucaac

SEQ ID NO: 1664539 - RNA, 19 nt, Artificial Sequence
  Description of Artificial Sequence: Synthetic oligonucleotide
uauccucaaugaagcguga

SEQ ID NO: 1664540 - RNA, 19 nt, Artificial Sequence
  Description of Artificial Sequence: Synthetic oligonucleotide
uccguaaauuucugagcaa

SEQ ID NO: 1664541 - RNA, 19 nt, Artificial Sequence
  Description of Artificial Sequence: Synthetic oligonucleotide
cguaugggaguuuagcaag

SEQ ID NO: 1664542 - RNA, 19 nt, Artificial Sequence
  Description of Artificial Sequence: Synthetic oligonucleotide
aaacagccucaugcagucg

SEQ ID NO: 1664543 - RNA, 19 nt, Artificial Sequence
  Description of Artificial Sequence: Synthetic oligonucleotide
uauucggggcuccguaaau

SEQ ID NO: 1664544 - RNA, 19 nt, Artificial Sequence
  Description of Artificial Sequence: Synthetic oligonucleotide
ugugguucaugggcgagaa

SEQ ID NO: 1664545 - RNA, 19 nt, Artificial Sequence
  Description of Artificial Sequence: Synthetic oligonucleotide
gccguauccucaaugaagc

SEQ ID NO: 1664546 - RNA, 19 nt, Artificial Sequence
  Description of Artificial Sequence: Synthetic oligonucleotide
ugugugguucaugggcgag

SEQ ID NO: 1664547 - RNA, 19 nt, Artificial Sequence
  Description of Artificial Sequence: Synthetic oligonucleotide
caauggcagccccauaguc

SEQ ID NO: 1664548 - RNA, 19 nt, Artificial Sequence
  Description of Artificial Sequence: Synthetic oligonucleotide
ggaguguaggguuggugcc

SEQ ID NO: 1664549 - RNA, 19 nt, Artificial Sequence
  Description of Artificial Sequence: Synthetic oligonucleotide
gcuccguaaauuucugagc

SEQ ID NO: 1664550 - RNA, 19 nt, Artificial Sequence
  Description of Artificial Sequence: Synthetic oligonucleotide
guguauaugucaaccccac

SEQ ID NO: 1664551 - RNA, 19 nt, Artificial Sequence
  Description of Artificial Sequence: Synthetic oligonucleotide
gccaagauggagcuuauaa

SEQ ID NO: 1664552 - RNA, 19 nt, Artificial Sequence
  Description of Artificial Sequence: Synthetic oligonucleotide
aaccgauccuuggcagugg

SEQ ID NO: 1664553 - RNA, 19 nt, Artificial Sequence
  Description of Artificial Sequence: Synthetic oligonucleotide
uggcgggcacgcuagcaag

SEQ ID NO: 1664554 - RNA, 19 nt, Artificial Sequence
  Description of Artificial Sequence: Synthetic oligonucleotide
guccguaugggaguuuagc

SEQ ID NO: 1664555 - RNA, 19 nt, Artificial Sequence
  Description of Artificial Sequence: Synthetic oligonucleotide
aggcaccacguccguaugg

SEQ ID NO: 1664556 - RNA, 19 nt, Artificial Sequence
  Description of Artificial Sequence: Synthetic oligonucleotide
gugaggguucgccugcagc

SEQ ID NO: 1664557 - RNA, 19 nt, Artificial Sequence
  Description of Artificial Sequence: Synthetic oligonucleotide
ccaccgcucggauauaacg

SEQ ID NO: 1664558 - RNA, 19 nt, Artificial Sequence
  Description of Artificial Sequence: Synthetic oligonucleotide
cuucauguccugggcaccc

SEQ ID NO: 1664559 - RNA, 19 nt, Artificial Sequence
  Description of Artificial Sequence: Synthetic oligonucleotide
cagggauuugagucaucag

SEQ ID NO: 1664560 - RNA, 19 nt, Artificial Sequence
  Description of Artificial Sequence: Synthetic oligonucleotide
uucggggcuccguaaauuu

SEQ ID NO: 1664561 - RNA, 19 nt, Artificial Sequence
  Description of Artificial Sequence: Synthetic oligonucleotide
uaacggcugucaguggcag

SEQ ID NO: 1664562 - RNA, 19 nt, Artificial Sequence
  Description of Artificial Sequence: Synthetic oligonucleotide
aagucaaagcuggcacuca

SEQ ID NO: 1664563 - RNA, 19 nt, Artificial Sequence
  Description of Artificial Sequence: Synthetic oligonucleotide
guuuagcaagauggagggg

SEQ ID NO: 1664564 - RNA, 19 nt, Artificial Sequence
  Description of Artificial Sequence: Synthetic oligonucleotide
uugguggucauggcgccgc

SEQ ID NO: 1664565 - RNA, 19 nt, Artificial Sequence
  Description of Artificial Sequence: Synthetic oligonucleotide
agcagcacggguguguggu

SEQ ID NO: 1664566 - RNA, 19 nt, Artificial Sequence
  Description of Artificial Sequence: Synthetic oligonucleotide
guucaugggcgagaagccc

SEQ ID NO: 1664567 - RNA, 19 nt, Artificial Sequence
  Description of Artificial Sequence: Synthetic oligonucleotide
gguggaugguucuagggaa

SEQ ID NO: 1664568 - RNA, 19 nt, Artificial Sequence
  Description of Artificial Sequence: Synthetic oligonucleotide
gauggagcuuauaaccuua

SEQ ID NO: 1664569 - RNA, 19 nt, Artificial Sequence
  Description of Artificial Sequence: Synthetic oligonucleotide
aggacuccguucacuauag

SEQ ID NO: 1664570 - RNA, 19 nt, Artificial Sequence
  Description of Artificial Sequence: Synthetic oligonucleotide
auuauaggccacaccgccu

SEQ ID NO: 1664571 - RNA, 19 nt, Artificial Sequence
  Description of Artificial Sequence: Synthetic oligonucleotide
gaggggaguguaggguugg

SEQ ID NO: 1664572 - RNA, 19 nt, Artificial Sequence
  Description of Artificial Sequence: Synthetic oligonucleotide
caagcaggggcaaccgauc

SEQ ID NO: 1664573 - RNA, 19 nt, Artificial Sequence
  Description of Artificial Sequence: Synthetic oligonucleotide
ggccacaccgccuucgagc

SEQ ID NO: 1664574 - RNA, 19 nt, Artificial Sequence
  Description of Artificial Sequence: Synthetic oligonucleotide
gcgagaagcccagagcugg

SEQ ID NO: 1664575 - RNA, 19 nt, Artificial Sequence
  Description of Artificial Sequence: Synthetic oligonucleotide
ucccuuugugaccuccgau

SEQ ID NO: 1664576 - RNA, 19 nt, Artificial Sequence
  Description of Artificial Sequence: Synthetic oligonucleotide
gucaaccccacggagaaaa

SEQ ID NO: 1664577 - RNA, 19 nt, Artificial Sequence
  Description of Artificial Sequence: Synthetic oligonucleotide
aggguucgccugcagccuc

SEQ ID NO: 1664578 - RNA, 19 nt, Artificial Sequence
  Description of Artificial Sequence: Synthetic oligonucleotide
uauccaccaaggacuccgu

SEQ ID NO: 1664579 - RNA, 19 nt, Artificial Sequence
  Description of Artificial Sequence: Synthetic oligonucleotide
uggucauggcgccgcgugc

SEQ ID NO: 1664580 - RNA, 19 nt, Artificial Sequence
  Description of Artificial Sequence: Synthetic oligonucleotide
uaugggaguuuagcaagau

SEQ ID NO: 1664581 - RNA, 19 nt, Artificial Sequence
  Description of Artificial Sequence: Synthetic oligonucleotide
ugcagucguucguuguggu

SEQ ID NO: 1664582 - RNA, 19 nt, Artificial Sequence
  Description of Artificial Sequence: Synthetic oligonucleotide
guuauucggggcuccguaa

SEQ ID NO: 1664583 - RNA, 19 nt, Artificial Sequence
  Description of Artificial Sequence: Synthetic oligonucleotide
augguucuagggaagcggu

SEQ ID NO: 1664584 - RNA, 19 nt, Artificial Sequence
  Description of Artificial Sequence: Synthetic oligonucleotide
ugggauccccaccgcucgg

SEQ ID NO: 1664585 - RNA, 19 nt, Artificial Sequence
  Description of Artificial Sequence: Synthetic oligonucleotide
ggcaaccgauccuuggcag

SEQ ID NO: 1664586 - RNA, 19 nt, Artificial Sequence
  Description of Artificial Sequence: Synthetic oligonucleotide
caucggugggguuggccag

SEQ ID NO: 1664587 - RNA, 19 nt, Artificial Sequence
  Description of Artificial Sequence: Synthetic oligonucleotide
ccgcuucacaaacaguucc

SEQ ID NO: 1664588 - RNA, 19 nt, Artificial Sequence
  Description of Artificial Sequence: Synthetic oligonucleotide
ucggggcuccguaaauuuc

SEQ ID NO: 1664589 - RNA, 19 nt, Artificial Sequence
  Description of Artificial Sequence: Synthetic oligonucleotide
cuuugugaccuccgaucuc

SEQ ID NO: 1664590 - RNA, 19 nt, Artificial Sequence
  Description of Artificial Sequence: Synthetic oligonucleotide
gagcaaacucaaaggugac

SEQ ID NO: 1664591 - RNA, 19 nt, Artificial Sequence
  Description of Artificial Sequence: Synthetic oligonucleotide
aucccuuugugaccuccga

SEQ ID NO: 1664592 - RNA, 19 nt, Artificial Sequence
  Description of Artificial Sequence: Synthetic oligonucleotide
gguucaugggcgagaagcc

SEQ ID NO: 1664593 - RNA, 19 nt, Artificial Sequence
  Description of Artificial Sequence: Synthetic oligonucleotide
uuauaaccuuaugcaacuu

SEQ ID NO: 1664594 - RNA, 19 nt, Artificial Sequence
  Description of Artificial Sequence: Synthetic oligonucleotide
ggaugguucuagggaagcg

SEQ ID NO: 1664595 - RNA, 19 nt, Artificial Sequence
  Description of Artificial Sequence: Synthetic oligonucleotide
cacggaggggugcucggcc

SEQ ID NO: 1664596 - RNA, 19 nt, Artificial Sequence
  Description of Artificial Sequence: Synthetic oligonucleotide
acggccccuuccuuuaggu

SEQ ID NO: 1664597 - RNA, 19 nt, Artificial Sequence
  Description of Artificial Sequence: Synthetic oligonucleotide
auggcgggcacgcuagcaa

SEQ ID NO: 1664598 - RNA, 19 nt, Artificial Sequence
  Description of Artificial Sequence: Synthetic oligonucleotide
uacugacacucuucauguc

SEQ ID NO: 1664599 - RNA, 19 nt, Artificial Sequence
  Description of Artificial Sequence: Synthetic oligonucleotide
cguaaauuucugagcaaac

SEQ ID NO: 1664600 - RNA, 19 nt, Artificial Sequence
  Description of Artificial Sequence: Synthetic oligonucleotide
ggggcaaccgauccuuggc

SEQ ID NO: 1664601 - RNA, 19 nt, Artificial Sequence
  Description of Artificial Sequence: Synthetic oligonucleotide
agucacggccccuuccuuu

SEQ ID NO: 1664602 - RNA, 19 nt, Artificial Sequence
  Description of Artificial Sequence: Synthetic oligonucleotide
gagaugagacguguguaua

SEQ ID NO: 1664603 - RNA, 19 nt, Artificial Sequence
  Description of Artificial Sequence: Synthetic oligonucleotide
agcacgggugugugguuca

SEQ ID NO: 1664604 - RNA, 19 nt, Artificial Sequence
  Description of Artificial Sequence: Synthetic oligonucleotide
accgauccuuggcaguggu

SEQ ID NO: 1664605 - RNA, 19 nt, Artificial Sequence
  Description of Artificial Sequence: Synthetic oligonucleotide
uacuggcggaagagcguca

SEQ ID NO: 1664606 - RNA, 19 nt, Artificial Sequence
  Description of Artificial Sequence: Synthetic oligonucleotide
agucguucguuguggucau

SEQ ID NO: 1664607 - RNA, 19 nt, Artificial Sequence
  Description of Artificial Sequence: Synthetic oligonucleotide
ccuccgaucuccucgucag

SEQ ID NO: 1664608 - RNA, 19 nt, Artificial Sequence
  Description of Artificial Sequence: Synthetic oligonucleotide
guacuggcggaagagcguc

SEQ ID NO: 1664609 - RNA, 19 nt, Artificial Sequence
  Description of Artificial Sequence: Synthetic oligonucleotide
guaugggaguuuagcaaga

SEQ ID NO: 1664610 - RNA, 19 nt, Artificial Sequence
  Description of Artificial Sequence: Synthetic oligonucleotide
cugacacucuucauguccu

SEQ ID NO: 1664611 - RNA, 19 nt, Artificial Sequence
  Description of Artificial Sequence: Synthetic oligonucleotide
ggauauaacggcugucagu

SEQ ID NO: 1664612 - RNA, 19 nt, Artificial Sequence
  Description of Artificial Sequence: Synthetic oligonucleotide
cuccgaucuccucgucagg

SEQ ID NO: 1664613 - RNA, 19 nt, Artificial Sequence
  Description of Artificial Sequence: Synthetic oligonucleotide
cacggccccuuccuuuagg

SEQ ID NO: 1664614 - RNA, 19 nt, Artificial Sequence
  Description of Artificial Sequence: Synthetic oligonucleotide
uggguguuauucggggcuc

SEQ ID NO: 1664615 - RNA, 19 nt, Artificial Sequence
  Description of Artificial Sequence: Synthetic oligonucleotide
gaucuccucgucaggcaca

SEQ ID NO: 1664616 - RNA, 19 nt, Artificial Sequence
  Description of Artificial Sequence: Synthetic oligonucleotide
agcgguggcccucacucuu

SEQ ID NO: 1664617 - RNA, 19 nt, Artificial Sequence
  Description of Artificial Sequence: Synthetic oligonucleotide
cccguauccaccaaggacu

SEQ ID NO: 1664618 - RNA, 19 nt, Artificial Sequence
  Description of Artificial Sequence: Synthetic oligonucleotide
ggcacaaaggucaggugga

SEQ ID NO: 1664619 - RNA, 19 nt, Artificial Sequence
  Description of Artificial Sequence: Synthetic oligonucleotide
agcccucagaauccuugaa

SEQ ID NO: 1664620 - RNA, 19 nt, Artificial Sequence
  Description of Artificial Sequence: Synthetic oligonucleotide
acagaagucacggccccuu

SEQ ID NO: 1664621 - RNA, 19 nt, Artificial Sequence
  Description of Artificial Sequence: Synthetic oligonucleotide
acggaggggugcucggccu

SEQ ID NO: 1664622 - RNA, 19 nt, Artificial Sequence
  Description of Artificial Sequence: Synthetic oligonucleotide
cucggauauaacggcuguc

SEQ ID NO: 1664623 - RNA, 19 nt, Artificial Sequence
  Description of Artificial Sequence: Synthetic oligonucleotide
gaggcauggcccggcuucc

SEQ ID NO: 1664624 - RNA, 19 nt, Artificial Sequence
  Description of Artificial Sequence: Synthetic oligonucleotide
gaagagcgucacggagggg

SEQ ID NO: 1664625 - RNA, 19 nt, Artificial Sequence
  Description of Artificial Sequence: Synthetic oligonucleotide
cgauccuuggcagugguug

SEQ ID NO: 1664626 - RNA, 19 nt, Artificial Sequence
  Description of Artificial Sequence: Synthetic oligonucleotide
cuuaugcaacuucucugcu

SEQ ID NO: 1664627 - RNA, 19 nt, Artificial Sequence
  Description of Artificial Sequence: Synthetic oligonucleotide
agucaggauugggcugcac

SEQ ID NO: 1664628 - RNA, 19 nt, Artificial Sequence
  Description of Artificial Sequence: Synthetic oligonucleotide
ccaccaaggacuccguuca

SEQ ID NO: 1664629 - RNA, 19 nt, Artificial Sequence
  Description of Artificial Sequence: Synthetic oligonucleotide
auucggggcuccguaaauu

SEQ ID NO: 1664630 - RNA, 19 nt, Artificial Sequence
  Description of Artificial Sequence: Synthetic oligonucleotide
ccguauccucaaugaagcg

SEQ ID NO: 1664631 - RNA, 19 nt, Artificial Sequence
  Description of Artificial Sequence: Synthetic oligonucleotide
agucaucaguggguguuau

SEQ ID NO: 1664632 - RNA, 19 nt, Artificial Sequence
  Description of Artificial Sequence: Synthetic oligonucleotide
ggauugggcugcacggugc

SEQ ID NO: 1664633 - RNA, 19 nt, Artificial Sequence
  Description of Artificial Sequence: Synthetic oligonucleotide
gggaguuuagcaagaugga

SEQ ID NO: 1664634 - RNA, 19 nt, Artificial Sequence
  Description of Artificial Sequence: Synthetic oligonucleotide
ccgccuucgagcuuaguca

SEQ ID NO: 1664635 - RNA, 19 nt, Artificial Sequence
  Description of Artificial Sequence: Synthetic oligonucleotide
gugguucaugggcgagaag

SEQ ID NO: 1664636 - RNA, 19 nt, Artificial Sequence
  Description of Artificial Sequence: Synthetic oligonucleotide
gggugcucggccucgggac

SEQ ID NO: 1664637 - RNA, 19 nt, Artificial Sequence
  Description of Artificial Sequence: Synthetic oligonucleotide
agagcgucacggaggggug

SEQ ID NO: 1664638 - RNA, 19 nt, Artificial Sequence
  Description of Artificial Sequence: Synthetic oligonucleotide
auggagcuuauaaccuuau

SEQ ID NO: 1664639 - RNA, 19 nt, Artificial Sequence
  Description of Artificial Sequence: Synthetic oligonucleotide
gguauuggauacugacacu

SEQ ID NO: 1664640 - RNA, 19 nt, Artificial Sequence
  Description of Artificial Sequence: Synthetic oligonucleotide
agguuggaaggcacagggu

SEQ ID NO: 1664641 - RNA, 19 nt, Artificial Sequence
  Description of Artificial Sequence: Synthetic oligonucleotide
ccguaugggaguuuagcaa

SEQ ID NO: 1664642 - RNA, 19 nt, Artificial Sequence
  Description of Artificial Sequence: Synthetic oligonucleotide
gggcaaccgauccuuggca

SEQ ID NO: 1664643 - RNA, 19 nt, Artificial Sequence
  Description of Artificial Sequence: Synthetic oligonucleotide
cugcacggugcggaugcgc

SEQ ID NO: 1664644 - RNA, 19 nt, Artificial Sequence
  Description of Artificial Sequence: Synthetic oligonucleotide
acguccguaugggaguuua

SEQ ID NO: 1664645 - RNA, 19 nt, Artificial Sequence
  Description of Artificial Sequence: Synthetic oligonucleotide
uagggaagcgguggcccuc

SEQ ID NO: 1664646 - RNA, 19 nt, Artificial Sequence
  Description of Artificial Sequence: Synthetic oligonucleotide
caggcaccacguccguaug

SEQ ID NO: 1664647 - RNA, 19 nt, Artificial Sequence
  Description of Artificial Sequence: Synthetic oligonucleotide
ccagggauuugagucauca

SEQ ID NO: 1664648 - RNA, 19 nt, Artificial Sequence
  Description of Artificial Sequence: Synthetic oligonucleotide
cugccguauccucaaugaa

SEQ ID NO: 1664649 - RNA, 19 nt, Artificial Sequence
  Description of Artificial Sequence: Synthetic oligonucleotide
cagcacgggugugugguuc

SEQ ID NO: 1664650 - RNA, 19 nt, Artificial Sequence
  Description of Artificial Sequence: Synthetic oligonucleotide
cccuggcauagauguagcc

SEQ ID NO: 1664651 - RNA, 19 nt, Artificial Sequence
  Description of Artificial Sequence: Synthetic oligonucleotide
ggugaggguucgccugcag

SEQ ID NO: 1664652 - RNA, 19 nt, Artificial Sequence
  Description of Artificial Sequence: Synthetic oligonucleotide
gauccccaccgcucggaua

SEQ ID NO: 1664653 - RNA, 19 nt, Artificial Sequence
  Description of Artificial Sequence: Synthetic oligonucleotide
gugugguucaugggcgaga

SEQ ID NO: 1664654 - RNA, 19 nt, Artificial Sequence
  Description of Artificial Sequence: Synthetic oligonucleotide
cacaccgccuucgagcuua

SEQ ID NO: 1664655 - RNA, 19 nt, Artificial Sequence
  Description of Artificial Sequence: Synthetic oligonucleotide
ccguaaauuucugagcaaa

SEQ ID NO: 1664656 - RNA, 19 nt, Artificial Sequence
  Description of Artificial Sequence: Synthetic oligonucleotide
caccaaggacuccguucac

SEQ ID NO: 1664657 - RNA, 19 nt, Artificial Sequence
  Description of Artificial Sequence: Synthetic oligonucleotide
cgccuucgagcuuagucag

SEQ ID NO: 1664658 - RNA, 19 nt, Artificial Sequence
  Description of Artificial Sequence: Synthetic oligonucleotide
uagucaggauugggcugca

SEQ ID NO: 1664659 - RNA, 19 nt, Artificial Sequence
  Description of Artificial Sequence: Synthetic oligonucleotide
ccguucacuauagaagaca

SEQ ID NO: 1664660 - RNA, 19 nt, Artificial Sequence
  Description of Artificial Sequence: Synthetic oligonucleotide
gagucaucaguggguguua

SEQ ID NO: 1664661 - RNA, 19 nt, Artificial Sequence
  Description of Artificial Sequence: Synthetic oligonucleotide
agggaagcgguggcccuca

SEQ ID NO: 1664662 - RNA, 19 nt, Artificial Sequence
  Description of Artificial Sequence: Synthetic oligonucleotide
ggaggggugcucggccucg

SEQ ID NO: 1664663 - RNA, 19 nt, Artificial Sequence
  Description of Artificial Sequence: Synthetic oligonucleotide
auguagcagcacgggugug

SEQ ID NO: 1664664 - RNA, 19 nt, Artificial Sequence
  Description of Artificial Sequence: Synthetic oligonucleotide
ccguauccaccaaggacuc

SEQ ID NO: 1664665 - RNA, 19 nt, Artificial Sequence
  Description of Artificial Sequence: Synthetic oligonucleotide
gcagucguucguugugguc

SEQ ID NO: 1664666 - RNA, 19 nt, Artificial Sequence
  Description of Artificial Sequence: Synthetic oligonucleotide
ggcggaagagcgucacgga

SEQ ID NO: 1664667 - RNA, 19 nt, Artificial Sequence
  Description of Artificial Sequence: Synthetic oligonucleotide
ccccuggcauagauguagc

SEQ ID NO: 1664668 - RNA, 19 nt, Artificial Sequence
  Description of Artificial Sequence: Synthetic oligonucleotide
gccccuuccuuuaggugag

SEQ ID NO: 1664669 - RNA, 19 nt, Artificial Sequence
  Description of Artificial Sequence: Synthetic oligonucleotide
ggccgcuucacaaacaguu

SEQ ID NO: 1664670 - RNA, 19 nt, Artificial Sequence
  Description of Artificial Sequence: Synthetic oligonucleotide
cgcucggauauaacggcug

SEQ ID NO: 1664671 - RNA, 19 nt, Artificial Sequence
  Description of Artificial Sequence: Synthetic oligonucleotide
cauggcgggcacgcuagca

SEQ ID NO: 1664672 - RNA, 19 nt, Artificial Sequence
  Description of Artificial Sequence: Synthetic oligonucleotide
ugccaagauggagcuuaua

SEQ ID NO: 1664673 - RNA, 19 nt, Artificial Sequence
  Description of Artificial Sequence: Synthetic oligonucleotide
ccuuugugaccuccgaucu

SEQ ID NO: 1664674 - RNA, 19 nt, Artificial Sequence
  Description of Artificial Sequence: Synthetic oligonucleotide
cuagggaagcgguggcccu

SEQ ID NO: 1664675 - RNA, 19 nt, Artificial Sequence
  Description of Artificial Sequence: Synthetic oligonucleotide
uccaucccuuugugaccuc

SEQ ID NO: 1664676 - RNA, 19 nt, Artificial Sequence
  Description of Artificial Sequence: Synthetic oligonucleotide
gggcuccguaaauuucuga

SEQ ID NO: 1664677 - RNA, 19 nt, Artificial Sequence
  Description of Artificial Sequence: Synthetic oligonucleotide
ggggcuccguaaauuucug

SEQ ID NO: 1664678 - RNA, 19 nt, Artificial Sequence
  Description of Artificial Sequence: Synthetic oligonucleotide
gaccuccgaucuccucguc

SEQ ID NO: 1664679 - RNA, 19 nt, Artificial Sequence
  Description of Artificial Sequence: Synthetic oligonucleotide
gguaacccguauccaccaa

SEQ ID NO: 1664680 - RNA, 19 nt, Artificial Sequence
  Description of Artificial Sequence: Synthetic oligonucleotide
ggggugcucggccucggga

SEQ ID NO: 1664681 - RNA, 19 nt, Artificial Sequence
  Description of Artificial Sequence: Synthetic oligonucleotide
aggccgcuucacaaacagu

SEQ ID NO: 1664682 - RNA, 19 nt, Artificial Sequence
  Description of Artificial Sequence: Synthetic oligonucleotide
aggggaguguaggguuggu

SEQ ID NO: 1664683 - RNA, 19 nt, Artificial Sequence
  Description of Artificial Sequence: Synthetic oligonucleotide
caaggacuccguucacuau

SEQ ID NO: 1664684 - RNA, 19 nt, Artificial Sequence
  Description of Artificial Sequence: Synthetic oligonucleotide
augccaagauggagcuuau

SEQ ID NO: 1664685 - RNA, 19 nt, Artificial Sequence
  Description of Artificial Sequence: Synthetic oligonucleotide
gcgggcacgcuagcaagug

SEQ ID NO: 1664686 - RNA, 19 nt, Artificial Sequence
  Description of Artificial Sequence: Synthetic oligonucleotide
gguacuggcggaagagcgu

SEQ ID NO: 1664687 - RNA, 19 nt, Artificial Sequence
  Description of Artificial Sequence: Synthetic oligonucleotide
cgucacggaggggugcucg

SEQ ID NO: 1664688 - RNA, 19 nt, Artificial Sequence
  Description of Artificial Sequence: Synthetic oligonucleotide
cccaccgcucggauauaac

SEQ ID NO: 1664689 - RNA, 19 nt, Artificial Sequence
  Description of Artificial Sequence: Synthetic oligonucleotide
guguuauucggggcuccgu

SEQ ID NO: 1664690 - RNA, 19 nt, Artificial Sequence
  Description of Artificial Sequence: Synthetic oligonucleotide
cagccuccagguauuggau

SEQ ID NO: 1664691 - RNA, 19 nt, Artificial Sequence
  Description of Artificial Sequence: Synthetic oligonucleotide
ccgcugaaagcugcccacc

SEQ ID NO: 1664692 - RNA, 19 nt, Artificial Sequence
  Description of Artificial Sequence: Synthetic oligonucleotide
gucguucguuguggucaug

SEQ ID NO: 1664693 - RNA, 19 nt, Artificial Sequence
  Description of Artificial Sequence: Synthetic oligonucleotide
cauggcccggcuucccagu

SEQ ID NO: 1664694 - RNA, 19 nt, Artificial Sequence
  Description of Artificial Sequence: Synthetic oligonucleotide
ggacuccguucacuauaga

SEQ ID NO: 1664695 - RNA, 19 nt, Artificial Sequence
  Description of Artificial Sequence: Synthetic oligonucleotide
cguccguaugggaguuuag

SEQ ID NO: 1664696 - RNA, 19 nt, Artificial Sequence
  Description of Artificial Sequence: Synthetic oligonucleotide
cguauccucaaugaagcgu

SEQ ID NO: 1664697 - RNA, 19 nt, Artificial Sequence
  Description of Artificial Sequence: Synthetic oligonucleotide
ccuuuaggugaggguucgc

SEQ ID NO: 1664698 - RNA, 19 nt, Artificial Sequence
  Description of Artificial Sequence: Synthetic oligonucleotide
ggucauggcgccgcgugcu

SEQ ID NO: 1664699 - RNA, 19 nt, Artificial Sequence
  Description of Artificial Sequence: Synthetic oligonucleotide
gcauggcgggcacgcuagc

SEQ ID NO: 1664700 - RNA, 19 nt, Artificial Sequence
  Description of Artificial Sequence: Synthetic oligonucleotide
gcgcagguacuggcggaag

SEQ ID NO: 1664701 - RNA, 19 nt, Artificial Sequence
  Description of Artificial Sequence: Synthetic oligonucleotide
ccucuacuuucugacagcu

SEQ ID NO: 1664702 - RNA, 19 nt, Artificial Sequence
  Description of Artificial Sequence: Synthetic oligonucleotide
cuucgagcuuagucagauu

SEQ ID NO: 1664703 - RNA, 19 nt, Artificial Sequence
  Description of Artificial Sequence: Synthetic oligonucleotide
gggauccccaccgcucgga

SEQ ID NO: 1664704 - RNA, 19 nt, Artificial Sequence
  Description of Artificial Sequence: Synthetic oligonucleotide
gugccacucggaagucaaa

SEQ ID NO: 1664705 - RNA, 19 nt, Artificial Sequence
  Description of Artificial Sequence: Synthetic oligonucleotide
caccagggauuugagucau

SEQ ID NO: 1664706 - RNA, 19 nt, Artificial Sequence
  Description of Artificial Sequence: Synthetic oligonucleotide
caugggcgagaagcccaga

SEQ ID NO: 1664707 - RNA, 19 nt, Artificial Sequence
  Description of Artificial Sequence: Synthetic oligonucleotide
ccuucgagcuuagucagau

SEQ ID NO: 1664708 - RNA, 19 nt, Artificial Sequence
  Description of Artificial Sequence: Synthetic oligonucleotide
cguauccaccaaggacucc

SEQ ID NO: 1664709 - RNA, 19 nt, Artificial Sequence
  Description of Artificial Sequence: Synthetic oligonucleotide
cuccagaguaagguucauu

SEQ ID NO: 1664710 - RNA, 19 nt, Artificial Sequence
  Description of Artificial Sequence: Synthetic oligonucleotide
cggggcuccguaaauuucu

SEQ ID NO: 1664711 - RNA, 19 nt, Artificial Sequence
  Description of Artificial Sequence: Synthetic oligonucleotide
gugaggcauggcccggcuu

SEQ ID NO: 1664712 - RNA, 19 nt, Artificial Sequence
  Description of Artificial Sequence: Synthetic oligonucleotide
gccuucgagcuuagucaga

SEQ ID NO: 1664713 - RNA, 19 nt, Artificial Sequence
  Description of Artificial Sequence: Synthetic oligonucleotide
gguuggugccuggccaggu

SEQ ID NO: 1664714 - RNA, 19 nt, Artificial Sequence
  Description of Artificial Sequence: Synthetic oligonucleotide
uccccaccgcucggauaua

SEQ ID NO: 1664715 - RNA, 19 nt, Artificial Sequence
  Description of Artificial Sequence: Synthetic oligonucleotide
gcgguggcccucacucuuc

SEQ ID NO: 1664716 - RNA, 19 nt, Artificial Sequence
  Description of Artificial Sequence: Synthetic oligonucleotide
gccaggcaccaccucuacu

SEQ ID NO: 1664717 - RNA, 19 nt, Artificial Sequence
  Description of Artificial Sequence: Synthetic oligonucleotide
ccgcucggauauaacggcu

SEQ ID NO: 1664718 - RNA, 19 nt, Artificial Sequence
  Description of Artificial Sequence: Synthetic oligonucleotide
ggauccccaccgcucggau

SEQ ID NO: 1664719 - RNA, 19 nt, Artificial Sequence
  Description of Artificial Sequence: Synthetic oligonucleotide
cguucguuguggucaugua

SEQ ID NO: 1664720 - RNA, 19 nt, Artificial Sequence
  Description of Artificial Sequence: Synthetic oligonucleotide
cgcuagcaagugcagagau

SEQ ID NO: 1664721 - RNA, 19 nt, Artificial Sequence
  Description of Artificial Sequence: Synthetic oligonucleotide
gggcaccccuggcauagau

SEQ ID NO: 1664722 - RNA, 19 nt, Artificial Sequence
  Description of Artificial Sequence: Synthetic oligonucleotide
ggcgggcacgcuagcaagu

SEQ ID NO: 1664723 - RNA, 19 nt, Artificial Sequence
  Description of Artificial Sequence: Synthetic oligonucleotide
ccucgccugcuuccuggca

SEQ ID NO: 1664724 - RNA, 19 nt, Artificial Sequence
  Description of Artificial Sequence: Synthetic oligonucleotide
caggcauggcgggcacgcu

SEQ ID NO: 1664725 - RNA, 19 nt, Artificial Sequence
  Description of Artificial Sequence: Synthetic oligonucleotide
ccccaccgcucggauauaa

SEQ ID NO: 1664726 - RNA, 19 nt, Artificial Sequence
  Description of Artificial Sequence: Synthetic oligonucleotide
gcgucacggaggggugcuc

SEQ ID NO: 1664727 - RNA, 19 nt, Artificial Sequence
  Description of Artificial Sequence: Synthetic oligonucleotide
gcccggcuucccagugcug

SEQ ID NO: 1664728 - RNA, 19 nt, Artificial Sequence
  Description of Artificial Sequence: Synthetic oligonucleotide
gcagcacgggugugugguu

SEQ ID NO: 1664729 - RNA, 19 nt, Artificial Sequence
  Description of Artificial Sequence: Synthetic oligonucleotide
cacguccguaugggaguuu

SEQ ID NO: 1664730 - RNA, 19 nt, Artificial Sequence
  Description of Artificial Sequence: Synthetic oligonucleotide
ccgauccuuggcagugguu

SEQ ID NO: 1664731 - RNA, 19 nt, Artificial Sequence
  Description of Artificial Sequence: Synthetic oligonucleotide
ccacguccguaugggaguu

SEQ ID NO: 1664732 - RNA, 19 nt, Artificial Sequence
  Description of Artificial Sequence: Synthetic oligonucleotide
caccgccuucgagcuuagu

SEQ ID NO: 1664733 - RNA, 19 nt, Artificial Sequence
  Description of Artificial Sequence: Synthetic oligonucleotide
ccacaccgccuucgagcuu

SEQ ID NO: 1664734 - RNA, 19 nt, Artificial Sequence
  Description of Artificial Sequence: Synthetic oligonucleotide
cggugcggaugcgcaggua

SEQ ID NO: 1664735 - RNA, 19 nt, Artificial Sequence
  Description of Artificial Sequence: Synthetic oligonucleotide
aaagcuuagaacuuaagac

SEQ ID NO: 1664736 - RNA, 19 nt, Artificial Sequence
  Description of Artificial Sequence: Synthetic oligonucleotide
aaagauuuaguuuccacac

SEQ ID NO: 1664737 - RNA, 19 nt, Artificial Sequence
  Description of Artificial Sequence: Synthetic oligonucleotide
agacuuaaaaguuuaaagc

SEQ ID NO: 1664738 - RNA, 19 nt, Artificial Sequence
  Description of Artificial Sequence: Synthetic oligonucleotide
uauugagagauccauaugg

SEQ ID NO: 1664739 - RNA, 19 nt, Artificial Sequence
  Description of Artificial Sequence: Synthetic oligonucleotide
agaaauaagacuuggaaag

SEQ ID NO: 1664740 - RNA, 19 nt, Artificial Sequence
  Description of Artificial Sequence: Synthetic oligonucleotide
aaauauaaauguuuacguc

SEQ ID NO: 1664741 - RNA, 19 nt, Artificial Sequence
  Description of Artificial Sequence: Synthetic oligonucleotide
ugucauucaaccacgaagg

SEQ ID NO: 1664742 - RNA, 19 nt, Artificial Sequence
  Description of Artificial Sequence: Synthetic oligonucleotide
agagaaauuacuuaagugu

SEQ ID NO: 1664743 - RNA, 19 nt, Artificial Sequence
  Description of Artificial Sequence: Synthetic oligonucleotide
aaaagauuuaguuuccaca

SEQ ID NO: 1664744 - RNA, 19 nt, Artificial Sequence
  Description of Artificial Sequence: Synthetic oligonucleotide
uuuauaaccagugacauaa

SEQ ID NO: 1664745 - RNA, 19 nt, Artificial Sequence
  Description of Artificial Sequence: Synthetic oligonucleotide
aguucugucauucaaccac

SEQ ID NO: 1664746 - RNA, 19 nt, Artificial Sequence
  Description of Artificial Sequence: Synthetic oligonucleotide
uuaauaugaaccaugggaa

SEQ ID NO: 1664747 - RNA, 19 nt, Artificial Sequence
  Description of Artificial Sequence: Synthetic oligonucleotide
uuauccuagagaaauaaga

SEQ ID NO: 1664748 - RNA, 19 nt, Artificial Sequence
  Description of Artificial Sequence: Synthetic oligonucleotide
aagagaaauuacuuaagug

SEQ ID NO: 1664749 - RNA, 19 nt, Artificial Sequence
  Description of Artificial Sequence: Synthetic oligonucleotide
uaagucacagaguagaucu

SEQ ID NO: 1664750 - RNA, 19 nt, Artificial Sequence
  Description of Artificial Sequence: Synthetic oligonucleotide
uucagacucagacuuaacg

SEQ ID NO: 1664751 - RNA, 19 nt, Artificial Sequence
  Description of Artificial Sequence: Synthetic oligonucleotide
cuugaauguaguuaaaaug

SEQ ID NO: 1664752 - RNA, 19 nt, Artificial Sequence
  Description of Artificial Sequence: Synthetic oligonucleotide
cuuaauaugaaccauggga

SEQ ID NO: 1664753 - RNA, 19 nt, Artificial Sequence
  Description of Artificial Sequence: Synthetic oligonucleotide
uccauuaguccuuacagag

SEQ ID NO: 1664754 - RNA, 19 nt, Artificial Sequence
  Description of Artificial Sequence: Synthetic oligonucleotide
aagauuaguagccucaaau

SEQ ID NO: 1664755 - RNA, 19 nt, Artificial Sequence
  Description of Artificial Sequence: Synthetic oligonucleotide
uuuggcaucauaucaaaga

SEQ ID NO: 1664756 - RNA, 19 nt, Artificial Sequence
  Description of Artificial Sequence: Synthetic oligonucleotide
uuuuaagucacagaguaga

SEQ ID NO: 1664757 - RNA, 19 nt, Artificial Sequence
  Description of Artificial Sequence: Synthetic oligonucleotide
acaugcauuacccaguaag

SEQ ID NO: 1664758 - RNA, 19 nt, Artificial Sequence
  Description of Artificial Sequence: Synthetic oligonucleotide
agcccuuucaaacuauugc

SEQ ID NO: 1664759 - RNA, 19 nt, Artificial Sequence
  Description of Artificial Sequence: Synthetic oligonucleotide
gaacuuaagacuuaaaagu

SEQ ID NO: 1664760 - RNA, 19 nt, Artificial Sequence
  Description of Artificial Sequence: Synthetic oligonucleotide
ucauaucaaagauuaguag

SEQ ID NO: 1664761 - RNA, 19 nt, Artificial Sequence
  Description of Artificial Sequence: Synthetic oligonucleotide
uauccuagagaaauaagac

SEQ ID NO: 1664762 - RNA, 19 nt, Artificial Sequence
  Description of Artificial Sequence: Synthetic oligonucleotide
gacauaagaaaacauguca

SEQ ID NO: 1664763 - RNA, 19 nt, Artificial Sequence
  Description of Artificial Sequence: Synthetic oligonucleotide
uuaaaaguuuaaagcuugg

SEQ ID NO: 1664764 - RNA, 19 nt, Artificial Sequence
  Description of Artificial Sequence: Synthetic oligonucleotide
aaaccuugaauguaguuaa

SEQ ID NO: 1664765 - RNA, 19 nt, Artificial Sequence
  Description of Artificial Sequence: Synthetic oligonucleotide
gauacagugccauccaugc

SEQ ID NO: 1664766 - RNA, 19 nt, Artificial Sequence
  Description of Artificial Sequence: Synthetic oligonucleotide
agugacauaaaagauuuag

SEQ ID NO: 1664767 - RNA, 19 nt, Artificial Sequence
  Description of Artificial Sequence: Synthetic oligonucleotide
aguccugacaugcauuacc

SEQ ID NO: 1664768 - RNA, 19 nt, Artificial Sequence
  Description of Artificial Sequence: Synthetic oligonucleotide
ugacauaaaagauuuaguu

SEQ ID NO: 1664769 - RNA, 19 nt, Artificial Sequence
  Description of Artificial Sequence: Synthetic oligonucleotide
ucagacucagacuuaacgc

SEQ ID NO: 1664770 - RNA, 19 nt, Artificial Sequence
  Description of Artificial Sequence: Synthetic oligonucleotide
uguuucuaagaaaucuucc

SEQ ID NO: 1664771 - RNA, 19 nt, Artificial Sequence
  Description of Artificial Sequence: Synthetic oligonucleotide
uccuagagaaauaagacuu

SEQ ID NO: 1664772 - RNA, 19 nt, Artificial Sequence
  Description of Artificial Sequence: Synthetic oligonucleotide
agacuuaacgcuucccacc

SEQ ID NO: 1664773 - RNA, 19 nt, Artificial Sequence
  Description of Artificial Sequence: Synthetic oligonucleotide
aacgcuucccaccaggcag

SEQ ID NO: 1664774 - RNA, 19 nt, Artificial Sequence
  Description of Artificial Sequence: Synthetic oligonucleotide
uacagaguauaccugaagu

SEQ ID NO: 1664775 - RNA, 19 nt, Artificial Sequence
  Description of Artificial Sequence: Synthetic oligonucleotide
ucaaagauuaguagccuca

SEQ ID NO: 1664776 - RNA, 19 nt, Artificial Sequence
  Description of Artificial Sequence: Synthetic oligonucleotide
caugcaaugucacaggcag

SEQ ID NO: 1664777 - RNA, 19 nt, Artificial Sequence
  Description of Artificial Sequence: Synthetic oligonucleotide
uuaguagccucaaaugagc

SEQ ID NO: 1664778 - RNA, 19 nt, Artificial Sequence
  Description of Artificial Sequence: Synthetic oligonucleotide
uacuuaagugucuaaaggu

SEQ ID NO: 1664779 - RNA, 19 nt, Artificial Sequence
  Description of Artificial Sequence: Synthetic oligonucleotide
gauuaguagccucaaauga

SEQ ID NO: 1664780 - RNA, 19 nt, Artificial Sequence
  Description of Artificial Sequence: Synthetic oligonucleotide
ucuauugagagauccauau

SEQ ID NO: 1664781 - RNA, 19 nt, Artificial Sequence
  Description of Artificial Sequence: Synthetic oligonucleotide
uucuuaauuaucccugucu

SEQ ID NO: 1664782 - RNA, 19 nt, Artificial Sequence
  Description of Artificial Sequence: Synthetic oligonucleotide
ugucuaaagguauaaaaua

SEQ ID NO: 1664783 - RNA, 19 nt, Artificial Sequence
  Description of Artificial Sequence: Synthetic oligonucleotide
aguagaucuagacagcacu

SEQ ID NO: 1664784 - RNA, 19 nt, Artificial Sequence
  Description of Artificial Sequence: Synthetic oligonucleotide
ucuuaauaugaaccauggg

SEQ ID NO: 1664785 - RNA, 19 nt, Artificial Sequence
  Description of Artificial Sequence: Synthetic oligonucleotide
uguaguuaaaauguggcaa

SEQ ID NO: 1664786 - RNA, 19 nt, Artificial Sequence
  Description of Artificial Sequence: Synthetic oligonucleotide
ugaauguaguuaaaaugug

SEQ ID NO: 1664787 - RNA, 19 nt, Artificial Sequence
  Description of Artificial Sequence: Synthetic oligonucleotide
uaggaaaauaacacgcuga

SEQ ID NO: 1664788 - RNA, 19 nt, Artificial Sequence
  Description of Artificial Sequence: Synthetic oligonucleotide
auaacgugaaccuuugcca

SEQ ID NO: 1664789 - RNA, 19 nt, Artificial Sequence
  Description of Artificial Sequence: Synthetic oligonucleotide
agauuaguagccucaaaug

SEQ ID NO: 1664790 - RNA, 19 nt, Artificial Sequence
  Description of Artificial Sequence: Synthetic oligonucleotide
agaguuuggcaucauauca

SEQ ID NO: 1664791 - RNA, 19 nt, Artificial Sequence
  Description of Artificial Sequence: Synthetic oligonucleotide
cugaaagaagucuucagac

SEQ ID NO: 1664792 - RNA, 19 nt, Artificial Sequence
  Description of Artificial Sequence: Synthetic oligonucleotide
aaucuuaauaugaaccaug

SEQ ID NO: 1664793 - RNA, 19 nt, Artificial Sequence
  Description of Artificial Sequence: Synthetic oligonucleotide
guaguuaaaauguggcaag

SEQ ID NO: 1664794 - RNA, 19 nt, Artificial Sequence
  Description of Artificial Sequence: Synthetic oligonucleotide
cugucauucaaccacgaag

SEQ ID NO: 1664795 - RNA, 19 nt, Artificial Sequence
  Description of Artificial Sequence: Synthetic oligonucleotide
cauguaaaucuuaauauga

SEQ ID NO: 1664796 - RNA, 19 nt, Artificial Sequence
  Description of Artificial Sequence: Synthetic oligonucleotide
ugggguauguaacaguucu

SEQ ID NO: 1664797 - RNA, 19 nt, Artificial Sequence
  Description of Artificial Sequence: Synthetic oligonucleotide
cauaaaagauuuaguuucc

SEQ ID NO: 1664798 - RNA, 19 nt, Artificial Sequence
  Description of Artificial Sequence: Synthetic oligonucleotide
aaacuauugccuaucccac

SEQ ID NO: 1664799 - RNA, 19 nt, Artificial Sequence
  Description of Artificial Sequence: Synthetic oligonucleotide
uuuccuauucuuaauuauc

SEQ ID NO: 1664800 - RNA, 19 nt, Artificial Sequence
  Description of Artificial Sequence: Synthetic oligonucleotide
caugcauuacccaguaagg

SEQ ID NO: 1664801 - RNA, 19 nt, Artificial Sequence
  Description of Artificial Sequence: Synthetic oligonucleotide
guaacaguucucuauugag

SEQ ID NO: 1664802 - RNA, 19 nt, Artificial Sequence
  Description of Artificial Sequence: Synthetic oligonucleotide
caaacuauugccuauccca

SEQ ID NO: 1664803 - RNA, 19 nt, Artificial Sequence
  Description of Artificial Sequence: Synthetic oligonucleotide
acuauugccuaucccacuc

SEQ ID NO: 1664804 - RNA, 19 nt, Artificial Sequence
  Description of Artificial Sequence: Synthetic oligonucleotide
ucuaaagguauaaaauaua

SEQ ID NO: 1664805 - RNA, 19 nt, Artificial Sequence
  Description of Artificial Sequence: Synthetic oligonucleotide
ucagacuuaacgcuuccca

SEQ ID NO: 1664806 - RNA, 19 nt, Artificial Sequence
  Description of Artificial Sequence: Synthetic oligonucleotide
aucaguaucugacugucug

SEQ ID NO: 1664807 - RNA, 19 nt, Artificial Sequence
  Description of Artificial Sequence: Synthetic oligonucleotide
cauucaaccacgaaggcca

SEQ ID NO: 1664808 - RNA, 19 nt, Artificial Sequence
  Description of Artificial Sequence: Synthetic oligonucleotide
aucaaagauuaguagccuc

SEQ ID NO: 1664809 - RNA, 19 nt, Artificial Sequence
  Description of Artificial Sequence: Synthetic oligonucleotide
aggucuugcacauagccug

SEQ ID NO: 1664810 - RNA, 19 nt, Artificial Sequence
  Description of Artificial Sequence: Synthetic oligonucleotide
aacacgcugacauaagaaa

SEQ ID NO: 1664811 - RNA, 19 nt, Artificial Sequence
  Description of Artificial Sequence: Synthetic oligonucleotide
uaaaagauuuaguuuccac

SEQ ID NO: 1664812 - RNA, 19 nt, Artificial Sequence
  Description of Artificial Sequence: Synthetic oligonucleotide
gagaacagaaaagaugggc

SEQ ID NO: 1664813 - RNA, 19 nt, Artificial Sequence
  Description of Artificial Sequence: Synthetic oligonucleotide
acagaguauaccugaagug

SEQ ID NO: 1664814 - RNA, 19 nt, Artificial Sequence
  Description of Artificial Sequence: Synthetic oligonucleotide
ugugguuacagaaggcugu

SEQ ID NO: 1664815 - RNA, 19 nt, Artificial Sequence
  Description of Artificial Sequence: Synthetic oligonucleotide
ugggccuuauccuagagaa

SEQ ID NO: 1664816 - RNA, 19 nt, Artificial Sequence
  Description of Artificial Sequence: Synthetic oligonucleotide
uuacagaguauaccugaag

SEQ ID NO: 1664817 - RNA, 19 nt, Artificial Sequence
  Description of Artificial Sequence: Synthetic oligonucleotide
uaaaccuugaauguaguua

SEQ ID NO: 1664818 - RNA, 19 nt, Artificial Sequence
  Description of Artificial Sequence: Synthetic oligonucleotide
gagaaauuacuuaaguguc

SEQ ID NO: 1664819 - RNA, 19 nt, Artificial Sequence
  Description of Artificial Sequence: Synthetic oligonucleotide
ucaaacuauugccuauccc

SEQ ID NO: 1664820 - RNA, 19 nt, Artificial Sequence
  Description of Artificial Sequence: Synthetic oligonucleotide
aauguggcaagcccuuuca

SEQ ID NO: 1664821 - RNA, 19 nt, Artificial Sequence
  Description of Artificial Sequence: Synthetic oligonucleotide
uauuuauaaccagugacau

SEQ ID NO: 1664822 - RNA, 19 nt, Artificial Sequence
  Description of Artificial Sequence: Synthetic oligonucleotide
uucaagacccuccagcauc

SEQ ID NO: 1664823 - RNA, 19 nt, Artificial Sequence
  Description of Artificial Sequence: Synthetic oligonucleotide
cuagagaaauaagacuugg

SEQ ID NO: 1664824 - RNA, 19 nt, Artificial Sequence
  Description of Artificial Sequence: Synthetic oligonucleotide
uucaaacuauugccuaucc

SEQ ID NO: 1664825 - RNA, 19 nt, Artificial Sequence
  Description of Artificial Sequence: Synthetic oligonucleotide
uuugggguauguaacaguu

SEQ ID NO: 1664826 - RNA, 19 nt, Artificial Sequence
  Description of Artificial Sequence: Synthetic oligonucleotide
aagauuuaguuuccacacu

SEQ ID NO: 1664827 - RNA, 19 nt, Artificial Sequence
  Description of Artificial Sequence: Synthetic oligonucleotide
aacuacuguugcuuggaca

SEQ ID NO: 1664828 - RNA, 19 nt, Artificial Sequence
  Description of Artificial Sequence: Synthetic oligonucleotide
aaagaugggccuuauccua

SEQ ID NO: 1664829 - RNA, 19 nt, Artificial Sequence
  Description of Artificial Sequence: Synthetic oligonucleotide
acucugcauaacgugaacc

SEQ ID NO: 1664830 - RNA, 19 nt, Artificial Sequence
  Description of Artificial Sequence: Synthetic oligonucleotide
cagaucacucugcauaacg

SEQ ID NO: 1664831 - RNA, 19 nt, Artificial Sequence
  Description of Artificial Sequence: Synthetic oligonucleotide
cuuaacgcuucccaccagg

SEQ ID NO: 1664832 - RNA, 19 nt, Artificial Sequence
  Description of Artificial Sequence: Synthetic oligonucleotide
uccuauucuuaauuauccc

SEQ ID NO: 1664833 - RNA, 19 nt, Artificial Sequence
  Description of Artificial Sequence: Synthetic oligonucleotide
uugggcauggcacuguggu

SEQ ID NO: 1664834 - RNA, 19 nt, Artificial Sequence
  Description of Artificial Sequence: Synthetic oligonucleotide
uagagaaauaagacuugga

SEQ ID NO: 1664835 - RNA, 19 nt, Artificial Sequence
  Description of Artificial Sequence: Synthetic oligonucleotide
ugcuuuuauguucuaacuu

SEQ ID NO: 1664836 - RNA, 19 nt, Artificial Sequence
  Description of Artificial Sequence: Synthetic oligonucleotide
ucauucaaccacgaaggcc

SEQ ID NO: 1664837 - RNA, 19 nt, Artificial Sequence
  Description of Artificial Sequence: Synthetic oligonucleotide
agauuuaguuuccacacuu

SEQ ID NO: 1664838 - RNA, 19 nt, Artificial Sequence
  Description of Artificial Sequence: Synthetic oligonucleotide
auguaguuaaaauguggca

SEQ ID NO: 1664839 - RNA, 19 nt, Artificial Sequence
  Description of Artificial Sequence: Synthetic oligonucleotide
aaaauaacacgcugacaua

SEQ ID NO: 1664840 - RNA, 19 nt, Artificial Sequence
  Description of Artificial Sequence: Synthetic oligonucleotide
uccaugcaaugucacaggc

SEQ ID NO: 1664841 - RNA, 19 nt, Artificial Sequence
  Description of Artificial Sequence: Synthetic oligonucleotide
ucuaugucaccucccgagc

SEQ ID NO: 1664842 - RNA, 19 nt, Artificial Sequence
  Description of Artificial Sequence: Synthetic oligonucleotide
acgaaggccacgcacccac

SEQ ID NO: 1664843 - RNA, 19 nt, Artificial Sequence
  Description of Artificial Sequence: Synthetic oligonucleotide
uugccuaucccacuccaug

SEQ ID NO: 1664844 - RNA, 19 nt, Artificial Sequence
  Description of Artificial Sequence: Synthetic oligonucleotide
gaagagaaauuacuuaagu

SEQ ID NO: 1664845 - RNA, 19 nt, Artificial Sequence
  Description of Artificial Sequence: Synthetic oligonucleotide
auaacacgcugacauaaga

SEQ ID NO: 1664846 - RNA, 19 nt, Artificial Sequence
  Description of Artificial Sequence: Synthetic oligonucleotide
uuaagugucuaaagguaua

SEQ ID NO: 1664847 - RNA, 19 nt, Artificial Sequence
  Description of Artificial Sequence: Synthetic oligonucleotide
uuaacgcuucccaccaggc

SEQ ID NO: 1664848 - RNA, 19 nt, Artificial Sequence
  Description of Artificial Sequence: Synthetic oligonucleotide
cucuccucccuuuauuagg

SEQ ID NO: 1664849 - RNA, 19 nt, Artificial Sequence
  Description of Artificial Sequence: Synthetic oligonucleotide
uaguagccucaaaugagcc

SEQ ID NO: 1664850 - RNA, 19 nt, Artificial Sequence
  Description of Artificial Sequence: Synthetic oligonucleotide
uguuuccuauucuuaauua

SEQ ID NO: 1664851 - RNA, 19 nt, Artificial Sequence
  Description of Artificial Sequence: Synthetic oligonucleotide
ugcauaacgugaaccuuug

SEQ ID NO: 1664852 - RNA, 19 nt, Artificial Sequence
  Description of Artificial Sequence: Synthetic oligonucleotide
ucuccucccuuuauuagga

SEQ ID NO: 1664853 - RNA, 19 nt, Artificial Sequence
  Description of Artificial Sequence: Synthetic oligonucleotide
cuuaagacuuaaaaguuua

SEQ ID NO: 1664854 - RNA, 19 nt, Artificial Sequence
  Description of Artificial Sequence: Synthetic oligonucleotide
ugugcuuugcuuuuauguu

SEQ ID NO: 1664855 - RNA, 19 nt, Artificial Sequence
  Description of Artificial Sequence: Synthetic oligonucleotide
uggacuucgcuguuugcag

SEQ ID NO: 1664856 - RNA, 19 nt, Artificial Sequence
  Description of Artificial Sequence: Synthetic oligonucleotide
aaauuacuuaagugucuaa

SEQ ID NO: 1664857 - RNA, 19 nt, Artificial Sequence
  Description of Artificial Sequence: Synthetic oligonucleotide
cacgcugacauaagaaaac

SEQ ID NO: 1664858 - RNA, 19 nt, Artificial Sequence
  Description of Artificial Sequence: Synthetic oligonucleotide
uccauauggaguccucugu

SEQ ID NO: 1664859 - RNA, 19 nt, Artificial Sequence
  Description of Artificial Sequence: Synthetic oligonucleotide
gaucuagacagcacugaag

SEQ ID NO: 1664860 - RNA, 19 nt, Artificial Sequence
  Description of Artificial Sequence: Synthetic oligonucleotide
aacuauugccuaucccacu

SEQ ID NO: 1664861 - RNA, 19 nt, Artificial Sequence
  Description of Artificial Sequence: Synthetic oligonucleotide
accuguuucuaagaaaucu

SEQ ID NO: 1664862 - RNA, 19 nt, Artificial Sequence
  Description of Artificial Sequence: Synthetic oligonucleotide
uccuuacagaguauaccug

SEQ ID NO: 1664863 - RNA, 19 nt, Artificial Sequence
  Description of Artificial Sequence: Synthetic oligonucleotide
uucucuauugagagaucca

SEQ ID NO: 1664864 - RNA, 19 nt, Artificial Sequence
  Description of Artificial Sequence: Synthetic oligonucleotide
ugugucuaugucaccuccc

SEQ ID NO: 1664865 - RNA, 19 nt, Artificial Sequence
  Description of Artificial Sequence: Synthetic oligonucleotide
auccaugcaaugucacagg

SEQ ID NO: 1664866 - RNA, 19 nt, Artificial Sequence
  Description of Artificial Sequence: Synthetic oligonucleotide
gugucuaugucaccucccg

SEQ ID NO: 1664867 - RNA, 19 nt, Artificial Sequence
  Description of Artificial Sequence: Synthetic oligonucleotide
ugcuuggacagucuucacu

SEQ ID NO: 1664868 - RNA, 19 nt, Artificial Sequence
  Description of Artificial Sequence: Synthetic oligonucleotide
uauugccuaucccacucca

SEQ ID NO: 1664869 - RNA, 19 nt, Artificial Sequence
  Description of Artificial Sequence: Synthetic oligonucleotide
ucagcaucuggacuucgcu

SEQ ID NO: 1664870 - RNA, 19 nt, Artificial Sequence
  Description of Artificial Sequence: Synthetic oligonucleotide
uaaauguuuacgucuuauu

SEQ ID NO: 1664871 - RNA, 19 nt, Artificial Sequence
  Description of Artificial Sequence: Synthetic oligonucleotide
uuuaaagcuuggucuugug

SEQ ID NO: 1664872 - RNA, 19 nt, Artificial Sequence
  Description of Artificial Sequence: Synthetic oligonucleotide
ugcuuuggaagagaaauua

SEQ ID NO: 1664873 - RNA, 19 nt, Artificial Sequence
  Description of Artificial Sequence: Synthetic oligonucleotide
auuaggaaaauaacacgcu

SEQ ID NO: 1664874 - RNA, 19 nt, Artificial Sequence
  Description of Artificial Sequence: Synthetic oligonucleotide
auauggaguccucuguaca

SEQ ID NO: 1664875 - RNA, 19 nt, Artificial Sequence
  Description of Artificial Sequence: Synthetic oligonucleotide
uccuuucagaucacucugc

SEQ ID NO: 1664876 - RNA, 19 nt, Artificial Sequence
  Description of Artificial Sequence: Synthetic oligonucleotide
uguuucccagaaguaaacc

SEQ ID NO: 1664877 - RNA, 19 nt, Artificial Sequence
  Description of Artificial Sequence: Synthetic oligonucleotide
gcauuacccaguaaggugg

SEQ ID NO: 1664878 - RNA, 19 nt, Artificial Sequence
  Description of Artificial Sequence: Synthetic oligonucleotide
cauaagaaaacaugucaaa

SEQ ID NO: 1664879 - RNA, 19 nt, Artificial Sequence
  Description of Artificial Sequence: Synthetic oligonucleotide
cauauggaguccucuguac

SEQ ID NO: 1664880 - RNA, 19 nt, Artificial Sequence
  Description of Artificial Sequence: Synthetic oligonucleotide
aucauaucaaagauuagua

SEQ ID NO: 1664881 - RNA, 19 nt, Artificial Sequence
  Description of Artificial Sequence: Synthetic oligonucleotide
augccagguacaucccacc

SEQ ID NO: 1664882 - RNA, 19 nt, Artificial Sequence
  Description of Artificial Sequence: Synthetic oligonucleotide
uauggaguccucuguacau

SEQ ID NO: 1664883 - RNA, 19 nt, Artificial Sequence
  Description of Artificial Sequence: Synthetic oligonucleotide
agucacagaguagaucuag

SEQ ID NO: 1664884 - RNA, 19 nt, Artificial Sequence
  Description of Artificial Sequence: Synthetic oligonucleotide
uaucaaagauuaguagccu

SEQ ID NO: 1664885 - RNA, 19 nt, Artificial Sequence
  Description of Artificial Sequence: Synthetic oligonucleotide
uaacgugaaccuuugccau

SEQ ID NO: 1664886 - RNA, 19 nt, Artificial Sequence
  Description of Artificial Sequence: Synthetic oligonucleotide
gacuuaacgcuucccacca

SEQ ID NO: 1664887 - RNA, 19 nt, Artificial Sequence
  Description of Artificial Sequence: Synthetic oligonucleotide
uuagaacuuaagacuuaaa

SEQ ID NO: 1664888 - RNA, 19 nt, Artificial Sequence
  Description of Artificial Sequence: Synthetic oligonucleotide
acgucuuauuuucucuuug

SEQ ID NO: 1664889 - RNA, 19 nt, Artificial Sequence
  Description of Artificial Sequence: Synthetic oligonucleotide
uguggcaagcccuuucaaa

SEQ ID NO: 1664890 - RNA, 19 nt, Artificial Sequence
  Description of Artificial Sequence: Synthetic oligonucleotide
uguguuuccuauucuuaau

SEQ ID NO: 1664891 - RNA, 19 nt, Artificial Sequence
  Description of Artificial Sequence: Synthetic oligonucleotide
uaagugucuaaagguauaa

SEQ ID NO: 1664892 - RNA, 19 nt, Artificial Sequence
  Description of Artificial Sequence: Synthetic oligonucleotide
uaguccuuacagaguauac

SEQ ID NO: 1664893 - RNA, 19 nt, Artificial Sequence
  Description of Artificial Sequence: Synthetic oligonucleotide
cauuaguccuuacagagua

SEQ ID NO: 1664894 - RNA, 19 nt, Artificial Sequence
  Description of Artificial Sequence: Synthetic oligonucleotide
agaaauuacuuaagugucu

SEQ ID NO: 1664895 - RNA, 19 nt, Artificial Sequence
  Description of Artificial Sequence: Synthetic oligonucleotide
uguuuacgucuuauuuucu

SEQ ID NO: 1664896 - RNA, 19 nt, Artificial Sequence
  Description of Artificial Sequence: Synthetic oligonucleotide
ucaucaguaucugacuguc

SEQ ID NO: 1664897 - RNA, 19 nt, Artificial Sequence
  Description of Artificial Sequence: Synthetic oligonucleotide
agaguauaccugaagugug

SEQ ID NO: 1664898 - RNA, 19 nt, Artificial Sequence
  Description of Artificial Sequence: Synthetic oligonucleotide
gguagcaguccauuagucc

SEQ ID NO: 1664899 - RNA, 19 nt, Artificial Sequence
  Description of Artificial Sequence: Synthetic oligonucleotide
aguagccucaaaugagcca

SEQ ID NO: 1664900 - RNA, 19 nt, Artificial Sequence
  Description of Artificial Sequence: Synthetic oligonucleotide
uguugcuuggacagucuuc

SEQ ID NO: 1664901 - RNA, 19 nt, Artificial Sequence
  Description of Artificial Sequence: Synthetic oligonucleotide
cacauaguggaguucuguc

SEQ ID NO: 1664902 - RNA, 19 nt, Artificial Sequence
  Description of Artificial Sequence: Synthetic oligonucleotide
aagggaacaaugccaggua

SEQ ID NO: 1664903 - RNA, 19 nt, Artificial Sequence
  Description of Artificial Sequence: Synthetic oligonucleotide
cugugguuacagaaggcug

SEQ ID NO: 1664904 - RNA, 19 nt, Artificial Sequence
  Description of Artificial Sequence: Synthetic oligonucleotide
cauagccugggaaaagguc

SEQ ID NO: 1664905 - RNA, 19 nt, Artificial Sequence
  Description of Artificial Sequence: Synthetic oligonucleotide
gaaauuacuuaagugucua

SEQ ID NO: 1664906 - RNA, 19 nt, Artificial Sequence
  Description of Artificial Sequence: Synthetic oligonucleotide
ucacucugcauaacgugaa

SEQ ID NO: 1664907 - RNA, 19 nt, Artificial Sequence
  Description of Artificial Sequence: Synthetic oligonucleotide
agaguagaucuagacagca

SEQ ID NO: 1664908 - RNA, 19 nt, Artificial Sequence
  Description of Artificial Sequence: Synthetic oligonucleotide
gaacagaaaagaugggccu

SEQ ID NO: 1664909 - RNA, 19 nt, Artificial Sequence
  Description of Artificial Sequence: Synthetic oligonucleotide
cuauugagagauccauaug

SEQ ID NO: 1664910 - RNA, 19 nt, Artificial Sequence
  Description of Artificial Sequence: Synthetic oligonucleotide
cauuccucaucgcuugggc

SEQ ID NO: 1664911 - RNA, 19 nt, Artificial Sequence
  Description of Artificial Sequence: Synthetic oligonucleotide
guagcaguccauuaguccu

SEQ ID NO: 1664912 - RNA, 19 nt, Artificial Sequence
  Description of Artificial Sequence: Synthetic oligonucleotide
gcccuuucaaacuauugcc

SEQ ID NO: 1664913 - RNA, 19 nt, Artificial Sequence
  Description of Artificial Sequence: Synthetic oligonucleotide
agaucuagacagcacugaa

SEQ ID NO: 1664914 - RNA, 19 nt, Artificial Sequence
  Description of Artificial Sequence: Synthetic oligonucleotide
uagaucuagacagcacuga

SEQ ID NO: 1664915 - RNA, 19 nt, Artificial Sequence
  Description of Artificial Sequence: Synthetic oligonucleotide
uaucccugucuucuuggga

SEQ ID NO: 1664916 - RNA, 19 nt, Artificial Sequence
  Description of Artificial Sequence: Synthetic oligonucleotide
guagaucuagacagcacug

SEQ ID NO: 1664917 - RNA, 19 nt, Artificial Sequence
  Description of Artificial Sequence: Synthetic oligonucleotide
agccucaaaugagccaugc

SEQ ID NO: 1664918 - RNA, 19 nt, Artificial Sequence
  Description of Artificial Sequence: Synthetic oligonucleotide
uugccauagucuccaucag

SEQ ID NO: 1664919 - RNA, 19 nt, Artificial Sequence
  Description of Artificial Sequence: Synthetic oligonucleotide
auugagagauccauaugga

SEQ ID NO: 1664920 - RNA, 19 nt, Artificial Sequence
  Description of Artificial Sequence: Synthetic oligonucleotide
ugacaugcauuacccagua

SEQ ID NO: 1664921 - RNA, 19 nt, Artificial Sequence
  Description of Artificial Sequence: Synthetic oligonucleotide
ggaagagaaauuacuuaag

SEQ ID NO: 1664922 - RNA, 19 nt, Artificial Sequence
  Description of Artificial Sequence: Synthetic oligonucleotide
uucaaguuucaaguuuuaa

SEQ ID NO: 1664923 - RNA, 19 nt, Artificial Sequence
  Description of Artificial Sequence: Synthetic oligonucleotide
auuuauaaccagugacaua

SEQ ID NO: 1664924 - RNA, 19 nt, Artificial Sequence
  Description of Artificial Sequence: Synthetic oligonucleotide
auuccucaucgcuugggca

SEQ ID NO: 1664925 - RNA, 19 nt, Artificial Sequence
  Description of Artificial Sequence: Synthetic oligonucleotide
ugucuaugucaccucccga

SEQ ID NO: 1664926 - RNA, 19 nt, Artificial Sequence
  Description of Artificial Sequence: Synthetic oligonucleotide
uaacgcuucccaccaggca

SEQ ID NO: 1664927 - RNA, 19 nt, Artificial Sequence
  Description of Artificial Sequence: Synthetic oligonucleotide
uucagccccauuucuggcu

SEQ ID NO: 1664928 - RNA, 19 nt, Artificial Sequence
  Description of Artificial Sequence: Synthetic oligonucleotide
agauacagugccauccaug

SEQ ID NO: 1664929 - RNA, 19 nt, Artificial Sequence
  Description of Artificial Sequence: Synthetic oligonucleotide
uuccaacuuccucuuugca

SEQ ID NO: 1664930 - RNA, 19 nt, Artificial Sequence
  Description of Artificial Sequence: Synthetic oligonucleotide
uccucccuuuauuaggaaa

SEQ ID NO: 1664931 - RNA, 19 nt, Artificial Sequence
  Description of Artificial Sequence: Synthetic oligonucleotide
gaugggccuuauccuagag

SEQ ID NO: 1664932 - RNA, 19 nt, Artificial Sequence
  Description of Artificial Sequence: Synthetic oligonucleotide
ucuugugcuuugcuuuuau

SEQ ID NO: 1664933 - RNA, 19 nt, Artificial Sequence
  Description of Artificial Sequence: Synthetic oligonucleotide
aguuuaaagcuuggucuug

SEQ ID NO: 1664934 - RNA, 19 nt, Artificial Sequence
  Description of Artificial Sequence: Synthetic oligonucleotide
aagcccuuucaaacuauug

SEQ ID NO: 1664935 - RNA, 19 nt, Artificial Sequence
  Description of Artificial Sequence: Synthetic oligonucleotide
aaugucacaggcagaguuu

SEQ ID NO: 1664936 - RNA, 19 nt, Artificial Sequence
  Description of Artificial Sequence: Synthetic oligonucleotide
acgugaaccuuugccauag

SEQ ID NO: 1664937 - RNA, 19 nt, Artificial Sequence
  Description of Artificial Sequence: Synthetic oligonucleotide
agcuuagaacuuaagacuu

SEQ ID NO: 1664938 - RNA, 19 nt, Artificial Sequence
  Description of Artificial Sequence: Synthetic oligonucleotide
augcauuacccaguaaggu

SEQ ID NO: 1664939 - RNA, 19 nt, Artificial Sequence
  Description of Artificial Sequence: Synthetic oligonucleotide
uaucccacuccauguaaau

SEQ ID NO: 1664940 - RNA, 19 nt, Artificial Sequence
  Description of Artificial Sequence: Synthetic oligonucleotide
aucgcuugggcauggcacu

SEQ ID NO: 1664941 - RNA, 19 nt, Artificial Sequence
  Description of Artificial Sequence: Synthetic oligonucleotide
guuucccagaaguaaaccu

SEQ ID NO: 1664942 - RNA, 19 nt, Artificial Sequence
  Description of Artificial Sequence: Synthetic oligonucleotide
uucgcuguuugcagaucug

SEQ ID NO: 1664943 - RNA, 19 nt, Artificial Sequence
  Description of Artificial Sequence: Synthetic oligonucleotide
uggcaucauaucaaagauu

SEQ ID NO: 1664944 - RNA, 19 nt, Artificial Sequence
  Description of Artificial Sequence: Synthetic oligonucleotide
gucauucaaccacgaaggc

SEQ ID NO: 1664945 - RNA, 19 nt, Artificial Sequence
  Description of Artificial Sequence: Synthetic oligonucleotide
aaugagccaugcaggaccu

SEQ ID NO: 1664946 - RNA, 19 nt, Artificial Sequence
  Description of Artificial Sequence: Synthetic oligonucleotide
guccugacaugcauuaccc

SEQ ID NO: 1664947 - RNA, 19 nt, Artificial Sequence
  Description of Artificial Sequence: Synthetic oligonucleotide
ucaccucccgagcagcuaa

SEQ ID NO: 1664948 - RNA, 19 nt, Artificial Sequence
  Description of Artificial Sequence: Synthetic oligonucleotide
gaagugugucuaugucacc

SEQ ID NO: 1664949 - RNA, 19 nt, Artificial Sequence
  Description of Artificial Sequence: Synthetic oligonucleotide
uugcuuuggaagagaaauu

SEQ ID NO: 1664950 - RNA, 19 nt, Artificial Sequence
  Description of Artificial Sequence: Synthetic oligonucleotide
uuugcacaguccugacaug

SEQ ID NO: 1664951 - RNA, 19 nt, Artificial Sequence
  Description of Artificial Sequence: Synthetic oligonucleotide
cuauugccuaucccacucc

SEQ ID NO: 1664952 - RNA, 19 nt, Artificial Sequence
  Description of Artificial Sequence: Synthetic oligonucleotide
uuauaaccagugacauaaa

SEQ ID NO: 1664953 - RNA, 19 nt, Artificial Sequence
  Description of Artificial Sequence: Synthetic oligonucleotide
accagugacauaaaagauu

SEQ ID NO: 1664954 - RNA, 19 nt, Artificial Sequence
  Description of Artificial Sequence: Synthetic oligonucleotide
caguaucugacugucugac

SEQ ID NO: 1664955 - RNA, 19 nt, Artificial Sequence
  Description of Artificial Sequence: Synthetic oligonucleotide
gggagauacagugccaucc

SEQ ID NO: 1664956 - RNA, 19 nt, Artificial Sequence
  Description of Artificial Sequence: Synthetic oligonucleotide
gugaaccuuugccauaguc

SEQ ID NO: 1664957 - RNA, 19 nt, Artificial Sequence
  Description of Artificial Sequence: Synthetic oligonucleotide
ucccugagguagcagucca

SEQ ID NO: 1664958 - RNA, 19 nt, Artificial Sequence
  Description of Artificial Sequence: Synthetic oligonucleotide
ucgcucagcaucuggacuu

SEQ ID NO: 1664959 - RNA, 19 nt, Artificial Sequence
  Description of Artificial Sequence: Synthetic oligonucleotide
agaucacucugcauaacgu

SEQ ID NO: 1664960 - RNA, 19 nt, Artificial Sequence
  Description of Artificial Sequence: Synthetic oligonucleotide
aacgugaaccuuugccaua

SEQ ID NO: 1664961 - RNA, 19 nt, Artificial Sequence
  Description of Artificial Sequence: Synthetic oligonucleotide
cuuaagugucuaaagguau

SEQ ID NO: 1664962 - RNA, 19 nt, Artificial Sequence
  Description of Artificial Sequence: Synthetic oligonucleotide
augucacaggcagaguuug

SEQ ID NO: 1664963 - RNA, 19 nt, Artificial Sequence
  Description of Artificial Sequence: Synthetic oligonucleotide
cacugugguuacagaaggc

SEQ ID NO: 1664964 - RNA, 19 nt, Artificial Sequence
  Description of Artificial Sequence: Synthetic oligonucleotide
aagugucuaaagguauaaa

SEQ ID NO: 1664965 - RNA, 19 nt, Artificial Sequence
  Description of Artificial Sequence: Synthetic oligonucleotide
uagucuccaucagaggaac

SEQ ID NO: 1664966 - RNA, 19 nt, Artificial Sequence
  Description of Artificial Sequence: Synthetic oligonucleotide
uacgucuuauuuucucuuu

SEQ ID NO: 1664967 - RNA, 19 nt, Artificial Sequence
  Description of Artificial Sequence: Synthetic oligonucleotide
cuugggcauggcacugugg

SEQ ID NO: 1664968 - RNA, 19 nt, Artificial Sequence
  Description of Artificial Sequence: Synthetic oligonucleotide
augggccuuauccuagaga

SEQ ID NO: 1664969 - RNA, 19 nt, Artificial Sequence
  Description of Artificial Sequence: Synthetic oligonucleotide
ucagaggaacucugggcau

SEQ ID NO: 1664970 - RNA, 19 nt, Artificial Sequence
  Description of Artificial Sequence: Synthetic oligonucleotide
uccugacaugcauuaccca

SEQ ID NO: 1664971 - RNA, 19 nt, Artificial Sequence
  Description of Artificial Sequence: Synthetic oligonucleotide
agguagcaguccauuaguc

SEQ ID NO: 1664972 - RNA, 19 nt, Artificial Sequence
  Description of Artificial Sequence: Synthetic oligonucleotide
gugcaguucucugagcaug

SEQ ID NO: 1664973 - RNA, 19 nt, Artificial Sequence
  Description of Artificial Sequence: Synthetic oligonucleotide
aguaaaccuugaauguagu

SEQ ID NO: 1664974 - RNA, 19 nt, Artificial Sequence
  Description of Artificial Sequence: Synthetic oligonucleotide
gguggugcuguccacucgc

SEQ ID NO: 1664975 - RNA, 19 nt, Artificial Sequence
  Description of Artificial Sequence: Synthetic oligonucleotide
acgcugacauaagaaaaca

SEQ ID NO: 1664976 - RNA, 19 nt, Artificial Sequence
  Description of Artificial Sequence: Synthetic oligonucleotide
ucgcuguuugcagaucuga

SEQ ID NO: 1664977 - RNA, 19 nt, Artificial Sequence
  Description of Artificial Sequence: Synthetic oligonucleotide
ucuggacuucgcuguuugc

SEQ ID NO: 1664978 - RNA, 19 nt, Artificial Sequence
  Description of Artificial Sequence: Synthetic oligonucleotide
cuuacagaguauaccugaa

SEQ ID NO: 1664979 - RNA, 19 nt, Artificial Sequence
  Description of Artificial Sequence: Synthetic oligonucleotide
uaucugacugucugacuuu

SEQ ID NO: 1664980 - RNA, 19 nt, Artificial Sequence
  Description of Artificial Sequence: Synthetic oligonucleotide
ucugcauaacgugaaccuu

SEQ ID NO: 1664981 - RNA, 19 nt, Artificial Sequence
  Description of Artificial Sequence: Synthetic oligonucleotide
uaauuaucccugucuucuu

SEQ ID NO: 1664982 - RNA, 19 nt, Artificial Sequence
  Description of Artificial Sequence: Synthetic oligonucleotide
acacgcugacauaagaaaa

SEQ ID NO: 1664983 - RNA, 19 nt, Artificial Sequence
  Description of Artificial Sequence: Synthetic oligonucleotide
cagacucagacuuaacgcu

SEQ ID NO: 1664984 - RNA, 19 nt, Artificial Sequence
  Description of Artificial Sequence: Synthetic oligonucleotide
caugggaagagaggagaac

SEQ ID NO: 1664985 - RNA, 19 nt, Artificial Sequence
  Description of Artificial Sequence: Synthetic oligonucleotide
ucccucauucccugucuca

SEQ ID NO: 1664986 - RNA, 19 nt, Artificial Sequence
  Description of Artificial Sequence: Synthetic oligonucleotide
cccauuucuggcuucuccc

SEQ ID NO: 1664987 - RNA, 19 nt, Artificial Sequence
  Description of Artificial Sequence: Synthetic oligonucleotide
gagguagcaguccauuagu

SEQ ID NO: 1664988 - RNA, 19 nt, Artificial Sequence
  Description of Artificial Sequence: Synthetic oligonucleotide
gccacgcacccacacaugg

SEQ ID NO: 1664989 - RNA, 19 nt, Artificial Sequence
  Description of Artificial Sequence: Synthetic oligonucleotide
acuuaacgcuucccaccag

SEQ ID NO: 1664990 - RNA, 19 nt, Artificial Sequence
  Description of Artificial Sequence: Synthetic oligonucleotide
auagucuccaucagaggaa

SEQ ID NO: 1664991 - RNA, 19 nt, Artificial Sequence
  Description of Artificial Sequence: Synthetic oligonucleotide
aggccacgcacccacacau

SEQ ID NO: 1664992 - RNA, 19 nt, Artificial Sequence
  Description of Artificial Sequence: Synthetic oligonucleotide
cuaugucaccucccgagca

SEQ ID NO: 1664993 - RNA, 19 nt, Artificial Sequence
  Description of Artificial Sequence: Synthetic oligonucleotide
auacagugccauccaugca

SEQ ID NO: 1664994 - RNA, 19 nt, Artificial Sequence
  Description of Artificial Sequence: Synthetic oligonucleotide
uuguaacuucaauuccauu

SEQ ID NO: 1664995 - RNA, 19 nt, Artificial Sequence
  Description of Artificial Sequence: Synthetic oligonucleotide
cucagacuuaacgcuuccc

SEQ ID NO: 1664996 - RNA, 19 nt, Artificial Sequence
  Description of Artificial Sequence: Synthetic oligonucleotide
ugucaccucccgagcagcu

SEQ ID NO: 1664997 - RNA, 19 nt, Artificial Sequence
  Description of Artificial Sequence: Synthetic oligonucleotide
ggaagagaggagaacagaa

SEQ ID NO: 1664998 - RNA, 19 nt, Artificial Sequence
  Description of Artificial Sequence: Synthetic oligonucleotide
ugggcaugugcaguucucu

SEQ ID NO: 1664999 - RNA, 19 nt, Artificial Sequence
  Description of Artificial Sequence: Synthetic oligonucleotide
caacuacuguugcuuggac

SEQ ID NO: 1665000 - RNA, 19 nt, Artificial Sequence
  Description of Artificial Sequence: Synthetic oligonucleotide
gcuuuuauguucuaacuuu

SEQ ID NO: 1665001 - RNA, 19 nt, Artificial Sequence
  Description of Artificial Sequence: Synthetic oligonucleotide
aguucucuauugagagauc

SEQ ID NO: 1665002 - RNA, 19 nt, Artificial Sequence
  Description of Artificial Sequence: Synthetic oligonucleotide
gugacauaaaagauuuagu

SEQ ID NO: 1665003 - RNA, 19 nt, Artificial Sequence
  Description of Artificial Sequence: Synthetic oligonucleotide
cucuuugcacaguccugac

SEQ ID NO: 1665004 - RNA, 19 nt, Artificial Sequence
  Description of Artificial Sequence: Synthetic oligonucleotide
ggaaagcuuagaacuuaag

SEQ ID NO: 1665005 - RNA, 19 nt, Artificial Sequence
  Description of Artificial Sequence: Synthetic oligonucleotide
cauaguggaguucugucau

SEQ ID NO: 1665006 - RNA, 19 nt, Artificial Sequence
  Description of Artificial Sequence: Synthetic oligonucleotide
guagccucaaaugagccau

SEQ ID NO: 1665007 - RNA, 19 nt, Artificial Sequence
  Description of Artificial Sequence: Synthetic oligonucleotide
acauagccugggaaaaggu

SEQ ID NO: 1665008 - RNA, 19 nt, Artificial Sequence
  Description of Artificial Sequence: Synthetic oligonucleotide
ugggagauacagugccauc

SEQ ID NO: 1665009 - RNA, 19 nt, Artificial Sequence
  Description of Artificial Sequence: Synthetic oligonucleotide
acagaaaagaugggccuua

SEQ ID NO: 1665010 - RNA, 19 nt, Artificial Sequence
  Description of Artificial Sequence: Synthetic oligonucleotide
auucaaccacgaaggccac

SEQ ID NO: 1665011 - RNA, 19 nt, Artificial Sequence
  Description of Artificial Sequence: Synthetic oligonucleotide
guaagguggugcuguccac

SEQ ID NO: 1665012 - RNA, 19 nt, Artificial Sequence
  Description of Artificial Sequence: Synthetic oligonucleotide
cucuauugagagauccaua

SEQ ID NO: 1665013 - RNA, 19 nt, Artificial Sequence
  Description of Artificial Sequence: Synthetic oligonucleotide
uccucaucgcuugggcaug

SEQ ID NO: 1665014 - RNA, 19 nt, Artificial Sequence
  Description of Artificial Sequence: Synthetic oligonucleotide
agaggaacucugggcaugu

SEQ ID NO: 1665015 - RNA, 19 nt, Artificial Sequence
  Description of Artificial Sequence: Synthetic oligonucleotide
caguucucuauugagagau

SEQ ID NO: 1665016 - RNA, 19 nt, Artificial Sequence
  Description of Artificial Sequence: Synthetic oligonucleotide
acuucgcuguuugcagauc

SEQ ID NO: 1665017 - RNA, 19 nt, Artificial Sequence
  Description of Artificial Sequence: Synthetic oligonucleotide
ccuauucuuaauuaucccu

SEQ ID NO: 1665018 - RNA, 19 nt, Artificial Sequence
  Description of Artificial Sequence: Synthetic oligonucleotide
cugacaugcauuacccagu

SEQ ID NO: 1665019 - RNA, 19 nt, Artificial Sequence
  Description of Artificial Sequence: Synthetic oligonucleotide
gucuugcacauagccuggg

SEQ ID NO: 1665020 - RNA, 19 nt, Artificial Sequence
  Description of Artificial Sequence: Synthetic oligonucleotide
gaguauaccugaagugugu

SEQ ID NO: 1665021 - RNA, 19 nt, Artificial Sequence
  Description of Artificial Sequence: Synthetic oligonucleotide
caaagauuaguagccucaa

SEQ ID NO: 1665022 - RNA, 19 nt, Artificial Sequence
  Description of Artificial Sequence: Synthetic oligonucleotide
gauccauauggaguccucu

SEQ ID NO: 1665023 - RNA, 19 nt, Artificial Sequence
  Description of Artificial Sequence: Synthetic oligonucleotide
augcaggaccuguuucuaa

SEQ ID NO: 1665024 - RNA, 19 nt, Artificial Sequence
  Description of Artificial Sequence: Synthetic oligonucleotide
agacucagacuuaacgcuu

SEQ ID NO: 1665025 - RNA, 19 nt, Artificial Sequence
  Description of Artificial Sequence: Synthetic oligonucleotide
ggucuugcacauagccugg

SEQ ID NO: 1665026 - RNA, 19 nt, Artificial Sequence
  Description of Artificial Sequence: Synthetic oligonucleotide
cugggcaugugcaguucuc

SEQ ID NO: 1665027 - RNA, 19 nt, Artificial Sequence
  Description of Artificial Sequence: Synthetic oligonucleotide
cuucgcuguuugcagaucu

SEQ ID NO: 1665028 - RNA, 19 nt, Artificial Sequence
  Description of Artificial Sequence: Synthetic oligonucleotide
gucccugagguagcagucc

SEQ ID NO: 1665029 - RNA, 19 nt, Artificial Sequence
  Description of Artificial Sequence: Synthetic oligonucleotide
ggaccuguuucuaagaaau

SEQ ID NO: 1665030 - RNA, 19 nt, Artificial Sequence
  Description of Artificial Sequence: Synthetic oligonucleotide
auuacccaguaagguggug

SEQ ID NO: 1665031 - RNA, 19 nt, Artificial Sequence
  Description of Artificial Sequence: Synthetic oligonucleotide
gguuacagaaggcuguuuu

SEQ ID NO: 1665032 - RNA, 19 nt, Artificial Sequence
  Description of Artificial Sequence: Synthetic oligonucleotide
ccucccuuuauuaggaaaa

SEQ ID NO: 1665033 - RNA, 19 nt, Artificial Sequence
  Description of Artificial Sequence: Synthetic oligonucleotide
ggguauguaacaguucucu

SEQ ID NO: 1665034 - RNA, 19 nt, Artificial Sequence
  Description of Artificial Sequence: Synthetic oligonucleotide
gguauguaacaguucucua

SEQ ID NO: 1665035 - RNA, 19 nt, Artificial Sequence
  Description of Artificial Sequence: Synthetic oligonucleotide
gacuucgcuguuugcagau

SEQ ID NO: 1665036 - RNA, 19 nt, Artificial Sequence
  Description of Artificial Sequence: Synthetic oligonucleotide
aggcaguccaccauugcuu

SEQ ID NO: 1665037 - RNA, 19 nt, Artificial Sequence
  Description of Artificial Sequence: Synthetic oligonucleotide
ucucugagcauggguguuu

SEQ ID NO: 1665038 - RNA, 19 nt, Artificial Sequence
  Description of Artificial Sequence: Synthetic oligonucleotide
auuaguccuuacagaguau

SEQ ID NO: 1665039 - RNA, 19 nt, Artificial Sequence
  Description of Artificial Sequence: Synthetic oligonucleotide
cugcauaacgugaaccuuu

SEQ ID NO: 1665040 - RNA, 19 nt, Artificial Sequence
  Description of Artificial Sequence: Synthetic oligonucleotide
gcaucauaucaaagauuag

SEQ ID NO: 1665041 - RNA, 19 nt, Artificial Sequence
  Description of Artificial Sequence: Synthetic oligonucleotide
gacaugcauuacccaguaa

SEQ ID NO: 1665042 - RNA, 19 nt, Artificial Sequence
  Description of Artificial Sequence: Synthetic oligonucleotide
cugagguagcaguccauua

SEQ ID NO: 1665043 - RNA, 19 nt, Artificial Sequence
  Description of Artificial Sequence: Synthetic oligonucleotide
ucgcuugggcauggcacug

SEQ ID NO: 1665044 - RNA, 19 nt, Artificial Sequence
  Description of Artificial Sequence: Synthetic oligonucleotide
gggaacaaugccagguaca

SEQ ID NO: 1665045 - RNA, 19 nt, Artificial Sequence
  Description of Artificial Sequence: Synthetic oligonucleotide
ggccuuauccuagagaaau

SEQ ID NO: 1665046 - RNA, 19 nt, Artificial Sequence
  Description of Artificial Sequence: Synthetic oligonucleotide
auggaguccucuguacauu

SEQ ID NO: 1665047 - RNA, 19 nt, Artificial Sequence
  Description of Artificial Sequence: Synthetic oligonucleotide
gcaacuacuguugcuugga

SEQ ID NO: 1665048 - RNA, 19 nt, Artificial Sequence
  Description of Artificial Sequence: Synthetic oligonucleotide
ccuuauccuagagaaauaa

SEQ ID NO: 1665049 - RNA, 19 nt, Artificial Sequence
  Description of Artificial Sequence: Synthetic oligonucleotide
ccuuucaaacuauugccua

SEQ ID NO: 1665050 - RNA, 19 nt, Artificial Sequence
  Description of Artificial Sequence: Synthetic oligonucleotide
ccuugaauguaguuaaaau

SEQ ID NO: 1665051 - RNA, 19 nt, Artificial Sequence
  Description of Artificial Sequence: Synthetic oligonucleotide
cacgcacccacacauggcu

SEQ ID NO: 1665052 - RNA, 19 nt, Artificial Sequence
  Description of Artificial Sequence: Synthetic oligonucleotide
guggcaaggucuugcacau

SEQ ID NO: 1665053 - RNA, 19 nt, Artificial Sequence
  Description of Artificial Sequence: Synthetic oligonucleotide
ggguguuucccagaaguaa

SEQ ID NO: 1665054 - RNA, 19 nt, Artificial Sequence
  Description of Artificial Sequence: Synthetic oligonucleotide
acgcacccacacauggcuc

SEQ ID NO: 1665055 - RNA, 19 nt, Artificial Sequence
  Description of Artificial Sequence: Synthetic oligonucleotide
gcauaacgugaaccuuugc

SEQ ID NO: 1665056 - RNA, 19 nt, Artificial Sequence
  Description of Artificial Sequence: Synthetic oligonucleotide
ggacuucgcuguuugcaga

SEQ ID NO: 1665057 - RNA, 19 nt, Artificial Sequence
  Description of Artificial Sequence: Synthetic oligonucleotide
ggcaagcccuuucaaacua

SEQ ID NO: 1665058 - RNA, 19 nt, Artificial Sequence
  Description of Artificial Sequence: Synthetic oligonucleotide
cagcaucaucaguaucuga

SEQ ID NO: 1665059 - RNA, 19 nt, Artificial Sequence
  Description of Artificial Sequence: Synthetic oligonucleotide
auugccuaucccacuccau

SEQ ID NO: 1665060 - RNA, 19 nt, Artificial Sequence
  Description of Artificial Sequence: Synthetic oligonucleotide
uccacucgcucagcaucug

SEQ ID NO: 1665061 - RNA, 19 nt, Artificial Sequence
  Description of Artificial Sequence: Synthetic oligonucleotide
gcaggaccuguuucuaaga

SEQ ID NO: 1665062 - RNA, 19 nt, Artificial Sequence
  Description of Artificial Sequence: Synthetic oligonucleotide
caccucccgagcagcuaag

SEQ ID NO: 1665063 - RNA, 19 nt, Artificial Sequence
  Description of Artificial Sequence: Synthetic oligonucleotide
caggcagaguuuggcauca

SEQ ID NO: 1665064 - RNA, 19 nt, Artificial Sequence
  Description of Artificial Sequence: Synthetic oligonucleotide
cucaaccuguguuuccuau

SEQ ID NO: 1665065 - RNA, 19 nt, Artificial Sequence
  Description of Artificial Sequence: Synthetic oligonucleotide
caguccugacaugcauuac

SEQ ID NO: 1665066 - RNA, 19 nt, Artificial Sequence
  Description of Artificial Sequence: Synthetic oligonucleotide
cucgcucagcaucuggacu

SEQ ID NO: 1665067 - RNA, 19 nt, Artificial Sequence
  Description of Artificial Sequence: Synthetic oligonucleotide
cauuacccaguaagguggu

SEQ ID NO: 1665068 - RNA, 19 nt, Artificial Sequence
  Description of Artificial Sequence: Synthetic oligonucleotide
ccaugcaaugucacaggca

SEQ ID NO: 1665069 - RNA, 19 nt, Artificial Sequence
  Description of Artificial Sequence: Synthetic oligonucleotide
ccacucgcucagcaucugg

SEQ ID NO: 1665070 - RNA, 19 nt, Artificial Sequence
  Description of Artificial Sequence: Synthetic oligonucleotide
agcaguccauuaguccuua

SEQ ID NO: 1665071 - RNA, 19 nt, Artificial Sequence
  Description of Artificial Sequence: Synthetic oligonucleotide
agucuccaucagaggaacu

SEQ ID NO: 1665072 - RNA, 19 nt, Artificial Sequence
  Description of Artificial Sequence: Synthetic oligonucleotide
ccacgcacccacacauggc

SEQ ID NO: 1665073 - RNA, 19 nt, Artificial Sequence
  Description of Artificial Sequence: Synthetic oligonucleotide
caugcaggaccuguuucua

SEQ ID NO: 1665074 - RNA, 19 nt, Artificial Sequence
  Description of Artificial Sequence: Synthetic oligonucleotide
gcaaggucuugcacauagc

SEQ ID NO: 1665075 - RNA, 19 nt, Artificial Sequence
  Description of Artificial Sequence: Synthetic oligonucleotide
ccaggcaguccaccauugc

SEQ ID NO: 1665076 - RNA, 19 nt, Artificial Sequence
  Description of Artificial Sequence: Synthetic oligonucleotide
cccuuucaaacuauugccu

SEQ ID NO: 1665077 - RNA, 19 nt, Artificial Sequence
  Description of Artificial Sequence: Synthetic oligonucleotide
gagcagcuaagcacauagu

SEQ ID NO: 1665078 - RNA, 19 nt, Artificial Sequence
  Description of Artificial Sequence: Synthetic oligonucleotide
augagccaugcaggaccug

SEQ ID NO: 1665079 - RNA, 19 nt, Artificial Sequence
  Description of Artificial Sequence: Synthetic oligonucleotide
cuccucccuuuauuaggaa

SEQ ID NO: 1665080 - RNA, 19 nt, Artificial Sequence
  Description of Artificial Sequence: Synthetic oligonucleotide
caaccacgaaggccacgca

SEQ ID NO: 1665081 - RNA, 19 nt, Artificial Sequence
  Description of Artificial Sequence: Synthetic oligonucleotide
ggacagucuucacucuccu

SEQ ID NO: 1665082 - RNA, 19 nt, Artificial Sequence
  Description of Artificial Sequence: Synthetic oligonucleotide
agacagcacugaagacuga

SEQ ID NO: 1665083 - RNA, 19 nt, Artificial Sequence
  Description of Artificial Sequence: Synthetic oligonucleotide
gccuaucccacuccaugua

SEQ ID NO: 1665084 - RNA, 19 nt, Artificial Sequence
  Description of Artificial Sequence: Synthetic oligonucleotide
ggucuugugcuuugcuuuu

SEQ ID NO: 1665085 - RNA, 19 nt, Artificial Sequence
  Description of Artificial Sequence: Synthetic oligonucleotide
cuguugcuuggacagucuu

SEQ ID NO: 1665086 - RNA, 19 nt, Artificial Sequence
  Description of Artificial Sequence: Synthetic oligonucleotide
ccucccgagcagcuaagca

SEQ ID NO: 1665087 - RNA, 19 nt, Artificial Sequence
  Description of Artificial Sequence: Synthetic oligonucleotide
gcaguccauuaguccuuac

SEQ ID NO: 1665088 - RNA, 19 nt, Artificial Sequence
  Description of Artificial Sequence: Synthetic oligonucleotide
ccucaucgcuugggcaugg

SEQ ID NO: 1665089 - RNA, 19 nt, Artificial Sequence
  Description of Artificial Sequence: Synthetic oligonucleotide
uggcaaggucuugcacaua

SEQ ID NO: 1665090 - RNA, 19 nt, Artificial Sequence
  Description of Artificial Sequence: Synthetic oligonucleotide
cacgaaggccacgcaccca

SEQ ID NO: 1665091 - RNA, 19 nt, Artificial Sequence
  Description of Artificial Sequence: Synthetic oligonucleotide
cuacuguugcuuggacagu

SEQ ID NO: 1665092 - RNA, 19 nt, Artificial Sequence
  Description of Artificial Sequence: Synthetic oligonucleotide
accucccacuuugcaguuu

SEQ ID NO: 1665093 - RNA, 19 nt, Artificial Sequence
  Description of Artificial Sequence: Synthetic oligonucleotide
gccuuauccuagagaaaua

SEQ ID NO: 1665094 - RNA, 19 nt, Artificial Sequence
  Description of Artificial Sequence: Synthetic oligonucleotide
ggccacgcacccacacaug

SEQ ID NO: 1665095 - RNA, 19 nt, Artificial Sequence
  Description of Artificial Sequence: Synthetic oligonucleotide
ccacuccauguaaaucuua

SEQ ID NO: 1665096 - RNA, 19 nt, Artificial Sequence
  Description of Artificial Sequence: Synthetic oligonucleotide
cccugucucaaccuguguu

SEQ ID NO: 1665097 - RNA, 19 nt, Artificial Sequence
  Description of Artificial Sequence: Synthetic oligonucleotide
gcaagcccuuucaaacuau

SEQ ID NO: 1665098 - RNA, 19 nt, Artificial Sequence
  Description of Artificial Sequence: Synthetic oligonucleotide
caucuggacuucgcuguuu

SEQ ID NO: 1665099 - RNA, 19 nt, Artificial Sequence
  Description of Artificial Sequence: Synthetic oligonucleotide
cgaaggccacgcacccaca

SEQ ID NO: 1665100 - RNA, 19 nt, Artificial Sequence
  Description of Artificial Sequence: Synthetic oligonucleotide
cacccacacauggcucuuu

SEQ ID NO: 1665101 - RNA, 19 nt, Artificial Sequence
  Description of Artificial Sequence: Synthetic oligonucleotide
cgugaaccuuugccauagu

SEQ ID NO: 1665102 - RNA, 19 nt, Artificial Sequence
  Description of Artificial Sequence: Synthetic oligonucleotide
ugagaagucauuaauaggg

SEQ ID NO: 1665103 - RNA, 19 nt, Artificial Sequence
  Description of Artificial Sequence: Synthetic oligonucleotide
uuuagaucaacacuaauag

SEQ ID NO: 1665104 - RNA, 19 nt, Artificial Sequence
  Description of Artificial Sequence: Synthetic oligonucleotide
aacaugauugucuagucac

SEQ ID NO: 1665105 - RNA, 19 nt, Artificial Sequence
  Description of Artificial Sequence: Synthetic oligonucleotide
aaagacgacauuuggauuc

SEQ ID NO: 1665106 - RNA, 19 nt, Artificial Sequence
  Description of Artificial Sequence: Synthetic oligonucleotide
aacacuaauagcaugauag

SEQ ID NO: 1665107 - RNA, 19 nt, Artificial Sequence
  Description of Artificial Sequence: Synthetic oligonucleotide
uguacaacagugaauaugc

SEQ ID NO: 1665108 - RNA, 19 nt, Artificial Sequence
  Description of Artificial Sequence: Synthetic oligonucleotide
augauugacaucuggauac

SEQ ID NO: 1665109 - RNA, 19 nt, Artificial Sequence
  Description of Artificial Sequence: Synthetic oligonucleotide
uuauccuugaucacgacag

SEQ ID NO: 1665110 - RNA, 19 nt, Artificial Sequence
  Description of Artificial Sequence: Synthetic oligonucleotide
uuuagcaugauugacaucu

SEQ ID NO: 1665111 - RNA, 19 nt, Artificial Sequence
  Description of Artificial Sequence: Synthetic oligonucleotide
aagucauuaauagggaggc

SEQ ID NO: 1665112 - RNA, 19 nt, Artificial Sequence
  Description of Artificial Sequence: Synthetic oligonucleotide
ugaauaugcaauuuggcca

SEQ ID NO: 1665113 - RNA, 19 nt, Artificial Sequence
  Description of Artificial Sequence: Synthetic oligonucleotide
gaguauaccauuaugacug

SEQ ID NO: 1665114 - RNA, 19 nt, Artificial Sequence
  Description of Artificial Sequence: Synthetic oligonucleotide
ucagagaugacacccauug

SEQ ID NO: 1665115 - RNA, 19 nt, Artificial Sequence
  Description of Artificial Sequence: Synthetic oligonucleotide
aauagggaggccuucaaca

SEQ ID NO: 1665116 - RNA, 19 nt, Artificial Sequence
  Description of Artificial Sequence: Synthetic oligonucleotide
ugucuagucacgcagagga

SEQ ID NO: 1665117 - RNA, 19 nt, Artificial Sequence
  Description of Artificial Sequence: Synthetic oligonucleotide
ucuaccacgaugcacauaa

SEQ ID NO: 1665118 - RNA, 19 nt, Artificial Sequence
  Description of Artificial Sequence: Synthetic oligonucleotide
caaaucucuaccacgaugc

SEQ ID NO: 1665119 - RNA, 19 nt, Artificial Sequence
  Description of Artificial Sequence: Synthetic oligonucleotide
uggucuuuaccaaacacag

SEQ ID NO: 1665120 - RNA, 19 nt, Artificial Sequence
  Description of Artificial Sequence: Synthetic oligonucleotide
gauaaugacauucuuuaca

SEQ ID NO: 1665121 - RNA, 19 nt, Artificial Sequence
  Description of Artificial Sequence: Synthetic oligonucleotide
uucacaaaucucuaccacg

SEQ ID NO: 1665122 - RNA, 19 nt, Artificial Sequence
  Description of Artificial Sequence: Synthetic oligonucleotide
aguagagaagaucaucagg

SEQ ID NO: 1665123 - RNA, 19 nt, Artificial Sequence
  Description of Artificial Sequence: Synthetic oligonucleotide
gaauaugcaauuuggccag

SEQ ID NO: 1665124 - RNA, 19 nt, Artificial Sequence
  Description of Artificial Sequence: Synthetic oligonucleotide
guuacaccgaguuuaagag

SEQ ID NO: 1665125 - RNA, 19 nt, Artificial Sequence
  Description of Artificial Sequence: Synthetic oligonucleotide
gacauuauugagaacugcg

SEQ ID NO: 1665126 - RNA, 19 nt, Artificial Sequence
  Description of Artificial Sequence: Synthetic oligonucleotide
uacaccgaguuuaagagca

SEQ ID NO: 1665127 - RNA, 19 nt, Artificial Sequence
  Description of Artificial Sequence: Synthetic oligonucleotide
ugauugucuagucacgcag

SEQ ID NO: 1665128 - RNA, 19 nt, Artificial Sequence
  Description of Artificial Sequence: Synthetic oligonucleotide
auaccauuaugacuguugg

SEQ ID NO: 1665129 - RNA, 19 nt, Artificial Sequence
  Description of Artificial Sequence: Synthetic oligonucleotide
ucaaagacgacauuuggau

SEQ ID NO: 1665130 - RNA, 19 nt, Artificial Sequence
  Description of Artificial Sequence: Synthetic oligonucleotide
uccgacauuauugagaacu

SEQ ID NO: 1665131 - RNA, 19 nt, Artificial Sequence
  Description of Artificial Sequence: Synthetic oligonucleotide
aacaccguccagaacaccc

SEQ ID NO: 1665132 - RNA, 19 nt, Artificial Sequence
  Description of Artificial Sequence: Synthetic oligonucleotide
uugaucacgacagggaacg

SEQ ID NO: 1665133 - RNA, 19 nt, Artificial Sequence
  Description of Artificial Sequence: Synthetic oligonucleotide
gugaauaugcaauuuggcc

SEQ ID NO: 1665134 - RNA, 19 nt, Artificial Sequence
  Description of Artificial Sequence: Synthetic oligonucleotide
ucagcuuugggauauuuac

SEQ ID NO: 1665135 - RNA, 19 nt, Artificial Sequence
  Description of Artificial Sequence: Synthetic oligonucleotide
uugcaguuccaucagaaca

SEQ ID NO: 1665136 - RNA, 19 nt, Artificial Sequence
  Description of Artificial Sequence: Synthetic oligonucleotide
uguugcacagucgagauga

SEQ ID NO: 1665137 - RNA, 19 nt, Artificial Sequence
  Description of Artificial Sequence: Synthetic oligonucleotide
auuuccaauacuguacaac

SEQ ID NO: 1665138 - RNA, 19 nt, Artificial Sequence
  Description of Artificial Sequence: Synthetic oligonucleotide
uugaguauaccauuaugac

SEQ ID NO: 1665139 - RNA, 19 nt, Artificial Sequence
  Description of Artificial Sequence: Synthetic oligonucleotide
aguuacaccgaguuuaaga

SEQ ID NO: 1665140 - RNA, 19 nt, Artificial Sequence
  Description of Artificial Sequence: Synthetic oligonucleotide
agauaaugacauucuuuac

SEQ ID NO: 1665141 - RNA, 19 nt, Artificial Sequence
  Description of Artificial Sequence: Synthetic oligonucleotide
ugggacuaggcucaaagac

SEQ ID NO: 1665142 - RNA, 19 nt, Artificial Sequence
  Description of Artificial Sequence: Synthetic oligonucleotide
auuugaguauaccauuaug

SEQ ID NO: 1665143 - RNA, 19 nt, Artificial Sequence
  Description of Artificial Sequence: Synthetic oligonucleotide
aggaauaccauacgaguug

SEQ ID NO: 1665144 - RNA, 19 nt, Artificial Sequence
  Description of Artificial Sequence: Synthetic oligonucleotide
aguaagguccauuuucuca

SEQ ID NO: 1665145 - RNA, 19 nt, Artificial Sequence
  Description of Artificial Sequence: Synthetic oligonucleotide
auugguuccgacauuauug

SEQ ID NO: 1665146 - RNA, 19 nt, Artificial Sequence
  Description of Artificial Sequence: Synthetic oligonucleotide
uuaacugauuucuuggcau

SEQ ID NO: 1665147 - RNA, 19 nt, Artificial Sequence
  Description of Artificial Sequence: Synthetic oligonucleotide
aauaccauacgaguugcca

SEQ ID NO: 1665148 - RNA, 19 nt, Artificial Sequence
  Description of Artificial Sequence: Synthetic oligonucleotide
gugagaagucauuaauagg

SEQ ID NO: 1665149 - RNA, 19 nt, Artificial Sequence
  Description of Artificial Sequence: Synthetic oligonucleotide
accauuaugacuguuggga

SEQ ID NO: 1665150 - RNA, 19 nt, Artificial Sequence
  Description of Artificial Sequence: Synthetic oligonucleotide
acuggacaguuuccgagcc

SEQ ID NO: 1665151 - RNA, 19 nt, Artificial Sequence
  Description of Artificial Sequence: Synthetic oligonucleotide
aaauaugaugcuguucaca

SEQ ID NO: 1665152 - RNA, 19 nt, Artificial Sequence
  Description of Artificial Sequence: Synthetic oligonucleotide
acagauccauuuccaauac

SEQ ID NO: 1665153 - RNA, 19 nt, Artificial Sequence
  Description of Artificial Sequence: Synthetic oligonucleotide
aagacgacauuuggauucc

SEQ ID NO: 1665154 - RNA, 19 nt, Artificial Sequence
  Description of Artificial Sequence: Synthetic oligonucleotide
guagagaagaucaucagga

SEQ ID NO: 1665155 - RNA, 19 nt, Artificial Sequence
  Description of Artificial Sequence: Synthetic oligonucleotide
cagaacacccaucaugggg

SEQ ID NO: 1665156 - RNA, 19 nt, Artificial Sequence
  Description of Artificial Sequence: Synthetic oligonucleotide
guaagguccauuuucucac

SEQ ID NO: 1665157 - RNA, 19 nt, Artificial Sequence
  Description of Artificial Sequence: Synthetic oligonucleotide
guugggacuaggcucaaag

SEQ ID NO: 1665158 - RNA, 19 nt, Artificial Sequence
  Description of Artificial Sequence: Synthetic oligonucleotide
ugcaaaggaugucuccagg

SEQ ID NO: 1665159 - RNA, 19 nt, Artificial Sequence
  Description of Artificial Sequence: Synthetic oligonucleotide
gaacgaguagagaagauca

SEQ ID NO: 1665160 - RNA, 19 nt, Artificial Sequence
  Description of Artificial Sequence: Synthetic oligonucleotide
uuugcaguaagguccauuu

SEQ ID NO: 1665161 - RNA, 19 nt, Artificial Sequence
  Description of Artificial Sequence: Synthetic oligonucleotide
augauagacuuucacaaau

SEQ ID NO: 1665162 - RNA, 19 nt, Artificial Sequence
  Description of Artificial Sequence: Synthetic oligonucleotide
cagaacaccguccagaaca

SEQ ID NO: 1665163 - RNA, 19 nt, Artificial Sequence
  Description of Artificial Sequence: Synthetic oligonucleotide
cuggauacugaguugauga

SEQ ID NO: 1665164 - RNA, 19 nt, Artificial Sequence
  Description of Artificial Sequence: Synthetic oligonucleotide
aguuuccgagccuugauga

SEQ ID NO: 1665165 - RNA, 19 nt, Artificial Sequence
  Description of Artificial Sequence: Synthetic oligonucleotide
agucgagaugaacucuccc

SEQ ID NO: 1665166 - RNA, 19 nt, Artificial Sequence
  Description of Artificial Sequence: Synthetic oligonucleotide
uuuccccagauaaugacau

SEQ ID NO: 1665167 - RNA, 19 nt, Artificial Sequence
  Description of Artificial Sequence: Synthetic oligonucleotide
uuucgcugcagacauugca

SEQ ID NO: 1665168 - RNA, 19 nt, Artificial Sequence
  Description of Artificial Sequence: Synthetic oligonucleotide
gaccuuaacugauuucuug

SEQ ID NO: 1665169 - RNA, 19 nt, Artificial Sequence
  Description of Artificial Sequence: Synthetic oligonucleotide
caggacuuauccuugauca

SEQ ID NO: 1665170 - RNA, 19 nt, Artificial Sequence
  Description of Artificial Sequence: Synthetic oligonucleotide
aaaccagaugucucugaug

SEQ ID NO: 1665171 - RNA, 19 nt, Artificial Sequence
  Description of Artificial Sequence: Synthetic oligonucleotide
acauuuggauuccucagcu

SEQ ID NO: 1665172 - RNA, 19 nt, Artificial Sequence
  Description of Artificial Sequence: Synthetic oligonucleotide
auuuucucacgugagaagu

SEQ ID NO: 1665173 - RNA, 19 nt, Artificial Sequence
  Description of Artificial Sequence: Synthetic oligonucleotide
ugcaauuuggccagcugcu

SEQ ID NO: 1665174 - RNA, 19 nt, Artificial Sequence
  Description of Artificial Sequence: Synthetic oligonucleotide
uuccacuugaauauauuuu

SEQ ID NO: 1665175 - RNA, 19 nt, Artificial Sequence
  Description of Artificial Sequence: Synthetic oligonucleotide
uuuguguuggcuggguucc

SEQ ID NO: 1665176 - RNA, 19 nt, Artificial Sequence
  Description of Artificial Sequence: Synthetic oligonucleotide
auacacaccaacuuccuuu

SEQ ID NO: 1665177 - RNA, 19 nt, Artificial Sequence
  Description of Artificial Sequence: Synthetic oligonucleotide
uucgcugcagacauugcac

SEQ ID NO: 1665178 - RNA, 19 nt, Artificial Sequence
  Description of Artificial Sequence: Synthetic oligonucleotide
uaccauuaugacuguuggg

SEQ ID NO: 1665179 - RNA, 19 nt, Artificial Sequence
  Description of Artificial Sequence: Synthetic oligonucleotide
auagacuuucacaaaucuc

SEQ ID NO: 1665180 - RNA, 19 nt, Artificial Sequence
  Description of Artificial Sequence: Synthetic oligonucleotide
acgacauuuggauuccuca

SEQ ID NO: 1665181 - RNA, 19 nt, Artificial Sequence
  Description of Artificial Sequence: Synthetic oligonucleotide
augacuguugggacuaggc

SEQ ID NO: 1665182 - RNA, 19 nt, Artificial Sequence
  Description of Artificial Sequence: Synthetic oligonucleotide
uuacaccgaguuuaagagc

SEQ ID NO: 1665183 - RNA, 19 nt, Artificial Sequence
  Description of Artificial Sequence: Synthetic oligonucleotide
uaugcaauuuggccagcug

SEQ ID NO: 1665184 - RNA, 19 nt, Artificial Sequence
  Description of Artificial Sequence: Synthetic oligonucleotide
ucuagucacgcagaggaga

SEQ ID NO: 1665185 - RNA, 19 nt, Artificial Sequence
  Description of Artificial Sequence: Synthetic oligonucleotide
gauauccaggagcacaaga

SEQ ID NO: 1665186 - RNA, 19 nt, Artificial Sequence
  Description of Artificial Sequence: Synthetic oligonucleotide
auacgaguugccaucagag

SEQ ID NO: 1665187 - RNA, 19 nt, Artificial Sequence
  Description of Artificial Sequence: Synthetic oligonucleotide
aucaacacuaauagcauga

SEQ ID NO: 1665188 - RNA, 19 nt, Artificial Sequence
  Description of Artificial Sequence: Synthetic oligonucleotide
cauuuucucacgugagaag

SEQ ID NO: 1665189 - RNA, 19 nt, Artificial Sequence
  Description of Artificial Sequence: Synthetic oligonucleotide
uggauacugaguugaugag

SEQ ID NO: 1665190 - RNA, 19 nt, Artificial Sequence
  Description of Artificial Sequence: Synthetic oligonucleotide
aauaugcaauuuggccagc

SEQ ID NO: 1665191 - RNA, 19 nt, Artificial Sequence
  Description of Artificial Sequence: Synthetic oligonucleotide
ugacuguugggacuaggcu

SEQ ID NO: 1665192 - RNA, 19 nt, Artificial Sequence
  Description of Artificial Sequence: Synthetic oligonucleotide
uuccaaaccagaugucucu

SEQ ID NO: 1665193 - RNA, 19 nt, Artificial Sequence
  Description of Artificial Sequence: Synthetic oligonucleotide
acgcagaggagagaaauuc

SEQ ID NO: 1665194 - RNA, 19 nt, Artificial Sequence
  Description of Artificial Sequence: Synthetic oligonucleotide
gaugggcuggucuuuacca

SEQ ID NO: 1665195 - RNA, 19 nt, Artificial Sequence
  Description of Artificial Sequence: Synthetic oligonucleotide
cuagucacgcagaggagag

SEQ ID NO: 1665196 - RNA, 19 nt, Artificial Sequence
  Description of Artificial Sequence: Synthetic oligonucleotide
acauuaacaugauugucua

SEQ ID NO: 1665197 - RNA, 19 nt, Artificial Sequence
  Description of Artificial Sequence: Synthetic oligonucleotide
aggacuuauccuugaucac

SEQ ID NO: 1665198 - RNA, 19 nt, Artificial Sequence
  Description of Artificial Sequence: Synthetic oligonucleotide
cauugcacuggacaguuuc

SEQ ID NO: 1665199 - RNA, 19 nt, Artificial Sequence
  Description of Artificial Sequence: Synthetic oligonucleotide
cacuaauagcaugauagac

SEQ ID NO: 1665200 - RNA, 19 nt, Artificial Sequence
  Description of Artificial Sequence: Synthetic oligonucleotide
uaauagggaggccuucaac

SEQ ID NO: 1665201 - RNA, 19 nt, Artificial Sequence
  Description of Artificial Sequence: Synthetic oligonucleotide
ucuacagcggagcggacuc

SEQ ID NO: 1665202 - RNA, 19 nt, Artificial Sequence
  Description of Artificial Sequence: Synthetic oligonucleotide
uagcaugauagacuuucac

SEQ ID NO: 1665203 - RNA, 19 nt, Artificial Sequence
  Description of Artificial Sequence: Synthetic oligonucleotide
guuccgacauuauugagaa

SEQ ID NO: 1665204 - RNA, 19 nt, Artificial Sequence
  Description of Artificial Sequence: Synthetic oligonucleotide
agcacaagaaugaugggcu

SEQ ID NO: 1665205 - RNA, 19 nt, Artificial Sequence
  Description of Artificial Sequence: Synthetic oligonucleotide
uauccaggagcacaagaau

SEQ ID NO: 1665206 - RNA, 19 nt, Artificial Sequence
  Description of Artificial Sequence: Synthetic oligonucleotide
caugauugucuagucacgc

SEQ ID NO: 1665207 - RNA, 19 nt, Artificial Sequence
  Description of Artificial Sequence: Synthetic oligonucleotide
uuucucacgugagaaguca

SEQ ID NO: 1665208 - RNA, 19 nt, Artificial Sequence
  Description of Artificial Sequence: Synthetic oligonucleotide
acgaguagagaagaucauc

SEQ ID NO: 1665209 - RNA, 19 nt, Artificial Sequence
  Description of Artificial Sequence: Synthetic oligonucleotide
ugaugggcuggucuuuacc

SEQ ID NO: 1665210 - RNA, 19 nt, Artificial Sequence
  Description of Artificial Sequence: Synthetic oligonucleotide
caacugaaguucuccuugg

SEQ ID NO: 1665211 - RNA, 19 nt, Artificial Sequence
  Description of Artificial Sequence: Synthetic oligonucleotide
ucugggguuccaaaccaga

SEQ ID NO: 1665212 - RNA, 19 nt, Artificial Sequence
  Description of Artificial Sequence: Synthetic oligonucleotide
cuugaucacgacagggaac

SEQ ID NO: 1665213 - RNA, 19 nt, Artificial Sequence
  Description of Artificial Sequence: Synthetic oligonucleotide
cuggucuuuaccaaacaca

SEQ ID NO: 1665214 - RNA, 19 nt, Artificial Sequence
  Description of Artificial Sequence: Synthetic oligonucleotide
ucuuugucuguugcaauga

SEQ ID NO: 1665215 - RNA, 19 nt, Artificial Sequence
  Description of Artificial Sequence: Synthetic oligonucleotide
agaacugcgaggccgacuu

SEQ ID NO: 1665216 - RNA, 19 nt, Artificial Sequence
  Description of Artificial Sequence: Synthetic oligonucleotide
ugaacucucccuugagcca

SEQ ID NO: 1665217 - RNA, 19 nt, Artificial Sequence
  Description of Artificial Sequence: Synthetic oligonucleotide
cuuaacugauuucuuggca

SEQ ID NO: 1665218 - RNA, 19 nt, Artificial Sequence
  Description of Artificial Sequence: Synthetic oligonucleotide
augacacccauugacacga

SEQ ID NO: 1665219 - RNA, 19 nt, Artificial Sequence
  Description of Artificial Sequence: Synthetic oligonucleotide
agggaggccuucaacaaac

SEQ ID NO: 1665220 - RNA, 19 nt, Artificial Sequence
  Description of Artificial Sequence: Synthetic oligonucleotide
auaccauacgaguugccau

SEQ ID NO: 1665221 - RNA, 19 nt, Artificial Sequence
  Description of Artificial Sequence: Synthetic oligonucleotide
cagggaacgaguagagaag

SEQ ID NO: 1665222 - RNA, 19 nt, Artificial Sequence
  Description of Artificial Sequence: Synthetic oligonucleotide
uccccagauaaugacauuc

SEQ ID NO: 1665223 - RNA, 19 nt, Artificial Sequence
  Description of Artificial Sequence: Synthetic oligonucleotide
uaccacgaugcacauaaua

SEQ ID NO: 1665224 - RNA, 19 nt, Artificial Sequence
  Description of Artificial Sequence: Synthetic oligonucleotide
guuuguguuggcuggguuc

SEQ ID NO: 1665225 - RNA, 19 nt, Artificial Sequence
  Description of Artificial Sequence: Synthetic oligonucleotide
ucgagaugaacucucccuu

SEQ ID NO: 1665226 - RNA, 19 nt, Artificial Sequence
  Description of Artificial Sequence: Synthetic oligonucleotide
uuagcaugauugacaucug

SEQ ID NO: 1665227 - RNA, 19 nt, Artificial Sequence
  Description of Artificial Sequence: Synthetic oligonucleotide
gaucacgacagggaacgag

SEQ ID NO: 1665228 - RNA, 19 nt, Artificial Sequence
  Description of Artificial Sequence: Synthetic oligonucleotide
ggagagagcgcugugcucg

SEQ ID NO: 1665229 - RNA, 19 nt, Artificial Sequence
  Description of Artificial Sequence: Synthetic oligonucleotide
uaccauacgaguugccauc

SEQ ID NO: 1665230 - RNA, 19 nt, Artificial Sequence
  Description of Artificial Sequence: Synthetic oligonucleotide
auuaauagggaggccuuca

SEQ ID NO: 1665231 - RNA, 19 nt, Artificial Sequence
  Description of Artificial Sequence: Synthetic oligonucleotide
ugacauuaacaugauuguc

SEQ ID NO: 1665232 - RNA, 19 nt, Artificial Sequence
  Description of Artificial Sequence: Synthetic oligonucleotide
uggcuuucgcugcagacau

SEQ ID NO: 1665233 - RNA, 19 nt, Artificial Sequence
  Description of Artificial Sequence: Synthetic oligonucleotide
acagucgagaugaacucuc

SEQ ID NO: 1665234 - RNA, 19 nt, Artificial Sequence
  Description of Artificial Sequence: Synthetic oligonucleotide
acauuauugagaacugcga

SEQ ID NO: 1665235 - RNA, 19 nt, Artificial Sequence
  Description of Artificial Sequence: Synthetic oligonucleotide
acucugauugguuccgaca

SEQ ID NO: 1665236 - RNA, 19 nt, Artificial Sequence
  Description of Artificial Sequence: Synthetic oligonucleotide
gcaacugaaguucuccuug

SEQ ID NO: 1665237 - RNA, 19 nt, Artificial Sequence
  Description of Artificial Sequence: Synthetic oligonucleotide
gcucaaagacgacauuugg

SEQ ID NO: 1665238 - RNA, 19 nt, Artificial Sequence
  Description of Artificial Sequence: Synthetic oligonucleotide
uacgaguugccaucagaga

SEQ ID NO: 1665239 - RNA, 19 nt, Artificial Sequence
  Description of Artificial Sequence: Synthetic oligonucleotide
uugggacuaggcucaaaga

SEQ ID NO: 1665240 - RNA, 19 nt, Artificial Sequence
  Description of Artificial Sequence: Synthetic oligonucleotide
acaugauugucuagucacg

SEQ ID NO: 1665241 - RNA, 19 nt, Artificial Sequence
  Description of Artificial Sequence: Synthetic oligonucleotide
gggacuaggcucaaagacg

SEQ ID NO: 1665242 - RNA, 19 nt, Artificial Sequence
  Description of Artificial Sequence: Synthetic oligonucleotide
cacuggacaguuuccgagc

SEQ ID NO: 1665243 - RNA, 19 nt, Artificial Sequence
  Description of Artificial Sequence: Synthetic oligonucleotide
accacgaugcacauaauau

SEQ ID NO: 1665244 - RNA, 19 nt, Artificial Sequence
  Description of Artificial Sequence: Synthetic oligonucleotide
augauugucuagucacgca

SEQ ID NO: 1665245 - RNA, 19 nt, Artificial Sequence
  Description of Artificial Sequence: Synthetic oligonucleotide
acuaggcucaaagacgaca

SEQ ID NO: 1665246 - RNA, 19 nt, Artificial Sequence
  Description of Artificial Sequence: Synthetic oligonucleotide
caggucaccucuacagcgg

SEQ ID NO: 1665247 - RNA, 19 nt, Artificial Sequence
  Description of Artificial Sequence: Synthetic oligonucleotide
ugcgaggccgacuucugca

SEQ ID NO: 1665248 - RNA, 19 nt, Artificial Sequence
  Description of Artificial Sequence: Synthetic oligonucleotide
uacugaguugaugagugau

SEQ ID NO: 1665249 - RNA, 19 nt, Artificial Sequence
  Description of Artificial Sequence: Synthetic oligonucleotide
uggucagagauggcuuucg

SEQ ID NO: 1665250 - RNA, 19 nt, Artificial Sequence
  Description of Artificial Sequence: Synthetic oligonucleotide
auauccaggagcacaagaa

SEQ ID NO: 1665251 - RNA, 19 nt, Artificial Sequence
  Description of Artificial Sequence: Synthetic oligonucleotide
ugguccaagcgagucaggc

SEQ ID NO: 1665252 - RNA, 19 nt, Artificial Sequence
  Description of Artificial Sequence: Synthetic oligonucleotide
gggauauuuacugacauua

SEQ ID NO: 1665253 - RNA, 19 nt, Artificial Sequence
  Description of Artificial Sequence: Synthetic oligonucleotide
acgacagggaacgaguaga

SEQ ID NO: 1665254 - RNA, 19 nt, Artificial Sequence
  Description of Artificial Sequence: Synthetic oligonucleotide
aguuccaucagaacaccgu

SEQ ID NO: 1665255 - RNA, 19 nt, Artificial Sequence
  Description of Artificial Sequence: Synthetic oligonucleotide
acuguugggacuaggcuca

SEQ ID NO: 1665256 - RNA, 19 nt, Artificial Sequence
  Description of Artificial Sequence: Synthetic oligonucleotide
accgaguuuaagagcaauc

SEQ ID NO: 1665257 - RNA, 19 nt, Artificial Sequence
  Description of Artificial Sequence: Synthetic oligonucleotide
agaacaccguccagaacac

SEQ ID NO: 1665258 - RNA, 19 nt, Artificial Sequence
  Description of Artificial Sequence: Synthetic oligonucleotide
cacccauugacacgaacuc

SEQ ID NO: 1665259 - RNA, 19 nt, Artificial Sequence
  Description of Artificial Sequence: Synthetic oligonucleotide
ucacgugagaagucauuaa

SEQ ID NO: 1665260 - RNA, 19 nt, Artificial Sequence
  Description of Artificial Sequence: Synthetic oligonucleotide
ugguuccgacauuauugag

SEQ ID NO: 1665261 - RNA, 19 nt, Artificial Sequence
  Description of Artificial Sequence: Synthetic oligonucleotide
aguauaccauuaugacugu

SEQ ID NO: 1665262 - RNA, 19 nt, Artificial Sequence
  Description of Artificial Sequence: Synthetic oligonucleotide
augaugggcuggucuuuac

SEQ ID NO: 1665263 - RNA, 19 nt, Artificial Sequence
  Description of Artificial Sequence: Synthetic oligonucleotide
caugauugacaucuggaua

SEQ ID NO: 1665264 - RNA, 19 nt, Artificial Sequence
  Description of Artificial Sequence: Synthetic oligonucleotide
ugcacuggacaguuuccga

SEQ ID NO: 1665265 - RNA, 19 nt, Artificial Sequence
  Description of Artificial Sequence: Synthetic oligonucleotide
aggacucugauugguuccg

SEQ ID NO: 1665266 - RNA, 19 nt, Artificial Sequence
  Description of Artificial Sequence: Synthetic oligonucleotide
agucacaaggacucugauu

SEQ ID NO: 1665267 - RNA, 19 nt, Artificial Sequence
  Description of Artificial Sequence: Synthetic oligonucleotide
ccuuaacugauuucuuggc

SEQ ID NO: 1665268 - RNA, 19 nt, Artificial Sequence
  Description of Artificial Sequence: Synthetic oligonucleotide
caguuuccgagccuugaug

SEQ ID NO: 1665269 - RNA, 19 nt, Artificial Sequence
  Description of Artificial Sequence: Synthetic oligonucleotide
cacgcuguugcacagucga

SEQ ID NO: 1665270 - RNA, 19 nt, Artificial Sequence
  Description of Artificial Sequence: Synthetic oligonucleotide
ugcucuguugugguccaag

SEQ ID NO: 1665271 - RNA, 19 nt, Artificial Sequence
  Description of Artificial Sequence: Synthetic oligonucleotide
caucuggauacugaguuga

SEQ ID NO: 1665272 - RNA, 19 nt, Artificial Sequence
  Description of Artificial Sequence: Synthetic oligonucleotide
gauugucuagucacgcaga

SEQ ID NO: 1665273 - RNA, 19 nt, Artificial Sequence
  Description of Artificial Sequence: Synthetic oligonucleotide
aauuucacuuuagcaugau

SEQ ID NO: 1665274 - RNA, 19 nt, Artificial Sequence
  Description of Artificial Sequence: Synthetic oligonucleotide
gacucugauugguuccgac

SEQ ID NO: 1665275 - RNA, 19 nt, Artificial Sequence
  Description of Artificial Sequence: Synthetic oligonucleotide
ucaacacuaauagcaugau

SEQ ID NO: 1665276 - RNA, 19 nt, Artificial Sequence
  Description of Artificial Sequence: Synthetic oligonucleotide
ugaccuuaacugauuucuu

SEQ ID NO: 1665277 - RNA, 19 nt, Artificial Sequence
  Description of Artificial Sequence: Synthetic oligonucleotide
agggaacgaguagagaaga

SEQ ID NO: 1665278 - RNA, 19 nt, Artificial Sequence
  Description of Artificial Sequence: Synthetic oligonucleotide
agucacgcagaggagagaa

SEQ ID NO: 1665279 - RNA, 19 nt, Artificial Sequence
  Description of Artificial Sequence: Synthetic oligonucleotide
gaugagugauuuccccaga

SEQ ID NO: 1665280 - RNA, 19 nt, Artificial Sequence
  Description of Artificial Sequence: Synthetic oligonucleotide
ugggauauuuacugacauu

SEQ ID NO: 1665281 - RNA, 19 nt, Artificial Sequence
  Description of Artificial Sequence: Synthetic oligonucleotide
cauacgaguugccaucaga

SEQ ID NO: 1665282 - RNA, 19 nt, Artificial Sequence
  Description of Artificial Sequence: Synthetic oligonucleotide
auggcuuucgcugcagaca

SEQ ID NO: 1665283 - RNA, 19 nt, Artificial Sequence
  Description of Artificial Sequence: Synthetic oligonucleotide
cagucgagaugaacucucc

SEQ ID NO: 1665284 - RNA, 19 nt, Artificial Sequence
  Description of Artificial Sequence: Synthetic oligonucleotide
ucucacgugagaagucauu

SEQ ID NO: 1665285 - RNA, 19 nt, Artificial Sequence
  Description of Artificial Sequence: Synthetic oligonucleotide
auacugaguugaugaguga

SEQ ID NO: 1665286 - RNA, 19 nt, Artificial Sequence
  Description of Artificial Sequence: Synthetic oligonucleotide
aaugaugggcuggucuuua

SEQ ID NO: 1665287 - RNA, 19 nt, Artificial Sequence
  Description of Artificial Sequence: Synthetic oligonucleotide
uucucacgugagaagucau

SEQ ID NO: 1665288 - RNA, 19 nt, Artificial Sequence
  Description of Artificial Sequence: Synthetic oligonucleotide
guuccaaaccagaugucuc

SEQ ID NO: 1665289 - RNA, 19 nt, Artificial Sequence
  Description of Artificial Sequence: Synthetic oligonucleotide
ucacgacagggaacgagua

SEQ ID NO: 1665290 - RNA, 19 nt, Artificial Sequence
  Description of Artificial Sequence: Synthetic oligonucleotide
gaauaccauacgaguugcc

SEQ ID NO: 1665291 - RNA, 19 nt, Artificial Sequence
  Description of Artificial Sequence: Synthetic oligonucleotide
aggcucaaagacgacauuu

SEQ ID NO: 1665292 - RNA, 19 nt, Artificial Sequence
  Description of Artificial Sequence: Synthetic oligonucleotide
agcggacucugggagagag

SEQ ID NO: 1665293 - RNA, 19 nt, Artificial Sequence
  Description of Artificial Sequence: Synthetic oligonucleotide
ucugauugguuccgacauu

SEQ ID NO: 1665294 - RNA, 19 nt, Artificial Sequence
  Description of Artificial Sequence: Synthetic oligonucleotide
gucgagaugaacucucccu

SEQ ID NO: 1665295 - RNA, 19 nt, Artificial Sequence
  Description of Artificial Sequence: Synthetic oligonucleotide
aacgaguagagaagaucau

SEQ ID NO: 1665296 - RNA, 19 nt, Artificial Sequence
  Description of Artificial Sequence: Synthetic oligonucleotide
uuccaggacuuauccuuga

SEQ ID NO: 1665297 - RNA, 19 nt, Artificial Sequence
  Description of Artificial Sequence: Synthetic oligonucleotide
gacacccauugacacgaac

SEQ ID NO: 1665298 - RNA, 19 nt, Artificial Sequence
  Description of Artificial Sequence: Synthetic oligonucleotide
ugauugguuccgacauuau

SEQ ID NO: 1665299 - RNA, 19 nt, Artificial Sequence
  Description of Artificial Sequence: Synthetic oligonucleotide
gguuccgacauuauugaga

SEQ ID NO: 1665300 - RNA, 19 nt, Artificial Sequence
  Description of Artificial Sequence: Synthetic oligonucleotide
cucugggguuccaaaccag

SEQ ID NO: 1665301 - RNA, 19 nt, Artificial Sequence
  Description of Artificial Sequence: Synthetic oligonucleotide
uccuugcaauuucacuuua

SEQ ID NO: 1665302 - RNA, 19 nt, Artificial Sequence
  Description of Artificial Sequence: Synthetic oligonucleotide
acauuugcuuucaguaggu

SEQ ID NO: 1665303 - RNA, 19 nt, Artificial Sequence
  Description of Artificial Sequence: Synthetic oligonucleotide
agagcacaaucuugcaguu

SEQ ID NO: 1665304 - RNA, 19 nt, Artificial Sequence
  Description of Artificial Sequence: Synthetic oligonucleotide
agugauuuccccagauaau

SEQ ID NO: 1665305 - RNA, 19 nt, Artificial Sequence
  Description of Artificial Sequence: Synthetic oligonucleotide
gggcuuugaagauucugac

SEQ ID NO: 1665306 - RNA, 19 nt, Artificial Sequence
  Description of Artificial Sequence: Synthetic oligonucleotide
cacgaugcacauaauauuu

SEQ ID NO: 1665307 - RNA, 19 nt, Artificial Sequence
  Description of Artificial Sequence: Synthetic oligonucleotide
uacugacauuaacaugauu

SEQ ID NO: 1665308 - RNA, 19 nt, Artificial Sequence
  Description of Artificial Sequence: Synthetic oligonucleotide
cuuuagcaugauugacauc

SEQ ID NO: 1665309 - RNA, 19 nt, Artificial Sequence
  Description of Artificial Sequence: Synthetic oligonucleotide
uccaagcgagucaggcaac

SEQ ID NO: 1665310 - RNA, 19 nt, Artificial Sequence
  Description of Artificial Sequence: Synthetic oligonucleotide
ggacuaggcucaaagacga

SEQ ID NO: 1665311 - RNA, 19 nt, Artificial Sequence
  Description of Artificial Sequence: Synthetic oligonucleotide
agcggagcggacucuggga

SEQ ID NO: 1665312 - RNA, 19 nt, Artificial Sequence
  Description of Artificial Sequence: Synthetic oligonucleotide
uacagcggagcggacucug

SEQ ID NO: 1665313 - RNA, 19 nt, Artificial Sequence
  Description of Artificial Sequence: Synthetic oligonucleotide
acgugagaagucauuaaua

SEQ ID NO: 1665314 - RNA, 19 nt, Artificial Sequence
  Description of Artificial Sequence: Synthetic oligonucleotide
gacaguuuccgagccuuga

SEQ ID NO: 1665315 - RNA, 19 nt, Artificial Sequence
  Description of Artificial Sequence: Synthetic oligonucleotide
uuaugacuguugggacuag

SEQ ID NO: 1665316 - RNA, 19 nt, Artificial Sequence
  Description of Artificial Sequence: Synthetic oligonucleotide
gauugguuccgacauuauu

SEQ ID NO: 1665317 - RNA, 19 nt, Artificial Sequence
  Description of Artificial Sequence: Synthetic oligonucleotide
cagcggagcggacucuggg

SEQ ID NO: 1665318 - RNA, 19 nt, Artificial Sequence
  Description of Artificial Sequence: Synthetic oligonucleotide
auagcaugauagacuuuca

SEQ ID NO: 1665319 - RNA, 19 nt, Artificial Sequence
  Description of Artificial Sequence: Synthetic oligonucleotide
acccauugacacgaacucu

SEQ ID NO: 1665320 - RNA, 19 nt, Artificial Sequence
  Description of Artificial Sequence: Synthetic oligonucleotide
accauacgaguugccauca

SEQ ID NO: 1665321 - RNA, 19 nt, Artificial Sequence
  Description of Artificial Sequence: Synthetic oligonucleotide
gagagcgcugugcucgcca

SEQ ID NO: 1665322 - RNA, 19 nt, Artificial Sequence
  Description of Artificial Sequence: Synthetic oligonucleotide
cucugauugguuccgacau

SEQ ID NO: 1665323 - RNA, 19 nt, Artificial Sequence
  Description of Artificial Sequence: Synthetic oligonucleotide
ucucuaccacgaugcacau

SEQ ID NO: 1665324 - RNA, 19 nt, Artificial Sequence
  Description of Artificial Sequence: Synthetic oligonucleotide
gcacagucgagaugaacuc

SEQ ID NO: 1665325 - RNA, 19 nt, Artificial Sequence
  Description of Artificial Sequence: Synthetic oligonucleotide
agcgagucaggcaacugaa

SEQ ID NO: 1665326 - RNA, 19 nt, Artificial Sequence
  Description of Artificial Sequence: Synthetic oligonucleotide
gcucuguugugguccaagc

SEQ ID NO: 1665327 - RNA, 19 nt, Artificial Sequence
  Description of Artificial Sequence: Synthetic oligonucleotide
ccgacauuauugagaacug

SEQ ID NO: 1665328 - RNA, 19 nt, Artificial Sequence
  Description of Artificial Sequence: Synthetic oligonucleotide
caccucuacagcggagcgg

SEQ ID NO: 1665329 - RNA, 19 nt, Artificial Sequence
  Description of Artificial Sequence: Synthetic oligonucleotide
cauuuccaauacuguacaa

SEQ ID NO: 1665330 - RNA, 19 nt, Artificial Sequence
  Description of Artificial Sequence: Synthetic oligonucleotide
agcgcugugcucgccagga

SEQ ID NO: 1665331 - RNA, 19 nt, Artificial Sequence
  Description of Artificial Sequence: Synthetic oligonucleotide
gucuagucacgcagaggag

SEQ ID NO: 1665332 - RNA, 19 nt, Artificial Sequence
  Description of Artificial Sequence: Synthetic oligonucleotide
gcggagcggacucugggag

SEQ ID NO: 1665333 - RNA, 19 nt, Artificial Sequence
  Description of Artificial Sequence: Synthetic oligonucleotide
ucgauggggcugacuugga

SEQ ID NO: 1665334 - RNA, 19 nt, Artificial Sequence
  Description of Artificial Sequence: Synthetic oligonucleotide
cugcgaggccgacuucugc

SEQ ID NO: 1665335 - RNA, 19 nt, Artificial Sequence
  Description of Artificial Sequence: Synthetic oligonucleotide
gaacaccguccagaacacc

SEQ ID NO: 1665336 - RNA, 19 nt, Artificial Sequence
  Description of Artificial Sequence: Synthetic oligonucleotide
caacacuaauagcaugaua

SEQ ID NO: 1665337 - RNA, 19 nt, Artificial Sequence
  Description of Artificial Sequence: Synthetic oligonucleotide
acgaugcacauaauauuua

SEQ ID NO: 1665338 - RNA, 19 nt, Artificial Sequence
  Description of Artificial Sequence: Synthetic oligonucleotide
cccucugggguuccaaacc

SEQ ID NO: 1665339 - RNA, 19 nt, Artificial Sequence
  Description of Artificial Sequence: Synthetic oligonucleotide
caacaaacuuccaggacuu

SEQ ID NO: 1665340 - RNA, 19 nt, Artificial Sequence
  Description of Artificial Sequence: Synthetic oligonucleotide
ggaucgauggggcugacuu

SEQ ID NO: 1665341 - RNA, 19 nt, Artificial Sequence
  Description of Artificial Sequence: Synthetic oligonucleotide
uuccgacauuauugagaac

SEQ ID NO: 1665342 - RNA, 19 nt, Artificial Sequence
  Description of Artificial Sequence: Synthetic oligonucleotide
cgaguugccaucagagaug

SEQ ID NO: 1665343 - RNA, 19 nt, Artificial Sequence
  Description of Artificial Sequence: Synthetic oligonucleotide
ccaggacuuauccuugauc

SEQ ID NO: 1665344 - RNA, 19 nt, Artificial Sequence
  Description of Artificial Sequence: Synthetic oligonucleotide
gcaugauugacaucuggau

SEQ ID NO: 1665345 - RNA, 19 nt, Artificial Sequence
  Description of Artificial Sequence: Synthetic oligonucleotide
acaaggacucugauugguu

SEQ ID NO: 1665346 - RNA, 19 nt, Artificial Sequence
  Description of Artificial Sequence: Synthetic oligonucleotide
cagagaugacacccauuga

SEQ ID NO: 1665347 - RNA, 19 nt, Artificial Sequence
  Description of Artificial Sequence: Synthetic oligonucleotide
accguccagaacacccauc

SEQ ID NO: 1665348 - RNA, 19 nt, Artificial Sequence
  Description of Artificial Sequence: Synthetic oligonucleotide
gaggccgacuucugcaccu

SEQ ID NO: 1665349 - RNA, 19 nt, Artificial Sequence
  Description of Artificial Sequence: Synthetic oligonucleotide
caguuacaccgaguuuaag

SEQ ID NO: 1665350 - RNA, 19 nt, Artificial Sequence
  Description of Artificial Sequence: Synthetic oligonucleotide
aagagcaaucugagauuuu

SEQ ID NO: 1665351 - RNA, 19 nt, Artificial Sequence
  Description of Artificial Sequence: Synthetic oligonucleotide
uagucacgcagaggagaga

SEQ ID NO: 1665352 - RNA, 19 nt, Artificial Sequence
  Description of Artificial Sequence: Synthetic oligonucleotide
gcaguuuguguuggcuggg

SEQ ID NO: 1665353 - RNA, 19 nt, Artificial Sequence
  Description of Artificial Sequence: Synthetic oligonucleotide
ugaucacgacagggaacga

SEQ ID NO: 1665354 - RNA, 19 nt, Artificial Sequence
  Description of Artificial Sequence: Synthetic oligonucleotide
gccuugaugacagcagcac

SEQ ID NO: 1665355 - RNA, 19 nt, Artificial Sequence
  Description of Artificial Sequence: Synthetic oligonucleotide
uuccccagauaaugacauu

SEQ ID NO: 1665356 - RNA, 19 nt, Artificial Sequence
  Description of Artificial Sequence: Synthetic oligonucleotide
cugccaguuccuuugcagu

SEQ ID NO: 1665357 - RNA, 19 nt, Artificial Sequence
  Description of Artificial Sequence: Synthetic oligonucleotide
caaagacgacauuuggauu

SEQ ID NO: 1665358 - RNA, 19 nt, Artificial Sequence
  Description of Artificial Sequence: Synthetic oligonucleotide
ugagaacugcgaggccgac

SEQ ID NO: 1665359 - RNA, 19 nt, Artificial Sequence
  Description of Artificial Sequence: Synthetic oligonucleotide
caaugaccuuaacugauuu

SEQ ID NO: 1665360 - RNA, 19 nt, Artificial Sequence
  Description of Artificial Sequence: Synthetic oligonucleotide
gacuaggcucaaagacgac

SEQ ID NO: 1665361 - RNA, 19 nt, Artificial Sequence
  Description of Artificial Sequence: Synthetic oligonucleotide
ccguccagaacacccauca

SEQ ID NO: 1665362 - RNA, 19 nt, Artificial Sequence
  Description of Artificial Sequence: Synthetic oligonucleotide
ggauacugaguugaugagu

SEQ ID NO: 1665363 - RNA, 19 nt, Artificial Sequence
  Description of Artificial Sequence: Synthetic oligonucleotide
cgagaugaacucucccuug

SEQ ID NO: 1665364 - RNA, 19 nt, Artificial Sequence
  Description of Artificial Sequence: Synthetic oligonucleotide
uccgagccuugaugacagc

SEQ ID NO: 1665365 - RNA, 19 nt, Artificial Sequence
  Description of Artificial Sequence: Synthetic oligonucleotide
ugacacccauugacacgaa

SEQ ID NO: 1665366 - RNA, 19 nt, Artificial Sequence
  Description of Artificial Sequence: Synthetic oligonucleotide
gaacucucccucugggguu

SEQ ID NO: 1665367 - RNA, 19 nt, Artificial Sequence
  Description of Artificial Sequence: Synthetic oligonucleotide
gcaguaagguccauuuucu

SEQ ID NO: 1665368 - RNA, 19 nt, Artificial Sequence
  Description of Artificial Sequence: Synthetic oligonucleotide
uguugggacuaggcucaaa

SEQ ID NO: 1665369 - RNA, 19 nt, Artificial Sequence
  Description of Artificial Sequence: Synthetic oligonucleotide
gaacugcgaggccgacuuc

SEQ ID NO: 1665370 - RNA, 19 nt, Artificial Sequence
  Description of Artificial Sequence: Synthetic oligonucleotide
ccagauaaugacauucuuu

SEQ ID NO: 1665371 - RNA, 19 nt, Artificial Sequence
  Description of Artificial Sequence: Synthetic oligonucleotide
cacaaggacucugauuggu

SEQ ID NO: 1665372 - RNA, 19 nt, Artificial Sequence
  Description of Artificial Sequence: Synthetic oligonucleotide
ggcuggucuuuaccaaaca

SEQ ID NO: 1665373 - RNA, 19 nt, Artificial Sequence
  Description of Artificial Sequence: Synthetic oligonucleotide
acgcuguugcacagucgag

SEQ ID NO: 1665374 - RNA, 19 nt, Artificial Sequence
  Description of Artificial Sequence: Synthetic oligonucleotide
ccaucagaacaccguccag

SEQ ID NO: 1665375 - RNA, 19 nt, Artificial Sequence
  Description of Artificial Sequence: Synthetic oligonucleotide
gcaccacgcuguugcacag

SEQ ID NO: 1665376 - RNA, 19 nt, Artificial Sequence
  Description of Artificial Sequence: Synthetic oligonucleotide
agacgacauuuggauuccu

SEQ ID NO: 1665377 - RNA, 19 nt, Artificial Sequence
  Description of Artificial Sequence: Synthetic oligonucleotide
gggcuggucuuuaccaaac

SEQ ID NO: 1665378 - RNA, 19 nt, Artificial Sequence
  Description of Artificial Sequence: Synthetic oligonucleotide
ccacgcuguugcacagucg

SEQ ID NO: 1665379 - RNA, 19 nt, Artificial Sequence
  Description of Artificial Sequence: Synthetic oligonucleotide
cacagucgagaugaacucu

SEQ ID NO: 1665380 - RNA, 19 nt, Artificial Sequence
  Description of Artificial Sequence: Synthetic oligonucleotide
gcuggguuccccacaacaa

SEQ ID NO: 1665381 - RNA, 19 nt, Artificial Sequence
  Description of Artificial Sequence: Synthetic oligonucleotide
ggucaccucuacagcggag

SEQ ID NO: 1665382 - RNA, 19 nt, Artificial Sequence
  Description of Artificial Sequence: Synthetic oligonucleotide
gagaacugcgaggccgacu

SEQ ID NO: 1665383 - RNA, 19 nt, Artificial Sequence
  Description of Artificial Sequence: Synthetic oligonucleotide
ccauacgaguugccaucag

SEQ ID NO: 1665384 - RNA, 19 nt, Artificial Sequence
  Description of Artificial Sequence: Synthetic oligonucleotide
cucuacagcggagcggacu

SEQ ID NO: 1665385 - RNA, 19 nt, Artificial Sequence
  Description of Artificial Sequence: Synthetic oligonucleotide
cacaaaucucuaccacgau

SEQ ID NO: 1665386 - RNA, 19 nt, Artificial Sequence
  Description of Artificial Sequence: Synthetic oligonucleotide
aggcggucaggcaguuugu

SEQ ID NO: 1665387 - RNA, 19 nt, Artificial Sequence
  Description of Artificial Sequence: Synthetic oligonucleotide
cuuugcaguaagguccauu

SEQ ID NO: 1665388 - RNA, 19 nt, Artificial Sequence
  Description of Artificial Sequence: Synthetic oligonucleotide
cacgcagaggagagaaauu

SEQ ID NO: 1665389 - RNA, 19 nt, Artificial Sequence
  Description of Artificial Sequence: Synthetic oligonucleotide
gucacgcagaggagagaaa

SEQ ID NO: 1665390 - RNA, 19 nt, Artificial Sequence
  Description of Artificial Sequence: Synthetic oligonucleotide
guugcacagucgagaugaa

SEQ ID NO: 1665391 - RNA, 19 nt, Artificial Sequence
  Description of Artificial Sequence: Synthetic oligonucleotide
guauaccauuaugacuguu

SEQ ID NO: 1665392 - RNA, 19 nt, Artificial Sequence
  Description of Artificial Sequence: Synthetic oligonucleotide
ccccagauaaugacauucu

SEQ ID NO: 1665393 - RNA, 19 nt, Artificial Sequence
  Description of Artificial Sequence: Synthetic oligonucleotide
ccacaacaaugaccuuaac

SEQ ID NO: 1665394 - RNA, 19 nt, Artificial Sequence
  Description of Artificial Sequence: Synthetic oligonucleotide
acauugcacuggacaguuu

SEQ ID NO: 1665395 - RNA, 19 nt, Artificial Sequence
  Description of Artificial Sequence: Synthetic oligonucleotide
caccgaguuuaagagcaau

SEQ ID NO: 1665396 - RNA, 19 nt, Artificial Sequence
  Description of Artificial Sequence: Synthetic oligonucleotide
caguuuguguuggcugggu

SEQ ID NO: 1665397 - RNA, 19 nt, Artificial Sequence
  Description of Artificial Sequence: Synthetic oligonucleotide
gagcggacucugggagaga

SEQ ID NO: 1665398 - RNA, 19 nt, Artificial Sequence
  Description of Artificial Sequence: Synthetic oligonucleotide
gcggacucugggagagagc

SEQ ID NO: 1665399 - RNA, 19 nt, Artificial Sequence
  Description of Artificial Sequence: Synthetic oligonucleotide
cagcaguuacaccgaguuu

SEQ ID NO: 1665400 - RNA, 19 nt, Artificial Sequence
  Description of Artificial Sequence: Synthetic oligonucleotide
cucuaccacgaugcacaua

SEQ ID NO: 1665401 - RNA, 19 nt, Artificial Sequence
  Description of Artificial Sequence: Synthetic oligonucleotide
cuaccacgaugcacauaau

SEQ ID NO: 1665402 - RNA, 19 nt, Artificial Sequence
  Description of Artificial Sequence: Synthetic oligonucleotide
cccagauaaugacauucuu

SEQ ID NO: 1665403 - RNA, 19 nt, Artificial Sequence
  Description of Artificial Sequence: Synthetic oligonucleotide
gggaacgaguagagaagau

SEQ ID NO: 1665404 - RNA, 19 nt, Artificial Sequence
  Description of Artificial Sequence: Synthetic oligonucleotide
ccucuacagcggagcggac

SEQ ID NO: 1665405 - RNA, 19 nt, Artificial Sequence
  Description of Artificial Sequence: Synthetic oligonucleotide
cuccagucacaaggacucu

SEQ ID NO: 1665406 - RNA, 19 nt, Artificial Sequence
  Description of Artificial Sequence: Synthetic oligonucleotide
cuacagcggagcggacucu

SEQ ID NO: 1665407 - RNA, 19 nt, Artificial Sequence
  Description of Artificial Sequence: Synthetic oligonucleotide
cuguugggacuaggcucaa

SEQ ID NO: 1665408 - RNA, 19 nt, Artificial Sequence
  Description of Artificial Sequence: Synthetic oligonucleotide
gggaggccuucaacaaacu

SEQ ID NO: 1665409 - RNA, 19 nt, Artificial Sequence
  Description of Artificial Sequence: Synthetic oligonucleotide
ccaagcgagucaggcaacu

SEQ ID NO: 1665410 - RNA, 19 nt, Artificial Sequence
  Description of Artificial Sequence: Synthetic oligonucleotide
caccacgcuguugcacagu

SEQ ID NO: 1665411 - RNA, 19 nt, Artificial Sequence
  Description of Artificial Sequence: Synthetic oligonucleotide
gcagcacccugggcuuuga

SEQ ID NO: 1665412 - RNA, 19 nt, Artificial Sequence
  Description of Artificial Sequence: Synthetic oligonucleotide
gggaucgauggggcugacu

SEQ ID NO: 1665413 - RNA, 19 nt, Artificial Sequence
  Description of Artificial Sequence: Synthetic oligonucleotide
ggggaucgauggggcugac

SEQ ID NO: 1665414 - RNA, 19 nt, Artificial Sequence
  Description of Artificial Sequence: Synthetic oligonucleotide
ggcuuucgcugcagacauu

SEQ ID NO: 1665415 - RNA, 19 nt, Artificial Sequence
  Description of Artificial Sequence: Synthetic oligonucleotide
acuaaucuccacuucaucc

SEQ ID NO: 1665416 - RNA, 19 nt, Artificial Sequence
  Description of Artificial Sequence: Synthetic oligonucleotide
uucacugugggcaagauca

SEQ ID NO: 1665417 - RNA, 19 nt, Artificial Sequence
  Description of Artificial Sequence: Synthetic oligonucleotide
ucucuuagaaguuucaccc

SEQ ID NO: 1665418 - RNA, 19 nt, Artificial Sequence
  Description of Artificial Sequence: Synthetic oligonucleotide
uuuucuguggaccaauuug

SEQ ID NO: 1665419 - RNA, 19 nt, Artificial Sequence
  Description of Artificial Sequence: Synthetic oligonucleotide
agagaaaucacccucagau

SEQ ID NO: 1665420 - RNA, 19 nt, Artificial Sequence
  Description of Artificial Sequence: Synthetic oligonucleotide
aagaagaucaguuugccuu

SEQ ID NO: 1665421 - RNA, 19 nt, Artificial Sequence
  Description of Artificial Sequence: Synthetic oligonucleotide
cuguggaccaauuugaggc

SEQ ID NO: 1665422 - RNA, 19 nt, Artificial Sequence
  Description of Artificial Sequence: Synthetic oligonucleotide
aggaauagaguuuucagcu

SEQ ID NO: 1665423 - RNA, 19 nt, Artificial Sequence
  Description of Artificial Sequence: Synthetic oligonucleotide
ucgaugaaggucaagguga

SEQ ID NO: 1665424 - RNA, 19 nt, Artificial Sequence
  Description of Artificial Sequence: Synthetic oligonucleotide
aauuugaugguccacucau

SEQ ID NO: 1665425 - RNA, 19 nt, Artificial Sequence
  Description of Artificial Sequence: Synthetic oligonucleotide
ugacuuacugguucuaccg

SEQ ID NO: 1665426 - RNA, 19 nt, Artificial Sequence
  Description of Artificial Sequence: Synthetic oligonucleotide
aacaugcacaaacccaagg

SEQ ID NO: 1665427 - RNA, 19 nt, Artificial Sequence
  Description of Artificial Sequence: Synthetic oligonucleotide
acaagcgagcgccauagcc

SEQ ID NO: 1665428 - RNA, 19 nt, Artificial Sequence
  Description of Artificial Sequence: Synthetic oligonucleotide
ugucaaacaggcuggaacc

SEQ ID NO: 1665429 - RNA, 19 nt, Artificial Sequence
  Description of Artificial Sequence: Synthetic oligonucleotide
ucuccaucaagcuuguuca

SEQ ID NO: 1665430 - RNA, 19 nt, Artificial Sequence
  Description of Artificial Sequence: Synthetic oligonucleotide
caguuguugacguuggugg

SEQ ID NO: 1665431 - RNA, 19 nt, Artificial Sequence
  Description of Artificial Sequence: Synthetic oligonucleotide
uuagcaguugggauggugc

SEQ ID NO: 1665432 - RNA, 19 nt, Artificial Sequence
  Description of Artificial Sequence: Synthetic oligonucleotide
aaggccacgagauuugugu

SEQ ID NO: 1665433 - RNA, 19 nt, Artificial Sequence
  Description of Artificial Sequence: Synthetic oligonucleotide
uuugaaggagcagacuucg

SEQ ID NO: 1665434 - RNA, 19 nt, Artificial Sequence
  Description of Artificial Sequence: Synthetic oligonucleotide
uaagggagaucuuacaagu

SEQ ID NO: 1665435 - RNA, 19 nt, Artificial Sequence
  Description of Artificial Sequence: Synthetic oligonucleotide
uguaaauccccacugcuuc

SEQ ID NO: 1665436 - RNA, 19 nt, Artificial Sequence
  Description of Artificial Sequence: Synthetic oligonucleotide
caaguggggauuuugacac

SEQ ID NO: 1665437 - RNA, 19 nt, Artificial Sequence
  Description of Artificial Sequence: Synthetic oligonucleotide
aaguuagcaguugggaugg

SEQ ID NO: 1665438 - RNA, 19 nt, Artificial Sequence
  Description of Artificial Sequence: Synthetic oligonucleotide
ucgaccaugugaaacuucc

SEQ ID NO: 1665439 - RNA, 19 nt, Artificial Sequence
  Description of Artificial Sequence: Synthetic oligonucleotide
aaauuggggauuuccacau

SEQ ID NO: 1665440 - RNA, 19 nt, Artificial Sequence
  Description of Artificial Sequence: Synthetic oligonucleotide
ucuuagaaguuucaccccu

SEQ ID NO: 1665441 - RNA, 19 nt, Artificial Sequence
  Description of Artificial Sequence: Synthetic oligonucleotide
aagaucaguuugccuuucc

SEQ ID NO: 1665442 - RNA, 19 nt, Artificial Sequence
  Description of Artificial Sequence: Synthetic oligonucleotide
uuccgguuguuaauggacg

SEQ ID NO: 1665443 - RNA, 19 nt, Artificial Sequence
  Description of Artificial Sequence: Synthetic oligonucleotide
acuuacugguucuaccgac

SEQ ID NO: 1665444 - RNA, 19 nt, Artificial Sequence
  Description of Artificial Sequence: Synthetic oligonucleotide
aaaccuccacuucauagca

SEQ ID NO: 1665445 - RNA, 19 nt, Artificial Sequence
  Description of Artificial Sequence: Synthetic oligonucleotide
uuucuacucgaacugccag

SEQ ID NO: 1665446 - RNA, 19 nt, Artificial Sequence
  Description of Artificial Sequence: Synthetic oligonucleotide
aucagcucacacuucgcgc

SEQ ID NO: 1665447 - RNA, 19 nt, Artificial Sequence
  Description of Artificial Sequence: Synthetic oligonucleotide
ucaagcuuguucacuuccg

SEQ ID NO: 1665448 - RNA, 19 nt, Artificial Sequence
  Description of Artificial Sequence: Synthetic oligonucleotide
aagcccaucaugagcaggc

SEQ ID NO: 1665449 - RNA, 19 nt, Artificial Sequence
  Description of Artificial Sequence: Synthetic oligonucleotide
uguuaauggacgccucucc

SEQ ID NO: 1665450 - RNA, 19 nt, Artificial Sequence
  Description of Artificial Sequence: Synthetic oligonucleotide
ugauguaaauccccacugc

SEQ ID NO: 1665451 - RNA, 19 nt, Artificial Sequence
  Description of Artificial Sequence: Synthetic oligonucleotide
ccuggaaacuacuagaagc

SEQ ID NO: 1665452 - RNA, 19 nt, Artificial Sequence
  Description of Artificial Sequence: Synthetic oligonucleotide
uuguauugcacuccugacu

SEQ ID NO: 1665453 - RNA, 19 nt, Artificial Sequence
  Description of Artificial Sequence: Synthetic oligonucleotide
uuuccgguuguuaauggac

SEQ ID NO: 1665454 - RNA, 19 nt, Artificial Sequence
  Description of Artificial Sequence: Synthetic oligonucleotide
auuuucuacucgaacugcc

SEQ ID NO: 1665455 - RNA, 19 nt, Artificial Sequence
  Description of Artificial Sequence: Synthetic oligonucleotide
ugcugguugacuuacuggu

SEQ ID NO: 1665456 - RNA, 19 nt, Artificial Sequence
  Description of Artificial Sequence: Synthetic oligonucleotide
gaugccacggccuuccaug

SEQ ID NO: 1665457 - RNA, 19 nt, Artificial Sequence
  Description of Artificial Sequence: Synthetic oligonucleotide
guaaacacucuauagagcu

SEQ ID NO: 1665458 - RNA, 19 nt, Artificial Sequence
  Description of Artificial Sequence: Synthetic oligonucleotide
caauguguuucucagggac

SEQ ID NO: 1665459 - RNA, 19 nt, Artificial Sequence
  Description of Artificial Sequence: Synthetic oligonucleotide
agugacguugccaucgacc

SEQ ID NO: 1665460 - RNA, 19 nt, Artificial Sequence
  Description of Artificial Sequence: Synthetic oligonucleotide
aaguaguaccgcugccagc

SEQ ID NO: 1665461 - RNA, 19 nt, Artificial Sequence
  Description of Artificial Sequence: Synthetic oligonucleotide
uucuacucgaacugccagg

SEQ ID NO: 1665462 - RNA, 19 nt, Artificial Sequence
  Description of Artificial Sequence: Synthetic oligonucleotide
uggguaaaagccugaacca

SEQ ID NO: 1665463 - RNA, 19 nt, Artificial Sequence
  Description of Artificial Sequence: Synthetic oligonucleotide
agaucaguuugccuuuccg

SEQ ID NO: 1665464 - RNA, 19 nt, Artificial Sequence
  Description of Artificial Sequence: Synthetic oligonucleotide
uggggauuuccacaugucc

SEQ ID NO: 1665465 - RNA, 19 nt, Artificial Sequence
  Description of Artificial Sequence: Synthetic oligonucleotide
cuuugucugcuucuaaggc

SEQ ID NO: 1665466 - RNA, 19 nt, Artificial Sequence
  Description of Artificial Sequence: Synthetic oligonucleotide
gggauuuugacaccaacag

SEQ ID NO: 1665467 - RNA, 19 nt, Artificial Sequence
  Description of Artificial Sequence: Synthetic oligonucleotide
uccagugacguugccaucg

SEQ ID NO: 1665468 - RNA, 19 nt, Artificial Sequence
  Description of Artificial Sequence: Synthetic oligonucleotide
uugacuuacugguucuacc

SEQ ID NO: 1665469 - RNA, 19 nt, Artificial Sequence
  Description of Artificial Sequence: Synthetic oligonucleotide
uuuucuacucgaacugcca

SEQ ID NO: 1665470 - RNA, 19 nt, Artificial Sequence
  Description of Artificial Sequence: Synthetic oligonucleotide
uacuagaagcggcaguagc

SEQ ID NO: 1665471 - RNA, 19 nt, Artificial Sequence
  Description of Artificial Sequence: Synthetic oligonucleotide
uccgucaccucacauuugc

SEQ ID NO: 1665472 - RNA, 19 nt, Artificial Sequence
  Description of Artificial Sequence: Synthetic oligonucleotide
ucuggccacgacuuaaacc

SEQ ID NO: 1665473 - RNA, 19 nt, Artificial Sequence
  Description of Artificial Sequence: Synthetic oligonucleotide
ggugguaaacacucuauag

SEQ ID NO: 1665474 - RNA, 19 nt, Artificial Sequence
  Description of Artificial Sequence: Synthetic oligonucleotide
ugcacuccugacuuagagg

SEQ ID NO: 1665475 - RNA, 19 nt, Artificial Sequence
  Description of Artificial Sequence: Synthetic oligonucleotide
uaauuugaugguccacuca

SEQ ID NO: 1665476 - RNA, 19 nt, Artificial Sequence
  Description of Artificial Sequence: Synthetic oligonucleotide
cuauagagcuccucugggg

SEQ ID NO: 1665477 - RNA, 19 nt, Artificial Sequence
  Description of Artificial Sequence: Synthetic oligonucleotide
ugugaaacuucccaccuuu

SEQ ID NO: 1665478 - RNA, 19 nt, Artificial Sequence
  Description of Artificial Sequence: Synthetic oligonucleotide
uugcacuccugacuuagag

SEQ ID NO: 1665479 - RNA, 19 nt, Artificial Sequence
  Description of Artificial Sequence: Synthetic oligonucleotide
uuuguauugcacuccugac

SEQ ID NO: 1665480 - RNA, 19 nt, Artificial Sequence
  Description of Artificial Sequence: Synthetic oligonucleotide
auuggggauuuccacaugu

SEQ ID NO: 1665481 - RNA, 19 nt, Artificial Sequence
  Description of Artificial Sequence: Synthetic oligonucleotide
uugccaucgaccaugugaa

SEQ ID NO: 1665482 - RNA, 19 nt, Artificial Sequence
  Description of Artificial Sequence: Synthetic oligonucleotide
gaaucacaagcccaucaug

SEQ ID NO: 1665483 - RNA, 19 nt, Artificial Sequence
  Description of Artificial Sequence: Synthetic oligonucleotide
uauugcacuccugacuuag

SEQ ID NO: 1665484 - RNA, 19 nt, Artificial Sequence
  Description of Artificial Sequence: Synthetic oligonucleotide
ugaaucacaagcccaucau

SEQ ID NO: 1665485 - RNA, 19 nt, Artificial Sequence
  Description of Artificial Sequence: Synthetic oligonucleotide
gugaugguagcaaagugcc

SEQ ID NO: 1665486 - RNA, 19 nt, Artificial Sequence
  Description of Artificial Sequence: Synthetic oligonucleotide
aaguggggauuuugacacc

SEQ ID NO: 1665487 - RNA, 19 nt, Artificial Sequence
  Description of Artificial Sequence: Synthetic oligonucleotide
cugauguaaauccccacug

SEQ ID NO: 1665488 - RNA, 19 nt, Artificial Sequence
  Description of Artificial Sequence: Synthetic oligonucleotide
aucagugaacucuccagug

SEQ ID NO: 1665489 - RNA, 19 nt, Artificial Sequence
  Description of Artificial Sequence: Synthetic oligonucleotide
gucgaugaaggucaaggug

SEQ ID NO: 1665490 - RNA, 19 nt, Artificial Sequence
  Description of Artificial Sequence: Synthetic oligonucleotide
ccuaaaacaagcgagcgcc

SEQ ID NO: 1665491 - RNA, 19 nt, Artificial Sequence
  Description of Artificial Sequence: Synthetic oligonucleotide
uaccuguccaguuuaauuu

SEQ ID NO: 1665492 - RNA, 19 nt, Artificial Sequence
  Description of Artificial Sequence: Synthetic oligonucleotide
acgacuuaaaccuccacuu

SEQ ID NO: 1665493 - RNA, 19 nt, Artificial Sequence
  Description of Artificial Sequence: Synthetic oligonucleotide
cuuuguauugcacuccuga

SEQ ID NO: 1665494 - RNA, 19 nt, Artificial Sequence
  Description of Artificial Sequence: Synthetic oligonucleotide
cuucuaaggccgcaggagc

SEQ ID NO: 1665495 - RNA, 19 nt, Artificial Sequence
  Description of Artificial Sequence: Synthetic oligonucleotide
agaucuuacaaguggggau

SEQ ID NO: 1665496 - RNA, 19 nt, Artificial Sequence
  Description of Artificial Sequence: Synthetic oligonucleotide
agcgccauagccaaagguc

SEQ ID NO: 1665497 - RNA, 19 nt, Artificial Sequence
  Description of Artificial Sequence: Synthetic oligonucleotide
aauggacgccucuccauca

SEQ ID NO: 1665498 - RNA, 19 nt, Artificial Sequence
  Description of Artificial Sequence: Synthetic oligonucleotide
gaaacuacuagaagcggca

SEQ ID NO: 1665499 - RNA, 19 nt, Artificial Sequence
  Description of Artificial Sequence: Synthetic oligonucleotide
auagagcuccucuggggac

SEQ ID NO: 1665500 - RNA, 19 nt, Artificial Sequence
  Description of Artificial Sequence: Synthetic oligonucleotide
caucagcucacacuucgcg

SEQ ID NO: 1665501 - RNA, 19 nt, Artificial Sequence
  Description of Artificial Sequence: Synthetic oligonucleotide
uggaaacuacuagaagcgg

SEQ ID NO: 1665502 - RNA, 19 nt, Artificial Sequence
  Description of Artificial Sequence: Synthetic oligonucleotide
ucuaccgacucuccauuca

SEQ ID NO: 1665503 - RNA, 19 nt, Artificial Sequence
  Description of Artificial Sequence: Synthetic oligonucleotide
aaggugaugguagcaaagu

SEQ ID NO: 1665504 - RNA, 19 nt, Artificial Sequence
  Description of Artificial Sequence: Synthetic oligonucleotide
gacuuagagguaccugucc

SEQ ID NO: 1665505 - RNA, 19 nt, Artificial Sequence
  Description of Artificial Sequence: Synthetic oligonucleotide
cacaccucaguuuucggug

SEQ ID NO: 1665506 - RNA, 19 nt, Artificial Sequence
  Description of Artificial Sequence: Synthetic oligonucleotide
auucacugugggcaagauc

SEQ ID NO: 1665507 - RNA, 19 nt, Artificial Sequence
  Description of Artificial Sequence: Synthetic oligonucleotide
ucuacucgaacugccagga

SEQ ID NO: 1665508 - RNA, 19 nt, Artificial Sequence
  Description of Artificial Sequence: Synthetic oligonucleotide
caaauuggggauuuccaca

SEQ ID NO: 1665509 - RNA, 19 nt, Artificial Sequence
  Description of Artificial Sequence: Synthetic oligonucleotide
acauuugcccuccucauuu

SEQ ID NO: 1665510 - RNA, 19 nt, Artificial Sequence
  Description of Artificial Sequence: Synthetic oligonucleotide
ugucgaugaaggucaaggu

SEQ ID NO: 1665511 - RNA, 19 nt, Artificial Sequence
  Description of Artificial Sequence: Synthetic oligonucleotide
aaacuacuagaagcggcag

SEQ ID NO: 1665512 - RNA, 19 nt, Artificial Sequence
  Description of Artificial Sequence: Synthetic oligonucleotide
uagcaauguguuucucagg

SEQ ID NO: 1665513 - RNA, 19 nt, Artificial Sequence
  Description of Artificial Sequence: Synthetic oligonucleotide
uaauggacgccucuccauc

SEQ ID NO: 1665514 - RNA, 19 nt, Artificial Sequence
  Description of Artificial Sequence: Synthetic oligonucleotide
caguuuucggugcugguug

SEQ ID NO: 1665515 - RNA, 19 nt, Artificial Sequence
  Description of Artificial Sequence: Synthetic oligonucleotide
uguggaccaauuugaggca

SEQ ID NO: 1665516 - RNA, 19 nt, Artificial Sequence
  Description of Artificial Sequence: Synthetic oligonucleotide
aauuggggauuuccacaug

SEQ ID NO: 1665517 - RNA, 19 nt, Artificial Sequence
  Description of Artificial Sequence: Synthetic oligonucleotide
accuguccaguuuaauuug

SEQ ID NO: 1665518 - RNA, 19 nt, Artificial Sequence
  Description of Artificial Sequence: Synthetic oligonucleotide
cacgagauuugugucaggc

SEQ ID NO: 1665519 - RNA, 19 nt, Artificial Sequence
  Description of Artificial Sequence: Synthetic oligonucleotide
uccgguuguuaauggacgc

SEQ ID NO: 1665520 - RNA, 19 nt, Artificial Sequence
  Description of Artificial Sequence: Synthetic oligonucleotide
uagaaguuucaccccuucu

SEQ ID NO: 1665521 - RNA, 19 nt, Artificial Sequence
  Description of Artificial Sequence: Synthetic oligonucleotide
cuggccacgacuuaaaccu

SEQ ID NO: 1665522 - RNA, 19 nt, Artificial Sequence
  Description of Artificial Sequence: Synthetic oligonucleotide
cagacuucgccuugcacac

SEQ ID NO: 1665523 - RNA, 19 nt, Artificial Sequence
  Description of Artificial Sequence: Synthetic oligonucleotide
uuacugguucuaccgacuc

SEQ ID NO: 1665524 - RNA, 19 nt, Artificial Sequence
  Description of Artificial Sequence: Synthetic oligonucleotide
uguuucucagggaccagau

SEQ ID NO: 1665525 - RNA, 19 nt, Artificial Sequence
  Description of Artificial Sequence: Synthetic oligonucleotide
uugacguugguggcguccg

SEQ ID NO: 1665526 - RNA, 19 nt, Artificial Sequence
  Description of Artificial Sequence: Synthetic oligonucleotide
ucacacuucgcgccgcuac

SEQ ID NO: 1665527 - RNA, 19 nt, Artificial Sequence
  Description of Artificial Sequence: Synthetic oligonucleotide
ugacuuagagguaccuguc

SEQ ID NO: 1665528 - RNA, 19 nt, Artificial Sequence
  Description of Artificial Sequence: Synthetic oligonucleotide
acuucgcgccgcuaccagc

SEQ ID NO: 1665529 - RNA, 19 nt, Artificial Sequence
  Description of Artificial Sequence: Synthetic oligonucleotide
auauguggagggaggggcc

SEQ ID NO: 1665530 - RNA, 19 nt, Artificial Sequence
  Description of Artificial Sequence: Synthetic oligonucleotide
uccaugcacaccucugucu

SEQ ID NO: 1665531 - RNA, 19 nt, Artificial Sequence
  Description of Artificial Sequence: Synthetic oligonucleotide
uucgccuugcacaccucag

SEQ ID NO: 1665532 - RNA, 19 nt, Artificial Sequence
  Description of Artificial Sequence: Synthetic oligonucleotide
cucacauuugcccuccuca

SEQ ID NO: 1665533 - RNA, 19 nt, Artificial Sequence
  Description of Artificial Sequence: Synthetic oligonucleotide
ucccucaccccacuuggcc

SEQ ID NO: 1665534 - RNA, 19 nt, Artificial Sequence
  Description of Artificial Sequence: Synthetic oligonucleotide
ugcacaaacccaagguaua

SEQ ID NO: 1665535 - RNA, 19 nt, Artificial Sequence
  Description of Artificial Sequence: Synthetic oligonucleotide
agcagacuucgccuugcac

SEQ ID NO: 1665536 - RNA, 19 nt, Artificial Sequence
  Description of Artificial Sequence: Synthetic oligonucleotide
augccacggccuuccaugc

SEQ ID NO: 1665537 - RNA, 19 nt, Artificial Sequence
  Description of Artificial Sequence: Synthetic oligonucleotide
uccuucauuaaggccacga

SEQ ID NO: 1665538 - RNA, 19 nt, Artificial Sequence
  Description of Artificial Sequence: Synthetic oligonucleotide
guauauguggagggagggg

SEQ ID NO: 1665539 - RNA, 19 nt, Artificial Sequence
  Description of Artificial Sequence: Synthetic oligonucleotide
gagaucuuacaagugggga

SEQ ID NO: 1665540 - RNA, 19 nt, Artificial Sequence
  Description of Artificial Sequence: Synthetic oligonucleotide
gugaaucacaagcccauca

SEQ ID NO: 1665541 - RNA, 19 nt, Artificial Sequence
  Description of Artificial Sequence: Synthetic oligonucleotide
guuaauggacgccucucca

SEQ ID NO: 1665542 - RNA, 19 nt, Artificial Sequence
  Description of Artificial Sequence: Synthetic oligonucleotide
acuagaagcggcaguagca

SEQ ID NO: 1665543 - RNA, 19 nt, Artificial Sequence
  Description of Artificial Sequence: Synthetic oligonucleotide
aagcgagcgccauagccaa

SEQ ID NO: 1665544 - RNA, 19 nt, Artificial Sequence
  Description of Artificial Sequence: Synthetic oligonucleotide
ugggugguaaacacucuau

SEQ ID NO: 1665545 - RNA, 19 nt, Artificial Sequence
  Description of Artificial Sequence: Synthetic oligonucleotide
gguauauguggagggaggg

SEQ ID NO: 1665546 - RNA, 19 nt, Artificial Sequence
  Description of Artificial Sequence: Synthetic oligonucleotide
aaaucacccucagauccca

SEQ ID NO: 1665547 - RNA, 19 nt, Artificial Sequence
  Description of Artificial Sequence: Synthetic oligonucleotide
auuaaggccacgagauuug

SEQ ID NO: 1665548 - RNA, 19 nt, Artificial Sequence
  Description of Artificial Sequence: Synthetic oligonucleotide
acuacuagaagcggcagua

SEQ ID NO: 1665549 - RNA, 19 nt, Artificial Sequence
  Description of Artificial Sequence: Synthetic oligonucleotide
ggaaacuacuagaagcggc

SEQ ID NO: 1665550 - RNA, 19 nt, Artificial Sequence
  Description of Artificial Sequence: Synthetic oligonucleotide
uggugcaauccugugaauc

SEQ ID NO: 1665551 - RNA, 19 nt, Artificial Sequence
  Description of Artificial Sequence: Synthetic oligonucleotide
aggccacgagauuuguguc

SEQ ID NO: 1665552 - RNA, 19 nt, Artificial Sequence
  Description of Artificial Sequence: Synthetic oligonucleotide
caagcgagcgccauagcca

SEQ ID NO: 1665553 - RNA, 19 nt, Artificial Sequence
  Description of Artificial Sequence: Synthetic oligonucleotide
ugcacaccucaguuuucgg

SEQ ID NO: 1665554 - RNA, 19 nt, Artificial Sequence
  Description of Artificial Sequence: Synthetic oligonucleotide
gguaaaagccugaaccagc

SEQ ID NO: 1665555 - RNA, 19 nt, Artificial Sequence
  Description of Artificial Sequence: Synthetic oligonucleotide
acuuccgucaccucacauu

SEQ ID NO: 1665556 - RNA, 19 nt, Artificial Sequence
  Description of Artificial Sequence: Synthetic oligonucleotide
ugguucuaccgacucucca

SEQ ID NO: 1665557 - RNA, 19 nt, Artificial Sequence
  Description of Artificial Sequence: Synthetic oligonucleotide
ggugcaauccugugaauca

SEQ ID NO: 1665558 - RNA, 19 nt, Artificial Sequence
  Description of Artificial Sequence: Synthetic oligonucleotide
acgagauuugugucaggcu

SEQ ID NO: 1665559 - RNA, 19 nt, Artificial Sequence
  Description of Artificial Sequence: Synthetic oligonucleotide
gacuuacugguucuaccga

SEQ ID NO: 1665560 - RNA, 19 nt, Artificial Sequence
  Description of Artificial Sequence: Synthetic oligonucleotide
uugaugguccacucauaaa

SEQ ID NO: 1665561 - RNA, 19 nt, Artificial Sequence
  Description of Artificial Sequence: Synthetic oligonucleotide
cugacuuagagguaccugu

SEQ ID NO: 1665562 - RNA, 19 nt, Artificial Sequence
  Description of Artificial Sequence: Synthetic oligonucleotide
uuucggugcugguugacuu

SEQ ID NO: 1665563 - RNA, 19 nt, Artificial Sequence
  Description of Artificial Sequence: Synthetic oligonucleotide
ccaugugaaacuucccacc

SEQ ID NO: 1665564 - RNA, 19 nt, Artificial Sequence
  Description of Artificial Sequence: Synthetic oligonucleotide
cuaccgacucuccauucac

SEQ ID NO: 1665565 - RNA, 19 nt, Artificial Sequence
  Description of Artificial Sequence: Synthetic oligonucleotide
gagggugcugauguaaauc

SEQ ID NO: 1665566 - RNA, 19 nt, Artificial Sequence
  Description of Artificial Sequence: Synthetic oligonucleotide
augcacaaacccaagguau

SEQ ID NO: 1665567 - RNA, 19 nt, Artificial Sequence
  Description of Artificial Sequence: Synthetic oligonucleotide
uaaaacaagcgagcgccau

SEQ ID NO: 1665568 - RNA, 19 nt, Artificial Sequence
  Description of Artificial Sequence: Synthetic oligonucleotide
agagguaccuguccaguuu

SEQ ID NO: 1665569 - RNA, 19 nt, Artificial Sequence
  Description of Artificial Sequence: Synthetic oligonucleotide
gagauuugugucaggcuca

SEQ ID NO: 1665570 - RNA, 19 nt, Artificial Sequence
  Description of Artificial Sequence: Synthetic oligonucleotide
ggagaucuuacaagugggg

SEQ ID NO: 1665571 - RNA, 19 nt, Artificial Sequence
  Description of Artificial Sequence: Synthetic oligonucleotide
ucauuaaggccacgagauu

SEQ ID NO: 1665572 - RNA, 19 nt, Artificial Sequence
  Description of Artificial Sequence: Synthetic oligonucleotide
ucagacaaauuggggauuu

SEQ ID NO: 1665573 - RNA, 19 nt, Artificial Sequence
  Description of Artificial Sequence: Synthetic oligonucleotide
ucaguuuucggugcugguu

SEQ ID NO: 1665574 - RNA, 19 nt, Artificial Sequence
  Description of Artificial Sequence: Synthetic oligonucleotide
uggacgccucuccaucaag

SEQ ID NO: 1665575 - RNA, 19 nt, Artificial Sequence
  Description of Artificial Sequence: Synthetic oligonucleotide
guugacuuacugguucuac

SEQ ID NO: 1665576 - RNA, 19 nt, Artificial Sequence
  Description of Artificial Sequence: Synthetic oligonucleotide
ucaaacaggcuggaaccuc

SEQ ID NO: 1665577 - RNA, 19 nt, Artificial Sequence
  Description of Artificial Sequence: Synthetic oligonucleotide
cuuguucacuuccgucacc

SEQ ID NO: 1665578 - RNA, 19 nt, Artificial Sequence
  Description of Artificial Sequence: Synthetic oligonucleotide
ucgccuugcacaccucagu

SEQ ID NO: 1665579 - RNA, 19 nt, Artificial Sequence
  Description of Artificial Sequence: Synthetic oligonucleotide
uuguugacguugguggcgu

SEQ ID NO: 1665580 - RNA, 19 nt, Artificial Sequence
  Description of Artificial Sequence: Synthetic oligonucleotide
caaaguaguaccgcugcca

SEQ ID NO: 1665581 - RNA, 19 nt, Artificial Sequence
  Description of Artificial Sequence: Synthetic oligonucleotide
uaccgacucuccauucacu

SEQ ID NO: 1665582 - RNA, 19 nt, Artificial Sequence
  Description of Artificial Sequence: Synthetic oligonucleotide
cacuaaucuccacuucauc

SEQ ID NO: 1665583 - RNA, 19 nt, Artificial Sequence
  Description of Artificial Sequence: Synthetic oligonucleotide
guuagcaguugggauggug

SEQ ID NO: 1665584 - RNA, 19 nt, Artificial Sequence
  Description of Artificial Sequence: Synthetic oligonucleotide
ugccccucuggccacgacu

SEQ ID NO: 1665585 - RNA, 19 nt, Artificial Sequence
  Description of Artificial Sequence: Synthetic oligonucleotide
gaccgcucggucccagccg

SEQ ID NO: 1665586 - RNA, 19 nt, Artificial Sequence
  Description of Artificial Sequence: Synthetic oligonucleotide
cuuuccgguuguuaaugga

SEQ ID NO: 1665587 - RNA, 19 nt, Artificial Sequence
  Description of Artificial Sequence: Synthetic oligonucleotide
guugggauggugcaauccu

SEQ ID NO: 1665588 - RNA, 19 nt, Artificial Sequence
  Description of Artificial Sequence: Synthetic oligonucleotide
uugaggcaucccuuucugu

SEQ ID NO: 1665589 - RNA, 19 nt, Artificial Sequence
  Description of Artificial Sequence: Synthetic oligonucleotide
aaggccgcaggagcauggg

SEQ ID NO: 1665590 - RNA, 19 nt, Artificial Sequence
  Description of Artificial Sequence: Synthetic oligonucleotide
ucguccgcucuuccucagg

SEQ ID NO: 1665591 - RNA, 19 nt, Artificial Sequence
  Description of Artificial Sequence: Synthetic oligonucleotide
caggcuggacugaaguguc

SEQ ID NO: 1665592 - RNA, 19 nt, Artificial Sequence
  Description of Artificial Sequence: Synthetic oligonucleotide
caucaagcuuguucacuuc

SEQ ID NO: 1665593 - RNA, 19 nt, Artificial Sequence
  Description of Artificial Sequence: Synthetic oligonucleotide
ggaaggucucucuaaggga

SEQ ID NO: 1665594 - RNA, 19 nt, Artificial Sequence
  Description of Artificial Sequence: Synthetic oligonucleotide
uggaccaauuugaggcauc

SEQ ID NO: 1665595 - RNA, 19 nt, Artificial Sequence
  Description of Artificial Sequence: Synthetic oligonucleotide
uucuaccgacucuccauuc

SEQ ID NO: 1665596 - RNA, 19 nt, Artificial Sequence
  Description of Artificial Sequence: Synthetic oligonucleotide
cgagauuugugucaggcuc

SEQ ID NO: 1665597 - RNA, 19 nt, Artificial Sequence
  Description of Artificial Sequence: Synthetic oligonucleotide
gccgcuaccagcucccaag

SEQ ID NO: 1665598 - RNA, 19 nt, Artificial Sequence
  Description of Artificial Sequence: Synthetic oligonucleotide
uggcaaggcucacacuaau

SEQ ID NO: 1665599 - RNA, 19 nt, Artificial Sequence
  Description of Artificial Sequence: Synthetic oligonucleotide
acgucaggaaggucucucu

SEQ ID NO: 1665600 - RNA, 19 nt, Artificial Sequence
  Description of Artificial Sequence: Synthetic oligonucleotide
cacacuucgcgccgcuacc

SEQ ID NO: 1665601 - RNA, 19 nt, Artificial Sequence
  Description of Artificial Sequence: Synthetic oligonucleotide
cuggcccuaaaacaagcga

SEQ ID NO: 1665602 - RNA, 19 nt, Artificial Sequence
  Description of Artificial Sequence: Synthetic oligonucleotide
cacaaacccaagguauaug

SEQ ID NO: 1665603 - RNA, 19 nt, Artificial Sequence
  Description of Artificial Sequence: Synthetic oligonucleotide
aagugucaaacaggcugga

SEQ ID NO: 1665604 - RNA, 19 nt, Artificial Sequence
  Description of Artificial Sequence: Synthetic oligonucleotide
cuacuagaagcggcaguag

SEQ ID NO: 1665605 - RNA, 19 nt, Artificial Sequence
  Description of Artificial Sequence: Synthetic oligonucleotide
gucaccucacauuugcccu

SEQ ID NO: 1665606 - RNA, 19 nt, Artificial Sequence
  Description of Artificial Sequence: Synthetic oligonucleotide
cuaaaacaagcgagcgcca

SEQ ID NO: 1665607 - RNA, 19 nt, Artificial Sequence
  Description of Artificial Sequence: Synthetic oligonucleotide
aggagcagacuucgccuug

SEQ ID NO: 1665608 - RNA, 19 nt, Artificial Sequence
  Description of Artificial Sequence: Synthetic oligonucleotide
gcuucuaaggccgcaggag

SEQ ID NO: 1665609 - RNA, 19 nt, Artificial Sequence
  Description of Artificial Sequence: Synthetic oligonucleotide
ucgaacugccaggaauaga

SEQ ID NO: 1665610 - RNA, 19 nt, Artificial Sequence
  Description of Artificial Sequence: Synthetic oligonucleotide
cacgacuuaaaccuccacu

SEQ ID NO: 1665611 - RNA, 19 nt, Artificial Sequence
  Description of Artificial Sequence: Synthetic oligonucleotide
aaacaggcuggaaccucug

SEQ ID NO: 1665612 - RNA, 19 nt, Artificial Sequence
  Description of Artificial Sequence: Synthetic oligonucleotide
aucgaccaugugaaacuuc

SEQ ID NO: 1665613 - RNA, 19 nt, Artificial Sequence
  Description of Artificial Sequence: Synthetic oligonucleotide
uuccgucaccucacauuug

SEQ ID NO: 1665614 - RNA, 19 nt, Artificial Sequence
  Description of Artificial Sequence: Synthetic oligonucleotide
gcccuaaaacaagcgagcg

SEQ ID NO: 1665615 - RNA, 19 nt, Artificial Sequence
  Description of Artificial Sequence: Synthetic oligonucleotide
cucgaacugccaggaauag

SEQ ID NO: 1665616 - RNA, 19 nt, Artificial Sequence
  Description of Artificial Sequence: Synthetic oligonucleotide
ucggugcugguugacuuac

SEQ ID NO: 1665617 - RNA, 19 nt, Artificial Sequence
  Description of Artificial Sequence: Synthetic oligonucleotide
guaaaagccugaaccagcu

SEQ ID NO: 1665618 - RNA, 19 nt, Artificial Sequence
  Description of Artificial Sequence: Synthetic oligonucleotide
agccuugccucguccgcuc

SEQ ID NO: 1665619 - RNA, 19 nt, Artificial Sequence
  Description of Artificial Sequence: Synthetic oligonucleotide
cuccugacuuagagguacc

SEQ ID NO: 1665620 - RNA, 19 nt, Artificial Sequence
  Description of Artificial Sequence: Synthetic oligonucleotide
gccccaaguuagcaguugg

SEQ ID NO: 1665621 - RNA, 19 nt, Artificial Sequence
  Description of Artificial Sequence: Synthetic oligonucleotide
gacgucaggaaggucucuc

SEQ ID NO: 1665622 - RNA, 19 nt, Artificial Sequence
  Description of Artificial Sequence: Synthetic oligonucleotide
caugugaaacuucccaccu

SEQ ID NO: 1665623 - RNA, 19 nt, Artificial Sequence
  Description of Artificial Sequence: Synthetic oligonucleotide
ugcccugagugaacucugu

SEQ ID NO: 1665624 - RNA, 19 nt, Artificial Sequence
  Description of Artificial Sequence: Synthetic oligonucleotide
cuccaucaagcuuguucac

SEQ ID NO: 1665625 - RNA, 19 nt, Artificial Sequence
  Description of Artificial Sequence: Synthetic oligonucleotide
ggaccaauuugaggcaucc

SEQ ID NO: 1665626 - RNA, 19 nt, Artificial Sequence
  Description of Artificial Sequence: Synthetic oligonucleotide
agggaccagaucagugaac

SEQ ID NO: 1665627 - RNA, 19 nt, Artificial Sequence
  Description of Artificial Sequence: Synthetic oligonucleotide
gccuggaaacuacuagaag

SEQ ID NO: 1665628 - RNA, 19 nt, Artificial Sequence
  Description of Artificial Sequence: Synthetic oligonucleotide
gaucuuacaaguggggauu

SEQ ID NO: 1665629 - RNA, 19 nt, Artificial Sequence
  Description of Artificial Sequence: Synthetic oligonucleotide
uccugacuuagagguaccu

SEQ ID NO: 1665630 - RNA, 19 nt, Artificial Sequence
  Description of Artificial Sequence: Synthetic oligonucleotide
ucuaaggccgcaggagcau

SEQ ID NO: 1665631 - RNA, 19 nt, Artificial Sequence
  Description of Artificial Sequence: Synthetic oligonucleotide
uucggugcugguugacuua

SEQ ID NO: 1665632 - RNA, 19 nt, Artificial Sequence
  Description of Artificial Sequence: Synthetic oligonucleotide
aacacucuauagagcuccu

SEQ ID NO: 1665633 - RNA, 19 nt, Artificial Sequence
  Description of Artificial Sequence: Synthetic oligonucleotide
ggggauuuugacaccaaca

SEQ ID NO: 1665634 - RNA, 19 nt, Artificial Sequence
  Description of Artificial Sequence: Synthetic oligonucleotide
augugaaacuucccaccuu

SEQ ID NO: 1665635 - RNA, 19 nt, Artificial Sequence
  Description of Artificial Sequence: Synthetic oligonucleotide
cccuaaaacaagcgagcgc

SEQ ID NO: 1665636 - RNA, 19 nt, Artificial Sequence
  Description of Artificial Sequence: Synthetic oligonucleotide
agcucacacuucgcgccgc

SEQ ID NO: 1665637 - RNA, 19 nt, Artificial Sequence
  Description of Artificial Sequence: Synthetic oligonucleotide
ugcacaccucugucucucc

SEQ ID NO: 1665638 - RNA, 19 nt, Artificial Sequence
  Description of Artificial Sequence: Synthetic oligonucleotide
cucucuaagggagaucuua

SEQ ID NO: 1665639 - RNA, 19 nt, Artificial Sequence
  Description of Artificial Sequence: Synthetic oligonucleotide
cucuggccacgacuuaaac

SEQ ID NO: 1665640 - RNA, 19 nt, Artificial Sequence
  Description of Artificial Sequence: Synthetic oligonucleotide
aguaccgcugccagccuug

SEQ ID NO: 1665641 - RNA, 19 nt, Artificial Sequence
  Description of Artificial Sequence: Synthetic oligonucleotide
agacuucgccuugcacacc

SEQ ID NO: 1665642 - RNA, 19 nt, Artificial Sequence
  Description of Artificial Sequence: Synthetic oligonucleotide
cuugucgaugaaggucaag

SEQ ID NO: 1665643 - RNA, 19 nt, Artificial Sequence
  Description of Artificial Sequence: Synthetic oligonucleotide
cuuacugguucuaccgacu

SEQ ID NO: 1665644 - RNA, 19 nt, Artificial Sequence
  Description of Artificial Sequence: Synthetic oligonucleotide
gcuggcccuaaaacaagcg

SEQ ID NO: 1665645 - RNA, 19 nt, Artificial Sequence
  Description of Artificial Sequence: Synthetic oligonucleotide
gccaucgaccaugugaaac

SEQ ID NO: 1665646 - RNA, 19 nt, Artificial Sequence
  Description of Artificial Sequence: Synthetic oligonucleotide
ugacguugguggcguccgc

SEQ ID NO: 1665647 - RNA, 19 nt, Artificial Sequence
  Description of Artificial Sequence: Synthetic oligonucleotide
cucacacuaaucuccacuu

SEQ ID NO: 1665648 - RNA, 19 nt, Artificial Sequence
  Description of Artificial Sequence: Synthetic oligonucleotide
uaguaccgcugccagccuu

SEQ ID NO: 1665649 - RNA, 19 nt, Artificial Sequence
  Description of Artificial Sequence: Synthetic oligonucleotide
cuucgccuugcacaccuca

SEQ ID NO: 1665650 - RNA, 19 nt, Artificial Sequence
  Description of Artificial Sequence: Synthetic oligonucleotide
aucagacaaauuggggauu

SEQ ID NO: 1665651 - RNA, 19 nt, Artificial Sequence
  Description of Artificial Sequence: Synthetic oligonucleotide
ucaugcccugagugaacuc

SEQ ID NO: 1665652 - RNA, 19 nt, Artificial Sequence
  Description of Artificial Sequence: Synthetic oligonucleotide
cuuccgucaccucacauuu

SEQ ID NO: 1665653 - RNA, 19 nt, Artificial Sequence
  Description of Artificial Sequence: Synthetic oligonucleotide
ucucucuaagggagaucuu

SEQ ID NO: 1665654 - RNA, 19 nt, Artificial Sequence
  Description of Artificial Sequence: Synthetic oligonucleotide
uggccacgacuuaaaccuc

SEQ ID NO: 1665655 - RNA, 19 nt, Artificial Sequence
  Description of Artificial Sequence: Synthetic oligonucleotide
cacuucgcgccgcuaccag

SEQ ID NO: 1665656 - RNA, 19 nt, Artificial Sequence
  Description of Artificial Sequence: Synthetic oligonucleotide
gccaaaggucuguuugaug

SEQ ID NO: 1665657 - RNA, 19 nt, Artificial Sequence
  Description of Artificial Sequence: Synthetic oligonucleotide
gguggcguccgcccgcucc

SEQ ID NO: 1665658 - RNA, 19 nt, Artificial Sequence
  Description of Artificial Sequence: Synthetic oligonucleotide
agcuccucuggggacguca

SEQ ID NO: 1665659 - RNA, 19 nt, Artificial Sequence
  Description of Artificial Sequence: Synthetic oligonucleotide
gcugcuggcccuaaaacaa

SEQ ID NO: 1665660 - RNA, 19 nt, Artificial Sequence
  Description of Artificial Sequence: Synthetic oligonucleotide
ccuccucauuuucuacucg

SEQ ID NO: 1665661 - RNA, 19 nt, Artificial Sequence
  Description of Artificial Sequence: Synthetic oligonucleotide
auggacgccucuccaucaa

SEQ ID NO: 1665662 - RNA, 19 nt, Artificial Sequence
  Description of Artificial Sequence: Synthetic oligonucleotide
ugccacggccuuccaugca

SEQ ID NO: 1665663 - RNA, 19 nt, Artificial Sequence
  Description of Artificial Sequence: Synthetic oligonucleotide
cuuccaugcacaccucugu

SEQ ID NO: 1665664 - RNA, 19 nt, Artificial Sequence
  Description of Artificial Sequence: Synthetic oligonucleotide
agugucaaacaggcuggaa

SEQ ID NO: 1665665 - RNA, 19 nt, Artificial Sequence
  Description of Artificial Sequence: Synthetic oligonucleotide
ucuuacaaguggggauuuu

SEQ ID NO: 1665666 - RNA, 19 nt, Artificial Sequence
  Description of Artificial Sequence: Synthetic oligonucleotide
ggccacgagauuuguguca

SEQ ID NO: 1665667 - RNA, 19 nt, Artificial Sequence
  Description of Artificial Sequence: Synthetic oligonucleotide
ggacgccucuccaucaagc

SEQ ID NO: 1665668 - RNA, 19 nt, Artificial Sequence
  Description of Artificial Sequence: Synthetic oligonucleotide
caucaugagcaggcuggac

SEQ ID NO: 1665669 - RNA, 19 nt, Artificial Sequence
  Description of Artificial Sequence: Synthetic oligonucleotide
gccuuuccgguuguuaaug

SEQ ID NO: 1665670 - RNA, 19 nt, Artificial Sequence
  Description of Artificial Sequence: Synthetic oligonucleotide
ccagaucagugaacucucc

SEQ ID NO: 1665671 - RNA, 19 nt, Artificial Sequence
  Description of Artificial Sequence: Synthetic oligonucleotide
augcccugagugaacucug

SEQ ID NO: 1665672 - RNA, 19 nt, Artificial Sequence
  Description of Artificial Sequence: Synthetic oligonucleotide
aucuuacaaguggggauuu

SEQ ID NO: 1665673 - RNA, 19 nt, Artificial Sequence
  Description of Artificial Sequence: Synthetic oligonucleotide
ggccacgacuuaaaccucc

SEQ ID NO: 1665674 - RNA, 19 nt, Artificial Sequence
  Description of Artificial Sequence: Synthetic oligonucleotide
acacuucgcgccgcuacca

SEQ ID NO: 1665675 - RNA, 19 nt, Artificial Sequence
  Description of Artificial Sequence: Synthetic oligonucleotide
cacggccuuccaugcacac

SEQ ID NO: 1665676 - RNA, 19 nt, Artificial Sequence
  Description of Artificial Sequence: Synthetic oligonucleotide
caguugggauggugcaauc

SEQ ID NO: 1665677 - RNA, 19 nt, Artificial Sequence
  Description of Artificial Sequence: Synthetic oligonucleotide
cucguccgcucuuccucag

SEQ ID NO: 1665678 - RNA, 19 nt, Artificial Sequence
  Description of Artificial Sequence: Synthetic oligonucleotide
gguucuaccgacucuccau

SEQ ID NO: 1665679 - RNA, 19 nt, Artificial Sequence
  Description of Artificial Sequence: Synthetic oligonucleotide
gcgagcgccauagccaaag

SEQ ID NO: 1665680 - RNA, 19 nt, Artificial Sequence
  Description of Artificial Sequence: Synthetic oligonucleotide
cuucgcgccgcuaccagcu

SEQ ID NO: 1665681 - RNA, 19 nt, Artificial Sequence
  Description of Artificial Sequence: Synthetic oligonucleotide
guuuucggugcugguugac

SEQ ID NO: 1665682 - RNA, 19 nt, Artificial Sequence
  Description of Artificial Sequence: Synthetic oligonucleotide
caagcuuguucacuuccgu

SEQ ID NO: 1665683 - RNA, 19 nt, Artificial Sequence
  Description of Artificial Sequence: Synthetic oligonucleotide
gcaauguguuucucaggga

SEQ ID NO: 1665684 - RNA, 19 nt, Artificial Sequence
  Description of Artificial Sequence: Synthetic oligonucleotide
auugcacuccugacuuaga

SEQ ID NO: 1665685 - RNA, 19 nt, Artificial Sequence
  Description of Artificial Sequence: Synthetic oligonucleotide
auggugcaauccugugaau

SEQ ID NO: 1665686 - RNA, 19 nt, Artificial Sequence
  Description of Artificial Sequence: Synthetic oligonucleotide
gggugguaaacacucuaua

SEQ ID NO: 1665687 - RNA, 19 nt, Artificial Sequence
  Description of Artificial Sequence: Synthetic oligonucleotide
ggagcagacuucgccuugc

SEQ ID NO: 1665688 - RNA, 19 nt, Artificial Sequence
  Description of Artificial Sequence: Synthetic oligonucleotide
ccugacuuagagguaccug

SEQ ID NO: 1665689 - RNA, 19 nt, Artificial Sequence
  Description of Artificial Sequence: Synthetic oligonucleotide
cagacaaauuggggauuuc

SEQ ID NO: 1665690 - RNA, 19 nt, Artificial Sequence
  Description of Artificial Sequence: Synthetic oligonucleotide
ugccaucgaccaugugaaa

SEQ ID NO: 1665691 - RNA, 19 nt, Artificial Sequence
  Description of Artificial Sequence: Synthetic oligonucleotide
cagccucaggaccgcucgg

SEQ ID NO: 1665692 - RNA, 19 nt, Artificial Sequence
  Description of Artificial Sequence: Synthetic oligonucleotide
agccucaggaccgcucggu

SEQ ID NO: 1665693 - RNA, 19 nt, Artificial Sequence
  Description of Artificial Sequence: Synthetic oligonucleotide
guucuaccgacucuccauu

SEQ ID NO: 1665694 - RNA, 19 nt, Artificial Sequence
  Description of Artificial Sequence: Synthetic oligonucleotide
uguugacguugguggcguc

SEQ ID NO: 1665695 - RNA, 19 nt, Artificial Sequence
  Description of Artificial Sequence: Synthetic oligonucleotide
guauugcacuccugacuua

SEQ ID NO: 1665696 - RNA, 19 nt, Artificial Sequence
  Description of Artificial Sequence: Synthetic oligonucleotide
gucaaacaggcuggaaccu

SEQ ID NO: 1665697 - RNA, 19 nt, Artificial Sequence
  Description of Artificial Sequence: Synthetic oligonucleotide
ccgguuguuaauggacgcc

SEQ ID NO: 1665698 - RNA, 19 nt, Artificial Sequence
  Description of Artificial Sequence: Synthetic oligonucleotide
ccuguccaguuuaauuuga

SEQ ID NO: 1665699 - RNA, 19 nt, Artificial Sequence
  Description of Artificial Sequence: Synthetic oligonucleotide
ggucaaggugaugguagca

SEQ ID NO: 1665700 - RNA, 19 nt, Artificial Sequence
  Description of Artificial Sequence: Synthetic oligonucleotide
uucgcgccgcuaccagcuc

SEQ ID NO: 1665701 - RNA, 19 nt, Artificial Sequence
  Description of Artificial Sequence: Synthetic oligonucleotide
cccaaguuagcaguuggga

SEQ ID NO: 1665702 - RNA, 19 nt, Artificial Sequence
  Description of Artificial Sequence: Synthetic oligonucleotide
ccaucgaccaugugaaacu

SEQ ID NO: 1665703 - RNA, 19 nt, Artificial Sequence
  Description of Artificial Sequence: Synthetic oligonucleotide
ccagccuugccucguccgc

SEQ ID NO: 1665704 - RNA, 19 nt, Artificial Sequence
  Description of Artificial Sequence: Synthetic oligonucleotide
cgacuuaaaccuccacuuc

SEQ ID NO: 1665705 - RNA, 19 nt, Artificial Sequence
  Description of Artificial Sequence: Synthetic oligonucleotide
ggucuguuugaugcccuca

SEQ ID NO: 1665706 - RNA, 19 nt, Artificial Sequence
  Description of Artificial Sequence: Synthetic oligonucleotide
cacccucagaucccaccca

SEQ ID NO: 1665707 - RNA, 19 nt, Artificial Sequence
  Description of Artificial Sequence: Synthetic oligonucleotide
ccaaguuagcaguugggau

SEQ ID NO: 1665708 - RNA, 19 nt, Artificial Sequence
  Description of Artificial Sequence: Synthetic oligonucleotide
ccgucaccucacauuugcc

SEQ ID NO: 1665709 - RNA, 19 nt, Artificial Sequence
  Description of Artificial Sequence: Synthetic oligonucleotide
cucaguuuucggugcuggu

SEQ ID NO: 1665710 - RNA, 19 nt, Artificial Sequence
  Description of Artificial Sequence: Synthetic oligonucleotide
caugcacaccucugucucu

SEQ ID NO: 1665711 - RNA, 19 nt, Artificial Sequence
  Description of Artificial Sequence: Synthetic oligonucleotide
guaccgcugccagccuugc

SEQ ID NO: 1665712 - RNA, 19 nt, Artificial Sequence
  Description of Artificial Sequence: Synthetic oligonucleotide
ccacgagauuugugucagg

SEQ ID NO: 1665713 - RNA, 19 nt, Artificial Sequence
  Description of Artificial Sequence: Synthetic oligonucleotide
cacuccugacuuagaggua

SEQ ID NO: 1665714 - RNA, 19 nt, Artificial Sequence
  Description of Artificial Sequence: Synthetic oligonucleotide
cuacucgaacugccaggaa

SEQ ID NO: 1665715 - RNA, 19 nt, Artificial Sequence
  Description of Artificial Sequence: Synthetic oligonucleotide
ccacgacuuaaaccuccac

SEQ ID NO: 1665716 - RNA, 19 nt, Artificial Sequence
  Description of Artificial Sequence: Synthetic oligonucleotide
agaucccacccagcagaaa

SEQ ID NO: 1665717 - RNA, 19 nt, Artificial Sequence
  Description of Artificial Sequence: Synthetic oligonucleotide
agguaccuguccaguuuaa

SEQ ID NO: 1665718 - RNA, 19 nt, Artificial Sequence
  Description of Artificial Sequence: Synthetic oligonucleotide
cacaccucugucucuccau

SEQ ID NO: 1665719 - RNA, 19 nt, Artificial Sequence
  Description of Artificial Sequence: Synthetic oligonucleotide
gcgccauagccaaaggucu

SEQ ID NO: 1665720 - RNA, 19 nt, Artificial Sequence
  Description of Artificial Sequence: Synthetic oligonucleotide
ccaucaagcuuguucacuu

SEQ ID NO: 1665721 - RNA, 19 nt, Artificial Sequence
  Description of Artificial Sequence: Synthetic oligonucleotide
guggaccaauuugaggcau

SEQ ID NO: 1665722 - RNA, 19 nt, Artificial Sequence
  Description of Artificial Sequence: Synthetic oligonucleotide
guggggauuuugacaccaa

SEQ ID NO: 1665723 - RNA, 19 nt, Artificial Sequence
  Description of Artificial Sequence: Synthetic oligonucleotide
guaguaccgcugccagccu

SEQ ID NO: 1665724 - RNA, 19 nt, Artificial Sequence
  Description of Artificial Sequence: Synthetic oligonucleotide
cgagcgccauagccaaagg

SEQ ID NO: 1665725 - RNA, 19 nt, Artificial Sequence
  Description of Artificial Sequence: Synthetic oligonucleotide
gcaguugggauggugcaau

SEQ ID NO: 1665726 - RNA, 19 nt, Artificial Sequence
  Description of Artificial Sequence: Synthetic oligonucleotide
gccacgacuuaaaccucca

SEQ ID NO: 1665727 - RNA, 19 nt, Artificial Sequence
  Description of Artificial Sequence: Synthetic oligonucleotide
cagcuuuucuguggaccaa

SEQ ID NO: 1665728 - RNA, 19 nt, Artificial Sequence
  Description of Artificial Sequence: Synthetic oligonucleotide
ccucguccgcucuuccuca

SEQ ID NO: 1665729 - RNA, 19 nt, Artificial Sequence
  Description of Artificial Sequence: Synthetic oligonucleotide
caucgaccaugugaaacuu

SEQ ID NO: 1665730 - RNA, 19 nt, Artificial Sequence
  Description of Artificial Sequence: Synthetic oligonucleotide
caccucaguuuucggugcu

SEQ ID NO: 1665731 - RNA, 19 nt, Artificial Sequence
  Description of Artificial Sequence: Synthetic oligonucleotide
cgcgccgcuaccagcuccc

SEQ ID NO: 1665732 - RNA, 19 nt, Artificial Sequence
  Description of Artificial Sequence: Synthetic oligonucleotide
ccagugacguugccaucga

SEQ ID NO: 1665733 - RNA, 19 nt, Artificial Sequence
  Description of Artificial Sequence: Synthetic oligonucleotide
cacuuccgucaccucacau

SEQ ID NO: 1665734 - RNA, 19 nt, Artificial Sequence
  Description of Artificial Sequence: Synthetic oligonucleotide
ugguggcguccgcccgcuc

SEQ ID NO: 1665735 - RNA, 19 nt, Artificial Sequence
  Description of Artificial Sequence: Synthetic oligonucleotide
ccacggccuuccaugcaca

SEQ ID NO: 1665736 - RNA, 19 nt, Artificial Sequence
  Description of Artificial Sequence: Synthetic oligonucleotide
cagccuugccucguccgcu

SEQ ID NO: 1665737 - RNA, 19 nt, Artificial Sequence
  Description of Artificial Sequence: Synthetic oligonucleotide
ccugaaccagcuccugggu

SEQ ID NO: 1665738 - RNA, 19 nt, Artificial Sequence
  Description of Artificial Sequence: Synthetic oligonucleotide
cucacacuucgcgccgcua

SEQ ID NO: 1665739 - RNA, 19 nt, Artificial Sequence
  Description of Artificial Sequence: Synthetic oligonucleotide
agcgagcgccauagccaaa

SEQ ID NO: 1665740 - RNA, 19 nt, Artificial Sequence
  Description of Artificial Sequence: Synthetic oligonucleotide
cgguuguuaauggacgccu

SEQ ID NO: 1665741 - RNA, 19 nt, Artificial Sequence
  Description of Artificial Sequence: Synthetic oligonucleotide
gcagcgccuggaaacuacu

SEQ ID NO: 1665742 - RNA, 19 nt, Artificial Sequence
  Description of Artificial Sequence: Synthetic oligonucleotide
gcucacacuucgcgccgcu

SEQ ID NO: 1665743 - RNA, 19 nt, Artificial Sequence
  Description of Artificial Sequence: Synthetic oligonucleotide
ggacgucaggaaggucucu

SEQ ID NO: 1665744 - RNA, 19 nt, Artificial Sequence
  Description of Artificial Sequence: Synthetic oligonucleotide
gccuugccucguccgcucu

SEQ ID NO: 1665745 - RNA, 19 nt, Artificial Sequence
  Description of Artificial Sequence: Synthetic oligonucleotide
gcgccgcuaccagcuccca

SEQ ID NO: 1665746 - RNA, 19 nt, Artificial Sequence
  Description of Artificial Sequence: Synthetic oligonucleotide
cgccgcuaccagcucccaa

SEQ ID NO: 1665747 - RNA, 19 nt, Artificial Sequence
  Description of Artificial Sequence: Synthetic oligonucleotide
gaauccauacucuagagug

SEQ ID NO: 1665748 - RNA, 19 nt, Artificial Sequence
  Description of Artificial Sequence: Synthetic oligonucleotide
ugcuauacaguuuagauuc

SEQ ID NO: 1665749 - RNA, 19 nt, Artificial Sequence
  Description of Artificial Sequence: Synthetic oligonucleotide
uguugcuagaaauuaaucc

SEQ ID NO: 1665750 - RNA, 19 nt, Artificial Sequence
  Description of Artificial Sequence: Synthetic oligonucleotide
ucuucuucggguuaaaggc

SEQ ID NO: 1665751 - RNA, 19 nt, Artificial Sequence
  Description of Artificial Sequence: Synthetic oligonucleotide
acaguuuagauuccgacuc

SEQ ID NO: 1665752 - RNA, 19 nt, Artificial Sequence
  Description of Artificial Sequence: Synthetic oligonucleotide
uauccaaaggaaauacugg

SEQ ID NO: 1665753 - RNA, 19 nt, Artificial Sequence
  Description of Artificial Sequence: Synthetic oligonucleotide
aauugcgcaggauugaaug

SEQ ID NO: 1665754 - RNA, 19 nt, Artificial Sequence
  Description of Artificial Sequence: Synthetic oligonucleotide
uaaggcucgaagaugaugc

SEQ ID NO: 1665755 - RNA, 19 nt, Artificial Sequence
  Description of Artificial Sequence: Synthetic oligonucleotide
ucugcauacuucaugaucu

SEQ ID NO: 1665756 - RNA, 19 nt, Artificial Sequence
  Description of Artificial Sequence: Synthetic oligonucleotide
aaggagaagacacauaguu

SEQ ID NO: 1665757 - RNA, 19 nt, Artificial Sequence
  Description of Artificial Sequence: Synthetic oligonucleotide
auaguucacgaguacagac

SEQ ID NO: 1665758 - RNA, 19 nt, Artificial Sequence
  Description of Artificial Sequence: Synthetic oligonucleotide
gacauggucggacacaggg

SEQ ID NO: 1665759 - RNA, 19 nt, Artificial Sequence
  Description of Artificial Sequence: Synthetic oligonucleotide
uagauuccgacucugcagg

SEQ ID NO: 1665760 - RNA, 19 nt, Artificial Sequence
  Description of Artificial Sequence: Synthetic oligonucleotide
aaauuaauccacugcagaa

SEQ ID NO: 1665761 - RNA, 19 nt, Artificial Sequence
  Description of Artificial Sequence: Synthetic oligonucleotide
auggggcucagguagaugc

SEQ ID NO: 1665762 - RNA, 19 nt, Artificial Sequence
  Description of Artificial Sequence: Synthetic oligonucleotide
uaaaccugaguuccgauca

SEQ ID NO: 1665763 - RNA, 19 nt, Artificial Sequence
  Description of Artificial Sequence: Synthetic oligonucleotide
aguauuaauguuggcaucg

SEQ ID NO: 1665764 - RNA, 19 nt, Artificial Sequence
  Description of Artificial Sequence: Synthetic oligonucleotide
auacaguuuagauuccgac

SEQ ID NO: 1665765 - RNA, 19 nt, Artificial Sequence
  Description of Artificial Sequence: Synthetic oligonucleotide
cuagaaauuaauccacugc

SEQ ID NO: 1665766 - RNA, 19 nt, Artificial Sequence
  Description of Artificial Sequence: Synthetic oligonucleotide
uccugaguauuaauguugg

SEQ ID NO: 1665767 - RNA, 19 nt, Artificial Sequence
  Description of Artificial Sequence: Synthetic oligonucleotide
ugcaguuugguguaggaug

SEQ ID NO: 1665768 - RNA, 19 nt, Artificial Sequence
  Description of Artificial Sequence: Synthetic oligonucleotide
gaugccuuuugccauaggc

SEQ ID NO: 1665769 - RNA, 19 nt, Artificial Sequence
  Description of Artificial Sequence: Synthetic oligonucleotide
uuugguguaggaugcauug

SEQ ID NO: 1665770 - RNA, 19 nt, Artificial Sequence
  Description of Artificial Sequence: Synthetic oligonucleotide
aaggaauccauacucuaga

SEQ ID NO: 1665771 - RNA, 19 nt, Artificial Sequence
  Description of Artificial Sequence: Synthetic oligonucleotide
cugaguuccgaucacacgc

SEQ ID NO: 1665772 - RNA, 19 nt, Artificial Sequence
  Description of Artificial Sequence: Synthetic oligonucleotide
gauguaaucacuucacaaa

SEQ ID NO: 1665773 - RNA, 19 nt, Artificial Sequence
  Description of Artificial Sequence: Synthetic oligonucleotide
uuccugaguauccaaagga

SEQ ID NO: 1665774 - RNA, 19 nt, Artificial Sequence
  Description of Artificial Sequence: Synthetic oligonucleotide
aguucacgaguacagacag

SEQ ID NO: 1665775 - RNA, 19 nt, Artificial Sequence
  Description of Artificial Sequence: Synthetic oligonucleotide
accuugacugaauggaucg

SEQ ID NO: 1665776 - RNA, 19 nt, Artificial Sequence
  Description of Artificial Sequence: Synthetic oligonucleotide
auuaauccacugcagaaga

SEQ ID NO: 1665777 - RNA, 19 nt, Artificial Sequence
  Description of Artificial Sequence: Synthetic oligonucleotide
auugcgcaggauugaaugc

SEQ ID NO: 1665778 - RNA, 19 nt, Artificial Sequence
  Description of Artificial Sequence: Synthetic oligonucleotide
aacagggugguacgagggc

SEQ ID NO: 1665779 - RNA, 19 nt, Artificial Sequence
  Description of Artificial Sequence: Synthetic oligonucleotide
agugcuauacaguuuagau

SEQ ID NO: 1665780 - RNA, 19 nt, Artificial Sequence
  Description of Artificial Sequence: Synthetic oligonucleotide
ucugaagccgcucauaauu

SEQ ID NO: 1665781 - RNA, 19 nt, Artificial Sequence
  Description of Artificial Sequence: Synthetic oligonucleotide
uugaaauuucucagggcag

SEQ ID NO: 1665782 - RNA, 19 nt, Artificial Sequence
  Description of Artificial Sequence: Synthetic oligonucleotide
cauaauucuucuucuucgg

SEQ ID NO: 1665783 - RNA, 19 nt, Artificial Sequence
  Description of Artificial Sequence: Synthetic oligonucleotide
cacgaguacagacagcugg

SEQ ID NO: 1665784 - RNA, 19 nt, Artificial Sequence
  Description of Artificial Sequence: Synthetic oligonucleotide
uuaagcauggacccauucu

SEQ ID NO: 1665785 - RNA, 19 nt, Artificial Sequence
  Description of Artificial Sequence: Synthetic oligonucleotide
agggaucugggucaucucc

SEQ ID NO: 1665786 - RNA, 19 nt, Artificial Sequence
  Description of Artificial Sequence: Synthetic oligonucleotide
uuguguaaaccugaguucc

SEQ ID NO: 1665787 - RNA, 19 nt, Artificial Sequence
  Description of Artificial Sequence: Synthetic oligonucleotide
ugaaugccaguucucaaug

SEQ ID NO: 1665788 - RNA, 19 nt, Artificial Sequence
  Description of Artificial Sequence: Synthetic oligonucleotide
uuggaaggcauucugugcu

SEQ ID NO: 1665789 - RNA, 19 nt, Artificial Sequence
  Description of Artificial Sequence: Synthetic oligonucleotide
auaucucuggaccagcuca

SEQ ID NO: 1665790 - RNA, 19 nt, Artificial Sequence
  Description of Artificial Sequence: Synthetic oligonucleotide
auuccugaguauccaaagg

SEQ ID NO: 1665791 - RNA, 19 nt, Artificial Sequence
  Description of Artificial Sequence: Synthetic oligonucleotide
aagacaugcugcucaucac

SEQ ID NO: 1665792 - RNA, 19 nt, Artificial Sequence
  Description of Artificial Sequence: Synthetic oligonucleotide
aaggcauucugugcugucc

SEQ ID NO: 1665793 - RNA, 19 nt, Artificial Sequence
  Description of Artificial Sequence: Synthetic oligonucleotide
auggacaucacacuaucca

SEQ ID NO: 1665794 - RNA, 19 nt, Artificial Sequence
  Description of Artificial Sequence: Synthetic oligonucleotide
agacacauaguucacgagu

SEQ ID NO: 1665795 - RNA, 19 nt, Artificial Sequence
  Description of Artificial Sequence: Synthetic oligonucleotide
guauccaaaggaaauacug

SEQ ID NO: 1665796 - RNA, 19 nt, Artificial Sequence
  Description of Artificial Sequence: Synthetic oligonucleotide
aagguccuuagauguaauc

SEQ ID NO: 1665797 - RNA, 19 nt, Artificial Sequence
  Description of Artificial Sequence: Synthetic oligonucleotide
uugcuagaaauuaauccac

SEQ ID NO: 1665798 - RNA, 19 nt, Artificial Sequence
  Description of Artificial Sequence: Synthetic oligonucleotide
ucgaagaugaugcucuuuc

SEQ ID NO: 1665799 - RNA, 19 nt, Artificial Sequence
  Description of Artificial Sequence: Synthetic oligonucleotide
cuggcuuaagcauggaccc

SEQ ID NO: 1665800 - RNA, 19 nt, Artificial Sequence
  Description of Artificial Sequence: Synthetic oligonucleotide
uucacgaguacagacagcu

SEQ ID NO: 1665801 - RNA, 19 nt, Artificial Sequence
  Description of Artificial Sequence: Synthetic oligonucleotide
cauccuguuauaucucugg

SEQ ID NO: 1665802 - RNA, 19 nt, Artificial Sequence
  Description of Artificial Sequence: Synthetic oligonucleotide
aaaggaaauacuggagaug

SEQ ID NO: 1665803 - RNA, 19 nt, Artificial Sequence
  Description of Artificial Sequence: Synthetic oligonucleotide
agugggguccaccacagag

SEQ ID NO: 1665804 - RNA, 19 nt, Artificial Sequence
  Description of Artificial Sequence: Synthetic oligonucleotide
uggacaucacacuauccag

SEQ ID NO: 1665805 - RNA, 19 nt, Artificial Sequence
  Description of Artificial Sequence: Synthetic oligonucleotide
uucuaggggacuccaaagc

SEQ ID NO: 1665806 - RNA, 19 nt, Artificial Sequence
  Description of Artificial Sequence: Synthetic oligonucleotide
uauacaguuuagauuccga

SEQ ID NO: 1665807 - RNA, 19 nt, Artificial Sequence
  Description of Artificial Sequence: Synthetic oligonucleotide
gguaguuugacaaugugug

SEQ ID NO: 1665808 - RNA, 19 nt, Artificial Sequence
  Description of Artificial Sequence: Synthetic oligonucleotide
uuucuaggggacuccaaag

SEQ ID NO: 1665809 - RNA, 19 nt, Artificial Sequence
  Description of Artificial Sequence: Synthetic oligonucleotide
gaagacacauaguucacga

SEQ ID NO: 1665810 - RNA, 19 nt, Artificial Sequence
  Description of Artificial Sequence: Synthetic oligonucleotide
acucauucaauguuggaau

SEQ ID NO: 1665811 - RNA, 19 nt, Artificial Sequence
  Description of Artificial Sequence: Synthetic oligonucleotide
uguguaaaccugaguuccg

SEQ ID NO: 1665812 - RNA, 19 nt, Artificial Sequence
  Description of Artificial Sequence: Synthetic oligonucleotide
ggagaagacacauaguuca

SEQ ID NO: 1665813 - RNA, 19 nt, Artificial Sequence
  Description of Artificial Sequence: Synthetic oligonucleotide
ugugcaugaacuucagccu

SEQ ID NO: 1665814 - RNA, 19 nt, Artificial Sequence
  Description of Artificial Sequence: Synthetic oligonucleotide
agagcuuuucugaagccgc

SEQ ID NO: 1665815 - RNA, 19 nt, Artificial Sequence
  Description of Artificial Sequence: Synthetic oligonucleotide
uccguagagcuucuuggcg

SEQ ID NO: 1665816 - RNA, 19 nt, Artificial Sequence
  Description of Artificial Sequence: Synthetic oligonucleotide
ucuaggggacuccaaagcu

SEQ ID NO: 1665817 - RNA, 19 nt, Artificial Sequence
  Description of Artificial Sequence: Synthetic oligonucleotide
uaucuugggguccugagua

SEQ ID NO: 1665818 - RNA, 19 nt, Artificial Sequence
  Description of Artificial Sequence: Synthetic oligonucleotide
ucggacacagggcacaccc

SEQ ID NO: 1665819 - RNA, 19 nt, Artificial Sequence
  Description of Artificial Sequence: Synthetic oligonucleotide
auuccgacucugcaggaac

SEQ ID NO: 1665820 - RNA, 19 nt, Artificial Sequence
  Description of Artificial Sequence: Synthetic oligonucleotide
aauccauacucuagagugg

SEQ ID NO: 1665821 - RNA, 19 nt, Artificial Sequence
  Description of Artificial Sequence: Synthetic oligonucleotide
aguguguagaaggagaaga

SEQ ID NO: 1665822 - RNA, 19 nt, Artificial Sequence
  Description of Artificial Sequence: Synthetic oligonucleotide
ccaaauguggagaaguucc

SEQ ID NO: 1665823 - RNA, 19 nt, Artificial Sequence
  Description of Artificial Sequence: Synthetic oligonucleotide
aaccgagccuccuuggcag

SEQ ID NO: 1665824 - RNA, 19 nt, Artificial Sequence
  Description of Artificial Sequence: Synthetic oligonucleotide
uuuuacaagggcagaugga

SEQ ID NO: 1665825 - RNA, 19 nt, Artificial Sequence
  Description of Artificial Sequence: Synthetic oligonucleotide
uguaggaugcauugaccag

SEQ ID NO: 1665826 - RNA, 19 nt, Artificial Sequence
  Description of Artificial Sequence: Synthetic oligonucleotide
uguccuuugcccauuccug

SEQ ID NO: 1665827 - RNA, 19 nt, Artificial Sequence
  Description of Artificial Sequence: Synthetic oligonucleotide
agacaugacucccagugug

SEQ ID NO: 1665828 - RNA, 19 nt, Artificial Sequence
  Description of Artificial Sequence: Synthetic oligonucleotide
ugaugcucuuucuagggga

SEQ ID NO: 1665829 - RNA, 19 nt, Artificial Sequence
  Description of Artificial Sequence: Synthetic oligonucleotide
uggagaaguuccuggauca

SEQ ID NO: 1665830 - RNA, 19 nt, Artificial Sequence
  Description of Artificial Sequence: Synthetic oligonucleotide
uucugaagguccuuagaug

SEQ ID NO: 1665831 - RNA, 19 nt, Artificial Sequence
  Description of Artificial Sequence: Synthetic oligonucleotide
aaaccugaguuccgaucac

SEQ ID NO: 1665832 - RNA, 19 nt, Artificial Sequence
  Description of Artificial Sequence: Synthetic oligonucleotide
uaguuugacaaugugugac

SEQ ID NO: 1665833 - RNA, 19 nt, Artificial Sequence
  Description of Artificial Sequence: Synthetic oligonucleotide
ucacaaagugcuauacagu

SEQ ID NO: 1665834 - RNA, 19 nt, Artificial Sequence
  Description of Artificial Sequence: Synthetic oligonucleotide
caaggaauccauacucuag

SEQ ID NO: 1665835 - RNA, 19 nt, Artificial Sequence
  Description of Artificial Sequence: Synthetic oligonucleotide
uugaccagcccaauugcgc

SEQ ID NO: 1665836 - RNA, 19 nt, Artificial Sequence
  Description of Artificial Sequence: Synthetic oligonucleotide
accuugugcagacaugguc

SEQ ID NO: 1665837 - RNA, 19 nt, Artificial Sequence
  Description of Artificial Sequence: Synthetic oligonucleotide
ccuguuauaucucuggacc

SEQ ID NO: 1665838 - RNA, 19 nt, Artificial Sequence
  Description of Artificial Sequence: Synthetic oligonucleotide
aaggugcuuccguagagcu

SEQ ID NO: 1665839 - RNA, 19 nt, Artificial Sequence
  Description of Artificial Sequence: Synthetic oligonucleotide
uaggggacuccaaagcugc

SEQ ID NO: 1665840 - RNA, 19 nt, Artificial Sequence
  Description of Artificial Sequence: Synthetic oligonucleotide
uguucuugcagugaccacu

SEQ ID NO: 1665841 - RNA, 19 nt, Artificial Sequence
  Description of Artificial Sequence: Synthetic oligonucleotide
ugguguaggaugcauugac

SEQ ID NO: 1665842 - RNA, 19 nt, Artificial Sequence
  Description of Artificial Sequence: Synthetic oligonucleotide
uacucauucaauguuggaa

SEQ ID NO: 1665843 - RNA, 19 nt, Artificial Sequence
  Description of Artificial Sequence: Synthetic oligonucleotide
accagcucauccuuggaag

SEQ ID NO: 1665844 - RNA, 19 nt, Artificial Sequence
  Description of Artificial Sequence: Synthetic oligonucleotide
uuuugccauaggcugcucc

SEQ ID NO: 1665845 - RNA, 19 nt, Artificial Sequence
  Description of Artificial Sequence: Synthetic oligonucleotide
cuuggaaggcauucugugc

SEQ ID NO: 1665846 - RNA, 19 nt, Artificial Sequence
  Description of Artificial Sequence: Synthetic oligonucleotide
cauuccugaguauccaaag

SEQ ID NO: 1665847 - RNA, 19 nt, Artificial Sequence
  Description of Artificial Sequence: Synthetic oligonucleotide
uuugccauaggcugcucca

SEQ ID NO: 1665848 - RNA, 19 nt, Artificial Sequence
  Description of Artificial Sequence: Synthetic oligonucleotide
augaucuggacaaggaauc

SEQ ID NO: 1665849 - RNA, 19 nt, Artificial Sequence
  Description of Artificial Sequence: Synthetic oligonucleotide
aaggcaaaggugcuuccgu

SEQ ID NO: 1665850 - RNA, 19 nt, Artificial Sequence
  Description of Artificial Sequence: Synthetic oligonucleotide
aaccuugacugaauggauc

SEQ ID NO: 1665851 - RNA, 19 nt, Artificial Sequence
  Description of Artificial Sequence: Synthetic oligonucleotide
aguacucauucaauguugg

SEQ ID NO: 1665852 - RNA, 19 nt, Artificial Sequence
  Description of Artificial Sequence: Synthetic oligonucleotide
agguagaugccuuuugcca

SEQ ID NO: 1665853 - RNA, 19 nt, Artificial Sequence
  Description of Artificial Sequence: Synthetic oligonucleotide
acuauccagagcuuuucug

SEQ ID NO: 1665854 - RNA, 19 nt, Artificial Sequence
  Description of Artificial Sequence: Synthetic oligonucleotide
ucaacugggcaaagucagg

SEQ ID NO: 1665855 - RNA, 19 nt, Artificial Sequence
  Description of Artificial Sequence: Synthetic oligonucleotide
ucccggauggacaucacac

SEQ ID NO: 1665856 - RNA, 19 nt, Artificial Sequence
  Description of Artificial Sequence: Synthetic oligonucleotide
ugcuagaaauuaauccacu

SEQ ID NO: 1665857 - RNA, 19 nt, Artificial Sequence
  Description of Artificial Sequence: Synthetic oligonucleotide
gaagaggaugggccaaggg

SEQ ID NO: 1665858 - RNA, 19 nt, Artificial Sequence
  Description of Artificial Sequence: Synthetic oligonucleotide
uguguagaaggagaagaca

SEQ ID NO: 1665859 - RNA, 19 nt, Artificial Sequence
  Description of Artificial Sequence: Synthetic oligonucleotide
cuucuucggguuaaaggcc

SEQ ID NO: 1665860 - RNA, 19 nt, Artificial Sequence
  Description of Artificial Sequence: Synthetic oligonucleotide
agaagacacauaguucacg

SEQ ID NO: 1665861 - RNA, 19 nt, Artificial Sequence
  Description of Artificial Sequence: Synthetic oligonucleotide
guguagaaggagaagacac

SEQ ID NO: 1665862 - RNA, 19 nt, Artificial Sequence
  Description of Artificial Sequence: Synthetic oligonucleotide
acauaguucacgaguacag

SEQ ID NO: 1665863 - RNA, 19 nt, Artificial Sequence
  Description of Artificial Sequence: Synthetic oligonucleotide
acacgcaugauuuccuucu

SEQ ID NO: 1665864 - RNA, 19 nt, Artificial Sequence
  Description of Artificial Sequence: Synthetic oligonucleotide
guuccgaucacacgcauga

SEQ ID NO: 1665865 - RNA, 19 nt, Artificial Sequence
  Description of Artificial Sequence: Synthetic oligonucleotide
aaauguggagaaguuccug

SEQ ID NO: 1665866 - RNA, 19 nt, Artificial Sequence
  Description of Artificial Sequence: Synthetic oligonucleotide
augugugaccuguugcuag

SEQ ID NO: 1665867 - RNA, 19 nt, Artificial Sequence
  Description of Artificial Sequence: Synthetic oligonucleotide
ccuugugcagacauggucg

SEQ ID NO: 1665868 - RNA, 19 nt, Artificial Sequence
  Description of Artificial Sequence: Synthetic oligonucleotide
caguacucauucaauguug

SEQ ID NO: 1665869 - RNA, 19 nt, Artificial Sequence
  Description of Artificial Sequence: Synthetic oligonucleotide
gagagguaguuugacaaug

SEQ ID NO: 1665870 - RNA, 19 nt, Artificial Sequence
  Description of Artificial Sequence: Synthetic oligonucleotide
uccuguuauaucucuggac

SEQ ID NO: 1665871 - RNA, 19 nt, Artificial Sequence
  Description of Artificial Sequence: Synthetic oligonucleotide
gagggauaaggcucgaaga

SEQ ID NO: 1665872 - RNA, 19 nt, Artificial Sequence
  Description of Artificial Sequence: Synthetic oligonucleotide
cuugugcagacauggucgg

SEQ ID NO: 1665873 - RNA, 19 nt, Artificial Sequence
  Description of Artificial Sequence: Synthetic oligonucleotide
agacaugcugcucaucaca

SEQ ID NO: 1665874 - RNA, 19 nt, Artificial Sequence
  Description of Artificial Sequence: Synthetic oligonucleotide
cauugaccagcccaauugc

SEQ ID NO: 1665875 - RNA, 19 nt, Artificial Sequence
  Description of Artificial Sequence: Synthetic oligonucleotide
guguaggaugcauugacca

SEQ ID NO: 1665876 - RNA, 19 nt, Artificial Sequence
  Description of Artificial Sequence: Synthetic oligonucleotide
cuauccagagcuuuucuga

SEQ ID NO: 1665877 - RNA, 19 nt, Artificial Sequence
  Description of Artificial Sequence: Synthetic oligonucleotide
uugacugaauggaucgggu

SEQ ID NO: 1665878 - RNA, 19 nt, Artificial Sequence
  Description of Artificial Sequence: Synthetic oligonucleotide
caucacacuauccagagcu

SEQ ID NO: 1665879 - RNA, 19 nt, Artificial Sequence
  Description of Artificial Sequence: Synthetic oligonucleotide
ucggguuaaaggccaaagu

SEQ ID NO: 1665880 - RNA, 19 nt, Artificial Sequence
  Description of Artificial Sequence: Synthetic oligonucleotide
ucauccuguuauaucucug

SEQ ID NO: 1665881 - RNA, 19 nt, Artificial Sequence
  Description of Artificial Sequence: Synthetic oligonucleotide
guaggaugcauugaccagc

SEQ ID NO: 1665882 - RNA, 19 nt, Artificial Sequence
  Description of Artificial Sequence: Synthetic oligonucleotide
gagguaguuugacaaugug

SEQ ID NO: 1665883 - RNA, 19 nt, Artificial Sequence
  Description of Artificial Sequence: Synthetic oligonucleotide
agggauaaggcucgaagau

SEQ ID NO: 1665884 - RNA, 19 nt, Artificial Sequence
  Description of Artificial Sequence: Synthetic oligonucleotide
acaguacucauucaauguu

SEQ ID NO: 1665885 - RNA, 19 nt, Artificial Sequence
  Description of Artificial Sequence: Synthetic oligonucleotide
gaacagggugguacgaggg

SEQ ID NO: 1665886 - RNA, 19 nt, Artificial Sequence
  Description of Artificial Sequence: Synthetic oligonucleotide
agguccuuagauguaauca

SEQ ID NO: 1665887 - RNA, 19 nt, Artificial Sequence
  Description of Artificial Sequence: Synthetic oligonucleotide
uccuuagauguaaucacuu

SEQ ID NO: 1665888 - RNA, 19 nt, Artificial Sequence
  Description of Artificial Sequence: Synthetic oligonucleotide
agcuggcuuaagcauggac

SEQ ID NO: 1665889 - RNA, 19 nt, Artificial Sequence
  Description of Artificial Sequence: Synthetic oligonucleotide
caacugggcaaagucaggg

SEQ ID NO: 1665890 - RNA, 19 nt, Artificial Sequence
  Description of Artificial Sequence: Synthetic oligonucleotide
uauaucucuggaccagcuc

SEQ ID NO: 1665891 - RNA, 19 nt, Artificial Sequence
  Description of Artificial Sequence: Synthetic oligonucleotide
cuaggggacuccaaagcug

SEQ ID NO: 1665892 - RNA, 19 nt, Artificial Sequence
  Description of Artificial Sequence: Synthetic oligonucleotide
gaguauuaauguuggcauc

SEQ ID NO: 1665893 - RNA, 19 nt, Artificial Sequence
  Description of Artificial Sequence: Synthetic oligonucleotide
guuggaauccucugcucug

SEQ ID NO: 1665894 - RNA, 19 nt, Artificial Sequence
  Description of Artificial Sequence: Synthetic oligonucleotide
aagccgcucauaauucuuc

SEQ ID NO: 1665895 - RNA, 19 nt, Artificial Sequence
  Description of Artificial Sequence: Synthetic oligonucleotide
acgaguacagacagcuggc

SEQ ID NO: 1665896 - RNA, 19 nt, Artificial Sequence
  Description of Artificial Sequence: Synthetic oligonucleotide
guagccaccuccucugcag

SEQ ID NO: 1665897 - RNA, 19 nt, Artificial Sequence
  Description of Artificial Sequence: Synthetic oligonucleotide
cuguugcuagaaauuaauc

SEQ ID NO: 1665898 - RNA, 19 nt, Artificial Sequence
  Description of Artificial Sequence: Synthetic oligonucleotide
aagugcuauacaguuuaga

SEQ ID NO: 1665899 - RNA, 19 nt, Artificial Sequence
  Description of Artificial Sequence: Synthetic oligonucleotide
uuacaagggcagauggauc

SEQ ID NO: 1665900 - RNA, 19 nt, Artificial Sequence
  Description of Artificial Sequence: Synthetic oligonucleotide
aguuuguguaaaccugagu

SEQ ID NO: 1665901 - RNA, 19 nt, Artificial Sequence
  Description of Artificial Sequence: Synthetic oligonucleotide
gcauugaccagcccaauug

SEQ ID NO: 1665902 - RNA, 19 nt, Artificial Sequence
  Description of Artificial Sequence: Synthetic oligonucleotide
ugaguauccaaaggaaaua

SEQ ID NO: 1665903 - RNA, 19 nt, Artificial Sequence
  Description of Artificial Sequence: Synthetic oligonucleotide
uccauacucuagagugggg

SEQ ID NO: 1665904 - RNA, 19 nt, Artificial Sequence
  Description of Artificial Sequence: Synthetic oligonucleotide
ggacaaggaauccauacuc

SEQ ID NO: 1665905 - RNA, 19 nt, Artificial Sequence
  Description of Artificial Sequence: Synthetic oligonucleotide
cagagcuuuucugaagccg

SEQ ID NO: 1665906 - RNA, 19 nt, Artificial Sequence
  Description of Artificial Sequence: Synthetic oligonucleotide
cucauucaauguuggaauc

SEQ ID NO: 1665907 - RNA, 19 nt, Artificial Sequence
  Description of Artificial Sequence: Synthetic oligonucleotide
gcuagaaauuaauccacug

SEQ ID NO: 1665908 - RNA, 19 nt, Artificial Sequence
  Description of Artificial Sequence: Synthetic oligonucleotide
guaaaccugaguuccgauc

SEQ ID NO: 1665909 - RNA, 19 nt, Artificial Sequence
  Description of Artificial Sequence: Synthetic oligonucleotide
uugcgcaggauugaaugcc

SEQ ID NO: 1665910 - RNA, 19 nt, Artificial Sequence
  Description of Artificial Sequence: Synthetic oligonucleotide
gguccuuagauguaaucac

SEQ ID NO: 1665911 - RNA, 19 nt, Artificial Sequence
  Description of Artificial Sequence: Synthetic oligonucleotide
ugcuccaugcagcugcagu

SEQ ID NO: 1665912 - RNA, 19 nt, Artificial Sequence
  Description of Artificial Sequence: Synthetic oligonucleotide
ugaucuggacaaggaaucc

SEQ ID NO: 1665913 - RNA, 19 nt, Artificial Sequence
  Description of Artificial Sequence: Synthetic oligonucleotide
ugaagccgcucauaauucu

SEQ ID NO: 1665914 - RNA, 19 nt, Artificial Sequence
  Description of Artificial Sequence: Synthetic oligonucleotide
uacucuagaguggggaugu

SEQ ID NO: 1665915 - RNA, 19 nt, Artificial Sequence
  Description of Artificial Sequence: Synthetic oligonucleotide
auugaccagcccaauugcg

SEQ ID NO: 1665916 - RNA, 19 nt, Artificial Sequence
  Description of Artificial Sequence: Synthetic oligonucleotide
auguuggaauccucugcuc

SEQ ID NO: 1665917 - RNA, 19 nt, Artificial Sequence
  Description of Artificial Sequence: Synthetic oligonucleotide
uguggagaaguuccuggau

SEQ ID NO: 1665918 - RNA, 19 nt, Artificial Sequence
  Description of Artificial Sequence: Synthetic oligonucleotide
acaaggaauccauacucua

SEQ ID NO: 1665919 - RNA, 19 nt, Artificial Sequence
  Description of Artificial Sequence: Synthetic oligonucleotide
ugugugaccuguugcuaga

SEQ ID NO: 1665920 - RNA, 19 nt, Artificial Sequence
  Description of Artificial Sequence: Synthetic oligonucleotide
auaaggcucgaagaugaug

SEQ ID NO: 1665921 - RNA, 19 nt, Artificial Sequence
  Description of Artificial Sequence: Synthetic oligonucleotide
aauuggugugaggugugca

SEQ ID NO: 1665922 - RNA, 19 nt, Artificial Sequence
  Description of Artificial Sequence: Synthetic oligonucleotide
auuggugugaggugugcau

SEQ ID NO: 1665923 - RNA, 19 nt, Artificial Sequence
  Description of Artificial Sequence: Synthetic oligonucleotide
cauaggcugcuccaugcag

SEQ ID NO: 1665924 - RNA, 19 nt, Artificial Sequence
  Description of Artificial Sequence: Synthetic oligonucleotide
auugaaugccaguucucaa

SEQ ID NO: 1665925 - RNA, 19 nt, Artificial Sequence
  Description of Artificial Sequence: Synthetic oligonucleotide
gcuggcuuaagcauggacc

SEQ ID NO: 1665926 - RNA, 19 nt, Artificial Sequence
  Description of Artificial Sequence: Synthetic oligonucleotide
ggaacagggugguacgagg

SEQ ID NO: 1665927 - RNA, 19 nt, Artificial Sequence
  Description of Artificial Sequence: Synthetic oligonucleotide
uccaaauguggagaaguuc

SEQ ID NO: 1665928 - RNA, 19 nt, Artificial Sequence
  Description of Artificial Sequence: Synthetic oligonucleotide
agguaguuugacaaugugu

SEQ ID NO: 1665929 - RNA, 19 nt, Artificial Sequence
  Description of Artificial Sequence: Synthetic oligonucleotide
uuggcgguccggaaccgag

SEQ ID NO: 1665930 - RNA, 19 nt, Artificial Sequence
  Description of Artificial Sequence: Synthetic oligonucleotide
ugacugaauggaucggguc

SEQ ID NO: 1665931 - RNA, 19 nt, Artificial Sequence
  Description of Artificial Sequence: Synthetic oligonucleotide
gaugggccaagggaucugg

SEQ ID NO: 1665932 - RNA, 19 nt, Artificial Sequence
  Description of Artificial Sequence: Synthetic oligonucleotide
uuccgacucugcaggaacc

SEQ ID NO: 1665933 - RNA, 19 nt, Artificial Sequence
  Description of Artificial Sequence: Synthetic oligonucleotide
gacugaauggaucgggucu

SEQ ID NO: 1665934 - RNA, 19 nt, Artificial Sequence
  Description of Artificial Sequence: Synthetic oligonucleotide
cauucugugcuguccuuug

SEQ ID NO: 1665935 - RNA, 19 nt, Artificial Sequence
  Description of Artificial Sequence: Synthetic oligonucleotide
acauggucggacacagggc

SEQ ID NO: 1665936 - RNA, 19 nt, Artificial Sequence
  Description of Artificial Sequence: Synthetic oligonucleotide
gacccauggaaggcaaagg

SEQ ID NO: 1665937 - RNA, 19 nt, Artificial Sequence
  Description of Artificial Sequence: Synthetic oligonucleotide
ugagagguaguuugacaau

SEQ ID NO: 1665938 - RNA, 19 nt, Artificial Sequence
  Description of Artificial Sequence: Synthetic oligonucleotide
ugcgcaggauugaaugcca

SEQ ID NO: 1665939 - RNA, 19 nt, Artificial Sequence
  Description of Artificial Sequence: Synthetic oligonucleotide
aaagugcuauacaguuuag

SEQ ID NO: 1665940 - RNA, 19 nt, Artificial Sequence
  Description of Artificial Sequence: Synthetic oligonucleotide
uuggcaucgcccaccugcc

SEQ ID NO: 1665941 - RNA, 19 nt, Artificial Sequence
  Description of Artificial Sequence: Synthetic oligonucleotide
acacuauccagagcuuuuc

SEQ ID NO: 1665942 - RNA, 19 nt, Artificial Sequence
  Description of Artificial Sequence: Synthetic oligonucleotide
aguuuagauuccgacucug

SEQ ID NO: 1665943 - RNA, 19 nt, Artificial Sequence
  Description of Artificial Sequence: Synthetic oligonucleotide
cauggucggacacagggca

SEQ ID NO: 1665944 - RNA, 19 nt, Artificial Sequence
  Description of Artificial Sequence: Synthetic oligonucleotide
cugaagccgcucauaauuc

SEQ ID NO: 1665945 - RNA, 19 nt, Artificial Sequence
  Description of Artificial Sequence: Synthetic oligonucleotide
uccgaucacacgcaugauu

SEQ ID NO: 1665946 - RNA, 19 nt, Artificial Sequence
  Description of Artificial Sequence: Synthetic oligonucleotide
uguaaaccugaguuccgau

SEQ ID NO: 1665947 - RNA, 19 nt, Artificial Sequence
  Description of Artificial Sequence: Synthetic oligonucleotide
auccuguuauaucucugga

SEQ ID NO: 1665948 - RNA, 19 nt, Artificial Sequence
  Description of Artificial Sequence: Synthetic oligonucleotide
caaugugggacccauggaa

SEQ ID NO: 1665949 - RNA, 19 nt, Artificial Sequence
  Description of Artificial Sequence: Synthetic oligonucleotide
caugacucccaguguguag

SEQ ID NO: 1665950 - RNA, 19 nt, Artificial Sequence
  Description of Artificial Sequence: Synthetic oligonucleotide
ugcagacauggucggacac

SEQ ID NO: 1665951 - RNA, 19 nt, Artificial Sequence
  Description of Artificial Sequence: Synthetic oligonucleotide
cuuaagcauggacccauuc

SEQ ID NO: 1665952 - RNA, 19 nt, Artificial Sequence
  Description of Artificial Sequence: Synthetic oligonucleotide
uaauguuggcaucgcccac

SEQ ID NO: 1665953 - RNA, 19 nt, Artificial Sequence
  Description of Artificial Sequence: Synthetic oligonucleotide
uggaaggcaaaggugcuuc

SEQ ID NO: 1665954 - RNA, 19 nt, Artificial Sequence
  Description of Artificial Sequence: Synthetic oligonucleotide
accugaguuccgaucacac

SEQ ID NO: 1665955 - RNA, 19 nt, Artificial Sequence
  Description of Artificial Sequence: Synthetic oligonucleotide
guaguuugacaauguguga

SEQ ID NO: 1665956 - RNA, 19 nt, Artificial Sequence
  Description of Artificial Sequence: Synthetic oligonucleotide
agcccaauugcgcaggauu

SEQ ID NO: 1665957 - RNA, 19 nt, Artificial Sequence
  Description of Artificial Sequence: Synthetic oligonucleotide
acuccaaagcugcucuaca

SEQ ID NO: 1665958 - RNA, 19 nt, Artificial Sequence
  Description of Artificial Sequence: Synthetic oligonucleotide
agucaacugggcaaaguca

SEQ ID NO: 1665959 - RNA, 19 nt, Artificial Sequence
  Description of Artificial Sequence: Synthetic oligonucleotide
uuuuggcccuugaaauuuc

SEQ ID NO: 1665960 - RNA, 19 nt, Artificial Sequence
  Description of Artificial Sequence: Synthetic oligonucleotide
uuggugugaggugugcaug

SEQ ID NO: 1665961 - RNA, 19 nt, Artificial Sequence
  Description of Artificial Sequence: Synthetic oligonucleotide
auacucuagaguggggaug

SEQ ID NO: 1665962 - RNA, 19 nt, Artificial Sequence
  Description of Artificial Sequence: Synthetic oligonucleotide
uuggaauccucugcucugc

SEQ ID NO: 1665963 - RNA, 19 nt, Artificial Sequence
  Description of Artificial Sequence: Synthetic oligonucleotide
gacacauaguucacgagua

SEQ ID NO: 1665964 - RNA, 19 nt, Artificial Sequence
  Description of Artificial Sequence: Synthetic oligonucleotide
augacucccaguguguaga

SEQ ID NO: 1665965 - RNA, 19 nt, Artificial Sequence
  Description of Artificial Sequence: Synthetic oligonucleotide
cuucuuggcgguccggaac

SEQ ID NO: 1665966 - RNA, 19 nt, Artificial Sequence
  Description of Artificial Sequence: Synthetic oligonucleotide
cugcucuacacauggccac

SEQ ID NO: 1665967 - RNA, 19 nt, Artificial Sequence
  Description of Artificial Sequence: Synthetic oligonucleotide
gaaccgagccuccuuggca

SEQ ID NO: 1665968 - RNA, 19 nt, Artificial Sequence
  Description of Artificial Sequence: Synthetic oligonucleotide
gaugcucuuucuaggggac

SEQ ID NO: 1665969 - RNA, 19 nt, Artificial Sequence
  Description of Artificial Sequence: Synthetic oligonucleotide
ucacgaguacagacagcug

SEQ ID NO: 1665970 - RNA, 19 nt, Artificial Sequence
  Description of Artificial Sequence: Synthetic oligonucleotide
guguucauccuguuauauc

SEQ ID NO: 1665971 - RNA, 19 nt, Artificial Sequence
  Description of Artificial Sequence: Synthetic oligonucleotide
cucagguagaugccuuuug

SEQ ID NO: 1665972 - RNA, 19 nt, Artificial Sequence
  Description of Artificial Sequence: Synthetic oligonucleotide
ucagggugggagucaguca

SEQ ID NO: 1665973 - RNA, 19 nt, Artificial Sequence
  Description of Artificial Sequence: Synthetic oligonucleotide
cuuucuaggggacuccaaa

SEQ ID NO: 1665974 - RNA, 19 nt, Artificial Sequence
  Description of Artificial Sequence: Synthetic oligonucleotide
augccuuuugccauaggcu

SEQ ID NO: 1665975 - RNA, 19 nt, Artificial Sequence
  Description of Artificial Sequence: Synthetic oligonucleotide
gaauuggugugaggugugc

SEQ ID NO: 1665976 - RNA, 19 nt, Artificial Sequence
  Description of Artificial Sequence: Synthetic oligonucleotide
acacagggcacacccaaau

SEQ ID NO: 1665977 - RNA, 19 nt, Artificial Sequence
  Description of Artificial Sequence: Synthetic oligonucleotide
ugcauugaccagcccaauu

SEQ ID NO: 1665978 - RNA, 19 nt, Artificial Sequence
  Description of Artificial Sequence: Synthetic oligonucleotide
ugcaggaaccuugacugaa

SEQ ID NO: 1665979 - RNA, 19 nt, Artificial Sequence
  Description of Artificial Sequence: Synthetic oligonucleotide
ucuuucuaggggacuccaa

SEQ ID NO: 1665980 - RNA, 19 nt, Artificial Sequence
  Description of Artificial Sequence: Synthetic oligonucleotide
gagaagacacauaguucac

SEQ ID NO: 1665981 - RNA, 19 nt, Artificial Sequence
  Description of Artificial Sequence: Synthetic oligonucleotide
aggaugcauugaccagccc

SEQ ID NO: 1665982 - RNA, 19 nt, Artificial Sequence
  Description of Artificial Sequence: Synthetic oligonucleotide
gucagugggguccaccaca

SEQ ID NO: 1665983 - RNA, 19 nt, Artificial Sequence
  Description of Artificial Sequence: Synthetic oligonucleotide
gacuccaaagcugcucuac

SEQ ID NO: 1665984 - RNA, 19 nt, Artificial Sequence
  Description of Artificial Sequence: Synthetic oligonucleotide
ugaagucaacugggcaaag

SEQ ID NO: 1665985 - RNA, 19 nt, Artificial Sequence
  Description of Artificial Sequence: Synthetic oligonucleotide
aaccugaguuccgaucaca

SEQ ID NO: 1665986 - RNA, 19 nt, Artificial Sequence
  Description of Artificial Sequence: Synthetic oligonucleotide
ucccaguguguagaaggag

SEQ ID NO: 1665987 - RNA, 19 nt, Artificial Sequence
  Description of Artificial Sequence: Synthetic oligonucleotide
gaccagcccaauugcgcag

SEQ ID NO: 1665988 - RNA, 19 nt, Artificial Sequence
  Description of Artificial Sequence: Synthetic oligonucleotide
cugaguauccaaaggaaau

SEQ ID NO: 1665989 - RNA, 19 nt, Artificial Sequence
  Description of Artificial Sequence: Synthetic oligonucleotide
aggcucgaagaugaugcuc

SEQ ID NO: 1665990 - RNA, 19 nt, Artificial Sequence
  Description of Artificial Sequence: Synthetic oligonucleotide
uggaauccucugcucugca

SEQ ID NO: 1665991 - RNA, 19 nt, Artificial Sequence
  Description of Artificial Sequence: Synthetic oligonucleotide
agagguaguuugacaaugu

SEQ ID NO: 1665992 - RNA, 19 nt, Artificial Sequence
  Description of Artificial Sequence: Synthetic oligonucleotide
cacaguacucauucaaugu

SEQ ID NO: 1665993 - RNA, 19 nt, Artificial Sequence
  Description of Artificial Sequence: Synthetic oligonucleotide
agggccauccaaaugugga

SEQ ID NO: 1665994 - RNA, 19 nt, Artificial Sequence
  Description of Artificial Sequence: Synthetic oligonucleotide
acgcaugauuuccuucugu

SEQ ID NO: 1665995 - RNA, 19 nt, Artificial Sequence
  Description of Artificial Sequence: Synthetic oligonucleotide
cuucuguaucuuggggucc

SEQ ID NO: 1665996 - RNA, 19 nt, Artificial Sequence
  Description of Artificial Sequence: Synthetic oligonucleotide
cugcauacuucaugaucug

SEQ ID NO: 1665997 - RNA, 19 nt, Artificial Sequence
  Description of Artificial Sequence: Synthetic oligonucleotide
agccgcucauaauucuucu

SEQ ID NO: 1665998 - RNA, 19 nt, Artificial Sequence
  Description of Artificial Sequence: Synthetic oligonucleotide
gcaguuugguguaggaugc

SEQ ID NO: 1665999 - RNA, 19 nt, Artificial Sequence
  Description of Artificial Sequence: Synthetic oligonucleotide
ccuuggaaggcauucugug

SEQ ID NO: 1666000 - RNA, 19 nt, Artificial Sequence
  Description of Artificial Sequence: Synthetic oligonucleotide
cacacgcaugauuuccuuc

SEQ ID NO: 1666001 - RNA, 19 nt, Artificial Sequence
  Description of Artificial Sequence: Synthetic oligonucleotide
aggaaauacuggagauggg

SEQ ID NO: 1666002 - RNA, 19 nt, Artificial Sequence
  Description of Artificial Sequence: Synthetic oligonucleotide
ugcugagagguaguuugac

SEQ ID NO: 1666003 - RNA, 19 nt, Artificial Sequence
  Description of Artificial Sequence: Synthetic oligonucleotide
ggugguacgagggcugggg

SEQ ID NO: 1666004 - RNA, 19 nt, Artificial Sequence
  Description of Artificial Sequence: Synthetic oligonucleotide
acaugcugcucaucacaca

SEQ ID NO: 1666005 - RNA, 19 nt, Artificial Sequence
  Description of Artificial Sequence: Synthetic oligonucleotide
ggauggacaucacacuauc

SEQ ID NO: 1666006 - RNA, 19 nt, Artificial Sequence
  Description of Artificial Sequence: Synthetic oligonucleotide
ucacacuauccagagcuuu

SEQ ID NO: 1666007 - RNA, 19 nt, Artificial Sequence
  Description of Artificial Sequence: Synthetic oligonucleotide
gaccuguugcuagaaauua

SEQ ID NO: 1666008 - RNA, 19 nt, Artificial Sequence
  Description of Artificial Sequence: Synthetic oligonucleotide
agaaccuugugcagacaug

SEQ ID NO: 1666009 - RNA, 19 nt, Artificial Sequence
  Description of Artificial Sequence: Synthetic oligonucleotide
gacaaggaauccauacucu

SEQ ID NO: 1666010 - RNA, 19 nt, Artificial Sequence
  Description of Artificial Sequence: Synthetic oligonucleotide
guacucauucaauguugga

SEQ ID NO: 1666011 - RNA, 19 nt, Artificial Sequence
  Description of Artificial Sequence: Synthetic oligonucleotide
ggaggaauuggugugaggu

SEQ ID NO: 1666012 - RNA, 19 nt, Artificial Sequence
  Description of Artificial Sequence: Synthetic oligonucleotide
ccuuagauguaaucacuuc

SEQ ID NO: 1666013 - RNA, 19 nt, Artificial Sequence
  Description of Artificial Sequence: Synthetic oligonucleotide
gggccauccaaauguggag

SEQ ID NO: 1666014 - RNA, 19 nt, Artificial Sequence
  Description of Artificial Sequence: Synthetic oligonucleotide
ccugaguuccgaucacacg

SEQ ID NO: 1666015 - RNA, 19 nt, Artificial Sequence
  Description of Artificial Sequence: Synthetic oligonucleotide
cauaguucacgaguacaga

SEQ ID NO: 1666016 - RNA, 19 nt, Artificial Sequence
  Description of Artificial Sequence: Synthetic oligonucleotide
agauuccgacucugcagga

SEQ ID NO: 1666017 - RNA, 19 nt, Artificial Sequence
  Description of Artificial Sequence: Synthetic oligonucleotide
cggguuaaaggccaaaguc

SEQ ID NO: 1666018 - RNA, 19 nt, Artificial Sequence
  Description of Artificial Sequence: Synthetic oligonucleotide
ggggaugguguucauccug

SEQ ID NO: 1666019 - RNA, 19 nt, Artificial Sequence
  Description of Artificial Sequence: Synthetic oligonucleotide
caguguguagaaggagaag

SEQ ID NO: 1666020 - RNA, 19 nt, Artificial Sequence
  Description of Artificial Sequence: Synthetic oligonucleotide
guggggauguucuugcagu

SEQ ID NO: 1666021 - RNA, 19 nt, Artificial Sequence
  Description of Artificial Sequence: Synthetic oligonucleotide
ucccaugcuucugaagguc

SEQ ID NO: 1666022 - RNA, 19 nt, Artificial Sequence
  Description of Artificial Sequence: Synthetic oligonucleotide
ugggacccauggaaggcaa

SEQ ID NO: 1666023 - RNA, 19 nt, Artificial Sequence
  Description of Artificial Sequence: Synthetic oligonucleotide
uggucggacacagggcaca

SEQ ID NO: 1666024 - RNA, 19 nt, Artificial Sequence
  Description of Artificial Sequence: Synthetic oligonucleotide
cucuagaguggggauguuc

SEQ ID NO: 1666025 - RNA, 19 nt, Artificial Sequence
  Description of Artificial Sequence: Synthetic oligonucleotide
ucuuggcgguccggaaccg

SEQ ID NO: 1666026 - RNA, 19 nt, Artificial Sequence
  Description of Artificial Sequence: Synthetic oligonucleotide
ggacccauggaaggcaaag

SEQ ID NO: 1666027 - RNA, 19 nt, Artificial Sequence
  Description of Artificial Sequence: Synthetic oligonucleotide
aucacacgcaugauuuccu

SEQ ID NO: 1666028 - RNA, 19 nt, Artificial Sequence
  Description of Artificial Sequence: Synthetic oligonucleotide
uccagacaugacucccagu

SEQ ID NO: 1666029 - RNA, 19 nt, Artificial Sequence
  Description of Artificial Sequence: Synthetic oligonucleotide
gugguacgagggcuggggc

SEQ ID NO: 1666030 - RNA, 19 nt, Artificial Sequence
  Description of Artificial Sequence: Synthetic oligonucleotide
augaaggcugccucuucua

SEQ ID NO: 1666031 - RNA, 19 nt, Artificial Sequence
  Description of Artificial Sequence: Synthetic oligonucleotide
gguacgagggcuggggccc

SEQ ID NO: 1666032 - RNA, 19 nt, Artificial Sequence
  Description of Artificial Sequence: Synthetic oligonucleotide
ccgcucauaauucuucuuc

SEQ ID NO: 1666033 - RNA, 19 nt, Artificial Sequence
  Description of Artificial Sequence: Synthetic oligonucleotide
uggcgguccggaaccgagc

SEQ ID NO: 1666034 - RNA, 19 nt, Artificial Sequence
  Description of Artificial Sequence: Synthetic oligonucleotide
cacgcaugauuuccuucug

SEQ ID NO: 1666035 - RNA, 19 nt, Artificial Sequence
  Description of Artificial Sequence: Synthetic oligonucleotide
ggguuaaaggccaaagucu

SEQ ID NO: 1666036 - RNA, 19 nt, Artificial Sequence
  Description of Artificial Sequence: Synthetic oligonucleotide
cucccaguguguagaagga

SEQ ID NO: 1666037 - RNA, 19 nt, Artificial Sequence
  Description of Artificial Sequence: Synthetic oligonucleotide
guagaugccuuuugccaua

SEQ ID NO: 1666038 - RNA, 19 nt, Artificial Sequence
  Description of Artificial Sequence: Synthetic oligonucleotide
aaccuugugcagacauggu

SEQ ID NO: 1666039 - RNA, 19 nt, Artificial Sequence
  Description of Artificial Sequence: Synthetic oligonucleotide
gauggggcucagguagaug

SEQ ID NO: 1666040 - RNA, 19 nt, Artificial Sequence
  Description of Artificial Sequence: Synthetic oligonucleotide
caugaacuucagccugcug

SEQ ID NO: 1666041 - RNA, 19 nt, Artificial Sequence
  Description of Artificial Sequence: Synthetic oligonucleotide
auggucggacacagggcac

SEQ ID NO: 1666042 - RNA, 19 nt, Artificial Sequence
  Description of Artificial Sequence: Synthetic oligonucleotide
guaucuugggguccugagu

SEQ ID NO: 1666043 - RNA, 19 nt, Artificial Sequence
  Description of Artificial Sequence: Synthetic oligonucleotide
ugacucccaguguguagaa

SEQ ID NO: 1666044 - RNA, 19 nt, Artificial Sequence
  Description of Artificial Sequence: Synthetic oligonucleotide
aguuccgaucacacgcaug

SEQ ID NO: 1666045 - RNA, 19 nt, Artificial Sequence
  Description of Artificial Sequence: Synthetic oligonucleotide
gucagucagggccauccaa

SEQ ID NO: 1666046 - RNA, 19 nt, Artificial Sequence
  Description of Artificial Sequence: Synthetic oligonucleotide
ugcuguccuuugcccauuc

SEQ ID NO: 1666047 - RNA, 19 nt, Artificial Sequence
  Description of Artificial Sequence: Synthetic oligonucleotide
ccugcccauccucauauac

SEQ ID NO: 1666048 - RNA, 19 nt, Artificial Sequence
  Description of Artificial Sequence: Synthetic oligonucleotide
ccugaguauuaauguuggc

SEQ ID NO: 1666049 - RNA, 19 nt, Artificial Sequence
  Description of Artificial Sequence: Synthetic oligonucleotide
guucacgaguacagacagc

SEQ ID NO: 1666050 - RNA, 19 nt, Artificial Sequence
  Description of Artificial Sequence: Synthetic oligonucleotide
gugcagacauggucggaca

SEQ ID NO: 1666051 - RNA, 19 nt, Artificial Sequence
  Description of Artificial Sequence: Synthetic oligonucleotide
gguagaugccuuuugccau

SEQ ID NO: 1666052 - RNA, 19 nt, Artificial Sequence
  Description of Artificial Sequence: Synthetic oligonucleotide
ggcgguccggaaccgagcc

SEQ ID NO: 1666053 - RNA, 19 nt, Artificial Sequence
  Description of Artificial Sequence: Synthetic oligonucleotide
gauuccgacucugcaggaa

SEQ ID NO: 1666054 - RNA, 19 nt, Artificial Sequence
  Description of Artificial Sequence: Synthetic oligonucleotide
uccggaaccgagccuccuu

SEQ ID NO: 1666055 - RNA, 19 nt, Artificial Sequence
  Description of Artificial Sequence: Synthetic oligonucleotide
ccaccucugcuccaguagc

SEQ ID NO: 1666056 - RNA, 19 nt, Artificial Sequence
  Description of Artificial Sequence: Synthetic oligonucleotide
uggcaucgcccaccugccc

SEQ ID NO: 1666057 - RNA, 19 nt, Artificial Sequence
  Description of Artificial Sequence: Synthetic oligonucleotide
ggaauuggugugaggugug

SEQ ID NO: 1666058 - RNA, 19 nt, Artificial Sequence
  Description of Artificial Sequence: Synthetic oligonucleotide
uguuggcaucgcccaccug

SEQ ID NO: 1666059 - RNA, 19 nt, Artificial Sequence
  Description of Artificial Sequence: Synthetic oligonucleotide
gcccaauugcgcaggauug

SEQ ID NO: 1666060 - RNA, 19 nt, Artificial Sequence
  Description of Artificial Sequence: Synthetic oligonucleotide
gcuauacaguuuagauucc

SEQ ID NO: 1666061 - RNA, 19 nt, Artificial Sequence
  Description of Artificial Sequence: Synthetic oligonucleotide
ucgcccaccugcccauccu

SEQ ID NO: 1666062 - RNA, 19 nt, Artificial Sequence
  Description of Artificial Sequence: Synthetic oligonucleotide
gggaacagggugguacgag

SEQ ID NO: 1666063 - RNA, 19 nt, Artificial Sequence
  Description of Artificial Sequence: Synthetic oligonucleotide
uugugcagacauggucgga

SEQ ID NO: 1666064 - RNA, 19 nt, Artificial Sequence
  Description of Artificial Sequence: Synthetic oligonucleotide
guccuuagauguaaucacu

SEQ ID NO: 1666065 - RNA, 19 nt, Artificial Sequence
  Description of Artificial Sequence: Synthetic oligonucleotide
acaugacucccagugugua

SEQ ID NO: 1666066 - RNA, 19 nt, Artificial Sequence
  Description of Artificial Sequence: Synthetic oligonucleotide
gcugcucuacacauggcca

SEQ ID NO: 1666067 - RNA, 19 nt, Artificial Sequence
  Description of Artificial Sequence: Synthetic oligonucleotide
gaaccuugacugaauggau

SEQ ID NO: 1666068 - RNA, 19 nt, Artificial Sequence
  Description of Artificial Sequence: Synthetic oligonucleotide
gaguacagacagcuggcuu

SEQ ID NO: 1666069 - RNA, 19 nt, Artificial Sequence
  Description of Artificial Sequence: Synthetic oligonucleotide
gacaugacucccagugugu

SEQ ID NO: 1666070 - RNA, 19 nt, Artificial Sequence
  Description of Artificial Sequence: Synthetic oligonucleotide
agacauggucggacacagg

SEQ ID NO: 1666071 - RNA, 19 nt, Artificial Sequence
  Description of Artificial Sequence: Synthetic oligonucleotide
gaacuucagccugcugaga

SEQ ID NO: 1666072 - RNA, 19 nt, Artificial Sequence
  Description of Artificial Sequence: Synthetic oligonucleotide
cuucagccugcugagaggu

SEQ ID NO: 1666073 - RNA, 19 nt, Artificial Sequence
  Description of Artificial Sequence: Synthetic oligonucleotide
cucuuucuaggggacucca

SEQ ID NO: 1666074 - RNA, 19 nt, Artificial Sequence
  Description of Artificial Sequence: Synthetic oligonucleotide
ggauugaaugccaguucuc

SEQ ID NO: 1666075 - RNA, 19 nt, Artificial Sequence
  Description of Artificial Sequence: Synthetic oligonucleotide
augcucuuucuaggggacu

SEQ ID NO: 1666076 - RNA, 19 nt, Artificial Sequence
  Description of Artificial Sequence: Synthetic oligonucleotide
gccuuuugccauaggcugc

SEQ ID NO: 1666077 - RNA, 19 nt, Artificial Sequence
  Description of Artificial Sequence: Synthetic oligonucleotide
ccaguguguagaaggagaa

SEQ ID NO: 1666078 - RNA, 19 nt, Artificial Sequence
  Description of Artificial Sequence: Synthetic oligonucleotide
ggucaucucccggauggac

SEQ ID NO: 1666079 - RNA, 19 nt, Artificial Sequence
  Description of Artificial Sequence: Synthetic oligonucleotide
cacuauccagagcuuuucu

SEQ ID NO: 1666080 - RNA, 19 nt, Artificial Sequence
  Description of Artificial Sequence: Synthetic oligonucleotide
gaagccgcucauaauucuu

SEQ ID NO: 1666081 - RNA, 19 nt, Artificial Sequence
  Description of Artificial Sequence: Synthetic oligonucleotide
aucacacuauccagagcuu

SEQ ID NO: 1666082 - RNA, 19 nt, Artificial Sequence
  Description of Artificial Sequence: Synthetic oligonucleotide
uuccgaucacacgcaugau

SEQ ID NO: 1666083 - RNA, 19 nt, Artificial Sequence
  Description of Artificial Sequence: Synthetic oligonucleotide
ccuguugcuagaaauuaau

SEQ ID NO: 1666084 - RNA, 19 nt, Artificial Sequence
  Description of Artificial Sequence: Synthetic oligonucleotide
cacacuauccagagcuuuu

SEQ ID NO: 1666085 - RNA, 19 nt, Artificial Sequence
  Description of Artificial Sequence: Synthetic oligonucleotide
gcaugauuuccuucuguau

SEQ ID NO: 1666086 - RNA, 19 nt, Artificial Sequence
  Description of Artificial Sequence: Synthetic oligonucleotide
ccggaaccgagccuccuug

SEQ ID NO: 1666087 - RNA, 19 nt, Artificial Sequence
  Description of Artificial Sequence: Synthetic oligonucleotide
guuugguguaggaugcauu

SEQ ID NO: 1666088 - RNA, 19 nt, Artificial Sequence
  Description of Artificial Sequence: Synthetic oligonucleotide
caauugcgcaggauugaau

SEQ ID NO: 1666089 - RNA, 19 nt, Artificial Sequence
  Description of Artificial Sequence: Synthetic oligonucleotide
gaagguccuuagauguaau

SEQ ID NO: 1666090 - RNA, 19 nt, Artificial Sequence
  Description of Artificial Sequence: Synthetic oligonucleotide
gucggacacagggcacacc

SEQ ID NO: 1666091 - RNA, 19 nt, Artificial Sequence
  Description of Artificial Sequence: Synthetic oligonucleotide
gugaggugugcaugaacuu

SEQ ID NO: 1666092 - RNA, 19 nt, Artificial Sequence
  Description of Artificial Sequence: Synthetic oligonucleotide
ccgaucacacgcaugauuu

SEQ ID NO: 1666093 - RNA, 19 nt, Artificial Sequence
  Description of Artificial Sequence: Synthetic oligonucleotide
gaguuccgaucacacgcau

SEQ ID NO: 1666094 - RNA, 19 nt, Artificial Sequence
  Description of Artificial Sequence: Synthetic oligonucleotide
ggggauguucuugcaguga

SEQ ID NO: 1666095 - RNA, 19 nt, Artificial Sequence
  Description of Artificial Sequence: Synthetic oligonucleotide
ccggauggacaucacacua

SEQ ID NO: 1666096 - RNA, 19 nt, Artificial Sequence
  Description of Artificial Sequence: Synthetic oligonucleotide
ggaugggccaagggaucug

SEQ ID NO: 1666097 - RNA, 19 nt, Artificial Sequence
  Description of Artificial Sequence: Synthetic oligonucleotide
agccugcugagagguaguu

SEQ ID NO: 1666098 - RNA, 19 nt, Artificial Sequence
  Description of Artificial Sequence: Synthetic oligonucleotide
cggaaccgagccuccuugg

SEQ ID NO: 1666099 - RNA, 19 nt, Artificial Sequence
  Description of Artificial Sequence: Synthetic oligonucleotide
gcacacccaaauguuccca

SEQ ID NO: 1666100 - RNA, 19 nt, Artificial Sequence
  Description of Artificial Sequence: Synthetic oligonucleotide
accugcccauccucauaua

SEQ ID NO: 1666101 - RNA, 19 nt, Artificial Sequence
  Description of Artificial Sequence: Synthetic oligonucleotide
cuagaguggggauguucuu

SEQ ID NO: 1666102 - RNA, 19 nt, Artificial Sequence
  Description of Artificial Sequence: Synthetic oligonucleotide
ggcuuaagcauggacccau

SEQ ID NO: 1666103 - RNA, 19 nt, Artificial Sequence
  Description of Artificial Sequence: Synthetic oligonucleotide
cgaucacacgcaugauuuc

SEQ ID NO: 1666104 - RNA, 19 nt, Artificial Sequence
  Description of Artificial Sequence: Synthetic oligonucleotide
gcucuacacauggccacca

SEQ ID NO: 1666105 - RNA, 19 nt, Artificial Sequence
  Description of Artificial Sequence: Synthetic oligonucleotide
guacgagggcuggggcccc

SEQ ID NO: 1666106 - RNA, 19 nt, Artificial Sequence
  Description of Artificial Sequence: Synthetic oligonucleotide
cgcaugauuuccuucugua

SEQ ID NO: 1666107 - RNA, 19 nt, Artificial Sequence
  Description of Artificial Sequence: Synthetic oligonucleotide
cuuggcgguccggaaccga

SEQ ID NO: 1666108 - RNA, 19 nt, Artificial Sequence
  Description of Artificial Sequence: Synthetic oligonucleotide
ggagaaguuccuggaucaa

SEQ ID NO: 1666109 - RNA, 19 nt, Artificial Sequence
  Description of Artificial Sequence: Synthetic oligonucleotide
ccauaggcugcuccaugca

SEQ ID NO: 1666110 - RNA, 19 nt, Artificial Sequence
  Description of Artificial Sequence: Synthetic oligonucleotide
ggucggacacagggcacac

SEQ ID NO: 1666111 - RNA, 19 nt, Artificial Sequence
  Description of Artificial Sequence: Synthetic oligonucleotide
ggaauccucugcucugcau

SEQ ID NO: 1666112 - RNA, 19 nt, Artificial Sequence
  Description of Artificial Sequence: Synthetic oligonucleotide
ccaauugcgcaggauugaa

SEQ ID NO: 1666113 - RNA, 19 nt, Artificial Sequence
  Description of Artificial Sequence: Synthetic oligonucleotide
cccauuccugaguauccaa

SEQ ID NO: 1666114 - RNA, 19 nt, Artificial Sequence
  Description of Artificial Sequence: Synthetic oligonucleotide
ggggaacagggugguacga

SEQ ID NO: 1666115 - RNA, 19 nt, Artificial Sequence
  Description of Artificial Sequence: Synthetic oligonucleotide
cccaauugcgcaggauuga

SEQ ID NO: 1666116 - RNA, 19 nt, Artificial Sequence
  Description of Artificial Sequence: Synthetic oligonucleotide
ggacuccaaagcugcucua

SEQ ID NO: 1666117 - RNA, 19 nt, Artificial Sequence
  Description of Artificial Sequence: Synthetic oligonucleotide
cucgaagaugaugcucuuu

SEQ ID NO: 1666118 - RNA, 19 nt, Artificial Sequence
  Description of Artificial Sequence: Synthetic oligonucleotide
cgaagaugaugcucuuucu

SEQ ID NO: 1666119 - RNA, 19 nt, Artificial Sequence
  Description of Artificial Sequence: Synthetic oligonucleotide
cccggauggacaucacacu

SEQ ID NO: 1666120 - RNA, 19 nt, Artificial Sequence
  Description of Artificial Sequence: Synthetic oligonucleotide
ccuuuugccauaggcugcu

SEQ ID NO: 1666121 - RNA, 19 nt, Artificial Sequence
  Description of Artificial Sequence: Synthetic oligonucleotide
ggcucagguagaugccuuu

SEQ ID NO: 1666122 - RNA, 19 nt, Artificial Sequence
  Description of Artificial Sequence: Synthetic oligonucleotide
gcaggaaccuugacugaau

SEQ ID NO: 1666123 - RNA, 19 nt, Artificial Sequence
  Description of Artificial Sequence: Synthetic oligonucleotide
cggauggacaucacacuau

SEQ ID NO: 1666124 - RNA, 19 nt, Artificial Sequence
  Description of Artificial Sequence: Synthetic oligonucleotide
ccagcccaauugcgcagga

SEQ ID NO: 1666125 - RNA, 19 nt, Artificial Sequence
  Description of Artificial Sequence: Synthetic oligonucleotide
gcucagguagaugccuuuu

SEQ ID NO: 1666126 - RNA, 19 nt, Artificial Sequence
  Description of Artificial Sequence: Synthetic oligonucleotide
ccaagggaucugggucauc

SEQ ID NO: 1666127 - RNA, 19 nt, Artificial Sequence
  Description of Artificial Sequence: Synthetic oligonucleotide
gcuuaagcauggacccauu

SEQ ID NO: 1666128 - RNA, 19 nt, Artificial Sequence
  Description of Artificial Sequence: Synthetic oligonucleotide
cagcccaauugcgcaggau

SEQ ID NO: 1666129 - RNA, 19 nt, Artificial Sequence
  Description of Artificial Sequence: Synthetic oligonucleotide
gccugcugagagguaguuu

SEQ ID NO: 1666130 - RNA, 19 nt, Artificial Sequence
  Description of Artificial Sequence: Synthetic oligonucleotide
gggagucagucagggccau

SEQ ID NO: 1666131 - RNA, 19 nt, Artificial Sequence
  Description of Artificial Sequence: Synthetic oligonucleotide
ccaaagucuuggggucagu

SEQ ID NO: 1666132 - RNA, 19 nt, Artificial Sequence
  Description of Artificial Sequence: Synthetic oligonucleotide
aauggggucgcucagugcc

SEQ ID NO: 1666133 - RNA, 19 nt, Artificial Sequence
  Description of Artificial Sequence: Synthetic oligonucleotide
aaaucaucguaguaauccc

SEQ ID NO: 1666134 - RNA, 19 nt, Artificial Sequence
  Description of Artificial Sequence: Synthetic oligonucleotide
gauaccuuguuccagaagc

SEQ ID NO: 1666135 - RNA, 19 nt, Artificial Sequence
  Description of Artificial Sequence: Synthetic oligonucleotide
acuguggauaccuuguucc

SEQ ID NO: 1666136 - RNA, 19 nt, Artificial Sequence
  Description of Artificial Sequence: Synthetic oligonucleotide
aaccacaacgcucuugccc

SEQ ID NO: 1666137 - RNA, 19 nt, Artificial Sequence
  Description of Artificial Sequence: Synthetic oligonucleotide
aauaguaagcaccuucaca

SEQ ID NO: 1666138 - RNA, 19 nt, Artificial Sequence
  Description of Artificial Sequence: Synthetic oligonucleotide
uaagccaauggacacaagc

SEQ ID NO: 1666139 - RNA, 19 nt, Artificial Sequence
  Description of Artificial Sequence: Synthetic oligonucleotide
ugugcuagccacauggaag

SEQ ID NO: 1666140 - RNA, 19 nt, Artificial Sequence
  Description of Artificial Sequence: Synthetic oligonucleotide
uuuguagucgcgcagugca

SEQ ID NO: 1666141 - RNA, 19 nt, Artificial Sequence
  Description of Artificial Sequence: Synthetic oligonucleotide
aaaguccucucgcucuacc

SEQ ID NO: 1666142 - RNA, 19 nt, Artificial Sequence
  Description of Artificial Sequence: Synthetic oligonucleotide
acuguagacauaguacagc

SEQ ID NO: 1666143 - RNA, 19 nt, Artificial Sequence
  Description of Artificial Sequence: Synthetic oligonucleotide
guacaugucagccacacuc

SEQ ID NO: 1666144 - RNA, 19 nt, Artificial Sequence
  Description of Artificial Sequence: Synthetic oligonucleotide
ucgaaaguggucauccagc

SEQ ID NO: 1666145 - RNA, 19 nt, Artificial Sequence
  Description of Artificial Sequence: Synthetic oligonucleotide
guagacauaguacagcaca

SEQ ID NO: 1666146 - RNA, 19 nt, Artificial Sequence
  Description of Artificial Sequence: Synthetic oligonucleotide
gaaacaucuuggcuaugcg

SEQ ID NO: 1666147 - RNA, 19 nt, Artificial Sequence
  Description of Artificial Sequence: Synthetic oligonucleotide
uuuccguguaccacgaaga

SEQ ID NO: 1666148 - RNA, 19 nt, Artificial Sequence
  Description of Artificial Sequence: Synthetic oligonucleotide
aaucaucguaguaaucccg

SEQ ID NO: 1666149 - RNA, 19 nt, Artificial Sequence
  Description of Artificial Sequence: Synthetic oligonucleotide
aucguaguaaucccgccuc

SEQ ID NO: 1666150 - RNA, 19 nt, Artificial Sequence
  Description of Artificial Sequence: Synthetic oligonucleotide
caggcguucacaaucacug

SEQ ID NO: 1666151 - RNA, 19 nt, Artificial Sequence
  Description of Artificial Sequence: Synthetic oligonucleotide
agagacagcgcucuccauc

SEQ ID NO: 1666152 - RNA, 19 nt, Artificial Sequence
  Description of Artificial Sequence: Synthetic oligonucleotide
uguaccacgaagaccacau

SEQ ID NO: 1666153 - RNA, 19 nt, Artificial Sequence
  Description of Artificial Sequence: Synthetic oligonucleotide
ugcccuuccacuuaguguc

SEQ ID NO: 1666154 - RNA, 19 nt, Artificial Sequence
  Description of Artificial Sequence: Synthetic oligonucleotide
uccuaggucgccccgaagc

SEQ ID NO: 1666155 - RNA, 19 nt, Artificial Sequence
  Description of Artificial Sequence: Synthetic oligonucleotide
agacgaaacaucuuggcua

SEQ ID NO: 1666156 - RNA, 19 nt, Artificial Sequence
  Description of Artificial Sequence: Synthetic oligonucleotide
ucgacaaguggaauggagu

SEQ ID NO: 1666157 - RNA, 19 nt, Artificial Sequence
  Description of Artificial Sequence: Synthetic oligonucleotide
gaagccacgaauucagaca

SEQ ID NO: 1666158 - RNA, 19 nt, Artificial Sequence
  Description of Artificial Sequence: Synthetic oligonucleotide
ugcgguaaccuguuuguag

SEQ ID NO: 1666159 - RNA, 19 nt, Artificial Sequence
  Description of Artificial Sequence: Synthetic oligonucleotide
aguauggucacuguagaca

SEQ ID NO: 1666160 - RNA, 19 nt, Artificial Sequence
  Description of Artificial Sequence: Synthetic oligonucleotide
aaccuguuuguagucgcgc

SEQ ID NO: 1666161 - RNA, 19 nt, Artificial Sequence
  Description of Artificial Sequence: Synthetic oligonucleotide
cacgaauucagacaccuuc

SEQ ID NO: 1666162 - RNA, 19 nt, Artificial Sequence
  Description of Artificial Sequence: Synthetic oligonucleotide
aucaucguaguaaucccgc

SEQ ID NO: 1666163 - RNA, 19 nt, Artificial Sequence
  Description of Artificial Sequence: Synthetic oligonucleotide
ugccugagaaccacaacgc

SEQ ID NO: 1666164 - RNA, 19 nt, Artificial Sequence
  Description of Artificial Sequence: Synthetic oligonucleotide
caccuucucgcauuuagcc

SEQ ID NO: 1666165 - RNA, 19 nt, Artificial Sequence
  Description of Artificial Sequence: Synthetic oligonucleotide
agagcccggaaguagucac

SEQ ID NO: 1666166 - RNA, 19 nt, Artificial Sequence
  Description of Artificial Sequence: Synthetic oligonucleotide
uaaccuguuuguagucgcg

SEQ ID NO: 1666167 - RNA, 19 nt, Artificial Sequence
  Description of Artificial Sequence: Synthetic oligonucleotide
cuuuccguguaccacgaag

SEQ ID NO: 1666168 - RNA, 19 nt, Artificial Sequence
  Description of Artificial Sequence: Synthetic oligonucleotide
gucaucgacaaguggaaug

SEQ ID NO: 1666169 - RNA, 19 nt, Artificial Sequence
  Description of Artificial Sequence: Synthetic oligonucleotide
ucgcauuuagccuccaggu

SEQ ID NO: 1666170 - RNA, 19 nt, Artificial Sequence
  Description of Artificial Sequence: Synthetic oligonucleotide
acagcgaugcgcccggaac

SEQ ID NO: 1666171 - RNA, 19 nt, Artificial Sequence
  Description of Artificial Sequence: Synthetic oligonucleotide
uaguaaucccgccuccugc

SEQ ID NO: 1666172 - RNA, 19 nt, Artificial Sequence
  Description of Artificial Sequence: Synthetic oligonucleotide
cacaaagccgcuucaggcc

SEQ ID NO: 1666173 - RNA, 19 nt, Artificial Sequence
  Description of Artificial Sequence: Synthetic oligonucleotide
ugcugcgccucuucaaugg

SEQ ID NO: 1666174 - RNA, 19 nt, Artificial Sequence
  Description of Artificial Sequence: Synthetic oligonucleotide
cugcaggaaaucaucguag

SEQ ID NO: 1666175 - RNA, 19 nt, Artificial Sequence
  Description of Artificial Sequence: Synthetic oligonucleotide
uguagucgcgcagugcacg

SEQ ID NO: 1666176 - RNA, 19 nt, Artificial Sequence
  Description of Artificial Sequence: Synthetic oligonucleotide
accacaacgcucuugcccu

SEQ ID NO: 1666177 - RNA, 19 nt, Artificial Sequence
  Description of Artificial Sequence: Synthetic oligonucleotide
gaaguagucacugcggcca

SEQ ID NO: 1666178 - RNA, 19 nt, Artificial Sequence
  Description of Artificial Sequence: Synthetic oligonucleotide
gucacuguagacauaguac

SEQ ID NO: 1666179 - RNA, 19 nt, Artificial Sequence
  Description of Artificial Sequence: Synthetic oligonucleotide
guaaccuguuuguagucgc

SEQ ID NO: 1666180 - RNA, 19 nt, Artificial Sequence
  Description of Artificial Sequence: Synthetic oligonucleotide
agcagucuaagccaaugga

SEQ ID NO: 1666181 - RNA, 19 nt, Artificial Sequence
  Description of Artificial Sequence: Synthetic oligonucleotide
cauguacucgguacacugg

SEQ ID NO: 1666182 - RNA, 19 nt, Artificial Sequence
  Description of Artificial Sequence: Synthetic oligonucleotide
cucgcucucucgaaagugg

SEQ ID NO: 1666183 - RNA, 19 nt, Artificial Sequence
  Description of Artificial Sequence: Synthetic oligonucleotide
cucgaaaguggucauccag

SEQ ID NO: 1666184 - RNA, 19 nt, Artificial Sequence
  Description of Artificial Sequence: Synthetic oligonucleotide
agaagguacaugucagcca

SEQ ID NO: 1666185 - RNA, 19 nt, Artificial Sequence
  Description of Artificial Sequence: Synthetic oligonucleotide
gagugaagauaucugggga

SEQ ID NO: 1666186 - RNA, 19 nt, Artificial Sequence
  Description of Artificial Sequence: Synthetic oligonucleotide
ugcacggcgaauggggucg

SEQ ID NO: 1666187 - RNA, 19 nt, Artificial Sequence
  Description of Artificial Sequence: Synthetic oligonucleotide
uuccacuuaguguccagca

SEQ ID NO: 1666188 - RNA, 19 nt, Artificial Sequence
  Description of Artificial Sequence: Synthetic oligonucleotide
uaccuuguuccagaagccg

SEQ ID NO: 1666189 - RNA, 19 nt, Artificial Sequence
  Description of Artificial Sequence: Synthetic oligonucleotide
uaaucccgccuccugcagg

SEQ ID NO: 1666190 - RNA, 19 nt, Artificial Sequence
  Description of Artificial Sequence: Synthetic oligonucleotide
cagugcacggcgaaugggg

SEQ ID NO: 1666191 - RNA, 19 nt, Artificial Sequence
  Description of Artificial Sequence: Synthetic oligonucleotide
cucucgaaaguggucaucc

SEQ ID NO: 1666192 - RNA, 19 nt, Artificial Sequence
  Description of Artificial Sequence: Synthetic oligonucleotide
caacagauagcgcaccaac

SEQ ID NO: 1666193 - RNA, 19 nt, Artificial Sequence
  Description of Artificial Sequence: Synthetic oligonucleotide
acgugccaggcuuggaagc

SEQ ID NO: 1666194 - RNA, 19 nt, Artificial Sequence
  Description of Artificial Sequence: Synthetic oligonucleotide
auaguacagcacaugagug

SEQ ID NO: 1666195 - RNA, 19 nt, Artificial Sequence
  Description of Artificial Sequence: Synthetic oligonucleotide
uagacauaguacagcacau

SEQ ID NO: 1666196 - RNA, 19 nt, Artificial Sequence
  Description of Artificial Sequence: Synthetic oligonucleotide
aaguaggugcugcgagcac

SEQ ID NO: 1666197 - RNA, 19 nt, Artificial Sequence
  Description of Artificial Sequence: Synthetic oligonucleotide
acagcgggcuccguuagcc

SEQ ID NO: 1666198 - RNA, 19 nt, Artificial Sequence
  Description of Artificial Sequence: Synthetic oligonucleotide
aaguggaauggagucuguc

SEQ ID NO: 1666199 - RNA, 19 nt, Artificial Sequence
  Description of Artificial Sequence: Synthetic oligonucleotide
agcgcucuccaucaaaagu

SEQ ID NO: 1666200 - RNA, 19 nt, Artificial Sequence
  Description of Artificial Sequence: Synthetic oligonucleotide
ucuaagccaauggacacaa

SEQ ID NO: 1666201 - RNA, 19 nt, Artificial Sequence
  Description of Artificial Sequence: Synthetic oligonucleotide
uguggauaccuuguuccag

SEQ ID NO: 1666202 - RNA, 19 nt, Artificial Sequence
  Description of Artificial Sequence: Synthetic oligonucleotide
aaucccgccuccugcagga

SEQ ID NO: 1666203 - RNA, 19 nt, Artificial Sequence
  Description of Artificial Sequence: Synthetic oligonucleotide
guguuggccucacagcggg

SEQ ID NO: 1666204 - RNA, 19 nt, Artificial Sequence
  Description of Artificial Sequence: Synthetic oligonucleotide
ugacauguuccacaccgau

SEQ ID NO: 1666205 - RNA, 19 nt, Artificial Sequence
  Description of Artificial Sequence: Synthetic oligonucleotide
aaguccucucgcucuacca

SEQ ID NO: 1666206 - RNA, 19 nt, Artificial Sequence
  Description of Artificial Sequence: Synthetic oligonucleotide
cauagagacagcgcucucc

SEQ ID NO: 1666207 - RNA, 19 nt, Artificial Sequence
  Description of Artificial Sequence: Synthetic oligonucleotide
auguacucgguacacuggu

SEQ ID NO: 1666208 - RNA, 19 nt, Artificial Sequence
  Description of Artificial Sequence: Synthetic oligonucleotide
aguaaucccgccuccugca

SEQ ID NO: 1666209 - RNA, 19 nt, Artificial Sequence
  Description of Artificial Sequence: Synthetic oligonucleotide
ucaucguaguaaucccgcc

SEQ ID NO: 1666210 - RNA, 19 nt, Artificial Sequence
  Description of Artificial Sequence: Synthetic oligonucleotide
gagacagcgcucuccauca

SEQ ID NO: 1666211 - RNA, 19 nt, Artificial Sequence
  Description of Artificial Sequence: Synthetic oligonucleotide
uugcccuuccacuuagugu

SEQ ID NO: 1666212 - RNA, 19 nt, Artificial Sequence
  Description of Artificial Sequence: Synthetic oligonucleotide
uaggucgccccgaagcuca

SEQ ID NO: 1666213 - RNA, 19 nt, Artificial Sequence
  Description of Artificial Sequence: Synthetic oligonucleotide
agucgcgcagugcacggcg

SEQ ID NO: 1666214 - RNA, 19 nt, Artificial Sequence
  Description of Artificial Sequence: Synthetic oligonucleotide
cuaugcgccagacacccac

SEQ ID NO: 1666215 - RNA, 19 nt, Artificial Sequence
  Description of Artificial Sequence: Synthetic oligonucleotide
gacacagcgaugcgcccgg

SEQ ID NO: 1666216 - RNA, 19 nt, Artificial Sequence
  Description of Artificial Sequence: Synthetic oligonucleotide
cauauccucccgcaaccgg

SEQ ID NO: 1666217 - RNA, 19 nt, Artificial Sequence
  Description of Artificial Sequence: Synthetic oligonucleotide
aacggcuuuccguguacca

SEQ ID NO: 1666218 - RNA, 19 nt, Artificial Sequence
  Description of Artificial Sequence: Synthetic oligonucleotide
ugucuaggcgaccugugua

SEQ ID NO: 1666219 - RNA, 19 nt, Artificial Sequence
  Description of Artificial Sequence: Synthetic oligonucleotide
gaagauaucuggggagaug

SEQ ID NO: 1666220 - RNA, 19 nt, Artificial Sequence
  Description of Artificial Sequence: Synthetic oligonucleotide
aagggcucagcagucuaag

SEQ ID NO: 1666221 - RNA, 19 nt, Artificial Sequence
  Description of Artificial Sequence: Synthetic oligonucleotide
auaucagggcagcugcuga

SEQ ID NO: 1666222 - RNA, 19 nt, Artificial Sequence
  Description of Artificial Sequence: Synthetic oligonucleotide
ugcgccucuucaauggcac

SEQ ID NO: 1666223 - RNA, 19 nt, Artificial Sequence
  Description of Artificial Sequence: Synthetic oligonucleotide
aguacagcacaugagugaa

SEQ ID NO: 1666224 - RNA, 19 nt, Artificial Sequence
  Description of Artificial Sequence: Synthetic oligonucleotide
caauaguaagcaccuucac

SEQ ID NO: 1666225 - RNA, 19 nt, Artificial Sequence
  Description of Artificial Sequence: Synthetic oligonucleotide
uuccguguaccacgaagac

SEQ ID NO: 1666226 - RNA, 19 nt, Artificial Sequence
  Description of Artificial Sequence: Synthetic oligonucleotide
cacaguuggcacugcuugg

SEQ ID NO: 1666227 - RNA, 19 nt, Artificial Sequence
  Description of Artificial Sequence: Synthetic oligonucleotide
gaaguaggugcugcgagca

SEQ ID NO: 1666228 - RNA, 19 nt, Artificial Sequence
  Description of Artificial Sequence: Synthetic oligonucleotide
auaggccaacucaggaggc

SEQ ID NO: 1666229 - RNA, 19 nt, Artificial Sequence
  Description of Artificial Sequence: Synthetic oligonucleotide
cacgucauaggccaacuca

SEQ ID NO: 1666230 - RNA, 19 nt, Artificial Sequence
  Description of Artificial Sequence: Synthetic oligonucleotide
guaguaaucccgccuccug

SEQ ID NO: 1666231 - RNA, 19 nt, Artificial Sequence
  Description of Artificial Sequence: Synthetic oligonucleotide
gaugcgguaaccuguuugu

SEQ ID NO: 1666232 - RNA, 19 nt, Artificial Sequence
  Description of Artificial Sequence: Synthetic oligonucleotide
cuugcccuuccacuuagug

SEQ ID NO: 1666233 - RNA, 19 nt, Artificial Sequence
  Description of Artificial Sequence: Synthetic oligonucleotide
acgucauaggccaacucag

SEQ ID NO: 1666234 - RNA, 19 nt, Artificial Sequence
  Description of Artificial Sequence: Synthetic oligonucleotide
ucguaguaaucccgccucc

SEQ ID NO: 1666235 - RNA, 19 nt, Artificial Sequence
  Description of Artificial Sequence: Synthetic oligonucleotide
aucgacaaguggaauggag

SEQ ID NO: 1666236 - RNA, 19 nt, Artificial Sequence
  Description of Artificial Sequence: Synthetic oligonucleotide
cacaccgaugucuaggcga

SEQ ID NO: 1666237 - RNA, 19 nt, Artificial Sequence
  Description of Artificial Sequence: Synthetic oligonucleotide
cuagccacauggaagcgga

SEQ ID NO: 1666238 - RNA, 19 nt, Artificial Sequence
  Description of Artificial Sequence: Synthetic oligonucleotide
uccguguaccacgaagacc

SEQ ID NO: 1666239 - RNA, 19 nt, Artificial Sequence
  Description of Artificial Sequence: Synthetic oligonucleotide
guagucgcgcagugcacgg

SEQ ID NO: 1666240 - RNA, 19 nt, Artificial Sequence
  Description of Artificial Sequence: Synthetic oligonucleotide
acggcuuuccguguaccac

SEQ ID NO: 1666241 - RNA, 19 nt, Artificial Sequence
  Description of Artificial Sequence: Synthetic oligonucleotide
gucuaggcgaccuguguac

SEQ ID NO: 1666242 - RNA, 19 nt, Artificial Sequence
  Description of Artificial Sequence: Synthetic oligonucleotide
acaccgaugucuaggcgac

SEQ ID NO: 1666243 - RNA, 19 nt, Artificial Sequence
  Description of Artificial Sequence: Synthetic oligonucleotide
uaugcgccagacacccacc

SEQ ID NO: 1666244 - RNA, 19 nt, Artificial Sequence
  Description of Artificial Sequence: Synthetic oligonucleotide
cagcgaugcgcccggaacg

SEQ ID NO: 1666245 - RNA, 19 nt, Artificial Sequence
  Description of Artificial Sequence: Synthetic oligonucleotide
ucaagugcccgcagucgcu

SEQ ID NO: 1666246 - RNA, 19 nt, Artificial Sequence
  Description of Artificial Sequence: Synthetic oligonucleotide
ccguguaccacgaagacca

SEQ ID NO: 1666247 - RNA, 19 nt, Artificial Sequence
  Description of Artificial Sequence: Synthetic oligonucleotide
ucucgcauuuagccuccag

SEQ ID NO: 1666248 - RNA, 19 nt, Artificial Sequence
  Description of Artificial Sequence: Synthetic oligonucleotide
ggaugcgguaaccuguuug

SEQ ID NO: 1666249 - RNA, 19 nt, Artificial Sequence
  Description of Artificial Sequence: Synthetic oligonucleotide
guaggugcugcgagcaccg

SEQ ID NO: 1666250 - RNA, 19 nt, Artificial Sequence
  Description of Artificial Sequence: Synthetic oligonucleotide
ucacagcgggcuccguuag

SEQ ID NO: 1666251 - RNA, 19 nt, Artificial Sequence
  Description of Artificial Sequence: Synthetic oligonucleotide
guggauaccuuguuccaga

SEQ ID NO: 1666252 - RNA, 19 nt, Artificial Sequence
  Description of Artificial Sequence: Synthetic oligonucleotide
ggaugucaucgacaagugg

SEQ ID NO: 1666253 - RNA, 19 nt, Artificial Sequence
  Description of Artificial Sequence: Synthetic oligonucleotide
cuucucgcauuuagccucc

SEQ ID NO: 1666254 - RNA, 19 nt, Artificial Sequence
  Description of Artificial Sequence: Synthetic oligonucleotide
aggcuuggaagccacgaau

SEQ ID NO: 1666255 - RNA, 19 nt, Artificial Sequence
  Description of Artificial Sequence: Synthetic oligonucleotide
agccaacagauagcgcacc

SEQ ID NO: 1666256 - RNA, 19 nt, Artificial Sequence
  Description of Artificial Sequence: Synthetic oligonucleotide
gccaauggacacaagcagg

SEQ ID NO: 1666257 - RNA, 19 nt, Artificial Sequence
  Description of Artificial Sequence: Synthetic oligonucleotide
cacgugccaggcuuggaag

SEQ ID NO: 1666258 - RNA, 19 nt, Artificial Sequence
  Description of Artificial Sequence: Synthetic oligonucleotide
ggagucagccacucggaag

SEQ ID NO: 1666259 - RNA, 19 nt, Artificial Sequence
  Description of Artificial Sequence: Synthetic oligonucleotide
ucucgaaaguggucaucca

SEQ ID NO: 1666260 - RNA, 19 nt, Artificial Sequence
  Description of Artificial Sequence: Synthetic oligonucleotide
cuaggcgaccuguguacag

SEQ ID NO: 1666261 - RNA, 19 nt, Artificial Sequence
  Description of Artificial Sequence: Synthetic oligonucleotide
cauggaagcggaugucauc

SEQ ID NO: 1666262 - RNA, 19 nt, Artificial Sequence
  Description of Artificial Sequence: Synthetic oligonucleotide
gaugucuaggcgaccugug

SEQ ID NO: 1666263 - RNA, 19 nt, Artificial Sequence
  Description of Artificial Sequence: Synthetic oligonucleotide
gaauggggucgcucagugc

SEQ ID NO: 1666264 - RNA, 19 nt, Artificial Sequence
  Description of Artificial Sequence: Synthetic oligonucleotide
uccucucgcucuaccagcu

SEQ ID NO: 1666265 - RNA, 19 nt, Artificial Sequence
  Description of Artificial Sequence: Synthetic oligonucleotide
cuagcaggucccacaguug

SEQ ID NO: 1666266 - RNA, 19 nt, Artificial Sequence
  Description of Artificial Sequence: Synthetic oligonucleotide
ucgcucucucgaaaguggu

SEQ ID NO: 1666267 - RNA, 19 nt, Artificial Sequence
  Description of Artificial Sequence: Synthetic oligonucleotide
uaucagggcagcugcugaa

SEQ ID NO: 1666268 - RNA, 19 nt, Artificial Sequence
  Description of Artificial Sequence: Synthetic oligonucleotide
gacgaaacaucuuggcuau

SEQ ID NO: 1666269 - RNA, 19 nt, Artificial Sequence
  Description of Artificial Sequence: Synthetic oligonucleotide
aaagccgcuucaggccagg

SEQ ID NO: 1666270 - RNA, 19 nt, Artificial Sequence
  Description of Artificial Sequence: Synthetic oligonucleotide
ggugcugcgagcaccgagg

SEQ ID NO: 1666271 - RNA, 19 nt, Artificial Sequence
  Description of Artificial Sequence: Synthetic oligonucleotide
cuccaucaaaaguguuggc

SEQ ID NO: 1666272 - RNA, 19 nt, Artificial Sequence
  Description of Artificial Sequence: Synthetic oligonucleotide
cacucggaagcagauauca

SEQ ID NO: 1666273 - RNA, 19 nt, Artificial Sequence
  Description of Artificial Sequence: Synthetic oligonucleotide
ccuucucgcauuuagccuc

SEQ ID NO: 1666274 - RNA, 19 nt, Artificial Sequence
  Description of Artificial Sequence: Synthetic oligonucleotide
ggcguucacaaucacugac

SEQ ID NO: 1666275 - RNA, 19 nt, Artificial Sequence
  Description of Artificial Sequence: Synthetic oligonucleotide
uggauaccuuguuccagaa

SEQ ID NO: 1666276 - RNA, 19 nt, Artificial Sequence
  Description of Artificial Sequence: Synthetic oligonucleotide
gaauggagucugucuccug

SEQ ID NO: 1666277 - RNA, 19 nt, Artificial Sequence
  Description of Artificial Sequence: Synthetic oligonucleotide
gaaccacaacgcucuugcc

SEQ ID NO: 1666278 - RNA, 19 nt, Artificial Sequence
  Description of Artificial Sequence: Synthetic oligonucleotide
uuguagucgcgcagugcac

SEQ ID NO: 1666279 - RNA, 19 nt, Artificial Sequence
  Description of Artificial Sequence: Synthetic oligonucleotide
gucgcucagugccccauag

SEQ ID NO: 1666280 - RNA, 19 nt, Artificial Sequence
  Description of Artificial Sequence: Synthetic oligonucleotide
cucgguacacugguccucc

SEQ ID NO: 1666281 - RNA, 19 nt, Artificial Sequence
  Description of Artificial Sequence: Synthetic oligonucleotide
agcgaugcgcccggaacgg

SEQ ID NO: 1666282 - RNA, 19 nt, Artificial Sequence
  Description of Artificial Sequence: Synthetic oligonucleotide
guuuguagucgcgcagugc

SEQ ID NO: 1666283 - RNA, 19 nt, Artificial Sequence
  Description of Artificial Sequence: Synthetic oligonucleotide
gcauuuagccuccaggucu

SEQ ID NO: 1666284 - RNA, 19 nt, Artificial Sequence
  Description of Artificial Sequence: Synthetic oligonucleotide
ucuaggcgaccuguguaca

SEQ ID NO: 1666285 - RNA, 19 nt, Artificial Sequence
  Description of Artificial Sequence: Synthetic oligonucleotide
accgaugucuaggcgaccu

SEQ ID NO: 1666286 - RNA, 19 nt, Artificial Sequence
  Description of Artificial Sequence: Synthetic oligonucleotide
ggcuaugcgccagacaccc

SEQ ID NO: 1666287 - RNA, 19 nt, Artificial Sequence
  Description of Artificial Sequence: Synthetic oligonucleotide
cguuagccaacagauagcg

SEQ ID NO: 1666288 - RNA, 19 nt, Artificial Sequence
  Description of Artificial Sequence: Synthetic oligonucleotide
ucagugccccauagagaca

SEQ ID NO: 1666289 - RNA, 19 nt, Artificial Sequence
  Description of Artificial Sequence: Synthetic oligonucleotide
cagggcacagucagccagc

SEQ ID NO: 1666290 - RNA, 19 nt, Artificial Sequence
  Description of Artificial Sequence: Synthetic oligonucleotide
gcgcucuccaucaaaagug

SEQ ID NO: 1666291 - RNA, 19 nt, Artificial Sequence
  Description of Artificial Sequence: Synthetic oligonucleotide
aucagggcagcugcugaag

SEQ ID NO: 1666292 - RNA, 19 nt, Artificial Sequence
  Description of Artificial Sequence: Synthetic oligonucleotide
gcugcgagcaccgaggaca

SEQ ID NO: 1666293 - RNA, 19 nt, Artificial Sequence
  Description of Artificial Sequence: Synthetic oligonucleotide
ggcacuguaggucuggacu

SEQ ID NO: 1666294 - RNA, 19 nt, Artificial Sequence
  Description of Artificial Sequence: Synthetic oligonucleotide
agauaucuggggagauguc

SEQ ID NO: 1666295 - RNA, 19 nt, Artificial Sequence
  Description of Artificial Sequence: Synthetic oligonucleotide
gcgaccuguguacagguac

SEQ ID NO: 1666296 - RNA, 19 nt, Artificial Sequence
  Description of Artificial Sequence: Synthetic oligonucleotide
gaacggcuuuccguguacc

SEQ ID NO: 1666297 - RNA, 19 nt, Artificial Sequence
  Description of Artificial Sequence: Synthetic oligonucleotide
ggauaccuuguuccagaag

SEQ ID NO: 1666298 - RNA, 19 nt, Artificial Sequence
  Description of Artificial Sequence: Synthetic oligonucleotide
ucuccuaggucgccccgaa

SEQ ID NO: 1666299 - RNA, 19 nt, Artificial Sequence
  Description of Artificial Sequence: Synthetic oligonucleotide
ccggaaguagucacugcgg

SEQ ID NO: 1666300 - RNA, 19 nt, Artificial Sequence
  Description of Artificial Sequence: Synthetic oligonucleotide
augucaucgacaaguggaa

SEQ ID NO: 1666301 - RNA, 19 nt, Artificial Sequence
  Description of Artificial Sequence: Synthetic oligonucleotide
cuggguugaucaggggugc

SEQ ID NO: 1666302 - RNA, 19 nt, Artificial Sequence
  Description of Artificial Sequence: Synthetic oligonucleotide
cucaaugacuuuggccaug

SEQ ID NO: 1666303 - RNA, 19 nt, Artificial Sequence
  Description of Artificial Sequence: Synthetic oligonucleotide
acucggaagcagauaucag

SEQ ID NO: 1666304 - RNA, 19 nt, Artificial Sequence
  Description of Artificial Sequence: Synthetic oligonucleotide
cuguggauaccuuguucca

SEQ ID NO: 1666305 - RNA, 19 nt, Artificial Sequence
  Description of Artificial Sequence: Synthetic oligonucleotide
cagguuccucgcucucucg

SEQ ID NO: 1666306 - RNA, 19 nt, Artificial Sequence
  Description of Artificial Sequence: Synthetic oligonucleotide
cuaagccaauggacacaag

SEQ ID NO: 1666307 - RNA, 19 nt, Artificial Sequence
  Description of Artificial Sequence: Synthetic oligonucleotide
ugucaucgacaaguggaau

SEQ ID NO: 1666308 - RNA, 19 nt, Artificial Sequence
  Description of Artificial Sequence: Synthetic oligonucleotide
auggggucgcucagugccc

SEQ ID NO: 1666309 - RNA, 19 nt, Artificial Sequence
  Description of Artificial Sequence: Synthetic oligonucleotide
ugcgccagacacccaccac

SEQ ID NO: 1666310 - RNA, 19 nt, Artificial Sequence
  Description of Artificial Sequence: Synthetic oligonucleotide
augcgccagacacccacca

SEQ ID NO: 1666311 - RNA, 19 nt, Artificial Sequence
  Description of Artificial Sequence: Synthetic oligonucleotide
acacacgugccaggcuugg

SEQ ID NO: 1666312 - RNA, 19 nt, Artificial Sequence
  Description of Artificial Sequence: Synthetic oligonucleotide
uguuggccucacagcgggc

SEQ ID NO: 1666313 - RNA, 19 nt, Artificial Sequence
  Description of Artificial Sequence: Synthetic oligonucleotide
gcugcaggaaaucaucgua

SEQ ID NO: 1666314 - RNA, 19 nt, Artificial Sequence
  Description of Artificial Sequence: Synthetic oligonucleotide
gccaucgggacacgggaag

SEQ ID NO: 1666315 - RNA, 19 nt, Artificial Sequence
  Description of Artificial Sequence: Synthetic oligonucleotide
ggcuccguuagccaacaga

SEQ ID NO: 1666316 - RNA, 19 nt, Artificial Sequence
  Description of Artificial Sequence: Synthetic oligonucleotide
agcgggcuccguuagccaa

SEQ ID NO: 1666317 - RNA, 19 nt, Artificial Sequence
  Description of Artificial Sequence: Synthetic oligonucleotide
cugcugcgccucuucaaug

SEQ ID NO: 1666318 - RNA, 19 nt, Artificial Sequence
  Description of Artificial Sequence: Synthetic oligonucleotide
cugcgagcaccgaggacac

SEQ ID NO: 1666319 - RNA, 19 nt, Artificial Sequence
  Description of Artificial Sequence: Synthetic oligonucleotide
cacugacauguuccacacc

SEQ ID NO: 1666320 - RNA, 19 nt, Artificial Sequence
  Description of Artificial Sequence: Synthetic oligonucleotide
guugaucaggggugccuga

SEQ ID NO: 1666321 - RNA, 19 nt, Artificial Sequence
  Description of Artificial Sequence: Synthetic oligonucleotide
gguugaucaggggugccug

SEQ ID NO: 1666322 - RNA, 19 nt, Artificial Sequence
  Description of Artificial Sequence: Synthetic oligonucleotide
acggcgaauggggucgcuc

SEQ ID NO: 1666323 - RNA, 19 nt, Artificial Sequence
  Description of Artificial Sequence: Synthetic oligonucleotide
cccggaacggcuuuccgug

SEQ ID NO: 1666324 - RNA, 19 nt, Artificial Sequence
  Description of Artificial Sequence: Synthetic oligonucleotide
gcugcugaagccaucggga

SEQ ID NO: 1666325 - RNA, 19 nt, Artificial Sequence
  Description of Artificial Sequence: Synthetic oligonucleotide
agcacgucauaggccaacu

SEQ ID NO: 1666326 - RNA, 19 nt, Artificial Sequence
  Description of Artificial Sequence: Synthetic oligonucleotide
ugcugcgagcaccgaggac

SEQ ID NO: 1666327 - RNA, 19 nt, Artificial Sequence
  Description of Artificial Sequence: Synthetic oligonucleotide
auuuagccuccaggucuuc

SEQ ID NO: 1666328 - RNA, 19 nt, Artificial Sequence
  Description of Artificial Sequence: Synthetic oligonucleotide
caucguaguaaucccgccu

SEQ ID NO: 1666329 - RNA, 19 nt, Artificial Sequence
  Description of Artificial Sequence: Synthetic oligonucleotide
cugugcuagccacauggaa

SEQ ID NO: 1666330 - RNA, 19 nt, Artificial Sequence
  Description of Artificial Sequence: Synthetic oligonucleotide
agauaucagggcagcugcu

SEQ ID NO: 1666331 - RNA, 19 nt, Artificial Sequence
  Description of Artificial Sequence: Synthetic oligonucleotide
ggccacuggguugaucagg

SEQ ID NO: 1666332 - RNA, 19 nt, Artificial Sequence
  Description of Artificial Sequence: Synthetic oligonucleotide
caagugcccgcagucgcug

SEQ ID NO: 1666333 - RNA, 19 nt, Artificial Sequence
  Description of Artificial Sequence: Synthetic oligonucleotide
uggguugaucaggggugcc

SEQ ID NO: 1666334 - RNA, 19 nt, Artificial Sequence
  Description of Artificial Sequence: Synthetic oligonucleotide
agguccucaagugcccgca

SEQ ID NO: 1666335 - RNA, 19 nt, Artificial Sequence
  Description of Artificial Sequence: Synthetic oligonucleotide
guuccucgcucucucgaaa

SEQ ID NO: 1666336 - RNA, 19 nt, Artificial Sequence
  Description of Artificial Sequence: Synthetic oligonucleotide
cgaaguaggugcugcgagc

SEQ ID NO: 1666337 - RNA, 19 nt, Artificial Sequence
  Description of Artificial Sequence: Synthetic oligonucleotide
ucgccccgaagcucaggug

SEQ ID NO: 1666338 - RNA, 19 nt, Artificial Sequence
  Description of Artificial Sequence: Synthetic oligonucleotide
cgucauaggccaacucagg

SEQ ID NO: 1666339 - RNA, 19 nt, Artificial Sequence
  Description of Artificial Sequence: Synthetic oligonucleotide
ggugccugagaaccacaac

SEQ ID NO: 1666340 - RNA, 19 nt, Artificial Sequence
  Description of Artificial Sequence: Synthetic oligonucleotide
ggaacggcuuuccguguac

SEQ ID NO: 1666341 - RNA, 19 nt, Artificial Sequence
  Description of Artificial Sequence: Synthetic oligonucleotide
cggcuuuccguguaccacg

SEQ ID NO: 1666342 - RNA, 19 nt, Artificial Sequence
  Description of Artificial Sequence: Synthetic oligonucleotide
ggcgaauggggucgcucag

SEQ ID NO: 1666343 - RNA, 19 nt, Artificial Sequence
  Description of Artificial Sequence: Synthetic oligonucleotide
cugcgccucuucaauggca

SEQ ID NO: 1666344 - RNA, 19 nt, Artificial Sequence
  Description of Artificial Sequence: Synthetic oligonucleotide
gcgccagacacccaccaca

SEQ ID NO: 1666345 - RNA, 19 nt, Artificial Sequence
  Description of Artificial Sequence: Synthetic oligonucleotide
gugcacggcgaaugggguc

SEQ ID NO: 1666346 - RNA, 19 nt, Artificial Sequence
  Description of Artificial Sequence: Synthetic oligonucleotide
cuggacugugcuagccaca

SEQ ID NO: 1666347 - RNA, 19 nt, Artificial Sequence
  Description of Artificial Sequence: Synthetic oligonucleotide
ucgguacacugguccucca

SEQ ID NO: 1666348 - RNA, 19 nt, Artificial Sequence
  Description of Artificial Sequence: Synthetic oligonucleotide
gcgguaaccuguuuguagu

SEQ ID NO: 1666349 - RNA, 19 nt, Artificial Sequence
  Description of Artificial Sequence: Synthetic oligonucleotide
gcagugcacggcgaauggg

SEQ ID NO: 1666350 - RNA, 19 nt, Artificial Sequence
  Description of Artificial Sequence: Synthetic oligonucleotide
gcguucacaaucacugaca

SEQ ID NO: 1666351 - RNA, 19 nt, Artificial Sequence
  Description of Artificial Sequence: Synthetic oligonucleotide
cagcacgucauaggccaac

SEQ ID NO: 1666352 - RNA, 19 nt, Artificial Sequence
  Description of Artificial Sequence: Synthetic oligonucleotide
cacagcgggcuccguuagc

SEQ ID NO: 1666353 - RNA, 19 nt, Artificial Sequence
  Description of Artificial Sequence: Synthetic oligonucleotide
guguaccacgaagaccaca

SEQ ID NO: 1666354 - RNA, 19 nt, Artificial Sequence
  Description of Artificial Sequence: Synthetic oligonucleotide
aguagucacugcggccaca

SEQ ID NO: 1666355 - RNA, 19 nt, Artificial Sequence
  Description of Artificial Sequence: Synthetic oligonucleotide
agccgcuucaggccaggua

SEQ ID NO: 1666356 - RNA, 19 nt, Artificial Sequence
  Description of Artificial Sequence: Synthetic oligonucleotide
aaccggggaucugcuggga

SEQ ID NO: 1666357 - RNA, 19 nt, Artificial Sequence
  Description of Artificial Sequence: Synthetic oligonucleotide
gcuccguuagccaacagau

SEQ ID NO: 1666358 - RNA, 19 nt, Artificial Sequence
  Description of Artificial Sequence: Synthetic oligonucleotide
cuccuaggucgccccgaag

SEQ ID NO: 1666359 - RNA, 19 nt, Artificial Sequence
  Description of Artificial Sequence: Synthetic oligonucleotide
gcggccacaaagccgcuuc

SEQ ID NO: 1666360 - RNA, 19 nt, Artificial Sequence
  Description of Artificial Sequence: Synthetic oligonucleotide
gucgccccgaagcucaggu

SEQ ID NO: 1666361 - RNA, 19 nt, Artificial Sequence
  Description of Artificial Sequence: Synthetic oligonucleotide
agucagccacucggaagca

SEQ ID NO: 1666362 - RNA, 19 nt, Artificial Sequence
  Description of Artificial Sequence: Synthetic oligonucleotide
cccgcaaccggggaucugc

SEQ ID NO: 1666363 - RNA, 19 nt, Artificial Sequence
  Description of Artificial Sequence: Synthetic oligonucleotide
cugucuccugccgggcggc

SEQ ID NO: 1666364 - RNA, 19 nt, Artificial Sequence
  Description of Artificial Sequence: Synthetic oligonucleotide
gcaccgaggacacagcgau

SEQ ID NO: 1666365 - RNA, 19 nt, Artificial Sequence
  Description of Artificial Sequence: Synthetic oligonucleotide
acgaaacaucuuggcuaug

SEQ ID NO: 1666366 - RNA, 19 nt, Artificial Sequence
  Description of Artificial Sequence: Synthetic oligonucleotide
gcucuccuaggucgccccg

SEQ ID NO: 1666367 - RNA, 19 nt, Artificial Sequence
  Description of Artificial Sequence: Synthetic oligonucleotide
ggccauguacucgguacac

SEQ ID NO: 1666368 - RNA, 19 nt, Artificial Sequence
  Description of Artificial Sequence: Synthetic oligonucleotide
cuccguuagccaacagaua

SEQ ID NO: 1666369 - RNA, 19 nt, Artificial Sequence
  Description of Artificial Sequence: Synthetic oligonucleotide
caucgacaaguggaaugga

SEQ ID NO: 1666370 - RNA, 19 nt, Artificial Sequence
  Description of Artificial Sequence: Synthetic oligonucleotide
gccacgaauucagacaccu

SEQ ID NO: 1666371 - RNA, 19 nt, Artificial Sequence
  Description of Artificial Sequence: Synthetic oligonucleotide
aggaugcgguaaccuguuu

SEQ ID NO: 1666372 - RNA, 19 nt, Artificial Sequence
  Description of Artificial Sequence: Synthetic oligonucleotide
agacagcgcucuccaucaa

SEQ ID NO: 1666373 - RNA, 19 nt, Artificial Sequence
  Description of Artificial Sequence: Synthetic oligonucleotide
uucucgcauuuagccucca

SEQ ID NO: 1666374 - RNA, 19 nt, Artificial Sequence
  Description of Artificial Sequence: Synthetic oligonucleotide
augcgguaaccuguuugua

SEQ ID NO: 1666375 - RNA, 19 nt, Artificial Sequence
  Description of Artificial Sequence: Synthetic oligonucleotide
ggcgaaguaggugcugcga

SEQ ID NO: 1666376 - RNA, 19 nt, Artificial Sequence
  Description of Artificial Sequence: Synthetic oligonucleotide
acuuaguguccagcauguu

SEQ ID NO: 1666377 - RNA, 19 nt, Artificial Sequence
  Description of Artificial Sequence: Synthetic oligonucleotide
gcgcagugcacggcgaaug

SEQ ID NO: 1666378 - RNA, 19 nt, Artificial Sequence
  Description of Artificial Sequence: Synthetic oligonucleotide
cgcauuuagccuccagguc

SEQ ID NO: 1666379 - RNA, 19 nt, Artificial Sequence
  Description of Artificial Sequence: Synthetic oligonucleotide
gcacgucauaggccaacuc

SEQ ID NO: 1666380 - RNA, 19 nt, Artificial Sequence
  Description of Artificial Sequence: Synthetic oligonucleotide
caccgaugucuaggcgacc

SEQ ID NO: 1666381 - RNA, 19 nt, Artificial Sequence
  Description of Artificial Sequence: Synthetic oligonucleotide
agccaucgggacacgggaa

SEQ ID NO: 1666382 - RNA, 19 nt, Artificial Sequence
  Description of Artificial Sequence: Synthetic oligonucleotide
cgccagacacccaccacac

SEQ ID NO: 1666383 - RNA, 19 nt, Artificial Sequence
  Description of Artificial Sequence: Synthetic oligonucleotide
ggccaggcguucacaauca

SEQ ID NO: 1666384 - RNA, 19 nt, Artificial Sequence
  Description of Artificial Sequence: Synthetic oligonucleotide
cucuccuaggucgccccga

SEQ ID NO: 1666385 - RNA, 19 nt, Artificial Sequence
  Description of Artificial Sequence: Synthetic oligonucleotide
ugcgcccggaacggcuuuc

SEQ ID NO: 1666386 - RNA, 19 nt, Artificial Sequence
  Description of Artificial Sequence: Synthetic oligonucleotide
ggcuuuccguguaccacga

SEQ ID NO: 1666387 - RNA, 19 nt, Artificial Sequence
  Description of Artificial Sequence: Synthetic oligonucleotide
ugcggccacaaagccgcuu

SEQ ID NO: 1666388 - RNA, 19 nt, Artificial Sequence
  Description of Artificial Sequence: Synthetic oligonucleotide
cacagcgaugcgcccggaa

SEQ ID NO: 1666389 - RNA, 19 nt, Artificial Sequence
  Description of Artificial Sequence: Synthetic oligonucleotide
gcucuugcccuuccacuua

SEQ ID NO: 1666390 - RNA, 19 nt, Artificial Sequence
  Description of Artificial Sequence: Synthetic oligonucleotide
gagcccggaaguagucacu

SEQ ID NO: 1666391 - RNA, 19 nt, Artificial Sequence
  Description of Artificial Sequence: Synthetic oligonucleotide
ccgaugucuaggcgaccug

SEQ ID NO: 1666392 - RNA, 19 nt, Artificial Sequence
  Description of Artificial Sequence: Synthetic oligonucleotide
augcgcccggaacggcuuu

SEQ ID NO: 1666393 - RNA, 19 nt, Artificial Sequence
  Description of Artificial Sequence: Synthetic oligonucleotide
gccccgaagcucagguggc

SEQ ID NO: 1666394 - RNA, 19 nt, Artificial Sequence
  Description of Artificial Sequence: Synthetic oligonucleotide
ccauagagacagcgcucuc

SEQ ID NO: 1666395 - RNA, 19 nt, Artificial Sequence
  Description of Artificial Sequence: Synthetic oligonucleotide
agacaccuucucgcauuua

SEQ ID NO: 1666396 - RNA, 19 nt, Artificial Sequence
  Description of Artificial Sequence: Synthetic oligonucleotide
gaugcgcccggaacggcuu

SEQ ID NO: 1666397 - RNA, 19 nt, Artificial Sequence
  Description of Artificial Sequence: Synthetic oligonucleotide
ccaggcguucacaaucacu

SEQ ID NO: 1666398 - RNA, 19 nt, Artificial Sequence
  Description of Artificial Sequence: Synthetic oligonucleotide
gucgcgcagugcacggcga

SEQ ID NO: 1666399 - RNA, 19 nt, Artificial Sequence
  Description of Artificial Sequence: Synthetic oligonucleotide
ggucgccccgaagcucagg

SEQ ID NO: 1666400 - RNA, 19 nt, Artificial Sequence
  Description of Artificial Sequence: Synthetic oligonucleotide
gcccuuccacuuagugucc

SEQ ID NO: 1666401 - RNA, 19 nt, Artificial Sequence
  Description of Artificial Sequence: Synthetic oligonucleotide
cccauagagacagcgcucu

SEQ ID NO: 1666402 - RNA, 19 nt, Artificial Sequence
  Description of Artificial Sequence: Synthetic oligonucleotide
ccaacagauagcgcaccaa

SEQ ID NO: 1666403 - RNA, 19 nt, Artificial Sequence
  Description of Artificial Sequence: Synthetic oligonucleotide
gcccggaacggcuuuccgu

SEQ ID NO: 1666404 - RNA, 19 nt, Artificial Sequence
  Description of Artificial Sequence: Synthetic oligonucleotide
gggcuccguuagccaacag

SEQ ID NO: 1666405 - RNA, 19 nt, Artificial Sequence
  Description of Artificial Sequence: Synthetic oligonucleotide
acacagcgaugcgcccgga

SEQ ID NO: 1666406 - RNA, 19 nt, Artificial Sequence
  Description of Artificial Sequence: Synthetic oligonucleotide
cguguaccacgaagaccac

SEQ ID NO: 1666407 - RNA, 19 nt, Artificial Sequence
  Description of Artificial Sequence: Synthetic oligonucleotide
cgcaaccggggaucugcug

SEQ ID NO: 1666408 - RNA, 19 nt, Artificial Sequence
  Description of Artificial Sequence: Synthetic oligonucleotide
gcuuuccguguaccacgaa

SEQ ID NO: 1666409 - RNA, 19 nt, Artificial Sequence
  Description of Artificial Sequence: Synthetic oligonucleotide
gcgcccggaacggcuuucc

SEQ ID NO: 1666410 - RNA, 19 nt, Artificial Sequence
  Description of Artificial Sequence: Synthetic oligonucleotide
gcgaugcgcccggaacggc

SEQ ID NO: 1666411 - RNA, 19 nt, Artificial Sequence
  Description of Artificial Sequence: Synthetic oligonucleotide
augcggccacaaagccgcu

SEQ ID NO: 1666412 - RNA, 19 nt, Artificial Sequence
  Description of Artificial Sequence: Synthetic oligonucleotide
ggggucgcucagugcccca

SEQ ID NO: 1666413 - RNA, 19 nt, Artificial Sequence
  Description of Artificial Sequence: Synthetic oligonucleotide
gcuaugcgccagacaccca

SEQ ID NO: 1666414 - RNA, 19 nt, Artificial Sequence
  Description of Artificial Sequence: Synthetic oligonucleotide
ggcgaccuguguacaggua

SEQ ID NO: 1666415 - RNA, 19 nt, Artificial Sequence
  Description of Artificial Sequence: Synthetic oligonucleotide
cgaugucuaggcgaccugu

SEQ ID NO: 1666416 - RNA, 19 nt, Artificial Sequence
  Description of Artificial Sequence: Synthetic oligonucleotide
cguaguaaucccgccuccu

SEQ ID NO: 1666417 - RNA, 19 nt, Artificial Sequence
  Description of Artificial Sequence: Synthetic oligonucleotide
cucccgcaaccggggaucu

SEQ ID NO: 1666418 - RNA, 19 nt, Artificial Sequence
  Description of Artificial Sequence: Synthetic oligonucleotide
cgaugcgcccggaacggcu

SEQ ID NO: 1666419 - RNA, 19 nt, Artificial Sequence
  Description of Artificial Sequence: Synthetic oligonucleotide
cggaacggcuuuccgugua

SEQ ID NO: 1666420 - RNA, 19 nt, Artificial Sequence
  Description of Artificial Sequence: Synthetic oligonucleotide
ccacgaauucagacaccuu

SEQ ID NO: 1666421 - RNA, 19 nt, Artificial Sequence
  Description of Artificial Sequence: Synthetic oligonucleotide
ccggaacggcuuuccgugu

SEQ ID NO: 1666422 - RNA, 19 nt, Artificial Sequence
  Description of Artificial Sequence: Synthetic oligonucleotide
gggccagacgaaacaucuu

SEQ ID NO: 1666423 - RNA, 19 nt, Artificial Sequence
  Description of Artificial Sequence: Synthetic oligonucleotide
cgggcuccguuagccaaca

SEQ ID NO: 1666424 - RNA, 19 nt, Artificial Sequence
  Description of Artificial Sequence: Synthetic oligonucleotide
ccgcaaccggggaucugcu

SEQ ID NO: 1666425 - RNA, 19 nt, Artificial Sequence
  Description of Artificial Sequence: Synthetic oligonucleotide
cacggcgaauggggucgcu

SEQ ID NO: 1666426 - RNA, 19 nt, Artificial Sequence
  Description of Artificial Sequence: Synthetic oligonucleotide
cccgcacggccuccacaaa

SEQ ID NO: 1666427 - RNA, 19 nt, Artificial Sequence
  Description of Artificial Sequence: Synthetic oligonucleotide
ccacaacgcucuugcccuu

SEQ ID NO: 1666428 - RNA, 19 nt, Artificial Sequence
  Description of Artificial Sequence: Synthetic oligonucleotide
agaauuauacaccaucagc

SEQ ID NO: 1666429 - RNA, 19 nt, Artificial Sequence
  Description of Artificial Sequence: Synthetic oligonucleotide
aauaccacaccccagacug

SEQ ID NO: 1666430 - RNA, 19 nt, Artificial Sequence
  Description of Artificial Sequence: Synthetic oligonucleotide
agaucucaaacucugaccc

SEQ ID NO: 1666431 - RNA, 19 nt, Artificial Sequence
  Description of Artificial Sequence: Synthetic oligonucleotide
uaaagcuuuaguuaaauac

SEQ ID NO: 1666432 - RNA, 19 nt, Artificial Sequence
  Description of Artificial Sequence: Synthetic oligonucleotide
agacauaccugacacaucc

SEQ ID NO: 1666433 - RNA, 19 nt, Artificial Sequence
  Description of Artificial Sequence: Synthetic oligonucleotide
aaaaccuccagccucacug

SEQ ID NO: 1666434 - RNA, 19 nt, Artificial Sequence
  Description of Artificial Sequence: Synthetic oligonucleotide
aguuaaauacuucaauguc

SEQ ID NO: 1666435 - RNA, 19 nt, Artificial Sequence
  Description of Artificial Sequence: Synthetic oligonucleotide
uguauagaagucuucagac

SEQ ID NO: 1666436 - RNA, 19 nt, Artificial Sequence
  Description of Artificial Sequence: Synthetic oligonucleotide
agagucuugaaggacaggc

SEQ ID NO: 1666437 - RNA, 19 nt, Artificial Sequence
  Description of Artificial Sequence: Synthetic oligonucleotide
uacuucaauguccaaaggc

SEQ ID NO: 1666438 - RNA, 19 nt, Artificial Sequence
  Description of Artificial Sequence: Synthetic oligonucleotide
ugaaggaguguauagaagu

SEQ ID NO: 1666439 - RNA, 19 nt, Artificial Sequence
  Description of Artificial Sequence: Synthetic oligonucleotide
aaggcauuaaguuguggag

SEQ ID NO: 1666440 - RNA, 19 nt, Artificial Sequence
  Description of Artificial Sequence: Synthetic oligonucleotide
uaguuaaauacuucaaugu

SEQ ID NO: 1666441 - RNA, 19 nt, Artificial Sequence
  Description of Artificial Sequence: Synthetic oligonucleotide
ucagaauuauacaccauca

SEQ ID NO: 1666442 - RNA, 19 nt, Artificial Sequence
  Description of Artificial Sequence: Synthetic oligonucleotide
auuauacaccaucagcuuc

SEQ ID NO: 1666443 - RNA, 19 nt, Artificial Sequence
  Description of Artificial Sequence: Synthetic oligonucleotide
caaaacaugccacacgugc

SEQ ID NO: 1666444 - RNA, 19 nt, Artificial Sequence
  Description of Artificial Sequence: Synthetic oligonucleotide
agagaucucaaacucugac

SEQ ID NO: 1666445 - RNA, 19 nt, Artificial Sequence
  Description of Artificial Sequence: Synthetic oligonucleotide
uaaguuguggaguauuagc

SEQ ID NO: 1666446 - RNA, 19 nt, Artificial Sequence
  Description of Artificial Sequence: Synthetic oligonucleotide
guuguggaguauuagcugg

SEQ ID NO: 1666447 - RNA, 19 nt, Artificial Sequence
  Description of Artificial Sequence: Synthetic oligonucleotide
aaacaugccacacgugcuc

SEQ ID NO: 1666448 - RNA, 19 nt, Artificial Sequence
  Description of Artificial Sequence: Synthetic oligonucleotide
gaaguaggguuccaggccg

SEQ ID NO: 1666449 - RNA, 19 nt, Artificial Sequence
  Description of Artificial Sequence: Synthetic oligonucleotide
uuauacaccaucagcuuca

SEQ ID NO: 1666450 - RNA, 19 nt, Artificial Sequence
  Description of Artificial Sequence: Synthetic oligonucleotide
gucagagccaacuacguag

SEQ ID NO: 1666451 - RNA, 19 nt, Artificial Sequence
  Description of Artificial Sequence: Synthetic oligonucleotide
ugcauugggagucacaguc

SEQ ID NO: 1666452 - RNA, 19 nt, Artificial Sequence
  Description of Artificial Sequence: Synthetic oligonucleotide
auacccauaaccaauacca

SEQ ID NO: 1666453 - RNA, 19 nt, Artificial Sequence
  Description of Artificial Sequence: Synthetic oligonucleotide
acuuguauugcugcugucc

SEQ ID NO: 1666454 - RNA, 19 nt, Artificial Sequence
  Description of Artificial Sequence: Synthetic oligonucleotide
aacuacguagucuguguag

SEQ ID NO: 1666455 - RNA, 19 nt, Artificial Sequence
  Description of Artificial Sequence: Synthetic oligonucleotide
auaaccaauaccacacccc

SEQ ID NO: 1666456 - RNA, 19 nt, Artificial Sequence
  Description of Artificial Sequence: Synthetic oligonucleotide
uaaccaauaccacacccca

SEQ ID NO: 1666457 - RNA, 19 nt, Artificial Sequence
  Description of Artificial Sequence: Synthetic oligonucleotide
aguauuagcugguggagug

SEQ ID NO: 1666458 - RNA, 19 nt, Artificial Sequence
  Description of Artificial Sequence: Synthetic oligonucleotide
acguagucuguguaggggc

SEQ ID NO: 1666459 - RNA, 19 nt, Artificial Sequence
  Description of Artificial Sequence: Synthetic oligonucleotide
aagccuggguccaugaccc

SEQ ID NO: 1666460 - RNA, 19 nt, Artificial Sequence
  Description of Artificial Sequence: Synthetic oligonucleotide
aauuauacaccaucagcuu

SEQ ID NO: 1666461 - RNA, 19 nt, Artificial Sequence
  Description of Artificial Sequence: Synthetic oligonucleotide
gagaucucaaacucugacc

SEQ ID NO: 1666462 - RNA, 19 nt, Artificial Sequence
  Description of Artificial Sequence: Synthetic oligonucleotide
auggcuagggcucccagac

SEQ ID NO: 1666463 - RNA, 19 nt, Artificial Sequence
  Description of Artificial Sequence: Synthetic oligonucleotide
caaacucugacccugacca

SEQ ID NO: 1666464 - RNA, 19 nt, Artificial Sequence
  Description of Artificial Sequence: Synthetic oligonucleotide
gaugagaccaucugggaga

SEQ ID NO: 1666465 - RNA, 19 nt, Artificial Sequence
  Description of Artificial Sequence: Synthetic oligonucleotide
uguauugcugcuguccagg

SEQ ID NO: 1666466 - RNA, 19 nt, Artificial Sequence
  Description of Artificial Sequence: Synthetic oligonucleotide
ugcccgaucgugaugauga

SEQ ID NO: 1666467 - RNA, 19 nt, Artificial Sequence
  Description of Artificial Sequence: Synthetic oligonucleotide
uggaguauuagcuggugga

SEQ ID NO: 1666468 - RNA, 19 nt, Artificial Sequence
  Description of Artificial Sequence: Synthetic oligonucleotide
gaauuauacaccaucagcu

SEQ ID NO: 1666469 - RNA, 19 nt, Artificial Sequence
  Description of Artificial Sequence: Synthetic oligonucleotide
agaugagaccaucugggag

SEQ ID NO: 1666470 - RNA, 19 nt, Artificial Sequence
  Description of Artificial Sequence: Synthetic oligonucleotide
aaaggcagcuuacagugau

SEQ ID NO: 1666471 - RNA, 19 nt, Artificial Sequence
  Description of Artificial Sequence: Synthetic oligonucleotide
uguagauacccauaaccaa

SEQ ID NO: 1666472 - RNA, 19 nt, Artificial Sequence
  Description of Artificial Sequence: Synthetic oligonucleotide
uccauguagucacugugcc

SEQ ID NO: 1666473 - RNA, 19 nt, Artificial Sequence
  Description of Artificial Sequence: Synthetic oligonucleotide
acauaccugacacauccag

SEQ ID NO: 1666474 - RNA, 19 nt, Artificial Sequence
  Description of Artificial Sequence: Synthetic oligonucleotide
uuaaguuguggaguauuag

SEQ ID NO: 1666475 - RNA, 19 nt, Artificial Sequence
  Description of Artificial Sequence: Synthetic oligonucleotide
cuggucagagccaacuacg

SEQ ID NO: 1666476 - RNA, 19 nt, Artificial Sequence
  Description of Artificial Sequence: Synthetic oligonucleotide
ucgaaguaggguuccaggc

SEQ ID NO: 1666477 - RNA, 19 nt, Artificial Sequence
  Description of Artificial Sequence: Synthetic oligonucleotide
uugaaaaccuccagccuca

SEQ ID NO: 1666478 - RNA, 19 nt, Artificial Sequence
  Description of Artificial Sequence: Synthetic oligonucleotide
cauguagucacugugccug

SEQ ID NO: 1666479 - RNA, 19 nt, Artificial Sequence
  Description of Artificial Sequence: Synthetic oligonucleotide
ucucgcaccuucauggucu

SEQ ID NO: 1666480 - RNA, 19 nt, Artificial Sequence
  Description of Artificial Sequence: Synthetic oligonucleotide
ugggauccgguguagauac

SEQ ID NO: 1666481 - RNA, 19 nt, Artificial Sequence
  Description of Artificial Sequence: Synthetic oligonucleotide
acuacguagucuguguagg

SEQ ID NO: 1666482 - RNA, 19 nt, Artificial Sequence
  Description of Artificial Sequence: Synthetic oligonucleotide
uccacguccaaaacaugcc

SEQ ID NO: 1666483 - RNA, 19 nt, Artificial Sequence
  Description of Artificial Sequence: Synthetic oligonucleotide
agauacccauaaccaauac

SEQ ID NO: 1666484 - RNA, 19 nt, Artificial Sequence
  Description of Artificial Sequence: Synthetic oligonucleotide
uacguagucuguguagggg

SEQ ID NO: 1666485 - RNA, 19 nt, Artificial Sequence
  Description of Artificial Sequence: Synthetic oligonucleotide
agccuugagugcccgaucg

SEQ ID NO: 1666486 - RNA, 19 nt, Artificial Sequence
  Description of Artificial Sequence: Synthetic oligonucleotide
gucgaaguaggguuccagg

SEQ ID NO: 1666487 - RNA, 19 nt, Artificial Sequence
  Description of Artificial Sequence: Synthetic oligonucleotide
uucgccaccccgcucauga

SEQ ID NO: 1666488 - RNA, 19 nt, Artificial Sequence
  Description of Artificial Sequence: Synthetic oligonucleotide
ugcuacuggaaccaauguc

SEQ ID NO: 1666489 - RNA, 19 nt, Artificial Sequence
  Description of Artificial Sequence: Synthetic oligonucleotide
agagacauaccugacacau

SEQ ID NO: 1666490 - RNA, 19 nt, Artificial Sequence
  Description of Artificial Sequence: Synthetic oligonucleotide
gcuacuggaaccaaugucc

SEQ ID NO: 1666491 - RNA, 19 nt, Artificial Sequence
  Description of Artificial Sequence: Synthetic oligonucleotide
uggacuguccgggaaagag

SEQ ID NO: 1666492 - RNA, 19 nt, Artificial Sequence
  Description of Artificial Sequence: Synthetic oligonucleotide
guguauagaagucuucaga

SEQ ID NO: 1666493 - RNA, 19 nt, Artificial Sequence
  Description of Artificial Sequence: Synthetic oligonucleotide
ugaagucgaaguaggguuc

SEQ ID NO: 1666494 - RNA, 19 nt, Artificial Sequence
  Description of Artificial Sequence: Synthetic oligonucleotide
caaggcauuaaguugugga

SEQ ID NO: 1666495 - RNA, 19 nt, Artificial Sequence
  Description of Artificial Sequence: Synthetic oligonucleotide
gaagcugcagaagcgcacg

SEQ ID NO: 1666496 - RNA, 19 nt, Artificial Sequence
  Description of Artificial Sequence: Synthetic oligonucleotide
aaaacaugccacacgugcu

SEQ ID NO: 1666497 - RNA, 19 nt, Artificial Sequence
  Description of Artificial Sequence: Synthetic oligonucleotide
aacaugccacacgugcucg

SEQ ID NO: 1666498 - RNA, 19 nt, Artificial Sequence
  Description of Artificial Sequence: Synthetic oligonucleotide
aggagucggacucagaauu

SEQ ID NO: 1666499 - RNA, 19 nt, Artificial Sequence
  Description of Artificial Sequence: Synthetic oligonucleotide
ucagcagcgucauggcuag

SEQ ID NO: 1666500 - RNA, 19 nt, Artificial Sequence
  Description of Artificial Sequence: Synthetic oligonucleotide
ucggacucagaauuauaca

SEQ ID NO: 1666501 - RNA, 19 nt, Artificial Sequence
  Description of Artificial Sequence: Synthetic oligonucleotide
aucgugaugaugaagucga

SEQ ID NO: 1666502 - RNA, 19 nt, Artificial Sequence
  Description of Artificial Sequence: Synthetic oligonucleotide
guggaguauuagcuggugg

SEQ ID NO: 1666503 - RNA, 19 nt, Artificial Sequence
  Description of Artificial Sequence: Synthetic oligonucleotide
uauuagcugguggagugcc

SEQ ID NO: 1666504 - RNA, 19 nt, Artificial Sequence
  Description of Artificial Sequence: Synthetic oligonucleotide
uggagaaucuggucagagc

SEQ ID NO: 1666505 - RNA, 19 nt, Artificial Sequence
  Description of Artificial Sequence: Synthetic oligonucleotide
agacucuuggagaaucugg

SEQ ID NO: 1666506 - RNA, 19 nt, Artificial Sequence
  Description of Artificial Sequence: Synthetic oligonucleotide
uagauacccauaaccaaua

SEQ ID NO: 1666507 - RNA, 19 nt, Artificial Sequence
  Description of Artificial Sequence: Synthetic oligonucleotide
caugagaacugcuacugga

SEQ ID NO: 1666508 - RNA, 19 nt, Artificial Sequence
  Description of Artificial Sequence: Synthetic oligonucleotide
acacuuguauugcugcugu

SEQ ID NO: 1666509 - RNA, 19 nt, Artificial Sequence
  Description of Artificial Sequence: Synthetic oligonucleotide
uuagcugguggagugccag

SEQ ID NO: 1666510 - RNA, 19 nt, Artificial Sequence
  Description of Artificial Sequence: Synthetic oligonucleotide
ucuugaaggacaggccaag

SEQ ID NO: 1666511 - RNA, 19 nt, Artificial Sequence
  Description of Artificial Sequence: Synthetic oligonucleotide
aggcagcuuacagugauuc

SEQ ID NO: 1666512 - RNA, 19 nt, Artificial Sequence
  Description of Artificial Sequence: Synthetic oligonucleotide
aagcuuuaguuaaauacuu

SEQ ID NO: 1666513 - RNA, 19 nt, Artificial Sequence
  Description of Artificial Sequence: Synthetic oligonucleotide
ugccacacgugcucgcugg

SEQ ID NO: 1666514 - RNA, 19 nt, Artificial Sequence
  Description of Artificial Sequence: Synthetic oligonucleotide
guguagauacccauaacca

SEQ ID NO: 1666515 - RNA, 19 nt, Artificial Sequence
  Description of Artificial Sequence: Synthetic oligonucleotide
cccauaaccaauaccacac

SEQ ID NO: 1666516 - RNA, 19 nt, Artificial Sequence
  Description of Artificial Sequence: Synthetic oligonucleotide
cuacguagucuguguaggg

SEQ ID NO: 1666517 - RNA, 19 nt, Artificial Sequence
  Description of Artificial Sequence: Synthetic oligonucleotide
aggugaagagggcuccacg

SEQ ID NO: 1666518 - RNA, 19 nt, Artificial Sequence
  Description of Artificial Sequence: Synthetic oligonucleotide
ucgagcugggcuuccagca

SEQ ID NO: 1666519 - RNA, 19 nt, Artificial Sequence
  Description of Artificial Sequence: Synthetic oligonucleotide
cauugggagucacagucac

SEQ ID NO: 1666520 - RNA, 19 nt, Artificial Sequence
  Description of Artificial Sequence: Synthetic oligonucleotide
cugacccugaccacguggc

SEQ ID NO: 1666521 - RNA, 19 nt, Artificial Sequence
  Description of Artificial Sequence: Synthetic oligonucleotide
gucggacucagaauuauac

SEQ ID NO: 1666522 - RNA, 19 nt, Artificial Sequence
  Description of Artificial Sequence: Synthetic oligonucleotide
acccugaccacguggcuuc

SEQ ID NO: 1666523 - RNA, 19 nt, Artificial Sequence
  Description of Artificial Sequence: Synthetic oligonucleotide
agcagcgucauggcuaggg

SEQ ID NO: 1666524 - RNA, 19 nt, Artificial Sequence
  Description of Artificial Sequence: Synthetic oligonucleotide
uccgagcucgccccuagcc

SEQ ID NO: 1666525 - RNA, 19 nt, Artificial Sequence
  Description of Artificial Sequence: Synthetic oligonucleotide
gaaggaguguauagaaguc

SEQ ID NO: 1666526 - RNA, 19 nt, Artificial Sequence
  Description of Artificial Sequence: Synthetic oligonucleotide
uguucagccuugagugccc

SEQ ID NO: 1666527 - RNA, 19 nt, Artificial Sequence
  Description of Artificial Sequence: Synthetic oligonucleotide
cuggaacccaacucugggc

SEQ ID NO: 1666528 - RNA, 19 nt, Artificial Sequence
  Description of Artificial Sequence: Synthetic oligonucleotide
gaagucgaaguaggguucc

SEQ ID NO: 1666529 - RNA, 19 nt, Artificial Sequence
  Description of Artificial Sequence: Synthetic oligonucleotide
cuuguaguggcuggagggc

SEQ ID NO: 1666530 - RNA, 19 nt, Artificial Sequence
  Description of Artificial Sequence: Synthetic oligonucleotide
cacguccaaaacaugccac

SEQ ID NO: 1666531 - RNA, 19 nt, Artificial Sequence
  Description of Artificial Sequence: Synthetic oligonucleotide
acguccaaaacaugccaca

SEQ ID NO: 1666532 - RNA, 19 nt, Artificial Sequence
  Description of Artificial Sequence: Synthetic oligonucleotide
uuguggaguauuagcuggu

SEQ ID NO: 1666533 - RNA, 19 nt, Artificial Sequence
  Description of Artificial Sequence: Synthetic oligonucleotide
agagccaacuacguagucu

SEQ ID NO: 1666534 - RNA, 19 nt, Artificial Sequence
  Description of Artificial Sequence: Synthetic oligonucleotide
acaugccacacgugcucgc

SEQ ID NO: 1666535 - RNA, 19 nt, Artificial Sequence
  Description of Artificial Sequence: Synthetic oligonucleotide
agcgucauggcuagggcuc

SEQ ID NO: 1666536 - RNA, 19 nt, Artificial Sequence
  Description of Artificial Sequence: Synthetic oligonucleotide
aagagucuugaaggacagg

SEQ ID NO: 1666537 - RNA, 19 nt, Artificial Sequence
  Description of Artificial Sequence: Synthetic oligonucleotide
uguggaggucagcacugug

SEQ ID NO: 1666538 - RNA, 19 nt, Artificial Sequence
  Description of Artificial Sequence: Synthetic oligonucleotide
gagucuugaaggacaggcc

SEQ ID NO: 1666539 - RNA, 19 nt, Artificial Sequence
  Description of Artificial Sequence: Synthetic oligonucleotide
gcuuccacgaagccaacag

SEQ ID NO: 1666540 - RNA, 19 nt, Artificial Sequence
  Description of Artificial Sequence: Synthetic oligonucleotide
cuucuggugaggaugcaga

SEQ ID NO: 1666541 - RNA, 19 nt, Artificial Sequence
  Description of Artificial Sequence: Synthetic oligonucleotide
agagccuucagggugucgu

SEQ ID NO: 1666542 - RNA, 19 nt, Artificial Sequence
  Description of Artificial Sequence: Synthetic oligonucleotide
cagaagcgcacgcuggccc

SEQ ID NO: 1666543 - RNA, 19 nt, Artificial Sequence
  Description of Artificial Sequence: Synthetic oligonucleotide
gaccacguggcuucgccac

SEQ ID NO: 1666544 - RNA, 19 nt, Artificial Sequence
  Description of Artificial Sequence: Synthetic oligonucleotide
ucccaaggcugagagagcu

SEQ ID NO: 1666545 - RNA, 19 nt, Artificial Sequence
  Description of Artificial Sequence: Synthetic oligonucleotide
ccccucaugggacugaagg

SEQ ID NO: 1666546 - RNA, 19 nt, Artificial Sequence
  Description of Artificial Sequence: Synthetic oligonucleotide
uaccacaccccagacugcc

SEQ ID NO: 1666547 - RNA, 19 nt, Artificial Sequence
  Description of Artificial Sequence: Synthetic oligonucleotide
accacguggcuucgccacc

SEQ ID NO: 1666548 - RNA, 19 nt, Artificial Sequence
  Description of Artificial Sequence: Synthetic oligonucleotide
ggugaggaugcagagauga

SEQ ID NO: 1666549 - RNA, 19 nt, Artificial Sequence
  Description of Artificial Sequence: Synthetic oligonucleotide
acccaaggagcugugcuuc

SEQ ID NO: 1666550 - RNA, 19 nt, Artificial Sequence
  Description of Artificial Sequence: Synthetic oligonucleotide
ugcuggcuccucgagcugg

SEQ ID NO: 1666551 - RNA, 19 nt, Artificial Sequence
  Description of Artificial Sequence: Synthetic oligonucleotide
accccagacugcccucucc

SEQ ID NO: 1666552 - RNA, 19 nt, Artificial Sequence
  Description of Artificial Sequence: Synthetic oligonucleotide
cugaccacguggcuucgcc

SEQ ID NO: 1666553 - RNA, 19 nt, Artificial Sequence
  Description of Artificial Sequence: Synthetic oligonucleotide
gacggugaggccccagcug

SEQ ID NO: 1666554 - RNA, 19 nt, Artificial Sequence
  Description of Artificial Sequence: Synthetic oligonucleotide
guauagaagucuucagacu

SEQ ID NO: 1666555 - RNA, 19 nt, Artificial Sequence
  Description of Artificial Sequence: Synthetic oligonucleotide
gucagcacuguggagggug

SEQ ID NO: 1666556 - RNA, 19 nt, Artificial Sequence
  Description of Artificial Sequence: Synthetic oligonucleotide
gccaacagggaccuguggc

SEQ ID NO: 1666557 - RNA, 19 nt, Artificial Sequence
  Description of Artificial Sequence: Synthetic oligonucleotide
ucaccucccggcaggaguc

SEQ ID NO: 1666558 - RNA, 19 nt, Artificial Sequence
  Description of Artificial Sequence: Synthetic oligonucleotide
caccaucagcuucaagggc

SEQ ID NO: 1666559 - RNA, 19 nt, Artificial Sequence
  Description of Artificial Sequence: Synthetic oligonucleotide
auuaaguuguggaguauua

SEQ ID NO: 1666560 - RNA, 19 nt, Artificial Sequence
  Description of Artificial Sequence: Synthetic oligonucleotide
gagugcccgaucgugauga

SEQ ID NO: 1666561 - RNA, 19 nt, Artificial Sequence
  Description of Artificial Sequence: Synthetic oligonucleotide
uugagugcccgaucgugau

SEQ ID NO: 1666562 - RNA, 19 nt, Artificial Sequence
  Description of Artificial Sequence: Synthetic oligonucleotide
ugcguugggauccggugua

SEQ ID NO: 1666563 - RNA, 19 nt, Artificial Sequence
  Description of Artificial Sequence: Synthetic oligonucleotide
agaaucuggucagagccaa

SEQ ID NO: 1666564 - RNA, 19 nt, Artificial Sequence
  Description of Artificial Sequence: Synthetic oligonucleotide
ucuccauggagcgcgcaca

SEQ ID NO: 1666565 - RNA, 19 nt, Artificial Sequence
  Description of Artificial Sequence: Synthetic oligonucleotide
uccgguguagauacccaua

SEQ ID NO: 1666566 - RNA, 19 nt, Artificial Sequence
  Description of Artificial Sequence: Synthetic oligonucleotide
ugagugcccgaucgugaug

SEQ ID NO: 1666567 - RNA, 19 nt, Artificial Sequence
  Description of Artificial Sequence: Synthetic oligonucleotide
agucgaaguaggguuccag

SEQ ID NO: 1666568 - RNA, 19 nt, Artificial Sequence
  Description of Artificial Sequence: Synthetic oligonucleotide
ggaguauuagcugguggag

SEQ ID NO: 1666569 - RNA, 19 nt, Artificial Sequence
  Description of Artificial Sequence: Synthetic oligonucleotide
cuugagugcccgaucguga

SEQ ID NO: 1666570 - RNA, 19 nt, Artificial Sequence
  Description of Artificial Sequence: Synthetic oligonucleotide
aguaggguuccaggccggc

SEQ ID NO: 1666571 - RNA, 19 nt, Artificial Sequence
  Description of Artificial Sequence: Synthetic oligonucleotide
aaguaggguuccaggccgg

SEQ ID NO: 1666572 - RNA, 19 nt, Artificial Sequence
  Description of Artificial Sequence: Synthetic oligonucleotide
ggggcacacacuuguauug

SEQ ID NO: 1666573 - RNA, 19 nt, Artificial Sequence
  Description of Artificial Sequence: Synthetic oligonucleotide
cucgccccuagccccaugg

SEQ ID NO: 1666574 - RNA, 19 nt, Artificial Sequence
  Description of Artificial Sequence: Synthetic oligonucleotide
cauggagcgcgcacauccc

SEQ ID NO: 1666575 - RNA, 19 nt, Artificial Sequence
  Description of Artificial Sequence: Synthetic oligonucleotide
uccaccucucgcaccuuca

SEQ ID NO: 1666576 - RNA, 19 nt, Artificial Sequence
  Description of Artificial Sequence: Synthetic oligonucleotide
cugcaccccgugcaggugg

SEQ ID NO: 1666577 - RNA, 19 nt, Artificial Sequence
  Description of Artificial Sequence: Synthetic oligonucleotide
ggcgaguucuccugcaccc

SEQ ID NO: 1666578 - RNA, 19 nt, Artificial Sequence
  Description of Artificial Sequence: Synthetic oligonucleotide
caugacccgcugcacuggg

SEQ ID NO: 1666579 - RNA, 19 nt, Artificial Sequence
  Description of Artificial Sequence: Synthetic oligonucleotide
guauuagcugguggagugc

SEQ ID NO: 1666580 - RNA, 19 nt, Artificial Sequence
  Description of Artificial Sequence: Synthetic oligonucleotide
guagauacccauaaccaau

SEQ ID NO: 1666581 - RNA, 19 nt, Artificial Sequence
  Description of Artificial Sequence: Synthetic oligonucleotide
ccuggaacccaacucuggg

SEQ ID NO: 1666582 - RNA, 19 nt, Artificial Sequence
  Description of Artificial Sequence: Synthetic oligonucleotide
ugaccacguggcuucgcca

SEQ ID NO: 1666583 - RNA, 19 nt, Artificial Sequence
  Description of Artificial Sequence: Synthetic oligonucleotide
agacagcccgucuucuggu

SEQ ID NO: 1666584 - RNA, 19 nt, Artificial Sequence
  Description of Artificial Sequence: Synthetic oligonucleotide
ucagccuugagugcccgau

SEQ ID NO: 1666585 - RNA, 19 nt, Artificial Sequence
  Description of Artificial Sequence: Synthetic oligonucleotide
caggagagacauaccugac

SEQ ID NO: 1666586 - RNA, 19 nt, Artificial Sequence
  Description of Artificial Sequence: Synthetic oligonucleotide
agacggugaggccccagcu

SEQ ID NO: 1666587 - RNA, 19 nt, Artificial Sequence
  Description of Artificial Sequence: Synthetic oligonucleotide
gagaaucuggucagagcca

SEQ ID NO: 1666588 - RNA, 19 nt, Artificial Sequence
  Description of Artificial Sequence: Synthetic oligonucleotide
ggauccgguguagauaccc

SEQ ID NO: 1666589 - RNA, 19 nt, Artificial Sequence
  Description of Artificial Sequence: Synthetic oligonucleotide
auccgguguagauacccau

SEQ ID NO: 1666590 - RNA, 19 nt, Artificial Sequence
  Description of Artificial Sequence: Synthetic oligonucleotide
uugggauccgguguagaua

SEQ ID NO: 1666591 - RNA, 19 nt, Artificial Sequence
  Description of Artificial Sequence: Synthetic oligonucleotide
gacucuuggagaaucuggu

SEQ ID NO: 1666592 - RNA, 19 nt, Artificial Sequence
  Description of Artificial Sequence: Synthetic oligonucleotide
gacagcccgucuucuggug

SEQ ID NO: 1666593 - RNA, 19 nt, Artificial Sequence
  Description of Artificial Sequence: Synthetic oligonucleotide
acagcccgucuucugguga

SEQ ID NO: 1666594 - RNA, 19 nt, Artificial Sequence
  Description of Artificial Sequence: Synthetic oligonucleotide
aggaguguauagaagucuu

SEQ ID NO: 1666595 - RNA, 19 nt, Artificial Sequence
  Description of Artificial Sequence: Synthetic oligonucleotide
aacugcuacuggaaccaau

SEQ ID NO: 1666596 - RNA, 19 nt, Artificial Sequence
  Description of Artificial Sequence: Synthetic oligonucleotide
cacuguggagggugacagg

SEQ ID NO: 1666597 - RNA, 19 nt, Artificial Sequence
  Description of Artificial Sequence: Synthetic oligonucleotide
cacuuccaccucucgcacc

SEQ ID NO: 1666598 - RNA, 19 nt, Artificial Sequence
  Description of Artificial Sequence: Synthetic oligonucleotide
gaagagggcuccacgucca

SEQ ID NO: 1666599 - RNA, 19 nt, Artificial Sequence
  Description of Artificial Sequence: Synthetic oligonucleotide
uggccgccucacauguugc

SEQ ID NO: 1666600 - RNA, 19 nt, Artificial Sequence
  Description of Artificial Sequence: Synthetic oligonucleotide
gcaggagucggacucagaa

SEQ ID NO: 1666601 - RNA, 19 nt, Artificial Sequence
  Description of Artificial Sequence: Synthetic oligonucleotide
guauugcugcuguccagga

SEQ ID NO: 1666602 - RNA, 19 nt, Artificial Sequence
  Description of Artificial Sequence: Synthetic oligonucleotide
acguggcuucgccaccccg

SEQ ID NO: 1666603 - RNA, 19 nt, Artificial Sequence
  Description of Artificial Sequence: Synthetic oligonucleotide
ugacccugaccacguggcu

SEQ ID NO: 1666604 - RNA, 19 nt, Artificial Sequence
  Description of Artificial Sequence: Synthetic oligonucleotide
uguccgggaaagagaucuc

SEQ ID NO: 1666605 - RNA, 19 nt, Artificial Sequence
  Description of Artificial Sequence: Synthetic oligonucleotide
cgaaguaggguuccaggcc

SEQ ID NO: 1666606 - RNA, 19 nt, Artificial Sequence
  Description of Artificial Sequence: Synthetic oligonucleotide
gcugcguugggauccggug

SEQ ID NO: 1666607 - RNA, 19 nt, Artificial Sequence
  Description of Artificial Sequence: Synthetic oligonucleotide
gauccgguguagauaccca

SEQ ID NO: 1666608 - RNA, 19 nt, Artificial Sequence
  Description of Artificial Sequence: Synthetic oligonucleotide
gaguauuagcugguggagu

SEQ ID NO: 1666609 - RNA, 19 nt, Artificial Sequence
  Description of Artificial Sequence: Synthetic oligonucleotide
cucucgcaccuucaugguc

SEQ ID NO: 1666610 - RNA, 19 nt, Artificial Sequence
  Description of Artificial Sequence: Synthetic oligonucleotide
ccacgaagccaacagggac

SEQ ID NO: 1666611 - RNA, 19 nt, Artificial Sequence
  Description of Artificial Sequence: Synthetic oligonucleotide
ugagagagcuguggagguc

SEQ ID NO: 1666612 - RNA, 19 nt, Artificial Sequence
  Description of Artificial Sequence: Synthetic oligonucleotide
ugggccggcgaguucuccu

SEQ ID NO: 1666613 - RNA, 19 nt, Artificial Sequence
  Description of Artificial Sequence: Synthetic oligonucleotide
ccauaaccaauaccacacc

SEQ ID NO: 1666614 - RNA, 19 nt, Artificial Sequence
  Description of Artificial Sequence: Synthetic oligonucleotide
gagacauaccugacacauc

SEQ ID NO: 1666615 - RNA, 19 nt, Artificial Sequence
  Description of Artificial Sequence: Synthetic oligonucleotide
ucgugaugaugaagucgaa

SEQ ID NO: 1666616 - RNA, 19 nt, Artificial Sequence
  Description of Artificial Sequence: Synthetic oligonucleotide
gccccuagccccauggccg

SEQ ID NO: 1666617 - RNA, 19 nt, Artificial Sequence
  Description of Artificial Sequence: Synthetic oligonucleotide
ccgccucacauguugcugg

SEQ ID NO: 1666618 - RNA, 19 nt, Artificial Sequence
  Description of Artificial Sequence: Synthetic oligonucleotide
guagucacugugccuggaa

SEQ ID NO: 1666619 - RNA, 19 nt, Artificial Sequence
  Description of Artificial Sequence: Synthetic oligonucleotide
ggaaccaauguccucuggu

SEQ ID NO: 1666620 - RNA, 19 nt, Artificial Sequence
  Description of Artificial Sequence: Synthetic oligonucleotide
uccccucaugggacugaag

SEQ ID NO: 1666621 - RNA, 19 nt, Artificial Sequence
  Description of Artificial Sequence: Synthetic oligonucleotide
ucacugugccuggaaccca

SEQ ID NO: 1666622 - RNA, 19 nt, Artificial Sequence
  Description of Artificial Sequence: Synthetic oligonucleotide
ggugaagagggcuccacgu

SEQ ID NO: 1666623 - RNA, 19 nt, Artificial Sequence
  Description of Artificial Sequence: Synthetic oligonucleotide
cucgcuggcccugcggaag

SEQ ID NO: 1666624 - RNA, 19 nt, Artificial Sequence
  Description of Artificial Sequence: Synthetic oligonucleotide
cuacuggaaccaauguccu

SEQ ID NO: 1666625 - RNA, 19 nt, Artificial Sequence
  Description of Artificial Sequence: Synthetic oligonucleotide
guaguggcuggagggcugc

SEQ ID NO: 1666626 - RNA, 19 nt, Artificial Sequence
  Description of Artificial Sequence: Synthetic oligonucleotide
uucagccuugagugcccga

SEQ ID NO: 1666627 - RNA, 19 nt, Artificial Sequence
  Description of Artificial Sequence: Synthetic oligonucleotide
guagucuguguaggggcac

SEQ ID NO: 1666628 - RNA, 19 nt, Artificial Sequence
  Description of Artificial Sequence: Synthetic oligonucleotide
gacauaccugacacaucca

SEQ ID NO: 1666629 - RNA, 19 nt, Artificial Sequence
  Description of Artificial Sequence: Synthetic oligonucleotide
ucgccccuagccccauggc

SEQ ID NO: 1666630 - RNA, 19 nt, Artificial Sequence
  Description of Artificial Sequence: Synthetic oligonucleotide
guccgggaaagagaucuca

SEQ ID NO: 1666631 - RNA, 19 nt, Artificial Sequence
  Description of Artificial Sequence: Synthetic oligonucleotide
cacuuguauugcugcuguc

SEQ ID NO: 1666632 - RNA, 19 nt, Artificial Sequence
  Description of Artificial Sequence: Synthetic oligonucleotide
uggaggcuguagagggauc

SEQ ID NO: 1666633 - RNA, 19 nt, Artificial Sequence
  Description of Artificial Sequence: Synthetic oligonucleotide
cgucuucuggugaggaugc

SEQ ID NO: 1666634 - RNA, 19 nt, Artificial Sequence
  Description of Artificial Sequence: Synthetic oligonucleotide
guugggauccgguguagau

SEQ ID NO: 1666635 - RNA, 19 nt, Artificial Sequence
  Description of Artificial Sequence: Synthetic oligonucleotide
gccaacuacguagucugug

SEQ ID NO: 1666636 - RNA, 19 nt, Artificial Sequence
  Description of Artificial Sequence: Synthetic oligonucleotide
ccgaucgugaugaugaagu

SEQ ID NO: 1666637 - RNA, 19 nt, Artificial Sequence
  Description of Artificial Sequence: Synthetic oligonucleotide
ggcuucgccaccccgcuca

SEQ ID NO: 1666638 - RNA, 19 nt, Artificial Sequence
  Description of Artificial Sequence: Synthetic oligonucleotide
ggcacaggccagccaaggc

SEQ ID NO: 1666639 - RNA, 19 nt, Artificial Sequence
  Description of Artificial Sequence: Synthetic oligonucleotide
gcagcgucauggcuagggc

SEQ ID NO: 1666640 - RNA, 19 nt, Artificial Sequence
  Description of Artificial Sequence: Synthetic oligonucleotide
acuguccgggaaagagauc

SEQ ID NO: 1666641 - RNA, 19 nt, Artificial Sequence
  Description of Artificial Sequence: Synthetic oligonucleotide
caacuacguagucugugua

SEQ ID NO: 1666642 - RNA, 19 nt, Artificial Sequence
  Description of Artificial Sequence: Synthetic oligonucleotide
ccgucuucuggugaggaug

SEQ ID NO: 1666643 - RNA, 19 nt, Artificial Sequence
  Description of Artificial Sequence: Synthetic oligonucleotide
cagacccaaggagcugugc

SEQ ID NO: 1666644 - RNA, 19 nt, Artificial Sequence
  Description of Artificial Sequence: Synthetic oligonucleotide
cgcucaugagaacugcuac

SEQ ID NO: 1666645 - RNA, 19 nt, Artificial Sequence
  Description of Artificial Sequence: Synthetic oligonucleotide
cauuaaguuguggaguauu

SEQ ID NO: 1666646 - RNA, 19 nt, Artificial Sequence
  Description of Artificial Sequence: Synthetic oligonucleotide
caauaccacaccccagacu

SEQ ID NO: 1666647 - RNA, 19 nt, Artificial Sequence
  Description of Artificial Sequence: Synthetic oligonucleotide
caccccgugcagguggaag

SEQ ID NO: 1666648 - RNA, 19 nt, Artificial Sequence
  Description of Artificial Sequence: Synthetic oligonucleotide
cagagccaacuacguaguc

SEQ ID NO: 1666649 - RNA, 19 nt, Artificial Sequence
  Description of Artificial Sequence: Synthetic oligonucleotide
cuccugcaccccgugcagg

SEQ ID NO: 1666650 - RNA, 19 nt, Artificial Sequence
  Description of Artificial Sequence: Synthetic oligonucleotide
ucgccaccccgcucaugag

SEQ ID NO: 1666651 - RNA, 19 nt, Artificial Sequence
  Description of Artificial Sequence: Synthetic oligonucleotide
gggcuccacguccaaaaca

SEQ ID NO: 1666652 - RNA, 19 nt, Artificial Sequence
  Description of Artificial Sequence: Synthetic oligonucleotide
ccuugagugcccgaucgug

SEQ ID NO: 1666653 - RNA, 19 nt, Artificial Sequence
  Description of Artificial Sequence: Synthetic oligonucleotide
acgugcucgcuggcccugc

SEQ ID NO: 1666654 - RNA, 19 nt, Artificial Sequence
  Description of Artificial Sequence: Synthetic oligonucleotide
guggaagcccucgccgccc

SEQ ID NO: 1666655 - RNA, 19 nt, Artificial Sequence
  Description of Artificial Sequence: Synthetic oligonucleotide
augacccgcugcacugggg

SEQ ID NO: 1666656 - RNA, 19 nt, Artificial Sequence
  Description of Artificial Sequence: Synthetic oligonucleotide
uuccccucaugggacugaa

SEQ ID NO: 1666657 - RNA, 19 nt, Artificial Sequence
  Description of Artificial Sequence: Synthetic oligonucleotide
cacugugccuggaacccaa

SEQ ID NO: 1666658 - RNA, 19 nt, Artificial Sequence
  Description of Artificial Sequence: Synthetic oligonucleotide
cuuggagaaucuggucaga

SEQ ID NO: 1666659 - RNA, 19 nt, Artificial Sequence
  Description of Artificial Sequence: Synthetic oligonucleotide
ggaacccaacucugggcca

SEQ ID NO: 1666660 - RNA, 19 nt, Artificial Sequence
  Description of Artificial Sequence: Synthetic oligonucleotide
gacccaaggagcugugcuu

SEQ ID NO: 1666661 - RNA, 19 nt, Artificial Sequence
  Description of Artificial Sequence: Synthetic oligonucleotide
aacccaacucugggccaga

SEQ ID NO: 1666662 - RNA, 19 nt, Artificial Sequence
  Description of Artificial Sequence: Synthetic oligonucleotide
agggcugcguugggauccg

SEQ ID NO: 1666663 - RNA, 19 nt, Artificial Sequence
  Description of Artificial Sequence: Synthetic oligonucleotide
cgaguucuccugcaccccg

SEQ ID NO: 1666664 - RNA, 19 nt, Artificial Sequence
  Description of Artificial Sequence: Synthetic oligonucleotide
gugcccgaucgugaugaug

SEQ ID NO: 1666665 - RNA, 19 nt, Artificial Sequence
  Description of Artificial Sequence: Synthetic oligonucleotide
acaccccagacugcccucu

SEQ ID NO: 1666666 - RNA, 19 nt, Artificial Sequence
  Description of Artificial Sequence: Synthetic oligonucleotide
aggcugcauugggagucac

SEQ ID NO: 1666667 - RNA, 19 nt, Artificial Sequence
  Description of Artificial Sequence: Synthetic oligonucleotide
ggacuguccgggaaagaga

SEQ ID NO: 1666668 - RNA, 19 nt, Artificial Sequence
  Description of Artificial Sequence: Synthetic oligonucleotide
agucggacucagaauuaua

SEQ ID NO: 1666669 - RNA, 19 nt, Artificial Sequence
  Description of Artificial Sequence: Synthetic oligonucleotide
cccggcaggagucggacuc

SEQ ID NO: 1666670 - RNA, 19 nt, Artificial Sequence
  Description of Artificial Sequence: Synthetic oligonucleotide
accucccggcaggagucgg

SEQ ID NO: 1666671 - RNA, 19 nt, Artificial Sequence
  Description of Artificial Sequence: Synthetic oligonucleotide
cucccggcaggagucggac

SEQ ID NO: 1666672 - RNA, 19 nt, Artificial Sequence
  Description of Artificial Sequence: Synthetic oligonucleotide
ucccggcaggagucggacu

SEQ ID NO: 1666673 - RNA, 19 nt, Artificial Sequence
  Description of Artificial Sequence: Synthetic oligonucleotide
cguggcuucgccaccccgc

SEQ ID NO: 1666674 - RNA, 19 nt, Artificial Sequence
  Description of Artificial Sequence: Synthetic oligonucleotide
gagucggacucagaauuau

SEQ ID NO: 1666675 - RNA, 19 nt, Artificial Sequence
  Description of Artificial Sequence: Synthetic oligonucleotide
ccacguccaaaacaugcca

SEQ ID NO: 1666676 - RNA, 19 nt, Artificial Sequence
  Description of Artificial Sequence: Synthetic oligonucleotide
cacguggcuucgccacccc

SEQ ID NO: 1666677 - RNA, 19 nt, Artificial Sequence
  Description of Artificial Sequence: Synthetic oligonucleotide
guggagugccagacgguga

SEQ ID NO: 1666678 - RNA, 19 nt, Artificial Sequence
  Description of Artificial Sequence: Synthetic oligonucleotide
ugacaggcuggggcacaca

SEQ ID NO: 1666679 - RNA, 19 nt, Artificial Sequence
  Description of Artificial Sequence: Synthetic oligonucleotide
ggucagagccaacuacgua

SEQ ID NO: 1666680 - RNA, 19 nt, Artificial Sequence
  Description of Artificial Sequence: Synthetic oligonucleotide
cagcgucauggcuagggcu

SEQ ID NO: 1666681 - RNA, 19 nt, Artificial Sequence
  Description of Artificial Sequence: Synthetic oligonucleotide
uccauggagcgcgcacauc

SEQ ID NO: 1666682 - RNA, 19 nt, Artificial Sequence
  Description of Artificial Sequence: Synthetic oligonucleotide
cucugacccugaccacgug

SEQ ID NO: 1666683 - RNA, 19 nt, Artificial Sequence
  Description of Artificial Sequence: Synthetic oligonucleotide
cuccgagcucgccccuagc

SEQ ID NO: 1666684 - RNA, 19 nt, Artificial Sequence
  Description of Artificial Sequence: Synthetic oligonucleotide
auguugcugggcaccacuu

SEQ ID NO: 1666685 - RNA, 19 nt, Artificial Sequence
  Description of Artificial Sequence: Synthetic oligonucleotide
ggcuccacguccaaaacau

SEQ ID NO: 1666686 - RNA, 19 nt, Artificial Sequence
  Description of Artificial Sequence: Synthetic oligonucleotide
cugcguugggauccggugu

SEQ ID NO: 1666687 - RNA, 19 nt, Artificial Sequence
  Description of Artificial Sequence: Synthetic oligonucleotide
ccgguguagauacccauaa

SEQ ID NO: 1666688 - RNA, 19 nt, Artificial Sequence
  Description of Artificial Sequence: Synthetic oligonucleotide
cagagccuucagggugucg

SEQ ID NO: 1666689 - RNA, 19 nt, Artificial Sequence
  Description of Artificial Sequence: Synthetic oligonucleotide
ccaacuacguagucugugu

SEQ ID NO: 1666690 - RNA, 19 nt, Artificial Sequence
  Description of Artificial Sequence: Synthetic oligonucleotide
cagugauucugugucugcu

SEQ ID NO: 1666691 - RNA, 19 nt, Artificial Sequence
  Description of Artificial Sequence: Synthetic oligonucleotide
gcauugggagucacaguca

SEQ ID NO: 1666692 - RNA, 19 nt, Artificial Sequence
  Description of Artificial Sequence: Synthetic oligonucleotide
agugcccgaucgugaugau

SEQ ID NO: 1666693 - RNA, 19 nt, Artificial Sequence
  Description of Artificial Sequence: Synthetic oligonucleotide
caucagcuucaagggcuuc

SEQ ID NO: 1666694 - RNA, 19 nt, Artificial Sequence
  Description of Artificial Sequence: Synthetic oligonucleotide
cccgaucgugaugaugaag

SEQ ID NO: 1666695 - RNA, 19 nt, Artificial Sequence
  Description of Artificial Sequence: Synthetic oligonucleotide
guggaggcuguagagggau

SEQ ID NO: 1666696 - RNA, 19 nt, Artificial Sequence
  Description of Artificial Sequence: Synthetic oligonucleotide
cgaucgugaugaugaaguc

SEQ ID NO: 1666697 - RNA, 19 nt, Artificial Sequence
  Description of Artificial Sequence: Synthetic oligonucleotide
ggaggcuguagagggaucu

SEQ ID NO: 1666698 - RNA, 19 nt, Artificial Sequence
  Description of Artificial Sequence: Synthetic oligonucleotide
caggagucggacucagaau

SEQ ID NO: 1666699 - RNA, 19 nt, Artificial Sequence
  Description of Artificial Sequence: Synthetic oligonucleotide
ggagggcugcguugggauc

SEQ ID NO: 1666700 - RNA, 19 nt, Artificial Sequence
  Description of Artificial Sequence: Synthetic oligonucleotide
agccaacuacguagucugu

SEQ ID NO: 1666701 - RNA, 19 nt, Artificial Sequence
  Description of Artificial Sequence: Synthetic oligonucleotide
cuggggcacacacuuguau

SEQ ID NO: 1666702 - RNA, 19 nt, Artificial Sequence
  Description of Artificial Sequence: Synthetic oligonucleotide
gccuggguccaugacccgc

SEQ ID NO: 1666703 - RNA, 19 nt, Artificial Sequence
  Description of Artificial Sequence: Synthetic oligonucleotide
gccgccucacauguugcug

SEQ ID NO: 1666704 - RNA, 19 nt, Artificial Sequence
  Description of Artificial Sequence: Synthetic oligonucleotide
ccaugacccgcugcacugg

SEQ ID NO: 1666705 - RNA, 19 nt, Artificial Sequence
  Description of Artificial Sequence: Synthetic oligonucleotide
guggcuucgccaccccgcu

SEQ ID NO: 1666706 - RNA, 19 nt, Artificial Sequence
  Description of Artificial Sequence: Synthetic oligonucleotide
cguagucuguguaggggca

SEQ ID NO: 1666707 - RNA, 19 nt, Artificial Sequence
  Description of Artificial Sequence: Synthetic oligonucleotide
gacccugaccacguggcuu

SEQ ID NO: 1666708 - RNA, 19 nt, Artificial Sequence
  Description of Artificial Sequence: Synthetic oligonucleotide
caugggacugaaggagugu

SEQ ID NO: 1666709 - RNA, 19 nt, Artificial Sequence
  Description of Artificial Sequence: Synthetic oligonucleotide
caccuggacuguccgggaa

SEQ ID NO: 1666710 - RNA, 19 nt, Artificial Sequence
  Description of Artificial Sequence: Synthetic oligonucleotide
gcgaguucuccugcacccc

SEQ ID NO: 1666711 - RNA, 19 nt, Artificial Sequence
  Description of Artificial Sequence: Synthetic oligonucleotide
ggcaccacuuccaccucuc

SEQ ID NO: 1666712 - RNA, 19 nt, Artificial Sequence
  Description of Artificial Sequence: Synthetic oligonucleotide
cugggccggcgaguucucc

SEQ ID NO: 1666713 - RNA, 19 nt, Artificial Sequence
  Description of Artificial Sequence: Synthetic oligonucleotide
cuuccccucaugggacuga

SEQ ID NO: 1666714 - RNA, 19 nt, Artificial Sequence
  Description of Artificial Sequence: Synthetic oligonucleotide
cacgugcucgcuggcccug

SEQ ID NO: 1666715 - RNA, 19 nt, Artificial Sequence
  Description of Artificial Sequence: Synthetic oligonucleotide
cuccucgagcugggcuucc

SEQ ID NO: 1666716 - RNA, 19 nt, Artificial Sequence
  Description of Artificial Sequence: Synthetic oligonucleotide
ggagucggacucagaauua

SEQ ID NO: 1666717 - RNA, 19 nt, Artificial Sequence
  Description of Artificial Sequence: Synthetic oligonucleotide
ccccuagccccauggccgc

SEQ ID NO: 1666718 - RNA, 19 nt, Artificial Sequence
  Description of Artificial Sequence: Synthetic oligonucleotide
ccacguggcuucgccaccc

SEQ ID NO: 1666719 - RNA, 19 nt, Artificial Sequence
  Description of Artificial Sequence: Synthetic oligonucleotide
ccagacccaaggagcugug

SEQ ID NO: 1666720 - RNA, 19 nt, Artificial Sequence
  Description of Artificial Sequence: Synthetic oligonucleotide
gcuccacguccaaaacaug

SEQ ID NO: 1666721 - RNA, 19 nt, Artificial Sequence
  Description of Artificial Sequence: Synthetic oligonucleotide
gcuuccccucaugggacug

SEQ ID NO: 1666722 - RNA, 19 nt, Artificial Sequence
  Description of Artificial Sequence: Synthetic oligonucleotide
gcgucauggcuagggcucc

SEQ ID NO: 1666723 - RNA, 19 nt, Artificial Sequence
  Description of Artificial Sequence: Synthetic oligonucleotide
gagcucgccccuagcccca

SEQ ID NO: 1666724 - RNA, 19 nt, Artificial Sequence
  Description of Artificial Sequence: Synthetic oligonucleotide
caggcugcauugggaguca

SEQ ID NO: 1666725 - RNA, 19 nt, Artificial Sequence
  Description of Artificial Sequence: Synthetic oligonucleotide
gccacacgugcucgcuggc

SEQ ID NO: 1666726 - RNA, 19 nt, Artificial Sequence
  Description of Artificial Sequence: Synthetic oligonucleotide
caugccacacgugcucgcu

SEQ ID NO: 1666727 - RNA, 19 nt, Artificial Sequence
  Description of Artificial Sequence: Synthetic oligonucleotide
gcuguagagggaucuccau

SEQ ID NO: 1666728 - RNA, 19 nt, Artificial Sequence
  Description of Artificial Sequence: Synthetic oligonucleotide
gagccuucagggugucguu

SEQ ID NO: 1666729 - RNA, 19 nt, Artificial Sequence
  Description of Artificial Sequence: Synthetic oligonucleotide
cuggacuguccgggaaaga

SEQ ID NO: 1666730 - RNA, 19 nt, Artificial Sequence
  Description of Artificial Sequence: Synthetic oligonucleotide
cuucgccaccccgcucaug

SEQ ID NO: 1666731 - RNA, 19 nt, Artificial Sequence
  Description of Artificial Sequence: Synthetic oligonucleotide
ugcuccgagcucgccccua

SEQ ID NO: 1666732 - RNA, 19 nt, Artificial Sequence
  Description of Artificial Sequence: Synthetic oligonucleotide
ccaaggcugagagagcugu

SEQ ID NO: 1666733 - RNA, 19 nt, Artificial Sequence
  Description of Artificial Sequence: Synthetic oligonucleotide
ccccgcucaugagaacugc

SEQ ID NO: 1666734 - RNA, 19 nt, Artificial Sequence
  Description of Artificial Sequence: Synthetic oligonucleotide
ggcuccucgagcugggcuu

SEQ ID NO: 1666735 - RNA, 19 nt, Artificial Sequence
  Description of Artificial Sequence: Synthetic oligonucleotide
ggcugcauugggagucaca

SEQ ID NO: 1666736 - RNA, 19 nt, Artificial Sequence
  Description of Artificial Sequence: Synthetic oligonucleotide
ccggcgaguucuccugcac

SEQ ID NO: 1666737 - RNA, 19 nt, Artificial Sequence
  Description of Artificial Sequence: Synthetic oligonucleotide
gcguugggauccgguguag

SEQ ID NO: 1666738 - RNA, 19 nt, Artificial Sequence
  Description of Artificial Sequence: Synthetic oligonucleotide
gggugacaggcuggggcac

SEQ ID NO: 1666739 - RNA, 19 nt, Artificial Sequence
  Description of Artificial Sequence: Synthetic oligonucleotide
cccugcggaagcugcagaa

SEQ ID NO: 1666740 - RNA, 19 nt, Artificial Sequence
  Description of Artificial Sequence: Synthetic oligonucleotide
gggauccgguguagauacc

SEQ ID NO: 1666741 - RNA, 19 nt, Artificial Sequence
  Description of Artificial Sequence: Synthetic oligonucleotide
cugcugggccggcgaguuc

SEQ ID NO: 1666742 - RNA, 19 nt, Artificial Sequence
  Description of Artificial Sequence: Synthetic oligonucleotide
cagcagcgucauggcuagg

SEQ ID NO: 1666743 - RNA, 19 nt, Artificial Sequence
  Description of Artificial Sequence: Synthetic oligonucleotide
gcccgucuucuggugagga

SEQ ID NO: 1666744 - RNA, 19 nt, Artificial Sequence
  Description of Artificial Sequence: Synthetic oligonucleotide
ccugaccacguggcuucgc

SEQ ID NO: 1666745 - RNA, 19 nt, Artificial Sequence
  Description of Artificial Sequence: Synthetic oligonucleotide
ggccgccucacauguugcu

SEQ ID NO: 1666746 - RNA, 19 nt, Artificial Sequence
  Description of Artificial Sequence: Synthetic oligonucleotide
ccaccccgcucaugagaac

SEQ ID NO: 1666747 - RNA, 19 nt, Artificial Sequence
  Description of Artificial Sequence: Synthetic oligonucleotide
cgugcucgcuggcccugcg

SEQ ID NO: 1666748 - RNA, 19 nt, Artificial Sequence
  Description of Artificial Sequence: Synthetic oligonucleotide
ccugcaccccgugcaggug

SEQ ID NO: 1666749 - RNA, 19 nt, Artificial Sequence
  Description of Artificial Sequence: Synthetic oligonucleotide
gccuugagugcccgaucgu

SEQ ID NO: 1666750 - RNA, 19 nt, Artificial Sequence
  Description of Artificial Sequence: Synthetic oligonucleotide
ggcaggagucggacucaga

SEQ ID NO: 1666751 - RNA, 19 nt, Artificial Sequence
  Description of Artificial Sequence: Synthetic oligonucleotide
cucgcaccuucauggucuu

SEQ ID NO: 1666752 - RNA, 19 nt, Artificial Sequence
  Description of Artificial Sequence: Synthetic oligonucleotide
cccugaccacguggcuucg

SEQ ID NO: 1666753 - RNA, 19 nt, Artificial Sequence
  Description of Artificial Sequence: Synthetic oligonucleotide
cccgcucaugagaacugcu

SEQ ID NO: 1666754 - RNA, 19 nt, Artificial Sequence
  Description of Artificial Sequence: Synthetic oligonucleotide
agcucgccccuagccccau

SEQ ID NO: 1666755 - RNA, 19 nt, Artificial Sequence
  Description of Artificial Sequence: Synthetic oligonucleotide
gggcugcguugggauccgg

SEQ ID NO: 1666756 - RNA, 19 nt, Artificial Sequence
  Description of Artificial Sequence: Synthetic oligonucleotide
ggcugcguugggauccggu

SEQ ID NO: 1666757 - RNA, 19 nt, Artificial Sequence
  Description of Artificial Sequence: Synthetic oligonucleotide
cccuggccgccucacaugu

SEQ ID NO: 1666758 - RNA, 19 nt, Artificial Sequence
  Description of Artificial Sequence: Synthetic oligonucleotide
ggccggccugcugggccgg

SEQ ID NO: 1666759 - RNA, 19 nt, Artificial Sequence
  Description of Artificial Sequence: Synthetic oligonucleotide
ccucucgcaccuucauggu

SEQ ID NO: 1666760 - RNA, 19 nt, Artificial Sequence
  Description of Artificial Sequence: Synthetic oligonucleotide
cgucauggcuagggcuccc

SEQ ID NO: 1666761 - RNA, 19 nt, Artificial Sequence
  Description of Artificial Sequence: Synthetic oligonucleotide
gcucgccccuagccccaug

SEQ ID NO: 1666762 - RNA, 19 nt, Artificial Sequence
  Description of Artificial Sequence: Synthetic oligonucleotide
cguugggauccgguguaga

SEQ ID NO: 1666763 - RNA, 19 nt, Artificial Sequence
  Description of Artificial Sequence: Synthetic oligonucleotide
ccggcaggagucggacuca

SEQ ID NO: 1666764 - RNA, 19 nt, Artificial Sequence
  Description of Artificial Sequence: Synthetic oligonucleotide
cccgucuucuggugaggau

SEQ ID NO: 1666765 - RNA, 19 nt, Artificial Sequence
  Description of Artificial Sequence: Synthetic oligonucleotide
gggccuccauguagucacu

SEQ ID NO: 1666766 - RNA, 19 nt, Artificial Sequence
  Description of Artificial Sequence: Synthetic oligonucleotide
ccuggccgccucacauguu

SEQ ID NO: 1666767 - RNA, 19 nt, Artificial Sequence
  Description of Artificial Sequence: Synthetic oligonucleotide
auaauaguaaaaucccagc

SEQ ID NO: 1666768 - RNA, 19 nt, Artificial Sequence
  Description of Artificial Sequence: Synthetic oligonucleotide
auaguaaaaucccagccac

SEQ ID NO: 1666769 - RNA, 19 nt, Artificial Sequence
  Description of Artificial Sequence: Synthetic oligonucleotide
acuaauuacugccaaauug

SEQ ID NO: 1666770 - RNA, 19 nt, Artificial Sequence
  Description of Artificial Sequence: Synthetic oligonucleotide
acagaaguugcucagucgc

SEQ ID NO: 1666771 - RNA, 19 nt, Artificial Sequence
  Description of Artificial Sequence: Synthetic oligonucleotide
uaauaguaaaaucccagcc

SEQ ID NO: 1666772 - RNA, 19 nt, Artificial Sequence
  Description of Artificial Sequence: Synthetic oligonucleotide
aaugcuaagccagugcccc

SEQ ID NO: 1666773 - RNA, 19 nt, Artificial Sequence
  Description of Artificial Sequence: Synthetic oligonucleotide
uguagaauccucuaggccu

SEQ ID NO: 1666774 - RNA, 19 nt, Artificial Sequence
  Description of Artificial Sequence: Synthetic oligonucleotide
auuacugccaaauugugcu

SEQ ID NO: 1666775 - RNA, 19 nt, Artificial Sequence
  Description of Artificial Sequence: Synthetic oligonucleotide
uucugugugaccaagcccc

SEQ ID NO: 1666776 - RNA, 19 nt, Artificial Sequence
  Description of Artificial Sequence: Synthetic oligonucleotide
ucuuuaucaggccacaaca

SEQ ID NO: 1666777 - RNA, 19 nt, Artificial Sequence
  Description of Artificial Sequence: Synthetic oligonucleotide
gagcauaauaguaaaaucc

SEQ ID NO: 1666778 - RNA, 19 nt, Artificial Sequence
  Description of Artificial Sequence: Synthetic oligonucleotide
cuugucacuaauuacugcc

SEQ ID NO: 1666779 - RNA, 19 nt, Artificial Sequence
  Description of Artificial Sequence: Synthetic oligonucleotide
agcauaauaguaaaauccc

SEQ ID NO: 1666780 - RNA, 19 nt, Artificial Sequence
  Description of Artificial Sequence: Synthetic oligonucleotide
aaaacauagaacaucuucu

SEQ ID NO: 1666781 - RNA, 19 nt, Artificial Sequence
  Description of Artificial Sequence: Synthetic oligonucleotide
aaacauagaacaucuucug

SEQ ID NO: 1666782 - RNA, 19 nt, Artificial Sequence
  Description of Artificial Sequence: Synthetic oligonucleotide
guaucugucaaugaggcgg

SEQ ID NO: 1666783 - RNA, 19 nt, Artificial Sequence
  Description of Artificial Sequence: Synthetic oligonucleotide
cauuggauccacaugacag

SEQ ID NO: 1666784 - RNA, 19 nt, Artificial Sequence
  Description of Artificial Sequence: Synthetic oligonucleotide
ucggauuggacaaccaagg

SEQ ID NO: 1666785 - RNA, 19 nt, Artificial Sequence
  Description of Artificial Sequence: Synthetic oligonucleotide
uaaugcaugccucagucca

SEQ ID NO: 1666786 - RNA, 19 nt, Artificial Sequence
  Description of Artificial Sequence: Synthetic oligonucleotide
ugagcaaccagaugugucc

SEQ ID NO: 1666787 - RNA, 19 nt, Artificial Sequence
  Description of Artificial Sequence: Synthetic oligonucleotide
aucuuuaucaggccacaac

SEQ ID NO: 1666788 - RNA, 19 nt, Artificial Sequence
  Description of Artificial Sequence: Synthetic oligonucleotide
gauuggacaaccaaggaga

SEQ ID NO: 1666789 - RNA, 19 nt, Artificial Sequence
  Description of Artificial Sequence: Synthetic oligonucleotide
agacacaggacuugugcgc

SEQ ID NO: 1666790 - RNA, 19 nt, Artificial Sequence
  Description of Artificial Sequence: Synthetic oligonucleotide
ugaccuauuucugugagca

SEQ ID NO: 1666791 - RNA, 19 nt, Artificial Sequence
  Description of Artificial Sequence: Synthetic oligonucleotide
uugauggugacugaagagc

SEQ ID NO: 1666792 - RNA, 19 nt, Artificial Sequence
  Description of Artificial Sequence: Synthetic oligonucleotide
ugagcauaauaguaaaauc

SEQ ID NO: 1666793 - RNA, 19 nt, Artificial Sequence
  Description of Artificial Sequence: Synthetic oligonucleotide
uuaucaggccacaacaaaa

SEQ ID NO: 1666794 - RNA, 19 nt, Artificial Sequence
  Description of Artificial Sequence: Synthetic oligonucleotide
aguaaaaucccagccacag

SEQ ID NO: 1666795 - RNA, 19 nt, Artificial Sequence
  Description of Artificial Sequence: Synthetic oligonucleotide
gaaggaggaacgcagccag

SEQ ID NO: 1666796 - RNA, 19 nt, Artificial Sequence
  Description of Artificial Sequence: Synthetic oligonucleotide
agaaggugagcugugaauc

SEQ ID NO: 1666797 - RNA, 19 nt, Artificial Sequence
  Description of Artificial Sequence: Synthetic oligonucleotide
uugugcgccaugcacauug

SEQ ID NO: 1666798 - RNA, 19 nt, Artificial Sequence
  Description of Artificial Sequence: Synthetic oligonucleotide
agaugguaaaacauagaac

SEQ ID NO: 1666799 - RNA, 19 nt, Artificial Sequence
  Description of Artificial Sequence: Synthetic oligonucleotide
uguaguggcuaaugcaugc

SEQ ID NO: 1666800 - RNA, 19 nt, Artificial Sequence
  Description of Artificial Sequence: Synthetic oligonucleotide
aacacauacugcuguagaa

SEQ ID NO: 1666801 - RNA, 19 nt, Artificial Sequence
  Description of Artificial Sequence: Synthetic oligonucleotide
aaguuacugacugucucuc

SEQ ID NO: 1666802 - RNA, 19 nt, Artificial Sequence
  Description of Artificial Sequence: Synthetic oligonucleotide
cacaagaaaucuuggcugc

SEQ ID NO: 1666803 - RNA, 19 nt, Artificial Sequence
  Description of Artificial Sequence: Synthetic oligonucleotide
aaugaggcggaguggucag

SEQ ID NO: 1666804 - RNA, 19 nt, Artificial Sequence
  Description of Artificial Sequence: Synthetic oligonucleotide
ugaccaagccccaacugcc

SEQ ID NO: 1666805 - RNA, 19 nt, Artificial Sequence
  Description of Artificial Sequence: Synthetic oligonucleotide
ggagauuccaaccuccucc

SEQ ID NO: 1666806 - RNA, 19 nt, Artificial Sequence
  Description of Artificial Sequence: Synthetic oligonucleotide
gaccuugacauccuggcac

SEQ ID NO: 1666807 - RNA, 19 nt, Artificial Sequence
  Description of Artificial Sequence: Synthetic oligonucleotide
gaaaucuuggcugcuccgg

SEQ ID NO: 1666808 - RNA, 19 nt, Artificial Sequence
  Description of Artificial Sequence: Synthetic oligonucleotide
aguuacugacugucucucc

SEQ ID NO: 1666809 - RNA, 19 nt, Artificial Sequence
  Description of Artificial Sequence: Synthetic oligonucleotide
uguaucugucaaugaggcg

SEQ ID NO: 1666810 - RNA, 19 nt, Artificial Sequence
  Description of Artificial Sequence: Synthetic oligonucleotide
ucuccuguaucugucaaug

SEQ ID NO: 1666811 - RNA, 19 nt, Artificial Sequence
  Description of Artificial Sequence: Synthetic oligonucleotide
agaaaucuuggcugcuccg

SEQ ID NO: 1666812 - RNA, 19 nt, Artificial Sequence
  Description of Artificial Sequence: Synthetic oligonucleotide
ugaaucuugcuuguggggu

SEQ ID NO: 1666813 - RNA, 19 nt, Artificial Sequence
  Description of Artificial Sequence: Synthetic oligonucleotide
cugucaaugaggcggagug

SEQ ID NO: 1666814 - RNA, 19 nt, Artificial Sequence
  Description of Artificial Sequence: Synthetic oligonucleotide
acgaggaggauucuugaug

SEQ ID NO: 1666815 - RNA, 19 nt, Artificial Sequence
  Description of Artificial Sequence: Synthetic oligonucleotide
cuaauuacugccaaauugu

SEQ ID NO: 1666816 - RNA, 19 nt, Artificial Sequence
  Description of Artificial Sequence: Synthetic oligonucleotide
uugucacuaauuacugcca

SEQ ID NO: 1666817 - RNA, 19 nt, Artificial Sequence
  Description of Artificial Sequence: Synthetic oligonucleotide
ucggccagaagaaugcuaa

SEQ ID NO: 1666818 - RNA, 19 nt, Artificial Sequence
  Description of Artificial Sequence: Synthetic oligonucleotide
auccacaugacagaacuug

SEQ ID NO: 1666819 - RNA, 19 nt, Artificial Sequence
  Description of Artificial Sequence: Synthetic oligonucleotide
ucacuaauuacugccaaau

SEQ ID NO: 1666820 - RNA, 19 nt, Artificial Sequence
  Description of Artificial Sequence: Synthetic oligonucleotide
aacaaaagacuuccuccau

SEQ ID NO: 1666821 - RNA, 19 nt, Artificial Sequence
  Description of Artificial Sequence: Synthetic oligonucleotide
guugaaguuacugacuguc

SEQ ID NO: 1666822 - RNA, 19 nt, Artificial Sequence
  Description of Artificial Sequence: Synthetic oligonucleotide
cuugaccuauuucugugag

SEQ ID NO: 1666823 - RNA, 19 nt, Artificial Sequence
  Description of Artificial Sequence: Synthetic oligonucleotide
uguuccgggccccagacau

SEQ ID NO: 1666824 - RNA, 19 nt, Artificial Sequence
  Description of Artificial Sequence: Synthetic oligonucleotide
ucaggaucccgucaacaac

SEQ ID NO: 1666825 - RNA, 19 nt, Artificial Sequence
  Description of Artificial Sequence: Synthetic oligonucleotide
ugcggcacaccuaacuggc

SEQ ID NO: 1666826 - RNA, 19 nt, Artificial Sequence
  Description of Artificial Sequence: Synthetic oligonucleotide
uccacaugacagaacuuga

SEQ ID NO: 1666827 - RNA, 19 nt, Artificial Sequence
  Description of Artificial Sequence: Synthetic oligonucleotide
cuguagaauccucuaggcc

SEQ ID NO: 1666828 - RNA, 19 nt, Artificial Sequence
  Description of Artificial Sequence: Synthetic oligonucleotide
ugugagcauaauaguaaaa

SEQ ID NO: 1666829 - RNA, 19 nt, Artificial Sequence
  Description of Artificial Sequence: Synthetic oligonucleotide
gaccacacaucugcgaggg

SEQ ID NO: 1666830 - RNA, 19 nt, Artificial Sequence
  Description of Artificial Sequence: Synthetic oligonucleotide
aagcagcgggcaucuauuc

SEQ ID NO: 1666831 - RNA, 19 nt, Artificial Sequence
  Description of Artificial Sequence: Synthetic oligonucleotide
uaucugucaaugaggcgga

SEQ ID NO: 1666832 - RNA, 19 nt, Artificial Sequence
  Description of Artificial Sequence: Synthetic oligonucleotide
ucuaggccugcccagcaca

SEQ ID NO: 1666833 - RNA, 19 nt, Artificial Sequence
  Description of Artificial Sequence: Synthetic oligonucleotide
accccaagcgaagagcgcc

SEQ ID NO: 1666834 - RNA, 19 nt, Artificial Sequence
  Description of Artificial Sequence: Synthetic oligonucleotide
ccugugacacucuugauac

SEQ ID NO: 1666835 - RNA, 19 nt, Artificial Sequence
  Description of Artificial Sequence: Synthetic oligonucleotide
cuaaugcaugccucagucc

SEQ ID NO: 1666836 - RNA, 19 nt, Artificial Sequence
  Description of Artificial Sequence: Synthetic oligonucleotide
ugacugucucuccuuccgg

SEQ ID NO: 1666837 - RNA, 19 nt, Artificial Sequence
  Description of Artificial Sequence: Synthetic oligonucleotide
gaggcaaagacacacugcu

SEQ ID NO: 1666838 - RNA, 19 nt, Artificial Sequence
  Description of Artificial Sequence: Synthetic oligonucleotide
gccagaagaaugcuaagcc

SEQ ID NO: 1666839 - RNA, 19 nt, Artificial Sequence
  Description of Artificial Sequence: Synthetic oligonucleotide
ugccauguucguuccagcc

SEQ ID NO: 1666840 - RNA, 19 nt, Artificial Sequence
  Description of Artificial Sequence: Synthetic oligonucleotide
caaccagauguguccaucc

SEQ ID NO: 1666841 - RNA, 19 nt, Artificial Sequence
  Description of Artificial Sequence: Synthetic oligonucleotide
ucccuagcugaccauaguc

SEQ ID NO: 1666842 - RNA, 19 nt, Artificial Sequence
  Description of Artificial Sequence: Synthetic oligonucleotide
ugucggauuggacaaccaa

SEQ ID NO: 1666843 - RNA, 19 nt, Artificial Sequence
  Description of Artificial Sequence: Synthetic oligonucleotide
uucauccugaaagcagcgg

SEQ ID NO: 1666844 - RNA, 19 nt, Artificial Sequence
  Description of Artificial Sequence: Synthetic oligonucleotide
uaguaaaaucccagccaca

SEQ ID NO: 1666845 - RNA, 19 nt, Artificial Sequence
  Description of Artificial Sequence: Synthetic oligonucleotide
gucggauuggacaaccaag

SEQ ID NO: 1666846 - RNA, 19 nt, Artificial Sequence
  Description of Artificial Sequence: Synthetic oligonucleotide
cuccggucaggcaacacag

SEQ ID NO: 1666847 - RNA, 19 nt, Artificial Sequence
  Description of Artificial Sequence: Synthetic oligonucleotide
aaggccaagcugcccguag

SEQ ID NO: 1666848 - RNA, 19 nt, Artificial Sequence
  Description of Artificial Sequence: Synthetic oligonucleotide
aaccagauguguccaucca

SEQ ID NO: 1666849 - RNA, 19 nt, Artificial Sequence
  Description of Artificial Sequence: Synthetic oligonucleotide
cacacaucugcgagggccg

SEQ ID NO: 1666850 - RNA, 19 nt, Artificial Sequence
  Description of Artificial Sequence: Synthetic oligonucleotide
acaucugcgagggccgugc

SEQ ID NO: 1666851 - RNA, 19 nt, Artificial Sequence
  Description of Artificial Sequence: Synthetic oligonucleotide
gaauccucuaggccugccc

SEQ ID NO: 1666852 - RNA, 19 nt, Artificial Sequence
  Description of Artificial Sequence: Synthetic oligonucleotide
ucgaccccagguaaacacc

SEQ ID NO: 1666853 - RNA, 19 nt, Artificial Sequence
  Description of Artificial Sequence: Synthetic oligonucleotide
aggagauuccaaccuccuc

SEQ ID NO: 1666854 - RNA, 19 nt, Artificial Sequence
  Description of Artificial Sequence: Synthetic oligonucleotide
cagaggcaaagacacacug

SEQ ID NO: 1666855 - RNA, 19 nt, Artificial Sequence
  Description of Artificial Sequence: Synthetic oligonucleotide
uugaccuauuucugugagc

SEQ ID NO: 1666856 - RNA, 19 nt, Artificial Sequence
  Description of Artificial Sequence: Synthetic oligonucleotide
augccauguucguuccagc

SEQ ID NO: 1666857 - RNA, 19 nt, Artificial Sequence
  Description of Artificial Sequence: Synthetic oligonucleotide
ugucaaugaggcggagugg

SEQ ID NO: 1666858 - RNA, 19 nt, Artificial Sequence
  Description of Artificial Sequence: Synthetic oligonucleotide
caacugcccaucuuuauca

SEQ ID NO: 1666859 - RNA, 19 nt, Artificial Sequence
  Description of Artificial Sequence: Synthetic oligonucleotide
acuugaccuauuucuguga

SEQ ID NO: 1666860 - RNA, 19 nt, Artificial Sequence
  Description of Artificial Sequence: Synthetic oligonucleotide
ccacaagaaaucuuggcug

SEQ ID NO: 1666861 - RNA, 19 nt, Artificial Sequence
  Description of Artificial Sequence: Synthetic oligonucleotide
agguucacagaaguugcuc

SEQ ID NO: 1666862 - RNA, 19 nt, Artificial Sequence
  Description of Artificial Sequence: Synthetic oligonucleotide
auacagcucuccuguaucu

SEQ ID NO: 1666863 - RNA, 19 nt, Artificial Sequence
  Description of Artificial Sequence: Synthetic oligonucleotide
gaaguuacugacugucucu

SEQ ID NO: 1666864 - RNA, 19 nt, Artificial Sequence
  Description of Artificial Sequence: Synthetic oligonucleotide
caugccauguucguuccag

SEQ ID NO: 1666865 - RNA, 19 nt, Artificial Sequence
  Description of Artificial Sequence: Synthetic oligonucleotide
uguagaugaccuugacauc

SEQ ID NO: 1666866 - RNA, 19 nt, Artificial Sequence
  Description of Artificial Sequence: Synthetic oligonucleotide
caaauugugcucugagcca

SEQ ID NO: 1666867 - RNA, 19 nt, Artificial Sequence
  Description of Artificial Sequence: Synthetic oligonucleotide
gcuaaugcaugccucaguc

SEQ ID NO: 1666868 - RNA, 19 nt, Artificial Sequence
  Description of Artificial Sequence: Synthetic oligonucleotide
gcuguagaauccucuaggc

SEQ ID NO: 1666869 - RNA, 19 nt, Artificial Sequence
  Description of Artificial Sequence: Synthetic oligonucleotide
gaucccgucaacaacacau

SEQ ID NO: 1666870 - RNA, 19 nt, Artificial Sequence
  Description of Artificial Sequence: Synthetic oligonucleotide
caagcgaagagcgccgcgg

SEQ ID NO: 1666871 - RNA, 19 nt, Artificial Sequence
  Description of Artificial Sequence: Synthetic oligonucleotide
uccaaccuccucccuagcu

SEQ ID NO: 1666872 - RNA, 19 nt, Artificial Sequence
  Description of Artificial Sequence: Synthetic oligonucleotide
accccagguaaacaccuug

SEQ ID NO: 1666873 - RNA, 19 nt, Artificial Sequence
  Description of Artificial Sequence: Synthetic oligonucleotide
cauucugagauucaggguu

SEQ ID NO: 1666874 - RNA, 19 nt, Artificial Sequence
  Description of Artificial Sequence: Synthetic oligonucleotide
gaggaacgcagccagggaa

SEQ ID NO: 1666875 - RNA, 19 nt, Artificial Sequence
  Description of Artificial Sequence: Synthetic oligonucleotide
ugauacacccagguucaca

SEQ ID NO: 1666876 - RNA, 19 nt, Artificial Sequence
  Description of Artificial Sequence: Synthetic oligonucleotide
uacugccaaauugugcucu

SEQ ID NO: 1666877 - RNA, 19 nt, Artificial Sequence
  Description of Artificial Sequence: Synthetic oligonucleotide
cuuuaucaggccacaacaa

SEQ ID NO: 1666878 - RNA, 19 nt, Artificial Sequence
  Description of Artificial Sequence: Synthetic oligonucleotide
acacauacugcuguagaau

SEQ ID NO: 1666879 - RNA, 19 nt, Artificial Sequence
  Description of Artificial Sequence: Synthetic oligonucleotide
uugcaccccaagcgaagag

SEQ ID NO: 1666880 - RNA, 19 nt, Artificial Sequence
  Description of Artificial Sequence: Synthetic oligonucleotide
cagcacacaagcgucggcc

SEQ ID NO: 1666881 - RNA, 19 nt, Artificial Sequence
  Description of Artificial Sequence: Synthetic oligonucleotide
gguucacagaaguugcuca

SEQ ID NO: 1666882 - RNA, 19 nt, Artificial Sequence
  Description of Artificial Sequence: Synthetic oligonucleotide
gcugacauaaggccaagga

SEQ ID NO: 1666883 - RNA, 19 nt, Artificial Sequence
  Description of Artificial Sequence: Synthetic oligonucleotide
gauuccaaccuccucccua

SEQ ID NO: 1666884 - RNA, 19 nt, Artificial Sequence
  Description of Artificial Sequence: Synthetic oligonucleotide
aagagccuguacuggggau

SEQ ID NO: 1666885 - RNA, 19 nt, Artificial Sequence
  Description of Artificial Sequence: Synthetic oligonucleotide
cacaugccauguucguucc

SEQ ID NO: 1666886 - RNA, 19 nt, Artificial Sequence
  Description of Artificial Sequence: Synthetic oligonucleotide
gcgccaugcacauugcucc

SEQ ID NO: 1666887 - RNA, 19 nt, Artificial Sequence
  Description of Artificial Sequence: Synthetic oligonucleotide
acugccaaauugugcucug

SEQ ID NO: 1666888 - RNA, 19 nt, Artificial Sequence
  Description of Artificial Sequence: Synthetic oligonucleotide
ucugucaaugaggcggagu

SEQ ID NO: 1666889 - RNA, 19 nt, Artificial Sequence
  Description of Artificial Sequence: Synthetic oligonucleotide
ccauguucguuccagcccc

SEQ ID NO: 1666890 - RNA, 19 nt, Artificial Sequence
  Description of Artificial Sequence: Synthetic oligonucleotide
ucugugugaccaagcccca

SEQ ID NO: 1666891 - RNA, 19 nt, Artificial Sequence
  Description of Artificial Sequence: Synthetic oligonucleotide
ugcccaucuuuaucaggcc

SEQ ID NO: 1666892 - RNA, 19 nt, Artificial Sequence
  Description of Artificial Sequence: Synthetic oligonucleotide
uuacugccaaauugugcuc

SEQ ID NO: 1666893 - RNA, 19 nt, Artificial Sequence
  Description of Artificial Sequence: Synthetic oligonucleotide
agcugugaaucuugcuugu

SEQ ID NO: 1666894 - RNA, 19 nt, Artificial Sequence
  Description of Artificial Sequence: Synthetic oligonucleotide
caguuucugucugagcaac

SEQ ID NO: 1666895 - RNA, 19 nt, Artificial Sequence
  Description of Artificial Sequence: Synthetic oligonucleotide
ucaaugaggcggagugguc

SEQ ID NO: 1666896 - RNA, 19 nt, Artificial Sequence
  Description of Artificial Sequence: Synthetic oligonucleotide
agucugcucgaccccaggu

SEQ ID NO: 1666897 - RNA, 19 nt, Artificial Sequence
  Description of Artificial Sequence: Synthetic oligonucleotide
agaauccucuaggccugcc

SEQ ID NO: 1666898 - RNA, 19 nt, Artificial Sequence
  Description of Artificial Sequence: Synthetic oligonucleotide
ugcccguagcuauuugcac

SEQ ID NO: 1666899 - RNA, 19 nt, Artificial Sequence
  Description of Artificial Sequence: Synthetic oligonucleotide
ugugcgccaugcacauugc

SEQ ID NO: 1666900 - RNA, 19 nt, Artificial Sequence
  Description of Artificial Sequence: Synthetic oligonucleotide
guaguggcuaaugcaugcc

SEQ ID NO: 1666901 - RNA, 19 nt, Artificial Sequence
  Description of Artificial Sequence: Synthetic oligonucleotide
agcacacaagcgucggcca

SEQ ID NO: 1666902 - RNA, 19 nt, Artificial Sequence
  Description of Artificial Sequence: Synthetic oligonucleotide
aggaacgcagccagggaag

SEQ ID NO: 1666903 - RNA, 19 nt, Artificial Sequence
  Description of Artificial Sequence: Synthetic oligonucleotide
ccuagcugaccauagucug

SEQ ID NO: 1666904 - RNA, 19 nt, Artificial Sequence
  Description of Artificial Sequence: Synthetic oligonucleotide
agcagcgggcaucuauucu

SEQ ID NO: 1666905 - RNA, 19 nt, Artificial Sequence
  Description of Artificial Sequence: Synthetic oligonucleotide
ugaggcggaguggucagga

SEQ ID NO: 1666906 - RNA, 19 nt, Artificial Sequence
  Description of Artificial Sequence: Synthetic oligonucleotide
aucugcgagggccgugcgg

SEQ ID NO: 1666907 - RNA, 19 nt, Artificial Sequence
  Description of Artificial Sequence: Synthetic oligonucleotide
uggcuaaugcaugccucag

SEQ ID NO: 1666908 - RNA, 19 nt, Artificial Sequence
  Description of Artificial Sequence: Synthetic oligonucleotide
gcuugcagaugguaaaaca

SEQ ID NO: 1666909 - RNA, 19 nt, Artificial Sequence
  Description of Artificial Sequence: Synthetic oligonucleotide
uuacugacugucucuccuu

SEQ ID NO: 1666910 - RNA, 19 nt, Artificial Sequence
  Description of Artificial Sequence: Synthetic oligonucleotide
gacauccuggcacggcuca

SEQ ID NO: 1666911 - RNA, 19 nt, Artificial Sequence
  Description of Artificial Sequence: Synthetic oligonucleotide
caagaaaucuuggcugcuc

SEQ ID NO: 1666912 - RNA, 19 nt, Artificial Sequence
  Description of Artificial Sequence: Synthetic oligonucleotide
aaggaguggccagccccac

SEQ ID NO: 1666913 - RNA, 19 nt, Artificial Sequence
  Description of Artificial Sequence: Synthetic oligonucleotide
cagauguguccauccacuc

SEQ ID NO: 1666914 - RNA, 19 nt, Artificial Sequence
  Description of Artificial Sequence: Synthetic oligonucleotide
ggaccacacaucugcgagg

SEQ ID NO: 1666915 - RNA, 19 nt, Artificial Sequence
  Description of Artificial Sequence: Synthetic oligonucleotide
ggacuugugcgccaugcac

SEQ ID NO: 1666916 - RNA, 19 nt, Artificial Sequence
  Description of Artificial Sequence: Synthetic oligonucleotide
agcgucggccagaagaaug

SEQ ID NO: 1666917 - RNA, 19 nt, Artificial Sequence
  Description of Artificial Sequence: Synthetic oligonucleotide
cccguagcuauuugcaccc

SEQ ID NO: 1666918 - RNA, 19 nt, Artificial Sequence
  Description of Artificial Sequence: Synthetic oligonucleotide
uuccgggccccagacauac

SEQ ID NO: 1666919 - RNA, 19 nt, Artificial Sequence
  Description of Artificial Sequence: Synthetic oligonucleotide
gcgggcaucuauucucugg

SEQ ID NO: 1666920 - RNA, 19 nt, Artificial Sequence
  Description of Artificial Sequence: Synthetic oligonucleotide
gucacuaauuacugccaaa

SEQ ID NO: 1666921 - RNA, 19 nt, Artificial Sequence
  Description of Artificial Sequence: Synthetic oligonucleotide
agcugacauaaggccaagg

SEQ ID NO: 1666922 - RNA, 19 nt, Artificial Sequence
  Description of Artificial Sequence: Synthetic oligonucleotide
gcccguagcuauuugcacc

SEQ ID NO: 1666923 - RNA, 19 nt, Artificial Sequence
  Description of Artificial Sequence: Synthetic oligonucleotide
acaagaaaucuuggcugcu

SEQ ID NO: 1666924 - RNA, 19 nt, Artificial Sequence
  Description of Artificial Sequence: Synthetic oligonucleotide
ugcuaagccagugccccac

SEQ ID NO: 1666925 - RNA, 19 nt, Artificial Sequence
  Description of Artificial Sequence: Synthetic oligonucleotide
caagcgucggccagaagaa

SEQ ID NO: 1666926 - RNA, 19 nt, Artificial Sequence
  Description of Artificial Sequence: Synthetic oligonucleotide
cugcccguagcuauuugca

SEQ ID NO: 1666927 - RNA, 19 nt, Artificial Sequence
  Description of Artificial Sequence: Synthetic oligonucleotide
aggaucccgucaacaacac

SEQ ID NO: 1666928 - RNA, 19 nt, Artificial Sequence
  Description of Artificial Sequence: Synthetic oligonucleotide
aggacuugugcgccaugca

SEQ ID NO: 1666929 - RNA, 19 nt, Artificial Sequence
  Description of Artificial Sequence: Synthetic oligonucleotide
caaugaggcggagugguca

SEQ ID NO: 1666930 - RNA, 19 nt, Artificial Sequence
  Description of Artificial Sequence: Synthetic oligonucleotide
cuaagccagugccccacug

SEQ ID NO: 1666931 - RNA, 19 nt, Artificial Sequence
  Description of Artificial Sequence: Synthetic oligonucleotide
caugcuuguuccgggcccc

SEQ ID NO: 1666932 - RNA, 19 nt, Artificial Sequence
  Description of Artificial Sequence: Synthetic oligonucleotide
uccggucaggcaacacaga

SEQ ID NO: 1666933 - RNA, 19 nt, Artificial Sequence
  Description of Artificial Sequence: Synthetic oligonucleotide
ucgcuggggcagaagcaca

SEQ ID NO: 1666934 - RNA, 19 nt, Artificial Sequence
  Description of Artificial Sequence: Synthetic oligonucleotide
ugcucgaccccagguaaac

SEQ ID NO: 1666935 - RNA, 19 nt, Artificial Sequence
  Description of Artificial Sequence: Synthetic oligonucleotide
gcugcccguagcuauuugc

SEQ ID NO: 1666936 - RNA, 19 nt, Artificial Sequence
  Description of Artificial Sequence: Synthetic oligonucleotide
uccucuaggccugcccagc

SEQ ID NO: 1666937 - RNA, 19 nt, Artificial Sequence
  Description of Artificial Sequence: Synthetic oligonucleotide
gacagaacuugaccuauuu

SEQ ID NO: 1666938 - RNA, 19 nt, Artificial Sequence
  Description of Artificial Sequence: Synthetic oligonucleotide
ggaacacacugccacucac

SEQ ID NO: 1666939 - RNA, 19 nt, Artificial Sequence
  Description of Artificial Sequence: Synthetic oligonucleotide
cacaccuaacuggccaaag

SEQ ID NO: 1666940 - RNA, 19 nt, Artificial Sequence
  Description of Artificial Sequence: Synthetic oligonucleotide
gcaugccucaguccagcgg

SEQ ID NO: 1666941 - RNA, 19 nt, Artificial Sequence
  Description of Artificial Sequence: Synthetic oligonucleotide
ccacaugacagaacuugac

SEQ ID NO: 1666942 - RNA, 19 nt, Artificial Sequence
  Description of Artificial Sequence: Synthetic oligonucleotide
gucaaugaggcggaguggu

SEQ ID NO: 1666943 - RNA, 19 nt, Artificial Sequence
  Description of Artificial Sequence: Synthetic oligonucleotide
agauuccaaccuccucccu

SEQ ID NO: 1666944 - RNA, 19 nt, Artificial Sequence
  Description of Artificial Sequence: Synthetic oligonucleotide
cuauucucuggggcagaag

SEQ ID NO: 1666945 - RNA, 19 nt, Artificial Sequence
  Description of Artificial Sequence: Synthetic oligonucleotide
ccggucaggcaacacagag

SEQ ID NO: 1666946 - RNA, 19 nt, Artificial Sequence
  Description of Artificial Sequence: Synthetic oligonucleotide
ccaccugucggauuggaca

SEQ ID NO: 1666947 - RNA, 19 nt, Artificial Sequence
  Description of Artificial Sequence: Synthetic oligonucleotide
gacugucucuccuuccggu

SEQ ID NO: 1666948 - RNA, 19 nt, Artificial Sequence
  Description of Artificial Sequence: Synthetic oligonucleotide
cccacgaggaggauucuug

SEQ ID NO: 1666949 - RNA, 19 nt, Artificial Sequence
  Description of Artificial Sequence: Synthetic oligonucleotide
guagcuauuugcaccccaa

SEQ ID NO: 1666950 - RNA, 19 nt, Artificial Sequence
  Description of Artificial Sequence: Synthetic oligonucleotide
caccugucggauuggacaa

SEQ ID NO: 1666951 - RNA, 19 nt, Artificial Sequence
  Description of Artificial Sequence: Synthetic oligonucleotide
gagcaaccagaugugucca

SEQ ID NO: 1666952 - RNA, 19 nt, Artificial Sequence
  Description of Artificial Sequence: Synthetic oligonucleotide
gugcuggcagcugacauaa

SEQ ID NO: 1666953 - RNA, 19 nt, Artificial Sequence
  Description of Artificial Sequence: Synthetic oligonucleotide
caccccaagcgaagagcgc

SEQ ID NO: 1666954 - RNA, 19 nt, Artificial Sequence
  Description of Artificial Sequence: Synthetic oligonucleotide
cgggcaucuauucucuggg

SEQ ID NO: 1666955 - RNA, 19 nt, Artificial Sequence
  Description of Artificial Sequence: Synthetic oligonucleotide
uagaauccucuaggccugc

SEQ ID NO: 1666956 - RNA, 19 nt, Artificial Sequence
  Description of Artificial Sequence: Synthetic oligonucleotide
accugucggauuggacaac

SEQ ID NO: 1666957 - RNA, 19 nt, Artificial Sequence
  Description of Artificial Sequence: Synthetic oligonucleotide
ggugagcugugaaucuugc

SEQ ID NO: 1666958 - RNA, 19 nt, Artificial Sequence
  Description of Artificial Sequence: Synthetic oligonucleotide
acacaggacuugugcgcca

SEQ ID NO: 1666959 - RNA, 19 nt, Artificial Sequence
  Description of Artificial Sequence: Synthetic oligonucleotide
agcaaccagauguguccau

SEQ ID NO: 1666960 - RNA, 19 nt, Artificial Sequence
  Description of Artificial Sequence: Synthetic oligonucleotide
cuccuguaucugucaauga

SEQ ID NO: 1666961 - RNA, 19 nt, Artificial Sequence
  Description of Artificial Sequence: Synthetic oligonucleotide
ccagcggcgacacaaacaa

SEQ ID NO: 1666962 - RNA, 19 nt, Artificial Sequence
  Description of Artificial Sequence: Synthetic oligonucleotide
ccaugcuuguuccgggccc

SEQ ID NO: 1666963 - RNA, 19 nt, Artificial Sequence
  Description of Artificial Sequence: Synthetic oligonucleotide
gaguggccagccccacagc

SEQ ID NO: 1666964 - RNA, 19 nt, Artificial Sequence
  Description of Artificial Sequence: Synthetic oligonucleotide
agcgggcaucuauucucug

SEQ ID NO: 1666965 - RNA, 19 nt, Artificial Sequence
  Description of Artificial Sequence: Synthetic oligonucleotide
ccaugcacauugcuccgcc

SEQ ID NO: 1666966 - RNA, 19 nt, Artificial Sequence
  Description of Artificial Sequence: Synthetic oligonucleotide
gaagagcgccgcggcagcc

SEQ ID NO: 1666967 - RNA, 19 nt, Artificial Sequence
  Description of Artificial Sequence: Synthetic oligonucleotide
acaugccauguucguucca

SEQ ID NO: 1666968 - RNA, 19 nt, Artificial Sequence
  Description of Artificial Sequence: Synthetic oligonucleotide
caucugcgagggccgugcg

SEQ ID NO: 1666969 - RNA, 19 nt, Artificial Sequence
  Description of Artificial Sequence: Synthetic oligonucleotide
ugcuggcagcugacauaag

SEQ ID NO: 1666970 - RNA, 19 nt, Artificial Sequence
  Description of Artificial Sequence: Synthetic oligonucleotide
augaggcggaguggucagg

SEQ ID NO: 1666971 - RNA, 19 nt, Artificial Sequence
  Description of Artificial Sequence: Synthetic oligonucleotide
gucugcucgaccccaggua

SEQ ID NO: 1666972 - RNA, 19 nt, Artificial Sequence
  Description of Artificial Sequence: Synthetic oligonucleotide
auguucguuccagccccag

SEQ ID NO: 1666973 - RNA, 19 nt, Artificial Sequence
  Description of Artificial Sequence: Synthetic oligonucleotide
ccugucggauuggacaacc

SEQ ID NO: 1666974 - RNA, 19 nt, Artificial Sequence
  Description of Artificial Sequence: Synthetic oligonucleotide
gccuccgagacacaggacu

SEQ ID NO: 1666975 - RNA, 19 nt, Artificial Sequence
  Description of Artificial Sequence: Synthetic oligonucleotide
ccucccuagcugaccauag

SEQ ID NO: 1666976 - RNA, 19 nt, Artificial Sequence
  Description of Artificial Sequence: Synthetic oligonucleotide
caugcacauugcuccgcca

SEQ ID NO: 1666977 - RNA, 19 nt, Artificial Sequence
  Description of Artificial Sequence: Synthetic oligonucleotide
gcccaucuuuaucaggcca

SEQ ID NO: 1666978 - RNA, 19 nt, Artificial Sequence
  Description of Artificial Sequence: Synthetic oligonucleotide
gcgucggccagaagaaugc

SEQ ID NO: 1666979 - RNA, 19 nt, Artificial Sequence
  Description of Artificial Sequence: Synthetic oligonucleotide
aggaguggccagccccaca

SEQ ID NO: 1666980 - RNA, 19 nt, Artificial Sequence
  Description of Artificial Sequence: Synthetic oligonucleotide
gcgaagagcgccgcggcag

SEQ ID NO: 1666981 - RNA, 19 nt, Artificial Sequence
  Description of Artificial Sequence: Synthetic oligonucleotide
aagcgucggccagaagaau

SEQ ID NO: 1666982 - RNA, 19 nt, Artificial Sequence
  Description of Artificial Sequence: Synthetic oligonucleotide
caaaggcauuggauccaca

SEQ ID NO: 1666983 - RNA, 19 nt, Artificial Sequence
  Description of Artificial Sequence: Synthetic oligonucleotide
ccgggccccagacauacag

SEQ ID NO: 1666984 - RNA, 19 nt, Artificial Sequence
  Description of Artificial Sequence: Synthetic oligonucleotide
cugucggauuggacaacca

SEQ ID NO: 1666985 - RNA, 19 nt, Artificial Sequence
  Description of Artificial Sequence: Synthetic oligonucleotide
ggaacgcagccagggaagc

SEQ ID NO: 1666986 - RNA, 19 nt, Artificial Sequence
  Description of Artificial Sequence: Synthetic oligonucleotide
aucugucaaugaggcggag

SEQ ID NO: 1666987 - RNA, 19 nt, Artificial Sequence
  Description of Artificial Sequence: Synthetic oligonucleotide
acagcccacgaggaggauu

SEQ ID NO: 1666988 - RNA, 19 nt, Artificial Sequence
  Description of Artificial Sequence: Synthetic oligonucleotide
ggucaggaucccgucaaca

SEQ ID NO: 1666989 - RNA, 19 nt, Artificial Sequence
  Description of Artificial Sequence: Synthetic oligonucleotide
acacaagcgucggccagaa

SEQ ID NO: 1666990 - RNA, 19 nt, Artificial Sequence
  Description of Artificial Sequence: Synthetic oligonucleotide
cagaaguugcucagucgcu

SEQ ID NO: 1666991 - RNA, 19 nt, Artificial Sequence
  Description of Artificial Sequence: Synthetic oligonucleotide
ggacucagugccaucucca

SEQ ID NO: 1666992 - RNA, 19 nt, Artificial Sequence
  Description of Artificial Sequence: Synthetic oligonucleotide
ccccaagcgaagagcgccg

SEQ ID NO: 1666993 - RNA, 19 nt, Artificial Sequence
  Description of Artificial Sequence: Synthetic oligonucleotide
cgugcggcacaccuaacug

SEQ ID NO: 1666994 - RNA, 19 nt, Artificial Sequence
  Description of Artificial Sequence: Synthetic oligonucleotide
ggaggaacgcagccaggga

SEQ ID NO: 1666995 - RNA, 19 nt, Artificial Sequence
  Description of Artificial Sequence: Synthetic oligonucleotide
gcaaccagauguguccauc

SEQ ID NO: 1666996 - RNA, 19 nt, Artificial Sequence
  Description of Artificial Sequence: Synthetic oligonucleotide
cacacaagcgucggccaga

SEQ ID NO: 1666997 - RNA, 19 nt, Artificial Sequence
  Description of Artificial Sequence: Synthetic oligonucleotide
aggguucccuguggcagcu

SEQ ID NO: 1666998 - RNA, 19 nt, Artificial Sequence
  Description of Artificial Sequence: Synthetic oligonucleotide
uccagacguuggacucagu

SEQ ID NO: 1666999 - RNA, 19 nt, Artificial Sequence
  Description of Artificial Sequence: Synthetic oligonucleotide
cacuaauuacugccaaauu

SEQ ID NO: 1667000 - RNA, 19 nt, Artificial Sequence
  Description of Artificial Sequence: Synthetic oligonucleotide
ccagauguguccauccacu

SEQ ID NO: 1667001 - RNA, 19 nt, Artificial Sequence
  Description of Artificial Sequence: Synthetic oligonucleotide
caucuuuaucaggccacaa

SEQ ID NO: 1667002 - RNA, 19 nt, Artificial Sequence
  Description of Artificial Sequence: Synthetic oligonucleotide
ccaaaggcauuggauccac

SEQ ID NO: 1667003 - RNA, 19 nt, Artificial Sequence
  Description of Artificial Sequence: Synthetic oligonucleotide
ggcacaccuaacuggccaa

SEQ ID NO: 1667004 - RNA, 19 nt, Artificial Sequence
  Description of Artificial Sequence: Synthetic oligonucleotide
cacucacuguaguggcuaa

SEQ ID NO: 1667005 - RNA, 19 nt, Artificial Sequence
  Description of Artificial Sequence: Synthetic oligonucleotide
acaggccaccugucggauu

SEQ ID NO: 1667006 - RNA, 19 nt, Artificial Sequence
  Description of Artificial Sequence: Synthetic oligonucleotide
gcggagucagccuccgaga

SEQ ID NO: 1667007 - RNA, 19 nt, Artificial Sequence
  Description of Artificial Sequence: Synthetic oligonucleotide
acacaucugcgagggccgu

SEQ ID NO: 1667008 - RNA, 19 nt, Artificial Sequence
  Description of Artificial Sequence: Synthetic oligonucleotide
ggccgugcggcacaccuaa

SEQ ID NO: 1667009 - RNA, 19 nt, Artificial Sequence
  Description of Artificial Sequence: Synthetic oligonucleotide
cacaucugcgagggccgug

SEQ ID NO: 1667010 - RNA, 19 nt, Artificial Sequence
  Description of Artificial Sequence: Synthetic oligonucleotide
cccagcacacaagcgucgg

SEQ ID NO: 1667011 - RNA, 19 nt, Artificial Sequence
  Description of Artificial Sequence: Synthetic oligonucleotide
ccagcacacaagcgucggc

SEQ ID NO: 1667012 - RNA, 19 nt, Artificial Sequence
  Description of Artificial Sequence: Synthetic oligonucleotide
cacaagcgucggccagaag

SEQ ID NO: 1667013 - RNA, 19 nt, Artificial Sequence
  Description of Artificial Sequence: Synthetic oligonucleotide
gucggccagaagaaugcua

SEQ ID NO: 1667014 - RNA, 19 nt, Artificial Sequence
  Description of Artificial Sequence: Synthetic oligonucleotide
ggaucccgucaacaacaca

SEQ ID NO: 1667015 - RNA, 19 nt, Artificial Sequence
  Description of Artificial Sequence: Synthetic oligonucleotide
gcuuguuccgggccccaga

SEQ ID NO: 1667016 - RNA, 19 nt, Artificial Sequence
  Description of Artificial Sequence: Synthetic oligonucleotide
cugagccacaagaaaucuu

SEQ ID NO: 1667017 - RNA, 19 nt, Artificial Sequence
  Description of Artificial Sequence: Synthetic oligonucleotide
ccacgaggaggauucuuga

SEQ ID NO: 1667018 - RNA, 19 nt, Artificial Sequence
  Description of Artificial Sequence: Synthetic oligonucleotide
cccuagcugaccauagucu

SEQ ID NO: 1667019 - RNA, 19 nt, Artificial Sequence
  Description of Artificial Sequence: Synthetic oligonucleotide
cugcucgaccccagguaaa

SEQ ID NO: 1667020 - RNA, 19 nt, Artificial Sequence
  Description of Artificial Sequence: Synthetic oligonucleotide
cagcgggcaucuauucucu

SEQ ID NO: 1667021 - RNA, 19 nt, Artificial Sequence
  Description of Artificial Sequence: Synthetic oligonucleotide
cucuccuguaucugucaau

SEQ ID NO: 1667022 - RNA, 19 nt, Artificial Sequence
  Description of Artificial Sequence: Synthetic oligonucleotide
gccaugcacauugcuccgc

SEQ ID NO: 1667023 - RNA, 19 nt, Artificial Sequence
  Description of Artificial Sequence: Synthetic oligonucleotide
cggagucagccuccgagac

SEQ ID NO: 1667024 - RNA, 19 nt, Artificial Sequence
  Description of Artificial Sequence: Synthetic oligonucleotide
ccgagacacaggacuugug

SEQ ID NO: 1667025 - RNA, 19 nt, Artificial Sequence
  Description of Artificial Sequence: Synthetic oligonucleotide
gcugcuccggucaggcaac

SEQ ID NO: 1667026 - RNA, 19 nt, Artificial Sequence
  Description of Artificial Sequence: Synthetic oligonucleotide
cccgucaacaacacauacu

SEQ ID NO: 1667027 - RNA, 19 nt, Artificial Sequence
  Description of Artificial Sequence: Synthetic oligonucleotide
ccauucugagauucagggu

SEQ ID NO: 1667028 - RNA, 19 nt, Artificial Sequence
  Description of Artificial Sequence: Synthetic oligonucleotide
cacugccacucacuguagu

SEQ ID NO: 1667029 - RNA, 19 nt, Artificial Sequence
  Description of Artificial Sequence: Synthetic oligonucleotide
cucccuagcugaccauagu

SEQ ID NO: 1667030 - RNA, 19 nt, Artificial Sequence
  Description of Artificial Sequence: Synthetic oligonucleotide
cguagcuauuugcacccca

SEQ ID NO: 1667031 - RNA, 19 nt, Artificial Sequence
  Description of Artificial Sequence: Synthetic oligonucleotide
gaggcggaguggucaggau

SEQ ID NO: 1667032 - RNA, 19 nt, Artificial Sequence
  Description of Artificial Sequence: Synthetic oligonucleotide
gccaccugucggauuggac

SEQ ID NO: 1667033 - RNA, 19 nt, Artificial Sequence
  Description of Artificial Sequence: Synthetic oligonucleotide
cccaagcgaagagcgccgc

SEQ ID NO: 1667034 - RNA, 19 nt, Artificial Sequence
  Description of Artificial Sequence: Synthetic oligonucleotide
cggcacaccuaacuggcca

SEQ ID NO: 1667035 - RNA, 19 nt, Artificial Sequence
  Description of Artificial Sequence: Synthetic oligonucleotide
cugugugaccaagccccaa

SEQ ID NO: 1667036 - RNA, 19 nt, Artificial Sequence
  Description of Artificial Sequence: Synthetic oligonucleotide
gcacggcucagagagugcu

SEQ ID NO: 1667037 - RNA, 19 nt, Artificial Sequence
  Description of Artificial Sequence: Synthetic oligonucleotide
cugcgagggccgugcggca

SEQ ID NO: 1667038 - RNA, 19 nt, Artificial Sequence
  Description of Artificial Sequence: Synthetic oligonucleotide
gcucgaccccagguaaaca

SEQ ID NO: 1667039 - RNA, 19 nt, Artificial Sequence
  Description of Artificial Sequence: Synthetic oligonucleotide
gcggcggagucagccuccg

SEQ ID NO: 1667040 - RNA, 19 nt, Artificial Sequence
  Description of Artificial Sequence: Synthetic oligonucleotide
ccguagcuauuugcacccc

SEQ ID NO: 1667041 - RNA, 19 nt, Artificial Sequence
  Description of Artificial Sequence: Synthetic oligonucleotide
gcggaguggucaggauccc

SEQ ID NO: 1667042 - RNA, 19 nt, Artificial Sequence
  Description of Artificial Sequence: Synthetic oligonucleotide
cguuggacucagugccauc

SEQ ID NO: 1667043 - RNA, 19 nt, Artificial Sequence
  Description of Artificial Sequence: Synthetic oligonucleotide
gcacaccuaacuggccaaa

SEQ ID NO: 1667044 - RNA, 19 nt, Artificial Sequence
  Description of Artificial Sequence: Synthetic oligonucleotide
gcuaagccagugccccacu

SEQ ID NO: 1667045 - RNA, 19 nt, Artificial Sequence
  Description of Artificial Sequence: Synthetic oligonucleotide
guuccgggccccagacaua

SEQ ID NO: 1667046 - RNA, 19 nt, Artificial Sequence
  Description of Artificial Sequence: Synthetic oligonucleotide
cgaccccagguaaacaccu

SEQ ID NO: 1667047 - RNA, 19 nt, Artificial Sequence
  Description of Artificial Sequence: Synthetic oligonucleotide
ccgugcggcacaccuaacu

SEQ ID NO: 1667048 - RNA, 19 nt, Artificial Sequence
  Description of Artificial Sequence: Synthetic oligonucleotide
ccuccgagacacaggacuu

SEQ ID NO: 1667049 - RNA, 19 nt, Artificial Sequence
  Description of Artificial Sequence: Synthetic oligonucleotide
cacaggccaccugucggau

SEQ ID NO: 1667050 - RNA, 19 nt, Artificial Sequence
  Description of Artificial Sequence: Synthetic oligonucleotide
ccaaggccaagcugcccgu

SEQ ID NO: 1667051 - RNA, 19 nt, Artificial Sequence
  Description of Artificial Sequence: Synthetic oligonucleotide
gccgugcggcacaccuaac

SEQ ID NO: 1667052 - RNA, 19 nt, Artificial Sequence
  Description of Artificial Sequence: Synthetic oligonucleotide
gcggcagccgcggcggagu

SEQ ID NO: 1667053 - RNA, 19 nt, Artificial Sequence
  Description of Artificial Sequence: Synthetic oligonucleotide
gggccgugcggcacaccua

SEQ ID NO: 1667054 - RNA, 19 nt, Artificial Sequence
  Description of Artificial Sequence: Synthetic oligonucleotide
cgagggccgugcggcacac

SEQ ID NO: 1667055 - RNA, 19 nt, Artificial Sequence
  Description of Artificial Sequence: Synthetic oligonucleotide
cgucggccagaagaaugcu

SEQ ID NO: 1667056 - RNA, 19 nt, Artificial Sequence
  Description of Artificial Sequence: Synthetic oligonucleotide
aaaguaauagucugugguc

SEQ ID NO: 1667057 - RNA, 19 nt, Artificial Sequence
  Description of Artificial Sequence: Synthetic oligonucleotide
aaguaauagucuguggucc

SEQ ID NO: 1667058 - RNA, 19 nt, Artificial Sequence
  Description of Artificial Sequence: Synthetic oligonucleotide
gauuccaaggcacagacug

SEQ ID NO: 1667059 - RNA, 19 nt, Artificial Sequence
  Description of Artificial Sequence: Synthetic oligonucleotide
agggaaucagcccacaagc

SEQ ID NO: 1667060 - RNA, 19 nt, Artificial Sequence
  Description of Artificial Sequence: Synthetic oligonucleotide
aguccuguuccucagagac

SEQ ID NO: 1667061 - RNA, 19 nt, Artificial Sequence
  Description of Artificial Sequence: Synthetic oligonucleotide
acaguaagaggccaaaguc

SEQ ID NO: 1667062 - RNA, 19 nt, Artificial Sequence
  Description of Artificial Sequence: Synthetic oligonucleotide
ucccaguacaguaagaggc

SEQ ID NO: 1667063 - RNA, 19 nt, Artificial Sequence
  Description of Artificial Sequence: Synthetic oligonucleotide
agcccgucgaaguagaccc

SEQ ID NO: 1667064 - RNA, 19 nt, Artificial Sequence
  Description of Artificial Sequence: Synthetic oligonucleotide
aacuguaccuucucccagc

SEQ ID NO: 1667065 - RNA, 19 nt, Artificial Sequence
  Description of Artificial Sequence: Synthetic oligonucleotide
uaccaaacgaacauuguca

SEQ ID NO: 1667066 - RNA, 19 nt, Artificial Sequence
  Description of Artificial Sequence: Synthetic oligonucleotide
uuaaaguaauagucugugg

SEQ ID NO: 1667067 - RNA, 19 nt, Artificial Sequence
  Description of Artificial Sequence: Synthetic oligonucleotide
uguacuuguccauagggca

SEQ ID NO: 1667068 - RNA, 19 nt, Artificial Sequence
  Description of Artificial Sequence: Synthetic oligonucleotide
gaacucaugaggcauauuc

SEQ ID NO: 1667069 - RNA, 19 nt, Artificial Sequence
  Description of Artificial Sequence: Synthetic oligonucleotide
acucaugaggcauauucac

SEQ ID NO: 1667070 - RNA, 19 nt, Artificial Sequence
  Description of Artificial Sequence: Synthetic oligonucleotide
ugucguuuaggccaguucu

SEQ ID NO: 1667071 - RNA, 19 nt, Artificial Sequence
  Description of Artificial Sequence: Synthetic oligonucleotide
aaugcugugcagccgcugg

SEQ ID NO: 1667072 - RNA, 19 nt, Artificial Sequence
  Description of Artificial Sequence: Synthetic oligonucleotide
ugccauauccccgaggacg

SEQ ID NO: 1667073 - RNA, 19 nt, Artificial Sequence
  Description of Artificial Sequence: Synthetic oligonucleotide
guuggcucaaggcagacgc

SEQ ID NO: 1667074 - RNA, 19 nt, Artificial Sequence
  Description of Artificial Sequence: Synthetic oligonucleotide
cagcauaucauccuugaag

SEQ ID NO: 1667075 - RNA, 19 nt, Artificial Sequence
  Description of Artificial Sequence: Synthetic oligonucleotide
ucgaaguagaccccgacgu

SEQ ID NO: 1667076 - RNA, 19 nt, Artificial Sequence
  Description of Artificial Sequence: Synthetic oligonucleotide
uccacuaacagcauaucau

SEQ ID NO: 1667077 - RNA, 19 nt, Artificial Sequence
  Description of Artificial Sequence: Synthetic oligonucleotide
aacagagucuggcuccagg

SEQ ID NO: 1667078 - RNA, 19 nt, Artificial Sequence
  Description of Artificial Sequence: Synthetic oligonucleotide
gagagcauggugcaucuag

SEQ ID NO: 1667079 - RNA, 19 nt, Artificial Sequence
  Description of Artificial Sequence: Synthetic oligonucleotide
aacagcauaucauccuuga

SEQ ID NO: 1667080 - RNA, 19 nt, Artificial Sequence
  Description of Artificial Sequence: Synthetic oligonucleotide
uauugcugggcaaugcugu

SEQ ID NO: 1667081 - RNA, 19 nt, Artificial Sequence
  Description of Artificial Sequence: Synthetic oligonucleotide
acuaacagcauaucauccu

SEQ ID NO: 1667082 - RNA, 19 nt, Artificial Sequence
  Description of Artificial Sequence: Synthetic oligonucleotide
ucagagacguccaguacca

SEQ ID NO: 1667083 - RNA, 19 nt, Artificial Sequence
  Description of Artificial Sequence: Synthetic oligonucleotide
augaggcauauucacagug

SEQ ID NO: 1667084 - RNA, 19 nt, Artificial Sequence
  Description of Artificial Sequence: Synthetic oligonucleotide
ucugugugguuuaaaguaa

SEQ ID NO: 1667085 - RNA, 19 nt, Artificial Sequence
  Description of Artificial Sequence: Synthetic oligonucleotide
cacuaacagcauaucaucc

SEQ ID NO: 1667086 - RNA, 19 nt, Artificial Sequence
  Description of Artificial Sequence: Synthetic oligonucleotide
caaacgaacauugucacca

SEQ ID NO: 1667087 - RNA, 19 nt, Artificial Sequence
  Description of Artificial Sequence: Synthetic oligonucleotide
cagaaacugguccuaacag

SEQ ID NO: 1667088 - RNA, 19 nt, Artificial Sequence
  Description of Artificial Sequence: Synthetic oligonucleotide
gaaguagaccccgacguag

SEQ ID NO: 1667089 - RNA, 19 nt, Artificial Sequence
  Description of Artificial Sequence: Synthetic oligonucleotide
ugugccaaagguuccggug

SEQ ID NO: 1667090 - RNA, 19 nt, Artificial Sequence
  Description of Artificial Sequence: Synthetic oligonucleotide
aucccaguacaguaagagg

SEQ ID NO: 1667091 - RNA, 19 nt, Artificial Sequence
  Description of Artificial Sequence: Synthetic oligonucleotide
aguucucaucuccacuaac

SEQ ID NO: 1667092 - RNA, 19 nt, Artificial Sequence
  Description of Artificial Sequence: Synthetic oligonucleotide
ugaaugcagaggcagggaa

SEQ ID NO: 1667093 - RNA, 19 nt, Artificial Sequence
  Description of Artificial Sequence: Synthetic oligonucleotide
uaggccaguucucaucucc

SEQ ID NO: 1667094 - RNA, 19 nt, Artificial Sequence
  Description of Artificial Sequence: Synthetic oligonucleotide
caguaccaaacgaacauug

SEQ ID NO: 1667095 - RNA, 19 nt, Artificial Sequence
  Description of Artificial Sequence: Synthetic oligonucleotide
uggaccugaucccaguaca

SEQ ID NO: 1667096 - RNA, 19 nt, Artificial Sequence
  Description of Artificial Sequence: Synthetic oligonucleotide
aggggccacaccugaaugc

SEQ ID NO: 1667097 - RNA, 19 nt, Artificial Sequence
  Description of Artificial Sequence: Synthetic oligonucleotide
aaguagaccccgacguagc

SEQ ID NO: 1667098 - RNA, 19 nt, Artificial Sequence
  Description of Artificial Sequence: Synthetic oligonucleotide
gaggacggcacaugcagcc

SEQ ID NO: 1667099 - RNA, 19 nt, Artificial Sequence
  Description of Artificial Sequence: Synthetic oligonucleotide
gucgaaguagaccccgacg

SEQ ID NO: 1667100 - RNA, 19 nt, Artificial Sequence
  Description of Artificial Sequence: Synthetic oligonucleotide
aaggcacagacugaugugu

SEQ ID NO: 1667101 - RNA, 19 nt, Artificial Sequence
  Description of Artificial Sequence: Synthetic oligonucleotide
uccuaacagagucuggcuc

SEQ ID NO: 1667102 - RNA, 19 nt, Artificial Sequence
  Description of Artificial Sequence: Synthetic oligonucleotide
uagaccccgacguagcggc

SEQ ID NO: 1667103 - RNA, 19 nt, Artificial Sequence
  Description of Artificial Sequence: Synthetic oligonucleotide
guaccaaacgaacauuguc

SEQ ID NO: 1667104 - RNA, 19 nt, Artificial Sequence
  Description of Artificial Sequence: Synthetic oligonucleotide
caucuagcugccauauccc

SEQ ID NO: 1667105 - RNA, 19 nt, Artificial Sequence
  Description of Artificial Sequence: Synthetic oligonucleotide
agaagagaggcgcggcgcg

SEQ ID NO: 1667106 - RNA, 19 nt, Artificial Sequence
  Description of Artificial Sequence: Synthetic oligonucleotide
ugcccguggaaccaggcca

SEQ ID NO: 1667107 - RNA, 19 nt, Artificial Sequence
  Description of Artificial Sequence: Synthetic oligonucleotide
aacucaugaggcauauuca

SEQ ID NO: 1667108 - RNA, 19 nt, Artificial Sequence
  Description of Artificial Sequence: Synthetic oligonucleotide
ugggcaaugcugugcagcc

SEQ ID NO: 1667109 - RNA, 19 nt, Artificial Sequence
  Description of Artificial Sequence: Synthetic oligonucleotide
gagacguccaguaccaaac

SEQ ID NO: 1667110 - RNA, 19 nt, Artificial Sequence
  Description of Artificial Sequence: Synthetic oligonucleotide
uacuuguccauagggcagg

SEQ ID NO: 1667111 - RNA, 19 nt, Artificial Sequence
  Description of Artificial Sequence: Synthetic oligonucleotide
agagcauggugcaucuagc

SEQ ID NO: 1667112 - RNA, 19 nt, Artificial Sequence
  Description of Artificial Sequence: Synthetic oligonucleotide
agacguccaguaccaaacg

SEQ ID NO: 1667113 - RNA, 19 nt, Artificial Sequence
  Description of Artificial Sequence: Synthetic oligonucleotide
gaugcucguagcccgcucc

SEQ ID NO: 1667114 - RNA, 19 nt, Artificial Sequence
  Description of Artificial Sequence: Synthetic oligonucleotide
aguagaccccgacguagcg

SEQ ID NO: 1667115 - RNA, 19 nt, Artificial Sequence
  Description of Artificial Sequence: Synthetic oligonucleotide
agcauggugcaucuagcug

SEQ ID NO: 1667116 - RNA, 19 nt, Artificial Sequence
  Description of Artificial Sequence: Synthetic oligonucleotide
caccuggacgcaaagguug

SEQ ID NO: 1667117 - RNA, 19 nt, Artificial Sequence
  Description of Artificial Sequence: Synthetic oligonucleotide
agacugaugugucguuuag

SEQ ID NO: 1667118 - RNA, 19 nt, Artificial Sequence
  Description of Artificial Sequence: Synthetic oligonucleotide
cagggaaucagcccacaag

SEQ ID NO: 1667119 - RNA, 19 nt, Artificial Sequence
  Description of Artificial Sequence: Synthetic oligonucleotide
accgacuggaacucaugag

SEQ ID NO: 1667120 - RNA, 19 nt, Artificial Sequence
  Description of Artificial Sequence: Synthetic oligonucleotide
cugaucccaguacaguaag

SEQ ID NO: 1667121 - RNA, 19 nt, Artificial Sequence
  Description of Artificial Sequence: Synthetic oligonucleotide
ugcgagggcagggagaaga

SEQ ID NO: 1667122 - RNA, 19 nt, Artificial Sequence
  Description of Artificial Sequence: Synthetic oligonucleotide
cuaugugccaaagguuccg

SEQ ID NO: 1667123 - RNA, 19 nt, Artificial Sequence
  Description of Artificial Sequence: Synthetic oligonucleotide
ccgacuggaacucaugagg

SEQ ID NO: 1667124 - RNA, 19 nt, Artificial Sequence
  Description of Artificial Sequence: Synthetic oligonucleotide
cauggugcaucuagcugcc

SEQ ID NO: 1667125 - RNA, 19 nt, Artificial Sequence
  Description of Artificial Sequence: Synthetic oligonucleotide
gaugugucguuuaggccag

SEQ ID NO: 1667126 - RNA, 19 nt, Artificial Sequence
  Description of Artificial Sequence: Synthetic oligonucleotide
uggacgcaaagguuggggu

SEQ ID NO: 1667127 - RNA, 19 nt, Artificial Sequence
  Description of Artificial Sequence: Synthetic oligonucleotide
guuuaggccaguucucauc

SEQ ID NO: 1667128 - RNA, 19 nt, Artificial Sequence
  Description of Artificial Sequence: Synthetic oligonucleotide
aaaagggcagcggccaaga

SEQ ID NO: 1667129 - RNA, 19 nt, Artificial Sequence
  Description of Artificial Sequence: Synthetic oligonucleotide
gaagucgggcagcacgcag

SEQ ID NO: 1667130 - RNA, 19 nt, Artificial Sequence
  Description of Artificial Sequence: Synthetic oligonucleotide
aaacgaacauugucaccau

SEQ ID NO: 1667131 - RNA, 19 nt, Artificial Sequence
  Description of Artificial Sequence: Synthetic oligonucleotide
agcggcaguuggcucaagg

SEQ ID NO: 1667132 - RNA, 19 nt, Artificial Sequence
  Description of Artificial Sequence: Synthetic oligonucleotide
acggggaucuucccggaag

SEQ ID NO: 1667133 - RNA, 19 nt, Artificial Sequence
  Description of Artificial Sequence: Synthetic oligonucleotide
gaggcgagggcgucaugcg

SEQ ID NO: 1667134 - RNA, 19 nt, Artificial Sequence
  Description of Artificial Sequence: Synthetic oligonucleotide
uccuucggcggaguggagg

SEQ ID NO: 1667135 - RNA, 19 nt, Artificial Sequence
  Description of Artificial Sequence: Synthetic oligonucleotide
agagacguccaguaccaaa

SEQ ID NO: 1667136 - RNA, 19 nt, Artificial Sequence
  Description of Artificial Sequence: Synthetic oligonucleotide
ucguuuaggccaguucuca

SEQ ID NO: 1667137 - RNA, 19 nt, Artificial Sequence
  Description of Artificial Sequence: Synthetic oligonucleotide
uggaaccaggccagggccc

SEQ ID NO: 1667138 - RNA, 19 nt, Artificial Sequence
  Description of Artificial Sequence: Synthetic oligonucleotide
uggcacugcgccaccgccg

SEQ ID NO: 1667139 - RNA, 19 nt, Artificial Sequence
  Description of Artificial Sequence: Synthetic oligonucleotide
ugcgccaccgccgcgggcg

SEQ ID NO: 1667140 - RNA, 19 nt, Artificial Sequence
  Description of Artificial Sequence: Synthetic oligonucleotide
cucguagcccgcuccuucg

SEQ ID NO: 1667141 - RNA, 19 nt, Artificial Sequence
  Description of Artificial Sequence: Synthetic oligonucleotide
auugcugggcaaugcugug

SEQ ID NO: 1667142 - RNA, 19 nt, Artificial Sequence
  Description of Artificial Sequence: Synthetic oligonucleotide
uggugcaucuagcugccau

SEQ ID NO: 1667143 - RNA, 19 nt, Artificial Sequence
  Description of Artificial Sequence: Synthetic oligonucleotide
guauugcugggcaaugcug

SEQ ID NO: 1667144 - RNA, 19 nt, Artificial Sequence
  Description of Artificial Sequence: Synthetic oligonucleotide
cuggacgcaaagguugggg

SEQ ID NO: 1667145 - RNA, 19 nt, Artificial Sequence
  Description of Artificial Sequence: Synthetic oligonucleotide
aacaggucugugugguuua

SEQ ID NO: 1667146 - RNA, 19 nt, Artificial Sequence
  Description of Artificial Sequence: Synthetic oligonucleotide
caccugaaugcagaggcag

SEQ ID NO: 1667147 - RNA, 19 nt, Artificial Sequence
  Description of Artificial Sequence: Synthetic oligonucleotide
gcauaucauccuugaaggg

SEQ ID NO: 1667148 - RNA, 19 nt, Artificial Sequence
  Description of Artificial Sequence: Synthetic oligonucleotide
cuggcuaugugccaaaggu

SEQ ID NO: 1667149 - RNA, 19 nt, Artificial Sequence
  Description of Artificial Sequence: Synthetic oligonucleotide
aggcccauagcgcucccag

SEQ ID NO: 1667150 - RNA, 19 nt, Artificial Sequence
  Description of Artificial Sequence: Synthetic oligonucleotide
cauagggcaggcccauagc

SEQ ID NO: 1667151 - RNA, 19 nt, Artificial Sequence
  Description of Artificial Sequence: Synthetic oligonucleotide
acuguaccuucucccagcu

SEQ ID NO: 1667152 - RNA, 19 nt, Artificial Sequence
  Description of Artificial Sequence: Synthetic oligonucleotide
cucggggugcagcagcccg

SEQ ID NO: 1667153 - RNA, 19 nt, Artificial Sequence
  Description of Artificial Sequence: Synthetic oligonucleotide
uucggcggaguggaggaag

SEQ ID NO: 1667154 - RNA, 19 nt, Artificial Sequence
  Description of Artificial Sequence: Synthetic oligonucleotide
uggcuaugugccaaagguu

SEQ ID NO: 1667155 - RNA, 19 nt, Artificial Sequence
  Description of Artificial Sequence: Synthetic oligonucleotide
gacccagcgcuuauggaug

SEQ ID NO: 1667156 - RNA, 19 nt, Artificial Sequence
  Description of Artificial Sequence: Synthetic oligonucleotide
aucuccacuaacagcauau

SEQ ID NO: 1667157 - RNA, 19 nt, Artificial Sequence
  Description of Artificial Sequence: Synthetic oligonucleotide
gacuggaacucaugaggca

SEQ ID NO: 1667158 - RNA, 19 nt, Artificial Sequence
  Description of Artificial Sequence: Synthetic oligonucleotide
ugguguguccggaagucuu

SEQ ID NO: 1667159 - RNA, 19 nt, Artificial Sequence
  Description of Artificial Sequence: Synthetic oligonucleotide
aguaccaaacgaacauugu

SEQ ID NO: 1667160 - RNA, 19 nt, Artificial Sequence
  Description of Artificial Sequence: Synthetic oligonucleotide
ggcuaugugccaaagguuc

SEQ ID NO: 1667161 - RNA, 19 nt, Artificial Sequence
  Description of Artificial Sequence: Synthetic oligonucleotide
cagccgcuggauuccaagg

SEQ ID NO: 1667162 - RNA, 19 nt, Artificial Sequence
  Description of Artificial Sequence: Synthetic oligonucleotide
ccacuaacagcauaucauc

SEQ ID NO: 1667163 - RNA, 19 nt, Artificial Sequence
  Description of Artificial Sequence: Synthetic oligonucleotide
guagaccccgacguagcgg

SEQ ID NO: 1667164 - RNA, 19 nt, Artificial Sequence
  Description of Artificial Sequence: Synthetic oligonucleotide
gugcacggggaucuucccg

SEQ ID NO: 1667165 - RNA, 19 nt, Artificial Sequence
  Description of Artificial Sequence: Synthetic oligonucleotide
caaagguuccggugugcac

SEQ ID NO: 1667166 - RNA, 19 nt, Artificial Sequence
  Description of Artificial Sequence: Synthetic oligonucleotide
gcugccauauccccgagga

SEQ ID NO: 1667167 - RNA, 19 nt, Artificial Sequence
  Description of Artificial Sequence: Synthetic oligonucleotide
aguuggcucaaggcagacg

SEQ ID NO: 1667168 - RNA, 19 nt, Artificial Sequence
  Description of Artificial Sequence: Synthetic oligonucleotide
agaugcucguagcccgcuc

SEQ ID NO: 1667169 - RNA, 19 nt, Artificial Sequence
  Description of Artificial Sequence: Synthetic oligonucleotide
aggcgagggcgucaugcgg

SEQ ID NO: 1667170 - RNA, 19 nt, Artificial Sequence
  Description of Artificial Sequence: Synthetic oligonucleotide
agcgcuuauggauguacuu

SEQ ID NO: 1667171 - RNA, 19 nt, Artificial Sequence
  Description of Artificial Sequence: Synthetic oligonucleotide
auauccccgaggacggcac

SEQ ID NO: 1667172 - RNA, 19 nt, Artificial Sequence
  Description of Artificial Sequence: Synthetic oligonucleotide
cacaccaggacccagcgcu

SEQ ID NO: 1667173 - RNA, 19 nt, Artificial Sequence
  Description of Artificial Sequence: Synthetic oligonucleotide
caccagaugcucguagccc

SEQ ID NO: 1667174 - RNA, 19 nt, Artificial Sequence
  Description of Artificial Sequence: Synthetic oligonucleotide
ucagcccacaagcacucuu

SEQ ID NO: 1667175 - RNA, 19 nt, Artificial Sequence
  Description of Artificial Sequence: Synthetic oligonucleotide
cacacacugguguguccgg

SEQ ID NO: 1667176 - RNA, 19 nt, Artificial Sequence
  Description of Artificial Sequence: Synthetic oligonucleotide
ggugccugccagcacagug

SEQ ID NO: 1667177 - RNA, 19 nt, Artificial Sequence
  Description of Artificial Sequence: Synthetic oligonucleotide
gacggcacaugcagccugg

SEQ ID NO: 1667178 - RNA, 19 nt, Artificial Sequence
  Description of Artificial Sequence: Synthetic oligonucleotide
cccaguacaguaagaggcc

SEQ ID NO: 1667179 - RNA, 19 nt, Artificial Sequence
  Description of Artificial Sequence: Synthetic oligonucleotide
caggguucggcgccgcugc

SEQ ID NO: 1667180 - RNA, 19 nt, Artificial Sequence
  Description of Artificial Sequence: Synthetic oligonucleotide
ugaagggccccagggaauc

SEQ ID NO: 1667181 - RNA, 19 nt, Artificial Sequence
  Description of Artificial Sequence: Synthetic oligonucleotide
cuggcacugcgccaccgcc

SEQ ID NO: 1667182 - RNA, 19 nt, Artificial Sequence
  Description of Artificial Sequence: Synthetic oligonucleotide
accuggacgcaaagguugg

SEQ ID NO: 1667183 - RNA, 19 nt, Artificial Sequence
  Description of Artificial Sequence: Synthetic oligonucleotide
augugccaaagguuccggu

SEQ ID NO: 1667184 - RNA, 19 nt, Artificial Sequence
  Description of Artificial Sequence: Synthetic oligonucleotide
gugugcacggggaucuucc

SEQ ID NO: 1667185 - RNA, 19 nt, Artificial Sequence
  Description of Artificial Sequence: Synthetic oligonucleotide
ccacaagcacucuuggaac

SEQ ID NO: 1667186 - RNA, 19 nt, Artificial Sequence
  Description of Artificial Sequence: Synthetic oligonucleotide
acguccaguaccaaacgaa

SEQ ID NO: 1667187 - RNA, 19 nt, Artificial Sequence
  Description of Artificial Sequence: Synthetic oligonucleotide
uggaacucaugaggcauau

SEQ ID NO: 1667188 - RNA, 19 nt, Artificial Sequence
  Description of Artificial Sequence: Synthetic oligonucleotide
cacucgcagcggcaguugg

SEQ ID NO: 1667189 - RNA, 19 nt, Artificial Sequence
  Description of Artificial Sequence: Synthetic oligonucleotide
gugucguuuaggccaguuc

SEQ ID NO: 1667190 - RNA, 19 nt, Artificial Sequence
  Description of Artificial Sequence: Synthetic oligonucleotide
cagccuccccugcaggacg

SEQ ID NO: 1667191 - RNA, 19 nt, Artificial Sequence
  Description of Artificial Sequence: Synthetic oligonucleotide
uagcgcucccagguuauca

SEQ ID NO: 1667192 - RNA, 19 nt, Artificial Sequence
  Description of Artificial Sequence: Synthetic oligonucleotide
aggcacagacugauguguc

SEQ ID NO: 1667193 - RNA, 19 nt, Artificial Sequence
  Description of Artificial Sequence: Synthetic oligonucleotide
ucugugguccagucagguu

SEQ ID NO: 1667194 - RNA, 19 nt, Artificial Sequence
  Description of Artificial Sequence: Synthetic oligonucleotide
gagcauggugcaucuagcu

SEQ ID NO: 1667195 - RNA, 19 nt, Artificial Sequence
  Description of Artificial Sequence: Synthetic oligonucleotide
cgacuggaacucaugaggc

SEQ ID NO: 1667196 - RNA, 19 nt, Artificial Sequence
  Description of Artificial Sequence: Synthetic oligonucleotide
ccaaacgaacauugucacc

SEQ ID NO: 1667197 - RNA, 19 nt, Artificial Sequence
  Description of Artificial Sequence: Synthetic oligonucleotide
caggggccacaccugaaug

SEQ ID NO: 1667198 - RNA, 19 nt, Artificial Sequence
  Description of Artificial Sequence: Synthetic oligonucleotide
gggcgagaagagcaggacc

SEQ ID NO: 1667199 - RNA, 19 nt, Artificial Sequence
  Description of Artificial Sequence: Synthetic oligonucleotide
gccauauccccgaggacgg

SEQ ID NO: 1667200 - RNA, 19 nt, Artificial Sequence
  Description of Artificial Sequence: Synthetic oligonucleotide
cagcccgucgaaguagacc

SEQ ID NO: 1667201 - RNA, 19 nt, Artificial Sequence
  Description of Artificial Sequence: Synthetic oligonucleotide
ggaggcgagggcgucaugc

SEQ ID NO: 1667202 - RNA, 19 nt, Artificial Sequence
  Description of Artificial Sequence: Synthetic oligonucleotide
acgcaaagguugggguggc

SEQ ID NO: 1667203 - RNA, 19 nt, Artificial Sequence
  Description of Artificial Sequence: Synthetic oligonucleotide
ccgaggacggcacaugcag

SEQ ID NO: 1667204 - RNA, 19 nt, Artificial Sequence
  Description of Artificial Sequence: Synthetic oligonucleotide
caccgacuggaacucauga

SEQ ID NO: 1667205 - RNA, 19 nt, Artificial Sequence
  Description of Artificial Sequence: Synthetic oligonucleotide
gagaggacccuggaccuga

SEQ ID NO: 1667206 - RNA, 19 nt, Artificial Sequence
  Description of Artificial Sequence: Synthetic oligonucleotide
gcgcuuauggauguacuug

SEQ ID NO: 1667207 - RNA, 19 nt, Artificial Sequence
  Description of Artificial Sequence: Synthetic oligonucleotide
acugguccuaacagagucu

SEQ ID NO: 1667208 - RNA, 19 nt, Artificial Sequence
  Description of Artificial Sequence: Synthetic oligonucleotide
ggguuugagaggacccugg

SEQ ID NO: 1667209 - RNA, 19 nt, Artificial Sequence
  Description of Artificial Sequence: Synthetic oligonucleotide
uggccccaccgucuggugu

SEQ ID NO: 1667210 - RNA, 19 nt, Artificial Sequence
  Description of Artificial Sequence: Synthetic oligonucleotide
gaucuucccggaaggggca

SEQ ID NO: 1667211 - RNA, 19 nt, Artificial Sequence
  Description of Artificial Sequence: Synthetic oligonucleotide
uuaggccaguucucaucuc

SEQ ID NO: 1667212 - RNA, 19 nt, Artificial Sequence
  Description of Artificial Sequence: Synthetic oligonucleotide
ccauagggcaggcccauag

SEQ ID NO: 1667213 - RNA, 19 nt, Artificial Sequence
  Description of Artificial Sequence: Synthetic oligonucleotide
acaugcagccuggcuaugu

SEQ ID NO: 1667214 - RNA, 19 nt, Artificial Sequence
  Description of Artificial Sequence: Synthetic oligonucleotide
cgucaugcggcccuggccc

SEQ ID NO: 1667215 - RNA, 19 nt, Artificial Sequence
  Description of Artificial Sequence: Synthetic oligonucleotide
aggguucggcgccgcugcc

SEQ ID NO: 1667216 - RNA, 19 nt, Artificial Sequence
  Description of Artificial Sequence: Synthetic oligonucleotide
accccgacguagcggcccg

SEQ ID NO: 1667217 - RNA, 19 nt, Artificial Sequence
  Description of Artificial Sequence: Synthetic oligonucleotide
gcuaugugccaaagguucc

SEQ ID NO: 1667218 - RNA, 19 nt, Artificial Sequence
  Description of Artificial Sequence: Synthetic oligonucleotide
augcucguagcccgcuccu

SEQ ID NO: 1667219 - RNA, 19 nt, Artificial Sequence
  Description of Artificial Sequence: Synthetic oligonucleotide
ccuggcuaugugccaaagg

SEQ ID NO: 1667220 - RNA, 19 nt, Artificial Sequence
  Description of Artificial Sequence: Synthetic oligonucleotide
gucguuuaggccaguucuc

SEQ ID NO: 1667221 - RNA, 19 nt, Artificial Sequence
  Description of Artificial Sequence: Synthetic oligonucleotide
uaacagagucuggcuccag

SEQ ID NO: 1667222 - RNA, 19 nt, Artificial Sequence
  Description of Artificial Sequence: Synthetic oligonucleotide
cacugcgccaccgccgcgg

SEQ ID NO: 1667223 - RNA, 19 nt, Artificial Sequence
  Description of Artificial Sequence: Synthetic oligonucleotide
acccagcgcuuauggaugu

SEQ ID NO: 1667224 - RNA, 19 nt, Artificial Sequence
  Description of Artificial Sequence: Synthetic oligonucleotide
ugugucguuuaggccaguu

SEQ ID NO: 1667225 - RNA, 19 nt, Artificial Sequence
  Description of Artificial Sequence: Synthetic oligonucleotide
gaccccgacguagcggccc

SEQ ID NO: 1667226 - RNA, 19 nt, Artificial Sequence
  Description of Artificial Sequence: Synthetic oligonucleotide
gguggcacaaguggcuggc

SEQ ID NO: 1667227 - RNA, 19 nt, Artificial Sequence
  Description of Artificial Sequence: Synthetic oligonucleotide
auagcgcucccagguuauc

SEQ ID NO: 1667228 - RNA, 19 nt, Artificial Sequence
  Description of Artificial Sequence: Synthetic oligonucleotide
ggaccugaucccaguacag

SEQ ID NO: 1667229 - RNA, 19 nt, Artificial Sequence
  Description of Artificial Sequence: Synthetic oligonucleotide
guagcggcccgccgcccgg

SEQ ID NO: 1667230 - RNA, 19 nt, Artificial Sequence
  Description of Artificial Sequence: Synthetic oligonucleotide
caguacaguaagaggccaa

SEQ ID NO: 1667231 - RNA, 19 nt, Artificial Sequence
  Description of Artificial Sequence: Synthetic oligonucleotide
uuccggugugcacggggau

SEQ ID NO: 1667232 - RNA, 19 nt, Artificial Sequence
  Description of Artificial Sequence: Synthetic oligonucleotide
gcagagagcauggugcauc

SEQ ID NO: 1667233 - RNA, 19 nt, Artificial Sequence
  Description of Artificial Sequence: Synthetic oligonucleotide
ggacggcacaugcagccug

SEQ ID NO: 1667234 - RNA, 19 nt, Artificial Sequence
  Description of Artificial Sequence: Synthetic oligonucleotide
ccggaagucuugcagcaac

SEQ ID NO: 1667235 - RNA, 19 nt, Artificial Sequence
  Description of Artificial Sequence: Synthetic oligonucleotide
ggcggaguggaggaagcag

SEQ ID NO: 1667236 - RNA, 19 nt, Artificial Sequence
  Description of Artificial Sequence: Synthetic oligonucleotide
gguuugagaggacccugga

SEQ ID NO: 1667237 - RNA, 19 nt, Artificial Sequence
  Description of Artificial Sequence: Synthetic oligonucleotide
acggcacaugcagccuggc

SEQ ID NO: 1667238 - RNA, 19 nt, Artificial Sequence
  Description of Artificial Sequence: Synthetic oligonucleotide
cauauccccgaggacggca

SEQ ID NO: 1667239 - RNA, 19 nt, Artificial Sequence
  Description of Artificial Sequence: Synthetic oligonucleotide
ggcacugcgccaccgccgc

SEQ ID NO: 1667240 - RNA, 19 nt, Artificial Sequence
  Description of Artificial Sequence: Synthetic oligonucleotide
gccccagggaaucagccca

SEQ ID NO: 1667241 - RNA, 19 nt, Artificial Sequence
  Description of Artificial Sequence: Synthetic oligonucleotide
ucucaccgacuggaacuca

SEQ ID NO: 1667242 - RNA, 19 nt, Artificial Sequence
  Description of Artificial Sequence: Synthetic oligonucleotide
cugccauauccccgaggac

SEQ ID NO: 1667243 - RNA, 19 nt, Artificial Sequence
  Description of Artificial Sequence: Synthetic oligonucleotide
gcagcggccaagaguaggc

SEQ ID NO: 1667244 - RNA, 19 nt, Artificial Sequence
  Description of Artificial Sequence: Synthetic oligonucleotide
gguguguccggaagucuug

SEQ ID NO: 1667245 - RNA, 19 nt, Artificial Sequence
  Description of Artificial Sequence: Synthetic oligonucleotide
acacacugguguguccgga

SEQ ID NO: 1667246 - RNA, 19 nt, Artificial Sequence
  Description of Artificial Sequence: Synthetic oligonucleotide
aucuucccggaaggggcag

SEQ ID NO: 1667247 - RNA, 19 nt, Artificial Sequence
  Description of Artificial Sequence: Synthetic oligonucleotide
ggcccauagcgcucccagg

SEQ ID NO: 1667248 - RNA, 19 nt, Artificial Sequence
  Description of Artificial Sequence: Synthetic oligonucleotide
guuccggugugcacgggga

SEQ ID NO: 1667249 - RNA, 19 nt, Artificial Sequence
  Description of Artificial Sequence: Synthetic oligonucleotide
cugaaugcagaggcaggga

SEQ ID NO: 1667250 - RNA, 19 nt, Artificial Sequence
  Description of Artificial Sequence: Synthetic oligonucleotide
cccgugcgcgcucagcucg

SEQ ID NO: 1667251 - RNA, 19 nt, Artificial Sequence
  Description of Artificial Sequence: Synthetic oligonucleotide
caugaggcauauucacagu

SEQ ID NO: 1667252 - RNA, 19 nt, Artificial Sequence
  Description of Artificial Sequence: Synthetic oligonucleotide
ggacccagcgcuuauggau

SEQ ID NO: 1667253 - RNA, 19 nt, Artificial Sequence
  Description of Artificial Sequence: Synthetic oligonucleotide
uccccgaggacggcacaug

SEQ ID NO: 1667254 - RNA, 19 nt, Artificial Sequence
  Description of Artificial Sequence: Synthetic oligonucleotide
ggugcaucuagcugccaua

SEQ ID NO: 1667255 - RNA, 19 nt, Artificial Sequence
  Description of Artificial Sequence: Synthetic oligonucleotide
aggccaguucucaucucca

SEQ ID NO: 1667256 - RNA, 19 nt, Artificial Sequence
  Description of Artificial Sequence: Synthetic oligonucleotide
ccggaaggggcagaaacug

SEQ ID NO: 1667257 - RNA, 19 nt, Artificial Sequence
  Description of Artificial Sequence: Synthetic oligonucleotide
ccaaggugagcagcucucg

SEQ ID NO: 1667258 - RNA, 19 nt, Artificial Sequence
  Description of Artificial Sequence: Synthetic oligonucleotide
cugugugguuuaaaguaau

SEQ ID NO: 1667259 - RNA, 19 nt, Artificial Sequence
  Description of Artificial Sequence: Synthetic oligonucleotide
gaaccaggccagggccccg

SEQ ID NO: 1667260 - RNA, 19 nt, Artificial Sequence
  Description of Artificial Sequence: Synthetic oligonucleotide
gccgcuggauuccaaggca

SEQ ID NO: 1667261 - RNA, 19 nt, Artificial Sequence
  Description of Artificial Sequence: Synthetic oligonucleotide
agacgccagggcgcccacc

SEQ ID NO: 1667262 - RNA, 19 nt, Artificial Sequence
  Description of Artificial Sequence: Synthetic oligonucleotide
gggaaucagcccacaagca

SEQ ID NO: 1667263 - RNA, 19 nt, Artificial Sequence
  Description of Artificial Sequence: Synthetic oligonucleotide
ccugaucccaguacaguaa

SEQ ID NO: 1667264 - RNA, 19 nt, Artificial Sequence
  Description of Artificial Sequence: Synthetic oligonucleotide
aggacggcacaugcagccu

SEQ ID NO: 1667265 - RNA, 19 nt, Artificial Sequence
  Description of Artificial Sequence: Synthetic oligonucleotide
agaccccgacguagcggcc

SEQ ID NO: 1667266 - RNA, 19 nt, Artificial Sequence
  Description of Artificial Sequence: Synthetic oligonucleotide
gccucucaccgacuggaac

SEQ ID NO: 1667267 - RNA, 19 nt, Artificial Sequence
  Description of Artificial Sequence: Synthetic oligonucleotide
gcuccuucggcggagugga

SEQ ID NO: 1667268 - RNA, 19 nt, Artificial Sequence
  Description of Artificial Sequence: Synthetic oligonucleotide
ccggccuugcaggaagucg

SEQ ID NO: 1667269 - RNA, 19 nt, Artificial Sequence
  Description of Artificial Sequence: Synthetic oligonucleotide
cccgucgaaguagaccccg

SEQ ID NO: 1667270 - RNA, 19 nt, Artificial Sequence
  Description of Artificial Sequence: Synthetic oligonucleotide
caguuggcucaaggcagac

SEQ ID NO: 1667271 - RNA, 19 nt, Artificial Sequence
  Description of Artificial Sequence: Synthetic oligonucleotide
gacauucuccuggagcauu

SEQ ID NO: 1667272 - RNA, 19 nt, Artificial Sequence
  Description of Artificial Sequence: Synthetic oligonucleotide
agcugcgagggcagggaga

SEQ ID NO: 1667273 - RNA, 19 nt, Artificial Sequence
  Description of Artificial Sequence: Synthetic oligonucleotide
ccucagagacguccaguac

SEQ ID NO: 1667274 - RNA, 19 nt, Artificial Sequence
  Description of Artificial Sequence: Synthetic oligonucleotide
ccagcgcuuauggauguac

SEQ ID NO: 1667275 - RNA, 19 nt, Artificial Sequence
  Description of Artificial Sequence: Synthetic oligonucleotide
ggccuugcaggaagucggg

SEQ ID NO: 1667276 - RNA, 19 nt, Artificial Sequence
  Description of Artificial Sequence: Synthetic oligonucleotide
gcuuauggauguacuuguc

SEQ ID NO: 1667277 - RNA, 19 nt, Artificial Sequence
  Description of Artificial Sequence: Synthetic oligonucleotide
agagaggcgcggcgcggaa

SEQ ID NO: 1667278 - RNA, 19 nt, Artificial Sequence
  Description of Artificial Sequence: Synthetic oligonucleotide
ggcgucaugcggcccuggc

SEQ ID NO: 1667279 - RNA, 19 nt, Artificial Sequence
  Description of Artificial Sequence: Synthetic oligonucleotide
ccucucaccgacuggaacu

SEQ ID NO: 1667280 - RNA, 19 nt, Artificial Sequence
  Description of Artificial Sequence: Synthetic oligonucleotide
acguagcggcccgccgccc

SEQ ID NO: 1667281 - RNA, 19 nt, Artificial Sequence
  Description of Artificial Sequence: Synthetic oligonucleotide
gggcaaugcugugcagccg

SEQ ID NO: 1667282 - RNA, 19 nt, Artificial Sequence
  Description of Artificial Sequence: Synthetic oligonucleotide
gaagggccccagggaauca

SEQ ID NO: 1667283 - RNA, 19 nt, Artificial Sequence
  Description of Artificial Sequence: Synthetic oligonucleotide
acgccagggcgcccaccag

SEQ ID NO: 1667284 - RNA, 19 nt, Artificial Sequence
  Description of Artificial Sequence: Synthetic oligonucleotide
cauagcgcucccagguuau

SEQ ID NO: 1667285 - RNA, 19 nt, Artificial Sequence
  Description of Artificial Sequence: Synthetic oligonucleotide
gagaggcgcggcgcggaac

SEQ ID NO: 1667286 - RNA, 19 nt, Artificial Sequence
  Description of Artificial Sequence: Synthetic oligonucleotide
cagcgcuuauggauguacu

SEQ ID NO: 1667287 - RNA, 19 nt, Artificial Sequence
  Description of Artificial Sequence: Synthetic oligonucleotide
ccccgaggacggcacaugc

SEQ ID NO: 1667288 - RNA, 19 nt, Artificial Sequence
  Description of Artificial Sequence: Synthetic oligonucleotide
gcccauagcgcucccaggu

SEQ ID NO: 1667289 - RNA, 19 nt, Artificial Sequence
  Description of Artificial Sequence: Synthetic oligonucleotide
ccuggagcauugguggcac

SEQ ID NO: 1667290 - RNA, 19 nt, Artificial Sequence
  Description of Artificial Sequence: Synthetic oligonucleotide
auccccgaggacggcacau

SEQ ID NO: 1667291 - RNA, 19 nt, Artificial Sequence
  Description of Artificial Sequence: Synthetic oligonucleotide
cucaccgacuggaacucau

SEQ ID NO: 1667292 - RNA, 19 nt, Artificial Sequence
  Description of Artificial Sequence: Synthetic oligonucleotide
gcgagggcgucaugcggcc

SEQ ID NO: 1667293 - RNA, 19 nt, Artificial Sequence
  Description of Artificial Sequence: Synthetic oligonucleotide
cuccuucggcggaguggag

SEQ ID NO: 1667294 - RNA, 19 nt, Artificial Sequence
  Description of Artificial Sequence: Synthetic oligonucleotide
gcccguggaaccaggccag

SEQ ID NO: 1667295 - RNA, 19 nt, Artificial Sequence
  Description of Artificial Sequence: Synthetic oligonucleotide
gugcaucuagcugccauau

SEQ ID NO: 1667296 - RNA, 19 nt, Artificial Sequence
  Description of Artificial Sequence: Synthetic oligonucleotide
cucgcagcggcaguuggcu

SEQ ID NO: 1667297 - RNA, 19 nt, Artificial Sequence
  Description of Artificial Sequence: Synthetic oligonucleotide
ggagguauugcugggcaau

SEQ ID NO: 1667298 - RNA, 19 nt, Artificial Sequence
  Description of Artificial Sequence: Synthetic oligonucleotide
gcacaugcagccuggcuau

SEQ ID NO: 1667299 - RNA, 19 nt, Artificial Sequence
  Description of Artificial Sequence: Synthetic oligonucleotide
gcacagacugaugugucgu

SEQ ID NO: 1667300 - RNA, 19 nt, Artificial Sequence
  Description of Artificial Sequence: Synthetic oligonucleotide
caggguuugagaggacccu

SEQ ID NO: 1667301 - RNA, 19 nt, Artificial Sequence
  Description of Artificial Sequence: Synthetic oligonucleotide
guaccuucucccagcugcu

SEQ ID NO: 1667302 - RNA, 19 nt, Artificial Sequence
  Description of Artificial Sequence: Synthetic oligonucleotide
agggcgucaugcggcccug

SEQ ID NO: 1667303 - RNA, 19 nt, Artificial Sequence
  Description of Artificial Sequence: Synthetic oligonucleotide
agagagcauggugcaucua

SEQ ID NO: 1667304 - RNA, 19 nt, Artificial Sequence
  Description of Artificial Sequence: Synthetic oligonucleotide
agccuccccugcaggacgu

SEQ ID NO: 1667305 - RNA, 19 nt, Artificial Sequence
  Description of Artificial Sequence: Synthetic oligonucleotide
auggugcaucuagcugcca

SEQ ID NO: 1667306 - RNA, 19 nt, Artificial Sequence
  Description of Artificial Sequence: Synthetic oligonucleotide
gccuggcuaugugccaaag

SEQ ID NO: 1667307 - RNA, 19 nt, Artificial Sequence
  Description of Artificial Sequence: Synthetic oligonucleotide
ccgacguagcggcccgccg

SEQ ID NO: 1667308 - RNA, 19 nt, Artificial Sequence
  Description of Artificial Sequence: Synthetic oligonucleotide
ccauagcgcucccagguua

SEQ ID NO: 1667309 - RNA, 19 nt, Artificial Sequence
  Description of Artificial Sequence: Synthetic oligonucleotide
ggguucggcgccgcugccc

SEQ ID NO: 1667310 - RNA, 19 nt, Artificial Sequence
  Description of Artificial Sequence: Synthetic oligonucleotide
ggaagucgggcagcacgca

SEQ ID NO: 1667311 - RNA, 19 nt, Artificial Sequence
  Description of Artificial Sequence: Synthetic oligonucleotide
cacggggaucuucccggaa

SEQ ID NO: 1667312 - RNA, 19 nt, Artificial Sequence
  Description of Artificial Sequence: Synthetic oligonucleotide
augugucguuuaggccagu

SEQ ID NO: 1667313 - RNA, 19 nt, Artificial Sequence
  Description of Artificial Sequence: Synthetic oligonucleotide
cugcgagggcagggagaag

SEQ ID NO: 1667314 - RNA, 19 nt, Artificial Sequence
  Description of Artificial Sequence: Synthetic oligonucleotide
cgccgcccggccuugcagg

SEQ ID NO: 1667315 - RNA, 19 nt, Artificial Sequence
  Description of Artificial Sequence: Synthetic oligonucleotide
gcggaacgcggcgggcacg

SEQ ID NO: 1667316 - RNA, 19 nt, Artificial Sequence
  Description of Artificial Sequence: Synthetic oligonucleotide
cccgaggacggcacaugca

SEQ ID NO: 1667317 - RNA, 19 nt, Artificial Sequence
  Description of Artificial Sequence: Synthetic oligonucleotide
gcacggggaucuucccgga

SEQ ID NO: 1667318 - RNA, 19 nt, Artificial Sequence
  Description of Artificial Sequence: Synthetic oligonucleotide
gggcagaaacugguccuaa

SEQ ID NO: 1667319 - RNA, 19 nt, Artificial Sequence
  Description of Artificial Sequence: Synthetic oligonucleotide
ccagggaaucagcccacaa

SEQ ID NO: 1667320 - RNA, 19 nt, Artificial Sequence
  Description of Artificial Sequence: Synthetic oligonucleotide
gcacugcgccaccgccgcg

SEQ ID NO: 1667321 - RNA, 19 nt, Artificial Sequence
  Description of Artificial Sequence: Synthetic oligonucleotide
cggaacgcggcgggcacgg

SEQ ID NO: 1667322 - RNA, 19 nt, Artificial Sequence
  Description of Artificial Sequence: Synthetic oligonucleotide
cccgacguagcggcccgcc

SEQ ID NO: 1667323 - RNA, 19 nt, Artificial Sequence
  Description of Artificial Sequence: Synthetic oligonucleotide
gcccgucgaaguagacccc

SEQ ID NO: 1667324 - RNA, 19 nt, Artificial Sequence
  Description of Artificial Sequence: Synthetic oligonucleotide
cagagacguccaguaccaa

SEQ ID NO: 1667325 - RNA, 19 nt, Artificial Sequence
  Description of Artificial Sequence: Synthetic oligonucleotide
ccacucgcagcggcaguug

SEQ ID NO: 1667326 - RNA, 19 nt, Artificial Sequence
  Description of Artificial Sequence: Synthetic oligonucleotide
cuucggcggaguggaggaa

SEQ ID NO: 1667327 - RNA, 19 nt, Artificial Sequence
  Description of Artificial Sequence: Synthetic oligonucleotide
caccgccgcgggcgagaag

SEQ ID NO: 1667328 - RNA, 19 nt, Artificial Sequence
  Description of Artificial Sequence: Synthetic oligonucleotide
gcgcccaccagaugcucgu

SEQ ID NO: 1667329 - RNA, 19 nt, Artificial Sequence
  Description of Artificial Sequence: Synthetic oligonucleotide
cccguggaaccaggccagg

SEQ ID NO: 1667330 - RNA, 19 nt, Artificial Sequence
  Description of Artificial Sequence: Synthetic oligonucleotide
gggcgucaugcggcccugg

SEQ ID NO: 1667331 - RNA, 19 nt, Artificial Sequence
  Description of Artificial Sequence: Synthetic oligonucleotide
cgaaguagaccccgacgua

SEQ ID NO: 1667332 - RNA, 19 nt, Artificial Sequence
  Description of Artificial Sequence: Synthetic oligonucleotide
gcagcccgucgaaguagac

SEQ ID NO: 1667333 - RNA, 19 nt, Artificial Sequence
  Description of Artificial Sequence: Synthetic oligonucleotide
ccccgugcgcgcucagcuc

SEQ ID NO: 1667334 - RNA, 19 nt, Artificial Sequence
  Description of Artificial Sequence: Synthetic oligonucleotide
cgcggaacgcggcgggcac

SEQ ID NO: 1667335 - RNA, 19 nt, Artificial Sequence
  Description of Artificial Sequence: Synthetic oligonucleotide
gcgcggaacgcggcgggca

SEQ ID NO: 1667336 - RNA, 19 nt, Artificial Sequence
  Description of Artificial Sequence: Synthetic oligonucleotide
cagcggcaguuggcucaag

SEQ ID NO: 1667337 - RNA, 19 nt, Artificial Sequence
  Description of Artificial Sequence: Synthetic oligonucleotide
ccgccgcgggcgagaagag

SEQ ID NO: 1667338 - RNA, 19 nt, Artificial Sequence
  Description of Artificial Sequence: Synthetic oligonucleotide
cgcgcucagcucgcggcgg

SEQ ID NO: 1667339 - RNA, 19 nt, Artificial Sequence
  Description of Artificial Sequence: Synthetic oligonucleotide
caggaggcgagggcgucau

SEQ ID NO: 1667340 - RNA, 19 nt, Artificial Sequence
  Description of Artificial Sequence: Synthetic oligonucleotide
ccccaccgucugguguugg

SEQ ID NO: 1667341 - RNA, 19 nt, Artificial Sequence
  Description of Artificial Sequence: Synthetic oligonucleotide
cguuuaggccaguucucau

SEQ ID NO: 1667342 - RNA, 19 nt, Artificial Sequence
  Description of Artificial Sequence: Synthetic oligonucleotide
cgugcgcgcucagcucgcg

SEQ ID NO: 1667343 - RNA, 19 nt, Artificial Sequence
  Description of Artificial Sequence: Synthetic oligonucleotide
guucggcgccgcugcccgu

SEQ ID NO: 1667344 - RNA, 19 nt, Artificial Sequence
  Description of Artificial Sequence: Synthetic oligonucleotide
ggaacucaugaggcauauu

SEQ ID NO: 1667345 - RNA, 19 nt, Artificial Sequence
  Description of Artificial Sequence: Synthetic oligonucleotide
gggcugugcgggcgguccu

SEQ ID NO: 1667346 - RNA, 19 nt, Artificial Sequence
  Description of Artificial Sequence: Synthetic oligonucleotide
gcugugcgggcgguccuuu

SEQ ID NO: 1667347 - RNA, 19 nt, Artificial Sequence
  Description of Artificial Sequence: Synthetic oligonucleotide
ggcugugcgggcgguccuu

SEQ ID NO: 1667348 - RNA, 19 nt, Artificial Sequence
  Description of Artificial Sequence: Synthetic oligonucleotide
cggcggcuccacaggucca

SEQ ID NO: 1667349 - RNA, 19 nt, Artificial Sequence
  Description of Artificial Sequence: Synthetic oligonucleotide
cccagcgcuuauggaugua

SEQ ID NO: 1667350 - RNA, 19 nt, Artificial Sequence
  Description of Artificial Sequence: Synthetic oligonucleotide
ccccgggagccgggcgcag

SEQ ID NO: 1667351 - RNA, 19 nt, Artificial Sequence
  Description of Artificial Sequence: Synthetic oligonucleotide
gcccggccuugcaggaagu

SEQ ID NO: 1667352 - RNA, 19 nt, Artificial Sequence
  Description of Artificial Sequence: Synthetic oligonucleotide
ccaccgccgcgggcgagaa

SEQ ID NO: 1667353 - RNA, 19 nt, Artificial Sequence
  Description of Artificial Sequence: Synthetic oligonucleotide
aagauaaccacacagcucc

SEQ ID NO: 1667354 - RNA, 19 nt, Artificial Sequence
  Description of Artificial Sequence: Synthetic oligonucleotide
aacauguuagcacaacccc

SEQ ID NO: 1667355 - RNA, 19 nt, Artificial Sequence
  Description of Artificial Sequence: Synthetic oligonucleotide
ugguaaaagacaaagagga

SEQ ID NO: 1667356 - RNA, 19 nt, Artificial Sequence
  Description of Artificial Sequence: Synthetic oligonucleotide
aagaggauaacucuuguag

SEQ ID NO: 1667357 - RNA, 19 nt, Artificial Sequence
  Description of Artificial Sequence: Synthetic oligonucleotide
uaugauauugcuuugcuca

SEQ ID NO: 1667358 - RNA, 19 nt, Artificial Sequence
  Description of Artificial Sequence: Synthetic oligonucleotide
aguauuuucacucccuggc

SEQ ID NO: 1667359 - RNA, 19 nt, Artificial Sequence
  Description of Artificial Sequence: Synthetic oligonucleotide
acaugauuugacuagggac

SEQ ID NO: 1667360 - RNA, 19 nt, Artificial Sequence
  Description of Artificial Sequence: Synthetic oligonucleotide
aaaggguuaaugcaagaag

SEQ ID NO: 1667361 - RNA, 19 nt, Artificial Sequence
  Description of Artificial Sequence: Synthetic oligonucleotide
aaaagauuccaugagaccu

SEQ ID NO: 1667362 - RNA, 19 nt, Artificial Sequence
  Description of Artificial Sequence: Synthetic oligonucleotide
aucagcaaaggguuaaugc

SEQ ID NO: 1667363 - RNA, 19 nt, Artificial Sequence
  Description of Artificial Sequence: Synthetic oligonucleotide
aaacauguuagcacaaccc

SEQ ID NO: 1667364 - RNA, 19 nt, Artificial Sequence
  Description of Artificial Sequence: Synthetic oligonucleotide
agcaaaacagcacuacugc

SEQ ID NO: 1667365 - RNA, 19 nt, Artificial Sequence
  Description of Artificial Sequence: Synthetic oligonucleotide
auacacacccuucagaagg

SEQ ID NO: 1667366 - RNA, 19 nt, Artificial Sequence
  Description of Artificial Sequence: Synthetic oligonucleotide
caucgagaaaugaagaugg

SEQ ID NO: 1667367 - RNA, 19 nt, Artificial Sequence
  Description of Artificial Sequence: Synthetic oligonucleotide
aaggauagaagaauuuggc

SEQ ID NO: 1667368 - RNA, 19 nt, Artificial Sequence
  Description of Artificial Sequence: Synthetic oligonucleotide
uguaccuuguccaucaacc

SEQ ID NO: 1667369 - RNA, 19 nt, Artificial Sequence
  Description of Artificial Sequence: Synthetic oligonucleotide
agagcaaacauguuagcac

SEQ ID NO: 1667370 - RNA, 19 nt, Artificial Sequence
  Description of Artificial Sequence: Synthetic oligonucleotide
ucaccuguaagacaucugg

SEQ ID NO: 1667371 - RNA, 19 nt, Artificial Sequence
  Description of Artificial Sequence: Synthetic oligonucleotide
agaaccaaugaucauuugg

SEQ ID NO: 1667372 - RNA, 19 nt, Artificial Sequence
  Description of Artificial Sequence: Synthetic oligonucleotide
aagacaaagaggauaacuc

SEQ ID NO: 1667373 - RNA, 19 nt, Artificial Sequence
  Description of Artificial Sequence: Synthetic oligonucleotide
aaaggauagaagaauuugg

SEQ ID NO: 1667374 - RNA, 19 nt, Artificial Sequence
  Description of Artificial Sequence: Synthetic oligonucleotide
aaaacagcacuacugccuc

SEQ ID NO: 1667375 - RNA, 19 nt, Artificial Sequence
  Description of Artificial Sequence: Synthetic oligonucleotide
uuuguaaagugcuacuuug

SEQ ID NO: 1667376 - RNA, 19 nt, Artificial Sequence
  Description of Artificial Sequence: Synthetic oligonucleotide
uacaacaaagaccuuccgg

SEQ ID NO: 1667377 - RNA, 19 nt, Artificial Sequence
  Description of Artificial Sequence: Synthetic oligonucleotide
uuaacagcaccgaagauaa

SEQ ID NO: 1667378 - RNA, 19 nt, Artificial Sequence
  Description of Artificial Sequence: Synthetic oligonucleotide
agaggauaacucuuguagc

SEQ ID NO: 1667379 - RNA, 19 nt, Artificial Sequence
  Description of Artificial Sequence: Synthetic oligonucleotide
gaaccaaugaucauuuggg

SEQ ID NO: 1667380 - RNA, 19 nt, Artificial Sequence
  Description of Artificial Sequence: Synthetic oligonucleotide
aguguaguauuuucacucc

SEQ ID NO: 1667381 - RNA, 19 nt, Artificial Sequence
  Description of Artificial Sequence: Synthetic oligonucleotide
acugguacaacaaagaccu

SEQ ID NO: 1667382 - RNA, 19 nt, Artificial Sequence
  Description of Artificial Sequence: Synthetic oligonucleotide
acauagaagaggcuccgcc

SEQ ID NO: 1667383 - RNA, 19 nt, Artificial Sequence
  Description of Artificial Sequence: Synthetic oligonucleotide
acaacaaagaccuuccgga

SEQ ID NO: 1667384 - RNA, 19 nt, Artificial Sequence
  Description of Artificial Sequence: Synthetic oligonucleotide
ugaaacagcauccagccau

SEQ ID NO: 1667385 - RNA, 19 nt, Artificial Sequence
  Description of Artificial Sequence: Synthetic oligonucleotide
uguaaagugcuacuuugcc

SEQ ID NO: 1667386 - RNA, 19 nt, Artificial Sequence
  Description of Artificial Sequence: Synthetic oligonucleotide
aauucugcaagcacuucgc

SEQ ID NO: 1667387 - RNA, 19 nt, Artificial Sequence
  Description of Artificial Sequence: Synthetic oligonucleotide
auuuauuuccccagcaccc

SEQ ID NO: 1667388 - RNA, 19 nt, Artificial Sequence
  Description of Artificial Sequence: Synthetic oligonucleotide
aaccaaugaucauuugggg

SEQ ID NO: 1667389 - RNA, 19 nt, Artificial Sequence
  Description of Artificial Sequence: Synthetic oligonucleotide
gacugcagaauacacaccc

SEQ ID NO: 1667390 - RNA, 19 nt, Artificial Sequence
  Description of Artificial Sequence: Synthetic oligonucleotide
auggauaugauauugcuuu

SEQ ID NO: 1667391 - RNA, 19 nt, Artificial Sequence
  Description of Artificial Sequence: Synthetic oligonucleotide
aagguuuagaaccaaugau

SEQ ID NO: 1667392 - RNA, 19 nt, Artificial Sequence
  Description of Artificial Sequence: Synthetic oligonucleotide
ucuaaggaaagagaugucc

SEQ ID NO: 1667393 - RNA, 19 nt, Artificial Sequence
  Description of Artificial Sequence: Synthetic oligonucleotide
ucagcaaaggguuaaugca

SEQ ID NO: 1667394 - RNA, 19 nt, Artificial Sequence
  Description of Artificial Sequence: Synthetic oligonucleotide
auucacaugauuugacuag

SEQ ID NO: 1667395 - RNA, 19 nt, Artificial Sequence
  Description of Artificial Sequence: Synthetic oligonucleotide
caugcaaacucgcaaaacc

SEQ ID NO: 1667396 - RNA, 19 nt, Artificial Sequence
  Description of Artificial Sequence: Synthetic oligonucleotide
auuugggagacagagagag

SEQ ID NO: 1667397 - RNA, 19 nt, Artificial Sequence
  Description of Artificial Sequence: Synthetic oligonucleotide
auucgggagacucagagca

SEQ ID NO: 1667398 - RNA, 19 nt, Artificial Sequence
  Description of Artificial Sequence: Synthetic oligonucleotide
ugcuuugagaacacaaagc

SEQ ID NO: 1667399 - RNA, 19 nt, Artificial Sequence
  Description of Artificial Sequence: Synthetic oligonucleotide
accgaagauaaccacacag

SEQ ID NO: 1667400 - RNA, 19 nt, Artificial Sequence
  Description of Artificial Sequence: Synthetic oligonucleotide
aaagcaaaacagcacuacu

SEQ ID NO: 1667401 - RNA, 19 nt, Artificial Sequence
  Description of Artificial Sequence: Synthetic oligonucleotide
agauuuauuuccccagcac

SEQ ID NO: 1667402 - RNA, 19 nt, Artificial Sequence
  Description of Artificial Sequence: Synthetic oligonucleotide
ucugcagaaccaaaggaca

SEQ ID NO: 1667403 - RNA, 19 nt, Artificial Sequence
  Description of Artificial Sequence: Synthetic oligonucleotide
uguccaacgucccucaccc

SEQ ID NO: 1667404 - RNA, 19 nt, Artificial Sequence
  Description of Artificial Sequence: Synthetic oligonucleotide
aauacacacccuucagaag

SEQ ID NO: 1667405 - RNA, 19 nt, Artificial Sequence
  Description of Artificial Sequence: Synthetic oligonucleotide
aagauuuauuuccccagca

SEQ ID NO: 1667406 - RNA, 19 nt, Artificial Sequence
  Description of Artificial Sequence: Synthetic oligonucleotide
uccaaaagauuccaugaga

SEQ ID NO: 1667407 - RNA, 19 nt, Artificial Sequence
  Description of Artificial Sequence: Synthetic oligonucleotide
cacucaacgucuaugaaac

SEQ ID NO: 1667408 - RNA, 19 nt, Artificial Sequence
  Description of Artificial Sequence: Synthetic oligonucleotide
ugggaugaaugccacagcc

SEQ ID NO: 1667409 - RNA, 19 nt, Artificial Sequence
  Description of Artificial Sequence: Synthetic oligonucleotide
gauuccaugagaccucaag

SEQ ID NO: 1667410 - RNA, 19 nt, Artificial Sequence
  Description of Artificial Sequence: Synthetic oligonucleotide
uuugacuagggacugcaga

SEQ ID NO: 1667411 - RNA, 19 nt, Artificial Sequence
  Description of Artificial Sequence: Synthetic oligonucleotide
uuugagagcccugaaagug

SEQ ID NO: 1667412 - RNA, 19 nt, Artificial Sequence
  Description of Artificial Sequence: Synthetic oligonucleotide
auuauugcuucuccagagg

SEQ ID NO: 1667413 - RNA, 19 nt, Artificial Sequence
  Description of Artificial Sequence: Synthetic oligonucleotide
uugagagcccugaaagugg

SEQ ID NO: 1667414 - RNA, 19 nt, Artificial Sequence
  Description of Artificial Sequence: Synthetic oligonucleotide
gauauugcuuugcucacug

SEQ ID NO: 1667415 - RNA, 19 nt, Artificial Sequence
  Description of Artificial Sequence: Synthetic oligonucleotide
gaagguuuagaaccaauga

SEQ ID NO: 1667416 - RNA, 19 nt, Artificial Sequence
  Description of Artificial Sequence: Synthetic oligonucleotide
aaagugcuacuuugccacc

SEQ ID NO: 1667417 - RNA, 19 nt, Artificial Sequence
  Description of Artificial Sequence: Synthetic oligonucleotide
agguuuagaaccaaugauc

SEQ ID NO: 1667418 - RNA, 19 nt, Artificial Sequence
  Description of Artificial Sequence: Synthetic oligonucleotide
uucacaguggaagauucgg

SEQ ID NO: 1667419 - RNA, 19 nt, Artificial Sequence
  Description of Artificial Sequence: Synthetic oligonucleotide
agauucgggagacucagag

SEQ ID NO: 1667420 - RNA, 19 nt, Artificial Sequence
  Description of Artificial Sequence: Synthetic oligonucleotide
ugcaaacucgcaaaacccc

SEQ ID NO: 1667421 - RNA, 19 nt, Artificial Sequence
  Description of Artificial Sequence: Synthetic oligonucleotide
uuuagaaccaaugaucauu

SEQ ID NO: 1667422 - RNA, 19 nt, Artificial Sequence
  Description of Artificial Sequence: Synthetic oligonucleotide
cacugguacaacaaagacc

SEQ ID NO: 1667423 - RNA, 19 nt, Artificial Sequence
  Description of Artificial Sequence: Synthetic oligonucleotide
cugauuaccaagaagagcu

SEQ ID NO: 1667424 - RNA, 19 nt, Artificial Sequence
  Description of Artificial Sequence: Synthetic oligonucleotide
uggggagaagccauuaccc

SEQ ID NO: 1667425 - RNA, 19 nt, Artificial Sequence
  Description of Artificial Sequence: Synthetic oligonucleotide
cugcugauuaccaagaaga

SEQ ID NO: 1667426 - RNA, 19 nt, Artificial Sequence
  Description of Artificial Sequence: Synthetic oligonucleotide
ucaugguaaaagacaaaga

SEQ ID NO: 1667427 - RNA, 19 nt, Artificial Sequence
  Description of Artificial Sequence: Synthetic oligonucleotide
agacaaagaggauaacucu

SEQ ID NO: 1667428 - RNA, 19 nt, Artificial Sequence
  Description of Artificial Sequence: Synthetic oligonucleotide
ucacaguggaagauucggg

SEQ ID NO: 1667429 - RNA, 19 nt, Artificial Sequence
  Description of Artificial Sequence: Synthetic oligonucleotide
gauuaccaagaagagcugg

SEQ ID NO: 1667430 - RNA, 19 nt, Artificial Sequence
  Description of Artificial Sequence: Synthetic oligonucleotide
uuguaaagugcuacuuugc

SEQ ID NO: 1667431 - RNA, 19 nt, Artificial Sequence
  Description of Artificial Sequence: Synthetic oligonucleotide
ugaucccuauagcucaagg

SEQ ID NO: 1667432 - RNA, 19 nt, Artificial Sequence
  Description of Artificial Sequence: Synthetic oligonucleotide
augcaaacucgcaaaaccc

SEQ ID NO: 1667433 - RNA, 19 nt, Artificial Sequence
  Description of Artificial Sequence: Synthetic oligonucleotide
aaaugggcucuguccaacg

SEQ ID NO: 1667434 - RNA, 19 nt, Artificial Sequence
  Description of Artificial Sequence: Synthetic oligonucleotide
ucacaugauuugacuaggg

SEQ ID NO: 1667435 - RNA, 19 nt, Artificial Sequence
  Description of Artificial Sequence: Synthetic oligonucleotide
uucacaugauuugacuagg

SEQ ID NO: 1667436 - RNA, 19 nt, Artificial Sequence
  Description of Artificial Sequence: Synthetic oligonucleotide
acucaagcaauccuaccag

SEQ ID NO: 1667437 - RNA, 19 nt, Artificial Sequence
  Description of Artificial Sequence: Synthetic oligonucleotide
ugauucacaugauuugacu

SEQ ID NO: 1667438 - RNA, 19 nt, Artificial Sequence
  Description of Artificial Sequence: Synthetic oligonucleotide
ugagagcccugaaaguggg

SEQ ID NO: 1667439 - RNA, 19 nt, Artificial Sequence
  Description of Artificial Sequence: Synthetic oligonucleotide
ggaauuauugcuucuccag

SEQ ID NO: 1667440 - RNA, 19 nt, Artificial Sequence
  Description of Artificial Sequence: Synthetic oligonucleotide
auuccaugagaccucaaga

SEQ ID NO: 1667441 - RNA, 19 nt, Artificial Sequence
  Description of Artificial Sequence: Synthetic oligonucleotide
ucagccaucgagaaaugaa

SEQ ID NO: 1667442 - RNA, 19 nt, Artificial Sequence
  Description of Artificial Sequence: Synthetic oligonucleotide
auagcucaaggugacauag

SEQ ID NO: 1667443 - RNA, 19 nt, Artificial Sequence
  Description of Artificial Sequence: Synthetic oligonucleotide
ugguucucauacaagauuu

SEQ ID NO: 1667444 - RNA, 19 nt, Artificial Sequence
  Description of Artificial Sequence: Synthetic oligonucleotide
aagugcuacuuugccaccc

SEQ ID NO: 1667445 - RNA, 19 nt, Artificial Sequence
  Description of Artificial Sequence: Synthetic oligonucleotide
aaaccccacuuccuucccc

SEQ ID NO: 1667446 - RNA, 19 nt, Artificial Sequence
  Description of Artificial Sequence: Synthetic oligonucleotide
cucaguguaguauuuucac

SEQ ID NO: 1667447 - RNA, 19 nt, Artificial Sequence
  Description of Artificial Sequence: Synthetic oligonucleotide
gaagauucgggagacucag

SEQ ID NO: 1667448 - RNA, 19 nt, Artificial Sequence
  Description of Artificial Sequence: Synthetic oligonucleotide
cauagaagaggcuccgccc

SEQ ID NO: 1667449 - RNA, 19 nt, Artificial Sequence
  Description of Artificial Sequence: Synthetic oligonucleotide
agcuccaaaagauuccaug

SEQ ID NO: 1667450 - RNA, 19 nt, Artificial Sequence
  Description of Artificial Sequence: Synthetic oligonucleotide
cucgcaaaaccccacuucc

SEQ ID NO: 1667451 - RNA, 19 nt, Artificial Sequence
  Description of Artificial Sequence: Synthetic oligonucleotide
uugauucacaugauuugac

SEQ ID NO: 1667452 - RNA, 19 nt, Artificial Sequence
  Description of Artificial Sequence: Synthetic oligonucleotide
cucaacgucuaugaaacag

SEQ ID NO: 1667453 - RNA, 19 nt, Artificial Sequence
  Description of Artificial Sequence: Synthetic oligonucleotide
gagaaaugaagaugggcuc

SEQ ID NO: 1667454 - RNA, 19 nt, Artificial Sequence
  Description of Artificial Sequence: Synthetic oligonucleotide
caagauuuauuuccccagc

SEQ ID NO: 1667455 - RNA, 19 nt, Artificial Sequence
  Description of Artificial Sequence: Synthetic oligonucleotide
ucgagaaaugaagaugggc

SEQ ID NO: 1667456 - RNA, 19 nt, Artificial Sequence
  Description of Artificial Sequence: Synthetic oligonucleotide
acucgcaaaaccccacuuc

SEQ ID NO: 1667457 - RNA, 19 nt, Artificial Sequence
  Description of Artificial Sequence: Synthetic oligonucleotide
uggcucuaaggaaagagau

SEQ ID NO: 1667458 - RNA, 19 nt, Artificial Sequence
  Description of Artificial Sequence: Synthetic oligonucleotide
agaauuuggcuugagcucu

SEQ ID NO: 1667459 - RNA, 19 nt, Artificial Sequence
  Description of Artificial Sequence: Synthetic oligonucleotide
ucaguguaguauuuucacu

SEQ ID NO: 1667460 - RNA, 19 nt, Artificial Sequence
  Description of Artificial Sequence: Synthetic oligonucleotide
aaagaggauaacucuugua

SEQ ID NO: 1667461 - RNA, 19 nt, Artificial Sequence
  Description of Artificial Sequence: Synthetic oligonucleotide
aguggaagauucgggagac

SEQ ID NO: 1667462 - RNA, 19 nt, Artificial Sequence
  Description of Artificial Sequence: Synthetic oligonucleotide
aggacaaacuugcuuugag

SEQ ID NO: 1667463 - RNA, 19 nt, Artificial Sequence
  Description of Artificial Sequence: Synthetic oligonucleotide
acagagagaggcaguaggc

SEQ ID NO: 1667464 - RNA, 19 nt, Artificial Sequence
  Description of Artificial Sequence: Synthetic oligonucleotide
ccaagagcaaacauguuag

SEQ ID NO: 1667465 - RNA, 19 nt, Artificial Sequence
  Description of Artificial Sequence: Synthetic oligonucleotide
guuaaugcaagaaggaaaa

SEQ ID NO: 1667466 - RNA, 19 nt, Artificial Sequence
  Description of Artificial Sequence: Synthetic oligonucleotide
uugcuuugcucacugcuca

SEQ ID NO: 1667467 - RNA, 19 nt, Artificial Sequence
  Description of Artificial Sequence: Synthetic oligonucleotide
gcuuugagaacacaaagca

SEQ ID NO: 1667468 - RNA, 19 nt, Artificial Sequence
  Description of Artificial Sequence: Synthetic oligonucleotide
auauugcuuugcucacugc

SEQ ID NO: 1667469 - RNA, 19 nt, Artificial Sequence
  Description of Artificial Sequence: Synthetic oligonucleotide
aagccauuaccccucacuu

SEQ ID NO: 1667470 - RNA, 19 nt, Artificial Sequence
  Description of Artificial Sequence: Synthetic oligonucleotide
cacuucgcagugcugaggg

SEQ ID NO: 1667471 - RNA, 19 nt, Artificial Sequence
  Description of Artificial Sequence: Synthetic oligonucleotide
uuaccccucacuuccacac

SEQ ID NO: 1667472 - RNA, 19 nt, Artificial Sequence
  Description of Artificial Sequence: Synthetic oligonucleotide
cugagggucagccaucgag

SEQ ID NO: 1667473 - RNA, 19 nt, Artificial Sequence
  Description of Artificial Sequence: Synthetic oligonucleotide
aaacucgcaaaaccccacu

SEQ ID NO: 1667474 - RNA, 19 nt, Artificial Sequence
  Description of Artificial Sequence: Synthetic oligonucleotide
ccaaaagauuccaugagac

SEQ ID NO: 1667475 - RNA, 19 nt, Artificial Sequence
  Description of Artificial Sequence: Synthetic oligonucleotide
caaauaugggagugcuggg

SEQ ID NO: 1667476 - RNA, 19 nt, Artificial Sequence
  Description of Artificial Sequence: Synthetic oligonucleotide
uuuauuuccccagcacccc

SEQ ID NO: 1667477 - RNA, 19 nt, Artificial Sequence
  Description of Artificial Sequence: Synthetic oligonucleotide
aguggggagaagccauuac

SEQ ID NO: 1667478 - RNA, 19 nt, Artificial Sequence
  Description of Artificial Sequence: Synthetic oligonucleotide
ucccgugaggugaagagaa

SEQ ID NO: 1667479 - RNA, 19 nt, Artificial Sequence
  Description of Artificial Sequence: Synthetic oligonucleotide
guaaagugcuacuuugcca

SEQ ID NO: 1667480 - RNA, 19 nt, Artificial Sequence
  Description of Artificial Sequence: Synthetic oligonucleotide
guggaauuauugcuucucc

SEQ ID NO: 1667481 - RNA, 19 nt, Artificial Sequence
  Description of Artificial Sequence: Synthetic oligonucleotide
guauuuucacucccuggcc

SEQ ID NO: 1667482 - RNA, 19 nt, Artificial Sequence
  Description of Artificial Sequence: Synthetic oligonucleotide
cucauacaagauuuauuuc

SEQ ID NO: 1667483 - RNA, 19 nt, Artificial Sequence
  Description of Artificial Sequence: Synthetic oligonucleotide
aauggauaugauauugcuu

SEQ ID NO: 1667484 - RNA, 19 nt, Artificial Sequence
  Description of Artificial Sequence: Synthetic oligonucleotide
ugauuaccaagaagagcug

SEQ ID NO: 1667485 - RNA, 19 nt, Artificial Sequence
  Description of Artificial Sequence: Synthetic oligonucleotide
guccaaagcauuugagagc

SEQ ID NO: 1667486 - RNA, 19 nt, Artificial Sequence
  Description of Artificial Sequence: Synthetic oligonucleotide
ugcagaauacacacccuuc

SEQ ID NO: 1667487 - RNA, 19 nt, Artificial Sequence
  Description of Artificial Sequence: Synthetic oligonucleotide
gauucgggagacucagagc

SEQ ID NO: 1667488 - RNA, 19 nt, Artificial Sequence
  Description of Artificial Sequence: Synthetic oligonucleotide
acgucccucacccaaauau

SEQ ID NO: 1667489 - RNA, 19 nt, Artificial Sequence
  Description of Artificial Sequence: Synthetic oligonucleotide
acaaagaggauaacucuug

SEQ ID NO: 1667490 - RNA, 19 nt, Artificial Sequence
  Description of Artificial Sequence: Synthetic oligonucleotide
uggauaugauauugcuuug

SEQ ID NO: 1667491 - RNA, 19 nt, Artificial Sequence
  Description of Artificial Sequence: Synthetic oligonucleotide
ugugcacccagaccuaaaa

SEQ ID NO: 1667492 - RNA, 19 nt, Artificial Sequence
  Description of Artificial Sequence: Synthetic oligonucleotide
uccaacgucccucacccaa

SEQ ID NO: 1667493 - RNA, 19 nt, Artificial Sequence
  Description of Artificial Sequence: Synthetic oligonucleotide
gaggauaacucuuguagcu

SEQ ID NO: 1667494 - RNA, 19 nt, Artificial Sequence
  Description of Artificial Sequence: Synthetic oligonucleotide
cucaagcaauccuaccagc

SEQ ID NO: 1667495 - RNA, 19 nt, Artificial Sequence
  Description of Artificial Sequence: Synthetic oligonucleotide
ucagccagauggucaaaug

SEQ ID NO: 1667496 - RNA, 19 nt, Artificial Sequence
  Description of Artificial Sequence: Synthetic oligonucleotide
gaagauaaccacacagcuc

SEQ ID NO: 1667497 - RNA, 19 nt, Artificial Sequence
  Description of Artificial Sequence: Synthetic oligonucleotide
gcucuuguaucagugaggg

SEQ ID NO: 1667498 - RNA, 19 nt, Artificial Sequence
  Description of Artificial Sequence: Synthetic oligonucleotide
uaccuuguccaucaaccaa

SEQ ID NO: 1667499 - RNA, 19 nt, Artificial Sequence
  Description of Artificial Sequence: Synthetic oligonucleotide
aaggaaagagauguccaaa

SEQ ID NO: 1667500 - RNA, 19 nt, Artificial Sequence
  Description of Artificial Sequence: Synthetic oligonucleotide
uuauuuccccagcacccca

SEQ ID NO: 1667501 - RNA, 19 nt, Artificial Sequence
  Description of Artificial Sequence: Synthetic oligonucleotide
gucaaauggagccaggggu

SEQ ID NO: 1667502 - RNA, 19 nt, Artificial Sequence
  Description of Artificial Sequence: Synthetic oligonucleotide
ugagaccucaagacagaga

SEQ ID NO: 1667503 - RNA, 19 nt, Artificial Sequence
  Description of Artificial Sequence: Synthetic oligonucleotide
ggaaagagauguccaaagc

SEQ ID NO: 1667504 - RNA, 19 nt, Artificial Sequence
  Description of Artificial Sequence: Synthetic oligonucleotide
augggcucuguccaacguc

SEQ ID NO: 1667505 - RNA, 19 nt, Artificial Sequence
  Description of Artificial Sequence: Synthetic oligonucleotide
agccauuaccccucacuuc

SEQ ID NO: 1667506 - RNA, 19 nt, Artificial Sequence
  Description of Artificial Sequence: Synthetic oligonucleotide
gguuuagaaccaaugauca

SEQ ID NO: 1667507 - RNA, 19 nt, Artificial Sequence
  Description of Artificial Sequence: Synthetic oligonucleotide
guacaacaaagaccuuccg

SEQ ID NO: 1667508 - RNA, 19 nt, Artificial Sequence
  Description of Artificial Sequence: Synthetic oligonucleotide
acuagggacugcagaauac

SEQ ID NO: 1667509 - RNA, 19 nt, Artificial Sequence
  Description of Artificial Sequence: Synthetic oligonucleotide
ugcuacuuugccacccucu

SEQ ID NO: 1667510 - RNA, 19 nt, Artificial Sequence
  Description of Artificial Sequence: Synthetic oligonucleotide
gauuugacuagggacugca

SEQ ID NO: 1667511 - RNA, 19 nt, Artificial Sequence
  Description of Artificial Sequence: Synthetic oligonucleotide
acacacucaugcaaacucg

SEQ ID NO: 1667512 - RNA, 19 nt, Artificial Sequence
  Description of Artificial Sequence: Synthetic oligonucleotide
gguacaacaaagaccuucc

SEQ ID NO: 1667513 - RNA, 19 nt, Artificial Sequence
  Description of Artificial Sequence: Synthetic oligonucleotide
ucgggagacucagagcagg

SEQ ID NO: 1667514 - RNA, 19 nt, Artificial Sequence
  Description of Artificial Sequence: Synthetic oligonucleotide
ucacccaaauaugggagug

SEQ ID NO: 1667515 - RNA, 19 nt, Artificial Sequence
  Description of Artificial Sequence: Synthetic oligonucleotide
caagagcaaacauguuagc

SEQ ID NO: 1667516 - RNA, 19 nt, Artificial Sequence
  Description of Artificial Sequence: Synthetic oligonucleotide
accacacagcuccaaaaga

SEQ ID NO: 1667517 - RNA, 19 nt, Artificial Sequence
  Description of Artificial Sequence: Synthetic oligonucleotide
aucaaccaagagcaaacau

SEQ ID NO: 1667518 - RNA, 19 nt, Artificial Sequence
  Description of Artificial Sequence: Synthetic oligonucleotide
gucccucacccaaauaugg

SEQ ID NO: 1667519 - RNA, 19 nt, Artificial Sequence
  Description of Artificial Sequence: Synthetic oligonucleotide
uccaucaaccaagagcaaa

SEQ ID NO: 1667520 - RNA, 19 nt, Artificial Sequence
  Description of Artificial Sequence: Synthetic oligonucleotide
cuaccagccagcugauccc

SEQ ID NO: 1667521 - RNA, 19 nt, Artificial Sequence
  Description of Artificial Sequence: Synthetic oligonucleotide
gagaugggcucuuguauca

SEQ ID NO: 1667522 - RNA, 19 nt, Artificial Sequence
  Description of Artificial Sequence: Synthetic oligonucleotide
gaagagaugggcucuugua

SEQ ID NO: 1667523 - RNA, 19 nt, Artificial Sequence
  Description of Artificial Sequence: Synthetic oligonucleotide
ccuaccagccagcugaucc

SEQ ID NO: 1667524 - RNA, 19 nt, Artificial Sequence
  Description of Artificial Sequence: Synthetic oligonucleotide
uggccucuguaccuugucc

SEQ ID NO: 1667525 - RNA, 19 nt, Artificial Sequence
  Description of Artificial Sequence: Synthetic oligonucleotide
augaaugccacagccauuu

SEQ ID NO: 1667526 - RNA, 19 nt, Artificial Sequence
  Description of Artificial Sequence: Synthetic oligonucleotide
aaagaccuuccggauuuug

SEQ ID NO: 1667527 - RNA, 19 nt, Artificial Sequence
  Description of Artificial Sequence: Synthetic oligonucleotide
agcaaaggguuaaugcaag

SEQ ID NO: 1667528 - RNA, 19 nt, Artificial Sequence
  Description of Artificial Sequence: Synthetic oligonucleotide
agagcucaccuguaagaca

SEQ ID NO: 1667529 - RNA, 19 nt, Artificial Sequence
  Description of Artificial Sequence: Synthetic oligonucleotide
caaacucgcaaaaccccac

SEQ ID NO: 1667530 - RNA, 19 nt, Artificial Sequence
  Description of Artificial Sequence: Synthetic oligonucleotide
ucaugcaaacucgcaaaac

SEQ ID NO: 1667531 - RNA, 19 nt, Artificial Sequence
  Description of Artificial Sequence: Synthetic oligonucleotide
aacucgcaaaaccccacuu

SEQ ID NO: 1667532 - RNA, 19 nt, Artificial Sequence
  Description of Artificial Sequence: Synthetic oligonucleotide
ccgaagauaaccacacagc

SEQ ID NO: 1667533 - RNA, 19 nt, Artificial Sequence
  Description of Artificial Sequence: Synthetic oligonucleotide
uauagcucaaggugacaua

SEQ ID NO: 1667534 - RNA, 19 nt, Artificial Sequence
  Description of Artificial Sequence: Synthetic oligonucleotide
aggauaacucuuguagcug

SEQ ID NO: 1667535 - RNA, 19 nt, Artificial Sequence
  Description of Artificial Sequence: Synthetic oligonucleotide
gaagccauuaccccucacu

SEQ ID NO: 1667536 - RNA, 19 nt, Artificial Sequence
  Description of Artificial Sequence: Synthetic oligonucleotide
caacgucuaugaaacagca

SEQ ID NO: 1667537 - RNA, 19 nt, Artificial Sequence
  Description of Artificial Sequence: Synthetic oligonucleotide
uauuuccccagcaccccac

SEQ ID NO: 1667538 - RNA, 19 nt, Artificial Sequence
  Description of Artificial Sequence: Synthetic oligonucleotide
gaaggagcucugcugauua

SEQ ID NO: 1667539 - RNA, 19 nt, Artificial Sequence
  Description of Artificial Sequence: Synthetic oligonucleotide
gaucccuauagcucaaggu

SEQ ID NO: 1667540 - RNA, 19 nt, Artificial Sequence
  Description of Artificial Sequence: Synthetic oligonucleotide
uucgggagacucagagcag

SEQ ID NO: 1667541 - RNA, 19 nt, Artificial Sequence
  Description of Artificial Sequence: Synthetic oligonucleotide
ugcugagggucagccaucg

SEQ ID NO: 1667542 - RNA, 19 nt, Artificial Sequence
  Description of Artificial Sequence: Synthetic oligonucleotide
cucuguaccuuguccauca

SEQ ID NO: 1667543 - RNA, 19 nt, Artificial Sequence
  Description of Artificial Sequence: Synthetic oligonucleotide
gguuaaugcaagaaggaaa

SEQ ID NO: 1667544 - RNA, 19 nt, Artificial Sequence
  Description of Artificial Sequence: Synthetic oligonucleotide
auucacaguggaagauucg

SEQ ID NO: 1667545 - RNA, 19 nt, Artificial Sequence
  Description of Artificial Sequence: Synthetic oligonucleotide
aagagauguccaaagcauu

SEQ ID NO: 1667546 - RNA, 19 nt, Artificial Sequence
  Description of Artificial Sequence: Synthetic oligonucleotide
aacagcacuacugccucaa

SEQ ID NO: 1667547 - RNA, 19 nt, Artificial Sequence
  Description of Artificial Sequence: Synthetic oligonucleotide
auuaccccucacuuccaca

SEQ ID NO: 1667548 - RNA, 19 nt, Artificial Sequence
  Description of Artificial Sequence: Synthetic oligonucleotide
ucgcaaaaccccacuuccu

SEQ ID NO: 1667549 - RNA, 19 nt, Artificial Sequence
  Description of Artificial Sequence: Synthetic oligonucleotide
ccaucaaccaagagcaaac

SEQ ID NO: 1667550 - RNA, 19 nt, Artificial Sequence
  Description of Artificial Sequence: Synthetic oligonucleotide
uagaaccaaugaucauuug

SEQ ID NO: 1667551 - RNA, 19 nt, Artificial Sequence
  Description of Artificial Sequence: Synthetic oligonucleotide
agagcccugaaagugggga

SEQ ID NO: 1667552 - RNA, 19 nt, Artificial Sequence
  Description of Artificial Sequence: Synthetic oligonucleotide
agacucagagcaggauccc

SEQ ID NO: 1667553 - RNA, 19 nt, Artificial Sequence
  Description of Artificial Sequence: Synthetic oligonucleotide
ggauaugauauugcuuugc

SEQ ID NO: 1667554 - RNA, 19 nt, Artificial Sequence
  Description of Artificial Sequence: Synthetic oligonucleotide
ucacuuccacacucaacgu

SEQ ID NO: 1667555 - RNA, 19 nt, Artificial Sequence
  Description of Artificial Sequence: Synthetic oligonucleotide
cuggcucuaaggaaagaga

SEQ ID NO: 1667556 - RNA, 19 nt, Artificial Sequence
  Description of Artificial Sequence: Synthetic oligonucleotide
augagaccucaagacagag

SEQ ID NO: 1667557 - RNA, 19 nt, Artificial Sequence
  Description of Artificial Sequence: Synthetic oligonucleotide
agcacuucgcagugcugag

SEQ ID NO: 1667558 - RNA, 19 nt, Artificial Sequence
  Description of Artificial Sequence: Synthetic oligonucleotide
cacaugauuugacuaggga

SEQ ID NO: 1667559 - RNA, 19 nt, Artificial Sequence
  Description of Artificial Sequence: Synthetic oligonucleotide
gaaaaugggcucuguccaa

SEQ ID NO: 1667560 - RNA, 19 nt, Artificial Sequence
  Description of Artificial Sequence: Synthetic oligonucleotide
ggagacucagagcaggauc

SEQ ID NO: 1667561 - RNA, 19 nt, Artificial Sequence
  Description of Artificial Sequence: Synthetic oligonucleotide
agcaccgaagauaaccaca

SEQ ID NO: 1667562 - RNA, 19 nt, Artificial Sequence
  Description of Artificial Sequence: Synthetic oligonucleotide
cacuuccacacucaacguc

SEQ ID NO: 1667563 - RNA, 19 nt, Artificial Sequence
  Description of Artificial Sequence: Synthetic oligonucleotide
uccgcccacaucacauuca

SEQ ID NO: 1667564 - RNA, 19 nt, Artificial Sequence
  Description of Artificial Sequence: Synthetic oligonucleotide
ccagggguuaacagcaccg

SEQ ID NO: 1667565 - RNA, 19 nt, Artificial Sequence
  Description of Artificial Sequence: Synthetic oligonucleotide
cauccagccauuccccuuc

SEQ ID NO: 1667566 - RNA, 19 nt, Artificial Sequence
  Description of Artificial Sequence: Synthetic oligonucleotide
aucgagaaaugaagauggg

SEQ ID NO: 1667567 - RNA, 19 nt, Artificial Sequence
  Description of Artificial Sequence: Synthetic oligonucleotide
agugcuacuuugccacccu

SEQ ID NO: 1667568 - RNA, 19 nt, Artificial Sequence
  Description of Artificial Sequence: Synthetic oligonucleotide
ggugaagagaagagauggg

SEQ ID NO: 1667569 - RNA, 19 nt, Artificial Sequence
  Description of Artificial Sequence: Synthetic oligonucleotide
gacuagggacugcagaaua

SEQ ID NO: 1667570 - RNA, 19 nt, Artificial Sequence
  Description of Artificial Sequence: Synthetic oligonucleotide
cuucgcagugcugaggguc

SEQ ID NO: 1667571 - RNA, 19 nt, Artificial Sequence
  Description of Artificial Sequence: Synthetic oligonucleotide
guaccuuguccaucaacca

SEQ ID NO: 1667572 - RNA, 19 nt, Artificial Sequence
  Description of Artificial Sequence: Synthetic oligonucleotide
cgucuaugaaacagcaucc

SEQ ID NO: 1667573 - RNA, 19 nt, Artificial Sequence
  Description of Artificial Sequence: Synthetic oligonucleotide
cagcaaaggguuaaugcaa

SEQ ID NO: 1667574 - RNA, 19 nt, Artificial Sequence
  Description of Artificial Sequence: Synthetic oligonucleotide
gggguuaacagcaccgaag

SEQ ID NO: 1667575 - RNA, 19 nt, Artificial Sequence
  Description of Artificial Sequence: Synthetic oligonucleotide
agaagccauuaccccucac

SEQ ID NO: 1667576 - RNA, 19 nt, Artificial Sequence
  Description of Artificial Sequence: Synthetic oligonucleotide
gcagaauacacacccuuca

SEQ ID NO: 1667577 - RNA, 19 nt, Artificial Sequence
  Description of Artificial Sequence: Synthetic oligonucleotide
aggaagugggccugcucug

SEQ ID NO: 1667578 - RNA, 19 nt, Artificial Sequence
  Description of Artificial Sequence: Synthetic oligonucleotide
augaaacagcauccagcca

SEQ ID NO: 1667579 - RNA, 19 nt, Artificial Sequence
  Description of Artificial Sequence: Synthetic oligonucleotide
ccucacccaaauaugggag

SEQ ID NO: 1667580 - RNA, 19 nt, Artificial Sequence
  Description of Artificial Sequence: Synthetic oligonucleotide
cucuaaggaaagagauguc

SEQ ID NO: 1667581 - RNA, 19 nt, Artificial Sequence
  Description of Artificial Sequence: Synthetic oligonucleotide
gcucuaaggaaagagaugu

SEQ ID NO: 1667582 - RNA, 19 nt, Artificial Sequence
  Description of Artificial Sequence: Synthetic oligonucleotide
ggggagaagccauuacccc

SEQ ID NO: 1667583 - RNA, 19 nt, Artificial Sequence
  Description of Artificial Sequence: Synthetic oligonucleotide
agauggucaaauggagcca

SEQ ID NO: 1667584 - RNA, 19 nt, Artificial Sequence
  Description of Artificial Sequence: Synthetic oligonucleotide
gucccugaggaucagcaaa

SEQ ID NO: 1667585 - RNA, 19 nt, Artificial Sequence
  Description of Artificial Sequence: Synthetic oligonucleotide
ggacaaacuugcuuugaga

SEQ ID NO: 1667586 - RNA, 19 nt, Artificial Sequence
  Description of Artificial Sequence: Synthetic oligonucleotide
gcucugauuugggagacag

SEQ ID NO: 1667587 - RNA, 19 nt, Artificial Sequence
  Description of Artificial Sequence: Synthetic oligonucleotide
uguaagacaucuggcucua

SEQ ID NO: 1667588 - RNA, 19 nt, Artificial Sequence
  Description of Artificial Sequence: Synthetic oligonucleotide
caguggaagauucgggaga

SEQ ID NO: 1667589 - RNA, 19 nt, Artificial Sequence
  Description of Artificial Sequence: Synthetic oligonucleotide
agccauuccccuucucagu

SEQ ID NO: 1667590 - RNA, 19 nt, Artificial Sequence
  Description of Artificial Sequence: Synthetic oligonucleotide
gcuacuuugccacccucug

SEQ ID NO: 1667591 - RNA, 19 nt, Artificial Sequence
  Description of Artificial Sequence: Synthetic oligonucleotide
ccaucgagaaaugaagaug

SEQ ID NO: 1667592 - RNA, 19 nt, Artificial Sequence
  Description of Artificial Sequence: Synthetic oligonucleotide
uuuuccccacauagagcuc

SEQ ID NO: 1667593 - RNA, 19 nt, Artificial Sequence
  Description of Artificial Sequence: Synthetic oligonucleotide
uuuucacucccuggccucu

SEQ ID NO: 1667594 - RNA, 19 nt, Artificial Sequence
  Description of Artificial Sequence: Synthetic oligonucleotide
cucuuguaucagugagggc

SEQ ID NO: 1667595 - RNA, 19 nt, Artificial Sequence
  Description of Artificial Sequence: Synthetic oligonucleotide
auuugacuagggacugcag

SEQ ID NO: 1667596 - RNA, 19 nt, Artificial Sequence
  Description of Artificial Sequence: Synthetic oligonucleotide
gcugccugacuucuguggc

SEQ ID NO: 1667597 - RNA, 19 nt, Artificial Sequence
  Description of Artificial Sequence: Synthetic oligonucleotide
gaggcacucaagcaauccu

SEQ ID NO: 1667598 - RNA, 19 nt, Artificial Sequence
  Description of Artificial Sequence: Synthetic oligonucleotide
ccacugguacaacaaagac

SEQ ID NO: 1667599 - RNA, 19 nt, Artificial Sequence
  Description of Artificial Sequence: Synthetic oligonucleotide
ggcaguaggcaggcgaagg

SEQ ID NO: 1667600 - RNA, 19 nt, Artificial Sequence
  Description of Artificial Sequence: Synthetic oligonucleotide
agacagagaggcacucaag

SEQ ID NO: 1667601 - RNA, 19 nt, Artificial Sequence
  Description of Artificial Sequence: Synthetic oligonucleotide
gcucccgugaggugaagag

SEQ ID NO: 1667602 - RNA, 19 nt, Artificial Sequence
  Description of Artificial Sequence: Synthetic oligonucleotide
cacucccuggccucuguac

SEQ ID NO: 1667603 - RNA, 19 nt, Artificial Sequence
  Description of Artificial Sequence: Synthetic oligonucleotide
gaaaguggggagaagccau

SEQ ID NO: 1667604 - RNA, 19 nt, Artificial Sequence
  Description of Artificial Sequence: Synthetic oligonucleotide
ugacuagggacugcagaau

SEQ ID NO: 1667605 - RNA, 19 nt, Artificial Sequence
  Description of Artificial Sequence: Synthetic oligonucleotide
acucaacgucuaugaaaca

SEQ ID NO: 1667606 - RNA, 19 nt, Artificial Sequence
  Description of Artificial Sequence: Synthetic oligonucleotide
uaggcaggcgaagguuuag

SEQ ID NO: 1667607 - RNA, 19 nt, Artificial Sequence
  Description of Artificial Sequence: Synthetic oligonucleotide
gagcucaccuguaagacau

SEQ ID NO: 1667608 - RNA, 19 nt, Artificial Sequence
  Description of Artificial Sequence: Synthetic oligonucleotide
aaauggagccagggguuaa

SEQ ID NO: 1667609 - RNA, 19 nt, Artificial Sequence
  Description of Artificial Sequence: Synthetic oligonucleotide
cacccaaauaugggagugc

SEQ ID NO: 1667610 - RNA, 19 nt, Artificial Sequence
  Description of Artificial Sequence: Synthetic oligonucleotide
uccggauuuugcucuccuc

SEQ ID NO: 1667611 - RNA, 19 nt, Artificial Sequence
  Description of Artificial Sequence: Synthetic oligonucleotide
gagacagagagaggcagua

SEQ ID NO: 1667612 - RNA, 19 nt, Artificial Sequence
  Description of Artificial Sequence: Synthetic oligonucleotide
gcaggcgaagguuuagaac

SEQ ID NO: 1667613 - RNA, 19 nt, Artificial Sequence
  Description of Artificial Sequence: Synthetic oligonucleotide
gaagugggccugcucugca

SEQ ID NO: 1667614 - RNA, 19 nt, Artificial Sequence
  Description of Artificial Sequence: Synthetic oligonucleotide
agaugggcucuuguaucag

SEQ ID NO: 1667615 - RNA, 19 nt, Artificial Sequence
  Description of Artificial Sequence: Synthetic oligonucleotide
acccuucagaaggagcucu

SEQ ID NO: 1667616 - RNA, 19 nt, Artificial Sequence
  Description of Artificial Sequence: Synthetic oligonucleotide
gugagggccccugugcacc

SEQ ID NO: 1667617 - RNA, 19 nt, Artificial Sequence
  Description of Artificial Sequence: Synthetic oligonucleotide
ggaugaaugccacagccau

SEQ ID NO: 1667618 - RNA, 19 nt, Artificial Sequence
  Description of Artificial Sequence: Synthetic oligonucleotide
uguaucagugagggccccu

SEQ ID NO: 1667619 - RNA, 19 nt, Artificial Sequence
  Description of Artificial Sequence: Synthetic oligonucleotide
ggggaguggucccugagga

SEQ ID NO: 1667620 - RNA, 19 nt, Artificial Sequence
  Description of Artificial Sequence: Synthetic oligonucleotide
uuccacacucaacgucuau

SEQ ID NO: 1667621 - RNA, 19 nt, Artificial Sequence
  Description of Artificial Sequence: Synthetic oligonucleotide
gagcucugauuugggagac

SEQ ID NO: 1667622 - RNA, 19 nt, Artificial Sequence
  Description of Artificial Sequence: Synthetic oligonucleotide
ggaguggucccugaggauc

SEQ ID NO: 1667623 - RNA, 19 nt, Artificial Sequence
  Description of Artificial Sequence: Synthetic oligonucleotide
cuuugccacccucugugga

SEQ ID NO: 1667624 - RNA, 19 nt, Artificial Sequence
  Description of Artificial Sequence: Synthetic oligonucleotide
ggcucuaaggaaagagaug

SEQ ID NO: 1667625 - RNA, 19 nt, Artificial Sequence
  Description of Artificial Sequence: Synthetic oligonucleotide
caggaagugggccugcucu

SEQ ID NO: 1667626 - RNA, 19 nt, Artificial Sequence
  Description of Artificial Sequence: Synthetic oligonucleotide
uuguaucagugagggcccc

SEQ ID NO: 1667627 - RNA, 19 nt, Artificial Sequence
  Description of Artificial Sequence: Synthetic oligonucleotide
aaaguggggagaagccauu

SEQ ID NO: 1667628 - RNA, 19 nt, Artificial Sequence
  Description of Artificial Sequence: Synthetic oligonucleotide
gagagcccugaaagugggg

SEQ ID NO: 1667629 - RNA, 19 nt, Artificial Sequence
  Description of Artificial Sequence: Synthetic oligonucleotide
aacgucccucacccaaaua

SEQ ID NO: 1667630 - RNA, 19 nt, Artificial Sequence
  Description of Artificial Sequence: Synthetic oligonucleotide
agcccugaaaguggggaga

SEQ ID NO: 1667631 - RNA, 19 nt, Artificial Sequence
  Description of Artificial Sequence: Synthetic oligonucleotide
acugcagaauacacacccu

SEQ ID NO: 1667632 - RNA, 19 nt, Artificial Sequence
  Description of Artificial Sequence: Synthetic oligonucleotide
gcaaaaccccacuuccuuc

SEQ ID NO: 1667633 - RNA, 19 nt, Artificial Sequence
  Description of Artificial Sequence: Synthetic oligonucleotide
uuccccacauagagcucac

SEQ ID NO: 1667634 - RNA, 19 nt, Artificial Sequence
  Description of Artificial Sequence: Synthetic oligonucleotide
cucacugcucagccagaug

SEQ ID NO: 1667635 - RNA, 19 nt, Artificial Sequence
  Description of Artificial Sequence: Synthetic oligonucleotide
caagcacuucgcagugcug

SEQ ID NO: 1667636 - RNA, 19 nt, Artificial Sequence
  Description of Artificial Sequence: Synthetic oligonucleotide
aagauucgggagacucaga

SEQ ID NO: 1667637 - RNA, 19 nt, Artificial Sequence
  Description of Artificial Sequence: Synthetic oligonucleotide
caaagaggauaacucuugu

SEQ ID NO: 1667638 - RNA, 19 nt, Artificial Sequence
  Description of Artificial Sequence: Synthetic oligonucleotide
ggaucccacugguacaaca

SEQ ID NO: 1667639 - RNA, 19 nt, Artificial Sequence
  Description of Artificial Sequence: Synthetic oligonucleotide
gagaagccauuaccccuca

SEQ ID NO: 1667640 - RNA, 19 nt, Artificial Sequence
  Description of Artificial Sequence: Synthetic oligonucleotide
cuauagcucaaggugacau

SEQ ID NO: 1667641 - RNA, 19 nt, Artificial Sequence
  Description of Artificial Sequence: Synthetic oligonucleotide
guuuagaaccaaugaucau

SEQ ID NO: 1667642 - RNA, 19 nt, Artificial Sequence
  Description of Artificial Sequence: Synthetic oligonucleotide
gacucagagcaggauccca

SEQ ID NO: 1667643 - RNA, 19 nt, Artificial Sequence
  Description of Artificial Sequence: Synthetic oligonucleotide
gcauuugagagcccugaaa

SEQ ID NO: 1667644 - RNA, 19 nt, Artificial Sequence
  Description of Artificial Sequence: Synthetic oligonucleotide
cucaagacagagaggcacu

SEQ ID NO: 1667645 - RNA, 19 nt, Artificial Sequence
  Description of Artificial Sequence: Synthetic oligonucleotide
uaccagccagcugaucccu

SEQ ID NO: 1667646 - RNA, 19 nt, Artificial Sequence
  Description of Artificial Sequence: Synthetic oligonucleotide
uuucacucccuggccucug

SEQ ID NO: 1667647 - RNA, 19 nt, Artificial Sequence
  Description of Artificial Sequence: Synthetic oligonucleotide
uccccuucucaguguagua

SEQ ID NO: 1667648 - RNA, 19 nt, Artificial Sequence
  Description of Artificial Sequence: Synthetic oligonucleotide
cucuguccaacgucccuca

SEQ ID NO: 1667649 - RNA, 19 nt, Artificial Sequence
  Description of Artificial Sequence: Synthetic oligonucleotide
acuucgcagugcugagggu

SEQ ID NO: 1667650 - RNA, 19 nt, Artificial Sequence
  Description of Artificial Sequence: Synthetic oligonucleotide
gaggcaguaggcaggcgaa

SEQ ID NO: 1667651 - RNA, 19 nt, Artificial Sequence
  Description of Artificial Sequence: Synthetic oligonucleotide
aggcacucaagcaauccua

SEQ ID NO: 1667652 - RNA, 19 nt, Artificial Sequence
  Description of Artificial Sequence: Synthetic oligonucleotide
gagcucugcugauuaccaa

SEQ ID NO: 1667653 - RNA, 19 nt, Artificial Sequence
  Description of Artificial Sequence: Synthetic oligonucleotide
agaaggagcucugcugauu

SEQ ID NO: 1667654 - RNA, 19 nt, Artificial Sequence
  Description of Artificial Sequence: Synthetic oligonucleotide
gccagcugaucccuauagc

SEQ ID NO: 1667655 - RNA, 19 nt, Artificial Sequence
  Description of Artificial Sequence: Synthetic oligonucleotide
gcaaaggguuaaugcaaga

SEQ ID NO: 1667656 - RNA, 19 nt, Artificial Sequence
  Description of Artificial Sequence: Synthetic oligonucleotide
aggcgaagguuuagaacca

SEQ ID NO: 1667657 - RNA, 19 nt, Artificial Sequence
  Description of Artificial Sequence: Synthetic oligonucleotide
cugaucccuauagcucaag

SEQ ID NO: 1667658 - RNA, 19 nt, Artificial Sequence
  Description of Artificial Sequence: Synthetic oligonucleotide
ggaagauucgggagacuca

SEQ ID NO: 1667659 - RNA, 19 nt, Artificial Sequence
  Description of Artificial Sequence: Synthetic oligonucleotide
gucagccaucgagaaauga

SEQ ID NO: 1667660 - RNA, 19 nt, Artificial Sequence
  Description of Artificial Sequence: Synthetic oligonucleotide
ggagcucugcugauuacca

SEQ ID NO: 1667661 - RNA, 19 nt, Artificial Sequence
  Description of Artificial Sequence: Synthetic oligonucleotide
cagugagggccccugugca

SEQ ID NO: 1667662 - RNA, 19 nt, Artificial Sequence
  Description of Artificial Sequence: Synthetic oligonucleotide
cucacccaaauaugggagu

SEQ ID NO: 1667663 - RNA, 19 nt, Artificial Sequence
  Description of Artificial Sequence: Synthetic oligonucleotide
cagaaccaaaggacaaacu

SEQ ID NO: 1667664 - RNA, 19 nt, Artificial Sequence
  Description of Artificial Sequence: Synthetic oligonucleotide
gggucagccaucgagaaau

SEQ ID NO: 1667665 - RNA, 19 nt, Artificial Sequence
  Description of Artificial Sequence: Synthetic oligonucleotide
cauuuguaaagugcuacuu

SEQ ID NO: 1667666 - RNA, 19 nt, Artificial Sequence
  Description of Artificial Sequence: Synthetic oligonucleotide
aggcaguaggcaggcgaag

SEQ ID NO: 1667667 - RNA, 19 nt, Artificial Sequence
  Description of Artificial Sequence: Synthetic oligonucleotide
ggaagugggccugcucugc

SEQ ID NO: 1667668 - RNA, 19 nt, Artificial Sequence
  Description of Artificial Sequence: Synthetic oligonucleotide
aggcaggcgaagguuuaga

SEQ ID NO: 1667669 - RNA, 19 nt, Artificial Sequence
  Description of Artificial Sequence: Synthetic oligonucleotide
gcuuugcucacugcucagc

SEQ ID NO: 1667670 - RNA, 19 nt, Artificial Sequence
  Description of Artificial Sequence: Synthetic oligonucleotide
agauaaccacacagcucca

SEQ ID NO: 1667671 - RNA, 19 nt, Artificial Sequence
  Description of Artificial Sequence: Synthetic oligonucleotide
gcaagcacuucgcagugcu

SEQ ID NO: 1667672 - RNA, 19 nt, Artificial Sequence
  Description of Artificial Sequence: Synthetic oligonucleotide
uccccacauagagcucacc

SEQ ID NO: 1667673 - RNA, 19 nt, Artificial Sequence
  Description of Artificial Sequence: Synthetic oligonucleotide
gugcuacuuugccacccuc

SEQ ID NO: 1667674 - RNA, 19 nt, Artificial Sequence
  Description of Artificial Sequence: Synthetic oligonucleotide
ggcaggcgaagguuuagaa

SEQ ID NO: 1667675 - RNA, 19 nt, Artificial Sequence
  Description of Artificial Sequence: Synthetic oligonucleotide
ggguugauucacaugauuu

SEQ ID NO: 1667676 - RNA, 19 nt, Artificial Sequence
  Description of Artificial Sequence: Synthetic oligonucleotide
ucgcagugcugagggucag

SEQ ID NO: 1667677 - RNA, 19 nt, Artificial Sequence
  Description of Artificial Sequence: Synthetic oligonucleotide
caggaucccacugguacaa

SEQ ID NO: 1667678 - RNA, 19 nt, Artificial Sequence
  Description of Artificial Sequence: Synthetic oligonucleotide
agcucaccuguaagacauc

SEQ ID NO: 1667679 - RNA, 19 nt, Artificial Sequence
  Description of Artificial Sequence: Synthetic oligonucleotide
ccacauagagcucaccugu

SEQ ID NO: 1667680 - RNA, 19 nt, Artificial Sequence
  Description of Artificial Sequence: Synthetic oligonucleotide
gcacuucgcagugcugagg

SEQ ID NO: 1667681 - RNA, 19 nt, Artificial Sequence
  Description of Artificial Sequence: Synthetic oligonucleotide
gaagaggcuccgcccacau

SEQ ID NO: 1667682 - RNA, 19 nt, Artificial Sequence
  Description of Artificial Sequence: Synthetic oligonucleotide
cgucccucacccaaauaug

SEQ ID NO: 1667683 - RNA, 19 nt, Artificial Sequence
  Description of Artificial Sequence: Synthetic oligonucleotide
gccaucgagaaaugaagau

SEQ ID NO: 1667684 - RNA, 19 nt, Artificial Sequence
  Description of Artificial Sequence: Synthetic oligonucleotide
aggcuccgcccacaucaca

SEQ ID NO: 1667685 - RNA, 19 nt, Artificial Sequence
  Description of Artificial Sequence: Synthetic oligonucleotide
caccgaagauaaccacaca

SEQ ID NO: 1667686 - RNA, 19 nt, Artificial Sequence
  Description of Artificial Sequence: Synthetic oligonucleotide
gguaaaagacaaagaggau

SEQ ID NO: 1667687 - RNA, 19 nt, Artificial Sequence
  Description of Artificial Sequence: Synthetic oligonucleotide
agcucugauuugggagaca

SEQ ID NO: 1667688 - RNA, 19 nt, Artificial Sequence
  Description of Artificial Sequence: Synthetic oligonucleotide
uccccucaccucccauuuu

SEQ ID NO: 1667689 - RNA, 19 nt, Artificial Sequence
  Description of Artificial Sequence: Synthetic oligonucleotide
gccccugugcacccagacc

SEQ ID NO: 1667690 - RNA, 19 nt, Artificial Sequence
  Description of Artificial Sequence: Synthetic oligonucleotide
ccugacuucuguggcuccc

SEQ ID NO: 1667691 - RNA, 19 nt, Artificial Sequence
  Description of Artificial Sequence: Synthetic oligonucleotide
ccgcccacaucacauucac

SEQ ID NO: 1667692 - RNA, 19 nt, Artificial Sequence
  Description of Artificial Sequence: Synthetic oligonucleotide
guaggcaggcgaagguuua

SEQ ID NO: 1667693 - RNA, 19 nt, Artificial Sequence
  Description of Artificial Sequence: Synthetic oligonucleotide
cugugcacccagaccuaaa

SEQ ID NO: 1667694 - RNA, 19 nt, Artificial Sequence
  Description of Artificial Sequence: Synthetic oligonucleotide
ccaaaggacaaacuugcuu

SEQ ID NO: 1667695 - RNA, 19 nt, Artificial Sequence
  Description of Artificial Sequence: Synthetic oligonucleotide
cccaaggcaugaagcaaca

SEQ ID NO: 1667696 - RNA, 19 nt, Artificial Sequence
  Description of Artificial Sequence: Synthetic oligonucleotide
ccgugaggugaagagaaga

SEQ ID NO: 1667697 - RNA, 19 nt, Artificial Sequence
  Description of Artificial Sequence: Synthetic oligonucleotide
cugccugacuucuguggcu

SEQ ID NO: 1667698 - RNA, 19 nt, Artificial Sequence
  Description of Artificial Sequence: Synthetic oligonucleotide
gguuaacagcaccgaagau

SEQ ID NO: 1667699 - RNA, 19 nt, Artificial Sequence
  Description of Artificial Sequence: Synthetic oligonucleotide
gggguugauucacaugauu

SEQ ID NO: 1667700 - RNA, 19 nt, Artificial Sequence
  Description of Artificial Sequence: Synthetic oligonucleotide
cucagccagauggucaaau

SEQ ID NO: 1667701 - RNA, 19 nt, Artificial Sequence
  Description of Artificial Sequence: Synthetic oligonucleotide
guccaacgucccucaccca

SEQ ID NO: 1667702 - RNA, 19 nt, Artificial Sequence
  Description of Artificial Sequence: Synthetic oligonucleotide
ccccacauagagcucaccu

SEQ ID NO: 1667703 - RNA, 19 nt, Artificial Sequence
  Description of Artificial Sequence: Synthetic oligonucleotide
ccucuguaccuuguccauc

SEQ ID NO: 1667704 - RNA, 19 nt, Artificial Sequence
  Description of Artificial Sequence: Synthetic oligonucleotide
auccuaccagccagcugau

SEQ ID NO: 1667705 - RNA, 19 nt, Artificial Sequence
  Description of Artificial Sequence: Synthetic oligonucleotide
uggcucccgugaggugaag

SEQ ID NO: 1667706 - RNA, 19 nt, Artificial Sequence
  Description of Artificial Sequence: Synthetic oligonucleotide
cagaaggagcucugcugau

SEQ ID NO: 1667707 - RNA, 19 nt, Artificial Sequence
  Description of Artificial Sequence: Synthetic oligonucleotide
ggcgaagguuuagaaccaa

SEQ ID NO: 1667708 - RNA, 19 nt, Artificial Sequence
  Description of Artificial Sequence: Synthetic oligonucleotide
guccaucaaccaagagcaa

SEQ ID NO: 1667709 - RNA, 19 nt, Artificial Sequence
  Description of Artificial Sequence: Synthetic oligonucleotide
ccaacgucccucacccaaa

SEQ ID NO: 1667710 - RNA, 19 nt, Artificial Sequence
  Description of Artificial Sequence: Synthetic oligonucleotide
caacgucccucacccaaau

SEQ ID NO: 1667711 - RNA, 19 nt, Artificial Sequence
  Description of Artificial Sequence: Synthetic oligonucleotide
guggcucccgugaggugaa

SEQ ID NO: 1667712 - RNA, 19 nt, Artificial Sequence
  Description of Artificial Sequence: Synthetic oligonucleotide
ggcucccgugaggugaaga

SEQ ID NO: 1667713 - RNA, 19 nt, Artificial Sequence
  Description of Artificial Sequence: Synthetic oligonucleotide
cagcuccaaaagauuccau

SEQ ID NO: 1667714 - RNA, 19 nt, Artificial Sequence
  Description of Artificial Sequence: Synthetic oligonucleotide
gcaauccuaccagccagcu

SEQ ID NO: 1667715 - RNA, 19 nt, Artificial Sequence
  Description of Artificial Sequence: Synthetic oligonucleotide
gccucuguaccuuguccau

SEQ ID NO: 1667716 - RNA, 19 nt, Artificial Sequence
  Description of Artificial Sequence: Synthetic oligonucleotide
ggcuccgcccacaucacau

SEQ ID NO: 1667717 - RNA, 19 nt, Artificial Sequence
  Description of Artificial Sequence: Synthetic oligonucleotide
guggaagauucgggagacu

SEQ ID NO: 1667718 - RNA, 19 nt, Artificial Sequence
  Description of Artificial Sequence: Synthetic oligonucleotide
cacccucuguggaauuauu

SEQ ID NO: 1667719 - RNA, 19 nt, Artificial Sequence
  Description of Artificial Sequence: Synthetic oligonucleotide
gcugagggucagccaucga

SEQ ID NO: 1667720 - RNA, 19 nt, Artificial Sequence
  Description of Artificial Sequence: Synthetic oligonucleotide
ugguggcuccugggaugaa

SEQ ID NO: 1667721 - RNA, 19 nt, Artificial Sequence
  Description of Artificial Sequence: Synthetic oligonucleotide
gagggccccugugcaccca

SEQ ID NO: 1667722 - RNA, 19 nt, Artificial Sequence
  Description of Artificial Sequence: Synthetic oligonucleotide
gcgaagguuuagaaccaau

SEQ ID NO: 1667723 - RNA, 19 nt, Artificial Sequence
  Description of Artificial Sequence: Synthetic oligonucleotide
gggaguggucccugaggau

SEQ ID NO: 1667724 - RNA, 19 nt, Artificial Sequence
  Description of Artificial Sequence: Synthetic oligonucleotide
cugguacaacaaagaccuu

SEQ ID NO: 1667725 - RNA, 19 nt, Artificial Sequence
  Description of Artificial Sequence: Synthetic oligonucleotide
cgcaaaaccccacuuccuu

SEQ ID NO: 1667726 - RNA, 19 nt, Artificial Sequence
  Description of Artificial Sequence: Synthetic oligonucleotide
gcucacugcucagccagau

SEQ ID NO: 1667727 - RNA, 19 nt, Artificial Sequence
  Description of Artificial Sequence: Synthetic oligonucleotide
cgcccacaucacauucaca

SEQ ID NO: 1667728 - RNA, 19 nt, Artificial Sequence
  Description of Artificial Sequence: Synthetic oligonucleotide
ccccaaccugcagcacaug

SEQ ID NO: 1667729 - RNA, 19 nt, Artificial Sequence
  Description of Artificial Sequence: Synthetic oligonucleotide
ccacccucuguggaauuau

SEQ ID NO: 1667730 - RNA, 19 nt, Artificial Sequence
  Description of Artificial Sequence: Synthetic oligonucleotide
aaugauaggagauauggga

SEQ ID NO: 1667731 - RNA, 19 nt, Artificial Sequence
  Description of Artificial Sequence: Synthetic oligonucleotide
aagaccucuaccuggacgc

SEQ ID NO: 1667732 - RNA, 19 nt, Artificial Sequence
  Description of Artificial Sequence: Synthetic oligonucleotide
ucaaugauaggagauaugg

SEQ ID NO: 1667733 - RNA, 19 nt, Artificial Sequence
  Description of Artificial Sequence: Synthetic oligonucleotide
cauaccaaauucuugaugc

SEQ ID NO: 1667734 - RNA, 19 nt, Artificial Sequence
  Description of Artificial Sequence: Synthetic oligonucleotide
aacacguucuucuugguuc

SEQ ID NO: 1667735 - RNA, 19 nt, Artificial Sequence
  Description of Artificial Sequence: Synthetic oligonucleotide
agagaugauguuuagaaca

SEQ ID NO: 1667736 - RNA, 19 nt, Artificial Sequence
  Description of Artificial Sequence: Synthetic oligonucleotide
uaugguaccauuacuaccu

SEQ ID NO: 1667737 - RNA, 19 nt, Artificial Sequence
  Description of Artificial Sequence: Synthetic oligonucleotide
acuaccucggaccugaagg

SEQ ID NO: 1667738 - RNA, 19 nt, Artificial Sequence
  Description of Artificial Sequence: Synthetic oligonucleotide
aagacuaagcacuuucuug

SEQ ID NO: 1667739 - RNA, 19 nt, Artificial Sequence
  Description of Artificial Sequence: Synthetic oligonucleotide
gucuuaguuagccagagag

SEQ ID NO: 1667740 - RNA, 19 nt, Artificial Sequence
  Description of Artificial Sequence: Synthetic oligonucleotide
aguaugguaccauuacuac

SEQ ID NO: 1667741 - RNA, 19 nt, Artificial Sequence
  Description of Artificial Sequence: Synthetic oligonucleotide
uggaauauguagcagggcu

SEQ ID NO: 1667742 - RNA, 19 nt, Artificial Sequence
  Description of Artificial Sequence: Synthetic oligonucleotide
accauguaaguacagagcu

SEQ ID NO: 1667743 - RNA, 19 nt, Artificial Sequence
  Description of Artificial Sequence: Synthetic oligonucleotide
aguaguuuugggcagacau

SEQ ID NO: 1667744 - RNA, 19 nt, Artificial Sequence
  Description of Artificial Sequence: Synthetic oligonucleotide
acaaugacugggcaguagg

SEQ ID NO: 1667745 - RNA, 19 nt, Artificial Sequence
  Description of Artificial Sequence: Synthetic oligonucleotide
auaaacguggcauuccuga

SEQ ID NO: 1667746 - RNA, 19 nt, Artificial Sequence
  Description of Artificial Sequence: Synthetic oligonucleotide
guaaauuggcauuuuccag

SEQ ID NO: 1667747 - RNA, 19 nt, Artificial Sequence
  Description of Artificial Sequence: Synthetic oligonucleotide
ucuauccauaccaaauucu

SEQ ID NO: 1667748 - RNA, 19 nt, Artificial Sequence
  Description of Artificial Sequence: Synthetic oligonucleotide
gaagacacggccaucagug

SEQ ID NO: 1667749 - RNA, 19 nt, Artificial Sequence
  Description of Artificial Sequence: Synthetic oligonucleotide
gauuccuuggaucaucaac

SEQ ID NO: 1667750 - RNA, 19 nt, Artificial Sequence
  Description of Artificial Sequence: Synthetic oligonucleotide
auaccaaauucuugaugcc

SEQ ID NO: 1667751 - RNA, 19 nt, Artificial Sequence
  Description of Artificial Sequence: Synthetic oligonucleotide
ucuauuaacuuggucuuag

SEQ ID NO: 1667752 - RNA, 19 nt, Artificial Sequence
  Description of Artificial Sequence: Synthetic oligonucleotide
gaagguuucgagaacauga

SEQ ID NO: 1667753 - RNA, 19 nt, Artificial Sequence
  Description of Artificial Sequence: Synthetic oligonucleotide
uaguuuugggcagacaucc

SEQ ID NO: 1667754 - RNA, 19 nt, Artificial Sequence
  Description of Artificial Sequence: Synthetic oligonucleotide
ucuuaguuagccagagagc

SEQ ID NO: 1667755 - RNA, 19 nt, Artificial Sequence
  Description of Artificial Sequence: Synthetic oligonucleotide
agcuguaugaggcuguuca

SEQ ID NO: 1667756 - RNA, 19 nt, Artificial Sequence
  Description of Artificial Sequence: Synthetic oligonucleotide
guucaacugcaacacaagg

SEQ ID NO: 1667757 - RNA, 19 nt, Artificial Sequence
  Description of Artificial Sequence: Synthetic oligonucleotide
gauaggagauaugggauag

SEQ ID NO: 1667758 - RNA, 19 nt, Artificial Sequence
  Description of Artificial Sequence: Synthetic oligonucleotide
aauccugugucaucuuuca

SEQ ID NO: 1667759 - RNA, 19 nt, Artificial Sequence
  Description of Artificial Sequence: Synthetic oligonucleotide
ucccacggcgggaagaucg

SEQ ID NO: 1667760 - RNA, 19 nt, Artificial Sequence
  Description of Artificial Sequence: Synthetic oligonucleotide
ugcaucuuccccucguagg

SEQ ID NO: 1667761 - RNA, 19 nt, Artificial Sequence
  Description of Artificial Sequence: Synthetic oligonucleotide
caaugauaggagauauggg

SEQ ID NO: 1667762 - RNA, 19 nt, Artificial Sequence
  Description of Artificial Sequence: Synthetic oligonucleotide
uccgccuugccagagaagg

SEQ ID NO: 1667763 - RNA, 19 nt, Artificial Sequence
  Description of Artificial Sequence: Synthetic oligonucleotide
aagguuucgagaacaugac

SEQ ID NO: 1667764 - RNA, 19 nt, Artificial Sequence
  Description of Artificial Sequence: Synthetic oligonucleotide
uucgagaacaugacuuuug

SEQ ID NO: 1667765 - RNA, 19 nt, Artificial Sequence
  Description of Artificial Sequence: Synthetic oligonucleotide
uauuaacuuggucuuaguu

SEQ ID NO: 1667766 - RNA, 19 nt, Artificial Sequence
  Description of Artificial Sequence: Synthetic oligonucleotide
aggagagugccagagacgg

SEQ ID NO: 1667767 - RNA, 19 nt, Artificial Sequence
  Description of Artificial Sequence: Synthetic oligonucleotide
ucucuaugugauuccuugg

SEQ ID NO: 1667768 - RNA, 19 nt, Artificial Sequence
  Description of Artificial Sequence: Synthetic oligonucleotide
ucaguaugguaccauuacu

SEQ ID NO: 1667769 - RNA, 19 nt, Artificial Sequence
  Description of Artificial Sequence: Synthetic oligonucleotide
agacuuugguggcauuccc

SEQ ID NO: 1667770 - RNA, 19 nt, Artificial Sequence
  Description of Artificial Sequence: Synthetic oligonucleotide
gaauauguagcagggcugc

SEQ ID NO: 1667771 - RNA, 19 nt, Artificial Sequence
  Description of Artificial Sequence: Synthetic oligonucleotide
cauucccaaaagcaaacag

SEQ ID NO: 1667772 - RNA, 19 nt, Artificial Sequence
  Description of Artificial Sequence: Synthetic oligonucleotide
aucucguacacccugucca

SEQ ID NO: 1667773 - RNA, 19 nt, Artificial Sequence
  Description of Artificial Sequence: Synthetic oligonucleotide
guaugguaccauuacuacc

SEQ ID NO: 1667774 - RNA, 19 nt, Artificial Sequence
  Description of Artificial Sequence: Synthetic oligonucleotide
ugugguguucaacugcaac

SEQ ID NO: 1667775 - RNA, 19 nt, Artificial Sequence
  Description of Artificial Sequence: Synthetic oligonucleotide
ucuugaugcccucacuaga

SEQ ID NO: 1667776 - RNA, 19 nt, Artificial Sequence
  Description of Artificial Sequence: Synthetic oligonucleotide
agcuggucugagucuaucc

SEQ ID NO: 1667777 - RNA, 19 nt, Artificial Sequence
  Description of Artificial Sequence: Synthetic oligonucleotide
auuccuuggaucaucaaca

SEQ ID NO: 1667778 - RNA, 19 nt, Artificial Sequence
  Description of Artificial Sequence: Synthetic oligonucleotide
uucuugguucucuauguga

SEQ ID NO: 1667779 - RNA, 19 nt, Artificial Sequence
  Description of Artificial Sequence: Synthetic oligonucleotide
uccggucuccacaagaccu

SEQ ID NO: 1667780 - RNA, 19 nt, Artificial Sequence
  Description of Artificial Sequence: Synthetic oligonucleotide
cuuggaucaucaacaagac

SEQ ID NO: 1667781 - RNA, 19 nt, Artificial Sequence
  Description of Artificial Sequence: Synthetic oligonucleotide
agagaagggugcuugaaaa

SEQ ID NO: 1667782 - RNA, 19 nt, Artificial Sequence
  Description of Artificial Sequence: Synthetic oligonucleotide
aagaucaaugauaggagau

SEQ ID NO: 1667783 - RNA, 19 nt, Artificial Sequence
  Description of Artificial Sequence: Synthetic oligonucleotide
gacgaagugcaucuucccc

SEQ ID NO: 1667784 - RNA, 19 nt, Artificial Sequence
  Description of Artificial Sequence: Synthetic oligonucleotide
gugcuugaaaaucugggac

SEQ ID NO: 1667785 - RNA, 19 nt, Artificial Sequence
  Description of Artificial Sequence: Synthetic oligonucleotide
caagaccucuaccuggacg

SEQ ID NO: 1667786 - RNA, 19 nt, Artificial Sequence
  Description of Artificial Sequence: Synthetic oligonucleotide
agagacucucgauuccagg

SEQ ID NO: 1667787 - RNA, 19 nt, Artificial Sequence
  Description of Artificial Sequence: Synthetic oligonucleotide
ugaaaaucugggacuuaca

SEQ ID NO: 1667788 - RNA, 19 nt, Artificial Sequence
  Description of Artificial Sequence: Synthetic oligonucleotide
ucguacacccuguccaggg

SEQ ID NO: 1667789 - RNA, 19 nt, Artificial Sequence
  Description of Artificial Sequence: Synthetic oligonucleotide
uaccauuacuaccucggac

SEQ ID NO: 1667790 - RNA, 19 nt, Artificial Sequence
  Description of Artificial Sequence: Synthetic oligonucleotide
uaguuagccagagagccug

SEQ ID NO: 1667791 - RNA, 19 nt, Artificial Sequence
  Description of Artificial Sequence: Synthetic oligonucleotide
cauacccucaaggagucgg

SEQ ID NO: 1667792 - RNA, 19 nt, Artificial Sequence
  Description of Artificial Sequence: Synthetic oligonucleotide
ucuaugugauuccuuggau

SEQ ID NO: 1667793 - RNA, 19 nt, Artificial Sequence
  Description of Artificial Sequence: Synthetic oligonucleotide
auuacuaccucggaccuga

SEQ ID NO: 1667794 - RNA, 19 nt, Artificial Sequence
  Description of Artificial Sequence: Synthetic oligonucleotide
aggccuucuauuaacuugg

SEQ ID NO: 1667795 - RNA, 19 nt, Artificial Sequence
  Description of Artificial Sequence: Synthetic oligonucleotide
cucacuagaggccagaucu

SEQ ID NO: 1667796 - RNA, 19 nt, Artificial Sequence
  Description of Artificial Sequence: Synthetic oligonucleotide
gagagugccagagacgggc

SEQ ID NO: 1667797 - RNA, 19 nt, Artificial Sequence
  Description of Artificial Sequence: Synthetic oligonucleotide
gacgccaacgccauaccgg

SEQ ID NO: 1667798 - RNA, 19 nt, Artificial Sequence
  Description of Artificial Sequence: Synthetic oligonucleotide
aacgucucuggcuggaaau

SEQ ID NO: 1667799 - RNA, 19 nt, Artificial Sequence
  Description of Artificial Sequence: Synthetic oligonucleotide
gguaccauuacuaccucgg

SEQ ID NO: 1667800 - RNA, 19 nt, Artificial Sequence
  Description of Artificial Sequence: Synthetic oligonucleotide
gaucggccgagccagcccg

SEQ ID NO: 1667801 - RNA, 19 nt, Artificial Sequence
  Description of Artificial Sequence: Synthetic oligonucleotide
acgaagugcaucuuccccu

SEQ ID NO: 1667802 - RNA, 19 nt, Artificial Sequence
  Description of Artificial Sequence: Synthetic oligonucleotide
cucgauuccaggugguggc

SEQ ID NO: 1667803 - RNA, 19 nt, Artificial Sequence
  Description of Artificial Sequence: Synthetic oligonucleotide
ugguaccauuacuaccucg

SEQ ID NO: 1667804 - RNA, 19 nt, Artificial Sequence
  Description of Artificial Sequence: Synthetic oligonucleotide
gagaugauguuuagaacac

SEQ ID NO: 1667805 - RNA, 19 nt, Artificial Sequence
  Description of Artificial Sequence: Synthetic oligonucleotide
aagaucggccgagccagcc

SEQ ID NO: 1667806 - RNA, 19 nt, Artificial Sequence
  Description of Artificial Sequence: Synthetic oligonucleotide
cuagcgcccgccaagcggg

SEQ ID NO: 1667807 - RNA, 19 nt, Artificial Sequence
  Description of Artificial Sequence: Synthetic oligonucleotide
ucaacaagacuaagcacuu

SEQ ID NO: 1667808 - RNA, 19 nt, Artificial Sequence
  Description of Artificial Sequence: Synthetic oligonucleotide
uugguucucuaugugauuc

SEQ ID NO: 1667809 - RNA, 19 nt, Artificial Sequence
  Description of Artificial Sequence: Synthetic oligonucleotide
ccagagacgggcaugagag

SEQ ID NO: 1667810 - RNA, 19 nt, Artificial Sequence
  Description of Artificial Sequence: Synthetic oligonucleotide
uaugggcuguuccaagacu

SEQ ID NO: 1667811 - RNA, 19 nt, Artificial Sequence
  Description of Artificial Sequence: Synthetic oligonucleotide
uggcuaaggaguaguuuug

SEQ ID NO: 1667812 - RNA, 19 nt, Artificial Sequence
  Description of Artificial Sequence: Synthetic oligonucleotide
ugguacucaguaugguacc

SEQ ID NO: 1667813 - RNA, 19 nt, Artificial Sequence
  Description of Artificial Sequence: Synthetic oligonucleotide
uuaguuagccagagagccu

SEQ ID NO: 1667814 - RNA, 19 nt, Artificial Sequence
  Description of Artificial Sequence: Synthetic oligonucleotide
uuuagaacacguucuucuu

SEQ ID NO: 1667815 - RNA, 19 nt, Artificial Sequence
  Description of Artificial Sequence: Synthetic oligonucleotide
ugagucuauccauaccaaa

SEQ ID NO: 1667816 - RNA, 19 nt, Artificial Sequence
  Description of Artificial Sequence: Synthetic oligonucleotide
gguggaauauguagcaggg

SEQ ID NO: 1667817 - RNA, 19 nt, Artificial Sequence
  Description of Artificial Sequence: Synthetic oligonucleotide
uucauacccucaaggaguc

SEQ ID NO: 1667818 - RNA, 19 nt, Artificial Sequence
  Description of Artificial Sequence: Synthetic oligonucleotide
gucuauccauaccaaauuc

SEQ ID NO: 1667819 - RNA, 19 nt, Artificial Sequence
  Description of Artificial Sequence: Synthetic oligonucleotide
acgacuaugggcuguucca

SEQ ID NO: 1667820 - RNA, 19 nt, Artificial Sequence
  Description of Artificial Sequence: Synthetic oligonucleotide
caaggagucggcagcgccg

SEQ ID NO: 1667821 - RNA, 19 nt, Artificial Sequence
  Description of Artificial Sequence: Synthetic oligonucleotide
caugagagaugauguuuag

SEQ ID NO: 1667822 - RNA, 19 nt, Artificial Sequence
  Description of Artificial Sequence: Synthetic oligonucleotide
gguaaggauaguccucccg

SEQ ID NO: 1667823 - RNA, 19 nt, Artificial Sequence
  Description of Artificial Sequence: Synthetic oligonucleotide
ucggaccugaaggagaaga

SEQ ID NO: 1667824 - RNA, 19 nt, Artificial Sequence
  Description of Artificial Sequence: Synthetic oligonucleotide
agacucucgauuccaggug

SEQ ID NO: 1667825 - RNA, 19 nt, Artificial Sequence
  Description of Artificial Sequence: Synthetic oligonucleotide
uucccauagaggagccuag

SEQ ID NO: 1667826 - RNA, 19 nt, Artificial Sequence
  Description of Artificial Sequence: Synthetic oligonucleotide
agaucggccgagccagccc

SEQ ID NO: 1667827 - RNA, 19 nt, Artificial Sequence
  Description of Artificial Sequence: Synthetic oligonucleotide
aagugcaucuuccccucgu

SEQ ID NO: 1667828 - RNA, 19 nt, Artificial Sequence
  Description of Artificial Sequence: Synthetic oligonucleotide
ggauagaagguuucgagaa

SEQ ID NO: 1667829 - RNA, 19 nt, Artificial Sequence
  Description of Artificial Sequence: Synthetic oligonucleotide
gaugauguuuagaacacgu

SEQ ID NO: 1667830 - RNA, 19 nt, Artificial Sequence
  Description of Artificial Sequence: Synthetic oligonucleotide
aaggauaguccucccggaa

SEQ ID NO: 1667831 - RNA, 19 nt, Artificial Sequence
  Description of Artificial Sequence: Synthetic oligonucleotide
cuucauacccucaaggagu

SEQ ID NO: 1667832 - RNA, 19 nt, Artificial Sequence
  Description of Artificial Sequence: Synthetic oligonucleotide
ugaggcuguucacaaugac

SEQ ID NO: 1667833 - RNA, 19 nt, Artificial Sequence
  Description of Artificial Sequence: Synthetic oligonucleotide
uggucuuaguuagccagag

SEQ ID NO: 1667834 - RNA, 19 nt, Artificial Sequence
  Description of Artificial Sequence: Synthetic oligonucleotide
ugauggguuccagacccgg

SEQ ID NO: 1667835 - RNA, 19 nt, Artificial Sequence
  Description of Artificial Sequence: Synthetic oligonucleotide
ccguaaauuggcauuuucc

SEQ ID NO: 1667836 - RNA, 19 nt, Artificial Sequence
  Description of Artificial Sequence: Synthetic oligonucleotide
ugggcagacauccgccuug

SEQ ID NO: 1667837 - RNA, 19 nt, Artificial Sequence
  Description of Artificial Sequence: Synthetic oligonucleotide
gaggagccuagcccgagcc

SEQ ID NO: 1667838 - RNA, 19 nt, Artificial Sequence
  Description of Artificial Sequence: Synthetic oligonucleotide
cacgacuaugggcuguucc

SEQ ID NO: 1667839 - RNA, 19 nt, Artificial Sequence
  Description of Artificial Sequence: Synthetic oligonucleotide
ccuucuauuaacuuggucu

SEQ ID NO: 1667840 - RNA, 19 nt, Artificial Sequence
  Description of Artificial Sequence: Synthetic oligonucleotide
ucacuagaggccagaucug

SEQ ID NO: 1667841 - RNA, 19 nt, Artificial Sequence
  Description of Artificial Sequence: Synthetic oligonucleotide
acgcacgccccauucguac

SEQ ID NO: 1667842 - RNA, 19 nt, Artificial Sequence
  Description of Artificial Sequence: Synthetic oligonucleotide
gacugggcgacaccagaag

SEQ ID NO: 1667843 - RNA, 19 nt, Artificial Sequence
  Description of Artificial Sequence: Synthetic oligonucleotide
ucuaccuggacgccgccau

SEQ ID NO: 1667844 - RNA, 19 nt, Artificial Sequence
  Description of Artificial Sequence: Synthetic oligonucleotide
gauccuuccagccgcgauc

SEQ ID NO: 1667845 - RNA, 19 nt, Artificial Sequence
  Description of Artificial Sequence: Synthetic oligonucleotide
ugggcaguaggucucucuc

SEQ ID NO: 1667846 - RNA, 19 nt, Artificial Sequence
  Description of Artificial Sequence: Synthetic oligonucleotide
uacuaccucggaccugaag

SEQ ID NO: 1667847 - RNA, 19 nt, Artificial Sequence
  Description of Artificial Sequence: Synthetic oligonucleotide
gcuaaggaguaguuuuggg

SEQ ID NO: 1667848 - RNA, 19 nt, Artificial Sequence
  Description of Artificial Sequence: Synthetic oligonucleotide
uguuuagaacacguucuuc

SEQ ID NO: 1667849 - RNA, 19 nt, Artificial Sequence
  Description of Artificial Sequence: Synthetic oligonucleotide
ggaagaucggccgagccag

SEQ ID NO: 1667850 - RNA, 19 nt, Artificial Sequence
  Description of Artificial Sequence: Synthetic oligonucleotide
ugggcgacaccagaagugc

SEQ ID NO: 1667851 - RNA, 19 nt, Artificial Sequence
  Description of Artificial Sequence: Synthetic oligonucleotide
cucuaugugauuccuugga

SEQ ID NO: 1667852 - RNA, 19 nt, Artificial Sequence
  Description of Artificial Sequence: Synthetic oligonucleotide
caguaugguaccauuacua

SEQ ID NO: 1667853 - RNA, 19 nt, Artificial Sequence
  Description of Artificial Sequence: Synthetic oligonucleotide
caggagagugccagagacg

SEQ ID NO: 1667854 - RNA, 19 nt, Artificial Sequence
  Description of Artificial Sequence: Synthetic oligonucleotide
caacugcaacacaaggaac

SEQ ID NO: 1667855 - RNA, 19 nt, Artificial Sequence
  Description of Artificial Sequence: Synthetic oligonucleotide
cuaugggcuguuccaagac

SEQ ID NO: 1667856 - RNA, 19 nt, Artificial Sequence
  Description of Artificial Sequence: Synthetic oligonucleotide
aucagugcccacgcucugc

SEQ ID NO: 1667857 - RNA, 19 nt, Artificial Sequence
  Description of Artificial Sequence: Synthetic oligonucleotide
agguuucgagaacaugacu

SEQ ID NO: 1667858 - RNA, 19 nt, Artificial Sequence
  Description of Artificial Sequence: Synthetic oligonucleotide
uguggccguaaauuggcau

SEQ ID NO: 1667859 - RNA, 19 nt, Artificial Sequence
  Description of Artificial Sequence: Synthetic oligonucleotide
auguuuagaacacguucuu

SEQ ID NO: 1667860 - RNA, 19 nt, Artificial Sequence
  Description of Artificial Sequence: Synthetic oligonucleotide
uagaagguuucgagaacau

SEQ ID NO: 1667861 - RNA, 19 nt, Artificial Sequence
  Description of Artificial Sequence: Synthetic oligonucleotide
uaguccucccggaauccug

SEQ ID NO: 1667862 - RNA, 19 nt, Artificial Sequence
  Description of Artificial Sequence: Synthetic oligonucleotide
uggucugagucuauccaua

SEQ ID NO: 1667863 - RNA, 19 nt, Artificial Sequence
  Description of Artificial Sequence: Synthetic oligonucleotide
acaagaccucuaccuggac

SEQ ID NO: 1667864 - RNA, 19 nt, Artificial Sequence
  Description of Artificial Sequence: Synthetic oligonucleotide
uuccgcguggaacgcacgc

SEQ ID NO: 1667865 - RNA, 19 nt, Artificial Sequence
  Description of Artificial Sequence: Synthetic oligonucleotide
gaauccugugucaucuuuc

SEQ ID NO: 1667866 - RNA, 19 nt, Artificial Sequence
  Description of Artificial Sequence: Synthetic oligonucleotide
agaagguuucgagaacaug

SEQ ID NO: 1667867 - RNA, 19 nt, Artificial Sequence
  Description of Artificial Sequence: Synthetic oligonucleotide
gagacucucgauuccaggu

SEQ ID NO: 1667868 - RNA, 19 nt, Artificial Sequence
  Description of Artificial Sequence: Synthetic oligonucleotide
agaucaaugauaggagaua

SEQ ID NO: 1667869 - RNA, 19 nt, Artificial Sequence
  Description of Artificial Sequence: Synthetic oligonucleotide
agagacgggcaugagagau

SEQ ID NO: 1667870 - RNA, 19 nt, Artificial Sequence
  Description of Artificial Sequence: Synthetic oligonucleotide
agagccagcuagcgcccgc

SEQ ID NO: 1667871 - RNA, 19 nt, Artificial Sequence
  Description of Artificial Sequence: Synthetic oligonucleotide
ugacugggcgacaccagaa

SEQ ID NO: 1667872 - RNA, 19 nt, Artificial Sequence
  Description of Artificial Sequence: Synthetic oligonucleotide
agacccgggaucucguaca

SEQ ID NO: 1667873 - RNA, 19 nt, Artificial Sequence
  Description of Artificial Sequence: Synthetic oligonucleotide
aggagaagagacucucgau

SEQ ID NO: 1667874 - RNA, 19 nt, Artificial Sequence
  Description of Artificial Sequence: Synthetic oligonucleotide
acaagacuaagcacuuucu

SEQ ID NO: 1667875 - RNA, 19 nt, Artificial Sequence
  Description of Artificial Sequence: Synthetic oligonucleotide
uacgccccgcguuucgggg

SEQ ID NO: 1667876 - RNA, 19 nt, Artificial Sequence
  Description of Artificial Sequence: Synthetic oligonucleotide
aauauguagcagggcugcu

SEQ ID NO: 1667877 - RNA, 19 nt, Artificial Sequence
  Description of Artificial Sequence: Synthetic oligonucleotide
cuugguacucaguauggua

SEQ ID NO: 1667878 - RNA, 19 nt, Artificial Sequence
  Description of Artificial Sequence: Synthetic oligonucleotide
acgccaacgccauaccggu

SEQ ID NO: 1667879 - RNA, 19 nt, Artificial Sequence
  Description of Artificial Sequence: Synthetic oligonucleotide
aacgccauaccgguccggu

SEQ ID NO: 1667880 - RNA, 19 nt, Artificial Sequence
  Description of Artificial Sequence: Synthetic oligonucleotide
ggaauauguagcagggcug

SEQ ID NO: 1667881 - RNA, 19 nt, Artificial Sequence
  Description of Artificial Sequence: Synthetic oligonucleotide
cacggcgggaagaucggcc

SEQ ID NO: 1667882 - RNA, 19 nt, Artificial Sequence
  Description of Artificial Sequence: Synthetic oligonucleotide
agcaccauguaaguacaga

SEQ ID NO: 1667883 - RNA, 19 nt, Artificial Sequence
  Description of Artificial Sequence: Synthetic oligonucleotide
guguucaacugcaacacaa

SEQ ID NO: 1667884 - RNA, 19 nt, Artificial Sequence
  Description of Artificial Sequence: Synthetic oligonucleotide
gccaacgccauaccggucc

SEQ ID NO: 1667885 - RNA, 19 nt, Artificial Sequence
  Description of Artificial Sequence: Synthetic oligonucleotide
ugcggugguaccguggauc

SEQ ID NO: 1667886 - RNA, 19 nt, Artificial Sequence
  Description of Artificial Sequence: Synthetic oligonucleotide
ucguacgccccgcguuucg

SEQ ID NO: 1667887 - RNA, 19 nt, Artificial Sequence
  Description of Artificial Sequence: Synthetic oligonucleotide
acgcucugcacgacuaugg

SEQ ID NO: 1667888 - RNA, 19 nt, Artificial Sequence
  Description of Artificial Sequence: Synthetic oligonucleotide
uuucgagaacaugacuuuu

SEQ ID NO: 1667889 - RNA, 19 nt, Artificial Sequence
  Description of Artificial Sequence: Synthetic oligonucleotide
uuagccagagagccugcuu

SEQ ID NO: 1667890 - RNA, 19 nt, Artificial Sequence
  Description of Artificial Sequence: Synthetic oligonucleotide
ugacuuuugguggcuucca

SEQ ID NO: 1667891 - RNA, 19 nt, Artificial Sequence
  Description of Artificial Sequence: Synthetic oligonucleotide
guaguuuugggcagacauc

SEQ ID NO: 1667892 - RNA, 19 nt, Artificial Sequence
  Description of Artificial Sequence: Synthetic oligonucleotide
gggguaaggauaguccucc

SEQ ID NO: 1667893 - RNA, 19 nt, Artificial Sequence
  Description of Artificial Sequence: Synthetic oligonucleotide
augggauagaagguuucga

SEQ ID NO: 1667894 - RNA, 19 nt, Artificial Sequence
  Description of Artificial Sequence: Synthetic oligonucleotide
guggcuaaggaguaguuuu

SEQ ID NO: 1667895 - RNA, 19 nt, Artificial Sequence
  Description of Artificial Sequence: Synthetic oligonucleotide
uaccucggaccugaaggag

SEQ ID NO: 1667896 - RNA, 19 nt, Artificial Sequence
  Description of Artificial Sequence: Synthetic oligonucleotide
agaacacguucuucuuggu

SEQ ID NO: 1667897 - RNA, 19 nt, Artificial Sequence
  Description of Artificial Sequence: Synthetic oligonucleotide
cccuuagcuguucuggagg

SEQ ID NO: 1667898 - RNA, 19 nt, Artificial Sequence
  Description of Artificial Sequence: Synthetic oligonucleotide
cugguaaaggagcuggucu

SEQ ID NO: 1667899 - RNA, 19 nt, Artificial Sequence
  Description of Artificial Sequence: Synthetic oligonucleotide
gguguggccguaaauuggc

SEQ ID NO: 1667900 - RNA, 19 nt, Artificial Sequence
  Description of Artificial Sequence: Synthetic oligonucleotide
gcuagcgcccgccaagcgg

SEQ ID NO: 1667901 - RNA, 19 nt, Artificial Sequence
  Description of Artificial Sequence: Synthetic oligonucleotide
gagucuauccauaccaaau

SEQ ID NO: 1667902 - RNA, 19 nt, Artificial Sequence
  Description of Artificial Sequence: Synthetic oligonucleotide
aguuuugggcagacauccg

SEQ ID NO: 1667903 - RNA, 19 nt, Artificial Sequence
  Description of Artificial Sequence: Synthetic oligonucleotide
cuaccucggaccugaagga

SEQ ID NO: 1667904 - RNA, 19 nt, Artificial Sequence
  Description of Artificial Sequence: Synthetic oligonucleotide
ggaacgcacgccccauucg

SEQ ID NO: 1667905 - RNA, 19 nt, Artificial Sequence
  Description of Artificial Sequence: Synthetic oligonucleotide
agcgguguggccguaaauu

SEQ ID NO: 1667906 - RNA, 19 nt, Artificial Sequence
  Description of Artificial Sequence: Synthetic oligonucleotide
agccagagagccugcuuca

SEQ ID NO: 1667907 - RNA, 19 nt, Artificial Sequence
  Description of Artificial Sequence: Synthetic oligonucleotide
agaccucuaccuggacgcc

SEQ ID NO: 1667908 - RNA, 19 nt, Artificial Sequence
  Description of Artificial Sequence: Synthetic oligonucleotide
acgccccauucguacgccc

SEQ ID NO: 1667909 - RNA, 19 nt, Artificial Sequence
  Description of Artificial Sequence: Synthetic oligonucleotide
uucuauuaacuuggucuua

SEQ ID NO: 1667910 - RNA, 19 nt, Artificial Sequence
  Description of Artificial Sequence: Synthetic oligonucleotide
auucguacgccccgcguuu

SEQ ID NO: 1667911 - RNA, 19 nt, Artificial Sequence
  Description of Artificial Sequence: Synthetic oligonucleotide
agugccagagacgggcaug

SEQ ID NO: 1667912 - RNA, 19 nt, Artificial Sequence
  Description of Artificial Sequence: Synthetic oligonucleotide
gcgccgguggaauauguag

SEQ ID NO: 1667913 - RNA, 19 nt, Artificial Sequence
  Description of Artificial Sequence: Synthetic oligonucleotide
guggaauauguagcagggc

SEQ ID NO: 1667914 - RNA, 19 nt, Artificial Sequence
  Description of Artificial Sequence: Synthetic oligonucleotide
ucauacccucaaggagucg

SEQ ID NO: 1667915 - RNA, 19 nt, Artificial Sequence
  Description of Artificial Sequence: Synthetic oligonucleotide
guaccauuacuaccucgga

SEQ ID NO: 1667916 - RNA, 19 nt, Artificial Sequence
  Description of Artificial Sequence: Synthetic oligonucleotide
ggacgccaacgccauaccg

SEQ ID NO: 1667917 - RNA, 19 nt, Artificial Sequence
  Description of Artificial Sequence: Synthetic oligonucleotide
cacaaugacugggcaguag

SEQ ID NO: 1667918 - RNA, 19 nt, Artificial Sequence
  Description of Artificial Sequence: Synthetic oligonucleotide
ggucugagucuauccauac

SEQ ID NO: 1667919 - RNA, 19 nt, Artificial Sequence
  Description of Artificial Sequence: Synthetic oligonucleotide
ucccauagaggagccuagc

SEQ ID NO: 1667920 - RNA, 19 nt, Artificial Sequence
  Description of Artificial Sequence: Synthetic oligonucleotide
guacgccccgcguuucggg

SEQ ID NO: 1667921 - RNA, 19 nt, Artificial Sequence
  Description of Artificial Sequence: Synthetic oligonucleotide
uccagacccgggaucucgu

SEQ ID NO: 1667922 - RNA, 19 nt, Artificial Sequence
  Description of Artificial Sequence: Synthetic oligonucleotide
ucgggcuuccgcguggaac

SEQ ID NO: 1667923 - RNA, 19 nt, Artificial Sequence
  Description of Artificial Sequence: Synthetic oligonucleotide
acuagaggccagaucugug

SEQ ID NO: 1667924 - RNA, 19 nt, Artificial Sequence
  Description of Artificial Sequence: Synthetic oligonucleotide
uuuugaugacugggcgaca

SEQ ID NO: 1667925 - RNA, 19 nt, Artificial Sequence
  Description of Artificial Sequence: Synthetic oligonucleotide
gcagacauccgccuugcca

SEQ ID NO: 1667926 - RNA, 19 nt, Artificial Sequence
  Description of Artificial Sequence: Synthetic oligonucleotide
cucccagagccagcuagcg

SEQ ID NO: 1667927 - RNA, 19 nt, Artificial Sequence
  Description of Artificial Sequence: Synthetic oligonucleotide
gagacgggcaugagagaug

SEQ ID NO: 1667928 - RNA, 19 nt, Artificial Sequence
  Description of Artificial Sequence: Synthetic oligonucleotide
gaacgucucuggcuggaaa

SEQ ID NO: 1667929 - RNA, 19 nt, Artificial Sequence
  Description of Artificial Sequence: Synthetic oligonucleotide
gaucggggccgugcggugg

SEQ ID NO: 1667930 - RNA, 19 nt, Artificial Sequence
  Description of Artificial Sequence: Synthetic oligonucleotide
cagacccgggaucucguac

SEQ ID NO: 1667931 - RNA, 19 nt, Artificial Sequence
  Description of Artificial Sequence: Synthetic oligonucleotide
agcuagcgcccgccaagcg

SEQ ID NO: 1667932 - RNA, 19 nt, Artificial Sequence
  Description of Artificial Sequence: Synthetic oligonucleotide
aagcgguguggccguaaau

SEQ ID NO: 1667933 - RNA, 19 nt, Artificial Sequence
  Description of Artificial Sequence: Synthetic oligonucleotide
gcgguguggccguaaauug

SEQ ID NO: 1667934 - RNA, 19 nt, Artificial Sequence
  Description of Artificial Sequence: Synthetic oligonucleotide
cucguacacccuguccagg

SEQ ID NO: 1667935 - RNA, 19 nt, Artificial Sequence
  Description of Artificial Sequence: Synthetic oligonucleotide
gguaccguggauccuucca

SEQ ID NO: 1667936 - RNA, 19 nt, Artificial Sequence
  Description of Artificial Sequence: Synthetic oligonucleotide
cugagucuauccauaccaa

SEQ ID NO: 1667937 - RNA, 19 nt, Artificial Sequence
  Description of Artificial Sequence: Synthetic oligonucleotide
gaacgcacgccccauucgu

SEQ ID NO: 1667938 - RNA, 19 nt, Artificial Sequence
  Description of Artificial Sequence: Synthetic oligonucleotide
cuuccgcguggaacgcacg

SEQ ID NO: 1667939 - RNA, 19 nt, Artificial Sequence
  Description of Artificial Sequence: Synthetic oligonucleotide
guuucgagaacaugacuuu

SEQ ID NO: 1667940 - RNA, 19 nt, Artificial Sequence
  Description of Artificial Sequence: Synthetic oligonucleotide
gagaagggugcuugaaaau

SEQ ID NO: 1667941 - RNA, 19 nt, Artificial Sequence
  Description of Artificial Sequence: Synthetic oligonucleotide
augauguuuagaacacguu

SEQ ID NO: 1667942 - RNA, 19 nt, Artificial Sequence
  Description of Artificial Sequence: Synthetic oligonucleotide
gacaccagaagugcuggua

SEQ ID NO: 1667943 - RNA, 19 nt, Artificial Sequence
  Description of Artificial Sequence: Synthetic oligonucleotide
uccgcguggaacgcacgcc

SEQ ID NO: 1667944 - RNA, 19 nt, Artificial Sequence
  Description of Artificial Sequence: Synthetic oligonucleotide
ggcauucccaaaagcaaac

SEQ ID NO: 1667945 - RNA, 19 nt, Artificial Sequence
  Description of Artificial Sequence: Synthetic oligonucleotide
uggccguaaauuggcauuu

SEQ ID NO: 1667946 - RNA, 19 nt, Artificial Sequence
  Description of Artificial Sequence: Synthetic oligonucleotide
acgccauaccgguccgguc

SEQ ID NO: 1667947 - RNA, 19 nt, Artificial Sequence
  Description of Artificial Sequence: Synthetic oligonucleotide
ucguaggugauggguucca

SEQ ID NO: 1667948 - RNA, 19 nt, Artificial Sequence
  Description of Artificial Sequence: Synthetic oligonucleotide
cccauagaggagccuagcc

SEQ ID NO: 1667949 - RNA, 19 nt, Artificial Sequence
  Description of Artificial Sequence: Synthetic oligonucleotide
acucaguaugguaccauua

SEQ ID NO: 1667950 - RNA, 19 nt, Artificial Sequence
  Description of Artificial Sequence: Synthetic oligonucleotide
ugguaccguggauccuucc

SEQ ID NO: 1667951 - RNA, 19 nt, Artificial Sequence
  Description of Artificial Sequence: Synthetic oligonucleotide
ugguggcuaaggaguaguu

SEQ ID NO: 1667952 - RNA, 19 nt, Artificial Sequence
  Description of Artificial Sequence: Synthetic oligonucleotide
uguagcagggcugcuccuu

SEQ ID NO: 1667953 - RNA, 19 nt, Artificial Sequence
  Description of Artificial Sequence: Synthetic oligonucleotide
gguuucgagaacaugacuu

SEQ ID NO: 1667954 - RNA, 19 nt, Artificial Sequence
  Description of Artificial Sequence: Synthetic oligonucleotide
cguggauccuuccagccgc

SEQ ID NO: 1667955 - RNA, 19 nt, Artificial Sequence
  Description of Artificial Sequence: Synthetic oligonucleotide
gacccgggaucucguacac

SEQ ID NO: 1667956 - RNA, 19 nt, Artificial Sequence
  Description of Artificial Sequence: Synthetic oligonucleotide
gcggugguaccguggaucc

SEQ ID NO: 1667957 - RNA, 19 nt, Artificial Sequence
  Description of Artificial Sequence: Synthetic oligonucleotide
uccccucguaggugauggg

SEQ ID NO: 1667958 - RNA, 19 nt, Artificial Sequence
  Description of Artificial Sequence: Synthetic oligonucleotide
ggagaagagacucucgauu

SEQ ID NO: 1667959 - RNA, 19 nt, Artificial Sequence
  Description of Artificial Sequence: Synthetic oligonucleotide
aggaguaguuuugggcaga

SEQ ID NO: 1667960 - RNA, 19 nt, Artificial Sequence
  Description of Artificial Sequence: Synthetic oligonucleotide
cauuacuaccucggaccug

SEQ ID NO: 1667961 - RNA, 19 nt, Artificial Sequence
  Description of Artificial Sequence: Synthetic oligonucleotide
gggaagaucggccgagcca

SEQ ID NO: 1667962 - RNA, 19 nt, Artificial Sequence
  Description of Artificial Sequence: Synthetic oligonucleotide
gcgacaccagaagugcugg

SEQ ID NO: 1667963 - RNA, 19 nt, Artificial Sequence
  Description of Artificial Sequence: Synthetic oligonucleotide
agacauccgccuugccaga

SEQ ID NO: 1667964 - RNA, 19 nt, Artificial Sequence
  Description of Artificial Sequence: Synthetic oligonucleotide
gccgguggaauauguagca

SEQ ID NO: 1667965 - RNA, 19 nt, Artificial Sequence
  Description of Artificial Sequence: Synthetic oligonucleotide
gagccuagcccgagccagg

SEQ ID NO: 1667966 - RNA, 19 nt, Artificial Sequence
  Description of Artificial Sequence: Synthetic oligonucleotide
gaaggccuucuauuaacuu

SEQ ID NO: 1667967 - RNA, 19 nt, Artificial Sequence
  Description of Artificial Sequence: Synthetic oligonucleotide
cgggcuuccgcguggaacg

SEQ ID NO: 1667968 - RNA, 19 nt, Artificial Sequence
  Description of Artificial Sequence: Synthetic oligonucleotide
gcccuuagcuguucuggag

SEQ ID NO: 1667969 - RNA, 19 nt, Artificial Sequence
  Description of Artificial Sequence: Synthetic oligonucleotide
gcuguaugaggcuguucac

SEQ ID NO: 1667970 - RNA, 19 nt, Artificial Sequence
  Description of Artificial Sequence: Synthetic oligonucleotide
accucggaccugaaggaga

SEQ ID NO: 1667971 - RNA, 19 nt, Artificial Sequence
  Description of Artificial Sequence: Synthetic oligonucleotide
gaacacguucuucuugguu

SEQ ID NO: 1667972 - RNA, 19 nt, Artificial Sequence
  Description of Artificial Sequence: Synthetic oligonucleotide
cacgcucugcacgacuaug

SEQ ID NO: 1667973 - RNA, 19 nt, Artificial Sequence
  Description of Artificial Sequence: Synthetic oligonucleotide
aguccucccggaauccugu

SEQ ID NO: 1667974 - RNA, 19 nt, Artificial Sequence
  Description of Artificial Sequence: Synthetic oligonucleotide
acccgggaucucguacacc

SEQ ID NO: 1667975 - RNA, 19 nt, Artificial Sequence
  Description of Artificial Sequence: Synthetic oligonucleotide
cagcccggggacgaagugc

SEQ ID NO: 1667976 - RNA, 19 nt, Artificial Sequence
  Description of Artificial Sequence: Synthetic oligonucleotide
cucucgauuccagguggug

SEQ ID NO: 1667977 - RNA, 19 nt, Artificial Sequence
  Description of Artificial Sequence: Synthetic oligonucleotide
ggcgacaccagaagugcug

SEQ ID NO: 1667978 - RNA, 19 nt, Artificial Sequence
  Description of Artificial Sequence: Synthetic oligonucleotide
cucaaggagucggcagcgc

SEQ ID NO: 1667979 - RNA, 19 nt, Artificial Sequence
  Description of Artificial Sequence: Synthetic oligonucleotide
gccgcgaucccacggcggg

SEQ ID NO: 1667980 - RNA, 19 nt, Artificial Sequence
  Description of Artificial Sequence: Synthetic oligonucleotide
gccguaaauuggcauuuuc

SEQ ID NO: 1667981 - RNA, 19 nt, Artificial Sequence
  Description of Artificial Sequence: Synthetic oligonucleotide
cagccgcgaucccacggcg

SEQ ID NO: 1667982 - RNA, 19 nt, Artificial Sequence
  Description of Artificial Sequence: Synthetic oligonucleotide
aggagcuggucugagucua

SEQ ID NO: 1667983 - RNA, 19 nt, Artificial Sequence
  Description of Artificial Sequence: Synthetic oligonucleotide
caaugacugggcaguaggu

SEQ ID NO: 1667984 - RNA, 19 nt, Artificial Sequence
  Description of Artificial Sequence: Synthetic oligonucleotide
ugaacgucucuggcuggaa

SEQ ID NO: 1667985 - RNA, 19 nt, Artificial Sequence
  Description of Artificial Sequence: Synthetic oligonucleotide
ggaccugaaggagaagaga

SEQ ID NO: 1667986 - RNA, 19 nt, Artificial Sequence
  Description of Artificial Sequence: Synthetic oligonucleotide
cagaggguccuugguacuc

SEQ ID NO: 1667987 - RNA, 19 nt, Artificial Sequence
  Description of Artificial Sequence: Synthetic oligonucleotide
ggggacgaagugcaucuuc

SEQ ID NO: 1667988 - RNA, 19 nt, Artificial Sequence
  Description of Artificial Sequence: Synthetic oligonucleotide
ucccggaauccugugucau

SEQ ID NO: 1667989 - RNA, 19 nt, Artificial Sequence
  Description of Artificial Sequence: Synthetic oligonucleotide
gaagaucggccgagccagc

SEQ ID NO: 1667990 - RNA, 19 nt, Artificial Sequence
  Description of Artificial Sequence: Synthetic oligonucleotide
gguccggucuccacaagac

SEQ ID NO: 1667991 - RNA, 19 nt, Artificial Sequence
  Description of Artificial Sequence: Synthetic oligonucleotide
cagcuagcgcccgccaagc

SEQ ID NO: 1667992 - RNA, 19 nt, Artificial Sequence
  Description of Artificial Sequence: Synthetic oligonucleotide
guggauccuuccagccgcg

SEQ ID NO: 1667993 - RNA, 19 nt, Artificial Sequence
  Description of Artificial Sequence: Synthetic oligonucleotide
ccagcuagcgcccgccaag

SEQ ID NO: 1667994 - RNA, 19 nt, Artificial Sequence
  Description of Artificial Sequence: Synthetic oligonucleotide
gaguaguuuugggcagaca

SEQ ID NO: 1667995 - RNA, 19 nt, Artificial Sequence
  Description of Artificial Sequence: Synthetic oligonucleotide
aucggggccgugcgguggu

SEQ ID NO: 1667996 - RNA, 19 nt, Artificial Sequence
  Description of Artificial Sequence: Synthetic oligonucleotide
guggccguaaauuggcauu

SEQ ID NO: 1667997 - RNA, 19 nt, Artificial Sequence
  Description of Artificial Sequence: Synthetic oligonucleotide
ccuagcccgagccagggca

SEQ ID NO: 1667998 - RNA, 19 nt, Artificial Sequence
  Description of Artificial Sequence: Synthetic oligonucleotide
ccucaaggagucggcagcg

SEQ ID NO: 1667999 - RNA, 19 nt, Artificial Sequence
  Description of Artificial Sequence: Synthetic oligonucleotide
uuacuaccucggaccugaa

SEQ ID NO: 1668000 - RNA, 19 nt, Artificial Sequence
  Description of Artificial Sequence: Synthetic oligonucleotide
gagcuggucugagucuauc

SEQ ID NO: 1668001 - RNA, 19 nt, Artificial Sequence
  Description of Artificial Sequence: Synthetic oligonucleotide
ggguaaggauaguccuccc

SEQ ID NO: 1668002 - RNA, 19 nt, Artificial Sequence
  Description of Artificial Sequence: Synthetic oligonucleotide
ccucguaggugauggguuc

SEQ ID NO: 1668003 - RNA, 19 nt, Artificial Sequence
  Description of Artificial Sequence: Synthetic oligonucleotide
cuggucugagucuauccau

SEQ ID NO: 1668004 - RNA, 19 nt, Artificial Sequence
  Description of Artificial Sequence: Synthetic oligonucleotide
ucggccgagccagcccggg

SEQ ID NO: 1668005 - RNA, 19 nt, Artificial Sequence
  Description of Artificial Sequence: Synthetic oligonucleotide
gccuucuauuaacuugguc

SEQ ID NO: 1668006 - RNA, 19 nt, Artificial Sequence
  Description of Artificial Sequence: Synthetic oligonucleotide
ugcacgacuaugggcuguu

SEQ ID NO: 1668007 - RNA, 19 nt, Artificial Sequence
  Description of Artificial Sequence: Synthetic oligonucleotide
ccuuagcuguucuggagga

SEQ ID NO: 1668008 - RNA, 19 nt, Artificial Sequence
  Description of Artificial Sequence: Synthetic oligonucleotide
cucccggaauccuguguca

SEQ ID NO: 1668009 - RNA, 19 nt, Artificial Sequence
  Description of Artificial Sequence: Synthetic oligonucleotide
aacgcacgccccauucgua

SEQ ID NO: 1668010 - RNA, 19 nt, Artificial Sequence
  Description of Artificial Sequence: Synthetic oligonucleotide
agcgcccgccaagcgggcc

SEQ ID NO: 1668011 - RNA, 19 nt, Artificial Sequence
  Description of Artificial Sequence: Synthetic oligonucleotide
ggaucucguacacccuguc

SEQ ID NO: 1668012 - RNA, 19 nt, Artificial Sequence
  Description of Artificial Sequence: Synthetic oligonucleotide
auguaaguacagagcuaaa

SEQ ID NO: 1668013 - RNA, 19 nt, Artificial Sequence
  Description of Artificial Sequence: Synthetic oligonucleotide
agcgggcccggacgccaac

SEQ ID NO: 1668014 - RNA, 19 nt, Artificial Sequence
  Description of Artificial Sequence: Synthetic oligonucleotide
acucucgauuccagguggu

SEQ ID NO: 1668015 - RNA, 19 nt, Artificial Sequence
  Description of Artificial Sequence: Synthetic oligonucleotide
acaugacuuuugguggcuu

SEQ ID NO: 1668016 - RNA, 19 nt, Artificial Sequence
  Description of Artificial Sequence: Synthetic oligonucleotide
uucguacgccccgcguuuc

SEQ ID NO: 1668017 - RNA, 19 nt, Artificial Sequence
  Description of Artificial Sequence: Synthetic oligonucleotide
ccgcguggaacgcacgccc

SEQ ID NO: 1668018 - RNA, 19 nt, Artificial Sequence
  Description of Artificial Sequence: Synthetic oligonucleotide
gccaagcgggcccggacgc

SEQ ID NO: 1668019 - RNA, 19 nt, Artificial Sequence
  Description of Artificial Sequence: Synthetic oligonucleotide
caacgccauaccgguccgg

SEQ ID NO: 1668020 - RNA, 19 nt, Artificial Sequence
  Description of Artificial Sequence: Synthetic oligonucleotide
cugaacgucucuggcugga

SEQ ID NO: 1668021 - RNA, 19 nt, Artificial Sequence
  Description of Artificial Sequence: Synthetic oligonucleotide
gaaagcgguguggccguaa

SEQ ID NO: 1668022 - RNA, 19 nt, Artificial Sequence
  Description of Artificial Sequence: Synthetic oligonucleotide
agccgcgaucccacggcgg

SEQ ID NO: 1668023 - RNA, 19 nt, Artificial Sequence
  Description of Artificial Sequence: Synthetic oligonucleotide
cuaccuggacgccgccauc

SEQ ID NO: 1668024 - RNA, 19 nt, Artificial Sequence
  Description of Artificial Sequence: Synthetic oligonucleotide
cagagacgggcaugagaga

SEQ ID NO: 1668025 - RNA, 19 nt, Artificial Sequence
  Description of Artificial Sequence: Synthetic oligonucleotide
ggcgggaagaucggccgag

SEQ ID NO: 1668026 - RNA, 19 nt, Artificial Sequence
  Description of Artificial Sequence: Synthetic oligonucleotide
cacgccccauucguacgcc

SEQ ID NO: 1668027 - RNA, 19 nt, Artificial Sequence
  Description of Artificial Sequence: Synthetic oligonucleotide
ggagagugccagagacggg

SEQ ID NO: 1668028 - RNA, 19 nt, Artificial Sequence
  Description of Artificial Sequence: Synthetic oligonucleotide
cagagccagcuagcgcccg

SEQ ID NO: 1668029 - RNA, 19 nt, Artificial Sequence
  Description of Artificial Sequence: Synthetic oligonucleotide
gugguggcuaaggaguagu

SEQ ID NO: 1668030 - RNA, 19 nt, Artificial Sequence
  Description of Artificial Sequence: Synthetic oligonucleotide
gcauucccauagaggagcc

SEQ ID NO: 1668031 - RNA, 19 nt, Artificial Sequence
  Description of Artificial Sequence: Synthetic oligonucleotide
cuugaaaaucugggacuua

SEQ ID NO: 1668032 - RNA, 19 nt, Artificial Sequence
  Description of Artificial Sequence: Synthetic oligonucleotide
aucccacggcgggaagauc

SEQ ID NO: 1668033 - RNA, 19 nt, Artificial Sequence
  Description of Artificial Sequence: Synthetic oligonucleotide
ccggacgccaacgccauac

SEQ ID NO: 1668034 - RNA, 19 nt, Artificial Sequence
  Description of Artificial Sequence: Synthetic oligonucleotide
aggagcaucuuggcccuua

SEQ ID NO: 1668035 - RNA, 19 nt, Artificial Sequence
  Description of Artificial Sequence: Synthetic oligonucleotide
gggacuuacacagcuguau

SEQ ID NO: 1668036 - RNA, 19 nt, Artificial Sequence
  Description of Artificial Sequence: Synthetic oligonucleotide
cguacacccuguccagggg

SEQ ID NO: 1668037 - RNA, 19 nt, Artificial Sequence
  Description of Artificial Sequence: Synthetic oligonucleotide
cuuagcuguucuggaggaa

SEQ ID NO: 1668038 - RNA, 19 nt, Artificial Sequence
  Description of Artificial Sequence: Synthetic oligonucleotide
gaucccacggcgggaagau

SEQ ID NO: 1668039 - RNA, 19 nt, Artificial Sequence
  Description of Artificial Sequence: Synthetic oligonucleotide
cuugguucucuaugugauu

SEQ ID NO: 1668040 - RNA, 19 nt, Artificial Sequence
  Description of Artificial Sequence: Synthetic oligonucleotide
cucggaccugaaggagaag

SEQ ID NO: 1668041 - RNA, 19 nt, Artificial Sequence
  Description of Artificial Sequence: Synthetic oligonucleotide
ggaaggccuucuauuaacu

SEQ ID NO: 1668042 - RNA, 19 nt, Artificial Sequence
  Description of Artificial Sequence: Synthetic oligonucleotide
auccgccuugccagagaag

SEQ ID NO: 1668043 - RNA, 19 nt, Artificial Sequence
  Description of Artificial Sequence: Synthetic oligonucleotide
cccauucguacgccccgcg

SEQ ID NO: 1668044 - RNA, 19 nt, Artificial Sequence
  Description of Artificial Sequence: Synthetic oligonucleotide
cauaccgguccggucucca

SEQ ID NO: 1668045 - RNA, 19 nt, Artificial Sequence
  Description of Artificial Sequence: Synthetic oligonucleotide
gggccgugcggugguaccg

SEQ ID NO: 1668046 - RNA, 19 nt, Artificial Sequence
  Description of Artificial Sequence: Synthetic oligonucleotide
ggggccgugcggugguacc

SEQ ID NO: 1668047 - RNA, 19 nt, Artificial Sequence
  Description of Artificial Sequence: Synthetic oligonucleotide
ccauguaaguacagagcua

SEQ ID NO: 1668048 - RNA, 19 nt, Artificial Sequence
  Description of Artificial Sequence: Synthetic oligonucleotide
ccgguggaauauguagcag

SEQ ID NO: 1668049 - RNA, 19 nt, Artificial Sequence
  Description of Artificial Sequence: Synthetic oligonucleotide
cguuucggggccccgcagc

SEQ ID NO: 1668050 - RNA, 19 nt, Artificial Sequence
  Description of Artificial Sequence: Synthetic oligonucleotide
ccgugcggugguaccgugg

SEQ ID NO: 1668051 - RNA, 19 nt, Artificial Sequence
  Description of Artificial Sequence: Synthetic oligonucleotide
gguccuugguacucaguau

SEQ ID NO: 1668052 - RNA, 19 nt, Artificial Sequence
  Description of Artificial Sequence: Synthetic oligonucleotide
gugguaccguggauccuuc

SEQ ID NO: 1668053 - RNA, 19 nt, Artificial Sequence
  Description of Artificial Sequence: Synthetic oligonucleotide
gcuugaaaaucugggacuu

SEQ ID NO: 1668054 - RNA, 19 nt, Artificial Sequence
  Description of Artificial Sequence: Synthetic oligonucleotide
caagcgggcccggacgcca

SEQ ID NO: 1668055 - RNA, 19 nt, Artificial Sequence
  Description of Artificial Sequence: Synthetic oligonucleotide
ggaucggggccgugcggug

SEQ ID NO: 1668056 - RNA, 19 nt, Artificial Sequence
  Description of Artificial Sequence: Synthetic oligonucleotide
guuagccagagagccugcu

SEQ ID NO: 1668057 - RNA, 19 nt, Artificial Sequence
  Description of Artificial Sequence: Synthetic oligonucleotide
gagugccagagacgggcau

SEQ ID NO: 1668058 - RNA, 19 nt, Artificial Sequence
  Description of Artificial Sequence: Synthetic oligonucleotide
ggcccggacgccaacgcca

SEQ ID NO: 1668059 - RNA, 19 nt, Artificial Sequence
  Description of Artificial Sequence: Synthetic oligonucleotide
cgggaagaucggccgagcc

SEQ ID NO: 1668060 - RNA, 19 nt, Artificial Sequence
  Description of Artificial Sequence: Synthetic oligonucleotide
gcgaggcucgggcuuccgc

SEQ ID NO: 1668061 - RNA, 19 nt, Artificial Sequence
  Description of Artificial Sequence: Synthetic oligonucleotide
cgccaagcgggcccggacg

SEQ ID NO: 1668062 - RNA, 19 nt, Artificial Sequence
  Description of Artificial Sequence: Synthetic oligonucleotide
ggcagacauccgccuugcc

SEQ ID NO: 1668063 - RNA, 19 nt, Artificial Sequence
  Description of Artificial Sequence: Synthetic oligonucleotide
agcgccgguggaauaugua

SEQ ID NO: 1668064 - RNA, 19 nt, Artificial Sequence
  Description of Artificial Sequence: Synthetic oligonucleotide
gccauaccgguccggucuc

SEQ ID NO: 1668065 - RNA, 19 nt, Artificial Sequence
  Description of Artificial Sequence: Synthetic oligonucleotide
aggagucggcagcgccggu

SEQ ID NO: 1668066 - RNA, 19 nt, Artificial Sequence
  Description of Artificial Sequence: Synthetic oligonucleotide
ccauuacuaccucggaccu

SEQ ID NO: 1668067 - RNA, 19 nt, Artificial Sequence
  Description of Artificial Sequence: Synthetic oligonucleotide
cgggcaugagagaugaugu

SEQ ID NO: 1668068 - RNA, 19 nt, Artificial Sequence
  Description of Artificial Sequence: Synthetic oligonucleotide
cgccccauucguacgcccc

SEQ ID NO: 1668069 - RNA, 19 nt, Artificial Sequence
  Description of Artificial Sequence: Synthetic oligonucleotide
gcguuucggggccccgcag

SEQ ID NO: 1668070 - RNA, 19 nt, Artificial Sequence
  Description of Artificial Sequence: Synthetic oligonucleotide
gacugggcaguaggucucu

SEQ ID NO: 1668071 - RNA, 19 nt, Artificial Sequence
  Description of Artificial Sequence: Synthetic oligonucleotide
ggugguaccguggauccuu

SEQ ID NO: 1668072 - RNA, 19 nt, Artificial Sequence
  Description of Artificial Sequence: Synthetic oligonucleotide
cuagcccgagccagggcau

SEQ ID NO: 1668073 - RNA, 19 nt, Artificial Sequence
  Description of Artificial Sequence: Synthetic oligonucleotide
ccggaauccugugucaucu

SEQ ID NO: 1668074 - RNA, 19 nt, Artificial Sequence
  Description of Artificial Sequence: Synthetic oligonucleotide
cgcguggaacgcacgcccc

SEQ ID NO: 1668075 - RNA, 19 nt, Artificial Sequence
  Description of Artificial Sequence: Synthetic oligonucleotide
aagcgggcccggacgccaa

SEQ ID NO: 1668076 - RNA, 19 nt, Artificial Sequence
  Description of Artificial Sequence: Synthetic oligonucleotide
ccggggacgaagugcaucu

SEQ ID NO: 1668077 - RNA, 19 nt, Artificial Sequence
  Description of Artificial Sequence: Synthetic oligonucleotide
cgugcggugguaccgugga

SEQ ID NO: 1668078 - RNA, 19 nt, Artificial Sequence
  Description of Artificial Sequence: Synthetic oligonucleotide
gcgggcccggacgccaacg

SEQ ID NO: 1668079 - RNA, 19 nt, Artificial Sequence
  Description of Artificial Sequence: Synthetic oligonucleotide
cccggggacgaagugcauc

SEQ ID NO: 1668080 - RNA, 19 nt, Artificial Sequence
  Description of Artificial Sequence: Synthetic oligonucleotide
gcgggaagaucggccgagc

SEQ ID NO: 1668081 - RNA, 19 nt, Artificial Sequence
  Description of Artificial Sequence: Synthetic oligonucleotide
gccgugcggugguaccgug

SEQ ID NO: 1668082 - RNA, 19 nt, Artificial Sequence
  Description of Artificial Sequence: Synthetic oligonucleotide
cagcgccgguggaauaugu

SEQ ID NO: 1668083 - RNA, 19 nt, Artificial Sequence
  Description of Artificial Sequence: Synthetic oligonucleotide
cguacgccccgcguuucgg

SEQ ID NO: 1668084 - RNA, 19 nt, Artificial Sequence
  Description of Artificial Sequence: Synthetic oligonucleotide
gccagcuagcgcccgccaa

SEQ ID NO: 1668085 - RNA, 19 nt, Artificial Sequence
  Description of Artificial Sequence: Synthetic oligonucleotide
cggacgccaacgccauacc

SEQ ID NO: 1668086 - RNA, 19 nt, Artificial Sequence
  Description of Artificial Sequence: Synthetic oligonucleotide
ccccauucguacgccccgc

SEQ ID NO: 1668087 - RNA, 19 nt, Artificial Sequence
  Description of Artificial Sequence: Synthetic oligonucleotide
gggcuuccgcguggaacgc

SEQ ID NO: 1668088 - RNA, 19 nt, Artificial Sequence
  Description of Artificial Sequence: Synthetic oligonucleotide
ggcgaggcucgggcuuccg

SEQ ID NO: 1668089 - RNA, 19 nt, Artificial Sequence
  Description of Artificial Sequence: Synthetic oligonucleotide
ccauaccgguccggucucc

SEQ ID NO: 1668090 - RNA, 19 nt, Artificial Sequence
  Description of Artificial Sequence: Synthetic oligonucleotide
ccaagcgggcccggacgcc

SEQ ID NO: 1668091 - RNA, 19 nt, Artificial Sequence
  Description of Artificial Sequence: Synthetic oligonucleotide
cgguccggucuccacaaga

SEQ ID NO: 1668092 - RNA, 19 nt, Artificial Sequence
  Description of Artificial Sequence: Synthetic oligonucleotide
cccucguaggugauggguu

SEQ ID NO: 1668093 - RNA, 19 nt, Artificial Sequence
  Description of Artificial Sequence: Synthetic oligonucleotide
cgggcccggacgccaacgc

SEQ ID NO: 1668094 - RNA, 19 nt, Artificial Sequence
  Description of Artificial Sequence: Synthetic oligonucleotide
cgccccgcguuucggggcc

SEQ ID NO: 1668095 - RNA, 19 nt, Artificial Sequence
  Description of Artificial Sequence: Synthetic oligonucleotide
cgacuaugggcuguuccaa

SEQ ID NO: 1668096 - RNA, 19 nt, Artificial Sequence
  Description of Artificial Sequence: Synthetic oligonucleotide
ccgcguuucggggccccgc

SEQ ID NO: 1668097 - RNA, 19 nt, Artificial Sequence
  Description of Artificial Sequence: Synthetic oligonucleotide
ccgguccggucuccacaag

SEQ ID NO: 1668098 - RNA, 19 nt, Artificial Sequence
  Description of Artificial Sequence: Synthetic oligonucleotide
cucgggcuuccgcguggaa

SEQ ID NO: 1668099 - RNA, 19 nt, Artificial Sequence
  Description of Artificial Sequence: Synthetic oligonucleotide
gagccagcccggggacgaa

SEQ ID NO: 1668100 - RNA, 19 nt, Artificial Sequence
  Description of Artificial Sequence: Synthetic oligonucleotide
gugcggugguaccguggau

SEQ ID NO: 1668101 - RNA, 19 nt, Artificial Sequence
  Description of Artificial Sequence: Synthetic oligonucleotide
ccauucguacgccccgcgu

SEQ ID NO: 1668102 - RNA, 19 nt, Artificial Sequence
  Description of Artificial Sequence: Synthetic oligonucleotide
gcacgacuaugggcuguuc

SEQ ID NO: 1668103 - RNA, 19 nt, Artificial Sequence
  Description of Artificial Sequence: Synthetic oligonucleotide
gcucgggcuuccgcgugga

SEQ ID NO: 1668104 - RNA, 19 nt, Artificial Sequence
  Description of Artificial Sequence: Synthetic oligonucleotide
ccagacccgggaucucgua

SEQ ID NO: 1668105 - RNA, 19 nt, Artificial Sequence
  Description of Artificial Sequence: Synthetic oligonucleotide
ccccucguaggugaugggu

SEQ ID NO: 1668106 - RNA, 19 nt, Artificial Sequence
  Description of Artificial Sequence: Synthetic oligonucleotide
cgaucccacggcgggaaga

SEQ ID NO: 1668107 - RNA, 19 nt, Artificial Sequence
  Description of Artificial Sequence: Synthetic oligonucleotide
cccgcguuucggggccccg

SEQ ID NO: 1668108 - RNA, 19 nt, Artificial Sequence
  Description of Artificial Sequence: Synthetic oligonucleotide
cccgaggccgagccuccca

SEQ ID NO: 1668109 - RNA, 19 nt, Artificial Sequence
  Description of Artificial Sequence: Synthetic oligonucleotide
gacgggcaugagagaugau

SEQ ID NO: 1668110 - RNA, 19 nt, Artificial Sequence
  Description of Artificial Sequence: Synthetic oligonucleotide
cgcguuucggggccccgca

SEQ ID NO: 1668111 - RNA, 19 nt, Artificial Sequence
  Description of Artificial Sequence: Synthetic oligonucleotide
cgccaacgccauaccgguc

SEQ ID NO: 1668112 - RNA, 19 nt, Artificial Sequence
  Description of Artificial Sequence: Synthetic oligonucleotide
ggaaagcgguguggccgua

SEQ ID NO: 1668113 - RNA, 19 nt, Artificial Sequence
  Description of Artificial Sequence: Synthetic oligonucleotide
gccagcccggggacgaagu

SEQ ID NO: 1668114 - RNA, 19 nt, Artificial Sequence
  Description of Artificial Sequence: Synthetic oligonucleotide
ggccgugcggugguaccgu

SEQ ID NO: 1668115 - RNA, 19 nt, Artificial Sequence
  Description of Artificial Sequence: Synthetic oligonucleotide
ggccguaaauuggcauuuu

SEQ ID NO: 1668116 - RNA, 19 nt, Artificial Sequence
  Description of Artificial Sequence: Synthetic oligonucleotide
ccccgcguuucggggcccc

SEQ ID NO: 1668117 - RNA, 19 nt, Artificial Sequence
  Description of Artificial Sequence: Synthetic oligonucleotide
cgcgaucccacggcgggaa

SEQ ID NO: 1668118 - RNA, 19 nt, Artificial Sequence
  Description of Artificial Sequence: Synthetic oligonucleotide
gccccgcguuucggggccc

SEQ ID NO: 1668119 - RNA, 19 nt, Artificial Sequence
  Description of Artificial Sequence: Synthetic oligonucleotide
ccacgcucugcacgacuau

SEQ ID NO: 1668120 - RNA, 19 nt, Artificial Sequence
  Description of Artificial Sequence: Synthetic oligonucleotide
cgacaccagaagugcuggu

SEQ ID NO: 1668121 - RNA, 19 nt, Artificial Sequence
  Description of Artificial Sequence: Synthetic oligonucleotide
gcccggacgccaacgccau

SEQ ID NO: 1668122 - RNA, 19 nt, Artificial Sequence
  Description of Artificial Sequence: Synthetic oligonucleotide
ccgcgaucccacggcggga

SEQ ID NO: 1668123 - RNA, 19 nt, Artificial Sequence
  Description of Artificial Sequence: Synthetic oligonucleotide
cguggaacgcacgccccau

SEQ ID NO: 1668124 - RNA, 19 nt, Artificial Sequence
  Description of Artificial Sequence: Synthetic oligonucleotide
gcucggggaucggggccgu

SEQ ID NO: 1668125 - RNA, 19 nt, Artificial Sequence
  Description of Artificial Sequence: Synthetic oligonucleotide
cccggacgccaacgccaua

SEQ ID NO: 1668126 - RNA, 19 nt, Artificial Sequence
  Description of Artificial Sequence: Synthetic oligonucleotide
cggugguaccguggauccu

SEQ ID NO: 1668127 - RNA, 19 nt, Artificial Sequence
  Description of Artificial Sequence: Synthetic oligonucleotide
ucaucuaguuccaagaugg

SEQ ID NO: 1668128 - RNA, 19 nt, Artificial Sequence
  Description of Artificial Sequence: Synthetic oligonucleotide
aauuguccggaucuggucc

SEQ ID NO: 1668129 - RNA, 19 nt, Artificial Sequence
  Description of Artificial Sequence: Synthetic oligonucleotide
gaaaccacgguccacaaag

SEQ ID NO: 1668130 - RNA, 19 nt, Artificial Sequence
  Description of Artificial Sequence: Synthetic oligonucleotide
acaggaaauagucagccac

SEQ ID NO: 1668131 - RNA, 19 nt, Artificial Sequence
  Description of Artificial Sequence: Synthetic oligonucleotide
gaaauagucagccaccggc

SEQ ID NO: 1668132 - RNA, 19 nt, Artificial Sequence
  Description of Artificial Sequence: Synthetic oligonucleotide
ucuaccaagaucucucugg

SEQ ID NO: 1668133 - RNA, 19 nt, Artificial Sequence
  Description of Artificial Sequence: Synthetic oligonucleotide
aguaauuaggugcugacca

SEQ ID NO: 1668134 - RNA, 19 nt, Artificial Sequence
  Description of Artificial Sequence: Synthetic oligonucleotide
ugaagugccacuuguaacc

SEQ ID NO: 1668135 - RNA, 19 nt, Artificial Sequence
  Description of Artificial Sequence: Synthetic oligonucleotide
aguagcgccauacagucac

SEQ ID NO: 1668136 - RNA, 19 nt, Artificial Sequence
  Description of Artificial Sequence: Synthetic oligonucleotide
aagguuucaacacuguaga

SEQ ID NO: 1668137 - RNA, 19 nt, Artificial Sequence
  Description of Artificial Sequence: Synthetic oligonucleotide
ucaaugauggcagacaggc

SEQ ID NO: 1668138 - RNA, 19 nt, Artificial Sequence
  Description of Artificial Sequence: Synthetic oligonucleotide
uuaagagccagcaggagga

SEQ ID NO: 1668139 - RNA, 19 nt, Artificial Sequence
  Description of Artificial Sequence: Synthetic oligonucleotide
gauaucgaaccuuaagagc

SEQ ID NO: 1668140 - RNA, 19 nt, Artificial Sequence
  Description of Artificial Sequence: Synthetic oligonucleotide
agucacaggaaauagucag

SEQ ID NO: 1668141 - RNA, 19 nt, Artificial Sequence
  Description of Artificial Sequence: Synthetic oligonucleotide
aacacuguagaaaccacgg

SEQ ID NO: 1668142 - RNA, 19 nt, Artificial Sequence
  Description of Artificial Sequence: Synthetic oligonucleotide
gaaaucuuucuggagaugc

SEQ ID NO: 1668143 - RNA, 19 nt, Artificial Sequence
  Description of Artificial Sequence: Synthetic oligonucleotide
aggauaucgaaccuuaaga

SEQ ID NO: 1668144 - RNA, 19 nt, Artificial Sequence
  Description of Artificial Sequence: Synthetic oligonucleotide
caaacaaguagccugcccc

SEQ ID NO: 1668145 - RNA, 19 nt, Artificial Sequence
  Description of Artificial Sequence: Synthetic oligonucleotide
uccaucaccaauugauggg

SEQ ID NO: 1668146 - RNA, 19 nt, Artificial Sequence
  Description of Artificial Sequence: Synthetic oligonucleotide
aaagucucccaugaagagg

SEQ ID NO: 1668147 - RNA, 19 nt, Artificial Sequence
  Description of Artificial Sequence: Synthetic oligonucleotide
aaaaugacuggaaacuuca

SEQ ID NO: 1668148 - RNA, 19 nt, Artificial Sequence
  Description of Artificial Sequence: Synthetic oligonucleotide
ucaugauugccccggauca

SEQ ID NO: 1668149 - RNA, 19 nt, Artificial Sequence
  Description of Artificial Sequence: Synthetic oligonucleotide
ucuucuaccaagaucucuc

SEQ ID NO: 1668150 - RNA, 19 nt, Artificial Sequence
  Description of Artificial Sequence: Synthetic oligonucleotide
aaagaucucagugcaguag

SEQ ID NO: 1668151 - RNA, 19 nt, Artificial Sequence
  Description of Artificial Sequence: Synthetic oligonucleotide
uuugcgcaagcauucauca

SEQ ID NO: 1668152 - RNA, 19 nt, Artificial Sequence
  Description of Artificial Sequence: Synthetic oligonucleotide
gacaucgccaccuacucug

SEQ ID NO: 1668153 - RNA, 19 nt, Artificial Sequence
  Description of Artificial Sequence: Synthetic oligonucleotide
acuggaaacuucaaggauc

SEQ ID NO: 1668154 - RNA, 19 nt, Artificial Sequence
  Description of Artificial Sequence: Synthetic oligonucleotide
aguaagcacggucucauug

SEQ ID NO: 1668155 - RNA, 19 nt, Artificial Sequence
  Description of Artificial Sequence: Synthetic oligonucleotide
aucaccaauugaugggcgc

SEQ ID NO: 1668156 - RNA, 19 nt, Artificial Sequence
  Description of Artificial Sequence: Synthetic oligonucleotide
uguugugucuucaggguca

SEQ ID NO: 1668157 - RNA, 19 nt, Artificial Sequence
  Description of Artificial Sequence: Synthetic oligonucleotide
guuggucucagggacaucg

SEQ ID NO: 1668158 - RNA, 19 nt, Artificial Sequence
  Description of Artificial Sequence: Synthetic oligonucleotide
cuuucggucaauuguccgg

SEQ ID NO: 1668159 - RNA, 19 nt, Artificial Sequence
  Description of Artificial Sequence: Synthetic oligonucleotide
acuucgcucucuuugauga

SEQ ID NO: 1668160 - RNA, 19 nt, Artificial Sequence
  Description of Artificial Sequence: Synthetic oligonucleotide
ggauaucgaaccuuaagag

SEQ ID NO: 1668161 - RNA, 19 nt, Artificial Sequence
  Description of Artificial Sequence: Synthetic oligonucleotide
agcacggucucauugaagu

SEQ ID NO: 1668162 - RNA, 19 nt, Artificial Sequence
  Description of Artificial Sequence: Synthetic oligonucleotide
cuuugaugagcucgcagcg

SEQ ID NO: 1668163 - RNA, 19 nt, Artificial Sequence
  Description of Artificial Sequence: Synthetic oligonucleotide
acuuguaaccuuccaucac

SEQ ID NO: 1668164 - RNA, 19 nt, Artificial Sequence
  Description of Artificial Sequence: Synthetic oligonucleotide
aauuaggugcugaccacac

SEQ ID NO: 1668165 - RNA, 19 nt, Artificial Sequence
  Description of Artificial Sequence: Synthetic oligonucleotide
acauggguccaucaugggg

SEQ ID NO: 1668166 - RNA, 19 nt, Artificial Sequence
  Description of Artificial Sequence: Synthetic oligonucleotide
uugaugagcucgcagcgcc

SEQ ID NO: 1668167 - RNA, 19 nt, Artificial Sequence
  Description of Artificial Sequence: Synthetic oligonucleotide
aaccacgguccacaaaguc

SEQ ID NO: 1668168 - RNA, 19 nt, Artificial Sequence
  Description of Artificial Sequence: Synthetic oligonucleotide
accuacucugaaaagcucc

SEQ ID NO: 1668169 - RNA, 19 nt, Artificial Sequence
  Description of Artificial Sequence: Synthetic oligonucleotide
ucacaggaaauagucagcc

SEQ ID NO: 1668170 - RNA, 19 nt, Artificial Sequence
  Description of Artificial Sequence: Synthetic oligonucleotide
ucgaagaugaugaaaucuu

SEQ ID NO: 1668171 - RNA, 19 nt, Artificial Sequence
  Description of Artificial Sequence: Synthetic oligonucleotide
caacacuguagaaaccacg

SEQ ID NO: 1668172 - RNA, 19 nt, Artificial Sequence
  Description of Artificial Sequence: Synthetic oligonucleotide
gugcugaccacacaguaag

SEQ ID NO: 1668173 - RNA, 19 nt, Artificial Sequence
  Description of Artificial Sequence: Synthetic oligonucleotide
aagaggucacacauggguc

SEQ ID NO: 1668174 - RNA, 19 nt, Artificial Sequence
  Description of Artificial Sequence: Synthetic oligonucleotide
ugaaccauauuugcgcaag

SEQ ID NO: 1668175 - RNA, 19 nt, Artificial Sequence
  Description of Artificial Sequence: Synthetic oligonucleotide
acacagaagaucuugccau

SEQ ID NO: 1668176 - RNA, 19 nt, Artificial Sequence
  Description of Artificial Sequence: Synthetic oligonucleotide
auugaagugccacuuguaa

SEQ ID NO: 1668177 - RNA, 19 nt, Artificial Sequence
  Description of Artificial Sequence: Synthetic oligonucleotide
cugccaaacaaguagccug

SEQ ID NO: 1668178 - RNA, 19 nt, Artificial Sequence
  Description of Artificial Sequence: Synthetic oligonucleotide
auugccccggaucaaagug

SEQ ID NO: 1668179 - RNA, 19 nt, Artificial Sequence
  Description of Artificial Sequence: Synthetic oligonucleotide
aagauggcugccacauucc

SEQ ID NO: 1668180 - RNA, 19 nt, Artificial Sequence
  Description of Artificial Sequence: Synthetic oligonucleotide
ugccaaacaaguagccugc

SEQ ID NO: 1668181 - RNA, 19 nt, Artificial Sequence
  Description of Artificial Sequence: Synthetic oligonucleotide
guugcucucuucuaccaag

SEQ ID NO: 1668182 - RNA, 19 nt, Artificial Sequence
  Description of Artificial Sequence: Synthetic oligonucleotide
aagugaugcggucaggaua

SEQ ID NO: 1668183 - RNA, 19 nt, Artificial Sequence
  Description of Artificial Sequence: Synthetic oligonucleotide
aggaucaaaugggagaaag

SEQ ID NO: 1668184 - RNA, 19 nt, Artificial Sequence
  Description of Artificial Sequence: Synthetic oligonucleotide
ugcgcaagcauucaucaua

SEQ ID NO: 1668185 - RNA, 19 nt, Artificial Sequence
  Description of Artificial Sequence: Synthetic oligonucleotide
uugaagugccacuuguaac

SEQ ID NO: 1668186 - RNA, 19 nt, Artificial Sequence
  Description of Artificial Sequence: Synthetic oligonucleotide
gaucucucuggccuucgcg

SEQ ID NO: 1668187 - RNA, 19 nt, Artificial Sequence
  Description of Artificial Sequence: Synthetic oligonucleotide
uccuugaggucauagaauu

SEQ ID NO: 1668188 - RNA, 19 nt, Artificial Sequence
  Description of Artificial Sequence: Synthetic oligonucleotide
cacuguagaaaccacgguc

SEQ ID NO: 1668189 - RNA, 19 nt, Artificial Sequence
  Description of Artificial Sequence: Synthetic oligonucleotide
ucuccgacuccccacuucc

SEQ ID NO: 1668190 - RNA, 19 nt, Artificial Sequence
  Description of Artificial Sequence: Synthetic oligonucleotide
ucaccaauugaugggcgcg

SEQ ID NO: 1668191 - RNA, 19 nt, Artificial Sequence
  Description of Artificial Sequence: Synthetic oligonucleotide
aguagccugccccacgggg

SEQ ID NO: 1668192 - RNA, 19 nt, Artificial Sequence
  Description of Artificial Sequence: Synthetic oligonucleotide
caauugaugggcgcgacag

SEQ ID NO: 1668193 - RNA, 19 nt, Artificial Sequence
  Description of Artificial Sequence: Synthetic oligonucleotide
caaagucucccaugaagag

SEQ ID NO: 1668194 - RNA, 19 nt, Artificial Sequence
  Description of Artificial Sequence: Synthetic oligonucleotide
caggaaauagucagccacc

SEQ ID NO: 1668195 - RNA, 19 nt, Artificial Sequence
  Description of Artificial Sequence: Synthetic oligonucleotide
uuguaaccuuccaucacca

SEQ ID NO: 1668196 - RNA, 19 nt, Artificial Sequence
  Description of Artificial Sequence: Synthetic oligonucleotide
acacauggguccaucaugg

SEQ ID NO: 1668197 - RNA, 19 nt, Artificial Sequence
  Description of Artificial Sequence: Synthetic oligonucleotide
ugucaccacauacugugac

SEQ ID NO: 1668198 - RNA, 19 nt, Artificial Sequence
  Description of Artificial Sequence: Synthetic oligonucleotide
augaaaucuuucuggagau

SEQ ID NO: 1668199 - RNA, 19 nt, Artificial Sequence
  Description of Artificial Sequence: Synthetic oligonucleotide
ucucccaugaagagguagu

SEQ ID NO: 1668200 - RNA, 19 nt, Artificial Sequence
  Description of Artificial Sequence: Synthetic oligonucleotide
uugcuuucggucaauuguc

SEQ ID NO: 1668201 - RNA, 19 nt, Artificial Sequence
  Description of Artificial Sequence: Synthetic oligonucleotide
aucaaaugggagaaaggag

SEQ ID NO: 1668202 - RNA, 19 nt, Artificial Sequence
  Description of Artificial Sequence: Synthetic oligonucleotide
aaagugaugcggucaggau

SEQ ID NO: 1668203 - RNA, 19 nt, Artificial Sequence
  Description of Artificial Sequence: Synthetic oligonucleotide
cuaccaagaucucucuggc

SEQ ID NO: 1668204 - RNA, 19 nt, Artificial Sequence
  Description of Artificial Sequence: Synthetic oligonucleotide
cuuccaucaccaauugaug

SEQ ID NO: 1668205 - RNA, 19 nt, Artificial Sequence
  Description of Artificial Sequence: Synthetic oligonucleotide
uccagagcaguccgcaccc

SEQ ID NO: 1668206 - RNA, 19 nt, Artificial Sequence
  Description of Artificial Sequence: Synthetic oligonucleotide
uugacuucgcucucuuuga

SEQ ID NO: 1668207 - RNA, 19 nt, Artificial Sequence
  Description of Artificial Sequence: Synthetic oligonucleotide
aaccauauuugcgcaagca

SEQ ID NO: 1668208 - RNA, 19 nt, Artificial Sequence
  Description of Artificial Sequence: Synthetic oligonucleotide
auuugcgcaagcauucauc

SEQ ID NO: 1668209 - RNA, 19 nt, Artificial Sequence
  Description of Artificial Sequence: Synthetic oligonucleotide
gguaguuggucucagggac

SEQ ID NO: 1668210 - RNA, 19 nt, Artificial Sequence
  Description of Artificial Sequence: Synthetic oligonucleotide
aaauagucagccaccggcu

SEQ ID NO: 1668211 - RNA, 19 nt, Artificial Sequence
  Description of Artificial Sequence: Synthetic oligonucleotide
uggaguggaggccccaacc

SEQ ID NO: 1668212 - RNA, 19 nt, Artificial Sequence
  Description of Artificial Sequence: Synthetic oligonucleotide
uaucgaaccuuaagagcca

SEQ ID NO: 1668213 - RNA, 19 nt, Artificial Sequence
  Description of Artificial Sequence: Synthetic oligonucleotide
uccaggucgcugauuuccg

SEQ ID NO: 1668214 - RNA, 19 nt, Artificial Sequence
  Description of Artificial Sequence: Synthetic oligonucleotide
augaaugucaccacauacu

SEQ ID NO: 1668215 - RNA, 19 nt, Artificial Sequence
  Description of Artificial Sequence: Synthetic oligonucleotide
ugaugcggucaggauaucg

SEQ ID NO: 1668216 - RNA, 19 nt, Artificial Sequence
  Description of Artificial Sequence: Synthetic oligonucleotide
ugcuuucggucaauugucc

SEQ ID NO: 1668217 - RNA, 19 nt, Artificial Sequence
  Description of Artificial Sequence: Synthetic oligonucleotide
gcugauuuccgccauggcc

SEQ ID NO: 1668218 - RNA, 19 nt, Artificial Sequence
  Description of Artificial Sequence: Synthetic oligonucleotide
accauauuugcgcaagcau

SEQ ID NO: 1668219 - RNA, 19 nt, Artificial Sequence
  Description of Artificial Sequence: Synthetic oligonucleotide
agugccacuuguaaccuuc

SEQ ID NO: 1668220 - RNA, 19 nt, Artificial Sequence
  Description of Artificial Sequence: Synthetic oligonucleotide
gaccacacaguaagcacgg

SEQ ID NO: 1668221 - RNA, 19 nt, Artificial Sequence
  Description of Artificial Sequence: Synthetic oligonucleotide
ugauugccccggaucaaag

SEQ ID NO: 1668222 - RNA, 19 nt, Artificial Sequence
  Description of Artificial Sequence: Synthetic oligonucleotide
uucuaccaagaucucucug

SEQ ID NO: 1668223 - RNA, 19 nt, Artificial Sequence
  Description of Artificial Sequence: Synthetic oligonucleotide
ugccacguguuuccugugg

SEQ ID NO: 1668224 - RNA, 19 nt, Artificial Sequence
  Description of Artificial Sequence: Synthetic oligonucleotide
cacggucucauugaagugc

SEQ ID NO: 1668225 - RNA, 19 nt, Artificial Sequence
  Description of Artificial Sequence: Synthetic oligonucleotide
acacaguaagcacggucuc

SEQ ID NO: 1668226 - RNA, 19 nt, Artificial Sequence
  Description of Artificial Sequence: Synthetic oligonucleotide
ucgccaccuacucugaaaa

SEQ ID NO: 1668227 - RNA, 19 nt, Artificial Sequence
  Description of Artificial Sequence: Synthetic oligonucleotide
ucucagugcaguagcgcca

SEQ ID NO: 1668228 - RNA, 19 nt, Artificial Sequence
  Description of Artificial Sequence: Synthetic oligonucleotide
cacacauggguccaucaug

SEQ ID NO: 1668229 - RNA, 19 nt, Artificial Sequence
  Description of Artificial Sequence: Synthetic oligonucleotide
caucaccaauugaugggcg

SEQ ID NO: 1668230 - RNA, 19 nt, Artificial Sequence
  Description of Artificial Sequence: Synthetic oligonucleotide
uuucggucaauuguccgga

SEQ ID NO: 1668231 - RNA, 19 nt, Artificial Sequence
  Description of Artificial Sequence: Synthetic oligonucleotide
aauugaugggcgcgacaga

SEQ ID NO: 1668232 - RNA, 19 nt, Artificial Sequence
  Description of Artificial Sequence: Synthetic oligonucleotide
acggucucauugaagugcc

SEQ ID NO: 1668233 - RNA, 19 nt, Artificial Sequence
  Description of Artificial Sequence: Synthetic oligonucleotide
agccuguugugucuucagg

SEQ ID NO: 1668234 - RNA, 19 nt, Artificial Sequence
  Description of Artificial Sequence: Synthetic oligonucleotide
uggucucagggacaucgcc

SEQ ID NO: 1668235 - RNA, 19 nt, Artificial Sequence
  Description of Artificial Sequence: Synthetic oligonucleotide
cuggcggcucucaugauug

SEQ ID NO: 1668236 - RNA, 19 nt, Artificial Sequence
  Description of Artificial Sequence: Synthetic oligonucleotide
gugcaguagcgccauacag

SEQ ID NO: 1668237 - RNA, 19 nt, Artificial Sequence
  Description of Artificial Sequence: Synthetic oligonucleotide
guaagcacggucucauuga

SEQ ID NO: 1668238 - RNA, 19 nt, Artificial Sequence
  Description of Artificial Sequence: Synthetic oligonucleotide
uccaagauggcugccacau

SEQ ID NO: 1668239 - RNA, 19 nt, Artificial Sequence
  Description of Artificial Sequence: Synthetic oligonucleotide
ucacuccccagccuguugu

SEQ ID NO: 1668240 - RNA, 19 nt, Artificial Sequence
  Description of Artificial Sequence: Synthetic oligonucleotide
uucgcucucuuugaugagc

SEQ ID NO: 1668241 - RNA, 19 nt, Artificial Sequence
  Description of Artificial Sequence: Synthetic oligonucleotide
ucauagaauuguccaugaa

SEQ ID NO: 1668242 - RNA, 19 nt, Artificial Sequence
  Description of Artificial Sequence: Synthetic oligonucleotide
uuugaugagcucgcagcgc

SEQ ID NO: 1668243 - RNA, 19 nt, Artificial Sequence
  Description of Artificial Sequence: Synthetic oligonucleotide
aagcaaagccaggcagccc

SEQ ID NO: 1668244 - RNA, 19 nt, Artificial Sequence
  Description of Artificial Sequence: Synthetic oligonucleotide
gucaauuguccggaucugg

SEQ ID NO: 1668245 - RNA, 19 nt, Artificial Sequence
  Description of Artificial Sequence: Synthetic oligonucleotide
gaucaaagugaugcgguca

SEQ ID NO: 1668246 - RNA, 19 nt, Artificial Sequence
  Description of Artificial Sequence: Synthetic oligonucleotide
gaaccauauuugcgcaagc

SEQ ID NO: 1668247 - RNA, 19 nt, Artificial Sequence
  Description of Artificial Sequence: Synthetic oligonucleotide
auuuccgccauggcccacc

SEQ ID NO: 1668248 - RNA, 19 nt, Artificial Sequence
  Description of Artificial Sequence: Synthetic oligonucleotide
uaggacuccggcugggucu

SEQ ID NO: 1668249 - RNA, 19 nt, Artificial Sequence
  Description of Artificial Sequence: Synthetic oligonucleotide
ucgcugauuuccgccaugg

SEQ ID NO: 1668250 - RNA, 19 nt, Artificial Sequence
  Description of Artificial Sequence: Synthetic oligonucleotide
guagaaaccacgguccaca

SEQ ID NO: 1668251 - RNA, 19 nt, Artificial Sequence
  Description of Artificial Sequence: Synthetic oligonucleotide
aaaucuuucuggagaugcu

SEQ ID NO: 1668252 - RNA, 19 nt, Artificial Sequence
  Description of Artificial Sequence: Synthetic oligonucleotide
cacccuagggcaagcaaag

SEQ ID NO: 1668253 - RNA, 19 nt, Artificial Sequence
  Description of Artificial Sequence: Synthetic oligonucleotide
agugaugcggucaggauau

SEQ ID NO: 1668254 - RNA, 19 nt, Artificial Sequence
  Description of Artificial Sequence: Synthetic oligonucleotide
gacuucgcucucuuugaug

SEQ ID NO: 1668255 - RNA, 19 nt, Artificial Sequence
  Description of Artificial Sequence: Synthetic oligonucleotide
gugacuggcgaguccaccc

SEQ ID NO: 1668256 - RNA, 19 nt, Artificial Sequence
  Description of Artificial Sequence: Synthetic oligonucleotide
caguugcucgaucugccgg

SEQ ID NO: 1668257 - RNA, 19 nt, Artificial Sequence
  Description of Artificial Sequence: Synthetic oligonucleotide
uaagcacggucucauugaa

SEQ ID NO: 1668258 - RNA, 19 nt, Artificial Sequence
  Description of Artificial Sequence: Synthetic oligonucleotide
cacugccaaacaaguagcc

SEQ ID NO: 1668259 - RNA, 19 nt, Artificial Sequence
  Description of Artificial Sequence: Synthetic oligonucleotide
ugcggucaggauaucgaac

SEQ ID NO: 1668260 - RNA, 19 nt, Artificial Sequence
  Description of Artificial Sequence: Synthetic oligonucleotide
gcggucaggauaucgaacc

SEQ ID NO: 1668261 - RNA, 19 nt, Artificial Sequence
  Description of Artificial Sequence: Synthetic oligonucleotide
agcaguccgcacccuaggg

SEQ ID NO: 1668262 - RNA, 19 nt, Artificial Sequence
  Description of Artificial Sequence: Synthetic oligonucleotide
aaguagccugccccacggg

SEQ ID NO: 1668263 - RNA, 19 nt, Artificial Sequence
  Description of Artificial Sequence: Synthetic oligonucleotide
aguugcucgaucugccggu

SEQ ID NO: 1668264 - RNA, 19 nt, Artificial Sequence
  Description of Artificial Sequence: Synthetic oligonucleotide
auugaugggcgcgacagau

SEQ ID NO: 1668265 - RNA, 19 nt, Artificial Sequence
  Description of Artificial Sequence: Synthetic oligonucleotide
cugccacauucccacagcg

SEQ ID NO: 1668266 - RNA, 19 nt, Artificial Sequence
  Description of Artificial Sequence: Synthetic oligonucleotide
uccgacugggcagagggca

SEQ ID NO: 1668267 - RNA, 19 nt, Artificial Sequence
  Description of Artificial Sequence: Synthetic oligonucleotide
acccucugcacguugcucu

SEQ ID NO: 1668268 - RNA, 19 nt, Artificial Sequence
  Description of Artificial Sequence: Synthetic oligonucleotide
uguuuccuguggugcagcc

SEQ ID NO: 1668269 - RNA, 19 nt, Artificial Sequence
  Description of Artificial Sequence: Synthetic oligonucleotide
gaugcggucaggauaucga

SEQ ID NO: 1668270 - RNA, 19 nt, Artificial Sequence
  Description of Artificial Sequence: Synthetic oligonucleotide
cacacagaagaucuugcca

SEQ ID NO: 1668271 - RNA, 19 nt, Artificial Sequence
  Description of Artificial Sequence: Synthetic oligonucleotide
cacauucccacagcgguag

SEQ ID NO: 1668272 - RNA, 19 nt, Artificial Sequence
  Description of Artificial Sequence: Synthetic oligonucleotide
ucaaagugaugcggucagg

SEQ ID NO: 1668273 - RNA, 19 nt, Artificial Sequence
  Description of Artificial Sequence: Synthetic oligonucleotide
caggucgcugauuuccgcc

SEQ ID NO: 1668274 - RNA, 19 nt, Artificial Sequence
  Description of Artificial Sequence: Synthetic oligonucleotide
ucagagucggggccgccgc

SEQ ID NO: 1668275 - RNA, 19 nt, Artificial Sequence
  Description of Artificial Sequence: Synthetic oligonucleotide
gcugcauugaacugggcca

SEQ ID NO: 1668276 - RNA, 19 nt, Artificial Sequence
  Description of Artificial Sequence: Synthetic oligonucleotide
ggaucaaaugggagaaagg

SEQ ID NO: 1668277 - RNA, 19 nt, Artificial Sequence
  Description of Artificial Sequence: Synthetic oligonucleotide
agguagucaaagaucucag

SEQ ID NO: 1668278 - RNA, 19 nt, Artificial Sequence
  Description of Artificial Sequence: Synthetic oligonucleotide
caauuguccggaucugguc

SEQ ID NO: 1668279 - RNA, 19 nt, Artificial Sequence
  Description of Artificial Sequence: Synthetic oligonucleotide
caucuaguuccaagauggc

SEQ ID NO: 1668280 - RNA, 19 nt, Artificial Sequence
  Description of Artificial Sequence: Synthetic oligonucleotide
cacuuguaaccuuccauca

SEQ ID NO: 1668281 - RNA, 19 nt, Artificial Sequence
  Description of Artificial Sequence: Synthetic oligonucleotide
guaccucuugcuuucgguc

SEQ ID NO: 1668282 - RNA, 19 nt, Artificial Sequence
  Description of Artificial Sequence: Synthetic oligonucleotide
cauggguccaucauggggu

SEQ ID NO: 1668283 - RNA, 19 nt, Artificial Sequence
  Description of Artificial Sequence: Synthetic oligonucleotide
uggagaugcucaucuaguu

SEQ ID NO: 1668284 - RNA, 19 nt, Artificial Sequence
  Description of Artificial Sequence: Synthetic oligonucleotide
uguagaaaccacgguccac

SEQ ID NO: 1668285 - RNA, 19 nt, Artificial Sequence
  Description of Artificial Sequence: Synthetic oligonucleotide
acugccaaacaaguagccu

SEQ ID NO: 1668286 - RNA, 19 nt, Artificial Sequence
  Description of Artificial Sequence: Synthetic oligonucleotide
ucgaaccuuaagagccagc

SEQ ID NO: 1668287 - RNA, 19 nt, Artificial Sequence
  Description of Artificial Sequence: Synthetic oligonucleotide
ucuggcggcucucaugauu

SEQ ID NO: 1668288 - RNA, 19 nt, Artificial Sequence
  Description of Artificial Sequence: Synthetic oligonucleotide
gcuuucggucaauuguccg

SEQ ID NO: 1668289 - RNA, 19 nt, Artificial Sequence
  Description of Artificial Sequence: Synthetic oligonucleotide
ugggguaccucuugcuuuc

SEQ ID NO: 1668290 - RNA, 19 nt, Artificial Sequence
  Description of Artificial Sequence: Synthetic oligonucleotide
uuggucucagggacaucgc

SEQ ID NO: 1668291 - RNA, 19 nt, Artificial Sequence
  Description of Artificial Sequence: Synthetic oligonucleotide
gcaguagcgccauacaguc

SEQ ID NO: 1668292 - RNA, 19 nt, Artificial Sequence
  Description of Artificial Sequence: Synthetic oligonucleotide
ugacuggcgaguccacccu

SEQ ID NO: 1668293 - RNA, 19 nt, Artificial Sequence
  Description of Artificial Sequence: Synthetic oligonucleotide
ccccggaucaaagugaugc

SEQ ID NO: 1668294 - RNA, 19 nt, Artificial Sequence
  Description of Artificial Sequence: Synthetic oligonucleotide
ggugcagccucgaagauga

SEQ ID NO: 1668295 - RNA, 19 nt, Artificial Sequence
  Description of Artificial Sequence: Synthetic oligonucleotide
caaagugaugcggucagga

SEQ ID NO: 1668296 - RNA, 19 nt, Artificial Sequence
  Description of Artificial Sequence: Synthetic oligonucleotide
accaauugaugggcgcgac

SEQ ID NO: 1668297 - RNA, 19 nt, Artificial Sequence
  Description of Artificial Sequence: Synthetic oligonucleotide
acguugcucucuucuacca

SEQ ID NO: 1668298 - RNA, 19 nt, Artificial Sequence
  Description of Artificial Sequence: Synthetic oligonucleotide
auacugugacuggcgaguc

SEQ ID NO: 1668299 - RNA, 19 nt, Artificial Sequence
  Description of Artificial Sequence: Synthetic oligonucleotide
uguaaccuuccaucaccaa

SEQ ID NO: 1668300 - RNA, 19 nt, Artificial Sequence
  Description of Artificial Sequence: Synthetic oligonucleotide
ggcgcgacagaucauguca

SEQ ID NO: 1668301 - RNA, 19 nt, Artificial Sequence
  Description of Artificial Sequence: Synthetic oligonucleotide
uccgccgcuaggacuccgg

SEQ ID NO: 1668302 - RNA, 19 nt, Artificial Sequence
  Description of Artificial Sequence: Synthetic oligonucleotide
ggagaugcucaucuaguuc

SEQ ID NO: 1668303 - RNA, 19 nt, Artificial Sequence
  Description of Artificial Sequence: Synthetic oligonucleotide
guaaccuuccaucaccaau

SEQ ID NO: 1668304 - RNA, 19 nt, Artificial Sequence
  Description of Artificial Sequence: Synthetic oligonucleotide
gagucacaggaaauaguca

SEQ ID NO: 1668305 - RNA, 19 nt, Artificial Sequence
  Description of Artificial Sequence: Synthetic oligonucleotide
gaugagcucgcagcgccgc

SEQ ID NO: 1668306 - RNA, 19 nt, Artificial Sequence
  Description of Artificial Sequence: Synthetic oligonucleotide
cauacagucacugaaccau

SEQ ID NO: 1668307 - RNA, 19 nt, Artificial Sequence
  Description of Artificial Sequence: Synthetic oligonucleotide
aggucgcugauuuccgcca

SEQ ID NO: 1668308 - RNA, 19 nt, Artificial Sequence
  Description of Artificial Sequence: Synthetic oligonucleotide
aaaugacuggaaacuucaa

SEQ ID NO: 1668309 - RNA, 19 nt, Artificial Sequence
  Description of Artificial Sequence: Synthetic oligonucleotide
gccaccuacucugaaaagc

SEQ ID NO: 1668310 - RNA, 19 nt, Artificial Sequence
  Description of Artificial Sequence: Synthetic oligonucleotide
auauuugcgcaagcauuca

SEQ ID NO: 1668311 - RNA, 19 nt, Artificial Sequence
  Description of Artificial Sequence: Synthetic oligonucleotide
agcgccauacagucacuga

SEQ ID NO: 1668312 - RNA, 19 nt, Artificial Sequence
  Description of Artificial Sequence: Synthetic oligonucleotide
aagcacggucucauugaag

SEQ ID NO: 1668313 - RNA, 19 nt, Artificial Sequence
  Description of Artificial Sequence: Synthetic oligonucleotide
aucgaaccuuaagagccag

SEQ ID NO: 1668314 - RNA, 19 nt, Artificial Sequence
  Description of Artificial Sequence: Synthetic oligonucleotide
aucgccaccuacucugaaa

SEQ ID NO: 1668315 - RNA, 19 nt, Artificial Sequence
  Description of Artificial Sequence: Synthetic oligonucleotide
ggaaacuucaaggaucaaa

SEQ ID NO: 1668316 - RNA, 19 nt, Artificial Sequence
  Description of Artificial Sequence: Synthetic oligonucleotide
cccuagggcaagcaaagcc

SEQ ID NO: 1668317 - RNA, 19 nt, Artificial Sequence
  Description of Artificial Sequence: Synthetic oligonucleotide
augggcgcgacagaucaug

SEQ ID NO: 1668318 - RNA, 19 nt, Artificial Sequence
  Description of Artificial Sequence: Synthetic oligonucleotide
agagucggggccgccgccc

SEQ ID NO: 1668319 - RNA, 19 nt, Artificial Sequence
  Description of Artificial Sequence: Synthetic oligonucleotide
uggggccuaggagucacag

SEQ ID NO: 1668320 - RNA, 19 nt, Artificial Sequence
  Description of Artificial Sequence: Synthetic oligonucleotide
ugacuucgcucucuuugau

SEQ ID NO: 1668321 - RNA, 19 nt, Artificial Sequence
  Description of Artificial Sequence: Synthetic oligonucleotide
aggugcugaccacacagua

SEQ ID NO: 1668322 - RNA, 19 nt, Artificial Sequence
  Description of Artificial Sequence: Synthetic oligonucleotide
ucgaucugccgguccaggu

SEQ ID NO: 1668323 - RNA, 19 nt, Artificial Sequence
  Description of Artificial Sequence: Synthetic oligonucleotide
ucucagggacaucgccacc

SEQ ID NO: 1668324 - RNA, 19 nt, Artificial Sequence
  Description of Artificial Sequence: Synthetic oligonucleotide
agagcaguccgcacccuag

SEQ ID NO: 1668325 - RNA, 19 nt, Artificial Sequence
  Description of Artificial Sequence: Synthetic oligonucleotide
gacuggaaacuucaaggau

SEQ ID NO: 1668326 - RNA, 19 nt, Artificial Sequence
  Description of Artificial Sequence: Synthetic oligonucleotide
aguggaggccccaaccucu

SEQ ID NO: 1668327 - RNA, 19 nt, Artificial Sequence
  Description of Artificial Sequence: Synthetic oligonucleotide
gccgcuaggacuccggcug

SEQ ID NO: 1668328 - RNA, 19 nt, Artificial Sequence
  Description of Artificial Sequence: Synthetic oligonucleotide
ugccccggaucaaagugau

SEQ ID NO: 1668329 - RNA, 19 nt, Artificial Sequence
  Description of Artificial Sequence: Synthetic oligonucleotide
ugcacguugcucucuucua

SEQ ID NO: 1668330 - RNA, 19 nt, Artificial Sequence
  Description of Artificial Sequence: Synthetic oligonucleotide
augcggucaggauaucgaa

SEQ ID NO: 1668331 - RNA, 19 nt, Artificial Sequence
  Description of Artificial Sequence: Synthetic oligonucleotide
agguuucaacacuguagaa

SEQ ID NO: 1668332 - RNA, 19 nt, Artificial Sequence
  Description of Artificial Sequence: Synthetic oligonucleotide
cuucgcucucuuugaugag

SEQ ID NO: 1668333 - RNA, 19 nt, Artificial Sequence
  Description of Artificial Sequence: Synthetic oligonucleotide
cacauacugugacuggcga

SEQ ID NO: 1668334 - RNA, 19 nt, Artificial Sequence
  Description of Artificial Sequence: Synthetic oligonucleotide
acccuagggcaagcaaagc

SEQ ID NO: 1668335 - RNA, 19 nt, Artificial Sequence
  Description of Artificial Sequence: Synthetic oligonucleotide
ugagcucgcagcgccgcag

SEQ ID NO: 1668336 - RNA, 19 nt, Artificial Sequence
  Description of Artificial Sequence: Synthetic oligonucleotide
uuuccgccauggcccaccc

SEQ ID NO: 1668337 - RNA, 19 nt, Artificial Sequence
  Description of Artificial Sequence: Synthetic oligonucleotide
caccuacucugaaaagcuc

SEQ ID NO: 1668338 - RNA, 19 nt, Artificial Sequence
  Description of Artificial Sequence: Synthetic oligonucleotide
uagcgccauacagucacug

SEQ ID NO: 1668339 - RNA, 19 nt, Artificial Sequence
  Description of Artificial Sequence: Synthetic oligonucleotide
acagucacugaaccauauu

SEQ ID NO: 1668340 - RNA, 19 nt, Artificial Sequence
  Description of Artificial Sequence: Synthetic oligonucleotide
aggagucacaggaaauagu

SEQ ID NO: 1668341 - RNA, 19 nt, Artificial Sequence
  Description of Artificial Sequence: Synthetic oligonucleotide
agaaaccacgguccacaaa

SEQ ID NO: 1668342 - RNA, 19 nt, Artificial Sequence
  Description of Artificial Sequence: Synthetic oligonucleotide
cuaggacuccggcuggguc

SEQ ID NO: 1668343 - RNA, 19 nt, Artificial Sequence
  Description of Artificial Sequence: Synthetic oligonucleotide
agggacaucgccaccuacu

SEQ ID NO: 1668344 - RNA, 19 nt, Artificial Sequence
  Description of Artificial Sequence: Synthetic oligonucleotide
uggccuucgcgcagagggc

SEQ ID NO: 1668345 - RNA, 19 nt, Artificial Sequence
  Description of Artificial Sequence: Synthetic oligonucleotide
ccacgguccacaaagucuc

SEQ ID NO: 1668346 - RNA, 19 nt, Artificial Sequence
  Description of Artificial Sequence: Synthetic oligonucleotide
cuaggagucacaggaaaua

SEQ ID NO: 1668347 - RNA, 19 nt, Artificial Sequence
  Description of Artificial Sequence: Synthetic oligonucleotide
gaccgcacaggggucuccg

SEQ ID NO: 1668348 - RNA, 19 nt, Artificial Sequence
  Description of Artificial Sequence: Synthetic oligonucleotide
ggucucauugaagugccac

SEQ ID NO: 1668349 - RNA, 19 nt, Artificial Sequence
  Description of Artificial Sequence: Synthetic oligonucleotide
gcaagcaaagccaggcagc

SEQ ID NO: 1668350 - RNA, 19 nt, Artificial Sequence
  Description of Artificial Sequence: Synthetic oligonucleotide
ugggcgcgacagaucaugu

SEQ ID NO: 1668351 - RNA, 19 nt, Artificial Sequence
  Description of Artificial Sequence: Synthetic oligonucleotide
ggaucaaagugaugcgguc

SEQ ID NO: 1668352 - RNA, 19 nt, Artificial Sequence
  Description of Artificial Sequence: Synthetic oligonucleotide
aagugccacuuguaaccuu

SEQ ID NO: 1668353 - RNA, 19 nt, Artificial Sequence
  Description of Artificial Sequence: Synthetic oligonucleotide
ggcgaguccacccucugca

SEQ ID NO: 1668354 - RNA, 19 nt, Artificial Sequence
  Description of Artificial Sequence: Synthetic oligonucleotide
gcgcaagcauucaucauag

SEQ ID NO: 1668355 - RNA, 19 nt, Artificial Sequence
  Description of Artificial Sequence: Synthetic oligonucleotide
ggccccaaccucuccagag

SEQ ID NO: 1668356 - RNA, 19 nt, Artificial Sequence
  Description of Artificial Sequence: Synthetic oligonucleotide
cacaggaaauagucagcca

SEQ ID NO: 1668357 - RNA, 19 nt, Artificial Sequence
  Description of Artificial Sequence: Synthetic oligonucleotide
cuguagaaaccacggucca

SEQ ID NO: 1668358 - RNA, 19 nt, Artificial Sequence
  Description of Artificial Sequence: Synthetic oligonucleotide
augauugccccggaucaaa

SEQ ID NO: 1668359 - RNA, 19 nt, Artificial Sequence
  Description of Artificial Sequence: Synthetic oligonucleotide
gauugccccggaucaaagu

SEQ ID NO: 1668360 - RNA, 19 nt, Artificial Sequence
  Description of Artificial Sequence: Synthetic oligonucleotide
uugcgcaagcauucaucau

SEQ ID NO: 1668361 - RNA, 19 nt, Artificial Sequence
  Description of Artificial Sequence: Synthetic oligonucleotide
cuccggcugggucucuccg

SEQ ID NO: 1668362 - RNA, 19 nt, Artificial Sequence
  Description of Artificial Sequence: Synthetic oligonucleotide
ccggaucaaagugaugcgg

SEQ ID NO: 1668363 - RNA, 19 nt, Artificial Sequence
  Description of Artificial Sequence: Synthetic oligonucleotide
uccggcugggucucuccga

SEQ ID NO: 1668364 - RNA, 19 nt, Artificial Sequence
  Description of Artificial Sequence: Synthetic oligonucleotide
guaguuggucucagggaca

SEQ ID NO: 1668365 - RNA, 19 nt, Artificial Sequence
  Description of Artificial Sequence: Synthetic oligonucleotide
cccggaucaaagugaugcg

SEQ ID NO: 1668366 - RNA, 19 nt, Artificial Sequence
  Description of Artificial Sequence: Synthetic oligonucleotide
gcacguugcucucuucuac

SEQ ID NO: 1668367 - RNA, 19 nt, Artificial Sequence
  Description of Artificial Sequence: Synthetic oligonucleotide
ggaagguuucaacacugua

SEQ ID NO: 1668368 - RNA, 19 nt, Artificial Sequence
  Description of Artificial Sequence: Synthetic oligonucleotide
agccaccggcuucuuggag

SEQ ID NO: 1668369 - RNA, 19 nt, Artificial Sequence
  Description of Artificial Sequence: Synthetic oligonucleotide
gucuggauggaaggggaga

SEQ ID NO: 1668370 - RNA, 19 nt, Artificial Sequence
  Description of Artificial Sequence: Synthetic oligonucleotide
cacacccggccuccgacug

SEQ ID NO: 1668371 - RNA, 19 nt, Artificial Sequence
  Description of Artificial Sequence: Synthetic oligonucleotide
gggacaucgccaccuacuc

SEQ ID NO: 1668372 - RNA, 19 nt, Artificial Sequence
  Description of Artificial Sequence: Synthetic oligonucleotide
cagagggccuugacuucgc

SEQ ID NO: 1668373 - RNA, 19 nt, Artificial Sequence
  Description of Artificial Sequence: Synthetic oligonucleotide
gcgacagaucaugucaaug

SEQ ID NO: 1668374 - RNA, 19 nt, Artificial Sequence
  Description of Artificial Sequence: Synthetic oligonucleotide
ggguccaucaugggguacc

SEQ ID NO: 1668375 - RNA, 19 nt, Artificial Sequence
  Description of Artificial Sequence: Synthetic oligonucleotide
ccaugcacacagaagaucu

SEQ ID NO: 1668376 - RNA, 19 nt, Artificial Sequence
  Description of Artificial Sequence: Synthetic oligonucleotide
cuggaguggaggccccaac

SEQ ID NO: 1668377 - RNA, 19 nt, Artificial Sequence
  Description of Artificial Sequence: Synthetic oligonucleotide
cugaaccauauuugcgcaa

SEQ ID NO: 1668378 - RNA, 19 nt, Artificial Sequence
  Description of Artificial Sequence: Synthetic oligonucleotide
guguuuccuguggugcagc

SEQ ID NO: 1668379 - RNA, 19 nt, Artificial Sequence
  Description of Artificial Sequence: Synthetic oligonucleotide
ggguaccucuugcuuucgg

SEQ ID NO: 1668380 - RNA, 19 nt, Artificial Sequence
  Description of Artificial Sequence: Synthetic oligonucleotide
ggcugggucucuccgacuc

SEQ ID NO: 1668381 - RNA, 19 nt, Artificial Sequence
  Description of Artificial Sequence: Synthetic oligonucleotide
gggcucacuccccagccug

SEQ ID NO: 1668382 - RNA, 19 nt, Artificial Sequence
  Description of Artificial Sequence: Synthetic oligonucleotide
uucggucaauuguccggau

SEQ ID NO: 1668383 - RNA, 19 nt, Artificial Sequence
  Description of Artificial Sequence: Synthetic oligonucleotide
cagggacaucgccaccuac

SEQ ID NO: 1668384 - RNA, 19 nt, Artificial Sequence
  Description of Artificial Sequence: Synthetic oligonucleotide
cacaguaagcacggucuca

SEQ ID NO: 1668385 - RNA, 19 nt, Artificial Sequence
  Description of Artificial Sequence: Synthetic oligonucleotide
augccacguguuuccugug

SEQ ID NO: 1668386 - RNA, 19 nt, Artificial Sequence
  Description of Artificial Sequence: Synthetic oligonucleotide
auacagucacugaaccaua

SEQ ID NO: 1668387 - RNA, 19 nt, Artificial Sequence
  Description of Artificial Sequence: Synthetic oligonucleotide
gcggcucucaugauugccc

SEQ ID NO: 1668388 - RNA, 19 nt, Artificial Sequence
  Description of Artificial Sequence: Synthetic oligonucleotide
gguagucaaagaucucagu

SEQ ID NO: 1668389 - RNA, 19 nt, Artificial Sequence
  Description of Artificial Sequence: Synthetic oligonucleotide
cuccggaccgcacaggggu

SEQ ID NO: 1668390 - RNA, 19 nt, Artificial Sequence
  Description of Artificial Sequence: Synthetic oligonucleotide
gcgccauacagucacugaa

SEQ ID NO: 1668391 - RNA, 19 nt, Artificial Sequence
  Description of Artificial Sequence: Synthetic oligonucleotide
ggucaauuguccggaucug

SEQ ID NO: 1668392 - RNA, 19 nt, Artificial Sequence
  Description of Artificial Sequence: Synthetic oligonucleotide
aucugccgguccaggucgc

SEQ ID NO: 1668393 - RNA, 19 nt, Artificial Sequence
  Description of Artificial Sequence: Synthetic oligonucleotide
uccggaccgcacagggguc

SEQ ID NO: 1668394 - RNA, 19 nt, Artificial Sequence
  Description of Artificial Sequence: Synthetic oligonucleotide
acuggcgaguccacccucu

SEQ ID NO: 1668395 - RNA, 19 nt, Artificial Sequence
  Description of Artificial Sequence: Synthetic oligonucleotide
gagucggggccgccgcccc

SEQ ID NO: 1668396 - RNA, 19 nt, Artificial Sequence
  Description of Artificial Sequence: Synthetic oligonucleotide
aguuggucucagggacauc

SEQ ID NO: 1668397 - RNA, 19 nt, Artificial Sequence
  Description of Artificial Sequence: Synthetic oligonucleotide
ucucuccgacuccccacuu

SEQ ID NO: 1668398 - RNA, 19 nt, Artificial Sequence
  Description of Artificial Sequence: Synthetic oligonucleotide
ggucuggauggaaggggag

SEQ ID NO: 1668399 - RNA, 19 nt, Artificial Sequence
  Description of Artificial Sequence: Synthetic oligonucleotide
caggggucuccgccgcuag

SEQ ID NO: 1668400 - RNA, 19 nt, Artificial Sequence
  Description of Artificial Sequence: Synthetic oligonucleotide
ucgcgcagagggccuugac

SEQ ID NO: 1668401 - RNA, 19 nt, Artificial Sequence
  Description of Artificial Sequence: Synthetic oligonucleotide
cccggcgcgggucagaguc

SEQ ID NO: 1668402 - RNA, 19 nt, Artificial Sequence
  Description of Artificial Sequence: Synthetic oligonucleotide
cccuccggaccgcacaggg

SEQ ID NO: 1668403 - RNA, 19 nt, Artificial Sequence
  Description of Artificial Sequence: Synthetic oligonucleotide
guccacccucugcacguug

SEQ ID NO: 1668404 - RNA, 19 nt, Artificial Sequence
  Description of Artificial Sequence: Synthetic oligonucleotide
cgcaguugcucgaucugcc

SEQ ID NO: 1668405 - RNA, 19 nt, Artificial Sequence
  Description of Artificial Sequence: Synthetic oligonucleotide
cgccauacagucacugaac

SEQ ID NO: 1668406 - RNA, 19 nt, Artificial Sequence
  Description of Artificial Sequence: Synthetic oligonucleotide
uggaaacuucaaggaucaa

SEQ ID NO: 1668407 - RNA, 19 nt, Artificial Sequence
  Description of Artificial Sequence: Synthetic oligonucleotide
gcgggucagagucggggcc

SEQ ID NO: 1668408 - RNA, 19 nt, Artificial Sequence
  Description of Artificial Sequence: Synthetic oligonucleotide
cagagucggggccgccgcc

SEQ ID NO: 1668409 - RNA, 19 nt, Artificial Sequence
  Description of Artificial Sequence: Synthetic oligonucleotide
ggaguggaggccccaaccu

SEQ ID NO: 1668410 - RNA, 19 nt, Artificial Sequence
  Description of Artificial Sequence: Synthetic oligonucleotide
uucgcgcagagggccuuga

SEQ ID NO: 1668411 - RNA, 19 nt, Artificial Sequence
  Description of Artificial Sequence: Synthetic oligonucleotide
caccaauugaugggcgcga

SEQ ID NO: 1668412 - RNA, 19 nt, Artificial Sequence
  Description of Artificial Sequence: Synthetic oligonucleotide
ggccuucgcgcagagggcc

SEQ ID NO: 1668413 - RNA, 19 nt, Artificial Sequence
  Description of Artificial Sequence: Synthetic oligonucleotide
ccaggucgcugauuuccgc

SEQ ID NO: 1668414 - RNA, 19 nt, Artificial Sequence
  Description of Artificial Sequence: Synthetic oligonucleotide
aggccccaaccucuccaga

SEQ ID NO: 1668415 - RNA, 19 nt, Artificial Sequence
  Description of Artificial Sequence: Synthetic oligonucleotide
gucucuccgacuccccacu

SEQ ID NO: 1668416 - RNA, 19 nt, Artificial Sequence
  Description of Artificial Sequence: Synthetic oligonucleotide
ggcggcucucaugauugcc

SEQ ID NO: 1668417 - RNA, 19 nt, Artificial Sequence
  Description of Artificial Sequence: Synthetic oligonucleotide
caguagcgccauacaguca

SEQ ID NO: 1668418 - RNA, 19 nt, Artificial Sequence
  Description of Artificial Sequence: Synthetic oligonucleotide
guugcucgaucugccgguc

SEQ ID NO: 1668419 - RNA, 19 nt, Artificial Sequence
  Description of Artificial Sequence: Synthetic oligonucleotide
uggguccaucaugggguac

SEQ ID NO: 1668420 - RNA, 19 nt, Artificial Sequence
  Description of Artificial Sequence: Synthetic oligonucleotide
guccgcacccuagggcaag

SEQ ID NO: 1668421 - RNA, 19 nt, Artificial Sequence
  Description of Artificial Sequence: Synthetic oligonucleotide
acaucgccaccuacucuga

SEQ ID NO: 1668422 - RNA, 19 nt, Artificial Sequence
  Description of Artificial Sequence: Synthetic oligonucleotide
caugggguaccucuugcuu

SEQ ID NO: 1668423 - RNA, 19 nt, Artificial Sequence
  Description of Artificial Sequence: Synthetic oligonucleotide
cccaugcacacagaagauc

SEQ ID NO: 1668424 - RNA, 19 nt, Artificial Sequence
  Description of Artificial Sequence: Synthetic oligonucleotide
gaggggaugccacguguuu

SEQ ID NO: 1668425 - RNA, 19 nt, Artificial Sequence
  Description of Artificial Sequence: Synthetic oligonucleotide
caugauugccccggaucaa

SEQ ID NO: 1668426 - RNA, 19 nt, Artificial Sequence
  Description of Artificial Sequence: Synthetic oligonucleotide
cucucaugauugccccgga

SEQ ID NO: 1668427 - RNA, 19 nt, Artificial Sequence
  Description of Artificial Sequence: Synthetic oligonucleotide
gcacccuagggcaagcaaa

SEQ ID NO: 1668428 - RNA, 19 nt, Artificial Sequence
  Description of Artificial Sequence: Synthetic oligonucleotide
ccgcaguugcucgaucugc

SEQ ID NO: 1668429 - RNA, 19 nt, Artificial Sequence
  Description of Artificial Sequence: Synthetic oligonucleotide
ccuccggaccgcacagggg

SEQ ID NO: 1668430 - RNA, 19 nt, Artificial Sequence
  Description of Artificial Sequence: Synthetic oligonucleotide
cggcucucaugauugcccc

SEQ ID NO: 1668431 - RNA, 19 nt, Artificial Sequence
  Description of Artificial Sequence: Synthetic oligonucleotide
gccaaacaaguagccugcc

SEQ ID NO: 1668432 - RNA, 19 nt, Artificial Sequence
  Description of Artificial Sequence: Synthetic oligonucleotide
ccuguugugucuucagggu

SEQ ID NO: 1668433 - RNA, 19 nt, Artificial Sequence
  Description of Artificial Sequence: Synthetic oligonucleotide
ucuccgccgcuaggacucc

SEQ ID NO: 1668434 - RNA, 19 nt, Artificial Sequence
  Description of Artificial Sequence: Synthetic oligonucleotide
gcgcagagggccuugacuu

SEQ ID NO: 1668435 - RNA, 19 nt, Artificial Sequence
  Description of Artificial Sequence: Synthetic oligonucleotide
cuucgcgcagagggccuug

SEQ ID NO: 1668436 - RNA, 19 nt, Artificial Sequence
  Description of Artificial Sequence: Synthetic oligonucleotide
ggggucuccgccgcuagga

SEQ ID NO: 1668437 - RNA, 19 nt, Artificial Sequence
  Description of Artificial Sequence: Synthetic oligonucleotide
cagagcaguccgcacccua

SEQ ID NO: 1668438 - RNA, 19 nt, Artificial Sequence
  Description of Artificial Sequence: Synthetic oligonucleotide
caugcacacagaagaucuu

SEQ ID NO: 1668439 - RNA, 19 nt, Artificial Sequence
  Description of Artificial Sequence: Synthetic oligonucleotide
gacuccggcugggucucuc

SEQ ID NO: 1668440 - RNA, 19 nt, Artificial Sequence
  Description of Artificial Sequence: Synthetic oligonucleotide
gggguaccucuugcuuucg

SEQ ID NO: 1668441 - RNA, 19 nt, Artificial Sequence
  Description of Artificial Sequence: Synthetic oligonucleotide
gggcgcgacagaucauguc

SEQ ID NO: 1668442 - RNA, 19 nt, Artificial Sequence
  Description of Artificial Sequence: Synthetic oligonucleotide
gggucuccgccgcuaggac

SEQ ID NO: 1668443 - RNA, 19 nt, Artificial Sequence
  Description of Artificial Sequence: Synthetic oligonucleotide
ccggcugggucucuccgac

SEQ ID NO: 1668444 - RNA, 19 nt, Artificial Sequence
  Description of Artificial Sequence: Synthetic oligonucleotide
agcucgcagcgccgcaguu

SEQ ID NO: 1668445 - RNA, 19 nt, Artificial Sequence
  Description of Artificial Sequence: Synthetic oligonucleotide
ccaauugaugggcgcgaca

SEQ ID NO: 1668446 - RNA, 19 nt, Artificial Sequence
  Description of Artificial Sequence: Synthetic oligonucleotide
cguguuuccuguggugcag

SEQ ID NO: 1668447 - RNA, 19 nt, Artificial Sequence
  Description of Artificial Sequence: Synthetic oligonucleotide
cggucaauuguccggaucu

SEQ ID NO: 1668448 - RNA, 19 nt, Artificial Sequence
  Description of Artificial Sequence: Synthetic oligonucleotide
cgcgggucagagucggggc

SEQ ID NO: 1668449 - RNA, 19 nt, Artificial Sequence
  Description of Artificial Sequence: Synthetic oligonucleotide
aguccgcacccuagggcaa

SEQ ID NO: 1668450 - RNA, 19 nt, Artificial Sequence
  Description of Artificial Sequence: Synthetic oligonucleotide
ccgcuaggacuccggcugg

SEQ ID NO: 1668451 - RNA, 19 nt, Artificial Sequence
  Description of Artificial Sequence: Synthetic oligonucleotide
ggacaucgccaccuacucu

SEQ ID NO: 1668452 - RNA, 19 nt, Artificial Sequence
  Description of Artificial Sequence: Synthetic oligonucleotide
ccuaggagucacaggaaau

SEQ ID NO: 1668453 - RNA, 19 nt, Artificial Sequence
  Description of Artificial Sequence: Synthetic oligonucleotide
aguccacccucugcacguu

SEQ ID NO: 1668454 - RNA, 19 nt, Artificial Sequence
  Description of Artificial Sequence: Synthetic oligonucleotide
guggugcagccucgaagau

SEQ ID NO: 1668455 - RNA, 19 nt, Artificial Sequence
  Description of Artificial Sequence: Synthetic oligonucleotide
cgcugauuuccgccauggc

SEQ ID NO: 1668456 - RNA, 19 nt, Artificial Sequence
  Description of Artificial Sequence: Synthetic oligonucleotide
gcgcgacagaucaugucaa

SEQ ID NO: 1668457 - RNA, 19 nt, Artificial Sequence
  Description of Artificial Sequence: Synthetic oligonucleotide
gggcuggggccuaggaguc

SEQ ID NO: 1668458 - RNA, 19 nt, Artificial Sequence
  Description of Artificial Sequence: Synthetic oligonucleotide
ccacauucccacagcggua

SEQ ID NO: 1668459 - RNA, 19 nt, Artificial Sequence
  Description of Artificial Sequence: Synthetic oligonucleotide
ggaccgcacaggggucucc

SEQ ID NO: 1668460 - RNA, 19 nt, Artificial Sequence
  Description of Artificial Sequence: Synthetic oligonucleotide
ccgccgcuaggacuccggc

SEQ ID NO: 1668461 - RNA, 19 nt, Artificial Sequence
  Description of Artificial Sequence: Synthetic oligonucleotide
cagcgccgcaguugcucga

SEQ ID NO: 1668462 - RNA, 19 nt, Artificial Sequence
  Description of Artificial Sequence: Synthetic oligonucleotide
gugaugcggucaggauauc

SEQ ID NO: 1668463 - RNA, 19 nt, Artificial Sequence
  Description of Artificial Sequence: Synthetic oligonucleotide
cgcagagggccuugacuuc

SEQ ID NO: 1668464 - RNA, 19 nt, Artificial Sequence
  Description of Artificial Sequence: Synthetic oligonucleotide
guagcgccauacagucacu

SEQ ID NO: 1668465 - RNA, 19 nt, Artificial Sequence
  Description of Artificial Sequence: Synthetic oligonucleotide
gguccaucaugggguaccu

SEQ ID NO: 1668466 - RNA, 19 nt, Artificial Sequence
  Description of Artificial Sequence: Synthetic oligonucleotide
ggucgcugauuuccgccau

SEQ ID NO: 1668467 - RNA, 19 nt, Artificial Sequence
  Description of Artificial Sequence: Synthetic oligonucleotide
cguugcucucuucuaccaa

SEQ ID NO: 1668468 - RNA, 19 nt, Artificial Sequence
  Description of Artificial Sequence: Synthetic oligonucleotide
cgcagcgccgcaguugcuc

SEQ ID NO: 1668469 - RNA, 19 nt, Artificial Sequence
  Description of Artificial Sequence: Synthetic oligonucleotide
ggaggggaugccacguguu

SEQ ID NO: 1668470 - RNA, 19 nt, Artificial Sequence
  Description of Artificial Sequence: Synthetic oligonucleotide
gcuaggacuccggcugggu

SEQ ID NO: 1668471 - RNA, 19 nt, Artificial Sequence
  Description of Artificial Sequence: Synthetic oligonucleotide
cgcacccuagggcaagcaa

SEQ ID NO: 1668472 - RNA, 19 nt, Artificial Sequence
  Description of Artificial Sequence: Synthetic oligonucleotide
ccccuccggaccgcacagg

SEQ ID NO: 1668473 - RNA, 19 nt, Artificial Sequence
  Description of Artificial Sequence: Synthetic oligonucleotide
gcgccgcaguugcucgauc

SEQ ID NO: 1668474 - RNA, 19 nt, Artificial Sequence
  Description of Artificial Sequence: Synthetic oligonucleotide
ggccuccgacugggcagag

SEQ ID NO: 1668475 - RNA, 19 nt, Artificial Sequence
  Description of Artificial Sequence: Synthetic oligonucleotide
cgccgcaguugcucgaucu

SEQ ID NO: 1668476 - RNA, 19 nt, Artificial Sequence
  Description of Artificial Sequence: Synthetic oligonucleotide
cggucaggauaucgaaccu

SEQ ID NO: 1668477 - RNA, 19 nt, Artificial Sequence
  Description of Artificial Sequence: Synthetic oligonucleotide
ccacacccggccuccgacu

SEQ ID NO: 1668478 - RNA, 19 nt, Artificial Sequence
  Description of Artificial Sequence: Synthetic oligonucleotide
cggucucauugaagugcca

SEQ ID NO: 1668479 - RNA, 19 nt, Artificial Sequence
  Description of Artificial Sequence: Synthetic oligonucleotide
gccuucgcgcagagggccu

SEQ ID NO: 1668480 - RNA, 19 nt, Artificial Sequence
  Description of Artificial Sequence: Synthetic oligonucleotide
cgcgacagaucaugucaau

SEQ ID NO: 1668481 - RNA, 19 nt, Artificial Sequence
  Description of Artificial Sequence: Synthetic oligonucleotide
ccgcacccuagggcaagca

SEQ ID NO: 1668482 - RNA, 19 nt, Artificial Sequence
  Description of Artificial Sequence: Synthetic oligonucleotide
gcucacuccccagccuguu

SEQ ID NO: 1668483 - RNA, 19 nt, Artificial Sequence
  Description of Artificial Sequence: Synthetic oligonucleotide
cgccgcuaggacuccggcu

SEQ ID NO: 1668484 - RNA, 19 nt, Artificial Sequence
  Description of Artificial Sequence: Synthetic oligonucleotide
cggaccgcacaggggucuc

SEQ ID NO: 1668485 - RNA, 19 nt, Artificial Sequence
  Description of Artificial Sequence: Synthetic oligonucleotide
cggccuccgacugggcaga

SEQ ID NO: 1668486 - RNA, 19 nt, Artificial Sequence
  Description of Artificial Sequence: Synthetic oligonucleotide
ccucuugcuuucggucaau

SEQ ID NO: 1668487 - RNA, 19 nt, Artificial Sequence
  Description of Artificial Sequence: Synthetic oligonucleotide
ccuucgcgcagagggccuu

SEQ ID NO: 1668488 - RNA, 19 nt, Artificial Sequence
  Description of Artificial Sequence: Synthetic oligonucleotide
ccccggcgcgggucagagu

SEQ ID NO: 1668489 - RNA, 19 nt, Artificial Sequence
  Description of Artificial Sequence: Synthetic oligonucleotide
aauacuugcgcuugcaacc

SEQ ID NO: 1668490 - RNA, 19 nt, Artificial Sequence
  Description of Artificial Sequence: Synthetic oligonucleotide
aaguuugagauguuggacg

SEQ ID NO: 1668491 - RNA, 19 nt, Artificial Sequence
  Description of Artificial Sequence: Synthetic oligonucleotide
uauaaaacaagccucugcu

SEQ ID NO: 1668492 - RNA, 19 nt, Artificial Sequence
  Description of Artificial Sequence: Synthetic oligonucleotide
aaaacaagccucugcucgc

SEQ ID NO: 1668493 - RNA, 19 nt, Artificial Sequence
  Description of Artificial Sequence: Synthetic oligonucleotide
aguuugagauguuggacgc

SEQ ID NO: 1668494 - RNA, 19 nt, Artificial Sequence
  Description of Artificial Sequence: Synthetic oligonucleotide
aauggcucgaguccaggcg

SEQ ID NO: 1668495 - RNA, 19 nt, Artificial Sequence
  Description of Artificial Sequence: Synthetic oligonucleotide
aagauggagaucaaguuug

SEQ ID NO: 1668496 - RNA, 19 nt, Artificial Sequence
  Description of Artificial Sequence: Synthetic oligonucleotide
ugcgcuugcaaccagcggc

SEQ ID NO: 1668497 - RNA, 19 nt, Artificial Sequence
  Description of Artificial Sequence: Synthetic oligonucleotide
aacgcgccccgguagaagc

SEQ ID NO: 1668498 - RNA, 19 nt, Artificial Sequence
  Description of Artificial Sequence: Synthetic oligonucleotide
aagucggccgcguuggccg

SEQ ID NO: 1668499 - RNA, 19 nt, Artificial Sequence
  Description of Artificial Sequence: Synthetic oligonucleotide
ugcguguaccuccagcugg

SEQ ID NO: 1668500 - RNA, 19 nt, Artificial Sequence
  Description of Artificial Sequence: Synthetic oligonucleotide
uaauacuugcgcuugcaac

SEQ ID NO: 1668501 - RNA, 19 nt, Artificial Sequence
  Description of Artificial Sequence: Synthetic oligonucleotide
uagaaggcgacaauggcuc

SEQ ID NO: 1668502 - RNA, 19 nt, Artificial Sequence
  Description of Artificial Sequence: Synthetic oligonucleotide
aguguccaaguccagcacg

SEQ ID NO: 1668503 - RNA, 19 nt, Artificial Sequence
  Description of Artificial Sequence: Synthetic oligonucleotide
aucaaguuugagauguugg

SEQ ID NO: 1668504 - RNA, 19 nt, Artificial Sequence
  Description of Artificial Sequence: Synthetic oligonucleotide
aaguagccguuuuccaccg

SEQ ID NO: 1668505 - RNA, 19 nt, Artificial Sequence
  Description of Artificial Sequence: Synthetic oligonucleotide
guagcgcucgcucagguag

SEQ ID NO: 1668506 - RNA, 19 nt, Artificial Sequence
  Description of Artificial Sequence: Synthetic oligonucleotide
ugagauguuggacgcgucc

SEQ ID NO: 1668507 - RNA, 19 nt, Artificial Sequence
  Description of Artificial Sequence: Synthetic oligonucleotide
uugcggagcacguaggaca

SEQ ID NO: 1668508 - RNA, 19 nt, Artificial Sequence
  Description of Artificial Sequence: Synthetic oligonucleotide
ucaggguaauacuugcgcu

SEQ ID NO: 1668509 - RNA, 19 nt, Artificial Sequence
  Description of Artificial Sequence: Synthetic oligonucleotide
gagcacguaggacacuagg

SEQ ID NO: 1668510 - RNA, 19 nt, Artificial Sequence
  Description of Artificial Sequence: Synthetic oligonucleotide
cuugcgcuugcaaccagcg

SEQ ID NO: 1668511 - RNA, 19 nt, Artificial Sequence
  Description of Artificial Sequence: Synthetic oligonucleotide
gaucaaguuugagauguug

SEQ ID NO: 1668512 - RNA, 19 nt, Artificial Sequence
  Description of Artificial Sequence: Synthetic oligonucleotide
gaugccaccgcgcuggguc

SEQ ID NO: 1668513 - RNA, 19 nt, Artificial Sequence
  Description of Artificial Sequence: Synthetic oligonucleotide
gagauguuggacgcguccg

SEQ ID NO: 1668514 - RNA, 19 nt, Artificial Sequence
  Description of Artificial Sequence: Synthetic oligonucleotide
cacgugaguguccaagucc

SEQ ID NO: 1668515 - RNA, 19 nt, Artificial Sequence
  Description of Artificial Sequence: Synthetic oligonucleotide
agaagcccgagccaaagau

SEQ ID NO: 1668516 - RNA, 19 nt, Artificial Sequence
  Description of Artificial Sequence: Synthetic oligonucleotide
agauguuggacgcguccgg

SEQ ID NO: 1668517 - RNA, 19 nt, Artificial Sequence
  Description of Artificial Sequence: Synthetic oligonucleotide
agcgggcgcguuuacaggg

SEQ ID NO: 1668518 - RNA, 19 nt, Artificial Sequence
  Description of Artificial Sequence: Synthetic oligonucleotide
uagccguuuuccaccgugg

SEQ ID NO: 1668519 - RNA, 19 nt, Artificial Sequence
  Description of Artificial Sequence: Synthetic oligonucleotide
aaccaagcccgggucagcg

SEQ ID NO: 1668520 - RNA, 19 nt, Artificial Sequence
  Description of Artificial Sequence: Synthetic oligonucleotide
gacacuaggagguucuugu

SEQ ID NO: 1668521 - RNA, 19 nt, Artificial Sequence
  Description of Artificial Sequence: Synthetic oligonucleotide
gucggcggcgcucugagag

SEQ ID NO: 1668522 - RNA, 19 nt, Artificial Sequence
  Description of Artificial Sequence: Synthetic oligonucleotide
uccuggugcaaguagccgu

SEQ ID NO: 1668523 - RNA, 19 nt, Artificial Sequence
  Description of Artificial Sequence: Synthetic oligonucleotide
uggagcgggccgaagucgg

SEQ ID NO: 1668524 - RNA, 19 nt, Artificial Sequence
  Description of Artificial Sequence: Synthetic oligonucleotide
gauguuggacgcguccggg

SEQ ID NO: 1668525 - RNA, 19 nt, Artificial Sequence
  Description of Artificial Sequence: Synthetic oligonucleotide
ucccuagaaggcgacaaug

SEQ ID NO: 1668526 - RNA, 19 nt, Artificial Sequence
  Description of Artificial Sequence: Synthetic oligonucleotide
aguuggagcgggccgaagu

SEQ ID NO: 1668527 - RNA, 19 nt, Artificial Sequence
  Description of Artificial Sequence: Synthetic oligonucleotide
gcacguaggacacuaggag

SEQ ID NO: 1668528 - RNA, 19 nt, Artificial Sequence
  Description of Artificial Sequence: Synthetic oligonucleotide
guagccguuuuccaccgug

SEQ ID NO: 1668529 - RNA, 19 nt, Artificial Sequence
  Description of Artificial Sequence: Synthetic oligonucleotide
aaggcgacaauggcucgag

SEQ ID NO: 1668530 - RNA, 19 nt, Artificial Sequence
  Description of Artificial Sequence: Synthetic oligonucleotide
auguuggacgcguccgggg

SEQ ID NO: 1668531 - RNA, 19 nt, Artificial Sequence
  Description of Artificial Sequence: Synthetic oligonucleotide
agaaggcgacaauggcucg

SEQ ID NO: 1668532 - RNA, 19 nt, Artificial Sequence
  Description of Artificial Sequence: Synthetic oligonucleotide
ugcugcguguaccuccagc

SEQ ID NO: 1668533 - RNA, 19 nt, Artificial Sequence
  Description of Artificial Sequence: Synthetic oligonucleotide
uuggagcgggccgaagucg

SEQ ID NO: 1668534 - RNA, 19 nt, Artificial Sequence
  Description of Artificial Sequence: Synthetic oligonucleotide
uugcgcuugcaaccagcgg

SEQ ID NO: 1668535 - RNA, 19 nt, Artificial Sequence
  Description of Artificial Sequence: Synthetic oligonucleotide
uugcugcugcugcugcugg

SEQ ID NO: 1668536 - RNA, 19 nt, Artificial Sequence
  Description of Artificial Sequence: Synthetic oligonucleotide
acuugcgcuugcaaccagc

SEQ ID NO: 1668537 - RNA, 19 nt, Artificial Sequence
  Description of Artificial Sequence: Synthetic oligonucleotide
ugcggagcacguaggacac

SEQ ID NO: 1668538 - RNA, 19 nt, Artificial Sequence
  Description of Artificial Sequence: Synthetic oligonucleotide
cuuggcgcacagcugcccg

SEQ ID NO: 1668539 - RNA, 19 nt, Artificial Sequence
  Description of Artificial Sequence: Synthetic oligonucleotide
aggguaauacuugcgcuug

SEQ ID NO: 1668540 - RNA, 19 nt, Artificial Sequence
  Description of Artificial Sequence: Synthetic oligonucleotide
ucccggagcgcccuggcca

SEQ ID NO: 1668541 - RNA, 19 nt, Artificial Sequence
  Description of Artificial Sequence: Synthetic oligonucleotide
cuugcaaccagcggcggac

SEQ ID NO: 1668542 - RNA, 19 nt, Artificial Sequence
  Description of Artificial Sequence: Synthetic oligonucleotide
acguaggacacuaggaggu

SEQ ID NO: 1668543 - RNA, 19 nt, Artificial Sequence
  Description of Artificial Sequence: Synthetic oligonucleotide
guacgcgaggugcuggugc

SEQ ID NO: 1668544 - RNA, 19 nt, Artificial Sequence
  Description of Artificial Sequence: Synthetic oligonucleotide
cuggcgagcgccugcuugg

SEQ ID NO: 1668545 - RNA, 19 nt, Artificial Sequence
  Description of Artificial Sequence: Synthetic oligonucleotide
gugcaaguagccguuuucc

SEQ ID NO: 1668546 - RNA, 19 nt, Artificial Sequence
  Description of Artificial Sequence: Synthetic oligonucleotide
gcgacaauggcucgagucc

SEQ ID NO: 1668547 - RNA, 19 nt, Artificial Sequence
  Description of Artificial Sequence: Synthetic oligonucleotide
cuagaaggcgacaauggcu

SEQ ID NO: 1668548 - RNA, 19 nt, Artificial Sequence
  Description of Artificial Sequence: Synthetic oligonucleotide
guuugagauguuggacgcg

SEQ ID NO: 1668549 - RNA, 19 nt, Artificial Sequence
  Description of Artificial Sequence: Synthetic oligonucleotide
cacaccgaaguccgagggg

SEQ ID NO: 1668550 - RNA, 19 nt, Artificial Sequence
  Description of Artificial Sequence: Synthetic oligonucleotide
cccuagaaggcgacaaugg

SEQ ID NO: 1668551 - RNA, 19 nt, Artificial Sequence
  Description of Artificial Sequence: Synthetic oligonucleotide
cucccuaccgucccuuggc

SEQ ID NO: 1668552 - RNA, 19 nt, Artificial Sequence
  Description of Artificial Sequence: Synthetic oligonucleotide
ugggcggaggcgcagcagu

SEQ ID NO: 1668553 - RNA, 19 nt, Artificial Sequence
  Description of Artificial Sequence: Synthetic oligonucleotide
agggcgcacuccaugcucc

SEQ ID NO: 1668554 - RNA, 19 nt, Artificial Sequence
  Description of Artificial Sequence: Synthetic oligonucleotide
guaauacuugcgcuugcaa

SEQ ID NO: 1668555 - RNA, 19 nt, Artificial Sequence
  Description of Artificial Sequence: Synthetic oligonucleotide
gagaagccgccaccaugcg

SEQ ID NO: 1668556 - RNA, 19 nt, Artificial Sequence
  Description of Artificial Sequence: Synthetic oligonucleotide
acgugaguguccaagucca

SEQ ID NO: 1668557 - RNA, 19 nt, Artificial Sequence
  Description of Artificial Sequence: Synthetic oligonucleotide
uuggacgcguccggggacg

SEQ ID NO: 1668558 - RNA, 19 nt, Artificial Sequence
  Description of Artificial Sequence: Synthetic oligonucleotide
ccuagaaggcgacaauggc

SEQ ID NO: 1668559 - RNA, 19 nt, Artificial Sequence
  Description of Artificial Sequence: Synthetic oligonucleotide
ucccguggagaggcgagcg

SEQ ID NO: 1668560 - RNA, 19 nt, Artificial Sequence
  Description of Artificial Sequence: Synthetic oligonucleotide
ucccuaccgucccuuggcc

SEQ ID NO: 1668561 - RNA, 19 nt, Artificial Sequence
  Description of Artificial Sequence: Synthetic oligonucleotide
cucugagagaagccgccac

SEQ ID NO: 1668562 - RNA, 19 nt, Artificial Sequence
  Description of Artificial Sequence: Synthetic oligonucleotide
uacuugcgcuugcaaccag

SEQ ID NO: 1668563 - RNA, 19 nt, Artificial Sequence
  Description of Artificial Sequence: Synthetic oligonucleotide
ugcccguugagcggcggcg

SEQ ID NO: 1668564 - RNA, 19 nt, Artificial Sequence
  Description of Artificial Sequence: Synthetic oligonucleotide
ucggcguagcgcucgcuca

SEQ ID NO: 1668565 - RNA, 19 nt, Artificial Sequence
  Description of Artificial Sequence: Synthetic oligonucleotide
uacgcgaggugcuggugcu

SEQ ID NO: 1668566 - RNA, 19 nt, Artificial Sequence
  Description of Artificial Sequence: Synthetic oligonucleotide
ugcaaccagcggcggacgc

SEQ ID NO: 1668567 - RNA, 19 nt, Artificial Sequence
  Description of Artificial Sequence: Synthetic oligonucleotide
caccacgugaguguccaag

SEQ ID NO: 1668568 - RNA, 19 nt, Artificial Sequence
  Description of Artificial Sequence: Synthetic oligonucleotide
gguagagcucggcguagcg

SEQ ID NO: 1668569 - RNA, 19 nt, Artificial Sequence
  Description of Artificial Sequence: Synthetic oligonucleotide
ugccgcguacgcgaggugc

SEQ ID NO: 1668570 - RNA, 19 nt, Artificial Sequence
  Description of Artificial Sequence: Synthetic oligonucleotide
acccgcucgcucccuaccg

SEQ ID NO: 1668571 - RNA, 19 nt, Artificial Sequence
  Description of Artificial Sequence: Synthetic oligonucleotide
gcacaccgaaguccgaggg

SEQ ID NO: 1668572 - RNA, 19 nt, Artificial Sequence
  Description of Artificial Sequence: Synthetic oligonucleotide
uugagauguuggacgcguc

SEQ ID NO: 1668573 - RNA, 19 nt, Artificial Sequence
  Description of Artificial Sequence: Synthetic oligonucleotide
caugcgcugcaccgcaccc

SEQ ID NO: 1668574 - RNA, 19 nt, Artificial Sequence
  Description of Artificial Sequence: Synthetic oligonucleotide
guagagcucggcguagcgc

SEQ ID NO: 1668575 - RNA, 19 nt, Artificial Sequence
  Description of Artificial Sequence: Synthetic oligonucleotide
uggccggcauucccggugc

SEQ ID NO: 1668576 - RNA, 19 nt, Artificial Sequence
  Description of Artificial Sequence: Synthetic oligonucleotide
uucccggugccgcguacgc

SEQ ID NO: 1668577 - RNA, 19 nt, Artificial Sequence
  Description of Artificial Sequence: Synthetic oligonucleotide
guugcugcugcugcugcug

SEQ ID NO: 1668578 - RNA, 19 nt, Artificial Sequence
  Description of Artificial Sequence: Synthetic oligonucleotide
ugcuuggcgcacagcugcc

SEQ ID NO: 1668579 - RNA, 19 nt, Artificial Sequence
  Description of Artificial Sequence: Synthetic oligonucleotide
accaagcccgggucagcgg

SEQ ID NO: 1668580 - RNA, 19 nt, Artificial Sequence
  Description of Artificial Sequence: Synthetic oligonucleotide
ucaaagcgggcgcguuuac

SEQ ID NO: 1668581 - RNA, 19 nt, Artificial Sequence
  Description of Artificial Sequence: Synthetic oligonucleotide
uugcaaccagcggcggacg

SEQ ID NO: 1668582 - RNA, 19 nt, Artificial Sequence
  Description of Artificial Sequence: Synthetic oligonucleotide
agccguuuuccaccguggu

SEQ ID NO: 1668583 - RNA, 19 nt, Artificial Sequence
  Description of Artificial Sequence: Synthetic oligonucleotide
auucccggugccgcguacg

SEQ ID NO: 1668584 - RNA, 19 nt, Artificial Sequence
  Description of Artificial Sequence: Synthetic oligonucleotide
ggugcaaguagccguuuuc

SEQ ID NO: 1668585 - RNA, 19 nt, Artificial Sequence
  Description of Artificial Sequence: Synthetic oligonucleotide
ggucaggguaauacuugcg

SEQ ID NO: 1668586 - RNA, 19 nt, Artificial Sequence
  Description of Artificial Sequence: Synthetic oligonucleotide
agaggcgagcggcggagca

SEQ ID NO: 1668587 - RNA, 19 nt, Artificial Sequence
  Description of Artificial Sequence: Synthetic oligonucleotide
gucaccacgugagugucca

SEQ ID NO: 1668588 - RNA, 19 nt, Artificial Sequence
  Description of Artificial Sequence: Synthetic oligonucleotide
uaacgcgccccgguagaag

SEQ ID NO: 1668589 - RNA, 19 nt, Artificial Sequence
  Description of Artificial Sequence: Synthetic oligonucleotide
guugcggagcacguaggac

SEQ ID NO: 1668590 - RNA, 19 nt, Artificial Sequence
  Description of Artificial Sequence: Synthetic oligonucleotide
uggugcaaguagccguuuu

SEQ ID NO: 1668591 - RNA, 19 nt, Artificial Sequence
  Description of Artificial Sequence: Synthetic oligonucleotide
cucggcucccaggucaccc

SEQ ID NO: 1668592 - RNA, 19 nt, Artificial Sequence
  Description of Artificial Sequence: Synthetic oligonucleotide
guaggacacuaggagguuc

SEQ ID NO: 1668593 - RNA, 19 nt, Artificial Sequence
  Description of Artificial Sequence: Synthetic oligonucleotide
gaaggcgacaauggcucga

SEQ ID NO: 1668594 - RNA, 19 nt, Artificial Sequence
  Description of Artificial Sequence: Synthetic oligonucleotide
cugcguguaccuccagcug

SEQ ID NO: 1668595 - RNA, 19 nt, Artificial Sequence
  Description of Artificial Sequence: Synthetic oligonucleotide
aagcccgggucagcggguc

SEQ ID NO: 1668596 - RNA, 19 nt, Artificial Sequence
  Description of Artificial Sequence: Synthetic oligonucleotide
cucggcguagcgcucgcuc

SEQ ID NO: 1668597 - RNA, 19 nt, Artificial Sequence
  Description of Artificial Sequence: Synthetic oligonucleotide
guuggacgcguccggggac

SEQ ID NO: 1668598 - RNA, 19 nt, Artificial Sequence
  Description of Artificial Sequence: Synthetic oligonucleotide
ggaaccaagcccgggucag

SEQ ID NO: 1668599 - RNA, 19 nt, Artificial Sequence
  Description of Artificial Sequence: Synthetic oligonucleotide
ugcugcugcugcugcuggc

SEQ ID NO: 1668600 - RNA, 19 nt, Artificial Sequence
  Description of Artificial Sequence: Synthetic oligonucleotide
gacccgcucgcucccuacc

SEQ ID NO: 1668601 - RNA, 19 nt, Artificial Sequence
  Description of Artificial Sequence: Synthetic oligonucleotide
ccaagcccgggucagcggg

SEQ ID NO: 1668602 - RNA, 19 nt, Artificial Sequence
  Description of Artificial Sequence: Synthetic oligonucleotide
uccggagcgcacugugcac

SEQ ID NO: 1668603 - RNA, 19 nt, Artificial Sequence
  Description of Artificial Sequence: Synthetic oligonucleotide
cuccggagcgcacugugca

SEQ ID NO: 1668604 - RNA, 19 nt, Artificial Sequence
  Description of Artificial Sequence: Synthetic oligonucleotide
accgucccuuggccgaguc

SEQ ID NO: 1668605 - RNA, 19 nt, Artificial Sequence
  Description of Artificial Sequence: Synthetic oligonucleotide
augcgcugcaccgcacccg

SEQ ID NO: 1668606 - RNA, 19 nt, Artificial Sequence
  Description of Artificial Sequence: Synthetic oligonucleotide
uuggcgcacagcugcccgu

SEQ ID NO: 1668607 - RNA, 19 nt, Artificial Sequence
  Description of Artificial Sequence: Synthetic oligonucleotide
gacgccaggccaggucccg

SEQ ID NO: 1668608 - RNA, 19 nt, Artificial Sequence
  Description of Artificial Sequence: Synthetic oligonucleotide
ucacccgcguccuccucgu

SEQ ID NO: 1668609 - RNA, 19 nt, Artificial Sequence
  Description of Artificial Sequence: Synthetic oligonucleotide
ggguaacgcgccccgguag

SEQ ID NO: 1668610 - RNA, 19 nt, Artificial Sequence
  Description of Artificial Sequence: Synthetic oligonucleotide
ccguuuuccaccgugguca

SEQ ID NO: 1668611 - RNA, 19 nt, Artificial Sequence
  Description of Artificial Sequence: Synthetic oligonucleotide
cagggcgcacuccaugcuc

SEQ ID NO: 1668612 - RNA, 19 nt, Artificial Sequence
  Description of Artificial Sequence: Synthetic oligonucleotide
uggcgcgcguugcggagca

SEQ ID NO: 1668613 - RNA, 19 nt, Artificial Sequence
  Description of Artificial Sequence: Synthetic oligonucleotide
cgggcagaaguccucaaag

SEQ ID NO: 1668614 - RNA, 19 nt, Artificial Sequence
  Description of Artificial Sequence: Synthetic oligonucleotide
gaggcgagcggcggagcag

SEQ ID NO: 1668615 - RNA, 19 nt, Artificial Sequence
  Description of Artificial Sequence: Synthetic oligonucleotide
gaaccaagcccgggucagc

SEQ ID NO: 1668616 - RNA, 19 nt, Artificial Sequence
  Description of Artificial Sequence: Synthetic oligonucleotide
gcuggcgagcgccugcuug

SEQ ID NO: 1668617 - RNA, 19 nt, Artificial Sequence
  Description of Artificial Sequence: Synthetic oligonucleotide
ucggcucaccagccccgag

SEQ ID NO: 1668618 - RNA, 19 nt, Artificial Sequence
  Description of Artificial Sequence: Synthetic oligonucleotide
gcucccuaccgucccuugg

SEQ ID NO: 1668619 - RNA, 19 nt, Artificial Sequence
  Description of Artificial Sequence: Synthetic oligonucleotide
accgccgccgccgccgcgc

SEQ ID NO: 1668620 - RNA, 19 nt, Artificial Sequence
  Description of Artificial Sequence: Synthetic oligonucleotide
gggacgaggaaggggcggg

SEQ ID NO: 1668621 - RNA, 19 nt, Artificial Sequence
  Description of Artificial Sequence: Synthetic oligonucleotide
gccgccaaguuggagcggg

SEQ ID NO: 1668622 - RNA, 19 nt, Artificial Sequence
  Description of Artificial Sequence: Synthetic oligonucleotide
ggacacuaggagguucuug

SEQ ID NO: 1668623 - RNA, 19 nt, Artificial Sequence
  Description of Artificial Sequence: Synthetic oligonucleotide
cuuggccgagucuuugucu

SEQ ID NO: 1668624 - RNA, 19 nt, Artificial Sequence
  Description of Artificial Sequence: Synthetic oligonucleotide
ugggcguccagggcgcacu

SEQ ID NO: 1668625 - RNA, 19 nt, Artificial Sequence
  Description of Artificial Sequence: Synthetic oligonucleotide
ugcucccguggagaggcga

SEQ ID NO: 1668626 - RNA, 19 nt, Artificial Sequence
  Description of Artificial Sequence: Synthetic oligonucleotide
aguagccguuuuccaccgu

SEQ ID NO: 1668627 - RNA, 19 nt, Artificial Sequence
  Description of Artificial Sequence: Synthetic oligonucleotide
gguaacgcgccccgguaga

SEQ ID NO: 1668628 - RNA, 19 nt, Artificial Sequence
  Description of Artificial Sequence: Synthetic oligonucleotide
gcgcuugcaaccagcggcg

SEQ ID NO: 1668629 - RNA, 19 nt, Artificial Sequence
  Description of Artificial Sequence: Synthetic oligonucleotide
gccgaagucggccgcguug

SEQ ID NO: 1668630 - RNA, 19 nt, Artificial Sequence
  Description of Artificial Sequence: Synthetic oligonucleotide
ggcgcuccggccaccaccg

SEQ ID NO: 1668631 - RNA, 19 nt, Artificial Sequence
  Description of Artificial Sequence: Synthetic oligonucleotide
ugcaccgcacccgcaggcu

SEQ ID NO: 1668632 - RNA, 19 nt, Artificial Sequence
  Description of Artificial Sequence: Synthetic oligonucleotide
agcccgggucagcgggucg

SEQ ID NO: 1668633 - RNA, 19 nt, Artificial Sequence
  Description of Artificial Sequence: Synthetic oligonucleotide
acgcgccccgguagaagcc

SEQ ID NO: 1668634 - RNA, 19 nt, Artificial Sequence
  Description of Artificial Sequence: Synthetic oligonucleotide
ccgccgccaaguuggagcg

SEQ ID NO: 1668635 - RNA, 19 nt, Artificial Sequence
  Description of Artificial Sequence: Synthetic oligonucleotide
agcuggucuccggagcgca

SEQ ID NO: 1668636 - RNA, 19 nt, Artificial Sequence
  Description of Artificial Sequence: Synthetic oligonucleotide
ccgaagucggccgcguugg

SEQ ID NO: 1668637 - RNA, 19 nt, Artificial Sequence
  Description of Artificial Sequence: Synthetic oligonucleotide
guguaccuccagcuggucu

SEQ ID NO: 1668638 - RNA, 19 nt, Artificial Sequence
  Description of Artificial Sequence: Synthetic oligonucleotide
gcguccggggacgaguccg

SEQ ID NO: 1668639 - RNA, 19 nt, Artificial Sequence
  Description of Artificial Sequence: Synthetic oligonucleotide
cugaucaggcucugggcgu

SEQ ID NO: 1668640 - RNA, 19 nt, Artificial Sequence
  Description of Artificial Sequence: Synthetic oligonucleotide
gcguuggccggcauucccg

SEQ ID NO: 1668641 - RNA, 19 nt, Artificial Sequence
  Description of Artificial Sequence: Synthetic oligonucleotide
caccguggucaccacguga

SEQ ID NO: 1668642 - RNA, 19 nt, Artificial Sequence
  Description of Artificial Sequence: Synthetic oligonucleotide
uccgggcagaaguccucaa

SEQ ID NO: 1668643 - RNA, 19 nt, Artificial Sequence
  Description of Artificial Sequence: Synthetic oligonucleotide
caccaugcgcugcaccgca

SEQ ID NO: 1668644 - RNA, 19 nt, Artificial Sequence
  Description of Artificial Sequence: Synthetic oligonucleotide
gggucagcgggucggcggc

SEQ ID NO: 1668645 - RNA, 19 nt, Artificial Sequence
  Description of Artificial Sequence: Synthetic oligonucleotide
gggaaccaagcccggguca

SEQ ID NO: 1668646 - RNA, 19 nt, Artificial Sequence
  Description of Artificial Sequence: Synthetic oligonucleotide
cgcguugcggagcacguag

SEQ ID NO: 1668647 - RNA, 19 nt, Artificial Sequence
  Description of Artificial Sequence: Synthetic oligonucleotide
cucaaagcgggcgcguuua

SEQ ID NO: 1668648 - RNA, 19 nt, Artificial Sequence
  Description of Artificial Sequence: Synthetic oligonucleotide
cuaccgucccuuggccgag

SEQ ID NO: 1668649 - RNA, 19 nt, Artificial Sequence
  Description of Artificial Sequence: Synthetic oligonucleotide
cccuaccgucccuuggccg

SEQ ID NO: 1668650 - RNA, 19 nt, Artificial Sequence
  Description of Artificial Sequence: Synthetic oligonucleotide
gggucggcggcgcucugag

SEQ ID NO: 1668651 - RNA, 19 nt, Artificial Sequence
  Description of Artificial Sequence: Synthetic oligonucleotide
gcggcgcucugagagaagc

SEQ ID NO: 1668652 - RNA, 19 nt, Artificial Sequence
  Description of Artificial Sequence: Synthetic oligonucleotide
cuggugccgggcgaccggc

SEQ ID NO: 1668653 - RNA, 19 nt, Artificial Sequence
  Description of Artificial Sequence: Synthetic oligonucleotide
cucccguggagaggcgagc

SEQ ID NO: 1668654 - RNA, 19 nt, Artificial Sequence
  Description of Artificial Sequence: Synthetic oligonucleotide
acgcguccggggacgaguc

SEQ ID NO: 1668655 - RNA, 19 nt, Artificial Sequence
  Description of Artificial Sequence: Synthetic oligonucleotide
gccguuuuccaccgugguc

SEQ ID NO: 1668656 - RNA, 19 nt, Artificial Sequence
  Description of Artificial Sequence: Synthetic oligonucleotide
caaagcgggcgcguuuaca

SEQ ID NO: 1668657 - RNA, 19 nt, Artificial Sequence
  Description of Artificial Sequence: Synthetic oligonucleotide
ggcucaccagccccgagaa

SEQ ID NO: 1668658 - RNA, 19 nt, Artificial Sequence
  Description of Artificial Sequence: Synthetic oligonucleotide
aggcgacaauggcucgagu

SEQ ID NO: 1668659 - RNA, 19 nt, Artificial Sequence
  Description of Artificial Sequence: Synthetic oligonucleotide
ccuaccgucccuuggccga

SEQ ID NO: 1668660 - RNA, 19 nt, Artificial Sequence
  Description of Artificial Sequence: Synthetic oligonucleotide
ggccggguaacgcgccccg

SEQ ID NO: 1668661 - RNA, 19 nt, Artificial Sequence
  Description of Artificial Sequence: Synthetic oligonucleotide
gcuaauguugcugcugcgu

SEQ ID NO: 1668662 - RNA, 19 nt, Artificial Sequence
  Description of Artificial Sequence: Synthetic oligonucleotide
gaccggcucgcgcgccucc

SEQ ID NO: 1668663 - RNA, 19 nt, Artificial Sequence
  Description of Artificial Sequence: Synthetic oligonucleotide
uggcgagcgccugcuuggc

SEQ ID NO: 1668664 - RNA, 19 nt, Artificial Sequence
  Description of Artificial Sequence: Synthetic oligonucleotide
agaucaaguuugagauguu

SEQ ID NO: 1668665 - RNA, 19 nt, Artificial Sequence
  Description of Artificial Sequence: Synthetic oligonucleotide
ccacgugaguguccaaguc

SEQ ID NO: 1668666 - RNA, 19 nt, Artificial Sequence
  Description of Artificial Sequence: Synthetic oligonucleotide
ggcgagcgccugcuuggcg

SEQ ID NO: 1668667 - RNA, 19 nt, Artificial Sequence
  Description of Artificial Sequence: Synthetic oligonucleotide
ggagcacguaggacacuag

SEQ ID NO: 1668668 - RNA, 19 nt, Artificial Sequence
  Description of Artificial Sequence: Synthetic oligonucleotide
gcaaccagcggcggacgcc

SEQ ID NO: 1668669 - RNA, 19 nt, Artificial Sequence
  Description of Artificial Sequence: Synthetic oligonucleotide
gaguccgggcagaaguccu

SEQ ID NO: 1668670 - RNA, 19 nt, Artificial Sequence
  Description of Artificial Sequence: Synthetic oligonucleotide
cguggucaccacgugagug

SEQ ID NO: 1668671 - RNA, 19 nt, Artificial Sequence
  Description of Artificial Sequence: Synthetic oligonucleotide
gccgaggcuggcgagcgcc

SEQ ID NO: 1668672 - RNA, 19 nt, Artificial Sequence
  Description of Artificial Sequence: Synthetic oligonucleotide
gacgcguccggggacgagu

SEQ ID NO: 1668673 - RNA, 19 nt, Artificial Sequence
  Description of Artificial Sequence: Synthetic oligonucleotide
accggcucgcgcgccuccg

SEQ ID NO: 1668674 - RNA, 19 nt, Artificial Sequence
  Description of Artificial Sequence: Synthetic oligonucleotide
guccgggcagaaguccuca

SEQ ID NO: 1668675 - RNA, 19 nt, Artificial Sequence
  Description of Artificial Sequence: Synthetic oligonucleotide
acgccaggccaggucccgg

SEQ ID NO: 1668676 - RNA, 19 nt, Artificial Sequence
  Description of Artificial Sequence: Synthetic oligonucleotide
gccgccgcgcagcuccugg

SEQ ID NO: 1668677 - RNA, 19 nt, Artificial Sequence
  Description of Artificial Sequence: Synthetic oligonucleotide
cucgcgcgccuccgcgucc

SEQ ID NO: 1668678 - RNA, 19 nt, Artificial Sequence
  Description of Artificial Sequence: Synthetic oligonucleotide
gaguccaggcgccgaggcu

SEQ ID NO: 1668679 - RNA, 19 nt, Artificial Sequence
  Description of Artificial Sequence: Synthetic oligonucleotide
ucgcgcgccuccgcguccc

SEQ ID NO: 1668680 - RNA, 19 nt, Artificial Sequence
  Description of Artificial Sequence: Synthetic oligonucleotide
gcggcggcugcuccgagga

SEQ ID NO: 1668681 - RNA, 19 nt, Artificial Sequence
  Description of Artificial Sequence: Synthetic oligonucleotide
ggcguagcgcucgcucagg

SEQ ID NO: 1668682 - RNA, 19 nt, Artificial Sequence
  Description of Artificial Sequence: Synthetic oligonucleotide
gcuugcaaccagcggcgga

SEQ ID NO: 1668683 - RNA, 19 nt, Artificial Sequence
  Description of Artificial Sequence: Synthetic oligonucleotide
gucagcgggucggcggcgc

SEQ ID NO: 1668684 - RNA, 19 nt, Artificial Sequence
  Description of Artificial Sequence: Synthetic oligonucleotide
gcgcgcguugcggagcacg

SEQ ID NO: 1668685 - RNA, 19 nt, Artificial Sequence
  Description of Artificial Sequence: Synthetic oligonucleotide
gcguugcggagcacguagg

SEQ ID NO: 1668686 - RNA, 19 nt, Artificial Sequence
  Description of Artificial Sequence: Synthetic oligonucleotide
ccggcauucccggugccgc

SEQ ID NO: 1668687 - RNA, 19 nt, Artificial Sequence
  Description of Artificial Sequence: Synthetic oligonucleotide
gcucccguggagaggcgag

SEQ ID NO: 1668688 - RNA, 19 nt, Artificial Sequence
  Description of Artificial Sequence: Synthetic oligonucleotide
ggcgcacuccaugcucccg

SEQ ID NO: 1668689 - RNA, 19 nt, Artificial Sequence
  Description of Artificial Sequence: Synthetic oligonucleotide
uggacgcguccggggacga

SEQ ID NO: 1668690 - RNA, 19 nt, Artificial Sequence
  Description of Artificial Sequence: Synthetic oligonucleotide
cgggucagcgggucggcgg

SEQ ID NO: 1668691 - RNA, 19 nt, Artificial Sequence
  Description of Artificial Sequence: Synthetic oligonucleotide
guaacgcgccccgguagaa

SEQ ID NO: 1668692 - RNA, 19 nt, Artificial Sequence
  Description of Artificial Sequence: Synthetic oligonucleotide
uggcgccgguagagcucgg

SEQ ID NO: 1668693 - RNA, 19 nt, Artificial Sequence
  Description of Artificial Sequence: Synthetic oligonucleotide
aggacacuaggagguucuu

SEQ ID NO: 1668694 - RNA, 19 nt, Artificial Sequence
  Description of Artificial Sequence: Synthetic oligonucleotide
caaguccagcacggugguc

SEQ ID NO: 1668695 - RNA, 19 nt, Artificial Sequence
  Description of Artificial Sequence: Synthetic oligonucleotide
gggcgcacuccaugcuccc

SEQ ID NO: 1668696 - RNA, 19 nt, Artificial Sequence
  Description of Artificial Sequence: Synthetic oligonucleotide
ggugccgggcgaccggcuc

SEQ ID NO: 1668697 - RNA, 19 nt, Artificial Sequence
  Description of Artificial Sequence: Synthetic oligonucleotide
gcccgggucagcgggucgg

SEQ ID NO: 1668698 - RNA, 19 nt, Artificial Sequence
  Description of Artificial Sequence: Synthetic oligonucleotide
gcgggcgcguuuacagggg

SEQ ID NO: 1668699 - RNA, 19 nt, Artificial Sequence
  Description of Artificial Sequence: Synthetic oligonucleotide
gcuuggcgcacagcugccc

SEQ ID NO: 1668700 - RNA, 19 nt, Artificial Sequence
  Description of Artificial Sequence: Synthetic oligonucleotide
ggacccgcucgcucccuac

SEQ ID NO: 1668701 - RNA, 19 nt, Artificial Sequence
  Description of Artificial Sequence: Synthetic oligonucleotide
agcugcccguugagcggcg

SEQ ID NO: 1668702 - RNA, 19 nt, Artificial Sequence
  Description of Artificial Sequence: Synthetic oligonucleotide
gcccguugagcggcggcgg

SEQ ID NO: 1668703 - RNA, 19 nt, Artificial Sequence
  Description of Artificial Sequence: Synthetic oligonucleotide
acgcgaggugcuggugcug

SEQ ID NO: 1668704 - RNA, 19 nt, Artificial Sequence
  Description of Artificial Sequence: Synthetic oligonucleotide
ucgcucccuaccgucccuu

SEQ ID NO: 1668705 - RNA, 19 nt, Artificial Sequence
  Description of Artificial Sequence: Synthetic oligonucleotide
cguuuuccaccguggucac

SEQ ID NO: 1668706 - RNA, 19 nt, Artificial Sequence
  Description of Artificial Sequence: Synthetic oligonucleotide
gugccgcguacgcgaggug

SEQ ID NO: 1668707 - RNA, 19 nt, Artificial Sequence
  Description of Artificial Sequence: Synthetic oligonucleotide
augcucccguggagaggcg

SEQ ID NO: 1668708 - RNA, 19 nt, Artificial Sequence
  Description of Artificial Sequence: Synthetic oligonucleotide
cgcguuggccggcauuccc

SEQ ID NO: 1668709 - RNA, 19 nt, Artificial Sequence
  Description of Artificial Sequence: Synthetic oligonucleotide
ggucagcgggucggcggcg

SEQ ID NO: 1668710 - RNA, 19 nt, Artificial Sequence
  Description of Artificial Sequence: Synthetic oligonucleotide
ggugccgcguacgcgaggu

SEQ ID NO: 1668711 - RNA, 19 nt, Artificial Sequence
  Description of Artificial Sequence: Synthetic oligonucleotide
gcggacgccaggccagguc

SEQ ID NO: 1668712 - RNA, 19 nt, Artificial Sequence
  Description of Artificial Sequence: Synthetic oligonucleotide
gcgccugcuuggcgcacag

SEQ ID NO: 1668713 - RNA, 19 nt, Artificial Sequence
  Description of Artificial Sequence: Synthetic oligonucleotide
cacgguggucuggcugcug

SEQ ID NO: 1668714 - RNA, 19 nt, Artificial Sequence
  Description of Artificial Sequence: Synthetic oligonucleotide
ggggccggguaacgcgccc

SEQ ID NO: 1668715 - RNA, 19 nt, Artificial Sequence
  Description of Artificial Sequence: Synthetic oligonucleotide
cgggagcuguggaucuugc

SEQ ID NO: 1668716 - RNA, 19 nt, Artificial Sequence
  Description of Artificial Sequence: Synthetic oligonucleotide
ggaguccggcugucggcuc

SEQ ID NO: 1668717 - RNA, 19 nt, Artificial Sequence
  Description of Artificial Sequence: Synthetic oligonucleotide
ccgaguggccaggacccgc

SEQ ID NO: 1668718 - RNA, 19 nt, Artificial Sequence
  Description of Artificial Sequence: Synthetic oligonucleotide
cccggagcgcccuggccac

SEQ ID NO: 1668719 - RNA, 19 nt, Artificial Sequence
  Description of Artificial Sequence: Synthetic oligonucleotide
cccguugagcggcggcggc

SEQ ID NO: 1668720 - RNA, 19 nt, Artificial Sequence
  Description of Artificial Sequence: Synthetic oligonucleotide
ccgccuuugcugcugcuaa

SEQ ID NO: 1668721 - RNA, 19 nt, Artificial Sequence
  Description of Artificial Sequence: Synthetic oligonucleotide
ccgaggaguccggcugucg

SEQ ID NO: 1668722 - RNA, 19 nt, Artificial Sequence
  Description of Artificial Sequence: Synthetic oligonucleotide
ccgggagcuguggaucuug

SEQ ID NO: 1668723 - RNA, 19 nt, Artificial Sequence
  Description of Artificial Sequence: Synthetic oligonucleotide
ggcgccgguagagcucggc

SEQ ID NO: 1668724 - RNA, 19 nt, Artificial Sequence
  Description of Artificial Sequence: Synthetic oligonucleotide
ccccgcggggcccaggguc

SEQ ID NO: 1668725 - RNA, 19 nt, Artificial Sequence
  Description of Artificial Sequence: Synthetic oligonucleotide
cgacaauggcucgagucca

SEQ ID NO: 1668726 - RNA, 19 nt, Artificial Sequence
  Description of Artificial Sequence: Synthetic oligonucleotide
gggccggguaacgcgcccc

SEQ ID NO: 1668727 - RNA, 19 nt, Artificial Sequence
  Description of Artificial Sequence: Synthetic oligonucleotide
ggagcgcccuggccacagc

SEQ ID NO: 1668728 - RNA, 19 nt, Artificial Sequence
  Description of Artificial Sequence: Synthetic oligonucleotide
gagcgccugcuuggcgcac

SEQ ID NO: 1668729 - RNA, 19 nt, Artificial Sequence
  Description of Artificial Sequence: Synthetic oligonucleotide
cguugcggagcacguagga

SEQ ID NO: 1668730 - RNA, 19 nt, Artificial Sequence
  Description of Artificial Sequence: Synthetic oligonucleotide
gcucgcgcgccuccgcguc

SEQ ID NO: 1668731 - RNA, 19 nt, Artificial Sequence
  Description of Artificial Sequence: Synthetic oligonucleotide
ccgccaaguuggagcgggc

SEQ ID NO: 1668732 - RNA, 19 nt, Artificial Sequence
  Description of Artificial Sequence: Synthetic oligonucleotide
caagcccgggucagcgggu

SEQ ID NO: 1668733 - RNA, 19 nt, Artificial Sequence
  Description of Artificial Sequence: Synthetic oligonucleotide
cgcguacgcgaggugcugg

SEQ ID NO: 1668734 - RNA, 19 nt, Artificial Sequence
  Description of Artificial Sequence: Synthetic oligonucleotide
cggcauucccggugccgcg

SEQ ID NO: 1668735 - RNA, 19 nt, Artificial Sequence
  Description of Artificial Sequence: Synthetic oligonucleotide
cggcguagcgcucgcucag

SEQ ID NO: 1668736 - RNA, 19 nt, Artificial Sequence
  Description of Artificial Sequence: Synthetic oligonucleotide
gccggguaacgcgccccgg

SEQ ID NO: 1668737 - RNA, 19 nt, Artificial Sequence
  Description of Artificial Sequence: Synthetic oligonucleotide
gucggccgcguuggccggc

SEQ ID NO: 1668738 - RNA, 19 nt, Artificial Sequence
  Description of Artificial Sequence: Synthetic oligonucleotide
ccggugccgcguacgcgag

SEQ ID NO: 1668739 - RNA, 19 nt, Artificial Sequence
  Description of Artificial Sequence: Synthetic oligonucleotide
cguugagcggcggcggcug

SEQ ID NO: 1668740 - RNA, 19 nt, Artificial Sequence
  Description of Artificial Sequence: Synthetic oligonucleotide
ccgggcgaccggcucgcgc

SEQ ID NO: 1668741 - RNA, 19 nt, Artificial Sequence
  Description of Artificial Sequence: Synthetic oligonucleotide
ccgggcagaaguccucaaa

SEQ ID NO: 1668742 - RNA, 19 nt, Artificial Sequence
  Description of Artificial Sequence: Synthetic oligonucleotide
ggggacgaguccgggcaga

SEQ ID NO: 1668743 - RNA, 19 nt, Artificial Sequence
  Description of Artificial Sequence: Synthetic oligonucleotide
ccggagcgcacugugcaca

SEQ ID NO: 1668744 - RNA, 19 nt, Artificial Sequence
  Description of Artificial Sequence: Synthetic oligonucleotide
ggucacccgcguccuccuc

SEQ ID NO: 1668745 - RNA, 19 nt, Artificial Sequence
  Description of Artificial Sequence: Synthetic oligonucleotide
cgccaccaugcgcugcacc

SEQ ID NO: 1668746 - RNA, 19 nt, Artificial Sequence
  Description of Artificial Sequence: Synthetic oligonucleotide
ggcggcgcucugagagaag

SEQ ID NO: 1668747 - RNA, 19 nt, Artificial Sequence
  Description of Artificial Sequence: Synthetic oligonucleotide
ccaaguccagcacgguggu

SEQ ID NO: 1668748 - RNA, 19 nt, Artificial Sequence
  Description of Artificial Sequence: Synthetic oligonucleotide
cccgaguggccaggacccg

SEQ ID NO: 1668749 - RNA, 19 nt, Artificial Sequence
  Description of Artificial Sequence: Synthetic oligonucleotide
gggacgaguccgggcagaa

SEQ ID NO: 1668750 - RNA, 19 nt, Artificial Sequence
  Description of Artificial Sequence: Synthetic oligonucleotide
ggacgcguccggggacgag

SEQ ID NO: 1668751 - RNA, 19 nt, Artificial Sequence
  Description of Artificial Sequence: Synthetic oligonucleotide
gcguacgcgaggugcuggu

SEQ ID NO: 1668752 - RNA, 19 nt, Artificial Sequence
  Description of Artificial Sequence: Synthetic oligonucleotide
ccgggucagcgggucggcg

SEQ ID NO: 1668753 - RNA, 19 nt, Artificial Sequence
  Description of Artificial Sequence: Synthetic oligonucleotide
cgaagucggccgcguuggc

SEQ ID NO: 1668754 - RNA, 19 nt, Artificial Sequence
  Description of Artificial Sequence: Synthetic oligonucleotide
gcguguaccuccagcuggu

SEQ ID NO: 1668755 - RNA, 19 nt, Artificial Sequence
  Description of Artificial Sequence: Synthetic oligonucleotide
ggucggcggcgcucugaga

SEQ ID NO: 1668756 - RNA, 19 nt, Artificial Sequence
  Description of Artificial Sequence: Synthetic oligonucleotide
cggcucgcgcgccuccgcg

SEQ ID NO: 1668757 - RNA, 19 nt, Artificial Sequence
  Description of Artificial Sequence: Synthetic oligonucleotide
gccgccuuugcugcugcua

SEQ ID NO: 1668758 - RNA, 19 nt, Artificial Sequence
  Description of Artificial Sequence: Synthetic oligonucleotide
cgcuugcaaccagcggcgg

SEQ ID NO: 1668759 - RNA, 19 nt, Artificial Sequence
  Description of Artificial Sequence: Synthetic oligonucleotide
cugggcgccgggugcuggu

SEQ ID NO: 1668760 - RNA, 19 nt, Artificial Sequence
  Description of Artificial Sequence: Synthetic oligonucleotide
cguacgcgaggugcuggug

SEQ ID NO: 1668761 - RNA, 19 nt, Artificial Sequence
  Description of Artificial Sequence: Synthetic oligonucleotide
gcgcagggagaugcugauc

SEQ ID NO: 1668762 - RNA, 19 nt, Artificial Sequence
  Description of Artificial Sequence: Synthetic oligonucleotide
cggggacgaguccgggcag

SEQ ID NO: 1668763 - RNA, 19 nt, Artificial Sequence
  Description of Artificial Sequence: Synthetic oligonucleotide
gcucggcucccaggucacc

SEQ ID NO: 1668764 - RNA, 19 nt, Artificial Sequence
  Description of Artificial Sequence: Synthetic oligonucleotide
ggcauucccggugccgcgu

SEQ ID NO: 1668765 - RNA, 19 nt, Artificial Sequence
  Description of Artificial Sequence: Synthetic oligonucleotide
cggagcacguaggacacua

SEQ ID NO: 1668766 - RNA, 19 nt, Artificial Sequence
  Description of Artificial Sequence: Synthetic oligonucleotide
ccccgccgccgccaaguug

SEQ ID NO: 1668767 - RNA, 19 nt, Artificial Sequence
  Description of Artificial Sequence: Synthetic oligonucleotide
ccggcucgcgcgccuccgc

SEQ ID NO: 1668768 - RNA, 19 nt, Artificial Sequence
  Description of Artificial Sequence: Synthetic oligonucleotide
cgcucccuaccgucccuug

SEQ ID NO: 1668769 - RNA, 19 nt, Artificial Sequence
  Description of Artificial Sequence: Synthetic oligonucleotide
ccgcguuggccggcauucc

SEQ ID NO: 1668770 - RNA, 19 nt, Artificial Sequence
  Description of Artificial Sequence: Synthetic oligonucleotide
ccgcguacgcgaggugcug

SEQ ID NO: 1668771 - RNA, 19 nt, Artificial Sequence
  Description of Artificial Sequence: Synthetic oligonucleotide
cccgggucagcgggucggc

SEQ ID NO: 1668772 - RNA, 19 nt, Artificial Sequence
  Description of Artificial Sequence: Synthetic oligonucleotide
cgcguccggggacgagucc

SEQ ID NO: 1668773 - RNA, 19 nt, Artificial Sequence
  Description of Artificial Sequence: Synthetic oligonucleotide
gccgcguacgcgaggugcu

SEQ ID NO: 1668774 - RNA, 19 nt, Artificial Sequence
  Description of Artificial Sequence: Synthetic oligonucleotide
cguagcgcucgcucaggua

SEQ ID NO: 1668775 - RNA, 19 nt, Artificial Sequence
  Description of Artificial Sequence: Synthetic oligonucleotide
cggugccgcguacgcgagg

SEQ ID NO: 1668776 - RNA, 19 nt, Artificial Sequence
  Description of Artificial Sequence: Synthetic oligonucleotide
cuggugcaaguagccguuu

SEQ ID NO: 1668777 - RNA, 19 nt, Artificial Sequence
  Description of Artificial Sequence: Synthetic oligonucleotide
ccggguaacgcgccccggu

SEQ ID NO: 1668778 - RNA, 19 nt, Artificial Sequence
  Description of Artificial Sequence: Synthetic oligonucleotide
ggucuccggagcgcacugu

SEQ ID NO: 1668779 - RNA, 19 nt, Artificial Sequence
  Description of Artificial Sequence: Synthetic oligonucleotide
cgucccuuggccgagucuu

SEQ ID NO: 1668780 - RNA, 19 nt, Artificial Sequence
  Description of Artificial Sequence: Synthetic oligonucleotide
ccucaaagcgggcgcguuu

SEQ ID NO: 1668781 - RNA, 19 nt, Artificial Sequence
  Description of Artificial Sequence: Synthetic oligonucleotide
cggguaacgcgccccggua

SEQ ID NO: 1668782 - RNA, 19 nt, Artificial Sequence
  Description of Artificial Sequence: Synthetic oligonucleotide
gcgggucggcggcgcucug

SEQ ID NO: 1668783 - RNA, 19 nt, Artificial Sequence
  Description of Artificial Sequence: Synthetic oligonucleotide
cgccgccaaguuggagcgg

SEQ ID NO: 1668784 - RNA, 19 nt, Artificial Sequence
  Description of Artificial Sequence: Synthetic oligonucleotide
cggcggacgccaggccagg

SEQ ID NO: 1668785 - RNA, 19 nt, Artificial Sequence
  Description of Artificial Sequence: Synthetic oligonucleotide
ggccgcguuggccggcauu

SEQ ID NO: 1668786 - RNA, 19 nt, Artificial Sequence
  Description of Artificial Sequence: Synthetic oligonucleotide
cccgcucgcucccuaccgu

SEQ ID NO: 1668787 - RNA, 19 nt, Artificial Sequence
  Description of Artificial Sequence: Synthetic oligonucleotide
gcgcguugcggagcacgua

SEQ ID NO: 1668788 - RNA, 19 nt, Artificial Sequence
  Description of Artificial Sequence: Synthetic oligonucleotide
ccuccuggucaggguaaua

SEQ ID NO: 1668789 - RNA, 19 nt, Artificial Sequence
  Description of Artificial Sequence: Synthetic oligonucleotide
ccgccaccaugcgcugcac

SEQ ID NO: 1668790 - RNA, 19 nt, Artificial Sequence
  Description of Artificial Sequence: Synthetic oligonucleotide
cggcggcugcuccgaggag

SEQ ID NO: 1668791 - RNA, 19 nt, Artificial Sequence
  Description of Artificial Sequence: Synthetic oligonucleotide
cgcgcguugcggagcacgu

SEQ ID NO: 1668792 - RNA, 19 nt, Artificial Sequence
  Description of Artificial Sequence: Synthetic oligonucleotide
gggccgaagucggccgcgu

SEQ ID NO: 1668793 - RNA, 19 nt, Artificial Sequence
  Description of Artificial Sequence: Synthetic oligonucleotide
ggcgcgcguugcggagcac

SEQ ID NO: 1668794 - RNA, 19 nt, Artificial Sequence
  Description of Artificial Sequence: Synthetic oligonucleotide
cggcggcgcucugagagaa

SEQ ID NO: 1668795 - RNA, 19 nt, Artificial Sequence
  Description of Artificial Sequence: Synthetic oligonucleotide
ccaggucccggagcgcccu

SEQ ID NO: 1668796 - RNA, 19 nt, Artificial Sequence
  Description of Artificial Sequence: Synthetic oligonucleotide
gcggagcacguaggacacu

SEQ ID NO: 1668797 - RNA, 19 nt, Artificial Sequence
  Description of Artificial Sequence: Synthetic oligonucleotide
ccguugagcggcggcggcu

SEQ ID NO: 1668798 - RNA, 19 nt, Artificial Sequence
  Description of Artificial Sequence: Synthetic oligonucleotide
ggcggacgccaggccaggu

SEQ ID NO: 1668799 - RNA, 19 nt, Artificial Sequence
  Description of Artificial Sequence: Synthetic oligonucleotide
gcgcugcaccgcacccgca

SEQ ID NO: 1668800 - RNA, 19 nt, Artificial Sequence
  Description of Artificial Sequence: Synthetic oligonucleotide
cguaggacacuaggagguu

SEQ ID NO: 1668801 - RNA, 19 nt, Artificial Sequence
  Description of Artificial Sequence: Synthetic oligonucleotide
cgaccggcucgcgcgccuc

SEQ ID NO: 1668802 - RNA, 19 nt, Artificial Sequence
  Description of Artificial Sequence: Synthetic oligonucleotide
cgggcgcuccggccaccac

SEQ ID NO: 1668803 - RNA, 19 nt, Artificial Sequence
  Description of Artificial Sequence: Synthetic oligonucleotide
gcucggcguagcgcucgcu

SEQ ID NO: 1668804 - RNA, 19 nt, Artificial Sequence
  Description of Artificial Sequence: Synthetic oligonucleotide
ccggagcgcccuggccaca

SEQ ID NO: 1668805 - RNA, 19 nt, Artificial Sequence
  Description of Artificial Sequence: Synthetic oligonucleotide
ccgccgccgccgccgcgca

SEQ ID NO: 1668806 - RNA, 19 nt, Artificial Sequence
  Description of Artificial Sequence: Synthetic oligonucleotide
gaugacacaauccaggacg

SEQ ID NO: 1668807 - RNA, 19 nt, Artificial Sequence
  Description of Artificial Sequence: Synthetic oligonucleotide
aguuuguuaaaccuguuac

SEQ ID NO: 1668808 - RNA, 19 nt, Artificial Sequence
  Description of Artificial Sequence: Synthetic oligonucleotide
aaaacuuugaagaccgucc

SEQ ID NO: 1668809 - RNA, 19 nt, Artificial Sequence
  Description of Artificial Sequence: Synthetic oligonucleotide
ucuuggauaauccuguugc

SEQ ID NO: 1668810 - RNA, 19 nt, Artificial Sequence
  Description of Artificial Sequence: Synthetic oligonucleotide
aaaccuguuacuuccacag

SEQ ID NO: 1668811 - RNA, 19 nt, Artificial Sequence
  Description of Artificial Sequence: Synthetic oligonucleotide
aaacagugguuccuuaggc

SEQ ID NO: 1668812 - RNA, 19 nt, Artificial Sequence
  Description of Artificial Sequence: Synthetic oligonucleotide
gagauaaggaguuuggggc

SEQ ID NO: 1668813 - RNA, 19 nt, Artificial Sequence
  Description of Artificial Sequence: Synthetic oligonucleotide
ugagauaaggaguuugggg

SEQ ID NO: 1668814 - RNA, 19 nt, Artificial Sequence
  Description of Artificial Sequence: Synthetic oligonucleotide
uguuaaaccuguuacuucc

SEQ ID NO: 1668815 - RNA, 19 nt, Artificial Sequence
  Description of Artificial Sequence: Synthetic oligonucleotide
guuaauuccugccagacug

SEQ ID NO: 1668816 - RNA, 19 nt, Artificial Sequence
  Description of Artificial Sequence: Synthetic oligonucleotide
aagccuaguuuguuaaacc

SEQ ID NO: 1668817 - RNA, 19 nt, Artificial Sequence
  Description of Artificial Sequence: Synthetic oligonucleotide
auuccugccagacuggagc

SEQ ID NO: 1668818 - RNA, 19 nt, Artificial Sequence
  Description of Artificial Sequence: Synthetic oligonucleotide
gaucgaacagccaagagag

SEQ ID NO: 1668819 - RNA, 19 nt, Artificial Sequence
  Description of Artificial Sequence: Synthetic oligonucleotide
uguaccaucucauagccca

SEQ ID NO: 1668820 - RNA, 19 nt, Artificial Sequence
  Description of Artificial Sequence: Synthetic oligonucleotide
cuuggaugaacaaaguggc

SEQ ID NO: 1668821 - RNA, 19 nt, Artificial Sequence
  Description of Artificial Sequence: Synthetic oligonucleotide
agaacuggugcccaauugc

SEQ ID NO: 1668822 - RNA, 19 nt, Artificial Sequence
  Description of Artificial Sequence: Synthetic oligonucleotide
aaguauagcagucaccgga

SEQ ID NO: 1668823 - RNA, 19 nt, Artificial Sequence
  Description of Artificial Sequence: Synthetic oligonucleotide
uaugcagagauuaggcagg

SEQ ID NO: 1668824 - RNA, 19 nt, Artificial Sequence
  Description of Artificial Sequence: Synthetic oligonucleotide
uuaggcaggcccaauagcc

SEQ ID NO: 1668825 - RNA, 19 nt, Artificial Sequence
  Description of Artificial Sequence: Synthetic oligonucleotide
acgaggacacuacacagcc

SEQ ID NO: 1668826 - RNA, 19 nt, Artificial Sequence
  Description of Artificial Sequence: Synthetic oligonucleotide
guaaggaagagucucgucc

SEQ ID NO: 1668827 - RNA, 19 nt, Artificial Sequence
  Description of Artificial Sequence: Synthetic oligonucleotide
auacacuuccccuucugcc

SEQ ID NO: 1668828 - RNA, 19 nt, Artificial Sequence
  Description of Artificial Sequence: Synthetic oligonucleotide
augcuugauggucacaccc

SEQ ID NO: 1668829 - RNA, 19 nt, Artificial Sequence
  Description of Artificial Sequence: Synthetic oligonucleotide
gaaacagugguuccuuagg

SEQ ID NO: 1668830 - RNA, 19 nt, Artificial Sequence
  Description of Artificial Sequence: Synthetic oligonucleotide
aauccaggacgcuggaaac

SEQ ID NO: 1668831 - RNA, 19 nt, Artificial Sequence
  Description of Artificial Sequence: Synthetic oligonucleotide
aagagaguguucccauggc

SEQ ID NO: 1668832 - RNA, 19 nt, Artificial Sequence
  Description of Artificial Sequence: Synthetic oligonucleotide
agccaguccaaacaagccc

SEQ ID NO: 1668833 - RNA, 19 nt, Artificial Sequence
  Description of Artificial Sequence: Synthetic oligonucleotide
aaggucaugaugaugccuc

SEQ ID NO: 1668834 - RNA, 19 nt, Artificial Sequence
  Description of Artificial Sequence: Synthetic oligonucleotide
auuaggcaggcccaauagc

SEQ ID NO: 1668835 - RNA, 19 nt, Artificial Sequence
  Description of Artificial Sequence: Synthetic oligonucleotide
uagaccaagccucccaccg

SEQ ID NO: 1668836 - RNA, 19 nt, Artificial Sequence
  Description of Artificial Sequence: Synthetic oligonucleotide
guucgucugugacagaucg

SEQ ID NO: 1668837 - RNA, 19 nt, Artificial Sequence
  Description of Artificial Sequence: Synthetic oligonucleotide
gaacaaaguggccuucugg

SEQ ID NO: 1668838 - RNA, 19 nt, Artificial Sequence
  Description of Artificial Sequence: Synthetic oligonucleotide
aucauggaagagucaauac

SEQ ID NO: 1668839 - RNA, 19 nt, Artificial Sequence
  Description of Artificial Sequence: Synthetic oligonucleotide
agaucgaacagccaagaga

SEQ ID NO: 1668840 - RNA, 19 nt, Artificial Sequence
  Description of Artificial Sequence: Synthetic oligonucleotide
aauaccacaaacaacucuu

SEQ ID NO: 1668841 - RNA, 19 nt, Artificial Sequence
  Description of Artificial Sequence: Synthetic oligonucleotide
ccaaaggucaugaugaugc

SEQ ID NO: 1668842 - RNA, 19 nt, Artificial Sequence
  Description of Artificial Sequence: Synthetic oligonucleotide
aaacuuugaagaccguccu

SEQ ID NO: 1668843 - RNA, 19 nt, Artificial Sequence
  Description of Artificial Sequence: Synthetic oligonucleotide
caccauguaaggaagaguc

SEQ ID NO: 1668844 - RNA, 19 nt, Artificial Sequence
  Description of Artificial Sequence: Synthetic oligonucleotide
ugacagaucgaacagccaa

SEQ ID NO: 1668845 - RNA, 19 nt, Artificial Sequence
  Description of Artificial Sequence: Synthetic oligonucleotide
agaguguucccauggcagc

SEQ ID NO: 1668846 - RNA, 19 nt, Artificial Sequence
  Description of Artificial Sequence: Synthetic oligonucleotide
uauagcagucaccggaggc

SEQ ID NO: 1668847 - RNA, 19 nt, Artificial Sequence
  Description of Artificial Sequence: Synthetic oligonucleotide
cauguaaggaagagucucg

SEQ ID NO: 1668848 - RNA, 19 nt, Artificial Sequence
  Description of Artificial Sequence: Synthetic oligonucleotide
uaggccuuggacccgacag

SEQ ID NO: 1668849 - RNA, 19 nt, Artificial Sequence
  Description of Artificial Sequence: Synthetic oligonucleotide
gaagucaccauguaaggaa

SEQ ID NO: 1668850 - RNA, 19 nt, Artificial Sequence
  Description of Artificial Sequence: Synthetic oligonucleotide
ugcuugauggucacacccg

SEQ ID NO: 1668851 - RNA, 19 nt, Artificial Sequence
  Description of Artificial Sequence: Synthetic oligonucleotide
aaacauccguugcugccac

SEQ ID NO: 1668852 - RNA, 19 nt, Artificial Sequence
  Description of Artificial Sequence: Synthetic oligonucleotide
uguuacuuccacaggccag

SEQ ID NO: 1668853 - RNA, 19 nt, Artificial Sequence
  Description of Artificial Sequence: Synthetic oligonucleotide
caagagaguguucccaugg

SEQ ID NO: 1668854 - RNA, 19 nt, Artificial Sequence
  Description of Artificial Sequence: Synthetic oligonucleotide
gucaauaccacaaacaacu

SEQ ID NO: 1668855 - RNA, 19 nt, Artificial Sequence
  Description of Artificial Sequence: Synthetic oligonucleotide
ucagucuccacgaggacac

SEQ ID NO: 1668856 - RNA, 19 nt, Artificial Sequence
  Description of Artificial Sequence: Synthetic oligonucleotide
uaaggaagagucucgucca

SEQ ID NO: 1668857 - RNA, 19 nt, Artificial Sequence
  Description of Artificial Sequence: Synthetic oligonucleotide
aacaagcccuggcuugccc

SEQ ID NO: 1668858 - RNA, 19 nt, Artificial Sequence
  Description of Artificial Sequence: Synthetic oligonucleotide
ucgaacagccaagagagug

SEQ ID NO: 1668859 - RNA, 19 nt, Artificial Sequence
  Description of Artificial Sequence: Synthetic oligonucleotide
acugguucgucugugacag

SEQ ID NO: 1668860 - RNA, 19 nt, Artificial Sequence
  Description of Artificial Sequence: Synthetic oligonucleotide
uuuaaccaggcuuggggug

SEQ ID NO: 1668861 - RNA, 19 nt, Artificial Sequence
  Description of Artificial Sequence: Synthetic oligonucleotide
aauugcccgugcugauugc

SEQ ID NO: 1668862 - RNA, 19 nt, Artificial Sequence
  Description of Artificial Sequence: Synthetic oligonucleotide
uggauaauccuguugccuc

SEQ ID NO: 1668863 - RNA, 19 nt, Artificial Sequence
  Description of Artificial Sequence: Synthetic oligonucleotide
ugccccaauggcuacagug

SEQ ID NO: 1668864 - RNA, 19 nt, Artificial Sequence
  Description of Artificial Sequence: Synthetic oligonucleotide
aacagcucuccgucugugg

SEQ ID NO: 1668865 - RNA, 19 nt, Artificial Sequence
  Description of Artificial Sequence: Synthetic oligonucleotide
agucaauaccacaaacaac

SEQ ID NO: 1668866 - RNA, 19 nt, Artificial Sequence
  Description of Artificial Sequence: Synthetic oligonucleotide
agugagauaaggaguuugg

SEQ ID NO: 1668867 - RNA, 19 nt, Artificial Sequence
  Description of Artificial Sequence: Synthetic oligonucleotide
ugauggucacacccgacug

SEQ ID NO: 1668868 - RNA, 19 nt, Artificial Sequence
  Description of Artificial Sequence: Synthetic oligonucleotide
aaccuguuacuuccacagg

SEQ ID NO: 1668869 - RNA, 19 nt, Artificial Sequence
  Description of Artificial Sequence: Synthetic oligonucleotide
uuugaagaccguccugcug

SEQ ID NO: 1668870 - RNA, 19 nt, Artificial Sequence
  Description of Artificial Sequence: Synthetic oligonucleotide
aacuggugcccaauugccc

SEQ ID NO: 1668871 - RNA, 19 nt, Artificial Sequence
  Description of Artificial Sequence: Synthetic oligonucleotide
guuacuuccacaggccagg

SEQ ID NO: 1668872 - RNA, 19 nt, Artificial Sequence
  Description of Artificial Sequence: Synthetic oligonucleotide
uuaaaccuguuacuuccac

SEQ ID NO: 1668873 - RNA, 19 nt, Artificial Sequence
  Description of Artificial Sequence: Synthetic oligonucleotide
aacuuugaagaccguccug

SEQ ID NO: 1668874 - RNA, 19 nt, Artificial Sequence
  Description of Artificial Sequence: Synthetic oligonucleotide
aacugguucgucugugaca

SEQ ID NO: 1668875 - RNA, 19 nt, Artificial Sequence
  Description of Artificial Sequence: Synthetic oligonucleotide
uguuaauuccugccagacu

SEQ ID NO: 1668876 - RNA, 19 nt, Artificial Sequence
  Description of Artificial Sequence: Synthetic oligonucleotide
auccguugcugccacugcc

SEQ ID NO: 1668877 - RNA, 19 nt, Artificial Sequence
  Description of Artificial Sequence: Synthetic oligonucleotide
auggccuaaacauccguug

SEQ ID NO: 1668878 - RNA, 19 nt, Artificial Sequence
  Description of Artificial Sequence: Synthetic oligonucleotide
uaugggacucccugguucc

SEQ ID NO: 1668879 - RNA, 19 nt, Artificial Sequence
  Description of Artificial Sequence: Synthetic oligonucleotide
agcggaaugagcagugccc

SEQ ID NO: 1668880 - RNA, 19 nt, Artificial Sequence
  Description of Artificial Sequence: Synthetic oligonucleotide
uaguuuguuaaaccuguua

SEQ ID NO: 1668881 - RNA, 19 nt, Artificial Sequence
  Description of Artificial Sequence: Synthetic oligonucleotide
gugauccaagccuaguuug

SEQ ID NO: 1668882 - RNA, 19 nt, Artificial Sequence
  Description of Artificial Sequence: Synthetic oligonucleotide
uuugccccaagaauacacu

SEQ ID NO: 1668883 - RNA, 19 nt, Artificial Sequence
  Description of Artificial Sequence: Synthetic oligonucleotide
cuuggauaauccuguugcc

SEQ ID NO: 1668884 - RNA, 19 nt, Artificial Sequence
  Description of Artificial Sequence: Synthetic oligonucleotide
accggaggcagucacagca

SEQ ID NO: 1668885 - RNA, 19 nt, Artificial Sequence
  Description of Artificial Sequence: Synthetic oligonucleotide
uggaagagucaauaccaca

SEQ ID NO: 1668886 - RNA, 19 nt, Artificial Sequence
  Description of Artificial Sequence: Synthetic oligonucleotide
ugcugauugcugccaaaag

SEQ ID NO: 1668887 - RNA, 19 nt, Artificial Sequence
  Description of Artificial Sequence: Synthetic oligonucleotide
uggccuaaacauccguugc

SEQ ID NO: 1668888 - RNA, 19 nt, Artificial Sequence
  Description of Artificial Sequence: Synthetic oligonucleotide
uuguuaaaccuguuacuuc

SEQ ID NO: 1668889 - RNA, 19 nt, Artificial Sequence
  Description of Artificial Sequence: Synthetic oligonucleotide
uagccaguccaaacaagcc

SEQ ID NO: 1668890 - RNA, 19 nt, Artificial Sequence
  Description of Artificial Sequence: Synthetic oligonucleotide
aagucaccauguaaggaag

SEQ ID NO: 1668891 - RNA, 19 nt, Artificial Sequence
  Description of Artificial Sequence: Synthetic oligonucleotide
aagaccguccugcuguuaa

SEQ ID NO: 1668892 - RNA, 19 nt, Artificial Sequence
  Description of Artificial Sequence: Synthetic oligonucleotide
gacacaauccaggacgcug

SEQ ID NO: 1668893 - RNA, 19 nt, Artificial Sequence
  Description of Artificial Sequence: Synthetic oligonucleotide
aaaggucaugaugaugccu

SEQ ID NO: 1668894 - RNA, 19 nt, Artificial Sequence
  Description of Artificial Sequence: Synthetic oligonucleotide
agggccaggacaugagagg

SEQ ID NO: 1668895 - RNA, 19 nt, Artificial Sequence
  Description of Artificial Sequence: Synthetic oligonucleotide
ugaugacacaauccaggac

SEQ ID NO: 1668896 - RNA, 19 nt, Artificial Sequence
  Description of Artificial Sequence: Synthetic oligonucleotide
uccaagccuaguuuguuaa

SEQ ID NO: 1668897 - RNA, 19 nt, Artificial Sequence
  Description of Artificial Sequence: Synthetic oligonucleotide
ucccauggcagcaggacac

SEQ ID NO: 1668898 - RNA, 19 nt, Artificial Sequence
  Description of Artificial Sequence: Synthetic oligonucleotide
uggucugauucuuggauaa

SEQ ID NO: 1668899 - RNA, 19 nt, Artificial Sequence
  Description of Artificial Sequence: Synthetic oligonucleotide
augacacaauccaggacgc

SEQ ID NO: 1668900 - RNA, 19 nt, Artificial Sequence
  Description of Artificial Sequence: Synthetic oligonucleotide
uguguaugugugugugugc

SEQ ID NO: 1668901 - RNA, 19 nt, Artificial Sequence
  Description of Artificial Sequence: Synthetic oligonucleotide
auggcaucagucuccacga

SEQ ID NO: 1668902 - RNA, 19 nt, Artificial Sequence
  Description of Artificial Sequence: Synthetic oligonucleotide
gauaaggaguuuggggcag

SEQ ID NO: 1668903 - RNA, 19 nt, Artificial Sequence
  Description of Artificial Sequence: Synthetic oligonucleotide
uuggauaauccuguugccu

SEQ ID NO: 1668904 - RNA, 19 nt, Artificial Sequence
  Description of Artificial Sequence: Synthetic oligonucleotide
acagagugagauaaggagu

SEQ ID NO: 1668905 - RNA, 19 nt, Artificial Sequence
  Description of Artificial Sequence: Synthetic oligonucleotide
ucaauaccacaaacaacuc

SEQ ID NO: 1668906 - RNA, 19 nt, Artificial Sequence
  Description of Artificial Sequence: Synthetic oligonucleotide
uggggcagcggcuuggaug

SEQ ID NO: 1668907 - RNA, 19 nt, Artificial Sequence
  Description of Artificial Sequence: Synthetic oligonucleotide
agucaccggaggcagucac

SEQ ID NO: 1668908 - RNA, 19 nt, Artificial Sequence
  Description of Artificial Sequence: Synthetic oligonucleotide
gacagaucgaacagccaag

SEQ ID NO: 1668909 - RNA, 19 nt, Artificial Sequence
  Description of Artificial Sequence: Synthetic oligonucleotide
agaggcaccacaggccacc

SEQ ID NO: 1668910 - RNA, 19 nt, Artificial Sequence
  Description of Artificial Sequence: Synthetic oligonucleotide
gugagauaaggaguuuggg

SEQ ID NO: 1668911 - RNA, 19 nt, Artificial Sequence
  Description of Artificial Sequence: Synthetic oligonucleotide
gaacuggugcccaauugcc

SEQ ID NO: 1668912 - RNA, 19 nt, Artificial Sequence
  Description of Artificial Sequence: Synthetic oligonucleotide
aguauagcagucaccggag

SEQ ID NO: 1668913 - RNA, 19 nt, Artificial Sequence
  Description of Artificial Sequence: Synthetic oligonucleotide
aggcccaauagccagucca

SEQ ID NO: 1668914 - RNA, 19 nt, Artificial Sequence
  Description of Artificial Sequence: Synthetic oligonucleotide
ucgucugugacagaucgaa

SEQ ID NO: 1668915 - RNA, 19 nt, Artificial Sequence
  Description of Artificial Sequence: Synthetic oligonucleotide
ccacaaacaacucuuugag

SEQ ID NO: 1668916 - RNA, 19 nt, Artificial Sequence
  Description of Artificial Sequence: Synthetic oligonucleotide
accguccugcuguuaauuc

SEQ ID NO: 1668917 - RNA, 19 nt, Artificial Sequence
  Description of Artificial Sequence: Synthetic oligonucleotide
uggcugaugucagugaggu

SEQ ID NO: 1668918 - RNA, 19 nt, Artificial Sequence
  Description of Artificial Sequence: Synthetic oligonucleotide
uccaaacaagcccuggcuu

SEQ ID NO: 1668919 - RNA, 19 nt, Artificial Sequence
  Description of Artificial Sequence: Synthetic oligonucleotide
agugagguugccauggccu

SEQ ID NO: 1668920 - RNA, 19 nt, Artificial Sequence
  Description of Artificial Sequence: Synthetic oligonucleotide
caagccuaguuuguuaaac

SEQ ID NO: 1668921 - RNA, 19 nt, Artificial Sequence
  Description of Artificial Sequence: Synthetic oligonucleotide
gaugaugccucggucaguc

SEQ ID NO: 1668922 - RNA, 19 nt, Artificial Sequence
  Description of Artificial Sequence: Synthetic oligonucleotide
auggcuacagugaaggcgu

SEQ ID NO: 1668923 - RNA, 19 nt, Artificial Sequence
  Description of Artificial Sequence: Synthetic oligonucleotide
cacugaugacacaauccag

SEQ ID NO: 1668924 - RNA, 19 nt, Artificial Sequence
  Description of Artificial Sequence: Synthetic oligonucleotide
cuaugggacucccugguuc

SEQ ID NO: 1668925 - RNA, 19 nt, Artificial Sequence
  Description of Artificial Sequence: Synthetic oligonucleotide
ggaaacagugguuccuuag

SEQ ID NO: 1668926 - RNA, 19 nt, Artificial Sequence
  Description of Artificial Sequence: Synthetic oligonucleotide
uccuuaggcaccugcauuu

SEQ ID NO: 1668927 - RNA, 19 nt, Artificial Sequence
  Description of Artificial Sequence: Synthetic oligonucleotide
ucaccggaggcagucacag

SEQ ID NO: 1668928 - RNA, 19 nt, Artificial Sequence
  Description of Artificial Sequence: Synthetic oligonucleotide
guguguaugugugugugug

SEQ ID NO: 1668929 - RNA, 19 nt, Artificial Sequence
  Description of Artificial Sequence: Synthetic oligonucleotide
caaaggucaugaugaugcc

SEQ ID NO: 1668930 - RNA, 19 nt, Artificial Sequence
  Description of Artificial Sequence: Synthetic oligonucleotide
uaaggaguuuggggcagcg

SEQ ID NO: 1668931 - RNA, 19 nt, Artificial Sequence
  Description of Artificial Sequence: Synthetic oligonucleotide
uguaaggaagagucucguc

SEQ ID NO: 1668932 - RNA, 19 nt, Artificial Sequence
  Description of Artificial Sequence: Synthetic oligonucleotide
uaggcaggcccaauagcca

SEQ ID NO: 1668933 - RNA, 19 nt, Artificial Sequence
  Description of Artificial Sequence: Synthetic oligonucleotide
acgcuggaaacagugguuc

SEQ ID NO: 1668934 - RNA, 19 nt, Artificial Sequence
  Description of Artificial Sequence: Synthetic oligonucleotide
guauagcagucaccggagg

SEQ ID NO: 1668935 - RNA, 19 nt, Artificial Sequence
  Description of Artificial Sequence: Synthetic oligonucleotide
uuaaccaggcuuggggugu

SEQ ID NO: 1668936 - RNA, 19 nt, Artificial Sequence
  Description of Artificial Sequence: Synthetic oligonucleotide
ugccccaagaauacacuuc

SEQ ID NO: 1668937 - RNA, 19 nt, Artificial Sequence
  Description of Artificial Sequence: Synthetic oligonucleotide
auaauccuguugccucagg

SEQ ID NO: 1668938 - RNA, 19 nt, Artificial Sequence
  Description of Artificial Sequence: Synthetic oligonucleotide
aggaagagucucguccagc

SEQ ID NO: 1668939 - RNA, 19 nt, Artificial Sequence
  Description of Artificial Sequence: Synthetic oligonucleotide
uggagacacagagugagau

SEQ ID NO: 1668940 - RNA, 19 nt, Artificial Sequence
  Description of Artificial Sequence: Synthetic oligonucleotide
gucaccauguaaggaagag

SEQ ID NO: 1668941 - RNA, 19 nt, Artificial Sequence
  Description of Artificial Sequence: Synthetic oligonucleotide
ucggccccaagcaaacagc

SEQ ID NO: 1668942 - RNA, 19 nt, Artificial Sequence
  Description of Artificial Sequence: Synthetic oligonucleotide
gaucauggaagagucaaua

SEQ ID NO: 1668943 - RNA, 19 nt, Artificial Sequence
  Description of Artificial Sequence: Synthetic oligonucleotide
gaggugcagagcccagugg

SEQ ID NO: 1668944 - RNA, 19 nt, Artificial Sequence
  Description of Artificial Sequence: Synthetic oligonucleotide
auagcagucaccggaggca

SEQ ID NO: 1668945 - RNA, 19 nt, Artificial Sequence
  Description of Artificial Sequence: Synthetic oligonucleotide
ugcccaauugcccgugcug

SEQ ID NO: 1668946 - RNA, 19 nt, Artificial Sequence
  Description of Artificial Sequence: Synthetic oligonucleotide
cugguuccuagaccaagcc

SEQ ID NO: 1668947 - RNA, 19 nt, Artificial Sequence
  Description of Artificial Sequence: Synthetic oligonucleotide
uggcccuccaggaaacgug

SEQ ID NO: 1668948 - RNA, 19 nt, Artificial Sequence
  Description of Artificial Sequence: Synthetic oligonucleotide
cuguuaauuccugccagac

SEQ ID NO: 1668949 - RNA, 19 nt, Artificial Sequence
  Description of Artificial Sequence: Synthetic oligonucleotide
ccugcuguuaauuccugcc

SEQ ID NO: 1668950 - RNA, 19 nt, Artificial Sequence
  Description of Artificial Sequence: Synthetic oligonucleotide
guccccgcaggccacaugc

SEQ ID NO: 1668951 - RNA, 19 nt, Artificial Sequence
  Description of Artificial Sequence: Synthetic oligonucleotide
ugcccuacgggcacaggca

SEQ ID NO: 1668952 - RNA, 19 nt, Artificial Sequence
  Description of Artificial Sequence: Synthetic oligonucleotide
caugcuugauggucacacc

SEQ ID NO: 1668953 - RNA, 19 nt, Artificial Sequence
  Description of Artificial Sequence: Synthetic oligonucleotide
agcuaugggacucccuggu

SEQ ID NO: 1668954 - RNA, 19 nt, Artificial Sequence
  Description of Artificial Sequence: Synthetic oligonucleotide
aaggaguuuggggcagcgg

SEQ ID NO: 1668955 - RNA, 19 nt, Artificial Sequence
  Description of Artificial Sequence: Synthetic oligonucleotide
uuccuuaggcaccugcauu

SEQ ID NO: 1668956 - RNA, 19 nt, Artificial Sequence
  Description of Artificial Sequence: Synthetic oligonucleotide
uuccugccagacuggagcc

SEQ ID NO: 1668957 - RNA, 19 nt, Artificial Sequence
  Description of Artificial Sequence: Synthetic oligonucleotide
gaagagucucguccagcug

SEQ ID NO: 1668958 - RNA, 19 nt, Artificial Sequence
  Description of Artificial Sequence: Synthetic oligonucleotide
cagggauaggugauccaag

SEQ ID NO: 1668959 - RNA, 19 nt, Artificial Sequence
  Description of Artificial Sequence: Synthetic oligonucleotide
uccugcuguuaauuccugc

SEQ ID NO: 1668960 - RNA, 19 nt, Artificial Sequence
  Description of Artificial Sequence: Synthetic oligonucleotide
ucaccauguaaggaagagu

SEQ ID NO: 1668961 - RNA, 19 nt, Artificial Sequence
  Description of Artificial Sequence: Synthetic oligonucleotide
uacgggcacaggcaccugc

SEQ ID NO: 1668962 - RNA, 19 nt, Artificial Sequence
  Description of Artificial Sequence: Synthetic oligonucleotide
ucuccacgaggacacuaca

SEQ ID NO: 1668963 - RNA, 19 nt, Artificial Sequence
  Description of Artificial Sequence: Synthetic oligonucleotide
ucgaccucgggcuccuuug

SEQ ID NO: 1668964 - RNA, 19 nt, Artificial Sequence
  Description of Artificial Sequence: Synthetic oligonucleotide
ggacacuacacagccaggg

SEQ ID NO: 1668965 - RNA, 19 nt, Artificial Sequence
  Description of Artificial Sequence: Synthetic oligonucleotide
caucccuccuucccagucg

SEQ ID NO: 1668966 - RNA, 19 nt, Artificial Sequence
  Description of Artificial Sequence: Synthetic oligonucleotide
gguuccuagaccaagccuc

SEQ ID NO: 1668967 - RNA, 19 nt, Artificial Sequence
  Description of Artificial Sequence: Synthetic oligonucleotide
ggcuuggaugaacaaagug

SEQ ID NO: 1668968 - RNA, 19 nt, Artificial Sequence
  Description of Artificial Sequence: Synthetic oligonucleotide
gcagcuaugggacucccug

SEQ ID NO: 1668969 - RNA, 19 nt, Artificial Sequence
  Description of Artificial Sequence: Synthetic oligonucleotide
cugcccuacgggcacaggc

SEQ ID NO: 1668970 - RNA, 19 nt, Artificial Sequence
  Description of Artificial Sequence: Synthetic oligonucleotide
caauccaggacgcuggaaa

SEQ ID NO: 1668971 - RNA, 19 nt, Artificial Sequence
  Description of Artificial Sequence: Synthetic oligonucleotide
gagcuuccugcccuacggg

SEQ ID NO: 1668972 - RNA, 19 nt, Artificial Sequence
  Description of Artificial Sequence: Synthetic oligonucleotide
gcuggugggaaucaggcuc

SEQ ID NO: 1668973 - RNA, 19 nt, Artificial Sequence
  Description of Artificial Sequence: Synthetic oligonucleotide
gacacuacacagccaggga

SEQ ID NO: 1668974 - RNA, 19 nt, Artificial Sequence
  Description of Artificial Sequence: Synthetic oligonucleotide
gauaggugauccaagccua

SEQ ID NO: 1668975 - RNA, 19 nt, Artificial Sequence
  Description of Artificial Sequence: Synthetic oligonucleotide
gacucccugguuccuagac

SEQ ID NO: 1668976 - RNA, 19 nt, Artificial Sequence
  Description of Artificial Sequence: Synthetic oligonucleotide
agauuaggcaggcccaaua

SEQ ID NO: 1668977 - RNA, 19 nt, Artificial Sequence
  Description of Artificial Sequence: Synthetic oligonucleotide
aaacagcucuccgucugug

SEQ ID NO: 1668978 - RNA, 19 nt, Artificial Sequence
  Description of Artificial Sequence: Synthetic oligonucleotide
cuccuuugccccaagaaua

SEQ ID NO: 1668979 - RNA, 19 nt, Artificial Sequence
  Description of Artificial Sequence: Synthetic oligonucleotide
ugguucgucugugacagau

SEQ ID NO: 1668980 - RNA, 19 nt, Artificial Sequence
  Description of Artificial Sequence: Synthetic oligonucleotide
cagcggaaugagcagugcc

SEQ ID NO: 1668981 - RNA, 19 nt, Artificial Sequence
  Description of Artificial Sequence: Synthetic oligonucleotide
cagcuaugggacucccugg

SEQ ID NO: 1668982 - RNA, 19 nt, Artificial Sequence
  Description of Artificial Sequence: Synthetic oligonucleotide
agucucguccagcugcacu

SEQ ID NO: 1668983 - RNA, 19 nt, Artificial Sequence
  Description of Artificial Sequence: Synthetic oligonucleotide
ggaagagucaauaccacaa

SEQ ID NO: 1668984 - RNA, 19 nt, Artificial Sequence
  Description of Artificial Sequence: Synthetic oligonucleotide
uaauuccugccagacugga

SEQ ID NO: 1668985 - RNA, 19 nt, Artificial Sequence
  Description of Artificial Sequence: Synthetic oligonucleotide
cuccacgaggacacuacac

SEQ ID NO: 1668986 - RNA, 19 nt, Artificial Sequence
  Description of Artificial Sequence: Synthetic oligonucleotide
auggcagcaggacacugaa

SEQ ID NO: 1668987 - RNA, 19 nt, Artificial Sequence
  Description of Artificial Sequence: Synthetic oligonucleotide
ggucacacccgacuggccc

SEQ ID NO: 1668988 - RNA, 19 nt, Artificial Sequence
  Description of Artificial Sequence: Synthetic oligonucleotide
gcggcuuggaugaacaaag

SEQ ID NO: 1668989 - RNA, 19 nt, Artificial Sequence
  Description of Artificial Sequence: Synthetic oligonucleotide
acagaucgaacagccaaga

SEQ ID NO: 1668990 - RNA, 19 nt, Artificial Sequence
  Description of Artificial Sequence: Synthetic oligonucleotide
acauccguugcugccacug

SEQ ID NO: 1668991 - RNA, 19 nt, Artificial Sequence
  Description of Artificial Sequence: Synthetic oligonucleotide
cagaucgaacagccaagag

SEQ ID NO: 1668992 - RNA, 19 nt, Artificial Sequence
  Description of Artificial Sequence: Synthetic oligonucleotide
uugcccgugcugauugcug

SEQ ID NO: 1668993 - RNA, 19 nt, Artificial Sequence
  Description of Artificial Sequence: Synthetic oligonucleotide
gggauaggugauccaagcc

SEQ ID NO: 1668994 - RNA, 19 nt, Artificial Sequence
  Description of Artificial Sequence: Synthetic oligonucleotide
cuguaccaucucauagccc

SEQ ID NO: 1668995 - RNA, 19 nt, Artificial Sequence
  Description of Artificial Sequence: Synthetic oligonucleotide
auguaaggaagagucucgu

SEQ ID NO: 1668996 - RNA, 19 nt, Artificial Sequence
  Description of Artificial Sequence: Synthetic oligonucleotide
cuuggacccgacagggcac

SEQ ID NO: 1668997 - RNA, 19 nt, Artificial Sequence
  Description of Artificial Sequence: Synthetic oligonucleotide
ccuggagacacagagugag

SEQ ID NO: 1668998 - RNA, 19 nt, Artificial Sequence
  Description of Artificial Sequence: Synthetic oligonucleotide
cagugagguugccauggcc

SEQ ID NO: 1668999 - RNA, 19 nt, Artificial Sequence
  Description of Artificial Sequence: Synthetic oligonucleotide
gaccaagccucccaccguc

SEQ ID NO: 1669000 - RNA, 19 nt, Artificial Sequence
  Description of Artificial Sequence: Synthetic oligonucleotide
uucgucugugacagaucga

SEQ ID NO: 1669001 - RNA, 19 nt, Artificial Sequence
  Description of Artificial Sequence: Synthetic oligonucleotide
gugaugaucauggaagagu

SEQ ID NO: 1669002 - RNA, 19 nt, Artificial Sequence
  Description of Artificial Sequence: Synthetic oligonucleotide
gaugaacaaaguggccuuc

SEQ ID NO: 1669003 - RNA, 19 nt, Artificial Sequence
  Description of Artificial Sequence: Synthetic oligonucleotide
gacccgacagggcacccug

SEQ ID NO: 1669004 - RNA, 19 nt, Artificial Sequence
  Description of Artificial Sequence: Synthetic oligonucleotide
uugccccaagaauacacuu

SEQ ID NO: 1669005 - RNA, 19 nt, Artificial Sequence
  Description of Artificial Sequence: Synthetic oligonucleotide
gauugcugccaaaaguaua

SEQ ID NO: 1669006 - RNA, 19 nt, Artificial Sequence
  Description of Artificial Sequence: Synthetic oligonucleotide
ccuaaacauccguugcugc

SEQ ID NO: 1669007 - RNA, 19 nt, Artificial Sequence
  Description of Artificial Sequence: Synthetic oligonucleotide
guuccuagaccaagccucc

SEQ ID NO: 1669008 - RNA, 19 nt, Artificial Sequence
  Description of Artificial Sequence: Synthetic oligonucleotide
acccgacuggcccuccagg

SEQ ID NO: 1669009 - RNA, 19 nt, Artificial Sequence
  Description of Artificial Sequence: Synthetic oligonucleotide
caagcaaacagcucuccgu

SEQ ID NO: 1669010 - RNA, 19 nt, Artificial Sequence
  Description of Artificial Sequence: Synthetic oligonucleotide
uccucggccccaagcaaac

SEQ ID NO: 1669011 - RNA, 19 nt, Artificial Sequence
  Description of Artificial Sequence: Synthetic oligonucleotide
gcuaugcagagauuaggca

SEQ ID NO: 1669012 - RNA, 19 nt, Artificial Sequence
  Description of Artificial Sequence: Synthetic oligonucleotide
cuacagugaaggcgucccc

SEQ ID NO: 1669013 - RNA, 19 nt, Artificial Sequence
  Description of Artificial Sequence: Synthetic oligonucleotide
ccuagggaguccagcaucc

SEQ ID NO: 1669014 - RNA, 19 nt, Artificial Sequence
  Description of Artificial Sequence: Synthetic oligonucleotide
caauaccacaaacaacucu

SEQ ID NO: 1669015 - RNA, 19 nt, Artificial Sequence
  Description of Artificial Sequence: Synthetic oligonucleotide
uggcaucagucuccacgag

SEQ ID NO: 1669016 - RNA, 19 nt, Artificial Sequence
  Description of Artificial Sequence: Synthetic oligonucleotide
auccaagccuaguuuguua

SEQ ID NO: 1669017 - RNA, 19 nt, Artificial Sequence
  Description of Artificial Sequence: Synthetic oligonucleotide
aggacgcuggaaacagugg

SEQ ID NO: 1669018 - RNA, 19 nt, Artificial Sequence
  Description of Artificial Sequence: Synthetic oligonucleotide
guuuggggcagcggcuugg

SEQ ID NO: 1669019 - RNA, 19 nt, Artificial Sequence
  Description of Artificial Sequence: Synthetic oligonucleotide
auaggugauccaagccuag

SEQ ID NO: 1669020 - RNA, 19 nt, Artificial Sequence
  Description of Artificial Sequence: Synthetic oligonucleotide
aggcaagccgugaacaggu

SEQ ID NO: 1669021 - RNA, 19 nt, Artificial Sequence
  Description of Artificial Sequence: Synthetic oligonucleotide
gcuacagugaaggcguccc

SEQ ID NO: 1669022 - RNA, 19 nt, Artificial Sequence
  Description of Artificial Sequence: Synthetic oligonucleotide
gcccucuaggccuuggacc

SEQ ID NO: 1669023 - RNA, 19 nt, Artificial Sequence
  Description of Artificial Sequence: Synthetic oligonucleotide
gcaagccgugaacaggucc

SEQ ID NO: 1669024 - RNA, 19 nt, Artificial Sequence
  Description of Artificial Sequence: Synthetic oligonucleotide
agguugccauggccuaaac

SEQ ID NO: 1669025 - RNA, 19 nt, Artificial Sequence
  Description of Artificial Sequence: Synthetic oligonucleotide
ccaagcaaacagcucuccg

SEQ ID NO: 1669026 - RNA, 19 nt, Artificial Sequence
  Description of Artificial Sequence: Synthetic oligonucleotide
uguaugugugugugugcuu

SEQ ID NO: 1669027 - RNA, 19 nt, Artificial Sequence
  Description of Artificial Sequence: Synthetic oligonucleotide
gucaggcaagccgugaaca

SEQ ID NO: 1669028 - RNA, 19 nt, Artificial Sequence
  Description of Artificial Sequence: Synthetic oligonucleotide
cauggcagcaggacacuga

SEQ ID NO: 1669029 - RNA, 19 nt, Artificial Sequence
  Description of Artificial Sequence: Synthetic oligonucleotide
caggacaugagaggcacca

SEQ ID NO: 1669030 - RNA, 19 nt, Artificial Sequence
  Description of Artificial Sequence: Synthetic oligonucleotide
aucccuccuucccagucga

SEQ ID NO: 1669031 - RNA, 19 nt, Artificial Sequence
  Description of Artificial Sequence: Synthetic oligonucleotide
ccugguuccuagaccaagc

SEQ ID NO: 1669032 - RNA, 19 nt, Artificial Sequence
  Description of Artificial Sequence: Synthetic oligonucleotide
ggauaauccuguugccuca

SEQ ID NO: 1669033 - RNA, 19 nt, Artificial Sequence
  Description of Artificial Sequence: Synthetic oligonucleotide
cauccguugcugccacugc

SEQ ID NO: 1669034 - RNA, 19 nt, Artificial Sequence
  Description of Artificial Sequence: Synthetic oligonucleotide
cugauucuuggauaauccu

SEQ ID NO: 1669035 - RNA, 19 nt, Artificial Sequence
  Description of Artificial Sequence: Synthetic oligonucleotide
ggggcagcggcuuggauga

SEQ ID NO: 1669036 - RNA, 19 nt, Artificial Sequence
  Description of Artificial Sequence: Synthetic oligonucleotide
cagagugagauaaggaguu

SEQ ID NO: 1669037 - RNA, 19 nt, Artificial Sequence
  Description of Artificial Sequence: Synthetic oligonucleotide
gccuaguuuguuaaaccug

SEQ ID NO: 1669038 - RNA, 19 nt, Artificial Sequence
  Description of Artificial Sequence: Synthetic oligonucleotide
uaugugugugugugcuuuu

SEQ ID NO: 1669039 - RNA, 19 nt, Artificial Sequence
  Description of Artificial Sequence: Synthetic oligonucleotide
uggcccgccgagaacuggu

SEQ ID NO: 1669040 - RNA, 19 nt, Artificial Sequence
  Description of Artificial Sequence: Synthetic oligonucleotide
uggucacacccgacuggcc

SEQ ID NO: 1669041 - RNA, 19 nt, Artificial Sequence
  Description of Artificial Sequence: Synthetic oligonucleotide
uuggacccgacagggcacc

SEQ ID NO: 1669042 - RNA, 19 nt, Artificial Sequence
  Description of Artificial Sequence: Synthetic oligonucleotide
agcggcuuggaugaacaaa

SEQ ID NO: 1669043 - RNA, 19 nt, Artificial Sequence
  Description of Artificial Sequence: Synthetic oligonucleotide
aacauccguugcugccacu

SEQ ID NO: 1669044 - RNA, 19 nt, Artificial Sequence
  Description of Artificial Sequence: Synthetic oligonucleotide
ggccuuggacccgacaggg

SEQ ID NO: 1669045 - RNA, 19 nt, Artificial Sequence
  Description of Artificial Sequence: Synthetic oligonucleotide
gaacucucagagguggucu

SEQ ID NO: 1669046 - RNA, 19 nt, Artificial Sequence
  Description of Artificial Sequence: Synthetic oligonucleotide
guccaaacaagcccuggcu

SEQ ID NO: 1669047 - RNA, 19 nt, Artificial Sequence
  Description of Artificial Sequence: Synthetic oligonucleotide
uuugagcuuccugcccuac

SEQ ID NO: 1669048 - RNA, 19 nt, Artificial Sequence
  Description of Artificial Sequence: Synthetic oligonucleotide
gcaucagucuccacgagga

SEQ ID NO: 1669049 - RNA, 19 nt, Artificial Sequence
  Description of Artificial Sequence: Synthetic oligonucleotide
agcagcggaaugagcagug

SEQ ID NO: 1669050 - RNA, 19 nt, Artificial Sequence
  Description of Artificial Sequence: Synthetic oligonucleotide
guggccuucuggccuuucc

SEQ ID NO: 1669051 - RNA, 19 nt, Artificial Sequence
  Description of Artificial Sequence: Synthetic oligonucleotide
ugugaagcucagggccucc

SEQ ID NO: 1669052 - RNA, 19 nt, Artificial Sequence
  Description of Artificial Sequence: Synthetic oligonucleotide
aggcaaggugaugaucaug

SEQ ID NO: 1669053 - RNA, 19 nt, Artificial Sequence
  Description of Artificial Sequence: Synthetic oligonucleotide
cggucagucaggcaagccg

SEQ ID NO: 1669054 - RNA, 19 nt, Artificial Sequence
  Description of Artificial Sequence: Synthetic oligonucleotide
auugcccgugcugauugcu

SEQ ID NO: 1669055 - RNA, 19 nt, Artificial Sequence
  Description of Artificial Sequence: Synthetic oligonucleotide
gccucggucagucaggcaa

SEQ ID NO: 1669056 - RNA, 19 nt, Artificial Sequence
  Description of Artificial Sequence: Synthetic oligonucleotide
agacacagagugagauaag

SEQ ID NO: 1669057 - RNA, 19 nt, Artificial Sequence
  Description of Artificial Sequence: Synthetic oligonucleotide
gucuccacgaggacacuac

SEQ ID NO: 1669058 - RNA, 19 nt, Artificial Sequence
  Description of Artificial Sequence: Synthetic oligonucleotide
ccguccugcuguuaauucc

SEQ ID NO: 1669059 - RNA, 19 nt, Artificial Sequence
  Description of Artificial Sequence: Synthetic oligonucleotide
ugcagagauuaggcaggcc

SEQ ID NO: 1669060 - RNA, 19 nt, Artificial Sequence
  Description of Artificial Sequence: Synthetic oligonucleotide
ucggucagucaggcaagcc

SEQ ID NO: 1669061 - RNA, 19 nt, Artificial Sequence
  Description of Artificial Sequence: Synthetic oligonucleotide
caucagucuccacgaggac

SEQ ID NO: 1669062 - RNA, 19 nt, Artificial Sequence
  Description of Artificial Sequence: Synthetic oligonucleotide
gccuaaacauccguugcug

SEQ ID NO: 1669063 - RNA, 19 nt, Artificial Sequence
  Description of Artificial Sequence: Synthetic oligonucleotide
cacuacacagccagggacu

SEQ ID NO: 1669064 - RNA, 19 nt, Artificial Sequence
  Description of Artificial Sequence: Synthetic oligonucleotide
ggguguguaugugugugug

SEQ ID NO: 1669065 - RNA, 19 nt, Artificial Sequence
  Description of Artificial Sequence: Synthetic oligonucleotide
agucaccauguaaggaaga

SEQ ID NO: 1669066 - RNA, 19 nt, Artificial Sequence
  Description of Artificial Sequence: Synthetic oligonucleotide
uggggcagcuaugggacuc

SEQ ID NO: 1669067 - RNA, 19 nt, Artificial Sequence
  Description of Artificial Sequence: Synthetic oligonucleotide
uuccuagaccaagccuccc

SEQ ID NO: 1669068 - RNA, 19 nt, Artificial Sequence
  Description of Artificial Sequence: Synthetic oligonucleotide
guguaugugugugugugcu

SEQ ID NO: 1669069 - RNA, 19 nt, Artificial Sequence
  Description of Artificial Sequence: Synthetic oligonucleotide
ggaagagucucguccagcu

SEQ ID NO: 1669070 - RNA, 19 nt, Artificial Sequence
  Description of Artificial Sequence: Synthetic oligonucleotide
uggcuugcccugcuccaaa

SEQ ID NO: 1669071 - RNA, 19 nt, Artificial Sequence
  Description of Artificial Sequence: Synthetic oligonucleotide
gguugccauggccuaaaca

SEQ ID NO: 1669072 - RNA, 19 nt, Artificial Sequence
  Description of Artificial Sequence: Synthetic oligonucleotide
ugacacaauccaggacgcu

SEQ ID NO: 1669073 - RNA, 19 nt, Artificial Sequence
  Description of Artificial Sequence: Synthetic oligonucleotide
ugaagaccguccugcuguu

SEQ ID NO: 1669074 - RNA, 19 nt, Artificial Sequence
  Description of Artificial Sequence: Synthetic oligonucleotide
gccaaaaguauagcaguca

SEQ ID NO: 1669075 - RNA, 19 nt, Artificial Sequence
  Description of Artificial Sequence: Synthetic oligonucleotide
ccuagaccaagccucccac

SEQ ID NO: 1669076 - RNA, 19 nt, Artificial Sequence
  Description of Artificial Sequence: Synthetic oligonucleotide
ugaugaugccucggucagu

SEQ ID NO: 1669077 - RNA, 19 nt, Artificial Sequence
  Description of Artificial Sequence: Synthetic oligonucleotide
gggacucccugguuccuag

SEQ ID NO: 1669078 - RNA, 19 nt, Artificial Sequence
  Description of Artificial Sequence: Synthetic oligonucleotide
gcuugauggucacacccga

SEQ ID NO: 1669079 - RNA, 19 nt, Artificial Sequence
  Description of Artificial Sequence: Synthetic oligonucleotide
ucccaccgucuccucggcc

SEQ ID NO: 1669080 - RNA, 19 nt, Artificial Sequence
  Description of Artificial Sequence: Synthetic oligonucleotide
auaccacaaacaacucuuu

SEQ ID NO: 1669081 - RNA, 19 nt, Artificial Sequence
  Description of Artificial Sequence: Synthetic oligonucleotide
uucugccccaauggcuaca

SEQ ID NO: 1669082 - RNA, 19 nt, Artificial Sequence
  Description of Artificial Sequence: Synthetic oligonucleotide
agaccguccugcuguuaau

SEQ ID NO: 1669083 - RNA, 19 nt, Artificial Sequence
  Description of Artificial Sequence: Synthetic oligonucleotide
cccgccgagaacuggugcc

SEQ ID NO: 1669084 - RNA, 19 nt, Artificial Sequence
  Description of Artificial Sequence: Synthetic oligonucleotide
gccgugaacagguccccgc

SEQ ID NO: 1669085 - RNA, 19 nt, Artificial Sequence
  Description of Artificial Sequence: Synthetic oligonucleotide
guaugugugugugugcuuu

SEQ ID NO: 1669086 - RNA, 19 nt, Artificial Sequence
  Description of Artificial Sequence: Synthetic oligonucleotide
agcagugcccagguccaca

SEQ ID NO: 1669087 - RNA, 19 nt, Artificial Sequence
  Description of Artificial Sequence: Synthetic oligonucleotide
gugagguugccauggccua

SEQ ID NO: 1669088 - RNA, 19 nt, Artificial Sequence
  Description of Artificial Sequence: Synthetic oligonucleotide
ggcaccacaggccaccugu

SEQ ID NO: 1669089 - RNA, 19 nt, Artificial Sequence
  Description of Artificial Sequence: Synthetic oligonucleotide
ccuuggacccgacagggca

SEQ ID NO: 1669090 - RNA, 19 nt, Artificial Sequence
  Description of Artificial Sequence: Synthetic oligonucleotide
gguuccuuaggcaccugca

SEQ ID NO: 1669091 - RNA, 19 nt, Artificial Sequence
  Description of Artificial Sequence: Synthetic oligonucleotide
cauagcccagcagggcuuc

SEQ ID NO: 1669092 - RNA, 19 nt, Artificial Sequence
  Description of Artificial Sequence: Synthetic oligonucleotide
uccugcccuacgggcacag

SEQ ID NO: 1669093 - RNA, 19 nt, Artificial Sequence
  Description of Artificial Sequence: Synthetic oligonucleotide
cacccgacuggcccuccag

SEQ ID NO: 1669094 - RNA, 19 nt, Artificial Sequence
  Description of Artificial Sequence: Synthetic oligonucleotide
agucuccacgaggacacua

SEQ ID NO: 1669095 - RNA, 19 nt, Artificial Sequence
  Description of Artificial Sequence: Synthetic oligonucleotide
cuccucggccccaagcaaa

SEQ ID NO: 1669096 - RNA, 19 nt, Artificial Sequence
  Description of Artificial Sequence: Synthetic oligonucleotide
acaauccaggacgcuggaa

SEQ ID NO: 1669097 - RNA, 19 nt, Artificial Sequence
  Description of Artificial Sequence: Synthetic oligonucleotide
cauggccuaaacauccguu

SEQ ID NO: 1669098 - RNA, 19 nt, Artificial Sequence
  Description of Artificial Sequence: Synthetic oligonucleotide
uccccgcaggccacaugcu

SEQ ID NO: 1669099 - RNA, 19 nt, Artificial Sequence
  Description of Artificial Sequence: Synthetic oligonucleotide
caggcccaauagccagucc

SEQ ID NO: 1669100 - RNA, 19 nt, Artificial Sequence
  Description of Artificial Sequence: Synthetic oligonucleotide
cagucaggcaagccgugaa

SEQ ID NO: 1669101 - RNA, 19 nt, Artificial Sequence
  Description of Artificial Sequence: Synthetic oligonucleotide
caccggaggcagucacagc

SEQ ID NO: 1669102 - RNA, 19 nt, Artificial Sequence
  Description of Artificial Sequence: Synthetic oligonucleotide
cccaguggugugaagcuca

SEQ ID NO: 1669103 - RNA, 19 nt, Artificial Sequence
  Description of Artificial Sequence: Synthetic oligonucleotide
ccucggucagucaggcaag

SEQ ID NO: 1669104 - RNA, 19 nt, Artificial Sequence
  Description of Artificial Sequence: Synthetic oligonucleotide
gcuccuuugccccaagaau

SEQ ID NO: 1669105 - RNA, 19 nt, Artificial Sequence
  Description of Artificial Sequence: Synthetic oligonucleotide
cuggcccgccgagaacugg

SEQ ID NO: 1669106 - RNA, 19 nt, Artificial Sequence
  Description of Artificial Sequence: Synthetic oligonucleotide
cuuugagcuuccugcccua

SEQ ID NO: 1669107 - RNA, 19 nt, Artificial Sequence
  Description of Artificial Sequence: Synthetic oligonucleotide
gucacacccgacuggcccu

SEQ ID NO: 1669108 - RNA, 19 nt, Artificial Sequence
  Description of Artificial Sequence: Synthetic oligonucleotide
gugugaagcucagggccuc

SEQ ID NO: 1669109 - RNA, 19 nt, Artificial Sequence
  Description of Artificial Sequence: Synthetic oligonucleotide
ggucagucaggcaagccgu

SEQ ID NO: 1669110 - RNA, 19 nt, Artificial Sequence
  Description of Artificial Sequence: Synthetic oligonucleotide
acgggcacaggcaccugcu

SEQ ID NO: 1669111 - RNA, 19 nt, Artificial Sequence
  Description of Artificial Sequence: Synthetic oligonucleotide
aggcaccacaggccaccug

SEQ ID NO: 1669112 - RNA, 19 nt, Artificial Sequence
  Description of Artificial Sequence: Synthetic oligonucleotide
cuaggccuuggacccgaca

SEQ ID NO: 1669113 - RNA, 19 nt, Artificial Sequence
  Description of Artificial Sequence: Synthetic oligonucleotide
gccagacuggagccuggag

SEQ ID NO: 1669114 - RNA, 19 nt, Artificial Sequence
  Description of Artificial Sequence: Synthetic oligonucleotide
ggccuaaacauccguugcu

SEQ ID NO: 1669115 - RNA, 19 nt, Artificial Sequence
  Description of Artificial Sequence: Synthetic oligonucleotide
gcggaaugagcagugccca

SEQ ID NO: 1669116 - RNA, 19 nt, Artificial Sequence
  Description of Artificial Sequence: Synthetic oligonucleotide
ucccuccuucccagucgac

SEQ ID NO: 1669117 - RNA, 19 nt, Artificial Sequence
  Description of Artificial Sequence: Synthetic oligonucleotide
acacccgacuggcccucca

SEQ ID NO: 1669118 - RNA, 19 nt, Artificial Sequence
  Description of Artificial Sequence: Synthetic oligonucleotide
ccggaggcagucacagcag

SEQ ID NO: 1669119 - RNA, 19 nt, Artificial Sequence
  Description of Artificial Sequence: Synthetic oligonucleotide
ucacacccgacuggcccuc

SEQ ID NO: 1669120 - RNA, 19 nt, Artificial Sequence
  Description of Artificial Sequence: Synthetic oligonucleotide
gcucccgguccagaggugc

SEQ ID NO: 1669121 - RNA, 19 nt, Artificial Sequence
  Description of Artificial Sequence: Synthetic oligonucleotide
ugggacucccugguuccua

SEQ ID NO: 1669122 - RNA, 19 nt, Artificial Sequence
  Description of Artificial Sequence: Synthetic oligonucleotide
gcagucaccggaggcaguc

SEQ ID NO: 1669123 - RNA, 19 nt, Artificial Sequence
  Description of Artificial Sequence: Synthetic oligonucleotide
caaacagcucuccgucugu

SEQ ID NO: 1669124 - RNA, 19 nt, Artificial Sequence
  Description of Artificial Sequence: Synthetic oligonucleotide
ccgucuguggacagggcca

SEQ ID NO: 1669125 - RNA, 19 nt, Artificial Sequence
  Description of Artificial Sequence: Synthetic oligonucleotide
gguguguaugugugugugu

SEQ ID NO: 1669126 - RNA, 19 nt, Artificial Sequence
  Description of Artificial Sequence: Synthetic oligonucleotide
gcccuacgggcacaggcac

SEQ ID NO: 1669127 - RNA, 19 nt, Artificial Sequence
  Description of Artificial Sequence: Synthetic oligonucleotide
uggugggaaucaggcuccu

SEQ ID NO: 1669128 - RNA, 19 nt, Artificial Sequence
  Description of Artificial Sequence: Synthetic oligonucleotide
uggacccgacagggcaccc

SEQ ID NO: 1669129 - RNA, 19 nt, Artificial Sequence
  Description of Artificial Sequence: Synthetic oligonucleotide
gucaccggaggcagucaca

SEQ ID NO: 1669130 - RNA, 19 nt, Artificial Sequence
  Description of Artificial Sequence: Synthetic oligonucleotide
ggcuuccacaauggugggc

SEQ ID NO: 1669131 - RNA, 19 nt, Artificial Sequence
  Description of Artificial Sequence: Synthetic oligonucleotide
ugaugcccucuaggccuug

SEQ ID NO: 1669132 - RNA, 19 nt, Artificial Sequence
  Description of Artificial Sequence: Synthetic oligonucleotide
gguucgucugugacagauc

SEQ ID NO: 1669133 - RNA, 19 nt, Artificial Sequence
  Description of Artificial Sequence: Synthetic oligonucleotide
aggcguccccacaggccac

SEQ ID NO: 1669134 - RNA, 19 nt, Artificial Sequence
  Description of Artificial Sequence: Synthetic oligonucleotide
augggacucccugguuccu

SEQ ID NO: 1669135 - RNA, 19 nt, Artificial Sequence
  Description of Artificial Sequence: Synthetic oligonucleotide
ccacuugcuggugggaauc

SEQ ID NO: 1669136 - RNA, 19 nt, Artificial Sequence
  Description of Artificial Sequence: Synthetic oligonucleotide
gcagcggaaugagcagugc

SEQ ID NO: 1669137 - RNA, 19 nt, Artificial Sequence
  Description of Artificial Sequence: Synthetic oligonucleotide
ccgguccagaggugcagag

SEQ ID NO: 1669138 - RNA, 19 nt, Artificial Sequence
  Description of Artificial Sequence: Synthetic oligonucleotide
ccagggauaggugauccaa

SEQ ID NO: 1669139 - RNA, 19 nt, Artificial Sequence
  Description of Artificial Sequence: Synthetic oligonucleotide
ucgggcuccuuugccccaa

SEQ ID NO: 1669140 - RNA, 19 nt, Artificial Sequence
  Description of Artificial Sequence: Synthetic oligonucleotide
gcccgccgagaacuggugc

SEQ ID NO: 1669141 - RNA, 19 nt, Artificial Sequence
  Description of Artificial Sequence: Synthetic oligonucleotide
cagaacucucagagguggu

SEQ ID NO: 1669142 - RNA, 19 nt, Artificial Sequence
  Description of Artificial Sequence: Synthetic oligonucleotide
ggcccuccaggaaacguga

SEQ ID NO: 1669143 - RNA, 19 nt, Artificial Sequence
  Description of Artificial Sequence: Synthetic oligonucleotide
ggggcagcuaugggacucc

SEQ ID NO: 1669144 - RNA, 19 nt, Artificial Sequence
  Description of Artificial Sequence: Synthetic oligonucleotide
ccagucgaccucgggcucc

SEQ ID NO: 1669145 - RNA, 19 nt, Artificial Sequence
  Description of Artificial Sequence: Synthetic oligonucleotide
gugcccaauugcccgugcu

SEQ ID NO: 1669146 - RNA, 19 nt, Artificial Sequence
  Description of Artificial Sequence: Synthetic oligonucleotide
gagauuaggcaggcccaau

SEQ ID NO: 1669147 - RNA, 19 nt, Artificial Sequence
  Description of Artificial Sequence: Synthetic oligonucleotide
ggcagcggcuuggaugaac

SEQ ID NO: 1669148 - RNA, 19 nt, Artificial Sequence
  Description of Artificial Sequence: Synthetic oligonucleotide
gaagaccguccugcuguua

SEQ ID NO: 1669149 - RNA, 19 nt, Artificial Sequence
  Description of Artificial Sequence: Synthetic oligonucleotide
agcagucaccggaggcagu

SEQ ID NO: 1669150 - RNA, 19 nt, Artificial Sequence
  Description of Artificial Sequence: Synthetic oligonucleotide
cgucuccucggccccaagc

SEQ ID NO: 1669151 - RNA, 19 nt, Artificial Sequence
  Description of Artificial Sequence: Synthetic oligonucleotide
cucgggcuccuuugcccca

SEQ ID NO: 1669152 - RNA, 19 nt, Artificial Sequence
  Description of Artificial Sequence: Synthetic oligonucleotide
cggaaugagcagugcccag

SEQ ID NO: 1669153 - RNA, 19 nt, Artificial Sequence
  Description of Artificial Sequence: Synthetic oligonucleotide
cuggugcccaauugcccgu

SEQ ID NO: 1669154 - RNA, 19 nt, Artificial Sequence
  Description of Artificial Sequence: Synthetic oligonucleotide
ccaagccuaguuuguuaaa

SEQ ID NO: 1669155 - RNA, 19 nt, Artificial Sequence
  Description of Artificial Sequence: Synthetic oligonucleotide
ccgccgagaacuggugccc

SEQ ID NO: 1669156 - RNA, 19 nt, Artificial Sequence
  Description of Artificial Sequence: Synthetic oligonucleotide
cagcggcuuggaugaacaa

SEQ ID NO: 1669157 - RNA, 19 nt, Artificial Sequence
  Description of Artificial Sequence: Synthetic oligonucleotide
cccgacuggcccuccagga

SEQ ID NO: 1669158 - RNA, 19 nt, Artificial Sequence
  Description of Artificial Sequence: Synthetic oligonucleotide
cacacccgacuggcccucc

SEQ ID NO: 1669159 - RNA, 19 nt, Artificial Sequence
  Description of Artificial Sequence: Synthetic oligonucleotide
aaguggccuucuggccuuu

SEQ ID NO: 1669160 - RNA, 19 nt, Artificial Sequence
  Description of Artificial Sequence: Synthetic oligonucleotide
cuggcuugcccugcuccaa

SEQ ID NO: 1669161 - RNA, 19 nt, Artificial Sequence
  Description of Artificial Sequence: Synthetic oligonucleotide
ccugcuggcccgccgagaa

SEQ ID NO: 1669162 - RNA, 19 nt, Artificial Sequence
  Description of Artificial Sequence: Synthetic oligonucleotide
ccgugaacagguccccgca

SEQ ID NO: 1669163 - RNA, 19 nt, Artificial Sequence
  Description of Artificial Sequence: Synthetic oligonucleotide
cgaacagccaagagagugu

SEQ ID NO: 1669164 - RNA, 19 nt, Artificial Sequence
  Description of Artificial Sequence: Synthetic oligonucleotide
gguccccgcaggccacaug

SEQ ID NO: 1669165 - RNA, 19 nt, Artificial Sequence
  Description of Artificial Sequence: Synthetic oligonucleotide
cugguucgucugugacaga

SEQ ID NO: 1669166 - RNA, 19 nt, Artificial Sequence
  Description of Artificial Sequence: Synthetic oligonucleotide
gugaagcucagggccuccu

SEQ ID NO: 1669167 - RNA, 19 nt, Artificial Sequence
  Description of Artificial Sequence: Synthetic oligonucleotide
cagucaccggaggcaguca

SEQ ID NO: 1669168 - RNA, 19 nt, Artificial Sequence
  Description of Artificial Sequence: Synthetic oligonucleotide
gucgaccucgggcuccuuu

SEQ ID NO: 1669169 - RNA, 19 nt, Artificial Sequence
  Description of Artificial Sequence: Synthetic oligonucleotide
gccuuggacccgacagggc

SEQ ID NO: 1669170 - RNA, 19 nt, Artificial Sequence
  Description of Artificial Sequence: Synthetic oligonucleotide
gcccuccaggaaacgugag

SEQ ID NO: 1669171 - RNA, 19 nt, Artificial Sequence
  Description of Artificial Sequence: Synthetic oligonucleotide
ccgcaggccacaugcuuga

SEQ ID NO: 1669172 - RNA, 19 nt, Artificial Sequence
  Description of Artificial Sequence: Synthetic oligonucleotide
gggcagcuaugggacuccc

SEQ ID NO: 1669173 - RNA, 19 nt, Artificial Sequence
  Description of Artificial Sequence: Synthetic oligonucleotide
ggcuccucauccagggaua

SEQ ID NO: 1669174 - RNA, 19 nt, Artificial Sequence
  Description of Artificial Sequence: Synthetic oligonucleotide
accgucuccucggccccaa

SEQ ID NO: 1669175 - RNA, 19 nt, Artificial Sequence
  Description of Artificial Sequence: Synthetic oligonucleotide
cuagggaguccagcauccu

SEQ ID NO: 1669176 - RNA, 19 nt, Artificial Sequence
  Description of Artificial Sequence: Synthetic oligonucleotide
ggcaagccgugaacagguc

SEQ ID NO: 1669177 - RNA, 19 nt, Artificial Sequence
  Description of Artificial Sequence: Synthetic oligonucleotide
ggcccgccgagaacuggug

SEQ ID NO: 1669178 - RNA, 19 nt, Artificial Sequence
  Description of Artificial Sequence: Synthetic oligonucleotide
gccgagaacuggugcccaa

SEQ ID NO: 1669179 - RNA, 19 nt, Artificial Sequence
  Description of Artificial Sequence: Synthetic oligonucleotide
cccagucgaccucgggcuc

SEQ ID NO: 1669180 - RNA, 19 nt, Artificial Sequence
  Description of Artificial Sequence: Synthetic oligonucleotide
ccuacgggcacaggcaccu

SEQ ID NO: 1669181 - RNA, 19 nt, Artificial Sequence
  Description of Artificial Sequence: Synthetic oligonucleotide
cacugccaaaggucaugau

SEQ ID NO: 1669182 - RNA, 19 nt, Artificial Sequence
  Description of Artificial Sequence: Synthetic oligonucleotide
ggccuagggaguccagcau

SEQ ID NO: 1669183 - RNA, 19 nt, Artificial Sequence
  Description of Artificial Sequence: Synthetic oligonucleotide
gcuggcccgccgagaacug

SEQ ID NO: 1669184 - RNA, 19 nt, Artificial Sequence
  Description of Artificial Sequence: Synthetic oligonucleotide
ccgacuggcccuccaggaa

SEQ ID NO: 1669185 - RNA, 19 nt, Artificial Sequence
  Description of Artificial Sequence: Synthetic oligonucleotide
ccugcccuacgggcacagg

SEQ ID NO: 1669186 - RNA, 19 nt, Artificial Sequence
  Description of Artificial Sequence: Synthetic oligonucleotide
cacaggccaccaucaccau

SEQ ID NO: 1669187 - RNA, 19 nt, Artificial Sequence
  Description of Artificial Sequence: Synthetic oligonucleotide
cggccccaagcaaacagcu

SEQ ID NO: 1669188 - RNA, 19 nt, Artificial Sequence
  Description of Artificial Sequence: Synthetic oligonucleotide
cagucgaccucgggcuccu

SEQ ID NO: 1669189 - RNA, 19 nt, Artificial Sequence
  Description of Artificial Sequence: Synthetic oligonucleotide
cccgguccagaggugcaga

SEQ ID NO: 1669190 - RNA, 19 nt, Artificial Sequence
  Description of Artificial Sequence: Synthetic oligonucleotide
ggacccgacagggcacccu

SEQ ID NO: 1669191 - RNA, 19 nt, Artificial Sequence
  Description of Artificial Sequence: Synthetic oligonucleotide
ccgucuccucggccccaag

SEQ ID NO: 1669192 - RNA, 19 nt, Artificial Sequence
  Description of Artificial Sequence: Synthetic oligonucleotide
agucgaccucgggcuccuu

SEQ ID NO: 1669193 - RNA, 19 nt, Artificial Sequence
  Description of Artificial Sequence: Synthetic oligonucleotide
cggcuuggaugaacaaagu

SEQ ID NO: 1669194 - RNA, 19 nt, Artificial Sequence
  Description of Artificial Sequence: Synthetic oligonucleotide
ccaauugcccgugcugauu

SEQ ID NO: 1669195 - RNA, 19 nt, Artificial Sequence
  Description of Artificial Sequence: Synthetic oligonucleotide
cagucuccacgaggacacu

SEQ ID NO: 1669196 - RNA, 19 nt, Artificial Sequence
  Description of Artificial Sequence: Synthetic oligonucleotide
gcguccccacaggccacca

SEQ ID NO: 1669197 - RNA, 19 nt, Artificial Sequence
  Description of Artificial Sequence: Synthetic oligonucleotide
ccuuaggcaccugcauuuu

SEQ ID NO: 1669198 - RNA, 19 nt, Artificial Sequence
  Description of Artificial Sequence: Synthetic oligonucleotide
cccauggcagcaggacacu

SEQ ID NO: 1669199 - RNA, 19 nt, Artificial Sequence
  Description of Artificial Sequence: Synthetic oligonucleotide
ccccgcaggccacaugcuu

SEQ ID NO: 1669200 - RNA, 19 nt, Artificial Sequence
  Description of Artificial Sequence: Synthetic oligonucleotide
gggcagcggcuuggaugaa

SEQ ID NO: 1669201 - RNA, 19 nt, Artificial Sequence
  Description of Artificial Sequence: Synthetic oligonucleotide
ucaucuucugaccauagcg

SEQ ID NO: 1669202 - RNA, 19 nt, Artificial Sequence
  Description of Artificial Sequence: Synthetic oligonucleotide
uucuugaaagcuauaagcc

SEQ ID NO: 1669203 - RNA, 19 nt, Artificial Sequence
  Description of Artificial Sequence: Synthetic oligonucleotide
aaucaguugccaauuagcc

SEQ ID NO: 1669204 - RNA, 19 nt, Artificial Sequence
  Description of Artificial Sequence: Synthetic oligonucleotide
uguugaaaaucucaugacc

SEQ ID NO: 1669205 - RNA, 19 nt, Artificial Sequence
  Description of Artificial Sequence: Synthetic oligonucleotide
ugaccaaucacaaaggcuc

SEQ ID NO: 1669206 - RNA, 19 nt, Artificial Sequence
  Description of Artificial Sequence: Synthetic oligonucleotide
ugauguaagaucaucuucu

SEQ ID NO: 1669207 - RNA, 19 nt, Artificial Sequence
  Description of Artificial Sequence: Synthetic oligonucleotide
guucuugaaagcuauaagc

SEQ ID NO: 1669208 - RNA, 19 nt, Artificial Sequence
  Description of Artificial Sequence: Synthetic oligonucleotide
aaugguauucgcuagugau

SEQ ID NO: 1669209 - RNA, 19 nt, Artificial Sequence
  Description of Artificial Sequence: Synthetic oligonucleotide
aguaccuugaguguggugg

SEQ ID NO: 1669210 - RNA, 19 nt, Artificial Sequence
  Description of Artificial Sequence: Synthetic oligonucleotide
gauagaguuccagugagcg

SEQ ID NO: 1669211 - RNA, 19 nt, Artificial Sequence
  Description of Artificial Sequence: Synthetic oligonucleotide
uccucuggccaaaacaugg

SEQ ID NO: 1669212 - RNA, 19 nt, Artificial Sequence
  Description of Artificial Sequence: Synthetic oligonucleotide
uuccuuauugcuaaguaaa

SEQ ID NO: 1669213 - RNA, 19 nt, Artificial Sequence
  Description of Artificial Sequence: Synthetic oligonucleotide
ucaguugccaauuagccau

SEQ ID NO: 1669214 - RNA, 19 nt, Artificial Sequence
  Description of Artificial Sequence: Synthetic oligonucleotide
ugaaucaguugccaauuag

SEQ ID NO: 1669215 - RNA, 19 nt, Artificial Sequence
  Description of Artificial Sequence: Synthetic oligonucleotide
gaugcuuggagcuugggga

SEQ ID NO: 1669216 - RNA, 19 nt, Artificial Sequence
  Description of Artificial Sequence: Synthetic oligonucleotide
gacaccuguacccuguagg

SEQ ID NO: 1669217 - RNA, 19 nt, Artificial Sequence
  Description of Artificial Sequence: Synthetic oligonucleotide
aaucccagcguucacacaa

SEQ ID NO: 1669218 - RNA, 19 nt, Artificial Sequence
  Description of Artificial Sequence: Synthetic oligonucleotide
aacaugggaugcuccaaac

SEQ ID NO: 1669219 - RNA, 19 nt, Artificial Sequence
  Description of Artificial Sequence: Synthetic oligonucleotide
uuuuaagucgguggcauag

SEQ ID NO: 1669220 - RNA, 19 nt, Artificial Sequence
  Description of Artificial Sequence: Synthetic oligonucleotide
uugugauuggcuauguggu

SEQ ID NO: 1669221 - RNA, 19 nt, Artificial Sequence
  Description of Artificial Sequence: Synthetic oligonucleotide
aaguaaaucuugcucaguu

SEQ ID NO: 1669222 - RNA, 19 nt, Artificial Sequence
  Description of Artificial Sequence: Synthetic oligonucleotide
ugcuaaguaaaucuugcuc

SEQ ID NO: 1669223 - RNA, 19 nt, Artificial Sequence
  Description of Artificial Sequence: Synthetic oligonucleotide
gagacagaagcgccgagcg

SEQ ID NO: 1669224 - RNA, 19 nt, Artificial Sequence
  Description of Artificial Sequence: Synthetic oligonucleotide
caugggaugcuccaaacgc

SEQ ID NO: 1669225 - RNA, 19 nt, Artificial Sequence
  Description of Artificial Sequence: Synthetic oligonucleotide
uacauaugaaucaguugcc

SEQ ID NO: 1669226 - RNA, 19 nt, Artificial Sequence
  Description of Artificial Sequence: Synthetic oligonucleotide
auaguuucugaauuccuca

SEQ ID NO: 1669227 - RNA, 19 nt, Artificial Sequence
  Description of Artificial Sequence: Synthetic oligonucleotide
ugccaauuagccauuugcc

SEQ ID NO: 1669228 - RNA, 19 nt, Artificial Sequence
  Description of Artificial Sequence: Synthetic oligonucleotide
ugacgauagaguuccagug

SEQ ID NO: 1669229 - RNA, 19 nt, Artificial Sequence
  Description of Artificial Sequence: Synthetic oligonucleotide
gaaucaguugccaauuagc

SEQ ID NO: 1669230 - RNA, 19 nt, Artificial Sequence
  Description of Artificial Sequence: Synthetic oligonucleotide
ugaguagcuaccauccgga

SEQ ID NO: 1669231 - RNA, 19 nt, Artificial Sequence
  Description of Artificial Sequence: Synthetic oligonucleotide
accauagcggacuuguaag

SEQ ID NO: 1669232 - RNA, 19 nt, Artificial Sequence
  Description of Artificial Sequence: Synthetic oligonucleotide
cuaaguaaaucuugcucag

SEQ ID NO: 1669233 - RNA, 19 nt, Artificial Sequence
  Description of Artificial Sequence: Synthetic oligonucleotide
auuugcgauugccagacug

SEQ ID NO: 1669234 - RNA, 19 nt, Artificial Sequence
  Description of Artificial Sequence: Synthetic oligonucleotide
uuagccauuugcccauagg

SEQ ID NO: 1669235 - RNA, 19 nt, Artificial Sequence
  Description of Artificial Sequence: Synthetic oligonucleotide
uagacuuccuuauugcuaa

SEQ ID NO: 1669236 - RNA, 19 nt, Artificial Sequence
  Description of Artificial Sequence: Synthetic oligonucleotide
gauagggcucagcaaaacc

SEQ ID NO: 1669237 - RNA, 19 nt, Artificial Sequence
  Description of Artificial Sequence: Synthetic oligonucleotide
aaacgcccgagcucuggcc

SEQ ID NO: 1669238 - RNA, 19 nt, Artificial Sequence
  Description of Artificial Sequence: Synthetic oligonucleotide
acgauagaguuccagugag

SEQ ID NO: 1669239 - RNA, 19 nt, Artificial Sequence
  Description of Artificial Sequence: Synthetic oligonucleotide
uuugcgauugccagacuga

SEQ ID NO: 1669240 - RNA, 19 nt, Artificial Sequence
  Description of Artificial Sequence: Synthetic oligonucleotide
uauucgcuagugauguuca

SEQ ID NO: 1669241 - RNA, 19 nt, Artificial Sequence
  Description of Artificial Sequence: Synthetic oligonucleotide
ucaguagaacacugucucg

SEQ ID NO: 1669242 - RNA, 19 nt, Artificial Sequence
  Description of Artificial Sequence: Synthetic oligonucleotide
guaagaucaucuucugacc

SEQ ID NO: 1669243 - RNA, 19 nt, Artificial Sequence
  Description of Artificial Sequence: Synthetic oligonucleotide
ucgcuagugauguucacca

SEQ ID NO: 1669244 - RNA, 19 nt, Artificial Sequence
  Description of Artificial Sequence: Synthetic oligonucleotide
auaugaaucaguugccaau

SEQ ID NO: 1669245 - RNA, 19 nt, Artificial Sequence
  Description of Artificial Sequence: Synthetic oligonucleotide
gucaguagaacacugucuc

SEQ ID NO: 1669246 - RNA, 19 nt, Artificial Sequence
  Description of Artificial Sequence: Synthetic oligonucleotide
gaagaagccgcuuccacga

SEQ ID NO: 1669247 - RNA, 19 nt, Artificial Sequence
  Description of Artificial Sequence: Synthetic oligonucleotide
gauggaaugguauucgcua

SEQ ID NO: 1669248 - RNA, 19 nt, Artificial Sequence
  Description of Artificial Sequence: Synthetic oligonucleotide
gcuaaguaaaucuugcuca

SEQ ID NO: 1669249 - RNA, 19 nt, Artificial Sequence
  Description of Artificial Sequence: Synthetic oligonucleotide
uccggagauaaucugcaga

SEQ ID NO: 1669250 - RNA, 19 nt, Artificial Sequence
  Description of Artificial Sequence: Synthetic oligonucleotide
acaugggaugcuccaaacg

SEQ ID NO: 1669251 - RNA, 19 nt, Artificial Sequence
  Description of Artificial Sequence: Synthetic oligonucleotide
caugaccaaucacaaaggc

SEQ ID NO: 1669252 - RNA, 19 nt, Artificial Sequence
  Description of Artificial Sequence: Synthetic oligonucleotide
uuggcuaugugguuuagua

SEQ ID NO: 1669253 - RNA, 19 nt, Artificial Sequence
  Description of Artificial Sequence: Synthetic oligonucleotide
acgauggaaugguauucgc

SEQ ID NO: 1669254 - RNA, 19 nt, Artificial Sequence
  Description of Artificial Sequence: Synthetic oligonucleotide
gacgauggaaugguauucg

SEQ ID NO: 1669255 - RNA, 19 nt, Artificial Sequence
  Description of Artificial Sequence: Synthetic oligonucleotide
agugagcgaacaguggggc

SEQ ID NO: 1669256 - RNA, 19 nt, Artificial Sequence
  Description of Artificial Sequence: Synthetic oligonucleotide
cacaaaggcuccuucuucc

SEQ ID NO: 1669257 - RNA, 19 nt, Artificial Sequence
  Description of Artificial Sequence: Synthetic oligonucleotide
aaugggcugaguagcuacc

SEQ ID NO: 1669258 - RNA, 19 nt, Artificial Sequence
  Description of Artificial Sequence: Synthetic oligonucleotide
ugguauucgcuagugaugu

SEQ ID NO: 1669259 - RNA, 19 nt, Artificial Sequence
  Description of Artificial Sequence: Synthetic oligonucleotide
aaacaugggaugcuccaaa

SEQ ID NO: 1669260 - RNA, 19 nt, Artificial Sequence
  Description of Artificial Sequence: Synthetic oligonucleotide
auggaaugguauucgcuag

SEQ ID NO: 1669261 - RNA, 19 nt, Artificial Sequence
  Description of Artificial Sequence: Synthetic oligonucleotide
uuggggauauuugcgauug

SEQ ID NO: 1669262 - RNA, 19 nt, Artificial Sequence
  Description of Artificial Sequence: Synthetic oligonucleotide
ugaaugucagcugugucgu

SEQ ID NO: 1669263 - RNA, 19 nt, Artificial Sequence
  Description of Artificial Sequence: Synthetic oligonucleotide
uuaagucgguggcauaggu

SEQ ID NO: 1669264 - RNA, 19 nt, Artificial Sequence
  Description of Artificial Sequence: Synthetic oligonucleotide
aagagccacgagcugacga

SEQ ID NO: 1669265 - RNA, 19 nt, Artificial Sequence
  Description of Artificial Sequence: Synthetic oligonucleotide
ugggaugcuccaaacgccc

SEQ ID NO: 1669266 - RNA, 19 nt, Artificial Sequence
  Description of Artificial Sequence: Synthetic oligonucleotide
agauaaucugcagaguacu

SEQ ID NO: 1669267 - RNA, 19 nt, Artificial Sequence
  Description of Artificial Sequence: Synthetic oligonucleotide
uuuaagucgguggcauagg

SEQ ID NO: 1669268 - RNA, 19 nt, Artificial Sequence
  Description of Artificial Sequence: Synthetic oligonucleotide
aucaguugccaauuagcca

SEQ ID NO: 1669269 - RNA, 19 nt, Artificial Sequence
  Description of Artificial Sequence: Synthetic oligonucleotide
ucagucaacaccuccucau

SEQ ID NO: 1669270 - RNA, 19 nt, Artificial Sequence
  Description of Artificial Sequence: Synthetic oligonucleotide
aucggagugagccuccaug

SEQ ID NO: 1669271 - RNA, 19 nt, Artificial Sequence
  Description of Artificial Sequence: Synthetic oligonucleotide
uggggagacagaagcgccg

SEQ ID NO: 1669272 - RNA, 19 nt, Artificial Sequence
  Description of Artificial Sequence: Synthetic oligonucleotide
agagaucggagugagccuc

SEQ ID NO: 1669273 - RNA, 19 nt, Artificial Sequence
  Description of Artificial Sequence: Synthetic oligonucleotide
uccucaugaccaaucacaa

SEQ ID NO: 1669274 - RNA, 19 nt, Artificial Sequence
  Description of Artificial Sequence: Synthetic oligonucleotide
ucccuguccagccuguucu

SEQ ID NO: 1669275 - RNA, 19 nt, Artificial Sequence
  Description of Artificial Sequence: Synthetic oligonucleotide
gacgauagaguuccaguga

SEQ ID NO: 1669276 - RNA, 19 nt, Artificial Sequence
  Description of Artificial Sequence: Synthetic oligonucleotide
uccuuuguucccugcagug

SEQ ID NO: 1669277 - RNA, 19 nt, Artificial Sequence
  Description of Artificial Sequence: Synthetic oligonucleotide
gcuauaagccaucacaaga

SEQ ID NO: 1669278 - RNA, 19 nt, Artificial Sequence
  Description of Artificial Sequence: Synthetic oligonucleotide
aagagaucggagugagccu

SEQ ID NO: 1669279 - RNA, 19 nt, Artificial Sequence
  Description of Artificial Sequence: Synthetic oligonucleotide
cacaguaccuugagugugg

SEQ ID NO: 1669280 - RNA, 19 nt, Artificial Sequence
  Description of Artificial Sequence: Synthetic oligonucleotide
uaccauccggagauaaucu

SEQ ID NO: 1669281 - RNA, 19 nt, Artificial Sequence
  Description of Artificial Sequence: Synthetic oligonucleotide
guguugaaaaucucaugac

SEQ ID NO: 1669282 - RNA, 19 nt, Artificial Sequence
  Description of Artificial Sequence: Synthetic oligonucleotide
gagauaaucugcagaguac

SEQ ID NO: 1669283 - RNA, 19 nt, Artificial Sequence
  Description of Artificial Sequence: Synthetic oligonucleotide
uaggaaaucccagcguuca

SEQ ID NO: 1669284 - RNA, 19 nt, Artificial Sequence
  Description of Artificial Sequence: Synthetic oligonucleotide
guacucaagauuggcauug

SEQ ID NO: 1669285 - RNA, 19 nt, Artificial Sequence
  Description of Artificial Sequence: Synthetic oligonucleotide
uugaaagcuauaagccauc

SEQ ID NO: 1669286 - RNA, 19 nt, Artificial Sequence
  Description of Artificial Sequence: Synthetic oligonucleotide
ugcacaguaccuugagugu

SEQ ID NO: 1669287 - RNA, 19 nt, Artificial Sequence
  Description of Artificial Sequence: Synthetic oligonucleotide
ucggagugagccuccauga

SEQ ID NO: 1669288 - RNA, 19 nt, Artificial Sequence
  Description of Artificial Sequence: Synthetic oligonucleotide
aguagcuaccauccggaga

SEQ ID NO: 1669289 - RNA, 19 nt, Artificial Sequence
  Description of Artificial Sequence: Synthetic oligonucleotide
uccuuauugcuaaguaaau

SEQ ID NO: 1669290 - RNA, 19 nt, Artificial Sequence
  Description of Artificial Sequence: Synthetic oligonucleotide
agacagaagcgccgagcgc

SEQ ID NO: 1669291 - RNA, 19 nt, Artificial Sequence
  Description of Artificial Sequence: Synthetic oligonucleotide
uugcuaaguaaaucuugcu

SEQ ID NO: 1669292 - RNA, 19 nt, Artificial Sequence
  Description of Artificial Sequence: Synthetic oligonucleotide
gaaagcuauaagccaucac

SEQ ID NO: 1669293 - RNA, 19 nt, Artificial Sequence
  Description of Artificial Sequence: Synthetic oligonucleotide
guagaacacugucucgaag

SEQ ID NO: 1669294 - RNA, 19 nt, Artificial Sequence
  Description of Artificial Sequence: Synthetic oligonucleotide
uuccacgaugcuuggagcu

SEQ ID NO: 1669295 - RNA, 19 nt, Artificial Sequence
  Description of Artificial Sequence: Synthetic oligonucleotide
uaugaaucaguugccaauu

SEQ ID NO: 1669296 - RNA, 19 nt, Artificial Sequence
  Description of Artificial Sequence: Synthetic oligonucleotide
uccccuaccaucuccaguu

SEQ ID NO: 1669297 - RNA, 19 nt, Artificial Sequence
  Description of Artificial Sequence: Synthetic oligonucleotide
agcugugucgucuguguug

SEQ ID NO: 1669298 - RNA, 19 nt, Artificial Sequence
  Description of Artificial Sequence: Synthetic oligonucleotide
acuuccuuauugcuaagua

SEQ ID NO: 1669299 - RNA, 19 nt, Artificial Sequence
  Description of Artificial Sequence: Synthetic oligonucleotide
uggaaugguauucgcuagu

SEQ ID NO: 1669300 - RNA, 19 nt, Artificial Sequence
  Description of Artificial Sequence: Synthetic oligonucleotide
ugaaagcuauaagccauca

SEQ ID NO: 1669301 - RNA, 19 nt, Artificial Sequence
  Description of Artificial Sequence: Synthetic oligonucleotide
ccagcguucacacaagagc

SEQ ID NO: 1669302 - RNA, 19 nt, Artificial Sequence
  Description of Artificial Sequence: Synthetic oligonucleotide
acaccuguacccuguagga

SEQ ID NO: 1669303 - RNA, 19 nt, Artificial Sequence
  Description of Artificial Sequence: Synthetic oligonucleotide
guagcuaccauccggagau

SEQ ID NO: 1669304 - RNA, 19 nt, Artificial Sequence
  Description of Artificial Sequence: Synthetic oligonucleotide
cagugagcgaacagugggg

SEQ ID NO: 1669305 - RNA, 19 nt, Artificial Sequence
  Description of Artificial Sequence: Synthetic oligonucleotide
agcuuggggauauuugcga

SEQ ID NO: 1669306 - RNA, 19 nt, Artificial Sequence
  Description of Artificial Sequence: Synthetic oligonucleotide
uuggcguagacuuccuuau

SEQ ID NO: 1669307 - RNA, 19 nt, Artificial Sequence
  Description of Artificial Sequence: Synthetic oligonucleotide
uggccaaaacaugggaugc

SEQ ID NO: 1669308 - RNA, 19 nt, Artificial Sequence
  Description of Artificial Sequence: Synthetic oligonucleotide
uaagucgguggcauagguc

SEQ ID NO: 1669309 - RNA, 19 nt, Artificial Sequence
  Description of Artificial Sequence: Synthetic oligonucleotide
agugagccuccaugaaggg

SEQ ID NO: 1669310 - RNA, 19 nt, Artificial Sequence
  Description of Artificial Sequence: Synthetic oligonucleotide
uuccaacaccugauguaag

SEQ ID NO: 1669311 - RNA, 19 nt, Artificial Sequence
  Description of Artificial Sequence: Synthetic oligonucleotide
cuaccauccggagauaauc

SEQ ID NO: 1669312 - RNA, 19 nt, Artificial Sequence
  Description of Artificial Sequence: Synthetic oligonucleotide
gccaauuagccauuugccc

SEQ ID NO: 1669313 - RNA, 19 nt, Artificial Sequence
  Description of Artificial Sequence: Synthetic oligonucleotide
acauaugaaucaguugcca

SEQ ID NO: 1669314 - RNA, 19 nt, Artificial Sequence
  Description of Artificial Sequence: Synthetic oligonucleotide
aggucugaagggucaguag

SEQ ID NO: 1669315 - RNA, 19 nt, Artificial Sequence
  Description of Artificial Sequence: Synthetic oligonucleotide
cuuccacgaugcuuggagc

SEQ ID NO: 1669316 - RNA, 19 nt, Artificial Sequence
  Description of Artificial Sequence: Synthetic oligonucleotide
gaccauagcggacuuguaa

SEQ ID NO: 1669317 - RNA, 19 nt, Artificial Sequence
  Description of Artificial Sequence: Synthetic oligonucleotide
cagaguacucaagauuggc

SEQ ID NO: 1669318 - RNA, 19 nt, Artificial Sequence
  Description of Artificial Sequence: Synthetic oligonucleotide
gaagccggcuaccgcgucg

SEQ ID NO: 1669319 - RNA, 19 nt, Artificial Sequence
  Description of Artificial Sequence: Synthetic oligonucleotide
ggcuaugugguuuaguaaa

SEQ ID NO: 1669320 - RNA, 19 nt, Artificial Sequence
  Description of Artificial Sequence: Synthetic oligonucleotide
acgagcugacgauagaguu

SEQ ID NO: 1669321 - RNA, 19 nt, Artificial Sequence
  Description of Artificial Sequence: Synthetic oligonucleotide
accauccggagauaaucug

SEQ ID NO: 1669322 - RNA, 19 nt, Artificial Sequence
  Description of Artificial Sequence: Synthetic oligonucleotide
aggaaaucccagcguucac

SEQ ID NO: 1669323 - RNA, 19 nt, Artificial Sequence
  Description of Artificial Sequence: Synthetic oligonucleotide
gacuuguaaggcuugcugu

SEQ ID NO: 1669324 - RNA, 19 nt, Artificial Sequence
  Description of Artificial Sequence: Synthetic oligonucleotide
cauagguguugaaaaucuc

SEQ ID NO: 1669325 - RNA, 19 nt, Artificial Sequence
  Description of Artificial Sequence: Synthetic oligonucleotide
gaaugguauucgcuaguga

SEQ ID NO: 1669326 - RNA, 19 nt, Artificial Sequence
  Description of Artificial Sequence: Synthetic oligonucleotide
guauucgcuagugauguuc

SEQ ID NO: 1669327 - RNA, 19 nt, Artificial Sequence
  Description of Artificial Sequence: Synthetic oligonucleotide
ccggagauaaucugcagag

SEQ ID NO: 1669328 - RNA, 19 nt, Artificial Sequence
  Description of Artificial Sequence: Synthetic oligonucleotide
ugcgauugccagacugacc

SEQ ID NO: 1669329 - RNA, 19 nt, Artificial Sequence
  Description of Artificial Sequence: Synthetic oligonucleotide
uguucccgccagcugagcu

SEQ ID NO: 1669330 - RNA, 19 nt, Artificial Sequence
  Description of Artificial Sequence: Synthetic oligonucleotide
ggagauaaucugcagagua

SEQ ID NO: 1669331 - RNA, 19 nt, Artificial Sequence
  Description of Artificial Sequence: Synthetic oligonucleotide
ggagugagccuccaugaag

SEQ ID NO: 1669332 - RNA, 19 nt, Artificial Sequence
  Description of Artificial Sequence: Synthetic oligonucleotide
gucaacaccuccucaugac

SEQ ID NO: 1669333 - RNA, 19 nt, Artificial Sequence
  Description of Artificial Sequence: Synthetic oligonucleotide
ggcguagacuuccuuauug

SEQ ID NO: 1669334 - RNA, 19 nt, Artificial Sequence
  Description of Artificial Sequence: Synthetic oligonucleotide
gugucgucuguguugucag

SEQ ID NO: 1669335 - RNA, 19 nt, Artificial Sequence
  Description of Artificial Sequence: Synthetic oligonucleotide
ccagugagcgaacaguggg

SEQ ID NO: 1669336 - RNA, 19 nt, Artificial Sequence
  Description of Artificial Sequence: Synthetic oligonucleotide
auagaguuccagugagcga

SEQ ID NO: 1669337 - RNA, 19 nt, Artificial Sequence
  Description of Artificial Sequence: Synthetic oligonucleotide
cauaugaaucaguugccaa

SEQ ID NO: 1669338 - RNA, 19 nt, Artificial Sequence
  Description of Artificial Sequence: Synthetic oligonucleotide
aguacucaagauuggcauu

SEQ ID NO: 1669339 - RNA, 19 nt, Artificial Sequence
  Description of Artificial Sequence: Synthetic oligonucleotide
accugauguaagaucaucu

SEQ ID NO: 1669340 - RNA, 19 nt, Artificial Sequence
  Description of Artificial Sequence: Synthetic oligonucleotide
uggcuaugugguuuaguaa

SEQ ID NO: 1669341 - RNA, 19 nt, Artificial Sequence
  Description of Artificial Sequence: Synthetic oligonucleotide
guaaggcuugcuguucccg

SEQ ID NO: 1669342 - RNA, 19 nt, Artificial Sequence
  Description of Artificial Sequence: Synthetic oligonucleotide
aggcaugcacaguaccuug

SEQ ID NO: 1669343 - RNA, 19 nt, Artificial Sequence
  Description of Artificial Sequence: Synthetic oligonucleotide
aggacgauggaaugguauu

SEQ ID NO: 1669344 - RNA, 19 nt, Artificial Sequence
  Description of Artificial Sequence: Synthetic oligonucleotide
augguauucgcuagugaug

SEQ ID NO: 1669345 - RNA, 19 nt, Artificial Sequence
  Description of Artificial Sequence: Synthetic oligonucleotide
acacaagagcagcuuuuca

SEQ ID NO: 1669346 - RNA, 19 nt, Artificial Sequence
  Description of Artificial Sequence: Synthetic oligonucleotide
gagcuuggcguagacuucc

SEQ ID NO: 1669347 - RNA, 19 nt, Artificial Sequence
  Description of Artificial Sequence: Synthetic oligonucleotide
gaguagcuaccauccggag

SEQ ID NO: 1669348 - RNA, 19 nt, Artificial Sequence
  Description of Artificial Sequence: Synthetic oligonucleotide
ucccgcgccaccaugccgu

SEQ ID NO: 1669349 - RNA, 19 nt, Artificial Sequence
  Description of Artificial Sequence: Synthetic oligonucleotide
cacugcgaacagcagcucc

SEQ ID NO: 1669350 - RNA, 19 nt, Artificial Sequence
  Description of Artificial Sequence: Synthetic oligonucleotide
cauccggagauaaucugca

SEQ ID NO: 1669351 - RNA, 19 nt, Artificial Sequence
  Description of Artificial Sequence: Synthetic oligonucleotide
agaagccgcuuccacgaug

SEQ ID NO: 1669352 - RNA, 19 nt, Artificial Sequence
  Description of Artificial Sequence: Synthetic oligonucleotide
cuaugugguuuaguaaauc

SEQ ID NO: 1669353 - RNA, 19 nt, Artificial Sequence
  Description of Artificial Sequence: Synthetic oligonucleotide
ugugauuggcuaugugguu

SEQ ID NO: 1669354 - RNA, 19 nt, Artificial Sequence
  Description of Artificial Sequence: Synthetic oligonucleotide
ccaauuagccauuugccca

SEQ ID NO: 1669355 - RNA, 19 nt, Artificial Sequence
  Description of Artificial Sequence: Synthetic oligonucleotide
cauugugauuggcuaugug

SEQ ID NO: 1669356 - RNA, 19 nt, Artificial Sequence
  Description of Artificial Sequence: Synthetic oligonucleotide
uagcggacuuguaaggcuu

SEQ ID NO: 1669357 - RNA, 19 nt, Artificial Sequence
  Description of Artificial Sequence: Synthetic oligonucleotide
uacccuguaggaggcgccg

SEQ ID NO: 1669358 - RNA, 19 nt, Artificial Sequence
  Description of Artificial Sequence: Synthetic oligonucleotide
ggggauauuugcgauugcc

SEQ ID NO: 1669359 - RNA, 19 nt, Artificial Sequence
  Description of Artificial Sequence: Synthetic oligonucleotide
caguagaacacugucucga

SEQ ID NO: 1669360 - RNA, 19 nt, Artificial Sequence
  Description of Artificial Sequence: Synthetic oligonucleotide
uaggaggcgccgccguucc

SEQ ID NO: 1669361 - RNA, 19 nt, Artificial Sequence
  Description of Artificial Sequence: Synthetic oligonucleotide
uugcgauugccagacugac

SEQ ID NO: 1669362 - RNA, 19 nt, Artificial Sequence
  Description of Artificial Sequence: Synthetic oligonucleotide
caccagcgcaggaagccgg

SEQ ID NO: 1669363 - RNA, 19 nt, Artificial Sequence
  Description of Artificial Sequence: Synthetic oligonucleotide
agcgcgaaguaggggcucc

SEQ ID NO: 1669364 - RNA, 19 nt, Artificial Sequence
  Description of Artificial Sequence: Synthetic oligonucleotide
uaggucugaagggucagua

SEQ ID NO: 1669365 - RNA, 19 nt, Artificial Sequence
  Description of Artificial Sequence: Synthetic oligonucleotide
caaacgcccgagcucuggc

SEQ ID NO: 1669366 - RNA, 19 nt, Artificial Sequence
  Description of Artificial Sequence: Synthetic oligonucleotide
gcguagacuuccuuauugc

SEQ ID NO: 1669367 - RNA, 19 nt, Artificial Sequence
  Description of Artificial Sequence: Synthetic oligonucleotide
gauuggcauugugauuggc

SEQ ID NO: 1669368 - RNA, 19 nt, Artificial Sequence
  Description of Artificial Sequence: Synthetic oligonucleotide
ggaaugguauucgcuagug

SEQ ID NO: 1669369 - RNA, 19 nt, Artificial Sequence
  Description of Artificial Sequence: Synthetic oligonucleotide
guagacuuccuuauugcua

SEQ ID NO: 1669370 - RNA, 19 nt, Artificial Sequence
  Description of Artificial Sequence: Synthetic oligonucleotide
gcgauugccagacugaccu

SEQ ID NO: 1669371 - RNA, 19 nt, Artificial Sequence
  Description of Artificial Sequence: Synthetic oligonucleotide
agacuuccuuauugcuaag

SEQ ID NO: 1669372 - RNA, 19 nt, Artificial Sequence
  Description of Artificial Sequence: Synthetic oligonucleotide
accauacauaugaaucagu

SEQ ID NO: 1669373 - RNA, 19 nt, Artificial Sequence
  Description of Artificial Sequence: Synthetic oligonucleotide
ucgucuguguugucaggau

SEQ ID NO: 1669374 - RNA, 19 nt, Artificial Sequence
  Description of Artificial Sequence: Synthetic oligonucleotide
cauaggaaaucccagcguu

SEQ ID NO: 1669375 - RNA, 19 nt, Artificial Sequence
  Description of Artificial Sequence: Synthetic oligonucleotide
agcguucacacaagagcag

SEQ ID NO: 1669376 - RNA, 19 nt, Artificial Sequence
  Description of Artificial Sequence: Synthetic oligonucleotide
cugacgauagaguuccagu

SEQ ID NO: 1669377 - RNA, 19 nt, Artificial Sequence
  Description of Artificial Sequence: Synthetic oligonucleotide
gauuggcuaugugguuuag

SEQ ID NO: 1669378 - RNA, 19 nt, Artificial Sequence
  Description of Artificial Sequence: Synthetic oligonucleotide
gccgcuuccacgaugcuug

SEQ ID NO: 1669379 - RNA, 19 nt, Artificial Sequence
  Description of Artificial Sequence: Synthetic oligonucleotide
ggccagagcgcgaaguagg

SEQ ID NO: 1669380 - RNA, 19 nt, Artificial Sequence
  Description of Artificial Sequence: Synthetic oligonucleotide
gcuagugauguucaccaaa

SEQ ID NO: 1669381 - RNA, 19 nt, Artificial Sequence
  Description of Artificial Sequence: Synthetic oligonucleotide
uauuugcgauugccagacu

SEQ ID NO: 1669382 - RNA, 19 nt, Artificial Sequence
  Description of Artificial Sequence: Synthetic oligonucleotide
gugcccugccggcucaccg

SEQ ID NO: 1669383 - RNA, 19 nt, Artificial Sequence
  Description of Artificial Sequence: Synthetic oligonucleotide
ggcauugugauuggcuaug

SEQ ID NO: 1669384 - RNA, 19 nt, Artificial Sequence
  Description of Artificial Sequence: Synthetic oligonucleotide
aagaagccgcuuccacgau

SEQ ID NO: 1669385 - RNA, 19 nt, Artificial Sequence
  Description of Artificial Sequence: Synthetic oligonucleotide
ccuuauugcuaaguaaauc

SEQ ID NO: 1669386 - RNA, 19 nt, Artificial Sequence
  Description of Artificial Sequence: Synthetic oligonucleotide
ucugaccauagcggacuug

SEQ ID NO: 1669387 - RNA, 19 nt, Artificial Sequence
  Description of Artificial Sequence: Synthetic oligonucleotide
uuugcccauagguguugaa

SEQ ID NO: 1669388 - RNA, 19 nt, Artificial Sequence
  Description of Artificial Sequence: Synthetic oligonucleotide
gccauuugcccauaggugu

SEQ ID NO: 1669389 - RNA, 19 nt, Artificial Sequence
  Description of Artificial Sequence: Synthetic oligonucleotide
agaagcgccgagcgcggca

SEQ ID NO: 1669390 - RNA, 19 nt, Artificial Sequence
  Description of Artificial Sequence: Synthetic oligonucleotide
caccugauguaagaucauc

SEQ ID NO: 1669391 - RNA, 19 nt, Artificial Sequence
  Description of Artificial Sequence: Synthetic oligonucleotide
gcagaguacucaagauugg

SEQ ID NO: 1669392 - RNA, 19 nt, Artificial Sequence
  Description of Artificial Sequence: Synthetic oligonucleotide
ggaaaucccagcguucaca

SEQ ID NO: 1669393 - RNA, 19 nt, Artificial Sequence
  Description of Artificial Sequence: Synthetic oligonucleotide
gggauauuugcgauugcca

SEQ ID NO: 1669394 - RNA, 19 nt, Artificial Sequence
  Description of Artificial Sequence: Synthetic oligonucleotide
gagaucggagugagccucc

SEQ ID NO: 1669395 - RNA, 19 nt, Artificial Sequence
  Description of Artificial Sequence: Synthetic oligonucleotide
agccacgagcugacgauag

SEQ ID NO: 1669396 - RNA, 19 nt, Artificial Sequence
  Description of Artificial Sequence: Synthetic oligonucleotide
accaaucacaaaggcuccu

SEQ ID NO: 1669397 - RNA, 19 nt, Artificial Sequence
  Description of Artificial Sequence: Synthetic oligonucleotide
gagcgcggcacugcgaaca

SEQ ID NO: 1669398 - RNA, 19 nt, Artificial Sequence
  Description of Artificial Sequence: Synthetic oligonucleotide
acagaagcgccgagcgcgg

SEQ ID NO: 1669399 - RNA, 19 nt, Artificial Sequence
  Description of Artificial Sequence: Synthetic oligonucleotide
accagcgcaggaagccggc

SEQ ID NO: 1669400 - RNA, 19 nt, Artificial Sequence
  Description of Artificial Sequence: Synthetic oligonucleotide
auuugcccauagguguuga

SEQ ID NO: 1669401 - RNA, 19 nt, Artificial Sequence
  Description of Artificial Sequence: Synthetic oligonucleotide
agcggcacccaccccgaca

SEQ ID NO: 1669402 - RNA, 19 nt, Artificial Sequence
  Description of Artificial Sequence: Synthetic oligonucleotide
gaagcgccgagcgcggcac

SEQ ID NO: 1669403 - RNA, 19 nt, Artificial Sequence
  Description of Artificial Sequence: Synthetic oligonucleotide
cugcgaacagcagcucccc

SEQ ID NO: 1669404 - RNA, 19 nt, Artificial Sequence
  Description of Artificial Sequence: Synthetic oligonucleotide
ucgccgucggacuggccac

SEQ ID NO: 1669405 - RNA, 19 nt, Artificial Sequence
  Description of Artificial Sequence: Synthetic oligonucleotide
agcuaccauccggagauaa

SEQ ID NO: 1669406 - RNA, 19 nt, Artificial Sequence
  Description of Artificial Sequence: Synthetic oligonucleotide
uccaaacgcccgagcucug

SEQ ID NO: 1669407 - RNA, 19 nt, Artificial Sequence
  Description of Artificial Sequence: Synthetic oligonucleotide
guagccggccaccgugccc

SEQ ID NO: 1669408 - RNA, 19 nt, Artificial Sequence
  Description of Artificial Sequence: Synthetic oligonucleotide
caauuagccauuugcccau

SEQ ID NO: 1669409 - RNA, 19 nt, Artificial Sequence
  Description of Artificial Sequence: Synthetic oligonucleotide
ggacgauggaaugguauuc

SEQ ID NO: 1669410 - RNA, 19 nt, Artificial Sequence
  Description of Artificial Sequence: Synthetic oligonucleotide
cugaccauagcggacuugu

SEQ ID NO: 1669411 - RNA, 19 nt, Artificial Sequence
  Description of Artificial Sequence: Synthetic oligonucleotide
caccaucugaaugucagcu

SEQ ID NO: 1669412 - RNA, 19 nt, Artificial Sequence
  Description of Artificial Sequence: Synthetic oligonucleotide
aauuagccauuugcccaua

SEQ ID NO: 1669413 - RNA, 19 nt, Artificial Sequence
  Description of Artificial Sequence: Synthetic oligonucleotide
gcuaccgcgucgccgucgg

SEQ ID NO: 1669414 - RNA, 19 nt, Artificial Sequence
  Description of Artificial Sequence: Synthetic oligonucleotide
uggcguagacuuccuuauu

SEQ ID NO: 1669415 - RNA, 19 nt, Artificial Sequence
  Description of Artificial Sequence: Synthetic oligonucleotide
augccguagccggccaccg

SEQ ID NO: 1669416 - RNA, 19 nt, Artificial Sequence
  Description of Artificial Sequence: Synthetic oligonucleotide
cagugguucuugaaagcua

SEQ ID NO: 1669417 - RNA, 19 nt, Artificial Sequence
  Description of Artificial Sequence: Synthetic oligonucleotide
ccacgagcugacgauagag

SEQ ID NO: 1669418 - RNA, 19 nt, Artificial Sequence
  Description of Artificial Sequence: Synthetic oligonucleotide
cccagcguucacacaagag

SEQ ID NO: 1669419 - RNA, 19 nt, Artificial Sequence
  Description of Artificial Sequence: Synthetic oligonucleotide
cucccgcgccaccaugccg

SEQ ID NO: 1669420 - RNA, 19 nt, Artificial Sequence
  Description of Artificial Sequence: Synthetic oligonucleotide
ccuuuguucccugcagugc

SEQ ID NO: 1669421 - RNA, 19 nt, Artificial Sequence
  Description of Artificial Sequence: Synthetic oligonucleotide
agcggacuuguaaggcuug

SEQ ID NO: 1669422 - RNA, 19 nt, Artificial Sequence
  Description of Artificial Sequence: Synthetic oligonucleotide
gccaaaacaugggaugcuc

SEQ ID NO: 1669423 - RNA, 19 nt, Artificial Sequence
  Description of Artificial Sequence: Synthetic oligonucleotide
ggaugcuccaaacgcccga

SEQ ID NO: 1669424 - RNA, 19 nt, Artificial Sequence
  Description of Artificial Sequence: Synthetic oligonucleotide
cacgagcugacgauagagu

SEQ ID NO: 1669425 - RNA, 19 nt, Artificial Sequence
  Description of Artificial Sequence: Synthetic oligonucleotide
ggcacccaccccgacaggc

SEQ ID NO: 1669426 - RNA, 19 nt, Artificial Sequence
  Description of Artificial Sequence: Synthetic oligonucleotide
gggaugcuccaaacgcccg

SEQ ID NO: 1669427 - RNA, 19 nt, Artificial Sequence
  Description of Artificial Sequence: Synthetic oligonucleotide
gagcgaacaguggggcuga

SEQ ID NO: 1669428 - RNA, 19 nt, Artificial Sequence
  Description of Artificial Sequence: Synthetic oligonucleotide
ccauacauaugaaucaguu

SEQ ID NO: 1669429 - RNA, 19 nt, Artificial Sequence
  Description of Artificial Sequence: Synthetic oligonucleotide
guaggggcuccagggugag

SEQ ID NO: 1669430 - RNA, 19 nt, Artificial Sequence
  Description of Artificial Sequence: Synthetic oligonucleotide
ucccgcgcaccagcgcagg

SEQ ID NO: 1669431 - RNA, 19 nt, Artificial Sequence
  Description of Artificial Sequence: Synthetic oligonucleotide
cucccgcgcaccagcgcag

SEQ ID NO: 1669432 - RNA, 19 nt, Artificial Sequence
  Description of Artificial Sequence: Synthetic oligonucleotide
agucgguggcauaggucug

SEQ ID NO: 1669433 - RNA, 19 nt, Artificial Sequence
  Description of Artificial Sequence: Synthetic oligonucleotide
agccggcuaccgcgucgcc

SEQ ID NO: 1669434 - RNA, 19 nt, Artificial Sequence
  Description of Artificial Sequence: Synthetic oligonucleotide
aguugccaauuagccauuu

SEQ ID NO: 1669435 - RNA, 19 nt, Artificial Sequence
  Description of Artificial Sequence: Synthetic oligonucleotide
gucgguggcauaggucuga

SEQ ID NO: 1669436 - RNA, 19 nt, Artificial Sequence
  Description of Artificial Sequence: Synthetic oligonucleotide
gcaccagcgcaggaagccg

SEQ ID NO: 1669437 - RNA, 19 nt, Artificial Sequence
  Description of Artificial Sequence: Synthetic oligonucleotide
cgucggacuggccaccgcg

SEQ ID NO: 1669438 - RNA, 19 nt, Artificial Sequence
  Description of Artificial Sequence: Synthetic oligonucleotide
agaucggagugagccucca

SEQ ID NO: 1669439 - RNA, 19 nt, Artificial Sequence
  Description of Artificial Sequence: Synthetic oligonucleotide
cacucccgcgcaccagcgc

SEQ ID NO: 1669440 - RNA, 19 nt, Artificial Sequence
  Description of Artificial Sequence: Synthetic oligonucleotide
gcauaggaaaucccagcgu

SEQ ID NO: 1669441 - RNA, 19 nt, Artificial Sequence
  Description of Artificial Sequence: Synthetic oligonucleotide
gggagacagaagcgccgag

SEQ ID NO: 1669442 - RNA, 19 nt, Artificial Sequence
  Description of Artificial Sequence: Synthetic oligonucleotide
aagcgccgagcgcggcacu

SEQ ID NO: 1669443 - RNA, 19 nt, Artificial Sequence
  Description of Artificial Sequence: Synthetic oligonucleotide
acaccugauguaagaucau

SEQ ID NO: 1669444 - RNA, 19 nt, Artificial Sequence
  Description of Artificial Sequence: Synthetic oligonucleotide
cccacucccgcgcaccagc

SEQ ID NO: 1669445 - RNA, 19 nt, Artificial Sequence
  Description of Artificial Sequence: Synthetic oligonucleotide
agccgcuuccacgaugcuu

SEQ ID NO: 1669446 - RNA, 19 nt, Artificial Sequence
  Description of Artificial Sequence: Synthetic oligonucleotide
ggccaccgugcccugccgg

SEQ ID NO: 1669447 - RNA, 19 nt, Artificial Sequence
  Description of Artificial Sequence: Synthetic oligonucleotide
ccaaacgcccgagcucugg

SEQ ID NO: 1669448 - RNA, 19 nt, Artificial Sequence
  Description of Artificial Sequence: Synthetic oligonucleotide
auugccagacugaccucuu

SEQ ID NO: 1669449 - RNA, 19 nt, Artificial Sequence
  Description of Artificial Sequence: Synthetic oligonucleotide
gccaccgugcccugccggc

SEQ ID NO: 1669450 - RNA, 19 nt, Artificial Sequence
  Description of Artificial Sequence: Synthetic oligonucleotide
gugagcgaacaguggggcu

SEQ ID NO: 1669451 - RNA, 19 nt, Artificial Sequence
  Description of Artificial Sequence: Synthetic oligonucleotide
gagcgcgaaguaggggcuc

SEQ ID NO: 1669452 - RNA, 19 nt, Artificial Sequence
  Description of Artificial Sequence: Synthetic oligonucleotide
gagccacgagcugacgaua

SEQ ID NO: 1669453 - RNA, 19 nt, Artificial Sequence
  Description of Artificial Sequence: Synthetic oligonucleotide
ccacucccgcgcaccagcg

SEQ ID NO: 1669454 - RNA, 19 nt, Artificial Sequence
  Description of Artificial Sequence: Synthetic oligonucleotide
caccgugcccugccggcuc

SEQ ID NO: 1669455 - RNA, 19 nt, Artificial Sequence
  Description of Artificial Sequence: Synthetic oligonucleotide
gccggcuaccgcgucgccg

SEQ ID NO: 1669456 - RNA, 19 nt, Artificial Sequence
  Description of Artificial Sequence: Synthetic oligonucleotide
accgccaccuugggacuca

SEQ ID NO: 1669457 - RNA, 19 nt, Artificial Sequence
  Description of Artificial Sequence: Synthetic oligonucleotide
ggggagacagaagcgccga

SEQ ID NO: 1669458 - RNA, 19 nt, Artificial Sequence
  Description of Artificial Sequence: Synthetic oligonucleotide
acgcucucccgcgccacca

SEQ ID NO: 1669459 - RNA, 19 nt, Artificial Sequence
  Description of Artificial Sequence: Synthetic oligonucleotide
cagaagcgccgagcgcggc

SEQ ID NO: 1669460 - RNA, 19 nt, Artificial Sequence
  Description of Artificial Sequence: Synthetic oligonucleotide
gcuuggggauauuugcgau

SEQ ID NO: 1669461 - RNA, 19 nt, Artificial Sequence
  Description of Artificial Sequence: Synthetic oligonucleotide
guucccgccagcugagcuu

SEQ ID NO: 1669462 - RNA, 19 nt, Artificial Sequence
  Description of Artificial Sequence: Synthetic oligonucleotide
ggcuaccgcgucgccgucg

SEQ ID NO: 1669463 - RNA, 19 nt, Artificial Sequence
  Description of Artificial Sequence: Synthetic oligonucleotide
gcggacuuguaaggcuugc

SEQ ID NO: 1669464 - RNA, 19 nt, Artificial Sequence
  Description of Artificial Sequence: Synthetic oligonucleotide
ccguagccggccaccgugc

SEQ ID NO: 1669465 - RNA, 19 nt, Artificial Sequence
  Description of Artificial Sequence: Synthetic oligonucleotide
gaucggagugagccuccau

SEQ ID NO: 1669466 - RNA, 19 nt, Artificial Sequence
  Description of Artificial Sequence: Synthetic oligonucleotide
gcucucccgcgccaccaug

SEQ ID NO: 1669467 - RNA, 19 nt, Artificial Sequence
  Description of Artificial Sequence: Synthetic oligonucleotide
cagcgcaggaagccggcua

SEQ ID NO: 1669468 - RNA, 19 nt, Artificial Sequence
  Description of Artificial Sequence: Synthetic oligonucleotide
ccagugguucuugaaagcu

SEQ ID NO: 1669469 - RNA, 19 nt, Artificial Sequence
  Description of Artificial Sequence: Synthetic oligonucleotide
cgcaggaagccggcuaccg

SEQ ID NO: 1669470 - RNA, 19 nt, Artificial Sequence
  Description of Artificial Sequence: Synthetic oligonucleotide
ggaaugggcugaguagcua

SEQ ID NO: 1669471 - RNA, 19 nt, Artificial Sequence
  Description of Artificial Sequence: Synthetic oligonucleotide
cguagacuuccuuauugcu

SEQ ID NO: 1669472 - RNA, 19 nt, Artificial Sequence
  Description of Artificial Sequence: Synthetic oligonucleotide
guucccugcagugcagcau

SEQ ID NO: 1669473 - RNA, 19 nt, Artificial Sequence
  Description of Artificial Sequence: Synthetic oligonucleotide
uagcuaccauccggagaua

SEQ ID NO: 1669474 - RNA, 19 nt, Artificial Sequence
  Description of Artificial Sequence: Synthetic oligonucleotide
gccacgagcugacgauaga

SEQ ID NO: 1669475 - RNA, 19 nt, Artificial Sequence
  Description of Artificial Sequence: Synthetic oligonucleotide
caggcaugcacaguaccuu

SEQ ID NO: 1669476 - RNA, 19 nt, Artificial Sequence
  Description of Artificial Sequence: Synthetic oligonucleotide
gccgcugauggagcaggug

SEQ ID NO: 1669477 - RNA, 19 nt, Artificial Sequence
  Description of Artificial Sequence: Synthetic oligonucleotide
cgauggaaugguauucgcu

SEQ ID NO: 1669478 - RNA, 19 nt, Artificial Sequence
  Description of Artificial Sequence: Synthetic oligonucleotide
gcucaccgccaccuuggga

SEQ ID NO: 1669479 - RNA, 19 nt, Artificial Sequence
  Description of Artificial Sequence: Synthetic oligonucleotide
gccgucggacuggccaccg

SEQ ID NO: 1669480 - RNA, 19 nt, Artificial Sequence
  Description of Artificial Sequence: Synthetic oligonucleotide
ccgcuuccacgaugcuugg

SEQ ID NO: 1669481 - RNA, 19 nt, Artificial Sequence
  Description of Artificial Sequence: Synthetic oligonucleotide
caccgccaccuugggacuc

SEQ ID NO: 1669482 - RNA, 19 nt, Artificial Sequence
  Description of Artificial Sequence: Synthetic oligonucleotide
cucugcagcgcgccucgcu

SEQ ID NO: 1669483 - RNA, 19 nt, Artificial Sequence
  Description of Artificial Sequence: Synthetic oligonucleotide
cagccccacucccgcgcac

SEQ ID NO: 1669484 - RNA, 19 nt, Artificial Sequence
  Description of Artificial Sequence: Synthetic oligonucleotide
ggccaaaacaugggaugcu

SEQ ID NO: 1669485 - RNA, 19 nt, Artificial Sequence
  Description of Artificial Sequence: Synthetic oligonucleotide
gcggcacugcgaacagcag

SEQ ID NO: 1669486 - RNA, 19 nt, Artificial Sequence
  Description of Artificial Sequence: Synthetic oligonucleotide
cagcugagcuuggcguaga

SEQ ID NO: 1669487 - RNA, 19 nt, Artificial Sequence
  Description of Artificial Sequence: Synthetic oligonucleotide
gcauugugauuggcuaugu

SEQ ID NO: 1669488 - RNA, 19 nt, Artificial Sequence
  Description of Artificial Sequence: Synthetic oligonucleotide
cguagccggccaccgugcc

SEQ ID NO: 1669489 - RNA, 19 nt, Artificial Sequence
  Description of Artificial Sequence: Synthetic oligonucleotide
caguugccaauuagccauu

SEQ ID NO: 1669490 - RNA, 19 nt, Artificial Sequence
  Description of Artificial Sequence: Synthetic oligonucleotide
cagcggcacccaccccgac

SEQ ID NO: 1669491 - RNA, 19 nt, Artificial Sequence
  Description of Artificial Sequence: Synthetic oligonucleotide
gcgcaccagcgcaggaagc

SEQ ID NO: 1669492 - RNA, 19 nt, Artificial Sequence
  Description of Artificial Sequence: Synthetic oligonucleotide
cgauugccagacugaccuc

SEQ ID NO: 1669493 - RNA, 19 nt, Artificial Sequence
  Description of Artificial Sequence: Synthetic oligonucleotide
gcuuggagcuuggggauau

SEQ ID NO: 1669494 - RNA, 19 nt, Artificial Sequence
  Description of Artificial Sequence: Synthetic oligonucleotide
gcgcaggaagccggcuacc

SEQ ID NO: 1669495 - RNA, 19 nt, Artificial Sequence
  Description of Artificial Sequence: Synthetic oligonucleotide
ccauuugcccauagguguu

SEQ ID NO: 1669496 - RNA, 19 nt, Artificial Sequence
  Description of Artificial Sequence: Synthetic oligonucleotide
gguauucgcuagugauguu

SEQ ID NO: 1669497 - RNA, 19 nt, Artificial Sequence
  Description of Artificial Sequence: Synthetic oligonucleotide
cgccgagcgcggcacugcg

SEQ ID NO: 1669498 - RNA, 19 nt, Artificial Sequence
  Description of Artificial Sequence: Synthetic oligonucleotide
gcuaccauccggagauaau

SEQ ID NO: 1669499 - RNA, 19 nt, Artificial Sequence
  Description of Artificial Sequence: Synthetic oligonucleotide
agcgaacaguggggcugaa

SEQ ID NO: 1669500 - RNA, 19 nt, Artificial Sequence
  Description of Artificial Sequence: Synthetic oligonucleotide
ccggcuaccgcgucgccgu

SEQ ID NO: 1669501 - RNA, 19 nt, Artificial Sequence
  Description of Artificial Sequence: Synthetic oligonucleotide
gcacugcgaacagcagcuc

SEQ ID NO: 1669502 - RNA, 19 nt, Artificial Sequence
  Description of Artificial Sequence: Synthetic oligonucleotide
cggcugcacgcucucccgc

SEQ ID NO: 1669503 - RNA, 19 nt, Artificial Sequence
  Description of Artificial Sequence: Synthetic oligonucleotide
ccgucggacuggccaccgc

SEQ ID NO: 1669504 - RNA, 19 nt, Artificial Sequence
  Description of Artificial Sequence: Synthetic oligonucleotide
cgcgucgccgucggacugg

SEQ ID NO: 1669505 - RNA, 19 nt, Artificial Sequence
  Description of Artificial Sequence: Synthetic oligonucleotide
gccccacucccgcgcacca

SEQ ID NO: 1669506 - RNA, 19 nt, Artificial Sequence
  Description of Artificial Sequence: Synthetic oligonucleotide
gcgucgccgucggacuggc

SEQ ID NO: 1669507 - RNA, 19 nt, Artificial Sequence
  Description of Artificial Sequence: Synthetic oligonucleotide
gcgccgagcgcggcacugc

SEQ ID NO: 1669508 - RNA, 19 nt, Artificial Sequence
  Description of Artificial Sequence: Synthetic oligonucleotide
cuaccgcgucgccgucgga

SEQ ID NO: 1669509 - RNA, 19 nt, Artificial Sequence
  Description of Artificial Sequence: Synthetic oligonucleotide
gcuuggcguagacuuccuu

SEQ ID NO: 1669510 - RNA, 19 nt, Artificial Sequence
  Description of Artificial Sequence: Synthetic oligonucleotide
cggagugagccuccaugaa

SEQ ID NO: 1669511 - RNA, 19 nt, Artificial Sequence
  Description of Artificial Sequence: Synthetic oligonucleotide
cgcuagugauguucaccaa

SEQ ID NO: 1669512 - RNA, 19 nt, Artificial Sequence
  Description of Artificial Sequence: Synthetic oligonucleotide
gcacccaccccgacaggcu

SEQ ID NO: 1669513 - RNA, 19 nt, Artificial Sequence
  Description of Artificial Sequence: Synthetic oligonucleotide
ccccacucccgcgcaccag

SEQ ID NO: 1669514 - RNA, 19 nt, Artificial Sequence
  Description of Artificial Sequence: Synthetic oligonucleotide
gcgcgaaguaggggcucca

SEQ ID NO: 1669515 - RNA, 19 nt, Artificial Sequence
  Description of Artificial Sequence: Synthetic oligonucleotide
cgggacaccuguacccugu

SEQ ID NO: 1669516 - RNA, 19 nt, Artificial Sequence
  Description of Artificial Sequence: Synthetic oligonucleotide
cggccaccgugcccugccg

SEQ ID NO: 1669517 - RNA, 19 nt, Artificial Sequence
  Description of Artificial Sequence: Synthetic oligonucleotide
gccgagcgcggcacugcga

SEQ ID NO: 1669518 - RNA, 19 nt, Artificial Sequence
  Description of Artificial Sequence: Synthetic oligonucleotide
cuuggagcuuggggauauu

SEQ ID NO: 1669519 - RNA, 19 nt, Artificial Sequence
  Description of Artificial Sequence: Synthetic oligonucleotide
ccgccaccuugggacucag

SEQ ID NO: 1669520 - RNA, 19 nt, Artificial Sequence
  Description of Artificial Sequence: Synthetic oligonucleotide
ccgcgcaccagcgcaggaa

SEQ ID NO: 1669521 - RNA, 19 nt, Artificial Sequence
  Description of Artificial Sequence: Synthetic oligonucleotide
cggagauaaucugcagagu

SEQ ID NO: 1669522 - RNA, 19 nt, Artificial Sequence
  Description of Artificial Sequence: Synthetic oligonucleotide
cgccgucggacuggccacc

SEQ ID NO: 1669523 - RNA, 19 nt, Artificial Sequence
  Description of Artificial Sequence: Synthetic oligonucleotide
ccgcgccaccaugccguag

SEQ ID NO: 1669524 - RNA, 19 nt, Artificial Sequence
  Description of Artificial Sequence: Synthetic oligonucleotide
cccgcgcaccagcgcagga

SEQ ID NO: 1669525 - RNA, 19 nt, Artificial Sequence
  Description of Artificial Sequence: Synthetic oligonucleotide
cgcuuccacgaugcuugga

SEQ ID NO: 1669526 - RNA, 19 nt, Artificial Sequence
  Description of Artificial Sequence: Synthetic oligonucleotide
ccgugcccugccggcucac

SEQ ID NO: 1669527 - RNA, 19 nt, Artificial Sequence
  Description of Artificial Sequence: Synthetic oligonucleotide
ccccuaccaucuccaguuu

SEQ ID NO: 1669528 - RNA, 19 nt, Artificial Sequence
  Description of Artificial Sequence: Synthetic oligonucleotide
cccgcgccaccaugccgua

SEQ ID NO: 1669529 - RNA, 19 nt, Artificial Sequence
  Description of Artificial Sequence: Synthetic oligonucleotide
cggcuaccgcgucgccguc

SEQ ID NO: 1669530 - RNA, 19 nt, Artificial Sequence
  Description of Artificial Sequence: Synthetic oligonucleotide
ucaaauagcacuaaugaag

SEQ ID NO: 1669531 - RNA, 19 nt, Artificial Sequence
  Description of Artificial Sequence: Synthetic oligonucleotide
aagcuuaaaauccacuccc

SEQ ID NO: 1669532 - RNA, 19 nt, Artificial Sequence
  Description of Artificial Sequence: Synthetic oligonucleotide
ugaaagacuagucuaaucc

SEQ ID NO: 1669533 - RNA, 19 nt, Artificial Sequence
  Description of Artificial Sequence: Synthetic oligonucleotide
uauacacccacuuuaaccg

SEQ ID NO: 1669534 - RNA, 19 nt, Artificial Sequence
  Description of Artificial Sequence: Synthetic oligonucleotide
auauacacccacuuuaacc

SEQ ID NO: 1669535 - RNA, 19 nt, Artificial Sequence
  Description of Artificial Sequence: Synthetic oligonucleotide
ucaagaauggucaaggagc

SEQ ID NO: 1669536 - RNA, 19 nt, Artificial Sequence
  Description of Artificial Sequence: Synthetic oligonucleotide
ugcccuaacagauacaugg

SEQ ID NO: 1669537 - RNA, 19 nt, Artificial Sequence
  Description of Artificial Sequence: Synthetic oligonucleotide
aucacguucuauuucagcc

SEQ ID NO: 1669538 - RNA, 19 nt, Artificial Sequence
  Description of Artificial Sequence: Synthetic oligonucleotide
aauagcacuaaugaagggg

SEQ ID NO: 1669539 - RNA, 19 nt, Artificial Sequence
  Description of Artificial Sequence: Synthetic oligonucleotide
aagcaaaguaucuggaagg

SEQ ID NO: 1669540 - RNA, 19 nt, Artificial Sequence
  Description of Artificial Sequence: Synthetic oligonucleotide
uuaauuuaagugcugguga

SEQ ID NO: 1669541 - RNA, 19 nt, Artificial Sequence
  Description of Artificial Sequence: Synthetic oligonucleotide
aauccaucuuaccaugggc

SEQ ID NO: 1669542 - RNA, 19 nt, Artificial Sequence
  Description of Artificial Sequence: Synthetic oligonucleotide
cuaaugaaggggaaaaucc

SEQ ID NO: 1669543 - RNA, 19 nt, Artificial Sequence
  Description of Artificial Sequence: Synthetic oligonucleotide
aaauuagcuguggugaggc

SEQ ID NO: 1669544 - RNA, 19 nt, Artificial Sequence
  Description of Artificial Sequence: Synthetic oligonucleotide
aaaugugaaagacuagucu

SEQ ID NO: 1669545 - RNA, 19 nt, Artificial Sequence
  Description of Artificial Sequence: Synthetic oligonucleotide
caaaacaccaacuaccggc

SEQ ID NO: 1669546 - RNA, 19 nt, Artificial Sequence
  Description of Artificial Sequence: Synthetic oligonucleotide
uuuaaccgcauuuagugag

SEQ ID NO: 1669547 - RNA, 19 nt, Artificial Sequence
  Description of Artificial Sequence: Synthetic oligonucleotide
acuuuaaccgcauuuagug

SEQ ID NO: 1669548 - RNA, 19 nt, Artificial Sequence
  Description of Artificial Sequence: Synthetic oligonucleotide
aauaggaugacaguaagaa

SEQ ID NO: 1669549 - RNA, 19 nt, Artificial Sequence
  Description of Artificial Sequence: Synthetic oligonucleotide
agcaauucuagcauuaggc

SEQ ID NO: 1669550 - RNA, 19 nt, Artificial Sequence
  Description of Artificial Sequence: Synthetic oligonucleotide
ugaucaaauagcacuaaug

SEQ ID NO: 1669551 - RNA, 19 nt, Artificial Sequence
  Description of Artificial Sequence: Synthetic oligonucleotide
aaugugaaagacuagucua

SEQ ID NO: 1669552 - RNA, 19 nt, Artificial Sequence
  Description of Artificial Sequence: Synthetic oligonucleotide
aaauccacucccuucuagg

SEQ ID NO: 1669553 - RNA, 19 nt, Artificial Sequence
  Description of Artificial Sequence: Synthetic oligonucleotide
cauucaacuagcaaagaag

SEQ ID NO: 1669554 - RNA, 19 nt, Artificial Sequence
  Description of Artificial Sequence: Synthetic oligonucleotide
uuacauuaauuuaagugcu

SEQ ID NO: 1669555 - RNA, 19 nt, Artificial Sequence
  Description of Artificial Sequence: Synthetic oligonucleotide
uaauauugagggaacuucc

SEQ ID NO: 1669556 - RNA, 19 nt, Artificial Sequence
  Description of Artificial Sequence: Synthetic oligonucleotide
uccucuaacauucuaaaau

SEQ ID NO: 1669557 - RNA, 19 nt, Artificial Sequence
  Description of Artificial Sequence: Synthetic oligonucleotide
acuguguugaucaaauagc

SEQ ID NO: 1669558 - RNA, 19 nt, Artificial Sequence
  Description of Artificial Sequence: Synthetic oligonucleotide
auaauauugagggaacuuc

SEQ ID NO: 1669559 - RNA, 19 nt, Artificial Sequence
  Description of Artificial Sequence: Synthetic oligonucleotide
ucuagcauuaggcacaaau

SEQ ID NO: 1669560 - RNA, 19 nt, Artificial Sequence
  Description of Artificial Sequence: Synthetic oligonucleotide
aaguauaauccucuaacau

SEQ ID NO: 1669561 - RNA, 19 nt, Artificial Sequence
  Description of Artificial Sequence: Synthetic oligonucleotide
accucaagaguacugugcc

SEQ ID NO: 1669562 - RNA, 19 nt, Artificial Sequence
  Description of Artificial Sequence: Synthetic oligonucleotide
ucggacuuuugaaagaagc

SEQ ID NO: 1669563 - RNA, 19 nt, Artificial Sequence
  Description of Artificial Sequence: Synthetic oligonucleotide
agauacauggcccuggacu

SEQ ID NO: 1669564 - RNA, 19 nt, Artificial Sequence
  Description of Artificial Sequence: Synthetic oligonucleotide
aaggcauuauuuuccgauc

SEQ ID NO: 1669565 - RNA, 19 nt, Artificial Sequence
  Description of Artificial Sequence: Synthetic oligonucleotide
agucuaauccaucuuacca

SEQ ID NO: 1669566 - RNA, 19 nt, Artificial Sequence
  Description of Artificial Sequence: Synthetic oligonucleotide
auuaauuuaagugcuggug

SEQ ID NO: 1669567 - RNA, 19 nt, Artificial Sequence
  Description of Artificial Sequence: Synthetic oligonucleotide
aaaauuugacauaaggcau

SEQ ID NO: 1669568 - RNA, 19 nt, Artificial Sequence
  Description of Artificial Sequence: Synthetic oligonucleotide
uauaagcaaaguaucugga

SEQ ID NO: 1669569 - RNA, 19 nt, Artificial Sequence
  Description of Artificial Sequence: Synthetic oligonucleotide
uaauuguucaggccaaaga

SEQ ID NO: 1669570 - RNA, 19 nt, Artificial Sequence
  Description of Artificial Sequence: Synthetic oligonucleotide
aacaccaacuaccggcuuc

SEQ ID NO: 1669571 - RNA, 19 nt, Artificial Sequence
  Description of Artificial Sequence: Synthetic oligonucleotide
uuauuuuccgaucacucau

SEQ ID NO: 1669572 - RNA, 19 nt, Artificial Sequence
  Description of Artificial Sequence: Synthetic oligonucleotide
uuggcagauacauucaacu

SEQ ID NO: 1669573 - RNA, 19 nt, Artificial Sequence
  Description of Artificial Sequence: Synthetic oligonucleotide
ucuccuguguccaaacucc

SEQ ID NO: 1669574 - RNA, 19 nt, Artificial Sequence
  Description of Artificial Sequence: Synthetic oligonucleotide
acauuaauuuaagugcugg

SEQ ID NO: 1669575 - RNA, 19 nt, Artificial Sequence
  Description of Artificial Sequence: Synthetic oligonucleotide
uugacauaaggcauuauuu

SEQ ID NO: 1669576 - RNA, 19 nt, Artificial Sequence
  Description of Artificial Sequence: Synthetic oligonucleotide
acaguaagaaggaggaggc

SEQ ID NO: 1669577 - RNA, 19 nt, Artificial Sequence
  Description of Artificial Sequence: Synthetic oligonucleotide
uuaagugcuggugaauagg

SEQ ID NO: 1669578 - RNA, 19 nt, Artificial Sequence
  Description of Artificial Sequence: Synthetic oligonucleotide
aguauaauccucuaacauu

SEQ ID NO: 1669579 - RNA, 19 nt, Artificial Sequence
  Description of Artificial Sequence: Synthetic oligonucleotide
ucuaauccaucuuaccaug

SEQ ID NO: 1669580 - RNA, 19 nt, Artificial Sequence
  Description of Artificial Sequence: Synthetic oligonucleotide
ucccauuacagacaagcug

SEQ ID NO: 1669581 - RNA, 19 nt, Artificial Sequence
  Description of Artificial Sequence: Synthetic oligonucleotide
aauccucuaacauucuaaa

SEQ ID NO: 1669582 - RNA, 19 nt, Artificial Sequence
  Description of Artificial Sequence: Synthetic oligonucleotide
caagcuuaaaauccacucc

SEQ ID NO: 1669583 - RNA, 19 nt, Artificial Sequence
  Description of Artificial Sequence: Synthetic oligonucleotide
ucucucuggacucauccag

SEQ ID NO: 1669584 - RNA, 19 nt, Artificial Sequence
  Description of Artificial Sequence: Synthetic oligonucleotide
uccaaaucugucccguccg

SEQ ID NO: 1669585 - RNA, 19 nt, Artificial Sequence
  Description of Artificial Sequence: Synthetic oligonucleotide
uuuaagugcuggugaauag

SEQ ID NO: 1669586 - RNA, 19 nt, Artificial Sequence
  Description of Artificial Sequence: Synthetic oligonucleotide
aaugucaagaauggucaag

SEQ ID NO: 1669587 - RNA, 19 nt, Artificial Sequence
  Description of Artificial Sequence: Synthetic oligonucleotide
ucaaaacaccaacuaccgg

SEQ ID NO: 1669588 - RNA, 19 nt, Artificial Sequence
  Description of Artificial Sequence: Synthetic oligonucleotide
caauucuagcauuaggcac

SEQ ID NO: 1669589 - RNA, 19 nt, Artificial Sequence
  Description of Artificial Sequence: Synthetic oligonucleotide
gucaagaauggucaaggag

SEQ ID NO: 1669590 - RNA, 19 nt, Artificial Sequence
  Description of Artificial Sequence: Synthetic oligonucleotide
ugguacauauuucauugcu

SEQ ID NO: 1669591 - RNA, 19 nt, Artificial Sequence
  Description of Artificial Sequence: Synthetic oligonucleotide
uuuaucauauaagcaaagu

SEQ ID NO: 1669592 - RNA, 19 nt, Artificial Sequence
  Description of Artificial Sequence: Synthetic oligonucleotide
ucaaauuagcuguggugag

SEQ ID NO: 1669593 - RNA, 19 nt, Artificial Sequence
  Description of Artificial Sequence: Synthetic oligonucleotide
guauaauccucuaacauuc

SEQ ID NO: 1669594 - RNA, 19 nt, Artificial Sequence
  Description of Artificial Sequence: Synthetic oligonucleotide
acauaucaaugucaucacg

SEQ ID NO: 1669595 - RNA, 19 nt, Artificial Sequence
  Description of Artificial Sequence: Synthetic oligonucleotide
caaguuucucaaaacuuag

SEQ ID NO: 1669596 - RNA, 19 nt, Artificial Sequence
  Description of Artificial Sequence: Synthetic oligonucleotide
uuucauaagaguguguuuu

SEQ ID NO: 1669597 - RNA, 19 nt, Artificial Sequence
  Description of Artificial Sequence: Synthetic oligonucleotide
augucaagaauggucaagg

SEQ ID NO: 1669598 - RNA, 19 nt, Artificial Sequence
  Description of Artificial Sequence: Synthetic oligonucleotide
uggucaaggagcuugcugu

SEQ ID NO: 1669599 - RNA, 19 nt, Artificial Sequence
  Description of Artificial Sequence: Synthetic oligonucleotide
aagaguguguuuuaucaua

SEQ ID NO: 1669600 - RNA, 19 nt, Artificial Sequence
  Description of Artificial Sequence: Synthetic oligonucleotide
uguugaucaaauagcacua

SEQ ID NO: 1669601 - RNA, 19 nt, Artificial Sequence
  Description of Artificial Sequence: Synthetic oligonucleotide
uaucccaguauuuuccaca

SEQ ID NO: 1669602 - RNA, 19 nt, Artificial Sequence
  Description of Artificial Sequence: Synthetic oligonucleotide
gugaucggacuuuugaaag

SEQ ID NO: 1669603 - RNA, 19 nt, Artificial Sequence
  Description of Artificial Sequence: Synthetic oligonucleotide
uuuaagccagaacauuuuc

SEQ ID NO: 1669604 - RNA, 19 nt, Artificial Sequence
  Description of Artificial Sequence: Synthetic oligonucleotide
aggaauuuuccccuuguca

SEQ ID NO: 1669605 - RNA, 19 nt, Artificial Sequence
  Description of Artificial Sequence: Synthetic oligonucleotide
aaucugucccguccguggg

SEQ ID NO: 1669606 - RNA, 19 nt, Artificial Sequence
  Description of Artificial Sequence: Synthetic oligonucleotide
aacaucuacuuacauuaau

SEQ ID NO: 1669607 - RNA, 19 nt, Artificial Sequence
  Description of Artificial Sequence: Synthetic oligonucleotide
aaagaugcuuccaaaucug

SEQ ID NO: 1669608 - RNA, 19 nt, Artificial Sequence
  Description of Artificial Sequence: Synthetic oligonucleotide
auaggaugacaguaagaag

SEQ ID NO: 1669609 - RNA, 19 nt, Artificial Sequence
  Description of Artificial Sequence: Synthetic oligonucleotide
caucaaauuagcuguggug

SEQ ID NO: 1669610 - RNA, 19 nt, Artificial Sequence
  Description of Artificial Sequence: Synthetic oligonucleotide
uccacucccuucuagggag

SEQ ID NO: 1669611 - RNA, 19 nt, Artificial Sequence
  Description of Artificial Sequence: Synthetic oligonucleotide
agagcuguauuuaagccag

SEQ ID NO: 1669612 - RNA, 19 nt, Artificial Sequence
  Description of Artificial Sequence: Synthetic oligonucleotide
agcuaucccaguauuuucc

SEQ ID NO: 1669613 - RNA, 19 nt, Artificial Sequence
  Description of Artificial Sequence: Synthetic oligonucleotide
uguguugaucaaauagcac

SEQ ID NO: 1669614 - RNA, 19 nt, Artificial Sequence
  Description of Artificial Sequence: Synthetic oligonucleotide
aagacuagucuaauccauc

SEQ ID NO: 1669615 - RNA, 19 nt, Artificial Sequence
  Description of Artificial Sequence: Synthetic oligonucleotide
auacacccacuuuaaccgc

SEQ ID NO: 1669616 - RNA, 19 nt, Artificial Sequence
  Description of Artificial Sequence: Synthetic oligonucleotide
gaaggaggaggccauagca

SEQ ID NO: 1669617 - RNA, 19 nt, Artificial Sequence
  Description of Artificial Sequence: Synthetic oligonucleotide
uauuucagccauccauuug

SEQ ID NO: 1669618 - RNA, 19 nt, Artificial Sequence
  Description of Artificial Sequence: Synthetic oligonucleotide
acuagucuaauccaucuua

SEQ ID NO: 1669619 - RNA, 19 nt, Artificial Sequence
  Description of Artificial Sequence: Synthetic oligonucleotide
gagagcuguauuuaagcca

SEQ ID NO: 1669620 - RNA, 19 nt, Artificial Sequence
  Description of Artificial Sequence: Synthetic oligonucleotide
uccauuuggguggagagcu

SEQ ID NO: 1669621 - RNA, 19 nt, Artificial Sequence
  Description of Artificial Sequence: Synthetic oligonucleotide
aguaagaaggaggaggcca

SEQ ID NO: 1669622 - RNA, 19 nt, Artificial Sequence
  Description of Artificial Sequence: Synthetic oligonucleotide
cuagucuaauccaucuuac

SEQ ID NO: 1669623 - RNA, 19 nt, Artificial Sequence
  Description of Artificial Sequence: Synthetic oligonucleotide
caaaguaucuggaagggaa

SEQ ID NO: 1669624 - RNA, 19 nt, Artificial Sequence
  Description of Artificial Sequence: Synthetic oligonucleotide
acauucaacuagcaaagaa

SEQ ID NO: 1669625 - RNA, 19 nt, Artificial Sequence
  Description of Artificial Sequence: Synthetic oligonucleotide
auuagcuguggugaggcuc

SEQ ID NO: 1669626 - RNA, 19 nt, Artificial Sequence
  Description of Artificial Sequence: Synthetic oligonucleotide
agacuagucuaauccaucu

SEQ ID NO: 1669627 - RNA, 19 nt, Artificial Sequence
  Description of Artificial Sequence: Synthetic oligonucleotide
uucagcaacaccugguaau

SEQ ID NO: 1669628 - RNA, 19 nt, Artificial Sequence
  Description of Artificial Sequence: Synthetic oligonucleotide
aauauugagggaacuuccu

SEQ ID NO: 1669629 - RNA, 19 nt, Artificial Sequence
  Description of Artificial Sequence: Synthetic oligonucleotide
agcaaaguaucuggaaggg

SEQ ID NO: 1669630 - RNA, 19 nt, Artificial Sequence
  Description of Artificial Sequence: Synthetic oligonucleotide
guguugaucaaauagcacu

SEQ ID NO: 1669631 - RNA, 19 nt, Artificial Sequence
  Description of Artificial Sequence: Synthetic oligonucleotide
aaaacaccaacuaccggcu

SEQ ID NO: 1669632 - RNA, 19 nt, Artificial Sequence
  Description of Artificial Sequence: Synthetic oligonucleotide
agugaucggacuuuugaaa

SEQ ID NO: 1669633 - RNA, 19 nt, Artificial Sequence
  Description of Artificial Sequence: Synthetic oligonucleotide
ucacguucuauuucagcca

SEQ ID NO: 1669634 - RNA, 19 nt, Artificial Sequence
  Description of Artificial Sequence: Synthetic oligonucleotide
cauccauuuggguggagag

SEQ ID NO: 1669635 - RNA, 19 nt, Artificial Sequence
  Description of Artificial Sequence: Synthetic oligonucleotide
agagcuuuucuuccuauaa

SEQ ID NO: 1669636 - RNA, 19 nt, Artificial Sequence
  Description of Artificial Sequence: Synthetic oligonucleotide
ugaaccucaagaguacugu

SEQ ID NO: 1669637 - RNA, 19 nt, Artificial Sequence
  Description of Artificial Sequence: Synthetic oligonucleotide
augacaguaagaaggagga

SEQ ID NO: 1669638 - RNA, 19 nt, Artificial Sequence
  Description of Artificial Sequence: Synthetic oligonucleotide
acaaaguauaauccucuaa

SEQ ID NO: 1669639 - RNA, 19 nt, Artificial Sequence
  Description of Artificial Sequence: Synthetic oligonucleotide
aaagacuagucuaauccau

SEQ ID NO: 1669640 - RNA, 19 nt, Artificial Sequence
  Description of Artificial Sequence: Synthetic oligonucleotide
uuaaccgcauuuagugaga

SEQ ID NO: 1669641 - RNA, 19 nt, Artificial Sequence
  Description of Artificial Sequence: Synthetic oligonucleotide
aaaacuuagcaaagaugcu

SEQ ID NO: 1669642 - RNA, 19 nt, Artificial Sequence
  Description of Artificial Sequence: Synthetic oligonucleotide
auagcacuaaugaagggga

SEQ ID NO: 1669643 - RNA, 19 nt, Artificial Sequence
  Description of Artificial Sequence: Synthetic oligonucleotide
ugaucggacuuuugaaaga

SEQ ID NO: 1669644 - RNA, 19 nt, Artificial Sequence
  Description of Artificial Sequence: Synthetic oligonucleotide
ccaaacucugaaaagugcc

SEQ ID NO: 1669645 - RNA, 19 nt, Artificial Sequence
  Description of Artificial Sequence: Synthetic oligonucleotide
ccuaacagauacauggccc

SEQ ID NO: 1669646 - RNA, 19 nt, Artificial Sequence
  Description of Artificial Sequence: Synthetic oligonucleotide
uauaauccucuaacauucu

SEQ ID NO: 1669647 - RNA, 19 nt, Artificial Sequence
  Description of Artificial Sequence: Synthetic oligonucleotide
aggcauuauuuuccgauca

SEQ ID NO: 1669648 - RNA, 19 nt, Artificial Sequence
  Description of Artificial Sequence: Synthetic oligonucleotide
agcgguugcuacuucuuag

SEQ ID NO: 1669649 - RNA, 19 nt, Artificial Sequence
  Description of Artificial Sequence: Synthetic oligonucleotide
acaccaacuaccggcuucc

SEQ ID NO: 1669650 - RNA, 19 nt, Artificial Sequence
  Description of Artificial Sequence: Synthetic oligonucleotide
ucucaaaacuuagcaaaga

SEQ ID NO: 1669651 - RNA, 19 nt, Artificial Sequence
  Description of Artificial Sequence: Synthetic oligonucleotide
uacuuaucuucugugguac

SEQ ID NO: 1669652 - RNA, 19 nt, Artificial Sequence
  Description of Artificial Sequence: Synthetic oligonucleotide
ugucaucacguucuauuuc

SEQ ID NO: 1669653 - RNA, 19 nt, Artificial Sequence
  Description of Artificial Sequence: Synthetic oligonucleotide
ugugcccuaacagauacau

SEQ ID NO: 1669654 - RNA, 19 nt, Artificial Sequence
  Description of Artificial Sequence: Synthetic oligonucleotide
uaagaguguguuuuaucau

SEQ ID NO: 1669655 - RNA, 19 nt, Artificial Sequence
  Description of Artificial Sequence: Synthetic oligonucleotide
aaucacagacucaagcuua

SEQ ID NO: 1669656 - RNA, 19 nt, Artificial Sequence
  Description of Artificial Sequence: Synthetic oligonucleotide
ucaaggagcuugcugugaa

SEQ ID NO: 1669657 - RNA, 19 nt, Artificial Sequence
  Description of Artificial Sequence: Synthetic oligonucleotide
cuagugaucggacuuuuga

SEQ ID NO: 1669658 - RNA, 19 nt, Artificial Sequence
  Description of Artificial Sequence: Synthetic oligonucleotide
uucucauacuuaucuucug

SEQ ID NO: 1669659 - RNA, 19 nt, Artificial Sequence
  Description of Artificial Sequence: Synthetic oligonucleotide
cagcaauucuagcauuagg

SEQ ID NO: 1669660 - RNA, 19 nt, Artificial Sequence
  Description of Artificial Sequence: Synthetic oligonucleotide
auaucaaugucaucacguu

SEQ ID NO: 1669661 - RNA, 19 nt, Artificial Sequence
  Description of Artificial Sequence: Synthetic oligonucleotide
gaaccucaagaguacugug

SEQ ID NO: 1669662 - RNA, 19 nt, Artificial Sequence
  Description of Artificial Sequence: Synthetic oligonucleotide
uagugaucggacuuuugaa

SEQ ID NO: 1669663 - RNA, 19 nt, Artificial Sequence
  Description of Artificial Sequence: Synthetic oligonucleotide
caaauuagcuguggugagg

SEQ ID NO: 1669664 - RNA, 19 nt, Artificial Sequence
  Description of Artificial Sequence: Synthetic oligonucleotide
acuaccggcuucccauuac

SEQ ID NO: 1669665 - RNA, 19 nt, Artificial Sequence
  Description of Artificial Sequence: Synthetic oligonucleotide
ugucaagaauggucaagga

SEQ ID NO: 1669666 - RNA, 19 nt, Artificial Sequence
  Description of Artificial Sequence: Synthetic oligonucleotide
acauuucuaaggaugacaa

SEQ ID NO: 1669667 - RNA, 19 nt, Artificial Sequence
  Description of Artificial Sequence: Synthetic oligonucleotide
agagcuagugaucggacuu

SEQ ID NO: 1669668 - RNA, 19 nt, Artificial Sequence
  Description of Artificial Sequence: Synthetic oligonucleotide
cgaucacucauauacaccc

SEQ ID NO: 1669669 - RNA, 19 nt, Artificial Sequence
  Description of Artificial Sequence: Synthetic oligonucleotide
auacaucauuaacauuucu

SEQ ID NO: 1669670 - RNA, 19 nt, Artificial Sequence
  Description of Artificial Sequence: Synthetic oligonucleotide
uacuuuucaauguccccaa

SEQ ID NO: 1669671 - RNA, 19 nt, Artificial Sequence
  Description of Artificial Sequence: Synthetic oligonucleotide
auuuaagugcuggugaaua

SEQ ID NO: 1669672 - RNA, 19 nt, Artificial Sequence
  Description of Artificial Sequence: Synthetic oligonucleotide
auacuuaucuucuguggua

SEQ ID NO: 1669673 - RNA, 19 nt, Artificial Sequence
  Description of Artificial Sequence: Synthetic oligonucleotide
ugcuuccaaaucugucccg

SEQ ID NO: 1669674 - RNA, 19 nt, Artificial Sequence
  Description of Artificial Sequence: Synthetic oligonucleotide
gacaccugugcucgagcgg

SEQ ID NO: 1669675 - RNA, 19 nt, Artificial Sequence
  Description of Artificial Sequence: Synthetic oligonucleotide
acucaagcuuaaaauccac

SEQ ID NO: 1669676 - RNA, 19 nt, Artificial Sequence
  Description of Artificial Sequence: Synthetic oligonucleotide
aacucccaccggaugacgg

SEQ ID NO: 1669677 - RNA, 19 nt, Artificial Sequence
  Description of Artificial Sequence: Synthetic oligonucleotide
uccaucuuaccaugggcaa

SEQ ID NO: 1669678 - RNA, 19 nt, Artificial Sequence
  Description of Artificial Sequence: Synthetic oligonucleotide
auuuuccgaucacucauau

SEQ ID NO: 1669679 - RNA, 19 nt, Artificial Sequence
  Description of Artificial Sequence: Synthetic oligonucleotide
aauuagcuguggugaggcu

SEQ ID NO: 1669680 - RNA, 19 nt, Artificial Sequence
  Description of Artificial Sequence: Synthetic oligonucleotide
uucauaagaguguguuuua

SEQ ID NO: 1669681 - RNA, 19 nt, Artificial Sequence
  Description of Artificial Sequence: Synthetic oligonucleotide
cuuuaaccgcauuuaguga

SEQ ID NO: 1669682 - RNA, 19 nt, Artificial Sequence
  Description of Artificial Sequence: Synthetic oligonucleotide
guugcuacuucuuaggcuu

SEQ ID NO: 1669683 - RNA, 19 nt, Artificial Sequence
  Description of Artificial Sequence: Synthetic oligonucleotide
gccauagcagaucaaaaca

SEQ ID NO: 1669684 - RNA, 19 nt, Artificial Sequence
  Description of Artificial Sequence: Synthetic oligonucleotide
cugaaaagugccugauguc

SEQ ID NO: 1669685 - RNA, 19 nt, Artificial Sequence
  Description of Artificial Sequence: Synthetic oligonucleotide
uaccggcuucccauuacag

SEQ ID NO: 1669686 - RNA, 19 nt, Artificial Sequence
  Description of Artificial Sequence: Synthetic oligonucleotide
aaacuguguugaucaaaua

SEQ ID NO: 1669687 - RNA, 19 nt, Artificial Sequence
  Description of Artificial Sequence: Synthetic oligonucleotide
gugaaagacuagucuaauc

SEQ ID NO: 1669688 - RNA, 19 nt, Artificial Sequence
  Description of Artificial Sequence: Synthetic oligonucleotide
auaauccucuaacauucua

SEQ ID NO: 1669689 - RNA, 19 nt, Artificial Sequence
  Description of Artificial Sequence: Synthetic oligonucleotide
gaauaggaugacaguaaga

SEQ ID NO: 1669690 - RNA, 19 nt, Artificial Sequence
  Description of Artificial Sequence: Synthetic oligonucleotide
aaacucccaccggaugacg

SEQ ID NO: 1669691 - RNA, 19 nt, Artificial Sequence
  Description of Artificial Sequence: Synthetic oligonucleotide
acagcaauucuagcauuag

SEQ ID NO: 1669692 - RNA, 19 nt, Artificial Sequence
  Description of Artificial Sequence: Synthetic oligonucleotide
ggccauagcagaucaaaac

SEQ ID NO: 1669693 - RNA, 19 nt, Artificial Sequence
  Description of Artificial Sequence: Synthetic oligonucleotide
ugugaaagacuagucuaau

SEQ ID NO: 1669694 - RNA, 19 nt, Artificial Sequence
  Description of Artificial Sequence: Synthetic oligonucleotide
gcaauucuagcauuaggca

SEQ ID NO: 1669695 - RNA, 19 nt, Artificial Sequence
  Description of Artificial Sequence: Synthetic oligonucleotide
gagcuaucccaguauuuuc

SEQ ID NO: 1669696 - RNA, 19 nt, Artificial Sequence
  Description of Artificial Sequence: Synthetic oligonucleotide
uaacauuucuaaggaugac

SEQ ID NO: 1669697 - RNA, 19 nt, Artificial Sequence
  Description of Artificial Sequence: Synthetic oligonucleotide
cagaucaaaacaccaacua

SEQ ID NO: 1669698 - RNA, 19 nt, Artificial Sequence
  Description of Artificial Sequence: Synthetic oligonucleotide
caggccaaagaucuggcga

SEQ ID NO: 1669699 - RNA, 19 nt, Artificial Sequence
  Description of Artificial Sequence: Synthetic oligonucleotide
cauacuuaucuucuguggu

SEQ ID NO: 1669700 - RNA, 19 nt, Artificial Sequence
  Description of Artificial Sequence: Synthetic oligonucleotide
acggccacagagcuuuucu

SEQ ID NO: 1669701 - RNA, 19 nt, Artificial Sequence
  Description of Artificial Sequence: Synthetic oligonucleotide
agaguguguuuuaucauau

SEQ ID NO: 1669702 - RNA, 19 nt, Artificial Sequence
  Description of Artificial Sequence: Synthetic oligonucleotide
uaacagauacauggcccug

SEQ ID NO: 1669703 - RNA, 19 nt, Artificial Sequence
  Description of Artificial Sequence: Synthetic oligonucleotide
auccacucccuucuaggga

SEQ ID NO: 1669704 - RNA, 19 nt, Artificial Sequence
  Description of Artificial Sequence: Synthetic oligonucleotide
ggacaccugugcucgagcg

SEQ ID NO: 1669705 - RNA, 19 nt, Artificial Sequence
  Description of Artificial Sequence: Synthetic oligonucleotide
aggagcuugcugugaaccu

SEQ ID NO: 1669706 - RNA, 19 nt, Artificial Sequence
  Description of Artificial Sequence: Synthetic oligonucleotide
ggaauuuuccccuugucau

SEQ ID NO: 1669707 - RNA, 19 nt, Artificial Sequence
  Description of Artificial Sequence: Synthetic oligonucleotide
acuuaucuucugugguaca

SEQ ID NO: 1669708 - RNA, 19 nt, Artificial Sequence
  Description of Artificial Sequence: Synthetic oligonucleotide
cauuaggcacaaaugucaa

SEQ ID NO: 1669709 - RNA, 19 nt, Artificial Sequence
  Description of Artificial Sequence: Synthetic oligonucleotide
ucgagcgguugcuacuucu

SEQ ID NO: 1669710 - RNA, 19 nt, Artificial Sequence
  Description of Artificial Sequence: Synthetic oligonucleotide
uuaccaugggcaagauuuu

SEQ ID NO: 1669711 - RNA, 19 nt, Artificial Sequence
  Description of Artificial Sequence: Synthetic oligonucleotide
acccacuuuaaccgcauuu

SEQ ID NO: 1669712 - RNA, 19 nt, Artificial Sequence
  Description of Artificial Sequence: Synthetic oligonucleotide
gcgguugcuacuucuuagg

SEQ ID NO: 1669713 - RNA, 19 nt, Artificial Sequence
  Description of Artificial Sequence: Synthetic oligonucleotide
gugaauaggaugacaguaa

SEQ ID NO: 1669714 - RNA, 19 nt, Artificial Sequence
  Description of Artificial Sequence: Synthetic oligonucleotide
ggugaauaggaugacagua

SEQ ID NO: 1669715 - RNA, 19 nt, Artificial Sequence
  Description of Artificial Sequence: Synthetic oligonucleotide
augugaaagacuagucuaa

SEQ ID NO: 1669716 - RNA, 19 nt, Artificial Sequence
  Description of Artificial Sequence: Synthetic oligonucleotide
cuccuguguccaaacuccc

SEQ ID NO: 1669717 - RNA, 19 nt, Artificial Sequence
  Description of Artificial Sequence: Synthetic oligonucleotide
gugaaccucaagaguacug

SEQ ID NO: 1669718 - RNA, 19 nt, Artificial Sequence
  Description of Artificial Sequence: Synthetic oligonucleotide
ccggaugacggccacagag

SEQ ID NO: 1669719 - RNA, 19 nt, Artificial Sequence
  Description of Artificial Sequence: Synthetic oligonucleotide
acagagcuuuucuuccuau

SEQ ID NO: 1669720 - RNA, 19 nt, Artificial Sequence
  Description of Artificial Sequence: Synthetic oligonucleotide
uagcacuaaugaaggggaa

SEQ ID NO: 1669721 - RNA, 19 nt, Artificial Sequence
  Description of Artificial Sequence: Synthetic oligonucleotide
ucuggcgaggcacggucaa

SEQ ID NO: 1669722 - RNA, 19 nt, Artificial Sequence
  Description of Artificial Sequence: Synthetic oligonucleotide
cucaaaacuuagcaaagau

SEQ ID NO: 1669723 - RNA, 19 nt, Artificial Sequence
  Description of Artificial Sequence: Synthetic oligonucleotide
cauuaauuuaagugcuggu

SEQ ID NO: 1669724 - RNA, 19 nt, Artificial Sequence
  Description of Artificial Sequence: Synthetic oligonucleotide
cugauaggccagguucugg

SEQ ID NO: 1669725 - RNA, 19 nt, Artificial Sequence
  Description of Artificial Sequence: Synthetic oligonucleotide
cccuaacagauacauggcc

SEQ ID NO: 1669726 - RNA, 19 nt, Artificial Sequence
  Description of Artificial Sequence: Synthetic oligonucleotide
agcacuaaugaaggggaaa

SEQ ID NO: 1669727 - RNA, 19 nt, Artificial Sequence
  Description of Artificial Sequence: Synthetic oligonucleotide
ucuuaccaugggcaagauu

SEQ ID NO: 1669728 - RNA, 19 nt, Artificial Sequence
  Description of Artificial Sequence: Synthetic oligonucleotide
guggagagcuagugaucgg

SEQ ID NO: 1669729 - RNA, 19 nt, Artificial Sequence
  Description of Artificial Sequence: Synthetic oligonucleotide
accaacuaccggcuuccca

SEQ ID NO: 1669730 - RNA, 19 nt, Artificial Sequence
  Description of Artificial Sequence: Synthetic oligonucleotide
ugcucgagcgguugcuacu

SEQ ID NO: 1669731 - RNA, 19 nt, Artificial Sequence
  Description of Artificial Sequence: Synthetic oligonucleotide
aacuaccggcuucccauua

SEQ ID NO: 1669732 - RNA, 19 nt, Artificial Sequence
  Description of Artificial Sequence: Synthetic oligonucleotide
agcuguauuuaagccagaa

SEQ ID NO: 1669733 - RNA, 19 nt, Artificial Sequence
  Description of Artificial Sequence: Synthetic oligonucleotide
ucguaccuucuccaucaaa

SEQ ID NO: 1669734 - RNA, 19 nt, Artificial Sequence
  Description of Artificial Sequence: Synthetic oligonucleotide
uacugugcccuaacagaua

SEQ ID NO: 1669735 - RNA, 19 nt, Artificial Sequence
  Description of Artificial Sequence: Synthetic oligonucleotide
aaacaccaacuaccggcuu

SEQ ID NO: 1669736 - RNA, 19 nt, Artificial Sequence
  Description of Artificial Sequence: Synthetic oligonucleotide
ucaagaguacugugcccua

SEQ ID NO: 1669737 - RNA, 19 nt, Artificial Sequence
  Description of Artificial Sequence: Synthetic oligonucleotide
ggcauuauuuuccgaucac

SEQ ID NO: 1669738 - RNA, 19 nt, Artificial Sequence
  Description of Artificial Sequence: Synthetic oligonucleotide
caggaauuuuccccuuguc

SEQ ID NO: 1669739 - RNA, 19 nt, Artificial Sequence
  Description of Artificial Sequence: Synthetic oligonucleotide
caaacucccaccggaugac

SEQ ID NO: 1669740 - RNA, 19 nt, Artificial Sequence
  Description of Artificial Sequence: Synthetic oligonucleotide
ugucccguccgugggagac

SEQ ID NO: 1669741 - RNA, 19 nt, Artificial Sequence
  Description of Artificial Sequence: Synthetic oligonucleotide
uuauggucuucaggacacc

SEQ ID NO: 1669742 - RNA, 19 nt, Artificial Sequence
  Description of Artificial Sequence: Synthetic oligonucleotide
cuuccaaaucugucccguc

SEQ ID NO: 1669743 - RNA, 19 nt, Artificial Sequence
  Description of Artificial Sequence: Synthetic oligonucleotide
ccgaucacucauauacacc

SEQ ID NO: 1669744 - RNA, 19 nt, Artificial Sequence
  Description of Artificial Sequence: Synthetic oligonucleotide
caccggaugacggccacag

SEQ ID NO: 1669745 - RNA, 19 nt, Artificial Sequence
  Description of Artificial Sequence: Synthetic oligonucleotide
cguucuauuucagccaucc

SEQ ID NO: 1669746 - RNA, 19 nt, Artificial Sequence
  Description of Artificial Sequence: Synthetic oligonucleotide
uaggauguucaggaauuuu

SEQ ID NO: 1669747 - RNA, 19 nt, Artificial Sequence
  Description of Artificial Sequence: Synthetic oligonucleotide
ccuguguccaaacucccac

SEQ ID NO: 1669748 - RNA, 19 nt, Artificial Sequence
  Description of Artificial Sequence: Synthetic oligonucleotide
cacuuuaaccgcauuuagu

SEQ ID NO: 1669749 - RNA, 19 nt, Artificial Sequence
  Description of Artificial Sequence: Synthetic oligonucleotide
caguaagaaggaggaggcc

SEQ ID NO: 1669750 - RNA, 19 nt, Artificial Sequence
  Description of Artificial Sequence: Synthetic oligonucleotide
uggcgaggcacggucaagu

SEQ ID NO: 1669751 - RNA, 19 nt, Artificial Sequence
  Description of Artificial Sequence: Synthetic oligonucleotide
ccucuaacauucuaaaaua

SEQ ID NO: 1669752 - RNA, 19 nt, Artificial Sequence
  Description of Artificial Sequence: Synthetic oligonucleotide
aaccgcauuuagugagaua

SEQ ID NO: 1669753 - RNA, 19 nt, Artificial Sequence
  Description of Artificial Sequence: Synthetic oligonucleotide
uaaccgcauuuagugagau

SEQ ID NO: 1669754 - RNA, 19 nt, Artificial Sequence
  Description of Artificial Sequence: Synthetic oligonucleotide
ccacauacuuuucaauguc

SEQ ID NO: 1669755 - RNA, 19 nt, Artificial Sequence
  Description of Artificial Sequence: Synthetic oligonucleotide
gagagcuagugaucggacu

SEQ ID NO: 1669756 - RNA, 19 nt, Artificial Sequence
  Description of Artificial Sequence: Synthetic oligonucleotide
cucaagaguacugugcccu

SEQ ID NO: 1669757 - RNA, 19 nt, Artificial Sequence
  Description of Artificial Sequence: Synthetic oligonucleotide
ucccuucuagggaguacuc

SEQ ID NO: 1669758 - RNA, 19 nt, Artificial Sequence
  Description of Artificial Sequence: Synthetic oligonucleotide
acuuuucaauguccccaaa

SEQ ID NO: 1669759 - RNA, 19 nt, Artificial Sequence
  Description of Artificial Sequence: Synthetic oligonucleotide
ccccaaacucugaaaagug

SEQ ID NO: 1669760 - RNA, 19 nt, Artificial Sequence
  Description of Artificial Sequence: Synthetic oligonucleotide
cauuaacauuucuaaggau

SEQ ID NO: 1669761 - RNA, 19 nt, Artificial Sequence
  Description of Artificial Sequence: Synthetic oligonucleotide
cagauacauggcccuggac

SEQ ID NO: 1669762 - RNA, 19 nt, Artificial Sequence
  Description of Artificial Sequence: Synthetic oligonucleotide
gaaaagugccugaugucau

SEQ ID NO: 1669763 - RNA, 19 nt, Artificial Sequence
  Description of Artificial Sequence: Synthetic oligonucleotide
ggaugacaguaagaaggag

SEQ ID NO: 1669764 - RNA, 19 nt, Artificial Sequence
  Description of Artificial Sequence: Synthetic oligonucleotide
auucuagcauuaggcacaa

SEQ ID NO: 1669765 - RNA, 19 nt, Artificial Sequence
  Description of Artificial Sequence: Synthetic oligonucleotide
cucccaccggaugacggcc

SEQ ID NO: 1669766 - RNA, 19 nt, Artificial Sequence
  Description of Artificial Sequence: Synthetic oligonucleotide
gcuaucccaguauuuucca

SEQ ID NO: 1669767 - RNA, 19 nt, Artificial Sequence
  Description of Artificial Sequence: Synthetic oligonucleotide
ucccaccggaugacggcca

SEQ ID NO: 1669768 - RNA, 19 nt, Artificial Sequence
  Description of Artificial Sequence: Synthetic oligonucleotide
aucugucccguccguggga

SEQ ID NO: 1669769 - RNA, 19 nt, Artificial Sequence
  Description of Artificial Sequence: Synthetic oligonucleotide
gguugcuacuucuuaggcu

SEQ ID NO: 1669770 - RNA, 19 nt, Artificial Sequence
  Description of Artificial Sequence: Synthetic oligonucleotide
gugcucgagcgguugcuac

SEQ ID NO: 1669771 - RNA, 19 nt, Artificial Sequence
  Description of Artificial Sequence: Synthetic oligonucleotide
ccaaacucccaccggauga

SEQ ID NO: 1669772 - RNA, 19 nt, Artificial Sequence
  Description of Artificial Sequence: Synthetic oligonucleotide
aucacagacucaagcuuaa

SEQ ID NO: 1669773 - RNA, 19 nt, Artificial Sequence
  Description of Artificial Sequence: Synthetic oligonucleotide
ccucaagaguacugugccc

SEQ ID NO: 1669774 - RNA, 19 nt, Artificial Sequence
  Description of Artificial Sequence: Synthetic oligonucleotide
gagcgguugcuacuucuua

SEQ ID NO: 1669775 - RNA, 19 nt, Artificial Sequence
  Description of Artificial Sequence: Synthetic oligonucleotide
gacuagucuaauccaucuu

SEQ ID NO: 1669776 - RNA, 19 nt, Artificial Sequence
  Description of Artificial Sequence: Synthetic oligonucleotide
ucacagacucaagcuuaaa

SEQ ID NO: 1669777 - RNA, 19 nt, Artificial Sequence
  Description of Artificial Sequence: Synthetic oligonucleotide
ugugcucgagcgguugcua

SEQ ID NO: 1669778 - RNA, 19 nt, Artificial Sequence
  Description of Artificial Sequence: Synthetic oligonucleotide
gucaaggagcuugcuguga

SEQ ID NO: 1669779 - RNA, 19 nt, Artificial Sequence
  Description of Artificial Sequence: Synthetic oligonucleotide
cuuaucuucugugguacau

SEQ ID NO: 1669780 - RNA, 19 nt, Artificial Sequence
  Description of Artificial Sequence: Synthetic oligonucleotide
ggagagcuagugaucggac

SEQ ID NO: 1669781 - RNA, 19 nt, Artificial Sequence
  Description of Artificial Sequence: Synthetic oligonucleotide
guaagaaggaggaggccau

SEQ ID NO: 1669782 - RNA, 19 nt, Artificial Sequence
  Description of Artificial Sequence: Synthetic oligonucleotide
accugugcucgagcgguug

SEQ ID NO: 1669783 - RNA, 19 nt, Artificial Sequence
  Description of Artificial Sequence: Synthetic oligonucleotide
gugcccuaacagauacaug

SEQ ID NO: 1669784 - RNA, 19 nt, Artificial Sequence
  Description of Artificial Sequence: Synthetic oligonucleotide
cacguucuauuucagccau

SEQ ID NO: 1669785 - RNA, 19 nt, Artificial Sequence
  Description of Artificial Sequence: Synthetic oligonucleotide
gcagaucaaaacaccaacu

SEQ ID NO: 1669786 - RNA, 19 nt, Artificial Sequence
  Description of Artificial Sequence: Synthetic oligonucleotide
gcaaaguaucuggaaggga

SEQ ID NO: 1669787 - RNA, 19 nt, Artificial Sequence
  Description of Artificial Sequence: Synthetic oligonucleotide
agcuagugaucggacuuuu

SEQ ID NO: 1669788 - RNA, 19 nt, Artificial Sequence
  Description of Artificial Sequence: Synthetic oligonucleotide
ggugaggcuccccaauucu

SEQ ID NO: 1669789 - RNA, 19 nt, Artificial Sequence
  Description of Artificial Sequence: Synthetic oligonucleotide
cccuucuagggaguacucc

SEQ ID NO: 1669790 - RNA, 19 nt, Artificial Sequence
  Description of Artificial Sequence: Synthetic oligonucleotide
cacggucaaguuucucaaa

SEQ ID NO: 1669791 - RNA, 19 nt, Artificial Sequence
  Description of Artificial Sequence: Synthetic oligonucleotide
cucccuucuagggaguacu

SEQ ID NO: 1669792 - RNA, 19 nt, Artificial Sequence
  Description of Artificial Sequence: Synthetic oligonucleotide
caagaguacugugcccuaa

SEQ ID NO: 1669793 - RNA, 19 nt, Artificial Sequence
  Description of Artificial Sequence: Synthetic oligonucleotide
gcuagugaucggacuuuug

SEQ ID NO: 1669794 - RNA, 19 nt, Artificial Sequence
  Description of Artificial Sequence: Synthetic oligonucleotide
gguacauauuucauugcuu

SEQ ID NO: 1669795 - RNA, 19 nt, Artificial Sequence
  Description of Artificial Sequence: Synthetic oligonucleotide
ggagcuaucccaguauuuu

SEQ ID NO: 1669796 - RNA, 19 nt, Artificial Sequence
  Description of Artificial Sequence: Synthetic oligonucleotide
cucgagcgguugcuacuuc

SEQ ID NO: 1669797 - RNA, 19 nt, Artificial Sequence
  Description of Artificial Sequence: Synthetic oligonucleotide
ccugugcucgagcgguugc

SEQ ID NO: 1669798 - RNA, 19 nt, Artificial Sequence
  Description of Artificial Sequence: Synthetic oligonucleotide
cuggcgaggcacggucaag

SEQ ID NO: 1669799 - RNA, 19 nt, Artificial Sequence
  Description of Artificial Sequence: Synthetic oligonucleotide
aucuuaccaugggcaagau

SEQ ID NO: 1669800 - RNA, 19 nt, Artificial Sequence
  Description of Artificial Sequence: Synthetic oligonucleotide
gagcuguauuuaagccaga

SEQ ID NO: 1669801 - RNA, 19 nt, Artificial Sequence
  Description of Artificial Sequence: Synthetic oligonucleotide
gguaauuguucaggccaaa

SEQ ID NO: 1669802 - RNA, 19 nt, Artificial Sequence
  Description of Artificial Sequence: Synthetic oligonucleotide
cgcauuuagugagauaaaa

SEQ ID NO: 1669803 - RNA, 19 nt, Artificial Sequence
  Description of Artificial Sequence: Synthetic oligonucleotide
caccaacuaccggcuuccc

SEQ ID NO: 1669804 - RNA, 19 nt, Artificial Sequence
  Description of Artificial Sequence: Synthetic oligonucleotide
cccacuuuaaccgcauuua

SEQ ID NO: 1669805 - RNA, 19 nt, Artificial Sequence
  Description of Artificial Sequence: Synthetic oligonucleotide
gagcuagugaucggacuuu

SEQ ID NO: 1669806 - RNA, 19 nt, Artificial Sequence
  Description of Artificial Sequence: Synthetic oligonucleotide
ccauccauuuggguggaga

SEQ ID NO: 1669807 - RNA, 19 nt, Artificial Sequence
  Description of Artificial Sequence: Synthetic oligonucleotide
guggugaggcuccccaauu

SEQ ID NO: 1669808 - RNA, 19 nt, Artificial Sequence
  Description of Artificial Sequence: Synthetic oligonucleotide
uucuagcauuaggcacaaa

SEQ ID NO: 1669809 - RNA, 19 nt, Artificial Sequence
  Description of Artificial Sequence: Synthetic oligonucleotide
guccaaacucccaccggau

SEQ ID NO: 1669810 - RNA, 19 nt, Artificial Sequence
  Description of Artificial Sequence: Synthetic oligonucleotide
ggggagcuaucccaguauu

SEQ ID NO: 1669811 - RNA, 19 nt, Artificial Sequence
  Description of Artificial Sequence: Synthetic oligonucleotide
ccauuacagacaagcuggu

SEQ ID NO: 1669812 - RNA, 19 nt, Artificial Sequence
  Description of Artificial Sequence: Synthetic oligonucleotide
gaggcacggucaaguuucu

SEQ ID NO: 1669813 - RNA, 19 nt, Artificial Sequence
  Description of Artificial Sequence: Synthetic oligonucleotide
ccgcauuuagugagauaaa

SEQ ID NO: 1669814 - RNA, 19 nt, Artificial Sequence
  Description of Artificial Sequence: Synthetic oligonucleotide
caacuaccggcuucccauu

SEQ ID NO: 1669815 - RNA, 19 nt, Artificial Sequence
  Description of Artificial Sequence: Synthetic oligonucleotide
gcaacaccugguaauuguu

SEQ ID NO: 1669816 - RNA, 19 nt, Artificial Sequence
  Description of Artificial Sequence: Synthetic oligonucleotide
cugugcucgagcgguugcu

SEQ ID NO: 1669817 - RNA, 19 nt, Artificial Sequence
  Description of Artificial Sequence: Synthetic oligonucleotide
cacucccuucuagggagua

SEQ ID NO: 1669818 - RNA, 19 nt, Artificial Sequence
  Description of Artificial Sequence: Synthetic oligonucleotide
cccaccggaugacggccac

SEQ ID NO: 1669819 - RNA, 19 nt, Artificial Sequence
  Description of Artificial Sequence: Synthetic oligonucleotide
ccguccgugggagacgcca

SEQ ID NO: 1669820 - RNA, 19 nt, Artificial Sequence
  Description of Artificial Sequence: Synthetic oligonucleotide
gcgaggcacggucaaguuu

SEQ ID NO: 1669821 - RNA, 19 nt, Artificial Sequence
  Description of Artificial Sequence: Synthetic oligonucleotide
gggagcuaucccaguauuu

SEQ ID NO: 1669822 - RNA, 19 nt, Artificial Sequence
  Description of Artificial Sequence: Synthetic oligonucleotide
ggccucguaccuucuccau

SEQ ID NO: 1669823 - RNA, 19 nt, Artificial Sequence
  Description of Artificial Sequence: Synthetic oligonucleotide
ggcgaggcacggucaaguu

SEQ ID NO: 1669824 - RNA, 19 nt, Artificial Sequence
  Description of Artificial Sequence: Synthetic oligonucleotide
ccauuuggguggagagcua

SEQ ID NO: 1669825 - RNA, 19 nt, Artificial Sequence
  Description of Artificial Sequence: Synthetic oligonucleotide
gcucgagcgguugcuacuu

SEQ ID NO: 1669826 - RNA, 19 nt, Artificial Sequence
  Description of Artificial Sequence: Synthetic oligonucleotide
cccguccgugggagacgcc

SEQ ID NO: 1669827 - RNA, 19 nt, Artificial Sequence
  Description of Artificial Sequence: Synthetic oligonucleotide
caccugugcucgagcgguu

SEQ ID NO: 1669828 - RNA, 19 nt, Artificial Sequence
  Description of Artificial Sequence: Synthetic oligonucleotide
cgagcgguugcuacuucuu

SEQ ID NO: 1669829 - RNA, 19 nt, Artificial Sequence
  Description of Artificial Sequence: Synthetic oligonucleotide
ccacucccuucuagggagu

SEQ ID NO: 1669830 - RNA, 19 nt, Artificial Sequence
  Description of Artificial Sequence: Synthetic oligonucleotide
ccaccggaugacggccaca

SEQ ID NO: 1669831 - RNA, 19 nt, Artificial Sequence
  Description of Artificial Sequence: Synthetic oligonucleotide
guacuccagcagagugcuu

SEQ ID NO: 1669832 - RNA, 19 nt, Artificial Sequence
  Description of Artificial Sequence: Synthetic oligonucleotide
cguccgugggagacgccau

SEQ ID NO: 1669833 - RNA, 19 nt, Artificial Sequence
  Description of Artificial Sequence: Synthetic oligonucleotide
ucuuggaucaggaaggugg

SEQ ID NO: 1669834 - RNA, 19 nt, Artificial Sequence
  Description of Artificial Sequence: Synthetic oligonucleotide
uugauaguagcugacaugg

SEQ ID NO: 1669835 - RNA, 19 nt, Artificial Sequence
  Description of Artificial Sequence: Synthetic oligonucleotide
cuaacaaggaccaucaaac

SEQ ID NO: 1669836 - RNA, 19 nt, Artificial Sequence
  Description of Artificial Sequence: Synthetic oligonucleotide
ugaugaaccagaugcaagg

SEQ ID NO: 1669837 - RNA, 19 nt, Artificial Sequence
  Description of Artificial Sequence: Synthetic oligonucleotide
aaaaccgcaacaugcuaac

SEQ ID NO: 1669838 - RNA, 19 nt, Artificial Sequence
  Description of Artificial Sequence: Synthetic oligonucleotide
acuguaaacgcucuucuuc

SEQ ID NO: 1669839 - RNA, 19 nt, Artificial Sequence
  Description of Artificial Sequence: Synthetic oligonucleotide
aacaaggaccaucaaacca

SEQ ID NO: 1669840 - RNA, 19 nt, Artificial Sequence
  Description of Artificial Sequence: Synthetic oligonucleotide
guaagauccccagagaugg

SEQ ID NO: 1669841 - RNA, 19 nt, Artificial Sequence
  Description of Artificial Sequence: Synthetic oligonucleotide
gaccuagagaggcagagcg

SEQ ID NO: 1669842 - RNA, 19 nt, Artificial Sequence
  Description of Artificial Sequence: Synthetic oligonucleotide
agaacuugccuacugugac

SEQ ID NO: 1669843 - RNA, 19 nt, Artificial Sequence
  Description of Artificial Sequence: Synthetic oligonucleotide
ugaaccagaugcaagggca

SEQ ID NO: 1669844 - RNA, 19 nt, Artificial Sequence
  Description of Artificial Sequence: Synthetic oligonucleotide
cuucagacauuccaggugg

SEQ ID NO: 1669845 - RNA, 19 nt, Artificial Sequence
  Description of Artificial Sequence: Synthetic oligonucleotide
aagaugucgucuucagagg

SEQ ID NO: 1669846 - RNA, 19 nt, Artificial Sequence
  Description of Artificial Sequence: Synthetic oligonucleotide
caucaaaccaugaaaccgc

SEQ ID NO: 1669847 - RNA, 19 nt, Artificial Sequence
  Description of Artificial Sequence: Synthetic oligonucleotide
cucggugucaccuugguug

SEQ ID NO: 1669848 - RNA, 19 nt, Artificial Sequence
  Description of Artificial Sequence: Synthetic oligonucleotide
uguugauaugcagugggcg

SEQ ID NO: 1669849 - RNA, 19 nt, Artificial Sequence
  Description of Artificial Sequence: Synthetic oligonucleotide
ugaaaguggaguccacuag

SEQ ID NO: 1669850 - RNA, 19 nt, Artificial Sequence
  Description of Artificial Sequence: Synthetic oligonucleotide
uuggcauuggaaccugugg

SEQ ID NO: 1669851 - RNA, 19 nt, Artificial Sequence
  Description of Artificial Sequence: Synthetic oligonucleotide
aggaagguggcguagaacu

SEQ ID NO: 1669852 - RNA, 19 nt, Artificial Sequence
  Description of Artificial Sequence: Synthetic oligonucleotide
aauaucaugcaacgugcgu

SEQ ID NO: 1669853 - RNA, 19 nt, Artificial Sequence
  Description of Artificial Sequence: Synthetic oligonucleotide
uuugauaguagcugacaug

SEQ ID NO: 1669854 - RNA, 19 nt, Artificial Sequence
  Description of Artificial Sequence: Synthetic oligonucleotide
guacucuuggaucaggaag

SEQ ID NO: 1669855 - RNA, 19 nt, Artificial Sequence
  Description of Artificial Sequence: Synthetic oligonucleotide
ugaaaccgcgauuacuagg

SEQ ID NO: 1669856 - RNA, 19 nt, Artificial Sequence
  Description of Artificial Sequence: Synthetic oligonucleotide
gaaaguggaguccacuagc

SEQ ID NO: 1669857 - RNA, 19 nt, Artificial Sequence
  Description of Artificial Sequence: Synthetic oligonucleotide
caaugccugaugaugaacc

SEQ ID NO: 1669858 - RNA, 19 nt, Artificial Sequence
  Description of Artificial Sequence: Synthetic oligonucleotide
ucuucagacauuccaggug

SEQ ID NO: 1669859 - RNA, 19 nt, Artificial Sequence
  Description of Artificial Sequence: Synthetic oligonucleotide
ugcaacgugcguaagccag

SEQ ID NO: 1669860 - RNA, 19 nt, Artificial Sequence
  Description of Artificial Sequence: Synthetic oligonucleotide
augguugccaaacaggccu

SEQ ID NO: 1669861 - RNA, 19 nt, Artificial Sequence
  Description of Artificial Sequence: Synthetic oligonucleotide
uuacccguggaaaagcaca

SEQ ID NO: 1669862 - RNA, 19 nt, Artificial Sequence
  Description of Artificial Sequence: Synthetic oligonucleotide
gaaaccgcgauuacuaggc

SEQ ID NO: 1669863 - RNA, 19 nt, Artificial Sequence
  Description of Artificial Sequence: Synthetic oligonucleotide
caucucuugacucaccgag

SEQ ID NO: 1669864 - RNA, 19 nt, Artificial Sequence
  Description of Artificial Sequence: Synthetic oligonucleotide
ucucuugacucaccgaggc

SEQ ID NO: 1669865 - RNA, 19 nt, Artificial Sequence
  Description of Artificial Sequence: Synthetic oligonucleotide
ucuugacucaccgaggccc

SEQ ID NO: 1669866 - RNA, 19 nt, Artificial Sequence
  Description of Artificial Sequence: Synthetic oligonucleotide
cuguaaacgcucuucuucc

SEQ ID NO: 1669867 - RNA, 19 nt, Artificial Sequence
  Description of Artificial Sequence: Synthetic oligonucleotide
ggcccuucgaccuagagag

SEQ ID NO: 1669868 - RNA, 19 nt, Artificial Sequence
  Description of Artificial Sequence: Synthetic oligonucleotide
cucaggcccaauaucaugc

SEQ ID NO: 1669869 - RNA, 19 nt, Artificial Sequence
  Description of Artificial Sequence: Synthetic oligonucleotide
auaucuguggagagcaggc

SEQ ID NO: 1669870 - RNA, 19 nt, Artificial Sequence
  Description of Artificial Sequence: Synthetic oligonucleotide
uccucuuuggagauugcug

SEQ ID NO: 1669871 - RNA, 19 nt, Artificial Sequence
  Description of Artificial Sequence: Synthetic oligonucleotide
uagagcugagcuuccaugc

SEQ ID NO: 1669872 - RNA, 19 nt, Artificial Sequence
  Description of Artificial Sequence: Synthetic oligonucleotide
uccacuagcuucucauggg

SEQ ID NO: 1669873 - RNA, 19 nt, Artificial Sequence
  Description of Artificial Sequence: Synthetic oligonucleotide
ugucacuuugauaguagcu

SEQ ID NO: 1669874 - RNA, 19 nt, Artificial Sequence
  Description of Artificial Sequence: Synthetic oligonucleotide
aacccagaaaaccgcaaca

SEQ ID NO: 1669875 - RNA, 19 nt, Artificial Sequence
  Description of Artificial Sequence: Synthetic oligonucleotide
agaguauaucuguggagag

SEQ ID NO: 1669876 - RNA, 19 nt, Artificial Sequence
  Description of Artificial Sequence: Synthetic oligonucleotide
aaccgcaacaugcuaacaa

SEQ ID NO: 1669877 - RNA, 19 nt, Artificial Sequence
  Description of Artificial Sequence: Synthetic oligonucleotide
uagaacuugccuacuguga

SEQ ID NO: 1669878 - RNA, 19 nt, Artificial Sequence
  Description of Artificial Sequence: Synthetic oligonucleotide
aaccgcgauuacuaggcag

SEQ ID NO: 1669879 - RNA, 19 nt, Artificial Sequence
  Description of Artificial Sequence: Synthetic oligonucleotide
aaugccugaugaugaacca

SEQ ID NO: 1669880 - RNA, 19 nt, Artificial Sequence
  Description of Artificial Sequence: Synthetic oligonucleotide
ugauccuuuugucucuuca

SEQ ID NO: 1669881 - RNA, 19 nt, Artificial Sequence
  Description of Artificial Sequence: Synthetic oligonucleotide
uuucccgucuuguugauau

SEQ ID NO: 1669882 - RNA, 19 nt, Artificial Sequence
  Description of Artificial Sequence: Synthetic oligonucleotide
aauuuucggaaguacucuu

SEQ ID NO: 1669883 - RNA, 19 nt, Artificial Sequence
  Description of Artificial Sequence: Synthetic oligonucleotide
uucggaaguacucuuggau

SEQ ID NO: 1669884 - RNA, 19 nt, Artificial Sequence
  Description of Artificial Sequence: Synthetic oligonucleotide
aacaugcuaacaaggacca

SEQ ID NO: 1669885 - RNA, 19 nt, Artificial Sequence
  Description of Artificial Sequence: Synthetic oligonucleotide
caauaucaugcaacgugcg

SEQ ID NO: 1669886 - RNA, 19 nt, Artificial Sequence
  Description of Artificial Sequence: Synthetic oligonucleotide
ucaugcaacgugcguaagc

SEQ ID NO: 1669887 - RNA, 19 nt, Artificial Sequence
  Description of Artificial Sequence: Synthetic oligonucleotide
guccacuagcuucucaugg

SEQ ID NO: 1669888 - RNA, 19 nt, Artificial Sequence
  Description of Artificial Sequence: Synthetic oligonucleotide
caugcaacgugcguaagcc

SEQ ID NO: 1669889 - RNA, 19 nt, Artificial Sequence
  Description of Artificial Sequence: Synthetic oligonucleotide
gaugaaccagaugcaaggg

SEQ ID NO: 1669890 - RNA, 19 nt, Artificial Sequence
  Description of Artificial Sequence: Synthetic oligonucleotide
accgcaacaugcuaacaag

SEQ ID NO: 1669891 - RNA, 19 nt, Artificial Sequence
  Description of Artificial Sequence: Synthetic oligonucleotide
acuagcuucucaugggaug

SEQ ID NO: 1669892 - RNA, 19 nt, Artificial Sequence
  Description of Artificial Sequence: Synthetic oligonucleotide
gugcauuccucugugaagg

SEQ ID NO: 1669893 - RNA, 19 nt, Artificial Sequence
  Description of Artificial Sequence: Synthetic oligonucleotide
gaaggucugaggaaaguug

SEQ ID NO: 1669894 - RNA, 19 nt, Artificial Sequence
  Description of Artificial Sequence: Synthetic oligonucleotide
agcguccucacucauucuc

SEQ ID NO: 1669895 - RNA, 19 nt, Artificial Sequence
  Description of Artificial Sequence: Synthetic oligonucleotide
gaucuugguaggagaaugg

SEQ ID NO: 1669896 - RNA, 19 nt, Artificial Sequence
  Description of Artificial Sequence: Synthetic oligonucleotide
gguagugaaggucugagga

SEQ ID NO: 1669897 - RNA, 19 nt, Artificial Sequence
  Description of Artificial Sequence: Synthetic oligonucleotide
uuguugauaugcagugggc

SEQ ID NO: 1669898 - RNA, 19 nt, Artificial Sequence
  Description of Artificial Sequence: Synthetic oligonucleotide
aacuugccuacugugaccu

SEQ ID NO: 1669899 - RNA, 19 nt, Artificial Sequence
  Description of Artificial Sequence: Synthetic oligonucleotide
aagguggcguagaacuugc

SEQ ID NO: 1669900 - RNA, 19 nt, Artificial Sequence
  Description of Artificial Sequence: Synthetic oligonucleotide
ucggaaguacucuuggauc

SEQ ID NO: 1669901 - RNA, 19 nt, Artificial Sequence
  Description of Artificial Sequence: Synthetic oligonucleotide
ugcgcaacuguaaacgcuc

SEQ ID NO: 1669902 - RNA, 19 nt, Artificial Sequence
  Description of Artificial Sequence: Synthetic oligonucleotide
cuuggaucaggaagguggc

SEQ ID NO: 1669903 - RNA, 19 nt, Artificial Sequence
  Description of Artificial Sequence: Synthetic oligonucleotide
accgcgauuacuaggcagc

SEQ ID NO: 1669904 - RNA, 19 nt, Artificial Sequence
  Description of Artificial Sequence: Synthetic oligonucleotide
ucuuuucgcuucuugaauu

SEQ ID NO: 1669905 - RNA, 19 nt, Artificial Sequence
  Description of Artificial Sequence: Synthetic oligonucleotide
ugaagaugucgucuucaga

SEQ ID NO: 1669906 - RNA, 19 nt, Artificial Sequence
  Description of Artificial Sequence: Synthetic oligonucleotide
uggaaacaucucuugacuc

SEQ ID NO: 1669907 - RNA, 19 nt, Artificial Sequence
  Description of Artificial Sequence: Synthetic oligonucleotide
uaucaugcaacgugcguaa

SEQ ID NO: 1669908 - RNA, 19 nt, Artificial Sequence
  Description of Artificial Sequence: Synthetic oligonucleotide
agaugcaagggcaaggcug

SEQ ID NO: 1669909 - RNA, 19 nt, Artificial Sequence
  Description of Artificial Sequence: Synthetic oligonucleotide
acgugcguaagccagccug

SEQ ID NO: 1669910 - RNA, 19 nt, Artificial Sequence
  Description of Artificial Sequence: Synthetic oligonucleotide
ccaauaucaugcaacgugc

SEQ ID NO: 1669911 - RNA, 19 nt, Artificial Sequence
  Description of Artificial Sequence: Synthetic oligonucleotide
uggaguagcaguggauggg

SEQ ID NO: 1669912 - RNA, 19 nt, Artificial Sequence
  Description of Artificial Sequence: Synthetic oligonucleotide
caugaaaccgcgauuacua

SEQ ID NO: 1669913 - RNA, 19 nt, Artificial Sequence
  Description of Artificial Sequence: Synthetic oligonucleotide
  modified_base (19)..(19): a, c, u, g, unknown or other
uuacuaggcagcagccugn

SEQ ID NO: 1669914 - RNA, 19 nt, Artificial Sequence
  Description of Artificial Sequence: Synthetic oligonucleotide
uggaaaagcacagcaaaua

SEQ ID NO: 1669915 - RNA, 19 nt, Artificial Sequence
  Description of Artificial Sequence: Synthetic oligonucleotide
cuucucaugggauggugac

SEQ ID NO: 1669916 - RNA, 19 nt, Artificial Sequence
  Description of Artificial Sequence: Synthetic oligonucleotide
aagggcaaggcuguuuucu

SEQ ID NO: 1669917 - RNA, 19 nt, Artificial Sequence
  Description of Artificial Sequence: Synthetic oligonucleotide
aaaguggaguccacuagcu

SEQ ID NO: 1669918 - RNA, 19 nt, Artificial Sequence
  Description of Artificial Sequence: Synthetic oligonucleotide
augaaaccgcgauuacuag

SEQ ID NO: 1669919 - RNA, 19 nt, Artificial Sequence
  Description of Artificial Sequence: Synthetic oligonucleotide
cugucacuuugauaguagc

SEQ ID NO: 1669920 - RNA, 19 nt, Artificial Sequence
  Description of Artificial Sequence: Synthetic oligonucleotide
gaagguggcguagaacuug

SEQ ID NO: 1669921 - RNA, 19 nt, Artificial Sequence
  Description of Artificial Sequence: Synthetic oligonucleotide
aaaccaugaaaccgcgauu

SEQ ID NO: 1669922 - RNA, 19 nt, Artificial Sequence
  Description of Artificial Sequence: Synthetic oligonucleotide
guagcugcuggggugaaag

SEQ ID NO: 1669923 - RNA, 19 nt, Artificial Sequence
  Description of Artificial Sequence: Synthetic oligonucleotide
cccaauaucaugcaacgug

SEQ ID NO: 1669924 - RNA, 19 nt, Artificial Sequence
  Description of Artificial Sequence: Synthetic oligonucleotide
caugguugccaaacaggcc

SEQ ID NO: 1669925 - RNA, 19 nt, Artificial Sequence
  Description of Artificial Sequence: Synthetic oligonucleotide
uggguagugaaggucugag

SEQ ID NO: 1669926 - RNA, 19 nt, Artificial Sequence
  Description of Artificial Sequence: Synthetic oligonucleotide
aguaagauccccagagaug

SEQ ID NO: 1669927 - RNA, 19 nt, Artificial Sequence
  Description of Artificial Sequence: Synthetic oligonucleotide
accaugaaaccgcgauuac

SEQ ID NO: 1669928 - RNA, 19 nt, Artificial Sequence
  Description of Artificial Sequence: Synthetic oligonucleotide
ucgaccuagagaggcagag

SEQ ID NO: 1669929 - RNA, 19 nt, Artificial Sequence
  Description of Artificial Sequence: Synthetic oligonucleotide
ggcccaauaucaugcaacg

SEQ ID NO: 1669930 - RNA, 19 nt, Artificial Sequence
  Description of Artificial Sequence: Synthetic oligonucleotide
gcgauuacuaggcagcagc

SEQ ID NO: 1669931 - RNA, 19 nt, Artificial Sequence
  Description of Artificial Sequence: Synthetic oligonucleotide
uggagauugcuggaucucc

SEQ ID NO: 1669932 - RNA, 19 nt, Artificial Sequence
  Description of Artificial Sequence: Synthetic oligonucleotide
aaaguugcuccugcuguca

SEQ ID NO: 1669933 - RNA, 19 nt, Artificial Sequence
  Description of Artificial Sequence: Synthetic oligonucleotide
ugggcguuggguagugaag

SEQ ID NO: 1669934 - RNA, 19 nt, Artificial Sequence
  Description of Artificial Sequence: Synthetic oligonucleotide
gaaaaccgcaacaugcuaa

SEQ ID NO: 1669935 - RNA, 19 nt, Artificial Sequence
  Description of Artificial Sequence: Synthetic oligonucleotide
augaugaaccagaugcaag

SEQ ID NO: 1669936 - RNA, 19 nt, Artificial Sequence
  Description of Artificial Sequence: Synthetic oligonucleotide
uuucggaaguacucuugga

SEQ ID NO: 1669937 - RNA, 19 nt, Artificial Sequence
  Description of Artificial Sequence: Synthetic oligonucleotide
acugugcuggaguagcagu

SEQ ID NO: 1669938 - RNA, 19 nt, Artificial Sequence
  Description of Artificial Sequence: Synthetic oligonucleotide
ugcaggucucuucuggaaa

SEQ ID NO: 1669939 - RNA, 19 nt, Artificial Sequence
  Description of Artificial Sequence: Synthetic oligonucleotide
ugacucggugucaccuugg

SEQ ID NO: 1669940 - RNA, 19 nt, Artificial Sequence
  Description of Artificial Sequence: Synthetic oligonucleotide
uggagaugucaguugucug

SEQ ID NO: 1669941 - RNA, 19 nt, Artificial Sequence
  Description of Artificial Sequence: Synthetic oligonucleotide
auaucaugcaacgugcgua

SEQ ID NO: 1669942 - RNA, 19 nt, Artificial Sequence
  Description of Artificial Sequence: Synthetic oligonucleotide
uguaaacgcucuucuuccu

SEQ ID NO: 1669943 - RNA, 19 nt, Artificial Sequence
  Description of Artificial Sequence: Synthetic oligonucleotide
agauccccagagauggccc

SEQ ID NO: 1669944 - RNA, 19 nt, Artificial Sequence
  Description of Artificial Sequence: Synthetic oligonucleotide
gaugaugaaccagaugcaa

SEQ ID NO: 1669945 - RNA, 19 nt, Artificial Sequence
  Description of Artificial Sequence: Synthetic oligonucleotide
cugacugugcuggaguagc

SEQ ID NO: 1669946 - RNA, 19 nt, Artificial Sequence
  Description of Artificial Sequence: Synthetic oligonucleotide
ucaaaccaugaaaccgcga

SEQ ID NO: 1669947 - RNA, 19 nt, Artificial Sequence
  Description of Artificial Sequence: Synthetic oligonucleotide
ggaaacaucucuugacuca

SEQ ID NO: 1669948 - RNA, 19 nt, Artificial Sequence
  Description of Artificial Sequence: Synthetic oligonucleotide
acuuugauaguagcugaca

SEQ ID NO: 1669949 - RNA, 19 nt, Artificial Sequence
  Description of Artificial Sequence: Synthetic oligonucleotide
cuuacccguggaaaagcac

SEQ ID NO: 1669950 - RNA, 19 nt, Artificial Sequence
  Description of Artificial Sequence: Synthetic oligonucleotide
uggaaccuguggaugagua

SEQ ID NO: 1669951 - RNA, 19 nt, Artificial Sequence
  Description of Artificial Sequence: Synthetic oligonucleotide
aguggauggggaaggcggc

SEQ ID NO: 1669952 - RNA, 19 nt, Artificial Sequence
  Description of Artificial Sequence: Synthetic oligonucleotide
uccucagcaguaagauccc

SEQ ID NO: 1669953 - RNA, 19 nt, Artificial Sequence
  Description of Artificial Sequence: Synthetic oligonucleotide
aguagcugacaugguugcc

SEQ ID NO: 1669954 - RNA, 19 nt, Artificial Sequence
  Description of Artificial Sequence: Synthetic oligonucleotide
aaguacucuuggaucagga

SEQ ID NO: 1669955 - RNA, 19 nt, Artificial Sequence
  Description of Artificial Sequence: Synthetic oligonucleotide
gaaggcuuucccaccaaac

SEQ ID NO: 1669956 - RNA, 19 nt, Artificial Sequence
  Description of Artificial Sequence: Synthetic oligonucleotide
aaccagaugcaagggcaag

SEQ ID NO: 1669957 - RNA, 19 nt, Artificial Sequence
  Description of Artificial Sequence: Synthetic oligonucleotide
cuugacucaccgaggcccc

SEQ ID NO: 1669958 - RNA, 19 nt, Artificial Sequence
  Description of Artificial Sequence: Synthetic oligonucleotide
uguacccggauagcagggg

SEQ ID NO: 1669959 - RNA, 19 nt, Artificial Sequence
  Description of Artificial Sequence: Synthetic oligonucleotide
ggcugcgcaacuguaaacg

SEQ ID NO: 1669960 - RNA, 19 nt, Artificial Sequence
  Description of Artificial Sequence: Synthetic oligonucleotide
ggaaggaggcccuucgacc

SEQ ID NO: 1669961 - RNA, 19 nt, Artificial Sequence
  Description of Artificial Sequence: Synthetic oligonucleotide
aguagcaguggauggggaa

SEQ ID NO: 1669962 - RNA, 19 nt, Artificial Sequence
  Description of Artificial Sequence: Synthetic oligonucleotide
aguacucuuggaucaggaa

SEQ ID NO: 1669963 - RNA, 19 nt, Artificial Sequence
  Description of Artificial Sequence: Synthetic oligonucleotide
uguggucugcacuggcucu

SEQ ID NO: 1669964 - RNA, 19 nt, Artificial Sequence
  Description of Artificial Sequence: Synthetic oligonucleotide
cuguacccggauagcaggg

SEQ ID NO: 1669965 - RNA, 19 nt, Artificial Sequence
  Description of Artificial Sequence: Synthetic oligonucleotide
aguccacuagcuucucaug

SEQ ID NO: 1669966 - RNA, 19 nt, Artificial Sequence
  Description of Artificial Sequence: Synthetic oligonucleotide
ugaguagcugcugggguga

SEQ ID NO: 1669967 - RNA, 19 nt, Artificial Sequence
  Description of Artificial Sequence: Synthetic oligonucleotide
augcuaacaaggaccauca

SEQ ID NO: 1669968 - RNA, 19 nt, Artificial Sequence
  Description of Artificial Sequence: Synthetic oligonucleotide
auggugacucggugucacc

SEQ ID NO: 1669969 - RNA, 19 nt, Artificial Sequence
  Description of Artificial Sequence: Synthetic oligonucleotide
ugauaguagcugacauggu

SEQ ID NO: 1669970 - RNA, 19 nt, Artificial Sequence
  Description of Artificial Sequence: Synthetic oligonucleotide
ugcguaagccagccugcag

SEQ ID NO: 1669971 - RNA, 19 nt, Artificial Sequence
  Description of Artificial Sequence: Synthetic oligonucleotide
aggcugcgcaacuguaaac

SEQ ID NO: 1669972 - RNA, 19 nt, Artificial Sequence
  Description of Artificial Sequence: Synthetic oligonucleotide
gaauuuucggaaguacucu

SEQ ID NO: 1669973 - RNA, 19 nt, Artificial Sequence
  Description of Artificial Sequence: Synthetic oligonucleotide
ugaaggucugaggaaaguu

SEQ ID NO: 1669974 - RNA, 19 nt, Artificial Sequence
  Description of Artificial Sequence: Synthetic oligonucleotide
aaaccgcgauuacuaggca

SEQ ID NO: 1669975 - RNA, 19 nt, Artificial Sequence
  Description of Artificial Sequence: Synthetic oligonucleotide
ggaucuugguaggagaaug

SEQ ID NO: 1669976 - RNA, 19 nt, Artificial Sequence
  Description of Artificial Sequence: Synthetic oligonucleotide
agaaaaccgcaacaugcua

SEQ ID NO: 1669977 - RNA, 19 nt, Artificial Sequence
  Description of Artificial Sequence: Synthetic oligonucleotide
augucgucuucagaggcag

SEQ ID NO: 1669978 - RNA, 19 nt, Artificial Sequence
  Description of Artificial Sequence: Synthetic oligonucleotide
gauggugacucggugucac

SEQ ID NO: 1669979 - RNA, 19 nt, Artificial Sequence
  Description of Artificial Sequence: Synthetic oligonucleotide
gcaacaugcuaacaaggac

SEQ ID NO: 1669980 - RNA, 19 nt, Artificial Sequence
  Description of Artificial Sequence: Synthetic oligonucleotide
cugccaaugccugaugaug

SEQ ID NO: 1669981 - RNA, 19 nt, Artificial Sequence
  Description of Artificial Sequence: Synthetic oligonucleotide
ucauccugguaggagagua

SEQ ID NO: 1669982 - RNA, 19 nt, Artificial Sequence
  Description of Artificial Sequence: Synthetic oligonucleotide
ugcagggacagugcauucc

SEQ ID NO: 1669983 - RNA, 19 nt, Artificial Sequence
  Description of Artificial Sequence: Synthetic oligonucleotide
agagcugagcuuccaugcu

SEQ ID NO: 1669984 - RNA, 19 nt, Artificial Sequence
  Description of Artificial Sequence: Synthetic oligonucleotide
uaagauccccagagauggc

SEQ ID NO: 1669985 - RNA, 19 nt, Artificial Sequence
  Description of Artificial Sequence: Synthetic oligonucleotide
acugcaggucucuucugga

SEQ ID NO: 1669986 - RNA, 19 nt, Artificial Sequence
  Description of Artificial Sequence: Synthetic oligonucleotide
gcuaacaaggaccaucaaa

SEQ ID NO: 1669987 - RNA, 19 nt, Artificial Sequence
  Description of Artificial Sequence: Synthetic oligonucleotide
guugauaugcagugggcgu

SEQ ID NO: 1669988 - RNA, 19 nt, Artificial Sequence
  Description of Artificial Sequence: Synthetic oligonucleotide
cuugguaggagaauggcuu

SEQ ID NO: 1669989 - RNA, 19 nt, Artificial Sequence
  Description of Artificial Sequence: Synthetic oligonucleotide
gaaggaggcccuucgaccu

SEQ ID NO: 1669990 - RNA, 19 nt, Artificial Sequence
  Description of Artificial Sequence: Synthetic oligonucleotide
accaaaccuugcucuuuuc

SEQ ID NO: 1669991 - RNA, 19 nt, Artificial Sequence
  Description of Artificial Sequence: Synthetic oligonucleotide
guagcugacaugguugcca

SEQ ID NO: 1669992 - RNA, 19 nt, Artificial Sequence
  Description of Artificial Sequence: Synthetic oligonucleotide
uccuauccucuggagaugu

SEQ ID NO: 1669993 - RNA, 19 nt, Artificial Sequence
  Description of Artificial Sequence: Synthetic oligonucleotide
cuucgaccuagagaggcag

SEQ ID NO: 1669994 - RNA, 19 nt, Artificial Sequence
  Description of Artificial Sequence: Synthetic oligonucleotide
ucggaucucaggcccaaua

SEQ ID NO: 1669995 - RNA, 19 nt, Artificial Sequence
  Description of Artificial Sequence: Synthetic oligonucleotide
aggcccuucgaccuagaga

SEQ ID NO: 1669996 - RNA, 19 nt, Artificial Sequence
  Description of Artificial Sequence: Synthetic oligonucleotide
uguggaugaguagcugcug

SEQ ID NO: 1669997 - RNA, 19 nt, Artificial Sequence
  Description of Artificial Sequence: Synthetic oligonucleotide
guagugaaggucugaggaa

SEQ ID NO: 1669998 - RNA, 19 nt, Artificial Sequence
  Description of Artificial Sequence: Synthetic oligonucleotide
acaucucuugacucaccga

SEQ ID NO: 1669999 - RNA, 19 nt, Artificial Sequence
  Description of Artificial Sequence: Synthetic oligonucleotide
cuagagaggcagagcggag

SEQ ID NO: 1670000 - RNA, 19 nt, Artificial Sequence
  Description of Artificial Sequence: Synthetic oligonucleotide
ucggugucaccuugguugu

SEQ ID NO: 1670001 - RNA, 19 nt, Artificial Sequence
  Description of Artificial Sequence: Synthetic oligonucleotide
aacgcucuucuuccucccu

SEQ ID NO: 1670002 - RNA, 19 nt, Artificial Sequence
  Description of Artificial Sequence: Synthetic oligonucleotide
ugacugugcuggaguagca

SEQ ID NO: 1670003 - RNA, 19 nt, Artificial Sequence
  Description of Artificial Sequence: Synthetic oligonucleotide
uacccggauagcaggggac

SEQ ID NO: 1670004 - RNA, 19 nt, Artificial Sequence
  Description of Artificial Sequence: Synthetic oligonucleotide
gaguggcaccucuuagagc

SEQ ID NO: 1670005 - RNA, 19 nt, Artificial Sequence
  Description of Artificial Sequence: Synthetic oligonucleotide
guggcguagaacuugccua

SEQ ID NO: 1670006 - RNA, 19 nt, Artificial Sequence
  Description of Artificial Sequence: Synthetic oligonucleotide
uggcccgucggaucucagg

SEQ ID NO: 1670007 - RNA, 19 nt, Artificial Sequence
  Description of Artificial Sequence: Synthetic oligonucleotide
accucuuagagcugagcuu

SEQ ID NO: 1670008 - RNA, 19 nt, Artificial Sequence
  Description of Artificial Sequence: Synthetic oligonucleotide
uggugacucggugucaccu

SEQ ID NO: 1670009 - RNA, 19 nt, Artificial Sequence
  Description of Artificial Sequence: Synthetic oligonucleotide
  modified_base (17)..(17): a, c, u, g, unknown or other
acuaggcagcagccugnac

SEQ ID NO: 1670010 - RNA, 19 nt, Artificial Sequence
  Description of Artificial Sequence: Synthetic oligonucleotide
uucgaccuagagaggcaga

SEQ ID NO: 1670011 - RNA, 19 nt, Artificial Sequence
  Description of Artificial Sequence: Synthetic oligonucleotide
caaaccaugaaaccgcgau

SEQ ID NO: 1670012 - RNA, 19 nt, Artificial Sequence
  Description of Artificial Sequence: Synthetic oligonucleotide
gugacucggugucaccuug

SEQ ID NO: 1670013 - RNA, 19 nt, Artificial Sequence
  Description of Artificial Sequence: Synthetic oligonucleotide
cuuccucccuuacccgugg

SEQ ID NO: 1670014 - RNA, 19 nt, Artificial Sequence
  Description of Artificial Sequence: Synthetic oligonucleotide
uugauaugcagugggcguu

SEQ ID NO: 1670015 - RNA, 19 nt, Artificial Sequence
  Description of Artificial Sequence: Synthetic oligonucleotide
gaugucgucuucagaggca

SEQ ID NO: 1670016 - RNA, 19 nt, Artificial Sequence
  Description of Artificial Sequence: Synthetic oligonucleotide
gaggcugcgcaacuguaaa

SEQ ID NO: 1670017 - RNA, 19 nt, Artificial Sequence
  Description of Artificial Sequence: Synthetic oligonucleotide
gccuccuguacccggauag

SEQ ID NO: 1670018 - RNA, 19 nt, Artificial Sequence
  Description of Artificial Sequence: Synthetic oligonucleotide
cucaugggauggugacucg

SEQ ID NO: 1670019 - RNA, 19 nt, Artificial Sequence
  Description of Artificial Sequence: Synthetic oligonucleotide
gcuguuuucugagagaugu

SEQ ID NO: 1670020 - RNA, 19 nt, Artificial Sequence
  Description of Artificial Sequence: Synthetic oligonucleotide
ucuuagagcugagcuucca

SEQ ID NO: 1670021 - RNA, 19 nt, Artificial Sequence
  Description of Artificial Sequence: Synthetic oligonucleotide
cucuugacucaccgaggcc

SEQ ID NO: 1670022 - RNA, 19 nt, Artificial Sequence
  Description of Artificial Sequence: Synthetic oligonucleotide
aggggcgaugcccugggga

SEQ ID NO: 1670023 - RNA, 19 nt, Artificial Sequence
  Description of Artificial Sequence: Synthetic oligonucleotide
gggcguuggguagugaagg

SEQ ID NO: 1670024 - RNA, 19 nt, Artificial Sequence
  Description of Artificial Sequence: Synthetic oligonucleotide
cuuugauaguagcugacau

SEQ ID NO: 1670025 - RNA, 19 nt, Artificial Sequence
  Description of Artificial Sequence: Synthetic oligonucleotide
ccgcaacaugcuaacaagg

SEQ ID NO: 1670026 - RNA, 19 nt, Artificial Sequence
  Description of Artificial Sequence: Synthetic oligonucleotide
ugguuguuucccgucuugu

SEQ ID NO: 1670027 - RNA, 19 nt, Artificial Sequence
  Description of Artificial Sequence: Synthetic oligonucleotide
acccguggaaaagcacagc

SEQ ID NO: 1670028 - RNA, 19 nt, Artificial Sequence
  Description of Artificial Sequence: Synthetic oligonucleotide
gaugcaagggcaaggcugu

SEQ ID NO: 1670029 - RNA, 19 nt, Artificial Sequence
  Description of Artificial Sequence: Synthetic oligonucleotide
uucucaugggauggugacu

SEQ ID NO: 1670030 - RNA, 19 nt, Artificial Sequence
  Description of Artificial Sequence: Synthetic oligonucleotide
uggauggggaaggcggccc

SEQ ID NO: 1670031 - RNA, 19 nt, Artificial Sequence
  Description of Artificial Sequence: Synthetic oligonucleotide
acccagaaaaccgcaacau

SEQ ID NO: 1670032 - RNA, 19 nt, Artificial Sequence
  Description of Artificial Sequence: Synthetic oligonucleotide
cuugccuacugugaccuca

SEQ ID NO: 1670033 - RNA, 19 nt, Artificial Sequence
  Description of Artificial Sequence: Synthetic oligonucleotide
accuagagaggcagagcgg

SEQ ID NO: 1670034 - RNA, 19 nt, Artificial Sequence
  Description of Artificial Sequence: Synthetic oligonucleotide
caacgugcguaagccagcc

SEQ ID NO: 1670035 - RNA, 19 nt, Artificial Sequence
  Description of Artificial Sequence: Synthetic oligonucleotide
gaggcccuucgaccuagag

SEQ ID NO: 1670036 - RNA, 19 nt, Artificial Sequence
  Description of Artificial Sequence: Synthetic oligonucleotide
ucgggaguggcaccucuua

SEQ ID NO: 1670037 - RNA, 19 nt, Artificial Sequence
  Description of Artificial Sequence: Synthetic oligonucleotide
ucucucgggaguggcaccu

SEQ ID NO: 1670038 - RNA, 19 nt, Artificial Sequence
  Description of Artificial Sequence: Synthetic oligonucleotide
aacgugcguaagccagccu

SEQ ID NO: 1670039 - RNA, 19 nt, Artificial Sequence
  Description of Artificial Sequence: Synthetic oligonucleotide
ucucacacugcaggucucu

SEQ ID NO: 1670040 - RNA, 19 nt, Artificial Sequence
  Description of Artificial Sequence: Synthetic oligonucleotide
ucccuccuauccucuggag

SEQ ID NO: 1670041 - RNA, 19 nt, Artificial Sequence
  Description of Artificial Sequence: Synthetic oligonucleotide
gagauggcccgucggaucu

SEQ ID NO: 1670042 - RNA, 19 nt, Artificial Sequence
  Description of Artificial Sequence: Synthetic oligonucleotide
uuggguagugaaggucuga

SEQ ID NO: 1670043 - RNA, 19 nt, Artificial Sequence
  Description of Artificial Sequence: Synthetic oligonucleotide
agagcggaggaaacuccuc

SEQ ID NO: 1670044 - RNA, 19 nt, Artificial Sequence
  Description of Artificial Sequence: Synthetic oligonucleotide
aaggaccaucaaaccauga

SEQ ID NO: 1670045 - RNA, 19 nt, Artificial Sequence
  Description of Artificial Sequence: Synthetic oligonucleotide
ggcccgucggaucucaggc

SEQ ID NO: 1670046 - RNA, 19 nt, Artificial Sequence
  Description of Artificial Sequence: Synthetic oligonucleotide
augcaacgugcguaagcca

SEQ ID NO: 1670047 - RNA, 19 nt, Artificial Sequence
  Description of Artificial Sequence: Synthetic oligonucleotide
ggcauuguugauguuggca

SEQ ID NO: 1670048 - RNA, 19 nt, Artificial Sequence
  Description of Artificial Sequence: Synthetic oligonucleotide
gcugucacuuugauaguag

SEQ ID NO: 1670049 - RNA, 19 nt, Artificial Sequence
  Description of Artificial Sequence: Synthetic oligonucleotide
uugccuacugugaccucau

SEQ ID NO: 1670050 - RNA, 19 nt, Artificial Sequence
  Description of Artificial Sequence: Synthetic oligonucleotide
gcaggucucuucuggaaac

SEQ ID NO: 1670051 - RNA, 19 nt, Artificial Sequence
  Description of Artificial Sequence: Synthetic oligonucleotide
gcugcgcaacuguaaacgc

SEQ ID NO: 1670052 - RNA, 19 nt, Artificial Sequence
  Description of Artificial Sequence: Synthetic oligonucleotide
uccucccuuacccguggaa

SEQ ID NO: 1670053 - RNA, 19 nt, Artificial Sequence
  Description of Artificial Sequence: Synthetic oligonucleotide
uucucacacugcaggucuc

SEQ ID NO: 1670054 - RNA, 19 nt, Artificial Sequence
  Description of Artificial Sequence: Synthetic oligonucleotide
uggcaccucuuagagcuga

SEQ ID NO: 1670055 - RNA, 19 nt, Artificial Sequence
  Description of Artificial Sequence: Synthetic oligonucleotide
gagcggaggaaacuccucu

SEQ ID NO: 1670056 - RNA, 19 nt, Artificial Sequence
  Description of Artificial Sequence: Synthetic oligonucleotide
uucccgucuuguugauaug

SEQ ID NO: 1670057 - RNA, 19 nt, Artificial Sequence
  Description of Artificial Sequence: Synthetic oligonucleotide
caggcugggcucacugcag

SEQ ID NO: 1670058 - RNA, 19 nt, Artificial Sequence
  Description of Artificial Sequence: Synthetic oligonucleotide
guacccggauagcagggga

SEQ ID NO: 1670059 - RNA, 19 nt, Artificial Sequence
  Description of Artificial Sequence: Synthetic oligonucleotide
gagauugcuggaucucccu

SEQ ID NO: 1670060 - RNA, 19 nt, Artificial Sequence
  Description of Artificial Sequence: Synthetic oligonucleotide
cucucucgggaguggcacc

SEQ ID NO: 1670061 - RNA, 19 nt, Artificial Sequence
  Description of Artificial Sequence: Synthetic oligonucleotide
gauuacuaggcagcagccu

SEQ ID NO: 1670062 - RNA, 19 nt, Artificial Sequence
  Description of Artificial Sequence: Synthetic oligonucleotide
ggagauugcuggaucuccc

SEQ ID NO: 1670063 - RNA, 19 nt, Artificial Sequence
  Description of Artificial Sequence: Synthetic oligonucleotide
caccucuuagagcugagcu

SEQ ID NO: 1670064 - RNA, 19 nt, Artificial Sequence
  Description of Artificial Sequence: Synthetic oligonucleotide
uguggagagcaggcugggc

SEQ ID NO: 1670065 - RNA, 19 nt, Artificial Sequence
  Description of Artificial Sequence: Synthetic oligonucleotide
cacacugcaggucucuucu

SEQ ID NO: 1670066 - RNA, 19 nt, Artificial Sequence
  Description of Artificial Sequence: Synthetic oligonucleotide
cucaaaccugccacugcca

SEQ ID NO: 1670067 - RNA, 19 nt, Artificial Sequence
  Description of Artificial Sequence: Synthetic oligonucleotide
acacugcaggucucuucug

SEQ ID NO: 1670068 - RNA, 19 nt, Artificial Sequence
  Description of Artificial Sequence: Synthetic oligonucleotide
agcggaggaaacuccucuu

SEQ ID NO: 1670069 - RNA, 19 nt, Artificial Sequence
  Description of Artificial Sequence: Synthetic oligonucleotide
uguuucccgucuuguugau

SEQ ID NO: 1670070 - RNA, 19 nt, Artificial Sequence
  Description of Artificial Sequence: Synthetic oligonucleotide
gaaccagaugcaagggcaa

SEQ ID NO: 1670071 - RNA, 19 nt, Artificial Sequence
  Description of Artificial Sequence: Synthetic oligonucleotide
cguaagccagccugcaggg

SEQ ID NO: 1670072 - RNA, 19 nt, Artificial Sequence
  Description of Artificial Sequence: Synthetic oligonucleotide
gaggggacucaaaccugcc

SEQ ID NO: 1670073 - RNA, 19 nt, Artificial Sequence
  Description of Artificial Sequence: Synthetic oligonucleotide
gugggcguuggguagugaa

SEQ ID NO: 1670074 - RNA, 19 nt, Artificial Sequence
  Description of Artificial Sequence: Synthetic oligonucleotide
cgauuacuaggcagcagcc

SEQ ID NO: 1670075 - RNA, 19 nt, Artificial Sequence
  Description of Artificial Sequence: Synthetic oligonucleotide
gggaguggcaccucuuaga

SEQ ID NO: 1670076 - RNA, 19 nt, Artificial Sequence
  Description of Artificial Sequence: Synthetic oligonucleotide
aucaugcaacgugcguaag

SEQ ID NO: 1670077 - RNA, 19 nt, Artificial Sequence
  Description of Artificial Sequence: Synthetic oligonucleotide
ucacugcaguacucagcgu

SEQ ID NO: 1670078 - RNA, 19 nt, Artificial Sequence
  Description of Artificial Sequence: Synthetic oligonucleotide
caggaagguggcguagaac

SEQ ID NO: 1670079 - RNA, 19 nt, Artificial Sequence
  Description of Artificial Sequence: Synthetic oligonucleotide
ggauagcaggggacaaggg

SEQ ID NO: 1670080 - RNA, 19 nt, Artificial Sequence
  Description of Artificial Sequence: Synthetic oligonucleotide
uggucugcacuggcucuag

SEQ ID NO: 1670081 - RNA, 19 nt, Artificial Sequence
  Description of Artificial Sequence: Synthetic oligonucleotide
gugguguggucugcacugg

SEQ ID NO: 1670082 - RNA, 19 nt, Artificial Sequence
  Description of Artificial Sequence: Synthetic oligonucleotide
aaggaggcccuucgaccua

SEQ ID NO: 1670083 - RNA, 19 nt, Artificial Sequence
  Description of Artificial Sequence: Synthetic oligonucleotide
  modified_base (18)..(18): a, c, u, g, unknown or other
uacuaggcagcagccugna

SEQ ID NO: 1670084 - RNA, 19 nt, Artificial Sequence
  Description of Artificial Sequence: Synthetic oligonucleotide
cccuucgaccuagagaggc

SEQ ID NO: 1670085 - RNA, 19 nt, Artificial Sequence
  Description of Artificial Sequence: Synthetic oligonucleotide
cuggcucuagccaccugca

SEQ ID NO: 1670086 - RNA, 19 nt, Artificial Sequence
  Description of Artificial Sequence: Synthetic oligonucleotide
guaggagaauggcuucucu

SEQ ID NO: 1670087 - RNA, 19 nt, Artificial Sequence
  Description of Artificial Sequence: Synthetic oligonucleotide
aggaggcccuucgaccuag

SEQ ID NO: 1670088 - RNA, 19 nt, Artificial Sequence
  Description of Artificial Sequence: Synthetic oligonucleotide
gcaguggauggggaaggcg

SEQ ID NO: 1670089 - RNA, 19 nt, Artificial Sequence
  Description of Artificial Sequence: Synthetic oligonucleotide
cucuuggaucaggaaggug

SEQ ID NO: 1670090 - RNA, 19 nt, Artificial Sequence
  Description of Artificial Sequence: Synthetic oligonucleotide
ccugguaggagaguauauc

SEQ ID NO: 1670091 - RNA, 19 nt, Artificial Sequence
  Description of Artificial Sequence: Synthetic oligonucleotide
ccucugugaaggcuuuccc

SEQ ID NO: 1670092 - RNA, 19 nt, Artificial Sequence
  Description of Artificial Sequence: Synthetic oligonucleotide
ugcaagggcaaggcuguuu

SEQ ID NO: 1670093 - RNA, 19 nt, Artificial Sequence
  Description of Artificial Sequence: Synthetic oligonucleotide
acccggauagcaggggaca

SEQ ID NO: 1670094 - RNA, 19 nt, Artificial Sequence
  Description of Artificial Sequence: Synthetic oligonucleotide
cccgucggaucucaggccc

SEQ ID NO: 1670095 - RNA, 19 nt, Artificial Sequence
  Description of Artificial Sequence: Synthetic oligonucleotide
guggauggggaaggcggcc

SEQ ID NO: 1670096 - RNA, 19 nt, Artificial Sequence
  Description of Artificial Sequence: Synthetic oligonucleotide
cucuuuucgcuucuugaau

SEQ ID NO: 1670097 - RNA, 19 nt, Artificial Sequence
  Description of Artificial Sequence: Synthetic oligonucleotide
ggcagagcggaggaaacuc

SEQ ID NO: 1670098 - RNA, 19 nt, Artificial Sequence
  Description of Artificial Sequence: Synthetic oligonucleotide
cguggaaaagcacagcaaa

SEQ ID NO: 1670099 - RNA, 19 nt, Artificial Sequence
  Description of Artificial Sequence: Synthetic oligonucleotide
cggaaguacucuuggauca

SEQ ID NO: 1670100 - RNA, 19 nt, Artificial Sequence
  Description of Artificial Sequence: Synthetic oligonucleotide
gaggggcgaugcccugggg

SEQ ID NO: 1670101 - RNA, 19 nt, Artificial Sequence
  Description of Artificial Sequence: Synthetic oligonucleotide
acucggugucaccuugguu

SEQ ID NO: 1670102 - RNA, 19 nt, Artificial Sequence
  Description of Artificial Sequence: Synthetic oligonucleotide
aucauccugguaggagagu

SEQ ID NO: 1670103 - RNA, 19 nt, Artificial Sequence
  Description of Artificial Sequence: Synthetic oligonucleotide
caugggauggugacucggu

SEQ ID NO: 1670104 - RNA, 19 nt, Artificial Sequence
  Description of Artificial Sequence: Synthetic oligonucleotide
gcagagcggaggaaacucc

SEQ ID NO: 1670105 - RNA, 19 nt, Artificial Sequence
  Description of Artificial Sequence: Synthetic oligonucleotide
ccuagagaggcagagcgga

SEQ ID NO: 1670106 - RNA, 19 nt, Artificial Sequence
  Description of Artificial Sequence: Synthetic oligonucleotide
cugcgcaacuguaaacgcu

SEQ ID NO: 1670107 - RNA, 19 nt, Artificial Sequence
  Description of Artificial Sequence: Synthetic oligonucleotide
ugccuccuguacccggaua

SEQ ID NO: 1670108 - RNA, 19 nt, Artificial Sequence
  Description of Artificial Sequence: Synthetic oligonucleotide
ugccuacugugaccucauc

SEQ ID NO: 1670109 - RNA, 19 nt, Artificial Sequence
  Description of Artificial Sequence: Synthetic oligonucleotide
cccagagauggcccgucgg

SEQ ID NO: 1670110 - RNA, 19 nt, Artificial Sequence
  Description of Artificial Sequence: Synthetic oligonucleotide
ccuggcuagcugagggcgg

SEQ ID NO: 1670111 - RNA, 19 nt, Artificial Sequence
  Description of Artificial Sequence: Synthetic oligonucleotide
cgugcguaagccagccugc

SEQ ID NO: 1670112 - RNA, 19 nt, Artificial Sequence
  Description of Artificial Sequence: Synthetic oligonucleotide
gguaggagaauggcuucuc

SEQ ID NO: 1670113 - RNA, 19 nt, Artificial Sequence
  Description of Artificial Sequence: Synthetic oligonucleotide
gggcaaggcuguuuucuga

SEQ ID NO: 1670114 - RNA, 19 nt, Artificial Sequence
  Description of Artificial Sequence: Synthetic oligonucleotide
gacucggugucaccuuggu

SEQ ID NO: 1670115 - RNA, 19 nt, Artificial Sequence
  Description of Artificial Sequence: Synthetic oligonucleotide
agcugagggcggguggugu

SEQ ID NO: 1670116 - RNA, 19 nt, Artificial Sequence
  Description of Artificial Sequence: Synthetic oligonucleotide
agauggcccgucggaucuc

SEQ ID NO: 1670117 - RNA, 19 nt, Artificial Sequence
  Description of Artificial Sequence: Synthetic oligonucleotide
cagagcggaggaaacuccu

SEQ ID NO: 1670118 - RNA, 19 nt, Artificial Sequence
  Description of Artificial Sequence: Synthetic oligonucleotide
accugcaccucagcuccug

SEQ ID NO: 1670119 - RNA, 19 nt, Artificial Sequence
  Description of Artificial Sequence: Synthetic oligonucleotide
gcuucucaugggaugguga

SEQ ID NO: 1670120 - RNA, 19 nt, Artificial Sequence
  Description of Artificial Sequence: Synthetic oligonucleotide
gguugccaaacaggccucc

SEQ ID NO: 1670121 - RNA, 19 nt, Artificial Sequence
  Description of Artificial Sequence: Synthetic oligonucleotide
cccuuacccguggaaaagc

SEQ ID NO: 1670122 - RNA, 19 nt, Artificial Sequence
  Description of Artificial Sequence: Synthetic oligonucleotide
gcaacgugcguaagccagc

SEQ ID NO: 1670123 - RNA, 19 nt, Artificial Sequence
  Description of Artificial Sequence: Synthetic oligonucleotide
ccuuacccguggaaaagca

SEQ ID NO: 1670124 - RNA, 19 nt, Artificial Sequence
  Description of Artificial Sequence: Synthetic oligonucleotide
gugaaggucugaggaaagu

SEQ ID NO: 1670125 - RNA, 19 nt, Artificial Sequence
  Description of Artificial Sequence: Synthetic oligonucleotide
ccacuagcuucucauggga

SEQ ID NO: 1670126 - RNA, 19 nt, Artificial Sequence
  Description of Artificial Sequence: Synthetic oligonucleotide
ggggaucuugguaggagaa

SEQ ID NO: 1670127 - RNA, 19 nt, Artificial Sequence
  Description of Artificial Sequence: Synthetic oligonucleotide
uccccagagauggcccguc

SEQ ID NO: 1670128 - RNA, 19 nt, Artificial Sequence
  Description of Artificial Sequence: Synthetic oligonucleotide
acaugcuaacaaggaccau

SEQ ID NO: 1670129 - RNA, 19 nt, Artificial Sequence
  Description of Artificial Sequence: Synthetic oligonucleotide
caacuccuccucagcagua

SEQ ID NO: 1670130 - RNA, 19 nt, Artificial Sequence
  Description of Artificial Sequence: Synthetic oligonucleotide
cacuagcuucucaugggau

SEQ ID NO: 1670131 - RNA, 19 nt, Artificial Sequence
  Description of Artificial Sequence: Synthetic oligonucleotide
auccccagagauggcccgu

SEQ ID NO: 1670132 - RNA, 19 nt, Artificial Sequence
  Description of Artificial Sequence: Synthetic oligonucleotide
ggugaggggcgaugcccug

SEQ ID NO: 1670133 - RNA, 19 nt, Artificial Sequence
  Description of Artificial Sequence: Synthetic oligonucleotide
ggucugcacuggcucuagc

SEQ ID NO: 1670134 - RNA, 19 nt, Artificial Sequence
  Description of Artificial Sequence: Synthetic oligonucleotide
gugcguaagccagccugca

SEQ ID NO: 1670135 - RNA, 19 nt, Artificial Sequence
  Description of Artificial Sequence: Synthetic oligonucleotide
cagaugcaagggcaaggcu

SEQ ID NO: 1670136 - RNA, 19 nt, Artificial Sequence
  Description of Artificial Sequence: Synthetic oligonucleotide
gcaagggcaaggcuguuuu

SEQ ID NO: 1670137 - RNA, 19 nt, Artificial Sequence
  Description of Artificial Sequence: Synthetic oligonucleotide
gcguuggguagugaagguc

SEQ ID NO: 1670138 - RNA, 19 nt, Artificial Sequence
  Description of Artificial Sequence: Synthetic oligonucleotide
cguccucacucauucucac

SEQ ID NO: 1670139 - RNA, 19 nt, Artificial Sequence
  Description of Artificial Sequence: Synthetic oligonucleotide
cccuccuauccucuggaga

SEQ ID NO: 1670140 - RNA, 19 nt, Artificial Sequence
  Description of Artificial Sequence: Synthetic oligonucleotide
cauccugguaggagaguau

SEQ ID NO: 1670141 - RNA, 19 nt, Artificial Sequence
  Description of Artificial Sequence: Synthetic oligonucleotide
gggcucacugcaguacuca

SEQ ID NO: 1670142 - RNA, 19 nt, Artificial Sequence
  Description of Artificial Sequence: Synthetic oligonucleotide
cagugggcguuggguagug

SEQ ID NO: 1670143 - RNA, 19 nt, Artificial Sequence
  Description of Artificial Sequence: Synthetic oligonucleotide
caaaccugccacugccaau

SEQ ID NO: 1670144 - RNA, 19 nt, Artificial Sequence
  Description of Artificial Sequence: Synthetic oligonucleotide
ccugcaccucagcuccugc

SEQ ID NO: 1670145 - RNA, 19 nt, Artificial Sequence
  Description of Artificial Sequence: Synthetic oligonucleotide
cuugguuguuucccgucuu

SEQ ID NO: 1670146 - RNA, 19 nt, Artificial Sequence
  Description of Artificial Sequence: Synthetic oligonucleotide
gcguccucacucauucuca

SEQ ID NO: 1670147 - RNA, 19 nt, Artificial Sequence
  Description of Artificial Sequence: Synthetic oligonucleotide
ccuucgaccuagagaggca

SEQ ID NO: 1670148 - RNA, 19 nt, Artificial Sequence
  Description of Artificial Sequence: Synthetic oligonucleotide
ccguggaaaagcacagcaa

SEQ ID NO: 1670149 - RNA, 19 nt, Artificial Sequence
  Description of Artificial Sequence: Synthetic oligonucleotide
cacuggcucuagccaccug

SEQ ID NO: 1670150 - RNA, 19 nt, Artificial Sequence
  Description of Artificial Sequence: Synthetic oligonucleotide
ccuccuguacccggauagc

SEQ ID NO: 1670151 - RNA, 19 nt, Artificial Sequence
  Description of Artificial Sequence: Synthetic oligonucleotide
cgggaguggcaccucuuag

SEQ ID NO: 1670152 - RNA, 19 nt, Artificial Sequence
  Description of Artificial Sequence: Synthetic oligonucleotide
ccccagagauggcccgucg

SEQ ID NO: 1670153 - RNA, 19 nt, Artificial Sequence
  Description of Artificial Sequence: Synthetic oligonucleotide
guggucugcacuggcucua

SEQ ID NO: 1670154 - RNA, 19 nt, Artificial Sequence
  Description of Artificial Sequence: Synthetic oligonucleotide
guuucccgucuuguugaua

SEQ ID NO: 1670155 - RNA, 19 nt, Artificial Sequence
  Description of Artificial Sequence: Synthetic oligonucleotide
ggcguuggguagugaaggu

SEQ ID NO: 1670156 - RNA, 19 nt, Artificial Sequence
  Description of Artificial Sequence: Synthetic oligonucleotide
cugcaggaggggacucaaa

SEQ ID NO: 1670157 - RNA, 19 nt, Artificial Sequence
  Description of Artificial Sequence: Synthetic oligonucleotide
ggggcgaugcccuggggau

SEQ ID NO: 1670158 - RNA, 19 nt, Artificial Sequence
  Description of Artificial Sequence: Synthetic oligonucleotide
cgaccuagagaggcagagc

SEQ ID NO: 1670159 - RNA, 19 nt, Artificial Sequence
  Description of Artificial Sequence: Synthetic oligonucleotide
ccucccuuacccguggaaa

SEQ ID NO: 1670160 - RNA, 19 nt, Artificial Sequence
  Description of Artificial Sequence: Synthetic oligonucleotide
ccaugaaaccgcgauuacu

SEQ ID NO: 1670161 - RNA, 19 nt, Artificial Sequence
  Description of Artificial Sequence: Synthetic oligonucleotide
gcauuccucugugaaggcu

SEQ ID NO: 1670162 - RNA, 19 nt, Artificial Sequence
  Description of Artificial Sequence: Synthetic oligonucleotide
gcucuccugaagaugucgu

SEQ ID NO: 1670163 - RNA, 19 nt, Artificial Sequence
  Description of Artificial Sequence: Synthetic oligonucleotide
gcccuucgaccuagagagg

SEQ ID NO: 1670164 - RNA, 19 nt, Artificial Sequence
  Description of Artificial Sequence: Synthetic oligonucleotide
cccuggccuggcuagcuga

SEQ ID NO: 1670165 - RNA, 19 nt, Artificial Sequence
  Description of Artificial Sequence: Synthetic oligonucleotide
ggcgaugcccuggggaucu

SEQ ID NO: 1670166 - RNA, 19 nt, Artificial Sequence
  Description of Artificial Sequence: Synthetic oligonucleotide
ggugacucggugucaccuu

SEQ ID NO: 1670167 - RNA, 19 nt, Artificial Sequence
  Description of Artificial Sequence: Synthetic oligonucleotide
caguguuguuggcauuguu

SEQ ID NO: 1670168 - RNA, 19 nt, Artificial Sequence
  Description of Artificial Sequence: Synthetic oligonucleotide
cgcgauuacuaggcagcag

SEQ ID NO: 1670169 - RNA, 19 nt, Artificial Sequence
  Description of Artificial Sequence: Synthetic oligonucleotide
gcggaggaaacuccucuuu

SEQ ID NO: 1670170 - RNA, 19 nt, Artificial Sequence
  Description of Artificial Sequence: Synthetic oligonucleotide
cugcaguacucagcguccu

SEQ ID NO: 1670171 - RNA, 19 nt, Artificial Sequence
  Description of Artificial Sequence: Synthetic oligonucleotide
augcaagggcaaggcuguu

SEQ ID NO: 1670172 - RNA, 19 nt, Artificial Sequence
  Description of Artificial Sequence: Synthetic oligonucleotide
gcccaauaucaugcaacgu

SEQ ID NO: 1670173 - RNA, 19 nt, Artificial Sequence
  Description of Artificial Sequence: Synthetic oligonucleotide
cucgggaguggcaccucuu

SEQ ID NO: 1670174 - RNA, 19 nt, Artificial Sequence
  Description of Artificial Sequence: Synthetic oligonucleotide
gggcgaugcccuggggauc

SEQ ID NO: 1670175 - RNA, 19 nt, Artificial Sequence
  Description of Artificial Sequence: Synthetic oligonucleotide
ggcguagaacuugccuacu

SEQ ID NO: 1670176 - RNA, 19 nt, Artificial Sequence
  Description of Artificial Sequence: Synthetic oligonucleotide
ccgcgauuacuaggcagca

SEQ ID NO: 1670177 - RNA, 19 nt, Artificial Sequence
  Description of Artificial Sequence: Synthetic oligonucleotide
gccugaugaugaaccagau

SEQ ID NO: 1670178 - RNA, 19 nt, Artificial Sequence
  Description of Artificial Sequence: Synthetic oligonucleotide
gcgggugguguggucugca

SEQ ID NO: 1670179 - RNA, 19 nt, Artificial Sequence
  Description of Artificial Sequence: Synthetic oligonucleotide
ccgucggaucucaggccca

SEQ ID NO: 1670180 - RNA, 19 nt, Artificial Sequence
  Description of Artificial Sequence: Synthetic oligonucleotide
cggaucucaggcccaauau

SEQ ID NO: 1670181 - RNA, 19 nt, Artificial Sequence
  Description of Artificial Sequence: Synthetic oligonucleotide
gcgcaacuguaaacgcucu

SEQ ID NO: 1670182 - RNA, 19 nt, Artificial Sequence
  Description of Artificial Sequence: Synthetic oligonucleotide
ggaggcccuucgaccuaga

SEQ ID NO: 1670183 - RNA, 19 nt, Artificial Sequence
  Description of Artificial Sequence: Synthetic oligonucleotide
gcacuggcucuagccaccu

SEQ ID NO: 1670184 - RNA, 19 nt, Artificial Sequence
  Description of Artificial Sequence: Synthetic oligonucleotide
gucggaucucaggcccaau

SEQ ID NO: 1670185 - RNA, 19 nt, Artificial Sequence
  Description of Artificial Sequence: Synthetic oligonucleotide
cgucggaucucaggcccaa

SEQ ID NO: 1670186 - RNA, 19 nt, Artificial Sequence
  Description of Artificial Sequence: Synthetic oligonucleotide
cggugucaccuugguuguu

SEQ ID NO: 1670187 - RNA, 19 nt, Artificial Sequence
  Description of Artificial Sequence: Synthetic oligonucleotide
acuauaauaaaaccuaagc

SEQ ID NO: 1670188 - RNA, 19 nt, Artificial Sequence
  Description of Artificial Sequence: Synthetic oligonucleotide
auaaauuugauuuuccaag

SEQ ID NO: 1670189 - RNA, 19 nt, Artificial Sequence
  Description of Artificial Sequence: Synthetic oligonucleotide
augaauagcaucuuggcgg

SEQ ID NO: 1670190 - RNA, 19 nt, Artificial Sequence
  Description of Artificial Sequence: Synthetic oligonucleotide
aaauaugacuucucggugg

SEQ ID NO: 1670191 - RNA, 19 nt, Artificial Sequence
  Description of Artificial Sequence: Synthetic oligonucleotide
agugggauuuauuugaugg

SEQ ID NO: 1670192 - RNA, 19 nt, Artificial Sequence
  Description of Artificial Sequence: Synthetic oligonucleotide
acuaauauugcaugaauag

SEQ ID NO: 1670193 - RNA, 19 nt, Artificial Sequence
  Description of Artificial Sequence: Synthetic oligonucleotide
agcuaaaauaucucaaccc

SEQ ID NO: 1670194 - RNA, 19 nt, Artificial Sequence
  Description of Artificial Sequence: Synthetic oligonucleotide
aagggcuacgaauaagucc

SEQ ID NO: 1670195 - RNA, 19 nt, Artificial Sequence
  Description of Artificial Sequence: Synthetic oligonucleotide
uagucuguaguccaaaggg

SEQ ID NO: 1670196 - RNA, 19 nt, Artificial Sequence
  Description of Artificial Sequence: Synthetic oligonucleotide
agaauuaagaaguucgaag

SEQ ID NO: 1670197 - RNA, 19 nt, Artificial Sequence
  Description of Artificial Sequence: Synthetic oligonucleotide
aggguuaucacacaaagug

SEQ ID NO: 1670198 - RNA, 19 nt, Artificial Sequence
  Description of Artificial Sequence: Synthetic oligonucleotide
ugugguacuauaauaaaac

SEQ ID NO: 1670199 - RNA, 19 nt, Artificial Sequence
  Description of Artificial Sequence: Synthetic oligonucleotide
auuaggucuuacuugaggg

SEQ ID NO: 1670200 - RNA, 19 nt, Artificial Sequence
  Description of Artificial Sequence: Synthetic oligonucleotide
acuacauaaacccuggucu

SEQ ID NO: 1670201 - RNA, 19 nt, Artificial Sequence
  Description of Artificial Sequence: Synthetic oligonucleotide
gaaaucaaccuucucagcc

SEQ ID NO: 1670202 - RNA, 19 nt, Artificial Sequence
  Description of Artificial Sequence: Synthetic oligonucleotide
acuuaaauaugacuucucg

SEQ ID NO: 1670203 - RNA, 19 nt, Artificial Sequence
  Description of Artificial Sequence: Synthetic oligonucleotide
aguucgaagaaccacugac

SEQ ID NO: 1670204 - RNA, 19 nt, Artificial Sequence
  Description of Artificial Sequence: Synthetic oligonucleotide
uauugcaugaauagcaucu

SEQ ID NO: 1670205 - RNA, 19 nt, Artificial Sequence
  Description of Artificial Sequence: Synthetic oligonucleotide
agcucagugcuuuagaggg

SEQ ID NO: 1670206 - RNA, 19 nt, Artificial Sequence
  Description of Artificial Sequence: Synthetic oligonucleotide
gaauuaagaaguucgaaga

SEQ ID NO: 1670207 - RNA, 19 nt, Artificial Sequence
  Description of Artificial Sequence: Synthetic oligonucleotide
uaagcgacggaaaucaacc

SEQ ID NO: 1670208 - RNA, 19 nt, Artificial Sequence
  Description of Artificial Sequence: Synthetic oligonucleotide
uuugacuauaaacuaauau

SEQ ID NO: 1670209 - RNA, 19 nt, Artificial Sequence
  Description of Artificial Sequence: Synthetic oligonucleotide
ugcaacuccaaccauaacu

SEQ ID NO: 1670210 - RNA, 19 nt, Artificial Sequence
  Description of Artificial Sequence: Synthetic oligonucleotide
aauagcaucuuggcggucc

SEQ ID NO: 1670211 - RNA, 19 nt, Artificial Sequence
  Description of Artificial Sequence: Synthetic oligonucleotide
gaaaauuuguucaaagaug

SEQ ID NO: 1670212 - RNA, 19 nt, Artificial Sequence
  Description of Artificial Sequence: Synthetic oligonucleotide
uauuaggucuuacuugagg

SEQ ID NO: 1670213 - RNA, 19 nt, Artificial Sequence
  Description of Artificial Sequence: Synthetic oligonucleotide
aagauuguguuuucaguag

SEQ ID NO: 1670214 - RNA, 19 nt, Artificial Sequence
  Description of Artificial Sequence: Synthetic oligonucleotide
aaguccgaaaauuuguuca

SEQ ID NO: 1670215 - RNA, 19 nt, Artificial Sequence
  Description of Artificial Sequence: Synthetic oligonucleotide
aaaaccuaagcuugacauc

SEQ ID NO: 1670216 - RNA, 19 nt, Artificial Sequence
  Description of Artificial Sequence: Synthetic oligonucleotide
uugacuauaaacuaauauu

SEQ ID NO: 1670217 - RNA, 19 nt, Artificial Sequence
  Description of Artificial Sequence: Synthetic oligonucleotide
gacgaagccacuaaugucg

SEQ ID NO: 1670218 - RNA, 19 nt, Artificial Sequence
  Description of Artificial Sequence: Synthetic oligonucleotide
uaaaaccuaagcuugacau

SEQ ID NO: 1670219 - RNA, 19 nt, Artificial Sequence
  Description of Artificial Sequence: Synthetic oligonucleotide
ugguacuauaauaaaaccu

SEQ ID NO: 1670220 - RNA, 19 nt, Artificial Sequence
  Description of Artificial Sequence: Synthetic oligonucleotide
uguucaaagagcuggauau

SEQ ID NO: 1670221 - RNA, 19 nt, Artificial Sequence
  Description of Artificial Sequence: Synthetic oligonucleotide
aaguucucgaaacguuugc

SEQ ID NO: 1670222 - RNA, 19 nt, Artificial Sequence
  Description of Artificial Sequence: Synthetic oligonucleotide
uugccaaauacuuaaauau

SEQ ID NO: 1670223 - RNA, 19 nt, Artificial Sequence
  Description of Artificial Sequence: Synthetic oligonucleotide
aagaaguucgaagaaccac

SEQ ID NO: 1670224 - RNA, 19 nt, Artificial Sequence
  Description of Artificial Sequence: Synthetic oligonucleotide
aaaccuaagcuugacauca

SEQ ID NO: 1670225 - RNA, 19 nt, Artificial Sequence
  Description of Artificial Sequence: Synthetic oligonucleotide
uucccaauaaccuuuugca

SEQ ID NO: 1670226 - RNA, 19 nt, Artificial Sequence
  Description of Artificial Sequence: Synthetic oligonucleotide
cuaagcuugacaucauucc

SEQ ID NO: 1670227 - RNA, 19 nt, Artificial Sequence
  Description of Artificial Sequence: Synthetic oligonucleotide
aaccauaacuaauccauga

SEQ ID NO: 1670228 - RNA, 19 nt, Artificial Sequence
  Description of Artificial Sequence: Synthetic oligonucleotide
guauuuuccacaaaagggc

SEQ ID NO: 1670229 - RNA, 19 nt, Artificial Sequence
  Description of Artificial Sequence: Synthetic oligonucleotide
agucccugcaacuccaacc

SEQ ID NO: 1670230 - RNA, 19 nt, Artificial Sequence
  Description of Artificial Sequence: Synthetic oligonucleotide
uacuucagcuaaaauaucu

SEQ ID NO: 1670231 - RNA, 19 nt, Artificial Sequence
  Description of Artificial Sequence: Synthetic oligonucleotide
uguucaaagaugcccaaac

SEQ ID NO: 1670232 - RNA, 19 nt, Artificial Sequence
  Description of Artificial Sequence: Synthetic oligonucleotide
gaaauaggcaaguauucac

SEQ ID NO: 1670233 - RNA, 19 nt, Artificial Sequence
  Description of Artificial Sequence: Synthetic oligonucleotide
uaaucgaaggcucacaauu

SEQ ID NO: 1670234 - RNA, 19 nt, Artificial Sequence
  Description of Artificial Sequence: Synthetic oligonucleotide
uuugauggaccgcaguaag

SEQ ID NO: 1670235 - RNA, 19 nt, Artificial Sequence
  Description of Artificial Sequence: Synthetic oligonucleotide
uucugugguacuauaauaa

SEQ ID NO: 1670236 - RNA, 19 nt, Artificial Sequence
  Description of Artificial Sequence: Synthetic oligonucleotide
uuugcauacugaauaagau

SEQ ID NO: 1670237 - RNA, 19 nt, Artificial Sequence
  Description of Artificial Sequence: Synthetic oligonucleotide
agaaauuccucuuucacua

SEQ ID NO: 1670238 - RNA, 19 nt, Artificial Sequence
  Description of Artificial Sequence: Synthetic oligonucleotide
cauaacuaauccaugagga

SEQ ID NO: 1670239 - RNA, 19 nt, Artificial Sequence
  Description of Artificial Sequence: Synthetic oligonucleotide
ucuuacuugaggguuauca

SEQ ID NO: 1670240 - RNA, 19 nt, Artificial Sequence
  Description of Artificial Sequence: Synthetic oligonucleotide
uaagauuguguuuucagua

SEQ ID NO: 1670241 - RNA, 19 nt, Artificial Sequence
  Description of Artificial Sequence: Synthetic oligonucleotide
ugcccaaacaaguauuucc

SEQ ID NO: 1670242 - RNA, 19 nt, Artificial Sequence
  Description of Artificial Sequence: Synthetic oligonucleotide
ugcuuuagaggguuaggcg

SEQ ID NO: 1670243 - RNA, 19 nt, Artificial Sequence
  Description of Artificial Sequence: Synthetic oligonucleotide
uccgaaaauuuguucaaag

SEQ ID NO: 1670244 - RNA, 19 nt, Artificial Sequence
  Description of Artificial Sequence: Synthetic oligonucleotide
aagaaccacugacagaacu

SEQ ID NO: 1670245 - RNA, 19 nt, Artificial Sequence
  Description of Artificial Sequence: Synthetic oligonucleotide
ggauuuauuugauggaccg

SEQ ID NO: 1670246 - RNA, 19 nt, Artificial Sequence
  Description of Artificial Sequence: Synthetic oligonucleotide
auaacuaauccaugaggag

SEQ ID NO: 1670247 - RNA, 19 nt, Artificial Sequence
  Description of Artificial Sequence: Synthetic oligonucleotide
ugauuacauuauaaaagga

SEQ ID NO: 1670248 - RNA, 19 nt, Artificial Sequence
  Description of Artificial Sequence: Synthetic oligonucleotide
ugccaaauacuuaaauaug

SEQ ID NO: 1670249 - RNA, 19 nt, Artificial Sequence
  Description of Artificial Sequence: Synthetic oligonucleotide
aguagaaauaggcaaguau

SEQ ID NO: 1670250 - RNA, 19 nt, Artificial Sequence
  Description of Artificial Sequence: Synthetic oligonucleotide
ugagaauuaagaaguucga

SEQ ID NO: 1670251 - RNA, 19 nt, Artificial Sequence
  Description of Artificial Sequence: Synthetic oligonucleotide
ucucagguugauaaauuug

SEQ ID NO: 1670252 - RNA, 19 nt, Artificial Sequence
  Description of Artificial Sequence: Synthetic oligonucleotide
aauaugacuucucggugga

SEQ ID NO: 1670253 - RNA, 19 nt, Artificial Sequence
  Description of Artificial Sequence: Synthetic oligonucleotide
gacggugucgcacagggcc

SEQ ID NO: 1670254 - RNA, 19 nt, Artificial Sequence
  Description of Artificial Sequence: Synthetic oligonucleotide
auaagauuguguuuucagu

SEQ ID NO: 1670255 - RNA, 19 nt, Artificial Sequence
  Description of Artificial Sequence: Synthetic oligonucleotide
uuacuugaggguuaucaca

SEQ ID NO: 1670256 - RNA, 19 nt, Artificial Sequence
  Description of Artificial Sequence: Synthetic oligonucleotide
aacccucacaucugcaauc

SEQ ID NO: 1670257 - RNA, 19 nt, Artificial Sequence
  Description of Artificial Sequence: Synthetic oligonucleotide
auuuauuugauggaccgca

SEQ ID NO: 1670258 - RNA, 19 nt, Artificial Sequence
  Description of Artificial Sequence: Synthetic oligonucleotide
gaugugaucagugcugugc

SEQ ID NO: 1670259 - RNA, 19 nt, Artificial Sequence
  Description of Artificial Sequence: Synthetic oligonucleotide
gacuauaaacuaauauugc

SEQ ID NO: 1670260 - RNA, 19 nt, Artificial Sequence
  Description of Artificial Sequence: Synthetic oligonucleotide
uuuauuugauggaccgcag

SEQ ID NO: 1670261 - RNA, 19 nt, Artificial Sequence
  Description of Artificial Sequence: Synthetic oligonucleotide
ucuuucacuaaugacagua

SEQ ID NO: 1670262 - RNA, 19 nt, Artificial Sequence
  Description of Artificial Sequence: Synthetic oligonucleotide
ugagagucgagguugggac

SEQ ID NO: 1670263 - RNA, 19 nt, Artificial Sequence
  Description of Artificial Sequence: Synthetic oligonucleotide
accauaacuaauccaugag

SEQ ID NO: 1670264 - RNA, 19 nt, Artificial Sequence
  Description of Artificial Sequence: Synthetic oligonucleotide
ucacguuuuguucuguggu

SEQ ID NO: 1670265 - RNA, 19 nt, Artificial Sequence
  Description of Artificial Sequence: Synthetic oligonucleotide
uauuugauggaccgcagua

SEQ ID NO: 1670266 - RNA, 19 nt, Artificial Sequence
  Description of Artificial Sequence: Synthetic oligonucleotide
aaauuugauuuuccaagua

SEQ ID NO: 1670267 - RNA, 19 nt, Artificial Sequence
  Description of Artificial Sequence: Synthetic oligonucleotide
aagaugcccaaacaaguau

SEQ ID NO: 1670268 - RNA, 19 nt, Artificial Sequence
  Description of Artificial Sequence: Synthetic oligonucleotide
aucacguuuuguucugugg

SEQ ID NO: 1670269 - RNA, 19 nt, Artificial Sequence
  Description of Artificial Sequence: Synthetic oligonucleotide
uuaucacacaaagugauua

SEQ ID NO: 1670270 - RNA, 19 nt, Artificial Sequence
  Description of Artificial Sequence: Synthetic oligonucleotide
gugguacuauaauaaaacc

SEQ ID NO: 1670271 - RNA, 19 nt, Artificial Sequence
  Description of Artificial Sequence: Synthetic oligonucleotide
aauguaacagcugguuuca

SEQ ID NO: 1670272 - RNA, 19 nt, Artificial Sequence
  Description of Artificial Sequence: Synthetic oligonucleotide
agagcucagugcuuuagag

SEQ ID NO: 1670273 - RNA, 19 nt, Artificial Sequence
  Description of Artificial Sequence: Synthetic oligonucleotide
uucucgaaacguuugcugu

SEQ ID NO: 1670274 - RNA, 19 nt, Artificial Sequence
  Description of Artificial Sequence: Synthetic oligonucleotide
aaggccucaucuccacuac

SEQ ID NO: 1670275 - RNA, 19 nt, Artificial Sequence
  Description of Artificial Sequence: Synthetic oligonucleotide
gagguugggacuaagaaaa

SEQ ID NO: 1670276 - RNA, 19 nt, Artificial Sequence
  Description of Artificial Sequence: Synthetic oligonucleotide
cuuacuugaggguuaucac

SEQ ID NO: 1670277 - RNA, 19 nt, Artificial Sequence
  Description of Artificial Sequence: Synthetic oligonucleotide
uggagguacaaccaccccu

SEQ ID NO: 1670278 - RNA, 19 nt, Artificial Sequence
  Description of Artificial Sequence: Synthetic oligonucleotide
gaaggcucacaauuucugc

SEQ ID NO: 1670279 - RNA, 19 nt, Artificial Sequence
  Description of Artificial Sequence: Synthetic oligonucleotide
ugugacucgaguagaaaua

SEQ ID NO: 1670280 - RNA, 19 nt, Artificial Sequence
  Description of Artificial Sequence: Synthetic oligonucleotide
acuaaugacaguaaucgaa

SEQ ID NO: 1670281 - RNA, 19 nt, Artificial Sequence
  Description of Artificial Sequence: Synthetic oligonucleotide
auaaaaccuaagcuugaca

SEQ ID NO: 1670282 - RNA, 19 nt, Artificial Sequence
  Description of Artificial Sequence: Synthetic oligonucleotide
cuuuagaggguuaggcgag

SEQ ID NO: 1670283 - RNA, 19 nt, Artificial Sequence
  Description of Artificial Sequence: Synthetic oligonucleotide
gugacggugucgcacaggg

SEQ ID NO: 1670284 - RNA, 19 nt, Artificial Sequence
  Description of Artificial Sequence: Synthetic oligonucleotide
ucgagguugggacuaagaa

SEQ ID NO: 1670285 - RNA, 19 nt, Artificial Sequence
  Description of Artificial Sequence: Synthetic oligonucleotide
aaagggcuacgaauaaguc

SEQ ID NO: 1670286 - RNA, 19 nt, Artificial Sequence
  Description of Artificial Sequence: Synthetic oligonucleotide
aguuggagguacaaccacc

SEQ ID NO: 1670287 - RNA, 19 nt, Artificial Sequence
  Description of Artificial Sequence: Synthetic oligonucleotide
aaaggacuccagaucacuc

SEQ ID NO: 1670288 - RNA, 19 nt, Artificial Sequence
  Description of Artificial Sequence: Synthetic oligonucleotide
uuuuccacaaaagggcuac

SEQ ID NO: 1670289 - RNA, 19 nt, Artificial Sequence
  Description of Artificial Sequence: Synthetic oligonucleotide
uuauuugauggaccgcagu

SEQ ID NO: 1670290 - RNA, 19 nt, Artificial Sequence
  Description of Artificial Sequence: Synthetic oligonucleotide
aacuaauccaugaggagaa

SEQ ID NO: 1670291 - RNA, 19 nt, Artificial Sequence
  Description of Artificial Sequence: Synthetic oligonucleotide
cuaagcgacggaaaucaac

SEQ ID NO: 1670292 - RNA, 19 nt, Artificial Sequence
  Description of Artificial Sequence: Synthetic oligonucleotide
guuaggcgaguucaguucc

SEQ ID NO: 1670293 - RNA, 19 nt, Artificial Sequence
  Description of Artificial Sequence: Synthetic oligonucleotide
aguaaucgaaggcucacaa

SEQ ID NO: 1670294 - RNA, 19 nt, Artificial Sequence
  Description of Artificial Sequence: Synthetic oligonucleotide
uccagaagugcugugggcc

SEQ ID NO: 1670295 - RNA, 19 nt, Artificial Sequence
  Description of Artificial Sequence: Synthetic oligonucleotide
ugggauuuauuugauggac

SEQ ID NO: 1670296 - RNA, 19 nt, Artificial Sequence
  Description of Artificial Sequence: Synthetic oligonucleotide
cuacgaauaaguccgaaaa

SEQ ID NO: 1670297 - RNA, 19 nt, Artificial Sequence
  Description of Artificial Sequence: Synthetic oligonucleotide
uacgaauaaguccgaaaau

SEQ ID NO: 1670298 - RNA, 19 nt, Artificial Sequence
  Description of Artificial Sequence: Synthetic oligonucleotide
uuaggucuuacuugagggu

SEQ ID NO: 1670299 - RNA, 19 nt, Artificial Sequence
  Description of Artificial Sequence: Synthetic oligonucleotide
acaaccaccccuuguguug

SEQ ID NO: 1670300 - RNA, 19 nt, Artificial Sequence
  Description of Artificial Sequence: Synthetic oligonucleotide
uugcaugaauagcaucuug

SEQ ID NO: 1670301 - RNA, 19 nt, Artificial Sequence
  Description of Artificial Sequence: Synthetic oligonucleotide
ugucguuguaacugcuucc

SEQ ID NO: 1670302 - RNA, 19 nt, Artificial Sequence
  Description of Artificial Sequence: Synthetic oligonucleotide
agaaauaggcaaguauuca

SEQ ID NO: 1670303 - RNA, 19 nt, Artificial Sequence
  Description of Artificial Sequence: Synthetic oligonucleotide
caugaggagaagaagcaca

SEQ ID NO: 1670304 - RNA, 19 nt, Artificial Sequence
  Description of Artificial Sequence: Synthetic oligonucleotide
gaucacucuguucaaaugu

SEQ ID NO: 1670305 - RNA, 19 nt, Artificial Sequence
  Description of Artificial Sequence: Synthetic oligonucleotide
agaaguucgaagaaccacu

SEQ ID NO: 1670306 - RNA, 19 nt, Artificial Sequence
  Description of Artificial Sequence: Synthetic oligonucleotide
agaucacucuguucaaaug

SEQ ID NO: 1670307 - RNA, 19 nt, Artificial Sequence
  Description of Artificial Sequence: Synthetic oligonucleotide
uguucaacaaggccucauc

SEQ ID NO: 1670308 - RNA, 19 nt, Artificial Sequence
  Description of Artificial Sequence: Synthetic oligonucleotide
ucucaacccucacaucugc

SEQ ID NO: 1670309 - RNA, 19 nt, Artificial Sequence
  Description of Artificial Sequence: Synthetic oligonucleotide
accgucagagcucagugcu

SEQ ID NO: 1670310 - RNA, 19 nt, Artificial Sequence
  Description of Artificial Sequence: Synthetic oligonucleotide
cucgaguagaaauaggcaa

SEQ ID NO: 1670311 - RNA, 19 nt, Artificial Sequence
  Description of Artificial Sequence: Synthetic oligonucleotide
guucucgaaacguuugcug

SEQ ID NO: 1670312 - RNA, 19 nt, Artificial Sequence
  Description of Artificial Sequence: Synthetic oligonucleotide
uucaacaaggccucaucuc

SEQ ID NO: 1670313 - RNA, 19 nt, Artificial Sequence
  Description of Artificial Sequence: Synthetic oligonucleotide
acguuuuguucugugguac

SEQ ID NO: 1670314 - RNA, 19 nt, Artificial Sequence
  Description of Artificial Sequence: Synthetic oligonucleotide
ucucgaaacguuugcugug

SEQ ID NO: 1670315 - RNA, 19 nt, Artificial Sequence
  Description of Artificial Sequence: Synthetic oligonucleotide
ccauaacuaauccaugagg

SEQ ID NO: 1670316 - RNA, 19 nt, Artificial Sequence
  Description of Artificial Sequence: Synthetic oligonucleotide
acaguaaucgaaggcucac

SEQ ID NO: 1670317 - RNA, 19 nt, Artificial Sequence
  Description of Artificial Sequence: Synthetic oligonucleotide
aggccugccuuauauuagg

SEQ ID NO: 1670318 - RNA, 19 nt, Artificial Sequence
  Description of Artificial Sequence: Synthetic oligonucleotide
ucugagaauuaagaaguuc

SEQ ID NO: 1670319 - RNA, 19 nt, Artificial Sequence
  Description of Artificial Sequence: Synthetic oligonucleotide
uaaacccuggucuccaguc

SEQ ID NO: 1670320 - RNA, 19 nt, Artificial Sequence
  Description of Artificial Sequence: Synthetic oligonucleotide
uaaugucgcccucucggcc

SEQ ID NO: 1670321 - RNA, 19 nt, Artificial Sequence
  Description of Artificial Sequence: Synthetic oligonucleotide
ucuccuaagcgacggaaau

SEQ ID NO: 1670322 - RNA, 19 nt, Artificial Sequence
  Description of Artificial Sequence: Synthetic oligonucleotide
gucguuguaacugcuuccg

SEQ ID NO: 1670323 - RNA, 19 nt, Artificial Sequence
  Description of Artificial Sequence: Synthetic oligonucleotide
gauuuauuugauggaccgc

SEQ ID NO: 1670324 - RNA, 19 nt, Artificial Sequence
  Description of Artificial Sequence: Synthetic oligonucleotide
gguacuauaauaaaaccua

SEQ ID NO: 1670325 - RNA, 19 nt, Artificial Sequence
  Description of Artificial Sequence: Synthetic oligonucleotide
aauaauucucagguugaua

SEQ ID NO: 1670326 - RNA, 19 nt, Artificial Sequence
  Description of Artificial Sequence: Synthetic oligonucleotide
acgaauaaguccgaaaauu

SEQ ID NO: 1670327 - RNA, 19 nt, Artificial Sequence
  Description of Artificial Sequence: Synthetic oligonucleotide
ugaucagugcugugcuggg

SEQ ID NO: 1670328 - RNA, 19 nt, Artificial Sequence
  Description of Artificial Sequence: Synthetic oligonucleotide
cuaaugucgcccucucggc

SEQ ID NO: 1670329 - RNA, 19 nt, Artificial Sequence
  Description of Artificial Sequence: Synthetic oligonucleotide
uaguuggagguacaaccac

SEQ ID NO: 1670330 - RNA, 19 nt, Artificial Sequence
  Description of Artificial Sequence: Synthetic oligonucleotide
auaucucaacccucacauc

SEQ ID NO: 1670331 - RNA, 19 nt, Artificial Sequence
  Description of Artificial Sequence: Synthetic oligonucleotide
uucucagguugauaaauuu

SEQ ID NO: 1670332 - RNA, 19 nt, Artificial Sequence
  Description of Artificial Sequence: Synthetic oligonucleotide
uaucacguuuuguucugug

SEQ ID NO: 1670333 - RNA, 19 nt, Artificial Sequence
  Description of Artificial Sequence: Synthetic oligonucleotide
gugacucgaguagaaauag

SEQ ID NO: 1670334 - RNA, 19 nt, Artificial Sequence
  Description of Artificial Sequence: Synthetic oligonucleotide
augguagucuaucacguuu

SEQ ID NO: 1670335 - RNA, 19 nt, Artificial Sequence
  Description of Artificial Sequence: Synthetic oligonucleotide
caaguauuuccucugugga

SEQ ID NO: 1670336 - RNA, 19 nt, Artificial Sequence
  Description of Artificial Sequence: Synthetic oligonucleotide
ccaauaaccuuuugcauac

SEQ ID NO: 1670337 - RNA, 19 nt, Artificial Sequence
  Description of Artificial Sequence: Synthetic oligonucleotide
uccgcugcagucuucaguu

SEQ ID NO: 1670338 - RNA, 19 nt, Artificial Sequence
  Description of Artificial Sequence: Synthetic oligonucleotide
uuugcgccuuagaaguucu

SEQ ID NO: 1670339 - RNA, 19 nt, Artificial Sequence
  Description of Artificial Sequence: Synthetic oligonucleotide
uguaacugcuuccgcugca

SEQ ID NO: 1670340 - RNA, 19 nt, Artificial Sequence
  Description of Artificial Sequence: Synthetic oligonucleotide
augugaucagugcugugcu

SEQ ID NO: 1670341 - RNA, 19 nt, Artificial Sequence
  Description of Artificial Sequence: Synthetic oligonucleotide
guuggagguacaaccaccc

SEQ ID NO: 1670342 - RNA, 19 nt, Artificial Sequence
  Description of Artificial Sequence: Synthetic oligonucleotide
aagcgacggaaaucaaccu

SEQ ID NO: 1670343 - RNA, 19 nt, Artificial Sequence
  Description of Artificial Sequence: Synthetic oligonucleotide
uugaggguuaucacacaaa

SEQ ID NO: 1670344 - RNA, 19 nt, Artificial Sequence
  Description of Artificial Sequence: Synthetic oligonucleotide
aaagaugcccaaacaagua

SEQ ID NO: 1670345 - RNA, 19 nt, Artificial Sequence
  Description of Artificial Sequence: Synthetic oligonucleotide
agcuugacaucauuccaga

SEQ ID NO: 1670346 - RNA, 19 nt, Artificial Sequence
  Description of Artificial Sequence: Synthetic oligonucleotide
aagccacuaaugucgcccu

SEQ ID NO: 1670347 - RNA, 19 nt, Artificial Sequence
  Description of Artificial Sequence: Synthetic oligonucleotide
uucaguaguuggagguaca

SEQ ID NO: 1670348 - RNA, 19 nt, Artificial Sequence
  Description of Artificial Sequence: Synthetic oligonucleotide
ucccugagagucgagguug

SEQ ID NO: 1670349 - RNA, 19 nt, Artificial Sequence
  Description of Artificial Sequence: Synthetic oligonucleotide
agugcuuuagaggguuagg

SEQ ID NO: 1670350 - RNA, 19 nt, Artificial Sequence
  Description of Artificial Sequence: Synthetic oligonucleotide
augccgagcaggucacggc

SEQ ID NO: 1670351 - RNA, 19 nt, Artificial Sequence
  Description of Artificial Sequence: Synthetic oligonucleotide
cacauuagucuguagucca

SEQ ID NO: 1670352 - RNA, 19 nt, Artificial Sequence
  Description of Artificial Sequence: Synthetic oligonucleotide
aguccgaaaauuuguucaa

SEQ ID NO: 1670353 - RNA, 19 nt, Artificial Sequence
  Description of Artificial Sequence: Synthetic oligonucleotide
acaaaagggcuacgaauaa

SEQ ID NO: 1670354 - RNA, 19 nt, Artificial Sequence
  Description of Artificial Sequence: Synthetic oligonucleotide
ggguacuucagcuaaaaua

SEQ ID NO: 1670355 - RNA, 19 nt, Artificial Sequence
  Description of Artificial Sequence: Synthetic oligonucleotide
auaucuucugucguuguaa

SEQ ID NO: 1670356 - RNA, 19 nt, Artificial Sequence
  Description of Artificial Sequence: Synthetic oligonucleotide
uuuguucugugguacuaua

SEQ ID NO: 1670357 - RNA, 19 nt, Artificial Sequence
  Description of Artificial Sequence: Synthetic oligonucleotide
ugauggaccgcaguaaguu

SEQ ID NO: 1670358 - RNA, 19 nt, Artificial Sequence
  Description of Artificial Sequence: Synthetic oligonucleotide
ucacaucugcaaucgcuga

SEQ ID NO: 1670359 - RNA, 19 nt, Artificial Sequence
  Description of Artificial Sequence: Synthetic oligonucleotide
ucccaauaaccuuuugcau

SEQ ID NO: 1670360 - RNA, 19 nt, Artificial Sequence
  Description of Artificial Sequence: Synthetic oligonucleotide
aacugccgccaauaauucu

SEQ ID NO: 1670361 - RNA, 19 nt, Artificial Sequence
  Description of Artificial Sequence: Synthetic oligonucleotide
ugguagucuaucacguuuu

SEQ ID NO: 1670362 - RNA, 19 nt, Artificial Sequence
  Description of Artificial Sequence: Synthetic oligonucleotide
gcuuuagaggguuaggcga

SEQ ID NO: 1670363 - RNA, 19 nt, Artificial Sequence
  Description of Artificial Sequence: Synthetic oligonucleotide
ucgaagaaccacugacaga

SEQ ID NO: 1670364 - RNA, 19 nt, Artificial Sequence
  Description of Artificial Sequence: Synthetic oligonucleotide
uucuccuaagcgacggaaa

SEQ ID NO: 1670365 - RNA, 19 nt, Artificial Sequence
  Description of Artificial Sequence: Synthetic oligonucleotide
uuggugacggugucgcaca

SEQ ID NO: 1670366 - RNA, 19 nt, Artificial Sequence
  Description of Artificial Sequence: Synthetic oligonucleotide
ugccgagcaggucacggca

SEQ ID NO: 1670367 - RNA, 19 nt, Artificial Sequence
  Description of Artificial Sequence: Synthetic oligonucleotide
cugucguuguaacugcuuc

SEQ ID NO: 1670368 - RNA, 19 nt, Artificial Sequence
  Description of Artificial Sequence: Synthetic oligonucleotide
aagcacauuucagucccug

SEQ ID NO: 1670369 - RNA, 19 nt, Artificial Sequence
  Description of Artificial Sequence: Synthetic oligonucleotide
aguauucacauuagucugu

SEQ ID NO: 1670370 - RNA, 19 nt, Artificial Sequence
  Description of Artificial Sequence: Synthetic oligonucleotide
gguacuucagcuaaaauau

SEQ ID NO: 1670371 - RNA, 19 nt, Artificial Sequence
  Description of Artificial Sequence: Synthetic oligonucleotide
cugugguacuauaauaaaa

SEQ ID NO: 1670372 - RNA, 19 nt, Artificial Sequence
  Description of Artificial Sequence: Synthetic oligonucleotide
auaaacccuggucuccagu

SEQ ID NO: 1670373 - RNA, 19 nt, Artificial Sequence
  Description of Artificial Sequence: Synthetic oligonucleotide
caucuuggcgguccacugg

SEQ ID NO: 1670374 - RNA, 19 nt, Artificial Sequence
  Description of Artificial Sequence: Synthetic oligonucleotide
uuccgcugcagucuucagu

SEQ ID NO: 1670375 - RNA, 19 nt, Artificial Sequence
  Description of Artificial Sequence: Synthetic oligonucleotide
uccucuguggacagucccu

SEQ ID NO: 1670376 - RNA, 19 nt, Artificial Sequence
  Description of Artificial Sequence: Synthetic oligonucleotide
acccucacaucugcaaucg

SEQ ID NO: 1670377 - RNA, 19 nt, Artificial Sequence
  Description of Artificial Sequence: Synthetic oligonucleotide
gauggaccgcaguaaguuc

SEQ ID NO: 1670378 - RNA, 19 nt, Artificial Sequence
  Description of Artificial Sequence: Synthetic oligonucleotide
ucguuguaacugcuuccgc

SEQ ID NO: 1670379 - RNA, 19 nt, Artificial Sequence
  Description of Artificial Sequence: Synthetic oligonucleotide
aaucgaaggcucacaauuu

SEQ ID NO: 1670380 - RNA, 19 nt, Artificial Sequence
  Description of Artificial Sequence: Synthetic oligonucleotide
cacuuugacuauaaacuaa

SEQ ID NO: 1670381 - RNA, 19 nt, Artificial Sequence
  Description of Artificial Sequence: Synthetic oligonucleotide
uuuucaguaguuggaggua

SEQ ID NO: 1670382 - RNA, 19 nt, Artificial Sequence
  Description of Artificial Sequence: Synthetic oligonucleotide
aaggguacuucagcuaaaa

SEQ ID NO: 1670383 - RNA, 19 nt, Artificial Sequence
  Description of Artificial Sequence: Synthetic oligonucleotide
gaccgucagagcucagugc

SEQ ID NO: 1670384 - RNA, 19 nt, Artificial Sequence
  Description of Artificial Sequence: Synthetic oligonucleotide
accgcaguaaguucucgaa

SEQ ID NO: 1670385 - RNA, 19 nt, Artificial Sequence
  Description of Artificial Sequence: Synthetic oligonucleotide
cuccaugguagucuaucac

SEQ ID NO: 1670386 - RNA, 19 nt, Artificial Sequence
  Description of Artificial Sequence: Synthetic oligonucleotide
uccgucuccaaguggcgga

SEQ ID NO: 1670387 - RNA, 19 nt, Artificial Sequence
  Description of Artificial Sequence: Synthetic oligonucleotide
uaggucuuacuugaggguu

SEQ ID NO: 1670388 - RNA, 19 nt, Artificial Sequence
  Description of Artificial Sequence: Synthetic oligonucleotide
gugggauuuauuugaugga

SEQ ID NO: 1670389 - RNA, 19 nt, Artificial Sequence
  Description of Artificial Sequence: Synthetic oligonucleotide
auuugauggaccgcaguaa

SEQ ID NO: 1670390 - RNA, 19 nt, Artificial Sequence
  Description of Artificial Sequence: Synthetic oligonucleotide
acgaagccacuaaugucgc

SEQ ID NO: 1670391 - RNA, 19 nt, Artificial Sequence
  Description of Artificial Sequence: Synthetic oligonucleotide
ccuaagcuugacaucauuc

SEQ ID NO: 1670392 - RNA, 19 nt, Artificial Sequence
  Description of Artificial Sequence: Synthetic oligonucleotide
aguucucgaaacguuugcu

SEQ ID NO: 1670393 - RNA, 19 nt, Artificial Sequence
  Description of Artificial Sequence: Synthetic oligonucleotide
guaguuggagguacaacca

SEQ ID NO: 1670394 - RNA, 19 nt, Artificial Sequence
  Description of Artificial Sequence: Synthetic oligonucleotide
gauaucuucugucguugua

SEQ ID NO: 1670395 - RNA, 19 nt, Artificial Sequence
  Description of Artificial Sequence: Synthetic oligonucleotide
gucuaucacguuuuguucu

SEQ ID NO: 1670396 - RNA, 19 nt, Artificial Sequence
  Description of Artificial Sequence: Synthetic oligonucleotide
agcacauuucagucccuga

SEQ ID NO: 1670397 - RNA, 19 nt, Artificial Sequence
  Description of Artificial Sequence: Synthetic oligonucleotide
guucgaagaaccacugaca

SEQ ID NO: 1670398 - RNA, 19 nt, Artificial Sequence
  Description of Artificial Sequence: Synthetic oligonucleotide
ugacagaacucuucuccua

SEQ ID NO: 1670399 - RNA, 19 nt, Artificial Sequence
  Description of Artificial Sequence: Synthetic oligonucleotide
ucaguaguuggagguacaa

SEQ ID NO: 1670400 - RNA, 19 nt, Artificial Sequence
  Description of Artificial Sequence: Synthetic oligonucleotide
agcgacggaaaucaaccuu

SEQ ID NO: 1670401 - RNA, 19 nt, Artificial Sequence
  Description of Artificial Sequence: Synthetic oligonucleotide
gccgccaauaauucucagg

SEQ ID NO: 1670402 - RNA, 19 nt, Artificial Sequence
  Description of Artificial Sequence: Synthetic oligonucleotide
caugccgagcaggucacgg

SEQ ID NO: 1670403 - RNA, 19 nt, Artificial Sequence
  Description of Artificial Sequence: Synthetic oligonucleotide
uuaggcgaguucaguuccu

SEQ ID NO: 1670404 - RNA, 19 nt, Artificial Sequence
  Description of Artificial Sequence: Synthetic oligonucleotide
gacaguaaucgaaggcuca

SEQ ID NO: 1670405 - RNA, 19 nt, Artificial Sequence
  Description of Artificial Sequence: Synthetic oligonucleotide
ugcugugacucgaguagaa

SEQ ID NO: 1670406 - RNA, 19 nt, Artificial Sequence
  Description of Artificial Sequence: Synthetic oligonucleotide
augcccaaacaaguauuuc

SEQ ID NO: 1670407 - RNA, 19 nt, Artificial Sequence
  Description of Artificial Sequence: Synthetic oligonucleotide
ggaaaucaaccuucucagc

SEQ ID NO: 1670408 - RNA, 19 nt, Artificial Sequence
  Description of Artificial Sequence: Synthetic oligonucleotide
cuuguguugccaaauacuu

SEQ ID NO: 1670409 - RNA, 19 nt, Artificial Sequence
  Description of Artificial Sequence: Synthetic oligonucleotide
ucuucuccuaagcgacgga

SEQ ID NO: 1670410 - RNA, 19 nt, Artificial Sequence
  Description of Artificial Sequence: Synthetic oligonucleotide
agucuguaguccaaagggu

SEQ ID NO: 1670411 - RNA, 19 nt, Artificial Sequence
  Description of Artificial Sequence: Synthetic oligonucleotide
ugcuccaugguagucuauc

SEQ ID NO: 1670412 - RNA, 19 nt, Artificial Sequence
  Description of Artificial Sequence: Synthetic oligonucleotide
guuggugacggugucgcac

SEQ ID NO: 1670413 - RNA, 19 nt, Artificial Sequence
  Description of Artificial Sequence: Synthetic oligonucleotide
auggaccgcaguaaguucu

SEQ ID NO: 1670414 - RNA, 19 nt, Artificial Sequence
  Description of Artificial Sequence: Synthetic oligonucleotide
aguggcggagccccgacau

SEQ ID NO: 1670415 - RNA, 19 nt, Artificial Sequence
  Description of Artificial Sequence: Synthetic oligonucleotide
auaaguccgaaaauuuguu

SEQ ID NO: 1670416 - RNA, 19 nt, Artificial Sequence
  Description of Artificial Sequence: Synthetic oligonucleotide
gguuaggcgaguucaguuc

SEQ ID NO: 1670417 - RNA, 19 nt, Artificial Sequence
  Description of Artificial Sequence: Synthetic oligonucleotide
acauaaacccuggucucca

SEQ ID NO: 1670418 - RNA, 19 nt, Artificial Sequence
  Description of Artificial Sequence: Synthetic oligonucleotide
cacuaaugucgcccucucg

SEQ ID NO: 1670419 - RNA, 19 nt, Artificial Sequence
  Description of Artificial Sequence: Synthetic oligonucleotide
ugcgccuuagaaguucuuc

SEQ ID NO: 1670420 - RNA, 19 nt, Artificial Sequence
  Description of Artificial Sequence: Synthetic oligonucleotide
cauaaacccuggucuccag

SEQ ID NO: 1670421 - RNA, 19 nt, Artificial Sequence
  Description of Artificial Sequence: Synthetic oligonucleotide
ucgaaacguuugcugugac

SEQ ID NO: 1670422 - RNA, 19 nt, Artificial Sequence
  Description of Artificial Sequence: Synthetic oligonucleotide
caaucgcugagaugugauc

SEQ ID NO: 1670423 - RNA, 19 nt, Artificial Sequence
  Description of Artificial Sequence: Synthetic oligonucleotide
guucaacaaggccucaucu

SEQ ID NO: 1670424 - RNA, 19 nt, Artificial Sequence
  Description of Artificial Sequence: Synthetic oligonucleotide
auauuaggucuuacuugag

SEQ ID NO: 1670425 - RNA, 19 nt, Artificial Sequence
  Description of Artificial Sequence: Synthetic oligonucleotide
cacuaaugacaguaaucga

SEQ ID NO: 1670426 - RNA, 19 nt, Artificial Sequence
  Description of Artificial Sequence: Synthetic oligonucleotide
ugcugugggccccauucau

SEQ ID NO: 1670427 - RNA, 19 nt, Artificial Sequence
  Description of Artificial Sequence: Synthetic oligonucleotide
auagcaucuuggcggucca

SEQ ID NO: 1670428 - RNA, 19 nt, Artificial Sequence
  Description of Artificial Sequence: Synthetic oligonucleotide
caggagcaagggaacugcc

SEQ ID NO: 1670429 - RNA, 19 nt, Artificial Sequence
  Description of Artificial Sequence: Synthetic oligonucleotide
gaccgcaguaaguucucga

SEQ ID NO: 1670430 - RNA, 19 nt, Artificial Sequence
  Description of Artificial Sequence: Synthetic oligonucleotide
agaugugaucagugcugug

SEQ ID NO: 1670431 - RNA, 19 nt, Artificial Sequence
  Description of Artificial Sequence: Synthetic oligonucleotide
gaacugccgccaauaauuc

SEQ ID NO: 1670432 - RNA, 19 nt, Artificial Sequence
  Description of Artificial Sequence: Synthetic oligonucleotide
acuacccaaggccugccuu

SEQ ID NO: 1670433 - RNA, 19 nt, Artificial Sequence
  Description of Artificial Sequence: Synthetic oligonucleotide
cagucccugagagucgagg

SEQ ID NO: 1670434 - RNA, 19 nt, Artificial Sequence
  Description of Artificial Sequence: Synthetic oligonucleotide
agugacuguucuucccaau

SEQ ID NO: 1670435 - RNA, 19 nt, Artificial Sequence
  Description of Artificial Sequence: Synthetic oligonucleotide
uuuagaggguuaggcgagu

SEQ ID NO: 1670436 - RNA, 19 nt, Artificial Sequence
  Description of Artificial Sequence: Synthetic oligonucleotide
auaugacuucucgguggac

SEQ ID NO: 1670437 - RNA, 19 nt, Artificial Sequence
  Description of Artificial Sequence: Synthetic oligonucleotide
gucccagaaaaggauucug

SEQ ID NO: 1670438 - RNA, 19 nt, Artificial Sequence
  Description of Artificial Sequence: Synthetic oligonucleotide
cugagaugugaucagugcu

SEQ ID NO: 1670439 - RNA, 19 nt, Artificial Sequence
  Description of Artificial Sequence: Synthetic oligonucleotide
caggcugaccgucagagcu

SEQ ID NO: 1670440 - RNA, 19 nt, Artificial Sequence
  Description of Artificial Sequence: Synthetic oligonucleotide
gucuccagucccacuaccc

SEQ ID NO: 1670441 - RNA, 19 nt, Artificial Sequence
  Description of Artificial Sequence: Synthetic oligonucleotide
ccgaaaauuuguucaaaga

SEQ ID NO: 1670442 - RNA, 19 nt, Artificial Sequence
  Description of Artificial Sequence: Synthetic oligonucleotide
ugguuucaguaauguucca

SEQ ID NO: 1670443 - RNA, 19 nt, Artificial Sequence
  Description of Artificial Sequence: Synthetic oligonucleotide
agcaugccgagcaggucac

SEQ ID NO: 1670444 - RNA, 19 nt, Artificial Sequence
  Description of Artificial Sequence: Synthetic oligonucleotide
uggaccgcaguaaguucuc

SEQ ID NO: 1670445 - RNA, 19 nt, Artificial Sequence
  Description of Artificial Sequence: Synthetic oligonucleotide
ggccaugaucucuucguug

SEQ ID NO: 1670446 - RNA, 19 nt, Artificial Sequence
  Description of Artificial Sequence: Synthetic oligonucleotide
uggugacggugucgcacag

SEQ ID NO: 1670447 - RNA, 19 nt, Artificial Sequence
  Description of Artificial Sequence: Synthetic oligonucleotide
aggguacuucagcuaaaau

SEQ ID NO: 1670448 - RNA, 19 nt, Artificial Sequence
  Description of Artificial Sequence: Synthetic oligonucleotide
gucacggcagcccuccguc

SEQ ID NO: 1670449 - RNA, 19 nt, Artificial Sequence
  Description of Artificial Sequence: Synthetic oligonucleotide
acucuucuccuaagcgacg

SEQ ID NO: 1670450 - RNA, 19 nt, Artificial Sequence
  Description of Artificial Sequence: Synthetic oligonucleotide
cacugacagaacucuucuc

SEQ ID NO: 1670451 - RNA, 19 nt, Artificial Sequence
  Description of Artificial Sequence: Synthetic oligonucleotide
agcaagggaacugccgcca

SEQ ID NO: 1670452 - RNA, 19 nt, Artificial Sequence
  Description of Artificial Sequence: Synthetic oligonucleotide
ugccgccaauaauucucag

SEQ ID NO: 1670453 - RNA, 19 nt, Artificial Sequence
  Description of Artificial Sequence: Synthetic oligonucleotide
accuaagcuugacaucauu

SEQ ID NO: 1670454 - RNA, 19 nt, Artificial Sequence
  Description of Artificial Sequence: Synthetic oligonucleotide
ugacggugucgcacagggc

SEQ ID NO: 1670455 - RNA, 19 nt, Artificial Sequence
  Description of Artificial Sequence: Synthetic oligonucleotide
agguggucccagaaaagga

SEQ ID NO: 1670456 - RNA, 19 nt, Artificial Sequence
  Description of Artificial Sequence: Synthetic oligonucleotide
cugugacucgaguagaaau

SEQ ID NO: 1670457 - RNA, 19 nt, Artificial Sequence
  Description of Artificial Sequence: Synthetic oligonucleotide
aggggacgaagccacuaau

SEQ ID NO: 1670458 - RNA, 19 nt, Artificial Sequence
  Description of Artificial Sequence: Synthetic oligonucleotide
ucagugcuuuagaggguua

SEQ ID NO: 1670459 - RNA, 19 nt, Artificial Sequence
  Description of Artificial Sequence: Synthetic oligonucleotide
gcuacgaauaaguccgaaa

SEQ ID NO: 1670460 - RNA, 19 nt, Artificial Sequence
  Description of Artificial Sequence: Synthetic oligonucleotide
ggguuaucacacaaaguga

SEQ ID NO: 1670461 - RNA, 19 nt, Artificial Sequence
  Description of Artificial Sequence: Synthetic oligonucleotide
cuccuaagcgacggaaauc

SEQ ID NO: 1670462 - RNA, 19 nt, Artificial Sequence
  Description of Artificial Sequence: Synthetic oligonucleotide
gguuaucacacaaagugau

SEQ ID NO: 1670463 - RNA, 19 nt, Artificial Sequence
  Description of Artificial Sequence: Synthetic oligonucleotide
gggacgaagccacuaaugu

SEQ ID NO: 1670464 - RNA, 19 nt, Artificial Sequence
  Description of Artificial Sequence: Synthetic oligonucleotide
cccaauaaccuuuugcaua

SEQ ID NO: 1670465 - RNA, 19 nt, Artificial Sequence
  Description of Artificial Sequence: Synthetic oligonucleotide
ugucgcacagggccaugau

SEQ ID NO: 1670466 - RNA, 19 nt, Artificial Sequence
  Description of Artificial Sequence: Synthetic oligonucleotide
caggucacggcagcccucc

SEQ ID NO: 1670467 - RNA, 19 nt, Artificial Sequence
  Description of Artificial Sequence: Synthetic oligonucleotide
cucgaaacguuugcuguga

SEQ ID NO: 1670468 - RNA, 19 nt, Artificial Sequence
  Description of Artificial Sequence: Synthetic oligonucleotide
gagaugugaucagugcugu

SEQ ID NO: 1670469 - RNA, 19 nt, Artificial Sequence
  Description of Artificial Sequence: Synthetic oligonucleotide
cugacagaacucuucuccu

SEQ ID NO: 1670470 - RNA, 19 nt, Artificial Sequence
  Description of Artificial Sequence: Synthetic oligonucleotide
aggguuaggcgaguucagu

SEQ ID NO: 1670471 - RNA, 19 nt, Artificial Sequence
  Description of Artificial Sequence: Synthetic oligonucleotide
cugagagucgagguuggga

SEQ ID NO: 1670472 - RNA, 19 nt, Artificial Sequence
  Description of Artificial Sequence: Synthetic oligonucleotide
ccucaucuccacuacauaa

SEQ ID NO: 1670473 - RNA, 19 nt, Artificial Sequence
  Description of Artificial Sequence: Synthetic oligonucleotide
uuagaggguuaggcgaguu

SEQ ID NO: 1670474 - RNA, 19 nt, Artificial Sequence
  Description of Artificial Sequence: Synthetic oligonucleotide
cacguuuuguucuguggua

SEQ ID NO: 1670475 - RNA, 19 nt, Artificial Sequence
  Description of Artificial Sequence: Synthetic oligonucleotide
gcgacggaaaucaaccuuc

SEQ ID NO: 1670476 - RNA, 19 nt, Artificial Sequence
  Description of Artificial Sequence: Synthetic oligonucleotide
cgaaaauuuguucaaagau

SEQ ID NO: 1670477 - RNA, 19 nt, Artificial Sequence
  Description of Artificial Sequence: Synthetic oligonucleotide
ccaaacaaguauuuccucu

SEQ ID NO: 1670478 - RNA, 19 nt, Artificial Sequence
  Description of Artificial Sequence: Synthetic oligonucleotide
gaguagaaauaggcaagua

SEQ ID NO: 1670479 - RNA, 19 nt, Artificial Sequence
  Description of Artificial Sequence: Synthetic oligonucleotide
cgaaggcucacaauuucug

SEQ ID NO: 1670480 - RNA, 19 nt, Artificial Sequence
  Description of Artificial Sequence: Synthetic oligonucleotide
cugccgccaauaauucuca

SEQ ID NO: 1670481 - RNA, 19 nt, Artificial Sequence
  Description of Artificial Sequence: Synthetic oligonucleotide
ggggacgaagccacuaaug

SEQ ID NO: 1670482 - RNA, 19 nt, Artificial Sequence
  Description of Artificial Sequence: Synthetic oligonucleotide
ggagccccgacaucucgcc

SEQ ID NO: 1670483 - RNA, 19 nt, Artificial Sequence
  Description of Artificial Sequence: Synthetic oligonucleotide
gagagucgagguugggacu

SEQ ID NO: 1670484 - RNA, 19 nt, Artificial Sequence
  Description of Artificial Sequence: Synthetic oligonucleotide
caacuccaaccauaacuaa

SEQ ID NO: 1670485 - RNA, 19 nt, Artificial Sequence
  Description of Artificial Sequence: Synthetic oligonucleotide
acauuagucuguaguccaa

SEQ ID NO: 1670486 - RNA, 19 nt, Artificial Sequence
  Description of Artificial Sequence: Synthetic oligonucleotide
cuucuccuaagcgacggaa

SEQ ID NO: 1670487 - RNA, 19 nt, Artificial Sequence
  Description of Artificial Sequence: Synthetic oligonucleotide
cagaucacucuguucaaau

SEQ ID NO: 1670488 - RNA, 19 nt, Artificial Sequence
  Description of Artificial Sequence: Synthetic oligonucleotide
aaccuaagcuugacaucau

SEQ ID NO: 1670489 - RNA, 19 nt, Artificial Sequence
  Description of Artificial Sequence: Synthetic oligonucleotide
gagccccgacaucucgccc

SEQ ID NO: 1670490 - RNA, 19 nt, Artificial Sequence
  Description of Artificial Sequence: Synthetic oligonucleotide
cccaaacaaguauuuccuc

SEQ ID NO: 1670491 - RNA, 19 nt, Artificial Sequence
  Description of Artificial Sequence: Synthetic oligonucleotide
cuacccaaggccugccuua

SEQ ID NO: 1670492 - RNA, 19 nt, Artificial Sequence
  Description of Artificial Sequence: Synthetic oligonucleotide
agucgagguugggacuaag

SEQ ID NO: 1670493 - RNA, 19 nt, Artificial Sequence
  Description of Artificial Sequence: Synthetic oligonucleotide
ucucuucguuguccagcau

SEQ ID NO: 1670494 - RNA, 19 nt, Artificial Sequence
  Description of Artificial Sequence: Synthetic oligonucleotide
acguuugcugugacucgag

SEQ ID NO: 1670495 - RNA, 19 nt, Artificial Sequence
  Description of Artificial Sequence: Synthetic oligonucleotide
caguaaucgaaggcucaca

SEQ ID NO: 1670496 - RNA, 19 nt, Artificial Sequence
  Description of Artificial Sequence: Synthetic oligonucleotide
guccgaaaauuuguucaaa

SEQ ID NO: 1670497 - RNA, 19 nt, Artificial Sequence
  Description of Artificial Sequence: Synthetic oligonucleotide
ggcaaguauucacauuagu

SEQ ID NO: 1670498 - RNA, 19 nt, Artificial Sequence
  Description of Artificial Sequence: Synthetic oligonucleotide
ccuuguguugccaaauacu

SEQ ID NO: 1670499 - RNA, 19 nt, Artificial Sequence
  Description of Artificial Sequence: Synthetic oligonucleotide
aggcgaguucaguuccuuu

SEQ ID NO: 1670500 - RNA, 19 nt, Artificial Sequence
  Description of Artificial Sequence: Synthetic oligonucleotide
cuguggacagucccugcaa

SEQ ID NO: 1670501 - RNA, 19 nt, Artificial Sequence
  Description of Artificial Sequence: Synthetic oligonucleotide
aggucuuacuugaggguua

SEQ ID NO: 1670502 - RNA, 19 nt, Artificial Sequence
  Description of Artificial Sequence: Synthetic oligonucleotide
uaggcgaguucaguuccuu

SEQ ID NO: 1670503 - RNA, 19 nt, Artificial Sequence
  Description of Artificial Sequence: Synthetic oligonucleotide
ggugacggugucgcacagg

SEQ ID NO: 1670504 - RNA, 19 nt, Artificial Sequence
  Description of Artificial Sequence: Synthetic oligonucleotide
aggucacggcagcccuccg

SEQ ID NO: 1670505 - RNA, 19 nt, Artificial Sequence
  Description of Artificial Sequence: Synthetic oligonucleotide
gcggagccccgacaucucg

SEQ ID NO: 1670506 - RNA, 19 nt, Artificial Sequence
  Description of Artificial Sequence: Synthetic oligonucleotide
guuaucacacaaagugauu

SEQ ID NO: 1670507 - RNA, 19 nt, Artificial Sequence
  Description of Artificial Sequence: Synthetic oligonucleotide
ggaccgcaguaaguucucg

SEQ ID NO: 1670508 - RNA, 19 nt, Artificial Sequence
  Description of Artificial Sequence: Synthetic oligonucleotide
cgagguugggacuaagaaa

SEQ ID NO: 1670509 - RNA, 19 nt, Artificial Sequence
  Description of Artificial Sequence: Synthetic oligonucleotide
gcgccuuagaaguucuucu

SEQ ID NO: 1670510 - RNA, 19 nt, Artificial Sequence
  Description of Artificial Sequence: Synthetic oligonucleotide
ccacaaaagggcuacgaau

SEQ ID NO: 1670511 - RNA, 19 nt, Artificial Sequence
  Description of Artificial Sequence: Synthetic oligonucleotide
uugcgccuuagaaguucuu

SEQ ID NO: 1670512 - RNA, 19 nt, Artificial Sequence
  Description of Artificial Sequence: Synthetic oligonucleotide
cugccuuauauuaggucuu

SEQ ID NO: 1670513 - RNA, 19 nt, Artificial Sequence
  Description of Artificial Sequence: Synthetic oligonucleotide
acggugucgcacagggcca

SEQ ID NO: 1670514 - RNA, 19 nt, Artificial Sequence
  Description of Artificial Sequence: Synthetic oligonucleotide
gcuugacaucauuccagaa

SEQ ID NO: 1670515 - RNA, 19 nt, Artificial Sequence
  Description of Artificial Sequence: Synthetic oligonucleotide
guguugccaaauacuuaaa

SEQ ID NO: 1670516 - RNA, 19 nt, Artificial Sequence
  Description of Artificial Sequence: Synthetic oligonucleotide
ccaaaggguacuucagcua

SEQ ID NO: 1670517 - RNA, 19 nt, Artificial Sequence
  Description of Artificial Sequence: Synthetic oligonucleotide
caucugcaaucgcugagau

SEQ ID NO: 1670518 - RNA, 19 nt, Artificial Sequence
  Description of Artificial Sequence: Synthetic oligonucleotide
gccuuauauuaggucuuac

SEQ ID NO: 1670519 - RNA, 19 nt, Artificial Sequence
  Description of Artificial Sequence: Synthetic oligonucleotide
cgaauaaguccgaaaauuu

SEQ ID NO: 1670520 - RNA, 19 nt, Artificial Sequence
  Description of Artificial Sequence: Synthetic oligonucleotide
cucagugcuuuagaggguu

SEQ ID NO: 1670521 - RNA, 19 nt, Artificial Sequence
  Description of Artificial Sequence: Synthetic oligonucleotide
ggguuaggcgaguucaguu

SEQ ID NO: 1670522 - RNA, 19 nt, Artificial Sequence
  Description of Artificial Sequence: Synthetic oligonucleotide
cucuuucacuaaugacagu

SEQ ID NO: 1670523 - RNA, 19 nt, Artificial Sequence
  Description of Artificial Sequence: Synthetic oligonucleotide
ggcugaccgucagagcuca

SEQ ID NO: 1670524 - RNA, 19 nt, Artificial Sequence
  Description of Artificial Sequence: Synthetic oligonucleotide
cugaccgucagagcucagu

SEQ ID NO: 1670525 - RNA, 19 nt, Artificial Sequence
  Description of Artificial Sequence: Synthetic oligonucleotide
ccaugaucucuucguuguc

SEQ ID NO: 1670526 - RNA, 19 nt, Artificial Sequence
  Description of Artificial Sequence: Synthetic oligonucleotide
ggcgguuggugacgguguc

SEQ ID NO: 1670527 - RNA, 19 nt, Artificial Sequence
  Description of Artificial Sequence: Synthetic oligonucleotide
ccugagagucgagguuggg

SEQ ID NO: 1670528 - RNA, 19 nt, Artificial Sequence
  Description of Artificial Sequence: Synthetic oligonucleotide
gggaacugccgccaauaau

SEQ ID NO: 1670529 - RNA, 19 nt, Artificial Sequence
  Description of Artificial Sequence: Synthetic oligonucleotide
gucuuacuugaggguuauc

SEQ ID NO: 1670530 - RNA, 19 nt, Artificial Sequence
  Description of Artificial Sequence: Synthetic oligonucleotide
gagucgagguugggacuaa

SEQ ID NO: 1670531 - RNA, 19 nt, Artificial Sequence
  Description of Artificial Sequence: Synthetic oligonucleotide
ggcuacgaauaaguccgaa

SEQ ID NO: 1670532 - RNA, 19 nt, Artificial Sequence
  Description of Artificial Sequence: Synthetic oligonucleotide
gccacuaaugucgcccucu

SEQ ID NO: 1670533 - RNA, 19 nt, Artificial Sequence
  Description of Artificial Sequence: Synthetic oligonucleotide
ccgcaguaaguucucgaaa

SEQ ID NO: 1670534 - RNA, 19 nt, Artificial Sequence
  Description of Artificial Sequence: Synthetic oligonucleotide
gcaugccgagcaggucacg

SEQ ID NO: 1670535 - RNA, 19 nt, Artificial Sequence
  Description of Artificial Sequence: Synthetic oligonucleotide
cccaaggccugccuuauau

SEQ ID NO: 1670536 - RNA, 19 nt, Artificial Sequence
  Description of Artificial Sequence: Synthetic oligonucleotide
ggucacggcagcccuccgu

SEQ ID NO: 1670537 - RNA, 19 nt, Artificial Sequence
  Description of Artificial Sequence: Synthetic oligonucleotide
ccuaagcgacggaaaucaa

SEQ ID NO: 1670538 - RNA, 19 nt, Artificial Sequence
  Description of Artificial Sequence: Synthetic oligonucleotide
ugucgcccucucggcccgc

SEQ ID NO: 1670539 - RNA, 19 nt, Artificial Sequence
  Description of Artificial Sequence: Synthetic oligonucleotide
ggucuuacuugaggguuau

SEQ ID NO: 1670540 - RNA, 19 nt, Artificial Sequence
  Description of Artificial Sequence: Synthetic oligonucleotide
gcaggggacgaagccacua

SEQ ID NO: 1670541 - RNA, 19 nt, Artificial Sequence
  Description of Artificial Sequence: Synthetic oligonucleotide
cgaguagaaauaggcaagu

SEQ ID NO: 1670542 - RNA, 19 nt, Artificial Sequence
  Description of Artificial Sequence: Synthetic oligonucleotide
cgcccucucggcccgcggg

SEQ ID NO: 1670543 - RNA, 19 nt, Artificial Sequence
  Description of Artificial Sequence: Synthetic oligonucleotide
cguuuuguucugugguacu

SEQ ID NO: 1670544 - RNA, 19 nt, Artificial Sequence
  Description of Artificial Sequence: Synthetic oligonucleotide
cgaaacguuugcugugacu

SEQ ID NO: 1670545 - RNA, 19 nt, Artificial Sequence
  Description of Artificial Sequence: Synthetic oligonucleotide
gggcuacgaauaaguccga

SEQ ID NO: 1670546 - RNA, 19 nt, Artificial Sequence
  Description of Artificial Sequence: Synthetic oligonucleotide
ggccugccuuauauuaggu

SEQ ID NO: 1670547 - RNA, 19 nt, Artificial Sequence
  Description of Artificial Sequence: Synthetic oligonucleotide
ggcggagccccgacaucuc

SEQ ID NO: 1670548 - RNA, 19 nt, Artificial Sequence
  Description of Artificial Sequence: Synthetic oligonucleotide
gcugaccgucagagcucag

SEQ ID NO: 1670549 - RNA, 19 nt, Artificial Sequence
  Description of Artificial Sequence: Synthetic oligonucleotide
ccacuacauaaacccuggu

SEQ ID NO: 1670550 - RNA, 19 nt, Artificial Sequence
  Description of Artificial Sequence: Synthetic oligonucleotide
cguuugcugugacucgagu

SEQ ID NO: 1670551 - RNA, 19 nt, Artificial Sequence
  Description of Artificial Sequence: Synthetic oligonucleotide
ccgucagagcucagugcuu

SEQ ID NO: 1670552 - RNA, 19 nt, Artificial Sequence
  Description of Artificial Sequence: Synthetic oligonucleotide
ccgcugcagucuucaguuu

SEQ ID NO: 1670553 - RNA, 19 nt, Artificial Sequence
  Description of Artificial Sequence: Synthetic oligonucleotide
cggugucgcacagggccau

SEQ ID NO: 1670554 - RNA, 19 nt, Artificial Sequence
  Description of Artificial Sequence: Synthetic oligonucleotide
aagaaugaacagcagaccc

SEQ ID NO: 1670555 - RNA, 19 nt, Artificial Sequence
  Description of Artificial Sequence: Synthetic oligonucleotide
auagacaacauauaggguc

SEQ ID NO: 1670556 - RNA, 19 nt, Artificial Sequence
  Description of Artificial Sequence: Synthetic oligonucleotide
aauaagagagugcugcccg

SEQ ID NO: 1670557 - RNA, 19 nt, Artificial Sequence
  Description of Artificial Sequence: Synthetic oligonucleotide
acaagaagccaccauauac

SEQ ID NO: 1670558 - RNA, 19 nt, Artificial Sequence
  Description of Artificial Sequence: Synthetic oligonucleotide
ucuacugucagcccgguag

SEQ ID NO: 1670559 - RNA, 19 nt, Artificial Sequence
  Description of Artificial Sequence: Synthetic oligonucleotide
uauagggucccacagauga

SEQ ID NO: 1670560 - RNA, 19 nt, Artificial Sequence
  Description of Artificial Sequence: Synthetic oligonucleotide
ucgagcauaauacaagaag

SEQ ID NO: 1670561 - RNA, 19 nt, Artificial Sequence
  Description of Artificial Sequence: Synthetic oligonucleotide
aauucgggaagcuuuccgg

SEQ ID NO: 1670562 - RNA, 19 nt, Artificial Sequence
  Description of Artificial Sequence: Synthetic oligonucleotide
guugcuuacauuuuccucc

SEQ ID NO: 1670563 - RNA, 19 nt, Artificial Sequence
  Description of Artificial Sequence: Synthetic oligonucleotide
aggaacacugaauacgggc

SEQ ID NO: 1670564 - RNA, 19 nt, Artificial Sequence
  Description of Artificial Sequence: Synthetic oligonucleotide
aauacaagaagccaccaua

SEQ ID NO: 1670565 - RNA, 19 nt, Artificial Sequence
  Description of Artificial Sequence: Synthetic oligonucleotide
uaagagaaucaaaagcacc

SEQ ID NO: 1670566 - RNA, 19 nt, Artificial Sequence
  Description of Artificial Sequence: Synthetic oligonucleotide
acuacucugguccuggcac

SEQ ID NO: 1670567 - RNA, 19 nt, Artificial Sequence
  Description of Artificial Sequence: Synthetic oligonucleotide
ggauaagagaaucaaaagc

SEQ ID NO: 1670568 - RNA, 19 nt, Artificial Sequence
  Description of Artificial Sequence: Synthetic oligonucleotide
ugaaauuugaucagcugaa

SEQ ID NO: 1670569 - RNA, 19 nt, Artificial Sequence
  Description of Artificial Sequence: Synthetic oligonucleotide
uaugugucuacugucagcc

SEQ ID NO: 1670570 - RNA, 19 nt, Artificial Sequence
  Description of Artificial Sequence: Synthetic oligonucleotide
ucgucguggaaaauaagag

SEQ ID NO: 1670571 - RNA, 19 nt, Artificial Sequence
  Description of Artificial Sequence: Synthetic oligonucleotide
acagucugucaccauaucg

SEQ ID NO: 1670572 - RNA, 19 nt, Artificial Sequence
  Description of Artificial Sequence: Synthetic oligonucleotide
auaugugucuacugucagc

SEQ ID NO: 1670573 - RNA, 19 nt, Artificial Sequence
  Description of Artificial Sequence: Synthetic oligonucleotide
uggcaugggcaccauaucg

SEQ ID NO: 1670574 - RNA, 19 nt, Artificial Sequence
  Description of Artificial Sequence: Synthetic oligonucleotide
gaauauaaaugugagggga

SEQ ID NO: 1670575 - RNA, 19 nt, Artificial Sequence
  Description of Artificial Sequence: Synthetic oligonucleotide
cucuaaggcagcuaaucgg

SEQ ID NO: 1670576 - RNA, 19 nt, Artificial Sequence
  Description of Artificial Sequence: Synthetic oligonucleotide
uuguagacaaucugguagc

SEQ ID NO: 1670577 - RNA, 19 nt, Artificial Sequence
  Description of Artificial Sequence: Synthetic oligonucleotide
ugaauacgggcccuacugg

SEQ ID NO: 1670578 - RNA, 19 nt, Artificial Sequence
  Description of Artificial Sequence: Synthetic oligonucleotide
agaaucuucauugaccuca

SEQ ID NO: 1670579 - RNA, 19 nt, Artificial Sequence
  Description of Artificial Sequence: Synthetic oligonucleotide
gugaaauuugaucagcuga

SEQ ID NO: 1670580 - RNA, 19 nt, Artificial Sequence
  Description of Artificial Sequence: Synthetic oligonucleotide
aguauucuccacuuggcca

SEQ ID NO: 1670581 - RNA, 19 nt, Artificial Sequence
  Description of Artificial Sequence: Synthetic oligonucleotide
ucaggugaaauuugaucag

SEQ ID NO: 1670582 - RNA, 19 nt, Artificial Sequence
  Description of Artificial Sequence: Synthetic oligonucleotide
gaauucgggaagcuuuccg

SEQ ID NO: 1670583 - RNA, 19 nt, Artificial Sequence
  Description of Artificial Sequence: Synthetic oligonucleotide
uguggaucuaacuuggcua

SEQ ID NO: 1670584 - RNA, 19 nt, Artificial Sequence
  Description of Artificial Sequence: Synthetic oligonucleotide
acacguagaucuucucugc

SEQ ID NO: 1670585 - RNA, 19 nt, Artificial Sequence
  Description of Artificial Sequence: Synthetic oligonucleotide
uuugaucagcugaagagua

SEQ ID NO: 1670586 - RNA, 19 nt, Artificial Sequence
  Description of Artificial Sequence: Synthetic oligonucleotide
aaagacgacaaggagcaga

SEQ ID NO: 1670587 - RNA, 19 nt, Artificial Sequence
  Description of Artificial Sequence: Synthetic oligonucleotide
aaaucacgcagccuuggga

SEQ ID NO: 1670588 - RNA, 19 nt, Artificial Sequence
  Description of Artificial Sequence: Synthetic oligonucleotide
agggugaaaucacgcagcc

SEQ ID NO: 1670589 - RNA, 19 nt, Artificial Sequence
  Description of Artificial Sequence: Synthetic oligonucleotide
ucaacuucuccgcagggaa

SEQ ID NO: 1670590 - RNA, 19 nt, Artificial Sequence
  Description of Artificial Sequence: Synthetic oligonucleotide
aggccuucgagcauaauac

SEQ ID NO: 1670591 - RNA, 19 nt, Artificial Sequence
  Description of Artificial Sequence: Synthetic oligonucleotide
accaguugcuuacauuuuc

SEQ ID NO: 1670592 - RNA, 19 nt, Artificial Sequence
  Description of Artificial Sequence: Synthetic oligonucleotide
uauagacaacauauagggu

SEQ ID NO: 1670593 - RNA, 19 nt, Artificial Sequence
  Description of Artificial Sequence: Synthetic oligonucleotide
guaucaacuucuccgcagg

SEQ ID NO: 1670594 - RNA, 19 nt, Artificial Sequence
  Description of Artificial Sequence: Synthetic oligonucleotide
auucgggaagcuuuccggg

SEQ ID NO: 1670595 - RNA, 19 nt, Artificial Sequence
  Description of Artificial Sequence: Synthetic oligonucleotide
uaaaugugaggggauaaga

SEQ ID NO: 1670596 - RNA, 19 nt, Artificial Sequence
  Description of Artificial Sequence: Synthetic oligonucleotide
uaaucggcguuccauguac

SEQ ID NO: 1670597 - RNA, 19 nt, Artificial Sequence
  Description of Artificial Sequence: Synthetic oligonucleotide
uugggaagacgaaagcugu

SEQ ID NO: 1670598 - RNA, 19 nt, Artificial Sequence
  Description of Artificial Sequence: Synthetic oligonucleotide
uggugugucccacugcugc

SEQ ID NO: 1670599 - RNA, 19 nt, Artificial Sequence
  Description of Artificial Sequence: Synthetic oligonucleotide
uucauugaccucaccugag

SEQ ID NO: 1670600 - RNA, 19 nt, Artificial Sequence
  Description of Artificial Sequence: Synthetic oligonucleotide
gaagaaugaacagcagacc

SEQ ID NO: 1670601 - RNA, 19 nt, Artificial Sequence
  Description of Artificial Sequence: Synthetic oligonucleotide
guggaucuaacuuggcuag

SEQ ID NO: 1670602 - RNA, 19 nt, Artificial Sequence
  Description of Artificial Sequence: Synthetic oligonucleotide
aagagagugcugcccguuc

SEQ ID NO: 1670603 - RNA, 19 nt, Artificial Sequence
  Description of Artificial Sequence: Synthetic oligonucleotide
ugugugccaucuaacacgu

SEQ ID NO: 1670604 - RNA, 19 nt, Artificial Sequence
  Description of Artificial Sequence: Synthetic oligonucleotide
aauauaaaugugaggggau

SEQ ID NO: 1670605 - RNA, 19 nt, Artificial Sequence
  Description of Artificial Sequence: Synthetic oligonucleotide
cugaauacgggcccuacug

SEQ ID NO: 1670606 - RNA, 19 nt, Artificial Sequence
  Description of Artificial Sequence: Synthetic oligonucleotide
gaaaucacgcagccuuggg

SEQ ID NO: 1670607 - RNA, 19 nt, Artificial Sequence
  Description of Artificial Sequence: Synthetic oligonucleotide
uucuccgcagggaacacug

SEQ ID NO: 1670608 - RNA, 19 nt, Artificial Sequence
  Description of Artificial Sequence: Synthetic oligonucleotide
uucccguucaagccggucc

SEQ ID NO: 1670609 - RNA, 19 nt, Artificial Sequence
  Description of Artificial Sequence: Synthetic oligonucleotide
gaacacugaauacgggccc

SEQ ID NO: 1670610 - RNA, 19 nt, Artificial Sequence
  Description of Artificial Sequence: Synthetic oligonucleotide
guucugggucuccagauag

SEQ ID NO: 1670611 - RNA, 19 nt, Artificial Sequence
  Description of Artificial Sequence: Synthetic oligonucleotide
acaaggagcagaggagugc

SEQ ID NO: 1670612 - RNA, 19 nt, Artificial Sequence
  Description of Artificial Sequence: Synthetic oligonucleotide
uaccacuggcaucaaagga

SEQ ID NO: 1670613 - RNA, 19 nt, Artificial Sequence
  Description of Artificial Sequence: Synthetic oligonucleotide
ugaggggauaagagaauca

SEQ ID NO: 1670614 - RNA, 19 nt, Artificial Sequence
  Description of Artificial Sequence: Synthetic oligonucleotide
uauaaaugugaggggauaa

SEQ ID NO: 1670615 - RNA, 19 nt, Artificial Sequence
  Description of Artificial Sequence: Synthetic oligonucleotide
ugaaaucacgcagccuugg

SEQ ID NO: 1670616 - RNA, 19 nt, Artificial Sequence
  Description of Artificial Sequence: Synthetic oligonucleotide
caaaugccugucaucgucc

SEQ ID NO: 1670617 - RNA, 19 nt, Artificial Sequence
  Description of Artificial Sequence: Synthetic oligonucleotide
auaaaugugaggggauaag

SEQ ID NO: 1670618 - RNA, 19 nt, Artificial Sequence
  Description of Artificial Sequence: Synthetic oligonucleotide
ugaagaguauucuccacuu

SEQ ID NO: 1670619 - RNA, 19 nt, Artificial Sequence
  Description of Artificial Sequence: Synthetic oligonucleotide
gaccucaccugagagauug

SEQ ID NO: 1670620 - RNA, 19 nt, Artificial Sequence
  Description of Artificial Sequence: Synthetic oligonucleotide
ucgcaagggugaaaucacg

SEQ ID NO: 1670621 - RNA, 19 nt, Artificial Sequence
  Description of Artificial Sequence: Synthetic oligonucleotide
ucguacuucucauuucuuc

SEQ ID NO: 1670622 - RNA, 19 nt, Artificial Sequence
  Description of Artificial Sequence: Synthetic oligonucleotide
auugaccucaccugagaga

SEQ ID NO: 1670623 - RNA, 19 nt, Artificial Sequence
  Description of Artificial Sequence: Synthetic oligonucleotide
uaucgucguggaaaauaag

SEQ ID NO: 1670624 - RNA, 19 nt, Artificial Sequence
  Description of Artificial Sequence: Synthetic oligonucleotide
aaaugccugucaucguccu

SEQ ID NO: 1670625 - RNA, 19 nt, Artificial Sequence
  Description of Artificial Sequence: Synthetic oligonucleotide
cuaaggcagcuaaucggcg

SEQ ID NO: 1670626 - RNA, 19 nt, Artificial Sequence
  Description of Artificial Sequence: Synthetic oligonucleotide
cauugaccucaccugagag

SEQ ID NO: 1670627 - RNA, 19 nt, Artificial Sequence
  Description of Artificial Sequence: Synthetic oligonucleotide
gaaggggcacccgaauucg

SEQ ID NO: 1670628 - RNA, 19 nt, Artificial Sequence
  Description of Artificial Sequence: Synthetic oligonucleotide
aacuucuccgcagggaaca

SEQ ID NO: 1670629 - RNA, 19 nt, Artificial Sequence
  Description of Artificial Sequence: Synthetic oligonucleotide
uagacacaaaugccuguca

SEQ ID NO: 1670630 - RNA, 19 nt, Artificial Sequence
  Description of Artificial Sequence: Synthetic oligonucleotide
cuucgagcauaauacaaga

SEQ ID NO: 1670631 - RNA, 19 nt, Artificial Sequence
  Description of Artificial Sequence: Synthetic oligonucleotide
agcuaaucggcguuccaug

SEQ ID NO: 1670632 - RNA, 19 nt, Artificial Sequence
  Description of Artificial Sequence: Synthetic oligonucleotide
uucgagcauaauacaagaa

SEQ ID NO: 1670633 - RNA, 19 nt, Artificial Sequence
  Description of Artificial Sequence: Synthetic oligonucleotide
aucgucguggaaaauaaga

SEQ ID NO: 1670634 - RNA, 19 nt, Artificial Sequence
  Description of Artificial Sequence: Synthetic oligonucleotide
agacccaauaagaauauaa

SEQ ID NO: 1670635 - RNA, 19 nt, Artificial Sequence
  Description of Artificial Sequence: Synthetic oligonucleotide
aucgcaagggugaaaucac

SEQ ID NO: 1670636 - RNA, 19 nt, Artificial Sequence
  Description of Artificial Sequence: Synthetic oligonucleotide
cugucaucguccugagugg

SEQ ID NO: 1670637 - RNA, 19 nt, Artificial Sequence
  Description of Artificial Sequence: Synthetic oligonucleotide
uaaggcagcuaaucggcgu

SEQ ID NO: 1670638 - RNA, 19 nt, Artificial Sequence
  Description of Artificial Sequence: Synthetic oligonucleotide
augggcaccauaucgucgu

SEQ ID NO: 1670639 - RNA, 19 nt, Artificial Sequence
  Description of Artificial Sequence: Synthetic oligonucleotide
gguaucaacuucuccgcag

SEQ ID NO: 1670640 - RNA, 19 nt, Artificial Sequence
  Description of Artificial Sequence: Synthetic oligonucleotide
augugucuacugucagccc

SEQ ID NO: 1670641 - RNA, 19 nt, Artificial Sequence
  Description of Artificial Sequence: Synthetic oligonucleotide
uacagcuggcgcgucacgg

SEQ ID NO: 1670642 - RNA, 19 nt, Artificial Sequence
  Description of Artificial Sequence: Synthetic oligonucleotide
accacuguucgguuuguca

SEQ ID NO: 1670643 - RNA, 19 nt, Artificial Sequence
  Description of Artificial Sequence: Synthetic oligonucleotide
accauauaccagcugcccu

SEQ ID NO: 1670644 - RNA, 19 nt, Artificial Sequence
  Description of Artificial Sequence: Synthetic oligonucleotide
gguguuauagacaacauau

SEQ ID NO: 1670645 - RNA, 19 nt, Artificial Sequence
  Description of Artificial Sequence: Synthetic oligonucleotide
caccauaucguacuucuca

SEQ ID NO: 1670646 - RNA, 19 nt, Artificial Sequence
  Description of Artificial Sequence: Synthetic oligonucleotide
agauaguccacuucccguu

SEQ ID NO: 1670647 - RNA, 19 nt, Artificial Sequence
  Description of Artificial Sequence: Synthetic oligonucleotide
ugcucugugucaagcgucu

SEQ ID NO: 1670648 - RNA, 19 nt, Artificial Sequence
  Description of Artificial Sequence: Synthetic oligonucleotide
ugccaucuaacacguagau

SEQ ID NO: 1670649 - RNA, 19 nt, Artificial Sequence
  Description of Artificial Sequence: Synthetic oligonucleotide
gaucuaacuuggcuagaca

SEQ ID NO: 1670650 - RNA, 19 nt, Artificial Sequence
  Description of Artificial Sequence: Synthetic oligonucleotide
cucaguucugagugcuucc

SEQ ID NO: 1670651 - RNA, 19 nt, Artificial Sequence
  Description of Artificial Sequence: Synthetic oligonucleotide
cuacugucagcccgguagg

SEQ ID NO: 1670652 - RNA, 19 nt, Artificial Sequence
  Description of Artificial Sequence: Synthetic oligonucleotide
aucggcguuccauguacuc

SEQ ID NO: 1670653 - RNA, 19 nt, Artificial Sequence
  Description of Artificial Sequence: Synthetic oligonucleotide
auacgggcccuacuggcag

SEQ ID NO: 1670654 - RNA, 19 nt, Artificial Sequence
  Description of Artificial Sequence: Synthetic oligonucleotide
ggaacacugaauacgggcc

SEQ ID NO: 1670655 - RNA, 19 nt, Artificial Sequence
  Description of Artificial Sequence: Synthetic oligonucleotide
ucaguucugagugcuuccc

SEQ ID NO: 1670656 - RNA, 19 nt, Artificial Sequence
  Description of Artificial Sequence: Synthetic oligonucleotide
accauaucguacuucucau

SEQ ID NO: 1670657 - RNA, 19 nt, Artificial Sequence
  Description of Artificial Sequence: Synthetic oligonucleotide
accauaucgucguggaaaa

SEQ ID NO: 1670658 - RNA, 19 nt, Artificial Sequence
  Description of Artificial Sequence: Synthetic oligonucleotide
agaaugaacagcagaccca

SEQ ID NO: 1670659 - RNA, 19 nt, Artificial Sequence
  Description of Artificial Sequence: Synthetic oligonucleotide
gaggccuucgagcauaaua

SEQ ID NO: 1670660 - RNA, 19 nt, Artificial Sequence
  Description of Artificial Sequence: Synthetic oligonucleotide
cagaguaccacuggcauca

SEQ ID NO: 1670661 - RNA, 19 nt, Artificial Sequence
  Description of Artificial Sequence: Synthetic oligonucleotide
acagcuggcgcgucacggg

SEQ ID NO: 1670662 - RNA, 19 nt, Artificial Sequence
  Description of Artificial Sequence: Synthetic oligonucleotide
ccuucgagcauaauacaag

SEQ ID NO: 1670663 - RNA, 19 nt, Artificial Sequence
  Description of Artificial Sequence: Synthetic oligonucleotide
aaggcagcuaaucggcguu

SEQ ID NO: 1670664 - RNA, 19 nt, Artificial Sequence
  Description of Artificial Sequence: Synthetic oligonucleotide
aacacugaauacgggcccu

SEQ ID NO: 1670665 - RNA, 19 nt, Artificial Sequence
  Description of Artificial Sequence: Synthetic oligonucleotide
caggugaaauuugaucagc

SEQ ID NO: 1670666 - RNA, 19 nt, Artificial Sequence
  Description of Artificial Sequence: Synthetic oligonucleotide
uacaagaagccaccauaua

SEQ ID NO: 1670667 - RNA, 19 nt, Artificial Sequence
  Description of Artificial Sequence: Synthetic oligonucleotide
ucccguucaagccggucca

SEQ ID NO: 1670668 - RNA, 19 nt, Artificial Sequence
  Description of Artificial Sequence: Synthetic oligonucleotide
aauacgggcccuacuggca

SEQ ID NO: 1670669 - RNA, 19 nt, Artificial Sequence
  Description of Artificial Sequence: Synthetic oligonucleotide
ugaguggcauagacagccc

SEQ ID NO: 1670670 - RNA, 19 nt, Artificial Sequence
  Description of Artificial Sequence: Synthetic oligonucleotide
aguagcggaggcuggcaug

SEQ ID NO: 1670671 - RNA, 19 nt, Artificial Sequence
  Description of Artificial Sequence: Synthetic oligonucleotide
uugaucagcugaagaguau

SEQ ID NO: 1670672 - RNA, 19 nt, Artificial Sequence
  Description of Artificial Sequence: Synthetic oligonucleotide
ugucaagcgucuguggauc

SEQ ID NO: 1670673 - RNA, 19 nt, Artificial Sequence
  Description of Artificial Sequence: Synthetic oligonucleotide
auacaagaagccaccauau

SEQ ID NO: 1670674 - RNA, 19 nt, Artificial Sequence
  Description of Artificial Sequence: Synthetic oligonucleotide
auaucgucguggaaaauaa

SEQ ID NO: 1670675 - RNA, 19 nt, Artificial Sequence
  Description of Artificial Sequence: Synthetic oligonucleotide
acugaauacgggcccuacu

SEQ ID NO: 1670676 - RNA, 19 nt, Artificial Sequence
  Description of Artificial Sequence: Synthetic oligonucleotide
cagggcggguguuauagac

SEQ ID NO: 1670677 - RNA, 19 nt, Artificial Sequence
  Description of Artificial Sequence: Synthetic oligonucleotide
gacgaaagcugugucguuc

SEQ ID NO: 1670678 - RNA, 19 nt, Artificial Sequence
  Description of Artificial Sequence: Synthetic oligonucleotide
agagagugcugcccguucu

SEQ ID NO: 1670679 - RNA, 19 nt, Artificial Sequence
  Description of Artificial Sequence: Synthetic oligonucleotide
ugaucagcugaagaguauu

SEQ ID NO: 1670680 - RNA, 19 nt, Artificial Sequence
  Description of Artificial Sequence: Synthetic oligonucleotide
agcagcaugccgacuacuc

SEQ ID NO: 1670681 - RNA, 19 nt, Artificial Sequence
  Description of Artificial Sequence: Synthetic oligonucleotide
acaagguggugcugcuguc

SEQ ID NO: 1670682 - RNA, 19 nt, Artificial Sequence
  Description of Artificial Sequence: Synthetic oligonucleotide
uggggccagaguaccacug

SEQ ID NO: 1670683 - RNA, 19 nt, Artificial Sequence
  Description of Artificial Sequence: Synthetic oligonucleotide
auauaaaugugaggggaua

SEQ ID NO: 1670684 - RNA, 19 nt, Artificial Sequence
  Description of Artificial Sequence: Synthetic oligonucleotide
gaggggauaagagaaucaa

SEQ ID NO: 1670685 - RNA, 19 nt, Artificial Sequence
  Description of Artificial Sequence: Synthetic oligonucleotide
aucacgcagccuugggaag

SEQ ID NO: 1670686 - RNA, 19 nt, Artificial Sequence
  Description of Artificial Sequence: Synthetic oligonucleotide
agccuugggaagacgaaag

SEQ ID NO: 1670687 - RNA, 19 nt, Artificial Sequence
  Description of Artificial Sequence: Synthetic oligonucleotide
ugucaucguccugaguggc

SEQ ID NO: 1670688 - RNA, 19 nt, Artificial Sequence
  Description of Artificial Sequence: Synthetic oligonucleotide
agcgucuguggaucuaacu

SEQ ID NO: 1670689 - RNA, 19 nt, Artificial Sequence
  Description of Artificial Sequence: Synthetic oligonucleotide
agucugucaccauaucgua

SEQ ID NO: 1670690 - RNA, 19 nt, Artificial Sequence
  Description of Artificial Sequence: Synthetic oligonucleotide
cccaguggauccuuggucc

SEQ ID NO: 1670691 - RNA, 19 nt, Artificial Sequence
  Description of Artificial Sequence: Synthetic oligonucleotide
aucguccugaguggcauag

SEQ ID NO: 1670692 - RNA, 19 nt, Artificial Sequence
  Description of Artificial Sequence: Synthetic oligonucleotide
guagaucuucucugcuggc

SEQ ID NO: 1670693 - RNA, 19 nt, Artificial Sequence
  Description of Artificial Sequence: Synthetic oligonucleotide
cuaacacguagaucuucuc

SEQ ID NO: 1670694 - RNA, 19 nt, Artificial Sequence
  Description of Artificial Sequence: Synthetic oligonucleotide
ccacuguucgguuugucag

SEQ ID NO: 1670695 - RNA, 19 nt, Artificial Sequence
  Description of Artificial Sequence: Synthetic oligonucleotide
guuaguagcggaggcuggc

SEQ ID NO: 1670696 - RNA, 19 nt, Artificial Sequence
  Description of Artificial Sequence: Synthetic oligonucleotide
caccauauaccagcugccc

SEQ ID NO: 1670697 - RNA, 19 nt, Artificial Sequence
  Description of Artificial Sequence: Synthetic oligonucleotide
cauaucgucguggaaaaua

SEQ ID NO: 1670698 - RNA, 19 nt, Artificial Sequence
  Description of Artificial Sequence: Synthetic oligonucleotide
ugugucguucugugugcca

SEQ ID NO: 1670699 - RNA, 19 nt, Artificial Sequence
  Description of Artificial Sequence: Synthetic oligonucleotide
ugcauucucucugggacau

SEQ ID NO: 1670700 - RNA, 19 nt, Artificial Sequence
  Description of Artificial Sequence: Synthetic oligonucleotide
guacuccacaagguggugc

SEQ ID NO: 1670701 - RNA, 19 nt, Artificial Sequence
  Description of Artificial Sequence: Synthetic oligonucleotide
cauaucguacuucucauuu

SEQ ID NO: 1670702 - RNA, 19 nt, Artificial Sequence
  Description of Artificial Sequence: Synthetic oligonucleotide
aggggucccguccaugaca

SEQ ID NO: 1670703 - RNA, 19 nt, Artificial Sequence
  Description of Artificial Sequence: Synthetic oligonucleotide
caugccgacuacucugguc

SEQ ID NO: 1670704 - RNA, 19 nt, Artificial Sequence
  Description of Artificial Sequence: Synthetic oligonucleotide
auacagcuggcgcgucacg

SEQ ID NO: 1670705 - RNA, 19 nt, Artificial Sequence
  Description of Artificial Sequence: Synthetic oligonucleotide
aagcgucuguggaucuaac

SEQ ID NO: 1670706 - RNA, 19 nt, Artificial Sequence
  Description of Artificial Sequence: Synthetic oligonucleotide
caccauaucgucguggaaa

SEQ ID NO: 1670707 - RNA, 19 nt, Artificial Sequence
  Description of Artificial Sequence: Synthetic oligonucleotide
ucaucguccugaguggcau

SEQ ID NO: 1670708 - RNA, 19 nt, Artificial Sequence
  Description of Artificial Sequence: Synthetic oligonucleotide
gaagucccgcagcucagca

SEQ ID NO: 1670709 - RNA, 19 nt, Artificial Sequence
  Description of Artificial Sequence: Synthetic oligonucleotide
agcugcccugugccuaccc

SEQ ID NO: 1670710 - RNA, 19 nt, Artificial Sequence
  Description of Artificial Sequence: Synthetic oligonucleotide
aagcaccaguugcuuacau

SEQ ID NO: 1670711 - RNA, 19 nt, Artificial Sequence
  Description of Artificial Sequence: Synthetic oligonucleotide
uuccgggcagccaucgcaa

SEQ ID NO: 1670712 - RNA, 19 nt, Artificial Sequence
  Description of Artificial Sequence: Synthetic oligonucleotide
auagggucccacagaugac

SEQ ID NO: 1670713 - RNA, 19 nt, Artificial Sequence
  Description of Artificial Sequence: Synthetic oligonucleotide
ggaaggggcacccgaauuc

SEQ ID NO: 1670714 - RNA, 19 nt, Artificial Sequence
  Description of Artificial Sequence: Synthetic oligonucleotide
uggauccuugguccauaga

SEQ ID NO: 1670715 - RNA, 19 nt, Artificial Sequence
  Description of Artificial Sequence: Synthetic oligonucleotide
caagccgguccacucuccc

SEQ ID NO: 1670716 - RNA, 19 nt, Artificial Sequence
  Description of Artificial Sequence: Synthetic oligonucleotide
ugucaccauaucguacuuc

SEQ ID NO: 1670717 - RNA, 19 nt, Artificial Sequence
  Description of Artificial Sequence: Synthetic oligonucleotide
gagagauuguguagccaca

SEQ ID NO: 1670718 - RNA, 19 nt, Artificial Sequence
  Description of Artificial Sequence: Synthetic oligonucleotide
gugaaaucacgcagccuug

SEQ ID NO: 1670719 - RNA, 19 nt, Artificial Sequence
  Description of Artificial Sequence: Synthetic oligonucleotide
ggcagggcggguguuauag

SEQ ID NO: 1670720 - RNA, 19 nt, Artificial Sequence
  Description of Artificial Sequence: Synthetic oligonucleotide
ggguuaguagcggaggcug

SEQ ID NO: 1670721 - RNA, 19 nt, Artificial Sequence
  Description of Artificial Sequence: Synthetic oligonucleotide
ggaucuaacuuggcuagac

SEQ ID NO: 1670722 - RNA, 19 nt, Artificial Sequence
  Description of Artificial Sequence: Synthetic oligonucleotide
uucgguuugucaggugaaa

SEQ ID NO: 1670723 - RNA, 19 nt, Artificial Sequence
  Description of Artificial Sequence: Synthetic oligonucleotide
ggcuagacacaaaugccug

SEQ ID NO: 1670724 - RNA, 19 nt, Artificial Sequence
  Description of Artificial Sequence: Synthetic oligonucleotide
ccacuucccguucaagccg

SEQ ID NO: 1670725 - RNA, 19 nt, Artificial Sequence
  Description of Artificial Sequence: Synthetic oligonucleotide
ucuucggcccuugccuuug

SEQ ID NO: 1670726 - RNA, 19 nt, Artificial Sequence
  Description of Artificial Sequence: Synthetic oligonucleotide
guagacaaucugguagcca

SEQ ID NO: 1670727 - RNA, 19 nt, Artificial Sequence
  Description of Artificial Sequence: Synthetic oligonucleotide
aaucggcguuccauguacu

SEQ ID NO: 1670728 - RNA, 19 nt, Artificial Sequence
  Description of Artificial Sequence: Synthetic oligonucleotide
cucugggacaugguguguc

SEQ ID NO: 1670729 - RNA, 19 nt, Artificial Sequence
  Description of Artificial Sequence: Synthetic oligonucleotide
cuacccaggggaaggggca

SEQ ID NO: 1670730 - RNA, 19 nt, Artificial Sequence
  Description of Artificial Sequence: Synthetic oligonucleotide
uggaucuaacuuggcuaga

SEQ ID NO: 1670731 - RNA, 19 nt, Artificial Sequence
  Description of Artificial Sequence: Synthetic oligonucleotide
gguuaguagcggaggcugg

SEQ ID NO: 1670732 - RNA, 19 nt, Artificial Sequence
  Description of Artificial Sequence: Synthetic oligonucleotide
auauagggucccacagaug

SEQ ID NO: 1670733 - RNA, 19 nt, Artificial Sequence
  Description of Artificial Sequence: Synthetic oligonucleotide
ggcaccauaucgucgugga

SEQ ID NO: 1670734 - RNA, 19 nt, Artificial Sequence
  Description of Artificial Sequence: Synthetic oligonucleotide
cugcauucucucugggaca

SEQ ID NO: 1670735 - RNA, 19 nt, Artificial Sequence
  Description of Artificial Sequence: Synthetic oligonucleotide
uaagagagugcugcccguu

SEQ ID NO: 1670736 - RNA, 19 nt, Artificial Sequence
  Description of Artificial Sequence: Synthetic oligonucleotide
aguggcauagacagcccaa

SEQ ID NO: 1670737 - RNA, 19 nt, Artificial Sequence
  Description of Artificial Sequence: Synthetic oligonucleotide
aggggauaagagaaucaaa

SEQ ID NO: 1670738 - RNA, 19 nt, Artificial Sequence
  Description of Artificial Sequence: Synthetic oligonucleotide
cugugucguucugugugcc

SEQ ID NO: 1670739 - RNA, 19 nt, Artificial Sequence
  Description of Artificial Sequence: Synthetic oligonucleotide
ugggcaccauaucgucgug

SEQ ID NO: 1670740 - RNA, 19 nt, Artificial Sequence
  Description of Artificial Sequence: Synthetic oligonucleotide
cuggcaugggcaccauauc

SEQ ID NO: 1670741 - RNA, 19 nt, Artificial Sequence
  Description of Artificial Sequence: Synthetic oligonucleotide
agccaccauauaccagcug

SEQ ID NO: 1670742 - RNA, 19 nt, Artificial Sequence
  Description of Artificial Sequence: Synthetic oligonucleotide
ggcacccgaauucgggaag

SEQ ID NO: 1670743 - RNA, 19 nt, Artificial Sequence
  Description of Artificial Sequence: Synthetic oligonucleotide
cacaagguggugcugcugu

SEQ ID NO: 1670744 - RNA, 19 nt, Artificial Sequence
  Description of Artificial Sequence: Synthetic oligonucleotide
ggguguuauagacaacaua

SEQ ID NO: 1670745 - RNA, 19 nt, Artificial Sequence
  Description of Artificial Sequence: Synthetic oligonucleotide
cacagucugucaccauauc

SEQ ID NO: 1670746 - RNA, 19 nt, Artificial Sequence
  Description of Artificial Sequence: Synthetic oligonucleotide
ccaggucaauauauguguc

SEQ ID NO: 1670747 - RNA, 19 nt, Artificial Sequence
  Description of Artificial Sequence: Synthetic oligonucleotide
cuuuccgggcagccaucgc

SEQ ID NO: 1670748 - RNA, 19 nt, Artificial Sequence
  Description of Artificial Sequence: Synthetic oligonucleotide
gacagcccaaaggcccucc

SEQ ID NO: 1670749 - RNA, 19 nt, Artificial Sequence
  Description of Artificial Sequence: Synthetic oligonucleotide
ugccgacuacucugguccu

SEQ ID NO: 1670750 - RNA, 19 nt, Artificial Sequence
  Description of Artificial Sequence: Synthetic oligonucleotide
ccaccaaaccgcuucagaa

SEQ ID NO: 1670751 - RNA, 19 nt, Artificial Sequence
  Description of Artificial Sequence: Synthetic oligonucleotide
cugagagauuguguagcca

SEQ ID NO: 1670752 - RNA, 19 nt, Artificial Sequence
  Description of Artificial Sequence: Synthetic oligonucleotide
cuaaucggcguuccaugua

SEQ ID NO: 1670753 - RNA, 19 nt, Artificial Sequence
  Description of Artificial Sequence: Synthetic oligonucleotide
caguugcuuacauuuuccu

SEQ ID NO: 1670754 - RNA, 19 nt, Artificial Sequence
  Description of Artificial Sequence: Synthetic oligonucleotide
cacugaauacgggcccuac

SEQ ID NO: 1670755 - RNA, 19 nt, Artificial Sequence
  Description of Artificial Sequence: Synthetic oligonucleotide
cagggaacacugagcuguc

SEQ ID NO: 1670756 - RNA, 19 nt, Artificial Sequence
  Description of Artificial Sequence: Synthetic oligonucleotide
ucccugaaggggucccguc

SEQ ID NO: 1670757 - RNA, 19 nt, Artificial Sequence
  Description of Artificial Sequence: Synthetic oligonucleotide
ucaagcgucuguggaucua

SEQ ID NO: 1670758 - RNA, 19 nt, Artificial Sequence
  Description of Artificial Sequence: Synthetic oligonucleotide
ccgaauucgggaagcuuuc

SEQ ID NO: 1670759 - RNA, 19 nt, Artificial Sequence
  Description of Artificial Sequence: Synthetic oligonucleotide
gaguaccacuggcaucaaa

SEQ ID NO: 1670760 - RNA, 19 nt, Artificial Sequence
  Description of Artificial Sequence: Synthetic oligonucleotide
gggcaccauaucgucgugg

SEQ ID NO: 1670761 - RNA, 19 nt, Artificial Sequence
  Description of Artificial Sequence: Synthetic oligonucleotide
aguggauccuugguccaua

SEQ ID NO: 1670762 - RNA, 19 nt, Artificial Sequence
  Description of Artificial Sequence: Synthetic oligonucleotide
uacccaggggaaggggcac

SEQ ID NO: 1670763 - RNA, 19 nt, Artificial Sequence
  Description of Artificial Sequence: Synthetic oligonucleotide
ggccuucgagcauaauaca

SEQ ID NO: 1670764 - RNA, 19 nt, Artificial Sequence
  Description of Artificial Sequence: Synthetic oligonucleotide
gugucaagcgucuguggau

SEQ ID NO: 1670765 - RNA, 19 nt, Artificial Sequence
  Description of Artificial Sequence: Synthetic oligonucleotide
gcuuguagacaaucuggua

SEQ ID NO: 1670766 - RNA, 19 nt, Artificial Sequence
  Description of Artificial Sequence: Synthetic oligonucleotide
agcuuuccgggcagccauc

SEQ ID NO: 1670767 - RNA, 19 nt, Artificial Sequence
  Description of Artificial Sequence: Synthetic oligonucleotide
ccgacuacucugguccugg

SEQ ID NO: 1670768 - RNA, 19 nt, Artificial Sequence
  Description of Artificial Sequence: Synthetic oligonucleotide
caagcgucuguggaucuaa

SEQ ID NO: 1670769 - RNA, 19 nt, Artificial Sequence
  Description of Artificial Sequence: Synthetic oligonucleotide
ucguucugugugccaucua

SEQ ID NO: 1670770 - RNA, 19 nt, Artificial Sequence
  Description of Artificial Sequence: Synthetic oligonucleotide
cucugugucaagcgucugu

SEQ ID NO: 1670771 - RNA, 19 nt, Artificial Sequence
  Description of Artificial Sequence: Synthetic oligonucleotide
cacgcagccuugggaagac

SEQ ID NO: 1670772 - RNA, 19 nt, Artificial Sequence
  Description of Artificial Sequence: Synthetic oligonucleotide
gcuaaucggcguuccaugu

SEQ ID NO: 1670773 - RNA, 19 nt, Artificial Sequence
  Description of Artificial Sequence: Synthetic oligonucleotide
ccuacuggcagggcgggug

SEQ ID NO: 1670774 - RNA, 19 nt, Artificial Sequence
  Description of Artificial Sequence: Synthetic oligonucleotide
ucguccugaguggcauaga

SEQ ID NO: 1670775 - RNA, 19 nt, Artificial Sequence
  Description of Artificial Sequence: Synthetic oligonucleotide
gccuucgagcauaauacaa

SEQ ID NO: 1670776 - RNA, 19 nt, Artificial Sequence
  Description of Artificial Sequence: Synthetic oligonucleotide
gcgucuguggaucuaacuu

SEQ ID NO: 1670777 - RNA, 19 nt, Artificial Sequence
  Description of Artificial Sequence: Synthetic oligonucleotide
ggggcacccgaauucggga

SEQ ID NO: 1670778 - RNA, 19 nt, Artificial Sequence
  Description of Artificial Sequence: Synthetic oligonucleotide
ggcccuugccuuugacccc

SEQ ID NO: 1670779 - RNA, 19 nt, Artificial Sequence
  Description of Artificial Sequence: Synthetic oligonucleotide
cacguagaucuucucugcu

SEQ ID NO: 1670780 - RNA, 19 nt, Artificial Sequence
  Description of Artificial Sequence: Synthetic oligonucleotide
ccuugguccauagaccaga

SEQ ID NO: 1670781 - RNA, 19 nt, Artificial Sequence
  Description of Artificial Sequence: Synthetic oligonucleotide
ccgggcagccaucgcaagg

SEQ ID NO: 1670782 - RNA, 19 nt, Artificial Sequence
  Description of Artificial Sequence: Synthetic oligonucleotide
gcacccgaauucgggaagc

SEQ ID NO: 1670783 - RNA, 19 nt, Artificial Sequence
  Description of Artificial Sequence: Synthetic oligonucleotide
gucaagcgucuguggaucu

SEQ ID NO: 1670784 - RNA, 19 nt, Artificial Sequence
  Description of Artificial Sequence: Synthetic oligonucleotide
cagucaccuucucauccaa

SEQ ID NO: 1670785 - RNA, 19 nt, Artificial Sequence
  Description of Artificial Sequence: Synthetic oligonucleotide
gggacauggugugucccac

SEQ ID NO: 1670786 - RNA, 19 nt, Artificial Sequence
  Description of Artificial Sequence: Synthetic oligonucleotide
cuacucugguccuggcacu

SEQ ID NO: 1670787 - RNA, 19 nt, Artificial Sequence
  Description of Artificial Sequence: Synthetic oligonucleotide
acgcagccuugggaagacg

SEQ ID NO: 1670788 - RNA, 19 nt, Artificial Sequence
  Description of Artificial Sequence: Synthetic oligonucleotide
gucguucugugugccaucu

SEQ ID NO: 1670789 - RNA, 19 nt, Artificial Sequence
  Description of Artificial Sequence: Synthetic oligonucleotide
cguucugugugccaucuaa

SEQ ID NO: 1670790 - RNA, 19 nt, Artificial Sequence
  Description of Artificial Sequence: Synthetic oligonucleotide
acccgaauucgggaagcuu

SEQ ID NO: 1670791 - RNA, 19 nt, Artificial Sequence
  Description of Artificial Sequence: Synthetic oligonucleotide
gugucguucugugugccau

SEQ ID NO: 1670792 - RNA, 19 nt, Artificial Sequence
  Description of Artificial Sequence: Synthetic oligonucleotide
caucuaacacguagaucuu

SEQ ID NO: 1670793 - RNA, 19 nt, Artificial Sequence
  Description of Artificial Sequence: Synthetic oligonucleotide
gcagcaugccgacuacucu

SEQ ID NO: 1670794 - RNA, 19 nt, Artificial Sequence
  Description of Artificial Sequence: Synthetic oligonucleotide
ggccagccguuccucuaag

SEQ ID NO: 1670795 - RNA, 19 nt, Artificial Sequence
  Description of Artificial Sequence: Synthetic oligonucleotide
gccuacccaggggaagggg

SEQ ID NO: 1670796 - RNA, 19 nt, Artificial Sequence
  Description of Artificial Sequence: Synthetic oligonucleotide
gcagcuaaucggcguucca

SEQ ID NO: 1670797 - RNA, 19 nt, Artificial Sequence
  Description of Artificial Sequence: Synthetic oligonucleotide
gggcacccgaauucgggaa

SEQ ID NO: 1670798 - RNA, 19 nt, Artificial Sequence
  Description of Artificial Sequence: Synthetic oligonucleotide
ccaucgcaagggugaaauc

SEQ ID NO: 1670799 - RNA, 19 nt, Artificial Sequence
  Description of Artificial Sequence: Synthetic oligonucleotide
caccacuguucgguuuguc

SEQ ID NO: 1670800 - RNA, 19 nt, Artificial Sequence
  Description of Artificial Sequence: Synthetic oligonucleotide
cagcuaaucggcguuccau

SEQ ID NO: 1670801 - RNA, 19 nt, Artificial Sequence
  Description of Artificial Sequence: Synthetic oligonucleotide
uggcagggcggguguuaua

SEQ ID NO: 1670802 - RNA, 19 nt, Artificial Sequence
  Description of Artificial Sequence: Synthetic oligonucleotide
cccaaaggcccuccucauc

SEQ ID NO: 1670803 - RNA, 19 nt, Artificial Sequence
  Description of Artificial Sequence: Synthetic oligonucleotide
caccaguugcuuacauuuu

SEQ ID NO: 1670804 - RNA, 19 nt, Artificial Sequence
  Description of Artificial Sequence: Synthetic oligonucleotide
gucuacugucagcccggua

SEQ ID NO: 1670805 - RNA, 19 nt, Artificial Sequence
  Description of Artificial Sequence: Synthetic oligonucleotide
caucguccugaguggcaua

SEQ ID NO: 1670806 - RNA, 19 nt, Artificial Sequence
  Description of Artificial Sequence: Synthetic oligonucleotide
agccaucgcaagggugaaa

SEQ ID NO: 1670807 - RNA, 19 nt, Artificial Sequence
  Description of Artificial Sequence: Synthetic oligonucleotide
gcccuugccuuugacccca

SEQ ID NO: 1670808 - RNA, 19 nt, Artificial Sequence
  Description of Artificial Sequence: Synthetic oligonucleotide
gcaccauaucgucguggaa

SEQ ID NO: 1670809 - RNA, 19 nt, Artificial Sequence
  Description of Artificial Sequence: Synthetic oligonucleotide
gcagggcggguguuauaga

SEQ ID NO: 1670810 - RNA, 19 nt, Artificial Sequence
  Description of Artificial Sequence: Synthetic oligonucleotide
gccgacuacucugguccug

SEQ ID NO: 1670811 - RNA, 19 nt, Artificial Sequence
  Description of Artificial Sequence: Synthetic oligonucleotide
gcagccuugggaagacgaa

SEQ ID NO: 1670812 - RNA, 19 nt, Artificial Sequence
  Description of Artificial Sequence: Synthetic oligonucleotide
gggguuaguagcggaggcu

SEQ ID NO: 1670813 - RNA, 19 nt, Artificial Sequence
  Description of Artificial Sequence: Synthetic oligonucleotide
cuucggcccuugccuuuga

SEQ ID NO: 1670814 - RNA, 19 nt, Artificial Sequence
  Description of Artificial Sequence: Synthetic oligonucleotide
gcucugugucaagcgucug

SEQ ID NO: 1670815 - RNA, 19 nt, Artificial Sequence
  Description of Artificial Sequence: Synthetic oligonucleotide
ccaaaccgcuucagaaucu

SEQ ID NO: 1670816 - RNA, 19 nt, Artificial Sequence
  Description of Artificial Sequence: Synthetic oligonucleotide
guccaccacuguucgguuu

SEQ ID NO: 1670817 - RNA, 19 nt, Artificial Sequence
  Description of Artificial Sequence: Synthetic oligonucleotide
cgacuacucugguccuggc

SEQ ID NO: 1670818 - RNA, 19 nt, Artificial Sequence
  Description of Artificial Sequence: Synthetic oligonucleotide
cagccaucgcaagggugaa

SEQ ID NO: 1670819 - RNA, 19 nt, Artificial Sequence
  Description of Artificial Sequence: Synthetic oligonucleotide
ggcauacagcuggcgcguc

SEQ ID NO: 1670820 - RNA, 19 nt, Artificial Sequence
  Description of Artificial Sequence: Synthetic oligonucleotide
cacccgaauucgggaagcu

SEQ ID NO: 1670821 - RNA, 19 nt, Artificial Sequence
  Description of Artificial Sequence: Synthetic oligonucleotide
cccguucaagccgguccac

SEQ ID NO: 1670822 - RNA, 19 nt, Artificial Sequence
  Description of Artificial Sequence: Synthetic oligonucleotide
cacggaggccuucgagcau

SEQ ID NO: 1670823 - RNA, 19 nt, Artificial Sequence
  Description of Artificial Sequence: Synthetic oligonucleotide
gcccaaaggcccuccucau

SEQ ID NO: 1670824 - RNA, 19 nt, Artificial Sequence
  Description of Artificial Sequence: Synthetic oligonucleotide
ccacucucccugagauggu

SEQ ID NO: 1670825 - RNA, 19 nt, Artificial Sequence
  Description of Artificial Sequence: Synthetic oligonucleotide
cagggccuccagucaccuu

SEQ ID NO: 1670826 - RNA, 19 nt, Artificial Sequence
  Description of Artificial Sequence: Synthetic oligonucleotide
ccauaucgucguggaaaau

SEQ ID NO: 1670827 - RNA, 19 nt, Artificial Sequence
  Description of Artificial Sequence: Synthetic oligonucleotide
ccguuccucuaaggcagcu

SEQ ID NO: 1670828 - RNA, 19 nt, Artificial Sequence
  Description of Artificial Sequence: Synthetic oligonucleotide
ggaggccuucgagcauaau

SEQ ID NO: 1670829 - RNA, 19 nt, Artificial Sequence
  Description of Artificial Sequence: Synthetic oligonucleotide
aaugccacccacuagaucc

SEQ ID NO: 1670830 - RNA, 19 nt, Artificial Sequence
  Description of Artificial Sequence: Synthetic oligonucleotide
aaagguuucuauuaaagug

SEQ ID NO: 1670831 - RNA, 19 nt, Artificial Sequence
  Description of Artificial Sequence: Synthetic oligonucleotide
uuuaguaauaaguaguaga

SEQ ID NO: 1670832 - RNA, 19 nt, Artificial Sequence
  Description of Artificial Sequence: Synthetic oligonucleotide
agacuggaggcuuagaucc

SEQ ID NO: 1670833 - RNA, 19 nt, Artificial Sequence
  Description of Artificial Sequence: Synthetic oligonucleotide
uuuaauuccgacuugcuca

SEQ ID NO: 1670834 - RNA, 19 nt, Artificial Sequence
  Description of Artificial Sequence: Synthetic oligonucleotide
aacacucgcacauacuccc

SEQ ID NO: 1670835 - RNA, 19 nt, Artificial Sequence
  Description of Artificial Sequence: Synthetic oligonucleotide
ugaacaagcgucaaagccc

SEQ ID NO: 1670836 - RNA, 19 nt, Artificial Sequence
  Description of Artificial Sequence: Synthetic oligonucleotide
uucacggugacauaggccc

SEQ ID NO: 1670837 - RNA, 19 nt, Artificial Sequence
  Description of Artificial Sequence: Synthetic oligonucleotide
uuaaagugaacgcuuuuag

SEQ ID NO: 1670838 - RNA, 19 nt, Artificial Sequence
  Description of Artificial Sequence: Synthetic oligonucleotide
ugaaaugccacccacuaga

SEQ ID NO: 1670839 - RNA, 19 nt, Artificial Sequence
  Description of Artificial Sequence: Synthetic oligonucleotide
uguccauacuccauuaggg

SEQ ID NO: 1670840 - RNA, 19 nt, Artificial Sequence
  Description of Artificial Sequence: Synthetic oligonucleotide
uucgucaugcaccagaggc

SEQ ID NO: 1670841 - RNA, 19 nt, Artificial Sequence
  Description of Artificial Sequence: Synthetic oligonucleotide
aacgcuuuuaguaauaagu

SEQ ID NO: 1670842 - RNA, 19 nt, Artificial Sequence
  Description of Artificial Sequence: Synthetic oligonucleotide
auaaguaguagaaaugggg

SEQ ID NO: 1670843 - RNA, 19 nt, Artificial Sequence
  Description of Artificial Sequence: Synthetic oligonucleotide
ugagguaaggcaguggugg

SEQ ID NO: 1670844 - RNA, 19 nt, Artificial Sequence
  Description of Artificial Sequence: Synthetic oligonucleotide
aaaccagccuccuaggaug

SEQ ID NO: 1670845 - RNA, 19 nt, Artificial Sequence
  Description of Artificial Sequence: Synthetic oligonucleotide
ugaagcaauguccauacuc

SEQ ID NO: 1670846 - RNA, 19 nt, Artificial Sequence
  Description of Artificial Sequence: Synthetic oligonucleotide
uuugucaacgccuggcuag

SEQ ID NO: 1670847 - RNA, 19 nt, Artificial Sequence
  Description of Artificial Sequence: Synthetic oligonucleotide
ucuauuaaagugaacgcuu

SEQ ID NO: 1670848 - RNA, 19 nt, Artificial Sequence
  Description of Artificial Sequence: Synthetic oligonucleotide
aaacgggugaugcucaugu

SEQ ID NO: 1670849 - RNA, 19 nt, Artificial Sequence
  Description of Artificial Sequence: Synthetic oligonucleotide
cugaacaagcgucaaagcc

SEQ ID NO: 1670850 - RNA, 19 nt, Artificial Sequence
  Description of Artificial Sequence: Synthetic oligonucleotide
aguaguagaaauggggagg

SEQ ID NO: 1670851 - RNA, 19 nt, Artificial Sequence
  Description of Artificial Sequence: Synthetic oligonucleotide
uccauuagggccucgauaa

SEQ ID NO: 1670852 - RNA, 19 nt, Artificial Sequence
  Description of Artificial Sequence: Synthetic oligonucleotide
caauguagaguuugggccg

SEQ ID NO: 1670853 - RNA, 19 nt, Artificial Sequence
  Description of Artificial Sequence: Synthetic oligonucleotide
acuuauggcagguccggcc

SEQ ID NO: 1670854 - RNA, 19 nt, Artificial Sequence
  Description of Artificial Sequence: Synthetic oligonucleotide
aagugcacaaugguauccc

SEQ ID NO: 1670855 - RNA, 19 nt, Artificial Sequence
  Description of Artificial Sequence: Synthetic oligonucleotide
agcgacuuccuacuguggc

SEQ ID NO: 1670856 - RNA, 19 nt, Artificial Sequence
  Description of Artificial Sequence: Synthetic oligonucleotide
auguccauacuccauuagg

SEQ ID NO: 1670857 - RNA, 19 nt, Artificial Sequence
  Description of Artificial Sequence: Synthetic oligonucleotide
uuuuaguaauaaguaguag

SEQ ID NO: 1670858 - RNA, 19 nt, Artificial Sequence
  Description of Artificial Sequence: Synthetic oligonucleotide
uuuucgaacgcuuggcgca

SEQ ID NO: 1670859 - RNA, 19 nt, Artificial Sequence
  Description of Artificial Sequence: Synthetic oligonucleotide
uucuauuaaagugaacgcu

SEQ ID NO: 1670860 - RNA, 19 nt, Artificial Sequence
  Description of Artificial Sequence: Synthetic oligonucleotide
agugagguaaggcaguggu

SEQ ID NO: 1670861 - RNA, 19 nt, Artificial Sequence
  Description of Artificial Sequence: Synthetic oligonucleotide
aucgugucugcuuugcuag

SEQ ID NO: 1670862 - RNA, 19 nt, Artificial Sequence
  Description of Artificial Sequence: Synthetic oligonucleotide
uuccuuuucgaacgcuugg

SEQ ID NO: 1670863 - RNA, 19 nt, Artificial Sequence
  Description of Artificial Sequence: Synthetic oligonucleotide
gauguuuuaauuccgacuu

SEQ ID NO: 1670864 - RNA, 19 nt, Artificial Sequence
  Description of Artificial Sequence: Synthetic oligonucleotide
ugcaaagugccaauuguuc

SEQ ID NO: 1670865 - RNA, 19 nt, Artificial Sequence
  Description of Artificial Sequence: Synthetic oligonucleotide
ucgucaugcaccagaggcg

SEQ ID NO: 1670866 - RNA, 19 nt, Artificial Sequence
  Description of Artificial Sequence: Synthetic oligonucleotide
uccaugaggagcugcauga

SEQ ID NO: 1670867 - RNA, 19 nt, Artificial Sequence
  Description of Artificial Sequence: Synthetic oligonucleotide
uaaagugaacgcuuuuagu

SEQ ID NO: 1670868 - RNA, 19 nt, Artificial Sequence
  Description of Artificial Sequence: Synthetic oligonucleotide
cuuuucgaacgcuuggcgc

SEQ ID NO: 1670869 - RNA, 19 nt, Artificial Sequence
  Description of Artificial Sequence: Synthetic oligonucleotide
cuguuagggacgcaggagg

SEQ ID NO: 1670870 - RNA, 19 nt, Artificial Sequence
  Description of Artificial Sequence: Synthetic oligonucleotide
cugggucccacacuuaugg

SEQ ID NO: 1670871 - RNA, 19 nt, Artificial Sequence
  Description of Artificial Sequence: Synthetic oligonucleotide
aaaugccacccacuagauc

SEQ ID NO: 1670872 - RNA, 19 nt, Artificial Sequence
  Description of Artificial Sequence: Synthetic oligonucleotide
cagucaagcccauauuggg

SEQ ID NO: 1670873 - RNA, 19 nt, Artificial Sequence
  Description of Artificial Sequence: Synthetic oligonucleotide
ucggucacaucaaacacuc

SEQ ID NO: 1670874 - RNA, 19 nt, Artificial Sequence
  Description of Artificial Sequence: Synthetic oligonucleotide
ucaacgccuggcuagguug

SEQ ID NO: 1670875 - RNA, 19 nt, Artificial Sequence
  Description of Artificial Sequence: Synthetic oligonucleotide
cuuauggcagguccggccg

SEQ ID NO: 1670876 - RNA, 19 nt, Artificial Sequence
  Description of Artificial Sequence: Synthetic oligonucleotide
gagagauguuuuaauuccg

SEQ ID NO: 1670877 - RNA, 19 nt, Artificial Sequence
  Description of Artificial Sequence: Synthetic oligonucleotide
gucaagcccauauuggggc

SEQ ID NO: 1670878 - RNA, 19 nt, Artificial Sequence
  Description of Artificial Sequence: Synthetic oligonucleotide
ucaugcaaacgggugaugc

SEQ ID NO: 1670879 - RNA, 19 nt, Artificial Sequence
  Description of Artificial Sequence: Synthetic oligonucleotide
cuccgcuucacuuagguca

SEQ ID NO: 1670880 - RNA, 19 nt, Artificial Sequence
  Description of Artificial Sequence: Synthetic oligonucleotide
gacccuagacacaggaucg

SEQ ID NO: 1670881 - RNA, 19 nt, Artificial Sequence
  Description of Artificial Sequence: Synthetic oligonucleotide
gagaggaguggccaaggag

SEQ ID NO: 1670882 - RNA, 19 nt, Artificial Sequence
  Description of Artificial Sequence: Synthetic oligonucleotide
agauccguccgcccugugc

SEQ ID NO: 1670883 - RNA, 19 nt, Artificial Sequence
  Description of Artificial Sequence: Synthetic oligonucleotide
gaacgcuuuuaguaauaag

SEQ ID NO: 1670884 - RNA, 19 nt, Artificial Sequence
  Description of Artificial Sequence: Synthetic oligonucleotide
cacaaugguaucccggagc

SEQ ID NO: 1670885 - RNA, 19 nt, Artificial Sequence
  Description of Artificial Sequence: Synthetic oligonucleotide
acuuaggucagcagcacuc

SEQ ID NO: 1670886 - RNA, 19 nt, Artificial Sequence
  Description of Artificial Sequence: Synthetic oligonucleotide
cugcaaguucacaauguag

SEQ ID NO: 1670887 - RNA, 19 nt, Artificial Sequence
  Description of Artificial Sequence: Synthetic oligonucleotide
ugcacucugguccccaggc

SEQ ID NO: 1670888 - RNA, 19 nt, Artificial Sequence
  Description of Artificial Sequence: Synthetic oligonucleotide
cuugccaccggcuguagac

SEQ ID NO: 1670889 - RNA, 19 nt, Artificial Sequence
  Description of Artificial Sequence: Synthetic oligonucleotide
acagcgacuuccuacugug

SEQ ID NO: 1670890 - RNA, 19 nt, Artificial Sequence
  Description of Artificial Sequence: Synthetic oligonucleotide
acagucaagcccauauugg

SEQ ID NO: 1670891 - RNA, 19 nt, Artificial Sequence
  Description of Artificial Sequence: Synthetic oligonucleotide
uucaagcuggacccuagac

SEQ ID NO: 1670892 - RNA, 19 nt, Artificial Sequence
  Description of Artificial Sequence: Synthetic oligonucleotide
agugcacaaugguaucccg

SEQ ID NO: 1670893 - RNA, 19 nt, Artificial Sequence
  Description of Artificial Sequence: Synthetic oligonucleotide
uucuuugucaacgccuggc

SEQ ID NO: 1670894 - RNA, 19 nt, Artificial Sequence
  Description of Artificial Sequence: Synthetic oligonucleotide
guaguagaaauggggaggc

SEQ ID NO: 1670895 - RNA, 19 nt, Artificial Sequence
  Description of Artificial Sequence: Synthetic oligonucleotide
uugcucaugcaaacgggug

SEQ ID NO: 1670896 - RNA, 19 nt, Artificial Sequence
  Description of Artificial Sequence: Synthetic oligonucleotide
uguagacugggaucuccag

SEQ ID NO: 1670897 - RNA, 19 nt, Artificial Sequence
  Description of Artificial Sequence: Synthetic oligonucleotide
cacauacucccuguuaggg

SEQ ID NO: 1670898 - RNA, 19 nt, Artificial Sequence
  Description of Artificial Sequence: Synthetic oligonucleotide
guccauacuccauuagggc

SEQ ID NO: 1670899 - RNA, 19 nt, Artificial Sequence
  Description of Artificial Sequence: Synthetic oligonucleotide
uccgcuucacuuaggucag

SEQ ID NO: 1670900 - RNA, 19 nt, Artificial Sequence
  Description of Artificial Sequence: Synthetic oligonucleotide
augcaaacgggugaugcuc

SEQ ID NO: 1670901 - RNA, 19 nt, Artificial Sequence
  Description of Artificial Sequence: Synthetic oligonucleotide
uguuagggacgcaggaggu

SEQ ID NO: 1670902 - RNA, 19 nt, Artificial Sequence
  Description of Artificial Sequence: Synthetic oligonucleotide
ugcaaacgggugaugcuca

SEQ ID NO: 1670903 - RNA, 19 nt, Artificial Sequence
  Description of Artificial Sequence: Synthetic oligonucleotide
gaggcuuagauccguccgc

SEQ ID NO: 1670904 - RNA, 19 nt, Artificial Sequence
  Description of Artificial Sequence: Synthetic oligonucleotide
agucaagcccauauugggg

SEQ ID NO: 1670905 - RNA, 19 nt, Artificial Sequence
  Description of Artificial Sequence: Synthetic oligonucleotide
ugagacacgacaugcugua

SEQ ID NO: 1670906 - RNA, 19 nt, Artificial Sequence
  Description of Artificial Sequence: Synthetic oligonucleotide
gacacgacaugcuguacca

SEQ ID NO: 1670907 - RNA, 19 nt, Artificial Sequence
  Description of Artificial Sequence: Synthetic oligonucleotide
agcgucaaagcccucugca

SEQ ID NO: 1670908 - RNA, 19 nt, Artificial Sequence
  Description of Artificial Sequence: Synthetic oligonucleotide
acgggugaugcucaugugu

SEQ ID NO: 1670909 - RNA, 19 nt, Artificial Sequence
  Description of Artificial Sequence: Synthetic oligonucleotide
guagaguuugggccgccgg

SEQ ID NO: 1670910 - RNA, 19 nt, Artificial Sequence
  Description of Artificial Sequence: Synthetic oligonucleotide
agacugggaucuccaggcc

SEQ ID NO: 1670911 - RNA, 19 nt, Artificial Sequence
  Description of Artificial Sequence: Synthetic oligonucleotide
uuauggcagguccggccgg

SEQ ID NO: 1670912 - RNA, 19 nt, Artificial Sequence
  Description of Artificial Sequence: Synthetic oligonucleotide
ucccuguuagggacgcagg

SEQ ID NO: 1670913 - RNA, 19 nt, Artificial Sequence
  Description of Artificial Sequence: Synthetic oligonucleotide
ucaccgugaaaugccaccc

SEQ ID NO: 1670914 - RNA, 19 nt, Artificial Sequence
  Description of Artificial Sequence: Synthetic oligonucleotide
ggaggcuuagauccguccg

SEQ ID NO: 1670915 - RNA, 19 nt, Artificial Sequence
  Description of Artificial Sequence: Synthetic oligonucleotide
agugccaauuguucuuugu

SEQ ID NO: 1670916 - RNA, 19 nt, Artificial Sequence
  Description of Artificial Sequence: Synthetic oligonucleotide
uccuuuucgaacgcuuggc

SEQ ID NO: 1670917 - RNA, 19 nt, Artificial Sequence
  Description of Artificial Sequence: Synthetic oligonucleotide
cagacuggaggcuuagauc

SEQ ID NO: 1670918 - RNA, 19 nt, Artificial Sequence
  Description of Artificial Sequence: Synthetic oligonucleotide
acacuuauggcagguccgg

SEQ ID NO: 1670919 - RNA, 19 nt, Artificial Sequence
  Description of Artificial Sequence: Synthetic oligonucleotide
gcuaccuucuucaccagcg

SEQ ID NO: 1670920 - RNA, 19 nt, Artificial Sequence
  Description of Artificial Sequence: Synthetic oligonucleotide
uggaggcuuagauccgucc

SEQ ID NO: 1670921 - RNA, 19 nt, Artificial Sequence
  Description of Artificial Sequence: Synthetic oligonucleotide
gugaaaugccacccacuag

SEQ ID NO: 1670922 - RNA, 19 nt, Artificial Sequence
  Description of Artificial Sequence: Synthetic oligonucleotide
gaggcuucgucaugcacca

SEQ ID NO: 1670923 - RNA, 19 nt, Artificial Sequence
  Description of Artificial Sequence: Synthetic oligonucleotide
uucccguggaggcucugag

SEQ ID NO: 1670924 - RNA, 19 nt, Artificial Sequence
  Description of Artificial Sequence: Synthetic oligonucleotide
uccuacuguggcuaccuuc

SEQ ID NO: 1670925 - RNA, 19 nt, Artificial Sequence
  Description of Artificial Sequence: Synthetic oligonucleotide
ucauccuuugguguccacu

SEQ ID NO: 1670926 - RNA, 19 nt, Artificial Sequence
  Description of Artificial Sequence: Synthetic oligonucleotide
uguagaguuugggccgccg

SEQ ID NO: 1670927 - RNA, 19 nt, Artificial Sequence
  Description of Artificial Sequence: Synthetic oligonucleotide
cuuagauccguccgcccug

SEQ ID NO: 1670928 - RNA, 19 nt, Artificial Sequence
  Description of Artificial Sequence: Synthetic oligonucleotide
uugucaacgccuggcuagg

SEQ ID NO: 1670929 - RNA, 19 nt, Artificial Sequence
  Description of Artificial Sequence: Synthetic oligonucleotide
ggacccuagacacaggauc

SEQ ID NO: 1670930 - RNA, 19 nt, Artificial Sequence
  Description of Artificial Sequence: Synthetic oligonucleotide
gaagcuucagugcggccca

SEQ ID NO: 1670931 - RNA, 19 nt, Artificial Sequence
  Description of Artificial Sequence: Synthetic oligonucleotide
gaucgugucugcuuugcua

SEQ ID NO: 1670932 - RNA, 19 nt, Artificial Sequence
  Description of Artificial Sequence: Synthetic oligonucleotide
acuuccuacuguggcuacc

SEQ ID NO: 1670933 - RNA, 19 nt, Artificial Sequence
  Description of Artificial Sequence: Synthetic oligonucleotide
cauauuggggcaguuacaa

SEQ ID NO: 1670934 - RNA, 19 nt, Artificial Sequence
  Description of Artificial Sequence: Synthetic oligonucleotide
gggucggcguccuugacag

SEQ ID NO: 1670935 - RNA, 19 nt, Artificial Sequence
  Description of Artificial Sequence: Synthetic oligonucleotide
ggaggcuucgucaugcacc

SEQ ID NO: 1670936 - RNA, 19 nt, Artificial Sequence
  Description of Artificial Sequence: Synthetic oligonucleotide
cuaccuucuucaccagcgc

SEQ ID NO: 1670937 - RNA, 19 nt, Artificial Sequence
  Description of Artificial Sequence: Synthetic oligonucleotide
uuucgaacgcuuggcgcag

SEQ ID NO: 1670938 - RNA, 19 nt, Artificial Sequence
  Description of Artificial Sequence: Synthetic oligonucleotide
cuggugccggugaagggcc

SEQ ID NO: 1670939 - RNA, 19 nt, Artificial Sequence
  Description of Artificial Sequence: Synthetic oligonucleotide
acaagcgucaaagcccucu

SEQ ID NO: 1670940 - RNA, 19 nt, Artificial Sequence
  Description of Artificial Sequence: Synthetic oligonucleotide
guucgugggagcccacugc

SEQ ID NO: 1670941 - RNA, 19 nt, Artificial Sequence
  Description of Artificial Sequence: Synthetic oligonucleotide
gacauaggccccugaacaa

SEQ ID NO: 1670942 - RNA, 19 nt, Artificial Sequence
  Description of Artificial Sequence: Synthetic oligonucleotide
agacagcucuguuuucaca

SEQ ID NO: 1670943 - RNA, 19 nt, Artificial Sequence
  Description of Artificial Sequence: Synthetic oligonucleotide
ugacagucaagcccauauu

SEQ ID NO: 1670944 - RNA, 19 nt, Artificial Sequence
  Description of Artificial Sequence: Synthetic oligonucleotide
acgcuuuuaguaauaagua

SEQ ID NO: 1670945 - RNA, 19 nt, Artificial Sequence
  Description of Artificial Sequence: Synthetic oligonucleotide
ucacggugacauaggcccc

SEQ ID NO: 1670946 - RNA, 19 nt, Artificial Sequence
  Description of Artificial Sequence: Synthetic oligonucleotide
gagugagguaaggcagugg

SEQ ID NO: 1670947 - RNA, 19 nt, Artificial Sequence
  Description of Artificial Sequence: Synthetic oligonucleotide
gcuuuuaguaauaaguagu

SEQ ID NO: 1670948 - RNA, 19 nt, Artificial Sequence
  Description of Artificial Sequence: Synthetic oligonucleotide
cgcuuuuaguaauaaguag

SEQ ID NO: 1670949 - RNA, 19 nt, Artificial Sequence
  Description of Artificial Sequence: Synthetic oligonucleotide
caaagcccucugcaaagug

SEQ ID NO: 1670950 - RNA, 19 nt, Artificial Sequence
  Description of Artificial Sequence: Synthetic oligonucleotide
ucgaacgcuuggcgcagcc

SEQ ID NO: 1670951 - RNA, 19 nt, Artificial Sequence
  Description of Artificial Sequence: Synthetic oligonucleotide
cuucgucaugcaccagagg

SEQ ID NO: 1670952 - RNA, 19 nt, Artificial Sequence
  Description of Artificial Sequence: Synthetic oligonucleotide
ugugagggugggcuccgcu

SEQ ID NO: 1670953 - RNA, 19 nt, Artificial Sequence
  Description of Artificial Sequence: Synthetic oligonucleotide
caacgccuggcuagguugc

SEQ ID NO: 1670954 - RNA, 19 nt, Artificial Sequence
  Description of Artificial Sequence: Synthetic oligonucleotide
gauccguccgcccugugcu

SEQ ID NO: 1670955 - RNA, 19 nt, Artificial Sequence
  Description of Artificial Sequence: Synthetic oligonucleotide
gugaagggccguacgcucg

SEQ ID NO: 1670956 - RNA, 19 nt, Artificial Sequence
  Description of Artificial Sequence: Synthetic oligonucleotide
caagcgucaaagcccucug

SEQ ID NO: 1670957 - RNA, 19 nt, Artificial Sequence
  Description of Artificial Sequence: Synthetic oligonucleotide
cucccuguuagggacgcag

SEQ ID NO: 1670958 - RNA, 19 nt, Artificial Sequence
  Description of Artificial Sequence: Synthetic oligonucleotide
ccuuuucgaacgcuuggcg

SEQ ID NO: 1670959 - RNA, 19 nt, Artificial Sequence
  Description of Artificial Sequence: Synthetic oligonucleotide
uggagcccgucgcaguucu

SEQ ID NO: 1670960 - RNA, 19 nt, Artificial Sequence
  Description of Artificial Sequence: Synthetic oligonucleotide
gauggcgguucgugggagc

SEQ ID NO: 1670961 - RNA, 19 nt, Artificial Sequence
  Description of Artificial Sequence: Synthetic oligonucleotide
uucggucgcugccucccag

SEQ ID NO: 1670962 - RNA, 19 nt, Artificial Sequence
  Description of Artificial Sequence: Synthetic oligonucleotide
agagugagguaaggcagug

SEQ ID NO: 1670963 - RNA, 19 nt, Artificial Sequence
  Description of Artificial Sequence: Synthetic oligonucleotide
gcuuuugcucaugcaaacg

SEQ ID NO: 1670964 - RNA, 19 nt, Artificial Sequence
  Description of Artificial Sequence: Synthetic oligonucleotide
agcugggucccacacuuau

SEQ ID NO: 1670965 - RNA, 19 nt, Artificial Sequence
  Description of Artificial Sequence: Synthetic oligonucleotide
uacgcucggucacaucaaa

SEQ ID NO: 1670966 - RNA, 19 nt, Artificial Sequence
  Description of Artificial Sequence: Synthetic oligonucleotide
gaacaagcgucaaagcccu

SEQ ID NO: 1670967 - RNA, 19 nt, Artificial Sequence
  Description of Artificial Sequence: Synthetic oligonucleotide
uaggccccugaacaagcgu

SEQ ID NO: 1670968 - RNA, 19 nt, Artificial Sequence
  Description of Artificial Sequence: Synthetic oligonucleotide
ugggucccacacuuauggc

SEQ ID NO: 1670969 - RNA, 19 nt, Artificial Sequence
  Description of Artificial Sequence: Synthetic oligonucleotide
cugccgccuuuguacaggg

SEQ ID NO: 1670970 - RNA, 19 nt, Artificial Sequence
  Description of Artificial Sequence: Synthetic oligonucleotide
ucggcguccuugacaguca

SEQ ID NO: 1670971 - RNA, 19 nt, Artificial Sequence
  Description of Artificial Sequence: Synthetic oligonucleotide
gggguacuucuucaguacc

SEQ ID NO: 1670972 - RNA, 19 nt, Artificial Sequence
  Description of Artificial Sequence: Synthetic oligonucleotide
gagauggcgguucguggga

SEQ ID NO: 1670973 - RNA, 19 nt, Artificial Sequence
  Description of Artificial Sequence: Synthetic oligonucleotide
cagugcaagagaggcuucc

SEQ ID NO: 1670974 - RNA, 19 nt, Artificial Sequence
  Description of Artificial Sequence: Synthetic oligonucleotide
agauggggucuugccaccg

SEQ ID NO: 1670975 - RNA, 19 nt, Artificial Sequence
  Description of Artificial Sequence: Synthetic oligonucleotide
ugagacuagccuggagagu

SEQ ID NO: 1670976 - RNA, 19 nt, Artificial Sequence
  Description of Artificial Sequence: Synthetic oligonucleotide
uacucccuguuagggacgc

SEQ ID NO: 1670977 - RNA, 19 nt, Artificial Sequence
  Description of Artificial Sequence: Synthetic oligonucleotide
acgacaugcuguaccagcu

SEQ ID NO: 1670978 - RNA, 19 nt, Artificial Sequence
  Description of Artificial Sequence: Synthetic oligonucleotide
auacucccuguuagggacg

SEQ ID NO: 1670979 - RNA, 19 nt, Artificial Sequence
  Description of Artificial Sequence: Synthetic oligonucleotide
ccugagacuagccuggaga

SEQ ID NO: 1670980 - RNA, 19 nt, Artificial Sequence
  Description of Artificial Sequence: Synthetic oligonucleotide
cacucgcacauacucccug

SEQ ID NO: 1670981 - RNA, 19 nt, Artificial Sequence
  Description of Artificial Sequence: Synthetic oligonucleotide
ugcuagcagcuucggucgc

SEQ ID NO: 1670982 - RNA, 19 nt, Artificial Sequence
  Description of Artificial Sequence: Synthetic oligonucleotide
cugcagaccaacacagaaa

SEQ ID NO: 1670983 - RNA, 19 nt, Artificial Sequence
  Description of Artificial Sequence: Synthetic oligonucleotide
ggggcaguuacaacagugc

SEQ ID NO: 1670984 - RNA, 19 nt, Artificial Sequence
  Description of Artificial Sequence: Synthetic oligonucleotide
cgcacauacucccuguuag

SEQ ID NO: 1670985 - RNA, 19 nt, Artificial Sequence
  Description of Artificial Sequence: Synthetic oligonucleotide
cagcgacuuccuacugugg

SEQ ID NO: 1670986 - RNA, 19 nt, Artificial Sequence
  Description of Artificial Sequence: Synthetic oligonucleotide
gucggcguccuugacaguc

SEQ ID NO: 1670987 - RNA, 19 nt, Artificial Sequence
  Description of Artificial Sequence: Synthetic oligonucleotide
agcccgucgcaguucugag

SEQ ID NO: 1670988 - RNA, 19 nt, Artificial Sequence
  Description of Artificial Sequence: Synthetic oligonucleotide
gccaauuguucuuugucaa

SEQ ID NO: 1670989 - RNA, 19 nt, Artificial Sequence
  Description of Artificial Sequence: Synthetic oligonucleotide
ccaauuguucuuugucaac

SEQ ID NO: 1670990 - RNA, 19 nt, Artificial Sequence
  Description of Artificial Sequence: Synthetic oligonucleotide
acuagccuggagagugagg

SEQ ID NO: 1670991 - RNA, 19 nt, Artificial Sequence
  Description of Artificial Sequence: Synthetic oligonucleotide
uuagauccguccgcccugu

SEQ ID NO: 1670992 - RNA, 19 nt, Artificial Sequence
  Description of Artificial Sequence: Synthetic oligonucleotide
uuggaggcuucgucaugca

SEQ ID NO: 1670993 - RNA, 19 nt, Artificial Sequence
  Description of Artificial Sequence: Synthetic oligonucleotide
cccgucgcaguucugagac

SEQ ID NO: 1670994 - RNA, 19 nt, Artificial Sequence
  Description of Artificial Sequence: Synthetic oligonucleotide
acgcucggucacaucaaac

SEQ ID NO: 1670995 - RNA, 19 nt, Artificial Sequence
  Description of Artificial Sequence: Synthetic oligonucleotide
aguucagaggcugcccuaa

SEQ ID NO: 1670996 - RNA, 19 nt, Artificial Sequence
  Description of Artificial Sequence: Synthetic oligonucleotide
gugcacucugguccccagg

SEQ ID NO: 1670997 - RNA, 19 nt, Artificial Sequence
  Description of Artificial Sequence: Synthetic oligonucleotide
agcaauguccauacuccau

SEQ ID NO: 1670998 - RNA, 19 nt, Artificial Sequence
  Description of Artificial Sequence: Synthetic oligonucleotide
cuauuaaagugaacgcuuu

SEQ ID NO: 1670999 - RNA, 19 nt, Artificial Sequence
  Description of Artificial Sequence: Synthetic oligonucleotide
ucccguggaggcucugaga

SEQ ID NO: 1671000 - RNA, 19 nt, Artificial Sequence
  Description of Artificial Sequence: Synthetic oligonucleotide
cuuaggucagcagcacuca

SEQ ID NO: 1671001 - RNA, 19 nt, Artificial Sequence
  Description of Artificial Sequence: Synthetic oligonucleotide
ggcuucgucaugcaccaga

SEQ ID NO: 1671002 - RNA, 19 nt, Artificial Sequence
  Description of Artificial Sequence: Synthetic oligonucleotide
gacaugcuguaccagcuuu

SEQ ID NO: 1671003 - RNA, 19 nt, Artificial Sequence
  Description of Artificial Sequence: Synthetic oligonucleotide
agauggcgguucgugggag

SEQ ID NO: 1671004 - RNA, 19 nt, Artificial Sequence
  Description of Artificial Sequence: Synthetic oligonucleotide
cugagacacgacaugcugu

SEQ ID NO: 1671005 - RNA, 19 nt, Artificial Sequence
  Description of Artificial Sequence: Synthetic oligonucleotide
gguucgugggagcccacug

SEQ ID NO: 1671006 - RNA, 19 nt, Artificial Sequence
  Description of Artificial Sequence: Synthetic oligonucleotide
guagaaauggggaggcccu

SEQ ID NO: 1671007 - RNA, 19 nt, Artificial Sequence
  Description of Artificial Sequence: Synthetic oligonucleotide
ggugacauaggccccugaa

SEQ ID NO: 1671008 - RNA, 19 nt, Artificial Sequence
  Description of Artificial Sequence: Synthetic oligonucleotide
gcuucgucaugcaccagag

SEQ ID NO: 1671009 - RNA, 19 nt, Artificial Sequence
  Description of Artificial Sequence: Synthetic oligonucleotide
uccgcccugugcugcagac

SEQ ID NO: 1671010 - RNA, 19 nt, Artificial Sequence
  Description of Artificial Sequence: Synthetic oligonucleotide
ggcccugagacuagccugg

SEQ ID NO: 1671011 - RNA, 19 nt, Artificial Sequence
  Description of Artificial Sequence: Synthetic oligonucleotide
ugccacccacuagauccgg

SEQ ID NO: 1671012 - RNA, 19 nt, Artificial Sequence
  Description of Artificial Sequence: Synthetic oligonucleotide
cuccauuagggccucgaua

SEQ ID NO: 1671013 - RNA, 19 nt, Artificial Sequence
  Description of Artificial Sequence: Synthetic oligonucleotide
ggacgcaggaggugcagac

SEQ ID NO: 1671014 - RNA, 19 nt, Artificial Sequence
  Description of Artificial Sequence: Synthetic oligonucleotide
ucggucgcugccucccagu

SEQ ID NO: 1671015 - RNA, 19 nt, Artificial Sequence
  Description of Artificial Sequence: Synthetic oligonucleotide
cacuuauggcagguccggc

SEQ ID NO: 1671016 - RNA, 19 nt, Artificial Sequence
  Description of Artificial Sequence: Synthetic oligonucleotide
gagcccgucgcaguucuga

SEQ ID NO: 1671017 - RNA, 19 nt, Artificial Sequence
  Description of Artificial Sequence: Synthetic oligonucleotide
caaacgggugaugcucaug

SEQ ID NO: 1671018 - RNA, 19 nt, Artificial Sequence
  Description of Artificial Sequence: Synthetic oligonucleotide
caugcaaacgggugaugcu

SEQ ID NO: 1671019 - RNA, 19 nt, Artificial Sequence
  Description of Artificial Sequence: Synthetic oligonucleotide
agguggagcccgucgcagu

SEQ ID NO: 1671020 - RNA, 19 nt, Artificial Sequence
  Description of Artificial Sequence: Synthetic oligonucleotide
ugcggcccagucauccuuu

SEQ ID NO: 1671021 - RNA, 19 nt, Artificial Sequence
  Description of Artificial Sequence: Synthetic oligonucleotide
cguacgcucggucacauca

SEQ ID NO: 1671022 - RNA, 19 nt, Artificial Sequence
  Description of Artificial Sequence: Synthetic oligonucleotide
cgucaugcaccagaggcgg

SEQ ID NO: 1671023 - RNA, 19 nt, Artificial Sequence
  Description of Artificial Sequence: Synthetic oligonucleotide
gguguccacugcaaguuca

SEQ ID NO: 1671024 - RNA, 19 nt, Artificial Sequence
  Description of Artificial Sequence: Synthetic oligonucleotide
gcuagguggugcacucugg

SEQ ID NO: 1671025 - RNA, 19 nt, Artificial Sequence
  Description of Artificial Sequence: Synthetic oligonucleotide
gccggugaagggccguacg

SEQ ID NO: 1671026 - RNA, 19 nt, Artificial Sequence
  Description of Artificial Sequence: Synthetic oligonucleotide
ggcaguuacaacagugcaa

SEQ ID NO: 1671027 - RNA, 19 nt, Artificial Sequence
  Description of Artificial Sequence: Synthetic oligonucleotide
uaauuccgacuugcucaga

SEQ ID NO: 1671028 - RNA, 19 nt, Artificial Sequence
  Description of Artificial Sequence: Synthetic oligonucleotide
aacgccuggcuagguugcu

SEQ ID NO: 1671029 - RNA, 19 nt, Artificial Sequence
  Description of Artificial Sequence: Synthetic oligonucleotide
ccacccacuagauccggug

SEQ ID NO: 1671030 - RNA, 19 nt, Artificial Sequence
  Description of Artificial Sequence: Synthetic oligonucleotide
gaaaugccacccacuagau

SEQ ID NO: 1671031 - RNA, 19 nt, Artificial Sequence
  Description of Artificial Sequence: Synthetic oligonucleotide
uucgaacgcuuggcgcagc

SEQ ID NO: 1671032 - RNA, 19 nt, Artificial Sequence
  Description of Artificial Sequence: Synthetic oligonucleotide
ccggugaagggccguacgc

SEQ ID NO: 1671033 - RNA, 19 nt, Artificial Sequence
  Description of Artificial Sequence: Synthetic oligonucleotide
acccuagacacaggaucgu

SEQ ID NO: 1671034 - RNA, 19 nt, Artificial Sequence
  Description of Artificial Sequence: Synthetic oligonucleotide
guaccagcuuuugcucaug

SEQ ID NO: 1671035 - RNA, 19 nt, Artificial Sequence
  Description of Artificial Sequence: Synthetic oligonucleotide
caaugguaucccggagcug

SEQ ID NO: 1671036 - RNA, 19 nt, Artificial Sequence
  Description of Artificial Sequence: Synthetic oligonucleotide
ggcuuagauccguccgccc

SEQ ID NO: 1671037 - RNA, 19 nt, Artificial Sequence
  Description of Artificial Sequence: Synthetic oligonucleotide
ugucaacgccuggcuaggu

SEQ ID NO: 1671038 - RNA, 19 nt, Artificial Sequence
  Description of Artificial Sequence: Synthetic oligonucleotide
ggugcacucugguccccag

SEQ ID NO: 1671039 - RNA, 19 nt, Artificial Sequence
  Description of Artificial Sequence: Synthetic oligonucleotide
uagauccguccgcccugug

SEQ ID NO: 1671040 - RNA, 19 nt, Artificial Sequence
  Description of Artificial Sequence: Synthetic oligonucleotide
gcuuugcuagcagcuucgg

SEQ ID NO: 1671041 - RNA, 19 nt, Artificial Sequence
  Description of Artificial Sequence: Synthetic oligonucleotide
uagccuucacggugacaua

SEQ ID NO: 1671042 - RNA, 19 nt, Artificial Sequence
  Description of Artificial Sequence: Synthetic oligonucleotide
cgcucggucacaucaaaca

SEQ ID NO: 1671043 - RNA, 19 nt, Artificial Sequence
  Description of Artificial Sequence: Synthetic oligonucleotide
caccgugaaaugccaccca

SEQ ID NO: 1671044 - RNA, 19 nt, Artificial Sequence
  Description of Artificial Sequence: Synthetic oligonucleotide
gcuucggucgcugccuccc

SEQ ID NO: 1671045 - RNA, 19 nt, Artificial Sequence
  Description of Artificial Sequence: Synthetic oligonucleotide
cuuccuacuguggcuaccu

SEQ ID NO: 1671046 - RNA, 19 nt, Artificial Sequence
  Description of Artificial Sequence: Synthetic oligonucleotide
uggcgguucgugggagccc

SEQ ID NO: 1671047 - RNA, 19 nt, Artificial Sequence
  Description of Artificial Sequence: Synthetic oligonucleotide
auacuccauuagggccucg

SEQ ID NO: 1671048 - RNA, 19 nt, Artificial Sequence
  Description of Artificial Sequence: Synthetic oligonucleotide
cgucgcaguucugagacac

SEQ ID NO: 1671049 - RNA, 19 nt, Artificial Sequence
  Description of Artificial Sequence: Synthetic oligonucleotide
ggggucggcguccuugaca

SEQ ID NO: 1671050 - RNA, 19 nt, Artificial Sequence
  Description of Artificial Sequence: Synthetic oligonucleotide
cacagcgacuuccuacugu

SEQ ID NO: 1671051 - RNA, 19 nt, Artificial Sequence
  Description of Artificial Sequence: Synthetic oligonucleotide
acacucgcacauacucccu

SEQ ID NO: 1671052 - RNA, 19 nt, Artificial Sequence
  Description of Artificial Sequence: Synthetic oligonucleotide
guccggccggucuggugcc

SEQ ID NO: 1671053 - RNA, 19 nt, Artificial Sequence
  Description of Artificial Sequence: Synthetic oligonucleotide
gcgucaaagcccucugcaa

SEQ ID NO: 1671054 - RNA, 19 nt, Artificial Sequence
  Description of Artificial Sequence: Synthetic oligonucleotide
cacuuaggucagcagcacu

SEQ ID NO: 1671055 - RNA, 19 nt, Artificial Sequence
  Description of Artificial Sequence: Synthetic oligonucleotide
acggugacauaggccccug

SEQ ID NO: 1671056 - RNA, 19 nt, Artificial Sequence
  Description of Artificial Sequence: Synthetic oligonucleotide
cuacuucugcacagcgacu

SEQ ID NO: 1671057 - RNA, 19 nt, Artificial Sequence
  Description of Artificial Sequence: Synthetic oligonucleotide
cgugaaaugccacccacua

SEQ ID NO: 1671058 - RNA, 19 nt, Artificial Sequence
  Description of Artificial Sequence: Synthetic oligonucleotide
cucacacuucuuccuuucu

SEQ ID NO: 1671059 - RNA, 19 nt, Artificial Sequence
  Description of Artificial Sequence: Synthetic oligonucleotide
caguucagaggcugcccua

SEQ ID NO: 1671060 - RNA, 19 nt, Artificial Sequence
  Description of Artificial Sequence: Synthetic oligonucleotide
cagcuucggucgcugccuc

SEQ ID NO: 1671061 - RNA, 19 nt, Artificial Sequence
  Description of Artificial Sequence: Synthetic oligonucleotide
gggccguacgcucggucac

SEQ ID NO: 1671062 - RNA, 19 nt, Artificial Sequence
  Description of Artificial Sequence: Synthetic oligonucleotide
ccuagacacaggaucgugu

SEQ ID NO: 1671063 - RNA, 19 nt, Artificial Sequence
  Description of Artificial Sequence: Synthetic oligonucleotide
guacgcucggucacaucaa

SEQ ID NO: 1671064 - RNA, 19 nt, Artificial Sequence
  Description of Artificial Sequence: Synthetic oligonucleotide
ccggcuuggaggcuucguc

SEQ ID NO: 1671065 - RNA, 19 nt, Artificial Sequence
  Description of Artificial Sequence: Synthetic oligonucleotide
gcacagcgacuuccuacug

SEQ ID NO: 1671066 - RNA, 19 nt, Artificial Sequence
  Description of Artificial Sequence: Synthetic oligonucleotide
ccaaaccagccuccuagga

SEQ ID NO: 1671067 - RNA, 19 nt, Artificial Sequence
  Description of Artificial Sequence: Synthetic oligonucleotide
ggcggggcuucuucucuac

SEQ ID NO: 1671068 - RNA, 19 nt, Artificial Sequence
  Description of Artificial Sequence: Synthetic oligonucleotide
gacgcaggaggugcagacu

SEQ ID NO: 1671069 - RNA, 19 nt, Artificial Sequence
  Description of Artificial Sequence: Synthetic oligonucleotide
gcugggucccacacuuaug

SEQ ID NO: 1671070 - RNA, 19 nt, Artificial Sequence
  Description of Artificial Sequence: Synthetic oligonucleotide
agacuucaauguacauauu

SEQ ID NO: 1671071 - RNA, 19 nt, Artificial Sequence
  Description of Artificial Sequence: Synthetic oligonucleotide
gcgacuuccuacuguggcu

SEQ ID NO: 1671072 - RNA, 19 nt, Artificial Sequence
  Description of Artificial Sequence: Synthetic oligonucleotide
gcagguggagcccgucgca

SEQ ID NO: 1671073 - RNA, 19 nt, Artificial Sequence
  Description of Artificial Sequence: Synthetic oligonucleotide
gucaacgccuggcuagguu

SEQ ID NO: 1671074 - RNA, 19 nt, Artificial Sequence
  Description of Artificial Sequence: Synthetic oligonucleotide
gcagguccggccggucugg

SEQ ID NO: 1671075 - RNA, 19 nt, Artificial Sequence
  Description of Artificial Sequence: Synthetic oligonucleotide
ggcgguucgugggagccca

SEQ ID NO: 1671076 - RNA, 19 nt, Artificial Sequence
  Description of Artificial Sequence: Synthetic oligonucleotide
cuucggucgcugccuccca

SEQ ID NO: 1671077 - RNA, 19 nt, Artificial Sequence
  Description of Artificial Sequence: Synthetic oligonucleotide
cccugagacuagccuggag

SEQ ID NO: 1671078 - RNA, 19 nt, Artificial Sequence
  Description of Artificial Sequence: Synthetic oligonucleotide
cugaagcaauguccauacu

SEQ ID NO: 1671079 - RNA, 19 nt, Artificial Sequence
  Description of Artificial Sequence: Synthetic oligonucleotide
gcuucccacaaggacaaau

SEQ ID NO: 1671080 - RNA, 19 nt, Artificial Sequence
  Description of Artificial Sequence: Synthetic oligonucleotide
guccgcccugugcugcaga

SEQ ID NO: 1671081 - RNA, 19 nt, Artificial Sequence
  Description of Artificial Sequence: Synthetic oligonucleotide
ggugggcuccgcuucacuu

SEQ ID NO: 1671082 - RNA, 19 nt, Artificial Sequence
  Description of Artificial Sequence: Synthetic oligonucleotide
ggaucgugucugcuuugcu

SEQ ID NO: 1671083 - RNA, 19 nt, Artificial Sequence
  Description of Artificial Sequence: Synthetic oligonucleotide
aggcuucgucaugcaccag

SEQ ID NO: 1671084 - RNA, 19 nt, Artificial Sequence
  Description of Artificial Sequence: Synthetic oligonucleotide
cugggcuagguggugcacu

SEQ ID NO: 1671085 - RNA, 19 nt, Artificial Sequence
  Description of Artificial Sequence: Synthetic oligonucleotide
cccguggaggcucugagau

SEQ ID NO: 1671086 - RNA, 19 nt, Artificial Sequence
  Description of Artificial Sequence: Synthetic oligonucleotide
ccaguucagaggcugcccu

SEQ ID NO: 1671087 - RNA, 19 nt, Artificial Sequence
  Description of Artificial Sequence: Synthetic oligonucleotide
gcccgucgcaguucugaga

SEQ ID NO: 1671088 - RNA, 19 nt, Artificial Sequence
  Description of Artificial Sequence: Synthetic oligonucleotide
ggggaggcccugagacuag

SEQ ID NO: 1671089 - RNA, 19 nt, Artificial Sequence
  Description of Artificial Sequence: Synthetic oligonucleotide
cacggugacauaggccccu

SEQ ID NO: 1671090 - RNA, 19 nt, Artificial Sequence
  Description of Artificial Sequence: Synthetic oligonucleotide
acgccuggcuagguugcuu

SEQ ID NO: 1671091 - RNA, 19 nt, Artificial Sequence
  Description of Artificial Sequence: Synthetic oligonucleotide
gguggagcccgucgcaguu

SEQ ID NO: 1671092 - RNA, 19 nt, Artificial Sequence
  Description of Artificial Sequence: Synthetic oligonucleotide
caccggcuguagacuggga

SEQ ID NO: 1671093 - RNA, 19 nt, Artificial Sequence
  Description of Artificial Sequence: Synthetic oligonucleotide
gagcugggucccacacuua

SEQ ID NO: 1671094 - RNA, 19 nt, Artificial Sequence
  Description of Artificial Sequence: Synthetic oligonucleotide
ccgugaaaugccacccacu

SEQ ID NO: 1671095 - RNA, 19 nt, Artificial Sequence
  Description of Artificial Sequence: Synthetic oligonucleotide
cgaacgcuuggcgcagccc

SEQ ID NO: 1671096 - RNA, 19 nt, Artificial Sequence
  Description of Artificial Sequence: Synthetic oligonucleotide
ggcuguagacugggaucuc

SEQ ID NO: 1671097 - RNA, 19 nt, Artificial Sequence
  Description of Artificial Sequence: Synthetic oligonucleotide
cgcuucacuuaggucagca

SEQ ID NO: 1671098 - RNA, 19 nt, Artificial Sequence
  Description of Artificial Sequence: Synthetic oligonucleotide
ccccaggcggggcuucuuc

SEQ ID NO: 1671099 - RNA, 19 nt, Artificial Sequence
  Description of Artificial Sequence: Synthetic oligonucleotide
gcaaacgggugaugcucau

SEQ ID NO: 1671100 - RNA, 19 nt, Artificial Sequence
  Description of Artificial Sequence: Synthetic oligonucleotide
ggccguacgcucggucaca

SEQ ID NO: 1671101 - RNA, 19 nt, Artificial Sequence
  Description of Artificial Sequence: Synthetic oligonucleotide
cugggaucuccaggcccaa

SEQ ID NO: 1671102 - RNA, 19 nt, Artificial Sequence
  Description of Artificial Sequence: Synthetic oligonucleotide
cucugagauggcgguucgu

SEQ ID NO: 1671103 - RNA, 19 nt, Artificial Sequence
  Description of Artificial Sequence: Synthetic oligonucleotide
ccccugaacaagcgucaaa

SEQ ID NO: 1671104 - RNA, 19 nt, Artificial Sequence
  Description of Artificial Sequence: Synthetic oligonucleotide
ccguacgcucggucacauc

SEQ ID NO: 1671105 - RNA, 19 nt, Artificial Sequence
  Description of Artificial Sequence: Synthetic oligonucleotide
ccggccggucuggugccgg

SEQ ID NO: 1671106 - RNA, 19 nt, Artificial Sequence
  Description of Artificial Sequence: Synthetic oligonucleotide
cggucuggugccggugaag

SEQ ID NO: 1671107 - RNA, 19 nt, Artificial Sequence
  Description of Artificial Sequence: Synthetic oligonucleotide
ggagcccgucgcaguucug

SEQ ID NO: 1671108 - RNA, 19 nt, Artificial Sequence
  Description of Artificial Sequence: Synthetic oligonucleotide
gccccugaacaagcgucaa

SEQ ID NO: 1671109 - RNA, 19 nt, Artificial Sequence
  Description of Artificial Sequence: Synthetic oligonucleotide
ccgucgcaguucugagaca

SEQ ID NO: 1671110 - RNA, 19 nt, Artificial Sequence
  Description of Artificial Sequence: Synthetic oligonucleotide
ccauuagggccucgauaau

SEQ ID NO: 1671111 - RNA, 19 nt, Artificial Sequence
  Description of Artificial Sequence: Synthetic oligonucleotide
ccguccgcccugugcugca

SEQ ID NO: 1671112 - RNA, 19 nt, Artificial Sequence
  Description of Artificial Sequence: Synthetic oligonucleotide
cggugaagggccguacgcu

SEQ ID NO: 1671113 - RNA, 19 nt, Artificial Sequence
  Description of Artificial Sequence: Synthetic oligonucleotide
ggucggcguccuugacagu

SEQ ID NO: 1671114 - RNA, 19 nt, Artificial Sequence
  Description of Artificial Sequence: Synthetic oligonucleotide
gccguacgcucggucacau

SEQ ID NO: 1671115 - RNA, 19 nt, Artificial Sequence
  Description of Artificial Sequence: Synthetic oligonucleotide
gcgguucgugggagcccac

SEQ ID NO: 1671116 - RNA, 19 nt, Artificial Sequence
  Description of Artificial Sequence: Synthetic oligonucleotide
gccggcuuggaggcuucgu

SEQ ID NO: 1671117 - RNA, 19 nt, Artificial Sequence
  Description of Artificial Sequence: Synthetic oligonucleotide
cguccgcccugugcugcag

SEQ ID NO: 1671118 - RNA, 19 nt, Artificial Sequence
  Description of Artificial Sequence: Synthetic oligonucleotide
cgacaugcuguaccagcuu

SEQ ID NO: 1671119 - RNA, 19 nt, Artificial Sequence
  Description of Artificial Sequence: Synthetic oligonucleotide
cgccggcuuggaggcuucg

SEQ ID NO: 1671120 - RNA, 19 nt, Artificial Sequence
  Description of Artificial Sequence: Synthetic oligonucleotide
cgguucgugggagcccacu

SEQ ID NO: 1671121 - RNA, 19 nt, Artificial Sequence
  Description of Artificial Sequence: Synthetic oligonucleotide
cggucgcugccucccaguu

SEQ ID NO: 1671122 - RNA, 19 nt, Artificial Sequence
  Description of Artificial Sequence: Synthetic oligonucleotide
aaaauaguugaccacagcu

SEQ ID NO: 1671123 - RNA, 19 nt, Artificial Sequence
  Description of Artificial Sequence: Synthetic oligonucleotide
ucaaccuugaauuugaccu

SEQ ID NO: 1671124 - RNA, 19 nt, Artificial Sequence
  Description of Artificial Sequence: Synthetic oligonucleotide
uuuuauuauguccaguccc

SEQ ID NO: 1671125 - RNA, 19 nt, Artificial Sequence
  Description of Artificial Sequence: Synthetic oligonucleotide
uuugcugggagcuucacgg

SEQ ID NO: 1671126 - RNA, 19 nt, Artificial Sequence
  Description of Artificial Sequence: Synthetic oligonucleotide
gauucauguacucaguugc

SEQ ID NO: 1671127 - RNA, 19 nt, Artificial Sequence
  Description of Artificial Sequence: Synthetic oligonucleotide
ucuugauucauguacucag

SEQ ID NO: 1671128 - RNA, 19 nt, Artificial Sequence
  Description of Artificial Sequence: Synthetic oligonucleotide
uuuauuauguccagucccc

SEQ ID NO: 1671129 - RNA, 19 nt, Artificial Sequence
  Description of Artificial Sequence: Synthetic oligonucleotide
aauuugaccuccuggucuc

SEQ ID NO: 1671130 - RNA, 19 nt, Artificial Sequence
  Description of Artificial Sequence: Synthetic oligonucleotide
auggauagccccuggaggc

SEQ ID NO: 1671131 - RNA, 19 nt, Artificial Sequence
  Description of Artificial Sequence: Synthetic oligonucleotide
ugcgucacaaaauaguuga

SEQ ID NO: 1671132 - RNA, 19 nt, Artificial Sequence
  Description of Artificial Sequence: Synthetic oligonucleotide
gaaccggcugacuagaggg

SEQ ID NO: 1671133 - RNA, 19 nt, Artificial Sequence
  Description of Artificial Sequence: Synthetic oligonucleotide
aaacgggucuuccacgucg

SEQ ID NO: 1671134 - RNA, 19 nt, Artificial Sequence
  Description of Artificial Sequence: Synthetic oligonucleotide
acgucgaucacauacuuag

SEQ ID NO: 1671135 - RNA, 19 nt, Artificial Sequence
  Description of Artificial Sequence: Synthetic oligonucleotide
uuagaugggacacggagcu

SEQ ID NO: 1671136 - RNA, 19 nt, Artificial Sequence
  Description of Artificial Sequence: Synthetic oligonucleotide
cuugaauuugaccuccugg

SEQ ID NO: 1671137 - RNA, 19 nt, Artificial Sequence
  Description of Artificial Sequence: Synthetic oligonucleotide
gauggauagccccuggagg

SEQ ID NO: 1671138 - RNA, 19 nt, Artificial Sequence
  Description of Artificial Sequence: Synthetic oligonucleotide
acuagagggagacacaucu

SEQ ID NO: 1671139 - RNA, 19 nt, Artificial Sequence
  Description of Artificial Sequence: Synthetic oligonucleotide
uguagugcuuaacuacugg

SEQ ID NO: 1671140 - RNA, 19 nt, Artificial Sequence
  Description of Artificial Sequence: Synthetic oligonucleotide
cacaucuugauucauguac

SEQ ID NO: 1671141 - RNA, 19 nt, Artificial Sequence
  Description of Artificial Sequence: Synthetic oligonucleotide
uuuggugugcgucacaaaa

SEQ ID NO: 1671142 - RNA, 19 nt, Artificial Sequence
  Description of Artificial Sequence: Synthetic oligonucleotide
uagggagucuucaaugggg

SEQ ID NO: 1671143 - RNA, 19 nt, Artificial Sequence
  Description of Artificial Sequence: Synthetic oligonucleotide
gucaagauaaauccuuucc

SEQ ID NO: 1671144 - RNA, 19 nt, Artificial Sequence
  Description of Artificial Sequence: Synthetic oligonucleotide
aggaaaacgggucuuccac

SEQ ID NO: 1671145 - RNA, 19 nt, Artificial Sequence
  Description of Artificial Sequence: Synthetic oligonucleotide
uuugucacgagggagggag

SEQ ID NO: 1671146 - RNA, 19 nt, Artificial Sequence
  Description of Artificial Sequence: Synthetic oligonucleotide
aaccuugaauuugaccucc

SEQ ID NO: 1671147 - RNA, 19 nt, Artificial Sequence
  Description of Artificial Sequence: Synthetic oligonucleotide
aauccuuuccacaucucac

SEQ ID NO: 1671148 - RNA, 19 nt, Artificial Sequence
  Description of Artificial Sequence: Synthetic oligonucleotide
uuuagguuugguuuuaguu

SEQ ID NO: 1671149 - RNA, 19 nt, Artificial Sequence
  Description of Artificial Sequence: Synthetic oligonucleotide
uuugagauccgguuugggc

SEQ ID NO: 1671150 - RNA, 19 nt, Artificial Sequence
  Description of Artificial Sequence: Synthetic oligonucleotide
uuccacgucgaucacauac

SEQ ID NO: 1671151 - RNA, 19 nt, Artificial Sequence
  Description of Artificial Sequence: Synthetic oligonucleotide
uuagguuugguuuuaguuu

SEQ ID NO: 1671152 - RNA, 19 nt, Artificial Sequence
  Description of Artificial Sequence: Synthetic oligonucleotide
caagauaaauccuuuccac

SEQ ID NO: 1671153 - RNA, 19 nt, Artificial Sequence
  Description of Artificial Sequence: Synthetic oligonucleotide
auucucucgauccgagugc

SEQ ID NO: 1671154 - RNA, 19 nt, Artificial Sequence
  Description of Artificial Sequence: Synthetic oligonucleotide
cauacuuaggacccucucg

SEQ ID NO: 1671155 - RNA, 19 nt, Artificial Sequence
  Description of Artificial Sequence: Synthetic oligonucleotide
agauaaauccuuuccacau

SEQ ID NO: 1671156 - RNA, 19 nt, Artificial Sequence
  Description of Artificial Sequence: Synthetic oligonucleotide
ucucgcuucaccuuguagu

SEQ ID NO: 1671157 - RNA, 19 nt, Artificial Sequence
  Description of Artificial Sequence: Synthetic oligonucleotide
ugauucauguacucaguug

SEQ ID NO: 1671158 - RNA, 19 nt, Artificial Sequence
  Description of Artificial Sequence: Synthetic oligonucleotide
agaugggacacggagcucc

SEQ ID NO: 1671159 - RNA, 19 nt, Artificial Sequence
  Description of Artificial Sequence: Synthetic oligonucleotide
accacagucaagauaaauc

SEQ ID NO: 1671160 - RNA, 19 nt, Artificial Sequence
  Description of Artificial Sequence: Synthetic oligonucleotide
gaggacacggcccauacac

SEQ ID NO: 1671161 - RNA, 19 nt, Artificial Sequence
  Description of Artificial Sequence: Synthetic oligonucleotide
cucguagugacagacacgc

SEQ ID NO: 1671162 - RNA, 19 nt, Artificial Sequence
  Description of Artificial Sequence: Synthetic oligonucleotide
acagacacgccauccuugc

SEQ ID NO: 1671163 - RNA, 19 nt, Artificial Sequence
  Description of Artificial Sequence: Synthetic oligonucleotide
uggagacucaucuuugagc

SEQ ID NO: 1671164 - RNA, 19 nt, Artificial Sequence
  Description of Artificial Sequence: Synthetic oligonucleotide
aaccucggccaucauguac

SEQ ID NO: 1671165 - RNA, 19 nt, Artificial Sequence
  Description of Artificial Sequence: Synthetic oligonucleotide
guuuuauuauguccagucc

SEQ ID NO: 1671166 - RNA, 19 nt, Artificial Sequence
  Description of Artificial Sequence: Synthetic oligonucleotide
aagccuagaaccuucucau

SEQ ID NO: 1671167 - RNA, 19 nt, Artificial Sequence
  Description of Artificial Sequence: Synthetic oligonucleotide
cuucgggacauuagcaugg

SEQ ID NO: 1671168 - RNA, 19 nt, Artificial Sequence
  Description of Artificial Sequence: Synthetic oligonucleotide
gugcacgaagccuagaacc

SEQ ID NO: 1671169 - RNA, 19 nt, Artificial Sequence
  Description of Artificial Sequence: Synthetic oligonucleotide
uaacugugccuccagccgg

SEQ ID NO: 1671170 - RNA, 19 nt, Artificial Sequence
  Description of Artificial Sequence: Synthetic oligonucleotide
auccuuuccacaucucacg

SEQ ID NO: 1671171 - RNA, 19 nt, Artificial Sequence
  Description of Artificial Sequence: Synthetic oligonucleotide
cucgccauucucucgaucc

SEQ ID NO: 1671172 - RNA, 19 nt, Artificial Sequence
  Description of Artificial Sequence: Synthetic oligonucleotide
guaacugugccuccagccg

SEQ ID NO: 1671173 - RNA, 19 nt, Artificial Sequence
  Description of Artificial Sequence: Synthetic oligonucleotide
gaagccuagaaccuucuca

SEQ ID NO: 1671174 - RNA, 19 nt, Artificial Sequence
  Description of Artificial Sequence: Synthetic oligonucleotide
auuauguccaguccccuca

SEQ ID NO: 1671175 - RNA, 19 nt, Artificial Sequence
  Description of Artificial Sequence: Synthetic oligonucleotide
agugcuuaacuacuggcga

SEQ ID NO: 1671176 - RNA, 19 nt, Artificial Sequence
  Description of Artificial Sequence: Synthetic oligonucleotide
agugacagacacgccaucc

SEQ ID NO: 1671177 - RNA, 19 nt, Artificial Sequence
  Description of Artificial Sequence: Synthetic oligonucleotide
aagggaaccggcugacuag

SEQ ID NO: 1671178 - RNA, 19 nt, Artificial Sequence
  Description of Artificial Sequence: Synthetic oligonucleotide
ucauguacauguguccggg

SEQ ID NO: 1671179 - RNA, 19 nt, Artificial Sequence
  Description of Artificial Sequence: Synthetic oligonucleotide
guuugggcacaacuggugg

SEQ ID NO: 1671180 - RNA, 19 nt, Artificial Sequence
  Description of Artificial Sequence: Synthetic oligonucleotide
agauggauagccccuggag

SEQ ID NO: 1671181 - RNA, 19 nt, Artificial Sequence
  Description of Artificial Sequence: Synthetic oligonucleotide
acuagugauggcuuugaga

SEQ ID NO: 1671182 - RNA, 19 nt, Artificial Sequence
  Description of Artificial Sequence: Synthetic oligonucleotide
guagugcuuaacuacuggc

SEQ ID NO: 1671183 - RNA, 19 nt, Artificial Sequence
  Description of Artificial Sequence: Synthetic oligonucleotide
aucauguacauguguccgg

SEQ ID NO: 1671184 - RNA, 19 nt, Artificial Sequence
  Description of Artificial Sequence: Synthetic oligonucleotide
ucgaucacauacuuaggac

SEQ ID NO: 1671185 - RNA, 19 nt, Artificial Sequence
  Description of Artificial Sequence: Synthetic oligonucleotide
uccccauggagacucaucu

SEQ ID NO: 1671186 - RNA, 19 nt, Artificial Sequence
  Description of Artificial Sequence: Synthetic oligonucleotide
uccgguuugggcacaacug

SEQ ID NO: 1671187 - RNA, 19 nt, Artificial Sequence
  Description of Artificial Sequence: Synthetic oligonucleotide
aucucacgagacuccaggc

SEQ ID NO: 1671188 - RNA, 19 nt, Artificial Sequence
  Description of Artificial Sequence: Synthetic oligonucleotide
ugugccccgaguuagucca

SEQ ID NO: 1671189 - RNA, 19 nt, Artificial Sequence
  Description of Artificial Sequence: Synthetic oligonucleotide
cauucucucgauccgagug

SEQ ID NO: 1671190 - RNA, 19 nt, Artificial Sequence
  Description of Artificial Sequence: Synthetic oligonucleotide
cauguacucaguugcuagg

SEQ ID NO: 1671191 - RNA, 19 nt, Artificial Sequence
  Description of Artificial Sequence: Synthetic oligonucleotide
caucauguacauguguccg

SEQ ID NO: 1671192 - RNA, 19 nt, Artificial Sequence
  Description of Artificial Sequence: Synthetic oligonucleotide
cuagugauggcuuugagau

SEQ ID NO: 1671193 - RNA, 19 nt, Artificial Sequence
  Description of Artificial Sequence: Synthetic oligonucleotide
cucaaccuugaauuugacc

SEQ ID NO: 1671194 - RNA, 19 nt, Artificial Sequence
  Description of Artificial Sequence: Synthetic oligonucleotide
aaaacgggucuuccacguc

SEQ ID NO: 1671195 - RNA, 19 nt, Artificial Sequence
  Description of Artificial Sequence: Synthetic oligonucleotide
cauguguccgggcagcagg

SEQ ID NO: 1671196 - RNA, 19 nt, Artificial Sequence
  Description of Artificial Sequence: Synthetic oligonucleotide
agaaccaggcugaagugac

SEQ ID NO: 1671197 - RNA, 19 nt, Artificial Sequence
  Description of Artificial Sequence: Synthetic oligonucleotide
guaucugccucguagugac

SEQ ID NO: 1671198 - RNA, 19 nt, Artificial Sequence
  Description of Artificial Sequence: Synthetic oligonucleotide
aaccaggcugaagugacag

SEQ ID NO: 1671199 - RNA, 19 nt, Artificial Sequence
  Description of Artificial Sequence: Synthetic oligonucleotide
agaaccucggccaucaugu

SEQ ID NO: 1671200 - RNA, 19 nt, Artificial Sequence
  Description of Artificial Sequence: Synthetic oligonucleotide
uagguuugguuuuaguuuu

SEQ ID NO: 1671201 - RNA, 19 nt, Artificial Sequence
  Description of Artificial Sequence: Synthetic oligonucleotide
aaauaguugaccacagcuu

SEQ ID NO: 1671202 - RNA, 19 nt, Artificial Sequence
  Description of Artificial Sequence: Synthetic oligonucleotide
uggaucaguguuccagugc

SEQ ID NO: 1671203 - RNA, 19 nt, Artificial Sequence
  Description of Artificial Sequence: Synthetic oligonucleotide
ugcacgaagccuagaaccu

SEQ ID NO: 1671204 - RNA, 19 nt, Artificial Sequence
  Description of Artificial Sequence: Synthetic oligonucleotide
ucucggagaaccaggcuga

SEQ ID NO: 1671205 - RNA, 19 nt, Artificial Sequence
  Description of Artificial Sequence: Synthetic oligonucleotide
uuaacuacuggcgacccau

SEQ ID NO: 1671206 - RNA, 19 nt, Artificial Sequence
  Description of Artificial Sequence: Synthetic oligonucleotide
auaguugaccacagcuucc

SEQ ID NO: 1671207 - RNA, 19 nt, Artificial Sequence
  Description of Artificial Sequence: Synthetic oligonucleotide
uacucaguugcuagggagu

SEQ ID NO: 1671208 - RNA, 19 nt, Artificial Sequence
  Description of Artificial Sequence: Synthetic oligonucleotide
cuacuggcgacccauugag

SEQ ID NO: 1671209 - RNA, 19 nt, Artificial Sequence
  Description of Artificial Sequence: Synthetic oligonucleotide
cuagggagucuucaauggg

SEQ ID NO: 1671210 - RNA, 19 nt, Artificial Sequence
  Description of Artificial Sequence: Synthetic oligonucleotide
aggcucucaaccuugaauu

SEQ ID NO: 1671211 - RNA, 19 nt, Artificial Sequence
  Description of Artificial Sequence: Synthetic oligonucleotide
gaauuugaccuccuggucu

SEQ ID NO: 1671212 - RNA, 19 nt, Artificial Sequence
  Description of Artificial Sequence: Synthetic oligonucleotide
guaacugaggcaggggagg

SEQ ID NO: 1671213 - RNA, 19 nt, Artificial Sequence
  Description of Artificial Sequence: Synthetic oligonucleotide
uugggcuucaagggaaccg

SEQ ID NO: 1671214 - RNA, 19 nt, Artificial Sequence
  Description of Artificial Sequence: Synthetic oligonucleotide
uguacucaguugcuaggga

SEQ ID NO: 1671215 - RNA, 19 nt, Artificial Sequence
  Description of Artificial Sequence: Synthetic oligonucleotide
auguacucaguugcuaggg

SEQ ID NO: 1671216 - RNA, 19 nt, Artificial Sequence
  Description of Artificial Sequence: Synthetic oligonucleotide
gaguuaguccacugguccc

SEQ ID NO: 1671217 - RNA, 19 nt, Artificial Sequence
  Description of Artificial Sequence: Synthetic oligonucleotide
uugauucauguacucaguu

SEQ ID NO: 1671218 - RNA, 19 nt, Artificial Sequence
  Description of Artificial Sequence: Synthetic oligonucleotide
uucuugggcuucaagggaa

SEQ ID NO: 1671219 - RNA, 19 nt, Artificial Sequence
  Description of Artificial Sequence: Synthetic oligonucleotide
agugaggacagcuggugga

SEQ ID NO: 1671220 - RNA, 19 nt, Artificial Sequence
  Description of Artificial Sequence: Synthetic oligonucleotide
uccuuuccacaucucacga

SEQ ID NO: 1671221 - RNA, 19 nt, Artificial Sequence
  Description of Artificial Sequence: Synthetic oligonucleotide
uccacgucgaucacauacu

SEQ ID NO: 1671222 - RNA, 19 nt, Artificial Sequence
  Description of Artificial Sequence: Synthetic oligonucleotide
aggacgcagcaacagguuc

SEQ ID NO: 1671223 - RNA, 19 nt, Artificial Sequence
  Description of Artificial Sequence: Synthetic oligonucleotide
agacacgccauccuugcca

SEQ ID NO: 1671224 - RNA, 19 nt, Artificial Sequence
  Description of Artificial Sequence: Synthetic oligonucleotide
ucagguuagaugggacacg

SEQ ID NO: 1671225 - RNA, 19 nt, Artificial Sequence
  Description of Artificial Sequence: Synthetic oligonucleotide
uggugugcgucacaaaaua

SEQ ID NO: 1671226 - RNA, 19 nt, Artificial Sequence
  Description of Artificial Sequence: Synthetic oligonucleotide
aggacuauugugccccgag

SEQ ID NO: 1671227 - RNA, 19 nt, Artificial Sequence
  Description of Artificial Sequence: Synthetic oligonucleotide
cuauugugccccgaguuag

SEQ ID NO: 1671228 - RNA, 19 nt, Artificial Sequence
  Description of Artificial Sequence: Synthetic oligonucleotide
agcuccaccacagucaaga

SEQ ID NO: 1671229 - RNA, 19 nt, Artificial Sequence
  Description of Artificial Sequence: Synthetic oligonucleotide
caggaaggggaccagcgcc

SEQ ID NO: 1671230 - RNA, 19 nt, Artificial Sequence
  Description of Artificial Sequence: Synthetic oligonucleotide
ugcuuaacuacuggcgacc

SEQ ID NO: 1671231 - RNA, 19 nt, Artificial Sequence
  Description of Artificial Sequence: Synthetic oligonucleotide
cucgcuucaccuuguagug

SEQ ID NO: 1671232 - RNA, 19 nt, Artificial Sequence
  Description of Artificial Sequence: Synthetic oligonucleotide
ugggacacggagcuccacc

SEQ ID NO: 1671233 - RNA, 19 nt, Artificial Sequence
  Description of Artificial Sequence: Synthetic oligonucleotide
ggaaaacgggucuuccacg

SEQ ID NO: 1671234 - RNA, 19 nt, Artificial Sequence
  Description of Artificial Sequence: Synthetic oligonucleotide
ucgccauucucucgauccg

SEQ ID NO: 1671235 - RNA, 19 nt, Artificial Sequence
  Description of Artificial Sequence: Synthetic oligonucleotide
gaguaucugccucguagug

SEQ ID NO: 1671236 - RNA, 19 nt, Artificial Sequence
  Description of Artificial Sequence: Synthetic oligonucleotide
gaagcaccagggcaccucc

SEQ ID NO: 1671237 - RNA, 19 nt, Artificial Sequence
  Description of Artificial Sequence: Synthetic oligonucleotide
acuacuggcgacccauuga

SEQ ID NO: 1671238 - RNA, 19 nt, Artificial Sequence
  Description of Artificial Sequence: Synthetic oligonucleotide
ugagauccgguuugggcac

SEQ ID NO: 1671239 - RNA, 19 nt, Artificial Sequence
  Description of Artificial Sequence: Synthetic oligonucleotide
acuggcgacccauugagua

SEQ ID NO: 1671240 - RNA, 19 nt, Artificial Sequence
  Description of Artificial Sequence: Synthetic oligonucleotide
acacucucgccauucucuc

SEQ ID NO: 1671241 - RNA, 19 nt, Artificial Sequence
  Description of Artificial Sequence: Synthetic oligonucleotide
uauuauguccaguccccuc

SEQ ID NO: 1671242 - RNA, 19 nt, Artificial Sequence
  Description of Artificial Sequence: Synthetic oligonucleotide
cugguggaggacuauugug

SEQ ID NO: 1671243 - RNA, 19 nt, Artificial Sequence
  Description of Artificial Sequence: Synthetic oligonucleotide
cucacgagacuccaggcuc

SEQ ID NO: 1671244 - RNA, 19 nt, Artificial Sequence
  Description of Artificial Sequence: Synthetic oligonucleotide
aagugacagcugguguccc

SEQ ID NO: 1671245 - RNA, 19 nt, Artificial Sequence
  Description of Artificial Sequence: Synthetic oligonucleotide
uguccgggcagcaggguca

SEQ ID NO: 1671246 - RNA, 19 nt, Artificial Sequence
  Description of Artificial Sequence: Synthetic oligonucleotide
uggcuucgggacauuagca

SEQ ID NO: 1671247 - RNA, 19 nt, Artificial Sequence
  Description of Artificial Sequence: Synthetic oligonucleotide
cucucgauccgagugcacg

SEQ ID NO: 1671248 - RNA, 19 nt, Artificial Sequence
  Description of Artificial Sequence: Synthetic oligonucleotide
guccaguccccucagugag

SEQ ID NO: 1671249 - RNA, 19 nt, Artificial Sequence
  Description of Artificial Sequence: Synthetic oligonucleotide
acggcccauacacucucgc

SEQ ID NO: 1671250 - RNA, 19 nt, Artificial Sequence
  Description of Artificial Sequence: Synthetic oligonucleotide
ggcuuucuggcccagacac

SEQ ID NO: 1671251 - RNA, 19 nt, Artificial Sequence
  Description of Artificial Sequence: Synthetic oligonucleotide
uccaggaguaacugugccu

SEQ ID NO: 1671252 - RNA, 19 nt, Artificial Sequence
  Description of Artificial Sequence: Synthetic oligonucleotide
ggucccguaacugaggcag

SEQ ID NO: 1671253 - RNA, 19 nt, Artificial Sequence
  Description of Artificial Sequence: Synthetic oligonucleotide
aggaccugagucccgggag

SEQ ID NO: 1671254 - RNA, 19 nt, Artificial Sequence
  Description of Artificial Sequence: Synthetic oligonucleotide
uuccacaucucacgagacu

SEQ ID NO: 1671255 - RNA, 19 nt, Artificial Sequence
  Description of Artificial Sequence: Synthetic oligonucleotide
gggacauuagcauggggug

SEQ ID NO: 1671256 - RNA, 19 nt, Artificial Sequence
  Description of Artificial Sequence: Synthetic oligonucleotide
uuggugugcgucacaaaau

SEQ ID NO: 1671257 - RNA, 19 nt, Artificial Sequence
  Description of Artificial Sequence: Synthetic oligonucleotide
accaggcugaagugacagc

SEQ ID NO: 1671258 - RNA, 19 nt, Artificial Sequence
  Description of Artificial Sequence: Synthetic oligonucleotide
ucucgauccgagugcacga

SEQ ID NO: 1671259 - RNA, 19 nt, Artificial Sequence
  Description of Artificial Sequence: Synthetic oligonucleotide
ugacuagagggagacacau

SEQ ID NO: 1671260 - RNA, 19 nt, Artificial Sequence
  Description of Artificial Sequence: Synthetic oligonucleotide
aucugccucguagugacag

SEQ ID NO: 1671261 - RNA, 19 nt, Artificial Sequence
  Description of Artificial Sequence: Synthetic oligonucleotide
aucaguguuccagugcucu

SEQ ID NO: 1671262 - RNA, 19 nt, Artificial Sequence
  Description of Artificial Sequence: Synthetic oligonucleotide
acagucaagauaaauccuu

SEQ ID NO: 1671263 - RNA, 19 nt, Artificial Sequence
  Description of Artificial Sequence: Synthetic oligonucleotide
acuauugugccccgaguua

SEQ ID NO: 1671264 - RNA, 19 nt, Artificial Sequence
  Description of Artificial Sequence: Synthetic oligonucleotide
auccgguuugggcacaacu

SEQ ID NO: 1671265 - RNA, 19 nt, Artificial Sequence
  Description of Artificial Sequence: Synthetic oligonucleotide
ucgauccgagugcacgaag

SEQ ID NO: 1671266 - RNA, 19 nt, Artificial Sequence
  Description of Artificial Sequence: Synthetic oligonucleotide
ucccgauugcuguuguaga

SEQ ID NO: 1671267 - RNA, 19 nt, Artificial Sequence
  Description of Artificial Sequence: Synthetic oligonucleotide
ucgggacauuagcaugggg

SEQ ID NO: 1671268 - RNA, 19 nt, Artificial Sequence
  Description of Artificial Sequence: Synthetic oligonucleotide
acacggcccauacacucuc

SEQ ID NO: 1671269 - RNA, 19 nt, Artificial Sequence
  Description of Artificial Sequence: Synthetic oligonucleotide
uugcuagggagucuucaau

SEQ ID NO: 1671270 - RNA, 19 nt, Artificial Sequence
  Description of Artificial Sequence: Synthetic oligonucleotide
cacgccauccuugccaucc

SEQ ID NO: 1671271 - RNA, 19 nt, Artificial Sequence
  Description of Artificial Sequence: Synthetic oligonucleotide
gacacuagugauggcuuug

SEQ ID NO: 1671272 - RNA, 19 nt, Artificial Sequence
  Description of Artificial Sequence: Synthetic oligonucleotide
uuauuauguccaguccccu

SEQ ID NO: 1671273 - RNA, 19 nt, Artificial Sequence
  Description of Artificial Sequence: Synthetic oligonucleotide
ggagacucaucuuugagcu

SEQ ID NO: 1671274 - RNA, 19 nt, Artificial Sequence
  Description of Artificial Sequence: Synthetic oligonucleotide
gaaaacagccucaggucca

SEQ ID NO: 1671275 - RNA, 19 nt, Artificial Sequence
  Description of Artificial Sequence: Synthetic oligonucleotide
ucacgagacuccaggcucu

SEQ ID NO: 1671276 - RNA, 19 nt, Artificial Sequence
  Description of Artificial Sequence: Synthetic oligonucleotide
gucagguuagaugggacac

SEQ ID NO: 1671277 - RNA, 19 nt, Artificial Sequence
  Description of Artificial Sequence: Synthetic oligonucleotide
uuugaccuccuggucucgg

SEQ ID NO: 1671278 - RNA, 19 nt, Artificial Sequence
  Description of Artificial Sequence: Synthetic oligonucleotide
gucccgauugcuguuguag

SEQ ID NO: 1671279 - RNA, 19 nt, Artificial Sequence
  Description of Artificial Sequence: Synthetic oligonucleotide
cagugaggacagcuggugg

SEQ ID NO: 1671280 - RNA, 19 nt, Artificial Sequence
  Description of Artificial Sequence: Synthetic oligonucleotide
gaaaacgggucuuccacgu

SEQ ID NO: 1671281 - RNA, 19 nt, Artificial Sequence
  Description of Artificial Sequence: Synthetic oligonucleotide
uuaguccacuggucccugg

SEQ ID NO: 1671282 - RNA, 19 nt, Artificial Sequence
  Description of Artificial Sequence: Synthetic oligonucleotide
agcaacagguucccgcacu

SEQ ID NO: 1671283 - RNA, 19 nt, Artificial Sequence
  Description of Artificial Sequence: Synthetic oligonucleotide
accuuguagugcuuaacua

SEQ ID NO: 1671284 - RNA, 19 nt, Artificial Sequence
  Description of Artificial Sequence: Synthetic oligonucleotide
cuccaggaguaacugugcc

SEQ ID NO: 1671285 - RNA, 19 nt, Artificial Sequence
  Description of Artificial Sequence: Synthetic oligonucleotide
ucccguaacugaggcaggg

SEQ ID NO: 1671286 - RNA, 19 nt, Artificial Sequence
  Description of Artificial Sequence: Synthetic oligonucleotide
uugugccccgaguuagucc

SEQ ID NO: 1671287 - RNA, 19 nt, Artificial Sequence
  Description of Artificial Sequence: Synthetic oligonucleotide
auugugccccgaguuaguc

SEQ ID NO: 1671288 - RNA, 19 nt, Artificial Sequence
  Description of Artificial Sequence: Synthetic oligonucleotide
aguccccucagugaggaca

SEQ ID NO: 1671289 - RNA, 19 nt, Artificial Sequence
  Description of Artificial Sequence: Synthetic oligonucleotide
gcugacuagagggagacac

SEQ ID NO: 1671290 - RNA, 19 nt, Artificial Sequence
  Description of Artificial Sequence: Synthetic oligonucleotide
uauugugccccgaguuagu

SEQ ID NO: 1671291 - RNA, 19 nt, Artificial Sequence
  Description of Artificial Sequence: Synthetic oligonucleotide
gagugcacgaagccuagaa

SEQ ID NO: 1671292 - RNA, 19 nt, Artificial Sequence
  Description of Artificial Sequence: Synthetic oligonucleotide
ucaguugcuagggagucuu

SEQ ID NO: 1671293 - RNA, 19 nt, Artificial Sequence
  Description of Artificial Sequence: Synthetic oligonucleotide
ccaucauguacaugugucc

SEQ ID NO: 1671294 - RNA, 19 nt, Artificial Sequence
  Description of Artificial Sequence: Synthetic oligonucleotide
uuaggacccucucgcuuca

SEQ ID NO: 1671295 - RNA, 19 nt, Artificial Sequence
  Description of Artificial Sequence: Synthetic oligonucleotide
gugcuuaacuacuggcgac

SEQ ID NO: 1671296 - RNA, 19 nt, Artificial Sequence
  Description of Artificial Sequence: Synthetic oligonucleotide
cacgaagccuagaaccuuc

SEQ ID NO: 1671297 - RNA, 19 nt, Artificial Sequence
  Description of Artificial Sequence: Synthetic oligonucleotide
gacacggagcuccaccaca

SEQ ID NO: 1671298 - RNA, 19 nt, Artificial Sequence
  Description of Artificial Sequence: Synthetic oligonucleotide
ggcuuugagauccgguuug

SEQ ID NO: 1671299 - RNA, 19 nt, Artificial Sequence
  Description of Artificial Sequence: Synthetic oligonucleotide
ggaaccggcugacuagagg

SEQ ID NO: 1671300 - RNA, 19 nt, Artificial Sequence
  Description of Artificial Sequence: Synthetic oligonucleotide
agacacaucuugauucaug

SEQ ID NO: 1671301 - RNA, 19 nt, Artificial Sequence
  Description of Artificial Sequence: Synthetic oligonucleotide
uucgggacauuagcauggg

SEQ ID NO: 1671302 - RNA, 19 nt, Artificial Sequence
  Description of Artificial Sequence: Synthetic oligonucleotide
cagaaccucggccaucaug

SEQ ID NO: 1671303 - RNA, 19 nt, Artificial Sequence
  Description of Artificial Sequence: Synthetic oligonucleotide
cugggagccuggaucagug

SEQ ID NO: 1671304 - RNA, 19 nt, Artificial Sequence
  Description of Artificial Sequence: Synthetic oligonucleotide
uucucucgauccgagugca

SEQ ID NO: 1671305 - RNA, 19 nt, Artificial Sequence
  Description of Artificial Sequence: Synthetic oligonucleotide
cuuugagauccgguuuggg

SEQ ID NO: 1671306 - RNA, 19 nt, Artificial Sequence
  Description of Artificial Sequence: Synthetic oligonucleotide
auccuugccauccccucca

SEQ ID NO: 1671307 - RNA, 19 nt, Artificial Sequence
  Description of Artificial Sequence: Synthetic oligonucleotide
uucauguacucaguugcua

SEQ ID NO: 1671308 - RNA, 19 nt, Artificial Sequence
  Description of Artificial Sequence: Synthetic oligonucleotide
ucccgggaggaggacacgg

SEQ ID NO: 1671309 - RNA, 19 nt, Artificial Sequence
  Description of Artificial Sequence: Synthetic oligonucleotide
acccucucgcuucaccuug

SEQ ID NO: 1671310 - RNA, 19 nt, Artificial Sequence
  Description of Artificial Sequence: Synthetic oligonucleotide
ggccugacagucccgauug

SEQ ID NO: 1671311 - RNA, 19 nt, Artificial Sequence
  Description of Artificial Sequence: Synthetic oligonucleotide
accucggccaucauguaca

SEQ ID NO: 1671312 - RNA, 19 nt, Artificial Sequence
  Description of Artificial Sequence: Synthetic oligonucleotide
cuucaagggaaccggcuga

SEQ ID NO: 1671313 - RNA, 19 nt, Artificial Sequence
  Description of Artificial Sequence: Synthetic oligonucleotide
gacgcagcaacagguuccc

SEQ ID NO: 1671314 - RNA, 19 nt, Artificial Sequence
  Description of Artificial Sequence: Synthetic oligonucleotide
cacucucgccauucucucg

SEQ ID NO: 1671315 - RNA, 19 nt, Artificial Sequence
  Description of Artificial Sequence: Synthetic oligonucleotide
gugcgucacaaaauaguug

SEQ ID NO: 1671316 - RNA, 19 nt, Artificial Sequence
  Description of Artificial Sequence: Synthetic oligonucleotide
cauggagacucaucuuuga

SEQ ID NO: 1671317 - RNA, 19 nt, Artificial Sequence
  Description of Artificial Sequence: Synthetic oligonucleotide
ugccucguagugacagaca

SEQ ID NO: 1671318 - RNA, 19 nt, Artificial Sequence
  Description of Artificial Sequence: Synthetic oligonucleotide
ucgggguagcgcuccagga

SEQ ID NO: 1671319 - RNA, 19 nt, Artificial Sequence
  Description of Artificial Sequence: Synthetic oligonucleotide
cucucgcuucaccuuguag

SEQ ID NO: 1671320 - RNA, 19 nt, Artificial Sequence
  Description of Artificial Sequence: Synthetic oligonucleotide
guugcuagggagucuucaa

SEQ ID NO: 1671321 - RNA, 19 nt, Artificial Sequence
  Description of Artificial Sequence: Synthetic oligonucleotide
uggggugcaggaccugagu

SEQ ID NO: 1671322 - RNA, 19 nt, Artificial Sequence
  Description of Artificial Sequence: Synthetic oligonucleotide
uggggugaacugacagcug

SEQ ID NO: 1671323 - RNA, 19 nt, Artificial Sequence
  Description of Artificial Sequence: Synthetic oligonucleotide
ucguagugacagacacgcc

SEQ ID NO: 1671324 - RNA, 19 nt, Artificial Sequence
  Description of Artificial Sequence: Synthetic oligonucleotide
ccgguuugggcacaacugg

SEQ ID NO: 1671325 - RNA, 19 nt, Artificial Sequence
  Description of Artificial Sequence: Synthetic oligonucleotide
agagggagacacaucuuga

SEQ ID NO: 1671326 - RNA, 19 nt, Artificial Sequence
  Description of Artificial Sequence: Synthetic oligonucleotide
gacuauugugccccgaguu

SEQ ID NO: 1671327 - RNA, 19 nt, Artificial Sequence
  Description of Artificial Sequence: Synthetic oligonucleotide
acagguucccgcacucggg

SEQ ID NO: 1671328 - RNA, 19 nt, Artificial Sequence
  Description of Artificial Sequence: Synthetic oligonucleotide
cacuagugauggcuuugag

SEQ ID NO: 1671329 - RNA, 19 nt, Artificial Sequence
  Description of Artificial Sequence: Synthetic oligonucleotide
cgauugcuguuguagaagc

SEQ ID NO: 1671330 - RNA, 19 nt, Artificial Sequence
  Description of Artificial Sequence: Synthetic oligonucleotide
uggauagccccuggaggcc

SEQ ID NO: 1671331 - RNA, 19 nt, Artificial Sequence
  Description of Artificial Sequence: Synthetic oligonucleotide
ggaccugagucccgggagg

SEQ ID NO: 1671332 - RNA, 19 nt, Artificial Sequence
  Description of Artificial Sequence: Synthetic oligonucleotide
cauccuggucccguaacug

SEQ ID NO: 1671333 - RNA, 19 nt, Artificial Sequence
  Description of Artificial Sequence: Synthetic oligonucleotide
ugacagcuggugucccuug

SEQ ID NO: 1671334 - RNA, 19 nt, Artificial Sequence
  Description of Artificial Sequence: Synthetic oligonucleotide
caggaguaacugugccucc

SEQ ID NO: 1671335 - RNA, 19 nt, Artificial Sequence
  Description of Artificial Sequence: Synthetic oligonucleotide
ugcccagaacuuccuguaa

SEQ ID NO: 1671336 - RNA, 19 nt, Artificial Sequence
  Description of Artificial Sequence: Synthetic oligonucleotide
ggucagguuagaugggaca

SEQ ID NO: 1671337 - RNA, 19 nt, Artificial Sequence
  Description of Artificial Sequence: Synthetic oligonucleotide
ggcccauacacucucgcca

SEQ ID NO: 1671338 - RNA, 19 nt, Artificial Sequence
  Description of Artificial Sequence: Synthetic oligonucleotide
ggugugcgucacaaaauag

SEQ ID NO: 1671339 - RNA, 19 nt, Artificial Sequence
  Description of Artificial Sequence: Synthetic oligonucleotide
ggaucaguguuccagugcu

SEQ ID NO: 1671340 - RNA, 19 nt, Artificial Sequence
  Description of Artificial Sequence: Synthetic oligonucleotide
gaccagcgcccuuuuggug

SEQ ID NO: 1671341 - RNA, 19 nt, Artificial Sequence
  Description of Artificial Sequence: Synthetic oligonucleotide
cuuuuggugugcgucacaa

SEQ ID NO: 1671342 - RNA, 19 nt, Artificial Sequence
  Description of Artificial Sequence: Synthetic oligonucleotide
uagugacagacacgccauc

SEQ ID NO: 1671343 - RNA, 19 nt, Artificial Sequence
  Description of Artificial Sequence: Synthetic oligonucleotide
uacuggcgacccauugagu

SEQ ID NO: 1671344 - RNA, 19 nt, Artificial Sequence
  Description of Artificial Sequence: Synthetic oligonucleotide
accacagcuuccagugagg

SEQ ID NO: 1671345 - RNA, 19 nt, Artificial Sequence
  Description of Artificial Sequence: Synthetic oligonucleotide
agcagauggauagccccug

SEQ ID NO: 1671346 - RNA, 19 nt, Artificial Sequence
  Description of Artificial Sequence: Synthetic oligonucleotide
agacacuagugauggcuuu

SEQ ID NO: 1671347 - RNA, 19 nt, Artificial Sequence
  Description of Artificial Sequence: Synthetic oligonucleotide
auuugaccuccuggucucg

SEQ ID NO: 1671348 - RNA, 19 nt, Artificial Sequence
  Description of Artificial Sequence: Synthetic oligonucleotide
agcugguggaggacuauug

SEQ ID NO: 1671349 - RNA, 19 nt, Artificial Sequence
  Description of Artificial Sequence: Synthetic oligonucleotide
acacggagcuccaccacag

SEQ ID NO: 1671350 - RNA, 19 nt, Artificial Sequence
  Description of Artificial Sequence: Synthetic oligonucleotide
ggacacggcccauacacuc

SEQ ID NO: 1671351 - RNA, 19 nt, Artificial Sequence
  Description of Artificial Sequence: Synthetic oligonucleotide
ucggagaaccaggcugaag

SEQ ID NO: 1671352 - RNA, 19 nt, Artificial Sequence
  Description of Artificial Sequence: Synthetic oligonucleotide
acagucccgauugcuguug

SEQ ID NO: 1671353 - RNA, 19 nt, Artificial Sequence
  Description of Artificial Sequence: Synthetic oligonucleotide
gccuggaucaguguuccag

SEQ ID NO: 1671354 - RNA, 19 nt, Artificial Sequence
  Description of Artificial Sequence: Synthetic oligonucleotide
gcuuugucacgagggaggg

SEQ ID NO: 1671355 - RNA, 19 nt, Artificial Sequence
  Description of Artificial Sequence: Synthetic oligonucleotide
cugacuagagggagacaca

SEQ ID NO: 1671356 - RNA, 19 nt, Artificial Sequence
  Description of Artificial Sequence: Synthetic oligonucleotide
caguguuccagugcucuuc

SEQ ID NO: 1671357 - RNA, 19 nt, Artificial Sequence
  Description of Artificial Sequence: Synthetic oligonucleotide
uggcgacccauugaguauc

SEQ ID NO: 1671358 - RNA, 19 nt, Artificial Sequence
  Description of Artificial Sequence: Synthetic oligonucleotide
cgacccauugaguaucugc

SEQ ID NO: 1671359 - RNA, 19 nt, Artificial Sequence
  Description of Artificial Sequence: Synthetic oligonucleotide
aacgggucuuccacgucga

SEQ ID NO: 1671360 - RNA, 19 nt, Artificial Sequence
  Description of Artificial Sequence: Synthetic oligonucleotide
ccaggaguaacugugccuc

SEQ ID NO: 1671361 - RNA, 19 nt, Artificial Sequence
  Description of Artificial Sequence: Synthetic oligonucleotide
ucucgccauucucucgauc

SEQ ID NO: 1671362 - RNA, 19 nt, Artificial Sequence
  Description of Artificial Sequence: Synthetic oligonucleotide
guaguggaggcagucuguc

SEQ ID NO: 1671363 - RNA, 19 nt, Artificial Sequence
  Description of Artificial Sequence: Synthetic oligonucleotide
cuccaggacgcagcaacag

SEQ ID NO: 1671364 - RNA, 19 nt, Artificial Sequence
  Description of Artificial Sequence: Synthetic oligonucleotide
gguuugggcacaacuggug

SEQ ID NO: 1671365 - RNA, 19 nt, Artificial Sequence
  Description of Artificial Sequence: Synthetic oligonucleotide
gcucucaaccuugaauuug

SEQ ID NO: 1671366 - RNA, 19 nt, Artificial Sequence
  Description of Artificial Sequence: Synthetic oligonucleotide
uccuugccauccccuccag

SEQ ID NO: 1671367 - RNA, 19 nt, Artificial Sequence
  Description of Artificial Sequence: Synthetic oligonucleotide
gugugcgucacaaaauagu

SEQ ID NO: 1671368 - RNA, 19 nt, Artificial Sequence
  Description of Artificial Sequence: Synthetic oligonucleotide
caccuuguagugcuuaacu

SEQ ID NO: 1671369 - RNA, 19 nt, Artificial Sequence
  Description of Artificial Sequence: Synthetic oligonucleotide
ccauggagacucaucuuug

SEQ ID NO: 1671370 - RNA, 19 nt, Artificial Sequence
  Description of Artificial Sequence: Synthetic oligonucleotide
gagggagacacaucuugau

SEQ ID NO: 1671371 - RNA, 19 nt, Artificial Sequence
  Description of Artificial Sequence: Synthetic oligonucleotide
ucaguguuccagugcucuu

SEQ ID NO: 1671372 - RNA, 19 nt, Artificial Sequence
  Description of Artificial Sequence: Synthetic oligonucleotide
gcagauggauagccccugg

SEQ ID NO: 1671373 - RNA, 19 nt, Artificial Sequence
  Description of Artificial Sequence: Synthetic oligonucleotide
cuuaacuacuggcgaccca

SEQ ID NO: 1671374 - RNA, 19 nt, Artificial Sequence
  Description of Artificial Sequence: Synthetic oligonucleotide
cguagugacagacacgcca

SEQ ID NO: 1671375 - RNA, 19 nt, Artificial Sequence
  Description of Artificial Sequence: Synthetic oligonucleotide
uggugucccuugagcuucc

SEQ ID NO: 1671376 - RNA, 19 nt, Artificial Sequence
  Description of Artificial Sequence: Synthetic oligonucleotide
uaacuacuggcgacccauu

SEQ ID NO: 1671377 - RNA, 19 nt, Artificial Sequence
  Description of Artificial Sequence: Synthetic oligonucleotide
cacggcccauacacucucg

SEQ ID NO: 1671378 - RNA, 19 nt, Artificial Sequence
  Description of Artificial Sequence: Synthetic oligonucleotide
ucucucgauccgagugcac

SEQ ID NO: 1671379 - RNA, 19 nt, Artificial Sequence
  Description of Artificial Sequence: Synthetic oligonucleotide
auugaguaucugccucgua

SEQ ID NO: 1671380 - RNA, 19 nt, Artificial Sequence
  Description of Artificial Sequence: Synthetic oligonucleotide
cuggggugaacugacagcu

SEQ ID NO: 1671381 - RNA, 19 nt, Artificial Sequence
  Description of Artificial Sequence: Synthetic oligonucleotide
agggaaccggcugacuaga

SEQ ID NO: 1671382 - RNA, 19 nt, Artificial Sequence
  Description of Artificial Sequence: Synthetic oligonucleotide
cccagaacuuccuguaauc

SEQ ID NO: 1671383 - RNA, 19 nt, Artificial Sequence
  Description of Artificial Sequence: Synthetic oligonucleotide
cagacacgccauccuugcc

SEQ ID NO: 1671384 - RNA, 19 nt, Artificial Sequence
  Description of Artificial Sequence: Synthetic oligonucleotide
acaucucacgagacuccag

SEQ ID NO: 1671385 - RNA, 19 nt, Artificial Sequence
  Description of Artificial Sequence: Synthetic oligonucleotide
guagcgcuccaggaguaac

SEQ ID NO: 1671386 - RNA, 19 nt, Artificial Sequence
  Description of Artificial Sequence: Synthetic oligonucleotide
agcauggggugcaggaccu

SEQ ID NO: 1671387 - RNA, 19 nt, Artificial Sequence
  Description of Artificial Sequence: Synthetic oligonucleotide
ugggagccuggaucagugu

SEQ ID NO: 1671388 - RNA, 19 nt, Artificial Sequence
  Description of Artificial Sequence: Synthetic oligonucleotide
agcgcccuuuuggugugcg

SEQ ID NO: 1671389 - RNA, 19 nt, Artificial Sequence
  Description of Artificial Sequence: Synthetic oligonucleotide
gcuuaacuacuggcgaccc

SEQ ID NO: 1671390 - RNA, 19 nt, Artificial Sequence
  Description of Artificial Sequence: Synthetic oligonucleotide
cgauccgagugcacgaagc

SEQ ID NO: 1671391 - RNA, 19 nt, Artificial Sequence
  Description of Artificial Sequence: Synthetic oligonucleotide
ggggugcaggaccugaguc

SEQ ID NO: 1671392 - RNA, 19 nt, Artificial Sequence
  Description of Artificial Sequence: Synthetic oligonucleotide
ggaggacuauugugccccg

SEQ ID NO: 1671393 - RNA, 19 nt, Artificial Sequence
  Description of Artificial Sequence: Synthetic oligonucleotide
cagauggauagccccugga

SEQ ID NO: 1671394 - RNA, 19 nt, Artificial Sequence
  Description of Artificial Sequence: Synthetic oligonucleotide
gaucaguguuccagugcuc

SEQ ID NO: 1671395 - RNA, 19 nt, Artificial Sequence
  Description of Artificial Sequence: Synthetic oligonucleotide
gcaggaaaacgggucuucc

SEQ ID NO: 1671396 - RNA, 19 nt, Artificial Sequence
  Description of Artificial Sequence: Synthetic oligonucleotide
cugaagugacagcuggugu

SEQ ID NO: 1671397 - RNA, 19 nt, Artificial Sequence
  Description of Artificial Sequence: Synthetic oligonucleotide
ccgauugcuguuguagaag

SEQ ID NO: 1671398 - RNA, 19 nt, Artificial Sequence
  Description of Artificial Sequence: Synthetic oligonucleotide
cuggaggccugcccagaac

SEQ ID NO: 1671399 - RNA, 19 nt, Artificial Sequence
  Description of Artificial Sequence: Synthetic oligonucleotide
agguucccgcacucggggu

SEQ ID NO: 1671400 - RNA, 19 nt, Artificial Sequence
  Description of Artificial Sequence: Synthetic oligonucleotide
agccuagaaccuucucaua

SEQ ID NO: 1671401 - RNA, 19 nt, Artificial Sequence
  Description of Artificial Sequence: Synthetic oligonucleotide
agggcaccuccgccgcacg

SEQ ID NO: 1671402 - RNA, 19 nt, Artificial Sequence
  Description of Artificial Sequence: Synthetic oligonucleotide
ucccgcacucgggguagcg

SEQ ID NO: 1671403 - RNA, 19 nt, Artificial Sequence
  Description of Artificial Sequence: Synthetic oligonucleotide
gacacgccauccuugccau

SEQ ID NO: 1671404 - RNA, 19 nt, Artificial Sequence
  Description of Artificial Sequence: Synthetic oligonucleotide
gaccugagucccgggagga

SEQ ID NO: 1671405 - RNA, 19 nt, Artificial Sequence
  Description of Artificial Sequence: Synthetic oligonucleotide
gauagccccuggaggccug

SEQ ID NO: 1671406 - RNA, 19 nt, Artificial Sequence
  Description of Artificial Sequence: Synthetic oligonucleotide
ggcacaacugguggcuuug

SEQ ID NO: 1671407 - RNA, 19 nt, Artificial Sequence
  Description of Artificial Sequence: Synthetic oligonucleotide
gucccguaacugaggcagg

SEQ ID NO: 1671408 - RNA, 19 nt, Artificial Sequence
  Description of Artificial Sequence: Synthetic oligonucleotide
gaugggacacggagcucca

SEQ ID NO: 1671409 - RNA, 19 nt, Artificial Sequence
  Description of Artificial Sequence: Synthetic oligonucleotide
ccccgaguuaguccacugg

SEQ ID NO: 1671410 - RNA, 19 nt, Artificial Sequence
  Description of Artificial Sequence: Synthetic oligonucleotide
gccauucucucgauccgag

SEQ ID NO: 1671411 - RNA, 19 nt, Artificial Sequence
  Description of Artificial Sequence: Synthetic oligonucleotide
acgaagccuagaaccuucu

SEQ ID NO: 1671412 - RNA, 19 nt, Artificial Sequence
  Description of Artificial Sequence: Synthetic oligonucleotide
uccagccggcucaccugca

SEQ ID NO: 1671413 - RNA, 19 nt, Artificial Sequence
  Description of Artificial Sequence: Synthetic oligonucleotide
gcucggcugugauaucccc

SEQ ID NO: 1671414 - RNA, 19 nt, Artificial Sequence
  Description of Artificial Sequence: Synthetic oligonucleotide
cagucaagauaaauccuuu

SEQ ID NO: 1671415 - RNA, 19 nt, Artificial Sequence
  Description of Artificial Sequence: Synthetic oligonucleotide
cacgucgaucacauacuua

SEQ ID NO: 1671416 - RNA, 19 nt, Artificial Sequence
  Description of Artificial Sequence: Synthetic oligonucleotide
aggacacggcccauacacu

SEQ ID NO: 1671417 - RNA, 19 nt, Artificial Sequence
  Description of Artificial Sequence: Synthetic oligonucleotide
ccgggaggaggacacggcc

SEQ ID NO: 1671418 - RNA, 19 nt, Artificial Sequence
  Description of Artificial Sequence: Synthetic oligonucleotide
caguugcuagggagucuuc

SEQ ID NO: 1671419 - RNA, 19 nt, Artificial Sequence
  Description of Artificial Sequence: Synthetic oligonucleotide
ccguaacugaggcagggga

SEQ ID NO: 1671420 - RNA, 19 nt, Artificial Sequence
  Description of Artificial Sequence: Synthetic oligonucleotide
cagacacuagugauggcuu

SEQ ID NO: 1671421 - RNA, 19 nt, Artificial Sequence
  Description of Artificial Sequence: Synthetic oligonucleotide
cauacacucucgccauucu

SEQ ID NO: 1671422 - RNA, 19 nt, Artificial Sequence
  Description of Artificial Sequence: Synthetic oligonucleotide
ggguuuugcugggagcuuc

SEQ ID NO: 1671423 - RNA, 19 nt, Artificial Sequence
  Description of Artificial Sequence: Synthetic oligonucleotide
ccauacacucucgccauuc

SEQ ID NO: 1671424 - RNA, 19 nt, Artificial Sequence
  Description of Artificial Sequence: Synthetic oligonucleotide
gacacggcccauacacucu

SEQ ID NO: 1671425 - RNA, 19 nt, Artificial Sequence
  Description of Artificial Sequence: Synthetic oligonucleotide
agucccgauugcuguugua

SEQ ID NO: 1671426 - RNA, 19 nt, Artificial Sequence
  Description of Artificial Sequence: Synthetic oligonucleotide
gaggacuauugugccccga

SEQ ID NO: 1671427 - RNA, 19 nt, Artificial Sequence
  Description of Artificial Sequence: Synthetic oligonucleotide
gaaccucggccaucaugua

SEQ ID NO: 1671428 - RNA, 19 nt, Artificial Sequence
  Description of Artificial Sequence: Synthetic oligonucleotide
gggguagcgcuccaggagu

SEQ ID NO: 1671429 - RNA, 19 nt, Artificial Sequence
  Description of Artificial Sequence: Synthetic oligonucleotide
gauccgguuugggcacaac

SEQ ID NO: 1671430 - RNA, 19 nt, Artificial Sequence
  Description of Artificial Sequence: Synthetic oligonucleotide
gcugguggaggacuauugu

SEQ ID NO: 1671431 - RNA, 19 nt, Artificial Sequence
  Description of Artificial Sequence: Synthetic oligonucleotide
gcaggaccugagucccggg

SEQ ID NO: 1671432 - RNA, 19 nt, Artificial Sequence
  Description of Artificial Sequence: Synthetic oligonucleotide
gggucagguuagaugggac

SEQ ID NO: 1671433 - RNA, 19 nt, Artificial Sequence
  Description of Artificial Sequence: Synthetic oligonucleotide
caggugggaguggcuucgg

SEQ ID NO: 1671434 - RNA, 19 nt, Artificial Sequence
  Description of Artificial Sequence: Synthetic oligonucleotide
ggcuucgggacauuagcau

SEQ ID NO: 1671435 - RNA, 19 nt, Artificial Sequence
  Description of Artificial Sequence: Synthetic oligonucleotide
cgggacauuagcauggggu

SEQ ID NO: 1671436 - RNA, 19 nt, Artificial Sequence
  Description of Artificial Sequence: Synthetic oligonucleotide
acgccgcgccuccucuuug

SEQ ID NO: 1671437 - RNA, 19 nt, Artificial Sequence
  Description of Artificial Sequence: Synthetic oligonucleotide
ccccagcuuugucacgagg

SEQ ID NO: 1671438 - RNA, 19 nt, Artificial Sequence
  Description of Artificial Sequence: Synthetic oligonucleotide
acgcagcaacagguucccg

SEQ ID NO: 1671439 - RNA, 19 nt, Artificial Sequence
  Description of Artificial Sequence: Synthetic oligonucleotide
cgcgccuccucuuugguca

SEQ ID NO: 1671440 - RNA, 19 nt, Artificial Sequence
  Description of Artificial Sequence: Synthetic oligonucleotide
cauugaguaucugccucgu

SEQ ID NO: 1671441 - RNA, 19 nt, Artificial Sequence
  Description of Artificial Sequence: Synthetic oligonucleotide
cuuugucacgagggaggga

SEQ ID NO: 1671442 - RNA, 19 nt, Artificial Sequence
  Description of Artificial Sequence: Synthetic oligonucleotide
ggaccagcgcccuuuuggu

SEQ ID NO: 1671443 - RNA, 19 nt, Artificial Sequence
  Description of Artificial Sequence: Synthetic oligonucleotide
cccguaacugaggcagggg

SEQ ID NO: 1671444 - RNA, 19 nt, Artificial Sequence
  Description of Artificial Sequence: Synthetic oligonucleotide
ggacuauugugccccgagu

SEQ ID NO: 1671445 - RNA, 19 nt, Artificial Sequence
  Description of Artificial Sequence: Synthetic oligonucleotide
cccgauugcuguuguagaa

SEQ ID NO: 1671446 - RNA, 19 nt, Artificial Sequence
  Description of Artificial Sequence: Synthetic oligonucleotide
gguucccgcacucggggua

SEQ ID NO: 1671447 - RNA, 19 nt, Artificial Sequence
  Description of Artificial Sequence: Synthetic oligonucleotide
cacgagacuccaggcucuc

SEQ ID NO: 1671448 - RNA, 19 nt, Artificial Sequence
  Description of Artificial Sequence: Synthetic oligonucleotide
gggcuucaagggaaccggc

SEQ ID NO: 1671449 - RNA, 19 nt, Artificial Sequence
  Description of Artificial Sequence: Synthetic oligonucleotide
gacccucucgcuucaccuu

SEQ ID NO: 1671450 - RNA, 19 nt, Artificial Sequence
  Description of Artificial Sequence: Synthetic oligonucleotide
cccgggaggaggacacggc

SEQ ID NO: 1671451 - RNA, 19 nt, Artificial Sequence
  Description of Artificial Sequence: Synthetic oligonucleotide
gucccgggaggaggacacg

SEQ ID NO: 1671452 - RNA, 19 nt, Artificial Sequence
  Description of Artificial Sequence: Synthetic oligonucleotide
gagggagccuggggugaac

SEQ ID NO: 1671453 - RNA, 19 nt, Artificial Sequence
  Description of Artificial Sequence: Synthetic oligonucleotide
acgggucuuccacgucgau

SEQ ID NO: 1671454 - RNA, 19 nt, Artificial Sequence
  Description of Artificial Sequence: Synthetic oligonucleotide
agauccgguuugggcacaa

SEQ ID NO: 1671455 - RNA, 19 nt, Artificial Sequence
  Description of Artificial Sequence: Synthetic oligonucleotide
cucgauccgagugcacgaa

SEQ ID NO: 1671456 - RNA, 19 nt, Artificial Sequence
  Description of Artificial Sequence: Synthetic oligonucleotide
gccccgaguuaguccacug

SEQ ID NO: 1671457 - RNA, 19 nt, Artificial Sequence
  Description of Artificial Sequence: Synthetic oligonucleotide
gggaaccggcugacuagag

SEQ ID NO: 1671458 - RNA, 19 nt, Artificial Sequence
  Description of Artificial Sequence: Synthetic oligonucleotide
caccacagucaagauaaau

SEQ ID NO: 1671459 - RNA, 19 nt, Artificial Sequence
  Description of Artificial Sequence: Synthetic oligonucleotide
cggcccauacacucucgcc

SEQ ID NO: 1671460 - RNA, 19 nt, Artificial Sequence
  Description of Artificial Sequence: Synthetic oligonucleotide
caguccccucagugaggac

SEQ ID NO: 1671461 - RNA, 19 nt, Artificial Sequence
  Description of Artificial Sequence: Synthetic oligonucleotide
gguaguggaggcagucugu

SEQ ID NO: 1671462 - RNA, 19 nt, Artificial Sequence
  Description of Artificial Sequence: Synthetic oligonucleotide
aggggaccagcgcccuuuu

SEQ ID NO: 1671463 - RNA, 19 nt, Artificial Sequence
  Description of Artificial Sequence: Synthetic oligonucleotide
ccagcgcccuuuuggugug

SEQ ID NO: 1671464 - RNA, 19 nt, Artificial Sequence
  Description of Artificial Sequence: Synthetic oligonucleotide
cccgaguuaguccacuggu

SEQ ID NO: 1671465 - RNA, 19 nt, Artificial Sequence
  Description of Artificial Sequence: Synthetic oligonucleotide
gccugacagucccgauugc

SEQ ID NO: 1671466 - RNA, 19 nt, Artificial Sequence
  Description of Artificial Sequence: Synthetic oligonucleotide
cuuccagcucggcugugau

SEQ ID NO: 1671467 - RNA, 19 nt, Artificial Sequence
  Description of Artificial Sequence: Synthetic oligonucleotide
gcccagaacuuccuguaau

SEQ ID NO: 1671468 - RNA, 19 nt, Artificial Sequence
  Description of Artificial Sequence: Synthetic oligonucleotide
ggggucacauaguucucau

SEQ ID NO: 1671469 - RNA, 19 nt, Artificial Sequence
  Description of Artificial Sequence: Synthetic oligonucleotide
ccaguccccucagugagga

SEQ ID NO: 1671470 - RNA, 19 nt, Artificial Sequence
  Description of Artificial Sequence: Synthetic oligonucleotide
cccuuuuggugugcgucac

SEQ ID NO: 1671471 - RNA, 19 nt, Artificial Sequence
  Description of Artificial Sequence: Synthetic oligonucleotide
gggcaccuccgccgcacgc

SEQ ID NO: 1671472 - RNA, 19 nt, Artificial Sequence
  Description of Artificial Sequence: Synthetic oligonucleotide
caggacgcagcaacagguu

SEQ ID NO: 1671473 - RNA, 19 nt, Artificial Sequence
  Description of Artificial Sequence: Synthetic oligonucleotide
ggucucggagaaccaggcu

SEQ ID NO: 1671474 - RNA, 19 nt, Artificial Sequence
  Description of Artificial Sequence: Synthetic oligonucleotide
gcccauacacucucgccau

SEQ ID NO: 1671475 - RNA, 19 nt, Artificial Sequence
  Description of Artificial Sequence: Synthetic oligonucleotide
cgcccuuuuggugugcguc

SEQ ID NO: 1671476 - RNA, 19 nt, Artificial Sequence
  Description of Artificial Sequence: Synthetic oligonucleotide
gucacgagggagggagccu

SEQ ID NO: 1671477 - RNA, 19 nt, Artificial Sequence
  Description of Artificial Sequence: Synthetic oligonucleotide
gguagcgcuccaggaguaa

SEQ ID NO: 1671478 - RNA, 19 nt, Artificial Sequence
  Description of Artificial Sequence: Synthetic oligonucleotide
cucggagaaccaggcugaa

SEQ ID NO: 1671479 - RNA, 19 nt, Artificial Sequence
  Description of Artificial Sequence: Synthetic oligonucleotide
cagcgcccuuuuggugugc

SEQ ID NO: 1671480 - RNA, 19 nt, Artificial Sequence
  Description of Artificial Sequence: Synthetic oligonucleotide
cagucccgauugcuguugu

SEQ ID NO: 1671481 - RNA, 19 nt, Artificial Sequence
  Description of Artificial Sequence: Synthetic oligonucleotide
ggauagccccuggaggccu

SEQ ID NO: 1671482 - RNA, 19 nt, Artificial Sequence
  Description of Artificial Sequence: Synthetic oligonucleotide
cacucgggguagcgcucca

SEQ ID NO: 1671483 - RNA, 19 nt, Artificial Sequence
  Description of Artificial Sequence: Synthetic oligonucleotide
gaaggggaccagcgcccuu

SEQ ID NO: 1671484 - RNA, 19 nt, Artificial Sequence
  Description of Artificial Sequence: Synthetic oligonucleotide
cgggucuuccacgucgauc

SEQ ID NO: 1671485 - RNA, 19 nt, Artificial Sequence
  Description of Artificial Sequence: Synthetic oligonucleotide
ccgcgccuccucuuugguc

SEQ ID NO: 1671486 - RNA, 19 nt, Artificial Sequence
  Description of Artificial Sequence: Synthetic oligonucleotide
cacggagcuccaccacagu

SEQ ID NO: 1671487 - RNA, 19 nt, Artificial Sequence
  Description of Artificial Sequence: Synthetic oligonucleotide
ggcugacuagagggagaca

SEQ ID NO: 1671488 - RNA, 19 nt, Artificial Sequence
  Description of Artificial Sequence: Synthetic oligonucleotide
ccagcucggcugugauauc

SEQ ID NO: 1671489 - RNA, 19 nt, Artificial Sequence
  Description of Artificial Sequence: Synthetic oligonucleotide
cucucgccauucucucgau

SEQ ID NO: 1671490 - RNA, 19 nt, Artificial Sequence
  Description of Artificial Sequence: Synthetic oligonucleotide
ccgcacucgggguagcgcu

SEQ ID NO: 1671491 - RNA, 19 nt, Artificial Sequence
  Description of Artificial Sequence: Synthetic oligonucleotide
ccauucucucgauccgagu

SEQ ID NO: 1671492 - RNA, 19 nt, Artificial Sequence
  Description of Artificial Sequence: Synthetic oligonucleotide
gcuuucuggcccagacacu

SEQ ID NO: 1671493 - RNA, 19 nt, Artificial Sequence
  Description of Artificial Sequence: Synthetic oligonucleotide
ggcgacccauugaguaucu

SEQ ID NO: 1671494 - RNA, 19 nt, Artificial Sequence
  Description of Artificial Sequence: Synthetic oligonucleotide
gcacgaagccuagaaccuu

SEQ ID NO: 1671495 - RNA, 19 nt, Artificial Sequence
  Description of Artificial Sequence: Synthetic oligonucleotide
ccacgucgaucacauacuu

SEQ ID NO: 1671496 - RNA, 19 nt, Artificial Sequence
  Description of Artificial Sequence: Synthetic oligonucleotide
ccaccacagucaagauaaa

SEQ ID NO: 1671497 - RNA, 19 nt, Artificial Sequence
  Description of Artificial Sequence: Synthetic oligonucleotide
cgccauucucucgauccga

SEQ ID NO: 1671498 - RNA, 19 nt, Artificial Sequence
  Description of Artificial Sequence: Synthetic oligonucleotide
gccgcgccuccucuuuggu

SEQ ID NO: 1671499 - RNA, 19 nt, Artificial Sequence
  Description of Artificial Sequence: Synthetic oligonucleotide
cacuggucccugggagccu

SEQ ID NO: 1671500 - RNA, 19 nt, Artificial Sequence
  Description of Artificial Sequence: Synthetic oligonucleotide
ccucucgcuucaccuugua

SEQ ID NO: 1671501 - RNA, 19 nt, Artificial Sequence
  Description of Artificial Sequence: Synthetic oligonucleotide
ccgcacgccgcgccuccuc

SEQ ID NO: 1671502 - RNA, 19 nt, Artificial Sequence
  Description of Artificial Sequence: Synthetic oligonucleotide
ggagcuucacgggcuucuu

SEQ ID NO: 1671503 - RNA, 19 nt, Artificial Sequence
  Description of Artificial Sequence: Synthetic oligonucleotide
cgccgcacgccgcgccucc

SEQ ID NO: 1671504 - RNA, 19 nt, Artificial Sequence
  Description of Artificial Sequence: Synthetic oligonucleotide
gcgcccuuuuggugugcgu

SEQ ID NO: 1671505 - RNA, 19 nt, Artificial Sequence
  Description of Artificial Sequence: Synthetic oligonucleotide
cccauacacucucgccauu

SEQ ID NO: 1671506 - RNA, 19 nt, Artificial Sequence
  Description of Artificial Sequence: Synthetic oligonucleotide
cgcacgccgcgccuccucu

SEQ ID NO: 1671507 - RNA, 19 nt, Artificial Sequence
  Description of Artificial Sequence: Synthetic oligonucleotide
gccgcacgccgcgccuccu

SEQ ID NO: 1671508 - RNA, 19 nt, Artificial Sequence
  Description of Artificial Sequence: Synthetic oligonucleotide
uaaacuagagauauaaacg

SEQ ID NO: 1671509 - RNA, 19 nt, Artificial Sequence
  Description of Artificial Sequence: Synthetic oligonucleotide
uauaccauauuccaaagag

SEQ ID NO: 1671510 - RNA, 19 nt, Artificial Sequence
  Description of Artificial Sequence: Synthetic oligonucleotide
aauagguuaagccugcguc

SEQ ID NO: 1671511 - RNA, 19 nt, Artificial Sequence
  Description of Artificial Sequence: Synthetic oligonucleotide
aaaacauacauguuggcug

SEQ ID NO: 1671512 - RNA, 19 nt, Artificial Sequence
  Description of Artificial Sequence: Synthetic oligonucleotide
aauuggaaauaacaccugc

SEQ ID NO: 1671513 - RNA, 19 nt, Artificial Sequence
  Description of Artificial Sequence: Synthetic oligonucleotide
aaccagucagcuuuuaugc

SEQ ID NO: 1671514 - RNA, 19 nt, Artificial Sequence
  Description of Artificial Sequence: Synthetic oligonucleotide
aucaaaauaacucuggacu

SEQ ID NO: 1671515 - RNA, 19 nt, Artificial Sequence
  Description of Artificial Sequence: Synthetic oligonucleotide
aaacauacauguuggcugc

SEQ ID NO: 1671516 - RNA, 19 nt, Artificial Sequence
  Description of Artificial Sequence: Synthetic oligonucleotide
auaaaagacuguuucuucc

SEQ ID NO: 1671517 - RNA, 19 nt, Artificial Sequence
  Description of Artificial Sequence: Synthetic oligonucleotide
aauacgagaguauuugcag

SEQ ID NO: 1671518 - RNA, 19 nt, Artificial Sequence
  Description of Artificial Sequence: Synthetic oligonucleotide
aaaauuggaaauaacaccu

SEQ ID NO: 1671519 - RNA, 19 nt, Artificial Sequence
  Description of Artificial Sequence: Synthetic oligonucleotide
uaccauauuccaaagagag

SEQ ID NO: 1671520 - RNA, 19 nt, Artificial Sequence
  Description of Artificial Sequence: Synthetic oligonucleotide
gauauaaacguuuauuuca

SEQ ID NO: 1671521 - RNA, 19 nt, Artificial Sequence
  Description of Artificial Sequence: Synthetic oligonucleotide
ugaagaaauagguuaagcc

SEQ ID NO: 1671522 - RNA, 19 nt, Artificial Sequence
  Description of Artificial Sequence: Synthetic oligonucleotide
aauaucucaucaugguucg

SEQ ID NO: 1671523 - RNA, 19 nt, Artificial Sequence
  Description of Artificial Sequence: Synthetic oligonucleotide
guauccauagcaaugaugg

SEQ ID NO: 1671524 - RNA, 19 nt, Artificial Sequence
  Description of Artificial Sequence: Synthetic oligonucleotide
auuaguccuuauuucaugc

SEQ ID NO: 1671525 - RNA, 19 nt, Artificial Sequence
  Description of Artificial Sequence: Synthetic oligonucleotide
uucacuuagagccaccucc

SEQ ID NO: 1671526 - RNA, 19 nt, Artificial Sequence
  Description of Artificial Sequence: Synthetic oligonucleotide
uaagugauauaccauauuc

SEQ ID NO: 1671527 - RNA, 19 nt, Artificial Sequence
  Description of Artificial Sequence: Synthetic oligonucleotide
uuaaucuccuuucugaggu

SEQ ID NO: 1671528 - RNA, 19 nt, Artificial Sequence
  Description of Artificial Sequence: Synthetic oligonucleotide
uuuacuaaacuagagauau

SEQ ID NO: 1671529 - RNA, 19 nt, Artificial Sequence
  Description of Artificial Sequence: Synthetic oligonucleotide
aagugauauaccauauucc

SEQ ID NO: 1671530 - RNA, 19 nt, Artificial Sequence
  Description of Artificial Sequence: Synthetic oligonucleotide
aaauaacaccugcagacag

SEQ ID NO: 1671531 - RNA, 19 nt, Artificial Sequence
  Description of Artificial Sequence: Synthetic oligonucleotide
acggauaaaagacuguuuc

SEQ ID NO: 1671532 - RNA, 19 nt, Artificial Sequence
  Description of Artificial Sequence: Synthetic oligonucleotide
ugaucuucgagguucaacc

SEQ ID NO: 1671533 - RNA, 19 nt, Artificial Sequence
  Description of Artificial Sequence: Synthetic oligonucleotide
cacaaaacauacauguugg

SEQ ID NO: 1671534 - RNA, 19 nt, Artificial Sequence
  Description of Artificial Sequence: Synthetic oligonucleotide
auagguuaagccugcgucc

SEQ ID NO: 1671535 - RNA, 19 nt, Artificial Sequence
  Description of Artificial Sequence: Synthetic oligonucleotide
aaccuuugaagcuggauug

SEQ ID NO: 1671536 - RNA, 19 nt, Artificial Sequence
  Description of Artificial Sequence: Synthetic oligonucleotide
agugauauaccauauucca

SEQ ID NO: 1671537 - RNA, 19 nt, Artificial Sequence
  Description of Artificial Sequence: Synthetic oligonucleotide
ugauauaccauauuccaaa

SEQ ID NO: 1671538 - RNA, 19 nt, Artificial Sequence
  Description of Artificial Sequence: Synthetic oligonucleotide
uauuucacaacucugccau

SEQ ID NO: 1671539 - RNA, 19 nt, Artificial Sequence
  Description of Artificial Sequence: Synthetic oligonucleotide
agaauacgagaguauuugc

SEQ ID NO: 1671540 - RNA, 19 nt, Artificial Sequence
  Description of Artificial Sequence: Synthetic oligonucleotide
guucguauaggguagggag

SEQ ID NO: 1671541 - RNA, 19 nt, Artificial Sequence
  Description of Artificial Sequence: Synthetic oligonucleotide
auacgagaguauuugcagc

SEQ ID NO: 1671542 - RNA, 19 nt, Artificial Sequence
  Description of Artificial Sequence: Synthetic oligonucleotide
agauguaccagacuggcca

SEQ ID NO: 1671543 - RNA, 19 nt, Artificial Sequence
  Description of Artificial Sequence: Synthetic oligonucleotide
uaugcuauccaaccaguca

SEQ ID NO: 1671544 - RNA, 19 nt, Artificial Sequence
  Description of Artificial Sequence: Synthetic oligonucleotide
aucaugguucgauucagcg

SEQ ID NO: 1671545 - RNA, 19 nt, Artificial Sequence
  Description of Artificial Sequence: Synthetic oligonucleotide
uucacgagaguucguauag

SEQ ID NO: 1671546 - RNA, 19 nt, Artificial Sequence
  Description of Artificial Sequence: Synthetic oligonucleotide
aauaacucuggacucuaga

SEQ ID NO: 1671547 - RNA, 19 nt, Artificial Sequence
  Description of Artificial Sequence: Synthetic oligonucleotide
ggaaauaacaccugcagac

SEQ ID NO: 1671548 - RNA, 19 nt, Artificial Sequence
  Description of Artificial Sequence: Synthetic oligonucleotide
auauuccaaagagagcucc

SEQ ID NO: 1671549 - RNA, 19 nt, Artificial Sequence
  Description of Artificial Sequence: Synthetic oligonucleotide
caugguucgauucagcgac

SEQ ID NO: 1671550 - RNA, 19 nt, Artificial Sequence
  Description of Artificial Sequence: Synthetic oligonucleotide
uggacucuagauuucagug

SEQ ID NO: 1671551 - RNA, 19 nt, Artificial Sequence
  Description of Artificial Sequence: Synthetic oligonucleotide
acaaaacauacauguuggc

SEQ ID NO: 1671552 - RNA, 19 nt, Artificial Sequence
  Description of Artificial Sequence: Synthetic oligonucleotide
gagcagauguaccagacug

SEQ ID NO: 1671553 - RNA, 19 nt, Artificial Sequence
  Description of Artificial Sequence: Synthetic oligonucleotide
gauauaccauauuccaaag

SEQ ID NO: 1671554 - RNA, 19 nt, Artificial Sequence
  Description of Artificial Sequence: Synthetic oligonucleotide
agaauguucacgaugcuag

SEQ ID NO: 1671555 - RNA, 19 nt, Artificial Sequence
  Description of Artificial Sequence: Synthetic oligonucleotide
uacuaaacuagagauauaa

SEQ ID NO: 1671556 - RNA, 19 nt, Artificial Sequence
  Description of Artificial Sequence: Synthetic oligonucleotide
uguacugggaacauuuaaa

SEQ ID NO: 1671557 - RNA, 19 nt, Artificial Sequence
  Description of Artificial Sequence: Synthetic oligonucleotide
auauaaacguuuauuucac

SEQ ID NO: 1671558 - RNA, 19 nt, Artificial Sequence
  Description of Artificial Sequence: Synthetic oligonucleotide
uguauccauagcaaugaug

SEQ ID NO: 1671559 - RNA, 19 nt, Artificial Sequence
  Description of Artificial Sequence: Synthetic oligonucleotide
auguucacgaugcuagagg

SEQ ID NO: 1671560 - RNA, 19 nt, Artificial Sequence
  Description of Artificial Sequence: Synthetic oligonucleotide
ugaaggugaagaccgggag

SEQ ID NO: 1671561 - RNA, 19 nt, Artificial Sequence
  Description of Artificial Sequence: Synthetic oligonucleotide
gaccauaagugauauacca

SEQ ID NO: 1671562 - RNA, 19 nt, Artificial Sequence
  Description of Artificial Sequence: Synthetic oligonucleotide
guuaaucuccuuucugagg

SEQ ID NO: 1671563 - RNA, 19 nt, Artificial Sequence
  Description of Artificial Sequence: Synthetic oligonucleotide
ugccaaauuuucacuagag

SEQ ID NO: 1671564 - RNA, 19 nt, Artificial Sequence
  Description of Artificial Sequence: Synthetic oligonucleotide
cauaggcagaauacgagag

SEQ ID NO: 1671565 - RNA, 19 nt, Artificial Sequence
  Description of Artificial Sequence: Synthetic oligonucleotide
uggcuuuuaaggcauugcc

SEQ ID NO: 1671566 - RNA, 19 nt, Artificial Sequence
  Description of Artificial Sequence: Synthetic oligonucleotide
gaucaucccagcuguaucc

SEQ ID NO: 1671567 - RNA, 19 nt, Artificial Sequence
  Description of Artificial Sequence: Synthetic oligonucleotide
acaaagaaccuuugaagcu

SEQ ID NO: 1671568 - RNA, 19 nt, Artificial Sequence
  Description of Artificial Sequence: Synthetic oligonucleotide
gacucuagauuucagugac

SEQ ID NO: 1671569 - RNA, 19 nt, Artificial Sequence
  Description of Artificial Sequence: Synthetic oligonucleotide
agugaagguccauaucuuc

SEQ ID NO: 1671570 - RNA, 19 nt, Artificial Sequence
  Description of Artificial Sequence: Synthetic oligonucleotide
uuugcagcuaugauaccug

SEQ ID NO: 1671571 - RNA, 19 nt, Artificial Sequence
  Description of Artificial Sequence: Synthetic oligonucleotide
aacccaauagugaagaaaa

SEQ ID NO: 1671572 - RNA, 19 nt, Artificial Sequence
  Description of Artificial Sequence: Synthetic oligonucleotide
uagggagacggauaaaaga

SEQ ID NO: 1671573 - RNA, 19 nt, Artificial Sequence
  Description of Artificial Sequence: Synthetic oligonucleotide
aauguucacgaugcuagag

SEQ ID NO: 1671574 - RNA, 19 nt, Artificial Sequence
  Description of Artificial Sequence: Synthetic oligonucleotide
uguucacgaugcuagagga

SEQ ID NO: 1671575 - RNA, 19 nt, Artificial Sequence
  Description of Artificial Sequence: Synthetic oligonucleotide
aauaacaccugcagacagg

SEQ ID NO: 1671576 - RNA, 19 nt, Artificial Sequence
  Description of Artificial Sequence: Synthetic oligonucleotide
agcuccacaaaacauacau

SEQ ID NO: 1671577 - RNA, 19 nt, Artificial Sequence
  Description of Artificial Sequence: Synthetic oligonucleotide
uccugaugcaccaagugaa

SEQ ID NO: 1671578 - RNA, 19 nt, Artificial Sequence
  Description of Artificial Sequence: Synthetic oligonucleotide
aaauagguuaagccugcgu

SEQ ID NO: 1671579 - RNA, 19 nt, Artificial Sequence
  Description of Artificial Sequence: Synthetic oligonucleotide
ucccuguucuuccaaauga

SEQ ID NO: 1671580 - RNA, 19 nt, Artificial Sequence
  Description of Artificial Sequence: Synthetic oligonucleotide
ugacugaacguugacagca

SEQ ID NO: 1671581 - RNA, 19 nt, Artificial Sequence
  Description of Artificial Sequence: Synthetic oligonucleotide
aaagaaccuuugaagcugg

SEQ ID NO: 1671582 - RNA, 19 nt, Artificial Sequence
  Description of Artificial Sequence: Synthetic oligonucleotide
agaaauagguuaagccugc

SEQ ID NO: 1671583 - RNA, 19 nt, Artificial Sequence
  Description of Artificial Sequence: Synthetic oligonucleotide
uuccagacagcaaggagca

SEQ ID NO: 1671584 - RNA, 19 nt, Artificial Sequence
  Description of Artificial Sequence: Synthetic oligonucleotide
ugaccauaagugauauacc

SEQ ID NO: 1671585 - RNA, 19 nt, Artificial Sequence
  Description of Artificial Sequence: Synthetic oligonucleotide
cacgagaguucguauaggg

SEQ ID NO: 1671586 - RNA, 19 nt, Artificial Sequence
  Description of Artificial Sequence: Synthetic oligonucleotide
ucagugacucauauugcca

SEQ ID NO: 1671587 - RNA, 19 nt, Artificial Sequence
  Description of Artificial Sequence: Synthetic oligonucleotide
uuuaugccaucaaaauaac

SEQ ID NO: 1671588 - RNA, 19 nt, Artificial Sequence
  Description of Artificial Sequence: Synthetic oligonucleotide
guauaggguagggagacgg

SEQ ID NO: 1671589 - RNA, 19 nt, Artificial Sequence
  Description of Artificial Sequence: Synthetic oligonucleotide
guccauaucuuccuguggc

SEQ ID NO: 1671590 - RNA, 19 nt, Artificial Sequence
  Description of Artificial Sequence: Synthetic oligonucleotide
accagucagcuuuuaugcc

SEQ ID NO: 1671591 - RNA, 19 nt, Artificial Sequence
  Description of Artificial Sequence: Synthetic oligonucleotide
ugaugcaccaagugaaggu

SEQ ID NO: 1671592 - RNA, 19 nt, Artificial Sequence
  Description of Artificial Sequence: Synthetic oligonucleotide
caaccagucagcuuuuaug

SEQ ID NO: 1671593 - RNA, 19 nt, Artificial Sequence
  Description of Artificial Sequence: Synthetic oligonucleotide
acacauaacugacaaaauu

SEQ ID NO: 1671594 - RNA, 19 nt, Artificial Sequence
  Description of Artificial Sequence: Synthetic oligonucleotide
gauuggauguaaaauaucu

SEQ ID NO: 1671595 - RNA, 19 nt, Artificial Sequence
  Description of Artificial Sequence: Synthetic oligonucleotide
ugccauaauuugcuaagga

SEQ ID NO: 1671596 - RNA, 19 nt, Artificial Sequence
  Description of Artificial Sequence: Synthetic oligonucleotide
acuuaggcuauuccaccac

SEQ ID NO: 1671597 - RNA, 19 nt, Artificial Sequence
  Description of Artificial Sequence: Synthetic oligonucleotide
ucacuuaggcuauuccacc

SEQ ID NO: 1671598 - RNA, 19 nt, Artificial Sequence
  Description of Artificial Sequence: Synthetic oligonucleotide
agagccaccuccuuucuug

SEQ ID NO: 1671599 - RNA, 19 nt, Artificial Sequence
  Description of Artificial Sequence: Synthetic oligonucleotide
auagcagcugauccaaaug

SEQ ID NO: 1671600 - RNA, 19 nt, Artificial Sequence
  Description of Artificial Sequence: Synthetic oligonucleotide
agagauauaaacguuuauu

SEQ ID NO: 1671601 - RNA, 19 nt, Artificial Sequence
  Description of Artificial Sequence: Synthetic oligonucleotide
cagaauacgagaguauuug

SEQ ID NO: 1671602 - RNA, 19 nt, Artificial Sequence
  Description of Artificial Sequence: Synthetic oligonucleotide
uauuccaaagagagcuccc

SEQ ID NO: 1671603 - RNA, 19 nt, Artificial Sequence
  Description of Artificial Sequence: Synthetic oligonucleotide
uuuuguggccguaugcuau

SEQ ID NO: 1671604 - RNA, 19 nt, Artificial Sequence
  Description of Artificial Sequence: Synthetic oligonucleotide
uucguauaggguagggaga

SEQ ID NO: 1671605 - RNA, 19 nt, Artificial Sequence
  Description of Artificial Sequence: Synthetic oligonucleotide
auugccagauagcagcuga

SEQ ID NO: 1671606 - RNA, 19 nt, Artificial Sequence
  Description of Artificial Sequence: Synthetic oligonucleotide
uuaagccugcguccgagca

SEQ ID NO: 1671607 - RNA, 19 nt, Artificial Sequence
  Description of Artificial Sequence: Synthetic oligonucleotide
ucuucgagguucaaccuuc

SEQ ID NO: 1671608 - RNA, 19 nt, Artificial Sequence
  Description of Artificial Sequence: Synthetic oligonucleotide
uguaugcuucaccacuuga

SEQ ID NO: 1671609 - RNA, 19 nt, Artificial Sequence
  Description of Artificial Sequence: Synthetic oligonucleotide
aaauuggaaauaacaccug

SEQ ID NO: 1671610 - RNA, 19 nt, Artificial Sequence
  Description of Artificial Sequence: Synthetic oligonucleotide
uucaugaccauaagugaua

SEQ ID NO: 1671611 - RNA, 19 nt, Artificial Sequence
  Description of Artificial Sequence: Synthetic oligonucleotide
ucaugguucgauucagcga

SEQ ID NO: 1671612 - RNA, 19 nt, Artificial Sequence
  Description of Artificial Sequence: Synthetic oligonucleotide
uucgauucagcgacggcac

SEQ ID NO: 1671613 - RNA, 19 nt, Artificial Sequence
  Description of Artificial Sequence: Synthetic oligonucleotide
cauuaguccuuauuucaug

SEQ ID NO: 1671614 - RNA, 19 nt, Artificial Sequence
  Description of Artificial Sequence: Synthetic oligonucleotide
cagugacucauauugccag

SEQ ID NO: 1671615 - RNA, 19 nt, Artificial Sequence
  Description of Artificial Sequence: Synthetic oligonucleotide
auauaccauauuccaaaga

SEQ ID NO: 1671616 - RNA, 19 nt, Artificial Sequence
  Description of Artificial Sequence: Synthetic oligonucleotide
uccuuuuguggccguaugc

SEQ ID NO: 1671617 - RNA, 19 nt, Artificial Sequence
  Description of Artificial Sequence: Synthetic oligonucleotide
uagguuaagccugcguccg

SEQ ID NO: 1671618 - RNA, 19 nt, Artificial Sequence
  Description of Artificial Sequence: Synthetic oligonucleotide
gaauacgagaguauuugca

SEQ ID NO: 1671619 - RNA, 19 nt, Artificial Sequence
  Description of Artificial Sequence: Synthetic oligonucleotide
ccuucugggaucuuggugc

SEQ ID NO: 1671620 - RNA, 19 nt, Artificial Sequence
  Description of Artificial Sequence: Synthetic oligonucleotide
acgaugcuagaggaaaagc

SEQ ID NO: 1671621 - RNA, 19 nt, Artificial Sequence
  Description of Artificial Sequence: Synthetic oligonucleotide
gccauaauuugcuaaggag

SEQ ID NO: 1671622 - RNA, 19 nt, Artificial Sequence
  Description of Artificial Sequence: Synthetic oligonucleotide
gaugcggagucuuccagac

SEQ ID NO: 1671623 - RNA, 19 nt, Artificial Sequence
  Description of Artificial Sequence: Synthetic oligonucleotide
uaggcuauuccaccacuug

SEQ ID NO: 1671624 - RNA, 19 nt, Artificial Sequence
  Description of Artificial Sequence: Synthetic oligonucleotide
uacacggccacaaacuguu

SEQ ID NO: 1671625 - RNA, 19 nt, Artificial Sequence
  Description of Artificial Sequence: Synthetic oligonucleotide
aacauacauguuggcugcc

SEQ ID NO: 1671626 - RNA, 19 nt, Artificial Sequence
  Description of Artificial Sequence: Synthetic oligonucleotide
ugugcccaaccucgcaacg

SEQ ID NO: 1671627 - RNA, 19 nt, Artificial Sequence
  Description of Artificial Sequence: Synthetic oligonucleotide
ucuagauuucagugacuca

SEQ ID NO: 1671628 - RNA, 19 nt, Artificial Sequence
  Description of Artificial Sequence: Synthetic oligonucleotide
gcuaugauaccugucacag

SEQ ID NO: 1671629 - RNA, 19 nt, Artificial Sequence
  Description of Artificial Sequence: Synthetic oligonucleotide
ugauccaaaugcacagccu

SEQ ID NO: 1671630 - RNA, 19 nt, Artificial Sequence
  Description of Artificial Sequence: Synthetic oligonucleotide
agaguauuugcagcuauga

SEQ ID NO: 1671631 - RNA, 19 nt, Artificial Sequence
  Description of Artificial Sequence: Synthetic oligonucleotide
agggcuucacgagaguucg

SEQ ID NO: 1671632 - RNA, 19 nt, Artificial Sequence
  Description of Artificial Sequence: Synthetic oligonucleotide
cucuagauuucagugacuc

SEQ ID NO: 1671633 - RNA, 19 nt, Artificial Sequence
  Description of Artificial Sequence: Synthetic oligonucleotide
cucauauugccagauagca

SEQ ID NO: 1671634 - RNA, 19 nt, Artificial Sequence
  Description of Artificial Sequence: Synthetic oligonucleotide
gcuaaggagacauguacug

SEQ ID NO: 1671635 - RNA, 19 nt, Artificial Sequence
  Description of Artificial Sequence: Synthetic oligonucleotide
caagugaagguccauaucu

SEQ ID NO: 1671636 - RNA, 19 nt, Artificial Sequence
  Description of Artificial Sequence: Synthetic oligonucleotide
caucacuuaggcuauucca

SEQ ID NO: 1671637 - RNA, 19 nt, Artificial Sequence
  Description of Artificial Sequence: Synthetic oligonucleotide
agauuucagugacucauau

SEQ ID NO: 1671638 - RNA, 19 nt, Artificial Sequence
  Description of Artificial Sequence: Synthetic oligonucleotide
gaaauaacaccugcagaca

SEQ ID NO: 1671639 - RNA, 19 nt, Artificial Sequence
  Description of Artificial Sequence: Synthetic oligonucleotide
aagaauguucacgaugcua

SEQ ID NO: 1671640 - RNA, 19 nt, Artificial Sequence
  Description of Artificial Sequence: Synthetic oligonucleotide
ucgagguucaaccuuccuu

SEQ ID NO: 1671641 - RNA, 19 nt, Artificial Sequence
  Description of Artificial Sequence: Synthetic oligonucleotide
auaggcagaauacgagagu

SEQ ID NO: 1671642 - RNA, 19 nt, Artificial Sequence
  Description of Artificial Sequence: Synthetic oligonucleotide
gagacauguacugggaaca

SEQ ID NO: 1671643 - RNA, 19 nt, Artificial Sequence
  Description of Artificial Sequence: Synthetic oligonucleotide
uauccauagcaaugauggc

SEQ ID NO: 1671644 - RNA, 19 nt, Artificial Sequence
  Description of Artificial Sequence: Synthetic oligonucleotide
auaacaccugcagacaggu

SEQ ID NO: 1671645 - RNA, 19 nt, Artificial Sequence
  Description of Artificial Sequence: Synthetic oligonucleotide
ucugaggucuccuuccuuu

SEQ ID NO: 1671646 - RNA, 19 nt, Artificial Sequence
  Description of Artificial Sequence: Synthetic oligonucleotide
ucguauaggguagggagac

SEQ ID NO: 1671647 - RNA, 19 nt, Artificial Sequence
  Description of Artificial Sequence: Synthetic oligonucleotide
gguucaaccuuccuuggug

SEQ ID NO: 1671648 - RNA, 19 nt, Artificial Sequence
  Description of Artificial Sequence: Synthetic oligonucleotide
uggaugcggagucuuccag

SEQ ID NO: 1671649 - RNA, 19 nt, Artificial Sequence
  Description of Artificial Sequence: Synthetic oligonucleotide
accaagugaagguccauau

SEQ ID NO: 1671650 - RNA, 19 nt, Artificial Sequence
  Description of Artificial Sequence: Synthetic oligonucleotide
gaaauagguuaagccugcg

SEQ ID NO: 1671651 - RNA, 19 nt, Artificial Sequence
  Description of Artificial Sequence: Synthetic oligonucleotide
gagagcuccgggcagccgc

SEQ ID NO: 1671652 - RNA, 19 nt, Artificial Sequence
  Description of Artificial Sequence: Synthetic oligonucleotide
uucagcgacggcacccucc

SEQ ID NO: 1671653 - RNA, 19 nt, Artificial Sequence
  Description of Artificial Sequence: Synthetic oligonucleotide
augccaaauuuucacuaga

SEQ ID NO: 1671654 - RNA, 19 nt, Artificial Sequence
  Description of Artificial Sequence: Synthetic oligonucleotide
gaagguccauaucuuccug

SEQ ID NO: 1671655 - RNA, 19 nt, Artificial Sequence
  Description of Artificial Sequence: Synthetic oligonucleotide
uuggagaacaaagaaccuu

SEQ ID NO: 1671656 - RNA, 19 nt, Artificial Sequence
  Description of Artificial Sequence: Synthetic oligonucleotide
auguacugggaacauuuaa

SEQ ID NO: 1671657 - RNA, 19 nt, Artificial Sequence
  Description of Artificial Sequence: Synthetic oligonucleotide
guucgauucagcgacggca

SEQ ID NO: 1671658 - RNA, 19 nt, Artificial Sequence
  Description of Artificial Sequence: Synthetic oligonucleotide
aaaugaguucaugaccaua

SEQ ID NO: 1671659 - RNA, 19 nt, Artificial Sequence
  Description of Artificial Sequence: Synthetic oligonucleotide
uuucugaggucuccuuccu

SEQ ID NO: 1671660 - RNA, 19 nt, Artificial Sequence
  Description of Artificial Sequence: Synthetic oligonucleotide
agcuguauccauagcaaug

SEQ ID NO: 1671661 - RNA, 19 nt, Artificial Sequence
  Description of Artificial Sequence: Synthetic oligonucleotide
ucacgagaguucguauagg

SEQ ID NO: 1671662 - RNA, 19 nt, Artificial Sequence
  Description of Artificial Sequence: Synthetic oligonucleotide
guaugcuucaccacuugac

SEQ ID NO: 1671663 - RNA, 19 nt, Artificial Sequence
  Description of Artificial Sequence: Synthetic oligonucleotide
guagggagacggauaaaag

SEQ ID NO: 1671664 - RNA, 19 nt, Artificial Sequence
  Description of Artificial Sequence: Synthetic oligonucleotide
gaacccaauagugaagaaa

SEQ ID NO: 1671665 - RNA, 19 nt, Artificial Sequence
  Description of Artificial Sequence: Synthetic oligonucleotide
uuaggcuauuccaccacuu

SEQ ID NO: 1671666 - RNA, 19 nt, Artificial Sequence
  Description of Artificial Sequence: Synthetic oligonucleotide
ugguucgauucagcgacgg

SEQ ID NO: 1671667 - RNA, 19 nt, Artificial Sequence
  Description of Artificial Sequence: Synthetic oligonucleotide
ucaugaccauaagugauau

SEQ ID NO: 1671668 - RNA, 19 nt, Artificial Sequence
  Description of Artificial Sequence: Synthetic oligonucleotide
agcagauguaccagacugg

SEQ ID NO: 1671669 - RNA, 19 nt, Artificial Sequence
  Description of Artificial Sequence: Synthetic oligonucleotide
ggagacggauaaaagacug

SEQ ID NO: 1671670 - RNA, 19 nt, Artificial Sequence
  Description of Artificial Sequence: Synthetic oligonucleotide
auaccauauuccaaagaga

SEQ ID NO: 1671671 - RNA, 19 nt, Artificial Sequence
  Description of Artificial Sequence: Synthetic oligonucleotide
cuccauaggcagaauacga

SEQ ID NO: 1671672 - RNA, 19 nt, Artificial Sequence
  Description of Artificial Sequence: Synthetic oligonucleotide
cugugaacccaauagugaa

SEQ ID NO: 1671673 - RNA, 19 nt, Artificial Sequence
  Description of Artificial Sequence: Synthetic oligonucleotide
gagaguauuugcagcuaug

SEQ ID NO: 1671674 - RNA, 19 nt, Artificial Sequence
  Description of Artificial Sequence: Synthetic oligonucleotide
gugaacccaauagugaaga

SEQ ID NO: 1671675 - RNA, 19 nt, Artificial Sequence
  Description of Artificial Sequence: Synthetic oligonucleotide
cuagaggaaaagcuccaca

SEQ ID NO: 1671676 - RNA, 19 nt, Artificial Sequence
  Description of Artificial Sequence: Synthetic oligonucleotide
acguugacagcaacauugg

SEQ ID NO: 1671677 - RNA, 19 nt, Artificial Sequence
  Description of Artificial Sequence: Synthetic oligonucleotide
uucaaccuuccuuggugcu

SEQ ID NO: 1671678 - RNA, 19 nt, Artificial Sequence
  Description of Artificial Sequence: Synthetic oligonucleotide
gguacacggccacaaacug

SEQ ID NO: 1671679 - RNA, 19 nt, Artificial Sequence
  Description of Artificial Sequence: Synthetic oligonucleotide
uuacuaaacuagagauaua

SEQ ID NO: 1671680 - RNA, 19 nt, Artificial Sequence
  Description of Artificial Sequence: Synthetic oligonucleotide
gaguucguauaggguaggg

SEQ ID NO: 1671681 - RNA, 19 nt, Artificial Sequence
  Description of Artificial Sequence: Synthetic oligonucleotide
uuuguggccguaugcuauc

SEQ ID NO: 1671682 - RNA, 19 nt, Artificial Sequence
  Description of Artificial Sequence: Synthetic oligonucleotide
cacgaugcuagaggaaaag

SEQ ID NO: 1671683 - RNA, 19 nt, Artificial Sequence
  Description of Artificial Sequence: Synthetic oligonucleotide
cagauguaccagacuggcc

SEQ ID NO: 1671684 - RNA, 19 nt, Artificial Sequence
  Description of Artificial Sequence: Synthetic oligonucleotide
agacggauaaaagacuguu

SEQ ID NO: 1671685 - RNA, 19 nt, Artificial Sequence
  Description of Artificial Sequence: Synthetic oligonucleotide
uggccguaugcuauccaac

SEQ ID NO: 1671686 - RNA, 19 nt, Artificial Sequence
  Description of Artificial Sequence: Synthetic oligonucleotide
ugcagcuaugauaccuguc

SEQ ID NO: 1671687 - RNA, 19 nt, Artificial Sequence
  Description of Artificial Sequence: Synthetic oligonucleotide
augauggcgagucucccuu

SEQ ID NO: 1671688 - RNA, 19 nt, Artificial Sequence
  Description of Artificial Sequence: Synthetic oligonucleotide
uugcagcuaugauaccugu

SEQ ID NO: 1671689 - RNA, 19 nt, Artificial Sequence
  Description of Artificial Sequence: Synthetic oligonucleotide
aguucguauaggguaggga

SEQ ID NO: 1671690 - RNA, 19 nt, Artificial Sequence
  Description of Artificial Sequence: Synthetic oligonucleotide
ggccguaugcuauccaacc

SEQ ID NO: 1671691 - RNA, 19 nt, Artificial Sequence
  Description of Artificial Sequence: Synthetic oligonucleotide
aucuucgagguucaaccuu

SEQ ID NO: 1671692 - RNA, 19 nt, Artificial Sequence
  Description of Artificial Sequence: Synthetic oligonucleotide
ucaccacuugacccugugu

SEQ ID NO: 1671693 - RNA, 19 nt, Artificial Sequence
  Description of Artificial Sequence: Synthetic oligonucleotide
cuagauuucagugacucau

SEQ ID NO: 1671694 - RNA, 19 nt, Artificial Sequence
  Description of Artificial Sequence: Synthetic oligonucleotide
ugaacccaauagugaagaa

SEQ ID NO: 1671695 - RNA, 19 nt, Artificial Sequence
  Description of Artificial Sequence: Synthetic oligonucleotide
cuucgagguucaaccuucc

SEQ ID NO: 1671696 - RNA, 19 nt, Artificial Sequence
  Description of Artificial Sequence: Synthetic oligonucleotide
ucgauucagcgacggcacc

SEQ ID NO: 1671697 - RNA, 19 nt, Artificial Sequence
  Description of Artificial Sequence: Synthetic oligonucleotide
uucgagguucaaccuuccu

SEQ ID NO: 1671698 - RNA, 19 nt, Artificial Sequence
  Description of Artificial Sequence: Synthetic oligonucleotide
acuaaacuagagauauaaa

SEQ ID NO: 1671699 - RNA, 19 nt, Artificial Sequence
  Description of Artificial Sequence: Synthetic oligonucleotide
cagcuaugauaccugucac

SEQ ID NO: 1671700 - RNA, 19 nt, Artificial Sequence
  Description of Artificial Sequence: Synthetic oligonucleotide
uccuuauuucaugccaaau

SEQ ID NO: 1671701 - RNA, 19 nt, Artificial Sequence
  Description of Artificial Sequence: Synthetic oligonucleotide
gacccugugucugaucuuc

SEQ ID NO: 1671702 - RNA, 19 nt, Artificial Sequence
  Description of Artificial Sequence: Synthetic oligonucleotide
guuaagccugcguccgagc

SEQ ID NO: 1671703 - RNA, 19 nt, Artificial Sequence
  Description of Artificial Sequence: Synthetic oligonucleotide
ggacucuagauuucaguga

SEQ ID NO: 1671704 - RNA, 19 nt, Artificial Sequence
  Description of Artificial Sequence: Synthetic oligonucleotide
agcacuucucuuguaugcu

SEQ ID NO: 1671705 - RNA, 19 nt, Artificial Sequence
  Description of Artificial Sequence: Synthetic oligonucleotide
accauaagugauauaccau

SEQ ID NO: 1671706 - RNA, 19 nt, Artificial Sequence
  Description of Artificial Sequence: Synthetic oligonucleotide
cauaagugauauaccauau

SEQ ID NO: 1671707 - RNA, 19 nt, Artificial Sequence
  Description of Artificial Sequence: Synthetic oligonucleotide
aucucaucaugguucgauu

SEQ ID NO: 1671708 - RNA, 19 nt, Artificial Sequence
  Description of Artificial Sequence: Synthetic oligonucleotide
caaccucugccccaccaug

SEQ ID NO: 1671709 - RNA, 19 nt, Artificial Sequence
  Description of Artificial Sequence: Synthetic oligonucleotide
cacuuaggcuauuccacca

SEQ ID NO: 1671710 - RNA, 19 nt, Artificial Sequence
  Description of Artificial Sequence: Synthetic oligonucleotide
gcauugccugcugugaagg

SEQ ID NO: 1671711 - RNA, 19 nt, Artificial Sequence
  Description of Artificial Sequence: Synthetic oligonucleotide
gcagauguaccagacuggc

SEQ ID NO: 1671712 - RNA, 19 nt, Artificial Sequence
  Description of Artificial Sequence: Synthetic oligonucleotide
aguccuuauuucaugccaa

SEQ ID NO: 1671713 - RNA, 19 nt, Artificial Sequence
  Description of Artificial Sequence: Synthetic oligonucleotide
aggcgcccacgccugaccg

SEQ ID NO: 1671714 - RNA, 19 nt, Artificial Sequence
  Description of Artificial Sequence: Synthetic oligonucleotide
auauugccagauagcagcu

SEQ ID NO: 1671715 - RNA, 19 nt, Artificial Sequence
  Description of Artificial Sequence: Synthetic oligonucleotide
ucaaagcacuucucuugua

SEQ ID NO: 1671716 - RNA, 19 nt, Artificial Sequence
  Description of Artificial Sequence: Synthetic oligonucleotide
cuucacgagaguucguaua

SEQ ID NO: 1671717 - RNA, 19 nt, Artificial Sequence
  Description of Artificial Sequence: Synthetic oligonucleotide
gugauauaccauauuccaa

SEQ ID NO: 1671718 - RNA, 19 nt, Artificial Sequence
  Description of Artificial Sequence: Synthetic oligonucleotide
gaucuucgagguucaaccu

SEQ ID NO: 1671719 - RNA, 19 nt, Artificial Sequence
  Description of Artificial Sequence: Synthetic oligonucleotide
cuucacuuagagccaccuc

SEQ ID NO: 1671720 - RNA, 19 nt, Artificial Sequence
  Description of Artificial Sequence: Synthetic oligonucleotide
cacgccugaccgcagcccc

SEQ ID NO: 1671721 - RNA, 19 nt, Artificial Sequence
  Description of Artificial Sequence: Synthetic oligonucleotide
agaaccuuugaagcuggau

SEQ ID NO: 1671722 - RNA, 19 nt, Artificial Sequence
  Description of Artificial Sequence: Synthetic oligonucleotide
ccauaagugauauaccaua

SEQ ID NO: 1671723 - RNA, 19 nt, Artificial Sequence
  Description of Artificial Sequence: Synthetic oligonucleotide
cucugccauaauuugcuaa

SEQ ID NO: 1671724 - RNA, 19 nt, Artificial Sequence
  Description of Artificial Sequence: Synthetic oligonucleotide
uggccaguuuugcuucacu

SEQ ID NO: 1671725 - RNA, 19 nt, Artificial Sequence
  Description of Artificial Sequence: Synthetic oligonucleotide
cugugcccaaccucgcaac

SEQ ID NO: 1671726 - RNA, 19 nt, Artificial Sequence
  Description of Artificial Sequence: Synthetic oligonucleotide
uugccagauagcagcugau

SEQ ID NO: 1671727 - RNA, 19 nt, Artificial Sequence
  Description of Artificial Sequence: Synthetic oligonucleotide
gaugauggcgagucucccu

SEQ ID NO: 1671728 - RNA, 19 nt, Artificial Sequence
  Description of Artificial Sequence: Synthetic oligonucleotide
auucagcgacggcacccuc

SEQ ID NO: 1671729 - RNA, 19 nt, Artificial Sequence
  Description of Artificial Sequence: Synthetic oligonucleotide
acgagaguucguauagggu

SEQ ID NO: 1671730 - RNA, 19 nt, Artificial Sequence
  Description of Artificial Sequence: Synthetic oligonucleotide
acggccacaaacuguucuu

SEQ ID NO: 1671731 - RNA, 19 nt, Artificial Sequence
  Description of Artificial Sequence: Synthetic oligonucleotide
agcgacggcacccuccaua

SEQ ID NO: 1671732 - RNA, 19 nt, Artificial Sequence
  Description of Artificial Sequence: Synthetic oligonucleotide
guaugcuauccaaccaguc

SEQ ID NO: 1671733 - RNA, 19 nt, Artificial Sequence
  Description of Artificial Sequence: Synthetic oligonucleotide
ggaucaucccagcuguauc

SEQ ID NO: 1671734 - RNA, 19 nt, Artificial Sequence
  Description of Artificial Sequence: Synthetic oligonucleotide
ugccagauagcagcugauc

SEQ ID NO: 1671735 - RNA, 19 nt, Artificial Sequence
  Description of Artificial Sequence: Synthetic oligonucleotide
ccaucacuuaggcuauucc

SEQ ID NO: 1671736 - RNA, 19 nt, Artificial Sequence
  Description of Artificial Sequence: Synthetic oligonucleotide
guucaugaccauaagugau

SEQ ID NO: 1671737 - RNA, 19 nt, Artificial Sequence
  Description of Artificial Sequence: Synthetic oligonucleotide
agagcuccgggcagccgcc

SEQ ID NO: 1671738 - RNA, 19 nt, Artificial Sequence
  Description of Artificial Sequence: Synthetic oligonucleotide
uuguggccguaugcuaucc

SEQ ID NO: 1671739 - RNA, 19 nt, Artificial Sequence
  Description of Artificial Sequence: Synthetic oligonucleotide
aaccucgcaacgccaucuu

SEQ ID NO: 1671740 - RNA, 19 nt, Artificial Sequence
  Description of Artificial Sequence: Synthetic oligonucleotide
gguuaagccugcguccgag

SEQ ID NO: 1671741 - RNA, 19 nt, Artificial Sequence
  Description of Artificial Sequence: Synthetic oligonucleotide
cagcuuuuaugccaucaaa

SEQ ID NO: 1671742 - RNA, 19 nt, Artificial Sequence
  Description of Artificial Sequence: Synthetic oligonucleotide
ccugugaacccaauaguga

SEQ ID NO: 1671743 - RNA, 19 nt, Artificial Sequence
  Description of Artificial Sequence: Synthetic oligonucleotide
ucaaccuuccuuggugcuu

SEQ ID NO: 1671744 - RNA, 19 nt, Artificial Sequence
  Description of Artificial Sequence: Synthetic oligonucleotide
gcgacggcacccuccauag

SEQ ID NO: 1671745 - RNA, 19 nt, Artificial Sequence
  Description of Artificial Sequence: Synthetic oligonucleotide
ccagucagcuuuuaugcca

SEQ ID NO: 1671746 - RNA, 19 nt, Artificial Sequence
  Description of Artificial Sequence: Synthetic oligonucleotide
ugaagaccgggaggaagau

SEQ ID NO: 1671747 - RNA, 19 nt, Artificial Sequence
  Description of Artificial Sequence: Synthetic oligonucleotide
gaggcgcccacgccugacc

SEQ ID NO: 1671748 - RNA, 19 nt, Artificial Sequence
  Description of Artificial Sequence: Synthetic oligonucleotide
cuggacucuagauuucagu

SEQ ID NO: 1671749 - RNA, 19 nt, Artificial Sequence
  Description of Artificial Sequence: Synthetic oligonucleotide
cagauagcagcugauccaa

SEQ ID NO: 1671750 - RNA, 19 nt, Artificial Sequence
  Description of Artificial Sequence: Synthetic oligonucleotide
guccuuauuucaugccaaa

SEQ ID NO: 1671751 - RNA, 19 nt, Artificial Sequence
  Description of Artificial Sequence: Synthetic oligonucleotide
cugcguccgagcagccgcg

SEQ ID NO: 1671752 - RNA, 19 nt, Artificial Sequence
  Description of Artificial Sequence: Synthetic oligonucleotide
gauggcgagucucccuucu

SEQ ID NO: 1671753 - RNA, 19 nt, Artificial Sequence
  Description of Artificial Sequence: Synthetic oligonucleotide
ucgcugugcccaaccucgc

SEQ ID NO: 1671754 - RNA, 19 nt, Artificial Sequence
  Description of Artificial Sequence: Synthetic oligonucleotide
augguucgauucagcgacg

SEQ ID NO: 1671755 - RNA, 19 nt, Artificial Sequence
  Description of Artificial Sequence: Synthetic oligonucleotide
cuggaugcggagucuucca

SEQ ID NO: 1671756 - RNA, 19 nt, Artificial Sequence
  Description of Artificial Sequence: Synthetic oligonucleotide
aagaaccuuugaagcugga

SEQ ID NO: 1671757 - RNA, 19 nt, Artificial Sequence
  Description of Artificial Sequence: Synthetic oligonucleotide
cauguacugggaacauuua

SEQ ID NO: 1671758 - RNA, 19 nt, Artificial Sequence
  Description of Artificial Sequence: Synthetic oligonucleotide
cuuaggcuauuccaccacu

SEQ ID NO: 1671759 - RNA, 19 nt, Artificial Sequence
  Description of Artificial Sequence: Synthetic oligonucleotide
gugcagacugcugcaagca

SEQ ID NO: 1671760 - RNA, 19 nt, Artificial Sequence
  Description of Artificial Sequence: Synthetic oligonucleotide
gcuccacaaaacauacaug

SEQ ID NO: 1671761 - RNA, 19 nt, Artificial Sequence
  Description of Artificial Sequence: Synthetic oligonucleotide
gguucgauucagcgacggc

SEQ ID NO: 1671762 - RNA, 19 nt, Artificial Sequence
  Description of Artificial Sequence: Synthetic oligonucleotide
gcuggaugcggagucuucc

SEQ ID NO: 1671763 - RNA, 19 nt, Artificial Sequence
  Description of Artificial Sequence: Synthetic oligonucleotide
cuuguaugcuucaccacuu

SEQ ID NO: 1671764 - RNA, 19 nt, Artificial Sequence
  Description of Artificial Sequence: Synthetic oligonucleotide
ggaugcggagucuuccaga

SEQ ID NO: 1671765 - RNA, 19 nt, Artificial Sequence
  Description of Artificial Sequence: Synthetic oligonucleotide
gugcccaaccucgcaacgc

SEQ ID NO: 1671766 - RNA, 19 nt, Artificial Sequence
  Description of Artificial Sequence: Synthetic oligonucleotide
cgagaguucguauagggua

SEQ ID NO: 1671767 - RNA, 19 nt, Artificial Sequence
  Description of Artificial Sequence: Synthetic oligonucleotide
agguuaagccugcguccga

SEQ ID NO: 1671768 - RNA, 19 nt, Artificial Sequence
  Description of Artificial Sequence: Synthetic oligonucleotide
ggaucuuggugcagacugc

SEQ ID NO: 1671769 - RNA, 19 nt, Artificial Sequence
  Description of Artificial Sequence: Synthetic oligonucleotide
gagacggauaaaagacugu

SEQ ID NO: 1671770 - RNA, 19 nt, Artificial Sequence
  Description of Artificial Sequence: Synthetic oligonucleotide
ucacaguccgcuggccauc

SEQ ID NO: 1671771 - RNA, 19 nt, Artificial Sequence
  Description of Artificial Sequence: Synthetic oligonucleotide
gauucagcgacggcacccu

SEQ ID NO: 1671772 - RNA, 19 nt, Artificial Sequence
  Description of Artificial Sequence: Synthetic oligonucleotide
agagagcuccgggcagccg

SEQ ID NO: 1671773 - RNA, 19 nt, Artificial Sequence
  Description of Artificial Sequence: Synthetic oligonucleotide
gcuauuccaccacuuguua

SEQ ID NO: 1671774 - RNA, 19 nt, Artificial Sequence
  Description of Artificial Sequence: Synthetic oligonucleotide
aucuuggugcagacugcug

SEQ ID NO: 1671775 - RNA, 19 nt, Artificial Sequence
  Description of Artificial Sequence: Synthetic oligonucleotide
gcuggauuggauguaaaau

SEQ ID NO: 1671776 - RNA, 19 nt, Artificial Sequence
  Description of Artificial Sequence: Synthetic oligonucleotide
gacggauaaaagacuguuu

SEQ ID NO: 1671777 - RNA, 19 nt, Artificial Sequence
  Description of Artificial Sequence: Synthetic oligonucleotide
uggcaacuuuacacacaua

SEQ ID NO: 1671778 - RNA, 19 nt, Artificial Sequence
  Description of Artificial Sequence: Synthetic oligonucleotide
gcuagaggaaaagcuccac

SEQ ID NO: 1671779 - RNA, 19 nt, Artificial Sequence
  Description of Artificial Sequence: Synthetic oligonucleotide
ugcguccgagcagccgcgg

SEQ ID NO: 1671780 - RNA, 19 nt, Artificial Sequence
  Description of Artificial Sequence: Synthetic oligonucleotide
gaacguugacagcaacauu

SEQ ID NO: 1671781 - RNA, 19 nt, Artificial Sequence
  Description of Artificial Sequence: Synthetic oligonucleotide
cuaugauaccugucacagu

SEQ ID NO: 1671782 - RNA, 19 nt, Artificial Sequence
  Description of Artificial Sequence: Synthetic oligonucleotide
acgagaguauuugcagcua

SEQ ID NO: 1671783 - RNA, 19 nt, Artificial Sequence
  Description of Artificial Sequence: Synthetic oligonucleotide
guucacgaugcuagaggaa

SEQ ID NO: 1671784 - RNA, 19 nt, Artificial Sequence
  Description of Artificial Sequence: Synthetic oligonucleotide
cagucagcuuuuaugccau

SEQ ID NO: 1671785 - RNA, 19 nt, Artificial Sequence
  Description of Artificial Sequence: Synthetic oligonucleotide
guacacggccacaaacugu

SEQ ID NO: 1671786 - RNA, 19 nt, Artificial Sequence
  Description of Artificial Sequence: Synthetic oligonucleotide
caugaccauaagugauaua

SEQ ID NO: 1671787 - RNA, 19 nt, Artificial Sequence
  Description of Artificial Sequence: Synthetic oligonucleotide
agccgccgaccacgggagg

SEQ ID NO: 1671788 - RNA, 19 nt, Artificial Sequence
  Description of Artificial Sequence: Synthetic oligonucleotide
caagaauguucacgaugcu

SEQ ID NO: 1671789 - RNA, 19 nt, Artificial Sequence
  Description of Artificial Sequence: Synthetic oligonucleotide
gcaacgccaucuucccaac

SEQ ID NO: 1671790 - RNA, 19 nt, Artificial Sequence
  Description of Artificial Sequence: Synthetic oligonucleotide
cgauucagcgacggcaccc

SEQ ID NO: 1671791 - RNA, 19 nt, Artificial Sequence
  Description of Artificial Sequence: Synthetic oligonucleotide
agauagcagcugauccaaa

SEQ ID NO: 1671792 - RNA, 19 nt, Artificial Sequence
  Description of Artificial Sequence: Synthetic oligonucleotide
ggagcagauguaccagacu

SEQ ID NO: 1671793 - RNA, 19 nt, Artificial Sequence
  Description of Artificial Sequence: Synthetic oligonucleotide
ggcagaauacgagaguauu

SEQ ID NO: 1671794 - RNA, 19 nt, Artificial Sequence
  Description of Artificial Sequence: Synthetic oligonucleotide
ggcuucacgagaguucgua

SEQ ID NO: 1671795 - RNA, 19 nt, Artificial Sequence
  Description of Artificial Sequence: Synthetic oligonucleotide
caaccucgcaacgccaucu

SEQ ID NO: 1671796 - RNA, 19 nt, Artificial Sequence
  Description of Artificial Sequence: Synthetic oligonucleotide
gccaucacuuaggcuauuc

SEQ ID NO: 1671797 - RNA, 19 nt, Artificial Sequence
  Description of Artificial Sequence: Synthetic oligonucleotide
cauugccugcugugaaggu

SEQ ID NO: 1671798 - RNA, 19 nt, Artificial Sequence
  Description of Artificial Sequence: Synthetic oligonucleotide
ggccaguuuugcuucacuu

SEQ ID NO: 1671799 - RNA, 19 nt, Artificial Sequence
  Description of Artificial Sequence: Synthetic oligonucleotide
cuguauccauagcaaugau

SEQ ID NO: 1671800 - RNA, 19 nt, Artificial Sequence
  Description of Artificial Sequence: Synthetic oligonucleotide
ccuuuuguggccguaugcu

SEQ ID NO: 1671801 - RNA, 19 nt, Artificial Sequence
  Description of Artificial Sequence: Synthetic oligonucleotide
gcagaauacgagaguauuu

SEQ ID NO: 1671802 - RNA, 19 nt, Artificial Sequence
  Description of Artificial Sequence: Synthetic oligonucleotide
ggcuauuccaccacuuguu

SEQ ID NO: 1671803 - RNA, 19 nt, Artificial Sequence
  Description of Artificial Sequence: Synthetic oligonucleotide
cuuccuuuuguggccguau

SEQ ID NO: 1671804 - RNA, 19 nt, Artificial Sequence
  Description of Artificial Sequence: Synthetic oligonucleotide
ccaaccucgcaacgccauc

SEQ ID NO: 1671805 - RNA, 19 nt, Artificial Sequence
  Description of Artificial Sequence: Synthetic oligonucleotide
ggcgcccacgccugaccgc

SEQ ID NO: 1671806 - RNA, 19 nt, Artificial Sequence
  Description of Artificial Sequence: Synthetic oligonucleotide
gccugcguccgagcagccg

SEQ ID NO: 1671807 - RNA, 19 nt, Artificial Sequence
  Description of Artificial Sequence: Synthetic oligonucleotide
cguaugcuauccaaccagu

SEQ ID NO: 1671808 - RNA, 19 nt, Artificial Sequence
  Description of Artificial Sequence: Synthetic oligonucleotide
ccgccgaccacgggaggcg

SEQ ID NO: 1671809 - RNA, 19 nt, Artificial Sequence
  Description of Artificial Sequence: Synthetic oligonucleotide
gggccgcagagagcuccgg

SEQ ID NO: 1671810 - RNA, 19 nt, Artificial Sequence
  Description of Artificial Sequence: Synthetic oligonucleotide
cacuuagagccaccuccuu

SEQ ID NO: 1671811 - RNA, 19 nt, Artificial Sequence
  Description of Artificial Sequence: Synthetic oligonucleotide
ccaaccagucagcuuuuau

SEQ ID NO: 1671812 - RNA, 19 nt, Artificial Sequence
  Description of Artificial Sequence: Synthetic oligonucleotide
cgggaggcgcccacgccug

SEQ ID NO: 1671813 - RNA, 19 nt, Artificial Sequence
  Description of Artificial Sequence: Synthetic oligonucleotide
gcccaaccucgcaacgcca

SEQ ID NO: 1671814 - RNA, 19 nt, Artificial Sequence
  Description of Artificial Sequence: Synthetic oligonucleotide
gccgaccacgggaggcgcc

SEQ ID NO: 1671815 - RNA, 19 nt, Artificial Sequence
  Description of Artificial Sequence: Synthetic oligonucleotide
gccucgcugugcccaaccu

SEQ ID NO: 1671816 - RNA, 19 nt, Artificial Sequence
  Description of Artificial Sequence: Synthetic oligonucleotide
gccccaccauggcccgacc

SEQ ID NO: 1671817 - RNA, 19 nt, Artificial Sequence
  Description of Artificial Sequence: Synthetic oligonucleotide
cccaaccucgcaacgccau

SEQ ID NO: 1671818 - RNA, 19 nt, Artificial Sequence
  Description of Artificial Sequence: Synthetic oligonucleotide
gggcuucacgagaguucgu

SEQ ID NO: 1671819 - RNA, 19 nt, Artificial Sequence
  Description of Artificial Sequence: Synthetic oligonucleotide
aauuguuuugguuacuacc

SEQ ID NO: 1671820 - RNA, 19 nt, Artificial Sequence
  Description of Artificial Sequence: Synthetic oligonucleotide
acaguuuuaagugagaagc

SEQ ID NO: 1671821 - RNA, 19 nt, Artificial Sequence
  Description of Artificial Sequence: Synthetic oligonucleotide
ucuacaauuauuaaaucca

SEQ ID NO: 1671822 - RNA, 19 nt, Artificial Sequence
  Description of Artificial Sequence: Synthetic oligonucleotide
uguauuguuuugaugaucc

SEQ ID NO: 1671823 - RNA, 19 nt, Artificial Sequence
  Description of Artificial Sequence: Synthetic oligonucleotide
uauugagacaaauacauac

SEQ ID NO: 1671824 - RNA, 19 nt, Artificial Sequence
  Description of Artificial Sequence: Synthetic oligonucleotide
acuuguauuguuuugauga

SEQ ID NO: 1671825 - RNA, 19 nt, Artificial Sequence
  Description of Artificial Sequence: Synthetic oligonucleotide
uauuugaggagcaauacca

SEQ ID NO: 1671826 - RNA, 19 nt, Artificial Sequence
  Description of Artificial Sequence: Synthetic oligonucleotide
uuaauugugguccauggca

SEQ ID NO: 1671827 - RNA, 19 nt, Artificial Sequence
  Description of Artificial Sequence: Synthetic oligonucleotide
uguauguagcugcagaucc

SEQ ID NO: 1671828 - RNA, 19 nt, Artificial Sequence
  Description of Artificial Sequence: Synthetic oligonucleotide
aaucucuggacauggcugc

SEQ ID NO: 1671829 - RNA, 19 nt, Artificial Sequence
  Description of Artificial Sequence: Synthetic oligonucleotide
aagcacuggauccaacacc

SEQ ID NO: 1671830 - RNA, 19 nt, Artificial Sequence
  Description of Artificial Sequence: Synthetic oligonucleotide
uccgaaacaguuuuaagug

SEQ ID NO: 1671831 - RNA, 19 nt, Artificial Sequence
  Description of Artificial Sequence: Synthetic oligonucleotide
uuagacgugauccucugag

SEQ ID NO: 1671832 - RNA, 19 nt, Artificial Sequence
  Description of Artificial Sequence: Synthetic oligonucleotide
  modified_base (9)..(9): a, c, u, g, unknown or other
ggaaaagcngguuugaucc

SEQ ID NO: 1671833 - RNA, 19 nt, Artificial Sequence
  Description of Artificial Sequence: Synthetic oligonucleotide
guuacuaccaacucacugc

SEQ ID NO: 1671834 - RNA, 19 nt, Artificial Sequence
  Description of Artificial Sequence: Synthetic oligonucleotide
aacuguaccugagagguac

SEQ ID NO: 1671835 - RNA, 19 nt, Artificial Sequence
  Description of Artificial Sequence: Synthetic oligonucleotide
gacaucaugaaacagaagu

SEQ ID NO: 1671836 - RNA, 19 nt, Artificial Sequence
  Description of Artificial Sequence: Synthetic oligonucleotide
ucuguaaaagcacuggauc

SEQ ID NO: 1671837 - RNA, 19 nt, Artificial Sequence
  Description of Artificial Sequence: Synthetic oligonucleotide
uggauuucuacaauuauua

SEQ ID NO: 1671838 - RNA, 19 nt, Artificial Sequence
  Description of Artificial Sequence: Synthetic oligonucleotide
aaaacuuagacgugauccu

SEQ ID NO: 1671839 - RNA, 19 nt, Artificial Sequence
  Description of Artificial Sequence: Synthetic oligonucleotide
gucauaguaaccuggcugg

SEQ ID NO: 1671840 - RNA, 19 nt, Artificial Sequence
  Description of Artificial Sequence: Synthetic oligonucleotide
  modified_base (10)..(10): a, c, u, g, unknown or other
aggaaaagcngguuugauc

SEQ ID NO: 1671841 - RNA, 19 nt, Artificial Sequence
  Description of Artificial Sequence: Synthetic oligonucleotide
uccaacaccaccacaaugu

SEQ ID NO: 1671842 - RNA, 19 nt, Artificial Sequence
  Description of Artificial Sequence: Synthetic oligonucleotide
acauacuacauauggugac

SEQ ID NO: 1671843 - RNA, 19 nt, Artificial Sequence
  Description of Artificial Sequence: Synthetic oligonucleotide
ucugucaccagagauuugg

SEQ ID NO: 1671844 - RNA, 19 nt, Artificial Sequence
  Description of Artificial Sequence: Synthetic oligonucleotide
aaaagcacuggauccaaca

SEQ ID NO: 1671845 - RNA, 19 nt, Artificial Sequence
  Description of Artificial Sequence: Synthetic oligonucleotide
uuauuugaggagcaauacc

SEQ ID NO: 1671846 - RNA, 19 nt, Artificial Sequence
  Description of Artificial Sequence: Synthetic oligonucleotide
  modified_base (7)..(7): a, c, u, g, unknown or other
aaaagcngguuugaucccg

SEQ ID NO: 1671847 - RNA, 19 nt, Artificial Sequence
  Description of Artificial Sequence: Synthetic oligonucleotide
gaacgguaaacgcuggugg

SEQ ID NO: 1671848 - RNA, 19 nt, Artificial Sequence
  Description of Artificial Sequence: Synthetic oligonucleotide
aagugauacuuugaggcac

SEQ ID NO: 1671849 - RNA, 19 nt, Artificial Sequence
  Description of Artificial Sequence: Synthetic oligonucleotide
uauuaaauccauguccgag

SEQ ID NO: 1671850 - RNA, 19 nt, Artificial Sequence
  Description of Artificial Sequence: Synthetic oligonucleotide
uguuuugaugauccgaaac

SEQ ID NO: 1671851 - RNA, 19 nt, Artificial Sequence
  Description of Artificial Sequence: Synthetic oligonucleotide
uuugaggagcaauaccagg

SEQ ID NO: 1671852 - RNA, 19 nt, Artificial Sequence
  Description of Artificial Sequence: Synthetic oligonucleotide
ugcagauccaccaaugccu

SEQ ID NO: 1671853 - RNA, 19 nt, Artificial Sequence
  Description of Artificial Sequence: Synthetic oligonucleotide
uuaaauccauguccgagug

SEQ ID NO: 1671854 - RNA, 19 nt, Artificial Sequence
  Description of Artificial Sequence: Synthetic oligonucleotide
cuguaaaagcacuggaucc

SEQ ID NO: 1671855 - RNA, 19 nt, Artificial Sequence
  Description of Artificial Sequence: Synthetic oligonucleotide
ugacuucgagauuugaugc

SEQ ID NO: 1671856 - RNA, 19 nt, Artificial Sequence
  Description of Artificial Sequence: Synthetic oligonucleotide
acuaccaacucacugcaag

SEQ ID NO: 1671857 - RNA, 19 nt, Artificial Sequence
  Description of Artificial Sequence: Synthetic oligonucleotide
cuuuguguugugaagguug

SEQ ID NO: 1671858 - RNA, 19 nt, Artificial Sequence
  Description of Artificial Sequence: Synthetic oligonucleotide
uuuuaagugagaagcuaga

SEQ ID NO: 1671859 - RNA, 19 nt, Artificial Sequence
  Description of Artificial Sequence: Synthetic oligonucleotide
gaagcuagagugcucuggg

SEQ ID NO: 1671860 - RNA, 19 nt, Artificial Sequence
  Description of Artificial Sequence: Synthetic oligonucleotide
ccaagugauacuuugaggc

SEQ ID NO: 1671861 - RNA, 19 nt, Artificial Sequence
  Description of Artificial Sequence: Synthetic oligonucleotide
uugaggagcaauaccagga

SEQ ID NO: 1671862 - RNA, 19 nt, Artificial Sequence
  Description of Artificial Sequence: Synthetic oligonucleotide
gagauuuggagacucaauc

SEQ ID NO: 1671863 - RNA, 19 nt, Artificial Sequence
  Description of Artificial Sequence: Synthetic oligonucleotide
auuaaauccauguccgagu

SEQ ID NO: 1671864 - RNA, 19 nt, Artificial Sequence
  Description of Artificial Sequence: Synthetic oligonucleotide
uccaagugauacuuugagg

SEQ ID NO: 1671865 - RNA, 19 nt, Artificial Sequence
  Description of Artificial Sequence: Synthetic oligonucleotide
auaguaaccuggcugguug

SEQ ID NO: 1671866 - RNA, 19 nt, Artificial Sequence
  Description of Artificial Sequence: Synthetic oligonucleotide
uugugcuagacucuugucu

SEQ ID NO: 1671867 - RNA, 19 nt, Artificial Sequence
  Description of Artificial Sequence: Synthetic oligonucleotide
uuuaagugagaagcuagag

SEQ ID NO: 1671868 - RNA, 19 nt, Artificial Sequence
  Description of Artificial Sequence: Synthetic oligonucleotide
ucaggcauuccucaggccu

SEQ ID NO: 1671869 - RNA, 19 nt, Artificial Sequence
  Description of Artificial Sequence: Synthetic oligonucleotide
acuacauauggugacauca

SEQ ID NO: 1671870 - RNA, 19 nt, Artificial Sequence
  Description of Artificial Sequence: Synthetic oligonucleotide
uuacuaccaacucacugca

SEQ ID NO: 1671871 - RNA, 19 nt, Artificial Sequence
  Description of Artificial Sequence: Synthetic oligonucleotide
guuuugaugauccgaaaca

SEQ ID NO: 1671872 - RNA, 19 nt, Artificial Sequence
  Description of Artificial Sequence: Synthetic oligonucleotide
  modified_base (19)..(19): a, c, u, g, unknown or other
uccagacagaggaaaagcn

SEQ ID NO: 1671873 - RNA, 19 nt, Artificial Sequence
  Description of Artificial Sequence: Synthetic oligonucleotide
aauugugguccauggcauc

SEQ ID NO: 1671874 - RNA, 19 nt, Artificial Sequence
  Description of Artificial Sequence: Synthetic oligonucleotide
uauuguuuugaugauccga

SEQ ID NO: 1671875 - RNA, 19 nt, Artificial Sequence
  Description of Artificial Sequence: Synthetic oligonucleotide
uuuggauuucuacaauuau

SEQ ID NO: 1671876 - RNA, 19 nt, Artificial Sequence
  Description of Artificial Sequence: Synthetic oligonucleotide
guugugaagguugauuggg

SEQ ID NO: 1671877 - RNA, 19 nt, Artificial Sequence
  Description of Artificial Sequence: Synthetic oligonucleotide
guugaggcagcucaguggc

SEQ ID NO: 1671878 - RNA, 19 nt, Artificial Sequence
  Description of Artificial Sequence: Synthetic oligonucleotide
aagugagaagcuagagugc

SEQ ID NO: 1671879 - RNA, 19 nt, Artificial Sequence
  Description of Artificial Sequence: Synthetic oligonucleotide
auuugaugcuuauucuuug

SEQ ID NO: 1671880 - RNA, 19 nt, Artificial Sequence
  Description of Artificial Sequence: Synthetic oligonucleotide
aagcuagagugcucugggc

SEQ ID NO: 1671881 - RNA, 19 nt, Artificial Sequence
  Description of Artificial Sequence: Synthetic oligonucleotide
ugugaagguugauuggggc

SEQ ID NO: 1671882 - RNA, 19 nt, Artificial Sequence
  Description of Artificial Sequence: Synthetic oligonucleotide
ugggcuuucagucgguuga

SEQ ID NO: 1671883 - RNA, 19 nt, Artificial Sequence
  Description of Artificial Sequence: Synthetic oligonucleotide
ugaagguugauuggggcag

SEQ ID NO: 1671884 - RNA, 19 nt, Artificial Sequence
  Description of Artificial Sequence: Synthetic oligonucleotide
uggccuguuuauuugagga

SEQ ID NO: 1671885 - RNA, 19 nt, Artificial Sequence
  Description of Artificial Sequence: Synthetic oligonucleotide
ucugauugugcuugguucu

SEQ ID NO: 1671886 - RNA, 19 nt, Artificial Sequence
  Description of Artificial Sequence: Synthetic oligonucleotide
ugugcuagacucuugucuc

SEQ ID NO: 1671887 - RNA, 19 nt, Artificial Sequence
  Description of Artificial Sequence: Synthetic oligonucleotide
uacauauggugacaucaug

SEQ ID NO: 1671888 - RNA, 19 nt, Artificial Sequence
  Description of Artificial Sequence: Synthetic oligonucleotide
ucgggaauuguuuugguua

SEQ ID NO: 1671889 - RNA, 19 nt, Artificial Sequence
  Description of Artificial Sequence: Synthetic oligonucleotide
gaugguugguucuuccagc

SEQ ID NO: 1671890 - RNA, 19 nt, Artificial Sequence
  Description of Artificial Sequence: Synthetic oligonucleotide
agaauucacucugacuucg

SEQ ID NO: 1671891 - RNA, 19 nt, Artificial Sequence
  Description of Artificial Sequence: Synthetic oligonucleotide
gguuaauugugguccaugg

SEQ ID NO: 1671892 - RNA, 19 nt, Artificial Sequence
  Description of Artificial Sequence: Synthetic oligonucleotide
aaucccuaacuguaccuga

SEQ ID NO: 1671893 - RNA, 19 nt, Artificial Sequence
  Description of Artificial Sequence: Synthetic oligonucleotide
uugaugcuuauucuuugga

SEQ ID NO: 1671894 - RNA, 19 nt, Artificial Sequence
  Description of Artificial Sequence: Synthetic oligonucleotide
uuucgugcugccuuggggu

SEQ ID NO: 1671895 - RNA, 19 nt, Artificial Sequence
  Description of Artificial Sequence: Synthetic oligonucleotide
agugucucagccuucucug

SEQ ID NO: 1671896 - RNA, 19 nt, Artificial Sequence
  Description of Artificial Sequence: Synthetic oligonucleotide
uuuugguuacuaccaacuc

SEQ ID NO: 1671897 - RNA, 19 nt, Artificial Sequence
  Description of Artificial Sequence: Synthetic oligonucleotide
gacgugauccucugagccg

SEQ ID NO: 1671898 - RNA, 19 nt, Artificial Sequence
  Description of Artificial Sequence: Synthetic oligonucleotide
gaugucgggaauuguuuug

SEQ ID NO: 1671899 - RNA, 19 nt, Artificial Sequence
  Description of Artificial Sequence: Synthetic oligonucleotide
agucccagucauuugccgg

SEQ ID NO: 1671900 - RNA, 19 nt, Artificial Sequence
  Description of Artificial Sequence: Synthetic oligonucleotide
aacgguaaacgcuggugga

SEQ ID NO: 1671901 - RNA, 19 nt, Artificial Sequence
  Description of Artificial Sequence: Synthetic oligonucleotide
uaauugugguccauggcau

SEQ ID NO: 1671902 - RNA, 19 nt, Artificial Sequence
  Description of Artificial Sequence: Synthetic oligonucleotide
ucugacuucgagauuugau

SEQ ID NO: 1671903 - RNA, 19 nt, Artificial Sequence
  Description of Artificial Sequence: Synthetic oligonucleotide
gagaggaacaucaggaauc

SEQ ID NO: 1671904 - RNA, 19 nt, Artificial Sequence
  Description of Artificial Sequence: Synthetic oligonucleotide
gaauuguuuugguuacuac

SEQ ID NO: 1671905 - RNA, 19 nt, Artificial Sequence
  Description of Artificial Sequence: Synthetic oligonucleotide
aggggacaaauacaucuuc

SEQ ID NO: 1671906 - RNA, 19 nt, Artificial Sequence
  Description of Artificial Sequence: Synthetic oligonucleotide
guuaauugugguccauggc

SEQ ID NO: 1671907 - RNA, 19 nt, Artificial Sequence
  Description of Artificial Sequence: Synthetic oligonucleotide
aaacgcacaggcgaaguca

SEQ ID NO: 1671908 - RNA, 19 nt, Artificial Sequence
  Description of Artificial Sequence: Synthetic oligonucleotide
agauuugaugcuuauucuu

SEQ ID NO: 1671909 - RNA, 19 nt, Artificial Sequence
  Description of Artificial Sequence: Synthetic oligonucleotide
ucuguauguagcugcagau

SEQ ID NO: 1671910 - RNA, 19 nt, Artificial Sequence
  Description of Artificial Sequence: Synthetic oligonucleotide
ugaugcuuauucuuuggau

SEQ ID NO: 1671911 - RNA, 19 nt, Artificial Sequence
  Description of Artificial Sequence: Synthetic oligonucleotide
ugaagggcgcuucagccac

SEQ ID NO: 1671912 - RNA, 19 nt, Artificial Sequence
  Description of Artificial Sequence: Synthetic oligonucleotide
accuuccaucuguaaaagc

SEQ ID NO: 1671913 - RNA, 19 nt, Artificial Sequence
  Description of Artificial Sequence: Synthetic oligonucleotide
ucgguugaccaccacugcc

SEQ ID NO: 1671914 - RNA, 19 nt, Artificial Sequence
  Description of Artificial Sequence: Synthetic oligonucleotide
guguuuuccuuccugcuug

SEQ ID NO: 1671915 - RNA, 19 nt, Artificial Sequence
  Description of Artificial Sequence: Synthetic oligonucleotide
cuucaggcauuccucaggc

SEQ ID NO: 1671916 - RNA, 19 nt, Artificial Sequence
  Description of Artificial Sequence: Synthetic oligonucleotide
cauuccucaggccucuggg

SEQ ID NO: 1671917 - RNA, 19 nt, Artificial Sequence
  Description of Artificial Sequence: Synthetic oligonucleotide
gauccucugagccgagggg

SEQ ID NO: 1671918 - RNA, 19 nt, Artificial Sequence
  Description of Artificial Sequence: Synthetic oligonucleotide
  modified_base (8)..(8): a, c, u, g, unknown or other
gaaaagcngguuugauccc

SEQ ID NO: 1671919 - RNA, 19 nt, Artificial Sequence
  Description of Artificial Sequence: Synthetic oligonucleotide
uuucagucgguugaccacc

SEQ ID NO: 1671920 - RNA, 19 nt, Artificial Sequence
  Description of Artificial Sequence: Synthetic oligonucleotide
auugagacaaauacauaca

SEQ ID NO: 1671921 - RNA, 19 nt, Artificial Sequence
  Description of Artificial Sequence: Synthetic oligonucleotide
ucaaucccuaacuguaccu

SEQ ID NO: 1671922 - RNA, 19 nt, Artificial Sequence
  Description of Artificial Sequence: Synthetic oligonucleotide
agaagcuagagugcucugg

SEQ ID NO: 1671923 - RNA, 19 nt, Artificial Sequence
  Description of Artificial Sequence: Synthetic oligonucleotide
agacucaaucccuaacugu

SEQ ID NO: 1671924 - RNA, 19 nt, Artificial Sequence
  Description of Artificial Sequence: Synthetic oligonucleotide
uugaggcacagccugggcu

SEQ ID NO: 1671925 - RNA, 19 nt, Artificial Sequence
  Description of Artificial Sequence: Synthetic oligonucleotide
ugcaaguggacugguaagc

SEQ ID NO: 1671926 - RNA, 19 nt, Artificial Sequence
  Description of Artificial Sequence: Synthetic oligonucleotide
guauuguuuugaugauccg

SEQ ID NO: 1671927 - RNA, 19 nt, Artificial Sequence
  Description of Artificial Sequence: Synthetic oligonucleotide
acauauggugacaucauga

SEQ ID NO: 1671928 - RNA, 19 nt, Artificial Sequence
  Description of Artificial Sequence: Synthetic oligonucleotide
auuguuuugaugauccgaa

SEQ ID NO: 1671929 - RNA, 19 nt, Artificial Sequence
  Description of Artificial Sequence: Synthetic oligonucleotide
gagccgaggggacaaauac

SEQ ID NO: 1671930 - RNA, 19 nt, Artificial Sequence
  Description of Artificial Sequence: Synthetic oligonucleotide
aacagaagucaggcuaguc

SEQ ID NO: 1671931 - RNA, 19 nt, Artificial Sequence
  Description of Artificial Sequence: Synthetic oligonucleotide
agaggaacgguaaacgcug

SEQ ID NO: 1671932 - RNA, 19 nt, Artificial Sequence
  Description of Artificial Sequence: Synthetic oligonucleotide
ucucuuuucgugcugccuu

SEQ ID NO: 1671933 - RNA, 19 nt, Artificial Sequence
  Description of Artificial Sequence: Synthetic oligonucleotide
cacuccauggacugcagug

SEQ ID NO: 1671934 - RNA, 19 nt, Artificial Sequence
  Description of Artificial Sequence: Synthetic oligonucleotide
augcuuauucuuuggauuu

SEQ ID NO: 1671935 - RNA, 19 nt, Artificial Sequence
  Description of Artificial Sequence: Synthetic oligonucleotide
aucaugagccuugugcuag

SEQ ID NO: 1671936 - RNA, 19 nt, Artificial Sequence
  Description of Artificial Sequence: Synthetic oligonucleotide
uagucaagccaaccugcag

SEQ ID NO: 1671937 - RNA, 19 nt, Artificial Sequence
  Description of Artificial Sequence: Synthetic oligonucleotide
agugagaagcuagagugcu

SEQ ID NO: 1671938 - RNA, 19 nt, Artificial Sequence
  Description of Artificial Sequence: Synthetic oligonucleotide
  modified_base (6)..(6): a, c, u, g, unknown or other
aaagcngguuugaucccgg

SEQ ID NO: 1671939 - RNA, 19 nt, Artificial Sequence
  Description of Artificial Sequence: Synthetic oligonucleotide
cuuucagucgguugaccac

SEQ ID NO: 1671940 - RNA, 19 nt, Artificial Sequence
  Description of Artificial Sequence: Synthetic oligonucleotide
cugagagccucuucucugg

SEQ ID NO: 1671941 - RNA, 19 nt, Artificial Sequence
  Description of Artificial Sequence: Synthetic oligonucleotide
gguugauuggggcagggug

SEQ ID NO: 1671942 - RNA, 19 nt, Artificial Sequence
  Description of Artificial Sequence: Synthetic oligonucleotide
agccuuuguaaacgcacag

SEQ ID NO: 1671943 - RNA, 19 nt, Artificial Sequence
  Description of Artificial Sequence: Synthetic oligonucleotide
cuaagacagagucccaguc

SEQ ID NO: 1671944 - RNA, 19 nt, Artificial Sequence
  Description of Artificial Sequence: Synthetic oligonucleotide
cacuggauccaacaccacc

SEQ ID NO: 1671945 - RNA, 19 nt, Artificial Sequence
  Description of Artificial Sequence: Synthetic oligonucleotide
  modified_base (3)..(3): a, c, u, g, unknown or other
gcngguuugaucccggagc

SEQ ID NO: 1671946 - RNA, 19 nt, Artificial Sequence
  Description of Artificial Sequence: Synthetic oligonucleotide
augucgggaauuguuuugg

SEQ ID NO: 1671947 - RNA, 19 nt, Artificial Sequence
  Description of Artificial Sequence: Synthetic oligonucleotide
  modified_base (4)..(4): a, c, u, g, unknown or other
agcngguuugaucccggag

SEQ ID NO: 1671948 - RNA, 19 nt, Artificial Sequence
  Description of Artificial Sequence: Synthetic oligonucleotide
ugugcuugguucucuucug

SEQ ID NO: 1671949 - RNA, 19 nt, Artificial Sequence
  Description of Artificial Sequence: Synthetic oligonucleotide
augucuacccuggacauca

SEQ ID NO: 1671950 - RNA, 19 nt, Artificial Sequence
  Description of Artificial Sequence: Synthetic oligonucleotide
uuguaaacgcacaggcgaa

SEQ ID NO: 1671951 - RNA, 19 nt, Artificial Sequence
  Description of Artificial Sequence: Synthetic oligonucleotide
ugauccgaaacaguuuuaa

SEQ ID NO: 1671952 - RNA, 19 nt, Artificial Sequence
  Description of Artificial Sequence: Synthetic oligonucleotide
guacuucugacccugucuc

SEQ ID NO: 1671953 - RNA, 19 nt, Artificial Sequence
  Description of Artificial Sequence: Synthetic oligonucleotide
uauguagcugcagauccac

SEQ ID NO: 1671954 - RNA, 19 nt, Artificial Sequence
  Description of Artificial Sequence: Synthetic oligonucleotide
cuaacuguaccugagaggu

SEQ ID NO: 1671955 - RNA, 19 nt, Artificial Sequence
  Description of Artificial Sequence: Synthetic oligonucleotide
ggacugguaagcuggaagc

SEQ ID NO: 1671956 - RNA, 19 nt, Artificial Sequence
  Description of Artificial Sequence: Synthetic oligonucleotide
aacgcugguggagguagac

SEQ ID NO: 1671957 - RNA, 19 nt, Artificial Sequence
  Description of Artificial Sequence: Synthetic oligonucleotide
ugaugauccgaaacaguuu

SEQ ID NO: 1671958 - RNA, 19 nt, Artificial Sequence
  Description of Artificial Sequence: Synthetic oligonucleotide
gaggagcaauaccaggaug

SEQ ID NO: 1671959 - RNA, 19 nt, Artificial Sequence
  Description of Artificial Sequence: Synthetic oligonucleotide
auuugaggagcaauaccag

SEQ ID NO: 1671960 - RNA, 19 nt, Artificial Sequence
  Description of Artificial Sequence: Synthetic oligonucleotide
cuuucucuuuucgugcugc

SEQ ID NO: 1671961 - RNA, 19 nt, Artificial Sequence
  Description of Artificial Sequence: Synthetic oligonucleotide
gaugcuuauucuuuggauu

SEQ ID NO: 1671962 - RNA, 19 nt, Artificial Sequence
  Description of Artificial Sequence: Synthetic oligonucleotide
auauggugacaucaugaaa

SEQ ID NO: 1671963 - RNA, 19 nt, Artificial Sequence
  Description of Artificial Sequence: Synthetic oligonucleotide
uguaaacgcacaggcgaag

SEQ ID NO: 1671964 - RNA, 19 nt, Artificial Sequence
  Description of Artificial Sequence: Synthetic oligonucleotide
gaugguuaauuguggucca

SEQ ID NO: 1671965 - RNA, 19 nt, Artificial Sequence
  Description of Artificial Sequence: Synthetic oligonucleotide
aggcuagucauaguaaccu

SEQ ID NO: 1671966 - RNA, 19 nt, Artificial Sequence
  Description of Artificial Sequence: Synthetic oligonucleotide
cuccagacagaggaaaagc

SEQ ID NO: 1671967 - RNA, 19 nt, Artificial Sequence
  Description of Artificial Sequence: Synthetic oligonucleotide
aacgcacaggcgaagucag

SEQ ID NO: 1671968 - RNA, 19 nt, Artificial Sequence
  Description of Artificial Sequence: Synthetic oligonucleotide
guggagguagacugcagug

SEQ ID NO: 1671969 - RNA, 19 nt, Artificial Sequence
  Description of Artificial Sequence: Synthetic oligonucleotide
uggagacucaaucccuaac

SEQ ID NO: 1671970 - RNA, 19 nt, Artificial Sequence
  Description of Artificial Sequence: Synthetic oligonucleotide
acuuagacgugauccucug

SEQ ID NO: 1671971 - RNA, 19 nt, Artificial Sequence
  Description of Artificial Sequence: Synthetic oligonucleotide
gcuagucauaguaaccugg

SEQ ID NO: 1671972 - RNA, 19 nt, Artificial Sequence
  Description of Artificial Sequence: Synthetic oligonucleotide
uccuuuguguugugaaggu

SEQ ID NO: 1671973 - RNA, 19 nt, Artificial Sequence
  Description of Artificial Sequence: Synthetic oligonucleotide
uaaacgcacaggcgaaguc

SEQ ID NO: 1671974 - RNA, 19 nt, Artificial Sequence
  Description of Artificial Sequence: Synthetic oligonucleotide
ucucugucaccagagauuu

SEQ ID NO: 1671975 - RNA, 19 nt, Artificial Sequence
  Description of Artificial Sequence: Synthetic oligonucleotide
uuugccgggcucuucucca

SEQ ID NO: 1671976 - RNA, 19 nt, Artificial Sequence
  Description of Artificial Sequence: Synthetic oligonucleotide
cucacugcaaguggacugg

SEQ ID NO: 1671977 - RNA, 19 nt, Artificial Sequence
  Description of Artificial Sequence: Synthetic oligonucleotide
agccuagucaagccaaccu

SEQ ID NO: 1671978 - RNA, 19 nt, Artificial Sequence
  Description of Artificial Sequence: Synthetic oligonucleotide
uaaaagcacuggauccaac

SEQ ID NO: 1671979 - RNA, 19 nt, Artificial Sequence
  Description of Artificial Sequence: Synthetic oligonucleotide
cuuuggauuucuacaauua

SEQ ID NO: 1671980 - RNA, 19 nt, Artificial Sequence
  Description of Artificial Sequence: Synthetic oligonucleotide
acucaaucccuaacuguac

SEQ ID NO: 1671981 - RNA, 19 nt, Artificial Sequence
  Description of Artificial Sequence: Synthetic oligonucleotide
ggugggaugguuaauugug

SEQ ID NO: 1671982 - RNA, 19 nt, Artificial Sequence
  Description of Artificial Sequence: Synthetic oligonucleotide
gacccugucucuuucucca

SEQ ID NO: 1671983 - RNA, 19 nt, Artificial Sequence
  Description of Artificial Sequence: Synthetic oligonucleotide
cgagauuugaugcuuauuc

SEQ ID NO: 1671984 - RNA, 19 nt, Artificial Sequence
  Description of Artificial Sequence: Synthetic oligonucleotide
gucuaagacagagucccag

SEQ ID NO: 1671985 - RNA, 19 nt, Artificial Sequence
  Description of Artificial Sequence: Synthetic oligonucleotide
agucgguugaccaccacug

SEQ ID NO: 1671986 - RNA, 19 nt, Artificial Sequence
  Description of Artificial Sequence: Synthetic oligonucleotide
ggagaggaacgguaaacgc

SEQ ID NO: 1671987 - RNA, 19 nt, Artificial Sequence
  Description of Artificial Sequence: Synthetic oligonucleotide
aacucacugcaaguggacu

SEQ ID NO: 1671988 - RNA, 19 nt, Artificial Sequence
  Description of Artificial Sequence: Synthetic oligonucleotide
caaguggacugguaagcug

SEQ ID NO: 1671989 - RNA, 19 nt, Artificial Sequence
  Description of Artificial Sequence: Synthetic oligonucleotide
aguuuuaagugagaagcua

SEQ ID NO: 1671990 - RNA, 19 nt, Artificial Sequence
  Description of Artificial Sequence: Synthetic oligonucleotide
agcugcacuccauggacug

SEQ ID NO: 1671991 - RNA, 19 nt, Artificial Sequence
  Description of Artificial Sequence: Synthetic oligonucleotide
ucaggaaucucuggacaug

SEQ ID NO: 1671992 - RNA, 19 nt, Artificial Sequence
  Description of Artificial Sequence: Synthetic oligonucleotide
aagguugauuggggcaggg

SEQ ID NO: 1671993 - RNA, 19 nt, Artificial Sequence
  Description of Artificial Sequence: Synthetic oligonucleotide
gugaagguugauuggggca

SEQ ID NO: 1671994 - RNA, 19 nt, Artificial Sequence
  Description of Artificial Sequence: Synthetic oligonucleotide
ccuaacuguaccugagagg

SEQ ID NO: 1671995 - RNA, 19 nt, Artificial Sequence
  Description of Artificial Sequence: Synthetic oligonucleotide
agggugggaugguuaauug

SEQ ID NO: 1671996 - RNA, 19 nt, Artificial Sequence
  Description of Artificial Sequence: Synthetic oligonucleotide
agguacuucugacccuguc

SEQ ID NO: 1671997 - RNA, 19 nt, Artificial Sequence
  Description of Artificial Sequence: Synthetic oligonucleotide
ccuagucaagccaaccugc

SEQ ID NO: 1671998 - RNA, 19 nt, Artificial Sequence
  Description of Artificial Sequence: Synthetic oligonucleotide
ucccuaacuguaccugaga

SEQ ID NO: 1671999 - RNA, 19 nt, Artificial Sequence
  Description of Artificial Sequence: Synthetic oligonucleotide
gggagaggaacgguaaacg

SEQ ID NO: 1672000 - RNA, 19 nt, Artificial Sequence
  Description of Artificial Sequence: Synthetic oligonucleotide
  modified_base (16)..(16): a, c, u, g, unknown or other
agacagaggaaaagcnggu

SEQ ID NO: 1672001 - RNA, 19 nt, Artificial Sequence
  Description of Artificial Sequence: Synthetic oligonucleotide
ucuuuucgugcugccuugg

SEQ ID NO: 1672002 - RNA, 19 nt, Artificial Sequence
  Description of Artificial Sequence: Synthetic oligonucleotide
uggauccaacaccaccaca

SEQ ID NO: 1672003 - RNA, 19 nt, Artificial Sequence
  Description of Artificial Sequence: Synthetic oligonucleotide
ucaguggcuuauguguaca

SEQ ID NO: 1672004 - RNA, 19 nt, Artificial Sequence
  Description of Artificial Sequence: Synthetic oligonucleotide
cuuuucgugcugccuuggg

SEQ ID NO: 1672005 - RNA, 19 nt, Artificial Sequence
  Description of Artificial Sequence: Synthetic oligonucleotide
uucuugaagggcgcuucag

SEQ ID NO: 1672006 - RNA, 19 nt, Artificial Sequence
  Description of Artificial Sequence: Synthetic oligonucleotide
aucuguaaaagcacuggau

SEQ ID NO: 1672007 - RNA, 19 nt, Artificial Sequence
  Description of Artificial Sequence: Synthetic oligonucleotide
uucagccacagccuuugua

SEQ ID NO: 1672008 - RNA, 19 nt, Artificial Sequence
  Description of Artificial Sequence: Synthetic oligonucleotide
uucgagauuugaugcuuau

SEQ ID NO: 1672009 - RNA, 19 nt, Artificial Sequence
  Description of Artificial Sequence: Synthetic oligonucleotide
gaagguugauuggggcagg

SEQ ID NO: 1672010 - RNA, 19 nt, Artificial Sequence
  Description of Artificial Sequence: Synthetic oligonucleotide
guaaccuggcugguugagg

SEQ ID NO: 1672011 - RNA, 19 nt, Artificial Sequence
  Description of Artificial Sequence: Synthetic oligonucleotide
aaccugcaggcaagaauuc

SEQ ID NO: 1672012 - RNA, 19 nt, Artificial Sequence
  Description of Artificial Sequence: Synthetic oligonucleotide
guuuugguuacuaccaacu

SEQ ID NO: 1672013 - RNA, 19 nt, Artificial Sequence
  Description of Artificial Sequence: Synthetic oligonucleotide
ugucuaagacagaguccca

SEQ ID NO: 1672014 - RNA, 19 nt, Artificial Sequence
  Description of Artificial Sequence: Synthetic oligonucleotide
ugucucggcugccagcauc

SEQ ID NO: 1672015 - RNA, 19 nt, Artificial Sequence
  Description of Artificial Sequence: Synthetic oligonucleotide
ugagccuagucaagccaac

SEQ ID NO: 1672016 - RNA, 19 nt, Artificial Sequence
  Description of Artificial Sequence: Synthetic oligonucleotide
caaucccuaacuguaccug

SEQ ID NO: 1672017 - RNA, 19 nt, Artificial Sequence
  Description of Artificial Sequence: Synthetic oligonucleotide
acggccaggacugucuaag

SEQ ID NO: 1672018 - RNA, 19 nt, Artificial Sequence
  Description of Artificial Sequence: Synthetic oligonucleotide
  modified_base (12)..(12): a, c, u, g, unknown or other
agaggaaaagcngguuuga

SEQ ID NO: 1672019 - RNA, 19 nt, Artificial Sequence
  Description of Artificial Sequence: Synthetic oligonucleotide
aagccaaccugcaggcaag

SEQ ID NO: 1672020 - RNA, 19 nt, Artificial Sequence
  Description of Artificial Sequence: Synthetic oligonucleotide
aggaugguugguucuucca

SEQ ID NO: 1672021 - RNA, 19 nt, Artificial Sequence
  Description of Artificial Sequence: Synthetic oligonucleotide
caacucacugcaaguggac

SEQ ID NO: 1672022 - RNA, 19 nt, Artificial Sequence
  Description of Artificial Sequence: Synthetic oligonucleotide
ucaguggcugagccuaguc

SEQ ID NO: 1672023 - RNA, 19 nt, Artificial Sequence
  Description of Artificial Sequence: Synthetic oligonucleotide
gccacagccuuuguaaacg

SEQ ID NO: 1672024 - RNA, 19 nt, Artificial Sequence
  Description of Artificial Sequence: Synthetic oligonucleotide
cucuuuucgugcugccuug

SEQ ID NO: 1672025 - RNA, 19 nt, Artificial Sequence
  Description of Artificial Sequence: Synthetic oligonucleotide
auacuacauauggugacau

SEQ ID NO: 1672026 - RNA, 19 nt, Artificial Sequence
  Description of Artificial Sequence: Synthetic oligonucleotide
aaacagaagucaggcuagu

SEQ ID NO: 1672027 - RNA, 19 nt, Artificial Sequence
  Description of Artificial Sequence: Synthetic oligonucleotide
uacuacauauggugacauc

SEQ ID NO: 1672028 - RNA, 19 nt, Artificial Sequence
  Description of Artificial Sequence: Synthetic oligonucleotide
uucgugcugccuuggggug

SEQ ID NO: 1672029 - RNA, 19 nt, Artificial Sequence
  Description of Artificial Sequence: Synthetic oligonucleotide
cauacuacauauggugaca

SEQ ID NO: 1672030 - RNA, 19 nt, Artificial Sequence
  Description of Artificial Sequence: Synthetic oligonucleotide
  modified_base (5)..(5): a, c, u, g, unknown or other
aagcngguuugaucccgga

SEQ ID NO: 1672031 - RNA, 19 nt, Artificial Sequence
  Description of Artificial Sequence: Synthetic oligonucleotide
uuggagacucaaucccuaa

SEQ ID NO: 1672032 - RNA, 19 nt, Artificial Sequence
  Description of Artificial Sequence: Synthetic oligonucleotide
ugcuccauccucugccaac

SEQ ID NO: 1672033 - RNA, 19 nt, Artificial Sequence
  Description of Artificial Sequence: Synthetic oligonucleotide
ucugacccugucucuuucu

SEQ ID NO: 1672034 - RNA, 19 nt, Artificial Sequence
  Description of Artificial Sequence: Synthetic oligonucleotide
aauccauguccgagugguc

SEQ ID NO: 1672035 - RNA, 19 nt, Artificial Sequence
  Description of Artificial Sequence: Synthetic oligonucleotide
ugguugguucuuccagcca

SEQ ID NO: 1672036 - RNA, 19 nt, Artificial Sequence
  Description of Artificial Sequence: Synthetic oligonucleotide
aguaaccuggcugguugag

SEQ ID NO: 1672037 - RNA, 19 nt, Artificial Sequence
  Description of Artificial Sequence: Synthetic oligonucleotide
ugucgggaauuguuuuggu

SEQ ID NO: 1672038 - RNA, 19 nt, Artificial Sequence
  Description of Artificial Sequence: Synthetic oligonucleotide
uucaggcauuccucaggcc

SEQ ID NO: 1672039 - RNA, 19 nt, Artificial Sequence
  Description of Artificial Sequence: Synthetic oligonucleotide
gagaggaacgguaaacgcu

SEQ ID NO: 1672040 - RNA, 19 nt, Artificial Sequence
  Description of Artificial Sequence: Synthetic oligonucleotide
cuguauguagcugcagauc

SEQ ID NO: 1672041 - RNA, 19 nt, Artificial Sequence
  Description of Artificial Sequence: Synthetic oligonucleotide
gaggaacgguaaacgcugg

SEQ ID NO: 1672042 - RNA, 19 nt, Artificial Sequence
  Description of Artificial Sequence: Synthetic oligonucleotide
aggaaucucuggacauggc

SEQ ID NO: 1672043 - RNA, 19 nt, Artificial Sequence
  Description of Artificial Sequence: Synthetic oligonucleotide
uucucuuuucgugcugccu

SEQ ID NO: 1672044 - RNA, 19 nt, Artificial Sequence
  Description of Artificial Sequence: Synthetic oligonucleotide
ggcgaagucagccagcucu

SEQ ID NO: 1672045 - RNA, 19 nt, Artificial Sequence
  Description of Artificial Sequence: Synthetic oligonucleotide
gagaagcuagagugcucug

SEQ ID NO: 1672046 - RNA, 19 nt, Artificial Sequence
  Description of Artificial Sequence: Synthetic oligonucleotide
acaggcgaagucagccagc

SEQ ID NO: 1672047 - RNA, 19 nt, Artificial Sequence
  Description of Artificial Sequence: Synthetic oligonucleotide
ggcaagaauucacucugac

SEQ ID NO: 1672048 - RNA, 19 nt, Artificial Sequence
  Description of Artificial Sequence: Synthetic oligonucleotide
ggccuguuuauuugaggag

SEQ ID NO: 1672049 - RNA, 19 nt, Artificial Sequence
  Description of Artificial Sequence: Synthetic oligonucleotide
gccuagucaagccaaccug

SEQ ID NO: 1672050 - RNA, 19 nt, Artificial Sequence
  Description of Artificial Sequence: Synthetic oligonucleotide
cuacaauuauuaaauccau

SEQ ID NO: 1672051 - RNA, 19 nt, Artificial Sequence
  Description of Artificial Sequence: Synthetic oligonucleotide
cccuaacuguaccugagag

SEQ ID NO: 1672052 - RNA, 19 nt, Artificial Sequence
  Description of Artificial Sequence: Synthetic oligonucleotide
cugccuugggguguuuucc

SEQ ID NO: 1672053 - RNA, 19 nt, Artificial Sequence
  Description of Artificial Sequence: Synthetic oligonucleotide
caagccaaccugcaggcaa

SEQ ID NO: 1672054 - RNA, 19 nt, Artificial Sequence
  Description of Artificial Sequence: Synthetic oligonucleotide
ggaacgguaaacgcuggug

SEQ ID NO: 1672055 - RNA, 19 nt, Artificial Sequence
  Description of Artificial Sequence: Synthetic oligonucleotide
caaccugcaggcaagaauu

SEQ ID NO: 1672056 - RNA, 19 nt, Artificial Sequence
  Description of Artificial Sequence: Synthetic oligonucleotide
ggcugguugaggcagcuca

SEQ ID NO: 1672057 - RNA, 19 nt, Artificial Sequence
  Description of Artificial Sequence: Synthetic oligonucleotide
ugcuuauucuuuggauuuc

SEQ ID NO: 1672058 - RNA, 19 nt, Artificial Sequence
  Description of Artificial Sequence: Synthetic oligonucleotide
gagccuagucaagccaacc

SEQ ID NO: 1672059 - RNA, 19 nt, Artificial Sequence
  Description of Artificial Sequence: Synthetic oligonucleotide
aagggcgcuucagccacag

SEQ ID NO: 1672060 - RNA, 19 nt, Artificial Sequence
  Description of Artificial Sequence: Synthetic oligonucleotide
aucccuaacuguaccugag

SEQ ID NO: 1672061 - RNA, 19 nt, Artificial Sequence
  Description of Artificial Sequence: Synthetic oligonucleotide
acgugauccucugagccga

SEQ ID NO: 1672062 - RNA, 19 nt, Artificial Sequence
  Description of Artificial Sequence: Synthetic oligonucleotide
acuucgagauuugaugcuu

SEQ ID NO: 1672063 - RNA, 19 nt, Artificial Sequence
  Description of Artificial Sequence: Synthetic oligonucleotide
gacuucgagauuugaugcu

SEQ ID NO: 1672064 - RNA, 19 nt, Artificial Sequence
  Description of Artificial Sequence: Synthetic oligonucleotide
gguuugaucccggagcuuc

SEQ ID NO: 1672065 - RNA, 19 nt, Artificial Sequence
  Description of Artificial Sequence: Synthetic oligonucleotide
caggcauuccucaggccuc

SEQ ID NO: 1672066 - RNA, 19 nt, Artificial Sequence
  Description of Artificial Sequence: Synthetic oligonucleotide
cuugucucggcugccagca

SEQ ID NO: 1672067 - RNA, 19 nt, Artificial Sequence
  Description of Artificial Sequence: Synthetic oligonucleotide
aggaacgguaaacgcuggu

SEQ ID NO: 1672068 - RNA, 19 nt, Artificial Sequence
  Description of Artificial Sequence: Synthetic oligonucleotide
ucauaguaaccuggcuggu

SEQ ID NO: 1672069 - RNA, 19 nt, Artificial Sequence
  Description of Artificial Sequence: Synthetic oligonucleotide
ggagacucaaucccuaacu

SEQ ID NO: 1672070 - RNA, 19 nt, Artificial Sequence
  Description of Artificial Sequence: Synthetic oligonucleotide
gguaagcuggaagcugacg

SEQ ID NO: 1672071 - RNA, 19 nt, Artificial Sequence
  Description of Artificial Sequence: Synthetic oligonucleotide
cugagccuagucaagccaa

SEQ ID NO: 1672072 - RNA, 19 nt, Artificial Sequence
  Description of Artificial Sequence: Synthetic oligonucleotide
ggauuucuacaauuauuaa

SEQ ID NO: 1672073 - RNA, 19 nt, Artificial Sequence
  Description of Artificial Sequence: Synthetic oligonucleotide
cggagcuucuugaagggcg

SEQ ID NO: 1672074 - RNA, 19 nt, Artificial Sequence
  Description of Artificial Sequence: Synthetic oligonucleotide
gucgguugaccaccacugc

SEQ ID NO: 1672075 - RNA, 19 nt, Artificial Sequence
  Description of Artificial Sequence: Synthetic oligonucleotide
gggaugguuaauugugguc

SEQ ID NO: 1672076 - RNA, 19 nt, Artificial Sequence
  Description of Artificial Sequence: Synthetic oligonucleotide
cuccuccuccaagugauac

SEQ ID NO: 1672077 - RNA, 19 nt, Artificial Sequence
  Description of Artificial Sequence: Synthetic oligonucleotide
aguggcuuauguguacaaa

SEQ ID NO: 1672078 - RNA, 19 nt, Artificial Sequence
  Description of Artificial Sequence: Synthetic oligonucleotide
ggcauuguggagaggaaca

SEQ ID NO: 1672079 - RNA, 19 nt, Artificial Sequence
  Description of Artificial Sequence: Synthetic oligonucleotide
gucuacccuggacaucaug

SEQ ID NO: 1672080 - RNA, 19 nt, Artificial Sequence
  Description of Artificial Sequence: Synthetic oligonucleotide
cagccuuuguaaacgcaca

SEQ ID NO: 1672081 - RNA, 19 nt, Artificial Sequence
  Description of Artificial Sequence: Synthetic oligonucleotide
agauccaccaaugccucuu

SEQ ID NO: 1672082 - RNA, 19 nt, Artificial Sequence
  Description of Artificial Sequence: Synthetic oligonucleotide
cugacccugucucuuucuc

SEQ ID NO: 1672083 - RNA, 19 nt, Artificial Sequence
  Description of Artificial Sequence: Synthetic oligonucleotide
uacuaccaacucacugcaa

SEQ ID NO: 1672084 - RNA, 19 nt, Artificial Sequence
  Description of Artificial Sequence: Synthetic oligonucleotide
gaucccggagcuucuugaa

SEQ ID NO: 1672085 - RNA, 19 nt, Artificial Sequence
  Description of Artificial Sequence: Synthetic oligonucleotide
uaacuguaccugagaggua

SEQ ID NO: 1672086 - RNA, 19 nt, Artificial Sequence
  Description of Artificial Sequence: Synthetic oligonucleotide
caguuuuaagugagaagcu

SEQ ID NO: 1672087 - RNA, 19 nt, Artificial Sequence
  Description of Artificial Sequence: Synthetic oligonucleotide
gacagagucccagucauuu

SEQ ID NO: 1672088 - RNA, 19 nt, Artificial Sequence
  Description of Artificial Sequence: Synthetic oligonucleotide
cuugcuugucucggcugcc

SEQ ID NO: 1672089 - RNA, 19 nt, Artificial Sequence
  Description of Artificial Sequence: Synthetic oligonucleotide
gugauacuuugaggcacag

SEQ ID NO: 1672090 - RNA, 19 nt, Artificial Sequence
  Description of Artificial Sequence: Synthetic oligonucleotide
cuuguauuguuuugaugau

SEQ ID NO: 1672091 - RNA, 19 nt, Artificial Sequence
  Description of Artificial Sequence: Synthetic oligonucleotide
gguacuucugacccugucu

SEQ ID NO: 1672092 - RNA, 19 nt, Artificial Sequence
  Description of Artificial Sequence: Synthetic oligonucleotide
gaauucacucugacuucga

SEQ ID NO: 1672093 - RNA, 19 nt, Artificial Sequence
  Description of Artificial Sequence: Synthetic oligonucleotide
ucagucgguugaccaccac

SEQ ID NO: 1672094 - RNA, 19 nt, Artificial Sequence
  Description of Artificial Sequence: Synthetic oligonucleotide
acccugucucuuucuccag

SEQ ID NO: 1672095 - RNA, 19 nt, Artificial Sequence
  Description of Artificial Sequence: Synthetic oligonucleotide
ggagcuggccuccaccuuc

SEQ ID NO: 1672096 - RNA, 19 nt, Artificial Sequence
  Description of Artificial Sequence: Synthetic oligonucleotide
ucaagccaaccugcaggca

SEQ ID NO: 1672097 - RNA, 19 nt, Artificial Sequence
  Description of Artificial Sequence: Synthetic oligonucleotide
cuagacucuugucucuucu

SEQ ID NO: 1672098 - RNA, 19 nt, Artificial Sequence
  Description of Artificial Sequence: Synthetic oligonucleotide
cugauugugcuugguucuc

SEQ ID NO: 1672099 - RNA, 19 nt, Artificial Sequence
  Description of Artificial Sequence: Synthetic oligonucleotide
cuucgagauuugaugcuua

SEQ ID NO: 1672100 - RNA, 19 nt, Artificial Sequence
  Description of Artificial Sequence: Synthetic oligonucleotide
ugacggccaggacugucua

SEQ ID NO: 1672101 - RNA, 19 nt, Artificial Sequence
  Description of Artificial Sequence: Synthetic oligonucleotide
cuuagacgugauccucuga

SEQ ID NO: 1672102 - RNA, 19 nt, Artificial Sequence
  Description of Artificial Sequence: Synthetic oligonucleotide
cauuugccgggcucuucuc

SEQ ID NO: 1672103 - RNA, 19 nt, Artificial Sequence
  Description of Artificial Sequence: Synthetic oligonucleotide
gcugagccuagucaagcca

SEQ ID NO: 1672104 - RNA, 19 nt, Artificial Sequence
  Description of Artificial Sequence: Synthetic oligonucleotide
cuacauauggugacaucau

SEQ ID NO: 1672105 - RNA, 19 nt, Artificial Sequence
  Description of Artificial Sequence: Synthetic oligonucleotide
ggaauuguuuugguuacua

SEQ ID NO: 1672106 - RNA, 19 nt, Artificial Sequence
  Description of Artificial Sequence: Synthetic oligonucleotide
auguccgaguggucugccu

SEQ ID NO: 1672107 - RNA, 19 nt, Artificial Sequence
  Description of Artificial Sequence: Synthetic oligonucleotide
ggagcuucuugaagggcgc

SEQ ID NO: 1672108 - RNA, 19 nt, Artificial Sequence
  Description of Artificial Sequence: Synthetic oligonucleotide
  modified_base (2)..(2): a, c, u, g, unknown or other
cngguuugaucccggagcu

SEQ ID NO: 1672109 - RNA, 19 nt, Artificial Sequence
  Description of Artificial Sequence: Synthetic oligonucleotide
gugauccucugagccgagg

SEQ ID NO: 1672110 - RNA, 19 nt, Artificial Sequence
  Description of Artificial Sequence: Synthetic oligonucleotide
caucaugagccuugugcua

SEQ ID NO: 1672111 - RNA, 19 nt, Artificial Sequence
  Description of Artificial Sequence: Synthetic oligonucleotide
cauguccgaguggucugcc

SEQ ID NO: 1672112 - RNA, 19 nt, Artificial Sequence
  Description of Artificial Sequence: Synthetic oligonucleotide
cuagagugcucugggcuca

SEQ ID NO: 1672113 - RNA, 19 nt, Artificial Sequence
  Description of Artificial Sequence: Synthetic oligonucleotide
agccgaggggacaaauaca

SEQ ID NO: 1672114 - RNA, 19 nt, Artificial Sequence
  Description of Artificial Sequence: Synthetic oligonucleotide
ccgaaacaguuuuaaguga

SEQ ID NO: 1672115 - RNA, 19 nt, Artificial Sequence
  Description of Artificial Sequence: Synthetic oligonucleotide
caugagccuugugcuagac

SEQ ID NO: 1672116 - RNA, 19 nt, Artificial Sequence
  Description of Artificial Sequence: Synthetic oligonucleotide
gagagguacuucugacccu

SEQ ID NO: 1672117 - RNA, 19 nt, Artificial Sequence
  Description of Artificial Sequence: Synthetic oligonucleotide
caugucuacccuggacauc

SEQ ID NO: 1672118 - RNA, 19 nt, Artificial Sequence
  Description of Artificial Sequence: Synthetic oligonucleotide
cacaugguccacuuguauu

SEQ ID NO: 1672119 - RNA, 19 nt, Artificial Sequence
  Description of Artificial Sequence: Synthetic oligonucleotide
caucccugagagccucuuc

SEQ ID NO: 1672120 - RNA, 19 nt, Artificial Sequence
  Description of Artificial Sequence: Synthetic oligonucleotide
cugcacuccauggacugca

SEQ ID NO: 1672121 - RNA, 19 nt, Artificial Sequence
  Description of Artificial Sequence: Synthetic oligonucleotide
gagccucuucucuggaccu

SEQ ID NO: 1672122 - RNA, 19 nt, Artificial Sequence
  Description of Artificial Sequence: Synthetic oligonucleotide
guaaacgcacaggcgaagu

SEQ ID NO: 1672123 - RNA, 19 nt, Artificial Sequence
  Description of Artificial Sequence: Synthetic oligonucleotide
acgcacaggcgaagucagc

SEQ ID NO: 1672124 - RNA, 19 nt, Artificial Sequence
  Description of Artificial Sequence: Synthetic oligonucleotide
cgaggggacaaauacaucu

SEQ ID NO: 1672125 - RNA, 19 nt, Artificial Sequence
  Description of Artificial Sequence: Synthetic oligonucleotide
cugcaggcaagaauucacu

SEQ ID NO: 1672126 - RNA, 19 nt, Artificial Sequence
  Description of Artificial Sequence: Synthetic oligonucleotide
agguugauuggggcagggu

SEQ ID NO: 1672127 - RNA, 19 nt, Artificial Sequence
  Description of Artificial Sequence: Synthetic oligonucleotide
acucugacuucgagauuug

SEQ ID NO: 1672128 - RNA, 19 nt, Artificial Sequence
  Description of Artificial Sequence: Synthetic oligonucleotide
acaaugugcuucaggcauu

SEQ ID NO: 1672129 - RNA, 19 nt, Artificial Sequence
  Description of Artificial Sequence: Synthetic oligonucleotide
ucgugcugccuuggggugu

SEQ ID NO: 1672130 - RNA, 19 nt, Artificial Sequence
  Description of Artificial Sequence: Synthetic oligonucleotide
  modified_base (11)..(11): a, c, u, g, unknown or other
gaggaaaagcngguuugau

SEQ ID NO: 1672131 - RNA, 19 nt, Artificial Sequence
  Description of Artificial Sequence: Synthetic oligonucleotide
accauccgagccugggcuu

SEQ ID NO: 1672132 - RNA, 19 nt, Artificial Sequence
  Description of Artificial Sequence: Synthetic oligonucleotide
gugagaagcuagagugcuc

SEQ ID NO: 1672133 - RNA, 19 nt, Artificial Sequence
  Description of Artificial Sequence: Synthetic oligonucleotide
uccgaguggucugccuuuc

SEQ ID NO: 1672134 - RNA, 19 nt, Artificial Sequence
  Description of Artificial Sequence: Synthetic oligonucleotide
uugccgggcucuucuccaa

SEQ ID NO: 1672135 - RNA, 19 nt, Artificial Sequence
  Description of Artificial Sequence: Synthetic oligonucleotide
ugucuacccuggacaucau

SEQ ID NO: 1672136 - RNA, 19 nt, Artificial Sequence
  Description of Artificial Sequence: Synthetic oligonucleotide
agccuugugcuagacucuu

SEQ ID NO: 1672137 - RNA, 19 nt, Artificial Sequence
  Description of Artificial Sequence: Synthetic oligonucleotide
caccauccgagccugggcu

SEQ ID NO: 1672138 - RNA, 19 nt, Artificial Sequence
  Description of Artificial Sequence: Synthetic oligonucleotide
cugacggccaggacugucu

SEQ ID NO: 1672139 - RNA, 19 nt, Artificial Sequence
  Description of Artificial Sequence: Synthetic oligonucleotide
ucugggcuuucagucgguu

SEQ ID NO: 1672140 - RNA, 19 nt, Artificial Sequence
  Description of Artificial Sequence: Synthetic oligonucleotide
gucgggaauuguuuugguu

SEQ ID NO: 1672141 - RNA, 19 nt, Artificial Sequence
  Description of Artificial Sequence: Synthetic oligonucleotide
gcugccuugggguguuuuc

SEQ ID NO: 1672142 - RNA, 19 nt, Artificial Sequence
  Description of Artificial Sequence: Synthetic oligonucleotide
gcuagacucuugucucuuc

SEQ ID NO: 1672143 - RNA, 19 nt, Artificial Sequence
  Description of Artificial Sequence: Synthetic oligonucleotide
cagucgguugaccaccacu

SEQ ID NO: 1672144 - RNA, 19 nt, Artificial Sequence
  Description of Artificial Sequence: Synthetic oligonucleotide
caguggcuuauguguacaa

SEQ ID NO: 1672145 - RNA, 19 nt, Artificial Sequence
  Description of Artificial Sequence: Synthetic oligonucleotide
ccagucauuugccgggcuc

SEQ ID NO: 1672146 - RNA, 19 nt, Artificial Sequence
  Description of Artificial Sequence: Synthetic oligonucleotide
cgguaaacgcugguggagg

SEQ ID NO: 1672147 - RNA, 19 nt, Artificial Sequence
  Description of Artificial Sequence: Synthetic oligonucleotide
gaggggacaaauacaucuu

SEQ ID NO: 1672148 - RNA, 19 nt, Artificial Sequence
  Description of Artificial Sequence: Synthetic oligonucleotide
ccuccaagugauacuuuga

SEQ ID NO: 1672149 - RNA, 19 nt, Artificial Sequence
  Description of Artificial Sequence: Synthetic oligonucleotide
ggacugcagugcucccagg

SEQ ID NO: 1672150 - RNA, 19 nt, Artificial Sequence
  Description of Artificial Sequence: Synthetic oligonucleotide
gguaaacgcugguggaggu

SEQ ID NO: 1672151 - RNA, 19 nt, Artificial Sequence
  Description of Artificial Sequence: Synthetic oligonucleotide
augauccgaaacaguuuua

SEQ ID NO: 1672152 - RNA, 19 nt, Artificial Sequence
  Description of Artificial Sequence: Synthetic oligonucleotide
cucugacuucgagauuuga

SEQ ID NO: 1672153 - RNA, 19 nt, Artificial Sequence
  Description of Artificial Sequence: Synthetic oligonucleotide
gucauuugccgggcucuuc

SEQ ID NO: 1672154 - RNA, 19 nt, Artificial Sequence
  Description of Artificial Sequence: Synthetic oligonucleotide
guaaacgcugguggaggua

SEQ ID NO: 1672155 - RNA, 19 nt, Artificial Sequence
  Description of Artificial Sequence: Synthetic oligonucleotide
ucugagccgaggggacaaa

SEQ ID NO: 1672156 - RNA, 19 nt, Artificial Sequence
  Description of Artificial Sequence: Synthetic oligonucleotide
ggcuuucagucgguugacc

SEQ ID NO: 1672157 - RNA, 19 nt, Artificial Sequence
  Description of Artificial Sequence: Synthetic oligonucleotide
gggugggaugguuaauugu

SEQ ID NO: 1672158 - RNA, 19 nt, Artificial Sequence
  Description of Artificial Sequence: Synthetic oligonucleotide
agucauuugccgggcucuu

SEQ ID NO: 1672159 - RNA, 19 nt, Artificial Sequence
  Description of Artificial Sequence: Synthetic oligonucleotide
gguccauggcaucugguuu

SEQ ID NO: 1672160 - RNA, 19 nt, Artificial Sequence
  Description of Artificial Sequence: Synthetic oligonucleotide
gguccacuuguauuguuuu

SEQ ID NO: 1672161 - RNA, 19 nt, Artificial Sequence
  Description of Artificial Sequence: Synthetic oligonucleotide
ggaugucgggaauuguuuu

SEQ ID NO: 1672162 - RNA, 19 nt, Artificial Sequence
  Description of Artificial Sequence: Synthetic oligonucleotide
cucugagccgaggggacaa

SEQ ID NO: 1672163 - RNA, 19 nt, Artificial Sequence
  Description of Artificial Sequence: Synthetic oligonucleotide
cagucauuugccgggcucu

SEQ ID NO: 1672164 - RNA, 19 nt, Artificial Sequence
  Description of Artificial Sequence: Synthetic oligonucleotide
ccagagauuuggagacuca

SEQ ID NO: 1672165 - RNA, 19 nt, Artificial Sequence
  Description of Artificial Sequence: Synthetic oligonucleotide
gagcaauaccaggaugguu

SEQ ID NO: 1672166 - RNA, 19 nt, Artificial Sequence
  Description of Artificial Sequence: Synthetic oligonucleotide
gccgaggggacaaauacau

SEQ ID NO: 1672167 - RNA, 19 nt, Artificial Sequence
  Description of Artificial Sequence: Synthetic oligonucleotide
cuccaccuuccaucuguaa

SEQ ID NO: 1672168 - RNA, 19 nt, Artificial Sequence
  Description of Artificial Sequence: Synthetic oligonucleotide
caugguccacuuguauugu

SEQ ID NO: 1672169 - RNA, 19 nt, Artificial Sequence
  Description of Artificial Sequence: Synthetic oligonucleotide
cagcugcacuccauggacu

SEQ ID NO: 1672170 - RNA, 19 nt, Artificial Sequence
  Description of Artificial Sequence: Synthetic oligonucleotide
gagggaugucgggaauugu

SEQ ID NO: 1672171 - RNA, 19 nt, Artificial Sequence
  Description of Artificial Sequence: Synthetic oligonucleotide
ccgaggggacaaauacauc

SEQ ID NO: 1672172 - RNA, 19 nt, Artificial Sequence
  Description of Artificial Sequence: Synthetic oligonucleotide
gaagggcgcuucagccaca

SEQ ID NO: 1672173 - RNA, 19 nt, Artificial Sequence
  Description of Artificial Sequence: Synthetic oligonucleotide
caggcgaagucagccagcu

SEQ ID NO: 1672174 - RNA, 19 nt, Artificial Sequence
  Description of Artificial Sequence: Synthetic oligonucleotide
cagggugggaugguuaauu

SEQ ID NO: 1672175 - RNA, 19 nt, Artificial Sequence
  Description of Artificial Sequence: Synthetic oligonucleotide
ggcaucugguuugcaggga

SEQ ID NO: 1672176 - RNA, 19 nt, Artificial Sequence
  Description of Artificial Sequence: Synthetic oligonucleotide
gggaugucgggaauuguuu

SEQ ID NO: 1672177 - RNA, 19 nt, Artificial Sequence
  Description of Artificial Sequence: Synthetic oligonucleotide
guccgaguggucugccuuu

SEQ ID NO: 1672178 - RNA, 19 nt, Artificial Sequence
  Description of Artificial Sequence: Synthetic oligonucleotide
cucggcugccagcaucccu

SEQ ID NO: 1672179 - RNA, 19 nt, Artificial Sequence
  Description of Artificial Sequence: Synthetic oligonucleotide
gcugacggccaggacuguc

SEQ ID NO: 1672180 - RNA, 19 nt, Artificial Sequence
  Description of Artificial Sequence: Synthetic oligonucleotide
gccuugugcuagacucuug

SEQ ID NO: 1672181 - RNA, 19 nt, Artificial Sequence
  Description of Artificial Sequence: Synthetic oligonucleotide
ccaugucuacccuggacau

SEQ ID NO: 1672182 - RNA, 19 nt, Artificial Sequence
  Description of Artificial Sequence: Synthetic oligonucleotide
ccaaggcauuguggagagg

SEQ ID NO: 1672183 - RNA, 19 nt, Artificial Sequence
  Description of Artificial Sequence: Synthetic oligonucleotide
cuggcugguugaggcagcu

SEQ ID NO: 1672184 - RNA, 19 nt, Artificial Sequence
  Description of Artificial Sequence: Synthetic oligonucleotide
cugagccgaggggacaaau

SEQ ID NO: 1672185 - RNA, 19 nt, Artificial Sequence
  Description of Artificial Sequence: Synthetic oligonucleotide
ggcauuccucaggccucug

SEQ ID NO: 1672186 - RNA, 19 nt, Artificial Sequence
  Description of Artificial Sequence: Synthetic oligonucleotide
ccucugagccgaggggaca

SEQ ID NO: 1672187 - RNA, 19 nt, Artificial Sequence
  Description of Artificial Sequence: Synthetic oligonucleotide
gcgcuucagccacagccuu

SEQ ID NO: 1672188 - RNA, 19 nt, Artificial Sequence
  Description of Artificial Sequence: Synthetic oligonucleotide
cccagucauuugccgggcu

SEQ ID NO: 1672189 - RNA, 19 nt, Artificial Sequence
  Description of Artificial Sequence: Synthetic oligonucleotide
ccuggacaucaugagccuu

SEQ ID NO: 1672190 - RNA, 19 nt, Artificial Sequence
  Description of Artificial Sequence: Synthetic oligonucleotide
ccgaguggucugccuuucu

SEQ ID NO: 1672191 - RNA, 19 nt, Artificial Sequence
  Description of Artificial Sequence: Synthetic oligonucleotide
ccucaggccucugggcuuu

SEQ ID NO: 1672192 - RNA, 19 nt, Artificial Sequence
  Description of Artificial Sequence: Synthetic oligonucleotide
  modified_base (1)..(1): a, c, u, g, unknown or other
ngguuugaucccggagcuu

SEQ ID NO: 1672193 - RNA, 19 nt, Artificial Sequence
  Description of Artificial Sequence: Synthetic oligonucleotide
aacaauaucaacauaaagc

SEQ ID NO: 1672194 - RNA, 19 nt, Artificial Sequence
  Description of Artificial Sequence: Synthetic oligonucleotide
ucuauaauaauuaaggagu

SEQ ID NO: 1672195 - RNA, 19 nt, Artificial Sequence
  Description of Artificial Sequence: Synthetic oligonucleotide
aaacucuggagucagagcc

SEQ ID NO: 1672196 - RNA, 19 nt, Artificial Sequence
  Description of Artificial Sequence: Synthetic oligonucleotide
aauacagugauuaugaaug

SEQ ID NO: 1672197 - RNA, 19 nt, Artificial Sequence
  Description of Artificial Sequence: Synthetic oligonucleotide
aauaauuuaaaggacacca

SEQ ID NO: 1672198 - RNA, 19 nt, Artificial Sequence
  Description of Artificial Sequence: Synthetic oligonucleotide
uguacaagaaaauacaggu

SEQ ID NO: 1672199 - RNA, 19 nt, Artificial Sequence
  Description of Artificial Sequence: Synthetic oligonucleotide
auuauuaaaguguucugac

SEQ ID NO: 1672200 - RNA, 19 nt, Artificial Sequence
  Description of Artificial Sequence: Synthetic oligonucleotide
aagucuaaggucuugccgg

SEQ ID NO: 1672201 - RNA, 19 nt, Artificial Sequence
  Description of Artificial Sequence: Synthetic oligonucleotide
auuucuacauuccaaacuc

SEQ ID NO: 1672202 - RNA, 19 nt, Artificial Sequence
  Description of Artificial Sequence: Synthetic oligonucleotide
aauuacauuucugucaggg

SEQ ID NO: 1672203 - RNA, 19 nt, Artificial Sequence
  Description of Artificial Sequence: Synthetic oligonucleotide
uuuagccugaaacaagucg

SEQ ID NO: 1672204 - RNA, 19 nt, Artificial Sequence
  Description of Artificial Sequence: Synthetic oligonucleotide
aauaucaacauaaagcacu

SEQ ID NO: 1672205 - RNA, 19 nt, Artificial Sequence
  Description of Artificial Sequence: Synthetic oligonucleotide
uguuaugcuacaaacuuag

SEQ ID NO: 1672206 - RNA, 19 nt, Artificial Sequence
  Description of Artificial Sequence: Synthetic oligonucleotide
aguuuguuaugcuacaaac

SEQ ID NO: 1672207 - RNA, 19 nt, Artificial Sequence
  Description of Artificial Sequence: Synthetic oligonucleotide
uaugcuacaaacuuagaca

SEQ ID NO: 1672208 - RNA, 19 nt, Artificial Sequence
  Description of Artificial Sequence: Synthetic oligonucleotide
auauaaaauauacaaggug

SEQ ID NO: 1672209 - RNA, 19 nt, Artificial Sequence
  Description of Artificial Sequence: Synthetic oligonucleotide
auuuuaaagucucugcagg

SEQ ID NO: 1672210 - RNA, 19 nt, Artificial Sequence
  Description of Artificial Sequence: Synthetic oligonucleotide
ugcauaaacacacaaguac

SEQ ID NO: 1672211 - RNA, 19 nt, Artificial Sequence
  Description of Artificial Sequence: Synthetic oligonucleotide
aaagucuaaggucuugccg

SEQ ID NO: 1672212 - RNA, 19 nt, Artificial Sequence
  Description of Artificial Sequence: Synthetic oligonucleotide
aacuugucuaaugaggagc

SEQ ID NO: 1672213 - RNA, 19 nt, Artificial Sequence
  Description of Artificial Sequence: Synthetic oligonucleotide
ugcauauaaaauauacaag

SEQ ID NO: 1672214 - RNA, 19 nt, Artificial Sequence
  Description of Artificial Sequence: Synthetic oligonucleotide
aguuauggaauuuuacagg

SEQ ID NO: 1672215 - RNA, 19 nt, Artificial Sequence
  Description of Artificial Sequence: Synthetic oligonucleotide
aagguguucuuucaaauug

SEQ ID NO: 1672216 - RNA, 19 nt, Artificial Sequence
  Description of Artificial Sequence: Synthetic oligonucleotide
aauaaguuaacuugucuaa

SEQ ID NO: 1672217 - RNA, 19 nt, Artificial Sequence
  Description of Artificial Sequence: Synthetic oligonucleotide
uuaacuugucuaaugagga

SEQ ID NO: 1672218 - RNA, 19 nt, Artificial Sequence
  Description of Artificial Sequence: Synthetic oligonucleotide
uaaaggacaccauuuacag

SEQ ID NO: 1672219 - RNA, 19 nt, Artificial Sequence
  Description of Artificial Sequence: Synthetic oligonucleotide
gauuccuuuagccugaaac

SEQ ID NO: 1672220 - RNA, 19 nt, Artificial Sequence
  Description of Artificial Sequence: Synthetic oligonucleotide
aaggacaccauuuacagua

SEQ ID NO: 1672221 - RNA, 19 nt, Artificial Sequence
  Description of Artificial Sequence: Synthetic oligonucleotide
uuaugcuacaaacuuagac

SEQ ID NO: 1672222 - RNA, 19 nt, Artificial Sequence
  Description of Artificial Sequence: Synthetic oligonucleotide
aaaauacagguuuuagucu

SEQ ID NO: 1672223 - RNA, 19 nt, Artificial Sequence
  Description of Artificial Sequence: Synthetic oligonucleotide
auuaugaaugugcugugac

SEQ ID NO: 1672224 - RNA, 19 nt, Artificial Sequence
  Description of Artificial Sequence: Synthetic oligonucleotide
uuuguuaugcuacaaacuu

SEQ ID NO: 1672225 - RNA, 19 nt, Artificial Sequence
  Description of Artificial Sequence: Synthetic oligonucleotide
uuuagcuuuguacauguac

SEQ ID NO: 1672226 - RNA, 19 nt, Artificial Sequence
  Description of Artificial Sequence: Synthetic oligonucleotide
agaugcauauaaaauauac

SEQ ID NO: 1672227 - RNA, 19 nt, Artificial Sequence
  Description of Artificial Sequence: Synthetic oligonucleotide
uguacauguacucugguau

SEQ ID NO: 1672228 - RNA, 19 nt, Artificial Sequence
  Description of Artificial Sequence: Synthetic oligonucleotide
uuugagacguuauugaaaa

SEQ ID NO: 1672229 - RNA, 19 nt, Artificial Sequence
  Description of Artificial Sequence: Synthetic oligonucleotide
uaugcagugucuauaauaa

SEQ ID NO: 1672230 - RNA, 19 nt, Artificial Sequence
  Description of Artificial Sequence: Synthetic oligonucleotide
uaaacacacaaguacaacu

SEQ ID NO: 1672231 - RNA, 19 nt, Artificial Sequence
  Description of Artificial Sequence: Synthetic oligonucleotide
aguuucgaaaauaaaaguc

SEQ ID NO: 1672232 - RNA, 19 nt, Artificial Sequence
  Description of Artificial Sequence: Synthetic oligonucleotide
guauauugcauguuuuggg

SEQ ID NO: 1672233 - RNA, 19 nt, Artificial Sequence
  Description of Artificial Sequence: Synthetic oligonucleotide
acagugauuaugaaugugc

SEQ ID NO: 1672234 - RNA, 19 nt, Artificial Sequence
  Description of Artificial Sequence: Synthetic oligonucleotide
uuagccugaaacaagucga

SEQ ID NO: 1672235 - RNA, 19 nt, Artificial Sequence
  Description of Artificial Sequence: Synthetic oligonucleotide
aagcuaagcaauucauuuc

SEQ ID NO: 1672236 - RNA, 19 nt, Artificial Sequence
  Description of Artificial Sequence: Synthetic oligonucleotide
guuaacuugucuaaugagg

SEQ ID NO: 1672237 - RNA, 19 nt, Artificial Sequence
  Description of Artificial Sequence: Synthetic oligonucleotide
augcuacaaacuuagacag

SEQ ID NO: 1672238 - RNA, 19 nt, Artificial Sequence
  Description of Artificial Sequence: Synthetic oligonucleotide
uauggaauuuuacaggaaa

SEQ ID NO: 1672239 - RNA, 19 nt, Artificial Sequence
  Description of Artificial Sequence: Synthetic oligonucleotide
uuagaucuaauaaaauaaa

SEQ ID NO: 1672240 - RNA, 19 nt, Artificial Sequence
  Description of Artificial Sequence: Synthetic oligonucleotide
ugggacuacauucauuucc

SEQ ID NO: 1672241 - RNA, 19 nt, Artificial Sequence
  Description of Artificial Sequence: Synthetic oligonucleotide
ucgauuaaugcacuugagc

SEQ ID NO: 1672242 - RNA, 19 nt, Artificial Sequence
  Description of Artificial Sequence: Synthetic oligonucleotide
uuuaaaggacaccauuuac

SEQ ID NO: 1672243 - RNA, 19 nt, Artificial Sequence
  Description of Artificial Sequence: Synthetic oligonucleotide
uauauugcauguuuuggga

SEQ ID NO: 1672244 - RNA, 19 nt, Artificial Sequence
  Description of Artificial Sequence: Synthetic oligonucleotide
caguuauggaauuuuacag

SEQ ID NO: 1672245 - RNA, 19 nt, Artificial Sequence
  Description of Artificial Sequence: Synthetic oligonucleotide
uuaaggaguaaaauaaguu

SEQ ID NO: 1672246 - RNA, 19 nt, Artificial Sequence
  Description of Artificial Sequence: Synthetic oligonucleotide
ugaguuuccaacugacagg

SEQ ID NO: 1672247 - RNA, 19 nt, Artificial Sequence
  Description of Artificial Sequence: Synthetic oligonucleotide
aauuaaggaguaaaauaag

SEQ ID NO: 1672248 - RNA, 19 nt, Artificial Sequence
  Description of Artificial Sequence: Synthetic oligonucleotide
acacaaguacaacuuuucc

SEQ ID NO: 1672249 - RNA, 19 nt, Artificial Sequence
  Description of Artificial Sequence: Synthetic oligonucleotide
uuacacacuaugaagaguu

SEQ ID NO: 1672250 - RNA, 19 nt, Artificial Sequence
  Description of Artificial Sequence: Synthetic oligonucleotide
aguuagaucuaauaaaaua

SEQ ID NO: 1672251 - RNA, 19 nt, Artificial Sequence
  Description of Artificial Sequence: Synthetic oligonucleotide
gaagaguuagaucuaauaa

SEQ ID NO: 1672252 - RNA, 19 nt, Artificial Sequence
  Description of Artificial Sequence: Synthetic oligonucleotide
uaccagaacaccauuaaaa

SEQ ID NO: 1672253 - RNA, 19 nt, Artificial Sequence
  Description of Artificial Sequence: Synthetic oligonucleotide
aacaccauuaaaauaauuu

SEQ ID NO: 1672254 - RNA, 19 nt, Artificial Sequence
  Description of Artificial Sequence: Synthetic oligonucleotide
aguauauugcauguuuugg

SEQ ID NO: 1672255 - RNA, 19 nt, Artificial Sequence
  Description of Artificial Sequence: Synthetic oligonucleotide
uaugaaugugcugugacca

SEQ ID NO: 1672256 - RNA, 19 nt, Artificial Sequence
  Description of Artificial Sequence: Synthetic oligonucleotide
uuacaggaaacauaacugu

SEQ ID NO: 1672257 - RNA, 19 nt, Artificial Sequence
  Description of Artificial Sequence: Synthetic oligonucleotide
cagguuuuagucuaugcag

SEQ ID NO: 1672258 - RNA, 19 nt, Artificial Sequence
  Description of Artificial Sequence: Synthetic oligonucleotide
aagugaaagucuaaggucu

SEQ ID NO: 1672259 - RNA, 19 nt, Artificial Sequence
  Description of Artificial Sequence: Synthetic oligonucleotide
ugagcauaauuaaauuaca

SEQ ID NO: 1672260 - RNA, 19 nt, Artificial Sequence
  Description of Artificial Sequence: Synthetic oligonucleotide
uaaugaggagcgcuggcgg

SEQ ID NO: 1672261 - RNA, 19 nt, Artificial Sequence
  Description of Artificial Sequence: Synthetic oligonucleotide
aguuaacuugucuaaugag

SEQ ID NO: 1672262 - RNA, 19 nt, Artificial Sequence
  Description of Artificial Sequence: Synthetic oligonucleotide
uuaaaagguacagaggauc

SEQ ID NO: 1672263 - RNA, 19 nt, Artificial Sequence
  Description of Artificial Sequence: Synthetic oligonucleotide
uauugcauguuuugggagc

SEQ ID NO: 1672264 - RNA, 19 nt, Artificial Sequence
  Description of Artificial Sequence: Synthetic oligonucleotide
ucuacuuugguuaguuaac

SEQ ID NO: 1672265 - RNA, 19 nt, Artificial Sequence
  Description of Artificial Sequence: Synthetic oligonucleotide
guuagaucuaauaaaauaa

SEQ ID NO: 1672266 - RNA, 19 nt, Artificial Sequence
  Description of Artificial Sequence: Synthetic oligonucleotide
uaauuuaaaggacaccauu

SEQ ID NO: 1672267 - RNA, 19 nt, Artificial Sequence
  Description of Artificial Sequence: Synthetic oligonucleotide
auuuacaguaccagaacac

SEQ ID NO: 1672268 - RNA, 19 nt, Artificial Sequence
  Description of Artificial Sequence: Synthetic oligonucleotide
uuuacaguaccagaacacc

SEQ ID NO: 1672269 - RNA, 19 nt, Artificial Sequence
  Description of Artificial Sequence: Synthetic oligonucleotide
guacagaggauccaguuug

SEQ ID NO: 1672270 - RNA, 19 nt, Artificial Sequence
  Description of Artificial Sequence: Synthetic oligonucleotide
aaagguacagaggauccag

SEQ ID NO: 1672271 - RNA, 19 nt, Artificial Sequence
  Description of Artificial Sequence: Synthetic oligonucleotide
aauuggaggaguuguggga

SEQ ID NO: 1672272 - RNA, 19 nt, Artificial Sequence
  Description of Artificial Sequence: Synthetic oligonucleotide
aaacauaacuguggucagc

SEQ ID NO: 1672273 - RNA, 19 nt, Artificial Sequence
  Description of Artificial Sequence: Synthetic oligonucleotide
guucuuucaaauuggagga

SEQ ID NO: 1672274 - RNA, 19 nt, Artificial Sequence
  Description of Artificial Sequence: Synthetic oligonucleotide
agcuaagcaauucauuucu

SEQ ID NO: 1672275 - RNA, 19 nt, Artificial Sequence
  Description of Artificial Sequence: Synthetic oligonucleotide
uuaugaaugugcugugacc

SEQ ID NO: 1672276 - RNA, 19 nt, Artificial Sequence
  Description of Artificial Sequence: Synthetic oligonucleotide
cuugcagugcucuuuuagg

SEQ ID NO: 1672277 - RNA, 19 nt, Artificial Sequence
  Description of Artificial Sequence: Synthetic oligonucleotide
agaggauccaguuuguuau

SEQ ID NO: 1672278 - RNA, 19 nt, Artificial Sequence
  Description of Artificial Sequence: Synthetic oligonucleotide
ugugcugugaccaguuaug

SEQ ID NO: 1672279 - RNA, 19 nt, Artificial Sequence
  Description of Artificial Sequence: Synthetic oligonucleotide
auaacagugcgcaugaaug

SEQ ID NO: 1672280 - RNA, 19 nt, Artificial Sequence
  Description of Artificial Sequence: Synthetic oligonucleotide
ugcagugucuauaauaauu

SEQ ID NO: 1672281 - RNA, 19 nt, Artificial Sequence
  Description of Artificial Sequence: Synthetic oligonucleotide
uguacucugguauaacagu

SEQ ID NO: 1672282 - RNA, 19 nt, Artificial Sequence
  Description of Artificial Sequence: Synthetic oligonucleotide
aaugaggagcgcuggcggg

SEQ ID NO: 1672283 - RNA, 19 nt, Artificial Sequence
  Description of Artificial Sequence: Synthetic oligonucleotide
uuugguuaguuaacaauau

SEQ ID NO: 1672284 - RNA, 19 nt, Artificial Sequence
  Description of Artificial Sequence: Synthetic oligonucleotide
acagguuuuagucuaugca

SEQ ID NO: 1672285 - RNA, 19 nt, Artificial Sequence
  Description of Artificial Sequence: Synthetic oligonucleotide
ugcuccaagauuccuuuag

SEQ ID NO: 1672286 - RNA, 19 nt, Artificial Sequence
  Description of Artificial Sequence: Synthetic oligonucleotide
agcauaauuaaauuacauu

SEQ ID NO: 1672287 - RNA, 19 nt, Artificial Sequence
  Description of Artificial Sequence: Synthetic oligonucleotide
uauaacagugcgcaugaau

SEQ ID NO: 1672288 - RNA, 19 nt, Artificial Sequence
  Description of Artificial Sequence: Synthetic oligonucleotide
auauugcauguuuugggag

SEQ ID NO: 1672289 - RNA, 19 nt, Artificial Sequence
  Description of Artificial Sequence: Synthetic oligonucleotide
uggaauuuuacaggaaaca

SEQ ID NO: 1672290 - RNA, 19 nt, Artificial Sequence
  Description of Artificial Sequence: Synthetic oligonucleotide
acagauauauuauuucuuu

SEQ ID NO: 1672291 - RNA, 19 nt, Artificial Sequence
  Description of Artificial Sequence: Synthetic oligonucleotide
uccaagauuccuuuagccu

SEQ ID NO: 1672292 - RNA, 19 nt, Artificial Sequence
  Description of Artificial Sequence: Synthetic oligonucleotide
agaaguauauugcauguuu

SEQ ID NO: 1672293 - RNA, 19 nt, Artificial Sequence
  Description of Artificial Sequence: Synthetic oligonucleotide
gacauuuacacacuaugaa

SEQ ID NO: 1672294 - RNA, 19 nt, Artificial Sequence
  Description of Artificial Sequence: Synthetic oligonucleotide
acaccauuaaaauaauuuu

SEQ ID NO: 1672295 - RNA, 19 nt, Artificial Sequence
  Description of Artificial Sequence: Synthetic oligonucleotide
auugcauguuuugggagcc

SEQ ID NO: 1672296 - RNA, 19 nt, Artificial Sequence
  Description of Artificial Sequence: Synthetic oligonucleotide
auuucugucaggguccacg

SEQ ID NO: 1672297 - RNA, 19 nt, Artificial Sequence
  Description of Artificial Sequence: Synthetic oligonucleotide
agugucuauaauaauuaag

SEQ ID NO: 1672298 - RNA, 19 nt, Artificial Sequence
  Description of Artificial Sequence: Synthetic oligonucleotide
ucaaauuggaggaguugug

SEQ ID NO: 1672299 - RNA, 19 nt, Artificial Sequence
  Description of Artificial Sequence: Synthetic oligonucleotide
gaaacauaacuguggucag

SEQ ID NO: 1672300 - RNA, 19 nt, Artificial Sequence
  Description of Artificial Sequence: Synthetic oligonucleotide
uguuuugggagccagucuu

SEQ ID NO: 1672301 - RNA, 19 nt, Artificial Sequence
  Description of Artificial Sequence: Synthetic oligonucleotide
gaguccaauaauauuaaca

SEQ ID NO: 1672302 - RNA, 19 nt, Artificial Sequence
  Description of Artificial Sequence: Synthetic oligonucleotide
uccuuugagacguuauuga

SEQ ID NO: 1672303 - RNA, 19 nt, Artificial Sequence
  Description of Artificial Sequence: Synthetic oligonucleotide
auuaaggaguaaaauaagu

SEQ ID NO: 1672304 - RNA, 19 nt, Artificial Sequence
  Description of Artificial Sequence: Synthetic oligonucleotide
uuuaaaagguacagaggau

SEQ ID NO: 1672305 - RNA, 19 nt, Artificial Sequence
  Description of Artificial Sequence: Synthetic oligonucleotide
aaauuacauuucugucagg

SEQ ID NO: 1672306 - RNA, 19 nt, Artificial Sequence
  Description of Artificial Sequence: Synthetic oligonucleotide
gaaagucuaaggucuugcc

SEQ ID NO: 1672307 - RNA, 19 nt, Artificial Sequence
  Description of Artificial Sequence: Synthetic oligonucleotide
acauaaagcacugaucaga

SEQ ID NO: 1672308 - RNA, 19 nt, Artificial Sequence
  Description of Artificial Sequence: Synthetic oligonucleotide
uucgauuaaugcacuugag

SEQ ID NO: 1672309 - RNA, 19 nt, Artificial Sequence
  Description of Artificial Sequence: Synthetic oligonucleotide
ugucuaaugaggagcgcug

SEQ ID NO: 1672310 - RNA, 19 nt, Artificial Sequence
  Description of Artificial Sequence: Synthetic oligonucleotide
acguuauugaaaauuuuag

SEQ ID NO: 1672311 - RNA, 19 nt, Artificial Sequence
  Description of Artificial Sequence: Synthetic oligonucleotide
gaugcauauaaaauauaca

SEQ ID NO: 1672312 - RNA, 19 nt, Artificial Sequence
  Description of Artificial Sequence: Synthetic oligonucleotide
agaguccaauaauauuaac

SEQ ID NO: 1672313 - RNA, 19 nt, Artificial Sequence
  Description of Artificial Sequence: Synthetic oligonucleotide
uaacuugucuaaugaggag

SEQ ID NO: 1672314 - RNA, 19 nt, Artificial Sequence
  Description of Artificial Sequence: Synthetic oligonucleotide
caguggagaaguauauugc

SEQ ID NO: 1672315 - RNA, 19 nt, Artificial Sequence
  Description of Artificial Sequence: Synthetic oligonucleotide
auggaauuuuacaggaaac

SEQ ID NO: 1672316 - RNA, 19 nt, Artificial Sequence
  Description of Artificial Sequence: Synthetic oligonucleotide
gaucagagagcugagcagc

SEQ ID NO: 1672317 - RNA, 19 nt, Artificial Sequence
  Description of Artificial Sequence: Synthetic oligonucleotide
ggaaccagggcauuggaag

SEQ ID NO: 1672318 - RNA, 19 nt, Artificial Sequence
  Description of Artificial Sequence: Synthetic oligonucleotide
ugcucuuuuaggcaugcuc

SEQ ID NO: 1672319 - RNA, 19 nt, Artificial Sequence
  Description of Artificial Sequence: Synthetic oligonucleotide
aaacaagucgaguccugca

SEQ ID NO: 1672320 - RNA, 19 nt, Artificial Sequence
  Description of Artificial Sequence: Synthetic oligonucleotide
accagaacaccauuaaaau

SEQ ID NO: 1672321 - RNA, 19 nt, Artificial Sequence
  Description of Artificial Sequence: Synthetic oligonucleotide
uuuaggcaugcucugaguu

SEQ ID NO: 1672322 - RNA, 19 nt, Artificial Sequence
  Description of Artificial Sequence: Synthetic oligonucleotide
ugagacguuauugaaaauu

SEQ ID NO: 1672323 - RNA, 19 nt, Artificial Sequence
  Description of Artificial Sequence: Synthetic oligonucleotide
uacagguuuuagucuaugc

SEQ ID NO: 1672324 - RNA, 19 nt, Artificial Sequence
  Description of Artificial Sequence: Synthetic oligonucleotide
uccaacggcgugcacagug

SEQ ID NO: 1672325 - RNA, 19 nt, Artificial Sequence
  Description of Artificial Sequence: Synthetic oligonucleotide
aggaguaaaauaaguuaac

SEQ ID NO: 1672326 - RNA, 19 nt, Artificial Sequence
  Description of Artificial Sequence: Synthetic oligonucleotide
cuuugguuaguuaacaaua

SEQ ID NO: 1672327 - RNA, 19 nt, Artificial Sequence
  Description of Artificial Sequence: Synthetic oligonucleotide
acuugucuaaugaggagcg

SEQ ID NO: 1672328 - RNA, 19 nt, Artificial Sequence
  Description of Artificial Sequence: Synthetic oligonucleotide
agagaugcauauaaaauau

SEQ ID NO: 1672329 - RNA, 19 nt, Artificial Sequence
  Description of Artificial Sequence: Synthetic oligonucleotide
ugguauaacagugcgcaug

SEQ ID NO: 1672330 - RNA, 19 nt, Artificial Sequence
  Description of Artificial Sequence: Synthetic oligonucleotide
aaaggacaccauuuacagu

SEQ ID NO: 1672331 - RNA, 19 nt, Artificial Sequence
  Description of Artificial Sequence: Synthetic oligonucleotide
cuuuuaggcaugcucugag

SEQ ID NO: 1672332 - RNA, 19 nt, Artificial Sequence
  Description of Artificial Sequence: Synthetic oligonucleotide
ucuaaugaggagcgcuggc

SEQ ID NO: 1672333 - RNA, 19 nt, Artificial Sequence
  Description of Artificial Sequence: Synthetic oligonucleotide
uuaaaguguucugacauuu

SEQ ID NO: 1672334 - RNA, 19 nt, Artificial Sequence
  Description of Artificial Sequence: Synthetic oligonucleotide
ugauuaugaaugugcugug

SEQ ID NO: 1672335 - RNA, 19 nt, Artificial Sequence
  Description of Artificial Sequence: Synthetic oligonucleotide
aucaccuuugcuuucccgu

SEQ ID NO: 1672336 - RNA, 19 nt, Artificial Sequence
  Description of Artificial Sequence: Synthetic oligonucleotide
uauaauaauuaaggaguaa

SEQ ID NO: 1672337 - RNA, 19 nt, Artificial Sequence
  Description of Artificial Sequence: Synthetic oligonucleotide
ucuuucaaauuggaggagu

SEQ ID NO: 1672338 - RNA, 19 nt, Artificial Sequence
  Description of Artificial Sequence: Synthetic oligonucleotide
cuaaugaggagcgcuggcg

SEQ ID NO: 1672339 - RNA, 19 nt, Artificial Sequence
  Description of Artificial Sequence: Synthetic oligonucleotide
uaacagugcgcaugaaugu

SEQ ID NO: 1672340 - RNA, 19 nt, Artificial Sequence
  Description of Artificial Sequence: Synthetic oligonucleotide
aguccaacggcgugcacag

SEQ ID NO: 1672341 - RNA, 19 nt, Artificial Sequence
  Description of Artificial Sequence: Synthetic oligonucleotide
ugcucugaguuuccaacug

SEQ ID NO: 1672342 - RNA, 19 nt, Artificial Sequence
  Description of Artificial Sequence: Synthetic oligonucleotide
cuugagcauaauuaaauua

SEQ ID NO: 1672343 - RNA, 19 nt, Artificial Sequence
  Description of Artificial Sequence: Synthetic oligonucleotide
aggaaacauaacugugguc

SEQ ID NO: 1672344 - RNA, 19 nt, Artificial Sequence
  Description of Artificial Sequence: Synthetic oligonucleotide
aggauccaguuuguuaugc

SEQ ID NO: 1672345 - RNA, 19 nt, Artificial Sequence
  Description of Artificial Sequence: Synthetic oligonucleotide
cuggacaccaucccugugc

SEQ ID NO: 1672346 - RNA, 19 nt, Artificial Sequence
  Description of Artificial Sequence: Synthetic oligonucleotide
uuguuaugcuacaaacuua

SEQ ID NO: 1672347 - RNA, 19 nt, Artificial Sequence
  Description of Artificial Sequence: Synthetic oligonucleotide
uagccugaaacaagucgag

SEQ ID NO: 1672348 - RNA, 19 nt, Artificial Sequence
  Description of Artificial Sequence: Synthetic oligonucleotide
aaucuugcagugcucuuuu

SEQ ID NO: 1672349 - RNA, 19 nt, Artificial Sequence
  Description of Artificial Sequence: Synthetic oligonucleotide
uuucugucaggguccacgc

SEQ ID NO: 1672350 - RNA, 19 nt, Artificial Sequence
  Description of Artificial Sequence: Synthetic oligonucleotide
ggauaagagaugcauauaa

SEQ ID NO: 1672351 - RNA, 19 nt, Artificial Sequence
  Description of Artificial Sequence: Synthetic oligonucleotide
aaagucucugcaggcaucu

SEQ ID NO: 1672352 - RNA, 19 nt, Artificial Sequence
  Description of Artificial Sequence: Synthetic oligonucleotide
acaaacuuagacaguggag

SEQ ID NO: 1672353 - RNA, 19 nt, Artificial Sequence
  Description of Artificial Sequence: Synthetic oligonucleotide
aaaagagaggggaugugaa

SEQ ID NO: 1672354 - RNA, 19 nt, Artificial Sequence
  Description of Artificial Sequence: Synthetic oligonucleotide
uaugaagaguuagaucuaa

SEQ ID NO: 1672355 - RNA, 19 nt, Artificial Sequence
  Description of Artificial Sequence: Synthetic oligonucleotide
cuucgauuaaugcacuuga

SEQ ID NO: 1672356 - RNA, 19 nt, Artificial Sequence
  Description of Artificial Sequence: Synthetic oligonucleotide
gcuacaaacuuagacagug

SEQ ID NO: 1672357 - RNA, 19 nt, Artificial Sequence
  Description of Artificial Sequence: Synthetic oligonucleotide
augaauguacaagaaaaua

SEQ ID NO: 1672358 - RNA, 19 nt, Artificial Sequence
  Description of Artificial Sequence: Synthetic oligonucleotide
ccaacugacaggaaccagg

SEQ ID NO: 1672359 - RNA, 19 nt, Artificial Sequence
  Description of Artificial Sequence: Synthetic oligonucleotide
uuugggagccagucuuuag

SEQ ID NO: 1672360 - RNA, 19 nt, Artificial Sequence
  Description of Artificial Sequence: Synthetic oligonucleotide
uacagugauuaugaaugug

SEQ ID NO: 1672361 - RNA, 19 nt, Artificial Sequence
  Description of Artificial Sequence: Synthetic oligonucleotide
auacagugauuaugaaugu

SEQ ID NO: 1672362 - RNA, 19 nt, Artificial Sequence
  Description of Artificial Sequence: Synthetic oligonucleotide
ucagcaguccaacggcgug

SEQ ID NO: 1672363 - RNA, 19 nt, Artificial Sequence
  Description of Artificial Sequence: Synthetic oligonucleotide
cacuaugaagaguuagauc

SEQ ID NO: 1672364 - RNA, 19 nt, Artificial Sequence
  Description of Artificial Sequence: Synthetic oligonucleotide
uuagacaguggagaaguau

SEQ ID NO: 1672365 - RNA, 19 nt, Artificial Sequence
  Description of Artificial Sequence: Synthetic oligonucleotide
caccauuaaaauaauuuua

SEQ ID NO: 1672366 - RNA, 19 nt, Artificial Sequence
  Description of Artificial Sequence: Synthetic oligonucleotide
cuauaauaauuaaggagua

SEQ ID NO: 1672367 - RNA, 19 nt, Artificial Sequence
  Description of Artificial Sequence: Synthetic oligonucleotide
uuuuaggcaugcucugagu

SEQ ID NO: 1672368 - RNA, 19 nt, Artificial Sequence
  Description of Artificial Sequence: Synthetic oligonucleotide
cucugaguuuccaacugac

SEQ ID NO: 1672369 - RNA, 19 nt, Artificial Sequence
  Description of Artificial Sequence: Synthetic oligonucleotide
gaggagguacuccugguga

SEQ ID NO: 1672370 - RNA, 19 nt, Artificial Sequence
  Description of Artificial Sequence: Synthetic oligonucleotide
auuaaaguguucugacauu

SEQ ID NO: 1672371 - RNA, 19 nt, Artificial Sequence
  Description of Artificial Sequence: Synthetic oligonucleotide
uagcuuuguacauguacuc

SEQ ID NO: 1672372 - RNA, 19 nt, Artificial Sequence
  Description of Artificial Sequence: Synthetic oligonucleotide
guguacaucuuuauuuuac

SEQ ID NO: 1672373 - RNA, 19 nt, Artificial Sequence
  Description of Artificial Sequence: Synthetic oligonucleotide
agguguucuuucaaauugg

SEQ ID NO: 1672374 - RNA, 19 nt, Artificial Sequence
  Description of Artificial Sequence: Synthetic oligonucleotide
guacucugguauaacagug

SEQ ID NO: 1672375 - RNA, 19 nt, Artificial Sequence
  Description of Artificial Sequence: Synthetic oligonucleotide
cuaugcagugucuauaaua

SEQ ID NO: 1672376 - RNA, 19 nt, Artificial Sequence
  Description of Artificial Sequence: Synthetic oligonucleotide
augaaugugcugugaccag

SEQ ID NO: 1672377 - RNA, 19 nt, Artificial Sequence
  Description of Artificial Sequence: Synthetic oligonucleotide
agcaaucaccuuugcuuuc

SEQ ID NO: 1672378 - RNA, 19 nt, Artificial Sequence
  Description of Artificial Sequence: Synthetic oligonucleotide
agcaauucauuucuacauu

SEQ ID NO: 1672379 - RNA, 19 nt, Artificial Sequence
  Description of Artificial Sequence: Synthetic oligonucleotide
ccugaaacaagucgagucc

SEQ ID NO: 1672380 - RNA, 19 nt, Artificial Sequence
  Description of Artificial Sequence: Synthetic oligonucleotide
gauaagagaugcauauaaa

SEQ ID NO: 1672381 - RNA, 19 nt, Artificial Sequence
  Description of Artificial Sequence: Synthetic oligonucleotide
gauuaaugcacuugagcau

SEQ ID NO: 1672382 - RNA, 19 nt, Artificial Sequence
  Description of Artificial Sequence: Synthetic oligonucleotide
uucuuucaaauuggaggag

SEQ ID NO: 1672383 - RNA, 19 nt, Artificial Sequence
  Description of Artificial Sequence: Synthetic oligonucleotide
ucuaaggucuugccgggua

SEQ ID NO: 1672384 - RNA, 19 nt, Artificial Sequence
  Description of Artificial Sequence: Synthetic oligonucleotide
aagcccaguuuuaaaauau

SEQ ID NO: 1672385 - RNA, 19 nt, Artificial Sequence
  Description of Artificial Sequence: Synthetic oligonucleotide
cauguuuugggagccaguc

SEQ ID NO: 1672386 - RNA, 19 nt, Artificial Sequence
  Description of Artificial Sequence: Synthetic oligonucleotide
caacccaaaguuauuaaua

SEQ ID NO: 1672387 - RNA, 19 nt, Artificial Sequence
  Description of Artificial Sequence: Synthetic oligonucleotide
ugcauguuuugggagccag

SEQ ID NO: 1672388 - RNA, 19 nt, Artificial Sequence
  Description of Artificial Sequence: Synthetic oligonucleotide
cuccuuugagacguuauug

SEQ ID NO: 1672389 - RNA, 19 nt, Artificial Sequence
  Description of Artificial Sequence: Synthetic oligonucleotide
acagugcgcaugaauguac

SEQ ID NO: 1672390 - RNA, 19 nt, Artificial Sequence
  Description of Artificial Sequence: Synthetic oligonucleotide
gugccuucgauuaaugcac

SEQ ID NO: 1672391 - RNA, 19 nt, Artificial Sequence
  Description of Artificial Sequence: Synthetic oligonucleotide
cucugguauaacagugcgc

SEQ ID NO: 1672392 - RNA, 19 nt, Artificial Sequence
  Description of Artificial Sequence: Synthetic oligonucleotide
ucuuuuaggcaugcucuga

SEQ ID NO: 1672393 - RNA, 19 nt, Artificial Sequence
  Description of Artificial Sequence: Synthetic oligonucleotide
uaaaguguucugacauuua

SEQ ID NO: 1672394 - RNA, 19 nt, Artificial Sequence
  Description of Artificial Sequence: Synthetic oligonucleotide
gauccaguuuguuaugcua

SEQ ID NO: 1672395 - RNA, 19 nt, Artificial Sequence
  Description of Artificial Sequence: Synthetic oligonucleotide
agcagaguccaauaauauu

SEQ ID NO: 1672396 - RNA, 19 nt, Artificial Sequence
  Description of Artificial Sequence: Synthetic oligonucleotide
gguauaacagugcgcauga

SEQ ID NO: 1672397 - RNA, 19 nt, Artificial Sequence
  Description of Artificial Sequence: Synthetic oligonucleotide
ggagucagagcccaguuuc

SEQ ID NO: 1672398 - RNA, 19 nt, Artificial Sequence
  Description of Artificial Sequence: Synthetic oligonucleotide
cucuuuuaggcaugcucug

SEQ ID NO: 1672399 - RNA, 19 nt, Artificial Sequence
  Description of Artificial Sequence: Synthetic oligonucleotide
gauuaugaaugugcuguga

SEQ ID NO: 1672400 - RNA, 19 nt, Artificial Sequence
  Description of Artificial Sequence: Synthetic oligonucleotide
ugcuacaaacuuagacagu

SEQ ID NO: 1672401 - RNA, 19 nt, Artificial Sequence
  Description of Artificial Sequence: Synthetic oligonucleotide
auaauuuaaaggacaccau

SEQ ID NO: 1672402 - RNA, 19 nt, Artificial Sequence
  Description of Artificial Sequence: Synthetic oligonucleotide
gcugugaccaguuauggaa

SEQ ID NO: 1672403 - RNA, 19 nt, Artificial Sequence
  Description of Artificial Sequence: Synthetic oligonucleotide
uuagucuaugcagugucua

SEQ ID NO: 1672404 - RNA, 19 nt, Artificial Sequence
  Description of Artificial Sequence: Synthetic oligonucleotide
uacauguacucugguauaa

SEQ ID NO: 1672405 - RNA, 19 nt, Artificial Sequence
  Description of Artificial Sequence: Synthetic oligonucleotide
gaggggaugugaagugugg

SEQ ID NO: 1672406 - RNA, 19 nt, Artificial Sequence
  Description of Artificial Sequence: Synthetic oligonucleotide
ugccggguaacuccuuuga

SEQ ID NO: 1672407 - RNA, 19 nt, Artificial Sequence
  Description of Artificial Sequence: Synthetic oligonucleotide
cgauuaaugcacuugagca

SEQ ID NO: 1672408 - RNA, 19 nt, Artificial Sequence
  Description of Artificial Sequence: Synthetic oligonucleotide
cauuucuacauuccaaacu

SEQ ID NO: 1672409 - RNA, 19 nt, Artificial Sequence
  Description of Artificial Sequence: Synthetic oligonucleotide
agguuuuagucuaugcagu

SEQ ID NO: 1672410 - RNA, 19 nt, Artificial Sequence
  Description of Artificial Sequence: Synthetic oligonucleotide
cagugccuucgauuaaugc

SEQ ID NO: 1672411 - RNA, 19 nt, Artificial Sequence
  Description of Artificial Sequence: Synthetic oligonucleotide
ucccagaugcuccaagauu

SEQ ID NO: 1672412 - RNA, 19 nt, Artificial Sequence
  Description of Artificial Sequence: Synthetic oligonucleotide
cccagaugcuccaagauuc

SEQ ID NO: 1672413 - RNA, 19 nt, Artificial Sequence
  Description of Artificial Sequence: Synthetic oligonucleotide
gucuaaugaggagcgcugg

SEQ ID NO: 1672414 - RNA, 19 nt, Artificial Sequence
  Description of Artificial Sequence: Synthetic oligonucleotide
augugcugugaccaguuau

SEQ ID NO: 1672415 - RNA, 19 nt, Artificial Sequence
  Description of Artificial Sequence: Synthetic oligonucleotide
acccaaaguuauuaauaau

SEQ ID NO: 1672416 - RNA, 19 nt, Artificial Sequence
  Description of Artificial Sequence: Synthetic oligonucleotide
ugcugugaccaguuaugga

SEQ ID NO: 1672417 - RNA, 19 nt, Artificial Sequence
  Description of Artificial Sequence: Synthetic oligonucleotide
ggucuugccggguaacucc

SEQ ID NO: 1672418 - RNA, 19 nt, Artificial Sequence
  Description of Artificial Sequence: Synthetic oligonucleotide
auguuuugggagccagucu

SEQ ID NO: 1672419 - RNA, 19 nt, Artificial Sequence
  Description of Artificial Sequence: Synthetic oligonucleotide
gaggauccaguuuguuaug

SEQ ID NO: 1672420 - RNA, 19 nt, Artificial Sequence
  Description of Artificial Sequence: Synthetic oligonucleotide
uagucuaugcagugucuau

SEQ ID NO: 1672421 - RNA, 19 nt, Artificial Sequence
  Description of Artificial Sequence: Synthetic oligonucleotide
gucuaugcagugucuauaa

SEQ ID NO: 1672422 - RNA, 19 nt, Artificial Sequence
  Description of Artificial Sequence: Synthetic oligonucleotide
aacagugcgcaugaaugua

SEQ ID NO: 1672423 - RNA, 19 nt, Artificial Sequence
  Description of Artificial Sequence: Synthetic oligonucleotide
uuccaacugacaggaacca

SEQ ID NO: 1672424 - RNA, 19 nt, Artificial Sequence
  Description of Artificial Sequence: Synthetic oligonucleotide
gcagaguccaauaauauua

SEQ ID NO: 1672425 - RNA, 19 nt, Artificial Sequence
  Description of Artificial Sequence: Synthetic oligonucleotide
uuucccguuccuucccgca

SEQ ID NO: 1672426 - RNA, 19 nt, Artificial Sequence
  Description of Artificial Sequence: Synthetic oligonucleotide
gccugaaacaagucgaguc

SEQ ID NO: 1672427 - RNA, 19 nt, Artificial Sequence
  Description of Artificial Sequence: Synthetic oligonucleotide
uucugucaggguccacgcc

SEQ ID NO: 1672428 - RNA, 19 nt, Artificial Sequence
  Description of Artificial Sequence: Synthetic oligonucleotide
caguuucgaaaauaaaagu

SEQ ID NO: 1672429 - RNA, 19 nt, Artificial Sequence
  Description of Artificial Sequence: Synthetic oligonucleotide
ucuggagucagagcccagu

SEQ ID NO: 1672430 - RNA, 19 nt, Artificial Sequence
  Description of Artificial Sequence: Synthetic oligonucleotide
acuccuuugagacguuauu

SEQ ID NO: 1672431 - RNA, 19 nt, Artificial Sequence
  Description of Artificial Sequence: Synthetic oligonucleotide
uaucaacauaaagcacuga

SEQ ID NO: 1672432 - RNA, 19 nt, Artificial Sequence
  Description of Artificial Sequence: Synthetic oligonucleotide
acaagucgaguccugcaua

SEQ ID NO: 1672433 - RNA, 19 nt, Artificial Sequence
  Description of Artificial Sequence: Synthetic oligonucleotide
cagaguccaauaauauuaa

SEQ ID NO: 1672434 - RNA, 19 nt, Artificial Sequence
  Description of Artificial Sequence: Synthetic oligonucleotide
ugccuucgauuaaugcacu

SEQ ID NO: 1672435 - RNA, 19 nt, Artificial Sequence
  Description of Artificial Sequence: Synthetic oligonucleotide
aggucuugccggguaacuc

SEQ ID NO: 1672436 - RNA, 19 nt, Artificial Sequence
  Description of Artificial Sequence: Synthetic oligonucleotide
aaggucuugccggguaacu

SEQ ID NO: 1672437 - RNA, 19 nt, Artificial Sequence
  Description of Artificial Sequence: Synthetic oligonucleotide
uugccggguaacuccuuug

SEQ ID NO: 1672438 - RNA, 19 nt, Artificial Sequence
  Description of Artificial Sequence: Synthetic oligonucleotide
ucaccuuugcuuucccguu

SEQ ID NO: 1672439 - RNA, 19 nt, Artificial Sequence
  Description of Artificial Sequence: Synthetic oligonucleotide
cagucuuuaggcuuucugu

SEQ ID NO: 1672440 - RNA, 19 nt, Artificial Sequence
  Description of Artificial Sequence: Synthetic oligonucleotide
gaugcuccaagauuccuuu

SEQ ID NO: 1672441 - RNA, 19 nt, Artificial Sequence
  Description of Artificial Sequence: Synthetic oligonucleotide
agaggggaugugaagugug

SEQ ID NO: 1672442 - RNA, 19 nt, Artificial Sequence
  Description of Artificial Sequence: Synthetic oligonucleotide
auacagguuuuagucuaug

SEQ ID NO: 1672443 - RNA, 19 nt, Artificial Sequence
  Description of Artificial Sequence: Synthetic oligonucleotide
ggagaaguauauugcaugu

SEQ ID NO: 1672444 - RNA, 19 nt, Artificial Sequence
  Description of Artificial Sequence: Synthetic oligonucleotide
gugaaagucuaaggucuug

SEQ ID NO: 1672445 - RNA, 19 nt, Artificial Sequence
  Description of Artificial Sequence: Synthetic oligonucleotide
gcuccaagauuccuuuagc

SEQ ID NO: 1672446 - RNA, 19 nt, Artificial Sequence
  Description of Artificial Sequence: Synthetic oligonucleotide
gaaccagggcauuggaagu

SEQ ID NO: 1672447 - RNA, 19 nt, Artificial Sequence
  Description of Artificial Sequence: Synthetic oligonucleotide
cuugucuaaugaggagcgc

SEQ ID NO: 1672448 - RNA, 19 nt, Artificial Sequence
  Description of Artificial Sequence: Synthetic oligonucleotide
uugagacguuauugaaaau

SEQ ID NO: 1672449 - RNA, 19 nt, Artificial Sequence
  Description of Artificial Sequence: Synthetic oligonucleotide
caagucgaguccugcauaa

SEQ ID NO: 1672450 - RNA, 19 nt, Artificial Sequence
  Description of Artificial Sequence: Synthetic oligonucleotide
uaaggucuugccggguaac

SEQ ID NO: 1672451 - RNA, 19 nt, Artificial Sequence
  Description of Artificial Sequence: Synthetic oligonucleotide
ggguaacuccuuugagacg

SEQ ID NO: 1672452 - RNA, 19 nt, Artificial Sequence
  Description of Artificial Sequence: Synthetic oligonucleotide
agacaguggagaaguauau

SEQ ID NO: 1672453 - RNA, 19 nt, Artificial Sequence
  Description of Artificial Sequence: Synthetic oligonucleotide
guacauguacucugguaua

SEQ ID NO: 1672454 - RNA, 19 nt, Artificial Sequence
  Description of Artificial Sequence: Synthetic oligonucleotide
agugcgcaugaauguacaa

SEQ ID NO: 1672455 - RNA, 19 nt, Artificial Sequence
  Description of Artificial Sequence: Synthetic oligonucleotide
ggaguaaaauaaguuaacu

SEQ ID NO: 1672456 - RNA, 19 nt, Artificial Sequence
  Description of Artificial Sequence: Synthetic oligonucleotide
guuuccaaugaugggcguc

SEQ ID NO: 1672457 - RNA, 19 nt, Artificial Sequence
  Description of Artificial Sequence: Synthetic oligonucleotide
cagugauuaugaaugugcu

SEQ ID NO: 1672458 - RNA, 19 nt, Artificial Sequence
  Description of Artificial Sequence: Synthetic oligonucleotide
gguacuccuggugacagca

SEQ ID NO: 1672459 - RNA, 19 nt, Artificial Sequence
  Description of Artificial Sequence: Synthetic oligonucleotide
ugcuggccuccauacuugu

SEQ ID NO: 1672460 - RNA, 19 nt, Artificial Sequence
  Description of Artificial Sequence: Synthetic oligonucleotide
ggucagcaguccaacggcg

SEQ ID NO: 1672461 - RNA, 19 nt, Artificial Sequence
  Description of Artificial Sequence: Synthetic oligonucleotide
acacugggaaagcccaguu

SEQ ID NO: 1672462 - RNA, 19 nt, Artificial Sequence
  Description of Artificial Sequence: Synthetic oligonucleotide
cagugcucuuuuaggcaug

SEQ ID NO: 1672463 - RNA, 19 nt, Artificial Sequence
  Description of Artificial Sequence: Synthetic oligonucleotide
agacguuauugaaaauuuu

SEQ ID NO: 1672464 - RNA, 19 nt, Artificial Sequence
  Description of Artificial Sequence: Synthetic oligonucleotide
agcgcuggcgggcagugua

SEQ ID NO: 1672465 - RNA, 19 nt, Artificial Sequence
  Description of Artificial Sequence: Synthetic oligonucleotide
ccuucgauuaaugcacuug

SEQ ID NO: 1672466 - RNA, 19 nt, Artificial Sequence
  Description of Artificial Sequence: Synthetic oligonucleotide
agaugcuccaagauuccuu

SEQ ID NO: 1672467 - RNA, 19 nt, Artificial Sequence
  Description of Artificial Sequence: Synthetic oligonucleotide
cagcaguccaacggcgugc

SEQ ID NO: 1672468 - RNA, 19 nt, Artificial Sequence
  Description of Artificial Sequence: Synthetic oligonucleotide
caguaccagaacaccauua

SEQ ID NO: 1672469 - RNA, 19 nt, Artificial Sequence
  Description of Artificial Sequence: Synthetic oligonucleotide
gcauuggaaguggagccag

SEQ ID NO: 1672470 - RNA, 19 nt, Artificial Sequence
  Description of Artificial Sequence: Synthetic oligonucleotide
guuuuagucuaugcagugu

SEQ ID NO: 1672471 - RNA, 19 nt, Artificial Sequence
  Description of Artificial Sequence: Synthetic oligonucleotide
acagugccuucgauuaaug

SEQ ID NO: 1672472 - RNA, 19 nt, Artificial Sequence
  Description of Artificial Sequence: Synthetic oligonucleotide
cagugcgcaugaauguaca

SEQ ID NO: 1672473 - RNA, 19 nt, Artificial Sequence
  Description of Artificial Sequence: Synthetic oligonucleotide
cagagcccaguuucgaaaa

SEQ ID NO: 1672474 - RNA, 19 nt, Artificial Sequence
  Description of Artificial Sequence: Synthetic oligonucleotide
cuuucaaauuggaggaguu

SEQ ID NO: 1672475 - RNA, 19 nt, Artificial Sequence
  Description of Artificial Sequence: Synthetic oligonucleotide
agccugaaacaagucgagu

SEQ ID NO: 1672476 - RNA, 19 nt, Artificial Sequence
  Description of Artificial Sequence: Synthetic oligonucleotide
gcuuucccguuccuucccg

SEQ ID NO: 1672477 - RNA, 19 nt, Artificial Sequence
  Description of Artificial Sequence: Synthetic oligonucleotide
aggcaugcucugaguuucc

SEQ ID NO: 1672478 - RNA, 19 nt, Artificial Sequence
  Description of Artificial Sequence: Synthetic oligonucleotide
guuaugcuacaaacuuaga

SEQ ID NO: 1672479 - RNA, 19 nt, Artificial Sequence
  Description of Artificial Sequence: Synthetic oligonucleotide
augaagaguuagaucuaau

SEQ ID NO: 1672480 - RNA, 19 nt, Artificial Sequence
  Description of Artificial Sequence: Synthetic oligonucleotide
agugaaagucuaaggucuu

SEQ ID NO: 1672481 - RNA, 19 nt, Artificial Sequence
  Description of Artificial Sequence: Synthetic oligonucleotide
gcucuuuuaggcaugcucu

SEQ ID NO: 1672482 - RNA, 19 nt, Artificial Sequence
  Description of Artificial Sequence: Synthetic oligonucleotide
aagucgaguccugcauaaa

SEQ ID NO: 1672483 - RNA, 19 nt, Artificial Sequence
  Description of Artificial Sequence: Synthetic oligonucleotide
agcaguccaacggcgugca

SEQ ID NO: 1672484 - RNA, 19 nt, Artificial Sequence
  Description of Artificial Sequence: Synthetic oligonucleotide
uugcauguuuugggagcca

SEQ ID NO: 1672485 - RNA, 19 nt, Artificial Sequence
  Description of Artificial Sequence: Synthetic oligonucleotide
gcucugaguuuccaacuga

SEQ ID NO: 1672486 - RNA, 19 nt, Artificial Sequence
  Description of Artificial Sequence: Synthetic oligonucleotide
ccagaacaccauuaaaaua

SEQ ID NO: 1672487 - RNA, 19 nt, Artificial Sequence
  Description of Artificial Sequence: Synthetic oligonucleotide
gccggguaacuccuuugag

SEQ ID NO: 1672488 - RNA, 19 nt, Artificial Sequence
  Description of Artificial Sequence: Synthetic oligonucleotide
cguuauugaaaauuuuagu

SEQ ID NO: 1672489 - RNA, 19 nt, Artificial Sequence
  Description of Artificial Sequence: Synthetic oligonucleotide
cauuggaaguggagccaga

SEQ ID NO: 1672490 - RNA, 19 nt, Artificial Sequence
  Description of Artificial Sequence: Synthetic oligonucleotide
ccggguaacuccuuugaga

SEQ ID NO: 1672491 - RNA, 19 nt, Artificial Sequence
  Description of Artificial Sequence: Synthetic oligonucleotide
ccuuuagccugaaacaagu

SEQ ID NO: 1672492 - RNA, 19 nt, Artificial Sequence
  Description of Artificial Sequence: Synthetic oligonucleotide
cuuagacaguggagaagua

SEQ ID NO: 1672493 - RNA, 19 nt, Artificial Sequence
  Description of Artificial Sequence: Synthetic oligonucleotide
caguggauaagagaugcau

SEQ ID NO: 1672494 - RNA, 19 nt, Artificial Sequence
  Description of Artificial Sequence: Synthetic oligonucleotide
acggcgugcacagugccuu

SEQ ID NO: 1672495 - RNA, 19 nt, Artificial Sequence
  Description of Artificial Sequence: Synthetic oligonucleotide
gacacugggaaagcccagu

SEQ ID NO: 1672496 - RNA, 19 nt, Artificial Sequence
  Description of Artificial Sequence: Synthetic oligonucleotide
gagaggggaugugaagugu

SEQ ID NO: 1672497 - RNA, 19 nt, Artificial Sequence
  Description of Artificial Sequence: Synthetic oligonucleotide
cagcagaguccaauaauau

SEQ ID NO: 1672498 - RNA, 19 nt, Artificial Sequence
  Description of Artificial Sequence: Synthetic oligonucleotide
ccuuuagcuuuguacaugu

SEQ ID NO: 1672499 - RNA, 19 nt, Artificial Sequence
  Description of Artificial Sequence: Synthetic oligonucleotide
gaacaccauuaaaauaauu

SEQ ID NO: 1672500 - RNA, 19 nt, Artificial Sequence
  Description of Artificial Sequence: Synthetic oligonucleotide
gggacuacauucauuuccu

SEQ ID NO: 1672501 - RNA, 19 nt, Artificial Sequence
  Description of Artificial Sequence: Synthetic oligonucleotide
acagaggauccaguuuguu

SEQ ID NO: 1672502 - RNA, 19 nt, Artificial Sequence
  Description of Artificial Sequence: Synthetic oligonucleotide
caggaaccagggcauugga

SEQ ID NO: 1672503 - RNA, 19 nt, Artificial Sequence
  Description of Artificial Sequence: Synthetic oligonucleotide
agcccaguuuuaaaauauu

SEQ ID NO: 1672504 - RNA, 19 nt, Artificial Sequence
  Description of Artificial Sequence: Synthetic oligonucleotide
ucuugccggguaacuccuu

SEQ ID NO: 1672505 - RNA, 19 nt, Artificial Sequence
  Description of Artificial Sequence: Synthetic oligonucleotide
gaaugugcugugaccaguu

SEQ ID NO: 1672506 - RNA, 19 nt, Artificial Sequence
  Description of Artificial Sequence: Synthetic oligonucleotide
cagagaugucaaagugaaa

SEQ ID NO: 1672507 - RNA, 19 nt, Artificial Sequence
  Description of Artificial Sequence: Synthetic oligonucleotide
ggcauuggaaguggagcca

SEQ ID NO: 1672508 - RNA, 19 nt, Artificial Sequence
  Description of Artificial Sequence: Synthetic oligonucleotide
gcccaguuuuaaaauauua

SEQ ID NO: 1672509 - RNA, 19 nt, Artificial Sequence
  Description of Artificial Sequence: Synthetic oligonucleotide
ggauccaguuuguuaugcu

SEQ ID NO: 1672510 - RNA, 19 nt, Artificial Sequence
  Description of Artificial Sequence: Synthetic oligonucleotide
uggugacagcaaucaccuu

SEQ ID NO: 1672511 - RNA, 19 nt, Artificial Sequence
  Description of Artificial Sequence: Synthetic oligonucleotide
ggacaccaucccugugccc

SEQ ID NO: 1672512 - RNA, 19 nt, Artificial Sequence
  Description of Artificial Sequence: Synthetic oligonucleotide
ggcgucucagagaugucaa

SEQ ID NO: 1672513 - RNA, 19 nt, Artificial Sequence
  Description of Artificial Sequence: Synthetic oligonucleotide
cccaacccaaaguuauuaa

SEQ ID NO: 1672514 - RNA, 19 nt, Artificial Sequence
  Description of Artificial Sequence: Synthetic oligonucleotide
gucagcaguccaacggcgu

SEQ ID NO: 1672515 - RNA, 19 nt, Artificial Sequence
  Description of Artificial Sequence: Synthetic oligonucleotide
cacagugccuucgauuaau

SEQ ID NO: 1672516 - RNA, 19 nt, Artificial Sequence
  Description of Artificial Sequence: Synthetic oligonucleotide
gcuaagcaauucauuucua

SEQ ID NO: 1672517 - RNA, 19 nt, Artificial Sequence
  Description of Artificial Sequence: Synthetic oligonucleotide
gugaccaguuauggaauuu

SEQ ID NO: 1672518 - RNA, 19 nt, Artificial Sequence
  Description of Artificial Sequence: Synthetic oligonucleotide
cuugccggguaacuccuuu

SEQ ID NO: 1672519 - RNA, 19 nt, Artificial Sequence
  Description of Artificial Sequence: Synthetic oligonucleotide
cugguauaacagugcgcau

SEQ ID NO: 1672520 - RNA, 19 nt, Artificial Sequence
  Description of Artificial Sequence: Synthetic oligonucleotide
gcgcaugaauguacaagaa

SEQ ID NO: 1672521 - RNA, 19 nt, Artificial Sequence
  Description of Artificial Sequence: Synthetic oligonucleotide
guuuugggagccagucuuu

SEQ ID NO: 1672522 - RNA, 19 nt, Artificial Sequence
  Description of Artificial Sequence: Synthetic oligonucleotide
cacugggaaagcccaguuu

SEQ ID NO: 1672523 - RNA, 19 nt, Artificial Sequence
  Description of Artificial Sequence: Synthetic oligonucleotide
guacuccuggugacagcaa

SEQ ID NO: 1672524 - RNA, 19 nt, Artificial Sequence
  Description of Artificial Sequence: Synthetic oligonucleotide
gcgucucagagaugucaaa

SEQ ID NO: 1672525 - RNA, 19 nt, Artificial Sequence
  Description of Artificial Sequence: Synthetic oligonucleotide
gggcaguguacaucuuuau

SEQ ID NO: 1672526 - RNA, 19 nt, Artificial Sequence
  Description of Artificial Sequence: Synthetic oligonucleotide
gucuaaggucuugccgggu

SEQ ID NO: 1672527 - RNA, 19 nt, Artificial Sequence
  Description of Artificial Sequence: Synthetic oligonucleotide
ccccaacccaaaguuauua

SEQ ID NO: 1672528 - RNA, 19 nt, Artificial Sequence
  Description of Artificial Sequence: Synthetic oligonucleotide
gcgggcaguguacaucuuu

SEQ ID NO: 1672529 - RNA, 19 nt, Artificial Sequence
  Description of Artificial Sequence: Synthetic oligonucleotide
cccguuccuucccgcagca

SEQ ID NO: 1672530 - RNA, 19 nt, Artificial Sequence
  Description of Artificial Sequence: Synthetic oligonucleotide
gccuucgauuaaugcacuu

SEQ ID NO: 1672531 - RNA, 19 nt, Artificial Sequence
  Description of Artificial Sequence: Synthetic oligonucleotide
gcgcuggcgggcaguguac

SEQ ID NO: 1672532 - RNA, 19 nt, Artificial Sequence
  Description of Artificial Sequence: Synthetic oligonucleotide
ccguuccuucccgcagcac

SEQ ID NO: 1672533 - RNA, 19 nt, Artificial Sequence
  Description of Artificial Sequence: Synthetic oligonucleotide
gccagucuuuaggcuuucu

SEQ ID NO: 1672534 - RNA, 19 nt, Artificial Sequence
  Description of Artificial Sequence: Synthetic oligonucleotide
gcuggccuccauacuuguu

SEQ ID NO: 1672535 - RNA, 19 nt, Artificial Sequence
  Description of Artificial Sequence: Synthetic oligonucleotide
uuaauuuagaauauuauag

SEQ ID NO: 1672536 - RNA, 19 nt, Artificial Sequence
  Description of Artificial Sequence: Synthetic oligonucleotide
aauuuagaauauuauagca

SEQ ID NO: 1672537 - RNA, 19 nt, Artificial Sequence
  Description of Artificial Sequence: Synthetic oligonucleotide
uuugcauagcauauaaacg

SEQ ID NO: 1672538 - RNA, 19 nt, Artificial Sequence
  Description of Artificial Sequence: Synthetic oligonucleotide
ucuauuaaaaggcuugcag

SEQ ID NO: 1672539 - RNA, 19 nt, Artificial Sequence
  Description of Artificial Sequence: Synthetic oligonucleotide
aagcgcuucuaacugaucc

SEQ ID NO: 1672540 - RNA, 19 nt, Artificial Sequence
  Description of Artificial Sequence: Synthetic oligonucleotide
aaauuuacgacacucugga

SEQ ID NO: 1672541 - RNA, 19 nt, Artificial Sequence
  Description of Artificial Sequence: Synthetic oligonucleotide
uaauuuagaauauuauagc

SEQ ID NO: 1672542 - RNA, 19 nt, Artificial Sequence
  Description of Artificial Sequence: Synthetic oligonucleotide
uuauagcaacauaauaugg

SEQ ID NO: 1672543 - RNA, 19 nt, Artificial Sequence
  Description of Artificial Sequence: Synthetic oligonucleotide
auugucugcauauaagaac

SEQ ID NO: 1672544 - RNA, 19 nt, Artificial Sequence
  Description of Artificial Sequence: Synthetic oligonucleotide
uaugcucuuaaacugcgcg

SEQ ID NO: 1672545 - RNA, 19 nt, Artificial Sequence
  Description of Artificial Sequence: Synthetic oligonucleotide
cauaauuuuccaaaugggc

SEQ ID NO: 1672546 - RNA, 19 nt, Artificial Sequence
  Description of Artificial Sequence: Synthetic oligonucleotide
uguaaggaguauuaguucc

SEQ ID NO: 1672547 - RNA, 19 nt, Artificial Sequence
  Description of Artificial Sequence: Synthetic oligonucleotide
uuugcaguacuucugagcu

SEQ ID NO: 1672548 - RNA, 19 nt, Artificial Sequence
  Description of Artificial Sequence: Synthetic oligonucleotide
auauacguugccuuccacc

SEQ ID NO: 1672549 - RNA, 19 nt, Artificial Sequence
  Description of Artificial Sequence: Synthetic oligonucleotide
ucucaaaugaugcuguaug

SEQ ID NO: 1672550 - RNA, 19 nt, Artificial Sequence
  Description of Artificial Sequence: Synthetic oligonucleotide
aaaauuuacgacacucugg

SEQ ID NO: 1672551 - RNA, 19 nt, Artificial Sequence
  Description of Artificial Sequence: Synthetic oligonucleotide
gauccauuagcuuugauaa

SEQ ID NO: 1672552 - RNA, 19 nt, Artificial Sequence
  Description of Artificial Sequence: Synthetic oligonucleotide
auuugcaguacuucugagc

SEQ ID NO: 1672553 - RNA, 19 nt, Artificial Sequence
  Description of Artificial Sequence: Synthetic oligonucleotide
cauauguugaagaugauga

SEQ ID NO: 1672554 - RNA, 19 nt, Artificial Sequence
  Description of Artificial Sequence: Synthetic oligonucleotide
auauaaacgacaguaguag

SEQ ID NO: 1672555 - RNA, 19 nt, Artificial Sequence
  Description of Artificial Sequence: Synthetic oligonucleotide
uguuaugacaucuauuaaa

SEQ ID NO: 1672556 - RNA, 19 nt, Artificial Sequence
  Description of Artificial Sequence: Synthetic oligonucleotide
aaaucguccagcucggucu

SEQ ID NO: 1672557 - RNA, 19 nt, Artificial Sequence
  Description of Artificial Sequence: Synthetic oligonucleotide
uuuacugucaaucuucauu

SEQ ID NO: 1672558 - RNA, 19 nt, Artificial Sequence
  Description of Artificial Sequence: Synthetic oligonucleotide
ucuuuaagcaguuauggau

SEQ ID NO: 1672559 - RNA, 19 nt, Artificial Sequence
  Description of Artificial Sequence: Synthetic oligonucleotide
acuguuaugacaucuauua

SEQ ID NO: 1672560 - RNA, 19 nt, Artificial Sequence
  Description of Artificial Sequence: Synthetic oligonucleotide
auaaacgacaguaguaggc

SEQ ID NO: 1672561 - RNA, 19 nt, Artificial Sequence
  Description of Artificial Sequence: Synthetic oligonucleotide
gaaccaugcucccaaaagg

SEQ ID NO: 1672562 - RNA, 19 nt, Artificial Sequence
  Description of Artificial Sequence: Synthetic oligonucleotide
auuuacgacacucuggagu

SEQ ID NO: 1672563 - RNA, 19 nt, Artificial Sequence
  Description of Artificial Sequence: Synthetic oligonucleotide
acauaauaugguuuguuug

SEQ ID NO: 1672564 - RNA, 19 nt, Artificial Sequence
  Description of Artificial Sequence: Synthetic oligonucleotide
uuacugucaaucuucauuc

SEQ ID NO: 1672565 - RNA, 19 nt, Artificial Sequence
  Description of Artificial Sequence: Synthetic oligonucleotide
agcaacauaauaugguuug

SEQ ID NO: 1672566 - RNA, 19 nt, Artificial Sequence
  Description of Artificial Sequence: Synthetic oligonucleotide
uguaugcucuuaaacugcg

SEQ ID NO: 1672567 - RNA, 19 nt, Artificial Sequence
  Description of Artificial Sequence: Synthetic oligonucleotide
uaauuuuccaaaugggcac

SEQ ID NO: 1672568 - RNA, 19 nt, Artificial Sequence
  Description of Artificial Sequence: Synthetic oligonucleotide
uauaaacgacaguaguagg

SEQ ID NO: 1672569 - RNA, 19 nt, Artificial Sequence
  Description of Artificial Sequence: Synthetic oligonucleotide
ugaggaaaguguaaggagu

SEQ ID NO: 1672570 - RNA, 19 nt, Artificial Sequence
  Description of Artificial Sequence: Synthetic oligonucleotide
ucuuaagcgcuucuaacug

SEQ ID NO: 1672571 - RNA, 19 nt, Artificial Sequence
  Description of Artificial Sequence: Synthetic oligonucleotide
ucugcauauaagaacauuu

SEQ ID NO: 1672572 - RNA, 19 nt, Artificial Sequence
  Description of Artificial Sequence: Synthetic oligonucleotide
aguugcuugggucauaugu

SEQ ID NO: 1672573 - RNA, 19 nt, Artificial Sequence
  Description of Artificial Sequence: Synthetic oligonucleotide
uucuaacugauccauuagc

SEQ ID NO: 1672574 - RNA, 19 nt, Artificial Sequence
  Description of Artificial Sequence: Synthetic oligonucleotide
aagcuuauacccaacauga

SEQ ID NO: 1672575 - RNA, 19 nt, Artificial Sequence
  Description of Artificial Sequence: Synthetic oligonucleotide
acaguaguaggccaccacg

SEQ ID NO: 1672576 - RNA, 19 nt, Artificial Sequence
  Description of Artificial Sequence: Synthetic oligonucleotide
aaguuguauacaugucagg

SEQ ID NO: 1672577 - RNA, 19 nt, Artificial Sequence
  Description of Artificial Sequence: Synthetic oligonucleotide
cuucugugaaccaugcucc

SEQ ID NO: 1672578 - RNA, 19 nt, Artificial Sequence
  Description of Artificial Sequence: Synthetic oligonucleotide
acugccagcauauuugcag

SEQ ID NO: 1672579 - RNA, 19 nt, Artificial Sequence
  Description of Artificial Sequence: Synthetic oligonucleotide
uaagcaguuauggauauac

SEQ ID NO: 1672580 - RNA, 19 nt, Artificial Sequence
  Description of Artificial Sequence: Synthetic oligonucleotide
gaaguuguauacaugucag

SEQ ID NO: 1672581 - RNA, 19 nt, Artificial Sequence
  Description of Artificial Sequence: Synthetic oligonucleotide
aagcauaauuuuccaaaug

SEQ ID NO: 1672582 - RNA, 19 nt, Artificial Sequence
  Description of Artificial Sequence: Synthetic oligonucleotide
ucuggugucagacggauau

SEQ ID NO: 1672583 - RNA, 19 nt, Artificial Sequence
  Description of Artificial Sequence: Synthetic oligonucleotide
uauacguugccuuccaccu

SEQ ID NO: 1672584 - RNA, 19 nt, Artificial Sequence
  Description of Artificial Sequence: Synthetic oligonucleotide
ugcauauaagaacauuuuc

SEQ ID NO: 1672585 - RNA, 19 nt, Artificial Sequence
  Description of Artificial Sequence: Synthetic oligonucleotide
ucuguggacagucugugga

SEQ ID NO: 1672586 - RNA, 19 nt, Artificial Sequence
  Description of Artificial Sequence: Synthetic oligonucleotide
agcaguuauggauauacgu

SEQ ID NO: 1672587 - RNA, 19 nt, Artificial Sequence
  Description of Artificial Sequence: Synthetic oligonucleotide
ugagcucuagcaaaguccu

SEQ ID NO: 1672588 - RNA, 19 nt, Artificial Sequence
  Description of Artificial Sequence: Synthetic oligonucleotide
ucuagcaaaguccucuggu

SEQ ID NO: 1672589 - RNA, 19 nt, Artificial Sequence
  Description of Artificial Sequence: Synthetic oligonucleotide
uaaacgacaguaguaggcc

SEQ ID NO: 1672590 - RNA, 19 nt, Artificial Sequence
  Description of Artificial Sequence: Synthetic oligonucleotide
caguuauggauauacguug

SEQ ID NO: 1672591 - RNA, 19 nt, Artificial Sequence
  Description of Artificial Sequence: Synthetic oligonucleotide
acaaccaacuauuucuuga

SEQ ID NO: 1672592 - RNA, 19 nt, Artificial Sequence
  Description of Artificial Sequence: Synthetic oligonucleotide
acuguagcugccuggugcc

SEQ ID NO: 1672593 - RNA, 19 nt, Artificial Sequence
  Description of Artificial Sequence: Synthetic oligonucleotide
ucauauguugaagaugaug

SEQ ID NO: 1672594 - RNA, 19 nt, Artificial Sequence
  Description of Artificial Sequence: Synthetic oligonucleotide
ugauccauuagcuuugaua

SEQ ID NO: 1672595 - RNA, 19 nt, Artificial Sequence
  Description of Artificial Sequence: Synthetic oligonucleotide
ucuuaaacugcgcgggcag

SEQ ID NO: 1672596 - RNA, 19 nt, Artificial Sequence
  Description of Artificial Sequence: Synthetic oligonucleotide
uguauuagcuggagcaugu

SEQ ID NO: 1672597 - RNA, 19 nt, Artificial Sequence
  Description of Artificial Sequence: Synthetic oligonucleotide
gucguugucuuacugagug

SEQ ID NO: 1672598 - RNA, 19 nt, Artificial Sequence
  Description of Artificial Sequence: Synthetic oligonucleotide
cauauuugcaguacuucug

SEQ ID NO: 1672599 - RNA, 19 nt, Artificial Sequence
  Description of Artificial Sequence: Synthetic oligonucleotide
gagcaugugcaccuggagg

SEQ ID NO: 1672600 - RNA, 19 nt, Artificial Sequence
  Description of Artificial Sequence: Synthetic oligonucleotide
aguuguauacaugucagga

SEQ ID NO: 1672601 - RNA, 19 nt, Artificial Sequence
  Description of Artificial Sequence: Synthetic oligonucleotide
aguuauggauauacguugc

SEQ ID NO: 1672602 - RNA, 19 nt, Artificial Sequence
  Description of Artificial Sequence: Synthetic oligonucleotide
uuucuuaagcgcuucuaac

SEQ ID NO: 1672603 - RNA, 19 nt, Artificial Sequence
  Description of Artificial Sequence: Synthetic oligonucleotide
ugcucuuaaacugcgcggg

SEQ ID NO: 1672604 - RNA, 19 nt, Artificial Sequence
  Description of Artificial Sequence: Synthetic oligonucleotide
cucaaaugaugcuguaugc

SEQ ID NO: 1672605 - RNA, 19 nt, Artificial Sequence
  Description of Artificial Sequence: Synthetic oligonucleotide
ucuacagggacauuuucau

SEQ ID NO: 1672606 - RNA, 19 nt, Artificial Sequence
  Description of Artificial Sequence: Synthetic oligonucleotide
ugcauagcauauaaacgac

SEQ ID NO: 1672607 - RNA, 19 nt, Artificial Sequence
  Description of Artificial Sequence: Synthetic oligonucleotide
uaugcacucagaagcacac

SEQ ID NO: 1672608 - RNA, 19 nt, Artificial Sequence
  Description of Artificial Sequence: Synthetic oligonucleotide
uauucuggcaaucuuuauu

SEQ ID NO: 1672609 - RNA, 19 nt, Artificial Sequence
  Description of Artificial Sequence: Synthetic oligonucleotide
auagcaacauaauaugguu

SEQ ID NO: 1672610 - RNA, 19 nt, Artificial Sequence
  Description of Artificial Sequence: Synthetic oligonucleotide
caaaugaugcuguaugcuc

SEQ ID NO: 1672611 - RNA, 19 nt, Artificial Sequence
  Description of Artificial Sequence: Synthetic oligonucleotide
aaugggcacaaccaacuau

SEQ ID NO: 1672612 - RNA, 19 nt, Artificial Sequence
  Description of Artificial Sequence: Synthetic oligonucleotide
ugucuuacugaguggaacu

SEQ ID NO: 1672613 - RNA, 19 nt, Artificial Sequence
  Description of Artificial Sequence: Synthetic oligonucleotide
uuuacgacacucuggaguu

SEQ ID NO: 1672614 - RNA, 19 nt, Artificial Sequence
  Description of Artificial Sequence: Synthetic oligonucleotide
uugggucauauguugaaga

SEQ ID NO: 1672615 - RNA, 19 nt, Artificial Sequence
  Description of Artificial Sequence: Synthetic oligonucleotide
aauuuacgacacucuggag

SEQ ID NO: 1672616 - RNA, 19 nt, Artificial Sequence
  Description of Artificial Sequence: Synthetic oligonucleotide
aaaugaugcuguaugcucu

SEQ ID NO: 1672617 - RNA, 19 nt, Artificial Sequence
  Description of Artificial Sequence: Synthetic oligonucleotide
uucuuuaagcaguuaugga

SEQ ID NO: 1672618 - RNA, 19 nt, Artificial Sequence
  Description of Artificial Sequence: Synthetic oligonucleotide
uguggacuggguugcacgg

SEQ ID NO: 1672619 - RNA, 19 nt, Artificial Sequence
  Description of Artificial Sequence: Synthetic oligonucleotide
ugaguaacagcuucauuau

SEQ ID NO: 1672620 - RNA, 19 nt, Artificial Sequence
  Description of Artificial Sequence: Synthetic oligonucleotide
auaauaugguuuguuuguc

SEQ ID NO: 1672621 - RNA, 19 nt, Artificial Sequence
  Description of Artificial Sequence: Synthetic oligonucleotide
aaacugcgcgggcagcggc

SEQ ID NO: 1672622 - RNA, 19 nt, Artificial Sequence
  Description of Artificial Sequence: Synthetic oligonucleotide
caaugguuggaacagucug

SEQ ID NO: 1672623 - RNA, 19 nt, Artificial Sequence
  Description of Artificial Sequence: Synthetic oligonucleotide
caaccaacuauuucuugag

SEQ ID NO: 1672624 - RNA, 19 nt, Artificial Sequence
  Description of Artificial Sequence: Synthetic oligonucleotide
caugcuguagucacauggc

SEQ ID NO: 1672625 - RNA, 19 nt, Artificial Sequence
  Description of Artificial Sequence: Synthetic oligonucleotide
aacgacaguaguaggccac

SEQ ID NO: 1672626 - RNA, 19 nt, Artificial Sequence
  Description of Artificial Sequence: Synthetic oligonucleotide
cuguaugcucuuaaacugc

SEQ ID NO: 1672627 - RNA, 19 nt, Artificial Sequence
  Description of Artificial Sequence: Synthetic oligonucleotide
uuaaacugcgcgggcagcg

SEQ ID NO: 1672628 - RNA, 19 nt, Artificial Sequence
  Description of Artificial Sequence: Synthetic oligonucleotide
uccccauucuuuaagcagu

SEQ ID NO: 1672629 - RNA, 19 nt, Artificial Sequence
  Description of Artificial Sequence: Synthetic oligonucleotide
uaaaaggcuugcaguguag

SEQ ID NO: 1672630 - RNA, 19 nt, Artificial Sequence
  Description of Artificial Sequence: Synthetic oligonucleotide
agcucuaugcacucagaag

SEQ ID NO: 1672631 - RNA, 19 nt, Artificial Sequence
  Description of Artificial Sequence: Synthetic oligonucleotide
uuuucaucugucagcucgc

SEQ ID NO: 1672632 - RNA, 19 nt, Artificial Sequence
  Description of Artificial Sequence: Synthetic oligonucleotide
ucaaaugaugcuguaugcu

SEQ ID NO: 1672633 - RNA, 19 nt, Artificial Sequence
  Description of Artificial Sequence: Synthetic oligonucleotide
agccguucucaaaugaugc

SEQ ID NO: 1672634 - RNA, 19 nt, Artificial Sequence
  Description of Artificial Sequence: Synthetic oligonucleotide
augcucuuaaacugcgcgg

SEQ ID NO: 1672635 - RNA, 19 nt, Artificial Sequence
  Description of Artificial Sequence: Synthetic oligonucleotide
ucaaugguuggaacagucu

SEQ ID NO: 1672636 - RNA, 19 nt, Artificial Sequence
  Description of Artificial Sequence: Synthetic oligonucleotide
gaugaugauggcugaggug

SEQ ID NO: 1672637 - RNA, 19 nt, Artificial Sequence
  Description of Artificial Sequence: Synthetic oligonucleotide
uuuaagcaguuauggauau

SEQ ID NO: 1672638 - RNA, 19 nt, Artificial Sequence
  Description of Artificial Sequence: Synthetic oligonucleotide
uccaaaugggcacaaccaa

SEQ ID NO: 1672639 - RNA, 19 nt, Artificial Sequence
  Description of Artificial Sequence: Synthetic oligonucleotide
ugcaguacuucugagcucu

SEQ ID NO: 1672640 - RNA, 19 nt, Artificial Sequence
  Description of Artificial Sequence: Synthetic oligonucleotide
aguguaaggaguauuaguu

SEQ ID NO: 1672641 - RNA, 19 nt, Artificial Sequence
  Description of Artificial Sequence: Synthetic oligonucleotide
guuaugacaucuauuaaaa

SEQ ID NO: 1672642 - RNA, 19 nt, Artificial Sequence
  Description of Artificial Sequence: Synthetic oligonucleotide
aaacgacaguaguaggcca

SEQ ID NO: 1672643 - RNA, 19 nt, Artificial Sequence
  Description of Artificial Sequence: Synthetic oligonucleotide
caguaguaggccaccacgg

SEQ ID NO: 1672644 - RNA, 19 nt, Artificial Sequence
  Description of Artificial Sequence: Synthetic oligonucleotide
uauuugcaguacuucugag

SEQ ID NO: 1672645 - RNA, 19 nt, Artificial Sequence
  Description of Artificial Sequence: Synthetic oligonucleotide
uuauggauauacguugccu

SEQ ID NO: 1672646 - RNA, 19 nt, Artificial Sequence
  Description of Artificial Sequence: Synthetic oligonucleotide
cuaacaucagcucuaugca

SEQ ID NO: 1672647 - RNA, 19 nt, Artificial Sequence
  Description of Artificial Sequence: Synthetic oligonucleotide
aggaguauuaguuccgcau

SEQ ID NO: 1672648 - RNA, 19 nt, Artificial Sequence
  Description of Artificial Sequence: Synthetic oligonucleotide
agaauauuauagcaacaua

SEQ ID NO: 1672649 - RNA, 19 nt, Artificial Sequence
  Description of Artificial Sequence: Synthetic oligonucleotide
gcuguaugcucuuaaacug

SEQ ID NO: 1672650 - RNA, 19 nt, Artificial Sequence
  Description of Artificial Sequence: Synthetic oligonucleotide
accaacuauuucuugagua

SEQ ID NO: 1672651 - RNA, 19 nt, Artificial Sequence
  Description of Artificial Sequence: Synthetic oligonucleotide
ggaaguuguauacauguca

SEQ ID NO: 1672652 - RNA, 19 nt, Artificial Sequence
  Description of Artificial Sequence: Synthetic oligonucleotide
aaugguuggaacagucugu

SEQ ID NO: 1672653 - RNA, 19 nt, Artificial Sequence
  Description of Artificial Sequence: Synthetic oligonucleotide
uuaagcgcuucuaacugau

SEQ ID NO: 1672654 - RNA, 19 nt, Artificial Sequence
  Description of Artificial Sequence: Synthetic oligonucleotide
cacuguagcugccuggugc

SEQ ID NO: 1672655 - RNA, 19 nt, Artificial Sequence
  Description of Artificial Sequence: Synthetic oligonucleotide
aaagguugaggaaagugua

SEQ ID NO: 1672656 - RNA, 19 nt, Artificial Sequence
  Description of Artificial Sequence: Synthetic oligonucleotide
aaccaacuauuucuugagu

SEQ ID NO: 1672657 - RNA, 19 nt, Artificial Sequence
  Description of Artificial Sequence: Synthetic oligonucleotide
guaaggaguauuaguuccg

SEQ ID NO: 1672658 - RNA, 19 nt, Artificial Sequence
  Description of Artificial Sequence: Synthetic oligonucleotide
cuucuaacugauccauuag

SEQ ID NO: 1672659 - RNA, 19 nt, Artificial Sequence
  Description of Artificial Sequence: Synthetic oligonucleotide
auuagcuggagcaugugca

SEQ ID NO: 1672660 - RNA, 19 nt, Artificial Sequence
  Description of Artificial Sequence: Synthetic oligonucleotide
guuauggauauacguugcc

SEQ ID NO: 1672661 - RNA, 19 nt, Artificial Sequence
  Description of Artificial Sequence: Synthetic oligonucleotide
agcauauaaacgacaguag

SEQ ID NO: 1672662 - RNA, 19 nt, Artificial Sequence
  Description of Artificial Sequence: Synthetic oligonucleotide
uaacaucagcucuaugcac

SEQ ID NO: 1672663 - RNA, 19 nt, Artificial Sequence
  Description of Artificial Sequence: Synthetic oligonucleotide
cuccccauucuuuaagcag

SEQ ID NO: 1672664 - RNA, 19 nt, Artificial Sequence
  Description of Artificial Sequence: Synthetic oligonucleotide
cauaauaugguuuguuugu

SEQ ID NO: 1672665 - RNA, 19 nt, Artificial Sequence
  Description of Artificial Sequence: Synthetic oligonucleotide
agcgcggccaucuccacuc

SEQ ID NO: 1672666 - RNA, 19 nt, Artificial Sequence
  Description of Artificial Sequence: Synthetic oligonucleotide
guauuaguuccgcaugcug

SEQ ID NO: 1672667 - RNA, 19 nt, Artificial Sequence
  Description of Artificial Sequence: Synthetic oligonucleotide
uacuuucuguguuucacau

SEQ ID NO: 1672668 - RNA, 19 nt, Artificial Sequence
  Description of Artificial Sequence: Synthetic oligonucleotide
aaccaugcucccaaaaggu

SEQ ID NO: 1672669 - RNA, 19 nt, Artificial Sequence
  Description of Artificial Sequence: Synthetic oligonucleotide
aaucuucauuccaguuugc

SEQ ID NO: 1672670 - RNA, 19 nt, Artificial Sequence
  Description of Artificial Sequence: Synthetic oligonucleotide
ugucaaucuucauuccagu

SEQ ID NO: 1672671 - RNA, 19 nt, Artificial Sequence
  Description of Artificial Sequence: Synthetic oligonucleotide
gaaucuguaucccacugua

SEQ ID NO: 1672672 - RNA, 19 nt, Artificial Sequence
  Description of Artificial Sequence: Synthetic oligonucleotide
auacuuucuguguuucaca

SEQ ID NO: 1672673 - RNA, 19 nt, Artificial Sequence
  Description of Artificial Sequence: Synthetic oligonucleotide
acaucagcucuaugcacuc

SEQ ID NO: 1672674 - RNA, 19 nt, Artificial Sequence
  Description of Artificial Sequence: Synthetic oligonucleotide
aaggaguauuaguuccgca

SEQ ID NO: 1672675 - RNA, 19 nt, Artificial Sequence
  Description of Artificial Sequence: Synthetic oligonucleotide
uccugagccguucucaaau

SEQ ID NO: 1672676 - RNA, 19 nt, Artificial Sequence
  Description of Artificial Sequence: Synthetic oligonucleotide
ugucagcucgccaaacacu

SEQ ID NO: 1672677 - RNA, 19 nt, Artificial Sequence
  Description of Artificial Sequence: Synthetic oligonucleotide
gcauaauuuuccaaauggg

SEQ ID NO: 1672678 - RNA, 19 nt, Artificial Sequence
  Description of Artificial Sequence: Synthetic oligonucleotide
gugucagacggauaucccc

SEQ ID NO: 1672679 - RNA, 19 nt, Artificial Sequence
  Description of Artificial Sequence: Synthetic oligonucleotide
cuauuaaaaggcuugcagu

SEQ ID NO: 1672680 - RNA, 19 nt, Artificial Sequence
  Description of Artificial Sequence: Synthetic oligonucleotide
guuggaacagucuguggac

SEQ ID NO: 1672681 - RNA, 19 nt, Artificial Sequence
  Description of Artificial Sequence: Synthetic oligonucleotide
cuuauacccaacaugauuu

SEQ ID NO: 1672682 - RNA, 19 nt, Artificial Sequence
  Description of Artificial Sequence: Synthetic oligonucleotide
uucacucccugccuguugu

SEQ ID NO: 1672683 - RNA, 19 nt, Artificial Sequence
  Description of Artificial Sequence: Synthetic oligonucleotide
uaaggaguauuaguuccgc

SEQ ID NO: 1672684 - RNA, 19 nt, Artificial Sequence
  Description of Artificial Sequence: Synthetic oligonucleotide
uacuucugagcucuagcaa

SEQ ID NO: 1672685 - RNA, 19 nt, Artificial Sequence
  Description of Artificial Sequence: Synthetic oligonucleotide
aagcaguuauggauauacg

SEQ ID NO: 1672686 - RNA, 19 nt, Artificial Sequence
  Description of Artificial Sequence: Synthetic oligonucleotide
gcauauaagaacauuuuca

SEQ ID NO: 1672687 - RNA, 19 nt, Artificial Sequence
  Description of Artificial Sequence: Synthetic oligonucleotide
cuguggacuggguugcacg

SEQ ID NO: 1672688 - RNA, 19 nt, Artificial Sequence
  Description of Artificial Sequence: Synthetic oligonucleotide
ucggucuucauugucugca

SEQ ID NO: 1672689 - RNA, 19 nt, Artificial Sequence
  Description of Artificial Sequence: Synthetic oligonucleotide
auauguugaagaugaugau

SEQ ID NO: 1672690 - RNA, 19 nt, Artificial Sequence
  Description of Artificial Sequence: Synthetic oligonucleotide
uaguaggccaccacgggau

SEQ ID NO: 1672691 - RNA, 19 nt, Artificial Sequence
  Description of Artificial Sequence: Synthetic oligonucleotide
gaaaucguccagcucgguc

SEQ ID NO: 1672692 - RNA, 19 nt, Artificial Sequence
  Description of Artificial Sequence: Synthetic oligonucleotide
uugucuuacugaguggaac

SEQ ID NO: 1672693 - RNA, 19 nt, Artificial Sequence
  Description of Artificial Sequence: Synthetic oligonucleotide
aaucuguaucccacuguag

SEQ ID NO: 1672694 - RNA, 19 nt, Artificial Sequence
  Description of Artificial Sequence: Synthetic oligonucleotide
ucguugucuuacugagugg

SEQ ID NO: 1672695 - RNA, 19 nt, Artificial Sequence
  Description of Artificial Sequence: Synthetic oligonucleotide
ugaugcuguaugcucuuaa

SEQ ID NO: 1672696 - RNA, 19 nt, Artificial Sequence
  Description of Artificial Sequence: Synthetic oligonucleotide
ggaguauuaguuccgcaug

SEQ ID NO: 1672697 - RNA, 19 nt, Artificial Sequence
  Description of Artificial Sequence: Synthetic oligonucleotide
cuuacugaguggaacugca

SEQ ID NO: 1672698 - RNA, 19 nt, Artificial Sequence
  Description of Artificial Sequence: Synthetic oligonucleotide
guguaaggaguauuaguuc

SEQ ID NO: 1672699 - RNA, 19 nt, Artificial Sequence
  Description of Artificial Sequence: Synthetic oligonucleotide
cacgggaucccgcuugucg

SEQ ID NO: 1672700 - RNA, 19 nt, Artificial Sequence
  Description of Artificial Sequence: Synthetic oligonucleotide
auuaguuccgcaugcugua

SEQ ID NO: 1672701 - RNA, 19 nt, Artificial Sequence
  Description of Artificial Sequence: Synthetic oligonucleotide
ugggucauauguugaagau

SEQ ID NO: 1672702 - RNA, 19 nt, Artificial Sequence
  Description of Artificial Sequence: Synthetic oligonucleotide
auacccaacaugauuuucu

SEQ ID NO: 1672703 - RNA, 19 nt, Artificial Sequence
  Description of Artificial Sequence: Synthetic oligonucleotide
uugucagcagccugagcgc

SEQ ID NO: 1672704 - RNA, 19 nt, Artificial Sequence
  Description of Artificial Sequence: Synthetic oligonucleotide
ggcacaaccaacuauuucu

SEQ ID NO: 1672705 - RNA, 19 nt, Artificial Sequence
  Description of Artificial Sequence: Synthetic oligonucleotide
uugucgugcuccugagccg

SEQ ID NO: 1672706 - RNA, 19 nt, Artificial Sequence
  Description of Artificial Sequence: Synthetic oligonucleotide
uucguacuggagagcacug

SEQ ID NO: 1672707 - RNA, 19 nt, Artificial Sequence
  Description of Artificial Sequence: Synthetic oligonucleotide
ucaggaucaaugguuggaa

SEQ ID NO: 1672708 - RNA, 19 nt, Artificial Sequence
  Description of Artificial Sequence: Synthetic oligonucleotide
aaaugggcacaaccaacua

SEQ ID NO: 1672709 - RNA, 19 nt, Artificial Sequence
  Description of Artificial Sequence: Synthetic oligonucleotide
aucuucguacuggagagca

SEQ ID NO: 1672710 - RNA, 19 nt, Artificial Sequence
  Description of Artificial Sequence: Synthetic oligonucleotide
aacauccuuuaguguauau

SEQ ID NO: 1672711 - RNA, 19 nt, Artificial Sequence
  Description of Artificial Sequence: Synthetic oligonucleotide
guuacaccugugcugugug

SEQ ID NO: 1672712 - RNA, 19 nt, Artificial Sequence
  Description of Artificial Sequence: Synthetic oligonucleotide
aguggaacugcagucuucu

SEQ ID NO: 1672713 - RNA, 19 nt, Artificial Sequence
  Description of Artificial Sequence: Synthetic oligonucleotide
ugguuggaacagucugugg

SEQ ID NO: 1672714 - RNA, 19 nt, Artificial Sequence
  Description of Artificial Sequence: Synthetic oligonucleotide
gcucccaaaagguugagga

SEQ ID NO: 1672715 - RNA, 19 nt, Artificial Sequence
  Description of Artificial Sequence: Synthetic oligonucleotide
uggagcaugugcaccugga

SEQ ID NO: 1672716 - RNA, 19 nt, Artificial Sequence
  Description of Artificial Sequence: Synthetic oligonucleotide
agcgcuucuaacugaucca

SEQ ID NO: 1672717 - RNA, 19 nt, Artificial Sequence
  Description of Artificial Sequence: Synthetic oligonucleotide
gagaaguggcaccaacauc

SEQ ID NO: 1672718 - RNA, 19 nt, Artificial Sequence
  Description of Artificial Sequence: Synthetic oligonucleotide
cuugggucauauguugaag

SEQ ID NO: 1672719 - RNA, 19 nt, Artificial Sequence
  Description of Artificial Sequence: Synthetic oligonucleotide
aggguucgaugcuaacauc

SEQ ID NO: 1672720 - RNA, 19 nt, Artificial Sequence
  Description of Artificial Sequence: Synthetic oligonucleotide
ugcagguguauuagcugga

SEQ ID NO: 1672721 - RNA, 19 nt, Artificial Sequence
  Description of Artificial Sequence: Synthetic oligonucleotide
cucuagcaaaguccucugg

SEQ ID NO: 1672722 - RNA, 19 nt, Artificial Sequence
  Description of Artificial Sequence: Synthetic oligonucleotide
uguuacaccugugcugugu

SEQ ID NO: 1672723 - RNA, 19 nt, Artificial Sequence
  Description of Artificial Sequence: Synthetic oligonucleotide
gacaguaguaggccaccac

SEQ ID NO: 1672724 - RNA, 19 nt, Artificial Sequence
  Description of Artificial Sequence: Synthetic oligonucleotide
gauauacguugccuuccac

SEQ ID NO: 1672725 - RNA, 19 nt, Artificial Sequence
  Description of Artificial Sequence: Synthetic oligonucleotide
uauacccaacaugauuuuc

SEQ ID NO: 1672726 - RNA, 19 nt, Artificial Sequence
  Description of Artificial Sequence: Synthetic oligonucleotide
cuaugcacucagaagcaca

SEQ ID NO: 1672727 - RNA, 19 nt, Artificial Sequence
  Description of Artificial Sequence: Synthetic oligonucleotide
ucuugaguaacagcuucau

SEQ ID NO: 1672728 - RNA, 19 nt, Artificial Sequence
  Description of Artificial Sequence: Synthetic oligonucleotide
ugcacgguauugcuuguua

SEQ ID NO: 1672729 - RNA, 19 nt, Artificial Sequence
  Description of Artificial Sequence: Synthetic oligonucleotide
cuuaagcgcuucuaacuga

SEQ ID NO: 1672730 - RNA, 19 nt, Artificial Sequence
  Description of Artificial Sequence: Synthetic oligonucleotide
uaaacugcgcgggcagcgg

SEQ ID NO: 1672731 - RNA, 19 nt, Artificial Sequence
  Description of Artificial Sequence: Synthetic oligonucleotide
uuaguuccgcaugcuguag

SEQ ID NO: 1672732 - RNA, 19 nt, Artificial Sequence
  Description of Artificial Sequence: Synthetic oligonucleotide
ucuaugcacucagaagcac

SEQ ID NO: 1672733 - RNA, 19 nt, Artificial Sequence
  Description of Artificial Sequence: Synthetic oligonucleotide
aucuauuaaaaggcuugca

SEQ ID NO: 1672734 - RNA, 19 nt, Artificial Sequence
  Description of Artificial Sequence: Synthetic oligonucleotide
uggguugcacgguauugcu

SEQ ID NO: 1672735 - RNA, 19 nt, Artificial Sequence
  Description of Artificial Sequence: Synthetic oligonucleotide
auaugguuuguuuguccaa

SEQ ID NO: 1672736 - RNA, 19 nt, Artificial Sequence
  Description of Artificial Sequence: Synthetic oligonucleotide
gaaagcuuauacccaacau

SEQ ID NO: 1672737 - RNA, 19 nt, Artificial Sequence
  Description of Artificial Sequence: Synthetic oligonucleotide
uucucaaaugaugcuguau

SEQ ID NO: 1672738 - RNA, 19 nt, Artificial Sequence
  Description of Artificial Sequence: Synthetic oligonucleotide
cacaaccaacuauuucuug

SEQ ID NO: 1672739 - RNA, 19 nt, Artificial Sequence
  Description of Artificial Sequence: Synthetic oligonucleotide
gaguaacagcuucauuauc

SEQ ID NO: 1672740 - RNA, 19 nt, Artificial Sequence
  Description of Artificial Sequence: Synthetic oligonucleotide
cuggguugcacgguauugc

SEQ ID NO: 1672741 - RNA, 19 nt, Artificial Sequence
  Description of Artificial Sequence: Synthetic oligonucleotide
ugcucccaaaagguugagg

SEQ ID NO: 1672742 - RNA, 19 nt, Artificial Sequence
  Description of Artificial Sequence: Synthetic oligonucleotide
aguauuaguuccgcaugcu

SEQ ID NO: 1672743 - RNA, 19 nt, Artificial Sequence
  Description of Artificial Sequence: Synthetic oligonucleotide
guaguaggccaccacggga

SEQ ID NO: 1672744 - RNA, 19 nt, Artificial Sequence
  Description of Artificial Sequence: Synthetic oligonucleotide
cagguguauuagcuggagc

SEQ ID NO: 1672745 - RNA, 19 nt, Artificial Sequence
  Description of Artificial Sequence: Synthetic oligonucleotide
uugugaaaucguccagcuc

SEQ ID NO: 1672746 - RNA, 19 nt, Artificial Sequence
  Description of Artificial Sequence: Synthetic oligonucleotide
guguauuagcuggagcaug

SEQ ID NO: 1672747 - RNA, 19 nt, Artificial Sequence
  Description of Artificial Sequence: Synthetic oligonucleotide
gguucugcacggcagugcc

SEQ ID NO: 1672748 - RNA, 19 nt, Artificial Sequence
  Description of Artificial Sequence: Synthetic oligonucleotide
uacccaacaugauuuucua

SEQ ID NO: 1672749 - RNA, 19 nt, Artificial Sequence
  Description of Artificial Sequence: Synthetic oligonucleotide
aguaggccaccacgggauc

SEQ ID NO: 1672750 - RNA, 19 nt, Artificial Sequence
  Description of Artificial Sequence: Synthetic oligonucleotide
aacacuguuaugacaucua

SEQ ID NO: 1672751 - RNA, 19 nt, Artificial Sequence
  Description of Artificial Sequence: Synthetic oligonucleotide
guuuuacugucaaucuuca

SEQ ID NO: 1672752 - RNA, 19 nt, Artificial Sequence
  Description of Artificial Sequence: Synthetic oligonucleotide
uauacaugucaggaucaau

SEQ ID NO: 1672753 - RNA, 19 nt, Artificial Sequence
  Description of Artificial Sequence: Synthetic oligonucleotide
cucuaugcacucagaagca

SEQ ID NO: 1672754 - RNA, 19 nt, Artificial Sequence
  Description of Artificial Sequence: Synthetic oligonucleotide
agcaggguucgaugcuaac

SEQ ID NO: 1672755 - RNA, 19 nt, Artificial Sequence
  Description of Artificial Sequence: Synthetic oligonucleotide
aagguugaggaaaguguaa

SEQ ID NO: 1672756 - RNA, 19 nt, Artificial Sequence
  Description of Artificial Sequence: Synthetic oligonucleotide
cacgguauugcuuguuaca

SEQ ID NO: 1672757 - RNA, 19 nt, Artificial Sequence
  Description of Artificial Sequence: Synthetic oligonucleotide
caguuugcauagcauauaa

SEQ ID NO: 1672758 - RNA, 19 nt, Artificial Sequence
  Description of Artificial Sequence: Synthetic oligonucleotide
agccugagcgccuucugga

SEQ ID NO: 1672759 - RNA, 19 nt, Artificial Sequence
  Description of Artificial Sequence: Synthetic oligonucleotide
acgggaucccgcuugucgu

SEQ ID NO: 1672760 - RNA, 19 nt, Artificial Sequence
  Description of Artificial Sequence: Synthetic oligonucleotide
aaguugcuugggucauaug

SEQ ID NO: 1672761 - RNA, 19 nt, Artificial Sequence
  Description of Artificial Sequence: Synthetic oligonucleotide
ucuucguacuggagagcac

SEQ ID NO: 1672762 - RNA, 19 nt, Artificial Sequence
  Description of Artificial Sequence: Synthetic oligonucleotide
gcgucguugucuuacugag

SEQ ID NO: 1672763 - RNA, 19 nt, Artificial Sequence
  Description of Artificial Sequence: Synthetic oligonucleotide
ucuccacuccccgaagcgc

SEQ ID NO: 1672764 - RNA, 19 nt, Artificial Sequence
  Description of Artificial Sequence: Synthetic oligonucleotide
acagucuguggacuggguu

SEQ ID NO: 1672765 - RNA, 19 nt, Artificial Sequence
  Description of Artificial Sequence: Synthetic oligonucleotide
uggacuggguugcacggua

SEQ ID NO: 1672766 - RNA, 19 nt, Artificial Sequence
  Description of Artificial Sequence: Synthetic oligonucleotide
caaacacuguuaugacauc

SEQ ID NO: 1672767 - RNA, 19 nt, Artificial Sequence
  Description of Artificial Sequence: Synthetic oligonucleotide
acauccuuuaguguauaua

SEQ ID NO: 1672768 - RNA, 19 nt, Artificial Sequence
  Description of Artificial Sequence: Synthetic oligonucleotide
cuuguuacaccugugcugu

SEQ ID NO: 1672769 - RNA, 19 nt, Artificial Sequence
  Description of Artificial Sequence: Synthetic oligonucleotide
guuguauacaugucaggau

SEQ ID NO: 1672770 - RNA, 19 nt, Artificial Sequence
  Description of Artificial Sequence: Synthetic oligonucleotide
gucuuacugaguggaacug

SEQ ID NO: 1672771 - RNA, 19 nt, Artificial Sequence
  Description of Artificial Sequence: Synthetic oligonucleotide
ggcaaucuuuauuaaaagu

SEQ ID NO: 1672772 - RNA, 19 nt, Artificial Sequence
  Description of Artificial Sequence: Synthetic oligonucleotide
augugcaccuggaggaauc

SEQ ID NO: 1672773 - RNA, 19 nt, Artificial Sequence
  Description of Artificial Sequence: Synthetic oligonucleotide
cucgccaaacacuguuaug

SEQ ID NO: 1672774 - RNA, 19 nt, Artificial Sequence
  Description of Artificial Sequence: Synthetic oligonucleotide
gacacucuggaguuuuacu

SEQ ID NO: 1672775 - RNA, 19 nt, Artificial Sequence
  Description of Artificial Sequence: Synthetic oligonucleotide
cccaaaagguugaggaaag

SEQ ID NO: 1672776 - RNA, 19 nt, Artificial Sequence
  Description of Artificial Sequence: Synthetic oligonucleotide
ugcuaacaucagcucuaug

SEQ ID NO: 1672777 - RNA, 19 nt, Artificial Sequence
  Description of Artificial Sequence: Synthetic oligonucleotide
ugccuuccaccuugcauac

SEQ ID NO: 1672778 - RNA, 19 nt, Artificial Sequence
  Description of Artificial Sequence: Synthetic oligonucleotide
gugccaaguugcuuggguc

SEQ ID NO: 1672779 - RNA, 19 nt, Artificial Sequence
  Description of Artificial Sequence: Synthetic oligonucleotide
cuggagcaugugcaccugg

SEQ ID NO: 1672780 - RNA, 19 nt, Artificial Sequence
  Description of Artificial Sequence: Synthetic oligonucleotide
aacugcgcgggcagcggcg

SEQ ID NO: 1672781 - RNA, 19 nt, Artificial Sequence
  Description of Artificial Sequence: Synthetic oligonucleotide
ucguacuggagagcacugc

SEQ ID NO: 1672782 - RNA, 19 nt, Artificial Sequence
  Description of Artificial Sequence: Synthetic oligonucleotide
ggaggaaucuguaucccac

SEQ ID NO: 1672783 - RNA, 19 nt, Artificial Sequence
  Description of Artificial Sequence: Synthetic oligonucleotide
cugagugggcagagaagug

SEQ ID NO: 1672784 - RNA, 19 nt, Artificial Sequence
  Description of Artificial Sequence: Synthetic oligonucleotide
ggcaccaacaucuucaguu

SEQ ID NO: 1672785 - RNA, 19 nt, Artificial Sequence
  Description of Artificial Sequence: Synthetic oligonucleotide
aucugucagcucgccaaac

SEQ ID NO: 1672786 - RNA, 19 nt, Artificial Sequence
  Description of Artificial Sequence: Synthetic oligonucleotide
gaaggacuugaucauguuu

SEQ ID NO: 1672787 - RNA, 19 nt, Artificial Sequence
  Description of Artificial Sequence: Synthetic oligonucleotide
auccauuagcuuugauaaa

SEQ ID NO: 1672788 - RNA, 19 nt, Artificial Sequence
  Description of Artificial Sequence: Synthetic oligonucleotide
gcuucuaacugauccauua

SEQ ID NO: 1672789 - RNA, 19 nt, Artificial Sequence
  Description of Artificial Sequence: Synthetic oligonucleotide
ggaguuuuacugucaaucu

SEQ ID NO: 1672790 - RNA, 19 nt, Artificial Sequence
  Description of Artificial Sequence: Synthetic oligonucleotide
aaacauccuuuaguguaua

SEQ ID NO: 1672791 - RNA, 19 nt, Artificial Sequence
  Description of Artificial Sequence: Synthetic oligonucleotide
cucggucuucauugucugc

SEQ ID NO: 1672792 - RNA, 19 nt, Artificial Sequence
  Description of Artificial Sequence: Synthetic oligonucleotide
uaagcgcuucuaacugauc

SEQ ID NO: 1672793 - RNA, 19 nt, Artificial Sequence
  Description of Artificial Sequence: Synthetic oligonucleotide
ugugaaccaugcucccaaa

SEQ ID NO: 1672794 - RNA, 19 nt, Artificial Sequence
  Description of Artificial Sequence: Synthetic oligonucleotide
ggagcaugugcaccuggag

SEQ ID NO: 1672795 - RNA, 19 nt, Artificial Sequence
  Description of Artificial Sequence: Synthetic oligonucleotide
ggguucgaugcuaacauca

SEQ ID NO: 1672796 - RNA, 19 nt, Artificial Sequence
  Description of Artificial Sequence: Synthetic oligonucleotide
gaguuuuacugucaaucuu

SEQ ID NO: 1672797 - RNA, 19 nt, Artificial Sequence
  Description of Artificial Sequence: Synthetic oligonucleotide
gggucauauguugaagaug

SEQ ID NO: 1672798 - RNA, 19 nt, Artificial Sequence
  Description of Artificial Sequence: Synthetic oligonucleotide
uacgacacucuggaguuuu

SEQ ID NO: 1672799 - RNA, 19 nt, Artificial Sequence
  Description of Artificial Sequence: Synthetic oligonucleotide
ugggcacaaccaacuauuu

SEQ ID NO: 1672800 - RNA, 19 nt, Artificial Sequence
  Description of Artificial Sequence: Synthetic oligonucleotide
ugugcaccuggaggaaucu

SEQ ID NO: 1672801 - RNA, 19 nt, Artificial Sequence
  Description of Artificial Sequence: Synthetic oligonucleotide
cuguuaugacaucuauuaa

SEQ ID NO: 1672802 - RNA, 19 nt, Artificial Sequence
  Description of Artificial Sequence: Synthetic oligonucleotide
uugcaguacuucugagcuc

SEQ ID NO: 1672803 - RNA, 19 nt, Artificial Sequence
  Description of Artificial Sequence: Synthetic oligonucleotide
cugagccguucucaaauga

SEQ ID NO: 1672804 - RNA, 19 nt, Artificial Sequence
  Description of Artificial Sequence: Synthetic oligonucleotide
ccaacuauuucuugaguaa

SEQ ID NO: 1672805 - RNA, 19 nt, Artificial Sequence
  Description of Artificial Sequence: Synthetic oligonucleotide
guauuagcuggagcaugug

SEQ ID NO: 1672806 - RNA, 19 nt, Artificial Sequence
  Description of Artificial Sequence: Synthetic oligonucleotide
cuugcauacuuucuguguu

SEQ ID NO: 1672807 - RNA, 19 nt, Artificial Sequence
  Description of Artificial Sequence: Synthetic oligonucleotide
caguacuucugagcucuag

SEQ ID NO: 1672808 - RNA, 19 nt, Artificial Sequence
  Description of Artificial Sequence: Synthetic oligonucleotide
aguuugcauagcauauaaa

SEQ ID NO: 1672809 - RNA, 19 nt, Artificial Sequence
  Description of Artificial Sequence: Synthetic oligonucleotide
ugcccacaucuucguacug

SEQ ID NO: 1672810 - RNA, 19 nt, Artificial Sequence
  Description of Artificial Sequence: Synthetic oligonucleotide
cuaacugauccauuagcuu

SEQ ID NO: 1672811 - RNA, 19 nt, Artificial Sequence
  Description of Artificial Sequence: Synthetic oligonucleotide
auccuuuaguguauauaaa

SEQ ID NO: 1672812 - RNA, 19 nt, Artificial Sequence
  Description of Artificial Sequence: Synthetic oligonucleotide
caucuucguacuggagagc

SEQ ID NO: 1672813 - RNA, 19 nt, Artificial Sequence
  Description of Artificial Sequence: Synthetic oligonucleotide
uuaagcaguuauggauaua

SEQ ID NO: 1672814 - RNA, 19 nt, Artificial Sequence
  Description of Artificial Sequence: Synthetic oligonucleotide
cucuuaaacugcgcgggca

SEQ ID NO: 1672815 - RNA, 19 nt, Artificial Sequence
  Description of Artificial Sequence: Synthetic oligonucleotide
cguacuggagagcacugcc

SEQ ID NO: 1672816 - RNA, 19 nt, Artificial Sequence
  Description of Artificial Sequence: Synthetic oligonucleotide
uuguuacaccugugcugug

SEQ ID NO: 1672817 - RNA, 19 nt, Artificial Sequence
  Description of Artificial Sequence: Synthetic oligonucleotide
aggcgucguugucuuacug

SEQ ID NO: 1672818 - RNA, 19 nt, Artificial Sequence
  Description of Artificial Sequence: Synthetic oligonucleotide
ggauauacguugccuucca

SEQ ID NO: 1672819 - RNA, 19 nt, Artificial Sequence
  Description of Artificial Sequence: Synthetic oligonucleotide
guaggccaccacgggaucc

SEQ ID NO: 1672820 - RNA, 19 nt, Artificial Sequence
  Description of Artificial Sequence: Synthetic oligonucleotide
gaagcaggguucgaugcua

SEQ ID NO: 1672821 - RNA, 19 nt, Artificial Sequence
  Description of Artificial Sequence: Synthetic oligonucleotide
cucccaaaagguugaggaa

SEQ ID NO: 1672822 - RNA, 19 nt, Artificial Sequence
  Description of Artificial Sequence: Synthetic oligonucleotide
agaagcacacaggcgucgu

SEQ ID NO: 1672823 - RNA, 19 nt, Artificial Sequence
  Description of Artificial Sequence: Synthetic oligonucleotide
ucauuccaguuugcauagc

SEQ ID NO: 1672824 - RNA, 19 nt, Artificial Sequence
  Description of Artificial Sequence: Synthetic oligonucleotide
ggcgucguugucuuacuga

SEQ ID NO: 1672825 - RNA, 19 nt, Artificial Sequence
  Description of Artificial Sequence: Synthetic oligonucleotide
gcccacaucuucguacugg

SEQ ID NO: 1672826 - RNA, 19 nt, Artificial Sequence
  Description of Artificial Sequence: Synthetic oligonucleotide
cagcucuaugcacucagaa

SEQ ID NO: 1672827 - RNA, 19 nt, Artificial Sequence
  Description of Artificial Sequence: Synthetic oligonucleotide
gugaaccaugcucccaaaa

SEQ ID NO: 1672828 - RNA, 19 nt, Artificial Sequence
  Description of Artificial Sequence: Synthetic oligonucleotide
gcacgguauugcuuguuac

SEQ ID NO: 1672829 - RNA, 19 nt, Artificial Sequence
  Description of Artificial Sequence: Synthetic oligonucleotide
cagaauauucuggcaaucu

SEQ ID NO: 1672830 - RNA, 19 nt, Artificial Sequence
  Description of Artificial Sequence: Synthetic oligonucleotide
guauacaugucaggaucaa

SEQ ID NO: 1672831 - RNA, 19 nt, Artificial Sequence
  Description of Artificial Sequence: Synthetic oligonucleotide
acugauccauuagcuuuga

SEQ ID NO: 1672832 - RNA, 19 nt, Artificial Sequence
  Description of Artificial Sequence: Synthetic oligonucleotide
cuucguacuggagagcacu

SEQ ID NO: 1672833 - RNA, 19 nt, Artificial Sequence
  Description of Artificial Sequence: Synthetic oligonucleotide
ggugucagacggauauccc

SEQ ID NO: 1672834 - RNA, 19 nt, Artificial Sequence
  Description of Artificial Sequence: Synthetic oligonucleotide
caggguucgaugcuaacau

SEQ ID NO: 1672835 - RNA, 19 nt, Artificial Sequence
  Description of Artificial Sequence: Synthetic oligonucleotide
ugaaaucguccagcucggu

SEQ ID NO: 1672836 - RNA, 19 nt, Artificial Sequence
  Description of Artificial Sequence: Synthetic oligonucleotide
auacguugccuuccaccuu

SEQ ID NO: 1672837 - RNA, 19 nt, Artificial Sequence
  Description of Artificial Sequence: Synthetic oligonucleotide
gaguggaacugcagucuuc

SEQ ID NO: 1672838 - RNA, 19 nt, Artificial Sequence
  Description of Artificial Sequence: Synthetic oligonucleotide
gcucuuaaacugcgcgggc

SEQ ID NO: 1672839 - RNA, 19 nt, Artificial Sequence
  Description of Artificial Sequence: Synthetic oligonucleotide
ccugagcgccuucuggagg

SEQ ID NO: 1672840 - RNA, 19 nt, Artificial Sequence
  Description of Artificial Sequence: Synthetic oligonucleotide
aagcaggguucgaugcuaa

SEQ ID NO: 1672841 - RNA, 19 nt, Artificial Sequence
  Description of Artificial Sequence: Synthetic oligonucleotide
accacgggaucccgcuugu

SEQ ID NO: 1672842 - RNA, 19 nt, Artificial Sequence
  Description of Artificial Sequence: Synthetic oligonucleotide
gcagguguauuagcuggag

SEQ ID NO: 1672843 - RNA, 19 nt, Artificial Sequence
  Description of Artificial Sequence: Synthetic oligonucleotide
gcugagugggcagagaagu

SEQ ID NO: 1672844 - RNA, 19 nt, Artificial Sequence
  Description of Artificial Sequence: Synthetic oligonucleotide
agcuuauacccaacaugau

SEQ ID NO: 1672845 - RNA, 19 nt, Artificial Sequence
  Description of Artificial Sequence: Synthetic oligonucleotide
augcuaacaucagcucuau

SEQ ID NO: 1672846 - RNA, 19 nt, Artificial Sequence
  Description of Artificial Sequence: Synthetic oligonucleotide
caccugugcuguguggcac

SEQ ID NO: 1672847 - RNA, 19 nt, Artificial Sequence
  Description of Artificial Sequence: Synthetic oligonucleotide
gaucccgcuugucgugcuc

SEQ ID NO: 1672848 - RNA, 19 nt, Artificial Sequence
  Description of Artificial Sequence: Synthetic oligonucleotide
acguugccuuccaccuugc

SEQ ID NO: 1672849 - RNA, 19 nt, Artificial Sequence
  Description of Artificial Sequence: Synthetic oligonucleotide
gagcacugccagcauauuu

SEQ ID NO: 1672850 - RNA, 19 nt, Artificial Sequence
  Description of Artificial Sequence: Synthetic oligonucleotide
guugucuuacugaguggaa

SEQ ID NO: 1672851 - RNA, 19 nt, Artificial Sequence
  Description of Artificial Sequence: Synthetic oligonucleotide
guuccgcaugcuguaguca

SEQ ID NO: 1672852 - RNA, 19 nt, Artificial Sequence
  Description of Artificial Sequence: Synthetic oligonucleotide
accaugcucccaaaagguu

SEQ ID NO: 1672853 - RNA, 19 nt, Artificial Sequence
  Description of Artificial Sequence: Synthetic oligonucleotide
cugagcgccuucuggaggu

SEQ ID NO: 1672854 - RNA, 19 nt, Artificial Sequence
  Description of Artificial Sequence: Synthetic oligonucleotide
guaucccacuguagcugcc

SEQ ID NO: 1672855 - RNA, 19 nt, Artificial Sequence
  Description of Artificial Sequence: Synthetic oligonucleotide
gcaguuauggauauacguu

SEQ ID NO: 1672856 - RNA, 19 nt, Artificial Sequence
  Description of Artificial Sequence: Synthetic oligonucleotide
gccagcauauuugcaguac

SEQ ID NO: 1672857 - RNA, 19 nt, Artificial Sequence
  Description of Artificial Sequence: Synthetic oligonucleotide
cagcucggucuucauuguc

SEQ ID NO: 1672858 - RNA, 19 nt, Artificial Sequence
  Description of Artificial Sequence: Synthetic oligonucleotide
ccugagccguucucaaaug

SEQ ID NO: 1672859 - RNA, 19 nt, Artificial Sequence
  Description of Artificial Sequence: Synthetic oligonucleotide
agcgccuucuggagguucu

SEQ ID NO: 1672860 - RNA, 19 nt, Artificial Sequence
  Description of Artificial Sequence: Synthetic oligonucleotide
cacuguuaugacaucuauu

SEQ ID NO: 1672861 - RNA, 19 nt, Artificial Sequence
  Description of Artificial Sequence: Synthetic oligonucleotide
ccauucuuuaagcaguuau

SEQ ID NO: 1672862 - RNA, 19 nt, Artificial Sequence
  Description of Artificial Sequence: Synthetic oligonucleotide
ucagcagccugagcgccuu

SEQ ID NO: 1672863 - RNA, 19 nt, Artificial Sequence
  Description of Artificial Sequence: Synthetic oligonucleotide
gcuugucgugcuccugagc

SEQ ID NO: 1672864 - RNA, 19 nt, Artificial Sequence
  Description of Artificial Sequence: Synthetic oligonucleotide
ccagaauauucuggcaauc

SEQ ID NO: 1672865 - RNA, 19 nt, Artificial Sequence
  Description of Artificial Sequence: Synthetic oligonucleotide
gcaaaguccucugguguca

SEQ ID NO: 1672866 - RNA, 19 nt, Artificial Sequence
  Description of Artificial Sequence: Synthetic oligonucleotide
ccacaucuucguacuggag

SEQ ID NO: 1672867 - RNA, 19 nt, Artificial Sequence
  Description of Artificial Sequence: Synthetic oligonucleotide
gccaucuccacuccccgaa

SEQ ID NO: 1672868 - RNA, 19 nt, Artificial Sequence
  Description of Artificial Sequence: Synthetic oligonucleotide
cguugucuuacugagugga

SEQ ID NO: 1672869 - RNA, 19 nt, Artificial Sequence
  Description of Artificial Sequence: Synthetic oligonucleotide
uugcacgguauugcuuguu

SEQ ID NO: 1672870 - RNA, 19 nt, Artificial Sequence
  Description of Artificial Sequence: Synthetic oligonucleotide
ucgugcuccugagccguuc

SEQ ID NO: 1672871 - RNA, 19 nt, Artificial Sequence
  Description of Artificial Sequence: Synthetic oligonucleotide
guugcacgguauugcuugu

SEQ ID NO: 1672872 - RNA, 19 nt, Artificial Sequence
  Description of Artificial Sequence: Synthetic oligonucleotide
gucugcauauaagaacauu

SEQ ID NO: 1672873 - RNA, 19 nt, Artificial Sequence
  Description of Artificial Sequence: Synthetic oligonucleotide
caaguugcuugggucauau

SEQ ID NO: 1672874 - RNA, 19 nt, Artificial Sequence
  Description of Artificial Sequence: Synthetic oligonucleotide
augaugcuguaugcucuua

SEQ ID NO: 1672875 - RNA, 19 nt, Artificial Sequence
  Description of Artificial Sequence: Synthetic oligonucleotide
agcucgccaaacacuguua

SEQ ID NO: 1672876 - RNA, 19 nt, Artificial Sequence
  Description of Artificial Sequence: Synthetic oligonucleotide
gggaucccgcuugucgugc

SEQ ID NO: 1672877 - RNA, 19 nt, Artificial Sequence
  Description of Artificial Sequence: Synthetic oligonucleotide
cuccugagccguucucaaa

SEQ ID NO: 1672878 - RNA, 19 nt, Artificial Sequence
  Description of Artificial Sequence: Synthetic oligonucleotide
gacuggguugcacgguauu

SEQ ID NO: 1672879 - RNA, 19 nt, Artificial Sequence
  Description of Artificial Sequence: Synthetic oligonucleotide
gguguauuagcuggagcau

SEQ ID NO: 1672880 - RNA, 19 nt, Artificial Sequence
  Description of Artificial Sequence: Synthetic oligonucleotide
ccgaagcgccacuuccuac

SEQ ID NO: 1672881 - RNA, 19 nt, Artificial Sequence
  Description of Artificial Sequence: Synthetic oligonucleotide
gaagcacacaggcgucguu

SEQ ID NO: 1672882 - RNA, 19 nt, Artificial Sequence
  Description of Artificial Sequence: Synthetic oligonucleotide
gcaacauaauaugguuugu

SEQ ID NO: 1672883 - RNA, 19 nt, Artificial Sequence
  Description of Artificial Sequence: Synthetic oligonucleotide
ccagcauauuugcaguacu

SEQ ID NO: 1672884 - RNA, 19 nt, Artificial Sequence
  Description of Artificial Sequence: Synthetic oligonucleotide
acggcagugcccacaucuu

SEQ ID NO: 1672885 - RNA, 19 nt, Artificial Sequence
  Description of Artificial Sequence: Synthetic oligonucleotide
gcucgccaaacacuguuau

SEQ ID NO: 1672886 - RNA, 19 nt, Artificial Sequence
  Description of Artificial Sequence: Synthetic oligonucleotide
cgaugcuaacaucagcucu

SEQ ID NO: 1672887 - RNA, 19 nt, Artificial Sequence
  Description of Artificial Sequence: Synthetic oligonucleotide
caccuggaggaaucuguau

SEQ ID NO: 1672888 - RNA, 19 nt, Artificial Sequence
  Description of Artificial Sequence: Synthetic oligonucleotide
ggaacagucuguggacagu

SEQ ID NO: 1672889 - RNA, 19 nt, Artificial Sequence
  Description of Artificial Sequence: Synthetic oligonucleotide
ugagcgccuucuggagguu

SEQ ID NO: 1672890 - RNA, 19 nt, Artificial Sequence
  Description of Artificial Sequence: Synthetic oligonucleotide
cgcuugucgugcuccugag

SEQ ID NO: 1672891 - RNA, 19 nt, Artificial Sequence
  Description of Artificial Sequence: Synthetic oligonucleotide
ccacuguagcugccuggug

SEQ ID NO: 1672892 - RNA, 19 nt, Artificial Sequence
  Description of Artificial Sequence: Synthetic oligonucleotide
cugcgcgggcagcggcggc

SEQ ID NO: 1672893 - RNA, 19 nt, Artificial Sequence
  Description of Artificial Sequence: Synthetic oligonucleotide
acgacacucuggaguuuua

SEQ ID NO: 1672894 - RNA, 19 nt, Artificial Sequence
  Description of Artificial Sequence: Synthetic oligonucleotide
caugugcaccuggaggaau

SEQ ID NO: 1672895 - RNA, 19 nt, Artificial Sequence
  Description of Artificial Sequence: Synthetic oligonucleotide
caggcgucguugucuuacu

SEQ ID NO: 1672896 - RNA, 19 nt, Artificial Sequence
  Description of Artificial Sequence: Synthetic oligonucleotide
gcaccuggaggaaucugua

SEQ ID NO: 1672897 - RNA, 19 nt, Artificial Sequence
  Description of Artificial Sequence: Synthetic oligonucleotide
cagugcccacaucuucgua

SEQ ID NO: 1672898 - RNA, 19 nt, Artificial Sequence
  Description of Artificial Sequence: Synthetic oligonucleotide
cgggaucccgcuugucgug

SEQ ID NO: 1672899 - RNA, 19 nt, Artificial Sequence
  Description of Artificial Sequence: Synthetic oligonucleotide
cugauccauuagcuuugau

SEQ ID NO: 1672900 - RNA, 19 nt, Artificial Sequence
  Description of Artificial Sequence: Synthetic oligonucleotide
gcgcuucuaacugauccau

SEQ ID NO: 1672901 - RNA, 19 nt, Artificial Sequence
  Description of Artificial Sequence: Synthetic oligonucleotide
cgcaugcuguagucacaug

SEQ ID NO: 1672902 - RNA, 19 nt, Artificial Sequence
  Description of Artificial Sequence: Synthetic oligonucleotide
ggaucccgcuugucgugcu

SEQ ID NO: 1672903 - RNA, 19 nt, Artificial Sequence
  Description of Artificial Sequence: Synthetic oligonucleotide
cacaggcgucguugucuua

SEQ ID NO: 1672904 - RNA, 19 nt, Artificial Sequence
  Description of Artificial Sequence: Synthetic oligonucleotide
gcgccuucuggagguucug

SEQ ID NO: 1672905 - RNA, 19 nt, Artificial Sequence
  Description of Artificial Sequence: Synthetic oligonucleotide
cccgaagcgccacuuccua

SEQ ID NO: 1672906 - RNA, 19 nt, Artificial Sequence
  Description of Artificial Sequence: Synthetic oligonucleotide
gccaaguugcuugggucau

SEQ ID NO: 1672907 - RNA, 19 nt, Artificial Sequence
  Description of Artificial Sequence: Synthetic oligonucleotide
cacuccccgaagcgccacu

SEQ ID NO: 1672908 - RNA, 19 nt, Artificial Sequence
  Description of Artificial Sequence: Synthetic oligonucleotide
ccacuccccgaagcgccac

SEQ ID NO: 1672909 - RNA, 19 nt, Artificial Sequence
  Description of Artificial Sequence: Synthetic oligonucleotide
ggguugcacgguauugcuu

SEQ ID NO: 1672910 - RNA, 19 nt, Artificial Sequence
  Description of Artificial Sequence: Synthetic oligonucleotide
ggacuggguugcacgguau

SEQ ID NO: 1672911 - RNA, 19 nt, Artificial Sequence
  Description of Artificial Sequence: Synthetic oligonucleotide
cgucguugucuuacugagu

SEQ ID NO: 1672912 - RNA, 19 nt, Artificial Sequence
  Description of Artificial Sequence: Synthetic oligonucleotide
cguugccuuccaccuugca

SEQ ID NO: 1672913 - RNA, 19 nt, Artificial Sequence
  Description of Artificial Sequence: Synthetic oligonucleotide
gcaguacuucugagcucua

SEQ ID NO: 1672914 - RNA, 19 nt, Artificial Sequence
  Description of Artificial Sequence: Synthetic oligonucleotide
ccacgggaucccgcuuguc

SEQ ID NO: 1672915 - RNA, 19 nt, Artificial Sequence
  Description of Artificial Sequence: Synthetic oligonucleotide
cgugcuccugagccguucu

SEQ ID NO: 1672916 - RNA, 19 nt, Artificial Sequence
  Description of Artificial Sequence: Synthetic oligonucleotide
cgcuucuaacugauccauu

SEQ ID NO: 1672917 - RNA, 19 nt, Artificial Sequence
  Description of Artificial Sequence: Synthetic oligonucleotide
ccaccacgggaucccgcuu

SEQ ID NO: 1672918 - RNA, 19 nt, Artificial Sequence
  Description of Artificial Sequence: Synthetic oligonucleotide
gcggggccagcgcggccau

SEQ ID NO: 1672919 - RNA, 19 nt, Artificial Sequence
  Description of Artificial Sequence: Synthetic oligonucleotide
cggggccagcgcggccauc

SEQ ID NO: 1672920 - RNA, 19 nt, Artificial Sequence
  Description of Artificial Sequence: Synthetic oligonucleotide
aauuccagggaucuugagc

SEQ ID NO: 1672921 - RNA, 19 nt, Artificial Sequence
  Description of Artificial Sequence: Synthetic oligonucleotide
ucuaaggucacauaauucc

SEQ ID NO: 1672922 - RNA, 19 nt, Artificial Sequence
  Description of Artificial Sequence: Synthetic oligonucleotide
auuuguuacgagcaggggc

SEQ ID NO: 1672923 - RNA, 19 nt, Artificial Sequence
  Description of Artificial Sequence: Synthetic oligonucleotide
aaguaagcagguaagaggg

SEQ ID NO: 1672924 - RNA, 19 nt, Artificial Sequence
  Description of Artificial Sequence: Synthetic oligonucleotide
aaagaagugacugaagaug

SEQ ID NO: 1672925 - RNA, 19 nt, Artificial Sequence
  Description of Artificial Sequence: Synthetic oligonucleotide
uuuguuacgagcaggggca

SEQ ID NO: 1672926 - RNA, 19 nt, Artificial Sequence
  Description of Artificial Sequence: Synthetic oligonucleotide
aaaggucaggcccuccugc

SEQ ID NO: 1672927 - RNA, 19 nt, Artificial Sequence
  Description of Artificial Sequence: Synthetic oligonucleotide
aguaucuaccaacucaguc

SEQ ID NO: 1672928 - RNA, 19 nt, Artificial Sequence
  Description of Artificial Sequence: Synthetic oligonucleotide
uauguucucagcacagagg

SEQ ID NO: 1672929 - RNA, 19 nt, Artificial Sequence
  Description of Artificial Sequence: Synthetic oligonucleotide
cacauguugagagagaugc

SEQ ID NO: 1672930 - RNA, 19 nt, Artificial Sequence
  Description of Artificial Sequence: Synthetic oligonucleotide
ugucugguaguacugaggc

SEQ ID NO: 1672931 - RNA, 19 nt, Artificial Sequence
  Description of Artificial Sequence: Synthetic oligonucleotide
gaugccaucuucuccaaag

SEQ ID NO: 1672932 - RNA, 19 nt, Artificial Sequence
  Description of Artificial Sequence: Synthetic oligonucleotide
ucuccuuccuccuugaucu

SEQ ID NO: 1672933 - RNA, 19 nt, Artificial Sequence
  Description of Artificial Sequence: Synthetic oligonucleotide
gagagagaugcccagcucg

SEQ ID NO: 1672934 - RNA, 19 nt, Artificial Sequence
  Description of Artificial Sequence: Synthetic oligonucleotide
uccaaaguaagcagguaag

SEQ ID NO: 1672935 - RNA, 19 nt, Artificial Sequence
  Description of Artificial Sequence: Synthetic oligonucleotide
uuuccuaggguacaccuug

SEQ ID NO: 1672936 - RNA, 19 nt, Artificial Sequence
  Description of Artificial Sequence: Synthetic oligonucleotide
uccaaguauguucucagca

SEQ ID NO: 1672937 - RNA, 19 nt, Artificial Sequence
  Description of Artificial Sequence: Synthetic oligonucleotide
uuccauacugcuuugggac

SEQ ID NO: 1672938 - RNA, 19 nt, Artificial Sequence
  Description of Artificial Sequence: Synthetic oligonucleotide
gaaugcuucuccuuccucc

SEQ ID NO: 1672939 - RNA, 19 nt, Artificial Sequence
  Description of Artificial Sequence: Synthetic oligonucleotide
gaagcgaagacggucaugc

SEQ ID NO: 1672940 - RNA, 19 nt, Artificial Sequence
  Description of Artificial Sequence: Synthetic oligonucleotide
aggagacacauguugagag

SEQ ID NO: 1672941 - RNA, 19 nt, Artificial Sequence
  Description of Artificial Sequence: Synthetic oligonucleotide
aguggcacucuuuccauac

SEQ ID NO: 1672942 - RNA, 19 nt, Artificial Sequence
  Description of Artificial Sequence: Synthetic oligonucleotide
cagggauuagccaugguag

SEQ ID NO: 1672943 - RNA, 19 nt, Artificial Sequence
  Description of Artificial Sequence: Synthetic oligonucleotide
auggcggucaugcucuucc

SEQ ID NO: 1672944 - RNA, 19 nt, Artificial Sequence
  Description of Artificial Sequence: Synthetic oligonucleotide
aguaucugggaagaccugc

SEQ ID NO: 1672945 - RNA, 19 nt, Artificial Sequence
  Description of Artificial Sequence: Synthetic oligonucleotide
uccucuuccggccagacuc

SEQ ID NO: 1672946 - RNA, 19 nt, Artificial Sequence
  Description of Artificial Sequence: Synthetic oligonucleotide
aagacggucaugccugaag

SEQ ID NO: 1672947 - RNA, 19 nt, Artificial Sequence
  Description of Artificial Sequence: Synthetic oligonucleotide
ugacugaagaugaaauccu

SEQ ID NO: 1672948 - RNA, 19 nt, Artificial Sequence
  Description of Artificial Sequence: Synthetic oligonucleotide
uaucuaccaacucagucuc

SEQ ID NO: 1672949 - RNA, 19 nt, Artificial Sequence
  Description of Artificial Sequence: Synthetic oligonucleotide
cauaauuccagggaucuug

SEQ ID NO: 1672950 - RNA, 19 nt, Artificial Sequence
  Description of Artificial Sequence: Synthetic oligonucleotide
acagugggagcacagcuuc

SEQ ID NO: 1672951 - RNA, 19 nt, Artificial Sequence
  Description of Artificial Sequence: Synthetic oligonucleotide
ugguccuccgcauccaugg

SEQ ID NO: 1672952 - RNA, 19 nt, Artificial Sequence
  Description of Artificial Sequence: Synthetic oligonucleotide
uccacauccacaucagugu

SEQ ID NO: 1672953 - RNA, 19 nt, Artificial Sequence
  Description of Artificial Sequence: Synthetic oligonucleotide
agucaucuacaccugagca

SEQ ID NO: 1672954 - RNA, 19 nt, Artificial Sequence
  Description of Artificial Sequence: Synthetic oligonucleotide
uggguaugugccaaggcca

SEQ ID NO: 1672955 - RNA, 19 nt, Artificial Sequence
  Description of Artificial Sequence: Synthetic oligonucleotide
uuuccauacugcuuuggga

SEQ ID NO: 1672956 - RNA, 19 nt, Artificial Sequence
  Description of Artificial Sequence: Synthetic oligonucleotide
cuucuugcuggacaguggg

SEQ ID NO: 1672957 - RNA, 19 nt, Artificial Sequence
  Description of Artificial Sequence: Synthetic oligonucleotide
uucccaucccuccagcucc

SEQ ID NO: 1672958 - RNA, 19 nt, Artificial Sequence
  Description of Artificial Sequence: Synthetic oligonucleotide
aggucacauaauuccaggg

SEQ ID NO: 1672959 - RNA, 19 nt, Artificial Sequence
  Description of Artificial Sequence: Synthetic oligonucleotide
uucuaaggucacauaauuc

SEQ ID NO: 1672960 - RNA, 19 nt, Artificial Sequence
  Description of Artificial Sequence: Synthetic oligonucleotide
cuggguaugugccaaggcc

SEQ ID NO: 1672961 - RNA, 19 nt, Artificial Sequence
  Description of Artificial Sequence: Synthetic oligonucleotide
cauggacccagucucaggc

SEQ ID NO: 1672962 - RNA, 19 nt, Artificial Sequence
  Description of Artificial Sequence: Synthetic oligonucleotide
uucuccaaaguaagcaggu

SEQ ID NO: 1672963 - RNA, 19 nt, Artificial Sequence
  Description of Artificial Sequence: Synthetic oligonucleotide
cuuccuaugcuuccagugc

SEQ ID NO: 1672964 - RNA, 19 nt, Artificial Sequence
  Description of Artificial Sequence: Synthetic oligonucleotide
gugucaucgucacugcugg

SEQ ID NO: 1672965 - RNA, 19 nt, Artificial Sequence
  Description of Artificial Sequence: Synthetic oligonucleotide
agcuucuaaggucacauaa

SEQ ID NO: 1672966 - RNA, 19 nt, Artificial Sequence
  Description of Artificial Sequence: Synthetic oligonucleotide
aaguauguucucagcacag

SEQ ID NO: 1672967 - RNA, 19 nt, Artificial Sequence
  Description of Artificial Sequence: Synthetic oligonucleotide
cuaggguacaccuugaagu

SEQ ID NO: 1672968 - RNA, 19 nt, Artificial Sequence
  Description of Artificial Sequence: Synthetic oligonucleotide
uuccuaugcuuccagugcu

SEQ ID NO: 1672969 - RNA, 19 nt, Artificial Sequence
  Description of Artificial Sequence: Synthetic oligonucleotide
ugcuuccccauucccaucc

SEQ ID NO: 1672970 - RNA, 19 nt, Artificial Sequence
  Description of Artificial Sequence: Synthetic oligonucleotide
ucacauaauuccagggauc

SEQ ID NO: 1672971 - RNA, 19 nt, Artificial Sequence
  Description of Artificial Sequence: Synthetic oligonucleotide
agcaguggcacucuuucca

SEQ ID NO: 1672972 - RNA, 19 nt, Artificial Sequence
  Description of Artificial Sequence: Synthetic oligonucleotide
uuccccaauucuucuaccc

SEQ ID NO: 1672973 - RNA, 19 nt, Artificial Sequence
  Description of Artificial Sequence: Synthetic oligonucleotide
aguccugucgcuugccauc

SEQ ID NO: 1672974 - RNA, 19 nt, Artificial Sequence
  Description of Artificial Sequence: Synthetic oligonucleotide
guaucuaccaacucagucu

SEQ ID NO: 1672975 - RNA, 19 nt, Artificial Sequence
  Description of Artificial Sequence: Synthetic oligonucleotide
guacuugcgcuucagcagc

SEQ ID NO: 1672976 - RNA, 19 nt, Artificial Sequence
  Description of Artificial Sequence: Synthetic oligonucleotide
gggagcacagcuucuaagg

SEQ ID NO: 1672977 - RNA, 19 nt, Artificial Sequence
  Description of Artificial Sequence: Synthetic oligonucleotide
ucgcuugccauccuuucug

SEQ ID NO: 1672978 - RNA, 19 nt, Artificial Sequence
  Description of Artificial Sequence: Synthetic oligonucleotide
aagucccggaagcgaagac

SEQ ID NO: 1672979 - RNA, 19 nt, Artificial Sequence
  Description of Artificial Sequence: Synthetic oligonucleotide
guaagcagguaagaggggc

SEQ ID NO: 1672980 - RNA, 19 nt, Artificial Sequence
  Description of Artificial Sequence: Synthetic oligonucleotide
ucuacaccugagcagcccu

SEQ ID NO: 1672981 - RNA, 19 nt, Artificial Sequence
  Description of Artificial Sequence: Synthetic oligonucleotide
uuucuguuccccaauucuu

SEQ ID NO: 1672982 - RNA, 19 nt, Artificial Sequence
  Description of Artificial Sequence: Synthetic oligonucleotide
agcgaagacggucaugccu

SEQ ID NO: 1672983 - RNA, 19 nt, Artificial Sequence
  Description of Artificial Sequence: Synthetic oligonucleotide
cacccaucuguuucaaugc

SEQ ID NO: 1672984 - RNA, 19 nt, Artificial Sequence
  Description of Artificial Sequence: Synthetic oligonucleotide
aagaccugcaacucugcuu

SEQ ID NO: 1672985 - RNA, 19 nt, Artificial Sequence
  Description of Artificial Sequence: Synthetic oligonucleotide
ugggaguccccacuuuucc

SEQ ID NO: 1672986 - RNA, 19 nt, Artificial Sequence
  Description of Artificial Sequence: Synthetic oligonucleotide
gguacuugcgcuucagcag

SEQ ID NO: 1672987 - RNA, 19 nt, Artificial Sequence
  Description of Artificial Sequence: Synthetic oligonucleotide
guuacgagcaggggcaggg

SEQ ID NO: 1672988 - RNA, 19 nt, Artificial Sequence
  Description of Artificial Sequence: Synthetic oligonucleotide
gucaucacccaucuguuuc

SEQ ID NO: 1672989 - RNA, 19 nt, Artificial Sequence
  Description of Artificial Sequence: Synthetic oligonucleotide
ccagagaacaggaggaucc

SEQ ID NO: 1672990 - RNA, 19 nt, Artificial Sequence
  Description of Artificial Sequence: Synthetic oligonucleotide
uccuccgcauccaugggug

SEQ ID NO: 1672991 - RNA, 19 nt, Artificial Sequence
  Description of Artificial Sequence: Synthetic oligonucleotide
caacccaccagagaacagg

SEQ ID NO: 1672992 - RNA, 19 nt, Artificial Sequence
  Description of Artificial Sequence: Synthetic oligonucleotide
uucccugggccccacaacu

SEQ ID NO: 1672993 - RNA, 19 nt, Artificial Sequence
  Description of Artificial Sequence: Synthetic oligonucleotide
ucaucacccaucuguuuca

SEQ ID NO: 1672994 - RNA, 19 nt, Artificial Sequence
  Description of Artificial Sequence: Synthetic oligonucleotide
guucccuacaguaucuacc

SEQ ID NO: 1672995 - RNA, 19 nt, Artificial Sequence
  Description of Artificial Sequence: Synthetic oligonucleotide
cuaaggucacauaauucca

SEQ ID NO: 1672996 - RNA, 19 nt, Artificial Sequence
  Description of Artificial Sequence: Synthetic oligonucleotide
ugggagcacagcuucuaag

SEQ ID NO: 1672997 - RNA, 19 nt, Artificial Sequence
  Description of Artificial Sequence: Synthetic oligonucleotide
agacggucaugccugaaga

SEQ ID NO: 1672998 - RNA, 19 nt, Artificial Sequence
  Description of Artificial Sequence: Synthetic oligonucleotide
uacaccuugaaguccuguc

SEQ ID NO: 1672999 - RNA, 19 nt, Artificial Sequence
  Description of Artificial Sequence: Synthetic oligonucleotide
ccauuuguuacgagcaggg

SEQ ID NO: 1673000 - RNA, 19 nt, Artificial Sequence
  Description of Artificial Sequence: Synthetic oligonucleotide
aggguacaccuugaagucc

SEQ ID NO: 1673001 - RNA, 19 nt, Artificial Sequence
  Description of Artificial Sequence: Synthetic oligonucleotide
caugguaguaguggugggg

SEQ ID NO: 1673002 - RNA, 19 nt, Artificial Sequence
  Description of Artificial Sequence: Synthetic oligonucleotide
agucccggaagcgaagacg

SEQ ID NO: 1673003 - RNA, 19 nt, Artificial Sequence
  Description of Artificial Sequence: Synthetic oligonucleotide
augaaauccucaaagucau

SEQ ID NO: 1673004 - RNA, 19 nt, Artificial Sequence
  Description of Artificial Sequence: Synthetic oligonucleotide
gaggccaguuccuguagcc

SEQ ID NO: 1673005 - RNA, 19 nt, Artificial Sequence
  Description of Artificial Sequence: Synthetic oligonucleotide
uguucccuacaguaucuac

SEQ ID NO: 1673006 - RNA, 19 nt, Artificial Sequence
  Description of Artificial Sequence: Synthetic oligonucleotide
cagucaucuacaccugagc

SEQ ID NO: 1673007 - RNA, 19 nt, Artificial Sequence
  Description of Artificial Sequence: Synthetic oligonucleotide
gucccggaagcgaagacgg

SEQ ID NO: 1673008 - RNA, 19 nt, Artificial Sequence
  Description of Artificial Sequence: Synthetic oligonucleotide
uaauuccagggaucuugag

SEQ ID NO: 1673009 - RNA, 19 nt, Artificial Sequence
  Description of Artificial Sequence: Synthetic oligonucleotide
uaugcuuccagugcucauc

SEQ ID NO: 1673010 - RNA, 19 nt, Artificial Sequence
  Description of Artificial Sequence: Synthetic oligonucleotide
agugucaucgucacugcug

SEQ ID NO: 1673011 - RNA, 19 nt, Artificial Sequence
  Description of Artificial Sequence: Synthetic oligonucleotide
ucagugucaucgucacugc

SEQ ID NO: 1673012 - RNA, 19 nt, Artificial Sequence
  Description of Artificial Sequence: Synthetic oligonucleotide
aucuacaccugagcagccc

SEQ ID NO: 1673013 - RNA, 19 nt, Artificial Sequence
  Description of Artificial Sequence: Synthetic oligonucleotide
uaugugccaaggccauuug

SEQ ID NO: 1673014 - RNA, 19 nt, Artificial Sequence
  Description of Artificial Sequence: Synthetic oligonucleotide
cuugcuggacagugggagc

SEQ ID NO: 1673015 - RNA, 19 nt, Artificial Sequence
  Description of Artificial Sequence: Synthetic oligonucleotide
agagaugcccagcucgccu

SEQ ID NO: 1673016 - RNA, 19 nt, Artificial Sequence
  Description of Artificial Sequence: Synthetic oligonucleotide
acauguugagagagaugcc

SEQ ID NO: 1673017 - RNA, 19 nt, Artificial Sequence
  Description of Artificial Sequence: Synthetic oligonucleotide
acagcuucuaaggucacau

SEQ ID NO: 1673018 - RNA, 19 nt, Artificial Sequence
  Description of Artificial Sequence: Synthetic oligonucleotide
gcauccauggguguggcgg

SEQ ID NO: 1673019 - RNA, 19 nt, Artificial Sequence
  Description of Artificial Sequence: Synthetic oligonucleotide
uccgcauccaugggugugg

SEQ ID NO: 1673020 - RNA, 19 nt, Artificial Sequence
  Description of Artificial Sequence: Synthetic oligonucleotide
uuugggacuugagggcagg

SEQ ID NO: 1673021 - RNA, 19 nt, Artificial Sequence
  Description of Artificial Sequence: Synthetic oligonucleotide
agaggggcagcucuuuggu

SEQ ID NO: 1673022 - RNA, 19 nt, Artificial Sequence
  Description of Artificial Sequence: Synthetic oligonucleotide
ccgagaagaaccagggucc

SEQ ID NO: 1673023 - RNA, 19 nt, Artificial Sequence
  Description of Artificial Sequence: Synthetic oligonucleotide
uuuuccuaggguacaccuu

SEQ ID NO: 1673024 - RNA, 19 nt, Artificial Sequence
  Description of Artificial Sequence: Synthetic oligonucleotide
ucuacccuuggcuugucuu

SEQ ID NO: 1673025 - RNA, 19 nt, Artificial Sequence
  Description of Artificial Sequence: Synthetic oligonucleotide
cuccaaguauguucucagc

SEQ ID NO: 1673026 - RNA, 19 nt, Artificial Sequence
  Description of Artificial Sequence: Synthetic oligonucleotide
cccaccagagaacaggagg

SEQ ID NO: 1673027 - RNA, 19 nt, Artificial Sequence
  Description of Artificial Sequence: Synthetic oligonucleotide
cucuagcucauccuuccug

SEQ ID NO: 1673028 - RNA, 19 nt, Artificial Sequence
  Description of Artificial Sequence: Synthetic oligonucleotide
ccuguagccguacaggggc

SEQ ID NO: 1673029 - RNA, 19 nt, Artificial Sequence
  Description of Artificial Sequence: Synthetic oligonucleotide
guggggauggcggucaugc

SEQ ID NO: 1673030 - RNA, 19 nt, Artificial Sequence
  Description of Artificial Sequence: Synthetic oligonucleotide
ggauuagccaugguaguag

SEQ ID NO: 1673031 - RNA, 19 nt, Artificial Sequence
  Description of Artificial Sequence: Synthetic oligonucleotide
cauuuguuacgagcagggg

SEQ ID NO: 1673032 - RNA, 19 nt, Artificial Sequence
  Description of Artificial Sequence: Synthetic oligonucleotide
cauccuuccuguucccuac

SEQ ID NO: 1673033 - RNA, 19 nt, Artificial Sequence
  Description of Artificial Sequence: Synthetic oligonucleotide
ggucacauaauuccaggga

SEQ ID NO: 1673034 - RNA, 19 nt, Artificial Sequence
  Description of Artificial Sequence: Synthetic oligonucleotide
aacucagucuccagcccag

SEQ ID NO: 1673035 - RNA, 19 nt, Artificial Sequence
  Description of Artificial Sequence: Synthetic oligonucleotide
gaguccccacuuuuccuag

SEQ ID NO: 1673036 - RNA, 19 nt, Artificial Sequence
  Description of Artificial Sequence: Synthetic oligonucleotide
uugcuggacagugggagca

SEQ ID NO: 1673037 - RNA, 19 nt, Artificial Sequence
  Description of Artificial Sequence: Synthetic oligonucleotide
ucuucuacccuuggcuugu

SEQ ID NO: 1673038 - RNA, 19 nt, Artificial Sequence
  Description of Artificial Sequence: Synthetic oligonucleotide
ugagagagaugcccagcuc

SEQ ID NO: 1673039 - RNA, 19 nt, Artificial Sequence
  Description of Artificial Sequence: Synthetic oligonucleotide
cuacccuuggcuugucuuc

SEQ ID NO: 1673040 - RNA, 19 nt, Artificial Sequence
  Description of Artificial Sequence: Synthetic oligonucleotide
cuuccagugcucauccuca

SEQ ID NO: 1673041 - RNA, 19 nt, Artificial Sequence
  Description of Artificial Sequence: Synthetic oligonucleotide
ccaaguauguucucagcac

SEQ ID NO: 1673042 - RNA, 19 nt, Artificial Sequence
  Description of Artificial Sequence: Synthetic oligonucleotide
cucgccuccuacacccucg

SEQ ID NO: 1673043 - RNA, 19 nt, Artificial Sequence
  Description of Artificial Sequence: Synthetic oligonucleotide
uuccccauucccaucccuc

SEQ ID NO: 1673044 - RNA, 19 nt, Artificial Sequence
  Description of Artificial Sequence: Synthetic oligonucleotide
augguaguaguggugggga

SEQ ID NO: 1673045 - RNA, 19 nt, Artificial Sequence
  Description of Artificial Sequence: Synthetic oligonucleotide
gcucucguuuuccaggucc

SEQ ID NO: 1673046 - RNA, 19 nt, Artificial Sequence
  Description of Artificial Sequence: Synthetic oligonucleotide
uuggucaguugcccagccc

SEQ ID NO: 1673047 - RNA, 19 nt, Artificial Sequence
  Description of Artificial Sequence: Synthetic oligonucleotide
aguaagcagguaagagggg

SEQ ID NO: 1673048 - RNA, 19 nt, Artificial Sequence
  Description of Artificial Sequence: Synthetic oligonucleotide
aggccgagaagaaccaggg

SEQ ID NO: 1673049 - RNA, 19 nt, Artificial Sequence
  Description of Artificial Sequence: Synthetic oligonucleotide
ugucuccaaagaagugacu

SEQ ID NO: 1673050 - RNA, 19 nt, Artificial Sequence
  Description of Artificial Sequence: Synthetic oligonucleotide
ucauccuuccuguucccua

SEQ ID NO: 1673051 - RNA, 19 nt, Artificial Sequence
  Description of Artificial Sequence: Synthetic oligonucleotide
gucacauaauuccagggau

SEQ ID NO: 1673052 - RNA, 19 nt, Artificial Sequence
  Description of Artificial Sequence: Synthetic oligonucleotide
gacugaagaugaaauccuc

SEQ ID NO: 1673053 - RNA, 19 nt, Artificial Sequence
  Description of Artificial Sequence: Synthetic oligonucleotide
cuuugggacuugagggcag

SEQ ID NO: 1673054 - RNA, 19 nt, Artificial Sequence
  Description of Artificial Sequence: Synthetic oligonucleotide
aggccauuuguuacgagca

SEQ ID NO: 1673055 - RNA, 19 nt, Artificial Sequence
  Description of Artificial Sequence: Synthetic oligonucleotide
aacccaccagagaacagga

SEQ ID NO: 1673056 - RNA, 19 nt, Artificial Sequence
  Description of Artificial Sequence: Synthetic oligonucleotide
uucuugcuggacaguggga

SEQ ID NO: 1673057 - RNA, 19 nt, Artificial Sequence
  Description of Artificial Sequence: Synthetic oligonucleotide
acccaucuguuucaaugcu

SEQ ID NO: 1673058 - RNA, 19 nt, Artificial Sequence
  Description of Artificial Sequence: Synthetic oligonucleotide
ccguacaggggcuagcucc

SEQ ID NO: 1673059 - RNA, 19 nt, Artificial Sequence
  Description of Artificial Sequence: Synthetic oligonucleotide
gagggcagguucuguggag

SEQ ID NO: 1673060 - RNA, 19 nt, Artificial Sequence
  Description of Artificial Sequence: Synthetic oligonucleotide
uucuguggagggcucucgu

SEQ ID NO: 1673061 - RNA, 19 nt, Artificial Sequence
  Description of Artificial Sequence: Synthetic oligonucleotide
cuuucuguuccccaauucu

SEQ ID NO: 1673062 - RNA, 19 nt, Artificial Sequence
  Description of Artificial Sequence: Synthetic oligonucleotide
ucgucaucacccaucuguu

SEQ ID NO: 1673063 - RNA, 19 nt, Artificial Sequence
  Description of Artificial Sequence: Synthetic oligonucleotide
guugagagagaugcccagc

SEQ ID NO: 1673064 - RNA, 19 nt, Artificial Sequence
  Description of Artificial Sequence: Synthetic oligonucleotide
uacccuuggcuugucuucc

SEQ ID NO: 1673065 - RNA, 19 nt, Artificial Sequence
  Description of Artificial Sequence: Synthetic oligonucleotide
aguauguucucagcacaga

SEQ ID NO: 1673066 - RNA, 19 nt, Artificial Sequence
  Description of Artificial Sequence: Synthetic oligonucleotide
cugugugucuggucccagg

SEQ ID NO: 1673067 - RNA, 19 nt, Artificial Sequence
  Description of Artificial Sequence: Synthetic oligonucleotide
uguuacgagcaggggcagg

SEQ ID NO: 1673068 - RNA, 19 nt, Artificial Sequence
  Description of Artificial Sequence: Synthetic oligonucleotide
uccugccuggcacagucau

SEQ ID NO: 1673069 - RNA, 19 nt, Artificial Sequence
  Description of Artificial Sequence: Synthetic oligonucleotide
cuaccaacucagucuccag

SEQ ID NO: 1673070 - RNA, 19 nt, Artificial Sequence
  Description of Artificial Sequence: Synthetic oligonucleotide
agugggaguccccacuuuu

SEQ ID NO: 1673071 - RNA, 19 nt, Artificial Sequence
  Description of Artificial Sequence: Synthetic oligonucleotide
agcuggguaugugccaagg

SEQ ID NO: 1673072 - RNA, 19 nt, Artificial Sequence
  Description of Artificial Sequence: Synthetic oligonucleotide
agcuccgcuuccucuuccg

SEQ ID NO: 1673073 - RNA, 19 nt, Artificial Sequence
  Description of Artificial Sequence: Synthetic oligonucleotide
gagcaguggcacucuuucc

SEQ ID NO: 1673074 - RNA, 19 nt, Artificial Sequence
  Description of Artificial Sequence: Synthetic oligonucleotide
auccucaaagucaucuacu

SEQ ID NO: 1673075 - RNA, 19 nt, Artificial Sequence
  Description of Artificial Sequence: Synthetic oligonucleotide
uuccuaggguacaccuuga

SEQ ID NO: 1673076 - RNA, 19 nt, Artificial Sequence
  Description of Artificial Sequence: Synthetic oligonucleotide
gggacuugagggcagguuc

SEQ ID NO: 1673077 - RNA, 19 nt, Artificial Sequence
  Description of Artificial Sequence: Synthetic oligonucleotide
guccccaggagacacaugu

SEQ ID NO: 1673078 - RNA, 19 nt, Artificial Sequence
  Description of Artificial Sequence: Synthetic oligonucleotide
ugucgcuugccauccuuuc

SEQ ID NO: 1673079 - RNA, 19 nt, Artificial Sequence
  Description of Artificial Sequence: Synthetic oligonucleotide
cuuuuccuaggguacaccu

SEQ ID NO: 1673080 - RNA, 19 nt, Artificial Sequence
  Description of Artificial Sequence: Synthetic oligonucleotide
uacgagcaggggcagggau

SEQ ID NO: 1673081 - RNA, 19 nt, Artificial Sequence
  Description of Artificial Sequence: Synthetic oligonucleotide
cuguugcuuccccauuccc

SEQ ID NO: 1673082 - RNA, 19 nt, Artificial Sequence
  Description of Artificial Sequence: Synthetic oligonucleotide
uccuuucuguuccccaauu

SEQ ID NO: 1673083 - RNA, 19 nt, Artificial Sequence
  Description of Artificial Sequence: Synthetic oligonucleotide
uccuaugcuuccagugcuc

SEQ ID NO: 1673084 - RNA, 19 nt, Artificial Sequence
  Description of Artificial Sequence: Synthetic oligonucleotide
uccuaggguacaccuugaa

SEQ ID NO: 1673085 - RNA, 19 nt, Artificial Sequence
  Description of Artificial Sequence: Synthetic oligonucleotide
auuagccaugguaguagug

SEQ ID NO: 1673086 - RNA, 19 nt, Artificial Sequence
  Description of Artificial Sequence: Synthetic oligonucleotide
uccaggaaugcuucuccuu

SEQ ID NO: 1673087 - RNA, 19 nt, Artificial Sequence
  Description of Artificial Sequence: Synthetic oligonucleotide
gccuccuacacccucgccc

SEQ ID NO: 1673088 - RNA, 19 nt, Artificial Sequence
  Description of Artificial Sequence: Synthetic oligonucleotide
acaaagucccggaagcgaa

SEQ ID NO: 1673089 - RNA, 19 nt, Artificial Sequence
  Description of Artificial Sequence: Synthetic oligonucleotide
ucccaucccuccagcuccg

SEQ ID NO: 1673090 - RNA, 19 nt, Artificial Sequence
  Description of Artificial Sequence: Synthetic oligonucleotide
gguguggcgggcugggcgg

SEQ ID NO: 1673091 - RNA, 19 nt, Artificial Sequence
  Description of Artificial Sequence: Synthetic oligonucleotide
agguccugugugucugguc

SEQ ID NO: 1673092 - RNA, 19 nt, Artificial Sequence
  Description of Artificial Sequence: Synthetic oligonucleotide
gauuagccaugguaguagu

SEQ ID NO: 1673093 - RNA, 19 nt, Artificial Sequence
  Description of Artificial Sequence: Synthetic oligonucleotide
caaagaagugacugaagau

SEQ ID NO: 1673094 - RNA, 19 nt, Artificial Sequence
  Description of Artificial Sequence: Synthetic oligonucleotide
uucuacccuuggcuugucu

SEQ ID NO: 1673095 - RNA, 19 nt, Artificial Sequence
  Description of Artificial Sequence: Synthetic oligonucleotide
ccuaggguacaccuugaag

SEQ ID NO: 1673096 - RNA, 19 nt, Artificial Sequence
  Description of Artificial Sequence: Synthetic oligonucleotide
aucuaccaacucagucucc

SEQ ID NO: 1673097 - RNA, 19 nt, Artificial Sequence
  Description of Artificial Sequence: Synthetic oligonucleotide
cagagaacaggaggauccc

SEQ ID NO: 1673098 - RNA, 19 nt, Artificial Sequence
  Description of Artificial Sequence: Synthetic oligonucleotide
cccacuuuuccuaggguac

SEQ ID NO: 1673099 - RNA, 19 nt, Artificial Sequence
  Description of Artificial Sequence: Synthetic oligonucleotide
guucuguggagggcucucg

SEQ ID NO: 1673100 - RNA, 19 nt, Artificial Sequence
  Description of Artificial Sequence: Synthetic oligonucleotide
aggcuugucgccacaggag

SEQ ID NO: 1673101 - RNA, 19 nt, Artificial Sequence
  Description of Artificial Sequence: Synthetic oligonucleotide
cuucuaaggucacauaauu

SEQ ID NO: 1673102 - RNA, 19 nt, Artificial Sequence
  Description of Artificial Sequence: Synthetic oligonucleotide
agagugggaguccccacuu

SEQ ID NO: 1673103 - RNA, 19 nt, Artificial Sequence
  Description of Artificial Sequence: Synthetic oligonucleotide
aggauccccaggccgagaa

SEQ ID NO: 1673104 - RNA, 19 nt, Artificial Sequence
  Description of Artificial Sequence: Synthetic oligonucleotide
ccccaggccgagaagaacc

SEQ ID NO: 1673105 - RNA, 19 nt, Artificial Sequence
  Description of Artificial Sequence: Synthetic oligonucleotide
uuguuacgagcaggggcag

SEQ ID NO: 1673106 - RNA, 19 nt, Artificial Sequence
  Description of Artificial Sequence: Synthetic oligonucleotide
ccgcagacccuccacaucc

SEQ ID NO: 1673107 - RNA, 19 nt, Artificial Sequence
  Description of Artificial Sequence: Synthetic oligonucleotide
cacaacucugugguuccag

SEQ ID NO: 1673108 - RNA, 19 nt, Artificial Sequence
  Description of Artificial Sequence: Synthetic oligonucleotide
cuacaccugagcagcccug

SEQ ID NO: 1673109 - RNA, 19 nt, Artificial Sequence
  Description of Artificial Sequence: Synthetic oligonucleotide
uggagggcucucguuuucc

SEQ ID NO: 1673110 - RNA, 19 nt, Artificial Sequence
  Description of Artificial Sequence: Synthetic oligonucleotide
gcgaagacggucaugccug

SEQ ID NO: 1673111 - RNA, 19 nt, Artificial Sequence
  Description of Artificial Sequence: Synthetic oligonucleotide
gggaagaccugcaacucug

SEQ ID NO: 1673112 - RNA, 19 nt, Artificial Sequence
  Description of Artificial Sequence: Synthetic oligonucleotide
ggguguggcgggcugggcg

SEQ ID NO: 1673113 - RNA, 19 nt, Artificial Sequence
  Description of Artificial Sequence: Synthetic oligonucleotide
cuccuuccuaugcuuccag

SEQ ID NO: 1673114 - RNA, 19 nt, Artificial Sequence
  Description of Artificial Sequence: Synthetic oligonucleotide
gcagggauuagccauggua

SEQ ID NO: 1673115 - RNA, 19 nt, Artificial Sequence
  Description of Artificial Sequence: Synthetic oligonucleotide
ggucaugcucuucccuggg

SEQ ID NO: 1673116 - RNA, 19 nt, Artificial Sequence
  Description of Artificial Sequence: Synthetic oligonucleotide
uccuacacccucgcccuug

SEQ ID NO: 1673117 - RNA, 19 nt, Artificial Sequence
  Description of Artificial Sequence: Synthetic oligonucleotide
caguaucugggaagaccug

SEQ ID NO: 1673118 - RNA, 19 nt, Artificial Sequence
  Description of Artificial Sequence: Synthetic oligonucleotide
cuccagcaacccaccagag

SEQ ID NO: 1673119 - RNA, 19 nt, Artificial Sequence
  Description of Artificial Sequence: Synthetic oligonucleotide
cagcaacccaccagagaac

SEQ ID NO: 1673120 - RNA, 19 nt, Artificial Sequence
  Description of Artificial Sequence: Synthetic oligonucleotide
auccauggguguggcgggc

SEQ ID NO: 1673121 - RNA, 19 nt, Artificial Sequence
  Description of Artificial Sequence: Synthetic oligonucleotide
gagagaugcccagcucgcc

SEQ ID NO: 1673122 - RNA, 19 nt, Artificial Sequence
  Description of Artificial Sequence: Synthetic oligonucleotide
guaucugggaagaccugca

SEQ ID NO: 1673123 - RNA, 19 nt, Artificial Sequence
  Description of Artificial Sequence: Synthetic oligonucleotide
ucucguuuuccagguccug

SEQ ID NO: 1673124 - RNA, 19 nt, Artificial Sequence
  Description of Artificial Sequence: Synthetic oligonucleotide
agggcagccucuccaagua

SEQ ID NO: 1673125 - RNA, 19 nt, Artificial Sequence
  Description of Artificial Sequence: Synthetic oligonucleotide
cacaaagucccggaagcga

SEQ ID NO: 1673126 - RNA, 19 nt, Artificial Sequence
  Description of Artificial Sequence: Synthetic oligonucleotide
uggagcaguggcacucuuu

SEQ ID NO: 1673127 - RNA, 19 nt, Artificial Sequence
  Description of Artificial Sequence: Synthetic oligonucleotide
cauccuuucuguuccccaa

SEQ ID NO: 1673128 - RNA, 19 nt, Artificial Sequence
  Description of Artificial Sequence: Synthetic oligonucleotide
ugguaguagugguggggau

SEQ ID NO: 1673129 - RNA, 19 nt, Artificial Sequence
  Description of Artificial Sequence: Synthetic oligonucleotide
ucgccuccuacacccucgc

SEQ ID NO: 1673130 - RNA, 19 nt, Artificial Sequence
  Description of Artificial Sequence: Synthetic oligonucleotide
cacuuuuccuaggguacac

SEQ ID NO: 1673131 - RNA, 19 nt, Artificial Sequence
  Description of Artificial Sequence: Synthetic oligonucleotide
ucccuacaguaucuaccaa

SEQ ID NO: 1673132 - RNA, 19 nt, Artificial Sequence
  Description of Artificial Sequence: Synthetic oligonucleotide
guccugugugucugguccc

SEQ ID NO: 1673133 - RNA, 19 nt, Artificial Sequence
  Description of Artificial Sequence: Synthetic oligonucleotide
gugguuccaggaaugcuuc

SEQ ID NO: 1673134 - RNA, 19 nt, Artificial Sequence
  Description of Artificial Sequence: Synthetic oligonucleotide
gacuugagggcagguucug

SEQ ID NO: 1673135 - RNA, 19 nt, Artificial Sequence
  Description of Artificial Sequence: Synthetic oligonucleotide
cauggguguggcgggcugg

SEQ ID NO: 1673136 - RNA, 19 nt, Artificial Sequence
  Description of Artificial Sequence: Synthetic oligonucleotide
ggcacucuuuccauacugc

SEQ ID NO: 1673137 - RNA, 19 nt, Artificial Sequence
  Description of Artificial Sequence: Synthetic oligonucleotide
cuucccugggccccacaac

SEQ ID NO: 1673138 - RNA, 19 nt, Artificial Sequence
  Description of Artificial Sequence: Synthetic oligonucleotide
ugucgccacaggagucucu

SEQ ID NO: 1673139 - RNA, 19 nt, Artificial Sequence
  Description of Artificial Sequence: Synthetic oligonucleotide
ccuccgucuccgcagaccc

SEQ ID NO: 1673140 - RNA, 19 nt, Artificial Sequence
  Description of Artificial Sequence: Synthetic oligonucleotide
guccugucgcuugccaucc

SEQ ID NO: 1673141 - RNA, 19 nt, Artificial Sequence
  Description of Artificial Sequence: Synthetic oligonucleotide
gcuggguaugugccaaggc

SEQ ID NO: 1673142 - RNA, 19 nt, Artificial Sequence
  Description of Artificial Sequence: Synthetic oligonucleotide
ggucaggcccuccugccug

SEQ ID NO: 1673143 - RNA, 19 nt, Artificial Sequence
  Description of Artificial Sequence: Synthetic oligonucleotide
ucgucacugcuggagcagu

SEQ ID NO: 1673144 - RNA, 19 nt, Artificial Sequence
  Description of Artificial Sequence: Synthetic oligonucleotide
gggccccacaacucugugg

SEQ ID NO: 1673145 - RNA, 19 nt, Artificial Sequence
  Description of Artificial Sequence: Synthetic oligonucleotide
uuacgagcaggggcaggga

SEQ ID NO: 1673146 - RNA, 19 nt, Artificial Sequence
  Description of Artificial Sequence: Synthetic oligonucleotide
agccguacaggggcuagcu

SEQ ID NO: 1673147 - RNA, 19 nt, Artificial Sequence
  Description of Artificial Sequence: Synthetic oligonucleotide
cagacccuccacauccaca

SEQ ID NO: 1673148 - RNA, 19 nt, Artificial Sequence
  Description of Artificial Sequence: Synthetic oligonucleotide
gggaucuugagcuggguau

SEQ ID NO: 1673149 - RNA, 19 nt, Artificial Sequence
  Description of Artificial Sequence: Synthetic oligonucleotide
ucuuccggccagacuccuc

SEQ ID NO: 1673150 - RNA, 19 nt, Artificial Sequence
  Description of Artificial Sequence: Synthetic oligonucleotide
ccuacaguaucuaccaacu

SEQ ID NO: 1673151 - RNA, 19 nt, Artificial Sequence
  Description of Artificial Sequence: Synthetic oligonucleotide
cguacaggggcuagcuccg

SEQ ID NO: 1673152 - RNA, 19 nt, Artificial Sequence
  Description of Artificial Sequence: Synthetic oligonucleotide
gcucuuuggucaguugccc

SEQ ID NO: 1673153 - RNA, 19 nt, Artificial Sequence
  Description of Artificial Sequence: Synthetic oligonucleotide
ccaguaucugggaagaccu

SEQ ID NO: 1673154 - RNA, 19 nt, Artificial Sequence
  Description of Artificial Sequence: Synthetic oligonucleotide
uugcuuccccauucccauc

SEQ ID NO: 1673155 - RNA, 19 nt, Artificial Sequence
  Description of Artificial Sequence: Synthetic oligonucleotide
ggaguccccacuuuuccua

SEQ ID NO: 1673156 - RNA, 19 nt, Artificial Sequence
  Description of Artificial Sequence: Synthetic oligonucleotide
cacuccuguugcuucccca

SEQ ID NO: 1673157 - RNA, 19 nt, Artificial Sequence
  Description of Artificial Sequence: Synthetic oligonucleotide
gguccuccgcauccauggg

SEQ ID NO: 1673158 - RNA, 19 nt, Artificial Sequence
  Description of Artificial Sequence: Synthetic oligonucleotide
cuccgcauccaugggugug

SEQ ID NO: 1673159 - RNA, 19 nt, Artificial Sequence
  Description of Artificial Sequence: Synthetic oligonucleotide
gaucuugagcuggguaugu

SEQ ID NO: 1673160 - RNA, 19 nt, Artificial Sequence
  Description of Artificial Sequence: Synthetic oligonucleotide
ggacagugggagcacagcu

SEQ ID NO: 1673161 - RNA, 19 nt, Artificial Sequence
  Description of Artificial Sequence: Synthetic oligonucleotide
ccacacuccuguugcuucc

SEQ ID NO: 1673162 - RNA, 19 nt, Artificial Sequence
  Description of Artificial Sequence: Synthetic oligonucleotide
gcuuugggacuugagggca

SEQ ID NO: 1673163 - RNA, 19 nt, Artificial Sequence
  Description of Artificial Sequence: Synthetic oligonucleotide
gacggucaugccugaagau

SEQ ID NO: 1673164 - RNA, 19 nt, Artificial Sequence
  Description of Artificial Sequence: Synthetic oligonucleotide
cccaggagacacauguuga

SEQ ID NO: 1673165 - RNA, 19 nt, Artificial Sequence
  Description of Artificial Sequence: Synthetic oligonucleotide
acauaauuccagggaucuu

SEQ ID NO: 1673166 - RNA, 19 nt, Artificial Sequence
  Description of Artificial Sequence: Synthetic oligonucleotide
ggagcacagcuucuaaggu

SEQ ID NO: 1673167 - RNA, 19 nt, Artificial Sequence
  Description of Artificial Sequence: Synthetic oligonucleotide
guaugugccaaggccauuu

SEQ ID NO: 1673168 - RNA, 19 nt, Artificial Sequence
  Description of Artificial Sequence: Synthetic oligonucleotide
ggucaugccugaagaugcc

SEQ ID NO: 1673169 - RNA, 19 nt, Artificial Sequence
  Description of Artificial Sequence: Synthetic oligonucleotide
acccaccagagaacaggag

SEQ ID NO: 1673170 - RNA, 19 nt, Artificial Sequence
  Description of Artificial Sequence: Synthetic oligonucleotide
gucgcuugccauccuuucu

SEQ ID NO: 1673171 - RNA, 19 nt, Artificial Sequence
  Description of Artificial Sequence: Synthetic oligonucleotide
uguggcgggcugggcgggg

SEQ ID NO: 1673172 - RNA, 19 nt, Artificial Sequence
  Description of Artificial Sequence: Synthetic oligonucleotide
ggucaguugcccagcccag

SEQ ID NO: 1673173 - RNA, 19 nt, Artificial Sequence
  Description of Artificial Sequence: Synthetic oligonucleotide
ggccccuccgucuccgcag

SEQ ID NO: 1673174 - RNA, 19 nt, Artificial Sequence
  Description of Artificial Sequence: Synthetic oligonucleotide
gauggcggucaugcucuuc

SEQ ID NO: 1673175 - RNA, 19 nt, Artificial Sequence
  Description of Artificial Sequence: Synthetic oligonucleotide
cuugucgccacaggagucu

SEQ ID NO: 1673176 - RNA, 19 nt, Artificial Sequence
  Description of Artificial Sequence: Synthetic oligonucleotide
gacccuccacauccacauc

SEQ ID NO: 1673177 - RNA, 19 nt, Artificial Sequence
  Description of Artificial Sequence: Synthetic oligonucleotide
ggcuugucgccacaggagu

SEQ ID NO: 1673178 - RNA, 19 nt, Artificial Sequence
  Description of Artificial Sequence: Synthetic oligonucleotide
ccggaagcgaagacgguca

SEQ ID NO: 1673179 - RNA, 19 nt, Artificial Sequence
  Description of Artificial Sequence: Synthetic oligonucleotide
uccugucgcuugccauccu

SEQ ID NO: 1673180 - RNA, 19 nt, Artificial Sequence
  Description of Artificial Sequence: Synthetic oligonucleotide
ggaagcgaagacggucaug

SEQ ID NO: 1673181 - RNA, 19 nt, Artificial Sequence
  Description of Artificial Sequence: Synthetic oligonucleotide
cagguaagaggggcagcuc

SEQ ID NO: 1673182 - RNA, 19 nt, Artificial Sequence
  Description of Artificial Sequence: Synthetic oligonucleotide
ccucuuccggccagacucc

SEQ ID NO: 1673183 - RNA, 19 nt, Artificial Sequence
  Description of Artificial Sequence: Synthetic oligonucleotide
cggucaugcucuucccugg

SEQ ID NO: 1673184 - RNA, 19 nt, Artificial Sequence
  Description of Artificial Sequence: Synthetic oligonucleotide
ccuacacccucgcccuugg

SEQ ID NO: 1673185 - RNA, 19 nt, Artificial Sequence
  Description of Artificial Sequence: Synthetic oligonucleotide
cauucccaucccuccagcu

SEQ ID NO: 1673186 - RNA, 19 nt, Artificial Sequence
  Description of Artificial Sequence: Synthetic oligonucleotide
gacagugggagcacagcuu

SEQ ID NO: 1673187 - RNA, 19 nt, Artificial Sequence
  Description of Artificial Sequence: Synthetic oligonucleotide
cccagcucgccuccuacac

SEQ ID NO: 1673188 - RNA, 19 nt, Artificial Sequence
  Description of Artificial Sequence: Synthetic oligonucleotide
ggacccagucucaggcucc

SEQ ID NO: 1673189 - RNA, 19 nt, Artificial Sequence
  Description of Artificial Sequence: Synthetic oligonucleotide
guccuccgcauccaugggu

SEQ ID NO: 1673190 - RNA, 19 nt, Artificial Sequence
  Description of Artificial Sequence: Synthetic oligonucleotide
gggauuagccaugguagua

SEQ ID NO: 1673191 - RNA, 19 nt, Artificial Sequence
  Description of Artificial Sequence: Synthetic oligonucleotide
cagagugggaguccccacu

SEQ ID NO: 1673192 - RNA, 19 nt, Artificial Sequence
  Description of Artificial Sequence: Synthetic oligonucleotide
cucguuuuccagguccugu

SEQ ID NO: 1673193 - RNA, 19 nt, Artificial Sequence
  Description of Artificial Sequence: Synthetic oligonucleotide
cuguggagggcucucguuu

SEQ ID NO: 1673194 - RNA, 19 nt, Artificial Sequence
  Description of Artificial Sequence: Synthetic oligonucleotide
gggauggcggucaugcucu

SEQ ID NO: 1673195 - RNA, 19 nt, Artificial Sequence
  Description of Artificial Sequence: Synthetic oligonucleotide
ggaggauccccaggccgag

SEQ ID NO: 1673196 - RNA, 19 nt, Artificial Sequence
  Description of Artificial Sequence: Synthetic oligonucleotide
caguaucuaccaacucagu

SEQ ID NO: 1673197 - RNA, 19 nt, Artificial Sequence
  Description of Artificial Sequence: Synthetic oligonucleotide
acccucgcccuuggccugg

SEQ ID NO: 1673198 - RNA, 19 nt, Artificial Sequence
  Description of Artificial Sequence: Synthetic oligonucleotide
gcaacccaccagagaacag

SEQ ID NO: 1673199 - RNA, 19 nt, Artificial Sequence
  Description of Artificial Sequence: Synthetic oligonucleotide
ccauccuuucuguucccca

SEQ ID NO: 1673200 - RNA, 19 nt, Artificial Sequence
  Description of Artificial Sequence: Synthetic oligonucleotide
cccggaagcgaagacgguc

SEQ ID NO: 1673201 - RNA, 19 nt, Artificial Sequence
  Description of Artificial Sequence: Synthetic oligonucleotide
ccccacuuuuccuagggua

SEQ ID NO: 1673202 - RNA, 19 nt, Artificial Sequence
  Description of Artificial Sequence: Synthetic oligonucleotide
cagcuucuaaggucacaua

SEQ ID NO: 1673203 - RNA, 19 nt, Artificial Sequence
  Description of Artificial Sequence: Synthetic oligonucleotide
gguucuguggagggcucuc

SEQ ID NO: 1673204 - RNA, 19 nt, Artificial Sequence
  Description of Artificial Sequence: Synthetic oligonucleotide
gcaacucugcuucuuccau

SEQ ID NO: 1673205 - RNA, 19 nt, Artificial Sequence
  Description of Artificial Sequence: Synthetic oligonucleotide
gcuugucgccacaggaguc

SEQ ID NO: 1673206 - RNA, 19 nt, Artificial Sequence
  Description of Artificial Sequence: Synthetic oligonucleotide
cgagaagaaccaggguccc

SEQ ID NO: 1673207 - RNA, 19 nt, Artificial Sequence
  Description of Artificial Sequence: Synthetic oligonucleotide
cuaugcuuccagugcucau

SEQ ID NO: 1673208 - RNA, 19 nt, Artificial Sequence
  Description of Artificial Sequence: Synthetic oligonucleotide
cuccugccuggcacaguca

SEQ ID NO: 1673209 - RNA, 19 nt, Artificial Sequence
  Description of Artificial Sequence: Synthetic oligonucleotide
ccuaugcuuccagugcuca

SEQ ID NO: 1673210 - RNA, 19 nt, Artificial Sequence
  Description of Artificial Sequence: Synthetic oligonucleotide
cuucaucgucaucacccau

SEQ ID NO: 1673211 - RNA, 19 nt, Artificial Sequence
  Description of Artificial Sequence: Synthetic oligonucleotide
ggacuugagggcagguucu

SEQ ID NO: 1673212 - RNA, 19 nt, Artificial Sequence
  Description of Artificial Sequence: Synthetic oligonucleotide
caucacccaucuguuucaa

SEQ ID NO: 1673213 - RNA, 19 nt, Artificial Sequence
  Description of Artificial Sequence: Synthetic oligonucleotide
cuucuacccuuggcuuguc

SEQ ID NO: 1673214 - RNA, 19 nt, Artificial Sequence
  Description of Artificial Sequence: Synthetic oligonucleotide
gggaguccccacuuuuccu

SEQ ID NO: 1673215 - RNA, 19 nt, Artificial Sequence
  Description of Artificial Sequence: Synthetic oligonucleotide
gggcucucguuuuccaggu

SEQ ID NO: 1673216 - RNA, 19 nt, Artificial Sequence
  Description of Artificial Sequence: Synthetic oligonucleotide
guaagaggggcagcucuuu

SEQ ID NO: 1673217 - RNA, 19 nt, Artificial Sequence
  Description of Artificial Sequence: Synthetic oligonucleotide
gaccugcaacucugcuucu

SEQ ID NO: 1673218 - RNA, 19 nt, Artificial Sequence
  Description of Artificial Sequence: Synthetic oligonucleotide
cuccgcagacccuccacau

SEQ ID NO: 1673219 - RNA, 19 nt, Artificial Sequence
  Description of Artificial Sequence: Synthetic oligonucleotide
gagugggaguccccacuuu

SEQ ID NO: 1673220 - RNA, 19 nt, Artificial Sequence
  Description of Artificial Sequence: Synthetic oligonucleotide
ccuccuacacccucgcccu

SEQ ID NO: 1673221 - RNA, 19 nt, Artificial Sequence
  Description of Artificial Sequence: Synthetic oligonucleotide
gccguacaggggcuagcuc

SEQ ID NO: 1673222 - RNA, 19 nt, Artificial Sequence
  Description of Artificial Sequence: Synthetic oligonucleotide
gguggggauggcggucaug

SEQ ID NO: 1673223 - RNA, 19 nt, Artificial Sequence
  Description of Artificial Sequence: Synthetic oligonucleotide
ggcucucguuuuccagguc

SEQ ID NO: 1673224 - RNA, 19 nt, Artificial Sequence
  Description of Artificial Sequence: Synthetic oligonucleotide
cccuccgucuccgcagacc

SEQ ID NO: 1673225 - RNA, 19 nt, Artificial Sequence
  Description of Artificial Sequence: Synthetic oligonucleotide
ggcggucaugcucuucccu

SEQ ID NO: 1673226 - RNA, 19 nt, Artificial Sequence
  Description of Artificial Sequence: Synthetic oligonucleotide
cagugggagcacagcuucu

SEQ ID NO: 1673227 - RNA, 19 nt, Artificial Sequence
  Description of Artificial Sequence: Synthetic oligonucleotide
ccugugugucuggucccag

SEQ ID NO: 1673228 - RNA, 19 nt, Artificial Sequence
  Description of Artificial Sequence: Synthetic oligonucleotide
agcucgccuccuacacccu

SEQ ID NO: 1673229 - RNA, 19 nt, Artificial Sequence
  Description of Artificial Sequence: Synthetic oligonucleotide
ccgucuccgcagacccucc

SEQ ID NO: 1673230 - RNA, 19 nt, Artificial Sequence
  Description of Artificial Sequence: Synthetic oligonucleotide
gcccagcucgccuccuaca

SEQ ID NO: 1673231 - RNA, 19 nt, Artificial Sequence
  Description of Artificial Sequence: Synthetic oligonucleotide
gguaagaggggcagcucuu

SEQ ID NO: 1673232 - RNA, 19 nt, Artificial Sequence
  Description of Artificial Sequence: Synthetic oligonucleotide
ggccgagaagaaccagggu

SEQ ID NO: 1673233 - RNA, 19 nt, Artificial Sequence
  Description of Artificial Sequence: Synthetic oligonucleotide
gggccgguacuugcgcuuc

SEQ ID NO: 1673234 - RNA, 19 nt, Artificial Sequence
  Description of Artificial Sequence: Synthetic oligonucleotide
ggguaugugccaaggccau

SEQ ID NO: 1673235 - RNA, 19 nt, Artificial Sequence
  Description of Artificial Sequence: Synthetic oligonucleotide
ggcuagcuccgugccaaaa

SEQ ID NO: 1673236 - RNA, 19 nt, Artificial Sequence
  Description of Artificial Sequence: Synthetic oligonucleotide
ccgcauccauggguguggc

SEQ ID NO: 1673237 - RNA, 19 nt, Artificial Sequence
  Description of Artificial Sequence: Synthetic oligonucleotide
gcuugccauccuuucuguu

SEQ ID NO: 1673238 - RNA, 19 nt, Artificial Sequence
  Description of Artificial Sequence: Synthetic oligonucleotide
guacaggggcuagcuccgu

SEQ ID NO: 1673239 - RNA, 19 nt, Artificial Sequence
  Description of Artificial Sequence: Synthetic oligonucleotide
ggggccgguacuugcgcuu

SEQ ID NO: 1673240 - RNA, 19 nt, Artificial Sequence
  Description of Artificial Sequence: Synthetic oligonucleotide
gggcagccucuccaaguau

SEQ ID NO: 1673241 - RNA, 19 nt, Artificial Sequence
  Description of Artificial Sequence: Synthetic oligonucleotide
gguaugugccaaggccauu

SEQ ID NO: 1673242 - RNA, 19 nt, Artificial Sequence
  Description of Artificial Sequence: Synthetic oligonucleotide
ccacaacucugugguucca

SEQ ID NO: 1673243 - RNA, 19 nt, Artificial Sequence
  Description of Artificial Sequence: Synthetic oligonucleotide
cagccucuccaaguauguu

SEQ ID NO: 1673244 - RNA, 19 nt, Artificial Sequence
  Description of Artificial Sequence: Synthetic oligonucleotide
ccaucccuccagcuccgcu

SEQ ID NO: 1673245 - RNA, 19 nt, Artificial Sequence
  Description of Artificial Sequence: Synthetic oligonucleotide
ccccuccgucuccgcagac

SEQ ID NO: 1673246 - RNA, 19 nt, Artificial Sequence
  Description of Artificial Sequence: Synthetic oligonucleotide
ccuccgcauccaugggugu

SEQ ID NO: 1673247 - RNA, 19 nt, Artificial Sequence
  Description of Artificial Sequence: Synthetic oligonucleotide
cgucuccgcagacccucca

SEQ ID NO: 1673248 - RNA, 19 nt, Artificial Sequence
  Description of Artificial Sequence: Synthetic oligonucleotide
cuccuacacccucgcccuu

SEQ ID NO: 1673249 - RNA, 19 nt, Artificial Sequence
  Description of Artificial Sequence: Synthetic oligonucleotide
cgucaucacccaucuguuu

SEQ ID NO: 1673250 - RNA, 19 nt, Artificial Sequence
  Description of Artificial Sequence: Synthetic oligonucleotide
gccccacaacucugugguu

SEQ ID NO: 1673251 - RNA, 19 nt, Artificial Sequence
  Description of Artificial Sequence: Synthetic oligonucleotide
cggaagcgaagacggucau

SEQ ID NO: 1673252 - RNA, 19 nt, Artificial Sequence
  Description of Artificial Sequence: Synthetic oligonucleotide
cccucgcccuuggccuggu

SEQ ID NO: 1673253 - RNA, 19 nt, Artificial Sequence
  Description of Artificial Sequence: Synthetic oligonucleotide
uuugauaucaaguaaacac

SEQ ID NO: 1673254 - RNA, 19 nt, Artificial Sequence
  Description of Artificial Sequence: Synthetic oligonucleotide
ugucauaugaauaucacac

SEQ ID NO: 1673255 - RNA, 19 nt, Artificial Sequence
  Description of Artificial Sequence: Synthetic oligonucleotide
aauauuaucugcuucuugu

SEQ ID NO: 1673256 - RNA, 19 nt, Artificial Sequence
  Description of Artificial Sequence: Synthetic oligonucleotide
ugcucucagaauaagaucg

SEQ ID NO: 1673257 - RNA, 19 nt, Artificial Sequence
  Description of Artificial Sequence: Synthetic oligonucleotide
uggaucaccaaccacaagg

SEQ ID NO: 1673258 - RNA, 19 nt, Artificial Sequence
  Description of Artificial Sequence: Synthetic oligonucleotide
acuuguacaacuguaaacc

SEQ ID NO: 1673259 - RNA, 19 nt, Artificial Sequence
  Description of Artificial Sequence: Synthetic oligonucleotide
aacaauuuccagaagcugc

SEQ ID NO: 1673260 - RNA, 19 nt, Artificial Sequence
  Description of Artificial Sequence: Synthetic oligonucleotide
cugauuuugaacaauuucc

SEQ ID NO: 1673261 - RNA, 19 nt, Artificial Sequence
  Description of Artificial Sequence: Synthetic oligonucleotide
aacuuguacaacuguaaac

SEQ ID NO: 1673262 - RNA, 19 nt, Artificial Sequence
  Description of Artificial Sequence: Synthetic oligonucleotide
aacugagacaaugugagac

SEQ ID NO: 1673263 - RNA, 19 nt, Artificial Sequence
  Description of Artificial Sequence: Synthetic oligonucleotide
auugugaauaacuugauaa

SEQ ID NO: 1673264 - RNA, 19 nt, Artificial Sequence
  Description of Artificial Sequence: Synthetic oligonucleotide
aaguaaacacaaugugugc

SEQ ID NO: 1673265 - RNA, 19 nt, Artificial Sequence
  Description of Artificial Sequence: Synthetic oligonucleotide
caagaaucaauuuucuucc

SEQ ID NO: 1673266 - RNA, 19 nt, Artificial Sequence
  Description of Artificial Sequence: Synthetic oligonucleotide
aagaaugcaaugguucucc

SEQ ID NO: 1673267 - RNA, 19 nt, Artificial Sequence
  Description of Artificial Sequence: Synthetic oligonucleotide
ugugaauaacuugauaagg

SEQ ID NO: 1673268 - RNA, 19 nt, Artificial Sequence
  Description of Artificial Sequence: Synthetic oligonucleotide
aacuugauaagggauuccc

SEQ ID NO: 1673269 - RNA, 19 nt, Artificial Sequence
  Description of Artificial Sequence: Synthetic oligonucleotide
uugauaucaaguaaacaca

SEQ ID NO: 1673270 - RNA, 19 nt, Artificial Sequence
  Description of Artificial Sequence: Synthetic oligonucleotide
uuccauaaaacucuuccag

SEQ ID NO: 1673271 - RNA, 19 nt, Artificial Sequence
  Description of Artificial Sequence: Synthetic oligonucleotide
gauucugggauagagaaag

SEQ ID NO: 1673272 - RNA, 19 nt, Artificial Sequence
  Description of Artificial Sequence: Synthetic oligonucleotide
auacuuucuagauaaauga

SEQ ID NO: 1673273 - RNA, 19 nt, Artificial Sequence
  Description of Artificial Sequence: Synthetic oligonucleotide
agcauuucgaacuccaggg

SEQ ID NO: 1673274 - RNA, 19 nt, Artificial Sequence
  Description of Artificial Sequence: Synthetic oligonucleotide
caaguaaacacaaugugug

SEQ ID NO: 1673275 - RNA, 19 nt, Artificial Sequence
  Description of Artificial Sequence: Synthetic oligonucleotide
uaucaaguaaacacaaugu

SEQ ID NO: 1673276 - RNA, 19 nt, Artificial Sequence
  Description of Artificial Sequence: Synthetic oligonucleotide
aagacuuagcauuuccauc

SEQ ID NO: 1673277 - RNA, 19 nt, Artificial Sequence
  Description of Artificial Sequence: Synthetic oligonucleotide
uaagggauucccaacuugg

SEQ ID NO: 1673278 - RNA, 19 nt, Artificial Sequence
  Description of Artificial Sequence: Synthetic oligonucleotide
gaucagguaaagcauuucg

SEQ ID NO: 1673279 - RNA, 19 nt, Artificial Sequence
  Description of Artificial Sequence: Synthetic oligonucleotide
ugugagacaacagaaacug

SEQ ID NO: 1673280 - RNA, 19 nt, Artificial Sequence
  Description of Artificial Sequence: Synthetic oligonucleotide
ucuaacugagacaauguga

SEQ ID NO: 1673281 - RNA, 19 nt, Artificial Sequence
  Description of Artificial Sequence: Synthetic oligonucleotide
aagccgaucagguaaagca

SEQ ID NO: 1673282 - RNA, 19 nt, Artificial Sequence
  Description of Artificial Sequence: Synthetic oligonucleotide
aaugcaacaucgcugacau

SEQ ID NO: 1673283 - RNA, 19 nt, Artificial Sequence
  Description of Artificial Sequence: Synthetic oligonucleotide
ugauuuugaacaauuucca

SEQ ID NO: 1673284 - RNA, 19 nt, Artificial Sequence
  Description of Artificial Sequence: Synthetic oligonucleotide
ucaacuugcuuccucuugg

SEQ ID NO: 1673285 - RNA, 19 nt, Artificial Sequence
  Description of Artificial Sequence: Synthetic oligonucleotide
auuuugaacaauuuccaga

SEQ ID NO: 1673286 - RNA, 19 nt, Artificial Sequence
  Description of Artificial Sequence: Synthetic oligonucleotide
gauacacucgacugcagcg

SEQ ID NO: 1673287 - RNA, 19 nt, Artificial Sequence
  Description of Artificial Sequence: Synthetic oligonucleotide
ucaccaaccacaaggaaug

SEQ ID NO: 1673288 - RNA, 19 nt, Artificial Sequence
  Description of Artificial Sequence: Synthetic oligonucleotide
uaauagcagauccaguacc

SEQ ID NO: 1673289 - RNA, 19 nt, Artificial Sequence
  Description of Artificial Sequence: Synthetic oligonucleotide
aaauggaucaccaaccaca

SEQ ID NO: 1673290 - RNA, 19 nt, Artificial Sequence
  Description of Artificial Sequence: Synthetic oligonucleotide
ugaccaaagaaugcaaugg

SEQ ID NO: 1673291 - RNA, 19 nt, Artificial Sequence
  Description of Artificial Sequence: Synthetic oligonucleotide
accccaaucuaacugagac

SEQ ID NO: 1673292 - RNA, 19 nt, Artificial Sequence
  Description of Artificial Sequence: Synthetic oligonucleotide
uccauaaaacucuuccagg

SEQ ID NO: 1673293 - RNA, 19 nt, Artificial Sequence
  Description of Artificial Sequence: Synthetic oligonucleotide
ugaauaacuugauaaggga

SEQ ID NO: 1673294 - RNA, 19 nt, Artificial Sequence
  Description of Artificial Sequence: Synthetic oligonucleotide
agugauugcugguucuucc

SEQ ID NO: 1673295 - RNA, 19 nt, Artificial Sequence
  Description of Artificial Sequence: Synthetic oligonucleotide
agguaaagcauuucgaacu

SEQ ID NO: 1673296 - RNA, 19 nt, Artificial Sequence
  Description of Artificial Sequence: Synthetic oligonucleotide
agaaacaguuucuccaaac

SEQ ID NO: 1673297 - RNA, 19 nt, Artificial Sequence
  Description of Artificial Sequence: Synthetic oligonucleotide
aaagacuuagcauuuccau

SEQ ID NO: 1673298 - RNA, 19 nt, Artificial Sequence
  Description of Artificial Sequence: Synthetic oligonucleotide
agacuuagcauuuccaucu

SEQ ID NO: 1673299 - RNA, 19 nt, Artificial Sequence
  Description of Artificial Sequence: Synthetic oligonucleotide
guaucgaggagguucauag

SEQ ID NO: 1673300 - RNA, 19 nt, Artificial Sequence
  Description of Artificial Sequence: Synthetic oligonucleotide
aauaagaucgcuguguguu

SEQ ID NO: 1673301 - RNA, 19 nt, Artificial Sequence
  Description of Artificial Sequence: Synthetic oligonucleotide
ugagacaacagaaacuguc

SEQ ID NO: 1673302 - RNA, 19 nt, Artificial Sequence
  Description of Artificial Sequence: Synthetic oligonucleotide
uugacuuugauaucaagua

SEQ ID NO: 1673303 - RNA, 19 nt, Artificial Sequence
  Description of Artificial Sequence: Synthetic oligonucleotide
cauaugaauaucacacacc

SEQ ID NO: 1673304 - RNA, 19 nt, Artificial Sequence
  Description of Artificial Sequence: Synthetic oligonucleotide
ugugaugaccaaagaaugc

SEQ ID NO: 1673305 - RNA, 19 nt, Artificial Sequence
  Description of Artificial Sequence: Synthetic oligonucleotide
ugauaucaaguaaacacaa

SEQ ID NO: 1673306 - RNA, 19 nt, Artificial Sequence
  Description of Artificial Sequence: Synthetic oligonucleotide
uucacacucauguaucgag

SEQ ID NO: 1673307 - RNA, 19 nt, Artificial Sequence
  Description of Artificial Sequence: Synthetic oligonucleotide
uucuguuauacuuucuaga

SEQ ID NO: 1673308 - RNA, 19 nt, Artificial Sequence
  Description of Artificial Sequence: Synthetic oligonucleotide
ugauaagggauucccaacu

SEQ ID NO: 1673309 - RNA, 19 nt, Artificial Sequence
  Description of Artificial Sequence: Synthetic oligonucleotide
gacaaugugagacaacaga

SEQ ID NO: 1673310 - RNA, 19 nt, Artificial Sequence
  Description of Artificial Sequence: Synthetic oligonucleotide
ucugggauagagaaagacu

SEQ ID NO: 1673311 - RNA, 19 nt, Artificial Sequence
  Description of Artificial Sequence: Synthetic oligonucleotide
uaaagcauuucgaacucca

SEQ ID NO: 1673312 - RNA, 19 nt, Artificial Sequence
  Description of Artificial Sequence: Synthetic oligonucleotide
ugcccucugauuuugaaca

SEQ ID NO: 1673313 - RNA, 19 nt, Artificial Sequence
  Description of Artificial Sequence: Synthetic oligonucleotide
ucauuauggaggcauugug

SEQ ID NO: 1673314 - RNA, 19 nt, Artificial Sequence
  Description of Artificial Sequence: Synthetic oligonucleotide
uguuguagccccaaaugga

SEQ ID NO: 1673315 - RNA, 19 nt, Artificial Sequence
  Description of Artificial Sequence: Synthetic oligonucleotide
acaucugcuguaaagugcc

SEQ ID NO: 1673316 - RNA, 19 nt, Artificial Sequence
  Description of Artificial Sequence: Synthetic oligonucleotide
guguuguagccccaaaugg

SEQ ID NO: 1673317 - RNA, 19 nt, Artificial Sequence
  Description of Artificial Sequence: Synthetic oligonucleotide
aaacuuguacaacuguaaa

SEQ ID NO: 1673318 - RNA, 19 nt, Artificial Sequence
  Description of Artificial Sequence: Synthetic oligonucleotide
auaacuugauaagggauuc

SEQ ID NO: 1673319 - RNA, 19 nt, Artificial Sequence
  Description of Artificial Sequence: Synthetic oligonucleotide
acuguaaaccacagcagcc

SEQ ID NO: 1673320 - RNA, 19 nt, Artificial Sequence
  Description of Artificial Sequence: Synthetic oligonucleotide
caauagaaacaguuucucc

SEQ ID NO: 1673321 - RNA, 19 nt, Artificial Sequence
  Description of Artificial Sequence: Synthetic oligonucleotide
caaugguucucccaagucc

SEQ ID NO: 1673322 - RNA, 19 nt, Artificial Sequence
  Description of Artificial Sequence: Synthetic oligonucleotide
uacuuucuagauaaaugac

SEQ ID NO: 1673323 - RNA, 19 nt, Artificial Sequence
  Description of Artificial Sequence: Synthetic oligonucleotide
gaguccauuaauacuuugg

SEQ ID NO: 1673324 - RNA, 19 nt, Artificial Sequence
  Description of Artificial Sequence: Synthetic oligonucleotide
aauaacuugauaagggauu

SEQ ID NO: 1673325 - RNA, 19 nt, Artificial Sequence
  Description of Artificial Sequence: Synthetic oligonucleotide
uaagccaacacagaguguc

SEQ ID NO: 1673326 - RNA, 19 nt, Artificial Sequence
  Description of Artificial Sequence: Synthetic oligonucleotide
uuggguucaacuugcuucc

SEQ ID NO: 1673327 - RNA, 19 nt, Artificial Sequence
  Description of Artificial Sequence: Synthetic oligonucleotide
uccagauacacucgacugc

SEQ ID NO: 1673328 - RNA, 19 nt, Artificial Sequence
  Description of Artificial Sequence: Synthetic oligonucleotide
aggaaugcaacaucgcuga

SEQ ID NO: 1673329 - RNA, 19 nt, Artificial Sequence
  Description of Artificial Sequence: Synthetic oligonucleotide
uguucagaguccauuaaua

SEQ ID NO: 1673330 - RNA, 19 nt, Artificial Sequence
  Description of Artificial Sequence: Synthetic oligonucleotide
augaccaaagaaugcaaug

SEQ ID NO: 1673331 - RNA, 19 nt, Artificial Sequence
  Description of Artificial Sequence: Synthetic oligonucleotide
acuuugauaucaaguaaac

SEQ ID NO: 1673332 - RNA, 19 nt, Artificial Sequence
  Description of Artificial Sequence: Synthetic oligonucleotide
auaucacacaccccaaucu

SEQ ID NO: 1673333 - RNA, 19 nt, Artificial Sequence
  Description of Artificial Sequence: Synthetic oligonucleotide
ugugcaugccauuuugucu

SEQ ID NO: 1673334 - RNA, 19 nt, Artificial Sequence
  Description of Artificial Sequence: Synthetic oligonucleotide
cugugaugaccaaagaaug

SEQ ID NO: 1673335 - RNA, 19 nt, Artificial Sequence
  Description of Artificial Sequence: Synthetic oligonucleotide
caggaaaccaacuguuggg

SEQ ID NO: 1673336 - RNA, 19 nt, Artificial Sequence
  Description of Artificial Sequence: Synthetic oligonucleotide
gauugcugguucuuccccg

SEQ ID NO: 1673337 - RNA, 19 nt, Artificial Sequence
  Description of Artificial Sequence: Synthetic oligonucleotide
uaugaauaucacacacccc

SEQ ID NO: 1673338 - RNA, 19 nt, Artificial Sequence
  Description of Artificial Sequence: Synthetic oligonucleotide
aaguguccguccaaaacac

SEQ ID NO: 1673339 - RNA, 19 nt, Artificial Sequence
  Description of Artificial Sequence: Synthetic oligonucleotide
ucgcuaacgccccucaaag

SEQ ID NO: 1673340 - RNA, 19 nt, Artificial Sequence
  Description of Artificial Sequence: Synthetic oligonucleotide
caaucuaacugagacaaug

SEQ ID NO: 1673341 - RNA, 19 nt, Artificial Sequence
  Description of Artificial Sequence: Synthetic oligonucleotide
ucagaauaagaucgcugug

SEQ ID NO: 1673342 - RNA, 19 nt, Artificial Sequence
  Description of Artificial Sequence: Synthetic oligonucleotide
ucugucagcaagaaucaau

SEQ ID NO: 1673343 - RNA, 19 nt, Artificial Sequence
  Description of Artificial Sequence: Synthetic oligonucleotide
acuguuggguucaacuugc

SEQ ID NO: 1673344 - RNA, 19 nt, Artificial Sequence
  Description of Artificial Sequence: Synthetic oligonucleotide
uauggaggcauugugaaua

SEQ ID NO: 1673345 - RNA, 19 nt, Artificial Sequence
  Description of Artificial Sequence: Synthetic oligonucleotide
gagacaaugugagacaaca

SEQ ID NO: 1673346 - RNA, 19 nt, Artificial Sequence
  Description of Artificial Sequence: Synthetic oligonucleotide
uccguccaaaacacaauag

SEQ ID NO: 1673347 - RNA, 19 nt, Artificial Sequence
  Description of Artificial Sequence: Synthetic oligonucleotide
acucuagcuaagccaacac

SEQ ID NO: 1673348 - RNA, 19 nt, Artificial Sequence
  Description of Artificial Sequence: Synthetic oligonucleotide
ccuacagcauucauuaugg

SEQ ID NO: 1673349 - RNA, 19 nt, Artificial Sequence
  Description of Artificial Sequence: Synthetic oligonucleotide
aguaaacacaaugugugca

SEQ ID NO: 1673350 - RNA, 19 nt, Artificial Sequence
  Description of Artificial Sequence: Synthetic oligonucleotide
uucaacuugcuuccucuug

SEQ ID NO: 1673351 - RNA, 19 nt, Artificial Sequence
  Description of Artificial Sequence: Synthetic oligonucleotide
gcuaagccaacacagagug

SEQ ID NO: 1673352 - RNA, 19 nt, Artificial Sequence
  Description of Artificial Sequence: Synthetic oligonucleotide
auaagggauucccaacuug

SEQ ID NO: 1673353 - RNA, 19 nt, Artificial Sequence
  Description of Artificial Sequence: Synthetic oligonucleotide
uguagccuuucuguaauag

SEQ ID NO: 1673354 - RNA, 19 nt, Artificial Sequence
  Description of Artificial Sequence: Synthetic oligonucleotide
aauagcagauccaguacca

SEQ ID NO: 1673355 - RNA, 19 nt, Artificial Sequence
  Description of Artificial Sequence: Synthetic oligonucleotide
ccauaaaacucuuccaggg

SEQ ID NO: 1673356 - RNA, 19 nt, Artificial Sequence
  Description of Artificial Sequence: Synthetic oligonucleotide
acaacagaaacuguccaug

SEQ ID NO: 1673357 - RNA, 19 nt, Artificial Sequence
  Description of Artificial Sequence: Synthetic oligonucleotide
cacucauguaucgaggagg

SEQ ID NO: 1673358 - RNA, 19 nt, Artificial Sequence
  Description of Artificial Sequence: Synthetic oligonucleotide
uugauaagggauucccaac

SEQ ID NO: 1673359 - RNA, 19 nt, Artificial Sequence
  Description of Artificial Sequence: Synthetic oligonucleotide
guaauagcagauccaguac

SEQ ID NO: 1673360 - RNA, 19 nt, Artificial Sequence
  Description of Artificial Sequence: Synthetic oligonucleotide
ugauugcugguucuucccc

SEQ ID NO: 1673361 - RNA, 19 nt, Artificial Sequence
  Description of Artificial Sequence: Synthetic oligonucleotide
auacacucgacugcagcgc

SEQ ID NO: 1673362 - RNA, 19 nt, Artificial Sequence
  Description of Artificial Sequence: Synthetic oligonucleotide
auuucgaacuccagggacg

SEQ ID NO: 1673363 - RNA, 19 nt, Artificial Sequence
  Description of Artificial Sequence: Synthetic oligonucleotide
gacucacaccagaagaggg

SEQ ID NO: 1673364 - RNA, 19 nt, Artificial Sequence
  Description of Artificial Sequence: Synthetic oligonucleotide
uuucgaacuccagggacgg

SEQ ID NO: 1673365 - RNA, 19 nt, Artificial Sequence
  Description of Artificial Sequence: Synthetic oligonucleotide
cauuucgaacuccagggac

SEQ ID NO: 1673366 - RNA, 19 nt, Artificial Sequence
  Description of Artificial Sequence: Synthetic oligonucleotide
aacacaauagaaacaguuu

SEQ ID NO: 1673367 - RNA, 19 nt, Artificial Sequence
  Description of Artificial Sequence: Synthetic oligonucleotide
aucgaggagguucauagau

SEQ ID NO: 1673368 - RNA, 19 nt, Artificial Sequence
  Description of Artificial Sequence: Synthetic oligonucleotide
cagguaaagcauuucgaac

SEQ ID NO: 1673369 - RNA, 19 nt, Artificial Sequence
  Description of Artificial Sequence: Synthetic oligonucleotide
uuucuagauaaaugacaga

SEQ ID NO: 1673370 - RNA, 19 nt, Artificial Sequence
  Description of Artificial Sequence: Synthetic oligonucleotide
gguucauagaucuuucuuc

SEQ ID NO: 1673371 - RNA, 19 nt, Artificial Sequence
  Description of Artificial Sequence: Synthetic oligonucleotide
acugagacaaugugagaca

SEQ ID NO: 1673372 - RNA, 19 nt, Artificial Sequence
  Description of Artificial Sequence: Synthetic oligonucleotide
acacaccccaaucuaacug

SEQ ID NO: 1673373 - RNA, 19 nt, Artificial Sequence
  Description of Artificial Sequence: Synthetic oligonucleotide
gauaaaugacagacccagg

SEQ ID NO: 1673374 - RNA, 19 nt, Artificial Sequence
  Description of Artificial Sequence: Synthetic oligonucleotide
ucuuggucacuucuguuau

SEQ ID NO: 1673375 - RNA, 19 nt, Artificial Sequence
  Description of Artificial Sequence: Synthetic oligonucleotide
gaacaauuuccagaagcug

SEQ ID NO: 1673376 - RNA, 19 nt, Artificial Sequence
  Description of Artificial Sequence: Synthetic oligonucleotide
ugaugaccaaagaaugcaa

SEQ ID NO: 1673377 - RNA, 19 nt, Artificial Sequence
  Description of Artificial Sequence: Synthetic oligonucleotide
cauuaauacuuugggauuc

SEQ ID NO: 1673378 - RNA, 19 nt, Artificial Sequence
  Description of Artificial Sequence: Synthetic oligonucleotide
caaguguccguccaaaaca

SEQ ID NO: 1673379 - RNA, 19 nt, Artificial Sequence
  Description of Artificial Sequence: Synthetic oligonucleotide
gacuuugauaucaaguaaa

SEQ ID NO: 1673380 - RNA, 19 nt, Artificial Sequence
  Description of Artificial Sequence: Synthetic oligonucleotide
acaaggaaugcaacaucgc

SEQ ID NO: 1673381 - RNA, 19 nt, Artificial Sequence
  Description of Artificial Sequence: Synthetic oligonucleotide
aggcauugugaauaacuug

SEQ ID NO: 1673382 - RNA, 19 nt, Artificial Sequence
  Description of Artificial Sequence: Synthetic oligonucleotide
cauuauggaggcauuguga

SEQ ID NO: 1673383 - RNA, 19 nt, Artificial Sequence
  Description of Artificial Sequence: Synthetic oligonucleotide
acucacaccagaagagggc

SEQ ID NO: 1673384 - RNA, 19 nt, Artificial Sequence
  Description of Artificial Sequence: Synthetic oligonucleotide
uuggucacuucuguuauac

SEQ ID NO: 1673385 - RNA, 19 nt, Artificial Sequence
  Description of Artificial Sequence: Synthetic oligonucleotide
agaaucaauuuucuuccau

SEQ ID NO: 1673386 - RNA, 19 nt, Artificial Sequence
  Description of Artificial Sequence: Synthetic oligonucleotide
cuguaaagugccugcugcg

SEQ ID NO: 1673387 - RNA, 19 nt, Artificial Sequence
  Description of Artificial Sequence: Synthetic oligonucleotide
ucucccaggcccaagccga

SEQ ID NO: 1673388 - RNA, 19 nt, Artificial Sequence
  Description of Artificial Sequence: Synthetic oligonucleotide
ugcaaugguucucccaagu

SEQ ID NO: 1673389 - RNA, 19 nt, Artificial Sequence
  Description of Artificial Sequence: Synthetic oligonucleotide
aacucuagcuaagccaaca

SEQ ID NO: 1673390 - RNA, 19 nt, Artificial Sequence
  Description of Artificial Sequence: Synthetic oligonucleotide
guagccuuucuguaauagc

SEQ ID NO: 1673391 - RNA, 19 nt, Artificial Sequence
  Description of Artificial Sequence: Synthetic oligonucleotide
uucugggauagagaaagac

SEQ ID NO: 1673392 - RNA, 19 nt, Artificial Sequence
  Description of Artificial Sequence: Synthetic oligonucleotide
ugguucacacucauguauc

SEQ ID NO: 1673393 - RNA, 19 nt, Artificial Sequence
  Description of Artificial Sequence: Synthetic oligonucleotide
auaagaucgcuguguguug

SEQ ID NO: 1673394 - RNA, 19 nt, Artificial Sequence
  Description of Artificial Sequence: Synthetic oligonucleotide
auacuuugggauucuggga

SEQ ID NO: 1673395 - RNA, 19 nt, Artificial Sequence
  Description of Artificial Sequence: Synthetic oligonucleotide
acggggagaccgcugaggg

SEQ ID NO: 1673396 - RNA, 19 nt, Artificial Sequence
  Description of Artificial Sequence: Synthetic oligonucleotide
cuugguugcucucagaaua

SEQ ID NO: 1673397 - RNA, 19 nt, Artificial Sequence
  Description of Artificial Sequence: Synthetic oligonucleotide
uucauuauggaggcauugu

SEQ ID NO: 1673398 - RNA, 19 nt, Artificial Sequence
  Description of Artificial Sequence: Synthetic oligonucleotide
gaaacaguuucuccaaacu

SEQ ID NO: 1673399 - RNA, 19 nt, Artificial Sequence
  Description of Artificial Sequence: Synthetic oligonucleotide
agacucacaccagaagagg

SEQ ID NO: 1673400 - RNA, 19 nt, Artificial Sequence
  Description of Artificial Sequence: Synthetic oligonucleotide
agugggugcagggugcccc

SEQ ID NO: 1673401 - RNA, 19 nt, Artificial Sequence
  Description of Artificial Sequence: Synthetic oligonucleotide
aaugugugcaugccauuuu

SEQ ID NO: 1673402 - RNA, 19 nt, Artificial Sequence
  Description of Artificial Sequence: Synthetic oligonucleotide
uucgcuaacgccccucaaa

SEQ ID NO: 1673403 - RNA, 19 nt, Artificial Sequence
  Description of Artificial Sequence: Synthetic oligonucleotide
aacagaaacuguccauguu

SEQ ID NO: 1673404 - RNA, 19 nt, Artificial Sequence
  Description of Artificial Sequence: Synthetic oligonucleotide
gaaagacuuagcauuucca

SEQ ID NO: 1673405 - RNA, 19 nt, Artificial Sequence
  Description of Artificial Sequence: Synthetic oligonucleotide
uguaaagugccugcugcga

SEQ ID NO: 1673406 - RNA, 19 nt, Artificial Sequence
  Description of Artificial Sequence: Synthetic oligonucleotide
gaucgcuguguguuguagc

SEQ ID NO: 1673407 - RNA, 19 nt, Artificial Sequence
  Description of Artificial Sequence: Synthetic oligonucleotide
gaucuuucuuccccugaug

SEQ ID NO: 1673408 - RNA, 19 nt, Artificial Sequence
  Description of Artificial Sequence: Synthetic oligonucleotide
gucauaugaauaucacaca

SEQ ID NO: 1673409 - RNA, 19 nt, Artificial Sequence
  Description of Artificial Sequence: Synthetic oligonucleotide
acacucauguaucgaggag

SEQ ID NO: 1673410 - RNA, 19 nt, Artificial Sequence
  Description of Artificial Sequence: Synthetic oligonucleotide
caaacuuguacaacuguaa

SEQ ID NO: 1673411 - RNA, 19 nt, Artificial Sequence
  Description of Artificial Sequence: Synthetic oligonucleotide
gaugcuucgcuaacgcccc

SEQ ID NO: 1673412 - RNA, 19 nt, Artificial Sequence
  Description of Artificial Sequence: Synthetic oligonucleotide
gcuguaaagugccugcugc

SEQ ID NO: 1673413 - RNA, 19 nt, Artificial Sequence
  Description of Artificial Sequence: Synthetic oligonucleotide
ugcugcgauuuucuggucu

SEQ ID NO: 1673414 - RNA, 19 nt, Artificial Sequence
  Description of Artificial Sequence: Synthetic oligonucleotide
gguucacacucauguaucg

SEQ ID NO: 1673415 - RNA, 19 nt, Artificial Sequence
  Description of Artificial Sequence: Synthetic oligonucleotide
ggcauugugaauaacuuga

SEQ ID NO: 1673416 - RNA, 19 nt, Artificial Sequence
  Description of Artificial Sequence: Synthetic oligonucleotide
uguaaaccacagcagccua

SEQ ID NO: 1673417 - RNA, 19 nt, Artificial Sequence
  Description of Artificial Sequence: Synthetic oligonucleotide
cuuguacaacuguaaacca

SEQ ID NO: 1673418 - RNA, 19 nt, Artificial Sequence
  Description of Artificial Sequence: Synthetic oligonucleotide
gugaugaccaaagaaugca

SEQ ID NO: 1673419 - RNA, 19 nt, Artificial Sequence
  Description of Artificial Sequence: Synthetic oligonucleotide
uucccaacuugguugcucu

SEQ ID NO: 1673420 - RNA, 19 nt, Artificial Sequence
  Description of Artificial Sequence: Synthetic oligonucleotide
caaauggaucaccaaccac

SEQ ID NO: 1673421 - RNA, 19 nt, Artificial Sequence
  Description of Artificial Sequence: Synthetic oligonucleotide
uugguugcucucagaauaa

SEQ ID NO: 1673422 - RNA, 19 nt, Artificial Sequence
  Description of Artificial Sequence: Synthetic oligonucleotide
gaaugcaaugguucuccca

SEQ ID NO: 1673423 - RNA, 19 nt, Artificial Sequence
  Description of Artificial Sequence: Synthetic oligonucleotide
gaaugcaacaucgcugaca

SEQ ID NO: 1673424 - RNA, 19 nt, Artificial Sequence
  Description of Artificial Sequence: Synthetic oligonucleotide
gggauagagaaagacuuag

SEQ ID NO: 1673425 - RNA, 19 nt, Artificial Sequence
  Description of Artificial Sequence: Synthetic oligonucleotide
agguucauagaucuuucuu

SEQ ID NO: 1673426 - RNA, 19 nt, Artificial Sequence
  Description of Artificial Sequence: Synthetic oligonucleotide
aucaccaaccacaaggaau

SEQ ID NO: 1673427 - RNA, 19 nt, Artificial Sequence
  Description of Artificial Sequence: Synthetic oligonucleotide
cagaaacuguccauguuca

SEQ ID NO: 1673428 - RNA, 19 nt, Artificial Sequence
  Description of Artificial Sequence: Synthetic oligonucleotide
ucgaggagguucauagauc

SEQ ID NO: 1673429 - RNA, 19 nt, Artificial Sequence
  Description of Artificial Sequence: Synthetic oligonucleotide
gugauugcugguucuuccc

SEQ ID NO: 1673430 - RNA, 19 nt, Artificial Sequence
  Description of Artificial Sequence: Synthetic oligonucleotide
ccuacagucaggacugagg

SEQ ID NO: 1673431 - RNA, 19 nt, Artificial Sequence
  Description of Artificial Sequence: Synthetic oligonucleotide
uggaugcuucgcuaacgcc

SEQ ID NO: 1673432 - RNA, 19 nt, Artificial Sequence
  Description of Artificial Sequence: Synthetic oligonucleotide
aucagguaaagcauuucga

SEQ ID NO: 1673433 - RNA, 19 nt, Artificial Sequence
  Description of Artificial Sequence: Synthetic oligonucleotide
gggauucugggauagagaa

SEQ ID NO: 1673434 - RNA, 19 nt, Artificial Sequence
  Description of Artificial Sequence: Synthetic oligonucleotide
caugccauuuugucuguuc

SEQ ID NO: 1673435 - RNA, 19 nt, Artificial Sequence
  Description of Artificial Sequence: Synthetic oligonucleotide
cuuugggauucugggauag

SEQ ID NO: 1673436 - RNA, 19 nt, Artificial Sequence
  Description of Artificial Sequence: Synthetic oligonucleotide
aacuguccauguucagagu

SEQ ID NO: 1673437 - RNA, 19 nt, Artificial Sequence
  Description of Artificial Sequence: Synthetic oligonucleotide
cagccuacagcauucauua

SEQ ID NO: 1673438 - RNA, 19 nt, Artificial Sequence
  Description of Artificial Sequence: Synthetic oligonucleotide
uaagaucgcuguguguugu

SEQ ID NO: 1673439 - RNA, 19 nt, Artificial Sequence
  Description of Artificial Sequence: Synthetic oligonucleotide
ugcagcgccucacaacuuc

SEQ ID NO: 1673440 - RNA, 19 nt, Artificial Sequence
  Description of Artificial Sequence: Synthetic oligonucleotide
uguccguccaaaacacaau

SEQ ID NO: 1673441 - RNA, 19 nt, Artificial Sequence
  Description of Artificial Sequence: Synthetic oligonucleotide
gaauaacuugauaagggau

SEQ ID NO: 1673442 - RNA, 19 nt, Artificial Sequence
  Description of Artificial Sequence: Synthetic oligonucleotide
gcuaacgccccucaaaguc

SEQ ID NO: 1673443 - RNA, 19 nt, Artificial Sequence
  Description of Artificial Sequence: Synthetic oligonucleotide
uaucgaggagguucauaga

SEQ ID NO: 1673444 - RNA, 19 nt, Artificial Sequence
  Description of Artificial Sequence: Synthetic oligonucleotide
auucccaacuugguugcuc

SEQ ID NO: 1673445 - RNA, 19 nt, Artificial Sequence
  Description of Artificial Sequence: Synthetic oligonucleotide
cuuugauaucaaguaaaca

SEQ ID NO: 1673446 - RNA, 19 nt, Artificial Sequence
  Description of Artificial Sequence: Synthetic oligonucleotide
aggaaaccaacuguugggu

SEQ ID NO: 1673447 - RNA, 19 nt, Artificial Sequence
  Description of Artificial Sequence: Synthetic oligonucleotide
cacaauagaaacaguuucu

SEQ ID NO: 1673448 - RNA, 19 nt, Artificial Sequence
  Description of Artificial Sequence: Synthetic oligonucleotide
guaaagcauuucgaacucc

SEQ ID NO: 1673449 - RNA, 19 nt, Artificial Sequence
  Description of Artificial Sequence: Synthetic oligonucleotide
ccucacaacuuccaggccc

SEQ ID NO: 1673450 - RNA, 19 nt, Artificial Sequence
  Description of Artificial Sequence: Synthetic oligonucleotide
gugugcaugccauuuuguc

SEQ ID NO: 1673451 - RNA, 19 nt, Artificial Sequence
  Description of Artificial Sequence: Synthetic oligonucleotide
aaugacagacccaggccau

SEQ ID NO: 1673452 - RNA, 19 nt, Artificial Sequence
  Description of Artificial Sequence: Synthetic oligonucleotide
cacaccccaaucuaacuga

SEQ ID NO: 1673453 - RNA, 19 nt, Artificial Sequence
  Description of Artificial Sequence: Synthetic oligonucleotide
gguaaagcauuucgaacuc

SEQ ID NO: 1673454 - RNA, 19 nt, Artificial Sequence
  Description of Artificial Sequence: Synthetic oligonucleotide
cugggauagagaaagacuu

SEQ ID NO: 1673455 - RNA, 19 nt, Artificial Sequence
  Description of Artificial Sequence: Synthetic oligonucleotide
aggagguucauagaucuuu

SEQ ID NO: 1673456 - RNA, 19 nt, Artificial Sequence
  Description of Artificial Sequence: Synthetic oligonucleotide
ucgacugcagcgccucaca

SEQ ID NO: 1673457 - RNA, 19 nt, Artificial Sequence
  Description of Artificial Sequence: Synthetic oligonucleotide
ucuuccccugaugagguuc

SEQ ID NO: 1673458 - RNA, 19 nt, Artificial Sequence
  Description of Artificial Sequence: Synthetic oligonucleotide
gacugcagcgccucacaac

SEQ ID NO: 1673459 - RNA, 19 nt, Artificial Sequence
  Description of Artificial Sequence: Synthetic oligonucleotide
augcaaugguucucccaag

SEQ ID NO: 1673460 - RNA, 19 nt, Artificial Sequence
  Description of Artificial Sequence: Synthetic oligonucleotide
acuugguugcucucagaau

SEQ ID NO: 1673461 - RNA, 19 nt, Artificial Sequence
  Description of Artificial Sequence: Synthetic oligonucleotide
gacggggagaccgcugagg

SEQ ID NO: 1673462 - RNA, 19 nt, Artificial Sequence
  Description of Artificial Sequence: Synthetic oligonucleotide
agacaaugugagacaacag

SEQ ID NO: 1673463 - RNA, 19 nt, Artificial Sequence
  Description of Artificial Sequence: Synthetic oligonucleotide
aucugcuguaaagugccug

SEQ ID NO: 1673464 - RNA, 19 nt, Artificial Sequence
  Description of Artificial Sequence: Synthetic oligonucleotide
aagggauucccaacuuggu

SEQ ID NO: 1673465 - RNA, 19 nt, Artificial Sequence
  Description of Artificial Sequence: Synthetic oligonucleotide
agggauucccaacuugguu

SEQ ID NO: 1673466 - RNA, 19 nt, Artificial Sequence
  Description of Artificial Sequence: Synthetic oligonucleotide
uaacgccccucaaagucuc

SEQ ID NO: 1673467 - RNA, 19 nt, Artificial Sequence
  Description of Artificial Sequence: Synthetic oligonucleotide
cucuagcuaagccaacaca

SEQ ID NO: 1673468 - RNA, 19 nt, Artificial Sequence
  Description of Artificial Sequence: Synthetic oligonucleotide
caacaucgcugacaucagc

SEQ ID NO: 1673469 - RNA, 19 nt, Artificial Sequence
  Description of Artificial Sequence: Synthetic oligonucleotide
agaucgcuguguguuguag

SEQ ID NO: 1673470 - RNA, 19 nt, Artificial Sequence
  Description of Artificial Sequence: Synthetic oligonucleotide
guugcucucagaauaagau

SEQ ID NO: 1673471 - RNA, 19 nt, Artificial Sequence
  Description of Artificial Sequence: Synthetic oligonucleotide
acuugauaagggauuccca

SEQ ID NO: 1673472 - RNA, 19 nt, Artificial Sequence
  Description of Artificial Sequence: Synthetic oligonucleotide
agucucacuguagccuuuc

SEQ ID NO: 1673473 - RNA, 19 nt, Artificial Sequence
  Description of Artificial Sequence: Synthetic oligonucleotide
agcuaagccaacacagagu

SEQ ID NO: 1673474 - RNA, 19 nt, Artificial Sequence
  Description of Artificial Sequence: Synthetic oligonucleotide
caagccgaucagguaaagc

SEQ ID NO: 1673475 - RNA, 19 nt, Artificial Sequence
  Description of Artificial Sequence: Synthetic oligonucleotide
uccaaguguccguccaaaa

SEQ ID NO: 1673476 - RNA, 19 nt, Artificial Sequence
  Description of Artificial Sequence: Synthetic oligonucleotide
gacuuagcauuuccaucuc

SEQ ID NO: 1673477 - RNA, 19 nt, Artificial Sequence
  Description of Artificial Sequence: Synthetic oligonucleotide
gaacuccagggacggggag

SEQ ID NO: 1673478 - RNA, 19 nt, Artificial Sequence
  Description of Artificial Sequence: Synthetic oligonucleotide
ucuccaaguguccguccaa

SEQ ID NO: 1673479 - RNA, 19 nt, Artificial Sequence
  Description of Artificial Sequence: Synthetic oligonucleotide
agcaccaacucuagcuaag

SEQ ID NO: 1673480 - RNA, 19 nt, Artificial Sequence
  Description of Artificial Sequence: Synthetic oligonucleotide
gaauaagaucgcugugugu

SEQ ID NO: 1673481 - RNA, 19 nt, Artificial Sequence
  Description of Artificial Sequence: Synthetic oligonucleotide
gaucaccaaccacaaggaa

SEQ ID NO: 1673482 - RNA, 19 nt, Artificial Sequence
  Description of Artificial Sequence: Synthetic oligonucleotide
caucucccaggcccaagcc

SEQ ID NO: 1673483 - RNA, 19 nt, Artificial Sequence
  Description of Artificial Sequence: Synthetic oligonucleotide
uguaucgaggagguucaua

SEQ ID NO: 1673484 - RNA, 19 nt, Artificial Sequence
  Description of Artificial Sequence: Synthetic oligonucleotide
agggacucguggaugcuuc

SEQ ID NO: 1673485 - RNA, 19 nt, Artificial Sequence
  Description of Artificial Sequence: Synthetic oligonucleotide
cauugugaauaacuugaua

SEQ ID NO: 1673486 - RNA, 19 nt, Artificial Sequence
  Description of Artificial Sequence: Synthetic oligonucleotide
guaaaccacagcagccuac

SEQ ID NO: 1673487 - RNA, 19 nt, Artificial Sequence
  Description of Artificial Sequence: Synthetic oligonucleotide
cauagaucuuucuuccccu

SEQ ID NO: 1673488 - RNA, 19 nt, Artificial Sequence
  Description of Artificial Sequence: Synthetic oligonucleotide
ccaaguguccguccaaaac

SEQ ID NO: 1673489 - RNA, 19 nt, Artificial Sequence
  Description of Artificial Sequence: Synthetic oligonucleotide
guccguccaaaacacaaua

SEQ ID NO: 1673490 - RNA, 19 nt, Artificial Sequence
  Description of Artificial Sequence: Synthetic oligonucleotide
ugccauuuugucuguucuu

SEQ ID NO: 1673491 - RNA, 19 nt, Artificial Sequence
  Description of Artificial Sequence: Synthetic oligonucleotide
aagaucgcuguguguugua

SEQ ID NO: 1673492 - RNA, 19 nt, Artificial Sequence
  Description of Artificial Sequence: Synthetic oligonucleotide
uggucacuucuguuauacu

SEQ ID NO: 1673493 - RNA, 19 nt, Artificial Sequence
  Description of Artificial Sequence: Synthetic oligonucleotide
cagaauaagaucgcugugu

SEQ ID NO: 1673494 - RNA, 19 nt, Artificial Sequence
  Description of Artificial Sequence: Synthetic oligonucleotide
accaaccacaaggaaugca

SEQ ID NO: 1673495 - RNA, 19 nt, Artificial Sequence
  Description of Artificial Sequence: Synthetic oligonucleotide
aagccaacacagagugucu

SEQ ID NO: 1673496 - RNA, 19 nt, Artificial Sequence
  Description of Artificial Sequence: Synthetic oligonucleotide
ggggagaccgcugagggac

SEQ ID NO: 1673497 - RNA, 19 nt, Artificial Sequence
  Description of Artificial Sequence: Synthetic oligonucleotide
acuuugggauucugggaua

SEQ ID NO: 1673498 - RNA, 19 nt, Artificial Sequence
  Description of Artificial Sequence: Synthetic oligonucleotide
cccaaucuaacugagacaa

SEQ ID NO: 1673499 - RNA, 19 nt, Artificial Sequence
  Description of Artificial Sequence: Synthetic oligonucleotide
guguccguccaaaacacaa

SEQ ID NO: 1673500 - RNA, 19 nt, Artificial Sequence
  Description of Artificial Sequence: Synthetic oligonucleotide
uccccugaugagguucucc

SEQ ID NO: 1673501 - RNA, 19 nt, Artificial Sequence
  Description of Artificial Sequence: Synthetic oligonucleotide
ccaacucuagcuaagccaa

SEQ ID NO: 1673502 - RNA, 19 nt, Artificial Sequence
  Description of Artificial Sequence: Synthetic oligonucleotide
gauaagggauucccaacuu

SEQ ID NO: 1673503 - RNA, 19 nt, Artificial Sequence
  Description of Artificial Sequence: Synthetic oligonucleotide
cacaaugugugcaugccau

SEQ ID NO: 1673504 - RNA, 19 nt, Artificial Sequence
  Description of Artificial Sequence: Synthetic oligonucleotide
gcgauuuucuggucuucag

SEQ ID NO: 1673505 - RNA, 19 nt, Artificial Sequence
  Description of Artificial Sequence: Synthetic oligonucleotide
acaaugugugcaugccauu

SEQ ID NO: 1673506 - RNA, 19 nt, Artificial Sequence
  Description of Artificial Sequence: Synthetic oligonucleotide
ugcaugccauuuugucugu

SEQ ID NO: 1673507 - RNA, 19 nt, Artificial Sequence
  Description of Artificial Sequence: Synthetic oligonucleotide
gauaucaaguaaacacaau

SEQ ID NO: 1673508 - RNA, 19 nt, Artificial Sequence
  Description of Artificial Sequence: Synthetic oligonucleotide
ucagugauugcugguucuu

SEQ ID NO: 1673509 - RNA, 19 nt, Artificial Sequence
  Description of Artificial Sequence: Synthetic oligonucleotide
ucgcuguguguuguagccc

SEQ ID NO: 1673510 - RNA, 19 nt, Artificial Sequence
  Description of Artificial Sequence: Synthetic oligonucleotide
acucguggaugcuucgcua

SEQ ID NO: 1673511 - RNA, 19 nt, Artificial Sequence
  Description of Artificial Sequence: Synthetic oligonucleotide
acgccccucaaagucucac

SEQ ID NO: 1673512 - RNA, 19 nt, Artificial Sequence
  Description of Artificial Sequence: Synthetic oligonucleotide
cugguucacacucauguau

SEQ ID NO: 1673513 - RNA, 19 nt, Artificial Sequence
  Description of Artificial Sequence: Synthetic oligonucleotide
uggucuccaaguguccguc

SEQ ID NO: 1673514 - RNA, 19 nt, Artificial Sequence
  Description of Artificial Sequence: Synthetic oligonucleotide
cugugauguccuuggcauc

SEQ ID NO: 1673515 - RNA, 19 nt, Artificial Sequence
  Description of Artificial Sequence: Synthetic oligonucleotide
acaccccaaucuaacugag

SEQ ID NO: 1673516 - RNA, 19 nt, Artificial Sequence
  Description of Artificial Sequence: Synthetic oligonucleotide
gccaacugaugaugaaaug

SEQ ID NO: 1673517 - RNA, 19 nt, Artificial Sequence
  Description of Artificial Sequence: Synthetic oligonucleotide
ccugugaugaccaaagaau

SEQ ID NO: 1673518 - RNA, 19 nt, Artificial Sequence
  Description of Artificial Sequence: Synthetic oligonucleotide
cuaacgccccucaaagucu

SEQ ID NO: 1673519 - RNA, 19 nt, Artificial Sequence
  Description of Artificial Sequence: Synthetic oligonucleotide
gagaccgcugagggacucg

SEQ ID NO: 1673520 - RNA, 19 nt, Artificial Sequence
  Description of Artificial Sequence: Synthetic oligonucleotide
auagcagauccaguaccau

SEQ ID NO: 1673521 - RNA, 19 nt, Artificial Sequence
  Description of Artificial Sequence: Synthetic oligonucleotide
gaggcauugugaauaacuu

SEQ ID NO: 1673522 - RNA, 19 nt, Artificial Sequence
  Description of Artificial Sequence: Synthetic oligonucleotide
gccauuuugucuguucuuc

SEQ ID NO: 1673523 - RNA, 19 nt, Artificial Sequence
  Description of Artificial Sequence: Synthetic oligonucleotide
ccucaaagucucacuguag

SEQ ID NO: 1673524 - RNA, 19 nt, Artificial Sequence
  Description of Artificial Sequence: Synthetic oligonucleotide
guucacacucauguaucga

SEQ ID NO: 1673525 - RNA, 19 nt, Artificial Sequence
  Description of Artificial Sequence: Synthetic oligonucleotide
ggaggcauugugaauaacu

SEQ ID NO: 1673526 - RNA, 19 nt, Artificial Sequence
  Description of Artificial Sequence: Synthetic oligonucleotide
gcaaugguucucccaaguc

SEQ ID NO: 1673527 - RNA, 19 nt, Artificial Sequence
  Description of Artificial Sequence: Synthetic oligonucleotide
caggcccaagccgaucagg

SEQ ID NO: 1673528 - RNA, 19 nt, Artificial Sequence
  Description of Artificial Sequence: Synthetic oligonucleotide
ccaacuugguugcucucag

SEQ ID NO: 1673529 - RNA, 19 nt, Artificial Sequence
  Description of Artificial Sequence: Synthetic oligonucleotide
agguguaggcuuccagaua

SEQ ID NO: 1673530 - RNA, 19 nt, Artificial Sequence
  Description of Artificial Sequence: Synthetic oligonucleotide
agccgaucagguaaagcau

SEQ ID NO: 1673531 - RNA, 19 nt, Artificial Sequence
  Description of Artificial Sequence: Synthetic oligonucleotide
cucguggaugcuucgcuaa

SEQ ID NO: 1673532 - RNA, 19 nt, Artificial Sequence
  Description of Artificial Sequence: Synthetic oligonucleotide
gguucuuccccgcgugccc

SEQ ID NO: 1673533 - RNA, 19 nt, Artificial Sequence
  Description of Artificial Sequence: Synthetic oligonucleotide
ccaaacuuguacaacugua

SEQ ID NO: 1673534 - RNA, 19 nt, Artificial Sequence
  Description of Artificial Sequence: Synthetic oligonucleotide
guuguagccccaaauggau

SEQ ID NO: 1673535 - RNA, 19 nt, Artificial Sequence
  Description of Artificial Sequence: Synthetic oligonucleotide
gguugcucucagaauaaga

SEQ ID NO: 1673536 - RNA, 19 nt, Artificial Sequence
  Description of Artificial Sequence: Synthetic oligonucleotide
cuacagcauucauuaugga

SEQ ID NO: 1673537 - RNA, 19 nt, Artificial Sequence
  Description of Artificial Sequence: Synthetic oligonucleotide
augcaacaucgcugacauc

SEQ ID NO: 1673538 - RNA, 19 nt, Artificial Sequence
  Description of Artificial Sequence: Synthetic oligonucleotide
ccguccaaaacacaauaga

SEQ ID NO: 1673539 - RNA, 19 nt, Artificial Sequence
  Description of Artificial Sequence: Synthetic oligonucleotide
guaaagugccugcugcgau

SEQ ID NO: 1673540 - RNA, 19 nt, Artificial Sequence
  Description of Artificial Sequence: Synthetic oligonucleotide
gcccaagccgaucagguaa

SEQ ID NO: 1673541 - RNA, 19 nt, Artificial Sequence
  Description of Artificial Sequence: Synthetic oligonucleotide
cagugauugcugguucuuc

SEQ ID NO: 1673542 - RNA, 19 nt, Artificial Sequence
  Description of Artificial Sequence: Synthetic oligonucleotide
agcagccuacagcauucau

SEQ ID NO: 1673543 - RNA, 19 nt, Artificial Sequence
  Description of Artificial Sequence: Synthetic oligonucleotide
ccaaauggaucaccaacca

SEQ ID NO: 1673544 - RNA, 19 nt, Artificial Sequence
  Description of Artificial Sequence: Synthetic oligonucleotide
cgcuguguguuguagcccc

SEQ ID NO: 1673545 - RNA, 19 nt, Artificial Sequence
  Description of Artificial Sequence: Synthetic oligonucleotide
caaguccacuguacacauc

SEQ ID NO: 1673546 - RNA, 19 nt, Artificial Sequence
  Description of Artificial Sequence: Synthetic oligonucleotide
ggagguucauagaucuuuc

SEQ ID NO: 1673547 - RNA, 19 nt, Artificial Sequence
  Description of Artificial Sequence: Synthetic oligonucleotide
uuccccgcgugcccucuga

SEQ ID NO: 1673548 - RNA, 19 nt, Artificial Sequence
  Description of Artificial Sequence: Synthetic oligonucleotide
cuguaaaccacagcagccu

SEQ ID NO: 1673549 - RNA, 19 nt, Artificial Sequence
  Description of Artificial Sequence: Synthetic oligonucleotide
gggacucguggaugcuucg

SEQ ID NO: 1673550 - RNA, 19 nt, Artificial Sequence
  Description of Artificial Sequence: Synthetic oligonucleotide
ccaucugucauaugaauau

SEQ ID NO: 1673551 - RNA, 19 nt, Artificial Sequence
  Description of Artificial Sequence: Synthetic oligonucleotide
gcauuucgaacuccaggga

SEQ ID NO: 1673552 - RNA, 19 nt, Artificial Sequence
  Description of Artificial Sequence: Synthetic oligonucleotide
guguguuguagccccaaau

SEQ ID NO: 1673553 - RNA, 19 nt, Artificial Sequence
  Description of Artificial Sequence: Synthetic oligonucleotide
uggaggcauugugaauaac

SEQ ID NO: 1673554 - RNA, 19 nt, Artificial Sequence
  Description of Artificial Sequence: Synthetic oligonucleotide
cucgacugcagcgccucac

SEQ ID NO: 1673555 - RNA, 19 nt, Artificial Sequence
  Description of Artificial Sequence: Synthetic oligonucleotide
ccagagacugcuccuugac

SEQ ID NO: 1673556 - RNA, 19 nt, Artificial Sequence
  Description of Artificial Sequence: Synthetic oligonucleotide
auucugggauagagaaaga

SEQ ID NO: 1673557 - RNA, 19 nt, Artificial Sequence
  Description of Artificial Sequence: Synthetic oligonucleotide
ggcuuccagauacacucga

SEQ ID NO: 1673558 - RNA, 19 nt, Artificial Sequence
  Description of Artificial Sequence: Synthetic oligonucleotide
cucagugauugcugguucu

SEQ ID NO: 1673559 - RNA, 19 nt, Artificial Sequence
  Description of Artificial Sequence: Synthetic oligonucleotide
ucccaacuugguugcucuc

SEQ ID NO: 1673560 - RNA, 19 nt, Artificial Sequence
  Description of Artificial Sequence: Synthetic oligonucleotide
aguguccguccaaaacaca

SEQ ID NO: 1673561 - RNA, 19 nt, Artificial Sequence
  Description of Artificial Sequence: Synthetic oligonucleotide
cagcaccaacucuagcuaa

SEQ ID NO: 1673562 - RNA, 19 nt, Artificial Sequence
  Description of Artificial Sequence: Synthetic oligonucleotide
cuguacacaucugcuguaa

SEQ ID NO: 1673563 - RNA, 19 nt, Artificial Sequence
  Description of Artificial Sequence: Synthetic oligonucleotide
ggucuccaaguguccgucc

SEQ ID NO: 1673564 - RNA, 19 nt, Artificial Sequence
  Description of Artificial Sequence: Synthetic oligonucleotide
aggccaucugucauaugaa

SEQ ID NO: 1673565 - RNA, 19 nt, Artificial Sequence
  Description of Artificial Sequence: Synthetic oligonucleotide
gcaacaucgcugacaucag

SEQ ID NO: 1673566 - RNA, 19 nt, Artificial Sequence
  Description of Artificial Sequence: Synthetic oligonucleotide
agccuacagcauucauuau

SEQ ID NO: 1673567 - RNA, 19 nt, Artificial Sequence
  Description of Artificial Sequence: Synthetic oligonucleotide
ugcuucgcuaacgccccuc

SEQ ID NO: 1673568 - RNA, 19 nt, Artificial Sequence
  Description of Artificial Sequence: Synthetic oligonucleotide
ggguucaacuugcuuccuc

SEQ ID NO: 1673569 - RNA, 19 nt, Artificial Sequence
  Description of Artificial Sequence: Synthetic oligonucleotide
ucgcugacaucagcauccu

SEQ ID NO: 1673570 - RNA, 19 nt, Artificial Sequence
  Description of Artificial Sequence: Synthetic oligonucleotide
cacucgacugcagcgccuc

SEQ ID NO: 1673571 - RNA, 19 nt, Artificial Sequence
  Description of Artificial Sequence: Synthetic oligonucleotide
uggguucaacuugcuuccu

SEQ ID NO: 1673572 - RNA, 19 nt, Artificial Sequence
  Description of Artificial Sequence: Synthetic oligonucleotide
cccugugaugaccaaagaa

SEQ ID NO: 1673573 - RNA, 19 nt, Artificial Sequence
  Description of Artificial Sequence: Synthetic oligonucleotide
ccucagugauugcugguuc

SEQ ID NO: 1673574 - RNA, 19 nt, Artificial Sequence
  Description of Artificial Sequence: Synthetic oligonucleotide
caccccaaucuaacugaga

SEQ ID NO: 1673575 - RNA, 19 nt, Artificial Sequence
  Description of Artificial Sequence: Synthetic oligonucleotide
gagacugcuccuugacuuu

SEQ ID NO: 1673576 - RNA, 19 nt, Artificial Sequence
  Description of Artificial Sequence: Synthetic oligonucleotide
cauucauuauggaggcauu

SEQ ID NO: 1673577 - RNA, 19 nt, Artificial Sequence
  Description of Artificial Sequence: Synthetic oligonucleotide
cuuccccugaugagguucu

SEQ ID NO: 1673578 - RNA, 19 nt, Artificial Sequence
  Description of Artificial Sequence: Synthetic oligonucleotide
uucuuccccugaugagguu

SEQ ID NO: 1673579 - RNA, 19 nt, Artificial Sequence
  Description of Artificial Sequence: Synthetic oligonucleotide
acucgacugcagcgccuca

SEQ ID NO: 1673580 - RNA, 19 nt, Artificial Sequence
  Description of Artificial Sequence: Synthetic oligonucleotide
ggacucguggaugcuucgc

SEQ ID NO: 1673581 - RNA, 19 nt, Artificial Sequence
  Description of Artificial Sequence: Synthetic oligonucleotide
cugcgauuuucuggucuuc

SEQ ID NO: 1673582 - RNA, 19 nt, Artificial Sequence
  Description of Artificial Sequence: Synthetic oligonucleotide
uucuuccccgcgugcccuc

SEQ ID NO: 1673583 - RNA, 19 nt, Artificial Sequence
  Description of Artificial Sequence: Synthetic oligonucleotide
guucucccaaguccacugu

SEQ ID NO: 1673584 - RNA, 19 nt, Artificial Sequence
  Description of Artificial Sequence: Synthetic oligonucleotide
gcuuccagauacacucgac

SEQ ID NO: 1673585 - RNA, 19 nt, Artificial Sequence
  Description of Artificial Sequence: Synthetic oligonucleotide
gcuucgcuaacgccccuca

SEQ ID NO: 1673586 - RNA, 19 nt, Artificial Sequence
  Description of Artificial Sequence: Synthetic oligonucleotide
cuccaaguguccguccaaa

SEQ ID NO: 1673587 - RNA, 19 nt, Artificial Sequence
  Description of Artificial Sequence: Synthetic oligonucleotide
aacgccccucaaagucuca

SEQ ID NO: 1673588 - RNA, 19 nt, Artificial Sequence
  Description of Artificial Sequence: Synthetic oligonucleotide
cuaagccaacacagagugu

SEQ ID NO: 1673589 - RNA, 19 nt, Artificial Sequence
  Description of Artificial Sequence: Synthetic oligonucleotide
caaugugugcaugccauuu

SEQ ID NO: 1673590 - RNA, 19 nt, Artificial Sequence
  Description of Artificial Sequence: Synthetic oligonucleotide
ucuuccccgcgugcccucu

SEQ ID NO: 1673591 - RNA, 19 nt, Artificial Sequence
  Description of Artificial Sequence: Synthetic oligonucleotide
gcagcgccucacaacuucc

SEQ ID NO: 1673592 - RNA, 19 nt, Artificial Sequence
  Description of Artificial Sequence: Synthetic oligonucleotide
gccucacaacuuccaggcc

SEQ ID NO: 1673593 - RNA, 19 nt, Artificial Sequence
  Description of Artificial Sequence: Synthetic oligonucleotide
augcuucgcuaacgccccu

SEQ ID NO: 1673594 - RNA, 19 nt, Artificial Sequence
  Description of Artificial Sequence: Synthetic oligonucleotide
gaccgcugagggacucgug

SEQ ID NO: 1673595 - RNA, 19 nt, Artificial Sequence
  Description of Artificial Sequence: Synthetic oligonucleotide
cuggucuccaaguguccgu

SEQ ID NO: 1673596 - RNA, 19 nt, Artificial Sequence
  Description of Artificial Sequence: Synthetic oligonucleotide
cccucaaagucucacugua

SEQ ID NO: 1673597 - RNA, 19 nt, Artificial Sequence
  Description of Artificial Sequence: Synthetic oligonucleotide
acacucgacugcagcgccu

SEQ ID NO: 1673598 - RNA, 19 nt, Artificial Sequence
  Description of Artificial Sequence: Synthetic oligonucleotide
gugagacaacagaaacugu

SEQ ID NO: 1673599 - RNA, 19 nt, Artificial Sequence
  Description of Artificial Sequence: Synthetic oligonucleotide
uccccgcgugcccucugau

SEQ ID NO: 1673600 - RNA, 19 nt, Artificial Sequence
  Description of Artificial Sequence: Synthetic oligonucleotide
ggacggggagaccgcugag

SEQ ID NO: 1673601 - RNA, 19 nt, Artificial Sequence
  Description of Artificial Sequence: Synthetic oligonucleotide
ggacugagguguaggcuuc

SEQ ID NO: 1673602 - RNA, 19 nt, Artificial Sequence
  Description of Artificial Sequence: Synthetic oligonucleotide
cuguagccuuucuguaaua

SEQ ID NO: 1673603 - RNA, 19 nt, Artificial Sequence
  Description of Artificial Sequence: Synthetic oligonucleotide
ucccuacagucaggacuga

SEQ ID NO: 1673604 - RNA, 19 nt, Artificial Sequence
  Description of Artificial Sequence: Synthetic oligonucleotide
ggaaaccaacuguuggguu

SEQ ID NO: 1673605 - RNA, 19 nt, Artificial Sequence
  Description of Artificial Sequence: Synthetic oligonucleotide
ggccaucugucauaugaau

SEQ ID NO: 1673606 - RNA, 19 nt, Artificial Sequence
  Description of Artificial Sequence: Synthetic oligonucleotide
cagaguccauuaauacuuu

SEQ ID NO: 1673607 - RNA, 19 nt, Artificial Sequence
  Description of Artificial Sequence: Synthetic oligonucleotide
cuucgcuaacgccccucaa

SEQ ID NO: 1673608 - RNA, 19 nt, Artificial Sequence
  Description of Artificial Sequence: Synthetic oligonucleotide
auguaucgaggagguucau

SEQ ID NO: 1673609 - RNA, 19 nt, Artificial Sequence
  Description of Artificial Sequence: Synthetic oligonucleotide
ccucugauuuugaacaauu

SEQ ID NO: 1673610 - RNA, 19 nt, Artificial Sequence
  Description of Artificial Sequence: Synthetic oligonucleotide
cccaacuugguugcucuca

SEQ ID NO: 1673611 - RNA, 19 nt, Artificial Sequence
  Description of Artificial Sequence: Synthetic oligonucleotide
cuuccccgcgugcccucug

SEQ ID NO: 1673612 - RNA, 19 nt, Artificial Sequence
  Description of Artificial Sequence: Synthetic oligonucleotide
gauucccaacuugguugcu

SEQ ID NO: 1673613 - RNA, 19 nt, Artificial Sequence
  Description of Artificial Sequence: Synthetic oligonucleotide
uuccccugaugagguucuc

SEQ ID NO: 1673614 - RNA, 19 nt, Artificial Sequence
  Description of Artificial Sequence: Synthetic oligonucleotide
uggcaucucccaggcccaa

SEQ ID NO: 1673615 - RNA, 19 nt, Artificial Sequence
  Description of Artificial Sequence: Synthetic oligonucleotide
gcugcgauuuucuggucuu

SEQ ID NO: 1673616 - RNA, 19 nt, Artificial Sequence
  Description of Artificial Sequence: Synthetic oligonucleotide
ccaagccgaucagguaaag

SEQ ID NO: 1673617 - RNA, 19 nt, Artificial Sequence
  Description of Artificial Sequence: Synthetic oligonucleotide
ccuuggcaucucccaggcc

SEQ ID NO: 1673618 - RNA, 19 nt, Artificial Sequence
  Description of Artificial Sequence: Synthetic oligonucleotide
cgaucagguaaagcauuuc

SEQ ID NO: 1673619 - RNA, 19 nt, Artificial Sequence
  Description of Artificial Sequence: Synthetic oligonucleotide
gcauugugaauaacuugau

SEQ ID NO: 1673620 - RNA, 19 nt, Artificial Sequence
  Description of Artificial Sequence: Synthetic oligonucleotide
cccaagccgaucagguaaa

SEQ ID NO: 1673621 - RNA, 19 nt, Artificial Sequence
  Description of Artificial Sequence: Synthetic oligonucleotide
ggagaccgcugagggacuc

SEQ ID NO: 1673622 - RNA, 19 nt, Artificial Sequence
  Description of Artificial Sequence: Synthetic oligonucleotide
ggcccaagccgaucaggua

SEQ ID NO: 1673623 - RNA, 19 nt, Artificial Sequence
  Description of Artificial Sequence: Synthetic oligonucleotide
gaggagguucauagaucuu

SEQ ID NO: 1673624 - RNA, 19 nt, Artificial Sequence
  Description of Artificial Sequence: Synthetic oligonucleotide
ccgcugagggacucgugga

SEQ ID NO: 1673625 - RNA, 19 nt, Artificial Sequence
  Description of Artificial Sequence: Synthetic oligonucleotide
gccgaucagguaaagcauu

SEQ ID NO: 1673626 - RNA, 19 nt, Artificial Sequence
  Description of Artificial Sequence: Synthetic oligonucleotide
ccgaucagguaaagcauuu

SEQ ID NO: 1673627 - RNA, 19 nt, Artificial Sequence
  Description of Artificial Sequence: Synthetic oligonucleotide
cccgcgugcccucugauuu

SEQ ID NO: 1673628 - RNA, 19 nt, Artificial Sequence
  Description of Artificial Sequence: Synthetic oligonucleotide
ccaggccaucugucauaug

SEQ ID NO: 1673629 - RNA, 19 nt, Artificial Sequence
  Description of Artificial Sequence: Synthetic oligonucleotide
cgcgugcccucugauuuug

SEQ ID NO: 1673630 - RNA, 19 nt, Artificial Sequence
  Description of Artificial Sequence: Synthetic oligonucleotide
ccaaucuaacugagacaau

SEQ ID NO: 1673631 - RNA, 19 nt, Artificial Sequence
  Description of Artificial Sequence: Synthetic oligonucleotide
ccucuuggucacuucuguu

SEQ ID NO: 1673632 - RNA, 19 nt, Artificial Sequence
  Description of Artificial Sequence: Synthetic oligonucleotide
cugcagcgccucacaacuu

SEQ ID NO: 1673633 - RNA, 19 nt, Artificial Sequence
  Description of Artificial Sequence: Synthetic oligonucleotide
cccucugauuuugaacaau

SEQ ID NO: 1673634 - RNA, 19 nt, Artificial Sequence
  Description of Artificial Sequence: Synthetic oligonucleotide
cgacugcagcgccucacaa

SEQ ID NO: 1673635 - RNA, 19 nt, Artificial Sequence
  Description of Artificial Sequence: Synthetic oligonucleotide
cggggagaccgcugaggga

SEQ ID NO: 1673636 - RNA, 19 nt, Artificial Sequence
  Description of Artificial Sequence: Synthetic oligonucleotide
gcgugcccucugauuuuga

SEQ ID NO: 1673637 - RNA, 19 nt, Artificial Sequence
  Description of Artificial Sequence: Synthetic oligonucleotide
cgcuaacgccccucaaagu

SEQ ID NO: 1673638 - RNA, 19 nt, Artificial Sequence
  Description of Artificial Sequence: Synthetic oligonucleotide
gggagaccgcugagggacu

SEQ ID NO: 1673639 - RNA, 19 nt, Artificial Sequence
  Description of Artificial Sequence: Synthetic oligonucleotide
cgccccucaaagucucacu

SEQ ID NO: 1673640 - RNA, 19 nt, Artificial Sequence
  Description of Artificial Sequence: Synthetic oligonucleotide
gcaugccauuuugucuguu

SEQ ID NO: 1673641 - RNA, 19 nt, Artificial Sequence
  Description of Artificial Sequence: Synthetic oligonucleotide
ccgcgugcccucugauuuu

SEQ ID NO: 1673642 - RNA, 19 nt, Artificial Sequence
  Description of Artificial Sequence: Synthetic oligonucleotide
ccccgcgugcccucugauu

SEQ ID NO: 1673643 - RNA, 19 nt, Artificial Sequence
  Description of Artificial Sequence: Synthetic oligonucleotide
aaccaacaagcuuagaggg

SEQ ID NO: 1673644 - RNA, 19 nt, Artificial Sequence
  Description of Artificial Sequence: Synthetic oligonucleotide
uacuagagaaccaacaagc

SEQ ID NO: 1673645 - RNA, 19 nt, Artificial Sequence
  Description of Artificial Sequence: Synthetic oligonucleotide
acuucuuuagcccucaguc

SEQ ID NO: 1673646 - RNA, 19 nt, Artificial Sequence
  Description of Artificial Sequence: Synthetic oligonucleotide
agaaccaacaagcuuagag

SEQ ID NO: 1673647 - RNA, 19 nt, Artificial Sequence
  Description of Artificial Sequence: Synthetic oligonucleotide
aagauugggaauccucagc

SEQ ID NO: 1673648 - RNA, 19 nt, Artificial Sequence
  Description of Artificial Sequence: Synthetic oligonucleotide
agaucucacuucuuuagcc

SEQ ID NO: 1673649 - RNA, 19 nt, Artificial Sequence
  Description of Artificial Sequence: Synthetic oligonucleotide
agauacagggaugaggugc

SEQ ID NO: 1673650 - RNA, 19 nt, Artificial Sequence
  Description of Artificial Sequence: Synthetic oligonucleotide
uagagaaccaacaagcuua

SEQ ID NO: 1673651 - RNA, 19 nt, Artificial Sequence
  Description of Artificial Sequence: Synthetic oligonucleotide
uagagggauaccaauaaca

SEQ ID NO: 1673652 - RNA, 19 nt, Artificial Sequence
  Description of Artificial Sequence: Synthetic oligonucleotide
aggaaucuaggucuaaagg

SEQ ID NO: 1673653 - RNA, 19 nt, Artificial Sequence
  Description of Artificial Sequence: Synthetic oligonucleotide
aaggaaucuaggucuaaag

SEQ ID NO: 1673654 - RNA, 19 nt, Artificial Sequence
  Description of Artificial Sequence: Synthetic oligonucleotide
uuagcccucagucacacug

SEQ ID NO: 1673655 - RNA, 19 nt, Artificial Sequence
  Description of Artificial Sequence: Synthetic oligonucleotide
ucuacacuacaacaaagga

SEQ ID NO: 1673656 - RNA, 19 nt, Artificial Sequence
  Description of Artificial Sequence: Synthetic oligonucleotide
uauguggaggcccacacca

SEQ ID NO: 1673657 - RNA, 19 nt, Artificial Sequence
  Description of Artificial Sequence: Synthetic oligonucleotide
accaauaacaaacccaccu

SEQ ID NO: 1673658 - RNA, 19 nt, Artificial Sequence
  Description of Artificial Sequence: Synthetic oligonucleotide
cacgugaugccuuaugugg

SEQ ID NO: 1673659 - RNA, 19 nt, Artificial Sequence
  Description of Artificial Sequence: Synthetic oligonucleotide
gacacuuuccucauaggcg

SEQ ID NO: 1673660 - RNA, 19 nt, Artificial Sequence
  Description of Artificial Sequence: Synthetic oligonucleotide
cauaguaaggcgcugugag

SEQ ID NO: 1673661 - RNA, 19 nt, Artificial Sequence
  Description of Artificial Sequence: Synthetic oligonucleotide
aacaagcuuagagggauac

SEQ ID NO: 1673662 - RNA, 19 nt, Artificial Sequence
  Description of Artificial Sequence: Synthetic oligonucleotide
  modified_base (5)..(5): a, c, u, g, unknown or other
ugagngaaacgcuugccgc

SEQ ID NO: 1673663 - RNA, 19 nt, Artificial Sequence
  Description of Artificial Sequence: Synthetic oligonucleotide
auaguaaggcgcugugagc

SEQ ID NO: 1673664 - RNA, 19 nt, Artificial Sequence
  Description of Artificial Sequence: Synthetic oligonucleotide
  modified_base (12)..(12): a, c, u, g, unknown or other
agagcgcugagngaaacgc

SEQ ID NO: 1673665 - RNA, 19 nt, Artificial Sequence
  Description of Artificial Sequence: Synthetic oligonucleotide
uguuuggcgagguuggagc

SEQ ID NO: 1673666 - RNA, 19 nt, Artificial Sequence
  Description of Artificial Sequence: Synthetic oligonucleotide
acaaacccaccuuguagcc

SEQ ID NO: 1673667 - RNA, 19 nt, Artificial Sequence
  Description of Artificial Sequence: Synthetic oligonucleotide
aacgcggcgggaucggagc

SEQ ID NO: 1673668 - RNA, 19 nt, Artificial Sequence
  Description of Artificial Sequence: Synthetic oligonucleotide
agauuggagagauagcuau

SEQ ID NO: 1673669 - RNA, 19 nt, Artificial Sequence
  Description of Artificial Sequence: Synthetic oligonucleotide
cuacuagagaaccaacaag

SEQ ID NO: 1673670 - RNA, 19 nt, Artificial Sequence
  Description of Artificial Sequence: Synthetic oligonucleotide
aagggccuugcauaguaag

SEQ ID NO: 1673671 - RNA, 19 nt, Artificial Sequence
  Description of Artificial Sequence: Synthetic oligonucleotide
  modified_base (6)..(6): a, c, u, g, unknown or other
cugagngaaacgcuugccg

SEQ ID NO: 1673672 - RNA, 19 nt, Artificial Sequence
  Description of Artificial Sequence: Synthetic oligonucleotide
ucgaguagcguuccggacc

SEQ ID NO: 1673673 - RNA, 19 nt, Artificial Sequence
  Description of Artificial Sequence: Synthetic oligonucleotide
cagucgacagaacacaagc

SEQ ID NO: 1673674 - RNA, 19 nt, Artificial Sequence
  Description of Artificial Sequence: Synthetic oligonucleotide
uuugcaacuccaucccucc

SEQ ID NO: 1673675 - RNA, 19 nt, Artificial Sequence
  Description of Artificial Sequence: Synthetic oligonucleotide
gacagaccuguguuuaggg

SEQ ID NO: 1673676 - RNA, 19 nt, Artificial Sequence
  Description of Artificial Sequence: Synthetic oligonucleotide
aauaacaaacccaccuugu

SEQ ID NO: 1673677 - RNA, 19 nt, Artificial Sequence
  Description of Artificial Sequence: Synthetic oligonucleotide
acagauacagggaugaggu

SEQ ID NO: 1673678 - RNA, 19 nt, Artificial Sequence
  Description of Artificial Sequence: Synthetic oligonucleotide
ugugcaagggccuugcaua

SEQ ID NO: 1673679 - RNA, 19 nt, Artificial Sequence
  Description of Artificial Sequence: Synthetic oligonucleotide
aacucgaguagcguuccgg

SEQ ID NO: 1673680 - RNA, 19 nt, Artificial Sequence
  Description of Artificial Sequence: Synthetic oligonucleotide
uuagagggauaccaauaac

SEQ ID NO: 1673681 - RNA, 19 nt, Artificial Sequence
  Description of Artificial Sequence: Synthetic oligonucleotide
uucaacuccuccccggucu

SEQ ID NO: 1673682 - RNA, 19 nt, Artificial Sequence
  Description of Artificial Sequence: Synthetic oligonucleotide
uaguaaggcgcugugagcu

SEQ ID NO: 1673683 - RNA, 19 nt, Artificial Sequence
  Description of Artificial Sequence: Synthetic oligonucleotide
acagaccuguguuuagggg

SEQ ID NO: 1673684 - RNA, 19 nt, Artificial Sequence
  Description of Artificial Sequence: Synthetic oligonucleotide
uuuagggguuggaguaagg

SEQ ID NO: 1673685 - RNA, 19 nt, Artificial Sequence
  Description of Artificial Sequence: Synthetic oligonucleotide
cacacgaacggcuucucgc

SEQ ID NO: 1673686 - RNA, 19 nt, Artificial Sequence
  Description of Artificial Sequence: Synthetic oligonucleotide
gagaucucacuucuuuagc

SEQ ID NO: 1673687 - RNA, 19 nt, Artificial Sequence
  Description of Artificial Sequence: Synthetic oligonucleotide
aagccuauugagguccccg

SEQ ID NO: 1673688 - RNA, 19 nt, Artificial Sequence
  Description of Artificial Sequence: Synthetic oligonucleotide
uagcuaugcacugugcaag

SEQ ID NO: 1673689 - RNA, 19 nt, Artificial Sequence
  Description of Artificial Sequence: Synthetic oligonucleotide
agccuauugagguccccgc

SEQ ID NO: 1673690 - RNA, 19 nt, Artificial Sequence
  Description of Artificial Sequence: Synthetic oligonucleotide
ugcgucacgagcacagagc

SEQ ID NO: 1673691 - RNA, 19 nt, Artificial Sequence
  Description of Artificial Sequence: Synthetic oligonucleotide
ugaugccuuauguggaggc

SEQ ID NO: 1673692 - RNA, 19 nt, Artificial Sequence
  Description of Artificial Sequence: Synthetic oligonucleotide
augccuuauguggaggccc

SEQ ID NO: 1673693 - RNA, 19 nt, Artificial Sequence
  Description of Artificial Sequence: Synthetic oligonucleotide
gaucuagucagcaucugca

SEQ ID NO: 1673694 - RNA, 19 nt, Artificial Sequence
  Description of Artificial Sequence: Synthetic oligonucleotide
ggcgauagggcccacaggc

SEQ ID NO: 1673695 - RNA, 19 nt, Artificial Sequence
  Description of Artificial Sequence: Synthetic oligonucleotide
caagauugggaauccucag

SEQ ID NO: 1673696 - RNA, 19 nt, Artificial Sequence
  Description of Artificial Sequence: Synthetic oligonucleotide
ucgacagaacacaagcuuu

SEQ ID NO: 1673697 - RNA, 19 nt, Artificial Sequence
  Description of Artificial Sequence: Synthetic oligonucleotide
cuacacuacaacaaaggaa

SEQ ID NO: 1673698 - RNA, 19 nt, Artificial Sequence
  Description of Artificial Sequence: Synthetic oligonucleotide
uuauguggaggcccacacc

SEQ ID NO: 1673699 - RNA, 19 nt, Artificial Sequence
  Description of Artificial Sequence: Synthetic oligonucleotide
agcuaugcacugugcaagg

SEQ ID NO: 1673700 - RNA, 19 nt, Artificial Sequence
  Description of Artificial Sequence: Synthetic oligonucleotide
uggugcgucacgagcacag

SEQ ID NO: 1673701 - RNA, 19 nt, Artificial Sequence
  Description of Artificial Sequence: Synthetic oligonucleotide
aggcacuccgaagaugucc

SEQ ID NO: 1673702 - RNA, 19 nt, Artificial Sequence
  Description of Artificial Sequence: Synthetic oligonucleotide
auagcuaugcacugugcaa

SEQ ID NO: 1673703 - RNA, 19 nt, Artificial Sequence
  Description of Artificial Sequence: Synthetic oligonucleotide
aaucuaggucuaaagggga

SEQ ID NO: 1673704 - RNA, 19 nt, Artificial Sequence
  Description of Artificial Sequence: Synthetic oligonucleotide
  modified_base (4)..(4): a, c, u, g, unknown or other
gagngaaacgcuugccgca

SEQ ID NO: 1673705 - RNA, 19 nt, Artificial Sequence
  Description of Artificial Sequence: Synthetic oligonucleotide
  modified_base (3)..(3): a, c, u, g, unknown or other
agngaaacgcuugccgcac

SEQ ID NO: 1673706 - RNA, 19 nt, Artificial Sequence
  Description of Artificial Sequence: Synthetic oligonucleotide
uccucauaggcgcccgagg

SEQ ID NO: 1673707 - RNA, 19 nt, Artificial Sequence
  Description of Artificial Sequence: Synthetic oligonucleotide
aaaggaaucuaggucuaaa

SEQ ID NO: 1673708 - RNA, 19 nt, Artificial Sequence
  Description of Artificial Sequence: Synthetic oligonucleotide
uccagauuggagagauagc

SEQ ID NO: 1673709 - RNA, 19 nt, Artificial Sequence
  Description of Artificial Sequence: Synthetic oligonucleotide
ucaaagaauaaggcuucca

SEQ ID NO: 1673710 - RNA, 19 nt, Artificial Sequence
  Description of Artificial Sequence: Synthetic oligonucleotide
cuacccauuugguaucuug

SEQ ID NO: 1673711 - RNA, 19 nt, Artificial Sequence
  Description of Artificial Sequence: Synthetic oligonucleotide
  modified_base (14)..(14): a, c, u, g, unknown or other
acagagcgcugagngaaac

SEQ ID NO: 1673712 - RNA, 19 nt, Artificial Sequence
  Description of Artificial Sequence: Synthetic oligonucleotide
caagcuuagagggauacca

SEQ ID NO: 1673713 - RNA, 19 nt, Artificial Sequence
  Description of Artificial Sequence: Synthetic oligonucleotide
ugugagcucagguccacgu

SEQ ID NO: 1673714 - RNA, 19 nt, Artificial Sequence
  Description of Artificial Sequence: Synthetic oligonucleotide
aucucacuucuuuagcccu

SEQ ID NO: 1673715 - RNA, 19 nt, Artificial Sequence
  Description of Artificial Sequence: Synthetic oligonucleotide
aagcgagaucugaagcucg

SEQ ID NO: 1673716 - RNA, 19 nt, Artificial Sequence
  Description of Artificial Sequence: Synthetic oligonucleotide
ugaagcucggggcgauagg

SEQ ID NO: 1673717 - RNA, 19 nt, Artificial Sequence
  Description of Artificial Sequence: Synthetic oligonucleotide
uugggaauccucagcccgc

SEQ ID NO: 1673718 - RNA, 19 nt, Artificial Sequence
  Description of Artificial Sequence: Synthetic oligonucleotide
auugagguccccgccugcc

SEQ ID NO: 1673719 - RNA, 19 nt, Artificial Sequence
  Description of Artificial Sequence: Synthetic oligonucleotide
ggugcucuugaucagggug

SEQ ID NO: 1673720 - RNA, 19 nt, Artificial Sequence
  Description of Artificial Sequence: Synthetic oligonucleotide
auaacaaacccaccuugua

SEQ ID NO: 1673721 - RNA, 19 nt, Artificial Sequence
  Description of Artificial Sequence: Synthetic oligonucleotide
uccaccaaccucacaggac

SEQ ID NO: 1673722 - RNA, 19 nt, Artificial Sequence
  Description of Artificial Sequence: Synthetic oligonucleotide
ugccaguaguccagauugg

SEQ ID NO: 1673723 - RNA, 19 nt, Artificial Sequence
  Description of Artificial Sequence: Synthetic oligonucleotide
acuuuccucauaggcgccc

SEQ ID NO: 1673724 - RNA, 19 nt, Artificial Sequence
  Description of Artificial Sequence: Synthetic oligonucleotide
ugcucgacagaccuguguu

SEQ ID NO: 1673725 - RNA, 19 nt, Artificial Sequence
  Description of Artificial Sequence: Synthetic oligonucleotide
uugugcgagccacaccuca

SEQ ID NO: 1673726 - RNA, 19 nt, Artificial Sequence
  Description of Artificial Sequence: Synthetic oligonucleotide
uguuugcaacuccaucccu

SEQ ID NO: 1673727 - RNA, 19 nt, Artificial Sequence
  Description of Artificial Sequence: Synthetic oligonucleotide
agagggauaccaauaacaa

SEQ ID NO: 1673728 - RNA, 19 nt, Artificial Sequence
  Description of Artificial Sequence: Synthetic oligonucleotide
agauagcuaugcacugugc

SEQ ID NO: 1673729 - RNA, 19 nt, Artificial Sequence
  Description of Artificial Sequence: Synthetic oligonucleotide
aguaaggcgcugugagcuc

SEQ ID NO: 1673730 - RNA, 19 nt, Artificial Sequence
  Description of Artificial Sequence: Synthetic oligonucleotide
ugcagcuacuagagaacca

SEQ ID NO: 1673731 - RNA, 19 nt, Artificial Sequence
  Description of Artificial Sequence: Synthetic oligonucleotide
ucuggcuacccauuuggua

SEQ ID NO: 1673732 - RNA, 19 nt, Artificial Sequence
  Description of Artificial Sequence: Synthetic oligonucleotide
acuccccugggaucuaguc

SEQ ID NO: 1673733 - RNA, 19 nt, Artificial Sequence
  Description of Artificial Sequence: Synthetic oligonucleotide
agcuuagagggauaccaau

SEQ ID NO: 1673734 - RNA, 19 nt, Artificial Sequence
  Description of Artificial Sequence: Synthetic oligonucleotide
acccggaggccguacggcc

SEQ ID NO: 1673735 - RNA, 19 nt, Artificial Sequence
  Description of Artificial Sequence: Synthetic oligonucleotide
gagcgggagacaccgcgcg

SEQ ID NO: 1673736 - RNA, 19 nt, Artificial Sequence
  Description of Artificial Sequence: Synthetic oligonucleotide
acuagagaaccaacaagcu

SEQ ID NO: 1673737 - RNA, 19 nt, Artificial Sequence
  Description of Artificial Sequence: Synthetic oligonucleotide
gacaccgcgcgcuuccacc

SEQ ID NO: 1673738 - RNA, 19 nt, Artificial Sequence
  Description of Artificial Sequence: Synthetic oligonucleotide
cuaggucuaaaggggaaug

SEQ ID NO: 1673739 - RNA, 19 nt, Artificial Sequence
  Description of Artificial Sequence: Synthetic oligonucleotide
acucgaguagcguuccgga

SEQ ID NO: 1673740 - RNA, 19 nt, Artificial Sequence
  Description of Artificial Sequence: Synthetic oligonucleotide
  modified_base (13)..(13): a, c, u, g, unknown or other
cagagcgcugagngaaacg

SEQ ID NO: 1673741 - RNA, 19 nt, Artificial Sequence
  Description of Artificial Sequence: Synthetic oligonucleotide
gaugccuuauguggaggcc

SEQ ID NO: 1673742 - RNA, 19 nt, Artificial Sequence
  Description of Artificial Sequence: Synthetic oligonucleotide
ggaucggagccaaagcugg

SEQ ID NO: 1673743 - RNA, 19 nt, Artificial Sequence
  Description of Artificial Sequence: Synthetic oligonucleotide
uagccagugcucgacagac

SEQ ID NO: 1673744 - RNA, 19 nt, Artificial Sequence
  Description of Artificial Sequence: Synthetic oligonucleotide
agcuacuagagaaccaaca

SEQ ID NO: 1673745 - RNA, 19 nt, Artificial Sequence
  Description of Artificial Sequence: Synthetic oligonucleotide
uggagaucucacuucuuua

SEQ ID NO: 1673746 - RNA, 19 nt, Artificial Sequence
  Description of Artificial Sequence: Synthetic oligonucleotide
guguuuagggguuggagua

SEQ ID NO: 1673747 - RNA, 19 nt, Artificial Sequence
  Description of Artificial Sequence: Synthetic oligonucleotide
gcgucacgagcacagagcg

SEQ ID NO: 1673748 - RNA, 19 nt, Artificial Sequence
  Description of Artificial Sequence: Synthetic oligonucleotide
uagcguuccggacccggag

SEQ ID NO: 1673749 - RNA, 19 nt, Artificial Sequence
  Description of Artificial Sequence: Synthetic oligonucleotide
ugcgccgugagaugcgcgc

SEQ ID NO: 1673750 - RNA, 19 nt, Artificial Sequence
  Description of Artificial Sequence: Synthetic oligonucleotide
ugucggcccguguucaccc

SEQ ID NO: 1673751 - RNA, 19 nt, Artificial Sequence
  Description of Artificial Sequence: Synthetic oligonucleotide
acaccucagaugccaguag

SEQ ID NO: 1673752 - RNA, 19 nt, Artificial Sequence
  Description of Artificial Sequence: Synthetic oligonucleotide
cuauugagguccccgccug

SEQ ID NO: 1673753 - RNA, 19 nt, Artificial Sequence
  Description of Artificial Sequence: Synthetic oligonucleotide
agagaaccaacaagcuuag

SEQ ID NO: 1673754 - RNA, 19 nt, Artificial Sequence
  Description of Artificial Sequence: Synthetic oligonucleotide
aucuagucagcaucugcaa

SEQ ID NO: 1673755 - RNA, 19 nt, Artificial Sequence
  Description of Artificial Sequence: Synthetic oligonucleotide
ugcgaacucgaguagcguu

SEQ ID NO: 1673756 - RNA, 19 nt, Artificial Sequence
  Description of Artificial Sequence: Synthetic oligonucleotide
ucuaggucuaaaggggaau

SEQ ID NO: 1673757 - RNA, 19 nt, Artificial Sequence
  Description of Artificial Sequence: Synthetic oligonucleotide
uccgccugcgaacucgagu

SEQ ID NO: 1673758 - RNA, 19 nt, Artificial Sequence
  Description of Artificial Sequence: Synthetic oligonucleotide
ugccgcuugaaguccgagc

SEQ ID NO: 1673759 - RNA, 19 nt, Artificial Sequence
  Description of Artificial Sequence: Synthetic oligonucleotide
cugcagcuacuagagaacc

SEQ ID NO: 1673760 - RNA, 19 nt, Artificial Sequence
  Description of Artificial Sequence: Synthetic oligonucleotide
aggggcuugugcgagccac

SEQ ID NO: 1673761 - RNA, 19 nt, Artificial Sequence
  Description of Artificial Sequence: Synthetic oligonucleotide
aguagcguuccggacccgg

SEQ ID NO: 1673762 - RNA, 19 nt, Artificial Sequence
  Description of Artificial Sequence: Synthetic oligonucleotide
guuuagggguuggaguaag

SEQ ID NO: 1673763 - RNA, 19 nt, Artificial Sequence
  Description of Artificial Sequence: Synthetic oligonucleotide
agggugucggcccguguuc

SEQ ID NO: 1673764 - RNA, 19 nt, Artificial Sequence
  Description of Artificial Sequence: Synthetic oligonucleotide
cucagaugccaguagucca

SEQ ID NO: 1673765 - RNA, 19 nt, Artificial Sequence
  Description of Artificial Sequence: Synthetic oligonucleotide
agggccuugcauaguaagg

SEQ ID NO: 1673766 - RNA, 19 nt, Artificial Sequence
  Description of Artificial Sequence: Synthetic oligonucleotide
agagauagcuaugcacugu

SEQ ID NO: 1673767 - RNA, 19 nt, Artificial Sequence
  Description of Artificial Sequence: Synthetic oligonucleotide
ggccuugcauaguaaggcg

SEQ ID NO: 1673768 - RNA, 19 nt, Artificial Sequence
  Description of Artificial Sequence: Synthetic oligonucleotide
cucauaggcgcccgagggc

SEQ ID NO: 1673769 - RNA, 19 nt, Artificial Sequence
  Description of Artificial Sequence: Synthetic oligonucleotide
ucggcgugcgcccacuggu

SEQ ID NO: 1673770 - RNA, 19 nt, Artificial Sequence
  Description of Artificial Sequence: Synthetic oligonucleotide
uugcauaguaaggcgcugu

SEQ ID NO: 1673771 - RNA, 19 nt, Artificial Sequence
  Description of Artificial Sequence: Synthetic oligonucleotide
gugcgucacgagcacagag

SEQ ID NO: 1673772 - RNA, 19 nt, Artificial Sequence
  Description of Artificial Sequence: Synthetic oligonucleotide
caagcgagaucugaagcuc

SEQ ID NO: 1673773 - RNA, 19 nt, Artificial Sequence
  Description of Artificial Sequence: Synthetic oligonucleotide
uggagcgcugcgcgaagcc

SEQ ID NO: 1673774 - RNA, 19 nt, Artificial Sequence
  Description of Artificial Sequence: Synthetic oligonucleotide
acacgccgcacacgaacgg

SEQ ID NO: 1673775 - RNA, 19 nt, Artificial Sequence
  Description of Artificial Sequence: Synthetic oligonucleotide
acagucgacagaacacaag

SEQ ID NO: 1673776 - RNA, 19 nt, Artificial Sequence
  Description of Artificial Sequence: Synthetic oligonucleotide
gcuacuagagaaccaacaa

SEQ ID NO: 1673777 - RNA, 19 nt, Artificial Sequence
  Description of Artificial Sequence: Synthetic oligonucleotide
cuuuagcccucagucacac

SEQ ID NO: 1673778 - RNA, 19 nt, Artificial Sequence
  Description of Artificial Sequence: Synthetic oligonucleotide
agggguuggaguaaggauu

SEQ ID NO: 1673779 - RNA, 19 nt, Artificial Sequence
  Description of Artificial Sequence: Synthetic oligonucleotide
guuugcaacuccaucccuc

SEQ ID NO: 1673780 - RNA, 19 nt, Artificial Sequence
  Description of Artificial Sequence: Synthetic oligonucleotide
agcgggagacaccgcgcgc

SEQ ID NO: 1673781 - RNA, 19 nt, Artificial Sequence
  Description of Artificial Sequence: Synthetic oligonucleotide
gaacucgaguagcguuccg

SEQ ID NO: 1673782 - RNA, 19 nt, Artificial Sequence
  Description of Artificial Sequence: Synthetic oligonucleotide
uaaggcgcugugagcucag

SEQ ID NO: 1673783 - RNA, 19 nt, Artificial Sequence
  Description of Artificial Sequence: Synthetic oligonucleotide
uuccucauaggcgcccgag

SEQ ID NO: 1673784 - RNA, 19 nt, Artificial Sequence
  Description of Artificial Sequence: Synthetic oligonucleotide
uuuggcgagguuggagcgc

SEQ ID NO: 1673785 - RNA, 19 nt, Artificial Sequence
  Description of Artificial Sequence: Synthetic oligonucleotide
guuccggacccggaggccg

SEQ ID NO: 1673786 - RNA, 19 nt, Artificial Sequence
  Description of Artificial Sequence: Synthetic oligonucleotide
uccgaagccuauugagguc

SEQ ID NO: 1673787 - RNA, 19 nt, Artificial Sequence
  Description of Artificial Sequence: Synthetic oligonucleotide
  modified_base (17)..(17): a, c, u, g, unknown or other
agcacagagcgcugagnga

SEQ ID NO: 1673788 - RNA, 19 nt, Artificial Sequence
  Description of Artificial Sequence: Synthetic oligonucleotide
gugaugccuuauguggagg

SEQ ID NO: 1673789 - RNA, 19 nt, Artificial Sequence
  Description of Artificial Sequence: Synthetic oligonucleotide
cuggcuacccauuugguau

SEQ ID NO: 1673790 - RNA, 19 nt, Artificial Sequence
  Description of Artificial Sequence: Synthetic oligonucleotide
cucgaguagcguuccggac

SEQ ID NO: 1673791 - RNA, 19 nt, Artificial Sequence
  Description of Artificial Sequence: Synthetic oligonucleotide
cugaagcucggggcgauag

SEQ ID NO: 1673792 - RNA, 19 nt, Artificial Sequence
  Description of Artificial Sequence: Synthetic oligonucleotide
gcucagguccacgugaugc

SEQ ID NO: 1673793 - RNA, 19 nt, Artificial Sequence
  Description of Artificial Sequence: Synthetic oligonucleotide
agucgacagaacacaagcu

SEQ ID NO: 1673794 - RNA, 19 nt, Artificial Sequence
  Description of Artificial Sequence: Synthetic oligonucleotide
aagcuuagagggauaccaa

SEQ ID NO: 1673795 - RNA, 19 nt, Artificial Sequence
  Description of Artificial Sequence: Synthetic oligonucleotide
agcgagaucugaagcucgg

SEQ ID NO: 1673796 - RNA, 19 nt, Artificial Sequence
  Description of Artificial Sequence: Synthetic oligonucleotide
acgagcacagagcgcugag

SEQ ID NO: 1673797 - RNA, 19 nt, Artificial Sequence
  Description of Artificial Sequence: Synthetic oligonucleotide
gggccuugcauaguaaggc

SEQ ID NO: 1673798 - RNA, 19 nt, Artificial Sequence
  Description of Artificial Sequence: Synthetic oligonucleotide
agacaccgcgcgcuuccac

SEQ ID NO: 1673799 - RNA, 19 nt, Artificial Sequence
  Description of Artificial Sequence: Synthetic oligonucleotide
cagcuacuagagaaccaac

SEQ ID NO: 1673800 - RNA, 19 nt, Artificial Sequence
  Description of Artificial Sequence: Synthetic oligonucleotide
aaguccgagcuguggccga

SEQ ID NO: 1673801 - RNA, 19 nt, Artificial Sequence
  Description of Artificial Sequence: Synthetic oligonucleotide
ccaguaguccagauuggag

SEQ ID NO: 1673802 - RNA, 19 nt, Artificial Sequence
  Description of Artificial Sequence: Synthetic oligonucleotide
  modified_base (10)..(10): a, c, u, g, unknown or other
agcgcugagngaaacgcuu

SEQ ID NO: 1673803 - RNA, 19 nt, Artificial Sequence
  Description of Artificial Sequence: Synthetic oligonucleotide
gucacgagcacagagcgcu

SEQ ID NO: 1673804 - RNA, 19 nt, Artificial Sequence
  Description of Artificial Sequence: Synthetic oligonucleotide
aggccguacggcccggcuc

SEQ ID NO: 1673805 - RNA, 19 nt, Artificial Sequence
  Description of Artificial Sequence: Synthetic oligonucleotide
gcuugugcgagccacaccu

SEQ ID NO: 1673806 - RNA, 19 nt, Artificial Sequence
  Description of Artificial Sequence: Synthetic oligonucleotide
ccguguucacccaagcgag

SEQ ID NO: 1673807 - RNA, 19 nt, Artificial Sequence
  Description of Artificial Sequence: Synthetic oligonucleotide
acgcggcgggaucggagcc

SEQ ID NO: 1673808 - RNA, 19 nt, Artificial Sequence
  Description of Artificial Sequence: Synthetic oligonucleotide
ucagguccacgugaugccu

SEQ ID NO: 1673809 - RNA, 19 nt, Artificial Sequence
  Description of Artificial Sequence: Synthetic oligonucleotide
cagauacagggaugaggug

SEQ ID NO: 1673810 - RNA, 19 nt, Artificial Sequence
  Description of Artificial Sequence: Synthetic oligonucleotide
cccaagcgagaucugaagc

SEQ ID NO: 1673811 - RNA, 19 nt, Artificial Sequence
  Description of Artificial Sequence: Synthetic oligonucleotide
uuuccucauaggcgcccga

SEQ ID NO: 1673812 - RNA, 19 nt, Artificial Sequence
  Description of Artificial Sequence: Synthetic oligonucleotide
gguuccgccugcgaacucg

SEQ ID NO: 1673813 - RNA, 19 nt, Artificial Sequence
  Description of Artificial Sequence: Synthetic oligonucleotide
uggcuacccauuugguauc

SEQ ID NO: 1673814 - RNA, 19 nt, Artificial Sequence
  Description of Artificial Sequence: Synthetic oligonucleotide
cccacagucgacagaacac

SEQ ID NO: 1673815 - RNA, 19 nt, Artificial Sequence
  Description of Artificial Sequence: Synthetic oligonucleotide
gucgacagaacacaagcuu

SEQ ID NO: 1673816 - RNA, 19 nt, Artificial Sequence
  Description of Artificial Sequence: Synthetic oligonucleotide
cuugcauaguaaggcgcug

SEQ ID NO: 1673817 - RNA, 19 nt, Artificial Sequence
  Description of Artificial Sequence: Synthetic oligonucleotide
cuccgaagccuauugaggu

SEQ ID NO: 1673818 - RNA, 19 nt, Artificial Sequence
  Description of Artificial Sequence: Synthetic oligonucleotide
ucagcccgccucgaggagc

SEQ ID NO: 1673819 - RNA, 19 nt, Artificial Sequence
  Description of Artificial Sequence: Synthetic oligonucleotide
  modified_base (7)..(7): a, c, u, g, unknown or other
gcugagngaaacgcuugcc

SEQ ID NO: 1673820 - RNA, 19 nt, Artificial Sequence
  Description of Artificial Sequence: Synthetic oligonucleotide
ugggaauccucagcccgcc

SEQ ID NO: 1673821 - RNA, 19 nt, Artificial Sequence
  Description of Artificial Sequence: Synthetic oligonucleotide
accgcgcgcuuccaccaac

SEQ ID NO: 1673822 - RNA, 19 nt, Artificial Sequence
  Description of Artificial Sequence: Synthetic oligonucleotide
ggagacaccgcgcgcuucc

SEQ ID NO: 1673823 - RNA, 19 nt, Artificial Sequence
  Description of Artificial Sequence: Synthetic oligonucleotide
guggccgugcaugugcgcc

SEQ ID NO: 1673824 - RNA, 19 nt, Artificial Sequence
  Description of Artificial Sequence: Synthetic oligonucleotide
  modified_base (16)..(16): a, c, u, g, unknown or other
gcacagagcgcugagngaa

SEQ ID NO: 1673825 - RNA, 19 nt, Artificial Sequence
  Description of Artificial Sequence: Synthetic oligonucleotide
acgugaugccuuaugugga

SEQ ID NO: 1673826 - RNA, 19 nt, Artificial Sequence
  Description of Artificial Sequence: Synthetic oligonucleotide
cccuccgaagccuauugag

SEQ ID NO: 1673827 - RNA, 19 nt, Artificial Sequence
  Description of Artificial Sequence: Synthetic oligonucleotide
gagcgcugcgcgaagccgc

SEQ ID NO: 1673828 - RNA, 19 nt, Artificial Sequence
  Description of Artificial Sequence: Synthetic oligonucleotide
guagccagugcucgacaga

SEQ ID NO: 1673829 - RNA, 19 nt, Artificial Sequence
  Description of Artificial Sequence: Synthetic oligonucleotide
uuuagcccucagucacacu

SEQ ID NO: 1673830 - RNA, 19 nt, Artificial Sequence
  Description of Artificial Sequence: Synthetic oligonucleotide
ggccuuacaaaagauggaa

SEQ ID NO: 1673831 - RNA, 19 nt, Artificial Sequence
  Description of Artificial Sequence: Synthetic oligonucleotide
cacuccgaagauguccaug

SEQ ID NO: 1673832 - RNA, 19 nt, Artificial Sequence
  Description of Artificial Sequence: Synthetic oligonucleotide
gaugccaguaguccagauu

SEQ ID NO: 1673833 - RNA, 19 nt, Artificial Sequence
  Description of Artificial Sequence: Synthetic oligonucleotide
acaccgcgcgcuuccacca

SEQ ID NO: 1673834 - RNA, 19 nt, Artificial Sequence
  Description of Artificial Sequence: Synthetic oligonucleotide
gguuggaguaaggauuuuc

SEQ ID NO: 1673835 - RNA, 19 nt, Artificial Sequence
  Description of Artificial Sequence: Synthetic oligonucleotide
gaagccuauugaggucccc

SEQ ID NO: 1673836 - RNA, 19 nt, Artificial Sequence
  Description of Artificial Sequence: Synthetic oligonucleotide
ucaacuccuccccggucuu

SEQ ID NO: 1673837 - RNA, 19 nt, Artificial Sequence
  Description of Artificial Sequence: Synthetic oligonucleotide
uguggccgugcaugugcgc

SEQ ID NO: 1673838 - RNA, 19 nt, Artificial Sequence
  Description of Artificial Sequence: Synthetic oligonucleotide
cacuggugccgggucagcg

SEQ ID NO: 1673839 - RNA, 19 nt, Artificial Sequence
  Description of Artificial Sequence: Synthetic oligonucleotide
gggaucggagccaaagcug

SEQ ID NO: 1673840 - RNA, 19 nt, Artificial Sequence
  Description of Artificial Sequence: Synthetic oligonucleotide
cacugugcaagggccuugc

SEQ ID NO: 1673841 - RNA, 19 nt, Artificial Sequence
  Description of Artificial Sequence: Synthetic oligonucleotide
aggccuuacaaaagaugga

SEQ ID NO: 1673842 - RNA, 19 nt, Artificial Sequence
  Description of Artificial Sequence: Synthetic oligonucleotide
caccaaccucacaggacac

SEQ ID NO: 1673843 - RNA, 19 nt, Artificial Sequence
  Description of Artificial Sequence: Synthetic oligonucleotide
cucggcgugcgcccacugg

SEQ ID NO: 1673844 - RNA, 19 nt, Artificial Sequence
  Description of Artificial Sequence: Synthetic oligonucleotide
gcugguuccgccugcgaac

SEQ ID NO: 1673845 - RNA, 19 nt, Artificial Sequence
  Description of Artificial Sequence: Synthetic oligonucleotide
cacacuggcccagaauuca

SEQ ID NO: 1673846 - RNA, 19 nt, Artificial Sequence
  Description of Artificial Sequence: Synthetic oligonucleotide
cuccccugggaucuaguca

SEQ ID NO: 1673847 - RNA, 19 nt, Artificial Sequence
  Description of Artificial Sequence: Synthetic oligonucleotide
ugcgcgaagccgcggccac

SEQ ID NO: 1673848 - RNA, 19 nt, Artificial Sequence
  Description of Artificial Sequence: Synthetic oligonucleotide
gagaugcgcgcgccggcug

SEQ ID NO: 1673849 - RNA, 19 nt, Artificial Sequence
  Description of Artificial Sequence: Synthetic oligonucleotide
aucuaggucuaaaggggaa

SEQ ID NO: 1673850 - RNA, 19 nt, Artificial Sequence
  Description of Artificial Sequence: Synthetic oligonucleotide
cacagucgacagaacacaa

SEQ ID NO: 1673851 - RNA, 19 nt, Artificial Sequence
  Description of Artificial Sequence: Synthetic oligonucleotide
gugugcgcgcgcccgugcg

SEQ ID NO: 1673852 - RNA, 19 nt, Artificial Sequence
  Description of Artificial Sequence: Synthetic oligonucleotide
guguggccgugcaugugcg

SEQ ID NO: 1673853 - RNA, 19 nt, Artificial Sequence
  Description of Artificial Sequence: Synthetic oligonucleotide
agaugcgcgcgccggcuga

SEQ ID NO: 1673854 - RNA, 19 nt, Artificial Sequence
  Description of Artificial Sequence: Synthetic oligonucleotide
gcacccaagauugggaauc

SEQ ID NO: 1673855 - RNA, 19 nt, Artificial Sequence
  Description of Artificial Sequence: Synthetic oligonucleotide
gcccguguucacccaagcg

SEQ ID NO: 1673856 - RNA, 19 nt, Artificial Sequence
  Description of Artificial Sequence: Synthetic oligonucleotide
guaaggcgcugugagcuca

SEQ ID NO: 1673857 - RNA, 19 nt, Artificial Sequence
  Description of Artificial Sequence: Synthetic oligonucleotide
gugagaugcgcgcgccggc

SEQ ID NO: 1673858 - RNA, 19 nt, Artificial Sequence
  Description of Artificial Sequence: Synthetic oligonucleotide
gccuugcauaguaaggcgc

SEQ ID NO: 1673859 - RNA, 19 nt, Artificial Sequence
  Description of Artificial Sequence: Synthetic oligonucleotide
gacccggaggccguacggc

SEQ ID NO: 1673860 - RNA, 19 nt, Artificial Sequence
  Description of Artificial Sequence: Synthetic oligonucleotide
ccacgugaugccuuaugug

SEQ ID NO: 1673861 - RNA, 19 nt, Artificial Sequence
  Description of Artificial Sequence: Synthetic oligonucleotide
auaggcgcccgagggcccg

SEQ ID NO: 1673862 - RNA, 19 nt, Artificial Sequence
  Description of Artificial Sequence: Synthetic oligonucleotide
caacuccaucccuccgaag

SEQ ID NO: 1673863 - RNA, 19 nt, Artificial Sequence
  Description of Artificial Sequence: Synthetic oligonucleotide
ggccguacggcccggcucc

SEQ ID NO: 1673864 - RNA, 19 nt, Artificial Sequence
  Description of Artificial Sequence: Synthetic oligonucleotide
cccguguucacccaagcga

SEQ ID NO: 1673865 - RNA, 19 nt, Artificial Sequence
  Description of Artificial Sequence: Synthetic oligonucleotide
gcagcuacuagagaaccaa

SEQ ID NO: 1673866 - RNA, 19 nt, Artificial Sequence
  Description of Artificial Sequence: Synthetic oligonucleotide
cacgccgcacacgaacggc

SEQ ID NO: 1673867 - RNA, 19 nt, Artificial Sequence
  Description of Artificial Sequence: Synthetic oligonucleotide
ggacccggaggccguacgg

SEQ ID NO: 1673868 - RNA, 19 nt, Artificial Sequence
  Description of Artificial Sequence: Synthetic oligonucleotide
gccuauugagguccccgcc

SEQ ID NO: 1673869 - RNA, 19 nt, Artificial Sequence
  Description of Artificial Sequence: Synthetic oligonucleotide
agaccuguguuuagggguu

SEQ ID NO: 1673870 - RNA, 19 nt, Artificial Sequence
  Description of Artificial Sequence: Synthetic oligonucleotide
ucagggugucggcccgugu

SEQ ID NO: 1673871 - RNA, 19 nt, Artificial Sequence
  Description of Artificial Sequence: Synthetic oligonucleotide
auacagggaugaggugcuc

SEQ ID NO: 1673872 - RNA, 19 nt, Artificial Sequence
  Description of Artificial Sequence: Synthetic oligonucleotide
cacucgggacaggggaagg

SEQ ID NO: 1673873 - RNA, 19 nt, Artificial Sequence
  Description of Artificial Sequence: Synthetic oligonucleotide
gccgcuugaaguccgagcu

SEQ ID NO: 1673874 - RNA, 19 nt, Artificial Sequence
  Description of Artificial Sequence: Synthetic oligonucleotide
cuggcccagaauucaugga

SEQ ID NO: 1673875 - RNA, 19 nt, Artificial Sequence
  Description of Artificial Sequence: Synthetic oligonucleotide
ucggcccguguucacccaa

SEQ ID NO: 1673876 - RNA, 19 nt, Artificial Sequence
  Description of Artificial Sequence: Synthetic oligonucleotide
cgaguagcguuccggaccc

SEQ ID NO: 1673877 - RNA, 19 nt, Artificial Sequence
  Description of Artificial Sequence: Synthetic oligonucleotide
cacccaagcgagaucugaa

SEQ ID NO: 1673878 - RNA, 19 nt, Artificial Sequence
  Description of Artificial Sequence: Synthetic oligonucleotide
ugcaagggccuugcauagu

SEQ ID NO: 1673879 - RNA, 19 nt, Artificial Sequence
  Description of Artificial Sequence: Synthetic oligonucleotide
ggcgaacgcggcgggaucg

SEQ ID NO: 1673880 - RNA, 19 nt, Artificial Sequence
  Description of Artificial Sequence: Synthetic oligonucleotide
ggagcgcugcgcgaagccg

SEQ ID NO: 1673881 - RNA, 19 nt, Artificial Sequence
  Description of Artificial Sequence: Synthetic oligonucleotide
uuccggacccggaggccgu

SEQ ID NO: 1673882 - RNA, 19 nt, Artificial Sequence
  Description of Artificial Sequence: Synthetic oligonucleotide
guacggcccggcuccccgg

SEQ ID NO: 1673883 - RNA, 19 nt, Artificial Sequence
  Description of Artificial Sequence: Synthetic oligonucleotide
aucggagccaaagcugguu

SEQ ID NO: 1673884 - RNA, 19 nt, Artificial Sequence
  Description of Artificial Sequence: Synthetic oligonucleotide
aucuggcuacccauuuggu

SEQ ID NO: 1673885 - RNA, 19 nt, Artificial Sequence
  Description of Artificial Sequence: Synthetic oligonucleotide
gcgggaucggagccaaagc

SEQ ID NO: 1673886 - RNA, 19 nt, Artificial Sequence
  Description of Artificial Sequence: Synthetic oligonucleotide
gcgagguuggagcgcugcg

SEQ ID NO: 1673887 - RNA, 19 nt, Artificial Sequence
  Description of Artificial Sequence: Synthetic oligonucleotide
gugucggcccguguucacc

SEQ ID NO: 1673888 - RNA, 19 nt, Artificial Sequence
  Description of Artificial Sequence: Synthetic oligonucleotide
ccgguguuuggcgagguug

SEQ ID NO: 1673889 - RNA, 19 nt, Artificial Sequence
  Description of Artificial Sequence: Synthetic oligonucleotide
gggcgauagggcccacagg

SEQ ID NO: 1673890 - RNA, 19 nt, Artificial Sequence
  Description of Artificial Sequence: Synthetic oligonucleotide
gcuuagagggauaccaaua

SEQ ID NO: 1673891 - RNA, 19 nt, Artificial Sequence
  Description of Artificial Sequence: Synthetic oligonucleotide
gcaagggccuugcauagua

SEQ ID NO: 1673892 - RNA, 19 nt, Artificial Sequence
  Description of Artificial Sequence: Synthetic oligonucleotide
gccagugcucgacagaccu

SEQ ID NO: 1673893 - RNA, 19 nt, Artificial Sequence
  Description of Artificial Sequence: Synthetic oligonucleotide
ugcgcccacuggugccggg

SEQ ID NO: 1673894 - RNA, 19 nt, Artificial Sequence
  Description of Artificial Sequence: Synthetic oligonucleotide
cauuugguaucuugcuuuu

SEQ ID NO: 1673895 - RNA, 19 nt, Artificial Sequence
  Description of Artificial Sequence: Synthetic oligonucleotide
gcgaacucgaguagcguuc

SEQ ID NO: 1673896 - RNA, 19 nt, Artificial Sequence
  Description of Artificial Sequence: Synthetic oligonucleotide
caagggccuugcauaguaa

SEQ ID NO: 1673897 - RNA, 19 nt, Artificial Sequence
  Description of Artificial Sequence: Synthetic oligonucleotide
ggcgugcgcccacuggugc

SEQ ID NO: 1673898 - RNA, 19 nt, Artificial Sequence
  Description of Artificial Sequence: Synthetic oligonucleotide
gcacucgccgcacgcguag

SEQ ID NO: 1673899 - RNA, 19 nt, Artificial Sequence
  Description of Artificial Sequence: Synthetic oligonucleotide
aucagggugucggcccgug

SEQ ID NO: 1673900 - RNA, 19 nt, Artificial Sequence
  Description of Artificial Sequence: Synthetic oligonucleotide
gggaaugcagcuggagauc

SEQ ID NO: 1673901 - RNA, 19 nt, Artificial Sequence
  Description of Artificial Sequence: Synthetic oligonucleotide
ccaagcgagaucugaagcu

SEQ ID NO: 1673902 - RNA, 19 nt, Artificial Sequence
  Description of Artificial Sequence: Synthetic oligonucleotide
  modified_base (2)..(2): a, c, u, g, unknown or other
gngaaacgcuugccgcacu

SEQ ID NO: 1673903 - RNA, 19 nt, Artificial Sequence
  Description of Artificial Sequence: Synthetic oligonucleotide
caggcacuccgaagauguc

SEQ ID NO: 1673904 - RNA, 19 nt, Artificial Sequence
  Description of Artificial Sequence: Synthetic oligonucleotide
gccgcgccgguguuuggcg

SEQ ID NO: 1673905 - RNA, 19 nt, Artificial Sequence
  Description of Artificial Sequence: Synthetic oligonucleotide
gagaaccaacaagcuuaga

SEQ ID NO: 1673906 - RNA, 19 nt, Artificial Sequence
  Description of Artificial Sequence: Synthetic oligonucleotide
gcauaguaaggcgcuguga

SEQ ID NO: 1673907 - RNA, 19 nt, Artificial Sequence
  Description of Artificial Sequence: Synthetic oligonucleotide
ccauuugguaucuugcuuu

SEQ ID NO: 1673908 - RNA, 19 nt, Artificial Sequence
  Description of Artificial Sequence: Synthetic oligonucleotide
cagugcucgacagaccugu

SEQ ID NO: 1673909 - RNA, 19 nt, Artificial Sequence
  Description of Artificial Sequence: Synthetic oligonucleotide
caaaggaaucuaggucuaa

SEQ ID NO: 1673910 - RNA, 19 nt, Artificial Sequence
  Description of Artificial Sequence: Synthetic oligonucleotide
acgccgcacacgaacggcu

SEQ ID NO: 1673911 - RNA, 19 nt, Artificial Sequence
  Description of Artificial Sequence: Synthetic oligonucleotide
  modified_base (8)..(8): a, c, u, g, unknown or other
cgcugagngaaacgcuugc

SEQ ID NO: 1673912 - RNA, 19 nt, Artificial Sequence
  Description of Artificial Sequence: Synthetic oligonucleotide
ggcuugugcgagccacacc

SEQ ID NO: 1673913 - RNA, 19 nt, Artificial Sequence
  Description of Artificial Sequence: Synthetic oligonucleotide
gccugcgaacucgaguagc

SEQ ID NO: 1673914 - RNA, 19 nt, Artificial Sequence
  Description of Artificial Sequence: Synthetic oligonucleotide
gugcucgacagaccugugu

SEQ ID NO: 1673915 - RNA, 19 nt, Artificial Sequence
  Description of Artificial Sequence: Synthetic oligonucleotide
gaguagcguuccggacccg

SEQ ID NO: 1673916 - RNA, 19 nt, Artificial Sequence
  Description of Artificial Sequence: Synthetic oligonucleotide
gccaguaguccagauugga

SEQ ID NO: 1673917 - RNA, 19 nt, Artificial Sequence
  Description of Artificial Sequence: Synthetic oligonucleotide
gcuggugcgucacgagcac

SEQ ID NO: 1673918 - RNA, 19 nt, Artificial Sequence
  Description of Artificial Sequence: Synthetic oligonucleotide
guagcguuccggacccgga

SEQ ID NO: 1673919 - RNA, 19 nt, Artificial Sequence
  Description of Artificial Sequence: Synthetic oligonucleotide
cgacagaccuguguuuagg

SEQ ID NO: 1673920 - RNA, 19 nt, Artificial Sequence
  Description of Artificial Sequence: Synthetic oligonucleotide
ggcgagguuggagcgcugc

SEQ ID NO: 1673921 - RNA, 19 nt, Artificial Sequence
  Description of Artificial Sequence: Synthetic oligonucleotide
guguucacccaagcgagau

SEQ ID NO: 1673922 - RNA, 19 nt, Artificial Sequence
  Description of Artificial Sequence: Synthetic oligonucleotide
ggagcgggagacaccgcgc

SEQ ID NO: 1673923 - RNA, 19 nt, Artificial Sequence
  Description of Artificial Sequence: Synthetic oligonucleotide
ggcuuccaacuccccuggg

SEQ ID NO: 1673924 - RNA, 19 nt, Artificial Sequence
  Description of Artificial Sequence: Synthetic oligonucleotide
ccacagucgacagaacaca

SEQ ID NO: 1673925 - RNA, 19 nt, Artificial Sequence
  Description of Artificial Sequence: Synthetic oligonucleotide
ugguuccgccugcgaacuc

SEQ ID NO: 1673926 - RNA, 19 nt, Artificial Sequence
  Description of Artificial Sequence: Synthetic oligonucleotide
  modified_base (9)..(9): a, c, u, g, unknown or other
gcgcugagngaaacgcuug

SEQ ID NO: 1673927 - RNA, 19 nt, Artificial Sequence
  Description of Artificial Sequence: Synthetic oligonucleotide
  modified_base (15)..(15): a, c, u, g, unknown or other
cacagagcgcugagngaaa

SEQ ID NO: 1673928 - RNA, 19 nt, Artificial Sequence
  Description of Artificial Sequence: Synthetic oligonucleotide
agugcucgacagaccugug

SEQ ID NO: 1673929 - RNA, 19 nt, Artificial Sequence
  Description of Artificial Sequence: Synthetic oligonucleotide
ugcgugcgcuggugcguca

SEQ ID NO: 1673930 - RNA, 19 nt, Artificial Sequence
  Description of Artificial Sequence: Synthetic oligonucleotide
gugcgccgugagaugcgcg

SEQ ID NO: 1673931 - RNA, 19 nt, Artificial Sequence
  Description of Artificial Sequence: Synthetic oligonucleotide
cgugagaugcgcgcgccgg

SEQ ID NO: 1673932 - RNA, 19 nt, Artificial Sequence
  Description of Artificial Sequence: Synthetic oligonucleotide
uggcgagguuggagcgcug

SEQ ID NO: 1673933 - RNA, 19 nt, Artificial Sequence
  Description of Artificial Sequence: Synthetic oligonucleotide
ccuugcauaguaaggcgcu

SEQ ID NO: 1673934 - RNA, 19 nt, Artificial Sequence
  Description of Artificial Sequence: Synthetic oligonucleotide
ucugaagcucggggcgaua

SEQ ID NO: 1673935 - RNA, 19 nt, Artificial Sequence
  Description of Artificial Sequence: Synthetic oligonucleotide
cgaacucgaguagcguucc

SEQ ID NO: 1673936 - RNA, 19 nt, Artificial Sequence
  Description of Artificial Sequence: Synthetic oligonucleotide
cccgugcgccgugagaugc

SEQ ID NO: 1673937 - RNA, 19 nt, Artificial Sequence
  Description of Artificial Sequence: Synthetic oligonucleotide
ccgccugcgaacucgagua

SEQ ID NO: 1673938 - RNA, 19 nt, Artificial Sequence
  Description of Artificial Sequence: Synthetic oligonucleotide
ccaauaacaaacccaccuu
